United States Patent Application Publication US 2015/0141320 A1 - sequence listing, part 19

SEQ ID NO: 605368 - DNA, 15 bp, Homo sapiens
agctatttgtcctaa

SEQ ID NO: 605369 - DNA, 15 bp, Homo sapiens
gctatttgtcctaat

SEQ ID NO: 605370 - DNA, 15 bp, Homo sapiens
ctatttgtcctaatg

SEQ ID NO: 605371 - DNA, 15 bp, Homo sapiens
tatttgtcctaatgc

SEQ ID NO: 605372 - DNA, 15 bp, Homo sapiens
atttgtcctaatgct

SEQ ID NO: 605373 - DNA, 15 bp, Homo sapiens
tttgtcctaatgctc

SEQ ID NO: 605374 - DNA, 15 bp, Homo sapiens
ttgtcctaatgctct

SEQ ID NO: 605375 - DNA, 15 bp, Homo sapiens
tgtcctaatgctctc

SEQ ID NO: 605376 - DNA, 15 bp, Homo sapiens
gtcctaatgctctcc

SEQ ID NO: 605377 - DNA, 15 bp, Homo sapiens
tcctaatgctctccc

SEQ ID NO: 605378 - DNA, 15 bp, Homo sapiens
cctaatgctctccct

SEQ ID NO: 605379 - DNA, 15 bp, Homo sapiens
ctaatgctctccctc

SEQ ID NO: 605380 - DNA, 15 bp, Homo sapiens
taatgctctccctcg

SEQ ID NO: 605381 - DNA, 15 bp, Homo sapiens
aatgctctccctcgc

SEQ ID NO: 605382 - DNA, 15 bp, Homo sapiens
atgctctccctcgcc

SEQ ID NO: 605383 - DNA, 15 bp, Homo sapiens
tgctctccctcgcct

SEQ ID NO: 605384 - DNA, 15 bp, Homo sapiens
gctctccctcgcctc

SEQ ID NO: 605385 - DNA, 15 bp, Homo sapiens
ctctccctcgcctcg

SEQ ID NO: 605386 - DNA, 15 bp, Homo sapiens
tctccctcgcctcgc

SEQ ID NO: 605387 - DNA, 15 bp, Homo sapiens
ctccctcgcctcgcc

SEQ ID NO: 605388 - DNA, 15 bp, Homo sapiens
tccctcgcctcgccc

SEQ ID NO: 605389 - DNA, 15 bp, Homo sapiens
ccctcgcctcgcccc

SEQ ID NO: 605390 - DNA, 15 bp, Homo sapiens
cctcgcctcgcccct

SEQ ID NO: 605391 - DNA, 15 bp, Homo sapiens
ctcgcctcgccccta

SEQ ID NO: 605392 - DNA, 15 bp, Homo sapiens
tcgcctcgcccctac

SEQ ID NO: 605393 - DNA, 15 bp, Homo sapiens
cgcctcgcccctacc

SEQ ID NO: 605394 - DNA, 15 bp, Homo sapiens
gcctcgcccctaccc

SEQ ID NO: 605395 - DNA, 15 bp, Homo sapiens
cctcgcccctacccc

SEQ ID NO: 605396 - DNA, 15 bp, Homo sapiens
ctcgcccctacccca

SEQ ID NO: 605397 - DNA, 15 bp, Homo sapiens
tcgcccctaccccac

SEQ ID NO: 605398 - DNA, 15 bp, Homo sapiens
cgcccctaccccacc

SEQ ID NO: 605399 - DNA, 15 bp, Homo sapiens
gcccctaccccaccc

SEQ ID NO: 605400 - DNA, 15 bp, Homo sapiens
cccctaccccacccc

SEQ ID NO: 605401 - DNA, 15 bp, Homo sapiens
ccctaccccacccca

SEQ ID NO: 605402 - DNA, 15 bp, Homo sapiens
cctaccccaccccaa

SEQ ID NO: 605403 - DNA, 15 bp, Homo sapiens
ctaccccaccccaac

SEQ ID NO: 605404 - DNA, 15 bp, Homo sapiens
taccccaccccaaca

SEQ ID NO: 605405 - DNA, 15 bp, Homo sapiens
accccaccccaacag

SEQ ID NO: 605406 - DNA, 15 bp, Homo sapiens
ccccaccccaacagg

SEQ ID NO: 605407 - DNA, 15 bp, Homo sapiens
cccaccccaacaggc

SEQ ID NO: 605408 - DNA, 15 bp, Homo sapiens
ccaccccaacaggct

SEQ ID NO: 605409 - DNA, 15 bp, Homo sapiens
caccccaacaggctc

SEQ ID NO: 605410 - DNA, 15 bp, Homo sapiens
accccaacaggctcc

SEQ ID NO: 605411 - DNA, 15 bp, Homo sapiens
ccccaacaggctccg

SEQ ID NO: 605412 - DNA, 15 bp, Homo sapiens
cccaacaggctccgg

SEQ ID NO: 605413 - DNA, 15 bp, Homo sapiens
ccaacaggctccggt

SEQ ID NO: 605414 - DNA, 15 bp, Homo sapiens
caacaggctccggtg

SEQ ID NO: 605415 - DNA, 15 bp, Homo sapiens
aacaggctccggtgt

SEQ ID NO: 605416 - DNA, 15 bp, Homo sapiens
acaggctccggtgtg

SEQ ID NO: 605417 - DNA, 15 bp, Homo sapiens
caggctccggtgtgt

SEQ ID NO: 605418 - DNA, 15 bp, Homo sapiens
aggctccggtgtgtg

SEQ ID NO: 605419 - DNA, 15 bp, Homo sapiens
ggctccggtgtgtga

SEQ ID NO: 605420 - DNA, 15 bp, Homo sapiens
gctccggtgtgtgat

SEQ ID NO: 605421 - DNA, 15 bp, Homo sapiens
ctccggtgtgtgatg

SEQ ID NO: 605422 - DNA, 15 bp, Homo sapiens
tccggtgtgtgatgt

SEQ ID NO: 605423 - DNA, 15 bp, Homo sapiens
ccggtgtgtgatgtt

SEQ ID NO: 605424 - DNA, 15 bp, Homo sapiens
cggtgtgtgatgttc

SEQ ID NO: 605425 - DNA, 15 bp, Homo sapiens
ggtgtgtgatgttcc

SEQ ID NO: 605426 - DNA, 15 bp, Homo sapiens
gtgtgtgatgttccc

SEQ ID NO: 605427 - DNA, 15 bp, Homo sapiens
tgtgtgatgttcccc

SEQ ID NO: 605428 - DNA, 15 bp, Homo sapiens
gtgtgatgttcccct

SEQ ID NO: 605429 - DNA, 15 bp, Homo sapiens
tgtgatgttcccctc

SEQ ID NO: 605430 - DNA, 15 bp, Homo sapiens
gtgatgttcccctcc

SEQ ID NO: 605431 - DNA, 15 bp, Homo sapiens
tgatgttcccctccc

SEQ ID NO: 605432 - DNA, 15 bp, Homo sapiens
gatgttcccctccct

SEQ ID NO: 605433 - DNA, 15 bp, Homo sapiens
atgttcccctccctg

SEQ ID NO: 605434 - DNA, 15 bp, Homo sapiens
tgttcccctccctgt

SEQ ID NO: 605435 - DNA, 15 bp, Homo sapiens
gttcccctccctgtg

SEQ ID NO: 605436 - DNA, 15 bp, Homo sapiens
ttcccctccctgtgt

SEQ ID NO: 605437 - DNA, 15 bp, Homo sapiens
tcccctccctgtgtc

SEQ ID NO: 605438 - DNA, 15 bp, Homo sapiens
cccctccctgtgtcc

SEQ ID NO: 605439 - DNA, 15 bp, Homo sapiens
ccctccctgtgtcca

SEQ ID NO: 605440 - DNA, 15 bp, Homo sapiens
cctccctgtgtccat

SEQ ID NO: 605441 - DNA, 15 bp, Homo sapiens
ctccctgtgtccatg

SEQ ID NO: 605442 - DNA, 15 bp, Homo sapiens
tccctgtgtccatgt

SEQ ID NO: 605443 - DNA, 15 bp, Homo sapiens
ccctgtgtccatgtg

SEQ ID NO: 605444 - DNA, 15 bp, Homo sapiens
cctgtgtccatgtgt

SEQ ID NO: 605445 - DNA, 15 bp, Homo sapiens
ctgtgtccatgtgtt

SEQ ID NO: 605446 - DNA, 15 bp, Homo sapiens
tgtgtccatgtgttc

SEQ ID NO: 605447 - DNA, 15 bp, Homo sapiens
gtgtccatgtgttct

SEQ ID NO: 605448 - DNA, 15 bp, Homo sapiens
tgtccatgtgttctc

SEQ ID NO: 605449 - DNA, 15 bp, Homo sapiens
gtccatgtgttctca

SEQ ID NO: 605450 - DNA, 15 bp, Homo sapiens
tccatgtgttctcat

SEQ ID NO: 605451 - DNA, 15 bp, Homo sapiens
ccatgtgttctcatt

SEQ ID NO: 605452 - DNA, 15 bp, Homo sapiens
catgtgttctcattg

SEQ ID NO: 605453 - DNA, 15 bp, Homo sapiens
atgtgttctcattgt

SEQ ID NO: 605454 - DNA, 15 bp, Homo sapiens
tgtgttctcattgtt

SEQ ID NO: 605455 - DNA, 15 bp, Homo sapiens
gtgttctcattgttc

SEQ ID NO: 605456 - DNA, 15 bp, Homo sapiens
tgttctcattgttca

SEQ ID NO: 605457 - DNA, 15 bp, Homo sapiens
gttctcattgttcag

SEQ ID NO: 605458 - DNA, 15 bp, Homo sapiens
ttctcattgttcagc

SEQ ID NO: 605459 - DNA, 15 bp, Homo sapiens
tctcattgttcagct

SEQ ID NO: 605460 - DNA, 15 bp, Homo sapiens
ctcattgttcagctt

SEQ ID NO: 605461 - DNA, 15 bp, Homo sapiens
tcattgttcagcttc

SEQ ID NO: 605462 - DNA, 15 bp, Homo sapiens
cattgttcagcttcc

SEQ ID NO: 605463 - DNA, 15 bp, Homo sapiens
attgttcagcttcca

SEQ ID NO: 605464 - DNA, 15 bp, Homo sapiens
ttgttcagcttccac

SEQ ID NO: 605465 - DNA, 15 bp, Homo sapiens
tgttcagcttccact

SEQ ID NO: 605466 - DNA, 15 bp, Homo sapiens
gttcagcttccactt

SEQ ID NO: 605467 - DNA, 15 bp, Homo sapiens
ttcagcttccactta

SEQ ID NO: 605468 - DNA, 15 bp, Homo sapiens
tcagcttccacttac

SEQ ID NO: 605469 - DNA, 15 bp, Homo sapiens
cagcttccacttaca

SEQ ID NO: 605470 - DNA, 15 bp, Homo sapiens
agcttccacttacaa

SEQ ID NO: 605471 - DNA, 15 bp, Homo sapiens
gcttccacttacaag

SEQ ID NO: 605472 - DNA, 15 bp, Homo sapiens
cttccacttacaagt

SEQ ID NO: 605473 - DNA, 15 bp, Homo sapiens
ttccacttacaagtg

SEQ ID NO: 605474 - DNA, 15 bp, Homo sapiens
tccacttacaagtga

SEQ ID NO: 605475 - DNA, 15 bp, Homo sapiens
ccacttacaagtgag

SEQ ID NO: 605476 - DNA, 15 bp, Homo sapiens
cacttacaagtgaga

SEQ ID NO: 605477 - DNA, 15 bp, Homo sapiens
acttacaagtgagaa

SEQ ID NO: 605478 - DNA, 15 bp, Homo sapiens
cttacaagtgagaac

SEQ ID NO: 605479 - DNA, 15 bp, Homo sapiens
ttacaagtgagaaca

SEQ ID NO: 605480 - DNA, 15 bp, Homo sapiens
tacaagtgagaacat

SEQ ID NO: 605481 - DNA, 15 bp, Homo sapiens
acaagtgagaacatg

SEQ ID NO: 605482 - DNA, 15 bp, Homo sapiens
caagtgagaacatgt

SEQ ID NO: 605483 - DNA, 15 bp, Homo sapiens
aagtgagaacatgtg

SEQ ID NO: 605484 - DNA, 15 bp, Homo sapiens
agtgagaacatgtgg

SEQ ID NO: 605485 - DNA, 15 bp, Homo sapiens
gtgagaacatgtggt

SEQ ID NO: 605486 - DNA, 15 bp, Homo sapiens
tgagaacatgtggtg

SEQ ID NO: 605487 - DNA, 15 bp, Homo sapiens
gagaacatgtggtgt

SEQ ID NO: 605488 - DNA, 15 bp, Homo sapiens
agaacatgtggtgtt

SEQ ID NO: 605489 - DNA, 15 bp, Homo sapiens
gaacatgtggtgttt

SEQ ID NO: 605490 - DNA, 15 bp, Homo sapiens
aacatgtggtgttta

SEQ ID NO: 605491 - DNA, 15 bp, Homo sapiens
acatgtggtgtttag

SEQ ID NO: 605492 - DNA, 15 bp, Homo sapiens
catgtggtgtttagt

SEQ ID NO: 605493 - DNA, 15 bp, Homo sapiens
atgtggtgtttagtt

SEQ ID NO: 605494 - DNA, 15 bp, Homo sapiens
tgtggtgtttagttt

SEQ ID NO: 605495 - DNA, 15 bp, Homo sapiens
gtggtgtttagtttt

SEQ ID NO: 605496 - DNA, 15 bp, Homo sapiens
tggtgtttagttttc

SEQ ID NO: 605497 - DNA, 15 bp, Homo sapiens
ggtgtttagttttct

SEQ ID NO: 605498 - DNA, 15 bp, Homo sapiens
gtgtttagttttctg

SEQ ID NO: 605499 - DNA, 15 bp, Homo sapiens
tgtttagttttctgt

SEQ ID NO: 605500 - DNA, 15 bp, Homo sapiens
gtttagttttctgtt

SEQ ID NO: 605501 - DNA, 15 bp, Homo sapiens
tttagttttctgttc

SEQ ID NO: 605502 - DNA, 15 bp, Homo sapiens
ttagttttctgttcc

SEQ ID NO: 605503 - DNA, 15 bp, Homo sapiens
tagttttctgttcct

SEQ ID NO: 605504 - DNA, 15 bp, Homo sapiens
agttttctgttcctg

SEQ ID NO: 605505 - DNA, 15 bp, Homo sapiens
gttttctgttcctgt

SEQ ID NO: 605506 - DNA, 15 bp, Homo sapiens
ttttctgttcctgtg

SEQ ID NO: 605507 - DNA, 15 bp, Homo sapiens
tttctgttcctgtgt

SEQ ID NO: 605508 - DNA, 15 bp, Homo sapiens
ttctgttcctgtgtt

SEQ ID NO: 605509 - DNA, 15 bp, Homo sapiens
tctgttcctgtgtta

SEQ ID NO: 605510 - DNA, 15 bp, Homo sapiens
ctgttcctgtgttag

SEQ ID NO: 605511 - DNA, 15 bp, Homo sapiens
tgttcctgtgttagt

SEQ ID NO: 605512 - DNA, 15 bp, Homo sapiens
gttcctgtgttagtt

SEQ ID NO: 605513 - DNA, 15 bp, Homo sapiens
ttcctgtgttagttt

SEQ ID NO: 605514 - DNA, 15 bp, Homo sapiens
tcctgtgttagtttg

SEQ ID NO: 605515 - DNA, 15 bp, Homo sapiens
cctgtgttagtttgc

SEQ ID NO: 605516 - DNA, 15 bp, Homo sapiens
ctgtgttagtttgct

SEQ ID NO: 605517 - DNA, 15 bp, Homo sapiens
tgtgttagtttgctg

SEQ ID NO: 605518 - DNA, 15 bp, Homo sapiens
gtgttagtttgctga

SEQ ID NO: 605519 - DNA, 15 bp, Homo sapiens
tgttagtttgctgag

SEQ ID NO: 605520 - DNA, 15 bp, Homo sapiens
gttagtttgctgagg

SEQ ID NO: 605521 - DNA, 15 bp, Homo sapiens
ttagtttgctgagga

SEQ ID NO: 605522 - DNA, 15 bp, Homo sapiens
tagtttgctgaggat

SEQ ID NO: 605523 - DNA, 15 bp, Homo sapiens
agtttgctgaggatg

SEQ ID NO: 605524 - DNA, 15 bp, Homo sapiens
gtttgctgaggatga

SEQ ID NO: 605525 - DNA, 15 bp, Homo sapiens
tttgctgaggatgat

SEQ ID NO: 605526 - DNA, 15 bp, Homo sapiens
ttgctgaggatgatg

SEQ ID NO: 605527 - DNA, 15 bp, Homo sapiens
tgctgaggatgatgg

SEQ ID NO: 605528 - DNA, 15 bp, Homo sapiens
gctgaggatgatggc

SEQ ID NO: 605529 - DNA, 15 bp, Homo sapiens
ctgaggatgatggct

SEQ ID NO: 605530 - DNA, 15 bp, Homo sapiens
tgaggatgatggctt

SEQ ID NO: 605531 - DNA, 15 bp, Homo sapiens
gaggatgatggcttc

SEQ ID NO: 605532 - DNA, 15 bp, Homo sapiens
aggatgatggcttcc

SEQ ID NO: 605533 - DNA, 15 bp, Homo sapiens
ggatgatggcttcca

SEQ ID NO: 605534 - DNA, 15 bp, Homo sapiens
gatgatggcttccag

SEQ ID NO: 605535 - DNA, 15 bp, Homo sapiens
atgatggcttccagc

SEQ ID NO: 605536 - DNA, 15 bp, Homo sapiens
tgatggcttccagct

SEQ ID NO: 605537 - DNA, 15 bp, Homo sapiens
gatggcttccagctt

SEQ ID NO: 605538 - DNA, 15 bp, Homo sapiens
atggcttccagcttc

SEQ ID NO: 605539 - DNA, 15 bp, Homo sapiens
tggcttccagcttct

SEQ ID NO: 605540 - DNA, 15 bp, Homo sapiens
ggcttccagcttctt

SEQ ID NO: 605541 - DNA, 15 bp, Homo sapiens
gcttccagcttcttc

SEQ ID NO: 605542 - DNA, 15 bp, Homo sapiens
cttccagcttcttcc

SEQ ID NO: 605543 - DNA, 15 bp, Homo sapiens
ttccagcttcttcca

SEQ ID NO: 605544 - DNA, 15 bp, Homo sapiens
tccagcttcttccat

SEQ ID NO: 605545 - DNA, 15 bp, Homo sapiens
ccagcttcttccatg

SEQ ID NO: 605546 - DNA, 15 bp, Homo sapiens
cagcttcttccatgt

SEQ ID NO: 605547 - DNA, 15 bp, Homo sapiens
agcttcttccatgtc

SEQ ID NO: 605548 - DNA, 15 bp, Homo sapiens
gcttcttccatgtcc

SEQ ID NO: 605549 - DNA, 15 bp, Homo sapiens
cttcttccatgtccc

SEQ ID NO: 605550 - DNA, 15 bp, Homo sapiens
ttcttccatgtccct

SEQ ID NO: 605551 - DNA, 15 bp, Homo sapiens
tcttccatgtccctg

SEQ ID NO: 605552 - DNA, 15 bp, Homo sapiens
cttccatgtccctgc

SEQ ID NO: 605553 - DNA, 15 bp, Homo sapiens
ttccatgtccctgca

SEQ ID NO: 605554 - DNA, 15 bp, Homo sapiens
tccatgtccctgcaa

SEQ ID NO: 605555 - DNA, 15 bp, Homo sapiens
ccatgtccctgcaaa

SEQ ID NO: 605556 - DNA, 15 bp, Homo sapiens
catgtccctgcaaag

SEQ ID NO: 605557 - DNA, 15 bp, Homo sapiens
atgtccctgcaaagg

SEQ ID NO: 605558 - DNA, 15 bp, Homo sapiens
tgtccctgcaaagga

SEQ ID NO: 605559 - DNA, 15 bp, Homo sapiens
gtccctgcaaaggac

SEQ ID NO: 605560 - DNA, 15 bp, Homo sapiens
tccctgcaaaggaca

SEQ ID NO: 605561 - DNA, 15 bp, Homo sapiens
ccctgcaaaggacat

SEQ ID NO: 605562 - DNA, 15 bp, Homo sapiens
cctgcaaaggacatg

SEQ ID NO: 605563 - DNA, 15 bp, Homo sapiens
ctgcaaaggacatga

SEQ ID NO: 605564 - DNA, 15 bp, Homo sapiens
tgcaaaggacatgat

SEQ ID NO: 605565 - DNA, 15 bp, Homo sapiens
gcaaaggacatgatc

SEQ ID NO: 605566 - DNA, 15 bp, Homo sapiens
caaaggacatgatct

SEQ ID NO: 605567 - DNA, 15 bp, Homo sapiens
aaaggacatgatctc

SEQ ID NO: 605568 - DNA, 15 bp, Homo sapiens
aaggacatgatctca

SEQ ID NO: 605569 - DNA, 15 bp, Homo sapiens
aggacatgatctcat

SEQ ID NO: 605570 - DNA, 15 bp, Homo sapiens
ggacatgatctcatt

SEQ ID NO: 605571 - DNA, 15 bp, Homo sapiens
gacatgatctcattc

SEQ ID NO: 605572 - DNA, 15 bp, Homo sapiens
acatgatctcattcc

SEQ ID NO: 605573 - DNA, 15 bp, Homo sapiens
catgatctcattcct

SEQ ID NO: 605574 - DNA, 15 bp, Homo sapiens
atgatctcattcctt

SEQ ID NO: 605575 - DNA, 15 bp, Homo sapiens
tgatctcattccttt

SEQ ID NO: 605576 - DNA, 15 bp, Homo sapiens
gatctcattcctttt

SEQ ID NO: 605577 - DNA, 15 bp, Homo sapiens
atctcattccttttt

SEQ ID NO: 605578 - DNA, 15 bp, Homo sapiens
tctcattccttttta

SEQ ID NO: 605579 - DNA, 15 bp, Homo sapiens
ctcattcctttttat

SEQ ID NO: 605580 - DNA, 15 bp, Homo sapiens
tcattcctttttatg

SEQ ID NO: 605581 - DNA, 15 bp, Homo sapiens
cattcctttttatgg

SEQ ID NO: 605582 - DNA, 15 bp, Homo sapiens
attcctttttatggc

SEQ ID NO: 605583 - DNA, 15 bp, Homo sapiens
ttcctttttatggct

SEQ ID NO: 605584 - DNA, 15 bp, Homo sapiens
tcctttttatggctg

SEQ ID NO: 605585 - DNA, 15 bp, Homo sapiens
cctttttatggctgc

SEQ ID NO: 605586 - DNA, 15 bp, Homo sapiens
ctttttatggctgca

SEQ ID NO: 605587 - DNA, 15 bp, Homo sapiens
tttttatggctgcat

SEQ ID NO: 605588 - DNA, 15 bp, Homo sapiens
ttttatggctgcata

SEQ ID NO: 605589 - DNA, 15 bp, Homo sapiens
tttatggctgcatag

SEQ ID NO: 605590 - DNA, 15 bp, Homo sapiens
ttatggctgcatagt

SEQ ID NO: 605591 - DNA, 15 bp, Homo sapiens
tatggctgcatagta

SEQ ID NO: 605592 - DNA, 15 bp, Homo sapiens
atggctgcatagtat

SEQ ID NO: 605593 - DNA, 15 bp, Homo sapiens
tggctgcatagtatt

SEQ ID NO: 605594 - DNA, 15 bp, Homo sapiens
ggctgcatagtattc

SEQ ID NO: 605595 - DNA, 15 bp, Homo sapiens
gctgcatagtattct

SEQ ID NO: 605596 - DNA, 15 bp, Homo sapiens
ctgcatagtattcta

SEQ ID NO: 605597 - DNA, 15 bp, Homo sapiens
tgcatagtattctat

SEQ ID NO: 605598 - DNA, 15 bp, Homo sapiens
gcatagtattctatg

SEQ ID NO: 605599 - DNA, 15 bp, Homo sapiens
catagtattctatgg

SEQ ID NO: 605600 - DNA, 15 bp, Homo sapiens
atagtattctatggt

SEQ ID NO: 605601 - DNA, 15 bp, Homo sapiens
tagtattctatggtg

SEQ ID NO: 605602 - DNA, 15 bp, Homo sapiens
agtattctatggtgt

SEQ ID NO: 605603 - DNA, 15 bp, Homo sapiens
gtattctatggtgta

SEQ ID NO: 605604 - DNA, 15 bp, Homo sapiens
tattctatggtgtat

SEQ ID NO: 605605 - DNA, 15 bp, Homo sapiens
attctatggtgtata

SEQ ID NO: 605606 - DNA, 15 bp, Homo sapiens
ttctatggtgtatat

SEQ ID NO: 605607 - DNA, 15 bp, Homo sapiens
tctatggtgtatatg

SEQ ID NO: 605608 - DNA, 15 bp, Homo sapiens
ctatggtgtatatgt

SEQ ID NO: 605609 - DNA, 15 bp, Homo sapiens
tatggtgtatatgta

SEQ ID NO: 605610 - DNA, 15 bp, Homo sapiens
atggtgtatatgtac

SEQ ID NO: 605611 - DNA, 15 bp, Homo sapiens
tggtgtatatgtacc

SEQ ID NO: 605612 - DNA, 15 bp, Homo sapiens
ggtgtatatgtacca

SEQ ID NO: 605613 - DNA, 15 bp, Homo sapiens
gtgtatatgtaccat

SEQ ID NO: 605614 - DNA, 15 bp, Homo sapiens
tgtatatgtaccata

SEQ ID NO: 605615 - DNA, 15 bp, Homo sapiens
gtatatgtaccatat

SEQ ID NO: 605616 - DNA, 15 bp, Homo sapiens
tatatgtaccatatt

SEQ ID NO: 605617 - DNA, 15 bp, Homo sapiens
atatgtaccatattt

SEQ ID NO: 605618 - DNA, 15 bp, Homo sapiens
tatgtaccatatttt

SEQ ID NO: 605619 - DNA, 15 bp, Homo sapiens
atgtaccatattttc

SEQ ID NO: 605620 - DNA, 15 bp, Homo sapiens
tgtaccatattttcc

SEQ ID NO: 605621 - DNA, 15 bp, Homo sapiens
gtaccatattttcct

SEQ ID NO: 605622 - DNA, 15 bp, Homo sapiens
taccatattttcctt

SEQ ID NO: 605623 - DNA, 15 bp, Homo sapiens
accatattttcctta

SEQ ID NO: 605624 - DNA, 15 bp, Homo sapiens
ccatattttccttat

SEQ ID NO: 605625 - DNA, 15 bp, Homo sapiens
catattttccttatc

SEQ ID NO: 605626 - DNA, 15 bp, Homo sapiens
atattttccttatcc

SEQ ID NO: 605627 - DNA, 15 bp, Homo sapiens
tattttccttatcca

SEQ ID NO: 605628 - DNA, 15 bp, Homo sapiens
attttccttatccag

SEQ ID NO: 605629 - DNA, 15 bp, Homo sapiens
ttttccttatccagc

SEQ ID NO: 605630 - DNA, 15 bp, Homo sapiens
tttccttatccagcc

SEQ ID NO: 605631 - DNA, 15 bp, Homo sapiens
ttccttatccagcct

SEQ ID NO: 605632 - DNA, 15 bp, Homo sapiens
tccttatccagccta

SEQ ID NO: 605633 - DNA, 15 bp, Homo sapiens
ccttatccagcctat

SEQ ID NO: 605634 - DNA, 15 bp, Homo sapiens
cttatccagcctatc

SEQ ID NO: 605635 - DNA, 15 bp, Homo sapiens
ttatccagcctatca

SEQ ID NO: 605636 - DNA, 15 bp, Homo sapiens
tatccagcctatcac

SEQ ID NO: 605637 - DNA, 15 bp, Homo sapiens
atccagcctatcact

SEQ ID NO: 605638 - DNA, 15 bp, Homo sapiens
tccagcctatcactg

SEQ ID NO: 605639 - DNA, 15 bp, Homo sapiens
ccagcctatcactga

SEQ ID NO: 605640 - DNA, 15 bp, Homo sapiens
cagcctatcactgat

SEQ ID NO: 605641 - DNA, 15 bp, Homo sapiens
agcctatcactgatg

SEQ ID NO: 605642 - DNA, 15 bp, Homo sapiens
gcctatcactgatgg

SEQ ID NO: 605643 - DNA, 15 bp, Homo sapiens
cctatcactgatggg

SEQ ID NO: 605644 - DNA, 15 bp, Homo sapiens
ctatcactgatgggc

SEQ ID NO: 605645 - DNA, 15 bp, Homo sapiens
tatcactgatgggca

SEQ ID NO: 605646 - DNA, 15 bp, Homo sapiens
atcactgatgggcat

SEQ ID NO: 605647 - DNA, 15 bp, Homo sapiens
tcactgatgggcatt

SEQ ID NO: 605648 - DNA, 15 bp, Homo sapiens
cactgatgggcattt

SEQ ID NO: 605649 - DNA, 15 bp, Homo sapiens
actgatgggcatttg

SEQ ID NO: 605650 - DNA, 15 bp, Homo sapiens
ctgatgggcatttgg

SEQ ID NO: 605651 - DNA, 15 bp, Homo sapiens
tgatgggcatttgga

SEQ ID NO: 605652 - DNA, 15 bp, Homo sapiens
gatgggcatttggat

SEQ ID NO: 605653 - DNA, 15 bp, Homo sapiens
atgggcatttggatt

SEQ ID NO: 605654 - DNA, 15 bp, Homo sapiens
tgggcatttggattg

SEQ ID NO: 605655 - DNA, 15 bp, Homo sapiens
gggcatttggattgg

SEQ ID NO: 605656 - DNA, 15 bp, Homo sapiens
ggcatttggattggt

SEQ ID NO: 605657 - DNA, 15 bp, Homo sapiens
gcatttggattggtt

SEQ ID NO: 605658 - DNA, 15 bp, Homo sapiens
catttggattggttc

SEQ ID NO: 605659 - DNA, 15 bp, Homo sapiens
atttggattggttcc

SEQ ID NO: 605660 - DNA, 15 bp, Homo sapiens
tttggattggttcca

SEQ ID NO: 605661 - DNA, 15 bp, Homo sapiens
ttggattggttccat

SEQ ID NO: 605662 - DNA, 15 bp, Homo sapiens
tggattggttccatg

SEQ ID NO: 605663 - DNA, 15 bp, Homo sapiens
ggattggttccatgt

SEQ ID NO: 605664 - DNA, 15 bp, Homo sapiens
gattggttccatgtc

SEQ ID NO: 605665 - DNA, 15 bp, Homo sapiens
attggttccatgtct

SEQ ID NO: 605666 - DNA, 15 bp, Homo sapiens
ttggttccatgtctt

SEQ ID NO: 605667 - DNA, 15 bp, Homo sapiens
tggttccatgtcttt

SEQ ID NO: 605668 - DNA, 15 bp, Homo sapiens
ggttccatgtctttg

SEQ ID NO: 605669 - DNA, 15 bp, Homo sapiens
gttccatgtctttgc

SEQ ID NO: 605670 - DNA, 15 bp, Homo sapiens
ttccatgtctttgca

SEQ ID NO: 605671 - DNA, 15 bp, Homo sapiens
tccatgtctttgcaa

SEQ ID NO: 605672 - DNA, 15 bp, Homo sapiens
ccatgtctttgcaat

SEQ ID NO: 605673 - DNA, 15 bp, Homo sapiens
catgtctttgcaatt

SEQ ID NO: 605674 - DNA, 15 bp, Homo sapiens
atgtctttgcaattg

SEQ ID NO: 605675 - DNA, 15 bp, Homo sapiens
tgtctttgcaattgt

SEQ ID NO: 605676 - DNA, 15 bp, Homo sapiens
gtctttgcaattgta

SEQ ID NO: 605677 - DNA, 15 bp, Homo sapiens
tctttgcaattgtaa

SEQ ID NO: 605678 - DNA, 15 bp, Homo sapiens
ctttgcaattgtaaa

SEQ ID NO: 605679 - DNA, 15 bp, Homo sapiens
tttgcaattgtaaac

SEQ ID NO: 605680 - DNA, 15 bp, Homo sapiens
ttgcaattgtaaaca

SEQ ID NO: 605681 - DNA, 15 bp, Homo sapiens
tgcaattgtaaacat

SEQ ID NO: 605682 - DNA, 15 bp, Homo sapiens
gcaattgtaaacata

SEQ ID NO: 605683 - DNA, 15 bp, Homo sapiens
caattgtaaacatac

SEQ ID NO: 605684 - DNA, 15 bp, Homo sapiens
aattgtaaacataca

SEQ ID NO: 605685 - DNA, 15 bp, Homo sapiens
attgtaaacatacat

SEQ ID NO: 605686 - DNA, 15 bp, Homo sapiens
ttgtaaacatacatg

SEQ ID NO: 605687 - DNA, 15 bp, Homo sapiens
tgtaaacatacatgt

SEQ ID NO: 605688 - DNA, 15 bp, Homo sapiens
gtaaacatacatgtg

SEQ ID NO: 605689 - DNA, 15 bp, Homo sapiens
taaacatacatgtgc

SEQ ID NO: 605690 - DNA, 15 bp, Homo sapiens
aaacatacatgtgca

SEQ ID NO: 605691 - DNA, 15 bp, Homo sapiens
aacatacatgtgcat

SEQ ID NO: 605692 - DNA, 15 bp, Homo sapiens
acatacatgtgcatg

SEQ ID NO: 605693 - DNA, 15 bp, Homo sapiens
catacatgtgcatgt

SEQ ID NO: 605694 - DNA, 15 bp, Homo sapiens
atacatgtgcatgta

SEQ ID NO: 605695 - DNA, 15 bp, Homo sapiens
tacatgtgcatgtat

SEQ ID NO: 605696 - DNA, 15 bp, Homo sapiens
acatgtgcatgtatt

SEQ ID NO: 605697 - DNA, 15 bp, Homo sapiens
catgtgcatgtattt

SEQ ID NO: 605698 - DNA, 15 bp, Homo sapiens
atgtgcatgtatttt

SEQ ID NO: 605699 - DNA, 15 bp, Homo sapiens
tgtgcatgtattttt

SEQ ID NO: 605700 - DNA, 15 bp, Homo sapiens
gtgcatgtattttta

SEQ ID NO: 605701 - DNA, 15 bp, Homo sapiens
tgcatgtatttttat

SEQ ID NO: 605702 - DNA, 15 bp, Homo sapiens
gcatgtatttttata

SEQ ID NO: 605703 - DNA, 15 bp, Homo sapiens
catgtatttttatag

SEQ ID NO: 605704 - DNA, 15 bp, Homo sapiens
atgtatttttatagt

SEQ ID NO: 605705 - DNA, 15 bp, Homo sapiens
tgtatttttatagta

SEQ ID NO: 605706 - DNA, 15 bp, Homo sapiens
gtatttttatagtag

SEQ ID NO: 605707 - DNA, 15 bp, Homo sapiens
tatttttatagtaga

SEQ ID NO: 605708 - DNA, 15 bp, Homo sapiens
atttttatagtagaa

SEQ ID NO: 605709 - DNA, 15 bp, Homo sapiens
tttttatagtagaat

SEQ ID NO: 605710 - DNA, 15 bp, Homo sapiens
ttttatagtagaatg

SEQ ID NO: 605711 - DNA, 15 bp, Homo sapiens
tttatagtagaatga

SEQ ID NO: 605712 - DNA, 15 bp, Homo sapiens
ttatagtagaatgat

SEQ ID NO: 605713 - DNA, 15 bp, Homo sapiens
tatagtagaatgatt

SEQ ID NO: 605714 - DNA, 15 bp, Homo sapiens
atagtagaatgattt

SEQ ID NO: 605715 - DNA, 15 bp, Homo sapiens
tagtagaatgattta

SEQ ID NO: 605716 - DNA, 15 bp, Homo sapiens
agtagaatgatttat

SEQ ID NO: 605717 - DNA, 15 bp, Homo sapiens
gtagaatgatttata

SEQ ID NO: 605718 - DNA, 15 bp, Homo sapiens
tagaatgatttatat

SEQ ID NO: 605719 - DNA, 15 bp, Homo sapiens
agaatgatttatatt

SEQ ID NO: 605720 - DNA, 15 bp, Homo sapiens
gaatgatttatattc

SEQ ID NO: 605721 - DNA, 15 bp, Homo sapiens
aatgatttatattcc

SEQ ID NO: 605722 - DNA, 15 bp, Homo sapiens
atgatttatattcct

SEQ ID NO: 605723 - DNA, 15 bp, Homo sapiens
tgatttatattcctt

SEQ ID NO: 605724 - DNA, 15 bp, Homo sapiens
gatttatattccttt

SEQ ID NO: 605725 - DNA, 15 bp, Homo sapiens
atttatattcctttg

SEQ ID NO: 605726 - DNA, 15 bp, Homo sapiens
tttatattcctttgg

SEQ ID NO: 605727 - DNA, 15 bp, Homo sapiens
ttatattcctttggt

SEQ ID NO: 605728 - DNA, 15 bp, Homo sapiens
tatattcctttggtt

SEQ ID NO: 605729 - DNA, 15 bp, Homo sapiens
atattcctttggtta

SEQ ID NO: 605730 - DNA, 15 bp, Homo sapiens
tattcctttggttat

SEQ ID NO: 605731 - DNA, 15 bp, Homo sapiens
attcctttggttata

SEQ ID NO: 605732 - DNA, 15 bp, Homo sapiens
ttcctttggttatat

SEQ ID NO: 605733 - DNA, 15 bp, Homo sapiens
tcctttggttatata

SEQ ID NO: 605734 - DNA, 15 bp, Homo sapiens
cctttggttatatac

SEQ ID NO: 605735 - DNA, 15 bp, Homo sapiens
ctttggttatatacc

SEQ ID NO: 605736 - DNA, 15 bp, Homo sapiens
tttggttatataccc

SEQ ID NO: 605737 - DNA, 15 bp, Homo sapiens
ttggttatataccca

SEQ ID NO: 605738 - DNA, 15 bp, Homo sapiens
tggttatatacccag

SEQ ID NO: 605739 - DNA, 15 bp, Homo sapiens
ggttatatacccagt

SEQ ID NO: 605740 - DNA, 15 bp, Homo sapiens
gttatatacccagta

SEQ ID NO: 605741 - DNA, 15 bp, Homo sapiens
ttatatacccagtaa

SEQ ID NO: 605742 - DNA, 15 bp, Homo sapiens
tatatacccagtaat

SEQ ID NO: 605743 - DNA, 15 bp, Homo sapiens
atatacccagtaatg

SEQ ID NO: 605744 - DNA, 15 bp, Homo sapiens
tatacccagtaatgg

SEQ ID NO: 605745 - DNA, 15 bp, Homo sapiens
atacccagtaatggg

SEQ ID NO: 605746 - DNA, 15 bp, Homo sapiens
tacccagtaatggga

SEQ ID NO: 605747 - DNA, 15 bp, Homo sapiens
acccagtaatgggat

SEQ ID NO: 605748 - DNA, 15 bp, Homo sapiens
cccagtaatgggatt

SEQ ID NO: 605749 - DNA, 15 bp, Homo sapiens
ccagtaatgggattg

SEQ ID NO: 605750 - DNA, 15 bp, Homo sapiens
cagtaatgggattgc

SEQ ID NO: 605751 - DNA, 15 bp, Homo sapiens
agtaatgggattgcc

SEQ ID NO: 605752 - DNA, 15 bp, Homo sapiens
gtaatgggattgcct

SEQ ID NO: 605753 - DNA, 15 bp, Homo sapiens
taatgggattgcctg

SEQ ID NO: 605754 - DNA, 15 bp, Homo sapiens
aatgggattgcctgg

SEQ ID NO: 605755 - DNA, 15 bp, Homo sapiens
atgggattgcctggt

SEQ ID NO: 605756 - DNA, 15 bp, Homo sapiens
tgggattgcctggtc

SEQ ID NO: 605757 - DNA, 15 bp, Homo sapiens
gggattgcctggtca

SEQ ID NO: 605758 - DNA, 15 bp, Homo sapiens
ggattgcctggtcaa

SEQ ID NO: 605759 - DNA, 15 bp, Homo sapiens
gattgcctggtcaaa

SEQ ID NO: 605760 - DNA, 15 bp, Homo sapiens
attgcctggtcaaat

SEQ ID NO: 605761 - DNA, 15 bp, Homo sapiens
ttgcctggtcaaatt

SEQ ID NO: 605762 - DNA, 15 bp, Homo sapiens
tgcctggtcaaattg

SEQ ID NO: 605763 - DNA, 15 bp, Homo sapiens
gcctggtcaaattgt

SEQ ID NO: 605764 - DNA, 15 bp, Homo sapiens
cctggtcaaattgta

SEQ ID NO: 605765 - DNA, 15 bp, Homo sapiens
ctggtcaaattgtat

SEQ ID NO: 605766 - DNA, 15 bp, Homo sapiens
tggtcaaattgtatt

SEQ ID NO: 605767 - DNA, 15 bp, Homo sapiens
ggtcaaattgtattt

SEQ ID NO: 605768 - DNA, 15 bp, Homo sapiens
gtcaaattgtatttc

SEQ ID NO: 605769 - DNA, 15 bp, Homo sapiens
tcaaattgtatttct

SEQ ID NO: 605770 - DNA, 15 bp, Homo sapiens
caaattgtatttctg

SEQ ID NO: 605771 - DNA, 15 bp, Homo sapiens
aaattgtatttctgg

SEQ ID NO: 605772 - DNA, 15 bp, Homo sapiens
aattgtatttctggt

SEQ ID NO: 605773 - DNA, 15 bp, Homo sapiens
attgtatttctggtt

SEQ ID NO: 605774 - DNA, 15 bp, Homo sapiens
ttgtatttctggttc

SEQ ID NO: 605775 - DNA, 15 bp, Homo sapiens
tgtatttctggttct

SEQ ID NO: 605776 - DNA, 15 bp, Homo sapiens
gtatttctggttcta

SEQ ID NO: 605777 - DNA, 15 bp, Homo sapiens
tatttctggttctag

SEQ ID NO: 605778 - DNA, 15 bp, Homo sapiens
atttctggttctaga

SEQ ID NO: 605779 - DNA, 15 bp, Homo sapiens
tttctggttctagat

SEQ ID NO: 605780 - DNA, 15 bp, Homo sapiens
ttctggttctagatc

SEQ ID NO: 605781 - DNA, 15 bp, Homo sapiens
tctggttctagatcc

SEQ ID NO: 605782 - DNA, 15 bp, Homo sapiens
ctggttctagatcct

SEQ ID NO: 605783 - DNA, 15 bp, Homo sapiens
tggttctagatcctt

SEQ ID NO: 605784 - DNA, 15 bp, Homo sapiens
ggttctagatccttg

SEQ ID NO: 605785 - DNA, 15 bp, Homo sapiens
gttctagatccttga

SEQ ID NO: 605786 - DNA, 15 bp, Homo sapiens
ttctagatccttgag

SEQ ID NO: 605787 - DNA, 15 bp, Homo sapiens
tctagatccttgagg

SEQ ID NO: 605788 - DNA, 15 bp, Homo sapiens
ctagatccttgagga

SEQ ID NO: 605789 - DNA, 15 bp, Homo sapiens
tagatccttgaggaa

SEQ ID NO: 605790 - DNA, 15 bp, Homo sapiens
agatccttgaggaat

SEQ ID NO: 605791 - DNA, 15 bp, Homo sapiens
gatccttgaggaatc

SEQ ID NO: 605792 - DNA, 15 bp, Homo sapiens
atccttgaggaatca

SEQ ID NO: 605793 - DNA, 15 bp, Homo sapiens
tccttgaggaatcac

SEQ ID NO: 605794 - DNA, 15 bp, Homo sapiens
ccttgaggaatcaca

SEQ ID NO: 605795 - DNA, 15 bp, Homo sapiens
cttgaggaatcacac

SEQ ID NO: 605796 - DNA, 15 bp, Homo sapiens
ttgaggaatcacact

SEQ ID NO: 605797 - DNA, 15 bp, Homo sapiens
tgaggaatcacacta

SEQ ID NO: 605798 - DNA, 15 bp, Homo sapiens
gaggaatcacactat

SEQ ID NO: 605799 - DNA, 15 bp, Homo sapiens
aggaatcacactatc

SEQ ID NO: 605800 - DNA, 15 bp, Homo sapiens
ggaatcacactatct

SEQ ID NO: 605801 - DNA, 15 bp, Homo sapiens
gaatcacactatctt

SEQ ID NO: 605802 - DNA, 15 bp, Homo sapiens
aatcacactatcttc

SEQ ID NO: 605803 - DNA, 15 bp, Homo sapiens
atcacactatcttcc

SEQ ID NO: 605804 - DNA, 15 bp, Homo sapiens
tcacactatcttcca

SEQ ID NO: 605805 - DNA, 15 bp, Homo sapiens
cacactatcttccac

SEQ ID NO: 605806 - DNA, 15 bp, Homo sapiens
acactatcttccaca

SEQ ID NO: 605807 - DNA, 15 bp, Homo sapiens
cactatcttccacaa

SEQ ID NO: 605808 - DNA, 15 bp, Homo sapiens
actatcttccacaat

SEQ ID NO: 605809 - DNA, 15 bp, Homo sapiens
ctatcttccacaatg

SEQ ID NO: 605810 - DNA, 15 bp, Homo sapiens
tatcttccacaatgg

SEQ ID NO: 605811 - DNA, 15 bp, Homo sapiens
atcttccacaatggt

SEQ ID NO: 605812 - DNA, 15 bp, Homo sapiens
tcttccacaatggtt

SEQ ID NO: 605813 - DNA, 15 bp, Homo sapiens
cttccacaatggttg

SEQ ID NO: 605814 - DNA, 15 bp, Homo sapiens
ttccacaatggttga

SEQ ID NO: 605815 - DNA, 15 bp, Homo sapiens
tccacaatggttgaa

SEQ ID NO: 605816 - DNA, 15 bp, Homo sapiens
ccacaatggttgaac

SEQ ID NO: 605817 - DNA, 15 bp, Homo sapiens
cacaatggttgaact

SEQ ID NO: 605818 - DNA, 15 bp, Homo sapiens
acaatggttgaacta

SEQ ID NO: 605819 - DNA, 15 bp, Homo sapiens
caatggttgaactaa

SEQ ID NO: 605820 - DNA, 15 bp, Homo sapiens
aatggttgaactaat

SEQ ID NO: 605821 - DNA, 15 bp, Homo sapiens
atggttgaactaatt

SEQ ID NO: 605822 - DNA, 15 bp, Homo sapiens
tggttgaactaattt

SEQ ID NO: 605823 - DNA, 15 bp, Homo sapiens
ggttgaactaattta

SEQ ID NO: 605824 - DNA, 15 bp, Homo sapiens
gttgaactaatttac

SEQ ID NO: 605825 - DNA, 15 bp, Homo sapiens
ttgaactaatttaca

SEQ ID NO: 605826 - DNA, 15 bp, Homo sapiens
tgaactaatttacat

SEQ ID NO: 605827 - DNA, 15 bp, Homo sapiens
gaactaatttacatt

SEQ ID NO: 605828 - DNA, 15 bp, Homo sapiens
aactaatttacattc

SEQ ID NO: 605829 - DNA, 15 bp, Homo sapiens
actaatttacattcc

SEQ ID NO: 605830 - DNA, 15 bp, Homo sapiens
ctaatttacattccc

SEQ ID NO: 605831 - DNA, 15 bp, Homo sapiens
taatttacattccca

SEQ ID NO: 605832 - DNA, 15 bp, Homo sapiens
aatttacattcccac

SEQ ID NO: 605833 - DNA, 15 bp, Homo sapiens
atttacattcccacc

SEQ ID NO: 605834 - DNA, 15 bp, Homo sapiens
tttacattcccacca

SEQ ID NO: 605835 - DNA, 15 bp, Homo sapiens
ttacattcccaccaa

SEQ ID NO: 605836 - DNA, 15 bp, Homo sapiens
tacattcccaccaac

SEQ ID NO: 605837 - DNA, 15 bp, Homo sapiens
acattcccaccaaca

SEQ ID NO: 605838 - DNA, 15 bp, Homo sapiens
cattcccaccaacag

SEQ ID NO: 605839 - DNA, 15 bp, Homo sapiens
attcccaccaacagt

SEQ ID NO: 605840 - DNA, 15 bp, Homo sapiens
ttcccaccaacagtg

SEQ ID NO: 605841 - DNA, 15 bp, Homo sapiens
tcccaccaacagtgt

SEQ ID NO: 605842 - DNA, 15 bp, Homo sapiens
cccaccaacagtgta

SEQ ID NO: 605843 - DNA, 15 bp, Homo sapiens
ccaccaacagtgtaa

SEQ ID NO: 605844 - DNA, 15 bp, Homo sapiens
caccaacagtgtaaa

SEQ ID NO: 605845 - DNA, 15 bp, Homo sapiens
accaacagtgtaaaa

SEQ ID NO: 605846 - DNA, 15 bp, Homo sapiens
ccaacagtgtaaaag

SEQ ID NO: 605847 - DNA, 15 bp, Homo sapiens
caacagtgtaaaagc

SEQ ID NO: 605848 - DNA, 15 bp, Homo sapiens
aacagtgtaaaagcc

SEQ ID NO: 605849 - DNA, 15 bp, Homo sapiens
acagtgtaaaagcct

SEQ ID NO: 605850 - DNA, 15 bp, Homo sapiens
cagtgtaaaagcctt

SEQ ID NO: 605851 - DNA, 15 bp, Homo sapiens
agtgtaaaagccttc

SEQ ID NO: 605852 - DNA, 15 bp, Homo sapiens
gtgtaaaagccttcc

SEQ ID NO: 605853 - DNA, 15 bp, Homo sapiens
tgtaaaagccttcct

SEQ ID NO: 605854 - DNA, 15 bp, Homo sapiens
gtaaaagccttccta

SEQ ID NO: 605855 - DNA, 15 bp, Homo sapiens
taaaagccttcctat

SEQ ID NO: 605856 - DNA, 15 bp, Homo sapiens
aaaagccttcctatt

SEQ ID NO: 605857 - DNA, 15 bp, Homo sapiens
aaagccttcctattt

SEQ ID NO: 605858 - DNA, 15 bp, Homo sapiens
aagccttcctatttc

SEQ ID NO: 605859 - DNA, 15 bp, Homo sapiens
agccttcctatttct

SEQ ID NO: 605860 - DNA, 15 bp, Homo sapiens
gccttcctatttctc

SEQ ID NO: 605861 - DNA, 15 bp, Homo sapiens
ccttcctatttctca

SEQ ID NO: 605862 - DNA, 15 bp, Homo sapiens
cttcctatttctcaa

SEQ ID NO: 605863 - DNA, 15 bp, Homo sapiens
ttcctatttctcaac

SEQ ID NO: 605864 - DNA, 15 bp, Homo sapiens
tcctatttctcaaca

SEQ ID NO: 605865 - DNA, 15 bp, Homo sapiens
cctatttctcaacag

SEQ ID NO: 605866 - DNA, 15 bp, Homo sapiens
ctatttctcaacagc

SEQ ID NO: 605867 - DNA, 15 bp, Homo sapiens
tatttctcaacagcc

SEQ ID NO: 605868 - DNA, 15 bp, Homo sapiens
atttctcaacagcct

SEQ ID NO: 605869 - DNA, 15 bp, Homo sapiens
tttctcaacagcctc

SEQ ID NO: 605870 - DNA, 15 bp, Homo sapiens
ttctcaacagcctca

SEQ ID NO: 605871 - DNA, 15 bp, Homo sapiens
tctcaacagcctcac

SEQ ID NO: 605872 - DNA, 15 bp, Homo sapiens
ctcaacagcctcacc

SEQ ID NO: 605873 - DNA, 15 bp, Homo sapiens
tcaacagcctcacca

SEQ ID NO: 605874 - DNA, 15 bp, Homo sapiens
caacagcctcaccag

SEQ ID NO: 605875 - DNA, 15 bp, Homo sapiens
aacagcctcaccagc

SEQ ID NO: 605876 - DNA, 15 bp, Homo sapiens
acagcctcaccagca

SEQ ID NO: 605877 - DNA, 15 bp, Homo sapiens
cagcctcaccagcat

SEQ ID NO: 605878 - DNA, 15 bp, Homo sapiens
agcctcaccagcatc

SEQ ID NO: 605879 - DNA, 15 bp, Homo sapiens
gcctcaccagcatct

SEQ ID NO: 605880 - DNA, 15 bp, Homo sapiens
cctcaccagcatcta

SEQ ID NO: 605881 - DNA, 15 bp, Homo sapiens
ctcaccagcatctat

SEQ ID NO: 605882 - DNA, 15 bp, Homo sapiens
tcaccagcatctatt

SEQ ID NO: 605883 - DNA, 15 bp, Homo sapiens
caccagcatctattg

SEQ ID NO: 605884 - DNA, 15 bp, Homo sapiens
accagcatctattgt

SEQ ID NO: 605885 - DNA, 15 bp, Homo sapiens
ccagcatctattgtt

SEQ ID NO: 605886 - DNA, 15 bp, Homo sapiens
cagcatctattgttt

SEQ ID NO: 605887 - DNA, 15 bp, Homo sapiens
agcatctattgtttc

SEQ ID NO: 605888 - DNA, 15 bp, Homo sapiens
gcatctattgtttct

SEQ ID NO: 605889 - DNA, 15 bp, Homo sapiens
catctattgtttctt

SEQ ID NO: 605890 - DNA, 15 bp, Homo sapiens
atctattgtttcttg

SEQ ID NO: 605891 - DNA, 15 bp, Homo sapiens
tctattgtttcttga

SEQ ID NO: 605892 - DNA, 15 bp, Homo sapiens
ctattgtttcttgac

SEQ ID NO: 605893 - DNA, 15 bp, Homo sapiens
tattgtttcttgaca

SEQ ID NO: 605894 - DNA, 15 bp, Homo sapiens
attgtttcttgacat

SEQ ID NO: 605895 - DNA, 15 bp, Homo sapiens
ttgtttcttgacatt

SEQ ID NO: 605896 - DNA, 15 bp, Homo sapiens
tgtttcttgacattt

SEQ ID NO: 605897 - DNA, 15 bp, Homo sapiens
gtttcttgacatttt

SEQ ID NO: 605898 - DNA, 15 bp, Homo sapiens
tttcttgacatttta

SEQ ID NO: 605899 - DNA, 15 bp, Homo sapiens
ttcttgacattttaa

SEQ ID NO: 605900 - DNA, 15 bp, Homo sapiens
tcttgacattttaat

SEQ ID NO: 605901 - DNA, 15 bp, Homo sapiens
cttgacattttaata

SEQ ID NO: 605902 - DNA, 15 bp, Homo sapiens
ttgacattttaataa

SEQ ID NO: 605903 - DNA, 15 bp, Homo sapiens
tgacattttaataat

SEQ ID NO: 605904 - DNA, 15 bp, Homo sapiens
gacattttaataatc

SEQ ID NO: 605905 - DNA, 15 bp, Homo sapiens
acattttaataatca

SEQ ID NO: 605906 - DNA, 15 bp, Homo sapiens
cattttaataatcac

SEQ ID NO: 605907 - DNA, 15 bp, Homo sapiens
attttaataatcacc

SEQ ID NO: 605908 - DNA, 15 bp, Homo sapiens
ttttaataatcacca

SEQ ID NO: 605909 - DNA, 15 bp, Homo sapiens
tttaataatcaccat

SEQ ID NO: 605910 - DNA, 15 bp, Homo sapiens
ttaataatcaccatt

SEQ ID NO: 605911 - DNA, 15 bp, Homo sapiens
taataatcaccattc

SEQ ID NO: 605912 - DNA, 15 bp, Homo sapiens
aataatcaccattct

SEQ ID NO: 605913 - DNA, 15 bp, Homo sapiens
ataatcaccattctg

SEQ ID NO: 605914 - DNA, 15 bp, Homo sapiens
taatcaccattctga

SEQ ID NO: 605915 - DNA, 15 bp, Homo sapiens
aatcaccattctgac

SEQ ID NO: 605916 - DNA, 15 bp, Homo sapiens
atcaccattctgact

SEQ ID NO: 605917 - DNA, 15 bp, Homo sapiens
tcaccattctgactg

SEQ ID NO: 605918 - DNA, 15 bp, Homo sapiens
caccattctgactgg

SEQ ID NO: 605919 - DNA, 15 bp, Homo sapiens
accattctgactggc

SEQ ID NO: 605920 - DNA, 15 bp, Homo sapiens
ccattctgactggca

SEQ ID NO: 605921 - DNA, 15 bp, Homo sapiens
cattctgactggcat

SEQ ID NO: 605922 - DNA, 15 bp, Homo sapiens
attctgactggcatg

SEQ ID NO: 605923 - DNA, 15 bp, Homo sapiens
ttctgactggcatga

SEQ ID NO: 605924 - DNA, 15 bp, Homo sapiens
tctgactggcatgag

SEQ ID NO: 605925 - DNA, 15 bp, Homo sapiens
ctgactggcatgaga

SEQ ID NO: 605926 - DNA, 15 bp, Homo sapiens
tgactggcatgagat

SEQ ID NO: 605927 - DNA, 15 bp, Homo sapiens
gactggcatgagatg

SEQ ID NO: 605928 - DNA, 15 bp, Homo sapiens
actggcatgagatga

SEQ ID NO: 605929 - DNA, 15 bp, Homo sapiens
ctggcatgagatgat

SEQ ID NO: 605930 - DNA, 15 bp, Homo sapiens
tggcatgagatgata

SEQ ID NO: 605931 - DNA, 15 bp, Homo sapiens
ggcatgagatgatag

SEQ ID NO: 605932 - DNA, 15 bp, Homo sapiens
gcatgagatgataga

SEQ ID NO: 605933 - DNA, 15 bp, Homo sapiens
catgagatgatagat

SEQ ID NO: 605934 - DNA, 15 bp, Homo sapiens
atgagatgatagata

SEQ ID NO: 605935 - DNA, 15 bp, Homo sapiens
tgagatgatagatac

SEQ ID NO: 605936 - DNA, 15 bp, Homo sapiens
gagatgatagatacc

SEQ ID NO: 605937 - DNA, 15 bp, Homo sapiens
agatgatagataccc

SEQ ID NO: 605938 - DNA, 15 bp, Homo sapiens
gatgatagataccca

SEQ ID NO: 605939 - DNA, 15 bp, Homo sapiens
atgatagatacccat

SEQ ID NO: 605940 - DNA, 15 bp, Homo sapiens
tgatagatacccatt

SEQ ID NO: 605941 - DNA, 15 bp, Homo sapiens
gatagatacccattt

SEQ ID NO: 605942 - DNA, 15 bp, Homo sapiens
atagatacccatttg

SEQ ID NO: 605943 - DNA, 15 bp, Homo sapiens
tagatacccatttgt

SEQ ID NO: 605944 - DNA, 15 bp, Homo sapiens
agatacccatttgtc

SEQ ID NO: 605945 - DNA, 15 bp, Homo sapiens
gatacccatttgtca

SEQ ID NO: 605946 - DNA, 15 bp, Homo sapiens
atacccatttgtcag

SEQ ID NO: 605947 - DNA, 15 bp, Homo sapiens
tacccatttgtcaga

SEQ ID NO: 605948 - DNA, 15 bp, Homo sapiens
acccatttgtcagat

SEQ ID NO: 605949 - DNA, 15 bp, Homo sapiens
cccatttgtcagatg

SEQ ID NO: 605950 - DNA, 15 bp, Homo sapiens
ccatttgtcagatgg

SEQ ID NO: 605951 - DNA, 15 bp, Homo sapiens
catttgtcagatggg

SEQ ID NO: 605952 - DNA, 15 bp, Homo sapiens
atttgtcagatgggt

SEQ ID NO: 605953 - DNA, 15 bp, Homo sapiens
tttgtcagatgggta

SEQ ID NO: 605954 - DNA, 15 bp, Homo sapiens
ttgtcagatgggtag

SEQ ID NO: 605955 - DNA, 15 bp, Homo sapiens
tgtcagatgggtaga

SEQ ID NO: 605956 - DNA, 15 bp, Homo sapiens
gtcagatgggtagat

SEQ ID NO: 605957 - DNA, 15 bp, Homo sapiens
tcagatgggtagatt

SEQ ID NO: 605958 - DNA, 15 bp, Homo sapiens
cagatgggtagatta

SEQ ID NO: 605959 - DNA, 15 bp, Homo sapiens
agatgggtagattac

SEQ ID NO: 605960 - DNA, 15 bp, Homo sapiens
gatgggtagattaca

SEQ ID NO: 605961 - DNA, 15 bp, Homo sapiens
atgggtagattacaa

SEQ ID NO: 605962 - DNA, 15 bp, Homo sapiens
tgggtagattacaaa

SEQ ID NO: 605963 - DNA, 15 bp, Homo sapiens
gggtagattacaaaa

SEQ ID NO: 605964 - DNA, 15 bp, Homo sapiens
ggtagattacaaaaa

SEQ ID NO: 605965 - DNA, 15 bp, Homo sapiens
gtagattacaaaaat

SEQ ID NO: 605966 - DNA, 15 bp, Homo sapiens
tagattacaaaaatt

SEQ ID NO: 605967 - DNA, 15 bp, Homo sapiens
agattacaaaaattt

SEQ ID NO: 605968 - DNA, 15 bp, Homo sapiens
gattacaaaaatttt

SEQ ID NO: 605969 - DNA, 15 bp, Homo sapiens
attacaaaaattttc

SEQ ID NO: 605970 - DNA, 15 bp, Homo sapiens
ttacaaaaattttct

SEQ ID NO: 605971 - DNA, 15 bp, Homo sapiens
tacaaaaattttctc

SEQ ID NO: 605972 - DNA, 15 bp, Homo sapiens
acaaaaattttctct

SEQ ID NO: 605973 - DNA, 15 bp, Homo sapiens
caaaaattttctctc

SEQ ID NO: 605974 - DNA, 15 bp, Homo sapiens
aaaaattttctctca

SEQ ID NO: 605975 - DNA, 15 bp, Homo sapiens
aaaattttctctcat

SEQ ID NO: 605976 - DNA, 15 bp, Homo sapiens
aaattttctctcatt

SEQ ID NO: 605977 - DNA, 15 bp, Homo sapiens
aattttctctcattc

SEQ ID NO: 605978 - DNA, 15 bp, Homo sapiens
attttctctcattct

SEQ ID NO: 605979 - DNA, 15 bp, Homo sapiens
ttttctctcattctg

SEQ ID NO: 605980 - DNA, 15 bp, Homo sapiens
tttctctcattctgc

SEQ ID NO: 605981 - DNA, 15 bp, Homo sapiens
ttctctcattctgca

SEQ ID NO: 605982 - DNA, 15 bp, Homo sapiens
tctctcattctgcag

SEQ ID NO: 605983 - DNA, 15 bp, Homo sapiens
ctctcattctgcagg

SEQ ID NO: 605984 - DNA, 15 bp, Homo sapiens
tctcattctgcaggt

SEQ ID NO: 605985 - DNA, 15 bp, Homo sapiens
ctcattctgcaggtt

SEQ ID NO: 605986 - DNA, 15 bp, Homo sapiens
tcattctgcaggttg

SEQ ID NO: 605987 - DNA, 15 bp, Homo sapiens
cattctgcaggttgc

SEQ ID NO: 605988 - DNA, 15 bp, Homo sapiens
attctgcaggttgcc

SEQ ID NO: 605989 - DNA, 15 bp, Homo sapiens
ttctgcaggttgcct

SEQ ID NO: 605990 - DNA, 15 bp, Homo sapiens
tctgcaggttgcctg

SEQ ID NO: 605991 - DNA, 15 bp, Homo sapiens
ctgcaggttgcctgt

SEQ ID NO: 605992 - DNA, 15 bp, Homo sapiens
tgcaggttgcctgtt

SEQ ID NO: 605993 - DNA, 15 bp, Homo sapiens
gcaggttgcctgttc

SEQ ID NO: 605994 - DNA, 15 bp, Homo sapiens
caggttgcctgttca

SEQ ID NO: 605995 - DNA, 15 bp, Homo sapiens
aggttgcctgttcac

SEQ ID NO: 605996 - DNA, 15 bp, Homo sapiens
ggttgcctgttcacg

SEQ ID NO: 605997 - DNA, 15 bp, Homo sapiens
gttgcctgttcacgc

SEQ ID NO: 605998 - DNA, 15 bp, Homo sapiens
ttgcctgttcacgct

SEQ ID NO: 605999 - DNA, 15 bp, Homo sapiens
tgcctgttcacgcta

SEQ ID NO: 606000 - DNA, 15 bp, Homo sapiens
gcctgttcacgctaa

SEQ ID NO: 606001 - DNA, 15 bp, Homo sapiens
cctgttcacgctaat

SEQ ID NO: 606002 - DNA, 15 bp, Homo sapiens
ctgttcacgctaatg

SEQ ID NO: 606003 - DNA, 15 bp, Homo sapiens
tgttcacgctaatga

SEQ ID NO: 606004 - DNA, 15 bp, Homo sapiens
gttcacgctaatgat

SEQ ID NO: 606005 - DNA, 15 bp, Homo sapiens
ttcacgctaatgata

SEQ ID NO: 606006 - DNA, 15 bp, Homo sapiens
tcacgctaatgatag

SEQ ID NO: 606007 - DNA, 15 bp, Homo sapiens
cacgctaatgatagt

SEQ ID NO: 606008 - DNA, 15 bp, Homo sapiens
acgctaatgatagtt

SEQ ID NO: 606009 - DNA, 15 bp, Homo sapiens
cgctaatgatagttt

SEQ ID NO: 606010 - DNA, 15 bp, Homo sapiens
gctaatgatagtttc

SEQ ID NO: 606011 - DNA, 15 bp, Homo sapiens
ctaatgatagtttct

SEQ ID NO: 606012 - DNA, 15 bp, Homo sapiens
taatgatagtttctt

SEQ ID NO: 606013 - DNA, 15 bp, Homo sapiens
aatgatagtttcttt

SEQ ID NO: 606014 - DNA, 15 bp, Homo sapiens
atgatagtttctttt

SEQ ID NO: 606015 - DNA, 15 bp, Homo sapiens
tgatagtttcttttg

SEQ ID NO: 606016 - DNA, 15 bp, Homo sapiens
gatagtttcttttgc

SEQ ID NO: 606017 - DNA, 15 bp, Homo sapiens
atagtttcttttgct

SEQ ID NO: 606018 - DNA, 15 bp, Homo sapiens
tagtttcttttgctg

SEQ ID NO: 606019 - DNA, 15 bp, Homo sapiens
agtttcttttgctgt

SEQ ID NO: 606020 - DNA, 15 bp, Homo sapiens
gtttcttttgctgtg

SEQ ID NO: 606021 - DNA, 15 bp, Homo sapiens
tttcttttgctgtgc

SEQ ID NO: 606022 - DNA, 15 bp, Homo sapiens
ttcttttgctgtgca

SEQ ID NO: 606023 - DNA, 15 bp, Homo sapiens
tcttttgctgtgcag

SEQ ID NO: 606024 - DNA, 15 bp, Homo sapiens
cttttgctgtgcaga

SEQ ID NO: 606025 - DNA, 15 bp, Homo sapiens
ttttgctgtgcagaa

SEQ ID NO: 606026 - DNA, 15 bp, Homo sapiens
tttgctgtgcagaag

SEQ ID NO: 606027 - DNA, 15 bp, Homo sapiens
ttgctgtgcagaagc

SEQ ID NO: 606028 - DNA, 15 bp, Homo sapiens
tgctgtgcagaagct

SEQ ID NO: 606029 - DNA, 15 bp, Homo sapiens
gctgtgcagaagctc

SEQ ID NO: 606030 - DNA, 15 bp, Homo sapiens
ctgtgcagaagctct

SEQ ID NO: 606031 - DNA, 15 bp, Homo sapiens
tgtgcagaagctctt

SEQ ID NO: 606032 - DNA, 15 bp, Homo sapiens
gtgcagaagctcttt

SEQ ID NO: 606033 - DNA, 15 bp, Homo sapiens
tgcagaagctcttta

SEQ ID NO: 606034 - DNA, 15 bp, Homo sapiens
gcagaagctctttag

SEQ ID NO: 606035 - DNA, 15 bp, Homo sapiens
cagaagctctttagc

SEQ ID NO: 606036 - DNA, 15 bp, Homo sapiens
agaagctctttagcc

SEQ ID NO: 606037 - DNA, 15 bp, Homo sapiens
gaagctctttagcct

SEQ ID NO: 606038 - DNA, 15 bp, Homo sapiens
aagctctttagccta

SEQ ID NO: 606039 - DNA, 15 bp, Homo sapiens
agctctttagcctaa

SEQ ID NO: 606040 - DNA, 15 bp, Homo sapiens
gctctttagcctaat

SEQ ID NO: 606041 - DNA, 15 bp, Homo sapiens
ctctttagcctaatt

SEQ ID NO: 606042 - DNA, 15 bp, Homo sapiens
tctttagcctaatta

SEQ ID NO: 606043 - DNA, 15 bp, Homo sapiens
ctttagcctaattag

SEQ ID NO: 606044 - DNA, 15 bp, Homo sapiens
tttagcctaattaga

SEQ ID NO: 606045 - DNA, 15 bp, Homo sapiens
ttagcctaattagat

SEQ ID NO: 606046 - DNA, 15 bp, Homo sapiens
tagcctaattagatc

SEQ ID NO: 606047 - DNA, 15 bp, Homo sapiens
agcctaattagatcc

SEQ ID NO: 606048 - DNA, 15 bp, Homo sapiens
gcctaattagatcca

SEQ ID NO: 606049 - DNA, 15 bp, Homo sapiens
cctaattagatccat

SEQ ID NO: 606050 - DNA, 15 bp, Homo sapiens
ctaattagatccatt

SEQ ID NO: 606051 - DNA, 15 bp, Homo sapiens
taattagatccattt

SEQ ID NO: 606052 - DNA, 15 bp, Homo sapiens
aattagatccatttt

SEQ ID NO: 606053 - DNA, 15 bp, Homo sapiens
attagatccattttt

SEQ ID NO: 606054 - DNA, 15 bp, Homo sapiens
ttagatccatttttc

SEQ ID NO: 606055 - DNA, 15 bp, Homo sapiens
tagatccatttttca

SEQ ID NO: 606056 - DNA, 15 bp, Homo sapiens
agatccatttttcaa

SEQ ID NO: 606057 - DNA, 15 bp, Homo sapiens
gatccatttttcaat

SEQ ID NO: 606058 - DNA, 15 bp, Homo sapiens
atccatttttcaatt

SEQ ID NO: 606059 - DNA, 15 bp, Homo sapiens
tccatttttcaattt

SEQ ID NO: 606060 - DNA, 15 bp, Homo sapiens
ccatttttcaatttt

SEQ ID NO: 606061 - DNA, 15 bp, Homo sapiens
catttttcaattttg

SEQ ID NO: 606062 - DNA, 15 bp, Homo sapiens
atttttcaattttgg

SEQ ID NO: 606063 - DNA, 15 bp, Homo sapiens
tttttcaattttggc

SEQ ID NO: 606064 - DNA, 15 bp, Homo sapiens
ttttcaattttggct

SEQ ID NO: 606065 - DNA, 15 bp, Homo sapiens
tttcaattttggctt

SEQ ID NO: 606066 - DNA, 15 bp, Homo sapiens
ttcaattttggcttt

SEQ ID NO: 606067 - DNA, 15 bp, Homo sapiens
tcaattttggctttt

SEQ ID NO: 606068 - DNA, 15 bp, Homo sapiens
caattttggcttttg

SEQ ID NO: 606069 - DNA, 15 bp, Homo sapiens
aattttggcttttgt

SEQ ID NO: 606070 - DNA, 15 bp, Homo sapiens
attttggcttttgtt

SEQ ID NO: 606071 - DNA, 15 bp, Homo sapiens
ttttggcttttgttg

SEQ ID NO: 606072 - DNA, 15 bp, Homo sapiens
tttggcttttgttgc

SEQ ID NO: 606073 - DNA, 15 bp, Homo sapiens
ttggcttttgttgca

SEQ ID NO: 606074 - DNA, 15 bp, Homo sapiens
tggcttttgttgcaa

SEQ ID NO: 606075 - DNA, 15 bp, Homo sapiens
ggcttttgttgcaat

SEQ ID NO: 606076 - DNA, 15 bp, Homo sapiens
gcttttgttgcaatt

SEQ ID NO: 606077 - DNA, 15 bp, Homo sapiens
cttttgttgcaattg

SEQ ID NO: 606078 - DNA, 15 bp, Homo sapiens
ttttgttgcaattgc

SEQ ID NO: 606079 - DNA, 15 bp, Homo sapiens
tttgttgcaattgct

SEQ ID NO: 606080 - DNA, 15 bp, Homo sapiens
ttgttgcaattgctt

SEQ ID NO: 606081 - DNA, 15 bp, Homo sapiens
tgttgcaattgcttt

SEQ ID NO: 606082 - DNA, 15 bp, Homo sapiens
gttgcaattgctttt

SEQ ID NO: 606083 - DNA, 15 bp, Homo sapiens
ttgcaattgcttttg

SEQ ID NO: 606084 - DNA, 15 bp, Homo sapiens
tgcaattgcttttgg

SEQ ID NO: 606085 - DNA, 15 bp, Homo sapiens
gcaattgcttttggt

SEQ ID NO: 606086 - DNA, 15 bp, Homo sapiens
caattgcttttggtg

SEQ ID NO: 606087 - DNA, 15 bp, Homo sapiens
aattgcttttggtgt

SEQ ID NO: 606088 - DNA, 15 bp, Homo sapiens
attgcttttggtgtt

SEQ ID NO: 606089 - DNA, 15 bp, Homo sapiens
ttgcttttggtgttt

SEQ ID NO: 606090 - DNA, 15 bp, Homo sapiens
tgcttttggtgtttt

SEQ ID NO: 606091 - DNA, 15 bp, Homo sapiens
gcttttggtgtttta

SEQ ID NO: 606092 - DNA, 15 bp, Homo sapiens
cttttggtgttttag

SEQ ID NO: 606093 - DNA, 15 bp, Homo sapiens
ttttggtgttttagt

SEQ ID NO: 606094 - DNA, 15 bp, Homo sapiens
tttggtgttttagtc

SEQ ID NO: 606095 - DNA, 15 bp, Homo sapiens
ttggtgttttagtca

SEQ ID NO: 606096 - DNA, 15 bp, Homo sapiens
tggtgttttagtcat

SEQ ID NO: 606097 - DNA, 15 bp, Homo sapiens
ggtgttttagtcatg

SEQ ID NO: 606098 - DNA, 15 bp, Homo sapiens
gtgttttagtcatga

SEQ ID NO: 606099 - DNA, 15 bp, Homo sapiens
tgttttagtcatgaa

SEQ ID NO: 606100 - DNA, 15 bp, Homo sapiens
gttttagtcatgaag

SEQ ID NO: 606101 - DNA, 15 bp, Homo sapiens
ttttagtcatgaagt

SEQ ID NO: 606102 - DNA, 15 bp, Homo sapiens
tttagtcatgaagtc

SEQ ID NO: 606103 - DNA, 15 bp, Homo sapiens
ttagtcatgaagtct

SEQ ID NO: 606104 - DNA, 15 bp, Homo sapiens
tagtcatgaagtctt

SEQ ID NO: 606105 - DNA, 15 bp, Homo sapiens
agtcatgaagtcttt

SEQ ID NO: 606106 - DNA, 15 bp, Homo sapiens
gtcatgaagtctttg

SEQ ID NO: 606107 - DNA, 15 bp, Homo sapiens
tcatgaagtctttgc

SEQ ID NO: 606108 - DNA, 15 bp, Homo sapiens
catgaagtctttgcc

SEQ ID NO: 606109 - DNA, 15 bp, Homo sapiens
atgaagtctttgccc

SEQ ID NO: 606110 - DNA, 15 bp, Homo sapiens
tgaagtctttgccca

SEQ ID NO: 606111 - DNA, 15 bp, Homo sapiens
gaagtctttgcccat

SEQ ID NO: 606112 - DNA, 15 bp, Homo sapiens
aagtctttgcccatg

SEQ ID NO: 606113 - DNA, 15 bp, Homo sapiens
agtctttgcccatgc

SEQ ID NO: 606114 - DNA, 15 bp, Homo sapiens
gtctttgcccatgcg

SEQ ID NO: 606115 - DNA, 15 bp, Homo sapiens
tctttgcccatgcgt

SEQ ID NO: 606116 - DNA, 15 bp, Homo sapiens
ctttgcccatgcgta

SEQ ID NO: 606117 - DNA, 15 bp, Homo sapiens
tttgcccatgcgtat

SEQ ID NO: 606118 - DNA, 15 bp, Homo sapiens
ttgcccatgcgtatg

SEQ ID NO: 606119 - DNA, 15 bp, Homo sapiens
tgcccatgcgtatgt

SEQ ID NO: 606120 - DNA, 15 bp, Homo sapiens
gcccatgcgtatgtc

SEQ ID NO: 606121 - DNA, 15 bp, Homo sapiens
cccatgcgtatgtcc

SEQ ID NO: 606122 - DNA, 15 bp, Homo sapiens
ccatgcgtatgtcct

SEQ ID NO: 606123 - DNA, 15 bp, Homo sapiens
catgcgtatgtcctg

SEQ ID NO: 606124 - DNA, 15 bp, Homo sapiens
atgcgtatgtcctga

SEQ ID NO: 606125 - DNA, 15 bp, Homo sapiens
tgcgtatgtcctgag

SEQ ID NO: 606126 - DNA, 15 bp, Homo sapiens
gcgtatgtcctgagt

SEQ ID NO: 606127 - DNA, 15 bp, Homo sapiens
cgtatgtcctgagtg

SEQ ID NO: 606128 - DNA, 15 bp, Homo sapiens
gtatgtcctgagtgg

SEQ ID NO: 606129 - DNA, 15 bp, Homo sapiens
tatgtcctgagtggt

SEQ ID NO: 606130 - DNA, 15 bp, Homo sapiens
atgtcctgagtggta

SEQ ID NO: 606131 - DNA, 15 bp, Homo sapiens
tgtcctgagtggtat

SEQ ID NO: 606132 - DNA, 15 bp, Homo sapiens
gtcctgagtggtatt

SEQ ID NO: 606133 - DNA, 15 bp, Homo sapiens
tcctgagtggtattg

SEQ ID NO: 606134 - DNA, 15 bp, Homo sapiens
cctgagtggtattgc

SEQ ID NO: 606135 - DNA, 15 bp, Homo sapiens
ctgagtggtattgcc

SEQ ID NO: 606136 - DNA, 15 bp, Homo sapiens
tgagtggtattgcct

SEQ ID NO: 606137 - DNA, 15 bp, Homo sapiens
gagtggtattgccta

SEQ ID NO: 606138 - DNA, 15 bp, Homo sapiens
agtggtattgcctag

SEQ ID NO: 606139 - DNA, 15 bp, Homo sapiens
gtggtattgcctagg

SEQ ID NO: 606140 - DNA, 15 bp, Homo sapiens
tggtattgcctaggc

SEQ ID NO: 606141 - DNA, 15 bp, Homo sapiens
ggtattgcctaggct

SEQ ID NO: 606142 - DNA, 15 bp, Homo sapiens
gtattgcctaggctt

SEQ ID NO: 606143 - DNA, 15 bp, Homo sapiens
tattgcctaggcttt

SEQ ID NO: 606144 - DNA, 15 bp, Homo sapiens
attgcctaggctttc

SEQ ID NO: 606145 - DNA, 15 bp, Homo sapiens
ttgcctaggctttct

SEQ ID NO: 606146 - DNA, 15 bp, Homo sapiens
tgcctaggctttctt

SEQ ID NO: 606147 - DNA, 15 bp, Homo sapiens
gcctaggctttcttc

SEQ ID NO: 606148 - DNA, 15 bp, Homo sapiens
cctaggctttcttct

SEQ ID NO: 606149 - DNA, 15 bp, Homo sapiens
ctaggctttcttcta

SEQ ID NO: 606150 - DNA, 15 bp, Homo sapiens
taggctttcttctag

SEQ ID NO: 606151 - DNA, 15 bp, Homo sapiens
aggctttcttctagt

SEQ ID NO: 606152 - DNA, 15 bp, Homo sapiens
ggctttcttctagtt

SEQ ID NO: 606153 - DNA, 15 bp, Homo sapiens
gctttcttctagttt

SEQ ID NO: 606154 - DNA, 15 bp, Homo sapiens
ctttcttctagtttt

SEQ ID NO: 606155 - DNA, 15 bp, Homo sapiens
tttcttctagttttc

SEQ ID NO: 606156 - DNA, 15 bp, Homo sapiens
ttcttctagttttca

SEQ ID NO: 606157 - DNA, 15 bp, Homo sapiens
tcttctagttttcat

SEQ ID NO: 606158 - DNA, 15 bp, Homo sapiens
cttctagttttcatg

SEQ ID NO: 606159 - DNA, 15 bp, Homo sapiens
ttctagttttcatga

SEQ ID NO: 606160 - DNA, 15 bp, Homo sapiens
tctagttttcatgat

SEQ ID NO: 606161 - DNA, 15 bp, Homo sapiens
ctagttttcatgatt

SEQ ID NO: 606162 - DNA, 15 bp, Homo sapiens
tagttttcatgattt

SEQ ID NO: 606163 - DNA, 15 bp, Homo sapiens
agttttcatgatttt

SEQ ID NO: 606164 - DNA, 15 bp, Homo sapiens
gttttcatgatttta

SEQ ID NO: 606165 - DNA, 15 bp, Homo sapiens
ttttcatgattttag

SEQ ID NO: 606166 - DNA, 15 bp, Homo sapiens
tttcatgattttaga

SEQ ID NO: 606167 - DNA, 15 bp, Homo sapiens
ttcatgattttagat

SEQ ID NO: 606168 - DNA, 15 bp, Homo sapiens
tcatgattttagatt

SEQ ID NO: 606169 - DNA, 15 bp, Homo sapiens
catgattttagattt

SEQ ID NO: 606170 - DNA, 15 bp, Homo sapiens
atgattttagatttt

SEQ ID NO: 606171 - DNA, 15 bp, Homo sapiens
tgattttagatttta

SEQ ID NO: 606172 - DNA, 15 bp, Homo sapiens
gattttagattttac

SEQ ID NO: 606173 - DNA, 15 bp, Homo sapiens
attttagattttaca

SEQ ID NO: 606174 - DNA, 15 bp, Homo sapiens
ttttagattttacat

SEQ ID NO: 606175 - DNA, 15 bp, Homo sapiens
tttagattttacatt

SEQ ID NO: 606176 - DNA, 15 bp, Homo sapiens
ttagattttacattt

SEQ ID NO: 606177 - DNA, 15 bp, Homo sapiens
tagattttacattta

SEQ ID NO: 606178 - DNA, 15 bp, Homo sapiens
agattttacatttaa

SEQ ID NO: 606179 - DNA, 15 bp, Homo sapiens
gattttacatttaag

SEQ ID NO: 606180 - DNA, 15 bp, Homo sapiens
attttacatttaagt

SEQ ID NO: 606181 - DNA, 15 bp, Homo sapiens
ttttacatttaagtc

SEQ ID NO: 606182 - DNA, 15 bp, Homo sapiens
tttacatttaagtct

SEQ ID NO: 606183 - DNA, 15 bp, Homo sapiens
ttacatttaagtctt

SEQ ID NO: 606184 - DNA, 15 bp, Homo sapiens
tacatttaagtcttt

SEQ ID NO: 606185 - DNA, 15 bp, Homo sapiens
acatttaagtcttta

SEQ ID NO: 606186 - DNA, 15 bp, Homo sapiens
catttaagtctttaa

SEQ ID NO: 606187 - DNA, 15 bp, Homo sapiens
atttaagtctttaat

SEQ ID NO: 606188 - DNA, 15 bp, Homo sapiens
tttaagtctttaatc

SEQ ID NO: 606189 - DNA, 15 bp, Homo sapiens
ttaagtctttaatcc

SEQ ID NO: 606190 - DNA, 15 bp, Homo sapiens
taagtctttaatcca

SEQ ID NO: 606191 - DNA, 15 bp, Homo sapiens
aagtctttaatccag

SEQ ID NO: 606192 - DNA, 15 bp, Homo sapiens
agtctttaatccagc

SEQ ID NO: 606193 - DNA, 15 bp, Homo sapiens
gtctttaatccagct

SEQ ID NO: 606194 - DNA, 15 bp, Homo sapiens
tctttaatccagctt

SEQ ID NO: 606195 - DNA, 15 bp, Homo sapiens
ctttaatccagcttg

SEQ ID NO: 606196 - DNA, 15 bp, Homo sapiens
tttaatccagcttga

SEQ ID NO: 606197 - DNA, 15 bp, Homo sapiens
ttaatccagcttgag

SEQ ID NO: 606198 - DNA, 15 bp, Homo sapiens
taatccagcttgagt

SEQ ID NO: 606199 - DNA, 15 bp, Homo sapiens
aatccagcttgagtt

SEQ ID NO: 606200 - DNA, 15 bp, Homo sapiens
atccagcttgagtta

SEQ ID NO: 606201 - DNA, 15 bp, Homo sapiens
tccagcttgagttaa

SEQ ID NO: 606202 - DNA, 15 bp, Homo sapiens
ccagcttgagttaat

SEQ ID NO: 606203 - DNA, 15 bp, Homo sapiens
cagcttgagttaatt

SEQ ID NO: 606204 - DNA, 15 bp, Homo sapiens
agcttgagttaattt

SEQ ID NO: 606205 - DNA, 15 bp, Homo sapiens
gcttgagttaatttt

SEQ ID NO: 606206 - DNA, 15 bp, Homo sapiens
cttgagttaattttt

SEQ ID NO: 606207 - DNA, 15 bp, Homo sapiens
ttgagttaatttttg

SEQ ID NO: 606208 - DNA, 15 bp, Homo sapiens
tgagttaatttttgt

SEQ ID NO: 606209 - DNA, 15 bp, Homo sapiens
gagttaatttttgta

SEQ ID NO: 606210 - DNA, 15 bp, Homo sapiens
agttaatttttgtat

SEQ ID NO: 606211 - DNA, 15 bp, Homo sapiens
gttaatttttgtata

SEQ ID NO: 606212 - DNA, 15 bp, Homo sapiens
ttaatttttgtataa

SEQ ID NO: 606213 - DNA, 15 bp, Homo sapiens
taatttttgtataag

SEQ ID NO: 606214 - DNA, 15 bp, Homo sapiens
aatttttgtataagg

SEQ ID NO: 606215 - DNA, 15 bp, Homo sapiens
atttttgtataaggt

SEQ ID NO: 606216 - DNA, 15 bp, Homo sapiens
tttttgtataaggtg

SEQ ID NO: 606217 - DNA, 15 bp, Homo sapiens
ttttgtataaggtgt

SEQ ID NO: 606218 - DNA, 15 bp, Homo sapiens
tttgtataaggtgta

SEQ ID NO: 606219 - DNA, 15 bp, Homo sapiens
ttgtataaggtgtaa

SEQ ID NO: 606220 - DNA, 15 bp, Homo sapiens
tgtataaggtgtaag

SEQ ID NO: 606221 - DNA, 15 bp, Homo sapiens
gtataaggtgtaagg

SEQ ID NO: 606222 - DNA, 15 bp, Homo sapiens
tataaggtgtaagga

SEQ ID NO: 606223 - DNA, 15 bp, Homo sapiens
ataaggtgtaaggaa

SEQ ID NO: 606224 - DNA, 15 bp, Homo sapiens
taaggtgtaaggaag

SEQ ID NO: 606225 - DNA, 15 bp, Homo sapiens
aaggtgtaaggaagg

SEQ ID NO: 606226 - DNA, 15 bp, Homo sapiens
aggtgtaaggaaggg

SEQ ID NO: 606227 - DNA, 15 bp, Homo sapiens
ggtgtaaggaaggga

SEQ ID NO: 606228 - DNA, 15 bp, Homo sapiens
gtgtaaggaagggat

SEQ ID NO: 606229 - DNA, 15 bp, Homo sapiens
tgtaaggaagggatc

SEQ ID NO: 606230 - DNA, 15 bp, Homo sapiens
gtaaggaagggatcc

SEQ ID NO: 606231 - DNA, 15 bp, Homo sapiens
taaggaagggatcca

SEQ ID NO: 606232 - DNA, 15 bp, Homo sapiens
aaggaagggatccag

SEQ ID NO: 606233 - DNA, 15 bp, Homo sapiens
aggaagggatccagt

SEQ ID NO: 606234 - DNA, 15 bp, Homo sapiens
ggaagggatccagtt

SEQ ID NO: 606235 - DNA, 15 bp, Homo sapiens
gaagggatccagttt

SEQ ID NO: 606236 - DNA, 15 bp, Homo sapiens
aagggatccagttta

SEQ ID NO: 606237 - DNA, 15 bp, Homo sapiens
agggatccagtttaa

SEQ ID NO: 606238 - DNA, 15 bp, Homo sapiens
gggatccagtttaag

SEQ ID NO: 606239 - DNA, 15 bp, Homo sapiens
ggatccagtttaagt

SEQ ID NO: 606240 - DNA, 15 bp, Homo sapiens
gatccagtttaagtt

SEQ ID NO: 606241 - DNA, 15 bp, Homo sapiens
atccagtttaagttt

SEQ ID NO: 606242 - DNA, 15 bp, Homo sapiens
tccagtttaagtttt

SEQ ID NO: 606243 - DNA, 15 bp, Homo sapiens
ccagtttaagttttc

SEQ ID NO: 606244 - DNA, 15 bp, Homo sapiens
cagtttaagttttct

SEQ ID NO: 606245 - DNA, 15 bp, Homo sapiens
agtttaagttttcta

SEQ ID NO: 606246 - DNA, 15 bp, Homo sapiens
gtttaagttttctac

SEQ ID NO: 606247 - DNA, 15 bp, Homo sapiens
tttaagttttctaca

SEQ ID NO: 606248 - DNA, 15 bp, Homo sapiens
ttaagttttctacat

SEQ ID NO: 606249 - DNA, 15 bp, Homo sapiens
taagttttctacata

SEQ ID NO: 606250 - DNA, 15 bp, Homo sapiens
aagttttctacatat

SEQ ID NO: 606251 - DNA, 15 bp, Homo sapiens
agttttctacatatg

SEQ ID NO: 606252 - DNA, 15 bp, Homo sapiens
gttttctacatatgg

SEQ ID NO: 606253 - DNA, 15 bp, Homo sapiens
ttttctacatatggc

SEQ ID NO: 606254 - DNA, 15 bp, Homo sapiens
tttctacatatggct

SEQ ID NO: 606255 - DNA, 15 bp, Homo sapiens
ttctacatatggcta

SEQ ID NO: 606256 - DNA, 15 bp, Homo sapiens
tctacatatggctag

SEQ ID NO: 606257 - DNA, 15 bp, Homo sapiens
ctacatatggctagc

SEQ ID NO: 606258 - DNA, 15 bp, Homo sapiens
tacatatggctagcc

SEQ ID NO: 606259 - DNA, 15 bp, Homo sapiens
acatatggctagcca

SEQ ID NO: 606260 - DNA, 15 bp, Homo sapiens
catatggctagccag

SEQ ID NO: 606261 - DNA, 15 bp, Homo sapiens
atatggctagccagt

SEQ ID NO: 606262 - DNA, 15 bp, Homo sapiens
tatggctagccagtt

SEQ ID NO: 606263 - DNA, 15 bp, Homo sapiens
atggctagccagttt

SEQ ID NO: 606264 - DNA, 15 bp, Homo sapiens
tggctagccagtttt

SEQ ID NO: 606265 - DNA, 15 bp, Homo sapiens
ggctagccagttttc

SEQ ID NO: 606266 - DNA, 15 bp, Homo sapiens
gctagccagttttcc

SEQ ID NO: 606267 - DNA, 15 bp, Homo sapiens
ctagccagttttccc

SEQ ID NO: 606268 - DNA, 15 bp, Homo sapiens
tagccagttttccca

SEQ ID NO: 606269 - DNA, 15 bp, Homo sapiens
agccagttttcccaa

SEQ ID NO: 606270 - DNA, 15 bp, Homo sapiens
gccagttttcccaac

SEQ ID NO: 606271 - DNA, 15 bp, Homo sapiens
ccagttttcccaaca

SEQ ID NO: 606272 - DNA, 15 bp, Homo sapiens
cagttttcccaacac

SEQ ID NO: 606273 - DNA, 15 bp, Homo sapiens
agttttcccaacacc

SEQ ID NO: 606274 - DNA, 15 bp, Homo sapiens
gttttcccaacacca

SEQ ID NO: 606275 - DNA, 15 bp, Homo sapiens
ttttcccaacaccat

SEQ ID NO: 606276 - DNA, 15 bp, Homo sapiens
tttcccaacaccatt

SEQ ID NO: 606277 - DNA, 15 bp, Homo sapiens
ttcccaacaccattt

SEQ ID NO: 606278 - DNA, 15 bp, Homo sapiens
tcccaacaccattta

SEQ ID NO: 606279 - DNA, 15 bp, Homo sapiens
cccaacaccatttat

SEQ ID NO: 606280 - DNA, 15 bp, Homo sapiens
ccaacaccatttatt

SEQ ID NO: 606281 - DNA, 15 bp, Homo sapiens
caacaccatttatta

SEQ ID NO: 606282 - DNA, 15 bp, Homo sapiens
aacaccatttattaa

SEQ ID NO: 606283 - DNA, 15 bp, Homo sapiens
acaccatttattaaa

SEQ ID NO: 606284 - DNA, 15 bp, Homo sapiens
caccatttattaaat

SEQ ID NO: 606285 - DNA, 15 bp, Homo sapiens
accatttattaaata

SEQ ID NO: 606286 - DNA, 15 bp, Homo sapiens
ccatttattaaatag

SEQ ID NO: 606287 - DNA, 15 bp, Homo sapiens
catttattaaatagg

SEQ ID NO: 606288 - DNA, 15 bp, Homo sapiens
atttattaaataggg

SEQ ID NO: 606289 - DNA, 15 bp, Homo sapiens
tttattaaataggga

SEQ ID NO: 606290 - DNA, 15 bp, Homo sapiens
ttattaaatagggaa

SEQ ID NO: 606291 - DNA, 15 bp, Homo sapiens
tattaaatagggaat

SEQ ID NO: 606292 - DNA, 15 bp, Homo sapiens
attaaatagggaatc

SEQ ID NO: 606293 - DNA, 15 bp, Homo sapiens
ttaaatagggaatcc

SEQ ID NO: 606294 - DNA, 15 bp, Homo sapiens
taaatagggaatcct

SEQ ID NO: 606295 - DNA, 15 bp, Homo sapiens
aaatagggaatcctt

SEQ ID NO: 606296 - DNA, 15 bp, Homo sapiens
aatagggaatccttt

SEQ ID NO: 606297 - DNA, 15 bp, Homo sapiens
atagggaatcctttc

SEQ ID NO: 606298 - DNA, 15 bp, Homo sapiens
tagggaatcctttcc

SEQ ID NO: 606299 - DNA, 15 bp, Homo sapiens
agggaatcctttccc

SEQ ID NO: 606300 - DNA, 15 bp, Homo sapiens
gggaatcctttcccc

SEQ ID NO: 606301 - DNA, 15 bp, Homo sapiens
ggaatcctttcccca

SEQ ID NO: 606302 - DNA, 15 bp, Homo sapiens
gaatcctttccccat

SEQ ID NO: 606303 - DNA, 15 bp, Homo sapiens
aatcctttccccatt

SEQ ID NO: 606304 - DNA, 15 bp, Homo sapiens
atcctttccccattg

SEQ ID NO: 606305 - DNA, 15 bp, Homo sapiens
tcctttccccattgc

SEQ ID NO: 606306 - DNA, 15 bp, Homo sapiens
cctttccccattgct

SEQ ID NO: 606307 - DNA, 15 bp, Homo sapiens
ctttccccattgctt

SEQ ID NO: 606308 - DNA, 15 bp, Homo sapiens
tttccccattgcttg

SEQ ID NO: 606309 - DNA, 15 bp, Homo sapiens
ttccccattgcttgt

SEQ ID NO: 606310 - DNA, 15 bp, Homo sapiens
tccccattgcttgtg

SEQ ID NO: 606311 - DNA, 15 bp, Homo sapiens
ccccattgcttgtgt

SEQ ID NO: 606312 - DNA, 15 bp, Homo sapiens
cccattgcttgtgtg

SEQ ID NO: 606313 - DNA, 15 bp, Homo sapiens
ccattgcttgtgtgt

SEQ ID NO: 606314 - DNA, 15 bp, Homo sapiens
cattgcttgtgtgtg

SEQ ID NO: 606315 - DNA, 15 bp, Homo sapiens
attgcttgtgtgtgt

SEQ ID NO: 606316 - DNA, 15 bp, Homo sapiens
ttgcttgtgtgtgtc

SEQ ID NO: 606317 - DNA, 15 bp, Homo sapiens
tgcttgtgtgtgtca

SEQ ID NO: 606318 - DNA, 15 bp, Homo sapiens
gcttgtgtgtgtcag

SEQ ID NO: 606319 - DNA, 15 bp, Homo sapiens
cttgtgtgtgtcagg

SEQ ID NO: 606320 - DNA, 15 bp, Homo sapiens
ttgtgtgtgtcaggt

SEQ ID NO: 606321 - DNA, 15 bp, Homo sapiens
tgtgtgtgtcaggtt

SEQ ID NO: 606322 - DNA, 15 bp, Homo sapiens
gtgtgtgtcaggttt

SEQ ID NO: 606323 - DNA, 15 bp, Homo sapiens
tgtgtgtcaggtttg

SEQ ID NO: 606324 - DNA, 15 bp, Homo sapiens
gtgtgtcaggtttgg

SEQ ID NO: 606325 - DNA, 15 bp, Homo sapiens
tgtgtcaggtttggc

SEQ ID NO: 606326 - DNA, 15 bp, Homo sapiens
gtgtcaggtttggca

SEQ ID NO: 606327 - DNA, 15 bp, Homo sapiens
tgtcaggtttggcaa

SEQ ID NO: 606328 - DNA, 15 bp, Homo sapiens
gtcaggtttggcaaa

SEQ ID NO: 606329 - DNA, 15 bp, Homo sapiens
tcaggtttggcaaag

SEQ ID NO: 606330 - DNA, 15 bp, Homo sapiens
caggtttggcaaaga

SEQ ID NO: 606331 - DNA, 15 bp, Homo sapiens
aggtttggcaaagat

SEQ ID NO: 606332 - DNA, 15 bp, Homo sapiens
ggtttggcaaagatc

SEQ ID NO: 606333 - DNA, 15 bp, Homo sapiens
gtttggcaaagatca

SEQ ID NO: 606334 - DNA, 15 bp, Homo sapiens
tttggcaaagatcag

SEQ ID NO: 606335 - DNA, 15 bp, Homo sapiens
ttggcaaagatcagg

SEQ ID NO: 606336 - DNA, 15 bp, Homo sapiens
tggcaaagatcaggt

SEQ ID NO: 606337 - DNA, 15 bp, Homo sapiens
ggcaaagatcaggtg

SEQ ID NO: 606338 - DNA, 15 bp, Homo sapiens
gcaaagatcaggtgg

SEQ ID NO: 606339 - DNA, 15 bp, Homo sapiens
caaagatcaggtggt

SEQ ID NO: 606340 - DNA, 15 bp, Homo sapiens
aaagatcaggtggtt

SEQ ID NO: 606341 - DNA, 15 bp, Homo sapiens
aagatcaggtggttg

SEQ ID NO: 606342 - DNA, 15 bp, Homo sapiens
agatcaggtggttgt

SEQ ID NO: 606343 - DNA, 15 bp, Homo sapiens
gatcaggtggttgta

SEQ ID NO: 606344 - DNA, 15 bp, Homo sapiens
atcaggtggttgtag

SEQ ID NO: 606345 - DNA, 15 bp, Homo sapiens
tcaggtggttgtaga

SEQ ID NO: 606346 - DNA, 15 bp, Homo sapiens
caggtggttgtagat

SEQ ID NO: 606347 - DNA, 15 bp, Homo sapiens
aggtggttgtagatg

SEQ ID NO: 606348 - DNA, 15 bp, Homo sapiens
ggtggttgtagatgt

SEQ ID NO: 606349 - DNA, 15 bp, Homo sapiens
gtggttgtagatgtg

SEQ ID NO: 606350 - DNA, 15 bp, Homo sapiens
tggttgtagatgtgt

SEQ ID NO: 606351 - DNA, 15 bp, Homo sapiens
ggttgtagatgtgtg

SEQ ID NO: 606352 - DNA, 15 bp, Homo sapiens
gttgtagatgtgtgg

SEQ ID NO: 606353 - DNA, 15 bp, Homo sapiens
ttgtagatgtgtggt

SEQ ID NO: 606354 - DNA, 15 bp, Homo sapiens
tgtagatgtgtggtg

SEQ ID NO: 606355 - DNA, 15 bp, Homo sapiens
gtagatgtgtggtgc

SEQ ID NO: 606356 - DNA, 15 bp, Homo sapiens
tagatgtgtggtgct

SEQ ID NO: 606357 - DNA, 15 bp, Homo sapiens
agatgtgtggtgcta

SEQ ID NO: 606358 - DNA, 15 bp, Homo sapiens
gatgtgtggtgctat

SEQ ID NO: 606359 - DNA, 15 bp, Homo sapiens
atgtgtggtgctatt

SEQ ID NO: 606360 - DNA, 15 bp, Homo sapiens
tgtgtggtgctattt

SEQ ID NO: 606361 - DNA, 15 bp, Homo sapiens
gtgtggtgctatttc

SEQ ID NO: 606362 - DNA, 15 bp, Homo sapiens
tgtggtgctatttct

SEQ ID NO: 606363 - DNA, 15 bp, Homo sapiens
gtggtgctatttctg

SEQ ID NO: 606364 - DNA, 15 bp, Homo sapiens
tggtgctatttctga

SEQ ID NO: 606365 - DNA, 15 bp, Homo sapiens
ggtgctatttctgaa

SEQ ID NO: 606366 - DNA, 15 bp, Homo sapiens
gtgctatttctgaag

SEQ ID NO: 606367 - DNA, 15 bp, Homo sapiens
tgctatttctgaagc

SEQ ID NO: 606368 - DNA, 15 bp, Homo sapiens
gctatttctgaagcc

SEQ ID NO: 606369 - DNA, 15 bp, Homo sapiens
ctatttctgaagcct

SEQ ID NO: 606370 - DNA, 15 bp, Homo sapiens
tatttctgaagcctc

SEQ ID NO: 606371 - DNA, 15 bp, Homo sapiens
atttctgaagcctct

SEQ ID NO: 606372 - DNA, 15 bp, Homo sapiens
tttctgaagcctctg

SEQ ID NO: 606373 - DNA, 15 bp, Homo sapiens
ttctgaagcctctgt

SEQ ID NO: 606374 - DNA, 15 bp, Homo sapiens
tctgaagcctctgtt

SEQ ID NO: 606375 - DNA, 15 bp, Homo sapiens
ctgaagcctctgttc

SEQ ID NO: 606376 - DNA, 15 bp, Homo sapiens
tgaagcctctgttct

SEQ ID NO: 606377 - DNA, 15 bp, Homo sapiens
gaagcctctgttctg

SEQ ID NO: 606378 - DNA, 15 bp, Homo sapiens
aagcctctgttctgt

SEQ ID NO: 606379 - DNA, 15 bp, Homo sapiens
agcctctgttctgtt

SEQ ID NO: 606380 - DNA, 15 bp, Homo sapiens
gcctctgttctgttc

SEQ ID NO: 606381 - DNA, 15 bp, Homo sapiens
cctctgttctgttcc

SEQ ID NO: 606382 - DNA, 15 bp, Homo sapiens
ctctgttctgttcca

SEQ ID NO: 606383 - DNA, 15 bp, Homo sapiens
tctgttctgttccat

SEQ ID NO: 606384 - DNA, 15 bp, Homo sapiens
ctgttctgttccatt

SEQ ID NO: 606385 - DNA, 15 bp, Homo sapiens
tgttctgttccattg

SEQ ID NO: 606386 - DNA, 15 bp, Homo sapiens
gttctgttccattgg

SEQ ID NO: 606387 - DNA, 15 bp, Homo sapiens
ttctgttccattggt

SEQ ID NO: 606388 - DNA, 15 bp, Homo sapiens
tctgttccattggtc

SEQ ID NO: 606389 - DNA, 15 bp, Homo sapiens
ctgttccattggtct

SEQ ID NO: 606390 - DNA, 15 bp, Homo sapiens
tgttccattggtcta

SEQ ID NO: 606391 - DNA, 15 bp, Homo sapiens
gttccattggtctat

SEQ ID NO: 606392 - DNA, 15 bp, Homo sapiens
ttccattggtctatg

SEQ ID NO: 606393 - DNA, 15 bp, Homo sapiens
tccattggtctatgt

SEQ ID NO: 606394 - DNA, 15 bp, Homo sapiens
ccattggtctatgtg

SEQ ID NO: 606395 - DNA, 15 bp, Homo sapiens
cattggtctatgtgt

SEQ ID NO: 606396 - DNA, 15 bp, Homo sapiens
attggtctatgtgtc

SEQ ID NO: 606397 - DNA, 15 bp, Homo sapiens
ttggtctatgtgtct

SEQ ID NO: 606398 - DNA, 15 bp, Homo sapiens
tggtctatgtgtctg

SEQ ID NO: 606399 - DNA, 15 bp, Homo sapiens
ggtctatgtgtctgt

SEQ ID NO: 606400 - DNA, 15 bp, Homo sapiens
gtctatgtgtctgtt

SEQ ID NO: 606401 - DNA, 15 bp, Homo sapiens
tctatgtgtctgttt

SEQ ID NO: 606402 - DNA, 15 bp, Homo sapiens
ctatgtgtctgttta

SEQ ID NO: 606403 - DNA, 15 bp, Homo sapiens
tatgtgtctgtttac

SEQ ID NO: 606404 - DNA, 15 bp, Homo sapiens
atgtgtctgtttaca

SEQ ID NO: 606405 - DNA, 15 bp, Homo sapiens
tgtgtctgtttacaa

SEQ ID NO: 606406 - DNA, 15 bp, Homo sapiens
gtgtctgtttacaaa

SEQ ID NO: 606407 - DNA, 15 bp, Homo sapiens
tgtctgtttacaaaa

SEQ ID NO: 606408 - DNA, 15 bp, Homo sapiens
gtctgtttacaaaac

SEQ ID NO: 606409 - DNA, 15 bp, Homo sapiens
tctgtttacaaaaca

SEQ ID NO: 606410 - DNA, 15 bp, Homo sapiens
ctgtttacaaaacag

SEQ ID NO: 606411 - DNA, 15 bp, Homo sapiens
tgtttacaaaacaga

SEQ ID NO: 606412 - DNA, 15 bp, Homo sapiens
gtttacaaaacagat

SEQ ID NO: 606413 - DNA, 15 bp, Homo sapiens
tttacaaaacagatt

SEQ ID NO: 606414 - DNA, 15 bp, Homo sapiens
ttacaaaacagattc

SEQ ID NO: 606415 - DNA, 15 bp, Homo sapiens
tacaaaacagattct

SEQ ID NO: 606416 - DNA, 15 bp, Homo sapiens
acaaaacagattctt

SEQ ID NO: 606417 - DNA, 15 bp, Homo sapiens
caaaacagattctta

SEQ ID NO: 606418 - DNA, 15 bp, Homo sapiens
aaaacagattcttaa

SEQ ID NO: 606419 - DNA, 15 bp, Homo sapiens
aaacagattcttaag

SEQ ID NO: 606420 - DNA, 15 bp, Homo sapiens
aacagattcttaagc

SEQ ID NO: 606421 - DNA, 15 bp, Homo sapiens
acagattcttaagca

SEQ ID NO: 606422 - DNA, 15 bp, Homo sapiens
cagattcttaagcat

SEQ ID NO: 606423 - DNA, 15 bp, Homo sapiens
agattcttaagcatc

SEQ ID NO: 606424 - DNA, 15 bp, Homo sapiens
gattcttaagcatca

SEQ ID NO: 606425 - DNA, 15 bp, Homo sapiens
attcttaagcatcaa

SEQ ID NO: 606426 - DNA, 15 bp, Homo sapiens
ttcttaagcatcaac

SEQ ID NO: 606427 - DNA, 15 bp, Homo sapiens
tcttaagcatcaacc

SEQ ID NO: 606428 - DNA, 15 bp, Homo sapiens
cttaagcatcaaccc

SEQ ID NO: 606429 - DNA, 15 bp, Homo sapiens
ttaagcatcaaccca

SEQ ID NO: 606430 - DNA, 15 bp, Homo sapiens
taagcatcaacccag

SEQ ID NO: 606431 - DNA, 15 bp, Homo sapiens
aagcatcaacccaga

SEQ ID NO: 606432 - DNA, 15 bp, Homo sapiens
agcatcaacccagat

SEQ ID NO: 606433 - DNA, 15 bp, Homo sapiens
gcatcaacccagatc

SEQ ID NO: 606434 - DNA, 15 bp, Homo sapiens
catcaacccagatcg

SEQ ID NO: 606435 - DNA, 15 bp, Homo sapiens
atcaacccagatcga

SEQ ID NO: 606436 - DNA, 15 bp, Homo sapiens
tcaacccagatcgac

SEQ ID NO: 606437 - DNA, 15 bp, Homo sapiens
caacccagatcgact

SEQ ID NO: 606438 - DNA, 15 bp, Homo sapiens
aacccagatcgactg

SEQ ID NO: 606439 - DNA, 15 bp, Homo sapiens
acccagatcgactgg

SEQ ID NO: 606440 - DNA, 15 bp, Homo sapiens
cccagatcgactggc

SEQ ID NO: 606441 - DNA, 15 bp, Homo sapiens
ccagatcgactggct

SEQ ID NO: 606442 - DNA, 15 bp, Homo sapiens
cagatcgactggctc

SEQ ID NO: 606443 - DNA, 15 bp, Homo sapiens
agatcgactggctca

SEQ ID NO: 606444 - DNA, 15 bp, Homo sapiens
gatcgactggctcag

SEQ ID NO: 606445 - DNA, 15 bp, Homo sapiens
atcgactggctcaga

SEQ ID NO: 606446 - DNA, 15 bp, Homo sapiens
tcgactggctcagaa

SEQ ID NO: 606447 - DNA, 15 bp, Homo sapiens
cgactggctcagaat

SEQ ID NO: 606448 - DNA, 15 bp, Homo sapiens
gactggctcagaatt

SEQ ID NO: 606449 - DNA, 15 bp, Homo sapiens
actggctcagaattt

SEQ ID NO: 606450 - DNA, 15 bp, Homo sapiens
ctggctcagaatttc

SEQ ID NO: 606451 - DNA, 15 bp, Homo sapiens
tggctcagaatttcc

SEQ ID NO: 606452 - DNA, 15 bp, Homo sapiens
ggctcagaatttcca

SEQ ID NO: 606453 - DNA, 15 bp, Homo sapiens
gctcagaatttccag

SEQ ID NO: 606454 - DNA, 15 bp, Homo sapiens
ctcagaatttccagg

SEQ ID NO: 606455 - DNA, 15 bp, Homo sapiens
tcagaatttccaggg

SEQ ID NO: 606456 - DNA, 15 bp, Homo sapiens
cagaatttccaggga

SEQ ID NO: 606457 - DNA, 15 bp, Homo sapiens
agaatttccagggaa

SEQ ID NO: 606458 - DNA, 15 bp, Homo sapiens
gaatttccagggaag

SEQ ID NO: 606459 - DNA, 15 bp, Homo sapiens
aatttccagggaaga

SEQ ID NO: 606460 - DNA, 15 bp, Homo sapiens
atttccagggaagag

SEQ ID NO: 606461 - DNA, 15 bp, Homo sapiens
tttccagggaagagg

SEQ ID NO: 606462 - DNA, 15 bp, Homo sapiens
ttccagggaagaggc

SEQ ID NO: 606463 - DNA, 15 bp, Homo sapiens
tccagggaagaggcc

SEQ ID NO: 606464 - DNA, 15 bp, Homo sapiens
ccagggaagaggcct

SEQ ID NO: 606465 - DNA, 15 bp, Homo sapiens
cagggaagaggcctg

SEQ ID NO: 606466 - DNA, 15 bp, Homo sapiens
agggaagaggcctgg

SEQ ID NO: 606467 - DNA, 15 bp, Homo sapiens
gggaagaggcctggt

SEQ ID NO: 606468 - DNA, 15 bp, Homo sapiens
ggaagaggcctggtt

SEQ ID NO: 606469 - DNA, 15 bp, Homo sapiens
gaagaggcctggtta

SEQ ID NO: 606470 - DNA, 15 bp, Homo sapiens
aagaggcctggttat

SEQ ID NO: 606471 - DNA, 15 bp, Homo sapiens
agaggcctggttatc

SEQ ID NO: 606472 - DNA, 15 bp, Homo sapiens
gaggcctggttatct

SEQ ID NO: 606473 - DNA, 15 bp, Homo sapiens
aggcctggttatctg

SEQ ID NO: 606474 - DNA, 15 bp, Homo sapiens
ggcctggttatctgc

SEQ ID NO: 606475 - DNA, 15 bp, Homo sapiens
gcctggttatctgca

SEQ ID NO: 606476 - DNA, 15 bp, Homo sapiens
cctggttatctgcat

SEQ ID NO: 606477 - DNA, 15 bp, Homo sapiens
ctggttatctgcatg

SEQ ID NO: 606478 - DNA, 15 bp, Homo sapiens
tggttatctgcatgt

SEQ ID NO: 606479 - DNA, 15 bp, Homo sapiens
ggttatctgcatgtt

SEQ ID NO: 606480 - DNA, 15 bp, Homo sapiens
gttatctgcatgttt

SEQ ID NO: 606481 - DNA, 15 bp, Homo sapiens
ttatctgcatgttta

SEQ ID NO: 606482 - DNA, 15 bp, Homo sapiens
tatctgcatgtttac

SEQ ID NO: 606483 - DNA, 15 bp, Homo sapiens
atctgcatgtttaca

SEQ ID NO: 606484 - DNA, 15 bp, Homo sapiens
tctgcatgtttacag

SEQ ID NO: 606485 - DNA, 15 bp, Homo sapiens
ctgcatgtttacaga

SEQ ID NO: 606486 - DNA, 15 bp, Homo sapiens
tgcatgtttacagac

SEQ ID NO: 606487 - DNA, 15 bp, Homo sapiens
gcatgtttacagacc

SEQ ID NO: 606488 - DNA, 15 bp, Homo sapiens
catgtttacagacct

SEQ ID NO: 606489 - DNA, 15 bp, Homo sapiens
atgtttacagaccta

SEQ ID NO: 606490 - DNA, 15 bp, Homo sapiens
tgtttacagacctat

SEQ ID NO: 606491 - DNA, 15 bp, Homo sapiens
gtttacagacctatt

SEQ ID NO: 606492 - DNA, 15 bp, Homo sapiens
tttacagacctatta

SEQ ID NO: 606493 - DNA, 15 bp, Homo sapiens
ttacagacctattag

SEQ ID NO: 606494 - DNA, 15 bp, Homo sapiens
tacagacctattaga

SEQ ID NO: 606495 - DNA, 15 bp, Homo sapiens
acagacctattagat

SEQ ID NO: 606496 - DNA, 15 bp, Homo sapiens
cagacctattagatt

SEQ ID NO: 606497 - DNA, 15 bp, Homo sapiens
agacctattagattt

SEQ ID NO: 606498 - DNA, 15 bp, Homo sapiens
gacctattagatttg

SEQ ID NO: 606499 - DNA, 15 bp, Homo sapiens
acctattagatttgt

SEQ ID NO: 606500 - DNA, 15 bp, Homo sapiens
cctattagatttgtg

SEQ ID NO: 606501 - DNA, 15 bp, Homo sapiens
ctattagatttgtgg

SEQ ID NO: 606502 - DNA, 15 bp, Homo sapiens
tattagatttgtggg

SEQ ID NO: 606503 - DNA, 15 bp, Homo sapiens
attagatttgtggga

SEQ ID NO: 606504 - DNA, 15 bp, Homo sapiens
ttagatttgtgggac

SEQ ID NO: 606505 - DNA, 15 bp, Homo sapiens
tagatttgtgggacc

SEQ ID NO: 606506 - DNA, 15 bp, Homo sapiens
agatttgtgggacct

SEQ ID NO: 606507 - DNA, 15 bp, Homo sapiens
gatttgtgggacctg

SEQ ID NO: 606508 - DNA, 15 bp, Homo sapiens
atttgtgggacctgc

SEQ ID NO: 606509 - DNA, 15 bp, Homo sapiens
tttgtgggacctgca

SEQ ID NO: 606510 - DNA, 15 bp, Homo sapiens
ttgtgggacctgcag

SEQ ID NO: 606511 - DNA, 15 bp, Homo sapiens
tgtgggacctgcagt

SEQ ID NO: 606512 - DNA, 15 bp, Homo sapiens
gtgggacctgcagtt

SEQ ID NO: 606513 - DNA, 15 bp, Homo sapiens
tgggacctgcagttc

SEQ ID NO: 606514 - DNA, 15 bp, Homo sapiens
gggacctgcagttcc

SEQ ID NO: 606515 - DNA, 15 bp, Homo sapiens
ggacctgcagttccc

SEQ ID NO: 606516 - DNA, 15 bp, Homo sapiens
gacctgcagttccct

SEQ ID NO: 606517 - DNA, 15 bp, Homo sapiens
acctgcagttccctt

SEQ ID NO: 606518 - DNA, 15 bp, Homo sapiens
cctgcagttcccttg

SEQ ID NO: 606519 - DNA, 15 bp, Homo sapiens
ctgcagttcccttgt

SEQ ID NO: 606520 - DNA, 15 bp, Homo sapiens
tgcagttcccttgta

SEQ ID NO: 606521 - DNA, 15 bp, Homo sapiens
gcagttcccttgtac

SEQ ID NO: 606522 - DNA, 15 bp, Homo sapiens
cagttcccttgtaca

SEQ ID NO: 606523 - DNA, 15 bp, Homo sapiens
agttcccttgtacag

SEQ ID NO: 606524 - DNA, 15 bp, Homo sapiens
gttcccttgtacagt

SEQ ID NO: 606525 - DNA, 15 bp, Homo sapiens
ttcccttgtacagtt

SEQ ID NO: 606526 - DNA, 15 bp, Homo sapiens
tcccttgtacagtta

SEQ ID NO: 606527 - DNA, 15 bp, Homo sapiens
cccttgtacagttag

SEQ ID NO: 606528 - DNA, 15 bp, Homo sapiens
ccttgtacagttagt

SEQ ID NO: 606529 - DNA, 15 bp, Homo sapiens
cttgtacagttagtt

SEQ ID NO: 606530 - DNA, 15 bp, Homo sapiens
ttgtacagttagtta

SEQ ID NO: 606531 - DNA, 15 bp, Homo sapiens
tgtacagttagttac

SEQ ID NO: 606532 - DNA, 15 bp, Homo sapiens
gtacagttagttact

SEQ ID NO: 606533 - DNA, 15 bp, Homo sapiens
tacagttagttactc

SEQ ID NO: 606534 - DNA, 15 bp, Homo sapiens
acagttagttactca

SEQ ID NO: 606535 - DNA, 15 bp, Homo sapiens
cagttagttactcaa

SEQ ID NO: 606536 - DNA, 15 bp, Homo sapiens
agttagttactcaat

SEQ ID NO: 606537 - DNA, 15 bp, Homo sapiens
gttagttactcaatt

SEQ ID NO: 606538 - DNA, 15 bp, Homo sapiens
ttagttactcaatta

SEQ ID NO: 606539 - DNA, 15 bp, Homo sapiens
tagttactcaattaa

SEQ ID NO: 606540 - DNA, 15 bp, Homo sapiens
agttactcaattaac

SEQ ID NO: 606541 - DNA, 15 bp, Homo sapiens
gttactcaattaaca

SEQ ID NO: 606542 - DNA, 15 bp, Homo sapiens
ttactcaattaacat

SEQ ID NO: 606543 - DNA, 15 bp, Homo sapiens
tactcaattaacatc

SEQ ID NO: 606544 - DNA, 15 bp, Homo sapiens
actcaattaacatct

SEQ ID NO: 606545 - DNA, 15 bp, Homo sapiens
ctcaattaacatctc

SEQ ID NO: 606546 - DNA, 15 bp, Homo sapiens
tcaattaacatctcc

SEQ ID NO: 606547 - DNA, 15 bp, Homo sapiens
caattaacatctccc

SEQ ID NO: 606548 - DNA, 15 bp, Homo sapiens
aattaacatctccct

SEQ ID NO: 606549 - DNA, 15 bp, Homo sapiens
attaacatctccctc

SEQ ID NO: 606550 - DNA, 15 bp, Homo sapiens
ttaacatctccctcc

SEQ ID NO: 606551 - DNA, 15 bp, Homo sapiens
taacatctccctcct

SEQ ID NO: 606552 - DNA, 15 bp, Homo sapiens
aacatctccctcctc

SEQ ID NO: 606553 - DNA, 15 bp, Homo sapiens
acatctccctcctct

SEQ ID NO: 606554 - DNA, 15 bp, Homo sapiens
catctccctcctctc

SEQ ID NO: 606555 - DNA, 15 bp, Homo sapiens
atctccctcctctca

SEQ ID NO: 606556 - DNA, 15 bp, Homo sapiens
tctccctcctctcat

SEQ ID NO: 606557 - DNA, 15 bp, Homo sapiens
ctccctcctctcatg

SEQ ID NO: 606558 - DNA, 15 bp, Homo sapiens
tccctcctctcatgg

SEQ ID NO: 606559 - DNA, 15 bp, Homo sapiens
ccctcctctcatggt

SEQ ID NO: 606560 - DNA, 15 bp, Homo sapiens
cctcctctcatggtg

SEQ ID NO: 606561 - DNA, 15 bp, Homo sapiens
ctcctctcatggtgc

SEQ ID NO: 606562 - DNA, 15 bp, Homo sapiens
tcctctcatggtgcc

SEQ ID NO: 606563 - DNA, 15 bp, Homo sapiens
cctctcatggtgcct

SEQ ID NO: 606564 - DNA, 15 bp, Homo sapiens
ctctcatggtgcctc

SEQ ID NO: 606565 - DNA, 15 bp, Homo sapiens
tctcatggtgcctct

SEQ ID NO: 606566 - DNA, 15 bp, Homo sapiens
ctcatggtgcctcta

SEQ ID NO: 606567 - DNA, 15 bp, Homo sapiens
tcatggtgcctctac

SEQ ID NO: 606568 - DNA, 15 bp, Homo sapiens
catggtgcctctacc

SEQ ID NO: 606569 - DNA, 15 bp, Homo sapiens
atggtgcctctacct

SEQ ID NO: 606570 - DNA, 15 bp, Homo sapiens
tggtgcctctacctg

SEQ ID NO: 606571 - DNA, 15 bp, Homo sapiens
ggtgcctctacctgc

SEQ ID NO: 606572 - DNA, 15 bp, Homo sapiens
gtgcctctacctgct

SEQ ID NO: 606573 - DNA, 15 bp, Homo sapiens
tgcctctacctgcta

SEQ ID NO: 606574 - DNA, 15 bp, Homo sapiens
gcctctacctgctaa

SEQ ID NO: 606575 - DNA, 15 bp, Homo sapiens
cctctacctgctaag

SEQ ID NO: 606576 - DNA, 15 bp, Homo sapiens
ctctacctgctaagc

SEQ ID NO: 606577 - DNA, 15 bp, Homo sapiens
tctacctgctaagcc

SEQ ID NO: 606578 - DNA, 15 bp, Homo sapiens
ctacctgctaagccc

SEQ ID NO: 606579 - DNA, 15 bp, Homo sapiens
tacctgctaagccct

SEQ ID NO: 606580 - DNA, 15 bp, Homo sapiens
acctgctaagccctt

SEQ ID NO: 606581 - DNA, 15 bp, Homo sapiens
cctgctaagccctta

SEQ ID NO: 606582 - DNA, 15 bp, Homo sapiens
ctgctaagcccttat

SEQ ID NO: 606583 - DNA, 15 bp, Homo sapiens
tgctaagcccttatt

SEQ ID NO: 606584 - DNA, 15 bp, Homo sapiens
gctaagcccttattc

SEQ ID NO: 606585 - DNA, 15 bp, Homo sapiens
ctaagcccttattcc

SEQ ID NO: 606586 - DNA, 15 bp, Homo sapiens
taagcccttattccc

SEQ ID NO: 606587 - DNA, 15 bp, Homo sapiens
aagcccttattccca

SEQ ID NO: 606588 - DNA, 15 bp, Homo sapiens
agcccttattcccag

SEQ ID NO: 606589 - DNA, 15 bp, Homo sapiens
gcccttattcccagc

SEQ ID NO: 606590 - DNA, 15 bp, Homo sapiens
cccttattcccagcc

SEQ ID NO: 606591 - DNA, 15 bp, Homo sapiens
ccttattcccagcca

SEQ ID NO: 606592 - DNA, 15 bp, Homo sapiens
cttattcccagccag

SEQ ID NO: 606593 - DNA, 15 bp, Homo sapiens
ttattcccagccagg

SEQ ID NO: 606594 - DNA, 15 bp, Homo sapiens
tattcccagccaggc

SEQ ID NO: 606595 - DNA, 15 bp, Homo sapiens
attcccagccaggcc

SEQ ID NO: 606596 - DNA, 15 bp, Homo sapiens
ttcccagccaggccc

SEQ ID NO: 606597 - DNA, 15 bp, Homo sapiens
tcccagccaggccca

SEQ ID NO: 606598 - DNA, 15 bp, Homo sapiens
cccagccaggcccac

SEQ ID NO: 606599 - DNA, 15 bp, Homo sapiens
ccagccaggcccacc

SEQ ID NO: 606600 - DNA, 15 bp, Homo sapiens
cagccaggcccacca

SEQ ID NO: 606601 - DNA, 15 bp, Homo sapiens
agccaggcccaccac

SEQ ID NO: 606602 - DNA, 15 bp, Homo sapiens
gccaggcccaccacc

SEQ ID NO: 606603 - DNA, 15 bp, Homo sapiens
ccaggcccaccacca

SEQ ID NO: 606604 - DNA, 15 bp, Homo sapiens
caggcccaccaccat

SEQ ID NO: 606605 - DNA, 15 bp, Homo sapiens
aggcccaccaccatc

SEQ ID NO: 606606 - DNA, 15 bp, Homo sapiens
ggcccaccaccatcc

SEQ ID NO: 606607 - DNA, 15 bp, Homo sapiens
gcccaccaccatcca

SEQ ID NO: 606608 - DNA, 15 bp, Homo sapiens
cccaccaccatccac

SEQ ID NO: 606609 - DNA, 15 bp, Homo sapiens
ccaccaccatccacc

SEQ ID NO: 606610 - DNA, 15 bp, Homo sapiens
caccaccatccaccc

SEQ ID NO: 606611 - DNA, 15 bp, Homo sapiens
accaccatccaccca

SEQ ID NO: 606612 - DNA, 15 bp, Homo sapiens
ccaccatccacccac

SEQ ID NO: 606613 - DNA, 15 bp, Homo sapiens
caccatccacccact

SEQ ID NO: 606614 - DNA, 15 bp, Homo sapiens
accatccacccactg

SEQ ID NO: 606615 - DNA, 15 bp, Homo sapiens
ccatccacccactgc

SEQ ID NO: 606616 - DNA, 15 bp, Homo sapiens
catccacccactgct

SEQ ID NO: 606617 - DNA, 15 bp, Homo sapiens
atccacccactgctg

SEQ ID NO: 606618 - DNA, 15 bp, Homo sapiens
tccacccactgctgt

SEQ ID NO: 606619 - DNA, 15 bp, Homo sapiens
ccacccactgctgtt

SEQ ID NO: 606620 - DNA, 15 bp, Homo sapiens
cacccactgctgtta

SEQ ID NO: 606621 - DNA, 15 bp, Homo sapiens
acccactgctgttat

SEQ ID NO: 606622 - DNA, 15 bp, Homo sapiens
cccactgctgttata

SEQ ID NO: 606623 - DNA, 15 bp, Homo sapiens
ccactgctgttataa

SEQ ID NO: 606624 - DNA, 15 bp, Homo sapiens
cactgctgttataac

SEQ ID NO: 606625 - DNA, 15 bp, Homo sapiens
actgctgttataaca

SEQ ID NO: 606626 - DNA, 15 bp, Homo sapiens
ctgctgttataacat

SEQ ID NO: 606627 - DNA, 15 bp, Homo sapiens
tgctgttataacata

SEQ ID NO: 606628 - DNA, 15 bp, Homo sapiens
gctgttataacataa

SEQ ID NO: 606629 - DNA, 15 bp, Homo sapiens
ctgttataacataag

SEQ ID NO: 606630 - DNA, 15 bp, Homo sapiens
tgttataacataagc

SEQ ID NO: 606631 - DNA, 15 bp, Homo sapiens
gttataacataagca

SEQ ID NO: 606632 - DNA, 15 bp, Homo sapiens
ttataacataagcag

SEQ ID NO: 606633 - DNA, 15 bp, Homo sapiens
tataacataagcagg

SEQ ID NO: 606634 - DNA, 15 bp, Homo sapiens
ataacataagcagga

SEQ ID NO: 606635 - DNA, 15 bp, Homo sapiens
taacataagcaggac

SEQ ID NO: 606636 - DNA, 15 bp, Homo sapiens
aacataagcaggacc

SEQ ID NO: 606637 - DNA, 15 bp, Homo sapiens
acataagcaggacct

SEQ ID NO: 606638 - DNA, 15 bp, Homo sapiens
cataagcaggacctg

SEQ ID NO: 606639 - DNA, 15 bp, Homo sapiens
ataagcaggacctgt

SEQ ID NO: 606640 - DNA, 15 bp, Homo sapiens
taagcaggacctgtg

SEQ ID NO: 606641 - DNA, 15 bp, Homo sapiens
aagcaggacctgtgc

SEQ ID NO: 606642 - DNA, 15 bp, Homo sapiens
agcaggacctgtgcg

SEQ ID NO: 606643 - DNA, 15 bp, Homo sapiens
gcaggacctgtgcga

SEQ ID NO: 606644 - DNA, 15 bp, Homo sapiens
caggacctgtgcgag

SEQ ID NO: 606645 - DNA, 15 bp, Homo sapiens
aggacctgtgcgagg

SEQ ID NO: 606646 - DNA, 15 bp, Homo sapiens
ggacctgtgcgaggg

SEQ ID NO: 606647 - DNA, 15 bp, Homo sapiens
gacctgtgcgagggg

SEQ ID NO: 606648 - DNA, 15 bp, Homo sapiens
acctgtgcgaggggg

SEQ ID NO: 606649 - DNA, 15 bp, Homo sapiens
cctgtgcgagggggt

SEQ ID NO: 606650 - DNA, 15 bp, Homo sapiens
ctgtgcgagggggtg

SEQ ID NO: 606651 - DNA, 15 bp, Homo sapiens
tgtgcgagggggtgt

SEQ ID NO: 606652 - DNA, 15 bp, Homo sapiens
gtgcgagggggtgtg

SEQ ID NO: 606653 - DNA, 15 bp, Homo sapiens
tgcgagggggtgtgg

SEQ ID NO: 606654 - DNA, 15 bp, Homo sapiens
gcgagggggtgtgga

SEQ ID NO: 606655 - DNA, 15 bp, Homo sapiens
cgagggggtgtggac

SEQ ID NO: 606656 - DNA, 15 bp, Homo sapiens
gagggggtgtggacg

SEQ ID NO: 606657 - DNA, 15 bp, Homo sapiens
agggggtgtggacgg

SEQ ID NO: 606658 - DNA, 15 bp, Homo sapiens
gggggtgtggacgga

SEQ ID NO: 606659 - DNA, 15 bp, Homo sapiens
ggggtgtggacggag

SEQ ID NO: 606660 - DNA, 15 bp, Homo sapiens
gggtgtggacggagg

SEQ ID NO: 606661 - DNA, 15 bp, Homo sapiens
ggtgtggacggagga

SEQ ID NO: 606662 - DNA, 15 bp, Homo sapiens
gtgtggacggaggag

SEQ ID NO: 606663 - DNA, 15 bp, Homo sapiens
tgtggacggaggaga

SEQ ID NO: 606664 - DNA, 15 bp, Homo sapiens
gtggacggaggagag

SEQ ID NO: 606665 - DNA, 15 bp, Homo sapiens
tggacggaggagaga

SEQ ID NO: 606666 - DNA, 15 bp, Homo sapiens
ggacggaggagagag

SEQ ID NO: 606667 - DNA, 15 bp, Homo sapiens
gacggaggagagagg

SEQ ID NO: 606668 - DNA, 15 bp, Homo sapiens
acggaggagagaggc

SEQ ID NO: 606669 - DNA, 15 bp, Homo sapiens
cggaggagagaggct

SEQ ID NO: 606670 - DNA, 15 bp, Homo sapiens
ggaggagagaggctc

SEQ ID NO: 606671 - DNA, 15 bp, Homo sapiens
gaggagagaggctct

SEQ ID NO: 606672 - DNA, 15 bp, Homo sapiens
aggagagaggctctg

SEQ ID NO: 606673 - DNA, 15 bp, Homo sapiens
ggagagaggctctgt

SEQ ID NO: 606674 - DNA, 15 bp, Homo sapiens
gagagaggctctgtt

SEQ ID NO: 606675 - DNA, 15 bp, Homo sapiens
agagaggctctgttg

SEQ ID NO: 606676 - DNA, 15 bp, Homo sapiens
gagaggctctgttgc

SEQ ID NO: 606677 - DNA, 15 bp, Homo sapiens
agaggctctgttgct

SEQ ID NO: 606678 - DNA, 15 bp, Homo sapiens
gaggctctgttgctt

SEQ ID NO: 606679 - DNA, 15 bp, Homo sapiens
aggctctgttgcttc

SEQ ID NO: 606680 - DNA, 15 bp, Homo sapiens
ggctctgttgcttca

SEQ ID NO: 606681 - DNA, 15 bp, Homo sapiens
gctctgttgcttcat

SEQ ID NO: 606682 - DNA, 15 bp, Homo sapiens
ctctgttgcttcatt

SEQ ID NO: 606683 - DNA, 15 bp, Homo sapiens
tctgttgcttcattt

SEQ ID NO: 606684 - DNA, 15 bp, Homo sapiens
ctgttgcttcatttg

SEQ ID NO: 606685 - DNA, 15 bp, Homo sapiens
tgttgcttcatttgt

SEQ ID NO: 606686 - DNA, 15 bp, Homo sapiens
gttgcttcatttgtg

SEQ ID NO: 606687 - DNA, 15 bp, Homo sapiens
ttgcttcatttgtgc

SEQ ID NO: 606688 - DNA, 15 bp, Homo sapiens
tgcttcatttgtgca

SEQ ID NO: 606689 - DNA, 15 bp, Homo sapiens
gcttcatttgtgcag

SEQ ID NO: 606690 - DNA, 15 bp, Homo sapiens
cttcatttgtgcagc

SEQ ID NO: 606691 - DNA, 15 bp, Homo sapiens
ttcatttgtgcagca

SEQ ID NO: 606692 - DNA, 15 bp, Homo sapiens
tcatttgtgcagcat

SEQ ID NO: 606693 - DNA, 15 bp, Homo sapiens
catttgtgcagcatg

SEQ ID NO: 606694 - DNA, 15 bp, Homo sapiens
atttgtgcagcatgg

SEQ ID NO: 606695 - DNA, 15 bp, Homo sapiens
tttgtgcagcatgga

SEQ ID NO: 606696 - DNA, 15 bp, Homo sapiens
ttgtgcagcatggag

SEQ ID NO: 606697 - DNA, 15 bp, Homo sapiens
tgtgcagcatggagt

SEQ ID NO: 606698 - DNA, 15 bp, Homo sapiens
gtgcagcatggagtt

SEQ ID NO: 606699 - DNA, 15 bp, Homo sapiens
tgcagcatggagttc

SEQ ID NO: 606700 - DNA, 15 bp, Homo sapiens
gcagcatggagttca

SEQ ID NO: 606701 - DNA, 15 bp, Homo sapiens
cagcatggagttcag

SEQ ID NO: 606702 - DNA, 15 bp, Homo sapiens
agcatggagttcagt

SEQ ID NO: 606703 - DNA, 15 bp, Homo sapiens
gcatggagttcagtg

SEQ ID NO: 606704 - DNA, 15 bp, Homo sapiens
catggagttcagtgg

SEQ ID NO: 606705 - DNA, 15 bp, Homo sapiens
atggagttcagtggt

SEQ ID NO: 606706 - DNA, 15 bp, Homo sapiens
tggagttcagtggtt

SEQ ID NO: 606707 - DNA, 15 bp, Homo sapiens
ggagttcagtggttc

SEQ ID NO: 606708 - DNA, 15 bp, Homo sapiens
gagttcagtggttct

SEQ ID NO: 606709 - DNA, 15 bp, Homo sapiens
agttcagtggttctc

SEQ ID NO: 606710 - DNA, 15 bp, Homo sapiens
gttcagtggttctca

SEQ ID NO: 606711 - DNA, 15 bp, Homo sapiens
ttcagtggttctcac

SEQ ID NO: 606712 - DNA, 15 bp, Homo sapiens
tcagtggttctcaca

SEQ ID NO: 606713 - DNA, 15 bp, Homo sapiens
cagtggttctcacaa

SEQ ID NO: 606714 - DNA, 15 bp, Homo sapiens
agtggttctcacaat

SEQ ID NO: 606715 - DNA, 15 bp, Homo sapiens
gtggttctcacaatg

SEQ ID NO: 606716 - DNA, 15 bp, Homo sapiens
tggttctcacaatgt

SEQ ID NO: 606717 - DNA, 15 bp, Homo sapiens
ggttctcacaatgtt

SEQ ID NO: 606718 - DNA, 15 bp, Homo sapiens
gttctcacaatgttt

SEQ ID NO: 606719 - DNA, 15 bp, Homo sapiens
ttctcacaatgtttt

SEQ ID NO: 606720 - DNA, 15 bp, Homo sapiens
tctcacaatgttttt

SEQ ID NO: 606721 - DNA, 15 bp, Homo sapiens
ctcacaatgtttttg

SEQ ID NO: 606722 - DNA, 15 bp, Homo sapiens
tcacaatgtttttgc

SEQ ID NO: 606723 - DNA, 15 bp, Homo sapiens
cacaatgtttttgca

SEQ ID NO: 606724 - DNA, 15 bp, Homo sapiens
acaatgtttttgcaa

SEQ ID NO: 606725 - DNA, 15 bp, Homo sapiens
caatgtttttgcaaa

SEQ ID NO: 606726 - DNA, 15 bp, Homo sapiens
aatgtttttgcaaag

SEQ ID NO: 606727 - DNA, 15 bp, Homo sapiens
atgtttttgcaaagt

SEQ ID NO: 606728 - DNA, 15 bp, Homo sapiens
tgtttttgcaaagta

SEQ ID NO: 606729 - DNA, 15 bp, Homo sapiens
gtttttgcaaagtat

SEQ ID NO: 606730 - DNA, 15 bp, Homo sapiens
tttttgcaaagtata

SEQ ID NO: 606731 - DNA, 15 bp, Homo sapiens
ttttgcaaagtatat

SEQ ID NO: 606732 - DNA, 15 bp, Homo sapiens
tttgcaaagtatata

SEQ ID NO: 606733 - DNA, 15 bp, Homo sapiens
ttgcaaagtatataa

SEQ ID NO: 606734 - DNA, 15 bp, Homo sapiens
tgcaaagtatataaa

SEQ ID NO: 606735 - DNA, 15 bp, Homo sapiens
gcaaagtatataaag

SEQ ID NO: 606736 - DNA, 15 bp, Homo sapiens
caaagtatataaaga

SEQ ID NO: 606737 - DNA, 15 bp, Homo sapiens
aaagtatataaagaa

SEQ ID NO: 606738 - DNA, 15 bp, Homo sapiens
aagtatataaagaat

SEQ ID NO: 606739 - DNA, 15 bp, Homo sapiens
agtatataaagaata

SEQ ID NO: 606740 - DNA, 15 bp, Homo sapiens
gtatataaagaatac

SEQ ID NO: 606741 - DNA, 15 bp, Homo sapiens
tatataaagaatact

SEQ ID NO: 606742 - DNA, 15 bp, Homo sapiens
atataaagaatactc

SEQ ID NO: 606743 - DNA, 15 bp, Homo sapiens
tataaagaatactcc

SEQ ID NO: 606744 - DNA, 15 bp, Homo sapiens
ataaagaatactcct

SEQ ID NO: 606745 - DNA, 15 bp, Homo sapiens
taaagaatactcctt

SEQ ID NO: 606746 - DNA, 15 bp, Homo sapiens
aaagaatactccttg

SEQ ID NO: 606747 - DNA, 15 bp, Homo sapiens
aagaatactccttgt

SEQ ID NO: 606748 - DNA, 15 bp, Homo sapiens
agaatactccttgtc

SEQ ID NO: 606749 - DNA, 15 bp, Homo sapiens
gaatactccttgtct

SEQ ID NO: 606750 - DNA, 15 bp, Homo sapiens
aatactccttgtcta

SEQ ID NO: 606751 - DNA, 15 bp, Homo sapiens
atactccttgtctac

SEQ ID NO: 606752 - DNA, 15 bp, Homo sapiens
tactccttgtctact

SEQ ID NO: 606753 - DNA, 15 bp, Homo sapiens
actccttgtctactt

SEQ ID NO: 606754 - DNA, 15 bp, Homo sapiens
ctccttgtctacttg

SEQ ID NO: 606755 - DNA, 15 bp, Homo sapiens
tccttgtctacttga

SEQ ID NO: 606756 - DNA, 15 bp, Homo sapiens
ccttgtctacttgac

SEQ ID NO: 606757 - DNA, 15 bp, Homo sapiens
cttgtctacttgaca

SEQ ID NO: 606758 - DNA, 15 bp, Homo sapiens
ttgtctacttgacat

SEQ ID NO: 606759 - DNA, 15 bp, Homo sapiens
tgtctacttgacatt

SEQ ID NO: 606760 - DNA, 15 bp, Homo sapiens
gtctacttgacattc

SEQ ID NO: 606761 - DNA, 15 bp, Homo sapiens
tctacttgacattcg

SEQ ID NO: 606762 - DNA, 15 bp, Homo sapiens
ctacttgacattcgt

SEQ ID NO: 606763 - DNA, 15 bp, Homo sapiens
tacttgacattcgta

SEQ ID NO: 606764 - DNA, 15 bp, Homo sapiens
acttgacattcgtat

SEQ ID NO: 606765 - DNA, 15 bp, Homo sapiens
cttgacattcgtatc

SEQ ID NO: 606766 - DNA, 15 bp, Homo sapiens
ttgacattcgtatcg

SEQ ID NO: 606767 - DNA, 15 bp, Homo sapiens
tgacattcgtatcgt

SEQ ID NO: 606768 - DNA, 15 bp, Homo sapiens
gacattcgtatcgtg

SEQ ID NO: 606769 - DNA, 15 bp, Homo sapiens
acattcgtatcgtga

SEQ ID NO: 606770 - DNA, 15 bp, Homo sapiens
cattcgtatcgtgac

SEQ ID NO: 606771 - DNA, 15 bp, Homo sapiens
attcgtatcgtgaca

SEQ ID NO: 606772 - DNA, 15 bp, Homo sapiens
ttcgtatcgtgacat

SEQ ID NO: 606773 - DNA, 15 bp, Homo sapiens
tcgtatcgtgacata

SEQ ID NO: 606774 - DNA, 15 bp, Homo sapiens
cgtatcgtgacataa

SEQ ID NO: 606775 - DNA, 15 bp, Homo sapiens
gtatcgtgacataaa

SEQ ID NO: 606776 - DNA, 15 bp, Homo sapiens
tatcgtgacataaat

SEQ ID NO: 606777 - DNA, 15 bp, Homo sapiens
atcgtgacataaatg

SEQ ID NO: 606778 - DNA, 15 bp, Homo sapiens
tcgtgacataaatgt

SEQ ID NO: 606779 - DNA, 15 bp, Homo sapiens
cgtgacataaatgtc

SEQ ID NO: 606780 - DNA, 15 bp, Homo sapiens
gtgacataaatgtct

SEQ ID NO: 606781 - DNA, 15 bp, Homo sapiens
tgacataaatgtctt

SEQ ID NO: 606782 - DNA, 15 bp, Homo sapiens
gacataaatgtcttg

SEQ ID NO: 606783 - DNA, 15 bp, Homo sapiens
acataaatgtcttgt

SEQ ID NO: 606784 - DNA, 15 bp, Homo sapiens
cataaatgtcttgtt

SEQ ID NO: 606785 - DNA, 15 bp, Homo sapiens
ataaatgtcttgttt

SEQ ID NO: 606786 - DNA, 15 bp, Homo sapiens
taaatgtcttgtttt

SEQ ID NO: 606787 - DNA, 15 bp, Homo sapiens
aaatgtcttgttttc

SEQ ID NO: 606788 - DNA, 15 bp, Homo sapiens
aatgtcttgttttcc

SEQ ID NO: 606789 - DNA, 15 bp, Homo sapiens
atgtcttgttttcca

SEQ ID NO: 606790 - DNA, 15 bp, Homo sapiens
tgtcttgttttccag

SEQ ID NO: 606791 - DNA, 15 bp, Homo sapiens
gtcttgttttccaga

SEQ ID NO: 606792 - DNA, 15 bp, Homo sapiens
tcttgttttccagaa

SEQ ID NO: 606793 - DNA, 15 bp, Homo sapiens
cttgttttccagaag

SEQ ID NO: 606794 - DNA, 15 bp, Homo sapiens
ttgttttccagaagg

SEQ ID NO: 606795 - DNA, 15 bp, Homo sapiens
tgttttccagaagga

SEQ ID NO: 606796 - DNA, 15 bp, Homo sapiens
gttttccagaaggat

SEQ ID NO: 606797 - DNA, 15 bp, Homo sapiens
ttttccagaaggatt

SEQ ID NO: 606798 - DNA, 15 bp, Homo sapiens
tttccagaaggatta

SEQ ID NO: 606799 - DNA, 15 bp, Homo sapiens
ttccagaaggattat

SEQ ID NO: 606800 - DNA, 15 bp, Homo sapiens
tccagaaggattatt

SEQ ID NO: 606801 - DNA, 15 bp, Homo sapiens
ccagaaggattattt

SEQ ID NO: 606802 - DNA, 15 bp, Homo sapiens
cagaaggattatttt

SEQ ID NO: 606803 - DNA, 15 bp, Homo sapiens
agaaggattattttt

SEQ ID NO: 606804 - DNA, 15 bp, Homo sapiens
gaaggattatttttt

SEQ ID NO: 606805 - DNA, 15 bp, Homo sapiens
aaggattattttttc

SEQ ID NO: 606806 - DNA, 15 bp, Homo sapiens
aggattattttttcc

SEQ ID NO: 606807 - DNA, 15 bp, Homo sapiens
ggattattttttcca

SEQ ID NO: 606808 - DNA, 15 bp, Homo sapiens
gattattttttccaa

SEQ ID NO: 606809 - DNA, 15 bp, Homo sapiens
attattttttccaag

SEQ ID NO: 606810 - DNA, 15 bp, Homo sapiens
ttattttttccaagc

SEQ ID NO: 606811 - DNA, 15 bp, Homo sapiens
tattttttccaagca

SEQ ID NO: 606812 - DNA, 15 bp, Homo sapiens
attttttccaagcag

SEQ ID NO: 606813 - DNA, 15 bp, Homo sapiens
ttttttccaagcagc

SEQ ID NO: 606814 - DNA, 15 bp, Homo sapiens
tttttccaagcagct

SEQ ID NO: 606815 - DNA, 15 bp, Homo sapiens
ttttccaagcagctt

SEQ ID NO: 606816 - DNA, 15 bp, Homo sapiens
tttccaagcagcttg

SEQ ID NO: 606817 - DNA, 15 bp, Homo sapiens
ttccaagcagcttgt

SEQ ID NO: 606818 - DNA, 15 bp, Homo sapiens
tccaagcagcttgtt

SEQ ID NO: 606819 - DNA, 15 bp, Homo sapiens
ccaagcagcttgttc

SEQ ID NO: 606820 - DNA, 15 bp, Homo sapiens
caagcagcttgttcc

SEQ ID NO: 606821 - DNA, 15 bp, Homo sapiens
aagcagcttgttcct

SEQ ID NO: 606822 - DNA, 15 bp, Homo sapiens
agcagcttgttccta

SEQ ID NO: 606823 - DNA, 15 bp, Homo sapiens
gcagcttgttcctaa

SEQ ID NO: 606824 - DNA, 15 bp, Homo sapiens
cagcttgttcctaat

SEQ ID NO: 606825 - DNA, 15 bp, Homo sapiens
agcttgttcctaatg

SEQ ID NO: 606826 - DNA, 15 bp, Homo sapiens
gcttgttcctaatgc

SEQ ID NO: 606827 - DNA, 15 bp, Homo sapiens
cttgttcctaatgca

SEQ ID NO: 606828 - DNA, 15 bp, Homo sapiens
ttgttcctaatgcag

SEQ ID NO: 606829 - DNA, 15 bp, Homo sapiens
tgttcctaatgcagc

SEQ ID NO: 606830 - DNA, 15 bp, Homo sapiens
gttcctaatgcagcc

SEQ ID NO: 606831 - DNA, 15 bp, Homo sapiens
ttcctaatgcagccc

SEQ ID NO: 606832 - DNA, 15 bp, Homo sapiens
tcctaatgcagcccc

SEQ ID NO: 606833 - DNA, 15 bp, Homo sapiens
cctaatgcagcccca

SEQ ID NO: 606834 - DNA, 15 bp, Homo sapiens
ctaatgcagccccag

SEQ ID NO: 606835 - DNA, 15 bp, Homo sapiens
taatgcagccccagg

SEQ ID NO: 606836 - DNA, 15 bp, Homo sapiens
aatgcagccccaggc

SEQ ID NO: 606837 - DNA, 15 bp, Homo sapiens
atgcagccccaggca

SEQ ID NO: 606838 - DNA, 15 bp, Homo sapiens
tgcagccccaggcac

SEQ ID NO: 606839 - DNA, 15 bp, Homo sapiens
gcagccccaggcacc

SEQ ID NO: 606840 - DNA, 15 bp, Homo sapiens
cagccccaggcacca

SEQ ID NO: 606841 - DNA, 15 bp, Homo sapiens
agccccaggcaccaa

SEQ ID NO: 606842 - DNA, 15 bp, Homo sapiens
gccccaggcaccaaa

SEQ ID NO: 606843 - DNA, 15 bp, Homo sapiens
ccccaggcaccaaac

SEQ ID NO: 606844 - DNA, 15 bp, Homo sapiens
cccaggcaccaaaca

SEQ ID NO: 606845 - DNA, 15 bp, Homo sapiens
ccaggcaccaaacag

SEQ ID NO: 606846 - DNA, 15 bp, Homo sapiens
caggcaccaaacaga

SEQ ID NO: 606847 - DNA, 15 bp, Homo sapiens
aggcaccaaacagat

SEQ ID NO: 606848 - DNA, 15 bp, Homo sapiens
ggcaccaaacagata

SEQ ID NO: 606849 - DNA, 15 bp, Homo sapiens
gcaccaaacagatac

SEQ ID NO: 606850 - DNA, 15 bp, Homo sapiens
caccaaacagatact

SEQ ID NO: 606851 - DNA, 15 bp, Homo sapiens
accaaacagatactt

SEQ ID NO: 606852 - DNA, 15 bp, Homo sapiens
ccaaacagatactta

SEQ ID NO: 606853 - DNA, 15 bp, Homo sapiens
caaacagatacttaa

SEQ ID NO: 606854 - DNA, 15 bp, Homo sapiens
aaacagatacttaaa

SEQ ID NO: 606855 - DNA, 15 bp, Homo sapiens
aacagatacttaaaa

SEQ ID NO: 606856 - DNA, 15 bp, Homo sapiens
acagatacttaaaat

SEQ ID NO: 606857 - DNA, 15 bp, Homo sapiens
cagatacttaaaata

SEQ ID NO: 606858 - DNA, 15 bp, Homo sapiens
agatacttaaaatat

SEQ ID NO: 606859 - DNA, 15 bp, Homo sapiens
gatacttaaaatata

SEQ ID NO: 606860 - DNA, 15 bp, Homo sapiens
atacttaaaatatat

SEQ ID NO: 606861 - DNA, 15 bp, Homo sapiens
tacttaaaatatatt

SEQ ID NO: 606862 - DNA, 15 bp, Homo sapiens
acttaaaatatatta

SEQ ID NO: 606863 - DNA, 15 bp, Homo sapiens
cttaaaatatattaa

SEQ ID NO: 606864 - DNA, 15 bp, Homo sapiens
ttaaaatatattaat

SEQ ID NO: 606865 - DNA, 15 bp, Homo sapiens
taaaatatattaatt

SEQ ID NO: 606866 - DNA, 15 bp, Homo sapiens
aaaatatattaattg

SEQ ID NO: 606867 - DNA, 15 bp, Homo sapiens
aaatatattaattgc

SEQ ID NO: 606868 - DNA, 15 bp, Homo sapiens
aatatattaattgct

SEQ ID NO: 606869 - DNA, 15 bp, Homo sapiens
atatattaattgctt

SEQ ID NO: 606870 - DNA, 15 bp, Homo sapiens
tatattaattgctta

SEQ ID NO: 606871 - DNA, 15 bp, Homo sapiens
atattaattgcttaa

SEQ ID NO: 606872 - DNA, 15 bp, Homo sapiens
tattaattgcttaaa

SEQ ID NO: 606873 - DNA, 15 bp, Homo sapiens
attaattgcttaaat

SEQ ID NO: 606874 - DNA, 15 bp, Homo sapiens
ttaattgcttaaatg

SEQ ID NO: 606875 - DNA, 15 bp, Homo sapiens
taattgcttaaatgg

SEQ ID NO: 606876 - DNA, 15 bp, Homo sapiens
aattgcttaaatggt

SEQ ID NO: 606877 - DNA, 15 bp, Homo sapiens
attgcttaaatggtt

SEQ ID NO: 606878 - DNA, 15 bp, Homo sapiens
ttgcttaaatggtta

SEQ ID NO: 606879 - DNA, 15 bp, Homo sapiens
tgcttaaatggttaa

SEQ ID NO: 606880 - DNA, 15 bp, Homo sapiens
gcttaaatggttaag

SEQ ID NO: 606881 - DNA, 15 bp, Homo sapiens
cttaaatggttaaga

SEQ ID NO: 606882 - DNA, 15 bp, Homo sapiens
ttaaatggttaagaa

SEQ ID NO: 606883 - DNA, 15 bp, Homo sapiens
taaatggttaagaat

SEQ ID NO: 606884 - DNA, 15 bp, Homo sapiens
aaatggttaagaatt

SEQ ID NO: 606885 - DNA, 15 bp, Homo sapiens
aatggttaagaattc

SEQ ID NO: 606886 - DNA, 15 bp, Homo sapiens
atggttaagaattca

SEQ ID NO: 606887 - DNA, 15 bp, Homo sapiens
tggttaagaattcag

SEQ ID NO: 606888 - DNA, 15 bp, Homo sapiens
ggttaagaattcagt

SEQ ID NO: 606889 - DNA, 15 bp, Homo sapiens
gttaagaattcagtc

SEQ ID NO: 606890 - DNA, 15 bp, Homo sapiens
ttaagaattcagtct

SEQ ID NO: 606891 - DNA, 15 bp, Homo sapiens
taagaattcagtctc

SEQ ID NO: 606892 - DNA, 15 bp, Homo sapiens
aagaattcagtctct

SEQ ID NO: 606893 - DNA, 15 bp, Homo sapiens
agaattcagtctctg

SEQ ID NO: 606894 - DNA, 15 bp, Homo sapiens
gaattcagtctctgg

SEQ ID NO: 606895 - DNA, 15 bp, Homo sapiens
aattcagtctctgga

SEQ ID NO: 606896 - DNA, 15 bp, Homo sapiens
attcagtctctggac

SEQ ID NO: 606897 - DNA, 15 bp, Homo sapiens
ttcagtctctggacc

SEQ ID NO: 606898 - DNA, 15 bp, Homo sapiens
tcagtctctggaccc

SEQ ID NO: 606899 - DNA, 15 bp, Homo sapiens
cagtctctggaccca

SEQ ID NO: 606900 - DNA, 15 bp, Homo sapiens
agtctctggacccac

SEQ ID NO: 606901 - DNA, 15 bp, Homo sapiens
gtctctggacccaca

SEQ ID NO: 606902 - DNA, 15 bp, Homo sapiens
tctctggacccacac

SEQ ID NO: 606903 - DNA, 15 bp, Homo sapiens
ctctggacccacact

SEQ ID NO: 606904 - DNA, 15 bp, Homo sapiens
tctggacccacactg

SEQ ID NO: 606905 - DNA, 15 bp, Homo sapiens
ctggacccacactgc

SEQ ID NO: 606906 - DNA, 15 bp, Homo sapiens
tggacccacactgcc

SEQ ID NO: 606907 - DNA, 15 bp, Homo sapiens
ggacccacactgcct

SEQ ID NO: 606908 - DNA, 15 bp, Homo sapiens
gacccacactgcctg

SEQ ID NO: 606909 - DNA, 15 bp, Homo sapiens
acccacactgcctgg

SEQ ID NO: 606910 - DNA, 15 bp, Homo sapiens
cccacactgcctggg

SEQ ID NO: 606911 - DNA, 15 bp, Homo sapiens
ccacactgcctgggt

SEQ ID NO: 606912 - DNA, 15 bp, Homo sapiens
cacactgcctgggtt

SEQ ID NO: 606913 - DNA, 15 bp, Homo sapiens
acactgcctgggttc

SEQ ID NO: 606914 - DNA, 15 bp, Homo sapiens
cactgcctgggttca

SEQ ID NO: 606915 - DNA, 15 bp, Homo sapiens
actgcctgggttcaa

SEQ ID NO: 606916 - DNA, 15 bp, Homo sapiens
ctgcctgggttcaaa

SEQ ID NO: 606917 - DNA, 15 bp, Homo sapiens
tgcctgggttcaaat

SEQ ID NO: 606918 - DNA, 15 bp, Homo sapiens
gcctgggttcaaatt

SEQ ID NO: 606919 - DNA, 15 bp, Homo sapiens
cctgggttcaaattc

SEQ ID NO: 606920 - DNA, 15 bp, Homo sapiens
ctgggttcaaattcc

SEQ ID NO: 606921 - DNA, 15 bp, Homo sapiens
tgggttcaaattcct

SEQ ID NO: 606922 - DNA, 15 bp, Homo sapiens
gggttcaaattccta

SEQ ID NO: 606923 - DNA, 15 bp, Homo sapiens
ggttcaaattcctat

SEQ ID NO: 606924 - DNA, 15 bp, Homo sapiens
gttcaaattcctatt

SEQ ID NO: 606925 - DNA, 15 bp, Homo sapiens
ttcaaattcctatta

SEQ ID NO: 606926 - DNA, 15 bp, Homo sapiens
tcaaattcctattat

SEQ ID NO: 606927 - DNA, 15 bp, Homo sapiens
caaattcctattatc

SEQ ID NO: 606928 - DNA, 15 bp, Homo sapiens
aaattcctattatct

SEQ ID NO: 606929 - DNA, 15 bp, Homo sapiens
aattcctattatctg

SEQ ID NO: 606930 - DNA, 15 bp, Homo sapiens
attcctattatctgt

SEQ ID NO: 606931 - DNA, 15 bp, Homo sapiens
ttcctattatctgtg

SEQ ID NO: 606932 - DNA, 15 bp, Homo sapiens
tcctattatctgtgc

SEQ ID NO: 606933 - DNA, 15 bp, Homo sapiens
cctattatctgtgcc

SEQ ID NO: 606934 - DNA, 15 bp, Homo sapiens
ctattatctgtgccc

SEQ ID NO: 606935 - DNA, 15 bp, Homo sapiens
tattatctgtgccca

SEQ ID NO: 606936 - DNA, 15 bp, Homo sapiens
attatctgtgcccag

SEQ ID NO: 606937 - DNA, 15 bp, Homo sapiens
ttatctgtgcccagt

SEQ ID NO: 606938 - DNA, 15 bp, Homo sapiens
tatctgtgcccagtt

SEQ ID NO: 606939 - DNA, 15 bp, Homo sapiens
atctgtgcccagttt

SEQ ID NO: 606940 - DNA, 15 bp, Homo sapiens
tctgtgcccagtttc

SEQ ID NO: 606941 - DNA, 15 bp, Homo sapiens
ctgtgcccagtttcc

SEQ ID NO: 606942 - DNA, 15 bp, Homo sapiens
tgtgcccagtttcca

SEQ ID NO: 606943 - DNA, 15 bp, Homo sapiens
gtgcccagtttccaa

SEQ ID NO: 606944 - DNA, 15 bp, Homo sapiens
tgcccagtttccaag

SEQ ID NO: 606945 - DNA, 15 bp, Homo sapiens
gcccagtttccaagt

SEQ ID NO: 606946 - DNA, 15 bp, Homo sapiens
cccagtttccaagtc

SEQ ID NO: 606947 - DNA, 15 bp, Homo sapiens
ccagtttccaagtct

SEQ ID NO: 606948 - DNA, 15 bp, Homo sapiens
cagtttccaagtcta

SEQ ID NO: 606949 - DNA, 15 bp, Homo sapiens
agtttccaagtctat

SEQ ID NO: 606950 - DNA, 15 bp, Homo sapiens
gtttccaagtctata

SEQ ID NO: 606951 - DNA, 15 bp, Homo sapiens
tttccaagtctataa

SEQ ID NO: 606952 - DNA, 15 bp, Homo sapiens
ttccaagtctataaa

SEQ ID NO: 606953 - DNA, 15 bp, Homo sapiens
tccaagtctataaaa

SEQ ID NO: 606954 - DNA, 15 bp, Homo sapiens
ccaagtctataaaat

SEQ ID NO: 606955 - DNA, 15 bp, Homo sapiens
caagtctataaaata

SEQ ID NO: 606956 - DNA, 15 bp, Homo sapiens
aagtctataaaatag

SEQ ID NO: 606957 - DNA, 15 bp, Homo sapiens
agtctataaaatagg

SEQ ID NO: 606958 - DNA, 15 bp, Homo sapiens
gtctataaaataggg

SEQ ID NO: 606959 - DNA, 15 bp, Homo sapiens
tctataaaataggga

SEQ ID NO: 606960 - DNA, 15 bp, Homo sapiens
ctataaaatagggat

SEQ ID NO: 606961 - DNA, 15 bp, Homo sapiens
tataaaatagggata

SEQ ID NO: 606962 - DNA, 15 bp, Homo sapiens
ataaaatagggatat

SEQ ID NO: 606963 - DNA, 15 bp, Homo sapiens
taaaatagggatatt

SEQ ID NO: 606964 - DNA, 15 bp, Homo sapiens
aaaatagggatatta

SEQ ID NO: 606965 - DNA, 15 bp, Homo sapiens
aaatagggatattaa

SEQ ID NO: 606966 - DNA, 15 bp, Homo sapiens
aatagggatattaat

SEQ ID NO: 606967 - DNA, 15 bp, Homo sapiens
atagggatattaata

SEQ ID NO: 606968 - DNA, 15 bp, Homo sapiens
tagggatattaatag

SEQ ID NO: 606969 - DNA, 15 bp, Homo sapiens
agggatattaatagc

SEQ ID NO: 606970 - DNA, 15 bp, Homo sapiens
gggatattaatagca

SEQ ID NO: 606971 - DNA, 15 bp, Homo sapiens
ggatattaatagcac

SEQ ID NO: 606972 - DNA, 15 bp, Homo sapiens
gatattaatagcact

SEQ ID NO: 606973 - DNA, 15 bp, Homo sapiens
atattaatagcactt

SEQ ID NO: 606974 - DNA, 15 bp, Homo sapiens
tattaatagcactta

SEQ ID NO: 606975 - DNA, 15 bp, Homo sapiens
attaatagcacttac

SEQ ID NO: 606976 - DNA, 15 bp, Homo sapiens
ttaatagcacttacc

SEQ ID NO: 606977 - DNA, 15 bp, Homo sapiens
taatagcacttacct

SEQ ID NO: 606978 - DNA, 15 bp, Homo sapiens
aatagcacttaccta

SEQ ID NO: 606979 - DNA, 15 bp, Homo sapiens
atagcacttacctaa

SEQ ID NO: 606980 - DNA, 15 bp, Homo sapiens
tagcacttacctaat

SEQ ID NO: 606981 - DNA, 15 bp, Homo sapiens
agcacttacctaata

SEQ ID NO: 606982 - DNA, 15 bp, Homo sapiens
gcacttacctaatag

SEQ ID NO: 606983 - DNA, 15 bp, Homo sapiens
cacttacctaatagg

SEQ ID NO: 606984 - DNA, 15 bp, Homo sapiens
acttacctaataggc

SEQ ID NO: 606985 - DNA, 15 bp, Homo sapiens
cttacctaataggct

SEQ ID NO: 606986 - DNA, 15 bp, Homo sapiens
ttacctaataggctc

SEQ ID NO: 606987 - DNA, 15 bp, Homo sapiens
tacctaataggctcg

SEQ ID NO: 606988 - DNA, 15 bp, Homo sapiens
acctaataggctcgt

SEQ ID NO: 606989 - DNA, 15 bp, Homo sapiens
cctaataggctcgtt

SEQ ID NO: 606990 - DNA, 15 bp, Homo sapiens
ctaataggctcgtta

SEQ ID NO: 606991 - DNA, 15 bp, Homo sapiens
taataggctcgttat

SEQ ID NO: 606992 - DNA, 15 bp, Homo sapiens
aataggctcgttatg

SEQ ID NO: 606993 - DNA, 15 bp, Homo sapiens
ataggctcgttatga

SEQ ID NO: 606994 - DNA, 15 bp, Homo sapiens
taggctcgttatgag

SEQ ID NO: 606995 - DNA, 15 bp, Homo sapiens
aggctcgttatgaga

SEQ ID NO: 606996 - DNA, 15 bp, Homo sapiens
ggctcgttatgagaa

SEQ ID NO: 606997 - DNA, 15 bp, Homo sapiens
gctcgttatgagaat

SEQ ID NO: 606998 - DNA, 15 bp, Homo sapiens
ctcgttatgagaatt

SEQ ID NO: 606999 - DNA, 15 bp, Homo sapiens
tcgttatgagaatta

SEQ ID NO: 607000 - DNA, 15 bp, Homo sapiens
cgttatgagaattaa

SEQ ID NO: 607001 - DNA, 15 bp, Homo sapiens
gttatgagaattaaa

SEQ ID NO: 607002 - DNA, 15 bp, Homo sapiens
ttatgagaattaaat

SEQ ID NO: 607003 - DNA, 15 bp, Homo sapiens
tatgagaattaaatg

SEQ ID NO: 607004 - DNA, 15 bp, Homo sapiens
atgagaattaaatga

SEQ ID NO: 607005 - DNA, 15 bp, Homo sapiens
tgagaattaaatgag

SEQ ID NO: 607006 - DNA, 15 bp, Homo sapiens
gagaattaaatgagc

SEQ ID NO: 607007 - DNA, 15 bp, Homo sapiens
agaattaaatgagct

SEQ ID NO: 607008 - DNA, 15 bp, Homo sapiens
gaattaaatgagcta

SEQ ID NO: 607009 - DNA, 15 bp, Homo sapiens
aattaaatgagctaa

SEQ ID NO: 607010 - DNA, 15 bp, Homo sapiens
attaaatgagctaat

SEQ ID NO: 607011 - DNA, 15 bp, Homo sapiens
ttaaatgagctaatt

SEQ ID NO: 607012 - DNA, 15 bp, Homo sapiens
taaatgagctaattc

SEQ ID NO: 607013 - DNA, 15 bp, Homo sapiens
aaatgagctaattca

SEQ ID NO: 607014 - DNA, 15 bp, Homo sapiens
aatgagctaattcat

SEQ ID NO: 607015 - DNA, 15 bp, Homo sapiens
atgagctaattcatg

SEQ ID NO: 607016 - DNA, 15 bp, Homo sapiens
tgagctaattcatgc

SEQ ID NO: 607017 - DNA, 15 bp, Homo sapiens
gagctaattcatgca

SEQ ID NO: 607018 - DNA, 15 bp, Homo sapiens
agctaattcatgcaa

SEQ ID NO: 607019 - DNA, 15 bp, Homo sapiens
gctaattcatgcaaa

SEQ ID NO: 607020 - DNA, 15 bp, Homo sapiens
ctaattcatgcaaag

SEQ ID NO: 607021 - DNA, 15 bp, Homo sapiens
taattcatgcaaagc

SEQ ID NO: 607022 - DNA, 15 bp, Homo sapiens
aattcatgcaaagca

SEQ ID NO: 607023 - DNA, 15 bp, Homo sapiens
attcatgcaaagcac

SEQ ID NO: 607024 - DNA, 15 bp, Homo sapiens
ttcatgcaaagcact

SEQ ID NO: 607025 - DNA, 15 bp, Homo sapiens
tcatgcaaagcactg

SEQ ID NO: 607026 - DNA, 15 bp, Homo sapiens
catgcaaagcactga

SEQ ID NO: 607027 - DNA, 15 bp, Homo sapiens
atgcaaagcactgac

SEQ ID NO: 607028 - DNA, 15 bp, Homo sapiens
tgcaaagcactgaca

SEQ ID NO: 607029 - DNA, 15 bp, Homo sapiens
gcaaagcactgacat

SEQ ID NO: 607030 - DNA, 15 bp, Homo sapiens
caaagcactgacata

SEQ ID NO: 607031 - DNA, 15 bp, Homo sapiens
aaagcactgacatat

SEQ ID NO: 607032 - DNA, 15 bp, Homo sapiens
aagcactgacatata

SEQ ID NO: 607033 - DNA, 15 bp, Homo sapiens
agcactgacatatag

SEQ ID NO: 607034 - DNA, 15 bp, Homo sapiens
gcactgacatatagt

SEQ ID NO: 607035 - DNA, 15 bp, Homo sapiens
cactgacatatagta

SEQ ID NO: 607036 - DNA, 15 bp, Homo sapiens
actgacatatagtaa

SEQ ID NO: 607037 - DNA, 15 bp, Homo sapiens
ctgacatatagtaag

SEQ ID NO: 607038 - DNA, 15 bp, Homo sapiens
tgacatatagtaagc

SEQ ID NO: 607039 - DNA, 15 bp, Homo sapiens
gacatatagtaagca

SEQ ID NO: 607040 - DNA, 15 bp, Homo sapiens
acatatagtaagcac

SEQ ID NO: 607041 - DNA, 15 bp, Homo sapiens
catatagtaagcact

SEQ ID NO: 607042 - DNA, 15 bp, Homo sapiens
atatagtaagcactt

SEQ ID NO: 607043 - DNA, 15 bp, Homo sapiens
tatagtaagcactta

SEQ ID NO: 607044 - DNA, 15 bp, Homo sapiens
atagtaagcacttaa

SEQ ID NO: 607045 - DNA, 15 bp, Homo sapiens
tagtaagcacttaat

SEQ ID NO: 607046 - DNA, 15 bp, Homo sapiens
agtaagcacttaata

SEQ ID NO: 607047 - DNA, 15 bp, Homo sapiens
gtaagcacttaataa

SEQ ID NO: 607048 - DNA, 15 bp, Homo sapiens
taagcacttaataaa

SEQ ID NO: 607049 - DNA, 15 bp, Homo sapiens
aagcacttaataaat

SEQ ID NO: 607050 - DNA, 15 bp, Homo sapiens
agcacttaataaata

SEQ ID NO: 607051 - DNA, 15 bp, Homo sapiens
gcacttaataaatat

SEQ ID NO: 607052 - DNA, 15 bp, Homo sapiens
cacttaataaatatt

SEQ ID NO: 607053 - DNA, 15 bp, Homo sapiens
acttaataaatatta

SEQ ID NO: 607054 - DNA, 15 bp, Homo sapiens
cttaataaatattag

SEQ ID NO: 607055 - DNA, 15 bp, Homo sapiens
ttaataaatattagc

SEQ ID NO: 607056 - DNA, 15 bp, Homo sapiens
taataaatattagct

SEQ ID NO: 607057 - DNA, 15 bp, Homo sapiens
aataaatattagctt

SEQ ID NO: 607058 - DNA, 15 bp, Homo sapiens
ataaatattagcttt

SEQ ID NO: 607059 - DNA, 15 bp, Homo sapiens
taaatattagctttt

SEQ ID NO: 607060 - DNA, 15 bp, Homo sapiens
aaatattagcttttt

SEQ ID NO: 607061 - DNA, 15 bp, Homo sapiens
aatattagcttttta

SEQ ID NO: 607062 - DNA, 15 bp, Homo sapiens
atattagctttttaa

SEQ ID NO: 607063 - DNA, 15 bp, Homo sapiens
tattagctttttaac

SEQ ID NO: 607064 - DNA, 15 bp, Homo sapiens
attagctttttaaca

SEQ ID NO: 607065 - DNA, 15 bp, Homo sapiens
ttagctttttaacaa

SEQ ID NO: 607066 - DNA, 15 bp, Homo sapiens
tagctttttaacaaa

SEQ ID NO: 607067 - DNA, 15 bp, Homo sapiens
agctttttaacaaaa

SEQ ID NO: 607068 - DNA, 15 bp, Homo sapiens
gctttttaacaaaat

SEQ ID NO: 607069 - DNA, 15 bp, Homo sapiens
ctttttaacaaaata

SEQ ID NO: 607070 - DNA, 15 bp, Homo sapiens
tttttaacaaaatac

SEQ ID NO: 607071 - DNA, 15 bp, Homo sapiens
ttttaacaaaataca

SEQ ID NO: 607072 - DNA, 15 bp, Homo sapiens
tttaacaaaatacaa

SEQ ID NO: 607073 - DNA, 15 bp, Homo sapiens
ttaacaaaatacaag

SEQ ID NO: 607074 - DNA, 15 bp, Homo sapiens
taacaaaatacaagc

SEQ ID NO: 607075 - DNA, 15 bp, Homo sapiens
aacaaaatacaagcc

SEQ ID NO: 607076 - DNA, 15 bp, Homo sapiens
acaaaatacaagcca

SEQ ID NO: 607077 - DNA, 15 bp, Homo sapiens
caaaatacaagccaa

SEQ ID NO: 607078 - DNA, 15 bp, Homo sapiens
aaaatacaagccaaa

SEQ ID NO: 607079 - DNA, 15 bp, Homo sapiens
aaatacaagccaaaa

SEQ ID NO: 607080 - DNA, 15 bp, Homo sapiens
aatacaagccaaaaa

SEQ ID NO: 607081 - DNA, 15 bp, Homo sapiens
atacaagccaaaaaa

SEQ ID NO: 607082 - DNA, 15 bp, Homo sapiens
tacaagccaaaaaac

SEQ ID NO: 607083 - DNA, 15 bp, Homo sapiens
acaagccaaaaaaca

SEQ ID NO: 607084 - DNA, 15 bp, Homo sapiens
caagccaaaaaacac

SEQ ID NO: 607085 - DNA, 15 bp, Homo sapiens
aagccaaaaaacact

SEQ ID NO: 607086 - DNA, 15 bp, Homo sapiens
agccaaaaaacactg

SEQ ID NO: 607087 - DNA, 15 bp, Homo sapiens
gccaaaaaacactgc

SEQ ID NO: 607088 - DNA, 15 bp, Homo sapiens
ccaaaaaacactgct

SEQ ID NO: 607089 - DNA, 15 bp, Homo sapiens
caaaaaacactgctt

SEQ ID NO: 607090 - DNA, 15 bp, Homo sapiens
aaaaaacactgctta

SEQ ID NO: 607091 - DNA, 15 bp, Homo sapiens
aaaaacactgcttag

SEQ ID NO: 607092 - DNA, 15 bp, Homo sapiens
aaaacactgcttagg

SEQ ID NO: 607093 - DNA, 15 bp, Homo sapiens
aaacactgcttagga

SEQ ID NO: 607094 - DNA, 15 bp, Homo sapiens
aacactgcttaggag

SEQ ID NO: 607095 - DNA, 15 bp, Homo sapiens
acactgcttaggaga

SEQ ID NO: 607096 - DNA, 15 bp, Homo sapiens
cactgcttaggagag

SEQ ID NO: 607097 - DNA, 15 bp, Homo sapiens
actgcttaggagagg

SEQ ID NO: 607098 - DNA, 15 bp, Homo sapiens
ctgcttaggagagga

SEQ ID NO: 607099 - DNA, 15 bp, Homo sapiens
tgcttaggagaggaa

SEQ ID NO: 607100 - DNA, 15 bp, Homo sapiens
gcttaggagaggaaa

SEQ ID NO: 607101 - DNA, 15 bp, Homo sapiens
cttaggagaggaaat

SEQ ID NO: 607102 - DNA, 15 bp, Homo sapiens
ttaggagaggaaatg

SEQ ID NO: 607103 - DNA, 15 bp, Homo sapiens
taggagaggaaatga

SEQ ID NO: 607104 - DNA, 15 bp, Homo sapiens
aggagaggaaatgat

SEQ ID NO: 607105 - DNA, 15 bp, Homo sapiens
ggagaggaaatgatg

SEQ ID NO: 607106 - DNA, 15 bp, Homo sapiens
gagaggaaatgatgt

SEQ ID NO: 607107 - DNA, 15 bp, Homo sapiens
agaggaaatgatgtt

SEQ ID NO: 607108 - DNA, 15 bp, Homo sapiens
gaggaaatgatgtta

SEQ ID NO: 607109 - DNA, 15 bp, Homo sapiens
aggaaatgatgttag

SEQ ID NO: 607110 - DNA, 15 bp, Homo sapiens
ggaaatgatgttagt

SEQ ID NO: 607111 - DNA, 15 bp, Homo sapiens
gaaatgatgttagtg

SEQ ID NO: 607112 - DNA, 15 bp, Homo sapiens
aaatgatgttagtgc

SEQ ID NO: 607113 - DNA, 15 bp, Homo sapiens
aatgatgttagtgcc

SEQ ID NO: 607114 - DNA, 15 bp, Homo sapiens
atgatgttagtgcct

SEQ ID NO: 607115 - DNA, 15 bp, Homo sapiens
tgatgttagtgcctc

SEQ ID NO: 607116 - DNA, 15 bp, Homo sapiens
gatgttagtgcctcc

SEQ ID NO: 607117 - DNA, 15 bp, Homo sapiens
atgttagtgcctcct

SEQ ID NO: 607118 - DNA, 15 bp, Homo sapiens
tgttagtgcctcctg

SEQ ID NO: 607119 - DNA, 15 bp, Homo sapiens
gttagtgcctcctgt

SEQ ID NO: 607120 - DNA, 15 bp, Homo sapiens
ttagtgcctcctgta

SEQ ID NO: 607121 - DNA, 15 bp, Homo sapiens
tagtgcctcctgtaa

SEQ ID NO: 607122 - DNA, 15 bp, Homo sapiens
agtgcctcctgtaaa

SEQ ID NO: 607123 - DNA, 15 bp, Homo sapiens
gtgcctcctgtaaat

SEQ ID NO: 607124 - DNA, 15 bp, Homo sapiens
tgcctcctgtaaata

SEQ ID NO: 607125 - DNA, 15 bp, Homo sapiens
gcctcctgtaaatag

SEQ ID NO: 607126 - DNA, 15 bp, Homo sapiens
cctcctgtaaatagg

SEQ ID NO: 607127 - DNA, 15 bp, Homo sapiens
ctcctgtaaataggc

SEQ ID NO: 607128 - DNA, 15 bp, Homo sapiens
tcctgtaaataggcc

SEQ ID NO: 607129 - DNA, 15 bp, Homo sapiens
cctgtaaataggccc

SEQ ID NO: 607130 - DNA, 15 bp, Homo sapiens
ctgtaaataggccca

SEQ ID NO: 607131 - DNA, 15 bp, Homo sapiens
tgtaaataggcccag

SEQ ID NO: 607132 - DNA, 15 bp, Homo sapiens
gtaaataggcccagc

SEQ ID NO: 607133 - DNA, 15 bp, Homo sapiens
taaataggcccagcc

SEQ ID NO: 607134 - DNA, 15 bp, Homo sapiens
aaataggcccagcct

SEQ ID NO: 607135 - DNA, 15 bp, Homo sapiens
aataggcccagcctc

SEQ ID NO: 607136 - DNA, 15 bp, Homo sapiens
ataggcccagcctcc

SEQ ID NO: 607137 - DNA, 15 bp, Homo sapiens
taggcccagcctcca

SEQ ID NO: 607138 - DNA, 15 bp, Homo sapiens
aggcccagcctccaa

SEQ ID NO: 607139 - DNA, 15 bp, Homo sapiens
ggcccagcctccaag

SEQ ID NO: 607140 - DNA, 15 bp, Homo sapiens
gcccagcctccaagc

SEQ ID NO: 607141 - DNA, 15 bp, Homo sapiens
cccagcctccaagct

SEQ ID NO: 607142 - DNA, 15 bp, Homo sapiens
ccagcctccaagctg

SEQ ID NO: 607143 - DNA, 15 bp, Homo sapiens
cagcctccaagctgg

SEQ ID NO: 607144 - DNA, 15 bp, Homo sapiens
agcctccaagctggt

SEQ ID NO: 607145 - DNA, 15 bp, Homo sapiens
gcctccaagctggtg

SEQ ID NO: 607146 - DNA, 15 bp, Homo sapiens
cctccaagctggtgc

SEQ ID NO: 607147 - DNA, 15 bp, Homo sapiens
ctccaagctggtgct

SEQ ID NO: 607148 - DNA, 15 bp, Homo sapiens
tccaagctggtgctc

SEQ ID NO: 607149 - DNA, 15 bp, Homo sapiens
ccaagctggtgctcc

SEQ ID NO: 607150 - DNA, 15 bp, Homo sapiens
caagctggtgctcct

SEQ ID NO: 607151 - DNA, 15 bp, Homo sapiens
aagctggtgctcctc

SEQ ID NO: 607152 - DNA, 15 bp, Homo sapiens
agctggtgctcctct

SEQ ID NO: 607153 - DNA, 15 bp, Homo sapiens
gctggtgctcctcta

SEQ ID NO: 607154 - DNA, 15 bp, Homo sapiens
ctggtgctcctctag

SEQ ID NO: 607155 - DNA, 15 bp, Homo sapiens
tggtgctcctctagg

SEQ ID NO: 607156 - DNA, 15 bp, Homo sapiens
ggtgctcctctagga

SEQ ID NO: 607157 - DNA, 15 bp, Homo sapiens
gtgctcctctaggaa

SEQ ID NO: 607158 - DNA, 15 bp, Homo sapiens
tgctcctctaggaat

SEQ ID NO: 607159 - DNA, 15 bp, Homo sapiens
gctcctctaggaatc

SEQ ID NO: 607160 - DNA, 15 bp, Homo sapiens
ctcctctaggaatca

SEQ ID NO: 607161 - DNA, 15 bp, Homo sapiens
tcctctaggaatcac

SEQ ID NO: 607162 - DNA, 15 bp, Homo sapiens
cctctaggaatcaca

SEQ ID NO: 607163 - DNA, 15 bp, Homo sapiens
ctctaggaatcacaa

SEQ ID NO: 607164 - DNA, 15 bp, Homo sapiens
tctaggaatcacaac

SEQ ID NO: 607165 - DNA, 15 bp, Homo sapiens
ctaggaatcacaacg

SEQ ID NO: 607166 - DNA, 15 bp, Homo sapiens
taggaatcacaacgc

SEQ ID NO: 607167 - DNA, 15 bp, Homo sapiens
aggaatcacaacgct

SEQ ID NO: 607168 - DNA, 15 bp, Homo sapiens
ggaatcacaacgctg

SEQ ID NO: 607169 - DNA, 15 bp, Homo sapiens
gaatcacaacgctgc

SEQ ID NO: 607170 - DNA, 15 bp, Homo sapiens
aatcacaacgctgca

SEQ ID NO: 607171 - DNA, 15 bp, Homo sapiens
atcacaacgctgcaa

SEQ ID NO: 607172 - DNA, 15 bp, Homo sapiens
tcacaacgctgcaaa

SEQ ID NO: 607173 - DNA, 15 bp, Homo sapiens
cacaacgctgcaaat

SEQ ID NO: 607174 - DNA, 15 bp, Homo sapiens
acaacgctgcaaatc

SEQ ID NO: 607175 - DNA, 15 bp, Homo sapiens
caacgctgcaaatca

SEQ ID NO: 607176 - DNA, 15 bp, Homo sapiens
aacgctgcaaatcac

SEQ ID NO: 607177 - DNA, 15 bp, Homo sapiens
acgctgcaaatcaca

SEQ ID NO: 607178 - DNA, 15 bp, Homo sapiens
cgctgcaaatcacat

SEQ ID NO: 607179 - DNA, 15 bp, Homo sapiens
gctgcaaatcacatc

SEQ ID NO: 607180 - DNA, 15 bp, Homo sapiens
ctgcaaatcacatcc

SEQ ID NO: 607181 - DNA, 15 bp, Homo sapiens
tgcaaatcacatcct

SEQ ID NO: 607182 - DNA, 15 bp, Homo sapiens
gcaaatcacatcctc

SEQ ID NO: 607183 - DNA, 15 bp, Homo sapiens
caaatcacatcctcc

SEQ ID NO: 607184 - DNA, 15 bp, Homo sapiens
aaatcacatcctccg

SEQ ID NO: 607185 - DNA, 15 bp, Homo sapiens
aatcacatcctccgg

SEQ ID NO: 607186 - DNA, 15 bp, Homo sapiens
atcacatcctccggg

SEQ ID NO: 607187 - DNA, 15 bp, Homo sapiens
tcacatcctccgggg

SEQ ID NO: 607188 - DNA, 15 bp, Homo sapiens
cacatcctccggggc

SEQ ID NO: 607189 - DNA, 15 bp, Homo sapiens
acatcctccggggcc

SEQ ID NO: 607190 - DNA, 15 bp, Homo sapiens
catcctccggggccg

SEQ ID NO: 607191 - DNA, 15 bp, Homo sapiens
atcctccggggccgc

SEQ ID NO: 607192 - DNA, 15 bp, Homo sapiens
tcctccggggccgcc

SEQ ID NO: 607193 - DNA, 15 bp, Homo sapiens
cctccggggccgcca

SEQ ID NO: 607194 - DNA, 15 bp, Homo sapiens
ctccggggccgccag

SEQ ID NO: 607195 - DNA, 15 bp, Homo sapiens
tccggggccgccagg

SEQ ID NO: 607196 - DNA, 15 bp, Homo sapiens
ccggggccgccagga

SEQ ID NO: 607197 - DNA, 15 bp, Homo sapiens
cggggccgccaggac

SEQ ID NO: 607198 - DNA, 15 bp, Homo sapiens
ggggccgccaggact

SEQ ID NO: 607199 - DNA, 15 bp, Homo sapiens
gggccgccaggactt

SEQ ID NO: 607200 - DNA, 15 bp, Homo sapiens
ggccgccaggacttc

SEQ ID NO: 607201 - DNA, 15 bp, Homo sapiens
gccgccaggacttca

SEQ ID NO: 607202 - DNA, 15 bp, Homo sapiens
ccgccaggacttcac

SEQ ID NO: 607203 - DNA, 15 bp, Homo sapiens
cgccaggacttcacg

SEQ ID NO: 607204 - DNA, 15 bp, Homo sapiens
gccaggacttcacga

SEQ ID NO: 607205 - DNA, 15 bp, Homo sapiens
ccaggacttcacgag

SEQ ID NO: 607206 - DNA, 15 bp, Homo sapiens
caggacttcacgagg

SEQ ID NO: 607207 - DNA, 15 bp, Homo sapiens
aggacttcacgaggg

SEQ ID NO: 607208 - DNA, 15 bp, Homo sapiens
ggacttcacgagggc

SEQ ID NO: 607209 - DNA, 15 bp, Homo sapiens
gacttcacgagggcc

SEQ ID NO: 607210 - DNA, 15 bp, Homo sapiens
acttcacgagggcct

SEQ ID NO: 607211 - DNA, 15 bp, Homo sapiens
cttcacgagggcctc

SEQ ID NO: 607212 - DNA, 15 bp, Homo sapiens
ttcacgagggcctct

SEQ ID NO: 607213 - DNA, 15 bp, Homo sapiens
tcacgagggcctctg

SEQ ID NO: 607214 - DNA, 15 bp, Homo sapiens
cacgagggcctctga

SEQ ID NO: 607215 - DNA, 15 bp, Homo sapiens
acgagggcctctgag

SEQ ID NO: 607216 - DNA, 15 bp, Homo sapiens
cgagggcctctgagc

SEQ ID NO: 607217 - DNA, 15 bp, Homo sapiens
gagggcctctgagca

SEQ ID NO: 607218 - DNA, 15 bp, Homo sapiens
agggcctctgagcag

SEQ ID NO: 607219 - DNA, 15 bp, Homo sapiens
gggcctctgagcaga

SEQ ID NO: 607220 - DNA, 15 bp, Homo sapiens
ggcctctgagcagag

SEQ ID NO: 607221 - DNA, 15 bp, Homo sapiens
gcctctgagcagagg

SEQ ID NO: 607222 - DNA, 15 bp, Homo sapiens
cctctgagcagaggg

SEQ ID NO: 607223 - DNA, 15 bp, Homo sapiens
ctctgagcagagggg

SEQ ID NO: 607224 - DNA, 15 bp, Homo sapiens
tctgagcagaggggt

SEQ ID NO: 607225 - DNA, 15 bp, Homo sapiens
ctgagcagaggggta

SEQ ID NO: 607226 - DNA, 15 bp, Homo sapiens
tgagcagaggggtat

SEQ ID NO: 607227 - DNA, 15 bp, Homo sapiens
gagcagaggggtatg

SEQ ID NO: 607228 - DNA, 15 bp, Homo sapiens
agcagaggggtatga

SEQ ID NO: 607229 - DNA, 15 bp, Homo sapiens
gcagaggggtatgat

SEQ ID NO: 607230 - DNA, 15 bp, Homo sapiens
cagaggggtatgatg

SEQ ID NO: 607231 - DNA, 15 bp, Homo sapiens
agaggggtatgatgg

SEQ ID NO: 607232 - DNA, 15 bp, Homo sapiens
gaggggtatgatggg

SEQ ID NO: 607233 - DNA, 15 bp, Homo sapiens
aggggtatgatggga

SEQ ID NO: 607234 - DNA, 15 bp, Homo sapiens
ggggtatgatgggag

SEQ ID NO: 607235 - DNA, 15 bp, Homo sapiens
gggtatgatgggagc

SEQ ID NO: 607236 - DNA, 15 bp, Homo sapiens
ggtatgatgggagca

SEQ ID NO: 607237 - DNA, 15 bp, Homo sapiens
gtatgatgggagcag

SEQ ID NO: 607238 - DNA, 15 bp, Homo sapiens
tatgatgggagcaga

SEQ ID NO: 607239 - DNA, 15 bp, Homo sapiens
atgatgggagcagaa

SEQ ID NO: 607240 - DNA, 15 bp, Homo sapiens
tgatgggagcagaag

SEQ ID NO: 607241 - DNA, 15 bp, Homo sapiens
gatgggagcagaagc

SEQ ID NO: 607242 - DNA, 15 bp, Homo sapiens
atgggagcagaagcc

SEQ ID NO: 607243 - DNA, 15 bp, Homo sapiens
tgggagcagaagccc

SEQ ID NO: 607244 - DNA, 15 bp, Homo sapiens
gggagcagaagccca

SEQ ID NO: 607245 - DNA, 15 bp, Homo sapiens
ggagcagaagcccag

SEQ ID NO: 607246 - DNA, 15 bp, Homo sapiens
gagcagaagcccagc

SEQ ID NO: 607247 - DNA, 15 bp, Homo sapiens
agcagaagcccagca

SEQ ID NO: 607248 - DNA, 15 bp, Homo sapiens
gcagaagcccagcag

SEQ ID NO: 607249 - DNA, 15 bp, Homo sapiens
cagaagcccagcagc

SEQ ID NO: 607250 - DNA, 15 bp, Homo sapiens
agaagcccagcagct

SEQ ID NO: 607251 - DNA, 15 bp, Homo sapiens
gaagcccagcagctg

SEQ ID NO: 607252 - DNA, 15 bp, Homo sapiens
aagcccagcagctgt

SEQ ID NO: 607253 - DNA, 15 bp, Homo sapiens
agcccagcagctgtg

SEQ ID NO: 607254 - DNA, 15 bp, Homo sapiens
gcccagcagctgtga

SEQ ID NO: 607255 - DNA, 15 bp, Homo sapiens
cccagcagctgtgat

SEQ ID NO: 607256 - DNA, 15 bp, Homo sapiens
ccagcagctgtgatg

SEQ ID NO: 607257 - DNA, 15 bp, Homo sapiens
cagcagctgtgatga

SEQ ID NO: 607258 - DNA, 15 bp, Homo sapiens
agcagctgtgatgat

SEQ ID NO: 607259 - DNA, 15 bp, Homo sapiens
gcagctgtgatgatg

SEQ ID NO: 607260 - DNA, 15 bp, Homo sapiens
cagctgtgatgatgt

SEQ ID NO: 607261 - DNA, 15 bp, Homo sapiens
agctgtgatgatgtg

SEQ ID NO: 607262 - DNA, 15 bp, Homo sapiens
gctgtgatgatgtgg

SEQ ID NO: 607263 - DNA, 15 bp, Homo sapiens
ctgtgatgatgtggt

SEQ ID NO: 607264 - DNA, 15 bp, Homo sapiens
tgtgatgatgtggtt

SEQ ID NO: 607265 - DNA, 15 bp, Homo sapiens
gtgatgatgtggttt

SEQ ID NO: 607266 - DNA, 15 bp, Homo sapiens
tgatgatgtggtttc

SEQ ID NO: 607267 - DNA, 15 bp, Homo sapiens
gatgatgtggtttct

SEQ ID NO: 607268 - DNA, 15 bp, Homo sapiens
atgatgtggtttctg

SEQ ID NO: 607269 - DNA, 15 bp, Homo sapiens
tgatgtggtttctga

SEQ ID NO: 607270 - DNA, 15 bp, Homo sapiens
gatgtggtttctgat

SEQ ID NO: 607271 - DNA, 15 bp, Homo sapiens
atgtggtttctgatc

SEQ ID NO: 607272 - DNA, 15 bp, Homo sapiens
tgtggtttctgatct

SEQ ID NO: 607273 - DNA, 15 bp, Homo sapiens
gtggtttctgatctt

SEQ ID NO: 607274 - DNA, 15 bp, Homo sapiens
tggtttctgatcttc

SEQ ID NO: 607275 - DNA, 15 bp, Homo sapiens
ggtttctgatcttcc

SEQ ID NO: 607276 - DNA, 15 bp, Homo sapiens
gtttctgatcttcct

SEQ ID NO: 607277 - DNA, 15 bp, Homo sapiens
tttctgatcttcctg

SEQ ID NO: 607278 - DNA, 15 bp, Homo sapiens
ttctgatcttcctgc

SEQ ID NO: 607279 - DNA, 15 bp, Homo sapiens
tctgatcttcctgcc

SEQ ID NO: 607280 - DNA, 15 bp, Homo sapiens
ctgatcttcctgccc

SEQ ID NO: 607281 - DNA, 15 bp, Homo sapiens
tgatcttcctgccct

SEQ ID NO: 607282 - DNA, 15 bp, Homo sapiens
gatcttcctgccctt

SEQ ID NO: 607283 - DNA, 15 bp, Homo sapiens
atcttcctgcccttg

SEQ ID NO: 607284 - DNA, 15 bp, Homo sapiens
tcttcctgcccttgg

SEQ ID NO: 607285 - DNA, 15 bp, Homo sapiens
cttcctgcccttggg

SEQ ID NO: 607286 - DNA, 15 bp, Homo sapiens
ttcctgcccttgggg

SEQ ID NO: 607287 - DNA, 15 bp, Homo sapiens
tcctgcccttggggt

SEQ ID NO: 607288 - DNA, 15 bp, Homo sapiens
cctgcccttggggtg

SEQ ID NO: 607289 - DNA, 15 bp, Homo sapiens
ctgcccttggggtgg

SEQ ID NO: 607290 - DNA, 15 bp, Homo sapiens
tgcccttggggtggg

SEQ ID NO: 607291 - DNA, 15 bp, Homo sapiens
gcccttggggtgggg

SEQ ID NO: 607292 - DNA, 15 bp, Homo sapiens
cccttggggtggggg

SEQ ID NO: 607293 - DNA, 15 bp, Homo sapiens
ccttggggtggggga

SEQ ID NO: 607294 - DNA, 15 bp, Homo sapiens
cttggggtgggggag

SEQ ID NO: 607295 - DNA, 15 bp, Homo sapiens
ttggggtgggggagg

SEQ ID NO: 607296 - DNA, 15 bp, Homo sapiens
tggggtgggggagga

SEQ ID NO: 607297 - DNA, 15 bp, Homo sapiens
ggggtgggggaggag

SEQ ID NO: 607298 - DNA, 15 bp, Homo sapiens
gggtgggggaggagg

SEQ ID NO: 607299 - DNA, 15 bp, Homo sapiens
ggtgggggaggagga

SEQ ID NO: 607300 - DNA, 15 bp, Homo sapiens
gtgggggaggaggaa

SEQ ID NO: 607301 - DNA, 15 bp, Homo sapiens
tgggggaggaggaaa

SEQ ID NO: 607302 - DNA, 15 bp, Homo sapiens
gggggaggaggaaag

SEQ ID NO: 607303 - DNA, 15 bp, Homo sapiens
ggggaggaggaaagc

SEQ ID NO: 607304 - DNA, 15 bp, Homo sapiens
gggaggaggaaagca

SEQ ID NO: 607305 - DNA, 15 bp, Homo sapiens
ggaggaggaaagcaa

SEQ ID NO: 607306 - DNA, 15 bp, Homo sapiens
gaggaggaaagcaag

SEQ ID NO: 607307 - DNA, 15 bp, Homo sapiens
aggaggaaagcaagg

SEQ ID NO: 607308 - DNA, 15 bp, Homo sapiens
ggaggaaagcaaggg

SEQ ID NO: 607309 - DNA, 15 bp, Homo sapiens
gaggaaagcaagggg

SEQ ID NO: 607310 - DNA, 15 bp, Homo sapiens
aggaaagcaaggggc

SEQ ID NO: 607311 - DNA, 15 bp, Homo sapiens
ggaaagcaaggggca

SEQ ID NO: 607312 - DNA, 15 bp, Homo sapiens
gaaagcaaggggcaa

SEQ ID NO: 607313 - DNA, 15 bp, Homo sapiens
aaagcaaggggcaat

SEQ ID NO: 607314 - DNA, 15 bp, Homo sapiens
aagcaaggggcaatg

SEQ ID NO: 607315 - DNA, 15 bp, Homo sapiens
agcaaggggcaatga

SEQ ID NO: 607316 - DNA, 15 bp, Homo sapiens
gcaaggggcaatgaa

SEQ ID NO: 607317 - DNA, 15 bp, Homo sapiens
caaggggcaatgaac

SEQ ID NO: 607318 - DNA, 15 bp, Homo sapiens
aaggggcaatgaaca

SEQ ID NO: 607319 - DNA, 15 bp, Homo sapiens
aggggcaatgaacag

SEQ ID NO: 607320 - DNA, 15 bp, Homo sapiens
ggggcaatgaacaga

SEQ ID NO: 607321 - DNA, 15 bp, Homo sapiens
gggcaatgaacagaa

SEQ ID NO: 607322 - DNA, 15 bp, Homo sapiens
ggcaatgaacagaaa

SEQ ID NO: 607323 - DNA, 15 bp, Homo sapiens
gcaatgaacagaaag

SEQ ID NO: 607324 - DNA, 15 bp, Homo sapiens
caatgaacagaaagg

SEQ ID NO: 607325 - DNA, 15 bp, Homo sapiens
aatgaacagaaagga

SEQ ID NO: 607326 - DNA, 15 bp, Homo sapiens
atgaacagaaaggag

SEQ ID NO: 607327 - DNA, 15 bp, Homo sapiens
tgaacagaaaggaga

SEQ ID NO: 607328 - DNA, 15 bp, Homo sapiens
gaacagaaaggagaa

SEQ ID NO: 607329 - DNA, 15 bp, Homo sapiens
aacagaaaggagaag

SEQ ID NO: 607330 - DNA, 15 bp, Homo sapiens
acagaaaggagaaga

SEQ ID NO: 607331 - DNA, 15 bp, Homo sapiens
cagaaaggagaagat

SEQ ID NO: 607332 - DNA, 15 bp, Homo sapiens
agaaaggagaagata

SEQ ID NO: 607333 - DNA, 15 bp, Homo sapiens
gaaaggagaagatag

SEQ ID NO: 607334 - DNA, 15 bp, Homo sapiens
aaaggagaagatagc

SEQ ID NO: 607335 - DNA, 15 bp, Homo sapiens
aaggagaagatagcg

SEQ ID NO: 607336 - DNA, 15 bp, Homo sapiens
aggagaagatagcgg

SEQ ID NO: 607337 - DNA, 15 bp, Homo sapiens
ggagaagatagcggg

SEQ ID NO: 607338 - DNA, 15 bp, Homo sapiens
gagaagatagcgggg

SEQ ID NO: 607339 - DNA, 15 bp, Homo sapiens
agaagatagcgggga

SEQ ID NO: 607340 - DNA, 15 bp, Homo sapiens
gaagatagcggggag

SEQ ID NO: 607341 - DNA, 15 bp, Homo sapiens
aagatagcggggagg

SEQ ID NO: 607342 - DNA, 15 bp, Homo sapiens
agatagcggggagga

SEQ ID NO: 607343 - DNA, 15 bp, Homo sapiens
gatagcggggaggaa

SEQ ID NO: 607344 - DNA, 15 bp, Homo sapiens
atagcggggaggaaa

SEQ ID NO: 607345 - DNA, 15 bp, Homo sapiens
tagcggggaggaaat

SEQ ID NO: 607346 - DNA, 15 bp, Homo sapiens
agcggggaggaaatg

SEQ ID NO: 607347 - DNA, 15 bp, Homo sapiens
gcggggaggaaatgt

SEQ ID NO: 607348 - DNA, 15 bp, Homo sapiens
cggggaggaaatgtg

SEQ ID NO: 607349 - DNA, 15 bp, Homo sapiens
ggggaggaaatgtgt

SEQ ID NO: 607350 - DNA, 15 bp, Homo sapiens
gggaggaaatgtgtg

SEQ ID NO: 607351 - DNA, 15 bp, Homo sapiens
ggaggaaatgtgtga

SEQ ID NO: 607352 - DNA, 15 bp, Homo sapiens
gaggaaatgtgtgag

SEQ ID NO: 607353 - DNA, 15 bp, Homo sapiens
aggaaatgtgtgagg

SEQ ID NO: 607354 - DNA, 15 bp, Homo sapiens
ggaaatgtgtgagga

SEQ ID NO: 607355 - DNA, 15 bp, Homo sapiens
gaaatgtgtgaggaa

SEQ ID NO: 607356 - DNA, 15 bp, Homo sapiens
aaatgtgtgaggaag

SEQ ID NO: 607357 - DNA, 15 bp, Homo sapiens
aatgtgtgaggaaga

SEQ ID NO: 607358 - DNA, 15 bp, Homo sapiens
atgtgtgaggaagaa

SEQ ID NO: 607359 - DNA, 15 bp, Homo sapiens
tgtgtgaggaagaaa

SEQ ID NO: 607360 - DNA, 15 bp, Homo sapiens
gtgtgaggaagaaac

SEQ ID NO: 607361 - DNA, 15 bp, Homo sapiens
tgtgaggaagaaaca

SEQ ID NO: 607362 - DNA, 15 bp, Homo sapiens
gtgaggaagaaacac

SEQ ID NO: 607363 - DNA, 15 bp, Homo sapiens
tgaggaagaaacaca

SEQ ID NO: 607364 - DNA, 15 bp, Homo sapiens
gaggaagaaacacat

SEQ ID NO: 607365 - DNA, 15 bp, Homo sapiens
aggaagaaacacatc

SEQ ID NO: 607366 - DNA, 15 bp, Homo sapiens
ggaagaaacacatca

SEQ ID NO: 607367 - DNA, 15 bp, Homo sapiens
gaagaaacacatcac

SEQ ID NO: 607368 - DNA, 15 bp, Homo sapiens
aagaaacacatcact

SEQ ID NO: 607369 - DNA, 15 bp, Homo sapiens
agaaacacatcactg

SEQ ID NO: 607370 - DNA, 15 bp, Homo sapiens
gaaacacatcactgt

SEQ ID NO: 607371 - DNA, 15 bp, Homo sapiens
aaacacatcactgtg

SEQ ID NO: 607372 - DNA, 15 bp, Homo sapiens
aacacatcactgtgg

SEQ ID NO: 607373 - DNA, 15 bp, Homo sapiens
acacatcactgtggc

SEQ ID NO: 607374 - DNA, 15 bp, Homo sapiens
cacatcactgtggct

SEQ ID NO: 607375 - DNA, 15 bp, Homo sapiens
acatcactgtggctt

SEQ ID NO: 607376 - DNA, 15 bp, Homo sapiens
catcactgtggcttg

SEQ ID NO: 607377 - DNA, 15 bp, Homo sapiens
atcactgtggcttgt

SEQ ID NO: 607378 - DNA, 15 bp, Homo sapiens
tcactgtggcttgtc

SEQ ID NO: 607379 - DNA, 15 bp, Homo sapiens
cactgtggcttgtcc

SEQ ID NO: 607380 - DNA, 15 bp, Homo sapiens
actgtggcttgtcct

SEQ ID NO: 607381 - DNA, 15 bp, Homo sapiens
ctgtggcttgtcctg

SEQ ID NO: 607382 - DNA, 15 bp, Homo sapiens
tgtggcttgtcctgg

SEQ ID NO: 607383 - DNA, 15 bp, Homo sapiens
gtggcttgtcctgga

SEQ ID NO: 607384 - DNA, 15 bp, Homo sapiens
tggcttgtcctggat

SEQ ID NO: 607385 - DNA, 15 bp, Homo sapiens
ggcttgtcctggatt

SEQ ID NO: 607386 - DNA, 15 bp, Homo sapiens
gcttgtcctggattt

SEQ ID NO: 607387 - DNA, 15 bp, Homo sapiens
cttgtcctggatttt

SEQ ID NO: 607388 - DNA, 15 bp, Homo sapiens
ttgtcctggattttt

SEQ ID NO: 607389 - DNA, 15 bp, Homo sapiens
tgtcctggatttttc

SEQ ID NO: 607390 - DNA, 15 bp, Homo sapiens
gtcctggatttttct

SEQ ID NO: 607391 - DNA, 15 bp, Homo sapiens
tcctggatttttctg

SEQ ID NO: 607392 - DNA, 15 bp, Homo sapiens
cctggatttttctgc

SEQ ID NO: 607393 - DNA, 15 bp, Homo sapiens
ctggatttttctgct

SEQ ID NO: 607394 - DNA, 15 bp, Homo sapiens
tggatttttctgctt

SEQ ID NO: 607395 - DNA, 15 bp, Homo sapiens
ggatttttctgcttc

SEQ ID NO: 607396 - DNA, 15 bp, Homo sapiens
gatttttctgcttct

SEQ ID NO: 607397 - DNA, 15 bp, Homo sapiens
atttttctgcttctg

SEQ ID NO: 607398 - DNA, 15 bp, Homo sapiens
tttttctgcttctgt

SEQ ID NO: 607399 - DNA, 15 bp, Homo sapiens
ttttctgcttctgtt

SEQ ID NO: 607400 - DNA, 15 bp, Homo sapiens
tttctgcttctgttc

SEQ ID NO: 607401 - DNA, 15 bp, Homo sapiens
ttctgcttctgttct

SEQ ID NO: 607402 - DNA, 15 bp, Homo sapiens
tctgcttctgttctc

SEQ ID NO: 607403 - DNA, 15 bp, Homo sapiens
ctgcttctgttctcg

SEQ ID NO: 607404 - DNA, 15 bp, Homo sapiens
tgcttctgttctcgt

SEQ ID NO: 607405 - DNA, 15 bp, Homo sapiens
gcttctgttctcgtg

SEQ ID NO: 607406 - DNA, 15 bp, Homo sapiens
cttctgttctcgtgt

SEQ ID NO: 607407 - DNA, 15 bp, Homo sapiens
ttctgttctcgtgtt

SEQ ID NO: 607408 - DNA, 15 bp, Homo sapiens
tctgttctcgtgttt

SEQ ID NO: 607409 - DNA, 15 bp, Homo sapiens
ctgttctcgtgtttt

SEQ ID NO: 607410 - DNA, 15 bp, Homo sapiens
tgttctcgtgttttg

SEQ ID NO: 607411 - DNA, 15 bp, Homo sapiens
gttctcgtgttttgg

SEQ ID NO: 607412 - DNA, 15 bp, Homo sapiens
ttctcgtgttttggg

SEQ ID NO: 607413 - DNA, 15 bp, Homo sapiens
tctcgtgttttggga

SEQ ID NO: 607414 - DNA, 15 bp, Homo sapiens
ctcgtgttttgggaa

SEQ ID NO: 607415 - DNA, 15 bp, Homo sapiens
tcgtgttttgggaag

SEQ ID NO: 607416 - DNA, 15 bp, Homo sapiens
cgtgttttgggaagt

SEQ ID NO: 607417 - DNA, 15 bp, Homo sapiens
gtgttttgggaagtc

SEQ ID NO: 607418 - DNA, 15 bp, Homo sapiens
tgttttgggaagtct

SEQ ID NO: 607419 - DNA, 15 bp, Homo sapiens
gttttgggaagtctg

SEQ ID NO: 607420 - DNA, 15 bp, Homo sapiens
ttttgggaagtctgg

SEQ ID NO: 607421 - DNA, 15 bp, Homo sapiens
tttgggaagtctgga

SEQ ID NO: 607422 - DNA, 15 bp, Homo sapiens
ttgggaagtctggag

SEQ ID NO: 607423 - DNA, 15 bp, Homo sapiens
tgggaagtctggagg

SEQ ID NO: 607424 - DNA, 15 bp, Homo sapiens
gggaagtctggagga

SEQ ID NO: 607425 - DNA, 15 bp, Homo sapiens
ggaagtctggaggag

SEQ ID NO: 607426 - DNA, 15 bp, Homo sapiens
gaagtctggaggaga

SEQ ID NO: 607427 - DNA, 15 bp, Homo sapiens
aagtctggaggagac

SEQ ID NO: 607428 - DNA, 15 bp, Homo sapiens
agtctggaggagact

SEQ ID NO: 607429 - DNA, 15 bp, Homo sapiens
gtctggaggagactt

SEQ ID NO: 607430 - DNA, 15 bp, Homo sapiens
tctggaggagacttg

SEQ ID NO: 607431 - DNA, 15 bp, Homo sapiens
ctggaggagacttga

SEQ ID NO: 607432 - DNA, 15 bp, Homo sapiens
tggaggagacttgaa

SEQ ID NO: 607433 - DNA, 15 bp, Homo sapiens
ggaggagacttgaaa

SEQ ID NO: 607434 - DNA, 15 bp, Homo sapiens
gaggagacttgaaaa

SEQ ID NO: 607435 - DNA, 15 bp, Homo sapiens
aggagacttgaaaat

SEQ ID NO: 607436 - DNA, 15 bp, Homo sapiens
ggagacttgaaaatc

SEQ ID NO: 607437 - DNA, 15 bp, Homo sapiens
gagacttgaaaatca

SEQ ID NO: 607438 - DNA, 15 bp, Homo sapiens
agacttgaaaatcat

SEQ ID NO: 607439 - DNA, 15 bp, Homo sapiens
gacttgaaaatcatt

SEQ ID NO: 607440 - DNA, 15 bp, Homo sapiens
acttgaaaatcattc

SEQ ID NO: 607441 - DNA, 15 bp, Homo sapiens
cttgaaaatcattca

SEQ ID NO: 607442 - DNA, 15 bp, Homo sapiens
ttgaaaatcattcat

SEQ ID NO: 607443 - DNA, 15 bp, Homo sapiens
tgaaaatcattcatg

SEQ ID NO: 607444 - DNA, 15 bp, Homo sapiens
gaaaatcattcatgt

SEQ ID NO: 607445 - DNA, 15 bp, Homo sapiens
aaaatcattcatgtc

SEQ ID NO: 607446 - DNA, 15 bp, Homo sapiens
aaatcattcatgtcc

SEQ ID NO: 607447 - DNA, 15 bp, Homo sapiens
aatcattcatgtccc

SEQ ID NO: 607448 - DNA, 15 bp, Homo sapiens
atcattcatgtcccc

SEQ ID NO: 607449 - DNA, 15 bp, Homo sapiens
tcattcatgtcccca

SEQ ID NO: 607450 - DNA, 15 bp, Homo sapiens
cattcatgtccccac

SEQ ID NO: 607451 - DNA, 15 bp, Homo sapiens
attcatgtccccacc

SEQ ID NO: 607452 - DNA, 15 bp, Homo sapiens
ttcatgtccccaccc

SEQ ID NO: 607453 - DNA, 15 bp, Homo sapiens
tcatgtccccaccct

SEQ ID NO: 607454 - DNA, 15 bp, Homo sapiens
catgtccccaccctg

SEQ ID NO: 607455 - DNA, 15 bp, Homo sapiens
atgtccccaccctga

SEQ ID NO: 607456 - DNA, 15 bp, Homo sapiens
tgtccccaccctgag

SEQ ID NO: 607457 - DNA, 15 bp, Homo sapiens
gtccccaccctgagg

SEQ ID NO: 607458 - DNA, 15 bp, Homo sapiens
tccccaccctgagga

SEQ ID NO: 607459 - DNA, 15 bp, Homo sapiens
ccccaccctgaggat

SEQ ID NO: 607460 - DNA, 15 bp, Homo sapiens
cccaccctgaggatg

SEQ ID NO: 607461 - DNA, 15 bp, Homo sapiens
ccaccctgaggatgg

SEQ ID NO: 607462 - DNA, 15 bp, Homo sapiens
caccctgaggatggc

SEQ ID NO: 607463 - DNA, 15 bp, Homo sapiens
accctgaggatggct

SEQ ID NO: 607464 - DNA, 15 bp, Homo sapiens
ccctgaggatggctt

SEQ ID NO: 607465 - DNA, 15 bp, Homo sapiens
cctgaggatggctta

SEQ ID NO: 607466 - DNA, 15 bp, Homo sapiens
ctgaggatggcttag

SEQ ID NO: 607467 - DNA, 15 bp, Homo sapiens
tgaggatggcttagt

SEQ ID NO: 607468 - DNA, 15 bp, Homo sapiens
gaggatggcttagta

SEQ ID NO: 607469 - DNA, 15 bp, Homo sapiens
aggatggcttagtag

SEQ ID NO: 607470 - DNA, 15 bp, Homo sapiens
ggatggcttagtagc

SEQ ID NO: 607471 - DNA, 15 bp, Homo sapiens
gatggcttagtagca

SEQ ID NO: 607472 - DNA, 15 bp, Homo sapiens
atggcttagtagcag

SEQ ID NO: 607473 - DNA, 15 bp, Homo sapiens
tggcttagtagcaga

SEQ ID NO: 607474 - DNA, 15 bp, Homo sapiens
ggcttagtagcagag

SEQ ID NO: 607475 - DNA, 15 bp, Homo sapiens
gcttagtagcagaga

SEQ ID NO: 607476 - DNA, 15 bp, Homo sapiens
cttagtagcagagag

SEQ ID NO: 607477 - DNA, 15 bp, Homo sapiens
ttagtagcagagagg

SEQ ID NO: 607478 - DNA, 15 bp, Homo sapiens
tagtagcagagaggc

SEQ ID NO: 607479 - DNA, 15 bp, Homo sapiens
agtagcagagaggcc

SEQ ID NO: 607480 - DNA, 15 bp, Homo sapiens
gtagcagagaggcca

SEQ ID NO: 607481 - DNA, 15 bp, Homo sapiens
tagcagagaggccat

SEQ ID NO: 607482 - DNA, 15 bp, Homo sapiens
agcagagaggccatg

SEQ ID NO: 607483 - DNA, 15 bp, Homo sapiens
gcagagaggccatga

SEQ ID NO: 607484 - DNA, 15 bp, Homo sapiens
cagagaggccatgaa

SEQ ID NO: 607485 - DNA, 15 bp, Homo sapiens
agagaggccatgaaa

SEQ ID NO: 607486 - DNA, 15 bp, Homo sapiens
gagaggccatgaaaa

SEQ ID NO: 607487 - DNA, 15 bp, Homo sapiens
agaggccatgaaaac

SEQ ID NO: 607488 - DNA, 15 bp, Homo sapiens
gaggccatgaaaact

SEQ ID NO: 607489 - DNA, 15 bp, Homo sapiens
aggccatgaaaactc

SEQ ID NO: 607490 - DNA, 15 bp, Homo sapiens
ggccatgaaaactct

SEQ ID NO: 607491 - DNA, 15 bp, Homo sapiens
gccatgaaaactctt

SEQ ID NO: 607492 - DNA, 15 bp, Homo sapiens
ccatgaaaactcttt

SEQ ID NO: 607493 - DNA, 15 bp, Homo sapiens
catgaaaactctttg

SEQ ID NO: 607494 - DNA, 15 bp, Homo sapiens
atgaaaactctttgc

SEQ ID NO: 607495 - DNA, 15 bp, Homo sapiens
tgaaaactctttgct

SEQ ID NO: 607496 - DNA, 15 bp, Homo sapiens
gaaaactctttgctg

SEQ ID NO: 607497 - DNA, 15 bp, Homo sapiens
aaaactctttgctga

SEQ ID NO: 607498 - DNA, 15 bp, Homo sapiens
aaactctttgctgat

SEQ ID NO: 607499 - DNA, 15 bp, Homo sapiens
aactctttgctgatg

SEQ ID NO: 607500 - DNA, 15 bp, Homo sapiens
actctttgctgatgg

SEQ ID NO: 607501 - DNA, 15 bp, Homo sapiens
ctctttgctgatggc

SEQ ID NO: 607502 - DNA, 15 bp, Homo sapiens
tctttgctgatggct

SEQ ID NO: 607503 - DNA, 15 bp, Homo sapiens
ctttgctgatggctc

SEQ ID NO: 607504 - DNA, 15 bp, Homo sapiens
tttgctgatggctct

SEQ ID NO: 607505 - DNA, 15 bp, Homo sapiens
ttgctgatggctctg

SEQ ID NO: 607506 - DNA, 15 bp, Homo sapiens
tgctgatggctctga

SEQ ID NO: 607507 - DNA, 15 bp, Homo sapiens
gctgatggctctgaa

SEQ ID NO: 607508 - DNA, 15 bp, Homo sapiens
ctgatggctctgaaa

SEQ ID NO: 607509 - DNA, 15 bp, Homo sapiens
tgatggctctgaaag

SEQ ID NO: 607510 - DNA, 15 bp, Homo sapiens
gatggctctgaaagc

SEQ ID NO: 607511 - DNA, 15 bp, Homo sapiens
atggctctgaaagca

SEQ ID NO: 607512 - DNA, 15 bp, Homo sapiens
tggctctgaaagcaa

SEQ ID NO: 607513 - DNA, 15 bp, Homo sapiens
ggctctgaaagcaag

SEQ ID NO: 607514 - DNA, 15 bp, Homo sapiens
gctctgaaagcaagg

SEQ ID NO: 607515 - DNA, 15 bp, Homo sapiens
ctctgaaagcaagga

SEQ ID NO: 607516 - DNA, 15 bp, Homo sapiens
tctgaaagcaaggat

SEQ ID NO: 607517 - DNA, 15 bp, Homo sapiens
ctgaaagcaaggatg

SEQ ID NO: 607518 - DNA, 15 bp, Homo sapiens
tgaaagcaaggatgt

SEQ ID NO: 607519 - DNA, 15 bp, Homo sapiens
gaaagcaaggatgtt

SEQ ID NO: 607520 - DNA, 15 bp, Homo sapiens
aaagcaaggatgttg

SEQ ID NO: 607521 - DNA, 15 bp, Homo sapiens
aagcaaggatgttgc

SEQ ID NO: 607522 - DNA, 15 bp, Homo sapiens
agcaaggatgttgct

SEQ ID NO: 607523 - DNA, 15 bp, Homo sapiens
gcaaggatgttgctt

SEQ ID NO: 607524 - DNA, 15 bp, Homo sapiens
caaggatgttgcttc

SEQ ID NO: 607525 - DNA, 15 bp, Homo sapiens
aaggatgttgcttca

SEQ ID NO: 607526 - DNA, 15 bp, Homo sapiens
aggatgttgcttcac

SEQ ID NO: 607527 - DNA, 15 bp, Homo sapiens
ggatgttgcttcact

SEQ ID NO: 607528 - DNA, 15 bp, Homo sapiens
gatgttgcttcactg

SEQ ID NO: 607529 - DNA, 15 bp, Homo sapiens
atgttgcttcactgg

SEQ ID NO: 607530 - DNA, 15 bp, Homo sapiens
tgttgcttcactggg

SEQ ID NO: 607531 - DNA, 15 bp, Homo sapiens
gttgcttcactgggc

SEQ ID NO: 607532 - DNA, 15 bp, Homo sapiens
ttgcttcactgggct

SEQ ID NO: 607533 - DNA, 15 bp, Homo sapiens
tgcttcactgggctg

SEQ ID NO: 607534 - DNA, 15 bp, Homo sapiens
gcttcactgggctgc

SEQ ID NO: 607535 - DNA, 15 bp, Homo sapiens
cttcactgggctgct

SEQ ID NO: 607536 - DNA, 15 bp, Homo sapiens
ttcactgggctgctg

SEQ ID NO: 607537 - DNA, 15 bp, Homo sapiens
tcactgggctgctga

SEQ ID NO: 607538 - DNA, 15 bp, Homo sapiens
cactgggctgctgaa

SEQ ID NO: 607539 - DNA, 15 bp, Homo sapiens
actgggctgctgaag

SEQ ID NO: 607540 - DNA, 15 bp, Homo sapiens
ctgggctgctgaagg

SEQ ID NO: 607541 - DNA, 15 bp, Homo sapiens
tgggctgctgaaggc

SEQ ID NO: 607542 - DNA, 15 bp, Homo sapiens
gggctgctgaaggcc

SEQ ID NO: 607543 - DNA, 15 bp, Homo sapiens
ggctgctgaaggcct

SEQ ID NO: 607544 - DNA, 15 bp, Homo sapiens
gctgctgaaggcctg

SEQ ID NO: 607545 - DNA, 15 bp, Homo sapiens
ctgctgaaggcctgc

SEQ ID NO: 607546 - DNA, 15 bp, Homo sapiens
tgctgaaggcctgcc

SEQ ID NO: 607547 - DNA, 15 bp, Homo sapiens
gctgaaggcctgcct

SEQ ID NO: 607548 - DNA, 15 bp, Homo sapiens
ctgaaggcctgcctg

SEQ ID NO: 607549 - DNA, 15 bp, Homo sapiens
tgaaggcctgcctgg

SEQ ID NO: 607550 - DNA, 15 bp, Homo sapiens
gaaggcctgcctggg

SEQ ID NO: 607551 - DNA, 15 bp, Homo sapiens
aaggcctgcctgggg

SEQ ID NO: 607552 - DNA, 15 bp, Homo sapiens
aggcctgcctggggg

SEQ ID NO: 607553 - DNA, 15 bp, Homo sapiens
ggcctgcctgggggt

SEQ ID NO: 607554 - DNA, 15 bp, Homo sapiens
gcctgcctgggggtt

SEQ ID NO: 607555 - DNA, 15 bp, Homo sapiens
cctgcctgggggttc

SEQ ID NO: 607556 - DNA, 15 bp, Homo sapiens
ctgcctgggggttct

SEQ ID NO: 607557 - DNA, 15 bp, Homo sapiens
tgcctgggggttctg

SEQ ID NO: 607558 - DNA, 15 bp, Homo sapiens
gcctgggggttctga

SEQ ID NO: 607559 - DNA, 15 bp, Homo sapiens
cctgggggttctgag

SEQ ID NO: 607560 - DNA, 15 bp, Homo sapiens
ctgggggttctgagc

SEQ ID NO: 607561 - DNA, 15 bp, Homo sapiens
tgggggttctgagca

SEQ ID NO: 607562 - DNA, 15 bp, Homo sapiens
gggggttctgagcag

SEQ ID NO: 607563 - DNA, 15 bp, Homo sapiens
ggggttctgagcaga

SEQ ID NO: 607564 - DNA, 15 bp, Homo sapiens
gggttctgagcagag

SEQ ID NO: 607565 - DNA, 15 bp, Homo sapiens
ggttctgagcagaga

SEQ ID NO: 607566 - DNA, 15 bp, Homo sapiens
gttctgagcagagag

SEQ ID NO: 607567 - DNA, 15 bp, Homo sapiens
ttctgagcagagagt

SEQ ID NO: 607568 - DNA, 15 bp, Homo sapiens
tctgagcagagagta

SEQ ID NO: 607569 - DNA, 15 bp, Homo sapiens
ctgagcagagagtac

SEQ ID NO: 607570 - DNA, 15 bp, Homo sapiens
tgagcagagagtaca

SEQ ID NO: 607571 - DNA, 15 bp, Homo sapiens
gagcagagagtacag

SEQ ID NO: 607572 - DNA, 15 bp, Homo sapiens
agcagagagtacagg

SEQ ID NO: 607573 - DNA, 15 bp, Homo sapiens
gcagagagtacaggc

SEQ ID NO: 607574 - DNA, 15 bp, Homo sapiens
cagagagtacaggcc

SEQ ID NO: 607575 - DNA, 15 bp, Homo sapiens
agagagtacaggccc

SEQ ID NO: 607576 - DNA, 15 bp, Homo sapiens
gagagtacaggcccc

SEQ ID NO: 607577 - DNA, 15 bp, Homo sapiens
agagtacaggcccct

SEQ ID NO: 607578 - DNA, 15 bp, Homo sapiens
gagtacaggcccctc

SEQ ID NO: 607579 - DNA, 15 bp, Homo sapiens
agtacaggcccctcc

SEQ ID NO: 607580 - DNA, 15 bp, Homo sapiens
gtacaggcccctccc

SEQ ID NO: 607581 - DNA, 15 bp, Homo sapiens
tacaggcccctccca

SEQ ID NO: 607582 - DNA, 15 bp, Homo sapiens
acaggcccctcccag

SEQ ID NO: 607583 - DNA, 15 bp, Homo sapiens
caggcccctcccagg

SEQ ID NO: 607584 - DNA, 15 bp, Homo sapiens
aggcccctcccagga

SEQ ID NO: 607585 - DNA, 15 bp, Homo sapiens
ggcccctcccaggag

SEQ ID NO: 607586 - DNA, 15 bp, Homo sapiens
gcccctcccaggagg

SEQ ID NO: 607587 - DNA, 15 bp, Homo sapiens
cccctcccaggaggg

SEQ ID NO: 607588 - DNA, 15 bp, Homo sapiens
ccctcccaggagggc

SEQ ID NO: 607589 - DNA, 15 bp, Homo sapiens
cctcccaggagggcg

SEQ ID NO: 607590 - DNA, 15 bp, Homo sapiens
ctcccaggagggcgg

SEQ ID NO: 607591 - DNA, 15 bp, Homo sapiens
tcccaggagggcggc

SEQ ID NO: 607592 - DNA, 15 bp, Homo sapiens
cccaggagggcggcc

SEQ ID NO: 607593 - DNA, 15 bp, Homo sapiens
ccaggagggcggcct

SEQ ID NO: 607594 - DNA, 15 bp, Homo sapiens
caggagggcggccta

SEQ ID NO: 607595 - DNA, 15 bp, Homo sapiens
aggagggcggcctaa

SEQ ID NO: 607596 - DNA, 15 bp, Homo sapiens
ggagggcggcctaac

SEQ ID NO: 607597 - DNA, 15 bp, Homo sapiens
gagggcggcctaacc

SEQ ID NO: 607598 - DNA, 15 bp, Homo sapiens
agggcggcctaacca

SEQ ID NO: 607599 - DNA, 15 bp, Homo sapiens
gggcggcctaaccac

SEQ ID NO: 607600 - DNA, 15 bp, Homo sapiens
ggcggcctaaccacc

SEQ ID NO: 607601 - DNA, 15 bp, Homo sapiens
gcggcctaaccacca

SEQ ID NO: 607602 - DNA, 15 bp, Homo sapiens
cggcctaaccaccat

SEQ ID NO: 607603 - DNA, 15 bp, Homo sapiens
ggcctaaccaccatg

SEQ ID NO: 607604 - DNA, 15 bp, Homo sapiens
gcctaaccaccatgc

SEQ ID NO: 607605 - DNA, 15 bp, Homo sapiens
cctaaccaccatgct

SEQ ID NO: 607606 - DNA, 15 bp, Homo sapiens
ctaaccaccatgctg

SEQ ID NO: 607607 - DNA, 15 bp, Homo sapiens
taaccaccatgctgg

SEQ ID NO: 607608 - DNA, 15 bp, Homo sapiens
aaccaccatgctggc

SEQ ID NO: 607609 - DNA, 15 bp, Homo sapiens
accaccatgctggca

SEQ ID NO: 607610 - DNA, 15 bp, Homo sapiens
ccaccatgctggcat

SEQ ID NO: 607611 - DNA, 15 bp, Homo sapiens
caccatgctggcatt

SEQ ID NO: 607612 - DNA, 15 bp, Homo sapiens
accatgctggcattt

SEQ ID NO: 607613 - DNA, 15 bp, Homo sapiens
ccatgctggcatttc

SEQ ID NO: 607614 - DNA, 15 bp, Homo sapiens
catgctggcatttct

SEQ ID NO: 607615 - DNA, 15 bp, Homo sapiens
atgctggcatttctg

SEQ ID NO: 607616 - DNA, 15 bp, Homo sapiens
tgctggcatttctgt

SEQ ID NO: 607617 - DNA, 15 bp, Homo sapiens
gctggcatttctgtg

SEQ ID NO: 607618 - DNA, 15 bp, Homo sapiens
ctggcatttctgtgg

SEQ ID NO: 607619 - DNA, 15 bp, Homo sapiens
tggcatttctgtgga

SEQ ID NO: 607620 - DNA, 15 bp, Homo sapiens
ggcatttctgtggac

SEQ ID NO: 607621 - DNA, 15 bp, Homo sapiens
gcatttctgtggacc

SEQ ID NO: 607622 - DNA, 15 bp, Homo sapiens
catttctgtggacca

SEQ ID NO: 607623 - DNA, 15 bp, Homo sapiens
atttctgtggaccat

SEQ ID NO: 607624 - DNA, 15 bp, Homo sapiens
tttctgtggaccatg

SEQ ID NO: 607625 - DNA, 15 bp, Homo sapiens
ttctgtggaccatgg

SEQ ID NO: 607626 - DNA, 15 bp, Homo sapiens
tctgtggaccatggt

SEQ ID NO: 607627 - DNA, 15 bp, Homo sapiens
ctgtggaccatggtc

SEQ ID NO: 607628 - DNA, 15 bp, Homo sapiens
tgtggaccatggtct

SEQ ID NO: 607629 - DNA, 15 bp, Homo sapiens
gtggaccatggtctg

SEQ ID NO: 607630 - DNA, 15 bp, Homo sapiens
tggaccatggtctgc

SEQ ID NO: 607631 - DNA, 15 bp, Homo sapiens
ggaccatggtctgct

SEQ ID NO: 607632 - DNA, 15 bp, Homo sapiens
gaccatggtctgctg

SEQ ID NO: 607633 - DNA, 15 bp, Homo sapiens
accatggtctgctgt

SEQ ID NO: 607634 - DNA, 15 bp, Homo sapiens
ccatggtctgctgtc

SEQ ID NO: 607635 - DNA, 15 bp, Homo sapiens
catggtctgctgtct

SEQ ID NO: 607636 - DNA, 15 bp, Homo sapiens
atggtctgctgtctc

SEQ ID NO: 607637 - DNA, 15 bp, Homo sapiens
tggtctgctgtctca

SEQ ID NO: 607638 - DNA, 15 bp, Homo sapiens
ggtctgctgtctcag

SEQ ID NO: 607639 - DNA, 15 bp, Homo sapiens
gtctgctgtctcaga

SEQ ID NO: 607640 - DNA, 15 bp, Homo sapiens
tctgctgtctcagac

SEQ ID NO: 607641 - DNA, 15 bp, Homo sapiens
ctgctgtctcagacc

SEQ ID NO: 607642 - DNA, 15 bp, Homo sapiens
tgctgtctcagaccc

SEQ ID NO: 607643 - DNA, 15 bp, Homo sapiens
gctgtctcagacccc

SEQ ID NO: 607644 - DNA, 15 bp, Homo sapiens
ctgtctcagaccccc

SEQ ID NO: 607645 - DNA, 15 bp, Homo sapiens
tgtctcagaccccct

SEQ ID NO: 607646 - DNA, 15 bp, Homo sapiens
gtctcagaccccctc

SEQ ID NO: 607647 - DNA, 15 bp, Homo sapiens
tctcagaccccctcc

SEQ ID NO: 607648 - DNA, 15 bp, Homo sapiens
ctcagaccccctcca

SEQ ID NO: 607649 - DNA, 15 bp, Homo sapiens
tcagaccccctccac

SEQ ID NO: 607650 - DNA, 15 bp, Homo sapiens
cagaccccctccaca

SEQ ID NO: 607651 - DNA, 15 bp, Homo sapiens
agaccccctccacaa

SEQ ID NO: 607652 - DNA, 15 bp, Homo sapiens
gaccccctccacaat

SEQ ID NO: 607653 - DNA, 15 bp, Homo sapiens
accccctccacaata

SEQ ID NO: 607654 - DNA, 15 bp, Homo sapiens
ccccctccacaatag

SEQ ID NO: 607655 - DNA, 15 bp, Homo sapiens
cccctccacaatagg

SEQ ID NO: 607656 - DNA, 15 bp, Homo sapiens
ccctccacaataggg

SEQ ID NO: 607657 - DNA, 15 bp, Homo sapiens
cctccacaatagggt

SEQ ID NO: 607658 - DNA, 15 bp, Homo sapiens
ctccacaatagggtc

SEQ ID NO: 607659 - DNA, 15 bp, Homo sapiens
tccacaatagggtct

SEQ ID NO: 607660 - DNA, 15 bp, Homo sapiens
ccacaatagggtctg

SEQ ID NO: 607661 - DNA, 15 bp, Homo sapiens
cacaatagggtctgc

SEQ ID NO: 607662 - DNA, 15 bp, Homo sapiens
acaatagggtctgca

SEQ ID NO: 607663 - DNA, 15 bp, Homo sapiens
caatagggtctgcaa

SEQ ID NO: 607664 - DNA, 15 bp, Homo sapiens
aatagggtctgcaat

SEQ ID NO: 607665 - DNA, 15 bp, Homo sapiens
atagggtctgcaatc

SEQ ID NO: 607666 - DNA, 15 bp, Homo sapiens
tagggtctgcaatct

SEQ ID NO: 607667 - DNA, 15 bp, Homo sapiens
agggtctgcaatctc

SEQ ID NO: 607668 - DNA, 15 bp, Homo sapiens
gggtctgcaatctca

SEQ ID NO: 607669 - DNA, 15 bp, Homo sapiens
ggtctgcaatctcat

SEQ ID NO: 607670 - DNA, 15 bp, Homo sapiens
gtctgcaatctcatt

SEQ ID NO: 607671 - DNA, 15 bp, Homo sapiens
tctgcaatctcattc

SEQ ID NO: 607672 - DNA, 15 bp, Homo sapiens
ctgcaatctcattca

SEQ ID NO: 607673 - DNA, 15 bp, Homo sapiens
tgcaatctcattcac

SEQ ID NO: 607674 - DNA, 15 bp, Homo sapiens
gcaatctcattcacc

SEQ ID NO: 607675 - DNA, 15 bp, Homo sapiens
caatctcattcaccc

SEQ ID NO: 607676 - DNA, 15 bp, Homo sapiens
aatctcattcacccc

SEQ ID NO: 607677 - DNA, 15 bp, Homo sapiens
atctcattcacccca

SEQ ID NO: 607678 - DNA, 15 bp, Homo sapiens
tctcattcaccccat

SEQ ID NO: 607679 - DNA, 15 bp, Homo sapiens
ctcattcaccccata

SEQ ID NO: 607680 - DNA, 15 bp, Homo sapiens
tcattcaccccataa

SEQ ID NO: 607681 - DNA, 15 bp, Homo sapiens
cattcaccccataaa

SEQ ID NO: 607682 - DNA, 15 bp, Homo sapiens
attcaccccataaat

SEQ ID NO: 607683 - DNA, 15 bp, Homo sapiens
ttcaccccataaata

SEQ ID NO: 607684 - DNA, 15 bp, Homo sapiens
tcaccccataaatac

SEQ ID NO: 607685 - DNA, 15 bp, Homo sapiens
caccccataaataca

SEQ ID NO: 607686 - DNA, 15 bp, Homo sapiens
accccataaatacat

SEQ ID NO: 607687 - DNA, 15 bp, Homo sapiens
ccccataaatacatt

SEQ ID NO: 607688 - DNA, 15 bp, Homo sapiens
cccataaatacattc

SEQ ID NO: 607689 - DNA, 15 bp, Homo sapiens
ccataaatacattct

SEQ ID NO: 607690 - DNA, 15 bp, Homo sapiens
cataaatacattctg

SEQ ID NO: 607691 - DNA, 15 bp, Homo sapiens
ataaatacattctgt

SEQ ID NO: 607692 - DNA, 15 bp, Homo sapiens
taaatacattctgtc

SEQ ID NO: 607693 - DNA, 15 bp, Homo sapiens
aaatacattctgtct

SEQ ID NO: 607694 - DNA, 15 bp, Homo sapiens
aatacattctgtctt

SEQ ID NO: 607695 - DNA, 15 bp, Homo sapiens
atacattctgtcttt

SEQ ID NO: 607696 - DNA, 15 bp, Homo sapiens
tacattctgtctttc

SEQ ID NO: 607697 - DNA, 15 bp, Homo sapiens
acattctgtctttcc

SEQ ID NO: 607698 - DNA, 15 bp, Homo sapiens
cattctgtctttcct

SEQ ID NO: 607699 - DNA, 15 bp, Homo sapiens
attctgtctttcctc

SEQ ID NO: 607700 - DNA, 15 bp, Homo sapiens
ttctgtctttcctct

SEQ ID NO: 607701 - DNA, 15 bp, Homo sapiens
tctgtctttcctctg

SEQ ID NO: 607702 - DNA, 15 bp, Homo sapiens
ctgtctttcctctga

SEQ ID NO: 607703 - DNA, 15 bp, Homo sapiens
tgtctttcctctgat

SEQ ID NO: 607704 - DNA, 15 bp, Homo sapiens
gtctttcctctgatc

SEQ ID NO: 607705 - DNA, 15 bp, Homo sapiens
tctttcctctgatcc

SEQ ID NO: 607706 - DNA, 15 bp, Homo sapiens
ctttcctctgatccc

SEQ ID NO: 607707 - DNA, 15 bp, Homo sapiens
tttcctctgatcccc

SEQ ID NO: 607708 - DNA, 15 bp, Homo sapiens
ttcctctgatcccct

SEQ ID NO: 607709 - DNA, 15 bp, Homo sapiens
tcctctgatcccctc

SEQ ID NO: 607710 - DNA, 15 bp, Homo sapiens
cctctgatcccctcc

SEQ ID NO: 607711 - DNA, 15 bp, Homo sapiens
ctctgatcccctccc

SEQ ID NO: 607712 - DNA, 15 bp, Homo sapiens
tctgatcccctccca

SEQ ID NO: 607713 - DNA, 15 bp, Homo sapiens
ctgatcccctcccat

SEQ ID NO: 607714 - DNA, 15 bp, Homo sapiens
tgatcccctcccatt

SEQ ID NO: 607715 - DNA, 15 bp, Homo sapiens
gatcccctcccatta

SEQ ID NO: 607716 - DNA, 15 bp, Homo sapiens
atcccctcccattag

SEQ ID NO: 607717 - DNA, 15 bp, Homo sapiens
tcccctcccattagc

SEQ ID NO: 607718 - DNA, 15 bp, Homo sapiens
cccctcccattagca

SEQ ID NO: 607719 - DNA, 15 bp, Homo sapiens
ccctcccattagcag

SEQ ID NO: 607720 - DNA, 15 bp, Homo sapiens
cctcccattagcagg

SEQ ID NO: 607721 - DNA, 15 bp, Homo sapiens
ctcccattagcaggg

SEQ ID NO: 607722 - DNA, 15 bp, Homo sapiens
tcccattagcagggg

SEQ ID NO: 607723 - DNA, 15 bp, Homo sapiens
cccattagcaggggg

SEQ ID NO: 607724 - DNA, 15 bp, Homo sapiens
ccattagcaggggga

SEQ ID NO: 607725 - DNA, 15 bp, Homo sapiens
cattagcagggggaa

SEQ ID NO: 607726 - DNA, 15 bp, Homo sapiens
attagcagggggaaa

SEQ ID NO: 607727 - DNA, 15 bp, Homo sapiens
ttagcagggggaaat

SEQ ID NO: 607728 - DNA, 15 bp, Homo sapiens
tagcagggggaaata

SEQ ID NO: 607729 - DNA, 15 bp, Homo sapiens
agcagggggaaataa

SEQ ID NO: 607730 - DNA, 15 bp, Homo sapiens
gcagggggaaataaa

SEQ ID NO: 607731 - DNA, 15 bp, Homo sapiens
cagggggaaataaat

SEQ ID NO: 607732 - DNA, 15 bp, Homo sapiens
agggggaaataaatg

SEQ ID NO: 607733 - DNA, 15 bp, Homo sapiens
gggggaaataaatgg

SEQ ID NO: 607734 - DNA, 15 bp, Homo sapiens
ggggaaataaatgga

SEQ ID NO: 607735 - DNA, 15 bp, Homo sapiens
gggaaataaatggaa

SEQ ID NO: 607736 - DNA, 15 bp, Homo sapiens
ggaaataaatggaag

SEQ ID NO: 607737 - DNA, 15 bp, Homo sapiens
gaaataaatggaagt

SEQ ID NO: 607738 - DNA, 15 bp, Homo sapiens
aaataaatggaagtc

SEQ ID NO: 607739 - DNA, 15 bp, Homo sapiens
aataaatggaagtca

SEQ ID NO: 607740 - DNA, 15 bp, Homo sapiens
ataaatggaagtcag

SEQ ID NO: 607741 - DNA, 15 bp, Homo sapiens
taaatggaagtcaga

SEQ ID NO: 607742 - DNA, 15 bp, Homo sapiens
aaatggaagtcagac

SEQ ID NO: 607743 - DNA, 15 bp, Homo sapiens
aatggaagtcagacg

SEQ ID NO: 607744 - DNA, 15 bp, Homo sapiens
atggaagtcagacgg

SEQ ID NO: 607745 - DNA, 15 bp, Homo sapiens
tggaagtcagacggc

SEQ ID NO: 607746 - DNA, 15 bp, Homo sapiens
ggaagtcagacggcc

SEQ ID NO: 607747 - DNA, 15 bp, Homo sapiens
gaagtcagacggccc

SEQ ID NO: 607748 - DNA, 15 bp, Homo sapiens
aagtcagacggccca

SEQ ID NO: 607749 - DNA, 15 bp, Homo sapiens
agtcagacggcccag

SEQ ID NO: 607750 - DNA, 15 bp, Homo sapiens
gtcagacggcccagt

SEQ ID NO: 607751 - DNA, 15 bp, Homo sapiens
tcagacggcccagtt

SEQ ID NO: 607752 - DNA, 15 bp, Homo sapiens
cagacggcccagtta

SEQ ID NO: 607753 - DNA, 15 bp, Homo sapiens
agacggcccagttag

SEQ ID NO: 607754 - DNA, 15 bp, Homo sapiens
gacggcccagttaga

SEQ ID NO: 607755 - DNA, 15 bp, Homo sapiens
acggcccagttagaa

SEQ ID NO: 607756 - DNA, 15 bp, Homo sapiens
cggcccagttagaag

SEQ ID NO: 607757 - DNA, 15 bp, Homo sapiens
ggcccagttagaagg

SEQ ID NO: 607758 - DNA, 15 bp, Homo sapiens
gcccagttagaaggc

SEQ ID NO: 607759 - DNA, 15 bp, Homo sapiens
cccagttagaaggca

SEQ ID NO: 607760 - DNA, 15 bp, Homo sapiens
ccagttagaaggcag

SEQ ID NO: 607761 - DNA, 15 bp, Homo sapiens
cagttagaaggcagg

SEQ ID NO: 607762 - DNA, 15 bp, Homo sapiens
agttagaaggcaggc

SEQ ID NO: 607763 - DNA, 15 bp, Homo sapiens
gttagaaggcaggca

SEQ ID NO: 607764 - DNA, 15 bp, Homo sapiens
ttagaaggcaggcag

SEQ ID NO: 607765 - DNA, 15 bp, Homo sapiens
tagaaggcaggcagt

SEQ ID NO: 607766 - DNA, 15 bp, Homo sapiens
agaaggcaggcagtg

SEQ ID NO: 607767 - DNA, 15 bp, Homo sapiens
gaaggcaggcagtgg

SEQ ID NO: 607768 - DNA, 15 bp, Homo sapiens
aaggcaggcagtgga

SEQ ID NO: 607769 - DNA, 15 bp, Homo sapiens
aggcaggcagtggag

SEQ ID NO: 607770 - DNA, 15 bp, Homo sapiens
ggcaggcagtggagt

SEQ ID NO: 607771 - DNA, 15 bp, Homo sapiens
gcaggcagtggagta

SEQ ID NO: 607772 - DNA, 15 bp, Homo sapiens
caggcagtggagtag

SEQ ID NO: 607773 - DNA, 15 bp, Homo sapiens
aggcagtggagtagg

SEQ ID NO: 607774 - DNA, 15 bp, Homo sapiens
ggcagtggagtagga

SEQ ID NO: 607775 - DNA, 15 bp, Homo sapiens
gcagtggagtaggaa

SEQ ID NO: 607776 - DNA, 15 bp, Homo sapiens
cagtggagtaggaaa

SEQ ID NO: 607777 - DNA, 15 bp, Homo sapiens
agtggagtaggaaaa

SEQ ID NO: 607778 - DNA, 15 bp, Homo sapiens
gtggagtaggaaaat

SEQ ID NO: 607779 - DNA, 15 bp, Homo sapiens
tggagtaggaaaata

SEQ ID NO: 607780 - DNA, 15 bp, Homo sapiens
ggagtaggaaaatag

SEQ ID NO: 607781 - DNA, 15 bp, Homo sapiens
gagtaggaaaataga

SEQ ID NO: 607782 - DNA, 15 bp, Homo sapiens
agtaggaaaatagat

SEQ ID NO: 607783 - DNA, 15 bp, Homo sapiens
gtaggaaaatagatg

SEQ ID NO: 607784 - DNA, 15 bp, Homo sapiens
taggaaaatagatga

SEQ ID NO: 607785 - DNA, 15 bp, Homo sapiens
aggaaaatagatgat

SEQ ID NO: 607786 - DNA, 15 bp, Homo sapiens
ggaaaatagatgatg

SEQ ID NO: 607787 - DNA, 15 bp, Homo sapiens
gaaaatagatgatgg

SEQ ID NO: 607788 - DNA, 15 bp, Homo sapiens
aaaatagatgatggt

SEQ ID NO: 607789 - DNA, 15 bp, Homo sapiens
aaatagatgatggtg

SEQ ID NO: 607790 - DNA, 15 bp, Homo sapiens
aatagatgatggtgg

SEQ ID NO: 607791 - DNA, 15 bp, Homo sapiens
atagatgatggtggt

SEQ ID NO: 607792 - DNA, 15 bp, Homo sapiens
tagatgatggtggtt

SEQ ID NO: 607793 - DNA, 15 bp, Homo sapiens
agatgatggtggttt

SEQ ID NO: 607794 - DNA, 15 bp, Homo sapiens
gatgatggtggtttg

SEQ ID NO: 607795 - DNA, 15 bp, Homo sapiens
atgatggtggtttgg

SEQ ID NO: 607796 - DNA, 15 bp, Homo sapiens
tgatggtggtttggg

SEQ ID NO: 607797 - DNA, 15 bp, Homo sapiens
gatggtggtttgggg

SEQ ID NO: 607798 - DNA, 15 bp, Homo sapiens
atggtggtttgggga

SEQ ID NO: 607799 - DNA, 15 bp, Homo sapiens
tggtggtttggggag

SEQ ID NO: 607800 - DNA, 15 bp, Homo sapiens
ggtggtttggggagc

SEQ ID NO: 607801 - DNA, 15 bp, Homo sapiens
gtggtttggggagcc

SEQ ID NO: 607802 - DNA, 15 bp, Homo sapiens
tggtttggggagcct

SEQ ID NO: 607803 - DNA, 15 bp, Homo sapiens
ggtttggggagcctc

SEQ ID NO: 607804 - DNA, 15 bp, Homo sapiens
gtttggggagcctca

SEQ ID NO: 607805 - DNA, 15 bp, Homo sapiens
tttggggagcctcac

SEQ ID NO: 607806 - DNA, 15 bp, Homo sapiens
ttggggagcctcaca

SEQ ID NO: 607807 - DNA, 15 bp, Homo sapiens
tggggagcctcacat

SEQ ID NO: 607808 - DNA, 15 bp, Homo sapiens
ggggagcctcacatc

SEQ ID NO: 607809 - DNA, 15 bp, Homo sapiens
gggagcctcacatca

SEQ ID NO: 607810 - DNA, 15 bp, Homo sapiens
ggagcctcacatcac

SEQ ID NO: 607811 - DNA, 15 bp, Homo sapiens
gagcctcacatcact

SEQ ID NO: 607812 - DNA, 15 bp, Homo sapiens
agcctcacatcactc

SEQ ID NO: 607813 - DNA, 15 bp, Homo sapiens
gcctcacatcactca

SEQ ID NO: 607814 - DNA, 15 bp, Homo sapiens
cctcacatcactcat

SEQ ID NO: 607815 - DNA, 15 bp, Homo sapiens
ctcacatcactcatg

SEQ ID NO: 607816 - DNA, 15 bp, Homo sapiens
tcacatcactcatgg

SEQ ID NO: 607817 - DNA, 15 bp, Homo sapiens
cacatcactcatggg

SEQ ID NO: 607818 - DNA, 15 bp, Homo sapiens
acatcactcatgggg

SEQ ID NO: 607819 - DNA, 15 bp, Homo sapiens
catcactcatgggga

SEQ ID NO: 607820 - DNA, 15 bp, Homo sapiens
atcactcatggggag

SEQ ID NO: 607821 - DNA, 15 bp, Homo sapiens
tcactcatggggaga

SEQ ID NO: 607822 - DNA, 15 bp, Homo sapiens
cactcatggggagac

SEQ ID NO: 607823 - DNA, 15 bp, Homo sapiens
actcatggggagaca

SEQ ID NO: 607824 - DNA, 15 bp, Homo sapiens
ctcatggggagacat

SEQ ID NO: 607825 - DNA, 15 bp, Homo sapiens
tcatggggagacatt

SEQ ID NO: 607826 - DNA, 15 bp, Homo sapiens
catggggagacattc

SEQ ID NO: 607827 - DNA, 15 bp, Homo sapiens
atggggagacattca

SEQ ID NO: 607828 - DNA, 15 bp, Homo sapiens
tggggagacattcat

SEQ ID NO: 607829 - DNA, 15 bp, Homo sapiens
ggggagacattcatt

SEQ ID NO: 607830 - DNA, 15 bp, Homo sapiens
gggagacattcattc

SEQ ID NO: 607831 - DNA, 15 bp, Homo sapiens
ggagacattcattcc

SEQ ID NO: 607832 - DNA, 15 bp, Homo sapiens
gagacattcattccc

SEQ ID NO: 607833 - DNA, 15 bp, Homo sapiens
agacattcattccca

SEQ ID NO: 607834 - DNA, 15 bp, Homo sapiens
gacattcattcccat

SEQ ID NO: 607835 - DNA, 15 bp, Homo sapiens
acattcattcccatg

SEQ ID NO: 607836 - DNA, 15 bp, Homo sapiens
cattcattcccatgg

SEQ ID NO: 607837 - DNA, 15 bp, Homo sapiens
attcattcccatggg

SEQ ID NO: 607838 - DNA, 15 bp, Homo sapiens
ttcattcccatgggc

SEQ ID NO: 607839 - DNA, 15 bp, Homo sapiens
tcattcccatgggcc

SEQ ID NO: 607840 - DNA, 15 bp, Homo sapiens
cattcccatgggcct

SEQ ID NO: 607841 - DNA, 15 bp, Homo sapiens
attcccatgggcctt

SEQ ID NO: 607842 - DNA, 15 bp, Homo sapiens
ttcccatgggccttc

SEQ ID NO: 607843 - DNA, 15 bp, Homo sapiens
tcccatgggccttcc

SEQ ID NO: 607844 - DNA, 15 bp, Homo sapiens
cccatgggccttcca

SEQ ID NO: 607845 - DNA, 15 bp, Homo sapiens
ccatgggccttccaa

SEQ ID NO: 607846 - DNA, 15 bp, Homo sapiens
catgggccttccaat

SEQ ID NO: 607847 - DNA, 15 bp, Homo sapiens
atgggccttccaatc

SEQ ID NO: 607848 - DNA, 15 bp, Homo sapiens
tgggccttccaatca

SEQ ID NO: 607849 - DNA, 15 bp, Homo sapiens
gggccttccaatcac

SEQ ID NO: 607850 - DNA, 15 bp, Homo sapiens
ggccttccaatcacc

SEQ ID NO: 607851 - DNA, 15 bp, Homo sapiens
gccttccaatcaccc

SEQ ID NO: 607852 - DNA, 15 bp, Homo sapiens
ccttccaatcaccct

SEQ ID NO: 607853 - DNA, 15 bp, Homo sapiens
cttccaatcaccctt

SEQ ID NO: 607854 - DNA, 15 bp, Homo sapiens
ttccaatcacccttt

SEQ ID NO: 607855 - DNA, 15 bp, Homo sapiens
tccaatcaccctttt

SEQ ID NO: 607856 - DNA, 15 bp, Homo sapiens
ccaatcacccttttc

SEQ ID NO: 607857 - DNA, 15 bp, Homo sapiens
caatcacccttttct

SEQ ID NO: 607858 - DNA, 15 bp, Homo sapiens
aatcacccttttctc

SEQ ID NO: 607859 - DNA, 15 bp, Homo sapiens
atcacccttttctcc

SEQ ID NO: 607860 - DNA, 15 bp, Homo sapiens
tcacccttttctcca

SEQ ID NO: 607861 - DNA, 15 bp, Homo sapiens
cacccttttctccaa

SEQ ID NO: 607862 - DNA, 15 bp, Homo sapiens
acccttttctccaaa

SEQ ID NO: 607863 - DNA, 15 bp, Homo sapiens
cccttttctccaaat

SEQ ID NO: 607864 - DNA, 15 bp, Homo sapiens
ccttttctccaaatc

SEQ ID NO: 607865 - DNA, 15 bp, Homo sapiens
cttttctccaaatct

SEQ ID NO: 607866 - DNA, 15 bp, Homo sapiens
ttttctccaaatcta

SEQ ID NO: 607867 - DNA, 15 bp, Homo sapiens
tttctccaaatctaa

SEQ ID NO: 607868 - DNA, 15 bp, Homo sapiens
ttctccaaatctaag

SEQ ID NO: 607869 - DNA, 15 bp, Homo sapiens
tctccaaatctaagg

SEQ ID NO: 607870 - DNA, 15 bp, Homo sapiens
ctccaaatctaagga

SEQ ID NO: 607871 - DNA, 15 bp, Homo sapiens
tccaaatctaaggac

SEQ ID NO: 607872 - DNA, 15 bp, Homo sapiens
ccaaatctaaggaca

SEQ ID NO: 607873 - DNA, 15 bp, Homo sapiens
caaatctaaggacac

SEQ ID NO: 607874 - DNA, 15 bp, Homo sapiens
aaatctaaggacaca

SEQ ID NO: 607875 - DNA, 15 bp, Homo sapiens
aatctaaggacacag

SEQ ID NO: 607876 - DNA, 15 bp, Homo sapiens
atctaaggacacagg

SEQ ID NO: 607877 - DNA, 15 bp, Homo sapiens
tctaaggacacagga

SEQ ID NO: 607878 - DNA, 15 bp, Homo sapiens
ctaaggacacaggac

SEQ ID NO: 607879 - DNA, 15 bp, Homo sapiens
taaggacacaggaca

SEQ ID NO: 607880 - DNA, 15 bp, Homo sapiens
aaggacacaggacaa

SEQ ID NO: 607881 - DNA, 15 bp, Homo sapiens
aggacacaggacaaa

SEQ ID NO: 607882 - DNA, 15 bp, Homo sapiens
ggacacaggacaaat

SEQ ID NO: 607883 - DNA, 15 bp, Homo sapiens
gacacaggacaaatg

SEQ ID NO: 607884 - DNA, 15 bp, Homo sapiens
acacaggacaaatgg

SEQ ID NO: 607885 - DNA, 15 bp, Homo sapiens
cacaggacaaatggg

SEQ ID NO: 607886 - DNA, 15 bp, Homo sapiens
acaggacaaatgggt

SEQ ID NO: 607887 - DNA, 15 bp, Homo sapiens
caggacaaatgggtc

SEQ ID NO: 607888 - DNA, 15 bp, Homo sapiens
aggacaaatgggtcc

SEQ ID NO: 607889 - DNA, 15 bp, Homo sapiens
ggacaaatgggtcct

SEQ ID NO: 607890 - DNA, 15 bp, Homo sapiens
gacaaatgggtcctc

SEQ ID NO: 607891 - DNA, 15 bp, Homo sapiens
acaaatgggtcctca

SEQ ID NO: 607892 - DNA, 15 bp, Homo sapiens
caaatgggtcctcat

SEQ ID NO: 607893 - DNA, 15 bp, Homo sapiens
aaatgggtcctcata

SEQ ID NO: 607894 - DNA, 15 bp, Homo sapiens
aatgggtcctcatac

SEQ ID NO: 607895 - DNA, 15 bp, Homo sapiens
atgggtcctcataca

SEQ ID NO: 607896 - DNA, 15 bp, Homo sapiens
tgggtcctcatacag

SEQ ID NO: 607897 - DNA, 15 bp, Homo sapiens
gggtcctcatacagg

SEQ ID NO: 607898 - DNA, 15 bp, Homo sapiens
ggtcctcatacaggc

SEQ ID NO: 607899 - DNA, 15 bp, Homo sapiens
gtcctcatacaggca

SEQ ID NO: 607900 - DNA, 15 bp, Homo sapiens
tcctcatacaggcaa

SEQ ID NO: 607901 - DNA, 15 bp, Homo sapiens
cctcatacaggcaaa

SEQ ID NO: 607902 - DNA, 15 bp, Homo sapiens
ctcatacaggcaaat

SEQ ID NO: 607903 - DNA, 15 bp, Homo sapiens
tcatacaggcaaata

SEQ ID NO: 607904 - DNA, 15 bp, Homo sapiens
catacaggcaaatat

SEQ ID NO: 607905 - DNA, 15 bp, Homo sapiens
atacaggcaaatatc

SEQ ID NO: 607906 - DNA, 15 bp, Homo sapiens
tacaggcaaatatct

SEQ ID NO: 607907 - DNA, 15 bp, Homo sapiens
acaggcaaatatctt

SEQ ID NO: 607908 - DNA, 15 bp, Homo sapiens
caggcaaatatctta

SEQ ID NO: 607909 - DNA, 15 bp, Homo sapiens
aggcaaatatcttaa

SEQ ID NO: 607910 - DNA, 15 bp, Homo sapiens
ggcaaatatcttaaa

SEQ ID NO: 607911 - DNA, 15 bp, Homo sapiens
gcaaatatcttaaac

SEQ ID NO: 607912 - DNA, 15 bp, Homo sapiens
caaatatcttaaact

SEQ ID NO: 607913 - DNA, 15 bp, Homo sapiens
aaatatcttaaactg

SEQ ID NO: 607914 - DNA, 15 bp, Homo sapiens
aatatcttaaactgg

SEQ ID NO: 607915 - DNA, 15 bp, Homo sapiens
atatcttaaactggt

SEQ ID NO: 607916 - DNA, 15 bp, Homo sapiens
tatcttaaactggta

SEQ ID NO: 607917 - DNA, 15 bp, Homo sapiens
atcttaaactggtat

SEQ ID NO: 607918 - DNA, 15 bp, Homo sapiens
tcttaaactggtatg

SEQ ID NO: 607919 - DNA, 15 bp, Homo sapiens
cttaaactggtatgt

SEQ ID NO: 607920 - DNA, 15 bp, Homo sapiens
ttaaactggtatgtg

SEQ ID NO: 607921 - DNA, 15 bp, Homo sapiens
taaactggtatgtgt

SEQ ID NO: 607922 - DNA, 15 bp, Homo sapiens
aaactggtatgtgta

SEQ ID NO: 607923 - DNA, 15 bp, Homo sapiens
aactggtatgtgtat

SEQ ID NO: 607924 - DNA, 15 bp, Homo sapiens
actggtatgtgtatt

SEQ ID NO: 607925 - DNA, 15 bp, Homo sapiens
ctggtatgtgtattc

SEQ ID NO: 607926 - DNA, 15 bp, Homo sapiens
tggtatgtgtattca

SEQ ID NO: 607927 - DNA, 15 bp, Homo sapiens
ggtatgtgtattcat

SEQ ID NO: 607928 - DNA, 15 bp, Homo sapiens
gtatgtgtattcatt

SEQ ID NO: 607929 - DNA, 15 bp, Homo sapiens
tatgtgtattcattt

SEQ ID NO: 607930 - DNA, 15 bp, Homo sapiens
atgtgtattcattta

SEQ ID NO: 607931 - DNA, 15 bp, Homo sapiens
tgtgtattcatttat

SEQ ID NO: 607932 - DNA, 15 bp, Homo sapiens
gtgtattcatttata

SEQ ID NO: 607933 - DNA, 15 bp, Homo sapiens
tgtattcatttatag

SEQ ID NO: 607934 - DNA, 15 bp, Homo sapiens
gtattcatttatagt

SEQ ID NO: 607935 - DNA, 15 bp, Homo sapiens
tattcatttatagtt

SEQ ID NO: 607936 - DNA, 15 bp, Homo sapiens
attcatttatagttc

SEQ ID NO: 607937 - DNA, 15 bp, Homo sapiens
ttcatttatagttct

SEQ ID NO: 607938 - DNA, 15 bp, Homo sapiens
tcatttatagttcta

SEQ ID NO: 607939 - DNA, 15 bp, Homo sapiens
catttatagttctaa

SEQ ID NO: 607940 - DNA, 15 bp, Homo sapiens
atttatagttctaat

SEQ ID NO: 607941 - DNA, 15 bp, Homo sapiens
tttatagttctaatt

SEQ ID NO: 607942 - DNA, 15 bp, Homo sapiens
ttatagttctaattt

SEQ ID NO: 607943 - DNA, 15 bp, Homo sapiens
tatagttctaattta

SEQ ID NO: 607944 - DNA, 15 bp, Homo sapiens
atagttctaatttat

SEQ ID NO: 607945 - DNA, 15 bp, Homo sapiens
tagttctaatttata

SEQ ID NO: 607946 - DNA, 15 bp, Homo sapiens
agttctaatttatat

SEQ ID NO: 607947 - DNA, 15 bp, Homo sapiens
gttctaatttatatg

SEQ ID NO: 607948 - DNA, 15 bp, Homo sapiens
ttctaatttatatgt

SEQ ID NO: 607949 - DNA, 15 bp, Homo sapiens
tctaatttatatgtg

SEQ ID NO: 607950 - DNA, 15 bp, Homo sapiens
ctaatttatatgtgt

SEQ ID NO: 607951 - DNA, 15 bp, Homo sapiens
taatttatatgtgtc

SEQ ID NO: 607952 - DNA, 15 bp, Homo sapiens
aatttatatgtgtct

SEQ ID NO: 607953 - DNA, 15 bp, Homo sapiens
atttatatgtgtctt

SEQ ID NO: 607954 - DNA, 15 bp, Homo sapiens
tttatatgtgtcttt

SEQ ID NO: 607955 - DNA, 15 bp, Homo sapiens
ttatatgtgtcttta

SEQ ID NO: 607956 - DNA, 15 bp, Homo sapiens
tatatgtgtctttat

SEQ ID NO: 607957 - DNA, 15 bp, Homo sapiens
atatgtgtctttatt

SEQ ID NO: 607958 - DNA, 15 bp, Homo sapiens
tatgtgtctttattc

SEQ ID NO: 607959 - DNA, 15 bp, Homo sapiens
atgtgtctttattca

SEQ ID NO: 607960 - DNA, 15 bp, Homo sapiens
tgtgtctttattcac

SEQ ID NO: 607961 - DNA, 15 bp, Homo sapiens
gtgtctttattcaca

SEQ ID NO: 607962 - DNA, 15 bp, Homo sapiens
tgtctttattcacat

SEQ ID NO: 607963 - DNA, 15 bp, Homo sapiens
gtctttattcacata

SEQ ID NO: 607964 - DNA, 15 bp, Homo sapiens
tctttattcacatat

SEQ ID NO: 607965 - DNA, 15 bp, Homo sapiens
ctttattcacatata

SEQ ID NO: 607966 - DNA, 15 bp, Homo sapiens
tttattcacatatat

SEQ ID NO: 607967 - DNA, 15 bp, Homo sapiens
ttattcacatatatt

SEQ ID NO: 607968 - DNA, 15 bp, Homo sapiens
tattcacatatattt

SEQ ID NO: 607969 - DNA, 15 bp, Homo sapiens
attcacatatatttt

SEQ ID NO: 607970 - DNA, 15 bp, Homo sapiens
ttcacatatattttg

SEQ ID NO: 607971 - DNA, 15 bp, Homo sapiens
tcacatatattttgc

SEQ ID NO: 607972 - DNA, 15 bp, Homo sapiens
cacatatattttgct

SEQ ID NO: 607973 - DNA, 15 bp, Homo sapiens
acatatattttgctt

SEQ ID NO: 607974 - DNA, 15 bp, Homo sapiens
catatattttgcttc

SEQ ID NO: 607975 - DNA, 15 bp, Homo sapiens
atatattttgcttct

SEQ ID NO: 607976 - DNA, 15 bp, Homo sapiens
tatattttgcttctg

SEQ ID NO: 607977 - DNA, 15 bp, Homo sapiens
atattttgcttctgg

SEQ ID NO: 607978 - DNA, 15 bp, Homo sapiens
tattttgcttctgga

SEQ ID NO: 607979 - DNA, 15 bp, Homo sapiens
attttgcttctggag

SEQ ID NO: 607980 - DNA, 15 bp, Homo sapiens
ttttgcttctggaga

SEQ ID NO: 607981 - DNA, 15 bp, Homo sapiens
tttgcttctggagaa

SEQ ID NO: 607982 - DNA, 15 bp, Homo sapiens
ttgcttctggagaaa

SEQ ID NO: 607983 - DNA, 15 bp, Homo sapiens
tgcttctggagaaaa

SEQ ID NO: 607984 - DNA, 15 bp, Homo sapiens
gcttctggagaaaag

SEQ ID NO: 607985 - DNA, 15 bp, Homo sapiens
cttctggagaaaagc

SEQ ID NO: 607986 - DNA, 15 bp, Homo sapiens
ttctggagaaaagct

SEQ ID NO: 607987 - DNA, 15 bp, Homo sapiens
tctggagaaaagctc

SEQ ID NO: 607988 - DNA, 15 bp, Homo sapiens
ctggagaaaagctca

SEQ ID NO: 607989 - DNA, 15 bp, Homo sapiens
tggagaaaagctcaa

SEQ ID NO: 607990 - DNA, 15 bp, Homo sapiens
ggagaaaagctcaat

SEQ ID NO: 607991 - DNA, 15 bp, Homo sapiens
gagaaaagctcaatt

SEQ ID NO: 607992 - DNA, 15 bp, Homo sapiens
agaaaagctcaatta

SEQ ID NO: 607993 - DNA, 15 bp, Homo sapiens
gaaaagctcaattag

SEQ ID NO: 607994 - DNA, 15 bp, Homo sapiens
aaaagctcaattaga

SEQ ID NO: 607995 - DNA, 15 bp, Homo sapiens
aaagctcaattagaa

SEQ ID NO: 607996 - DNA, 15 bp, Homo sapiens
aagctcaattagaaa

SEQ ID NO: 607997 - DNA, 15 bp, Homo sapiens
agctcaattagaaaa

SEQ ID NO: 607998 - DNA, 15 bp, Homo sapiens
gctcaattagaaaaa

SEQ ID NO: 607999 - DNA, 15 bp, Homo sapiens
ctcaattagaaaaat

SEQ ID NO: 608000 - DNA, 15 bp, Homo sapiens
tcaattagaaaaatt

SEQ ID NO: 608001 - DNA, 15 bp, Homo sapiens
caattagaaaaatta

SEQ ID NO: 608002 - DNA, 15 bp, Homo sapiens
aattagaaaaattaa

SEQ ID NO: 608003 - DNA, 15 bp, Homo sapiens
attagaaaaattaat

SEQ ID NO: 608004 - DNA, 15 bp, Homo sapiens
ttagaaaaattaata

SEQ ID NO: 608005 - DNA, 15 bp, Homo sapiens
tagaaaaattaatac

SEQ ID NO: 608006 - DNA, 15 bp, Homo sapiens
agaaaaattaataca

SEQ ID NO: 608007 - DNA, 15 bp, Homo sapiens
gaaaaattaatacat

SEQ ID NO: 608008 - DNA, 15 bp, Homo sapiens
aaaaattaatacatt

SEQ ID NO: 608009 - DNA, 15 bp, Homo sapiens
aaaattaatacatta

SEQ ID NO: 608010 - DNA, 15 bp, Homo sapiens
aaattaatacattat

SEQ ID NO: 608011 - DNA, 15 bp, Homo sapiens
aattaatacattatt

SEQ ID NO: 608012 - DNA, 15 bp, Homo sapiens
attaatacattattc

SEQ ID NO: 608013 - DNA, 15 bp, Homo sapiens
ttaatacattattct

SEQ ID NO: 608014 - DNA, 15 bp, Homo sapiens
taatacattattctt

SEQ ID NO: 608015 - DNA, 15 bp, Homo sapiens
aatacattattcttc

SEQ ID NO: 608016 - DNA, 15 bp, Homo sapiens
atacattattcttct

SEQ ID NO: 608017 - DNA, 15 bp, Homo sapiens
tacattattcttctt

SEQ ID NO: 608018 - DNA, 15 bp, Homo sapiens
acattattcttctta

SEQ ID NO: 608019 - DNA, 15 bp, Homo sapiens
cattattcttcttat

SEQ ID NO: 608020 - DNA, 15 bp, Homo sapiens
attattcttcttatt

SEQ ID NO: 608021 - DNA, 15 bp, Homo sapiens
ttattcttcttattg

SEQ ID NO: 608022 - DNA, 15 bp, Homo sapiens
tattcttcttattgc

SEQ ID NO: 608023 - DNA, 15 bp, Homo sapiens
attcttcttattgcc

SEQ ID NO: 608024 - DNA, 15 bp, Homo sapiens
ttcttcttattgccc

SEQ ID NO: 608025 - DNA, 15 bp, Homo sapiens
tcttcttattgccct

SEQ ID NO: 608026 - DNA, 15 bp, Homo sapiens
cttcttattgccctt

SEQ ID NO: 608027 - DNA, 15 bp, Homo sapiens
ttcttattgcccttc

SEQ ID NO: 608028 - DNA, 15 bp, Homo sapiens
tcttattgcccttca

SEQ ID NO: 608029 - DNA, 15 bp, Homo sapiens
cttattgcccttcag

SEQ ID NO: 608030 - DNA, 15 bp, Homo sapiens
ttattgcccttcagc

SEQ ID NO: 608031 - DNA, 15 bp, Homo sapiens
tattgcccttcagct

SEQ ID NO: 608032 - DNA, 15 bp, Homo sapiens
attgcccttcagcta

SEQ ID NO: 608033 - DNA, 15 bp, Homo sapiens
ttgcccttcagctaa

SEQ ID NO: 608034 - DNA, 15 bp, Homo sapiens
tgcccttcagctaaa

SEQ ID NO: 608035 - DNA, 15 bp, Homo sapiens
gcccttcagctaaaa

SEQ ID NO: 608036 - DNA, 15 bp, Homo sapiens
cccttcagctaaaac

SEQ ID NO: 608037 - DNA, 15 bp, Homo sapiens
ccttcagctaaaaca

SEQ ID NO: 608038 - DNA, 15 bp, Homo sapiens
cttcagctaaaacaa

SEQ ID NO: 608039 - DNA, 15 bp, Homo sapiens
ttcagctaaaacaag

SEQ ID NO: 608040 - DNA, 15 bp, Homo sapiens
tcagctaaaacaagc

SEQ ID NO: 608041 - DNA, 15 bp, Homo sapiens
cagctaaaacaagca

SEQ ID NO: 608042 - DNA, 15 bp, Homo sapiens
agctaaaacaagcat

SEQ ID NO: 608043 - DNA, 15 bp, Homo sapiens
gctaaaacaagcata

SEQ ID NO: 608044 - DNA, 15 bp, Homo sapiens
ctaaaacaagcatac

SEQ ID NO: 608045 - DNA, 15 bp, Homo sapiens
taaaacaagcataca

SEQ ID NO: 608046 - DNA, 15 bp, Homo sapiens
aaaacaagcatacac

SEQ ID NO: 608047 - DNA, 15 bp, Homo sapiens
aaacaagcatacaca

SEQ ID NO: 608048 - DNA, 15 bp, Homo sapiens
aacaagcatacacac

SEQ ID NO: 608049 - DNA, 15 bp, Homo sapiens
acaagcatacacacc

SEQ ID NO: 608050 - DNA, 15 bp, Homo sapiens
caagcatacacaccc

SEQ ID NO: 608051 - DNA, 15 bp, Homo sapiens
aagcatacacacccc

SEQ ID NO: 608052 - DNA, 15 bp, Homo sapiens
agcatacacacccct

SEQ ID NO: 608053 - DNA, 15 bp, Homo sapiens
gcatacacacccctc

SEQ ID NO: 608054 - DNA, 15 bp, Homo sapiens
catacacacccctcc

SEQ ID NO: 608055 - DNA, 15 bp, Homo sapiens
atacacacccctccc

SEQ ID NO: 608056 - DNA, 15 bp, Homo sapiens
tacacacccctcccc

SEQ ID NO: 608057 - DNA, 15 bp, Homo sapiens
acacacccctcccct

SEQ ID NO: 608058 - DNA, 15 bp, Homo sapiens
cacacccctcccctt

SEQ ID NO: 608059 - DNA, 15 bp, Homo sapiens
acacccctccccttt

SEQ ID NO: 608060 - DNA, 15 bp, Homo sapiens
cacccctcccctttg

SEQ ID NO: 608061 - DNA, 15 bp, Homo sapiens
acccctcccctttgg

SEQ ID NO: 608062 - DNA, 15 bp, Homo sapiens
cccctcccctttgga

SEQ ID NO: 608063 - DNA, 15 bp, Homo sapiens
ccctcccctttggat

SEQ ID NO: 608064 - DNA, 15 bp, Homo sapiens
cctcccctttggatt

SEQ ID NO: 608065 - DNA, 15 bp, Homo sapiens
ctcccctttggattt

SEQ ID NO: 608066 - DNA, 15 bp, Homo sapiens
tcccctttggatttt

SEQ ID NO: 608067 - DNA, 15 bp, Homo sapiens
cccctttggattttt

SEQ ID NO: 608068 - DNA, 15 bp, Homo sapiens
ccctttggatttttt

SEQ ID NO: 608069 - DNA, 15 bp, Homo sapiens
cctttggattttttg

SEQ ID NO: 608070 - DNA, 15 bp, Homo sapiens
ctttggattttttgt

SEQ ID NO: 608071 - DNA, 15 bp, Homo sapiens
tttggattttttgtt

SEQ ID NO: 608072 - DNA, 15 bp, Homo sapiens
ttggattttttgttt

SEQ ID NO: 608073 - DNA, 15 bp, Homo sapiens
tggattttttgttta

SEQ ID NO: 608074 - DNA, 15 bp, Homo sapiens
ggattttttgtttag

SEQ ID NO: 608075 - DNA, 15 bp, Homo sapiens
gattttttgtttagc

SEQ ID NO: 608076 - DNA, 15 bp, Homo sapiens
attttttgtttagca

SEQ ID NO: 608077 - DNA, 15 bp, Homo sapiens
ttttttgtttagcaa

SEQ ID NO: 608078 - DNA, 15 bp, Homo sapiens
tttttgtttagcaaa

SEQ ID NO: 608079 - DNA, 15 bp, Homo sapiens
ttttgtttagcaaaa

SEQ ID NO: 608080 - DNA, 15 bp, Homo sapiens
tttgtttagcaaaag

SEQ ID NO: 608081 - DNA, 15 bp, Homo sapiens
ttgtttagcaaaagg

SEQ ID NO: 608082 - DNA, 15 bp, Homo sapiens
tgtttagcaaaaggt

SEQ ID NO: 608083 - DNA, 15 bp, Homo sapiens
gtttagcaaaaggtt

SEQ ID NO: 608084 - DNA, 15 bp, Homo sapiens
tttagcaaaaggtta

SEQ ID NO: 608085 - DNA, 15 bp, Homo sapiens
ttagcaaaaggttag

SEQ ID NO: 608086 - DNA, 15 bp, Homo sapiens
tagcaaaaggttagg

SEQ ID NO: 608087 - DNA, 15 bp, Homo sapiens
agcaaaaggttaggc

SEQ ID NO: 608088 - DNA, 15 bp, Homo sapiens
gcaaaaggttaggcc

SEQ ID NO: 608089 - DNA, 15 bp, Homo sapiens
caaaaggttaggcct

SEQ ID NO: 608090 - DNA, 15 bp, Homo sapiens
aaaaggttaggcctg

SEQ ID NO: 608091 - DNA, 15 bp, Homo sapiens
aaaggttaggcctgg

SEQ ID NO: 608092 - DNA, 15 bp, Homo sapiens
aaggttaggcctggc

SEQ ID NO: 608093 - DNA, 15 bp, Homo sapiens
aggttaggcctggca

SEQ ID NO: 608094 - DNA, 15 bp, Homo sapiens
ggttaggcctggcac

SEQ ID NO: 608095 - DNA, 15 bp, Homo sapiens
gttaggcctggcaca

SEQ ID NO: 608096 - DNA, 15 bp, Homo sapiens
ttaggcctggcacag

SEQ ID NO: 608097 - DNA, 15 bp, Homo sapiens
taggcctggcacaga

SEQ ID NO: 608098 - DNA, 15 bp, Homo sapiens
aggcctggcacagat

SEQ ID NO: 608099 - DNA, 15 bp, Homo sapiens
ggcctggcacagatg

SEQ ID NO: 608100 - DNA, 15 bp, Homo sapiens
gcctggcacagatga

SEQ ID NO: 608101 - DNA, 15 bp, Homo sapiens
cctggcacagatgaa

SEQ ID NO: 608102 - DNA, 15 bp, Homo sapiens
ctggcacagatgaaa

SEQ ID NO: 608103 - DNA, 15 bp, Homo sapiens
tggcacagatgaaat

SEQ ID NO: 608104 - DNA, 15 bp, Homo sapiens
ggcacagatgaaata

SEQ ID NO: 608105 - DNA, 15 bp, Homo sapiens
gcacagatgaaatac

SEQ ID NO: 608106 - DNA, 15 bp, Homo sapiens
cacagatgaaatact

SEQ ID NO: 608107 - DNA, 15 bp, Homo sapiens
acagatgaaatacta

SEQ ID NO: 608108 - DNA, 15 bp, Homo sapiens
cagatgaaatactat

SEQ ID NO: 608109 - DNA, 15 bp, Homo sapiens
agatgaaatactatt

SEQ ID NO: 608110 - DNA, 15 bp, Homo sapiens
gatgaaatactattc

SEQ ID NO: 608111 - DNA, 15 bp, Homo sapiens
atgaaatactattca

SEQ ID NO: 608112 - DNA, 15 bp, Homo sapiens
tgaaatactattcag

SEQ ID NO: 608113 - DNA, 15 bp, Homo sapiens
gaaatactattcaga

SEQ ID NO: 608114 - DNA, 15 bp, Homo sapiens
aaatactattcagag

SEQ ID NO: 608115 - DNA, 15 bp, Homo sapiens
aatactattcagagt

SEQ ID NO: 608116 - DNA, 15 bp, Homo sapiens
atactattcagagtt

SEQ ID NO: 608117 - DNA, 15 bp, Homo sapiens
tactattcagagttc

SEQ ID NO: 608118 - DNA, 15 bp, Homo sapiens
actattcagagttca

SEQ ID NO: 608119 - DNA, 15 bp, Homo sapiens
ctattcagagttcac

SEQ ID NO: 608120 - DNA, 15 bp, Homo sapiens
tattcagagttcaca

SEQ ID NO: 608121 - DNA, 15 bp, Homo sapiens
attcagagttcacag

SEQ ID NO: 608122 - DNA, 15 bp, Homo sapiens
ttcagagttcacagt

SEQ ID NO: 608123 - DNA, 15 bp, Homo sapiens
tcagagttcacagtg

SEQ ID NO: 608124 - DNA, 15 bp, Homo sapiens
cagagttcacagtgt

SEQ ID NO: 608125 - DNA, 15 bp, Homo sapiens
agagttcacagtgta

SEQ ID NO: 608126 - DNA, 15 bp, Homo sapiens
gagttcacagtgtat

SEQ ID NO: 608127 - DNA, 15 bp, Homo sapiens
agttcacagtgtatt

SEQ ID NO: 608128 - DNA, 15 bp, Homo sapiens
gttcacagtgtattt

SEQ ID NO: 608129 - DNA, 15 bp, Homo sapiens
ttcacagtgtatttt

SEQ ID NO: 608130 - DNA, 15 bp, Homo sapiens
tcacagtgtattttc

SEQ ID NO: 608131 - DNA, 15 bp, Homo sapiens
cacagtgtattttca

SEQ ID NO: 608132 - DNA, 15 bp, Homo sapiens
acagtgtattttcat

SEQ ID NO: 608133 - DNA, 15 bp, Homo sapiens
cagtgtattttcatt

SEQ ID NO: 608134 - DNA, 15 bp, Homo sapiens
agtgtattttcattt

SEQ ID NO: 608135 - DNA, 15 bp, Homo sapiens
gtgtattttcatttc

SEQ ID NO: 608136 - DNA, 15 bp, Homo sapiens
tgtattttcatttca

SEQ ID NO: 608137 - DNA, 15 bp, Homo sapiens
gtattttcatttcat

SEQ ID NO: 608138 - DNA, 15 bp, Homo sapiens
tattttcatttcata

SEQ ID NO: 608139 - DNA, 15 bp, Homo sapiens
attttcatttcataa

SEQ ID NO: 608140 - DNA, 15 bp, Homo sapiens
ttttcatttcataat

SEQ ID NO: 608141 - DNA, 15 bp, Homo sapiens
tttcatttcataata

SEQ ID NO: 608142 - DNA, 15 bp, Homo sapiens
ttcatttcataatat

SEQ ID NO: 608143 - DNA, 15 bp, Homo sapiens
tcatttcataatata

SEQ ID NO: 608144 - DNA, 15 bp, Homo sapiens
catttcataatatat

SEQ ID NO: 608145 - DNA, 15 bp, Homo sapiens
atttcataatatatt

SEQ ID NO: 608146 - DNA, 15 bp, Homo sapiens
tttcataatatattt

SEQ ID NO: 608147 - DNA, 15 bp, Homo sapiens
ttcataatatatttg

SEQ ID NO: 608148 - DNA, 15 bp, Homo sapiens
tcataatatatttga

SEQ ID NO: 608149 - DNA, 15 bp, Homo sapiens
cataatatatttgat

SEQ ID NO: 608150 - DNA, 15 bp, Homo sapiens
ataatatatttgatt

SEQ ID NO: 608151 - DNA, 15 bp, Homo sapiens
taatatatttgattt

SEQ ID NO: 608152 - DNA, 15 bp, Homo sapiens
aatatatttgatttt

SEQ ID NO: 608153 - DNA, 15 bp, Homo sapiens
atatatttgattttc

SEQ ID NO: 608154 - DNA, 15 bp, Homo sapiens
tatatttgattttca

SEQ ID NO: 608155 - DNA, 15 bp, Homo sapiens
atatttgattttcag

SEQ ID NO: 608156 - DNA, 15 bp, Homo sapiens
tatttgattttcagg

SEQ ID NO: 608157 - DNA, 15 bp, Homo sapiens
atttgattttcaggt

SEQ ID NO: 608158 - DNA, 15 bp, Homo sapiens
tttgattttcaggtc

SEQ ID NO: 608159 - DNA, 15 bp, Homo sapiens
ttgattttcaggtct

SEQ ID NO: 608160 - DNA, 15 bp, Homo sapiens
tgattttcaggtctt

SEQ ID NO: 608161 - DNA, 15 bp, Homo sapiens
gattttcaggtcttg

SEQ ID NO: 608162 - DNA, 15 bp, Homo sapiens
attttcaggtcttga

SEQ ID NO: 608163 - DNA, 15 bp, Homo sapiens
ttttcaggtcttgaa

SEQ ID NO: 608164 - DNA, 15 bp, Homo sapiens
tttcaggtcttgaat

SEQ ID NO: 608165 - DNA, 15 bp, Homo sapiens
ttcaggtcttgaatt

SEQ ID NO: 608166 - DNA, 15 bp, Homo sapiens
tcaggtcttgaattt

SEQ ID NO: 608167 - DNA, 15 bp, Homo sapiens
caggtcttgaatttc

SEQ ID NO: 608168 - DNA, 15 bp, Homo sapiens
aggtcttgaatttca

SEQ ID NO: 608169 - DNA, 15 bp, Homo sapiens
ggtcttgaatttcac

SEQ ID NO: 608170 - DNA, 15 bp, Homo sapiens
gtcttgaatttcaca

SEQ ID NO: 608171 - DNA, 15 bp, Homo sapiens
tcttgaatttcacat

SEQ ID NO: 608172 - DNA, 15 bp, Homo sapiens
cttgaatttcacatc

SEQ ID NO: 608173 - DNA, 15 bp, Homo sapiens
ttgaatttcacatca

SEQ ID NO: 608174 - DNA, 15 bp, Homo sapiens
tgaatttcacatcag

SEQ ID NO: 608175 - DNA, 15 bp, Homo sapiens
gaatttcacatcagg

SEQ ID NO: 608176 - DNA, 15 bp, Homo sapiens
aatttcacatcagga

SEQ ID NO: 608177 - DNA, 15 bp, Homo sapiens
atttcacatcaggaa

SEQ ID NO: 608178 - DNA, 15 bp, Homo sapiens
tttcacatcaggaag

SEQ ID NO: 608179 - DNA, 15 bp, Homo sapiens
ttcacatcaggaagc

SEQ ID NO: 608180 - DNA, 15 bp, Homo sapiens
tcacatcaggaagct

SEQ ID NO: 608181 - DNA, 15 bp, Homo sapiens
cacatcaggaagctg

SEQ ID NO: 608182 - DNA, 15 bp, Homo sapiens
acatcaggaagctga

SEQ ID NO: 608183 - DNA, 15 bp, Homo sapiens
catcaggaagctgat

SEQ ID NO: 608184 - DNA, 15 bp, Homo sapiens
atcaggaagctgata

SEQ ID NO: 608185 - DNA, 15 bp, Homo sapiens
tcaggaagctgatat

SEQ ID NO: 608186 - DNA, 15 bp, Homo sapiens
caggaagctgatata

SEQ ID NO: 608187 - DNA, 15 bp, Homo sapiens
aggaagctgatatag

SEQ ID NO: 608188 - DNA, 15 bp, Homo sapiens
ggaagctgatatagg

SEQ ID NO: 608189 - DNA, 15 bp, Homo sapiens
gaagctgatatagga

SEQ ID NO: 608190 - DNA, 15 bp, Homo sapiens
aagctgatataggaa

SEQ ID NO: 608191 - DNA, 15 bp, Homo sapiens
agctgatataggaag

SEQ ID NO: 608192 - DNA, 15 bp, Homo sapiens
gctgatataggaagc

SEQ ID NO: 608193 - DNA, 15 bp, Homo sapiens
ctgatataggaagct

SEQ ID NO: 608194 - DNA, 15 bp, Homo sapiens
tgatataggaagctg

SEQ ID NO: 608195 - DNA, 15 bp, Homo sapiens
gatataggaagctga

SEQ ID NO: 608196 - DNA, 15 bp, Homo sapiens
atataggaagctgaa

SEQ ID NO: 608197 - DNA, 15 bp, Homo sapiens
tataggaagctgaat

SEQ ID NO: 608198 - DNA, 15 bp, Homo sapiens
ataggaagctgaatt

SEQ ID NO: 608199 - DNA, 15 bp, Homo sapiens
taggaagctgaattc

SEQ ID NO: 608200 - DNA, 15 bp, Homo sapiens
aggaagctgaattca

SEQ ID NO: 608201 - DNA, 15 bp, Homo sapiens
ggaagctgaattcag

SEQ ID NO: 608202 - DNA, 15 bp, Homo sapiens
gaagctgaattcagc

SEQ ID NO: 608203 - DNA, 15 bp, Homo sapiens
aagctgaattcagcc

SEQ ID NO: 608204 - DNA, 15 bp, Homo sapiens
agctgaattcagcca

SEQ ID NO: 608205 - DNA, 15 bp, Homo sapiens
gctgaattcagccag

SEQ ID NO: 608206 - DNA, 15 bp, Homo sapiens
ctgaattcagccaga

SEQ ID NO: 608207 - DNA, 15 bp, Homo sapiens
tgaattcagccagat

SEQ ID NO: 608208 - DNA, 15 bp, Homo sapiens
gaattcagccagatt

SEQ ID NO: 608209 - DNA, 15 bp, Homo sapiens
aattcagccagattt

SEQ ID NO: 608210 - DNA, 15 bp, Homo sapiens
attcagccagatttt

SEQ ID NO: 608211 - DNA, 15 bp, Homo sapiens
ttcagccagatttta

SEQ ID NO: 608212 - DNA, 15 bp, Homo sapiens
tcagccagattttaa

SEQ ID NO: 608213 - DNA, 15 bp, Homo sapiens
cagccagattttaat

SEQ ID NO: 608214 - DNA, 15 bp, Homo sapiens
agccagattttaata

SEQ ID NO: 608215 - DNA, 15 bp, Homo sapiens
gccagattttaatac

SEQ ID NO: 608216 - DNA, 15 bp, Homo sapiens
ccagattttaatacg

SEQ ID NO: 608217 - DNA, 15 bp, Homo sapiens
cagattttaatacga

SEQ ID NO: 608218 - DNA, 15 bp, Homo sapiens
agattttaatacgaa

SEQ ID NO: 608219 - DNA, 15 bp, Homo sapiens
gattttaatacgaaa

SEQ ID NO: 608220 - DNA, 15 bp, Homo sapiens
attttaatacgaaaa

SEQ ID NO: 608221 - DNA, 15 bp, Homo sapiens
ttttaatacgaaaat

SEQ ID NO: 608222 - DNA, 15 bp, Homo sapiens
tttaatacgaaaata

SEQ ID NO: 608223 - DNA, 15 bp, Homo sapiens
ttaatacgaaaatac

SEQ ID NO: 608224 - DNA, 15 bp, Homo sapiens
taatacgaaaatacc

SEQ ID NO: 608225 - DNA, 15 bp, Homo sapiens
aatacgaaaatacct

SEQ ID NO: 608226 - DNA, 15 bp, Homo sapiens
atacgaaaatacctc

SEQ ID NO: 608227 - DNA, 15 bp, Homo sapiens
tacgaaaatacctct

SEQ ID NO: 608228 - DNA, 15 bp, Homo sapiens
acgaaaatacctctg

SEQ ID NO: 608229 - DNA, 15 bp, Homo sapiens
cgaaaatacctctga

SEQ ID NO: 608230 - DNA, 15 bp, Homo sapiens
gaaaatacctctgat

SEQ ID NO: 608231 - DNA, 15 bp, Homo sapiens
aaaatacctctgatc

SEQ ID NO: 608232 - DNA, 15 bp, Homo sapiens
aaatacctctgatca

SEQ ID NO: 608233 - DNA, 15 bp, Homo sapiens
aatacctctgatcaa

SEQ ID NO: 608234 - DNA, 15 bp, Homo sapiens
atacctctgatcaag

SEQ ID NO: 608235 - DNA, 15 bp, Homo sapiens
tacctctgatcaagg

SEQ ID NO: 608236 - DNA, 15 bp, Homo sapiens
acctctgatcaaggc

SEQ ID NO: 608237 - DNA, 15 bp, Homo sapiens
cctctgatcaaggca

SEQ ID NO: 608238 - DNA, 15 bp, Homo sapiens
ctctgatcaaggcat

SEQ ID NO: 608239 - DNA, 15 bp, Homo sapiens
tctgatcaaggcata

SEQ ID NO: 608240 - DNA, 15 bp, Homo sapiens
ctgatcaaggcataa

SEQ ID NO: 608241 - DNA, 15 bp, Homo sapiens
tgatcaaggcataaa

SEQ ID NO: 608242 - DNA, 15 bp, Homo sapiens
gatcaaggcataaaa

SEQ ID NO: 608243 - DNA, 15 bp, Homo sapiens
atcaaggcataaaat

SEQ ID NO: 608244 - DNA, 15 bp, Homo sapiens
tcaaggcataaaatt

SEQ ID NO: 608245 - DNA, 15 bp, Homo sapiens
caaggcataaaattg

SEQ ID NO: 608246 - DNA, 15 bp, Homo sapiens
aaggcataaaattgt

SEQ ID NO: 608247 - DNA, 15 bp, Homo sapiens
aggcataaaattgta

SEQ ID NO: 608248 - DNA, 15 bp, Homo sapiens
ggcataaaattgtac

SEQ ID NO: 608249 - DNA, 15 bp, Homo sapiens
gcataaaattgtact

SEQ ID NO: 608250 - DNA, 15 bp, Homo sapiens
cataaaattgtactt

SEQ ID NO: 608251 - DNA, 15 bp, Homo sapiens
ataaaattgtacttt

SEQ ID NO: 608252 - DNA, 15 bp, Homo sapiens
taaaattgtacttta

SEQ ID NO: 608253 - DNA, 15 bp, Homo sapiens
aaaattgtactttaa

SEQ ID NO: 608254 - DNA, 15 bp, Homo sapiens
aaattgtactttaac

SEQ ID NO: 608255 - DNA, 15 bp, Homo sapiens
aattgtactttaacc

SEQ ID NO: 608256 - DNA, 15 bp, Homo sapiens
attgtactttaacca

SEQ ID NO: 608257 - DNA, 15 bp, Homo sapiens
ttgtactttaaccag

SEQ ID NO: 608258 - DNA, 15 bp, Homo sapiens
tgtactttaaccagt

SEQ ID NO: 608259 - DNA, 15 bp, Homo sapiens
gtactttaaccagta

SEQ ID NO: 608260 - DNA, 15 bp, Homo sapiens
tactttaaccagtaa

SEQ ID NO: 608261 - DNA, 15 bp, Homo sapiens
actttaaccagtaac

SEQ ID NO: 608262 - DNA, 15 bp, Homo sapiens
ctttaaccagtaacc

SEQ ID NO: 608263 - DNA, 15 bp, Homo sapiens
tttaaccagtaacca

SEQ ID NO: 608264 - DNA, 15 bp, Homo sapiens
ttaaccagtaaccac

SEQ ID NO: 608265 - DNA, 15 bp, Homo sapiens
taaccagtaaccact

SEQ ID NO: 608266 - DNA, 15 bp, Homo sapiens
aaccagtaaccactg

SEQ ID NO: 608267 - DNA, 15 bp, Homo sapiens
accagtaaccactgt

SEQ ID NO: 608268 - DNA, 15 bp, Homo sapiens
ccagtaaccactgta

SEQ ID NO: 608269 - DNA, 15 bp, Homo sapiens
cagtaaccactgtat

SEQ ID NO: 608270 - DNA, 15 bp, Homo sapiens
agtaaccactgtatt

SEQ ID NO: 608271 - DNA, 15 bp, Homo sapiens
gtaaccactgtattt

SEQ ID NO: 608272 - DNA, 15 bp, Homo sapiens
taaccactgtatttc

SEQ ID NO: 608273 - DNA, 15 bp, Homo sapiens
aaccactgtatttct

SEQ ID NO: 608274 - DNA, 15 bp, Homo sapiens
accactgtatttctc

SEQ ID NO: 608275 - DNA, 15 bp, Homo sapiens
ccactgtatttctct

SEQ ID NO: 608276 - DNA, 15 bp, Homo sapiens
cactgtatttctcta

SEQ ID NO: 608277 - DNA, 15 bp, Homo sapiens
actgtatttctctaa

SEQ ID NO: 608278 - DNA, 15 bp, Homo sapiens
ctgtatttctctaag

SEQ ID NO: 608279 - DNA, 15 bp, Homo sapiens
tgtatttctctaagc

SEQ ID NO: 608280 - DNA, 15 bp, Homo sapiens
gtatttctctaagct

SEQ ID NO: 608281 - DNA, 15 bp, Homo sapiens
tatttctctaagctg

SEQ ID NO: 608282 - DNA, 15 bp, Homo sapiens
atttctctaagctgt

SEQ ID NO: 608283 - DNA, 15 bp, Homo sapiens
tttctctaagctgtg

SEQ ID NO: 608284 - DNA, 15 bp, Homo sapiens
ttctctaagctgtga

SEQ ID NO: 608285 - DNA, 15 bp, Homo sapiens
tctctaagctgtgaa

SEQ ID NO: 608286 - DNA, 15 bp, Homo sapiens
ctctaagctgtgaaa

SEQ ID NO: 608287 - DNA, 15 bp, Homo sapiens
tctaagctgtgaaaa

SEQ ID NO: 608288 - DNA, 15 bp, Homo sapiens
ctaagctgtgaaaaa

SEQ ID NO: 608289 - DNA, 15 bp, Homo sapiens
taagctgtgaaaaaa

SEQ ID NO: 608290 - DNA, 15 bp, Homo sapiens
aagctgtgaaaaaac

SEQ ID NO: 608291 - DNA, 15 bp, Homo sapiens
agctgtgaaaaaaca

SEQ ID NO: 608292 - DNA, 15 bp, Homo sapiens
gctgtgaaaaaacat

SEQ ID NO: 608293 - DNA, 15 bp, Homo sapiens
ctgtgaaaaaacatg

SEQ ID NO: 608294 - DNA, 15 bp, Homo sapiens
tgtgaaaaaacatgc

SEQ ID NO: 608295 - DNA, 15 bp, Homo sapiens
gtgaaaaaacatgca

SEQ ID NO: 608296 - DNA, 15 bp, Homo sapiens
tgaaaaaacatgcat

SEQ ID NO: 608297 - DNA, 15 bp, Homo sapiens
gaaaaaacatgcatt

SEQ ID NO: 608298 - DNA, 15 bp, Homo sapiens
aaaaaacatgcattc

SEQ ID NO: 608299 - DNA, 15 bp, Homo sapiens
aaaaacatgcattca

SEQ ID NO: 608300 - DNA, 15 bp, Homo sapiens
aaaacatgcattcat

SEQ ID NO: 608301 - DNA, 15 bp, Homo sapiens
aaacatgcattcatt

SEQ ID NO: 608302 - DNA, 15 bp, Homo sapiens
aacatgcattcatta

SEQ ID NO: 608303 - DNA, 15 bp, Homo sapiens
acatgcattcattaa

SEQ ID NO: 608304 - DNA, 15 bp, Homo sapiens
catgcattcattaac

SEQ ID NO: 608305 - DNA, 15 bp, Homo sapiens
atgcattcattaact

SEQ ID NO: 608306 - DNA, 15 bp, Homo sapiens
tgcattcattaactg

SEQ ID NO: 608307 - DNA, 15 bp, Homo sapiens
gcattcattaactgc

SEQ ID NO: 608308 - DNA, 15 bp, Homo sapiens
cattcattaactgct

SEQ ID NO: 608309 - DNA, 15 bp, Homo sapiens
attcattaactgctt

SEQ ID NO: 608310 - DNA, 15 bp, Homo sapiens
ttcattaactgcttt

SEQ ID NO: 608311 - DNA, 15 bp, Homo sapiens
tcattaactgctttt

SEQ ID NO: 608312 - DNA, 15 bp, Homo sapiens
cattaactgcttttt

SEQ ID NO: 608313 - DNA, 15 bp, Homo sapiens
attaactgctttttc

SEQ ID NO: 608314 - DNA, 15 bp, Homo sapiens
ttaactgctttttcc

SEQ ID NO: 608315 - DNA, 15 bp, Homo sapiens
taactgctttttcct

SEQ ID NO: 608316 - DNA, 15 bp, Homo sapiens
aactgctttttcctc

SEQ ID NO: 608317 - DNA, 15 bp, Homo sapiens
actgctttttcctct

SEQ ID NO: 608318 - DNA, 15 bp, Homo sapiens
ctgctttttcctctg

SEQ ID NO: 608319 - DNA, 15 bp, Homo sapiens
tgctttttcctctgc

SEQ ID NO: 608320 - DNA, 15 bp, Homo sapiens
gctttttcctctgct

SEQ ID NO: 608321 - DNA, 15 bp, Homo sapiens
ctttttcctctgctg

SEQ ID NO: 608322 - DNA, 15 bp, Homo sapiens
tttttcctctgctgt

SEQ ID NO: 608323 - DNA, 15 bp, Homo sapiens
ttttcctctgctgtc

SEQ ID NO: 608324 - DNA, 15 bp, Homo sapiens
tttcctctgctgtca

SEQ ID NO: 608325 - DNA, 15 bp, Homo sapiens
ttcctctgctgtcaa

SEQ ID NO: 608326 - DNA, 15 bp, Homo sapiens
tcctctgctgtcaac

SEQ ID NO: 608327 - DNA, 15 bp, Homo sapiens
cctctgctgtcaaca

SEQ ID NO: 608328 - DNA, 15 bp, Homo sapiens
ctctgctgtcaacac

SEQ ID NO: 608329 - DNA, 15 bp, Homo sapiens
tctgctgtcaacaca

SEQ ID NO: 608330 - DNA, 15 bp, Homo sapiens
ctgctgtcaacacag

SEQ ID NO: 608331 - DNA, 15 bp, Homo sapiens
tgctgtcaacacagt

SEQ ID NO: 608332 - DNA, 15 bp, Homo sapiens
gctgtcaacacagtc

SEQ ID NO: 608333 - DNA, 15 bp, Homo sapiens
ctgtcaacacagtca

SEQ ID NO: 608334 - DNA, 15 bp, Homo sapiens
tgtcaacacagtcaa

SEQ ID NO: 608335 - DNA, 15 bp, Homo sapiens
gtcaacacagtcaat

SEQ ID NO: 608336 - DNA, 15 bp, Homo sapiens
tcaacacagtcaata

SEQ ID NO: 608337 - DNA, 15 bp, Homo sapiens
caacacagtcaatac

SEQ ID NO: 608338 - DNA, 15 bp, Homo sapiens
aacacagtcaataca

SEQ ID NO: 608339 - DNA, 15 bp, Homo sapiens
acacagtcaatacat

SEQ ID NO: 608340 - DNA, 15 bp, Homo sapiens
cacagtcaatacatg

SEQ ID NO: 608341 - DNA, 15 bp, Homo sapiens
acagtcaatacatgt

SEQ ID NO: 608342 - DNA, 15 bp, Homo sapiens
cagtcaatacatgtg

SEQ ID NO: 608343 - DNA, 15 bp, Homo sapiens
agtcaatacatgtgc

SEQ ID NO: 608344 - DNA, 15 bp, Homo sapiens
gtcaatacatgtgca

SEQ ID NO: 608345 - DNA, 15 bp, Homo sapiens
tcaatacatgtgcat

SEQ ID NO: 608346 - DNA, 15 bp, Homo sapiens
caatacatgtgcata

SEQ ID NO: 608347 - DNA, 15 bp, Homo sapiens
aatacatgtgcataa

SEQ ID NO: 608348 - DNA, 15 bp, Homo sapiens
atacatgtgcataac

SEQ ID NO: 608349 - DNA, 15 bp, Homo sapiens
tacatgtgcataact

SEQ ID NO: 608350 - DNA, 15 bp, Homo sapiens
acatgtgcataactc

SEQ ID NO: 608351 - DNA, 15 bp, Homo sapiens
catgtgcataactcc

SEQ ID NO: 608352 - DNA, 15 bp, Homo sapiens
atgtgcataactcct

SEQ ID NO: 608353 - DNA, 15 bp, Homo sapiens
tgtgcataactcctt

SEQ ID NO: 608354 - DNA, 15 bp, Homo sapiens
gtgcataactcctta

SEQ ID NO: 608355 - DNA, 15 bp, Homo sapiens
tgcataactccttat

SEQ ID NO: 608356 - DNA, 15 bp, Homo sapiens
gcataactccttatt

SEQ ID NO: 608357 - DNA, 15 bp, Homo sapiens
cataactccttattg

SEQ ID NO: 608358 - DNA, 15 bp, Homo sapiens
ataactccttattgt

SEQ ID NO: 608359 - DNA, 15 bp, Homo sapiens
taactccttattgtc

SEQ ID NO: 608360 - DNA, 15 bp, Homo sapiens
aactccttattgtct

SEQ ID NO: 608361 - DNA, 15 bp, Homo sapiens
actccttattgtcta

SEQ ID NO: 608362 - DNA, 15 bp, Homo sapiens
ctccttattgtctac

SEQ ID NO: 608363 - DNA, 15 bp, Homo sapiens
tccttattgtctaca

SEQ ID NO: 608364 - DNA, 15 bp, Homo sapiens
ccttattgtctacat

SEQ ID NO: 608365 - DNA, 15 bp, Homo sapiens
cttattgtctacatg

SEQ ID NO: 608366 - DNA, 15 bp, Homo sapiens
ttattgtctacatgg

SEQ ID NO: 608367 - DNA, 15 bp, Homo sapiens
tattgtctacatggt

SEQ ID NO: 608368 - DNA, 15 bp, Homo sapiens
attgtctacatggtg

SEQ ID NO: 608369 - DNA, 15 bp, Homo sapiens
ttgtctacatggtga

SEQ ID NO: 608370 - DNA, 15 bp, Homo sapiens
tgtctacatggtgat

SEQ ID NO: 608371 - DNA, 15 bp, Homo sapiens
gtctacatggtgatt

SEQ ID NO: 608372 - DNA, 15 bp, Homo sapiens
tctacatggtgatta

SEQ ID NO: 608373 - DNA, 15 bp, Homo sapiens
ctacatggtgattat

SEQ ID NO: 608374 - DNA, 15 bp, Homo sapiens
tacatggtgattatc

SEQ ID NO: 608375 - DNA, 15 bp, Homo sapiens
acatggtgattatct

SEQ ID NO: 608376 - DNA, 15 bp, Homo sapiens
catggtgattatctt

SEQ ID NO: 608377 - DNA, 15 bp, Homo sapiens
atggtgattatcttg

SEQ ID NO: 608378 - DNA, 15 bp, Homo sapiens
tggtgattatcttgc

SEQ ID NO: 608379 - DNA, 15 bp, Homo sapiens
ggtgattatcttgct

SEQ ID NO: 608380 - DNA, 15 bp, Homo sapiens
gtgattatcttgctg

SEQ ID NO: 608381 - DNA, 15 bp, Homo sapiens
tgattatcttgctga

SEQ ID NO: 608382 - DNA, 15 bp, Homo sapiens
gattatcttgctgat

SEQ ID NO: 608383 - DNA, 15 bp, Homo sapiens
attatcttgctgatg

SEQ ID NO: 608384 - DNA, 15 bp, Homo sapiens
ttatcttgctgatga

SEQ ID NO: 608385 - DNA, 15 bp, Homo sapiens
tatcttgctgatgaa

SEQ ID NO: 608386 - DNA, 15 bp, Homo sapiens
atcttgctgatgaat

SEQ ID NO: 608387 - DNA, 15 bp, Homo sapiens
tcttgctgatgaatt

SEQ ID NO: 608388 - DNA, 15 bp, Homo sapiens
cttgctgatgaattc

SEQ ID NO: 608389 - DNA, 15 bp, Homo sapiens
ttgctgatgaattct

SEQ ID NO: 608390 - DNA, 15 bp, Homo sapiens
tgctgatgaattctc

SEQ ID NO: 608391 - DNA, 15 bp, Homo sapiens
gctgatgaattctca

SEQ ID NO: 608392 - DNA, 15 bp, Homo sapiens
ctgatgaattctcaa

SEQ ID NO: 608393 - DNA, 15 bp, Homo sapiens
tgatgaattctcaaa

SEQ ID NO: 608394 - DNA, 15 bp, Homo sapiens
gatgaattctcaaag

SEQ ID NO: 608395 - DNA, 15 bp, Homo sapiens
atgaattctcaaagg

SEQ ID NO: 608396 - DNA, 15 bp, Homo sapiens
tgaattctcaaaggc

SEQ ID NO: 608397 - DNA, 15 bp, Homo sapiens
gaattctcaaaggcc

SEQ ID NO: 608398 - DNA, 15 bp, Homo sapiens
aattctcaaaggcca

SEQ ID NO: 608399 - DNA, 15 bp, Homo sapiens
attctcaaaggccag

SEQ ID NO: 608400 - DNA, 15 bp, Homo sapiens
ttctcaaaggccaga

SEQ ID NO: 608401 - DNA, 15 bp, Homo sapiens
tctcaaaggccagag

SEQ ID NO: 608402 - DNA, 15 bp, Homo sapiens
ctcaaaggccagaga

SEQ ID NO: 608403 - DNA, 15 bp, Homo sapiens
tcaaaggccagagat

SEQ ID NO: 608404 - DNA, 15 bp, Homo sapiens
caaaggccagagatt

SEQ ID NO: 608405 - DNA, 15 bp, Homo sapiens
aaaggccagagattt

SEQ ID NO: 608406 - DNA, 15 bp, Homo sapiens
aaggccagagatttg

SEQ ID NO: 608407 - DNA, 15 bp, Homo sapiens
aggccagagatttgg

SEQ ID NO: 608408 - DNA, 15 bp, Homo sapiens
ggccagagatttgga

SEQ ID NO: 608409 - DNA, 15 bp, Homo sapiens
gccagagatttggac

SEQ ID NO: 608410 - DNA, 15 bp, Homo sapiens
ccagagatttggact

SEQ ID NO: 608411 - DNA, 15 bp, Homo sapiens
cagagatttggacta

SEQ ID NO: 608412 - DNA, 15 bp, Homo sapiens
agagatttggactat

SEQ ID NO: 608413 - DNA, 15 bp, Homo sapiens
gagatttggactatt

SEQ ID NO: 608414 - DNA, 15 bp, Homo sapiens
agatttggactattt

SEQ ID NO: 608415 - DNA, 15 bp, Homo sapiens
gatttggactatttt

SEQ ID NO: 608416 - DNA, 15 bp, Homo sapiens
atttggactattttt

SEQ ID NO: 608417 - DNA, 15 bp, Homo sapiens
tttggactatttttt

SEQ ID NO: 608418 - DNA, 15 bp, Homo sapiens
ttggactattttttc

SEQ ID NO: 608419 - DNA, 15 bp, Homo sapiens
tggactattttttct

SEQ ID NO: 608420 - DNA, 15 bp, Homo sapiens
ggactattttttctc

SEQ ID NO: 608421 - DNA, 15 bp, Homo sapiens
gactattttttctct

SEQ ID NO: 608422 - DNA, 15 bp, Homo sapiens
actattttttctctg

SEQ ID NO: 608423 - DNA, 15 bp, Homo sapiens
ctattttttctctgt

SEQ ID NO: 608424 - DNA, 15 bp, Homo sapiens
tattttttctctgta

SEQ ID NO: 608425 - DNA, 15 bp, Homo sapiens
attttttctctgtaa

SEQ ID NO: 608426 - DNA, 15 bp, Homo sapiens
ttttttctctgtaac

SEQ ID NO: 608427 - DNA, 15 bp, Homo sapiens
tttttctctgtaacc

SEQ ID NO: 608428 - DNA, 15 bp, Homo sapiens
ttttctctgtaacct

SEQ ID NO: 608429 - DNA, 15 bp, Homo sapiens
tttctctgtaacctt

SEQ ID NO: 608430 - DNA, 15 bp, Homo sapiens
ttctctgtaaccttg

SEQ ID NO: 608431 - DNA, 15 bp, Homo sapiens
tctctgtaaccttgc

SEQ ID NO: 608432 - DNA, 15 bp, Homo sapiens
ctctgtaaccttgca

SEQ ID NO: 608433 - DNA, 15 bp, Homo sapiens
tctgtaaccttgcat

SEQ ID NO: 608434 - DNA, 15 bp, Homo sapiens
ctgtaaccttgcatg

SEQ ID NO: 608435 - DNA, 15 bp, Homo sapiens
tgtaaccttgcatgt

SEQ ID NO: 608436 - DNA, 15 bp, Homo sapiens
gtaaccttgcatgtt

SEQ ID NO: 608437 - DNA, 15 bp, Homo sapiens
taaccttgcatgttc

SEQ ID NO: 608438 - DNA, 15 bp, Homo sapiens
aaccttgcatgttcc

SEQ ID NO: 608439 - DNA, 15 bp, Homo sapiens
accttgcatgttcct

SEQ ID NO: 608440 - DNA, 15 bp, Homo sapiens
ccttgcatgttcctg

SEQ ID NO: 608441 - DNA, 15 bp, Homo sapiens
cttgcatgttcctgg

SEQ ID NO: 608442 - DNA, 15 bp, Homo sapiens
ttgcatgttcctggc

SEQ ID NO: 608443 - DNA, 15 bp, Homo sapiens
tgcatgttcctggcc

SEQ ID NO: 608444 - DNA, 15 bp, Homo sapiens
gcatgttcctggcca

SEQ ID NO: 608445 - DNA, 15 bp, Homo sapiens
catgttcctggccac

SEQ ID NO: 608446 - DNA, 15 bp, Homo sapiens
atgttcctggccaca

SEQ ID NO: 608447 - DNA, 15 bp, Homo sapiens
tgttcctggccacat

SEQ ID NO: 608448 - DNA, 15 bp, Homo sapiens
gttcctggccacatg

SEQ ID NO: 608449 - DNA, 15 bp, Homo sapiens
ttcctggccacatgc

SEQ ID NO: 608450 - DNA, 15 bp, Homo sapiens
tcctggccacatgcc

SEQ ID NO: 608451 - DNA, 15 bp, Homo sapiens
cctggccacatgcca

SEQ ID NO: 608452 - DNA, 15 bp, Homo sapiens
ctggccacatgccac

SEQ ID NO: 608453 - DNA, 15 bp, Homo sapiens
tggccacatgccacc

SEQ ID NO: 608454 - DNA, 15 bp, Homo sapiens
ggccacatgccacca

SEQ ID NO: 608455 - DNA, 15 bp, Homo sapiens
gccacatgccaccac

SEQ ID NO: 608456 - DNA, 15 bp, Homo sapiens
ccacatgccaccacc

SEQ ID NO: 608457 - DNA, 15 bp, Homo sapiens
cacatgccaccacca

SEQ ID NO: 608458 - DNA, 15 bp, Homo sapiens
acatgccaccaccac

SEQ ID NO: 608459 - DNA, 15 bp, Homo sapiens
catgccaccaccacc

SEQ ID NO: 608460 - DNA, 15 bp, Homo sapiens
atgccaccaccaccc

SEQ ID NO: 608461 - DNA, 15 bp, Homo sapiens
tgccaccaccaccca

SEQ ID NO: 608462 - DNA, 15 bp, Homo sapiens
gccaccaccacccaa

SEQ ID NO: 608463 - DNA, 15 bp, Homo sapiens
ccaccaccacccaaa

SEQ ID NO: 608464 - DNA, 15 bp, Homo sapiens
caccaccacccaaac

SEQ ID NO: 608465 - DNA, 15 bp, Homo sapiens
accaccacccaaaca

SEQ ID NO: 608466 - DNA, 15 bp, Homo sapiens
ccaccacccaaacag

SEQ ID NO: 608467 - DNA, 15 bp, Homo sapiens
caccacccaaacaga

SEQ ID NO: 608468 - DNA, 15 bp, Homo sapiens
accacccaaacagaa

SEQ ID NO: 608469 - DNA, 15 bp, Homo sapiens
ccacccaaacagaat

SEQ ID NO: 608470 - DNA, 15 bp, Homo sapiens
cacccaaacagaatg

SEQ ID NO: 608471 - DNA, 15 bp, Homo sapiens
acccaaacagaatgt

SEQ ID NO: 608472 - DNA, 15 bp, Homo sapiens
cccaaacagaatgta

SEQ ID NO: 608473 - DNA, 15 bp, Homo sapiens
ccaaacagaatgtac

SEQ ID NO: 608474 - DNA, 15 bp, Homo sapiens
caaacagaatgtacg

SEQ ID NO: 608475 - DNA, 15 bp, Homo sapiens
aaacagaatgtacgc

SEQ ID NO: 608476 - DNA, 15 bp, Homo sapiens
aacagaatgtacgca

SEQ ID NO: 608477 - DNA, 15 bp, Homo sapiens
acagaatgtacgcag

SEQ ID NO: 608478 - DNA, 15 bp, Homo sapiens
cagaatgtacgcagg

SEQ ID NO: 608479 - DNA, 15 bp, Homo sapiens
agaatgtacgcaggg

SEQ ID NO: 608480 - DNA, 15 bp, Homo sapiens
gaatgtacgcaggga

SEQ ID NO: 608481 - DNA, 15 bp, Homo sapiens
aatgtacgcagggaa

SEQ ID NO: 608482 - DNA, 15 bp, Homo sapiens
atgtacgcagggaat

SEQ ID NO: 608483 - DNA, 15 bp, Homo sapiens
tgtacgcagggaatg

SEQ ID NO: 608484 - DNA, 15 bp, Homo sapiens
gtacgcagggaatgt

SEQ ID NO: 608485 - DNA, 15 bp, Homo sapiens
tacgcagggaatgta

SEQ ID NO: 608486 - DNA, 15 bp, Homo sapiens
acgcagggaatgtat

SEQ ID NO: 608487 - DNA, 15 bp, Homo sapiens
cgcagggaatgtatt

SEQ ID NO: 608488 - DNA, 15 bp, Homo sapiens
gcagggaatgtattt

SEQ ID NO: 608489 - DNA, 15 bp, Homo sapiens
cagggaatgtatttt

SEQ ID NO: 608490 - DNA, 15 bp, Homo sapiens
agggaatgtattttt

SEQ ID NO: 608491 - DNA, 15 bp, Homo sapiens
gggaatgtatttttc

SEQ ID NO: 608492 - DNA, 15 bp, Homo sapiens
ggaatgtatttttca

SEQ ID NO: 608493 - DNA, 15 bp, Homo sapiens
gaatgtatttttcag

SEQ ID NO: 608494 - DNA, 15 bp, Homo sapiens
aatgtatttttcagg

SEQ ID NO: 608495 - DNA, 15 bp, Homo sapiens
atgtatttttcagga

SEQ ID NO: 608496 - DNA, 15 bp, Homo sapiens
tgtatttttcaggat

SEQ ID NO: 608497 - DNA, 15 bp, Homo sapiens
gtatttttcaggata

SEQ ID NO: 608498 - DNA, 15 bp, Homo sapiens
tatttttcaggataa

SEQ ID NO: 608499 - DNA, 15 bp, Homo sapiens
atttttcaggataac

SEQ ID NO: 608500 - DNA, 15 bp, Homo sapiens
tttttcaggataacc

SEQ ID NO: 608501 - DNA, 15 bp, Homo sapiens
ttttcaggataacct

SEQ ID NO: 608502 - DNA, 15 bp, Homo sapiens
tttcaggataaccta

SEQ ID NO: 608503 - DNA, 15 bp, Homo sapiens
ttcaggataacctaa

SEQ ID NO: 608504 - DNA, 15 bp, Homo sapiens
tcaggataacctaag

SEQ ID NO: 608505 - DNA, 15 bp, Homo sapiens
caggataacctaaga

SEQ ID NO: 608506 - DNA, 15 bp, Homo sapiens
aggataacctaagaa

SEQ ID NO: 608507 - DNA, 15 bp, Homo sapiens
ggataacctaagaaa

SEQ ID NO: 608508 - DNA, 15 bp, Homo sapiens
gataacctaagaaaa

SEQ ID NO: 608509 - DNA, 15 bp, Homo sapiens
ataacctaagaaaaa

SEQ ID NO: 608510 - DNA, 15 bp, Homo sapiens
taacctaagaaaaaa

SEQ ID NO: 608511 - DNA, 15 bp, Homo sapiens
aacctaagaaaaaat

SEQ ID NO: 608512 - DNA, 15 bp, Homo sapiens
acctaagaaaaaata

SEQ ID NO: 608513 - DNA, 15 bp, Homo sapiens
cctaagaaaaaatag

SEQ ID NO: 608514 - DNA, 15 bp, Homo sapiens
ctaagaaaaaatagg

SEQ ID NO: 608515 - DNA, 15 bp, Homo sapiens
taagaaaaaatagga

SEQ ID NO: 608516 - DNA, 15 bp, Homo sapiens
aagaaaaaataggat

SEQ ID NO: 608517 - DNA, 15 bp, Homo sapiens
agaaaaaataggatt

SEQ ID NO: 608518 - DNA, 15 bp, Homo sapiens
gaaaaaataggatta

SEQ ID NO: 608519 - DNA, 15 bp, Homo sapiens
aaaaaataggattaa

SEQ ID NO: 608520 - DNA, 15 bp, Homo sapiens
aaaaataggattaag

SEQ ID NO: 608521 - DNA, 15 bp, Homo sapiens
aaaataggattaaga

SEQ ID NO: 608522 - DNA, 15 bp, Homo sapiens
aaataggattaagaa

SEQ ID NO: 608523 - DNA, 15 bp, Homo sapiens
aataggattaagaag

SEQ ID NO: 608524 - DNA, 15 bp, Homo sapiens
ataggattaagaaga

SEQ ID NO: 608525 - DNA, 15 bp, Homo sapiens
taggattaagaagat

SEQ ID NO: 608526 - DNA, 15 bp, Homo sapiens
aggattaagaagata

SEQ ID NO: 608527 - DNA, 15 bp, Homo sapiens
ggattaagaagataa

SEQ ID NO: 608528 - DNA, 15 bp, Homo sapiens
gattaagaagataaa

SEQ ID NO: 608529 - DNA, 15 bp, Homo sapiens
attaagaagataaag

SEQ ID NO: 608530 - DNA, 15 bp, Homo sapiens
ttaagaagataaagc

SEQ ID NO: 608531 - DNA, 15 bp, Homo sapiens
taagaagataaagct

SEQ ID NO: 608532 - DNA, 15 bp, Homo sapiens
aagaagataaagctg

SEQ ID NO: 608533 - DNA, 15 bp, Homo sapiens
agaagataaagctgc

SEQ ID NO: 608534 - DNA, 15 bp, Homo sapiens
gaagataaagctgct

SEQ ID NO: 608535 - DNA, 15 bp, Homo sapiens
aagataaagctgctg

SEQ ID NO: 608536 - DNA, 15 bp, Homo sapiens
agataaagctgctga

SEQ ID NO: 608537 - DNA, 15 bp, Homo sapiens
gataaagctgctgat

SEQ ID NO: 608538 - DNA, 15 bp, Homo sapiens
ataaagctgctgatc

SEQ ID NO: 608539 - DNA, 15 bp, Homo sapiens
taaagctgctgatca

SEQ ID NO: 608540 - DNA, 15 bp, Homo sapiens
aaagctgctgatcat

SEQ ID NO: 608541 - DNA, 15 bp, Homo sapiens
aagctgctgatcatg

SEQ ID NO: 608542 - DNA, 15 bp, Homo sapiens
agctgctgatcatgt

SEQ ID NO: 608543 - DNA, 15 bp, Homo sapiens
gctgctgatcatgta

SEQ ID NO: 608544 - DNA, 15 bp, Homo sapiens
ctgctgatcatgtaa

SEQ ID NO: 608545 - DNA, 15 bp, Homo sapiens
tgctgatcatgtaat

SEQ ID NO: 608546 - DNA, 15 bp, Homo sapiens
gctgatcatgtaatg

SEQ ID NO: 608547 - DNA, 15 bp, Homo sapiens
ctgatcatgtaatgt

SEQ ID NO: 608548 - DNA, 15 bp, Homo sapiens
tgatcatgtaatgta

SEQ ID NO: 608549 - DNA, 15 bp, Homo sapiens
gatcatgtaatgtac

SEQ ID NO: 608550 - DNA, 15 bp, Homo sapiens
atcatgtaatgtact

SEQ ID NO: 608551 - DNA, 15 bp, Homo sapiens
tcatgtaatgtactt

SEQ ID NO: 608552 - DNA, 15 bp, Homo sapiens
catgtaatgtacttt

SEQ ID NO: 608553 - DNA, 15 bp, Homo sapiens
atgtaatgtacttta

SEQ ID NO: 608554 - DNA, 15 bp, Homo sapiens
tgtaatgtactttag

SEQ ID NO: 608555 - DNA, 15 bp, Homo sapiens
gtaatgtactttaga

SEQ ID NO: 608556 - DNA, 15 bp, Homo sapiens
taatgtactttagac

SEQ ID NO: 608557 - DNA, 15 bp, Homo sapiens
aatgtactttagact

SEQ ID NO: 608558 - DNA, 15 bp, Homo sapiens
atgtactttagactc

SEQ ID NO: 608559 - DNA, 15 bp, Homo sapiens
tgtactttagactca

SEQ ID NO: 608560 - DNA, 15 bp, Homo sapiens
gtactttagactcag

SEQ ID NO: 608561 - DNA, 15 bp, Homo sapiens
tactttagactcaga

SEQ ID NO: 608562 - DNA, 15 bp, Homo sapiens
actttagactcagat

SEQ ID NO: 608563 - DNA, 15 bp, Homo sapiens
ctttagactcagata

SEQ ID NO: 608564 - DNA, 15 bp, Homo sapiens
tttagactcagatat

SEQ ID NO: 608565 - DNA, 15 bp, Homo sapiens
ttagactcagatata

SEQ ID NO: 608566 - DNA, 15 bp, Homo sapiens
tagactcagatatat

SEQ ID NO: 608567 - DNA, 15 bp, Homo sapiens
agactcagatatata

SEQ ID NO: 608568 - DNA, 15 bp, Homo sapiens
gactcagatatataa

SEQ ID NO: 608569 - DNA, 15 bp, Homo sapiens
actcagatatataaa

SEQ ID NO: 608570 - DNA, 15 bp, Homo sapiens
ctcagatatataaat

SEQ ID NO: 608571 - DNA, 15 bp, Homo sapiens
tcagatatataaata

SEQ ID NO: 608572 - DNA, 15 bp, Homo sapiens
cagatatataaatat

SEQ ID NO: 608573 - DNA, 15 bp, Homo sapiens
agatatataaatatt

SEQ ID NO: 608574 - DNA, 15 bp, Homo sapiens
gatatataaatattt

SEQ ID NO: 608575 - DNA, 15 bp, Homo sapiens
atatataaatatttg

SEQ ID NO: 608576 - DNA, 15 bp, Homo sapiens
tatataaatatttgt

SEQ ID NO: 608577 - DNA, 15 bp, Homo sapiens
atataaatatttgtg

SEQ ID NO: 608578 - DNA, 15 bp, Homo sapiens
tataaatatttgtga

SEQ ID NO: 608579 - DNA, 15 bp, Homo sapiens
ataaatatttgtgaa

SEQ ID NO: 608580 - DNA, 15 bp, Homo sapiens
taaatatttgtgaat

SEQ ID NO: 608581 - DNA, 15 bp, Homo sapiens
aaatatttgtgaatt

SEQ ID NO: 608582 - DNA, 15 bp, Homo sapiens
aatatttgtgaatta

SEQ ID NO: 608583 - DNA, 15 bp, Homo sapiens
atatttgtgaattat

SEQ ID NO: 608584 - DNA, 15 bp, Homo sapiens
tatttgtgaattatc

SEQ ID NO: 608585 - DNA, 15 bp, Homo sapiens
atttgtgaattatct

SEQ ID NO: 608586 - DNA, 15 bp, Homo sapiens
tttgtgaattatctg

SEQ ID NO: 608587 - DNA, 15 bp, Homo sapiens
ttgtgaattatctgt

SEQ ID NO: 608588 - DNA, 15 bp, Homo sapiens
tgtgaattatctgtc

SEQ ID NO: 608589 - DNA, 15 bp, Homo sapiens
gtgaattatctgtcc

SEQ ID NO: 608590 - DNA, 15 bp, Homo sapiens
tgaattatctgtcct

SEQ ID NO: 608591 - DNA, 15 bp, Homo sapiens
gaattatctgtccta

SEQ ID NO: 608592 - DNA, 15 bp, Homo sapiens
aattatctgtcctat

SEQ ID NO: 608593 - DNA, 15 bp, Homo sapiens
attatctgtcctatt

SEQ ID NO: 608594 - DNA, 15 bp, Homo sapiens
ttatctgtcctattt

SEQ ID NO: 608595 - DNA, 15 bp, Homo sapiens
tatctgtcctatttc

SEQ ID NO: 608596 - DNA, 15 bp, Homo sapiens
atctgtcctatttct

SEQ ID NO: 608597 - DNA, 15 bp, Homo sapiens
tctgtcctatttctt

SEQ ID NO: 608598 - DNA, 15 bp, Homo sapiens
ctgtcctatttcttt

SEQ ID NO: 608599 - DNA, 15 bp, Homo sapiens
tgtcctatttctttc

SEQ ID NO: 608600 - DNA, 15 bp, Homo sapiens
gtcctatttctttct

SEQ ID NO: 608601 - DNA, 15 bp, Homo sapiens
tcctatttctttctt

SEQ ID NO: 608602 - DNA, 15 bp, Homo sapiens
cctatttctttcttc

SEQ ID NO: 608603 - DNA, 15 bp, Homo sapiens
ctatttctttcttct

SEQ ID NO: 608604 - DNA, 15 bp, Homo sapiens
tatttctttcttcta

SEQ ID NO: 608605 - DNA, 15 bp, Homo sapiens
atttctttcttctat

SEQ ID NO: 608606 - DNA, 15 bp, Homo sapiens
tttctttcttctatt

SEQ ID NO: 608607 - DNA, 15 bp, Homo sapiens
ttctttcttctatta

SEQ ID NO: 608608 - DNA, 15 bp, Homo sapiens
tctttcttctattaa

SEQ ID NO: 608609 - DNA, 15 bp, Homo sapiens
ctttcttctattaat

SEQ ID NO: 608610 - DNA, 15 bp, Homo sapiens
tttcttctattaatt

SEQ ID NO: 608611 - DNA, 15 bp, Homo sapiens
ttcttctattaattc

SEQ ID NO: 608612 - DNA, 15 bp, Homo sapiens
tcttctattaattca

SEQ ID NO: 608613 - DNA, 15 bp, Homo sapiens
cttctattaattcat

SEQ ID NO: 608614 - DNA, 15 bp, Homo sapiens
ttctattaattcatt

SEQ ID NO: 608615 - DNA, 15 bp, Homo sapiens
tctattaattcattg

SEQ ID NO: 608616 - DNA, 15 bp, Homo sapiens
ctattaattcattga

SEQ ID NO: 608617 - DNA, 15 bp, Homo sapiens
tattaattcattgac

SEQ ID NO: 608618 - DNA, 15 bp, Homo sapiens
attaattcattgact

SEQ ID NO: 608619 - DNA, 15 bp, Homo sapiens
ttaattcattgactc

SEQ ID NO: 608620 - DNA, 15 bp, Homo sapiens
taattcattgactct

SEQ ID NO: 608621 - DNA, 15 bp, Homo sapiens
aattcattgactcta

SEQ ID NO: 608622 - DNA, 15 bp, Homo sapiens
attcattgactctag

SEQ ID NO: 608623 - DNA, 15 bp, Homo sapiens
ttcattgactctaga

SEQ ID NO: 608624 - DNA, 15 bp, Homo sapiens
tctgccactgtctct

SEQ ID NO: 608625 - DNA, 15 bp, Homo sapiens
ctgccactgtctctc

SEQ ID NO: 608626 - DNA, 15 bp, Homo sapiens
tgccactgtctctct

SEQ ID NO: 608627 - DNA, 15 bp, Homo sapiens
gccactgtctctctg

SEQ ID NO: 608628 - DNA, 15 bp, Homo sapiens
ccactgtctctctgg

SEQ ID NO: 608629 - DNA, 15 bp, Homo sapiens
cactgtctctctggg

SEQ ID NO: 608630 - DNA, 15 bp, Homo sapiens
actgtctctctgggt

SEQ ID NO: 608631 - DNA, 15 bp, Homo sapiens
ctgtctctctgggtg

SEQ ID NO: 608632 - DNA, 15 bp, Homo sapiens
tgtctctctgggtga

SEQ ID NO: 608633 - DNA, 15 bp, Homo sapiens
gtctctctgggtgac

SEQ ID NO: 608634 - DNA, 15 bp, Homo sapiens
tctctctgggtgacc

SEQ ID NO: 608635 - DNA, 15 bp, Homo sapiens
ctctctgggtgacct

SEQ ID NO: 608636 - DNA, 15 bp, Homo sapiens
tctctgggtgacctc

SEQ ID NO: 608637 - DNA, 15 bp, Homo sapiens
ctctgggtgacctca

SEQ ID NO: 608638 - DNA, 15 bp, Homo sapiens
tctgggtgacctcag

SEQ ID NO: 608639 - DNA, 15 bp, Homo sapiens
ctgggtgacctcagg

SEQ ID NO: 608640 - DNA, 15 bp, Homo sapiens
tgggtgacctcaggc

SEQ ID NO: 608641 - DNA, 15 bp, Homo sapiens
gggtgacctcaggca

SEQ ID NO: 608642 - DNA, 15 bp, Homo sapiens
ggtgacctcaggcag

SEQ ID NO: 608643 - DNA, 15 bp, Homo sapiens
gtgacctcaggcagg

SEQ ID NO: 608644 - DNA, 15 bp, Homo sapiens
tgacctcaggcaggt

SEQ ID NO: 608645 - DNA, 15 bp, Homo sapiens
gacctcaggcaggtc

SEQ ID NO: 608646 - DNA, 15 bp, Homo sapiens
acctcaggcaggtct

SEQ ID NO: 608647 - DNA, 15 bp, Homo sapiens
cctcaggcaggtctc

SEQ ID NO: 608648 - DNA, 15 bp, Homo sapiens
ctcaggcaggtctcc

SEQ ID NO: 608649 - DNA, 15 bp, Homo sapiens
tcaggcaggtctcct

SEQ ID NO: 608650 - DNA, 15 bp, Homo sapiens
caggcaggtctcctc

SEQ ID NO: 608651 - DNA, 15 bp, Homo sapiens
aggcaggtctcctca

SEQ ID NO: 608652 - DNA, 15 bp, Homo sapiens
ggcaggtctcctcaa

SEQ ID NO: 608653 - DNA, 15 bp, Homo sapiens
gcaggtctcctcaaa

SEQ ID NO: 608654 - DNA, 15 bp, Homo sapiens
caggtctcctcaaaa

SEQ ID NO: 608655 - DNA, 15 bp, Homo sapiens
aggtctcctcaaaaa

SEQ ID NO: 608656 - DNA, 15 bp, Homo sapiens
ggtctcctcaaaaaa

SEQ ID NO: 608657 - DNA, 15 bp, Homo sapiens
gtctcctcaaaaaaa

SEQ ID NO: 608658 - DNA, 15 bp, Homo sapiens
tctcctcaaaaaaat

SEQ ID NO: 608659 - DNA, 15 bp, Homo sapiens
ctcctcaaaaaaata

SEQ ID NO: 608660 - DNA, 15 bp, Homo sapiens
tcctcaaaaaaataa

SEQ ID NO: 608661 - DNA, 15 bp, Homo sapiens
cctcaaaaaaataag

SEQ ID NO: 608662 - DNA, 15 bp, Homo sapiens
ctcaaaaaaataaga

SEQ ID NO: 608663 - DNA, 15 bp, Homo sapiens
tcaaaaaaataagat

SEQ ID NO: 608664 - DNA, 15 bp, Homo sapiens
caaaaaaataagata

SEQ ID NO: 608665 - DNA, 15 bp, Homo sapiens
aaaaaaataagatac

SEQ ID NO: 608666 - DNA, 15 bp, Homo sapiens
aaaaaataagatact

SEQ ID NO: 608667 - DNA, 15 bp, Homo sapiens
aaaaataagatactt

SEQ ID NO: 608668 - DNA, 15 bp, Homo sapiens
aaaataagatacttt

SEQ ID NO: 608669 - DNA, 15 bp, Homo sapiens
aaataagatacttta

SEQ ID NO: 608670 - DNA, 15 bp, Homo sapiens
aataagatactttat

SEQ ID NO: 608671 - DNA, 15 bp, Homo sapiens
ataagatactttata

SEQ ID NO: 608672 - DNA, 15 bp, Homo sapiens
taagatactttataa

SEQ ID NO: 608673 - DNA, 15 bp, Homo sapiens
aagatactttataaa

SEQ ID NO: 608674 - DNA, 15 bp, Homo sapiens
agatactttataaag

SEQ ID NO: 608675 - DNA, 15 bp, Homo sapiens
gatactttataaagc

SEQ ID NO: 608676 - DNA, 15 bp, Homo sapiens
atactttataaagct

SEQ ID NO: 608677 - DNA, 15 bp, Homo sapiens
tactttataaagctc

SEQ ID NO: 608678 - DNA, 15 bp, Homo sapiens
actttataaagctca

SEQ ID NO: 608679 - DNA, 15 bp, Homo sapiens
ctttataaagctcag

SEQ ID NO: 608680 - DNA, 15 bp, Homo sapiens
tttataaagctcagt

SEQ ID NO: 608681 - DNA, 15 bp, Homo sapiens
ttataaagctcagtt

SEQ ID NO: 608682 - DNA, 15 bp, Homo sapiens
tataaagctcagttt

SEQ ID NO: 608683 - DNA, 15 bp, Homo sapiens
ataaagctcagtttc

SEQ ID NO: 608684 - DNA, 15 bp, Homo sapiens
taaagctcagtttcc

SEQ ID NO: 608685 - DNA, 15 bp, Homo sapiens
aaagctcagtttcct

SEQ ID NO: 608686 - DNA, 15 bp, Homo sapiens
aagctcagtttcctc

SEQ ID NO: 608687 - DNA, 15 bp, Homo sapiens
agctcagtttcctct

SEQ ID NO: 608688 - DNA, 15 bp, Homo sapiens
gctcagtttcctctt

SEQ ID NO: 608689 - DNA, 15 bp, Homo sapiens
ctcagtttcctcttc

SEQ ID NO: 608690 - DNA, 15 bp, Homo sapiens
tcagtttcctcttca

SEQ ID NO: 608691 - DNA, 15 bp, Homo sapiens
cagtttcctcttcag

SEQ ID NO: 608692 - DNA, 15 bp, Homo sapiens
agtttcctcttcagt

SEQ ID NO: 608693 - DNA, 15 bp, Homo sapiens
gtttcctcttcagta

SEQ ID NO: 608694 - DNA, 15 bp, Homo sapiens
tttcctcttcagtaa

SEQ ID NO: 608695 - DNA, 15 bp, Homo sapiens
ttcctcttcagtaaa

SEQ ID NO: 608696 - DNA, 15 bp, Homo sapiens
tcctcttcagtaaaa

SEQ ID NO: 608697 - DNA, 15 bp, Homo sapiens
cctcttcagtaaaat

SEQ ID NO: 608698 - DNA, 15 bp, Homo sapiens
ctcttcagtaaaatg

SEQ ID NO: 608699 - DNA, 15 bp, Homo sapiens
tcttcagtaaaatga

SEQ ID NO: 608700 - DNA, 15 bp, Homo sapiens
cttcagtaaaatgag

SEQ ID NO: 608701 - DNA, 15 bp, Homo sapiens
ttcagtaaaatgagg

SEQ ID NO: 608702 - DNA, 15 bp, Homo sapiens
tcagtaaaatgagga

SEQ ID NO: 608703 - DNA, 15 bp, Homo sapiens
cagtaaaatgaggat

SEQ ID NO: 608704 - DNA, 15 bp, Homo sapiens
agtaaaatgaggatt

SEQ ID NO: 608705 - DNA, 15 bp, Homo sapiens
gtaaaatgaggattc

SEQ ID NO: 608706 - DNA, 15 bp, Homo sapiens
taaaatgaggattcc

SEQ ID NO: 608707 - DNA, 15 bp, Homo sapiens
aaaatgaggattcca

SEQ ID NO: 608708 - DNA, 15 bp, Homo sapiens
aaatgaggattccag

SEQ ID NO: 608709 - DNA, 15 bp, Homo sapiens
aatgaggattccagg

SEQ ID NO: 608710 - DNA, 15 bp, Homo sapiens
atgaggattccaggt

SEQ ID NO: 608711 - DNA, 15 bp, Homo sapiens
tgaggattccaggta

SEQ ID NO: 608712 - DNA, 15 bp, Homo sapiens
gaggattccaggtaa

SEQ ID NO: 608713 - DNA, 15 bp, Homo sapiens
aggattccaggtaac

SEQ ID NO: 608714 - DNA, 15 bp, Homo sapiens
ggattccaggtaact

SEQ ID NO: 608715 - DNA, 15 bp, Homo sapiens
gattccaggtaactc

SEQ ID NO: 608716 - DNA, 15 bp, Homo sapiens
attccaggtaactca

SEQ ID NO: 608717 - DNA, 15 bp, Homo sapiens
ttccaggtaactcac

SEQ ID NO: 608718 - DNA, 15 bp, Homo sapiens
tccaggtaactcaca

SEQ ID NO: 608719 - DNA, 15 bp, Homo sapiens
ccaggtaactcacag

SEQ ID NO: 608720 - DNA, 15 bp, Homo sapiens
caggtaactcacaga

SEQ ID NO: 608721 - DNA, 15 bp, Homo sapiens
aggtaactcacagat

SEQ ID NO: 608722 - DNA, 15 bp, Homo sapiens
ggtaactcacagata

SEQ ID NO: 608723 - DNA, 15 bp, Homo sapiens
gtaactcacagatag

SEQ ID NO: 608724 - DNA, 15 bp, Homo sapiens
taactcacagatagt

SEQ ID NO: 608725 - DNA, 15 bp, Homo sapiens
aactcacagatagtt

SEQ ID NO: 608726 - DNA, 15 bp, Homo sapiens
actcacagatagttt

SEQ ID NO: 608727 - DNA, 15 bp, Homo sapiens
ctcacagatagtttg

SEQ ID NO: 608728 - DNA, 15 bp, Homo sapiens
tcacagatagtttgt

SEQ ID NO: 608729 - DNA, 15 bp, Homo sapiens
cacagatagtttgtg

SEQ ID NO: 608730 - DNA, 15 bp, Homo sapiens
acagatagtttgtgg

SEQ ID NO: 608731 - DNA, 15 bp, Homo sapiens
cagatagtttgtggg

SEQ ID NO: 608732 - DNA, 15 bp, Homo sapiens
agatagtttgtgggg

SEQ ID NO: 608733 - DNA, 15 bp, Homo sapiens
gatagtttgtgggga

SEQ ID NO: 608734 - DNA, 15 bp, Homo sapiens
atagtttgtggggat

SEQ ID NO: 608735 - DNA, 15 bp, Homo sapiens
tagtttgtggggatg

SEQ ID NO: 608736 - DNA, 15 bp, Homo sapiens
agtttgtggggatga

SEQ ID NO: 608737 - DNA, 15 bp, Homo sapiens
gtttgtggggatgaa

SEQ ID NO: 608738 - DNA, 15 bp, Homo sapiens
tttgtggggatgaat

SEQ ID NO: 608739 - DNA, 15 bp, Homo sapiens
ttgtggggatgaatc

SEQ ID NO: 608740 - DNA, 15 bp, Homo sapiens
tgtggggatgaatct

SEQ ID NO: 608741 - DNA, 15 bp, Homo sapiens
gtggggatgaatctg

SEQ ID NO: 608742 - DNA, 15 bp, Homo sapiens
tggggatgaatctgt

SEQ ID NO: 608743 - DNA, 15 bp, Homo sapiens
ggggatgaatctgtt

SEQ ID NO: 608744 - DNA, 15 bp, Homo sapiens
gggatgaatctgttc

SEQ ID NO: 608745 - DNA, 15 bp, Homo sapiens
ggatgaatctgttcc

SEQ ID NO: 608746 - DNA, 15 bp, Homo sapiens
gatgaatctgttcct

SEQ ID NO: 608747 - DNA, 15 bp, Homo sapiens
atgaatctgttcctt

SEQ ID NO: 608748 - DNA, 15 bp, Homo sapiens
tgaatctgttcctta

SEQ ID NO: 608749 - DNA, 15 bp, Homo sapiens
gaatctgttccttaa

SEQ ID NO: 608750 - DNA, 15 bp, Homo sapiens
aatctgttccttaaa

SEQ ID NO: 608751 - DNA, 15 bp, Homo sapiens
atctgttccttaaag

SEQ ID NO: 608752 - DNA, 15 bp, Homo sapiens
tctgttccttaaagc

SEQ ID NO: 608753 - DNA, 15 bp, Homo sapiens
ctgttccttaaagcc

SEQ ID NO: 608754 - DNA, 15 bp, Homo sapiens
tgttccttaaagcct

SEQ ID NO: 608755 - DNA, 15 bp, Homo sapiens
gttccttaaagcctg

SEQ ID NO: 608756 - DNA, 15 bp, Homo sapiens
ttccttaaagcctgc

SEQ ID NO: 608757 - DNA, 15 bp, Homo sapiens
tccttaaagcctgca

SEQ ID NO: 608758 - DNA, 15 bp, Homo sapiens
ccttaaagcctgcag

SEQ ID NO: 608759 - DNA, 15 bp, Homo sapiens
cttaaagcctgcagt

SEQ ID NO: 608760 - DNA, 15 bp, Homo sapiens
ttaaagcctgcagta

SEQ ID NO: 608761 - DNA, 15 bp, Homo sapiens
taaagcctgcagtac

SEQ ID NO: 608762 - DNA, 15 bp, Homo sapiens
aaagcctgcagtaca

SEQ ID NO: 608763 - DNA, 15 bp, Homo sapiens
aagcctgcagtacat

SEQ ID NO: 608764 - DNA, 15 bp, Homo sapiens
agcctgcagtacatc

SEQ ID NO: 608765 - DNA, 15 bp, Homo sapiens
gcctgcagtacatca

SEQ ID NO: 608766 - DNA, 15 bp, Homo sapiens
cctgcagtacatcaa

SEQ ID NO: 608767 - DNA, 15 bp, Homo sapiens
ctgcagtacatcaat

SEQ ID NO: 608768 - DNA, 15 bp, Homo sapiens
tgcagtacatcaata

SEQ ID NO: 608769 - DNA, 15 bp, Homo sapiens
gcagtacatcaataa

SEQ ID NO: 608770 - DNA, 15 bp, Homo sapiens
cagtacatcaataac

SEQ ID NO: 608771 - DNA, 15 bp, Homo sapiens
agtacatcaataacc

SEQ ID NO: 608772 - DNA, 15 bp, Homo sapiens
gtacatcaataaccc

SEQ ID NO: 608773 - DNA, 15 bp, Homo sapiens
tacatcaataaccca

SEQ ID NO: 608774 - DNA, 15 bp, Homo sapiens
acatcaataacccag

SEQ ID NO: 608775 - DNA, 15 bp, Homo sapiens
catcaataacccagt

SEQ ID NO: 608776 - DNA, 15 bp, Homo sapiens
atcaataacccagtc

SEQ ID NO: 608777 - DNA, 15 bp, Homo sapiens
tcaataacccagtct

SEQ ID NO: 608778 - DNA, 15 bp, Homo sapiens
caataacccagtctt

SEQ ID NO: 608779 - DNA, 15 bp, Homo sapiens
aataacccagtcttc

SEQ ID NO: 608780 - DNA, 15 bp, Homo sapiens
ataacccagtcttcc

SEQ ID NO: 608781 - DNA, 15 bp, Homo sapiens
taacccagtcttcct

SEQ ID NO: 608782 - DNA, 15 bp, Homo sapiens
aacccagtcttcctg

SEQ ID NO: 608783 - DNA, 15 bp, Homo sapiens
acccagtcttcctgc

SEQ ID NO: 608784 - DNA, 15 bp, Homo sapiens
cccagtcttcctgct

SEQ ID NO: 608785 - DNA, 15 bp, Homo sapiens
ccagtcttcctgctt

SEQ ID NO: 608786 - DNA, 15 bp, Homo sapiens
cagtcttcctgcttg

SEQ ID NO: 608787 - DNA, 15 bp, Homo sapiens
agtcttcctgcttgc

SEQ ID NO: 608788 - DNA, 15 bp, Homo sapiens
gtcttcctgcttgct

SEQ ID NO: 608789 - DNA, 15 bp, Homo sapiens
tcttcctgcttgctt

SEQ ID NO: 608790 - DNA, 15 bp, Homo sapiens
cttcctgcttgcttt

SEQ ID NO: 608791 - DNA, 15 bp, Homo sapiens
ttcctgcttgctttc

SEQ ID NO: 608792 - DNA, 15 bp, Homo sapiens
tcctgcttgctttcc

SEQ ID NO: 608793 - DNA, 15 bp, Homo sapiens
cctgcttgctttccc

SEQ ID NO: 608794 - DNA, 15 bp, Homo sapiens
ctgcttgctttcccc

SEQ ID NO: 608795 - DNA, 15 bp, Homo sapiens
tgcttgctttccccc

SEQ ID NO: 608796 - DNA, 15 bp, Homo sapiens
gcttgctttcccccc

SEQ ID NO: 608797 - DNA, 15 bp, Homo sapiens
cttgctttcccccct

SEQ ID NO: 608798 - DNA, 15 bp, Homo sapiens
ttgctttcccccctc

SEQ ID NO: 608799 - DNA, 15 bp, Homo sapiens
tgctttcccccctct

SEQ ID NO: 608800 - DNA, 15 bp, Homo sapiens
gctttcccccctctc

SEQ ID NO: 608801 - DNA, 15 bp, Homo sapiens
ctttcccccctctcc

SEQ ID NO: 608802 - DNA, 15 bp, Homo sapiens
tttcccccctctcca

SEQ ID NO: 608803 - DNA, 15 bp, Homo sapiens
ttcccccctctccac

SEQ ID NO: 608804 - DNA, 15 bp, Homo sapiens
tcccccctctccact

SEQ ID NO: 608805 - DNA, 15 bp, Homo sapiens
cccccctctccacta

SEQ ID NO: 608806 - DNA, 15 bp, Homo sapiens
ccccctctccactac

SEQ ID NO: 608807 - DNA, 15 bp, Homo sapiens
cccctctccactacc

SEQ ID NO: 608808 - DNA, 15 bp, Homo sapiens
ccctctccactacca

SEQ ID NO: 608809 - DNA, 15 bp, Homo sapiens
cctctccactaccag

SEQ ID NO: 608810 - DNA, 15 bp, Homo sapiens
ctctccactaccagt

SEQ ID NO: 608811 - DNA, 15 bp, Homo sapiens
tctccactaccagtg

SEQ ID NO: 608812 - DNA, 15 bp, Homo sapiens
ctccactaccagtga

SEQ ID NO: 608813 - DNA, 15 bp, Homo sapiens
tccactaccagtgat

SEQ ID NO: 608814 - DNA, 15 bp, Homo sapiens
ccactaccagtgatc

SEQ ID NO: 608815 - DNA, 15 bp, Homo sapiens
cactaccagtgatca

SEQ ID NO: 608816 - DNA, 15 bp, Homo sapiens
actaccagtgatcat

SEQ ID NO: 608817 - DNA, 15 bp, Homo sapiens
ctaccagtgatcata

SEQ ID NO: 608818 - DNA, 15 bp, Homo sapiens
taccagtgatcatag

SEQ ID NO: 608819 - DNA, 15 bp, Homo sapiens
accagtgatcatagt

SEQ ID NO: 608820 - DNA, 15 bp, Homo sapiens
ccagtgatcatagtc

SEQ ID NO: 608821 - DNA, 15 bp, Homo sapiens
cagtgatcatagtct

SEQ ID NO: 608822 - DNA, 15 bp, Homo sapiens
agtgatcatagtctg

SEQ ID NO: 608823 - DNA, 15 bp, Homo sapiens
gtgatcatagtctga

SEQ ID NO: 608824 - DNA, 15 bp, Homo sapiens
tgatcatagtctgat

SEQ ID NO: 608825 - DNA, 15 bp, Homo sapiens
gatcatagtctgatc

SEQ ID NO: 608826 - DNA, 15 bp, Homo sapiens
atcatagtctgatcc

SEQ ID NO: 608827 - DNA, 15 bp, Homo sapiens
tcatagtctgatccc

SEQ ID NO: 608828 - DNA, 15 bp, Homo sapiens
catagtctgatccca

SEQ ID NO: 608829 - DNA, 15 bp, Homo sapiens
atagtctgatcccat

SEQ ID NO: 608830 - DNA, 15 bp, Homo sapiens
tagtctgatcccata

SEQ ID NO: 608831 - DNA, 15 bp, Homo sapiens
agtctgatcccatag

SEQ ID NO: 608832 - DNA, 15 bp, Homo sapiens
gtctgatcccatagg

SEQ ID NO: 608833 - DNA, 15 bp, Homo sapiens
tctgatcccataggt

SEQ ID NO: 608834 - DNA, 15 bp, Homo sapiens
ctgatcccataggtg

SEQ ID NO: 608835 - DNA, 15 bp, Homo sapiens
tgatcccataggtga

SEQ ID NO: 608836 - DNA, 15 bp, Homo sapiens
gatcccataggtgat

SEQ ID NO: 608837 - DNA, 15 bp, Homo sapiens
atcccataggtgata

SEQ ID NO: 608838 - DNA, 15 bp, Homo sapiens
tcccataggtgatat

SEQ ID NO: 608839 - DNA, 15 bp, Homo sapiens
cccataggtgatatc

SEQ ID NO: 608840 - DNA, 15 bp, Homo sapiens
ccataggtgatatcc

SEQ ID NO: 608841 - DNA, 15 bp, Homo sapiens
cataggtgatatccc

SEQ ID NO: 608842 - DNA, 15 bp, Homo sapiens
ataggtgatatccca

SEQ ID NO: 608843 - DNA, 15 bp, Homo sapiens
taggtgatatcccag

SEQ ID NO: 608844 - DNA, 15 bp, Homo sapiens
aggtgatatcccagc

SEQ ID NO: 608845 - DNA, 15 bp, Homo sapiens
ggtgatatcccagct

SEQ ID NO: 608846 - DNA, 15 bp, Homo sapiens
gtgatatcccagctc

SEQ ID NO: 608847 - DNA, 15 bp, Homo sapiens
tgatatcccagctca

SEQ ID NO: 608848 - DNA, 15 bp, Homo sapiens
gatatcccagctcaa

SEQ ID NO: 608849 - DNA, 15 bp, Homo sapiens
atatcccagctcaaa

SEQ ID NO: 608850 - DNA, 15 bp, Homo sapiens
tatcccagctcaaaa

SEQ ID NO: 608851 - DNA, 15 bp, Homo sapiens
atcccagctcaaaac

SEQ ID NO: 608852 - DNA, 15 bp, Homo sapiens
tcccagctcaaaacc

SEQ ID NO: 608853 - DNA, 15 bp, Homo sapiens
cccagctcaaaaccc

SEQ ID NO: 608854 - DNA, 15 bp, Homo sapiens
ccagctcaaaaccct

SEQ ID NO: 608855 - DNA, 15 bp, Homo sapiens
cagctcaaaacccta

SEQ ID NO: 608856 - DNA, 15 bp, Homo sapiens
agctcaaaaccctac

SEQ ID NO: 608857 - DNA, 15 bp, Homo sapiens
gctcaaaaccctaca

SEQ ID NO: 608858 - DNA, 15 bp, Homo sapiens
ctcaaaaccctacat

SEQ ID NO: 608859 - DNA, 15 bp, Homo sapiens
tcaaaaccctacatt

SEQ ID NO: 608860 - DNA, 15 bp, Homo sapiens
caaaaccctacatta

SEQ ID NO: 608861 - DNA, 15 bp, Homo sapiens
aaaaccctacattag

SEQ ID NO: 608862 - DNA, 15 bp, Homo sapiens
aaaccctacattagc

SEQ ID NO: 608863 - DNA, 15 bp, Homo sapiens
aaccctacattagct

SEQ ID NO: 608864 - DNA, 15 bp, Homo sapiens
accctacattagctt

SEQ ID NO: 608865 - DNA, 15 bp, Homo sapiens
ccctacattagcttc

SEQ ID NO: 608866 - DNA, 15 bp, Homo sapiens
cctacattagcttct

SEQ ID NO: 608867 - DNA, 15 bp, Homo sapiens
ctacattagcttctg

SEQ ID NO: 608868 - DNA, 15 bp, Homo sapiens
tacattagcttctgt

SEQ ID NO: 608869 - DNA, 15 bp, Homo sapiens
acattagcttctgtg

SEQ ID NO: 608870 - DNA, 15 bp, Homo sapiens
cattagcttctgtgg

SEQ ID NO: 608871 - DNA, 15 bp, Homo sapiens
attagcttctgtggc

SEQ ID NO: 608872 - DNA, 15 bp, Homo sapiens
ttagcttctgtggct

SEQ ID NO: 608873 - DNA, 15 bp, Homo sapiens
tagcttctgtggctg

SEQ ID NO: 608874 - DNA, 15 bp, Homo sapiens
agcttctgtggctgt

SEQ ID NO: 608875 - DNA, 15 bp, Homo sapiens
gcttctgtggctgtt

SEQ ID NO: 608876 - DNA, 15 bp, Homo sapiens
cttctgtggctgttt

SEQ ID NO: 608877 - DNA, 15 bp, Homo sapiens
ttctgtggctgttta

SEQ ID NO: 608878 - DNA, 15 bp, Homo sapiens
tctgtggctgtttaa

SEQ ID NO: 608879 - DNA, 15 bp, Homo sapiens
ctgtggctgtttaag

SEQ ID NO: 608880 - DNA, 15 bp, Homo sapiens
tgtggctgtttaagg

SEQ ID NO: 608881 - DNA, 15 bp, Homo sapiens
gtggctgtttaaggc

SEQ ID NO: 608882 - DNA, 15 bp, Homo sapiens
tggctgtttaaggcc

SEQ ID NO: 608883 - DNA, 15 bp, Homo sapiens
ggctgtttaaggcct

SEQ ID NO: 608884 - DNA, 15 bp, Homo sapiens
gctgtttaaggcctg

SEQ ID NO: 608885 - DNA, 15 bp, Homo sapiens
ctgtttaaggcctgc

SEQ ID NO: 608886 - DNA, 15 bp, Homo sapiens
tgtttaaggcctgcc

SEQ ID NO: 608887 - DNA, 15 bp, Homo sapiens
gtttaaggcctgccc

SEQ ID NO: 608888 - DNA, 15 bp, Homo sapiens
tttaaggcctgccca

SEQ ID NO: 608889 - DNA, 15 bp, Homo sapiens
ttaaggcctgcccag

SEQ ID NO: 608890 - DNA, 15 bp, Homo sapiens
taaggcctgcccaga

SEQ ID NO: 608891 - DNA, 15 bp, Homo sapiens
aaggcctgcccagaa

SEQ ID NO: 608892 - DNA, 15 bp, Homo sapiens
aggcctgcccagaac

SEQ ID NO: 608893 - DNA, 15 bp, Homo sapiens
ggcctgcccagaact

SEQ ID NO: 608894 - DNA, 15 bp, Homo sapiens
gcctgcccagaactc

SEQ ID NO: 608895 - DNA, 15 bp, Homo sapiens
cctgcccagaactcc

SEQ ID NO: 608896 - DNA, 15 bp, Homo sapiens
ctgcccagaactccc

SEQ ID NO: 608897 - DNA, 15 bp, Homo sapiens
tgcccagaactcccc

SEQ ID NO: 608898 - DNA, 15 bp, Homo sapiens
gcccagaactcccct

SEQ ID NO: 608899 - DNA, 15 bp, Homo sapiens
cccagaactcccctg

SEQ ID NO: 608900 - DNA, 15 bp, Homo sapiens
ccagaactcccctgg

SEQ ID NO: 608901 - DNA, 15 bp, Homo sapiens
cagaactcccctggt

SEQ ID NO: 608902 - DNA, 15 bp, Homo sapiens
agaactcccctggtc

SEQ ID NO: 608903 - DNA, 15 bp, Homo sapiens
gaactcccctggtct

SEQ ID NO: 608904 - DNA, 15 bp, Homo sapiens
aactcccctggtctt

SEQ ID NO: 608905 - DNA, 15 bp, Homo sapiens
actcccctggtctta

SEQ ID NO: 608906 - DNA, 15 bp, Homo sapiens
ctcccctggtcttag

SEQ ID NO: 608907 - DNA, 15 bp, Homo sapiens
tcccctggtcttagc

SEQ ID NO: 608908 - DNA, 15 bp, Homo sapiens
cccctggtcttagca

SEQ ID NO: 608909 - DNA, 15 bp, Homo sapiens
ccctggtcttagcac

SEQ ID NO: 608910 - DNA, 15 bp, Homo sapiens
cctggtcttagcact

SEQ ID NO: 608911 - DNA, 15 bp, Homo sapiens
ctggtcttagcactg

SEQ ID NO: 608912 - DNA, 15 bp, Homo sapiens
tggtcttagcactga

SEQ ID NO: 608913 - DNA, 15 bp, Homo sapiens
ggtcttagcactgaa

SEQ ID NO: 608914 - DNA, 15 bp, Homo sapiens
gtcttagcactgaaa

SEQ ID NO: 608915 - DNA, 15 bp, Homo sapiens
tcttagcactgaaag

SEQ ID NO: 608916 - DNA, 15 bp, Homo sapiens
cttagcactgaaagc

SEQ ID NO: 608917 - DNA, 15 bp, Homo sapiens
ttagcactgaaagca

SEQ ID NO: 608918 - DNA, 15 bp, Homo sapiens
tagcactgaaagcac

SEQ ID NO: 608919 - DNA, 15 bp, Homo sapiens
agcactgaaagcacg

SEQ ID NO: 608920 - DNA, 15 bp, Homo sapiens
gcactgaaagcacgt

SEQ ID NO: 608921 - DNA, 15 bp, Homo sapiens
cactgaaagcacgtg

SEQ ID NO: 608922 - DNA, 15 bp, Homo sapiens
actgaaagcacgtgt

SEQ ID NO: 608923 - DNA, 15 bp, Homo sapiens
ctgaaagcacgtgtc

SEQ ID NO: 608924 - DNA, 15 bp, Homo sapiens
tgaaagcacgtgtcc

SEQ ID NO: 608925 - DNA, 15 bp, Homo sapiens
gaaagcacgtgtccg

SEQ ID NO: 608926 - DNA, 15 bp, Homo sapiens
aaagcacgtgtccgg

SEQ ID NO: 608927 - DNA, 15 bp, Homo sapiens
aagcacgtgtccggg

SEQ ID NO: 608928 - DNA, 15 bp, Homo sapiens
agcacgtgtccgggg

SEQ ID NO: 608929 - DNA, 15 bp, Homo sapiens
gcacgtgtccgggga

SEQ ID NO: 608930 - DNA, 15 bp, Homo sapiens
cacgtgtccggggaa

SEQ ID NO: 608931 - DNA, 15 bp, Homo sapiens
acgtgtccggggaag

SEQ ID NO: 608932 - DNA, 15 bp, Homo sapiens
cgtgtccggggaagc

SEQ ID NO: 608933 - DNA, 15 bp, Homo sapiens
gtgtccggggaagcc

SEQ ID NO: 608934 - DNA, 15 bp, Homo sapiens
tgtccggggaagccc

SEQ ID NO: 608935 - DNA, 15 bp, Homo sapiens
gtccggggaagccct

SEQ ID NO: 608936 - DNA, 15 bp, Homo sapiens
tccggggaagccctg

SEQ ID NO: 608937 - DNA, 15 bp, Homo sapiens
ccggggaagccctgc

SEQ ID NO: 608938 - DNA, 15 bp, Homo sapiens
cggggaagccctgca

SEQ ID NO: 608939 - DNA, 15 bp, Homo sapiens
ggggaagccctgcat

SEQ ID NO: 608940 - DNA, 15 bp, Homo sapiens
gggaagccctgcatt

SEQ ID NO: 608941 - DNA, 15 bp, Homo sapiens
ggaagccctgcattg

SEQ ID NO: 608942 - DNA, 15 bp, Homo sapiens
gaagccctgcattgg

SEQ ID NO: 608943 - DNA, 15 bp, Homo sapiens
aagccctgcattggt

SEQ ID NO: 608944 - DNA, 15 bp, Homo sapiens
agccctgcattggtc

SEQ ID NO: 608945 - DNA, 15 bp, Homo sapiens
gccctgcattggtcg

SEQ ID NO: 608946 - DNA, 15 bp, Homo sapiens
ccctgcattggtcgt

SEQ ID NO: 608947 - DNA, 15 bp, Homo sapiens
cctgcattggtcgtt

SEQ ID NO: 608948 - DNA, 15 bp, Homo sapiens
ctgcattggtcgttc

SEQ ID NO: 608949 - DNA, 15 bp, Homo sapiens
tgcattggtcgttca

SEQ ID NO: 608950 - DNA, 15 bp, Homo sapiens
gcattggtcgttcat

SEQ ID NO: 608951 - DNA, 15 bp, Homo sapiens
cattggtcgttcata

SEQ ID NO: 608952 - DNA, 15 bp, Homo sapiens
attggtcgttcatac

SEQ ID NO: 608953 - DNA, 15 bp, Homo sapiens
ttggtcgttcatact

SEQ ID NO: 608954 - DNA, 15 bp, Homo sapiens
tggtcgttcatacta

SEQ ID NO: 608955 - DNA, 15 bp, Homo sapiens
ggtcgttcatactac

SEQ ID NO: 608956 - DNA, 15 bp, Homo sapiens
gtcgttcatactact

SEQ ID NO: 608957 - DNA, 15 bp, Homo sapiens
tcgttcatactactg

SEQ ID NO: 608958 - DNA, 15 bp, Homo sapiens
cgttcatactactga

SEQ ID NO: 608959 - DNA, 15 bp, Homo sapiens
gttcatactactgag

SEQ ID NO: 608960 - DNA, 15 bp, Homo sapiens
ttcatactactgagt

SEQ ID NO: 608961 - DNA, 15 bp, Homo sapiens
tcatactactgagtc

SEQ ID NO: 608962 - DNA, 15 bp, Homo sapiens
catactactgagtcc

SEQ ID NO: 608963 - DNA, 15 bp, Homo sapiens
atactactgagtccc

SEQ ID NO: 608964 - DNA, 15 bp, Homo sapiens
tactactgagtcccg

SEQ ID NO: 608965 - DNA, 15 bp, Homo sapiens
actactgagtcccgc

SEQ ID NO: 608966 - DNA, 15 bp, Homo sapiens
ctactgagtcccgca

SEQ ID NO: 608967 - DNA, 15 bp, Homo sapiens
tactgagtcccgcag

SEQ ID NO: 608968 - DNA, 15 bp, Homo sapiens
actgagtcccgcagg

SEQ ID NO: 608969 - DNA, 15 bp, Homo sapiens
ctgagtcccgcaggg

SEQ ID NO: 608970 - DNA, 15 bp, Homo sapiens
tgagtcccgcagggc

SEQ ID NO: 608971 - DNA, 15 bp, Homo sapiens
gagtcccgcagggca

SEQ ID NO: 608972 - DNA, 15 bp, Homo sapiens
agtcccgcagggcaa

SEQ ID NO: 608973 - DNA, 15 bp, Homo sapiens
gtcccgcagggcaaa

SEQ ID NO: 608974 - DNA, 15 bp, Homo sapiens
tcccgcagggcaaac

SEQ ID NO: 608975 - DNA, 15 bp, Homo sapiens
cccgcagggcaaacc

SEQ ID NO: 608976 - DNA, 15 bp, Homo sapiens
ccgcagggcaaaccg

SEQ ID NO: 608977 - DNA, 15 bp, Homo sapiens
cgcagggcaaaccgt

SEQ ID NO: 608978 - DNA, 15 bp, Homo sapiens
gcagggcaaaccgtc

SEQ ID NO: 608979 - DNA, 15 bp, Homo sapiens
cagggcaaaccgtcc

SEQ ID NO: 608980 - DNA, 15 bp, Homo sapiens
agggcaaaccgtccg

SEQ ID NO: 608981 - DNA, 15 bp, Homo sapiens
gggcaaaccgtccgg

SEQ ID NO: 608982 - DNA, 15 bp, Homo sapiens
ggcaaaccgtccggt

SEQ ID NO: 608983 - DNA, 15 bp, Homo sapiens
gcaaaccgtccggtc

SEQ ID NO: 608984 - DNA, 15 bp, Homo sapiens
caaaccgtccggtcc

SEQ ID NO: 608985 - DNA, 15 bp, Homo sapiens
aaaccgtccggtccc

SEQ ID NO: 608986 - DNA, 15 bp, Homo sapiens
aaccgtccggtccca

SEQ ID NO: 608987 - DNA, 15 bp, Homo sapiens
accgtccggtcccac

SEQ ID NO: 608988 - DNA, 15 bp, Homo sapiens
ccgtccggtcccacc

SEQ ID NO: 608989 - DNA, 15 bp, Homo sapiens
cgtccggtcccaccc

SEQ ID NO: 608990 - DNA, 15 bp, Homo sapiens
gtccggtcccaccct

SEQ ID NO: 608991 - DNA, 15 bp, Homo sapiens
tccggtcccaccctc

SEQ ID NO: 608992 - DNA, 15 bp, Homo sapiens
ccggtcccaccctcc

SEQ ID NO: 608993 - DNA, 15 bp, Homo sapiens
cggtcccaccctcct

SEQ ID NO: 608994 - DNA, 15 bp, Homo sapiens
ggtcccaccctcctt

SEQ ID NO: 608995 - DNA, 15 bp, Homo sapiens
gtcccaccctccttt

SEQ ID NO: 608996 - DNA, 15 bp, Homo sapiens
tcccaccctcctttc

SEQ ID NO: 608997 - DNA, 15 bp, Homo sapiens
cccaccctcctttct

SEQ ID NO: 608998 - DNA, 15 bp, Homo sapiens
ccaccctcctttcta

SEQ ID NO: 608999 - DNA, 15 bp, Homo sapiens
caccctcctttctag

SEQ ID NO: 609000 - DNA, 15 bp, Homo sapiens
accctcctttctagt

SEQ ID NO: 609001 - DNA, 15 bp, Homo sapiens
ccctcctttctagtg

SEQ ID NO: 609002 - DNA, 15 bp, Homo sapiens
cctcctttctagtgc

SEQ ID NO: 609003 - DNA, 15 bp, Homo sapiens
ctcctttctagtgct

SEQ ID NO: 609004 - DNA, 15 bp, Homo sapiens
tcctttctagtgctg

SEQ ID NO: 609005 - DNA, 15 bp, Homo sapiens
cctttctagtgctgc

SEQ ID NO: 609006 - DNA, 15 bp, Homo sapiens
ctttctagtgctgct

SEQ ID NO: 609007 - DNA, 15 bp, Homo sapiens
tttctagtgctgctg

SEQ ID NO: 609008 - DNA, 15 bp, Homo sapiens
ttctagtgctgctgt

SEQ ID NO: 609009 - DNA, 15 bp, Homo sapiens
tctagtgctgctgtc

SEQ ID NO: 609010 - DNA, 15 bp, Homo sapiens
ctagtgctgctgtca

SEQ ID NO: 609011 - DNA, 15 bp, Homo sapiens
tagtgctgctgtcac

SEQ ID NO: 609012 - DNA, 15 bp, Homo sapiens
agtgctgctgtcaca

SEQ ID NO: 609013 - DNA, 15 bp, Homo sapiens
gtgctgctgtcacac

SEQ ID NO: 609014 - DNA, 15 bp, Homo sapiens
tgctgctgtcacact

SEQ ID NO: 609015 - DNA, 15 bp, Homo sapiens
gctgctgtcacactc

SEQ ID NO: 609016 - DNA, 15 bp, Homo sapiens
ctgctgtcacactca

SEQ ID NO: 609017 - DNA, 15 bp, Homo sapiens
tgctgtcacactcac

SEQ ID NO: 609018 - DNA, 15 bp, Homo sapiens
gctgtcacactcacc

SEQ ID NO: 609019 - DNA, 15 bp, Homo sapiens
ctgtcacactcacct

SEQ ID NO: 609020 - DNA, 15 bp, Homo sapiens
tgtcacactcacctc

SEQ ID NO: 609021 - DNA, 15 bp, Homo sapiens
gtcacactcacctcc

SEQ ID NO: 609022 - DNA, 15 bp, Homo sapiens
tcacactcacctccc

SEQ ID NO: 609023 - DNA, 15 bp, Homo sapiens
cacactcacctccct

SEQ ID NO: 609024 - DNA, 15 bp, Homo sapiens
acactcacctccctt

SEQ ID NO: 609025 - DNA, 15 bp, Homo sapiens
cactcacctcccttc

SEQ ID NO: 609026 - DNA, 15 bp, Homo sapiens
actcacctcccttca

SEQ ID NO: 609027 - DNA, 15 bp, Homo sapiens
ctcacctcccttcac

SEQ ID NO: 609028 - DNA, 15 bp, Homo sapiens
tcacctcccttcacc

SEQ ID NO: 609029 - DNA, 15 bp, Homo sapiens
cacctcccttcaccc

SEQ ID NO: 609030 - DNA, 15 bp, Homo sapiens
acctcccttcaccct

SEQ ID NO: 609031 - DNA, 15 bp, Homo sapiens
cctcccttcacccta

SEQ ID NO: 609032 - DNA, 15 bp, Homo sapiens
ctcccttcaccctac

SEQ ID NO: 609033 - DNA, 15 bp, Homo sapiens
tcccttcaccctaca

SEQ ID NO: 609034 - DNA, 15 bp, Homo sapiens
cccttcaccctacac

SEQ ID NO: 609035 - DNA, 15 bp, Homo sapiens
ccttcaccctacact

SEQ ID NO: 609036 - DNA, 15 bp, Homo sapiens
cttcaccctacactc

SEQ ID NO: 609037 - DNA, 15 bp, Homo sapiens
ttcaccctacactcc

SEQ ID NO: 609038 - DNA, 15 bp, Homo sapiens
tcaccctacactccc

SEQ ID NO: 609039 - DNA, 15 bp, Homo sapiens
caccctacactccct

SEQ ID NO: 609040 - DNA, 15 bp, Homo sapiens
accctacactccctt

SEQ ID NO: 609041 - DNA, 15 bp, Homo sapiens
ccctacactcccttc

SEQ ID NO: 609042 - DNA, 15 bp, Homo sapiens
cctacactcccttct

SEQ ID NO: 609043 - DNA, 15 bp, Homo sapiens
ctacactcccttctg

SEQ ID NO: 609044 - DNA, 15 bp, Homo sapiens
tacactcccttctgt

SEQ ID NO: 609045 - DNA, 15 bp, Homo sapiens
acactcccttctgtg

SEQ ID NO: 609046 - DNA, 15 bp, Homo sapiens
cactcccttctgtgc

SEQ ID NO: 609047 - DNA, 15 bp, Homo sapiens
actcccttctgtgcc

SEQ ID NO: 609048 - DNA, 15 bp, Homo sapiens
ctcccttctgtgcct

SEQ ID NO: 609049 - DNA, 15 bp, Homo sapiens
tcccttctgtgcctt

SEQ ID NO: 609050 - DNA, 15 bp, Homo sapiens
cccttctgtgccttg

SEQ ID NO: 609051 - DNA, 15 bp, Homo sapiens
ccttctgtgccttgc

SEQ ID NO: 609052 - DNA, 15 bp, Homo sapiens
cttctgtgccttgca

SEQ ID NO: 609053 - DNA, 15 bp, Homo sapiens
ttctgtgccttgcaa

SEQ ID NO: 609054 - DNA, 15 bp, Homo sapiens
tctgtgccttgcaat

SEQ ID NO: 609055 - DNA, 15 bp, Homo sapiens
ctgtgccttgcaatt

SEQ ID NO: 609056 - DNA, 15 bp, Homo sapiens
tgtgccttgcaatta

SEQ ID NO: 609057 - DNA, 15 bp, Homo sapiens
gtgccttgcaattac

SEQ ID NO: 609058 - DNA, 15 bp, Homo sapiens
tgccttgcaattacc

SEQ ID NO: 609059 - DNA, 15 bp, Homo sapiens
gccttgcaattacct

SEQ ID NO: 609060 - DNA, 15 bp, Homo sapiens
ccttgcaattaccta

SEQ ID NO: 609061 - DNA, 15 bp, Homo sapiens
cttgcaattacctag

SEQ ID NO: 609062 - DNA, 15 bp, Homo sapiens
ttgcaattacctagg

SEQ ID NO: 609063 - DNA, 15 bp, Homo sapiens
tgcaattacctaggg

SEQ ID NO: 609064 - DNA, 15 bp, Homo sapiens
gcaattacctaggga

SEQ ID NO: 609065 - DNA, 15 bp, Homo sapiens
caattacctagggag

SEQ ID NO: 609066 - DNA, 15 bp, Homo sapiens
aattacctagggagt

SEQ ID NO: 609067 - DNA, 15 bp, Homo sapiens
attacctagggagtt

SEQ ID NO: 609068 - DNA, 15 bp, Homo sapiens
ttacctagggagttt

SEQ ID NO: 609069 - DNA, 15 bp, Homo sapiens
tacctagggagtttt

SEQ ID NO: 609070 - DNA, 15 bp, Homo sapiens
acctagggagttttt

SEQ ID NO: 609071 - DNA, 15 bp, Homo sapiens
cctagggagtttttt

SEQ ID NO: 609072 - DNA, 15 bp, Homo sapiens
ctagggagtttttta

SEQ ID NO: 609073 - DNA, 15 bp, Homo sapiens
tagggagttttttac

SEQ ID NO: 609074 - DNA, 15 bp, Homo sapiens
agggagttttttaca

SEQ ID NO: 609075 - DNA, 15 bp, Homo sapiens
gggagttttttacaa

SEQ ID NO: 609076 - DNA, 15 bp, Homo sapiens
ggagttttttacaag

SEQ ID NO: 609077 - DNA, 15 bp, Homo sapiens
gagttttttacaaga

SEQ ID NO: 609078 - DNA, 15 bp, Homo sapiens
agttttttacaagat

SEQ ID NO: 609079 - DNA, 15 bp, Homo sapiens
gttttttacaagata

SEQ ID NO: 609080 - DNA, 15 bp, Homo sapiens
ttttttacaagatat

SEQ ID NO: 609081 - DNA, 15 bp, Homo sapiens
tttttacaagatatg

SEQ ID NO: 609082 - DNA, 15 bp, Homo sapiens
ttttacaagatatgg

SEQ ID NO: 609083 - DNA, 15 bp, Homo sapiens
tttacaagatatgga

SEQ ID NO: 609084 - DNA, 15 bp, Homo sapiens
ttacaagatatggat

SEQ ID NO: 609085 - DNA, 15 bp, Homo sapiens
tacaagatatggatg

SEQ ID NO: 609086 - DNA, 15 bp, Homo sapiens
acaagatatggatgc

SEQ ID NO: 609087 - DNA, 15 bp, Homo sapiens
caagatatggatgcc

SEQ ID NO: 609088 - DNA, 15 bp, Homo sapiens
aagatatggatgccc

SEQ ID NO: 609089 - DNA, 15 bp, Homo sapiens
agatatggatgccct

SEQ ID NO: 609090 - DNA, 15 bp, Homo sapiens
gatatggatgccctg

SEQ ID NO: 609091 - DNA, 15 bp, Homo sapiens
atatggatgccctgg

SEQ ID NO: 609092 - DNA, 15 bp, Homo sapiens
tatggatgccctggc

SEQ ID NO: 609093 - DNA, 15 bp, Homo sapiens
atggatgccctggcc

SEQ ID NO: 609094 - DNA, 15 bp, Homo sapiens
tggatgccctggccc

SEQ ID NO: 609095 - DNA, 15 bp, Homo sapiens
ggatgccctggccct

SEQ ID NO: 609096 - DNA, 15 bp, Homo sapiens
gatgccctggccctg

SEQ ID NO: 609097 - DNA, 15 bp, Homo sapiens
atgccctggccctgc

SEQ ID NO: 609098 - DNA, 15 bp, Homo sapiens
tgccctggccctgcc

SEQ ID NO: 609099 - DNA, 15 bp, Homo sapiens
gccctggccctgcca

SEQ ID NO: 609100 - DNA, 15 bp, Homo sapiens
ccctggccctgccac

SEQ ID NO: 609101 - DNA, 15 bp, Homo sapiens
cctggccctgccact

SEQ ID NO: 609102 - DNA, 15 bp, Homo sapiens
ctggccctgccacta

SEQ ID NO: 609103 - DNA, 15 bp, Homo sapiens
tggccctgccactag

SEQ ID NO: 609104 - DNA, 15 bp, Homo sapiens
ggccctgccactaga

SEQ ID NO: 609105 - DNA, 15 bp, Homo sapiens
gccctgccactagag

SEQ ID NO: 609106 - DNA, 15 bp, Homo sapiens
ccctgccactagaga

SEQ ID NO: 609107 - DNA, 15 bp, Homo sapiens
cctgccactagagat

SEQ ID NO: 609108 - DNA, 15 bp, Homo sapiens
ctgccactagagatt

SEQ ID NO: 609109 - DNA, 15 bp, Homo sapiens
tgccactagagattc

SEQ ID NO: 609110 - DNA, 15 bp, Homo sapiens
gccactagagattct

SEQ ID NO: 609111 - DNA, 15 bp, Homo sapiens
ccactagagattctg

SEQ ID NO: 609112 - DNA, 15 bp, Homo sapiens
cactagagattctga

SEQ ID NO: 609113 - DNA, 15 bp, Homo sapiens
actagagattctgat

SEQ ID NO: 609114 - DNA, 15 bp, Homo sapiens
ctagagattctgatt

SEQ ID NO: 609115 - DNA, 15 bp, Homo sapiens
tagagattctgattt

SEQ ID NO: 609116 - DNA, 15 bp, Homo sapiens
agagattctgattta

SEQ ID NO: 609117 - DNA, 15 bp, Homo sapiens
gagattctgatttaa

SEQ ID NO: 609118 - DNA, 15 bp, Homo sapiens
agattctgatttaat

SEQ ID NO: 609119 - DNA, 15 bp, Homo sapiens
gattctgatttaatt

SEQ ID NO: 609120 - DNA, 15 bp, Homo sapiens
attctgatttaattg

SEQ ID NO: 609121 - DNA, 15 bp, Homo sapiens
ttctgatttaattgc

SEQ ID NO: 609122 - DNA, 15 bp, Homo sapiens
tctgatttaattgct

SEQ ID NO: 609123 - DNA, 15 bp, Homo sapiens
ctgatttaattgctt

SEQ ID NO: 609124 - DNA, 15 bp, Homo sapiens
tgatttaattgcttg

SEQ ID NO: 609125 - DNA, 15 bp, Homo sapiens
gatttaattgcttgg

SEQ ID NO: 609126 - DNA, 15 bp, Homo sapiens
atttaattgcttggg

SEQ ID NO: 609127 - DNA, 15 bp, Homo sapiens
tttaattgcttgggg

SEQ ID NO: 609128 - DNA, 15 bp, Homo sapiens
ttaattgcttggggt

SEQ ID NO: 609129 - DNA, 15 bp, Homo sapiens
taattgcttggggta

SEQ ID NO: 609130 - DNA, 15 bp, Homo sapiens
aattgcttggggtag

SEQ ID NO: 609131 - DNA, 15 bp, Homo sapiens
attgcttggggtagg

SEQ ID NO: 609132 - DNA, 15 bp, Homo sapiens
ttgcttggggtaggg

SEQ ID NO: 609133 - DNA, 15 bp, Homo sapiens
tgcttggggtagggc

SEQ ID NO: 609134 - DNA, 15 bp, Homo sapiens
gcttggggtagggcc

SEQ ID NO: 609135 - DNA, 15 bp, Homo sapiens
cttggggtagggcct

SEQ ID NO: 609136 - DNA, 15 bp, Homo sapiens
ttggggtagggcctg

SEQ ID NO: 609137 - DNA, 15 bp, Homo sapiens
tggggtagggcctgg

SEQ ID NO: 609138 - DNA, 15 bp, Homo sapiens
ggggtagggcctggc

SEQ ID NO: 609139 - DNA, 15 bp, Homo sapiens
gggtagggcctggca

SEQ ID NO: 609140 - DNA, 15 bp, Homo sapiens
ggtagggcctggcat

SEQ ID NO: 609141 - DNA, 15 bp, Homo sapiens
gtagggcctggcata

SEQ ID NO: 609142 - DNA, 15 bp, Homo sapiens
tagggcctggcatag

SEQ ID NO: 609143 - DNA, 15 bp, Homo sapiens
agggcctggcatagg

SEQ ID NO: 609144 - DNA, 15 bp, Homo sapiens
gggcctggcataggt

SEQ ID NO: 609145 - DNA, 15 bp, Homo sapiens
ggcctggcataggta

SEQ ID NO: 609146 - DNA, 15 bp, Homo sapiens
gcctggcataggtat

SEQ ID NO: 609147 - DNA, 15 bp, Homo sapiens
cctggcataggtatc

SEQ ID NO: 609148 - DNA, 15 bp, Homo sapiens
ctggcataggtatct

SEQ ID NO: 609149 - DNA, 15 bp, Homo sapiens
tggcataggtatctt

SEQ ID NO: 609150 - DNA, 15 bp, Homo sapiens
ggcataggtatcttt

SEQ ID NO: 609151 - DNA, 15 bp, Homo sapiens
gcataggtatctttt

SEQ ID NO: 609152 - DNA, 15 bp, Homo sapiens
cataggtatctttta

SEQ ID NO: 609153 - DNA, 15 bp, Homo sapiens
ataggtatcttttaa

SEQ ID NO: 609154 - DNA, 15 bp, Homo sapiens
taggtatcttttaaa

SEQ ID NO: 609155 - DNA, 15 bp, Homo sapiens
aggtatcttttaaag

SEQ ID NO: 609156 - DNA, 15 bp, Homo sapiens
ggtatcttttaaagc

SEQ ID NO: 609157 - DNA, 15 bp, Homo sapiens
gtatcttttaaagct

SEQ ID NO: 609158 - DNA, 15 bp, Homo sapiens
tatcttttaaagctc

SEQ ID NO: 609159 - DNA, 15 bp, Homo sapiens
atcttttaaagctcc

SEQ ID NO: 609160 - DNA, 15 bp, Homo sapiens
tcttttaaagctccg

SEQ ID NO: 609161 - DNA, 15 bp, Homo sapiens
cttttaaagctccgc

SEQ ID NO: 609162 - DNA, 15 bp, Homo sapiens
ttttaaagctccgca

SEQ ID NO: 609163 - DNA, 15 bp, Homo sapiens
tttaaagctccgcag

SEQ ID NO: 609164 - DNA, 15 bp, Homo sapiens
ttaaagctccgcagt

SEQ ID NO: 609165 - DNA, 15 bp, Homo sapiens
taaagctccgcagtg

SEQ ID NO: 609166 - DNA, 15 bp, Homo sapiens
aaagctccgcagtgg

SEQ ID NO: 609167 - DNA, 15 bp, Homo sapiens
aagctccgcagtggt

SEQ ID NO: 609168 - DNA, 15 bp, Homo sapiens
agctccgcagtggtt

SEQ ID NO: 609169 - DNA, 15 bp, Homo sapiens
gctccgcagtggttc

SEQ ID NO: 609170 - DNA, 15 bp, Homo sapiens
ctccgcagtggttct

SEQ ID NO: 609171 - DNA, 15 bp, Homo sapiens
tccgcagtggttcta

SEQ ID NO: 609172 - DNA, 15 bp, Homo sapiens
ccgcagtggttctaa

SEQ ID NO: 609173 - DNA, 15 bp, Homo sapiens
cgcagtggttctaaa

SEQ ID NO: 609174 - DNA, 15 bp, Homo sapiens
gcagtggttctaaag

SEQ ID NO: 609175 - DNA, 15 bp, Homo sapiens
cagtggttctaaagc

SEQ ID NO: 609176 - DNA, 15 bp, Homo sapiens
agtggttctaaagca

SEQ ID NO: 609177 - DNA, 15 bp, Homo sapiens
gtggttctaaagcac

SEQ ID NO: 609178 - DNA, 15 bp, Homo sapiens
tggttctaaagcaca

SEQ ID NO: 609179 - DNA, 15 bp, Homo sapiens
ggttctaaagcacag

SEQ ID NO: 609180 - DNA, 15 bp, Homo sapiens
gttctaaagcacagc

SEQ ID NO: 609181 - DNA, 15 bp, Homo sapiens
ttctaaagcacagcc

SEQ ID NO: 609182 - DNA, 15 bp, Homo sapiens
tctaaagcacagcca

SEQ ID NO: 609183 - DNA, 15 bp, Homo sapiens
ctaaagcacagccac

SEQ ID NO: 609184 - DNA, 15 bp, Homo sapiens
taaagcacagccaca

SEQ ID NO: 609185 - DNA, 15 bp, Homo sapiens
aaagcacagccacag

SEQ ID NO: 609186 - DNA, 15 bp, Homo sapiens
aagcacagccacaga

SEQ ID NO: 609187 - DNA, 15 bp, Homo sapiens
agcacagccacagat

SEQ ID NO: 609188 - DNA, 15 bp, Homo sapiens
gcacagccacagatg

SEQ ID NO: 609189 - DNA, 15 bp, Homo sapiens
cacagccacagatgg

SEQ ID NO: 609190 - DNA, 15 bp, Homo sapiens
acagccacagatggg

SEQ ID NO: 609191 - DNA, 15 bp, Homo sapiens
cagccacagatggga

SEQ ID NO: 609192 - DNA, 15 bp, Homo sapiens
agccacagatgggaa

SEQ ID NO: 609193 - DNA, 15 bp, Homo sapiens
gccacagatgggaac

SEQ ID NO: 609194 - DNA, 15 bp, Homo sapiens
ccacagatgggaacc

SEQ ID NO: 609195 - DNA, 15 bp, Homo sapiens
cacagatgggaacca

SEQ ID NO: 609196 - DNA, 15 bp, Homo sapiens
acagatgggaaccac

SEQ ID NO: 609197 - DNA, 15 bp, Homo sapiens
cagatgggaaccact

SEQ ID NO: 609198 - DNA, 15 bp, Homo sapiens
agatgggaaccactg

SEQ ID NO: 609199 - DNA, 15 bp, Homo sapiens
gatgggaaccactga

SEQ ID NO: 609200 - DNA, 15 bp, Homo sapiens
atgggaaccactgat

SEQ ID NO: 609201 - DNA, 15 bp, Homo sapiens
tgggaaccactgatc

SEQ ID NO: 609202 - DNA, 15 bp, Homo sapiens
gggaaccactgatct

SEQ ID NO: 609203 - DNA, 15 bp, Homo sapiens
ggaaccactgatcta

SEQ ID NO: 609204 - DNA, 15 bp, Homo sapiens
gaaccactgatctat

SEQ ID NO: 609205 - DNA, 15 bp, Homo sapiens
aaccactgatctatt

SEQ ID NO: 609206 - DNA, 15 bp, Homo sapiens
accactgatctattc

SEQ ID NO: 609207 - DNA, 15 bp, Homo sapiens
ccactgatctattct

SEQ ID NO: 609208 - DNA, 15 bp, Homo sapiens
cactgatctattctt

SEQ ID NO: 609209 - DNA, 15 bp, Homo sapiens
actgatctattcttg

SEQ ID NO: 609210 - DNA, 15 bp, Homo sapiens
ctgatctattcttgt

SEQ ID NO: 609211 - DNA, 15 bp, Homo sapiens
tgatctattcttgta

SEQ ID NO: 609212 - DNA, 15 bp, Homo sapiens
gatctattcttgtag

SEQ ID NO: 609213 - DNA, 15 bp, Homo sapiens
atctattcttgtagg

SEQ ID NO: 609214 - DNA, 15 bp, Homo sapiens
tctattcttgtaggt

SEQ ID NO: 609215 - DNA, 15 bp, Homo sapiens
ctattcttgtaggtc

SEQ ID NO: 609216 - DNA, 15 bp, Homo sapiens
tattcttgtaggtcc

SEQ ID NO: 609217 - DNA, 15 bp, Homo sapiens
attcttgtaggtccc

SEQ ID NO: 609218 - DNA, 15 bp, Homo sapiens
ttcttgtaggtcccc

SEQ ID NO: 609219 - DNA, 15 bp, Homo sapiens
tcttgtaggtcccca

SEQ ID NO: 609220 - DNA, 15 bp, Homo sapiens
cttgtaggtccccag

SEQ ID NO: 609221 - DNA, 15 bp, Homo sapiens
ttgtaggtccccaga

SEQ ID NO: 609222 - DNA, 15 bp, Homo sapiens
tgtaggtccccagat

SEQ ID NO: 609223 - DNA, 15 bp, Homo sapiens
gtaggtccccagata

SEQ ID NO: 609224 - DNA, 15 bp, Homo sapiens
taggtccccagatac

SEQ ID NO: 609225 - DNA, 15 bp, Homo sapiens
aggtccccagatacc

SEQ ID NO: 609226 - DNA, 15 bp, Homo sapiens
ggtccccagatacct

SEQ ID NO: 609227 - DNA, 15 bp, Homo sapiens
gtccccagatacctc

SEQ ID NO: 609228 - DNA, 15 bp, Homo sapiens
tccccagatacctca

SEQ ID NO: 609229 - DNA, 15 bp, Homo sapiens
ccccagatacctcat

SEQ ID NO: 609230 - DNA, 15 bp, Homo sapiens
cccagatacctcatg

SEQ ID NO: 609231 - DNA, 15 bp, Homo sapiens
ccagatacctcatgt

SEQ ID NO: 609232 - DNA, 15 bp, Homo sapiens
cagatacctcatgtg

SEQ ID NO: 609233 - DNA, 15 bp, Homo sapiens
agatacctcatgtgc

SEQ ID NO: 609234 - DNA, 15 bp, Homo sapiens
gatacctcatgtgct

SEQ ID NO: 609235 - DNA, 15 bp, Homo sapiens
atacctcatgtgctg

SEQ ID NO: 609236 - DNA, 15 bp, Homo sapiens
tacctcatgtgctgt

SEQ ID NO: 609237 - DNA, 15 bp, Homo sapiens
acctcatgtgctgtt

SEQ ID NO: 609238 - DNA, 15 bp, Homo sapiens
cctcatgtgctgttc

SEQ ID NO: 609239 - DNA, 15 bp, Homo sapiens
ctcatgtgctgttcc

SEQ ID NO: 609240 - DNA, 15 bp, Homo sapiens
tcatgtgctgttccc

SEQ ID NO: 609241 - DNA, 15 bp, Homo sapiens
catgtgctgttccct

SEQ ID NO: 609242 - DNA, 15 bp, Homo sapiens
atgtgctgttccctg

SEQ ID NO: 609243 - DNA, 15 bp, Homo sapiens
tgtgctgttccctgt

SEQ ID NO: 609244 - DNA, 15 bp, Homo sapiens
gtgctgttccctgtg

SEQ ID NO: 609245 - DNA, 15 bp, Homo sapiens
tgctgttccctgtgc

SEQ ID NO: 609246 - DNA, 15 bp, Homo sapiens
gctgttccctgtgcc

SEQ ID NO: 609247 - DNA, 15 bp, Homo sapiens
ctgttccctgtgcct

SEQ ID NO: 609248 - DNA, 15 bp, Homo sapiens
tgttccctgtgcctg

SEQ ID NO: 609249 - DNA, 15 bp, Homo sapiens
gttccctgtgcctga

SEQ ID NO: 609250 - DNA, 15 bp, Homo sapiens
ttccctgtgcctgag

SEQ ID NO: 609251 - DNA, 15 bp, Homo sapiens
tccctgtgcctgagc

SEQ ID NO: 609252 - DNA, 15 bp, Homo sapiens
ccctgtgcctgagct

SEQ ID NO: 609253 - DNA, 15 bp, Homo sapiens
cctgtgcctgagctg

SEQ ID NO: 609254 - DNA, 15 bp, Homo sapiens
ctgtgcctgagctga

SEQ ID NO: 609255 - DNA, 15 bp, Homo sapiens
tgtgcctgagctgac

SEQ ID NO: 609256 - DNA, 15 bp, Homo sapiens
gtgcctgagctgacc

SEQ ID NO: 609257 - DNA, 15 bp, Homo sapiens
tgcctgagctgacct

SEQ ID NO: 609258 - DNA, 15 bp, Homo sapiens
gcctgagctgacctt

SEQ ID NO: 609259 - DNA, 15 bp, Homo sapiens
cctgagctgaccttt

SEQ ID NO: 609260 - DNA, 15 bp, Homo sapiens
ctgagctgacctttc

SEQ ID NO: 609261 - DNA, 15 bp, Homo sapiens
tgagctgacctttcc

SEQ ID NO: 609262 - DNA, 15 bp, Homo sapiens
gagctgacctttccc

SEQ ID NO: 609263 - DNA, 15 bp, Homo sapiens
agctgacctttcccc

SEQ ID NO: 609264 - DNA, 15 bp, Homo sapiens
gctgacctttccccc

SEQ ID NO: 609265 - DNA, 15 bp, Homo sapiens
ctgacctttccccca

SEQ ID NO: 609266 - DNA, 15 bp, Homo sapiens
tgacctttcccccac

SEQ ID NO: 609267 - DNA, 15 bp, Homo sapiens
gacctttcccccact

SEQ ID NO: 609268 - DNA, 15 bp, Homo sapiens
acctttcccccactt

SEQ ID NO: 609269 - DNA, 15 bp, Homo sapiens
cctttcccccacttt

SEQ ID NO: 609270 - DNA, 15 bp, Homo sapiens
ctttcccccactttc

SEQ ID NO: 609271 - DNA, 15 bp, Homo sapiens
tttcccccactttcc

SEQ ID NO: 609272 - DNA, 15 bp, Homo sapiens
ttcccccactttcct

SEQ ID NO: 609273 - DNA, 15 bp, Homo sapiens
tcccccactttcctc

SEQ ID NO: 609274 - DNA, 15 bp, Homo sapiens
cccccactttcctct

SEQ ID NO: 609275 - DNA, 15 bp, Homo sapiens
ccccactttcctctc

SEQ ID NO: 609276 - DNA, 15 bp, Homo sapiens
cccactttcctctcc

SEQ ID NO: 609277 - DNA, 15 bp, Homo sapiens
ccactttcctctcct

SEQ ID NO: 609278 - DNA, 15 bp, Homo sapiens
cactttcctctcctc

SEQ ID NO: 609279 - DNA, 15 bp, Homo sapiens
actttcctctcctcg

SEQ ID NO: 609280 - DNA, 15 bp, Homo sapiens
ctttcctctcctcgg

SEQ ID NO: 609281 - DNA, 15 bp, Homo sapiens
tttcctctcctcggc

SEQ ID NO: 609282 - DNA, 15 bp, Homo sapiens
ttcctctcctcggct

SEQ ID NO: 609283 - DNA, 15 bp, Homo sapiens
tcctctcctcggcta

SEQ ID NO: 609284 - DNA, 15 bp, Homo sapiens
cctctcctcggctaa

SEQ ID NO: 609285 - DNA, 15 bp, Homo sapiens
ctctcctcggctaat

SEQ ID NO: 609286 - DNA, 15 bp, Homo sapiens
tctcctcggctaatt

SEQ ID NO: 609287 - DNA, 15 bp, Homo sapiens
ctcctcggctaattc

SEQ ID NO: 609288 - DNA, 15 bp, Homo sapiens
tcctcggctaattcc

SEQ ID NO: 609289 - DNA, 15 bp, Homo sapiens
cctcggctaattcct

SEQ ID NO: 609290 - DNA, 15 bp, Homo sapiens
ctcggctaattcctg

SEQ ID NO: 609291 - DNA, 15 bp, Homo sapiens
tcggctaattcctgc

SEQ ID NO: 609292 - DNA, 15 bp, Homo sapiens
cggctaattcctgct

SEQ ID NO: 609293 - DNA, 15 bp, Homo sapiens
ggctaattcctgctt

SEQ ID NO: 609294 - DNA, 15 bp, Homo sapiens
gctaattcctgctta

SEQ ID NO: 609295 - DNA, 15 bp, Homo sapiens
ctaattcctgcttat

SEQ ID NO: 609296 - DNA, 15 bp, Homo sapiens
taattcctgcttatc

SEQ ID NO: 609297 - DNA, 15 bp, Homo sapiens
aattcctgcttatcc

SEQ ID NO: 609298 - DNA, 15 bp, Homo sapiens
attcctgcttatcct

SEQ ID NO: 609299 - DNA, 15 bp, Homo sapiens
ttcctgcttatcctc

SEQ ID NO: 609300 - DNA, 15 bp, Homo sapiens
tcctgcttatcctcc

SEQ ID NO: 609301 - DNA, 15 bp, Homo sapiens
cctgcttatcctcct

SEQ ID NO: 609302 - DNA, 15 bp, Homo sapiens
ctgcttatcctccta

SEQ ID NO: 609303 - DNA, 15 bp, Homo sapiens
tgcttatcctcctac

SEQ ID NO: 609304 - DNA, 15 bp, Homo sapiens
gcttatcctcctact

SEQ ID NO: 609305 - DNA, 15 bp, Homo sapiens
cttatcctcctactc

SEQ ID NO: 609306 - DNA, 15 bp, Homo sapiens
ttatcctcctactca

SEQ ID NO: 609307 - DNA, 15 bp, Homo sapiens
tatcctcctactcag

SEQ ID NO: 609308 - DNA, 15 bp, Homo sapiens
atcctcctactcagg

SEQ ID NO: 609309 - DNA, 15 bp, Homo sapiens
tcctcctactcagga

SEQ ID NO: 609310 - DNA, 15 bp, Homo sapiens
cctcctactcaggag

SEQ ID NO: 609311 - DNA, 15 bp, Homo sapiens
ctcctactcaggagg

SEQ ID NO: 609312 - DNA, 15 bp, Homo sapiens
tcctactcaggaggc

SEQ ID NO: 609313 - DNA, 15 bp, Homo sapiens
cctactcaggaggct

SEQ ID NO: 609314 - DNA, 15 bp, Homo sapiens
ctactcaggaggctc

SEQ ID NO: 609315 - DNA, 15 bp, Homo sapiens
tactcaggaggctct

SEQ ID NO: 609316 - DNA, 15 bp, Homo sapiens
actcaggaggctctt

SEQ ID NO: 609317 - DNA, 15 bp, Homo sapiens
ctcaggaggctcttc

SEQ ID NO: 609318 - DNA, 15 bp, Homo sapiens
tcaggaggctcttcc

SEQ ID NO: 609319 - DNA, 15 bp, Homo sapiens
caggaggctcttcct

SEQ ID NO: 609320 - DNA, 15 bp, Homo sapiens
aggaggctcttcctc

SEQ ID NO: 609321 - DNA, 15 bp, Homo sapiens
ggaggctcttcctcc

SEQ ID NO: 609322 - DNA, 15 bp, Homo sapiens
gaggctcttcctcca

SEQ ID NO: 609323 - DNA, 15 bp, Homo sapiens
aggctcttcctccag

SEQ ID NO: 609324 - DNA, 15 bp, Homo sapiens
ggctcttcctccagg

SEQ ID NO: 609325 - DNA, 15 bp, Homo sapiens
gctcttcctccaggc

SEQ ID NO: 609326 - DNA, 15 bp, Homo sapiens
ctcttcctccaggca

SEQ ID NO: 609327 - DNA, 15 bp, Homo sapiens
tcttcctccaggcag

SEQ ID NO: 609328 - DNA, 15 bp, Homo sapiens
cttcctccaggcagc

SEQ ID NO: 609329 - DNA, 15 bp, Homo sapiens
ttcctccaggcagcc

SEQ ID NO: 609330 - DNA, 15 bp, Homo sapiens
tcctccaggcagcct

SEQ ID NO: 609331 - DNA, 15 bp, Homo sapiens
cctccaggcagcctt

SEQ ID NO: 609332 - DNA, 15 bp, Homo sapiens
ctccaggcagccttc

SEQ ID NO: 609333 - DNA, 15 bp, Homo sapiens
tccaggcagccttcc

SEQ ID NO: 609334 - DNA, 15 bp, Homo sapiens
ccaggcagccttccc

SEQ ID NO: 609335 - DNA, 15 bp, Homo sapiens
caggcagccttccct

SEQ ID NO: 609336 - DNA, 15 bp, Homo sapiens
aggcagccttccctg

SEQ ID NO: 609337 - DNA, 15 bp, Homo sapiens
ggcagccttccctga

SEQ ID NO: 609338 - DNA, 15 bp, Homo sapiens
gcagccttccctgat

SEQ ID NO: 609339 - DNA, 15 bp, Homo sapiens
cagccttccctgatc

SEQ ID NO: 609340 - DNA, 15 bp, Homo sapiens
agccttccctgatcc

SEQ ID NO: 609341 - DNA, 15 bp, Homo sapiens
gccttccctgatccc

SEQ ID NO: 609342 - DNA, 15 bp, Homo sapiens
ccttccctgatccct

SEQ ID NO: 609343 - DNA, 15 bp, Homo sapiens
cttccctgatccctc

SEQ ID NO: 609344 - DNA, 15 bp, Homo sapiens
ttccctgatccctcc

SEQ ID NO: 609345 - DNA, 15 bp, Homo sapiens
tccctgatccctcca

SEQ ID NO: 609346 - DNA, 15 bp, Homo sapiens
ccctgatccctccag

SEQ ID NO: 609347 - DNA, 15 bp, Homo sapiens
cctgatccctccagg

SEQ ID NO: 609348 - DNA, 15 bp, Homo sapiens
ctgatccctccagga

SEQ ID NO: 609349 - DNA, 15 bp, Homo sapiens
tgatccctccaggaa

SEQ ID NO: 609350 - DNA, 15 bp, Homo sapiens
gatccctccaggaag

SEQ ID NO: 609351 - DNA, 15 bp, Homo sapiens
atccctccaggaaga

SEQ ID NO: 609352 - DNA, 15 bp, Homo sapiens
tccctccaggaagac

SEQ ID NO: 609353 - DNA, 15 bp, Homo sapiens
ccctccaggaagact

SEQ ID NO: 609354 - DNA, 15 bp, Homo sapiens
cctccaggaagactt

SEQ ID NO: 609355 - DNA, 15 bp, Homo sapiens
ctccaggaagactta

SEQ ID NO: 609356 - DNA, 15 bp, Homo sapiens
tccaggaagacttag

SEQ ID NO: 609357 - DNA, 15 bp, Homo sapiens
ccaggaagacttagc

SEQ ID NO: 609358 - DNA, 15 bp, Homo sapiens
caggaagacttagct

SEQ ID NO: 609359 - DNA, 15 bp, Homo sapiens
aggaagacttagctg

SEQ ID NO: 609360 - DNA, 15 bp, Homo sapiens
ggaagacttagctgc

SEQ ID NO: 609361 - DNA, 15 bp, Homo sapiens
gaagacttagctgcg

SEQ ID NO: 609362 - DNA, 15 bp, Homo sapiens
aagacttagctgcgt

SEQ ID NO: 609363 - DNA, 15 bp, Homo sapiens
agacttagctgcgtc

SEQ ID NO: 609364 - DNA, 15 bp, Homo sapiens
gacttagctgcgtcc

SEQ ID NO: 609365 - DNA, 15 bp, Homo sapiens
acttagctgcgtccc

SEQ ID NO: 609366 - DNA, 15 bp, Homo sapiens
cttagctgcgtccct

SEQ ID NO: 609367 - DNA, 15 bp, Homo sapiens
ttagctgcgtccctc

SEQ ID NO: 609368 - DNA, 15 bp, Homo sapiens
tagctgcgtccctcc

SEQ ID NO: 609369 - DNA, 15 bp, Homo sapiens
agctgcgtccctccg

SEQ ID NO: 609370 - DNA, 15 bp, Homo sapiens
gctgcgtccctccgc

SEQ ID NO: 609371 - DNA, 15 bp, Homo sapiens
ctgcgtccctccgct

SEQ ID NO: 609372 - DNA, 15 bp, Homo sapiens
tgcgtccctccgctg

SEQ ID NO: 609373 - DNA, 15 bp, Homo sapiens
gcgtccctccgctgg

SEQ ID NO: 609374 - DNA, 15 bp, Homo sapiens
cgtccctccgctggg

SEQ ID NO: 609375 - DNA, 15 bp, Homo sapiens
gtccctccgctgggc

SEQ ID NO: 609376 - DNA, 15 bp, Homo sapiens
tccctccgctgggct

SEQ ID NO: 609377 - DNA, 15 bp, Homo sapiens
ccctccgctgggctt

SEQ ID NO: 609378 - DNA, 15 bp, Homo sapiens
cctccgctgggcttc

SEQ ID NO: 609379 - DNA, 15 bp, Homo sapiens
ctccgctgggcttcc

SEQ ID NO: 609380 - DNA, 15 bp, Homo sapiens
tccgctgggcttccc

SEQ ID NO: 609381 - DNA, 15 bp, Homo sapiens
ccgctgggcttcccc

SEQ ID NO: 609382 - DNA, 15 bp, Homo sapiens
cgctgggcttcccca

SEQ ID NO: 609383 - DNA, 15 bp, Homo sapiens
gctgggcttccccaa

SEQ ID NO: 609384 - DNA, 15 bp, Homo sapiens
ctgggcttccccaat

SEQ ID NO: 609385 - DNA, 15 bp, Homo sapiens
tgggcttccccaata

SEQ ID NO: 609386 - DNA, 15 bp, Homo sapiens
gggcttccccaatac

SEQ ID NO: 609387 - DNA, 15 bp, Homo sapiens
ggcttccccaataca

SEQ ID NO: 609388 - DNA, 15 bp, Homo sapiens
gcttccccaatacac

SEQ ID NO: 609389 - DNA, 15 bp, Homo sapiens
cttccccaatacact

SEQ ID NO: 609390 - DNA, 15 bp, Homo sapiens
ttccccaatacactg

SEQ ID NO: 609391 - DNA, 15 bp, Homo sapiens
tccccaatacactgg

SEQ ID NO: 609392 - DNA, 15 bp, Homo sapiens
ccccaatacactggg

SEQ ID NO: 609393 - DNA, 15 bp, Homo sapiens
cccaatacactgggc

SEQ ID NO: 609394 - DNA, 15 bp, Homo sapiens
ccaatacactgggct

SEQ ID NO: 609395 - DNA, 15 bp, Homo sapiens
caatacactgggctt

SEQ ID NO: 609396 - DNA, 15 bp, Homo sapiens
aatacactgggcttg

SEQ ID NO: 609397 - DNA, 15 bp, Homo sapiens
atacactgggcttgc

SEQ ID NO: 609398 - DNA, 15 bp, Homo sapiens
tacactgggcttgct

SEQ ID NO: 609399 - DNA, 15 bp, Homo sapiens
acactgggcttgctt

SEQ ID NO: 609400 - DNA, 15 bp, Homo sapiens
cactgggcttgcttt

SEQ ID NO: 609401 - DNA, 15 bp, Homo sapiens
actgggcttgctttc

SEQ ID NO: 609402 - DNA, 15 bp, Homo sapiens
ctgggcttgctttca

SEQ ID NO: 609403 - DNA, 15 bp, Homo sapiens
tgggcttgctttcat

SEQ ID NO: 609404 - DNA, 15 bp, Homo sapiens
gggcttgctttcatt

SEQ ID NO: 609405 - DNA, 15 bp, Homo sapiens
ggcttgctttcatta

SEQ ID NO: 609406 - DNA, 15 bp, Homo sapiens
gcttgctttcattag

SEQ ID NO: 609407 - DNA, 15 bp, Homo sapiens
cttgctttcattaga

SEQ ID NO: 609408 - DNA, 15 bp, Homo sapiens
ttgctttcattagaa

SEQ ID NO: 609409 - DNA, 15 bp, Homo sapiens
tgctttcattagaac

SEQ ID NO: 609410 - DNA, 15 bp, Homo sapiens
gctttcattagaacc

SEQ ID NO: 609411 - DNA, 15 bp, Homo sapiens
ctttcattagaacct

SEQ ID NO: 609412 - DNA, 15 bp, Homo sapiens
tttcattagaacctg

SEQ ID NO: 609413 - DNA, 15 bp, Homo sapiens
ttcattagaacctga

SEQ ID NO: 609414 - DNA, 15 bp, Homo sapiens
tcattagaacctgat

SEQ ID NO: 609415 - DNA, 15 bp, Homo sapiens
cattagaacctgatc

SEQ ID NO: 609416 - DNA, 15 bp, Homo sapiens
attagaacctgatcc

SEQ ID NO: 609417 - DNA, 15 bp, Homo sapiens
ttagaacctgatcct

SEQ ID NO: 609418 - DNA, 15 bp, Homo sapiens
tagaacctgatcctt

SEQ ID NO: 609419 - DNA, 15 bp, Homo sapiens
agaacctgatccttc

SEQ ID NO: 609420 - DNA, 15 bp, Homo sapiens
gaacctgatccttcc

SEQ ID NO: 609421 - DNA, 15 bp, Homo sapiens
aacctgatccttcca

SEQ ID NO: 609422 - DNA, 15 bp, Homo sapiens
acctgatccttccac

SEQ ID NO: 609423 - DNA, 15 bp, Homo sapiens
cctgatccttccaca

SEQ ID NO: 609424 - DNA, 15 bp, Homo sapiens
ctgatccttccacat

SEQ ID NO: 609425 - DNA, 15 bp, Homo sapiens
tgatccttccacatt

SEQ ID NO: 609426 - DNA, 15 bp, Homo sapiens
gatccttccacatta

SEQ ID NO: 609427 - DNA, 15 bp, Homo sapiens
atccttccacattat

SEQ ID NO: 609428 - DNA, 15 bp, Homo sapiens
tccttccacattatg

SEQ ID NO: 609429 - DNA, 15 bp, Homo sapiens
ccttccacattatgg

SEQ ID NO: 609430 - DNA, 15 bp, Homo sapiens
cttccacattatggt

SEQ ID NO: 609431 - DNA, 15 bp, Homo sapiens
ttccacattatggtt

SEQ ID NO: 609432 - DNA, 15 bp, Homo sapiens
tccacattatggttg

SEQ ID NO: 609433 - DNA, 15 bp, Homo sapiens
ccacattatggttgt

SEQ ID NO: 609434 - DNA, 15 bp, Homo sapiens
cacattatggttgtt

SEQ ID NO: 609435 - DNA, 15 bp, Homo sapiens
acattatggttgttg

SEQ ID NO: 609436 - DNA, 15 bp, Homo sapiens
cattatggttgttgg

SEQ ID NO: 609437 - DNA, 15 bp, Homo sapiens
attatggttgttggt

SEQ ID NO: 609438 - DNA, 15 bp, Homo sapiens
ttatggttgttggtt

SEQ ID NO: 609439 - DNA, 15 bp, Homo sapiens
tatggttgttggttt

SEQ ID NO: 609440 - DNA, 15 bp, Homo sapiens
atggttgttggtttg

SEQ ID NO: 609441 - DNA, 15 bp, Homo sapiens
tggttgttggtttgc

SEQ ID NO: 609442 - DNA, 15 bp, Homo sapiens
ggttgttggtttgct

SEQ ID NO: 609443 - DNA, 15 bp, Homo sapiens
gttgttggtttgctc

SEQ ID NO: 609444 - DNA, 15 bp, Homo sapiens
ttgttggtttgctcc

SEQ ID NO: 609445 - DNA, 15 bp, Homo sapiens
tgttggtttgctcca

SEQ ID NO: 609446 - DNA, 15 bp, Homo sapiens
gttggtttgctccaa

SEQ ID NO: 609447 - DNA, 15 bp, Homo sapiens
ttggtttgctccaat

SEQ ID NO: 609448 - DNA, 15 bp, Homo sapiens
tggtttgctccaatc

SEQ ID NO: 609449 - DNA, 15 bp, Homo sapiens
ggtttgctccaatcc

SEQ ID NO: 609450 - DNA, 15 bp, Homo sapiens
gtttgctccaatcct

SEQ ID NO: 609451 - DNA, 15 bp, Homo sapiens
tttgctccaatcctc

SEQ ID NO: 609452 - DNA, 15 bp, Homo sapiens
ttgctccaatcctct

SEQ ID NO: 609453 - DNA, 15 bp, Homo sapiens
tgctccaatcctctc

SEQ ID NO: 609454 - DNA, 15 bp, Homo sapiens
gctccaatcctctcc

SEQ ID NO: 609455 - DNA, 15 bp, Homo sapiens
ctccaatcctctccc

SEQ ID NO: 609456 - DNA, 15 bp, Homo sapiens
tccaatcctctccct

SEQ ID NO: 609457 - DNA, 15 bp, Homo sapiens
ccaatcctctccctc

SEQ ID NO: 609458 - DNA, 15 bp, Homo sapiens
caatcctctccctca

SEQ ID NO: 609459 - DNA, 15 bp, Homo sapiens
aatcctctccctcat

SEQ ID NO: 609460 - DNA, 15 bp, Homo sapiens
atcctctccctcatt

SEQ ID NO: 609461 - DNA, 15 bp, Homo sapiens
tcctctccctcatta

SEQ ID NO: 609462 - DNA, 15 bp, Homo sapiens
cctctccctcattag

SEQ ID NO: 609463 - DNA, 15 bp, Homo sapiens
ctctccctcattagc

SEQ ID NO: 609464 - DNA, 15 bp, Homo sapiens
tctccctcattagct

SEQ ID NO: 609465 - DNA, 15 bp, Homo sapiens
ctccctcattagctc

SEQ ID NO: 609466 - DNA, 15 bp, Homo sapiens
tccctcattagctct

SEQ ID NO: 609467 - DNA, 15 bp, Homo sapiens
ccctcattagctctc

SEQ ID NO: 609468 - DNA, 15 bp, Homo sapiens
cctcattagctctca

SEQ ID NO: 609469 - DNA, 15 bp, Homo sapiens
ctcattagctctcaa

SEQ ID NO: 609470 - DNA, 15 bp, Homo sapiens
tcattagctctcaac

SEQ ID NO: 609471 - DNA, 15 bp, Homo sapiens
cattagctctcaact

SEQ ID NO: 609472 - DNA, 15 bp, Homo sapiens
attagctctcaactt

SEQ ID NO: 609473 - DNA, 15 bp, Homo sapiens
ttagctctcaacttt

SEQ ID NO: 609474 - DNA, 15 bp, Homo sapiens
tagctctcaactttc

SEQ ID NO: 609475 - DNA, 15 bp, Homo sapiens
agctctcaactttct

SEQ ID NO: 609476 - DNA, 15 bp, Homo sapiens
gctctcaactttctt

SEQ ID NO: 609477 - DNA, 15 bp, Homo sapiens
ctctcaactttcttt

SEQ ID NO: 609478 - DNA, 15 bp, Homo sapiens
tctcaactttctttc

SEQ ID NO: 609479 - DNA, 15 bp, Homo sapiens
ctcaactttctttca

SEQ ID NO: 609480 - DNA, 15 bp, Homo sapiens
tcaactttctttcag

SEQ ID NO: 609481 - DNA, 15 bp, Homo sapiens
caactttctttcagg

SEQ ID NO: 609482 - DNA, 15 bp, Homo sapiens
aactttctttcagga

SEQ ID NO: 609483 - DNA, 15 bp, Homo sapiens
actttctttcaggaa

SEQ ID NO: 609484 - DNA, 15 bp, Homo sapiens
ctttctttcaggaag

SEQ ID NO: 609485 - DNA, 15 bp, Homo sapiens
tttctttcaggaaga

SEQ ID NO: 609486 - DNA, 15 bp, Homo sapiens
ttctttcaggaagag

SEQ ID NO: 609487 - DNA, 15 bp, Homo sapiens
tctttcaggaagaga

SEQ ID NO: 609488 - DNA, 15 bp, Homo sapiens
ctttcaggaagagat

SEQ ID NO: 609489 - DNA, 15 bp, Homo sapiens
tttcaggaagagatg

SEQ ID NO: 609490 - DNA, 15 bp, Homo sapiens
ttcaggaagagatgt

SEQ ID NO: 609491 - DNA, 15 bp, Homo sapiens
tcaggaagagatgtt

SEQ ID NO: 609492 - DNA, 15 bp, Homo sapiens
caggaagagatgttt

SEQ ID NO: 609493 - DNA, 15 bp, Homo sapiens
aggaagagatgttta

SEQ ID NO: 609494 - DNA, 15 bp, Homo sapiens
ggaagagatgtttat

SEQ ID NO: 609495 - DNA, 15 bp, Homo sapiens
gaagagatgtttatc

SEQ ID NO: 609496 - DNA, 15 bp, Homo sapiens
aagagatgtttatct

SEQ ID NO: 609497 - DNA, 15 bp, Homo sapiens
agagatgtttatctt

SEQ ID NO: 609498 - DNA, 15 bp, Homo sapiens
gagatgtttatcttt

SEQ ID NO: 609499 - DNA, 15 bp, Homo sapiens
agatgtttatctttc

SEQ ID NO: 609500 - DNA, 15 bp, Homo sapiens
gatgtttatctttcc

SEQ ID NO: 609501 - DNA, 15 bp, Homo sapiens
atgtttatctttcct

SEQ ID NO: 609502 - DNA, 15 bp, Homo sapiens
tgtttatctttcctt

SEQ ID NO: 609503 - DNA, 15 bp, Homo sapiens
gtttatctttccttc

SEQ ID NO: 609504 - DNA, 15 bp, Homo sapiens
tttatctttccttct

SEQ ID NO: 609505 - DNA, 15 bp, Homo sapiens
ttatctttccttctt

SEQ ID NO: 609506 - DNA, 15 bp, Homo sapiens
tatctttccttcttg

SEQ ID NO: 609507 - DNA, 15 bp, Homo sapiens
atctttccttcttgt

SEQ ID NO: 609508 - DNA, 15 bp, Homo sapiens
tctttccttcttgta

SEQ ID NO: 609509 - DNA, 15 bp, Homo sapiens
ctttccttcttgtat

SEQ ID NO: 609510 - DNA, 15 bp, Homo sapiens
tttccttcttgtatt

SEQ ID NO: 609511 - DNA, 15 bp, Homo sapiens
ttccttcttgtattc

SEQ ID NO: 609512 - DNA, 15 bp, Homo sapiens
tccttcttgtattcc

SEQ ID NO: 609513 - DNA, 15 bp, Homo sapiens
ccttcttgtattcct

SEQ ID NO: 609514 - DNA, 15 bp, Homo sapiens
cttcttgtattccta

SEQ ID NO: 609515 - DNA, 15 bp, Homo sapiens
ttcttgtattcctag

SEQ ID NO: 609516 - DNA, 15 bp, Homo sapiens
tcttgtattcctaga

SEQ ID NO: 609517 - DNA, 15 bp, Homo sapiens
cttgtattcctagag

SEQ ID NO: 609518 - DNA, 15 bp, Homo sapiens
ttgtattcctagagt

SEQ ID NO: 609519 - DNA, 15 bp, Homo sapiens
tgtattcctagagtc

SEQ ID NO: 609520 - DNA, 15 bp, Homo sapiens
gtattcctagagtcg

SEQ ID NO: 609521 - DNA, 15 bp, Homo sapiens
tattcctagagtcga

SEQ ID NO: 609522 - DNA, 15 bp, Homo sapiens
attcctagagtcgac

SEQ ID NO: 609523 - DNA, 15 bp, Homo sapiens
ttcctagagtcgacc

SEQ ID NO: 609524 - DNA, 15 bp, Homo sapiens
tcctagagtcgacca

SEQ ID NO: 609525 - DNA, 15 bp, Homo sapiens
cctagagtcgaccag

SEQ ID NO: 609526 - DNA, 15 bp, Homo sapiens
ctagagtcgaccagg

SEQ ID NO: 609527 - DNA, 15 bp, Homo sapiens
tagagtcgaccaggc

SEQ ID NO: 609528 - DNA, 15 bp, Homo sapiens
agagtcgaccaggct

SEQ ID NO: 609529 - DNA, 15 bp, Homo sapiens
gagtcgaccaggctc

SEQ ID NO: 609530 - DNA, 15 bp, Homo sapiens
agtcgaccaggctct

SEQ ID NO: 609531 - DNA, 15 bp, Homo sapiens
gtcgaccaggctctg

SEQ ID NO: 609532 - DNA, 15 bp, Homo sapiens
tcgaccaggctctgg

SEQ ID NO: 609533 - DNA, 15 bp, Homo sapiens
cgaccaggctctggc

SEQ ID NO: 609534 - DNA, 15 bp, Homo sapiens
gaccaggctctggca

SEQ ID NO: 609535 - DNA, 15 bp, Homo sapiens
accaggctctggcac

SEQ ID NO: 609536 - DNA, 15 bp, Homo sapiens
ccaggctctggcaca

SEQ ID NO: 609537 - DNA, 15 bp, Homo sapiens
caggctctggcacat

SEQ ID NO: 609538 - DNA, 15 bp, Homo sapiens
aggctctggcacatt

SEQ ID NO: 609539 - DNA, 15 bp, Homo sapiens
ggctctggcacattg

SEQ ID NO: 609540 - DNA, 15 bp, Homo sapiens
gctctggcacattgc

SEQ ID NO: 609541 - DNA, 15 bp, Homo sapiens
ctctggcacattgca

SEQ ID NO: 609542 - DNA, 15 bp, Homo sapiens
tctggcacattgcag

SEQ ID NO: 609543 - DNA, 15 bp, Homo sapiens
ctggcacattgcaga

SEQ ID NO: 609544 - DNA, 15 bp, Homo sapiens
tggcacattgcagat

SEQ ID NO: 609545 - DNA, 15 bp, Homo sapiens
ggcacattgcagatt

SEQ ID NO: 609546 - DNA, 15 bp, Homo sapiens
gcacattgcagattc

SEQ ID NO: 609547 - DNA, 15 bp, Homo sapiens
cacattgcagattct

SEQ ID NO: 609548 - DNA, 15 bp, Homo sapiens
acattgcagattctc

SEQ ID NO: 609549 - DNA, 15 bp, Homo sapiens
cattgcagattctca

SEQ ID NO: 609550 - DNA, 15 bp, Homo sapiens
attgcagattctcag

SEQ ID NO: 609551 - DNA, 15 bp, Homo sapiens
ttgcagattctcagt

SEQ ID NO: 609552 - DNA, 15 bp, Homo sapiens
tgcagattctcagta

SEQ ID NO: 609553 - DNA, 15 bp, Homo sapiens
gcagattctcagtat

SEQ ID NO: 609554 - DNA, 15 bp, Homo sapiens
cagattctcagtatg

SEQ ID NO: 609555 - DNA, 15 bp, Homo sapiens
agattctcagtatgc

SEQ ID NO: 609556 - DNA, 15 bp, Homo sapiens
gattctcagtatgca

SEQ ID NO: 609557 - DNA, 15 bp, Homo sapiens
attctcagtatgcat

SEQ ID NO: 609558 - DNA, 15 bp, Homo sapiens
ttctcagtatgcatt

SEQ ID NO: 609559 - DNA, 15 bp, Homo sapiens
tctcagtatgcattc

SEQ ID NO: 609560 - DNA, 15 bp, Homo sapiens
ctcagtatgcattca

SEQ ID NO: 609561 - DNA, 15 bp, Homo sapiens
tcagtatgcattcag

SEQ ID NO: 609562 - DNA, 15 bp, Homo sapiens
cagtatgcattcagg

SEQ ID NO: 609563 - DNA, 15 bp, Homo sapiens
agtatgcattcaggg

SEQ ID NO: 609564 - DNA, 15 bp, Homo sapiens
gtatgcattcaggga

SEQ ID NO: 609565 - DNA, 15 bp, Homo sapiens
tatgcattcagggaa

SEQ ID NO: 609566 - DNA, 15 bp, Homo sapiens
atgcattcagggaac

SEQ ID NO: 609567 - DNA, 15 bp, Homo sapiens
tgcattcagggaaca

SEQ ID NO: 609568 - DNA, 15 bp, Homo sapiens
gcattcagggaacaa

SEQ ID NO: 609569 - DNA, 15 bp, Homo sapiens
cattcagggaacaac

SEQ ID NO: 609570 - DNA, 15 bp, Homo sapiens
attcagggaacaact

SEQ ID NO: 609571 - DNA, 15 bp, Homo sapiens
ttcagggaacaactt

SEQ ID NO: 609572 - DNA, 15 bp, Homo sapiens
tcagggaacaactta

SEQ ID NO: 609573 - DNA, 15 bp, Homo sapiens
cagggaacaacttaa

SEQ ID NO: 609574 - DNA, 15 bp, Homo sapiens
agggaacaacttaat

SEQ ID NO: 609575 - DNA, 15 bp, Homo sapiens
gggaacaacttaatc

SEQ ID NO: 609576 - DNA, 15 bp, Homo sapiens
ggaacaacttaatca

SEQ ID NO: 609577 - DNA, 15 bp, Homo sapiens
gaacaacttaatcaa

SEQ ID NO: 609578 - DNA, 15 bp, Homo sapiens
aacaacttaatcaag

SEQ ID NO: 609579 - DNA, 15 bp, Homo sapiens
acaacttaatcaaga

SEQ ID NO: 609580 - DNA, 15 bp, Homo sapiens
caacttaatcaagac

SEQ ID NO: 609581 - DNA, 15 bp, Homo sapiens
aacttaatcaagaca

SEQ ID NO: 609582 - DNA, 15 bp, Homo sapiens
acttaatcaagacaa

SEQ ID NO: 609583 - DNA, 15 bp, Homo sapiens
cttaatcaagacaag

SEQ ID NO: 609584 - DNA, 15 bp, Homo sapiens
ttaatcaagacaaga

SEQ ID NO: 609585 - DNA, 15 bp, Homo sapiens
taatcaagacaagac

SEQ ID NO: 609586 - DNA, 15 bp, Homo sapiens
aatcaagacaagacc

SEQ ID NO: 609587 - DNA, 15 bp, Homo sapiens
atcaagacaagacca

SEQ ID NO: 609588 - DNA, 15 bp, Homo sapiens
tcaagacaagaccat

SEQ ID NO: 609589 - DNA, 15 bp, Homo sapiens
caagacaagaccatc

SEQ ID NO: 609590 - DNA, 15 bp, Homo sapiens
aagacaagaccatct

SEQ ID NO: 609591 - DNA, 15 bp, Homo sapiens
agacaagaccatctg

SEQ ID NO: 609592 - DNA, 15 bp, Homo sapiens
gacaagaccatctga

SEQ ID NO: 609593 - DNA, 15 bp, Homo sapiens
acaagaccatctgac

SEQ ID NO: 609594 - DNA, 15 bp, Homo sapiens
caagaccatctgact

SEQ ID NO: 609595 - DNA, 15 bp, Homo sapiens
aagaccatctgactt

SEQ ID NO: 609596 - DNA, 15 bp, Homo sapiens
agaccatctgacttc

SEQ ID NO: 609597 - DNA, 15 bp, Homo sapiens
gaccatctgacttct

SEQ ID NO: 609598 - DNA, 15 bp, Homo sapiens
accatctgacttctt

SEQ ID NO: 609599 - DNA, 15 bp, Homo sapiens
ccatctgacttcttg

SEQ ID NO: 609600 - DNA, 15 bp, Homo sapiens
catctgacttcttgt

SEQ ID NO: 609601 - DNA, 15 bp, Homo sapiens
atctgacttcttgtg

SEQ ID NO: 609602 - DNA, 15 bp, Homo sapiens
tctgacttcttgtga

SEQ ID NO: 609603 - DNA, 15 bp, Homo sapiens
ctgacttcttgtgag

SEQ ID NO: 609604 - DNA, 15 bp, Homo sapiens
tgacttcttgtgagt

SEQ ID NO: 609605 - DNA, 15 bp, Homo sapiens
gacttcttgtgagtt

SEQ ID NO: 609606 - DNA, 15 bp, Homo sapiens
acttcttgtgagtta

SEQ ID NO: 609607 - DNA, 15 bp, Homo sapiens
cttcttgtgagttac

SEQ ID NO: 609608 - DNA, 15 bp, Homo sapiens
ttcttgtgagttaca

SEQ ID NO: 609609 - DNA, 15 bp, Homo sapiens
tcttgtgagttacat

SEQ ID NO: 609610 - DNA, 15 bp, Homo sapiens
cttgtgagttacatg

SEQ ID NO: 609611 - DNA, 15 bp, Homo sapiens
ttgtgagttacatgc

SEQ ID NO: 609612 - DNA, 15 bp, Homo sapiens
tgtgagttacatgct

SEQ ID NO: 609613 - DNA, 15 bp, Homo sapiens
gtgagttacatgcta

SEQ ID NO: 609614 - DNA, 15 bp, Homo sapiens
tgagttacatgctaa

SEQ ID NO: 609615 - DNA, 15 bp, Homo sapiens
gagttacatgctaag

SEQ ID NO: 609616 - DNA, 15 bp, Homo sapiens
agttacatgctaaga

SEQ ID NO: 609617 - DNA, 15 bp, Homo sapiens
gttacatgctaagaa

SEQ ID NO: 609618 - DNA, 15 bp, Homo sapiens
ttacatgctaagaaa

SEQ ID NO: 609619 - DNA, 15 bp, Homo sapiens
tacatgctaagaaag

SEQ ID NO: 609620 - DNA, 15 bp, Homo sapiens
acatgctaagaaaga

SEQ ID NO: 609621 - DNA, 15 bp, Homo sapiens
catgctaagaaagaa

SEQ ID NO: 609622 - DNA, 15 bp, Homo sapiens
atgctaagaaagaaa

SEQ ID NO: 609623 - DNA, 15 bp, Homo sapiens
tgctaagaaagaaat

SEQ ID NO: 609624 - DNA, 15 bp, Homo sapiens
gctaagaaagaaatg

SEQ ID NO: 609625 - DNA, 15 bp, Homo sapiens
ctaagaaagaaatgt

SEQ ID NO: 609626 - DNA, 15 bp, Homo sapiens
taagaaagaaatgtc

SEQ ID NO: 609627 - DNA, 15 bp, Homo sapiens
aagaaagaaatgtcg

SEQ ID NO: 609628 - DNA, 15 bp, Homo sapiens
agaaagaaatgtcga

SEQ ID NO: 609629 - DNA, 15 bp, Homo sapiens
gaaagaaatgtcgac

SEQ ID NO: 609630 - DNA, 15 bp, Homo sapiens
aaagaaatgtcgaca

SEQ ID NO: 609631 - DNA, 15 bp, Homo sapiens
aagaaatgtcgacac

SEQ ID NO: 609632 - DNA, 15 bp, Homo sapiens
agaaatgtcgacacc

SEQ ID NO: 609633 - DNA, 15 bp, Homo sapiens
gaaatgtcgacacca

SEQ ID NO: 609634 - DNA, 15 bp, Homo sapiens
aaatgtcgacaccaa

SEQ ID NO: 609635 - DNA, 15 bp, Homo sapiens
aatgtcgacaccaat

SEQ ID NO: 609636 - DNA, 15 bp, Homo sapiens
atgtcgacaccaata

SEQ ID NO: 609637 - DNA, 15 bp, Homo sapiens
tgtcgacaccaatag

SEQ ID NO: 609638 - DNA, 15 bp, Homo sapiens
gtcgacaccaatagc

SEQ ID NO: 609639 - DNA, 15 bp, Homo sapiens
tcgacaccaatagcc

SEQ ID NO: 609640 - DNA, 15 bp, Homo sapiens
cgacaccaatagccc

SEQ ID NO: 609641 - DNA, 15 bp, Homo sapiens
gacaccaatagccct

SEQ ID NO: 609642 - DNA, 15 bp, Homo sapiens
acaccaatagccctc

SEQ ID NO: 609643 - DNA, 15 bp, Homo sapiens
caccaatagccctca

SEQ ID NO: 609644 - DNA, 15 bp, Homo sapiens
accaatagccctcac

SEQ ID NO: 609645 - DNA, 15 bp, Homo sapiens
ccaatagccctcaca

SEQ ID NO: 609646 - DNA, 15 bp, Homo sapiens
caatagccctcacaa

SEQ ID NO: 609647 - DNA, 15 bp, Homo sapiens
aatagccctcacaat

SEQ ID NO: 609648 - DNA, 15 bp, Homo sapiens
atagccctcacaatg

SEQ ID NO: 609649 - DNA, 15 bp, Homo sapiens
tagccctcacaatga

SEQ ID NO: 609650 - DNA, 15 bp, Homo sapiens
agccctcacaatgat

SEQ ID NO: 609651 - DNA, 15 bp, Homo sapiens
gccctcacaatgata

SEQ ID NO: 609652 - DNA, 15 bp, Homo sapiens
ccctcacaatgatag

SEQ ID NO: 609653 - DNA, 15 bp, Homo sapiens
cctcacaatgatagg

SEQ ID NO: 609654 - DNA, 15 bp, Homo sapiens
ctcacaatgatagga

SEQ ID NO: 609655 - DNA, 15 bp, Homo sapiens
tcacaatgataggaa

SEQ ID NO: 609656 - DNA, 15 bp, Homo sapiens
cacaatgataggaac

SEQ ID NO: 609657 - DNA, 15 bp, Homo sapiens
acaatgataggaaca

SEQ ID NO: 609658 - DNA, 15 bp, Homo sapiens
caatgataggaacag

SEQ ID NO: 609659 - DNA, 15 bp, Homo sapiens
aatgataggaacagg

SEQ ID NO: 609660 - DNA, 15 bp, Homo sapiens
atgataggaacagga

SEQ ID NO: 609661 - DNA, 15 bp, Homo sapiens
tgataggaacaggag

SEQ ID NO: 609662 - DNA, 15 bp, Homo sapiens
gataggaacaggagg

SEQ ID NO: 609663 - DNA, 15 bp, Homo sapiens
ataggaacaggaggt

SEQ ID NO: 609664 - DNA, 15 bp, Homo sapiens
taggaacaggaggtt

SEQ ID NO: 609665 - DNA, 15 bp, Homo sapiens
aggaacaggaggtta

SEQ ID NO: 609666 - DNA, 15 bp, Homo sapiens
ggaacaggaggttaa

SEQ ID NO: 609667 - DNA, 15 bp, Homo sapiens
gaacaggaggttaaa

SEQ ID NO: 609668 - DNA, 15 bp, Homo sapiens
aacaggaggttaaag

SEQ ID NO: 609669 - DNA, 15 bp, Homo sapiens
acaggaggttaaaga

SEQ ID NO: 609670 - DNA, 15 bp, Homo sapiens
caggaggttaaagaa

SEQ ID NO: 609671 - DNA, 15 bp, Homo sapiens
aggaggttaaagaaa

SEQ ID NO: 609672 - DNA, 15 bp, Homo sapiens
ggaggttaaagaaaa

SEQ ID NO: 609673 - DNA, 15 bp, Homo sapiens
gaggttaaagaaaag

SEQ ID NO: 609674 - DNA, 15 bp, Homo sapiens
aggttaaagaaaagg

SEQ ID NO: 609675 - DNA, 15 bp, Homo sapiens
ggttaaagaaaagga

SEQ ID NO: 609676 - DNA, 15 bp, Homo sapiens
gttaaagaaaaggaa

SEQ ID NO: 609677 - DNA, 15 bp, Homo sapiens
ttaaagaaaaggaaa

SEQ ID NO: 609678 - DNA, 15 bp, Homo sapiens
taaagaaaaggaaat

SEQ ID NO: 609679 - DNA, 15 bp, Homo sapiens
aaagaaaaggaaata

SEQ ID NO: 609680 - DNA, 15 bp, Homo sapiens
aagaaaaggaaatag

SEQ ID NO: 609681 - DNA, 15 bp, Homo sapiens
agaaaaggaaataga

SEQ ID NO: 609682 - DNA, 15 bp, Homo sapiens
gaaaaggaaatagat

SEQ ID NO: 609683 - DNA, 15 bp, Homo sapiens
aaaaggaaatagatg

SEQ ID NO: 609684 - DNA, 15 bp, Homo sapiens
aaaggaaatagatgc

SEQ ID NO: 609685 - DNA, 15 bp, Homo sapiens
aaggaaatagatgca

SEQ ID NO: 609686 - DNA, 15 bp, Homo sapiens
aggaaatagatgcaa

SEQ ID NO: 609687 - DNA, 15 bp, Homo sapiens
ggaaatagatgcaaa

SEQ ID NO: 609688 - DNA, 15 bp, Homo sapiens
gaaatagatgcaaat

SEQ ID NO: 609689 - DNA, 15 bp, Homo sapiens
aaatagatgcaaata

SEQ ID NO: 609690 - DNA, 15 bp, Homo sapiens
aatagatgcaaatag

SEQ ID NO: 609691 - DNA, 15 bp, Homo sapiens
atagatgcaaatagc

SEQ ID NO: 609692 - DNA, 15 bp, Homo sapiens
tagatgcaaatagca

SEQ ID NO: 609693 - DNA, 15 bp, Homo sapiens
agatgcaaatagcaa

SEQ ID NO: 609694 - DNA, 15 bp, Homo sapiens
gatgcaaatagcaat

SEQ ID NO: 609695 - DNA, 15 bp, Homo sapiens
atgcaaatagcaata

SEQ ID NO: 609696 - DNA, 15 bp, Homo sapiens
tgcaaatagcaatat

SEQ ID NO: 609697 - DNA, 15 bp, Homo sapiens
gcaaatagcaatata

SEQ ID NO: 609698 - DNA, 15 bp, Homo sapiens
caaatagcaatataa

SEQ ID NO: 609699 - DNA, 15 bp, Homo sapiens
aaatagcaatataag

SEQ ID NO: 609700 - DNA, 15 bp, Homo sapiens
aatagcaatataagt

SEQ ID NO: 609701 - DNA, 15 bp, Homo sapiens
atagcaatataagtg

SEQ ID NO: 609702 - DNA, 15 bp, Homo sapiens
tagcaatataagtgc

SEQ ID NO: 609703 - DNA, 15 bp, Homo sapiens
agcaatataagtgct

SEQ ID NO: 609704 - DNA, 15 bp, Homo sapiens
gcaatataagtgctt

SEQ ID NO: 609705 - DNA, 15 bp, Homo sapiens
caatataagtgcttt

SEQ ID NO: 609706 - DNA, 15 bp, Homo sapiens
aatataagtgcttta

SEQ ID NO: 609707 - DNA, 15 bp, Homo sapiens
atataagtgctttaa

SEQ ID NO: 609708 - DNA, 15 bp, Homo sapiens
tataagtgctttaac

SEQ ID NO: 609709 - DNA, 15 bp, Homo sapiens
ataagtgctttaaca

SEQ ID NO: 609710 - DNA, 15 bp, Homo sapiens
taagtgctttaacaa

SEQ ID NO: 609711 - DNA, 15 bp, Homo sapiens
aagtgctttaacaaa

SEQ ID NO: 609712 - DNA, 15 bp, Homo sapiens
agtgctttaacaaat

SEQ ID NO: 609713 - DNA, 15 bp, Homo sapiens
gtgctttaacaaatc

SEQ ID NO: 609714 - DNA, 15 bp, Homo sapiens
tgctttaacaaatct

SEQ ID NO: 609715 - DNA, 15 bp, Homo sapiens
gctttaacaaatcta

SEQ ID NO: 609716 - DNA, 15 bp, Homo sapiens
ctttaacaaatctat

SEQ ID NO: 609717 - DNA, 15 bp, Homo sapiens
tttaacaaatctata

SEQ ID NO: 609718 - DNA, 15 bp, Homo sapiens
ttaacaaatctatac

SEQ ID NO: 609719 - DNA, 15 bp, Homo sapiens
taacaaatctataca

SEQ ID NO: 609720 - DNA, 15 bp, Homo sapiens
aacaaatctatacag

SEQ ID NO: 609721 - DNA, 15 bp, Homo sapiens
acaaatctatacagg

SEQ ID NO: 609722 - DNA, 15 bp, Homo sapiens
caaatctatacagga

SEQ ID NO: 609723 - DNA, 15 bp, Homo sapiens
aaatctatacaggag

SEQ ID NO: 609724 - DNA, 15 bp, Homo sapiens
aatctatacaggagg

SEQ ID NO: 609725 - DNA, 15 bp, Homo sapiens
atctatacaggagga

SEQ ID NO: 609726 - DNA, 15 bp, Homo sapiens
tctatacaggaggac

SEQ ID NO: 609727 - DNA, 15 bp, Homo sapiens
ctatacaggaggaca

SEQ ID NO: 609728 - DNA, 15 bp, Homo sapiens
tatacaggaggacaa

SEQ ID NO: 609729 - DNA, 15 bp, Homo sapiens
atacaggaggacaac

SEQ ID NO: 609730 - DNA, 15 bp, Homo sapiens
tacaggaggacaacc

SEQ ID NO: 609731 - DNA, 15 bp, Homo sapiens
acaggaggacaacca

SEQ ID NO: 609732 - DNA, 15 bp, Homo sapiens
caggaggacaaccat

SEQ ID NO: 609733 - DNA, 15 bp, Homo sapiens
aggaggacaaccatc

SEQ ID NO: 609734 - DNA, 15 bp, Homo sapiens
ggaggacaaccatca

SEQ ID NO: 609735 - DNA, 15 bp, Homo sapiens
gaggacaaccatcat

SEQ ID NO: 609736 - DNA, 15 bp, Homo sapiens
aggacaaccatcata

SEQ ID NO: 609737 - DNA, 15 bp, Homo sapiens
ggacaaccatcatat

SEQ ID NO: 609738 - DNA, 15 bp, Homo sapiens
gacaaccatcatatt

SEQ ID NO: 609739 - DNA, 15 bp, Homo sapiens
acaaccatcatattc

SEQ ID NO: 609740 - DNA, 15 bp, Homo sapiens
caaccatcatattca

SEQ ID NO: 609741 - DNA, 15 bp, Homo sapiens
aaccatcatattcaa

SEQ ID NO: 609742 - DNA, 15 bp, Homo sapiens
accatcatattcaaa

SEQ ID NO: 609743 - DNA, 15 bp, Homo sapiens
ccatcatattcaaat

SEQ ID NO: 609744 - DNA, 15 bp, Homo sapiens
catcatattcaaatt

SEQ ID NO: 609745 - DNA, 15 bp, Homo sapiens
atcatattcaaattt

SEQ ID NO: 609746 - DNA, 15 bp, Homo sapiens
tcatattcaaatttt

SEQ ID NO: 609747 - DNA, 15 bp, Homo sapiens
catattcaaattttc

SEQ ID NO: 609748 - DNA, 15 bp, Homo sapiens
atattcaaattttca

SEQ ID NO: 609749 - DNA, 15 bp, Homo sapiens
tattcaaattttcaa

SEQ ID NO: 609750 - DNA, 15 bp, Homo sapiens
attcaaattttcaaa

SEQ ID NO: 609751 - DNA, 15 bp, Homo sapiens
ttcaaattttcaaac

SEQ ID NO: 609752 - DNA, 15 bp, Homo sapiens
tcaaattttcaaaca

SEQ ID NO: 609753 - DNA, 15 bp, Homo sapiens
caaattttcaaacat

SEQ ID NO: 609754 - DNA, 15 bp, Homo sapiens
aaattttcaaacatt

SEQ ID NO: 609755 - DNA, 15 bp, Homo sapiens
aattttcaaacattc

SEQ ID NO: 609756 - DNA, 15 bp, Homo sapiens
attttcaaacattct

SEQ ID NO: 609757 - DNA, 15 bp, Homo sapiens
ttttcaaacattctt

SEQ ID NO: 609758 - DNA, 15 bp, Homo sapiens
tttcaaacattctta

SEQ ID NO: 609759 - DNA, 15 bp, Homo sapiens
ttcaaacattcttag

SEQ ID NO: 609760 - DNA, 15 bp, Homo sapiens
tcaaacattcttagt

SEQ ID NO: 609761 - DNA, 15 bp, Homo sapiens
caaacattcttagtt

SEQ ID NO: 609762 - DNA, 15 bp, Homo sapiens
aaacattcttagttc

SEQ ID NO: 609763 - DNA, 15 bp, Homo sapiens
aacattcttagttct

SEQ ID NO: 609764 - DNA, 15 bp, Homo sapiens
acattcttagttctg

SEQ ID NO: 609765 - DNA, 15 bp, Homo sapiens
cattcttagttctgc

SEQ ID NO: 609766 - DNA, 15 bp, Homo sapiens
attcttagttctgct

SEQ ID NO: 609767 - DNA, 15 bp, Homo sapiens
ttcttagttctgctc

SEQ ID NO: 609768 - DNA, 15 bp, Homo sapiens
tcttagttctgctct

SEQ ID NO: 609769 - DNA, 15 bp, Homo sapiens
cttagttctgctctt

SEQ ID NO: 609770 - DNA, 15 bp, Homo sapiens
ttagttctgctcttt

SEQ ID NO: 609771 - DNA, 15 bp, Homo sapiens
tagttctgctctttt

SEQ ID NO: 609772 - DNA, 15 bp, Homo sapiens
agttctgctcttttg

SEQ ID NO: 609773 - DNA, 15 bp, Homo sapiens
gttctgctcttttgt

SEQ ID NO: 609774 - DNA, 15 bp, Homo sapiens
ttctgctcttttgtg

SEQ ID NO: 609775 - DNA, 15 bp, Homo sapiens
tctgctcttttgtgg

SEQ ID NO: 609776 - DNA, 15 bp, Homo sapiens
ctgctcttttgtggg

SEQ ID NO: 609777 - DNA, 15 bp, Homo sapiens
tgctcttttgtgggt

SEQ ID NO: 609778 - DNA, 15 bp, Homo sapiens
gctcttttgtgggta

SEQ ID NO: 609779 - DNA, 15 bp, Homo sapiens
ctcttttgtgggtaa

SEQ ID NO: 609780 - DNA, 15 bp, Homo sapiens
tcttttgtgggtaat

SEQ ID NO: 609781 - DNA, 15 bp, Homo sapiens
cttttgtgggtaatg

SEQ ID NO: 609782 - DNA, 15 bp, Homo sapiens
ttttgtgggtaatgg

SEQ ID NO: 609783 - DNA, 15 bp, Homo sapiens
tttgtgggtaatggt

SEQ ID NO: 609784 - DNA, 15 bp, Homo sapiens
ttgtgggtaatggtt

SEQ ID NO: 609785 - DNA, 15 bp, Homo sapiens
tgtgggtaatggttt

SEQ ID NO: 609786 - DNA, 15 bp, Homo sapiens
gtgggtaatggtttt

SEQ ID NO: 609787 - DNA, 15 bp, Homo sapiens
tgggtaatggttttt

SEQ ID NO: 609788 - DNA, 15 bp, Homo sapiens
gggtaatggtttttt

SEQ ID NO: 609789 - DNA, 15 bp, Homo sapiens
ggtaatggttttttt

SEQ ID NO: 609790 - DNA, 15 bp, Homo sapiens
gtaatggtttttttt

SEQ ID NO: 609791 - DNA, 15 bp, Homo sapiens
taatggttttttttt

SEQ ID NO: 609792 - DNA, 15 bp, Homo sapiens
aatggtttttttttt

SEQ ID NO: 609793 - DNA, 15 bp, Homo sapiens
atggttttttttttt

SEQ ID NO: 609794 - DNA, 15 bp, Homo sapiens
tggtttttttttttc

SEQ ID NO: 609795 - DNA, 15 bp, Homo sapiens
ggtttttttttttcc

SEQ ID NO: 609796 - DNA, 15 bp, Homo sapiens
gtttttttttttcct

SEQ ID NO: 609797 - DNA, 15 bp, Homo sapiens
tttttttttttcctc

SEQ ID NO: 609798 - DNA, 15 bp, Homo sapiens
ttttttttttcctct

SEQ ID NO: 609799 - DNA, 15 bp, Homo sapiens
tttttttttcctctt

SEQ ID NO: 609800 - DNA, 15 bp, Homo sapiens
ttttttttcctcttc

SEQ ID NO: 609801 - DNA, 15 bp, Homo sapiens
tttttttcctcttcc

SEQ ID NO: 609802 - DNA, 15 bp, Homo sapiens
ttttttcctcttcca

SEQ ID NO: 609803 - DNA, 15 bp, Homo sapiens
tttttcctcttccag

SEQ ID NO: 609804 - DNA, 15 bp, Homo sapiens
ttttcctcttccagg

SEQ ID NO: 609805 - DNA, 15 bp, Homo sapiens
tttcctcttccagga

SEQ ID NO: 609806 - DNA, 15 bp, Homo sapiens
ttcctcttccaggag

SEQ ID NO: 609807 - DNA, 15 bp, Homo sapiens
tcctcttccaggaga

SEQ ID NO: 609808 - DNA, 15 bp, Homo sapiens
cctcttccaggagaa

SEQ ID NO: 609809 - DNA, 15 bp, Homo sapiens
ctcttccaggagaag

SEQ ID NO: 609810 - DNA, 15 bp, Homo sapiens
tcttccaggagaaga

SEQ ID NO: 609811 - DNA, 15 bp, Homo sapiens
cttccaggagaagaa

SEQ ID NO: 609812 - DNA, 15 bp, Homo sapiens
ttccaggagaagaaa

SEQ ID NO: 609813 - DNA, 15 bp, Homo sapiens
tccaggagaagaaaa

SEQ ID NO: 609814 - DNA, 15 bp, Homo sapiens
ccaggagaagaaaag

SEQ ID NO: 609815 - DNA, 15 bp, Homo sapiens
caggagaagaaaaga

SEQ ID NO: 609816 - DNA, 15 bp, Homo sapiens
aggagaagaaaagag

SEQ ID NO: 609817 - DNA, 15 bp, Homo sapiens
ggagaagaaaagagg

SEQ ID NO: 609818 - DNA, 15 bp, Homo sapiens
gagaagaaaagaggc

SEQ ID NO: 609819 - DNA, 15 bp, Homo sapiens
agaagaaaagaggca

SEQ ID NO: 609820 - DNA, 15 bp, Homo sapiens
gaagaaaagaggcat

SEQ ID NO: 609821 - DNA, 15 bp, Homo sapiens
aagaaaagaggcata

SEQ ID NO: 609822 - DNA, 15 bp, Homo sapiens
agaaaagaggcatat

SEQ ID NO: 609823 - DNA, 15 bp, Homo sapiens
gaaaagaggcatatt

SEQ ID NO: 609824 - DNA, 15 bp, Homo sapiens
aaaagaggcatatta

SEQ ID NO: 609825 - DNA, 15 bp, Homo sapiens
aaagaggcatattat

SEQ ID NO: 609826 - DNA, 15 bp, Homo sapiens
aagaggcatattata

SEQ ID NO: 609827 - DNA, 15 bp, Homo sapiens
agaggcatattatag

SEQ ID NO: 609828 - DNA, 15 bp, Homo sapiens
gaggcatattataga

SEQ ID NO: 609829 - DNA, 15 bp, Homo sapiens
aggcatattatagaa

SEQ ID NO: 609830 - DNA, 15 bp, Homo sapiens
ggcatattatagaaa

SEQ ID NO: 609831 - DNA, 15 bp, Homo sapiens
gcatattatagaaat

SEQ ID NO: 609832 - DNA, 15 bp, Homo sapiens
catattatagaaatt

SEQ ID NO: 609833 - DNA, 15 bp, Homo sapiens
atattatagaaattc

SEQ ID NO: 609834 - DNA, 15 bp, Homo sapiens
tattatagaaattcc

SEQ ID NO: 609835 - DNA, 15 bp, Homo sapiens
attatagaaattcct

SEQ ID NO: 609836 - DNA, 15 bp, Homo sapiens
ttatagaaattcctc

SEQ ID NO: 609837 - DNA, 15 bp, Homo sapiens
tatagaaattcctcc

SEQ ID NO: 609838 - DNA, 15 bp, Homo sapiens
atagaaattcctcct

SEQ ID NO: 609839 - DNA, 15 bp, Homo sapiens
tagaaattcctcctc

SEQ ID NO: 609840 - DNA, 15 bp, Homo sapiens
agaaattcctcctcc

SEQ ID NO: 609841 - DNA, 15 bp, Homo sapiens
gaaattcctcctccc

SEQ ID NO: 609842 - DNA, 15 bp, Homo sapiens
aaattcctcctcccc

SEQ ID NO: 609843 - DNA, 15 bp, Homo sapiens
aattcctcctccccc

SEQ ID NO: 609844 - DNA, 15 bp, Homo sapiens
attcctcctccccca

SEQ ID NO: 609845 - DNA, 15 bp, Homo sapiens
ttcctcctcccccag

SEQ ID NO: 609846 - DNA, 15 bp, Homo sapiens
tcctcctcccccagc

SEQ ID NO: 609847 - DNA, 15 bp, Homo sapiens
cctcctcccccagca

SEQ ID NO: 609848 - DNA, 15 bp, Homo sapiens
ctcctcccccagcat

SEQ ID NO: 609849 - DNA, 15 bp, Homo sapiens
tcctcccccagcatt

SEQ ID NO: 609850 - DNA, 15 bp, Homo sapiens
cctcccccagcatta

SEQ ID NO: 609851 - DNA, 15 bp, Homo sapiens
ctcccccagcattac

SEQ ID NO: 609852 - DNA, 15 bp, Homo sapiens
tcccccagcattact

SEQ ID NO: 609853 - DNA, 15 bp, Homo sapiens
cccccagcattactt

SEQ ID NO: 609854 - DNA, 15 bp, Homo sapiens
ccccagcattacttg

SEQ ID NO: 609855 - DNA, 15 bp, Homo sapiens
cccagcattacttgt

SEQ ID NO: 609856 - DNA, 15 bp, Homo sapiens
ccagcattacttgtc

SEQ ID NO: 609857 - DNA, 15 bp, Homo sapiens
cagcattacttgtca

SEQ ID NO: 609858 - DNA, 15 bp, Homo sapiens
agcattacttgtcac

SEQ ID NO: 609859 - DNA, 15 bp, Homo sapiens
gcattacttgtcaca

SEQ ID NO: 609860 - DNA, 15 bp, Homo sapiens
cattacttgtcacag

SEQ ID NO: 609861 - DNA, 15 bp, Homo sapiens
attacttgtcacaga

SEQ ID NO: 609862 - DNA, 15 bp, Homo sapiens
ttacttgtcacagaa

SEQ ID NO: 609863 - DNA, 15 bp, Homo sapiens
tacttgtcacagaat

SEQ ID NO: 609864 - DNA, 15 bp, Homo sapiens
acttgtcacagaatt

SEQ ID NO: 609865 - DNA, 15 bp, Homo sapiens
cttgtcacagaattg

SEQ ID NO: 609866 - DNA, 15 bp, Homo sapiens
ttgtcacagaattgt

SEQ ID NO: 609867 - DNA, 15 bp, Homo sapiens
tgtcacagaattgta

SEQ ID NO: 609868 - DNA, 15 bp, Homo sapiens
gtcacagaattgtaa

SEQ ID NO: 609869 - DNA, 15 bp, Homo sapiens
tcacagaattgtaat

SEQ ID NO: 609870 - DNA, 15 bp, Homo sapiens
cacagaattgtaatt

SEQ ID NO: 609871 - DNA, 15 bp, Homo sapiens
acagaattgtaattg

SEQ ID NO: 609872 - DNA, 15 bp, Homo sapiens
cagaattgtaattgg

SEQ ID NO: 609873 - DNA, 15 bp, Homo sapiens
agaattgtaattgga

SEQ ID NO: 609874 - DNA, 15 bp, Homo sapiens
gaattgtaattggaa

SEQ ID NO: 609875 - DNA, 15 bp, Homo sapiens
aattgtaattggaag

SEQ ID NO: 609876 - DNA, 15 bp, Homo sapiens
attgtaattggaagt

SEQ ID NO: 609877 - DNA, 15 bp, Homo sapiens
ttgtaattggaagtg

SEQ ID NO: 609878 - DNA, 15 bp, Homo sapiens
tgtaattggaagtga

SEQ ID NO: 609879 - DNA, 15 bp, Homo sapiens
gtaattggaagtgat

SEQ ID NO: 609880 - DNA, 15 bp, Homo sapiens
taattggaagtgatt

SEQ ID NO: 609881 - DNA, 15 bp, Homo sapiens
aattggaagtgattt

SEQ ID NO: 609882 - DNA, 15 bp, Homo sapiens
attggaagtgatttc

SEQ ID NO: 609883 - DNA, 15 bp, Homo sapiens
ttggaagtgatttcc

SEQ ID NO: 609884 - DNA, 15 bp, Homo sapiens
tggaagtgatttccc

SEQ ID NO: 609885 - DNA, 15 bp, Homo sapiens
ggaagtgatttccct

SEQ ID NO: 609886 - DNA, 15 bp, Homo sapiens
gaagtgatttccctg

SEQ ID NO: 609887 - DNA, 15 bp, Homo sapiens
aagtgatttccctga

SEQ ID NO: 609888 - DNA, 15 bp, Homo sapiens
agtgatttccctgac

SEQ ID NO: 609889 - DNA, 15 bp, Homo sapiens
gtgatttccctgact

SEQ ID NO: 609890 - DNA, 15 bp, Homo sapiens
tgatttccctgacta

SEQ ID NO: 609891 - DNA, 15 bp, Homo sapiens
gatttccctgactaa

SEQ ID NO: 609892 - DNA, 15 bp, Homo sapiens
atttccctgactaag

SEQ ID NO: 609893 - DNA, 15 bp, Homo sapiens
tttccctgactaagt

SEQ ID NO: 609894 - DNA, 15 bp, Homo sapiens
ttccctgactaagtt

SEQ ID NO: 609895 - DNA, 15 bp, Homo sapiens
tccctgactaagtta

SEQ ID NO: 609896 - DNA, 15 bp, Homo sapiens
ccctgactaagttat

SEQ ID NO: 609897 - DNA, 15 bp, Homo sapiens
cctgactaagttatt

SEQ ID NO: 609898 - DNA, 15 bp, Homo sapiens
ctgactaagttattt

SEQ ID NO: 609899 - DNA, 15 bp, Homo sapiens
tgactaagttatttt

SEQ ID NO: 609900 - DNA, 15 bp, Homo sapiens
gactaagttattttg

SEQ ID NO: 609901 - DNA, 15 bp, Homo sapiens
actaagttattttgg

SEQ ID NO: 609902 - DNA, 15 bp, Homo sapiens
ctaagttattttggc

SEQ ID NO: 609903 - DNA, 15 bp, Homo sapiens
taagttattttggct

SEQ ID NO: 609904 - DNA, 15 bp, Homo sapiens
aagttattttggctg

SEQ ID NO: 609905 - DNA, 15 bp, Homo sapiens
agttattttggctgt

SEQ ID NO: 609906 - DNA, 15 bp, Homo sapiens
gttattttggctgtc

SEQ ID NO: 609907 - DNA, 15 bp, Homo sapiens
ttattttggctgtct

SEQ ID NO: 609908 - DNA, 15 bp, Homo sapiens
tattttggctgtctg

SEQ ID NO: 609909 - DNA, 15 bp, Homo sapiens
attttggctgtctgt

SEQ ID NO: 609910 - DNA, 15 bp, Homo sapiens
ttttggctgtctgtt

SEQ ID NO: 609911 - DNA, 15 bp, Homo sapiens
tttggctgtctgtta

SEQ ID NO: 609912 - DNA, 15 bp, Homo sapiens
ttggctgtctgttat

SEQ ID NO: 609913 - DNA, 15 bp, Homo sapiens
tggctgtctgttatt

SEQ ID NO: 609914 - DNA, 15 bp, Homo sapiens
ggctgtctgttattt

SEQ ID NO: 609915 - DNA, 15 bp, Homo sapiens
gctgtctgttatttt

SEQ ID NO: 609916 - DNA, 15 bp, Homo sapiens
ctgtctgttattttc

SEQ ID NO: 609917 - DNA, 15 bp, Homo sapiens
tgtctgttattttct

SEQ ID NO: 609918 - DNA, 15 bp, Homo sapiens
gtctgttattttctc

SEQ ID NO: 609919 - DNA, 15 bp, Homo sapiens
tctgttattttctct

SEQ ID NO: 609920 - DNA, 15 bp, Homo sapiens
ctgttattttctctc

SEQ ID NO: 609921 - DNA, 15 bp, Homo sapiens
tgttattttctctct

SEQ ID NO: 609922 - DNA, 15 bp, Homo sapiens
gttattttctctctt

SEQ ID NO: 609923 - DNA, 15 bp, Homo sapiens
ttattttctctcttc

SEQ ID NO: 609924 - DNA, 15 bp, Homo sapiens
tattttctctcttcc

SEQ ID NO: 609925 - DNA, 15 bp, Homo sapiens
attttctctcttcct

SEQ ID NO: 609926 - DNA, 15 bp, Homo sapiens
ttttctctcttcctc

SEQ ID NO: 609927 - DNA, 15 bp, Homo sapiens
tttctctcttcctcc

SEQ ID NO: 609928 - DNA, 15 bp, Homo sapiens
ttctctcttcctcct

SEQ ID NO: 609929 - DNA, 15 bp, Homo sapiens
tctctcttcctcctt

SEQ ID NO: 609930 - DNA, 15 bp, Homo sapiens
ctctcttcctccttg

SEQ ID NO: 609931 - DNA, 15 bp, Homo sapiens
tctcttcctccttgc

SEQ ID NO: 609932 - DNA, 15 bp, Homo sapiens
ctcttcctccttgct

SEQ ID NO: 609933 - DNA, 15 bp, Homo sapiens
tcttcctccttgctc

SEQ ID NO: 609934 - DNA, 15 bp, Homo sapiens
cttcctccttgctct

SEQ ID NO: 609935 - DNA, 15 bp, Homo sapiens
ttcctccttgctctt

SEQ ID NO: 609936 - DNA, 15 bp, Homo sapiens
tcctccttgctcttc

SEQ ID NO: 609937 - DNA, 15 bp, Homo sapiens
cctccttgctcttcc

SEQ ID NO: 609938 - DNA, 15 bp, Homo sapiens
ctccttgctcttccc

SEQ ID NO: 609939 - DNA, 15 bp, Homo sapiens
tccttgctcttccct

SEQ ID NO: 609940 - DNA, 15 bp, Homo sapiens
ccttgctcttccctc

SEQ ID NO: 609941 - DNA, 15 bp, Homo sapiens
cttgctcttccctca

SEQ ID NO: 609942 - DNA, 15 bp, Homo sapiens
ttgctcttccctcag

SEQ ID NO: 609943 - DNA, 15 bp, Homo sapiens
tgctcttccctcagc

SEQ ID NO: 609944 - DNA, 15 bp, Homo sapiens
gctcttccctcagct

SEQ ID NO: 609945 - DNA, 15 bp, Homo sapiens
ctcttccctcagctg

SEQ ID NO: 609946 - DNA, 15 bp, Homo sapiens
tcttccctcagctgg

SEQ ID NO: 609947 - DNA, 15 bp, Homo sapiens
cttccctcagctggc

SEQ ID NO: 609948 - DNA, 15 bp, Homo sapiens
ttccctcagctggcc

SEQ ID NO: 609949 - DNA, 15 bp, Homo sapiens
tccctcagctggcca

SEQ ID NO: 609950 - DNA, 15 bp, Homo sapiens
ccctcagctggccat

SEQ ID NO: 609951 - DNA, 15 bp, Homo sapiens
cctcagctggccatc

SEQ ID NO: 609952 - DNA, 15 bp, Homo sapiens
ctcagctggccatcc

SEQ ID NO: 609953 - DNA, 15 bp, Homo sapiens
tcagctggccatcct

SEQ ID NO: 609954 - DNA, 15 bp, Homo sapiens
cagctggccatcctg

SEQ ID NO: 609955 - DNA, 15 bp, Homo sapiens
agctggccatcctgt

SEQ ID NO: 609956 - DNA, 15 bp, Homo sapiens
gctggccatcctgtg

SEQ ID NO: 609957 - DNA, 15 bp, Homo sapiens
ctggccatcctgtgt

SEQ ID NO: 609958 - DNA, 15 bp, Homo sapiens
tggccatcctgtgtg

SEQ ID NO: 609959 - DNA, 15 bp, Homo sapiens
ggccatcctgtgtgt

SEQ ID NO: 609960 - DNA, 15 bp, Homo sapiens
gccatcctgtgtgtt

SEQ ID NO: 609961 - DNA, 15 bp, Homo sapiens
ccatcctgtgtgttt

SEQ ID NO: 609962 - DNA, 15 bp, Homo sapiens
catcctgtgtgtttg

SEQ ID NO: 609963 - DNA, 15 bp, Homo sapiens
atcctgtgtgtttgg

SEQ ID NO: 609964 - DNA, 15 bp, Homo sapiens
tcctgtgtgtttgga

SEQ ID NO: 609965 - DNA, 15 bp, Homo sapiens
cctgtgtgtttggag

SEQ ID NO: 609966 - DNA, 15 bp, Homo sapiens
ctgtgtgtttggaga

SEQ ID NO: 609967 - DNA, 15 bp, Homo sapiens
tgtgtgtttggagag

SEQ ID NO: 609968 - DNA, 15 bp, Homo sapiens
gtgtgtttggagaga

SEQ ID NO: 609969 - DNA, 15 bp, Homo sapiens
tgtgtttggagagag

SEQ ID NO: 609970 - DNA, 15 bp, Homo sapiens
gtgtttggagagagc

SEQ ID NO: 609971 - DNA, 15 bp, Homo sapiens
tgtttggagagagcc

SEQ ID NO: 609972 - DNA, 15 bp, Homo sapiens
gtttggagagagcca

SEQ ID NO: 609973 - DNA, 15 bp, Homo sapiens
tttggagagagccag

SEQ ID NO: 609974 - DNA, 15 bp, Homo sapiens
ttggagagagccaga

SEQ ID NO: 609975 - DNA, 15 bp, Homo sapiens
tggagagagccagaa

SEQ ID NO: 609976 - DNA, 15 bp, Homo sapiens
ggagagagccagaaa

SEQ ID NO: 609977 - DNA, 15 bp, Homo sapiens
gagagagccagaaag

SEQ ID NO: 609978 - DNA, 15 bp, Homo sapiens
agagagccagaaagg

SEQ ID NO: 609979 - DNA, 15 bp, Homo sapiens
gagagccagaaaggt

SEQ ID NO: 609980 - DNA, 15 bp, Homo sapiens
agagccagaaaggtt

SEQ ID NO: 609981 - DNA, 15 bp, Homo sapiens
gagccagaaaggttc

SEQ ID NO: 609982 - DNA, 15 bp, Homo sapiens
agccagaaaggttca

SEQ ID NO: 609983 - DNA, 15 bp, Homo sapiens
gccagaaaggttcaa

SEQ ID NO: 609984 - DNA, 15 bp, Homo sapiens
ccagaaaggttcaag

SEQ ID NO: 609985 - DNA, 15 bp, Homo sapiens
cagaaaggttcaagg

SEQ ID NO: 609986 - DNA, 15 bp, Homo sapiens
agaaaggttcaaggc

SEQ ID NO: 609987 - DNA, 15 bp, Homo sapiens
gaaaggttcaaggct

SEQ ID NO: 609988 - DNA, 15 bp, Homo sapiens
aaaggttcaaggcta

SEQ ID NO: 609989 - DNA, 15 bp, Homo sapiens
aaggttcaaggctag

SEQ ID NO: 609990 - DNA, 15 bp, Homo sapiens
aggttcaaggctagg

SEQ ID NO: 609991 - DNA, 15 bp, Homo sapiens
ggttcaaggctagga

SEQ ID NO: 609992 - DNA, 15 bp, Homo sapiens
gttcaaggctaggaa

SEQ ID NO: 609993 - DNA, 15 bp, Homo sapiens
ttcaaggctaggaat

SEQ ID NO: 609994 - DNA, 15 bp, Homo sapiens
tcaaggctaggaatg

SEQ ID NO: 609995 - DNA, 15 bp, Homo sapiens
caaggctaggaatgt

SEQ ID NO: 609996 - DNA, 15 bp, Homo sapiens
aaggctaggaatgtt

SEQ ID NO: 609997 - DNA, 15 bp, Homo sapiens
aggctaggaatgttt

SEQ ID NO: 609998 - DNA, 15 bp, Homo sapiens
ggctaggaatgtttc

SEQ ID NO: 609999 - DNA, 15 bp, Homo sapiens
gctaggaatgtttct

SEQ ID NO: 610000 - DNA, 15 bp, Homo sapiens
ctaggaatgtttctc

SEQ ID NO: 610001 - DNA, 15 bp, Homo sapiens
taggaatgtttctct

SEQ ID NO: 610002 - DNA, 15 bp, Homo sapiens
aggaatgtttctctc

SEQ ID NO: 610003 - DNA, 15 bp, Homo sapiens
ggaatgtttctctct

SEQ ID NO: 610004 - DNA, 15 bp, Homo sapiens
gaatgtttctctctc

SEQ ID NO: 610005 - DNA, 15 bp, Homo sapiens
aatgtttctctctct

SEQ ID NO: 610006 - DNA, 15 bp, Homo sapiens
atgtttctctctctc

SEQ ID NO: 610007 - DNA, 15 bp, Homo sapiens
tgtttctctctctct

SEQ ID NO: 610008 - DNA, 15 bp, Homo sapiens
gtttctctctctctt

SEQ ID NO: 610009 - DNA, 15 bp, Homo sapiens
tttctctctctcttt

SEQ ID NO: 610010 - DNA, 15 bp, Homo sapiens
ttctctctctcttta

SEQ ID NO: 610011 - DNA, 15 bp, Homo sapiens
tctctctctctttaa

SEQ ID NO: 610012 - DNA, 15 bp, Homo sapiens
ctctctctctttaaa

SEQ ID NO: 610013 - DNA, 15 bp, Homo sapiens
tctctctctttaaag

SEQ ID NO: 610014 - DNA, 15 bp, Homo sapiens
ctctctctttaaagc

SEQ ID NO: 610015 - DNA, 15 bp, Homo sapiens
tctctctttaaagct

SEQ ID NO: 610016 - DNA, 15 bp, Homo sapiens
ctctctttaaagctc

SEQ ID NO: 610017 - DNA, 15 bp, Homo sapiens
tctctttaaagctct

SEQ ID NO: 610018 - DNA, 15 bp, Homo sapiens
ctctttaaagctctt

SEQ ID NO: 610019 - DNA, 15 bp, Homo sapiens
tctttaaagctcttt

SEQ ID NO: 610020 - DNA, 15 bp, Homo sapiens
ctttaaagctcttta

SEQ ID NO: 610021 - DNA, 15 bp, Homo sapiens
tttaaagctctttaa

SEQ ID NO: 610022 - DNA, 15 bp, Homo sapiens
ttaaagctctttaat

SEQ ID NO: 610023 - DNA, 15 bp, Homo sapiens
taaagctctttaatc

SEQ ID NO: 610024 - DNA, 15 bp, Homo sapiens
aaagctctttaatcg

SEQ ID NO: 610025 - DNA, 15 bp, Homo sapiens
aagctctttaatcgt

SEQ ID NO: 610026 - DNA, 15 bp, Homo sapiens
agctctttaatcgtc

SEQ ID NO: 610027 - DNA, 15 bp, Homo sapiens
gctctttaatcgtca

SEQ ID NO: 610028 - DNA, 15 bp, Homo sapiens
ctctttaatcgtcag

SEQ ID NO: 610029 - DNA, 15 bp, Homo sapiens
tctttaatcgtcagg

SEQ ID NO: 610030 - DNA, 15 bp, Homo sapiens
ctttaatcgtcaggc

SEQ ID NO: 610031 - DNA, 15 bp, Homo sapiens
tttaatcgtcaggct

SEQ ID NO: 610032 - DNA, 15 bp, Homo sapiens
ttaatcgtcaggctt

SEQ ID NO: 610033 - DNA, 15 bp, Homo sapiens
taatcgtcaggcttt

SEQ ID NO: 610034 - DNA, 15 bp, Homo sapiens
aatcgtcaggctttc

SEQ ID NO: 610035 - DNA, 15 bp, Homo sapiens
atcgtcaggctttct

SEQ ID NO: 610036 - DNA, 15 bp, Homo sapiens
tcgtcaggctttctg

SEQ ID NO: 610037 - DNA, 15 bp, Homo sapiens
cgtcaggctttctga

SEQ ID NO: 610038 - DNA, 15 bp, Homo sapiens
gtcaggctttctgat

SEQ ID NO: 610039 - DNA, 15 bp, Homo sapiens
tcaggctttctgatc

SEQ ID NO: 610040 - DNA, 15 bp, Homo sapiens
caggctttctgatct

SEQ ID NO: 610041 - DNA, 15 bp, Homo sapiens
aggctttctgatctt

SEQ ID NO: 610042 - DNA, 15 bp, Homo sapiens
ggctttctgatcttc

SEQ ID NO: 610043 - DNA, 15 bp, Homo sapiens
gctttctgatcttca

SEQ ID NO: 610044 - DNA, 15 bp, Homo sapiens
ctttctgatcttcaa

SEQ ID NO: 610045 - DNA, 15 bp, Homo sapiens
tttctgatcttcaaa

SEQ ID NO: 610046 - DNA, 15 bp, Homo sapiens
ttctgatcttcaaag

SEQ ID NO: 610047 - DNA, 15 bp, Homo sapiens
tctgatcttcaaagc

SEQ ID NO: 610048 - DNA, 15 bp, Homo sapiens
ctgatcttcaaagca

SEQ ID NO: 610049 - DNA, 15 bp, Homo sapiens
tgatcttcaaagcag

SEQ ID NO: 610050 - DNA, 15 bp, Homo sapiens
gatcttcaaagcagg

SEQ ID NO: 610051 - DNA, 15 bp, Homo sapiens
atcttcaaagcaggc

SEQ ID NO: 610052 - DNA, 15 bp, Homo sapiens
tcttcaaagcaggct

SEQ ID NO: 610053 - DNA, 15 bp, Homo sapiens
cttcaaagcaggctg

SEQ ID NO: 610054 - DNA, 15 bp, Homo sapiens
ttcaaagcaggctgt

SEQ ID NO: 610055 - DNA, 15 bp, Homo sapiens
tcaaagcaggctgta

SEQ ID NO: 610056 - DNA, 15 bp, Homo sapiens
caaagcaggctgtag

SEQ ID NO: 610057 - DNA, 15 bp, Homo sapiens
aaagcaggctgtagc

SEQ ID NO: 610058 - DNA, 15 bp, Homo sapiens
aagcaggctgtagcc

SEQ ID NO: 610059 - DNA, 15 bp, Homo sapiens
agcaggctgtagcca

SEQ ID NO: 610060 - DNA, 15 bp, Homo sapiens
gcaggctgtagccag

SEQ ID NO: 610061 - DNA, 15 bp, Homo sapiens
caggctgtagccagt

SEQ ID NO: 610062 - DNA, 15 bp, Homo sapiens
aggctgtagccagtg

SEQ ID NO: 610063 - DNA, 15 bp, Homo sapiens
ggctgtagccagtgt

SEQ ID NO: 610064 - DNA, 15 bp, Homo sapiens
gctgtagccagtgtg

SEQ ID NO: 610065 - DNA, 15 bp, Homo sapiens
ctgtagccagtgtga

SEQ ID NO: 610066 - DNA, 15 bp, Homo sapiens
tgtagccagtgtgac

SEQ ID NO: 610067 - DNA, 15 bp, Homo sapiens
gtagccagtgtgacc

SEQ ID NO: 610068 - DNA, 15 bp, Homo sapiens
tagccagtgtgaccc

SEQ ID NO: 610069 - DNA, 15 bp, Homo sapiens
agccagtgtgacccc

SEQ ID NO: 610070 - DNA, 15 bp, Homo sapiens
gccagtgtgacccca

SEQ ID NO: 610071 - DNA, 15 bp, Homo sapiens
ccagtgtgaccccac

SEQ ID NO: 610072 - DNA, 15 bp, Homo sapiens
cagtgtgaccccact

SEQ ID NO: 610073 - DNA, 15 bp, Homo sapiens
agtgtgaccccactc

SEQ ID NO: 610074 - DNA, 15 bp, Homo sapiens
gtgtgaccccactcc

SEQ ID NO: 610075 - DNA, 15 bp, Homo sapiens
tgtgaccccactccc

SEQ ID NO: 610076 - DNA, 15 bp, Homo sapiens
gtgaccccactccct

SEQ ID NO: 610077 - DNA, 15 bp, Homo sapiens
tgaccccactccctc

SEQ ID NO: 610078 - DNA, 15 bp, Homo sapiens
gaccccactccctcg

SEQ ID NO: 610079 - DNA, 15 bp, Homo sapiens
accccactccctcgc

SEQ ID NO: 610080 - DNA, 15 bp, Homo sapiens
ccccactccctcgcc

SEQ ID NO: 610081 - DNA, 15 bp, Homo sapiens
cccactccctcgcct

SEQ ID NO: 610082 - DNA, 15 bp, Homo sapiens
ccactccctcgcctc

SEQ ID NO: 610083 - DNA, 15 bp, Homo sapiens
cactccctcgcctcc

SEQ ID NO: 610084 - DNA, 15 bp, Homo sapiens
actccctcgcctccc

SEQ ID NO: 610085 - DNA, 15 bp, Homo sapiens
ctccctcgcctcccc

SEQ ID NO: 610086 - DNA, 15 bp, Homo sapiens
tccctcgcctcccca

SEQ ID NO: 610087 - DNA, 15 bp, Homo sapiens
ccctcgcctccccat

SEQ ID NO: 610088 - DNA, 15 bp, Homo sapiens
cctcgcctccccatg

SEQ ID NO: 610089 - DNA, 15 bp, Homo sapiens
ctcgcctccccatgc

SEQ ID NO: 610090 - DNA, 15 bp, Homo sapiens
tcgcctccccatgct

SEQ ID NO: 610091 - DNA, 15 bp, Homo sapiens
cgcctccccatgctg

SEQ ID NO: 610092 - DNA, 15 bp, Homo sapiens
gcctccccatgctgg

SEQ ID NO: 610093 - DNA, 15 bp, Homo sapiens
cctccccatgctgga

SEQ ID NO: 610094 - DNA, 15 bp, Homo sapiens
ctccccatgctggag

SEQ ID NO: 610095 - DNA, 15 bp, Homo sapiens
tccccatgctggaga

SEQ ID NO: 610096 - DNA, 15 bp, Homo sapiens
ccccatgctggagag

SEQ ID NO: 610097 - DNA, 15 bp, Homo sapiens
cccatgctggagagt

SEQ ID NO: 610098 - DNA, 15 bp, Homo sapiens
ccatgctggagagta

SEQ ID NO: 610099 - DNA, 15 bp, Homo sapiens
catgctggagagtaa

SEQ ID NO: 610100 - DNA, 15 bp, Homo sapiens
atgctggagagtaaa

SEQ ID NO: 610101 - DNA, 15 bp, Homo sapiens
tgctggagagtaaaa

SEQ ID NO: 610102 - DNA, 15 bp, Homo sapiens
gctggagagtaaaag

SEQ ID NO: 610103 - DNA, 15 bp, Homo sapiens
ctggagagtaaaagc

SEQ ID NO: 610104 - DNA, 15 bp, Homo sapiens
tggagagtaaaagcc

SEQ ID NO: 610105 - DNA, 15 bp, Homo sapiens
ggagagtaaaagcct

SEQ ID NO: 610106 - DNA, 15 bp, Homo sapiens
gagagtaaaagcctg

SEQ ID NO: 610107 - DNA, 15 bp, Homo sapiens
agagtaaaagcctgg

SEQ ID NO: 610108 - DNA, 15 bp, Homo sapiens
gagtaaaagcctgga

SEQ ID NO: 610109 - DNA, 15 bp, Homo sapiens
agtaaaagcctggag

SEQ ID NO: 610110 - DNA, 15 bp, Homo sapiens
gtaaaagcctggagt

SEQ ID NO: 610111 - DNA, 15 bp, Homo sapiens
taaaagcctggagta

SEQ ID NO: 610112 - DNA, 15 bp, Homo sapiens
aaaagcctggagtat

SEQ ID NO: 610113 - DNA, 15 bp, Homo sapiens
aaagcctggagtatt

SEQ ID NO: 610114 - DNA, 15 bp, Homo sapiens
aagcctggagtattt

SEQ ID NO: 610115 - DNA, 15 bp, Homo sapiens
agcctggagtatttt

SEQ ID NO: 610116 - DNA, 15 bp, Homo sapiens
gcctggagtattttt

SEQ ID NO: 610117 - DNA, 15 bp, Homo sapiens
cctggagtatttttg

SEQ ID NO: 610118 - DNA, 15 bp, Homo sapiens
ctggagtatttttgt

SEQ ID NO: 610119 - DNA, 15 bp, Homo sapiens
tggagtatttttgtc

SEQ ID NO: 610120 - DNA, 15 bp, Homo sapiens
ggagtatttttgtca

SEQ ID NO: 610121 - DNA, 15 bp, Homo sapiens
gagtatttttgtcat

SEQ ID NO: 610122 - DNA, 15 bp, Homo sapiens
agtatttttgtcatt

SEQ ID NO: 610123 - DNA, 15 bp, Homo sapiens
gtatttttgtcattt

SEQ ID NO: 610124 - DNA, 15 bp, Homo sapiens
tatttttgtcatttt

SEQ ID NO: 610125 - DNA, 15 bp, Homo sapiens
atttttgtcattttg

SEQ ID NO: 610126 - DNA, 15 bp, Homo sapiens
tttttgtcattttga

SEQ ID NO: 610127 - DNA, 15 bp, Homo sapiens
ttttgtcattttgaa

SEQ ID NO: 610128 - DNA, 15 bp, Homo sapiens
tttgtcattttgaag

SEQ ID NO: 610129 - DNA, 15 bp, Homo sapiens
ttgtcattttgaaga

SEQ ID NO: 610130 - DNA, 15 bp, Homo sapiens
tgtcattttgaagac

SEQ ID NO: 610131 - DNA, 15 bp, Homo sapiens
gtcattttgaagact

SEQ ID NO: 610132 - DNA, 15 bp, Homo sapiens
tcattttgaagactt

SEQ ID NO: 610133 - DNA, 15 bp, Homo sapiens
cattttgaagacttg

SEQ ID NO: 610134 - DNA, 15 bp, Homo sapiens
attttgaagacttgc

SEQ ID NO: 610135 - DNA, 15 bp, Homo sapiens
ttttgaagacttgca

SEQ ID NO: 610136 - DNA, 15 bp, Homo sapiens
tttgaagacttgcat

SEQ ID NO: 610137 - DNA, 15 bp, Homo sapiens
ttgaagacttgcata

SEQ ID NO: 610138 - DNA, 15 bp, Homo sapiens
tgaagacttgcatat

SEQ ID NO: 610139 - DNA, 15 bp, Homo sapiens
gaagacttgcatatt

SEQ ID NO: 610140 - DNA, 15 bp, Homo sapiens
aagacttgcatattt

SEQ ID NO: 610141 - DNA, 15 bp, Homo sapiens
agacttgcatatttg

SEQ ID NO: 610142 - DNA, 15 bp, Homo sapiens
gacttgcatatttgg

SEQ ID NO: 610143 - DNA, 15 bp, Homo sapiens
acttgcatatttgga

SEQ ID NO: 610144 - DNA, 15 bp, Homo sapiens
cttgcatatttggac

SEQ ID NO: 610145 - DNA, 15 bp, Homo sapiens
ttgcatatttggaca

SEQ ID NO: 610146 - DNA, 15 bp, Homo sapiens
tgcatatttggacag

SEQ ID NO: 610147 - DNA, 15 bp, Homo sapiens
gcatatttggacagc

SEQ ID NO: 610148 - DNA, 15 bp, Homo sapiens
catatttggacagcc

SEQ ID NO: 610149 - DNA, 15 bp, Homo sapiens
atatttggacagcct

SEQ ID NO: 610150 - DNA, 15 bp, Homo sapiens
tatttggacagcctt

SEQ ID NO: 610151 - DNA, 15 bp, Homo sapiens
atttggacagccttg

SEQ ID NO: 610152 - DNA, 15 bp, Homo sapiens
tttggacagccttgg

SEQ ID NO: 610153 - DNA, 15 bp, Homo sapiens
ttggacagccttgga

SEQ ID NO: 610154 - DNA, 15 bp, Homo sapiens
tggacagccttggac

SEQ ID NO: 610155 - DNA, 15 bp, Homo sapiens
ggacagccttggaca

SEQ ID NO: 610156 - DNA, 15 bp, Homo sapiens
gacagccttggacat

SEQ ID NO: 610157 - DNA, 15 bp, Homo sapiens
acagccttggacatc

SEQ ID NO: 610158 - DNA, 15 bp, Homo sapiens
cagccttggacatct

SEQ ID NO: 610159 - DNA, 15 bp, Homo sapiens
agccttggacatctg

SEQ ID NO: 610160 - DNA, 15 bp, Homo sapiens
gccttggacatctgg

SEQ ID NO: 610161 - DNA, 15 bp, Homo sapiens
ccttggacatctgga

SEQ ID NO: 610162 - DNA, 15 bp, Homo sapiens
cttggacatctggaa

SEQ ID NO: 610163 - DNA, 15 bp, Homo sapiens
ttggacatctggaaa

SEQ ID NO: 610164 - DNA, 15 bp, Homo sapiens
tggacatctggaaag

SEQ ID NO: 610165 - DNA, 15 bp, Homo sapiens
ggacatctggaaagt

SEQ ID NO: 610166 - DNA, 15 bp, Homo sapiens
gacatctggaaagtg

SEQ ID NO: 610167 - DNA, 15 bp, Homo sapiens
acatctggaaagtgt

SEQ ID NO: 610168 - DNA, 15 bp, Homo sapiens
catctggaaagtgtg

SEQ ID NO: 610169 - DNA, 15 bp, Homo sapiens
atctggaaagtgtgg

SEQ ID NO: 610170 - DNA, 15 bp, Homo sapiens
tctggaaagtgtggt

SEQ ID NO: 610171 - DNA, 15 bp, Homo sapiens
ctggaaagtgtggtc

SEQ ID NO: 610172 - DNA, 15 bp, Homo sapiens
tggaaagtgtggtcc

SEQ ID NO: 610173 - DNA, 15 bp, Homo sapiens
ggaaagtgtggtcct

SEQ ID NO: 610174 - DNA, 15 bp, Homo sapiens
gaaagtgtggtcctc

SEQ ID NO: 610175 - DNA, 15 bp, Homo sapiens
aaagtgtggtcctca

SEQ ID NO: 610176 - DNA, 15 bp, Homo sapiens
aagtgtggtcctcac

SEQ ID NO: 610177 - DNA, 15 bp, Homo sapiens
agtgtggtcctcact

SEQ ID NO: 610178 - DNA, 15 bp, Homo sapiens
gtgtggtcctcacta

SEQ ID NO: 610179 - DNA, 15 bp, Homo sapiens
tgtggtcctcactag

SEQ ID NO: 610180 - DNA, 15 bp, Homo sapiens
gtggtcctcactagc

SEQ ID NO: 610181 - DNA, 15 bp, Homo sapiens
tggtcctcactagct

SEQ ID NO: 610182 - DNA, 15 bp, Homo sapiens
ggtcctcactagctc

SEQ ID NO: 610183 - DNA, 15 bp, Homo sapiens
gtcctcactagctct

SEQ ID NO: 610184 - DNA, 15 bp, Homo sapiens
tcctcactagctctg

SEQ ID NO: 610185 - DNA, 15 bp, Homo sapiens
cctcactagctctgc

SEQ ID NO: 610186 - DNA, 15 bp, Homo sapiens
ctcactagctctgca

SEQ ID NO: 610187 - DNA, 15 bp, Homo sapiens
tcactagctctgcag

SEQ ID NO: 610188 - DNA, 15 bp, Homo sapiens
cactagctctgcagg

SEQ ID NO: 610189 - DNA, 15 bp, Homo sapiens
actagctctgcaggg

SEQ ID NO: 610190 - DNA, 15 bp, Homo sapiens
ctagctctgcaggga

SEQ ID NO: 610191 - DNA, 15 bp, Homo sapiens
tagctctgcagggat

SEQ ID NO: 610192 - DNA, 15 bp, Homo sapiens
agctctgcagggata

SEQ ID NO: 610193 - DNA, 15 bp, Homo sapiens
gctctgcagggataa

SEQ ID NO: 610194 - DNA, 15 bp, Homo sapiens
ctctgcagggataag

SEQ ID NO: 610195 - DNA, 15 bp, Homo sapiens
tctgcagggataaga

SEQ ID NO: 610196 - DNA, 15 bp, Homo sapiens
ctgcagggataagag

SEQ ID NO: 610197 - DNA, 15 bp, Homo sapiens
tgcagggataagagc

SEQ ID NO: 610198 - DNA, 15 bp, Homo sapiens
gcagggataagagca

SEQ ID NO: 610199 - DNA, 15 bp, Homo sapiens
cagggataagagcac

SEQ ID NO: 610200 - DNA, 15 bp, Homo sapiens
agggataagagcacg

SEQ ID NO: 610201 - DNA, 15 bp, Homo sapiens
gggataagagcacgt

SEQ ID NO: 610202 - DNA, 15 bp, Homo sapiens
ggataagagcacgtc

SEQ ID NO: 610203 - DNA, 15 bp, Homo sapiens
gataagagcacgtca

SEQ ID NO: 610204 - DNA, 15 bp, Homo sapiens
ataagagcacgtcag

SEQ ID NO: 610205 - DNA, 15 bp, Homo sapiens
taagagcacgtcagc

SEQ ID NO: 610206 - DNA, 15 bp, Homo sapiens
aagagcacgtcagca

SEQ ID NO: 610207 - DNA, 15 bp, Homo sapiens
agagcacgtcagcac

SEQ ID NO: 610208 - DNA, 15 bp, Homo sapiens
gagcacgtcagcact

SEQ ID NO: 610209 - DNA, 15 bp, Homo sapiens
agcacgtcagcactt

SEQ ID NO: 610210 - DNA, 15 bp, Homo sapiens
gcacgtcagcacttc

SEQ ID NO: 610211 - DNA, 15 bp, Homo sapiens
cacgtcagcacttcc

SEQ ID NO: 610212 - DNA, 15 bp, Homo sapiens
acgtcagcacttcca

SEQ ID NO: 610213 - DNA, 15 bp, Homo sapiens
cgtcagcacttccaa

SEQ ID NO: 610214 - DNA, 15 bp, Homo sapiens
gtcagcacttccaag

SEQ ID NO: 610215 - DNA, 15 bp, Homo sapiens
tcagcacttccaagc

SEQ ID NO: 610216 - DNA, 15 bp, Homo sapiens
cagcacttccaagct

SEQ ID NO: 610217 - DNA, 15 bp, Homo sapiens
agcacttccaagctc

SEQ ID NO: 610218 - DNA, 15 bp, Homo sapiens
gcacttccaagctct

SEQ ID NO: 610219 - DNA, 15 bp, Homo sapiens
cacttccaagctctc

SEQ ID NO: 610220 - DNA, 15 bp, Homo sapiens
acttccaagctctct

SEQ ID NO: 610221 - DNA, 15 bp, Homo sapiens
cttccaagctctctg

SEQ ID NO: 610222 - DNA, 15 bp, Homo sapiens
ttccaagctctctgg

SEQ ID NO: 610223 - DNA, 15 bp, Homo sapiens
tccaagctctctggc

SEQ ID NO: 610224 - DNA, 15 bp, Homo sapiens
ccaagctctctggcg

SEQ ID NO: 610225 - DNA, 15 bp, Homo sapiens
caagctctctggcgc

SEQ ID NO: 610226 - DNA, 15 bp, Homo sapiens
aagctctctggcgcc

SEQ ID NO: 610227 - DNA, 15 bp, Homo sapiens
agctctctggcgccc

SEQ ID NO: 610228 - DNA, 15 bp, Homo sapiens
gctctctggcgcccc

SEQ ID NO: 610229 - DNA, 15 bp, Homo sapiens
ctctctggcgcccct

SEQ ID NO: 610230 - DNA, 15 bp, Homo sapiens
tctctggcgccccta

SEQ ID NO: 610231 - DNA, 15 bp, Homo sapiens
ctctggcgcccctac

SEQ ID NO: 610232 - DNA, 15 bp, Homo sapiens
tctggcgcccctaca

SEQ ID NO: 610233 - DNA, 15 bp, Homo sapiens
ctggcgcccctacat

SEQ ID NO: 610234 - DNA, 15 bp, Homo sapiens
tggcgcccctacatc

SEQ ID NO: 610235 - DNA, 15 bp, Homo sapiens
ggcgcccctacatct

SEQ ID NO: 610236 - DNA, 15 bp, Homo sapiens
gcgcccctacatctg

SEQ ID NO: 610237 - DNA, 15 bp, Homo sapiens
cgcccctacatctgg

SEQ ID NO: 610238 - DNA, 15 bp, Homo sapiens
gcccctacatctgga

SEQ ID NO: 610239 - DNA, 15 bp, Homo sapiens
cccctacatctggac

SEQ ID NO: 610240 - DNA, 15 bp, Homo sapiens
ccctacatctggaca

SEQ ID NO: 610241 - DNA, 15 bp, Homo sapiens
cctacatctggacac

SEQ ID NO: 610242 - DNA, 15 bp, Homo sapiens
ctacatctggacacg

SEQ ID NO: 610243 - DNA, 15 bp, Homo sapiens
tacatctggacacgt

SEQ ID NO: 610244 - DNA, 15 bp, Homo sapiens
acatctggacacgtt

SEQ ID NO: 610245 - DNA, 15 bp, Homo sapiens
catctggacacgttg

SEQ ID NO: 610246 - DNA, 15 bp, Homo sapiens
atctggacacgttga

SEQ ID NO: 610247 - DNA, 15 bp, Homo sapiens
tctggacacgttgaa

SEQ ID NO: 610248 - DNA, 15 bp, Homo sapiens
ctggacacgttgaaa

SEQ ID NO: 610249 - DNA, 15 bp, Homo sapiens
tggacacgttgaaaa

SEQ ID NO: 610250 - DNA, 15 bp, Homo sapiens
ggacacgttgaaaaa

SEQ ID NO: 610251 - DNA, 15 bp, Homo sapiens
gacacgttgaaaaat

SEQ ID NO: 610252 - DNA, 15 bp, Homo sapiens
acacgttgaaaaatt

SEQ ID NO: 610253 - DNA, 15 bp, Homo sapiens
cacgttgaaaaatta

SEQ ID NO: 610254 - DNA, 15 bp, Homo sapiens
acgttgaaaaattaa

SEQ ID NO: 610255 - DNA, 15 bp, Homo sapiens
cgttgaaaaattaac

SEQ ID NO: 610256 - DNA, 15 bp, Homo sapiens
gttgaaaaattaaca

SEQ ID NO: 610257 - DNA, 15 bp, Homo sapiens
ttgaaaaattaacac

SEQ ID NO: 610258 - DNA, 15 bp, Homo sapiens
tgaaaaattaacacc

SEQ ID NO: 610259 - DNA, 15 bp, Homo sapiens
gaaaaattaacacca

SEQ ID NO: 610260 - DNA, 15 bp, Homo sapiens
aaaaattaacaccag

SEQ ID NO: 610261 - DNA, 15 bp, Homo sapiens
aaaattaacaccaga

SEQ ID NO: 610262 - DNA, 15 bp, Homo sapiens
aaattaacaccagac

SEQ ID NO: 610263 - DNA, 15 bp, Homo sapiens
aattaacaccagact

SEQ ID NO: 610264 - DNA, 15 bp, Homo sapiens
attaacaccagactc

SEQ ID NO: 610265 - DNA, 15 bp, Homo sapiens
ttaacaccagactct

SEQ ID NO: 610266 - DNA, 15 bp, Homo sapiens
taacaccagactctg

SEQ ID NO: 610267 - DNA, 15 bp, Homo sapiens
aacaccagactctgg

SEQ ID NO: 610268 - DNA, 15 bp, Homo sapiens
acaccagactctgga

SEQ ID NO: 610269 - DNA, 15 bp, Homo sapiens
caccagactctggag

SEQ ID NO: 610270 - DNA, 15 bp, Homo sapiens
accagactctggagt

SEQ ID NO: 610271 - DNA, 15 bp, Homo sapiens
ccagactctggagtt

SEQ ID NO: 610272 - DNA, 15 bp, Homo sapiens
cagactctggagtta

SEQ ID NO: 610273 - DNA, 15 bp, Homo sapiens
agactctggagttaa

SEQ ID NO: 610274 - DNA, 15 bp, Homo sapiens
gactctggagttaag

SEQ ID NO: 610275 - DNA, 15 bp, Homo sapiens
actctggagttaagc

SEQ ID NO: 610276 - DNA, 15 bp, Homo sapiens
ctctggagttaagca

SEQ ID NO: 610277 - DNA, 15 bp, Homo sapiens
tctggagttaagcaa

SEQ ID NO: 610278 - DNA, 15 bp, Homo sapiens
ctggagttaagcaaa

SEQ ID NO: 610279 - DNA, 15 bp, Homo sapiens
tggagttaagcaaac

SEQ ID NO: 610280 - DNA, 15 bp, Homo sapiens
ggagttaagcaaaca

SEQ ID NO: 610281 - DNA, 15 bp, Homo sapiens
gagttaagcaaacat

SEQ ID NO: 610282 - DNA, 15 bp, Homo sapiens
agttaagcaaacatt

SEQ ID NO: 610283 - DNA, 15 bp, Homo sapiens
gttaagcaaacatta

SEQ ID NO: 610284 - DNA, 15 bp, Homo sapiens
ttaagcaaacattaa

SEQ ID NO: 610285 - DNA, 15 bp, Homo sapiens
taagcaaacattaag

SEQ ID NO: 610286 - DNA, 15 bp, Homo sapiens
aagcaaacattaagt

SEQ ID NO: 610287 - DNA, 15 bp, Homo sapiens
agcaaacattaagtt

SEQ ID NO: 610288 - DNA, 15 bp, Homo sapiens
gcaaacattaagttt

SEQ ID NO: 610289 - DNA, 15 bp, Homo sapiens
caaacattaagttta

SEQ ID NO: 610290 - DNA, 15 bp, Homo sapiens
aaacattaagtttat

SEQ ID NO: 610291 - DNA, 15 bp, Homo sapiens
aacattaagtttata

SEQ ID NO: 610292 - DNA, 15 bp, Homo sapiens
acattaagtttatag

SEQ ID NO: 610293 - DNA, 15 bp, Homo sapiens
cattaagtttatagg

SEQ ID NO: 610294 - DNA, 15 bp, Homo sapiens
attaagtttataggc

SEQ ID NO: 610295 - DNA, 15 bp, Homo sapiens
ttaagtttataggcc

SEQ ID NO: 610296 - DNA, 15 bp, Homo sapiens
taagtttataggcct

SEQ ID NO: 610297 - DNA, 15 bp, Homo sapiens
aagtttataggcctc

SEQ ID NO: 610298 - DNA, 15 bp, Homo sapiens
agtttataggcctcc

SEQ ID NO: 610299 - DNA, 15 bp, Homo sapiens
gtttataggcctcct

SEQ ID NO: 610300 - DNA, 15 bp, Homo sapiens
tttataggcctcctt

SEQ ID NO: 610301 - DNA, 15 bp, Homo sapiens
ttataggcctccttg

SEQ ID NO: 610302 - DNA, 15 bp, Homo sapiens
tataggcctccttgc

SEQ ID NO: 610303 - DNA, 15 bp, Homo sapiens
ataggcctccttgca

SEQ ID NO: 610304 - DNA, 15 bp, Homo sapiens
taggcctccttgcat

SEQ ID NO: 610305 - DNA, 15 bp, Homo sapiens
aggcctccttgcatt

SEQ ID NO: 610306 - DNA, 15 bp, Homo sapiens
ggcctccttgcattt

SEQ ID NO: 610307 - DNA, 15 bp, Homo sapiens
gcctccttgcatttg

SEQ ID NO: 610308 - DNA, 15 bp, Homo sapiens
cctccttgcatttga

SEQ ID NO: 610309 - DNA, 15 bp, Homo sapiens
ctccttgcatttgac

SEQ ID NO: 610310 - DNA, 15 bp, Homo sapiens
tccttgcatttgacc

SEQ ID NO: 610311 - DNA, 15 bp, Homo sapiens
ccttgcatttgacca

SEQ ID NO: 610312 - DNA, 15 bp, Homo sapiens
cttgcatttgaccat

SEQ ID NO: 610313 - DNA, 15 bp, Homo sapiens
ttgcatttgaccatt

SEQ ID NO: 610314 - DNA, 15 bp, Homo sapiens
tgcatttgaccattt

SEQ ID NO: 610315 - DNA, 15 bp, Homo sapiens
gcatttgaccatttc

SEQ ID NO: 610316 - DNA, 15 bp, Homo sapiens
catttgaccatttcc

SEQ ID NO: 610317 - DNA, 15 bp, Homo sapiens
atttgaccatttcct

SEQ ID NO: 610318 - DNA, 15 bp, Homo sapiens
tttgaccatttcctg

SEQ ID NO: 610319 - DNA, 15 bp, Homo sapiens
ttgaccatttcctgg

SEQ ID NO: 610320 - DNA, 15 bp, Homo sapiens
tgaccatttcctggg

SEQ ID NO: 610321 - DNA, 15 bp, Homo sapiens
gaccatttcctggga

SEQ ID NO: 610322 - DNA, 15 bp, Homo sapiens
accatttcctgggac

SEQ ID NO: 610323 - DNA, 15 bp, Homo sapiens
ccatttcctgggaca

SEQ ID NO: 610324 - DNA, 15 bp, Homo sapiens
catttcctgggacag

SEQ ID NO: 610325 - DNA, 15 bp, Homo sapiens
atttcctgggacagc

SEQ ID NO: 610326 - DNA, 15 bp, Homo sapiens
tttcctgggacagca

SEQ ID NO: 610327 - DNA, 15 bp, Homo sapiens
ttcctgggacagcag

SEQ ID NO: 610328 - DNA, 15 bp, Homo sapiens
tcctgggacagcagc

SEQ ID NO: 610329 - DNA, 15 bp, Homo sapiens
cctgggacagcagcc

SEQ ID NO: 610330 - DNA, 15 bp, Homo sapiens
ctgggacagcagccc

SEQ ID NO: 610331 - DNA, 15 bp, Homo sapiens
tgggacagcagccct

SEQ ID NO: 610332 - DNA, 15 bp, Homo sapiens
gggacagcagccctt

SEQ ID NO: 610333 - DNA, 15 bp, Homo sapiens
ggacagcagccctta

SEQ ID NO: 610334 - DNA, 15 bp, Homo sapiens
gacagcagcccttat

SEQ ID NO: 610335 - DNA, 15 bp, Homo sapiens
acagcagcccttatc

SEQ ID NO: 610336 - DNA, 15 bp, Homo sapiens
cagcagcccttatcc

SEQ ID NO: 610337 - DNA, 15 bp, Homo sapiens
agcagcccttatcct

SEQ ID NO: 610338 - DNA, 15 bp, Homo sapiens
gcagcccttatcctg

SEQ ID NO: 610339 - DNA, 15 bp, Homo sapiens
cagcccttatcctgt

SEQ ID NO: 610340 - DNA, 15 bp, Homo sapiens
agcccttatcctgtg

SEQ ID NO: 610341 - DNA, 15 bp, Homo sapiens
gcccttatcctgtga

SEQ ID NO: 610342 - DNA, 15 bp, Homo sapiens
cccttatcctgtgac

SEQ ID NO: 610343 - DNA, 15 bp, Homo sapiens
ccttatcctgtgact

SEQ ID NO: 610344 - DNA, 15 bp, Homo sapiens
cttatcctgtgactt

SEQ ID NO: 610345 - DNA, 15 bp, Homo sapiens
ttatcctgtgacttt

SEQ ID NO: 610346 - DNA, 15 bp, Homo sapiens
tatcctgtgactttc

SEQ ID NO: 610347 - DNA, 15 bp, Homo sapiens
atcctgtgactttct

SEQ ID NO: 610348 - DNA, 15 bp, Homo sapiens
tcctgtgactttctg

SEQ ID NO: 610349 - DNA, 15 bp, Homo sapiens
cctgtgactttctgt

SEQ ID NO: 610350 - DNA, 15 bp, Homo sapiens
ctgtgactttctgtg

SEQ ID NO: 610351 - DNA, 15 bp, Homo sapiens
tgtgactttctgtgt

SEQ ID NO: 610352 - DNA, 15 bp, Homo sapiens
gtgactttctgtgtg

SEQ ID NO: 610353 - DNA, 15 bp, Homo sapiens
tgactttctgtgtgt

SEQ ID NO: 610354 - DNA, 15 bp, Homo sapiens
gactttctgtgtgta

SEQ ID NO: 610355 - DNA, 15 bp, Homo sapiens
actttctgtgtgtag

SEQ ID NO: 610356 - DNA, 15 bp, Homo sapiens
ctttctgtgtgtaga

SEQ ID NO: 610357 - DNA, 15 bp, Homo sapiens
tttctgtgtgtagag

SEQ ID NO: 610358 - DNA, 15 bp, Homo sapiens
ttctgtgtgtagagt

SEQ ID NO: 610359 - DNA, 15 bp, Homo sapiens
tctgtgtgtagagtt

SEQ ID NO: 610360 - DNA, 15 bp, Homo sapiens
ctgtgtgtagagttg

SEQ ID NO: 610361 - DNA, 15 bp, Homo sapiens
tgtgtgtagagttga

SEQ ID NO: 610362 - DNA, 15 bp, Homo sapiens
gtgtgtagagttgag

SEQ ID NO: 610363 - DNA, 15 bp, Homo sapiens
tgtgtagagttgagt

SEQ ID NO: 610364 - DNA, 15 bp, Homo sapiens
gtgtagagttgagtc

SEQ ID NO: 610365 - DNA, 15 bp, Homo sapiens
tgtagagttgagtct

SEQ ID NO: 610366 - DNA, 15 bp, Homo sapiens
gtagagttgagtctt

SEQ ID NO: 610367 - DNA, 15 bp, Homo sapiens
tagagttgagtcttt

SEQ ID NO: 610368 - DNA, 15 bp, Homo sapiens
agagttgagtctttg

SEQ ID NO: 610369 - DNA, 15 bp, Homo sapiens
gagttgagtctttgc

SEQ ID NO: 610370 - DNA, 15 bp, Homo sapiens
agttgagtctttgca

SEQ ID NO: 610371 - DNA, 15 bp, Homo sapiens
gttgagtctttgcag

SEQ ID NO: 610372 - DNA, 15 bp, Homo sapiens
ttgagtctttgcagt

SEQ ID NO: 610373 - DNA, 15 bp, Homo sapiens
tgagtctttgcagtt

SEQ ID NO: 610374 - DNA, 15 bp, Homo sapiens
gagtctttgcagttg

SEQ ID NO: 610375 - DNA, 15 bp, Homo sapiens
agtctttgcagttgg

SEQ ID NO: 610376 - DNA, 15 bp, Homo sapiens
gtctttgcagttggt

SEQ ID NO: 610377 - DNA, 15 bp, Homo sapiens
tctttgcagttggtc

SEQ ID NO: 610378 - DNA, 15 bp, Homo sapiens
ctttgcagttggtcc

SEQ ID NO: 610379 - DNA, 15 bp, Homo sapiens
tttgcagttggtcct

SEQ ID NO: 610380 - DNA, 15 bp, Homo sapiens
ttgcagttggtcctc

SEQ ID NO: 610381 - DNA, 15 bp, Homo sapiens
tgcagttggtcctcc

SEQ ID NO: 610382 - DNA, 15 bp, Homo sapiens
gcagttggtcctcct

SEQ ID NO: 610383 - DNA, 15 bp, Homo sapiens
cagttggtcctcctc

SEQ ID NO: 610384 - DNA, 15 bp, Homo sapiens
agttggtcctcctca

SEQ ID NO: 610385 - DNA, 15 bp, Homo sapiens
gttggtcctcctcac

SEQ ID NO: 610386 - DNA, 15 bp, Homo sapiens
ttggtcctcctcaca

SEQ ID NO: 610387 - DNA, 15 bp, Homo sapiens
tggtcctcctcacac

SEQ ID NO: 610388 - DNA, 15 bp, Homo sapiens
ggtcctcctcacact

SEQ ID NO: 610389 - DNA, 15 bp, Homo sapiens
gtcctcctcacactc

SEQ ID NO: 610390 - DNA, 15 bp, Homo sapiens
tcctcctcacactct

SEQ ID NO: 610391 - DNA, 15 bp, Homo sapiens
cctcctcacactctc

SEQ ID NO: 610392 - DNA, 15 bp, Homo sapiens
ctcctcacactctct

SEQ ID NO: 610393 - DNA, 15 bp, Homo sapiens
tcctcacactctctc

SEQ ID NO: 610394 - DNA, 15 bp, Homo sapiens
cctcacactctctca

SEQ ID NO: 610395 - DNA, 15 bp, Homo sapiens
ctcacactctctcaa

SEQ ID NO: 610396 - DNA, 15 bp, Homo sapiens
tcacactctctcaac

SEQ ID NO: 610397 - DNA, 15 bp, Homo sapiens
cacactctctcaact

SEQ ID NO: 610398 - DNA, 15 bp, Homo sapiens
acactctctcaactt

SEQ ID NO: 610399 - DNA, 15 bp, Homo sapiens
cactctctcaacttt

SEQ ID NO: 610400 - DNA, 15 bp, Homo sapiens
actctctcaactttg

SEQ ID NO: 610401 - DNA, 15 bp, Homo sapiens
ctctctcaactttgt

SEQ ID NO: 610402 - DNA, 15 bp, Homo sapiens
tctctcaactttgtg

SEQ ID NO: 610403 - DNA, 15 bp, Homo sapiens
ctctcaactttgtga

SEQ ID NO: 610404 - DNA, 15 bp, Homo sapiens
tctcaactttgtgac

SEQ ID NO: 610405 - DNA, 15 bp, Homo sapiens
ctcaactttgtgact

SEQ ID NO: 610406 - DNA, 15 bp, Homo sapiens
tcaactttgtgactc

SEQ ID NO: 610407 - DNA, 15 bp, Homo sapiens
caactttgtgactct

SEQ ID NO: 610408 - DNA, 15 bp, Homo sapiens
aactttgtgactctc

SEQ ID NO: 610409 - DNA, 15 bp, Homo sapiens
actttgtgactctct

SEQ ID NO: 610410 - DNA, 15 bp, Homo sapiens
ctttgtgactctctg

SEQ ID NO: 610411 - DNA, 15 bp, Homo sapiens
tttgtgactctctgc

SEQ ID NO: 610412 - DNA, 15 bp, Homo sapiens
ttgtgactctctgca

SEQ ID NO: 610413 - DNA, 15 bp, Homo sapiens
tgtgactctctgcag

SEQ ID NO: 610414 - DNA, 15 bp, Homo sapiens
gtgactctctgcagt

SEQ ID NO: 610415 - DNA, 15 bp, Homo sapiens
tgactctctgcagtg

SEQ ID NO: 610416 - DNA, 15 bp, Homo sapiens
gactctctgcagtgc

SEQ ID NO: 610417 - DNA, 15 bp, Homo sapiens
actctctgcagtgct

SEQ ID NO: 610418 - DNA, 15 bp, Homo sapiens
ctctctgcagtgctt

SEQ ID NO: 610419 - DNA, 15 bp, Homo sapiens
tctctgcagtgcttg

SEQ ID NO: 610420 - DNA, 15 bp, Homo sapiens
ctctgcagtgcttgg

SEQ ID NO: 610421 - DNA, 15 bp, Homo sapiens
tctgcagtgcttggt

SEQ ID NO: 610422 - DNA, 15 bp, Homo sapiens
ctgcagtgcttggtc

SEQ ID NO: 610423 - DNA, 15 bp, Homo sapiens
tgcagtgcttggtcc

SEQ ID NO: 610424 - DNA, 15 bp, Homo sapiens
gcagtgcttggtcct

SEQ ID NO: 610425 - DNA, 15 bp, Homo sapiens
cagtgcttggtcctg

SEQ ID NO: 610426 - DNA, 15 bp, Homo sapiens
agtgcttggtcctgg

SEQ ID NO: 610427 - DNA, 15 bp, Homo sapiens
gtgcttggtcctgga

SEQ ID NO: 610428 - DNA, 15 bp, Homo sapiens
tgcttggtcctggat

SEQ ID NO: 610429 - DNA, 15 bp, Homo sapiens
gcttggtcctggata

SEQ ID NO: 610430 - DNA, 15 bp, Homo sapiens
cttggtcctggataa

SEQ ID NO: 610431 - DNA, 15 bp, Homo sapiens
ttggtcctggataag

SEQ ID NO: 610432 - DNA, 15 bp, Homo sapiens
tggtcctggataagt

SEQ ID NO: 610433 - DNA, 15 bp, Homo sapiens
ggtcctggataagtt

SEQ ID NO: 610434 - DNA, 15 bp, Homo sapiens
gtcctggataagttt

SEQ ID NO: 610435 - DNA, 15 bp, Homo sapiens
tcctggataagtttg

SEQ ID NO: 610436 - DNA, 15 bp, Homo sapiens
cctggataagtttga

SEQ ID NO: 610437 - DNA, 15 bp, Homo sapiens
ctggataagtttgaa

SEQ ID NO: 610438 - DNA, 15 bp, Homo sapiens
tggataagtttgaaa

SEQ ID NO: 610439 - DNA, 15 bp, Homo sapiens
ggataagtttgaaag

SEQ ID NO: 610440 - DNA, 15 bp, Homo sapiens
gataagtttgaaagc

SEQ ID NO: 610441 - DNA, 15 bp, Homo sapiens
ataagtttgaaagct

SEQ ID NO: 610442 - DNA, 15 bp, Homo sapiens
taagtttgaaagcta

SEQ ID NO: 610443 - DNA, 15 bp, Homo sapiens
aagtttgaaagctac

SEQ ID NO: 610444 - DNA, 15 bp, Homo sapiens
agtttgaaagctaca

SEQ ID NO: 610445 - DNA, 15 bp, Homo sapiens
gtttgaaagctacaa

SEQ ID NO: 610446 - DNA, 15 bp, Homo sapiens
tttgaaagctacaat

SEQ ID NO: 610447 - DNA, 15 bp, Homo sapiens
ttgaaagctacaatg

SEQ ID NO: 610448 - DNA, 15 bp, Homo sapiens
tgaaagctacaatga

SEQ ID NO: 610449 - DNA, 15 bp, Homo sapiens
gaaagctacaatgat

SEQ ID NO: 610450 - DNA, 15 bp, Homo sapiens
aaagctacaatgatg

SEQ ID NO: 610451 - DNA, 15 bp, Homo sapiens
aagctacaatgatga

SEQ ID NO: 610452 - DNA, 15 bp, Homo sapiens
agctacaatgatgaa

SEQ ID NO: 610453 - DNA, 15 bp, Homo sapiens
gctacaatgatgaaa

SEQ ID NO: 610454 - DNA, 15 bp, Homo sapiens
ctacaatgatgaaac

SEQ ID NO: 610455 - DNA, 15 bp, Homo sapiens
tacaatgatgaaact

SEQ ID NO: 610456 - DNA, 15 bp, Homo sapiens
acaatgatgaaactc

SEQ ID NO: 610457 - DNA, 15 bp, Homo sapiens
caatgatgaaactca

SEQ ID NO: 610458 - DNA, 15 bp, Homo sapiens
aatgatgaaactcag

SEQ ID NO: 610459 - DNA, 15 bp, Homo sapiens
atgatgaaactcagc

SEQ ID NO: 610460 - DNA, 15 bp, Homo sapiens
tgatgaaactcagct

SEQ ID NO: 610461 - DNA, 15 bp, Homo sapiens
gatgaaactcagctc

SEQ ID NO: 610462 - DNA, 15 bp, Homo sapiens
atgaaactcagctca

SEQ ID NO: 610463 - DNA, 15 bp, Homo sapiens
tgaaactcagctcac

SEQ ID NO: 610464 - DNA, 15 bp, Homo sapiens
gaaactcagctcacc

SEQ ID NO: 610465 - DNA, 15 bp, Homo sapiens
aaactcagctcaccc

SEQ ID NO: 610466 - DNA, 15 bp, Homo sapiens
aactcagctcaccca

SEQ ID NO: 610467 - DNA, 15 bp, Homo sapiens
actcagctcacccaa

SEQ ID NO: 610468 - DNA, 15 bp, Homo sapiens
ctcagctcacccaac

SEQ ID NO: 610469 - DNA, 15 bp, Homo sapiens
tcagctcacccaacg

SEQ ID NO: 610470 - DNA, 15 bp, Homo sapiens
cagctcacccaacgt

SEQ ID NO: 610471 - DNA, 15 bp, Homo sapiens
agctcacccaacgtg

SEQ ID NO: 610472 - DNA, 15 bp, Homo sapiens
gctcacccaacgtgc

SEQ ID NO: 610473 - DNA, 15 bp, Homo sapiens
ctcacccaacgtgcc

SEQ ID NO: 610474 - DNA, 15 bp, Homo sapiens
tcacccaacgtgccc

SEQ ID NO: 610475 - DNA, 15 bp, Homo sapiens
cacccaacgtgccct

SEQ ID NO: 610476 - DNA, 15 bp, Homo sapiens
acccaacgtgccctc

SEQ ID NO: 610477 - DNA, 15 bp, Homo sapiens
cccaacgtgccctct

SEQ ID NO: 610478 - DNA, 15 bp, Homo sapiens
ccaacgtgccctctc

SEQ ID NO: 610479 - DNA, 15 bp, Homo sapiens
caacgtgccctctct

SEQ ID NO: 610480 - DNA, 15 bp, Homo sapiens
aacgtgccctctctc

SEQ ID NO: 610481 - DNA, 15 bp, Homo sapiens
acgtgccctctctct

SEQ ID NO: 610482 - DNA, 15 bp, Homo sapiens
cgtgccctctctcta

SEQ ID NO: 610483 - DNA, 15 bp, Homo sapiens
gtgccctctctctac

SEQ ID NO: 610484 - DNA, 15 bp, Homo sapiens
tgccctctctctact

SEQ ID NO: 610485 - DNA, 15 bp, Homo sapiens
gccctctctctactg

SEQ ID NO: 610486 - DNA, 15 bp, Homo sapiens
ccctctctctactgg

SEQ ID NO: 610487 - DNA, 15 bp, Homo sapiens
cctctctctactgga

SEQ ID NO: 610488 - DNA, 15 bp, Homo sapiens
ctctctctactggag

SEQ ID NO: 610489 - DNA, 15 bp, Homo sapiens
tctctctactggagg

SEQ ID NO: 610490 - DNA, 15 bp, Homo sapiens
ctctctactggagga

SEQ ID NO: 610491 - DNA, 15 bp, Homo sapiens
tctctactggaggaa

SEQ ID NO: 610492 - DNA, 15 bp, Homo sapiens
ctctactggaggaaa

SEQ ID NO: 610493 - DNA, 15 bp, Homo sapiens
tctactggaggaaaa

SEQ ID NO: 610494 - DNA, 15 bp, Homo sapiens
ctactggaggaaaac

SEQ ID NO: 610495 - DNA, 15 bp, Homo sapiens
tactggaggaaaaca

SEQ ID NO: 610496 - DNA, 15 bp, Homo sapiens
actggaggaaaacat

SEQ ID NO: 610497 - DNA, 15 bp, Homo sapiens
ctggaggaaaacatg

SEQ ID NO: 610498 - DNA, 15 bp, Homo sapiens
tggaggaaaacatgt

SEQ ID NO: 610499 - DNA, 15 bp, Homo sapiens
ggaggaaaacatgtt

SEQ ID NO: 610500 - DNA, 15 bp, Homo sapiens
gaggaaaacatgttc

SEQ ID NO: 610501 - DNA, 15 bp, Homo sapiens
aggaaaacatgttct

SEQ ID NO: 610502 - DNA, 15 bp, Homo sapiens
ggaaaacatgttctg

SEQ ID NO: 610503 - DNA, 15 bp, Homo sapiens
gaaaacatgttctgg

SEQ ID NO: 610504 - DNA, 15 bp, Homo sapiens
aaaacatgttctggg

SEQ ID NO: 610505 - DNA, 15 bp, Homo sapiens
aaacatgttctgggc

SEQ ID NO: 610506 - DNA, 15 bp, Homo sapiens
aacatgttctgggcc

SEQ ID NO: 610507 - DNA, 15 bp, Homo sapiens
acatgttctgggccg

SEQ ID NO: 610508 - DNA, 15 bp, Homo sapiens
catgttctgggccgg

SEQ ID NO: 610509 - DNA, 15 bp, Homo sapiens
atgttctgggccgga

SEQ ID NO: 610510 - DNA, 15 bp, Homo sapiens
tgttctgggccggag

SEQ ID NO: 610511 - DNA, 15 bp, Homo sapiens
gttctgggccggagt

SEQ ID NO: 610512 - DNA, 15 bp, Homo sapiens
ttctgggccggagtg

SEQ ID NO: 610513 - DNA, 15 bp, Homo sapiens
tctgggccggagtgg

SEQ ID NO: 610514 - DNA, 15 bp, Homo sapiens
ctgggccggagtggt

SEQ ID NO: 610515 - DNA, 15 bp, Homo sapiens
tgggccggagtggta

SEQ ID NO: 610516 - DNA, 15 bp, Homo sapiens
gggccggagtggtat

SEQ ID NO: 610517 - DNA, 15 bp, Homo sapiens
ggccggagtggtatt

SEQ ID NO: 610518 - DNA, 15 bp, Homo sapiens
gccggagtggtattc

SEQ ID NO: 610519 - DNA, 15 bp, Homo sapiens
ccggagtggtattcc

SEQ ID NO: 610520 - DNA, 15 bp, Homo sapiens
cggagtggtattccc

SEQ ID NO: 610521 - DNA, 15 bp, Homo sapiens
ggagtggtattccct

SEQ ID NO: 610522 - DNA, 15 bp, Homo sapiens
gagtggtattccctg

SEQ ID NO: 610523 - DNA, 15 bp, Homo sapiens
agtggtattccctga

SEQ ID NO: 610524 - DNA, 15 bp, Homo sapiens
gtggtattccctgac

SEQ ID NO: 610525 - DNA, 15 bp, Homo sapiens
tggtattccctgaca

SEQ ID NO: 610526 - DNA, 15 bp, Homo sapiens
ggtattccctgacat

SEQ ID NO: 610527 - DNA, 15 bp, Homo sapiens
gtattccctgacatg

SEQ ID NO: 610528 - DNA, 15 bp, Homo sapiens
tattccctgacatgt

SEQ ID NO: 610529 - DNA, 15 bp, Homo sapiens
attccctgacatgta

SEQ ID NO: 610530 - DNA, 15 bp, Homo sapiens
ttccctgacatgtat

SEQ ID NO: 610531 - DNA, 15 bp, Homo sapiens
tccctgacatgtatc

SEQ ID NO: 610532 - DNA, 15 bp, Homo sapiens
ccctgacatgtatcc

SEQ ID NO: 610533 - DNA, 15 bp, Homo sapiens
cctgacatgtatccc

SEQ ID NO: 610534 - DNA, 15 bp, Homo sapiens
ctgacatgtatccct

SEQ ID NO: 610535 - DNA, 15 bp, Homo sapiens
tgacatgtatccctg

SEQ ID NO: 610536 - DNA, 15 bp, Homo sapiens
gacatgtatccctgg

SEQ ID NO: 610537 - DNA, 15 bp, Homo sapiens
acatgtatccctgga

SEQ ID NO: 610538 - DNA, 15 bp, Homo sapiens
catgtatccctggac

SEQ ID NO: 610539 - DNA, 15 bp, Homo sapiens
atgtatccctggacc

SEQ ID NO: 610540 - DNA, 15 bp, Homo sapiens
tgtatccctggacca

SEQ ID NO: 610541 - DNA, 15 bp, Homo sapiens
gtatccctggaccag

SEQ ID NO: 610542 - DNA, 15 bp, Homo sapiens
tatccctggaccagc

SEQ ID NO: 610543 - DNA, 15 bp, Homo sapiens
atccctggaccagct

SEQ ID NO: 610544 - DNA, 15 bp, Homo sapiens
tccctggaccagctc

SEQ ID NO: 610545 - DNA, 15 bp, Homo sapiens
ccctggaccagctct

SEQ ID NO: 610546 - DNA, 15 bp, Homo sapiens
cctggaccagctctc

SEQ ID NO: 610547 - DNA, 15 bp, Homo sapiens
ctggaccagctctct

SEQ ID NO: 610548 - DNA, 15 bp, Homo sapiens
tggaccagctctcta

SEQ ID NO: 610549 - DNA, 15 bp, Homo sapiens
ggaccagctctctac

SEQ ID NO: 610550 - DNA, 15 bp, Homo sapiens
gaccagctctctacc

SEQ ID NO: 610551 - DNA, 15 bp, Homo sapiens
accagctctctacca

SEQ ID NO: 610552 - DNA, 15 bp, Homo sapiens
ccagctctctaccac

SEQ ID NO: 610553 - DNA, 15 bp, Homo sapiens
cagctctctaccacc

SEQ ID NO: 610554 - DNA, 15 bp, Homo sapiens
agctctctaccaccc

SEQ ID NO: 610555 - DNA, 15 bp, Homo sapiens
gctctctaccacccc

SEQ ID NO: 610556 - DNA, 15 bp, Homo sapiens
ctctctaccacccca

SEQ ID NO: 610557 - DNA, 15 bp, Homo sapiens
tctctaccaccccac

SEQ ID NO: 610558 - DNA, 15 bp, Homo sapiens
ctctaccaccccacg

SEQ ID NO: 610559 - DNA, 15 bp, Homo sapiens
tctaccaccccacgt

SEQ ID NO: 610560 - DNA, 15 bp, Homo sapiens
ctaccaccccacgtg

SEQ ID NO: 610561 - DNA, 15 bp, Homo sapiens
taccaccccacgtga

SEQ ID NO: 610562 - DNA, 15 bp, Homo sapiens
accaccccacgtgaa

SEQ ID NO: 610563 - DNA, 15 bp, Homo sapiens
ccaccccacgtgaag

SEQ ID NO: 610564 - DNA, 15 bp, Homo sapiens
caccccacgtgaagt

SEQ ID NO: 610565 - DNA, 15 bp, Homo sapiens
accccacgtgaagta

SEQ ID NO: 610566 - DNA, 15 bp, Homo sapiens
ccccacgtgaagtat

SEQ ID NO: 610567 - DNA, 15 bp, Homo sapiens
cccacgtgaagtata

SEQ ID NO: 610568 - DNA, 15 bp, Homo sapiens
ccacgtgaagtataa

SEQ ID NO: 610569 - DNA, 15 bp, Homo sapiens
cacgtgaagtataag

SEQ ID NO: 610570 - DNA, 15 bp, Homo sapiens
acgtgaagtataaga

SEQ ID NO: 610571 - DNA, 15 bp, Homo sapiens
cgtgaagtataagat

SEQ ID NO: 610572 - DNA, 15 bp, Homo sapiens
gtgaagtataagatc

SEQ ID NO: 610573 - DNA, 15 bp, Homo sapiens
tgaagtataagatcc

SEQ ID NO: 610574 - DNA, 15 bp, Homo sapiens
gaagtataagatccg

SEQ ID NO: 610575 - DNA, 15 bp, Homo sapiens
aagtataagatccga

SEQ ID NO: 610576 - DNA, 15 bp, Homo sapiens
agtataagatccgaa

SEQ ID NO: 610577 - DNA, 15 bp, Homo sapiens
gtataagatccgaat

SEQ ID NO: 610578 - DNA, 15 bp, Homo sapiens
tataagatccgaatg

SEQ ID NO: 610579 - DNA, 15 bp, Homo sapiens
ataagatccgaatgg

SEQ ID NO: 610580 - DNA, 15 bp, Homo sapiens
taagatccgaatgga

SEQ ID NO: 610581 - DNA, 15 bp, Homo sapiens
aagatccgaatggac

SEQ ID NO: 610582 - DNA, 15 bp, Homo sapiens
agatccgaatggaca

SEQ ID NO: 610583 - DNA, 15 bp, Homo sapiens
gatccgaatggacat

SEQ ID NO: 610584 - DNA, 15 bp, Homo sapiens
atccgaatggacata

SEQ ID NO: 610585 - DNA, 15 bp, Homo sapiens
tccgaatggacatag

SEQ ID NO: 610586 - DNA, 15 bp, Homo sapiens
ccgaatggacataga

SEQ ID NO: 610587 - DNA, 15 bp, Homo sapiens
cgaatggacatagac

SEQ ID NO: 610588 - DNA, 15 bp, Homo sapiens
gaatggacatagacg

SEQ ID NO: 610589 - DNA, 15 bp, Homo sapiens
aatggacatagacgt

SEQ ID NO: 610590 - DNA, 15 bp, Homo sapiens
atggacatagacgtg

SEQ ID NO: 610591 - DNA, 15 bp, Homo sapiens
tggacatagacgtgg

SEQ ID NO: 610592 - DNA, 15 bp, Homo sapiens
ggacatagacgtggt

SEQ ID NO: 610593 - DNA, 15 bp, Homo sapiens
gacatagacgtggtg

SEQ ID NO: 610594 - DNA, 15 bp, Homo sapiens
acatagacgtggtgg

SEQ ID NO: 610595 - DNA, 15 bp, Homo sapiens
catagacgtggtgga

SEQ ID NO: 610596 - DNA, 15 bp, Homo sapiens
atagacgtggtggag

SEQ ID NO: 610597 - DNA, 15 bp, Homo sapiens
tagacgtggtggaga

SEQ ID NO: 610598 - DNA, 15 bp, Homo sapiens
agacgtggtggagaa

SEQ ID NO: 610599 - DNA, 15 bp, Homo sapiens
gacgtggtggagaaa

SEQ ID NO: 610600 - DNA, 15 bp, Homo sapiens
acgtggtggagaaaa

SEQ ID NO: 610601 - DNA, 15 bp, Homo sapiens
cgtggtggagaaaac

SEQ ID NO: 610602 - DNA, 15 bp, Homo sapiens
gtggtggagaaaacc

SEQ ID NO: 610603 - DNA, 15 bp, Homo sapiens
tggtggagaaaacca

SEQ ID NO: 610604 - DNA, 15 bp, Homo sapiens
ggtggagaaaaccaa

SEQ ID NO: 610605 - DNA, 15 bp, Homo sapiens
gtggagaaaaccaat

SEQ ID NO: 610606 - DNA, 15 bp, Homo sapiens
tggagaaaaccaata

SEQ ID NO: 610607 - DNA, 15 bp, Homo sapiens
ggagaaaaccaataa

SEQ ID NO: 610608 - DNA, 15 bp, Homo sapiens
gagaaaaccaataag

SEQ ID NO: 610609 - DNA, 15 bp, Homo sapiens
agaaaaccaataaga

SEQ ID NO: 610610 - DNA, 15 bp, Homo sapiens
gaaaaccaataagat

SEQ ID NO: 610611 - DNA, 15 bp, Homo sapiens
aaaaccaataagatt

SEQ ID NO: 610612 - DNA, 15 bp, Homo sapiens
aaaccaataagatta

SEQ ID NO: 610613 - DNA, 15 bp, Homo sapiens
aaccaataagattaa

SEQ ID NO: 610614 - DNA, 15 bp, Homo sapiens
accaataagattaaa

SEQ ID NO: 610615 - DNA, 15 bp, Homo sapiens
ccaataagattaaag

SEQ ID NO: 610616 - DNA, 15 bp, Homo sapiens
caataagattaaaga

SEQ ID NO: 610617 - DNA, 15 bp, Homo sapiens
aataagattaaagac

SEQ ID NO: 610618 - DNA, 15 bp, Homo sapiens
ataagattaaagaca

SEQ ID NO: 610619 - DNA, 15 bp, Homo sapiens
taagattaaagacag

SEQ ID NO: 610620 - DNA, 15 bp, Homo sapiens
aagattaaagacagg

SEQ ID NO: 610621 - DNA, 15 bp, Homo sapiens
agattaaagacaggt

SEQ ID NO: 610622 - DNA, 15 bp, Homo sapiens
gattaaagacaggtg

SEQ ID NO: 610623 - DNA, 15 bp, Homo sapiens
attaaagacaggtga

SEQ ID NO: 610624 - DNA, 15 bp, Homo sapiens
ttaaagacaggtgat

SEQ ID NO: 610625 - DNA, 15 bp, Homo sapiens
taaagacaggtgatg

SEQ ID NO: 610626 - DNA, 15 bp, Homo sapiens
aaagacaggtgatgt

SEQ ID NO: 610627 - DNA, 15 bp, Homo sapiens
aagacaggtgatgtt

SEQ ID NO: 610628 - DNA, 15 bp, Homo sapiens
agacaggtgatgttt

SEQ ID NO: 610629 - DNA, 15 bp, Homo sapiens
gacaggtgatgtttc

SEQ ID NO: 610630 - DNA, 15 bp, Homo sapiens
acaggtgatgtttca

SEQ ID NO: 610631 - DNA, 15 bp, Homo sapiens
caggtgatgtttcag

SEQ ID NO: 610632 - DNA, 15 bp, Homo sapiens
aggtgatgtttcagg

SEQ ID NO: 610633 - DNA, 15 bp, Homo sapiens
ggtgatgtttcagga

SEQ ID NO: 610634 - DNA, 15 bp, Homo sapiens
gtgatgtttcaggaa

SEQ ID NO: 610635 - DNA, 15 bp, Homo sapiens
tgatgtttcaggaag

SEQ ID NO: 610636 - DNA, 15 bp, Homo sapiens
gatgtttcaggaagg

SEQ ID NO: 610637 - DNA, 15 bp, Homo sapiens
atgtttcaggaaggg

SEQ ID NO: 610638 - DNA, 15 bp, Homo sapiens
tgtttcaggaagggc

SEQ ID NO: 610639 - DNA, 15 bp, Homo sapiens
gtttcaggaagggct

SEQ ID NO: 610640 - DNA, 15 bp, Homo sapiens
tttcaggaagggctc

SEQ ID NO: 610641 - DNA, 15 bp, Homo sapiens
ttcaggaagggctcg

SEQ ID NO: 610642 - DNA, 15 bp, Homo sapiens
tcaggaagggctcgc

SEQ ID NO: 610643 - DNA, 15 bp, Homo sapiens
caggaagggctcgct

SEQ ID NO: 610644 - DNA, 15 bp, Homo sapiens
aggaagggctcgctg

SEQ ID NO: 610645 - DNA, 15 bp, Homo sapiens
ggaagggctcgctgc

SEQ ID NO: 610646 - DNA, 15 bp, Homo sapiens
gaagggctcgctgca

SEQ ID NO: 610647 - DNA, 15 bp, Homo sapiens
aagggctcgctgcat

SEQ ID NO: 610648 - DNA, 15 bp, Homo sapiens
agggctcgctgcatt

SEQ ID NO: 610649 - DNA, 15 bp, Homo sapiens
gggctcgctgcattt

SEQ ID NO: 610650 - DNA, 15 bp, Homo sapiens
ggctcgctgcatttc

SEQ ID NO: 610651 - DNA, 15 bp, Homo sapiens
gctcgctgcatttct

SEQ ID NO: 610652 - DNA, 15 bp, Homo sapiens
ctcgctgcatttctc

SEQ ID NO: 610653 - DNA, 15 bp, Homo sapiens
tcgctgcatttctcc

SEQ ID NO: 610654 - DNA, 15 bp, Homo sapiens
cgctgcatttctcca

SEQ ID NO: 610655 - DNA, 15 bp, Homo sapiens
gctgcatttctccaa

SEQ ID NO: 610656 - DNA, 15 bp, Homo sapiens
ctgcatttctccaaa

SEQ ID NO: 610657 - DNA, 15 bp, Homo sapiens
tgcatttctccaaag

SEQ ID NO: 610658 - DNA, 15 bp, Homo sapiens
gcatttctccaaagt

SEQ ID NO: 610659 - DNA, 15 bp, Homo sapiens
catttctccaaagtc

SEQ ID NO: 610660 - DNA, 15 bp, Homo sapiens
atttctccaaagtca

SEQ ID NO: 610661 - DNA, 15 bp, Homo sapiens
tttctccaaagtcag

SEQ ID NO: 610662 - DNA, 15 bp, Homo sapiens
ttctccaaagtcagt

SEQ ID NO: 610663 - DNA, 15 bp, Homo sapiens
tctccaaagtcagtg

SEQ ID NO: 610664 - DNA, 15 bp, Homo sapiens
ctccaaagtcagtgg

SEQ ID NO: 610665 - DNA, 15 bp, Homo sapiens
tccaaagtcagtggg

SEQ ID NO: 610666 - DNA, 15 bp, Homo sapiens
ccaaagtcagtggga

SEQ ID NO: 610667 - DNA, 15 bp, Homo sapiens
caaagtcagtgggaa

SEQ ID NO: 610668 - DNA, 15 bp, Homo sapiens
aaagtcagtgggaaa

SEQ ID NO: 610669 - DNA, 15 bp, Homo sapiens
aagtcagtgggaaat

SEQ ID NO: 610670 - DNA, 15 bp, Homo sapiens
agtcagtgggaaatt

SEQ ID NO: 610671 - DNA, 15 bp, Homo sapiens
gtcagtgggaaatta

SEQ ID NO: 610672 - DNA, 15 bp, Homo sapiens
tcagtgggaaattac

SEQ ID NO: 610673 - DNA, 15 bp, Homo sapiens
cagtgggaaattaca

SEQ ID NO: 610674 - DNA, 15 bp, Homo sapiens
agtgggaaattacat

SEQ ID NO: 610675 - DNA, 15 bp, Homo sapiens
gtgggaaattacatt

SEQ ID NO: 610676 - DNA, 15 bp, Homo sapiens
tgggaaattacattt

SEQ ID NO: 610677 - DNA, 15 bp, Homo sapiens
gggaaattacatttg

SEQ ID NO: 610678 - DNA, 15 bp, Homo sapiens
ggaaattacatttgg

SEQ ID NO: 610679 - DNA, 15 bp, Homo sapiens
gaaattacatttggt

SEQ ID NO: 610680 - DNA, 15 bp, Homo sapiens
aaattacatttggta

SEQ ID NO: 610681 - DNA, 15 bp, Homo sapiens
aattacatttggtag

SEQ ID NO: 610682 - DNA, 15 bp, Homo sapiens
attacatttggtaga

SEQ ID NO: 610683 - DNA, 15 bp, Homo sapiens
ttacatttggtagag

SEQ ID NO: 610684 - DNA, 15 bp, Homo sapiens
tacatttggtagaga

SEQ ID NO: 610685 - DNA, 15 bp, Homo sapiens
acatttggtagagag

SEQ ID NO: 610686 - DNA, 15 bp, Homo sapiens
catttggtagagaga

SEQ ID NO: 610687 - DNA, 15 bp, Homo sapiens
atttggtagagagaa

SEQ ID NO: 610688 - DNA, 15 bp, Homo sapiens
tttggtagagagaaa

SEQ ID NO: 610689 - DNA, 15 bp, Homo sapiens
ttggtagagagaaag

SEQ ID NO: 610690 - DNA, 15 bp, Homo sapiens
tggtagagagaaagg

SEQ ID NO: 610691 - DNA, 15 bp, Homo sapiens
ggtagagagaaaggg

SEQ ID NO: 610692 - DNA, 15 bp, Homo sapiens
gtagagagaaaggga

SEQ ID NO: 610693 - DNA, 15 bp, Homo sapiens
tagagagaaagggat

SEQ ID NO: 610694 - DNA, 15 bp, Homo sapiens
agagagaaagggatt

SEQ ID NO: 610695 - DNA, 15 bp, Homo sapiens
gagagaaagggattg

SEQ ID NO: 610696 - DNA, 15 bp, Homo sapiens
agagaaagggattga

SEQ ID NO: 610697 - DNA, 15 bp, Homo sapiens
gagaaagggattgag

SEQ ID NO: 610698 - DNA, 15 bp, Homo sapiens
agaaagggattgaga

SEQ ID NO: 610699 - DNA, 15 bp, Homo sapiens
gaaagggattgagac

SEQ ID NO: 610700 - DNA, 15 bp, Homo sapiens
aaagggattgagact

SEQ ID NO: 610701 - DNA, 15 bp, Homo sapiens
aagggattgagactg

SEQ ID NO: 610702 - DNA, 15 bp, Homo sapiens
agggattgagactgg

SEQ ID NO: 610703 - DNA, 15 bp, Homo sapiens
gggattgagactgga

SEQ ID NO: 610704 - DNA, 15 bp, Homo sapiens
ggattgagactggac

SEQ ID NO: 610705 - DNA, 15 bp, Homo sapiens
gattgagactggact

SEQ ID NO: 610706 - DNA, 15 bp, Homo sapiens
attgagactggactc

SEQ ID NO: 610707 - DNA, 15 bp, Homo sapiens
ttgagactggactca

SEQ ID NO: 610708 - DNA, 15 bp, Homo sapiens
tgagactggactcat

SEQ ID NO: 610709 - DNA, 15 bp, Homo sapiens
gagactggactcata

SEQ ID NO: 610710 - DNA, 15 bp, Homo sapiens
agactggactcataa

SEQ ID NO: 610711 - DNA, 15 bp, Homo sapiens
gactggactcataaa

SEQ ID NO: 610712 - DNA, 15 bp, Homo sapiens
actggactcataaat

SEQ ID NO: 610713 - DNA, 15 bp, Homo sapiens
ctggactcataaatc

SEQ ID NO: 610714 - DNA, 15 bp, Homo sapiens
tggactcataaatca

SEQ ID NO: 610715 - DNA, 15 bp, Homo sapiens
ggactcataaatcaa

SEQ ID NO: 610716 - DNA, 15 bp, Homo sapiens
gactcataaatcaat

SEQ ID NO: 610717 - DNA, 15 bp, Homo sapiens
actcataaatcaata

SEQ ID NO: 610718 - DNA, 15 bp, Homo sapiens
ctcataaatcaataa

SEQ ID NO: 610719 - DNA, 15 bp, Homo sapiens
tcataaatcaataaa

SEQ ID NO: 610720 - DNA, 15 bp, Homo sapiens
cataaatcaataaaa

SEQ ID NO: 610721 - DNA, 15 bp, Homo sapiens
ataaatcaataaaat

SEQ ID NO: 610722 - DNA, 15 bp, Homo sapiens
taaatcaataaaatt

SEQ ID NO: 610723 - DNA, 15 bp, Homo sapiens
aaatcaataaaatta

SEQ ID NO: 610724 - DNA, 15 bp, Homo sapiens
aatcaataaaattaa

SEQ ID NO: 610725 - DNA, 15 bp, Homo sapiens
atcaataaaattaag

SEQ ID NO: 610726 - DNA, 15 bp, Homo sapiens
tcaataaaattaagt

SEQ ID NO: 610727 - DNA, 15 bp, Homo sapiens
caataaaattaagtt

SEQ ID NO: 610728 - DNA, 15 bp, Homo sapiens
aataaaattaagtta

SEQ ID NO: 610729 - DNA, 15 bp, Homo sapiens
ataaaattaagttaa

SEQ ID NO: 610730 - DNA, 15 bp, Homo sapiens
taaaattaagttaaa

SEQ ID NO: 610731 - DNA, 15 bp, Homo sapiens
aaaattaagttaaat

SEQ ID NO: 610732 - DNA, 15 bp, Homo sapiens
aaattaagttaaata

SEQ ID NO: 610733 - DNA, 15 bp, Homo sapiens
gctggaaaagggaag

SEQ ID NO: 610734 - DNA, 15 bp, Homo sapiens
ctggaaaagggaagg

SEQ ID NO: 610735 - DNA, 15 bp, Homo sapiens
tggaaaagggaaggg

SEQ ID NO: 610736 - DNA, 15 bp, Homo sapiens
ggaaaagggaagggg

SEQ ID NO: 610737 - DNA, 15 bp, Homo sapiens
gaaaagggaagggga

SEQ ID NO: 610738 - DNA, 15 bp, Homo sapiens
aaaagggaaggggaa

SEQ ID NO: 610739 - DNA, 15 bp, Homo sapiens
aaagggaaggggaaa

SEQ ID NO: 610740 - DNA, 15 bp, Homo sapiens
aagggaaggggaaaa

SEQ ID NO: 610741 - DNA, 15 bp, Homo sapiens
agggaaggggaaaat

SEQ ID NO: 610742 - DNA, 15 bp, Homo sapiens
gggaaggggaaaatt

SEQ ID NO: 610743 - DNA, 15 bp, Homo sapiens
ggaaggggaaaatta

SEQ ID NO: 610744 - DNA, 15 bp, Homo sapiens
gaaggggaaaattaa

SEQ ID NO: 610745 - DNA, 15 bp, Homo sapiens
aaggggaaaattaaa

SEQ ID NO: 610746 - DNA, 15 bp, Homo sapiens
aggggaaaattaaag

SEQ ID NO: 610747 - DNA, 15 bp, Homo sapiens
ggggaaaattaaagc

SEQ ID NO: 610748 - DNA, 15 bp, Homo sapiens
gggaaaattaaagca

SEQ ID NO: 610749 - DNA, 15 bp, Homo sapiens
ggaaaattaaagcaa

SEQ ID NO: 610750 - DNA, 15 bp, Homo sapiens
gaaaattaaagcaag

SEQ ID NO: 610751 - DNA, 15 bp, Homo sapiens
aaaattaaagcaagg

SEQ ID NO: 610752 - DNA, 15 bp, Homo sapiens
aaattaaagcaagga

SEQ ID NO: 610753 - DNA, 15 bp, Homo sapiens
aattaaagcaaggaa

SEQ ID NO: 610754 - DNA, 15 bp, Homo sapiens
attaaagcaaggaaa

SEQ ID NO: 610755 - DNA, 15 bp, Homo sapiens
ttaaagcaaggaaag

SEQ ID NO: 610756 - DNA, 15 bp, Homo sapiens
taaagcaaggaaagt

SEQ ID NO: 610757 - DNA, 15 bp, Homo sapiens
aaagcaaggaaagtg

SEQ ID NO: 610758 - DNA, 15 bp, Homo sapiens
aagcaaggaaagtga

SEQ ID NO: 610759 - DNA, 15 bp, Homo sapiens
agcaaggaaagtgag

SEQ ID NO: 610760 - DNA, 15 bp, Homo sapiens
gcaaggaaagtgagg

SEQ ID NO: 610761 - DNA, 15 bp, Homo sapiens
caaggaaagtgaggc

SEQ ID NO: 610762 - DNA, 15 bp, Homo sapiens
aaggaaagtgaggct

SEQ ID NO: 610763 - DNA, 15 bp, Homo sapiens
aggaaagtgaggctg

SEQ ID NO: 610764 - DNA, 15 bp, Homo sapiens
ggaaagtgaggctgg

SEQ ID NO: 610765 - DNA, 15 bp, Homo sapiens
gaaagtgaggctggg

SEQ ID NO: 610766 - DNA, 15 bp, Homo sapiens
aaagtgaggctgggg

SEQ ID NO: 610767 - DNA, 15 bp, Homo sapiens
aagtgaggctggggg

SEQ ID NO: 610768 - DNA, 15 bp, Homo sapiens
agtgaggctggggga

SEQ ID NO: 610769 - DNA, 15 bp, Homo sapiens
gtgaggctgggggag

SEQ ID NO: 610770 - DNA, 15 bp, Homo sapiens
tgaggctgggggagg

SEQ ID NO: 610771 - DNA, 15 bp, Homo sapiens
gaggctgggggaggg

SEQ ID NO: 610772 - DNA, 15 bp, Homo sapiens
aggctgggggagggg

SEQ ID NO: 610773 - DNA, 15 bp, Homo sapiens
ggctgggggagggga

SEQ ID NO: 610774 - DNA, 15 bp, Homo sapiens
gctgggggaggggac

SEQ ID NO: 610775 - DNA, 15 bp, Homo sapiens
ctgggggaggggaca

SEQ ID NO: 610776 - DNA, 15 bp, Homo sapiens
tgggggaggggacaa

SEQ ID NO: 610777 - DNA, 15 bp, Homo sapiens
gggggaggggacaaa

SEQ ID NO: 610778 - DNA, 15 bp, Homo sapiens
ggggaggggacaaat

SEQ ID NO: 610779 - DNA, 15 bp, Homo sapiens
gggaggggacaaatt

SEQ ID NO: 610780 - DNA, 15 bp, Homo sapiens
ggaggggacaaattc

SEQ ID NO: 610781 - DNA, 15 bp, Homo sapiens
gaggggacaaattcc

SEQ ID NO: 610782 - DNA, 15 bp, Homo sapiens
aggggacaaattccc

SEQ ID NO: 610783 - DNA, 15 bp, Homo sapiens
ggggacaaattcccc

SEQ ID NO: 610784 - DNA, 15 bp, Homo sapiens
gggacaaattcccca

SEQ ID NO: 610785 - DNA, 15 bp, Homo sapiens
ggacaaattccccac

SEQ ID NO: 610786 - DNA, 15 bp, Homo sapiens
gacaaattccccact

SEQ ID NO: 610787 - DNA, 15 bp, Homo sapiens
acaaattccccacta

SEQ ID NO: 610788 - DNA, 15 bp, Homo sapiens
caaattccccactat

SEQ ID NO: 610789 - DNA, 15 bp, Homo sapiens
aaattccccactatg

SEQ ID NO: 610790 - DNA, 15 bp, Homo sapiens
aattccccactatgt

SEQ ID NO: 610791 - DNA, 15 bp, Homo sapiens
attccccactatgta

SEQ ID NO: 610792 - DNA, 15 bp, Homo sapiens
ttccccactatgtag

SEQ ID NO: 610793 - DNA, 15 bp, Homo sapiens
tccccactatgtagt

SEQ ID NO: 610794 - DNA, 15 bp, Homo sapiens
ccccactatgtagta

SEQ ID NO: 610795 - DNA, 15 bp, Homo sapiens
cccactatgtagtat

SEQ ID NO: 610796 - DNA, 15 bp, Homo sapiens
ccactatgtagtatg

SEQ ID NO: 610797 - DNA, 15 bp, Homo sapiens
cactatgtagtatgt

SEQ ID NO: 610798 - DNA, 15 bp, Homo sapiens
actatgtagtatgtt

SEQ ID NO: 610799 - DNA, 15 bp, Homo sapiens
ctatgtagtatgttt

SEQ ID NO: 610800 - DNA, 15 bp, Homo sapiens
tatgtagtatgtttg

SEQ ID NO: 610801 - DNA, 15 bp, Homo sapiens
atgtagtatgtttgg

SEQ ID NO: 610802 - DNA, 15 bp, Homo sapiens
tgtagtatgtttggt

SEQ ID NO: 610803 - DNA, 15 bp, Homo sapiens
gtagtatgtttggta

SEQ ID NO: 610804 - DNA, 15 bp, Homo sapiens
tagtatgtttggtat

SEQ ID NO: 610805 - DNA, 15 bp, Homo sapiens
agtatgtttggtatg

SEQ ID NO: 610806 - DNA, 15 bp, Homo sapiens
gtatgtttggtatgt

SEQ ID NO: 610807 - DNA, 15 bp, Homo sapiens
tatgtttggtatgtg

SEQ ID NO: 610808 - DNA, 15 bp, Homo sapiens
atgtttggtatgtgg

SEQ ID NO: 610809 - DNA, 15 bp, Homo sapiens
tgtttggtatgtgga

SEQ ID NO: 610810 - DNA, 15 bp, Homo sapiens
gtttggtatgtggaa

SEQ ID NO: 610811 - DNA, 15 bp, Homo sapiens
tttggtatgtggaag

SEQ ID NO: 610812 - DNA, 15 bp, Homo sapiens
ttggtatgtggaagg

SEQ ID NO: 610813 - DNA, 15 bp, Homo sapiens
tggtatgtggaaggg

SEQ ID NO: 610814 - DNA, 15 bp, Homo sapiens
ggtatgtggaagggt

SEQ ID NO: 610815 - DNA, 15 bp, Homo sapiens
gtatgtggaagggtt

SEQ ID NO: 610816 - DNA, 15 bp, Homo sapiens
tatgtggaagggttc

SEQ ID NO: 610817 - DNA, 15 bp, Homo sapiens
atgtggaagggttct

SEQ ID NO: 610818 - DNA, 15 bp, Homo sapiens
tgtggaagggttctg

SEQ ID NO: 610819 - DNA, 15 bp, Homo sapiens
gtggaagggttctgg

SEQ ID NO: 610820 - DNA, 15 bp, Homo sapiens
tggaagggttctggt

SEQ ID NO: 610821 - DNA, 15 bp, Homo sapiens
ggaagggttctggtc

SEQ ID NO: 610822 - DNA, 15 bp, Homo sapiens
gaagggttctggtca

SEQ ID NO: 610823 - DNA, 15 bp, Homo sapiens
aagggttctggtcag

SEQ ID NO: 610824 - DNA, 15 bp, Homo sapiens
agggttctggtcaga

SEQ ID NO: 610825 - DNA, 15 bp, Homo sapiens
gggttctggtcagaa

SEQ ID NO: 610826 - DNA, 15 bp, Homo sapiens
ggttctggtcagaat

SEQ ID NO: 610827 - DNA, 15 bp, Homo sapiens
gttctggtcagaatg

SEQ ID NO: 610828 - DNA, 15 bp, Homo sapiens
ttctggtcagaatgt

SEQ ID NO: 610829 - DNA, 15 bp, Homo sapiens
tctggtcagaatgtt

SEQ ID NO: 610830 - DNA, 15 bp, Homo sapiens
ctggtcagaatgttt

SEQ ID NO: 610831 - DNA, 15 bp, Homo sapiens
tggtcagaatgtttg

SEQ ID NO: 610832 - DNA, 15 bp, Homo sapiens
ggtcagaatgtttgc

SEQ ID NO: 610833 - DNA, 15 bp, Homo sapiens
gtcagaatgtttgcc

SEQ ID NO: 610834 - DNA, 15 bp, Homo sapiens
tcagaatgtttgccc

SEQ ID NO: 610835 - DNA, 15 bp, Homo sapiens
cagaatgtttgccca

SEQ ID NO: 610836 - DNA, 15 bp, Homo sapiens
agaatgtttgcccaa

SEQ ID NO: 610837 - DNA, 15 bp, Homo sapiens
gaatgtttgcccaat

SEQ ID NO: 610838 - DNA, 15 bp, Homo sapiens
aatgtttgcccaatg

SEQ ID NO: 610839 - DNA, 15 bp, Homo sapiens
atgtttgcccaatga

SEQ ID NO: 610840 - DNA, 15 bp, Homo sapiens
tgtttgcccaatgat

SEQ ID NO: 610841 - DNA, 15 bp, Homo sapiens
gtttgcccaatgatt

SEQ ID NO: 610842 - DNA, 15 bp, Homo sapiens
tttgcccaatgattg

SEQ ID NO: 610843 - DNA, 15 bp, Homo sapiens
ttgcccaatgattgc

SEQ ID NO: 610844 - DNA, 15 bp, Homo sapiens
tgcccaatgattgcc

SEQ ID NO: 610845 - DNA, 15 bp, Homo sapiens
gcccaatgattgcca

SEQ ID NO: 610846 - DNA, 15 bp, Homo sapiens
cccaatgattgccac

SEQ ID NO: 610847 - DNA, 15 bp, Homo sapiens
ccaatgattgccaca

SEQ ID NO: 610848 - DNA, 15 bp, Homo sapiens
caatgattgccacat

SEQ ID NO: 610849 - DNA, 15 bp, Homo sapiens
aatgattgccacatc

SEQ ID NO: 610850 - DNA, 15 bp, Homo sapiens
atgattgccacatca

SEQ ID NO: 610851 - DNA, 15 bp, Homo sapiens
tgattgccacatcag

SEQ ID NO: 610852 - DNA, 15 bp, Homo sapiens
gattgccacatcagc

SEQ ID NO: 610853 - DNA, 15 bp, Homo sapiens
attgccacatcagca

SEQ ID NO: 610854 - DNA, 15 bp, Homo sapiens
ttgccacatcagcat

SEQ ID NO: 610855 - DNA, 15 bp, Homo sapiens
tgccacatcagcatt

SEQ ID NO: 610856 - DNA, 15 bp, Homo sapiens
gccacatcagcattc

SEQ ID NO: 610857 - DNA, 15 bp, Homo sapiens
ccacatcagcattca

SEQ ID NO: 610858 - DNA, 15 bp, Homo sapiens
cacatcagcattcat

SEQ ID NO: 610859 - DNA, 15 bp, Homo sapiens
acatcagcattcatt

SEQ ID NO: 610860 - DNA, 15 bp, Homo sapiens
catcagcattcattt

SEQ ID NO: 610861 - DNA, 15 bp, Homo sapiens
atcagcattcatttt

SEQ ID NO: 610862 - DNA, 15 bp, Homo sapiens
tcagcattcattttg

SEQ ID NO: 610863 - DNA, 15 bp, Homo sapiens
cagcattcattttgg

SEQ ID NO: 610864 - DNA, 15 bp, Homo sapiens
agcattcattttgga

SEQ ID NO: 610865 - DNA, 15 bp, Homo sapiens
gcattcattttggac

SEQ ID NO: 610866 - DNA, 15 bp, Homo sapiens
cattcattttggact

SEQ ID NO: 610867 - DNA, 15 bp, Homo sapiens
attcattttggactc

SEQ ID NO: 610868 - DNA, 15 bp, Homo sapiens
ttcattttggactct

SEQ ID NO: 610869 - DNA, 15 bp, Homo sapiens
tcattttggactctg

SEQ ID NO: 610870 - DNA, 15 bp, Homo sapiens
cattttggactctgt

SEQ ID NO: 610871 - DNA, 15 bp, Homo sapiens
attttggactctgta

SEQ ID NO: 610872 - DNA, 15 bp, Homo sapiens
ttttggactctgtat

SEQ ID NO: 610873 - DNA, 15 bp, Homo sapiens
tttggactctgtatg

SEQ ID NO: 610874 - DNA, 15 bp, Homo sapiens
ttggactctgtatgg

SEQ ID NO: 610875 - DNA, 15 bp, Homo sapiens
tggactctgtatggc

SEQ ID NO: 610876 - DNA, 15 bp, Homo sapiens
ggactctgtatggcc

SEQ ID NO: 610877 - DNA, 15 bp, Homo sapiens
gactctgtatggcca

SEQ ID NO: 610878 - DNA, 15 bp, Homo sapiens
actctgtatggccag

SEQ ID NO: 610879 - DNA, 15 bp, Homo sapiens
ctctgtatggccagt

SEQ ID NO: 610880 - DNA, 15 bp, Homo sapiens
tctgtatggccagta

SEQ ID NO: 610881 - DNA, 15 bp, Homo sapiens
ctgtatggccagtag

SEQ ID NO: 610882 - DNA, 15 bp, Homo sapiens
tgtatggccagtagg

SEQ ID NO: 610883 - DNA, 15 bp, Homo sapiens
gtatggccagtaggt

SEQ ID NO: 610884 - DNA, 15 bp, Homo sapiens
tatggccagtaggtc

SEQ ID NO: 610885 - DNA, 15 bp, Homo sapiens
atggccagtaggtct

SEQ ID NO: 610886 - DNA, 15 bp, Homo sapiens
tggccagtaggtctg

SEQ ID NO: 610887 - DNA, 15 bp, Homo sapiens
ggccagtaggtctgg

SEQ ID NO: 610888 - DNA, 15 bp, Homo sapiens
gccagtaggtctggt

SEQ ID NO: 610889 - DNA, 15 bp, Homo sapiens
ccagtaggtctggtt

SEQ ID NO: 610890 - DNA, 15 bp, Homo sapiens
cagtaggtctggttc

SEQ ID NO: 610891 - DNA, 15 bp, Homo sapiens
agtaggtctggttcc

SEQ ID NO: 610892 - DNA, 15 bp, Homo sapiens
gtaggtctggttcct

SEQ ID NO: 610893 - DNA, 15 bp, Homo sapiens
taggtctggttcctg

SEQ ID NO: 610894 - DNA, 15 bp, Homo sapiens
aggtctggttcctgg

SEQ ID NO: 610895 - DNA, 15 bp, Homo sapiens
ggtctggttcctggg

SEQ ID NO: 610896 - DNA, 15 bp, Homo sapiens
gtctggttcctggga

SEQ ID NO: 610897 - DNA, 15 bp, Homo sapiens
tctggttcctgggag

SEQ ID NO: 610898 - DNA, 15 bp, Homo sapiens
ctggttcctgggagc

SEQ ID NO: 610899 - DNA, 15 bp, Homo sapiens
tggttcctgggagcc

SEQ ID NO: 610900 - DNA, 15 bp, Homo sapiens
ggttcctgggagccc

SEQ ID NO: 610901 - DNA, 15 bp, Homo sapiens
gttcctgggagccct

SEQ ID NO: 610902 - DNA, 15 bp, Homo sapiens
ttcctgggagccctg

SEQ ID NO: 610903 - DNA, 15 bp, Homo sapiens
tcctgggagccctgg

SEQ ID NO: 610904 - DNA, 15 bp, Homo sapiens
cctgggagccctgga

SEQ ID NO: 610905 - DNA, 15 bp, Homo sapiens
ctgggagccctggaa

SEQ ID NO: 610906 - DNA, 15 bp, Homo sapiens
tgggagccctggaat

SEQ ID NO: 610907 - DNA, 15 bp, Homo sapiens
gggagccctggaata

SEQ ID NO: 610908 - DNA, 15 bp, Homo sapiens
ggagccctggaataa

SEQ ID NO: 610909 - DNA, 15 bp, Homo sapiens
gagccctggaataat

SEQ ID NO: 610910 - DNA, 15 bp, Homo sapiens
agccctggaataatg

SEQ ID NO: 610911 - DNA, 15 bp, Homo sapiens
gccctggaataatgc

SEQ ID NO: 610912 - DNA, 15 bp, Homo sapiens
ccctggaataatgca

SEQ ID NO: 610913 - DNA, 15 bp, Homo sapiens
cctggaataatgcag

SEQ ID NO: 610914 - DNA, 15 bp, Homo sapiens
ctggaataatgcagc

SEQ ID NO: 610915 - DNA, 15 bp, Homo sapiens
tggaataatgcagcc

SEQ ID NO: 610916 - DNA, 15 bp, Homo sapiens
ggaataatgcagccc

SEQ ID NO: 610917 - DNA, 15 bp, Homo sapiens
gaataatgcagcccc

SEQ ID NO: 610918 - DNA, 15 bp, Homo sapiens
aataatgcagcccct

SEQ ID NO: 610919 - DNA, 15 bp, Homo sapiens
ataatgcagcccctt

SEQ ID NO: 610920 - DNA, 15 bp, Homo sapiens
taatgcagccccttc

SEQ ID NO: 610921 - DNA, 15 bp, Homo sapiens
aatgcagccccttcc

SEQ ID NO: 610922 - DNA, 15 bp, Homo sapiens
atgcagccccttccc

SEQ ID NO: 610923 - DNA, 15 bp, Homo sapiens
tgcagccccttccct

SEQ ID NO: 610924 - DNA, 15 bp, Homo sapiens
gcagccccttcccta

SEQ ID NO: 610925 - DNA, 15 bp, Homo sapiens
cagccccttccctaa

SEQ ID NO: 610926 - DNA, 15 bp, Homo sapiens
agccccttccctaac

SEQ ID NO: 610927 - DNA, 15 bp, Homo sapiens
gccccttccctaact

SEQ ID NO: 610928 - DNA, 15 bp, Homo sapiens
ccccttccctaacta

SEQ ID NO: 610929 - DNA, 15 bp, Homo sapiens
cccttccctaactaa

SEQ ID NO: 610930 - DNA, 15 bp, Homo sapiens
ccttccctaactaac

SEQ ID NO: 610931 - DNA, 15 bp, Homo sapiens
cttccctaactaaca

SEQ ID NO: 610932 - DNA, 15 bp, Homo sapiens
ttccctaactaacat

SEQ ID NO: 610933 - DNA, 15 bp, Homo sapiens
tccctaactaacatt

SEQ ID NO: 610934 - DNA, 15 bp, Homo sapiens
ccctaactaacattt

SEQ ID NO: 610935 - DNA, 15 bp, Homo sapiens
cctaactaacatttc

SEQ ID NO: 610936 - DNA, 15 bp, Homo sapiens
ctaactaacatttcc

SEQ ID NO: 610937 - DNA, 15 bp, Homo sapiens
taactaacatttcca

SEQ ID NO: 610938 - DNA, 15 bp, Homo sapiens
aactaacatttccat

SEQ ID NO: 610939 - DNA, 15 bp, Homo sapiens
actaacatttccatg

SEQ ID NO: 610940 - DNA, 15 bp, Homo sapiens
ctaacatttccatga

SEQ ID NO: 610941 - DNA, 15 bp, Homo sapiens
taacatttccatgat

SEQ ID NO: 610942 - DNA, 15 bp, Homo sapiens
aacatttccatgatg

SEQ ID NO: 610943 - DNA, 15 bp, Homo sapiens
acatttccatgatgt

SEQ ID NO: 610944 - DNA, 15 bp, Homo sapiens
catttccatgatgta

SEQ ID NO: 610945 - DNA, 15 bp, Homo sapiens
atttccatgatgtat

SEQ ID NO: 610946 - DNA, 15 bp, Homo sapiens
tttccatgatgtatg

SEQ ID NO: 610947 - DNA, 15 bp, Homo sapiens
ttccatgatgtatgc

SEQ ID NO: 610948 - DNA, 15 bp, Homo sapiens
tccatgatgtatgct

SEQ ID NO: 610949 - DNA, 15 bp, Homo sapiens
ccatgatgtatgctc

SEQ ID NO: 610950 - DNA, 15 bp, Homo sapiens
catgatgtatgctca

SEQ ID NO: 610951 - DNA, 15 bp, Homo sapiens
atgatgtatgctcaa

SEQ ID NO: 610952 - DNA, 15 bp, Homo sapiens
tgatgtatgctcaat

SEQ ID NO: 610953 - DNA, 15 bp, Homo sapiens
gatgtatgctcaatg

SEQ ID NO: 610954 - DNA, 15 bp, Homo sapiens
atgtatgctcaatga

SEQ ID NO: 610955 - DNA, 15 bp, Homo sapiens
tgtatgctcaatgac

SEQ ID NO: 610956 - DNA, 15 bp, Homo sapiens
gtatgctcaatgaca

SEQ ID NO: 610957 - DNA, 15 bp, Homo sapiens
tatgctcaatgacaa

SEQ ID NO: 610958 - DNA, 15 bp, Homo sapiens
atgctcaatgacaag

SEQ ID NO: 610959 - DNA, 15 bp, Homo sapiens
tgctcaatgacaagg

SEQ ID NO: 610960 - DNA, 15 bp, Homo sapiens
gctcaatgacaaggc

SEQ ID NO: 610961 - DNA, 15 bp, Homo sapiens
ctcaatgacaaggca

SEQ ID NO: 610962 - DNA, 15 bp, Homo sapiens
tcaatgacaaggcag

SEQ ID NO: 610963 - DNA, 15 bp, Homo sapiens
caatgacaaggcaga

SEQ ID NO: 610964 - DNA, 15 bp, Homo sapiens
aatgacaaggcagag

SEQ ID NO: 610965 - DNA, 15 bp, Homo sapiens
atgacaaggcagagg

SEQ ID NO: 610966 - DNA, 15 bp, Homo sapiens
tgacaaggcagagga

SEQ ID NO: 610967 - DNA, 15 bp, Homo sapiens
gacaaggcagaggaa

SEQ ID NO: 610968 - DNA, 15 bp, Homo sapiens
acaaggcagaggaat

SEQ ID NO: 610969 - DNA, 15 bp, Homo sapiens
caaggcagaggaatg

SEQ ID NO: 610970 - DNA, 15 bp, Homo sapiens
aaggcagaggaatgt

SEQ ID NO: 610971 - DNA, 15 bp, Homo sapiens
aggcagaggaatgtg

SEQ ID NO: 610972 - DNA, 15 bp, Homo sapiens
ggcagaggaatgtgt

SEQ ID NO: 610973 - DNA, 15 bp, Homo sapiens
gcagaggaatgtgtt

SEQ ID NO: 610974 - DNA, 15 bp, Homo sapiens
cagaggaatgtgttg

SEQ ID NO: 610975 - DNA, 15 bp, Homo sapiens
agaggaatgtgttgg

SEQ ID NO: 610976 - DNA, 15 bp, Homo sapiens
gaggaatgtgttgga

SEQ ID NO: 610977 - DNA, 15 bp, Homo sapiens
aggaatgtgttggat

SEQ ID NO: 610978 - DNA, 15 bp, Homo sapiens
ggaatgtgttggatg

SEQ ID NO: 610979 - DNA, 15 bp, Homo sapiens
gaatgtgttggatga

SEQ ID NO: 610980 - DNA, 15 bp, Homo sapiens
aatgtgttggatgag

SEQ ID NO: 610981 - DNA, 15 bp, Homo sapiens
atgtgttggatgagc

SEQ ID NO: 610982 - DNA, 15 bp, Homo sapiens
tgtgttggatgagct

SEQ ID NO: 610983 - DNA, 15 bp, Homo sapiens
gtgttggatgagctc

SEQ ID NO: 610984 - DNA, 15 bp, Homo sapiens
tgttggatgagctca

SEQ ID NO: 610985 - DNA, 15 bp, Homo sapiens
gttggatgagctcag

SEQ ID NO: 610986 - DNA, 15 bp, Homo sapiens
ttggatgagctcagg

SEQ ID NO: 610987 - DNA, 15 bp, Homo sapiens
tggatgagctcagga

SEQ ID NO: 610988 - DNA, 15 bp, Homo sapiens
ggatgagctcaggac

SEQ ID NO: 610989 - DNA, 15 bp, Homo sapiens
gatgagctcaggacc

SEQ ID NO: 610990 - DNA, 15 bp, Homo sapiens
atgagctcaggacct

SEQ ID NO: 610991 - DNA, 15 bp, Homo sapiens
tgagctcaggacctg

SEQ ID NO: 610992 - DNA, 15 bp, Homo sapiens
gagctcaggacctgc

SEQ ID NO: 610993 - DNA, 15 bp, Homo sapiens
agctcaggacctgcc

SEQ ID NO: 610994 - DNA, 15 bp, Homo sapiens
gctcaggacctgcct

SEQ ID NO: 610995 - DNA, 15 bp, Homo sapiens
ctcaggacctgcctc

SEQ ID NO: 610996 - DNA, 15 bp, Homo sapiens
tcaggacctgcctcc

SEQ ID NO: 610997 - DNA, 15 bp, Homo sapiens
caggacctgcctccc

SEQ ID NO: 610998 - DNA, 15 bp, Homo sapiens
aggacctgcctccct

SEQ ID NO: 610999 - DNA, 15 bp, Homo sapiens
ggacctgcctccctg

SEQ ID NO: 611000 - DNA, 15 bp, Homo sapiens
gacctgcctccctgg

SEQ ID NO: 611001 - DNA, 15 bp, Homo sapiens
acctgcctccctgga

SEQ ID NO: 611002 - DNA, 15 bp, Homo sapiens
cctgcctccctggac

SEQ ID NO: 611003 - DNA, 15 bp, Homo sapiens
ctgcctccctggaca

SEQ ID NO: 611004 - DNA, 15 bp, Homo sapiens
tgcctccctggacac

SEQ ID NO: 611005 - DNA, 15 bp, Homo sapiens
gcctccctggacact

SEQ ID NO: 611006 - DNA, 15 bp, Homo sapiens
cctccctggacactc

SEQ ID NO: 611007 - DNA, 15 bp, Homo sapiens
ctccctggacactcc

SEQ ID NO: 611008 - DNA, 15 bp, Homo sapiens
tccctggacactccc

SEQ ID NO: 611009 - DNA, 15 bp, Homo sapiens
ccctggacactccca

SEQ ID NO: 611010 - DNA, 15 bp, Homo sapiens
cctggacactcccat

SEQ ID NO: 611011 - DNA, 15 bp, Homo sapiens
ctggacactcccatc

SEQ ID NO: 611012 - DNA, 15 bp, Homo sapiens
tggacactcccatcc

SEQ ID NO: 611013 - DNA, 15 bp, Homo sapiens
ggacactcccatccc

SEQ ID NO: 611014 - DNA, 15 bp, Homo sapiens
gacactcccatccca

SEQ ID NO: 611015 - DNA, 15 bp, Homo sapiens
acactcccatcccag

SEQ ID NO: 611016 - DNA, 15 bp, Homo sapiens
cactcccatcccagg

SEQ ID NO: 611017 - DNA, 15 bp, Homo sapiens
actcccatcccaggc

SEQ ID NO: 611018 - DNA, 15 bp, Homo sapiens
ctcccatcccaggcc

SEQ ID NO: 611019 - DNA, 15 bp, Homo sapiens
tcccatcccaggcct

SEQ ID NO: 611020 - DNA, 15 bp, Homo sapiens
cccatcccaggcctg

SEQ ID NO: 611021 - DNA, 15 bp, Homo sapiens
ccatcccaggcctgt

SEQ ID NO: 611022 - DNA, 15 bp, Homo sapiens
catcccaggcctgta

SEQ ID NO: 611023 - DNA, 15 bp, Homo sapiens
atcccaggcctgtat

SEQ ID NO: 611024 - DNA, 15 bp, Homo sapiens
tcccaggcctgtata

SEQ ID NO: 611025 - DNA, 15 bp, Homo sapiens
cccaggcctgtatat

SEQ ID NO: 611026 - DNA, 15 bp, Homo sapiens
ccaggcctgtatatc

SEQ ID NO: 611027 - DNA, 15 bp, Homo sapiens
caggcctgtatatct

SEQ ID NO: 611028 - DNA, 15 bp, Homo sapiens
aggcctgtatatctg

SEQ ID NO: 611029 - DNA, 15 bp, Homo sapiens
ggcctgtatatctgt

SEQ ID NO: 611030 - DNA, 15 bp, Homo sapiens
gcctgtatatctgtt

SEQ ID NO: 611031 - DNA, 15 bp, Homo sapiens
cctgtatatctgttg

SEQ ID NO: 611032 - DNA, 15 bp, Homo sapiens
ctgtatatctgttga

SEQ ID NO: 611033 - DNA, 15 bp, Homo sapiens
tgtatatctgttgac

SEQ ID NO: 611034 - DNA, 15 bp, Homo sapiens
gtatatctgttgacc

SEQ ID NO: 611035 - DNA, 15 bp, Homo sapiens
tatatctgttgacca

SEQ ID NO: 611036 - DNA, 15 bp, Homo sapiens
atatctgttgaccag

SEQ ID NO: 611037 - DNA, 15 bp, Homo sapiens
tatctgttgaccagg

SEQ ID NO: 611038 - DNA, 15 bp, Homo sapiens
atctgttgaccagga

SEQ ID NO: 611039 - DNA, 15 bp, Homo sapiens
tctgttgaccaggaa

SEQ ID NO: 611040 - DNA, 15 bp, Homo sapiens
ctgttgaccaggaat

SEQ ID NO: 611041 - DNA, 15 bp, Homo sapiens
tgttgaccaggaata

SEQ ID NO: 611042 - DNA, 15 bp, Homo sapiens
gttgaccaggaataa

SEQ ID NO: 611043 - DNA, 15 bp, Homo sapiens
ttgaccaggaataag

SEQ ID NO: 611044 - DNA, 15 bp, Homo sapiens
tgaccaggaataagc

SEQ ID NO: 611045 - DNA, 15 bp, Homo sapiens
gaccaggaataagcc

SEQ ID NO: 611046 - DNA, 15 bp, Homo sapiens
accaggaataagcca

SEQ ID NO: 611047 - DNA, 15 bp, Homo sapiens
ccaggaataagccaa

SEQ ID NO: 611048 - DNA, 15 bp, Homo sapiens
caggaataagccaag

SEQ ID NO: 611049 - DNA, 15 bp, Homo sapiens
aggaataagccaagc

SEQ ID NO: 611050 - DNA, 15 bp, Homo sapiens
ggaataagccaagca

SEQ ID NO: 611051 - DNA, 15 bp, Homo sapiens
gaataagccaagcaa

SEQ ID NO: 611052 - DNA, 15 bp, Homo sapiens
aataagccaagcaag

SEQ ID NO: 611053 - DNA, 15 bp, Homo sapiens
ataagccaagcaagc

SEQ ID NO: 611054 - DNA, 15 bp, Homo sapiens
taagccaagcaagca

SEQ ID NO: 611055 - DNA, 15 bp, Homo sapiens
aagccaagcaagcag

SEQ ID NO: 611056 - DNA, 15 bp, Homo sapiens
agccaagcaagcagc

SEQ ID NO: 611057 - DNA, 15 bp, Homo sapiens
gccaagcaagcagcc

SEQ ID NO: 611058 - DNA, 15 bp, Homo sapiens
ccaagcaagcagcct

SEQ ID NO: 611059 - DNA, 15 bp, Homo sapiens
caagcaagcagccta

SEQ ID NO: 611060 - DNA, 15 bp, Homo sapiens
aagcaagcagcctac

SEQ ID NO: 611061 - DNA, 15 bp, Homo sapiens
agcaagcagcctact

SEQ ID NO: 611062 - DNA, 15 bp, Homo sapiens
gcaagcagcctactg

SEQ ID NO: 611063 - DNA, 15 bp, Homo sapiens
caagcagcctactgt

SEQ ID NO: 611064 - DNA, 15 bp, Homo sapiens
aagcagcctactgtt

SEQ ID NO: 611065 - DNA, 15 bp, Homo sapiens
agcagcctactgttt

SEQ ID NO: 611066 - DNA, 15 bp, Homo sapiens
gcagcctactgtttg

SEQ ID NO: 611067 - DNA, 15 bp, Homo sapiens
cagcctactgtttga

SEQ ID NO: 611068 - DNA, 15 bp, Homo sapiens
agcctactgtttgac

SEQ ID NO: 611069 - DNA, 15 bp, Homo sapiens
gcctactgtttgact

SEQ ID NO: 611070 - DNA, 15 bp, Homo sapiens
cctactgtttgactg

SEQ ID NO: 611071 - DNA, 15 bp, Homo sapiens
ctactgtttgactga

SEQ ID NO: 611072 - DNA, 15 bp, Homo sapiens
tactgtttgactgaa

SEQ ID NO: 611073 - DNA, 15 bp, Homo sapiens
actgtttgactgaat

SEQ ID NO: 611074 - DNA, 15 bp, Homo sapiens
ctgtttgactgaata

SEQ ID NO: 611075 - DNA, 15 bp, Homo sapiens
tgtttgactgaatat

SEQ ID NO: 611076 - DNA, 15 bp, Homo sapiens
gtttgactgaatatg

SEQ ID NO: 611077 - DNA, 15 bp, Homo sapiens
tttgactgaatatgg

SEQ ID NO: 611078 - DNA, 15 bp, Homo sapiens
ttgactgaatatgga

SEQ ID NO: 611079 - DNA, 15 bp, Homo sapiens
tgactgaatatggat

SEQ ID NO: 611080 - DNA, 15 bp, Homo sapiens
gactgaatatggatt

SEQ ID NO: 611081 - DNA, 15 bp, Homo sapiens
actgaatatggattt

SEQ ID NO: 611082 - DNA, 15 bp, Homo sapiens
ctgaatatggatttg

SEQ ID NO: 611083 - DNA, 15 bp, Homo sapiens
tgaatatggatttgg

SEQ ID NO: 611084 - DNA, 15 bp, Homo sapiens
gaatatggatttggg

SEQ ID NO: 611085 - DNA, 15 bp, Homo sapiens
aatatggatttgggg

SEQ ID NO: 611086 - DNA, 15 bp, Homo sapiens
atatggatttggggg

SEQ ID NO: 611087 - DNA, 15 bp, Homo sapiens
tatggatttgggggg

SEQ ID NO: 611088 - DNA, 15 bp, Homo sapiens
atggatttggggggt

SEQ ID NO: 611089 - DNA, 15 bp, Homo sapiens
tggatttggggggtg

SEQ ID NO: 611090 - DNA, 15 bp, Homo sapiens
ggatttggggggtgg

SEQ ID NO: 611091 - DNA, 15 bp, Homo sapiens
gatttggggggtggt

SEQ ID NO: 611092 - DNA, 15 bp, Homo sapiens
atttggggggtggta

SEQ ID NO: 611093 - DNA, 15 bp, Homo sapiens
tttggggggtggtag

SEQ ID NO: 611094 - DNA, 15 bp, Homo sapiens
ttggggggtggtaga

SEQ ID NO: 611095 - DNA, 15 bp, Homo sapiens
tggggggtggtagag

SEQ ID NO: 611096 - DNA, 15 bp, Homo sapiens
ggggggtggtagaga

SEQ ID NO: 611097 - DNA, 15 bp, Homo sapiens
gggggtggtagagaa

SEQ ID NO: 611098 - DNA, 15 bp, Homo sapiens
ggggtggtagagaaa

SEQ ID NO: 611099 - DNA, 15 bp, Homo sapiens
gggtggtagagaaag

SEQ ID NO: 611100 - DNA, 15 bp, Homo sapiens
ggtggtagagaaagg

SEQ ID NO: 611101 - DNA, 15 bp, Homo sapiens
gtggtagagaaaggg

SEQ ID NO: 611102 - DNA, 15 bp, Homo sapiens
tggtagagaaagggc

SEQ ID NO: 611103 - DNA, 15 bp, Homo sapiens
ggtagagaaagggcc

SEQ ID NO: 611104 - DNA, 15 bp, Homo sapiens
gtagagaaagggccg

SEQ ID NO: 611105 - DNA, 15 bp, Homo sapiens
tagagaaagggccgg

SEQ ID NO: 611106 - DNA, 15 bp, Homo sapiens
agagaaagggccggg

SEQ ID NO: 611107 - DNA, 15 bp, Homo sapiens
gagaaagggccgggg

SEQ ID NO: 611108 - DNA, 15 bp, Homo sapiens
agaaagggccggggt

SEQ ID NO: 611109 - DNA, 15 bp, Homo sapiens
gaaagggccggggtg

SEQ ID NO: 611110 - DNA, 15 bp, Homo sapiens
aaagggccggggtgg

SEQ ID NO: 611111 - DNA, 15 bp, Homo sapiens
aagggccggggtgga

SEQ ID NO: 611112 - DNA, 15 bp, Homo sapiens
agggccggggtggag

SEQ ID NO: 611113 - DNA, 15 bp, Homo sapiens
gggccggggtggagg

SEQ ID NO: 611114 - DNA, 15 bp, Homo sapiens
ggccggggtggaggg

SEQ ID NO: 611115 - DNA, 15 bp, Homo sapiens
gccggggtggagggt

SEQ ID NO: 611116 - DNA, 15 bp, Homo sapiens
ccggggtggagggtt

SEQ ID NO: 611117 - DNA, 15 bp, Homo sapiens
cggggtggagggttg

SEQ ID NO: 611118 - DNA, 15 bp, Homo sapiens
ggggtggagggttgg

SEQ ID NO: 611119 - DNA, 15 bp, Homo sapiens
gggtggagggttggg

SEQ ID NO: 611120 - DNA, 15 bp, Homo sapiens
ggtggagggttggga

SEQ ID NO: 611121 - DNA, 15 bp, Homo sapiens
gtggagggttgggag

SEQ ID NO: 611122 - DNA, 15 bp, Homo sapiens
tggagggttgggagg

SEQ ID NO: 611123 - DNA, 15 bp, Homo sapiens
ggagggttgggaggc

SEQ ID NO: 611124 - DNA, 15 bp, Homo sapiens
gagggttgggaggct

SEQ ID NO: 611125 - DNA, 15 bp, Homo sapiens
agggttgggaggctc

SEQ ID NO: 611126 - DNA, 15 bp, Homo sapiens
gggttgggaggctca

SEQ ID NO: 611127 - DNA, 15 bp, Homo sapiens
ggttgggaggctcat

SEQ ID NO: 611128 - DNA, 15 bp, Homo sapiens
gttgggaggctcatt

SEQ ID NO: 611129 - DNA, 15 bp, Homo sapiens
ttgggaggctcattt

SEQ ID NO: 611130 - DNA, 15 bp, Homo sapiens
tgggaggctcatttg

SEQ ID NO: 611131 - DNA, 15 bp, Homo sapiens
gggaggctcatttgt

SEQ ID NO: 611132 - DNA, 15 bp, Homo sapiens
ggaggctcatttgtc

SEQ ID NO: 611133 - DNA, 15 bp, Homo sapiens
gaggctcatttgtca

SEQ ID NO: 611134 - DNA, 15 bp, Homo sapiens
aggctcatttgtcat

SEQ ID NO: 611135 - DNA, 15 bp, Homo sapiens
ggctcatttgtcatt

SEQ ID NO: 611136 - DNA, 15 bp, Homo sapiens
gctcatttgtcatta

SEQ ID NO: 611137 - DNA, 15 bp, Homo sapiens
ctcatttgtcattat

SEQ ID NO: 611138 - DNA, 15 bp, Homo sapiens
tcatttgtcattata

SEQ ID NO: 611139 - DNA, 15 bp, Homo sapiens
catttgtcattatag

SEQ ID NO: 611140 - DNA, 15 bp, Homo sapiens
atttgtcattataga

SEQ ID NO: 611141 - DNA, 15 bp, Homo sapiens
tttgtcattatagat

SEQ ID NO: 611142 - DNA, 15 bp, Homo sapiens
ttgtcattatagatg

SEQ ID NO: 611143 - DNA, 15 bp, Homo sapiens
tgtcattatagatgg

SEQ ID NO: 611144 - DNA, 15 bp, Homo sapiens
gtcattatagatggg

SEQ ID NO: 611145 - DNA, 15 bp, Homo sapiens
tcattatagatgggg

SEQ ID NO: 611146 - DNA, 15 bp, Homo sapiens
cattatagatggggt

SEQ ID NO: 611147 - DNA, 15 bp, Homo sapiens
attatagatggggtc

SEQ ID NO: 611148 - DNA, 15 bp, Homo sapiens
ttatagatggggtca

SEQ ID NO: 611149 - DNA, 15 bp, Homo sapiens
tatagatggggtcag

SEQ ID NO: 611150 - DNA, 15 bp, Homo sapiens
atagatggggtcaga

SEQ ID NO: 611151 - DNA, 15 bp, Homo sapiens
tagatggggtcagac

SEQ ID NO: 611152 - DNA, 15 bp, Homo sapiens
agatggggtcagaca

SEQ ID NO: 611153 - DNA, 15 bp, Homo sapiens
gatggggtcagacac

SEQ ID NO: 611154 - DNA, 15 bp, Homo sapiens
atggggtcagacaca

SEQ ID NO: 611155 - DNA, 15 bp, Homo sapiens
tggggtcagacacac

SEQ ID NO: 611156 - DNA, 15 bp, Homo sapiens
ggggtcagacacact

SEQ ID NO: 611157 - DNA, 15 bp, Homo sapiens
gggtcagacacacta

SEQ ID NO: 611158 - DNA, 15 bp, Homo sapiens
ggtcagacacactac

SEQ ID NO: 611159 - DNA, 15 bp, Homo sapiens
gtcagacacactacc

SEQ ID NO: 611160 - DNA, 15 bp, Homo sapiens
tcagacacactacca

SEQ ID NO: 611161 - DNA, 15 bp, Homo sapiens
cagacacactaccaa

SEQ ID NO: 611162 - DNA, 15 bp, Homo sapiens
agacacactaccaaa

SEQ ID NO: 611163 - DNA, 15 bp, Homo sapiens
gacacactaccaaaa

SEQ ID NO: 611164 - DNA, 15 bp, Homo sapiens
acacactaccaaaac

SEQ ID NO: 611165 - DNA, 15 bp, Homo sapiens
cacactaccaaaaca

SEQ ID NO: 611166 - DNA, 15 bp, Homo sapiens
acactaccaaaacag

SEQ ID NO: 611167 - DNA, 15 bp, Homo sapiens
cactaccaaaacagc

SEQ ID NO: 611168 - DNA, 15 bp, Homo sapiens
actaccaaaacagca

SEQ ID NO: 611169 - DNA, 15 bp, Homo sapiens
ctaccaaaacagcag

SEQ ID NO: 611170 - DNA, 15 bp, Homo sapiens
taccaaaacagcagc

SEQ ID NO: 611171 - DNA, 15 bp, Homo sapiens
accaaaacagcagca

SEQ ID NO: 611172 - DNA, 15 bp, Homo sapiens
ccaaaacagcagcag

SEQ ID NO: 611173 - DNA, 15 bp, Homo sapiens
caaaacagcagcaga

SEQ ID NO: 611174 - DNA, 15 bp, Homo sapiens
aaaacagcagcagag

SEQ ID NO: 611175 - DNA, 15 bp, Homo sapiens
aaacagcagcagaga

SEQ ID NO: 611176 - DNA, 15 bp, Homo sapiens
aacagcagcagagat

SEQ ID NO: 611177 - DNA, 15 bp, Homo sapiens
acagcagcagagatc

SEQ ID NO: 611178 - DNA, 15 bp, Homo sapiens
cagcagcagagatct

SEQ ID NO: 611179 - DNA, 15 bp, Homo sapiens
agcagcagagatcta

SEQ ID NO: 611180 - DNA, 15 bp, Homo sapiens
gcagcagagatctac

SEQ ID NO: 611181 - DNA, 15 bp, Homo sapiens
cagcagagatctaca

SEQ ID NO: 611182 - DNA, 15 bp, Homo sapiens
agcagagatctacaa

SEQ ID NO: 611183 - DNA, 15 bp, Homo sapiens
gcagagatctacaat

SEQ ID NO: 611184 - DNA, 15 bp, Homo sapiens
cagagatctacaatt

SEQ ID NO: 611185 - DNA, 15 bp, Homo sapiens
agagatctacaattg

SEQ ID NO: 611186 - DNA, 15 bp, Homo sapiens
gagatctacaattga

SEQ ID NO: 611187 - DNA, 15 bp, Homo sapiens
agatctacaattgag

SEQ ID NO: 611188 - DNA, 15 bp, Homo sapiens
gatctacaattgagt

SEQ ID NO: 611189 - DNA, 15 bp, Homo sapiens
atctacaattgagtt

SEQ ID NO: 611190 - DNA, 15 bp, Homo sapiens
tctacaattgagttc

SEQ ID NO: 611191 - DNA, 15 bp, Homo sapiens
ctacaattgagttca

SEQ ID NO: 611192 - DNA, 15 bp, Homo sapiens
tacaattgagttcac

SEQ ID NO: 611193 - DNA, 15 bp, Homo sapiens
acaattgagttcacc

SEQ ID NO: 611194 - DNA, 15 bp, Homo sapiens
caattgagttcacct

SEQ ID NO: 611195 - DNA, 15 bp, Homo sapiens
aattgagttcaccta

SEQ ID NO: 611196 - DNA, 15 bp, Homo sapiens
attgagttcacctaa

SEQ ID NO: 611197 - DNA, 15 bp, Homo sapiens
ttgagttcacctaaa

SEQ ID NO: 611198 - DNA, 15 bp, Homo sapiens
tgagttcacctaaaa

SEQ ID NO: 611199 - DNA, 15 bp, Homo sapiens
gagttcacctaaaac

SEQ ID NO: 611200 - DNA, 15 bp, Homo sapiens
agttcacctaaaact

SEQ ID NO: 611201 - DNA, 15 bp, Homo sapiens
gttcacctaaaactc

SEQ ID NO: 611202 - DNA, 15 bp, Homo sapiens
ttcacctaaaactca

SEQ ID NO: 611203 - DNA, 15 bp, Homo sapiens
tcacctaaaactcag

SEQ ID NO: 611204 - DNA, 15 bp, Homo sapiens
cacctaaaactcagt

SEQ ID NO: 611205 - DNA, 15 bp, Homo sapiens
acctaaaactcagtg

SEQ ID NO: 611206 - DNA, 15 bp, Homo sapiens
cctaaaactcagtgt

SEQ ID NO: 611207 - DNA, 15 bp, Homo sapiens
ctaaaactcagtgtg

SEQ ID NO: 611208 - DNA, 15 bp, Homo sapiens
taaaactcagtgtgg

SEQ ID NO: 611209 - DNA, 15 bp, Homo sapiens
aaaactcagtgtgga

SEQ ID NO: 611210 - DNA, 15 bp, Homo sapiens
aaactcagtgtggac

SEQ ID NO: 611211 - DNA, 15 bp, Homo sapiens
aactcagtgtggaca

SEQ ID NO: 611212 - DNA, 15 bp, Homo sapiens
actcagtgtggacac

SEQ ID NO: 611213 - DNA, 15 bp, Homo sapiens
ctcagtgtggacaca

SEQ ID NO: 611214 - DNA, 15 bp, Homo sapiens
tcagtgtggacacag

SEQ ID NO: 611215 - DNA, 15 bp, Homo sapiens
cagtgtggacacagg

SEQ ID NO: 611216 - DNA, 15 bp, Homo sapiens
agtgtggacacagga

SEQ ID NO: 611217 - DNA, 15 bp, Homo sapiens
gtgtggacacaggaa

SEQ ID NO: 611218 - DNA, 15 bp, Homo sapiens
tgtggacacaggaaa

SEQ ID NO: 611219 - DNA, 15 bp, Homo sapiens
gtggacacaggaaac

SEQ ID NO: 611220 - DNA, 15 bp, Homo sapiens
tggacacaggaaacc

SEQ ID NO: 611221 - DNA, 15 bp, Homo sapiens
ggacacaggaaaccc

SEQ ID NO: 611222 - DNA, 15 bp, Homo sapiens
gacacaggaaaccct

SEQ ID NO: 611223 - DNA, 15 bp, Homo sapiens
acacaggaaaccctc

SEQ ID NO: 611224 - DNA, 15 bp, Homo sapiens
cacaggaaaccctct

SEQ ID NO: 611225 - DNA, 15 bp, Homo sapiens
acaggaaaccctctt

SEQ ID NO: 611226 - DNA, 15 bp, Homo sapiens
caggaaaccctcttt

SEQ ID NO: 611227 - DNA, 15 bp, Homo sapiens
aggaaaccctctttt

SEQ ID NO: 611228 - DNA, 15 bp, Homo sapiens
ggaaaccctctttta

SEQ ID NO: 611229 - DNA, 15 bp, Homo sapiens
gaaaccctcttttaa

SEQ ID NO: 611230 - DNA, 15 bp, Homo sapiens
aaaccctcttttaat

SEQ ID NO: 611231 - DNA, 15 bp, Homo sapiens
aaccctcttttaata

SEQ ID NO: 611232 - DNA, 15 bp, Homo sapiens
accctcttttaataa

SEQ ID NO: 611233 - DNA, 15 bp, Homo sapiens
ccctcttttaataac

SEQ ID NO: 611234 - DNA, 15 bp, Homo sapiens
cctcttttaataact

SEQ ID NO: 611235 - DNA, 15 bp, Homo sapiens
ctcttttaataactg

SEQ ID NO: 611236 - DNA, 15 bp, Homo sapiens
tcttttaataactgt

SEQ ID NO: 611237 - DNA, 15 bp, Homo sapiens
cttttaataactgtc

SEQ ID NO: 611238 - DNA, 15 bp, Homo sapiens
ttttaataactgtcc

SEQ ID NO: 611239 - DNA, 15 bp, Homo sapiens
tttaataactgtcca

SEQ ID NO: 611240 - DNA, 15 bp, Homo sapiens
ttaataactgtccaa

SEQ ID NO: 611241 - DNA, 15 bp, Homo sapiens
taataactgtccaat

SEQ ID NO: 611242 - DNA, 15 bp, Homo sapiens
aataactgtccaatg

SEQ ID NO: 611243 - DNA, 15 bp, Homo sapiens
ataactgtccaatgg

SEQ ID NO: 611244 - DNA, 15 bp, Homo sapiens
taactgtccaatggg

SEQ ID NO: 611245 - DNA, 15 bp, Homo sapiens
aactgtccaatgggt

SEQ ID NO: 611246 - DNA, 15 bp, Homo sapiens
actgtccaatgggtt

SEQ ID NO: 611247 - DNA, 15 bp, Homo sapiens
ctgtccaatgggttt

SEQ ID NO: 611248 - DNA, 15 bp, Homo sapiens
tgtccaatgggtttt

SEQ ID NO: 611249 - DNA, 15 bp, Homo sapiens
gtccaatgggttttc

SEQ ID NO: 611250 - DNA, 15 bp, Homo sapiens
tccaatgggttttcc

SEQ ID NO: 611251 - DNA, 15 bp, Homo sapiens
ccaatgggttttcca

SEQ ID NO: 611252 - DNA, 15 bp, Homo sapiens
caatgggttttccag

SEQ ID NO: 611253 - DNA, 15 bp, Homo sapiens
aatgggttttccagc

SEQ ID NO: 611254 - DNA, 15 bp, Homo sapiens
atgggttttccagcc

SEQ ID NO: 611255 - DNA, 15 bp, Homo sapiens
tgggttttccagcct

SEQ ID NO: 611256 - DNA, 15 bp, Homo sapiens
gggttttccagcctc

SEQ ID NO: 611257 - DNA, 15 bp, Homo sapiens
ggttttccagcctca

SEQ ID NO: 611258 - DNA, 15 bp, Homo sapiens
gttttccagcctcag

SEQ ID NO: 611259 - DNA, 15 bp, Homo sapiens
ttttccagcctcagc

SEQ ID NO: 611260 - DNA, 15 bp, Homo sapiens
tttccagcctcagct

SEQ ID NO: 611261 - DNA, 15 bp, Homo sapiens
ttccagcctcagctc

SEQ ID NO: 611262 - DNA, 15 bp, Homo sapiens
tccagcctcagctct

SEQ ID NO: 611263 - DNA, 15 bp, Homo sapiens
ccagcctcagctcta

SEQ ID NO: 611264 - DNA, 15 bp, Homo sapiens
cagcctcagctctac

SEQ ID NO: 611265 - DNA, 15 bp, Homo sapiens
agcctcagctctaca

SEQ ID NO: 611266 - DNA, 15 bp, Homo sapiens
gcctcagctctacag

SEQ ID NO: 611267 - DNA, 15 bp, Homo sapiens
cctcagctctacaga

SEQ ID NO: 611268 - DNA, 15 bp, Homo sapiens
ctcagctctacagaa

SEQ ID NO: 611269 - DNA, 15 bp, Homo sapiens
tcagctctacagaaa

SEQ ID NO: 611270 - DNA, 15 bp, Homo sapiens
cagctctacagaaaa

SEQ ID NO: 611271 - DNA, 15 bp, Homo sapiens
agctctacagaaaac

SEQ ID NO: 611272 - DNA, 15 bp, Homo sapiens
gctctacagaaaact

SEQ ID NO: 611273 - DNA, 15 bp, Homo sapiens
ctctacagaaaactt

SEQ ID NO: 611274 - DNA, 15 bp, Homo sapiens
tctacagaaaacttg

SEQ ID NO: 611275 - DNA, 15 bp, Homo sapiens
ctacagaaaacttga

SEQ ID NO: 611276 - DNA, 15 bp, Homo sapiens
tacagaaaacttgag

SEQ ID NO: 611277 - DNA, 15 bp, Homo sapiens
acagaaaacttgaga

SEQ ID NO: 611278 - DNA, 15 bp, Homo sapiens
cagaaaacttgagat

SEQ ID NO: 611279 - DNA, 15 bp, Homo sapiens
agaaaacttgagata

SEQ ID NO: 611280 - DNA, 15 bp, Homo sapiens
gaaaacttgagataa

SEQ ID NO: 611281 - DNA, 15 bp, Homo sapiens
aaaacttgagataac

SEQ ID NO: 611282 - DNA, 15 bp, Homo sapiens
aaacttgagataaca

SEQ ID NO: 611283 - DNA, 15 bp, Homo sapiens
aacttgagataacag

SEQ ID NO: 611284 - DNA, 15 bp, Homo sapiens
acttgagataacagt

SEQ ID NO: 611285 - DNA, 15 bp, Homo sapiens
cttgagataacagtg

SEQ ID NO: 611286 - DNA, 15 bp, Homo sapiens
ttgagataacagtgg

SEQ ID NO: 611287 - DNA, 15 bp, Homo sapiens
tgagataacagtggc

SEQ ID NO: 611288 - DNA, 15 bp, Homo sapiens
gagataacagtggcc

SEQ ID NO: 611289 - DNA, 15 bp, Homo sapiens
agataacagtggcca

SEQ ID NO: 611290 - DNA, 15 bp, Homo sapiens
gataacagtggccag

SEQ ID NO: 611291 - DNA, 15 bp, Homo sapiens
ataacagtggccagt

SEQ ID NO: 611292 - DNA, 15 bp, Homo sapiens
taacagtggccagtc

SEQ ID NO: 611293 - DNA, 15 bp, Homo sapiens
aacagtggccagtct

SEQ ID NO: 611294 - DNA, 15 bp, Homo sapiens
acagtggccagtctg

SEQ ID NO: 611295 - DNA, 15 bp, Homo sapiens
cagtggccagtctgc

SEQ ID NO: 611296 - DNA, 15 bp, Homo sapiens
agtggccagtctgca

SEQ ID NO: 611297 - DNA, 15 bp, Homo sapiens
gtggccagtctgcag

SEQ ID NO: 611298 - DNA, 15 bp, Homo sapiens
tggccagtctgcagt

SEQ ID NO: 611299 - DNA, 15 bp, Homo sapiens
ggccagtctgcagtt

SEQ ID NO: 611300 - DNA, 15 bp, Homo sapiens
gccagtctgcagtta

SEQ ID NO: 611301 - DNA, 15 bp, Homo sapiens
ccagtctgcagttag

SEQ ID NO: 611302 - DNA, 15 bp, Homo sapiens
cagtctgcagttagt

SEQ ID NO: 611303 - DNA, 15 bp, Homo sapiens
agtctgcagttagtt

SEQ ID NO: 611304 - DNA, 15 bp, Homo sapiens
gtctgcagttagttt

SEQ ID NO: 611305 - DNA, 15 bp, Homo sapiens
tctgcagttagtttg

SEQ ID NO: 611306 - DNA, 15 bp, Homo sapiens
ctgcagttagtttgg

SEQ ID NO: 611307 - DNA, 15 bp, Homo sapiens
tgcagttagtttggg

SEQ ID NO: 611308 - DNA, 15 bp, Homo sapiens
gcagttagtttgggt

SEQ ID NO: 611309 - DNA, 15 bp, Homo sapiens
cagttagtttgggtt

SEQ ID NO: 611310 - DNA, 15 bp, Homo sapiens
agttagtttgggttc

SEQ ID NO: 611311 - DNA, 15 bp, Homo sapiens
gttagtttgggttcg

SEQ ID NO: 611312 - DNA, 15 bp, Homo sapiens
ttagtttgggttcgg

SEQ ID NO: 611313 - DNA, 15 bp, Homo sapiens
tagtttgggttcgga

SEQ ID NO: 611314 - DNA, 15 bp, Homo sapiens
agtttgggttcggac

SEQ ID NO: 611315 - DNA, 15 bp, Homo sapiens
gtttgggttcggaca

SEQ ID NO: 611316 - DNA, 15 bp, Homo sapiens
tttgggttcggacaa

SEQ ID NO: 611317 - DNA, 15 bp, Homo sapiens
ttgggttcggacaat

SEQ ID NO: 611318 - DNA, 15 bp, Homo sapiens
tgggttcggacaata

SEQ ID NO: 611319 - DNA, 15 bp, Homo sapiens
gggttcggacaatag

SEQ ID NO: 611320 - DNA, 15 bp, Homo sapiens
ggttcggacaatagg

SEQ ID NO: 611321 - DNA, 15 bp, Homo sapiens
gttcggacaataggc

SEQ ID NO: 611322 - DNA, 15 bp, Homo sapiens
ttcggacaataggca

SEQ ID NO: 611323 - DNA, 15 bp, Homo sapiens
tcggacaataggcag

SEQ ID NO: 611324 - DNA, 15 bp, Homo sapiens
cggacaataggcaga

SEQ ID NO: 611325 - DNA, 15 bp, Homo sapiens
ggacaataggcagag

SEQ ID NO: 611326 - DNA, 15 bp, Homo sapiens
gacaataggcagagc

SEQ ID NO: 611327 - DNA, 15 bp, Homo sapiens
acaataggcagagct

SEQ ID NO: 611328 - DNA, 15 bp, Homo sapiens
caataggcagagctg

SEQ ID NO: 611329 - DNA, 15 bp, Homo sapiens
aataggcagagctgg

SEQ ID NO: 611330 - DNA, 15 bp, Homo sapiens
ataggcagagctggg

SEQ ID NO: 611331 - DNA, 15 bp, Homo sapiens
taggcagagctggga

SEQ ID NO: 611332 - DNA, 15 bp, Homo sapiens
aggcagagctgggaa

SEQ ID NO: 611333 - DNA, 15 bp, Homo sapiens
ggcagagctgggaaa

SEQ ID NO: 611334 - DNA, 15 bp, Homo sapiens
gcagagctgggaaat

SEQ ID NO: 611335 - DNA, 15 bp, Homo sapiens
cagagctgggaaatg

SEQ ID NO: 611336 - DNA, 15 bp, Homo sapiens
agagctgggaaatgg

SEQ ID NO: 611337 - DNA, 15 bp, Homo sapiens
gagctgggaaatgga

SEQ ID NO: 611338 - DNA, 15 bp, Homo sapiens
agctgggaaatggag

SEQ ID NO: 611339 - DNA, 15 bp, Homo sapiens
gctgggaaatggagc

SEQ ID NO: 611340 - DNA, 15 bp, Homo sapiens
ctgggaaatggagcc

SEQ ID NO: 611341 - DNA, 15 bp, Homo sapiens
tgggaaatggagcca

SEQ ID NO: 611342 - DNA, 15 bp, Homo sapiens
gggaaatggagccag

SEQ ID NO: 611343 - DNA, 15 bp, Homo sapiens
ggaaatggagccagg

SEQ ID NO: 611344 - DNA, 15 bp, Homo sapiens
gaaatggagccaggg

SEQ ID NO: 611345 - DNA, 15 bp, Homo sapiens
aaatggagccagggg

SEQ ID NO: 611346 - DNA, 15 bp, Homo sapiens
aatggagccaggggc

SEQ ID NO: 611347 - DNA, 15 bp, Homo sapiens
atggagccaggggcg

SEQ ID NO: 611348 - DNA, 15 bp, Homo sapiens
tggagccaggggcga

SEQ ID NO: 611349 - DNA, 15 bp, Homo sapiens
ggagccaggggcgaa

SEQ ID NO: 611350 - DNA, 15 bp, Homo sapiens
gagccaggggcgaaa

SEQ ID NO: 611351 - DNA, 15 bp, Homo sapiens
agccaggggcgaaag

SEQ ID NO: 611352 - DNA, 15 bp, Homo sapiens
gccaggggcgaaagc

SEQ ID NO: 611353 - DNA, 15 bp, Homo sapiens
ccaggggcgaaagcc

SEQ ID NO: 611354 - DNA, 15 bp, Homo sapiens
caggggcgaaagccc

SEQ ID NO: 611355 - DNA, 15 bp, Homo sapiens
aggggcgaaagccca

SEQ ID NO: 611356 - DNA, 15 bp, Homo sapiens
ggggcgaaagcccag

SEQ ID NO: 611357 - DNA, 15 bp, Homo sapiens
gggcgaaagcccagg

SEQ ID NO: 611358 - DNA, 15 bp, Homo sapiens
ggcgaaagcccaggt

SEQ ID NO: 611359 - DNA, 15 bp, Homo sapiens
gcgaaagcccaggtc

SEQ ID NO: 611360 - DNA, 15 bp, Homo sapiens
cgaaagcccaggtcc

SEQ ID NO: 611361 - DNA, 15 bp, Homo sapiens
gaaagcccaggtcca

SEQ ID NO: 611362 - DNA, 15 bp, Homo sapiens
aaagcccaggtccac

SEQ ID NO: 611363 - DNA, 15 bp, Homo sapiens
aagcccaggtccact

SEQ ID NO: 611364 - DNA, 15 bp, Homo sapiens
agcccaggtccactt

SEQ ID NO: 611365 - DNA, 15 bp, Homo sapiens
gcccaggtccacttt

SEQ ID NO: 611366 - DNA, 15 bp, Homo sapiens
cccaggtccacttta

SEQ ID NO: 611367 - DNA, 15 bp, Homo sapiens
ccaggtccactttag

SEQ ID NO: 611368 - DNA, 15 bp, Homo sapiens
caggtccactttagg

SEQ ID NO: 611369 - DNA, 15 bp, Homo sapiens
aggtccactttagga

SEQ ID NO: 611370 - DNA, 15 bp, Homo sapiens
ggtccactttaggat

SEQ ID NO: 611371 - DNA, 15 bp, Homo sapiens
gtccactttaggatc

SEQ ID NO: 611372 - DNA, 15 bp, Homo sapiens
tccactttaggatca

SEQ ID NO: 611373 - DNA, 15 bp, Homo sapiens
ccactttaggatcag

SEQ ID NO: 611374 - DNA, 15 bp, Homo sapiens
cactttaggatcagg

SEQ ID NO: 611375 - DNA, 15 bp, Homo sapiens
actttaggatcagga

SEQ ID NO: 611376 - DNA, 15 bp, Homo sapiens
ctttaggatcaggac

SEQ ID NO: 611377 - DNA, 15 bp, Homo sapiens
tttaggatcaggacg

SEQ ID NO: 611378 - DNA, 15 bp, Homo sapiens
ttaggatcaggacgg

SEQ ID NO: 611379 - DNA, 15 bp, Homo sapiens
taggatcaggacggg

SEQ ID NO: 611380 - DNA, 15 bp, Homo sapiens
aggatcaggacggga

SEQ ID NO: 611381 - DNA, 15 bp, Homo sapiens
ggatcaggacgggag

SEQ ID NO: 611382 - DNA, 15 bp, Homo sapiens
gatcaggacgggagt

SEQ ID NO: 611383 - DNA, 15 bp, Homo sapiens
atcaggacgggagtg

SEQ ID NO: 611384 - DNA, 15 bp, Homo sapiens
tcaggacgggagtgg

SEQ ID NO: 611385 - DNA, 15 bp, Homo sapiens
caggacgggagtggc

SEQ ID NO: 611386 - DNA, 15 bp, Homo sapiens
aggacgggagtggct

SEQ ID NO: 611387 - DNA, 15 bp, Homo sapiens
ggacgggagtggctg

SEQ ID NO: 611388 - DNA, 15 bp, Homo sapiens
gacgggagtggctgg

SEQ ID NO: 611389 - DNA, 15 bp, Homo sapiens
acgggagtggctggt

SEQ ID NO: 611390 - DNA, 15 bp, Homo sapiens
cgggagtggctggtg

SEQ ID NO: 611391 - DNA, 15 bp, Homo sapiens
gggagtggctggtgg

SEQ ID NO: 611392 - DNA, 15 bp, Homo sapiens
ggagtggctggtggg

SEQ ID NO: 611393 - DNA, 15 bp, Homo sapiens
gagtggctggtgggg

SEQ ID NO: 611394 - DNA, 15 bp, Homo sapiens
agtggctggtgggga

SEQ ID NO: 611395 - DNA, 15 bp, Homo sapiens
gtggctggtggggaa

SEQ ID NO: 611396 - DNA, 15 bp, Homo sapiens
tggctggtggggaag

SEQ ID NO: 611397 - DNA, 15 bp, Homo sapiens
ggctggtggggaagt

SEQ ID NO: 611398 - DNA, 15 bp, Homo sapiens
gctggtggggaagtg

SEQ ID NO: 611399 - DNA, 15 bp, Homo sapiens
ctggtggggaagtga

SEQ ID NO: 611400 - DNA, 15 bp, Homo sapiens
tggtggggaagtgag

SEQ ID NO: 611401 - DNA, 15 bp, Homo sapiens
ggtggggaagtgagg

SEQ ID NO: 611402 - DNA, 15 bp, Homo sapiens
gtggggaagtgaggt

SEQ ID NO: 611403 - DNA, 15 bp, Homo sapiens
tggggaagtgaggtg

SEQ ID NO: 611404 - DNA, 15 bp, Homo sapiens
ggggaagtgaggtgg

SEQ ID NO: 611405 - DNA, 15 bp, Homo sapiens
gggaagtgaggtggg

SEQ ID NO: 611406 - DNA, 15 bp, Homo sapiens
ggaagtgaggtgggt

SEQ ID NO: 611407 - DNA, 15 bp, Homo sapiens
gaagtgaggtgggtg

SEQ ID NO: 611408 - DNA, 15 bp, Homo sapiens
aagtgaggtgggtgt

SEQ ID NO: 611409 - DNA, 15 bp, Homo sapiens
agtgaggtgggtgtg

SEQ ID NO: 611410 - DNA, 15 bp, Homo sapiens
gtgaggtgggtgtgg

SEQ ID NO: 611411 - DNA, 15 bp, Homo sapiens
tgaggtgggtgtggg

SEQ ID NO: 611412 - DNA, 15 bp, Homo sapiens
gaggtgggtgtgggg

SEQ ID NO: 611413 - DNA, 15 bp, Homo sapiens
aggtgggtgtgggga

SEQ ID NO: 611414 - DNA, 15 bp, Homo sapiens
ggtgggtgtggggag

SEQ ID NO: 611415 - DNA, 15 bp, Homo sapiens
gtgggtgtggggagg

SEQ ID NO: 611416 - DNA, 15 bp, Homo sapiens
tgggtgtggggaggc

SEQ ID NO: 611417 - DNA, 15 bp, Homo sapiens
gggtgtggggaggca

SEQ ID NO: 611418 - DNA, 15 bp, Homo sapiens
ggtgtggggaggcaa

SEQ ID NO: 611419 - DNA, 15 bp, Homo sapiens
gtgtggggaggcaat

SEQ ID NO: 611420 - DNA, 15 bp, Homo sapiens
tgtggggaggcaata

SEQ ID NO: 611421 - DNA, 15 bp, Homo sapiens
gtggggaggcaatag

SEQ ID NO: 611422 - DNA, 15 bp, Homo sapiens
tggggaggcaatagg

SEQ ID NO: 611423 - DNA, 15 bp, Homo sapiens
ggggaggcaataggg

SEQ ID NO: 611424 - DNA, 15 bp, Homo sapiens
gggaggcaataggga

SEQ ID NO: 611425 - DNA, 15 bp, Homo sapiens
ggaggcaatagggag

SEQ ID NO: 611426 - DNA, 15 bp, Homo sapiens
gaggcaatagggagc

SEQ ID NO: 611427 - DNA, 15 bp, Homo sapiens
aggcaatagggagct

SEQ ID NO: 611428 - DNA, 15 bp, Homo sapiens
ggcaatagggagctg

SEQ ID NO: 611429 - DNA, 15 bp, Homo sapiens
gcaatagggagctgg

SEQ ID NO: 611430 - DNA, 15 bp, Homo sapiens
caatagggagctggg

SEQ ID NO: 611431 - DNA, 15 bp, Homo sapiens
aatagggagctgggt

SEQ ID NO: 611432 - DNA, 15 bp, Homo sapiens
atagggagctgggtc

SEQ ID NO: 611433 - DNA, 15 bp, Homo sapiens
tagggagctgggtca

SEQ ID NO: 611434 - DNA, 15 bp, Homo sapiens
agggagctgggtcat

SEQ ID NO: 611435 - DNA, 15 bp, Homo sapiens
gggagctgggtcatt

SEQ ID NO: 611436 - DNA, 15 bp, Homo sapiens
ggagctgggtcattt

SEQ ID NO: 611437 - DNA, 15 bp, Homo sapiens
gagctgggtcatttg

SEQ ID NO: 611438 - DNA, 15 bp, Homo sapiens
agctgggtcatttgg

SEQ ID NO: 611439 - DNA, 15 bp, Homo sapiens
gctgggtcatttggt

SEQ ID NO: 611440 - DNA, 15 bp, Homo sapiens
ctgggtcatttggta

SEQ ID NO: 611441 - DNA, 15 bp, Homo sapiens
tgggtcatttggtat

SEQ ID NO: 611442 - DNA, 15 bp, Homo sapiens
gggtcatttggtatg

SEQ ID NO: 611443 - DNA, 15 bp, Homo sapiens
ggtcatttggtatgg

SEQ ID NO: 611444 - DNA, 15 bp, Homo sapiens
gtcatttggtatggg

SEQ ID NO: 611445 - DNA, 15 bp, Homo sapiens
tcatttggtatggga

SEQ ID NO: 611446 - DNA, 15 bp, Homo sapiens
catttggtatgggag

SEQ ID NO: 611447 - DNA, 15 bp, Homo sapiens
atttggtatgggaga

SEQ ID NO: 611448 - DNA, 15 bp, Homo sapiens
tttggtatgggagag

SEQ ID NO: 611449 - DNA, 15 bp, Homo sapiens
ttggtatgggagagt

SEQ ID NO: 611450 - DNA, 15 bp, Homo sapiens
tggtatgggagagtc

SEQ ID NO: 611451 - DNA, 15 bp, Homo sapiens
ggtatgggagagtcc

SEQ ID NO: 611452 - DNA, 15 bp, Homo sapiens
gtatgggagagtcct

SEQ ID NO: 611453 - DNA, 15 bp, Homo sapiens
tatgggagagtcctc

SEQ ID NO: 611454 - DNA, 15 bp, Homo sapiens
atgggagagtcctct

SEQ ID NO: 611455 - DNA, 15 bp, Homo sapiens
tgggagagtcctctg

SEQ ID NO: 611456 - DNA, 15 bp, Homo sapiens
gggagagtcctctgg

SEQ ID NO: 611457 - DNA, 15 bp, Homo sapiens
ggagagtcctctggt

SEQ ID NO: 611458 - DNA, 15 bp, Homo sapiens
gagagtcctctggtg

SEQ ID NO: 611459 - DNA, 15 bp, Homo sapiens
agagtcctctggtgg

SEQ ID NO: 611460 - DNA, 15 bp, Homo sapiens
gagtcctctggtggc

SEQ ID NO: 611461 - DNA, 15 bp, Homo sapiens
agtcctctggtggct

SEQ ID NO: 611462 - DNA, 15 bp, Homo sapiens
gtcctctggtggcta

SEQ ID NO: 611463 - DNA, 15 bp, Homo sapiens
tcctctggtggctag

SEQ ID NO: 611464 - DNA, 15 bp, Homo sapiens
cctctggtggctagt

SEQ ID NO: 611465 - DNA, 15 bp, Homo sapiens
ctctggtggctagtc

SEQ ID NO: 611466 - DNA, 15 bp, Homo sapiens
tctggtggctagtcc

SEQ ID NO: 611467 - DNA, 15 bp, Homo sapiens
ctggtggctagtccc

SEQ ID NO: 611468 - DNA, 15 bp, Homo sapiens
tggtggctagtccca

SEQ ID NO: 611469 - DNA, 15 bp, Homo sapiens
ggtggctagtcccag

SEQ ID NO: 611470 - DNA, 15 bp, Homo sapiens
gtggctagtcccaga

SEQ ID NO: 611471 - DNA, 15 bp, Homo sapiens
tggctagtcccagaa

SEQ ID NO: 611472 - DNA, 15 bp, Homo sapiens
ggctagtcccagaag

SEQ ID NO: 611473 - DNA, 15 bp, Homo sapiens
gctagtcccagaagt

SEQ ID NO: 611474 - DNA, 15 bp, Homo sapiens
ctagtcccagaagtg

SEQ ID NO: 611475 - DNA, 15 bp, Homo sapiens
tagtcccagaagtgc

SEQ ID NO: 611476 - DNA, 15 bp, Homo sapiens
agtcccagaagtgca

SEQ ID NO: 611477 - DNA, 15 bp, Homo sapiens
gtcccagaagtgcat

SEQ ID NO: 611478 - DNA, 15 bp, Homo sapiens
tcccagaagtgcatg

SEQ ID NO: 611479 - DNA, 15 bp, Homo sapiens
cccagaagtgcatgc

SEQ ID NO: 611480 - DNA, 15 bp, Homo sapiens
ccagaagtgcatgct

SEQ ID NO: 611481 - DNA, 15 bp, Homo sapiens
cagaagtgcatgctt

SEQ ID NO: 611482 - DNA, 15 bp, Homo sapiens
agaagtgcatgcttt

SEQ ID NO: 611483 - DNA, 15 bp, Homo sapiens
gaagtgcatgcttta

SEQ ID NO: 611484 - DNA, 15 bp, Homo sapiens
aagtgcatgctttac

SEQ ID NO: 611485 - DNA, 15 bp, Homo sapiens
agtgcatgctttacg

SEQ ID NO: 611486 - DNA, 15 bp, Homo sapiens
gtgcatgctttacga

SEQ ID NO: 611487 - DNA, 15 bp, Homo sapiens
tgcatgctttacgaa

SEQ ID NO: 611488 - DNA, 15 bp, Homo sapiens
gcatgctttacgaac

SEQ ID NO: 611489 - DNA, 15 bp, Homo sapiens
catgctttacgaaca

SEQ ID NO: 611490 - DNA, 15 bp, Homo sapiens
atgctttacgaacat

SEQ ID NO: 611491 - DNA, 15 bp, Homo sapiens
tgctttacgaacata

SEQ ID NO: 611492 - DNA, 15 bp, Homo sapiens
gctttacgaacatat

SEQ ID NO: 611493 - DNA, 15 bp, Homo sapiens
ctttacgaacatatg

SEQ ID NO: 611494 - DNA, 15 bp, Homo sapiens
tttacgaacatatgc

SEQ ID NO: 611495 - DNA, 15 bp, Homo sapiens
ttacgaacatatgct

SEQ ID NO: 611496 - DNA, 15 bp, Homo sapiens
tacgaacatatgctt

SEQ ID NO: 611497 - DNA, 15 bp, Homo sapiens
acgaacatatgcttc

SEQ ID NO: 611498 - DNA, 15 bp, Homo sapiens
cgaacatatgcttct

SEQ ID NO: 611499 - DNA, 15 bp, Homo sapiens
gaacatatgcttctc

SEQ ID NO: 611500 - DNA, 15 bp, Homo sapiens
aacatatgcttctct

SEQ ID NO: 611501 - DNA, 15 bp, Homo sapiens
acatatgcttctctc

SEQ ID NO: 611502 - DNA, 15 bp, Homo sapiens
catatgcttctctcc

SEQ ID NO: 611503 - DNA, 15 bp, Homo sapiens
atatgcttctctccc

SEQ ID NO: 611504 - DNA, 15 bp, Homo sapiens
tatgcttctctccct

SEQ ID NO: 611505 - DNA, 15 bp, Homo sapiens
atgcttctctcccta

SEQ ID NO: 611506 - DNA, 15 bp, Homo sapiens
tgcttctctccctag

SEQ ID NO: 611507 - DNA, 15 bp, Homo sapiens
gcttctctccctagg

SEQ ID NO: 611508 - DNA, 15 bp, Homo sapiens
cttctctccctaggg

SEQ ID NO: 611509 - DNA, 15 bp, Homo sapiens
ttctctccctagggc

SEQ ID NO: 611510 - DNA, 15 bp, Homo sapiens
tctctccctagggcc

SEQ ID NO: 611511 - DNA, 15 bp, Homo sapiens
ctctccctagggcca

SEQ ID NO: 611512 - DNA, 15 bp, Homo sapiens
tctccctagggccac

SEQ ID NO: 611513 - DNA, 15 bp, Homo sapiens
ctccctagggccacc

SEQ ID NO: 611514 - DNA, 15 bp, Homo sapiens
tccctagggccacct

SEQ ID NO: 611515 - DNA, 15 bp, Homo sapiens
ccctagggccacctt

SEQ ID NO: 611516 - DNA, 15 bp, Homo sapiens
cctagggccaccttg

SEQ ID NO: 611517 - DNA, 15 bp, Homo sapiens
ctagggccaccttga

SEQ ID NO: 611518 - DNA, 15 bp, Homo sapiens
tagggccaccttgag

SEQ ID NO: 611519 - DNA, 15 bp, Homo sapiens
agggccaccttgagt

SEQ ID NO: 611520 - DNA, 15 bp, Homo sapiens
gggccaccttgagtg

SEQ ID NO: 611521 - DNA, 15 bp, Homo sapiens
ggccaccttgagtga

SEQ ID NO: 611522 - DNA, 15 bp, Homo sapiens
gccaccttgagtgaa

SEQ ID NO: 611523 - DNA, 15 bp, Homo sapiens
ccaccttgagtgaaa

SEQ ID NO: 611524 - DNA, 15 bp, Homo sapiens
caccttgagtgaaac

SEQ ID NO: 611525 - DNA, 15 bp, Homo sapiens
accttgagtgaaacc

SEQ ID NO: 611526 - DNA, 15 bp, Homo sapiens
ccttgagtgaaaccc

SEQ ID NO: 611527 - DNA, 15 bp, Homo sapiens
cttgagtgaaaccct

SEQ ID NO: 611528 - DNA, 15 bp, Homo sapiens
ttgagtgaaaccctc

SEQ ID NO: 611529 - DNA, 15 bp, Homo sapiens
tgagtgaaaccctcc

SEQ ID NO: 611530 - DNA, 15 bp, Homo sapiens
gagtgaaaccctccc

SEQ ID NO: 611531 - DNA, 15 bp, Homo sapiens
agtgaaaccctccca

SEQ ID NO: 611532 - DNA, 15 bp, Homo sapiens
gtgaaaccctcccat

SEQ ID NO: 611533 - DNA, 15 bp, Homo sapiens
tgaaaccctcccatg

SEQ ID NO: 611534 - DNA, 15 bp, Homo sapiens
gaaaccctcccatgc

SEQ ID NO: 611535 - DNA, 15 bp, Homo sapiens
aaaccctcccatgct

SEQ ID NO: 611536 - DNA, 15 bp, Homo sapiens
aaccctcccatgctg

SEQ ID NO: 611537 - DNA, 15 bp, Homo sapiens
accctcccatgctgg

SEQ ID NO: 611538 - DNA, 15 bp, Homo sapiens
ccctcccatgctgga

SEQ ID NO: 611539 - DNA, 15 bp, Homo sapiens
cctcccatgctggaa

SEQ ID NO: 611540 - DNA, 15 bp, Homo sapiens
ctcccatgctggaat

SEQ ID NO: 611541 - DNA, 15 bp, Homo sapiens
tcccatgctggaatt

SEQ ID NO: 611542 - DNA, 15 bp, Homo sapiens
cccatgctggaattg

SEQ ID NO: 611543 - DNA, 15 bp, Homo sapiens
ccatgctggaattgg

SEQ ID NO: 611544 - DNA, 15 bp, Homo sapiens
catgctggaattggg

SEQ ID NO: 611545 - DNA, 15 bp, Homo sapiens
atgctggaattgggc

SEQ ID NO: 611546 - DNA, 15 bp, Homo sapiens
tgctggaattgggcc

SEQ ID NO: 611547 - DNA, 15 bp, Homo sapiens
gctggaattgggccc

SEQ ID NO: 611548 - DNA, 15 bp, Homo sapiens
ctggaattgggccct

SEQ ID NO: 611549 - DNA, 15 bp, Homo sapiens
tggaattgggccctt

SEQ ID NO: 611550 - DNA, 15 bp, Homo sapiens
ggaattgggcccttt

SEQ ID NO: 611551 - DNA, 15 bp, Homo sapiens
gaattgggccctttc

SEQ ID NO: 611552 - DNA, 15 bp, Homo sapiens
aattgggccctttca

SEQ ID NO: 611553 - DNA, 15 bp, Homo sapiens
attgggccctttcag

SEQ ID NO: 611554 - DNA, 15 bp, Homo sapiens
ttgggccctttcagt

SEQ ID NO: 611555 - DNA, 15 bp, Homo sapiens
tgggccctttcagtg

SEQ ID NO: 611556 - DNA, 15 bp, Homo sapiens
gggccctttcagtga

SEQ ID NO: 611557 - DNA, 15 bp, Homo sapiens
ggccctttcagtgac

SEQ ID NO: 611558 - DNA, 15 bp, Homo sapiens
gccctttcagtgaca

SEQ ID NO: 611559 - DNA, 15 bp, Homo sapiens
ccctttcagtgacaa

SEQ ID NO: 611560 - DNA, 15 bp, Homo sapiens
cctttcagtgacaac

SEQ ID NO: 611561 - DNA, 15 bp, Homo sapiens
ctttcagtgacaaca

SEQ ID NO: 611562 - DNA, 15 bp, Homo sapiens
tttcagtgacaacac

SEQ ID NO: 611563 - DNA, 15 bp, Homo sapiens
ttcagtgacaacaca

SEQ ID NO: 611564 - DNA, 15 bp, Homo sapiens
tcagtgacaacacac

SEQ ID NO: 611565 - DNA, 15 bp, Homo sapiens
cagtgacaacacaca

SEQ ID NO: 611566 - DNA, 15 bp, Homo sapiens
agtgacaacacacaa

SEQ ID NO: 611567 - DNA, 15 bp, Homo sapiens
gtgacaacacacaac

SEQ ID NO: 611568 - DNA, 15 bp, Homo sapiens
tgacaacacacaaca

SEQ ID NO: 611569 - DNA, 15 bp, Homo sapiens
gacaacacacaacag

SEQ ID NO: 611570 - DNA, 15 bp, Homo sapiens
acaacacacaacagt

SEQ ID NO: 611571 - DNA, 15 bp, Homo sapiens
caacacacaacagtt

SEQ ID NO: 611572 - DNA, 15 bp, Homo sapiens
aacacacaacagttt

SEQ ID NO: 611573 - DNA, 15 bp, Homo sapiens
acacacaacagtttt

SEQ ID NO: 611574 - DNA, 15 bp, Homo sapiens
cacacaacagttttc

SEQ ID NO: 611575 - DNA, 15 bp, Homo sapiens
acacaacagttttca

SEQ ID NO: 611576 - DNA, 15 bp, Homo sapiens
cacaacagttttcaa

SEQ ID NO: 611577 - DNA, 15 bp, Homo sapiens
acaacagttttcaat

SEQ ID NO: 611578 - DNA, 15 bp, Homo sapiens
caacagttttcaata

SEQ ID NO: 611579 - DNA, 15 bp, Homo sapiens
aacagttttcaatag

SEQ ID NO: 611580 - DNA, 15 bp, Homo sapiens
acagttttcaataga

SEQ ID NO: 611581 - DNA, 15 bp, Homo sapiens
cagttttcaatagat

SEQ ID NO: 611582 - DNA, 15 bp, Homo sapiens
agttttcaatagata

SEQ ID NO: 611583 - DNA, 15 bp, Homo sapiens
gttttcaatagataa

SEQ ID NO: 611584 - DNA, 15 bp, Homo sapiens
ttttcaatagataat

SEQ ID NO: 611585 - DNA, 15 bp, Homo sapiens
tttcaatagataata

SEQ ID NO: 611586 - DNA, 15 bp, Homo sapiens
ttcaatagataataa

SEQ ID NO: 611587 - DNA, 15 bp, Homo sapiens
tcaatagataataat

SEQ ID NO: 611588 - DNA, 15 bp, Homo sapiens
caatagataataatc

SEQ ID NO: 611589 - DNA, 15 bp, Homo sapiens
aatagataataatcc

SEQ ID NO: 611590 - DNA, 15 bp, Homo sapiens
atagataataatccc

SEQ ID NO: 611591 - DNA, 15 bp, Homo sapiens
tagataataatccca

SEQ ID NO: 611592 - DNA, 15 bp, Homo sapiens
agataataatcccaa

SEQ ID NO: 611593 - DNA, 15 bp, Homo sapiens
gataataatcccaag

SEQ ID NO: 611594 - DNA, 15 bp, Homo sapiens
ataataatcccaagg

SEQ ID NO: 611595 - DNA, 15 bp, Homo sapiens
taataatcccaaggg

SEQ ID NO: 611596 - DNA, 15 bp, Homo sapiens
aataatcccaagggc

SEQ ID NO: 611597 - DNA, 15 bp, Homo sapiens
ataatcccaagggct

SEQ ID NO: 611598 - DNA, 15 bp, Homo sapiens
taatcccaagggctt

SEQ ID NO: 611599 - DNA, 15 bp, Homo sapiens
aatcccaagggcttt

SEQ ID NO: 611600 - DNA, 15 bp, Homo sapiens
atcccaagggcttta

SEQ ID NO: 611601 - DNA, 15 bp, Homo sapiens
tcccaagggctttac

SEQ ID NO: 611602 - DNA, 15 bp, Homo sapiens
cccaagggctttact

SEQ ID NO: 611603 - DNA, 15 bp, Homo sapiens
ccaagggctttacta

SEQ ID NO: 611604 - DNA, 15 bp, Homo sapiens
caagggctttactag

SEQ ID NO: 611605 - DNA, 15 bp, Homo sapiens
aagggctttactagc

SEQ ID NO: 611606 - DNA, 15 bp, Homo sapiens
agggctttactagca

SEQ ID NO: 611607 - DNA, 15 bp, Homo sapiens
gggctttactagcac

SEQ ID NO: 611608 - DNA, 15 bp, Homo sapiens
ggctttactagcaca

SEQ ID NO: 611609 - DNA, 15 bp, Homo sapiens
gctttactagcacat

SEQ ID NO: 611610 - DNA, 15 bp, Homo sapiens
ctttactagcacatg

SEQ ID NO: 611611 - DNA, 15 bp, Homo sapiens
tttactagcacatga

SEQ ID NO: 611612 - DNA, 15 bp, Homo sapiens
ttactagcacatgaa

SEQ ID NO: 611613 - DNA, 15 bp, Homo sapiens
tactagcacatgaaa

SEQ ID NO: 611614 - DNA, 15 bp, Homo sapiens
actagcacatgaaac

SEQ ID NO: 611615 - DNA, 15 bp, Homo sapiens
ctagcacatgaaaca

SEQ ID NO: 611616 - DNA, 15 bp, Homo sapiens
tagcacatgaaacac

SEQ ID NO: 611617 - DNA, 15 bp, Homo sapiens
agcacatgaaacaca

SEQ ID NO: 611618 - DNA, 15 bp, Homo sapiens
gcacatgaaacacag

SEQ ID NO: 611619 - DNA, 15 bp, Homo sapiens
cacatgaaacacagg

SEQ ID NO: 611620 - DNA, 15 bp, Homo sapiens
acatgaaacacaggg

SEQ ID NO: 611621 - DNA, 15 bp, Homo sapiens
catgaaacacaggga

SEQ ID NO: 611622 - DNA, 15 bp, Homo sapiens
atgaaacacagggaa

SEQ ID NO: 611623 - DNA, 15 bp, Homo sapiens
tgaaacacagggaaa

SEQ ID NO: 611624 - DNA, 15 bp, Homo sapiens
gaaacacagggaaaa

SEQ ID NO: 611625 - DNA, 15 bp, Homo sapiens
aaacacagggaaaac

SEQ ID NO: 611626 - DNA, 15 bp, Homo sapiens
aacacagggaaaacg

SEQ ID NO: 611627 - DNA, 15 bp, Homo sapiens
acacagggaaaacgt

SEQ ID NO: 611628 - DNA, 15 bp, Homo sapiens
cacagggaaaacgtg

SEQ ID NO: 611629 - DNA, 15 bp, Homo sapiens
acagggaaaacgtgt

SEQ ID NO: 611630 - DNA, 15 bp, Homo sapiens
cagggaaaacgtgta

SEQ ID NO: 611631 - DNA, 15 bp, Homo sapiens
agggaaaacgtgtaa

SEQ ID NO: 611632 - DNA, 15 bp, Homo sapiens
gggaaaacgtgtaaa

SEQ ID NO: 611633 - DNA, 15 bp, Homo sapiens
ggaaaacgtgtaaag

SEQ ID NO: 611634 - DNA, 15 bp, Homo sapiens
gaaaacgtgtaaagt

SEQ ID NO: 611635 - DNA, 15 bp, Homo sapiens
aaaacgtgtaaagtt

SEQ ID NO: 611636 - DNA, 15 bp, Homo sapiens
aaacgtgtaaagttc

SEQ ID NO: 611637 - DNA, 15 bp, Homo sapiens
aacgtgtaaagttca

SEQ ID NO: 611638 - DNA, 15 bp, Homo sapiens
acgtgtaaagttcac

SEQ ID NO: 611639 - DNA, 15 bp, Homo sapiens
cgtgtaaagttcaca

SEQ ID NO: 611640 - DNA, 15 bp, Homo sapiens
gtgtaaagttcacaa

SEQ ID NO: 611641 - DNA, 15 bp, Homo sapiens
tgtaaagttcacaag

SEQ ID NO: 611642 - DNA, 15 bp, Homo sapiens
gtaaagttcacaaga

SEQ ID NO: 611643 - DNA, 15 bp, Homo sapiens
taaagttcacaagaa

SEQ ID NO: 611644 - DNA, 15 bp, Homo sapiens
aaagttcacaagaaa

SEQ ID NO: 611645 - DNA, 15 bp, Homo sapiens
aagttcacaagaaag

SEQ ID NO: 611646 - DNA, 15 bp, Homo sapiens
agttcacaagaaagt

SEQ ID NO: 611647 - DNA, 15 bp, Homo sapiens
gttcacaagaaagtc

SEQ ID NO: 611648 - DNA, 15 bp, Homo sapiens
ttcacaagaaagtcg

SEQ ID NO: 611649 - DNA, 15 bp, Homo sapiens
tcacaagaaagtcgt

SEQ ID NO: 611650 - DNA, 15 bp, Homo sapiens
cacaagaaagtcgtt

SEQ ID NO: 611651 - DNA, 15 bp, Homo sapiens
acaagaaagtcgttc

SEQ ID NO: 611652 - DNA, 15 bp, Homo sapiens
caagaaagtcgttcc

SEQ ID NO: 611653 - DNA, 15 bp, Homo sapiens
aagaaagtcgttcca

SEQ ID NO: 611654 - DNA, 15 bp, Homo sapiens
agaaagtcgttccag

SEQ ID NO: 611655 - DNA, 15 bp, Homo sapiens
gaaagtcgttccagt

SEQ ID NO: 611656 - DNA, 15 bp, Homo sapiens
aaagtcgttccagtg

SEQ ID NO: 611657 - DNA, 15 bp, Homo sapiens
aagtcgttccagtgt

SEQ ID NO: 611658 - DNA, 15 bp, Homo sapiens
agtcgttccagtgta

SEQ ID NO: 611659 - DNA, 15 bp, Homo sapiens
gtcgttccagtgtat

SEQ ID NO: 611660 - DNA, 15 bp, Homo sapiens
tcgttccagtgtatc

SEQ ID NO: 611661 - DNA, 15 bp, Homo sapiens
cgttccagtgtatca

SEQ ID NO: 611662 - DNA, 15 bp, Homo sapiens
gttccagtgtatcaa

SEQ ID NO: 611663 - DNA, 15 bp, Homo sapiens
ttccagtgtatcaaa

SEQ ID NO: 611664 - DNA, 15 bp, Homo sapiens
tccagtgtatcaaat

SEQ ID NO: 611665 - DNA, 15 bp, Homo sapiens
ccagtgtatcaaatc

SEQ ID NO: 611666 - DNA, 15 bp, Homo sapiens
cagtgtatcaaatct

SEQ ID NO: 611667 - DNA, 15 bp, Homo sapiens
agtgtatcaaatcta

SEQ ID NO: 611668 - DNA, 15 bp, Homo sapiens
gtgtatcaaatctat

SEQ ID NO: 611669 - DNA, 15 bp, Homo sapiens
tgtatcaaatctatc

SEQ ID NO: 611670 - DNA, 15 bp, Homo sapiens
gtatcaaatctatcc

SEQ ID NO: 611671 - DNA, 15 bp, Homo sapiens
tatcaaatctatcct

SEQ ID NO: 611672 - DNA, 15 bp, Homo sapiens
atcaaatctatcctg

SEQ ID NO: 611673 - DNA, 15 bp, Homo sapiens
tcaaatctatcctgt

SEQ ID NO: 611674 - DNA, 15 bp, Homo sapiens
caaatctatcctgtt

SEQ ID NO: 611675 - DNA, 15 bp, Homo sapiens
aaatctatcctgttt

SEQ ID NO: 611676 - DNA, 15 bp, Homo sapiens
aatctatcctgtttg

SEQ ID NO: 611677 - DNA, 15 bp, Homo sapiens
atctatcctgtttgc

SEQ ID NO: 611678 - DNA, 15 bp, Homo sapiens
tctatcctgtttgcc

SEQ ID NO: 611679 - DNA, 15 bp, Homo sapiens
ctatcctgtttgcca

SEQ ID NO: 611680 - DNA, 15 bp, Homo sapiens
tatcctgtttgccag

SEQ ID NO: 611681 - DNA, 15 bp, Homo sapiens
atcctgtttgccagg

SEQ ID NO: 611682 - DNA, 15 bp, Homo sapiens
tcctgtttgccaggt

SEQ ID NO: 611683 - DNA, 15 bp, Homo sapiens
cctgtttgccaggtg

SEQ ID NO: 611684 - DNA, 15 bp, Homo sapiens
ctgtttgccaggtgg

SEQ ID NO: 611685 - DNA, 15 bp, Homo sapiens
tgtttgccaggtgga

SEQ ID NO: 611686 - DNA, 15 bp, Homo sapiens
gtttgccaggtggat

SEQ ID NO: 611687 - DNA, 15 bp, Homo sapiens
tttgccaggtggata

SEQ ID NO: 611688 - DNA, 15 bp, Homo sapiens
ttgccaggtggatat

SEQ ID NO: 611689 - DNA, 15 bp, Homo sapiens
tgccaggtggatata

SEQ ID NO: 611690 - DNA, 15 bp, Homo sapiens
gccaggtggatatac

SEQ ID NO: 611691 - DNA, 15 bp, Homo sapiens
ccaggtggatatacc

SEQ ID NO: 611692 - DNA, 15 bp, Homo sapiens
caggtggatatacca

SEQ ID NO: 611693 - DNA, 15 bp, Homo sapiens
aggtggatataccag

SEQ ID NO: 611694 - DNA, 15 bp, Homo sapiens
ggtggatataccagg

SEQ ID NO: 611695 - DNA, 15 bp, Homo sapiens
gtggatataccaggg

SEQ ID NO: 611696 - DNA, 15 bp, Homo sapiens
tggatataccagggt

SEQ ID NO: 611697 - DNA, 15 bp, Homo sapiens
ggatataccagggtc

SEQ ID NO: 611698 - DNA, 15 bp, Homo sapiens
gatataccagggtct

SEQ ID NO: 611699 - DNA, 15 bp, Homo sapiens
atataccagggtctc

SEQ ID NO: 611700 - DNA, 15 bp, Homo sapiens
tataccagggtctcc

SEQ ID NO: 611701 - DNA, 15 bp, Homo sapiens
ataccagggtctcct

SEQ ID NO: 611702 - DNA, 15 bp, Homo sapiens
taccagggtctcctc

SEQ ID NO: 611703 - DNA, 15 bp, Homo sapiens
accagggtctcctcc

SEQ ID NO: 611704 - DNA, 15 bp, Homo sapiens
ccagggtctcctcca

SEQ ID NO: 611705 - DNA, 15 bp, Homo sapiens
cagggtctcctccac

SEQ ID NO: 611706 - DNA, 15 bp, Homo sapiens
agggtctcctccacc

SEQ ID NO: 611707 - DNA, 15 bp, Homo sapiens
gggtctcctccacct

SEQ ID NO: 611708 - DNA, 15 bp, Homo sapiens
ggtctcctccacctg

SEQ ID NO: 611709 - DNA, 15 bp, Homo sapiens
gtctcctccacctgt

SEQ ID NO: 611710 - DNA, 15 bp, Homo sapiens
tctcctccacctgtg

SEQ ID NO: 611711 - DNA, 15 bp, Homo sapiens
ctcctccacctgtgc

SEQ ID NO: 611712 - DNA, 15 bp, Homo sapiens
tcctccacctgtgca

SEQ ID NO: 611713 - DNA, 15 bp, Homo sapiens
cctccacctgtgcat

SEQ ID NO: 611714 - DNA, 15 bp, Homo sapiens
ctccacctgtgcatg

SEQ ID NO: 611715 - DNA, 15 bp, Homo sapiens
tccacctgtgcatgg

SEQ ID NO: 611716 - DNA, 15 bp, Homo sapiens
ccacctgtgcatggc

SEQ ID NO: 611717 - DNA, 15 bp, Homo sapiens
cacctgtgcatggct

SEQ ID NO: 611718 - DNA, 15 bp, Homo sapiens
acctgtgcatggctg

SEQ ID NO: 611719 - DNA, 15 bp, Homo sapiens
cctgtgcatggctgg

SEQ ID NO: 611720 - DNA, 15 bp, Homo sapiens
ctgtgcatggctggt

SEQ ID NO: 611721 - DNA, 15 bp, Homo sapiens
tgtgcatggctggtg

SEQ ID NO: 611722 - DNA, 15 bp, Homo sapiens
gtgcatggctggtgg

SEQ ID NO: 611723 - DNA, 15 bp, Homo sapiens
tgcatggctggtggt

SEQ ID NO: 611724 - DNA, 15 bp, Homo sapiens
gcatggctggtggtg

SEQ ID NO: 611725 - DNA, 15 bp, Homo sapiens
catggctggtggtgg

SEQ ID NO: 611726 - DNA, 15 bp, Homo sapiens
atggctggtggtggg

SEQ ID NO: 611727 - DNA, 15 bp, Homo sapiens
tggctggtggtgggt

SEQ ID NO: 611728 - DNA, 15 bp, Homo sapiens
ggctggtggtgggtc

SEQ ID NO: 611729 - DNA, 15 bp, Homo sapiens
gctggtggtgggtcc

SEQ ID NO: 611730 - DNA, 15 bp, Homo sapiens
ctggtggtgggtcca

SEQ ID NO: 611731 - DNA, 15 bp, Homo sapiens
tggtggtgggtccag

SEQ ID NO: 611732 - DNA, 15 bp, Homo sapiens
ggtggtgggtccagt

SEQ ID NO: 611733 - DNA, 15 bp, Homo sapiens
gtggtgggtccagtg

SEQ ID NO: 611734 - DNA, 15 bp, Homo sapiens
tggtgggtccagtgg

SEQ ID NO: 611735 - DNA, 15 bp, Homo sapiens
ggtgggtccagtggc

SEQ ID NO: 611736 - DNA, 15 bp, Homo sapiens
gtgggtccagtggct

SEQ ID NO: 611737 - DNA, 15 bp, Homo sapiens
tgggtccagtggctg

SEQ ID NO: 611738 - DNA, 15 bp, Homo sapiens
gggtccagtggctgt

SEQ ID NO: 611739 - DNA, 15 bp, Homo sapiens
ggtccagtggctgtt

SEQ ID NO: 611740 - DNA, 15 bp, Homo sapiens
gtccagtggctgttg

SEQ ID NO: 611741 - DNA, 15 bp, Homo sapiens
tccagtggctgttgg

SEQ ID NO: 611742 - DNA, 15 bp, Homo sapiens
ccagtggctgttgga

SEQ ID NO: 611743 - DNA, 15 bp, Homo sapiens
cagtggctgttggat

SEQ ID NO: 611744 - DNA, 15 bp, Homo sapiens
agtggctgttggata

SEQ ID NO: 611745 - DNA, 15 bp, Homo sapiens
gtggctgttggataa

SEQ ID NO: 611746 - DNA, 15 bp, Homo sapiens
tggctgttggataac

SEQ ID NO: 611747 - DNA, 15 bp, Homo sapiens
ggctgttggataact

SEQ ID NO: 611748 - DNA, 15 bp, Homo sapiens
gctgttggataactg

SEQ ID NO: 611749 - DNA, 15 bp, Homo sapiens
ctgttggataactga

SEQ ID NO: 611750 - DNA, 15 bp, Homo sapiens
tgttggataactgat

SEQ ID NO: 611751 - DNA, 15 bp, Homo sapiens
gttggataactgatg

SEQ ID NO: 611752 - DNA, 15 bp, Homo sapiens
ttggataactgatgt

SEQ ID NO: 611753 - DNA, 15 bp, Homo sapiens
tggataactgatgta

SEQ ID NO: 611754 - DNA, 15 bp, Homo sapiens
ggataactgatgtat

SEQ ID NO: 611755 - DNA, 15 bp, Homo sapiens
gataactgatgtatt

SEQ ID NO: 611756 - DNA, 15 bp, Homo sapiens
ataactgatgtattg

SEQ ID NO: 611757 - DNA, 15 bp, Homo sapiens
taactgatgtattga

SEQ ID NO: 611758 - DNA, 15 bp, Homo sapiens
aactgatgtattgat

SEQ ID NO: 611759 - DNA, 15 bp, Homo sapiens
actgatgtattgatg

SEQ ID NO: 611760 - DNA, 15 bp, Homo sapiens
ctgatgtattgatgg

SEQ ID NO: 611761 - DNA, 15 bp, Homo sapiens
tgatgtattgatgga

SEQ ID NO: 611762 - DNA, 15 bp, Homo sapiens
gatgtattgatggat

SEQ ID NO: 611763 - DNA, 15 bp, Homo sapiens
atgtattgatggatc

SEQ ID NO: 611764 - DNA, 15 bp, Homo sapiens
tgtattgatggatca

SEQ ID NO: 611765 - DNA, 15 bp, Homo sapiens
gtattgatggatcat

SEQ ID NO: 611766 - DNA, 15 bp, Homo sapiens
tattgatggatcatt

SEQ ID NO: 611767 - DNA, 15 bp, Homo sapiens
attgatggatcattc

SEQ ID NO: 611768 - DNA, 15 bp, Homo sapiens
ttgatggatcattcg

SEQ ID NO: 611769 - DNA, 15 bp, Homo sapiens
tgatggatcattcgc

SEQ ID NO: 611770 - DNA, 15 bp, Homo sapiens
gatggatcattcgcc

SEQ ID NO: 611771 - DNA, 15 bp, Homo sapiens
atggatcattcgcct

SEQ ID NO: 611772 - DNA, 15 bp, Homo sapiens
tggatcattcgcctt

SEQ ID NO: 611773 - DNA, 15 bp, Homo sapiens
ggatcattcgccttc

SEQ ID NO: 611774 - DNA, 15 bp, Homo sapiens
gatcattcgccttct

SEQ ID NO: 611775 - DNA, 15 bp, Homo sapiens
atcattcgccttctg

SEQ ID NO: 611776 - DNA, 15 bp, Homo sapiens
tcattcgccttctga

SEQ ID NO: 611777 - DNA, 15 bp, Homo sapiens
cattcgccttctgaa

SEQ ID NO: 611778 - DNA, 15 bp, Homo sapiens
attcgccttctgaaa

SEQ ID NO: 611779 - DNA, 15 bp, Homo sapiens
ttcgccttctgaaag

SEQ ID NO: 611780 - DNA, 15 bp, Homo sapiens
tcgccttctgaaagt

SEQ ID NO: 611781 - DNA, 15 bp, Homo sapiens
cgccttctgaaagtg

SEQ ID NO: 611782 - DNA, 15 bp, Homo sapiens
gccttctgaaagtgc

SEQ ID NO: 611783 - DNA, 15 bp, Homo sapiens
ccttctgaaagtgcc

SEQ ID NO: 611784 - DNA, 15 bp, Homo sapiens
cttctgaaagtgcca

SEQ ID NO: 611785 - DNA, 15 bp, Homo sapiens
ttctgaaagtgccaa

SEQ ID NO: 611786 - DNA, 15 bp, Homo sapiens
tctgaaagtgccaaa

SEQ ID NO: 611787 - DNA, 15 bp, Homo sapiens
ctgaaagtgccaaac

SEQ ID NO: 611788 - DNA, 15 bp, Homo sapiens
tgaaagtgccaaact

SEQ ID NO: 611789 - DNA, 15 bp, Homo sapiens
gaaagtgccaaactg

SEQ ID NO: 611790 - DNA, 15 bp, Homo sapiens
aaagtgccaaactga

SEQ ID NO: 611791 - DNA, 15 bp, Homo sapiens
aagtgccaaactgat

SEQ ID NO: 611792 - DNA, 15 bp, Homo sapiens
agtgccaaactgatt

SEQ ID NO: 611793 - DNA, 15 bp, Homo sapiens
gtgccaaactgatta

SEQ ID NO: 611794 - DNA, 15 bp, Homo sapiens
tgccaaactgattag

SEQ ID NO: 611795 - DNA, 15 bp, Homo sapiens
gccaaactgattagt

SEQ ID NO: 611796 - DNA, 15 bp, Homo sapiens
ccaaactgattagtt

SEQ ID NO: 611797 - DNA, 15 bp, Homo sapiens
caaactgattagtta

SEQ ID NO: 611798 - DNA, 15 bp, Homo sapiens
aaactgattagttat

SEQ ID NO: 611799 - DNA, 15 bp, Homo sapiens
aactgattagttatt

SEQ ID NO: 611800 - DNA, 15 bp, Homo sapiens
actgattagttattt

SEQ ID NO: 611801 - DNA, 15 bp, Homo sapiens
ctgattagttatttt

SEQ ID NO: 611802 - DNA, 15 bp, Homo sapiens
tgattagttattttg

SEQ ID NO: 611803 - DNA, 15 bp, Homo sapiens
gattagttattttgt

SEQ ID NO: 611804 - DNA, 15 bp, Homo sapiens
attagttattttgtg

SEQ ID NO: 611805 - DNA, 15 bp, Homo sapiens
ttagttattttgtgt

SEQ ID NO: 611806 - DNA, 15 bp, Homo sapiens
tagttattttgtgtg

SEQ ID NO: 611807 - DNA, 15 bp, Homo sapiens
agttattttgtgtgt

SEQ ID NO: 611808 - DNA, 15 bp, Homo sapiens
gttattttgtgtgtc

SEQ ID NO: 611809 - DNA, 15 bp, Homo sapiens
ttattttgtgtgtct

SEQ ID NO: 611810 - DNA, 15 bp, Homo sapiens
tattttgtgtgtctt

SEQ ID NO: 611811 - DNA, 15 bp, Homo sapiens
attttgtgtgtcttt

SEQ ID NO: 611812 - DNA, 15 bp, Homo sapiens
ttttgtgtgtctttt

SEQ ID NO: 611813 - DNA, 15 bp, Homo sapiens
tttgtgtgtcttttt

SEQ ID NO: 611814 - DNA, 15 bp, Homo sapiens
ttgtgtgtctttttg

SEQ ID NO: 611815 - DNA, 15 bp, Homo sapiens
tgtgtgtctttttgt

SEQ ID NO: 611816 - DNA, 15 bp, Homo sapiens
gtgtgtctttttgtg

SEQ ID NO: 611817 - DNA, 15 bp, Homo sapiens
tgtgtctttttgtgt

SEQ ID NO: 611818 - DNA, 15 bp, Homo sapiens
gtgtctttttgtgta

SEQ ID NO: 611819 - DNA, 15 bp, Homo sapiens
tgtctttttgtgtaa

SEQ ID NO: 611820 - DNA, 15 bp, Homo sapiens
gtctttttgtgtaac

SEQ ID NO: 611821 - DNA, 15 bp, Homo sapiens
tctttttgtgtaact

SEQ ID NO: 611822 - DNA, 15 bp, Homo sapiens
ctttttgtgtaacta

SEQ ID NO: 611823 - DNA, 15 bp, Homo sapiens
tttttgtgtaactag

SEQ ID NO: 611824 - DNA, 15 bp, Homo sapiens
ttttgtgtaactagg

SEQ ID NO: 611825 - DNA, 15 bp, Homo sapiens
tttgtgtaactaggg

SEQ ID NO: 611826 - DNA, 15 bp, Homo sapiens
ttgtgtaactagggt

SEQ ID NO: 611827 - DNA, 15 bp, Homo sapiens
tgtgtaactagggtt

SEQ ID NO: 611828 - DNA, 15 bp, Homo sapiens
gtgtaactagggttt

SEQ ID NO: 611829 - DNA, 15 bp, Homo sapiens
tgtaactagggtttg

SEQ ID NO: 611830 - DNA, 15 bp, Homo sapiens
gtaactagggtttga

SEQ ID NO: 611831 - DNA, 15 bp, Homo sapiens
taactagggtttgac

SEQ ID NO: 611832 - DNA, 15 bp, Homo sapiens
aactagggtttgacc

SEQ ID NO: 611833 - DNA, 15 bp, Homo sapiens
actagggtttgacct

SEQ ID NO: 611834 - DNA, 15 bp, Homo sapiens
ctagggtttgacctt

SEQ ID NO: 611835 - DNA, 15 bp, Homo sapiens
tagggtttgaccttc

SEQ ID NO: 611836 - DNA, 15 bp, Homo sapiens
agggtttgaccttcc

SEQ ID NO: 611837 - DNA, 15 bp, Homo sapiens
gggtttgaccttcca

SEQ ID NO: 611838 - DNA, 15 bp, Homo sapiens
ggtttgaccttccag

SEQ ID NO: 611839 - DNA, 15 bp, Homo sapiens
gtttgaccttccagg

SEQ ID NO: 611840 - DNA, 15 bp, Homo sapiens
tttgaccttccaggg

SEQ ID NO: 611841 - DNA, 15 bp, Homo sapiens
ttgaccttccagggc

SEQ ID NO: 611842 - DNA, 15 bp, Homo sapiens
tgaccttccagggca

SEQ ID NO: 611843 - DNA, 15 bp, Homo sapiens
gaccttccagggcag

SEQ ID NO: 611844 - DNA, 15 bp, Homo sapiens
accttccagggcaga

SEQ ID NO: 611845 - DNA, 15 bp, Homo sapiens
ccttccagggcagac

SEQ ID NO: 611846 - DNA, 15 bp, Homo sapiens
cttccagggcagact

SEQ ID NO: 611847 - DNA, 15 bp, Homo sapiens
ttccagggcagactg

SEQ ID NO: 611848 - DNA, 15 bp, Homo sapiens
tccagggcagactgt

SEQ ID NO: 611849 - DNA, 15 bp, Homo sapiens
ccagggcagactgtg

SEQ ID NO: 611850 - DNA, 15 bp, Homo sapiens
cagggcagactgtgc

SEQ ID NO: 611851 - DNA, 15 bp, Homo sapiens
agggcagactgtgct

SEQ ID NO: 611852 - DNA, 15 bp, Homo sapiens
gggcagactgtgctg

SEQ ID NO: 611853 - DNA, 15 bp, Homo sapiens
ggcagactgtgctgg

SEQ ID NO: 611854 - DNA, 15 bp, Homo sapiens
gcagactgtgctggg

SEQ ID NO: 611855 - DNA, 15 bp, Homo sapiens
cagactgtgctgggg

SEQ ID NO: 611856 - DNA, 15 bp, Homo sapiens
agactgtgctggggc

SEQ ID NO: 611857 - DNA, 15 bp, Homo sapiens
gactgtgctggggcg

SEQ ID NO: 611858 - DNA, 15 bp, Homo sapiens
actgtgctggggcgg

SEQ ID NO: 611859 - DNA, 15 bp, Homo sapiens
ctgtgctggggcggc

SEQ ID NO: 611860 - DNA, 15 bp, Homo sapiens
tgtgctggggcggct

SEQ ID NO: 611861 - DNA, 15 bp, Homo sapiens
gtgctggggcggctg

SEQ ID NO: 611862 - DNA, 15 bp, Homo sapiens
tgctggggcggctga

SEQ ID NO: 611863 - DNA, 15 bp, Homo sapiens
gctggggcggctgac

SEQ ID NO: 611864 - DNA, 15 bp, Homo sapiens
ctggggcggctgacc

SEQ ID NO: 611865 - DNA, 15 bp, Homo sapiens
tggggcggctgaccc

SEQ ID NO: 611866 - DNA, 15 bp, Homo sapiens
ggggcggctgacccc

SEQ ID NO: 611867 - DNA, 15 bp, Homo sapiens
gggcggctgacccct

SEQ ID NO: 611868 - DNA, 15 bp, Homo sapiens
ggcggctgacccctt

SEQ ID NO: 611869 - DNA, 15 bp, Homo sapiens
gcggctgaccccttg

SEQ ID NO: 611870 - DNA, 15 bp, Homo sapiens
cggctgaccccttgg

SEQ ID NO: 611871 - DNA, 15 bp, Homo sapiens
ggctgaccccttggg

SEQ ID NO: 611872 - DNA, 15 bp, Homo sapiens
gctgaccccttgggg

SEQ ID NO: 611873 - DNA, 15 bp, Homo sapiens
ctgaccccttgggga

SEQ ID NO: 611874 - DNA, 15 bp, Homo sapiens
tgaccccttggggag

SEQ ID NO: 611875 - DNA, 15 bp, Homo sapiens
gaccccttggggagc

SEQ ID NO: 611876 - DNA, 15 bp, Homo sapiens
accccttggggagcc

SEQ ID NO: 611877 - DNA, 15 bp, Homo sapiens
ccccttggggagcca

SEQ ID NO: 611878 - DNA, 15 bp, Homo sapiens
cccttggggagccaa

SEQ ID NO: 611879 - DNA, 15 bp, Homo sapiens
ccttggggagccaag

SEQ ID NO: 611880 - DNA, 15 bp, Homo sapiens
cttggggagccaagt

SEQ ID NO: 611881 - DNA, 15 bp, Homo sapiens
ttggggagccaagtt

SEQ ID NO: 611882 - DNA, 15 bp, Homo sapiens
tggggagccaagtta

SEQ ID NO: 611883 - DNA, 15 bp, Homo sapiens
ggggagccaagttat

SEQ ID NO: 611884 - DNA, 15 bp, Homo sapiens
gggagccaagttatt

SEQ ID NO: 611885 - DNA, 15 bp, Homo sapiens
ggagccaagttattg

SEQ ID NO: 611886 - DNA, 15 bp, Homo sapiens
gagccaagttattgc

SEQ ID NO: 611887 - DNA, 15 bp, Homo sapiens
agccaagttattgct

SEQ ID NO: 611888 - DNA, 15 bp, Homo sapiens
gccaagttattgctc

SEQ ID NO: 611889 - DNA, 15 bp, Homo sapiens
ccaagttattgctct

SEQ ID NO: 611890 - DNA, 15 bp, Homo sapiens
caagttattgctctt

SEQ ID NO: 611891 - DNA, 15 bp, Homo sapiens
aagttattgctctta

SEQ ID NO: 611892 - DNA, 15 bp, Homo sapiens
agttattgctcttac

SEQ ID NO: 611893 - DNA, 15 bp, Homo sapiens
gttattgctcttacc

SEQ ID NO: 611894 - DNA, 15 bp, Homo sapiens
ttattgctcttacca

SEQ ID NO: 611895 - DNA, 15 bp, Homo sapiens
tattgctcttaccac

SEQ ID NO: 611896 - DNA, 15 bp, Homo sapiens
attgctcttaccacc

SEQ ID NO: 611897 - DNA, 15 bp, Homo sapiens
ttgctcttaccacca

SEQ ID NO: 611898 - DNA, 15 bp, Homo sapiens
tgctcttaccaccac

SEQ ID NO: 611899 - DNA, 15 bp, Homo sapiens
gctcttaccaccacc

SEQ ID NO: 611900 - DNA, 15 bp, Homo sapiens
ctcttaccaccacca

SEQ ID NO: 611901 - DNA, 15 bp, Homo sapiens
tcttaccaccaccac

SEQ ID NO: 611902 - DNA, 15 bp, Homo sapiens
cttaccaccaccact

SEQ ID NO: 611903 - DNA, 15 bp, Homo sapiens
ttaccaccaccactt

SEQ ID NO: 611904 - DNA, 15 bp, Homo sapiens
taccaccaccacttg

SEQ ID NO: 611905 - DNA, 15 bp, Homo sapiens
accaccaccacttgc

SEQ ID NO: 611906 - DNA, 15 bp, Homo sapiens
ccaccaccacttgcc

SEQ ID NO: 611907 - DNA, 15 bp, Homo sapiens
caccaccacttgccc

SEQ ID NO: 611908 - DNA, 15 bp, Homo sapiens
accaccacttgccct

SEQ ID NO: 611909 - DNA, 15 bp, Homo sapiens
ccaccacttgccctt

SEQ ID NO: 611910 - DNA, 15 bp, Homo sapiens
caccacttgcccttg

SEQ ID NO: 611911 - DNA, 15 bp, Homo sapiens
accacttgcccttgt

SEQ ID NO: 611912 - DNA, 15 bp, Homo sapiens
ccacttgcccttgtc

SEQ ID NO: 611913 - DNA, 15 bp, Homo sapiens
cacttgcccttgtca

SEQ ID NO: 611914 - DNA, 15 bp, Homo sapiens
acttgcccttgtcag

SEQ ID NO: 611915 - DNA, 15 bp, Homo sapiens
cttgcccttgtcagt

SEQ ID NO: 611916 - DNA, 15 bp, Homo sapiens
ttgcccttgtcagtc

SEQ ID NO: 611917 - DNA, 15 bp, Homo sapiens
tgcccttgtcagtcc

SEQ ID NO: 611918 - DNA, 15 bp, Homo sapiens
gcccttgtcagtcct

SEQ ID NO: 611919 - DNA, 15 bp, Homo sapiens
cccttgtcagtcctc

SEQ ID NO: 611920 - DNA, 15 bp, Homo sapiens
ccttgtcagtcctcc

SEQ ID NO: 611921 - DNA, 15 bp, Homo sapiens
cttgtcagtcctcca

SEQ ID NO: 611922 - DNA, 15 bp, Homo sapiens
ttgtcagtcctccac

SEQ ID NO: 611923 - DNA, 15 bp, Homo sapiens
tgtcagtcctccacc

SEQ ID NO: 611924 - DNA, 15 bp, Homo sapiens
gtcagtcctccaccc

SEQ ID NO: 611925 - DNA, 15 bp, Homo sapiens
tcagtcctccaccct

SEQ ID NO: 611926 - DNA, 15 bp, Homo sapiens
cagtcctccaccctc

SEQ ID NO: 611927 - DNA, 15 bp, Homo sapiens
agtcctccaccctct

SEQ ID NO: 611928 - DNA, 15 bp, Homo sapiens
gtcctccaccctctt

SEQ ID NO: 611929 - DNA, 15 bp, Homo sapiens
tcctccaccctcttg

SEQ ID NO: 611930 - DNA, 15 bp, Homo sapiens
cctccaccctcttgg

SEQ ID NO: 611931 - DNA, 15 bp, Homo sapiens
ctccaccctcttggg

SEQ ID NO: 611932 - DNA, 15 bp, Homo sapiens
tccaccctcttgggt

SEQ ID NO: 611933 - DNA, 15 bp, Homo sapiens
ccaccctcttgggtt

SEQ ID NO: 611934 - DNA, 15 bp, Homo sapiens
caccctcttgggttt

SEQ ID NO: 611935 - DNA, 15 bp, Homo sapiens
accctcttgggtttc

SEQ ID NO: 611936 - DNA, 15 bp, Homo sapiens
ccctcttgggtttca

SEQ ID NO: 611937 - DNA, 15 bp, Homo sapiens
cctcttgggtttcag

SEQ ID NO: 611938 - DNA, 15 bp, Homo sapiens
ctcttgggtttcagt

SEQ ID NO: 611939 - DNA, 15 bp, Homo sapiens
tcttgggtttcagtg

SEQ ID NO: 611940 - DNA, 15 bp, Homo sapiens
cttgggtttcagtgt

SEQ ID NO: 611941 - DNA, 15 bp, Homo sapiens
ttgggtttcagtgtc

SEQ ID NO: 611942 - DNA, 15 bp, Homo sapiens
tgggtttcagtgtca

SEQ ID NO: 611943 - DNA, 15 bp, Homo sapiens
gggtttcagtgtcag

SEQ ID NO: 611944 - DNA, 15 bp, Homo sapiens
ggtttcagtgtcagc

SEQ ID NO: 611945 - DNA, 15 bp, Homo sapiens
gtttcagtgtcagca

SEQ ID NO: 611946 - DNA, 15 bp, Homo sapiens
tttcagtgtcagcat

SEQ ID NO: 611947 - DNA, 15 bp, Homo sapiens
ttcagtgtcagcatg

SEQ ID NO: 611948 - DNA, 15 bp, Homo sapiens
tcagtgtcagcatgt

SEQ ID NO: 611949 - DNA, 15 bp, Homo sapiens
cagtgtcagcatgta

SEQ ID NO: 611950 - DNA, 15 bp, Homo sapiens
agtgtcagcatgtag

SEQ ID NO: 611951 - DNA, 15 bp, Homo sapiens
gtgtcagcatgtagc

SEQ ID NO: 611952 - DNA, 15 bp, Homo sapiens
tgtcagcatgtagct

SEQ ID NO: 611953 - DNA, 15 bp, Homo sapiens
gtcagcatgtagctg

SEQ ID NO: 611954 - DNA, 15 bp, Homo sapiens
tcagcatgtagctgt

SEQ ID NO: 611955 - DNA, 15 bp, Homo sapiens
cagcatgtagctgtc

SEQ ID NO: 611956 - DNA, 15 bp, Homo sapiens
agcatgtagctgtct

SEQ ID NO: 611957 - DNA, 15 bp, Homo sapiens
gcatgtagctgtcta

SEQ ID NO: 611958 - DNA, 15 bp, Homo sapiens
catgtagctgtctac

SEQ ID NO: 611959 - DNA, 15 bp, Homo sapiens
atgtagctgtctact

SEQ ID NO: 611960 - DNA, 15 bp, Homo sapiens
tgtagctgtctactc

SEQ ID NO: 611961 - DNA, 15 bp, Homo sapiens
gtagctgtctactca

SEQ ID NO: 611962 - DNA, 15 bp, Homo sapiens
tagctgtctactcag

SEQ ID NO: 611963 - DNA, 15 bp, Homo sapiens
agctgtctactcaga

SEQ ID NO: 611964 - DNA, 15 bp, Homo sapiens
gctgtctactcagat

SEQ ID NO: 611965 - DNA, 15 bp, Homo sapiens
ctgtctactcagatc

SEQ ID NO: 611966 - DNA, 15 bp, Homo sapiens
tgtctactcagatcc

SEQ ID NO: 611967 - DNA, 15 bp, Homo sapiens
gtctactcagatccc

SEQ ID NO: 611968 - DNA, 15 bp, Homo sapiens
tctactcagatccca

SEQ ID NO: 611969 - DNA, 15 bp, Homo sapiens
ctactcagatcccat

SEQ ID NO: 611970 - DNA, 15 bp, Homo sapiens
tactcagatcccatc

SEQ ID NO: 611971 - DNA, 15 bp, Homo sapiens
actcagatcccatcc

SEQ ID NO: 611972 - DNA, 15 bp, Homo sapiens
ctcagatcccatcca

SEQ ID NO: 611973 - DNA, 15 bp, Homo sapiens
tcagatcccatccac

SEQ ID NO: 611974 - DNA, 15 bp, Homo sapiens
cagatcccatccaca

SEQ ID NO: 611975 - DNA, 15 bp, Homo sapiens
agatcccatccacat

SEQ ID NO: 611976 - DNA, 15 bp, Homo sapiens
gatcccatccacatc

SEQ ID NO: 611977 - DNA, 15 bp, Homo sapiens
atcccatccacatca

SEQ ID NO: 611978 - DNA, 15 bp, Homo sapiens
tcccatccacatcat

SEQ ID NO: 611979 - DNA, 15 bp, Homo sapiens
cccatccacatcatc

SEQ ID NO: 611980 - DNA, 15 bp, Homo sapiens
ccatccacatcatca

SEQ ID NO: 611981 - DNA, 15 bp, Homo sapiens
catccacatcatcaa

SEQ ID NO: 611982 - DNA, 15 bp, Homo sapiens
atccacatcatcaag

SEQ ID NO: 611983 - DNA, 15 bp, Homo sapiens
tccacatcatcaagt

SEQ ID NO: 611984 - DNA, 15 bp, Homo sapiens
ccacatcatcaagtc

SEQ ID NO: 611985 - DNA, 15 bp, Homo sapiens
cacatcatcaagtct

SEQ ID NO: 611986 - DNA, 15 bp, Homo sapiens
acatcatcaagtctg

SEQ ID NO: 611987 - DNA, 15 bp, Homo sapiens
catcatcaagtctgc

SEQ ID NO: 611988 - DNA, 15 bp, Homo sapiens
atcatcaagtctgca

SEQ ID NO: 611989 - DNA, 15 bp, Homo sapiens
tcatcaagtctgcag

SEQ ID NO: 611990 - DNA, 15 bp, Homo sapiens
catcaagtctgcagt

SEQ ID NO: 611991 - DNA, 15 bp, Homo sapiens
atcaagtctgcagtt

SEQ ID NO: 611992 - DNA, 15 bp, Homo sapiens
tcaagtctgcagttt

SEQ ID NO: 611993 - DNA, 15 bp, Homo sapiens
caagtctgcagtttt

SEQ ID NO: 611994 - DNA, 15 bp, Homo sapiens
aagtctgcagttttt

SEQ ID NO: 611995 - DNA, 15 bp, Homo sapiens
agtctgcagtttttt

SEQ ID NO: 611996 - DNA, 15 bp, Homo sapiens
gtctgcagttttttc

SEQ ID NO: 611997 - DNA, 15 bp, Homo sapiens
tctgcagttttttcc

SEQ ID NO: 611998 - DNA, 15 bp, Homo sapiens
ctgcagttttttcct

SEQ ID NO: 611999 - DNA, 15 bp, Homo sapiens
tgcagttttttcctt

SEQ ID NO: 612000 - DNA, 15 bp, Homo sapiens
gcagttttttccttg

SEQ ID NO: 612001 - DNA, 15 bp, Homo sapiens
cagttttttccttgc

SEQ ID NO: 612002 - DNA, 15 bp, Homo sapiens
agttttttccttgca

SEQ ID NO: 612003 - DNA, 15 bp, Homo sapiens
gttttttccttgcaa

SEQ ID NO: 612004 - DNA, 15 bp, Homo sapiens
ttttttccttgcaag

SEQ ID NO: 612005 - DNA, 15 bp, Homo sapiens
tttttccttgcaagg

SEQ ID NO: 612006 - DNA, 15 bp, Homo sapiens
ttttccttgcaaggc

SEQ ID NO: 612007 - DNA, 15 bp, Homo sapiens
tttccttgcaaggcc

SEQ ID NO: 612008 - DNA, 15 bp, Homo sapiens
ttccttgcaaggcct

SEQ ID NO: 612009 - DNA, 15 bp, Homo sapiens
tccttgcaaggcctt

SEQ ID NO: 612010 - DNA, 15 bp, Homo sapiens
ccttgcaaggcctta

SEQ ID NO: 612011 - DNA, 15 bp, Homo sapiens
cttgcaaggccttac

SEQ ID NO: 612012 - DNA, 15 bp, Homo sapiens
ttgcaaggccttaca

SEQ ID NO: 612013 - DNA, 15 bp, Homo sapiens
tgcaaggccttacag

SEQ ID NO: 612014 - DNA, 15 bp, Homo sapiens
gcaaggccttacagg

SEQ ID NO: 612015 - DNA, 15 bp, Homo sapiens
caaggccttacaggg

SEQ ID NO: 612016 - DNA, 15 bp, Homo sapiens
aaggccttacaggga

SEQ ID NO: 612017 - DNA, 15 bp, Homo sapiens
aggccttacagggaa

SEQ ID NO: 612018 - DNA, 15 bp, Homo sapiens
ggccttacagggaag

SEQ ID NO: 612019 - DNA, 15 bp, Homo sapiens
gccttacagggaaga

SEQ ID NO: 612020 - DNA, 15 bp, Homo sapiens
ccttacagggaagat

SEQ ID NO: 612021 - DNA, 15 bp, Homo sapiens
cttacagggaagatc

SEQ ID NO: 612022 - DNA, 15 bp, Homo sapiens
ttacagggaagatct

SEQ ID NO: 612023 - DNA, 15 bp, Homo sapiens
tacagggaagatctt

SEQ ID NO: 612024 - DNA, 15 bp, Homo sapiens
acagggaagatcttt

SEQ ID NO: 612025 - DNA, 15 bp, Homo sapiens
cagggaagatctttg

SEQ ID NO: 612026 - DNA, 15 bp, Homo sapiens
agggaagatctttga

SEQ ID NO: 612027 - DNA, 15 bp, Homo sapiens
gggaagatctttgac

SEQ ID NO: 612028 - DNA, 15 bp, Homo sapiens
ggaagatctttgaca

SEQ ID NO: 612029 - DNA, 15 bp, Homo sapiens
gaagatctttgacat

SEQ ID NO: 612030 - DNA, 15 bp, Homo sapiens
aagatctttgacata

SEQ ID NO: 612031 - DNA, 15 bp, Homo sapiens
agatctttgacatag

SEQ ID NO: 612032 - DNA, 15 bp, Homo sapiens
gatctttgacataga

SEQ ID NO: 612033 - DNA, 15 bp, Homo sapiens
atctttgacatagag

SEQ ID NO: 612034 - DNA, 15 bp, Homo sapiens
tctttgacatagagg

SEQ ID NO: 612035 - DNA, 15 bp, Homo sapiens
ctttgacatagagga

SEQ ID NO: 612036 - DNA, 15 bp, Homo sapiens
tttgacatagaggat

SEQ ID NO: 612037 - DNA, 15 bp, Homo sapiens
ttgacatagaggata

SEQ ID NO: 612038 - DNA, 15 bp, Homo sapiens
tgacatagaggatat

SEQ ID NO: 612039 - DNA, 15 bp, Homo sapiens
gacatagaggatata

SEQ ID NO: 612040 - DNA, 15 bp, Homo sapiens
acatagaggatataa

SEQ ID NO: 612041 - DNA, 15 bp, Homo sapiens
catagaggatataat

SEQ ID NO: 612042 - DNA, 15 bp, Homo sapiens
atagaggatataatt

SEQ ID NO: 612043 - DNA, 15 bp, Homo sapiens
tagaggatataattt

SEQ ID NO: 612044 - DNA, 15 bp, Homo sapiens
agaggatataatttt

SEQ ID NO: 612045 - DNA, 15 bp, Homo sapiens
gaggatataatttta

SEQ ID NO: 612046 - DNA, 15 bp, Homo sapiens
aggatataattttat

SEQ ID NO: 612047 - DNA, 15 bp, Homo sapiens
ggatataattttatt

SEQ ID NO: 612048 - DNA, 15 bp, Homo sapiens
gatataattttattg

SEQ ID NO: 612049 - DNA, 15 bp, Homo sapiens
atataattttattga

SEQ ID NO: 612050 - DNA, 15 bp, Homo sapiens
tataattttattgac

SEQ ID NO: 612051 - DNA, 15 bp, Homo sapiens
ataattttattgaca

SEQ ID NO: 612052 - DNA, 15 bp, Homo sapiens
taattttattgacac

SEQ ID NO: 612053 - DNA, 15 bp, Homo sapiens
aattttattgacaca

SEQ ID NO: 612054 - DNA, 15 bp, Homo sapiens
attttattgacacat

SEQ ID NO: 612055 - DNA, 15 bp, Homo sapiens
ttttattgacacatt

SEQ ID NO: 612056 - DNA, 15 bp, Homo sapiens
tttattgacacattt

SEQ ID NO: 612057 - DNA, 15 bp, Homo sapiens
ttattgacacatttt

SEQ ID NO: 612058 - DNA, 15 bp, Homo sapiens
tattgacacatttta

SEQ ID NO: 612059 - DNA, 15 bp, Homo sapiens
attgacacattttac

SEQ ID NO: 612060 - DNA, 15 bp, Homo sapiens
ttgacacattttact

SEQ ID NO: 612061 - DNA, 15 bp, Homo sapiens
tgacacattttactt

SEQ ID NO: 612062 - DNA, 15 bp, Homo sapiens
gacacattttacttg

SEQ ID NO: 612063 - DNA, 15 bp, Homo sapiens
acacattttacttgc

SEQ ID NO: 612064 - DNA, 15 bp, Homo sapiens
cacattttacttgca

SEQ ID NO: 612065 - DNA, 15 bp, Homo sapiens
acattttacttgcag

SEQ ID NO: 612066 - DNA, 15 bp, Homo sapiens
cattttacttgcaga

SEQ ID NO: 612067 - DNA, 15 bp, Homo sapiens
attttacttgcagag

SEQ ID NO: 612068 - DNA, 15 bp, Homo sapiens
ttttacttgcagagc

SEQ ID NO: 612069 - DNA, 15 bp, Homo sapiens
tttacttgcagagca

SEQ ID NO: 612070 - DNA, 15 bp, Homo sapiens
ttacttgcagagcat

SEQ ID NO: 612071 - DNA, 15 bp, Homo sapiens
tacttgcagagcatt

SEQ ID NO: 612072 - DNA, 15 bp, Homo sapiens
acttgcagagcattc

SEQ ID NO: 612073 - DNA, 15 bp, Homo sapiens
cttgcagagcattca

SEQ ID NO: 612074 - DNA, 15 bp, Homo sapiens
ttgcagagcattcac

SEQ ID NO: 612075 - DNA, 15 bp, Homo sapiens
tgcagagcattcacc

SEQ ID NO: 612076 - DNA, 15 bp, Homo sapiens
gcagagcattcaccc

SEQ ID NO: 612077 - DNA, 15 bp, Homo sapiens
cagagcattcacccg

SEQ ID NO: 612078 - DNA, 15 bp, Homo sapiens
agagcattcacccgg

SEQ ID NO: 612079 - DNA, 15 bp, Homo sapiens
gagcattcacccggg

SEQ ID NO: 612080 - DNA, 15 bp, Homo sapiens
agcattcacccgggc

SEQ ID NO: 612081 - DNA, 15 bp, Homo sapiens
gcattcacccgggct

SEQ ID NO: 612082 - DNA, 15 bp, Homo sapiens
cattcacccgggcta

SEQ ID NO: 612083 - DNA, 15 bp, Homo sapiens
attcacccgggctaa

SEQ ID NO: 612084 - DNA, 15 bp, Homo sapiens
ttcacccgggctaac

SEQ ID NO: 612085 - DNA, 15 bp, Homo sapiens
tcacccgggctaacc

SEQ ID NO: 612086 - DNA, 15 bp, Homo sapiens
cacccgggctaacca

SEQ ID NO: 612087 - DNA, 15 bp, Homo sapiens
acccgggctaaccag

SEQ ID NO: 612088 - DNA, 15 bp, Homo sapiens
cccgggctaaccaga

SEQ ID NO: 612089 - DNA, 15 bp, Homo sapiens
ccgggctaaccagaa

SEQ ID NO: 612090 - DNA, 15 bp, Homo sapiens
cgggctaaccagaaa

SEQ ID NO: 612091 - DNA, 15 bp, Homo sapiens
gggctaaccagaaag

SEQ ID NO: 612092 - DNA, 15 bp, Homo sapiens
ggctaaccagaaagc

SEQ ID NO: 612093 - DNA, 15 bp, Homo sapiens
gctaaccagaaagcc

SEQ ID NO: 612094 - DNA, 15 bp, Homo sapiens
ctaaccagaaagcca

SEQ ID NO: 612095 - DNA, 15 bp, Homo sapiens
taaccagaaagccag

SEQ ID NO: 612096 - DNA, 15 bp, Homo sapiens
aaccagaaagccagc

SEQ ID NO: 612097 - DNA, 15 bp, Homo sapiens
accagaaagccagca

SEQ ID NO: 612098 - DNA, 15 bp, Homo sapiens
ccagaaagccagcac

SEQ ID NO: 612099 - DNA, 15 bp, Homo sapiens
cagaaagccagcact

SEQ ID NO: 612100 - DNA, 15 bp, Homo sapiens
agaaagccagcactc

SEQ ID NO: 612101 - DNA, 15 bp, Homo sapiens
gaaagccagcactct

SEQ ID NO: 612102 - DNA, 15 bp, Homo sapiens
aaagccagcactctg

SEQ ID NO: 612103 - DNA, 15 bp, Homo sapiens
aagccagcactctgc

SEQ ID NO: 612104 - DNA, 15 bp, Homo sapiens
agccagcactctgct

SEQ ID NO: 612105 - DNA, 15 bp, Homo sapiens
gccagcactctgcta

SEQ ID NO: 612106 - DNA, 15 bp, Homo sapiens
ccagcactctgctat

SEQ ID NO: 612107 - DNA, 15 bp, Homo sapiens
cagcactctgctata

SEQ ID NO: 612108 - DNA, 15 bp, Homo sapiens
agcactctgctataa

SEQ ID NO: 612109 - DNA, 15 bp, Homo sapiens
gcactctgctataaa

SEQ ID NO: 612110 - DNA, 15 bp, Homo sapiens
cactctgctataaac

SEQ ID NO: 612111 - DNA, 15 bp, Homo sapiens
actctgctataaaca

SEQ ID NO: 612112 - DNA, 15 bp, Homo sapiens
ctctgctataaacaa

SEQ ID NO: 612113 - DNA, 15 bp, Homo sapiens
tctgctataaacaaa

SEQ ID NO: 612114 - DNA, 15 bp, Homo sapiens
ctgctataaacaaaa

SEQ ID NO: 612115 - DNA, 15 bp, Homo sapiens
tgctataaacaaaaa

SEQ ID NO: 612116 - DNA, 15 bp, Homo sapiens
gctataaacaaaaaa

SEQ ID NO: 612117 - DNA, 15 bp, Homo sapiens
ctataaacaaaaaat

SEQ ID NO: 612118 - DNA, 15 bp, Homo sapiens
tataaacaaaaaata

SEQ ID NO: 612119 - DNA, 15 bp, Homo sapiens
ataaacaaaaaataa

SEQ ID NO: 612120 - DNA, 15 bp, Homo sapiens
taaacaaaaaataat

SEQ ID NO: 612121 - DNA, 15 bp, Homo sapiens
aaacaaaaaataatg

SEQ ID NO: 612122 - DNA, 15 bp, Homo sapiens
aacaaaaaataatgc

SEQ ID NO: 612123 - DNA, 15 bp, Homo sapiens
acaaaaaataatgct

SEQ ID NO: 612124 - DNA, 15 bp, Homo sapiens
caaaaaataatgctt

SEQ ID NO: 612125 - DNA, 15 bp, Homo sapiens
aaaaaataatgcttc

SEQ ID NO: 612126 - DNA, 15 bp, Homo sapiens
aaaaataatgcttca

SEQ ID NO: 612127 - DNA, 15 bp, Homo sapiens
aaaataatgcttcag

SEQ ID NO: 612128 - DNA, 15 bp, Homo sapiens
aaataatgcttcagg

SEQ ID NO: 612129 - DNA, 15 bp, Homo sapiens
aataatgcttcaggg

SEQ ID NO: 612130 - DNA, 15 bp, Homo sapiens
ataatgcttcagggc

SEQ ID NO: 612131 - DNA, 15 bp, Homo sapiens
taatgcttcagggct

SEQ ID NO: 612132 - DNA, 15 bp, Homo sapiens
aatgcttcagggcta

SEQ ID NO: 612133 - DNA, 15 bp, Homo sapiens
atgcttcagggctaa

SEQ ID NO: 612134 - DNA, 15 bp, Homo sapiens
tgcttcagggctaac

SEQ ID NO: 612135 - DNA, 15 bp, Homo sapiens
gcttcagggctaaca

SEQ ID NO: 612136 - DNA, 15 bp, Homo sapiens
cttcagggctaacat

SEQ ID NO: 612137 - DNA, 15 bp, Homo sapiens
ttcagggctaacatg

SEQ ID NO: 612138 - DNA, 15 bp, Homo sapiens
tcagggctaacatgg

SEQ ID NO: 612139 - DNA, 15 bp, Homo sapiens
cagggctaacatgga

SEQ ID NO: 612140 - DNA, 15 bp, Homo sapiens
agggctaacatggaa

SEQ ID NO: 612141 - DNA, 15 bp, Homo sapiens
gggctaacatggaat

SEQ ID NO: 612142 - DNA, 15 bp, Homo sapiens
ggctaacatggaatg

SEQ ID NO: 612143 - DNA, 15 bp, Homo sapiens
gctaacatggaatgt

SEQ ID NO: 612144 - DNA, 15 bp, Homo sapiens
ctaacatggaatgtg

SEQ ID NO: 612145 - DNA, 15 bp, Homo sapiens
taacatggaatgtgt

SEQ ID NO: 612146 - DNA, 15 bp, Homo sapiens
aacatggaatgtgtt

SEQ ID NO: 612147 - DNA, 15 bp, Homo sapiens
acatggaatgtgtta

SEQ ID NO: 612148 - DNA, 15 bp, Homo sapiens
catggaatgtgttaa

SEQ ID NO: 612149 - DNA, 15 bp, Homo sapiens
atggaatgtgttaaa

SEQ ID NO: 612150 - DNA, 15 bp, Homo sapiens
tggaatgtgttaaaa

SEQ ID NO: 612151 - DNA, 15 bp, Homo sapiens
ggaatgtgttaaaag

SEQ ID NO: 612152 - DNA, 15 bp, Homo sapiens
gaatgtgttaaaaga

SEQ ID NO: 612153 - DNA, 15 bp, Homo sapiens
aatgtgttaaaagat

SEQ ID NO: 612154 - DNA, 15 bp, Homo sapiens
atgtgttaaaagatt

SEQ ID NO: 612155 - DNA, 15 bp, Homo sapiens
tgtgttaaaagattc

SEQ ID NO: 612156 - DNA, 15 bp, Homo sapiens
gtgttaaaagattcc

SEQ ID NO: 612157 - DNA, 15 bp, Homo sapiens
tgttaaaagattcca

SEQ ID NO: 612158 - DNA, 15 bp, Homo sapiens
gttaaaagattccag

SEQ ID NO: 612159 - DNA, 15 bp, Homo sapiens
ttaaaagattccagc

SEQ ID NO: 612160 - DNA, 15 bp, Homo sapiens
taaaagattccagcc

SEQ ID NO: 612161 - DNA, 15 bp, Homo sapiens
aaaagattccagccc

SEQ ID NO: 612162 - DNA, 15 bp, Homo sapiens
aaagattccagccca

SEQ ID NO: 612163 - DNA, 15 bp, Homo sapiens
aagattccagcccat

SEQ ID NO: 612164 - DNA, 15 bp, Homo sapiens
agattccagcccatt

SEQ ID NO: 612165 - DNA, 15 bp, Homo sapiens
gattccagcccatta

SEQ ID NO: 612166 - DNA, 15 bp, Homo sapiens
attccagcccattaa

SEQ ID NO: 612167 - DNA, 15 bp, Homo sapiens
ttccagcccattaaa

SEQ ID NO: 612168 - DNA, 15 bp, Homo sapiens
tccagcccattaaat

SEQ ID NO: 612169 - DNA, 15 bp, Homo sapiens
ccagcccattaaatg

SEQ ID NO: 612170 - DNA, 15 bp, Homo sapiens
cagcccattaaatgt

SEQ ID NO: 612171 - DNA, 15 bp, Homo sapiens
agcccattaaatgtc

SEQ ID NO: 612172 - DNA, 15 bp, Homo sapiens
gcccattaaatgtcc

SEQ ID NO: 612173 - DNA, 15 bp, Homo sapiens
cccattaaatgtcca

SEQ ID NO: 612174 - DNA, 15 bp, Homo sapiens
ccattaaatgtccag

SEQ ID NO: 612175 - DNA, 15 bp, Homo sapiens
cattaaatgtccagg

SEQ ID NO: 612176 - DNA, 15 bp, Homo sapiens
attaaatgtccaggg

SEQ ID NO: 612177 - DNA, 15 bp, Homo sapiens
ttaaatgtccagggg

SEQ ID NO: 612178 - DNA, 15 bp, Homo sapiens
taaatgtccagggga

SEQ ID NO: 612179 - DNA, 15 bp, Homo sapiens
aaatgtccaggggag

SEQ ID NO: 612180 - DNA, 15 bp, Homo sapiens
aatgtccaggggagg

SEQ ID NO: 612181 - DNA, 15 bp, Homo sapiens
atgtccaggggaggt

SEQ ID NO: 612182 - DNA, 15 bp, Homo sapiens
tgtccaggggaggtt

SEQ ID NO: 612183 - DNA, 15 bp, Homo sapiens
gtccaggggaggttt

SEQ ID NO: 612184 - DNA, 15 bp, Homo sapiens
tccaggggaggtttt

SEQ ID NO: 612185 - DNA, 15 bp, Homo sapiens
ccaggggaggttttc

SEQ ID NO: 612186 - DNA, 15 bp, Homo sapiens
caggggaggttttcc

SEQ ID NO: 612187 - DNA, 15 bp, Homo sapiens
aggggaggttttcct

SEQ ID NO: 612188 - DNA, 15 bp, Homo sapiens
ggggaggttttcctg

SEQ ID NO: 612189 - DNA, 15 bp, Homo sapiens
gggaggttttcctgt

SEQ ID NO: 612190 - DNA, 15 bp, Homo sapiens
ggaggttttcctgtt

SEQ ID NO: 612191 - DNA, 15 bp, Homo sapiens
gaggttttcctgttt

SEQ ID NO: 612192 - DNA, 15 bp, Homo sapiens
aggttttcctgtttt

SEQ ID NO: 612193 - DNA, 15 bp, Homo sapiens
ggttttcctgttttc

SEQ ID NO: 612194 - DNA, 15 bp, Homo sapiens
gttttcctgttttcc

SEQ ID NO: 612195 - DNA, 15 bp, Homo sapiens
ttttcctgttttcct

SEQ ID NO: 612196 - DNA, 15 bp, Homo sapiens
tttcctgttttcctt

SEQ ID NO: 612197 - DNA, 15 bp, Homo sapiens
ttcctgttttccttt

SEQ ID NO: 612198 - DNA, 15 bp, Homo sapiens
tcctgttttcctttc

SEQ ID NO: 612199 - DNA, 15 bp, Homo sapiens
cctgttttcctttcc

SEQ ID NO: 612200 - DNA, 15 bp, Homo sapiens
ctgttttcctttccc

SEQ ID NO: 612201 - DNA, 15 bp, Homo sapiens
tgttttcctttccct

SEQ ID NO: 612202 - DNA, 15 bp, Homo sapiens
gttttcctttccctc

SEQ ID NO: 612203 - DNA, 15 bp, Homo sapiens
ttttcctttccctcc

SEQ ID NO: 612204 - DNA, 15 bp, Homo sapiens
tttcctttccctcca

SEQ ID NO: 612205 - DNA, 15 bp, Homo sapiens
ttcctttccctccat

SEQ ID NO: 612206 - DNA, 15 bp, Homo sapiens
tcctttccctccatc

SEQ ID NO: 612207 - DNA, 15 bp, Homo sapiens
cctttccctccatct

SEQ ID NO: 612208 - DNA, 15 bp, Homo sapiens
ctttccctccatctg

SEQ ID NO: 612209 - DNA, 15 bp, Homo sapiens
tttccctccatctgg

SEQ ID NO: 612210 - DNA, 15 bp, Homo sapiens
ttccctccatctggg

SEQ ID NO: 612211 - DNA, 15 bp, Homo sapiens
tccctccatctgggc

SEQ ID NO: 612212 - DNA, 15 bp, Homo sapiens
ccctccatctgggct

SEQ ID NO: 612213 - DNA, 15 bp, Homo sapiens
cctccatctgggctt

SEQ ID NO: 612214 - DNA, 15 bp, Homo sapiens
ctccatctgggcttt

SEQ ID NO: 612215 - DNA, 15 bp, Homo sapiens
tccatctgggctttg

SEQ ID NO: 612216 - DNA, 15 bp, Homo sapiens
ccatctgggctttgt

SEQ ID NO: 612217 - DNA, 15 bp, Homo sapiens
catctgggctttgtt

SEQ ID NO: 612218 - DNA, 15 bp, Homo sapiens
atctgggctttgttc

SEQ ID NO: 612219 - DNA, 15 bp, Homo sapiens
tctgggctttgttct

SEQ ID NO: 612220 - DNA, 15 bp, Homo sapiens
ctgggctttgttctc

SEQ ID NO: 612221 - DNA, 15 bp, Homo sapiens
tgggctttgttctca

SEQ ID NO: 612222 - DNA, 15 bp, Homo sapiens
gggctttgttctcaa

SEQ ID NO: 612223 - DNA, 15 bp, Homo sapiens
ggctttgttctcaac

SEQ ID NO: 612224 - DNA, 15 bp, Homo sapiens
gctttgttctcaaca

SEQ ID NO: 612225 - DNA, 15 bp, Homo sapiens
ctttgttctcaacac

SEQ ID NO: 612226 - DNA, 15 bp, Homo sapiens
tttgttctcaacaca

SEQ ID NO: 612227 - DNA, 15 bp, Homo sapiens
ttgttctcaacacat

SEQ ID NO: 612228 - DNA, 15 bp, Homo sapiens
tgttctcaacacatt

SEQ ID NO: 612229 - DNA, 15 bp, Homo sapiens
gttctcaacacattc

SEQ ID NO: 612230 - DNA, 15 bp, Homo sapiens
ttctcaacacattca

SEQ ID NO: 612231 - DNA, 15 bp, Homo sapiens
tctcaacacattcat

SEQ ID NO: 612232 - DNA, 15 bp, Homo sapiens
ctcaacacattcatt

SEQ ID NO: 612233 - DNA, 15 bp, Homo sapiens
tcaacacattcattc

SEQ ID NO: 612234 - DNA, 15 bp, Homo sapiens
caacacattcattca

SEQ ID NO: 612235 - DNA, 15 bp, Homo sapiens
aacacattcattcaa

SEQ ID NO: 612236 - DNA, 15 bp, Homo sapiens
acacattcattcaac

SEQ ID NO: 612237 - DNA, 15 bp, Homo sapiens
cacattcattcaaca

SEQ ID NO: 612238 - DNA, 15 bp, Homo sapiens
acattcattcaacaa

SEQ ID NO: 612239 - DNA, 15 bp, Homo sapiens
cattcattcaacaaa

SEQ ID NO: 612240 - DNA, 15 bp, Homo sapiens
attcattcaacaaac

SEQ ID NO: 612241 - DNA, 15 bp, Homo sapiens
ttcattcaacaaaca

SEQ ID NO: 612242 - DNA, 15 bp, Homo sapiens
tcattcaacaaacat

SEQ ID NO: 612243 - DNA, 15 bp, Homo sapiens
cattcaacaaacatt

SEQ ID NO: 612244 - DNA, 15 bp, Homo sapiens
attcaacaaacattt

SEQ ID NO: 612245 - DNA, 15 bp, Homo sapiens
ttcaacaaacattta

SEQ ID NO: 612246 - DNA, 15 bp, Homo sapiens
tcaacaaacatttat

SEQ ID NO: 612247 - DNA, 15 bp, Homo sapiens
caacaaacatttatt

SEQ ID NO: 612248 - DNA, 15 bp, Homo sapiens
aacaaacatttattc

SEQ ID NO: 612249 - DNA, 15 bp, Homo sapiens
acaaacatttattct

SEQ ID NO: 612250 - DNA, 15 bp, Homo sapiens
caaacatttattctg

SEQ ID NO: 612251 - DNA, 15 bp, Homo sapiens
aaacatttattctgc

SEQ ID NO: 612252 - DNA, 15 bp, Homo sapiens
aacatttattctgcc

SEQ ID NO: 612253 - DNA, 15 bp, Homo sapiens
acatttattctgcct

SEQ ID NO: 612254 - DNA, 15 bp, Homo sapiens
catttattctgcctc

SEQ ID NO: 612255 - DNA, 15 bp, Homo sapiens
atttattctgcctct

SEQ ID NO: 612256 - DNA, 15 bp, Homo sapiens
tttattctgcctcta

SEQ ID NO: 612257 - DNA, 15 bp, Homo sapiens
ttattctgcctctac

SEQ ID NO: 612258 - DNA, 15 bp, Homo sapiens
tattctgcctctacc

SEQ ID NO: 612259 - DNA, 15 bp, Homo sapiens
attctgcctctacca

SEQ ID NO: 612260 - DNA, 15 bp, Homo sapiens
ttctgcctctaccag

SEQ ID NO: 612261 - DNA, 15 bp, Homo sapiens
tctgcctctaccagg

SEQ ID NO: 612262 - DNA, 15 bp, Homo sapiens
ctgcctctaccaggt

SEQ ID NO: 612263 - DNA, 15 bp, Homo sapiens
tgcctctaccaggta

SEQ ID NO: 612264 - DNA, 15 bp, Homo sapiens
gcctctaccaggtac

SEQ ID NO: 612265 - DNA, 15 bp, Homo sapiens
cctctaccaggtaca

SEQ ID NO: 612266 - DNA, 15 bp, Homo sapiens
ctctaccaggtacag

SEQ ID NO: 612267 - DNA, 15 bp, Homo sapiens
tctaccaggtacaga

SEQ ID NO: 612268 - DNA, 15 bp, Homo sapiens
ctaccaggtacagag

SEQ ID NO: 612269 - DNA, 15 bp, Homo sapiens
taccaggtacagagc

SEQ ID NO: 612270 - DNA, 15 bp, Homo sapiens
accaggtacagagca

SEQ ID NO: 612271 - DNA, 15 bp, Homo sapiens
ccaggtacagagcac

SEQ ID NO: 612272 - DNA, 15 bp, Homo sapiens
caggtacagagcact

SEQ ID NO: 612273 - DNA, 15 bp, Homo sapiens
aggtacagagcactc

SEQ ID NO: 612274 - DNA, 15 bp, Homo sapiens
ggtacagagcactct

SEQ ID NO: 612275 - DNA, 15 bp, Homo sapiens
gtacagagcactcta

SEQ ID NO: 612276 - DNA, 15 bp, Homo sapiens
tacagagcactctac

SEQ ID NO: 612277 - DNA, 15 bp, Homo sapiens
acagagcactctact

SEQ ID NO: 612278 - DNA, 15 bp, Homo sapiens
cagagcactctacta

SEQ ID NO: 612279 - DNA, 15 bp, Homo sapiens
agagcactctactat

SEQ ID NO: 612280 - DNA, 15 bp, Homo sapiens
gagcactctactatt

SEQ ID NO: 612281 - DNA, 15 bp, Homo sapiens
agcactctactattc

SEQ ID NO: 612282 - DNA, 15 bp, Homo sapiens
gcactctactattct

SEQ ID NO: 612283 - DNA, 15 bp, Homo sapiens
cactctactattctg

SEQ ID NO: 612284 - DNA, 15 bp, Homo sapiens
actctactattctgc

SEQ ID NO: 612285 - DNA, 15 bp, Homo sapiens
ctctactattctgct

SEQ ID NO: 612286 - DNA, 15 bp, Homo sapiens
tctactattctgctt

SEQ ID NO: 612287 - DNA, 15 bp, Homo sapiens
ctactattctgcttc

SEQ ID NO: 612288 - DNA, 15 bp, Homo sapiens
tactattctgcttct

SEQ ID NO: 612289 - DNA, 15 bp, Homo sapiens
actattctgcttctc

SEQ ID NO: 612290 - DNA, 15 bp, Homo sapiens
ctattctgcttctct

SEQ ID NO: 612291 - DNA, 15 bp, Homo sapiens
tattctgcttctctc

SEQ ID NO: 612292 - DNA, 15 bp, Homo sapiens
attctgcttctctcc

SEQ ID NO: 612293 - DNA, 15 bp, Homo sapiens
ttctgcttctctcct

SEQ ID NO: 612294 - DNA, 15 bp, Homo sapiens
tctgcttctctcctt

SEQ ID NO: 612295 - DNA, 15 bp, Homo sapiens
ctgcttctctccttt

SEQ ID NO: 612296 - DNA, 15 bp, Homo sapiens
tgcttctctcctttt

SEQ ID NO: 612297 - DNA, 15 bp, Homo sapiens
gcttctctccttttg

SEQ ID NO: 612298 - DNA, 15 bp, Homo sapiens
cttctctccttttgc

SEQ ID NO: 612299 - DNA, 15 bp, Homo sapiens
ttctctccttttgct

SEQ ID NO: 612300 - DNA, 15 bp, Homo sapiens
tctctccttttgctt

SEQ ID NO: 612301 - DNA, 15 bp, Homo sapiens
ctctccttttgcttt

SEQ ID NO: 612302 - DNA, 15 bp, Homo sapiens
tctccttttgcttta

SEQ ID NO: 612303 - DNA, 15 bp, Homo sapiens
ctccttttgctttag

SEQ ID NO: 612304 - DNA, 15 bp, Homo sapiens
tccttttgctttagt

SEQ ID NO: 612305 - DNA, 15 bp, Homo sapiens
ccttttgctttagtt

SEQ ID NO: 612306 - DNA, 15 bp, Homo sapiens
cttttgctttagttt

SEQ ID NO: 612307 - DNA, 15 bp, Homo sapiens
ttttgctttagtttc

SEQ ID NO: 612308 - DNA, 15 bp, Homo sapiens
tttgctttagtttca

SEQ ID NO: 612309 - DNA, 15 bp, Homo sapiens
ttgctttagtttcat

SEQ ID NO: 612310 - DNA, 15 bp, Homo sapiens
tgctttagtttcatg

SEQ ID NO: 612311 - DNA, 15 bp, Homo sapiens
gctttagtttcatga

SEQ ID NO: 612312 - DNA, 15 bp, Homo sapiens
ctttagtttcatgat

SEQ ID NO: 612313 - DNA, 15 bp, Homo sapiens
tttagtttcatgatc

SEQ ID NO: 612314 - DNA, 15 bp, Homo sapiens
ttagtttcatgatca

SEQ ID NO: 612315 - DNA, 15 bp, Homo sapiens
tagtttcatgatcat

SEQ ID NO: 612316 - DNA, 15 bp, Homo sapiens
agtttcatgatcatc

SEQ ID NO: 612317 - DNA, 15 bp, Homo sapiens
gtttcatgatcatcc

SEQ ID NO: 612318 - DNA, 15 bp, Homo sapiens
tttcatgatcatcct

SEQ ID NO: 612319 - DNA, 15 bp, Homo sapiens
ttcatgatcatcctg

SEQ ID NO: 612320 - DNA, 15 bp, Homo sapiens
tcatgatcatcctga

SEQ ID NO: 612321 - DNA, 15 bp, Homo sapiens
catgatcatcctgaa

SEQ ID NO: 612322 - DNA, 15 bp, Homo sapiens
atgatcatcctgaac

SEQ ID NO: 612323 - DNA, 15 bp, Homo sapiens
tgatcatcctgaacc

SEQ ID NO: 612324 - DNA, 15 bp, Homo sapiens
gatcatcctgaaccg

SEQ ID NO: 612325 - DNA, 15 bp, Homo sapiens
atcatcctgaaccgc

SEQ ID NO: 612326 - DNA, 15 bp, Homo sapiens
tcatcctgaaccgct

SEQ ID NO: 612327 - DNA, 15 bp, Homo sapiens
catcctgaaccgctg

SEQ ID NO: 612328 - DNA, 15 bp, Homo sapiens
atcctgaaccgctgt

SEQ ID NO: 612329 - DNA, 15 bp, Homo sapiens
tcctgaaccgctgtt

SEQ ID NO: 612330 - DNA, 15 bp, Homo sapiens
cctgaaccgctgttt

SEQ ID NO: 612331 - DNA, 15 bp, Homo sapiens
ctgaaccgctgtttc

SEQ ID NO: 612332 - DNA, 15 bp, Homo sapiens
tgaaccgctgtttcc

SEQ ID NO: 612333 - DNA, 15 bp, Homo sapiens
gaaccgctgtttccc

SEQ ID NO: 612334 - DNA, 15 bp, Homo sapiens
aaccgctgtttccct

SEQ ID NO: 612335 - DNA, 15 bp, Homo sapiens
accgctgtttcccta

SEQ ID NO: 612336 - DNA, 15 bp, Homo sapiens
ccgctgtttccctat

SEQ ID NO: 612337 - DNA, 15 bp, Homo sapiens
cgctgtttccctatc

SEQ ID NO: 612338 - DNA, 15 bp, Homo sapiens
gctgtttccctatct

SEQ ID NO: 612339 - DNA, 15 bp, Homo sapiens
ctgtttccctatctt

SEQ ID NO: 612340 - DNA, 15 bp, Homo sapiens
tgtttccctatcttc

SEQ ID NO: 612341 - DNA, 15 bp, Homo sapiens
gtttccctatcttca

SEQ ID NO: 612342 - DNA, 15 bp, Homo sapiens
tttccctatcttcat

SEQ ID NO: 612343 - DNA, 15 bp, Homo sapiens
ttccctatcttcatg

SEQ ID NO: 612344 - DNA, 15 bp, Homo sapiens
tccctatcttcatgg

SEQ ID NO: 612345 - DNA, 15 bp, Homo sapiens
ccctatcttcatggt

SEQ ID NO: 612346 - DNA, 15 bp, Homo sapiens
cctatcttcatggtg

SEQ ID NO: 612347 - DNA, 15 bp, Homo sapiens
ctatcttcatggtgc

SEQ ID NO: 612348 - DNA, 15 bp, Homo sapiens
tatcttcatggtgct

SEQ ID NO: 612349 - DNA, 15 bp, Homo sapiens
atcttcatggtgctg

SEQ ID NO: 612350 - DNA, 15 bp, Homo sapiens
tcttcatggtgctgg

SEQ ID NO: 612351 - DNA, 15 bp, Homo sapiens
cttcatggtgctggc

SEQ ID NO: 612352 - DNA, 15 bp, Homo sapiens
ttcatggtgctggca

SEQ ID NO: 612353 - DNA, 15 bp, Homo sapiens
tcatggtgctggcat

SEQ ID NO: 612354 - DNA, 15 bp, Homo sapiens
catggtgctggcatg

SEQ ID NO: 612355 - DNA, 15 bp, Homo sapiens
atggtgctggcatgg

SEQ ID NO: 612356 - DNA, 15 bp, Homo sapiens
tggtgctggcatgga

SEQ ID NO: 612357 - DNA, 15 bp, Homo sapiens
ggtgctggcatggat

SEQ ID NO: 612358 - DNA, 15 bp, Homo sapiens
gtgctggcatggatc

SEQ ID NO: 612359 - DNA, 15 bp, Homo sapiens
tgctggcatggatct

SEQ ID NO: 612360 - DNA, 15 bp, Homo sapiens
gctggcatggatcta

SEQ ID NO: 612361 - DNA, 15 bp, Homo sapiens
ctggcatggatctac

SEQ ID NO: 612362 - DNA, 15 bp, Homo sapiens
tggcatggatctact

SEQ ID NO: 612363 - DNA, 15 bp, Homo sapiens
ggcatggatctactc

SEQ ID NO: 612364 - DNA, 15 bp, Homo sapiens
gcatggatctactct

SEQ ID NO: 612365 - DNA, 15 bp, Homo sapiens
catggatctactctg

SEQ ID NO: 612366 - DNA, 15 bp, Homo sapiens
atggatctactctgt

SEQ ID NO: 612367 - DNA, 15 bp, Homo sapiens
tggatctactctgtc

SEQ ID NO: 612368 - DNA, 15 bp, Homo sapiens
ggatctactctgtct

SEQ ID NO: 612369 - DNA, 15 bp, Homo sapiens
gatctactctgtctc

SEQ ID NO: 612370 - DNA, 15 bp, Homo sapiens
atctactctgtctcc

SEQ ID NO: 612371 - DNA, 15 bp, Homo sapiens
tctactctgtctcca

SEQ ID NO: 612372 - DNA, 15 bp, Homo sapiens
ctactctgtctccat

SEQ ID NO: 612373 - DNA, 15 bp, Homo sapiens
tactctgtctccatg

SEQ ID NO: 612374 - DNA, 15 bp, Homo sapiens
actctgtctccatga

SEQ ID NO: 612375 - DNA, 15 bp, Homo sapiens
ctctgtctccatgac

SEQ ID NO: 612376 - DNA, 15 bp, Homo sapiens
tctgtctccatgact

SEQ ID NO: 612377 - DNA, 15 bp, Homo sapiens
ctgtctccatgactg

SEQ ID NO: 612378 - DNA, 15 bp, Homo sapiens
tgtctccatgactgt

SEQ ID NO: 612379 - DNA, 15 bp, Homo sapiens
gtctccatgactgtg

SEQ ID NO: 612380 - DNA, 15 bp, Homo sapiens
tctccatgactgtga

SEQ ID NO: 612381 - DNA, 15 bp, Homo sapiens
ctccatgactgtgaa

SEQ ID NO: 612382 - DNA, 15 bp, Homo sapiens
tccatgactgtgaag

SEQ ID NO: 612383 - DNA, 15 bp, Homo sapiens
ccatgactgtgaaga

SEQ ID NO: 612384 - DNA, 15 bp, Homo sapiens
catgactgtgaagag

SEQ ID NO: 612385 - DNA, 15 bp, Homo sapiens
atgactgtgaagagc

SEQ ID NO: 612386 - DNA, 15 bp, Homo sapiens
tgactgtgaagagca

SEQ ID NO: 612387 - DNA, 15 bp, Homo sapiens
gactgtgaagagcat

SEQ ID NO: 612388 - DNA, 15 bp, Homo sapiens
actgtgaagagcatc

SEQ ID NO: 612389 - DNA, 15 bp, Homo sapiens
ctgtgaagagcatcg

SEQ ID NO: 612390 - DNA, 15 bp, Homo sapiens
tgtgaagagcatcgt

SEQ ID NO: 612391 - DNA, 15 bp, Homo sapiens
gtgaagagcatcgtc

SEQ ID NO: 612392 - DNA, 15 bp, Homo sapiens
tgaagagcatcgtct

SEQ ID NO: 612393 - DNA, 15 bp, Homo sapiens
gaagagcatcgtctt

SEQ ID NO: 612394 - DNA, 15 bp, Homo sapiens
aagagcatcgtcttg

SEQ ID NO: 612395 - DNA, 15 bp, Homo sapiens
agagcatcgtcttgg

SEQ ID NO: 612396 - DNA, 15 bp, Homo sapiens
gagcatcgtcttgga

SEQ ID NO: 612397 - DNA, 15 bp, Homo sapiens
agcatcgtcttggag

SEQ ID NO: 612398 - DNA, 15 bp, Homo sapiens
gcatcgtcttggaga

SEQ ID NO: 612399 - DNA, 15 bp, Homo sapiens
catcgtcttggagaa

SEQ ID NO: 612400 - DNA, 15 bp, Homo sapiens
atcgtcttggagaag

SEQ ID NO: 612401 - DNA, 15 bp, Homo sapiens
tcgtcttggagaagg

SEQ ID NO: 612402 - DNA, 15 bp, Homo sapiens
cgtcttggagaagga

SEQ ID NO: 612403 - DNA, 15 bp, Homo sapiens
gtcttggagaaggag

SEQ ID NO: 612404 - DNA, 15 bp, Homo sapiens
tcttggagaaggagt

SEQ ID NO: 612405 - DNA, 15 bp, Homo sapiens
cttggagaaggagtt

SEQ ID NO: 612406 - DNA, 15 bp, Homo sapiens
ttggagaaggagttg

SEQ ID NO: 612407 - DNA, 15 bp, Homo sapiens
tggagaaggagttgc

SEQ ID NO: 612408 - DNA, 15 bp, Homo sapiens
ggagaaggagttgcg

SEQ ID NO: 612409 - DNA, 15 bp, Homo sapiens
gagaaggagttgcga

SEQ ID NO: 612410 - DNA, 15 bp, Homo sapiens
agaaggagttgcgac

SEQ ID NO: 612411 - DNA, 15 bp, Homo sapiens
gaaggagttgcgact

SEQ ID NO: 612412 - DNA, 15 bp, Homo sapiens
aaggagttgcgactg

SEQ ID NO: 612413 - DNA, 15 bp, Homo sapiens
aggagttgcgactga

SEQ ID NO: 612414 - DNA, 15 bp, Homo sapiens
ggagttgcgactgaa

SEQ ID NO: 612415 - DNA, 15 bp, Homo sapiens
gagttgcgactgaag

SEQ ID NO: 612416 - DNA, 15 bp, Homo sapiens
agttgcgactgaagg

SEQ ID NO: 612417 - DNA, 15 bp, Homo sapiens
gttgcgactgaagga

SEQ ID NO: 612418 - DNA, 15 bp, Homo sapiens
ttgcgactgaaggag

SEQ ID NO: 612419 - DNA, 15 bp, Homo sapiens
tgcgactgaaggaga

SEQ ID NO: 612420 - DNA, 15 bp, Homo sapiens
gcgactgaaggagac

SEQ ID NO: 612421 - DNA, 15 bp, Homo sapiens
cgactgaaggagacc

SEQ ID NO: 612422 - DNA, 15 bp, Homo sapiens
gactgaaggagacct

SEQ ID NO: 612423 - DNA, 15 bp, Homo sapiens
actgaaggagacctt

SEQ ID NO: 612424 - DNA, 15 bp, Homo sapiens
ctgaaggagaccttg

SEQ ID NO: 612425 - DNA, 15 bp, Homo sapiens
tgaaggagaccttga

SEQ ID NO: 612426 - DNA, 15 bp, Homo sapiens
gaaggagaccttgaa

SEQ ID NO: 612427 - DNA, 15 bp, Homo sapiens
aaggagaccttgaaa

SEQ ID NO: 612428 - DNA, 15 bp, Homo sapiens
aggagaccttgaaaa

SEQ ID NO: 612429 - DNA, 15 bp, Homo sapiens
ggagaccttgaaaaa

SEQ ID NO: 612430 - DNA, 15 bp, Homo sapiens
gagaccttgaaaaat

SEQ ID NO: 612431 - DNA, 15 bp, Homo sapiens
agaccttgaaaaatc

SEQ ID NO: 612432 - DNA, 15 bp, Homo sapiens
gaccttgaaaaatca

SEQ ID NO: 612433 - DNA, 15 bp, Homo sapiens
accttgaaaaatcag

SEQ ID NO: 612434 - DNA, 15 bp, Homo sapiens
ccttgaaaaatcagg

SEQ ID NO: 612435 - DNA, 15 bp, Homo sapiens
cttgaaaaatcaggg

SEQ ID NO: 612436 - DNA, 15 bp, Homo sapiens
ttgaaaaatcagggt

SEQ ID NO: 612437 - DNA, 15 bp, Homo sapiens
tgaaaaatcagggtg

SEQ ID NO: 612438 - DNA, 15 bp, Homo sapiens
gaaaaatcagggtgt

SEQ ID NO: 612439 - DNA, 15 bp, Homo sapiens
aaaaatcagggtgtc

SEQ ID NO: 612440 - DNA, 15 bp, Homo sapiens
aaaatcagggtgtct

SEQ ID NO: 612441 - DNA, 15 bp, Homo sapiens
aaatcagggtgtctc

SEQ ID NO: 612442 - DNA, 15 bp, Homo sapiens
aatcagggtgtctcc

SEQ ID NO: 612443 - DNA, 15 bp, Homo sapiens
atcagggtgtctcca

SEQ ID NO: 612444 - DNA, 15 bp, Homo sapiens
tcagggtgtctccaa

SEQ ID NO: 612445 - DNA, 15 bp, Homo sapiens
cagggtgtctccaat

SEQ ID NO: 612446 - DNA, 15 bp, Homo sapiens
agggtgtctccaatg

SEQ ID NO: 612447 - DNA, 15 bp, Homo sapiens
gggtgtctccaatgc

SEQ ID NO: 612448 - DNA, 15 bp, Homo sapiens
ggtgtctccaatgca

SEQ ID NO: 612449 - DNA, 15 bp, Homo sapiens
gtgtctccaatgcag

SEQ ID NO: 612450 - DNA, 15 bp, Homo sapiens
tgtctccaatgcagt

SEQ ID NO: 612451 - DNA, 15 bp, Homo sapiens
gtctccaatgcagtg

SEQ ID NO: 612452 - DNA, 15 bp, Homo sapiens
tctccaatgcagtga

SEQ ID NO: 612453 - DNA, 15 bp, Homo sapiens
ctccaatgcagtgat

SEQ ID NO: 612454 - DNA, 15 bp, Homo sapiens
tccaatgcagtgatt

SEQ ID NO: 612455 - DNA, 15 bp, Homo sapiens
ccaatgcagtgattt

SEQ ID NO: 612456 - DNA, 15 bp, Homo sapiens
caatgcagtgatttg

SEQ ID NO: 612457 - DNA, 15 bp, Homo sapiens
aatgcagtgatttgg

SEQ ID NO: 612458 - DNA, 15 bp, Homo sapiens
atgcagtgatttggt

SEQ ID NO: 612459 - DNA, 15 bp, Homo sapiens
tgcagtgatttggtg

SEQ ID NO: 612460 - DNA, 15 bp, Homo sapiens
gcagtgatttggtgt

SEQ ID NO: 612461 - DNA, 15 bp, Homo sapiens
cagtgatttggtgta

SEQ ID NO: 612462 - DNA, 15 bp, Homo sapiens
agtgatttggtgtac

SEQ ID NO: 612463 - DNA, 15 bp, Homo sapiens
gtgatttggtgtacc

SEQ ID NO: 612464 - DNA, 15 bp, Homo sapiens
tgatttggtgtacct

SEQ ID NO: 612465 - DNA, 15 bp, Homo sapiens
gatttggtgtacctg

SEQ ID NO: 612466 - DNA, 15 bp, Homo sapiens
atttggtgtacctgg

SEQ ID NO: 612467 - DNA, 15 bp, Homo sapiens
tttggtgtacctggt

SEQ ID NO: 612468 - DNA, 15 bp, Homo sapiens
ttggtgtacctggtt

SEQ ID NO: 612469 - DNA, 15 bp, Homo sapiens
tggtgtacctggttc

SEQ ID NO: 612470 - DNA, 15 bp, Homo sapiens
ggtgtacctggttcc

SEQ ID NO: 612471 - DNA, 15 bp, Homo sapiens
gtgtacctggttcct

SEQ ID NO: 612472 - DNA, 15 bp, Homo sapiens
tgtacctggttcctg

SEQ ID NO: 612473 - DNA, 15 bp, Homo sapiens
gtacctggttcctgg

SEQ ID NO: 612474 - DNA, 15 bp, Homo sapiens
tacctggttcctgga

SEQ ID NO: 612475 - DNA, 15 bp, Homo sapiens
acctggttcctggac

SEQ ID NO: 612476 - DNA, 15 bp, Homo sapiens
cctggttcctggaca

SEQ ID NO: 612477 - DNA, 15 bp, Homo sapiens
ctggttcctggacag

SEQ ID NO: 612478 - DNA, 15 bp, Homo sapiens
tggttcctggacagc

SEQ ID NO: 612479 - DNA, 15 bp, Homo sapiens
ggttcctggacagct

SEQ ID NO: 612480 - DNA, 15 bp, Homo sapiens
gttcctggacagctt

SEQ ID NO: 612481 - DNA, 15 bp, Homo sapiens
ttcctggacagcttc

SEQ ID NO: 612482 - DNA, 15 bp, Homo sapiens
tcctggacagcttct

SEQ ID NO: 612483 - DNA, 15 bp, Homo sapiens
cctggacagcttctc

SEQ ID NO: 612484 - DNA, 15 bp, Homo sapiens
ctggacagcttctcc

SEQ ID NO: 612485 - DNA, 15 bp, Homo sapiens
tggacagcttctcca

SEQ ID NO: 612486 - DNA, 15 bp, Homo sapiens
ggacagcttctccat

SEQ ID NO: 612487 - DNA, 15 bp, Homo sapiens
gacagcttctccatc

SEQ ID NO: 612488 - DNA, 15 bp, Homo sapiens
acagcttctccatca

SEQ ID NO: 612489 - DNA, 15 bp, Homo sapiens
cagcttctccatcat

SEQ ID NO: 612490 - DNA, 15 bp, Homo sapiens
agcttctccatcatg

SEQ ID NO: 612491 - DNA, 15 bp, Homo sapiens
gcttctccatcatgt

SEQ ID NO: 612492 - DNA, 15 bp, Homo sapiens
cttctccatcatgtc

SEQ ID NO: 612493 - DNA, 15 bp, Homo sapiens
ttctccatcatgtcg

SEQ ID NO: 612494 - DNA, 15 bp, Homo sapiens
tctccatcatgtcga

SEQ ID NO: 612495 - DNA, 15 bp, Homo sapiens
ctccatcatgtcgat

SEQ ID NO: 612496 - DNA, 15 bp, Homo sapiens
tccatcatgtcgatg

SEQ ID NO: 612497 - DNA, 15 bp, Homo sapiens
ccatcatgtcgatga

SEQ ID NO: 612498 - DNA, 15 bp, Homo sapiens
catcatgtcgatgag

SEQ ID NO: 612499 - DNA, 15 bp, Homo sapiens
atcatgtcgatgagc

SEQ ID NO: 612500 - DNA, 15 bp, Homo sapiens
tcatgtcgatgagca

SEQ ID NO: 612501 - DNA, 15 bp, Homo sapiens
catgtcgatgagcat

SEQ ID NO: 612502 - DNA, 15 bp, Homo sapiens
atgtcgatgagcatc

SEQ ID NO: 612503 - DNA, 15 bp, Homo sapiens
tgtcgatgagcatct

SEQ ID NO: 612504 - DNA, 15 bp, Homo sapiens
gtcgatgagcatctt

SEQ ID NO: 612505 - DNA, 15 bp, Homo sapiens
tcgatgagcatcttc

SEQ ID NO: 612506 - DNA, 15 bp, Homo sapiens
cgatgagcatcttcc

SEQ ID NO: 612507 - DNA, 15 bp, Homo sapiens
gatgagcatcttcct

SEQ ID NO: 612508 - DNA, 15 bp, Homo sapiens
atgagcatcttcctc

SEQ ID NO: 612509 - DNA, 15 bp, Homo sapiens
tgagcatcttcctcc

SEQ ID NO: 612510 - DNA, 15 bp, Homo sapiens
gagcatcttcctcct

SEQ ID NO: 612511 - DNA, 15 bp, Homo sapiens
agcatcttcctcctg

SEQ ID NO: 612512 - DNA, 15 bp, Homo sapiens
gcatcttcctcctga

SEQ ID NO: 612513 - DNA, 15 bp, Homo sapiens
catcttcctcctgac

SEQ ID NO: 612514 - DNA, 15 bp, Homo sapiens
atcttcctcctgacg

SEQ ID NO: 612515 - DNA, 15 bp, Homo sapiens
tcttcctcctgacga

SEQ ID NO: 612516 - DNA, 15 bp, Homo sapiens
cttcctcctgacgat

SEQ ID NO: 612517 - DNA, 15 bp, Homo sapiens
ttcctcctgacgata

SEQ ID NO: 612518 - DNA, 15 bp, Homo sapiens
tcctcctgacgatat

SEQ ID NO: 612519 - DNA, 15 bp, Homo sapiens
cctcctgacgatatt

SEQ ID NO: 612520 - DNA, 15 bp, Homo sapiens
ctcctgacgatattc

SEQ ID NO: 612521 - DNA, 15 bp, Homo sapiens
tcctgacgatattca

SEQ ID NO: 612522 - DNA, 15 bp, Homo sapiens
cctgacgatattcat

SEQ ID NO: 612523 - DNA, 15 bp, Homo sapiens
ctgacgatattcatc

SEQ ID NO: 612524 - DNA, 15 bp, Homo sapiens
tgacgatattcatca

SEQ ID NO: 612525 - DNA, 15 bp, Homo sapiens
gacgatattcatcat

SEQ ID NO: 612526 - DNA, 15 bp, Homo sapiens
acgatattcatcatg

SEQ ID NO: 612527 - DNA, 15 bp, Homo sapiens
cgatattcatcatgg

SEQ ID NO: 612528 - DNA, 15 bp, Homo sapiens
gatattcatcatggt

SEQ ID NO: 612529 - DNA, 15 bp, Homo sapiens
atattcatcatggta

SEQ ID NO: 612530 - DNA, 15 bp, Homo sapiens
tattcatcatggtaa

SEQ ID NO: 612531 - DNA, 15 bp, Homo sapiens
attcatcatggtaag

SEQ ID NO: 612532 - DNA, 15 bp, Homo sapiens
ttcatcatggtaagc

SEQ ID NO: 612533 - DNA, 15 bp, Homo sapiens
tcatcatggtaagcc

SEQ ID NO: 612534 - DNA, 15 bp, Homo sapiens
catcatggtaagcca

SEQ ID NO: 612535 - DNA, 15 bp, Homo sapiens
atcatggtaagccaa

SEQ ID NO: 612536 - DNA, 15 bp, Homo sapiens
tcatggtaagccaaa

SEQ ID NO: 612537 - DNA, 15 bp, Homo sapiens
catggtaagccaaat

SEQ ID NO: 612538 - DNA, 15 bp, Homo sapiens
atggtaagccaaatg

SEQ ID NO: 612539 - DNA, 15 bp, Homo sapiens
tggtaagccaaatgg

SEQ ID NO: 612540 - DNA, 15 bp, Homo sapiens
ggtaagccaaatgga

SEQ ID NO: 612541 - DNA, 15 bp, Homo sapiens
gtaagccaaatggag

SEQ ID NO: 612542 - DNA, 15 bp, Homo sapiens
taagccaaatggaga

SEQ ID NO: 612543 - DNA, 15 bp, Homo sapiens
aagccaaatggagaa

SEQ ID NO: 612544 - DNA, 15 bp, Homo sapiens
agccaaatggagaag

SEQ ID NO: 612545 - DNA, 15 bp, Homo sapiens
gccaaatggagaagg

SEQ ID NO: 612546 - DNA, 15 bp, Homo sapiens
ccaaatggagaaggc

SEQ ID NO: 612547 - DNA, 15 bp, Homo sapiens
caaatggagaaggcc

SEQ ID NO: 612548 - DNA, 15 bp, Homo sapiens
aaatggagaaggccc

SEQ ID NO: 612549 - DNA, 15 bp, Homo sapiens
aatggagaaggccca

SEQ ID NO: 612550 - DNA, 15 bp, Homo sapiens
atggagaaggcccag

SEQ ID NO: 612551 - DNA, 15 bp, Homo sapiens
tggagaaggcccaga

SEQ ID NO: 612552 - DNA, 15 bp, Homo sapiens
ggagaaggcccagaa

SEQ ID NO: 612553 - DNA, 15 bp, Homo sapiens
gagaaggcccagaaa

SEQ ID NO: 612554 - DNA, 15 bp, Homo sapiens
agaaggcccagaaaa

SEQ ID NO: 612555 - DNA, 15 bp, Homo sapiens
gaaggcccagaaaat

SEQ ID NO: 612556 - DNA, 15 bp, Homo sapiens
aaggcccagaaaatc

SEQ ID NO: 612557 - DNA, 15 bp, Homo sapiens
aggcccagaaaatct

SEQ ID NO: 612558 - DNA, 15 bp, Homo sapiens
ggcccagaaaatctt

SEQ ID NO: 612559 - DNA, 15 bp, Homo sapiens
gcccagaaaatcttg

SEQ ID NO: 612560 - DNA, 15 bp, Homo sapiens
cccagaaaatcttga

SEQ ID NO: 612561 - DNA, 15 bp, Homo sapiens
ccagaaaatcttgaa

SEQ ID NO: 612562 - DNA, 15 bp, Homo sapiens
cagaaaatcttgaat

SEQ ID NO: 612563 - DNA, 15 bp, Homo sapiens
agaaaatcttgaata

SEQ ID NO: 612564 - DNA, 15 bp, Homo sapiens
gaaaatcttgaatac

SEQ ID NO: 612565 - DNA, 15 bp, Homo sapiens
aaaatcttgaatact

SEQ ID NO: 612566 - DNA, 15 bp, Homo sapiens
aaatcttgaatactt

SEQ ID NO: 612567 - DNA, 15 bp, Homo sapiens
aatcttgaatacttt

SEQ ID NO: 612568 - DNA, 15 bp, Homo sapiens
atcttgaatactttg

SEQ ID NO: 612569 - DNA, 15 bp, Homo sapiens
tcttgaatactttgg

SEQ ID NO: 612570 - DNA, 15 bp, Homo sapiens
cttgaatactttggt

SEQ ID NO: 612571 - DNA, 15 bp, Homo sapiens
ttgaatactttggtt

SEQ ID NO: 612572 - DNA, 15 bp, Homo sapiens
tgaatactttggttc

SEQ ID NO: 612573 - DNA, 15 bp, Homo sapiens
gaatactttggttcc

SEQ ID NO: 612574 - DNA, 15 bp, Homo sapiens
aatactttggttcct

SEQ ID NO: 612575 - DNA, 15 bp, Homo sapiens
atactttggttcctt

SEQ ID NO: 612576 - DNA, 15 bp, Homo sapiens
tactttggttccttt

SEQ ID NO: 612577 - DNA, 15 bp, Homo sapiens
actttggttcctttc

SEQ ID NO: 612578 - DNA, 15 bp, Homo sapiens
ctttggttcctttcc

SEQ ID NO: 612579 - DNA, 15 bp, Homo sapiens
tttggttcctttccc

SEQ ID NO: 612580 - DNA, 15 bp, Homo sapiens
ttggttcctttcccc

SEQ ID NO: 612581 - DNA, 15 bp, Homo sapiens
tggttcctttcccct

SEQ ID NO: 612582 - DNA, 15 bp, Homo sapiens
ggttcctttcccctt

SEQ ID NO: 612583 - DNA, 15 bp, Homo sapiens
gttcctttccccttt

SEQ ID NO: 612584 - DNA, 15 bp, Homo sapiens
ttcctttcccctttc

SEQ ID NO: 612585 - DNA, 15 bp, Homo sapiens
tcctttcccctttcc

SEQ ID NO: 612586 - DNA, 15 bp, Homo sapiens
cctttcccctttcct

SEQ ID NO: 612587 - DNA, 15 bp, Homo sapiens
ctttcccctttcctc

SEQ ID NO: 612588 - DNA, 15 bp, Homo sapiens
tttcccctttcctcc

SEQ ID NO: 612589 - DNA, 15 bp, Homo sapiens
ttcccctttcctcct

SEQ ID NO: 612590 - DNA, 15 bp, Homo sapiens
tcccctttcctcctg

SEQ ID NO: 612591 - DNA, 15 bp, Homo sapiens
cccctttcctcctgt

SEQ ID NO: 612592 - DNA, 15 bp, Homo sapiens
ccctttcctcctgtt

SEQ ID NO: 612593 - DNA, 15 bp, Homo sapiens
cctttcctcctgttc

SEQ ID NO: 612594 - DNA, 15 bp, Homo sapiens
ctttcctcctgttca

SEQ ID NO: 612595 - DNA, 15 bp, Homo sapiens
tttcctcctgttcat

SEQ ID NO: 612596 - DNA, 15 bp, Homo sapiens
ttcctcctgttcatg

SEQ ID NO: 612597 - DNA, 15 bp, Homo sapiens
tcctcctgttcatgt

SEQ ID NO: 612598 - DNA, 15 bp, Homo sapiens
cctcctgttcatgtg

SEQ ID NO: 612599 - DNA, 15 bp, Homo sapiens
ctcctgttcatgtgc

SEQ ID NO: 612600 - DNA, 15 bp, Homo sapiens
tcctgttcatgtgcc

SEQ ID NO: 612601 - DNA, 15 bp, Homo sapiens
cctgttcatgtgcct

SEQ ID NO: 612602 - DNA, 15 bp, Homo sapiens
ctgttcatgtgcctg

SEQ ID NO: 612603 - DNA, 15 bp, Homo sapiens
tgttcatgtgcctgg

SEQ ID NO: 612604 - DNA, 15 bp, Homo sapiens
gttcatgtgcctgga

SEQ ID NO: 612605 - DNA, 15 bp, Homo sapiens
ttcatgtgcctggat

SEQ ID NO: 612606 - DNA, 15 bp, Homo sapiens
tcatgtgcctggatt

SEQ ID NO: 612607 - DNA, 15 bp, Homo sapiens
catgtgcctggatta

SEQ ID NO: 612608 - DNA, 15 bp, Homo sapiens
atgtgcctggattag

SEQ ID NO: 612609 - DNA, 15 bp, Homo sapiens
tgtgcctggattagt

SEQ ID NO: 612610 - DNA, 15 bp, Homo sapiens
gtgcctggattagtc

SEQ ID NO: 612611 - DNA, 15 bp, Homo sapiens
tgcctggattagtca

SEQ ID NO: 612612 - DNA, 15 bp, Homo sapiens
gcctggattagtcat

SEQ ID NO: 612613 - DNA, 15 bp, Homo sapiens
cctggattagtcatg

SEQ ID NO: 612614 - DNA, 15 bp, Homo sapiens
ctggattagtcatgt

SEQ ID NO: 612615 - DNA, 15 bp, Homo sapiens
tggattagtcatgtg

SEQ ID NO: 612616 - DNA, 15 bp, Homo sapiens
ggattagtcatgtgg

SEQ ID NO: 612617 - DNA, 15 bp, Homo sapiens
gattagtcatgtggc

SEQ ID NO: 612618 - DNA, 15 bp, Homo sapiens
attagtcatgtggcc

SEQ ID NO: 612619 - DNA, 15 bp, Homo sapiens
ttagtcatgtggcca

SEQ ID NO: 612620 - DNA, 15 bp, Homo sapiens
tagtcatgtggccac

SEQ ID NO: 612621 - DNA, 15 bp, Homo sapiens
agtcatgtggccacc

SEQ ID NO: 612622 - DNA, 15 bp, Homo sapiens
gtcatgtggccacca

SEQ ID NO: 612623 - DNA, 15 bp, Homo sapiens
tcatgtggccaccaa

SEQ ID NO: 612624 - DNA, 15 bp, Homo sapiens
catgtggccaccaag

SEQ ID NO: 612625 - DNA, 15 bp, Homo sapiens
atgtggccaccaagg

SEQ ID NO: 612626 - DNA, 15 bp, Homo sapiens
tgtggccaccaagga

SEQ ID NO: 612627 - DNA, 15 bp, Homo sapiens
gtggccaccaaggag

SEQ ID NO: 612628 - DNA, 15 bp, Homo sapiens
tggccaccaaggaga

SEQ ID NO: 612629 - DNA, 15 bp, Homo sapiens
ggccaccaaggagag

SEQ ID NO: 612630 - DNA, 15 bp, Homo sapiens
gccaccaaggagagc

SEQ ID NO: 612631 - DNA, 15 bp, Homo sapiens
ccaccaaggagagcg

SEQ ID NO: 612632 - DNA, 15 bp, Homo sapiens
caccaaggagagcgt

SEQ ID NO: 612633 - DNA, 15 bp, Homo sapiens
accaaggagagcgtg

SEQ ID NO: 612634 - DNA, 15 bp, Homo sapiens
ccaaggagagcgtga

SEQ ID NO: 612635 - DNA, 15 bp, Homo sapiens
caaggagagcgtgac

SEQ ID NO: 612636 - DNA, 15 bp, Homo sapiens
aaggagagcgtgaca

SEQ ID NO: 612637 - DNA, 15 bp, Homo sapiens
aggagagcgtgacat

SEQ ID NO: 612638 - DNA, 15 bp, Homo sapiens
ggagagcgtgacatc

SEQ ID NO: 612639 - DNA, 15 bp, Homo sapiens
gagagcgtgacatct

SEQ ID NO: 612640 - DNA, 15 bp, Homo sapiens
agagcgtgacatcta

SEQ ID NO: 612641 - DNA, 15 bp, Homo sapiens
gagcgtgacatctag

SEQ ID NO: 612642 - DNA, 15 bp, Homo sapiens
agcgtgacatctagc

SEQ ID NO: 612643 - DNA, 15 bp, Homo sapiens
gcgtgacatctagct

SEQ ID NO: 612644 - DNA, 15 bp, Homo sapiens
cgtgacatctagctt

SEQ ID NO: 612645 - DNA, 15 bp, Homo sapiens
gtgacatctagcttc

SEQ ID NO: 612646 - DNA, 15 bp, Homo sapiens
tgacatctagcttcc

SEQ ID NO: 612647 - DNA, 15 bp, Homo sapiens
gacatctagcttccc

SEQ ID NO: 612648 - DNA, 15 bp, Homo sapiens
acatctagcttccca

SEQ ID NO: 612649 - DNA, 15 bp, Homo sapiens
catctagcttcccag

SEQ ID NO: 612650 - DNA, 15 bp, Homo sapiens
atctagcttcccagc

SEQ ID NO: 612651 - DNA, 15 bp, Homo sapiens
tctagcttcccagcc

SEQ ID NO: 612652 - DNA, 15 bp, Homo sapiens
ctagcttcccagccc

SEQ ID NO: 612653 - DNA, 15 bp, Homo sapiens
tagcttcccagccct

SEQ ID NO: 612654 - DNA, 15 bp, Homo sapiens
agcttcccagccctt

SEQ ID NO: 612655 - DNA, 15 bp, Homo sapiens
gcttcccagcccttc

SEQ ID NO: 612656 - DNA, 15 bp, Homo sapiens
cttcccagcccttcc

SEQ ID NO: 612657 - DNA, 15 bp, Homo sapiens
ttcccagcccttcct

SEQ ID NO: 612658 - DNA, 15 bp, Homo sapiens
tcccagcccttcctt

SEQ ID NO: 612659 - DNA, 15 bp, Homo sapiens
cccagcccttccttt

SEQ ID NO: 612660 - DNA, 15 bp, Homo sapiens
ccagcccttcctttt

SEQ ID NO: 612661 - DNA, 15 bp, Homo sapiens
cagcccttcctttta

SEQ ID NO: 612662 - DNA, 15 bp, Homo sapiens
agcccttccttttag

SEQ ID NO: 612663 - DNA, 15 bp, Homo sapiens
gcccttccttttagc

SEQ ID NO: 612664 - DNA, 15 bp, Homo sapiens
cccttccttttagcc

SEQ ID NO: 612665 - DNA, 15 bp, Homo sapiens
ccttccttttagcca

SEQ ID NO: 612666 - DNA, 15 bp, Homo sapiens
cttccttttagccaa

SEQ ID NO: 612667 - DNA, 15 bp, Homo sapiens
ttccttttagccaac

SEQ ID NO: 612668 - DNA, 15 bp, Homo sapiens
tccttttagccaacg

SEQ ID NO: 612669 - DNA, 15 bp, Homo sapiens
ccttttagccaacgt

SEQ ID NO: 612670 - DNA, 15 bp, Homo sapiens
cttttagccaacgtg

SEQ ID NO: 612671 - DNA, 15 bp, Homo sapiens
ttttagccaacgtgg

SEQ ID NO: 612672 - DNA, 15 bp, Homo sapiens
tttagccaacgtggg

SEQ ID NO: 612673 - DNA, 15 bp, Homo sapiens
ttagccaacgtggga

SEQ ID NO: 612674 - DNA, 15 bp, Homo sapiens
tagccaacgtgggag

SEQ ID NO: 612675 - DNA, 15 bp, Homo sapiens
agccaacgtgggaga

SEQ ID NO: 612676 - DNA, 15 bp, Homo sapiens
gccaacgtgggagac

SEQ ID NO: 612677 - DNA, 15 bp, Homo sapiens
ccaacgtgggagaca

SEQ ID NO: 612678 - DNA, 15 bp, Homo sapiens
caacgtgggagacac

SEQ ID NO: 612679 - DNA, 15 bp, Homo sapiens
aacgtgggagacact

SEQ ID NO: 612680 - DNA, 15 bp, Homo sapiens
acgtgggagacactc

SEQ ID NO: 612681 - DNA, 15 bp, Homo sapiens
cgtgggagacactca

SEQ ID NO: 612682 - DNA, 15 bp, Homo sapiens
gtgggagacactcaa

SEQ ID NO: 612683 - DNA, 15 bp, Homo sapiens
tgggagacactcaaa

SEQ ID NO: 612684 - DNA, 15 bp, Homo sapiens
gggagacactcaaag

SEQ ID NO: 612685 - DNA, 15 bp, Homo sapiens
ggagacactcaaaga

SEQ ID NO: 612686 - DNA, 15 bp, Homo sapiens
gagacactcaaagag

SEQ ID NO: 612687 - DNA, 15 bp, Homo sapiens
agacactcaaagaga

SEQ ID NO: 612688 - DNA, 15 bp, Homo sapiens
gacactcaaagagac

SEQ ID NO: 612689 - DNA, 15 bp, Homo sapiens
acactcaaagagacg

SEQ ID NO: 612690 - DNA, 15 bp, Homo sapiens
cactcaaagagacga

SEQ ID NO: 612691 - DNA, 15 bp, Homo sapiens
actcaaagagacgaa

SEQ ID NO: 612692 - DNA, 15 bp, Homo sapiens
ctcaaagagacgaaa

SEQ ID NO: 612693 - DNA, 15 bp, Homo sapiens
tcaaagagacgaaat

SEQ ID NO: 612694 - DNA, 15 bp, Homo sapiens
caaagagacgaaatc

SEQ ID NO: 612695 - DNA, 15 bp, Homo sapiens
aaagagacgaaatct

SEQ ID NO: 612696 - DNA, 15 bp, Homo sapiens
aagagacgaaatctc

SEQ ID NO: 612697 - DNA, 15 bp, Homo sapiens
agagacgaaatctcc

SEQ ID NO: 612698 - DNA, 15 bp, Homo sapiens
gagacgaaatctcct

SEQ ID NO: 612699 - DNA, 15 bp, Homo sapiens
agacgaaatctcctg

SEQ ID NO: 612700 - DNA, 15 bp, Homo sapiens
gacgaaatctcctga

SEQ ID NO: 612701 - DNA, 15 bp, Homo sapiens
acgaaatctcctgaa

SEQ ID NO: 612702 - DNA, 15 bp, Homo sapiens
cgaaatctcctgaag

SEQ ID NO: 612703 - DNA, 15 bp, Homo sapiens
gaaatctcctgaagg

SEQ ID NO: 612704 - DNA, 15 bp, Homo sapiens
aaatctcctgaagga

SEQ ID NO: 612705 - DNA, 15 bp, Homo sapiens
aatctcctgaaggag

SEQ ID NO: 612706 - DNA, 15 bp, Homo sapiens
atctcctgaaggagc

SEQ ID NO: 612707 - DNA, 15 bp, Homo sapiens
tctcctgaaggagcc

SEQ ID NO: 612708 - DNA, 15 bp, Homo sapiens
ctcctgaaggagcca

SEQ ID NO: 612709 - DNA, 15 bp, Homo sapiens
tcctgaaggagccac

SEQ ID NO: 612710 - DNA, 15 bp, Homo sapiens
cctgaaggagccact

SEQ ID NO: 612711 - DNA, 15 bp, Homo sapiens
ctgaaggagccactg

SEQ ID NO: 612712 - DNA, 15 bp, Homo sapiens
tgaaggagccactgt

SEQ ID NO: 612713 - DNA, 15 bp, Homo sapiens
gaaggagccactgta

SEQ ID NO: 612714 - DNA, 15 bp, Homo sapiens
aaggagccactgtat

SEQ ID NO: 612715 - DNA, 15 bp, Homo sapiens
aggagccactgtatc

SEQ ID NO: 612716 - DNA, 15 bp, Homo sapiens
ggagccactgtatca

SEQ ID NO: 612717 - DNA, 15 bp, Homo sapiens
gagccactgtatcac

SEQ ID NO: 612718 - DNA, 15 bp, Homo sapiens
agccactgtatcaca

SEQ ID NO: 612719 - DNA, 15 bp, Homo sapiens
gccactgtatcacag

SEQ ID NO: 612720 - DNA, 15 bp, Homo sapiens
ccactgtatcacagc

SEQ ID NO: 612721 - DNA, 15 bp, Homo sapiens
cactgtatcacagca

SEQ ID NO: 612722 - DNA, 15 bp, Homo sapiens
actgtatcacagcat

SEQ ID NO: 612723 - DNA, 15 bp, Homo sapiens
ctgtatcacagcatc

SEQ ID NO: 612724 - DNA, 15 bp, Homo sapiens
tgtatcacagcatcc

SEQ ID NO: 612725 - DNA, 15 bp, Homo sapiens
gtatcacagcatcct

SEQ ID NO: 612726 - DNA, 15 bp, Homo sapiens
tatcacagcatcctc

SEQ ID NO: 612727 - DNA, 15 bp, Homo sapiens
atcacagcatcctcc

SEQ ID NO: 612728 - DNA, 15 bp, Homo sapiens
tcacagcatcctccc

SEQ ID NO: 612729 - DNA, 15 bp, Homo sapiens
cacagcatcctccca

SEQ ID NO: 612730 - DNA, 15 bp, Homo sapiens
acagcatcctcccat

SEQ ID NO: 612731 - DNA, 15 bp, Homo sapiens
cagcatcctcccatc

SEQ ID NO: 612732 - DNA, 15 bp, Homo sapiens
agcatcctcccatct

SEQ ID NO: 612733 - DNA, 15 bp, Homo sapiens
gcatcctcccatctc

SEQ ID NO: 612734 - DNA, 15 bp, Homo sapiens
catcctcccatctcc

SEQ ID NO: 612735 - DNA, 15 bp, Homo sapiens
atcctcccatctccc

SEQ ID NO: 612736 - DNA, 15 bp, Homo sapiens
tcctcccatctccca

SEQ ID NO: 612737 - DNA, 15 bp, Homo sapiens
cctcccatctcccac

SEQ ID NO: 612738 - DNA, 15 bp, Homo sapiens
ctcccatctcccact

SEQ ID NO: 612739 - DNA, 15 bp, Homo sapiens
tcccatctcccactt

SEQ ID NO: 612740 - DNA, 15 bp, Homo sapiens
cccatctcccacttc

SEQ ID NO: 612741 - DNA, 15 bp, Homo sapiens
ccatctcccacttcc

SEQ ID NO: 612742 - DNA, 15 bp, Homo sapiens
catctcccacttcct

SEQ ID NO: 612743 - DNA, 15 bp, Homo sapiens
atctcccacttcctg

SEQ ID NO: 612744 - DNA, 15 bp, Homo sapiens
tctcccacttcctgc

SEQ ID NO: 612745 - DNA, 15 bp, Homo sapiens
ctcccacttcctgcc

SEQ ID NO: 612746 - DNA, 15 bp, Homo sapiens
tcccacttcctgccc

SEQ ID NO: 612747 - DNA, 15 bp, Homo sapiens
cccacttcctgccca

SEQ ID NO: 612748 - DNA, 15 bp, Homo sapiens
ccacttcctgcccag

SEQ ID NO: 612749 - DNA, 15 bp, Homo sapiens
cacttcctgcccagg

SEQ ID NO: 612750 - DNA, 15 bp, Homo sapiens
acttcctgcccaggg

SEQ ID NO: 612751 - DNA, 15 bp, Homo sapiens
cttcctgcccagggg

SEQ ID NO: 612752 - DNA, 15 bp, Homo sapiens
ttcctgcccaggggt

SEQ ID NO: 612753 - DNA, 15 bp, Homo sapiens
tcctgcccaggggtc

SEQ ID NO: 612754 - DNA, 15 bp, Homo sapiens
cctgcccaggggtcc

SEQ ID NO: 612755 - DNA, 15 bp, Homo sapiens
ctgcccaggggtcca

SEQ ID NO: 612756 - DNA, 15 bp, Homo sapiens
tgcccaggggtccat

SEQ ID NO: 612757 - DNA, 15 bp, Homo sapiens
gcccaggggtccatg

SEQ ID NO: 612758 - DNA, 15 bp, Homo sapiens
cccaggggtccatgg

SEQ ID NO: 612759 - DNA, 15 bp, Homo sapiens
ccaggggtccatggt

SEQ ID NO: 612760 - DNA, 15 bp, Homo sapiens
caggggtccatggtc

SEQ ID NO: 612761 - DNA, 15 bp, Homo sapiens
aggggtccatggtcc

SEQ ID NO: 612762 - DNA, 15 bp, Homo sapiens
ggggtccatggtcca

SEQ ID NO: 612763 - DNA, 15 bp, Homo sapiens
gggtccatggtccac

SEQ ID NO: 612764 - DNA, 15 bp, Homo sapiens
ggtccatggtccaca

SEQ ID NO: 612765 - DNA, 15 bp, Homo sapiens
gtccatggtccacac

SEQ ID NO: 612766 - DNA, 15 bp, Homo sapiens
tccatggtccacaca

SEQ ID NO: 612767 - DNA, 15 bp, Homo sapiens
ccatggtccacacag

SEQ ID NO: 612768 - DNA, 15 bp, Homo sapiens
catggtccacacaga

SEQ ID NO: 612769 - DNA, 15 bp, Homo sapiens
atggtccacacagac

SEQ ID NO: 612770 - DNA, 15 bp, Homo sapiens
tggtccacacagact

SEQ ID NO: 612771 - DNA, 15 bp, Homo sapiens
ggtccacacagactt

SEQ ID NO: 612772 - DNA, 15 bp, Homo sapiens
gtccacacagacttc

SEQ ID NO: 612773 - DNA, 15 bp, Homo sapiens
tccacacagacttcc

SEQ ID NO: 612774 - DNA, 15 bp, Homo sapiens
ccacacagacttccc

SEQ ID NO: 612775 - DNA, 15 bp, Homo sapiens
cacacagacttccca

SEQ ID NO: 612776 - DNA, 15 bp, Homo sapiens
acacagacttcccag

SEQ ID NO: 612777 - DNA, 15 bp, Homo sapiens
cacagacttcccagt

SEQ ID NO: 612778 - DNA, 15 bp, Homo sapiens
acagacttcccagtc

SEQ ID NO: 612779 - DNA, 15 bp, Homo sapiens
cagacttcccagtcc

SEQ ID NO: 612780 - DNA, 15 bp, Homo sapiens
agacttcccagtccc

SEQ ID NO: 612781 - DNA, 15 bp, Homo sapiens
gacttcccagtccca

SEQ ID NO: 612782 - DNA, 15 bp, Homo sapiens
acttcccagtcccat

SEQ ID NO: 612783 - DNA, 15 bp, Homo sapiens
cttcccagtcccatt

SEQ ID NO: 612784 - DNA, 15 bp, Homo sapiens
ttcccagtcccattc

SEQ ID NO: 612785 - DNA, 15 bp, Homo sapiens
tcccagtcccattcc

SEQ ID NO: 612786 - DNA, 15 bp, Homo sapiens
cccagtcccattccg

SEQ ID NO: 612787 - DNA, 15 bp, Homo sapiens
ccagtcccattccgt

SEQ ID NO: 612788 - DNA, 15 bp, Homo sapiens
cagtcccattccgtg

SEQ ID NO: 612789 - DNA, 15 bp, Homo sapiens
agtcccattccgtga

SEQ ID NO: 612790 - DNA, 15 bp, Homo sapiens
gtcccattccgtgac

SEQ ID NO: 612791 - DNA, 15 bp, Homo sapiens
tcccattccgtgacc

SEQ ID NO: 612792 - DNA, 15 bp, Homo sapiens
cccattccgtgacca

SEQ ID NO: 612793 - DNA, 15 bp, Homo sapiens
ccattccgtgaccat

SEQ ID NO: 612794 - DNA, 15 bp, Homo sapiens
cattccgtgaccatc

SEQ ID NO: 612795 - DNA, 15 bp, Homo sapiens
attccgtgaccatct

SEQ ID NO: 612796 - DNA, 15 bp, Homo sapiens
ttccgtgaccatctg

SEQ ID NO: 612797 - DNA, 15 bp, Homo sapiens
tccgtgaccatctgg

SEQ ID NO: 612798 - DNA, 15 bp, Homo sapiens
ccgtgaccatctgga

SEQ ID NO: 612799 - DNA, 15 bp, Homo sapiens
cgtgaccatctggag

SEQ ID NO: 612800 - DNA, 15 bp, Homo sapiens
gtgaccatctggaga

SEQ ID NO: 612801 - DNA, 15 bp, Homo sapiens
tgaccatctggagaa

SEQ ID NO: 612802 - DNA, 15 bp, Homo sapiens
gaccatctggagaag

SEQ ID NO: 612803 - DNA, 15 bp, Homo sapiens
accatctggagaagc

SEQ ID NO: 612804 - DNA, 15 bp, Homo sapiens
ccatctggagaagct

SEQ ID NO: 612805 - DNA, 15 bp, Homo sapiens
catctggagaagctg

SEQ ID NO: 612806 - DNA, 15 bp, Homo sapiens
atctggagaagctgc

SEQ ID NO: 612807 - DNA, 15 bp, Homo sapiens
tctggagaagctgct

SEQ ID NO: 612808 - DNA, 15 bp, Homo sapiens
ctggagaagctgcta

SEQ ID NO: 612809 - DNA, 15 bp, Homo sapiens
tggagaagctgctat

SEQ ID NO: 612810 - DNA, 15 bp, Homo sapiens
ggagaagctgctatt

SEQ ID NO: 612811 - DNA, 15 bp, Homo sapiens
gagaagctgctatta

SEQ ID NO: 612812 - DNA, 15 bp, Homo sapiens
agaagctgctattag

SEQ ID NO: 612813 - DNA, 15 bp, Homo sapiens
gaagctgctattagc

SEQ ID NO: 612814 - DNA, 15 bp, Homo sapiens
aagctgctattagca

SEQ ID NO: 612815 - DNA, 15 bp, Homo sapiens
agctgctattagcag

SEQ ID NO: 612816 - DNA, 15 bp, Homo sapiens
gctgctattagcaga

SEQ ID NO: 612817 - DNA, 15 bp, Homo sapiens
ctgctattagcagag

SEQ ID NO: 612818 - DNA, 15 bp, Homo sapiens
tgctattagcagagc

SEQ ID NO: 612819 - DNA, 15 bp, Homo sapiens
gctattagcagagcc

SEQ ID NO: 612820 - DNA, 15 bp, Homo sapiens
ctattagcagagccc

SEQ ID NO: 612821 - DNA, 15 bp, Homo sapiens
tattagcagagccct

SEQ ID NO: 612822 - DNA, 15 bp, Homo sapiens
attagcagagccctg

SEQ ID NO: 612823 - DNA, 15 bp, Homo sapiens
ttagcagagccctgc

SEQ ID NO: 612824 - DNA, 15 bp, Homo sapiens
tagcagagccctgca

SEQ ID NO: 612825 - DNA, 15 bp, Homo sapiens
agcagagccctgcac

SEQ ID NO: 612826 - DNA, 15 bp, Homo sapiens
gcagagccctgcaca

SEQ ID NO: 612827 - DNA, 15 bp, Homo sapiens
cagagccctgcacag

SEQ ID NO: 612828 - DNA, 15 bp, Homo sapiens
agagccctgcacagg

SEQ ID NO: 612829 - DNA, 15 bp, Homo sapiens
gagccctgcacaggg

SEQ ID NO: 612830 - DNA, 15 bp, Homo sapiens
agccctgcacagggt

SEQ ID NO: 612831 - DNA, 15 bp, Homo sapiens
gccctgcacagggtg

SEQ ID NO: 612832 - DNA, 15 bp, Homo sapiens
ccctgcacagggtga

SEQ ID NO: 612833 - DNA, 15 bp, Homo sapiens
cctgcacagggtgat

SEQ ID NO: 612834 - DNA, 15 bp, Homo sapiens
ctgcacagggtgata

SEQ ID NO: 612835 - DNA, 15 bp, Homo sapiens
tgcacagggtgatag

SEQ ID NO: 612836 - DNA, 15 bp, Homo sapiens
gcacagggtgatagt

SEQ ID NO: 612837 - DNA, 15 bp, Homo sapiens
cacagggtgatagtg

SEQ ID NO: 612838 - DNA, 15 bp, Homo sapiens
acagggtgatagtgt

SEQ ID NO: 612839 - DNA, 15 bp, Homo sapiens
cagggtgatagtgta

SEQ ID NO: 612840 - DNA, 15 bp, Homo sapiens
agggtgatagtgtaa

SEQ ID NO: 612841 - DNA, 15 bp, Homo sapiens
gggtgatagtgtaat

SEQ ID NO: 612842 - DNA, 15 bp, Homo sapiens
ggtgatagtgtaatt

SEQ ID NO: 612843 - DNA, 15 bp, Homo sapiens
gtgatagtgtaatta

SEQ ID NO: 612844 - DNA, 15 bp, Homo sapiens
tgatagtgtaattaa

SEQ ID NO: 612845 - DNA, 15 bp, Homo sapiens
gatagtgtaattaaa

SEQ ID NO: 612846 - DNA, 15 bp, Homo sapiens
atagtgtaattaaag

SEQ ID NO: 612847 - DNA, 15 bp, Homo sapiens
tagtgtaattaaagt

SEQ ID NO: 612848 - DNA, 15 bp, Homo sapiens
agtgtaattaaagtg

SEQ ID NO: 612849 - DNA, 15 bp, Homo sapiens
gtgtaattaaagtgg

SEQ ID NO: 612850 - DNA, 15 bp, Homo sapiens
tgtaattaaagtggt

SEQ ID NO: 612851 - DNA, 15 bp, Homo sapiens
gtaattaaagtggtc

SEQ ID NO: 612852 - DNA, 15 bp, Homo sapiens
taattaaagtggtct

SEQ ID NO: 612853 - DNA, 15 bp, Homo sapiens
aattaaagtggtctt

SEQ ID NO: 612854 - DNA, 15 bp, Homo sapiens
attaaagtggtcttc

SEQ ID NO: 612855 - DNA, 15 bp, Homo sapiens
ttaaagtggtcttct

SEQ ID NO: 612856 - DNA, 15 bp, Homo sapiens
taaagtggtcttctc

SEQ ID NO: 612857 - DNA, 15 bp, Homo sapiens
aaagtggtcttctct

SEQ ID NO: 612858 - DNA, 15 bp, Homo sapiens
aagtggtcttctctt

SEQ ID NO: 612859 - DNA, 15 bp, Homo sapiens
agtggtcttctcttt

SEQ ID NO: 612860 - DNA, 15 bp, Homo sapiens
gtggtcttctctttc

SEQ ID NO: 612861 - DNA, 15 bp, Homo sapiens
tggtcttctctttcc

SEQ ID NO: 612862 - DNA, 15 bp, Homo sapiens
ggtcttctctttcca

SEQ ID NO: 612863 - DNA, 15 bp, Homo sapiens
gtcttctctttccaa

SEQ ID NO: 612864 - DNA, 15 bp, Homo sapiens
tcttctctttccaaa

SEQ ID NO: 612865 - DNA, 15 bp, Homo sapiens
cttctctttccaaac

SEQ ID NO: 612866 - DNA, 15 bp, Homo sapiens
ttctctttccaaaca

SEQ ID NO: 612867 - DNA, 15 bp, Homo sapiens
tctctttccaaacac

SEQ ID NO: 612868 - DNA, 15 bp, Homo sapiens
ctctttccaaacaca

SEQ ID NO: 612869 - DNA, 15 bp, Homo sapiens
tctttccaaacacag

SEQ ID NO: 612870 - DNA, 15 bp, Homo sapiens
ctttccaaacacaga

SEQ ID NO: 612871 - DNA, 15 bp, Homo sapiens
tttccaaacacagaa

SEQ ID NO: 612872 - DNA, 15 bp, Homo sapiens
ttccaaacacagaaa

SEQ ID NO: 612873 - DNA, 15 bp, Homo sapiens
tccaaacacagaaaa

SEQ ID NO: 612874 - DNA, 15 bp, Homo sapiens
ccaaacacagaaaaa

SEQ ID NO: 612875 - DNA, 15 bp, Homo sapiens
caaacacagaaaaaa

SEQ ID NO: 612876 - DNA, 15 bp, Homo sapiens
aaacacagaaaaaat

SEQ ID NO: 612877 - DNA, 15 bp, Homo sapiens
aacacagaaaaaatc

SEQ ID NO: 612878 - DNA, 15 bp, Homo sapiens
acacagaaaaaatca

SEQ ID NO: 612879 - DNA, 15 bp, Homo sapiens
cacagaaaaaatcag

SEQ ID NO: 612880 - DNA, 15 bp, Homo sapiens
acagaaaaaatcagt

SEQ ID NO: 612881 - DNA, 15 bp, Homo sapiens
cagaaaaaatcagtt

SEQ ID NO: 612882 - DNA, 15 bp, Homo sapiens
agaaaaaatcagttc

SEQ ID NO: 612883 - DNA, 15 bp, Homo sapiens
gaaaaaatcagttca

SEQ ID NO: 612884 - DNA, 15 bp, Homo sapiens
aaaaaatcagttcag

SEQ ID NO: 612885 - DNA, 15 bp, Homo sapiens
aaaaatcagttcagg

SEQ ID NO: 612886 - DNA, 15 bp, Homo sapiens
aaaatcagttcaggg

SEQ ID NO: 612887 - DNA, 15 bp, Homo sapiens
aaatcagttcaggga

SEQ ID NO: 612888 - DNA, 15 bp, Homo sapiens
aatcagttcagggag

SEQ ID NO: 612889 - DNA, 15 bp, Homo sapiens
atcagttcagggagt

SEQ ID NO: 612890 - DNA, 15 bp, Homo sapiens
tcagttcagggagtg

SEQ ID NO: 612891 - DNA, 15 bp, Homo sapiens
cagttcagggagtgt

SEQ ID NO: 612892 - DNA, 15 bp, Homo sapiens
agttcagggagtgtt

SEQ ID NO: 612893 - DNA, 15 bp, Homo sapiens
gttcagggagtgttt

SEQ ID NO: 612894 - DNA, 15 bp, Homo sapiens
ttcagggagtgtttt

SEQ ID NO: 612895 - DNA, 15 bp, Homo sapiens
tcagggagtgttttc

SEQ ID NO: 612896 - DNA, 15 bp, Homo sapiens
cagggagtgttttcc

SEQ ID NO: 612897 - DNA, 15 bp, Homo sapiens
agggagtgttttcct

SEQ ID NO: 612898 - DNA, 15 bp, Homo sapiens
gggagtgttttcctg

SEQ ID NO: 612899 - DNA, 15 bp, Homo sapiens
ggagtgttttcctgg

SEQ ID NO: 612900 - DNA, 15 bp, Homo sapiens
gagtgttttcctggg

SEQ ID NO: 612901 - DNA, 15 bp, Homo sapiens
agtgttttcctgggc

SEQ ID NO: 612902 - DNA, 15 bp, Homo sapiens
gtgttttcctgggct

SEQ ID NO: 612903 - DNA, 15 bp, Homo sapiens
tgttttcctgggctt

SEQ ID NO: 612904 - DNA, 15 bp, Homo sapiens
gttttcctgggctta

SEQ ID NO: 612905 - DNA, 15 bp, Homo sapiens
ttttcctgggcttac

SEQ ID NO: 612906 - DNA, 15 bp, Homo sapiens
tttcctgggcttaca

SEQ ID NO: 612907 - DNA, 15 bp, Homo sapiens
ttcctgggcttacaa

SEQ ID NO: 612908 - DNA, 15 bp, Homo sapiens
tcctgggcttacaat

SEQ ID NO: 612909 - DNA, 15 bp, Homo sapiens
cctgggcttacaatt

SEQ ID NO: 612910 - DNA, 15 bp, Homo sapiens
ctgggcttacaattt

SEQ ID NO: 612911 - DNA, 15 bp, Homo sapiens
tgggcttacaatttt

SEQ ID NO: 612912 - DNA, 15 bp, Homo sapiens
gggcttacaatttta

SEQ ID NO: 612913 - DNA, 15 bp, Homo sapiens
ggcttacaattttaa

SEQ ID NO: 612914 - DNA, 15 bp, Homo sapiens
gcttacaattttaac

SEQ ID NO: 612915 - DNA, 15 bp, Homo sapiens
cttacaattttaact

SEQ ID NO: 612916 - DNA, 15 bp, Homo sapiens
ttacaattttaacta

SEQ ID NO: 612917 - DNA, 15 bp, Homo sapiens
tacaattttaactac

SEQ ID NO: 612918 - DNA, 15 bp, Homo sapiens
acaattttaactact

SEQ ID NO: 612919 - DNA, 15 bp, Homo sapiens
caattttaactactg

SEQ ID NO: 612920 - DNA, 15 bp, Homo sapiens
aattttaactactgg

SEQ ID NO: 612921 - DNA, 15 bp, Homo sapiens
attttaactactggc

SEQ ID NO: 612922 - DNA, 15 bp, Homo sapiens
ttttaactactggct

SEQ ID NO: 612923 - DNA, 15 bp, Homo sapiens
tttaactactggcta

SEQ ID NO: 612924 - DNA, 15 bp, Homo sapiens
ttaactactggctag

SEQ ID NO: 612925 - DNA, 15 bp, Homo sapiens
taactactggctaga

SEQ ID NO: 612926 - DNA, 15 bp, Homo sapiens
aactactggctagag

SEQ ID NO: 612927 - DNA, 15 bp, Homo sapiens
actactggctagagt

SEQ ID NO: 612928 - DNA, 15 bp, Homo sapiens
ctactggctagagtt

SEQ ID NO: 612929 - DNA, 15 bp, Homo sapiens
tactggctagagttg

SEQ ID NO: 612930 - DNA, 15 bp, Homo sapiens
actggctagagttga

SEQ ID NO: 612931 - DNA, 15 bp, Homo sapiens
ctggctagagttgaa

SEQ ID NO: 612932 - DNA, 15 bp, Homo sapiens
tggctagagttgaaa

SEQ ID NO: 612933 - DNA, 15 bp, Homo sapiens
ggctagagttgaaat

SEQ ID NO: 612934 - DNA, 15 bp, Homo sapiens
gctagagttgaaatg

SEQ ID NO: 612935 - DNA, 15 bp, Homo sapiens
ctagagttgaaatgg

SEQ ID NO: 612936 - DNA, 15 bp, Homo sapiens
tagagttgaaatggg

SEQ ID NO: 612937 - DNA, 15 bp, Homo sapiens
agagttgaaatgggg

SEQ ID NO: 612938 - DNA, 15 bp, Homo sapiens
gagttgaaatgggga

SEQ ID NO: 612939 - DNA, 15 bp, Homo sapiens
agttgaaatggggaa

SEQ ID NO: 612940 - DNA, 15 bp, Homo sapiens
gttgaaatggggaaa

SEQ ID NO: 612941 - DNA, 15 bp, Homo sapiens
ttgaaatggggaaag

SEQ ID NO: 612942 - DNA, 15 bp, Homo sapiens
tgaaatggggaaagc

SEQ ID NO: 612943 - DNA, 15 bp, Homo sapiens
gaaatggggaaagcc

SEQ ID NO: 612944 - DNA, 15 bp, Homo sapiens
aaatggggaaagcct

SEQ ID NO: 612945 - DNA, 15 bp, Homo sapiens
aatggggaaagcctt

SEQ ID NO: 612946 - DNA, 15 bp, Homo sapiens
atggggaaagccttt

SEQ ID NO: 612947 - DNA, 15 bp, Homo sapiens
tggggaaagcctttt

SEQ ID NO: 612948 - DNA, 15 bp, Homo sapiens
ggggaaagccttttg

SEQ ID NO: 612949 - DNA, 15 bp, Homo sapiens
gggaaagccttttgc

SEQ ID NO: 612950 - DNA, 15 bp, Homo sapiens
ggaaagccttttgcc

SEQ ID NO: 612951 - DNA, 15 bp, Homo sapiens
gaaagccttttgcct

SEQ ID NO: 612952 - DNA, 15 bp, Homo sapiens
aaagccttttgcctt

SEQ ID NO: 612953 - DNA, 15 bp, Homo sapiens
aagccttttgccttt

SEQ ID NO: 612954 - DNA, 15 bp, Homo sapiens
agccttttgcctttt

SEQ ID NO: 612955 - DNA, 15 bp, Homo sapiens
gccttttgccttttc

SEQ ID NO: 612956 - DNA, 15 bp, Homo sapiens
ccttttgccttttca

SEQ ID NO: 612957 - DNA, 15 bp, Homo sapiens
cttttgccttttcag

SEQ ID NO: 612958 - DNA, 15 bp, Homo sapiens
ttttgccttttcagt

SEQ ID NO: 612959 - DNA, 15 bp, Homo sapiens
tttgccttttcagta

SEQ ID NO: 612960 - DNA, 15 bp, Homo sapiens
ttgccttttcagtag

SEQ ID NO: 612961 - DNA, 15 bp, Homo sapiens
tgccttttcagtagc

SEQ ID NO: 612962 - DNA, 15 bp, Homo sapiens
gccttttcagtagca

SEQ ID NO: 612963 - DNA, 15 bp, Homo sapiens
ccttttcagtagcag

SEQ ID NO: 612964 - DNA, 15 bp, Homo sapiens
cttttcagtagcagt

SEQ ID NO: 612965 - DNA, 15 bp, Homo sapiens
ttttcagtagcagta

SEQ ID NO: 612966 - DNA, 15 bp, Homo sapiens
tttcagtagcagtag

SEQ ID NO: 612967 - DNA, 15 bp, Homo sapiens
ttcagtagcagtagg

SEQ ID NO: 612968 - DNA, 15 bp, Homo sapiens
tcagtagcagtaggg

SEQ ID NO: 612969 - DNA, 15 bp, Homo sapiens
cagtagcagtagggg

SEQ ID NO: 612970 - DNA, 15 bp, Homo sapiens
agtagcagtagggga

SEQ ID NO: 612971 - DNA, 15 bp, Homo sapiens
gtagcagtaggggag

SEQ ID NO: 612972 - DNA, 15 bp, Homo sapiens
tagcagtaggggagg

SEQ ID NO: 612973 - DNA, 15 bp, Homo sapiens
agcagtaggggagga

SEQ ID NO: 612974 - DNA, 15 bp, Homo sapiens
gcagtaggggaggag

SEQ ID NO: 612975 - DNA, 15 bp, Homo sapiens
cagtaggggaggaga

SEQ ID NO: 612976 - DNA, 15 bp, Homo sapiens
agtaggggaggagat

SEQ ID NO: 612977 - DNA, 15 bp, Homo sapiens
gtaggggaggagatc

SEQ ID NO: 612978 - DNA, 15 bp, Homo sapiens
taggggaggagatct

SEQ ID NO: 612979 - DNA, 15 bp, Homo sapiens
aggggaggagatctg

SEQ ID NO: 612980 - DNA, 15 bp, Homo sapiens
ggggaggagatctgg

SEQ ID NO: 612981 - DNA, 15 bp, Homo sapiens
gggaggagatctgga

SEQ ID NO: 612982 - DNA, 15 bp, Homo sapiens
ggaggagatctggat

SEQ ID NO: 612983 - DNA, 15 bp, Homo sapiens
gaggagatctggatt

SEQ ID NO: 612984 - DNA, 15 bp, Homo sapiens
aggagatctggatta

SEQ ID NO: 612985 - DNA, 15 bp, Homo sapiens
ggagatctggattat

SEQ ID NO: 612986 - DNA, 15 bp, Homo sapiens
gagatctggattatt

SEQ ID NO: 612987 - DNA, 15 bp, Homo sapiens
agatctggattattt

SEQ ID NO: 612988 - DNA, 15 bp, Homo sapiens
gatctggattattta

SEQ ID NO: 612989 - DNA, 15 bp, Homo sapiens
atctggattatttac

SEQ ID NO: 612990 - DNA, 15 bp, Homo sapiens
tctggattatttact

SEQ ID NO: 612991 - DNA, 15 bp, Homo sapiens
ctggattatttactt

SEQ ID NO: 612992 - DNA, 15 bp, Homo sapiens
tggattatttactta

SEQ ID NO: 612993 - DNA, 15 bp, Homo sapiens
ggattatttacttat

SEQ ID NO: 612994 - DNA, 15 bp, Homo sapiens
gattatttacttatc

SEQ ID NO: 612995 - DNA, 15 bp, Homo sapiens
attatttacttatca

SEQ ID NO: 612996 - DNA, 15 bp, Homo sapiens
ttatttacttatcat

SEQ ID NO: 612997 - DNA, 15 bp, Homo sapiens
tatttacttatcatc

SEQ ID NO: 612998 - DNA, 15 bp, Homo sapiens
atttacttatcatca

SEQ ID NO: 612999 - DNA, 15 bp, Homo sapiens
tttacttatcatcat

SEQ ID NO: 613000 - DNA, 15 bp, Homo sapiens
ttacttatcatcatc

SEQ ID NO: 613001 - DNA, 15 bp, Homo sapiens
tacttatcatcatca

SEQ ID NO: 613002 - DNA, 15 bp, Homo sapiens
acttatcatcatcat

SEQ ID NO: 613003 - DNA, 15 bp, Homo sapiens
cttatcatcatcatg

SEQ ID NO: 613004 - DNA, 15 bp, Homo sapiens
ttatcatcatcatgg

SEQ ID NO: 613005 - DNA, 15 bp, Homo sapiens
tatcatcatcatggt

SEQ ID NO: 613006 - DNA, 15 bp, Homo sapiens
atcatcatcatggtc

SEQ ID NO: 613007 - DNA, 15 bp, Homo sapiens
tcatcatcatggtca

SEQ ID NO: 613008 - DNA, 15 bp, Homo sapiens
catcatcatggtcac

SEQ ID NO: 613009 - DNA, 15 bp, Homo sapiens
atcatcatggtcacc

SEQ ID NO: 613010 - DNA, 15 bp, Homo sapiens
tcatcatggtcacct

SEQ ID NO: 613011 - DNA, 15 bp, Homo sapiens
catcatggtcacctc

SEQ ID NO: 613012 - DNA, 15 bp, Homo sapiens
atcatggtcacctcc

SEQ ID NO: 613013 - DNA, 15 bp, Homo sapiens
tcatggtcacctcct

SEQ ID NO: 613014 - DNA, 15 bp, Homo sapiens
catggtcacctccta

SEQ ID NO: 613015 - DNA, 15 bp, Homo sapiens
atggtcacctcctac

SEQ ID NO: 613016 - DNA, 15 bp, Homo sapiens
tggtcacctcctaca

SEQ ID NO: 613017 - DNA, 15 bp, Homo sapiens
ggtcacctcctacat

SEQ ID NO: 613018 - DNA, 15 bp, Homo sapiens
gtcacctcctacatg

SEQ ID NO: 613019 - DNA, 15 bp, Homo sapiens
tcacctcctacatgg

SEQ ID NO: 613020 - DNA, 15 bp, Homo sapiens
cacctcctacatggc

SEQ ID NO: 613021 - DNA, 15 bp, Homo sapiens
acctcctacatggct

SEQ ID NO: 613022 - DNA, 15 bp, Homo sapiens
cctcctacatggctt

SEQ ID NO: 613023 - DNA, 15 bp, Homo sapiens
ctcctacatggcttc

SEQ ID NO: 613024 - DNA, 15 bp, Homo sapiens
tcctacatggcttca

SEQ ID NO: 613025 - DNA, 15 bp, Homo sapiens
cctacatggcttcac

SEQ ID NO: 613026 - DNA, 15 bp, Homo sapiens
ctacatggcttcacc

SEQ ID NO: 613027 - DNA, 15 bp, Homo sapiens
tacatggcttcacca

SEQ ID NO: 613028 - DNA, 15 bp, Homo sapiens
acatggcttcaccaa

SEQ ID NO: 613029 - DNA, 15 bp, Homo sapiens
catggcttcaccaaa

SEQ ID NO: 613030 - DNA, 15 bp, Homo sapiens
atggcttcaccaaaa

SEQ ID NO: 613031 - DNA, 15 bp, Homo sapiens
tggcttcaccaaaaa

SEQ ID NO: 613032 - DNA, 15 bp, Homo sapiens
ggcttcaccaaaaaa

SEQ ID NO: 613033 - DNA, 15 bp, Homo sapiens
gcttcaccaaaaaac

SEQ ID NO: 613034 - DNA, 15 bp, Homo sapiens
cttcaccaaaaaaca

SEQ ID NO: 613035 - DNA, 15 bp, Homo sapiens
ttcaccaaaaaacat

SEQ ID NO: 613036 - DNA, 15 bp, Homo sapiens
tcaccaaaaaacatt

SEQ ID NO: 613037 - DNA, 15 bp, Homo sapiens
caccaaaaaacattc

SEQ ID NO: 613038 - DNA, 15 bp, Homo sapiens
accaaaaaacattct

SEQ ID NO: 613039 - DNA, 15 bp, Homo sapiens
ccaaaaaacattctg

SEQ ID NO: 613040 - DNA, 15 bp, Homo sapiens
caaaaaacattctgc

SEQ ID NO: 613041 - DNA, 15 bp, Homo sapiens
aaaaaacattctgct

SEQ ID NO: 613042 - DNA, 15 bp, Homo sapiens
aaaaacattctgctg

SEQ ID NO: 613043 - DNA, 15 bp, Homo sapiens
aaaacattctgctgc

SEQ ID NO: 613044 - DNA, 15 bp, Homo sapiens
aaacattctgctgcc

SEQ ID NO: 613045 - DNA, 15 bp, Homo sapiens
aacattctgctgcct

SEQ ID NO: 613046 - DNA, 15 bp, Homo sapiens
acattctgctgcctg

SEQ ID NO: 613047 - DNA, 15 bp, Homo sapiens
cattctgctgcctga

SEQ ID NO: 613048 - DNA, 15 bp, Homo sapiens
attctgctgcctgaa

SEQ ID NO: 613049 - DNA, 15 bp, Homo sapiens
ttctgctgcctgaaa

SEQ ID NO: 613050 - DNA, 15 bp, Homo sapiens
tctgctgcctgaaaa

SEQ ID NO: 613051 - DNA, 15 bp, Homo sapiens
ctgctgcctgaaaaa

SEQ ID NO: 613052 - DNA, 15 bp, Homo sapiens
tgctgcctgaaaaag

SEQ ID NO: 613053 - DNA, 15 bp, Homo sapiens
gctgcctgaaaaagc

SEQ ID NO: 613054 - DNA, 15 bp, Homo sapiens
ctgcctgaaaaagct

SEQ ID NO: 613055 - DNA, 15 bp, Homo sapiens
tgcctgaaaaagctc

SEQ ID NO: 613056 - DNA, 15 bp, Homo sapiens
gcctgaaaaagctcc

SEQ ID NO: 613057 - DNA, 15 bp, Homo sapiens
cctgaaaaagctcca

SEQ ID NO: 613058 - DNA, 15 bp, Homo sapiens
ctgaaaaagctccaa

SEQ ID NO: 613059 - DNA, 15 bp, Homo sapiens
tgaaaaagctccaac

SEQ ID NO: 613060 - DNA, 15 bp, Homo sapiens
gaaaaagctccaaca

SEQ ID NO: 613061 - DNA, 15 bp, Homo sapiens
aaaaagctccaacac

SEQ ID NO: 613062 - DNA, 15 bp, Homo sapiens
aaaagctccaacacc

SEQ ID NO: 613063 - DNA, 15 bp, Homo sapiens
aaagctccaacacct

SEQ ID NO: 613064 - DNA, 15 bp, Homo sapiens
aagctccaacacctc

SEQ ID NO: 613065 - DNA, 15 bp, Homo sapiens
agctccaacacctct

SEQ ID NO: 613066 - DNA, 15 bp, Homo sapiens
gctccaacacctctc

SEQ ID NO: 613067 - DNA, 15 bp, Homo sapiens
ctccaacacctctct

SEQ ID NO: 613068 - DNA, 15 bp, Homo sapiens
tccaacacctctctc

SEQ ID NO: 613069 - DNA, 15 bp, Homo sapiens
ccaacacctctctct

SEQ ID NO: 613070 - DNA, 15 bp, Homo sapiens
caacacctctctctc

SEQ ID NO: 613071 - DNA, 15 bp, Homo sapiens
aacacctctctctct

SEQ ID NO: 613072 - DNA, 15 bp, Homo sapiens
acacctctctctctt

SEQ ID NO: 613073 - DNA, 15 bp, Homo sapiens
cacctctctctcttt

SEQ ID NO: 613074 - DNA, 15 bp, Homo sapiens
acctctctctctttt

SEQ ID NO: 613075 - DNA, 15 bp, Homo sapiens
cctctctctctttta

SEQ ID NO: 613076 - DNA, 15 bp, Homo sapiens
ctctctctcttttaa

SEQ ID NO: 613077 - DNA, 15 bp, Homo sapiens
tctctctcttttaaa

SEQ ID NO: 613078 - DNA, 15 bp, Homo sapiens
ctctctcttttaaag

SEQ ID NO: 613079 - DNA, 15 bp, Homo sapiens
tctctcttttaaagg

SEQ ID NO: 613080 - DNA, 15 bp, Homo sapiens
ctctcttttaaagga

SEQ ID NO: 613081 - DNA, 15 bp, Homo sapiens
tctcttttaaaggat

SEQ ID NO: 613082 - DNA, 15 bp, Homo sapiens
ctcttttaaaggatg

SEQ ID NO: 613083 - DNA, 15 bp, Homo sapiens
tcttttaaaggatgg

SEQ ID NO: 613084 - DNA, 15 bp, Homo sapiens
cttttaaaggatgga

SEQ ID NO: 613085 - DNA, 15 bp, Homo sapiens
ttttaaaggatggaa

SEQ ID NO: 613086 - DNA, 15 bp, Homo sapiens
tttaaaggatggaat

SEQ ID NO: 613087 - DNA, 15 bp, Homo sapiens
ttaaaggatggaatt

SEQ ID NO: 613088 - DNA, 15 bp, Homo sapiens
taaaggatggaattt

SEQ ID NO: 613089 - DNA, 15 bp, Homo sapiens
aaaggatggaatttg

SEQ ID NO: 613090 - DNA, 15 bp, Homo sapiens
aaggatggaatttgg

SEQ ID NO: 613091 - DNA, 15 bp, Homo sapiens
aggatggaatttgga

SEQ ID NO: 613092 - DNA, 15 bp, Homo sapiens
ggatggaatttggag

SEQ ID NO: 613093 - DNA, 15 bp, Homo sapiens
gatggaatttggagt

SEQ ID NO: 613094 - DNA, 15 bp, Homo sapiens
atggaatttggagtc

SEQ ID NO: 613095 - DNA, 15 bp, Homo sapiens
tggaatttggagtcc

SEQ ID NO: 613096 - DNA, 15 bp, Homo sapiens
ggaatttggagtcca

SEQ ID NO: 613097 - DNA, 15 bp, Homo sapiens
gaatttggagtccat

SEQ ID NO: 613098 - DNA, 15 bp, Homo sapiens
aatttggagtccatc

SEQ ID NO: 613099 - DNA, 15 bp, Homo sapiens
atttggagtccatcc

SEQ ID NO: 613100 - DNA, 15 bp, Homo sapiens
tttggagtccatcct

SEQ ID NO: 613101 - DNA, 15 bp, Homo sapiens
ttggagtccatcctt

SEQ ID NO: 613102 - DNA, 15 bp, Homo sapiens
tggagtccatccttc

SEQ ID NO: 613103 - DNA, 15 bp, Homo sapiens
ggagtccatccttcc

SEQ ID NO: 613104 - DNA, 15 bp, Homo sapiens
gagtccatccttcct

SEQ ID NO: 613105 - DNA, 15 bp, Homo sapiens
agtccatccttcctc

SEQ ID NO: 613106 - DNA, 15 bp, Homo sapiens
gtccatccttcctca

SEQ ID NO: 613107 - DNA, 15 bp, Homo sapiens
tccatccttcctcag

SEQ ID NO: 613108 - DNA, 15 bp, Homo sapiens
ccatccttcctcagt

SEQ ID NO: 613109 - DNA, 15 bp, Homo sapiens
catccttcctcagtg

SEQ ID NO: 613110 - DNA, 15 bp, Homo sapiens
atccttcctcagtga

SEQ ID NO: 613111 - DNA, 15 bp, Homo sapiens
tccttcctcagtgat

SEQ ID NO: 613112 - DNA, 15 bp, Homo sapiens
ccttcctcagtgata

SEQ ID NO: 613113 - DNA, 15 bp, Homo sapiens
cttcctcagtgataa

SEQ ID NO: 613114 - DNA, 15 bp, Homo sapiens
ttcctcagtgataag

SEQ ID NO: 613115 - DNA, 15 bp, Homo sapiens
tcctcagtgataagg

SEQ ID NO: 613116 - DNA, 15 bp, Homo sapiens
cctcagtgataagga

SEQ ID NO: 613117 - DNA, 15 bp, Homo sapiens
ctcagtgataaggag

SEQ ID NO: 613118 - DNA, 15 bp, Homo sapiens
tcagtgataaggagt

SEQ ID NO: 613119 - DNA, 15 bp, Homo sapiens
cagtgataaggagtt

SEQ ID NO: 613120 - DNA, 15 bp, Homo sapiens
agtgataaggagttt

SEQ ID NO: 613121 - DNA, 15 bp, Homo sapiens
gtgataaggagtttt

SEQ ID NO: 613122 - DNA, 15 bp, Homo sapiens
tgataaggagttttt

SEQ ID NO: 613123 - DNA, 15 bp, Homo sapiens
gataaggagttttta

SEQ ID NO: 613124 - DNA, 15 bp, Homo sapiens
ataaggagtttttat

SEQ ID NO: 613125 - DNA, 15 bp, Homo sapiens
taaggagtttttata

SEQ ID NO: 613126 - DNA, 15 bp, Homo sapiens
aaggagtttttatag

SEQ ID NO: 613127 - DNA, 15 bp, Homo sapiens
aggagtttttatagc

SEQ ID NO: 613128 - DNA, 15 bp, Homo sapiens
ggagtttttatagcc

SEQ ID NO: 613129 - DNA, 15 bp, Homo sapiens
gagtttttatagcca

SEQ ID NO: 613130 - DNA, 15 bp, Homo sapiens
agtttttatagccac

SEQ ID NO: 613131 - DNA, 15 bp, Homo sapiens
gtttttatagccaca

SEQ ID NO: 613132 - DNA, 15 bp, Homo sapiens
tttttatagccacag

SEQ ID NO: 613133 - DNA, 15 bp, Homo sapiens
ttttatagccacagg

SEQ ID NO: 613134 - DNA, 15 bp, Homo sapiens
tttatagccacaggc

SEQ ID NO: 613135 - DNA, 15 bp, Homo sapiens
ttatagccacaggca

SEQ ID NO: 613136 - DNA, 15 bp, Homo sapiens
tatagccacaggcag

SEQ ID NO: 613137 - DNA, 15 bp, Homo sapiens
atagccacaggcagc

SEQ ID NO: 613138 - DNA, 15 bp, Homo sapiens
tagccacaggcagca

SEQ ID NO: 613139 - DNA, 15 bp, Homo sapiens
agccacaggcagcat

SEQ ID NO: 613140 - DNA, 15 bp, Homo sapiens
gccacaggcagcatc

SEQ ID NO: 613141 - DNA, 15 bp, Homo sapiens
ccacaggcagcatct

SEQ ID NO: 613142 - DNA, 15 bp, Homo sapiens
cacaggcagcatcta

SEQ ID NO: 613143 - DNA, 15 bp, Homo sapiens
acaggcagcatctat

SEQ ID NO: 613144 - DNA, 15 bp, Homo sapiens
caggcagcatctatt

SEQ ID NO: 613145 - DNA, 15 bp, Homo sapiens
aggcagcatctattg

SEQ ID NO: 613146 - DNA, 15 bp, Homo sapiens
ggcagcatctattgg

SEQ ID NO: 613147 - DNA, 15 bp, Homo sapiens
gcagcatctattggt

SEQ ID NO: 613148 - DNA, 15 bp, Homo sapiens
cagcatctattggtc

SEQ ID NO: 613149 - DNA, 15 bp, Homo sapiens
agcatctattggtct

SEQ ID NO: 613150 - DNA, 15 bp, Homo sapiens
gcatctattggtctg

SEQ ID NO: 613151 - DNA, 15 bp, Homo sapiens
catctattggtctgt

SEQ ID NO: 613152 - DNA, 15 bp, Homo sapiens
atctattggtctgtc

SEQ ID NO: 613153 - DNA, 15 bp, Homo sapiens
tctattggtctgtcc

SEQ ID NO: 613154 - DNA, 15 bp, Homo sapiens
ctattggtctgtcct

SEQ ID NO: 613155 - DNA, 15 bp, Homo sapiens
tattggtctgtcctc

SEQ ID NO: 613156 - DNA, 15 bp, Homo sapiens
attggtctgtcctct

SEQ ID NO: 613157 - DNA, 15 bp, Homo sapiens
ttggtctgtcctctg

SEQ ID NO: 613158 - DNA, 15 bp, Homo sapiens
tggtctgtcctctgc

SEQ ID NO: 613159 - DNA, 15 bp, Homo sapiens
ggtctgtcctctgca

SEQ ID NO: 613160 - DNA, 15 bp, Homo sapiens
gtctgtcctctgcaa

SEQ ID NO: 613161 - DNA, 15 bp, Homo sapiens
tctgtcctctgcaaa

SEQ ID NO: 613162 - DNA, 15 bp, Homo sapiens
ctgtcctctgcaaac

SEQ ID NO: 613163 - DNA, 15 bp, Homo sapiens
tgtcctctgcaaact

SEQ ID NO: 613164 - DNA, 15 bp, Homo sapiens
gtcctctgcaaactt

SEQ ID NO: 613165 - DNA, 15 bp, Homo sapiens
tcctctgcaaacttg

SEQ ID NO: 613166 - DNA, 15 bp, Homo sapiens
cctctgcaaacttgc

SEQ ID NO: 613167 - DNA, 15 bp, Homo sapiens
ctctgcaaacttgca

SEQ ID NO: 613168 - DNA, 15 bp, Homo sapiens
tctgcaaacttgcaa

SEQ ID NO: 613169 - DNA, 15 bp, Homo sapiens
ctgcaaacttgcaac

SEQ ID NO: 613170 - DNA, 15 bp, Homo sapiens
tgcaaacttgcaact

SEQ ID NO: 613171 - DNA, 15 bp, Homo sapiens
gcaaacttgcaactc

SEQ ID NO: 613172 - DNA, 15 bp, Homo sapiens
caaacttgcaactcc

SEQ ID NO: 613173 - DNA, 15 bp, Homo sapiens
aaacttgcaactcct

SEQ ID NO: 613174 - DNA, 15 bp, Homo sapiens
aacttgcaactcctc

SEQ ID NO: 613175 - DNA, 15 bp, Homo sapiens
acttgcaactcctct

SEQ ID NO: 613176 - DNA, 15 bp, Homo sapiens
cttgcaactcctctg

SEQ ID NO: 613177 - DNA, 15 bp, Homo sapiens
ttgcaactcctctga

SEQ ID NO: 613178 - DNA, 15 bp, Homo sapiens
tgcaactcctctgag

SEQ ID NO: 613179 - DNA, 15 bp, Homo sapiens
gcaactcctctgaga

SEQ ID NO: 613180 - DNA, 15 bp, Homo sapiens
caactcctctgagag

SEQ ID NO: 613181 - DNA, 15 bp, Homo sapiens
aactcctctgagagc

SEQ ID NO: 613182 - DNA, 15 bp, Homo sapiens
actcctctgagagct

SEQ ID NO: 613183 - DNA, 15 bp, Homo sapiens
ctcctctgagagcta

SEQ ID NO: 613184 - DNA, 15 bp, Homo sapiens
tcctctgagagctag

SEQ ID NO: 613185 - DNA, 15 bp, Homo sapiens
cctctgagagctaga

SEQ ID NO: 613186 - DNA, 15 bp, Homo sapiens
ctctgagagctagac

SEQ ID NO: 613187 - DNA, 15 bp, Homo sapiens
tctgagagctagact

SEQ ID NO: 613188 - DNA, 15 bp, Homo sapiens
ctgagagctagactt

SEQ ID NO: 613189 - DNA, 15 bp, Homo sapiens
tgagagctagacttg

SEQ ID NO: 613190 - DNA, 15 bp, Homo sapiens
gagagctagacttgg

SEQ ID NO: 613191 - DNA, 15 bp, Homo sapiens
agagctagacttgga

SEQ ID NO: 613192 - DNA, 15 bp, Homo sapiens
gagctagacttggaa

SEQ ID NO: 613193 - DNA, 15 bp, Homo sapiens
agctagacttggaaa

SEQ ID NO: 613194 - DNA, 15 bp, Homo sapiens
gctagacttggaaat

SEQ ID NO: 613195 - DNA, 15 bp, Homo sapiens
ctagacttggaaatg

SEQ ID NO: 613196 - DNA, 15 bp, Homo sapiens
tagacttggaaatga

SEQ ID NO: 613197 - DNA, 15 bp, Homo sapiens
agacttggaaatgaa

SEQ ID NO: 613198 - DNA, 15 bp, Homo sapiens
gacttggaaatgaaa

SEQ ID NO: 613199 - DNA, 15 bp, Homo sapiens
acttggaaatgaaac

SEQ ID NO: 613200 - DNA, 15 bp, Homo sapiens
cttggaaatgaaaca

SEQ ID NO: 613201 - DNA, 15 bp, Homo sapiens
ttggaaatgaaacat

SEQ ID NO: 613202 - DNA, 15 bp, Homo sapiens
tggaaatgaaacatt

SEQ ID NO: 613203 - DNA, 15 bp, Homo sapiens
ggaaatgaaacatta

SEQ ID NO: 613204 - DNA, 15 bp, Homo sapiens
gaaatgaaacattat

SEQ ID NO: 613205 - DNA, 15 bp, Homo sapiens
aaatgaaacattatt

SEQ ID NO: 613206 - DNA, 15 bp, Homo sapiens
aatgaaacattattt

SEQ ID NO: 613207 - DNA, 15 bp, Homo sapiens
atgaaacattatttt

SEQ ID NO: 613208 - DNA, 15 bp, Homo sapiens
tgaaacattattttg

SEQ ID NO: 613209 - DNA, 15 bp, Homo sapiens
gaaacattattttgc

SEQ ID NO: 613210 - DNA, 15 bp, Homo sapiens
aaacattattttgca

SEQ ID NO: 613211 - DNA, 15 bp, Homo sapiens
aacattattttgcaa

SEQ ID NO: 613212 - DNA, 15 bp, Homo sapiens
acattattttgcaat

SEQ ID NO: 613213 - DNA, 15 bp, Homo sapiens
cattattttgcaatg

SEQ ID NO: 613214 - DNA, 15 bp, Homo sapiens
attattttgcaatgc

SEQ ID NO: 613215 - DNA, 15 bp, Homo sapiens
ttattttgcaatgcg

SEQ ID NO: 613216 - DNA, 15 bp, Homo sapiens
tattttgcaatgcgc

SEQ ID NO: 613217 - DNA, 15 bp, Homo sapiens
attttgcaatgcgct

SEQ ID NO: 613218 - DNA, 15 bp, Homo sapiens
ttttgcaatgcgctg

SEQ ID NO: 613219 - DNA, 15 bp, Homo sapiens
tttgcaatgcgctgc

SEQ ID NO: 613220 - DNA, 15 bp, Homo sapiens
ttgcaatgcgctgct

SEQ ID NO: 613221 - DNA, 15 bp, Homo sapiens
tgcaatgcgctgcta

SEQ ID NO: 613222 - DNA, 15 bp, Homo sapiens
gcaatgcgctgctat

SEQ ID NO: 613223 - DNA, 15 bp, Homo sapiens
caatgcgctgctatc

SEQ ID NO: 613224 - DNA, 15 bp, Homo sapiens
aatgcgctgctatcc

SEQ ID NO: 613225 - DNA, 15 bp, Homo sapiens
atgcgctgctatcct

SEQ ID NO: 613226 - DNA, 15 bp, Homo sapiens
tgcgctgctatcctt

SEQ ID NO: 613227 - DNA, 15 bp, Homo sapiens
gcgctgctatccttc

SEQ ID NO: 613228 - DNA, 15 bp, Homo sapiens
cgctgctatccttca

SEQ ID NO: 613229 - DNA, 15 bp, Homo sapiens
gctgctatccttcat

SEQ ID NO: 613230 - DNA, 15 bp, Homo sapiens
ctgctatccttcatt

SEQ ID NO: 613231 - DNA, 15 bp, Homo sapiens
tgctatccttcattt

SEQ ID NO: 613232 - DNA, 15 bp, Homo sapiens
gctatccttcatttt

SEQ ID NO: 613233 - DNA, 15 bp, Homo sapiens
ctatccttcattttt

SEQ ID NO: 613234 - DNA, 15 bp, Homo sapiens
tatccttcattttta

SEQ ID NO: 613235 - DNA, 15 bp, Homo sapiens
atccttcatttttag

SEQ ID NO: 613236 - DNA, 15 bp, Homo sapiens
tccttcatttttagc

SEQ ID NO: 613237 - DNA, 15 bp, Homo sapiens
ccttcatttttagct

SEQ ID NO: 613238 - DNA, 15 bp, Homo sapiens
cttcatttttagctc

SEQ ID NO: 613239 - DNA, 15 bp, Homo sapiens
ttcatttttagctcc

SEQ ID NO: 613240 - DNA, 15 bp, Homo sapiens
tcatttttagctcct

SEQ ID NO: 613241 - DNA, 15 bp, Homo sapiens
catttttagctcctc

SEQ ID NO: 613242 - DNA, 15 bp, Homo sapiens
atttttagctcctcc

SEQ ID NO: 613243 - DNA, 15 bp, Homo sapiens
tttttagctcctcca

SEQ ID NO: 613244 - DNA, 15 bp, Homo sapiens
ttttagctcctccac

SEQ ID NO: 613245 - DNA, 15 bp, Homo sapiens
tttagctcctccacc

SEQ ID NO: 613246 - DNA, 15 bp, Homo sapiens
ttagctcctccaccg

SEQ ID NO: 613247 - DNA, 15 bp, Homo sapiens
tagctcctccaccgt

SEQ ID NO: 613248 - DNA, 15 bp, Homo sapiens
agctcctccaccgta

SEQ ID NO: 613249 - DNA, 15 bp, Homo sapiens
gctcctccaccgtag

SEQ ID NO: 613250 - DNA, 15 bp, Homo sapiens
ctcctccaccgtaga

SEQ ID NO: 613251 - DNA, 15 bp, Homo sapiens
tcctccaccgtagat

SEQ ID NO: 613252 - DNA, 15 bp, Homo sapiens
cctccaccgtagatg

SEQ ID NO: 613253 - DNA, 15 bp, Homo sapiens
ctccaccgtagatga

SEQ ID NO: 613254 - DNA, 15 bp, Homo sapiens
tccaccgtagatgat

SEQ ID NO: 613255 - DNA, 15 bp, Homo sapiens
ccaccgtagatgata

SEQ ID NO: 613256 - DNA, 15 bp, Homo sapiens
caccgtagatgatag

SEQ ID NO: 613257 - DNA, 15 bp, Homo sapiens
accgtagatgatagt

SEQ ID NO: 613258 - DNA, 15 bp, Homo sapiens
ccgtagatgatagtt

SEQ ID NO: 613259 - DNA, 15 bp, Homo sapiens
cgtagatgatagttt

SEQ ID NO: 613260 - DNA, 15 bp, Homo sapiens
gtagatgatagtttg

SEQ ID NO: 613261 - DNA, 15 bp, Homo sapiens
tagatgatagtttgt

SEQ ID NO: 613262 - DNA, 15 bp, Homo sapiens
agatgatagtttgta

SEQ ID NO: 613263 - DNA, 15 bp, Homo sapiens
gatgatagtttgtac

SEQ ID NO: 613264 - DNA, 15 bp, Homo sapiens
atgatagtttgtact

SEQ ID NO: 613265 - DNA, 15 bp, Homo sapiens
tgatagtttgtactt

SEQ ID NO: 613266 - DNA, 15 bp, Homo sapiens
gatagtttgtacttg

SEQ ID NO: 613267 - DNA, 15 bp, Homo sapiens
atagtttgtacttgt

SEQ ID NO: 613268 - DNA, 15 bp, Homo sapiens
tagtttgtacttgtt

SEQ ID NO: 613269 - DNA, 15 bp, Homo sapiens
agtttgtacttgtta

SEQ ID NO: 613270 - DNA, 15 bp, Homo sapiens
gtttgtacttgttaa

SEQ ID NO: 613271 - DNA, 15 bp, Homo sapiens
tttgtacttgttaaa

SEQ ID NO: 613272 - DNA, 15 bp, Homo sapiens
ttgtacttgttaaat

SEQ ID NO: 613273 - DNA, 15 bp, Homo sapiens
tgtacttgttaaatg

SEQ ID NO: 613274 - DNA, 15 bp, Homo sapiens
gtacttgttaaatga

SEQ ID NO: 613275 - DNA, 15 bp, Homo sapiens
tacttgttaaatgat

SEQ ID NO: 613276 - DNA, 15 bp, Homo sapiens
acttgttaaatgata

SEQ ID NO: 613277 - DNA, 15 bp, Homo sapiens
cttgttaaatgataa

SEQ ID NO: 613278 - DNA, 15 bp, Homo sapiens
ttgttaaatgataag

SEQ ID NO: 613279 - DNA, 15 bp, Homo sapiens
tgttaaatgataagg

SEQ ID NO: 613280 - DNA, 15 bp, Homo sapiens
gttaaatgataagga

SEQ ID NO: 613281 - DNA, 15 bp, Homo sapiens
ttaaatgataaggat

SEQ ID NO: 613282 - DNA, 15 bp, Homo sapiens
taaatgataaggata

SEQ ID NO: 613283 - DNA, 15 bp, Homo sapiens
aaatgataaggatat

SEQ ID NO: 613284 - DNA, 15 bp, Homo sapiens
aatgataaggatata

SEQ ID NO: 613285 - DNA, 15 bp, Homo sapiens
atgataaggatataa

SEQ ID NO: 613286 - DNA, 15 bp, Homo sapiens
tgataaggatataaa

SEQ ID NO: 613287 - DNA, 15 bp, Homo sapiens
gataaggatataaat

SEQ ID NO: 613288 - DNA, 15 bp, Homo sapiens
ataaggatataaatt

SEQ ID NO: 613289 - DNA, 15 bp, Homo sapiens
taaggatataaattt

SEQ ID NO: 613290 - DNA, 15 bp, Homo sapiens
aaggatataaattta

SEQ ID NO: 613291 - DNA, 15 bp, Homo sapiens
aggatataaatttag

SEQ ID NO: 613292 - DNA, 15 bp, Homo sapiens
ggatataaatttagg

SEQ ID NO: 613293 - DNA, 15 bp, Homo sapiens
gatataaatttaggt

SEQ ID NO: 613294 - DNA, 15 bp, Homo sapiens
atataaatttaggtc

SEQ ID NO: 613295 - DNA, 15 bp, Homo sapiens
tataaatttaggtca

SEQ ID NO: 613296 - DNA, 15 bp, Homo sapiens
ataaatttaggtcat

SEQ ID NO: 613297 - DNA, 15 bp, Homo sapiens
taaatttaggtcatt

SEQ ID NO: 613298 - DNA, 15 bp, Homo sapiens
aaatttaggtcattt

SEQ ID NO: 613299 - DNA, 15 bp, Homo sapiens
aatttaggtcatttt

SEQ ID NO: 613300 - DNA, 15 bp, Homo sapiens
atttaggtcattttt

SEQ ID NO: 613301 - DNA, 15 bp, Homo sapiens
tttaggtcatttttt

SEQ ID NO: 613302 - DNA, 15 bp, Homo sapiens
ttaggtcatttttta

SEQ ID NO: 613303 - DNA, 15 bp, Homo sapiens
taggtcattttttat

SEQ ID NO: 613304 - DNA, 15 bp, Homo sapiens
aggtcattttttata

SEQ ID NO: 613305 - DNA, 15 bp, Homo sapiens
ggtcattttttatat

SEQ ID NO: 613306 - DNA, 15 bp, Homo sapiens
gtcattttttatatt

SEQ ID NO: 613307 - DNA, 15 bp, Homo sapiens
tcattttttatattt

SEQ ID NO: 613308 - DNA, 15 bp, Homo sapiens
cattttttatatttt

SEQ ID NO: 613309 - DNA, 15 bp, Homo sapiens
attttttatatttta

SEQ ID NO: 613310 - DNA, 15 bp, Homo sapiens
ttttttatattttat

SEQ ID NO: 613311 - DNA, 15 bp, Homo sapiens
tttttatattttatt

SEQ ID NO: 613312 - DNA, 15 bp, Homo sapiens
ttttatattttattg

SEQ ID NO: 613313 - DNA, 15 bp, Homo sapiens
tttatattttattgg

SEQ ID NO: 613314 - DNA, 15 bp, Homo sapiens
ttatattttattggg

SEQ ID NO: 613315 - DNA, 15 bp, Homo sapiens
tatattttattgggt

SEQ ID NO: 613316 - DNA, 15 bp, Homo sapiens
atattttattgggtg

SEQ ID NO: 613317 - DNA, 15 bp, Homo sapiens
tattttattgggtgg

SEQ ID NO: 613318 - DNA, 15 bp, Homo sapiens
attttattgggtgga

SEQ ID NO: 613319 - DNA, 15 bp, Homo sapiens
ttttattgggtggaa

SEQ ID NO: 613320 - DNA, 15 bp, Homo sapiens
tttattgggtggaat

SEQ ID NO: 613321 - DNA, 15 bp, Homo sapiens
ttattgggtggaatt

SEQ ID NO: 613322 - DNA, 15 bp, Homo sapiens
tattgggtggaattt

SEQ ID NO: 613323 - DNA, 15 bp, Homo sapiens
attgggtggaatttg

SEQ ID NO: 613324 - DNA, 15 bp, Homo sapiens
ttgggtggaatttgg

SEQ ID NO: 613325 - DNA, 15 bp, Homo sapiens
tgggtggaatttggt

SEQ ID NO: 613326 - DNA, 15 bp, Homo sapiens
gggtggaatttggta

SEQ ID NO: 613327 - DNA, 15 bp, Homo sapiens
ggtggaatttggtat

SEQ ID NO: 613328 - DNA, 15 bp, Homo sapiens
gtggaatttggtata

SEQ ID NO: 613329 - DNA, 15 bp, Homo sapiens
tggaatttggtataa

SEQ ID NO: 613330 - DNA, 15 bp, Homo sapiens
ggaatttggtataat

SEQ ID NO: 613331 - DNA, 15 bp, Homo sapiens
gaatttggtataatt

SEQ ID NO: 613332 - DNA, 15 bp, Homo sapiens
aatttggtataattt

SEQ ID NO: 613333 - DNA, 15 bp, Homo sapiens
atttggtataatttt

SEQ ID NO: 613334 - DNA, 15 bp, Homo sapiens
tttggtataattttt

SEQ ID NO: 613335 - DNA, 15 bp, Homo sapiens
ttggtataattttta

SEQ ID NO: 613336 - DNA, 15 bp, Homo sapiens
tggtataatttttag

SEQ ID NO: 613337 - DNA, 15 bp, Homo sapiens
ggtataatttttaga

SEQ ID NO: 613338 - DNA, 15 bp, Homo sapiens
gtataatttttagac

SEQ ID NO: 613339 - DNA, 15 bp, Homo sapiens
tataatttttagact

SEQ ID NO: 613340 - DNA, 15 bp, Homo sapiens
ataatttttagactt

SEQ ID NO: 613341 - DNA, 15 bp, Homo sapiens
taatttttagacttc

SEQ ID NO: 613342 - DNA, 15 bp, Homo sapiens
aatttttagacttca

SEQ ID NO: 613343 - DNA, 15 bp, Homo sapiens
atttttagacttcag

SEQ ID NO: 613344 - DNA, 15 bp, Homo sapiens
tttttagacttcagg

SEQ ID NO: 613345 - DNA, 15 bp, Homo sapiens
ttttagacttcaggc

SEQ ID NO: 613346 - DNA, 15 bp, Homo sapiens
tttagacttcaggct

SEQ ID NO: 613347 - DNA, 15 bp, Homo sapiens
ttagacttcaggctt

SEQ ID NO: 613348 - DNA, 15 bp, Homo sapiens
tagacttcaggcttt

SEQ ID NO: 613349 - DNA, 15 bp, Homo sapiens
agacttcaggcttta

SEQ ID NO: 613350 - DNA, 15 bp, Homo sapiens
gacttcaggctttac

SEQ ID NO: 613351 - DNA, 15 bp, Homo sapiens
acttcaggctttaca

SEQ ID NO: 613352 - DNA, 15 bp, Homo sapiens
cttcaggctttacag

SEQ ID NO: 613353 - DNA, 15 bp, Homo sapiens
ttcaggctttacagg

SEQ ID NO: 613354 - DNA, 15 bp, Homo sapiens
tcaggctttacaggc

SEQ ID NO: 613355 - DNA, 15 bp, Homo sapiens
caggctttacaggct

SEQ ID NO: 613356 - DNA, 15 bp, Homo sapiens
aggctttacaggctc

SEQ ID NO: 613357 - DNA, 15 bp, Homo sapiens
ggctttacaggctcc

SEQ ID NO: 613358 - DNA, 15 bp, Homo sapiens
gctttacaggctcct

SEQ ID NO: 613359 - DNA, 15 bp, Homo sapiens
ctttacaggctcctg

SEQ ID NO: 613360 - DNA, 15 bp, Homo sapiens
tttacaggctcctga

SEQ ID NO: 613361 - DNA, 15 bp, Homo sapiens
ttacaggctcctgag

SEQ ID NO: 613362 - DNA, 15 bp, Homo sapiens
tacaggctcctgaga

SEQ ID NO: 613363 - DNA, 15 bp, Homo sapiens
acaggctcctgagat

SEQ ID NO: 613364 - DNA, 15 bp, Homo sapiens
caggctcctgagatg

SEQ ID NO: 613365 - DNA, 15 bp, Homo sapiens
aggctcctgagatgg

SEQ ID NO: 613366 - DNA, 15 bp, Homo sapiens
ggctcctgagatgga

SEQ ID NO: 613367 - DNA, 15 bp, Homo sapiens
gctcctgagatggac

SEQ ID NO: 613368 - DNA, 15 bp, Homo sapiens
ctcctgagatggact

SEQ ID NO: 613369 - DNA, 15 bp, Homo sapiens
tcctgagatggactg

SEQ ID NO: 613370 - DNA, 15 bp, Homo sapiens
cctgagatggactga

SEQ ID NO: 613371 - DNA, 15 bp, Homo sapiens
ctgagatggactgat

SEQ ID NO: 613372 - DNA, 15 bp, Homo sapiens
tgagatggactgatt

SEQ ID NO: 613373 - DNA, 15 bp, Homo sapiens
gagatggactgattg

SEQ ID NO: 613374 - DNA, 15 bp, Homo sapiens
agatggactgattga

SEQ ID NO: 613375 - DNA, 15 bp, Homo sapiens
gatggactgattgag

SEQ ID NO: 613376 - DNA, 15 bp, Homo sapiens
atggactgattgagc

SEQ ID NO: 613377 - DNA, 15 bp, Homo sapiens
tggactgattgagct

SEQ ID NO: 613378 - DNA, 15 bp, Homo sapiens
ggactgattgagctt

SEQ ID NO: 613379 - DNA, 15 bp, Homo sapiens
gactgattgagcttg

SEQ ID NO: 613380 - DNA, 15 bp, Homo sapiens
actgattgagcttgt

SEQ ID NO: 613381 - DNA, 15 bp, Homo sapiens
ctgattgagcttgtt

SEQ ID NO: 613382 - DNA, 15 bp, Homo sapiens
tgattgagcttgttc

SEQ ID NO: 613383 - DNA, 15 bp, Homo sapiens
gattgagcttgttct

SEQ ID NO: 613384 - DNA, 15 bp, Homo sapiens
attgagcttgttcta

SEQ ID NO: 613385 - DNA, 15 bp, Homo sapiens
ttgagcttgttctac

SEQ ID NO: 613386 - DNA, 15 bp, Homo sapiens
tgagcttgttctact

SEQ ID NO: 613387 - DNA, 15 bp, Homo sapiens
gagcttgttctactt

SEQ ID NO: 613388 - DNA, 15 bp, Homo sapiens
agcttgttctacttc

SEQ ID NO: 613389 - DNA, 15 bp, Homo sapiens
gcttgttctacttct

SEQ ID NO: 613390 - DNA, 15 bp, Homo sapiens
cttgttctacttctt

SEQ ID NO: 613391 - DNA, 15 bp, Homo sapiens
ttgttctacttcttc

SEQ ID NO: 613392 - DNA, 15 bp, Homo sapiens
tgttctacttcttcc

SEQ ID NO: 613393 - DNA, 15 bp, Homo sapiens
gttctacttcttccc

SEQ ID NO: 613394 - DNA, 15 bp, Homo sapiens
ttctacttcttcccc

SEQ ID NO: 613395 - DNA, 15 bp, Homo sapiens
tctacttcttcccca

SEQ ID NO: 613396 - DNA, 15 bp, Homo sapiens
ctacttcttccccat

SEQ ID NO: 613397 - DNA, 15 bp, Homo sapiens
tacttcttccccatc

SEQ ID NO: 613398 - DNA, 15 bp, Homo sapiens
acttcttccccatca

SEQ ID NO: 613399 - DNA, 15 bp, Homo sapiens
cttcttccccatcat

SEQ ID NO: 613400 - DNA, 15 bp, Homo sapiens
ttcttccccatcatg

SEQ ID NO: 613401 - DNA, 15 bp, Homo sapiens
tcttccccatcatga

SEQ ID NO: 613402 - DNA, 15 bp, Homo sapiens
cttccccatcatgat

SEQ ID NO: 613403 - DNA, 15 bp, Homo sapiens
ttccccatcatgata

SEQ ID NO: 613404 - DNA, 15 bp, Homo sapiens
tccccatcatgatag

SEQ ID NO: 613405 - DNA, 15 bp, Homo sapiens
ccccatcatgatagg

SEQ ID NO: 613406 - DNA, 15 bp, Homo sapiens
cccatcatgatagga

SEQ ID NO: 613407 - DNA, 15 bp, Homo sapiens
ccatcatgataggaa

SEQ ID NO: 613408 - DNA, 15 bp, Homo sapiens
catcatgataggaag

SEQ ID NO: 613409 - DNA, 15 bp, Homo sapiens
atcatgataggaagt

SEQ ID NO: 613410 - DNA, 15 bp, Homo sapiens
tcatgataggaagtg

SEQ ID NO: 613411 - DNA, 15 bp, Homo sapiens
catgataggaagtgc

SEQ ID NO: 613412 - DNA, 15 bp, Homo sapiens
atgataggaagtgct

SEQ ID NO: 613413 - DNA, 15 bp, Homo sapiens
tgataggaagtgctg

SEQ ID NO: 613414 - DNA, 15 bp, Homo sapiens
gataggaagtgctgt

SEQ ID NO: 613415 - DNA, 15 bp, Homo sapiens
ataggaagtgctgta

SEQ ID NO: 613416 - DNA, 15 bp, Homo sapiens
taggaagtgctgtac

SEQ ID NO: 613417 - DNA, 15 bp, Homo sapiens
aggaagtgctgtacc

SEQ ID NO: 613418 - DNA, 15 bp, Homo sapiens
ggaagtgctgtacca

SEQ ID NO: 613419 - DNA, 15 bp, Homo sapiens
gaagtgctgtaccac

SEQ ID NO: 613420 - DNA, 15 bp, Homo sapiens
aagtgctgtaccaca

SEQ ID NO: 613421 - DNA, 15 bp, Homo sapiens
agtgctgtaccacac

SEQ ID NO: 613422 - DNA, 15 bp, Homo sapiens
gtgctgtaccacact

SEQ ID NO: 613423 - DNA, 15 bp, Homo sapiens
tgctgtaccacacta

SEQ ID NO: 613424 - DNA, 15 bp, Homo sapiens
gctgtaccacactag

SEQ ID NO: 613425 - DNA, 15 bp, Homo sapiens
ctgtaccacactagg

SEQ ID NO: 613426 - DNA, 15 bp, Homo sapiens
tgtaccacactaggc

SEQ ID NO: 613427 - DNA, 15 bp, Homo sapiens
gtaccacactaggca

SEQ ID NO: 613428 - DNA, 15 bp, Homo sapiens
taccacactaggcag

SEQ ID NO: 613429 - DNA, 15 bp, Homo sapiens
accacactaggcagt

SEQ ID NO: 613430 - DNA, 15 bp, Homo sapiens
ccacactaggcagtg

SEQ ID NO: 613431 - DNA, 15 bp, Homo sapiens
cacactaggcagtgt

SEQ ID NO: 613432 - DNA, 15 bp, Homo sapiens
acactaggcagtgtg

SEQ ID NO: 613433 - DNA, 15 bp, Homo sapiens
cactaggcagtgtgt

SEQ ID NO: 613434 - DNA, 15 bp, Homo sapiens
actaggcagtgtgtg

SEQ ID NO: 613435 - DNA, 15 bp, Homo sapiens
ctaggcagtgtgtgt

SEQ ID NO: 613436 - DNA, 15 bp, Homo sapiens
taggcagtgtgtgta

SEQ ID NO: 613437 - DNA, 15 bp, Homo sapiens
aggcagtgtgtgtag

SEQ ID NO: 613438 - DNA, 15 bp, Homo sapiens
ggcagtgtgtgtagt

SEQ ID NO: 613439 - DNA, 15 bp, Homo sapiens
gcagtgtgtgtagtg

SEQ ID NO: 613440 - DNA, 15 bp, Homo sapiens
cagtgtgtgtagtga

SEQ ID NO: 613441 - DNA, 15 bp, Homo sapiens
agtgtgtgtagtgac

SEQ ID NO: 613442 - DNA, 15 bp, Homo sapiens
gtgtgtgtagtgacc

SEQ ID NO: 613443 - DNA, 15 bp, Homo sapiens
tgtgtgtagtgacca

SEQ ID NO: 613444 - DNA, 15 bp, Homo sapiens
gtgtgtagtgaccac

SEQ ID NO: 613445 - DNA, 15 bp, Homo sapiens
tgtgtagtgaccaca

SEQ ID NO: 613446 - DNA, 15 bp, Homo sapiens
gtgtagtgaccacag

SEQ ID NO: 613447 - DNA, 15 bp, Homo sapiens
tgtagtgaccacaga

SEQ ID NO: 613448 - DNA, 15 bp, Homo sapiens
gtagtgaccacagac

SEQ ID NO: 613449 - DNA, 15 bp, Homo sapiens
tagtgaccacagact

SEQ ID NO: 613450 - DNA, 15 bp, Homo sapiens
agtgaccacagactg

SEQ ID NO: 613451 - DNA, 15 bp, Homo sapiens
gtgaccacagactgg

SEQ ID NO: 613452 - DNA, 15 bp, Homo sapiens
tgaccacagactggc

SEQ ID NO: 613453 - DNA, 15 bp, Homo sapiens
gaccacagactggct

SEQ ID NO: 613454 - DNA, 15 bp, Homo sapiens
accacagactggctg

SEQ ID NO: 613455 - DNA, 15 bp, Homo sapiens
ccacagactggctga

SEQ ID NO: 613456 - DNA, 15 bp, Homo sapiens
cacagactggctgag

SEQ ID NO: 613457 - DNA, 15 bp, Homo sapiens
acagactggctgagt

SEQ ID NO: 613458 - DNA, 15 bp, Homo sapiens
cagactggctgagtg

SEQ ID NO: 613459 - DNA, 15 bp, Homo sapiens
agactggctgagtgt

SEQ ID NO: 613460 - DNA, 15 bp, Homo sapiens
gactggctgagtgtc

SEQ ID NO: 613461 - DNA, 15 bp, Homo sapiens
actggctgagtgtct

SEQ ID NO: 613462 - DNA, 15 bp, Homo sapiens
ctggctgagtgtctc

SEQ ID NO: 613463 - DNA, 15 bp, Homo sapiens
tggctgagtgtctcc

SEQ ID NO: 613464 - DNA, 15 bp, Homo sapiens
ggctgagtgtctccc

SEQ ID NO: 613465 - DNA, 15 bp, Homo sapiens
gctgagtgtctccca

SEQ ID NO: 613466 - DNA, 15 bp, Homo sapiens
ctgagtgtctcccat

SEQ ID NO: 613467 - DNA, 15 bp, Homo sapiens
tgagtgtctcccatc

SEQ ID NO: 613468 - DNA, 15 bp, Homo sapiens
gagtgtctcccatcc

SEQ ID NO: 613469 - DNA, 15 bp, Homo sapiens
agtgtctcccatccc

SEQ ID NO: 613470 - DNA, 15 bp, Homo sapiens
gtgtctcccatccca

SEQ ID NO: 613471 - DNA, 15 bp, Homo sapiens
tgtctcccatcccat

SEQ ID NO: 613472 - DNA, 15 bp, Homo sapiens
gtctcccatcccatg

SEQ ID NO: 613473 - DNA, 15 bp, Homo sapiens
tctcccatcccatgc

SEQ ID NO: 613474 - DNA, 15 bp, Homo sapiens
ctcccatcccatgct

SEQ ID NO: 613475 - DNA, 15 bp, Homo sapiens
tcccatcccatgctg

SEQ ID NO: 613476 - DNA, 15 bp, Homo sapiens
cccatcccatgctgg

SEQ ID NO: 613477 - DNA, 15 bp, Homo sapiens
ccatcccatgctggc

SEQ ID NO: 613478 - DNA, 15 bp, Homo sapiens
catcccatgctggcc

SEQ ID NO: 613479 - DNA, 15 bp, Homo sapiens
atcccatgctggccc

SEQ ID NO: 613480 - DNA, 15 bp, Homo sapiens
tcccatgctggccca

SEQ ID NO: 613481 - DNA, 15 bp, Homo sapiens
cccatgctggcccat

SEQ ID NO: 613482 - DNA, 15 bp, Homo sapiens
ccatgctggcccata

SEQ ID NO: 613483 - DNA, 15 bp, Homo sapiens
catgctggcccatat

SEQ ID NO: 613484 - DNA, 15 bp, Homo sapiens
atgctggcccatatc

SEQ ID NO: 613485 - DNA, 15 bp, Homo sapiens
tgctggcccatatct

SEQ ID NO: 613486 - DNA, 15 bp, Homo sapiens
gctggcccatatctg

SEQ ID NO: 613487 - DNA, 15 bp, Homo sapiens
ctggcccatatctgg

SEQ ID NO: 613488 - DNA, 15 bp, Homo sapiens
tggcccatatctggt

SEQ ID NO: 613489 - DNA, 15 bp, Homo sapiens
ggcccatatctggta

SEQ ID NO: 613490 - DNA, 15 bp, Homo sapiens
gcccatatctggtac

SEQ ID NO: 613491 - DNA, 15 bp, Homo sapiens
cccatatctggtacc

SEQ ID NO: 613492 - DNA, 15 bp, Homo sapiens
ccatatctggtaccc

SEQ ID NO: 613493 - DNA, 15 bp, Homo sapiens
catatctggtaccca

SEQ ID NO: 613494 - DNA, 15 bp, Homo sapiens
atatctggtacccac

SEQ ID NO: 613495 - DNA, 15 bp, Homo sapiens
tatctggtacccacc

SEQ ID NO: 613496 - DNA, 15 bp, Homo sapiens
atctggtacccacct

SEQ ID NO: 613497 - DNA, 15 bp, Homo sapiens
tctggtacccacctg

SEQ ID NO: 613498 - DNA, 15 bp, Homo sapiens
ctggtacccacctga

SEQ ID NO: 613499 - DNA, 15 bp, Homo sapiens
tggtacccacctgat

SEQ ID NO: 613500 - DNA, 15 bp, Homo sapiens
ggtacccacctgatc

SEQ ID NO: 613501 - DNA, 15 bp, Homo sapiens
gtacccacctgatcc

SEQ ID NO: 613502 - DNA, 15 bp, Homo sapiens
tacccacctgatcca

SEQ ID NO: 613503 - DNA, 15 bp, Homo sapiens
acccacctgatccac

SEQ ID NO: 613504 - DNA, 15 bp, Homo sapiens
cccacctgatccaca

SEQ ID NO: 613505 - DNA, 15 bp, Homo sapiens
ccacctgatccacaa

SEQ ID NO: 613506 - DNA, 15 bp, Homo sapiens
cacctgatccacaaa

SEQ ID NO: 613507 - DNA, 15 bp, Homo sapiens
acctgatccacaaat

SEQ ID NO: 613508 - DNA, 15 bp, Homo sapiens
cctgatccacaaatg

SEQ ID NO: 613509 - DNA, 15 bp, Homo sapiens
ctgatccacaaatgt

SEQ ID NO: 613510 - DNA, 15 bp, Homo sapiens
tgatccacaaatgtt

SEQ ID NO: 613511 - DNA, 15 bp, Homo sapiens
gatccacaaatgttc

SEQ ID NO: 613512 - DNA, 15 bp, Homo sapiens
atccacaaatgttcc

SEQ ID NO: 613513 - DNA, 15 bp, Homo sapiens
tccacaaatgttcca

SEQ ID NO: 613514 - DNA, 15 bp, Homo sapiens
ccacaaatgttccat

SEQ ID NO: 613515 - DNA, 15 bp, Homo sapiens
cacaaatgttccatc

SEQ ID NO: 613516 - DNA, 15 bp, Homo sapiens
acaaatgttccatca

SEQ ID NO: 613517 - DNA, 15 bp, Homo sapiens
caaatgttccatcag

SEQ ID NO: 613518 - DNA, 15 bp, Homo sapiens
aaatgttccatcaga

SEQ ID NO: 613519 - DNA, 15 bp, Homo sapiens
aatgttccatcagat

SEQ ID NO: 613520 - DNA, 15 bp, Homo sapiens
atgttccatcagatc

SEQ ID NO: 613521 - DNA, 15 bp, Homo sapiens
tgttccatcagatcc

SEQ ID NO: 613522 - DNA, 15 bp, Homo sapiens
gttccatcagatcct

SEQ ID NO: 613523 - DNA, 15 bp, Homo sapiens
ttccatcagatcctg

SEQ ID NO: 613524 - DNA, 15 bp, Homo sapiens
tccatcagatcctgt

SEQ ID NO: 613525 - DNA, 15 bp, Homo sapiens
ccatcagatcctgtt

SEQ ID NO: 613526 - DNA, 15 bp, Homo sapiens
catcagatcctgttc

SEQ ID NO: 613527 - DNA, 15 bp, Homo sapiens
atcagatcctgttca

SEQ ID NO: 613528 - DNA, 15 bp, Homo sapiens
tcagatcctgttcaa

SEQ ID NO: 613529 - DNA, 15 bp, Homo sapiens
cagatcctgttcaaa

SEQ ID NO: 613530 - DNA, 15 bp, Homo sapiens
agatcctgttcaaac

SEQ ID NO: 613531 - DNA, 15 bp, Homo sapiens
gatcctgttcaaaca

SEQ ID NO: 613532 - DNA, 15 bp, Homo sapiens
atcctgttcaaacaa

SEQ ID NO: 613533 - DNA, 15 bp, Homo sapiens
tcctgttcaaacaac

SEQ ID NO: 613534 - DNA, 15 bp, Homo sapiens
cctgttcaaacaaca

SEQ ID NO: 613535 - DNA, 15 bp, Homo sapiens
ctgttcaaacaacac

SEQ ID NO: 613536 - DNA, 15 bp, Homo sapiens
tgttcaaacaacaca

SEQ ID NO: 613537 - DNA, 15 bp, Homo sapiens
gttcaaacaacacat

SEQ ID NO: 613538 - DNA, 15 bp, Homo sapiens
ttcaaacaacacatc

SEQ ID NO: 613539 - DNA, 15 bp, Homo sapiens
tcaaacaacacatct

SEQ ID NO: 613540 - DNA, 15 bp, Homo sapiens
caaacaacacatctc

SEQ ID NO: 613541 - DNA, 15 bp, Homo sapiens
aaacaacacatctcc

SEQ ID NO: 613542 - DNA, 15 bp, Homo sapiens
aacaacacatctcca

SEQ ID NO: 613543 - DNA, 15 bp, Homo sapiens
acaacacatctccag

SEQ ID NO: 613544 - DNA, 15 bp, Homo sapiens
caacacatctccagt

SEQ ID NO: 613545 - DNA, 15 bp, Homo sapiens
aacacatctccagtt

SEQ ID NO: 613546 - DNA, 15 bp, Homo sapiens
acacatctccagtta

SEQ ID NO: 613547 - DNA, 15 bp, Homo sapiens
cacatctccagttaa

SEQ ID NO: 613548 - DNA, 15 bp, Homo sapiens
acatctccagttaag

SEQ ID NO: 613549 - DNA, 15 bp, Homo sapiens
catctccagttaagc

SEQ ID NO: 613550 - DNA, 15 bp, Homo sapiens
atctccagttaagcc

SEQ ID NO: 613551 - DNA, 15 bp, Homo sapiens
tctccagttaagcca

SEQ ID NO: 613552 - DNA, 15 bp, Homo sapiens
ctccagttaagccaa

SEQ ID NO: 613553 - DNA, 15 bp, Homo sapiens
tccagttaagccaaa

SEQ ID NO: 613554 - DNA, 15 bp, Homo sapiens
ccagttaagccaaat

SEQ ID NO: 613555 - DNA, 15 bp, Homo sapiens
cagttaagccaaatc

SEQ ID NO: 613556 - DNA, 15 bp, Homo sapiens
agttaagccaaatct

SEQ ID NO: 613557 - DNA, 15 bp, Homo sapiens
gttaagccaaatctt

SEQ ID NO: 613558 - DNA, 15 bp, Homo sapiens
ttaagccaaatcttg

SEQ ID NO: 613559 - DNA, 15 bp, Homo sapiens
taagccaaatcttgc

SEQ ID NO: 613560 - DNA, 15 bp, Homo sapiens
aagccaaatcttgcc

SEQ ID NO: 613561 - DNA, 15 bp, Homo sapiens
agccaaatcttgccc

SEQ ID NO: 613562 - DNA, 15 bp, Homo sapiens
gccaaatcttgccct

SEQ ID NO: 613563 - DNA, 15 bp, Homo sapiens
ccaaatcttgccctt

SEQ ID NO: 613564 - DNA, 15 bp, Homo sapiens
caaatcttgcccttt

SEQ ID NO: 613565 - DNA, 15 bp, Homo sapiens
aaatcttgccctttc

SEQ ID NO: 613566 - DNA, 15 bp, Homo sapiens
aatcttgccctttct

SEQ ID NO: 613567 - DNA, 15 bp, Homo sapiens
atcttgccctttctc

SEQ ID NO: 613568 - DNA, 15 bp, Homo sapiens
tcttgccctttctcc

SEQ ID NO: 613569 - DNA, 15 bp, Homo sapiens
cttgccctttctcct

SEQ ID NO: 613570 - DNA, 15 bp, Homo sapiens
ttgccctttctcctt

SEQ ID NO: 613571 - DNA, 15 bp, Homo sapiens
tgccctttctcctta

SEQ ID NO: 613572 - DNA, 15 bp, Homo sapiens
gccctttctccttac

SEQ ID NO: 613573 - DNA, 15 bp, Homo sapiens
ccctttctccttacg

SEQ ID NO: 613574 - DNA, 15 bp, Homo sapiens
cctttctccttacgg

SEQ ID NO: 613575 - DNA, 15 bp, Homo sapiens
ctttctccttacggt

SEQ ID NO: 613576 - DNA, 15 bp, Homo sapiens
tttctccttacggta

SEQ ID NO: 613577 - DNA, 15 bp, Homo sapiens
ttctccttacggtaa

SEQ ID NO: 613578 - DNA, 15 bp, Homo sapiens
tctccttacggtaaa

SEQ ID NO: 613579 - DNA, 15 bp, Homo sapiens
ctccttacggtaaaa

SEQ ID NO: 613580 - DNA, 15 bp, Homo sapiens
tccttacggtaaaat

SEQ ID NO: 613581 - DNA, 15 bp, Homo sapiens
ccttacggtaaaatg

SEQ ID NO: 613582 - DNA, 15 bp, Homo sapiens
cttacggtaaaatgt

SEQ ID NO: 613583 - DNA, 15 bp, Homo sapiens
ttacggtaaaatgta

SEQ ID NO: 613584 - DNA, 15 bp, Homo sapiens
tacggtaaaatgtac

SEQ ID NO: 613585 - DNA, 15 bp, Homo sapiens
acggtaaaatgtact

SEQ ID NO: 613586 - DNA, 15 bp, Homo sapiens
cggtaaaatgtacta

SEQ ID NO: 613587 - DNA, 15 bp, Homo sapiens
ggtaaaatgtactaa

SEQ ID NO: 613588 - DNA, 15 bp, Homo sapiens
gtaaaatgtactaaa

SEQ ID NO: 613589 - DNA, 15 bp, Homo sapiens
taaaatgtactaaat

SEQ ID NO: 613590 - DNA, 15 bp, Homo sapiens
aaaatgtactaaatc

SEQ ID NO: 613591 - DNA, 15 bp, Homo sapiens
aaatgtactaaatct

SEQ ID NO: 613592 - DNA, 15 bp, Homo sapiens
aatgtactaaatctg

SEQ ID NO: 613593 - DNA, 15 bp, Homo sapiens
atgtactaaatctga

SEQ ID NO: 613594 - DNA, 15 bp, Homo sapiens
tgtactaaatctgaa

SEQ ID NO: 613595 - DNA, 15 bp, Homo sapiens
gtactaaatctgaag

SEQ ID NO: 613596 - DNA, 15 bp, Homo sapiens
tactaaatctgaagg

SEQ ID NO: 613597 - DNA, 15 bp, Homo sapiens
actaaatctgaaggt

SEQ ID NO: 613598 - DNA, 15 bp, Homo sapiens
ctaaatctgaaggtt

SEQ ID NO: 613599 - DNA, 15 bp, Homo sapiens
taaatctgaaggttt

SEQ ID NO: 613600 - DNA, 15 bp, Homo sapiens
aaatctgaaggtttt

SEQ ID NO: 613601 - DNA, 15 bp, Homo sapiens
aatctgaaggttttg

SEQ ID NO: 613602 - DNA, 15 bp, Homo sapiens
atctgaaggttttgt

SEQ ID NO: 613603 - DNA, 15 bp, Homo sapiens
tctgaaggttttgtc

SEQ ID NO: 613604 - DNA, 15 bp, Homo sapiens
ctgaaggttttgtct

SEQ ID NO: 613605 - DNA, 15 bp, Homo sapiens
tgaaggttttgtctt

SEQ ID NO: 613606 - DNA, 15 bp, Homo sapiens
gaaggttttgtcttt

SEQ ID NO: 613607 - DNA, 15 bp, Homo sapiens
aaggttttgtctttt

SEQ ID NO: 613608 - DNA, 15 bp, Homo sapiens
aggttttgtcttttt

SEQ ID NO: 613609 - DNA, 15 bp, Homo sapiens
ggttttgtcttttta

SEQ ID NO: 613610 - DNA, 15 bp, Homo sapiens
gttttgtctttttaa

SEQ ID NO: 613611 - DNA, 15 bp, Homo sapiens
ttttgtctttttaat

SEQ ID NO: 613612 - DNA, 15 bp, Homo sapiens
tttgtctttttaatg

SEQ ID NO: 613613 - DNA, 15 bp, Homo sapiens
gtctgttctgtcagt

SEQ ID NO: 613614 - DNA, 15 bp, Homo sapiens
tctgttctgtcagta

SEQ ID NO: 613615 - DNA, 15 bp, Homo sapiens
ctgttctgtcagtac

SEQ ID NO: 613616 - DNA, 15 bp, Homo sapiens
tgttctgtcagtacc

SEQ ID NO: 613617 - DNA, 15 bp, Homo sapiens
gttctgtcagtaccc

SEQ ID NO: 613618 - DNA, 15 bp, Homo sapiens
ttctgtcagtaccca

SEQ ID NO: 613619 - DNA, 15 bp, Homo sapiens
tctgtcagtacccac

SEQ ID NO: 613620 - DNA, 15 bp, Homo sapiens
ctgtcagtacccaca

SEQ ID NO: 613621 - DNA, 15 bp, Homo sapiens
tgtcagtacccacag

SEQ ID NO: 613622 - DNA, 15 bp, Homo sapiens
gtcagtacccacagg

SEQ ID NO: 613623 - DNA, 15 bp, Homo sapiens
tcagtacccacaggc

SEQ ID NO: 613624 - DNA, 15 bp, Homo sapiens
cagtacccacaggca

SEQ ID NO: 613625 - DNA, 15 bp, Homo sapiens
agtacccacaggcag

SEQ ID NO: 613626 - DNA, 15 bp, Homo sapiens
gtacccacaggcagg

SEQ ID NO: 613627 - DNA, 15 bp, Homo sapiens
tacccacaggcagga

SEQ ID NO: 613628 - DNA, 15 bp, Homo sapiens
acccacaggcaggag

SEQ ID NO: 613629 - DNA, 15 bp, Homo sapiens
cccacaggcaggaga

SEQ ID NO: 613630 - DNA, 15 bp, Homo sapiens
ccacaggcaggagag

SEQ ID NO: 613631 - DNA, 15 bp, Homo sapiens
cacaggcaggagagc

SEQ ID NO: 613632 - DNA, 15 bp, Homo sapiens
acaggcaggagagca

SEQ ID NO: 613633 - DNA, 15 bp, Homo sapiens
caggcaggagagcag

SEQ ID NO: 613634 - DNA, 15 bp, Homo sapiens
aggcaggagagcaga

SEQ ID NO: 613635 - DNA, 15 bp, Homo sapiens
ggcaggagagcagaa

SEQ ID NO: 613636 - DNA, 15 bp, Homo sapiens
gcaggagagcagaaa

SEQ ID NO: 613637 - DNA, 15 bp, Homo sapiens
caggagagcagaaag

SEQ ID NO: 613638 - DNA, 15 bp, Homo sapiens
aggagagcagaaagg

SEQ ID NO: 613639 - DNA, 15 bp, Homo sapiens
ggagagcagaaagga

SEQ ID NO: 613640 - DNA, 15 bp, Homo sapiens
gagagcagaaaggag

SEQ ID NO: 613641 - DNA, 15 bp, Homo sapiens
agagcagaaaggaga

SEQ ID NO: 613642 - DNA, 15 bp, Homo sapiens
gagcagaaaggagaa

SEQ ID NO: 613643 - DNA, 15 bp, Homo sapiens
agcagaaaggagaaa

SEQ ID NO: 613644 - DNA, 15 bp, Homo sapiens
gcagaaaggagaaat

SEQ ID NO: 613645 - DNA, 15 bp, Homo sapiens
cagaaaggagaaatg

SEQ ID NO: 613646 - DNA, 15 bp, Homo sapiens
agaaaggagaaatgg

SEQ ID NO: 613647 - DNA, 15 bp, Homo sapiens
gaaaggagaaatggc

SEQ ID NO: 613648 - DNA, 15 bp, Homo sapiens
aaaggagaaatggca

SEQ ID NO: 613649 - DNA, 15 bp, Homo sapiens
aaggagaaatggcag

SEQ ID NO: 613650 - DNA, 15 bp, Homo sapiens
aggagaaatggcagc

SEQ ID NO: 613651 - DNA, 15 bp, Homo sapiens
ggagaaatggcagcc

SEQ ID NO: 613652 - DNA, 15 bp, Homo sapiens
gagaaatggcagcca

SEQ ID NO: 613653 - DNA, 15 bp, Homo sapiens
agaaatggcagccac

SEQ ID NO: 613654 - DNA, 15 bp, Homo sapiens
gaaatggcagccaca

SEQ ID NO: 613655 - DNA, 15 bp, Homo sapiens
aaatggcagccacag

SEQ ID NO: 613656 - DNA, 15 bp, Homo sapiens
aatggcagccacagc

SEQ ID NO: 613657 - DNA, 15 bp, Homo sapiens
atggcagccacagca

SEQ ID NO: 613658 - DNA, 15 bp, Homo sapiens
tggcagccacagcag

SEQ ID NO: 613659 - DNA, 15 bp, Homo sapiens
ggcagccacagcaga

SEQ ID NO: 613660 - DNA, 15 bp, Homo sapiens
gcagccacagcagac

SEQ ID NO: 613661 - DNA, 15 bp, Homo sapiens
cagccacagcagaca

SEQ ID NO: 613662 - DNA, 15 bp, Homo sapiens
agccacagcagacaa

SEQ ID NO: 613663 - DNA, 15 bp, Homo sapiens
gccacagcagacaaa

SEQ ID NO: 613664 - DNA, 15 bp, Homo sapiens
ccacagcagacaaat

SEQ ID NO: 613665 - DNA, 15 bp, Homo sapiens
cacagcagacaaatg

SEQ ID NO: 613666 - DNA, 15 bp, Homo sapiens
acagcagacaaatgg

SEQ ID NO: 613667 - DNA, 15 bp, Homo sapiens
cagcagacaaatggc

SEQ ID NO: 613668 - DNA, 15 bp, Homo sapiens
agcagacaaatggca

SEQ ID NO: 613669 - DNA, 15 bp, Homo sapiens
gcagacaaatggcac

SEQ ID NO: 613670 - DNA, 15 bp, Homo sapiens
cagacaaatggcaca

SEQ ID NO: 613671 - DNA, 15 bp, Homo sapiens
agacaaatggcacat

SEQ ID NO: 613672 - DNA, 15 bp, Homo sapiens
gacaaatggcacatt

SEQ ID NO: 613673 - DNA, 15 bp, Homo sapiens
acaaatggcacattc

SEQ ID NO: 613674 - DNA, 15 bp, Homo sapiens
caaatggcacattcg

SEQ ID NO: 613675 - DNA, 15 bp, Homo sapiens
aaatggcacattcgt

SEQ ID NO: 613676 - DNA, 15 bp, Homo sapiens
aatggcacattcgtt

SEQ ID NO: 613677 - DNA, 15 bp, Homo sapiens
atggcacattcgttc

SEQ ID NO: 613678 - DNA, 15 bp, Homo sapiens
tggcacattcgttcc

SEQ ID NO: 613679 - DNA, 15 bp, Homo sapiens
ggcacattcgttcca

SEQ ID NO: 613680 - DNA, 15 bp, Homo sapiens
gcacattcgttccac

SEQ ID NO: 613681 - DNA, 15 bp, Homo sapiens
cacattcgttccact

SEQ ID NO: 613682 - DNA, 15 bp, Homo sapiens
acattcgttccactc

SEQ ID NO: 613683 - DNA, 15 bp, Homo sapiens
cattcgttccactca

SEQ ID NO: 613684 - DNA, 15 bp, Homo sapiens
attcgttccactcag

SEQ ID NO: 613685 - DNA, 15 bp, Homo sapiens
ttcgttccactcagc

SEQ ID NO: 613686 - DNA, 15 bp, Homo sapiens
tcgttccactcagct

SEQ ID NO: 613687 - DNA, 15 bp, Homo sapiens
cgttccactcagctc

SEQ ID NO: 613688 - DNA, 15 bp, Homo sapiens
gttccactcagctct

SEQ ID NO: 613689 - DNA, 15 bp, Homo sapiens
ttccactcagctctc

SEQ ID NO: 613690 - DNA, 15 bp, Homo sapiens
tccactcagctctcg

SEQ ID NO: 613691 - DNA, 15 bp, Homo sapiens
ccactcagctctcgc

SEQ ID NO: 613692 - DNA, 15 bp, Homo sapiens
cactcagctctcgca

SEQ ID NO: 613693 - DNA, 15 bp, Homo sapiens
actcagctctcgcat

SEQ ID NO: 613694 - DNA, 15 bp, Homo sapiens
ctcagctctcgcatg

SEQ ID NO: 613695 - DNA, 15 bp, Homo sapiens
tcagctctcgcatgc

SEQ ID NO: 613696 - DNA, 15 bp, Homo sapiens
cagctctcgcatgcc

SEQ ID NO: 613697 - DNA, 15 bp, Homo sapiens
agctctcgcatgccc

SEQ ID NO: 613698 - DNA, 15 bp, Homo sapiens
gctctcgcatgccca

SEQ ID NO: 613699 - DNA, 15 bp, Homo sapiens
ctctcgcatgcccat

SEQ ID NO: 613700 - DNA, 15 bp, Homo sapiens
tctcgcatgcccatc

SEQ ID NO: 613701 - DNA, 15 bp, Homo sapiens
ctcgcatgcccatca

SEQ ID NO: 613702 - DNA, 15 bp, Homo sapiens
tcgcatgcccatcac

SEQ ID NO: 613703 - DNA, 15 bp, Homo sapiens
cgcatgcccatcaca

SEQ ID NO: 613704 - DNA, 15 bp, Homo sapiens
gcatgcccatcacag

SEQ ID NO: 613705 - DNA, 15 bp, Homo sapiens
catgcccatcacaga

SEQ ID NO: 613706 - DNA, 15 bp, Homo sapiens
atgcccatcacagat

SEQ ID NO: 613707 - DNA, 15 bp, Homo sapiens
tgcccatcacagata

SEQ ID NO: 613708 - DNA, 15 bp, Homo sapiens
gcccatcacagatac

SEQ ID NO: 613709 - DNA, 15 bp, Homo sapiens
cccatcacagataca

SEQ ID NO: 613710 - DNA, 15 bp, Homo sapiens
ccatcacagatacag

SEQ ID NO: 613711 - DNA, 15 bp, Homo sapiens
catcacagatacagc

SEQ ID NO: 613712 - DNA, 15 bp, Homo sapiens
atcacagatacagct

SEQ ID NO: 613713 - DNA, 15 bp, Homo sapiens
tcacagatacagctc

SEQ ID NO: 613714 - DNA, 15 bp, Homo sapiens
cacagatacagctca

SEQ ID NO: 613715 - DNA, 15 bp, Homo sapiens
acagatacagctcat

SEQ ID NO: 613716 - DNA, 15 bp, Homo sapiens
cagatacagctcatt

SEQ ID NO: 613717 - DNA, 15 bp, Homo sapiens
agatacagctcattg

SEQ ID NO: 613718 - DNA, 15 bp, Homo sapiens
gatacagctcattgg

SEQ ID NO: 613719 - DNA, 15 bp, Homo sapiens
atacagctcattggt

SEQ ID NO: 613720 - DNA, 15 bp, Homo sapiens
tacagctcattggtc

SEQ ID NO: 613721 - DNA, 15 bp, Homo sapiens
acagctcattggtct

SEQ ID NO: 613722 - DNA, 15 bp, Homo sapiens
cagctcattggtctc

SEQ ID NO: 613723 - DNA, 15 bp, Homo sapiens
agctcattggtctct

SEQ ID NO: 613724 - DNA, 15 bp, Homo sapiens
gctcattggtctctt

SEQ ID NO: 613725 - DNA, 15 bp, Homo sapiens
ctcattggtctcttt

SEQ ID NO: 613726 - DNA, 15 bp, Homo sapiens
tcattggtctctttt

SEQ ID NO: 613727 - DNA, 15 bp, Homo sapiens
cattggtctcttttc

SEQ ID NO: 613728 - DNA, 15 bp, Homo sapiens
attggtctcttttct

SEQ ID NO: 613729 - DNA, 15 bp, Homo sapiens
ttggtctcttttcta

SEQ ID NO: 613730 - DNA, 15 bp, Homo sapiens
tggtctcttttctat

SEQ ID NO: 613731 - DNA, 15 bp, Homo sapiens
ggtctcttttctatg

SEQ ID NO: 613732 - DNA, 15 bp, Homo sapiens
gtctcttttctatga

SEQ ID NO: 613733 - DNA, 15 bp, Homo sapiens
tctcttttctatgag

SEQ ID NO: 613734 - DNA, 15 bp, Homo sapiens
ctcttttctatgaga

SEQ ID NO: 613735 - DNA, 15 bp, Homo sapiens
tcttttctatgagag

SEQ ID NO: 613736 - DNA, 15 bp, Homo sapiens
cttttctatgagagg

SEQ ID NO: 613737 - DNA, 15 bp, Homo sapiens
ttttctatgagagga

SEQ ID NO: 613738 - DNA, 15 bp, Homo sapiens
tttctatgagaggaa

SEQ ID NO: 613739 - DNA, 15 bp, Homo sapiens
ttctatgagaggaag

SEQ ID NO: 613740 - DNA, 15 bp, Homo sapiens
tctatgagaggaagc

SEQ ID NO: 613741 - DNA, 15 bp, Homo sapiens
ctatgagaggaagcc

SEQ ID NO: 613742 - DNA, 15 bp, Homo sapiens
tatgagaggaagcca

SEQ ID NO: 613743 - DNA, 15 bp, Homo sapiens
atgagaggaagccag

SEQ ID NO: 613744 - DNA, 15 bp, Homo sapiens
tgagaggaagccaga

SEQ ID NO: 613745 - DNA, 15 bp, Homo sapiens
gagaggaagccagag

SEQ ID NO: 613746 - DNA, 15 bp, Homo sapiens
agaggaagccagagc

SEQ ID NO: 613747 - DNA, 15 bp, Homo sapiens
gaggaagccagagct

SEQ ID NO: 613748 - DNA, 15 bp, Homo sapiens
aggaagccagagctc

SEQ ID NO: 613749 - DNA, 15 bp, Homo sapiens
ggaagccagagctcc

SEQ ID NO: 613750 - DNA, 15 bp, Homo sapiens
gaagccagagctcca

SEQ ID NO: 613751 - DNA, 15 bp, Homo sapiens
aagccagagctccag

SEQ ID NO: 613752 - DNA, 15 bp, Homo sapiens
agccagagctccagg

SEQ ID NO: 613753 - DNA, 15 bp, Homo sapiens
gccagagctccaggg

SEQ ID NO: 613754 - DNA, 15 bp, Homo sapiens
ccagagctccaggga

SEQ ID NO: 613755 - DNA, 15 bp, Homo sapiens
cagagctccagggaa

SEQ ID NO: 613756 - DNA, 15 bp, Homo sapiens
agagctccagggaac

SEQ ID NO: 613757 - DNA, 15 bp, Homo sapiens
gagctccagggaact

SEQ ID NO: 613758 - DNA, 15 bp, Homo sapiens
agctccagggaacta

SEQ ID NO: 613759 - DNA, 15 bp, Homo sapiens
gctccagggaactac

SEQ ID NO: 613760 - DNA, 15 bp, Homo sapiens
ctccagggaactact

SEQ ID NO: 613761 - DNA, 15 bp, Homo sapiens
tccagggaactactg

SEQ ID NO: 613762 - DNA, 15 bp, Homo sapiens
ccagggaactactgc

SEQ ID NO: 613763 - DNA, 15 bp, Homo sapiens
cagggaactactgcc

SEQ ID NO: 613764 - DNA, 15 bp, Homo sapiens
agggaactactgcca

SEQ ID NO: 613765 - DNA, 15 bp, Homo sapiens
gggaactactgccaa

SEQ ID NO: 613766 - DNA, 15 bp, Homo sapiens
ggaactactgccaac

SEQ ID NO: 613767 - DNA, 15 bp, Homo sapiens
gaactactgccaact

SEQ ID NO: 613768 - DNA, 15 bp, Homo sapiens
aactactgccaactg

SEQ ID NO: 613769 - DNA, 15 bp, Homo sapiens
actactgccaactga

SEQ ID NO: 613770 - DNA, 15 bp, Homo sapiens
ctactgccaactgat

SEQ ID NO: 613771 - DNA, 15 bp, Homo sapiens
tactgccaactgatc

SEQ ID NO: 613772 - DNA, 15 bp, Homo sapiens
actgccaactgatca

SEQ ID NO: 613773 - DNA, 15 bp, Homo sapiens
ctgccaactgatcag

SEQ ID NO: 613774 - DNA, 15 bp, Homo sapiens
tgccaactgatcaga

SEQ ID NO: 613775 - DNA, 15 bp, Homo sapiens
gccaactgatcagaa

SEQ ID NO: 613776 - DNA, 15 bp, Homo sapiens
ccaactgatcagaac

SEQ ID NO: 613777 - DNA, 15 bp, Homo sapiens
caactgatcagaact

SEQ ID NO: 613778 - DNA, 15 bp, Homo sapiens
aactgatcagaactc

SEQ ID NO: 613779 - DNA, 15 bp, Homo sapiens
actgatcagaactca

SEQ ID NO: 613780 - DNA, 15 bp, Homo sapiens
ctgatcagaactcat

SEQ ID NO: 613781 - DNA, 15 bp, Homo sapiens
tgatcagaactcatt

SEQ ID NO: 613782 - DNA, 15 bp, Homo sapiens
gatcagaactcattt

SEQ ID NO: 613783 - DNA, 15 bp, Homo sapiens
atcagaactcattta

SEQ ID NO: 613784 - DNA, 15 bp, Homo sapiens
tcagaactcatttag

SEQ ID NO: 613785 - DNA, 15 bp, Homo sapiens
cagaactcatttagg

SEQ ID NO: 613786 - DNA, 15 bp, Homo sapiens
agaactcatttagga

SEQ ID NO: 613787 - DNA, 15 bp, Homo sapiens
gaactcatttaggac

SEQ ID NO: 613788 - DNA, 15 bp, Homo sapiens
aactcatttaggaca

SEQ ID NO: 613789 - DNA, 15 bp, Homo sapiens
actcatttaggacat

SEQ ID NO: 613790 - DNA, 15 bp, Homo sapiens
ctcatttaggacatg

SEQ ID NO: 613791 - DNA, 15 bp, Homo sapiens
tcatttaggacatgg

SEQ ID NO: 613792 - DNA, 15 bp, Homo sapiens
catttaggacatgga

SEQ ID NO: 613793 - DNA, 15 bp, Homo sapiens
atttaggacatggac

SEQ ID NO: 613794 - DNA, 15 bp, Homo sapiens
tttaggacatggacc

SEQ ID NO: 613795 - DNA, 15 bp, Homo sapiens
ttaggacatggacct

SEQ ID NO: 613796 - DNA, 15 bp, Homo sapiens
taggacatggaccta

SEQ ID NO: 613797 - DNA, 15 bp, Homo sapiens
aggacatggacctat

SEQ ID NO: 613798 - DNA, 15 bp, Homo sapiens
ggacatggacctatt

SEQ ID NO: 613799 - DNA, 15 bp, Homo sapiens
gacatggacctattt

SEQ ID NO: 613800 - DNA, 15 bp, Homo sapiens
acatggacctatttg

SEQ ID NO: 613801 - DNA, 15 bp, Homo sapiens
catggacctatttgt

SEQ ID NO: 613802 - DNA, 15 bp, Homo sapiens
atggacctatttgtt

SEQ ID NO: 613803 - DNA, 15 bp, Homo sapiens
tggacctatttgttc

SEQ ID NO: 613804 - DNA, 15 bp, Homo sapiens
ggacctatttgttcc

SEQ ID NO: 613805 - DNA, 15 bp, Homo sapiens
gacctatttgttcct

SEQ ID NO: 613806 - DNA, 15 bp, Homo sapiens
acctatttgttcctt

SEQ ID NO: 613807 - DNA, 15 bp, Homo sapiens
cctatttgttccttt

SEQ ID NO: 613808 - DNA, 15 bp, Homo sapiens
ctatttgttccttta

SEQ ID NO: 613809 - DNA, 15 bp, Homo sapiens
tatttgttcctttat

SEQ ID NO: 613810 - DNA, 15 bp, Homo sapiens
atttgttcctttatg

SEQ ID NO: 613811 - DNA, 15 bp, Homo sapiens
tttgttcctttatgt

SEQ ID NO: 613812 - DNA, 15 bp, Homo sapiens
ttgttcctttatgtt

SEQ ID NO: 613813 - DNA, 15 bp, Homo sapiens
tgttcctttatgttc

SEQ ID NO: 613814 - DNA, 15 bp, Homo sapiens
gttcctttatgttcc

SEQ ID NO: 613815 - DNA, 15 bp, Homo sapiens
ttcctttatgttcct

SEQ ID NO: 613816 - DNA, 15 bp, Homo sapiens
tcctttatgttcctg

SEQ ID NO: 613817 - DNA, 15 bp, Homo sapiens
cctttatgttcctgg

SEQ ID NO: 613818 - DNA, 15 bp, Homo sapiens
ctttatgttcctggg

SEQ ID NO: 613819 - DNA, 15 bp, Homo sapiens
tttatgttcctggga

SEQ ID NO: 613820 - DNA, 15 bp, Homo sapiens
ttatgttcctgggaa

SEQ ID NO: 613821 - DNA, 15 bp, Homo sapiens
tatgttcctgggaag

SEQ ID NO: 613822 - DNA, 15 bp, Homo sapiens
atgttcctgggaaga

SEQ ID NO: 613823 - DNA, 15 bp, Homo sapiens
tgttcctgggaagag

SEQ ID NO: 613824 - DNA, 15 bp, Homo sapiens
gttcctgggaagagc

SEQ ID NO: 613825 - DNA, 15 bp, Homo sapiens
ttcctgggaagagca

SEQ ID NO: 613826 - DNA, 15 bp, Homo sapiens
tcctgggaagagcac

SEQ ID NO: 613827 - DNA, 15 bp, Homo sapiens
cctgggaagagcaca

SEQ ID NO: 613828 - DNA, 15 bp, Homo sapiens
ctgggaagagcacag

SEQ ID NO: 613829 - DNA, 15 bp, Homo sapiens
tgggaagagcacagg

SEQ ID NO: 613830 - DNA, 15 bp, Homo sapiens
gggaagagcacagga

SEQ ID NO: 613831 - DNA, 15 bp, Homo sapiens
ggaagagcacaggat

SEQ ID NO: 613832 - DNA, 15 bp, Homo sapiens
gaagagcacaggatg

SEQ ID NO: 613833 - DNA, 15 bp, Homo sapiens
aagagcacaggatga

SEQ ID NO: 613834 - DNA, 15 bp, Homo sapiens
agagcacaggatgaa

SEQ ID NO: 613835 - DNA, 15 bp, Homo sapiens
gagcacaggatgaat

SEQ ID NO: 613836 - DNA, 15 bp, Homo sapiens
agcacaggatgaatt

SEQ ID NO: 613837 - DNA, 15 bp, Homo sapiens
gcacaggatgaattc

SEQ ID NO: 613838 - DNA, 15 bp, Homo sapiens
cacaggatgaattct

SEQ ID NO: 613839 - DNA, 15 bp, Homo sapiens
acaggatgaattcta

SEQ ID NO: 613840 - DNA, 15 bp, Homo sapiens
caggatgaattctat

SEQ ID NO: 613841 - DNA, 15 bp, Homo sapiens
aggatgaattctatg

SEQ ID NO: 613842 - DNA, 15 bp, Homo sapiens
ggatgaattctatgt

SEQ ID NO: 613843 - DNA, 15 bp, Homo sapiens
gatgaattctatgta

SEQ ID NO: 613844 - DNA, 15 bp, Homo sapiens
atgaattctatgtac

SEQ ID NO: 613845 - DNA, 15 bp, Homo sapiens
tgaattctatgtact

SEQ ID NO: 613846 - DNA, 15 bp, Homo sapiens
gaattctatgtactc

SEQ ID NO: 613847 - DNA, 15 bp, Homo sapiens
aattctatgtactca

SEQ ID NO: 613848 - DNA, 15 bp, Homo sapiens
attctatgtactcat

SEQ ID NO: 613849 - DNA, 15 bp, Homo sapiens
ttctatgtactcatt

SEQ ID NO: 613850 - DNA, 15 bp, Homo sapiens
tctatgtactcattt

SEQ ID NO: 613851 - DNA, 15 bp, Homo sapiens
ctatgtactcattta

SEQ ID NO: 613852 - DNA, 15 bp, Homo sapiens
tatgtactcatttac

SEQ ID NO: 613853 - DNA, 15 bp, Homo sapiens
atgtactcatttacg

SEQ ID NO: 613854 - DNA, 15 bp, Homo sapiens
tgtactcatttacgt

SEQ ID NO: 613855 - DNA, 15 bp, Homo sapiens
gtactcatttacgtg

SEQ ID NO: 613856 - DNA, 15 bp, Homo sapiens
tactcatttacgtgt

SEQ ID NO: 613857 - DNA, 15 bp, Homo sapiens
actcatttacgtgtt

SEQ ID NO: 613858 - DNA, 15 bp, Homo sapiens
ctcatttacgtgttc

SEQ ID NO: 613859 - DNA, 15 bp, Homo sapiens
tcatttacgtgttca

SEQ ID NO: 613860 - DNA, 15 bp, Homo sapiens
catttacgtgttcag

SEQ ID NO: 613861 - DNA, 15 bp, Homo sapiens
atttacgtgttcaga

SEQ ID NO: 613862 - DNA, 15 bp, Homo sapiens
tttacgtgttcagag

SEQ ID NO: 613863 - DNA, 15 bp, Homo sapiens
ttacgtgttcagaga

SEQ ID NO: 613864 - DNA, 15 bp, Homo sapiens
tacgtgttcagagag

SEQ ID NO: 613865 - DNA, 15 bp, Homo sapiens
acgtgttcagagagt

SEQ ID NO: 613866 - DNA, 15 bp, Homo sapiens
cgtgttcagagagta

SEQ ID NO: 613867 - DNA, 15 bp, Homo sapiens
gtgttcagagagtaa

SEQ ID NO: 613868 - DNA, 15 bp, Homo sapiens
tgttcagagagtaaa

SEQ ID NO: 613869 - DNA, 15 bp, Homo sapiens
gttcagagagtaaag

SEQ ID NO: 613870 - DNA, 15 bp, Homo sapiens
ttcagagagtaaagt

SEQ ID NO: 613871 - DNA, 15 bp, Homo sapiens
tcagagagtaaagtg

SEQ ID NO: 613872 - DNA, 15 bp, Homo sapiens
cagagagtaaagtgc

SEQ ID NO: 613873 - DNA, 15 bp, Homo sapiens
agagagtaaagtgcc

SEQ ID NO: 613874 - DNA, 15 bp, Homo sapiens
gagagtaaagtgcct

SEQ ID NO: 613875 - DNA, 15 bp, Homo sapiens
agagtaaagtgcctc

SEQ ID NO: 613876 - DNA, 15 bp, Homo sapiens
gagtaaagtgcctca

SEQ ID NO: 613877 - DNA, 15 bp, Homo sapiens
agtaaagtgcctcat

SEQ ID NO: 613878 - DNA, 15 bp, Homo sapiens
gtaaagtgcctcata

SEQ ID NO: 613879 - DNA, 15 bp, Homo sapiens
taaagtgcctcatag

SEQ ID NO: 613880 - DNA, 15 bp, Homo sapiens
aaagtgcctcatagg

SEQ ID NO: 613881 - DNA, 15 bp, Homo sapiens
aagtgcctcatagga

SEQ ID NO: 613882 - DNA, 15 bp, Homo sapiens
agtgcctcataggat

SEQ ID NO: 613883 - DNA, 15 bp, Homo sapiens
gtgcctcataggatg

SEQ ID NO: 613884 - DNA, 15 bp, Homo sapiens
tgcctcataggatgc

SEQ ID NO: 613885 - DNA, 15 bp, Homo sapiens
gcctcataggatgcc

SEQ ID NO: 613886 - DNA, 15 bp, Homo sapiens
cctcataggatgcct

SEQ ID NO: 613887 - DNA, 15 bp, Homo sapiens
ctcataggatgcctc

SEQ ID NO: 613888 - DNA, 15 bp, Homo sapiens
tcataggatgcctcc

SEQ ID NO: 613889 - DNA, 15 bp, Homo sapiens
cataggatgcctcca

SEQ ID NO: 613890 - DNA, 15 bp, Homo sapiens
ataggatgcctccag

SEQ ID NO: 613891 - DNA, 15 bp, Homo sapiens
taggatgcctccagc

SEQ ID NO: 613892 - DNA, 15 bp, Homo sapiens
aggatgcctccagca

SEQ ID NO: 613893 - DNA, 15 bp, Homo sapiens
ggatgcctccagcaa

SEQ ID NO: 613894 - DNA, 15 bp, Homo sapiens
gatgcctccagcaaa

SEQ ID NO: 613895 - DNA, 15 bp, Homo sapiens
atgcctccagcaaaa

SEQ ID NO: 613896 - DNA, 15 bp, Homo sapiens
tgcctccagcaaaag

SEQ ID NO: 613897 - DNA, 15 bp, Homo sapiens
gcctccagcaaaaga

SEQ ID NO: 613898 - DNA, 15 bp, Homo sapiens
cctccagcaaaagat

SEQ ID NO: 613899 - DNA, 15 bp, Homo sapiens
ctccagcaaaagata

SEQ ID NO: 613900 - DNA, 15 bp, Homo sapiens
tccagcaaaagataa

SEQ ID NO: 613901 - DNA, 15 bp, Homo sapiens
ccagcaaaagataac

SEQ ID NO: 613902 - DNA, 15 bp, Homo sapiens
cagcaaaagataacc

SEQ ID NO: 613903 - DNA, 15 bp, Homo sapiens
agcaaaagataacca

SEQ ID NO: 613904 - DNA, 15 bp, Homo sapiens
gcaaaagataaccaa

SEQ ID NO: 613905 - DNA, 15 bp, Homo sapiens
caaaagataaccaag

SEQ ID NO: 613906 - DNA, 15 bp, Homo sapiens
aaaagataaccaaga

SEQ ID NO: 613907 - DNA, 15 bp, Homo sapiens
aaagataaccaagaa

SEQ ID NO: 613908 - DNA, 15 bp, Homo sapiens
aagataaccaagaag

SEQ ID NO: 613909 - DNA, 15 bp, Homo sapiens
agataaccaagaagg

SEQ ID NO: 613910 - DNA, 15 bp, Homo sapiens
gataaccaagaaggt

SEQ ID NO: 613911 - DNA, 15 bp, Homo sapiens
ataaccaagaaggtc

SEQ ID NO: 613912 - DNA, 15 bp, Homo sapiens
taaccaagaaggtct

SEQ ID NO: 613913 - DNA, 15 bp, Homo sapiens
aaccaagaaggtcta

SEQ ID NO: 613914 - DNA, 15 bp, Homo sapiens
accaagaaggtctaa

SEQ ID NO: 613915 - DNA, 15 bp, Homo sapiens
ccaagaaggtctaat

SEQ ID NO: 613916 - DNA, 15 bp, Homo sapiens
caagaaggtctaata

SEQ ID NO: 613917 - DNA, 15 bp, Homo sapiens
aagaaggtctaatac

SEQ ID NO: 613918 - DNA, 15 bp, Homo sapiens
agaaggtctaatacc

SEQ ID NO: 613919 - DNA, 15 bp, Homo sapiens
gaaggtctaatacct

SEQ ID NO: 613920 - DNA, 15 bp, Homo sapiens
aaggtctaatacctt

SEQ ID NO: 613921 - DNA, 15 bp, Homo sapiens
aggtctaataccttt

SEQ ID NO: 613922 - DNA, 15 bp, Homo sapiens
ggtctaatacctttg

SEQ ID NO: 613923 - DNA, 15 bp, Homo sapiens
gtctaatacctttga

SEQ ID NO: 613924 - DNA, 15 bp, Homo sapiens
tctaatacctttgac

SEQ ID NO: 613925 - DNA, 15 bp, Homo sapiens
ctaatacctttgaca

SEQ ID NO: 613926 - DNA, 15 bp, Homo sapiens
taatacctttgacaa

SEQ ID NO: 613927 - DNA, 15 bp, Homo sapiens
aatacctttgacaat

SEQ ID NO: 613928 - DNA, 15 bp, Homo sapiens
atacctttgacaatc

SEQ ID NO: 613929 - DNA, 15 bp, Homo sapiens
tacctttgacaatct

SEQ ID NO: 613930 - DNA, 15 bp, Homo sapiens
acctttgacaatctc

SEQ ID NO: 613931 - DNA, 15 bp, Homo sapiens
cctttgacaatctca

SEQ ID NO: 613932 - DNA, 15 bp, Homo sapiens
ctttgacaatctcag

SEQ ID NO: 613933 - DNA, 15 bp, Homo sapiens
tttgacaatctcagt

SEQ ID NO: 613934 - DNA, 15 bp, Homo sapiens
ttgacaatctcagtt

SEQ ID NO: 613935 - DNA, 15 bp, Homo sapiens
tgacaatctcagttt

SEQ ID NO: 613936 - DNA, 15 bp, Homo sapiens
gacaatctcagttta

SEQ ID NO: 613937 - DNA, 15 bp, Homo sapiens
acaatctcagtttat

SEQ ID NO: 613938 - DNA, 15 bp, Homo sapiens
caatctcagtttatc

SEQ ID NO: 613939 - DNA, 15 bp, Homo sapiens
aatctcagtttatcc

SEQ ID NO: 613940 - DNA, 15 bp, Homo sapiens
atctcagtttatcct

SEQ ID NO: 613941 - DNA, 15 bp, Homo sapiens
tctcagtttatccta

SEQ ID NO: 613942 - DNA, 15 bp, Homo sapiens
ctcagtttatcctat

SEQ ID NO: 613943 - DNA, 15 bp, Homo sapiens
tcagtttatcctata

SEQ ID NO: 613944 - DNA, 15 bp, Homo sapiens
cagtttatcctatag

SEQ ID NO: 613945 - DNA, 15 bp, Homo sapiens
agtttatcctatagt

SEQ ID NO: 613946 - DNA, 15 bp, Homo sapiens
gtttatcctatagtg

SEQ ID NO: 613947 - DNA, 15 bp, Homo sapiens
tttatcctatagtgt

SEQ ID NO: 613948 - DNA, 15 bp, Homo sapiens
ttatcctatagtgta

SEQ ID NO: 613949 - DNA, 15 bp, Homo sapiens
tatcctatagtgtaa

SEQ ID NO: 613950 - DNA, 15 bp, Homo sapiens
atcctatagtgtaat

SEQ ID NO: 613951 - DNA, 15 bp, Homo sapiens
tcctatagtgtaatt

SEQ ID NO: 613952 - DNA, 15 bp, Homo sapiens
cctatagtgtaattg

SEQ ID NO: 613953 - DNA, 15 bp, Homo sapiens
ctatagtgtaattgg

SEQ ID NO: 613954 - DNA, 15 bp, Homo sapiens
tatagtgtaattgga

SEQ ID NO: 613955 - DNA, 15 bp, Homo sapiens
atagtgtaattggat

SEQ ID NO: 613956 - DNA, 15 bp, Homo sapiens
tagtgtaattggata

SEQ ID NO: 613957 - DNA, 15 bp, Homo sapiens
agtgtaattggatag

SEQ ID NO: 613958 - DNA, 15 bp, Homo sapiens
gtgtaattggatagc

SEQ ID NO: 613959 - DNA, 15 bp, Homo sapiens
tgtaattggatagca

SEQ ID NO: 613960 - DNA, 15 bp, Homo sapiens
gtaattggatagcag

SEQ ID NO: 613961 - DNA, 15 bp, Homo sapiens
taattggatagcagt

SEQ ID NO: 613962 - DNA, 15 bp, Homo sapiens
aattggatagcagtt

SEQ ID NO: 613963 - DNA, 15 bp, Homo sapiens
attggatagcagttc

SEQ ID NO: 613964 - DNA, 15 bp, Homo sapiens
ttggatagcagttcc

SEQ ID NO: 613965 - DNA, 15 bp, Homo sapiens
tggatagcagttccc

SEQ ID NO: 613966 - DNA, 15 bp, Homo sapiens
ggatagcagttcccc

SEQ ID NO: 613967 - DNA, 15 bp, Homo sapiens
gatagcagttcccct

SEQ ID NO: 613968 - DNA, 15 bp, Homo sapiens
atagcagttccccta

SEQ ID NO: 613969 - DNA, 15 bp, Homo sapiens
tagcagttcccctag

SEQ ID NO: 613970 - DNA, 15 bp, Homo sapiens
agcagttcccctagc

SEQ ID NO: 613971 - DNA, 15 bp, Homo sapiens
gcagttcccctagca

SEQ ID NO: 613972 - DNA, 15 bp, Homo sapiens
cagttcccctagcaa

SEQ ID NO: 613973 - DNA, 15 bp, Homo sapiens
agttcccctagcaaa

SEQ ID NO: 613974 - DNA, 15 bp, Homo sapiens
gttcccctagcaaaa

SEQ ID NO: 613975 - DNA, 15 bp, Homo sapiens
ttcccctagcaaaag

SEQ ID NO: 613976 - DNA, 15 bp, Homo sapiens
tcccctagcaaaagt

SEQ ID NO: 613977 - DNA, 15 bp, Homo sapiens
cccctagcaaaagtt

SEQ ID NO: 613978 - DNA, 15 bp, Homo sapiens
ccctagcaaaagttg

SEQ ID NO: 613979 - DNA, 15 bp, Homo sapiens
cctagcaaaagttgc

SEQ ID NO: 613980 - DNA, 15 bp, Homo sapiens
ctagcaaaagttgct

SEQ ID NO: 613981 - DNA, 15 bp, Homo sapiens
tagcaaaagttgcta

SEQ ID NO: 613982 - DNA, 15 bp, Homo sapiens
agcaaaagttgctag

SEQ ID NO: 613983 - DNA, 15 bp, Homo sapiens
gcaaaagttgctagt

SEQ ID NO: 613984 - DNA, 15 bp, Homo sapiens
caaaagttgctagtt

SEQ ID NO: 613985 - DNA, 15 bp, Homo sapiens
aaaagttgctagttt

SEQ ID NO: 613986 - DNA, 15 bp, Homo sapiens
aaagttgctagtttg

SEQ ID NO: 613987 - DNA, 15 bp, Homo sapiens
aagttgctagtttgg

SEQ ID NO: 613988 - DNA, 15 bp, Homo sapiens
agttgctagtttggt

SEQ ID NO: 613989 - DNA, 15 bp, Homo sapiens
gttgctagtttggtc

SEQ ID NO: 613990 - DNA, 15 bp, Homo sapiens
ttgctagtttggtcc

SEQ ID NO: 613991 - DNA, 15 bp, Homo sapiens
tgctagtttggtcct

SEQ ID NO: 613992 - DNA, 15 bp, Homo sapiens
gctagtttggtccta

SEQ ID NO: 613993 - DNA, 15 bp, Homo sapiens
ctagtttggtcctat

SEQ ID NO: 613994 - DNA, 15 bp, Homo sapiens
tagtttggtcctatt

SEQ ID NO: 613995 - DNA, 15 bp, Homo sapiens
agtttggtcctattt

SEQ ID NO: 613996 - DNA, 15 bp, Homo sapiens
gtttggtcctatttt

SEQ ID NO: 613997 - DNA, 15 bp, Homo sapiens
tttggtcctattttc

SEQ ID NO: 613998 - DNA, 15 bp, Homo sapiens
ttggtcctattttct

SEQ ID NO: 613999 - DNA, 15 bp, Homo sapiens
tggtcctattttcta

SEQ ID NO: 614000 - DNA, 15 bp, Homo sapiens
ggtcctattttctac

SEQ ID NO: 614001 - DNA, 15 bp, Homo sapiens
gtcctattttctaca

SEQ ID NO: 614002 - DNA, 15 bp, Homo sapiens
tcctattttctacat

SEQ ID NO: 614003 - DNA, 15 bp, Homo sapiens
cctattttctacata

SEQ ID NO: 614004 - DNA, 15 bp, Homo sapiens
ctattttctacatag

SEQ ID NO: 614005 - DNA, 15 bp, Homo sapiens
tattttctacatagc

SEQ ID NO: 614006 - DNA, 15 bp, Homo sapiens
attttctacatagcc

SEQ ID NO: 614007 - DNA, 15 bp, Homo sapiens
ttttctacatagcca

SEQ ID NO: 614008 - DNA, 15 bp, Homo sapiens
tttctacatagccaa

SEQ ID NO: 614009 - DNA, 15 bp, Homo sapiens
ttctacatagccaaa

SEQ ID NO: 614010 - DNA, 15 bp, Homo sapiens
tctacatagccaaag

SEQ ID NO: 614011 - DNA, 15 bp, Homo sapiens
ctacatagccaaagt

SEQ ID NO: 614012 - DNA, 15 bp, Homo sapiens
tacatagccaaagtg

SEQ ID NO: 614013 - DNA, 15 bp, Homo sapiens
acatagccaaagtga

SEQ ID NO: 614014 - DNA, 15 bp, Homo sapiens
catagccaaagtgat

SEQ ID NO: 614015 - DNA, 15 bp, Homo sapiens
atagccaaagtgatt

SEQ ID NO: 614016 - DNA, 15 bp, Homo sapiens
tagccaaagtgattg

SEQ ID NO: 614017 - DNA, 15 bp, Homo sapiens
agccaaagtgattga

SEQ ID NO: 614018 - DNA, 15 bp, Homo sapiens
gccaaagtgattgat

SEQ ID NO: 614019 - DNA, 15 bp, Homo sapiens
ccaaagtgattgatt

SEQ ID NO: 614020 - DNA, 15 bp, Homo sapiens
caaagtgattgattc

SEQ ID NO: 614021 - DNA, 15 bp, Homo sapiens
aaagtgattgattca

SEQ ID NO: 614022 - DNA, 15 bp, Homo sapiens
aagtgattgattcat

SEQ ID NO: 614023 - DNA, 15 bp, Homo sapiens
agtgattgattcatt

SEQ ID NO: 614024 - DNA, 15 bp, Homo sapiens
gtgattgattcattg

SEQ ID NO: 614025 - DNA, 15 bp, Homo sapiens
tgattgattcattgg

SEQ ID NO: 614026 - DNA, 15 bp, Homo sapiens
gattgattcattggt

SEQ ID NO: 614027 - DNA, 15 bp, Homo sapiens
attgattcattggtt

SEQ ID NO: 614028 - DNA, 15 bp, Homo sapiens
ttgattcattggtta

SEQ ID NO: 614029 - DNA, 15 bp, Homo sapiens
tgattcattggttaa

SEQ ID NO: 614030 - DNA, 15 bp, Homo sapiens
gattcattggttaat

SEQ ID NO: 614031 - DNA, 15 bp, Homo sapiens
attcattggttaatg

SEQ ID NO: 614032 - DNA, 15 bp, Homo sapiens
ttcattggttaatgt

SEQ ID NO: 614033 - DNA, 15 bp, Homo sapiens
tcattggttaatgtg

SEQ ID NO: 614034 - DNA, 15 bp, Homo sapiens
cattggttaatgtga

SEQ ID NO: 614035 - DNA, 15 bp, Homo sapiens
attggttaatgtgaa

SEQ ID NO: 614036 - DNA, 15 bp, Homo sapiens
ttggttaatgtgaaa

SEQ ID NO: 614037 - DNA, 15 bp, Homo sapiens
tggttaatgtgaaag

SEQ ID NO: 614038 - DNA, 15 bp, Homo sapiens
ggttaatgtgaaagt

SEQ ID NO: 614039 - DNA, 15 bp, Homo sapiens
gttaatgtgaaagtt

SEQ ID NO: 614040 - DNA, 15 bp, Homo sapiens
ttaatgtgaaagtta

SEQ ID NO: 614041 - DNA, 15 bp, Homo sapiens
taatgtgaaagttac

SEQ ID NO: 614042 - DNA, 15 bp, Homo sapiens
aatgtgaaagttact

SEQ ID NO: 614043 - DNA, 15 bp, Homo sapiens
atgtgaaagttactg

SEQ ID NO: 614044 - DNA, 15 bp, Homo sapiens
tgtgaaagttactga

SEQ ID NO: 614045 - DNA, 15 bp, Homo sapiens
gtgaaagttactgag

SEQ ID NO: 614046 - DNA, 15 bp, Homo sapiens
tgaaagttactgagt

SEQ ID NO: 614047 - DNA, 15 bp, Homo sapiens
gaaagttactgagta

SEQ ID NO: 614048 - DNA, 15 bp, Homo sapiens
aaagttactgagtac

SEQ ID NO: 614049 - DNA, 15 bp, Homo sapiens
aagttactgagtact

SEQ ID NO: 614050 - DNA, 15 bp, Homo sapiens
agttactgagtactg

SEQ ID NO: 614051 - DNA, 15 bp, Homo sapiens
gttactgagtactgc

SEQ ID NO: 614052 - DNA, 15 bp, Homo sapiens
ttactgagtactgcc

SEQ ID NO: 614053 - DNA, 15 bp, Homo sapiens
tactgagtactgcca

SEQ ID NO: 614054 - DNA, 15 bp, Homo sapiens
actgagtactgccag

SEQ ID NO: 614055 - DNA, 15 bp, Homo sapiens
ctgagtactgccagc

SEQ ID NO: 614056 - DNA, 15 bp, Homo sapiens
tgagtactgccagca

SEQ ID NO: 614057 - DNA, 15 bp, Homo sapiens
gagtactgccagcag

SEQ ID NO: 614058 - DNA, 15 bp, Homo sapiens
agtactgccagcagg

SEQ ID NO: 614059 - DNA, 15 bp, Homo sapiens
gtactgccagcaggt

SEQ ID NO: 614060 - DNA, 15 bp, Homo sapiens
tactgccagcaggtt

SEQ ID NO: 614061 - DNA, 15 bp, Homo sapiens
actgccagcaggttc

SEQ ID NO: 614062 - DNA, 15 bp, Homo sapiens
ctgccagcaggttct

SEQ ID NO: 614063 - DNA, 15 bp, Homo sapiens
tgccagcaggttcta

SEQ ID NO: 614064 - DNA, 15 bp, Homo sapiens
gccagcaggttctag

SEQ ID NO: 614065 - DNA, 15 bp, Homo sapiens
ccagcaggttctagg

SEQ ID NO: 614066 - DNA, 15 bp, Homo sapiens
cagcaggttctagga

SEQ ID NO: 614067 - DNA, 15 bp, Homo sapiens
agcaggttctaggaa

SEQ ID NO: 614068 - DNA, 15 bp, Homo sapiens
gcaggttctaggaaa

SEQ ID NO: 614069 - DNA, 15 bp, Homo sapiens
caggttctaggaaat

SEQ ID NO: 614070 - DNA, 15 bp, Homo sapiens
aggttctaggaaata

SEQ ID NO: 614071 - DNA, 15 bp, Homo sapiens
ggttctaggaaatat

SEQ ID NO: 614072 - DNA, 15 bp, Homo sapiens
gttctaggaaatata

SEQ ID NO: 614073 - DNA, 15 bp, Homo sapiens
ttctaggaaatatat

SEQ ID NO: 614074 - DNA, 15 bp, Homo sapiens
tctaggaaatatatt

SEQ ID NO: 614075 - DNA, 15 bp, Homo sapiens
ctaggaaatatattt

SEQ ID NO: 614076 - DNA, 15 bp, Homo sapiens
taggaaatatatttg

SEQ ID NO: 614077 - DNA, 15 bp, Homo sapiens
aggaaatatatttgt

SEQ ID NO: 614078 - DNA, 15 bp, Homo sapiens
ggaaatatatttgtg

SEQ ID NO: 614079 - DNA, 15 bp, Homo sapiens
gaaatatatttgtgt

SEQ ID NO: 614080 - DNA, 15 bp, Homo sapiens
aaatatatttgtgtg

SEQ ID NO: 614081 - DNA, 15 bp, Homo sapiens
aatatatttgtgtga

SEQ ID NO: 614082 - DNA, 15 bp, Homo sapiens
atatatttgtgtgat

SEQ ID NO: 614083 - DNA, 15 bp, Homo sapiens
tatatttgtgtgata

SEQ ID NO: 614084 - DNA, 15 bp, Homo sapiens
atatttgtgtgatat

SEQ ID NO: 614085 - DNA, 15 bp, Homo sapiens
tatttgtgtgatatt

SEQ ID NO: 614086 - DNA, 15 bp, Homo sapiens
atttgtgtgatattc

SEQ ID NO: 614087 - DNA, 15 bp, Homo sapiens
tttgtgtgatattca

SEQ ID NO: 614088 - DNA, 15 bp, Homo sapiens
ttgtgtgatattcat

SEQ ID NO: 614089 - DNA, 15 bp, Homo sapiens
tgtgtgatattcatg

SEQ ID NO: 614090 - DNA, 15 bp, Homo sapiens
gtgtgatattcatgg

SEQ ID NO: 614091 - DNA, 15 bp, Homo sapiens
tgtgatattcatgga

SEQ ID NO: 614092 - DNA, 15 bp, Homo sapiens
gtgatattcatggat

SEQ ID NO: 614093 - DNA, 15 bp, Homo sapiens
tgatattcatggatg

SEQ ID NO: 614094 - DNA, 15 bp, Homo sapiens
gatattcatggatgg

SEQ ID NO: 614095 - DNA, 15 bp, Homo sapiens
atattcatggatggg

SEQ ID NO: 614096 - DNA, 15 bp, Homo sapiens
tattcatggatgggg

SEQ ID NO: 614097 - DNA, 15 bp, Homo sapiens
attcatggatgggga

SEQ ID NO: 614098 - DNA, 15 bp, Homo sapiens
ttcatggatggggag

SEQ ID NO: 614099 - DNA, 15 bp, Homo sapiens
tcatggatggggagg

SEQ ID NO: 614100 - DNA, 15 bp, Homo sapiens
catggatggggagga

SEQ ID NO: 614101 - DNA, 15 bp, Homo sapiens
atggatggggaggat

SEQ ID NO: 614102 - DNA, 15 bp, Homo sapiens
tggatggggaggatc

SEQ ID NO: 614103 - DNA, 15 bp, Homo sapiens
ggatggggaggatca

SEQ ID NO: 614104 - DNA, 15 bp, Homo sapiens
gatggggaggatcaa

SEQ ID NO: 614105 - DNA, 15 bp, Homo sapiens
atggggaggatcaat

SEQ ID NO: 614106 - DNA, 15 bp, Homo sapiens
tggggaggatcaatc

SEQ ID NO: 614107 - DNA, 15 bp, Homo sapiens
ggggaggatcaatcc

SEQ ID NO: 614108 - DNA, 15 bp, Homo sapiens
gggaggatcaatcca

SEQ ID NO: 614109 - DNA, 15 bp, Homo sapiens
ggaggatcaatccac

SEQ ID NO: 614110 - DNA, 15 bp, Homo sapiens
gaggatcaatccact

SEQ ID NO: 614111 - DNA, 15 bp, Homo sapiens
aggatcaatccactt

SEQ ID NO: 614112 - DNA, 15 bp, Homo sapiens
ggatcaatccacttc

SEQ ID NO: 614113 - DNA, 15 bp, Homo sapiens
gatcaatccacttcc

SEQ ID NO: 614114 - DNA, 15 bp, Homo sapiens
atcaatccacttcca

SEQ ID NO: 614115 - DNA, 15 bp, Homo sapiens
tcaatccacttccaa

SEQ ID NO: 614116 - DNA, 15 bp, Homo sapiens
caatccacttccaag

SEQ ID NO: 614117 - DNA, 15 bp, Homo sapiens
aatccacttccaagt

SEQ ID NO: 614118 - DNA, 15 bp, Homo sapiens
atccacttccaagtg

SEQ ID NO: 614119 - DNA, 15 bp, Homo sapiens
tccacttccaagtga

SEQ ID NO: 614120 - DNA, 15 bp, Homo sapiens
ccacttccaagtgat

SEQ ID NO: 614121 - DNA, 15 bp, Homo sapiens
cacttccaagtgatt

SEQ ID NO: 614122 - DNA, 15 bp, Homo sapiens
acttccaagtgattt

SEQ ID NO: 614123 - DNA, 15 bp, Homo sapiens
cttccaagtgatttg

SEQ ID NO: 614124 - DNA, 15 bp, Homo sapiens
ttccaagtgatttgg

SEQ ID NO: 614125 - DNA, 15 bp, Homo sapiens
tccaagtgatttgga

SEQ ID NO: 614126 - DNA, 15 bp, Homo sapiens
ccaagtgatttggat

SEQ ID NO: 614127 - DNA, 15 bp, Homo sapiens
caagtgatttggatt

SEQ ID NO: 614128 - DNA, 15 bp, Homo sapiens
aagtgatttggatta

SEQ ID NO: 614129 - DNA, 15 bp, Homo sapiens
agtgatttggattaa

SEQ ID NO: 614130 - DNA, 15 bp, Homo sapiens
gtgatttggattaat

SEQ ID NO: 614131 - DNA, 15 bp, Homo sapiens
tgatttggattaatt

SEQ ID NO: 614132 - DNA, 15 bp, Homo sapiens
gatttggattaatta

SEQ ID NO: 614133 - DNA, 15 bp, Homo sapiens
atttggattaattac

SEQ ID NO: 614134 - DNA, 15 bp, Homo sapiens
tttggattaattact

SEQ ID NO: 614135 - DNA, 15 bp, Homo sapiens
ttggattaattactg

SEQ ID NO: 614136 - DNA, 15 bp, Homo sapiens
tggattaattactgg

SEQ ID NO: 614137 - DNA, 15 bp, Homo sapiens
ggattaattactggt

SEQ ID NO: 614138 - DNA, 15 bp, Homo sapiens
gattaattactggta

SEQ ID NO: 614139 - DNA, 15 bp, Homo sapiens
attaattactggtat

SEQ ID NO: 614140 - DNA, 15 bp, Homo sapiens
ttaattactggtatt

SEQ ID NO: 614141 - DNA, 15 bp, Homo sapiens
taattactggtattt

SEQ ID NO: 614142 - DNA, 15 bp, Homo sapiens
aattactggtatttt

SEQ ID NO: 614143 - DNA, 15 bp, Homo sapiens
attactggtattttc

SEQ ID NO: 614144 - DNA, 15 bp, Homo sapiens
ttactggtattttca

SEQ ID NO: 614145 - DNA, 15 bp, Homo sapiens
tactggtattttcac

SEQ ID NO: 614146 - DNA, 15 bp, Homo sapiens
actggtattttcacc

SEQ ID NO: 614147 - DNA, 15 bp, Homo sapiens
ctggtattttcacct

SEQ ID NO: 614148 - DNA, 15 bp, Homo sapiens
tggtattttcacctg

SEQ ID NO: 614149 - DNA, 15 bp, Homo sapiens
ggtattttcacctgt

SEQ ID NO: 614150 - DNA, 15 bp, Homo sapiens
gtattttcacctgtg

SEQ ID NO: 614151 - DNA, 15 bp, Homo sapiens
tattttcacctgtgt

SEQ ID NO: 614152 - DNA, 15 bp, Homo sapiens
attttcacctgtgtg

SEQ ID NO: 614153 - DNA, 15 bp, Homo sapiens
ttttcacctgtgtgg

SEQ ID NO: 614154 - DNA, 15 bp, Homo sapiens
tttcacctgtgtggg

SEQ ID NO: 614155 - DNA, 15 bp, Homo sapiens
ttcacctgtgtgggt

SEQ ID NO: 614156 - DNA, 15 bp, Homo sapiens
tcacctgtgtgggta

SEQ ID NO: 614157 - DNA, 15 bp, Homo sapiens
cacctgtgtgggtag

SEQ ID NO: 614158 - DNA, 15 bp, Homo sapiens
acctgtgtgggtagc

SEQ ID NO: 614159 - DNA, 15 bp, Homo sapiens
cctgtgtgggtagca

SEQ ID NO: 614160 - DNA, 15 bp, Homo sapiens
ctgtgtgggtagcaa

SEQ ID NO: 614161 - DNA, 15 bp, Homo sapiens
tgtgtgggtagcaaa

SEQ ID NO: 614162 - DNA, 15 bp, Homo sapiens
gtgtgggtagcaaac

SEQ ID NO: 614163 - DNA, 15 bp, Homo sapiens
tgtgggtagcaaacc

SEQ ID NO: 614164 - DNA, 15 bp, Homo sapiens
gtgggtagcaaacct

SEQ ID NO: 614165 - DNA, 15 bp, Homo sapiens
tgggtagcaaacctc

SEQ ID NO: 614166 - DNA, 15 bp, Homo sapiens
gggtagcaaacctca

SEQ ID NO: 614167 - DNA, 15 bp, Homo sapiens
ggtagcaaacctcag

SEQ ID NO: 614168 - DNA, 15 bp, Homo sapiens
gtagcaaacctcaga

SEQ ID NO: 614169 - DNA, 15 bp, Homo sapiens
tagcaaacctcagaa

SEQ ID NO: 614170 - DNA, 15 bp, Homo sapiens
agcaaacctcagaaa

SEQ ID NO: 614171 - DNA, 15 bp, Homo sapiens
gcaaacctcagaaaa

SEQ ID NO: 614172 - DNA, 15 bp, Homo sapiens
caaacctcagaaaat

SEQ ID NO: 614173 - DNA, 15 bp, Homo sapiens
aaacctcagaaaatc

SEQ ID NO: 614174 - DNA, 15 bp, Homo sapiens
aacctcagaaaatca

SEQ ID NO: 614175 - DNA, 15 bp, Homo sapiens
acctcagaaaatcaa

SEQ ID NO: 614176 - DNA, 15 bp, Homo sapiens
cctcagaaaatcaag

SEQ ID NO: 614177 - DNA, 15 bp, Homo sapiens
ctcagaaaatcaagt

SEQ ID NO: 614178 - DNA, 15 bp, Homo sapiens
tcagaaaatcaagta

SEQ ID NO: 614179 - DNA, 15 bp, Homo sapiens
cagaaaatcaagtat

SEQ ID NO: 614180 - DNA, 15 bp, Homo sapiens
agaaaatcaagtata

SEQ ID NO: 614181 - DNA, 15 bp, Homo sapiens
gaaaatcaagtatag

SEQ ID NO: 614182 - DNA, 15 bp, Homo sapiens
aaaatcaagtataga

SEQ ID NO: 614183 - DNA, 15 bp, Homo sapiens
aaatcaagtatagat

SEQ ID NO: 614184 - DNA, 15 bp, Homo sapiens
aatcaagtatagatg

SEQ ID NO: 614185 - DNA, 15 bp, Homo sapiens
atcaagtatagatga

SEQ ID NO: 614186 - DNA, 15 bp, Homo sapiens
tcaagtatagatgac

SEQ ID NO: 614187 - DNA, 15 bp, Homo sapiens
caagtatagatgacg

SEQ ID NO: 614188 - DNA, 15 bp, Homo sapiens
aagtatagatgacgg

SEQ ID NO: 614189 - DNA, 15 bp, Homo sapiens
agtatagatgacggc

SEQ ID NO: 614190 - DNA, 15 bp, Homo sapiens
gtatagatgacggca

SEQ ID NO: 614191 - DNA, 15 bp, Homo sapiens
tatagatgacggcat

SEQ ID NO: 614192 - DNA, 15 bp, Homo sapiens
atagatgacggcata

SEQ ID NO: 614193 - DNA, 15 bp, Homo sapiens
tagatgacggcatag

SEQ ID NO: 614194 - DNA, 15 bp, Homo sapiens
agatgacggcatagg

SEQ ID NO: 614195 - DNA, 15 bp, Homo sapiens
gatgacggcatagga

SEQ ID NO: 614196 - DNA, 15 bp, Homo sapiens
atgacggcataggac

SEQ ID NO: 614197 - DNA, 15 bp, Homo sapiens
tgacggcataggaca

SEQ ID NO: 614198 - DNA, 15 bp, Homo sapiens
gacggcataggacag

SEQ ID NO: 614199 - DNA, 15 bp, Homo sapiens
acggcataggacagg

SEQ ID NO: 614200 - DNA, 15 bp, Homo sapiens
cggcataggacaggc

SEQ ID NO: 614201 - DNA, 15 bp, Homo sapiens
ggcataggacaggcc

SEQ ID NO: 614202 - DNA, 15 bp, Homo sapiens
gcataggacaggcca

SEQ ID NO: 614203 - DNA, 15 bp, Homo sapiens
cataggacaggccag

SEQ ID NO: 614204 - DNA, 15 bp, Homo sapiens
ataggacaggccagg

SEQ ID NO: 614205 - DNA, 15 bp, Homo sapiens
taggacaggccaggc

SEQ ID NO: 614206 - DNA, 15 bp, Homo sapiens
aggacaggccaggcc

SEQ ID NO: 614207 - DNA, 15 bp, Homo sapiens
ggacaggccaggccc

SEQ ID NO: 614208 - DNA, 15 bp, Homo sapiens
gacaggccaggcccc

SEQ ID NO: 614209 - DNA, 15 bp, Homo sapiens
acaggccaggcccca

SEQ ID NO: 614210 - DNA, 15 bp, Homo sapiens
caggccaggccccag

SEQ ID NO: 614211 - DNA, 15 bp, Homo sapiens
aggccaggccccagg

SEQ ID NO: 614212 - DNA, 15 bp, Homo sapiens
ggccaggccccaggc

SEQ ID NO: 614213 - DNA, 15 bp, Homo sapiens
gccaggccccaggca

SEQ ID NO: 614214 - DNA, 15 bp, Homo sapiens
ccaggccccaggcaa

SEQ ID NO: 614215 - DNA, 15 bp, Homo sapiens
caggccccaggcaaa

SEQ ID NO: 614216 - DNA, 15 bp, Homo sapiens
aggccccaggcaaaa

SEQ ID NO: 614217 - DNA, 15 bp, Homo sapiens
ggccccaggcaaaat

SEQ ID NO: 614218 - DNA, 15 bp, Homo sapiens
gccccaggcaaaatg

SEQ ID NO: 614219 - DNA, 15 bp, Homo sapiens
ccccaggcaaaatgt

SEQ ID NO: 614220 - DNA, 15 bp, Homo sapiens
cccaggcaaaatgtt

SEQ ID NO: 614221 - DNA, 15 bp, Homo sapiens
ccaggcaaaatgttg

SEQ ID NO: 614222 - DNA, 15 bp, Homo sapiens
caggcaaaatgttga

SEQ ID NO: 614223 - DNA, 15 bp, Homo sapiens
aggcaaaatgttgaa

SEQ ID NO: 614224 - DNA, 15 bp, Homo sapiens
ggcaaaatgttgaag

SEQ ID NO: 614225 - DNA, 15 bp, Homo sapiens
gcaaaatgttgaagc

SEQ ID NO: 614226 - DNA, 15 bp, Homo sapiens
caaaatgttgaagct

SEQ ID NO: 614227 - DNA, 15 bp, Homo sapiens
aaaatgttgaagctc

SEQ ID NO: 614228 - DNA, 15 bp, Homo sapiens
aaatgttgaagctcc

SEQ ID NO: 614229 - DNA, 15 bp, Homo sapiens
aatgttgaagctcct

SEQ ID NO: 614230 - DNA, 15 bp, Homo sapiens
atgttgaagctcctc

SEQ ID NO: 614231 - DNA, 15 bp, Homo sapiens
tgttgaagctcctct

SEQ ID NO: 614232 - DNA, 15 bp, Homo sapiens
gttgaagctcctctg

SEQ ID NO: 614233 - DNA, 15 bp, Homo sapiens
ttgaagctcctctgg

SEQ ID NO: 614234 - DNA, 15 bp, Homo sapiens
tgaagctcctctgga

SEQ ID NO: 614235 - DNA, 15 bp, Homo sapiens
gaagctcctctggag

SEQ ID NO: 614236 - DNA, 15 bp, Homo sapiens
aagctcctctggagt

SEQ ID NO: 614237 - DNA, 15 bp, Homo sapiens
agctcctctggagtt

SEQ ID NO: 614238 - DNA, 15 bp, Homo sapiens
gctcctctggagttc

SEQ ID NO: 614239 - DNA, 15 bp, Homo sapiens
ctcctctggagttcc

SEQ ID NO: 614240 - DNA, 15 bp, Homo sapiens
tcctctggagttccc

SEQ ID NO: 614241 - DNA, 15 bp, Homo sapiens
cctctggagttccct

SEQ ID NO: 614242 - DNA, 15 bp, Homo sapiens
ctctggagttccctc

SEQ ID NO: 614243 - DNA, 15 bp, Homo sapiens
tctggagttccctcc

SEQ ID NO: 614244 - DNA, 15 bp, Homo sapiens
ctggagttccctccc

SEQ ID NO: 614245 - DNA, 15 bp, Homo sapiens
tggagttccctccca

SEQ ID NO: 614246 - DNA, 15 bp, Homo sapiens
ggagttccctcccat

SEQ ID NO: 614247 - DNA, 15 bp, Homo sapiens
gagttccctcccatc

SEQ ID NO: 614248 - DNA, 15 bp, Homo sapiens
agttccctcccatct

SEQ ID NO: 614249 - DNA, 15 bp, Homo sapiens
gttccctcccatctc

SEQ ID NO: 614250 - DNA, 15 bp, Homo sapiens
ttccctcccatctcc

SEQ ID NO: 614251 - DNA, 15 bp, Homo sapiens
tccctcccatctccc

SEQ ID NO: 614252 - DNA, 15 bp, Homo sapiens
ccctcccatctccct

SEQ ID NO: 614253 - DNA, 15 bp, Homo sapiens
cctcccatctccctc

SEQ ID NO: 614254 - DNA, 15 bp, Homo sapiens
ctcccatctccctct

SEQ ID NO: 614255 - DNA, 15 bp, Homo sapiens
tcccatctccctctt

SEQ ID NO: 614256 - DNA, 15 bp, Homo sapiens
cccatctccctcttt

SEQ ID NO: 614257 - DNA, 15 bp, Homo sapiens
ccatctccctctttt

SEQ ID NO: 614258 - DNA, 15 bp, Homo sapiens
catctccctcttttg

SEQ ID NO: 614259 - DNA, 15 bp, Homo sapiens
atctccctcttttgt

SEQ ID NO: 614260 - DNA, 15 bp, Homo sapiens
tctccctcttttgtt

SEQ ID NO: 614261 - DNA, 15 bp, Homo sapiens
ctccctcttttgttt

SEQ ID NO: 614262 - DNA, 15 bp, Homo sapiens
tccctcttttgtttt

SEQ ID NO: 614263 - DNA, 15 bp, Homo sapiens
ccctcttttgttttc

SEQ ID NO: 614264 - DNA, 15 bp, Homo sapiens
cctcttttgttttcc

SEQ ID NO: 614265 - DNA, 15 bp, Homo sapiens
ctcttttgttttcca

SEQ ID NO: 614266 - DNA, 15 bp, Homo sapiens
tcttttgttttccat

SEQ ID NO: 614267 - DNA, 15 bp, Homo sapiens
cttttgttttccata

SEQ ID NO: 614268 - DNA, 15 bp, Homo sapiens
ttttgttttccatat

SEQ ID NO: 614269 - DNA, 15 bp, Homo sapiens
tttgttttccatata

SEQ ID NO: 614270 - DNA, 15 bp, Homo sapiens
ttgttttccatatac

SEQ ID NO: 614271 - DNA, 15 bp, Homo sapiens
tgttttccatatacc

SEQ ID NO: 614272 - DNA, 15 bp, Homo sapiens
gttttccatatacct

SEQ ID NO: 614273 - DNA, 15 bp, Homo sapiens
ttttccatatacctg

SEQ ID NO: 614274 - DNA, 15 bp, Homo sapiens
tttccatatacctgg

SEQ ID NO: 614275 - DNA, 15 bp, Homo sapiens
ttccatatacctggt

SEQ ID NO: 614276 - DNA, 15 bp, Homo sapiens
tccatatacctggtt

SEQ ID NO: 614277 - DNA, 15 bp, Homo sapiens
ccatatacctggttt

SEQ ID NO: 614278 - DNA, 15 bp, Homo sapiens
catatacctggttta

SEQ ID NO: 614279 - DNA, 15 bp, Homo sapiens
atatacctggtttat

SEQ ID NO: 614280 - DNA, 15 bp, Homo sapiens
tatacctggtttatc

SEQ ID NO: 614281 - DNA, 15 bp, Homo sapiens
atacctggtttatcc

SEQ ID NO: 614282 - DNA, 15 bp, Homo sapiens
tacctggtttatcca

SEQ ID NO: 614283 - DNA, 15 bp, Homo sapiens
acctggtttatccag

SEQ ID NO: 614284 - DNA, 15 bp, Homo sapiens
cctggtttatccagg

SEQ ID NO: 614285 - DNA, 15 bp, Homo sapiens
ctggtttatccaggg

SEQ ID NO: 614286 - DNA, 15 bp, Homo sapiens
tggtttatccagggc

SEQ ID NO: 614287 - DNA, 15 bp, Homo sapiens
ggtttatccagggcc

SEQ ID NO: 614288 - DNA, 15 bp, Homo sapiens
gtttatccagggccc

SEQ ID NO: 614289 - DNA, 15 bp, Homo sapiens
tttatccagggccct

SEQ ID NO: 614290 - DNA, 15 bp, Homo sapiens
ttatccagggccctg

SEQ ID NO: 614291 - DNA, 15 bp, Homo sapiens
tatccagggccctgg

SEQ ID NO: 614292 - DNA, 15 bp, Homo sapiens
atccagggccctgga

SEQ ID NO: 614293 - DNA, 15 bp, Homo sapiens
tccagggccctggag

SEQ ID NO: 614294 - DNA, 15 bp, Homo sapiens
ccagggccctggaga

SEQ ID NO: 614295 - DNA, 15 bp, Homo sapiens
cagggccctggagat

SEQ ID NO: 614296 - DNA, 15 bp, Homo sapiens
agggccctggagatg

SEQ ID NO: 614297 - DNA, 15 bp, Homo sapiens
gggccctggagatgc

SEQ ID NO: 614298 - DNA, 15 bp, Homo sapiens
ggccctggagatgct

SEQ ID NO: 614299 - DNA, 15 bp, Homo sapiens
gccctggagatgctc

SEQ ID NO: 614300 - DNA, 15 bp, Homo sapiens
ccctggagatgctcc

SEQ ID NO: 614301 - DNA, 15 bp, Homo sapiens
cctggagatgctcca

SEQ ID NO: 614302 - DNA, 15 bp, Homo sapiens
ctggagatgctccaa

SEQ ID NO: 614303 - DNA, 15 bp, Homo sapiens
tggagatgctccaag

SEQ ID NO: 614304 - DNA, 15 bp, Homo sapiens
ggagatgctccaaga

SEQ ID NO: 614305 - DNA, 15 bp, Homo sapiens
gagatgctccaagac

SEQ ID NO: 614306 - DNA, 15 bp, Homo sapiens
agatgctccaagacc

SEQ ID NO: 614307 - DNA, 15 bp, Homo sapiens
gatgctccaagaccc

SEQ ID NO: 614308 - DNA, 15 bp, Homo sapiens
atgctccaagacccc

SEQ ID NO: 614309 - DNA, 15 bp, Homo sapiens
tgctccaagaccccc

SEQ ID NO: 614310 - DNA, 15 bp, Homo sapiens
gctccaagaccccct

SEQ ID NO: 614311 - DNA, 15 bp, Homo sapiens
ctccaagacccccta

SEQ ID NO: 614312 - DNA, 15 bp, Homo sapiens
tccaagaccccctac

SEQ ID NO: 614313 - DNA, 15 bp, Homo sapiens
ccaagaccccctacc

SEQ ID NO: 614314 - DNA, 15 bp, Homo sapiens
caagaccccctaccc

SEQ ID NO: 614315 - DNA, 15 bp, Homo sapiens
aagaccccctaccca

SEQ ID NO: 614316 - DNA, 15 bp, Homo sapiens
agaccccctacccag

SEQ ID NO: 614317 - DNA, 15 bp, Homo sapiens
gaccccctacccagg

SEQ ID NO: 614318 - DNA, 15 bp, Homo sapiens
accccctacccaggt

SEQ ID NO: 614319 - DNA, 15 bp, Homo sapiens
ccccctacccaggtc

SEQ ID NO: 614320 - DNA, 15 bp, Homo sapiens
cccctacccaggtct

SEQ ID NO: 614321 - DNA, 15 bp, Homo sapiens
ccctacccaggtctt

SEQ ID NO: 614322 - DNA, 15 bp, Homo sapiens
cctacccaggtcttc

SEQ ID NO: 614323 - DNA, 15 bp, Homo sapiens
ctacccaggtcttcc

SEQ ID NO: 614324 - DNA, 15 bp, Homo sapiens
tacccaggtcttcct

SEQ ID NO: 614325 - DNA, 15 bp, Homo sapiens
acccaggtcttcctc

SEQ ID NO: 614326 - DNA, 15 bp, Homo sapiens
cccaggtcttcctcc

SEQ ID NO: 614327 - DNA, 15 bp, Homo sapiens
ccaggtcttcctccc

SEQ ID NO: 614328 - DNA, 15 bp, Homo sapiens
caggtcttcctccct

SEQ ID NO: 614329 - DNA, 15 bp, Homo sapiens
aggtcttcctccctt

SEQ ID NO: 614330 - DNA, 15 bp, Homo sapiens
ggtcttcctcccttg

SEQ ID NO: 614331 - DNA, 15 bp, Homo sapiens
gtcttcctcccttgt

SEQ ID NO: 614332 - DNA, 15 bp, Homo sapiens
tcttcctcccttgtc

SEQ ID NO: 614333 - DNA, 15 bp, Homo sapiens
cttcctcccttgtcc

SEQ ID NO: 614334 - DNA, 15 bp, Homo sapiens
ttcctcccttgtccc

SEQ ID NO: 614335 - DNA, 15 bp, Homo sapiens
tcctcccttgtccca

SEQ ID NO: 614336 - DNA, 15 bp, Homo sapiens
cctcccttgtcccag

SEQ ID NO: 614337 - DNA, 15 bp, Homo sapiens
ctcccttgtcccagc

SEQ ID NO: 614338 - DNA, 15 bp, Homo sapiens
tcccttgtcccagct

SEQ ID NO: 614339 - DNA, 15 bp, Homo sapiens
cccttgtcccagcta

SEQ ID NO: 614340 - DNA, 15 bp, Homo sapiens
ccttgtcccagctat

SEQ ID NO: 614341 - DNA, 15 bp, Homo sapiens
cttgtcccagctata

SEQ ID NO: 614342 - DNA, 15 bp, Homo sapiens
ttgtcccagctatat

SEQ ID NO: 614343 - DNA, 15 bp, Homo sapiens
tgtcccagctatatt

SEQ ID NO: 614344 - DNA, 15 bp, Homo sapiens
gtcccagctatattt

SEQ ID NO: 614345 - DNA, 15 bp, Homo sapiens
tcccagctatatttc

SEQ ID NO: 614346 - DNA, 15 bp, Homo sapiens
cccagctatatttct

SEQ ID NO: 614347 - DNA, 15 bp, Homo sapiens
ccagctatatttctc

SEQ ID NO: 614348 - DNA, 15 bp, Homo sapiens
cagctatatttctcc

SEQ ID NO: 614349 - DNA, 15 bp, Homo sapiens
agctatatttctcca

SEQ ID NO: 614350 - DNA, 15 bp, Homo sapiens
gctatatttctccat

SEQ ID NO: 614351 - DNA, 15 bp, Homo sapiens
ctatatttctccata

SEQ ID NO: 614352 - DNA, 15 bp, Homo sapiens
tatatttctccatat

SEQ ID NO: 614353 - DNA, 15 bp, Homo sapiens
atatttctccatatt

SEQ ID NO: 614354 - DNA, 15 bp, Homo sapiens
tatttctccatatta

SEQ ID NO: 614355 - DNA, 15 bp, Homo sapiens
atttctccatattac

SEQ ID NO: 614356 - DNA, 15 bp, Homo sapiens
tttctccatattacc

SEQ ID NO: 614357 - DNA, 15 bp, Homo sapiens
ttctccatattacca

SEQ ID NO: 614358 - DNA, 15 bp, Homo sapiens
tctccatattaccac

SEQ ID NO: 614359 - DNA, 15 bp, Homo sapiens
ctccatattaccact

SEQ ID NO: 614360 - DNA, 15 bp, Homo sapiens
tccatattaccactc

SEQ ID NO: 614361 - DNA, 15 bp, Homo sapiens
ccatattaccactct

SEQ ID NO: 614362 - DNA, 15 bp, Homo sapiens
catattaccactctt

SEQ ID NO: 614363 - DNA, 15 bp, Homo sapiens
atattaccactcttc

SEQ ID NO: 614364 - DNA, 15 bp, Homo sapiens
tattaccactcttct

SEQ ID NO: 614365 - DNA, 15 bp, Homo sapiens
attaccactcttctc

SEQ ID NO: 614366 - DNA, 15 bp, Homo sapiens
ttaccactcttctca

SEQ ID NO: 614367 - DNA, 15 bp, Homo sapiens
taccactcttctcac

SEQ ID NO: 614368 - DNA, 15 bp, Homo sapiens
accactcttctcacc

SEQ ID NO: 614369 - DNA, 15 bp, Homo sapiens
ccactcttctcaccg

SEQ ID NO: 614370 - DNA, 15 bp, Homo sapiens
cactcttctcaccga

SEQ ID NO: 614371 - DNA, 15 bp, Homo sapiens
actcttctcaccgag

SEQ ID NO: 614372 - DNA, 15 bp, Homo sapiens
ctcttctcaccgagg

SEQ ID NO: 614373 - DNA, 15 bp, Homo sapiens
tcttctcaccgagga

SEQ ID NO: 614374 - DNA, 15 bp, Homo sapiens
cttctcaccgaggat

SEQ ID NO: 614375 - DNA, 15 bp, Homo sapiens
ttctcaccgaggatt

SEQ ID NO: 614376 - DNA, 15 bp, Homo sapiens
tctcaccgaggattt

SEQ ID NO: 614377 - DNA, 15 bp, Homo sapiens
ctcaccgaggatttg

SEQ ID NO: 614378 - DNA, 15 bp, Homo sapiens
tcaccgaggatttgc

SEQ ID NO: 614379 - DNA, 15 bp, Homo sapiens
caccgaggatttgct

SEQ ID NO: 614380 - DNA, 15 bp, Homo sapiens
accgaggatttgctt

SEQ ID NO: 614381 - DNA, 15 bp, Homo sapiens
ccgaggatttgctta

SEQ ID NO: 614382 - DNA, 15 bp, Homo sapiens
cgaggatttgcttac

SEQ ID NO: 614383 - DNA, 15 bp, Homo sapiens
gaggatttgcttact

SEQ ID NO: 614384 - DNA, 15 bp, Homo sapiens
aggatttgcttactt

SEQ ID NO: 614385 - DNA, 15 bp, Homo sapiens
ggatttgcttactta

SEQ ID NO: 614386 - DNA, 15 bp, Homo sapiens
gatttgcttacttaa

SEQ ID NO: 614387 - DNA, 15 bp, Homo sapiens
atttgcttacttaac

SEQ ID NO: 614388 - DNA, 15 bp, Homo sapiens
tttgcttacttaaca

SEQ ID NO: 614389 - DNA, 15 bp, Homo sapiens
ttgcttacttaacac

SEQ ID NO: 614390 - DNA, 15 bp, Homo sapiens
tgcttacttaacaca

SEQ ID NO: 614391 - DNA, 15 bp, Homo sapiens
gcttacttaacacat

SEQ ID NO: 614392 - DNA, 15 bp, Homo sapiens
cttacttaacacata

SEQ ID NO: 614393 - DNA, 15 bp, Homo sapiens
ttacttaacacataa

SEQ ID NO: 614394 - DNA, 15 bp, Homo sapiens
tacttaacacataat

SEQ ID NO: 614395 - DNA, 15 bp, Homo sapiens
acttaacacataata

SEQ ID NO: 614396 - DNA, 15 bp, Homo sapiens
cttaacacataataa

SEQ ID NO: 614397 - DNA, 15 bp, Homo sapiens
ttaacacataataaa

SEQ ID NO: 614398 - DNA, 15 bp, Homo sapiens
taacacataataaat

SEQ ID NO: 614399 - DNA, 15 bp, Homo sapiens
aacacataataaata

SEQ ID NO: 614400 - DNA, 15 bp, Homo sapiens
acacataataaatac

SEQ ID NO: 614401 - DNA, 15 bp, Homo sapiens
cacataataaatact

SEQ ID NO: 614402 - DNA, 15 bp, Homo sapiens
acataataaatacta

SEQ ID NO: 614403 - DNA, 15 bp, Homo sapiens
cataataaatactat

SEQ ID NO: 614404 - DNA, 15 bp, Homo sapiens
ataataaatactatt

SEQ ID NO: 614405 - DNA, 15 bp, Homo sapiens
taataaatactatta

SEQ ID NO: 614406 - DNA, 15 bp, Homo sapiens
aataaatactattaa

SEQ ID NO: 614407 - DNA, 15 bp, Homo sapiens
ataaatactattaaa

SEQ ID NO: 614408 - DNA, 15 bp, Homo sapiens
taaatactattaaaa

SEQ ID NO: 614409 - DNA, 15 bp, Homo sapiens
aaatactattaaaag

SEQ ID NO: 614410 - DNA, 15 bp, Homo sapiens
aatactattaaaaga

SEQ ID NO: 614411 - DNA, 15 bp, Homo sapiens
atactattaaaagag

SEQ ID NO: 614412 - DNA, 15 bp, Homo sapiens
tactattaaaagaga

SEQ ID NO: 614413 - DNA, 15 bp, Homo sapiens
actattaaaagagaa

SEQ ID NO: 614414 - DNA, 15 bp, Homo sapiens
ctattaaaagagaaa

SEQ ID NO: 614415 - DNA, 15 bp, Homo sapiens
tattaaaagagaaac

SEQ ID NO: 614416 - DNA, 15 bp, Homo sapiens
attaaaagagaaact

SEQ ID NO: 614417 - DNA, 15 bp, Homo sapiens
ttaaaagagaaactt

SEQ ID NO: 614418 - DNA, 15 bp, Homo sapiens
taaaagagaaactta

SEQ ID NO: 614419 - DNA, 15 bp, Homo sapiens
aaaagagaaacttag

SEQ ID NO: 614420 - DNA, 15 bp, Homo sapiens
aaagagaaacttagg

SEQ ID NO: 614421 - DNA, 15 bp, Homo sapiens
aagagaaacttaggc

SEQ ID NO: 614422 - DNA, 15 bp, Homo sapiens
agagaaacttaggca

SEQ ID NO: 614423 - DNA, 15 bp, Homo sapiens
gagaaacttaggcac

SEQ ID NO: 614424 - DNA, 15 bp, Homo sapiens
agaaacttaggcaca

SEQ ID NO: 614425 - DNA, 15 bp, Homo sapiens
gaaacttaggcacat

SEQ ID NO: 614426 - DNA, 15 bp, Homo sapiens
aaacttaggcacatt

SEQ ID NO: 614427 - DNA, 15 bp, Homo sapiens
aacttaggcacatta

SEQ ID NO: 614428 - DNA, 15 bp, Homo sapiens
acttaggcacattaa

SEQ ID NO: 614429 - DNA, 15 bp, Homo sapiens
cttaggcacattaaa

SEQ ID NO: 614430 - DNA, 15 bp, Homo sapiens
ttaggcacattaaaa

SEQ ID NO: 614431 - DNA, 15 bp, Homo sapiens
taggcacattaaaat

SEQ ID NO: 614432 - DNA, 15 bp, Homo sapiens
aggcacattaaaatg

SEQ ID NO: 614433 - DNA, 15 bp, Homo sapiens
ggcacattaaaatgt

SEQ ID NO: 614434 - DNA, 15 bp, Homo sapiens
gcacattaaaatgtt

SEQ ID NO: 614435 - DNA, 15 bp, Homo sapiens
cacattaaaatgtta

SEQ ID NO: 614436 - DNA, 15 bp, Homo sapiens
acattaaaatgttag

SEQ ID NO: 614437 - DNA, 15 bp, Homo sapiens
cattaaaatgttaga

SEQ ID NO: 614438 - DNA, 15 bp, Homo sapiens
attaaaatgttagag

SEQ ID NO: 614439 - DNA, 15 bp, Homo sapiens
ttaaaatgttagagt

SEQ ID NO: 614440 - DNA, 15 bp, Homo sapiens
taaaatgttagagtt

SEQ ID NO: 614441 - DNA, 15 bp, Homo sapiens
aaaatgttagagttg

SEQ ID NO: 614442 - DNA, 15 bp, Homo sapiens
aaatgttagagttga

SEQ ID NO: 614443 - DNA, 15 bp, Homo sapiens
aatgttagagttgat

SEQ ID NO: 614444 - DNA, 15 bp, Homo sapiens
atgttagagttgatt

SEQ ID NO: 614445 - DNA, 15 bp, Homo sapiens
tgttagagttgattc

SEQ ID NO: 614446 - DNA, 15 bp, Homo sapiens
gttagagttgattcc

SEQ ID NO: 614447 - DNA, 15 bp, Homo sapiens
ttagagttgattcca

SEQ ID NO: 614448 - DNA, 15 bp, Homo sapiens
tagagttgattccag

SEQ ID NO: 614449 - DNA, 15 bp, Homo sapiens
agagttgattccagc

SEQ ID NO: 614450 - DNA, 15 bp, Homo sapiens
gagttgattccagca

SEQ ID NO: 614451 - DNA, 15 bp, Homo sapiens
agttgattccagcaa

SEQ ID NO: 614452 - DNA, 15 bp, Homo sapiens
gttgattccagcaaa

SEQ ID NO: 614453 - DNA, 15 bp, Homo sapiens
ttgattccagcaaac

SEQ ID NO: 614454 - DNA, 15 bp, Homo sapiens
tgattccagcaaaca

SEQ ID NO: 614455 - DNA, 15 bp, Homo sapiens
gattccagcaaacag

SEQ ID NO: 614456 - DNA, 15 bp, Homo sapiens
attccagcaaacagt

SEQ ID NO: 614457 - DNA, 15 bp, Homo sapiens
ttccagcaaacagtg

SEQ ID NO: 614458 - DNA, 15 bp, Homo sapiens
tccagcaaacagtga

SEQ ID NO: 614459 - DNA, 15 bp, Homo sapiens
ccagcaaacagtgat

SEQ ID NO: 614460 - DNA, 15 bp, Homo sapiens
cagcaaacagtgatt

SEQ ID NO: 614461 - DNA, 15 bp, Homo sapiens
agcaaacagtgattc

SEQ ID NO: 614462 - DNA, 15 bp, Homo sapiens
gcaaacagtgattca

SEQ ID NO: 614463 - DNA, 15 bp, Homo sapiens
caaacagtgattcac

SEQ ID NO: 614464 - DNA, 15 bp, Homo sapiens
aaacagtgattcaca

SEQ ID NO: 614465 - DNA, 15 bp, Homo sapiens
aacagtgattcacag

SEQ ID NO: 614466 - DNA, 15 bp, Homo sapiens
acagtgattcacagg

SEQ ID NO: 614467 - DNA, 15 bp, Homo sapiens
cagtgattcacagga

SEQ ID NO: 614468 - DNA, 15 bp, Homo sapiens
agtgattcacaggag

SEQ ID NO: 614469 - DNA, 15 bp, Homo sapiens
gtgattcacaggagg

SEQ ID NO: 614470 - DNA, 15 bp, Homo sapiens
tgattcacaggaggc

SEQ ID NO: 614471 - DNA, 15 bp, Homo sapiens
gattcacaggaggct

SEQ ID NO: 614472 - DNA, 15 bp, Homo sapiens
attcacaggaggctc

SEQ ID NO: 614473 - DNA, 15 bp, Homo sapiens
ttcacaggaggctcc

SEQ ID NO: 614474 - DNA, 15 bp, Homo sapiens
tcacaggaggctcca

SEQ ID NO: 614475 - DNA, 15 bp, Homo sapiens
cacaggaggctccag

SEQ ID NO: 614476 - DNA, 15 bp, Homo sapiens
acaggaggctccaga

SEQ ID NO: 614477 - DNA, 15 bp, Homo sapiens
caggaggctccagat

SEQ ID NO: 614478 - DNA, 15 bp, Homo sapiens
aggaggctccagatc

SEQ ID NO: 614479 - DNA, 15 bp, Homo sapiens
ggaggctccagatca

SEQ ID NO: 614480 - DNA, 15 bp, Homo sapiens
gaggctccagatcac

SEQ ID NO: 614481 - DNA, 15 bp, Homo sapiens
aggctccagatcaca

SEQ ID NO: 614482 - DNA, 15 bp, Homo sapiens
ggctccagatcacaa

SEQ ID NO: 614483 - DNA, 15 bp, Homo sapiens
gctccagatcacaag

SEQ ID NO: 614484 - DNA, 15 bp, Homo sapiens
ctccagatcacaagt

SEQ ID NO: 614485 - DNA, 15 bp, Homo sapiens
tccagatcacaagtg

SEQ ID NO: 614486 - DNA, 15 bp, Homo sapiens
ccagatcacaagtgg

SEQ ID NO: 614487 - DNA, 15 bp, Homo sapiens
cagatcacaagtggt

SEQ ID NO: 614488 - DNA, 15 bp, Homo sapiens
agatcacaagtggtt

SEQ ID NO: 614489 - DNA, 15 bp, Homo sapiens
gatcacaagtggttc

SEQ ID NO: 614490 - DNA, 15 bp, Homo sapiens
atcacaagtggttca

SEQ ID NO: 614491 - DNA, 15 bp, Homo sapiens
tcacaagtggttcag

SEQ ID NO: 614492 - DNA, 15 bp, Homo sapiens
cacaagtggttcagg

SEQ ID NO: 614493 - DNA, 15 bp, Homo sapiens
acaagtggttcaggg

SEQ ID NO: 614494 - DNA, 15 bp, Homo sapiens
caagtggttcagggc

SEQ ID NO: 614495 - DNA, 15 bp, Homo sapiens
aagtggttcagggcc

SEQ ID NO: 614496 - DNA, 15 bp, Homo sapiens
agtggttcagggccc

SEQ ID NO: 614497 - DNA, 15 bp, Homo sapiens
gtggttcagggcccc

SEQ ID NO: 614498 - DNA, 15 bp, Homo sapiens
tggttcagggcccca

SEQ ID NO: 614499 - DNA, 15 bp, Homo sapiens
ggttcagggccccac

SEQ ID NO: 614500 - DNA, 15 bp, Homo sapiens
gttcagggccccact

SEQ ID NO: 614501 - DNA, 15 bp, Homo sapiens
ttcagggccccactg

SEQ ID NO: 614502 - DNA, 15 bp, Homo sapiens
tcagggccccactga

SEQ ID NO: 614503 - DNA, 15 bp, Homo sapiens
cagggccccactgag

SEQ ID NO: 614504 - DNA, 15 bp, Homo sapiens
agggccccactgagg

SEQ ID NO: 614505 - DNA, 15 bp, Homo sapiens
gggccccactgaggg

SEQ ID NO: 614506 - DNA, 15 bp, Homo sapiens
ggccccactgagggg

SEQ ID NO: 614507 - DNA, 15 bp, Homo sapiens
gccccactgaggggt

SEQ ID NO: 614508 - DNA, 15 bp, Homo sapiens
ccccactgaggggta

SEQ ID NO: 614509 - DNA, 15 bp, Homo sapiens
cccactgaggggtag

SEQ ID NO: 614510 - DNA, 15 bp, Homo sapiens
ccactgaggggtagg

SEQ ID NO: 614511 - DNA, 15 bp, Homo sapiens
cactgaggggtaggg

SEQ ID NO: 614512 - DNA, 15 bp, Homo sapiens
actgaggggtaggga

SEQ ID NO: 614513 - DNA, 15 bp, Homo sapiens
ctgaggggtagggaa

SEQ ID NO: 614514 - DNA, 15 bp, Homo sapiens
tgaggggtagggaag

SEQ ID NO: 614515 - DNA, 15 bp, Homo sapiens
gaggggtagggaagc

SEQ ID NO: 614516 - DNA, 15 bp, Homo sapiens
aggggtagggaagca

SEQ ID NO: 614517 - DNA, 15 bp, Homo sapiens
ggggtagggaagcaa

SEQ ID NO: 614518 - DNA, 15 bp, Homo sapiens
gggtagggaagcaag

SEQ ID NO: 614519 - DNA, 15 bp, Homo sapiens
ggtagggaagcaaga

SEQ ID NO: 614520 - DNA, 15 bp, Homo sapiens
gtagggaagcaagac

SEQ ID NO: 614521 - DNA, 15 bp, Homo sapiens
tagggaagcaagaca

SEQ ID NO: 614522 - DNA, 15 bp, Homo sapiens
agggaagcaagacaa

SEQ ID NO: 614523 - DNA, 15 bp, Homo sapiens
gggaagcaagacaaa

SEQ ID NO: 614524 - DNA, 15 bp, Homo sapiens
ggaagcaagacaaag

SEQ ID NO: 614525 - DNA, 15 bp, Homo sapiens
gaagcaagacaaaga

SEQ ID NO: 614526 - DNA, 15 bp, Homo sapiens
aagcaagacaaagaa

SEQ ID NO: 614527 - DNA, 15 bp, Homo sapiens
agcaagacaaagaaa

SEQ ID NO: 614528 - DNA, 15 bp, Homo sapiens
gcaagacaaagaaaa

SEQ ID NO: 614529 - DNA, 15 bp, Homo sapiens
caagacaaagaaaaa

SEQ ID NO: 614530 - DNA, 15 bp, Homo sapiens
aagacaaagaaaaac

SEQ ID NO: 614531 - DNA, 15 bp, Homo sapiens
agacaaagaaaaaca

SEQ ID NO: 614532 - DNA, 15 bp, Homo sapiens
gacaaagaaaaacaa

SEQ ID NO: 614533 - DNA, 15 bp, Homo sapiens
acaaagaaaaacaaa

SEQ ID NO: 614534 - DNA, 15 bp, Homo sapiens
caaagaaaaacaaag

SEQ ID NO: 614535 - DNA, 15 bp, Homo sapiens
aaagaaaaacaaagc

SEQ ID NO: 614536 - DNA, 15 bp, Homo sapiens
aagaaaaacaaagca

SEQ ID NO: 614537 - DNA, 15 bp, Homo sapiens
agaaaaacaaagcaa

SEQ ID NO: 614538 - DNA, 15 bp, Homo sapiens
gaaaaacaaagcaaa

SEQ ID NO: 614539 - DNA, 15 bp, Homo sapiens
aaaaacaaagcaaat

SEQ ID NO: 614540 - DNA, 15 bp, Homo sapiens
aaaacaaagcaaata

SEQ ID NO: 614541 - DNA, 15 bp, Homo sapiens
aaacaaagcaaatat

SEQ ID NO: 614542 - DNA, 15 bp, Homo sapiens
aacaaagcaaatatt

SEQ ID NO: 614543 - DNA, 15 bp, Homo sapiens
acaaagcaaatattt

SEQ ID NO: 614544 - DNA, 15 bp, Homo sapiens
caaagcaaatatttg

SEQ ID NO: 614545 - DNA, 15 bp, Homo sapiens
aaagcaaatatttga

SEQ ID NO: 614546 - DNA, 15 bp, Homo sapiens
aagcaaatatttgat

SEQ ID NO: 614547 - DNA, 15 bp, Homo sapiens
agcaaatatttgatt

SEQ ID NO: 614548 - DNA, 15 bp, Homo sapiens
gcaaatatttgattg

SEQ ID NO: 614549 - DNA, 15 bp, Homo sapiens
caaatatttgattgg

SEQ ID NO: 614550 - DNA, 15 bp, Homo sapiens
aaatatttgattggt

SEQ ID NO: 614551 - DNA, 15 bp, Homo sapiens
aatatttgattggtt

SEQ ID NO: 614552 - DNA, 15 bp, Homo sapiens
atatttgattggttc

SEQ ID NO: 614553 - DNA, 15 bp, Homo sapiens
tatttgattggttca

SEQ ID NO: 614554 - DNA, 15 bp, Homo sapiens
atttgattggttcaa

SEQ ID NO: 614555 - DNA, 15 bp, Homo sapiens
tttgattggttcaag

SEQ ID NO: 614556 - DNA, 15 bp, Homo sapiens
ttgattggttcaagt

SEQ ID NO: 614557 - DNA, 15 bp, Homo sapiens
tgattggttcaagtg

SEQ ID NO: 614558 - DNA, 15 bp, Homo sapiens
gattggttcaagtgg

SEQ ID NO: 614559 - DNA, 15 bp, Homo sapiens
attggttcaagtgga

SEQ ID NO: 614560 - DNA, 15 bp, Homo sapiens
ttggttcaagtggaa

SEQ ID NO: 614561 - DNA, 15 bp, Homo sapiens
tggttcaagtggaaa

SEQ ID NO: 614562 - DNA, 15 bp, Homo sapiens
ggttcaagtggaaag

SEQ ID NO: 614563 - DNA, 15 bp, Homo sapiens
gttcaagtggaaagt

SEQ ID NO: 614564 - DNA, 15 bp, Homo sapiens
ttcaagtggaaagtc

SEQ ID NO: 614565 - DNA, 15 bp, Homo sapiens
tcaagtggaaagtcc

SEQ ID NO: 614566 - DNA, 15 bp, Homo sapiens
caagtggaaagtccc

SEQ ID NO: 614567 - DNA, 15 bp, Homo sapiens
aagtggaaagtccct

SEQ ID NO: 614568 - DNA, 15 bp, Homo sapiens
agtggaaagtccctg

SEQ ID NO: 614569 - DNA, 15 bp, Homo sapiens
gtggaaagtccctga

SEQ ID NO: 614570 - DNA, 15 bp, Homo sapiens
tggaaagtccctgat

SEQ ID NO: 614571 - DNA, 15 bp, Homo sapiens
ggaaagtccctgatt

SEQ ID NO: 614572 - DNA, 15 bp, Homo sapiens
gaaagtccctgatta

SEQ ID NO: 614573 - DNA, 15 bp, Homo sapiens
aaagtccctgattac

SEQ ID NO: 614574 - DNA, 15 bp, Homo sapiens
aagtccctgattaca

SEQ ID NO: 614575 - DNA, 15 bp, Homo sapiens
agtccctgattacag

SEQ ID NO: 614576 - DNA, 15 bp, Homo sapiens
gtccctgattacagg

SEQ ID NO: 614577 - DNA, 15 bp, Homo sapiens
tccctgattacaggt

SEQ ID NO: 614578 - DNA, 15 bp, Homo sapiens
ccctgattacaggtt

SEQ ID NO: 614579 - DNA, 15 bp, Homo sapiens
cctgattacaggtta

SEQ ID NO: 614580 - DNA, 15 bp, Homo sapiens
ctgattacaggttag

SEQ ID NO: 614581 - DNA, 15 bp, Homo sapiens
tgattacaggttagt

SEQ ID NO: 614582 - DNA, 15 bp, Homo sapiens
gattacaggttagtg

SEQ ID NO: 614583 - DNA, 15 bp, Homo sapiens
attacaggttagtgg

SEQ ID NO: 614584 - DNA, 15 bp, Homo sapiens
ttacaggttagtggg

SEQ ID NO: 614585 - DNA, 15 bp, Homo sapiens
tacaggttagtgggc

SEQ ID NO: 614586 - DNA, 15 bp, Homo sapiens
acaggttagtgggca

SEQ ID NO: 614587 - DNA, 15 bp, Homo sapiens
caggttagtgggcag

SEQ ID NO: 614588 - DNA, 15 bp, Homo sapiens
aggttagtgggcagt

SEQ ID NO: 614589 - DNA, 15 bp, Homo sapiens
ggttagtgggcagtt

SEQ ID NO: 614590 - DNA, 15 bp, Homo sapiens
gttagtgggcagttt

SEQ ID NO: 614591 - DNA, 15 bp, Homo sapiens
ttagtgggcagtttg

SEQ ID NO: 614592 - DNA, 15 bp, Homo sapiens
tagtgggcagtttgt

SEQ ID NO: 614593 - DNA, 15 bp, Homo sapiens
agtgggcagtttgtg

SEQ ID NO: 614594 - DNA, 15 bp, Homo sapiens
gtgggcagtttgtga

SEQ ID NO: 614595 - DNA, 15 bp, Homo sapiens
tgggcagtttgtgat

SEQ ID NO: 614596 - DNA, 15 bp, Homo sapiens
gggcagtttgtgatt

SEQ ID NO: 614597 - DNA, 15 bp, Homo sapiens
ggcagtttgtgatta

SEQ ID NO: 614598 - DNA, 15 bp, Homo sapiens
gcagtttgtgattag

SEQ ID NO: 614599 - DNA, 15 bp, Homo sapiens
cagtttgtgattagt

SEQ ID NO: 614600 - DNA, 15 bp, Homo sapiens
agtttgtgattagtt

SEQ ID NO: 614601 - DNA, 15 bp, Homo sapiens
gtttgtgattagtta

SEQ ID NO: 614602 - DNA, 15 bp, Homo sapiens
tttgtgattagttaa

SEQ ID NO: 614603 - DNA, 15 bp, Homo sapiens
ttgtgattagttaag

SEQ ID NO: 614604 - DNA, 15 bp, Homo sapiens
tgtgattagttaagt

SEQ ID NO: 614605 - DNA, 15 bp, Homo sapiens
gtgattagttaagtt

SEQ ID NO: 614606 - DNA, 15 bp, Homo sapiens
tgattagttaagttt

SEQ ID NO: 614607 - DNA, 15 bp, Homo sapiens
gattagttaagtttc

SEQ ID NO: 614608 - DNA, 15 bp, Homo sapiens
attagttaagtttct

SEQ ID NO: 614609 - DNA, 15 bp, Homo sapiens
ttagttaagtttctc

SEQ ID NO: 614610 - DNA, 15 bp, Homo sapiens
tagttaagtttctct

SEQ ID NO: 614611 - DNA, 15 bp, Homo sapiens
agttaagtttctcta

SEQ ID NO: 614612 - DNA, 15 bp, Homo sapiens
gttaagtttctctaa

SEQ ID NO: 614613 - DNA, 15 bp, Homo sapiens
ttaagtttctctaag

SEQ ID NO: 614614 - DNA, 15 bp, Homo sapiens
taagtttctctaagt

SEQ ID NO: 614615 - DNA, 15 bp, Homo sapiens
aagtttctctaagtt

SEQ ID NO: 614616 - DNA, 15 bp, Homo sapiens
agtttctctaagttg

SEQ ID NO: 614617 - DNA, 15 bp, Homo sapiens
gtttctctaagttgg

SEQ ID NO: 614618 - DNA, 15 bp, Homo sapiens
tttctctaagttggg

SEQ ID NO: 614619 - DNA, 15 bp, Homo sapiens
ttctctaagttgggt

SEQ ID NO: 614620 - DNA, 15 bp, Homo sapiens
tctctaagttgggtt

SEQ ID NO: 614621 - DNA, 15 bp, Homo sapiens
ctctaagttgggttt

SEQ ID NO: 614622 - DNA, 15 bp, Homo sapiens
tctaagttgggtttt

SEQ ID NO: 614623 - DNA, 15 bp, Homo sapiens
ctaagttgggttttg

SEQ ID NO: 614624 - DNA, 15 bp, Homo sapiens
taagttgggttttgg

SEQ ID NO: 614625 - DNA, 15 bp, Homo sapiens
aagttgggttttggt

SEQ ID NO: 614626 - DNA, 15 bp, Homo sapiens
agttgggttttggtt

SEQ ID NO: 614627 - DNA, 15 bp, Homo sapiens
gttgggttttggttt

SEQ ID NO: 614628 - DNA, 15 bp, Homo sapiens
ttgggttttggtttg

SEQ ID NO: 614629 - DNA, 15 bp, Homo sapiens
tgggttttggtttgc

SEQ ID NO: 614630 - DNA, 15 bp, Homo sapiens
gggttttggtttgct

SEQ ID NO: 614631 - DNA, 15 bp, Homo sapiens
ggttttggtttgctg

SEQ ID NO: 614632 - DNA, 15 bp, Homo sapiens
gttttggtttgctga

SEQ ID NO: 614633 - DNA, 15 bp, Homo sapiens
ttttggtttgctgat

SEQ ID NO: 614634 - DNA, 15 bp, Homo sapiens
tttggtttgctgatg

SEQ ID NO: 614635 - DNA, 15 bp, Homo sapiens
ttggtttgctgatgt

SEQ ID NO: 614636 - DNA, 15 bp, Homo sapiens
tggtttgctgatgta

SEQ ID NO: 614637 - DNA, 15 bp, Homo sapiens
ggtttgctgatgtag

SEQ ID NO: 614638 - DNA, 15 bp, Homo sapiens
gtttgctgatgtagg

SEQ ID NO: 614639 - DNA, 15 bp, Homo sapiens
tttgctgatgtagga

SEQ ID NO: 614640 - DNA, 15 bp, Homo sapiens
ttgctgatgtaggaa

SEQ ID NO: 614641 - DNA, 15 bp, Homo sapiens
tgctgatgtaggaac

SEQ ID NO: 614642 - DNA, 15 bp, Homo sapiens
gctgatgtaggaaca

SEQ ID NO: 614643 - DNA, 15 bp, Homo sapiens
ctgatgtaggaacac

SEQ ID NO: 614644 - DNA, 15 bp, Homo sapiens
tgatgtaggaacaca

SEQ ID NO: 614645 - DNA, 15 bp, Homo sapiens
gatgtaggaacacag

SEQ ID NO: 614646 - DNA, 15 bp, Homo sapiens
atgtaggaacacaga

SEQ ID NO: 614647 - DNA, 15 bp, Homo sapiens
tgtaggaacacagaa

SEQ ID NO: 614648 - DNA, 15 bp, Homo sapiens
gtaggaacacagaat

SEQ ID NO: 614649 - DNA, 15 bp, Homo sapiens
taggaacacagaatg

SEQ ID NO: 614650 - DNA, 15 bp, Homo sapiens
aggaacacagaatgc

SEQ ID NO: 614651 - DNA, 15 bp, Homo sapiens
ggaacacagaatgct

SEQ ID NO: 614652 - DNA, 15 bp, Homo sapiens
gaacacagaatgctg

SEQ ID NO: 614653 - DNA, 15 bp, Homo sapiens
aacacagaatgctgg

SEQ ID NO: 614654 - DNA, 15 bp, Homo sapiens
acacagaatgctggg

SEQ ID NO: 614655 - DNA, 15 bp, Homo sapiens
cacagaatgctgggg

SEQ ID NO: 614656 - DNA, 15 bp, Homo sapiens
acagaatgctggggc

SEQ ID NO: 614657 - DNA, 15 bp, Homo sapiens
cagaatgctggggcc

SEQ ID NO: 614658 - DNA, 15 bp, Homo sapiens
agaatgctggggccg

SEQ ID NO: 614659 - DNA, 15 bp, Homo sapiens
gaatgctggggccgt

SEQ ID NO: 614660 - DNA, 15 bp, Homo sapiens
aatgctggggccgtt

SEQ ID NO: 614661 - DNA, 15 bp, Homo sapiens
atgctggggccgttt

SEQ ID NO: 614662 - DNA, 15 bp, Homo sapiens
tgctggggccgtttc

SEQ ID NO: 614663 - DNA, 15 bp, Homo sapiens
gctggggccgtttca

SEQ ID NO: 614664 - DNA, 15 bp, Homo sapiens
ctggggccgtttcaa

SEQ ID NO: 614665 - DNA, 15 bp, Homo sapiens
tggggccgtttcaac

SEQ ID NO: 614666 - DNA, 15 bp, Homo sapiens
ggggccgtttcaacc

SEQ ID NO: 614667 - DNA, 15 bp, Homo sapiens
gggccgtttcaacct

SEQ ID NO: 614668 - DNA, 15 bp, Homo sapiens
ggccgtttcaaccta

SEQ ID NO: 614669 - DNA, 15 bp, Homo sapiens
gccgtttcaacctaa

SEQ ID NO: 614670 - DNA, 15 bp, Homo sapiens
ccgtttcaacctaat

SEQ ID NO: 614671 - DNA, 15 bp, Homo sapiens
cgtttcaacctaatg

SEQ ID NO: 614672 - DNA, 15 bp, Homo sapiens
gtttcaacctaatgg

SEQ ID NO: 614673 - DNA, 15 bp, Homo sapiens
tttcaacctaatggt

SEQ ID NO: 614674 - DNA, 15 bp, Homo sapiens
ttcaacctaatggtc

SEQ ID NO: 614675 - DNA, 15 bp, Homo sapiens
tcaacctaatggtct

SEQ ID NO: 614676 - DNA, 15 bp, Homo sapiens
caacctaatggtctc

SEQ ID NO: 614677 - DNA, 15 bp, Homo sapiens
aacctaatggtctcc

SEQ ID NO: 614678 - DNA, 15 bp, Homo sapiens
acctaatggtctccc

SEQ ID NO: 614679 - DNA, 15 bp, Homo sapiens
cctaatggtctccca

SEQ ID NO: 614680 - DNA, 15 bp, Homo sapiens
ctaatggtctcccaa

SEQ ID NO: 614681 - DNA, 15 bp, Homo sapiens
taatggtctcccaat

SEQ ID NO: 614682 - DNA, 15 bp, Homo sapiens
aatggtctcccaatt

SEQ ID NO: 614683 - DNA, 15 bp, Homo sapiens
atggtctcccaatta

SEQ ID NO: 614684 - DNA, 15 bp, Homo sapiens
tggtctcccaattaa

SEQ ID NO: 614685 - DNA, 15 bp, Homo sapiens
ggtctcccaattaat

SEQ ID NO: 614686 - DNA, 15 bp, Homo sapiens
gtctcccaattaatt

SEQ ID NO: 614687 - DNA, 15 bp, Homo sapiens
tctcccaattaattt

SEQ ID NO: 614688 - DNA, 15 bp, Homo sapiens
ctcccaattaatttt

SEQ ID NO: 614689 - DNA, 15 bp, Homo sapiens
tcccaattaattttt

SEQ ID NO: 614690 - DNA, 15 bp, Homo sapiens
cccaattaatttttt

SEQ ID NO: 614691 - DNA, 15 bp, Homo sapiens
ccaattaattttttt

SEQ ID NO: 614692 - DNA, 15 bp, Homo sapiens
caattaattttttta

SEQ ID NO: 614693 - DNA, 15 bp, Homo sapiens
aattaatttttttaa

SEQ ID NO: 614694 - DNA, 15 bp, Homo sapiens
attaatttttttaac

SEQ ID NO: 614695 - DNA, 15 bp, Homo sapiens
ttaatttttttaaca

SEQ ID NO: 614696 - DNA, 15 bp, Homo sapiens
taatttttttaacat

SEQ ID NO: 614697 - DNA, 15 bp, Homo sapiens
aatttttttaacatt

SEQ ID NO: 614698 - DNA, 15 bp, Homo sapiens
atttttttaacatta

SEQ ID NO: 614699 - DNA, 15 bp, Homo sapiens
tttttttaacattac

SEQ ID NO: 614700 - DNA, 15 bp, Homo sapiens
ttttttaacattact

SEQ ID NO: 614701 - DNA, 15 bp, Homo sapiens
tttttaacattactg

SEQ ID NO: 614702 - DNA, 15 bp, Homo sapiens
ttttaacattactga

SEQ ID NO: 614703 - DNA, 15 bp, Homo sapiens
tttaacattactgat

SEQ ID NO: 614704 - DNA, 15 bp, Homo sapiens
ttaacattactgatg

SEQ ID NO: 614705 - DNA, 15 bp, Homo sapiens
taacattactgatga

SEQ ID NO: 614706 - DNA, 15 bp, Homo sapiens
aacattactgatgac

SEQ ID NO: 614707 - DNA, 15 bp, Homo sapiens
acattactgatgact

SEQ ID NO: 614708 - DNA, 15 bp, Homo sapiens
cattactgatgactg

SEQ ID NO: 614709 - DNA, 15 bp, Homo sapiens
attactgatgactgt

SEQ ID NO: 614710 - DNA, 15 bp, Homo sapiens
ttactgatgactgtt

SEQ ID NO: 614711 - DNA, 15 bp, Homo sapiens
tactgatgactgtta

SEQ ID NO: 614712 - DNA, 15 bp, Homo sapiens
actgatgactgttag

SEQ ID NO: 614713 - DNA, 15 bp, Homo sapiens
ctgatgactgttagg

SEQ ID NO: 614714 - DNA, 15 bp, Homo sapiens
tgatgactgttagga

SEQ ID NO: 614715 - DNA, 15 bp, Homo sapiens
gatgactgttaggag

SEQ ID NO: 614716 - DNA, 15 bp, Homo sapiens
atgactgttaggagt

SEQ ID NO: 614717 - DNA, 15 bp, Homo sapiens
tgactgttaggagtc

SEQ ID NO: 614718 - DNA, 15 bp, Homo sapiens
gactgttaggagtct

SEQ ID NO: 614719 - DNA, 15 bp, Homo sapiens
actgttaggagtcta

SEQ ID NO: 614720 - DNA, 15 bp, Homo sapiens
ctgttaggagtctaa

SEQ ID NO: 614721 - DNA, 15 bp, Homo sapiens
tgttaggagtctaat

SEQ ID NO: 614722 - DNA, 15 bp, Homo sapiens
gttaggagtctaatg

SEQ ID NO: 614723 - DNA, 15 bp, Homo sapiens
ttaggagtctaatgt

SEQ ID NO: 614724 - DNA, 15 bp, Homo sapiens
taggagtctaatgtg

SEQ ID NO: 614725 - DNA, 15 bp, Homo sapiens
aggagtctaatgtgc

SEQ ID NO: 614726 - DNA, 15 bp, Homo sapiens
ggagtctaatgtgct

SEQ ID NO: 614727 - DNA, 15 bp, Homo sapiens
gagtctaatgtgcta

SEQ ID NO: 614728 - DNA, 15 bp, Homo sapiens
agtctaatgtgctac

SEQ ID NO: 614729 - DNA, 15 bp, Homo sapiens
gtctaatgtgctact

SEQ ID NO: 614730 - DNA, 15 bp, Homo sapiens
tctaatgtgctactc

SEQ ID NO: 614731 - DNA, 15 bp, Homo sapiens
ctaatgtgctactcc

SEQ ID NO: 614732 - DNA, 15 bp, Homo sapiens
taatgtgctactcct

SEQ ID NO: 614733 - DNA, 15 bp, Homo sapiens
aatgtgctactcctc

SEQ ID NO: 614734 - DNA, 15 bp, Homo sapiens
atgtgctactcctcc

SEQ ID NO: 614735 - DNA, 15 bp, Homo sapiens
tgtgctactcctccc

SEQ ID NO: 614736 - DNA, 15 bp, Homo sapiens
gtgctactcctccca

SEQ ID NO: 614737 - DNA, 15 bp, Homo sapiens
tgctactcctcccag

SEQ ID NO: 614738 - DNA, 15 bp, Homo sapiens
gctactcctcccagg

SEQ ID NO: 614739 - DNA, 15 bp, Homo sapiens
ctactcctcccaggg

SEQ ID NO: 614740 - DNA, 15 bp, Homo sapiens
tactcctcccaggga

SEQ ID NO: 614741 - DNA, 15 bp, Homo sapiens
actcctcccagggaa

SEQ ID NO: 614742 - DNA, 15 bp, Homo sapiens
ctcctcccagggaaa

SEQ ID NO: 614743 - DNA, 15 bp, Homo sapiens
tcctcccagggaaaa

SEQ ID NO: 614744 - DNA, 15 bp, Homo sapiens
cctcccagggaaaat

SEQ ID NO: 614745 - DNA, 15 bp, Homo sapiens
ctcccagggaaaatg

SEQ ID NO: 614746 - DNA, 15 bp, Homo sapiens
tcccagggaaaatgg

SEQ ID NO: 614747 - DNA, 15 bp, Homo sapiens
cccagggaaaatggc

SEQ ID NO: 614748 - DNA, 15 bp, Homo sapiens
ccagggaaaatggca

SEQ ID NO: 614749 - DNA, 15 bp, Homo sapiens
cagggaaaatggcat

SEQ ID NO: 614750 - DNA, 15 bp, Homo sapiens
agggaaaatggcatt

SEQ ID NO: 614751 - DNA, 15 bp, Homo sapiens
gggaaaatggcattc

SEQ ID NO: 614752 - DNA, 15 bp, Homo sapiens
ggaaaatggcattcc

SEQ ID NO: 614753 - DNA, 15 bp, Homo sapiens
gaaaatggcattcct

SEQ ID NO: 614754 - DNA, 15 bp, Homo sapiens
aaaatggcattccta

SEQ ID NO: 614755 - DNA, 15 bp, Homo sapiens
aaatggcattcctag

SEQ ID NO: 614756 - DNA, 15 bp, Homo sapiens
aatggcattcctagg

SEQ ID NO: 614757 - DNA, 15 bp, Homo sapiens
atggcattcctagga

SEQ ID NO: 614758 - DNA, 15 bp, Homo sapiens
tggcattcctaggat

SEQ ID NO: 614759 - DNA, 15 bp, Homo sapiens
ggcattcctaggatt

SEQ ID NO: 614760 - DNA, 15 bp, Homo sapiens
gcattcctaggatta

SEQ ID NO: 614761 - DNA, 15 bp, Homo sapiens
cattcctaggattaa

SEQ ID NO: 614762 - DNA, 15 bp, Homo sapiens
attcctaggattaaa

SEQ ID NO: 614763 - DNA, 15 bp, Homo sapiens
ttcctaggattaaag

SEQ ID NO: 614764 - DNA, 15 bp, Homo sapiens
tcctaggattaaagg

SEQ ID NO: 614765 - DNA, 15 bp, Homo sapiens
cctaggattaaagga

SEQ ID NO: 614766 - DNA, 15 bp, Homo sapiens
ctaggattaaaggaa

SEQ ID NO: 614767 - DNA, 15 bp, Homo sapiens
taggattaaaggaac

SEQ ID NO: 614768 - DNA, 15 bp, Homo sapiens
aggattaaaggaact

SEQ ID NO: 614769 - DNA, 15 bp, Homo sapiens
ggattaaaggaactc

SEQ ID NO: 614770 - DNA, 15 bp, Homo sapiens
gattaaaggaactca

SEQ ID NO: 614771 - DNA, 15 bp, Homo sapiens
attaaaggaactcag

SEQ ID NO: 614772 - DNA, 15 bp, Homo sapiens
ttaaaggaactcagc

SEQ ID NO: 614773 - DNA, 15 bp, Homo sapiens
taaaggaactcagca

SEQ ID NO: 614774 - DNA, 15 bp, Homo sapiens
aaaggaactcagcac

SEQ ID NO: 614775 - DNA, 15 bp, Homo sapiens
aaggaactcagcaca

SEQ ID NO: 614776 - DNA, 15 bp, Homo sapiens
aggaactcagcacat

SEQ ID NO: 614777 - DNA, 15 bp, Homo sapiens
ggaactcagcacatg

SEQ ID NO: 614778 - DNA, 15 bp, Homo sapiens
gaactcagcacatgg

SEQ ID NO: 614779 - DNA, 15 bp, Homo sapiens
aactcagcacatgga

SEQ ID NO: 614780 - DNA, 15 bp, Homo sapiens
actcagcacatggag

SEQ ID NO: 614781 - DNA, 15 bp, Homo sapiens
ctcagcacatggagt

SEQ ID NO: 614782 - DNA, 15 bp, Homo sapiens
tcagcacatggagtg

SEQ ID NO: 614783 - DNA, 15 bp, Homo sapiens
cagcacatggagtgt

SEQ ID NO: 614784 - DNA, 15 bp, Homo sapiens
agcacatggagtgtg

SEQ ID NO: 614785 - DNA, 15 bp, Homo sapiens
gcacatggagtgtgc

SEQ ID NO: 614786 - DNA, 15 bp, Homo sapiens
cacatggagtgtgcg

SEQ ID NO: 614787 - DNA, 15 bp, Homo sapiens
acatggagtgtgcgt

SEQ ID NO: 614788 - DNA, 15 bp, Homo sapiens
catggagtgtgcgta

SEQ ID NO: 614789 - DNA, 15 bp, Homo sapiens
atggagtgtgcgtag

SEQ ID NO: 614790 - DNA, 15 bp, Homo sapiens
tggagtgtgcgtaga

SEQ ID NO: 614791 - DNA, 15 bp, Homo sapiens
ggagtgtgcgtagaa

SEQ ID NO: 614792 - DNA, 15 bp, Homo sapiens
gagtgtgcgtagaaa

SEQ ID NO: 614793 - DNA, 15 bp, Homo sapiens
agtgtgcgtagaaat

SEQ ID NO: 614794 - DNA, 15 bp, Homo sapiens
gtgtgcgtagaaatt

SEQ ID NO: 614795 - DNA, 15 bp, Homo sapiens
tgtgcgtagaaattt

SEQ ID NO: 614796 - DNA, 15 bp, Homo sapiens
gtgcgtagaaattta

SEQ ID NO: 614797 - DNA, 15 bp, Homo sapiens
tgcgtagaaatttag

SEQ ID NO: 614798 - DNA, 15 bp, Homo sapiens
gcgtagaaatttaga

SEQ ID NO: 614799 - DNA, 15 bp, Homo sapiens
cgtagaaatttagac

SEQ ID NO: 614800 - DNA, 15 bp, Homo sapiens
gtagaaatttagaca

SEQ ID NO: 614801 - DNA, 15 bp, Homo sapiens
tagaaatttagacac

SEQ ID NO: 614802 - DNA, 15 bp, Homo sapiens
agaaatttagacact

SEQ ID NO: 614803 - DNA, 15 bp, Homo sapiens
gaaatttagacacta

SEQ ID NO: 614804 - DNA, 15 bp, Homo sapiens
aaatttagacactaa

SEQ ID NO: 614805 - DNA, 15 bp, Homo sapiens
aatttagacactaac

SEQ ID NO: 614806 - DNA, 15 bp, Homo sapiens
atttagacactaact

SEQ ID NO: 614807 - DNA, 15 bp, Homo sapiens
tttagacactaactg

SEQ ID NO: 614808 - DNA, 15 bp, Homo sapiens
ttagacactaactgc

SEQ ID NO: 614809 - DNA, 15 bp, Homo sapiens
tagacactaactgca

SEQ ID NO: 614810 - DNA, 15 bp, Homo sapiens
agacactaactgcag

SEQ ID NO: 614811 - DNA, 15 bp, Homo sapiens
gacactaactgcagg

SEQ ID NO: 614812 - DNA, 15 bp, Homo sapiens
acactaactgcaggc

SEQ ID NO: 614813 - DNA, 15 bp, Homo sapiens
cactaactgcaggct

SEQ ID NO: 614814 - DNA, 15 bp, Homo sapiens
actaactgcaggctg

SEQ ID NO: 614815 - DNA, 15 bp, Homo sapiens
ctaactgcaggctgg

SEQ ID NO: 614816 - DNA, 15 bp, Homo sapiens
taactgcaggctggt

SEQ ID NO: 614817 - DNA, 15 bp, Homo sapiens
aactgcaggctggtg

SEQ ID NO: 614818 - DNA, 15 bp, Homo sapiens
actgcaggctggtgg

SEQ ID NO: 614819 - DNA, 15 bp, Homo sapiens
ctgcaggctggtggg

SEQ ID NO: 614820 - DNA, 15 bp, Homo sapiens
tgcaggctggtggga

SEQ ID NO: 614821 - DNA, 15 bp, Homo sapiens
gcaggctggtgggag

SEQ ID NO: 614822 - DNA, 15 bp, Homo sapiens
caggctggtgggaga

SEQ ID NO: 614823 - DNA, 15 bp, Homo sapiens
aggctggtgggagag

SEQ ID NO: 614824 - DNA, 15 bp, Homo sapiens
ggctggtgggagaga

SEQ ID NO: 614825 - DNA, 15 bp, Homo sapiens
gctggtgggagagag

SEQ ID NO: 614826 - DNA, 15 bp, Homo sapiens
ctggtgggagagagc

SEQ ID NO: 614827 - DNA, 15 bp, Homo sapiens
tggtgggagagagcc

SEQ ID NO: 614828 - DNA, 15 bp, Homo sapiens
ggtgggagagagccc

SEQ ID NO: 614829 - DNA, 15 bp, Homo sapiens
gtgggagagagccct

SEQ ID NO: 614830 - DNA, 15 bp, Homo sapiens
tgggagagagccctt

SEQ ID NO: 614831 - DNA, 15 bp, Homo sapiens
gggagagagcccttt

SEQ ID NO: 614832 - DNA, 15 bp, Homo sapiens
ggagagagcccttta

SEQ ID NO: 614833 - DNA, 15 bp, Homo sapiens
gagagagccctttag

SEQ ID NO: 614834 - DNA, 15 bp, Homo sapiens
agagagccctttagg

SEQ ID NO: 614835 - DNA, 15 bp, Homo sapiens
gagagccctttaggg

SEQ ID NO: 614836 - DNA, 15 bp, Homo sapiens
agagccctttagggc

SEQ ID NO: 614837 - DNA, 15 bp, Homo sapiens
gagccctttagggca

SEQ ID NO: 614838 - DNA, 15 bp, Homo sapiens
agccctttagggcag

SEQ ID NO: 614839 - DNA, 15 bp, Homo sapiens
gccctttagggcaga

SEQ ID NO: 614840 - DNA, 15 bp, Homo sapiens
ccctttagggcagaa

SEQ ID NO: 614841 - DNA, 15 bp, Homo sapiens
cctttagggcagaat

SEQ ID NO: 614842 - DNA, 15 bp, Homo sapiens
ctttagggcagaatg

SEQ ID NO: 614843 - DNA, 15 bp, Homo sapiens
tttagggcagaatga

SEQ ID NO: 614844 - DNA, 15 bp, Homo sapiens
ttagggcagaatgag

SEQ ID NO: 614845 - DNA, 15 bp, Homo sapiens
tagggcagaatgaga

SEQ ID NO: 614846 - DNA, 15 bp, Homo sapiens
agggcagaatgagaa

SEQ ID NO: 614847 - DNA, 15 bp, Homo sapiens
gggcagaatgagaag

SEQ ID NO: 614848 - DNA, 15 bp, Homo sapiens
ggcagaatgagaagg

SEQ ID NO: 614849 - DNA, 15 bp, Homo sapiens
gcagaatgagaaggc

SEQ ID NO: 614850 - DNA, 15 bp, Homo sapiens
cagaatgagaaggcg

SEQ ID NO: 614851 - DNA, 15 bp, Homo sapiens
agaatgagaaggcgt

SEQ ID NO: 614852 - DNA, 15 bp, Homo sapiens
gaatgagaaggcgtc

SEQ ID NO: 614853 - DNA, 15 bp, Homo sapiens
aatgagaaggcgtcc

SEQ ID NO: 614854 - DNA, 15 bp, Homo sapiens
atgagaaggcgtccg

SEQ ID NO: 614855 - DNA, 15 bp, Homo sapiens
tgagaaggcgtccgg

SEQ ID NO: 614856 - DNA, 15 bp, Homo sapiens
gagaaggcgtccggc

SEQ ID NO: 614857 - DNA, 15 bp, Homo sapiens
agaaggcgtccggcc

SEQ ID NO: 614858 - DNA, 15 bp, Homo sapiens
gaaggcgtccggcca

SEQ ID NO: 614859 - DNA, 15 bp, Homo sapiens
aaggcgtccggccaa

SEQ ID NO: 614860 - DNA, 15 bp, Homo sapiens
aggcgtccggccaag

SEQ ID NO: 614861 - DNA, 15 bp, Homo sapiens
ggcgtccggccaagg

SEQ ID NO: 614862 - DNA, 15 bp, Homo sapiens
gcgtccggccaaggg

SEQ ID NO: 614863 - DNA, 15 bp, Homo sapiens
cgtccggccaagggc

SEQ ID NO: 614864 - DNA, 15 bp, Homo sapiens
gtccggccaagggca

SEQ ID NO: 614865 - DNA, 15 bp, Homo sapiens
tccggccaagggcag

SEQ ID NO: 614866 - DNA, 15 bp, Homo sapiens
ccggccaagggcagg

SEQ ID NO: 614867 - DNA, 15 bp, Homo sapiens
cggccaagggcagga

SEQ ID NO: 614868 - DNA, 15 bp, Homo sapiens
ggccaagggcaggag

SEQ ID NO: 614869 - DNA, 15 bp, Homo sapiens
gccaagggcaggagt

SEQ ID NO: 614870 - DNA, 15 bp, Homo sapiens
ccaagggcaggagtt

SEQ ID NO: 614871 - DNA, 15 bp, Homo sapiens
caagggcaggagtta

SEQ ID NO: 614872 - DNA, 15 bp, Homo sapiens
aagggcaggagttac

SEQ ID NO: 614873 - DNA, 15 bp, Homo sapiens
agggcaggagttact

SEQ ID NO: 614874 - DNA, 15 bp, Homo sapiens
gggcaggagttactg

SEQ ID NO: 614875 - DNA, 15 bp, Homo sapiens
ggcaggagttactga

SEQ ID NO: 614876 - DNA, 15 bp, Homo sapiens
gcaggagttactgac

SEQ ID NO: 614877 - DNA, 15 bp, Homo sapiens
caggagttactgacg

SEQ ID NO: 614878 - DNA, 15 bp, Homo sapiens
aggagttactgacgc

SEQ ID NO: 614879 - DNA, 15 bp, Homo sapiens
ggagttactgacgca

SEQ ID NO: 614880 - DNA, 15 bp, Homo sapiens
gagttactgacgcat

SEQ ID NO: 614881 - DNA, 15 bp, Homo sapiens
agttactgacgcatg

SEQ ID NO: 614882 - DNA, 15 bp, Homo sapiens
gttactgacgcatgg

SEQ ID NO: 614883 - DNA, 15 bp, Homo sapiens
ttactgacgcatggc

SEQ ID NO: 614884 - DNA, 15 bp, Homo sapiens
tactgacgcatggcc

SEQ ID NO: 614885 - DNA, 15 bp, Homo sapiens
actgacgcatggcct

SEQ ID NO: 614886 - DNA, 15 bp, Homo sapiens
ctgacgcatggcctc

SEQ ID NO: 614887 - DNA, 15 bp, Homo sapiens
tgacgcatggcctct

SEQ ID NO: 614888 - DNA, 15 bp, Homo sapiens
gacgcatggcctctt

SEQ ID NO: 614889 - DNA, 15 bp, Homo sapiens
acgcatggcctcttg

SEQ ID NO: 614890 - DNA, 15 bp, Homo sapiens
cgcatggcctcttgg

SEQ ID NO: 614891 - DNA, 15 bp, Homo sapiens
gcatggcctcttggt

SEQ ID NO: 614892 - DNA, 15 bp, Homo sapiens
catggcctcttggtt

SEQ ID NO: 614893 - DNA, 15 bp, Homo sapiens
atggcctcttggttt

SEQ ID NO: 614894 - DNA, 15 bp, Homo sapiens
tggcctcttggtttc

SEQ ID NO: 614895 - DNA, 15 bp, Homo sapiens
ggcctcttggtttca

SEQ ID NO: 614896 - DNA, 15 bp, Homo sapiens
gcctcttggtttcag

SEQ ID NO: 614897 - DNA, 15 bp, Homo sapiens
cctcttggtttcagc

SEQ ID NO: 614898 - DNA, 15 bp, Homo sapiens
ctcttggtttcagca

SEQ ID NO: 614899 - DNA, 15 bp, Homo sapiens
tcttggtttcagcat

SEQ ID NO: 614900 - DNA, 15 bp, Homo sapiens
cttggtttcagcatg

SEQ ID NO: 614901 - DNA, 15 bp, Homo sapiens
ttggtttcagcatgg

SEQ ID NO: 614902 - DNA, 15 bp, Homo sapiens
tggtttcagcatgga

SEQ ID NO: 614903 - DNA, 15 bp, Homo sapiens
ggtttcagcatggaa

SEQ ID NO: 614904 - DNA, 15 bp, Homo sapiens
gtttcagcatggaag

SEQ ID NO: 614905 - DNA, 15 bp, Homo sapiens
tttcagcatggaaga

SEQ ID NO: 614906 - DNA, 15 bp, Homo sapiens
ttcagcatggaagaa

SEQ ID NO: 614907 - DNA, 15 bp, Homo sapiens
tcagcatggaagaat

SEQ ID NO: 614908 - DNA, 15 bp, Homo sapiens
cagcatggaagaatc

SEQ ID NO: 614909 - DNA, 15 bp, Homo sapiens
agcatggaagaatcc

SEQ ID NO: 614910 - DNA, 15 bp, Homo sapiens
gcatggaagaatcct

SEQ ID NO: 614911 - DNA, 15 bp, Homo sapiens
catggaagaatccta

SEQ ID NO: 614912 - DNA, 15 bp, Homo sapiens
atggaagaatcctac

SEQ ID NO: 614913 - DNA, 15 bp, Homo sapiens
tggaagaatcctaca

SEQ ID NO: 614914 - DNA, 15 bp, Homo sapiens
ggaagaatcctacat

SEQ ID NO: 614915 - DNA, 15 bp, Homo sapiens
gaagaatcctacatt

SEQ ID NO: 614916 - DNA, 15 bp, Homo sapiens
aagaatcctacatta

SEQ ID NO: 614917 - DNA, 15 bp, Homo sapiens
agaatcctacattac

SEQ ID NO: 614918 - DNA, 15 bp, Homo sapiens
gaatcctacattaca

SEQ ID NO: 614919 - DNA, 15 bp, Homo sapiens
aatcctacattacag

SEQ ID NO: 614920 - DNA, 15 bp, Homo sapiens
atcctacattacagc

SEQ ID NO: 614921 - DNA, 15 bp, Homo sapiens
tcctacattacagcg

SEQ ID NO: 614922 - DNA, 15 bp, Homo sapiens
cctacattacagcga

SEQ ID NO: 614923 - DNA, 15 bp, Homo sapiens
ctacattacagcgac

SEQ ID NO: 614924 - DNA, 15 bp, Homo sapiens
tacattacagcgacc

SEQ ID NO: 614925 - DNA, 15 bp, Homo sapiens
acattacagcgaccc

SEQ ID NO: 614926 - DNA, 15 bp, Homo sapiens
cattacagcgaccca

SEQ ID NO: 614927 - DNA, 15 bp, Homo sapiens
attacagcgacccat

SEQ ID NO: 614928 - DNA, 15 bp, Homo sapiens
ttacagcgacccatt

SEQ ID NO: 614929 - DNA, 15 bp, Homo sapiens
tacagcgacccattc

SEQ ID NO: 614930 - DNA, 15 bp, Homo sapiens
acagcgacccattca

SEQ ID NO: 614931 - DNA, 15 bp, Homo sapiens
cagcgacccattcat

SEQ ID NO: 614932 - DNA, 15 bp, Homo sapiens
agcgacccattcatc

SEQ ID NO: 614933 - DNA, 15 bp, Homo sapiens
gcgacccattcatcc

SEQ ID NO: 614934 - DNA, 15 bp, Homo sapiens
cgacccattcatcct

SEQ ID NO: 614935 - DNA, 15 bp, Homo sapiens
gacccattcatcctc

SEQ ID NO: 614936 - DNA, 15 bp, Homo sapiens
acccattcatcctct

SEQ ID NO: 614937 - DNA, 15 bp, Homo sapiens
cccattcatcctctt

SEQ ID NO: 614938 - DNA, 15 bp, Homo sapiens
ccattcatcctcttc

SEQ ID NO: 614939 - DNA, 15 bp, Homo sapiens
cattcatcctcttcc

SEQ ID NO: 614940 - DNA, 15 bp, Homo sapiens
attcatcctcttcct

SEQ ID NO: 614941 - DNA, 15 bp, Homo sapiens
ttcatcctcttcctg

SEQ ID NO: 614942 - DNA, 15 bp, Homo sapiens
tcatcctcttcctgt

SEQ ID NO: 614943 - DNA, 15 bp, Homo sapiens
catcctcttcctgtt

SEQ ID NO: 614944 - DNA, 15 bp, Homo sapiens
atcctcttcctgttc

SEQ ID NO: 614945 - DNA, 15 bp, Homo sapiens
tcctcttcctgttct

SEQ ID NO: 614946 - DNA, 15 bp, Homo sapiens
cctcttcctgttctt

SEQ ID NO: 614947 - DNA, 15 bp, Homo sapiens
ctcttcctgttcttg

SEQ ID NO: 614948 - DNA, 15 bp, Homo sapiens
tcttcctgttcttgt

SEQ ID NO: 614949 - DNA, 15 bp, Homo sapiens
cttcctgttcttgtt

SEQ ID NO: 614950 - DNA, 15 bp, Homo sapiens
ttcctgttcttgttg

SEQ ID NO: 614951 - DNA, 15 bp, Homo sapiens
tcctgttcttgttgg

SEQ ID NO: 614952 - DNA, 15 bp, Homo sapiens
cctgttcttgttggc

SEQ ID NO: 614953 - DNA, 15 bp, Homo sapiens
ctgttcttgttggct

SEQ ID NO: 614954 - DNA, 15 bp, Homo sapiens
tgttcttgttggctt

SEQ ID NO: 614955 - DNA, 15 bp, Homo sapiens
gttcttgttggcttt

SEQ ID NO: 614956 - DNA, 15 bp, Homo sapiens
ttcttgttggctttc

SEQ ID NO: 614957 - DNA, 15 bp, Homo sapiens
tcttgttggctttct

SEQ ID NO: 614958 - DNA, 15 bp, Homo sapiens
cttgttggctttctc

SEQ ID NO: 614959 - DNA, 15 bp, Homo sapiens
ttgttggctttctcc

SEQ ID NO: 614960 - DNA, 15 bp, Homo sapiens
tgttggctttctcca

SEQ ID NO: 614961 - DNA, 15 bp, Homo sapiens
gttggctttctccac

SEQ ID NO: 614962 - DNA, 15 bp, Homo sapiens
ttggctttctccact

SEQ ID NO: 614963 - DNA, 15 bp, Homo sapiens
tggctttctccactg

SEQ ID NO: 614964 - DNA, 15 bp, Homo sapiens
ggctttctccactgc

SEQ ID NO: 614965 - DNA, 15 bp, Homo sapiens
gctttctccactgcc

SEQ ID NO: 614966 - DNA, 15 bp, Homo sapiens
ctttctccactgcca

SEQ ID NO: 614967 - DNA, 15 bp, Homo sapiens
tttctccactgccac

SEQ ID NO: 614968 - DNA, 15 bp, Homo sapiens
ttctccactgccacc

SEQ ID NO: 614969 - DNA, 15 bp, Homo sapiens
tctccactgccacca

SEQ ID NO: 614970 - DNA, 15 bp, Homo sapiens
ctccactgccaccat

SEQ ID NO: 614971 - DNA, 15 bp, Homo sapiens
tccactgccaccatc

SEQ ID NO: 614972 - DNA, 15 bp, Homo sapiens
ccactgccaccatca

SEQ ID NO: 614973 - DNA, 15 bp, Homo sapiens
cactgccaccatcat

SEQ ID NO: 614974 - DNA, 15 bp, Homo sapiens
actgccaccatcatg

SEQ ID NO: 614975 - DNA, 15 bp, Homo sapiens
ctgccaccatcatgc

SEQ ID NO: 614976 - DNA, 15 bp, Homo sapiens
tgccaccatcatgct

SEQ ID NO: 614977 - DNA, 15 bp, Homo sapiens
gccaccatcatgctg

SEQ ID NO: 614978 - DNA, 15 bp, Homo sapiens
ccaccatcatgctgt

SEQ ID NO: 614979 - DNA, 15 bp, Homo sapiens
caccatcatgctgtg

SEQ ID NO: 614980 - DNA, 15 bp, Homo sapiens
accatcatgctgtgc

SEQ ID NO: 614981 - DNA, 15 bp, Homo sapiens
ccatcatgctgtgct

SEQ ID NO: 614982 - DNA, 15 bp, Homo sapiens
catcatgctgtgctt

SEQ ID NO: 614983 - DNA, 15 bp, Homo sapiens
atcatgctgtgcttt

SEQ ID NO: 614984 - DNA, 15 bp, Homo sapiens
tcatgctgtgctttc

SEQ ID NO: 614985 - DNA, 15 bp, Homo sapiens
catgctgtgctttct

SEQ ID NO: 614986 - DNA, 15 bp, Homo sapiens
atgctgtgctttctg

SEQ ID NO: 614987 - DNA, 15 bp, Homo sapiens
tgctgtgctttctgc

SEQ ID NO: 614988 - DNA, 15 bp, Homo sapiens
gctgtgctttctgct

SEQ ID NO: 614989 - DNA, 15 bp, Homo sapiens
ctgtgctttctgctc

SEQ ID NO: 614990 - DNA, 15 bp, Homo sapiens
tgtgctttctgctca

SEQ ID NO: 614991 - DNA, 15 bp, Homo sapiens
gtgctttctgctcag

SEQ ID NO: 614992 - DNA, 15 bp, Homo sapiens
tgctttctgctcagc

SEQ ID NO: 614993 - DNA, 15 bp, Homo sapiens
gctttctgctcagca

SEQ ID NO: 614994 - DNA, 15 bp, Homo sapiens
ctttctgctcagcac

SEQ ID NO: 614995 - DNA, 15 bp, Homo sapiens
tttctgctcagcacc

SEQ ID NO: 614996 - DNA, 15 bp, Homo sapiens
ttctgctcagcacct

SEQ ID NO: 614997 - DNA, 15 bp, Homo sapiens
tctgctcagcacctt

SEQ ID NO: 614998 - DNA, 15 bp, Homo sapiens
ctgctcagcaccttc

SEQ ID NO: 614999 - DNA, 15 bp, Homo sapiens
tgctcagcaccttct

SEQ ID NO: 615000 - DNA, 15 bp, Homo sapiens
gctcagcaccttctt

SEQ ID NO: 615001 - DNA, 15 bp, Homo sapiens
ctcagcaccttcttc

SEQ ID NO: 615002 - DNA, 15 bp, Homo sapiens
tcagcaccttcttct

SEQ ID NO: 615003 - DNA, 15 bp, Homo sapiens
cagcaccttcttctc

SEQ ID NO: 615004 - DNA, 15 bp, Homo sapiens
agcaccttcttctcc

SEQ ID NO: 615005 - DNA, 15 bp, Homo sapiens
gcaccttcttctcca

SEQ ID NO: 615006 - DNA, 15 bp, Homo sapiens
caccttcttctccaa

SEQ ID NO: 615007 - DNA, 15 bp, Homo sapiens
accttcttctccaag

SEQ ID NO: 615008 - DNA, 15 bp, Homo sapiens
ccttcttctccaagg

SEQ ID NO: 615009 - DNA, 15 bp, Homo sapiens
cttcttctccaaggc

SEQ ID NO: 615010 - DNA, 15 bp, Homo sapiens
ttcttctccaaggcc

SEQ ID NO: 615011 - DNA, 15 bp, Homo sapiens
tcttctccaaggcca

SEQ ID NO: 615012 - DNA, 15 bp, Homo sapiens
cttctccaaggccag

SEQ ID NO: 615013 - DNA, 15 bp, Homo sapiens
ttctccaaggccagt

SEQ ID NO: 615014 - DNA, 15 bp, Homo sapiens
tctccaaggccagtc

SEQ ID NO: 615015 - DNA, 15 bp, Homo sapiens
ctccaaggccagtct

SEQ ID NO: 615016 - DNA, 15 bp, Homo sapiens
tccaaggccagtctg

SEQ ID NO: 615017 - DNA, 15 bp, Homo sapiens
ccaaggccagtctgg

SEQ ID NO: 615018 - DNA, 15 bp, Homo sapiens
caaggccagtctggc

SEQ ID NO: 615019 - DNA, 15 bp, Homo sapiens
aaggccagtctggca

SEQ ID NO: 615020 - DNA, 15 bp, Homo sapiens
aggccagtctggcag

SEQ ID NO: 615021 - DNA, 15 bp, Homo sapiens
ggccagtctggcagc

SEQ ID NO: 615022 - DNA, 15 bp, Homo sapiens
gccagtctggcagca

SEQ ID NO: 615023 - DNA, 15 bp, Homo sapiens
ccagtctggcagcag

SEQ ID NO: 615024 - DNA, 15 bp, Homo sapiens
cagtctggcagcagc

SEQ ID NO: 615025 - DNA, 15 bp, Homo sapiens
agtctggcagcagcc

SEQ ID NO: 615026 - DNA, 15 bp, Homo sapiens
gtctggcagcagcct

SEQ ID NO: 615027 - DNA, 15 bp, Homo sapiens
tctggcagcagcctg

SEQ ID NO: 615028 - DNA, 15 bp, Homo sapiens
ctggcagcagcctgt

SEQ ID NO: 615029 - DNA, 15 bp, Homo sapiens
tggcagcagcctgta

SEQ ID NO: 615030 - DNA, 15 bp, Homo sapiens
ggcagcagcctgtag

SEQ ID NO: 615031 - DNA, 15 bp, Homo sapiens
gcagcagcctgtagt

SEQ ID NO: 615032 - DNA, 15 bp, Homo sapiens
cagcagcctgtagtg

SEQ ID NO: 615033 - DNA, 15 bp, Homo sapiens
agcagcctgtagtgg

SEQ ID NO: 615034 - DNA, 15 bp, Homo sapiens
gcagcctgtagtggt

SEQ ID NO: 615035 - DNA, 15 bp, Homo sapiens
cagcctgtagtggtg

SEQ ID NO: 615036 - DNA, 15 bp, Homo sapiens
agcctgtagtggtgt

SEQ ID NO: 615037 - DNA, 15 bp, Homo sapiens
gcctgtagtggtgtc

SEQ ID NO: 615038 - DNA, 15 bp, Homo sapiens
cctgtagtggtgtca

SEQ ID NO: 615039 - DNA, 15 bp, Homo sapiens
ctgtagtggtgtcat

SEQ ID NO: 615040 - DNA, 15 bp, Homo sapiens
tgtagtggtgtcatc

SEQ ID NO: 615041 - DNA, 15 bp, Homo sapiens
gtagtggtgtcatct

SEQ ID NO: 615042 - DNA, 15 bp, Homo sapiens
tagtggtgtcatcta

SEQ ID NO: 615043 - DNA, 15 bp, Homo sapiens
agtggtgtcatctat

SEQ ID NO: 615044 - DNA, 15 bp, Homo sapiens
gtggtgtcatctatt

SEQ ID NO: 615045 - DNA, 15 bp, Homo sapiens
tggtgtcatctattt

SEQ ID NO: 615046 - DNA, 15 bp, Homo sapiens
ggtgtcatctatttc

SEQ ID NO: 615047 - DNA, 15 bp, Homo sapiens
gtgtcatctatttca

SEQ ID NO: 615048 - DNA, 15 bp, Homo sapiens
tgtcatctatttcac

SEQ ID NO: 615049 - DNA, 15 bp, Homo sapiens
gtcatctatttcacc

SEQ ID NO: 615050 - DNA, 15 bp, Homo sapiens
tcatctatttcaccc

SEQ ID NO: 615051 - DNA, 15 bp, Homo sapiens
catctatttcaccct

SEQ ID NO: 615052 - DNA, 15 bp, Homo sapiens
atctatttcaccctc

SEQ ID NO: 615053 - DNA, 15 bp, Homo sapiens
tctatttcaccctct

SEQ ID NO: 615054 - DNA, 15 bp, Homo sapiens
ctatttcaccctcta

SEQ ID NO: 615055 - DNA, 15 bp, Homo sapiens
tatttcaccctctac

SEQ ID NO: 615056 - DNA, 15 bp, Homo sapiens
atttcaccctctacc

SEQ ID NO: 615057 - DNA, 15 bp, Homo sapiens
tttcaccctctacct

SEQ ID NO: 615058 - DNA, 15 bp, Homo sapiens
ttcaccctctacctg

SEQ ID NO: 615059 - DNA, 15 bp, Homo sapiens
tcaccctctacctgc

SEQ ID NO: 615060 - DNA, 15 bp, Homo sapiens
caccctctacctgcc

SEQ ID NO: 615061 - DNA, 15 bp, Homo sapiens
accctctacctgcca

SEQ ID NO: 615062 - DNA, 15 bp, Homo sapiens
ccctctacctgccac

SEQ ID NO: 615063 - DNA, 15 bp, Homo sapiens
cctctacctgccaca

SEQ ID NO: 615064 - DNA, 15 bp, Homo sapiens
ctctacctgccacac

SEQ ID NO: 615065 - DNA, 15 bp, Homo sapiens
tctacctgccacaca

SEQ ID NO: 615066 - DNA, 15 bp, Homo sapiens
ctacctgccacacat

SEQ ID NO: 615067 - DNA, 15 bp, Homo sapiens
tacctgccacacatc

SEQ ID NO: 615068 - DNA, 15 bp, Homo sapiens
acctgccacacatcc

SEQ ID NO: 615069 - DNA, 15 bp, Homo sapiens
cctgccacacatcct

SEQ ID NO: 615070 - DNA, 15 bp, Homo sapiens
ctgccacacatcctg

SEQ ID NO: 615071 - DNA, 15 bp, Homo sapiens
tgccacacatcctgt

SEQ ID NO: 615072 - DNA, 15 bp, Homo sapiens
gccacacatcctgtg

SEQ ID NO: 615073 - DNA, 15 bp, Homo sapiens
ccacacatcctgtgc

SEQ ID NO: 615074 - DNA, 15 bp, Homo sapiens
cacacatcctgtgct

SEQ ID NO: 615075 - DNA, 15 bp, Homo sapiens
acacatcctgtgctt

SEQ ID NO: 615076 - DNA, 15 bp, Homo sapiens
cacatcctgtgcttc

SEQ ID NO: 615077 - DNA, 15 bp, Homo sapiens
acatcctgtgcttcg

SEQ ID NO: 615078 - DNA, 15 bp, Homo sapiens
catcctgtgcttcgc

SEQ ID NO: 615079 - DNA, 15 bp, Homo sapiens
atcctgtgcttcgcc

SEQ ID NO: 615080 - DNA, 15 bp, Homo sapiens
tcctgtgcttcgcct

SEQ ID NO: 615081 - DNA, 15 bp, Homo sapiens
cctgtgcttcgcctg

SEQ ID NO: 615082 - DNA, 15 bp, Homo sapiens
ctgtgcttcgcctgg

SEQ ID NO: 615083 - DNA, 15 bp, Homo sapiens
tgtgcttcgcctggc

SEQ ID NO: 615084 - DNA, 15 bp, Homo sapiens
gtgcttcgcctggca

SEQ ID NO: 615085 - DNA, 15 bp, Homo sapiens
tgcttcgcctggcag

SEQ ID NO: 615086 - DNA, 15 bp, Homo sapiens
gcttcgcctggcagg

SEQ ID NO: 615087 - DNA, 15 bp, Homo sapiens
cttcgcctggcagga

SEQ ID NO: 615088 - DNA, 15 bp, Homo sapiens
ttcgcctggcaggac

SEQ ID NO: 615089 - DNA, 15 bp, Homo sapiens
tcgcctggcaggacc

SEQ ID NO: 615090 - DNA, 15 bp, Homo sapiens
cgcctggcaggaccg

SEQ ID NO: 615091 - DNA, 15 bp, Homo sapiens
gcctggcaggaccgc

SEQ ID NO: 615092 - DNA, 15 bp, Homo sapiens
cctggcaggaccgca

SEQ ID NO: 615093 - DNA, 15 bp, Homo sapiens
ctggcaggaccgcat

SEQ ID NO: 615094 - DNA, 15 bp, Homo sapiens
tggcaggaccgcatg

SEQ ID NO: 615095 - DNA, 15 bp, Homo sapiens
ggcaggaccgcatga

SEQ ID NO: 615096 - DNA, 15 bp, Homo sapiens
gcaggaccgcatgac

SEQ ID NO: 615097 - DNA, 15 bp, Homo sapiens
caggaccgcatgacc

SEQ ID NO: 615098 - DNA, 15 bp, Homo sapiens
aggaccgcatgaccg

SEQ ID NO: 615099 - DNA, 15 bp, Homo sapiens
ggaccgcatgaccgc

SEQ ID NO: 615100 - DNA, 15 bp, Homo sapiens
gaccgcatgaccgct

SEQ ID NO: 615101 - DNA, 15 bp, Homo sapiens
accgcatgaccgctg

SEQ ID NO: 615102 - DNA, 15 bp, Homo sapiens
ccgcatgaccgctga

SEQ ID NO: 615103 - DNA, 15 bp, Homo sapiens
cgcatgaccgctgag

SEQ ID NO: 615104 - DNA, 15 bp, Homo sapiens
gcatgaccgctgagc

SEQ ID NO: 615105 - DNA, 15 bp, Homo sapiens
catgaccgctgagct

SEQ ID NO: 615106 - DNA, 15 bp, Homo sapiens
atgaccgctgagctg

SEQ ID NO: 615107 - DNA, 15 bp, Homo sapiens
tgaccgctgagctga

SEQ ID NO: 615108 - DNA, 15 bp, Homo sapiens
gaccgctgagctgaa

SEQ ID NO: 615109 - DNA, 15 bp, Homo sapiens
accgctgagctgaag

SEQ ID NO: 615110 - DNA, 15 bp, Homo sapiens
ccgctgagctgaaga

SEQ ID NO: 615111 - DNA, 15 bp, Homo sapiens
cgctgagctgaagaa

SEQ ID NO: 615112 - DNA, 15 bp, Homo sapiens
gctgagctgaagaag

SEQ ID NO: 615113 - DNA, 15 bp, Homo sapiens
ctgagctgaagaagg

SEQ ID NO: 615114 - DNA, 15 bp, Homo sapiens
tgagctgaagaaggc

SEQ ID NO: 615115 - DNA, 15 bp, Homo sapiens
gagctgaagaaggct

SEQ ID NO: 615116 - DNA, 15 bp, Homo sapiens
agctgaagaaggctg

SEQ ID NO: 615117 - DNA, 15 bp, Homo sapiens
gctgaagaaggctgt

SEQ ID NO: 615118 - DNA, 15 bp, Homo sapiens
ctgaagaaggctgtg

SEQ ID NO: 615119 - DNA, 15 bp, Homo sapiens
tgaagaaggctgtgg

SEQ ID NO: 615120 - DNA, 15 bp, Homo sapiens
gaagaaggctgtggt

SEQ ID NO: 615121 - DNA, 15 bp, Homo sapiens
aagaaggctgtggtg

SEQ ID NO: 615122 - DNA, 15 bp, Homo sapiens
agaaggctgtggtga

SEQ ID NO: 615123 - DNA, 15 bp, Homo sapiens
gaaggctgtggtgag

SEQ ID NO: 615124 - DNA, 15 bp, Homo sapiens
aaggctgtggtgagg

SEQ ID NO: 615125 - DNA, 15 bp, Homo sapiens
aggctgtggtgaggc

SEQ ID NO: 615126 - DNA, 15 bp, Homo sapiens
ggctgtggtgaggcc

SEQ ID NO: 615127 - DNA, 15 bp, Homo sapiens
gctgtggtgaggccc

SEQ ID NO: 615128 - DNA, 15 bp, Homo sapiens
ctgtggtgaggccct

SEQ ID NO: 615129 - DNA, 15 bp, Homo sapiens
tgtggtgaggccctt

SEQ ID NO: 615130 - DNA, 15 bp, Homo sapiens
gtggtgaggcccttg

SEQ ID NO: 615131 - DNA, 15 bp, Homo sapiens
tggtgaggcccttgg

SEQ ID NO: 615132 - DNA, 15 bp, Homo sapiens
ggtgaggcccttggg

SEQ ID NO: 615133 - DNA, 15 bp, Homo sapiens
gtgaggcccttgggc

SEQ ID NO: 615134 - DNA, 15 bp, Homo sapiens
tgaggcccttgggct

SEQ ID NO: 615135 - DNA, 15 bp, Homo sapiens
gaggcccttgggctg

SEQ ID NO: 615136 - DNA, 15 bp, Homo sapiens
aggcccttgggctgg

SEQ ID NO: 615137 - DNA, 15 bp, Homo sapiens
ggcccttgggctggc

SEQ ID NO: 615138 - DNA, 15 bp, Homo sapiens
gcccttgggctggcc

SEQ ID NO: 615139 - DNA, 15 bp, Homo sapiens
cccttgggctggccc

SEQ ID NO: 615140 - DNA, 15 bp, Homo sapiens
ccttgggctggcccc

SEQ ID NO: 615141 - DNA, 15 bp, Homo sapiens
cttgggctggcccct

SEQ ID NO: 615142 - DNA, 15 bp, Homo sapiens
ttgggctggcccctg

SEQ ID NO: 615143 - DNA, 15 bp, Homo sapiens
tgggctggcccctgt

SEQ ID NO: 615144 - DNA, 15 bp, Homo sapiens
gggctggcccctgtc

SEQ ID NO: 615145 - DNA, 15 bp, Homo sapiens
ggctggcccctgtcc

SEQ ID NO: 615146 - DNA, 15 bp, Homo sapiens
gctggcccctgtcct

SEQ ID NO: 615147 - DNA, 15 bp, Homo sapiens
ctggcccctgtccta

SEQ ID NO: 615148 - DNA, 15 bp, Homo sapiens
tggcccctgtcctac

SEQ ID NO: 615149 - DNA, 15 bp, Homo sapiens
ggcccctgtcctaca

SEQ ID NO: 615150 - DNA, 15 bp, Homo sapiens
gcccctgtcctacaa

SEQ ID NO: 615151 - DNA, 15 bp, Homo sapiens
cccctgtcctacaac

SEQ ID NO: 615152 - DNA, 15 bp, Homo sapiens
ccctgtcctacaaca

SEQ ID NO: 615153 - DNA, 15 bp, Homo sapiens
cctgtcctacaacac

SEQ ID NO: 615154 - DNA, 15 bp, Homo sapiens
ctgtcctacaacacg

SEQ ID NO: 615155 - DNA, 15 bp, Homo sapiens
tgtcctacaacacgt

SEQ ID NO: 615156 - DNA, 15 bp, Homo sapiens
gtcctacaacacgtt

SEQ ID NO: 615157 - DNA, 15 bp, Homo sapiens
tcctacaacacgttt

SEQ ID NO: 615158 - DNA, 15 bp, Homo sapiens
cctacaacacgtttc

SEQ ID NO: 615159 - DNA, 15 bp, Homo sapiens
ctacaacacgtttcc

SEQ ID NO: 615160 - DNA, 15 bp, Homo sapiens
tacaacacgtttcct

SEQ ID NO: 615161 - DNA, 15 bp, Homo sapiens
acaacacgtttcctt

SEQ ID NO: 615162 - DNA, 15 bp, Homo sapiens
caacacgtttccttg

SEQ ID NO: 615163 - DNA, 15 bp, Homo sapiens
aacacgtttccttgg

SEQ ID NO: 615164 - DNA, 15 bp, Homo sapiens
acacgtttccttgga

SEQ ID NO: 615165 - DNA, 15 bp, Homo sapiens
cacgtttccttggaa

SEQ ID NO: 615166 - DNA, 15 bp, Homo sapiens
acgtttccttggaag

SEQ ID NO: 615167 - DNA, 15 bp, Homo sapiens
cgtttccttggaagg

SEQ ID NO: 615168 - DNA, 15 bp, Homo sapiens
gtttccttggaaggg

SEQ ID NO: 615169 - DNA, 15 bp, Homo sapiens
tttccttggaagggt

SEQ ID NO: 615170 - DNA, 15 bp, Homo sapiens
ttccttggaagggtc

SEQ ID NO: 615171 - DNA, 15 bp, Homo sapiens
tccttggaagggtcc

SEQ ID NO: 615172 - DNA, 15 bp, Homo sapiens
ccttggaagggtccg

SEQ ID NO: 615173 - DNA, 15 bp, Homo sapiens
cttggaagggtccgt

SEQ ID NO: 615174 - DNA, 15 bp, Homo sapiens
ttggaagggtccgta

SEQ ID NO: 615175 - DNA, 15 bp, Homo sapiens
tggaagggtccgtag

SEQ ID NO: 615176 - DNA, 15 bp, Homo sapiens
ggaagggtccgtagc

SEQ ID NO: 615177 - DNA, 15 bp, Homo sapiens
gaagggtccgtagca

SEQ ID NO: 615178 - DNA, 15 bp, Homo sapiens
aagggtccgtagcag

SEQ ID NO: 615179 - DNA, 15 bp, Homo sapiens
agggtccgtagcagt

SEQ ID NO: 615180 - DNA, 15 bp, Homo sapiens
gggtccgtagcagtc

SEQ ID NO: 615181 - DNA, 15 bp, Homo sapiens
ggtccgtagcagtcc

SEQ ID NO: 615182 - DNA, 15 bp, Homo sapiens
gtccgtagcagtcct

SEQ ID NO: 615183 - DNA, 15 bp, Homo sapiens
tccgtagcagtcctg

SEQ ID NO: 615184 - DNA, 15 bp, Homo sapiens
ccgtagcagtcctgg

SEQ ID NO: 615185 - DNA, 15 bp, Homo sapiens
cgtagcagtcctgga

SEQ ID NO: 615186 - DNA, 15 bp, Homo sapiens
gtagcagtcctggag

SEQ ID NO: 615187 - DNA, 15 bp, Homo sapiens
tagcagtcctggagg

SEQ ID NO: 615188 - DNA, 15 bp, Homo sapiens
agcagtcctggaggc

SEQ ID NO: 615189 - DNA, 15 bp, Homo sapiens
gcagtcctggaggcc

SEQ ID NO: 615190 - DNA, 15 bp, Homo sapiens
cagtcctggaggccc

SEQ ID NO: 615191 - DNA, 15 bp, Homo sapiens
agtcctggaggccca

SEQ ID NO: 615192 - DNA, 15 bp, Homo sapiens
gtcctggaggcccag

SEQ ID NO: 615193 - DNA, 15 bp, Homo sapiens
tcctggaggcccagc

SEQ ID NO: 615194 - DNA, 15 bp, Homo sapiens
cctggaggcccagcc

SEQ ID NO: 615195 - DNA, 15 bp, Homo sapiens
ctggaggcccagcct

SEQ ID NO: 615196 - DNA, 15 bp, Homo sapiens
tggaggcccagcctg

SEQ ID NO: 615197 - DNA, 15 bp, Homo sapiens
ggaggcccagcctgc

SEQ ID NO: 615198 - DNA, 15 bp, Homo sapiens
gaggcccagcctgcc

SEQ ID NO: 615199 - DNA, 15 bp, Homo sapiens
aggcccagcctgccc

SEQ ID NO: 615200 - DNA, 15 bp, Homo sapiens
ggcccagcctgccct

SEQ ID NO: 615201 - DNA, 15 bp, Homo sapiens
gcccagcctgccctc

SEQ ID NO: 615202 - DNA, 15 bp, Homo sapiens
cccagcctgccctct

SEQ ID NO: 615203 - DNA, 15 bp, Homo sapiens
ccagcctgccctctg

SEQ ID NO: 615204 - DNA, 15 bp, Homo sapiens
cagcctgccctctga

SEQ ID NO: 615205 - DNA, 15 bp, Homo sapiens
agcctgccctctgag

SEQ ID NO: 615206 - DNA, 15 bp, Homo sapiens
gcctgccctctgagg

SEQ ID NO: 615207 - DNA, 15 bp, Homo sapiens
cctgccctctgaggg

SEQ ID NO: 615208 - DNA, 15 bp, Homo sapiens
ctgccctctgagggg

SEQ ID NO: 615209 - DNA, 15 bp, Homo sapiens
tgccctctgaggggg

SEQ ID NO: 615210 - DNA, 15 bp, Homo sapiens
gccctctgagggggt

SEQ ID NO: 615211 - DNA, 15 bp, Homo sapiens
ccctctgagggggtc

SEQ ID NO: 615212 - DNA, 15 bp, Homo sapiens
cctctgagggggtcc

SEQ ID NO: 615213 - DNA, 15 bp, Homo sapiens
ctctgagggggtcca

SEQ ID NO: 615214 - DNA, 15 bp, Homo sapiens
tctgagggggtccac

SEQ ID NO: 615215 - DNA, 15 bp, Homo sapiens
ctgagggggtccact

SEQ ID NO: 615216 - DNA, 15 bp, Homo sapiens
tgagggggtccactt

SEQ ID NO: 615217 - DNA, 15 bp, Homo sapiens
gagggggtccacttt

SEQ ID NO: 615218 - DNA, 15 bp, Homo sapiens
agggggtccactttg

SEQ ID NO: 615219 - DNA, 15 bp, Homo sapiens
gggggtccactttgc

SEQ ID NO: 615220 - DNA, 15 bp, Homo sapiens
ggggtccactttgcc

SEQ ID NO: 615221 - DNA, 15 bp, Homo sapiens
gggtccactttgcct

SEQ ID NO: 615222 - DNA, 15 bp, Homo sapiens
ggtccactttgcctt

SEQ ID NO: 615223 - DNA, 15 bp, Homo sapiens
gtccactttgccttt

SEQ ID NO: 615224 - DNA, 15 bp, Homo sapiens
tccactttgcctttg

SEQ ID NO: 615225 - DNA, 15 bp, Homo sapiens
ccactttgcctttga

SEQ ID NO: 615226 - DNA, 15 bp, Homo sapiens
cactttgcctttgac

SEQ ID NO: 615227 - DNA, 15 bp, Homo sapiens
actttgcctttgacc

SEQ ID NO: 615228 - DNA, 15 bp, Homo sapiens
ctttgcctttgacct

SEQ ID NO: 615229 - DNA, 15 bp, Homo sapiens
tttgcctttgaccta

SEQ ID NO: 615230 - DNA, 15 bp, Homo sapiens
ttgcctttgacctaa

SEQ ID NO: 615231 - DNA, 15 bp, Homo sapiens
tgcctttgacctaag

SEQ ID NO: 615232 - DNA, 15 bp, Homo sapiens
gcctttgacctaagg

SEQ ID NO: 615233 - DNA, 15 bp, Homo sapiens
cctttgacctaaggt

SEQ ID NO: 615234 - DNA, 15 bp, Homo sapiens
ctttgacctaaggtt

SEQ ID NO: 615235 - DNA, 15 bp, Homo sapiens
tttgacctaaggtta

SEQ ID NO: 615236 - DNA, 15 bp, Homo sapiens
ttgacctaaggttaa

SEQ ID NO: 615237 - DNA, 15 bp, Homo sapiens
tgacctaaggttaaa

SEQ ID NO: 615238 - DNA, 15 bp, Homo sapiens
gacctaaggttaaaa

SEQ ID NO: 615239 - DNA, 15 bp, Homo sapiens
acctaaggttaaaaa

SEQ ID NO: 615240 - DNA, 15 bp, Homo sapiens
cctaaggttaaaaag

SEQ ID NO: 615241 - DNA, 15 bp, Homo sapiens
ctaaggttaaaaagt

SEQ ID NO: 615242 - DNA, 15 bp, Homo sapiens
taaggttaaaaagtt

SEQ ID NO: 615243 - DNA, 15 bp, Homo sapiens
aaggttaaaaagttc

SEQ ID NO: 615244 - DNA, 15 bp, Homo sapiens
aggttaaaaagttca

SEQ ID NO: 615245 - DNA, 15 bp, Homo sapiens
ggttaaaaagttcac

SEQ ID NO: 615246 - DNA, 15 bp, Homo sapiens
gttaaaaagttcacg

SEQ ID NO: 615247 - DNA, 15 bp, Homo sapiens
ttaaaaagttcacgt

SEQ ID NO: 615248 - DNA, 15 bp, Homo sapiens
taaaaagttcacgtg

SEQ ID NO: 615249 - DNA, 15 bp, Homo sapiens
aaaaagttcacgtga

SEQ ID NO: 615250 - DNA, 15 bp, Homo sapiens
aaaagttcacgtgag

SEQ ID NO: 615251 - DNA, 15 bp, Homo sapiens
aaagttcacgtgagg

SEQ ID NO: 615252 - DNA, 15 bp, Homo sapiens
aagttcacgtgaggc

SEQ ID NO: 615253 - DNA, 15 bp, Homo sapiens
agttcacgtgaggct

SEQ ID NO: 615254 - DNA, 15 bp, Homo sapiens
gttcacgtgaggcta

SEQ ID NO: 615255 - DNA, 15 bp, Homo sapiens
ttcacgtgaggctaa

SEQ ID NO: 615256 - DNA, 15 bp, Homo sapiens
tcacgtgaggctaaa

SEQ ID NO: 615257 - DNA, 15 bp, Homo sapiens
cacgtgaggctaaaa

SEQ ID NO: 615258 - DNA, 15 bp, Homo sapiens
acgtgaggctaaaat

SEQ ID NO: 615259 - DNA, 15 bp, Homo sapiens
cgtgaggctaaaatg

SEQ ID NO: 615260 - DNA, 15 bp, Homo sapiens
gtgaggctaaaatgt

SEQ ID NO: 615261 - DNA, 15 bp, Homo sapiens
tgaggctaaaatgta

SEQ ID NO: 615262 - DNA, 15 bp, Homo sapiens
gaggctaaaatgtac

SEQ ID NO: 615263 - DNA, 15 bp, Homo sapiens
aggctaaaatgtaca

SEQ ID NO: 615264 - DNA, 15 bp, Homo sapiens
ggctaaaatgtacag

SEQ ID NO: 615265 - DNA, 15 bp, Homo sapiens
gctaaaatgtacagg

SEQ ID NO: 615266 - DNA, 15 bp, Homo sapiens
ctaaaatgtacaggg

SEQ ID NO: 615267 - DNA, 15 bp, Homo sapiens
taaaatgtacagggg

SEQ ID NO: 615268 - DNA, 15 bp, Homo sapiens
aaaatgtacaggggc

SEQ ID NO: 615269 - DNA, 15 bp, Homo sapiens
aaatgtacaggggca

SEQ ID NO: 615270 - DNA, 15 bp, Homo sapiens
aatgtacaggggcaa

SEQ ID NO: 615271 - DNA, 15 bp, Homo sapiens
atgtacaggggcaaa

SEQ ID NO: 615272 - DNA, 15 bp, Homo sapiens
tgtacaggggcaaaa

SEQ ID NO: 615273 - DNA, 15 bp, Homo sapiens
gtacaggggcaaaag

SEQ ID NO: 615274 - DNA, 15 bp, Homo sapiens
tacaggggcaaaagt

SEQ ID NO: 615275 - DNA, 15 bp, Homo sapiens
acaggggcaaaagtg

SEQ ID NO: 615276 - DNA, 15 bp, Homo sapiens
caggggcaaaagtgg

SEQ ID NO: 615277 - DNA, 15 bp, Homo sapiens
aggggcaaaagtggg

SEQ ID NO: 615278 - DNA, 15 bp, Homo sapiens
ggggcaaaagtggga

SEQ ID NO: 615279 - DNA, 15 bp, Homo sapiens
gggcaaaagtgggag

SEQ ID NO: 615280 - DNA, 15 bp, Homo sapiens
ggcaaaagtgggagc

SEQ ID NO: 615281 - DNA, 15 bp, Homo sapiens
gcaaaagtgggagca

SEQ ID NO: 615282 - DNA, 15 bp, Homo sapiens
caaaagtgggagcag

SEQ ID NO: 615283 - DNA, 15 bp, Homo sapiens
aaaagtgggagcagt

SEQ ID NO: 615284 - DNA, 15 bp, Homo sapiens
aaagtgggagcagtc

SEQ ID NO: 615285 - DNA, 15 bp, Homo sapiens
aagtgggagcagtcc

SEQ ID NO: 615286 - DNA, 15 bp, Homo sapiens
agtgggagcagtcct

SEQ ID NO: 615287 - DNA, 15 bp, Homo sapiens
gtgggagcagtcctc

SEQ ID NO: 615288 - DNA, 15 bp, Homo sapiens
tgggagcagtcctca

SEQ ID NO: 615289 - DNA, 15 bp, Homo sapiens
gggagcagtcctcac

SEQ ID NO: 615290 - DNA, 15 bp, Homo sapiens
ggagcagtcctcacc

SEQ ID NO: 615291 - DNA, 15 bp, Homo sapiens
gagcagtcctcaccc

SEQ ID NO: 615292 - DNA, 15 bp, Homo sapiens
agcagtcctcacccc

SEQ ID NO: 615293 - DNA, 15 bp, Homo sapiens
gcagtcctcaccccg

SEQ ID NO: 615294 - DNA, 15 bp, Homo sapiens
cagtcctcaccccga

SEQ ID NO: 615295 - DNA, 15 bp, Homo sapiens
agtcctcaccccgag

SEQ ID NO: 615296 - DNA, 15 bp, Homo sapiens
gtcctcaccccgagc

SEQ ID NO: 615297 - DNA, 15 bp, Homo sapiens
tcctcaccccgagcg

SEQ ID NO: 615298 - DNA, 15 bp, Homo sapiens
cctcaccccgagcga

SEQ ID NO: 615299 - DNA, 15 bp, Homo sapiens
ctcaccccgagcgat

SEQ ID NO: 615300 - DNA, 15 bp, Homo sapiens
tcaccccgagcgatg

SEQ ID NO: 615301 - DNA, 15 bp, Homo sapiens
caccccgagcgatgc

SEQ ID NO: 615302 - DNA, 15 bp, Homo sapiens
accccgagcgatgca

SEQ ID NO: 615303 - DNA, 15 bp, Homo sapiens
ccccgagcgatgcaa

SEQ ID NO: 615304 - DNA, 15 bp, Homo sapiens
cccgagcgatgcaac

SEQ ID NO: 615305 - DNA, 15 bp, Homo sapiens
ccgagcgatgcaaca

SEQ ID NO: 615306 - DNA, 15 bp, Homo sapiens
cgagcgatgcaacag

SEQ ID NO: 615307 - DNA, 15 bp, Homo sapiens
gagcgatgcaacagt

SEQ ID NO: 615308 - DNA, 15 bp, Homo sapiens
agcgatgcaacagtg

SEQ ID NO: 615309 - DNA, 15 bp, Homo sapiens
gcgatgcaacagtga

SEQ ID NO: 615310 - DNA, 15 bp, Homo sapiens
cgatgcaacagtgac

SEQ ID NO: 615311 - DNA, 15 bp, Homo sapiens
gatgcaacagtgact

SEQ ID NO: 615312 - DNA, 15 bp, Homo sapiens
atgcaacagtgactc

SEQ ID NO: 615313 - DNA, 15 bp, Homo sapiens
tgcaacagtgactcc

SEQ ID NO: 615314 - DNA, 15 bp, Homo sapiens
gcaacagtgactcct

SEQ ID NO: 615315 - DNA, 15 bp, Homo sapiens
caacagtgactcctc

SEQ ID NO: 615316 - DNA, 15 bp, Homo sapiens
aacagtgactcctca

SEQ ID NO: 615317 - DNA, 15 bp, Homo sapiens
acagtgactcctcac

SEQ ID NO: 615318 - DNA, 15 bp, Homo sapiens
cagtgactcctcacc

SEQ ID NO: 615319 - DNA, 15 bp, Homo sapiens
agtgactcctcacca

SEQ ID NO: 615320 - DNA, 15 bp, Homo sapiens
gtgactcctcaccac

SEQ ID NO: 615321 - DNA, 15 bp, Homo sapiens
tgactcctcaccacg

SEQ ID NO: 615322 - DNA, 15 bp, Homo sapiens
gactcctcaccacgc

SEQ ID NO: 615323 - DNA, 15 bp, Homo sapiens
actcctcaccacgcc

SEQ ID NO: 615324 - DNA, 15 bp, Homo sapiens
ctcctcaccacgcct

SEQ ID NO: 615325 - DNA, 15 bp, Homo sapiens
tcctcaccacgcctg

SEQ ID NO: 615326 - DNA, 15 bp, Homo sapiens
cctcaccacgcctgc

SEQ ID NO: 615327 - DNA, 15 bp, Homo sapiens
ctcaccacgcctgct

SEQ ID NO: 615328 - DNA, 15 bp, Homo sapiens
tcaccacgcctgctt

SEQ ID NO: 615329 - DNA, 15 bp, Homo sapiens
caccacgcctgcttg

SEQ ID NO: 615330 - DNA, 15 bp, Homo sapiens
accacgcctgcttga

SEQ ID NO: 615331 - DNA, 15 bp, Homo sapiens
ccacgcctgcttgat

SEQ ID NO: 615332 - DNA, 15 bp, Homo sapiens
cacgcctgcttgatt

SEQ ID NO: 615333 - DNA, 15 bp, Homo sapiens
acgcctgcttgattc

SEQ ID NO: 615334 - DNA, 15 bp, Homo sapiens
cgcctgcttgattca

SEQ ID NO: 615335 - DNA, 15 bp, Homo sapiens
gcctgcttgattcat

SEQ ID NO: 615336 - DNA, 15 bp, Homo sapiens
cctgcttgattcatc

SEQ ID NO: 615337 - DNA, 15 bp, Homo sapiens
ctgcttgattcatct

SEQ ID NO: 615338 - DNA, 15 bp, Homo sapiens
tgcttgattcatctg

SEQ ID NO: 615339 - DNA, 15 bp, Homo sapiens
gcttgattcatctgc

SEQ ID NO: 615340 - DNA, 15 bp, Homo sapiens
cttgattcatctgcc

SEQ ID NO: 615341 - DNA, 15 bp, Homo sapiens
ttgattcatctgccc

SEQ ID NO: 615342 - DNA, 15 bp, Homo sapiens
tgattcatctgccct

SEQ ID NO: 615343 - DNA, 15 bp, Homo sapiens
gattcatctgccctg

SEQ ID NO: 615344 - DNA, 15 bp, Homo sapiens
attcatctgccctgg

SEQ ID NO: 615345 - DNA, 15 bp, Homo sapiens
ttcatctgccctgga

SEQ ID NO: 615346 - DNA, 15 bp, Homo sapiens
tcatctgccctggaa

SEQ ID NO: 615347 - DNA, 15 bp, Homo sapiens
catctgccctggaaa

SEQ ID NO: 615348 - DNA, 15 bp, Homo sapiens
atctgccctggaaag

SEQ ID NO: 615349 - DNA, 15 bp, Homo sapiens
tctgccctggaaagt

SEQ ID NO: 615350 - DNA, 15 bp, Homo sapiens
ctgccctggaaagtc

SEQ ID NO: 615351 - DNA, 15 bp, Homo sapiens
tgccctggaaagtca

SEQ ID NO: 615352 - DNA, 15 bp, Homo sapiens
gccctggaaagtcat

SEQ ID NO: 615353 - DNA, 15 bp, Homo sapiens
ccctggaaagtcatt

SEQ ID NO: 615354 - DNA, 15 bp, Homo sapiens
cctggaaagtcatta

SEQ ID NO: 615355 - DNA, 15 bp, Homo sapiens
ctggaaagtcattaa

SEQ ID NO: 615356 - DNA, 15 bp, Homo sapiens
tggaaagtcattaaa

SEQ ID NO: 615357 - DNA, 15 bp, Homo sapiens
ggaaagtcattaaaa

SEQ ID NO: 615358 - DNA, 15 bp, Homo sapiens
gaaagtcattaaaaa

SEQ ID NO: 615359 - DNA, 15 bp, Homo sapiens
aaagtcattaaaaaa

SEQ ID NO: 615360 - DNA, 15 bp, Homo sapiens
aagtcattaaaaaac

SEQ ID NO: 615361 - DNA, 15 bp, Homo sapiens
agtcattaaaaaacc

SEQ ID NO: 615362 - DNA, 15 bp, Homo sapiens
gtcattaaaaaacca

SEQ ID NO: 615363 - DNA, 15 bp, Homo sapiens
tcattaaaaaaccag

SEQ ID NO: 615364 - DNA, 15 bp, Homo sapiens
cattaaaaaaccagt

SEQ ID NO: 615365 - DNA, 15 bp, Homo sapiens
attaaaaaaccagtt

SEQ ID NO: 615366 - DNA, 15 bp, Homo sapiens
ttaaaaaaccagttc

SEQ ID NO: 615367 - DNA, 15 bp, Homo sapiens
taaaaaaccagttca

SEQ ID NO: 615368 - DNA, 15 bp, Homo sapiens
aaaaaaccagttcaa

SEQ ID NO: 615369 - DNA, 15 bp, Homo sapiens
aaaaaccagttcaac

SEQ ID NO: 615370 - DNA, 15 bp, Homo sapiens
aaaaccagttcaact

SEQ ID NO: 615371 - DNA, 15 bp, Homo sapiens
aaaccagttcaactc

SEQ ID NO: 615372 - DNA, 15 bp, Homo sapiens
aaccagttcaactca

SEQ ID NO: 615373 - DNA, 15 bp, Homo sapiens
accagttcaactcat

SEQ ID NO: 615374 - DNA, 15 bp, Homo sapiens
ccagttcaactcatg

SEQ ID NO: 615375 - DNA, 15 bp, Homo sapiens
cagttcaactcatgg

SEQ ID NO: 615376 - DNA, 15 bp, Homo sapiens
agttcaactcatggg

SEQ ID NO: 615377 - DNA, 15 bp, Homo sapiens
gttcaactcatgggt

SEQ ID NO: 615378 - DNA, 15 bp, Homo sapiens
ttcaactcatgggtc

SEQ ID NO: 615379 - DNA, 15 bp, Homo sapiens
tcaactcatgggtcc

SEQ ID NO: 615380 - DNA, 15 bp, Homo sapiens
caactcatgggtccc

SEQ ID NO: 615381 - DNA, 15 bp, Homo sapiens
aactcatgggtccct

SEQ ID NO: 615382 - DNA, 15 bp, Homo sapiens
actcatgggtccctt

SEQ ID NO: 615383 - DNA, 15 bp, Homo sapiens
ctcatgggtcccttt

SEQ ID NO: 615384 - DNA, 15 bp, Homo sapiens
tcatgggtcccttta

SEQ ID NO: 615385 - DNA, 15 bp, Homo sapiens
catgggtccctttat

SEQ ID NO: 615386 - DNA, 15 bp, Homo sapiens
atgggtccctttatt

SEQ ID NO: 615387 - DNA, 15 bp, Homo sapiens
tgggtccctttattt

SEQ ID NO: 615388 - DNA, 15 bp, Homo sapiens
gggtccctttattta

SEQ ID NO: 615389 - DNA, 15 bp, Homo sapiens
ggtccctttatttac

SEQ ID NO: 615390 - DNA, 15 bp, Homo sapiens
gtccctttatttact

SEQ ID NO: 615391 - DNA, 15 bp, Homo sapiens
tccctttatttactc

SEQ ID NO: 615392 - DNA, 15 bp, Homo sapiens
ccctttatttactca

SEQ ID NO: 615393 - DNA, 15 bp, Homo sapiens
cctttatttactcac

SEQ ID NO: 615394 - DNA, 15 bp, Homo sapiens
ctttatttactcaca

SEQ ID NO: 615395 - DNA, 15 bp, Homo sapiens
tttatttactcacaa

SEQ ID NO: 615396 - DNA, 15 bp, Homo sapiens
ttatttactcacaag

SEQ ID NO: 615397 - DNA, 15 bp, Homo sapiens
tatttactcacaaga

SEQ ID NO: 615398 - DNA, 15 bp, Homo sapiens
atttactcacaagag

SEQ ID NO: 615399 - DNA, 15 bp, Homo sapiens
tttactcacaagaga

SEQ ID NO: 615400 - DNA, 15 bp, Homo sapiens
ttactcacaagagag

SEQ ID NO: 615401 - DNA, 15 bp, Homo sapiens
tactcacaagagaga

SEQ ID NO: 615402 - DNA, 15 bp, Homo sapiens
actcacaagagagag

SEQ ID NO: 615403 - DNA, 15 bp, Homo sapiens
ctcacaagagagagc

SEQ ID NO: 615404 - DNA, 15 bp, Homo sapiens
tcacaagagagagcc

SEQ ID NO: 615405 - DNA, 15 bp, Homo sapiens
cacaagagagagcca

SEQ ID NO: 615406 - DNA, 15 bp, Homo sapiens
acaagagagagccag

SEQ ID NO: 615407 - DNA, 15 bp, Homo sapiens
caagagagagccagc

SEQ ID NO: 615408 - DNA, 15 bp, Homo sapiens
aagagagagccagca

SEQ ID NO: 615409 - DNA, 15 bp, Homo sapiens
agagagagccagcag

SEQ ID NO: 615410 - DNA, 15 bp, Homo sapiens
gagagagccagcagc

SEQ ID NO: 615411 - DNA, 15 bp, Homo sapiens
agagagccagcagcc

SEQ ID NO: 615412 - DNA, 15 bp, Homo sapiens
gagagccagcagccc

SEQ ID NO: 615413 - DNA, 15 bp, Homo sapiens
agagccagcagccca

SEQ ID NO: 615414 - DNA, 15 bp, Homo sapiens
gagccagcagcccat

SEQ ID NO: 615415 - DNA, 15 bp, Homo sapiens
agccagcagcccatt

SEQ ID NO: 615416 - DNA, 15 bp, Homo sapiens
gccagcagcccattt

SEQ ID NO: 615417 - DNA, 15 bp, Homo sapiens
ccagcagcccatttc

SEQ ID NO: 615418 - DNA, 15 bp, Homo sapiens
cagcagcccatttca

SEQ ID NO: 615419 - DNA, 15 bp, Homo sapiens
agcagcccatttcac

SEQ ID NO: 615420 - DNA, 15 bp, Homo sapiens
gcagcccatttcact

SEQ ID NO: 615421 - DNA, 15 bp, Homo sapiens
cagcccatttcacta

SEQ ID NO: 615422 - DNA, 15 bp, Homo sapiens
agcccatttcactag

SEQ ID NO: 615423 - DNA, 15 bp, Homo sapiens
gcccatttcactagt

SEQ ID NO: 615424 - DNA, 15 bp, Homo sapiens
cccatttcactagtt

SEQ ID NO: 615425 - DNA, 15 bp, Homo sapiens
ccatttcactagttt

SEQ ID NO: 615426 - DNA, 15 bp, Homo sapiens
catttcactagtttt

SEQ ID NO: 615427 - DNA, 15 bp, Homo sapiens
atttcactagttttc

SEQ ID NO: 615428 - DNA, 15 bp, Homo sapiens
tttcactagttttcc

SEQ ID NO: 615429 - DNA, 15 bp, Homo sapiens
ttcactagttttcct

SEQ ID NO: 615430 - DNA, 15 bp, Homo sapiens
tcactagttttcctt

SEQ ID NO: 615431 - DNA, 15 bp, Homo sapiens
cactagttttccttt

SEQ ID NO: 615432 - DNA, 15 bp, Homo sapiens
actagttttcctttc

SEQ ID NO: 615433 - DNA, 15 bp, Homo sapiens
ctagttttcctttcc

SEQ ID NO: 615434 - DNA, 15 bp, Homo sapiens
tagttttcctttcct

SEQ ID NO: 615435 - DNA, 15 bp, Homo sapiens
agttttcctttccta

SEQ ID NO: 615436 - DNA, 15 bp, Homo sapiens
gttttcctttcctac

SEQ ID NO: 615437 - DNA, 15 bp, Homo sapiens
ttttcctttcctact

SEQ ID NO: 615438 - DNA, 15 bp, Homo sapiens
tttcctttcctactc

SEQ ID NO: 615439 - DNA, 15 bp, Homo sapiens
ttcctttcctactct

SEQ ID NO: 615440 - DNA, 15 bp, Homo sapiens
tcctttcctactctt

SEQ ID NO: 615441 - DNA, 15 bp, Homo sapiens
cctttcctactcttt

SEQ ID NO: 615442 - DNA, 15 bp, Homo sapiens
ctttcctactctttg

SEQ ID NO: 615443 - DNA, 15 bp, Homo sapiens
tttcctactctttga

SEQ ID NO: 615444 - DNA, 15 bp, Homo sapiens
ttcctactctttgag

SEQ ID NO: 615445 - DNA, 15 bp, Homo sapiens
tcctactctttgaga

SEQ ID NO: 615446 - DNA, 15 bp, Homo sapiens
cctactctttgagaa

SEQ ID NO: 615447 - DNA, 15 bp, Homo sapiens
ctactctttgagaag

SEQ ID NO: 615448 - DNA, 15 bp, Homo sapiens
tactctttgagaaga

SEQ ID NO: 615449 - DNA, 15 bp, Homo sapiens
actctttgagaagaa

SEQ ID NO: 615450 - DNA, 15 bp, Homo sapiens
ctctttgagaagaat

SEQ ID NO: 615451 - DNA, 15 bp, Homo sapiens
tctttgagaagaatc

SEQ ID NO: 615452 - DNA, 15 bp, Homo sapiens
ctttgagaagaatca

SEQ ID NO: 615453 - DNA, 15 bp, Homo sapiens
tttgagaagaatcag

SEQ ID NO: 615454 - DNA, 15 bp, Homo sapiens
ttgagaagaatcaga

SEQ ID NO: 615455 - DNA, 15 bp, Homo sapiens
tgagaagaatcagaa

SEQ ID NO: 615456 - DNA, 15 bp, Homo sapiens
gagaagaatcagaag

SEQ ID NO: 615457 - DNA, 15 bp, Homo sapiens
agaagaatcagaagg

SEQ ID NO: 615458 - DNA, 15 bp, Homo sapiens
gaagaatcagaaggg

SEQ ID NO: 615459 - DNA, 15 bp, Homo sapiens
aagaatcagaaggga

SEQ ID NO: 615460 - DNA, 15 bp, Homo sapiens
agaatcagaagggag

SEQ ID NO: 615461 - DNA, 15 bp, Homo sapiens
gaatcagaagggagg

SEQ ID NO: 615462 - DNA, 15 bp, Homo sapiens
aatcagaagggaggg

SEQ ID NO: 615463 - DNA, 15 bp, Homo sapiens
atcagaagggaggga

SEQ ID NO: 615464 - DNA, 15 bp, Homo sapiens
tcagaagggagggag

SEQ ID NO: 615465 - DNA, 15 bp, Homo sapiens
cagaagggagggagc

SEQ ID NO: 615466 - DNA, 15 bp, Homo sapiens
agaagggagggagct

SEQ ID NO: 615467 - DNA, 15 bp, Homo sapiens
gaagggagggagctt

SEQ ID NO: 615468 - DNA, 15 bp, Homo sapiens
aagggagggagcttg

SEQ ID NO: 615469 - DNA, 15 bp, Homo sapiens
agggagggagcttgc

SEQ ID NO: 615470 - DNA, 15 bp, Homo sapiens
gggagggagcttgcc

SEQ ID NO: 615471 - DNA, 15 bp, Homo sapiens
ggagggagcttgcca

SEQ ID NO: 615472 - DNA, 15 bp, Homo sapiens
gagggagcttgccac

SEQ ID NO: 615473 - DNA, 15 bp, Homo sapiens
agggagcttgccact

SEQ ID NO: 615474 - DNA, 15 bp, Homo sapiens
gggagcttgccactt

SEQ ID NO: 615475 - DNA, 15 bp, Homo sapiens
ggagcttgccacttt

SEQ ID NO: 615476 - DNA, 15 bp, Homo sapiens
gagcttgccacttta

SEQ ID NO: 615477 - DNA, 15 bp, Homo sapiens
agcttgccactttac

SEQ ID NO: 615478 - DNA, 15 bp, Homo sapiens
gcttgccactttact

SEQ ID NO: 615479 - DNA, 15 bp, Homo sapiens
cttgccactttacta

SEQ ID NO: 615480 - DNA, 15 bp, Homo sapiens
ttgccactttactat

SEQ ID NO: 615481 - DNA, 15 bp, Homo sapiens
tgccactttactatc

SEQ ID NO: 615482 - DNA, 15 bp, Homo sapiens
gccactttactatct

SEQ ID NO: 615483 - DNA, 15 bp, Homo sapiens
ccactttactatctg

SEQ ID NO: 615484 - DNA, 15 bp, Homo sapiens
cactttactatctgt

SEQ ID NO: 615485 - DNA, 15 bp, Homo sapiens
actttactatctgtc

SEQ ID NO: 615486 - DNA, 15 bp, Homo sapiens
ctttactatctgtct

SEQ ID NO: 615487 - DNA, 15 bp, Homo sapiens
tttactatctgtcta

SEQ ID NO: 615488 - DNA, 15 bp, Homo sapiens
ttactatctgtctaa

SEQ ID NO: 615489 - DNA, 15 bp, Homo sapiens
tactatctgtctaaa

SEQ ID NO: 615490 - DNA, 15 bp, Homo sapiens
actatctgtctaaag

SEQ ID NO: 615491 - DNA, 15 bp, Homo sapiens
ctatctgtctaaaga

SEQ ID NO: 615492 - DNA, 15 bp, Homo sapiens
tatctgtctaaagag

SEQ ID NO: 615493 - DNA, 15 bp, Homo sapiens
atctgtctaaagaga

SEQ ID NO: 615494 - DNA, 15 bp, Homo sapiens
tctgtctaaagagat

SEQ ID NO: 615495 - DNA, 15 bp, Homo sapiens
ctgtctaaagagatg

SEQ ID NO: 615496 - DNA, 15 bp, Homo sapiens
tgtctaaagagatgt

SEQ ID NO: 615497 - DNA, 15 bp, Homo sapiens
gtctaaagagatgtt

SEQ ID NO: 615498 - DNA, 15 bp, Homo sapiens
tctaaagagatgttt

SEQ ID NO: 615499 - DNA, 15 bp, Homo sapiens
ctaaagagatgtttc

SEQ ID NO: 615500 - DNA, 15 bp, Homo sapiens
taaagagatgtttcc

SEQ ID NO: 615501 - DNA, 15 bp, Homo sapiens
aaagagatgtttcca

SEQ ID NO: 615502 - DNA, 15 bp, Homo sapiens
aagagatgtttccat

SEQ ID NO: 615503 - DNA, 15 bp, Homo sapiens
agagatgtttccatt

SEQ ID NO: 615504 - DNA, 15 bp, Homo sapiens
gagatgtttccatta

SEQ ID NO: 615505 - DNA, 15 bp, Homo sapiens
agatgtttccattaa

SEQ ID NO: 615506 - DNA, 15 bp, Homo sapiens
gatgtttccattaat

SEQ ID NO: 615507 - DNA, 15 bp, Homo sapiens
atgtttccattaatt

SEQ ID NO: 615508 - DNA, 15 bp, Homo sapiens
tgtttccattaatta

SEQ ID NO: 615509 - DNA, 15 bp, Homo sapiens
gtttccattaattaa

SEQ ID NO: 615510 - DNA, 15 bp, Homo sapiens
tttccattaattaaa

SEQ ID NO: 615511 - DNA, 15 bp, Homo sapiens
ttccattaattaaag

SEQ ID NO: 615512 - DNA, 15 bp, Homo sapiens
tccattaattaaagg

SEQ ID NO: 615513 - DNA, 15 bp, Homo sapiens
ccattaattaaaggt

SEQ ID NO: 615514 - DNA, 15 bp, Homo sapiens
cattaattaaaggtt

SEQ ID NO: 615515 - DNA, 15 bp, Homo sapiens
attaattaaaggttt

SEQ ID NO: 615516 - DNA, 15 bp, Homo sapiens
ttaattaaaggtttt

SEQ ID NO: 615517 - DNA, 15 bp, Homo sapiens
taattaaaggttttt

SEQ ID NO: 615518 - DNA, 15 bp, Homo sapiens
aattaaaggtttttg

SEQ ID NO: 615519 - DNA, 15 bp, Homo sapiens
attaaaggtttttgt

SEQ ID NO: 615520 - DNA, 15 bp, Homo sapiens
ttaaaggtttttgtt

SEQ ID NO: 615521 - DNA, 15 bp, Homo sapiens
taaaggtttttgttt

SEQ ID NO: 615522 - DNA, 15 bp, Homo sapiens
aaaggtttttgtttt

SEQ ID NO: 615523 - DNA, 15 bp, Homo sapiens
aaggtttttgttttg

SEQ ID NO: 615524 - DNA, 15 bp, Homo sapiens
aggtttttgttttgc

SEQ ID NO: 615525 - DNA, 15 bp, Homo sapiens
ggtttttgttttgct

SEQ ID NO: 615526 - DNA, 15 bp, Homo sapiens
gtttttgttttgctt

SEQ ID NO: 615527 - DNA, 15 bp, Homo sapiens
tttttgttttgcttc

SEQ ID NO: 615528 - DNA, 15 bp, Homo sapiens
ttttgttttgcttca

SEQ ID NO: 615529 - DNA, 15 bp, Homo sapiens
tttgttttgcttcaa

SEQ ID NO: 615530 - DNA, 15 bp, Homo sapiens
ttgttttgcttcaaa

SEQ ID NO: 615531 - DNA, 15 bp, Homo sapiens
tgttttgcttcaaaa

SEQ ID NO: 615532 - DNA, 15 bp, Homo sapiens
gttttgcttcaaaaa

SEQ ID NO: 615533 - DNA, 15 bp, Homo sapiens
ttttgcttcaaaaaa

SEQ ID NO: 615534 - DNA, 15 bp, Homo sapiens
tttgcttcaaaaaaa

SEQ ID NO: 615535 - DNA, 15 bp, Homo sapiens
ttgcttcaaaaaaac

SEQ ID NO: 615536 - DNA, 15 bp, Homo sapiens
tgcttcaaaaaaact

SEQ ID NO: 615537 - DNA, 15 bp, Homo sapiens
gcttcaaaaaaactt

SEQ ID NO: 615538 - DNA, 15 bp, Homo sapiens
cttcaaaaaaacttg

SEQ ID NO: 615539 - DNA, 15 bp, Homo sapiens
ttcaaaaaaacttga

SEQ ID NO: 615540 - DNA, 15 bp, Homo sapiens
tcaaaaaaacttgaa

SEQ ID NO: 615541 - DNA, 15 bp, Homo sapiens
caaaaaaacttgaat

SEQ ID NO: 615542 - DNA, 15 bp, Homo sapiens
aaaaaaacttgaatt

SEQ ID NO: 615543 - DNA, 15 bp, Homo sapiens
aaaaaacttgaattg

SEQ ID NO: 615544 - DNA, 15 bp, Homo sapiens
aaaaacttgaattgg

SEQ ID NO: 615545 - DNA, 15 bp, Homo sapiens
aaaacttgaattgga

SEQ ID NO: 615546 - DNA, 15 bp, Homo sapiens
aaacttgaattggag

SEQ ID NO: 615547 - DNA, 15 bp, Homo sapiens
aacttgaattggagt

SEQ ID NO: 615548 - DNA, 15 bp, Homo sapiens
acttgaattggagta

SEQ ID NO: 615549 - DNA, 15 bp, Homo sapiens
cttgaattggagtat

SEQ ID NO: 615550 - DNA, 15 bp, Homo sapiens
ttgaattggagtatt

SEQ ID NO: 615551 - DNA, 15 bp, Homo sapiens
tgaattggagtattt

SEQ ID NO: 615552 - DNA, 15 bp, Homo sapiens
gaattggagtatttc

SEQ ID NO: 615553 - DNA, 15 bp, Homo sapiens
aattggagtatttcc

SEQ ID NO: 615554 - DNA, 15 bp, Homo sapiens
attggagtatttcca

SEQ ID NO: 615555 - DNA, 15 bp, Homo sapiens
ttggagtatttccac

SEQ ID NO: 615556 - DNA, 15 bp, Homo sapiens
tggagtatttccaca

SEQ ID NO: 615557 - DNA, 15 bp, Homo sapiens
ggagtatttccacaa

SEQ ID NO: 615558 - DNA, 15 bp, Homo sapiens
gagtatttccacaag

SEQ ID NO: 615559 - DNA, 15 bp, Homo sapiens
agtatttccacaagt

SEQ ID NO: 615560 - DNA, 15 bp, Homo sapiens
gtatttccacaagta

SEQ ID NO: 615561 - DNA, 15 bp, Homo sapiens
tatttccacaagtat

SEQ ID NO: 615562 - DNA, 15 bp, Homo sapiens
atttccacaagtatc

SEQ ID NO: 615563 - DNA, 15 bp, Homo sapiens
tttccacaagtatct

SEQ ID NO: 615564 - DNA, 15 bp, Homo sapiens
ttccacaagtatctt

SEQ ID NO: 615565 - DNA, 15 bp, Homo sapiens
tccacaagtatcttt

SEQ ID NO: 615566 - DNA, 15 bp, Homo sapiens
ccacaagtatcttta

SEQ ID NO: 615567 - DNA, 15 bp, Homo sapiens
cacaagtatctttaa

SEQ ID NO: 615568 - DNA, 15 bp, Homo sapiens
acaagtatctttaac

SEQ ID NO: 615569 - DNA, 15 bp, Homo sapiens
caagtatctttaaca

SEQ ID NO: 615570 - DNA, 15 bp, Homo sapiens
aagtatctttaacat

SEQ ID NO: 615571 - DNA, 15 bp, Homo sapiens
agtatctttaacatg

SEQ ID NO: 615572 - DNA, 15 bp, Homo sapiens
gtatctttaacatgc

SEQ ID NO: 615573 - DNA, 15 bp, Homo sapiens
tatctttaacatgct

SEQ ID NO: 615574 - DNA, 15 bp, Homo sapiens
atctttaacatgctc

SEQ ID NO: 615575 - DNA, 15 bp, Homo sapiens
tctttaacatgctct

SEQ ID NO: 615576 - DNA, 15 bp, Homo sapiens
ctttaacatgctcta

SEQ ID NO: 615577 - DNA, 15 bp, Homo sapiens
tttaacatgctctac

SEQ ID NO: 615578 - DNA, 15 bp, Homo sapiens
ttaacatgctctacc

SEQ ID NO: 615579 - DNA, 15 bp, Homo sapiens
taacatgctctacca

SEQ ID NO: 615580 - DNA, 15 bp, Homo sapiens
aacatgctctaccaa

SEQ ID NO: 615581 - DNA, 15 bp, Homo sapiens
acatgctctaccaat

SEQ ID NO: 615582 - DNA, 15 bp, Homo sapiens
catgctctaccaatg

SEQ ID NO: 615583 - DNA, 15 bp, Homo sapiens
atgctctaccaatgt

SEQ ID NO: 615584 - DNA, 15 bp, Homo sapiens
tgctctaccaatgtt

SEQ ID NO: 615585 - DNA, 15 bp, Homo sapiens
gctctaccaatgttt

SEQ ID NO: 615586 - DNA, 15 bp, Homo sapiens
ctctaccaatgtttg

SEQ ID NO: 615587 - DNA, 15 bp, Homo sapiens
tctaccaatgtttgc

SEQ ID NO: 615588 - DNA, 15 bp, Homo sapiens
ctaccaatgtttgca

SEQ ID NO: 615589 - DNA, 15 bp, Homo sapiens
taccaatgtttgcag

SEQ ID NO: 615590 - DNA, 15 bp, Homo sapiens
accaatgtttgcaga

SEQ ID NO: 615591 - DNA, 15 bp, Homo sapiens
ccaatgtttgcagaa

SEQ ID NO: 615592 - DNA, 15 bp, Homo sapiens
caatgtttgcagaaa

SEQ ID NO: 615593 - DNA, 15 bp, Homo sapiens
aatgtttgcagaaag

SEQ ID NO: 615594 - DNA, 15 bp, Homo sapiens
atgtttgcagaaaga

SEQ ID NO: 615595 - DNA, 15 bp, Homo sapiens
tgtttgcagaaagaa

SEQ ID NO: 615596 - DNA, 15 bp, Homo sapiens
gtttgcagaaagaag

SEQ ID NO: 615597 - DNA, 15 bp, Homo sapiens
tttgcagaaagaagt

SEQ ID NO: 615598 - DNA, 15 bp, Homo sapiens
ttgcagaaagaagtg

SEQ ID NO: 615599 - DNA, 15 bp, Homo sapiens
tgcagaaagaagtgc

SEQ ID NO: 615600 - DNA, 15 bp, Homo sapiens
gcagaaagaagtgca

SEQ ID NO: 615601 - DNA, 15 bp, Homo sapiens
cagaaagaagtgcag

SEQ ID NO: 615602 - DNA, 15 bp, Homo sapiens
agaaagaagtgcaga

SEQ ID NO: 615603 - DNA, 15 bp, Homo sapiens
gaaagaagtgcagaa

SEQ ID NO: 615604 - DNA, 15 bp, Homo sapiens
aaagaagtgcagaaa

SEQ ID NO: 615605 - DNA, 15 bp, Homo sapiens
aagaagtgcagaaat

SEQ ID NO: 615606 - DNA, 15 bp, Homo sapiens
agaagtgcagaaatg

SEQ ID NO: 615607 - DNA, 15 bp, Homo sapiens
gaagtgcagaaatga

SEQ ID NO: 615608 - DNA, 15 bp, Homo sapiens
aagtgcagaaatgag

SEQ ID NO: 615609 - DNA, 15 bp, Homo sapiens
agtgcagaaatgaga

SEQ ID NO: 615610 - DNA, 15 bp, Homo sapiens
gtgcagaaatgagac

SEQ ID NO: 615611 - DNA, 15 bp, Homo sapiens
tgcagaaatgagact

SEQ ID NO: 615612 - DNA, 15 bp, Homo sapiens
gcagaaatgagactg

SEQ ID NO: 615613 - DNA, 15 bp, Homo sapiens
cagaaatgagactgt

SEQ ID NO: 615614 - DNA, 15 bp, Homo sapiens
agaaatgagactgtc

SEQ ID NO: 615615 - DNA, 15 bp, Homo sapiens
gaaatgagactgtcc

SEQ ID NO: 615616 - DNA, 15 bp, Homo sapiens
aaatgagactgtcca

SEQ ID NO: 615617 - DNA, 15 bp, Homo sapiens
aatgagactgtccac

SEQ ID NO: 615618 - DNA, 15 bp, Homo sapiens
atgagactgtccaca

SEQ ID NO: 615619 - DNA, 15 bp, Homo sapiens
tgagactgtccacag

SEQ ID NO: 615620 - DNA, 15 bp, Homo sapiens
gagactgtccacaga

SEQ ID NO: 615621 - DNA, 15 bp, Homo sapiens
agactgtccacagag

SEQ ID NO: 615622 - DNA, 15 bp, Homo sapiens
gactgtccacagagt

SEQ ID NO: 615623 - DNA, 15 bp, Homo sapiens
actgtccacagagtc

SEQ ID NO: 615624 - DNA, 15 bp, Homo sapiens
ctgtccacagagtca

SEQ ID NO: 615625 - DNA, 15 bp, Homo sapiens
tgtccacagagtcag

SEQ ID NO: 615626 - DNA, 15 bp, Homo sapiens
gtccacagagtcagg

SEQ ID NO: 615627 - DNA, 15 bp, Homo sapiens
tccacagagtcaggc

SEQ ID NO: 615628 - DNA, 15 bp, Homo sapiens
ccacagagtcaggct

SEQ ID NO: 615629 - DNA, 15 bp, Homo sapiens
cacagagtcaggctc

SEQ ID NO: 615630 - DNA, 15 bp, Homo sapiens
acagagtcaggctcg

SEQ ID NO: 615631 - DNA, 15 bp, Homo sapiens
cagagtcaggctcgc

SEQ ID NO: 615632 - DNA, 15 bp, Homo sapiens
agagtcaggctcgct

SEQ ID NO: 615633 - DNA, 15 bp, Homo sapiens
gagtcaggctcgctg

SEQ ID NO: 615634 - DNA, 15 bp, Homo sapiens
agtcaggctcgctgg

SEQ ID NO: 615635 - DNA, 15 bp, Homo sapiens
gtcaggctcgctggc

SEQ ID NO: 615636 - DNA, 15 bp, Homo sapiens
tcaggctcgctggcc

SEQ ID NO: 615637 - DNA, 15 bp, Homo sapiens
caggctcgctggcca

SEQ ID NO: 615638 - DNA, 15 bp, Homo sapiens
aggctcgctggccag

SEQ ID NO: 615639 - DNA, 15 bp, Homo sapiens
ggctcgctggccagg

SEQ ID NO: 615640 - DNA, 15 bp, Homo sapiens
gctcgctggccagga

SEQ ID NO: 615641 - DNA, 15 bp, Homo sapiens
ctcgctggccaggag

SEQ ID NO: 615642 - DNA, 15 bp, Homo sapiens
tcgctggccaggaga

SEQ ID NO: 615643 - DNA, 15 bp, Homo sapiens
cgctggccaggagag

SEQ ID NO: 615644 - DNA, 15 bp, Homo sapiens
gctggccaggagagg

SEQ ID NO: 615645 - DNA, 15 bp, Homo sapiens
ctggccaggagagga

SEQ ID NO: 615646 - DNA, 15 bp, Homo sapiens
tggccaggagaggac

SEQ ID NO: 615647 - DNA, 15 bp, Homo sapiens
ggccaggagaggact

SEQ ID NO: 615648 - DNA, 15 bp, Homo sapiens
gccaggagaggactc

SEQ ID NO: 615649 - DNA, 15 bp, Homo sapiens
ccaggagaggactcc

SEQ ID NO: 615650 - DNA, 15 bp, Homo sapiens
caggagaggactccc

SEQ ID NO: 615651 - DNA, 15 bp, Homo sapiens
aggagaggactcccg

SEQ ID NO: 615652 - DNA, 15 bp, Homo sapiens
ggagaggactcccga

SEQ ID NO: 615653 - DNA, 15 bp, Homo sapiens
gagaggactcccgaa

SEQ ID NO: 615654 - DNA, 15 bp, Homo sapiens
agaggactcccgaag

SEQ ID NO: 615655 - DNA, 15 bp, Homo sapiens
gaggactcccgaagc

SEQ ID NO: 615656 - DNA, 15 bp, Homo sapiens
aggactcccgaagct

SEQ ID NO: 615657 - DNA, 15 bp, Homo sapiens
ggactcccgaagctg

SEQ ID NO: 615658 - DNA, 15 bp, Homo sapiens
gactcccgaagctga

SEQ ID NO: 615659 - DNA, 15 bp, Homo sapiens
actcccgaagctgac

SEQ ID NO: 615660 - DNA, 15 bp, Homo sapiens
ctcccgaagctgact

SEQ ID NO: 615661 - DNA, 15 bp, Homo sapiens
tcccgaagctgactt

SEQ ID NO: 615662 - DNA, 15 bp, Homo sapiens
cccgaagctgacttc

SEQ ID NO: 615663 - DNA, 15 bp, Homo sapiens
ccgaagctgacttct

SEQ ID NO: 615664 - DNA, 15 bp, Homo sapiens
cgaagctgacttctg

SEQ ID NO: 615665 - DNA, 15 bp, Homo sapiens
gaagctgacttctga

SEQ ID NO: 615666 - DNA, 15 bp, Homo sapiens
aagctgacttctgat

SEQ ID NO: 615667 - DNA, 15 bp, Homo sapiens
agctgacttctgatg

SEQ ID NO: 615668 - DNA, 15 bp, Homo sapiens
gctgacttctgatgg

SEQ ID NO: 615669 - DNA, 15 bp, Homo sapiens
ctgacttctgatggc

SEQ ID NO: 615670 - DNA, 15 bp, Homo sapiens
tgacttctgatggcc

SEQ ID NO: 615671 - DNA, 15 bp, Homo sapiens
gacttctgatggcct

SEQ ID NO: 615672 - DNA, 15 bp, Homo sapiens
acttctgatggcctg

SEQ ID NO: 615673 - DNA, 15 bp, Homo sapiens
cttctgatggcctga

SEQ ID NO: 615674 - DNA, 15 bp, Homo sapiens
ttctgatggcctgag

SEQ ID NO: 615675 - DNA, 15 bp, Homo sapiens
tctgatggcctgaga

SEQ ID NO: 615676 - DNA, 15 bp, Homo sapiens
ctgatggcctgagaa

SEQ ID NO: 615677 - DNA, 15 bp, Homo sapiens
tgatggcctgagaaa

SEQ ID NO: 615678 - DNA, 15 bp, Homo sapiens
gatggcctgagaaac

SEQ ID NO: 615679 - DNA, 15 bp, Homo sapiens
atggcctgagaaact

SEQ ID NO: 615680 - DNA, 15 bp, Homo sapiens
tggcctgagaaactt

SEQ ID NO: 615681 - DNA, 15 bp, Homo sapiens
ggcctgagaaacttc

SEQ ID NO: 615682 - DNA, 15 bp, Homo sapiens
gcctgagaaacttcc

SEQ ID NO: 615683 - DNA, 15 bp, Homo sapiens
cctgagaaacttcct

SEQ ID NO: 615684 - DNA, 15 bp, Homo sapiens
ctgagaaacttccta

SEQ ID NO: 615685 - DNA, 15 bp, Homo sapiens
tgagaaacttcctag

SEQ ID NO: 615686 - DNA, 15 bp, Homo sapiens
gagaaacttcctagt

SEQ ID NO: 615687 - DNA, 15 bp, Homo sapiens
agaaacttcctagtt

SEQ ID NO: 615688 - DNA, 15 bp, Homo sapiens
gaaacttcctagttc

SEQ ID NO: 615689 - DNA, 15 bp, Homo sapiens
aaacttcctagttca

SEQ ID NO: 615690 - DNA, 15 bp, Homo sapiens
aacttcctagttcac

SEQ ID NO: 615691 - DNA, 15 bp, Homo sapiens
acttcctagttcaca

SEQ ID NO: 615692 - DNA, 15 bp, Homo sapiens
cttcctagttcacaa

SEQ ID NO: 615693 - DNA, 15 bp, Homo sapiens
ttcctagttcacaat

SEQ ID NO: 615694 - DNA, 15 bp, Homo sapiens
tcctagttcacaatt

SEQ ID NO: 615695 - DNA, 15 bp, Homo sapiens
cctagttcacaattc

SEQ ID NO: 615696 - DNA, 15 bp, Homo sapiens
ctagttcacaattcc

SEQ ID NO: 615697 - DNA, 15 bp, Homo sapiens
tagttcacaattccc

SEQ ID NO: 615698 - DNA, 15 bp, Homo sapiens
agttcacaattccca

SEQ ID NO: 615699 - DNA, 15 bp, Homo sapiens
gttcacaattcccag

SEQ ID NO: 615700 - DNA, 15 bp, Homo sapiens
ttcacaattcccaga

SEQ ID NO: 615701 - DNA, 15 bp, Homo sapiens
tcacaattcccagac

SEQ ID NO: 615702 - DNA, 15 bp, Homo sapiens
cacaattcccagacc

SEQ ID NO: 615703 - DNA, 15 bp, Homo sapiens
acaattcccagaccc

SEQ ID NO: 615704 - DNA, 15 bp, Homo sapiens
caattcccagaccca

SEQ ID NO: 615705 - DNA, 15 bp, Homo sapiens
aattcccagacccag

SEQ ID NO: 615706 - DNA, 15 bp, Homo sapiens
attcccagacccaga

SEQ ID NO: 615707 - DNA, 15 bp, Homo sapiens
ttcccagacccagac

SEQ ID NO: 615708 - DNA, 15 bp, Homo sapiens
tcccagacccagaca

SEQ ID NO: 615709 - DNA, 15 bp, Homo sapiens
cccagacccagacaa

SEQ ID NO: 615710 - DNA, 15 bp, Homo sapiens
ccagacccagacaaa

SEQ ID NO: 615711 - DNA, 15 bp, Homo sapiens
cagacccagacaaag

SEQ ID NO: 615712 - DNA, 15 bp, Homo sapiens
agacccagacaaaga

SEQ ID NO: 615713 - DNA, 15 bp, Homo sapiens
gacccagacaaagag

SEQ ID NO: 615714 - DNA, 15 bp, Homo sapiens
acccagacaaagagc

SEQ ID NO: 615715 - DNA, 15 bp, Homo sapiens
cccagacaaagagca

SEQ ID NO: 615716 - DNA, 15 bp, Homo sapiens
ccagacaaagagcac

SEQ ID NO: 615717 - DNA, 15 bp, Homo sapiens
cagacaaagagcact

SEQ ID NO: 615718 - DNA, 15 bp, Homo sapiens
agacaaagagcactg

SEQ ID NO: 615719 - DNA, 15 bp, Homo sapiens
gacaaagagcactgt

SEQ ID NO: 615720 - DNA, 15 bp, Homo sapiens
acaaagagcactgtc

SEQ ID NO: 615721 - DNA, 15 bp, Homo sapiens
caaagagcactgtct

SEQ ID NO: 615722 - DNA, 15 bp, Homo sapiens
aaagagcactgtctt

SEQ ID NO: 615723 - DNA, 15 bp, Homo sapiens
aagagcactgtcttt

SEQ ID NO: 615724 - DNA, 15 bp, Homo sapiens
agagcactgtctttt

SEQ ID NO: 615725 - DNA, 15 bp, Homo sapiens
gagcactgtcttttc

SEQ ID NO: 615726 - DNA, 15 bp, Homo sapiens
agcactgtcttttct

SEQ ID NO: 615727 - DNA, 15 bp, Homo sapiens
gcactgtcttttctc

SEQ ID NO: 615728 - DNA, 15 bp, Homo sapiens
cactgtcttttctct

SEQ ID NO: 615729 - DNA, 15 bp, Homo sapiens
actgtcttttctcta

SEQ ID NO: 615730 - DNA, 15 bp, Homo sapiens
ctgtcttttctctaa

SEQ ID NO: 615731 - DNA, 15 bp, Homo sapiens
tgtcttttctctaat

SEQ ID NO: 615732 - DNA, 15 bp, Homo sapiens
gtcttttctctaatt

SEQ ID NO: 615733 - DNA, 15 bp, Homo sapiens
tcttttctctaattg

SEQ ID NO: 615734 - DNA, 15 bp, Homo sapiens
cttttctctaattgt

SEQ ID NO: 615735 - DNA, 15 bp, Homo sapiens
ttttctctaattgtt

SEQ ID NO: 615736 - DNA, 15 bp, Homo sapiens
tttctctaattgttt

SEQ ID NO: 615737 - DNA, 15 bp, Homo sapiens
ttctctaattgtttt

SEQ ID NO: 615738 - DNA, 15 bp, Homo sapiens
tctctaattgttttc

SEQ ID NO: 615739 - DNA, 15 bp, Homo sapiens
ctctaattgttttca

SEQ ID NO: 615740 - DNA, 15 bp, Homo sapiens
tctaattgttttcaa

SEQ ID NO: 615741 - DNA, 15 bp, Homo sapiens
ctaattgttttcaaa

SEQ ID NO: 615742 - DNA, 15 bp, Homo sapiens
taattgttttcaaat

SEQ ID NO: 615743 - DNA, 15 bp, Homo sapiens
aattgttttcaaatg

SEQ ID NO: 615744 - DNA, 15 bp, Homo sapiens
attgttttcaaatgg

SEQ ID NO: 615745 - DNA, 15 bp, Homo sapiens
ttgttttcaaatggg

SEQ ID NO: 615746 - DNA, 15 bp, Homo sapiens
tgttttcaaatgggc

SEQ ID NO: 615747 - DNA, 15 bp, Homo sapiens
gttttcaaatgggcc

SEQ ID NO: 615748 - DNA, 15 bp, Homo sapiens
ttttcaaatgggcca

SEQ ID NO: 615749 - DNA, 15 bp, Homo sapiens
tttcaaatgggccat

SEQ ID NO: 615750 - DNA, 15 bp, Homo sapiens
ttcaaatgggccatt

SEQ ID NO: 615751 - DNA, 15 bp, Homo sapiens
tcaaatgggccattt

SEQ ID NO: 615752 - DNA, 15 bp, Homo sapiens
caaatgggccatttc

SEQ ID NO: 615753 - DNA, 15 bp, Homo sapiens
aaatgggccatttcc

SEQ ID NO: 615754 - DNA, 15 bp, Homo sapiens
aatgggccatttcca

SEQ ID NO: 615755 - DNA, 15 bp, Homo sapiens
atgggccatttccac

SEQ ID NO: 615756 - DNA, 15 bp, Homo sapiens
tgggccatttccacc

SEQ ID NO: 615757 - DNA, 15 bp, Homo sapiens
gggccatttccaccc

SEQ ID NO: 615758 - DNA, 15 bp, Homo sapiens
ggccatttccaccct

SEQ ID NO: 615759 - DNA, 15 bp, Homo sapiens
gccatttccaccctc

SEQ ID NO: 615760 - DNA, 15 bp, Homo sapiens
ccatttccaccctct

SEQ ID NO: 615761 - DNA, 15 bp, Homo sapiens
catttccaccctcta

SEQ ID NO: 615762 - DNA, 15 bp, Homo sapiens
atttccaccctctaa

SEQ ID NO: 615763 - DNA, 15 bp, Homo sapiens
tttccaccctctaat

SEQ ID NO: 615764 - DNA, 15 bp, Homo sapiens
ttccaccctctaatc

SEQ ID NO: 615765 - DNA, 15 bp, Homo sapiens
tccaccctctaatca

SEQ ID NO: 615766 - DNA, 15 bp, Homo sapiens
ccaccctctaatcag

SEQ ID NO: 615767 - DNA, 15 bp, Homo sapiens
caccctctaatcagc

SEQ ID NO: 615768 - DNA, 15 bp, Homo sapiens
accctctaatcagcc

SEQ ID NO: 615769 - DNA, 15 bp, Homo sapiens
ccctctaatcagcct

SEQ ID NO: 615770 - DNA, 15 bp, Homo sapiens
cctctaatcagcctc

SEQ ID NO: 615771 - DNA, 15 bp, Homo sapiens
ctctaatcagcctct

SEQ ID NO: 615772 - DNA, 15 bp, Homo sapiens
tctaatcagcctctg

SEQ ID NO: 615773 - DNA, 15 bp, Homo sapiens
ctaatcagcctctgg

SEQ ID NO: 615774 - DNA, 15 bp, Homo sapiens
taatcagcctctggc

SEQ ID NO: 615775 - DNA, 15 bp, Homo sapiens
aatcagcctctggcc

SEQ ID NO: 615776 - DNA, 15 bp, Homo sapiens
atcagcctctggccc

SEQ ID NO: 615777 - DNA, 15 bp, Homo sapiens
tcagcctctggccct

SEQ ID NO: 615778 - DNA, 15 bp, Homo sapiens
cagcctctggccctg

SEQ ID NO: 615779 - DNA, 15 bp, Homo sapiens
agcctctggccctgg

SEQ ID NO: 615780 - DNA, 15 bp, Homo sapiens
gcctctggccctgga

SEQ ID NO: 615781 - DNA, 15 bp, Homo sapiens
cctctggccctggag

SEQ ID NO: 615782 - DNA, 15 bp, Homo sapiens
ctctggccctggagg

SEQ ID NO: 615783 - DNA, 15 bp, Homo sapiens
tctggccctggaggg

SEQ ID NO: 615784 - DNA, 15 bp, Homo sapiens
ctggccctggagggt

SEQ ID NO: 615785 - DNA, 15 bp, Homo sapiens
tggccctggagggtg

SEQ ID NO: 615786 - DNA, 15 bp, Homo sapiens
ggccctggagggtgc

SEQ ID NO: 615787 - DNA, 15 bp, Homo sapiens
gccctggagggtgca

SEQ ID NO: 615788 - DNA, 15 bp, Homo sapiens
ccctggagggtgcag

SEQ ID NO: 615789 - DNA, 15 bp, Homo sapiens
cctggagggtgcagt

SEQ ID NO: 615790 - DNA, 15 bp, Homo sapiens
ctggagggtgcagtt

SEQ ID NO: 615791 - DNA, 15 bp, Homo sapiens
tggagggtgcagttc

SEQ ID NO: 615792 - DNA, 15 bp, Homo sapiens
ggagggtgcagttcc

SEQ ID NO: 615793 - DNA, 15 bp, Homo sapiens
gagggtgcagttccc

SEQ ID NO: 615794 - DNA, 15 bp, Homo sapiens
agggtgcagttcccc

SEQ ID NO: 615795 - DNA, 15 bp, Homo sapiens
gggtgcagttcccct

SEQ ID NO: 615796 - DNA, 15 bp, Homo sapiens
ggtgcagttcccctt

SEQ ID NO: 615797 - DNA, 15 bp, Homo sapiens
gtgcagttccccttg

SEQ ID NO: 615798 - DNA, 15 bp, Homo sapiens
tgcagttccccttgt

SEQ ID NO: 615799 - DNA, 15 bp, Homo sapiens
gcagttccccttgtc

SEQ ID NO: 615800 - DNA, 15 bp, Homo sapiens
cagttccccttgtcc

SEQ ID NO: 615801 - DNA, 15 bp, Homo sapiens
agttccccttgtcct

SEQ ID NO: 615802 - DNA, 15 bp, Homo sapiens
gttccccttgtcctc

SEQ ID NO: 615803 - DNA, 15 bp, Homo sapiens
ttccccttgtcctcc

SEQ ID NO: 615804 - DNA, 15 bp, Homo sapiens
tccccttgtcctccg

SEQ ID NO: 615805 - DNA, 15 bp, Homo sapiens
ccccttgtcctccgg

SEQ ID NO: 615806 - DNA, 15 bp, Homo sapiens
cccttgtcctccgga

SEQ ID NO: 615807 - DNA, 15 bp, Homo sapiens
ccttgtcctccggag

SEQ ID NO: 615808 - DNA, 15 bp, Homo sapiens
cttgtcctccggagt

SEQ ID NO: 615809 - DNA, 15 bp, Homo sapiens
ttgtcctccggagtc

SEQ ID NO: 615810 - DNA, 15 bp, Homo sapiens
tgtcctccggagtct

SEQ ID NO: 615811 - DNA, 15 bp, Homo sapiens
gtcctccggagtctc

SEQ ID NO: 615812 - DNA, 15 bp, Homo sapiens
tcctccggagtctcc

SEQ ID NO: 615813 - DNA, 15 bp, Homo sapiens
cctccggagtctccc

SEQ ID NO: 615814 - DNA, 15 bp, Homo sapiens
ctccggagtctccct

SEQ ID NO: 615815 - DNA, 15 bp, Homo sapiens
tccggagtctccctg

SEQ ID NO: 615816 - DNA, 15 bp, Homo sapiens
ccggagtctccctgt

SEQ ID NO: 615817 - DNA, 15 bp, Homo sapiens
cggagtctccctgtc

SEQ ID NO: 615818 - DNA, 15 bp, Homo sapiens
ggagtctccctgtct

SEQ ID NO: 615819 - DNA, 15 bp, Homo sapiens
gagtctccctgtctc

SEQ ID NO: 615820 - DNA, 15 bp, Homo sapiens
agtctccctgtctct

SEQ ID NO: 615821 - DNA, 15 bp, Homo sapiens
gtctccctgtctctg

SEQ ID NO: 615822 - DNA, 15 bp, Homo sapiens
tctccctgtctctgt

SEQ ID NO: 615823 - DNA, 15 bp, Homo sapiens
ctccctgtctctgtg

SEQ ID NO: 615824 - DNA, 15 bp, Homo sapiens
tccctgtctctgtgc

SEQ ID NO: 615825 - DNA, 15 bp, Homo sapiens
ccctgtctctgtgct

SEQ ID NO: 615826 - DNA, 15 bp, Homo sapiens
cctgtctctgtgctg

SEQ ID NO: 615827 - DNA, 15 bp, Homo sapiens
ctgtctctgtgctgt

SEQ ID NO: 615828 - DNA, 15 bp, Homo sapiens
tgtctctgtgctgta

SEQ ID NO: 615829 - DNA, 15 bp, Homo sapiens
gtctctgtgctgtag

SEQ ID NO: 615830 - DNA, 15 bp, Homo sapiens
tctctgtgctgtaga

SEQ ID NO: 615831 - DNA, 15 bp, Homo sapiens
ctctgtgctgtagag

SEQ ID NO: 615832 - DNA, 15 bp, Homo sapiens
tctgtgctgtagagt

SEQ ID NO: 615833 - DNA, 15 bp, Homo sapiens
ctgtgctgtagagtc

SEQ ID NO: 615834 - DNA, 15 bp, Homo sapiens
tgtgctgtagagtca

SEQ ID NO: 615835 - DNA, 15 bp, Homo sapiens
gtgctgtagagtcaa

SEQ ID NO: 615836 - DNA, 15 bp, Homo sapiens
tgctgtagagtcaag

SEQ ID NO: 615837 - DNA, 15 bp, Homo sapiens
gctgtagagtcaaga

SEQ ID NO: 615838 - DNA, 15 bp, Homo sapiens
ctgtagagtcaagaa

SEQ ID NO: 615839 - DNA, 15 bp, Homo sapiens
tgtagagtcaagaag

SEQ ID NO: 615840 - DNA, 15 bp, Homo sapiens
gtagagtcaagaagg

SEQ ID NO: 615841 - DNA, 15 bp, Homo sapiens
tagagtcaagaaggg

SEQ ID NO: 615842 - DNA, 15 bp, Homo sapiens
agagtcaagaaggga

SEQ ID NO: 615843 - DNA, 15 bp, Homo sapiens
gagtcaagaagggac

SEQ ID NO: 615844 - DNA, 15 bp, Homo sapiens
agtcaagaagggaca

SEQ ID NO: 615845 - DNA, 15 bp, Homo sapiens
gtcaagaagggacaa

SEQ ID NO: 615846 - DNA, 15 bp, Homo sapiens
tcaagaagggacaac

SEQ ID NO: 615847 - DNA, 15 bp, Homo sapiens
caagaagggacaacc

SEQ ID NO: 615848 - DNA, 15 bp, Homo sapiens
aagaagggacaacca

SEQ ID NO: 615849 - DNA, 15 bp, Homo sapiens
agaagggacaaccac

SEQ ID NO: 615850 - DNA, 15 bp, Homo sapiens
gaagggacaaccacc

SEQ ID NO: 615851 - DNA, 15 bp, Homo sapiens
aagggacaaccacct

SEQ ID NO: 615852 - DNA, 15 bp, Homo sapiens
agggacaaccacctg

SEQ ID NO: 615853 - DNA, 15 bp, Homo sapiens
gggacaaccacctgc

SEQ ID NO: 615854 - DNA, 15 bp, Homo sapiens
ggacaaccacctgcc

SEQ ID NO: 615855 - DNA, 15 bp, Homo sapiens
gacaaccacctgccc

SEQ ID NO: 615856 - DNA, 15 bp, Homo sapiens
acaaccacctgccct

SEQ ID NO: 615857 - DNA, 15 bp, Homo sapiens
caaccacctgccctc

SEQ ID NO: 615858 - DNA, 15 bp, Homo sapiens
aaccacctgccctca

SEQ ID NO: 615859 - DNA, 15 bp, Homo sapiens
accacctgccctcac

SEQ ID NO: 615860 - DNA, 15 bp, Homo sapiens
ccacctgccctcact

SEQ ID NO: 615861 - DNA, 15 bp, Homo sapiens
cacctgccctcactg

SEQ ID NO: 615862 - DNA, 15 bp, Homo sapiens
acctgccctcactgg

SEQ ID NO: 615863 - DNA, 15 bp, Homo sapiens
cctgccctcactggg

SEQ ID NO: 615864 - DNA, 15 bp, Homo sapiens
ctgccctcactggga

SEQ ID NO: 615865 - DNA, 15 bp, Homo sapiens
tgccctcactgggaa

SEQ ID NO: 615866 - DNA, 15 bp, Homo sapiens
gccctcactgggaaa

SEQ ID NO: 615867 - DNA, 15 bp, Homo sapiens
ccctcactgggaaaa

SEQ ID NO: 615868 - DNA, 15 bp, Homo sapiens
cctcactgggaaaag

SEQ ID NO: 615869 - DNA, 15 bp, Homo sapiens
ctcactgggaaaaga

SEQ ID NO: 615870 - DNA, 15 bp, Homo sapiens
tcactgggaaaagac

SEQ ID NO: 615871 - DNA, 15 bp, Homo sapiens
cactgggaaaagaca

SEQ ID NO: 615872 - DNA, 15 bp, Homo sapiens
actgggaaaagacag

SEQ ID NO: 615873 - DNA, 15 bp, Homo sapiens
ctgggaaaagacaga

SEQ ID NO: 615874 - DNA, 15 bp, Homo sapiens
tgggaaaagacagaa

SEQ ID NO: 615875 - DNA, 15 bp, Homo sapiens
gggaaaagacagaaa

SEQ ID NO: 615876 - DNA, 15 bp, Homo sapiens
ggaaaagacagaaag

SEQ ID NO: 615877 - DNA, 15 bp, Homo sapiens
gaaaagacagaaagt

SEQ ID NO: 615878 - DNA, 15 bp, Homo sapiens
aaaagacagaaagtc

SEQ ID NO: 615879 - DNA, 15 bp, Homo sapiens
aaagacagaaagtct

SEQ ID NO: 615880 - DNA, 15 bp, Homo sapiens
aagacagaaagtctg

SEQ ID NO: 615881 - DNA, 15 bp, Homo sapiens
agacagaaagtctga

SEQ ID NO: 615882 - DNA, 15 bp, Homo sapiens
gacagaaagtctgac

SEQ ID NO: 615883 - DNA, 15 bp, Homo sapiens
acagaaagtctgact

SEQ ID NO: 615884 - DNA, 15 bp, Homo sapiens
cagaaagtctgactt

SEQ ID NO: 615885 - DNA, 15 bp, Homo sapiens
agaaagtctgacttg

SEQ ID NO: 615886 - DNA, 15 bp, Homo sapiens
gaaagtctgacttgt

SEQ ID NO: 615887 - DNA, 15 bp, Homo sapiens
aaagtctgacttgtt

SEQ ID NO: 615888 - DNA, 15 bp, Homo sapiens
aagtctgacttgttc

SEQ ID NO: 615889 - DNA, 15 bp, Homo sapiens
agtctgacttgttct

SEQ ID NO: 615890 - DNA, 15 bp, Homo sapiens
gtctgacttgttctc

SEQ ID NO: 615891 - DNA, 15 bp, Homo sapiens
tctgacttgttctca

SEQ ID NO: 615892 - DNA, 15 bp, Homo sapiens
ctgacttgttctcac

SEQ ID NO: 615893 - DNA, 15 bp, Homo sapiens
tgacttgttctcacg

SEQ ID NO: 615894 - DNA, 15 bp, Homo sapiens
gacttgttctcacga

SEQ ID NO: 615895 - DNA, 15 bp, Homo sapiens
acttgttctcacgac

SEQ ID NO: 615896 - DNA, 15 bp, Homo sapiens
cttgttctcacgact

SEQ ID NO: 615897 - DNA, 15 bp, Homo sapiens
ttgttctcacgactc

SEQ ID NO: 615898 - DNA, 15 bp, Homo sapiens
tgttctcacgactca

SEQ ID NO: 615899 - DNA, 15 bp, Homo sapiens
gttctcacgactcac

SEQ ID NO: 615900 - DNA, 15 bp, Homo sapiens
ttctcacgactcaca

SEQ ID NO: 615901 - DNA, 15 bp, Homo sapiens
tctcacgactcacac

SEQ ID NO: 615902 - DNA, 15 bp, Homo sapiens
ctcacgactcacact

SEQ ID NO: 615903 - DNA, 15 bp, Homo sapiens
tcacgactcacactt

SEQ ID NO: 615904 - DNA, 15 bp, Homo sapiens
cacgactcacactta

SEQ ID NO: 615905 - DNA, 15 bp, Homo sapiens
acgactcacacttat

SEQ ID NO: 615906 - DNA, 15 bp, Homo sapiens
cgactcacacttatt

SEQ ID NO: 615907 - DNA, 15 bp, Homo sapiens
gactcacacttatta

SEQ ID NO: 615908 - DNA, 15 bp, Homo sapiens
actcacacttattag

SEQ ID NO: 615909 - DNA, 15 bp, Homo sapiens
ctcacacttattagg

SEQ ID NO: 615910 - DNA, 15 bp, Homo sapiens
tcacacttattaggc

SEQ ID NO: 615911 - DNA, 15 bp, Homo sapiens
cacacttattaggct

SEQ ID NO: 615912 - DNA, 15 bp, Homo sapiens
acacttattaggctc

SEQ ID NO: 615913 - DNA, 15 bp, Homo sapiens
cacttattaggctcc

SEQ ID NO: 615914 - DNA, 15 bp, Homo sapiens
acttattaggctcca

SEQ ID NO: 615915 - DNA, 15 bp, Homo sapiens
cttattaggctccag

SEQ ID NO: 615916 - DNA, 15 bp, Homo sapiens
ttattaggctccaga

SEQ ID NO: 615917 - DNA, 15 bp, Homo sapiens
tattaggctccagag

SEQ ID NO: 615918 - DNA, 15 bp, Homo sapiens
attaggctccagagg

SEQ ID NO: 615919 - DNA, 15 bp, Homo sapiens
ttaggctccagaggt

SEQ ID NO: 615920 - DNA, 15 bp, Homo sapiens
taggctccagaggtg

SEQ ID NO: 615921 - DNA, 15 bp, Homo sapiens
aggctccagaggtgt

SEQ ID NO: 615922 - DNA, 15 bp, Homo sapiens
ggctccagaggtgtc

SEQ ID NO: 615923 - DNA, 15 bp, Homo sapiens
gctccagaggtgtca

SEQ ID NO: 615924 - DNA, 15 bp, Homo sapiens
ctccagaggtgtcag

SEQ ID NO: 615925 - DNA, 15 bp, Homo sapiens
tccagaggtgtcagg

SEQ ID NO: 615926 - DNA, 15 bp, Homo sapiens
ccagaggtgtcaggg

SEQ ID NO: 615927 - DNA, 15 bp, Homo sapiens
cagaggtgtcagggc

SEQ ID NO: 615928 - DNA, 15 bp, Homo sapiens
agaggtgtcagggca

SEQ ID NO: 615929 - DNA, 15 bp, Homo sapiens
gaggtgtcagggcat

SEQ ID NO: 615930 - DNA, 15 bp, Homo sapiens
aggtgtcagggcatc

SEQ ID NO: 615931 - DNA, 15 bp, Homo sapiens
ggtgtcagggcatct

SEQ ID NO: 615932 - DNA, 15 bp, Homo sapiens
gtgtcagggcatctg

SEQ ID NO: 615933 - DNA, 15 bp, Homo sapiens
tgtcagggcatctgc

SEQ ID NO: 615934 - DNA, 15 bp, Homo sapiens
gtcagggcatctgcc

SEQ ID NO: 615935 - DNA, 15 bp, Homo sapiens
tcagggcatctgcct

SEQ ID NO: 615936 - DNA, 15 bp, Homo sapiens
cagggcatctgcctt

SEQ ID NO: 615937 - DNA, 15 bp, Homo sapiens
agggcatctgccttt

SEQ ID NO: 615938 - DNA, 15 bp, Homo sapiens
gggcatctgcctttc

SEQ ID NO: 615939 - DNA, 15 bp, Homo sapiens
ggcatctgcctttca

SEQ ID NO: 615940 - DNA, 15 bp, Homo sapiens
gcatctgcctttcat

SEQ ID NO: 615941 - DNA, 15 bp, Homo sapiens
catctgcctttcatt

SEQ ID NO: 615942 - DNA, 15 bp, Homo sapiens
atctgcctttcattt

SEQ ID NO: 615943 - DNA, 15 bp, Homo sapiens
tctgcctttcatttc

SEQ ID NO: 615944 - DNA, 15 bp, Homo sapiens
ctgcctttcatttct

SEQ ID NO: 615945 - DNA, 15 bp, Homo sapiens
tgcctttcatttctt

SEQ ID NO: 615946 - DNA, 15 bp, Homo sapiens
gcctttcatttctta

SEQ ID NO: 615947 - DNA, 15 bp, Homo sapiens
cctttcatttcttag

SEQ ID NO: 615948 - DNA, 15 bp, Homo sapiens
ctttcatttcttagg

SEQ ID NO: 615949 - DNA, 15 bp, Homo sapiens
tttcatttcttaggt

SEQ ID NO: 615950 - DNA, 15 bp, Homo sapiens
ttcatttcttaggtt

SEQ ID NO: 615951 - DNA, 15 bp, Homo sapiens
tcatttcttaggtta

SEQ ID NO: 615952 - DNA, 15 bp, Homo sapiens
catttcttaggttaa

SEQ ID NO: 615953 - DNA, 15 bp, Homo sapiens
atttcttaggttaaa

SEQ ID NO: 615954 - DNA, 15 bp, Homo sapiens
tttcttaggttaaat

SEQ ID NO: 615955 - DNA, 15 bp, Homo sapiens
ttcttaggttaaata

SEQ ID NO: 615956 - DNA, 15 bp, Homo sapiens
tcttaggttaaataa

SEQ ID NO: 615957 - DNA, 15 bp, Homo sapiens
cttaggttaaataag

SEQ ID NO: 615958 - DNA, 15 bp, Homo sapiens
ttaggttaaataaga

SEQ ID NO: 615959 - DNA, 15 bp, Homo sapiens
taggttaaataagaa

SEQ ID NO: 615960 - DNA, 15 bp, Homo sapiens
aggttaaataagaaa

SEQ ID NO: 615961 - DNA, 15 bp, Homo sapiens
ggttaaataagaaat

SEQ ID NO: 615962 - DNA, 15 bp, Homo sapiens
gttaaataagaaatc

SEQ ID NO: 615963 - DNA, 15 bp, Homo sapiens
ttaaataagaaatca

SEQ ID NO: 615964 - DNA, 15 bp, Homo sapiens
taaataagaaatcaa

SEQ ID NO: 615965 - DNA, 15 bp, Homo sapiens
aaataagaaatcaat

SEQ ID NO: 615966 - DNA, 15 bp, Homo sapiens
aataagaaatcaatt

SEQ ID NO: 615967 - DNA, 15 bp, Homo sapiens
ataagaaatcaattg

SEQ ID NO: 615968 - DNA, 15 bp, Homo sapiens
taagaaatcaattgc

SEQ ID NO: 615969 - DNA, 15 bp, Homo sapiens
aagaaatcaattgct

SEQ ID NO: 615970 - DNA, 15 bp, Homo sapiens
agaaatcaattgctg

SEQ ID NO: 615971 - DNA, 15 bp, Homo sapiens
gaaatcaattgctgc

SEQ ID NO: 615972 - DNA, 15 bp, Homo sapiens
aaatcaattgctgcc

SEQ ID NO: 615973 - DNA, 15 bp, Homo sapiens
aatcaattgctgcca

SEQ ID NO: 615974 - DNA, 15 bp, Homo sapiens
atcaattgctgccat

SEQ ID NO: 615975 - DNA, 15 bp, Homo sapiens
tcaattgctgccatt

SEQ ID NO: 615976 - DNA, 15 bp, Homo sapiens
caattgctgccattt

SEQ ID NO: 615977 - DNA, 15 bp, Homo sapiens
aattgctgccatttg

SEQ ID NO: 615978 - DNA, 15 bp, Homo sapiens
attgctgccatttgt

SEQ ID NO: 615979 - DNA, 15 bp, Homo sapiens
ttgctgccatttgta

SEQ ID NO: 615980 - DNA, 15 bp, Homo sapiens
tgctgccatttgtag

SEQ ID NO: 615981 - DNA, 15 bp, Homo sapiens
gctgccatttgtagt

SEQ ID NO: 615982 - DNA, 15 bp, Homo sapiens
ctgccatttgtagta

SEQ ID NO: 615983 - DNA, 15 bp, Homo sapiens
tgccatttgtagtac

SEQ ID NO: 615984 - DNA, 15 bp, Homo sapiens
gccatttgtagtacc

SEQ ID NO: 615985 - DNA, 15 bp, Homo sapiens
ccatttgtagtaccc

SEQ ID NO: 615986 - DNA, 15 bp, Homo sapiens
catttgtagtaccca

SEQ ID NO: 615987 - DNA, 15 bp, Homo sapiens
atttgtagtacccaa

SEQ ID NO: 615988 - DNA, 15 bp, Homo sapiens
tttgtagtacccaat

SEQ ID NO: 615989 - DNA, 15 bp, Homo sapiens
ttgtagtacccaatt

SEQ ID NO: 615990 - DNA, 15 bp, Homo sapiens
tgtagtacccaattt

SEQ ID NO: 615991 - DNA, 15 bp, Homo sapiens
gtagtacccaatttt

SEQ ID NO: 615992 - DNA, 15 bp, Homo sapiens
tagtacccaattttc

SEQ ID NO: 615993 - DNA, 15 bp, Homo sapiens
agtacccaattttct

SEQ ID NO: 615994 - DNA, 15 bp, Homo sapiens
gtacccaattttcta

SEQ ID NO: 615995 - DNA, 15 bp, Homo sapiens
tacccaattttctaa

SEQ ID NO: 615996 - DNA, 15 bp, Homo sapiens
acccaattttctaaa

SEQ ID NO: 615997 - DNA, 15 bp, Homo sapiens
cccaattttctaaaa

SEQ ID NO: 615998 - DNA, 15 bp, Homo sapiens
ccaattttctaaaat

SEQ ID NO: 615999 - DNA, 15 bp, Homo sapiens
caattttctaaaatg

SEQ ID NO: 616000 - DNA, 15 bp, Homo sapiens
aattttctaaaatga

SEQ ID NO: 616001 - DNA, 15 bp, Homo sapiens
attttctaaaatgat

SEQ ID NO: 616002 - DNA, 15 bp, Homo sapiens
ttttctaaaatgatc

SEQ ID NO: 616003 - DNA, 15 bp, Homo sapiens
tttctaaaatgatca

SEQ ID NO: 616004 - DNA, 15 bp, Homo sapiens
ttctaaaatgatcac

SEQ ID NO: 616005 - DNA, 15 bp, Homo sapiens
tctaaaatgatcaca

SEQ ID NO: 616006 - DNA, 15 bp, Homo sapiens
ctaaaatgatcacaa

SEQ ID NO: 616007 - DNA, 15 bp, Homo sapiens
taaaatgatcacaat

SEQ ID NO: 616008 - DNA, 15 bp, Homo sapiens
aaaatgatcacaatg

SEQ ID NO: 616009 - DNA, 15 bp, Homo sapiens
aaatgatcacaatgg

SEQ ID NO: 616010 - DNA, 15 bp, Homo sapiens
aatgatcacaatgga

SEQ ID NO: 616011 - DNA, 15 bp, Homo sapiens
atgatcacaatggat

SEQ ID NO: 616012 - DNA, 15 bp, Homo sapiens
tgatcacaatggata

SEQ ID NO: 616013 - DNA, 15 bp, Homo sapiens
gatcacaatggataa

SEQ ID NO: 616014 - DNA, 15 bp, Homo sapiens
atcacaatggataag

SEQ ID NO: 616015 - DNA, 15 bp, Homo sapiens
tcacaatggataagt

SEQ ID NO: 616016 - DNA, 15 bp, Homo sapiens
cacaatggataagtg

SEQ ID NO: 616017 - DNA, 15 bp, Homo sapiens
acaatggataagtgg

SEQ ID NO: 616018 - DNA, 15 bp, Homo sapiens
caatggataagtggc

SEQ ID NO: 616019 - DNA, 15 bp, Homo sapiens
aatggataagtggca

SEQ ID NO: 616020 - DNA, 15 bp, Homo sapiens
atggataagtggcaa

SEQ ID NO: 616021 - DNA, 15 bp, Homo sapiens
tggataagtggcaag

SEQ ID NO: 616022 - DNA, 15 bp, Homo sapiens
ggataagtggcaaga

SEQ ID NO: 616023 - DNA, 15 bp, Homo sapiens
gataagtggcaagaa

SEQ ID NO: 616024 - DNA, 15 bp, Homo sapiens
ataagtggcaagaaa

SEQ ID NO: 616025 - DNA, 15 bp, Homo sapiens
taagtggcaagaaat

SEQ ID NO: 616026 - DNA, 15 bp, Homo sapiens
aagtggcaagaaatc

SEQ ID NO: 616027 - DNA, 15 bp, Homo sapiens
agtggcaagaaatcc

SEQ ID NO: 616028 - DNA, 15 bp, Homo sapiens
gtggcaagaaatcct

SEQ ID NO: 616029 - DNA, 15 bp, Homo sapiens
tggcaagaaatcctt

SEQ ID NO: 616030 - DNA, 15 bp, Homo sapiens
ggcaagaaatcctta

SEQ ID NO: 616031 - DNA, 15 bp, Homo sapiens
gcaagaaatccttat

SEQ ID NO: 616032 - DNA, 15 bp, Homo sapiens
caagaaatccttatg

SEQ ID NO: 616033 - DNA, 15 bp, Homo sapiens
aagaaatccttatga

SEQ ID NO: 616034 - DNA, 15 bp, Homo sapiens
agaaatccttatgac

SEQ ID NO: 616035 - DNA, 15 bp, Homo sapiens
gaaatccttatgact

SEQ ID NO: 616036 - DNA, 15 bp, Homo sapiens
aaatccttatgactc

SEQ ID NO: 616037 - DNA, 15 bp, Homo sapiens
aatccttatgactca

SEQ ID NO: 616038 - DNA, 15 bp, Homo sapiens
atccttatgactcat

SEQ ID NO: 616039 - DNA, 15 bp, Homo sapiens
tccttatgactcatc

SEQ ID NO: 616040 - DNA, 15 bp, Homo sapiens
ccttatgactcatct

SEQ ID NO: 616041 - DNA, 15 bp, Homo sapiens
cttatgactcatctg

SEQ ID NO: 616042 - DNA, 15 bp, Homo sapiens
ttatgactcatctgt

SEQ ID NO: 616043 - DNA, 15 bp, Homo sapiens
tatgactcatctgtg

SEQ ID NO: 616044 - DNA, 15 bp, Homo sapiens
atgactcatctgtgg

SEQ ID NO: 616045 - DNA, 15 bp, Homo sapiens
tgactcatctgtggg

SEQ ID NO: 616046 - DNA, 15 bp, Homo sapiens
gactcatctgtgggc

SEQ ID NO: 616047 - DNA, 15 bp, Homo sapiens
actcatctgtgggca

SEQ ID NO: 616048 - DNA, 15 bp, Homo sapiens
ctcatctgtgggcag

SEQ ID NO: 616049 - DNA, 15 bp, Homo sapiens
tcatctgtgggcaga

SEQ ID NO: 616050 - DNA, 15 bp, Homo sapiens
catctgtgggcagag

SEQ ID NO: 616051 - DNA, 15 bp, Homo sapiens
atctgtgggcagagt

SEQ ID NO: 616052 - DNA, 15 bp, Homo sapiens
tctgtgggcagagtt

SEQ ID NO: 616053 - DNA, 15 bp, Homo sapiens
tgtgggcagagttgg

SEQ ID NO: 616054 - DNA, 15 bp, Homo sapiens
gtgggcagagttggg

SEQ ID NO: 616055 - DNA, 15 bp, Homo sapiens
tgggcagagttgggc

SEQ ID NO: 616056 - DNA, 15 bp, Homo sapiens
gggcagagttgggct

SEQ ID NO: 616057 - DNA, 15 bp, Homo sapiens
ggcagagttgggcta

SEQ ID NO: 616058 - DNA, 15 bp, Homo sapiens
gcagagttgggctat

SEQ ID NO: 616059 - DNA, 15 bp, Homo sapiens
cagagttgggctatt

SEQ ID NO: 616060 - DNA, 15 bp, Homo sapiens
agagttgggctattt

SEQ ID NO: 616061 - DNA, 15 bp, Homo sapiens
gagttgggctatttt

SEQ ID NO: 616062 - DNA, 15 bp, Homo sapiens
agttgggctattttg

SEQ ID NO: 616063 - DNA, 15 bp, Homo sapiens
gttgggctattttgg

SEQ ID NO: 616064 - DNA, 15 bp, Homo sapiens
ttgggctattttggt

SEQ ID NO: 616065 - DNA, 15 bp, Homo sapiens
tgggctattttggta

SEQ ID NO: 616066 - DNA, 15 bp, Homo sapiens
gggctattttggtaa

SEQ ID NO: 616067 - DNA, 15 bp, Homo sapiens
ggctattttggtaat

SEQ ID NO: 616068 - DNA, 15 bp, Homo sapiens
gctattttggtaatc

SEQ ID NO: 616069 - DNA, 15 bp, Homo sapiens
ctattttggtaatcc

SEQ ID NO: 616070 - DNA, 15 bp, Homo sapiens
tattttggtaatcct

SEQ ID NO: 616071 - DNA, 15 bp, Homo sapiens
attttggtaatcctt

SEQ ID NO: 616072 - DNA, 15 bp, Homo sapiens
ttttggtaatccttg

SEQ ID NO: 616073 - DNA, 15 bp, Homo sapiens
tttggtaatccttga

SEQ ID NO: 616074 - DNA, 15 bp, Homo sapiens
ttggtaatccttgag

SEQ ID NO: 616075 - DNA, 15 bp, Homo sapiens
tggtaatccttgagt

SEQ ID NO: 616076 - DNA, 15 bp, Homo sapiens
ggtaatccttgagta

SEQ ID NO: 616077 - DNA, 15 bp, Homo sapiens
gtaatccttgagtag

SEQ ID NO: 616078 - DNA, 15 bp, Homo sapiens
taatccttgagtagg

SEQ ID NO: 616079 - DNA, 15 bp, Homo sapiens
aatccttgagtaggc

SEQ ID NO: 616080 - DNA, 15 bp, Homo sapiens
atccttgagtaggca

SEQ ID NO: 616081 - DNA, 15 bp, Homo sapiens
tccttgagtaggcag

SEQ ID NO: 616082 - DNA, 15 bp, Homo sapiens
ccttgagtaggcaga

SEQ ID NO: 616083 - DNA, 15 bp, Homo sapiens
cttgagtaggcagat

SEQ ID NO: 616084 - DNA, 15 bp, Homo sapiens
ttgagtaggcagatg

SEQ ID NO: 616085 - DNA, 15 bp, Homo sapiens
tgagtaggcagatgg

SEQ ID NO: 616086 - DNA, 15 bp, Homo sapiens
gagtaggcagatgga

SEQ ID NO: 616087 - DNA, 15 bp, Homo sapiens
agtaggcagatggaa

SEQ ID NO: 616088 - DNA, 15 bp, Homo sapiens
gtaggcagatggaat

SEQ ID NO: 616089 - DNA, 15 bp, Homo sapiens
taggcagatggaatt

SEQ ID NO: 616090 - DNA, 15 bp, Homo sapiens
aggcagatggaattt

SEQ ID NO: 616091 - DNA, 15 bp, Homo sapiens
ggcagatggaatttg

SEQ ID NO: 616092 - DNA, 15 bp, Homo sapiens
gcagatggaatttga

SEQ ID NO: 616093 - DNA, 15 bp, Homo sapiens
cagatggaatttgag

SEQ ID NO: 616094 - DNA, 15 bp, Homo sapiens
agatggaatttgagg

SEQ ID NO: 616095 - DNA, 15 bp, Homo sapiens
gatggaatttgaggc

SEQ ID NO: 616096 - DNA, 15 bp, Homo sapiens
atggaatttgaggcc

SEQ ID NO: 616097 - DNA, 15 bp, Homo sapiens
tggaatttgaggcca

SEQ ID NO: 616098 - DNA, 15 bp, Homo sapiens
ggaatttgaggccat

SEQ ID NO: 616099 - DNA, 15 bp, Homo sapiens
gaatttgaggccatc

SEQ ID NO: 616100 - DNA, 15 bp, Homo sapiens
aatttgaggccatct

SEQ ID NO: 616101 - DNA, 15 bp, Homo sapiens
atttgaggccatctt

SEQ ID NO: 616102 - DNA, 15 bp, Homo sapiens
tttgaggccatcttc

SEQ ID NO: 616103 - DNA, 15 bp, Homo sapiens
ttgaggccatcttct

SEQ ID NO: 616104 - DNA, 15 bp, Homo sapiens
tgaggccatcttctt

SEQ ID NO: 616105 - DNA, 15 bp, Homo sapiens
gaggccatcttcttg

SEQ ID NO: 616106 - DNA, 15 bp, Homo sapiens
aggccatcttcttgg

SEQ ID NO: 616107 - DNA, 15 bp, Homo sapiens
ggccatcttcttggg

SEQ ID NO: 616108 - DNA, 15 bp, Homo sapiens
gccatcttcttgggt

SEQ ID NO: 616109 - DNA, 15 bp, Homo sapiens
ccatcttcttgggta

SEQ ID NO: 616110 - DNA, 15 bp, Homo sapiens
catcttcttgggtac

SEQ ID NO: 616111 - DNA, 15 bp, Homo sapiens
atcttcttgggtaca

SEQ ID NO: 616112 - DNA, 15 bp, Homo sapiens
tcttcttgggtacat

SEQ ID NO: 616113 - DNA, 15 bp, Homo sapiens
cttcttgggtacata

SEQ ID NO: 616114 - DNA, 15 bp, Homo sapiens
ttcttgggtacatag

SEQ ID NO: 616115 - DNA, 15 bp, Homo sapiens
tcttgggtacataga

SEQ ID NO: 616116 - DNA, 15 bp, Homo sapiens
cttgggtacatagat

SEQ ID NO: 616117 - DNA, 15 bp, Homo sapiens
ttgggtacatagatc

SEQ ID NO: 616118 - DNA, 15 bp, Homo sapiens
tgggtacatagatca

SEQ ID NO: 616119 - DNA, 15 bp, Homo sapiens
gggtacatagatcac

SEQ ID NO: 616120 - DNA, 15 bp, Homo sapiens
ggtacatagatcact

SEQ ID NO: 616121 - DNA, 15 bp, Homo sapiens
gtacatagatcacta

SEQ ID NO: 616122 - DNA, 15 bp, Homo sapiens
tacatagatcactag

SEQ ID NO: 616123 - DNA, 15 bp, Homo sapiens
acatagatcactagg

SEQ ID NO: 616124 - DNA, 15 bp, Homo sapiens
catagatcactagga

SEQ ID NO: 616125 - DNA, 15 bp, Homo sapiens
atagatcactaggaa

SEQ ID NO: 616126 - DNA, 15 bp, Homo sapiens
tagatcactaggaag

SEQ ID NO: 616127 - DNA, 15 bp, Homo sapiens
agatcactaggaagc

SEQ ID NO: 616128 - DNA, 15 bp, Homo sapiens
gatcactaggaagct

SEQ ID NO: 616129 - DNA, 15 bp, Homo sapiens
atcactaggaagcta

SEQ ID NO: 616130 - DNA, 15 bp, Homo sapiens
tcactaggaagctat

SEQ ID NO: 616131 - DNA, 15 bp, Homo sapiens
cactaggaagctata

SEQ ID NO: 616132 - DNA, 15 bp, Homo sapiens
actaggaagctatag

SEQ ID NO: 616133 - DNA, 15 bp, Homo sapiens
ctaggaagctatagg

SEQ ID NO: 616134 - DNA, 15 bp, Homo sapiens
taggaagctataggt

SEQ ID NO: 616135 - DNA, 15 bp, Homo sapiens
aggaagctataggtc

SEQ ID NO: 616136 - DNA, 15 bp, Homo sapiens
ggaagctataggtct

SEQ ID NO: 616137 - DNA, 15 bp, Homo sapiens
gaagctataggtcta

SEQ ID NO: 616138 - DNA, 15 bp, Homo sapiens
aagctataggtctag

SEQ ID NO: 616139 - DNA, 15 bp, Homo sapiens
agctataggtctagc

SEQ ID NO: 616140 - DNA, 15 bp, Homo sapiens
gctataggtctagca

SEQ ID NO: 616141 - DNA, 15 bp, Homo sapiens
ctataggtctagcaa

SEQ ID NO: 616142 - DNA, 15 bp, Homo sapiens
tataggtctagcaac

SEQ ID NO: 616143 - DNA, 15 bp, Homo sapiens
ataggtctagcaact

SEQ ID NO: 616144 - DNA, 15 bp, Homo sapiens
taggtctagcaactg

SEQ ID NO: 616145 - DNA, 15 bp, Homo sapiens
aggtctagcaactgt

SEQ ID NO: 616146 - DNA, 15 bp, Homo sapiens
ggtctagcaactgtg

SEQ ID NO: 616147 - DNA, 15 bp, Homo sapiens
gtctagcaactgtgg

SEQ ID NO: 616148 - DNA, 15 bp, Homo sapiens
tctagcaactgtgga

SEQ ID NO: 616149 - DNA, 15 bp, Homo sapiens
ctagcaactgtggat

SEQ ID NO: 616150 - DNA, 15 bp, Homo sapiens
tagcaactgtggatt

SEQ ID NO: 616151 - DNA, 15 bp, Homo sapiens
agcaactgtggatta

SEQ ID NO: 616152 - DNA, 15 bp, Homo sapiens
gcaactgtggattag

SEQ ID NO: 616153 - DNA, 15 bp, Homo sapiens
caactgtggattagg

SEQ ID NO: 616154 - DNA, 15 bp, Homo sapiens
aactgtggattaggg

SEQ ID NO: 616155 - DNA, 15 bp, Homo sapiens
actgtggattagggc

SEQ ID NO: 616156 - DNA, 15 bp, Homo sapiens
ctgtggattagggct

SEQ ID NO: 616157 - DNA, 15 bp, Homo sapiens
tgtggattagggctg

SEQ ID NO: 616158 - DNA, 15 bp, Homo sapiens
gtggattagggctgg

SEQ ID NO: 616159 - DNA, 15 bp, Homo sapiens
tggattagggctggg

SEQ ID NO: 616160 - DNA, 15 bp, Homo sapiens
ggattagggctgggc

SEQ ID NO: 616161 - DNA, 15 bp, Homo sapiens
gattagggctgggct

SEQ ID NO: 616162 - DNA, 15 bp, Homo sapiens
attagggctgggctg

SEQ ID NO: 616163 - DNA, 15 bp, Homo sapiens
ttagggctgggctga

SEQ ID NO: 616164 - DNA, 15 bp, Homo sapiens
tagggctgggctgag

SEQ ID NO: 616165 - DNA, 15 bp, Homo sapiens
agggctgggctgaga

SEQ ID NO: 616166 - DNA, 15 bp, Homo sapiens
gggctgggctgagaa

SEQ ID NO: 616167 - DNA, 15 bp, Homo sapiens
ggctgggctgagaat

SEQ ID NO: 616168 - DNA, 15 bp, Homo sapiens
gctgggctgagaatt

SEQ ID NO: 616169 - DNA, 15 bp, Homo sapiens
ctgggctgagaattg

SEQ ID NO: 616170 - DNA, 15 bp, Homo sapiens
tgggctgagaattgt

SEQ ID NO: 616171 - DNA, 15 bp, Homo sapiens
gggctgagaattgtt

SEQ ID NO: 616172 - DNA, 15 bp, Homo sapiens
ggctgagaattgttt

SEQ ID NO: 616173 - DNA, 15 bp, Homo sapiens
gctgagaattgtttc

SEQ ID NO: 616174 - DNA, 15 bp, Homo sapiens
ctgagaattgtttca

SEQ ID NO: 616175 - DNA, 15 bp, Homo sapiens
tgagaattgtttcat

SEQ ID NO: 616176 - DNA, 15 bp, Homo sapiens
gagaattgtttcatg

SEQ ID NO: 616177 - DNA, 15 bp, Homo sapiens
agaattgtttcatgt

SEQ ID NO: 616178 - DNA, 15 bp, Homo sapiens
gaattgtttcatgtt

SEQ ID NO: 616179 - DNA, 15 bp, Homo sapiens
aattgtttcatgttt

SEQ ID NO: 616180 - DNA, 15 bp, Homo sapiens
attgtttcatgtttt

SEQ ID NO: 616181 - DNA, 15 bp, Homo sapiens
ttgtttcatgttttt

SEQ ID NO: 616182 - DNA, 15 bp, Homo sapiens
tgtttcatgtttttt

SEQ ID NO: 616183 - DNA, 15 bp, Homo sapiens
gtttcatgttttttg

SEQ ID NO: 616184 - DNA, 15 bp, Homo sapiens
tttcatgttttttgt

SEQ ID NO: 616185 - DNA, 15 bp, Homo sapiens
ttcatgttttttgtg

SEQ ID NO: 616186 - DNA, 15 bp, Homo sapiens
tcatgttttttgtga

SEQ ID NO: 616187 - DNA, 15 bp, Homo sapiens
catgttttttgtgac

SEQ ID NO: 616188 - DNA, 15 bp, Homo sapiens
atgttttttgtgact

SEQ ID NO: 616189 - DNA, 15 bp, Homo sapiens
tgttttttgtgactg

SEQ ID NO: 616190 - DNA, 15 bp, Homo sapiens
gttttttgtgactgt

SEQ ID NO: 616191 - DNA, 15 bp, Homo sapiens
ttttttgtgactgta

SEQ ID NO: 616192 - DNA, 15 bp, Homo sapiens
tttttgtgactgtat

SEQ ID NO: 616193 - DNA, 15 bp, Homo sapiens
ttttgtgactgtata

SEQ ID NO: 616194 - DNA, 15 bp, Homo sapiens
tttgtgactgtatag

SEQ ID NO: 616195 - DNA, 15 bp, Homo sapiens
ttgtgactgtatagc

SEQ ID NO: 616196 - DNA, 15 bp, Homo sapiens
tgtgactgtatagct

SEQ ID NO: 616197 - DNA, 15 bp, Homo sapiens
gtgactgtatagcta

SEQ ID NO: 616198 - DNA, 15 bp, Homo sapiens
tgactgtatagctag

SEQ ID NO: 616199 - DNA, 15 bp, Homo sapiens
gactgtatagctaga

SEQ ID NO: 616200 - DNA, 15 bp, Homo sapiens
actgtatagctagag

SEQ ID NO: 616201 - DNA, 15 bp, Homo sapiens
ctgtatagctagaga

SEQ ID NO: 616202 - DNA, 15 bp, Homo sapiens
tgtatagctagagac

SEQ ID NO: 616203 - DNA, 15 bp, Homo sapiens
gtatagctagagact

SEQ ID NO: 616204 - DNA, 15 bp, Homo sapiens
tatagctagagactc

SEQ ID NO: 616205 - DNA, 15 bp, Homo sapiens
atagctagagactct

SEQ ID NO: 616206 - DNA, 15 bp, Homo sapiens
tagctagagactctc

SEQ ID NO: 616207 - DNA, 15 bp, Homo sapiens
agctagagactctct

SEQ ID NO: 616208 - DNA, 15 bp, Homo sapiens
gctagagactctctt

SEQ ID NO: 616209 - DNA, 15 bp, Homo sapiens
ctagagactctcttg

SEQ ID NO: 616210 - DNA, 15 bp, Homo sapiens
tagagactctcttgt

SEQ ID NO: 616211 - DNA, 15 bp, Homo sapiens
agagactctcttgtt

SEQ ID NO: 616212 - DNA, 15 bp, Homo sapiens
gagactctcttgttt

SEQ ID NO: 616213 - DNA, 15 bp, Homo sapiens
agactctcttgtttg

SEQ ID NO: 616214 - DNA, 15 bp, Homo sapiens
gactctcttgtttgc

SEQ ID NO: 616215 - DNA, 15 bp, Homo sapiens
actctcttgtttgca

SEQ ID NO: 616216 - DNA, 15 bp, Homo sapiens
ctctcttgtttgcag

SEQ ID NO: 616217 - DNA, 15 bp, Homo sapiens
tctcttgtttgcaga

SEQ ID NO: 616218 - DNA, 15 bp, Homo sapiens
ctcttgtttgcagag

SEQ ID NO: 616219 - DNA, 15 bp, Homo sapiens
tcttgtttgcagaga

SEQ ID NO: 616220 - DNA, 15 bp, Homo sapiens
cttgtttgcagagag

SEQ ID NO: 616221 - DNA, 15 bp, Homo sapiens
ttgtttgcagagaga

SEQ ID NO: 616222 - DNA, 15 bp, Homo sapiens
tgtttgcagagagac

SEQ ID NO: 616223 - DNA, 15 bp, Homo sapiens
gtttgcagagagaca

SEQ ID NO: 616224 - DNA, 15 bp, Homo sapiens
tttgcagagagacac

SEQ ID NO: 616225 - DNA, 15 bp, Homo sapiens
ttgcagagagacact

SEQ ID NO: 616226 - DNA, 15 bp, Homo sapiens
tgcagagagacactc

SEQ ID NO: 616227 - DNA, 15 bp, Homo sapiens
gcagagagacactct

SEQ ID NO: 616228 - DNA, 15 bp, Homo sapiens
cagagagacactctg

SEQ ID NO: 616229 - DNA, 15 bp, Homo sapiens
agagagacactctga

SEQ ID NO: 616230 - DNA, 15 bp, Homo sapiens
gagagacactctgaa

SEQ ID NO: 616231 - DNA, 15 bp, Homo sapiens
agagacactctgaac

SEQ ID NO: 616232 - DNA, 15 bp, Homo sapiens
gagacactctgaact

SEQ ID NO: 616233 - DNA, 15 bp, Homo sapiens
agacactctgaactc

SEQ ID NO: 616234 - DNA, 15 bp, Homo sapiens
gacactctgaactcc

SEQ ID NO: 616235 - DNA, 15 bp, Homo sapiens
acactctgaactccc

SEQ ID NO: 616236 - DNA, 15 bp, Homo sapiens
cactctgaactcccc

SEQ ID NO: 616237 - DNA, 15 bp, Homo sapiens
actctgaactccccc

SEQ ID NO: 616238 - DNA, 15 bp, Homo sapiens
ctctgaactccccct

SEQ ID NO: 616239 - DNA, 15 bp, Homo sapiens
tctgaactccccctg

SEQ ID NO: 616240 - DNA, 15 bp, Homo sapiens
ctgaactccccctgg

SEQ ID NO: 616241 - DNA, 15 bp, Homo sapiens
tgaactccccctggc

SEQ ID NO: 616242 - DNA, 15 bp, Homo sapiens
gaactccccctggcc

SEQ ID NO: 616243 - DNA, 15 bp, Homo sapiens
aactccccctggccg

SEQ ID NO: 616244 - DNA, 15 bp, Homo sapiens
actccccctggccgt

SEQ ID NO: 616245 - DNA, 15 bp, Homo sapiens
ctccccctggccgtc

SEQ ID NO: 616246 - DNA, 15 bp, Homo sapiens
tccccctggccgtca

SEQ ID NO: 616247 - DNA, 15 bp, Homo sapiens
ccccctggccgtcaa

SEQ ID NO: 616248 - DNA, 15 bp, Homo sapiens
cccctggccgtcaag

SEQ ID NO: 616249 - DNA, 15 bp, Homo sapiens
ccctggccgtcaagg

SEQ ID NO: 616250 - DNA, 15 bp, Homo sapiens
cctggccgtcaaggg

SEQ ID NO: 616251 - DNA, 15 bp, Homo sapiens
ctggccgtcaaggga

SEQ ID NO: 616252 - DNA, 15 bp, Homo sapiens
tggccgtcaagggaa

SEQ ID NO: 616253 - DNA, 15 bp, Homo sapiens
ggccgtcaagggaaa

SEQ ID NO: 616254 - DNA, 15 bp, Homo sapiens
gccgtcaagggaaag

SEQ ID NO: 616255 - DNA, 15 bp, Homo sapiens
ccgtcaagggaaaga

SEQ ID NO: 616256 - DNA, 15 bp, Homo sapiens
cgtcaagggaaagac

SEQ ID NO: 616257 - DNA, 15 bp, Homo sapiens
gtcaagggaaagact

SEQ ID NO: 616258 - DNA, 15 bp, Homo sapiens
tcaagggaaagactg

SEQ ID NO: 616259 - DNA, 15 bp, Homo sapiens
caagggaaagactgc

SEQ ID NO: 616260 - DNA, 15 bp, Homo sapiens
aagggaaagactgcc

SEQ ID NO: 616261 - DNA, 15 bp, Homo sapiens
agggaaagactgcct

SEQ ID NO: 616262 - DNA, 15 bp, Homo sapiens
gggaaagactgcctt

SEQ ID NO: 616263 - DNA, 15 bp, Homo sapiens
ggaaagactgccttc

SEQ ID NO: 616264 - DNA, 15 bp, Homo sapiens
gaaagactgccttca

SEQ ID NO: 616265 - DNA, 15 bp, Homo sapiens
aaagactgccttcac

SEQ ID NO: 616266 - DNA, 15 bp, Homo sapiens
aagactgccttcacc

SEQ ID NO: 616267 - DNA, 15 bp, Homo sapiens
agactgccttcaccc

SEQ ID NO: 616268 - DNA, 15 bp, Homo sapiens
gactgccttcaccct

SEQ ID NO: 616269 - DNA, 15 bp, Homo sapiens
actgccttcaccctc

SEQ ID NO: 616270 - DNA, 15 bp, Homo sapiens
ctgccttcaccctcc

SEQ ID NO: 616271 - DNA, 15 bp, Homo sapiens
tgccttcaccctcct

SEQ ID NO: 616272 - DNA, 15 bp, Homo sapiens
gccttcaccctcctg

SEQ ID NO: 616273 - DNA, 15 bp, Homo sapiens
ccttcaccctcctga

SEQ ID NO: 616274 - DNA, 15 bp, Homo sapiens
cttcaccctcctgag

SEQ ID NO: 616275 - DNA, 15 bp, Homo sapiens
ttcaccctcctgagc

SEQ ID NO: 616276 - DNA, 15 bp, Homo sapiens
tcaccctcctgagct

SEQ ID NO: 616277 - DNA, 15 bp, Homo sapiens
caccctcctgagctg

SEQ ID NO: 616278 - DNA, 15 bp, Homo sapiens
accctcctgagctga

SEQ ID NO: 616279 - DNA, 15 bp, Homo sapiens
ccctcctgagctgac

SEQ ID NO: 616280 - DNA, 15 bp, Homo sapiens
cctcctgagctgacc

SEQ ID NO: 616281 - DNA, 15 bp, Homo sapiens
ctcctgagctgacct

SEQ ID NO: 616282 - DNA, 15 bp, Homo sapiens
tcctgagctgacctt

SEQ ID NO: 616283 - DNA, 15 bp, Homo sapiens
cctgagctgacctta

SEQ ID NO: 616284 - DNA, 15 bp, Homo sapiens
ctgagctgaccttac

SEQ ID NO: 616285 - DNA, 15 bp, Homo sapiens
tgagctgaccttaca

SEQ ID NO: 616286 - DNA, 15 bp, Homo sapiens
gagctgaccttacac

SEQ ID NO: 616287 - DNA, 15 bp, Homo sapiens
agctgaccttacact

SEQ ID NO: 616288 - DNA, 15 bp, Homo sapiens
gctgaccttacactg

SEQ ID NO: 616289 - DNA, 15 bp, Homo sapiens
ctgaccttacactga

SEQ ID NO: 616290 - DNA, 15 bp, Homo sapiens
tgaccttacactgag

SEQ ID NO: 616291 - DNA, 15 bp, Homo sapiens
gaccttacactgaga

SEQ ID NO: 616292 - DNA, 15 bp, Homo sapiens
accttacactgagag

SEQ ID NO: 616293 - DNA, 15 bp, Homo sapiens
ccttacactgagaga

SEQ ID NO: 616294 - DNA, 15 bp, Homo sapiens
cttacactgagagac

SEQ ID NO: 616295 - DNA, 15 bp, Homo sapiens
ttacactgagagaca

SEQ ID NO: 616296 - DNA, 15 bp, Homo sapiens
tacactgagagacaa

SEQ ID NO: 616297 - DNA, 15 bp, Homo sapiens
acactgagagacaat

SEQ ID NO: 616298 - DNA, 15 bp, Homo sapiens
cactgagagacaatg

SEQ ID NO: 616299 - DNA, 15 bp, Homo sapiens
actgagagacaatgg

SEQ ID NO: 616300 - DNA, 15 bp, Homo sapiens
ctgagagacaatggg

SEQ ID NO: 616301 - DNA, 15 bp, Homo sapiens
tgagagacaatgggg

SEQ ID NO: 616302 - DNA, 15 bp, Homo sapiens
gagagacaatgggga

SEQ ID NO: 616303 - DNA, 15 bp, Homo sapiens
agagacaatggggac

SEQ ID NO: 616304 - DNA, 15 bp, Homo sapiens
gagacaatggggacc

SEQ ID NO: 616305 - DNA, 15 bp, Homo sapiens
agacaatggggaccc

SEQ ID NO: 616306 - DNA, 15 bp, Homo sapiens
gacaatggggaccct

SEQ ID NO: 616307 - DNA, 15 bp, Homo sapiens
acaatggggaccctc

SEQ ID NO: 616308 - DNA, 15 bp, Homo sapiens
caatggggaccctct

SEQ ID NO: 616309 - DNA, 15 bp, Homo sapiens
aatggggaccctctt

SEQ ID NO: 616310 - DNA, 15 bp, Homo sapiens
atggggaccctcttt

SEQ ID NO: 616311 - DNA, 15 bp, Homo sapiens
tggggaccctctttt

SEQ ID NO: 616312 - DNA, 15 bp, Homo sapiens
ggggaccctcttttg

SEQ ID NO: 616313 - DNA, 15 bp, Homo sapiens
gggaccctcttttgg

SEQ ID NO: 616314 - DNA, 15 bp, Homo sapiens
ggaccctcttttggc

SEQ ID NO: 616315 - DNA, 15 bp, Homo sapiens
gaccctcttttggcc

SEQ ID NO: 616316 - DNA, 15 bp, Homo sapiens
accctcttttggccc

SEQ ID NO: 616317 - DNA, 15 bp, Homo sapiens
ccctcttttggccct

SEQ ID NO: 616318 - DNA, 15 bp, Homo sapiens
cctcttttggccctc

SEQ ID NO: 616319 - DNA, 15 bp, Homo sapiens
ctcttttggccctcc

SEQ ID NO: 616320 - DNA, 15 bp, Homo sapiens
tcttttggccctccc

SEQ ID NO: 616321 - DNA, 15 bp, Homo sapiens
cttttggccctcccc

SEQ ID NO: 616322 - DNA, 15 bp, Homo sapiens
ttttggccctcccct

SEQ ID NO: 616323 - DNA, 15 bp, Homo sapiens
tttggccctcccctc

SEQ ID NO: 616324 - DNA, 15 bp, Homo sapiens
ttggccctcccctct

SEQ ID NO: 616325 - DNA, 15 bp, Homo sapiens
tggccctcccctcta

SEQ ID NO: 616326 - DNA, 15 bp, Homo sapiens
ggccctcccctctac

SEQ ID NO: 616327 - DNA, 15 bp, Homo sapiens
gccctcccctctacc

SEQ ID NO: 616328 - DNA, 15 bp, Homo sapiens
ccctcccctctacct

SEQ ID NO: 616329 - DNA, 15 bp, Homo sapiens
cctcccctctacctc

SEQ ID NO: 616330 - DNA, 15 bp, Homo sapiens
ctcccctctacctcg

SEQ ID NO: 616331 - DNA, 15 bp, Homo sapiens
tcccctctacctcga

SEQ ID NO: 616332 - DNA, 15 bp, Homo sapiens
cccctctacctcgag

SEQ ID NO: 616333 - DNA, 15 bp, Homo sapiens
ccctctacctcgagg

SEQ ID NO: 616334 - DNA, 15 bp, Homo sapiens
cctctacctcgaggg

SEQ ID NO: 616335 - DNA, 15 bp, Homo sapiens
ctctacctcgagggc

SEQ ID NO: 616336 - DNA, 15 bp, Homo sapiens
tctacctcgagggca

SEQ ID NO: 616337 - DNA, 15 bp, Homo sapiens
ctacctcgagggcat

SEQ ID NO: 616338 - DNA, 15 bp, Homo sapiens
tacctcgagggcatc

SEQ ID NO: 616339 - DNA, 15 bp, Homo sapiens
acctcgagggcatct

SEQ ID NO: 616340 - DNA, 15 bp, Homo sapiens
cctcgagggcatctg

SEQ ID NO: 616341 - DNA, 15 bp, Homo sapiens
ctcgagggcatctgg

SEQ ID NO: 616342 - DNA, 15 bp, Homo sapiens
tcgagggcatctggg

SEQ ID NO: 616343 - DNA, 15 bp, Homo sapiens
cgagggcatctgggt

SEQ ID NO: 616344 - DNA, 15 bp, Homo sapiens
gagggcatctgggtg

SEQ ID NO: 616345 - DNA, 15 bp, Homo sapiens
agggcatctgggtgc

SEQ ID NO: 616346 - DNA, 15 bp, Homo sapiens
gggcatctgggtgct

SEQ ID NO: 616347 - DNA, 15 bp, Homo sapiens
ggcatctgggtgctg

SEQ ID NO: 616348 - DNA, 15 bp, Homo sapiens
gcatctgggtgctgt

SEQ ID NO: 616349 - DNA, 15 bp, Homo sapiens
catctgggtgctgtt

SEQ ID NO: 616350 - DNA, 15 bp, Homo sapiens
atctgggtgctgttg

SEQ ID NO: 616351 - DNA, 15 bp, Homo sapiens
tctgggtgctgttgc

SEQ ID NO: 616352 - DNA, 15 bp, Homo sapiens
ctgggtgctgttgca

SEQ ID NO: 616353 - DNA, 15 bp, Homo sapiens
tgggtgctgttgcat

SEQ ID NO: 616354 - DNA, 15 bp, Homo sapiens
gggtgctgttgcatt

SEQ ID NO: 616355 - DNA, 15 bp, Homo sapiens
ggtgctgttgcattg

SEQ ID NO: 616356 - DNA, 15 bp, Homo sapiens
gtgctgttgcattgg

SEQ ID NO: 616357 - DNA, 15 bp, Homo sapiens
tgctgttgcattgga

SEQ ID NO: 616358 - DNA, 15 bp, Homo sapiens
gctgttgcattggat

SEQ ID NO: 616359 - DNA, 15 bp, Homo sapiens
ctgttgcattggata

SEQ ID NO: 616360 - DNA, 15 bp, Homo sapiens
tgttgcattggataa

SEQ ID NO: 616361 - DNA, 15 bp, Homo sapiens
gttgcattggataaa

SEQ ID NO: 616362 - DNA, 15 bp, Homo sapiens
ttgcattggataaaa

SEQ ID NO: 616363 - DNA, 15 bp, Homo sapiens
tgcattggataaaag

SEQ ID NO: 616364 - DNA, 15 bp, Homo sapiens
gcattggataaaagg

SEQ ID NO: 616365 - DNA, 15 bp, Homo sapiens
cattggataaaaggc

SEQ ID NO: 616366 - DNA, 15 bp, Homo sapiens
attggataaaaggca

SEQ ID NO: 616367 - DNA, 15 bp, Homo sapiens
ttggataaaaggcac

SEQ ID NO: 616368 - DNA, 15 bp, Homo sapiens
tggataaaaggcact

SEQ ID NO: 616369 - DNA, 15 bp, Homo sapiens
ggataaaaggcactg

SEQ ID NO: 616370 - DNA, 15 bp, Homo sapiens
gataaaaggcactgc

SEQ ID NO: 616371 - DNA, 15 bp, Homo sapiens
ataaaaggcactgct

SEQ ID NO: 616372 - DNA, 15 bp, Homo sapiens
taaaaggcactgctc

SEQ ID NO: 616373 - DNA, 15 bp, Homo sapiens
aaaaggcactgctct

SEQ ID NO: 616374 - DNA, 15 bp, Homo sapiens
aaaggcactgctctt

SEQ ID NO: 616375 - DNA, 15 bp, Homo sapiens
aaggcactgctcttt

SEQ ID NO: 616376 - DNA, 15 bp, Homo sapiens
aggcactgctctttt

SEQ ID NO: 616377 - DNA, 15 bp, Homo sapiens
ggcactgctcttttt

SEQ ID NO: 616378 - DNA, 15 bp, Homo sapiens
gcactgctctttttc

SEQ ID NO: 616379 - DNA, 15 bp, Homo sapiens
cactgctctttttct

SEQ ID NO: 616380 - DNA, 15 bp, Homo sapiens
actgctctttttctg

SEQ ID NO: 616381 - DNA, 15 bp, Homo sapiens
ctgctctttttctgt

SEQ ID NO: 616382 - DNA, 15 bp, Homo sapiens
tgctctttttctgtg

SEQ ID NO: 616383 - DNA, 15 bp, Homo sapiens
gctctttttctgtgc

SEQ ID NO: 616384 - DNA, 15 bp, Homo sapiens
ctctttttctgtgcc

SEQ ID NO: 616385 - DNA, 15 bp, Homo sapiens
tctttttctgtgccc

SEQ ID NO: 616386 - DNA, 15 bp, Homo sapiens
ctttttctgtgccct

SEQ ID NO: 616387 - DNA, 15 bp, Homo sapiens
tttttctgtgccctc

SEQ ID NO: 616388 - DNA, 15 bp, Homo sapiens
ttttctgtgccctct

SEQ ID NO: 616389 - DNA, 15 bp, Homo sapiens
tttctgtgccctctc

SEQ ID NO: 616390 - DNA, 15 bp, Homo sapiens
ttctgtgccctctcc

SEQ ID NO: 616391 - DNA, 15 bp, Homo sapiens
tctgtgccctctccg

SEQ ID NO: 616392 - DNA, 15 bp, Homo sapiens
ctgtgccctctccgc

SEQ ID NO: 616393 - DNA, 15 bp, Homo sapiens
tgtgccctctccgcc

SEQ ID NO: 616394 - DNA, 15 bp, Homo sapiens
gtgccctctccgcct

SEQ ID NO: 616395 - DNA, 15 bp, Homo sapiens
tgccctctccgcctc

SEQ ID NO: 616396 - DNA, 15 bp, Homo sapiens
gccctctccgcctca

SEQ ID NO: 616397 - DNA, 15 bp, Homo sapiens
ccctctccgcctcac

SEQ ID NO: 616398 - DNA, 15 bp, Homo sapiens
ctgcatttcctgtga

SEQ ID NO: 616399 - DNA, 15 bp, Homo sapiens
tgcatttcctgtgac

SEQ ID NO: 616400 - DNA, 15 bp, Homo sapiens
gcatttcctgtgacc

SEQ ID NO: 616401 - DNA, 15 bp, Homo sapiens
catttcctgtgacct

SEQ ID NO: 616402 - DNA, 15 bp, Homo sapiens
atttcctgtgacctg

SEQ ID NO: 616403 - DNA, 15 bp, Homo sapiens
tttcctgtgacctga

SEQ ID NO: 616404 - DNA, 15 bp, Homo sapiens
ttcctgtgacctgag

SEQ ID NO: 616405 - DNA, 15 bp, Homo sapiens
tcctgtgacctgagg

SEQ ID NO: 616406 - DNA, 15 bp, Homo sapiens
cctgtgacctgagga

SEQ ID NO: 616407 - DNA, 15 bp, Homo sapiens
ctgtgacctgaggat

SEQ ID NO: 616408 - DNA, 15 bp, Homo sapiens
tgtgacctgaggatt

SEQ ID NO: 616409 - DNA, 15 bp, Homo sapiens
gtgacctgaggattc

SEQ ID NO: 616410 - DNA, 15 bp, Homo sapiens
tgacctgaggattca

SEQ ID NO: 616411 - DNA, 15 bp, Homo sapiens
gacctgaggattcag

SEQ ID NO: 616412 - DNA, 15 bp, Homo sapiens
acctgaggattcagt

SEQ ID NO: 616413 - DNA, 15 bp, Homo sapiens
cctgaggattcagtt

SEQ ID NO: 616414 - DNA, 15 bp, Homo sapiens
ctgaggattcagttt

SEQ ID NO: 616415 - DNA, 15 bp, Homo sapiens
tgaggattcagtttt

SEQ ID NO: 616416 - DNA, 15 bp, Homo sapiens
gaggattcagttttg

SEQ ID NO: 616417 - DNA, 15 bp, Homo sapiens
aggattcagttttgt

SEQ ID NO: 616418 - DNA, 15 bp, Homo sapiens
ggattcagttttgtt

SEQ ID NO: 616419 - DNA, 15 bp, Homo sapiens
gattcagttttgttt

SEQ ID NO: 616420 - DNA, 15 bp, Homo sapiens
attcagttttgtttg

SEQ ID NO: 616421 - DNA, 15 bp, Homo sapiens
ttcagttttgtttgt

SEQ ID NO: 616422 - DNA, 15 bp, Homo sapiens
tcagttttgtttgtg

SEQ ID NO: 616423 - DNA, 15 bp, Homo sapiens
cagttttgtttgtgg

SEQ ID NO: 616424 - DNA, 15 bp, Homo sapiens
agttttgtttgtgga

SEQ ID NO: 616425 - DNA, 15 bp, Homo sapiens
gttttgtttgtggag

SEQ ID NO: 616426 - DNA, 15 bp, Homo sapiens
ttttgtttgtggagg

SEQ ID NO: 616427 - DNA, 15 bp, Homo sapiens
tttgtttgtggaggc

SEQ ID NO: 616428 - DNA, 15 bp, Homo sapiens
ttgtttgtggaggca

SEQ ID NO: 616429 - DNA, 15 bp, Homo sapiens
tgtttgtggaggcag

SEQ ID NO: 616430 - DNA, 15 bp, Homo sapiens
gtttgtggaggcagg

SEQ ID NO: 616431 - DNA, 15 bp, Homo sapiens
tttgtggaggcaggt

SEQ ID NO: 616432 - DNA, 15 bp, Homo sapiens
ttgtggaggcaggtg

SEQ ID NO: 616433 - DNA, 15 bp, Homo sapiens
tgtggaggcaggtgc

SEQ ID NO: 616434 - DNA, 15 bp, Homo sapiens
gtggaggcaggtgca

SEQ ID NO: 616435 - DNA, 15 bp, Homo sapiens
tggaggcaggtgcaa

SEQ ID NO: 616436 - DNA, 15 bp, Homo sapiens
ggaggcaggtgcaat

SEQ ID NO: 616437 - DNA, 15 bp, Homo sapiens
gaggcaggtgcaatc

SEQ ID NO: 616438 - DNA, 15 bp, Homo sapiens
aggcaggtgcaatcc

SEQ ID NO: 616439 - DNA, 15 bp, Homo sapiens
ggcaggtgcaatccc

SEQ ID NO: 616440 - DNA, 15 bp, Homo sapiens
gcaggtgcaatccca

SEQ ID NO: 616441 - DNA, 15 bp, Homo sapiens
caggtgcaatcccaa

SEQ ID NO: 616442 - DNA, 15 bp, Homo sapiens
aggtgcaatcccaag

SEQ ID NO: 616443 - DNA, 15 bp, Homo sapiens
ggtgcaatcccaaga

SEQ ID NO: 616444 - DNA, 15 bp, Homo sapiens
gtgcaatcccaagag

SEQ ID NO: 616445 - DNA, 15 bp, Homo sapiens
tgcaatcccaagaga

SEQ ID NO: 616446 - DNA, 15 bp, Homo sapiens
gcaatcccaagagaa

SEQ ID NO: 616447 - DNA, 15 bp, Homo sapiens
caatcccaagagaaa

SEQ ID NO: 616448 - DNA, 15 bp, Homo sapiens
aatcccaagagaaac

SEQ ID NO: 616449 - DNA, 15 bp, Homo sapiens
atcccaagagaaact

SEQ ID NO: 616450 - DNA, 15 bp, Homo sapiens
tcccaagagaaactg

SEQ ID NO: 616451 - DNA, 15 bp, Homo sapiens
cccaagagaaactgt

SEQ ID NO: 616452 - DNA, 15 bp, Homo sapiens
ccaagagaaactgtg

SEQ ID NO: 616453 - DNA, 15 bp, Homo sapiens
caagagaaactgtgc

SEQ ID NO: 616454 - DNA, 15 bp, Homo sapiens
aagagaaactgtgca

SEQ ID NO: 616455 - DNA, 15 bp, Homo sapiens
agagaaactgtgcaa

SEQ ID NO: 616456 - DNA, 15 bp, Homo sapiens
gagaaactgtgcaat

SEQ ID NO: 616457 - DNA, 15 bp, Homo sapiens
agaaactgtgcaatc

SEQ ID NO: 616458 - DNA, 15 bp, Homo sapiens
gaaactgtgcaatct

SEQ ID NO: 616459 - DNA, 15 bp, Homo sapiens
aaactgtgcaatctt

SEQ ID NO: 616460 - DNA, 15 bp, Homo sapiens
aactgtgcaatcttc

SEQ ID NO: 616461 - DNA, 15 bp, Homo sapiens
actgtgcaatcttct

SEQ ID NO: 616462 - DNA, 15 bp, Homo sapiens
ctgtgcaatcttctg

SEQ ID NO: 616463 - DNA, 15 bp, Homo sapiens
tgtgcaatcttctga

SEQ ID NO: 616464 - DNA, 15 bp, Homo sapiens
gtgcaatcttctgag

SEQ ID NO: 616465 - DNA, 15 bp, Homo sapiens
tgcaatcttctgaga

SEQ ID NO: 616466 - DNA, 15 bp, Homo sapiens
gcaatcttctgagaa

SEQ ID NO: 616467 - DNA, 15 bp, Homo sapiens
caatcttctgagaag

SEQ ID NO: 616468 - DNA, 15 bp, Homo sapiens
aatcttctgagaagt

SEQ ID NO: 616469 - DNA, 15 bp, Homo sapiens
atcttctgagaagtt

SEQ ID NO: 616470 - DNA, 15 bp, Homo sapiens
tcttctgagaagtta

SEQ ID NO: 616471 - DNA, 15 bp, Homo sapiens
cttctgagaagttag

SEQ ID NO: 616472 - DNA, 15 bp, Homo sapiens
ttctgagaagttaga

SEQ ID NO: 616473 - DNA, 15 bp, Homo sapiens
tctgagaagttagag

SEQ ID NO: 616474 - DNA, 15 bp, Homo sapiens
ctgagaagttagagt

SEQ ID NO: 616475 - DNA, 15 bp, Homo sapiens
tgagaagttagagta

SEQ ID NO: 616476 - DNA, 15 bp, Homo sapiens
gagaagttagagtag

SEQ ID NO: 616477 - DNA, 15 bp, Homo sapiens
agaagttagagtagg

SEQ ID NO: 616478 - DNA, 15 bp, Homo sapiens
gaagttagagtaggc

SEQ ID NO: 616479 - DNA, 15 bp, Homo sapiens
aagttagagtaggca

SEQ ID NO: 616480 - DNA, 15 bp, Homo sapiens
agttagagtaggcat

SEQ ID NO: 616481 - DNA, 15 bp, Homo sapiens
gttagagtaggcatg

SEQ ID NO: 616482 - DNA, 15 bp, Homo sapiens
ttagagtaggcatgt

SEQ ID NO: 616483 - DNA, 15 bp, Homo sapiens
tagagtaggcatgtg

SEQ ID NO: 616484 - DNA, 15 bp, Homo sapiens
agagtaggcatgtgt

SEQ ID NO: 616485 - DNA, 15 bp, Homo sapiens
gagtaggcatgtgtg

SEQ ID NO: 616486 - DNA, 15 bp, Homo sapiens
agtaggcatgtgtgt

SEQ ID NO: 616487 - DNA, 15 bp, Homo sapiens
gtaggcatgtgtgtg

SEQ ID NO: 616488 - DNA, 15 bp, Homo sapiens
taggcatgtgtgtgt

SEQ ID NO: 616489 - DNA, 15 bp, Homo sapiens
aggcatgtgtgtgtg

SEQ ID NO: 616490 - DNA, 15 bp, Homo sapiens
ggcatgtgtgtgtga

SEQ ID NO: 616491 - DNA, 15 bp, Homo sapiens
gcatgtgtgtgtgat

SEQ ID NO: 616492 - DNA, 15 bp, Homo sapiens
catgtgtgtgtgatt

SEQ ID NO: 616493 - DNA, 15 bp, Homo sapiens
atgtgtgtgtgattt

SEQ ID NO: 616494 - DNA, 15 bp, Homo sapiens
tgtgtgtgtgattta

SEQ ID NO: 616495 - DNA, 15 bp, Homo sapiens
gtgtgtgtgatttag

SEQ ID NO: 616496 - DNA, 15 bp, Homo sapiens
tgtgtgtgatttagg

SEQ ID NO: 616497 - DNA, 15 bp, Homo sapiens
gtgtgtgatttaggg

SEQ ID NO: 616498 - DNA, 15 bp, Homo sapiens
tgtgtgatttaggga

SEQ ID NO: 616499 - DNA, 15 bp, Homo sapiens
gtgtgatttagggaa

SEQ ID NO: 616500 - DNA, 15 bp, Homo sapiens
tgtgatttagggaag

SEQ ID NO: 616501 - DNA, 15 bp, Homo sapiens
gtgatttagggaagg

SEQ ID NO: 616502 - DNA, 15 bp, Homo sapiens
tgatttagggaaggt

SEQ ID NO: 616503 - DNA, 15 bp, Homo sapiens
gatttagggaaggta

SEQ ID NO: 616504 - DNA, 15 bp, Homo sapiens
atttagggaaggtac

SEQ ID NO: 616505 - DNA, 15 bp, Homo sapiens
tttagggaaggtact

SEQ ID NO: 616506 - DNA, 15 bp, Homo sapiens
ttagggaaggtactt

SEQ ID NO: 616507 - DNA, 15 bp, Homo sapiens
tagggaaggtacttc

SEQ ID NO: 616508 - DNA, 15 bp, Homo sapiens
agggaaggtacttct

SEQ ID NO: 616509 - DNA, 15 bp, Homo sapiens
gggaaggtacttctc

SEQ ID NO: 616510 - DNA, 15 bp, Homo sapiens
ggaaggtacttctca

SEQ ID NO: 616511 - DNA, 15 bp, Homo sapiens
gaaggtacttctcac

SEQ ID NO: 616512 - DNA, 15 bp, Homo sapiens
aaggtacttctcact

SEQ ID NO: 616513 - DNA, 15 bp, Homo sapiens
aggtacttctcactc

SEQ ID NO: 616514 - DNA, 15 bp, Homo sapiens
ggtacttctcactca

SEQ ID NO: 616515 - DNA, 15 bp, Homo sapiens
gtacttctcactcag

SEQ ID NO: 616516 - DNA, 15 bp, Homo sapiens
tacttctcactcagc

SEQ ID NO: 616517 - DNA, 15 bp, Homo sapiens
acttctcactcagct

SEQ ID NO: 616518 - DNA, 15 bp, Homo sapiens
cttctcactcagctt

SEQ ID NO: 616519 - DNA, 15 bp, Homo sapiens
ttctcactcagcttg

SEQ ID NO: 616520 - DNA, 15 bp, Homo sapiens
tctcactcagcttgg

SEQ ID NO: 616521 - DNA, 15 bp, Homo sapiens
ctcactcagcttggt

SEQ ID NO: 616522 - DNA, 15 bp, Homo sapiens
tcactcagcttggtc

SEQ ID NO: 616523 - DNA, 15 bp, Homo sapiens
cactcagcttggtca

SEQ ID NO: 616524 - DNA, 15 bp, Homo sapiens
actcagcttggtcac

SEQ ID NO: 616525 - DNA, 15 bp, Homo sapiens
ctcagcttggtcacc

SEQ ID NO: 616526 - DNA, 15 bp, Homo sapiens
tcagcttggtcaccg

SEQ ID NO: 616527 - DNA, 15 bp, Homo sapiens
cagcttggtcaccgg

SEQ ID NO: 616528 - DNA, 15 bp, Homo sapiens
agcttggtcaccggt

SEQ ID NO: 616529 - DNA, 15 bp, Homo sapiens
gcttggtcaccggtt

SEQ ID NO: 616530 - DNA, 15 bp, Homo sapiens
cttggtcaccggttc

SEQ ID NO: 616531 - DNA, 15 bp, Homo sapiens
ttggtcaccggttcc

SEQ ID NO: 616532 - DNA, 15 bp, Homo sapiens
tggtcaccggttcca

SEQ ID NO: 616533 - DNA, 15 bp, Homo sapiens
ggtcaccggttccag

SEQ ID NO: 616534 - DNA, 15 bp, Homo sapiens
gtcaccggttccagg

SEQ ID NO: 616535 - DNA, 15 bp, Homo sapiens
tcaccggttccaggt

SEQ ID NO: 616536 - DNA, 15 bp, Homo sapiens
caccggttccaggtt

SEQ ID NO: 616537 - DNA, 15 bp, Homo sapiens
accggttccaggttt

SEQ ID NO: 616538 - DNA, 15 bp, Homo sapiens
ccggttccaggtttg

SEQ ID NO: 616539 - DNA, 15 bp, Homo sapiens
cggttccaggtttgt

SEQ ID NO: 616540 - DNA, 15 bp, Homo sapiens
ggttccaggtttgtg

SEQ ID NO: 616541 - DNA, 15 bp, Homo sapiens
gttccaggtttgtgt

SEQ ID NO: 616542 - DNA, 15 bp, Homo sapiens
ttccaggtttgtgtc

SEQ ID NO: 616543 - DNA, 15 bp, Homo sapiens
tccaggtttgtgtct

SEQ ID NO: 616544 - DNA, 15 bp, Homo sapiens
ccaggtttgtgtctt

SEQ ID NO: 616545 - DNA, 15 bp, Homo sapiens
caggtttgtgtcttg

SEQ ID NO: 616546 - DNA, 15 bp, Homo sapiens
aggtttgtgtcttgg

SEQ ID NO: 616547 - DNA, 15 bp, Homo sapiens
ggtttgtgtcttggg

SEQ ID NO: 616548 - DNA, 15 bp, Homo sapiens
gtttgtgtcttgggc

SEQ ID NO: 616549 - DNA, 15 bp, Homo sapiens
tttgtgtcttgggca

SEQ ID NO: 616550 - DNA, 15 bp, Homo sapiens
ttgtgtcttgggcaa

SEQ ID NO: 616551 - DNA, 15 bp, Homo sapiens
tgtgtcttgggcaag

SEQ ID NO: 616552 - DNA, 15 bp, Homo sapiens
gtgtcttgggcaagt

SEQ ID NO: 616553 - DNA, 15 bp, Homo sapiens
tgtcttgggcaagtc

SEQ ID NO: 616554 - DNA, 15 bp, Homo sapiens
gtcttgggcaagtcc

SEQ ID NO: 616555 - DNA, 15 bp, Homo sapiens
tcttgggcaagtccc

SEQ ID NO: 616556 - DNA, 15 bp, Homo sapiens
cttgggcaagtcccc

SEQ ID NO: 616557 - DNA, 15 bp, Homo sapiens
ttgggcaagtccccc

SEQ ID NO: 616558 - DNA, 15 bp, Homo sapiens
tgggcaagtccccca

SEQ ID NO: 616559 - DNA, 15 bp, Homo sapiens
gggcaagtcccccat

SEQ ID NO: 616560 - DNA, 15 bp, Homo sapiens
ggcaagtcccccata

SEQ ID NO: 616561 - DNA, 15 bp, Homo sapiens
gcaagtcccccatag

SEQ ID NO: 616562 - DNA, 15 bp, Homo sapiens
caagtcccccatagc

SEQ ID NO: 616563 - DNA, 15 bp, Homo sapiens
aagtcccccatagct

SEQ ID NO: 616564 - DNA, 15 bp, Homo sapiens
agtcccccatagctg

SEQ ID NO: 616565 - DNA, 15 bp, Homo sapiens
gtcccccatagctgg

SEQ ID NO: 616566 - DNA, 15 bp, Homo sapiens
tcccccatagctggt

SEQ ID NO: 616567 - DNA, 15 bp, Homo sapiens
cccccatagctggtg

SEQ ID NO: 616568 - DNA, 15 bp, Homo sapiens
ccccatagctggtga

SEQ ID NO: 616569 - DNA, 15 bp, Homo sapiens
cccatagctggtgac

SEQ ID NO: 616570 - DNA, 15 bp, Homo sapiens
ccatagctggtgaca

SEQ ID NO: 616571 - DNA, 15 bp, Homo sapiens
catagctggtgacag

SEQ ID NO: 616572 - DNA, 15 bp, Homo sapiens
atagctggtgacaga

SEQ ID NO: 616573 - DNA, 15 bp, Homo sapiens
tagctggtgacagac

SEQ ID NO: 616574 - DNA, 15 bp, Homo sapiens
agctggtgacagacc

SEQ ID NO: 616575 - DNA, 15 bp, Homo sapiens
gctggtgacagacca

SEQ ID NO: 616576 - DNA, 15 bp, Homo sapiens
ctggtgacagaccag

SEQ ID NO: 616577 - DNA, 15 bp, Homo sapiens
tggtgacagaccaga

SEQ ID NO: 616578 - DNA, 15 bp, Homo sapiens
ggtgacagaccagaa

SEQ ID NO: 616579 - DNA, 15 bp, Homo sapiens
gtgacagaccagaaa

SEQ ID NO: 616580 - DNA, 15 bp, Homo sapiens
tgacagaccagaaaa

SEQ ID NO: 616581 - DNA, 15 bp, Homo sapiens
gacagaccagaaaaa

SEQ ID NO: 616582 - DNA, 15 bp, Homo sapiens
acagaccagaaaaat

SEQ ID NO: 616583 - DNA, 15 bp, Homo sapiens
cagaccagaaaaatg

SEQ ID NO: 616584 - DNA, 15 bp, Homo sapiens
agaccagaaaaatga

SEQ ID NO: 616585 - DNA, 15 bp, Homo sapiens
gaccagaaaaatgaa

SEQ ID NO: 616586 - DNA, 15 bp, Homo sapiens
accagaaaaatgaaa

SEQ ID NO: 616587 - DNA, 15 bp, Homo sapiens
ccagaaaaatgaaaa

SEQ ID NO: 616588 - DNA, 15 bp, Homo sapiens
cagaaaaatgaaaac

SEQ ID NO: 616589 - DNA, 15 bp, Homo sapiens
agaaaaatgaaaaca

SEQ ID NO: 616590 - DNA, 15 bp, Homo sapiens
gaaaaatgaaaacaa

SEQ ID NO: 616591 - DNA, 15 bp, Homo sapiens
aaaaatgaaaacaac

SEQ ID NO: 616592 - DNA, 15 bp, Homo sapiens
aaaatgaaaacaact

SEQ ID NO: 616593 - DNA, 15 bp, Homo sapiens
aaatgaaaacaactt

SEQ ID NO: 616594 - DNA, 15 bp, Homo sapiens
aatgaaaacaacttt

SEQ ID NO: 616595 - DNA, 15 bp, Homo sapiens
atgaaaacaactttg

SEQ ID NO: 616596 - DNA, 15 bp, Homo sapiens
tgaaaacaactttga

SEQ ID NO: 616597 - DNA, 15 bp, Homo sapiens
gaaaacaactttgac

SEQ ID NO: 616598 - DNA, 15 bp, Homo sapiens
aaaacaactttgact

SEQ ID NO: 616599 - DNA, 15 bp, Homo sapiens
aaacaactttgactt

SEQ ID NO: 616600 - DNA, 15 bp, Homo sapiens
aacaactttgactta

SEQ ID NO: 616601 - DNA, 15 bp, Homo sapiens
acaactttgacttag

SEQ ID NO: 616602 - DNA, 15 bp, Homo sapiens
caactttgacttagc

SEQ ID NO: 616603 - DNA, 15 bp, Homo sapiens
aactttgacttagcc

SEQ ID NO: 616604 - DNA, 15 bp, Homo sapiens
actttgacttagccc

SEQ ID NO: 616605 - DNA, 15 bp, Homo sapiens
ctttgacttagccct

SEQ ID NO: 616606 - DNA, 15 bp, Homo sapiens
tttgacttagccctc

SEQ ID NO: 616607 - DNA, 15 bp, Homo sapiens
ttgacttagccctca

SEQ ID NO: 616608 - DNA, 15 bp, Homo sapiens
tgacttagccctcaa

SEQ ID NO: 616609 - DNA, 15 bp, Homo sapiens
gacttagccctcaag

SEQ ID NO: 616610 - DNA, 15 bp, Homo sapiens
acttagccctcaagt

SEQ ID NO: 616611 - DNA, 15 bp, Homo sapiens
cttagccctcaagtt

SEQ ID NO: 616612 - DNA, 15 bp, Homo sapiens
ttagccctcaagttt

SEQ ID NO: 616613 - DNA, 15 bp, Homo sapiens
tagccctcaagtttt

SEQ ID NO: 616614 - DNA, 15 bp, Homo sapiens
agccctcaagttttc

SEQ ID NO: 616615 - DNA, 15 bp, Homo sapiens
gccctcaagttttca

SEQ ID NO: 616616 - DNA, 15 bp, Homo sapiens
ccctcaagttttcag

SEQ ID NO: 616617 - DNA, 15 bp, Homo sapiens
cctcaagttttcagt

SEQ ID NO: 616618 - DNA, 15 bp, Homo sapiens
ctcaagttttcagtg

SEQ ID NO: 616619 - DNA, 15 bp, Homo sapiens
tcaagttttcagtga

SEQ ID NO: 616620 - DNA, 15 bp, Homo sapiens
caagttttcagtgaa

SEQ ID NO: 616621 - DNA, 15 bp, Homo sapiens
aagttttcagtgaat

SEQ ID NO: 616622 - DNA, 15 bp, Homo sapiens
agttttcagtgaatg

SEQ ID NO: 616623 - DNA, 15 bp, Homo sapiens
gttttcagtgaatga

SEQ ID NO: 616624 - DNA, 15 bp, Homo sapiens
ttttcagtgaatgag

SEQ ID NO: 616625 - DNA, 15 bp, Homo sapiens
tttcagtgaatgaga

SEQ ID NO: 616626 - DNA, 15 bp, Homo sapiens
ttcagtgaatgagaa

SEQ ID NO: 616627 - DNA, 15 bp, Homo sapiens
tcagtgaatgagaat

SEQ ID NO: 616628 - DNA, 15 bp, Homo sapiens
cagtgaatgagaatg

SEQ ID NO: 616629 - DNA, 15 bp, Homo sapiens
agtgaatgagaatga

SEQ ID NO: 616630 - DNA, 15 bp, Homo sapiens
gtgaatgagaatgaa

SEQ ID NO: 616631 - DNA, 15 bp, Homo sapiens
tgaatgagaatgaaa

SEQ ID NO: 616632 - DNA, 15 bp, Homo sapiens
gaatgagaatgaaaa

SEQ ID NO: 616633 - DNA, 15 bp, Homo sapiens
aatgagaatgaaaaa

SEQ ID NO: 616634 - DNA, 15 bp, Homo sapiens
atgagaatgaaaaac

SEQ ID NO: 616635 - DNA, 15 bp, Homo sapiens
tgagaatgaaaaaca

SEQ ID NO: 616636 - DNA, 15 bp, Homo sapiens
gagaatgaaaaacaa

SEQ ID NO: 616637 - DNA, 15 bp, Homo sapiens
agaatgaaaaacaac

SEQ ID NO: 616638 - DNA, 15 bp, Homo sapiens
gaatgaaaaacaacc

SEQ ID NO: 616639 - DNA, 15 bp, Homo sapiens
aatgaaaaacaacca

SEQ ID NO: 616640 - DNA, 15 bp, Homo sapiens
atgaaaaacaaccat

SEQ ID NO: 616641 - DNA, 15 bp, Homo sapiens
tgaaaaacaaccatg

SEQ ID NO: 616642 - DNA, 15 bp, Homo sapiens
gaaaaacaaccatga

SEQ ID NO: 616643 - DNA, 15 bp, Homo sapiens
aaaaacaaccatgag

SEQ ID NO: 616644 - DNA, 15 bp, Homo sapiens
aaaacaaccatgagt

SEQ ID NO: 616645 - DNA, 15 bp, Homo sapiens
aaacaaccatgagta

SEQ ID NO: 616646 - DNA, 15 bp, Homo sapiens
aacaaccatgagtaa

SEQ ID NO: 616647 - DNA, 15 bp, Homo sapiens
acaaccatgagtaag

SEQ ID NO: 616648 - DNA, 15 bp, Homo sapiens
caaccatgagtaaga

SEQ ID NO: 616649 - DNA, 15 bp, Homo sapiens
aaccatgagtaagag

SEQ ID NO: 616650 - DNA, 15 bp, Homo sapiens
accatgagtaagaga

SEQ ID NO: 616651 - DNA, 15 bp, Homo sapiens
ccatgagtaagagat

SEQ ID NO: 616652 - DNA, 15 bp, Homo sapiens
catgagtaagagatt

SEQ ID NO: 616653 - DNA, 15 bp, Homo sapiens
atgagtaagagattt

SEQ ID NO: 616654 - DNA, 15 bp, Homo sapiens
tgagtaagagatttc

SEQ ID NO: 616655 - DNA, 15 bp, Homo sapiens
gagtaagagatttct

SEQ ID NO: 616656 - DNA, 15 bp, Homo sapiens
agtaagagatttctt

SEQ ID NO: 616657 - DNA, 15 bp, Homo sapiens
gtaagagatttctta

SEQ ID NO: 616658 - DNA, 15 bp, Homo sapiens
taagagatttcttac

SEQ ID NO: 616659 - DNA, 15 bp, Homo sapiens
aagagatttcttacc

SEQ ID NO: 616660 - DNA, 15 bp, Homo sapiens
agagatttcttaccg

SEQ ID NO: 616661 - DNA, 15 bp, Homo sapiens
gagatttcttaccga

SEQ ID NO: 616662 - DNA, 15 bp, Homo sapiens
agatttcttaccgag

SEQ ID NO: 616663 - DNA, 15 bp, Homo sapiens
gatttcttaccgaga

SEQ ID NO: 616664 - DNA, 15 bp, Homo sapiens
atttcttaccgagat

SEQ ID NO: 616665 - DNA, 15 bp, Homo sapiens
tttcttaccgagatg

SEQ ID NO: 616666 - DNA, 15 bp, Homo sapiens
ttcttaccgagatga

SEQ ID NO: 616667 - DNA, 15 bp, Homo sapiens
tcttaccgagatgat

SEQ ID NO: 616668 - DNA, 15 bp, Homo sapiens
cttaccgagatgatg

SEQ ID NO: 616669 - DNA, 15 bp, Homo sapiens
ttaccgagatgatgt

SEQ ID NO: 616670 - DNA, 15 bp, Homo sapiens
taccgagatgatgta

SEQ ID NO: 616671 - DNA, 15 bp, Homo sapiens
accgagatgatgtaa

SEQ ID NO: 616672 - DNA, 15 bp, Homo sapiens
ccgagatgatgtaaa

SEQ ID NO: 616673 - DNA, 15 bp, Homo sapiens
cgagatgatgtaaag

SEQ ID NO: 616674 - DNA, 15 bp, Homo sapiens
gagatgatgtaaagg

SEQ ID NO: 616675 - DNA, 15 bp, Homo sapiens
agatgatgtaaagga

SEQ ID NO: 616676 - DNA, 15 bp, Homo sapiens
gatgatgtaaaggat

SEQ ID NO: 616677 - DNA, 15 bp, Homo sapiens
atgatgtaaaggata

SEQ ID NO: 616678 - DNA, 15 bp, Homo sapiens
tgatgtaaaggataa

SEQ ID NO: 616679 - DNA, 15 bp, Homo sapiens
gatgtaaaggataat

SEQ ID NO: 616680 - DNA, 15 bp, Homo sapiens
atgtaaaggataata

SEQ ID NO: 616681 - DNA, 15 bp, Homo sapiens
tgtaaaggataataa

SEQ ID NO: 616682 - DNA, 15 bp, Homo sapiens
gtaaaggataataat

SEQ ID NO: 616683 - DNA, 15 bp, Homo sapiens
taaaggataataata

SEQ ID NO: 616684 - DNA, 15 bp, Homo sapiens
aaaggataataatag

SEQ ID NO: 616685 - DNA, 15 bp, Homo sapiens
aaggataataatagc

SEQ ID NO: 616686 - DNA, 15 bp, Homo sapiens
aggataataatagca

SEQ ID NO: 616687 - DNA, 15 bp, Homo sapiens
ggataataatagcag

SEQ ID NO: 616688 - DNA, 15 bp, Homo sapiens
gataataatagcagc

SEQ ID NO: 616689 - DNA, 15 bp, Homo sapiens
ataataatagcagcc

SEQ ID NO: 616690 - DNA, 15 bp, Homo sapiens
taataatagcagcca

SEQ ID NO: 616691 - DNA, 15 bp, Homo sapiens
aataatagcagccag

SEQ ID NO: 616692 - DNA, 15 bp, Homo sapiens
ataatagcagccagc

SEQ ID NO: 616693 - DNA, 15 bp, Homo sapiens
taatagcagccagca

SEQ ID NO: 616694 - DNA, 15 bp, Homo sapiens
aatagcagccagcac

SEQ ID NO: 616695 - DNA, 15 bp, Homo sapiens
atagcagccagcact

SEQ ID NO: 616696 - DNA, 15 bp, Homo sapiens
tagcagccagcactc

SEQ ID NO: 616697 - DNA, 15 bp, Homo sapiens
agcagccagcactca

SEQ ID NO: 616698 - DNA, 15 bp, Homo sapiens
gcagccagcactcac

SEQ ID NO: 616699 - DNA, 15 bp, Homo sapiens
cagccagcactcacc

SEQ ID NO: 616700 - DNA, 15 bp, Homo sapiens
agccagcactcacct

SEQ ID NO: 616701 - DNA, 15 bp, Homo sapiens
gccagcactcaccta

SEQ ID NO: 616702 - DNA, 15 bp, Homo sapiens
ccagcactcacctat

SEQ ID NO: 616703 - DNA, 15 bp, Homo sapiens
cagcactcacctatg

SEQ ID NO: 616704 - DNA, 15 bp, Homo sapiens
agcactcacctatgt

SEQ ID NO: 616705 - DNA, 15 bp, Homo sapiens
gcactcacctatgtg

SEQ ID NO: 616706 - DNA, 15 bp, Homo sapiens
cactcacctatgtgc

SEQ ID NO: 616707 - DNA, 15 bp, Homo sapiens
actcacctatgtgcc

SEQ ID NO: 616708 - DNA, 15 bp, Homo sapiens
ctcacctatgtgcca

SEQ ID NO: 616709 - DNA, 15 bp, Homo sapiens
tcacctatgtgccag

SEQ ID NO: 616710 - DNA, 15 bp, Homo sapiens
cacctatgtgccagg

SEQ ID NO: 616711 - DNA, 15 bp, Homo sapiens
acctatgtgccaggt

SEQ ID NO: 616712 - DNA, 15 bp, Homo sapiens
cctatgtgccaggta

SEQ ID NO: 616713 - DNA, 15 bp, Homo sapiens
ctatgtgccaggtat

SEQ ID NO: 616714 - DNA, 15 bp, Homo sapiens
tatgtgccaggtatt

SEQ ID NO: 616715 - DNA, 15 bp, Homo sapiens
atgtgccaggtattt

SEQ ID NO: 616716 - DNA, 15 bp, Homo sapiens
tgtgccaggtatttc

SEQ ID NO: 616717 - DNA, 15 bp, Homo sapiens
gtgccaggtatttct

SEQ ID NO: 616718 - DNA, 15 bp, Homo sapiens
tgccaggtatttctc

SEQ ID NO: 616719 - DNA, 15 bp, Homo sapiens
gccaggtatttctct

SEQ ID NO: 616720 - DNA, 15 bp, Homo sapiens
ccaggtatttctcta

SEQ ID NO: 616721 - DNA, 15 bp, Homo sapiens
caggtatttctctaa

SEQ ID NO: 616722 - DNA, 15 bp, Homo sapiens
aggtatttctctaac

SEQ ID NO: 616723 - DNA, 15 bp, Homo sapiens
ggtatttctctaact

SEQ ID NO: 616724 - DNA, 15 bp, Homo sapiens
gtatttctctaactg

SEQ ID NO: 616725 - DNA, 15 bp, Homo sapiens
tatttctctaactgc

SEQ ID NO: 616726 - DNA, 15 bp, Homo sapiens
atttctctaactgct

SEQ ID NO: 616727 - DNA, 15 bp, Homo sapiens
tttctctaactgctt

SEQ ID NO: 616728 - DNA, 15 bp, Homo sapiens
ttctctaactgcttt

SEQ ID NO: 616729 - DNA, 15 bp, Homo sapiens
tctctaactgctttg

SEQ ID NO: 616730 - DNA, 15 bp, Homo sapiens
ctctaactgctttgt

SEQ ID NO: 616731 - DNA, 15 bp, Homo sapiens
tctaactgctttgtg

SEQ ID NO: 616732 - DNA, 15 bp, Homo sapiens
ctaactgctttgtgt

SEQ ID NO: 616733 - DNA, 15 bp, Homo sapiens
taactgctttgtgta

SEQ ID NO: 616734 - DNA, 15 bp, Homo sapiens
aactgctttgtgtag

SEQ ID NO: 616735 - DNA, 15 bp, Homo sapiens
actgctttgtgtagt

SEQ ID NO: 616736 - DNA, 15 bp, Homo sapiens
ctgctttgtgtagtt

SEQ ID NO: 616737 - DNA, 15 bp, Homo sapiens
tgctttgtgtagttt

SEQ ID NO: 616738 - DNA, 15 bp, Homo sapiens
gctttgtgtagtttg

SEQ ID NO: 616739 - DNA, 15 bp, Homo sapiens
ctttgtgtagtttga

SEQ ID NO: 616740 - DNA, 15 bp, Homo sapiens
tttgtgtagtttgac

SEQ ID NO: 616741 - DNA, 15 bp, Homo sapiens
ttgtgtagtttgact

SEQ ID NO: 616742 - DNA, 15 bp, Homo sapiens
tgtgtagtttgactc

SEQ ID NO: 616743 - DNA, 15 bp, Homo sapiens
gtgtagtttgactca

SEQ ID NO: 616744 - DNA, 15 bp, Homo sapiens
tgtagtttgactcat

SEQ ID NO: 616745 - DNA, 15 bp, Homo sapiens
gtagtttgactcatc

SEQ ID NO: 616746 - DNA, 15 bp, Homo sapiens
tagtttgactcatcc

SEQ ID NO: 616747 - DNA, 15 bp, Homo sapiens
agtttgactcatcca

SEQ ID NO: 616748 - DNA, 15 bp, Homo sapiens
gtttgactcatccag

SEQ ID NO: 616749 - DNA, 15 bp, Homo sapiens
tttgactcatccagt

SEQ ID NO: 616750 - DNA, 15 bp, Homo sapiens
ttgactcatccagtc

SEQ ID NO: 616751 - DNA, 15 bp, Homo sapiens
tgactcatccagtcc

SEQ ID NO: 616752 - DNA, 15 bp, Homo sapiens
gactcatccagtcct

SEQ ID NO: 616753 - DNA, 15 bp, Homo sapiens
actcatccagtcctc

SEQ ID NO: 616754 - DNA, 15 bp, Homo sapiens
ctcatccagtcctca

SEQ ID NO: 616755 - DNA, 15 bp, Homo sapiens
tcatccagtcctcaa

SEQ ID NO: 616756 - DNA, 15 bp, Homo sapiens
catccagtcctcaaa

SEQ ID NO: 616757 - DNA, 15 bp, Homo sapiens
atccagtcctcaaaa

SEQ ID NO: 616758 - DNA, 15 bp, Homo sapiens
tccagtcctcaaaaa

SEQ ID NO: 616759 - DNA, 15 bp, Homo sapiens
ccagtcctcaaaaac

SEQ ID NO: 616760 - DNA, 15 bp, Homo sapiens
cagtcctcaaaaaca

SEQ ID NO: 616761 - DNA, 15 bp, Homo sapiens
agtcctcaaaaacaa

SEQ ID NO: 616762 - DNA, 15 bp, Homo sapiens
gtcctcaaaaacaac

SEQ ID NO: 616763 - DNA, 15 bp, Homo sapiens
tcctcaaaaacaaca

SEQ ID NO: 616764 - DNA, 15 bp, Homo sapiens
cctcaaaaacaacaa

SEQ ID NO: 616765 - DNA, 15 bp, Homo sapiens
ctcaaaaacaacaat

SEQ ID NO: 616766 - DNA, 15 bp, Homo sapiens
tcaaaaacaacaatg

SEQ ID NO: 616767 - DNA, 15 bp, Homo sapiens
caaaaacaacaatga

SEQ ID NO: 616768 - DNA, 15 bp, Homo sapiens
aaaaacaacaatgaa

SEQ ID NO: 616769 - DNA, 15 bp, Homo sapiens
aaaacaacaatgaag

SEQ ID NO: 616770 - DNA, 15 bp, Homo sapiens
aaacaacaatgaagt

SEQ ID NO: 616771 - DNA, 15 bp, Homo sapiens
aacaacaatgaagtg

SEQ ID NO: 616772 - DNA, 15 bp, Homo sapiens
acaacaatgaagtgg

SEQ ID NO: 616773 - DNA, 15 bp, Homo sapiens
caacaatgaagtgga

SEQ ID NO: 616774 - DNA, 15 bp, Homo sapiens
aacaatgaagtggat

SEQ ID NO: 616775 - DNA, 15 bp, Homo sapiens
acaatgaagtggata

SEQ ID NO: 616776 - DNA, 15 bp, Homo sapiens
caatgaagtggatac

SEQ ID NO: 616777 - DNA, 15 bp, Homo sapiens
aatgaagtggatacc

SEQ ID NO: 616778 - DNA, 15 bp, Homo sapiens
atgaagtggatacca

SEQ ID NO: 616779 - DNA, 15 bp, Homo sapiens
tgaagtggataccag

SEQ ID NO: 616780 - DNA, 15 bp, Homo sapiens
gaagtggataccagt

SEQ ID NO: 616781 - DNA, 15 bp, Homo sapiens
aagtggataccagta

SEQ ID NO: 616782 - DNA, 15 bp, Homo sapiens
agtggataccagtat

SEQ ID NO: 616783 - DNA, 15 bp, Homo sapiens
gtggataccagtatt

SEQ ID NO: 616784 - DNA, 15 bp, Homo sapiens
tggataccagtattt

SEQ ID NO: 616785 - DNA, 15 bp, Homo sapiens
ggataccagtatttt

SEQ ID NO: 616786 - DNA, 15 bp, Homo sapiens
gataccagtattttc

SEQ ID NO: 616787 - DNA, 15 bp, Homo sapiens
ataccagtattttcc

SEQ ID NO: 616788 - DNA, 15 bp, Homo sapiens
taccagtattttccc

SEQ ID NO: 616789 - DNA, 15 bp, Homo sapiens
accagtattttcccc

SEQ ID NO: 616790 - DNA, 15 bp, Homo sapiens
ccagtattttcccct

SEQ ID NO: 616791 - DNA, 15 bp, Homo sapiens
cagtattttcccctt

SEQ ID NO: 616792 - DNA, 15 bp, Homo sapiens
agtattttccccttt

SEQ ID NO: 616793 - DNA, 15 bp, Homo sapiens
gtattttcccctttt

SEQ ID NO: 616794 - DNA, 15 bp, Homo sapiens
tattttccccttttc

SEQ ID NO: 616795 - DNA, 15 bp, Homo sapiens
attttccccttttca

SEQ ID NO: 616796 - DNA, 15 bp, Homo sapiens
ttttccccttttcac

SEQ ID NO: 616797 - DNA, 15 bp, Homo sapiens
tttccccttttcaca

SEQ ID NO: 616798 - DNA, 15 bp, Homo sapiens
ttccccttttcacag

SEQ ID NO: 616799 - DNA, 15 bp, Homo sapiens
tccccttttcacaga

SEQ ID NO: 616800 - DNA, 15 bp, Homo sapiens
ccccttttcacagat

SEQ ID NO: 616801 - DNA, 15 bp, Homo sapiens
cccttttcacagatg

SEQ ID NO: 616802 - DNA, 15 bp, Homo sapiens
ccttttcacagatga

SEQ ID NO: 616803 - DNA, 15 bp, Homo sapiens
cttttcacagatgag

SEQ ID NO: 616804 - DNA, 15 bp, Homo sapiens
ttttcacagatgagg

SEQ ID NO: 616805 - DNA, 15 bp, Homo sapiens
tttcacagatgagga

SEQ ID NO: 616806 - DNA, 15 bp, Homo sapiens
ttcacagatgaggaa

SEQ ID NO: 616807 - DNA, 15 bp, Homo sapiens
tcacagatgaggaaa

SEQ ID NO: 616808 - DNA, 15 bp, Homo sapiens
cacagatgaggaaag

SEQ ID NO: 616809 - DNA, 15 bp, Homo sapiens
acagatgaggaaagt

SEQ ID NO: 616810 - DNA, 15 bp, Homo sapiens
cagatgaggaaagtc

SEQ ID NO: 616811 - DNA, 15 bp, Homo sapiens
agatgaggaaagtct

SEQ ID NO: 616812 - DNA, 15 bp, Homo sapiens
gatgaggaaagtcta

SEQ ID NO: 616813 - DNA, 15 bp, Homo sapiens
atgaggaaagtctaa

SEQ ID NO: 616814 - DNA, 15 bp, Homo sapiens
tgaggaaagtctaat

SEQ ID NO: 616815 - DNA, 15 bp, Homo sapiens
gaggaaagtctaatg

SEQ ID NO: 616816 - DNA, 15 bp, Homo sapiens
aggaaagtctaatgt

SEQ ID NO: 616817 - DNA, 15 bp, Homo sapiens
ggaaagtctaatgtg

SEQ ID NO: 616818 - DNA, 15 bp, Homo sapiens
gaaagtctaatgtga

SEQ ID NO: 616819 - DNA, 15 bp, Homo sapiens
aaagtctaatgtgac

SEQ ID NO: 616820 - DNA, 15 bp, Homo sapiens
aagtctaatgtgacc

SEQ ID NO: 616821 - DNA, 15 bp, Homo sapiens
agtctaatgtgaccc

SEQ ID NO: 616822 - DNA, 15 bp, Homo sapiens
gtctaatgtgaccca

SEQ ID NO: 616823 - DNA, 15 bp, Homo sapiens
tctaatgtgacccac

SEQ ID NO: 616824 - DNA, 15 bp, Homo sapiens
ctaatgtgacccacc

SEQ ID NO: 616825 - DNA, 15 bp, Homo sapiens
taatgtgacccaccc

SEQ ID NO: 616826 - DNA, 15 bp, Homo sapiens
aatgtgacccaccca

SEQ ID NO: 616827 - DNA, 15 bp, Homo sapiens
atgtgacccacccaa

SEQ ID NO: 616828 - DNA, 15 bp, Homo sapiens
tgtgacccacccaac

SEQ ID NO: 616829 - DNA, 15 bp, Homo sapiens
gtgacccacccaaca

SEQ ID NO: 616830 - DNA, 15 bp, Homo sapiens
tgacccacccaacat

SEQ ID NO: 616831 - DNA, 15 bp, Homo sapiens
gacccacccaacata

SEQ ID NO: 616832 - DNA, 15 bp, Homo sapiens
acccacccaacataa

SEQ ID NO: 616833 - DNA, 15 bp, Homo sapiens
cccacccaacataac

SEQ ID NO: 616834 - DNA, 15 bp, Homo sapiens
ccacccaacataaca

SEQ ID NO: 616835 - DNA, 15 bp, Homo sapiens
cacccaacataacat

SEQ ID NO: 616836 - DNA, 15 bp, Homo sapiens
acccaacataacata

SEQ ID NO: 616837 - DNA, 15 bp, Homo sapiens
cccaacataacatag

SEQ ID NO: 616838 - DNA, 15 bp, Homo sapiens
ccaacataacatagt

SEQ ID NO: 616839 - DNA, 15 bp, Homo sapiens
caacataacatagtt

SEQ ID NO: 616840 - DNA, 15 bp, Homo sapiens
aacataacatagttt

SEQ ID NO: 616841 - DNA, 15 bp, Homo sapiens
acataacatagtttg

SEQ ID NO: 616842 - DNA, 15 bp, Homo sapiens
cataacatagtttga

SEQ ID NO: 616843 - DNA, 15 bp, Homo sapiens
ataacatagtttgag

SEQ ID NO: 616844 - DNA, 15 bp, Homo sapiens
taacatagtttgagg

SEQ ID NO: 616845 - DNA, 15 bp, Homo sapiens
aacatagtttgaggg

SEQ ID NO: 616846 - DNA, 15 bp, Homo sapiens
acatagtttgagggg

SEQ ID NO: 616847 - DNA, 15 bp, Homo sapiens
catagtttgagggga

SEQ ID NO: 616848 - DNA, 15 bp, Homo sapiens
atagtttgaggggac

SEQ ID NO: 616849 - DNA, 15 bp, Homo sapiens
tagtttgaggggaca

SEQ ID NO: 616850 - DNA, 15 bp, Homo sapiens
agtttgaggggacag

SEQ ID NO: 616851 - DNA, 15 bp, Homo sapiens
gtttgaggggacaga

SEQ ID NO: 616852 - DNA, 15 bp, Homo sapiens
tttgaggggacagag

SEQ ID NO: 616853 - DNA, 15 bp, Homo sapiens
ttgaggggacagagc

SEQ ID NO: 616854 - DNA, 15 bp, Homo sapiens
tgaggggacagagca

SEQ ID NO: 616855 - DNA, 15 bp, Homo sapiens
gaggggacagagcat

SEQ ID NO: 616856 - DNA, 15 bp, Homo sapiens
aggggacagagcatt

SEQ ID NO: 616857 - DNA, 15 bp, Homo sapiens
ggggacagagcattt

SEQ ID NO: 616858 - DNA, 15 bp, Homo sapiens
gggacagagcatttc

SEQ ID NO: 616859 - DNA, 15 bp, Homo sapiens
ggacagagcatttcg

SEQ ID NO: 616860 - DNA, 15 bp, Homo sapiens
gacagagcatttcgt

SEQ ID NO: 616861 - DNA, 15 bp, Homo sapiens
acagagcatttcgtt

SEQ ID NO: 616862 - DNA, 15 bp, Homo sapiens
cagagcatttcgttg

SEQ ID NO: 616863 - DNA, 15 bp, Homo sapiens
agagcatttcgttga

SEQ ID NO: 616864 - DNA, 15 bp, Homo sapiens
gagcatttcgttgaa

SEQ ID NO: 616865 - DNA, 15 bp, Homo sapiens
agcatttcgttgaac

SEQ ID NO: 616866 - DNA, 15 bp, Homo sapiens
gcatttcgttgaaca

SEQ ID NO: 616867 - DNA, 15 bp, Homo sapiens
catttcgttgaacag

SEQ ID NO: 616868 - DNA, 15 bp, Homo sapiens
atttcgttgaacaga

SEQ ID NO: 616869 - DNA, 15 bp, Homo sapiens
tttcgttgaacagag

SEQ ID NO: 616870 - DNA, 15 bp, Homo sapiens
ttcgttgaacagagg

SEQ ID NO: 616871 - DNA, 15 bp, Homo sapiens
tcgttgaacagagga

SEQ ID NO: 616872 - DNA, 15 bp, Homo sapiens
cgttgaacagaggag

SEQ ID NO: 616873 - DNA, 15 bp, Homo sapiens
gttgaacagaggagg

SEQ ID NO: 616874 - DNA, 15 bp, Homo sapiens
ttgaacagaggagga

SEQ ID NO: 616875 - DNA, 15 bp, Homo sapiens
tgaacagaggaggaa

SEQ ID NO: 616876 - DNA, 15 bp, Homo sapiens
gaacagaggaggaac

SEQ ID NO: 616877 - DNA, 15 bp, Homo sapiens
aacagaggaggaact

SEQ ID NO: 616878 - DNA, 15 bp, Homo sapiens
acagaggaggaactg

SEQ ID NO: 616879 - DNA, 15 bp, Homo sapiens
cagaggaggaactgg

SEQ ID NO: 616880 - DNA, 15 bp, Homo sapiens
agaggaggaactggc

SEQ ID NO: 616881 - DNA, 15 bp, Homo sapiens
gaggaggaactggca

SEQ ID NO: 616882 - DNA, 15 bp, Homo sapiens
aggaggaactggcac

SEQ ID NO: 616883 - DNA, 15 bp, Homo sapiens
ggaggaactggcaca

SEQ ID NO: 616884 - DNA, 15 bp, Homo sapiens
gaggaactggcacag

SEQ ID NO: 616885 - DNA, 15 bp, Homo sapiens
aggaactggcacagg

SEQ ID NO: 616886 - DNA, 15 bp, Homo sapiens
ggaactggcacagga

SEQ ID NO: 616887 - DNA, 15 bp, Homo sapiens
gaactggcacaggaa

SEQ ID NO: 616888 - DNA, 15 bp, Homo sapiens
aactggcacaggaaa

SEQ ID NO: 616889 - DNA, 15 bp, Homo sapiens
actggcacaggaaag

SEQ ID NO: 616890 - DNA, 15 bp, Homo sapiens
ctggcacaggaaagt

SEQ ID NO: 616891 - DNA, 15 bp, Homo sapiens
tggcacaggaaagtt

SEQ ID NO: 616892 - DNA, 15 bp, Homo sapiens
ggcacaggaaagttg

SEQ ID NO: 616893 - DNA, 15 bp, Homo sapiens
gcacaggaaagttgc

SEQ ID NO: 616894 - DNA, 15 bp, Homo sapiens
cacaggaaagttgca

SEQ ID NO: 616895 - DNA, 15 bp, Homo sapiens
acaggaaagttgcat

SEQ ID NO: 616896 - DNA, 15 bp, Homo sapiens
caggaaagttgcatg

SEQ ID NO: 616897 - DNA, 15 bp, Homo sapiens
aggaaagttgcatga

SEQ ID NO: 616898 - DNA, 15 bp, Homo sapiens
ggaaagttgcatgac

SEQ ID NO: 616899 - DNA, 15 bp, Homo sapiens
gaaagttgcatgacc

SEQ ID NO: 616900 - DNA, 15 bp, Homo sapiens
aaagttgcatgaccc

SEQ ID NO: 616901 - DNA, 15 bp, Homo sapiens
aagttgcatgacccc

SEQ ID NO: 616902 - DNA, 15 bp, Homo sapiens
agttgcatgaccccc

SEQ ID NO: 616903 - DNA, 15 bp, Homo sapiens
gttgcatgacccccc

SEQ ID NO: 616904 - DNA, 15 bp, Homo sapiens
ttgcatgaccccccc

SEQ ID NO: 616905 - DNA, 15 bp, Homo sapiens
tgcatgaccccccca

SEQ ID NO: 616906 - DNA, 15 bp, Homo sapiens
gcatgacccccccac

SEQ ID NO: 616907 - DNA, 15 bp, Homo sapiens
catgacccccccacc

SEQ ID NO: 616908 - DNA, 15 bp, Homo sapiens
atgacccccccacca

SEQ ID NO: 616909 - DNA, 15 bp, Homo sapiens
tgacccccccaccaa

SEQ ID NO: 616910 - DNA, 15 bp, Homo sapiens
gacccccccaccaac

SEQ ID NO: 616911 - DNA, 15 bp, Homo sapiens
acccccccaccaacc

SEQ ID NO: 616912 - DNA, 15 bp, Homo sapiens
cccccccaccaacct

SEQ ID NO: 616913 - DNA, 15 bp, Homo sapiens
ccccccaccaacctc

SEQ ID NO: 616914 - DNA, 15 bp, Homo sapiens
cccccaccaacctcc

SEQ ID NO: 616915 - DNA, 15 bp, Homo sapiens
ccccaccaacctccg

SEQ ID NO: 616916 - DNA, 15 bp, Homo sapiens
cccaccaacctccgc

SEQ ID NO: 616917 - DNA, 15 bp, Homo sapiens
ccaccaacctccgcc

SEQ ID NO: 616918 - DNA, 15 bp, Homo sapiens
caccaacctccgccc

SEQ ID NO: 616919 - DNA, 15 bp, Homo sapiens
accaacctccgcccc

SEQ ID NO: 616920 - DNA, 15 bp, Homo sapiens
ccaacctccgccccc

SEQ ID NO: 616921 - DNA, 15 bp, Homo sapiens
caacctccgccccca

SEQ ID NO: 616922 - DNA, 15 bp, Homo sapiens
aacctccgcccccag

SEQ ID NO: 616923 - DNA, 15 bp, Homo sapiens
acctccgcccccagg

SEQ ID NO: 616924 - DNA, 15 bp, Homo sapiens
cctccgcccccaggt

SEQ ID NO: 616925 - DNA, 15 bp, Homo sapiens
ctccgcccccaggtt

SEQ ID NO: 616926 - DNA, 15 bp, Homo sapiens
tccgcccccaggttg

SEQ ID NO: 616927 - DNA, 15 bp, Homo sapiens
ccgcccccaggttgc

SEQ ID NO: 616928 - DNA, 15 bp, Homo sapiens
cgcccccaggttgca

SEQ ID NO: 616929 - DNA, 15 bp, Homo sapiens
gcccccaggttgcac

SEQ ID NO: 616930 - DNA, 15 bp, Homo sapiens
cccccaggttgcaca

SEQ ID NO: 616931 - DNA, 15 bp, Homo sapiens
ccccaggttgcacag

SEQ ID NO: 616932 - DNA, 15 bp, Homo sapiens
cccaggttgcacagc

SEQ ID NO: 616933 - DNA, 15 bp, Homo sapiens
ccaggttgcacagct

SEQ ID NO: 616934 - DNA, 15 bp, Homo sapiens
caggttgcacagcta

SEQ ID NO: 616935 - DNA, 15 bp, Homo sapiens
aggttgcacagctag

SEQ ID NO: 616936 - DNA, 15 bp, Homo sapiens
ggttgcacagctagc

SEQ ID NO: 616937 - DNA, 15 bp, Homo sapiens
gttgcacagctagct

SEQ ID NO: 616938 - DNA, 15 bp, Homo sapiens
ttgcacagctagcta

SEQ ID NO: 616939 - DNA, 15 bp, Homo sapiens
tgcacagctagctag

SEQ ID NO: 616940 - DNA, 15 bp, Homo sapiens
gcacagctagctagt

SEQ ID NO: 616941 - DNA, 15 bp, Homo sapiens
cacagctagctagtc

SEQ ID NO: 616942 - DNA, 15 bp, Homo sapiens
acagctagctagtcg

SEQ ID NO: 616943 - DNA, 15 bp, Homo sapiens
cagctagctagtcgg

SEQ ID NO: 616944 - DNA, 15 bp, Homo sapiens
agctagctagtcggg

SEQ ID NO: 616945 - DNA, 15 bp, Homo sapiens
gctagctagtcggga

SEQ ID NO: 616946 - DNA, 15 bp, Homo sapiens
ctagctagtcgggag

SEQ ID NO: 616947 - DNA, 15 bp, Homo sapiens
tagctagtcgggagg

SEQ ID NO: 616948 - DNA, 15 bp, Homo sapiens
agctagtcgggagga

SEQ ID NO: 616949 - DNA, 15 bp, Homo sapiens
gctagtcgggaggac

SEQ ID NO: 616950 - DNA, 15 bp, Homo sapiens
ctagtcgggaggact

SEQ ID NO: 616951 - DNA, 15 bp, Homo sapiens
tagtcgggaggactt

SEQ ID NO: 616952 - DNA, 15 bp, Homo sapiens
agtcgggaggacttt

SEQ ID NO: 616953 - DNA, 15 bp, Homo sapiens
gtcgggaggactttg

SEQ ID NO: 616954 - DNA, 15 bp, Homo sapiens
tcgggaggactttgc

SEQ ID NO: 616955 - DNA, 15 bp, Homo sapiens
cgggaggactttgct

SEQ ID NO: 616956 - DNA, 15 bp, Homo sapiens
gggaggactttgctt

SEQ ID NO: 616957 - DNA, 15 bp, Homo sapiens
ggaggactttgcttc

SEQ ID NO: 616958 - DNA, 15 bp, Homo sapiens
gaggactttgcttcc

SEQ ID NO: 616959 - DNA, 15 bp, Homo sapiens
aggactttgcttccg

SEQ ID NO: 616960 - DNA, 15 bp, Homo sapiens
ggactttgcttccgt

SEQ ID NO: 616961 - DNA, 15 bp, Homo sapiens
gactttgcttccgtt

SEQ ID NO: 616962 - DNA, 15 bp, Homo sapiens
actttgcttccgttt

SEQ ID NO: 616963 - DNA, 15 bp, Homo sapiens
ctttgcttccgtttc

SEQ ID NO: 616964 - DNA, 15 bp, Homo sapiens
tttgcttccgtttcc

SEQ ID NO: 616965 - DNA, 15 bp, Homo sapiens
ttgcttccgtttccc

SEQ ID NO: 616966 - DNA, 15 bp, Homo sapiens
tgcttccgtttccct

SEQ ID NO: 616967 - DNA, 15 bp, Homo sapiens
gcttccgtttccctc

SEQ ID NO: 616968 - DNA, 15 bp, Homo sapiens
cttccgtttccctct

SEQ ID NO: 616969 - DNA, 15 bp, Homo sapiens
ttccgtttccctctg

SEQ ID NO: 616970 - DNA, 15 bp, Homo sapiens
tccgtttccctctgc

SEQ ID NO: 616971 - DNA, 15 bp, Homo sapiens
ccgtttccctctgcc

SEQ ID NO: 616972 - DNA, 15 bp, Homo sapiens
cgtttccctctgcct

SEQ ID NO: 616973 - DNA, 15 bp, Homo sapiens
gtttccctctgcctc

SEQ ID NO: 616974 - DNA, 15 bp, Homo sapiens
tttccctctgcctct

SEQ ID NO: 616975 - DNA, 15 bp, Homo sapiens
ttccctctgcctctc

SEQ ID NO: 616976 - DNA, 15 bp, Homo sapiens
tccctctgcctctca

SEQ ID NO: 616977 - DNA, 15 bp, Homo sapiens
ccctctgcctctcaa

SEQ ID NO: 616978 - DNA, 15 bp, Homo sapiens
cctctgcctctcaat

SEQ ID NO: 616979 - DNA, 15 bp, Homo sapiens
ctctgcctctcaatg

SEQ ID NO: 616980 - DNA, 15 bp, Homo sapiens
tctgcctctcaatga

SEQ ID NO: 616981 - DNA, 15 bp, Homo sapiens
ctgcctctcaatgat

SEQ ID NO: 616982 - DNA, 15 bp, Homo sapiens
tgcctctcaatgatg

SEQ ID NO: 616983 - DNA, 15 bp, Homo sapiens
gcctctcaatgatga

SEQ ID NO: 616984 - DNA, 15 bp, Homo sapiens
cctctcaatgatgat

SEQ ID NO: 616985 - DNA, 15 bp, Homo sapiens
ctctcaatgatgatc

SEQ ID NO: 616986 - DNA, 15 bp, Homo sapiens
tctcaatgatgatct

SEQ ID NO: 616987 - DNA, 15 bp, Homo sapiens
ctcaatgatgatctc

SEQ ID NO: 616988 - DNA, 15 bp, Homo sapiens
tcaatgatgatctca

SEQ ID NO: 616989 - DNA, 15 bp, Homo sapiens
caatgatgatctcag

SEQ ID NO: 616990 - DNA, 15 bp, Homo sapiens
aatgatgatctcagg

SEQ ID NO: 616991 - DNA, 15 bp, Homo sapiens
atgatgatctcaggg

SEQ ID NO: 616992 - DNA, 15 bp, Homo sapiens
tgatgatctcagggc

SEQ ID NO: 616993 - DNA, 15 bp, Homo sapiens
gatgatctcagggcc

SEQ ID NO: 616994 - DNA, 15 bp, Homo sapiens
atgatctcagggcca

SEQ ID NO: 616995 - DNA, 15 bp, Homo sapiens
tgatctcagggccaa

SEQ ID NO: 616996 - DNA, 15 bp, Homo sapiens
gatctcagggccaac

SEQ ID NO: 616997 - DNA, 15 bp, Homo sapiens
atctcagggccaact

SEQ ID NO: 616998 - DNA, 15 bp, Homo sapiens
tctcagggccaacta

SEQ ID NO: 616999 - DNA, 15 bp, Homo sapiens
ctcagggccaactaa

SEQ ID NO: 617000 - DNA, 15 bp, Homo sapiens
tcagggccaactaag

SEQ ID NO: 617001 - DNA, 15 bp, Homo sapiens
cagggccaactaagc

SEQ ID NO: 617002 - DNA, 15 bp, Homo sapiens
agggccaactaagct

SEQ ID NO: 617003 - DNA, 15 bp, Homo sapiens
gggccaactaagcta

SEQ ID NO: 617004 - DNA, 15 bp, Homo sapiens
ggccaactaagctaa

SEQ ID NO: 617005 - DNA, 15 bp, Homo sapiens
gccaactaagctaaa

SEQ ID NO: 617006 - DNA, 15 bp, Homo sapiens
ccaactaagctaaaa

SEQ ID NO: 617007 - DNA, 15 bp, Homo sapiens
caactaagctaaaag

SEQ ID NO: 617008 - DNA, 15 bp, Homo sapiens
aactaagctaaaagc

SEQ ID NO: 617009 - DNA, 15 bp, Homo sapiens
actaagctaaaagca

SEQ ID NO: 617010 - DNA, 15 bp, Homo sapiens
ctaagctaaaagcag

SEQ ID NO: 617011 - DNA, 15 bp, Homo sapiens
taagctaaaagcaga

SEQ ID NO: 617012 - DNA, 15 bp, Homo sapiens
aagctaaaagcagac

SEQ ID NO: 617013 - DNA, 15 bp, Homo sapiens
agctaaaagcagact

SEQ ID NO: 617014 - DNA, 15 bp, Homo sapiens
gctaaaagcagactt

SEQ ID NO: 617015 - DNA, 15 bp, Homo sapiens
ctaaaagcagacttg

SEQ ID NO: 617016 - DNA, 15 bp, Homo sapiens
taaaagcagacttga

SEQ ID NO: 617017 - DNA, 15 bp, Homo sapiens
aaaagcagacttgat

SEQ ID NO: 617018 - DNA, 15 bp, Homo sapiens
aaagcagacttgatg

SEQ ID NO: 617019 - DNA, 15 bp, Homo sapiens
aagcagacttgatgg

SEQ ID NO: 617020 - DNA, 15 bp, Homo sapiens
agcagacttgatgga

SEQ ID NO: 617021 - DNA, 15 bp, Homo sapiens
gcagacttgatggag

SEQ ID NO: 617022 - DNA, 15 bp, Homo sapiens
cagacttgatggagc

SEQ ID NO: 617023 - DNA, 15 bp, Homo sapiens
agacttgatggagca

SEQ ID NO: 617024 - DNA, 15 bp, Homo sapiens
gacttgatggagcat

SEQ ID NO: 617025 - DNA, 15 bp, Homo sapiens
acttgatggagcatc

SEQ ID NO: 617026 - DNA, 15 bp, Homo sapiens
cttgatggagcatca

SEQ ID NO: 617027 - DNA, 15 bp, Homo sapiens
ttgatggagcatcag

SEQ ID NO: 617028 - DNA, 15 bp, Homo sapiens
tgatggagcatcagt

SEQ ID NO: 617029 - DNA, 15 bp, Homo sapiens
gatggagcatcagtc

SEQ ID NO: 617030 - DNA, 15 bp, Homo sapiens
atggagcatcagtcc

SEQ ID NO: 617031 - DNA, 15 bp, Homo sapiens
tggagcatcagtcct

SEQ ID NO: 617032 - DNA, 15 bp, Homo sapiens
ggagcatcagtcctc

SEQ ID NO: 617033 - DNA, 15 bp, Homo sapiens
gagcatcagtcctct

SEQ ID NO: 617034 - DNA, 15 bp, Homo sapiens
agcatcagtcctctg

SEQ ID NO: 617035 - DNA, 15 bp, Homo sapiens
gcatcagtcctctga

SEQ ID NO: 617036 - DNA, 15 bp, Homo sapiens
catcagtcctctgaa

SEQ ID NO: 617037 - DNA, 15 bp, Homo sapiens
atcagtcctctgaaa

SEQ ID NO: 617038 - DNA, 15 bp, Homo sapiens
tcagtcctctgaaag

SEQ ID NO: 617039 - DNA, 15 bp, Homo sapiens
cagtcctctgaaaga

SEQ ID NO: 617040 - DNA, 15 bp, Homo sapiens
agtcctctgaaagag

SEQ ID NO: 617041 - DNA, 15 bp, Homo sapiens
gtcctctgaaagagt

SEQ ID NO: 617042 - DNA, 15 bp, Homo sapiens
tcctctgaaagagtc

SEQ ID NO: 617043 - DNA, 15 bp, Homo sapiens
cctctgaaagagtca

SEQ ID NO: 617044 - DNA, 15 bp, Homo sapiens
ctctgaaagagtcac

SEQ ID NO: 617045 - DNA, 15 bp, Homo sapiens
tctgaaagagtcact

SEQ ID NO: 617046 - DNA, 15 bp, Homo sapiens
ctgaaagagtcactg

SEQ ID NO: 617047 - DNA, 15 bp, Homo sapiens
tgaaagagtcactgc

SEQ ID NO: 617048 - DNA, 15 bp, Homo sapiens
gaaagagtcactgcc

SEQ ID NO: 617049 - DNA, 15 bp, Homo sapiens
aaagagtcactgccg

SEQ ID NO: 617050 - DNA, 15 bp, Homo sapiens
aagagtcactgccga

SEQ ID NO: 617051 - DNA, 15 bp, Homo sapiens
agagtcactgccgag

SEQ ID NO: 617052 - DNA, 15 bp, Homo sapiens
gagtcactgccgaga

SEQ ID NO: 617053 - DNA, 15 bp, Homo sapiens
agtcactgccgagat

SEQ ID NO: 617054 - DNA, 15 bp, Homo sapiens
gtcactgccgagata

SEQ ID NO: 617055 - DNA, 15 bp, Homo sapiens
tcactgccgagatac

SEQ ID NO: 617056 - DNA, 15 bp, Homo sapiens
cactgccgagataca

SEQ ID NO: 617057 - DNA, 15 bp, Homo sapiens
actgccgagatacaa

SEQ ID NO: 617058 - DNA, 15 bp, Homo sapiens
ctgccgagatacaaa

SEQ ID NO: 617059 - DNA, 15 bp, Homo sapiens
tgccgagatacaaaa

SEQ ID NO: 617060 - DNA, 15 bp, Homo sapiens
gccgagatacaaaat

SEQ ID NO: 617061 - DNA, 15 bp, Homo sapiens
ccgagatacaaaata

SEQ ID NO: 617062 - DNA, 15 bp, Homo sapiens
cgagatacaaaatac

SEQ ID NO: 617063 - DNA, 15 bp, Homo sapiens
gagatacaaaatacc

SEQ ID NO: 617064 - DNA, 15 bp, Homo sapiens
agatacaaaatacct

SEQ ID NO: 617065 - DNA, 15 bp, Homo sapiens
gatacaaaatacctc

SEQ ID NO: 617066 - DNA, 15 bp, Homo sapiens
atacaaaatacctct

SEQ ID NO: 617067 - DNA, 15 bp, Homo sapiens
tacaaaatacctctt

SEQ ID NO: 617068 - DNA, 15 bp, Homo sapiens
acaaaatacctcttc

SEQ ID NO: 617069 - DNA, 15 bp, Homo sapiens
caaaatacctcttct

SEQ ID NO: 617070 - DNA, 15 bp, Homo sapiens
aaaatacctcttctt

SEQ ID NO: 617071 - DNA, 15 bp, Homo sapiens
aaatacctcttcttc

SEQ ID NO: 617072 - DNA, 15 bp, Homo sapiens
aatacctcttcttca

SEQ ID NO: 617073 - DNA, 15 bp, Homo sapiens
atacctcttcttcaa

SEQ ID NO: 617074 - DNA, 15 bp, Homo sapiens
tacctcttcttcaaa

SEQ ID NO: 617075 - DNA, 15 bp, Homo sapiens
acctcttcttcaaag

SEQ ID NO: 617076 - DNA, 15 bp, Homo sapiens
cctcttcttcaaagg

SEQ ID NO: 617077 - DNA, 15 bp, Homo sapiens
ctcttcttcaaaggg

SEQ ID NO: 617078 - DNA, 15 bp, Homo sapiens
tcttcttcaaagggg

SEQ ID NO: 617079 - DNA, 15 bp, Homo sapiens
cttcttcaaagggga

SEQ ID NO: 617080 - DNA, 15 bp, Homo sapiens
ttcttcaaaggggaa

SEQ ID NO: 617081 - DNA, 15 bp, Homo sapiens
tcttcaaaggggaag

SEQ ID NO: 617082 - DNA, 15 bp, Homo sapiens
cttcaaaggggaagt

SEQ ID NO: 617083 - DNA, 15 bp, Homo sapiens
ttcaaaggggaagtg

SEQ ID NO: 617084 - DNA, 15 bp, Homo sapiens
tcaaaggggaagtgg

SEQ ID NO: 617085 - DNA, 15 bp, Homo sapiens
caaaggggaagtgga

SEQ ID NO: 617086 - DNA, 15 bp, Homo sapiens
aaaggggaagtggag

SEQ ID NO: 617087 - DNA, 15 bp, Homo sapiens
aaggggaagtggaga

SEQ ID NO: 617088 - DNA, 15 bp, Homo sapiens
aggggaagtggagag

SEQ ID NO: 617089 - DNA, 15 bp, Homo sapiens
ggggaagtggagaga

SEQ ID NO: 617090 - DNA, 15 bp, Homo sapiens
gggaagtggagagaa

SEQ ID NO: 617091 - DNA, 15 bp, Homo sapiens
ggaagtggagagaag

SEQ ID NO: 617092 - DNA, 15 bp, Homo sapiens
gaagtggagagaagt

SEQ ID NO: 617093 - DNA, 15 bp, Homo sapiens
aagtggagagaagta

SEQ ID NO: 617094 - DNA, 15 bp, Homo sapiens
agtggagagaagtag

SEQ ID NO: 617095 - DNA, 15 bp, Homo sapiens
gtggagagaagtagg

SEQ ID NO: 617096 - DNA, 15 bp, Homo sapiens
tggagagaagtagga

SEQ ID NO: 617097 - DNA, 15 bp, Homo sapiens
ggagagaagtaggaa

SEQ ID NO: 617098 - DNA, 15 bp, Homo sapiens
gagagaagtaggaaa

SEQ ID NO: 617099 - DNA, 15 bp, Homo sapiens
agagaagtaggaaat

SEQ ID NO: 617100 - DNA, 15 bp, Homo sapiens
gagaagtaggaaatc

SEQ ID NO: 617101 - DNA, 15 bp, Homo sapiens
agaagtaggaaatct

SEQ ID NO: 617102 - DNA, 15 bp, Homo sapiens
gaagtaggaaatctg

SEQ ID NO: 617103 - DNA, 15 bp, Homo sapiens
aagtaggaaatctgg

SEQ ID NO: 617104 - DNA, 15 bp, Homo sapiens
agtaggaaatctggg

SEQ ID NO: 617105 - DNA, 15 bp, Homo sapiens
gtaggaaatctgggt

SEQ ID NO: 617106 - DNA, 15 bp, Homo sapiens
taggaaatctgggta

SEQ ID NO: 617107 - DNA, 15 bp, Homo sapiens
aggaaatctgggtaa

SEQ ID NO: 617108 - DNA, 15 bp, Homo sapiens
ggaaatctgggtaac

SEQ ID NO: 617109 - DNA, 15 bp, Homo sapiens
gaaatctgggtaacc

SEQ ID NO: 617110 - DNA, 15 bp, Homo sapiens
aaatctgggtaacct

SEQ ID NO: 617111 - DNA, 15 bp, Homo sapiens
aatctgggtaacctc

SEQ ID NO: 617112 - DNA, 15 bp, Homo sapiens
atctgggtaacctca

SEQ ID NO: 617113 - DNA, 15 bp, Homo sapiens
tctgggtaacctcac

SEQ ID NO: 617114 - DNA, 15 bp, Homo sapiens
ctgggtaacctcaca

SEQ ID NO: 617115 - DNA, 15 bp, Homo sapiens
tgggtaacctcacag

SEQ ID NO: 617116 - DNA, 15 bp, Homo sapiens
gggtaacctcacagt

SEQ ID NO: 617117 - DNA, 15 bp, Homo sapiens
ggtaacctcacagtc

SEQ ID NO: 617118 - DNA, 15 bp, Homo sapiens
gtaacctcacagtct

SEQ ID NO: 617119 - DNA, 15 bp, Homo sapiens
taacctcacagtctt

SEQ ID NO: 617120 - DNA, 15 bp, Homo sapiens
aacctcacagtcttc

SEQ ID NO: 617121 - DNA, 15 bp, Homo sapiens
acctcacagtcttcc

SEQ ID NO: 617122 - DNA, 15 bp, Homo sapiens
cctcacagtcttcca

SEQ ID NO: 617123 - DNA, 15 bp, Homo sapiens
ctcacagtcttccag

SEQ ID NO: 617124 - DNA, 15 bp, Homo sapiens
tcacagtcttccagt

SEQ ID NO: 617125 - DNA, 15 bp, Homo sapiens
cacagtcttccagtt

SEQ ID NO: 617126 - DNA, 15 bp, Homo sapiens
acagtcttccagttt

SEQ ID NO: 617127 - DNA, 15 bp, Homo sapiens
cagtcttccagtttc

SEQ ID NO: 617128 - DNA, 15 bp, Homo sapiens
agtcttccagtttct

SEQ ID NO: 617129 - DNA, 15 bp, Homo sapiens
gtcttccagtttctg

SEQ ID NO: 617130 - DNA, 15 bp, Homo sapiens
tcttccagtttctgg

SEQ ID NO: 617131 - DNA, 15 bp, Homo sapiens
cttccagtttctgga

SEQ ID NO: 617132 - DNA, 15 bp, Homo sapiens
ttccagtttctggaa

SEQ ID NO: 617133 - DNA, 15 bp, Homo sapiens
tccagtttctggaaa

SEQ ID NO: 617134 - DNA, 15 bp, Homo sapiens
ccagtttctggaaaa

SEQ ID NO: 617135 - DNA, 15 bp, Homo sapiens
cagtttctggaaaac

SEQ ID NO: 617136 - DNA, 15 bp, Homo sapiens
agtttctggaaaaca

SEQ ID NO: 617137 - DNA, 15 bp, Homo sapiens
gtttctggaaaacag

SEQ ID NO: 617138 - DNA, 15 bp, Homo sapiens
tttctggaaaacaga

SEQ ID NO: 617139 - DNA, 15 bp, Homo sapiens
ttctggaaaacagag

SEQ ID NO: 617140 - DNA, 15 bp, Homo sapiens
tctggaaaacagagc

SEQ ID NO: 617141 - DNA, 15 bp, Homo sapiens
ctggaaaacagagct

SEQ ID NO: 617142 - DNA, 15 bp, Homo sapiens
tggaaaacagagctg

SEQ ID NO: 617143 - DNA, 15 bp, Homo sapiens
ggaaaacagagctgg

SEQ ID NO: 617144 - DNA, 15 bp, Homo sapiens
gaaaacagagctggc

SEQ ID NO: 617145 - DNA, 15 bp, Homo sapiens
aaaacagagctggca

SEQ ID NO: 617146 - DNA, 15 bp, Homo sapiens
aaacagagctggcat

SEQ ID NO: 617147 - DNA, 15 bp, Homo sapiens
aacagagctggcatc

SEQ ID NO: 617148 - DNA, 15 bp, Homo sapiens
acagagctggcatca

SEQ ID NO: 617149 - DNA, 15 bp, Homo sapiens
cagagctggcatcag

SEQ ID NO: 617150 - DNA, 15 bp, Homo sapiens
agagctggcatcagt

SEQ ID NO: 617151 - DNA, 15 bp, Homo sapiens
gagctggcatcagtc

SEQ ID NO: 617152 - DNA, 15 bp, Homo sapiens
agctggcatcagtct

SEQ ID NO: 617153 - DNA, 15 bp, Homo sapiens
gctggcatcagtctt

SEQ ID NO: 617154 - DNA, 15 bp, Homo sapiens
ctggcatcagtcttt

SEQ ID NO: 617155 - DNA, 15 bp, Homo sapiens
tggcatcagtctttt

SEQ ID NO: 617156 - DNA, 15 bp, Homo sapiens
ggcatcagtcttttt

SEQ ID NO: 617157 - DNA, 15 bp, Homo sapiens
gcatcagtctttttt

SEQ ID NO: 617158 - DNA, 15 bp, Homo sapiens
catcagtcttttttc

SEQ ID NO: 617159 - DNA, 15 bp, Homo sapiens
atcagtcttttttct

SEQ ID NO: 617160 - DNA, 15 bp, Homo sapiens
tcagtcttttttctt

SEQ ID NO: 617161 - DNA, 15 bp, Homo sapiens
cagtcttttttcttg

SEQ ID NO: 617162 - DNA, 15 bp, Homo sapiens
agtcttttttcttgt

SEQ ID NO: 617163 - DNA, 15 bp, Homo sapiens
gtcttttttcttgtc

SEQ ID NO: 617164 - DNA, 15 bp, Homo sapiens
tcttttttcttgtcc

SEQ ID NO: 617165 - DNA, 15 bp, Homo sapiens
cttttttcttgtcct

SEQ ID NO: 617166 - DNA, 15 bp, Homo sapiens
ttttttcttgtccta

SEQ ID NO: 617167 - DNA, 15 bp, Homo sapiens
tttttcttgtcctag

SEQ ID NO: 617168 - DNA, 15 bp, Homo sapiens
ttttcttgtcctagg

SEQ ID NO: 617169 - DNA, 15 bp, Homo sapiens
tttcttgtcctaggg

SEQ ID NO: 617170 - DNA, 15 bp, Homo sapiens
ttcttgtcctagggg

SEQ ID NO: 617171 - DNA, 15 bp, Homo sapiens
tcttgtcctagggga

SEQ ID NO: 617172 - DNA, 15 bp, Homo sapiens
cttgtcctaggggat

SEQ ID NO: 617173 - DNA, 15 bp, Homo sapiens
ttgtcctaggggatg

SEQ ID NO: 617174 - DNA, 15 bp, Homo sapiens
tgtcctaggggatgt

SEQ ID NO: 617175 - DNA, 15 bp, Homo sapiens
gtcctaggggatgta

SEQ ID NO: 617176 - DNA, 15 bp, Homo sapiens
tcctaggggatgtaa

SEQ ID NO: 617177 - DNA, 15 bp, Homo sapiens
cctaggggatgtaaa

SEQ ID NO: 617178 - DNA, 15 bp, Homo sapiens
ctaggggatgtaaat

SEQ ID NO: 617179 - DNA, 15 bp, Homo sapiens
taggggatgtaaatg

SEQ ID NO: 617180 - DNA, 15 bp, Homo sapiens
aggggatgtaaatga

SEQ ID NO: 617181 - DNA, 15 bp, Homo sapiens
ggggatgtaaatgag

SEQ ID NO: 617182 - DNA, 15 bp, Homo sapiens
gggatgtaaatgagc

SEQ ID NO: 617183 - DNA, 15 bp, Homo sapiens
ggatgtaaatgagct

SEQ ID NO: 617184 - DNA, 15 bp, Homo sapiens
gatgtaaatgagctg

SEQ ID NO: 617185 - DNA, 15 bp, Homo sapiens
atgtaaatgagctga

SEQ ID NO: 617186 - DNA, 15 bp, Homo sapiens
tgtaaatgagctgat

SEQ ID NO: 617187 - DNA, 15 bp, Homo sapiens
gtaaatgagctgatg

SEQ ID NO: 617188 - DNA, 15 bp, Homo sapiens
taaatgagctgatgg

SEQ ID NO: 617189 - DNA, 15 bp, Homo sapiens
aaatgagctgatgga

SEQ ID NO: 617190 - DNA, 15 bp, Homo sapiens
aatgagctgatggat

SEQ ID NO: 617191 - DNA, 15 bp, Homo sapiens
atgagctgatggatg

SEQ ID NO: 617192 - DNA, 15 bp, Homo sapiens
tgagctgatggatgt

SEQ ID NO: 617193 - DNA, 15 bp, Homo sapiens
gagctgatggatgta

SEQ ID NO: 617194 - DNA, 15 bp, Homo sapiens
agctgatggatgtag

SEQ ID NO: 617195 - DNA, 15 bp, Homo sapiens
gctgatggatgtagt

SEQ ID NO: 617196 - DNA, 15 bp, Homo sapiens
ctgatggatgtagtt

SEQ ID NO: 617197 - DNA, 15 bp, Homo sapiens
tgatggatgtagttc

SEQ ID NO: 617198 - DNA, 15 bp, Homo sapiens
gatggatgtagttct

SEQ ID NO: 617199 - DNA, 15 bp, Homo sapiens
atggatgtagttctc

SEQ ID NO: 617200 - DNA, 15 bp, Homo sapiens
tggatgtagttctcc

SEQ ID NO: 617201 - DNA, 15 bp, Homo sapiens
ggatgtagttctcca

SEQ ID NO: 617202 - DNA, 15 bp, Homo sapiens
gatgtagttctccac

SEQ ID NO: 617203 - DNA, 15 bp, Homo sapiens
atgtagttctccacc

SEQ ID NO: 617204 - DNA, 15 bp, Homo sapiens
tgtagttctccacca

SEQ ID NO: 617205 - DNA, 15 bp, Homo sapiens
gtagttctccaccat

SEQ ID NO: 617206 - DNA, 15 bp, Homo sapiens
tagttctccaccatg

SEQ ID NO: 617207 - DNA, 15 bp, Homo sapiens
agttctccaccatgt

SEQ ID NO: 617208 - DNA, 15 bp, Homo sapiens
gttctccaccatgtt

SEQ ID NO: 617209 - DNA, 15 bp, Homo sapiens
ttctccaccatgttc

SEQ ID NO: 617210 - DNA, 15 bp, Homo sapiens
tctccaccatgttcc

SEQ ID NO: 617211 - DNA, 15 bp, Homo sapiens
ctccaccatgttcca

SEQ ID NO: 617212 - DNA, 15 bp, Homo sapiens
tccaccatgttccag

SEQ ID NO: 617213 - DNA, 15 bp, Homo sapiens
ccaccatgttccaga

SEQ ID NO: 617214 - DNA, 15 bp, Homo sapiens
caccatgttccagag

SEQ ID NO: 617215 - DNA, 15 bp, Homo sapiens
accatgttccagagg

SEQ ID NO: 617216 - DNA, 15 bp, Homo sapiens
ccatgttccagaggc

SEQ ID NO: 617217 - DNA, 15 bp, Homo sapiens
catgttccagaggca

SEQ ID NO: 617218 - DNA, 15 bp, Homo sapiens
atgttccagaggcaa

SEQ ID NO: 617219 - DNA, 15 bp, Homo sapiens
tgttccagaggcaaa

SEQ ID NO: 617220 - DNA, 15 bp, Homo sapiens
gttccagaggcaaag

SEQ ID NO: 617221 - DNA, 15 bp, Homo sapiens
ttccagaggcaaagc

SEQ ID NO: 617222 - DNA, 15 bp, Homo sapiens
tccagaggcaaagct

SEQ ID NO: 617223 - DNA, 15 bp, Homo sapiens
ccagaggcaaagctg

SEQ ID NO: 617224 - DNA, 15 bp, Homo sapiens
cagaggcaaagctgg

SEQ ID NO: 617225 - DNA, 15 bp, Homo sapiens
agaggcaaagctggt

SEQ ID NO: 617226 - DNA, 15 bp, Homo sapiens
gaggcaaagctggtg

SEQ ID NO: 617227 - DNA, 15 bp, Homo sapiens
aggcaaagctggtgg

SEQ ID NO: 617228 - DNA, 15 bp, Homo sapiens
ggcaaagctggtgga

SEQ ID NO: 617229 - DNA, 15 bp, Homo sapiens
gcaaagctggtggag

SEQ ID NO: 617230 - DNA, 15 bp, Homo sapiens
caaagctggtggagt

SEQ ID NO: 617231 - DNA, 15 bp, Homo sapiens
aaagctggtggagtg

SEQ ID NO: 617232 - DNA, 15 bp, Homo sapiens
aagctggtggagtgc

SEQ ID NO: 617233 - DNA, 15 bp, Homo sapiens
agctggtggagtgca

SEQ ID NO: 617234 - DNA, 15 bp, Homo sapiens
gctggtggagtgcat

SEQ ID NO: 617235 - DNA, 15 bp, Homo sapiens
ctggtggagtgcatt

SEQ ID NO: 617236 - DNA, 15 bp, Homo sapiens
tggtggagtgcattg

SEQ ID NO: 617237 - DNA, 15 bp, Homo sapiens
ggtggagtgcattgg

SEQ ID NO: 617238 - DNA, 15 bp, Homo sapiens
gtggagtgcattggt

SEQ ID NO: 617239 - DNA, 15 bp, Homo sapiens
tggagtgcattggtc

SEQ ID NO: 617240 - DNA, 15 bp, Homo sapiens
ggagtgcattggtca

SEQ ID NO: 617241 - DNA, 15 bp, Homo sapiens
gagtgcattggtcaa

SEQ ID NO: 617242 - DNA, 15 bp, Homo sapiens
agtgcattggtcaag

SEQ ID NO: 617243 - DNA, 15 bp, Homo sapiens
gtgcattggtcaaga

SEQ ID NO: 617244 - DNA, 15 bp, Homo sapiens
tgcattggtcaagaa

SEQ ID NO: 617245 - DNA, 15 bp, Homo sapiens
gcattggtcaagaac

SEQ ID NO: 617246 - DNA, 15 bp, Homo sapiens
cattggtcaagaact

SEQ ID NO: 617247 - DNA, 15 bp, Homo sapiens
attggtcaagaactt

SEQ ID NO: 617248 - DNA, 15 bp, Homo sapiens
ttggtcaagaactta

SEQ ID NO: 617249 - DNA, 15 bp, Homo sapiens
tggtcaagaacttat

SEQ ID NO: 617250 - DNA, 15 bp, Homo sapiens
ggtcaagaacttatc

SEQ ID NO: 617251 - DNA, 15 bp, Homo sapiens
gtcaagaacttatct

SEQ ID NO: 617252 - DNA, 15 bp, Homo sapiens
tcaagaacttatctt

SEQ ID NO: 617253 - DNA, 15 bp, Homo sapiens
caagaacttatcttc

SEQ ID NO: 617254 - DNA, 15 bp, Homo sapiens
aagaacttatcttcc

SEQ ID NO: 617255 - DNA, 15 bp, Homo sapiens
agaacttatcttcct

SEQ ID NO: 617256 - DNA, 15 bp, Homo sapiens
gaacttatcttcctt

SEQ ID NO: 617257 - DNA, 15 bp, Homo sapiens
aacttatcttccttc

SEQ ID NO: 617258 - DNA, 15 bp, Homo sapiens
acttatcttccttct

SEQ ID NO: 617259 - DNA, 15 bp, Homo sapiens
cttatcttccttctt

SEQ ID NO: 617260 - DNA, 15 bp, Homo sapiens
ttatcttccttcttc

SEQ ID NO: 617261 - DNA, 15 bp, Homo sapiens
tatcttccttcttcc

SEQ ID NO: 617262 - DNA, 15 bp, Homo sapiens
atcttccttcttcca

SEQ ID NO: 617263 - DNA, 15 bp, Homo sapiens
tcttccttcttccaa

SEQ ID NO: 617264 - DNA, 15 bp, Homo sapiens
cttccttcttccaaa

SEQ ID NO: 617265 - DNA, 15 bp, Homo sapiens
ttccttcttccaaat

SEQ ID NO: 617266 - DNA, 15 bp, Homo sapiens
tccttcttccaaata

SEQ ID NO: 617267 - DNA, 15 bp, Homo sapiens
ccttcttccaaataa

SEQ ID NO: 617268 - DNA, 15 bp, Homo sapiens
cttcttccaaataag

SEQ ID NO: 617269 - DNA, 15 bp, Homo sapiens
ttcttccaaataaga

SEQ ID NO: 617270 - DNA, 15 bp, Homo sapiens
tcttccaaataagaa

SEQ ID NO: 617271 - DNA, 15 bp, Homo sapiens
cttccaaataagaac

SEQ ID NO: 617272 - DNA, 15 bp, Homo sapiens
ttccaaataagaact

SEQ ID NO: 617273 - DNA, 15 bp, Homo sapiens
tccaaataagaactt

SEQ ID NO: 617274 - DNA, 15 bp, Homo sapiens
ccaaataagaacttc

SEQ ID NO: 617275 - DNA, 15 bp, Homo sapiens
caaataagaacttca

SEQ ID NO: 617276 - DNA, 15 bp, Homo sapiens
aaataagaacttcaa

SEQ ID NO: 617277 - DNA, 15 bp, Homo sapiens
aataagaacttcaag

SEQ ID NO: 617278 - DNA, 15 bp, Homo sapiens
ataagaacttcaagc

SEQ ID NO: 617279 - DNA, 15 bp, Homo sapiens
taagaacttcaagca

SEQ ID NO: 617280 - DNA, 15 bp, Homo sapiens
aagaacttcaagcac

SEQ ID NO: 617281 - DNA, 15 bp, Homo sapiens
agaacttcaagcaca

SEQ ID NO: 617282 - DNA, 15 bp, Homo sapiens
gaacttcaagcacag

SEQ ID NO: 617283 - DNA, 15 bp, Homo sapiens
aacttcaagcacaga

SEQ ID NO: 617284 - DNA, 15 bp, Homo sapiens
acttcaagcacagag

SEQ ID NO: 617285 - DNA, 15 bp, Homo sapiens
cttcaagcacagagc

SEQ ID NO: 617286 - DNA, 15 bp, Homo sapiens
ttcaagcacagagca

SEQ ID NO: 617287 - DNA, 15 bp, Homo sapiens
tcaagcacagagcat

SEQ ID NO: 617288 - DNA, 15 bp, Homo sapiens
caagcacagagcata

SEQ ID NO: 617289 - DNA, 15 bp, Homo sapiens
aagcacagagcatat

SEQ ID NO: 617290 - DNA, 15 bp, Homo sapiens
agcacagagcatatg

SEQ ID NO: 617291 - DNA, 15 bp, Homo sapiens
gcacagagcatatgc

SEQ ID NO: 617292 - DNA, 15 bp, Homo sapiens
cacagagcatatgcc

SEQ ID NO: 617293 - DNA, 15 bp, Homo sapiens
acagagcatatgcca

SEQ ID NO: 617294 - DNA, 15 bp, Homo sapiens
cagagcatatgccag

SEQ ID NO: 617295 - DNA, 15 bp, Homo sapiens
agagcatatgccagc

SEQ ID NO: 617296 - DNA, 15 bp, Homo sapiens
gagcatatgccagcc

SEQ ID NO: 617297 - DNA, 15 bp, Homo sapiens
agcatatgccagcct

SEQ ID NO: 617298 - DNA, 15 bp, Homo sapiens
gcatatgccagcctt

SEQ ID NO: 617299 - DNA, 15 bp, Homo sapiens
catatgccagccttt

SEQ ID NO: 617300 - DNA, 15 bp, Homo sapiens
atatgccagcctttt

SEQ ID NO: 617301 - DNA, 15 bp, Homo sapiens
tatgccagccttttc

SEQ ID NO: 617302 - DNA, 15 bp, Homo sapiens
atgccagccttttca

SEQ ID NO: 617303 - DNA, 15 bp, Homo sapiens
tgccagccttttcag

SEQ ID NO: 617304 - DNA, 15 bp, Homo sapiens
gccagccttttcaga

SEQ ID NO: 617305 - DNA, 15 bp, Homo sapiens
ccagccttttcagag

SEQ ID NO: 617306 - DNA, 15 bp, Homo sapiens
cagccttttcagaga

SEQ ID NO: 617307 - DNA, 15 bp, Homo sapiens
agccttttcagagag

SEQ ID NO: 617308 - DNA, 15 bp, Homo sapiens
gccttttcagagagc

SEQ ID NO: 617309 - DNA, 15 bp, Homo sapiens
ccttttcagagagct

SEQ ID NO: 617310 - DNA, 15 bp, Homo sapiens
cttttcagagagctg

SEQ ID NO: 617311 - DNA, 15 bp, Homo sapiens
ttttcagagagctgg

SEQ ID NO: 617312 - DNA, 15 bp, Homo sapiens
tttcagagagctgga

SEQ ID NO: 617313 - DNA, 15 bp, Homo sapiens
ttcagagagctggag

SEQ ID NO: 617314 - DNA, 15 bp, Homo sapiens
tcagagagctggagg

SEQ ID NO: 617315 - DNA, 15 bp, Homo sapiens
cagagagctggagga

SEQ ID NO: 617316 - DNA, 15 bp, Homo sapiens
agagagctggaggag

SEQ ID NO: 617317 - DNA, 15 bp, Homo sapiens
gagagctggaggaga

SEQ ID NO: 617318 - DNA, 15 bp, Homo sapiens
agagctggaggagac

SEQ ID NO: 617319 - DNA, 15 bp, Homo sapiens
gagctggaggagacg

SEQ ID NO: 617320 - DNA, 15 bp, Homo sapiens
agctggaggagacgc

SEQ ID NO: 617321 - DNA, 15 bp, Homo sapiens
gctggaggagacgct

SEQ ID NO: 617322 - DNA, 15 bp, Homo sapiens
ctggaggagacgctg

SEQ ID NO: 617323 - DNA, 15 bp, Homo sapiens
tggaggagacgctgg

SEQ ID NO: 617324 - DNA, 15 bp, Homo sapiens
ggaggagacgctggc

SEQ ID NO: 617325 - DNA, 15 bp, Homo sapiens
gaggagacgctggct

SEQ ID NO: 617326 - DNA, 15 bp, Homo sapiens
aggagacgctggctg

SEQ ID NO: 617327 - DNA, 15 bp, Homo sapiens
ggagacgctggctga

SEQ ID NO: 617328 - DNA, 15 bp, Homo sapiens
gagacgctggctgac

SEQ ID NO: 617329 - DNA, 15 bp, Homo sapiens
agacgctggctgacc

SEQ ID NO: 617330 - DNA, 15 bp, Homo sapiens
gacgctggctgacct

SEQ ID NO: 617331 - DNA, 15 bp, Homo sapiens
acgctggctgacctt

SEQ ID NO: 617332 - DNA, 15 bp, Homo sapiens
cgctggctgaccttg

SEQ ID NO: 617333 - DNA, 15 bp, Homo sapiens
gctggctgaccttgg

SEQ ID NO: 617334 - DNA, 15 bp, Homo sapiens
ctggctgaccttggt

SEQ ID NO: 617335 - DNA, 15 bp, Homo sapiens
tggctgaccttggtc

SEQ ID NO: 617336 - DNA, 15 bp, Homo sapiens
ggctgaccttggtct

SEQ ID NO: 617337 - DNA, 15 bp, Homo sapiens
gctgaccttggtctc

SEQ ID NO: 617338 - DNA, 15 bp, Homo sapiens
ctgaccttggtctca

SEQ ID NO: 617339 - DNA, 15 bp, Homo sapiens
tgaccttggtctcag

SEQ ID NO: 617340 - DNA, 15 bp, Homo sapiens
gaccttggtctcagc

SEQ ID NO: 617341 - DNA, 15 bp, Homo sapiens
accttggtctcagca

SEQ ID NO: 617342 - DNA, 15 bp, Homo sapiens
ccttggtctcagcag

SEQ ID NO: 617343 - DNA, 15 bp, Homo sapiens
cttggtctcagcagt

SEQ ID NO: 617344 - DNA, 15 bp, Homo sapiens
ttggtctcagcagtt

SEQ ID NO: 617345 - DNA, 15 bp, Homo sapiens
tggtctcagcagttt

SEQ ID NO: 617346 - DNA, 15 bp, Homo sapiens
ggtctcagcagtttt

SEQ ID NO: 617347 - DNA, 15 bp, Homo sapiens
gtctcagcagttttg

SEQ ID NO: 617348 - DNA, 15 bp, Homo sapiens
tctcagcagttttgg

SEQ ID NO: 617349 - DNA, 15 bp, Homo sapiens
ctcagcagttttgga

SEQ ID NO: 617350 - DNA, 15 bp, Homo sapiens
tcagcagttttggaa

SEQ ID NO: 617351 - DNA, 15 bp, Homo sapiens
cagcagttttggaat

SEQ ID NO: 617352 - DNA, 15 bp, Homo sapiens
agcagttttggaatt

SEQ ID NO: 617353 - DNA, 15 bp, Homo sapiens
gcagttttggaattt

SEQ ID NO: 617354 - DNA, 15 bp, Homo sapiens
cagttttggaatttc

SEQ ID NO: 617355 - DNA, 15 bp, Homo sapiens
agttttggaatttct

SEQ ID NO: 617356 - DNA, 15 bp, Homo sapiens
gttttggaatttctg

SEQ ID NO: 617357 - DNA, 15 bp, Homo sapiens
ttttggaatttctga

SEQ ID NO: 617358 - DNA, 15 bp, Homo sapiens
tttggaatttctgac

SEQ ID NO: 617359 - DNA, 15 bp, Homo sapiens
ttggaatttctgaca

SEQ ID NO: 617360 - DNA, 15 bp, Homo sapiens
tggaatttctgacac

SEQ ID NO: 617361 - DNA, 15 bp, Homo sapiens
ggaatttctgacact

SEQ ID NO: 617362 - DNA, 15 bp, Homo sapiens
gaatttctgacactc

SEQ ID NO: 617363 - DNA, 15 bp, Homo sapiens
aatttctgacactcc

SEQ ID NO: 617364 - DNA, 15 bp, Homo sapiens
atttctgacactccc

SEQ ID NO: 617365 - DNA, 15 bp, Homo sapiens
tttctgacactcccc

SEQ ID NO: 617366 - DNA, 15 bp, Homo sapiens
ttctgacactcccct

SEQ ID NO: 617367 - DNA, 15 bp, Homo sapiens
tctgacactcccctg

SEQ ID NO: 617368 - DNA, 15 bp, Homo sapiens
ctgacactcccctgg

SEQ ID NO: 617369 - DNA, 15 bp, Homo sapiens
tgacactcccctgga

SEQ ID NO: 617370 - DNA, 15 bp, Homo sapiens
gacactcccctggaa

SEQ ID NO: 617371 - DNA, 15 bp, Homo sapiens
acactcccctggaag

SEQ ID NO: 617372 - DNA, 15 bp, Homo sapiens
cactcccctggaaga

SEQ ID NO: 617373 - DNA, 15 bp, Homo sapiens
actcccctggaagag

SEQ ID NO: 617374 - DNA, 15 bp, Homo sapiens
ctcccctggaagagg

SEQ ID NO: 617375 - DNA, 15 bp, Homo sapiens
tcccctggaagaggt

SEQ ID NO: 617376 - DNA, 15 bp, Homo sapiens
cccctggaagaggta

SEQ ID NO: 617377 - DNA, 15 bp, Homo sapiens
ccctggaagaggtaa

SEQ ID NO: 617378 - DNA, 15 bp, Homo sapiens
cctggaagaggtaaa

SEQ ID NO: 617379 - DNA, 15 bp, Homo sapiens
ctggaagaggtaaag

SEQ ID NO: 617380 - DNA, 15 bp, Homo sapiens
tggaagaggtaaagt

SEQ ID NO: 617381 - DNA, 15 bp, Homo sapiens
ggaagaggtaaagta

SEQ ID NO: 617382 - DNA, 15 bp, Homo sapiens
gaagaggtaaagtag

SEQ ID NO: 617383 - DNA, 15 bp, Homo sapiens
aagaggtaaagtaga

SEQ ID NO: 617384 - DNA, 15 bp, Homo sapiens
agaggtaaagtagag

SEQ ID NO: 617385 - DNA, 15 bp, Homo sapiens
gaggtaaagtagaga

SEQ ID NO: 617386 - DNA, 15 bp, Homo sapiens
aggtaaagtagagat

SEQ ID NO: 617387 - DNA, 15 bp, Homo sapiens
ggtaaagtagagatt

SEQ ID NO: 617388 - DNA, 15 bp, Homo sapiens
gtaaagtagagattc

SEQ ID NO: 617389 - DNA, 15 bp, Homo sapiens
taaagtagagattcc

SEQ ID NO: 617390 - DNA, 15 bp, Homo sapiens
aaagtagagattcca

SEQ ID NO: 617391 - DNA, 15 bp, Homo sapiens
aagtagagattccag

SEQ ID NO: 617392 - DNA, 15 bp, Homo sapiens
agtagagattccagc

SEQ ID NO: 617393 - DNA, 15 bp, Homo sapiens
gtagagattccagct

SEQ ID NO: 617394 - DNA, 15 bp, Homo sapiens
tagagattccagctg

SEQ ID NO: 617395 - DNA, 15 bp, Homo sapiens
agagattccagctgg

SEQ ID NO: 617396 - DNA, 15 bp, Homo sapiens
gagattccagctggt

SEQ ID NO: 617397 - DNA, 15 bp, Homo sapiens
agattccagctggtt

SEQ ID NO: 617398 - DNA, 15 bp, Homo sapiens
gattccagctggttt

SEQ ID NO: 617399 - DNA, 15 bp, Homo sapiens
attccagctggtttc

SEQ ID NO: 617400 - DNA, 15 bp, Homo sapiens
ttccagctggtttct

SEQ ID NO: 617401 - DNA, 15 bp, Homo sapiens
tccagctggtttctg

SEQ ID NO: 617402 - DNA, 15 bp, Homo sapiens
ccagctggtttctgt

SEQ ID NO: 617403 - DNA, 15 bp, Homo sapiens
cagctggtttctgtc

SEQ ID NO: 617404 - DNA, 15 bp, Homo sapiens
agctggtttctgtca

SEQ ID NO: 617405 - DNA, 15 bp, Homo sapiens
gctggtttctgtcaa

SEQ ID NO: 617406 - DNA, 15 bp, Homo sapiens
ctggtttctgtcaag

SEQ ID NO: 617407 - DNA, 15 bp, Homo sapiens
tggtttctgtcaagt

SEQ ID NO: 617408 - DNA, 15 bp, Homo sapiens
ggtttctgtcaagtg

SEQ ID NO: 617409 - DNA, 15 bp, Homo sapiens
gtttctgtcaagtgc

SEQ ID NO: 617410 - DNA, 15 bp, Homo sapiens
tttctgtcaagtgcc

SEQ ID NO: 617411 - DNA, 15 bp, Homo sapiens
ttctgtcaagtgcca

SEQ ID NO: 617412 - DNA, 15 bp, Homo sapiens
tctgtcaagtgccag

SEQ ID NO: 617413 - DNA, 15 bp, Homo sapiens
ctgtcaagtgccaga

SEQ ID NO: 617414 - DNA, 15 bp, Homo sapiens
tgtcaagtgccagaa

SEQ ID NO: 617415 - DNA, 15 bp, Homo sapiens
gtcaagtgccagaag

SEQ ID NO: 617416 - DNA, 15 bp, Homo sapiens
tcaagtgccagaagt

SEQ ID NO: 617417 - DNA, 15 bp, Homo sapiens
caagtgccagaagtg

SEQ ID NO: 617418 - DNA, 15 bp, Homo sapiens
aagtgccagaagtgg

SEQ ID NO: 617419 - DNA, 15 bp, Homo sapiens
agtgccagaagtggc

SEQ ID NO: 617420 - DNA, 15 bp, Homo sapiens
gtgccagaagtggcg

SEQ ID NO: 617421 - DNA, 15 bp, Homo sapiens
tgccagaagtggcgg

SEQ ID NO: 617422 - DNA, 15 bp, Homo sapiens
gccagaagtggcggt

SEQ ID NO: 617423 - DNA, 15 bp, Homo sapiens
ccagaagtggcggtt

SEQ ID NO: 617424 - DNA, 15 bp, Homo sapiens
cagaagtggcggttc

SEQ ID NO: 617425 - DNA, 15 bp, Homo sapiens
agaagtggcggttct

SEQ ID NO: 617426 - DNA, 15 bp, Homo sapiens
gaagtggcggttctt

SEQ ID NO: 617427 - DNA, 15 bp, Homo sapiens
aagtggcggttcttt

SEQ ID NO: 617428 - DNA, 15 bp, Homo sapiens
agtggcggttctttg

SEQ ID NO: 617429 - DNA, 15 bp, Homo sapiens
gtggcggttctttga

SEQ ID NO: 617430 - DNA, 15 bp, Homo sapiens
tggcggttctttgaa

SEQ ID NO: 617431 - DNA, 15 bp, Homo sapiens
ggcggttctttgaaa

SEQ ID NO: 617432 - DNA, 15 bp, Homo sapiens
gcggttctttgaaaa

SEQ ID NO: 617433 - DNA, 15 bp, Homo sapiens
cggttctttgaaaaa

SEQ ID NO: 617434 - DNA, 15 bp, Homo sapiens
ggttctttgaaaaag

SEQ ID NO: 617435 - DNA, 15 bp, Homo sapiens
gttctttgaaaaagt

SEQ ID NO: 617436 - DNA, 15 bp, Homo sapiens
ttctttgaaaaagtc

SEQ ID NO: 617437 - DNA, 15 bp, Homo sapiens
tctttgaaaaagtct

SEQ ID NO: 617438 - DNA, 15 bp, Homo sapiens
ctttgaaaaagtcta

SEQ ID NO: 617439 - DNA, 15 bp, Homo sapiens
tttgaaaaagtctaa

SEQ ID NO: 617440 - DNA, 15 bp, Homo sapiens
ttgaaaaagtctaac

SEQ ID NO: 617441 - DNA, 15 bp, Homo sapiens
tgaaaaagtctaaca

SEQ ID NO: 617442 - DNA, 15 bp, Homo sapiens
gaaaaagtctaacat

SEQ ID NO: 617443 - DNA, 15 bp, Homo sapiens
aaaaagtctaacatt

SEQ ID NO: 617444 - DNA, 15 bp, Homo sapiens
aaaagtctaacatta

SEQ ID NO: 617445 - DNA, 15 bp, Homo sapiens
aaagtctaacattag

SEQ ID NO: 617446 - DNA, 15 bp, Homo sapiens
aagtctaacattaga

SEQ ID NO: 617447 - DNA, 15 bp, Homo sapiens
agtctaacattagag

SEQ ID NO: 617448 - DNA, 15 bp, Homo sapiens
gtctaacattagagc

SEQ ID NO: 617449 - DNA, 15 bp, Homo sapiens
tctaacattagagca

SEQ ID NO: 617450 - DNA, 15 bp, Homo sapiens
ctaacattagagcaa

SEQ ID NO: 617451 - DNA, 15 bp, Homo sapiens
taacattagagcaaa

SEQ ID NO: 617452 - DNA, 15 bp, Homo sapiens
aacattagagcaaag

SEQ ID NO: 617453 - DNA, 15 bp, Homo sapiens
acattagagcaaagt

SEQ ID NO: 617454 - DNA, 15 bp, Homo sapiens
cattagagcaaagtt

SEQ ID NO: 617455 - DNA, 15 bp, Homo sapiens
attagagcaaagttt

SEQ ID NO: 617456 - DNA, 15 bp, Homo sapiens
ttagagcaaagtttt

SEQ ID NO: 617457 - DNA, 15 bp, Homo sapiens
tagagcaaagttttg

SEQ ID NO: 617458 - DNA, 15 bp, Homo sapiens
agagcaaagttttgt

SEQ ID NO: 617459 - DNA, 15 bp, Homo sapiens
gagcaaagttttgta

SEQ ID NO: 617460 - DNA, 15 bp, Homo sapiens
agcaaagttttgtaa

SEQ ID NO: 617461 - DNA, 15 bp, Homo sapiens
gcaaagttttgtaaa

SEQ ID NO: 617462 - DNA, 15 bp, Homo sapiens
caaagttttgtaaaa

SEQ ID NO: 617463 - DNA, 15 bp, Homo sapiens
aaagttttgtaaaag

SEQ ID NO: 617464 - DNA, 15 bp, Homo sapiens
aagttttgtaaaagc

SEQ ID NO: 617465 - DNA, 15 bp, Homo sapiens
agttttgtaaaagca

SEQ ID NO: 617466 - DNA, 15 bp, Homo sapiens
gttttgtaaaagcaa

SEQ ID NO: 617467 - DNA, 15 bp, Homo sapiens
ttttgtaaaagcaaa

SEQ ID NO: 617468 - DNA, 15 bp, Homo sapiens
tttgtaaaagcaaaa

SEQ ID NO: 617469 - DNA, 15 bp, Homo sapiens
ttgtaaaagcaaaaa

SEQ ID NO: 617470 - DNA, 15 bp, Homo sapiens
tgtaaaagcaaaaag

SEQ ID NO: 617471 - DNA, 15 bp, Homo sapiens
gtaaaagcaaaaagc

SEQ ID NO: 617472 - DNA, 15 bp, Homo sapiens
taaaagcaaaaagcc

SEQ ID NO: 617473 - DNA, 15 bp, Homo sapiens
aaaagcaaaaagcca

SEQ ID NO: 617474 - DNA, 15 bp, Homo sapiens
aaagcaaaaagccat

SEQ ID NO: 617475 - DNA, 15 bp, Homo sapiens
aagcaaaaagccatc

SEQ ID NO: 617476 - DNA, 15 bp, Homo sapiens
agcaaaaagccatcg

SEQ ID NO: 617477 - DNA, 15 bp, Homo sapiens
gcaaaaagccatcgt

SEQ ID NO: 617478 - DNA, 15 bp, Homo sapiens
caaaaagccatcgtt

SEQ ID NO: 617479 - DNA, 15 bp, Homo sapiens
aaaaagccatcgttc

SEQ ID NO: 617480 - DNA, 15 bp, Homo sapiens
aaaagccatcgttcc

SEQ ID NO: 617481 - DNA, 15 bp, Homo sapiens
aaagccatcgttccc

SEQ ID NO: 617482 - DNA, 15 bp, Homo sapiens
aagccatcgttcccc

SEQ ID NO: 617483 - DNA, 15 bp, Homo sapiens
agccatcgttcccca

SEQ ID NO: 617484 - DNA, 15 bp, Homo sapiens
gccatcgttccccac

SEQ ID NO: 617485 - DNA, 15 bp, Homo sapiens
ccatcgttccccacc

SEQ ID NO: 617486 - DNA, 15 bp, Homo sapiens
catcgttccccaccc

SEQ ID NO: 617487 - DNA, 15 bp, Homo sapiens
atcgttccccaccca

SEQ ID NO: 617488 - DNA, 15 bp, Homo sapiens
tcgttccccacccaa

SEQ ID NO: 617489 - DNA, 15 bp, Homo sapiens
cgttccccacccaag

SEQ ID NO: 617490 - DNA, 15 bp, Homo sapiens
gttccccacccaagc

SEQ ID NO: 617491 - DNA, 15 bp, Homo sapiens
ttccccacccaagca

SEQ ID NO: 617492 - DNA, 15 bp, Homo sapiens
tccccacccaagcat

SEQ ID NO: 617493 - DNA, 15 bp, Homo sapiens
ccccacccaagcata

SEQ ID NO: 617494 - DNA, 15 bp, Homo sapiens
cccacccaagcatag

SEQ ID NO: 617495 - DNA, 15 bp, Homo sapiens
ccacccaagcatagc

SEQ ID NO: 617496 - DNA, 15 bp, Homo sapiens
cacccaagcatagca

SEQ ID NO: 617497 - DNA, 15 bp, Homo sapiens
acccaagcatagcaa

SEQ ID NO: 617498 - DNA, 15 bp, Homo sapiens
cccaagcatagcaac

SEQ ID NO: 617499 - DNA, 15 bp, Homo sapiens
ccaagcatagcaact

SEQ ID NO: 617500 - DNA, 15 bp, Homo sapiens
caagcatagcaacta

SEQ ID NO: 617501 - DNA, 15 bp, Homo sapiens
aagcatagcaactat

SEQ ID NO: 617502 - DNA, 15 bp, Homo sapiens
agcatagcaactatc

SEQ ID NO: 617503 - DNA, 15 bp, Homo sapiens
gcatagcaactatct

SEQ ID NO: 617504 - DNA, 15 bp, Homo sapiens
catagcaactatctt

SEQ ID NO: 617505 - DNA, 15 bp, Homo sapiens
atagcaactatcttt

SEQ ID NO: 617506 - DNA, 15 bp, Homo sapiens
tagcaactatcttta

SEQ ID NO: 617507 - DNA, 15 bp, Homo sapiens
agcaactatctttat

SEQ ID NO: 617508 - DNA, 15 bp, Homo sapiens
gcaactatctttatt

SEQ ID NO: 617509 - DNA, 15 bp, Homo sapiens
caactatctttattt

SEQ ID NO: 617510 - DNA, 15 bp, Homo sapiens
aactatctttatttt

SEQ ID NO: 617511 - DNA, 15 bp, Homo sapiens
actatctttattttt

SEQ ID NO: 617512 - DNA, 15 bp, Homo sapiens
ctatctttatttttg

SEQ ID NO: 617513 - DNA, 15 bp, Homo sapiens
tatctttatttttgg

SEQ ID NO: 617514 - DNA, 15 bp, Homo sapiens
atctttatttttggc

SEQ ID NO: 617515 - DNA, 15 bp, Homo sapiens
tctttatttttggca

SEQ ID NO: 617516 - DNA, 15 bp, Homo sapiens
ctttatttttggcat

SEQ ID NO: 617517 - DNA, 15 bp, Homo sapiens
tttatttttggcata

SEQ ID NO: 617518 - DNA, 15 bp, Homo sapiens
ttatttttggcatag

SEQ ID NO: 617519 - DNA, 15 bp, Homo sapiens
tatttttggcatagt

SEQ ID NO: 617520 - DNA, 15 bp, Homo sapiens
atttttggcatagtt

SEQ ID NO: 617521 - DNA, 15 bp, Homo sapiens
tttttggcatagttc

SEQ ID NO: 617522 - DNA, 15 bp, Homo sapiens
ttttggcatagttcc

SEQ ID NO: 617523 - DNA, 15 bp, Homo sapiens
tttggcatagttccc

SEQ ID NO: 617524 - DNA, 15 bp, Homo sapiens
ttggcatagttcccc

SEQ ID NO: 617525 - DNA, 15 bp, Homo sapiens
tggcatagttccccc

SEQ ID NO: 617526 - DNA, 15 bp, Homo sapiens
ggcatagttccccca

SEQ ID NO: 617527 - DNA, 15 bp, Homo sapiens
gcatagttcccccat

SEQ ID NO: 617528 - DNA, 15 bp, Homo sapiens
catagttcccccatc

SEQ ID NO: 617529 - DNA, 15 bp, Homo sapiens
atagttcccccatct

SEQ ID NO: 617530 - DNA, 15 bp, Homo sapiens
tagttcccccatctc

SEQ ID NO: 617531 - DNA, 15 bp, Homo sapiens
agttcccccatctct

SEQ ID NO: 617532 - DNA, 15 bp, Homo sapiens
gttcccccatctctg

SEQ ID NO: 617533 - DNA, 15 bp, Homo sapiens
ttcccccatctctgc

SEQ ID NO: 617534 - DNA, 15 bp, Homo sapiens
tcccccatctctgca

SEQ ID NO: 617535 - DNA, 15 bp, Homo sapiens
cccccatctctgcat

SEQ ID NO: 617536 - DNA, 15 bp, Homo sapiens
ccccatctctgcatg

SEQ ID NO: 617537 - DNA, 15 bp, Homo sapiens
cccatctctgcatgc

SEQ ID NO: 617538 - DNA, 15 bp, Homo sapiens
ccatctctgcatgca

SEQ ID NO: 617539 - DNA, 15 bp, Homo sapiens
catctctgcatgcat

SEQ ID NO: 617540 - DNA, 15 bp, Homo sapiens
atctctgcatgcata

SEQ ID NO: 617541 - DNA, 15 bp, Homo sapiens
tctctgcatgcatac

SEQ ID NO: 617542 - DNA, 15 bp, Homo sapiens
ctctgcatgcataca

SEQ ID NO: 617543 - DNA, 15 bp, Homo sapiens
tctgcatgcatacaa

SEQ ID NO: 617544 - DNA, 15 bp, Homo sapiens
ctgcatgcatacaaa

SEQ ID NO: 617545 - DNA, 15 bp, Homo sapiens
tgcatgcatacaaat

SEQ ID NO: 617546 - DNA, 15 bp, Homo sapiens
gcatgcatacaaatt

SEQ ID NO: 617547 - DNA, 15 bp, Homo sapiens
catgcatacaaattt

SEQ ID NO: 617548 - DNA, 15 bp, Homo sapiens
atgcatacaaatttt

SEQ ID NO: 617549 - DNA, 15 bp, Homo sapiens
tgcatacaaatttta

SEQ ID NO: 617550 - DNA, 15 bp, Homo sapiens
gcatacaaattttat

SEQ ID NO: 617551 - DNA, 15 bp, Homo sapiens
catacaaattttatg

SEQ ID NO: 617552 - DNA, 15 bp, Homo sapiens
atacaaattttatgt

SEQ ID NO: 617553 - DNA, 15 bp, Homo sapiens
tacaaattttatgta

SEQ ID NO: 617554 - DNA, 15 bp, Homo sapiens
acaaattttatgtac

SEQ ID NO: 617555 - DNA, 15 bp, Homo sapiens
caaattttatgtact

SEQ ID NO: 617556 - DNA, 15 bp, Homo sapiens
aaattttatgtactt

SEQ ID NO: 617557 - DNA, 15 bp, Homo sapiens
aattttatgtacttg

SEQ ID NO: 617558 - DNA, 15 bp, Homo sapiens
attttatgtacttgt

SEQ ID NO: 617559 - DNA, 15 bp, Homo sapiens
ttttatgtacttgtg

SEQ ID NO: 617560 - DNA, 15 bp, Homo sapiens
tttatgtacttgtgg

SEQ ID NO: 617561 - DNA, 15 bp, Homo sapiens
ttatgtacttgtggt

SEQ ID NO: 617562 - DNA, 15 bp, Homo sapiens
tatgtacttgtggtt

SEQ ID NO: 617563 - DNA, 15 bp, Homo sapiens
atgtacttgtggtta

SEQ ID NO: 617564 - DNA, 15 bp, Homo sapiens
tgtacttgtggttac

SEQ ID NO: 617565 - DNA, 15 bp, Homo sapiens
gtacttgtggttact

SEQ ID NO: 617566 - DNA, 15 bp, Homo sapiens
tacttgtggttactg

SEQ ID NO: 617567 - DNA, 15 bp, Homo sapiens
acttgtggttactgt

SEQ ID NO: 617568 - DNA, 15 bp, Homo sapiens
cttgtggttactgtg

SEQ ID NO: 617569 - DNA, 15 bp, Homo sapiens
ttgtggttactgtgt

SEQ ID NO: 617570 - DNA, 15 bp, Homo sapiens
tgtggttactgtgtg

SEQ ID NO: 617571 - DNA, 15 bp, Homo sapiens
gtggttactgtgtgc

SEQ ID NO: 617572 - DNA, 15 bp, Homo sapiens
tggttactgtgtgct

SEQ ID NO: 617573 - DNA, 15 bp, Homo sapiens
ggttactgtgtgctt

SEQ ID NO: 617574 - DNA, 15 bp, Homo sapiens
gttactgtgtgctta

SEQ ID NO: 617575 - DNA, 15 bp, Homo sapiens
ttactgtgtgcttac

SEQ ID NO: 617576 - DNA, 15 bp, Homo sapiens
tactgtgtgcttacg

SEQ ID NO: 617577 - DNA, 15 bp, Homo sapiens
actgtgtgcttacgt

SEQ ID NO: 617578 - DNA, 15 bp, Homo sapiens
ctgtgtgcttacgtt

SEQ ID NO: 617579 - DNA, 15 bp, Homo sapiens
tgtgtgcttacgttt

SEQ ID NO: 617580 - DNA, 15 bp, Homo sapiens
gtgtgcttacgtttt

SEQ ID NO: 617581 - DNA, 15 bp, Homo sapiens
tgtgcttacgttttt

SEQ ID NO: 617582 - DNA, 15 bp, Homo sapiens
gtgcttacgtttttg

SEQ ID NO: 617583 - DNA, 15 bp, Homo sapiens
tgcttacgtttttgt

SEQ ID NO: 617584 - DNA, 15 bp, Homo sapiens
gcttacgtttttgta

SEQ ID NO: 617585 - DNA, 15 bp, Homo sapiens
cttacgtttttgtat

SEQ ID NO: 617586 - DNA, 15 bp, Homo sapiens
ttacgtttttgtatt

SEQ ID NO: 617587 - DNA, 15 bp, Homo sapiens
tacgtttttgtattt

SEQ ID NO: 617588 - DNA, 15 bp, Homo sapiens
acgtttttgtattta

SEQ ID NO: 617589 - DNA, 15 bp, Homo sapiens
cgtttttgtatttat

SEQ ID NO: 617590 - DNA, 15 bp, Homo sapiens
gtttttgtatttata

SEQ ID NO: 617591 - DNA, 15 bp, Homo sapiens
tttttgtatttatag

SEQ ID NO: 617592 - DNA, 15 bp, Homo sapiens
ttttgtatttataga

SEQ ID NO: 617593 - DNA, 15 bp, Homo sapiens
tttgtatttatagaa

SEQ ID NO: 617594 - DNA, 15 bp, Homo sapiens
ttgtatttatagaag

SEQ ID NO: 617595 - DNA, 15 bp, Homo sapiens
tgtatttatagaaga

SEQ ID NO: 617596 - DNA, 15 bp, Homo sapiens
gtatttatagaagat

SEQ ID NO: 617597 - DNA, 15 bp, Homo sapiens
tatttatagaagatg

SEQ ID NO: 617598 - DNA, 15 bp, Homo sapiens
atttatagaagatga

SEQ ID NO: 617599 - DNA, 15 bp, Homo sapiens
tttatagaagatgat

SEQ ID NO: 617600 - DNA, 15 bp, Homo sapiens
ttatagaagatgatg

SEQ ID NO: 617601 - DNA, 15 bp, Homo sapiens
tatagaagatgatgt

SEQ ID NO: 617602 - DNA, 15 bp, Homo sapiens
atagaagatgatgtt

SEQ ID NO: 617603 - DNA, 15 bp, Homo sapiens
tagaagatgatgttc

SEQ ID NO: 617604 - DNA, 15 bp, Homo sapiens
agaagatgatgttct

SEQ ID NO: 617605 - DNA, 15 bp, Homo sapiens
gaagatgatgttctc

SEQ ID NO: 617606 - DNA, 15 bp, Homo sapiens
aagatgatgttctca

SEQ ID NO: 617607 - DNA, 15 bp, Homo sapiens
agatgatgttctcag

SEQ ID NO: 617608 - DNA, 15 bp, Homo sapiens
gatgatgttctcaga

SEQ ID NO: 617609 - DNA, 15 bp, Homo sapiens
atgatgttctcagat

SEQ ID NO: 617610 - DNA, 15 bp, Homo sapiens
tgatgttctcagata

SEQ ID NO: 617611 - DNA, 15 bp, Homo sapiens
gatgttctcagatag

SEQ ID NO: 617612 - DNA, 15 bp, Homo sapiens
atgttctcagataga

SEQ ID NO: 617613 - DNA, 15 bp, Homo sapiens
tgttctcagatagag

SEQ ID NO: 617614 - DNA, 15 bp, Homo sapiens
gttctcagatagagt

SEQ ID NO: 617615 - DNA, 15 bp, Homo sapiens
ttctcagatagagtc

SEQ ID NO: 617616 - DNA, 15 bp, Homo sapiens
tctcagatagagtcg

SEQ ID NO: 617617 - DNA, 15 bp, Homo sapiens
ctcagatagagtcgt

SEQ ID NO: 617618 - DNA, 15 bp, Homo sapiens
tcagatagagtcgta

SEQ ID NO: 617619 - DNA, 15 bp, Homo sapiens
cagatagagtcgtaa

SEQ ID NO: 617620 - DNA, 15 bp, Homo sapiens
agatagagtcgtaat

SEQ ID NO: 617621 - DNA, 15 bp, Homo sapiens
gatagagtcgtaatg

SEQ ID NO: 617622 - DNA, 15 bp, Homo sapiens
atagagtcgtaatgg

SEQ ID NO: 617623 - DNA, 15 bp, Homo sapiens
tagagtcgtaatgga

SEQ ID NO: 617624 - DNA, 15 bp, Homo sapiens
agagtcgtaatggat

SEQ ID NO: 617625 - DNA, 15 bp, Homo sapiens
gagtcgtaatggatt

SEQ ID NO: 617626 - DNA, 15 bp, Homo sapiens
agtcgtaatggattt

SEQ ID NO: 617627 - DNA, 15 bp, Homo sapiens
gtcgtaatggatttt

SEQ ID NO: 617628 - DNA, 15 bp, Homo sapiens
tcgtaatggattttc

SEQ ID NO: 617629 - DNA, 15 bp, Homo sapiens
cgtaatggattttct

SEQ ID NO: 617630 - DNA, 15 bp, Homo sapiens
gtaatggattttctt

SEQ ID NO: 617631 - DNA, 15 bp, Homo sapiens
taatggattttcttc

SEQ ID NO: 617632 - DNA, 15 bp, Homo sapiens
aatggattttcttcc

SEQ ID NO: 617633 - DNA, 15 bp, Homo sapiens
atggattttcttccc

SEQ ID NO: 617634 - DNA, 15 bp, Homo sapiens
tggattttcttccca

SEQ ID NO: 617635 - DNA, 15 bp, Homo sapiens
ggattttcttcccat

SEQ ID NO: 617636 - DNA, 15 bp, Homo sapiens
gattttcttcccatt

SEQ ID NO: 617637 - DNA, 15 bp, Homo sapiens
attttcttcccatta

SEQ ID NO: 617638 - DNA, 15 bp, Homo sapiens
ttttcttcccattat

SEQ ID NO: 617639 - DNA, 15 bp, Homo sapiens
tttcttcccattatg

SEQ ID NO: 617640 - DNA, 15 bp, Homo sapiens
ttcttcccattatga

SEQ ID NO: 617641 - DNA, 15 bp, Homo sapiens
tcttcccattatgaa

SEQ ID NO: 617642 - DNA, 15 bp, Homo sapiens
cttcccattatgaag

SEQ ID NO: 617643 - DNA, 15 bp, Homo sapiens
ttcccattatgaagc

SEQ ID NO: 617644 - DNA, 15 bp, Homo sapiens
tcccattatgaagca

SEQ ID NO: 617645 - DNA, 15 bp, Homo sapiens
cccattatgaagcaa

SEQ ID NO: 617646 - DNA, 15 bp, Homo sapiens
ccattatgaagcaat

SEQ ID NO: 617647 - DNA, 15 bp, Homo sapiens
cattatgaagcaata

SEQ ID NO: 617648 - DNA, 15 bp, Homo sapiens
attatgaagcaatac

SEQ ID NO: 617649 - DNA, 15 bp, Homo sapiens
ttatgaagcaatacc

SEQ ID NO: 617650 - DNA, 15 bp, Homo sapiens
tatgaagcaataccc

SEQ ID NO: 617651 - DNA, 15 bp, Homo sapiens
atgaagcaataccca

SEQ ID NO: 617652 - DNA, 15 bp, Homo sapiens
tgaagcaatacccaa

SEQ ID NO: 617653 - DNA, 15 bp, Homo sapiens
gaagcaatacccaac

SEQ ID NO: 617654 - DNA, 15 bp, Homo sapiens
aagcaatacccaaca

SEQ ID NO: 617655 - DNA, 15 bp, Homo sapiens
agcaatacccaacaa

SEQ ID NO: 617656 - DNA, 15 bp, Homo sapiens
gcaatacccaacaaa

SEQ ID NO: 617657 - DNA, 15 bp, Homo sapiens
caatacccaacaaaa

SEQ ID NO: 617658 - DNA, 15 bp, Homo sapiens
aatacccaacaaaac

SEQ ID NO: 617659 - DNA, 15 bp, Homo sapiens
atacccaacaaaaca

SEQ ID NO: 617660 - DNA, 15 bp, Homo sapiens
tacccaacaaaacag

SEQ ID NO: 617661 - DNA, 15 bp, Homo sapiens
acccaacaaaacaga

SEQ ID NO: 617662 - DNA, 15 bp, Homo sapiens
cccaacaaaacagag

SEQ ID NO: 617663 - DNA, 15 bp, Homo sapiens
ccaacaaaacagagc

SEQ ID NO: 617664 - DNA, 15 bp, Homo sapiens
caacaaaacagagct

SEQ ID NO: 617665 - DNA, 15 bp, Homo sapiens
aacaaaacagagctt

SEQ ID NO: 617666 - DNA, 15 bp, Homo sapiens
acaaaacagagcttg

SEQ ID NO: 617667 - DNA, 15 bp, Homo sapiens
caaaacagagcttgg

SEQ ID NO: 617668 - DNA, 15 bp, Homo sapiens
aaaacagagcttggg

SEQ ID NO: 617669 - DNA, 15 bp, Homo sapiens
aaacagagcttgggt

SEQ ID NO: 617670 - DNA, 15 bp, Homo sapiens
aacagagcttgggtt

SEQ ID NO: 617671 - DNA, 15 bp, Homo sapiens
acagagcttgggtta

SEQ ID NO: 617672 - DNA, 15 bp, Homo sapiens
cagagcttgggttag

SEQ ID NO: 617673 - DNA, 15 bp, Homo sapiens
agagcttgggttaga

SEQ ID NO: 617674 - DNA, 15 bp, Homo sapiens
gagcttgggttagat

SEQ ID NO: 617675 - DNA, 15 bp, Homo sapiens
agcttgggttagatt

SEQ ID NO: 617676 - DNA, 15 bp, Homo sapiens
gcttgggttagattt

SEQ ID NO: 617677 - DNA, 15 bp, Homo sapiens
cttgggttagatttt

SEQ ID NO: 617678 - DNA, 15 bp, Homo sapiens
ttgggttagattttt

SEQ ID NO: 617679 - DNA, 15 bp, Homo sapiens
tgggttagatttttc

SEQ ID NO: 617680 - DNA, 15 bp, Homo sapiens
gggttagatttttct

SEQ ID NO: 617681 - DNA, 15 bp, Homo sapiens
ggttagatttttctg

SEQ ID NO: 617682 - DNA, 15 bp, Homo sapiens
gttagatttttctga

SEQ ID NO: 617683 - DNA, 15 bp, Homo sapiens
ttagatttttctgag

SEQ ID NO: 617684 - DNA, 15 bp, Homo sapiens
tagatttttctgaga

SEQ ID NO: 617685 - DNA, 15 bp, Homo sapiens
agatttttctgagaa

SEQ ID NO: 617686 - DNA, 15 bp, Homo sapiens
gatttttctgagaat

SEQ ID NO: 617687 - DNA, 15 bp, Homo sapiens
atttttctgagaata

SEQ ID NO: 617688 - DNA, 15 bp, Homo sapiens
tttttctgagaataa

SEQ ID NO: 617689 - DNA, 15 bp, Homo sapiens
ttttctgagaataag

SEQ ID NO: 617690 - DNA, 15 bp, Homo sapiens
tttctgagaataaga

SEQ ID NO: 617691 - DNA, 15 bp, Homo sapiens
ttctgagaataagaa

SEQ ID NO: 617692 - DNA, 15 bp, Homo sapiens
tctgagaataagaat

SEQ ID NO: 617693 - DNA, 15 bp, Homo sapiens
ctgagaataagaatg

SEQ ID NO: 617694 - DNA, 15 bp, Homo sapiens
tgagaataagaatga

SEQ ID NO: 617695 - DNA, 15 bp, Homo sapiens
gagaataagaatgac

SEQ ID NO: 617696 - DNA, 15 bp, Homo sapiens
agaataagaatgact

SEQ ID NO: 617697 - DNA, 15 bp, Homo sapiens
gaataagaatgacta

SEQ ID NO: 617698 - DNA, 15 bp, Homo sapiens
aataagaatgactaa

SEQ ID NO: 617699 - DNA, 15 bp, Homo sapiens
ataagaatgactaaa

SEQ ID NO: 617700 - DNA, 15 bp, Homo sapiens
taagaatgactaaac

SEQ ID NO: 617701 - DNA, 15 bp, Homo sapiens
aagaatgactaaaca

SEQ ID NO: 617702 - DNA, 15 bp, Homo sapiens
agaatgactaaacaa

SEQ ID NO: 617703 - DNA, 15 bp, Homo sapiens
gaatgactaaacaaa

SEQ ID NO: 617704 - DNA, 15 bp, Homo sapiens
aatgactaaacaaaa

SEQ ID NO: 617705 - DNA, 15 bp, Homo sapiens
atgactaaacaaaat

SEQ ID NO: 617706 - DNA, 15 bp, Homo sapiens
tgactaaacaaaatt

SEQ ID NO: 617707 - DNA, 15 bp, Homo sapiens
gactaaacaaaattc

SEQ ID NO: 617708 - DNA, 15 bp, Homo sapiens
actaaacaaaattct

SEQ ID NO: 617709 - DNA, 15 bp, Homo sapiens
ctaaacaaaattctc

SEQ ID NO: 617710 - DNA, 15 bp, Homo sapiens
taaacaaaattctct

SEQ ID NO: 617711 - DNA, 15 bp, Homo sapiens
aaacaaaattctctc

SEQ ID NO: 617712 - DNA, 15 bp, Homo sapiens
aacaaaattctctct

SEQ ID NO: 617713 - DNA, 15 bp, Homo sapiens
acaaaattctctctt

SEQ ID NO: 617714 - DNA, 15 bp, Homo sapiens
caaaattctctcttt

SEQ ID NO: 617715 - DNA, 15 bp, Homo sapiens
aaaattctctctttt

SEQ ID NO: 617716 - DNA, 15 bp, Homo sapiens
aaattctctcttttt

SEQ ID NO: 617717 - DNA, 15 bp, Homo sapiens
aattctctctttttt

SEQ ID NO: 617718 - DNA, 15 bp, Homo sapiens
attctctcttttttt

SEQ ID NO: 617719 - DNA, 15 bp, Homo sapiens
ttctctctttttttc

SEQ ID NO: 617720 - DNA, 15 bp, Homo sapiens
tctctctttttttct

SEQ ID NO: 617721 - DNA, 15 bp, Homo sapiens
ctctctttttttctt

SEQ ID NO: 617722 - DNA, 15 bp, Homo sapiens
tctctttttttcttc

SEQ ID NO: 617723 - DNA, 15 bp, Homo sapiens
ctctttttttcttct

SEQ ID NO: 617724 - DNA, 15 bp, Homo sapiens
tctttttttcttctt

SEQ ID NO: 617725 - DNA, 15 bp, Homo sapiens
ctttttttcttcttg

SEQ ID NO: 617726 - DNA, 15 bp, Homo sapiens
tttttttcttcttga

SEQ ID NO: 617727 - DNA, 15 bp, Homo sapiens
ttttttcttcttgac

SEQ ID NO: 617728 - DNA, 15 bp, Homo sapiens
tttttcttcttgaca

SEQ ID NO: 617729 - DNA, 15 bp, Homo sapiens
ttttcttcttgacag

SEQ ID NO: 617730 - DNA, 15 bp, Homo sapiens
tttcttcttgacaga

SEQ ID NO: 617731 - DNA, 15 bp, Homo sapiens
ttcttcttgacagat

SEQ ID NO: 617732 - DNA, 15 bp, Homo sapiens
tcttcttgacagatt

SEQ ID NO: 617733 - DNA, 15 bp, Homo sapiens
cttcttgacagattt

SEQ ID NO: 617734 - DNA, 15 bp, Homo sapiens
ttcttgacagatttt

SEQ ID NO: 617735 - DNA, 15 bp, Homo sapiens
tcttgacagattttt

SEQ ID NO: 617736 - DNA, 15 bp, Homo sapiens
cttgacagatttttc

SEQ ID NO: 617737 - DNA, 15 bp, Homo sapiens
ttgacagatttttct

SEQ ID NO: 617738 - DNA, 15 bp, Homo sapiens
tgacagatttttctg

SEQ ID NO: 617739 - DNA, 15 bp, Homo sapiens
gacagatttttctga

SEQ ID NO: 617740 - DNA, 15 bp, Homo sapiens
acagatttttctgaa

SEQ ID NO: 617741 - DNA, 15 bp, Homo sapiens
cagatttttctgaag

SEQ ID NO: 617742 - DNA, 15 bp, Homo sapiens
agatttttctgaagg

SEQ ID NO: 617743 - DNA, 15 bp, Homo sapiens
gatttttctgaaggt

SEQ ID NO: 617744 - DNA, 15 bp, Homo sapiens
atttttctgaaggtc

SEQ ID NO: 617745 - DNA, 15 bp, Homo sapiens
tttttctgaaggtca

SEQ ID NO: 617746 - DNA, 15 bp, Homo sapiens
ttttctgaaggtcac

SEQ ID NO: 617747 - DNA, 15 bp, Homo sapiens
tttctgaaggtcacg

SEQ ID NO: 617748 - DNA, 15 bp, Homo sapiens
ttctgaaggtcacgg

SEQ ID NO: 617749 - DNA, 15 bp, Homo sapiens
tctgaaggtcacgga

SEQ ID NO: 617750 - DNA, 15 bp, Homo sapiens
ctgaaggtcacggag

SEQ ID NO: 617751 - DNA, 15 bp, Homo sapiens
tgaaggtcacggagg

SEQ ID NO: 617752 - DNA, 15 bp, Homo sapiens
gaaggtcacggagga

SEQ ID NO: 617753 - DNA, 15 bp, Homo sapiens
aaggtcacggaggat

SEQ ID NO: 617754 - DNA, 15 bp, Homo sapiens
aggtcacggaggatt

SEQ ID NO: 617755 - DNA, 15 bp, Homo sapiens
ggtcacggaggattc

SEQ ID NO: 617756 - DNA, 15 bp, Homo sapiens
gtcacggaggattct

SEQ ID NO: 617757 - DNA, 15 bp, Homo sapiens
tcacggaggattctg

SEQ ID NO: 617758 - DNA, 15 bp, Homo sapiens
cacggaggattctga

SEQ ID NO: 617759 - DNA, 15 bp, Homo sapiens
acggaggattctgat

SEQ ID NO: 617760 - DNA, 15 bp, Homo sapiens
cggaggattctgatt

SEQ ID NO: 617761 - DNA, 15 bp, Homo sapiens
ggaggattctgattc

SEQ ID NO: 617762 - DNA, 15 bp, Homo sapiens
gaggattctgattca

SEQ ID NO: 617763 - DNA, 15 bp, Homo sapiens
aggattctgattcag

SEQ ID NO: 617764 - DNA, 15 bp, Homo sapiens
ggattctgattcagg

SEQ ID NO: 617765 - DNA, 15 bp, Homo sapiens
gattctgattcagga

SEQ ID NO: 617766 - DNA, 15 bp, Homo sapiens
attctgattcaggac

SEQ ID NO: 617767 - DNA, 15 bp, Homo sapiens
ttctgattcaggacc

SEQ ID NO: 617768 - DNA, 15 bp, Homo sapiens
tctgattcaggacct

SEQ ID NO: 617769 - DNA, 15 bp, Homo sapiens
ctgattcaggacctc

SEQ ID NO: 617770 - DNA, 15 bp, Homo sapiens
tgattcaggacctct

SEQ ID NO: 617771 - DNA, 15 bp, Homo sapiens
gattcaggacctctg

SEQ ID NO: 617772 - DNA, 15 bp, Homo sapiens
attcaggacctctgt

SEQ ID NO: 617773 - DNA, 15 bp, Homo sapiens
ttcaggacctctgtt

SEQ ID NO: 617774 - DNA, 15 bp, Homo sapiens
tcaggacctctgttt

SEQ ID NO: 617775 - DNA, 15 bp, Homo sapiens
caggacctctgtttg

SEQ ID NO: 617776 - DNA, 15 bp, Homo sapiens
aggacctctgtttgc

SEQ ID NO: 617777 - DNA, 15 bp, Homo sapiens
ggacctctgtttgcg

SEQ ID NO: 617778 - DNA, 15 bp, Homo sapiens
gacctctgtttgcgg

SEQ ID NO: 617779 - DNA, 15 bp, Homo sapiens
acctctgtttgcggg

SEQ ID NO: 617780 - DNA, 15 bp, Homo sapiens
cctctgtttgcgggt

SEQ ID NO: 617781 - DNA, 15 bp, Homo sapiens
ctctgtttgcgggta

SEQ ID NO: 617782 - DNA, 15 bp, Homo sapiens
tctgtttgcgggtat

SEQ ID NO: 617783 - DNA, 15 bp, Homo sapiens
ctgtttgcgggtatg

SEQ ID NO: 617784 - DNA, 15 bp, Homo sapiens
tgtttgcgggtatgg

SEQ ID NO: 617785 - DNA, 15 bp, Homo sapiens
gtttgcgggtatggt

SEQ ID NO: 617786 - DNA, 15 bp, Homo sapiens
tttgcgggtatggtg

SEQ ID NO: 617787 - DNA, 15 bp, Homo sapiens
ttgcgggtatggtgc

SEQ ID NO: 617788 - DNA, 15 bp, Homo sapiens
tgcgggtatggtgct

SEQ ID NO: 617789 - DNA, 15 bp, Homo sapiens
gcgggtatggtgctg

SEQ ID NO: 617790 - DNA, 15 bp, Homo sapiens
cgggtatggtgctgg

SEQ ID NO: 617791 - DNA, 15 bp, Homo sapiens
gggtatggtgctgga

SEQ ID NO: 617792 - DNA, 15 bp, Homo sapiens
ggtatggtgctggag

SEQ ID NO: 617793 - DNA, 15 bp, Homo sapiens
gtatggtgctggagc

SEQ ID NO: 617794 - DNA, 15 bp, Homo sapiens
tatggtgctggagcc

SEQ ID NO: 617795 - DNA, 15 bp, Homo sapiens
atggtgctggagcca

SEQ ID NO: 617796 - DNA, 15 bp, Homo sapiens
tggtgctggagccag

SEQ ID NO: 617797 - DNA, 15 bp, Homo sapiens
ggtgctggagccagt

SEQ ID NO: 617798 - DNA, 15 bp, Homo sapiens
gtgctggagccagtg

SEQ ID NO: 617799 - DNA, 15 bp, Homo sapiens
tgctggagccagtgg

SEQ ID NO: 617800 - DNA, 15 bp, Homo sapiens
gctggagccagtggc

SEQ ID NO: 617801 - DNA, 15 bp, Homo sapiens
ctggagccagtggct

SEQ ID NO: 617802 - DNA, 15 bp, Homo sapiens
tggagccagtggctt

SEQ ID NO: 617803 - DNA, 15 bp, Homo sapiens
ggagccagtggcttg

SEQ ID NO: 617804 - DNA, 15 bp, Homo sapiens
gagccagtggcttgt

SEQ ID NO: 617805 - DNA, 15 bp, Homo sapiens
agccagtggcttgtt

SEQ ID NO: 617806 - DNA, 15 bp, Homo sapiens
gccagtggcttgttc

SEQ ID NO: 617807 - DNA, 15 bp, Homo sapiens
ccagtggcttgttcc

SEQ ID NO: 617808 - DNA, 15 bp, Homo sapiens
cagtggcttgttccc

SEQ ID NO: 617809 - DNA, 15 bp, Homo sapiens
agtggcttgttccct

SEQ ID NO: 617810 - DNA, 15 bp, Homo sapiens
gtggcttgttccctt

SEQ ID NO: 617811 - DNA, 15 bp, Homo sapiens
tggcttgttcccttc

SEQ ID NO: 617812 - DNA, 15 bp, Homo sapiens
ggcttgttcccttcc

SEQ ID NO: 617813 - DNA, 15 bp, Homo sapiens
gcttgttcccttcct

SEQ ID NO: 617814 - DNA, 15 bp, Homo sapiens
cttgttcccttcctt

SEQ ID NO: 617815 - DNA, 15 bp, Homo sapiens
ttgttcccttccttg

SEQ ID NO: 617816 - DNA, 15 bp, Homo sapiens
tgttcccttccttgc

SEQ ID NO: 617817 - DNA, 15 bp, Homo sapiens
gttcccttccttgcc

SEQ ID NO: 617818 - DNA, 15 bp, Homo sapiens
ttcccttccttgcct

SEQ ID NO: 617819 - DNA, 15 bp, Homo sapiens
tcccttccttgcctc

SEQ ID NO: 617820 - DNA, 15 bp, Homo sapiens
cccttccttgcctcc

SEQ ID NO: 617821 - DNA, 15 bp, Homo sapiens
ccttccttgcctccc

SEQ ID NO: 617822 - DNA, 15 bp, Homo sapiens
cttccttgcctccct

SEQ ID NO: 617823 - DNA, 15 bp, Homo sapiens
ttccttgcctccctc

SEQ ID NO: 617824 - DNA, 15 bp, Homo sapiens
tccttgcctccctcc

SEQ ID NO: 617825 - DNA, 15 bp, Homo sapiens
ccttgcctccctccc

SEQ ID NO: 617826 - DNA, 15 bp, Homo sapiens
cttgcctccctccca

SEQ ID NO: 617827 - DNA, 15 bp, Homo sapiens
ttgcctccctcccaa

SEQ ID NO: 617828 - DNA, 15 bp, Homo sapiens
tgcctccctcccaag

SEQ ID NO: 617829 - DNA, 15 bp, Homo sapiens
gcctccctcccaagt

SEQ ID NO: 617830 - DNA, 15 bp, Homo sapiens
cctccctcccaagtt

SEQ ID NO: 617831 - DNA, 15 bp, Homo sapiens
ctccctcccaagttc

SEQ ID NO: 617832 - DNA, 15 bp, Homo sapiens
tccctcccaagttcc

SEQ ID NO: 617833 - DNA, 15 bp, Homo sapiens
ccctcccaagttcca

SEQ ID NO: 617834 - DNA, 15 bp, Homo sapiens
cctcccaagttccat

SEQ ID NO: 617835 - DNA, 15 bp, Homo sapiens
ctcccaagttccatc

SEQ ID NO: 617836 - DNA, 15 bp, Homo sapiens
tcccaagttccatct

SEQ ID NO: 617837 - DNA, 15 bp, Homo sapiens
cccaagttccatctc

SEQ ID NO: 617838 - DNA, 15 bp, Homo sapiens
ccaagttccatctcg

SEQ ID NO: 617839 - DNA, 15 bp, Homo sapiens
caagttccatctcga

SEQ ID NO: 617840 - DNA, 15 bp, Homo sapiens
aagttccatctcgaa

SEQ ID NO: 617841 - DNA, 15 bp, Homo sapiens
agttccatctcgaaa

SEQ ID NO: 617842 - DNA, 15 bp, Homo sapiens
gttccatctcgaaag

SEQ ID NO: 617843 - DNA, 15 bp, Homo sapiens
ttccatctcgaaagt

SEQ ID NO: 617844 - DNA, 15 bp, Homo sapiens
tccatctcgaaagtc

SEQ ID NO: 617845 - DNA, 15 bp, Homo sapiens
ccatctcgaaagtct

SEQ ID NO: 617846 - DNA, 15 bp, Homo sapiens
catctcgaaagtcta

SEQ ID NO: 617847 - DNA, 15 bp, Homo sapiens
atctcgaaagtctaa

SEQ ID NO: 617848 - DNA, 15 bp, Homo sapiens
tctcgaaagtctaag

SEQ ID NO: 617849 - DNA, 15 bp, Homo sapiens
ctcgaaagtctaagg

SEQ ID NO: 617850 - DNA, 15 bp, Homo sapiens
tcgaaagtctaaggg

SEQ ID NO: 617851 - DNA, 15 bp, Homo sapiens
cgaaagtctaagggg

SEQ ID NO: 617852 - DNA, 15 bp, Homo sapiens
gaaagtctaaggggc

SEQ ID NO: 617853 - DNA, 15 bp, Homo sapiens
aaagtctaaggggct

SEQ ID NO: 617854 - DNA, 15 bp, Homo sapiens
aagtctaaggggctg

SEQ ID NO: 617855 - DNA, 15 bp, Homo sapiens
agtctaaggggctgg

SEQ ID NO: 617856 - DNA, 15 bp, Homo sapiens
gtctaaggggctggg

SEQ ID NO: 617857 - DNA, 15 bp, Homo sapiens
tctaaggggctgggc

SEQ ID NO: 617858 - DNA, 15 bp, Homo sapiens
ctaaggggctgggca

SEQ ID NO: 617859 - DNA, 15 bp, Homo sapiens
taaggggctgggcac

SEQ ID NO: 617860 - DNA, 15 bp, Homo sapiens
aaggggctgggcaca

SEQ ID NO: 617861 - DNA, 15 bp, Homo sapiens
aggggctgggcacag

SEQ ID NO: 617862 - DNA, 15 bp, Homo sapiens
ggggctgggcacagt

SEQ ID NO: 617863 - DNA, 15 bp, Homo sapiens
gggctgggcacagtg

SEQ ID NO: 617864 - DNA, 15 bp, Homo sapiens
ggctgggcacagtgg

SEQ ID NO: 617865 - DNA, 15 bp, Homo sapiens
gctgggcacagtggc

SEQ ID NO: 617866 - DNA, 15 bp, Homo sapiens
ctgggcacagtggct

SEQ ID NO: 617867 - DNA, 15 bp, Homo sapiens
tgggcacagtggctc

SEQ ID NO: 617868 - DNA, 15 bp, Homo sapiens
gggcacagtggctca

SEQ ID NO: 617869 - DNA, 15 bp, Homo sapiens
ggcacagtggctcat

SEQ ID NO: 617870 - DNA, 15 bp, Homo sapiens
gcacagtggctcatg

SEQ ID NO: 617871 - DNA, 15 bp, Homo sapiens
cacagtggctcatgc

SEQ ID NO: 617872 - DNA, 15 bp, Homo sapiens
acagtggctcatgcc

SEQ ID NO: 617873 - DNA, 15 bp, Homo sapiens
cagtggctcatgcct

SEQ ID NO: 617874 - DNA, 15 bp, Homo sapiens
agtggctcatgcctg

SEQ ID NO: 617875 - DNA, 15 bp, Homo sapiens
ctgtaatcccagcaa

SEQ ID NO: 617876 - DNA, 15 bp, Homo sapiens
tgtaatcccagcaat

SEQ ID NO: 617877 - DNA, 15 bp, Homo sapiens
gtaatcccagcaatt

SEQ ID NO: 617878 - DNA, 15 bp, Homo sapiens
taatcccagcaattt

SEQ ID NO: 617879 - DNA, 15 bp, Homo sapiens
aatcccagcaatttg

SEQ ID NO: 617880 - DNA, 15 bp, Homo sapiens
atcccagcaatttgg

SEQ ID NO: 617881 - DNA, 15 bp, Homo sapiens
tcccagcaatttggg

SEQ ID NO: 617882 - DNA, 15 bp, Homo sapiens
cccagcaatttggga

SEQ ID NO: 617883 - DNA, 15 bp, Homo sapiens
ccagcaatttgggag

SEQ ID NO: 617884 - DNA, 15 bp, Homo sapiens
cagcaatttgggagg

SEQ ID NO: 617885 - DNA, 15 bp, Homo sapiens
agcaatttgggaggc

SEQ ID NO: 617886 - DNA, 15 bp, Homo sapiens
gcaatttgggaggcc

SEQ ID NO: 617887 - DNA, 15 bp, Homo sapiens
caatttgggaggcca

SEQ ID NO: 617888 - DNA, 15 bp, Homo sapiens
aatttgggaggccaa

SEQ ID NO: 617889 - DNA, 15 bp, Homo sapiens
atttgggaggccaag

SEQ ID NO: 617890 - DNA, 15 bp, Homo sapiens
ggaggccaaggcaga

SEQ ID NO: 617891 - DNA, 15 bp, Homo sapiens
gaggccaaggcagat

SEQ ID NO: 617892 - DNA, 15 bp, Homo sapiens
aggccaaggcagatg

SEQ ID NO: 617893 - DNA, 15 bp, Homo sapiens
ggccaaggcagatgg

SEQ ID NO: 617894 - DNA, 15 bp, Homo sapiens
gccaaggcagatgga

SEQ ID NO: 617895 - DNA, 15 bp, Homo sapiens
ccaaggcagatggac

SEQ ID NO: 617896 - DNA, 15 bp, Homo sapiens
caaggcagatggacc

SEQ ID NO: 617897 - DNA, 15 bp, Homo sapiens
aaggcagatggacca

SEQ ID NO: 617898 - DNA, 15 bp, Homo sapiens
aggcagatggaccac

SEQ ID NO: 617899 - DNA, 15 bp, Homo sapiens
ggcagatggaccacc

SEQ ID NO: 617900 - DNA, 15 bp, Homo sapiens
gcagatggaccacct

SEQ ID NO: 617901 - DNA, 15 bp, Homo sapiens
cagatggaccacctg

SEQ ID NO: 617902 - DNA, 15 bp, Homo sapiens
agatggaccacctga

SEQ ID NO: 617903 - DNA, 15 bp, Homo sapiens
gatggaccacctgag

SEQ ID NO: 617904 - DNA, 15 bp, Homo sapiens
atggaccacctgagt

SEQ ID NO: 617905 - DNA, 15 bp, Homo sapiens
tggaccacctgagtt

SEQ ID NO: 617906 - DNA, 15 bp, Homo sapiens
ggaccacctgagttc

SEQ ID NO: 617907 - DNA, 15 bp, Homo sapiens
gaccacctgagttcg

SEQ ID NO: 617908 - DNA, 15 bp, Homo sapiens
accacctgagttcga

SEQ ID NO: 617909 - DNA, 15 bp, Homo sapiens
ccacctgagttcgag

SEQ ID NO: 617910 - DNA, 15 bp, Homo sapiens
cacctgagttcgaga

SEQ ID NO: 617911 - DNA, 15 bp, Homo sapiens
acctgagttcgagac

SEQ ID NO: 617912 - DNA, 15 bp, Homo sapiens
cctgagttcgagacc

SEQ ID NO: 617913 - DNA, 15 bp, Homo sapiens
ctgagttcgagacca

SEQ ID NO: 617914 - DNA, 15 bp, Homo sapiens
tgagttcgagaccag

SEQ ID NO: 617915 - DNA, 15 bp, Homo sapiens
gagttcgagaccagc

SEQ ID NO: 617916 - DNA, 15 bp, Homo sapiens
agttcgagaccagcc

SEQ ID NO: 617917 - DNA, 15 bp, Homo sapiens
gttcgagaccagcct

SEQ ID NO: 617918 - DNA, 15 bp, Homo sapiens
ttcgagaccagcctg

SEQ ID NO: 617919 - DNA, 15 bp, Homo sapiens
tcgagaccagcctgg

SEQ ID NO: 617920 - DNA, 15 bp, Homo sapiens
cgagaccagcctggc

SEQ ID NO: 617921 - DNA, 15 bp, Homo sapiens
gagaccagcctggcc

SEQ ID NO: 617922 - DNA, 15 bp, Homo sapiens
agaccagcctggcca

SEQ ID NO: 617923 - DNA, 15 bp, Homo sapiens
gaccagcctggccaa

SEQ ID NO: 617924 - DNA, 15 bp, Homo sapiens
accagcctggccaac

SEQ ID NO: 617925 - DNA, 15 bp, Homo sapiens
ccagcctggccaaca

SEQ ID NO: 617926 - DNA, 15 bp, Homo sapiens
ctggccaacatggtg

SEQ ID NO: 617927 - DNA, 15 bp, Homo sapiens
tggccaacatggtga

SEQ ID NO: 617928 - DNA, 15 bp, Homo sapiens
ggccaacatggtgaa

SEQ ID NO: 617929 - DNA, 15 bp, Homo sapiens
gccaacatggtgaaa

SEQ ID NO: 617930 - DNA, 15 bp, Homo sapiens
ccaacatggtgaaac

SEQ ID NO: 617931 - DNA, 15 bp, Homo sapiens
caacatggtgaaacc

SEQ ID NO: 617932 - DNA, 15 bp, Homo sapiens
catggtgaaacccca

SEQ ID NO: 617933 - DNA, 15 bp, Homo sapiens
atggtgaaaccccat

SEQ ID NO: 617934 - DNA, 15 bp, Homo sapiens
tggtgaaaccccatc

SEQ ID NO: 617935 - DNA, 15 bp, Homo sapiens
ggtgaaaccccatct

SEQ ID NO: 617936 - DNA, 15 bp, Homo sapiens
gtgaaaccccatctg

SEQ ID NO: 617937 - DNA, 15 bp, Homo sapiens
tgaaaccccatctgt

SEQ ID NO: 617938 - DNA, 15 bp, Homo sapiens
gaaaccccatctgta

SEQ ID NO: 617939 - DNA, 15 bp, Homo sapiens
aaaccccatctgtac

SEQ ID NO: 617940 - DNA, 15 bp, Homo sapiens
aaccccatctgtact

SEQ ID NO: 617941 - DNA, 15 bp, Homo sapiens
accccatctgtacta

SEQ ID NO: 617942 - DNA, 15 bp, Homo sapiens
ccccatctgtactaa

SEQ ID NO: 617943 - DNA, 15 bp, Homo sapiens
cccatctgtactaaa

SEQ ID NO: 617944 - DNA, 15 bp, Homo sapiens
ccatctgtactaaaa

SEQ ID NO: 617945 - DNA, 15 bp, Homo sapiens
catctgtactaaaaa

SEQ ID NO: 617946 - DNA, 15 bp, Homo sapiens
atctgtactaaaaat

SEQ ID NO: 617947 - DNA, 15 bp, Homo sapiens
tctgtactaaaaata

SEQ ID NO: 617948 - DNA, 15 bp, Homo sapiens
ctgtactaaaaatac

SEQ ID NO: 617949 - DNA, 15 bp, Homo sapiens
tgtactaaaaataca

SEQ ID NO: 617950 - DNA, 15 bp, Homo sapiens
gtactaaaaatacaa

SEQ ID NO: 617951 - DNA, 15 bp, Homo sapiens
atacaaaaattagct

SEQ ID NO: 617952 - DNA, 15 bp, Homo sapiens
tacaaaaattagcta

SEQ ID NO: 617953 - DNA, 15 bp, Homo sapiens
acaaaaattagctag

SEQ ID NO: 617954 - DNA, 15 bp, Homo sapiens
caaaaattagctagg

SEQ ID NO: 617955 - DNA, 15 bp, Homo sapiens
aaaaattagctaggt

SEQ ID NO: 617956 - DNA, 15 bp, Homo sapiens
aaaattagctaggtg

SEQ ID NO: 617957 - DNA, 15 bp, Homo sapiens
aaattagctaggtgt

SEQ ID NO: 617958 - DNA, 15 bp, Homo sapiens
aattagctaggtgtg

SEQ ID NO: 617959 - DNA, 15 bp, Homo sapiens
attagctaggtgtgg

SEQ ID NO: 617960 - DNA, 15 bp, Homo sapiens
ttagctaggtgtggt

SEQ ID NO: 617961 - DNA, 15 bp, Homo sapiens
tagctaggtgtggtg

SEQ ID NO: 617962 - DNA, 15 bp, Homo sapiens
agctaggtgtggtgg

SEQ ID NO: 617963 - DNA, 15 bp, Homo sapiens
gctaggtgtggtggc

SEQ ID NO: 617964 - DNA, 15 bp, Homo sapiens
ctaggtgtggtggcg

SEQ ID NO: 617965 - DNA, 15 bp, Homo sapiens
taggtgtggtggcgc

SEQ ID NO: 617966 - DNA, 15 bp, Homo sapiens
aggtgtggtggcgcg

SEQ ID NO: 617967 - DNA, 15 bp, Homo sapiens
ggtgtggtggcgcgc

SEQ ID NO: 617968 - DNA, 15 bp, Homo sapiens
gtgtggtggcgcgca

SEQ ID NO: 617969 - DNA, 15 bp, Homo sapiens
tgtggtggcgcgcac

SEQ ID NO: 617970 - DNA, 15 bp, Homo sapiens
gtggtggcgcgcacc

SEQ ID NO: 617971 - DNA, 15 bp, Homo sapiens
tggtggcgcgcacct

SEQ ID NO: 617972 - DNA, 15 bp, Homo sapiens
ggtggcgcgcacctg

SEQ ID NO: 617973 - DNA, 15 bp, Homo sapiens
gtggcgcgcacctgt

SEQ ID NO: 617974 - DNA, 15 bp, Homo sapiens
tggcgcgcacctgta

SEQ ID NO: 617975 - DNA, 15 bp, Homo sapiens
ggcgcgcacctgtaa

SEQ ID NO: 617976 - DNA, 15 bp, Homo sapiens
gcgcgcacctgtaat

SEQ ID NO: 617977 - DNA, 15 bp, Homo sapiens
cgcgcacctgtaatt

SEQ ID NO: 617978 - DNA, 15 bp, Homo sapiens
gcgcacctgtaattc

SEQ ID NO: 617979 - DNA, 15 bp, Homo sapiens
cgcacctgtaattcc

SEQ ID NO: 617980 - DNA, 15 bp, Homo sapiens
gcacctgtaattcca

SEQ ID NO: 617981 - DNA, 15 bp, Homo sapiens
cacctgtaattccag

SEQ ID NO: 617982 - DNA, 15 bp, Homo sapiens
acctgtaattccagc

SEQ ID NO: 617983 - DNA, 15 bp, Homo sapiens
cctgtaattccagct

SEQ ID NO: 617984 - DNA, 15 bp, Homo sapiens
ctgtaattccagcta

SEQ ID NO: 617985 - DNA, 15 bp, Homo sapiens
tgtaattccagctac

SEQ ID NO: 617986 - DNA, 15 bp, Homo sapiens
gtaattccagctact

SEQ ID NO: 617987 - DNA, 15 bp, Homo sapiens
taattccagctactc

SEQ ID NO: 617988 - DNA, 15 bp, Homo sapiens
aattccagctactcg

SEQ ID NO: 617989 - DNA, 15 bp, Homo sapiens
attccagctactcgg

SEQ ID NO: 617990 - DNA, 15 bp, Homo sapiens
ttccagctactcggg

SEQ ID NO: 617991 - DNA, 15 bp, Homo sapiens
tccagctactcggga

SEQ ID NO: 617992 - DNA, 15 bp, Homo sapiens
gaggcaggagaatca

SEQ ID NO: 617993 - DNA, 15 bp, Homo sapiens
aggcaggagaatcac

SEQ ID NO: 617994 - DNA, 15 bp, Homo sapiens
ggcaggagaatcact

SEQ ID NO: 617995 - DNA, 15 bp, Homo sapiens
gaatcacttgaacct

SEQ ID NO: 617996 - DNA, 15 bp, Homo sapiens
aatcacttgaacctg

SEQ ID NO: 617997 - DNA, 15 bp, Homo sapiens
atcacttgaacctgg

SEQ ID NO: 617998 - DNA, 15 bp, Homo sapiens
tcacttgaacctggg

SEQ ID NO: 617999 - DNA, 15 bp, Homo sapiens
cacttgaacctggga

SEQ ID NO: 618000 - DNA, 15 bp, Homo sapiens
acttgaacctgggag

SEQ ID NO: 618001 - DNA, 15 bp, Homo sapiens
cttgaacctgggagg

SEQ ID NO: 618002 - DNA, 15 bp, Homo sapiens
ttgaacctgggaggc

SEQ ID NO: 618003 - DNA, 15 bp, Homo sapiens
cctgggaggcagagg

SEQ ID NO: 618004 - DNA, 15 bp, Homo sapiens
ctgggaggcagaggt

SEQ ID NO: 618005 - DNA, 15 bp, Homo sapiens
tgggaggcagaggtt

SEQ ID NO: 618006 - DNA, 15 bp, Homo sapiens
gggaggcagaggttg

SEQ ID NO: 618007 - DNA, 15 bp, Homo sapiens
ggaggcagaggttgc

SEQ ID NO: 618008 - DNA, 15 bp, Homo sapiens
gaggcagaggttgca

SEQ ID NO: 618009 - DNA, 15 bp, Homo sapiens
aggcagaggttgcag

SEQ ID NO: 618010 - DNA, 15 bp, Homo sapiens
ggcagaggttgcagt

SEQ ID NO: 618011 - DNA, 15 bp, Homo sapiens
gcagaggttgcagtg

SEQ ID NO: 618012 - DNA, 15 bp, Homo sapiens
cagaggttgcagtga

SEQ ID NO: 618013 - DNA, 15 bp, Homo sapiens
agaggttgcagtgag

SEQ ID NO: 618014 - DNA, 15 bp, Homo sapiens
gaggttgcagtgagc

SEQ ID NO: 618015 - DNA, 15 bp, Homo sapiens
aggttgcagtgagca

SEQ ID NO: 618016 - DNA, 15 bp, Homo sapiens
ggttgcagtgagcag

SEQ ID NO: 618017 - DNA, 15 bp, Homo sapiens
gttgcagtgagcaga

SEQ ID NO: 618018 - DNA, 15 bp, Homo sapiens
ttgcagtgagcagag

SEQ ID NO: 618019 - DNA, 15 bp, Homo sapiens
tgcagtgagcagaga

SEQ ID NO: 618020 - DNA, 15 bp, Homo sapiens
cagtgagcagagatt

SEQ ID NO: 618021 - DNA, 15 bp, Homo sapiens
agtgagcagagattg

SEQ ID NO: 618022 - DNA, 15 bp, Homo sapiens
gtgagcagagattgt

SEQ ID NO: 618023 - DNA, 15 bp, Homo sapiens
tgagcagagattgtg

SEQ ID NO: 618024 - DNA, 15 bp, Homo sapiens
gagcagagattgtgc

SEQ ID NO: 618025 - DNA, 15 bp, Homo sapiens
agcagagattgtgcc

SEQ ID NO: 618026 - DNA, 15 bp, Homo sapiens
gcagagattgtgcca

SEQ ID NO: 618027 - DNA, 15 bp, Homo sapiens
cagagattgtgccac

SEQ ID NO: 618028 - DNA, 15 bp, Homo sapiens
agagattgtgccact

SEQ ID NO: 618029 - DNA, 15 bp, Homo sapiens
gagattgtgccactg

SEQ ID NO: 618030 - DNA, 15 bp, Homo sapiens
agattgtgccactgc

SEQ ID NO: 618031 - DNA, 15 bp, Homo sapiens
gattgtgccactgca

SEQ ID NO: 618032 - DNA, 15 bp, Homo sapiens
attgtgccactgcac

SEQ ID NO: 618033 - DNA, 15 bp, Homo sapiens
ttgtgccactgcact

SEQ ID NO: 618034 - DNA, 15 bp, Homo sapiens
tgtgccactgcactg

SEQ ID NO: 618035 - DNA, 15 bp, Homo sapiens
gtgccactgcactgc

SEQ ID NO: 618036 - DNA, 15 bp, Homo sapiens
tgccactgcactgca

SEQ ID NO: 618037 - DNA, 15 bp, Homo sapiens
gccactgcactgcag

SEQ ID NO: 618038 - DNA, 15 bp, Homo sapiens
ccactgcactgcagc

SEQ ID NO: 618039 - DNA, 15 bp, Homo sapiens
cactgcactgcagcc

SEQ ID NO: 618040 - DNA, 15 bp, Homo sapiens
actgcactgcagcct

SEQ ID NO: 618041 - DNA, 15 bp, Homo sapiens
ctgcactgcagcctg

SEQ ID NO: 618042 - DNA, 15 bp, Homo sapiens
tgcactgcagcctga

SEQ ID NO: 618043 - DNA, 15 bp, Homo sapiens
gcactgcagcctgag

SEQ ID NO: 618044 - DNA, 15 bp, Homo sapiens
cactgcagcctgagc

SEQ ID NO: 618045 - DNA, 15 bp, Homo sapiens
actgcagcctgagcg

SEQ ID NO: 618046 - DNA, 15 bp, Homo sapiens
ctgcagcctgagcga

SEQ ID NO: 618047 - DNA, 15 bp, Homo sapiens
tgcagcctgagcgac

SEQ ID NO: 618048 - DNA, 15 bp, Homo sapiens
gcagcctgagcgaca

SEQ ID NO: 618049 - DNA, 15 bp, Homo sapiens
cagcctgagcgacaa

SEQ ID NO: 618050 - DNA, 15 bp, Homo sapiens
agcctgagcgacaag

SEQ ID NO: 618051 - DNA, 15 bp, Homo sapiens
gcctgagcgacaaga

SEQ ID NO: 618052 - DNA, 15 bp, Homo sapiens
cctgagcgacaagag

SEQ ID NO: 618053 - DNA, 15 bp, Homo sapiens
ctgagcgacaagagc

SEQ ID NO: 618054 - DNA, 15 bp, Homo sapiens
tgagcgacaagagca

SEQ ID NO: 618055 - DNA, 15 bp, Homo sapiens
gagcgacaagagcaa

SEQ ID NO: 618056 - DNA, 15 bp, Homo sapiens
agcgacaagagcaaa

SEQ ID NO: 618057 - DNA, 15 bp, Homo sapiens
gcgacaagagcaaaa

SEQ ID NO: 618058 - DNA, 15 bp, Homo sapiens
cgacaagagcaaaat

SEQ ID NO: 618059 - DNA, 15 bp, Homo sapiens
gacaagagcaaaatc

SEQ ID NO: 618060 - DNA, 15 bp, Homo sapiens
acaagagcaaaatcc

SEQ ID NO: 618061 - DNA, 15 bp, Homo sapiens
caagagcaaaatcca

SEQ ID NO: 618062 - DNA, 15 bp, Homo sapiens
aagagcaaaatccat

SEQ ID NO: 618063 - DNA, 15 bp, Homo sapiens
agagcaaaatccatc

SEQ ID NO: 618064 - DNA, 15 bp, Homo sapiens
gagcaaaatccatct

SEQ ID NO: 618065 - DNA, 15 bp, Homo sapiens
agcaaaatccatctc

SEQ ID NO: 618066 - DNA, 15 bp, Homo sapiens
gcaaaatccatctca

SEQ ID NO: 618067 - DNA, 15 bp, Homo sapiens
caaaatccatctcaa

SEQ ID NO: 618068 - DNA, 15 bp, Homo sapiens
aaaatccatctcaaa

SEQ ID NO: 618069 - DNA, 15 bp, Homo sapiens
aaatccatctcaaaa

SEQ ID NO: 618070 - DNA, 15 bp, Homo sapiens
aatccatctcaaaaa

SEQ ID NO: 618071 - DNA, 15 bp, Homo sapiens
atccatctcaaaaaa

SEQ ID NO: 618072 - DNA, 15 bp, Homo sapiens
aaaaaaaaaaaaagt

SEQ ID NO: 618073 - DNA, 15 bp, Homo sapiens
aaaaaaaaaaaagtc

SEQ ID NO: 618074 - DNA, 15 bp, Homo sapiens
aaaaaaaaaaagtct

SEQ ID NO: 618075 - DNA, 15 bp, Homo sapiens
aaaaaaaaaagtcta

SEQ ID NO: 618076 - DNA, 15 bp, Homo sapiens
aaaaaaaaagtctaa

SEQ ID NO: 618077 - DNA, 15 bp, Homo sapiens
aaaaaaaagtctaag

SEQ ID NO: 618078 - DNA, 15 bp, Homo sapiens
aaaaaaagtctaagg

SEQ ID NO: 618079 - DNA, 15 bp, Homo sapiens
aaaaaagtctaagga

SEQ ID NO: 618080 - DNA, 15 bp, Homo sapiens
aaaaagtctaaggaa

SEQ ID NO: 618081 - DNA, 15 bp, Homo sapiens
aaaagtctaaggaaa

SEQ ID NO: 618082 - DNA, 15 bp, Homo sapiens
aaagtctaaggaaaa

SEQ ID NO: 618083 - DNA, 15 bp, Homo sapiens
aagtctaaggaaaaa

SEQ ID NO: 618084 - DNA, 15 bp, Homo sapiens
agtctaaggaaaaag

SEQ ID NO: 618085 - DNA, 15 bp, Homo sapiens
gtctaaggaaaaagt

SEQ ID NO: 618086 - DNA, 15 bp, Homo sapiens
tctaaggaaaaagtc

SEQ ID NO: 618087 - DNA, 15 bp, Homo sapiens
ctaaggaaaaagtca

SEQ ID NO: 618088 - DNA, 15 bp, Homo sapiens
taaggaaaaagtcat

SEQ ID NO: 618089 - DNA, 15 bp, Homo sapiens
aaggaaaaagtcatg

SEQ ID NO: 618090 - DNA, 15 bp, Homo sapiens
aggaaaaagtcatga

SEQ ID NO: 618091 - DNA, 15 bp, Homo sapiens
ggaaaaagtcatgaa

SEQ ID NO: 618092 - DNA, 15 bp, Homo sapiens
gaaaaagtcatgaaa

SEQ ID NO: 618093 - DNA, 15 bp, Homo sapiens
aaaaagtcatgaaac

SEQ ID NO: 618094 - DNA, 15 bp, Homo sapiens
aaaagtcatgaaaca

SEQ ID NO: 618095 - DNA, 15 bp, Homo sapiens
aaagtcatgaaacaa

SEQ ID NO: 618096 - DNA, 15 bp, Homo sapiens
aagtcatgaaacaac

SEQ ID NO: 618097 - DNA, 15 bp, Homo sapiens
agtcatgaaacaaca

SEQ ID NO: 618098 - DNA, 15 bp, Homo sapiens
gtcatgaaacaacaa

SEQ ID NO: 618099 - DNA, 15 bp, Homo sapiens
tcatgaaacaacaaa

SEQ ID NO: 618100 - DNA, 15 bp, Homo sapiens
catgaaacaacaaag

SEQ ID NO: 618101 - DNA, 15 bp, Homo sapiens
atgaaacaacaaagc

SEQ ID NO: 618102 - DNA, 15 bp, Homo sapiens
tgaaacaacaaagca

SEQ ID NO: 618103 - DNA, 15 bp, Homo sapiens
gaaacaacaaagcag

SEQ ID NO: 618104 - DNA, 15 bp, Homo sapiens
aaacaacaaagcagg

SEQ ID NO: 618105 - DNA, 15 bp, Homo sapiens
aacaacaaagcaggc

SEQ ID NO: 618106 - DNA, 15 bp, Homo sapiens
acaacaaagcaggca

SEQ ID NO: 618107 - DNA, 15 bp, Homo sapiens
caacaaagcaggcaa

SEQ ID NO: 618108 - DNA, 15 bp, Homo sapiens
aacaaagcaggcaaa

SEQ ID NO: 618109 - DNA, 15 bp, Homo sapiens
acaaagcaggcaaat

SEQ ID NO: 618110 - DNA, 15 bp, Homo sapiens
caaagcaggcaaata

SEQ ID NO: 618111 - DNA, 15 bp, Homo sapiens
aaagcaggcaaatac

SEQ ID NO: 618112 - DNA, 15 bp, Homo sapiens
aagcaggcaaatact

SEQ ID NO: 618113 - DNA, 15 bp, Homo sapiens
agcaggcaaatactc

SEQ ID NO: 618114 - DNA, 15 bp, Homo sapiens
gcaggcaaatactcc

SEQ ID NO: 618115 - DNA, 15 bp, Homo sapiens
caggcaaatactcct

SEQ ID NO: 618116 - DNA, 15 bp, Homo sapiens
aggcaaatactcctc

SEQ ID NO: 618117 - DNA, 15 bp, Homo sapiens
ggcaaatactcctcc

SEQ ID NO: 618118 - DNA, 15 bp, Homo sapiens
gcaaatactcctcca

SEQ ID NO: 618119 - DNA, 15 bp, Homo sapiens
caaatactcctccat

SEQ ID NO: 618120 - DNA, 15 bp, Homo sapiens
aaatactcctccata

SEQ ID NO: 618121 - DNA, 15 bp, Homo sapiens
aatactcctccatag

SEQ ID NO: 618122 - DNA, 15 bp, Homo sapiens
atactcctccatagt

SEQ ID NO: 618123 - DNA, 15 bp, Homo sapiens
tactcctccatagta

SEQ ID NO: 618124 - DNA, 15 bp, Homo sapiens
actcctccatagtat

SEQ ID NO: 618125 - DNA, 15 bp, Homo sapiens
ctcctccatagtatc

SEQ ID NO: 618126 - DNA, 15 bp, Homo sapiens
tcctccatagtatct

SEQ ID NO: 618127 - DNA, 15 bp, Homo sapiens
cctccatagtatctg

SEQ ID NO: 618128 - DNA, 15 bp, Homo sapiens
ctccatagtatctga

SEQ ID NO: 618129 - DNA, 15 bp, Homo sapiens
tccatagtatctgac

SEQ ID NO: 618130 - DNA, 15 bp, Homo sapiens
ccatagtatctgact

SEQ ID NO: 618131 - DNA, 15 bp, Homo sapiens
catagtatctgactc

SEQ ID NO: 618132 - DNA, 15 bp, Homo sapiens
atagtatctgactcc

SEQ ID NO: 618133 - DNA, 15 bp, Homo sapiens
tagtatctgactccc

SEQ ID NO: 618134 - DNA, 15 bp, Homo sapiens
agtatctgactcccc

SEQ ID NO: 618135 - DNA, 15 bp, Homo sapiens
gtatctgactcccca

SEQ ID NO: 618136 - DNA, 15 bp, Homo sapiens
tatctgactccccag

SEQ ID NO: 618137 - DNA, 15 bp, Homo sapiens
atctgactccccagt

SEQ ID NO: 618138 - DNA, 15 bp, Homo sapiens
tctgactccccagta

SEQ ID NO: 618139 - DNA, 15 bp, Homo sapiens
ctgactccccagtag

SEQ ID NO: 618140 - DNA, 15 bp, Homo sapiens
tgactccccagtagt

SEQ ID NO: 618141 - DNA, 15 bp, Homo sapiens
gactccccagtagta

SEQ ID NO: 618142 - DNA, 15 bp, Homo sapiens
actccccagtagtag

SEQ ID NO: 618143 - DNA, 15 bp, Homo sapiens
ctccccagtagtagg

SEQ ID NO: 618144 - DNA, 15 bp, Homo sapiens
tccccagtagtaggc

SEQ ID NO: 618145 - DNA, 15 bp, Homo sapiens
ccccagtagtaggca

SEQ ID NO: 618146 - DNA, 15 bp, Homo sapiens
cccagtagtaggcat

SEQ ID NO: 618147 - DNA, 15 bp, Homo sapiens
ccagtagtaggcatt

SEQ ID NO: 618148 - DNA, 15 bp, Homo sapiens
cagtagtaggcattt

SEQ ID NO: 618149 - DNA, 15 bp, Homo sapiens
agtagtaggcatttt

SEQ ID NO: 618150 - DNA, 15 bp, Homo sapiens
gtagtaggcattttg

SEQ ID NO: 618151 - DNA, 15 bp, Homo sapiens
tagtaggcattttgc

SEQ ID NO: 618152 - DNA, 15 bp, Homo sapiens
agtaggcattttgca

SEQ ID NO: 618153 - DNA, 15 bp, Homo sapiens
gtaggcattttgcat

SEQ ID NO: 618154 - DNA, 15 bp, Homo sapiens
taggcattttgcatc

SEQ ID NO: 618155 - DNA, 15 bp, Homo sapiens
aggcattttgcatcc

SEQ ID NO: 618156 - DNA, 15 bp, Homo sapiens
ggcattttgcatcct

SEQ ID NO: 618157 - DNA, 15 bp, Homo sapiens
gcattttgcatccta

SEQ ID NO: 618158 - DNA, 15 bp, Homo sapiens
cattttgcatcctag

SEQ ID NO: 618159 - DNA, 15 bp, Homo sapiens
attttgcatcctaga

SEQ ID NO: 618160 - DNA, 15 bp, Homo sapiens
ttttgcatcctagat

SEQ ID NO: 618161 - DNA, 15 bp, Homo sapiens
tttgcatcctagatg

SEQ ID NO: 618162 - DNA, 15 bp, Homo sapiens
ttgcatcctagatgg

SEQ ID NO: 618163 - DNA, 15 bp, Homo sapiens
tgcatcctagatggc

SEQ ID NO: 618164 - DNA, 15 bp, Homo sapiens
gcatcctagatggct

SEQ ID NO: 618165 - DNA, 15 bp, Homo sapiens
catcctagatggctt

SEQ ID NO: 618166 - DNA, 15 bp, Homo sapiens
atcctagatggcttt

SEQ ID NO: 618167 - DNA, 15 bp, Homo sapiens
tcctagatggctttg

SEQ ID NO: 618168 - DNA, 15 bp, Homo sapiens
cctagatggctttga

SEQ ID NO: 618169 - DNA, 15 bp, Homo sapiens
ctagatggctttgag

SEQ ID NO: 618170 - DNA, 15 bp, Homo sapiens
tagatggctttgagt

SEQ ID NO: 618171 - DNA, 15 bp, Homo sapiens
agatggctttgagtg

SEQ ID NO: 618172 - DNA, 15 bp, Homo sapiens
gatggctttgagtga

SEQ ID NO: 618173 - DNA, 15 bp, Homo sapiens
atggctttgagtgac

SEQ ID NO: 618174 - DNA, 15 bp, Homo sapiens
tggctttgagtgaca

SEQ ID NO: 618175 - DNA, 15 bp, Homo sapiens
ggctttgagtgacaa

SEQ ID NO: 618176 - DNA, 15 bp, Homo sapiens
gctttgagtgacaaa

SEQ ID NO: 618177 - DNA, 15 bp, Homo sapiens
ctttgagtgacaaag

SEQ ID NO: 618178 - DNA, 15 bp, Homo sapiens
tttgagtgacaaagg

SEQ ID NO: 618179 - DNA, 15 bp, Homo sapiens
ttgagtgacaaagga

SEQ ID NO: 618180 - DNA, 15 bp, Homo sapiens
tgagtgacaaaggaa

SEQ ID NO: 618181 - DNA, 15 bp, Homo sapiens
gagtgacaaaggaat

SEQ ID NO: 618182 - DNA, 15 bp, Homo sapiens
agtgacaaaggaata

SEQ ID NO: 618183 - DNA, 15 bp, Homo sapiens
gtgacaaaggaataa

SEQ ID NO: 618184 - DNA, 15 bp, Homo sapiens
tgacaaaggaataac

SEQ ID NO: 618185 - DNA, 15 bp, Homo sapiens
gacaaaggaataaca

SEQ ID NO: 618186 - DNA, 15 bp, Homo sapiens
acaaaggaataacag

SEQ ID NO: 618187 - DNA, 15 bp, Homo sapiens
caaaggaataacaga

SEQ ID NO: 618188 - DNA, 15 bp, Homo sapiens
aaaggaataacagac

SEQ ID NO: 618189 - DNA, 15 bp, Homo sapiens
aaggaataacagact

SEQ ID NO: 618190 - DNA, 15 bp, Homo sapiens
aggaataacagactg

SEQ ID NO: 618191 - DNA, 15 bp, Homo sapiens
ggaataacagactga

SEQ ID NO: 618192 - DNA, 15 bp, Homo sapiens
gaataacagactgag

SEQ ID NO: 618193 - DNA, 15 bp, Homo sapiens
aataacagactgagt

SEQ ID NO: 618194 - DNA, 15 bp, Homo sapiens
ataacagactgagtt

SEQ ID NO: 618195 - DNA, 15 bp, Homo sapiens
taacagactgagtta

SEQ ID NO: 618196 - DNA, 15 bp, Homo sapiens
aacagactgagttag

SEQ ID NO: 618197 - DNA, 15 bp, Homo sapiens
acagactgagttagg

SEQ ID NO: 618198 - DNA, 15 bp, Homo sapiens
cagactgagttaggt

SEQ ID NO: 618199 - DNA, 15 bp, Homo sapiens
agactgagttaggtc

SEQ ID NO: 618200 - DNA, 15 bp, Homo sapiens
gactgagttaggtct

SEQ ID NO: 618201 - DNA, 15 bp, Homo sapiens
actgagttaggtcta

SEQ ID NO: 618202 - DNA, 15 bp, Homo sapiens
ctgagttaggtctag

SEQ ID NO: 618203 - DNA, 15 bp, Homo sapiens
tgagttaggtctaga

SEQ ID NO: 618204 - DNA, 15 bp, Homo sapiens
gagttaggtctagat

SEQ ID NO: 618205 - DNA, 15 bp, Homo sapiens
agttaggtctagatg

SEQ ID NO: 618206 - DNA, 15 bp, Homo sapiens
gttaggtctagatgg

SEQ ID NO: 618207 - DNA, 15 bp, Homo sapiens
ttaggtctagatggg

SEQ ID NO: 618208 - DNA, 15 bp, Homo sapiens
taggtctagatgggg

SEQ ID NO: 618209 - DNA, 15 bp, Homo sapiens
aggtctagatgggga

SEQ ID NO: 618210 - DNA, 15 bp, Homo sapiens
ggtctagatggggac

SEQ ID NO: 618211 - DNA, 15 bp, Homo sapiens
gtctagatggggaca

SEQ ID NO: 618212 - DNA, 15 bp, Homo sapiens
tctagatggggacac

SEQ ID NO: 618213 - DNA, 15 bp, Homo sapiens
ctagatggggacact

SEQ ID NO: 618214 - DNA, 15 bp, Homo sapiens
tagatggggacactt

SEQ ID NO: 618215 - DNA, 15 bp, Homo sapiens
agatggggacacttt

SEQ ID NO: 618216 - DNA, 15 bp, Homo sapiens
gatggggacactttg

SEQ ID NO: 618217 - DNA, 15 bp, Homo sapiens
atggggacactttgg

SEQ ID NO: 618218 - DNA, 15 bp, Homo sapiens
tggggacactttgga

SEQ ID NO: 618219 - DNA, 15 bp, Homo sapiens
ggggacactttggat

SEQ ID NO: 618220 - DNA, 15 bp, Homo sapiens
gggacactttggatg

SEQ ID NO: 618221 - DNA, 15 bp, Homo sapiens
ggacactttggatga

SEQ ID NO: 618222 - DNA, 15 bp, Homo sapiens
gacactttggatgaa

SEQ ID NO: 618223 - DNA, 15 bp, Homo sapiens
acactttggatgaat

SEQ ID NO: 618224 - DNA, 15 bp, Homo sapiens
cactttggatgaatg

SEQ ID NO: 618225 - DNA, 15 bp, Homo sapiens
actttggatgaatga

SEQ ID NO: 618226 - DNA, 15 bp, Homo sapiens
ctttggatgaatgag

SEQ ID NO: 618227 - DNA, 15 bp, Homo sapiens
tttggatgaatgagg

SEQ ID NO: 618228 - DNA, 15 bp, Homo sapiens
ttggatgaatgagga

SEQ ID NO: 618229 - DNA, 15 bp, Homo sapiens
tggatgaatgaggat

SEQ ID NO: 618230 - DNA, 15 bp, Homo sapiens
ggatgaatgaggatt

SEQ ID NO: 618231 - DNA, 15 bp, Homo sapiens
gatgaatgaggattc

SEQ ID NO: 618232 - DNA, 15 bp, Homo sapiens
atgaatgaggattct

SEQ ID NO: 618233 - DNA, 15 bp, Homo sapiens
tgaatgaggattctt

SEQ ID NO: 618234 - DNA, 15 bp, Homo sapiens
gaatgaggattctta

SEQ ID NO: 618235 - DNA, 15 bp, Homo sapiens
aatgaggattcttac

SEQ ID NO: 618236 - DNA, 15 bp, Homo sapiens
atgaggattcttacg

SEQ ID NO: 618237 - DNA, 15 bp, Homo sapiens
tgaggattcttacgg

SEQ ID NO: 618238 - DNA, 15 bp, Homo sapiens
gaggattcttacgga

SEQ ID NO: 618239 - DNA, 15 bp, Homo sapiens
aggattcttacggag

SEQ ID NO: 618240 - DNA, 15 bp, Homo sapiens
ggattcttacggagg

SEQ ID NO: 618241 - DNA, 15 bp, Homo sapiens
gattcttacggaggt

SEQ ID NO: 618242 - DNA, 15 bp, Homo sapiens
attcttacggaggtc

SEQ ID NO: 618243 - DNA, 15 bp, Homo sapiens
ttcttacggaggtca

SEQ ID NO: 618244 - DNA, 15 bp, Homo sapiens
tcttacggaggtcag

SEQ ID NO: 618245 - DNA, 15 bp, Homo sapiens
cttacggaggtcagg

SEQ ID NO: 618246 - DNA, 15 bp, Homo sapiens
ttacggaggtcaggt

SEQ ID NO: 618247 - DNA, 15 bp, Homo sapiens
tacggaggtcaggtt

SEQ ID NO: 618248 - DNA, 15 bp, Homo sapiens
acggaggtcaggttg

SEQ ID NO: 618249 - DNA, 15 bp, Homo sapiens
cggaggtcaggttgg

SEQ ID NO: 618250 - DNA, 15 bp, Homo sapiens
ggaggtcaggttggt

SEQ ID NO: 618251 - DNA, 15 bp, Homo sapiens
gaggtcaggttggta

SEQ ID NO: 618252 - DNA, 15 bp, Homo sapiens
aggtcaggttggtag

SEQ ID NO: 618253 - DNA, 15 bp, Homo sapiens
ggtcaggttggtagc

SEQ ID NO: 618254 - DNA, 15 bp, Homo sapiens
gtcaggttggtagct

SEQ ID NO: 618255 - DNA, 15 bp, Homo sapiens
tcaggttggtagctt

SEQ ID NO: 618256 - DNA, 15 bp, Homo sapiens
caggttggtagcttc

SEQ ID NO: 618257 - DNA, 15 bp, Homo sapiens
aggttggtagcttca

SEQ ID NO: 618258 - DNA, 15 bp, Homo sapiens
ggttggtagcttcat

SEQ ID NO: 618259 - DNA, 15 bp, Homo sapiens
gttggtagcttcatc

SEQ ID NO: 618260 - DNA, 15 bp, Homo sapiens
ttggtagcttcatcc

SEQ ID NO: 618261 - DNA, 15 bp, Homo sapiens
tggtagcttcatccc

SEQ ID NO: 618262 - DNA, 15 bp, Homo sapiens
ggtagcttcatccct

SEQ ID NO: 618263 - DNA, 15 bp, Homo sapiens
gtagcttcatccctc

SEQ ID NO: 618264 - DNA, 15 bp, Homo sapiens
tagcttcatccctca

SEQ ID NO: 618265 - DNA, 15 bp, Homo sapiens
agcttcatccctcag

SEQ ID NO: 618266 - DNA, 15 bp, Homo sapiens
gcttcatccctcagc

SEQ ID NO: 618267 - DNA, 15 bp, Homo sapiens
cttcatccctcagct

SEQ ID NO: 618268 - DNA, 15 bp, Homo sapiens
ttcatccctcagctc

SEQ ID NO: 618269 - DNA, 15 bp, Homo sapiens
tcatccctcagctcc

SEQ ID NO: 618270 - DNA, 15 bp, Homo sapiens
catccctcagctcct

SEQ ID NO: 618271 - DNA, 15 bp, Homo sapiens
atccctcagctcctc

SEQ ID NO: 618272 - DNA, 15 bp, Homo sapiens
tccctcagctcctca

SEQ ID NO: 618273 - DNA, 15 bp, Homo sapiens
ccctcagctcctcat

SEQ ID NO: 618274 - DNA, 15 bp, Homo sapiens
cctcagctcctcatg

SEQ ID NO: 618275 - DNA, 15 bp, Homo sapiens
ctcagctcctcatgc

SEQ ID NO: 618276 - DNA, 15 bp, Homo sapiens
tcagctcctcatgct

SEQ ID NO: 618277 - DNA, 15 bp, Homo sapiens
cagctcctcatgctg

SEQ ID NO: 618278 - DNA, 15 bp, Homo sapiens
agctcctcatgctgt

SEQ ID NO: 618279 - DNA, 15 bp, Homo sapiens
gctcctcatgctgta

SEQ ID NO: 618280 - DNA, 15 bp, Homo sapiens
ctcctcatgctgtat

SEQ ID NO: 618281 - DNA, 15 bp, Homo sapiens
tcctcatgctgtatc

SEQ ID NO: 618282 - DNA, 15 bp, Homo sapiens
cctcatgctgtatcc

SEQ ID NO: 618283 - DNA, 15 bp, Homo sapiens
ctcatgctgtatccc

SEQ ID NO: 618284 - DNA, 15 bp, Homo sapiens
tcatgctgtatcccc

SEQ ID NO: 618285 - DNA, 15 bp, Homo sapiens
catgctgtatcccca

SEQ ID NO: 618286 - DNA, 15 bp, Homo sapiens
atgctgtatccccag

SEQ ID NO: 618287 - DNA, 15 bp, Homo sapiens
tgctgtatccccagt

SEQ ID NO: 618288 - DNA, 15 bp, Homo sapiens
gctgtatccccagtc

SEQ ID NO: 618289 - DNA, 15 bp, Homo sapiens
ctgtatccccagtct

SEQ ID NO: 618290 - DNA, 15 bp, Homo sapiens
tgtatccccagtctc

SEQ ID NO: 618291 - DNA, 15 bp, Homo sapiens
gtatccccagtctct

SEQ ID NO: 618292 - DNA, 15 bp, Homo sapiens
tatccccagtctctc

SEQ ID NO: 618293 - DNA, 15 bp, Homo sapiens
atccccagtctctcg

SEQ ID NO: 618294 - DNA, 15 bp, Homo sapiens
tccccagtctctcgg

SEQ ID NO: 618295 - DNA, 15 bp, Homo sapiens
ccccagtctctcggc

SEQ ID NO: 618296 - DNA, 15 bp, Homo sapiens
cccagtctctcggcc

SEQ ID NO: 618297 - DNA, 15 bp, Homo sapiens
ccagtctctcggcct

SEQ ID NO: 618298 - DNA, 15 bp, Homo sapiens
cagtctctcggcctg

SEQ ID NO: 618299 - DNA, 15 bp, Homo sapiens
agtctctcggcctgc

SEQ ID NO: 618300 - DNA, 15 bp, Homo sapiens
gtctctcggcctgcc

SEQ ID NO: 618301 - DNA, 15 bp, Homo sapiens
tctctcggcctgcca

SEQ ID NO: 618302 - DNA, 15 bp, Homo sapiens
ctctcggcctgccat

SEQ ID NO: 618303 - DNA, 15 bp, Homo sapiens
tctcggcctgccatg

SEQ ID NO: 618304 - DNA, 15 bp, Homo sapiens
ctcggcctgccatgt

SEQ ID NO: 618305 - DNA, 15 bp, Homo sapiens
tcggcctgccatgtc

SEQ ID NO: 618306 - DNA, 15 bp, Homo sapiens
cggcctgccatgtca

SEQ ID NO: 618307 - DNA, 15 bp, Homo sapiens
ggcctgccatgtcat

SEQ ID NO: 618308 - DNA, 15 bp, Homo sapiens
gcctgccatgtcatc

SEQ ID NO: 618309 - DNA, 15 bp, Homo sapiens
cctgccatgtcatca

SEQ ID NO: 618310 - DNA, 15 bp, Homo sapiens
ctgccatgtcatcat

SEQ ID NO: 618311 - DNA, 15 bp, Homo sapiens
tgccatgtcatcatc

SEQ ID NO: 618312 - DNA, 15 bp, Homo sapiens
gccatgtcatcatcc

SEQ ID NO: 618313 - DNA, 15 bp, Homo sapiens
ccatgtcatcatcct

SEQ ID NO: 618314 - DNA, 15 bp, Homo sapiens
catgtcatcatcctc

SEQ ID NO: 618315 - DNA, 15 bp, Homo sapiens
atgtcatcatcctca

SEQ ID NO: 618316 - DNA, 15 bp, Homo sapiens
tgtcatcatcctcat

SEQ ID NO: 618317 - DNA, 15 bp, Homo sapiens
gtcatcatcctcatc

SEQ ID NO: 618318 - DNA, 15 bp, Homo sapiens
tcatcatcctcatct

SEQ ID NO: 618319 - DNA, 15 bp, Homo sapiens
catcatcctcatctc

SEQ ID NO: 618320 - DNA, 15 bp, Homo sapiens
atcatcctcatctcc

SEQ ID NO: 618321 - DNA, 15 bp, Homo sapiens
tcatcctcatctcct

SEQ ID NO: 618322 - DNA, 15 bp, Homo sapiens
catcctcatctcctc

SEQ ID NO: 618323 - DNA, 15 bp, Homo sapiens
atcctcatctcctcc

SEQ ID NO: 618324 - DNA, 15 bp, Homo sapiens
tcctcatctcctcct

SEQ ID NO: 618325 - DNA, 15 bp, Homo sapiens
cctcatctcctcctg

SEQ ID NO: 618326 - DNA, 15 bp, Homo sapiens
ctcatctcctcctgt

SEQ ID NO: 618327 - DNA, 15 bp, Homo sapiens
tcatctcctcctgtc

SEQ ID NO: 618328 - DNA, 15 bp, Homo sapiens
catctcctcctgtca

SEQ ID NO: 618329 - DNA, 15 bp, Homo sapiens
atctcctcctgtcat

SEQ ID NO: 618330 - DNA, 15 bp, Homo sapiens
tctcctcctgtcatc

SEQ ID NO: 618331 - DNA, 15 bp, Homo sapiens
ctcctcctgtcatct

SEQ ID NO: 618332 - DNA, 15 bp, Homo sapiens
tcctcctgtcatctc

SEQ ID NO: 618333 - DNA, 15 bp, Homo sapiens
cctcctgtcatctcc

SEQ ID NO: 618334 - DNA, 15 bp, Homo sapiens
ctcctgtcatctcca

SEQ ID NO: 618335 - DNA, 15 bp, Homo sapiens
tcctgtcatctccac

SEQ ID NO: 618336 - DNA, 15 bp, Homo sapiens
cctgtcatctccacc

SEQ ID NO: 618337 - DNA, 15 bp, Homo sapiens
ctgtcatctccacca

SEQ ID NO: 618338 - DNA, 15 bp, Homo sapiens
tgtcatctccaccag

SEQ ID NO: 618339 - DNA, 15 bp, Homo sapiens
gtcatctccaccagg

SEQ ID NO: 618340 - DNA, 15 bp, Homo sapiens
tcatctccaccaggc

SEQ ID NO: 618341 - DNA, 15 bp, Homo sapiens
catctccaccaggcc

SEQ ID NO: 618342 - DNA, 15 bp, Homo sapiens
atctccaccaggcct

SEQ ID NO: 618343 - DNA, 15 bp, Homo sapiens
tctccaccaggcctc

SEQ ID NO: 618344 - DNA, 15 bp, Homo sapiens
ctccaccaggcctct

SEQ ID NO: 618345 - DNA, 15 bp, Homo sapiens
tccaccaggcctctg

SEQ ID NO: 618346 - DNA, 15 bp, Homo sapiens
ccaccaggcctctga

SEQ ID NO: 618347 - DNA, 15 bp, Homo sapiens
caccaggcctctgat

SEQ ID NO: 618348 - DNA, 15 bp, Homo sapiens
accaggcctctgatc

SEQ ID NO: 618349 - DNA, 15 bp, Homo sapiens
ccaggcctctgatcc

SEQ ID NO: 618350 - DNA, 15 bp, Homo sapiens
caggcctctgatcca

SEQ ID NO: 618351 - DNA, 15 bp, Homo sapiens
aggcctctgatccat

SEQ ID NO: 618352 - DNA, 15 bp, Homo sapiens
ggcctctgatccatc

SEQ ID NO: 618353 - DNA, 15 bp, Homo sapiens
gcctctgatccatct

SEQ ID NO: 618354 - DNA, 15 bp, Homo sapiens
cctctgatccatctc

SEQ ID NO: 618355 - DNA, 15 bp, Homo sapiens
ctctgatccatctct

SEQ ID NO: 618356 - DNA, 15 bp, Homo sapiens
tctgatccatctctg

SEQ ID NO: 618357 - DNA, 15 bp, Homo sapiens
ctgatccatctctgt

SEQ ID NO: 618358 - DNA, 15 bp, Homo sapiens
tgatccatctctgtc

SEQ ID NO: 618359 - DNA, 15 bp, Homo sapiens
gatccatctctgtct

SEQ ID NO: 618360 - DNA, 15 bp, Homo sapiens
atccatctctgtctg

SEQ ID NO: 618361 - DNA, 15 bp, Homo sapiens
tccatctctgtctgc

SEQ ID NO: 618362 - DNA, 15 bp, Homo sapiens
ccatctctgtctgca

SEQ ID NO: 618363 - DNA, 15 bp, Homo sapiens
catctctgtctgcat

SEQ ID NO: 618364 - DNA, 15 bp, Homo sapiens
atctctgtctgcatg

SEQ ID NO: 618365 - DNA, 15 bp, Homo sapiens
tctctgtctgcatga

SEQ ID NO: 618366 - DNA, 15 bp, Homo sapiens
ctctgtctgcatgag

SEQ ID NO: 618367 - DNA, 15 bp, Homo sapiens
tctgtctgcatgagt

SEQ ID NO: 618368 - DNA, 15 bp, Homo sapiens
ctgtctgcatgagtg

SEQ ID NO: 618369 - DNA, 15 bp, Homo sapiens
tgtctgcatgagtga

SEQ ID NO: 618370 - DNA, 15 bp, Homo sapiens
gtctgcatgagtgac

SEQ ID NO: 618371 - DNA, 15 bp, Homo sapiens
tctgcatgagtgaca

SEQ ID NO: 618372 - DNA, 15 bp, Homo sapiens
ctgcatgagtgacag

SEQ ID NO: 618373 - DNA, 15 bp, Homo sapiens
tgcatgagtgacagc

SEQ ID NO: 618374 - DNA, 15 bp, Homo sapiens
gcatgagtgacagct

SEQ ID NO: 618375 - DNA, 15 bp, Homo sapiens
catgagtgacagctg

SEQ ID NO: 618376 - DNA, 15 bp, Homo sapiens
atgagtgacagctgg

SEQ ID NO: 618377 - DNA, 15 bp, Homo sapiens
tgagtgacagctggc

SEQ ID NO: 618378 - DNA, 15 bp, Homo sapiens
gagtgacagctggca

SEQ ID NO: 618379 - DNA, 15 bp, Homo sapiens
agtgacagctggcag

SEQ ID NO: 618380 - DNA, 15 bp, Homo sapiens
gtgacagctggcaga

SEQ ID NO: 618381 - DNA, 15 bp, Homo sapiens
tgacagctggcagag

SEQ ID NO: 618382 - DNA, 15 bp, Homo sapiens
gacagctggcagagt

SEQ ID NO: 618383 - DNA, 15 bp, Homo sapiens
acagctggcagagtc

SEQ ID NO: 618384 - DNA, 15 bp, Homo sapiens
cagctggcagagtcc

SEQ ID NO: 618385 - DNA, 15 bp, Homo sapiens
agctggcagagtcct

SEQ ID NO: 618386 - DNA, 15 bp, Homo sapiens
gctggcagagtcctt

SEQ ID NO: 618387 - DNA, 15 bp, Homo sapiens
ctggcagagtcctta

SEQ ID NO: 618388 - DNA, 15 bp, Homo sapiens
tggcagagtccttaa

SEQ ID NO: 618389 - DNA, 15 bp, Homo sapiens
ggcagagtccttaat

SEQ ID NO: 618390 - DNA, 15 bp, Homo sapiens
gcagagtccttaatg

SEQ ID NO: 618391 - DNA, 15 bp, Homo sapiens
cagagtccttaatgt

SEQ ID NO: 618392 - DNA, 15 bp, Homo sapiens
agagtccttaatgtt

SEQ ID NO: 618393 - DNA, 15 bp, Homo sapiens
gagtccttaatgttt

SEQ ID NO: 618394 - DNA, 15 bp, Homo sapiens
agtccttaatgttta

SEQ ID NO: 618395 - DNA, 15 bp, Homo sapiens
gtccttaatgtttat

SEQ ID NO: 618396 - DNA, 15 bp, Homo sapiens
tccttaatgtttatc

SEQ ID NO: 618397 - DNA, 15 bp, Homo sapiens
ccttaatgtttatca

SEQ ID NO: 618398 - DNA, 15 bp, Homo sapiens
cttaatgtttatcaa

SEQ ID NO: 618399 - DNA, 15 bp, Homo sapiens
ttaatgtttatcaaa

SEQ ID NO: 618400 - DNA, 15 bp, Homo sapiens
taatgtttatcaaat

SEQ ID NO: 618401 - DNA, 15 bp, Homo sapiens
aatgtttatcaaata

SEQ ID NO: 618402 - DNA, 15 bp, Homo sapiens
atgtttatcaaatac

SEQ ID NO: 618403 - DNA, 15 bp, Homo sapiens
tgtttatcaaataca

SEQ ID NO: 618404 - DNA, 15 bp, Homo sapiens
gtttatcaaatacaa

SEQ ID NO: 618405 - DNA, 15 bp, Homo sapiens
tttatcaaatacaac

SEQ ID NO: 618406 - DNA, 15 bp, Homo sapiens
ttatcaaatacaact

SEQ ID NO: 618407 - DNA, 15 bp, Homo sapiens
tatcaaatacaactc

SEQ ID NO: 618408 - DNA, 15 bp, Homo sapiens
atcaaatacaactca

SEQ ID NO: 618409 - DNA, 15 bp, Homo sapiens
tcaaatacaactcag

SEQ ID NO: 618410 - DNA, 15 bp, Homo sapiens
caaatacaactcaga

SEQ ID NO: 618411 - DNA, 15 bp, Homo sapiens
aaatacaactcagac

SEQ ID NO: 618412 - DNA, 15 bp, Homo sapiens
aatacaactcagacg

SEQ ID NO: 618413 - DNA, 15 bp, Homo sapiens
atacaactcagacgt

SEQ ID NO: 618414 - DNA, 15 bp, Homo sapiens
tacaactcagacgtc

SEQ ID NO: 618415 - DNA, 15 bp, Homo sapiens
acaactcagacgtca

SEQ ID NO: 618416 - DNA, 15 bp, Homo sapiens
caactcagacgtcag

SEQ ID NO: 618417 - DNA, 15 bp, Homo sapiens
aactcagacgtcagt

SEQ ID NO: 618418 - DNA, 15 bp, Homo sapiens
actcagacgtcagtc

SEQ ID NO: 618419 - DNA, 15 bp, Homo sapiens
ctcagacgtcagtct

SEQ ID NO: 618420 - DNA, 15 bp, Homo sapiens
tcagacgtcagtctc

SEQ ID NO: 618421 - DNA, 15 bp, Homo sapiens
cagacgtcagtctcc

SEQ ID NO: 618422 - DNA, 15 bp, Homo sapiens
agacgtcagtctcct

SEQ ID NO: 618423 - DNA, 15 bp, Homo sapiens
gacgtcagtctcctg

SEQ ID NO: 618424 - DNA, 15 bp, Homo sapiens
acgtcagtctcctgg

SEQ ID NO: 618425 - DNA, 15 bp, Homo sapiens
cgtcagtctcctggc

SEQ ID NO: 618426 - DNA, 15 bp, Homo sapiens
gtcagtctcctggcc

SEQ ID NO: 618427 - DNA, 15 bp, Homo sapiens
tcagtctcctggccc

SEQ ID NO: 618428 - DNA, 15 bp, Homo sapiens
cagtctcctggcccc

SEQ ID NO: 618429 - DNA, 15 bp, Homo sapiens
agtctcctggcccct

SEQ ID NO: 618430 - DNA, 15 bp, Homo sapiens
gtctcctggcccctt

SEQ ID NO: 618431 - DNA, 15 bp, Homo sapiens
tctcctggccccttt

SEQ ID NO: 618432 - DNA, 15 bp, Homo sapiens
ctcctggcccctttg

SEQ ID NO: 618433 - DNA, 15 bp, Homo sapiens
tcctggcccctttga

SEQ ID NO: 618434 - DNA, 15 bp, Homo sapiens
cctggcccctttgag

SEQ ID NO: 618435 - DNA, 15 bp, Homo sapiens
ctggcccctttgaga

SEQ ID NO: 618436 - DNA, 15 bp, Homo sapiens
tggcccctttgagat

SEQ ID NO: 618437 - DNA, 15 bp, Homo sapiens
ggcccctttgagatc

SEQ ID NO: 618438 - DNA, 15 bp, Homo sapiens
gcccctttgagatca

SEQ ID NO: 618439 - DNA, 15 bp, Homo sapiens
cccctttgagatcaa

SEQ ID NO: 618440 - DNA, 15 bp, Homo sapiens
ccctttgagatcaac

SEQ ID NO: 618441 - DNA, 15 bp, Homo sapiens
cctttgagatcaaca

SEQ ID NO: 618442 - DNA, 15 bp, Homo sapiens
ctttgagatcaacat

SEQ ID NO: 618443 - DNA, 15 bp, Homo sapiens
tttgagatcaacata

SEQ ID NO: 618444 - DNA, 15 bp, Homo sapiens
ttgagatcaacataa

SEQ ID NO: 618445 - DNA, 15 bp, Homo sapiens
tgagatcaacataaa

SEQ ID NO: 618446 - DNA, 15 bp, Homo sapiens
gagatcaacataaaa

SEQ ID NO: 618447 - DNA, 15 bp, Homo sapiens
agatcaacataaaat

SEQ ID NO: 618448 - DNA, 15 bp, Homo sapiens
gatcaacataaaatc

SEQ ID NO: 618449 - DNA, 15 bp, Homo sapiens
atcaacataaaatca

SEQ ID NO: 618450 - DNA, 15 bp, Homo sapiens
tcaacataaaatcat

SEQ ID NO: 618451 - DNA, 15 bp, Homo sapiens
caacataaaatcatt

SEQ ID NO: 618452 - DNA, 15 bp, Homo sapiens
aacataaaatcattt

SEQ ID NO: 618453 - DNA, 15 bp, Homo sapiens
acataaaatcatttt

SEQ ID NO: 618454 - DNA, 15 bp, Homo sapiens
cataaaatcattttg

SEQ ID NO: 618455 - DNA, 15 bp, Homo sapiens
ataaaatcattttga

SEQ ID NO: 618456 - DNA, 15 bp, Homo sapiens
taaaatcattttgaa

SEQ ID NO: 618457 - DNA, 15 bp, Homo sapiens
aaaatcattttgaac

SEQ ID NO: 618458 - DNA, 15 bp, Homo sapiens
aaatcattttgaacc

SEQ ID NO: 618459 - DNA, 15 bp, Homo sapiens
aatcattttgaaccc

SEQ ID NO: 618460 - DNA, 15 bp, Homo sapiens
atcattttgaaccct

SEQ ID NO: 618461 - DNA, 15 bp, Homo sapiens
tcattttgaaccctt

SEQ ID NO: 618462 - DNA, 15 bp, Homo sapiens
cattttgaaccctta

SEQ ID NO: 618463 - DNA, 15 bp, Homo sapiens
attttgaacccttat

SEQ ID NO: 618464 - DNA, 15 bp, Homo sapiens
ttttgaacccttatt

SEQ ID NO: 618465 - DNA, 15 bp, Homo sapiens
tttgaacccttattt

SEQ ID NO: 618466 - DNA, 15 bp, Homo sapiens
ttgaacccttattta

SEQ ID NO: 618467 - DNA, 15 bp, Homo sapiens
tgaacccttatttag

SEQ ID NO: 618468 - DNA, 15 bp, Homo sapiens
gaacccttatttagt

SEQ ID NO: 618469 - DNA, 15 bp, Homo sapiens
aacccttatttagtg

SEQ ID NO: 618470 - DNA, 15 bp, Homo sapiens
acccttatttagtgg

SEQ ID NO: 618471 - DNA, 15 bp, Homo sapiens
cccttatttagtggt

SEQ ID NO: 618472 - DNA, 15 bp, Homo sapiens
ccttatttagtggtc

SEQ ID NO: 618473 - DNA, 15 bp, Homo sapiens
cttatttagtggtct

SEQ ID NO: 618474 - DNA, 15 bp, Homo sapiens
ttatttagtggtcta

SEQ ID NO: 618475 - DNA, 15 bp, Homo sapiens
tatttagtggtctat

SEQ ID NO: 618476 - DNA, 15 bp, Homo sapiens
atttagtggtctatg

SEQ ID NO: 618477 - DNA, 15 bp, Homo sapiens
tttagtggtctatgg

SEQ ID NO: 618478 - DNA, 15 bp, Homo sapiens
ttagtggtctatggg

SEQ ID NO: 618479 - DNA, 15 bp, Homo sapiens
tagtggtctatgggc

SEQ ID NO: 618480 - DNA, 15 bp, Homo sapiens
agtggtctatgggct

SEQ ID NO: 618481 - DNA, 15 bp, Homo sapiens
gtggtctatgggctt

SEQ ID NO: 618482 - DNA, 15 bp, Homo sapiens
tggtctatgggcttt

SEQ ID NO: 618483 - DNA, 15 bp, Homo sapiens
ggtctatgggctttg

SEQ ID NO: 618484 - DNA, 15 bp, Homo sapiens
gtctatgggctttga

SEQ ID NO: 618485 - DNA, 15 bp, Homo sapiens
tctatgggctttgaa

SEQ ID NO: 618486 - DNA, 15 bp, Homo sapiens
ctatgggctttgaaa

SEQ ID NO: 618487 - DNA, 15 bp, Homo sapiens
tatgggctttgaaaa

SEQ ID NO: 618488 - DNA, 15 bp, Homo sapiens
atgggctttgaaaac

SEQ ID NO: 618489 - DNA, 15 bp, Homo sapiens
tgggctttgaaaaca

SEQ ID NO: 618490 - DNA, 15 bp, Homo sapiens
gggctttgaaaacat

SEQ ID NO: 618491 - DNA, 15 bp, Homo sapiens
ggctttgaaaacatg

SEQ ID NO: 618492 - DNA, 15 bp, Homo sapiens
gctttgaaaacatgg

SEQ ID NO: 618493 - DNA, 15 bp, Homo sapiens
ctttgaaaacatggg

SEQ ID NO: 618494 - DNA, 15 bp, Homo sapiens
tttgaaaacatgggg

SEQ ID NO: 618495 - DNA, 15 bp, Homo sapiens
ttgaaaacatgggga

SEQ ID NO: 618496 - DNA, 15 bp, Homo sapiens
tgaaaacatggggac

SEQ ID NO: 618497 - DNA, 15 bp, Homo sapiens
gaaaacatggggacc

SEQ ID NO: 618498 - DNA, 15 bp, Homo sapiens
aaaacatggggacca

SEQ ID NO: 618499 - DNA, 15 bp, Homo sapiens
aaacatggggaccaa

SEQ ID NO: 618500 - DNA, 15 bp, Homo sapiens
aacatggggaccaaa

SEQ ID NO: 618501 - DNA, 15 bp, Homo sapiens
acatggggaccaaaa

SEQ ID NO: 618502 - DNA, 15 bp, Homo sapiens
catggggaccaaaat

SEQ ID NO: 618503 - DNA, 15 bp, Homo sapiens
atggggaccaaaatt

SEQ ID NO: 618504 - DNA, 15 bp, Homo sapiens
tggggaccaaaattc

SEQ ID NO: 618505 - DNA, 15 bp, Homo sapiens
ggggaccaaaattcc

SEQ ID NO: 618506 - DNA, 15 bp, Homo sapiens
gggaccaaaattcct

SEQ ID NO: 618507 - DNA, 15 bp, Homo sapiens
ggaccaaaattcctg

SEQ ID NO: 618508 - DNA, 15 bp, Homo sapiens
gaccaaaattcctgt

SEQ ID NO: 618509 - DNA, 15 bp, Homo sapiens
accaaaattcctgtg

SEQ ID NO: 618510 - DNA, 15 bp, Homo sapiens
ccaaaattcctgtgg

SEQ ID NO: 618511 - DNA, 15 bp, Homo sapiens
caaaattcctgtgga

SEQ ID NO: 618512 - DNA, 15 bp, Homo sapiens
aaaattcctgtggat

SEQ ID NO: 618513 - DNA, 15 bp, Homo sapiens
aaattcctgtggatt

SEQ ID NO: 618514 - DNA, 15 bp, Homo sapiens
aattcctgtggattc

SEQ ID NO: 618515 - DNA, 15 bp, Homo sapiens
attcctgtggattct

SEQ ID NO: 618516 - DNA, 15 bp, Homo sapiens
ttcctgtggattcta

SEQ ID NO: 618517 - DNA, 15 bp, Homo sapiens
tcctgtggattctag

SEQ ID NO: 618518 - DNA, 15 bp, Homo sapiens
cctgtggattctaga

SEQ ID NO: 618519 - DNA, 15 bp, Homo sapiens
ctgtggattctagaa

SEQ ID NO: 618520 - DNA, 15 bp, Homo sapiens
tgtggattctagaag

SEQ ID NO: 618521 - DNA, 15 bp, Homo sapiens
gtggattctagaagt

SEQ ID NO: 618522 - DNA, 15 bp, Homo sapiens
tggattctagaagtc

SEQ ID NO: 618523 - DNA, 15 bp, Homo sapiens
ggattctagaagtct

SEQ ID NO: 618524 - DNA, 15 bp, Homo sapiens
gattctagaagtctc

SEQ ID NO: 618525 - DNA, 15 bp, Homo sapiens
attctagaagtctct

SEQ ID NO: 618526 - DNA, 15 bp, Homo sapiens
ttctagaagtctctc

SEQ ID NO: 618527 - DNA, 15 bp, Homo sapiens
tctagaagtctctct

SEQ ID NO: 618528 - DNA, 15 bp, Homo sapiens
ctagaagtctctctt

SEQ ID NO: 618529 - DNA, 15 bp, Homo sapiens
tagaagtctctcttc

SEQ ID NO: 618530 - DNA, 15 bp, Homo sapiens
agaagtctctcttct

SEQ ID NO: 618531 - DNA, 15 bp, Homo sapiens
gaagtctctcttcta

SEQ ID NO: 618532 - DNA, 15 bp, Homo sapiens
aagtctctcttctac

SEQ ID NO: 618533 - DNA, 15 bp, Homo sapiens
agtctctcttctaca

SEQ ID NO: 618534 - DNA, 15 bp, Homo sapiens
gtctctcttctacat

SEQ ID NO: 618535 - DNA, 15 bp, Homo sapiens
tctctcttctacatg

SEQ ID NO: 618536 - DNA, 15 bp, Homo sapiens
ctctcttctacatgt

SEQ ID NO: 618537 - DNA, 15 bp, Homo sapiens
tctcttctacatgtg

SEQ ID NO: 618538 - DNA, 15 bp, Homo sapiens
ctcttctacatgtgt

SEQ ID NO: 618539 - DNA, 15 bp, Homo sapiens
tcttctacatgtgtc

SEQ ID NO: 618540 - DNA, 15 bp, Homo sapiens
cttctacatgtgtca

SEQ ID NO: 618541 - DNA, 15 bp, Homo sapiens
ttctacatgtgtcag

SEQ ID NO: 618542 - DNA, 15 bp, Homo sapiens
tctacatgtgtcagc

SEQ ID NO: 618543 - DNA, 15 bp, Homo sapiens
ctacatgtgtcagcc

SEQ ID NO: 618544 - DNA, 15 bp, Homo sapiens
tacatgtgtcagcct

SEQ ID NO: 618545 - DNA, 15 bp, Homo sapiens
acatgtgtcagcctg

SEQ ID NO: 618546 - DNA, 15 bp, Homo sapiens
catgtgtcagcctgg

SEQ ID NO: 618547 - DNA, 15 bp, Homo sapiens
atgtgtcagcctggg

SEQ ID NO: 618548 - DNA, 15 bp, Homo sapiens
tgtgtcagcctgggc

SEQ ID NO: 618549 - DNA, 15 bp, Homo sapiens
gtgtcagcctgggca

SEQ ID NO: 618550 - DNA, 15 bp, Homo sapiens
tgtcagcctgggcac

SEQ ID NO: 618551 - DNA, 15 bp, Homo sapiens
gtcagcctgggcacc

SEQ ID NO: 618552 - DNA, 15 bp, Homo sapiens
tcagcctgggcacca

SEQ ID NO: 618553 - DNA, 15 bp, Homo sapiens
cagcctgggcaccaa

SEQ ID NO: 618554 - DNA, 15 bp, Homo sapiens
agcctgggcaccaac

SEQ ID NO: 618555 - DNA, 15 bp, Homo sapiens
gcctgggcaccaact

SEQ ID NO: 618556 - DNA, 15 bp, Homo sapiens
cctgggcaccaacta

SEQ ID NO: 618557 - DNA, 15 bp, Homo sapiens
ctgggcaccaactag

SEQ ID NO: 618558 - DNA, 15 bp, Homo sapiens
tgggcaccaactagc

SEQ ID NO: 618559 - DNA, 15 bp, Homo sapiens
gggcaccaactagct

SEQ ID NO: 618560 - DNA, 15 bp, Homo sapiens
ggcaccaactagctc

SEQ ID NO: 618561 - DNA, 15 bp, Homo sapiens
gcaccaactagctcc

SEQ ID NO: 618562 - DNA, 15 bp, Homo sapiens
caccaactagctcct

SEQ ID NO: 618563 - DNA, 15 bp, Homo sapiens
accaactagctcctt

SEQ ID NO: 618564 - DNA, 15 bp, Homo sapiens
ccaactagctccttc

SEQ ID NO: 618565 - DNA, 15 bp, Homo sapiens
caactagctccttcc

SEQ ID NO: 618566 - DNA, 15 bp, Homo sapiens
aactagctccttcca

SEQ ID NO: 618567 - DNA, 15 bp, Homo sapiens
actagctccttccat

SEQ ID NO: 618568 - DNA, 15 bp, Homo sapiens
ctagctccttccatg

SEQ ID NO: 618569 - DNA, 15 bp, Homo sapiens
tagctccttccatga

SEQ ID NO: 618570 - DNA, 15 bp, Homo sapiens
agctccttccatgaa

SEQ ID NO: 618571 - DNA, 15 bp, Homo sapiens
gctccttccatgaac

SEQ ID NO: 618572 - DNA, 15 bp, Homo sapiens
ctccttccatgaact

SEQ ID NO: 618573 - DNA, 15 bp, Homo sapiens
tccttccatgaactt

SEQ ID NO: 618574 - DNA, 15 bp, Homo sapiens
ccttccatgaacttt

SEQ ID NO: 618575 - DNA, 15 bp, Homo sapiens
cttccatgaactttt

SEQ ID NO: 618576 - DNA, 15 bp, Homo sapiens
ttccatgaactttta

SEQ ID NO: 618577 - DNA, 15 bp, Homo sapiens
tccatgaacttttat

SEQ ID NO: 618578 - DNA, 15 bp, Homo sapiens
ccatgaacttttatc

SEQ ID NO: 618579 - DNA, 15 bp, Homo sapiens
catgaacttttatca

SEQ ID NO: 618580 - DNA, 15 bp, Homo sapiens
atgaacttttatcaa

SEQ ID NO: 618581 - DNA, 15 bp, Homo sapiens
tgaacttttatcaaa

SEQ ID NO: 618582 - DNA, 15 bp, Homo sapiens
gaacttttatcaaac

SEQ ID NO: 618583 - DNA, 15 bp, Homo sapiens
aacttttatcaaacc

SEQ ID NO: 618584 - DNA, 15 bp, Homo sapiens
acttttatcaaaccc

SEQ ID NO: 618585 - DNA, 15 bp, Homo sapiens
cttttatcaaaccca

SEQ ID NO: 618586 - DNA, 15 bp, Homo sapiens
ttttatcaaacccac

SEQ ID NO: 618587 - DNA, 15 bp, Homo sapiens
tttatcaaacccaca

SEQ ID NO: 618588 - DNA, 15 bp, Homo sapiens
ttatcaaacccacag

SEQ ID NO: 618589 - DNA, 15 bp, Homo sapiens
tatcaaacccacagc

SEQ ID NO: 618590 - DNA, 15 bp, Homo sapiens
atcaaacccacagcc

SEQ ID NO: 618591 - DNA, 15 bp, Homo sapiens
tcaaacccacagcca

SEQ ID NO: 618592 - DNA, 15 bp, Homo sapiens
caaacccacagccac

SEQ ID NO: 618593 - DNA, 15 bp, Homo sapiens
aaacccacagccaca

SEQ ID NO: 618594 - DNA, 15 bp, Homo sapiens
aacccacagccacac

SEQ ID NO: 618595 - DNA, 15 bp, Homo sapiens
acccacagccacaca

SEQ ID NO: 618596 - DNA, 15 bp, Homo sapiens
cccacagccacacaa

SEQ ID NO: 618597 - DNA, 15 bp, Homo sapiens
ccacagccacacaaa

SEQ ID NO: 618598 - DNA, 15 bp, Homo sapiens
cacagccacacaaag

SEQ ID NO: 618599 - DNA, 15 bp, Homo sapiens
acagccacacaaagc

SEQ ID NO: 618600 - DNA, 15 bp, Homo sapiens
cagccacacaaagca

SEQ ID NO: 618601 - DNA, 15 bp, Homo sapiens
agccacacaaagcat

SEQ ID NO: 618602 - DNA, 15 bp, Homo sapiens
gccacacaaagcatg

SEQ ID NO: 618603 - DNA, 15 bp, Homo sapiens
ccacacaaagcatgt

SEQ ID NO: 618604 - DNA, 15 bp, Homo sapiens
cacacaaagcatgtg

SEQ ID NO: 618605 - DNA, 15 bp, Homo sapiens
acacaaagcatgtgt

SEQ ID NO: 618606 - DNA, 15 bp, Homo sapiens
cacaaagcatgtgtg

SEQ ID NO: 618607 - DNA, 15 bp, Homo sapiens
acaaagcatgtgtga

SEQ ID NO: 618608 - DNA, 15 bp, Homo sapiens
caaagcatgtgtgag

SEQ ID NO: 618609 - DNA, 15 bp, Homo sapiens
aaagcatgtgtgagt

SEQ ID NO: 618610 - DNA, 15 bp, Homo sapiens
aagcatgtgtgagtg

SEQ ID NO: 618611 - DNA, 15 bp, Homo sapiens
agcatgtgtgagtgt

SEQ ID NO: 618612 - DNA, 15 bp, Homo sapiens
gcatgtgtgagtgta

SEQ ID NO: 618613 - DNA, 15 bp, Homo sapiens
catgtgtgagtgtag

SEQ ID NO: 618614 - DNA, 15 bp, Homo sapiens
atgtgtgagtgtagc

SEQ ID NO: 618615 - DNA, 15 bp, Homo sapiens
tgtgtgagtgtagca

SEQ ID NO: 618616 - DNA, 15 bp, Homo sapiens
gtgtgagtgtagcag

SEQ ID NO: 618617 - DNA, 15 bp, Homo sapiens
tgtgagtgtagcaga

SEQ ID NO: 618618 - DNA, 15 bp, Homo sapiens
gtgagtgtagcagag

SEQ ID NO: 618619 - DNA, 15 bp, Homo sapiens
tgagtgtagcagagt

SEQ ID NO: 618620 - DNA, 15 bp, Homo sapiens
gagtgtagcagagtt

SEQ ID NO: 618621 - DNA, 15 bp, Homo sapiens
agtgtagcagagttt

SEQ ID NO: 618622 - DNA, 15 bp, Homo sapiens
gtgtagcagagttta

SEQ ID NO: 618623 - DNA, 15 bp, Homo sapiens
tgtagcagagtttac

SEQ ID NO: 618624 - DNA, 15 bp, Homo sapiens
gtagcagagtttaca

SEQ ID NO: 618625 - DNA, 15 bp, Homo sapiens
tagcagagtttacag

SEQ ID NO: 618626 - DNA, 15 bp, Homo sapiens
agcagagtttacagc

SEQ ID NO: 618627 - DNA, 15 bp, Homo sapiens
gcagagtttacagca

SEQ ID NO: 618628 - DNA, 15 bp, Homo sapiens
cagagtttacagcag

SEQ ID NO: 618629 - DNA, 15 bp, Homo sapiens
agagtttacagcaga

SEQ ID NO: 618630 - DNA, 15 bp, Homo sapiens
gagtttacagcagag

SEQ ID NO: 618631 - DNA, 15 bp, Homo sapiens
agtttacagcagagg

SEQ ID NO: 618632 - DNA, 15 bp, Homo sapiens
gtttacagcagaggg

SEQ ID NO: 618633 - DNA, 15 bp, Homo sapiens
tttacagcagagggt

SEQ ID NO: 618634 - DNA, 15 bp, Homo sapiens
ttacagcagagggtg

SEQ ID NO: 618635 - DNA, 15 bp, Homo sapiens
tacagcagagggtgg

SEQ ID NO: 618636 - DNA, 15 bp, Homo sapiens
acagcagagggtgga

SEQ ID NO: 618637 - DNA, 15 bp, Homo sapiens
cagcagagggtggag

SEQ ID NO: 618638 - DNA, 15 bp, Homo sapiens
agcagagggtggagg

SEQ ID NO: 618639 - DNA, 15 bp, Homo sapiens
gcagagggtggaggg

SEQ ID NO: 618640 - DNA, 15 bp, Homo sapiens
cagagggtggagggt

SEQ ID NO: 618641 - DNA, 15 bp, Homo sapiens
agagggtggagggtg

SEQ ID NO: 618642 - DNA, 15 bp, Homo sapiens
gagggtggagggtgg

SEQ ID NO: 618643 - DNA, 15 bp, Homo sapiens
agggtggagggtggg

SEQ ID NO: 618644 - DNA, 15 bp, Homo sapiens
gggtggagggtgggg

SEQ ID NO: 618645 - DNA, 15 bp, Homo sapiens
ggtggagggtgggga

SEQ ID NO: 618646 - DNA, 15 bp, Homo sapiens
gtggagggtggggag

SEQ ID NO: 618647 - DNA, 15 bp, Homo sapiens
tggagggtggggaga

SEQ ID NO: 618648 - DNA, 15 bp, Homo sapiens
ggagggtggggagat

SEQ ID NO: 618649 - DNA, 15 bp, Homo sapiens
gagggtggggagata

SEQ ID NO: 618650 - DNA, 15 bp, Homo sapiens
agggtggggagatag

SEQ ID NO: 618651 - DNA, 15 bp, Homo sapiens
gggtggggagataga

SEQ ID NO: 618652 - DNA, 15 bp, Homo sapiens
ggtggggagatagat

SEQ ID NO: 618653 - DNA, 15 bp, Homo sapiens
gtggggagatagatg

SEQ ID NO: 618654 - DNA, 15 bp, Homo sapiens
tggggagatagatgt

SEQ ID NO: 618655 - DNA, 15 bp, Homo sapiens
ggggagatagatgtg

SEQ ID NO: 618656 - DNA, 15 bp, Homo sapiens
gggagatagatgtgt

SEQ ID NO: 618657 - DNA, 15 bp, Homo sapiens
ggagatagatgtgtg

SEQ ID NO: 618658 - DNA, 15 bp, Homo sapiens
gagatagatgtgtgg

SEQ ID NO: 618659 - DNA, 15 bp, Homo sapiens
agatagatgtgtgga

SEQ ID NO: 618660 - DNA, 15 bp, Homo sapiens
gatagatgtgtggaa

SEQ ID NO: 618661 - DNA, 15 bp, Homo sapiens
atagatgtgtggaag

SEQ ID NO: 618662 - DNA, 15 bp, Homo sapiens
tagatgtgtggaagg

SEQ ID NO: 618663 - DNA, 15 bp, Homo sapiens
agatgtgtggaaggg

SEQ ID NO: 618664 - DNA, 15 bp, Homo sapiens
gatgtgtggaagggt

SEQ ID NO: 618665 - DNA, 15 bp, Homo sapiens
atgtgtggaagggtt

SEQ ID NO: 618666 - DNA, 15 bp, Homo sapiens
tgtgtggaagggtta

SEQ ID NO: 618667 - DNA, 15 bp, Homo sapiens
gtgtggaagggttac

SEQ ID NO: 618668 - DNA, 15 bp, Homo sapiens
tgtggaagggttacc

SEQ ID NO: 618669 - DNA, 15 bp, Homo sapiens
gtggaagggttacct

SEQ ID NO: 618670 - DNA, 15 bp, Homo sapiens
tggaagggttacctg

SEQ ID NO: 618671 - DNA, 15 bp, Homo sapiens
ggaagggttacctgc

SEQ ID NO: 618672 - DNA, 15 bp, Homo sapiens
gaagggttacctgcc

SEQ ID NO: 618673 - DNA, 15 bp, Homo sapiens
aagggttacctgcca

SEQ ID NO: 618674 - DNA, 15 bp, Homo sapiens
agggttacctgccac

SEQ ID NO: 618675 - DNA, 15 bp, Homo sapiens
gggttacctgccaca

SEQ ID NO: 618676 - DNA, 15 bp, Homo sapiens
ggttacctgccacac

SEQ ID NO: 618677 - DNA, 15 bp, Homo sapiens
gttacctgccacaca

SEQ ID NO: 618678 - DNA, 15 bp, Homo sapiens
ttacctgccacacaa

SEQ ID NO: 618679 - DNA, 15 bp, Homo sapiens
tacctgccacacaaa

SEQ ID NO: 618680 - DNA, 15 bp, Homo sapiens
acctgccacacaaac

SEQ ID NO: 618681 - DNA, 15 bp, Homo sapiens
cctgccacacaaaca

SEQ ID NO: 618682 - DNA, 15 bp, Homo sapiens
ctgccacacaaacag

SEQ ID NO: 618683 - DNA, 15 bp, Homo sapiens
tgccacacaaacaga

SEQ ID NO: 618684 - DNA, 15 bp, Homo sapiens
gccacacaaacagaa

SEQ ID NO: 618685 - DNA, 15 bp, Homo sapiens
ccacacaaacagaaa

SEQ ID NO: 618686 - DNA, 15 bp, Homo sapiens
cacacaaacagaaac

SEQ ID NO: 618687 - DNA, 15 bp, Homo sapiens
acacaaacagaaacc

SEQ ID NO: 618688 - DNA, 15 bp, Homo sapiens
cacaaacagaaacca

SEQ ID NO: 618689 - DNA, 15 bp, Homo sapiens
acaaacagaaaccac

SEQ ID NO: 618690 - DNA, 15 bp, Homo sapiens
caaacagaaaccact

SEQ ID NO: 618691 - DNA, 15 bp, Homo sapiens
aaacagaaaccactt

SEQ ID NO: 618692 - DNA, 15 bp, Homo sapiens
aacagaaaccacttc

SEQ ID NO: 618693 - DNA, 15 bp, Homo sapiens
acagaaaccacttct

SEQ ID NO: 618694 - DNA, 15 bp, Homo sapiens
cagaaaccacttctg

SEQ ID NO: 618695 - DNA, 15 bp, Homo sapiens
agaaaccacttctga

SEQ ID NO: 618696 - DNA, 15 bp, Homo sapiens
gaaaccacttctgat

SEQ ID NO: 618697 - DNA, 15 bp, Homo sapiens
aaaccacttctgata

SEQ ID NO: 618698 - DNA, 15 bp, Homo sapiens
aaccacttctgatag

SEQ ID NO: 618699 - DNA, 15 bp, Homo sapiens
accacttctgataga

SEQ ID NO: 618700 - DNA, 15 bp, Homo sapiens
ccacttctgatagaa

SEQ ID NO: 618701 - DNA, 15 bp, Homo sapiens
cacttctgatagaac

SEQ ID NO: 618702 - DNA, 15 bp, Homo sapiens
acttctgatagaaca

SEQ ID NO: 618703 - DNA, 15 bp, Homo sapiens
cttctgatagaacac

SEQ ID NO: 618704 - DNA, 15 bp, Homo sapiens
ttctgatagaacacg

SEQ ID NO: 618705 - DNA, 15 bp, Homo sapiens
tctgatagaacacga

SEQ ID NO: 618706 - DNA, 15 bp, Homo sapiens
ctgatagaacacgag

SEQ ID NO: 618707 - DNA, 15 bp, Homo sapiens
tgatagaacacgagg

SEQ ID NO: 618708 - DNA, 15 bp, Homo sapiens
gatagaacacgaggt

SEQ ID NO: 618709 - DNA, 15 bp, Homo sapiens
atagaacacgaggtg

SEQ ID NO: 618710 - DNA, 15 bp, Homo sapiens
tagaacacgaggtgt

SEQ ID NO: 618711 - DNA, 15 bp, Homo sapiens
agaacacgaggtgtc

SEQ ID NO: 618712 - DNA, 15 bp, Homo sapiens
gaacacgaggtgtcc

SEQ ID NO: 618713 - DNA, 15 bp, Homo sapiens
aacacgaggtgtcca

SEQ ID NO: 618714 - DNA, 15 bp, Homo sapiens
acacgaggtgtccac

SEQ ID NO: 618715 - DNA, 15 bp, Homo sapiens
cacgaggtgtccacc

SEQ ID NO: 618716 - DNA, 15 bp, Homo sapiens
acgaggtgtccaccc

SEQ ID NO: 618717 - DNA, 15 bp, Homo sapiens
cgaggtgtccaccca

SEQ ID NO: 618718 - DNA, 15 bp, Homo sapiens
gaggtgtccacccac

SEQ ID NO: 618719 - DNA, 15 bp, Homo sapiens
aggtgtccacccaca

SEQ ID NO: 618720 - DNA, 15 bp, Homo sapiens
ggtgtccacccacac

SEQ ID NO: 618721 - DNA, 15 bp, Homo sapiens
gtgtccacccacact

SEQ ID NO: 618722 - DNA, 15 bp, Homo sapiens
tgtccacccacactg

SEQ ID NO: 618723 - DNA, 15 bp, Homo sapiens
gtccacccacactgt

SEQ ID NO: 618724 - DNA, 15 bp, Homo sapiens
tccacccacactgta

SEQ ID NO: 618725 - DNA, 15 bp, Homo sapiens
ccacccacactgtaa

SEQ ID NO: 618726 - DNA, 15 bp, Homo sapiens
cacccacactgtaaa

SEQ ID NO: 618727 - DNA, 15 bp, Homo sapiens
acccacactgtaaaa

SEQ ID NO: 618728 - DNA, 15 bp, Homo sapiens
cccacactgtaaaat

SEQ ID NO: 618729 - DNA, 15 bp, Homo sapiens
ccacactgtaaaatc

SEQ ID NO: 618730 - DNA, 15 bp, Homo sapiens
cacactgtaaaatcc

SEQ ID NO: 618731 - DNA, 15 bp, Homo sapiens
acactgtaaaatcct

SEQ ID NO: 618732 - DNA, 15 bp, Homo sapiens
cactgtaaaatcctc

SEQ ID NO: 618733 - DNA, 15 bp, Homo sapiens
actgtaaaatcctct

SEQ ID NO: 618734 - DNA, 15 bp, Homo sapiens
ctgtaaaatcctctc

SEQ ID NO: 618735 - DNA, 15 bp, Homo sapiens
tgtaaaatcctctcc

SEQ ID NO: 618736 - DNA, 15 bp, Homo sapiens
gtaaaatcctctcct

SEQ ID NO: 618737 - DNA, 15 bp, Homo sapiens
taaaatcctctcctg

SEQ ID NO: 618738 - DNA, 15 bp, Homo sapiens
aaaatcctctcctgg

SEQ ID NO: 618739 - DNA, 15 bp, Homo sapiens
aaatcctctcctggt

SEQ ID NO: 618740 - DNA, 15 bp, Homo sapiens
aatcctctcctggta

SEQ ID NO: 618741 - DNA, 15 bp, Homo sapiens
atcctctcctggtac

SEQ ID NO: 618742 - DNA, 15 bp, Homo sapiens
tcctctcctggtaca

SEQ ID NO: 618743 - DNA, 15 bp, Homo sapiens
cctctcctggtacag

SEQ ID NO: 618744 - DNA, 15 bp, Homo sapiens
ctctcctggtacagg

SEQ ID NO: 618745 - DNA, 15 bp, Homo sapiens
tctcctggtacaggc

SEQ ID NO: 618746 - DNA, 15 bp, Homo sapiens
ctcctggtacaggca

SEQ ID NO: 618747 - DNA, 15 bp, Homo sapiens
tcctggtacaggcaa

SEQ ID NO: 618748 - DNA, 15 bp, Homo sapiens
cctggtacaggcaaa

SEQ ID NO: 618749 - DNA, 15 bp, Homo sapiens
ctggtacaggcaaag

SEQ ID NO: 618750 - DNA, 15 bp, Homo sapiens
tggtacaggcaaagc

SEQ ID NO: 618751 - DNA, 15 bp, Homo sapiens
ggtacaggcaaagct

SEQ ID NO: 618752 - DNA, 15 bp, Homo sapiens
gtacaggcaaagctt

SEQ ID NO: 618753 - DNA, 15 bp, Homo sapiens
tacaggcaaagcttt

SEQ ID NO: 618754 - DNA, 15 bp, Homo sapiens
acaggcaaagctttg

SEQ ID NO: 618755 - DNA, 15 bp, Homo sapiens
caggcaaagctttgc

SEQ ID NO: 618756 - DNA, 15 bp, Homo sapiens
aggcaaagctttgca

SEQ ID NO: 618757 - DNA, 15 bp, Homo sapiens
ggcaaagctttgcag

SEQ ID NO: 618758 - DNA, 15 bp, Homo sapiens
gcaaagctttgcagc

SEQ ID NO: 618759 - DNA, 15 bp, Homo sapiens
caaagctttgcagcg

SEQ ID NO: 618760 - DNA, 15 bp, Homo sapiens
aaagctttgcagcga

SEQ ID NO: 618761 - DNA, 15 bp, Homo sapiens
aagctttgcagcgat

SEQ ID NO: 618762 - DNA, 15 bp, Homo sapiens
agctttgcagcgatt

SEQ ID NO: 618763 - DNA, 15 bp, Homo sapiens
gctttgcagcgattc

SEQ ID NO: 618764 - DNA, 15 bp, Homo sapiens
ctttgcagcgattct

SEQ ID NO: 618765 - DNA, 15 bp, Homo sapiens
tttgcagcgattctc

SEQ ID NO: 618766 - DNA, 15 bp, Homo sapiens
ttgcagcgattctcc

SEQ ID NO: 618767 - DNA, 15 bp, Homo sapiens
tgcagcgattctcct

SEQ ID NO: 618768 - DNA, 15 bp, Homo sapiens
gcagcgattctcctt

SEQ ID NO: 618769 - DNA, 15 bp, Homo sapiens
cagcgattctccttt

SEQ ID NO: 618770 - DNA, 15 bp, Homo sapiens
agcgattctcctttg

SEQ ID NO: 618771 - DNA, 15 bp, Homo sapiens
gcgattctcctttgc

SEQ ID NO: 618772 - DNA, 15 bp, Homo sapiens
cgattctcctttgct

SEQ ID NO: 618773 - DNA, 15 bp, Homo sapiens
gattctcctttgctg

SEQ ID NO: 618774 - DNA, 15 bp, Homo sapiens
attctcctttgctgc

SEQ ID NO: 618775 - DNA, 15 bp, Homo sapiens
ttctcctttgctgcc

SEQ ID NO: 618776 - DNA, 15 bp, Homo sapiens
tctcctttgctgccc

SEQ ID NO: 618777 - DNA, 15 bp, Homo sapiens
ctcctttgctgcccc

SEQ ID NO: 618778 - DNA, 15 bp, Homo sapiens
tcctttgctgcccct

SEQ ID NO: 618779 - DNA, 15 bp, Homo sapiens
cctttgctgcccctg

SEQ ID NO: 618780 - DNA, 15 bp, Homo sapiens
ctttgctgcccctgg

SEQ ID NO: 618781 - DNA, 15 bp, Homo sapiens
tttgctgcccctggg

SEQ ID NO: 618782 - DNA, 15 bp, Homo sapiens
ttgctgcccctgggc

SEQ ID NO: 618783 - DNA, 15 bp, Homo sapiens
tgctgcccctgggct

SEQ ID NO: 618784 - DNA, 15 bp, Homo sapiens
gctgcccctgggctc

SEQ ID NO: 618785 - DNA, 15 bp, Homo sapiens
ctgcccctgggctcc

SEQ ID NO: 618786 - DNA, 15 bp, Homo sapiens
tgcccctgggctcct

SEQ ID NO: 618787 - DNA, 15 bp, Homo sapiens
gcccctgggctccta

SEQ ID NO: 618788 - DNA, 15 bp, Homo sapiens
cccctgggctcctaa

SEQ ID NO: 618789 - DNA, 15 bp, Homo sapiens
ccctgggctcctaac

SEQ ID NO: 618790 - DNA, 15 bp, Homo sapiens
cctgggctcctaaca

SEQ ID NO: 618791 - DNA, 15 bp, Homo sapiens
ctgggctcctaacac

SEQ ID NO: 618792 - DNA, 15 bp, Homo sapiens
tgggctcctaacacc

SEQ ID NO: 618793 - DNA, 15 bp, Homo sapiens
gggctcctaacacct

SEQ ID NO: 618794 - DNA, 15 bp, Homo sapiens
ggctcctaacacctc

SEQ ID NO: 618795 - DNA, 15 bp, Homo sapiens
gctcctaacacctcc

SEQ ID NO: 618796 - DNA, 15 bp, Homo sapiens
ctcctaacacctcct

SEQ ID NO: 618797 - DNA, 15 bp, Homo sapiens
tcctaacacctccta

SEQ ID NO: 618798 - DNA, 15 bp, Homo sapiens
cctaacacctcctaa

SEQ ID NO: 618799 - DNA, 15 bp, Homo sapiens
ctaacacctcctaaa

SEQ ID NO: 618800 - DNA, 15 bp, Homo sapiens
taacacctcctaaac

SEQ ID NO: 618801 - DNA, 15 bp, Homo sapiens
aacacctcctaaacc

SEQ ID NO: 618802 - DNA, 15 bp, Homo sapiens
acacctcctaaacca

SEQ ID NO: 618803 - DNA, 15 bp, Homo sapiens
cacctcctaaaccac

SEQ ID NO: 618804 - DNA, 15 bp, Homo sapiens
acctcctaaaccacc

SEQ ID NO: 618805 - DNA, 15 bp, Homo sapiens
cctcctaaaccacca

SEQ ID NO: 618806 - DNA, 15 bp, Homo sapiens
ctcctaaaccaccag

SEQ ID NO: 618807 - DNA, 15 bp, Homo sapiens
tcctaaaccaccagt

SEQ ID NO: 618808 - DNA, 15 bp, Homo sapiens
cctaaaccaccagtt

SEQ ID NO: 618809 - DNA, 15 bp, Homo sapiens
ctaaaccaccagtta

SEQ ID NO: 618810 - DNA, 15 bp, Homo sapiens
taaaccaccagttac

SEQ ID NO: 618811 - DNA, 15 bp, Homo sapiens
aaaccaccagttacc

SEQ ID NO: 618812 - DNA, 15 bp, Homo sapiens
aaccaccagttacct

SEQ ID NO: 618813 - DNA, 15 bp, Homo sapiens
accaccagttacctc

SEQ ID NO: 618814 - DNA, 15 bp, Homo sapiens
ccaccagttacctcc

SEQ ID NO: 618815 - DNA, 15 bp, Homo sapiens
caccagttacctcct

SEQ ID NO: 618816 - DNA, 15 bp, Homo sapiens
accagttacctcctt

SEQ ID NO: 618817 - DNA, 15 bp, Homo sapiens
ccagttacctccttc

SEQ ID NO: 618818 - DNA, 15 bp, Homo sapiens
cagttacctccttct

SEQ ID NO: 618819 - DNA, 15 bp, Homo sapiens
agttacctccttctt

SEQ ID NO: 618820 - DNA, 15 bp, Homo sapiens
gttacctccttcttt

SEQ ID NO: 618821 - DNA, 15 bp, Homo sapiens
ttacctccttctttc

SEQ ID NO: 618822 - DNA, 15 bp, Homo sapiens
tacctccttctttcc

SEQ ID NO: 618823 - DNA, 15 bp, Homo sapiens
acctccttctttcca

SEQ ID NO: 618824 - DNA, 15 bp, Homo sapiens
cctccttctttccag

SEQ ID NO: 618825 - DNA, 15 bp, Homo sapiens
ctccttctttccagt

SEQ ID NO: 618826 - DNA, 15 bp, Homo sapiens
tccttctttccagtg

SEQ ID NO: 618827 - DNA, 15 bp, Homo sapiens
ccttctttccagtgt

SEQ ID NO: 618828 - DNA, 15 bp, Homo sapiens
cttctttccagtgtg

SEQ ID NO: 618829 - DNA, 15 bp, Homo sapiens
ttctttccagtgtgg

SEQ ID NO: 618830 - DNA, 15 bp, Homo sapiens
tctttccagtgtggc

SEQ ID NO: 618831 - DNA, 15 bp, Homo sapiens
ctttccagtgtggca

SEQ ID NO: 618832 - DNA, 15 bp, Homo sapiens
tttccagtgtggcat

SEQ ID NO: 618833 - DNA, 15 bp, Homo sapiens
ttccagtgtggcata

SEQ ID NO: 618834 - DNA, 15 bp, Homo sapiens
tccagtgtggcatat

SEQ ID NO: 618835 - DNA, 15 bp, Homo sapiens
ccagtgtggcatatt

SEQ ID NO: 618836 - DNA, 15 bp, Homo sapiens
cagtgtggcatattt

SEQ ID NO: 618837 - DNA, 15 bp, Homo sapiens
agtgtggcatatttc

SEQ ID NO: 618838 - DNA, 15 bp, Homo sapiens
gtgtggcatatttca

SEQ ID NO: 618839 - DNA, 15 bp, Homo sapiens
tgtggcatatttcag

SEQ ID NO: 618840 - DNA, 15 bp, Homo sapiens
gtggcatatttcagt

SEQ ID NO: 618841 - DNA, 15 bp, Homo sapiens
tggcatatttcagtg

SEQ ID NO: 618842 - DNA, 15 bp, Homo sapiens
ggcatatttcagtgt

SEQ ID NO: 618843 - DNA, 15 bp, Homo sapiens
gcatatttcagtgtt

SEQ ID NO: 618844 - DNA, 15 bp, Homo sapiens
catatttcagtgttt

SEQ ID NO: 618845 - DNA, 15 bp, Homo sapiens
atatttcagtgtttt

SEQ ID NO: 618846 - DNA, 15 bp, Homo sapiens
tatttcagtgttttc

SEQ ID NO: 618847 - DNA, 15 bp, Homo sapiens
atttcagtgttttcc

SEQ ID NO: 618848 - DNA, 15 bp, Homo sapiens
tttcagtgttttcct

SEQ ID NO: 618849 - DNA, 15 bp, Homo sapiens
ttcagtgttttcctg

SEQ ID NO: 618850 - DNA, 15 bp, Homo sapiens
tcagtgttttcctgt

SEQ ID NO: 618851 - DNA, 15 bp, Homo sapiens
cagtgttttcctgtt

SEQ ID NO: 618852 - DNA, 15 bp, Homo sapiens
agtgttttcctgttg

SEQ ID NO: 618853 - DNA, 15 bp, Homo sapiens
gtgttttcctgttgg

SEQ ID NO: 618854 - DNA, 15 bp, Homo sapiens
tgttttcctgttgga

SEQ ID NO: 618855 - DNA, 15 bp, Homo sapiens
gttttcctgttggag

SEQ ID NO: 618856 - DNA, 15 bp, Homo sapiens
ttttcctgttggagt

SEQ ID NO: 618857 - DNA, 15 bp, Homo sapiens
tttcctgttggagtg

SEQ ID NO: 618858 - DNA, 15 bp, Homo sapiens
ttcctgttggagtgt

SEQ ID NO: 618859 - DNA, 15 bp, Homo sapiens
tcctgttggagtgtt

SEQ ID NO: 618860 - DNA, 15 bp, Homo sapiens
cctgttggagtgttt

SEQ ID NO: 618861 - DNA, 15 bp, Homo sapiens
ctgttggagtgtttc

SEQ ID NO: 618862 - DNA, 15 bp, Homo sapiens
tgttggagtgtttcc

SEQ ID NO: 618863 - DNA, 15 bp, Homo sapiens
gttggagtgtttcct

SEQ ID NO: 618864 - DNA, 15 bp, Homo sapiens
ttggagtgtttcctt

SEQ ID NO: 618865 - DNA, 15 bp, Homo sapiens
tggagtgtttccttt

SEQ ID NO: 618866 - DNA, 15 bp, Homo sapiens
ggagtgtttcctttc

SEQ ID NO: 618867 - DNA, 15 bp, Homo sapiens
gagtgtttcctttct

SEQ ID NO: 618868 - DNA, 15 bp, Homo sapiens
agtgtttcctttcta

SEQ ID NO: 618869 - DNA, 15 bp, Homo sapiens
gtgtttcctttctat

SEQ ID NO: 618870 - DNA, 15 bp, Homo sapiens
tgtttcctttctatg

SEQ ID NO: 618871 - DNA, 15 bp, Homo sapiens
gtttcctttctatgt

SEQ ID NO: 618872 - DNA, 15 bp, Homo sapiens
tttcctttctatgtg

SEQ ID NO: 618873 - DNA, 15 bp, Homo sapiens
ttcctttctatgtgg

SEQ ID NO: 618874 - DNA, 15 bp, Homo sapiens
tcctttctatgtgga

SEQ ID NO: 618875 - DNA, 15 bp, Homo sapiens
cctttctatgtggat

SEQ ID NO: 618876 - DNA, 15 bp, Homo sapiens
ctttctatgtggatt

SEQ ID NO: 618877 - DNA, 15 bp, Homo sapiens
tttctatgtggattc

SEQ ID NO: 618878 - DNA, 15 bp, Homo sapiens
ttctatgtggattct

SEQ ID NO: 618879 - DNA, 15 bp, Homo sapiens
tctatgtggattctg

SEQ ID NO: 618880 - DNA, 15 bp, Homo sapiens
ctatgtggattctgg

SEQ ID NO: 618881 - DNA, 15 bp, Homo sapiens
tatgtggattctgga

SEQ ID NO: 618882 - DNA, 15 bp, Homo sapiens
atgtggattctggaa

SEQ ID NO: 618883 - DNA, 15 bp, Homo sapiens
tgtggattctggaat

SEQ ID NO: 618884 - DNA, 15 bp, Homo sapiens
gtggattctggaatc

SEQ ID NO: 618885 - DNA, 15 bp, Homo sapiens
tggattctggaatca

SEQ ID NO: 618886 - DNA, 15 bp, Homo sapiens
ggattctggaatcag

SEQ ID NO: 618887 - DNA, 15 bp, Homo sapiens
gattctggaatcagc

SEQ ID NO: 618888 - DNA, 15 bp, Homo sapiens
attctggaatcagct

SEQ ID NO: 618889 - DNA, 15 bp, Homo sapiens
ttctggaatcagctc

SEQ ID NO: 618890 - DNA, 15 bp, Homo sapiens
tctggaatcagctct

SEQ ID NO: 618891 - DNA, 15 bp, Homo sapiens
ctggaatcagctctt

SEQ ID NO: 618892 - DNA, 15 bp, Homo sapiens
tggaatcagctctta

SEQ ID NO: 618893 - DNA, 15 bp, Homo sapiens
ggaatcagctcttaa

SEQ ID NO: 618894 - DNA, 15 bp, Homo sapiens
gaatcagctcttaag

SEQ ID NO: 618895 - DNA, 15 bp, Homo sapiens
aatcagctcttaaga

SEQ ID NO: 618896 - DNA, 15 bp, Homo sapiens
atcagctcttaagat

SEQ ID NO: 618897 - DNA, 15 bp, Homo sapiens
tcagctcttaagata

SEQ ID NO: 618898 - DNA, 15 bp, Homo sapiens
cagctcttaagataa

SEQ ID NO: 618899 - DNA, 15 bp, Homo sapiens
agctcttaagataac

SEQ ID NO: 618900 - DNA, 15 bp, Homo sapiens
gctcttaagataact

SEQ ID NO: 618901 - DNA, 15 bp, Homo sapiens
ctcttaagataactt

SEQ ID NO: 618902 - DNA, 15 bp, Homo sapiens
tcttaagataacttg

SEQ ID NO: 618903 - DNA, 15 bp, Homo sapiens
cttaagataacttgg

SEQ ID NO: 618904 - DNA, 15 bp, Homo sapiens
ttaagataacttggt

SEQ ID NO: 618905 - DNA, 15 bp, Homo sapiens
taagataacttggtt

SEQ ID NO: 618906 - DNA, 15 bp, Homo sapiens
aagataacttggttt

SEQ ID NO: 618907 - DNA, 15 bp, Homo sapiens
agataacttggtttt

SEQ ID NO: 618908 - DNA, 15 bp, Homo sapiens
gataacttggttttc

SEQ ID NO: 618909 - DNA, 15 bp, Homo sapiens
ataacttggttttca

SEQ ID NO: 618910 - DNA, 15 bp, Homo sapiens
taacttggttttcat

SEQ ID NO: 618911 - DNA, 15 bp, Homo sapiens
aacttggttttcatc

SEQ ID NO: 618912 - DNA, 15 bp, Homo sapiens
acttggttttcatct

SEQ ID NO: 618913 - DNA, 15 bp, Homo sapiens
cttggttttcatctt

SEQ ID NO: 618914 - DNA, 15 bp, Homo sapiens
ttggttttcatcttt

SEQ ID NO: 618915 - DNA, 15 bp, Homo sapiens
tggttttcatctttc

SEQ ID NO: 618916 - DNA, 15 bp, Homo sapiens
ggttttcatctttct

SEQ ID NO: 618917 - DNA, 15 bp, Homo sapiens
gttttcatctttctt

SEQ ID NO: 618918 - DNA, 15 bp, Homo sapiens
ttttcatctttcttc

SEQ ID NO: 618919 - DNA, 15 bp, Homo sapiens
tttcatctttcttca

SEQ ID NO: 618920 - DNA, 15 bp, Homo sapiens
ttcatctttcttcat

SEQ ID NO: 618921 - DNA, 15 bp, Homo sapiens
tcatctttcttcata

SEQ ID NO: 618922 - DNA, 15 bp, Homo sapiens
catctttcttcataa

SEQ ID NO: 618923 - DNA, 15 bp, Homo sapiens
atctttcttcataat

SEQ ID NO: 618924 - DNA, 15 bp, Homo sapiens
tctttcttcataatg

SEQ ID NO: 618925 - DNA, 15 bp, Homo sapiens
ctttcttcataatga

SEQ ID NO: 618926 - DNA, 15 bp, Homo sapiens
tttcttcataatgat

SEQ ID NO: 618927 - DNA, 15 bp, Homo sapiens
ttcttcataatgatc

SEQ ID NO: 618928 - DNA, 15 bp, Homo sapiens
tcttcataatgatcc

SEQ ID NO: 618929 - DNA, 15 bp, Homo sapiens
cttcataatgatccc

SEQ ID NO: 618930 - DNA, 15 bp, Homo sapiens
ttcataatgatccca

SEQ ID NO: 618931 - DNA, 15 bp, Homo sapiens
tcataatgatcccaa

SEQ ID NO: 618932 - DNA, 15 bp, Homo sapiens
cataatgatcccaaa

SEQ ID NO: 618933 - DNA, 15 bp, Homo sapiens
ataatgatcccaaac

SEQ ID NO: 618934 - DNA, 15 bp, Homo sapiens
taatgatcccaaaca

SEQ ID NO: 618935 - DNA, 15 bp, Homo sapiens
aatgatcccaaacat

SEQ ID NO: 618936 - DNA, 15 bp, Homo sapiens
atgatcccaaacatc

SEQ ID NO: 618937 - DNA, 15 bp, Homo sapiens
tgatcccaaacatct

SEQ ID NO: 618938 - DNA, 15 bp, Homo sapiens
gatcccaaacatcta

SEQ ID NO: 618939 - DNA, 15 bp, Homo sapiens
atcccaaacatctat

SEQ ID NO: 618940 - DNA, 15 bp, Homo sapiens
tcccaaacatctatc

SEQ ID NO: 618941 - DNA, 15 bp, Homo sapiens
cccaaacatctatct

SEQ ID NO: 618942 - DNA, 15 bp, Homo sapiens
ccaaacatctatcta

SEQ ID NO: 618943 - DNA, 15 bp, Homo sapiens
caaacatctatctac

SEQ ID NO: 618944 - DNA, 15 bp, Homo sapiens
aaacatctatctact

SEQ ID NO: 618945 - DNA, 15 bp, Homo sapiens
aacatctatctacta

SEQ ID NO: 618946 - DNA, 15 bp, Homo sapiens
acatctatctactat

SEQ ID NO: 618947 - DNA, 15 bp, Homo sapiens
catctatctactatg

SEQ ID NO: 618948 - DNA, 15 bp, Homo sapiens
atctatctactatgc

SEQ ID NO: 618949 - DNA, 15 bp, Homo sapiens
tctatctactatgcc

SEQ ID NO: 618950 - DNA, 15 bp, Homo sapiens
ctatctactatgcct

SEQ ID NO: 618951 - DNA, 15 bp, Homo sapiens
tatctactatgccta

SEQ ID NO: 618952 - DNA, 15 bp, Homo sapiens
atctactatgcctag

SEQ ID NO: 618953 - DNA, 15 bp, Homo sapiens
tctactatgcctaga

SEQ ID NO: 618954 - DNA, 15 bp, Homo sapiens
ctactatgcctagaa

SEQ ID NO: 618955 - DNA, 15 bp, Homo sapiens
tactatgcctagaac

SEQ ID NO: 618956 - DNA, 15 bp, Homo sapiens
actatgcctagaact

SEQ ID NO: 618957 - DNA, 15 bp, Homo sapiens
ctatgcctagaacta

SEQ ID NO: 618958 - DNA, 15 bp, Homo sapiens
tatgcctagaactac

SEQ ID NO: 618959 - DNA, 15 bp, Homo sapiens
atgcctagaactacc

SEQ ID NO: 618960 - DNA, 15 bp, Homo sapiens
tgcctagaactacca

SEQ ID NO: 618961 - DNA, 15 bp, Homo sapiens
gcctagaactaccaa

SEQ ID NO: 618962 - DNA, 15 bp, Homo sapiens
cctagaactaccaat

SEQ ID NO: 618963 - DNA, 15 bp, Homo sapiens
ctagaactaccaatg

SEQ ID NO: 618964 - DNA, 15 bp, Homo sapiens
tagaactaccaatgg

SEQ ID NO: 618965 - DNA, 15 bp, Homo sapiens
agaactaccaatgga

SEQ ID NO: 618966 - DNA, 15 bp, Homo sapiens
gaactaccaatggac

SEQ ID NO: 618967 - DNA, 15 bp, Homo sapiens
aactaccaatggaca

SEQ ID NO: 618968 - DNA, 15 bp, Homo sapiens
actaccaatggacac

SEQ ID NO: 618969 - DNA, 15 bp, Homo sapiens
ctaccaatggacaca

SEQ ID NO: 618970 - DNA, 15 bp, Homo sapiens
taccaatggacacat

SEQ ID NO: 618971 - DNA, 15 bp, Homo sapiens
accaatggacacata

SEQ ID NO: 618972 - DNA, 15 bp, Homo sapiens
ccaatggacacatat

SEQ ID NO: 618973 - DNA, 15 bp, Homo sapiens
caatggacacatata

SEQ ID NO: 618974 - DNA, 15 bp, Homo sapiens
aatggacacatatac

SEQ ID NO: 618975 - DNA, 15 bp, Homo sapiens
atggacacatatacc

SEQ ID NO: 618976 - DNA, 15 bp, Homo sapiens
tggacacatatacca

SEQ ID NO: 618977 - DNA, 15 bp, Homo sapiens
ggacacatataccag

SEQ ID NO: 618978 - DNA, 15 bp, Homo sapiens
gacacatataccagc

SEQ ID NO: 618979 - DNA, 15 bp, Homo sapiens
acacatataccagcc

SEQ ID NO: 618980 - DNA, 15 bp, Homo sapiens
cacatataccagccc

SEQ ID NO: 618981 - DNA, 15 bp, Homo sapiens
acatataccagccca

SEQ ID NO: 618982 - DNA, 15 bp, Homo sapiens
catataccagcccag

SEQ ID NO: 618983 - DNA, 15 bp, Homo sapiens
atataccagcccaga

SEQ ID NO: 618984 - DNA, 15 bp, Homo sapiens
tataccagcccagat

SEQ ID NO: 618985 - DNA, 15 bp, Homo sapiens
ataccagcccagata

SEQ ID NO: 618986 - DNA, 15 bp, Homo sapiens
taccagcccagatat

SEQ ID NO: 618987 - DNA, 15 bp, Homo sapiens
accagcccagatatg

SEQ ID NO: 618988 - DNA, 15 bp, Homo sapiens
ccagcccagatatgc

SEQ ID NO: 618989 - DNA, 15 bp, Homo sapiens
cagcccagatatgct

SEQ ID NO: 618990 - DNA, 15 bp, Homo sapiens
agcccagatatgctt

SEQ ID NO: 618991 - DNA, 15 bp, Homo sapiens
gcccagatatgcttc

SEQ ID NO: 618992 - DNA, 15 bp, Homo sapiens
cccagatatgcttca

SEQ ID NO: 618993 - DNA, 15 bp, Homo sapiens
ccagatatgcttcag

SEQ ID NO: 618994 - DNA, 15 bp, Homo sapiens
cagatatgcttcagc

SEQ ID NO: 618995 - DNA, 15 bp, Homo sapiens
agatatgcttcagcc

SEQ ID NO: 618996 - DNA, 15 bp, Homo sapiens
gatatgcttcagccc

SEQ ID NO: 618997 - DNA, 15 bp, Homo sapiens
atatgcttcagccca

SEQ ID NO: 618998 - DNA, 15 bp, Homo sapiens
tatgcttcagcccat

SEQ ID NO: 618999 - DNA, 15 bp, Homo sapiens
atgcttcagcccatc

SEQ ID NO: 619000 - DNA, 15 bp, Homo sapiens
tgcttcagcccatcc

SEQ ID NO: 619001 - DNA, 15 bp, Homo sapiens
gcttcagcccatccc

SEQ ID NO: 619002 - DNA, 15 bp, Homo sapiens
cttcagcccatccca

SEQ ID NO: 619003 - DNA, 15 bp, Homo sapiens
ttcagcccatcccag

SEQ ID NO: 619004 - DNA, 15 bp, Homo sapiens
tcagcccatcccagt

SEQ ID NO: 619005 - DNA, 15 bp, Homo sapiens
cagcccatcccagta

SEQ ID NO: 619006 - DNA, 15 bp, Homo sapiens
agcccatcccagtac

SEQ ID NO: 619007 - DNA, 15 bp, Homo sapiens
gcccatcccagtaca

SEQ ID NO: 619008 - DNA, 15 bp, Homo sapiens
cccatcccagtacat

SEQ ID NO: 619009 - DNA, 15 bp, Homo sapiens
ccatcccagtacatc

SEQ ID NO: 619010 - DNA, 15 bp, Homo sapiens
catcccagtacatcg

SEQ ID NO: 619011 - DNA, 15 bp, Homo sapiens
atcccagtacatcgc

SEQ ID NO: 619012 - DNA, 15 bp, Homo sapiens
tcccagtacatcgca

SEQ ID NO: 619013 - DNA, 15 bp, Homo sapiens
cccagtacatcgcat

SEQ ID NO: 619014 - DNA, 15 bp, Homo sapiens
ccagtacatcgcatg

SEQ ID NO: 619015 - DNA, 15 bp, Homo sapiens
cagtacatcgcatgg

SEQ ID NO: 619016 - DNA, 15 bp, Homo sapiens
agtacatcgcatggt

SEQ ID NO: 619017 - DNA, 15 bp, Homo sapiens
gtacatcgcatggtg

SEQ ID NO: 619018 - DNA, 15 bp, Homo sapiens
tacatcgcatggtga

SEQ ID NO: 619019 - DNA, 15 bp, Homo sapiens
acatcgcatggtgac

SEQ ID NO: 619020 - DNA, 15 bp, Homo sapiens
catcgcatggtgacc

SEQ ID NO: 619021 - DNA, 15 bp, Homo sapiens
atcgcatggtgacca

SEQ ID NO: 619022 - DNA, 15 bp, Homo sapiens
tcgcatggtgaccaa

SEQ ID NO: 619023 - DNA, 15 bp, Homo sapiens
cgcatggtgaccaaa

SEQ ID NO: 619024 - DNA, 15 bp, Homo sapiens
gcatggtgaccaaaa

SEQ ID NO: 619025 - DNA, 15 bp, Homo sapiens
catggtgaccaaaag

SEQ ID NO: 619026 - DNA, 15 bp, Homo sapiens
atggtgaccaaaaga

SEQ ID NO: 619027 - DNA, 15 bp, Homo sapiens
tggtgaccaaaagat

SEQ ID NO: 619028 - DNA, 15 bp, Homo sapiens
ggtgaccaaaagatg

SEQ ID NO: 619029 - DNA, 15 bp, Homo sapiens
gtgaccaaaagatgt

SEQ ID NO: 619030 - DNA, 15 bp, Homo sapiens
tgaccaaaagatgta

SEQ ID NO: 619031 - DNA, 15 bp, Homo sapiens
gaccaaaagatgtag

SEQ ID NO: 619032 - DNA, 15 bp, Homo sapiens
accaaaagatgtagt

SEQ ID NO: 619033 - DNA, 15 bp, Homo sapiens
ccaaaagatgtagtc

SEQ ID NO: 619034 - DNA, 15 bp, Homo sapiens
caaaagatgtagtcg

SEQ ID NO: 619035 - DNA, 15 bp, Homo sapiens
aaaagatgtagtcgt

SEQ ID NO: 619036 - DNA, 15 bp, Homo sapiens
aaagatgtagtcgtc

SEQ ID NO: 619037 - DNA, 15 bp, Homo sapiens
aagatgtagtcgtcc

SEQ ID NO: 619038 - DNA, 15 bp, Homo sapiens
agatgtagtcgtcct

SEQ ID NO: 619039 - DNA, 15 bp, Homo sapiens
gatgtagtcgtcctg

SEQ ID NO: 619040 - DNA, 15 bp, Homo sapiens
atgtagtcgtcctgg

SEQ ID NO: 619041 - DNA, 15 bp, Homo sapiens
tgtagtcgtcctggc

SEQ ID NO: 619042 - DNA, 15 bp, Homo sapiens
gtagtcgtcctggca

SEQ ID NO: 619043 - DNA, 15 bp, Homo sapiens
tagtcgtcctggcac

SEQ ID NO: 619044 - DNA, 15 bp, Homo sapiens
agtcgtcctggcaca

SEQ ID NO: 619045 - DNA, 15 bp, Homo sapiens
gtcgtcctggcacag

SEQ ID NO: 619046 - DNA, 15 bp, Homo sapiens
tcgtcctggcacagt

SEQ ID NO: 619047 - DNA, 15 bp, Homo sapiens
cgtcctggcacagtg

SEQ ID NO: 619048 - DNA, 15 bp, Homo sapiens
gtcctggcacagtgg

SEQ ID NO: 619049 - DNA, 15 bp, Homo sapiens
tcctggcacagtggg

SEQ ID NO: 619050 - DNA, 15 bp, Homo sapiens
cctggcacagtgggt

SEQ ID NO: 619051 - DNA, 15 bp, Homo sapiens
ctggcacagtgggtg

SEQ ID NO: 619052 - DNA, 15 bp, Homo sapiens
tggcacagtgggtgt

SEQ ID NO: 619053 - DNA, 15 bp, Homo sapiens
ggcacagtgggtgtg

SEQ ID NO: 619054 - DNA, 15 bp, Homo sapiens
gcacagtgggtgtgg

SEQ ID NO: 619055 - DNA, 15 bp, Homo sapiens
cacagtgggtgtggg

SEQ ID NO: 619056 - DNA, 15 bp, Homo sapiens
acagtgggtgtgggg

SEQ ID NO: 619057 - DNA, 15 bp, Homo sapiens
cagtgggtgtggggc

SEQ ID NO: 619058 - DNA, 15 bp, Homo sapiens
agtgggtgtggggca

SEQ ID NO: 619059 - DNA, 15 bp, Homo sapiens
gtgggtgtggggcag

SEQ ID NO: 619060 - DNA, 15 bp, Homo sapiens
tgggtgtggggcagg

SEQ ID NO: 619061 - DNA, 15 bp, Homo sapiens
gggtgtggggcagga

SEQ ID NO: 619062 - DNA, 15 bp, Homo sapiens
ggtgtggggcaggaa

SEQ ID NO: 619063 - DNA, 15 bp, Homo sapiens
gtgtggggcaggaag

SEQ ID NO: 619064 - DNA, 15 bp, Homo sapiens
tgtggggcaggaagc

SEQ ID NO: 619065 - DNA, 15 bp, Homo sapiens
gtggggcaggaagca

SEQ ID NO: 619066 - DNA, 15 bp, Homo sapiens
tggggcaggaagcag

SEQ ID NO: 619067 - DNA, 15 bp, Homo sapiens
ggggcaggaagcagt

SEQ ID NO: 619068 - DNA, 15 bp, Homo sapiens
gggcaggaagcagtc

SEQ ID NO: 619069 - DNA, 15 bp, Homo sapiens
ggcaggaagcagtcc

SEQ ID NO: 619070 - DNA, 15 bp, Homo sapiens
gcaggaagcagtcct

SEQ ID NO: 619071 - DNA, 15 bp, Homo sapiens
caggaagcagtcctc

SEQ ID NO: 619072 - DNA, 15 bp, Homo sapiens
aggaagcagtcctct

SEQ ID NO: 619073 - DNA, 15 bp, Homo sapiens
ggaagcagtcctctc

SEQ ID NO: 619074 - DNA, 15 bp, Homo sapiens
gaagcagtcctctcc

SEQ ID NO: 619075 - DNA, 15 bp, Homo sapiens
aagcagtcctctcca

SEQ ID NO: 619076 - DNA, 15 bp, Homo sapiens
agcagtcctctccag

SEQ ID NO: 619077 - DNA, 15 bp, Homo sapiens
gcagtcctctccagg

SEQ ID NO: 619078 - DNA, 15 bp, Homo sapiens
cagtcctctccaggg

SEQ ID NO: 619079 - DNA, 15 bp, Homo sapiens
agtcctctccagggg

SEQ ID NO: 619080 - DNA, 15 bp, Homo sapiens
gtcctctccagggga

SEQ ID NO: 619081 - DNA, 15 bp, Homo sapiens
tcctctccaggggac

SEQ ID NO: 619082 - DNA, 15 bp, Homo sapiens
cctctccaggggaca

SEQ ID NO: 619083 - DNA, 15 bp, Homo sapiens
ctctccaggggacag

SEQ ID NO: 619084 - DNA, 15 bp, Homo sapiens
tctccaggggacagc

SEQ ID NO: 619085 - DNA, 15 bp, Homo sapiens
ctccaggggacagca

SEQ ID NO: 619086 - DNA, 15 bp, Homo sapiens
tccaggggacagcag

SEQ ID NO: 619087 - DNA, 15 bp, Homo sapiens
ccaggggacagcagc

SEQ ID NO: 619088 - DNA, 15 bp, Homo sapiens
caggggacagcagca

SEQ ID NO: 619089 - DNA, 15 bp, Homo sapiens
aggggacagcagcaa

SEQ ID NO: 619090 - DNA, 15 bp, Homo sapiens
ggggacagcagcaat

SEQ ID NO: 619091 - DNA, 15 bp, Homo sapiens
gggacagcagcaatt

SEQ ID NO: 619092 - DNA, 15 bp, Homo sapiens
ggacagcagcaattc

SEQ ID NO: 619093 - DNA, 15 bp, Homo sapiens
gacagcagcaattca

SEQ ID NO: 619094 - DNA, 15 bp, Homo sapiens
acagcagcaattcac

SEQ ID NO: 619095 - DNA, 15 bp, Homo sapiens
cagcagcaattcacc

SEQ ID NO: 619096 - DNA, 15 bp, Homo sapiens
agcagcaattcacca

SEQ ID NO: 619097 - DNA, 15 bp, Homo sapiens
gcagcaattcaccac

SEQ ID NO: 619098 - DNA, 15 bp, Homo sapiens
cagcaattcaccaca

SEQ ID NO: 619099 - DNA, 15 bp, Homo sapiens
agcaattcaccacag

SEQ ID NO: 619100 - DNA, 15 bp, Homo sapiens
gcaattcaccacaga

SEQ ID NO: 619101 - DNA, 15 bp, Homo sapiens
caattcaccacagaa

SEQ ID NO: 619102 - DNA, 15 bp, Homo sapiens
aattcaccacagaac

SEQ ID NO: 619103 - DNA, 15 bp, Homo sapiens
attcaccacagaacc

SEQ ID NO: 619104 - DNA, 15 bp, Homo sapiens
ttcaccacagaaccc

SEQ ID NO: 619105 - DNA, 15 bp, Homo sapiens
tcaccacagaaccca

SEQ ID NO: 619106 - DNA, 15 bp, Homo sapiens
caccacagaacccaa

SEQ ID NO: 619107 - DNA, 15 bp, Homo sapiens
accacagaacccaag

SEQ ID NO: 619108 - DNA, 15 bp, Homo sapiens
ccacagaacccaagt

SEQ ID NO: 619109 - DNA, 15 bp, Homo sapiens
cacagaacccaagtt

SEQ ID NO: 619110 - DNA, 15 bp, Homo sapiens
acagaacccaagttt

SEQ ID NO: 619111 - DNA, 15 bp, Homo sapiens
cagaacccaagtttc

SEQ ID NO: 619112 - DNA, 15 bp, Homo sapiens
agaacccaagtttct

SEQ ID NO: 619113 - DNA, 15 bp, Homo sapiens
gaacccaagtttctt

SEQ ID NO: 619114 - DNA, 15 bp, Homo sapiens
aacccaagtttcttt

SEQ ID NO: 619115 - DNA, 15 bp, Homo sapiens
acccaagtttctttc

SEQ ID NO: 619116 - DNA, 15 bp, Homo sapiens
cccaagtttctttca

SEQ ID NO: 619117 - DNA, 15 bp, Homo sapiens
ccaagtttctttcaa

SEQ ID NO: 619118 - DNA, 15 bp, Homo sapiens
caagtttctttcaag

SEQ ID NO: 619119 - DNA, 15 bp, Homo sapiens
aagtttctttcaagc

SEQ ID NO: 619120 - DNA, 15 bp, Homo sapiens
agtttctttcaagct

SEQ ID NO: 619121 - DNA, 15 bp, Homo sapiens
gtttctttcaagctc

SEQ ID NO: 619122 - DNA, 15 bp, Homo sapiens
tttctttcaagctct

SEQ ID NO: 619123 - DNA, 15 bp, Homo sapiens
ttctttcaagctctg

SEQ ID NO: 619124 - DNA, 15 bp, Homo sapiens
tctttcaagctctgc

SEQ ID NO: 619125 - DNA, 15 bp, Homo sapiens
ctttcaagctctgct

SEQ ID NO: 619126 - DNA, 15 bp, Homo sapiens
tttcaagctctgctg

SEQ ID NO: 619127 - DNA, 15 bp, Homo sapiens
ttcaagctctgctga

SEQ ID NO: 619128 - DNA, 15 bp, Homo sapiens
tcaagctctgctgac

SEQ ID NO: 619129 - DNA, 15 bp, Homo sapiens
caagctctgctgaca

SEQ ID NO: 619130 - DNA, 15 bp, Homo sapiens
aagctctgctgacac

SEQ ID NO: 619131 - DNA, 15 bp, Homo sapiens
agctctgctgacaca

SEQ ID NO: 619132 - DNA, 15 bp, Homo sapiens
gctctgctgacacag

SEQ ID NO: 619133 - DNA, 15 bp, Homo sapiens
ctctgctgacacaga

SEQ ID NO: 619134 - DNA, 15 bp, Homo sapiens
tctgctgacacagaa

SEQ ID NO: 619135 - DNA, 15 bp, Homo sapiens
ctgctgacacagaaa

SEQ ID NO: 619136 - DNA, 15 bp, Homo sapiens
tgctgacacagaaat

SEQ ID NO: 619137 - DNA, 15 bp, Homo sapiens
gctgacacagaaatt

SEQ ID NO: 619138 - DNA, 15 bp, Homo sapiens
ctgacacagaaattg

SEQ ID NO: 619139 - DNA, 15 bp, Homo sapiens
tgacacagaaattga

SEQ ID NO: 619140 - DNA, 15 bp, Homo sapiens
gacacagaaattgaa

SEQ ID NO: 619141 - DNA, 15 bp, Homo sapiens
acacagaaattgaat

SEQ ID NO: 619142 - DNA, 15 bp, Homo sapiens
cacagaaattgaata

SEQ ID NO: 619143 - DNA, 15 bp, Homo sapiens
acagaaattgaataa

SEQ ID NO: 619144 - DNA, 15 bp, Homo sapiens
cagaaattgaataat

SEQ ID NO: 619145 - DNA, 15 bp, Homo sapiens
agaaattgaataatc

SEQ ID NO: 619146 - DNA, 15 bp, Homo sapiens
gaaattgaataatct

SEQ ID NO: 619147 - DNA, 15 bp, Homo sapiens
aaattgaataatctc

SEQ ID NO: 619148 - DNA, 15 bp, Homo sapiens
aattgaataatctca

SEQ ID NO: 619149 - DNA, 15 bp, Homo sapiens
attgaataatctcag

SEQ ID NO: 619150 - DNA, 15 bp, Homo sapiens
ttgaataatctcagc

SEQ ID NO: 619151 - DNA, 15 bp, Homo sapiens
tgaataatctcagct

SEQ ID NO: 619152 - DNA, 15 bp, Homo sapiens
gaataatctcagctc

SEQ ID NO: 619153 - DNA, 15 bp, Homo sapiens
aataatctcagctca

SEQ ID NO: 619154 - DNA, 15 bp, Homo sapiens
ataatctcagctcac

SEQ ID NO: 619155 - DNA, 15 bp, Homo sapiens
taatctcagctcacc

SEQ ID NO: 619156 - DNA, 15 bp, Homo sapiens
aatctcagctcaccc

SEQ ID NO: 619157 - DNA, 15 bp, Homo sapiens
atctcagctcaccca

SEQ ID NO: 619158 - DNA, 15 bp, Homo sapiens
tctcagctcacccaa

SEQ ID NO: 619159 - DNA, 15 bp, Homo sapiens
ctcagctcacccaat

SEQ ID NO: 619160 - DNA, 15 bp, Homo sapiens
tcagctcacccaatg

SEQ ID NO: 619161 - DNA, 15 bp, Homo sapiens
cagctcacccaatgt

SEQ ID NO: 619162 - DNA, 15 bp, Homo sapiens
agctcacccaatgtc

SEQ ID NO: 619163 - DNA, 15 bp, Homo sapiens
gctcacccaatgtca

SEQ ID NO: 619164 - DNA, 15 bp, Homo sapiens
ctcacccaatgtcaa

SEQ ID NO: 619165 - DNA, 15 bp, Homo sapiens
tcacccaatgtcaaa

SEQ ID NO: 619166 - DNA, 15 bp, Homo sapiens
cacccaatgtcaaag

SEQ ID NO: 619167 - DNA, 15 bp, Homo sapiens
acccaatgtcaaaga

SEQ ID NO: 619168 - DNA, 15 bp, Homo sapiens
cccaatgtcaaagac

SEQ ID NO: 619169 - DNA, 15 bp, Homo sapiens
ccaatgtcaaagact

SEQ ID NO: 619170 - DNA, 15 bp, Homo sapiens
caatgtcaaagactc

SEQ ID NO: 619171 - DNA, 15 bp, Homo sapiens
aatgtcaaagactca

SEQ ID NO: 619172 - DNA, 15 bp, Homo sapiens
atgtcaaagactcat

SEQ ID NO: 619173 - DNA, 15 bp, Homo sapiens
tgtcaaagactcata

SEQ ID NO: 619174 - DNA, 15 bp, Homo sapiens
gtcaaagactcatat

SEQ ID NO: 619175 - DNA, 15 bp, Homo sapiens
tcaaagactcatatt

SEQ ID NO: 619176 - DNA, 15 bp, Homo sapiens
caaagactcatatta

SEQ ID NO: 619177 - DNA, 15 bp, Homo sapiens
aaagactcatattaa

SEQ ID NO: 619178 - DNA, 15 bp, Homo sapiens
aagactcatattaac

SEQ ID NO: 619179 - DNA, 15 bp, Homo sapiens
agactcatattaacc

SEQ ID NO: 619180 - DNA, 15 bp, Homo sapiens
gactcatattaacca

SEQ ID NO: 619181 - DNA, 15 bp, Homo sapiens
actcatattaaccaa

SEQ ID NO: 619182 - DNA, 15 bp, Homo sapiens
ctcatattaaccaag

SEQ ID NO: 619183 - DNA, 15 bp, Homo sapiens
tcatattaaccaaga

SEQ ID NO: 619184 - DNA, 15 bp, Homo sapiens
catattaaccaagac

SEQ ID NO: 619185 - DNA, 15 bp, Homo sapiens
atattaaccaagacc

SEQ ID NO: 619186 - DNA, 15 bp, Homo sapiens
tattaaccaagacca

SEQ ID NO: 619187 - DNA, 15 bp, Homo sapiens
attaaccaagaccag

SEQ ID NO: 619188 - DNA, 15 bp, Homo sapiens
ttaaccaagaccaga

SEQ ID NO: 619189 - DNA, 15 bp, Homo sapiens
taaccaagaccagaa

SEQ ID NO: 619190 - DNA, 15 bp, Homo sapiens
aaccaagaccagaat

SEQ ID NO: 619191 - DNA, 15 bp, Homo sapiens
accaagaccagaatg

SEQ ID NO: 619192 - DNA, 15 bp, Homo sapiens
ccaagaccagaatga

SEQ ID NO: 619193 - DNA, 15 bp, Homo sapiens
caagaccagaatgaa

SEQ ID NO: 619194 - DNA, 15 bp, Homo sapiens
aagaccagaatgaaa

SEQ ID NO: 619195 - DNA, 15 bp, Homo sapiens
agaccagaatgaaaa

SEQ ID NO: 619196 - DNA, 15 bp, Homo sapiens
gaccagaatgaaaat

SEQ ID NO: 619197 - DNA, 15 bp, Homo sapiens
accagaatgaaaata

SEQ ID NO: 619198 - DNA, 15 bp, Homo sapiens
ccagaatgaaaatat

SEQ ID NO: 619199 - DNA, 15 bp, Homo sapiens
cagaatgaaaatatg

SEQ ID NO: 619200 - DNA, 15 bp, Homo sapiens
agaatgaaaatatgc

SEQ ID NO: 619201 - DNA, 15 bp, Homo sapiens
gaatgaaaatatgct

SEQ ID NO: 619202 - DNA, 15 bp, Homo sapiens
aatgaaaatatgcta

SEQ ID NO: 619203 - DNA, 15 bp, Homo sapiens
atgaaaatatgctaa

SEQ ID NO: 619204 - DNA, 15 bp, Homo sapiens
tgaaaatatgctaat

SEQ ID NO: 619205 - DNA, 15 bp, Homo sapiens
gaaaatatgctaatt

SEQ ID NO: 619206 - DNA, 15 bp, Homo sapiens
aaaatatgctaattt

SEQ ID NO: 619207 - DNA, 15 bp, Homo sapiens
aaatatgctaattta

SEQ ID NO: 619208 - DNA, 15 bp, Homo sapiens
aatatgctaatttat

SEQ ID NO: 619209 - DNA, 15 bp, Homo sapiens
atatgctaatttata

SEQ ID NO: 619210 - DNA, 15 bp, Homo sapiens
tatgctaatttatat

SEQ ID NO: 619211 - DNA, 15 bp, Homo sapiens
atgctaatttatatc

SEQ ID NO: 619212 - DNA, 15 bp, Homo sapiens
tgctaatttatatca

SEQ ID NO: 619213 - DNA, 15 bp, Homo sapiens
gctaatttatatcag

SEQ ID NO: 619214 - DNA, 15 bp, Homo sapiens
ctaatttatatcaga

SEQ ID NO: 619215 - DNA, 15 bp, Homo sapiens
taatttatatcagaa

SEQ ID NO: 619216 - DNA, 15 bp, Homo sapiens
aatttatatcagaag

SEQ ID NO: 619217 - DNA, 15 bp, Homo sapiens
atttatatcagaagc

SEQ ID NO: 619218 - DNA, 15 bp, Homo sapiens
tttatatcagaagct

SEQ ID NO: 619219 - DNA, 15 bp, Homo sapiens
ttatatcagaagctt

SEQ ID NO: 619220 - DNA, 15 bp, Homo sapiens
tatatcagaagcttt

SEQ ID NO: 619221 - DNA, 15 bp, Homo sapiens
atatcagaagctttg

SEQ ID NO: 619222 - DNA, 15 bp, Homo sapiens
tatcagaagctttgc

SEQ ID NO: 619223 - DNA, 15 bp, Homo sapiens
atcagaagctttgct

SEQ ID NO: 619224 - DNA, 15 bp, Homo sapiens
tcagaagctttgctg

SEQ ID NO: 619225 - DNA, 15 bp, Homo sapiens
cagaagctttgctgg

SEQ ID NO: 619226 - DNA, 15 bp, Homo sapiens
agaagctttgctgga

SEQ ID NO: 619227 - DNA, 15 bp, Homo sapiens
gaagctttgctggat

SEQ ID NO: 619228 - DNA, 15 bp, Homo sapiens
aagctttgctggatt

SEQ ID NO: 619229 - DNA, 15 bp, Homo sapiens
agctttgctggattc

SEQ ID NO: 619230 - DNA, 15 bp, Homo sapiens
gctttgctggattca

SEQ ID NO: 619231 - DNA, 15 bp, Homo sapiens
ctttgctggattcaa

SEQ ID NO: 619232 - DNA, 15 bp, Homo sapiens
tttgctggattcaag

SEQ ID NO: 619233 - DNA, 15 bp, Homo sapiens
ttgctggattcaaga

SEQ ID NO: 619234 - DNA, 15 bp, Homo sapiens
tgctggattcaagag

SEQ ID NO: 619235 - DNA, 15 bp, Homo sapiens
gctggattcaagagt

SEQ ID NO: 619236 - DNA, 15 bp, Homo sapiens
ctggattcaagagtt

SEQ ID NO: 619237 - DNA, 15 bp, Homo sapiens
tggattcaagagtta

SEQ ID NO: 619238 - DNA, 15 bp, Homo sapiens
ggattcaagagttag

SEQ ID NO: 619239 - DNA, 15 bp, Homo sapiens
gattcaagagttagg

SEQ ID NO: 619240 - DNA, 15 bp, Homo sapiens
attcaagagttaggg

SEQ ID NO: 619241 - DNA, 15 bp, Homo sapiens
ttcaagagttagggc

SEQ ID NO: 619242 - DNA, 15 bp, Homo sapiens
tcaagagttagggcc

SEQ ID NO: 619243 - DNA, 15 bp, Homo sapiens
caagagttagggcct

SEQ ID NO: 619244 - DNA, 15 bp, Homo sapiens
aagagttagggcctt

SEQ ID NO: 619245 - DNA, 15 bp, Homo sapiens
agagttagggccttt

SEQ ID NO: 619246 - DNA, 15 bp, Homo sapiens
gagttagggcctttt

SEQ ID NO: 619247 - DNA, 15 bp, Homo sapiens
agttagggcctttta

SEQ ID NO: 619248 - DNA, 15 bp, Homo sapiens
gttagggccttttac

SEQ ID NO: 619249 - DNA, 15 bp, Homo sapiens
ttagggccttttacc

SEQ ID NO: 619250 - DNA, 15 bp, Homo sapiens
tagggccttttacct

SEQ ID NO: 619251 - DNA, 15 bp, Homo sapiens
agggccttttacctg

SEQ ID NO: 619252 - DNA, 15 bp, Homo sapiens
gggccttttacctgt

SEQ ID NO: 619253 - DNA, 15 bp, Homo sapiens
ggccttttacctgtg

SEQ ID NO: 619254 - DNA, 15 bp, Homo sapiens
gccttttacctgtgc

SEQ ID NO: 619255 - DNA, 15 bp, Homo sapiens
ccttttacctgtgca

SEQ ID NO: 619256 - DNA, 15 bp, Homo sapiens
cttttacctgtgcag

SEQ ID NO: 619257 - DNA, 15 bp, Homo sapiens
ttttacctgtgcaga

SEQ ID NO: 619258 - DNA, 15 bp, Homo sapiens
tttacctgtgcagaa

SEQ ID NO: 619259 - DNA, 15 bp, Homo sapiens
ttacctgtgcagaat

SEQ ID NO: 619260 - DNA, 15 bp, Homo sapiens
tacctgtgcagaata

SEQ ID NO: 619261 - DNA, 15 bp, Homo sapiens
acctgtgcagaatat

SEQ ID NO: 619262 - DNA, 15 bp, Homo sapiens
cctgtgcagaatatt

SEQ ID NO: 619263 - DNA, 15 bp, Homo sapiens
ctgtgcagaatattc

SEQ ID NO: 619264 - DNA, 15 bp, Homo sapiens
tgtgcagaatattcc

SEQ ID NO: 619265 - DNA, 15 bp, Homo sapiens
gtgcagaatattcct

SEQ ID NO: 619266 - DNA, 15 bp, Homo sapiens
tgcagaatattcctt

SEQ ID NO: 619267 - DNA, 15 bp, Homo sapiens
gcagaatattccttc

SEQ ID NO: 619268 - DNA, 15 bp, Homo sapiens
cagaatattccttct

SEQ ID NO: 619269 - DNA, 15 bp, Homo sapiens
agaatattccttctt

SEQ ID NO: 619270 - DNA, 15 bp, Homo sapiens
gaatattccttcttg

SEQ ID NO: 619271 - DNA, 15 bp, Homo sapiens
aatattccttcttga

SEQ ID NO: 619272 - DNA, 15 bp, Homo sapiens
atattccttcttgat

SEQ ID NO: 619273 - DNA, 15 bp, Homo sapiens
tattccttcttgata

SEQ ID NO: 619274 - DNA, 15 bp, Homo sapiens
attccttcttgataa

SEQ ID NO: 619275 - DNA, 15 bp, Homo sapiens
ttccttcttgataaa

SEQ ID NO: 619276 - DNA, 15 bp, Homo sapiens
tccttcttgataaat

SEQ ID NO: 619277 - DNA, 15 bp, Homo sapiens
ccttcttgataaata

SEQ ID NO: 619278 - DNA, 15 bp, Homo sapiens
cttcttgataaatag

SEQ ID NO: 619279 - DNA, 15 bp, Homo sapiens
ttcttgataaatagg

SEQ ID NO: 619280 - DNA, 15 bp, Homo sapiens
tcttgataaataggc

SEQ ID NO: 619281 - DNA, 15 bp, Homo sapiens
cttgataaataggcc

SEQ ID NO: 619282 - DNA, 15 bp, Homo sapiens
ttgataaataggccc

SEQ ID NO: 619283 - DNA, 15 bp, Homo sapiens
tgataaataggccct

SEQ ID NO: 619284 - DNA, 15 bp, Homo sapiens
gataaataggccctc

SEQ ID NO: 619285 - DNA, 15 bp, Homo sapiens
ataaataggccctct

SEQ ID NO: 619286 - DNA, 15 bp, Homo sapiens
taaataggccctctc

SEQ ID NO: 619287 - DNA, 15 bp, Homo sapiens
aaataggccctctca

SEQ ID NO: 619288 - DNA, 15 bp, Homo sapiens
aataggccctctcag

SEQ ID NO: 619289 - DNA, 15 bp, Homo sapiens
ataggccctctcagg

SEQ ID NO: 619290 - DNA, 15 bp, Homo sapiens
taggccctctcagga

SEQ ID NO: 619291 - DNA, 15 bp, Homo sapiens
aggccctctcaggag

SEQ ID NO: 619292 - DNA, 15 bp, Homo sapiens
ggccctctcaggaga

SEQ ID NO: 619293 - DNA, 15 bp, Homo sapiens
gccctctcaggagaa

SEQ ID NO: 619294 - DNA, 15 bp, Homo sapiens
ccctctcaggagaat

SEQ ID NO: 619295 - DNA, 15 bp, Homo sapiens
cctctcaggagaata

SEQ ID NO: 619296 - DNA, 15 bp, Homo sapiens
ctctcaggagaataa

SEQ ID NO: 619297 - DNA, 15 bp, Homo sapiens
tctcaggagaataaa

SEQ ID NO: 619298 - DNA, 15 bp, Homo sapiens
ctcaggagaataaat

SEQ ID NO: 619299 - DNA, 15 bp, Homo sapiens
tcaggagaataaatt

SEQ ID NO: 619300 - DNA, 15 bp, Homo sapiens
caggagaataaatta

SEQ ID NO: 619301 - DNA, 15 bp, Homo sapiens
aggagaataaattac

SEQ ID NO: 619302 - DNA, 15 bp, Homo sapiens
ggagaataaattaca

SEQ ID NO: 619303 - DNA, 15 bp, Homo sapiens
gagaataaattacac

SEQ ID NO: 619304 - DNA, 15 bp, Homo sapiens
agaataaattacaca

SEQ ID NO: 619305 - DNA, 15 bp, Homo sapiens
gaataaattacacat

SEQ ID NO: 619306 - DNA, 15 bp, Homo sapiens
aataaattacacatc

SEQ ID NO: 619307 - DNA, 15 bp, Homo sapiens
ataaattacacatca

SEQ ID NO: 619308 - DNA, 15 bp, Homo sapiens
taaattacacatcag

SEQ ID NO: 619309 - DNA, 15 bp, Homo sapiens
aaattacacatcaga

SEQ ID NO: 619310 - DNA, 15 bp, Homo sapiens
aattacacatcagag

SEQ ID NO: 619311 - DNA, 15 bp, Homo sapiens
attacacatcagagg

SEQ ID NO: 619312 - DNA, 15 bp, Homo sapiens
ttacacatcagagga

SEQ ID NO: 619313 - DNA, 15 bp, Homo sapiens
tacacatcagaggac

SEQ ID NO: 619314 - DNA, 15 bp, Homo sapiens
acacatcagaggact

SEQ ID NO: 619315 - DNA, 15 bp, Homo sapiens
cacatcagaggactg

SEQ ID NO: 619316 - DNA, 15 bp, Homo sapiens
acatcagaggactgt

SEQ ID NO: 619317 - DNA, 15 bp, Homo sapiens
catcagaggactgtt

SEQ ID NO: 619318 - DNA, 15 bp, Homo sapiens
atcagaggactgttt

SEQ ID NO: 619319 - DNA, 15 bp, Homo sapiens
tcagaggactgttta

SEQ ID NO: 619320 - DNA, 15 bp, Homo sapiens
cagaggactgtttag

SEQ ID NO: 619321 - DNA, 15 bp, Homo sapiens
agaggactgtttagt

SEQ ID NO: 619322 - DNA, 15 bp, Homo sapiens
gaggactgtttagtc

SEQ ID NO: 619323 - DNA, 15 bp, Homo sapiens
aggactgtttagtca

SEQ ID NO: 619324 - DNA, 15 bp, Homo sapiens
ggactgtttagtcag

SEQ ID NO: 619325 - DNA, 15 bp, Homo sapiens
gactgtttagtcagc

SEQ ID NO: 619326 - DNA, 15 bp, Homo sapiens
actgtttagtcagca

SEQ ID NO: 619327 - DNA, 15 bp, Homo sapiens
ctgtttagtcagcat

SEQ ID NO: 619328 - DNA, 15 bp, Homo sapiens
tgtttagtcagcata

SEQ ID NO: 619329 - DNA, 15 bp, Homo sapiens
gtttagtcagcatag

SEQ ID NO: 619330 - DNA, 15 bp, Homo sapiens
tttagtcagcatagg

SEQ ID NO: 619331 - DNA, 15 bp, Homo sapiens
ttagtcagcataggc

SEQ ID NO: 619332 - DNA, 15 bp, Homo sapiens
tagtcagcataggca

SEQ ID NO: 619333 - DNA, 15 bp, Homo sapiens
agtcagcataggcat

SEQ ID NO: 619334 - DNA, 15 bp, Homo sapiens
gtcagcataggcata

SEQ ID NO: 619335 - DNA, 15 bp, Homo sapiens
tcagcataggcatag

SEQ ID NO: 619336 - DNA, 15 bp, Homo sapiens
cagcataggcataga

SEQ ID NO: 619337 - DNA, 15 bp, Homo sapiens
agcataggcatagaa

SEQ ID NO: 619338 - DNA, 15 bp, Homo sapiens
gcataggcatagaac

SEQ ID NO: 619339 - DNA, 15 bp, Homo sapiens
cataggcatagaaca

SEQ ID NO: 619340 - DNA, 15 bp, Homo sapiens
ataggcatagaacag

SEQ ID NO: 619341 - DNA, 15 bp, Homo sapiens
taggcatagaacagg

SEQ ID NO: 619342 - DNA, 15 bp, Homo sapiens
aggcatagaacagga

SEQ ID NO: 619343 - DNA, 15 bp, Homo sapiens
ggcatagaacaggat

SEQ ID NO: 619344 - DNA, 15 bp, Homo sapiens
gcatagaacaggatg

SEQ ID NO: 619345 - DNA, 15 bp, Homo sapiens
catagaacaggatgt

SEQ ID NO: 619346 - DNA, 15 bp, Homo sapiens
atagaacaggatgtt

SEQ ID NO: 619347 - DNA, 15 bp, Homo sapiens
tagaacaggatgttc

SEQ ID NO: 619348 - DNA, 15 bp, Homo sapiens
agaacaggatgttcc

SEQ ID NO: 619349 - DNA, 15 bp, Homo sapiens
gaacaggatgttcca

SEQ ID NO: 619350 - DNA, 15 bp, Homo sapiens
aacaggatgttccaa

SEQ ID NO: 619351 - DNA, 15 bp, Homo sapiens
acaggatgttccaaa

SEQ ID NO: 619352 - DNA, 15 bp, Homo sapiens
caggatgttccaaag

SEQ ID NO: 619353 - DNA, 15 bp, Homo sapiens
aggatgttccaaaga

SEQ ID NO: 619354 - DNA, 15 bp, Homo sapiens
ggatgttccaaagat

SEQ ID NO: 619355 - DNA, 15 bp, Homo sapiens
gatgttccaaagata

SEQ ID NO: 619356 - DNA, 15 bp, Homo sapiens
atgttccaaagatac

SEQ ID NO: 619357 - DNA, 15 bp, Homo sapiens
tgttccaaagataca

SEQ ID NO: 619358 - DNA, 15 bp, Homo sapiens
gttccaaagatacag

SEQ ID NO: 619359 - DNA, 15 bp, Homo sapiens
ttccaaagatacagt

SEQ ID NO: 619360 - DNA, 15 bp, Homo sapiens
tccaaagatacagtc

SEQ ID NO: 619361 - DNA, 15 bp, Homo sapiens
ccaaagatacagtca

SEQ ID NO: 619362 - DNA, 15 bp, Homo sapiens
caaagatacagtcaa

SEQ ID NO: 619363 - DNA, 15 bp, Homo sapiens
aaagatacagtcaag

SEQ ID NO: 619364 - DNA, 15 bp, Homo sapiens
aagatacagtcaagg

SEQ ID NO: 619365 - DNA, 15 bp, Homo sapiens
agatacagtcaaggg

SEQ ID NO: 619366 - DNA, 15 bp, Homo sapiens
gatacagtcaagggg

SEQ ID NO: 619367 - DNA, 15 bp, Homo sapiens
atacagtcaagggga

SEQ ID NO: 619368 - DNA, 15 bp, Homo sapiens
tacagtcaaggggag

SEQ ID NO: 619369 - DNA, 15 bp, Homo sapiens
acagtcaaggggagt

SEQ ID NO: 619370 - DNA, 15 bp, Homo sapiens
cagtcaaggggagtg

SEQ ID NO: 619371 - DNA, 15 bp, Homo sapiens
agtcaaggggagtgg

SEQ ID NO: 619372 - DNA, 15 bp, Homo sapiens
gtcaaggggagtggg

SEQ ID NO: 619373 - DNA, 15 bp, Homo sapiens
tcaaggggagtgggt

SEQ ID NO: 619374 - DNA, 15 bp, Homo sapiens
caaggggagtgggta

SEQ ID NO: 619375 - DNA, 15 bp, Homo sapiens
aaggggagtgggtaa

SEQ ID NO: 619376 - DNA, 15 bp, Homo sapiens
aggggagtgggtaag

SEQ ID NO: 619377 - DNA, 15 bp, Homo sapiens
ggggagtgggtaaga

SEQ ID NO: 619378 - DNA, 15 bp, Homo sapiens
gggagtgggtaagag

SEQ ID NO: 619379 - DNA, 15 bp, Homo sapiens
ggagtgggtaagagt

SEQ ID NO: 619380 - DNA, 15 bp, Homo sapiens
gagtgggtaagagtg

SEQ ID NO: 619381 - DNA, 15 bp, Homo sapiens
agtgggtaagagtgt

SEQ ID NO: 619382 - DNA, 15 bp, Homo sapiens
gtgggtaagagtgta

SEQ ID NO: 619383 - DNA, 15 bp, Homo sapiens
tgggtaagagtgtag

SEQ ID NO: 619384 - DNA, 15 bp, Homo sapiens
gggtaagagtgtagc

SEQ ID NO: 619385 - DNA, 15 bp, Homo sapiens
ggtaagagtgtagcc

SEQ ID NO: 619386 - DNA, 15 bp, Homo sapiens
gtaagagtgtagcct

SEQ ID NO: 619387 - DNA, 15 bp, Homo sapiens
taagagtgtagcctc

SEQ ID NO: 619388 - DNA, 15 bp, Homo sapiens
aagagtgtagcctct

SEQ ID NO: 619389 - DNA, 15 bp, Homo sapiens
agagtgtagcctctg

SEQ ID NO: 619390 - DNA, 15 bp, Homo sapiens
gagtgtagcctctgg

SEQ ID NO: 619391 - DNA, 15 bp, Homo sapiens
agtgtagcctctgga

SEQ ID NO: 619392 - DNA, 15 bp, Homo sapiens
gtgtagcctctggag

SEQ ID NO: 619393 - DNA, 15 bp, Homo sapiens
tgtagcctctggagt

SEQ ID NO: 619394 - DNA, 15 bp, Homo sapiens
gtagcctctggagtg

SEQ ID NO: 619395 - DNA, 15 bp, Homo sapiens
tagcctctggagtga

SEQ ID NO: 619396 - DNA, 15 bp, Homo sapiens
agcctctggagtgag

SEQ ID NO: 619397 - DNA, 15 bp, Homo sapiens
gcctctggagtgagg

SEQ ID NO: 619398 - DNA, 15 bp, Homo sapiens
cctctggagtgaggc

SEQ ID NO: 619399 - DNA, 15 bp, Homo sapiens
ctctggagtgaggcc

SEQ ID NO: 619400 - DNA, 15 bp, Homo sapiens
tctggagtgaggccg

SEQ ID NO: 619401 - DNA, 15 bp, Homo sapiens
ctggagtgaggccga

SEQ ID NO: 619402 - DNA, 15 bp, Homo sapiens
tggagtgaggccgac

SEQ ID NO: 619403 - DNA, 15 bp, Homo sapiens
ggagtgaggccgacc

SEQ ID NO: 619404 - DNA, 15 bp, Homo sapiens
gagtgaggccgacca

SEQ ID NO: 619405 - DNA, 15 bp, Homo sapiens
agtgaggccgaccaa

SEQ ID NO: 619406 - DNA, 15 bp, Homo sapiens
gtgaggccgaccaaa

SEQ ID NO: 619407 - DNA, 15 bp, Homo sapiens
tgaggccgaccaaat

SEQ ID NO: 619408 - DNA, 15 bp, Homo sapiens
gaggccgaccaaata

SEQ ID NO: 619409 - DNA, 15 bp, Homo sapiens
aggccgaccaaatat

SEQ ID NO: 619410 - DNA, 15 bp, Homo sapiens
ggccgaccaaatatc

SEQ ID NO: 619411 - DNA, 15 bp, Homo sapiens
gccgaccaaatatca

SEQ ID NO: 619412 - DNA, 15 bp, Homo sapiens
ccgaccaaatatcaa

SEQ ID NO: 619413 - DNA, 15 bp, Homo sapiens
cgaccaaatatcaaa

SEQ ID NO: 619414 - DNA, 15 bp, Homo sapiens
gaccaaatatcaaac

SEQ ID NO: 619415 - DNA, 15 bp, Homo sapiens
accaaatatcaaacc

SEQ ID NO: 619416 - DNA, 15 bp, Homo sapiens
ccaaatatcaaacct

SEQ ID NO: 619417 - DNA, 15 bp, Homo sapiens
caaatatcaaacctg

SEQ ID NO: 619418 - DNA, 15 bp, Homo sapiens
aaatatcaaacctga

SEQ ID NO: 619419 - DNA, 15 bp, Homo sapiens
aatatcaaacctgag

SEQ ID NO: 619420 - DNA, 15 bp, Homo sapiens
atatcaaacctgagc

SEQ ID NO: 619421 - DNA, 15 bp, Homo sapiens
tatcaaacctgagct

SEQ ID NO: 619422 - DNA, 15 bp, Homo sapiens
atcaaacctgagctt

SEQ ID NO: 619423 - DNA, 15 bp, Homo sapiens
tcaaacctgagcttc

SEQ ID NO: 619424 - DNA, 15 bp, Homo sapiens
caaacctgagcttca

SEQ ID NO: 619425 - DNA, 15 bp, Homo sapiens
aaacctgagcttcat

SEQ ID NO: 619426 - DNA, 15 bp, Homo sapiens
aacctgagcttcata

SEQ ID NO: 619427 - DNA, 15 bp, Homo sapiens
acctgagcttcataa

SEQ ID NO: 619428 - DNA, 15 bp, Homo sapiens
cctgagcttcataat

SEQ ID NO: 619429 - DNA, 15 bp, Homo sapiens
ctgagcttcataatt

SEQ ID NO: 619430 - DNA, 15 bp, Homo sapiens
tgagcttcataattt

SEQ ID NO: 619431 - DNA, 15 bp, Homo sapiens
gagcttcataatttg

SEQ ID NO: 619432 - DNA, 15 bp, Homo sapiens
agcttcataatttgc

SEQ ID NO: 619433 - DNA, 15 bp, Homo sapiens
gcttcataatttgca

SEQ ID NO: 619434 - DNA, 15 bp, Homo sapiens
cttcataatttgcaa

SEQ ID NO: 619435 - DNA, 15 bp, Homo sapiens
ttcataatttgcaaa

SEQ ID NO: 619436 - DNA, 15 bp, Homo sapiens
tcataatttgcaaac

SEQ ID NO: 619437 - DNA, 15 bp, Homo sapiens
cataatttgcaaact

SEQ ID NO: 619438 - DNA, 15 bp, Homo sapiens
ataatttgcaaacta

SEQ ID NO: 619439 - DNA, 15 bp, Homo sapiens
taatttgcaaactaa

SEQ ID NO: 619440 - DNA, 15 bp, Homo sapiens
aatttgcaaactaac

SEQ ID NO: 619441 - DNA, 15 bp, Homo sapiens
atttgcaaactaact

SEQ ID NO: 619442 - DNA, 15 bp, Homo sapiens
tttgcaaactaactg

SEQ ID NO: 619443 - DNA, 15 bp, Homo sapiens
ttgcaaactaactgg

SEQ ID NO: 619444 - DNA, 15 bp, Homo sapiens
tgcaaactaactggc

SEQ ID NO: 619445 - DNA, 15 bp, Homo sapiens
gcaaactaactggct

SEQ ID NO: 619446 - DNA, 15 bp, Homo sapiens
caaactaactggctt

SEQ ID NO: 619447 - DNA, 15 bp, Homo sapiens
aaactaactggcttt

SEQ ID NO: 619448 - DNA, 15 bp, Homo sapiens
aactaactggctttg

SEQ ID NO: 619449 - DNA, 15 bp, Homo sapiens
actaactggctttgg

SEQ ID NO: 619450 - DNA, 15 bp, Homo sapiens
ctaactggctttggg

SEQ ID NO: 619451 - DNA, 15 bp, Homo sapiens
taactggctttgggt

SEQ ID NO: 619452 - DNA, 15 bp, Homo sapiens
aactggctttgggta

SEQ ID NO: 619453 - DNA, 15 bp, Homo sapiens
actggctttgggtaa

SEQ ID NO: 619454 - DNA, 15 bp, Homo sapiens
ctggctttgggtaag

SEQ ID NO: 619455 - DNA, 15 bp, Homo sapiens
tggctttgggtaagt

SEQ ID NO: 619456 - DNA, 15 bp, Homo sapiens
ggctttgggtaagta

SEQ ID NO: 619457 - DNA, 15 bp, Homo sapiens
gctttgggtaagtac

SEQ ID NO: 619458 - DNA, 15 bp, Homo sapiens
ctttgggtaagtaca

SEQ ID NO: 619459 - DNA, 15 bp, Homo sapiens
tttgggtaagtacat

SEQ ID NO: 619460 - DNA, 15 bp, Homo sapiens
ttgggtaagtacata

SEQ ID NO: 619461 - DNA, 15 bp, Homo sapiens
tgggtaagtacatag

SEQ ID NO: 619462 - DNA, 15 bp, Homo sapiens
gggtaagtacatagc

SEQ ID NO: 619463 - DNA, 15 bp, Homo sapiens
ggtaagtacatagcc

SEQ ID NO: 619464 - DNA, 15 bp, Homo sapiens
gtaagtacatagcct

SEQ ID NO: 619465 - DNA, 15 bp, Homo sapiens
taagtacatagcctc

SEQ ID NO: 619466 - DNA, 15 bp, Homo sapiens
aagtacatagcctct

SEQ ID NO: 619467 - DNA, 15 bp, Homo sapiens
agtacatagcctctt

SEQ ID NO: 619468 - DNA, 15 bp, Homo sapiens
gtacatagcctcttt

SEQ ID NO: 619469 - DNA, 15 bp, Homo sapiens
tacatagcctctttg

SEQ ID NO: 619470 - DNA, 15 bp, Homo sapiens
acatagcctctttgt

SEQ ID NO: 619471 - DNA, 15 bp, Homo sapiens
catagcctctttgta

SEQ ID NO: 619472 - DNA, 15 bp, Homo sapiens
atagcctctttgtac

SEQ ID NO: 619473 - DNA, 15 bp, Homo sapiens
tagcctctttgtacc

SEQ ID NO: 619474 - DNA, 15 bp, Homo sapiens
agcctctttgtacct

SEQ ID NO: 619475 - DNA, 15 bp, Homo sapiens
gcctctttgtacctg

SEQ ID NO: 619476 - DNA, 15 bp, Homo sapiens
cctctttgtacctgt

SEQ ID NO: 619477 - DNA, 15 bp, Homo sapiens
ctctttgtacctgtt

SEQ ID NO: 619478 - DNA, 15 bp, Homo sapiens
tctttgtacctgttt

SEQ ID NO: 619479 - DNA, 15 bp, Homo sapiens
ctttgtacctgtttc

SEQ ID NO: 619480 - DNA, 15 bp, Homo sapiens
tttgtacctgtttcc

SEQ ID NO: 619481 - DNA, 15 bp, Homo sapiens
ttgtacctgtttccc

SEQ ID NO: 619482 - DNA, 15 bp, Homo sapiens
tgtacctgtttcccc

SEQ ID NO: 619483 - DNA, 15 bp, Homo sapiens
gtacctgtttcccca

SEQ ID NO: 619484 - DNA, 15 bp, Homo sapiens
tacctgtttccccat

SEQ ID NO: 619485 - DNA, 15 bp, Homo sapiens
acctgtttccccatc

SEQ ID NO: 619486 - DNA, 15 bp, Homo sapiens
cctgtttccccatct

SEQ ID NO: 619487 - DNA, 15 bp, Homo sapiens
ctgtttccccatctg

SEQ ID NO: 619488 - DNA, 15 bp, Homo sapiens
tgtttccccatctgc

SEQ ID NO: 619489 - DNA, 15 bp, Homo sapiens
gtttccccatctgca

SEQ ID NO: 619490 - DNA, 15 bp, Homo sapiens
tttccccatctgcaa

SEQ ID NO: 619491 - DNA, 15 bp, Homo sapiens
ttccccatctgcaaa

SEQ ID NO: 619492 - DNA, 15 bp, Homo sapiens
tccccatctgcaaaa

SEQ ID NO: 619493 - DNA, 15 bp, Homo sapiens
ccccatctgcaaaat

SEQ ID NO: 619494 - DNA, 15 bp, Homo sapiens
cccatctgcaaaatg

SEQ ID NO: 619495 - DNA, 15 bp, Homo sapiens
ccatctgcaaaatgg

SEQ ID NO: 619496 - DNA, 15 bp, Homo sapiens
catctgcaaaatgga

SEQ ID NO: 619497 - DNA, 15 bp, Homo sapiens
atctgcaaaatggag

SEQ ID NO: 619498 - DNA, 15 bp, Homo sapiens
tctgcaaaatggaga

SEQ ID NO: 619499 - DNA, 15 bp, Homo sapiens
ctgcaaaatggagat

SEQ ID NO: 619500 - DNA, 15 bp, Homo sapiens
tgcaaaatggagata

SEQ ID NO: 619501 - DNA, 15 bp, Homo sapiens
gcaaaatggagataa

SEQ ID NO: 619502 - DNA, 15 bp, Homo sapiens
caaaatggagataat

SEQ ID NO: 619503 - DNA, 15 bp, Homo sapiens
aaaatggagataata

SEQ ID NO: 619504 - DNA, 15 bp, Homo sapiens
aaatggagataataa

SEQ ID NO: 619505 - DNA, 15 bp, Homo sapiens
aatggagataataat

SEQ ID NO: 619506 - DNA, 15 bp, Homo sapiens
atggagataataata

SEQ ID NO: 619507 - DNA, 15 bp, Homo sapiens
tggagataataatag

SEQ ID NO: 619508 - DNA, 15 bp, Homo sapiens
ggagataataatagc

SEQ ID NO: 619509 - DNA, 15 bp, Homo sapiens
gagataataatagca

SEQ ID NO: 619510 - DNA, 15 bp, Homo sapiens
agataataatagcat

SEQ ID NO: 619511 - DNA, 15 bp, Homo sapiens
gataataatagcatc

SEQ ID NO: 619512 - DNA, 15 bp, Homo sapiens
ataataatagcatct

SEQ ID NO: 619513 - DNA, 15 bp, Homo sapiens
taataatagcatcta

SEQ ID NO: 619514 - DNA, 15 bp, Homo sapiens
aataatagcatctac

SEQ ID NO: 619515 - DNA, 15 bp, Homo sapiens
ataatagcatctacc

SEQ ID NO: 619516 - DNA, 15 bp, Homo sapiens
taatagcatctacct

SEQ ID NO: 619517 - DNA, 15 bp, Homo sapiens
aatagcatctacctg

SEQ ID NO: 619518 - DNA, 15 bp, Homo sapiens
atagcatctacctgt

SEQ ID NO: 619519 - DNA, 15 bp, Homo sapiens
tagcatctacctgta

SEQ ID NO: 619520 - DNA, 15 bp, Homo sapiens
agcatctacctgtag

SEQ ID NO: 619521 - DNA, 15 bp, Homo sapiens
gcatctacctgtagc

SEQ ID NO: 619522 - DNA, 15 bp, Homo sapiens
catctacctgtagca

SEQ ID NO: 619523 - DNA, 15 bp, Homo sapiens
atctacctgtagcat

SEQ ID NO: 619524 - DNA, 15 bp, Homo sapiens
tctacctgtagcatt

SEQ ID NO: 619525 - DNA, 15 bp, Homo sapiens
ctacctgtagcattg

SEQ ID NO: 619526 - DNA, 15 bp, Homo sapiens
tacctgtagcattgt

SEQ ID NO: 619527 - DNA, 15 bp, Homo sapiens
acctgtagcattgtt

SEQ ID NO: 619528 - DNA, 15 bp, Homo sapiens
cctgtagcattgttg

SEQ ID NO: 619529 - DNA, 15 bp, Homo sapiens
ctgtagcattgttga

SEQ ID NO: 619530 - DNA, 15 bp, Homo sapiens
tgtagcattgttgag

SEQ ID NO: 619531 - DNA, 15 bp, Homo sapiens
gtagcattgttgaga

SEQ ID NO: 619532 - DNA, 15 bp, Homo sapiens
tagcattgttgagag

SEQ ID NO: 619533 - DNA, 15 bp, Homo sapiens
agcattgttgagaga

SEQ ID NO: 619534 - DNA, 15 bp, Homo sapiens
gcattgttgagagaa

SEQ ID NO: 619535 - DNA, 15 bp, Homo sapiens
cattgttgagagaat

SEQ ID NO: 619536 - DNA, 15 bp, Homo sapiens
attgttgagagaatt

SEQ ID NO: 619537 - DNA, 15 bp, Homo sapiens
ttgttgagagaatta

SEQ ID NO: 619538 - DNA, 15 bp, Homo sapiens
tgttgagagaattaa

SEQ ID NO: 619539 - DNA, 15 bp, Homo sapiens
gttgagagaattaag

SEQ ID NO: 619540 - DNA, 15 bp, Homo sapiens
ttgagagaattaagt

SEQ ID NO: 619541 - DNA, 15 bp, Homo sapiens
tgagagaattaagtg

SEQ ID NO: 619542 - DNA, 15 bp, Homo sapiens
gagagaattaagtga

SEQ ID NO: 619543 - DNA, 15 bp, Homo sapiens
agagaattaagtgag

SEQ ID NO: 619544 - DNA, 15 bp, Homo sapiens
gagaattaagtgagt

SEQ ID NO: 619545 - DNA, 15 bp, Homo sapiens
agaattaagtgagtt

SEQ ID NO: 619546 - DNA, 15 bp, Homo sapiens
gaattaagtgagtta

SEQ ID NO: 619547 - DNA, 15 bp, Homo sapiens
aattaagtgagttaa

SEQ ID NO: 619548 - DNA, 15 bp, Homo sapiens
attaagtgagttaat

SEQ ID NO: 619549 - DNA, 15 bp, Homo sapiens
ttaagtgagttaatg

SEQ ID NO: 619550 - DNA, 15 bp, Homo sapiens
taagtgagttaatgc

SEQ ID NO: 619551 - DNA, 15 bp, Homo sapiens
aagtgagttaatgct

SEQ ID NO: 619552 - DNA, 15 bp, Homo sapiens
agtgagttaatgctt

SEQ ID NO: 619553 - DNA, 15 bp, Homo sapiens
gtgagttaatgcttg

SEQ ID NO: 619554 - DNA, 15 bp, Homo sapiens
tgagttaatgcttgc

SEQ ID NO: 619555 - DNA, 15 bp, Homo sapiens
gagttaatgcttgcc

SEQ ID NO: 619556 - DNA, 15 bp, Homo sapiens
agttaatgcttgccg

SEQ ID NO: 619557 - DNA, 15 bp, Homo sapiens
gttaatgcttgccga

SEQ ID NO: 619558 - DNA, 15 bp, Homo sapiens
ttaatgcttgccgac

SEQ ID NO: 619559 - DNA, 15 bp, Homo sapiens
taatgcttgccgact

SEQ ID NO: 619560 - DNA, 15 bp, Homo sapiens
aatgcttgccgactt

SEQ ID NO: 619561 - DNA, 15 bp, Homo sapiens
atgcttgccgactta

SEQ ID NO: 619562 - DNA, 15 bp, Homo sapiens
tgcttgccgacttat

SEQ ID NO: 619563 - DNA, 15 bp, Homo sapiens
gcttgccgacttata

SEQ ID NO: 619564 - DNA, 15 bp, Homo sapiens
cttgccgacttataa

SEQ ID NO: 619565 - DNA, 15 bp, Homo sapiens
ttgccgacttataac

SEQ ID NO: 619566 - DNA, 15 bp, Homo sapiens
tgccgacttataaca

SEQ ID NO: 619567 - DNA, 15 bp, Homo sapiens
gccgacttataacac

SEQ ID NO: 619568 - DNA, 15 bp, Homo sapiens
ccgacttataacaca

SEQ ID NO: 619569 - DNA, 15 bp, Homo sapiens
cgacttataacacag

SEQ ID NO: 619570 - DNA, 15 bp, Homo sapiens
gacttataacacagt

SEQ ID NO: 619571 - DNA, 15 bp, Homo sapiens
acttataacacagta

SEQ ID NO: 619572 - DNA, 15 bp, Homo sapiens
cttataacacagtat

SEQ ID NO: 619573 - DNA, 15 bp, Homo sapiens
ttataacacagtata

SEQ ID NO: 619574 - DNA, 15 bp, Homo sapiens
tataacacagtatac

SEQ ID NO: 619575 - DNA, 15 bp, Homo sapiens
ataacacagtatacg

SEQ ID NO: 619576 - DNA, 15 bp, Homo sapiens
taacacagtatacga

SEQ ID NO: 619577 - DNA, 15 bp, Homo sapiens
aacacagtatacgat

SEQ ID NO: 619578 - DNA, 15 bp, Homo sapiens
acacagtatacgatc

SEQ ID NO: 619579 - DNA, 15 bp, Homo sapiens
cacagtatacgatca

SEQ ID NO: 619580 - DNA, 15 bp, Homo sapiens
acagtatacgatcac

SEQ ID NO: 619581 - DNA, 15 bp, Homo sapiens
cagtatacgatcact

SEQ ID NO: 619582 - DNA, 15 bp, Homo sapiens
agtatacgatcactg

SEQ ID NO: 619583 - DNA, 15 bp, Homo sapiens
gtatacgatcactga

SEQ ID NO: 619584 - DNA, 15 bp, Homo sapiens
tatacgatcactgat

SEQ ID NO: 619585 - DNA, 15 bp, Homo sapiens
atacgatcactgatt

SEQ ID NO: 619586 - DNA, 15 bp, Homo sapiens
tacgatcactgatta

SEQ ID NO: 619587 - DNA, 15 bp, Homo sapiens
acgatcactgattaa

SEQ ID NO: 619588 - DNA, 15 bp, Homo sapiens
cgatcactgattaag

SEQ ID NO: 619589 - DNA, 15 bp, Homo sapiens
gatcactgattaaga

SEQ ID NO: 619590 - DNA, 15 bp, Homo sapiens
atcactgattaagac

SEQ ID NO: 619591 - DNA, 15 bp, Homo sapiens
tcactgattaagact

SEQ ID NO: 619592 - DNA, 15 bp, Homo sapiens
cactgattaagactt

SEQ ID NO: 619593 - DNA, 15 bp, Homo sapiens
actgattaagactta

SEQ ID NO: 619594 - DNA, 15 bp, Homo sapiens
ctgattaagacttag

SEQ ID NO: 619595 - DNA, 15 bp, Homo sapiens
tgattaagacttagc

SEQ ID NO: 619596 - DNA, 15 bp, Homo sapiens
gattaagacttagca

SEQ ID NO: 619597 - DNA, 15 bp, Homo sapiens
attaagacttagcaa

SEQ ID NO: 619598 - DNA, 15 bp, Homo sapiens
ttaagacttagcaac

SEQ ID NO: 619599 - DNA, 15 bp, Homo sapiens
taagacttagcaact

SEQ ID NO: 619600 - DNA, 15 bp, Homo sapiens
aagacttagcaactc

SEQ ID NO: 619601 - DNA, 15 bp, Homo sapiens
agacttagcaactct

SEQ ID NO: 619602 - DNA, 15 bp, Homo sapiens
gacttagcaactcta

SEQ ID NO: 619603 - DNA, 15 bp, Homo sapiens
acttagcaactctaa

SEQ ID NO: 619604 - DNA, 15 bp, Homo sapiens
cttagcaactctaaa

SEQ ID NO: 619605 - DNA, 15 bp, Homo sapiens
ttagcaactctaaac

SEQ ID NO: 619606 - DNA, 15 bp, Homo sapiens
tagcaactctaaact

SEQ ID NO: 619607 - DNA, 15 bp, Homo sapiens
agcaactctaaacta

SEQ ID NO: 619608 - DNA, 15 bp, Homo sapiens
gcaactctaaactaa

SEQ ID NO: 619609 - DNA, 15 bp, Homo sapiens
caactctaaactaaa

SEQ ID NO: 619610 - DNA, 15 bp, Homo sapiens
aactctaaactaaat

SEQ ID NO: 619611 - DNA, 15 bp, Homo sapiens
actctaaactaaatg

SEQ ID NO: 619612 - DNA, 15 bp, Homo sapiens
ctctaaactaaatgt

SEQ ID NO: 619613 - DNA, 15 bp, Homo sapiens
tctaaactaaatgtt

SEQ ID NO: 619614 - DNA, 15 bp, Homo sapiens
ctaaactaaatgttt

SEQ ID NO: 619615 - DNA, 15 bp, Homo sapiens
taaactaaatgttta

SEQ ID NO: 619616 - DNA, 15 bp, Homo sapiens
aaactaaatgtttac

SEQ ID NO: 619617 - DNA, 15 bp, Homo sapiens
aactaaatgtttaca

SEQ ID NO: 619618 - DNA, 15 bp, Homo sapiens
actaaatgtttacaa

SEQ ID NO: 619619 - DNA, 15 bp, Homo sapiens
ctaaatgtttacaaa

SEQ ID NO: 619620 - DNA, 15 bp, Homo sapiens
taaatgtttacaaac

SEQ ID NO: 619621 - DNA, 15 bp, Homo sapiens
aaatgtttacaaacc

SEQ ID NO: 619622 - DNA, 15 bp, Homo sapiens
aatgtttacaaacca

SEQ ID NO: 619623 - DNA, 15 bp, Homo sapiens
atgtttacaaaccat

SEQ ID NO: 619624 - DNA, 15 bp, Homo sapiens
tgtttacaaaccatc

SEQ ID NO: 619625 - DNA, 15 bp, Homo sapiens
gtttacaaaccatct

SEQ ID NO: 619626 - DNA, 15 bp, Homo sapiens
tttacaaaccatctc

SEQ ID NO: 619627 - DNA, 15 bp, Homo sapiens
ttacaaaccatctct

SEQ ID NO: 619628 - DNA, 15 bp, Homo sapiens
tacaaaccatctctt

SEQ ID NO: 619629 - DNA, 15 bp, Homo sapiens
acaaaccatctctta

SEQ ID NO: 619630 - DNA, 15 bp, Homo sapiens
caaaccatctcttac

SEQ ID NO: 619631 - DNA, 15 bp, Homo sapiens
aaaccatctcttacc

SEQ ID NO: 619632 - DNA, 15 bp, Homo sapiens
aaccatctcttacct

SEQ ID NO: 619633 - DNA, 15 bp, Homo sapiens
accatctcttacctc

SEQ ID NO: 619634 - DNA, 15 bp, Homo sapiens
ccatctcttacctca

SEQ ID NO: 619635 - DNA, 15 bp, Homo sapiens
catctcttacctcaa

SEQ ID NO: 619636 - DNA, 15 bp, Homo sapiens
atctcttacctcaaa

SEQ ID NO: 619637 - DNA, 15 bp, Homo sapiens
tctcttacctcaaag

SEQ ID NO: 619638 - DNA, 15 bp, Homo sapiens
ctcttacctcaaagc

SEQ ID NO: 619639 - DNA, 15 bp, Homo sapiens
tcttacctcaaagca

SEQ ID NO: 619640 - DNA, 15 bp, Homo sapiens
cttacctcaaagcac

SEQ ID NO: 619641 - DNA, 15 bp, Homo sapiens
ttacctcaaagcact

SEQ ID NO: 619642 - DNA, 15 bp, Homo sapiens
tacctcaaagcactt

SEQ ID NO: 619643 - DNA, 15 bp, Homo sapiens
acctcaaagcactta

SEQ ID NO: 619644 - DNA, 15 bp, Homo sapiens
cctcaaagcacttaa

SEQ ID NO: 619645 - DNA, 15 bp, Homo sapiens
ctcaaagcacttaac

SEQ ID NO: 619646 - DNA, 15 bp, Homo sapiens
tcaaagcacttaaca

SEQ ID NO: 619647 - DNA, 15 bp, Homo sapiens
caaagcacttaacat

SEQ ID NO: 619648 - DNA, 15 bp, Homo sapiens
aaagcacttaacatc

SEQ ID NO: 619649 - DNA, 15 bp, Homo sapiens
aagcacttaacatcc

SEQ ID NO: 619650 - DNA, 15 bp, Homo sapiens
agcacttaacatcca

SEQ ID NO: 619651 - DNA, 15 bp, Homo sapiens
gcacttaacatccat

SEQ ID NO: 619652 - DNA, 15 bp, Homo sapiens
cacttaacatccatt

SEQ ID NO: 619653 - DNA, 15 bp, Homo sapiens
acttaacatccattg

SEQ ID NO: 619654 - DNA, 15 bp, Homo sapiens
cttaacatccattgt

SEQ ID NO: 619655 - DNA, 15 bp, Homo sapiens
ttaacatccattgtc

SEQ ID NO: 619656 - DNA, 15 bp, Homo sapiens
taacatccattgtct

SEQ ID NO: 619657 - DNA, 15 bp, Homo sapiens
aacatccattgtctt

SEQ ID NO: 619658 - DNA, 15 bp, Homo sapiens
acatccattgtctta

SEQ ID NO: 619659 - DNA, 15 bp, Homo sapiens
catccattgtcttat

SEQ ID NO: 619660 - DNA, 15 bp, Homo sapiens
atccattgtcttatt

SEQ ID NO: 619661 - DNA, 15 bp, Homo sapiens
tccattgtcttattt

SEQ ID NO: 619662 - DNA, 15 bp, Homo sapiens
ccattgtcttatttg

SEQ ID NO: 619663 - DNA, 15 bp, Homo sapiens
cattgtcttatttga

SEQ ID NO: 619664 - DNA, 15 bp, Homo sapiens
attgtcttatttgat

SEQ ID NO: 619665 - DNA, 15 bp, Homo sapiens
ttgtcttatttgatt

SEQ ID NO: 619666 - DNA, 15 bp, Homo sapiens
tgtcttatttgatta

SEQ ID NO: 619667 - DNA, 15 bp, Homo sapiens
gtcttatttgattat

SEQ ID NO: 619668 - DNA, 15 bp, Homo sapiens
tcttatttgattatc

SEQ ID NO: 619669 - DNA, 15 bp, Homo sapiens
cttatttgattatca

SEQ ID NO: 619670 - DNA, 15 bp, Homo sapiens
ttatttgattatcac

SEQ ID NO: 619671 - DNA, 15 bp, Homo sapiens
tatttgattatcact

SEQ ID NO: 619672 - DNA, 15 bp, Homo sapiens
atttgattatcactg

SEQ ID NO: 619673 - DNA, 15 bp, Homo sapiens
tttgattatcactgt

SEQ ID NO: 619674 - DNA, 15 bp, Homo sapiens
ttgattatcactgta

SEQ ID NO: 619675 - DNA, 15 bp, Homo sapiens
tgattatcactgtaa

SEQ ID NO: 619676 - DNA, 15 bp, Homo sapiens
gattatcactgtaat

SEQ ID NO: 619677 - DNA, 15 bp, Homo sapiens
attatcactgtaatc

SEQ ID NO: 619678 - DNA, 15 bp, Homo sapiens
ttatcactgtaatct

SEQ ID NO: 619679 - DNA, 15 bp, Homo sapiens
tatcactgtaatctt

SEQ ID NO: 619680 - DNA, 15 bp, Homo sapiens
atcactgtaatctta

SEQ ID NO: 619681 - DNA, 15 bp, Homo sapiens
tcactgtaatcttat

SEQ ID NO: 619682 - DNA, 15 bp, Homo sapiens
cactgtaatcttatg

SEQ ID NO: 619683 - DNA, 15 bp, Homo sapiens
actgtaatcttatga

SEQ ID NO: 619684 - DNA, 15 bp, Homo sapiens
ctgtaatcttatgaa

SEQ ID NO: 619685 - DNA, 15 bp, Homo sapiens
tgtaatcttatgaag

SEQ ID NO: 619686 - DNA, 15 bp, Homo sapiens
gtaatcttatgaagc

SEQ ID NO: 619687 - DNA, 15 bp, Homo sapiens
taatcttatgaagca

SEQ ID NO: 619688 - DNA, 15 bp, Homo sapiens
aatcttatgaagcag

SEQ ID NO: 619689 - DNA, 15 bp, Homo sapiens
atcttatgaagcagg

SEQ ID NO: 619690 - DNA, 15 bp, Homo sapiens
tcttatgaagcaggc

SEQ ID NO: 619691 - DNA, 15 bp, Homo sapiens
cttatgaagcaggca

SEQ ID NO: 619692 - DNA, 15 bp, Homo sapiens
ttatgaagcaggcag

SEQ ID NO: 619693 - DNA, 15 bp, Homo sapiens
tatgaagcaggcagg

SEQ ID NO: 619694 - DNA, 15 bp, Homo sapiens
atgaagcaggcaggg

SEQ ID NO: 619695 - DNA, 15 bp, Homo sapiens
tgaagcaggcagggc

SEQ ID NO: 619696 - DNA, 15 bp, Homo sapiens
gaagcaggcagggca

SEQ ID NO: 619697 - DNA, 15 bp, Homo sapiens
aagcaggcagggcag

SEQ ID NO: 619698 - DNA, 15 bp, Homo sapiens
agcaggcagggcagg

SEQ ID NO: 619699 - DNA, 15 bp, Homo sapiens
gcaggcagggcaggg

SEQ ID NO: 619700 - DNA, 15 bp, Homo sapiens
caggcagggcagggg

SEQ ID NO: 619701 - DNA, 15 bp, Homo sapiens
aggcagggcaggggt

SEQ ID NO: 619702 - DNA, 15 bp, Homo sapiens
ggcagggcaggggtc

SEQ ID NO: 619703 - DNA, 15 bp, Homo sapiens
gcagggcaggggtct

SEQ ID NO: 619704 - DNA, 15 bp, Homo sapiens
cagggcaggggtctg

SEQ ID NO: 619705 - DNA, 15 bp, Homo sapiens
agggcaggggtctgc

SEQ ID NO: 619706 - DNA, 15 bp, Homo sapiens
gggcaggggtctgcc

SEQ ID NO: 619707 - DNA, 15 bp, Homo sapiens
ggcaggggtctgccc

SEQ ID NO: 619708 - DNA, 15 bp, Homo sapiens
gcaggggtctgcccc

SEQ ID NO: 619709 - DNA, 15 bp, Homo sapiens
caggggtctgcccca

SEQ ID NO: 619710 - DNA, 15 bp, Homo sapiens
aggggtctgccccat

SEQ ID NO: 619711 - DNA, 15 bp, Homo sapiens
ggggtctgccccatc

SEQ ID NO: 619712 - DNA, 15 bp, Homo sapiens
gggtctgccccatct

SEQ ID NO: 619713 - DNA, 15 bp, Homo sapiens
ggtctgccccatctg

SEQ ID NO: 619714 - DNA, 15 bp, Homo sapiens
gtctgccccatctgg

SEQ ID NO: 619715 - DNA, 15 bp, Homo sapiens
tctgccccatctggg

SEQ ID NO: 619716 - DNA, 15 bp, Homo sapiens
ctgccccatctgggg

SEQ ID NO: 619717 - DNA, 15 bp, Homo sapiens
tgccccatctggggg

SEQ ID NO: 619718 - DNA, 15 bp, Homo sapiens
gccccatctgggggg

SEQ ID NO: 619719 - DNA, 15 bp, Homo sapiens
ccccatctgggggga

SEQ ID NO: 619720 - DNA, 15 bp, Homo sapiens
cccatctggggggaa

SEQ ID NO: 619721 - DNA, 15 bp, Homo sapiens
ccatctggggggaac

SEQ ID NO: 619722 - DNA, 15 bp, Homo sapiens
catctggggggaact

SEQ ID NO: 619723 - DNA, 15 bp, Homo sapiens
atctggggggaactg

SEQ ID NO: 619724 - DNA, 15 bp, Homo sapiens
tctggggggaactga

SEQ ID NO: 619725 - DNA, 15 bp, Homo sapiens
ctggggggaactgag

SEQ ID NO: 619726 - DNA, 15 bp, Homo sapiens
tggggggaactgagc

SEQ ID NO: 619727 - DNA, 15 bp, Homo sapiens
ggggggaactgagct

SEQ ID NO: 619728 - DNA, 15 bp, Homo sapiens
gggggaactgagctc

SEQ ID NO: 619729 - DNA, 15 bp, Homo sapiens
ggggaactgagctca

SEQ ID NO: 619730 - DNA, 15 bp, Homo sapiens
gggaactgagctcac

SEQ ID NO: 619731 - DNA, 15 bp, Homo sapiens
ggaactgagctcaca

SEQ ID NO: 619732 - DNA, 15 bp, Homo sapiens
gaactgagctcacag

SEQ ID NO: 619733 - DNA, 15 bp, Homo sapiens
aactgagctcacaga

SEQ ID NO: 619734 - DNA, 15 bp, Homo sapiens
actgagctcacagag

SEQ ID NO: 619735 - DNA, 15 bp, Homo sapiens
ctgagctcacagagg

SEQ ID NO: 619736 - DNA, 15 bp, Homo sapiens
tgagctcacagaggt

SEQ ID NO: 619737 - DNA, 15 bp, Homo sapiens
gagctcacagaggtt

SEQ ID NO: 619738 - DNA, 15 bp, Homo sapiens
agctcacagaggttg

SEQ ID NO: 619739 - DNA, 15 bp, Homo sapiens
gctcacagaggttgg

SEQ ID NO: 619740 - DNA, 15 bp, Homo sapiens
ctcacagaggttgga

SEQ ID NO: 619741 - DNA, 15 bp, Homo sapiens
tcacagaggttggag

SEQ ID NO: 619742 - DNA, 15 bp, Homo sapiens
cacagaggttggagg

SEQ ID NO: 619743 - DNA, 15 bp, Homo sapiens
acagaggttggaggg

SEQ ID NO: 619744 - DNA, 15 bp, Homo sapiens
cagaggttggagggt

SEQ ID NO: 619745 - DNA, 15 bp, Homo sapiens
agaggttggagggtt

SEQ ID NO: 619746 - DNA, 15 bp, Homo sapiens
gaggttggagggttt

SEQ ID NO: 619747 - DNA, 15 bp, Homo sapiens
aggttggagggtttg

SEQ ID NO: 619748 - DNA, 15 bp, Homo sapiens
ggttggagggtttgc

SEQ ID NO: 619749 - DNA, 15 bp, Homo sapiens
gttggagggtttgcc

SEQ ID NO: 619750 - DNA, 15 bp, Homo sapiens
ttggagggtttgcct

SEQ ID NO: 619751 - DNA, 15 bp, Homo sapiens
tggagggtttgccta

SEQ ID NO: 619752 - DNA, 15 bp, Homo sapiens
ggagggtttgcctaa

SEQ ID NO: 619753 - DNA, 15 bp, Homo sapiens
gagggtttgcctaaa

SEQ ID NO: 619754 - DNA, 15 bp, Homo sapiens
agggtttgcctaaag

SEQ ID NO: 619755 - DNA, 15 bp, Homo sapiens
gggtttgcctaaagt

SEQ ID NO: 619756 - DNA, 15 bp, Homo sapiens
ggtttgcctaaagtc

SEQ ID NO: 619757 - DNA, 15 bp, Homo sapiens
gtttgcctaaagtca

SEQ ID NO: 619758 - DNA, 15 bp, Homo sapiens
tttgcctaaagtcac

SEQ ID NO: 619759 - DNA, 15 bp, Homo sapiens
ttgcctaaagtcacc

SEQ ID NO: 619760 - DNA, 15 bp, Homo sapiens
tgcctaaagtcaccc

SEQ ID NO: 619761 - DNA, 15 bp, Homo sapiens
gcctaaagtcaccca

SEQ ID NO: 619762 - DNA, 15 bp, Homo sapiens
cctaaagtcacccag

SEQ ID NO: 619763 - DNA, 15 bp, Homo sapiens
ctaaagtcacccagg

SEQ ID NO: 619764 - DNA, 15 bp, Homo sapiens
taaagtcacccaggc

SEQ ID NO: 619765 - DNA, 15 bp, Homo sapiens
aaagtcacccaggcc

SEQ ID NO: 619766 - DNA, 15 bp, Homo sapiens
aagtcacccaggcca

SEQ ID NO: 619767 - DNA, 15 bp, Homo sapiens
agtcacccaggccac

SEQ ID NO: 619768 - DNA, 15 bp, Homo sapiens
gtcacccaggccact

SEQ ID NO: 619769 - DNA, 15 bp, Homo sapiens
tcacccaggccactg

SEQ ID NO: 619770 - DNA, 15 bp, Homo sapiens
cacccaggccactgg

SEQ ID NO: 619771 - DNA, 15 bp, Homo sapiens
acccaggccactggg

SEQ ID NO: 619772 - DNA, 15 bp, Homo sapiens
cccaggccactgggt

SEQ ID NO: 619773 - DNA, 15 bp, Homo sapiens
ccaggccactgggtc

SEQ ID NO: 619774 - DNA, 15 bp, Homo sapiens
caggccactgggtct

SEQ ID NO: 619775 - DNA, 15 bp, Homo sapiens
aggccactgggtctc

SEQ ID NO: 619776 - DNA, 15 bp, Homo sapiens
ggccactgggtctca

SEQ ID NO: 619777 - DNA, 15 bp, Homo sapiens
gccactgggtctcac

SEQ ID NO: 619778 - DNA, 15 bp, Homo sapiens
ccactgggtctcact

SEQ ID NO: 619779 - DNA, 15 bp, Homo sapiens
cactgggtctcactc

SEQ ID NO: 619780 - DNA, 15 bp, Homo sapiens
actgggtctcactct

SEQ ID NO: 619781 - DNA, 15 bp, Homo sapiens
ctgggtctcactctc

SEQ ID NO: 619782 - DNA, 15 bp, Homo sapiens
tgggtctcactctct

SEQ ID NO: 619783 - DNA, 15 bp, Homo sapiens
gggtctcactctctg

SEQ ID NO: 619784 - DNA, 15 bp, Homo sapiens
ggtctcactctctgg

SEQ ID NO: 619785 - DNA, 15 bp, Homo sapiens
gtctcactctctggt

SEQ ID NO: 619786 - DNA, 15 bp, Homo sapiens
tctcactctctggtc

SEQ ID NO: 619787 - DNA, 15 bp, Homo sapiens
ctcactctctggtct

SEQ ID NO: 619788 - DNA, 15 bp, Homo sapiens
tcactctctggtctt

SEQ ID NO: 619789 - DNA, 15 bp, Homo sapiens
cactctctggtctta

SEQ ID NO: 619790 - DNA, 15 bp, Homo sapiens
actctctggtcttag

SEQ ID NO: 619791 - DNA, 15 bp, Homo sapiens
ctctctggtcttagc

SEQ ID NO: 619792 - DNA, 15 bp, Homo sapiens
tctctggtcttagct

SEQ ID NO: 619793 - DNA, 15 bp, Homo sapiens
ctctggtcttagctc

SEQ ID NO: 619794 - DNA, 15 bp, Homo sapiens
tctggtcttagctct

SEQ ID NO: 619795 - DNA, 15 bp, Homo sapiens
ctggtcttagctctg

SEQ ID NO: 619796 - DNA, 15 bp, Homo sapiens
tggtcttagctctgt

SEQ ID NO: 619797 - DNA, 15 bp, Homo sapiens
ggtcttagctctgta

SEQ ID NO: 619798 - DNA, 15 bp, Homo sapiens
gtcttagctctgtaa

SEQ ID NO: 619799 - DNA, 15 bp, Homo sapiens
tcttagctctgtaat

SEQ ID NO: 619800 - DNA, 15 bp, Homo sapiens
cttagctctgtaatc

SEQ ID NO: 619801 - DNA, 15 bp, Homo sapiens
ttagctctgtaatct

SEQ ID NO: 619802 - DNA, 15 bp, Homo sapiens
tagctctgtaatcta

SEQ ID NO: 619803 - DNA, 15 bp, Homo sapiens
agctctgtaatctag

SEQ ID NO: 619804 - DNA, 15 bp, Homo sapiens
gctctgtaatctagg

SEQ ID NO: 619805 - DNA, 15 bp, Homo sapiens
ctctgtaatctagga

SEQ ID NO: 619806 - DNA, 15 bp, Homo sapiens
tctgtaatctaggat

SEQ ID NO: 619807 - DNA, 15 bp, Homo sapiens
ctgtaatctaggatg

SEQ ID NO: 619808 - DNA, 15 bp, Homo sapiens
tgtaatctaggatgc

SEQ ID NO: 619809 - DNA, 15 bp, Homo sapiens
gtaatctaggatgct

SEQ ID NO: 619810 - DNA, 15 bp, Homo sapiens
taatctaggatgctc

SEQ ID NO: 619811 - DNA, 15 bp, Homo sapiens
aatctaggatgctca

SEQ ID NO: 619812 - DNA, 15 bp, Homo sapiens
atctaggatgctcaa

SEQ ID NO: 619813 - DNA, 15 bp, Homo sapiens
tctaggatgctcaat

SEQ ID NO: 619814 - DNA, 15 bp, Homo sapiens
ctaggatgctcaatg

SEQ ID NO: 619815 - DNA, 15 bp, Homo sapiens
taggatgctcaatgc

SEQ ID NO: 619816 - DNA, 15 bp, Homo sapiens
aggatgctcaatgcc

SEQ ID NO: 619817 - DNA, 15 bp, Homo sapiens
ggatgctcaatgcca

SEQ ID NO: 619818 - DNA, 15 bp, Homo sapiens
gatgctcaatgccac

SEQ ID NO: 619819 - DNA, 15 bp, Homo sapiens
atgctcaatgccaca

SEQ ID NO: 619820 - DNA, 15 bp, Homo sapiens
tgctcaatgccacac

SEQ ID NO: 619821 - DNA, 15 bp, Homo sapiens
gctcaatgccacact

SEQ ID NO: 619822 - DNA, 15 bp, Homo sapiens
ctcaatgccacactc

SEQ ID NO: 619823 - DNA, 15 bp, Homo sapiens
tcaatgccacactct

SEQ ID NO: 619824 - DNA, 15 bp, Homo sapiens
caatgccacactctc

SEQ ID NO: 619825 - DNA, 15 bp, Homo sapiens
aatgccacactctca

SEQ ID NO: 619826 - DNA, 15 bp, Homo sapiens
atgccacactctcag

SEQ ID NO: 619827 - DNA, 15 bp, Homo sapiens
tgccacactctcagc

SEQ ID NO: 619828 - DNA, 15 bp, Homo sapiens
gccacactctcagcc

SEQ ID NO: 619829 - DNA, 15 bp, Homo sapiens
ccacactctcagcca

SEQ ID NO: 619830 - DNA, 15 bp, Homo sapiens
cacactctcagccac

SEQ ID NO: 619831 - DNA, 15 bp, Homo sapiens
acactctcagccact

SEQ ID NO: 619832 - DNA, 15 bp, Homo sapiens
cactctcagccactt

SEQ ID NO: 619833 - DNA, 15 bp, Homo sapiens
actctcagccacttt

SEQ ID NO: 619834 - DNA, 15 bp, Homo sapiens
ctctcagccactttt

SEQ ID NO: 619835 - DNA, 15 bp, Homo sapiens
tctcagccacttttc

SEQ ID NO: 619836 - DNA, 15 bp, Homo sapiens
ctcagccacttttca

SEQ ID NO: 619837 - DNA, 15 bp, Homo sapiens
tcagccacttttcag

SEQ ID NO: 619838 - DNA, 15 bp, Homo sapiens
cagccacttttcaga

SEQ ID NO: 619839 - DNA, 15 bp, Homo sapiens
agccacttttcagat

SEQ ID NO: 619840 - DNA, 15 bp, Homo sapiens
gccacttttcagatg

SEQ ID NO: 619841 - DNA, 15 bp, Homo sapiens
ccacttttcagatgg

SEQ ID NO: 619842 - DNA, 15 bp, Homo sapiens
cacttttcagatggc

SEQ ID NO: 619843 - DNA, 15 bp, Homo sapiens
acttttcagatggct

SEQ ID NO: 619844 - DNA, 15 bp, Homo sapiens
cttttcagatggcta

SEQ ID NO: 619845 - DNA, 15 bp, Homo sapiens
ttttcagatggctaa

SEQ ID NO: 619846 - DNA, 15 bp, Homo sapiens
tttcagatggctaag

SEQ ID NO: 619847 - DNA, 15 bp, Homo sapiens
ttcagatggctaagt

SEQ ID NO: 619848 - DNA, 15 bp, Homo sapiens
tcagatggctaagta

SEQ ID NO: 619849 - DNA, 15 bp, Homo sapiens
cagatggctaagtac

SEQ ID NO: 619850 - DNA, 15 bp, Homo sapiens
agatggctaagtaca

SEQ ID NO: 619851 - DNA, 15 bp, Homo sapiens
gatggctaagtacat

SEQ ID NO: 619852 - DNA, 15 bp, Homo sapiens
atggctaagtacatt

SEQ ID NO: 619853 - DNA, 15 bp, Homo sapiens
tggctaagtacattt

SEQ ID NO: 619854 - DNA, 15 bp, Homo sapiens
ggctaagtacatttg

SEQ ID NO: 619855 - DNA, 15 bp, Homo sapiens
gctaagtacatttgt

SEQ ID NO: 619856 - DNA, 15 bp, Homo sapiens
ctaagtacatttgtt

SEQ ID NO: 619857 - DNA, 15 bp, Homo sapiens
taagtacatttgttt

SEQ ID NO: 619858 - DNA, 15 bp, Homo sapiens
aagtacatttgtttt

SEQ ID NO: 619859 - DNA, 15 bp, Homo sapiens
agtacatttgttttg

SEQ ID NO: 619860 - DNA, 15 bp, Homo sapiens
gtacatttgttttga

SEQ ID NO: 619861 - DNA, 15 bp, Homo sapiens
tacatttgttttgag

SEQ ID NO: 619862 - DNA, 15 bp, Homo sapiens
acatttgttttgagt

SEQ ID NO: 619863 - DNA, 15 bp, Homo sapiens
catttgttttgagtt

SEQ ID NO: 619864 - DNA, 15 bp, Homo sapiens
atttgttttgagtta

SEQ ID NO: 619865 - DNA, 15 bp, Homo sapiens
tttgttttgagttag

SEQ ID NO: 619866 - DNA, 15 bp, Homo sapiens
ttgttttgagttagc

SEQ ID NO: 619867 - DNA, 15 bp, Homo sapiens
tgttttgagttagct

SEQ ID NO: 619868 - DNA, 15 bp, Homo sapiens
gttttgagttagctc

SEQ ID NO: 619869 - DNA, 15 bp, Homo sapiens
ttttgagttagctca

SEQ ID NO: 619870 - DNA, 15 bp, Homo sapiens
tttgagttagctcag

SEQ ID NO: 619871 - DNA, 15 bp, Homo sapiens
ttgagttagctcagt

SEQ ID NO: 619872 - DNA, 15 bp, Homo sapiens
tgagttagctcagtc

SEQ ID NO: 619873 - DNA, 15 bp, Homo sapiens
gagttagctcagtct

SEQ ID NO: 619874 - DNA, 15 bp, Homo sapiens
agttagctcagtctc

SEQ ID NO: 619875 - DNA, 15 bp, Homo sapiens
gttagctcagtctca

SEQ ID NO: 619876 - DNA, 15 bp, Homo sapiens
ttagctcagtctcag

SEQ ID NO: 619877 - DNA, 15 bp, Homo sapiens
tagctcagtctcaga

SEQ ID NO: 619878 - DNA, 15 bp, Homo sapiens
agctcagtctcagag

SEQ ID NO: 619879 - DNA, 15 bp, Homo sapiens
gctcagtctcagagg

SEQ ID NO: 619880 - DNA, 15 bp, Homo sapiens
ctcagtctcagagga

SEQ ID NO: 619881 - DNA, 15 bp, Homo sapiens
tcagtctcagaggat

SEQ ID NO: 619882 - DNA, 15 bp, Homo sapiens
cagtctcagaggatg

SEQ ID NO: 619883 - DNA, 15 bp, Homo sapiens
agtctcagaggatga

SEQ ID NO: 619884 - DNA, 15 bp, Homo sapiens
gtctcagaggatgac

SEQ ID NO: 619885 - DNA, 15 bp, Homo sapiens
tctcagaggatgaca

SEQ ID NO: 619886 - DNA, 15 bp, Homo sapiens
ctcagaggatgacat

SEQ ID NO: 619887 - DNA, 15 bp, Homo sapiens
tcagaggatgacatt

SEQ ID NO: 619888 - DNA, 15 bp, Homo sapiens
cagaggatgacattt

SEQ ID NO: 619889 - DNA, 15 bp, Homo sapiens
agaggatgacatttt

SEQ ID NO: 619890 - DNA, 15 bp, Homo sapiens
gaggatgacattttc

SEQ ID NO: 619891 - DNA, 15 bp, Homo sapiens
aggatgacattttct

SEQ ID NO: 619892 - DNA, 15 bp, Homo sapiens
ggatgacattttctg

SEQ ID NO: 619893 - DNA, 15 bp, Homo sapiens
gatgacattttctga

SEQ ID NO: 619894 - DNA, 15 bp, Homo sapiens
atgacattttctgat

SEQ ID NO: 619895 - DNA, 15 bp, Homo sapiens
tgacattttctgatc

SEQ ID NO: 619896 - DNA, 15 bp, Homo sapiens
gacattttctgatct

SEQ ID NO: 619897 - DNA, 15 bp, Homo sapiens
acattttctgatctt

SEQ ID NO: 619898 - DNA, 15 bp, Homo sapiens
cattttctgatcttg

SEQ ID NO: 619899 - DNA, 15 bp, Homo sapiens
attttctgatcttgt

SEQ ID NO: 619900 - DNA, 15 bp, Homo sapiens
ttttctgatcttgtc

SEQ ID NO: 619901 - DNA, 15 bp, Homo sapiens
tttctgatcttgtct

SEQ ID NO: 619902 - DNA, 15 bp, Homo sapiens
ttctgatcttgtctc

SEQ ID NO: 619903 - DNA, 15 bp, Homo sapiens
tctgatcttgtctcc

SEQ ID NO: 619904 - DNA, 15 bp, Homo sapiens
ctgatcttgtctcca

SEQ ID NO: 619905 - DNA, 15 bp, Homo sapiens
tgatcttgtctccag

SEQ ID NO: 619906 - DNA, 15 bp, Homo sapiens
gatcttgtctccagt

SEQ ID NO: 619907 - DNA, 15 bp, Homo sapiens
atcttgtctccagtg

SEQ ID NO: 619908 - DNA, 15 bp, Homo sapiens
tcttgtctccagtgt

SEQ ID NO: 619909 - DNA, 15 bp, Homo sapiens
cttgtctccagtgtt

SEQ ID NO: 619910 - DNA, 15 bp, Homo sapiens
ttgtctccagtgttt

SEQ ID NO: 619911 - DNA, 15 bp, Homo sapiens
tgtctccagtgttta

SEQ ID NO: 619912 - DNA, 15 bp, Homo sapiens
gtctccagtgtttaa

SEQ ID NO: 619913 - DNA, 15 bp, Homo sapiens
tctccagtgtttaaa

SEQ ID NO: 619914 - DNA, 15 bp, Homo sapiens
ctccagtgtttaaat

SEQ ID NO: 619915 - DNA, 15 bp, Homo sapiens
tccagtgtttaaatg

SEQ ID NO: 619916 - DNA, 15 bp, Homo sapiens
ccagtgtttaaatga

SEQ ID NO: 619917 - DNA, 15 bp, Homo sapiens
cagtgtttaaatgaa

SEQ ID NO: 619918 - DNA, 15 bp, Homo sapiens
agtgtttaaatgaac

SEQ ID NO: 619919 - DNA, 15 bp, Homo sapiens
gtgtttaaatgaacc

SEQ ID NO: 619920 - DNA, 15 bp, Homo sapiens
tgtttaaatgaacct

SEQ ID NO: 619921 - DNA, 15 bp, Homo sapiens
gtttaaatgaacctg

SEQ ID NO: 619922 - DNA, 15 bp, Homo sapiens
tttaaatgaacctgt

SEQ ID NO: 619923 - DNA, 15 bp, Homo sapiens
ttaaatgaacctgta

SEQ ID NO: 619924 - DNA, 15 bp, Homo sapiens
taaatgaacctgtag

SEQ ID NO: 619925 - DNA, 15 bp, Homo sapiens
aaatgaacctgtagc

SEQ ID NO: 619926 - DNA, 15 bp, Homo sapiens
aatgaacctgtagct

SEQ ID NO: 619927 - DNA, 15 bp, Homo sapiens
atgaacctgtagctg

SEQ ID NO: 619928 - DNA, 15 bp, Homo sapiens
tgaacctgtagctgt

SEQ ID NO: 619929 - DNA, 15 bp, Homo sapiens
gaacctgtagctgtg

SEQ ID NO: 619930 - DNA, 15 bp, Homo sapiens
aacctgtagctgtgc

SEQ ID NO: 619931 - DNA, 15 bp, Homo sapiens
acctgtagctgtgca

SEQ ID NO: 619932 - DNA, 15 bp, Homo sapiens
cctgtagctgtgcat

SEQ ID NO: 619933 - DNA, 15 bp, Homo sapiens
ctgtagctgtgcatt

SEQ ID NO: 619934 - DNA, 15 bp, Homo sapiens
tgtagctgtgcattg

SEQ ID NO: 619935 - DNA, 15 bp, Homo sapiens
gtagctgtgcattgg

SEQ ID NO: 619936 - DNA, 15 bp, Homo sapiens
tagctgtgcattggg

SEQ ID NO: 619937 - DNA, 15 bp, Homo sapiens
agctgtgcattgggg

SEQ ID NO: 619938 - DNA, 15 bp, Homo sapiens
gctgtgcattggggt

SEQ ID NO: 619939 - DNA, 15 bp, Homo sapiens
ctgtgcattggggtc

SEQ ID NO: 619940 - DNA, 15 bp, Homo sapiens
tgtgcattggggtca

SEQ ID NO: 619941 - DNA, 15 bp, Homo sapiens
gtgcattggggtcac

SEQ ID NO: 619942 - DNA, 15 bp, Homo sapiens
tgcattggggtcaca

SEQ ID NO: 619943 - DNA, 15 bp, Homo sapiens
gcattggggtcacac

SEQ ID NO: 619944 - DNA, 15 bp, Homo sapiens
cattggggtcacaca

SEQ ID NO: 619945 - DNA, 15 bp, Homo sapiens
attggggtcacacaa

SEQ ID NO: 619946 - DNA, 15 bp, Homo sapiens
ttggggtcacacaat

SEQ ID NO: 619947 - DNA, 15 bp, Homo sapiens
tggggtcacacaatg

SEQ ID NO: 619948 - DNA, 15 bp, Homo sapiens
ggggtcacacaatgc

SEQ ID NO: 619949 - DNA, 15 bp, Homo sapiens
gggtcacacaatgcg

SEQ ID NO: 619950 - DNA, 15 bp, Homo sapiens
ggtcacacaatgcgt

SEQ ID NO: 619951 - DNA, 15 bp, Homo sapiens
gtcacacaatgcgtg

SEQ ID NO: 619952 - DNA, 15 bp, Homo sapiens
tcacacaatgcgtgg

SEQ ID NO: 619953 - DNA, 15 bp, Homo sapiens
cacacaatgcgtggc

SEQ ID NO: 619954 - DNA, 15 bp, Homo sapiens
acacaatgcgtggca

SEQ ID NO: 619955 - DNA, 15 bp, Homo sapiens
cacaatgcgtggcat

SEQ ID NO: 619956 - DNA, 15 bp, Homo sapiens
acaatgcgtggcatg

SEQ ID NO: 619957 - DNA, 15 bp, Homo sapiens
caatgcgtggcatgg

SEQ ID NO: 619958 - DNA, 15 bp, Homo sapiens
aatgcgtggcatgga

SEQ ID NO: 619959 - DNA, 15 bp, Homo sapiens
atgcgtggcatggag

SEQ ID NO: 619960 - DNA, 15 bp, Homo sapiens
tgcgtggcatggaga

SEQ ID NO: 619961 - DNA, 15 bp, Homo sapiens
gcgtggcatggagag

SEQ ID NO: 619962 - DNA, 15 bp, Homo sapiens
cgtggcatggagagg

SEQ ID NO: 619963 - DNA, 15 bp, Homo sapiens
gtggcatggagaggg

SEQ ID NO: 619964 - DNA, 15 bp, Homo sapiens
tggcatggagagggt

SEQ ID NO: 619965 - DNA, 15 bp, Homo sapiens
ggcatggagagggtc

SEQ ID NO: 619966 - DNA, 15 bp, Homo sapiens
gcatggagagggtct

SEQ ID NO: 619967 - DNA, 15 bp, Homo sapiens
catggagagggtctg

SEQ ID NO: 619968 - DNA, 15 bp, Homo sapiens
atggagagggtctgt

SEQ ID NO: 619969 - DNA, 15 bp, Homo sapiens
tggagagggtctgtg

SEQ ID NO: 619970 - DNA, 15 bp, Homo sapiens
ggagagggtctgtgg

SEQ ID NO: 619971 - DNA, 15 bp, Homo sapiens
gagagggtctgtggc

SEQ ID NO: 619972 - DNA, 15 bp, Homo sapiens
agagggtctgtggct

SEQ ID NO: 619973 - DNA, 15 bp, Homo sapiens
gagggtctgtggctg

SEQ ID NO: 619974 - DNA, 15 bp, Homo sapiens
agggtctgtggctga

SEQ ID NO: 619975 - DNA, 15 bp, Homo sapiens
gggtctgtggctgac

SEQ ID NO: 619976 - DNA, 15 bp, Homo sapiens
ggtctgtggctgact

SEQ ID NO: 619977 - DNA, 15 bp, Homo sapiens
gtctgtggctgactg

SEQ ID NO: 619978 - DNA, 15 bp, Homo sapiens
tctgtggctgactgc

SEQ ID NO: 619979 - DNA, 15 bp, Homo sapiens
ctgtggctgactgcc

SEQ ID NO: 619980 - DNA, 15 bp, Homo sapiens
tgtggctgactgcca

SEQ ID NO: 619981 - DNA, 15 bp, Homo sapiens
gtggctgactgccac

SEQ ID NO: 619982 - DNA, 15 bp, Homo sapiens
tggctgactgccacg

SEQ ID NO: 619983 - DNA, 15 bp, Homo sapiens
ggctgactgccacgg

SEQ ID NO: 619984 - DNA, 15 bp, Homo sapiens
gctgactgccacggt

SEQ ID NO: 619985 - DNA, 15 bp, Homo sapiens
ctgactgccacggtt

SEQ ID NO: 619986 - DNA, 15 bp, Homo sapiens
tgactgccacggtta

SEQ ID NO: 619987 - DNA, 15 bp, Homo sapiens
gactgccacggttac

SEQ ID NO: 619988 - DNA, 15 bp, Homo sapiens
actgccacggttact

SEQ ID NO: 619989 - DNA, 15 bp, Homo sapiens
ctgccacggttacta

SEQ ID NO: 619990 - DNA, 15 bp, Homo sapiens
tgccacggttactac

SEQ ID NO: 619991 - DNA, 15 bp, Homo sapiens
gccacggttactacg

SEQ ID NO: 619992 - DNA, 15 bp, Homo sapiens
ccacggttactacgt

SEQ ID NO: 619993 - DNA, 15 bp, Homo sapiens
cacggttactacgtg

SEQ ID NO: 619994 - DNA, 15 bp, Homo sapiens
acggttactacgtga

SEQ ID NO: 619995 - DNA, 15 bp, Homo sapiens
cggttactacgtgaa

SEQ ID NO: 619996 - DNA, 15 bp, Homo sapiens
ggttactacgtgaaa

SEQ ID NO: 619997 - DNA, 15 bp, Homo sapiens
gttactacgtgaaac

SEQ ID NO: 619998 - DNA, 15 bp, Homo sapiens
ttactacgtgaaacc

SEQ ID NO: 619999 - DNA, 15 bp, Homo sapiens
tactacgtgaaacca

SEQ ID NO: 620000 - DNA, 15 bp, Homo sapiens
actacgtgaaaccat

SEQ ID NO: 620001 - DNA, 15 bp, Homo sapiens
ctacgtgaaaccatc

SEQ ID NO: 620002 - DNA, 15 bp, Homo sapiens
tacgtgaaaccatca

SEQ ID NO: 620003 - DNA, 15 bp, Homo sapiens
acgtgaaaccatcat

SEQ ID NO: 620004 - DNA, 15 bp, Homo sapiens
cgtgaaaccatcatt

SEQ ID NO: 620005 - DNA, 15 bp, Homo sapiens
gtgaaaccatcatta

SEQ ID NO: 620006 - DNA, 15 bp, Homo sapiens
tgaaaccatcattac

SEQ ID NO: 620007 - DNA, 15 bp, Homo sapiens
gaaaccatcattaca

SEQ ID NO: 620008 - DNA, 15 bp, Homo sapiens
aaaccatcattacag

SEQ ID NO: 620009 - DNA, 15 bp, Homo sapiens
aaccatcattacagc

SEQ ID NO: 620010 - DNA, 15 bp, Homo sapiens
accatcattacagca

SEQ ID NO: 620011 - DNA, 15 bp, Homo sapiens
ccatcattacagcag

SEQ ID NO: 620012 - DNA, 15 bp, Homo sapiens
catcattacagcagt

SEQ ID NO: 620013 - DNA, 15 bp, Homo sapiens
atcattacagcagtt

SEQ ID NO: 620014 - DNA, 15 bp, Homo sapiens
tcattacagcagtta

SEQ ID NO: 620015 - DNA, 15 bp, Homo sapiens
cattacagcagttac

SEQ ID NO: 620016 - DNA, 15 bp, Homo sapiens
attacagcagttact

SEQ ID NO: 620017 - DNA, 15 bp, Homo sapiens
ttacagcagttacta

SEQ ID NO: 620018 - DNA, 15 bp, Homo sapiens
tacagcagttactac

SEQ ID NO: 620019 - DNA, 15 bp, Homo sapiens
acagcagttactact

SEQ ID NO: 620020 - DNA, 15 bp, Homo sapiens
cagcagttactactg

SEQ ID NO: 620021 - DNA, 15 bp, Homo sapiens
agcagttactactgt

SEQ ID NO: 620022 - DNA, 15 bp, Homo sapiens
gcagttactactgtt

SEQ ID NO: 620023 - DNA, 15 bp, Homo sapiens
cagttactactgtta

SEQ ID NO: 620024 - DNA, 15 bp, Homo sapiens
agttactactgttac

SEQ ID NO: 620025 - DNA, 15 bp, Homo sapiens
gttactactgttact

SEQ ID NO: 620026 - DNA, 15 bp, Homo sapiens
ttactactgttactg

SEQ ID NO: 620027 - DNA, 15 bp, Homo sapiens
tactactgttactgc

SEQ ID NO: 620028 - DNA, 15 bp, Homo sapiens
actactgttactgcc

SEQ ID NO: 620029 - DNA, 15 bp, Homo sapiens
ctactgttactgcct

SEQ ID NO: 620030 - DNA, 15 bp, Homo sapiens
tactgttactgcctg

SEQ ID NO: 620031 - DNA, 15 bp, Homo sapiens
actgttactgcctga

SEQ ID NO: 620032 - DNA, 15 bp, Homo sapiens
ctgttactgcctgag

SEQ ID NO: 620033 - DNA, 15 bp, Homo sapiens
tgttactgcctgaga

SEQ ID NO: 620034 - DNA, 15 bp, Homo sapiens
gttactgcctgagaa

SEQ ID NO: 620035 - DNA, 15 bp, Homo sapiens
ttactgcctgagaac

SEQ ID NO: 620036 - DNA, 15 bp, Homo sapiens
tactgcctgagaaca

SEQ ID NO: 620037 - DNA, 15 bp, Homo sapiens
actgcctgagaacat

SEQ ID NO: 620038 - DNA, 15 bp, Homo sapiens
ctgcctgagaacatc

SEQ ID NO: 620039 - DNA, 15 bp, Homo sapiens
tgcctgagaacatca

SEQ ID NO: 620040 - DNA, 15 bp, Homo sapiens
gcctgagaacatcat

SEQ ID NO: 620041 - DNA, 15 bp, Homo sapiens
cctgagaacatcatt

SEQ ID NO: 620042 - DNA, 15 bp, Homo sapiens
ctgagaacatcatta

SEQ ID NO: 620043 - DNA, 15 bp, Homo sapiens
tgagaacatcattac

SEQ ID NO: 620044 - DNA, 15 bp, Homo sapiens
gagaacatcattaca

SEQ ID NO: 620045 - DNA, 15 bp, Homo sapiens
agaacatcattacaa

SEQ ID NO: 620046 - DNA, 15 bp, Homo sapiens
gaacatcattacaag

SEQ ID NO: 620047 - DNA, 15 bp, Homo sapiens
aacatcattacaaga

SEQ ID NO: 620048 - DNA, 15 bp, Homo sapiens
acatcattacaagac

SEQ ID NO: 620049 - DNA, 15 bp, Homo sapiens
catcattacaagact

SEQ ID NO: 620050 - DNA, 15 bp, Homo sapiens
atcattacaagactg

SEQ ID NO: 620051 - DNA, 15 bp, Homo sapiens
tcattacaagactga

SEQ ID NO: 620052 - DNA, 15 bp, Homo sapiens
cattacaagactgaa

SEQ ID NO: 620053 - DNA, 15 bp, Homo sapiens
attacaagactgaac

SEQ ID NO: 620054 - DNA, 15 bp, Homo sapiens
ttacaagactgaacg

SEQ ID NO: 620055 - DNA, 15 bp, Homo sapiens
tacaagactgaacga

SEQ ID NO: 620056 - DNA, 15 bp, Homo sapiens
acaagactgaacgaa

SEQ ID NO: 620057 - DNA, 15 bp, Homo sapiens
caagactgaacgaag

SEQ ID NO: 620058 - DNA, 15 bp, Homo sapiens
aagactgaacgaagg

SEQ ID NO: 620059 - DNA, 15 bp, Homo sapiens
agactgaacgaaggg

SEQ ID NO: 620060 - DNA, 15 bp, Homo sapiens
gactgaacgaaggga

SEQ ID NO: 620061 - DNA, 15 bp, Homo sapiens
actgaacgaagggat

SEQ ID NO: 620062 - DNA, 15 bp, Homo sapiens
ctgaacgaagggatc

SEQ ID NO: 620063 - DNA, 15 bp, Homo sapiens
tgaacgaagggatca

SEQ ID NO: 620064 - DNA, 15 bp, Homo sapiens
gaacgaagggatcaa

SEQ ID NO: 620065 - DNA, 15 bp, Homo sapiens
aacgaagggatcaac

SEQ ID NO: 620066 - DNA, 15 bp, Homo sapiens
acgaagggatcaaca

SEQ ID NO: 620067 - DNA, 15 bp, Homo sapiens
cgaagggatcaacat

SEQ ID NO: 620068 - DNA, 15 bp, Homo sapiens
gaagggatcaacatg

SEQ ID NO: 620069 - DNA, 15 bp, Homo sapiens
aagggatcaacatgg

SEQ ID NO: 620070 - DNA, 15 bp, Homo sapiens
agggatcaacatgga

SEQ ID NO: 620071 - DNA, 15 bp, Homo sapiens
gggatcaacatggaa

SEQ ID NO: 620072 - DNA, 15 bp, Homo sapiens
ggatcaacatggaaa

SEQ ID NO: 620073 - DNA, 15 bp, Homo sapiens
gatcaacatggaaat

SEQ ID NO: 620074 - DNA, 15 bp, Homo sapiens
atcaacatggaaatg

SEQ ID NO: 620075 - DNA, 15 bp, Homo sapiens
tcaacatggaaatga

SEQ ID NO: 620076 - DNA, 15 bp, Homo sapiens
caacatggaaatgat

SEQ ID NO: 620077 - DNA, 15 bp, Homo sapiens
aacatggaaatgata

SEQ ID NO: 620078 - DNA, 15 bp, Homo sapiens
acatggaaatgataa

SEQ ID NO: 620079 - DNA, 15 bp, Homo sapiens
catggaaatgataac

SEQ ID NO: 620080 - DNA, 15 bp, Homo sapiens
atggaaatgataaca

SEQ ID NO: 620081 - DNA, 15 bp, Homo sapiens
tggaaatgataacaa

SEQ ID NO: 620082 - DNA, 15 bp, Homo sapiens
ggaaatgataacaaa

SEQ ID NO: 620083 - DNA, 15 bp, Homo sapiens
gaaatgataacaaaa

SEQ ID NO: 620084 - DNA, 15 bp, Homo sapiens
aaatgataacaaaaa

SEQ ID NO: 620085 - DNA, 15 bp, Homo sapiens
aatgataacaaaaaa

SEQ ID NO: 620086 - DNA, 15 bp, Homo sapiens
atgataacaaaaaaa

SEQ ID NO: 620087 - DNA, 15 bp, Homo sapiens
tgataacaaaaaaac

SEQ ID NO: 620088 - DNA, 15 bp, Homo sapiens
gataacaaaaaaacc

SEQ ID NO: 620089 - DNA, 15 bp, Homo sapiens
ataacaaaaaaacca

SEQ ID NO: 620090 - DNA, 15 bp, Homo sapiens
taacaaaaaaaccaa

SEQ ID NO: 620091 - DNA, 15 bp, Homo sapiens
aacaaaaaaaccaaa

SEQ ID NO: 620092 - DNA, 15 bp, Homo sapiens
acaaaaaaaccaaag

SEQ ID NO: 620093 - DNA, 15 bp, Homo sapiens
caaaaaaaccaaagt

SEQ ID NO: 620094 - DNA, 15 bp, Homo sapiens
aaaaaaaccaaagta

SEQ ID NO: 620095 - DNA, 15 bp, Homo sapiens
aaaaaaccaaagtaa

SEQ ID NO: 620096 - DNA, 15 bp, Homo sapiens
aaaaaccaaagtaac

SEQ ID NO: 620097 - DNA, 15 bp, Homo sapiens
aaaaccaaagtaact

SEQ ID NO: 620098 - DNA, 15 bp, Homo sapiens
aaaccaaagtaactg

SEQ ID NO: 620099 - DNA, 15 bp, Homo sapiens
aaccaaagtaactgt

SEQ ID NO: 620100 - DNA, 15 bp, Homo sapiens
accaaagtaactgtt

SEQ ID NO: 620101 - DNA, 15 bp, Homo sapiens
ccaaagtaactgttt

SEQ ID NO: 620102 - DNA, 15 bp, Homo sapiens
caaagtaactgtttt

SEQ ID NO: 620103 - DNA, 15 bp, Homo sapiens
aaagtaactgtttta

SEQ ID NO: 620104 - DNA, 15 bp, Homo sapiens
aagtaactgttttaa

SEQ ID NO: 620105 - DNA, 15 bp, Homo sapiens
agtaactgttttaag

SEQ ID NO: 620106 - DNA, 15 bp, Homo sapiens
gtaactgttttaagg

SEQ ID NO: 620107 - DNA, 15 bp, Homo sapiens
taactgttttaagga

SEQ ID NO: 620108 - DNA, 15 bp, Homo sapiens
aactgttttaaggaa

SEQ ID NO: 620109 - DNA, 15 bp, Homo sapiens
actgttttaaggaaa

SEQ ID NO: 620110 - DNA, 15 bp, Homo sapiens
ctgttttaaggaaag

SEQ ID NO: 620111 - DNA, 15 bp, Homo sapiens
tgttttaaggaaagg

SEQ ID NO: 620112 - DNA, 15 bp, Homo sapiens
gttttaaggaaaggc

SEQ ID NO: 620113 - DNA, 15 bp, Homo sapiens
ttttaaggaaaggct

SEQ ID NO: 620114 - DNA, 15 bp, Homo sapiens
tttaaggaaaggcta

SEQ ID NO: 620115 - DNA, 15 bp, Homo sapiens
ttaaggaaaggctag

SEQ ID NO: 620116 - DNA, 15 bp, Homo sapiens
taaggaaaggctagc

SEQ ID NO: 620117 - DNA, 15 bp, Homo sapiens
aaggaaaggctagca

SEQ ID NO: 620118 - DNA, 15 bp, Homo sapiens
aggaaaggctagcat

SEQ ID NO: 620119 - DNA, 15 bp, Homo sapiens
ggaaaggctagcatc

SEQ ID NO: 620120 - DNA, 15 bp, Homo sapiens
gaaaggctagcatcg

SEQ ID NO: 620121 - DNA, 15 bp, Homo sapiens
aaaggctagcatcgg

SEQ ID NO: 620122 - DNA, 15 bp, Homo sapiens
aaggctagcatcggg

SEQ ID NO: 620123 - DNA, 15 bp, Homo sapiens
aggctagcatcggga

SEQ ID NO: 620124 - DNA, 15 bp, Homo sapiens
ggctagcatcgggaa

SEQ ID NO: 620125 - DNA, 15 bp, Homo sapiens
gctagcatcgggaag

SEQ ID NO: 620126 - DNA, 15 bp, Homo sapiens
ctagcatcgggaaga

SEQ ID NO: 620127 - DNA, 15 bp, Homo sapiens
tagcatcgggaagaa

SEQ ID NO: 620128 - DNA, 15 bp, Homo sapiens
agcatcgggaagaag

SEQ ID NO: 620129 - DNA, 15 bp, Homo sapiens
gcatcgggaagaaga

SEQ ID NO: 620130 - DNA, 15 bp, Homo sapiens
catcgggaagaagaa

SEQ ID NO: 620131 - DNA, 15 bp, Homo sapiens
atcgggaagaagaag

SEQ ID NO: 620132 - DNA, 15 bp, Homo sapiens
tcgggaagaagaaga

SEQ ID NO: 620133 - DNA, 15 bp, Homo sapiens
cgggaagaagaagag

SEQ ID NO: 620134 - DNA, 15 bp, Homo sapiens
gggaagaagaagaga

SEQ ID NO: 620135 - DNA, 15 bp, Homo sapiens
ggaagaagaagagag

SEQ ID NO: 620136 - DNA, 15 bp, Homo sapiens
gaagaagaagagaga

SEQ ID NO: 620137 - DNA, 15 bp, Homo sapiens
aagaagaagagagaa

SEQ ID NO: 620138 - DNA, 15 bp, Homo sapiens
agaagaagagagaag

SEQ ID NO: 620139 - DNA, 15 bp, Homo sapiens
gaagaagagagaaga

SEQ ID NO: 620140 - DNA, 15 bp, Homo sapiens
aagaagagagaagaa

SEQ ID NO: 620141 - DNA, 15 bp, Homo sapiens
agaagagagaagaag

SEQ ID NO: 620142 - DNA, 15 bp, Homo sapiens
gaagagagaagaaga

SEQ ID NO: 620143 - DNA, 15 bp, Homo sapiens
aagagagaagaagag

SEQ ID NO: 620144 - DNA, 15 bp, Homo sapiens
agagagaagaagaga

SEQ ID NO: 620145 - DNA, 15 bp, Homo sapiens
gagagaagaagagaa

SEQ ID NO: 620146 - DNA, 15 bp, Homo sapiens
agagaagaagagaag

SEQ ID NO: 620147 - DNA, 15 bp, Homo sapiens
gagaagaagagaaga

SEQ ID NO: 620148 - DNA, 15 bp, Homo sapiens
agaagaagagaagaa

SEQ ID NO: 620149 - DNA, 15 bp, Homo sapiens
gaagaagagaagaag

SEQ ID NO: 620150 - DNA, 15 bp, Homo sapiens
aagaagagaagaaga

SEQ ID NO: 620151 - DNA, 15 bp, Homo sapiens
agaagagaagaagaa

SEQ ID NO: 620152 - DNA, 15 bp, Homo sapiens
gaagagaagaagaaa

SEQ ID NO: 620153 - DNA, 15 bp, Homo sapiens
aagagaagaagaaaa

SEQ ID NO: 620154 - DNA, 15 bp, Homo sapiens
agagaagaagaaaag

SEQ ID NO: 620155 - DNA, 15 bp, Homo sapiens
gagaagaagaaaagg

SEQ ID NO: 620156 - DNA, 15 bp, Homo sapiens
agaagaagaaaaggg

SEQ ID NO: 620157 - DNA, 15 bp, Homo sapiens
gaagaagaaaagggc

SEQ ID NO: 620158 - DNA, 15 bp, Homo sapiens
aagaagaaaagggct

SEQ ID NO: 620159 - DNA, 15 bp, Homo sapiens
agaagaaaagggctc

SEQ ID NO: 620160 - DNA, 15 bp, Homo sapiens
gaagaaaagggctcc

SEQ ID NO: 620161 - DNA, 15 bp, Homo sapiens
aagaaaagggctccc

SEQ ID NO: 620162 - DNA, 15 bp, Homo sapiens
agaaaagggctccct

SEQ ID NO: 620163 - DNA, 15 bp, Homo sapiens
gaaaagggctccctg

SEQ ID NO: 620164 - DNA, 15 bp, Homo sapiens
aaaagggctccctgc

SEQ ID NO: 620165 - DNA, 15 bp, Homo sapiens
aaagggctccctgct

SEQ ID NO: 620166 - DNA, 15 bp, Homo sapiens
aagggctccctgctt

SEQ ID NO: 620167 - DNA, 15 bp, Homo sapiens
agggctccctgcttc

SEQ ID NO: 620168 - DNA, 15 bp, Homo sapiens
gggctccctgcttct

SEQ ID NO: 620169 - DNA, 15 bp, Homo sapiens
ggctccctgcttcta

SEQ ID NO: 620170 - DNA, 15 bp, Homo sapiens
gctccctgcttctaa

SEQ ID NO: 620171 - DNA, 15 bp, Homo sapiens
ctccctgcttctaat

SEQ ID NO: 620172 - DNA, 15 bp, Homo sapiens
tccctgcttctaatg

SEQ ID NO: 620173 - DNA, 15 bp, Homo sapiens
ccctgcttctaatga

SEQ ID NO: 620174 - DNA, 15 bp, Homo sapiens
cctgcttctaatgag

SEQ ID NO: 620175 - DNA, 15 bp, Homo sapiens
ctgcttctaatgagt

SEQ ID NO: 620176 - DNA, 15 bp, Homo sapiens
tgcttctaatgagta

SEQ ID NO: 620177 - DNA, 15 bp, Homo sapiens
gcttctaatgagtaa

SEQ ID NO: 620178 - DNA, 15 bp, Homo sapiens
cttctaatgagtaaa

SEQ ID NO: 620179 - DNA, 15 bp, Homo sapiens
ttctaatgagtaaag

SEQ ID NO: 620180 - DNA, 15 bp, Homo sapiens
tctaatgagtaaagg

SEQ ID NO: 620181 - DNA, 15 bp, Homo sapiens
ctaatgagtaaaggc

SEQ ID NO: 620182 - DNA, 15 bp, Homo sapiens
taatgagtaaaggca

SEQ ID NO: 620183 - DNA, 15 bp, Homo sapiens
aatgagtaaaggcag

SEQ ID NO: 620184 - DNA, 15 bp, Homo sapiens
atgagtaaaggcagc

SEQ ID NO: 620185 - DNA, 15 bp, Homo sapiens
tgagtaaaggcagct

SEQ ID NO: 620186 - DNA, 15 bp, Homo sapiens
gagtaaaggcagctc

SEQ ID NO: 620187 - DNA, 15 bp, Homo sapiens
agtaaaggcagctcc

SEQ ID NO: 620188 - DNA, 15 bp, Homo sapiens
gtaaaggcagctccc

SEQ ID NO: 620189 - DNA, 15 bp, Homo sapiens
taaaggcagctccct

SEQ ID NO: 620190 - DNA, 15 bp, Homo sapiens
aaaggcagctcccta

SEQ ID NO: 620191 - DNA, 15 bp, Homo sapiens
aaggcagctccctaa

SEQ ID NO: 620192 - DNA, 15 bp, Homo sapiens
aggcagctccctaag

SEQ ID NO: 620193 - DNA, 15 bp, Homo sapiens
ggcagctccctaagc

SEQ ID NO: 620194 - DNA, 15 bp, Homo sapiens
gcagctccctaagct

SEQ ID NO: 620195 - DNA, 15 bp, Homo sapiens
cagctccctaagctt

SEQ ID NO: 620196 - DNA, 15 bp, Homo sapiens
agctccctaagcttc

SEQ ID NO: 620197 - DNA, 15 bp, Homo sapiens
gctccctaagcttct

SEQ ID NO: 620198 - DNA, 15 bp, Homo sapiens
ctccctaagcttctg

SEQ ID NO: 620199 - DNA, 15 bp, Homo sapiens
tccctaagcttctgc

SEQ ID NO: 620200 - DNA, 15 bp, Homo sapiens
ccctaagcttctgca

SEQ ID NO: 620201 - DNA, 15 bp, Homo sapiens
cctaagcttctgcag

SEQ ID NO: 620202 - DNA, 15 bp, Homo sapiens
ctaagcttctgcagc

SEQ ID NO: 620203 - DNA, 15 bp, Homo sapiens
taagcttctgcagcc

SEQ ID NO: 620204 - DNA, 15 bp, Homo sapiens
aagcttctgcagccc

SEQ ID NO: 620205 - DNA, 15 bp, Homo sapiens
agcttctgcagccct

SEQ ID NO: 620206 - DNA, 15 bp, Homo sapiens
gcttctgcagccctt

SEQ ID NO: 620207 - DNA, 15 bp, Homo sapiens
cttctgcagcccttc

SEQ ID NO: 620208 - DNA, 15 bp, Homo sapiens
ttctgcagcccttca

SEQ ID NO: 620209 - DNA, 15 bp, Homo sapiens
tctgcagcccttcat

SEQ ID NO: 620210 - DNA, 15 bp, Homo sapiens
ctgcagcccttcatt

SEQ ID NO: 620211 - DNA, 15 bp, Homo sapiens
tgcagcccttcatta

SEQ ID NO: 620212 - DNA, 15 bp, Homo sapiens
gcagcccttcattat

SEQ ID NO: 620213 - DNA, 15 bp, Homo sapiens
cagcccttcattatt

SEQ ID NO: 620214 - DNA, 15 bp, Homo sapiens
agcccttcattattt

SEQ ID NO: 620215 - DNA, 15 bp, Homo sapiens
gcccttcattattta

SEQ ID NO: 620216 - DNA, 15 bp, Homo sapiens
cccttcattatttat

SEQ ID NO: 620217 - DNA, 15 bp, Homo sapiens
ccttcattatttatt

SEQ ID NO: 620218 - DNA, 15 bp, Homo sapiens
cttcattatttattg

SEQ ID NO: 620219 - DNA, 15 bp, Homo sapiens
ttcattatttattgg

SEQ ID NO: 620220 - DNA, 15 bp, Homo sapiens
tcattatttattggg

SEQ ID NO: 620221 - DNA, 15 bp, Homo sapiens
cattatttattgggt

SEQ ID NO: 620222 - DNA, 15 bp, Homo sapiens
attatttattgggta

SEQ ID NO: 620223 - DNA, 15 bp, Homo sapiens
ttatttattgggtaa

SEQ ID NO: 620224 - DNA, 15 bp, Homo sapiens
tatttattgggtaac

SEQ ID NO: 620225 - DNA, 15 bp, Homo sapiens
atttattgggtaaca

SEQ ID NO: 620226 - DNA, 15 bp, Homo sapiens
tttattgggtaacag

SEQ ID NO: 620227 - DNA, 15 bp, Homo sapiens
ttattgggtaacagg

SEQ ID NO: 620228 - DNA, 15 bp, Homo sapiens
tattgggtaacagga

SEQ ID NO: 620229 - DNA, 15 bp, Homo sapiens
attgggtaacaggag

SEQ ID NO: 620230 - DNA, 15 bp, Homo sapiens
ttgggtaacaggagg

SEQ ID NO: 620231 - DNA, 15 bp, Homo sapiens
tgggtaacaggagga

SEQ ID NO: 620232 - DNA, 15 bp, Homo sapiens
gggtaacaggaggaa

SEQ ID NO: 620233 - DNA, 15 bp, Homo sapiens
ggtaacaggaggaag

SEQ ID NO: 620234 - DNA, 15 bp, Homo sapiens
gtaacaggaggaagg

SEQ ID NO: 620235 - DNA, 15 bp, Homo sapiens
taacaggaggaagga

SEQ ID NO: 620236 - DNA, 15 bp, Homo sapiens
aacaggaggaaggag

SEQ ID NO: 620237 - DNA, 15 bp, Homo sapiens
acaggaggaaggagc

SEQ ID NO: 620238 - DNA, 15 bp, Homo sapiens
caggaggaaggagca

SEQ ID NO: 620239 - DNA, 15 bp, Homo sapiens
aggaggaaggagcag

SEQ ID NO: 620240 - DNA, 15 bp, Homo sapiens
ggaggaaggagcagg

SEQ ID NO: 620241 - DNA, 15 bp, Homo sapiens
gaggaaggagcagga

SEQ ID NO: 620242 - DNA, 15 bp, Homo sapiens
aggaaggagcaggag

SEQ ID NO: 620243 - DNA, 15 bp, Homo sapiens
ggaaggagcaggagg

SEQ ID NO: 620244 - DNA, 15 bp, Homo sapiens
gaaggagcaggaggt

SEQ ID NO: 620245 - DNA, 15 bp, Homo sapiens
aaggagcaggaggta

SEQ ID NO: 620246 - DNA, 15 bp, Homo sapiens
aggagcaggaggtaa

SEQ ID NO: 620247 - DNA, 15 bp, Homo sapiens
ggagcaggaggtaat

SEQ ID NO: 620248 - DNA, 15 bp, Homo sapiens
gagcaggaggtaatg

SEQ ID NO: 620249 - DNA, 15 bp, Homo sapiens
agcaggaggtaatga

SEQ ID NO: 620250 - DNA, 15 bp, Homo sapiens
gcaggaggtaatgat

SEQ ID NO: 620251 - DNA, 15 bp, Homo sapiens
caggaggtaatgatt

SEQ ID NO: 620252 - DNA, 15 bp, Homo sapiens
aggaggtaatgattg

SEQ ID NO: 620253 - DNA, 15 bp, Homo sapiens
ggaggtaatgattgg

SEQ ID NO: 620254 - DNA, 15 bp, Homo sapiens
gaggtaatgattggg

SEQ ID NO: 620255 - DNA, 15 bp, Homo sapiens
aggtaatgattgggt

SEQ ID NO: 620256 - DNA, 15 bp, Homo sapiens
ggtaatgattgggtc

SEQ ID NO: 620257 - DNA, 15 bp, Homo sapiens
gtaatgattgggtca

SEQ ID NO: 620258 - DNA, 15 bp, Homo sapiens
taatgattgggtcag

SEQ ID NO: 620259 - DNA, 15 bp, Homo sapiens
aatgattgggtcagc

SEQ ID NO: 620260 - DNA, 15 bp, Homo sapiens
atgattgggtcagct

SEQ ID NO: 620261 - DNA, 15 bp, Homo sapiens
tgattgggtcagctg

SEQ ID NO: 620262 - DNA, 15 bp, Homo sapiens
gattgggtcagctgc

SEQ ID NO: 620263 - DNA, 15 bp, Homo sapiens
attgggtcagctgct

SEQ ID NO: 620264 - DNA, 15 bp, Homo sapiens
ttgggtcagctgctt

SEQ ID NO: 620265 - DNA, 15 bp, Homo sapiens
tgggtcagctgctta

SEQ ID NO: 620266 - DNA, 15 bp, Homo sapiens
gggtcagctgcttaa

SEQ ID NO: 620267 - DNA, 15 bp, Homo sapiens
ggtcagctgcttaaa

SEQ ID NO: 620268 - DNA, 15 bp, Homo sapiens
gtcagctgcttaaat

SEQ ID NO: 620269 - DNA, 15 bp, Homo sapiens
tcagctgcttaaatg

SEQ ID NO: 620270 - DNA, 15 bp, Homo sapiens
cagctgcttaaatga

SEQ ID NO: 620271 - DNA, 15 bp, Homo sapiens
agctgcttaaatgat

SEQ ID NO: 620272 - DNA, 15 bp, Homo sapiens
gctgcttaaatgatc

SEQ ID NO: 620273 - DNA, 15 bp, Homo sapiens
ctgcttaaatgatca

SEQ ID NO: 620274 - DNA, 15 bp, Homo sapiens
tgcttaaatgatcac

SEQ ID NO: 620275 - DNA, 15 bp, Homo sapiens
gcttaaatgatcacg

SEQ ID NO: 620276 - DNA, 15 bp, Homo sapiens
cttaaatgatcacgg

SEQ ID NO: 620277 - DNA, 15 bp, Homo sapiens
ttaaatgatcacggg

SEQ ID NO: 620278 - DNA, 15 bp, Homo sapiens
taaatgatcacgggt

SEQ ID NO: 620279 - DNA, 15 bp, Homo sapiens
aaatgatcacgggtt

SEQ ID NO: 620280 - DNA, 15 bp, Homo sapiens
aatgatcacgggttc

SEQ ID NO: 620281 - DNA, 15 bp, Homo sapiens
atgatcacgggttca

SEQ ID NO: 620282 - DNA, 15 bp, Homo sapiens
tgatcacgggttcat

SEQ ID NO: 620283 - DNA, 15 bp, Homo sapiens
gatcacgggttcatg

SEQ ID NO: 620284 - DNA, 15 bp, Homo sapiens
atcacgggttcatgt

SEQ ID NO: 620285 - DNA, 15 bp, Homo sapiens
tcacgggttcatgtt

SEQ ID NO: 620286 - DNA, 15 bp, Homo sapiens
cacgggttcatgttg

SEQ ID NO: 620287 - DNA, 15 bp, Homo sapiens
acgggttcatgttgt

SEQ ID NO: 620288 - DNA, 15 bp, Homo sapiens
cgggttcatgttgtt

SEQ ID NO: 620289 - DNA, 15 bp, Homo sapiens
gggttcatgttgtta

SEQ ID NO: 620290 - DNA, 15 bp, Homo sapiens
ggttcatgttgttac

SEQ ID NO: 620291 - DNA, 15 bp, Homo sapiens
gttcatgttgttact

SEQ ID NO: 620292 - DNA, 15 bp, Homo sapiens
ttcatgttgttactg

SEQ ID NO: 620293 - DNA, 15 bp, Homo sapiens
tcatgttgttactga

SEQ ID NO: 620294 - DNA, 15 bp, Homo sapiens
catgttgttactgac

SEQ ID NO: 620295 - DNA, 15 bp, Homo sapiens
atgttgttactgaca

SEQ ID NO: 620296 - DNA, 15 bp, Homo sapiens
tgttgttactgacag

SEQ ID NO: 620297 - DNA, 15 bp, Homo sapiens
gttgttactgacaga

SEQ ID NO: 620298 - DNA, 15 bp, Homo sapiens
ttgttactgacagat

SEQ ID NO: 620299 - DNA, 15 bp, Homo sapiens
tgttactgacagatt

SEQ ID NO: 620300 - DNA, 15 bp, Homo sapiens
gttactgacagattt

SEQ ID NO: 620301 - DNA, 15 bp, Homo sapiens
ttactgacagatttc

SEQ ID NO: 620302 - DNA, 15 bp, Homo sapiens
tactgacagatttca

SEQ ID NO: 620303 - DNA, 15 bp, Homo sapiens
actgacagatttcaa

SEQ ID NO: 620304 - DNA, 15 bp, Homo sapiens
ctgacagatttcaat

SEQ ID NO: 620305 - DNA, 15 bp, Homo sapiens
tgacagatttcaatt

SEQ ID NO: 620306 - DNA, 15 bp, Homo sapiens
gacagatttcaatta

SEQ ID NO: 620307 - DNA, 15 bp, Homo sapiens
acagatttcaattat

SEQ ID NO: 620308 - DNA, 15 bp, Homo sapiens
cagatttcaattatg

SEQ ID NO: 620309 - DNA, 15 bp, Homo sapiens
agatttcaattatgc

SEQ ID NO: 620310 - DNA, 15 bp, Homo sapiens
gatttcaattatgcc

SEQ ID NO: 620311 - DNA, 15 bp, Homo sapiens
atttcaattatgcct

SEQ ID NO: 620312 - DNA, 15 bp, Homo sapiens
tttcaattatgccta

SEQ ID NO: 620313 - DNA, 15 bp, Homo sapiens
ttcaattatgcctaa

SEQ ID NO: 620314 - DNA, 15 bp, Homo sapiens
tcaattatgcctaat

SEQ ID NO: 620315 - DNA, 15 bp, Homo sapiens
caattatgcctaatc

SEQ ID NO: 620316 - DNA, 15 bp, Homo sapiens
aattatgcctaatca

SEQ ID NO: 620317 - DNA, 15 bp, Homo sapiens
attatgcctaatcat

SEQ ID NO: 620318 - DNA, 15 bp, Homo sapiens
ttatgcctaatcata

SEQ ID NO: 620319 - DNA, 15 bp, Homo sapiens
tatgcctaatcataa

SEQ ID NO: 620320 - DNA, 15 bp, Homo sapiens
atgcctaatcataag

SEQ ID NO: 620321 - DNA, 15 bp, Homo sapiens
tgcctaatcataaga

SEQ ID NO: 620322 - DNA, 15 bp, Homo sapiens
gcctaatcataagaa

SEQ ID NO: 620323 - DNA, 15 bp, Homo sapiens
cctaatcataagaaa

SEQ ID NO: 620324 - DNA, 15 bp, Homo sapiens
ctaatcataagaaac

SEQ ID NO: 620325 - DNA, 15 bp, Homo sapiens
taatcataagaaaca

SEQ ID NO: 620326 - DNA, 15 bp, Homo sapiens
aatcataagaaacat

SEQ ID NO: 620327 - DNA, 15 bp, Homo sapiens
atcataagaaacatt

SEQ ID NO: 620328 - DNA, 15 bp, Homo sapiens
tcataagaaacattt

SEQ ID NO: 620329 - DNA, 15 bp, Homo sapiens
cataagaaacatttg

SEQ ID NO: 620330 - DNA, 15 bp, Homo sapiens
ataagaaacatttgt

SEQ ID NO: 620331 - DNA, 15 bp, Homo sapiens
taagaaacatttgtg

SEQ ID NO: 620332 - DNA, 15 bp, Homo sapiens
aagaaacatttgtgc

SEQ ID NO: 620333 - DNA, 15 bp, Homo sapiens
agaaacatttgtgca

SEQ ID NO: 620334 - DNA, 15 bp, Homo sapiens
gaaacatttgtgcag

SEQ ID NO: 620335 - DNA, 15 bp, Homo sapiens
aaacatttgtgcagc

SEQ ID NO: 620336 - DNA, 15 bp, Homo sapiens
aacatttgtgcagcc

SEQ ID NO: 620337 - DNA, 15 bp, Homo sapiens
acatttgtgcagcct

SEQ ID NO: 620338 - DNA, 15 bp, Homo sapiens
catttgtgcagcctc

SEQ ID NO: 620339 - DNA, 15 bp, Homo sapiens
atttgtgcagcctcc

SEQ ID NO: 620340 - DNA, 15 bp, Homo sapiens
tttgtgcagcctcca

SEQ ID NO: 620341 - DNA, 15 bp, Homo sapiens
ttgtgcagcctccaa

SEQ ID NO: 620342 - DNA, 15 bp, Homo sapiens
tgtgcagcctccaac

SEQ ID NO: 620343 - DNA, 15 bp, Homo sapiens
gtgcagcctccaaca

SEQ ID NO: 620344 - DNA, 15 bp, Homo sapiens
tgcagcctccaacaa

SEQ ID NO: 620345 - DNA, 15 bp, Homo sapiens
gcagcctccaacaag

SEQ ID NO: 620346 - DNA, 15 bp, Homo sapiens
cagcctccaacaagg

SEQ ID NO: 620347 - DNA, 15 bp, Homo sapiens
agcctccaacaaggg

SEQ ID NO: 620348 - DNA, 15 bp, Homo sapiens
gcctccaacaagggt

SEQ ID NO: 620349 - DNA, 15 bp, Homo sapiens
cctccaacaagggtc

SEQ ID NO: 620350 - DNA, 15 bp, Homo sapiens
ctccaacaagggtca

SEQ ID NO: 620351 - DNA, 15 bp, Homo sapiens
tccaacaagggtcaa

SEQ ID NO: 620352 - DNA, 15 bp, Homo sapiens
ccaacaagggtcaat

SEQ ID NO: 620353 - DNA, 15 bp, Homo sapiens
caacaagggtcaatg

SEQ ID NO: 620354 - DNA, 15 bp, Homo sapiens
aacaagggtcaatgc

SEQ ID NO: 620355 - DNA, 15 bp, Homo sapiens
acaagggtcaatgcc

SEQ ID NO: 620356 - DNA, 15 bp, Homo sapiens
caagggtcaatgcca

SEQ ID NO: 620357 - DNA, 15 bp, Homo sapiens
aagggtcaatgccac

SEQ ID NO: 620358 - DNA, 15 bp, Homo sapiens
agggtcaatgccact

SEQ ID NO: 620359 - DNA, 15 bp, Homo sapiens
gggtcaatgccactt

SEQ ID NO: 620360 - DNA, 15 bp, Homo sapiens
ggtcaatgccacttc

SEQ ID NO: 620361 - DNA, 15 bp, Homo sapiens
gtcaatgccacttct

SEQ ID NO: 620362 - DNA, 15 bp, Homo sapiens
tcaatgccacttctg

SEQ ID NO: 620363 - DNA, 15 bp, Homo sapiens
caatgccacttctga

SEQ ID NO: 620364 - DNA, 15 bp, Homo sapiens
aatgccacttctgaa

SEQ ID NO: 620365 - DNA, 15 bp, Homo sapiens
atgccacttctgaag

SEQ ID NO: 620366 - DNA, 15 bp, Homo sapiens
tgccacttctgaagg

SEQ ID NO: 620367 - DNA, 15 bp, Homo sapiens
gccacttctgaaggg

SEQ ID NO: 620368 - DNA, 15 bp, Homo sapiens
ccacttctgaagggg

SEQ ID NO: 620369 - DNA, 15 bp, Homo sapiens
cacttctgaaggggt

SEQ ID NO: 620370 - DNA, 15 bp, Homo sapiens
acttctgaaggggtg

SEQ ID NO: 620371 - DNA, 15 bp, Homo sapiens
cttctgaaggggtga

SEQ ID NO: 620372 - DNA, 15 bp, Homo sapiens
ttctgaaggggtgac

SEQ ID NO: 620373 - DNA, 15 bp, Homo sapiens
tctgaaggggtgact

SEQ ID NO: 620374 - DNA, 15 bp, Homo sapiens
ctgaaggggtgactc

SEQ ID NO: 620375 - DNA, 15 bp, Homo sapiens
tgaaggggtgactca

SEQ ID NO: 620376 - DNA, 15 bp, Homo sapiens
gaaggggtgactcat

SEQ ID NO: 620377 - DNA, 15 bp, Homo sapiens
aaggggtgactcata

SEQ ID NO: 620378 - DNA, 15 bp, Homo sapiens
aggggtgactcatag

SEQ ID NO: 620379 - DNA, 15 bp, Homo sapiens
ggggtgactcatagt

SEQ ID NO: 620380 - DNA, 15 bp, Homo sapiens
gggtgactcatagtc

SEQ ID NO: 620381 - DNA, 15 bp, Homo sapiens
ggtgactcatagtca

SEQ ID NO: 620382 - DNA, 15 bp, Homo sapiens
gtgactcatagtcag

SEQ ID NO: 620383 - DNA, 15 bp, Homo sapiens
tgactcatagtcagt

SEQ ID NO: 620384 - DNA, 15 bp, Homo sapiens
gactcatagtcagta

SEQ ID NO: 620385 - DNA, 15 bp, Homo sapiens
actcatagtcagtaa

SEQ ID NO: 620386 - DNA, 15 bp, Homo sapiens
ctcatagtcagtaac

SEQ ID NO: 620387 - DNA, 15 bp, Homo sapiens
tcatagtcagtaact

SEQ ID NO: 620388 - DNA, 15 bp, Homo sapiens
catagtcagtaacta

SEQ ID NO: 620389 - DNA, 15 bp, Homo sapiens
atagtcagtaactag

SEQ ID NO: 620390 - DNA, 15 bp, Homo sapiens
tagtcagtaactaga

SEQ ID NO: 620391 - DNA, 15 bp, Homo sapiens
agtcagtaactagaa

SEQ ID NO: 620392 - DNA, 15 bp, Homo sapiens
gtcagtaactagaaa

SEQ ID NO: 620393 - DNA, 15 bp, Homo sapiens
tcagtaactagaaag

SEQ ID NO: 620394 - DNA, 15 bp, Homo sapiens
cagtaactagaaagc

SEQ ID NO: 620395 - DNA, 15 bp, Homo sapiens
agtaactagaaagca

SEQ ID NO: 620396 - DNA, 15 bp, Homo sapiens
gtaactagaaagcag

SEQ ID NO: 620397 - DNA, 15 bp, Homo sapiens
taactagaaagcagc

SEQ ID NO: 620398 - DNA, 15 bp, Homo sapiens
aactagaaagcagca

SEQ ID NO: 620399 - DNA, 15 bp, Homo sapiens
actagaaagcagcag

SEQ ID NO: 620400 - DNA, 15 bp, Homo sapiens
ctagaaagcagcaga

SEQ ID NO: 620401 - DNA, 15 bp, Homo sapiens
tagaaagcagcagat

SEQ ID NO: 620402 - DNA, 15 bp, Homo sapiens
agaaagcagcagata

SEQ ID NO: 620403 - DNA, 15 bp, Homo sapiens
gaaagcagcagatag

SEQ ID NO: 620404 - DNA, 15 bp, Homo sapiens
aaagcagcagatagc

SEQ ID NO: 620405 - DNA, 15 bp, Homo sapiens
aagcagcagatagct

SEQ ID NO: 620406 - DNA, 15 bp, Homo sapiens
agcagcagatagcta

SEQ ID NO: 620407 - DNA, 15 bp, Homo sapiens
gcagcagatagctag

SEQ ID NO: 620408 - DNA, 15 bp, Homo sapiens
cagcagatagctagg

SEQ ID NO: 620409 - DNA, 15 bp, Homo sapiens
agcagatagctaggg

SEQ ID NO: 620410 - DNA, 15 bp, Homo sapiens
gcagatagctaggga

SEQ ID NO: 620411 - DNA, 15 bp, Homo sapiens
cagatagctagggac

SEQ ID NO: 620412 - DNA, 15 bp, Homo sapiens
agatagctagggaca

SEQ ID NO: 620413 - DNA, 15 bp, Homo sapiens
gatagctagggacaa

SEQ ID NO: 620414 - DNA, 15 bp, Homo sapiens
atagctagggacaaa

SEQ ID NO: 620415 - DNA, 15 bp, Homo sapiens
tagctagggacaaac

SEQ ID NO: 620416 - DNA, 15 bp, Homo sapiens
agctagggacaaact

SEQ ID NO: 620417 - DNA, 15 bp, Homo sapiens
gctagggacaaactg

SEQ ID NO: 620418 - DNA, 15 bp, Homo sapiens
ctagggacaaactgg

SEQ ID NO: 620419 - DNA, 15 bp, Homo sapiens
tagggacaaactggc

SEQ ID NO: 620420 - DNA, 15 bp, Homo sapiens
agggacaaactggcg

SEQ ID NO: 620421 - DNA, 15 bp, Homo sapiens
gggacaaactggcga

SEQ ID NO: 620422 - DNA, 15 bp, Homo sapiens
ggacaaactggcgat

SEQ ID NO: 620423 - DNA, 15 bp, Homo sapiens
gacaaactggcgatt

SEQ ID NO: 620424 - DNA, 15 bp, Homo sapiens
acaaactggcgattc

SEQ ID NO: 620425 - DNA, 15 bp, Homo sapiens
caaactggcgattct

SEQ ID NO: 620426 - DNA, 15 bp, Homo sapiens
aaactggcgattctg

SEQ ID NO: 620427 - DNA, 15 bp, Homo sapiens
aactggcgattctga

SEQ ID NO: 620428 - DNA, 15 bp, Homo sapiens
actggcgattctgaa

SEQ ID NO: 620429 - DNA, 15 bp, Homo sapiens
ctggcgattctgaat

SEQ ID NO: 620430 - DNA, 15 bp, Homo sapiens
tggcgattctgaata

SEQ ID NO: 620431 - DNA, 15 bp, Homo sapiens
ggcgattctgaatag

SEQ ID NO: 620432 - DNA, 15 bp, Homo sapiens
gcgattctgaatagg

SEQ ID NO: 620433 - DNA, 15 bp, Homo sapiens
cgattctgaataggc

SEQ ID NO: 620434 - DNA, 15 bp, Homo sapiens
gattctgaataggcc

SEQ ID NO: 620435 - DNA, 15 bp, Homo sapiens
attctgaataggcct

SEQ ID NO: 620436 - DNA, 15 bp, Homo sapiens
ttctgaataggcctg

SEQ ID NO: 620437 - DNA, 15 bp, Homo sapiens
tctgaataggcctgg

SEQ ID NO: 620438 - DNA, 15 bp, Homo sapiens
ctgaataggcctgga

SEQ ID NO: 620439 - DNA, 15 bp, Homo sapiens
tgaataggcctggaa

SEQ ID NO: 620440 - DNA, 15 bp, Homo sapiens
gaataggcctggaac

SEQ ID NO: 620441 - DNA, 15 bp, Homo sapiens
aataggcctggaacc

SEQ ID NO: 620442 - DNA, 15 bp, Homo sapiens
ataggcctggaaccc

SEQ ID NO: 620443 - DNA, 15 bp, Homo sapiens
taggcctggaaccct

SEQ ID NO: 620444 - DNA, 15 bp, Homo sapiens
aggcctggaaccctt

SEQ ID NO: 620445 - DNA, 15 bp, Homo sapiens
ggcctggaaccctta

SEQ ID NO: 620446 - DNA, 15 bp, Homo sapiens
gcctggaacccttag

SEQ ID NO: 620447 - DNA, 15 bp, Homo sapiens
cctggaacccttagc

SEQ ID NO: 620448 - DNA, 15 bp, Homo sapiens
ctggaacccttagct

SEQ ID NO: 620449 - DNA, 15 bp, Homo sapiens
tggaacccttagctc

SEQ ID NO: 620450 - DNA, 15 bp, Homo sapiens
ggaacccttagctct

SEQ ID NO: 620451 - DNA, 15 bp, Homo sapiens
gaacccttagctctg

SEQ ID NO: 620452 - DNA, 15 bp, Homo sapiens
aacccttagctctgg

SEQ ID NO: 620453 - DNA, 15 bp, Homo sapiens
acccttagctctggc

SEQ ID NO: 620454 - DNA, 15 bp, Homo sapiens
cccttagctctggcc

SEQ ID NO: 620455 - DNA, 15 bp, Homo sapiens
ccttagctctggcca

SEQ ID NO: 620456 - DNA, 15 bp, Homo sapiens
cttagctctggccag

SEQ ID NO: 620457 - DNA, 15 bp, Homo sapiens
ttagctctggccagg

SEQ ID NO: 620458 - DNA, 15 bp, Homo sapiens
tagctctggccaggt

SEQ ID NO: 620459 - DNA, 15 bp, Homo sapiens
agctctggccaggtc

SEQ ID NO: 620460 - DNA, 15 bp, Homo sapiens
gctctggccaggtca

SEQ ID NO: 620461 - DNA, 15 bp, Homo sapiens
ctctggccaggtcag

SEQ ID NO: 620462 - DNA, 15 bp, Homo sapiens
tctggccaggtcagt

SEQ ID NO: 620463 - DNA, 15 bp, Homo sapiens
ctggccaggtcagtg

SEQ ID NO: 620464 - DNA, 15 bp, Homo sapiens
tggccaggtcagtgg

SEQ ID NO: 620465 - DNA, 15 bp, Homo sapiens
ggccaggtcagtggg

SEQ ID NO: 620466 - DNA, 15 bp, Homo sapiens
gccaggtcagtgggc

SEQ ID NO: 620467 - DNA, 15 bp, Homo sapiens
ccaggtcagtgggct

SEQ ID NO: 620468 - DNA, 15 bp, Homo sapiens
caggtcagtgggctc

SEQ ID NO: 620469 - DNA, 15 bp, Homo sapiens
aggtcagtgggctcc

SEQ ID NO: 620470 - DNA, 15 bp, Homo sapiens
ggtcagtgggctcca

SEQ ID NO: 620471 - DNA, 15 bp, Homo sapiens
gtcagtgggctccag

SEQ ID NO: 620472 - DNA, 15 bp, Homo sapiens
tcagtgggctccagt

SEQ ID NO: 620473 - DNA, 15 bp, Homo sapiens
cagtgggctccagtc

SEQ ID NO: 620474 - DNA, 15 bp, Homo sapiens
agtgggctccagtca

SEQ ID NO: 620475 - DNA, 15 bp, Homo sapiens
gtgggctccagtcag

SEQ ID NO: 620476 - DNA, 15 bp, Homo sapiens
tgggctccagtcagg

SEQ ID NO: 620477 - DNA, 15 bp, Homo sapiens
gggctccagtcagga

SEQ ID NO: 620478 - DNA, 15 bp, Homo sapiens
ggctccagtcaggat

SEQ ID NO: 620479 - DNA, 15 bp, Homo sapiens
gctccagtcaggatg

SEQ ID NO: 620480 - DNA, 15 bp, Homo sapiens
ctccagtcaggatgg

SEQ ID NO: 620481 - DNA, 15 bp, Homo sapiens
tccagtcaggatgga

SEQ ID NO: 620482 - DNA, 15 bp, Homo sapiens
ccagtcaggatggag

SEQ ID NO: 620483 - DNA, 15 bp, Homo sapiens
cagtcaggatggagc

SEQ ID NO: 620484 - DNA, 15 bp, Homo sapiens
agtcaggatggagcc

SEQ ID NO: 620485 - DNA, 15 bp, Homo sapiens
gtcaggatggagcct

SEQ ID NO: 620486 - DNA, 15 bp, Homo sapiens
tcaggatggagcctt

SEQ ID NO: 620487 - DNA, 15 bp, Homo sapiens
caggatggagccttc

SEQ ID NO: 620488 - DNA, 15 bp, Homo sapiens
aggatggagccttca

SEQ ID NO: 620489 - DNA, 15 bp, Homo sapiens
ggatggagccttcag

SEQ ID NO: 620490 - DNA, 15 bp, Homo sapiens
gatggagccttcagg

SEQ ID NO: 620491 - DNA, 15 bp, Homo sapiens
atggagccttcaggg

SEQ ID NO: 620492 - DNA, 15 bp, Homo sapiens
tggagccttcaggga

SEQ ID NO: 620493 - DNA, 15 bp, Homo sapiens
ggagccttcagggag

SEQ ID NO: 620494 - DNA, 15 bp, Homo sapiens
gagccttcagggaga

SEQ ID NO: 620495 - DNA, 15 bp, Homo sapiens
agccttcagggagag

SEQ ID NO: 620496 - DNA, 15 bp, Homo sapiens
gccttcagggagaga

SEQ ID NO: 620497 - DNA, 15 bp, Homo sapiens
ccttcagggagagat

SEQ ID NO: 620498 - DNA, 15 bp, Homo sapiens
cttcagggagagatc

SEQ ID NO: 620499 - DNA, 15 bp, Homo sapiens
ttcagggagagatca

SEQ ID NO: 620500 - DNA, 15 bp, Homo sapiens
tcagggagagatcaa

SEQ ID NO: 620501 - DNA, 15 bp, Homo sapiens
cagggagagatcaaa

SEQ ID NO: 620502 - DNA, 15 bp, Homo sapiens
agggagagatcaaag

SEQ ID NO: 620503 - DNA, 15 bp, Homo sapiens
gggagagatcaaagc

SEQ ID NO: 620504 - DNA, 15 bp, Homo sapiens
ggagagatcaaagct

SEQ ID NO: 620505 - DNA, 15 bp, Homo sapiens
gagagatcaaagctc

SEQ ID NO: 620506 - DNA, 15 bp, Homo sapiens
agagatcaaagctca

SEQ ID NO: 620507 - DNA, 15 bp, Homo sapiens
gagatcaaagctcag

SEQ ID NO: 620508 - DNA, 15 bp, Homo sapiens
agatcaaagctcaga

SEQ ID NO: 620509 - DNA, 15 bp, Homo sapiens
gatcaaagctcagag

SEQ ID NO: 620510 - DNA, 15 bp, Homo sapiens
atcaaagctcagagg

SEQ ID NO: 620511 - DNA, 15 bp, Homo sapiens
tcaaagctcagaggt

SEQ ID NO: 620512 - DNA, 15 bp, Homo sapiens
caaagctcagaggtt

SEQ ID NO: 620513 - DNA, 15 bp, Homo sapiens
aaagctcagaggttt

SEQ ID NO: 620514 - DNA, 15 bp, Homo sapiens
aagctcagaggtttg

SEQ ID NO: 620515 - DNA, 15 bp, Homo sapiens
agctcagaggtttga

SEQ ID NO: 620516 - DNA, 15 bp, Homo sapiens
gctcagaggtttgag

SEQ ID NO: 620517 - DNA, 15 bp, Homo sapiens
ctcagaggtttgaga

SEQ ID NO: 620518 - DNA, 15 bp, Homo sapiens
tcagaggtttgagat

SEQ ID NO: 620519 - DNA, 15 bp, Homo sapiens
cagaggtttgagatg

SEQ ID NO: 620520 - DNA, 15 bp, Homo sapiens
agaggtttgagatga

SEQ ID NO: 620521 - DNA, 15 bp, Homo sapiens
gaggtttgagatgat

SEQ ID NO: 620522 - DNA, 15 bp, Homo sapiens
aggtttgagatgata

SEQ ID NO: 620523 - DNA, 15 bp, Homo sapiens
ggtttgagatgatat

SEQ ID NO: 620524 - DNA, 15 bp, Homo sapiens
gtttgagatgatatc

SEQ ID NO: 620525 - DNA, 15 bp, Homo sapiens
tttgagatgatatca

SEQ ID NO: 620526 - DNA, 15 bp, Homo sapiens
ttgagatgatatcag

SEQ ID NO: 620527 - DNA, 15 bp, Homo sapiens
tgagatgatatcagc

SEQ ID NO: 620528 - DNA, 15 bp, Homo sapiens
gagatgatatcagcc

SEQ ID NO: 620529 - DNA, 15 bp, Homo sapiens
agatgatatcagcca

SEQ ID NO: 620530 - DNA, 15 bp, Homo sapiens
gatgatatcagccag

SEQ ID NO: 620531 - DNA, 15 bp, Homo sapiens
atgatatcagccagc

SEQ ID NO: 620532 - DNA, 15 bp, Homo sapiens
tgatatcagccagca

SEQ ID NO: 620533 - DNA, 15 bp, Homo sapiens
gatatcagccagcaa

SEQ ID NO: 620534 - DNA, 15 bp, Homo sapiens
atatcagccagcaaa

SEQ ID NO: 620535 - DNA, 15 bp, Homo sapiens
tatcagccagcaaag

SEQ ID NO: 620536 - DNA, 15 bp, Homo sapiens
atcagccagcaaaga

SEQ ID NO: 620537 - DNA, 15 bp, Homo sapiens
tcagccagcaaagag

SEQ ID NO: 620538 - DNA, 15 bp, Homo sapiens
cagccagcaaagagg

SEQ ID NO: 620539 - DNA, 15 bp, Homo sapiens
agccagcaaagagga

SEQ ID NO: 620540 - DNA, 15 bp, Homo sapiens
gccagcaaagaggag

SEQ ID NO: 620541 - DNA, 15 bp, Homo sapiens
ccagcaaagaggagg

SEQ ID NO: 620542 - DNA, 15 bp, Homo sapiens
cagcaaagaggaggg

SEQ ID NO: 620543 - DNA, 15 bp, Homo sapiens
agcaaagaggagggg

SEQ ID NO: 620544 - DNA, 15 bp, Homo sapiens
gcaaagaggaggggc

SEQ ID NO: 620545 - DNA, 15 bp, Homo sapiens
caaagaggaggggca

SEQ ID NO: 620546 - DNA, 15 bp, Homo sapiens
aaagaggaggggcag

SEQ ID NO: 620547 - DNA, 15 bp, Homo sapiens
aagaggaggggcagt

SEQ ID NO: 620548 - DNA, 15 bp, Homo sapiens
agaggaggggcagta

SEQ ID NO: 620549 - DNA, 15 bp, Homo sapiens
gaggaggggcagtag

SEQ ID NO: 620550 - DNA, 15 bp, Homo sapiens
aggaggggcagtagg

SEQ ID NO: 620551 - DNA, 15 bp, Homo sapiens
ggaggggcagtaggg

SEQ ID NO: 620552 - DNA, 15 bp, Homo sapiens
gaggggcagtaggga

SEQ ID NO: 620553 - DNA, 15 bp, Homo sapiens
aggggcagtagggat

SEQ ID NO: 620554 - DNA, 15 bp, Homo sapiens
ggggcagtagggatc

SEQ ID NO: 620555 - DNA, 15 bp, Homo sapiens
gggcagtagggatcc

SEQ ID NO: 620556 - DNA, 15 bp, Homo sapiens
ggcagtagggatcct

SEQ ID NO: 620557 - DNA, 15 bp, Homo sapiens
gcagtagggatcctc

SEQ ID NO: 620558 - DNA, 15 bp, Homo sapiens
cagtagggatcctcc

SEQ ID NO: 620559 - DNA, 15 bp, Homo sapiens
agtagggatcctccc

SEQ ID NO: 620560 - DNA, 15 bp, Homo sapiens
gtagggatcctccca

SEQ ID NO: 620561 - DNA, 15 bp, Homo sapiens
tagggatcctcccag

SEQ ID NO: 620562 - DNA, 15 bp, Homo sapiens
agggatcctcccaga

SEQ ID NO: 620563 - DNA, 15 bp, Homo sapiens
gggatcctcccagag

SEQ ID NO: 620564 - DNA, 15 bp, Homo sapiens
ggatcctcccagagg

SEQ ID NO: 620565 - DNA, 15 bp, Homo sapiens
gatcctcccagaggg

SEQ ID NO: 620566 - DNA, 15 bp, Homo sapiens
atcctcccagaggga

SEQ ID NO: 620567 - DNA, 15 bp, Homo sapiens
tcctcccagagggag

SEQ ID NO: 620568 - DNA, 15 bp, Homo sapiens
cctcccagagggagg

SEQ ID NO: 620569 - DNA, 15 bp, Homo sapiens
ctcccagagggaggg

SEQ ID NO: 620570 - DNA, 15 bp, Homo sapiens
tcccagagggagggc

SEQ ID NO: 620571 - DNA, 15 bp, Homo sapiens
cccagagggagggcc

SEQ ID NO: 620572 - DNA, 15 bp, Homo sapiens
ccagagggagggcca

SEQ ID NO: 620573 - DNA, 15 bp, Homo sapiens
cagagggagggccag

SEQ ID NO: 620574 - DNA, 15 bp, Homo sapiens
agagggagggccagc

SEQ ID NO: 620575 - DNA, 15 bp, Homo sapiens
gagggagggccagcc

SEQ ID NO: 620576 - DNA, 15 bp, Homo sapiens
agggagggccagcca

SEQ ID NO: 620577 - DNA, 15 bp, Homo sapiens
gggagggccagccat

SEQ ID NO: 620578 - DNA, 15 bp, Homo sapiens
ggagggccagccata

SEQ ID NO: 620579 - DNA, 15 bp, Homo sapiens
gagggccagccatag

SEQ ID NO: 620580 - DNA, 15 bp, Homo sapiens
agggccagccataga

SEQ ID NO: 620581 - DNA, 15 bp, Homo sapiens
gggccagccatagaa

SEQ ID NO: 620582 - DNA, 15 bp, Homo sapiens
ggccagccatagaag

SEQ ID NO: 620583 - DNA, 15 bp, Homo sapiens
gccagccatagaaga

SEQ ID NO: 620584 - DNA, 15 bp, Homo sapiens
ccagccatagaagac

SEQ ID NO: 620585 - DNA, 15 bp, Homo sapiens
cagccatagaagaca

SEQ ID NO: 620586 - DNA, 15 bp, Homo sapiens
agccatagaagacat

SEQ ID NO: 620587 - DNA, 15 bp, Homo sapiens
gccatagaagacatc

SEQ ID NO: 620588 - DNA, 15 bp, Homo sapiens
ccatagaagacatca

SEQ ID NO: 620589 - DNA, 15 bp, Homo sapiens
catagaagacatcaa

SEQ ID NO: 620590 - DNA, 15 bp, Homo sapiens
atagaagacatcaaa

SEQ ID NO: 620591 - DNA, 15 bp, Homo sapiens
tagaagacatcaaat

SEQ ID NO: 620592 - DNA, 15 bp, Homo sapiens
agaagacatcaaatc

SEQ ID NO: 620593 - DNA, 15 bp, Homo sapiens
gaagacatcaaatct

SEQ ID NO: 620594 - DNA, 15 bp, Homo sapiens
aagacatcaaatctg

SEQ ID NO: 620595 - DNA, 15 bp, Homo sapiens
agacatcaaatctga

SEQ ID NO: 620596 - DNA, 15 bp, Homo sapiens
gacatcaaatctgag

SEQ ID NO: 620597 - DNA, 15 bp, Homo sapiens
acatcaaatctgagc

SEQ ID NO: 620598 - DNA, 15 bp, Homo sapiens
catcaaatctgagcc

SEQ ID NO: 620599 - DNA, 15 bp, Homo sapiens
atcaaatctgagccc

SEQ ID NO: 620600 - DNA, 15 bp, Homo sapiens
tcaaatctgagcccg

SEQ ID NO: 620601 - DNA, 15 bp, Homo sapiens
caaatctgagcccgg

SEQ ID NO: 620602 - DNA, 15 bp, Homo sapiens
aaatctgagcccgga

SEQ ID NO: 620603 - DNA, 15 bp, Homo sapiens
aatctgagcccggat

SEQ ID NO: 620604 - DNA, 15 bp, Homo sapiens
atctgagcccggatc

SEQ ID NO: 620605 - DNA, 15 bp, Homo sapiens
tctgagcccggatca

SEQ ID NO: 620606 - DNA, 15 bp, Homo sapiens
ctgagcccggatcag

SEQ ID NO: 620607 - DNA, 15 bp, Homo sapiens
tgagcccggatcagg

SEQ ID NO: 620608 - DNA, 15 bp, Homo sapiens
gagcccggatcagga

SEQ ID NO: 620609 - DNA, 15 bp, Homo sapiens
agcccggatcaggag

SEQ ID NO: 620610 - DNA, 15 bp, Homo sapiens
gcccggatcaggaga

SEQ ID NO: 620611 - DNA, 15 bp, Homo sapiens
cccggatcaggagaa

SEQ ID NO: 620612 - DNA, 15 bp, Homo sapiens
ccggatcaggagaag

SEQ ID NO: 620613 - DNA, 15 bp, Homo sapiens
cggatcaggagaagg

SEQ ID NO: 620614 - DNA, 15 bp, Homo sapiens
ggatcaggagaagga

SEQ ID NO: 620615 - DNA, 15 bp, Homo sapiens
gatcaggagaaggag

SEQ ID NO: 620616 - DNA, 15 bp, Homo sapiens
atcaggagaaggagc

SEQ ID NO: 620617 - DNA, 15 bp, Homo sapiens
tcaggagaaggagcc

SEQ ID NO: 620618 - DNA, 15 bp, Homo sapiens
caggagaaggagcct

SEQ ID NO: 620619 - DNA, 15 bp, Homo sapiens
aggagaaggagcctg

SEQ ID NO: 620620 - DNA, 15 bp, Homo sapiens
ggagaaggagcctgc

SEQ ID NO: 620621 - DNA, 15 bp, Homo sapiens
gagaaggagcctgca

SEQ ID NO: 620622 - DNA, 15 bp, Homo sapiens
agaaggagcctgcag

SEQ ID NO: 620623 - DNA, 15 bp, Homo sapiens
gaaggagcctgcaga

SEQ ID NO: 620624 - DNA, 15 bp, Homo sapiens
aaggagcctgcagaa

SEQ ID NO: 620625 - DNA, 15 bp, Homo sapiens
aggagcctgcagaac

SEQ ID NO: 620626 - DNA, 15 bp, Homo sapiens
ggagcctgcagaact

SEQ ID NO: 620627 - DNA, 15 bp, Homo sapiens
gagcctgcagaactg

SEQ ID NO: 620628 - DNA, 15 bp, Homo sapiens
agcctgcagaactgg

SEQ ID NO: 620629 - DNA, 15 bp, Homo sapiens
gcctgcagaactggg

SEQ ID NO: 620630 - DNA, 15 bp, Homo sapiens
cctgcagaactgggg

SEQ ID NO: 620631 - DNA, 15 bp, Homo sapiens
ctgcagaactggggc

SEQ ID NO: 620632 - DNA, 15 bp, Homo sapiens
tgcagaactggggct

SEQ ID NO: 620633 - DNA, 15 bp, Homo sapiens
gcagaactggggctc

SEQ ID NO: 620634 - DNA, 15 bp, Homo sapiens
cagaactggggctct

SEQ ID NO: 620635 - DNA, 15 bp, Homo sapiens
agaactggggctctg

SEQ ID NO: 620636 - DNA, 15 bp, Homo sapiens
gaactggggctctgg

SEQ ID NO: 620637 - DNA, 15 bp, Homo sapiens
aactggggctctggc

SEQ ID NO: 620638 - DNA, 15 bp, Homo sapiens
actggggctctggca

SEQ ID NO: 620639 - DNA, 15 bp, Homo sapiens
ctggggctctggcac

SEQ ID NO: 620640 - DNA, 15 bp, Homo sapiens
tggggctctggcacc

SEQ ID NO: 620641 - DNA, 15 bp, Homo sapiens
ggggctctggcaccg

SEQ ID NO: 620642 - DNA, 15 bp, Homo sapiens
gggctctggcaccga

SEQ ID NO: 620643 - DNA, 15 bp, Homo sapiens
ggctctggcaccgag

SEQ ID NO: 620644 - DNA, 15 bp, Homo sapiens
gctctggcaccgaga

SEQ ID NO: 620645 - DNA, 15 bp, Homo sapiens
ctctggcaccgagaa

SEQ ID NO: 620646 - DNA, 15 bp, Homo sapiens
tctggcaccgagaac

SEQ ID NO: 620647 - DNA, 15 bp, Homo sapiens
ctggcaccgagaacc

SEQ ID NO: 620648 - DNA, 15 bp, Homo sapiens
tggcaccgagaacct

SEQ ID NO: 620649 - DNA, 15 bp, Homo sapiens
ggcaccgagaacctg

SEQ ID NO: 620650 - DNA, 15 bp, Homo sapiens
gcaccgagaacctgc

SEQ ID NO: 620651 - DNA, 15 bp, Homo sapiens
caccgagaacctgca

SEQ ID NO: 620652 - DNA, 15 bp, Homo sapiens
accgagaacctgcag

SEQ ID NO: 620653 - DNA, 15 bp, Homo sapiens
ccgagaacctgcaga

SEQ ID NO: 620654 - DNA, 15 bp, Homo sapiens
cgagaacctgcagaa

SEQ ID NO: 620655 - DNA, 15 bp, Homo sapiens
gagaacctgcagaac

SEQ ID NO: 620656 - DNA, 15 bp, Homo sapiens
agaacctgcagaact

SEQ ID NO: 620657 - DNA, 15 bp, Homo sapiens
gaacctgcagaactt

SEQ ID NO: 620658 - DNA, 15 bp, Homo sapiens
aacctgcagaacttc

SEQ ID NO: 620659 - DNA, 15 bp, Homo sapiens
acctgcagaacttcg

SEQ ID NO: 620660 - DNA, 15 bp, Homo sapiens
cctgcagaacttcgc

SEQ ID NO: 620661 - DNA, 15 bp, Homo sapiens
ctgcagaacttcgcc

SEQ ID NO: 620662 - DNA, 15 bp, Homo sapiens
tgcagaacttcgccc

SEQ ID NO: 620663 - DNA, 15 bp, Homo sapiens
gcagaacttcgcccc

SEQ ID NO: 620664 - DNA, 15 bp, Homo sapiens
cagaacttcgcccct

SEQ ID NO: 620665 - DNA, 15 bp, Homo sapiens
agaacttcgcccctc

SEQ ID NO: 620666 - DNA, 15 bp, Homo sapiens
gaacttcgcccctct

SEQ ID NO: 620667 - DNA, 15 bp, Homo sapiens
aacttcgcccctctg

SEQ ID NO: 620668 - DNA, 15 bp, Homo sapiens
acttcgcccctctga

SEQ ID NO: 620669 - DNA, 15 bp, Homo sapiens
cttcgcccctctgag

SEQ ID NO: 620670 - DNA, 15 bp, Homo sapiens
ttcgcccctctgagt

SEQ ID NO: 620671 - DNA, 15 bp, Homo sapiens
tcgcccctctgagtg

SEQ ID NO: 620672 - DNA, 15 bp, Homo sapiens
cgcccctctgagtgc

SEQ ID NO: 620673 - DNA, 15 bp, Homo sapiens
gcccctctgagtgca

SEQ ID NO: 620674 - DNA, 15 bp, Homo sapiens
cccctctgagtgcag

SEQ ID NO: 620675 - DNA, 15 bp, Homo sapiens
ccctctgagtgcagg

SEQ ID NO: 620676 - DNA, 15 bp, Homo sapiens
cctctgagtgcaggt

SEQ ID NO: 620677 - DNA, 15 bp, Homo sapiens
ctctgagtgcaggtg

SEQ ID NO: 620678 - DNA, 15 bp, Homo sapiens
tctgagtgcaggtgc

SEQ ID NO: 620679 - DNA, 15 bp, Homo sapiens
ctgagtgcaggtgcc

SEQ ID NO: 620680 - DNA, 15 bp, Homo sapiens
tgagtgcaggtgcca

SEQ ID NO: 620681 - DNA, 15 bp, Homo sapiens
gagtgcaggtgccag

SEQ ID NO: 620682 - DNA, 15 bp, Homo sapiens
agtgcaggtgccagg

SEQ ID NO: 620683 - DNA, 15 bp, Homo sapiens
gtgcaggtgccaggg

SEQ ID NO: 620684 - DNA, 15 bp, Homo sapiens
tgcaggtgccagggc

SEQ ID NO: 620685 - DNA, 15 bp, Homo sapiens
gcaggtgccagggct

SEQ ID NO: 620686 - DNA, 15 bp, Homo sapiens
caggtgccagggctg

SEQ ID NO: 620687 - DNA, 15 bp, Homo sapiens
aggtgccagggctgg

SEQ ID NO: 620688 - DNA, 15 bp, Homo sapiens
ggtgccagggctggg

SEQ ID NO: 620689 - DNA, 15 bp, Homo sapiens
gtgccagggctgggg

SEQ ID NO: 620690 - DNA, 15 bp, Homo sapiens
tgccagggctggggc

SEQ ID NO: 620691 - DNA, 15 bp, Homo sapiens
gccagggctggggct

SEQ ID NO: 620692 - DNA, 15 bp, Homo sapiens
ccagggctggggctg

SEQ ID NO: 620693 - DNA, 15 bp, Homo sapiens
cagggctggggctgc

SEQ ID NO: 620694 - DNA, 15 bp, Homo sapiens
agggctggggctgcc

SEQ ID NO: 620695 - DNA, 15 bp, Homo sapiens
gggctggggctgcca

SEQ ID NO: 620696 - DNA, 15 bp, Homo sapiens
ggctggggctgccac

SEQ ID NO: 620697 - DNA, 15 bp, Homo sapiens
gctggggctgccacc

SEQ ID NO: 620698 - DNA, 15 bp, Homo sapiens
ctggggctgccaccc

SEQ ID NO: 620699 - DNA, 15 bp, Homo sapiens
tggggctgccaccca

SEQ ID NO: 620700 - DNA, 15 bp, Homo sapiens
ggggctgccacccag

SEQ ID NO: 620701 - DNA, 15 bp, Homo sapiens
gggctgccacccagc

SEQ ID NO: 620702 - DNA, 15 bp, Homo sapiens
ggctgccacccagcc

SEQ ID NO: 620703 - DNA, 15 bp, Homo sapiens
gctgccacccagcct

SEQ ID NO: 620704 - DNA, 15 bp, Homo sapiens
ctgccacccagcctt

SEQ ID NO: 620705 - DNA, 15 bp, Homo sapiens
tgccacccagccttc

SEQ ID NO: 620706 - DNA, 15 bp, Homo sapiens
gccacccagccttcg

SEQ ID NO: 620707 - DNA, 15 bp, Homo sapiens
ccacccagccttcgc

SEQ ID NO: 620708 - DNA, 15 bp, Homo sapiens
cacccagccttcgca

SEQ ID NO: 620709 - DNA, 15 bp, Homo sapiens
acccagccttcgcat

SEQ ID NO: 620710 - DNA, 15 bp, Homo sapiens
cccagccttcgcatc

SEQ ID NO: 620711 - DNA, 15 bp, Homo sapiens
ccagccttcgcatcc

SEQ ID NO: 620712 - DNA, 15 bp, Homo sapiens
cagccttcgcatccc

SEQ ID NO: 620713 - DNA, 15 bp, Homo sapiens
agccttcgcatccca

SEQ ID NO: 620714 - DNA, 15 bp, Homo sapiens
gccttcgcatcccag

SEQ ID NO: 620715 - DNA, 15 bp, Homo sapiens
ccttcgcatcccagg

SEQ ID NO: 620716 - DNA, 15 bp, Homo sapiens
cttcgcatcccaggc

SEQ ID NO: 620717 - DNA, 15 bp, Homo sapiens
ttcgcatcccaggcc

SEQ ID NO: 620718 - DNA, 15 bp, Homo sapiens
tcgcatcccaggcct

SEQ ID NO: 620719 - DNA, 15 bp, Homo sapiens
cgcatcccaggcctg

SEQ ID NO: 620720 - DNA, 15 bp, Homo sapiens
gcatcccaggcctgg

SEQ ID NO: 620721 - DNA, 15 bp, Homo sapiens
catcccaggcctggc

SEQ ID NO: 620722 - DNA, 15 bp, Homo sapiens
atcccaggcctggca

SEQ ID NO: 620723 - DNA, 15 bp, Homo sapiens
tcccaggcctggcac

SEQ ID NO: 620724 - DNA, 15 bp, Homo sapiens
cccaggcctggcacg

SEQ ID NO: 620725 - DNA, 15 bp, Homo sapiens
ccaggcctggcacgt

SEQ ID NO: 620726 - DNA, 15 bp, Homo sapiens
caggcctggcacgtc

SEQ ID NO: 620727 - DNA, 15 bp, Homo sapiens
aggcctggcacgtca

SEQ ID NO: 620728 - DNA, 15 bp, Homo sapiens
ggcctggcacgtcat

SEQ ID NO: 620729 - DNA, 15 bp, Homo sapiens
gcctggcacgtcata

SEQ ID NO: 620730 - DNA, 15 bp, Homo sapiens
cctggcacgtcatag

SEQ ID NO: 620731 - DNA, 15 bp, Homo sapiens
ctggcacgtcatagg

SEQ ID NO: 620732 - DNA, 15 bp, Homo sapiens
tggcacgtcataggt

SEQ ID NO: 620733 - DNA, 15 bp, Homo sapiens
ggcacgtcataggta

SEQ ID NO: 620734 - DNA, 15 bp, Homo sapiens
gcacgtcataggtaa

SEQ ID NO: 620735 - DNA, 15 bp, Homo sapiens
cacgtcataggtaaa

SEQ ID NO: 620736 - DNA, 15 bp, Homo sapiens
acgtcataggtaaat

SEQ ID NO: 620737 - DNA, 15 bp, Homo sapiens
cgtcataggtaaatg

SEQ ID NO: 620738 - DNA, 15 bp, Homo sapiens
gtcataggtaaatgt

SEQ ID NO: 620739 - DNA, 15 bp, Homo sapiens
tcataggtaaatgta

SEQ ID NO: 620740 - DNA, 15 bp, Homo sapiens
cataggtaaatgtag

SEQ ID NO: 620741 - DNA, 15 bp, Homo sapiens
ataggtaaatgtagt

SEQ ID NO: 620742 - DNA, 15 bp, Homo sapiens
taggtaaatgtagtt

SEQ ID NO: 620743 - DNA, 15 bp, Homo sapiens
aggtaaatgtagttg

SEQ ID NO: 620744 - DNA, 15 bp, Homo sapiens
ggtaaatgtagttga

SEQ ID NO: 620745 - DNA, 15 bp, Homo sapiens
gtaaatgtagttgaa

SEQ ID NO: 620746 - DNA, 15 bp, Homo sapiens
taaatgtagttgaaa

SEQ ID NO: 620747 - DNA, 15 bp, Homo sapiens
aaatgtagttgaaag

SEQ ID NO: 620748 - DNA, 15 bp, Homo sapiens
aatgtagttgaaagg

SEQ ID NO: 620749 - DNA, 15 bp, Homo sapiens
atgtagttgaaagga

SEQ ID NO: 620750 - DNA, 15 bp, Homo sapiens
tgtagttgaaaggat

SEQ ID NO: 620751 - DNA, 15 bp, Homo sapiens
gtagttgaaaggatg

SEQ ID NO: 620752 - DNA, 15 bp, Homo sapiens
tagttgaaaggatga

SEQ ID NO: 620753 - DNA, 15 bp, Homo sapiens
agttgaaaggatgac

SEQ ID NO: 620754 - DNA, 15 bp, Homo sapiens
gttgaaaggatgact

SEQ ID NO: 620755 - DNA, 15 bp, Homo sapiens
ttgaaaggatgactg

SEQ ID NO: 620756 - DNA, 15 bp, Homo sapiens
tgaaaggatgactga

SEQ ID NO: 620757 - DNA, 15 bp, Homo sapiens
gaaaggatgactgag

SEQ ID NO: 620758 - DNA, 15 bp, Homo sapiens
aaaggatgactgagc

SEQ ID NO: 620759 - DNA, 15 bp, Homo sapiens
aaggatgactgagct

SEQ ID NO: 620760 - DNA, 15 bp, Homo sapiens
aggatgactgagctg

SEQ ID NO: 620761 - DNA, 15 bp, Homo sapiens
ggatgactgagctga

SEQ ID NO: 620762 - DNA, 15 bp, Homo sapiens
gatgactgagctgat

SEQ ID NO: 620763 - DNA, 15 bp, Homo sapiens
atgactgagctgatc

SEQ ID NO: 620764 - DNA, 15 bp, Homo sapiens
tgactgagctgatcc

SEQ ID NO: 620765 - DNA, 15 bp, Homo sapiens
gactgagctgatcca

SEQ ID NO: 620766 - DNA, 15 bp, Homo sapiens
actgagctgatccaa

SEQ ID NO: 620767 - DNA, 15 bp, Homo sapiens
ctgagctgatccaat

SEQ ID NO: 620768 - DNA, 15 bp, Homo sapiens
tgagctgatccaatt

SEQ ID NO: 620769 - DNA, 15 bp, Homo sapiens
gagctgatccaattc

SEQ ID NO: 620770 - DNA, 15 bp, Homo sapiens
agctgatccaattcc

SEQ ID NO: 620771 - DNA, 15 bp, Homo sapiens
gctgatccaattccc

SEQ ID NO: 620772 - DNA, 15 bp, Homo sapiens
ctgatccaattccct

SEQ ID NO: 620773 - DNA, 15 bp, Homo sapiens
tgatccaattccctt

SEQ ID NO: 620774 - DNA, 15 bp, Homo sapiens
gatccaattcccttt

SEQ ID NO: 620775 - DNA, 15 bp, Homo sapiens
atccaattcccttta

SEQ ID NO: 620776 - DNA, 15 bp, Homo sapiens
tccaattccctttac

SEQ ID NO: 620777 - DNA, 15 bp, Homo sapiens
ccaattccctttaca

SEQ ID NO: 620778 - DNA, 15 bp, Homo sapiens
caattccctttacaa

SEQ ID NO: 620779 - DNA, 15 bp, Homo sapiens
aattccctttacaac

SEQ ID NO: 620780 - DNA, 15 bp, Homo sapiens
attccctttacaact

SEQ ID NO: 620781 - DNA, 15 bp, Homo sapiens
ttccctttacaactg

SEQ ID NO: 620782 - DNA, 15 bp, Homo sapiens
tccctttacaactgt

SEQ ID NO: 620783 - DNA, 15 bp, Homo sapiens
ccctttacaactgtc

SEQ ID NO: 620784 - DNA, 15 bp, Homo sapiens
cctttacaactgtcc

SEQ ID NO: 620785 - DNA, 15 bp, Homo sapiens
ctttacaactgtcct

SEQ ID NO: 620786 - DNA, 15 bp, Homo sapiens
tttacaactgtcctt

SEQ ID NO: 620787 - DNA, 15 bp, Homo sapiens
ttacaactgtccttg

SEQ ID NO: 620788 - DNA, 15 bp, Homo sapiens
tacaactgtccttgt

SEQ ID NO: 620789 - DNA, 15 bp, Homo sapiens
acaactgtccttgtc

SEQ ID NO: 620790 - DNA, 15 bp, Homo sapiens
caactgtccttgtcc

SEQ ID NO: 620791 - DNA, 15 bp, Homo sapiens
aactgtccttgtcct

SEQ ID NO: 620792 - DNA, 15 bp, Homo sapiens
actgtccttgtcctg

SEQ ID NO: 620793 - DNA, 15 bp, Homo sapiens
ctgtccttgtcctgg

SEQ ID NO: 620794 - DNA, 15 bp, Homo sapiens
tgtccttgtcctggg

SEQ ID NO: 620795 - DNA, 15 bp, Homo sapiens
gtccttgtcctgggg

SEQ ID NO: 620796 - DNA, 15 bp, Homo sapiens
tccttgtcctggggg

SEQ ID NO: 620797 - DNA, 15 bp, Homo sapiens
ccttgtcctggggga

SEQ ID NO: 620798 - DNA, 15 bp, Homo sapiens
cttgtcctgggggac

SEQ ID NO: 620799 - DNA, 15 bp, Homo sapiens
ttgtcctgggggact

SEQ ID NO: 620800 - DNA, 15 bp, Homo sapiens
tgtcctgggggactt

SEQ ID NO: 620801 - DNA, 15 bp, Homo sapiens
gtcctgggggacttg

SEQ ID NO: 620802 - DNA, 15 bp, Homo sapiens
tcctgggggacttga

SEQ ID NO: 620803 - DNA, 15 bp, Homo sapiens
cctgggggacttgag

SEQ ID NO: 620804 - DNA, 15 bp, Homo sapiens
ctgggggacttgagg

SEQ ID NO: 620805 - DNA, 15 bp, Homo sapiens
tgggggacttgagga

SEQ ID NO: 620806 - DNA, 15 bp, Homo sapiens
gggggacttgaggag

SEQ ID NO: 620807 - DNA, 15 bp, Homo sapiens
ggggacttgaggagg

SEQ ID NO: 620808 - DNA, 15 bp, Homo sapiens
gggacttgaggaggg

SEQ ID NO: 620809 - DNA, 15 bp, Homo sapiens
ggacttgaggagggt

SEQ ID NO: 620810 - DNA, 15 bp, Homo sapiens
gacttgaggagggtt

SEQ ID NO: 620811 - DNA, 15 bp, Homo sapiens
acttgaggagggtta

SEQ ID NO: 620812 - DNA, 15 bp, Homo sapiens
cttgaggagggttaa

SEQ ID NO: 620813 - DNA, 15 bp, Homo sapiens
ttgaggagggttaag

SEQ ID NO: 620814 - DNA, 15 bp, Homo sapiens
tgaggagggttaaga

SEQ ID NO: 620815 - DNA, 15 bp, Homo sapiens
gaggagggttaagaa

SEQ ID NO: 620816 - DNA, 15 bp, Homo sapiens
aggagggttaagaaa

SEQ ID NO: 620817 - DNA, 15 bp, Homo sapiens
ggagggttaagaaag

SEQ ID NO: 620818 - DNA, 15 bp, Homo sapiens
gagggttaagaaagc

SEQ ID NO: 620819 - DNA, 15 bp, Homo sapiens
agggttaagaaagca

SEQ ID NO: 620820 - DNA, 15 bp, Homo sapiens
gggttaagaaagcag

SEQ ID NO: 620821 - DNA, 15 bp, Homo sapiens
ggttaagaaagcagc

SEQ ID NO: 620822 - DNA, 15 bp, Homo sapiens
gttaagaaagcagct

SEQ ID NO: 620823 - DNA, 15 bp, Homo sapiens
ttaagaaagcagctg

SEQ ID NO: 620824 - DNA, 15 bp, Homo sapiens
taagaaagcagctgg

SEQ ID NO: 620825 - DNA, 15 bp, Homo sapiens
aagaaagcagctggg

SEQ ID NO: 620826 - DNA, 15 bp, Homo sapiens
agaaagcagctgggg

SEQ ID NO: 620827 - DNA, 15 bp, Homo sapiens
gaaagcagctgggga

SEQ ID NO: 620828 - DNA, 15 bp, Homo sapiens
aaagcagctggggac

SEQ ID NO: 620829 - DNA, 15 bp, Homo sapiens
aagcagctggggacc

SEQ ID NO: 620830 - DNA, 15 bp, Homo sapiens
agcagctggggacca

SEQ ID NO: 620831 - DNA, 15 bp, Homo sapiens
gcagctggggaccaa

SEQ ID NO: 620832 - DNA, 15 bp, Homo sapiens
cagctggggaccaac

SEQ ID NO: 620833 - DNA, 15 bp, Homo sapiens
agctggggaccaacc

SEQ ID NO: 620834 - DNA, 15 bp, Homo sapiens
gctggggaccaacca

SEQ ID NO: 620835 - DNA, 15 bp, Homo sapiens
ctggggaccaaccaa

SEQ ID NO: 620836 - DNA, 15 bp, Homo sapiens
tggggaccaaccaac

SEQ ID NO: 620837 - DNA, 15 bp, Homo sapiens
ggggaccaaccaaca

SEQ ID NO: 620838 - DNA, 15 bp, Homo sapiens
gggaccaaccaacag

SEQ ID NO: 620839 - DNA, 15 bp, Homo sapiens
ggaccaaccaacagt

SEQ ID NO: 620840 - DNA, 15 bp, Homo sapiens
gaccaaccaacagtc

SEQ ID NO: 620841 - DNA, 15 bp, Homo sapiens
accaaccaacagtcc

SEQ ID NO: 620842 - DNA, 15 bp, Homo sapiens
ccaaccaacagtcct

SEQ ID NO: 620843 - DNA, 15 bp, Homo sapiens
caaccaacagtcctc

SEQ ID NO: 620844 - DNA, 15 bp, Homo sapiens
aaccaacagtcctct

SEQ ID NO: 620845 - DNA, 15 bp, Homo sapiens
accaacagtcctcta

SEQ ID NO: 620846 - DNA, 15 bp, Homo sapiens
ccaacagtcctctag

SEQ ID NO: 620847 - DNA, 15 bp, Homo sapiens
caacagtcctctagg

SEQ ID NO: 620848 - DNA, 15 bp, Homo sapiens
aacagtcctctaggc

SEQ ID NO: 620849 - DNA, 15 bp, Homo sapiens
acagtcctctaggct

SEQ ID NO: 620850 - DNA, 15 bp, Homo sapiens
cagtcctctaggctc

SEQ ID NO: 620851 - DNA, 15 bp, Homo sapiens
agtcctctaggctct

SEQ ID NO: 620852 - DNA, 15 bp, Homo sapiens
gtcctctaggctctc

SEQ ID NO: 620853 - DNA, 15 bp, Homo sapiens
tcctctaggctctcc

SEQ ID NO: 620854 - DNA, 15 bp, Homo sapiens
cctctaggctctcca

SEQ ID NO: 620855 - DNA, 15 bp, Homo sapiens
ctctaggctctccat

SEQ ID NO: 620856 - DNA, 15 bp, Homo sapiens
tctaggctctccatg

SEQ ID NO: 620857 - DNA, 15 bp, Homo sapiens
ctaggctctccatgt

SEQ ID NO: 620858 - DNA, 15 bp, Homo sapiens
taggctctccatgtc

SEQ ID NO: 620859 - DNA, 15 bp, Homo sapiens
aggctctccatgtcc

SEQ ID NO: 620860 - DNA, 15 bp, Homo sapiens
ggctctccatgtcca

SEQ ID NO: 620861 - DNA, 15 bp, Homo sapiens
gctctccatgtccag

SEQ ID NO: 620862 - DNA, 15 bp, Homo sapiens
ctctccatgtccagc

SEQ ID NO: 620863 - DNA, 15 bp, Homo sapiens
tctccatgtccagca

SEQ ID NO: 620864 - DNA, 15 bp, Homo sapiens
ctccatgtccagcaa

SEQ ID NO: 620865 - DNA, 15 bp, Homo sapiens
tccatgtccagcaat

SEQ ID NO: 620866 - DNA, 15 bp, Homo sapiens
ccatgtccagcaata

SEQ ID NO: 620867 - DNA, 15 bp, Homo sapiens
catgtccagcaatag

SEQ ID NO: 620868 - DNA, 15 bp, Homo sapiens
atgtccagcaatagt

SEQ ID NO: 620869 - DNA, 15 bp, Homo sapiens
tgtccagcaatagtt

SEQ ID NO: 620870 - DNA, 15 bp, Homo sapiens
gtccagcaatagttg

SEQ ID NO: 620871 - DNA, 15 bp, Homo sapiens
tccagcaatagttgt

SEQ ID NO: 620872 - DNA, 15 bp, Homo sapiens
ccagcaatagttgtt

SEQ ID NO: 620873 - DNA, 15 bp, Homo sapiens
cagcaatagttgttc

SEQ ID NO: 620874 - DNA, 15 bp, Homo sapiens
agcaatagttgttca

SEQ ID NO: 620875 - DNA, 15 bp, Homo sapiens
gcaatagttgttcag

SEQ ID NO: 620876 - DNA, 15 bp, Homo sapiens
caatagttgttcagc

SEQ ID NO: 620877 - DNA, 15 bp, Homo sapiens
aatagttgttcagca

SEQ ID NO: 620878 - DNA, 15 bp, Homo sapiens
atagttgttcagcaa

SEQ ID NO: 620879 - DNA, 15 bp, Homo sapiens
tagttgttcagcaaa

SEQ ID NO: 620880 - DNA, 15 bp, Homo sapiens
agttgttcagcaaat

SEQ ID NO: 620881 - DNA, 15 bp, Homo sapiens
gttgttcagcaaatg

SEQ ID NO: 620882 - DNA, 15 bp, Homo sapiens
ttgttcagcaaatga

SEQ ID NO: 620883 - DNA, 15 bp, Homo sapiens
tgttcagcaaatgag

SEQ ID NO: 620884 - DNA, 15 bp, Homo sapiens
gttcagcaaatgagc

SEQ ID NO: 620885 - DNA, 15 bp, Homo sapiens
ttcagcaaatgagca

SEQ ID NO: 620886 - DNA, 15 bp, Homo sapiens
tcagcaaatgagcat

SEQ ID NO: 620887 - DNA, 15 bp, Homo sapiens
cagcaaatgagcatt

SEQ ID NO: 620888 - DNA, 15 bp, Homo sapiens
agcaaatgagcatta

SEQ ID NO: 620889 - DNA, 15 bp, Homo sapiens
gcaaatgagcattaa

SEQ ID NO: 620890 - DNA, 15 bp, Homo sapiens
caaatgagcattaat

SEQ ID NO: 620891 - DNA, 15 bp, Homo sapiens
aaatgagcattaatc

SEQ ID NO: 620892 - DNA, 15 bp, Homo sapiens
aatgagcattaatca

SEQ ID NO: 620893 - DNA, 15 bp, Homo sapiens
atgagcattaatcag

SEQ ID NO: 620894 - DNA, 15 bp, Homo sapiens
tgagcattaatcagt

SEQ ID NO: 620895 - DNA, 15 bp, Homo sapiens
gagcattaatcagtg

SEQ ID NO: 620896 - DNA, 15 bp, Homo sapiens
agcattaatcagtga

SEQ ID NO: 620897 - DNA, 15 bp, Homo sapiens
gcattaatcagtgac

SEQ ID NO: 620898 - DNA, 15 bp, Homo sapiens
cattaatcagtgact

SEQ ID NO: 620899 - DNA, 15 bp, Homo sapiens
attaatcagtgacta

SEQ ID NO: 620900 - DNA, 15 bp, Homo sapiens
ttaatcagtgactat

SEQ ID NO: 620901 - DNA, 15 bp, Homo sapiens
taatcagtgactata

SEQ ID NO: 620902 - DNA, 15 bp, Homo sapiens
aatcagtgactataa

SEQ ID NO: 620903 - DNA, 15 bp, Homo sapiens
atcagtgactataaa

SEQ ID NO: 620904 - DNA, 15 bp, Homo sapiens
tcagtgactataaac

SEQ ID NO: 620905 - DNA, 15 bp, Homo sapiens
cagtgactataaact

SEQ ID NO: 620906 - DNA, 15 bp, Homo sapiens
agtgactataaactg

SEQ ID NO: 620907 - DNA, 15 bp, Homo sapiens
gtgactataaactgt

SEQ ID NO: 620908 - DNA, 15 bp, Homo sapiens
tgactataaactgta

SEQ ID NO: 620909 - DNA, 15 bp, Homo sapiens
gactataaactgtag

SEQ ID NO: 620910 - DNA, 15 bp, Homo sapiens
actataaactgtagc

SEQ ID NO: 620911 - DNA, 15 bp, Homo sapiens
ctataaactgtagct

SEQ ID NO: 620912 - DNA, 15 bp, Homo sapiens
tataaactgtagctt

SEQ ID NO: 620913 - DNA, 15 bp, Homo sapiens
ataaactgtagcttc

SEQ ID NO: 620914 - DNA, 15 bp, Homo sapiens
taaactgtagcttca

SEQ ID NO: 620915 - DNA, 15 bp, Homo sapiens
aaactgtagcttcaa

SEQ ID NO: 620916 - DNA, 15 bp, Homo sapiens
aactgtagcttcaac

SEQ ID NO: 620917 - DNA, 15 bp, Homo sapiens
actgtagcttcaaca

SEQ ID NO: 620918 - DNA, 15 bp, Homo sapiens
ctgtagcttcaacat

SEQ ID NO: 620919 - DNA, 15 bp, Homo sapiens
tgtagcttcaacata

SEQ ID NO: 620920 - DNA, 15 bp, Homo sapiens
gtagcttcaacataa

SEQ ID NO: 620921 - DNA, 15 bp, Homo sapiens
tagcttcaacataac

SEQ ID NO: 620922 - DNA, 15 bp, Homo sapiens
agcttcaacataacc

SEQ ID NO: 620923 - DNA, 15 bp, Homo sapiens
gcttcaacataaccg

SEQ ID NO: 620924 - DNA, 15 bp, Homo sapiens
cttcaacataaccga

SEQ ID NO: 620925 - DNA, 15 bp, Homo sapiens
ttcaacataaccgac

SEQ ID NO: 620926 - DNA, 15 bp, Homo sapiens
tcaacataaccgaca

SEQ ID NO: 620927 - DNA, 15 bp, Homo sapiens
caacataaccgacaa

SEQ ID NO: 620928 - DNA, 15 bp, Homo sapiens
aacataaccgacaac

SEQ ID NO: 620929 - DNA, 15 bp, Homo sapiens
acataaccgacaact

SEQ ID NO: 620930 - DNA, 15 bp, Homo sapiens
cataaccgacaactt

SEQ ID NO: 620931 - DNA, 15 bp, Homo sapiens
ataaccgacaacttg

SEQ ID NO: 620932 - DNA, 15 bp, Homo sapiens
taaccgacaacttgc

SEQ ID NO: 620933 - DNA, 15 bp, Homo sapiens
aaccgacaacttgca

SEQ ID NO: 620934 - DNA, 15 bp, Homo sapiens
accgacaacttgcaa

SEQ ID NO: 620935 - DNA, 15 bp, Homo sapiens
ccgacaacttgcaat

SEQ ID NO: 620936 - DNA, 15 bp, Homo sapiens
cgacaacttgcaatg

SEQ ID NO: 620937 - DNA, 15 bp, Homo sapiens
gacaacttgcaatgg

SEQ ID NO: 620938 - DNA, 15 bp, Homo sapiens
acaacttgcaatggt

SEQ ID NO: 620939 - DNA, 15 bp, Homo sapiens
caacttgcaatggtt

SEQ ID NO: 620940 - DNA, 15 bp, Homo sapiens
aacttgcaatggttt

SEQ ID NO: 620941 - DNA, 15 bp, Homo sapiens
acttgcaatggtttc

SEQ ID NO: 620942 - DNA, 15 bp, Homo sapiens
cttgcaatggtttct

SEQ ID NO: 620943 - DNA, 15 bp, Homo sapiens
ttgcaatggtttcta

SEQ ID NO: 620944 - DNA, 15 bp, Homo sapiens
tgcaatggtttctag

SEQ ID NO: 620945 - DNA, 15 bp, Homo sapiens
gcaatggtttctaga

SEQ ID NO: 620946 - DNA, 15 bp, Homo sapiens
caatggtttctagag

SEQ ID NO: 620947 - DNA, 15 bp, Homo sapiens
aatggtttctagagc

SEQ ID NO: 620948 - DNA, 15 bp, Homo sapiens
atggtttctagagca

SEQ ID NO: 620949 - DNA, 15 bp, Homo sapiens
tggtttctagagcat

SEQ ID NO: 620950 - DNA, 15 bp, Homo sapiens
ggtttctagagcatg

SEQ ID NO: 620951 - DNA, 15 bp, Homo sapiens
gtttctagagcatgc

SEQ ID NO: 620952 - DNA, 15 bp, Homo sapiens
tttctagagcatgct

SEQ ID NO: 620953 - DNA, 15 bp, Homo sapiens
ttctagagcatgctc

SEQ ID NO: 620954 - DNA, 15 bp, Homo sapiens
tctagagcatgctcc

SEQ ID NO: 620955 - DNA, 15 bp, Homo sapiens
ctagagcatgctccc

SEQ ID NO: 620956 - DNA, 15 bp, Homo sapiens
tagagcatgctccca

SEQ ID NO: 620957 - DNA, 15 bp, Homo sapiens
agagcatgctcccat

SEQ ID NO: 620958 - DNA, 15 bp, Homo sapiens
gagcatgctcccatg

SEQ ID NO: 620959 - DNA, 15 bp, Homo sapiens
agcatgctcccatgt

SEQ ID NO: 620960 - DNA, 15 bp, Homo sapiens
gcatgctcccatgtg

SEQ ID NO: 620961 - DNA, 15 bp, Homo sapiens
catgctcccatgtgt

SEQ ID NO: 620962 - DNA, 15 bp, Homo sapiens
atgctcccatgtgtt

SEQ ID NO: 620963 - DNA, 15 bp, Homo sapiens
tgctcccatgtgtta

SEQ ID NO: 620964 - DNA, 15 bp, Homo sapiens
gctcccatgtgttat

SEQ ID NO: 620965 - DNA, 15 bp, Homo sapiens
ctcccatgtgttatc

SEQ ID NO: 620966 - DNA, 15 bp, Homo sapiens
tcccatgtgttatct

SEQ ID NO: 620967 - DNA, 15 bp, Homo sapiens
cccatgtgttatctc

SEQ ID NO: 620968 - DNA, 15 bp, Homo sapiens
ccatgtgttatctca

SEQ ID NO: 620969 - DNA, 15 bp, Homo sapiens
catgtgttatctcat

SEQ ID NO: 620970 - DNA, 15 bp, Homo sapiens
atgtgttatctcatt

SEQ ID NO: 620971 - DNA, 15 bp, Homo sapiens
tgtgttatctcattt

SEQ ID NO: 620972 - DNA, 15 bp, Homo sapiens
gtgttatctcattta

SEQ ID NO: 620973 - DNA, 15 bp, Homo sapiens
tgttatctcatttaa

SEQ ID NO: 620974 - DNA, 15 bp, Homo sapiens
gttatctcatttaaa

SEQ ID NO: 620975 - DNA, 15 bp, Homo sapiens
ttatctcatttaaat

SEQ ID NO: 620976 - DNA, 15 bp, Homo sapiens
tatctcatttaaatt

SEQ ID NO: 620977 - DNA, 15 bp, Homo sapiens
atctcatttaaattt

SEQ ID NO: 620978 - DNA, 15 bp, Homo sapiens
tctcatttaaatttc

SEQ ID NO: 620979 - DNA, 15 bp, Homo sapiens
ctcatttaaatttcc

SEQ ID NO: 620980 - DNA, 15 bp, Homo sapiens
tcatttaaatttcca

SEQ ID NO: 620981 - DNA, 15 bp, Homo sapiens
catttaaatttccaa

SEQ ID NO: 620982 - DNA, 15 bp, Homo sapiens
atttaaatttccaaa

SEQ ID NO: 620983 - DNA, 15 bp, Homo sapiens
tttaaatttccaaac

SEQ ID NO: 620984 - DNA, 15 bp, Homo sapiens
ttaaatttccaaacc

SEQ ID NO: 620985 - DNA, 15 bp, Homo sapiens
taaatttccaaacca

SEQ ID NO: 620986 - DNA, 15 bp, Homo sapiens
aaatttccaaaccaa

SEQ ID NO: 620987 - DNA, 15 bp, Homo sapiens
aatttccaaaccaat

SEQ ID NO: 620988 - DNA, 15 bp, Homo sapiens
atttccaaaccaatc

SEQ ID NO: 620989 - DNA, 15 bp, Homo sapiens
tttccaaaccaatcc

SEQ ID NO: 620990 - DNA, 15 bp, Homo sapiens
ttccaaaccaatcct

SEQ ID NO: 620991 - DNA, 15 bp, Homo sapiens
tccaaaccaatcctg

SEQ ID NO: 620992 - DNA, 15 bp, Homo sapiens
ccaaaccaatcctgt

SEQ ID NO: 620993 - DNA, 15 bp, Homo sapiens
caaaccaatcctgtg

SEQ ID NO: 620994 - DNA, 15 bp, Homo sapiens
aaaccaatcctgtga

SEQ ID NO: 620995 - DNA, 15 bp, Homo sapiens
aaccaatcctgtgaa

SEQ ID NO: 620996 - DNA, 15 bp, Homo sapiens
accaatcctgtgaaa

SEQ ID NO: 620997 - DNA, 15 bp, Homo sapiens
ccaatcctgtgaaat

SEQ ID NO: 620998 - DNA, 15 bp, Homo sapiens
caatcctgtgaaatg

SEQ ID NO: 620999 - DNA, 15 bp, Homo sapiens
aatcctgtgaaatgt

SEQ ID NO: 621000 - DNA, 15 bp, Homo sapiens
atcctgtgaaatgtt

SEQ ID NO: 621001 - DNA, 15 bp, Homo sapiens
tcctgtgaaatgttc

SEQ ID NO: 621002 - DNA, 15 bp, Homo sapiens
cctgtgaaatgttct

SEQ ID NO: 621003 - DNA, 15 bp, Homo sapiens
ctgtgaaatgttctt

SEQ ID NO: 621004 - DNA, 15 bp, Homo sapiens
tgtgaaatgttcttt

SEQ ID NO: 621005 - DNA, 15 bp, Homo sapiens
gtgaaatgttctttt

SEQ ID NO: 621006 - DNA, 15 bp, Homo sapiens
tgaaatgttcttttt

SEQ ID NO: 621007 - DNA, 15 bp, Homo sapiens
gaaatgttctttttt

SEQ ID NO: 621008 - DNA, 15 bp, Homo sapiens
aaatgttcttttttt

SEQ ID NO: 621009 - DNA, 15 bp, Homo sapiens
aatgttctttttttt

SEQ ID NO: 621010 - DNA, 15 bp, Homo sapiens
atgttcttttttttt

SEQ ID NO: 621011 - DNA, 15 bp, Homo sapiens
tgttctttttttttt

SEQ ID NO: 621012 - DNA, 15 bp, Homo sapiens
gttcttttttttttt

SEQ ID NO: 621013 - DNA, 15 bp, Homo sapiens
ttctttttttttttc

SEQ ID NO: 621014 - DNA, 15 bp, Homo sapiens
tctttttttttttct

SEQ ID NO: 621015 - DNA, 15 bp, Homo sapiens
ctttttttttttctt

SEQ ID NO: 621016 - DNA, 15 bp, Homo sapiens
tttttttttttcttt

SEQ ID NO: 621017 - DNA, 15 bp, Homo sapiens
ttttttttttctttt

SEQ ID NO: 621018 - DNA, 15 bp, Homo sapiens
ttttttctttttttt

SEQ ID NO: 621019 - DNA, 15 bp, Homo sapiens
tttttcttttttttt

SEQ ID NO: 621020 - DNA, 15 bp, Homo sapiens
tttttttgagataga

SEQ ID NO: 621021 - DNA, 15 bp, Homo sapiens
ttttttgagatagag

SEQ ID NO: 621022 - DNA, 15 bp, Homo sapiens
tttttgagatagagt

SEQ ID NO: 621023 - DNA, 15 bp, Homo sapiens
ttttgagatagagtt

SEQ ID NO: 621024 - DNA, 15 bp, Homo sapiens
tttgagatagagttt

SEQ ID NO: 621025 - DNA, 15 bp, Homo sapiens
ttgagatagagtttt

SEQ ID NO: 621026 - DNA, 15 bp, Homo sapiens
tgagatagagttttg

SEQ ID NO: 621027 - DNA, 15 bp, Homo sapiens
gagatagagttttgc

SEQ ID NO: 621028 - DNA, 15 bp, Homo sapiens
agatagagttttgct

SEQ ID NO: 621029 - DNA, 15 bp, Homo sapiens
gatagagttttgctc

SEQ ID NO: 621030 - DNA, 15 bp, Homo sapiens
atagagttttgctct

SEQ ID NO: 621031 - DNA, 15 bp, Homo sapiens
tagagttttgctctg

SEQ ID NO: 621032 - DNA, 15 bp, Homo sapiens
agagttttgctctgt

SEQ ID NO: 621033 - DNA, 15 bp, Homo sapiens
gagttttgctctgtc

SEQ ID NO: 621034 - DNA, 15 bp, Homo sapiens
agttttgctctgtca

SEQ ID NO: 621035 - DNA, 15 bp, Homo sapiens
gttttgctctgtcac

SEQ ID NO: 621036 - DNA, 15 bp, Homo sapiens
ttttgctctgtcacc

SEQ ID NO: 621037 - DNA, 15 bp, Homo sapiens
tttgctctgtcaccc

SEQ ID NO: 621038 - DNA, 15 bp, Homo sapiens
ttgctctgtcaccca

SEQ ID NO: 621039 - DNA, 15 bp, Homo sapiens
tgctctgtcacccag

SEQ ID NO: 621040 - DNA, 15 bp, Homo sapiens
gctctgtcacccagg

SEQ ID NO: 621041 - DNA, 15 bp, Homo sapiens
ctctgtcacccaggc

SEQ ID NO: 621042 - DNA, 15 bp, Homo sapiens
tctgtcacccaggct

SEQ ID NO: 621043 - DNA, 15 bp, Homo sapiens
ctgtcacccaggctg

SEQ ID NO: 621044 - DNA, 15 bp, Homo sapiens
tgtcacccaggctgg

SEQ ID NO: 621045 - DNA, 15 bp, Homo sapiens
gtcacccaggctgga

SEQ ID NO: 621046 - DNA, 15 bp, Homo sapiens
tcacccaggctggaa

SEQ ID NO: 621047 - DNA, 15 bp, Homo sapiens
cacccaggctggaat

SEQ ID NO: 621048 - DNA, 15 bp, Homo sapiens
acccaggctggaata

SEQ ID NO: 621049 - DNA, 15 bp, Homo sapiens
cccaggctggaatac

SEQ ID NO: 621050 - DNA, 15 bp, Homo sapiens
ccaggctggaataca

SEQ ID NO: 621051 - DNA, 15 bp, Homo sapiens
caggctggaatacag

SEQ ID NO: 621052 - DNA, 15 bp, Homo sapiens
aggctggaatacagc

SEQ ID NO: 621053 - DNA, 15 bp, Homo sapiens
caccgcgaagtgctg

SEQ ID NO: 621054 - DNA, 15 bp, Homo sapiens
accgcgaagtgctga

SEQ ID NO: 621055 - DNA, 15 bp, Homo sapiens
ccgcgaagtgctgat

SEQ ID NO: 621056 - DNA, 15 bp, Homo sapiens
cgcgaagtgctgatt

SEQ ID NO: 621057 - DNA, 15 bp, Homo sapiens
gcgaagtgctgattt

SEQ ID NO: 621058 - DNA, 15 bp, Homo sapiens
cgaagtgctgatttg

SEQ ID NO: 621059 - DNA, 15 bp, Homo sapiens
gaagtgctgatttgg

SEQ ID NO: 621060 - DNA, 15 bp, Homo sapiens
aagtgctgatttgga

SEQ ID NO: 621061 - DNA, 15 bp, Homo sapiens
agtgctgatttggat

SEQ ID NO: 621062 - DNA, 15 bp, Homo sapiens
gtgctgatttggatg

SEQ ID NO: 621063 - DNA, 15 bp, Homo sapiens
tgctgatttggatgg

SEQ ID NO: 621064 - DNA, 15 bp, Homo sapiens
gctgatttggatggt

SEQ ID NO: 621065 - DNA, 15 bp, Homo sapiens
ctgatttggatggta

SEQ ID NO: 621066 - DNA, 15 bp, Homo sapiens
tgatttggatggtaa

SEQ ID NO: 621067 - DNA, 15 bp, Homo sapiens
gatttggatggtaat

SEQ ID NO: 621068 - DNA, 15 bp, Homo sapiens
atttggatggtaatg

SEQ ID NO: 621069 - DNA, 15 bp, Homo sapiens
tttggatggtaatgc

SEQ ID NO: 621070 - DNA, 15 bp, Homo sapiens
ttggatggtaatgct

SEQ ID NO: 621071 - DNA, 15 bp, Homo sapiens
tggatggtaatgctg

SEQ ID NO: 621072 - DNA, 15 bp, Homo sapiens
ggatggtaatgctgt

SEQ ID NO: 621073 - DNA, 15 bp, Homo sapiens
gatggtaatgctgtt

SEQ ID NO: 621074 - DNA, 15 bp, Homo sapiens
atggtaatgctgttt

SEQ ID NO: 621075 - DNA, 15 bp, Homo sapiens
tggtaatgctgttta

SEQ ID NO: 621076 - DNA, 15 bp, Homo sapiens
ggtaatgctgtttag

SEQ ID NO: 621077 - DNA, 15 bp, Homo sapiens
gtaatgctgtttagt

SEQ ID NO: 621078 - DNA, 15 bp, Homo sapiens
taatgctgtttagtc

SEQ ID NO: 621079 - DNA, 15 bp, Homo sapiens
aatgctgtttagtca

SEQ ID NO: 621080 - DNA, 15 bp, Homo sapiens
atgctgtttagtcag

SEQ ID NO: 621081 - DNA, 15 bp, Homo sapiens
tgctgtttagtcagg

SEQ ID NO: 621082 - DNA, 15 bp, Homo sapiens
gctgtttagtcaggc

SEQ ID NO: 621083 - DNA, 15 bp, Homo sapiens
ctgtttagtcaggca

SEQ ID NO: 621084 - DNA, 15 bp, Homo sapiens
tgtttagtcaggcac

SEQ ID NO: 621085 - DNA, 15 bp, Homo sapiens
gtttagtcaggcaca

SEQ ID NO: 621086 - DNA, 15 bp, Homo sapiens
tttagtcaggcacat

SEQ ID NO: 621087 - DNA, 15 bp, Homo sapiens
ttagtcaggcacata

SEQ ID NO: 621088 - DNA, 15 bp, Homo sapiens
tagtcaggcacatat

SEQ ID NO: 621089 - DNA, 15 bp, Homo sapiens
agtcaggcacatatg

SEQ ID NO: 621090 - DNA, 15 bp, Homo sapiens
gtcaggcacatatga

SEQ ID NO: 621091 - DNA, 15 bp, Homo sapiens
tcaggcacatatgaa

SEQ ID NO: 621092 - DNA, 15 bp, Homo sapiens
caggcacatatgaac

SEQ ID NO: 621093 - DNA, 15 bp, Homo sapiens
aggcacatatgaaca

SEQ ID NO: 621094 - DNA, 15 bp, Homo sapiens
ggcacatatgaacat

SEQ ID NO: 621095 - DNA, 15 bp, Homo sapiens
gcacatatgaacatc

SEQ ID NO: 621096 - DNA, 15 bp, Homo sapiens
cacatatgaacatcc

SEQ ID NO: 621097 - DNA, 15 bp, Homo sapiens
acatatgaacatccg

SEQ ID NO: 621098 - DNA, 15 bp, Homo sapiens
catatgaacatccga

SEQ ID NO: 621099 - DNA, 15 bp, Homo sapiens
atatgaacatccgac

SEQ ID NO: 621100 - DNA, 15 bp, Homo sapiens
tatgaacatccgact

SEQ ID NO: 621101 - DNA, 15 bp, Homo sapiens
atgaacatccgactt

SEQ ID NO: 621102 - DNA, 15 bp, Homo sapiens
tgaacatccgacttt

SEQ ID NO: 621103 - DNA, 15 bp, Homo sapiens
gaacatccgactttc

SEQ ID NO: 621104 - DNA, 15 bp, Homo sapiens
aacatccgactttca

SEQ ID NO: 621105 - DNA, 15 bp, Homo sapiens
acatccgactttcaa

SEQ ID NO: 621106 - DNA, 15 bp, Homo sapiens
catccgactttcaaa

SEQ ID NO: 621107 - DNA, 15 bp, Homo sapiens
atccgactttcaaat

SEQ ID NO: 621108 - DNA, 15 bp, Homo sapiens
tccgactttcaaata

SEQ ID NO: 621109 - DNA, 15 bp, Homo sapiens
ccgactttcaaataa

SEQ ID NO: 621110 - DNA, 15 bp, Homo sapiens
cgactttcaaataag

SEQ ID NO: 621111 - DNA, 15 bp, Homo sapiens
gactttcaaataagt

SEQ ID NO: 621112 - DNA, 15 bp, Homo sapiens
actttcaaataagtg

SEQ ID NO: 621113 - DNA, 15 bp, Homo sapiens
ctttcaaataagtgc

SEQ ID NO: 621114 - DNA, 15 bp, Homo sapiens
tttcaaataagtgcc

SEQ ID NO: 621115 - DNA, 15 bp, Homo sapiens
ttcaaataagtgcct

SEQ ID NO: 621116 - DNA, 15 bp, Homo sapiens
tcaaataagtgcctc

SEQ ID NO: 621117 - DNA, 15 bp, Homo sapiens
caaataagtgcctca

SEQ ID NO: 621118 - DNA, 15 bp, Homo sapiens
aaataagtgcctcac

SEQ ID NO: 621119 - DNA, 15 bp, Homo sapiens
aataagtgcctcaca

SEQ ID NO: 621120 - DNA, 15 bp, Homo sapiens
ataagtgcctcacac

SEQ ID NO: 621121 - DNA, 15 bp, Homo sapiens
taagtgcctcacact

SEQ ID NO: 621122 - DNA, 15 bp, Homo sapiens
aagtgcctcacactt

SEQ ID NO: 621123 - DNA, 15 bp, Homo sapiens
agtgcctcacacttc

SEQ ID NO: 621124 - DNA, 15 bp, Homo sapiens
gtgcctcacacttca

SEQ ID NO: 621125 - DNA, 15 bp, Homo sapiens
tgcctcacacttcac

SEQ ID NO: 621126 - DNA, 15 bp, Homo sapiens
gcctcacacttcaca

SEQ ID NO: 621127 - DNA, 15 bp, Homo sapiens
cctcacacttcacat

SEQ ID NO: 621128 - DNA, 15 bp, Homo sapiens
ctcacacttcacata

SEQ ID NO: 621129 - DNA, 15 bp, Homo sapiens
tcacacttcacatac

SEQ ID NO: 621130 - DNA, 15 bp, Homo sapiens
cacacttcacatacc

SEQ ID NO: 621131 - DNA, 15 bp, Homo sapiens
acacttcacatacca

SEQ ID NO: 621132 - DNA, 15 bp, Homo sapiens
cacttcacataccag

SEQ ID NO: 621133 - DNA, 15 bp, Homo sapiens
acttcacataccaga

SEQ ID NO: 621134 - DNA, 15 bp, Homo sapiens
cttcacataccagac

SEQ ID NO: 621135 - DNA, 15 bp, Homo sapiens
ttcacataccagacc

SEQ ID NO: 621136 - DNA, 15 bp, Homo sapiens
tcacataccagacct

SEQ ID NO: 621137 - DNA, 15 bp, Homo sapiens
cacataccagacctc

SEQ ID NO: 621138 - DNA, 15 bp, Homo sapiens
acataccagacctct

SEQ ID NO: 621139 - DNA, 15 bp, Homo sapiens
cataccagacctctt

SEQ ID NO: 621140 - DNA, 15 bp, Homo sapiens
ataccagacctcttg

SEQ ID NO: 621141 - DNA, 15 bp, Homo sapiens
taccagacctcttgg

SEQ ID NO: 621142 - DNA, 15 bp, Homo sapiens
accagacctcttggt

SEQ ID NO: 621143 - DNA, 15 bp, Homo sapiens
ccagacctcttggtc

SEQ ID NO: 621144 - DNA, 15 bp, Homo sapiens
cagacctcttggtca

SEQ ID NO: 621145 - DNA, 15 bp, Homo sapiens
agacctcttggtcat

SEQ ID NO: 621146 - DNA, 15 bp, Homo sapiens
gacctcttggtcatt

SEQ ID NO: 621147 - DNA, 15 bp, Homo sapiens
acctcttggtcattc

SEQ ID NO: 621148 - DNA, 15 bp, Homo sapiens
cctcttggtcattct

SEQ ID NO: 621149 - DNA, 15 bp, Homo sapiens
ctcttggtcattctt

SEQ ID NO: 621150 - DNA, 15 bp, Homo sapiens
tcttggtcattcttt

SEQ ID NO: 621151 - DNA, 15 bp, Homo sapiens
cttggtcattctttc

SEQ ID NO: 621152 - DNA, 15 bp, Homo sapiens
ttggtcattctttct

SEQ ID NO: 621153 - DNA, 15 bp, Homo sapiens
tggtcattctttctc

SEQ ID NO: 621154 - DNA, 15 bp, Homo sapiens
ggtcattctttctcc

SEQ ID NO: 621155 - DNA, 15 bp, Homo sapiens
gtcattctttctccc

SEQ ID NO: 621156 - DNA, 15 bp, Homo sapiens
tcattctttctcccc

SEQ ID NO: 621157 - DNA, 15 bp, Homo sapiens
cattctttctcccca

SEQ ID NO: 621158 - DNA, 15 bp, Homo sapiens
attctttctccccaa

SEQ ID NO: 621159 - DNA, 15 bp, Homo sapiens
ttctttctccccaac

SEQ ID NO: 621160 - DNA, 15 bp, Homo sapiens
tctttctccccaaca

SEQ ID NO: 621161 - DNA, 15 bp, Homo sapiens
ctttctccccaacat

SEQ ID NO: 621162 - DNA, 15 bp, Homo sapiens
tttctccccaacatt

SEQ ID NO: 621163 - DNA, 15 bp, Homo sapiens
ttctccccaacattt

SEQ ID NO: 621164 - DNA, 15 bp, Homo sapiens
tctccccaacattta

SEQ ID NO: 621165 - DNA, 15 bp, Homo sapiens
ctccccaacatttat

SEQ ID NO: 621166 - DNA, 15 bp, Homo sapiens
tccccaacatttatg

SEQ ID NO: 621167 - DNA, 15 bp, Homo sapiens
ccccaacatttatgt

SEQ ID NO: 621168 - DNA, 15 bp, Homo sapiens
cccaacatttatgtg

SEQ ID NO: 621169 - DNA, 15 bp, Homo sapiens
ccaacatttatgtgg

SEQ ID NO: 621170 - DNA, 15 bp, Homo sapiens
caacatttatgtggc

SEQ ID NO: 621171 - DNA, 15 bp, Homo sapiens
aacatttatgtggca

SEQ ID NO: 621172 - DNA, 15 bp, Homo sapiens
acatttatgtggcaa

SEQ ID NO: 621173 - DNA, 15 bp, Homo sapiens
catttatgtggcaag

SEQ ID NO: 621174 - DNA, 15 bp, Homo sapiens
atttatgtggcaagt

SEQ ID NO: 621175 - DNA, 15 bp, Homo sapiens
tttatgtggcaagta

SEQ ID NO: 621176 - DNA, 15 bp, Homo sapiens
ttatgtggcaagtaa

SEQ ID NO: 621177 - DNA, 15 bp, Homo sapiens
tatgtggcaagtaag

SEQ ID NO: 621178 - DNA, 15 bp, Homo sapiens
atgtggcaagtaagt

SEQ ID NO: 621179 - DNA, 15 bp, Homo sapiens
tgtggcaagtaagtt

SEQ ID NO: 621180 - DNA, 15 bp, Homo sapiens
gtggcaagtaagttt

SEQ ID NO: 621181 - DNA, 15 bp, Homo sapiens
tggcaagtaagttta

SEQ ID NO: 621182 - DNA, 15 bp, Homo sapiens
ggcaagtaagtttac

SEQ ID NO: 621183 - DNA, 15 bp, Homo sapiens
gcaagtaagtttaca

SEQ ID NO: 621184 - DNA, 15 bp, Homo sapiens
caagtaagtttacat

SEQ ID NO: 621185 - DNA, 15 bp, Homo sapiens
aagtaagtttacatt

SEQ ID NO: 621186 - DNA, 15 bp, Homo sapiens
agtaagtttacattt

SEQ ID NO: 621187 - DNA, 15 bp, Homo sapiens
gtaagtttacatttg

SEQ ID NO: 621188 - DNA, 15 bp, Homo sapiens
taagtttacatttgg

SEQ ID NO: 621189 - DNA, 15 bp, Homo sapiens
aagtttacatttggt

SEQ ID NO: 621190 - DNA, 15 bp, Homo sapiens
agtttacatttggtt

SEQ ID NO: 621191 - DNA, 15 bp, Homo sapiens
gtttacatttggttc

SEQ ID NO: 621192 - DNA, 15 bp, Homo sapiens
tttacatttggttcc

SEQ ID NO: 621193 - DNA, 15 bp, Homo sapiens
ttacatttggttcca

SEQ ID NO: 621194 - DNA, 15 bp, Homo sapiens
tacatttggttccat

SEQ ID NO: 621195 - DNA, 15 bp, Homo sapiens
acatttggttccatt

SEQ ID NO: 621196 - DNA, 15 bp, Homo sapiens
catttggttccattc

SEQ ID NO: 621197 - DNA, 15 bp, Homo sapiens
atttggttccattcc

SEQ ID NO: 621198 - DNA, 15 bp, Homo sapiens
tttggttccattccc

SEQ ID NO: 621199 - DNA, 15 bp, Homo sapiens
ttggttccattccct

SEQ ID NO: 621200 - DNA, 15 bp, Homo sapiens
tggttccattccctt

SEQ ID NO: 621201 - DNA, 15 bp, Homo sapiens
ggttccattcccttt

SEQ ID NO: 621202 - DNA, 15 bp, Homo sapiens
gttccattccctttt

SEQ ID NO: 621203 - DNA, 15 bp, Homo sapiens
ttccattcccttttg

SEQ ID NO: 621204 - DNA, 15 bp, Homo sapiens
tccattcccttttgg

SEQ ID NO: 621205 - DNA, 15 bp, Homo sapiens
ccattcccttttggc

SEQ ID NO: 621206 - DNA, 15 bp, Homo sapiens
cattcccttttggct

SEQ ID NO: 621207 - DNA, 15 bp, Homo sapiens
attcccttttggctt

SEQ ID NO: 621208 - DNA, 15 bp, Homo sapiens
ttcccttttggcttt

SEQ ID NO: 621209 - DNA, 15 bp, Homo sapiens
tcccttttggctttt

SEQ ID NO: 621210 - DNA, 15 bp, Homo sapiens
cccttttggcttttg

SEQ ID NO: 621211 - DNA, 15 bp, Homo sapiens
ccttttggcttttga

SEQ ID NO: 621212 - DNA, 15 bp, Homo sapiens
cttttggcttttgat

SEQ ID NO: 621213 - DNA, 15 bp, Homo sapiens
ttttggcttttgata

SEQ ID NO: 621214 - DNA, 15 bp, Homo sapiens
tttggcttttgatag

SEQ ID NO: 621215 - DNA, 15 bp, Homo sapiens
ttggcttttgatagc

SEQ ID NO: 621216 - DNA, 15 bp, Homo sapiens
tggcttttgatagca

SEQ ID NO: 621217 - DNA, 15 bp, Homo sapiens
ggcttttgatagcaa

SEQ ID NO: 621218 - DNA, 15 bp, Homo sapiens
gcttttgatagcaag

SEQ ID NO: 621219 - DNA, 15 bp, Homo sapiens
cttttgatagcaagt

SEQ ID NO: 621220 - DNA, 15 bp, Homo sapiens
ttttgatagcaagtt

SEQ ID NO: 621221 - DNA, 15 bp, Homo sapiens
tttgatagcaagttg

SEQ ID NO: 621222 - DNA, 15 bp, Homo sapiens
ttgatagcaagttgc

SEQ ID NO: 621223 - DNA, 15 bp, Homo sapiens
tgatagcaagttgct

SEQ ID NO: 621224 - DNA, 15 bp, Homo sapiens
gatagcaagttgctc

SEQ ID NO: 621225 - DNA, 15 bp, Homo sapiens
atagcaagttgctcc

SEQ ID NO: 621226 - DNA, 15 bp, Homo sapiens
tagcaagttgctcct

SEQ ID NO: 621227 - DNA, 15 bp, Homo sapiens
agcaagttgctcctg

SEQ ID NO: 621228 - DNA, 15 bp, Homo sapiens
gcaagttgctcctgg

SEQ ID NO: 621229 - DNA, 15 bp, Homo sapiens
caagttgctcctgga

SEQ ID NO: 621230 - DNA, 15 bp, Homo sapiens
aagttgctcctggag

SEQ ID NO: 621231 - DNA, 15 bp, Homo sapiens
agttgctcctggagc

SEQ ID NO: 621232 - DNA, 15 bp, Homo sapiens
gttgctcctggagct

SEQ ID NO: 621233 - DNA, 15 bp, Homo sapiens
ttgctcctggagctt

SEQ ID NO: 621234 - DNA, 15 bp, Homo sapiens
tgctcctggagctta

SEQ ID NO: 621235 - DNA, 15 bp, Homo sapiens
gctcctggagcttat

SEQ ID NO: 621236 - DNA, 15 bp, Homo sapiens
ctcctggagcttata

SEQ ID NO: 621237 - DNA, 15 bp, Homo sapiens
tcctggagcttatac

SEQ ID NO: 621238 - DNA, 15 bp, Homo sapiens
cctggagcttataca

SEQ ID NO: 621239 - DNA, 15 bp, Homo sapiens
ctggagcttatacaa

SEQ ID NO: 621240 - DNA, 15 bp, Homo sapiens
tggagcttatacaat

SEQ ID NO: 621241 - DNA, 15 bp, Homo sapiens
ggagcttatacaatt

SEQ ID NO: 621242 - DNA, 15 bp, Homo sapiens
gagcttatacaatta

SEQ ID NO: 621243 - DNA, 15 bp, Homo sapiens
agcttatacaattat

SEQ ID NO: 621244 - DNA, 15 bp, Homo sapiens
gcttatacaattatt

SEQ ID NO: 621245 - DNA, 15 bp, Homo sapiens
cttatacaattatta

SEQ ID NO: 621246 - DNA, 15 bp, Homo sapiens
ttatacaattattat

SEQ ID NO: 621247 - DNA, 15 bp, Homo sapiens
tatacaattattatc

SEQ ID NO: 621248 - DNA, 15 bp, Homo sapiens
atacaattattatct

SEQ ID NO: 621249 - DNA, 15 bp, Homo sapiens
tacaattattatctt

SEQ ID NO: 621250 - DNA, 15 bp, Homo sapiens
acaattattatcttt

SEQ ID NO: 621251 - DNA, 15 bp, Homo sapiens
caattattatctttg

SEQ ID NO: 621252 - DNA, 15 bp, Homo sapiens
aattattatctttgc

SEQ ID NO: 621253 - DNA, 15 bp, Homo sapiens
attattatctttgct

SEQ ID NO: 621254 - DNA, 15 bp, Homo sapiens
ttattatctttgcta

SEQ ID NO: 621255 - DNA, 15 bp, Homo sapiens
tattatctttgctat

SEQ ID NO: 621256 - DNA, 15 bp, Homo sapiens
attatctttgctatg

SEQ ID NO: 621257 - DNA, 15 bp, Homo sapiens
ttatctttgctatgt

SEQ ID NO: 621258 - DNA, 15 bp, Homo sapiens
tatctttgctatgtg

SEQ ID NO: 621259 - DNA, 15 bp, Homo sapiens
atctttgctatgtgc

SEQ ID NO: 621260 - DNA, 15 bp, Homo sapiens
tctttgctatgtgca

SEQ ID NO: 621261 - DNA, 15 bp, Homo sapiens
ctttgctatgtgcaa

SEQ ID NO: 621262 - DNA, 15 bp, Homo sapiens
tttgctatgtgcaaa

SEQ ID NO: 621263 - DNA, 15 bp, Homo sapiens
ttgctatgtgcaaag

SEQ ID NO: 621264 - DNA, 15 bp, Homo sapiens
tgctatgtgcaaagc

SEQ ID NO: 621265 - DNA, 15 bp, Homo sapiens
gctatgtgcaaagca

SEQ ID NO: 621266 - DNA, 15 bp, Homo sapiens
ctatgtgcaaagcag

SEQ ID NO: 621267 - DNA, 15 bp, Homo sapiens
tatgtgcaaagcagc

SEQ ID NO: 621268 - DNA, 15 bp, Homo sapiens
atgtgcaaagcagct

SEQ ID NO: 621269 - DNA, 15 bp, Homo sapiens
tgtgcaaagcagctg

SEQ ID NO: 621270 - DNA, 15 bp, Homo sapiens
gtgcaaagcagctgc

SEQ ID NO: 621271 - DNA, 15 bp, Homo sapiens
tgcaaagcagctgcc

SEQ ID NO: 621272 - DNA, 15 bp, Homo sapiens
gcaaagcagctgcca

SEQ ID NO: 621273 - DNA, 15 bp, Homo sapiens
caaagcagctgccag

SEQ ID NO: 621274 - DNA, 15 bp, Homo sapiens
aaagcagctgccagg

SEQ ID NO: 621275 - DNA, 15 bp, Homo sapiens
aagcagctgccagga

SEQ ID NO: 621276 - DNA, 15 bp, Homo sapiens
agcagctgccaggaa

SEQ ID NO: 621277 - DNA, 15 bp, Homo sapiens
gcagctgccaggaac

SEQ ID NO: 621278 - DNA, 15 bp, Homo sapiens
cagctgccaggaact

SEQ ID NO: 621279 - DNA, 15 bp, Homo sapiens
agctgccaggaactg

SEQ ID NO: 621280 - DNA, 15 bp, Homo sapiens
gctgccaggaactgg

SEQ ID NO: 621281 - DNA, 15 bp, Homo sapiens
ctgccaggaactggc

SEQ ID NO: 621282 - DNA, 15 bp, Homo sapiens
tgccaggaactggca

SEQ ID NO: 621283 - DNA, 15 bp, Homo sapiens
gccaggaactggcaa

SEQ ID NO: 621284 - DNA, 15 bp, Homo sapiens
ccaggaactggcaaa

SEQ ID NO: 621285 - DNA, 15 bp, Homo sapiens
caggaactggcaaag

SEQ ID NO: 621286 - DNA, 15 bp, Homo sapiens
aggaactggcaaagt

SEQ ID NO: 621287 - DNA, 15 bp, Homo sapiens
ggaactggcaaagtt

SEQ ID NO: 621288 - DNA, 15 bp, Homo sapiens
gaactggcaaagttc

SEQ ID NO: 621289 - DNA, 15 bp, Homo sapiens
aactggcaaagttca

SEQ ID NO: 621290 - DNA, 15 bp, Homo sapiens
actggcaaagttcag

SEQ ID NO: 621291 - DNA, 15 bp, Homo sapiens
ctggcaaagttcagt

SEQ ID NO: 621292 - DNA, 15 bp, Homo sapiens
tggcaaagttcagta

SEQ ID NO: 621293 - DNA, 15 bp, Homo sapiens
ggcaaagttcagtaa

SEQ ID NO: 621294 - DNA, 15 bp, Homo sapiens
gcaaagttcagtaaa

SEQ ID NO: 621295 - DNA, 15 bp, Homo sapiens
caaagttcagtaaac

SEQ ID NO: 621296 - DNA, 15 bp, Homo sapiens
aaagttcagtaaacc

SEQ ID NO: 621297 - DNA, 15 bp, Homo sapiens
aagttcagtaaacct

SEQ ID NO: 621298 - DNA, 15 bp, Homo sapiens
agttcagtaaacctt

SEQ ID NO: 621299 - DNA, 15 bp, Homo sapiens
gttcagtaaaccttt

SEQ ID NO: 621300 - DNA, 15 bp, Homo sapiens
ttcagtaaacctttc

SEQ ID NO: 621301 - DNA, 15 bp, Homo sapiens
tcagtaaacctttca

SEQ ID NO: 621302 - DNA, 15 bp, Homo sapiens
cagtaaacctttcag

SEQ ID NO: 621303 - DNA, 15 bp, Homo sapiens
agtaaacctttcagc

SEQ ID NO: 621304 - DNA, 15 bp, Homo sapiens
gtaaacctttcagct

SEQ ID NO: 621305 - DNA, 15 bp, Homo sapiens
taaacctttcagctc

SEQ ID NO: 621306 - DNA, 15 bp, Homo sapiens
aaacctttcagctcc

SEQ ID NO: 621307 - DNA, 15 bp, Homo sapiens
aacctttcagctccc

SEQ ID NO: 621308 - DNA, 15 bp, Homo sapiens
acctttcagctccct

SEQ ID NO: 621309 - DNA, 15 bp, Homo sapiens
cctttcagctccctc

SEQ ID NO: 621310 - DNA, 15 bp, Homo sapiens
ctttcagctccctcg

SEQ ID NO: 621311 - DNA, 15 bp, Homo sapiens
tttcagctccctcgg

SEQ ID NO: 621312 - DNA, 15 bp, Homo sapiens
ttcagctccctcgga

SEQ ID NO: 621313 - DNA, 15 bp, Homo sapiens
tcagctccctcggag

SEQ ID NO: 621314 - DNA, 15 bp, Homo sapiens
cagctccctcggagt

SEQ ID NO: 621315 - DNA, 15 bp, Homo sapiens
agctccctcggagta

SEQ ID NO: 621316 - DNA, 15 bp, Homo sapiens
gctccctcggagtaa

SEQ ID NO: 621317 - DNA, 15 bp, Homo sapiens
ctccctcggagtaat

SEQ ID NO: 621318 - DNA, 15 bp, Homo sapiens
tccctcggagtaatt

SEQ ID NO: 621319 - DNA, 15 bp, Homo sapiens
ccctcggagtaatta

SEQ ID NO: 621320 - DNA, 15 bp, Homo sapiens
cctcggagtaattat

SEQ ID NO: 621321 - DNA, 15 bp, Homo sapiens
ctcggagtaattatc

SEQ ID NO: 621322 - DNA, 15 bp, Homo sapiens
tcggagtaattatct

SEQ ID NO: 621323 - DNA, 15 bp, Homo sapiens
cggagtaattatctt

SEQ ID NO: 621324 - DNA, 15 bp, Homo sapiens
ggagtaattatctta

SEQ ID NO: 621325 - DNA, 15 bp, Homo sapiens
gagtaattatcttag

SEQ ID NO: 621326 - DNA, 15 bp, Homo sapiens
agtaattatcttaga

SEQ ID NO: 621327 - DNA, 15 bp, Homo sapiens
gtaattatcttagat

SEQ ID NO: 621328 - DNA, 15 bp, Homo sapiens
taattatcttagatt

SEQ ID NO: 621329 - DNA, 15 bp, Homo sapiens
aattatcttagattc

SEQ ID NO: 621330 - DNA, 15 bp, Homo sapiens
attatcttagattcc

SEQ ID NO: 621331 - DNA, 15 bp, Homo sapiens
ttatcttagattcca

SEQ ID NO: 621332 - DNA, 15 bp, Homo sapiens
tatcttagattccag

SEQ ID NO: 621333 - DNA, 15 bp, Homo sapiens
atcttagattccagg

SEQ ID NO: 621334 - DNA, 15 bp, Homo sapiens
tcttagattccagga

SEQ ID NO: 621335 - DNA, 15 bp, Homo sapiens
cttagattccaggaa

SEQ ID NO: 621336 - DNA, 15 bp, Homo sapiens
ttagattccaggaat

SEQ ID NO: 621337 - DNA, 15 bp, Homo sapiens
tagattccaggaatt

SEQ ID NO: 621338 - DNA, 15 bp, Homo sapiens
agattccaggaattt

SEQ ID NO: 621339 - DNA, 15 bp, Homo sapiens
gattccaggaatttc

SEQ ID NO: 621340 - DNA, 15 bp, Homo sapiens
attccaggaatttcc

SEQ ID NO: 621341 - DNA, 15 bp, Homo sapiens
ttccaggaatttcct

SEQ ID NO: 621342 - DNA, 15 bp, Homo sapiens
tccaggaatttcctc

SEQ ID NO: 621343 - DNA, 15 bp, Homo sapiens
ccaggaatttcctca

SEQ ID NO: 621344 - DNA, 15 bp, Homo sapiens
caggaatttcctcag

SEQ ID NO: 621345 - DNA, 15 bp, Homo sapiens
aggaatttcctcaga

SEQ ID NO: 621346 - DNA, 15 bp, Homo sapiens
ggaatttcctcagaa

SEQ ID NO: 621347 - DNA, 15 bp, Homo sapiens
gaatttcctcagaag

SEQ ID NO: 621348 - DNA, 15 bp, Homo sapiens
aatttcctcagaaga

SEQ ID NO: 621349 - DNA, 15 bp, Homo sapiens
atttcctcagaagag

SEQ ID NO: 621350 - DNA, 15 bp, Homo sapiens
tttcctcagaagagc

SEQ ID NO: 621351 - DNA, 15 bp, Homo sapiens
ttcctcagaagagca

SEQ ID NO: 621352 - DNA, 15 bp, Homo sapiens
tcctcagaagagcat

SEQ ID NO: 621353 - DNA, 15 bp, Homo sapiens
cctcagaagagcata

SEQ ID NO: 621354 - DNA, 15 bp, Homo sapiens
ctcagaagagcatac

SEQ ID NO: 621355 - DNA, 15 bp, Homo sapiens
tcagaagagcatact

SEQ ID NO: 621356 - DNA, 15 bp, Homo sapiens
cagaagagcatactt

SEQ ID NO: 621357 - DNA, 15 bp, Homo sapiens
agaagagcatacttt

SEQ ID NO: 621358 - DNA, 15 bp, Homo sapiens
gaagagcatactttg

SEQ ID NO: 621359 - DNA, 15 bp, Homo sapiens
aagagcatactttgg

SEQ ID NO: 621360 - DNA, 15 bp, Homo sapiens
agagcatactttgga

SEQ ID NO: 621361 - DNA, 15 bp, Homo sapiens
gagcatactttggag

SEQ ID NO: 621362 - DNA, 15 bp, Homo sapiens
agcatactttggaga

SEQ ID NO: 621363 - DNA, 15 bp, Homo sapiens
gcatactttggagat

SEQ ID NO: 621364 - DNA, 15 bp, Homo sapiens
catactttggagatg

SEQ ID NO: 621365 - DNA, 15 bp, Homo sapiens
atactttggagatgt

SEQ ID NO: 621366 - DNA, 15 bp, Homo sapiens
tactttggagatgtc

SEQ ID NO: 621367 - DNA, 15 bp, Homo sapiens
actttggagatgtcg

SEQ ID NO: 621368 - DNA, 15 bp, Homo sapiens
ctttggagatgtcga

SEQ ID NO: 621369 - DNA, 15 bp, Homo sapiens
tttggagatgtcgac

SEQ ID NO: 621370 - DNA, 15 bp, Homo sapiens
ttggagatgtcgaca

SEQ ID NO: 621371 - DNA, 15 bp, Homo sapiens
tggagatgtcgacag

SEQ ID NO: 621372 - DNA, 15 bp, Homo sapiens
ggagatgtcgacaga

SEQ ID NO: 621373 - DNA, 15 bp, Homo sapiens
gagatgtcgacagag

SEQ ID NO: 621374 - DNA, 15 bp, Homo sapiens
agatgtcgacagagc

SEQ ID NO: 621375 - DNA, 15 bp, Homo sapiens
gatgtcgacagagct

SEQ ID NO: 621376 - DNA, 15 bp, Homo sapiens
atgtcgacagagctt

SEQ ID NO: 621377 - DNA, 15 bp, Homo sapiens
tgtcgacagagcttt

SEQ ID NO: 621378 - DNA, 15 bp, Homo sapiens
gtcgacagagctttg

SEQ ID NO: 621379 - DNA, 15 bp, Homo sapiens
tcgacagagctttgc

SEQ ID NO: 621380 - DNA, 15 bp, Homo sapiens
cgacagagctttgct

SEQ ID NO: 621381 - DNA, 15 bp, Homo sapiens
gacagagctttgcta

SEQ ID NO: 621382 - DNA, 15 bp, Homo sapiens
acagagctttgctac

SEQ ID NO: 621383 - DNA, 15 bp, Homo sapiens
cagagctttgctacc

SEQ ID NO: 621384 - DNA, 15 bp, Homo sapiens
agagctttgctaccc

SEQ ID NO: 621385 - DNA, 15 bp, Homo sapiens
gagctttgctaccct

SEQ ID NO: 621386 - DNA, 15 bp, Homo sapiens
agctttgctaccctc

SEQ ID NO: 621387 - DNA, 15 bp, Homo sapiens
gctttgctaccctca

SEQ ID NO: 621388 - DNA, 15 bp, Homo sapiens
ctttgctaccctcaa

SEQ ID NO: 621389 - DNA, 15 bp, Homo sapiens
tttgctaccctcaag

SEQ ID NO: 621390 - DNA, 15 bp, Homo sapiens
ttgctaccctcaagc

SEQ ID NO: 621391 - DNA, 15 bp, Homo sapiens
tgctaccctcaagct

SEQ ID NO: 621392 - DNA, 15 bp, Homo sapiens
gctaccctcaagctg

SEQ ID NO: 621393 - DNA, 15 bp, Homo sapiens
ctaccctcaagctga

SEQ ID NO: 621394 - DNA, 15 bp, Homo sapiens
taccctcaagctgag

SEQ ID NO: 621395 - DNA, 15 bp, Homo sapiens
accctcaagctgagg

SEQ ID NO: 621396 - DNA, 15 bp, Homo sapiens
ccctcaagctgaggc

SEQ ID NO: 621397 - DNA, 15 bp, Homo sapiens
cctcaagctgaggct

SEQ ID NO: 621398 - DNA, 15 bp, Homo sapiens
ctcaagctgaggctc

SEQ ID NO: 621399 - DNA, 15 bp, Homo sapiens
tcaagctgaggctct

SEQ ID NO: 621400 - DNA, 15 bp, Homo sapiens
caagctgaggctctt

SEQ ID NO: 621401 - DNA, 15 bp, Homo sapiens
aagctgaggctcttc

SEQ ID NO: 621402 - DNA, 15 bp, Homo sapiens
agctgaggctcttct

SEQ ID NO: 621403 - DNA, 15 bp, Homo sapiens
gctgaggctcttctt

SEQ ID NO: 621404 - DNA, 15 bp, Homo sapiens
ctgaggctcttcttg

SEQ ID NO: 621405 - DNA, 15 bp, Homo sapiens
tgaggctcttcttgc

SEQ ID NO: 621406 - DNA, 15 bp, Homo sapiens
gaggctcttcttgca

SEQ ID NO: 621407 - DNA, 15 bp, Homo sapiens
aggctcttcttgcac

SEQ ID NO: 621408 - DNA, 15 bp, Homo sapiens
ggctcttcttgcaca

SEQ ID NO: 621409 - DNA, 15 bp, Homo sapiens
gctcttcttgcacag

SEQ ID NO: 621410 - DNA, 15 bp, Homo sapiens
ctcttcttgcacagt

SEQ ID NO: 621411 - DNA, 15 bp, Homo sapiens
tcttcttgcacagtt

SEQ ID NO: 621412 - DNA, 15 bp, Homo sapiens
cttcttgcacagttt

SEQ ID NO: 621413 - DNA, 15 bp, Homo sapiens
ttcttgcacagtttc

SEQ ID NO: 621414 - DNA, 15 bp, Homo sapiens
tcttgcacagtttca

SEQ ID NO: 621415 - DNA, 15 bp, Homo sapiens
cttgcacagtttcag

SEQ ID NO: 621416 - DNA, 15 bp, Homo sapiens
ttgcacagtttcagc

SEQ ID NO: 621417 - DNA, 15 bp, Homo sapiens
tgcacagtttcagcc

SEQ ID NO: 621418 - DNA, 15 bp, Homo sapiens
gcacagtttcagcca

SEQ ID NO: 621419 - DNA, 15 bp, Homo sapiens
cacagtttcagccag

SEQ ID NO: 621420 - DNA, 15 bp, Homo sapiens
acagtttcagccagt

SEQ ID NO: 621421 - DNA, 15 bp, Homo sapiens
cagtttcagccagtg

SEQ ID NO: 621422 - DNA, 15 bp, Homo sapiens
agtttcagccagtgg

SEQ ID NO: 621423 - DNA, 15 bp, Homo sapiens
gtttcagccagtgga

SEQ ID NO: 621424 - DNA, 15 bp, Homo sapiens
tttcagccagtggag

SEQ ID NO: 621425 - DNA, 15 bp, Homo sapiens
ttcagccagtggaga

SEQ ID NO: 621426 - DNA, 15 bp, Homo sapiens
tcagccagtggagac

SEQ ID NO: 621427 - DNA, 15 bp, Homo sapiens
cagccagtggagaca

SEQ ID NO: 621428 - DNA, 15 bp, Homo sapiens
agccagtggagacag

SEQ ID NO: 621429 - DNA, 15 bp, Homo sapiens
gccagtggagacagt

SEQ ID NO: 621430 - DNA, 15 bp, Homo sapiens
ccagtggagacagtg

SEQ ID NO: 621431 - DNA, 15 bp, Homo sapiens
cagtggagacagtgg

SEQ ID NO: 621432 - DNA, 15 bp, Homo sapiens
agtggagacagtggc

SEQ ID NO: 621433 - DNA, 15 bp, Homo sapiens
gtggagacagtggcc

SEQ ID NO: 621434 - DNA, 15 bp, Homo sapiens
tggagacagtggcct

SEQ ID NO: 621435 - DNA, 15 bp, Homo sapiens
ggagacagtggcctt

SEQ ID NO: 621436 - DNA, 15 bp, Homo sapiens
gagacagtggccttg

SEQ ID NO: 621437 - DNA, 15 bp, Homo sapiens
agacagtggccttgt

SEQ ID NO: 621438 - DNA, 15 bp, Homo sapiens
gacagtggccttgtg

SEQ ID NO: 621439 - DNA, 15 bp, Homo sapiens
acagtggccttgtgc

SEQ ID NO: 621440 - DNA, 15 bp, Homo sapiens
cagtggccttgtgcg

SEQ ID NO: 621441 - DNA, 15 bp, Homo sapiens
agtggccttgtgcgt

SEQ ID NO: 621442 - DNA, 15 bp, Homo sapiens
gtggccttgtgcgtt

SEQ ID NO: 621443 - DNA, 15 bp, Homo sapiens
tggccttgtgcgttt

SEQ ID NO: 621444 - DNA, 15 bp, Homo sapiens
ggccttgtgcgtttt

SEQ ID NO: 621445 - DNA, 15 bp, Homo sapiens
gccttgtgcgttttg

SEQ ID NO: 621446 - DNA, 15 bp, Homo sapiens
ccttgtgcgttttgt

SEQ ID NO: 621447 - DNA, 15 bp, Homo sapiens
cttgtgcgttttgta

SEQ ID NO: 621448 - DNA, 15 bp, Homo sapiens
ttgtgcgttttgtag

SEQ ID NO: 621449 - DNA, 15 bp, Homo sapiens
tgtgcgttttgtagt

SEQ ID NO: 621450 - DNA, 15 bp, Homo sapiens
gtgcgttttgtagta

SEQ ID NO: 621451 - DNA, 15 bp, Homo sapiens
tgcgttttgtagtat

SEQ ID NO: 621452 - DNA, 15 bp, Homo sapiens
gcgttttgtagtatg

SEQ ID NO: 621453 - DNA, 15 bp, Homo sapiens
cgttttgtagtatgt

SEQ ID NO: 621454 - DNA, 15 bp, Homo sapiens
gttttgtagtatgtt

SEQ ID NO: 621455 - DNA, 15 bp, Homo sapiens
ttttgtagtatgttc

SEQ ID NO: 621456 - DNA, 15 bp, Homo sapiens
tttgtagtatgttca

SEQ ID NO: 621457 - DNA, 15 bp, Homo sapiens
ttgtagtatgttcac

SEQ ID NO: 621458 - DNA, 15 bp, Homo sapiens
tgtagtatgttcact

SEQ ID NO: 621459 - DNA, 15 bp, Homo sapiens
gtagtatgttcactc

SEQ ID NO: 621460 - DNA, 15 bp, Homo sapiens
tagtatgttcactct

SEQ ID NO: 621461 - DNA, 15 bp, Homo sapiens
agtatgttcactcta

SEQ ID NO: 621462 - DNA, 15 bp, Homo sapiens
gtatgttcactctat

SEQ ID NO: 621463 - DNA, 15 bp, Homo sapiens
tatgttcactctatt

SEQ ID NO: 621464 - DNA, 15 bp, Homo sapiens
atgttcactctattt

SEQ ID NO: 621465 - DNA, 15 bp, Homo sapiens
tgttcactctatttg

SEQ ID NO: 621466 - DNA, 15 bp, Homo sapiens
gttcactctatttga

SEQ ID NO: 621467 - DNA, 15 bp, Homo sapiens
ttcactctatttgag

SEQ ID NO: 621468 - DNA, 15 bp, Homo sapiens
tcactctatttgagg

SEQ ID NO: 621469 - DNA, 15 bp, Homo sapiens
cactctatttgaggc

SEQ ID NO: 621470 - DNA, 15 bp, Homo sapiens
actctatttgaggcc

SEQ ID NO: 621471 - DNA, 15 bp, Homo sapiens
ctctatttgaggcct

SEQ ID NO: 621472 - DNA, 15 bp, Homo sapiens
tctatttgaggccta

SEQ ID NO: 621473 - DNA, 15 bp, Homo sapiens
ctatttgaggcctac

SEQ ID NO: 621474 - DNA, 15 bp, Homo sapiens
tatttgaggcctaca

SEQ ID NO: 621475 - DNA, 15 bp, Homo sapiens
atttgaggcctacat

SEQ ID NO: 621476 - DNA, 15 bp, Homo sapiens
tttgaggcctacatg

SEQ ID NO: 621477 - DNA, 15 bp, Homo sapiens
ttgaggcctacatgg

SEQ ID NO: 621478 - DNA, 15 bp, Homo sapiens
tgaggcctacatgga

SEQ ID NO: 621479 - DNA, 15 bp, Homo sapiens
gaggcctacatggag

SEQ ID NO: 621480 - DNA, 15 bp, Homo sapiens
aggcctacatggagg

SEQ ID NO: 621481 - DNA, 15 bp, Homo sapiens
ggcctacatggagga

SEQ ID NO: 621482 - DNA, 15 bp, Homo sapiens
gcctacatggaggag

SEQ ID NO: 621483 - DNA, 15 bp, Homo sapiens
cctacatggaggagg

SEQ ID NO: 621484 - DNA, 15 bp, Homo sapiens
ctacatggaggaggg

SEQ ID NO: 621485 - DNA, 15 bp, Homo sapiens
tacatggaggagggg

SEQ ID NO: 621486 - DNA, 15 bp, Homo sapiens
acatggaggaggggt

SEQ ID NO: 621487 - DNA, 15 bp, Homo sapiens
catggaggaggggtt

SEQ ID NO: 621488 - DNA, 15 bp, Homo sapiens
atggaggaggggttg

SEQ ID NO: 621489 - DNA, 15 bp, Homo sapiens
tggaggaggggttgg

SEQ ID NO: 621490 - DNA, 15 bp, Homo sapiens
ggaggaggggttggt

SEQ ID NO: 621491 - DNA, 15 bp, Homo sapiens
gaggaggggttggta

SEQ ID NO: 621492 - DNA, 15 bp, Homo sapiens
aggaggggttggtag

SEQ ID NO: 621493 - DNA, 15 bp, Homo sapiens
ggaggggttggtagg

SEQ ID NO: 621494 - DNA, 15 bp, Homo sapiens
gaggggttggtagga

SEQ ID NO: 621495 - DNA, 15 bp, Homo sapiens
aggggttggtaggag

SEQ ID NO: 621496 - DNA, 15 bp, Homo sapiens
ggggttggtaggagc

SEQ ID NO: 621497 - DNA, 15 bp, Homo sapiens
gggttggtaggagca

SEQ ID NO: 621498 - DNA, 15 bp, Homo sapiens
ggttggtaggagcac

SEQ ID NO: 621499 - DNA, 15 bp, Homo sapiens
gttggtaggagcacc

SEQ ID NO: 621500 - DNA, 15 bp, Homo sapiens
ttggtaggagcacct

SEQ ID NO: 621501 - DNA, 15 bp, Homo sapiens
tggtaggagcacctt

SEQ ID NO: 621502 - DNA, 15 bp, Homo sapiens
ggtaggagcaccttt

SEQ ID NO: 621503 - DNA, 15 bp, Homo sapiens
gtaggagcacctttg

SEQ ID NO: 621504 - DNA, 15 bp, Homo sapiens
taggagcacctttgt

SEQ ID NO: 621505 - DNA, 15 bp, Homo sapiens
aggagcacctttgtt

SEQ ID NO: 621506 - DNA, 15 bp, Homo sapiens
ggagcacctttgtta

SEQ ID NO: 621507 - DNA, 15 bp, Homo sapiens
gagcacctttgttag

SEQ ID NO: 621508 - DNA, 15 bp, Homo sapiens
agcacctttgttagt

SEQ ID NO: 621509 - DNA, 15 bp, Homo sapiens
gcacctttgttagtg

SEQ ID NO: 621510 - DNA, 15 bp, Homo sapiens
cacctttgttagtgc

SEQ ID NO: 621511 - DNA, 15 bp, Homo sapiens
acctttgttagtgca

SEQ ID NO: 621512 - DNA, 15 bp, Homo sapiens
cctttgttagtgcaa

SEQ ID NO: 621513 - DNA, 15 bp, Homo sapiens
ctttgttagtgcaaa

SEQ ID NO: 621514 - DNA, 15 bp, Homo sapiens
tttgttagtgcaaac

SEQ ID NO: 621515 - DNA, 15 bp, Homo sapiens
ttgttagtgcaaact

SEQ ID NO: 621516 - DNA, 15 bp, Homo sapiens
tgttagtgcaaactt

SEQ ID NO: 621517 - DNA, 15 bp, Homo sapiens
gttagtgcaaacttc

SEQ ID NO: 621518 - DNA, 15 bp, Homo sapiens
ttagtgcaaacttca

SEQ ID NO: 621519 - DNA, 15 bp, Homo sapiens
tagtgcaaacttcag

SEQ ID NO: 621520 - DNA, 15 bp, Homo sapiens
agtgcaaacttcagc

SEQ ID NO: 621521 - DNA, 15 bp, Homo sapiens
gtgcaaacttcagca

SEQ ID NO: 621522 - DNA, 15 bp, Homo sapiens
tgcaaacttcagcaa

SEQ ID NO: 621523 - DNA, 15 bp, Homo sapiens
gcaaacttcagcaac

SEQ ID NO: 621524 - DNA, 15 bp, Homo sapiens
caaacttcagcaacg

SEQ ID NO: 621525 - DNA, 15 bp, Homo sapiens
aaacttcagcaacgt

SEQ ID NO: 621526 - DNA, 15 bp, Homo sapiens
aacttcagcaacgtt

SEQ ID NO: 621527 - DNA, 15 bp, Homo sapiens
acttcagcaacgttg

SEQ ID NO: 621528 - DNA, 15 bp, Homo sapiens
cttcagcaacgttgt

SEQ ID NO: 621529 - DNA, 15 bp, Homo sapiens
ttcagcaacgttgtg

SEQ ID NO: 621530 - DNA, 15 bp, Homo sapiens
tcagcaacgttgtgg

SEQ ID NO: 621531 - DNA, 15 bp, Homo sapiens
cagcaacgttgtggg

SEQ ID NO: 621532 - DNA, 15 bp, Homo sapiens
agcaacgttgtgggg

SEQ ID NO: 621533 - DNA, 15 bp, Homo sapiens
gcaacgttgtggggt

SEQ ID NO: 621534 - DNA, 15 bp, Homo sapiens
caacgttgtggggtc

SEQ ID NO: 621535 - DNA, 15 bp, Homo sapiens
aacgttgtggggtcc

SEQ ID NO: 621536 - DNA, 15 bp, Homo sapiens
acgttgtggggtcct

SEQ ID NO: 621537 - DNA, 15 bp, Homo sapiens
cgttgtggggtcctg

SEQ ID NO: 621538 - DNA, 15 bp, Homo sapiens
gttgtggggtcctga

SEQ ID NO: 621539 - DNA, 15 bp, Homo sapiens
ttgtggggtcctgat

SEQ ID NO: 621540 - DNA, 15 bp, Homo sapiens
tgtggggtcctgatt

SEQ ID NO: 621541 - DNA, 15 bp, Homo sapiens
gtggggtcctgattt

SEQ ID NO: 621542 - DNA, 15 bp, Homo sapiens
tggggtcctgatttt

SEQ ID NO: 621543 - DNA, 15 bp, Homo sapiens
ggggtcctgatttta

SEQ ID NO: 621544 - DNA, 15 bp, Homo sapiens
gggtcctgattttac

SEQ ID NO: 621545 - DNA, 15 bp, Homo sapiens
ggtcctgattttact

SEQ ID NO: 621546 - DNA, 15 bp, Homo sapiens
gtcctgattttacta

SEQ ID NO: 621547 - DNA, 15 bp, Homo sapiens
tcctgattttactat

SEQ ID NO: 621548 - DNA, 15 bp, Homo sapiens
cctgattttactatc

SEQ ID NO: 621549 - DNA, 15 bp, Homo sapiens
ctgattttactatcc

SEQ ID NO: 621550 - DNA, 15 bp, Homo sapiens
tgattttactatcct

SEQ ID NO: 621551 - DNA, 15 bp, Homo sapiens
gattttactatccta

SEQ ID NO: 621552 - DNA, 15 bp, Homo sapiens
attttactatcctag

SEQ ID NO: 621553 - DNA, 15 bp, Homo sapiens
ttttactatcctagc

SEQ ID NO: 621554 - DNA, 15 bp, Homo sapiens
tttactatcctagca

SEQ ID NO: 621555 - DNA, 15 bp, Homo sapiens
ttactatcctagcac

SEQ ID NO: 621556 - DNA, 15 bp, Homo sapiens
tactatcctagcaca

SEQ ID NO: 621557 - DNA, 15 bp, Homo sapiens
actatcctagcacac

SEQ ID NO: 621558 - DNA, 15 bp, Homo sapiens
ctatcctagcacacg

SEQ ID NO: 621559 - DNA, 15 bp, Homo sapiens
tatcctagcacacgc

SEQ ID NO: 621560 - DNA, 15 bp, Homo sapiens
atcctagcacacgct

SEQ ID NO: 621561 - DNA, 15 bp, Homo sapiens
tcctagcacacgctg

SEQ ID NO: 621562 - DNA, 15 bp, Homo sapiens
cctagcacacgctga

SEQ ID NO: 621563 - DNA, 15 bp, Homo sapiens
ctagcacacgctgag

SEQ ID NO: 621564 - DNA, 15 bp, Homo sapiens
tagcacacgctgagt

SEQ ID NO: 621565 - DNA, 15 bp, Homo sapiens
agcacacgctgagtg

SEQ ID NO: 621566 - DNA, 15 bp, Homo sapiens
gcacacgctgagtgc

SEQ ID NO: 621567 - DNA, 15 bp, Homo sapiens
cacacgctgagtgcc

SEQ ID NO: 621568 - DNA, 15 bp, Homo sapiens
acacgctgagtgcca

SEQ ID NO: 621569 - DNA, 15 bp, Homo sapiens
cacgctgagtgccag

SEQ ID NO: 621570 - DNA, 15 bp, Homo sapiens
acgctgagtgccagt

SEQ ID NO: 621571 - DNA, 15 bp, Homo sapiens
cgctgagtgccagtg

SEQ ID NO: 621572 - DNA, 15 bp, Homo sapiens
gctgagtgccagtga

SEQ ID NO: 621573 - DNA, 15 bp, Homo sapiens
ctgagtgccagtgaa

SEQ ID NO: 621574 - DNA, 15 bp, Homo sapiens
tgagtgccagtgaac

SEQ ID NO: 621575 - DNA, 15 bp, Homo sapiens
gagtgccagtgaaca

SEQ ID NO: 621576 - DNA, 15 bp, Homo sapiens
agtgccagtgaacat

SEQ ID NO: 621577 - DNA, 15 bp, Homo sapiens
gtgccagtgaacatg

SEQ ID NO: 621578 - DNA, 15 bp, Homo sapiens
tgccagtgaacatgc

SEQ ID NO: 621579 - DNA, 15 bp, Homo sapiens
gccagtgaacatgcc

SEQ ID NO: 621580 - DNA, 15 bp, Homo sapiens
ccagtgaacatgccc

SEQ ID NO: 621581 - DNA, 15 bp, Homo sapiens
cagtgaacatgccca

SEQ ID NO: 621582 - DNA, 15 bp, Homo sapiens
agtgaacatgcccag

SEQ ID NO: 621583 - DNA, 15 bp, Homo sapiens
gtgaacatgcccagg

SEQ ID NO: 621584 - DNA, 15 bp, Homo sapiens
tgaacatgcccaggg

SEQ ID NO: 621585 - DNA, 15 bp, Homo sapiens
gaacatgcccagggt

SEQ ID NO: 621586 - DNA, 15 bp, Homo sapiens
aacatgcccagggtc

SEQ ID NO: 621587 - DNA, 15 bp, Homo sapiens
acatgcccagggtca

SEQ ID NO: 621588 - DNA, 15 bp, Homo sapiens
catgcccagggtcat

SEQ ID NO: 621589 - DNA, 15 bp, Homo sapiens
atgcccagggtcatc

SEQ ID NO: 621590 - DNA, 15 bp, Homo sapiens
tgcccagggtcatcc

SEQ ID NO: 621591 - DNA, 15 bp, Homo sapiens
gcccagggtcatcca

SEQ ID NO: 621592 - DNA, 15 bp, Homo sapiens
cccagggtcatccac

SEQ ID NO: 621593 - DNA, 15 bp, Homo sapiens
ccagggtcatccact

SEQ ID NO: 621594 - DNA, 15 bp, Homo sapiens
cagggtcatccacta

SEQ ID NO: 621595 - DNA, 15 bp, Homo sapiens
agggtcatccactaa

SEQ ID NO: 621596 - DNA, 15 bp, Homo sapiens
gggtcatccactaaa

SEQ ID NO: 621597 - DNA, 15 bp, Homo sapiens
ggtcatccactaaaa

SEQ ID NO: 621598 - DNA, 15 bp, Homo sapiens
gtcatccactaaaac

SEQ ID NO: 621599 - DNA, 15 bp, Homo sapiens
tcatccactaaaacc

SEQ ID NO: 621600 - DNA, 15 bp, Homo sapiens
catccactaaaacct

SEQ ID NO: 621601 - DNA, 15 bp, Homo sapiens
atccactaaaacctg

SEQ ID NO: 621602 - DNA, 15 bp, Homo sapiens
tccactaaaacctgg

SEQ ID NO: 621603 - DNA, 15 bp, Homo sapiens
ccactaaaacctggg

SEQ ID NO: 621604 - DNA, 15 bp, Homo sapiens
cactaaaacctgggc

SEQ ID NO: 621605 - DNA, 15 bp, Homo sapiens
actaaaacctgggcc

SEQ ID NO: 621606 - DNA, 15 bp, Homo sapiens
ctaaaacctgggcct

SEQ ID NO: 621607 - DNA, 15 bp, Homo sapiens
taaaacctgggcctt

SEQ ID NO: 621608 - DNA, 15 bp, Homo sapiens
aaaacctgggccttg

SEQ ID NO: 621609 - DNA, 15 bp, Homo sapiens
aaacctgggccttgg

SEQ ID NO: 621610 - DNA, 15 bp, Homo sapiens
aacctgggccttggc

SEQ ID NO: 621611 - DNA, 15 bp, Homo sapiens
acctgggccttggct

SEQ ID NO: 621612 - DNA, 15 bp, Homo sapiens
cctgggccttggctc

SEQ ID NO: 621613 - DNA, 15 bp, Homo sapiens
ctgggccttggctcc

SEQ ID NO: 621614 - DNA, 15 bp, Homo sapiens
tgggccttggctcct

SEQ ID NO: 621615 - DNA, 15 bp, Homo sapiens
gggccttggctcctt

SEQ ID NO: 621616 - DNA, 15 bp, Homo sapiens
ggccttggctccttg

SEQ ID NO: 621617 - DNA, 15 bp, Homo sapiens
gccttggctccttgg

SEQ ID NO: 621618 - DNA, 15 bp, Homo sapiens
ccttggctccttggt

SEQ ID NO: 621619 - DNA, 15 bp, Homo sapiens
cttggctccttggtg

SEQ ID NO: 621620 - DNA, 15 bp, Homo sapiens
ttggctccttggtgt

SEQ ID NO: 621621 - DNA, 15 bp, Homo sapiens
tggctccttggtgtc

SEQ ID NO: 621622 - DNA, 15 bp, Homo sapiens
ggctccttggtgtct

SEQ ID NO: 621623 - DNA, 15 bp, Homo sapiens
gctccttggtgtctt

SEQ ID NO: 621624 - DNA, 15 bp, Homo sapiens
ctccttggtgtcttc

SEQ ID NO: 621625 - DNA, 15 bp, Homo sapiens
tccttggtgtcttcc

SEQ ID NO: 621626 - DNA, 15 bp, Homo sapiens
ccttggtgtcttcct

SEQ ID NO: 621627 - DNA, 15 bp, Homo sapiens
cttggtgtcttcctc

SEQ ID NO: 621628 - DNA, 15 bp, Homo sapiens
ttggtgtcttcctct

SEQ ID NO: 621629 - DNA, 15 bp, Homo sapiens
tggtgtcttcctctg

SEQ ID NO: 621630 - DNA, 15 bp, Homo sapiens
ggtgtcttcctctgg

SEQ ID NO: 621631 - DNA, 15 bp, Homo sapiens
gtgtcttcctctgga

SEQ ID NO: 621632 - DNA, 15 bp, Homo sapiens
tgtcttcctctggac

SEQ ID NO: 621633 - DNA, 15 bp, Homo sapiens
gtcttcctctggaca

SEQ ID NO: 621634 - DNA, 15 bp, Homo sapiens
tcttcctctggacac

SEQ ID NO: 621635 - DNA, 15 bp, Homo sapiens
cttcctctggacacc

SEQ ID NO: 621636 - DNA, 15 bp, Homo sapiens
ttcctctggacaccc

SEQ ID NO: 621637 - DNA, 15 bp, Homo sapiens
tcctctggacaccct

SEQ ID NO: 621638 - DNA, 15 bp, Homo sapiens
cctctggacacccta

SEQ ID NO: 621639 - DNA, 15 bp, Homo sapiens
ctctggacaccctag

SEQ ID NO: 621640 - DNA, 15 bp, Homo sapiens
tctggacaccctagg

SEQ ID NO: 621641 - DNA, 15 bp, Homo sapiens
ctggacaccctaggg

SEQ ID NO: 621642 - DNA, 15 bp, Homo sapiens
tggacaccctagggc

SEQ ID NO: 621643 - DNA, 15 bp, Homo sapiens
ggacaccctagggcc

SEQ ID NO: 621644 - DNA, 15 bp, Homo sapiens
gacaccctagggccc

SEQ ID NO: 621645 - DNA, 15 bp, Homo sapiens
acaccctagggccct

SEQ ID NO: 621646 - DNA, 15 bp, Homo sapiens
caccctagggcccta

SEQ ID NO: 621647 - DNA, 15 bp, Homo sapiens
accctagggccctag

SEQ ID NO: 621648 - DNA, 15 bp, Homo sapiens
ccctagggccctaga

SEQ ID NO: 621649 - DNA, 15 bp, Homo sapiens
cctagggccctagac

SEQ ID NO: 621650 - DNA, 15 bp, Homo sapiens
ctagggccctagact

SEQ ID NO: 621651 - DNA, 15 bp, Homo sapiens
tagggccctagactg

SEQ ID NO: 621652 - DNA, 15 bp, Homo sapiens
agggccctagactgt

SEQ ID NO: 621653 - DNA, 15 bp, Homo sapiens
gggccctagactgtc

SEQ ID NO: 621654 - DNA, 15 bp, Homo sapiens
ggccctagactgtcc

SEQ ID NO: 621655 - DNA, 15 bp, Homo sapiens
gccctagactgtcct

SEQ ID NO: 621656 - DNA, 15 bp, Homo sapiens
ccctagactgtcctc

SEQ ID NO: 621657 - DNA, 15 bp, Homo sapiens
cctagactgtcctct

SEQ ID NO: 621658 - DNA, 15 bp, Homo sapiens
ctagactgtcctctg

SEQ ID NO: 621659 - DNA, 15 bp, Homo sapiens
tagactgtcctctgt

SEQ ID NO: 621660 - DNA, 15 bp, Homo sapiens
agactgtcctctgtt

SEQ ID NO: 621661 - DNA, 15 bp, Homo sapiens
gactgtcctctgtta

SEQ ID NO: 621662 - DNA, 15 bp, Homo sapiens
actgtcctctgttaa

SEQ ID NO: 621663 - DNA, 15 bp, Homo sapiens
ctgtcctctgttaat

SEQ ID NO: 621664 - DNA, 15 bp, Homo sapiens
tgtcctctgttaatt

SEQ ID NO: 621665 - DNA, 15 bp, Homo sapiens
gtcctctgttaattc

SEQ ID NO: 621666 - DNA, 15 bp, Homo sapiens
tcctctgttaattct

SEQ ID NO: 621667 - DNA, 15 bp, Homo sapiens
cctctgttaattctc

SEQ ID NO: 621668 - DNA, 15 bp, Homo sapiens
ctctgttaattctca

SEQ ID NO: 621669 - DNA, 15 bp, Homo sapiens
tctgttaattctcac

SEQ ID NO: 621670 - DNA, 15 bp, Homo sapiens
ctgttaattctcact

SEQ ID NO: 621671 - DNA, 15 bp, Homo sapiens
tgttaattctcactc

SEQ ID NO: 621672 - DNA, 15 bp, Homo sapiens
gttaattctcactca

SEQ ID NO: 621673 - DNA, 15 bp, Homo sapiens
ttaattctcactcag

SEQ ID NO: 621674 - DNA, 15 bp, Homo sapiens
taattctcactcagc

SEQ ID NO: 621675 - DNA, 15 bp, Homo sapiens
aattctcactcagcc

SEQ ID NO: 621676 - DNA, 15 bp, Homo sapiens
attctcactcagcca

SEQ ID NO: 621677 - DNA, 15 bp, Homo sapiens
ttctcactcagccac

SEQ ID NO: 621678 - DNA, 15 bp, Homo sapiens
tctcactcagccaca

SEQ ID NO: 621679 - DNA, 15 bp, Homo sapiens
ctcactcagccacac

SEQ ID NO: 621680 - DNA, 15 bp, Homo sapiens
tcactcagccacact

SEQ ID NO: 621681 - DNA, 15 bp, Homo sapiens
cactcagccacactt

SEQ ID NO: 621682 - DNA, 15 bp, Homo sapiens
actcagccacacttt

SEQ ID NO: 621683 - DNA, 15 bp, Homo sapiens
ctcagccacactttc

SEQ ID NO: 621684 - DNA, 15 bp, Homo sapiens
tcagccacactttcg

SEQ ID NO: 621685 - DNA, 15 bp, Homo sapiens
cagccacactttcgt

SEQ ID NO: 621686 - DNA, 15 bp, Homo sapiens
agccacactttcgtg

SEQ ID NO: 621687 - DNA, 15 bp, Homo sapiens
gccacactttcgtgt

SEQ ID NO: 621688 - DNA, 15 bp, Homo sapiens
ccacactttcgtgtg

SEQ ID NO: 621689 - DNA, 15 bp, Homo sapiens
cacactttcgtgtgt

SEQ ID NO: 621690 - DNA, 15 bp, Homo sapiens
acactttcgtgtgtc

SEQ ID NO: 621691 - DNA, 15 bp, Homo sapiens
cactttcgtgtgtct

SEQ ID NO: 621692 - DNA, 15 bp, Homo sapiens
actttcgtgtgtctc

SEQ ID NO: 621693 - DNA, 15 bp, Homo sapiens
ctttcgtgtgtctcc

SEQ ID NO: 621694 - DNA, 15 bp, Homo sapiens
tttcgtgtgtctcct

SEQ ID NO: 621695 - DNA, 15 bp, Homo sapiens
ttcgtgtgtctcctt

SEQ ID NO: 621696 - DNA, 15 bp, Homo sapiens
tcgtgtgtctccttc

SEQ ID NO: 621697 - DNA, 15 bp, Homo sapiens
cgtgtgtctccttcc

SEQ ID NO: 621698 - DNA, 15 bp, Homo sapiens
gtgtgtctccttcca

SEQ ID NO: 621699 - DNA, 15 bp, Homo sapiens
tgtgtctccttccag

SEQ ID NO: 621700 - DNA, 15 bp, Homo sapiens
gtgtctccttccagt

SEQ ID NO: 621701 - DNA, 15 bp, Homo sapiens
tgtctccttccagtc

SEQ ID NO: 621702 - DNA, 15 bp, Homo sapiens
gtctccttccagtca

SEQ ID NO: 621703 - DNA, 15 bp, Homo sapiens
tctccttccagtcat

SEQ ID NO: 621704 - DNA, 15 bp, Homo sapiens
ctccttccagtcatt

SEQ ID NO: 621705 - DNA, 15 bp, Homo sapiens
tccttccagtcattt

SEQ ID NO: 621706 - DNA, 15 bp, Homo sapiens
ccttccagtcatttg

SEQ ID NO: 621707 - DNA, 15 bp, Homo sapiens
cttccagtcatttgt

SEQ ID NO: 621708 - DNA, 15 bp, Homo sapiens
ttccagtcatttgtt

SEQ ID NO: 621709 - DNA, 15 bp, Homo sapiens
tccagtcatttgttc

SEQ ID NO: 621710 - DNA, 15 bp, Homo sapiens
ccagtcatttgttct

SEQ ID NO: 621711 - DNA, 15 bp, Homo sapiens
cagtcatttgttcta

SEQ ID NO: 621712 - DNA, 15 bp, Homo sapiens
agtcatttgttctaa

SEQ ID NO: 621713 - DNA, 15 bp, Homo sapiens
gtcatttgttctaag

SEQ ID NO: 621714 - DNA, 15 bp, Homo sapiens
tcatttgttctaagc

SEQ ID NO: 621715 - DNA, 15 bp, Homo sapiens
catttgttctaagct

SEQ ID NO: 621716 - DNA, 15 bp, Homo sapiens
atttgttctaagctt

SEQ ID NO: 621717 - DNA, 15 bp, Homo sapiens
tttgttctaagctta

SEQ ID NO: 621718 - DNA, 15 bp, Homo sapiens
ttgttctaagcttac

SEQ ID NO: 621719 - DNA, 15 bp, Homo sapiens
tgttctaagcttact

SEQ ID NO: 621720 - DNA, 15 bp, Homo sapiens
gttctaagcttacta

SEQ ID NO: 621721 - DNA, 15 bp, Homo sapiens
ttctaagcttactac

SEQ ID NO: 621722 - DNA, 15 bp, Homo sapiens
tctaagcttactacg

SEQ ID NO: 621723 - DNA, 15 bp, Homo sapiens
ctaagcttactacgt

SEQ ID NO: 621724 - DNA, 15 bp, Homo sapiens
taagcttactacgtg

SEQ ID NO: 621725 - DNA, 15 bp, Homo sapiens
aagcttactacgtgt

SEQ ID NO: 621726 - DNA, 15 bp, Homo sapiens
agcttactacgtgta

SEQ ID NO: 621727 - DNA, 15 bp, Homo sapiens
gcttactacgtgtat

SEQ ID NO: 621728 - DNA, 15 bp, Homo sapiens
cttactacgtgtatg

SEQ ID NO: 621729 - DNA, 15 bp, Homo sapiens
ttactacgtgtatgg

SEQ ID NO: 621730 - DNA, 15 bp, Homo sapiens
tactacgtgtatgga

SEQ ID NO: 621731 - DNA, 15 bp, Homo sapiens
actacgtgtatggat

SEQ ID NO: 621732 - DNA, 15 bp, Homo sapiens
ctacgtgtatggatg

SEQ ID NO: 621733 - DNA, 15 bp, Homo sapiens
tacgtgtatggatga

SEQ ID NO: 621734 - DNA, 15 bp, Homo sapiens
acgtgtatggatgat

SEQ ID NO: 621735 - DNA, 15 bp, Homo sapiens
cgtgtatggatgata

SEQ ID NO: 621736 - DNA, 15 bp, Homo sapiens
gtgtatggatgatat

SEQ ID NO: 621737 - DNA, 15 bp, Homo sapiens
tgtatggatgatatg

SEQ ID NO: 621738 - DNA, 15 bp, Homo sapiens
gtatggatgatatga

SEQ ID NO: 621739 - DNA, 15 bp, Homo sapiens
tatggatgatatgat

SEQ ID NO: 621740 - DNA, 15 bp, Homo sapiens
atggatgatatgatc

SEQ ID NO: 621741 - DNA, 15 bp, Homo sapiens
tggatgatatgatct

SEQ ID NO: 621742 - DNA, 15 bp, Homo sapiens
ggatgatatgatctg

SEQ ID NO: 621743 - DNA, 15 bp, Homo sapiens
gatgatatgatctgt

SEQ ID NO: 621744 - DNA, 15 bp, Homo sapiens
atgatatgatctgta

SEQ ID NO: 621745 - DNA, 15 bp, Homo sapiens
tgatatgatctgtag

SEQ ID NO: 621746 - DNA, 15 bp, Homo sapiens
gatatgatctgtagt

SEQ ID NO: 621747 - DNA, 15 bp, Homo sapiens
atatgatctgtagtt

SEQ ID NO: 621748 - DNA, 15 bp, Homo sapiens
tatgatctgtagttt

SEQ ID NO: 621749 - DNA, 15 bp, Homo sapiens
atgatctgtagtttt

SEQ ID NO: 621750 - DNA, 15 bp, Homo sapiens
tgatctgtagtttta

SEQ ID NO: 621751 - DNA, 15 bp, Homo sapiens
gatctgtagttttat

SEQ ID NO: 621752 - DNA, 15 bp, Homo sapiens
atctgtagttttatc

SEQ ID NO: 621753 - DNA, 15 bp, Homo sapiens
tctgtagttttatca

SEQ ID NO: 621754 - DNA, 15 bp, Homo sapiens
ctgtagttttatcaa

SEQ ID NO: 621755 - DNA, 15 bp, Homo sapiens
tgtagttttatcaag

SEQ ID NO: 621756 - DNA, 15 bp, Homo sapiens
gtagttttatcaagg

SEQ ID NO: 621757 - DNA, 15 bp, Homo sapiens
tagttttatcaaggt

SEQ ID NO: 621758 - DNA, 15 bp, Homo sapiens
agttttatcaaggta

SEQ ID NO: 621759 - DNA, 15 bp, Homo sapiens
gttttatcaaggtag

SEQ ID NO: 621760 - DNA, 15 bp, Homo sapiens
ttttatcaaggtagt

SEQ ID NO: 621761 - DNA, 15 bp, Homo sapiens
tttatcaaggtagtg

SEQ ID NO: 621762 - DNA, 15 bp, Homo sapiens
ttatcaaggtagtga

SEQ ID NO: 621763 - DNA, 15 bp, Homo sapiens
tatcaaggtagtgac

SEQ ID NO: 621764 - DNA, 15 bp, Homo sapiens
atcaaggtagtgact

SEQ ID NO: 621765 - DNA, 15 bp, Homo sapiens
tcaaggtagtgacta

SEQ ID NO: 621766 - DNA, 15 bp, Homo sapiens
caaggtagtgactac

SEQ ID NO: 621767 - DNA, 15 bp, Homo sapiens
aaggtagtgactacc

SEQ ID NO: 621768 - DNA, 15 bp, Homo sapiens
aggtagtgactacca

SEQ ID NO: 621769 - DNA, 15 bp, Homo sapiens
ggtagtgactaccac

SEQ ID NO: 621770 - DNA, 15 bp, Homo sapiens
gtagtgactaccaca

SEQ ID NO: 621771 - DNA, 15 bp, Homo sapiens
tagtgactaccacat

SEQ ID NO: 621772 - DNA, 15 bp, Homo sapiens
agtgactaccacata

SEQ ID NO: 621773 - DNA, 15 bp, Homo sapiens
gtgactaccacatag

SEQ ID NO: 621774 - DNA, 15 bp, Homo sapiens
tgactaccacatagg

SEQ ID NO: 621775 - DNA, 15 bp, Homo sapiens
gactaccacatagga

SEQ ID NO: 621776 - DNA, 15 bp, Homo sapiens
actaccacataggat

SEQ ID NO: 621777 - DNA, 15 bp, Homo sapiens
ctaccacataggata

SEQ ID NO: 621778 - DNA, 15 bp, Homo sapiens
taccacataggatac

SEQ ID NO: 621779 - DNA, 15 bp, Homo sapiens
accacataggatacc

SEQ ID NO: 621780 - DNA, 15 bp, Homo sapiens
ccacataggatacct

SEQ ID NO: 621781 - DNA, 15 bp, Homo sapiens
cacataggatacctt

SEQ ID NO: 621782 - DNA, 15 bp, Homo sapiens
acataggataccttt

SEQ ID NO: 621783 - DNA, 15 bp, Homo sapiens
cataggatacctttg

SEQ ID NO: 621784 - DNA, 15 bp, Homo sapiens
ataggatacctttgt

SEQ ID NO: 621785 - DNA, 15 bp, Homo sapiens
taggatacctttgtg

SEQ ID NO: 621786 - DNA, 15 bp, Homo sapiens
aggatacctttgtgg

SEQ ID NO: 621787 - DNA, 15 bp, Homo sapiens
ggatacctttgtgga

SEQ ID NO: 621788 - DNA, 15 bp, Homo sapiens
gatacctttgtggaa

SEQ ID NO: 621789 - DNA, 15 bp, Homo sapiens
atacctttgtggaaa

SEQ ID NO: 621790 - DNA, 15 bp, Homo sapiens
tacctttgtggaaat

SEQ ID NO: 621791 - DNA, 15 bp, Homo sapiens
acctttgtggaaatt

SEQ ID NO: 621792 - DNA, 15 bp, Homo sapiens
cctttgtggaaatta

SEQ ID NO: 621793 - DNA, 15 bp, Homo sapiens
ctttgtggaaattag

SEQ ID NO: 621794 - DNA, 15 bp, Homo sapiens
tttgtggaaattagt

SEQ ID NO: 621795 - DNA, 15 bp, Homo sapiens
ttgtggaaattagta

SEQ ID NO: 621796 - DNA, 15 bp, Homo sapiens
tgtggaaattagtaa

SEQ ID NO: 621797 - DNA, 15 bp, Homo sapiens
gtggaaattagtaaa

SEQ ID NO: 621798 - DNA, 15 bp, Homo sapiens
tggaaattagtaaaa

SEQ ID NO: 621799 - DNA, 15 bp, Homo sapiens
ggaaattagtaaaaa

SEQ ID NO: 621800 - DNA, 15 bp, Homo sapiens
gaaattagtaaaaat

SEQ ID NO: 621801 - DNA, 15 bp, Homo sapiens
aaattagtaaaaatg

SEQ ID NO: 621802 - DNA, 15 bp, Homo sapiens
aattagtaaaaatgc

SEQ ID NO: 621803 - DNA, 15 bp, Homo sapiens
attagtaaaaatgct

SEQ ID NO: 621804 - DNA, 15 bp, Homo sapiens
ttagtaaaaatgctc

SEQ ID NO: 621805 - DNA, 15 bp, Homo sapiens
tagtaaaaatgctct

SEQ ID NO: 621806 - DNA, 15 bp, Homo sapiens
agtaaaaatgctctt

SEQ ID NO: 621807 - DNA, 15 bp, Homo sapiens
gtaaaaatgctcttt

SEQ ID NO: 621808 - DNA, 15 bp, Homo sapiens
taaaaatgctctttt

SEQ ID NO: 621809 - DNA, 15 bp, Homo sapiens
aaaaatgctcttttc

SEQ ID NO: 621810 - DNA, 15 bp, Homo sapiens
aaaatgctcttttct

SEQ ID NO: 621811 - DNA, 15 bp, Homo sapiens
aaatgctcttttctg

SEQ ID NO: 621812 - DNA, 15 bp, Homo sapiens
aatgctcttttctgc

SEQ ID NO: 621813 - DNA, 15 bp, Homo sapiens
atgctcttttctgca

SEQ ID NO: 621814 - DNA, 15 bp, Homo sapiens
tgctcttttctgcag

SEQ ID NO: 621815 - DNA, 15 bp, Homo sapiens
gctcttttctgcagg

SEQ ID NO: 621816 - DNA, 15 bp, Homo sapiens
ctcttttctgcaggt

SEQ ID NO: 621817 - DNA, 15 bp, Homo sapiens
tcttttctgcaggtg

SEQ ID NO: 621818 - DNA, 15 bp, Homo sapiens
cttttctgcaggtgg

SEQ ID NO: 621819 - DNA, 15 bp, Homo sapiens
ttttctgcaggtgga

SEQ ID NO: 621820 - DNA, 15 bp, Homo sapiens
tttctgcaggtggac

SEQ ID NO: 621821 - DNA, 15 bp, Homo sapiens
ttctgcaggtggaca

SEQ ID NO: 621822 - DNA, 15 bp, Homo sapiens
tctgcaggtggacac

SEQ ID NO: 621823 - DNA, 15 bp, Homo sapiens
ctgcaggtggacact

SEQ ID NO: 621824 - DNA, 15 bp, Homo sapiens
tgcaggtggacactg

SEQ ID NO: 621825 - DNA, 15 bp, Homo sapiens
gcaggtggacactgt

SEQ ID NO: 621826 - DNA, 15 bp, Homo sapiens
caggtggacactgtc

SEQ ID NO: 621827 - DNA, 15 bp, Homo sapiens
aggtggacactgtcc

SEQ ID NO: 621828 - DNA, 15 bp, Homo sapiens
ggtggacactgtccc

SEQ ID NO: 621829 - DNA, 15 bp, Homo sapiens
gtggacactgtccca

SEQ ID NO: 621830 - DNA, 15 bp, Homo sapiens
tggacactgtcccat

SEQ ID NO: 621831 - DNA, 15 bp, Homo sapiens
ggacactgtcccatg

SEQ ID NO: 621832 - DNA, 15 bp, Homo sapiens
gacactgtcccatgc

SEQ ID NO: 621833 - DNA, 15 bp, Homo sapiens
acactgtcccatgcc

SEQ ID NO: 621834 - DNA, 15 bp, Homo sapiens
cactgtcccatgcca

SEQ ID NO: 621835 - DNA, 15 bp, Homo sapiens
actgtcccatgccag

SEQ ID NO: 621836 - DNA, 15 bp, Homo sapiens
ctgtcccatgccagg

SEQ ID NO: 621837 - DNA, 15 bp, Homo sapiens
tgtcccatgccaggg

SEQ ID NO: 621838 - DNA, 15 bp, Homo sapiens
gtcccatgccagggg

SEQ ID NO: 621839 - DNA, 15 bp, Homo sapiens
tcccatgccaggggt

SEQ ID NO: 621840 - DNA, 15 bp, Homo sapiens
cccatgccaggggtt

SEQ ID NO: 621841 - DNA, 15 bp, Homo sapiens
ccatgccaggggtta

SEQ ID NO: 621842 - DNA, 15 bp, Homo sapiens
catgccaggggttat

SEQ ID NO: 621843 - DNA, 15 bp, Homo sapiens
atgccaggggttatg

SEQ ID NO: 621844 - DNA, 15 bp, Homo sapiens
tgccaggggttatgg

SEQ ID NO: 621845 - DNA, 15 bp, Homo sapiens
gccaggggttatggc

SEQ ID NO: 621846 - DNA, 15 bp, Homo sapiens
ccaggggttatggct

SEQ ID NO: 621847 - DNA, 15 bp, Homo sapiens
caggggttatggctt

SEQ ID NO: 621848 - DNA, 15 bp, Homo sapiens
aggggttatggcttg

SEQ ID NO: 621849 - DNA, 15 bp, Homo sapiens
ggggttatggcttgt

SEQ ID NO: 621850 - DNA, 15 bp, Homo sapiens
gggttatggcttgta

SEQ ID NO: 621851 - DNA, 15 bp, Homo sapiens
ggttatggcttgtac

SEQ ID NO: 621852 - DNA, 15 bp, Homo sapiens
gttatggcttgtaca

SEQ ID NO: 621853 - DNA, 15 bp, Homo sapiens
ttatggcttgtacat

SEQ ID NO: 621854 - DNA, 15 bp, Homo sapiens
tatggcttgtacata

SEQ ID NO: 621855 - DNA, 15 bp, Homo sapiens
atggcttgtacataa

SEQ ID NO: 621856 - DNA, 15 bp, Homo sapiens
tggcttgtacataaa

SEQ ID NO: 621857 - DNA, 15 bp, Homo sapiens
ggcttgtacataaag

SEQ ID NO: 621858 - DNA, 15 bp, Homo sapiens
gcttgtacataaagt

SEQ ID NO: 621859 - DNA, 15 bp, Homo sapiens
cttgtacataaagtt

SEQ ID NO: 621860 - DNA, 15 bp, Homo sapiens
ttgtacataaagttc

SEQ ID NO: 621861 - DNA, 15 bp, Homo sapiens
tgtacataaagttca

SEQ ID NO: 621862 - DNA, 15 bp, Homo sapiens
gtacataaagttcag

SEQ ID NO: 621863 - DNA, 15 bp, Homo sapiens
tacataaagttcagg

SEQ ID NO: 621864 - DNA, 15 bp, Homo sapiens
acataaagttcaggc

SEQ ID NO: 621865 - DNA, 15 bp, Homo sapiens
cataaagttcaggct

SEQ ID NO: 621866 - DNA, 15 bp, Homo sapiens
ataaagttcaggctg

SEQ ID NO: 621867 - DNA, 15 bp, Homo sapiens
taaagttcaggctgg

SEQ ID NO: 621868 - DNA, 15 bp, Homo sapiens
aaagttcaggctggc

SEQ ID NO: 621869 - DNA, 15 bp, Homo sapiens
aagttcaggctggct

SEQ ID NO: 621870 - DNA, 15 bp, Homo sapiens
agttcaggctggctt

SEQ ID NO: 621871 - DNA, 15 bp, Homo sapiens
gttcaggctggcttt

SEQ ID NO: 621872 - DNA, 15 bp, Homo sapiens
ttcaggctggcttta

SEQ ID NO: 621873 - DNA, 15 bp, Homo sapiens
tcaggctggctttag

SEQ ID NO: 621874 - DNA, 15 bp, Homo sapiens
caggctggctttagc

SEQ ID NO: 621875 - DNA, 15 bp, Homo sapiens
aggctggctttagcc

SEQ ID NO: 621876 - DNA, 15 bp, Homo sapiens
ggctggctttagccc

SEQ ID NO: 621877 - DNA, 15 bp, Homo sapiens
gctggctttagcccc

SEQ ID NO: 621878 - DNA, 15 bp, Homo sapiens
ctggctttagcccca

SEQ ID NO: 621879 - DNA, 15 bp, Homo sapiens
tggctttagccccaa

SEQ ID NO: 621880 - DNA, 15 bp, Homo sapiens
ggctttagccccaac

SEQ ID NO: 621881 - DNA, 15 bp, Homo sapiens
gctttagccccaact

SEQ ID NO: 621882 - DNA, 15 bp, Homo sapiens
ctttagccccaactt

SEQ ID NO: 621883 - DNA, 15 bp, Homo sapiens
tttagccccaactta

SEQ ID NO: 621884 - DNA, 15 bp, Homo sapiens
ttagccccaacttac

SEQ ID NO: 621885 - DNA, 15 bp, Homo sapiens
tagccccaacttacc

SEQ ID NO: 621886 - DNA, 15 bp, Homo sapiens
agccccaacttaccc

SEQ ID NO: 621887 - DNA, 15 bp, Homo sapiens
gccccaacttacccc

SEQ ID NO: 621888 - DNA, 15 bp, Homo sapiens
ccccaacttacccct

SEQ ID NO: 621889 - DNA, 15 bp, Homo sapiens
cccaacttacccctc

SEQ ID NO: 621890 - DNA, 15 bp, Homo sapiens
ccaacttacccctca

SEQ ID NO: 621891 - DNA, 15 bp, Homo sapiens
caacttacccctcag

SEQ ID NO: 621892 - DNA, 15 bp, Homo sapiens
aacttacccctcagc

SEQ ID NO: 621893 - DNA, 15 bp, Homo sapiens
acttacccctcagcc

SEQ ID NO: 621894 - DNA, 15 bp, Homo sapiens
cttacccctcagcca

SEQ ID NO: 621895 - DNA, 15 bp, Homo sapiens
ttacccctcagccag

SEQ ID NO: 621896 - DNA, 15 bp, Homo sapiens
tacccctcagccaga

SEQ ID NO: 621897 - DNA, 15 bp, Homo sapiens
acccctcagccagat

SEQ ID NO: 621898 - DNA, 15 bp, Homo sapiens
cccctcagccagatg

SEQ ID NO: 621899 - DNA, 15 bp, Homo sapiens
ccctcagccagatgc

SEQ ID NO: 621900 - DNA, 15 bp, Homo sapiens
cctcagccagatgcc

SEQ ID NO: 621901 - DNA, 15 bp, Homo sapiens
ctcagccagatgcct

SEQ ID NO: 621902 - DNA, 15 bp, Homo sapiens
tcagccagatgcctt

SEQ ID NO: 621903 - DNA, 15 bp, Homo sapiens
cagccagatgccttc

SEQ ID NO: 621904 - DNA, 15 bp, Homo sapiens
agccagatgccttct

SEQ ID NO: 621905 - DNA, 15 bp, Homo sapiens
gccagatgccttcta

SEQ ID NO: 621906 - DNA, 15 bp, Homo sapiens
ccagatgccttctat

SEQ ID NO: 621907 - DNA, 15 bp, Homo sapiens
cagatgccttctatt

SEQ ID NO: 621908 - DNA, 15 bp, Homo sapiens
agatgccttctattt

SEQ ID NO: 621909 - DNA, 15 bp, Homo sapiens
gatgccttctatttg

SEQ ID NO: 621910 - DNA, 15 bp, Homo sapiens
atgccttctatttgt

SEQ ID NO: 621911 - DNA, 15 bp, Homo sapiens
tgccttctatttgtc

SEQ ID NO: 621912 - DNA, 15 bp, Homo sapiens
gccttctatttgtcc

SEQ ID NO: 621913 - DNA, 15 bp, Homo sapiens
ccttctatttgtccg

SEQ ID NO: 621914 - DNA, 15 bp, Homo sapiens
cttctatttgtccga

SEQ ID NO: 621915 - DNA, 15 bp, Homo sapiens
ttctatttgtccgag

SEQ ID NO: 621916 - DNA, 15 bp, Homo sapiens
tctatttgtccgagg

SEQ ID NO: 621917 - DNA, 15 bp, Homo sapiens
ctatttgtccgagga

SEQ ID NO: 621918 - DNA, 15 bp, Homo sapiens
tatttgtccgaggaa

SEQ ID NO: 621919 - DNA, 15 bp, Homo sapiens
atttgtccgaggaaa

SEQ ID NO: 621920 - DNA, 15 bp, Homo sapiens
tttgtccgaggaaag

SEQ ID NO: 621921 - DNA, 15 bp, Homo sapiens
ttgtccgaggaaaga

SEQ ID NO: 621922 - DNA, 15 bp, Homo sapiens
tgtccgaggaaagaa

SEQ ID NO: 621923 - DNA, 15 bp, Homo sapiens
gtccgaggaaagaat

SEQ ID NO: 621924 - DNA, 15 bp, Homo sapiens
tccgaggaaagaata

SEQ ID NO: 621925 - DNA, 15 bp, Homo sapiens
ccgaggaaagaataa

SEQ ID NO: 621926 - DNA, 15 bp, Homo sapiens
cgaggaaagaataaa

SEQ ID NO: 621927 - DNA, 15 bp, Homo sapiens
gaggaaagaataaat

SEQ ID NO: 621928 - DNA, 15 bp, Homo sapiens
aggaaagaataaata

SEQ ID NO: 621929 - DNA, 15 bp, Homo sapiens
ggaaagaataaatag

SEQ ID NO: 621930 - DNA, 15 bp, Homo sapiens
gaaagaataaataga

SEQ ID NO: 621931 - DNA, 15 bp, Homo sapiens
aaagaataaatagag

SEQ ID NO: 621932 - DNA, 15 bp, Homo sapiens
aagaataaatagagc

SEQ ID NO: 621933 - DNA, 15 bp, Homo sapiens
agaataaatagagcc

SEQ ID NO: 621934 - DNA, 15 bp, Homo sapiens
gaataaatagagcca

SEQ ID NO: 621935 - DNA, 15 bp, Homo sapiens
aataaatagagccaa

SEQ ID NO: 621936 - DNA, 15 bp, Homo sapiens
ataaatagagccaag

SEQ ID NO: 621937 - DNA, 15 bp, Homo sapiens
taaatagagccaagt

SEQ ID NO: 621938 - DNA, 15 bp, Homo sapiens
aaatagagccaagtc

SEQ ID NO: 621939 - DNA, 15 bp, Homo sapiens
aatagagccaagtcc

SEQ ID NO: 621940 - DNA, 15 bp, Homo sapiens
atagagccaagtccc

SEQ ID NO: 621941 - DNA, 15 bp, Homo sapiens
tagagccaagtccct

SEQ ID NO: 621942 - DNA, 15 bp, Homo sapiens
agagccaagtccctg

SEQ ID NO: 621943 - DNA, 15 bp, Homo sapiens
gagccaagtccctgt

SEQ ID NO: 621944 - DNA, 15 bp, Homo sapiens
agccaagtccctgta

SEQ ID NO: 621945 - DNA, 15 bp, Homo sapiens
gccaagtccctgtac

SEQ ID NO: 621946 - DNA, 15 bp, Homo sapiens
ccaagtccctgtaca

SEQ ID NO: 621947 - DNA, 15 bp, Homo sapiens
caagtccctgtacaa

SEQ ID NO: 621948 - DNA, 15 bp, Homo sapiens
aagtccctgtacaac

SEQ ID NO: 621949 - DNA, 15 bp, Homo sapiens
agtccctgtacaact

SEQ ID NO: 621950 - DNA, 15 bp, Homo sapiens
gtccctgtacaactt

SEQ ID NO: 621951 - DNA, 15 bp, Homo sapiens
tccctgtacaacttg

SEQ ID NO: 621952 - DNA, 15 bp, Homo sapiens
ccctgtacaacttgc

SEQ ID NO: 621953 - DNA, 15 bp, Homo sapiens
cctgtacaacttgcc

SEQ ID NO: 621954 - DNA, 15 bp, Homo sapiens
ctgtacaacttgcct

SEQ ID NO: 621955 - DNA, 15 bp, Homo sapiens
tgtacaacttgcctg

SEQ ID NO: 621956 - DNA, 15 bp, Homo sapiens
gtacaacttgcctgc

SEQ ID NO: 621957 - DNA, 15 bp, Homo sapiens
tacaacttgcctgcc

SEQ ID NO: 621958 - DNA, 15 bp, Homo sapiens
acaacttgcctgccc

SEQ ID NO: 621959 - DNA, 15 bp, Homo sapiens
caacttgcctgccct

SEQ ID NO: 621960 - DNA, 15 bp, Homo sapiens
aacttgcctgccctc

SEQ ID NO: 621961 - DNA, 15 bp, Homo sapiens
acttgcctgccctct

SEQ ID NO: 621962 - DNA, 15 bp, Homo sapiens
cttgcctgccctctt

SEQ ID NO: 621963 - DNA, 15 bp, Homo sapiens
ttgcctgccctcttt

SEQ ID NO: 621964 - DNA, 15 bp, Homo sapiens
tgcctgccctctttt

SEQ ID NO: 621965 - DNA, 15 bp, Homo sapiens
gcctgccctcttttc

SEQ ID NO: 621966 - DNA, 15 bp, Homo sapiens
cctgccctcttttca

SEQ ID NO: 621967 - DNA, 15 bp, Homo sapiens
ctgccctcttttcac

SEQ ID NO: 621968 - DNA, 15 bp, Homo sapiens
tgccctcttttcact

SEQ ID NO: 621969 - DNA, 15 bp, Homo sapiens
gccctcttttcactt

SEQ ID NO: 621970 - DNA, 15 bp, Homo sapiens
ccctcttttcactta

SEQ ID NO: 621971 - DNA, 15 bp, Homo sapiens
cctcttttcacttaa

SEQ ID NO: 621972 - DNA, 15 bp, Homo sapiens
ctcttttcacttaaa

SEQ ID NO: 621973 - DNA, 15 bp, Homo sapiens
tcttttcacttaaat

SEQ ID NO: 621974 - DNA, 15 bp, Homo sapiens
cttttcacttaaatt

SEQ ID NO: 621975 - DNA, 15 bp, Homo sapiens
ttttcacttaaattt

SEQ ID NO: 621976 - DNA, 15 bp, Homo sapiens
tttcacttaaattta

SEQ ID NO: 621977 - DNA, 15 bp, Homo sapiens
ttcacttaaatttac

SEQ ID NO: 621978 - DNA, 15 bp, Homo sapiens
tcacttaaatttaca

SEQ ID NO: 621979 - DNA, 15 bp, Homo sapiens
cacttaaatttacat

SEQ ID NO: 621980 - DNA, 15 bp, Homo sapiens
acttaaatttacatc

SEQ ID NO: 621981 - DNA, 15 bp, Homo sapiens
cttaaatttacatca

SEQ ID NO: 621982 - DNA, 15 bp, Homo sapiens
ttaaatttacatcat

SEQ ID NO: 621983 - DNA, 15 bp, Homo sapiens
taaatttacatcatg

SEQ ID NO: 621984 - DNA, 15 bp, Homo sapiens
aaatttacatcatga

SEQ ID NO: 621985 - DNA, 15 bp, Homo sapiens
aatttacatcatgaa

SEQ ID NO: 621986 - DNA, 15 bp, Homo sapiens
atttacatcatgaac

SEQ ID NO: 621987 - DNA, 15 bp, Homo sapiens
tttacatcatgaaca

SEQ ID NO: 621988 - DNA, 15 bp, Homo sapiens
ttacatcatgaacat

SEQ ID NO: 621989 - DNA, 15 bp, Homo sapiens
tacatcatgaacatt

SEQ ID NO: 621990 - DNA, 15 bp, Homo sapiens
acatcatgaacattt

SEQ ID NO: 621991 - DNA, 15 bp, Homo sapiens
catcatgaacatttc

SEQ ID NO: 621992 - DNA, 15 bp, Homo sapiens
atcatgaacatttcc

SEQ ID NO: 621993 - DNA, 15 bp, Homo sapiens
tcatgaacatttcct

SEQ ID NO: 621994 - DNA, 15 bp, Homo sapiens
catgaacatttcctt

SEQ ID NO: 621995 - DNA, 15 bp, Homo sapiens
atgaacatttccttg

SEQ ID NO: 621996 - DNA, 15 bp, Homo sapiens
tgaacatttccttgt

SEQ ID NO: 621997 - DNA, 15 bp, Homo sapiens
gaacatttccttgtg

SEQ ID NO: 621998 - DNA, 15 bp, Homo sapiens
aacatttccttgtgt

SEQ ID NO: 621999 - DNA, 15 bp, Homo sapiens
acatttccttgtgtt

SEQ ID NO: 622000 - DNA, 15 bp, Homo sapiens
catttccttgtgtta

SEQ ID NO: 622001 - DNA, 15 bp, Homo sapiens
atttccttgtgttac

SEQ ID NO: 622002 - DNA, 15 bp, Homo sapiens
tttccttgtgttacg

SEQ ID NO: 622003 - DNA, 15 bp, Homo sapiens
ttccttgtgttacga

SEQ ID NO: 622004 - DNA, 15 bp, Homo sapiens
tccttgtgttacgat

SEQ ID NO: 622005 - DNA, 15 bp, Homo sapiens
ccttgtgttacgatg

SEQ ID NO: 622006 - DNA, 15 bp, Homo sapiens
cttgtgttacgatgt

SEQ ID NO: 622007 - DNA, 15 bp, Homo sapiens
ttgtgttacgatgta

SEQ ID NO: 622008 - DNA, 15 bp, Homo sapiens
tgtgttacgatgtac

SEQ ID NO: 622009 - DNA, 15 bp, Homo sapiens
gtgttacgatgtact

SEQ ID NO: 622010 - DNA, 15 bp, Homo sapiens
tgttacgatgtactt

SEQ ID NO: 622011 - DNA, 15 bp, Homo sapiens
gttacgatgtacttc

SEQ ID NO: 622012 - DNA, 15 bp, Homo sapiens
ttacgatgtacttct

SEQ ID NO: 622013 - DNA, 15 bp, Homo sapiens
tacgatgtacttctt

SEQ ID NO: 622014 - DNA, 15 bp, Homo sapiens
acgatgtacttcttg

SEQ ID NO: 622015 - DNA, 15 bp, Homo sapiens
cgatgtacttcttga

SEQ ID NO: 622016 - DNA, 15 bp, Homo sapiens
gatgtacttcttgaa

SEQ ID NO: 622017 - DNA, 15 bp, Homo sapiens
atgtacttcttgaaa

SEQ ID NO: 622018 - DNA, 15 bp, Homo sapiens
tgtacttcttgaaaa

SEQ ID NO: 622019 - DNA, 15 bp, Homo sapiens
gtacttcttgaaaat

SEQ ID NO: 622020 - DNA, 15 bp, Homo sapiens
tacttcttgaaaatg

SEQ ID NO: 622021 - DNA, 15 bp, Homo sapiens
acttcttgaaaatgt

SEQ ID NO: 622022 - DNA, 15 bp, Homo sapiens
cttcttgaaaatgtg

SEQ ID NO: 622023 - DNA, 15 bp, Homo sapiens
ttcttgaaaatgtga

SEQ ID NO: 622024 - DNA, 15 bp, Homo sapiens
tcttgaaaatgtgat

SEQ ID NO: 622025 - DNA, 15 bp, Homo sapiens
cttgaaaatgtgatt

SEQ ID NO: 622026 - DNA, 15 bp, Homo sapiens
ttgaaaatgtgattt

SEQ ID NO: 622027 - DNA, 15 bp, Homo sapiens
tgaaaatgtgattta

SEQ ID NO: 622028 - DNA, 15 bp, Homo sapiens
gaaaatgtgatttaa

SEQ ID NO: 622029 - DNA, 15 bp, Homo sapiens
aaaatgtgatttaac

SEQ ID NO: 622030 - DNA, 15 bp, Homo sapiens
aaatgtgatttaaca

SEQ ID NO: 622031 - DNA, 15 bp, Homo sapiens
aatgtgatttaacaa

SEQ ID NO: 622032 - DNA, 15 bp, Homo sapiens
atgtgatttaacaag

SEQ ID NO: 622033 - DNA, 15 bp, Homo sapiens
tgtgatttaacaaga

SEQ ID NO: 622034 - DNA, 15 bp, Homo sapiens
gtgatttaacaagat

SEQ ID NO: 622035 - DNA, 15 bp, Homo sapiens
tgatttaacaagatg

SEQ ID NO: 622036 - DNA, 15 bp, Homo sapiens
gatttaacaagatga

SEQ ID NO: 622037 - DNA, 15 bp, Homo sapiens
atttaacaagatgat

SEQ ID NO: 622038 - DNA, 15 bp, Homo sapiens
tttaacaagatgatt

SEQ ID NO: 622039 - DNA, 15 bp, Homo sapiens
ttaacaagatgatta

SEQ ID NO: 622040 - DNA, 15 bp, Homo sapiens
taacaagatgattat

SEQ ID NO: 622041 - DNA, 15 bp, Homo sapiens
aacaagatgattatt

SEQ ID NO: 622042 - DNA, 15 bp, Homo sapiens
acaagatgattatta

SEQ ID NO: 622043 - DNA, 15 bp, Homo sapiens
caagatgattattaa

SEQ ID NO: 622044 - DNA, 15 bp, Homo sapiens
aagatgattattaac

SEQ ID NO: 622045 - DNA, 15 bp, Homo sapiens
agatgattattaaca

SEQ ID NO: 622046 - DNA, 15 bp, Homo sapiens
gatgattattaacaa

SEQ ID NO: 622047 - DNA, 15 bp, Homo sapiens
atgattattaacaaa

SEQ ID NO: 622048 - DNA, 15 bp, Homo sapiens
tgattattaacaaaa

SEQ ID NO: 622049 - DNA, 15 bp, Homo sapiens
gattattaacaaaag

SEQ ID NO: 622050 - DNA, 15 bp, Homo sapiens
attattaacaaaaga

SEQ ID NO: 622051 - DNA, 15 bp, Homo sapiens
ttattaacaaaagat

SEQ ID NO: 622052 - DNA, 15 bp, Homo sapiens
tattaacaaaagata

SEQ ID NO: 622053 - DNA, 15 bp, Homo sapiens
attaacaaaagataa

SEQ ID NO: 622054 - DNA, 15 bp, Homo sapiens
ttaacaaaagataaa

SEQ ID NO: 622055 - DNA, 15 bp, Homo sapiens
taacaaaagataaat

SEQ ID NO: 622056 - DNA, 15 bp, Homo sapiens
aacaaaagataaatc

SEQ ID NO: 622057 - DNA, 15 bp, Homo sapiens
acaaaagataaatct

SEQ ID NO: 622058 - DNA, 15 bp, Homo sapiens
caaaagataaatctc

SEQ ID NO: 622059 - DNA, 15 bp, Homo sapiens
aaaagataaatctca

SEQ ID NO: 622060 - DNA, 15 bp, Homo sapiens
aaagataaatctcac

SEQ ID NO: 622061 - DNA, 15 bp, Homo sapiens
aagataaatctcaca

SEQ ID NO: 622062 - DNA, 15 bp, Homo sapiens
agataaatctcacag

SEQ ID NO: 622063 - DNA, 15 bp, Homo sapiens
gataaatctcacaga

SEQ ID NO: 622064 - DNA, 15 bp, Homo sapiens
ataaatctcacagac

SEQ ID NO: 622065 - DNA, 15 bp, Homo sapiens
taaatctcacagacc

SEQ ID NO: 622066 - DNA, 15 bp, Homo sapiens
aaatctcacagaccg

SEQ ID NO: 622067 - DNA, 15 bp, Homo sapiens
aatctcacagaccgt

SEQ ID NO: 622068 - DNA, 15 bp, Homo sapiens
atctcacagaccgta

SEQ ID NO: 622069 - DNA, 15 bp, Homo sapiens
tctcacagaccgtat

SEQ ID NO: 622070 - DNA, 15 bp, Homo sapiens
ctcacagaccgtatg

SEQ ID NO: 622071 - DNA, 15 bp, Homo sapiens
tcacagaccgtatgt

SEQ ID NO: 622072 - DNA, 15 bp, Homo sapiens
cacagaccgtatgtc

SEQ ID NO: 622073 - DNA, 15 bp, Homo sapiens
acagaccgtatgtct

SEQ ID NO: 622074 - DNA, 15 bp, Homo sapiens
cagaccgtatgtctg

SEQ ID NO: 622075 - DNA, 15 bp, Homo sapiens
agaccgtatgtctgt

SEQ ID NO: 622076 - DNA, 15 bp, Homo sapiens
gaccgtatgtctgtc

SEQ ID NO: 622077 - DNA, 15 bp, Homo sapiens
accgtatgtctgtca

SEQ ID NO: 622078 - DNA, 15 bp, Homo sapiens
ccgtatgtctgtcaa

SEQ ID NO: 622079 - DNA, 15 bp, Homo sapiens
cgtatgtctgtcaac

SEQ ID NO: 622080 - DNA, 15 bp, Homo sapiens
gtatgtctgtcaaca

SEQ ID NO: 622081 - DNA, 15 bp, Homo sapiens
tatgtctgtcaacat

SEQ ID NO: 622082 - DNA, 15 bp, Homo sapiens
atgtctgtcaacata

SEQ ID NO: 622083 - DNA, 15 bp, Homo sapiens
tgtctgtcaacatag

SEQ ID NO: 622084 - DNA, 15 bp, Homo sapiens
gtctgtcaacataga

SEQ ID NO: 622085 - DNA, 15 bp, Homo sapiens
tctgtcaacatagaa

SEQ ID NO: 622086 - DNA, 15 bp, Homo sapiens
ctgtcaacatagaaa

SEQ ID NO: 622087 - DNA, 15 bp, Homo sapiens
tgtcaacatagaaaa

SEQ ID NO: 622088 - DNA, 15 bp, Homo sapiens
gtcaacatagaaaat

SEQ ID NO: 622089 - DNA, 15 bp, Homo sapiens
tcaacatagaaaatt

SEQ ID NO: 622090 - DNA, 15 bp, Homo sapiens
caacatagaaaattc

SEQ ID NO: 622091 - DNA, 15 bp, Homo sapiens
aacatagaaaattca

SEQ ID NO: 622092 - DNA, 15 bp, Homo sapiens
acatagaaaattcaa

SEQ ID NO: 622093 - DNA, 15 bp, Homo sapiens
catagaaaattcaag

SEQ ID NO: 622094 - DNA, 15 bp, Homo sapiens
atagaaaattcaaga

SEQ ID NO: 622095 - DNA, 15 bp, Homo sapiens
tagaaaattcaagag

SEQ ID NO: 622096 - DNA, 15 bp, Homo sapiens
agaaaattcaagaga

SEQ ID NO: 622097 - DNA, 15 bp, Homo sapiens
gaaaattcaagagac

SEQ ID NO: 622098 - DNA, 15 bp, Homo sapiens
aaaattcaagagact

SEQ ID NO: 622099 - DNA, 15 bp, Homo sapiens
aaattcaagagactc

SEQ ID NO: 622100 - DNA, 15 bp, Homo sapiens
aattcaagagactct

SEQ ID NO: 622101 - DNA, 15 bp, Homo sapiens
attcaagagactcta

SEQ ID NO: 622102 - DNA, 15 bp, Homo sapiens
ttcaagagactctat

SEQ ID NO: 622103 - DNA, 15 bp, Homo sapiens
tcaagagactctata

SEQ ID NO: 622104 - DNA, 15 bp, Homo sapiens
caagagactctatag

SEQ ID NO: 622105 - DNA, 15 bp, Homo sapiens
aagagactctataga

SEQ ID NO: 622106 - DNA, 15 bp, Homo sapiens
agagactctatagac

SEQ ID NO: 622107 - DNA, 15 bp, Homo sapiens
gagactctatagaca

SEQ ID NO: 622108 - DNA, 15 bp, Homo sapiens
agactctatagacag

SEQ ID NO: 622109 - DNA, 15 bp, Homo sapiens
gactctatagacaga

SEQ ID NO: 622110 - DNA, 15 bp, Homo sapiens
actctatagacagat

SEQ ID NO: 622111 - DNA, 15 bp, Homo sapiens
ctctatagacagatt

SEQ ID NO: 622112 - DNA, 15 bp, Homo sapiens
tctatagacagatta

SEQ ID NO: 622113 - DNA, 15 bp, Homo sapiens
ctatagacagattat

SEQ ID NO: 622114 - DNA, 15 bp, Homo sapiens
tatagacagattatt

SEQ ID NO: 622115 - DNA, 15 bp, Homo sapiens
atagacagattatta

SEQ ID NO: 622116 - DNA, 15 bp, Homo sapiens
tagacagattattag

SEQ ID NO: 622117 - DNA, 15 bp, Homo sapiens
agacagattattaga

SEQ ID NO: 622118 - DNA, 15 bp, Homo sapiens
gacagattattagag

SEQ ID NO: 622119 - DNA, 15 bp, Homo sapiens
acagattattagagc

SEQ ID NO: 622120 - DNA, 15 bp, Homo sapiens
cagattattagagct

SEQ ID NO: 622121 - DNA, 15 bp, Homo sapiens
agattattagagcta

SEQ ID NO: 622122 - DNA, 15 bp, Homo sapiens
gattattagagctaa

SEQ ID NO: 622123 - DNA, 15 bp, Homo sapiens
attattagagctaat

SEQ ID NO: 622124 - DNA, 15 bp, Homo sapiens
ttattagagctaatg

SEQ ID NO: 622125 - DNA, 15 bp, Homo sapiens
tattagagctaatga

SEQ ID NO: 622126 - DNA, 15 bp, Homo sapiens
attagagctaatgag

SEQ ID NO: 622127 - DNA, 15 bp, Homo sapiens
ttagagctaatgaga

SEQ ID NO: 622128 - DNA, 15 bp, Homo sapiens
tagagctaatgagag

SEQ ID NO: 622129 - DNA, 15 bp, Homo sapiens
agagctaatgagagc

SEQ ID NO: 622130 - DNA, 15 bp, Homo sapiens
gagctaatgagagca

SEQ ID NO: 622131 - DNA, 15 bp, Homo sapiens
agctaatgagagcat

SEQ ID NO: 622132 - DNA, 15 bp, Homo sapiens
gctaatgagagcatt

SEQ ID NO: 622133 - DNA, 15 bp, Homo sapiens
ctaatgagagcattg

SEQ ID NO: 622134 - DNA, 15 bp, Homo sapiens
taatgagagcattgc

SEQ ID NO: 622135 - DNA, 15 bp, Homo sapiens
aatgagagcattgca

SEQ ID NO: 622136 - DNA, 15 bp, Homo sapiens
atgagagcattgcag

SEQ ID NO: 622137 - DNA, 15 bp, Homo sapiens
tgagagcattgcagt

SEQ ID NO: 622138 - DNA, 15 bp, Homo sapiens
gagagcattgcagta

SEQ ID NO: 622139 - DNA, 15 bp, Homo sapiens
agagcattgcagtac

SEQ ID NO: 622140 - DNA, 15 bp, Homo sapiens
gagcattgcagtaca

SEQ ID NO: 622141 - DNA, 15 bp, Homo sapiens
agcattgcagtacat

SEQ ID NO: 622142 - DNA, 15 bp, Homo sapiens
gcattgcagtacata

SEQ ID NO: 622143 - DNA, 15 bp, Homo sapiens
cattgcagtacataa

SEQ ID NO: 622144 - DNA, 15 bp, Homo sapiens
attgcagtacataag

SEQ ID NO: 622145 - DNA, 15 bp, Homo sapiens
ttgcagtacataaga

SEQ ID NO: 622146 - DNA, 15 bp, Homo sapiens
tgcagtacataagat

SEQ ID NO: 622147 - DNA, 15 bp, Homo sapiens
gcagtacataagatt

SEQ ID NO: 622148 - DNA, 15 bp, Homo sapiens
cagtacataagatta

SEQ ID NO: 622149 - DNA, 15 bp, Homo sapiens
agtacataagattaa

SEQ ID NO: 622150 - DNA, 15 bp, Homo sapiens
gtacataagattaat

SEQ ID NO: 622151 - DNA, 15 bp, Homo sapiens
tacataagattaata

SEQ ID NO: 622152 - DNA, 15 bp, Homo sapiens
acataagattaatat

SEQ ID NO: 622153 - DNA, 15 bp, Homo sapiens
cataagattaatata

SEQ ID NO: 622154 - DNA, 15 bp, Homo sapiens
ataagattaatataa

SEQ ID NO: 622155 - DNA, 15 bp, Homo sapiens
taagattaatataaa

SEQ ID NO: 622156 - DNA, 15 bp, Homo sapiens
aagattaatataaac

SEQ ID NO: 622157 - DNA, 15 bp, Homo sapiens
agattaatataaaca

SEQ ID NO: 622158 - DNA, 15 bp, Homo sapiens
gattaatataaacat

SEQ ID NO: 622159 - DNA, 15 bp, Homo sapiens
attaatataaacatc

SEQ ID NO: 622160 - DNA, 15 bp, Homo sapiens
ttaatataaacatct

SEQ ID NO: 622161 - DNA, 15 bp, Homo sapiens
taatataaacatcta

SEQ ID NO: 622162 - DNA, 15 bp, Homo sapiens
aatataaacatctat

SEQ ID NO: 622163 - DNA, 15 bp, Homo sapiens
atataaacatctatt

SEQ ID NO: 622164 - DNA, 15 bp, Homo sapiens
tataaacatctattt

SEQ ID NO: 622165 - DNA, 15 bp, Homo sapiens
ataaacatctatttc

SEQ ID NO: 622166 - DNA, 15 bp, Homo sapiens
taaacatctatttct

SEQ ID NO: 622167 - DNA, 15 bp, Homo sapiens
aaacatctatttcta

SEQ ID NO: 622168 - DNA, 15 bp, Homo sapiens
aacatctatttctat

SEQ ID NO: 622169 - DNA, 15 bp, Homo sapiens
acatctatttctata

SEQ ID NO: 622170 - DNA, 15 bp, Homo sapiens
catctatttctatac

SEQ ID NO: 622171 - DNA, 15 bp, Homo sapiens
atctatttctataca

SEQ ID NO: 622172 - DNA, 15 bp, Homo sapiens
tctatttctatacac

SEQ ID NO: 622173 - DNA, 15 bp, Homo sapiens
ctatttctatacacc

SEQ ID NO: 622174 - DNA, 15 bp, Homo sapiens
tatttctatacacca

SEQ ID NO: 622175 - DNA, 15 bp, Homo sapiens
atttctatacaccat

SEQ ID NO: 622176 - DNA, 15 bp, Homo sapiens
tttctatacaccata

SEQ ID NO: 622177 - DNA, 15 bp, Homo sapiens
ttctatacaccataa

SEQ ID NO: 622178 - DNA, 15 bp, Homo sapiens
tctatacaccataaa

SEQ ID NO: 622179 - DNA, 15 bp, Homo sapiens
ctatacaccataaaa

SEQ ID NO: 622180 - DNA, 15 bp, Homo sapiens
tatacaccataaaaa

SEQ ID NO: 622181 - DNA, 15 bp, Homo sapiens
atacaccataaaaat

SEQ ID NO: 622182 - DNA, 15 bp, Homo sapiens
tacaccataaaaata

SEQ ID NO: 622183 - DNA, 15 bp, Homo sapiens
acaccataaaaataa

SEQ ID NO: 622184 - DNA, 15 bp, Homo sapiens
caccataaaaataat

SEQ ID NO: 622185 - DNA, 15 bp, Homo sapiens
accataaaaataatt

SEQ ID NO: 622186 - DNA, 15 bp, Homo sapiens
ccataaaaataatta

SEQ ID NO: 622187 - DNA, 15 bp, Homo sapiens
cataaaaataattag

SEQ ID NO: 622188 - DNA, 15 bp, Homo sapiens
ataaaaataattaga

SEQ ID NO: 622189 - DNA, 15 bp, Homo sapiens
taaaaataattagag

SEQ ID NO: 622190 - DNA, 15 bp, Homo sapiens
aaaaataattagaga

SEQ ID NO: 622191 - DNA, 15 bp, Homo sapiens
aaaataattagagaa

SEQ ID NO: 622192 - DNA, 15 bp, Homo sapiens
aaataattagagaat

SEQ ID NO: 622193 - DNA, 15 bp, Homo sapiens
aataattagagaata

SEQ ID NO: 622194 - DNA, 15 bp, Homo sapiens
ataattagagaatat

SEQ ID NO: 622195 - DNA, 15 bp, Homo sapiens
taattagagaatata

SEQ ID NO: 622196 - DNA, 15 bp, Homo sapiens
aattagagaatataa

SEQ ID NO: 622197 - DNA, 15 bp, Homo sapiens
attagagaatataat

SEQ ID NO: 622198 - DNA, 15 bp, Homo sapiens
ttagagaatataata

SEQ ID NO: 622199 - DNA, 15 bp, Homo sapiens
tagagaatataataa

SEQ ID NO: 622200 - DNA, 15 bp, Homo sapiens
agagaatataataaa

SEQ ID NO: 622201 - DNA, 15 bp, Homo sapiens
gagaatataataaaa

SEQ ID NO: 622202 - DNA, 15 bp, Homo sapiens
agaatataataaaaa

SEQ ID NO: 622203 - DNA, 15 bp, Homo sapiens
gaatataataaaaag

SEQ ID NO: 622204 - DNA, 15 bp, Homo sapiens
aatataataaaaaga

SEQ ID NO: 622205 - DNA, 15 bp, Homo sapiens
atataataaaaagaa

SEQ ID NO: 622206 - DNA, 15 bp, Homo sapiens
tataataaaaagaaa

SEQ ID NO: 622207 - DNA, 15 bp, Homo sapiens
ataataaaaagaaag

SEQ ID NO: 622208 - DNA, 15 bp, Homo sapiens
taataaaaagaaagg

SEQ ID NO: 622209 - DNA, 15 bp, Homo sapiens
aataaaaagaaaggt

SEQ ID NO: 622210 - DNA, 15 bp, Homo sapiens
ataaaaagaaaggtt

SEQ ID NO: 622211 - DNA, 15 bp, Homo sapiens
taaaaagaaaggttg

SEQ ID NO: 622212 - DNA, 15 bp, Homo sapiens
aaaaagaaaggttgt

SEQ ID NO: 622213 - DNA, 15 bp, Homo sapiens
aaaagaaaggttgtc

SEQ ID NO: 622214 - DNA, 15 bp, Homo sapiens
aaagaaaggttgtct

SEQ ID NO: 622215 - DNA, 15 bp, Homo sapiens
aagaaaggttgtcta

SEQ ID NO: 622216 - DNA, 15 bp, Homo sapiens
agaaaggttgtctag

SEQ ID NO: 622217 - DNA, 15 bp, Homo sapiens
gaaaggttgtctaga

SEQ ID NO: 622218 - DNA, 15 bp, Homo sapiens
aaaggttgtctagaa

SEQ ID NO: 622219 - DNA, 15 bp, Homo sapiens
aaggttgtctagaaa

SEQ ID NO: 622220 - DNA, 15 bp, Homo sapiens
aggttgtctagaaat

SEQ ID NO: 622221 - DNA, 15 bp, Homo sapiens
ggttgtctagaaata

SEQ ID NO: 622222 - DNA, 15 bp, Homo sapiens
gttgtctagaaatat

SEQ ID NO: 622223 - DNA, 15 bp, Homo sapiens
ttgtctagaaatatt

SEQ ID NO: 622224 - DNA, 15 bp, Homo sapiens
tgtctagaaatattc

SEQ ID NO: 622225 - DNA, 15 bp, Homo sapiens
gtctagaaatattca

SEQ ID NO: 622226 - DNA, 15 bp, Homo sapiens
tctagaaatattcac

SEQ ID NO: 622227 - DNA, 15 bp, Homo sapiens
ctagaaatattcaca

SEQ ID NO: 622228 - DNA, 15 bp, Homo sapiens
tagaaatattcacat

SEQ ID NO: 622229 - DNA, 15 bp, Homo sapiens
agaaatattcacatg

SEQ ID NO: 622230 - DNA, 15 bp, Homo sapiens
gaaatattcacatga

SEQ ID NO: 622231 - DNA, 15 bp, Homo sapiens
aaatattcacatgaa

SEQ ID NO: 622232 - DNA, 15 bp, Homo sapiens
aatattcacatgaaa

SEQ ID NO: 622233 - DNA, 15 bp, Homo sapiens
atattcacatgaaat

SEQ ID NO: 622234 - DNA, 15 bp, Homo sapiens
tattcacatgaaata

SEQ ID NO: 622235 - DNA, 15 bp, Homo sapiens
attcacatgaaatag

SEQ ID NO: 622236 - DNA, 15 bp, Homo sapiens
ttcacatgaaataga

SEQ ID NO: 622237 - DNA, 15 bp, Homo sapiens
tcacatgaaatagaa

SEQ ID NO: 622238 - DNA, 15 bp, Homo sapiens
cacatgaaatagaaa

SEQ ID NO: 622239 - DNA, 15 bp, Homo sapiens
acatgaaatagaaag

SEQ ID NO: 622240 - DNA, 15 bp, Homo sapiens
catgaaatagaaagg

SEQ ID NO: 622241 - DNA, 15 bp, Homo sapiens
atgaaatagaaaggc

SEQ ID NO: 622242 - DNA, 15 bp, Homo sapiens
tgaaatagaaaggca

SEQ ID NO: 622243 - DNA, 15 bp, Homo sapiens
gaaatagaaaggcaa

SEQ ID NO: 622244 - DNA, 15 bp, Homo sapiens
aaatagaaaggcaac

SEQ ID NO: 622245 - DNA, 15 bp, Homo sapiens
aatagaaaggcaacc

SEQ ID NO: 622246 - DNA, 15 bp, Homo sapiens
atagaaaggcaaccc

SEQ ID NO: 622247 - DNA, 15 bp, Homo sapiens
tagaaaggcaacccg

SEQ ID NO: 622248 - DNA, 15 bp, Homo sapiens
agaaaggcaacccgc

SEQ ID NO: 622249 - DNA, 15 bp, Homo sapiens
gaaaggcaacccgca

SEQ ID NO: 622250 - DNA, 15 bp, Homo sapiens
aaaggcaacccgcaa

SEQ ID NO: 622251 - DNA, 15 bp, Homo sapiens
aaggcaacccgcaaa

SEQ ID NO: 622252 - DNA, 15 bp, Homo sapiens
aggcaacccgcaaat

SEQ ID NO: 622253 - DNA, 15 bp, Homo sapiens
ggcaacccgcaaata

SEQ ID NO: 622254 - DNA, 15 bp, Homo sapiens
gcaacccgcaaatac

SEQ ID NO: 622255 - DNA, 15 bp, Homo sapiens
caacccgcaaatacc

SEQ ID NO: 622256 - DNA, 15 bp, Homo sapiens
aacccgcaaataccc

SEQ ID NO: 622257 - DNA, 15 bp, Homo sapiens
acccgcaaataccca

SEQ ID NO: 622258 - DNA, 15 bp, Homo sapiens
cccgcaaatacccat

SEQ ID NO: 622259 - DNA, 15 bp, Homo sapiens
ccgcaaatacccatt

SEQ ID NO: 622260 - DNA, 15 bp, Homo sapiens
cgcaaatacccattt

SEQ ID NO: 622261 - DNA, 15 bp, Homo sapiens
gcaaatacccattta

SEQ ID NO: 622262 - DNA, 15 bp, Homo sapiens
caaatacccatttaa

SEQ ID NO: 622263 - DNA, 15 bp, Homo sapiens
aaatacccatttaac

SEQ ID NO: 622264 - DNA, 15 bp, Homo sapiens
aatacccatttaacc

SEQ ID NO: 622265 - DNA, 15 bp, Homo sapiens
atacccatttaacct

SEQ ID NO: 622266 - DNA, 15 bp, Homo sapiens
tacccatttaacctt

SEQ ID NO: 622267 - DNA, 15 bp, Homo sapiens
acccatttaaccttg

SEQ ID NO: 622268 - DNA, 15 bp, Homo sapiens
cccatttaaccttgg

SEQ ID NO: 622269 - DNA, 15 bp, Homo sapiens
ccatttaaccttggt

SEQ ID NO: 622270 - DNA, 15 bp, Homo sapiens
catttaaccttggtc

SEQ ID NO: 622271 - DNA, 15 bp, Homo sapiens
atttaaccttggtcc

SEQ ID NO: 622272 - DNA, 15 bp, Homo sapiens
tttaaccttggtcca

SEQ ID NO: 622273 - DNA, 15 bp, Homo sapiens
ttaaccttggtccat

SEQ ID NO: 622274 - DNA, 15 bp, Homo sapiens
taaccttggtccata

SEQ ID NO: 622275 - DNA, 15 bp, Homo sapiens
aaccttggtccatat

SEQ ID NO: 622276 - DNA, 15 bp, Homo sapiens
accttggtccatatg

SEQ ID NO: 622277 - DNA, 15 bp, Homo sapiens
ccttggtccatatgg

SEQ ID NO: 622278 - DNA, 15 bp, Homo sapiens
cttggtccatatgga

SEQ ID NO: 622279 - DNA, 15 bp, Homo sapiens
ttggtccatatggat

SEQ ID NO: 622280 - DNA, 15 bp, Homo sapiens
tggtccatatggatt

SEQ ID NO: 622281 - DNA, 15 bp, Homo sapiens
ggtccatatggatta

SEQ ID NO: 622282 - DNA, 15 bp, Homo sapiens
gtccatatggattaa

SEQ ID NO: 622283 - DNA, 15 bp, Homo sapiens
tccatatggattaag

SEQ ID NO: 622284 - DNA, 15 bp, Homo sapiens
ccatatggattaaga

SEQ ID NO: 622285 - DNA, 15 bp, Homo sapiens
catatggattaagac

SEQ ID NO: 622286 - DNA, 15 bp, Homo sapiens
atatggattaagaca

SEQ ID NO: 622287 - DNA, 15 bp, Homo sapiens
tatggattaagacag

SEQ ID NO: 622288 - DNA, 15 bp, Homo sapiens
atggattaagacagt

SEQ ID NO: 622289 - DNA, 15 bp, Homo sapiens
tggattaagacagtt

SEQ ID NO: 622290 - DNA, 15 bp, Homo sapiens
ggattaagacagttt

SEQ ID NO: 622291 - DNA, 15 bp, Homo sapiens
gattaagacagttta

SEQ ID NO: 622292 - DNA, 15 bp, Homo sapiens
attaagacagtttag

SEQ ID NO: 622293 - DNA, 15 bp, Homo sapiens
ttaagacagtttagt

SEQ ID NO: 622294 - DNA, 15 bp, Homo sapiens
taagacagtttagtg

SEQ ID NO: 622295 - DNA, 15 bp, Homo sapiens
aagacagtttagtgg

SEQ ID NO: 622296 - DNA, 15 bp, Homo sapiens
agacagtttagtgga

SEQ ID NO: 622297 - DNA, 15 bp, Homo sapiens
gacagtttagtggag

SEQ ID NO: 622298 - DNA, 15 bp, Homo sapiens
acagtttagtggagt

SEQ ID NO: 622299 - DNA, 15 bp, Homo sapiens
cagtttagtggagtg

SEQ ID NO: 622300 - DNA, 15 bp, Homo sapiens
agtttagtggagtga

SEQ ID NO: 622301 - DNA, 15 bp, Homo sapiens
gtttagtggagtgac

SEQ ID NO: 622302 - DNA, 15 bp, Homo sapiens
tttagtggagtgaca

SEQ ID NO: 622303 - DNA, 15 bp, Homo sapiens
ttagtggagtgacag

SEQ ID NO: 622304 - DNA, 15 bp, Homo sapiens
tagtggagtgacagc

SEQ ID NO: 622305 - DNA, 15 bp, Homo sapiens
agtggagtgacagct

SEQ ID NO: 622306 - DNA, 15 bp, Homo sapiens
gtggagtgacagctt

SEQ ID NO: 622307 - DNA, 15 bp, Homo sapiens
tggagtgacagcttc

SEQ ID NO: 622308 - DNA, 15 bp, Homo sapiens
ggagtgacagcttca

SEQ ID NO: 622309 - DNA, 15 bp, Homo sapiens
gagtgacagcttcaa

SEQ ID NO: 622310 - DNA, 15 bp, Homo sapiens
agtgacagcttcaag

SEQ ID NO: 622311 - DNA, 15 bp, Homo sapiens
gtgacagcttcaagg

SEQ ID NO: 622312 - DNA, 15 bp, Homo sapiens
tgacagcttcaaggt

SEQ ID NO: 622313 - DNA, 15 bp, Homo sapiens
gacagcttcaaggta

SEQ ID NO: 622314 - DNA, 15 bp, Homo sapiens
acagcttcaaggtag

SEQ ID NO: 622315 - DNA, 15 bp, Homo sapiens
cagcttcaaggtaga

SEQ ID NO: 622316 - DNA, 15 bp, Homo sapiens
agcttcaaggtagag

SEQ ID NO: 622317 - DNA, 15 bp, Homo sapiens
gcttcaaggtagaga

SEQ ID NO: 622318 - DNA, 15 bp, Homo sapiens
cttcaaggtagagaa

SEQ ID NO: 622319 - DNA, 15 bp, Homo sapiens
ttcaaggtagagaag

SEQ ID NO: 622320 - DNA, 15 bp, Homo sapiens
tcaaggtagagaaga

SEQ ID NO: 622321 - DNA, 15 bp, Homo sapiens
caaggtagagaagag

SEQ ID NO: 622322 - DNA, 15 bp, Homo sapiens
aaggtagagaagagg

SEQ ID NO: 622323 - DNA, 15 bp, Homo sapiens
aggtagagaagagga

SEQ ID NO: 622324 - DNA, 15 bp, Homo sapiens
ggtagagaagaggaa

SEQ ID NO: 622325 - DNA, 15 bp, Homo sapiens
gtagagaagaggaac

SEQ ID NO: 622326 - DNA, 15 bp, Homo sapiens
tagagaagaggaacc

SEQ ID NO: 622327 - DNA, 15 bp, Homo sapiens
agagaagaggaacct

SEQ ID NO: 622328 - DNA, 15 bp, Homo sapiens
gagaagaggaacctg

SEQ ID NO: 622329 - DNA, 15 bp, Homo sapiens
agaagaggaacctgg

SEQ ID NO: 622330 - DNA, 15 bp, Homo sapiens
gaagaggaacctgga

SEQ ID NO: 622331 - DNA, 15 bp, Homo sapiens
aagaggaacctggag

SEQ ID NO: 622332 - DNA, 15 bp, Homo sapiens
agaggaacctggagg

SEQ ID NO: 622333 - DNA, 15 bp, Homo sapiens
gaggaacctggaggc

SEQ ID NO: 622334 - DNA, 15 bp, Homo sapiens
aggaacctggaggcc

SEQ ID NO: 622335 - DNA, 15 bp, Homo sapiens
ggaacctggaggcca

SEQ ID NO: 622336 - DNA, 15 bp, Homo sapiens
gaacctggaggccac

SEQ ID NO: 622337 - DNA, 15 bp, Homo sapiens
aacctggaggccaca

SEQ ID NO: 622338 - DNA, 15 bp, Homo sapiens
acctggaggccacac

SEQ ID NO: 622339 - DNA, 15 bp, Homo sapiens
cctggaggccacacc

SEQ ID NO: 622340 - DNA, 15 bp, Homo sapiens
ctggaggccacacct

SEQ ID NO: 622341 - DNA, 15 bp, Homo sapiens
tggaggccacacctg

SEQ ID NO: 622342 - DNA, 15 bp, Homo sapiens
ggaggccacacctgg

SEQ ID NO: 622343 - DNA, 15 bp, Homo sapiens
gaggccacacctggg

SEQ ID NO: 622344 - DNA, 15 bp, Homo sapiens
aggccacacctgggc

SEQ ID NO: 622345 - DNA, 15 bp, Homo sapiens
ggccacacctgggcg

SEQ ID NO: 622346 - DNA, 15 bp, Homo sapiens
gccacacctgggcgg

SEQ ID NO: 622347 - DNA, 15 bp, Homo sapiens
ccacacctgggcggg

SEQ ID NO: 622348 - DNA, 15 bp, Homo sapiens
cacacctgggcgggt

SEQ ID NO: 622349 - DNA, 15 bp, Homo sapiens
acacctgggcgggtg

SEQ ID NO: 622350 - DNA, 15 bp, Homo sapiens
cacctgggcgggtgt

SEQ ID NO: 622351 - DNA, 15 bp, Homo sapiens
acctgggcgggtgta

SEQ ID NO: 622352 - DNA, 15 bp, Homo sapiens
cctgggcgggtgtaa

SEQ ID NO: 622353 - DNA, 15 bp, Homo sapiens
ctgggcgggtgtaag

SEQ ID NO: 622354 - DNA, 15 bp, Homo sapiens
tgggcgggtgtaagg

SEQ ID NO: 622355 - DNA, 15 bp, Homo sapiens
gggcgggtgtaaggc

SEQ ID NO: 622356 - DNA, 15 bp, Homo sapiens
ggcgggtgtaaggcc

SEQ ID NO: 622357 - DNA, 15 bp, Homo sapiens
gcgggtgtaaggcct

SEQ ID NO: 622358 - DNA, 15 bp, Homo sapiens
cgggtgtaaggcctt

SEQ ID NO: 622359 - DNA, 15 bp, Homo sapiens
gggtgtaaggccttc

SEQ ID NO: 622360 - DNA, 15 bp, Homo sapiens
ggtgtaaggccttcc

SEQ ID NO: 622361 - DNA, 15 bp, Homo sapiens
gtgtaaggccttccc

SEQ ID NO: 622362 - DNA, 15 bp, Homo sapiens
tgtaaggccttccca

SEQ ID NO: 622363 - DNA, 15 bp, Homo sapiens
gtaaggccttcccaa

SEQ ID NO: 622364 - DNA, 15 bp, Homo sapiens
taaggccttcccaaa

SEQ ID NO: 622365 - DNA, 15 bp, Homo sapiens
aaggccttcccaaag

SEQ ID NO: 622366 - DNA, 15 bp, Homo sapiens
aggccttcccaaagc

SEQ ID NO: 622367 - DNA, 15 bp, Homo sapiens
ggccttcccaaagcc

SEQ ID NO: 622368 - DNA, 15 bp, Homo sapiens
gccttcccaaagcct

SEQ ID NO: 622369 - DNA, 15 bp, Homo sapiens
ccttcccaaagcctg

SEQ ID NO: 622370 - DNA, 15 bp, Homo sapiens
cttcccaaagcctga

SEQ ID NO: 622371 - DNA, 15 bp, Homo sapiens
ttcccaaagcctgac

SEQ ID NO: 622372 - DNA, 15 bp, Homo sapiens
tcccaaagcctgact

SEQ ID NO: 622373 - DNA, 15 bp, Homo sapiens
cccaaagcctgactt

SEQ ID NO: 622374 - DNA, 15 bp, Homo sapiens
ccaaagcctgacttt

SEQ ID NO: 622375 - DNA, 15 bp, Homo sapiens
caaagcctgactttg

SEQ ID NO: 622376 - DNA, 15 bp, Homo sapiens
aaagcctgactttgt

SEQ ID NO: 622377 - DNA, 15 bp, Homo sapiens
aagcctgactttgta

SEQ ID NO: 622378 - DNA, 15 bp, Homo sapiens
agcctgactttgtat

SEQ ID NO: 622379 - DNA, 15 bp, Homo sapiens
gcctgactttgtatc

SEQ ID NO: 622380 - DNA, 15 bp, Homo sapiens
cctgactttgtatct

SEQ ID NO: 622381 - DNA, 15 bp, Homo sapiens
ctgactttgtatctt

SEQ ID NO: 622382 - DNA, 15 bp, Homo sapiens
tgactttgtatcttc

SEQ ID NO: 622383 - DNA, 15 bp, Homo sapiens
gactttgtatcttct

SEQ ID NO: 622384 - DNA, 15 bp, Homo sapiens
actttgtatcttctc

SEQ ID NO: 622385 - DNA, 15 bp, Homo sapiens
ctttgtatcttctcc

SEQ ID NO: 622386 - DNA, 15 bp, Homo sapiens
tttgtatcttctcct

SEQ ID NO: 622387 - DNA, 15 bp, Homo sapiens
ttgtatcttctcctc

SEQ ID NO: 622388 - DNA, 15 bp, Homo sapiens
tgtatcttctcctcc

SEQ ID NO: 622389 - DNA, 15 bp, Homo sapiens
gtatcttctcctcct

SEQ ID NO: 622390 - DNA, 15 bp, Homo sapiens
tatcttctcctcctt

SEQ ID NO: 622391 - DNA, 15 bp, Homo sapiens
atcttctcctccttc

SEQ ID NO: 622392 - DNA, 15 bp, Homo sapiens
tcttctcctccttct

SEQ ID NO: 622393 - DNA, 15 bp, Homo sapiens
cttctcctccttctg

SEQ ID NO: 622394 - DNA, 15 bp, Homo sapiens
ttctcctccttctgc

SEQ ID NO: 622395 - DNA, 15 bp, Homo sapiens
tctcctccttctgct

SEQ ID NO: 622396 - DNA, 15 bp, Homo sapiens
ctcctccttctgctc

SEQ ID NO: 622397 - DNA, 15 bp, Homo sapiens
tcctccttctgctct

SEQ ID NO: 622398 - DNA, 15 bp, Homo sapiens
cctccttctgctctt

SEQ ID NO: 622399 - DNA, 15 bp, Homo sapiens
ctccttctgctcttc

SEQ ID NO: 622400 - DNA, 15 bp, Homo sapiens
tccttctgctcttcc

SEQ ID NO: 622401 - DNA, 15 bp, Homo sapiens
ccttctgctcttccc

SEQ ID NO: 622402 - DNA, 15 bp, Homo sapiens
cttctgctcttccct

SEQ ID NO: 622403 - DNA, 15 bp, Homo sapiens
ttctgctcttccctc

SEQ ID NO: 622404 - DNA, 15 bp, Homo sapiens
tctgctcttccctct

SEQ ID NO: 622405 - DNA, 15 bp, Homo sapiens
ctgctcttccctctt

SEQ ID NO: 622406 - DNA, 15 bp, Homo sapiens
tgctcttccctcttc

SEQ ID NO: 622407 - DNA, 15 bp, Homo sapiens
gctcttccctcttca

SEQ ID NO: 622408 - DNA, 15 bp, Homo sapiens
ctcttccctcttcat

SEQ ID NO: 622409 - DNA, 15 bp, Homo sapiens
tcttccctcttcatc

SEQ ID NO: 622410 - DNA, 15 bp, Homo sapiens
cttccctcttcatcg

SEQ ID NO: 622411 - DNA, 15 bp, Homo sapiens
ttccctcttcatcgc

SEQ ID NO: 622412 - DNA, 15 bp, Homo sapiens
tccctcttcatcgcc

SEQ ID NO: 622413 - DNA, 15 bp, Homo sapiens
ccctcttcatcgccc

SEQ ID NO: 622414 - DNA, 15 bp, Homo sapiens
cctcttcatcgccct

SEQ ID NO: 622415 - DNA, 15 bp, Homo sapiens
ctcttcatcgccctc

SEQ ID NO: 622416 - DNA, 15 bp, Homo sapiens
tcttcatcgccctct

SEQ ID NO: 622417 - DNA, 15 bp, Homo sapiens
cttcatcgccctctc

SEQ ID NO: 622418 - DNA, 15 bp, Homo sapiens
ttcatcgccctctcc

SEQ ID NO: 622419 - DNA, 15 bp, Homo sapiens
tcatcgccctctccc

SEQ ID NO: 622420 - DNA, 15 bp, Homo sapiens
catcgccctctccct

SEQ ID NO: 622421 - DNA, 15 bp, Homo sapiens
atcgccctctccctg

SEQ ID NO: 622422 - DNA, 15 bp, Homo sapiens
tcgccctctccctgt

SEQ ID NO: 622423 - DNA, 15 bp, Homo sapiens
cgccctctccctgtg

SEQ ID NO: 622424 - DNA, 15 bp, Homo sapiens
gccctctccctgtgt

SEQ ID NO: 622425 - DNA, 15 bp, Homo sapiens
ccctctccctgtgtc

SEQ ID NO: 622426 - DNA, 15 bp, Homo sapiens
cctctccctgtgtct

SEQ ID NO: 622427 - DNA, 15 bp, Homo sapiens
ctctccctgtgtctc

SEQ ID NO: 622428 - DNA, 15 bp, Homo sapiens
tctccctgtgtctct

SEQ ID NO: 622429 - DNA, 15 bp, Homo sapiens
ctccctgtgtctctg

SEQ ID NO: 622430 - DNA, 15 bp, Homo sapiens
tccctgtgtctctgg

SEQ ID NO: 622431 - DNA, 15 bp, Homo sapiens
ccctgtgtctctggc

SEQ ID NO: 622432 - DNA, 15 bp, Homo sapiens
cctgtgtctctggcc

SEQ ID NO: 622433 - DNA, 15 bp, Homo sapiens
ctgtgtctctggccc

SEQ ID NO: 622434 - DNA, 15 bp, Homo sapiens
tgtgtctctggccct

SEQ ID NO: 622435 - DNA, 15 bp, Homo sapiens
gtgtctctggccctg

SEQ ID NO: 622436 - DNA, 15 bp, Homo sapiens
tgtctctggccctgc

SEQ ID NO: 622437 - DNA, 15 bp, Homo sapiens
gtctctggccctgct

SEQ ID NO: 622438 - DNA, 15 bp, Homo sapiens
tctctggccctgctg

SEQ ID NO: 622439 - DNA, 15 bp, Homo sapiens
ctctggccctgctgc

SEQ ID NO: 622440 - DNA, 15 bp, Homo sapiens
tctggccctgctgca

SEQ ID NO: 622441 - DNA, 15 bp, Homo sapiens
ctggccctgctgcag

SEQ ID NO: 622442 - DNA, 15 bp, Homo sapiens
tggccctgctgcagg

SEQ ID NO: 622443 - DNA, 15 bp, Homo sapiens
ggccctgctgcaggc

SEQ ID NO: 622444 - DNA, 15 bp, Homo sapiens
gccctgctgcaggct

SEQ ID NO: 622445 - DNA, 15 bp, Homo sapiens
ccctgctgcaggctg

SEQ ID NO: 622446 - DNA, 15 bp, Homo sapiens
cctgctgcaggctga

SEQ ID NO: 622447 - DNA, 15 bp, Homo sapiens
ctgctgcaggctgac

SEQ ID NO: 622448 - DNA, 15 bp, Homo sapiens
tgctgcaggctgacc

SEQ ID NO: 622449 - DNA, 15 bp, Homo sapiens
gctgcaggctgacca

SEQ ID NO: 622450 - DNA, 15 bp, Homo sapiens
ctgcaggctgaccac

SEQ ID NO: 622451 - DNA, 15 bp, Homo sapiens
tgcaggctgaccact

SEQ ID NO: 622452 - DNA, 15 bp, Homo sapiens
gcaggctgaccactt

SEQ ID NO: 622453 - DNA, 15 bp, Homo sapiens
caggctgaccacttc

SEQ ID NO: 622454 - DNA, 15 bp, Homo sapiens
aggctgaccacttca

SEQ ID NO: 622455 - DNA, 15 bp, Homo sapiens
ggctgaccacttcag

SEQ ID NO: 622456 - DNA, 15 bp, Homo sapiens
gctgaccacttcagt

SEQ ID NO: 622457 - DNA, 15 bp, Homo sapiens
ctgaccacttcagtg

SEQ ID NO: 622458 - DNA, 15 bp, Homo sapiens
tgaccacttcagtgg

SEQ ID NO: 622459 - DNA, 15 bp, Homo sapiens
gaccacttcagtgga

SEQ ID NO: 622460 - DNA, 15 bp, Homo sapiens
accacttcagtggat

SEQ ID NO: 622461 - DNA, 15 bp, Homo sapiens
ccacttcagtggatg

SEQ ID NO: 622462 - DNA, 15 bp, Homo sapiens
cacttcagtggatgc

SEQ ID NO: 622463 - DNA, 15 bp, Homo sapiens
acttcagtggatgct

SEQ ID NO: 622464 - DNA, 15 bp, Homo sapiens
cttcagtggatgctg

SEQ ID NO: 622465 - DNA, 15 bp, Homo sapiens
ttcagtggatgctgt

SEQ ID NO: 622466 - DNA, 15 bp, Homo sapiens
tcagtggatgctgtg

SEQ ID NO: 622467 - DNA, 15 bp, Homo sapiens
cagtggatgctgtgg

SEQ ID NO: 622468 - DNA, 15 bp, Homo sapiens
agtggatgctgtggt

SEQ ID NO: 622469 - DNA, 15 bp, Homo sapiens
gtggatgctgtggtt

SEQ ID NO: 622470 - DNA, 15 bp, Homo sapiens
tggatgctgtggttg

SEQ ID NO: 622471 - DNA, 15 bp, Homo sapiens
ggatgctgtggttgc

SEQ ID NO: 622472 - DNA, 15 bp, Homo sapiens
gatgctgtggttgcc

SEQ ID NO: 622473 - DNA, 15 bp, Homo sapiens
atgctgtggttgcca

SEQ ID NO: 622474 - DNA, 15 bp, Homo sapiens
tgctgtggttgccat

SEQ ID NO: 622475 - DNA, 15 bp, Homo sapiens
gctgtggttgccatc

SEQ ID NO: 622476 - DNA, 15 bp, Homo sapiens
ctgtggttgccatct

SEQ ID NO: 622477 - DNA, 15 bp, Homo sapiens
tgtggttgccatctg

SEQ ID NO: 622478 - DNA, 15 bp, Homo sapiens
gtggttgccatctgc

SEQ ID NO: 622479 - DNA, 15 bp, Homo sapiens
tggttgccatctgcg

SEQ ID NO: 622480 - DNA, 15 bp, Homo sapiens
ggttgccatctgcgt

SEQ ID NO: 622481 - DNA, 15 bp, Homo sapiens
gttgccatctgcgtg

SEQ ID NO: 622482 - DNA, 15 bp, Homo sapiens
ttgccatctgcgtga

SEQ ID NO: 622483 - DNA, 15 bp, Homo sapiens
tgccatctgcgtgat

SEQ ID NO: 622484 - DNA, 15 bp, Homo sapiens
gccatctgcgtgatt

SEQ ID NO: 622485 - DNA, 15 bp, Homo sapiens
ccatctgcgtgattt

SEQ ID NO: 622486 - DNA, 15 bp, Homo sapiens
catctgcgtgatttt

SEQ ID NO: 622487 - DNA, 15 bp, Homo sapiens
atctgcgtgattttc

SEQ ID NO: 622488 - DNA, 15 bp, Homo sapiens
tctgcgtgattttct

SEQ ID NO: 622489 - DNA, 15 bp, Homo sapiens
ctgcgtgattttctc

SEQ ID NO: 622490 - DNA, 15 bp, Homo sapiens
tgcgtgattttctcc

SEQ ID NO: 622491 - DNA, 15 bp, Homo sapiens
gcgtgattttctcca

SEQ ID NO: 622492 - DNA, 15 bp, Homo sapiens
cgtgattttctccat

SEQ ID NO: 622493 - DNA, 15 bp, Homo sapiens
gtgattttctccatg

SEQ ID NO: 622494 - DNA, 15 bp, Homo sapiens
tgattttctccatgt

SEQ ID NO: 622495 - DNA, 15 bp, Homo sapiens
gattttctccatgtc

SEQ ID NO: 622496 - DNA, 15 bp, Homo sapiens
attttctccatgtcc

SEQ ID NO: 622497 - DNA, 15 bp, Homo sapiens
ttttctccatgtcct

SEQ ID NO: 622498 - DNA, 15 bp, Homo sapiens
tttctccatgtcctt

SEQ ID NO: 622499 - DNA, 15 bp, Homo sapiens
ttctccatgtccttc

SEQ ID NO: 622500 - DNA, 15 bp, Homo sapiens
tctccatgtccttcg

SEQ ID NO: 622501 - DNA, 15 bp, Homo sapiens
ctccatgtccttcgt

SEQ ID NO: 622502 - DNA, 15 bp, Homo sapiens
tccatgtccttcgtc

SEQ ID NO: 622503 - DNA, 15 bp, Homo sapiens
ccatgtccttcgtcc

SEQ ID NO: 622504 - DNA, 15 bp, Homo sapiens
catgtccttcgtccc

SEQ ID NO: 622505 - DNA, 15 bp, Homo sapiens
atgtccttcgtccca

SEQ ID NO: 622506 - DNA, 15 bp, Homo sapiens
tgtccttcgtcccag

SEQ ID NO: 622507 - DNA, 15 bp, Homo sapiens
gtccttcgtcccagc

SEQ ID NO: 622508 - DNA, 15 bp, Homo sapiens
tccttcgtcccagcc

SEQ ID NO: 622509 - DNA, 15 bp, Homo sapiens
ccttcgtcccagcca

SEQ ID NO: 622510 - DNA, 15 bp, Homo sapiens
cttcgtcccagccag

SEQ ID NO: 622511 - DNA, 15 bp, Homo sapiens
ttcgtcccagccagc

SEQ ID NO: 622512 - DNA, 15 bp, Homo sapiens
tcgtcccagccagct

SEQ ID NO: 622513 - DNA, 15 bp, Homo sapiens
cgtcccagccagctt

SEQ ID NO: 622514 - DNA, 15 bp, Homo sapiens
gtcccagccagcttt

SEQ ID NO: 622515 - DNA, 15 bp, Homo sapiens
tcccagccagctttg

SEQ ID NO: 622516 - DNA, 15 bp, Homo sapiens
cccagccagctttgt

SEQ ID NO: 622517 - DNA, 15 bp, Homo sapiens
ccagccagctttgtc

SEQ ID NO: 622518 - DNA, 15 bp, Homo sapiens
cagccagctttgtcc

SEQ ID NO: 622519 - DNA, 15 bp, Homo sapiens
agccagctttgtcct

SEQ ID NO: 622520 - DNA, 15 bp, Homo sapiens
gccagctttgtcctt

SEQ ID NO: 622521 - DNA, 15 bp, Homo sapiens
ccagctttgtccttt

SEQ ID NO: 622522 - DNA, 15 bp, Homo sapiens
cagctttgtccttta

SEQ ID NO: 622523 - DNA, 15 bp, Homo sapiens
agctttgtcctttat

SEQ ID NO: 622524 - DNA, 15 bp, Homo sapiens
gctttgtcctttatt

SEQ ID NO: 622525 - DNA, 15 bp, Homo sapiens
ctttgtcctttattt

SEQ ID NO: 622526 - DNA, 15 bp, Homo sapiens
tttgtcctttatttg

SEQ ID NO: 622527 - DNA, 15 bp, Homo sapiens
ttgtcctttatttga

SEQ ID NO: 622528 - DNA, 15 bp, Homo sapiens
tgtcctttatttgat

SEQ ID NO: 622529 - DNA, 15 bp, Homo sapiens
gtcctttatttgatc

SEQ ID NO: 622530 - DNA, 15 bp, Homo sapiens
tcctttatttgatcc

SEQ ID NO: 622531 - DNA, 15 bp, Homo sapiens
cctttatttgatcca

SEQ ID NO: 622532 - DNA, 15 bp, Homo sapiens
ctttatttgatccag

SEQ ID NO: 622533 - DNA, 15 bp, Homo sapiens
tttatttgatccagg

SEQ ID NO: 622534 - DNA, 15 bp, Homo sapiens
ttatttgatccagga

SEQ ID NO: 622535 - DNA, 15 bp, Homo sapiens
tatttgatccaggag

SEQ ID NO: 622536 - DNA, 15 bp, Homo sapiens
atttgatccaggagc

SEQ ID NO: 622537 - DNA, 15 bp, Homo sapiens
tttgatccaggagcg

SEQ ID NO: 622538 - DNA, 15 bp, Homo sapiens
ttgatccaggagcgg

SEQ ID NO: 622539 - DNA, 15 bp, Homo sapiens
tgatccaggagcggg

SEQ ID NO: 622540 - DNA, 15 bp, Homo sapiens
gatccaggagcgggt

SEQ ID NO: 622541 - DNA, 15 bp, Homo sapiens
atccaggagcgggtg

SEQ ID NO: 622542 - DNA, 15 bp, Homo sapiens
tccaggagcgggtga

SEQ ID NO: 622543 - DNA, 15 bp, Homo sapiens
ccaggagcgggtgaa

SEQ ID NO: 622544 - DNA, 15 bp, Homo sapiens
caggagcgggtgaac

SEQ ID NO: 622545 - DNA, 15 bp, Homo sapiens
aggagcgggtgaaca

SEQ ID NO: 622546 - DNA, 15 bp, Homo sapiens
ggagcgggtgaacaa

SEQ ID NO: 622547 - DNA, 15 bp, Homo sapiens
gagcgggtgaacaaa

SEQ ID NO: 622548 - DNA, 15 bp, Homo sapiens
agcgggtgaacaaat

SEQ ID NO: 622549 - DNA, 15 bp, Homo sapiens
gcgggtgaacaaatc

SEQ ID NO: 622550 - DNA, 15 bp, Homo sapiens
cgggtgaacaaatcc

SEQ ID NO: 622551 - DNA, 15 bp, Homo sapiens
gggtgaacaaatcca

SEQ ID NO: 622552 - DNA, 15 bp, Homo sapiens
ggtgaacaaatccaa

SEQ ID NO: 622553 - DNA, 15 bp, Homo sapiens
gtgaacaaatccaag

SEQ ID NO: 622554 - DNA, 15 bp, Homo sapiens
tgaacaaatccaagc

SEQ ID NO: 622555 - DNA, 15 bp, Homo sapiens
gaacaaatccaagca

SEQ ID NO: 622556 - DNA, 15 bp, Homo sapiens
aacaaatccaagcac

SEQ ID NO: 622557 - DNA, 15 bp, Homo sapiens
acaaatccaagcacc

SEQ ID NO: 622558 - DNA, 15 bp, Homo sapiens
caaatccaagcacct

SEQ ID NO: 622559 - DNA, 15 bp, Homo sapiens
aaatccaagcacctc

SEQ ID NO: 622560 - DNA, 15 bp, Homo sapiens
aatccaagcacctcc

SEQ ID NO: 622561 - DNA, 15 bp, Homo sapiens
atccaagcacctcca

SEQ ID NO: 622562 - DNA, 15 bp, Homo sapiens
tccaagcacctccag

SEQ ID NO: 622563 - DNA, 15 bp, Homo sapiens
ccaagcacctccagt

SEQ ID NO: 622564 - DNA, 15 bp, Homo sapiens
caagcacctccagtt

SEQ ID NO: 622565 - DNA, 15 bp, Homo sapiens
aagcacctccagttt

SEQ ID NO: 622566 - DNA, 15 bp, Homo sapiens
agcacctccagttta

SEQ ID NO: 622567 - DNA, 15 bp, Homo sapiens
gcacctccagtttat

SEQ ID NO: 622568 - DNA, 15 bp, Homo sapiens
cacctccagtttatc

SEQ ID NO: 622569 - DNA, 15 bp, Homo sapiens
acctccagtttatca

SEQ ID NO: 622570 - DNA, 15 bp, Homo sapiens
cctccagtttatcag

SEQ ID NO: 622571 - DNA, 15 bp, Homo sapiens
ctccagtttatcagt

SEQ ID NO: 622572 - DNA, 15 bp, Homo sapiens
tccagtttatcagtg

SEQ ID NO: 622573 - DNA, 15 bp, Homo sapiens
ccagtttatcagtgg

SEQ ID NO: 622574 - DNA, 15 bp, Homo sapiens
cagtttatcagtgga

SEQ ID NO: 622575 - DNA, 15 bp, Homo sapiens
agtttatcagtggag

SEQ ID NO: 622576 - DNA, 15 bp, Homo sapiens
gtttatcagtggagt

SEQ ID NO: 622577 - DNA, 15 bp, Homo sapiens
tttatcagtggagtg

SEQ ID NO: 622578 - DNA, 15 bp, Homo sapiens
ttatcagtggagtga

SEQ ID NO: 622579 - DNA, 15 bp, Homo sapiens
tatcagtggagtgag

SEQ ID NO: 622580 - DNA, 15 bp, Homo sapiens
atcagtggagtgagc

SEQ ID NO: 622581 - DNA, 15 bp, Homo sapiens
tcagtggagtgagcc

SEQ ID NO: 622582 - DNA, 15 bp, Homo sapiens
cagtggagtgagccc

SEQ ID NO: 622583 - DNA, 15 bp, Homo sapiens
agtggagtgagcccc

SEQ ID NO: 622584 - DNA, 15 bp, Homo sapiens
gtggagtgagcccca

SEQ ID NO: 622585 - DNA, 15 bp, Homo sapiens
tggagtgagccccac

SEQ ID NO: 622586 - DNA, 15 bp, Homo sapiens
ggagtgagccccacc

SEQ ID NO: 622587 - DNA, 15 bp, Homo sapiens
gagtgagccccacca

SEQ ID NO: 622588 - DNA, 15 bp, Homo sapiens
agtgagccccaccac

SEQ ID NO: 622589 - DNA, 15 bp, Homo sapiens
gtgagccccaccacc

SEQ ID NO: 622590 - DNA, 15 bp, Homo sapiens
tgagccccaccacct

SEQ ID NO: 622591 - DNA, 15 bp, Homo sapiens
gagccccaccaccta

SEQ ID NO: 622592 - DNA, 15 bp, Homo sapiens
agccccaccacctac

SEQ ID NO: 622593 - DNA, 15 bp, Homo sapiens
gccccaccacctact

SEQ ID NO: 622594 - DNA, 15 bp, Homo sapiens
ccccaccacctactg

SEQ ID NO: 622595 - DNA, 15 bp, Homo sapiens
cccaccacctactgg

SEQ ID NO: 622596 - DNA, 15 bp, Homo sapiens
ccaccacctactggg

SEQ ID NO: 622597 - DNA, 15 bp, Homo sapiens
caccacctactgggt

SEQ ID NO: 622598 - DNA, 15 bp, Homo sapiens
accacctactgggtg

SEQ ID NO: 622599 - DNA, 15 bp, Homo sapiens
ccacctactgggtga

SEQ ID NO: 622600 - DNA, 15 bp, Homo sapiens
cacctactgggtgac

SEQ ID NO: 622601 - DNA, 15 bp, Homo sapiens
acctactgggtgacc

SEQ ID NO: 622602 - DNA, 15 bp, Homo sapiens
cctactgggtgacca

SEQ ID NO: 622603 - DNA, 15 bp, Homo sapiens
ctactgggtgaccaa

SEQ ID NO: 622604 - DNA, 15 bp, Homo sapiens
tactgggtgaccaac

SEQ ID NO: 622605 - DNA, 15 bp, Homo sapiens
actgggtgaccaact

SEQ ID NO: 622606 - DNA, 15 bp, Homo sapiens
ctgggtgaccaactt

SEQ ID NO: 622607 - DNA, 15 bp, Homo sapiens
tgggtgaccaacttc

SEQ ID NO: 622608 - DNA, 15 bp, Homo sapiens
gggtgaccaacttcc

SEQ ID NO: 622609 - DNA, 15 bp, Homo sapiens
ggtgaccaacttcct

SEQ ID NO: 622610 - DNA, 15 bp, Homo sapiens
gtgaccaacttcctc

SEQ ID NO: 622611 - DNA, 15 bp, Homo sapiens
tgaccaacttcctct

SEQ ID NO: 622612 - DNA, 15 bp, Homo sapiens
gaccaacttcctctg

SEQ ID NO: 622613 - DNA, 15 bp, Homo sapiens
accaacttcctctgg

SEQ ID NO: 622614 - DNA, 15 bp, Homo sapiens
ccaacttcctctggg

SEQ ID NO: 622615 - DNA, 15 bp, Homo sapiens
caacttcctctggga

SEQ ID NO: 622616 - DNA, 15 bp, Homo sapiens
aacttcctctgggac

SEQ ID NO: 622617 - DNA, 15 bp, Homo sapiens
acttcctctgggaca

SEQ ID NO: 622618 - DNA, 15 bp, Homo sapiens
cttcctctgggacat

SEQ ID NO: 622619 - DNA, 15 bp, Homo sapiens
ttcctctgggacatc

SEQ ID NO: 622620 - DNA, 15 bp, Homo sapiens
tcctctgggacatcg

SEQ ID NO: 622621 - DNA, 15 bp, Homo sapiens
cctctgggacatcgt

SEQ ID NO: 622622 - DNA, 15 bp, Homo sapiens
ctctgggacatcgta

SEQ ID NO: 622623 - DNA, 15 bp, Homo sapiens
tctgggacatcgtaa

SEQ ID NO: 622624 - DNA, 15 bp, Homo sapiens
ctgggacatcgtaag

SEQ ID NO: 622625 - DNA, 15 bp, Homo sapiens
tgggacatcgtaagt

SEQ ID NO: 622626 - DNA, 15 bp, Homo sapiens
gggacatcgtaagtg

SEQ ID NO: 622627 - DNA, 15 bp, Homo sapiens
ggacatcgtaagtgt

SEQ ID NO: 622628 - DNA, 15 bp, Homo sapiens
gacatcgtaagtgtc

SEQ ID NO: 622629 - DNA, 15 bp, Homo sapiens
acatcgtaagtgtca

SEQ ID NO: 622630 - DNA, 15 bp, Homo sapiens
catcgtaagtgtcag

SEQ ID NO: 622631 - DNA, 15 bp, Homo sapiens
atcgtaagtgtcagt

SEQ ID NO: 622632 - DNA, 15 bp, Homo sapiens
tcgtaagtgtcagtt

SEQ ID NO: 622633 - DNA, 15 bp, Homo sapiens
cgtaagtgtcagttt

SEQ ID NO: 622634 - DNA, 15 bp, Homo sapiens
gtaagtgtcagttta

SEQ ID NO: 622635 - DNA, 15 bp, Homo sapiens
taagtgtcagtttac

SEQ ID NO: 622636 - DNA, 15 bp, Homo sapiens
aagtgtcagtttaca

SEQ ID NO: 622637 - DNA, 15 bp, Homo sapiens
agtgtcagtttacag

SEQ ID NO: 622638 - DNA, 15 bp, Homo sapiens
gtgtcagtttacagc

SEQ ID NO: 622639 - DNA, 15 bp, Homo sapiens
tgtcagtttacagcg

SEQ ID NO: 622640 - DNA, 15 bp, Homo sapiens
gtcagtttacagcgc

SEQ ID NO: 622641 - DNA, 15 bp, Homo sapiens
tcagtttacagcgcc

SEQ ID NO: 622642 - DNA, 15 bp, Homo sapiens
cagtttacagcgcct

SEQ ID NO: 622643 - DNA, 15 bp, Homo sapiens
agtttacagcgcctc

SEQ ID NO: 622644 - DNA, 15 bp, Homo sapiens
gtttacagcgcctcc

SEQ ID NO: 622645 - DNA, 15 bp, Homo sapiens
tttacagcgcctccc

SEQ ID NO: 622646 - DNA, 15 bp, Homo sapiens
ttacagcgcctccct

SEQ ID NO: 622647 - DNA, 15 bp, Homo sapiens
tacagcgcctccctc

SEQ ID NO: 622648 - DNA, 15 bp, Homo sapiens
acagcgcctccctcc

SEQ ID NO: 622649 - DNA, 15 bp, Homo sapiens
cagcgcctccctccc

SEQ ID NO: 622650 - DNA, 15 bp, Homo sapiens
agcgcctccctcccc

SEQ ID NO: 622651 - DNA, 15 bp, Homo sapiens
gcgcctccctcccct

SEQ ID NO: 622652 - DNA, 15 bp, Homo sapiens
cgcctccctcccctc

SEQ ID NO: 622653 - DNA, 15 bp, Homo sapiens
gcctccctcccctcc

SEQ ID NO: 622654 - DNA, 15 bp, Homo sapiens
cctccctcccctccg

SEQ ID NO: 622655 - DNA, 15 bp, Homo sapiens
ctccctcccctccgt

SEQ ID NO: 622656 - DNA, 15 bp, Homo sapiens
tccctcccctccgtg

SEQ ID NO: 622657 - DNA, 15 bp, Homo sapiens
ccctcccctccgtgg

SEQ ID NO: 622658 - DNA, 15 bp, Homo sapiens
cctcccctccgtggg

SEQ ID NO: 622659 - DNA, 15 bp, Homo sapiens
ctcccctccgtgggc

SEQ ID NO: 622660 - DNA, 15 bp, Homo sapiens
tcccctccgtgggcc

SEQ ID NO: 622661 - DNA, 15 bp, Homo sapiens
cccctccgtgggccc

SEQ ID NO: 622662 - DNA, 15 bp, Homo sapiens
ccctccgtgggccca

SEQ ID NO: 622663 - DNA, 15 bp, Homo sapiens
cctccgtgggcccaa

SEQ ID NO: 622664 - DNA, 15 bp, Homo sapiens
ctccgtgggcccaag

SEQ ID NO: 622665 - DNA, 15 bp, Homo sapiens
tccgtgggcccaagg

SEQ ID NO: 622666 - DNA, 15 bp, Homo sapiens
ccgtgggcccaaggt

SEQ ID NO: 622667 - DNA, 15 bp, Homo sapiens
cgtgggcccaaggtg

SEQ ID NO: 622668 - DNA, 15 bp, Homo sapiens
gtgggcccaaggtgg

SEQ ID NO: 622669 - DNA, 15 bp, Homo sapiens
tgggcccaaggtgga

SEQ ID NO: 622670 - DNA, 15 bp, Homo sapiens
gggcccaaggtggag

SEQ ID NO: 622671 - DNA, 15 bp, Homo sapiens
ggcccaaggtggagc

SEQ ID NO: 622672 - DNA, 15 bp, Homo sapiens
gcccaaggtggagct

SEQ ID NO: 622673 - DNA, 15 bp, Homo sapiens
cccaaggtggagctt

SEQ ID NO: 622674 - DNA, 15 bp, Homo sapiens
ccaaggtggagcttg

SEQ ID NO: 622675 - DNA, 15 bp, Homo sapiens
caaggtggagcttgt

SEQ ID NO: 622676 - DNA, 15 bp, Homo sapiens
aaggtggagcttgtg

SEQ ID NO: 622677 - DNA, 15 bp, Homo sapiens
aggtggagcttgtgt

SEQ ID NO: 622678 - DNA, 15 bp, Homo sapiens
ggtggagcttgtgtg

SEQ ID NO: 622679 - DNA, 15 bp, Homo sapiens
gtggagcttgtgtgt

SEQ ID NO: 622680 - DNA, 15 bp, Homo sapiens
tggagcttgtgtgtg

SEQ ID NO: 622681 - DNA, 15 bp, Homo sapiens
ggagcttgtgtgtgc

SEQ ID NO: 622682 - DNA, 15 bp, Homo sapiens
gagcttgtgtgtgct

SEQ ID NO: 622683 - DNA, 15 bp, Homo sapiens
agcttgtgtgtgctc

SEQ ID NO: 622684 - DNA, 15 bp, Homo sapiens
gcttgtgtgtgctct

SEQ ID NO: 622685 - DNA, 15 bp, Homo sapiens
cttgtgtgtgctctg

SEQ ID NO: 622686 - DNA, 15 bp, Homo sapiens
ttgtgtgtgctctga

SEQ ID NO: 622687 - DNA, 15 bp, Homo sapiens
tgtgtgtgctctgaa

SEQ ID NO: 622688 - DNA, 15 bp, Homo sapiens
gtgtgtgctctgaag

SEQ ID NO: 622689 - DNA, 15 bp, Homo sapiens
tgtgtgctctgaagg

SEQ ID NO: 622690 - DNA, 15 bp, Homo sapiens
gtgtgctctgaagga

SEQ ID NO: 622691 - DNA, 15 bp, Homo sapiens
tgtgctctgaaggac

SEQ ID NO: 622692 - DNA, 15 bp, Homo sapiens
gtgctctgaaggacc

SEQ ID NO: 622693 - DNA, 15 bp, Homo sapiens
tgctctgaaggacca

SEQ ID NO: 622694 - DNA, 15 bp, Homo sapiens
gctctgaaggaccag

SEQ ID NO: 622695 - DNA, 15 bp, Homo sapiens
ctctgaaggaccaga

SEQ ID NO: 622696 - DNA, 15 bp, Homo sapiens
tctgaaggaccagac

SEQ ID NO: 622697 - DNA, 15 bp, Homo sapiens
ctgaaggaccagacc

SEQ ID NO: 622698 - DNA, 15 bp, Homo sapiens
tgaaggaccagacca

SEQ ID NO: 622699 - DNA, 15 bp, Homo sapiens
gaaggaccagaccaa

SEQ ID NO: 622700 - DNA, 15 bp, Homo sapiens
aaggaccagaccaag

SEQ ID NO: 622701 - DNA, 15 bp, Homo sapiens
aggaccagaccaaga

SEQ ID NO: 622702 - DNA, 15 bp, Homo sapiens
ggaccagaccaagag

SEQ ID NO: 622703 - DNA, 15 bp, Homo sapiens
gaccagaccaagagg

SEQ ID NO: 622704 - DNA, 15 bp, Homo sapiens
accagaccaagaggg

SEQ ID NO: 622705 - DNA, 15 bp, Homo sapiens
ccagaccaagagggg

SEQ ID NO: 622706 - DNA, 15 bp, Homo sapiens
cagaccaagagggga

SEQ ID NO: 622707 - DNA, 15 bp, Homo sapiens
agaccaagaggggag

SEQ ID NO: 622708 - DNA, 15 bp, Homo sapiens
gaccaagaggggagg

SEQ ID NO: 622709 - DNA, 15 bp, Homo sapiens
accaagaggggaggg

SEQ ID NO: 622710 - DNA, 15 bp, Homo sapiens
ccaagaggggagggg

SEQ ID NO: 622711 - DNA, 15 bp, Homo sapiens
caagaggggaggggt

SEQ ID NO: 622712 - DNA, 15 bp, Homo sapiens
aagaggggaggggtt

SEQ ID NO: 622713 - DNA, 15 bp, Homo sapiens
agaggggaggggttc

SEQ ID NO: 622714 - DNA, 15 bp, Homo sapiens
gaggggaggggttct

SEQ ID NO: 622715 - DNA, 15 bp, Homo sapiens
aggggaggggttctc

SEQ ID NO: 622716 - DNA, 15 bp, Homo sapiens
ggggaggggttctca

SEQ ID NO: 622717 - DNA, 15 bp, Homo sapiens
gggaggggttctcac

SEQ ID NO: 622718 - DNA, 15 bp, Homo sapiens
ggaggggttctcacg

SEQ ID NO: 622719 - DNA, 15 bp, Homo sapiens
gaggggttctcacgg

SEQ ID NO: 622720 - DNA, 15 bp, Homo sapiens
aggggttctcacggt

SEQ ID NO: 622721 - DNA, 15 bp, Homo sapiens
ggggttctcacggtg

SEQ ID NO: 622722 - DNA, 15 bp, Homo sapiens
gggttctcacggtgc

SEQ ID NO: 622723 - DNA, 15 bp, Homo sapiens
ggttctcacggtgcc

SEQ ID NO: 622724 - DNA, 15 bp, Homo sapiens
gttctcacggtgcca

SEQ ID NO: 622725 - DNA, 15 bp, Homo sapiens
ttctcacggtgccag

SEQ ID NO: 622726 - DNA, 15 bp, Homo sapiens
tctcacggtgccagg

SEQ ID NO: 622727 - DNA, 15 bp, Homo sapiens
ctcacggtgccaggg

SEQ ID NO: 622728 - DNA, 15 bp, Homo sapiens
tcacggtgccagggc

SEQ ID NO: 622729 - DNA, 15 bp, Homo sapiens
cacggtgccagggct

SEQ ID NO: 622730 - DNA, 15 bp, Homo sapiens
acggtgccagggctg

SEQ ID NO: 622731 - DNA, 15 bp, Homo sapiens
cggtgccagggctgc

SEQ ID NO: 622732 - DNA, 15 bp, Homo sapiens
ggtgccagggctgct

SEQ ID NO: 622733 - DNA, 15 bp, Homo sapiens
gtgccagggctgctg

SEQ ID NO: 622734 - DNA, 15 bp, Homo sapiens
tgccagggctgctga

SEQ ID NO: 622735 - DNA, 15 bp, Homo sapiens
gccagggctgctgaa

SEQ ID NO: 622736 - DNA, 15 bp, Homo sapiens
ccagggctgctgaaa

SEQ ID NO: 622737 - DNA, 15 bp, Homo sapiens
cagggctgctgaaag

SEQ ID NO: 622738 - DNA, 15 bp, Homo sapiens
agggctgctgaaagg

SEQ ID NO: 622739 - DNA, 15 bp, Homo sapiens
gggctgctgaaaggc

SEQ ID NO: 622740 - DNA, 15 bp, Homo sapiens
ggctgctgaaaggca

SEQ ID NO: 622741 - DNA, 15 bp, Homo sapiens
gctgctgaaaggcac

SEQ ID NO: 622742 - DNA, 15 bp, Homo sapiens
ctgctgaaaggcact

SEQ ID NO: 622743 - DNA, 15 bp, Homo sapiens
tgctgaaaggcactg

SEQ ID NO: 622744 - DNA, 15 bp, Homo sapiens
gctgaaaggcactgg

SEQ ID NO: 622745 - DNA, 15 bp, Homo sapiens
ctgaaaggcactggg

SEQ ID NO: 622746 - DNA, 15 bp, Homo sapiens
tgaaaggcactgggc

SEQ ID NO: 622747 - DNA, 15 bp, Homo sapiens
gaaaggcactgggcc

SEQ ID NO: 622748 - DNA, 15 bp, Homo sapiens
aaaggcactgggcca

SEQ ID NO: 622749 - DNA, 15 bp, Homo sapiens
aaggcactgggccaa

SEQ ID NO: 622750 - DNA, 15 bp, Homo sapiens
aggcactgggccaag

SEQ ID NO: 622751 - DNA, 15 bp, Homo sapiens
ggcactgggccaagg

SEQ ID NO: 622752 - DNA, 15 bp, Homo sapiens
gcactgggccaaggg

SEQ ID NO: 622753 - DNA, 15 bp, Homo sapiens
cactgggccaagggc

SEQ ID NO: 622754 - DNA, 15 bp, Homo sapiens
actgggccaagggcc

SEQ ID NO: 622755 - DNA, 15 bp, Homo sapiens
ctgggccaagggcct

SEQ ID NO: 622756 - DNA, 15 bp, Homo sapiens
tgggccaagggcctt

SEQ ID NO: 622757 - DNA, 15 bp, Homo sapiens
gggccaagggccttg

SEQ ID NO: 622758 - DNA, 15 bp, Homo sapiens
ggccaagggccttgt

SEQ ID NO: 622759 - DNA, 15 bp, Homo sapiens
gccaagggccttgtg

SEQ ID NO: 622760 - DNA, 15 bp, Homo sapiens
ccaagggccttgtgt

SEQ ID NO: 622761 - DNA, 15 bp, Homo sapiens
caagggccttgtgta

SEQ ID NO: 622762 - DNA, 15 bp, Homo sapiens
aagggccttgtgtat

SEQ ID NO: 622763 - DNA, 15 bp, Homo sapiens
agggccttgtgtatc

SEQ ID NO: 622764 - DNA, 15 bp, Homo sapiens
gggccttgtgtatct

SEQ ID NO: 622765 - DNA, 15 bp, Homo sapiens
ggccttgtgtatctg

SEQ ID NO: 622766 - DNA, 15 bp, Homo sapiens
gccttgtgtatctgc

SEQ ID NO: 622767 - DNA, 15 bp, Homo sapiens
ccttgtgtatctgct

SEQ ID NO: 622768 - DNA, 15 bp, Homo sapiens
cttgtgtatctgctg

SEQ ID NO: 622769 - DNA, 15 bp, Homo sapiens
ttgtgtatctgctgt

SEQ ID NO: 622770 - DNA, 15 bp, Homo sapiens
tgtgtatctgctgtc

SEQ ID NO: 622771 - DNA, 15 bp, Homo sapiens
gtgtatctgctgtcc

SEQ ID NO: 622772 - DNA, 15 bp, Homo sapiens
tgtatctgctgtccc

SEQ ID NO: 622773 - DNA, 15 bp, Homo sapiens
gtatctgctgtccct

SEQ ID NO: 622774 - DNA, 15 bp, Homo sapiens
tatctgctgtccctt

SEQ ID NO: 622775 - DNA, 15 bp, Homo sapiens
atctgctgtcccttg

SEQ ID NO: 622776 - DNA, 15 bp, Homo sapiens
tctgctgtcccttga

SEQ ID NO: 622777 - DNA, 15 bp, Homo sapiens
ctgctgtcccttgac

SEQ ID NO: 622778 - DNA, 15 bp, Homo sapiens
tgctgtcccttgaca

SEQ ID NO: 622779 - DNA, 15 bp, Homo sapiens
gctgtcccttgacat

SEQ ID NO: 622780 - DNA, 15 bp, Homo sapiens
ctgtcccttgacatc

SEQ ID NO: 622781 - DNA, 15 bp, Homo sapiens
tgtcccttgacatct

SEQ ID NO: 622782 - DNA, 15 bp, Homo sapiens
gtcccttgacatctt

SEQ ID NO: 622783 - DNA, 15 bp, Homo sapiens
tcccttgacatcttc

SEQ ID NO: 622784 - DNA, 15 bp, Homo sapiens
cccttgacatcttct

SEQ ID NO: 622785 - DNA, 15 bp, Homo sapiens
ccttgacatcttctc

SEQ ID NO: 622786 - DNA, 15 bp, Homo sapiens
cttgacatcttctca

SEQ ID NO: 622787 - DNA, 15 bp, Homo sapiens
ttgacatcttctcag

SEQ ID NO: 622788 - DNA, 15 bp, Homo sapiens
tgacatcttctcaga

SEQ ID NO: 622789 - DNA, 15 bp, Homo sapiens
gacatcttctcagaa

SEQ ID NO: 622790 - DNA, 15 bp, Homo sapiens
acatcttctcagaaa

SEQ ID NO: 622791 - DNA, 15 bp, Homo sapiens
catcttctcagaaag

SEQ ID NO: 622792 - DNA, 15 bp, Homo sapiens
atcttctcagaaagg

SEQ ID NO: 622793 - DNA, 15 bp, Homo sapiens
tcttctcagaaaggc

SEQ ID NO: 622794 - DNA, 15 bp, Homo sapiens
cttctcagaaaggca

SEQ ID NO: 622795 - DNA, 15 bp, Homo sapiens
ttctcagaaaggcac

SEQ ID NO: 622796 - DNA, 15 bp, Homo sapiens
tctcagaaaggcaca

SEQ ID NO: 622797 - DNA, 15 bp, Homo sapiens
ctcagaaaggcacag

SEQ ID NO: 622798 - DNA, 15 bp, Homo sapiens
tcagaaaggcacaga

SEQ ID NO: 622799 - DNA, 15 bp, Homo sapiens
cagaaaggcacagaa

SEQ ID NO: 622800 - DNA, 15 bp, Homo sapiens
agaaaggcacagaac

SEQ ID NO: 622801 - DNA, 15 bp, Homo sapiens
gaaaggcacagaact

SEQ ID NO: 622802 - DNA, 15 bp, Homo sapiens
aaaggcacagaacta

SEQ ID NO: 622803 - DNA, 15 bp, Homo sapiens
aaggcacagaactag

SEQ ID NO: 622804 - DNA, 15 bp, Homo sapiens
aggcacagaactagg

SEQ ID NO: 622805 - DNA, 15 bp, Homo sapiens
ggcacagaactagga

SEQ ID NO: 622806 - DNA, 15 bp, Homo sapiens
gcacagaactaggag

SEQ ID NO: 622807 - DNA, 15 bp, Homo sapiens
cacagaactaggagc

SEQ ID NO: 622808 - DNA, 15 bp, Homo sapiens
acagaactaggagcc

SEQ ID NO: 622809 - DNA, 15 bp, Homo sapiens
cagaactaggagccc

SEQ ID NO: 622810 - DNA, 15 bp, Homo sapiens
agaactaggagcccg

SEQ ID NO: 622811 - DNA, 15 bp, Homo sapiens
gaactaggagcccga

SEQ ID NO: 622812 - DNA, 15 bp, Homo sapiens
aactaggagcccgaa

SEQ ID NO: 622813 - DNA, 15 bp, Homo sapiens
actaggagcccgaag

SEQ ID NO: 622814 - DNA, 15 bp, Homo sapiens
ctaggagcccgaagc

SEQ ID NO: 622815 - DNA, 15 bp, Homo sapiens
taggagcccgaagct

SEQ ID NO: 622816 - DNA, 15 bp, Homo sapiens
aggagcccgaagcta

SEQ ID NO: 622817 - DNA, 15 bp, Homo sapiens
ggagcccgaagctag

SEQ ID NO: 622818 - DNA, 15 bp, Homo sapiens
gagcccgaagctagg

SEQ ID NO: 622819 - DNA, 15 bp, Homo sapiens
agcccgaagctagga

SEQ ID NO: 622820 - DNA, 15 bp, Homo sapiens
gcccgaagctaggaa

SEQ ID NO: 622821 - DNA, 15 bp, Homo sapiens
cccgaagctaggaaa

SEQ ID NO: 622822 - DNA, 15 bp, Homo sapiens
ccgaagctaggaaag

SEQ ID NO: 622823 - DNA, 15 bp, Homo sapiens
cgaagctaggaaagg

SEQ ID NO: 622824 - DNA, 15 bp, Homo sapiens
gaagctaggaaaggc

SEQ ID NO: 622825 - DNA, 15 bp, Homo sapiens
aagctaggaaaggct

SEQ ID NO: 622826 - DNA, 15 bp, Homo sapiens
agctaggaaaggctg

SEQ ID NO: 622827 - DNA, 15 bp, Homo sapiens
gctaggaaaggctgt

SEQ ID NO: 622828 - DNA, 15 bp, Homo sapiens
ctaggaaaggctgtg

SEQ ID NO: 622829 - DNA, 15 bp, Homo sapiens
taggaaaggctgtgg

SEQ ID NO: 622830 - DNA, 15 bp, Homo sapiens
aggaaaggctgtggg

SEQ ID NO: 622831 - DNA, 15 bp, Homo sapiens
ggaaaggctgtgggg

SEQ ID NO: 622832 - DNA, 15 bp, Homo sapiens
gaaaggctgtggggt

SEQ ID NO: 622833 - DNA, 15 bp, Homo sapiens
aaaggctgtggggtg

SEQ ID NO: 622834 - DNA, 15 bp, Homo sapiens
aaggctgtggggtgc

SEQ ID NO: 622835 - DNA, 15 bp, Homo sapiens
aggctgtggggtgca

SEQ ID NO: 622836 - DNA, 15 bp, Homo sapiens
ggctgtggggtgcag

SEQ ID NO: 622837 - DNA, 15 bp, Homo sapiens
gctgtggggtgcagc

SEQ ID NO: 622838 - DNA, 15 bp, Homo sapiens
ctgtggggtgcagct

SEQ ID NO: 622839 - DNA, 15 bp, Homo sapiens
tgtggggtgcagctt

SEQ ID NO: 622840 - DNA, 15 bp, Homo sapiens
gtggggtgcagctta

SEQ ID NO: 622841 - DNA, 15 bp, Homo sapiens
tggggtgcagcttaa

SEQ ID NO: 622842 - DNA, 15 bp, Homo sapiens
ggggtgcagcttaac

SEQ ID NO: 622843 - DNA, 15 bp, Homo sapiens
gggtgcagcttaaca

SEQ ID NO: 622844 - DNA, 15 bp, Homo sapiens
ggtgcagcttaacaa

SEQ ID NO: 622845 - DNA, 15 bp, Homo sapiens
gtgcagcttaacaac

SEQ ID NO: 622846 - DNA, 15 bp, Homo sapiens
tgcagcttaacaact

SEQ ID NO: 622847 - DNA, 15 bp, Homo sapiens
gcagcttaacaactg

SEQ ID NO: 622848 - DNA, 15 bp, Homo sapiens
cagcttaacaactgg

SEQ ID NO: 622849 - DNA, 15 bp, Homo sapiens
agcttaacaactggt

SEQ ID NO: 622850 - DNA, 15 bp, Homo sapiens
gcttaacaactggtg

SEQ ID NO: 622851 - DNA, 15 bp, Homo sapiens
cttaacaactggtga

SEQ ID NO: 622852 - DNA, 15 bp, Homo sapiens
ttaacaactggtgaa

SEQ ID NO: 622853 - DNA, 15 bp, Homo sapiens
taacaactggtgaac

SEQ ID NO: 622854 - DNA, 15 bp, Homo sapiens
aacaactggtgaacg

SEQ ID NO: 622855 - DNA, 15 bp, Homo sapiens
acaactggtgaacgg

SEQ ID NO: 622856 - DNA, 15 bp, Homo sapiens
caactggtgaacggg

SEQ ID NO: 622857 - DNA, 15 bp, Homo sapiens
aactggtgaacgggg

SEQ ID NO: 622858 - DNA, 15 bp, Homo sapiens
actggtgaacggggg

SEQ ID NO: 622859 - DNA, 15 bp, Homo sapiens
ctggtgaacgggggc

SEQ ID NO: 622860 - DNA, 15 bp, Homo sapiens
tggtgaacgggggct

SEQ ID NO: 622861 - DNA, 15 bp, Homo sapiens
ggtgaacgggggctc

SEQ ID NO: 622862 - DNA, 15 bp, Homo sapiens
gtgaacgggggctct

SEQ ID NO: 622863 - DNA, 15 bp, Homo sapiens
tgaacgggggctctc

SEQ ID NO: 622864 - DNA, 15 bp, Homo sapiens
gaacgggggctctct

SEQ ID NO: 622865 - DNA, 15 bp, Homo sapiens
aacgggggctctcta

SEQ ID NO: 622866 - DNA, 15 bp, Homo sapiens
acgggggctctctat

SEQ ID NO: 622867 - DNA, 15 bp, Homo sapiens
cgggggctctctatg

SEQ ID NO: 622868 - DNA, 15 bp, Homo sapiens
gggggctctctatgt

SEQ ID NO: 622869 - DNA, 15 bp, Homo sapiens
ggggctctctatgtc

SEQ ID NO: 622870 - DNA, 15 bp, Homo sapiens
gggctctctatgtcc

SEQ ID NO: 622871 - DNA, 15 bp, Homo sapiens
ggctctctatgtcct

SEQ ID NO: 622872 - DNA, 15 bp, Homo sapiens
gctctctatgtcctg

SEQ ID NO: 622873 - DNA, 15 bp, Homo sapiens
ctctctatgtcctgc

SEQ ID NO: 622874 - DNA, 15 bp, Homo sapiens
tctctatgtcctgca

SEQ ID NO: 622875 - DNA, 15 bp, Homo sapiens
ctctatgtcctgcac

SEQ ID NO: 622876 - DNA, 15 bp, Homo sapiens
tctatgtcctgcact

SEQ ID NO: 622877 - DNA, 15 bp, Homo sapiens
ctatgtcctgcactg

SEQ ID NO: 622878 - DNA, 15 bp, Homo sapiens
tatgtcctgcactga

SEQ ID NO: 622879 - DNA, 15 bp, Homo sapiens
atgtcctgcactgag

SEQ ID NO: 622880 - DNA, 15 bp, Homo sapiens
tgtcctgcactgagg

SEQ ID NO: 622881 - DNA, 15 bp, Homo sapiens
gtcctgcactgaggg

SEQ ID NO: 622882 - DNA, 15 bp, Homo sapiens
tcctgcactgagggg

SEQ ID NO: 622883 - DNA, 15 bp, Homo sapiens
cctgcactgaggggt

SEQ ID NO: 622884 - DNA, 15 bp, Homo sapiens
ctgcactgaggggtc

SEQ ID NO: 622885 - DNA, 15 bp, Homo sapiens
tgcactgaggggtct

SEQ ID NO: 622886 - DNA, 15 bp, Homo sapiens
gcactgaggggtctt

SEQ ID NO: 622887 - DNA, 15 bp, Homo sapiens
cactgaggggtcttc

SEQ ID NO: 622888 - DNA, 15 bp, Homo sapiens
actgaggggtcttct

SEQ ID NO: 622889 - DNA, 15 bp, Homo sapiens
ctgaggggtcttctg

SEQ ID NO: 622890 - DNA, 15 bp, Homo sapiens
tgaggggtcttctga

SEQ ID NO: 622891 - DNA, 15 bp, Homo sapiens
gaggggtcttctgac

SEQ ID NO: 622892 - DNA, 15 bp, Homo sapiens
aggggtcttctgacc

SEQ ID NO: 622893 - DNA, 15 bp, Homo sapiens
ggggtcttctgaccc

SEQ ID NO: 622894 - DNA, 15 bp, Homo sapiens
gggtcttctgaccca

SEQ ID NO: 622895 - DNA, 15 bp, Homo sapiens
ggtcttctgacccat

SEQ ID NO: 622896 - DNA, 15 bp, Homo sapiens
gtcttctgacccatc

SEQ ID NO: 622897 - DNA, 15 bp, Homo sapiens
tcttctgacccatca

SEQ ID NO: 622898 - DNA, 15 bp, Homo sapiens
cttctgacccatcaa

SEQ ID NO: 622899 - DNA, 15 bp, Homo sapiens
ttctgacccatcaaa

SEQ ID NO: 622900 - DNA, 15 bp, Homo sapiens
tctgacccatcaaat

SEQ ID NO: 622901 - DNA, 15 bp, Homo sapiens
ctgacccatcaaata

SEQ ID NO: 622902 - DNA, 15 bp, Homo sapiens
tgacccatcaaataa

SEQ ID NO: 622903 - DNA, 15 bp, Homo sapiens
gacccatcaaataat

SEQ ID NO: 622904 - DNA, 15 bp, Homo sapiens
acccatcaaataatc

SEQ ID NO: 622905 - DNA, 15 bp, Homo sapiens
cccatcaaataatca

SEQ ID NO: 622906 - DNA, 15 bp, Homo sapiens
ccatcaaataatcac

SEQ ID NO: 622907 - DNA, 15 bp, Homo sapiens
catcaaataatcact

SEQ ID NO: 622908 - DNA, 15 bp, Homo sapiens
atcaaataatcactg

SEQ ID NO: 622909 - DNA, 15 bp, Homo sapiens
tcaaataatcactgc

SEQ ID NO: 622910 - DNA, 15 bp, Homo sapiens
caaataatcactgca

SEQ ID NO: 622911 - DNA, 15 bp, Homo sapiens
aaataatcactgcac

SEQ ID NO: 622912 - DNA, 15 bp, Homo sapiens
aataatcactgcacc

SEQ ID NO: 622913 - DNA, 15 bp, Homo sapiens
ataatcactgcaccg

SEQ ID NO: 622914 - DNA, 15 bp, Homo sapiens
taatcactgcaccgc

SEQ ID NO: 622915 - DNA, 15 bp, Homo sapiens
aatcactgcaccgca

SEQ ID NO: 622916 - DNA, 15 bp, Homo sapiens
atcactgcaccgcag

SEQ ID NO: 622917 - DNA, 15 bp, Homo sapiens
tcactgcaccgcagg

SEQ ID NO: 622918 - DNA, 15 bp, Homo sapiens
cactgcaccgcaggc

SEQ ID NO: 622919 - DNA, 15 bp, Homo sapiens
actgcaccgcaggca

SEQ ID NO: 622920 - DNA, 15 bp, Homo sapiens
ctgcaccgcaggcat

SEQ ID NO: 622921 - DNA, 15 bp, Homo sapiens
tgcaccgcaggcatg

SEQ ID NO: 622922 - DNA, 15 bp, Homo sapiens
gcaccgcaggcatga

SEQ ID NO: 622923 - DNA, 15 bp, Homo sapiens
caccgcaggcatgag

SEQ ID NO: 622924 - DNA, 15 bp, Homo sapiens
accgcaggcatgagt

SEQ ID NO: 622925 - DNA, 15 bp, Homo sapiens
ccgcaggcatgagtc

SEQ ID NO: 622926 - DNA, 15 bp, Homo sapiens
cgcaggcatgagtct

SEQ ID NO: 622927 - DNA, 15 bp, Homo sapiens
gcaggcatgagtctg

SEQ ID NO: 622928 - DNA, 15 bp, Homo sapiens
caggcatgagtctgg

SEQ ID NO: 622929 - DNA, 15 bp, Homo sapiens
aggcatgagtctggc

SEQ ID NO: 622930 - DNA, 15 bp, Homo sapiens
ggcatgagtctggcc

SEQ ID NO: 622931 - DNA, 15 bp, Homo sapiens
gcatgagtctggcct

SEQ ID NO: 622932 - DNA, 15 bp, Homo sapiens
catgagtctggcctt

SEQ ID NO: 622933 - DNA, 15 bp, Homo sapiens
atgagtctggccttc

SEQ ID NO: 622934 - DNA, 15 bp, Homo sapiens
tgagtctggccttcc

SEQ ID NO: 622935 - DNA, 15 bp, Homo sapiens
gagtctggccttcct

SEQ ID NO: 622936 - DNA, 15 bp, Homo sapiens
agtctggccttcctg

SEQ ID NO: 622937 - DNA, 15 bp, Homo sapiens
gtctggccttcctgg

SEQ ID NO: 622938 - DNA, 15 bp, Homo sapiens
tctggccttcctggc

SEQ ID NO: 622939 - DNA, 15 bp, Homo sapiens
ctggccttcctggca

SEQ ID NO: 622940 - DNA, 15 bp, Homo sapiens
tggccttcctggcat

SEQ ID NO: 622941 - DNA, 15 bp, Homo sapiens
ggccttcctggcatc

SEQ ID NO: 622942 - DNA, 15 bp, Homo sapiens
gccttcctggcatca

SEQ ID NO: 622943 - DNA, 15 bp, Homo sapiens
ccttcctggcatcag

SEQ ID NO: 622944 - DNA, 15 bp, Homo sapiens
cttcctggcatcagt

SEQ ID NO: 622945 - DNA, 15 bp, Homo sapiens
ttcctggcatcagtc

SEQ ID NO: 622946 - DNA, 15 bp, Homo sapiens
tcctggcatcagtct

SEQ ID NO: 622947 - DNA, 15 bp, Homo sapiens
cctggcatcagtctg

SEQ ID NO: 622948 - DNA, 15 bp, Homo sapiens
ctggcatcagtctgg

SEQ ID NO: 622949 - DNA, 15 bp, Homo sapiens
tggcatcagtctggc

SEQ ID NO: 622950 - DNA, 15 bp, Homo sapiens
ggcatcagtctggcg

SEQ ID NO: 622951 - DNA, 15 bp, Homo sapiens
gcatcagtctggcgc

SEQ ID NO: 622952 - DNA, 15 bp, Homo sapiens
catcagtctggcgct

SEQ ID NO: 622953 - DNA, 15 bp, Homo sapiens
atcagtctggcgctg

SEQ ID NO: 622954 - DNA, 15 bp, Homo sapiens
tcagtctggcgctga

SEQ ID NO: 622955 - DNA, 15 bp, Homo sapiens
cagtctggcgctgag

SEQ ID NO: 622956 - DNA, 15 bp, Homo sapiens
agtctggcgctgaga

SEQ ID NO: 622957 - DNA, 15 bp, Homo sapiens
gtctggcgctgagaa

SEQ ID NO: 622958 - DNA, 15 bp, Homo sapiens
tctggcgctgagaag

SEQ ID NO: 622959 - DNA, 15 bp, Homo sapiens
ctggcgctgagaagg

SEQ ID NO: 622960 - DNA, 15 bp, Homo sapiens
tggcgctgagaaggt

SEQ ID NO: 622961 - DNA, 15 bp, Homo sapiens
ggcgctgagaaggta

SEQ ID NO: 622962 - DNA, 15 bp, Homo sapiens
gcgctgagaaggtaa

SEQ ID NO: 622963 - DNA, 15 bp, Homo sapiens
cgctgagaaggtaat

SEQ ID NO: 622964 - DNA, 15 bp, Homo sapiens
gctgagaaggtaata

SEQ ID NO: 622965 - DNA, 15 bp, Homo sapiens
ctgagaaggtaatat

SEQ ID NO: 622966 - DNA, 15 bp, Homo sapiens
tgagaaggtaatatg

SEQ ID NO: 622967 - DNA, 15 bp, Homo sapiens
gagaaggtaatatga

SEQ ID NO: 622968 - DNA, 15 bp, Homo sapiens
agaaggtaatatgaa

SEQ ID NO: 622969 - DNA, 15 bp, Homo sapiens
gaaggtaatatgaag

SEQ ID NO: 622970 - DNA, 15 bp, Homo sapiens
aaggtaatatgaagg

SEQ ID NO: 622971 - DNA, 15 bp, Homo sapiens
aggtaatatgaaggg

SEQ ID NO: 622972 - DNA, 15 bp, Homo sapiens
ggtaatatgaagggg

SEQ ID NO: 622973 - DNA, 15 bp, Homo sapiens
gtaatatgaaggggt

SEQ ID NO: 622974 - DNA, 15 bp, Homo sapiens
taatatgaaggggtc

SEQ ID NO: 622975 - DNA, 15 bp, Homo sapiens
aatatgaaggggtct

SEQ ID NO: 622976 - DNA, 15 bp, Homo sapiens
atatgaaggggtctt

SEQ ID NO: 622977 - DNA, 15 bp, Homo sapiens
tatgaaggggtcttt

SEQ ID NO: 622978 - DNA, 15 bp, Homo sapiens
atgaaggggtctttc

SEQ ID NO: 622979 - DNA, 15 bp, Homo sapiens
tgaaggggtctttca

SEQ ID NO: 622980 - DNA, 15 bp, Homo sapiens
gaaggggtctttcac

SEQ ID NO: 622981 - DNA, 15 bp, Homo sapiens
aaggggtctttcacc

SEQ ID NO: 622982 - DNA, 15 bp, Homo sapiens
aggggtctttcaccc

SEQ ID NO: 622983 - DNA, 15 bp, Homo sapiens
ggggtctttcacccc

SEQ ID NO: 622984 - DNA, 15 bp, Homo sapiens
gggtctttcacccca

SEQ ID NO: 622985 - DNA, 15 bp, Homo sapiens
ggtctttcaccccaa

SEQ ID NO: 622986 - DNA, 15 bp, Homo sapiens
gtctttcaccccaag

SEQ ID NO: 622987 - DNA, 15 bp, Homo sapiens
tctttcaccccaagt

SEQ ID NO: 622988 - DNA, 15 bp, Homo sapiens
ctttcaccccaagtc

SEQ ID NO: 622989 - DNA, 15 bp, Homo sapiens
tttcaccccaagtcc

SEQ ID NO: 622990 - DNA, 15 bp, Homo sapiens
ttcaccccaagtccc

SEQ ID NO: 622991 - DNA, 15 bp, Homo sapiens
tcaccccaagtcccc

SEQ ID NO: 622992 - DNA, 15 bp, Homo sapiens
caccccaagtcccct

SEQ ID NO: 622993 - DNA, 15 bp, Homo sapiens
accccaagtcccctt

SEQ ID NO: 622994 - DNA, 15 bp, Homo sapiens
ccccaagtccccttc

SEQ ID NO: 622995 - DNA, 15 bp, Homo sapiens
cccaagtccccttct

SEQ ID NO: 622996 - DNA, 15 bp, Homo sapiens
ccaagtccccttctc

SEQ ID NO: 622997 - DNA, 15 bp, Homo sapiens
caagtccccttctca

SEQ ID NO: 622998 - DNA, 15 bp, Homo sapiens
aagtccccttctcaa

SEQ ID NO: 622999 - DNA, 15 bp, Homo sapiens
agtccccttctcaaa

SEQ ID NO: 623000 - DNA, 15 bp, Homo sapiens
gtccccttctcaaat

SEQ ID NO: 623001 - DNA, 15 bp, Homo sapiens
tccccttctcaaatc

SEQ ID NO: 623002 - DNA, 15 bp, Homo sapiens
ccccttctcaaatcc

SEQ ID NO: 623003 - DNA, 15 bp, Homo sapiens
cccttctcaaatcct

SEQ ID NO: 623004 - DNA, 15 bp, Homo sapiens
ccttctcaaatcctg

SEQ ID NO: 623005 - DNA, 15 bp, Homo sapiens
cttctcaaatcctgc

SEQ ID NO: 623006 - DNA, 15 bp, Homo sapiens
ttctcaaatcctgcc

SEQ ID NO: 623007 - DNA, 15 bp, Homo sapiens
tctcaaatcctgccc

SEQ ID NO: 623008 - DNA, 15 bp, Homo sapiens
ctcaaatcctgcccc

SEQ ID NO: 623009 - DNA, 15 bp, Homo sapiens
tcaaatcctgcccca

SEQ ID NO: 623010 - DNA, 15 bp, Homo sapiens
caaatcctgccccac

SEQ ID NO: 623011 - DNA, 15 bp, Homo sapiens
aaatcctgccccacc

SEQ ID NO: 623012 - DNA, 15 bp, Homo sapiens
aatcctgccccacct

SEQ ID NO: 623013 - DNA, 15 bp, Homo sapiens
atcctgccccacctt

SEQ ID NO: 623014 - DNA, 15 bp, Homo sapiens
tcctgccccaccttc

SEQ ID NO: 623015 - DNA, 15 bp, Homo sapiens
cctgccccaccttca

SEQ ID NO: 623016 - DNA, 15 bp, Homo sapiens
ctgccccaccttcaa

SEQ ID NO: 623017 - DNA, 15 bp, Homo sapiens
tgccccaccttcaaa

SEQ ID NO: 623018 - DNA, 15 bp, Homo sapiens
gccccaccttcaaaa

SEQ ID NO: 623019 - DNA, 15 bp, Homo sapiens
ccccaccttcaaaag

SEQ ID NO: 623020 - DNA, 15 bp, Homo sapiens
cccaccttcaaaagg

SEQ ID NO: 623021 - DNA, 15 bp, Homo sapiens
ccaccttcaaaaggg

SEQ ID NO: 623022 - DNA, 15 bp, Homo sapiens
caccttcaaaagggt

SEQ ID NO: 623023 - DNA, 15 bp, Homo sapiens
accttcaaaagggta

SEQ ID NO: 623024 - DNA, 15 bp, Homo sapiens
ccttcaaaagggtaa

SEQ ID NO: 623025 - DNA, 15 bp, Homo sapiens
cttcaaaagggtaaa

SEQ ID NO: 623026 - DNA, 15 bp, Homo sapiens
ttcaaaagggtaaag

SEQ ID NO: 623027 - DNA, 15 bp, Homo sapiens
tcaaaagggtaaagg

SEQ ID NO: 623028 - DNA, 15 bp, Homo sapiens
caaaagggtaaaggt

SEQ ID NO: 623029 - DNA, 15 bp, Homo sapiens
aaaagggtaaaggta

SEQ ID NO: 623030 - DNA, 15 bp, Homo sapiens
aaagggtaaaggtaa

SEQ ID NO: 623031 - DNA, 15 bp, Homo sapiens
aagggtaaaggtaaa

SEQ ID NO: 623032 - DNA, 15 bp, Homo sapiens
agggtaaaggtaaaa

SEQ ID NO: 623033 - DNA, 15 bp, Homo sapiens
gggtaaaggtaaaac

SEQ ID NO: 623034 - DNA, 15 bp, Homo sapiens
ggtaaaggtaaaact

SEQ ID NO: 623035 - DNA, 15 bp, Homo sapiens
gtaaaggtaaaactt

SEQ ID NO: 623036 - DNA, 15 bp, Homo sapiens
taaaggtaaaacttt

SEQ ID NO: 623037 - DNA, 15 bp, Homo sapiens
aaaggtaaaactttc

SEQ ID NO: 623038 - DNA, 15 bp, Homo sapiens
aaggtaaaactttcc

SEQ ID NO: 623039 - DNA, 15 bp, Homo sapiens
aggtaaaactttccc

SEQ ID NO: 623040 - DNA, 15 bp, Homo sapiens
ggtaaaactttccct

SEQ ID NO: 623041 - DNA, 15 bp, Homo sapiens
gtaaaactttccctg

SEQ ID NO: 623042 - DNA, 15 bp, Homo sapiens
taaaactttccctgt

SEQ ID NO: 623043 - DNA, 15 bp, Homo sapiens
aaaactttccctgtg

SEQ ID NO: 623044 - DNA, 15 bp, Homo sapiens
aaactttccctgtgg

SEQ ID NO: 623045 - DNA, 15 bp, Homo sapiens
aactttccctgtggt

SEQ ID NO: 623046 - DNA, 15 bp, Homo sapiens
actttccctgtggta

SEQ ID NO: 623047 - DNA, 15 bp, Homo sapiens
ctttccctgtggtag

SEQ ID NO: 623048 - DNA, 15 bp, Homo sapiens
tttccctgtggtagg

SEQ ID NO: 623049 - DNA, 15 bp, Homo sapiens
ttccctgtggtaggg

SEQ ID NO: 623050 - DNA, 15 bp, Homo sapiens
tccctgtggtagggt

SEQ ID NO: 623051 - DNA, 15 bp, Homo sapiens
ccctgtggtagggtc

SEQ ID NO: 623052 - DNA, 15 bp, Homo sapiens
cctgtggtagggtca

SEQ ID NO: 623053 - DNA, 15 bp, Homo sapiens
ctgtggtagggtcac

SEQ ID NO: 623054 - DNA, 15 bp, Homo sapiens
tgtggtagggtcacc

SEQ ID NO: 623055 - DNA, 15 bp, Homo sapiens
gtggtagggtcacca

SEQ ID NO: 623056 - DNA, 15 bp, Homo sapiens
tggtagggtcaccag

SEQ ID NO: 623057 - DNA, 15 bp, Homo sapiens
ggtagggtcaccaga

SEQ ID NO: 623058 - DNA, 15 bp, Homo sapiens
gtagggtcaccagat

SEQ ID NO: 623059 - DNA, 15 bp, Homo sapiens
tagggtcaccagata

SEQ ID NO: 623060 - DNA, 15 bp, Homo sapiens
agggtcaccagataa

SEQ ID NO: 623061 - DNA, 15 bp, Homo sapiens
gggtcaccagataaa

SEQ ID NO: 623062 - DNA, 15 bp, Homo sapiens
ggtcaccagataaat

SEQ ID NO: 623063 - DNA, 15 bp, Homo sapiens
gtcaccagataaata

SEQ ID NO: 623064 - DNA, 15 bp, Homo sapiens
tcaccagataaatac

SEQ ID NO: 623065 - DNA, 15 bp, Homo sapiens
caccagataaataca

SEQ ID NO: 623066 - DNA, 15 bp, Homo sapiens
accagataaatacag

SEQ ID NO: 623067 - DNA, 15 bp, Homo sapiens
ccagataaatacagg

SEQ ID NO: 623068 - DNA, 15 bp, Homo sapiens
cagataaatacagga

SEQ ID NO: 623069 - DNA, 15 bp, Homo sapiens
agataaatacaggac

SEQ ID NO: 623070 - DNA, 15 bp, Homo sapiens
gataaatacaggaca

SEQ ID NO: 623071 - DNA, 15 bp, Homo sapiens
ataaatacaggacac

SEQ ID NO: 623072 - DNA, 15 bp, Homo sapiens
taaatacaggacacc

SEQ ID NO: 623073 - DNA, 15 bp, Homo sapiens
aaatacaggacaccc

SEQ ID NO: 623074 - DNA, 15 bp, Homo sapiens
aatacaggacaccca

SEQ ID NO: 623075 - DNA, 15 bp, Homo sapiens
atacaggacacccag

SEQ ID NO: 623076 - DNA, 15 bp, Homo sapiens
tacaggacacccagt

SEQ ID NO: 623077 - DNA, 15 bp, Homo sapiens
acaggacacccagtt

SEQ ID NO: 623078 - DNA, 15 bp, Homo sapiens
caggacacccagtta

SEQ ID NO: 623079 - DNA, 15 bp, Homo sapiens
aggacacccagttaa

SEQ ID NO: 623080 - DNA, 15 bp, Homo sapiens
ggacacccagttaaa

SEQ ID NO: 623081 - DNA, 15 bp, Homo sapiens
gacacccagttaaat

SEQ ID NO: 623082 - DNA, 15 bp, Homo sapiens
acacccagttaaatt

SEQ ID NO: 623083 - DNA, 15 bp, Homo sapiens
cacccagttaaattt

SEQ ID NO: 623084 - DNA, 15 bp, Homo sapiens
acccagttaaattta

SEQ ID NO: 623085 - DNA, 15 bp, Homo sapiens
cccagttaaatttaa

SEQ ID NO: 623086 - DNA, 15 bp, Homo sapiens
ccagttaaatttaat

SEQ ID NO: 623087 - DNA, 15 bp, Homo sapiens
cagttaaatttaatt

SEQ ID NO: 623088 - DNA, 15 bp, Homo sapiens
agttaaatttaattt

SEQ ID NO: 623089 - DNA, 15 bp, Homo sapiens
gttaaatttaatttc

SEQ ID NO: 623090 - DNA, 15 bp, Homo sapiens
ttaaatttaatttca

SEQ ID NO: 623091 - DNA, 15 bp, Homo sapiens
taaatttaatttcag

SEQ ID NO: 623092 - DNA, 15 bp, Homo sapiens
aaatttaatttcaga

SEQ ID NO: 623093 - DNA, 15 bp, Homo sapiens
aatttaatttcagat

SEQ ID NO: 623094 - DNA, 15 bp, Homo sapiens
atttaatttcagatg

SEQ ID NO: 623095 - DNA, 15 bp, Homo sapiens
tttaatttcagatga

SEQ ID NO: 623096 - DNA, 15 bp, Homo sapiens
ttaatttcagatgat

SEQ ID NO: 623097 - DNA, 15 bp, Homo sapiens
taatttcagatgatg

SEQ ID NO: 623098 - DNA, 15 bp, Homo sapiens
aatttcagatgatga

SEQ ID NO: 623099 - DNA, 15 bp, Homo sapiens
atttcagatgatgaa

SEQ ID NO: 623100 - DNA, 15 bp, Homo sapiens
tttcagatgatgaat

SEQ ID NO: 623101 - DNA, 15 bp, Homo sapiens
ttcagatgatgaata

SEQ ID NO: 623102 - DNA, 15 bp, Homo sapiens
tcagatgatgaataa

SEQ ID NO: 623103 - DNA, 15 bp, Homo sapiens
cagatgatgaataat

SEQ ID NO: 623104 - DNA, 15 bp, Homo sapiens
agatgatgaataatt

SEQ ID NO: 623105 - DNA, 15 bp, Homo sapiens
gatgatgaataattt

SEQ ID NO: 623106 - DNA, 15 bp, Homo sapiens
atgatgaataatttt

SEQ ID NO: 623107 - DNA, 15 bp, Homo sapiens
tgatgaataattttt

SEQ ID NO: 623108 - DNA, 15 bp, Homo sapiens
gatgaataattttta

SEQ ID NO: 623109 - DNA, 15 bp, Homo sapiens
atgaataatttttag

SEQ ID NO: 623110 - DNA, 15 bp, Homo sapiens
tgaataatttttagt

SEQ ID NO: 623111 - DNA, 15 bp, Homo sapiens
gaataatttttagta

SEQ ID NO: 623112 - DNA, 15 bp, Homo sapiens
aataatttttagtat

SEQ ID NO: 623113 - DNA, 15 bp, Homo sapiens
ataatttttagtata

SEQ ID NO: 623114 - DNA, 15 bp, Homo sapiens
taatttttagtataa

SEQ ID NO: 623115 - DNA, 15 bp, Homo sapiens
aatttttagtataag

SEQ ID NO: 623116 - DNA, 15 bp, Homo sapiens
atttttagtataagc

SEQ ID NO: 623117 - DNA, 15 bp, Homo sapiens
tttttagtataagca

SEQ ID NO: 623118 - DNA, 15 bp, Homo sapiens
ttttagtataagcat

SEQ ID NO: 623119 - DNA, 15 bp, Homo sapiens
tttagtataagcata

SEQ ID NO: 623120 - DNA, 15 bp, Homo sapiens
ttagtataagcatat

SEQ ID NO: 623121 - DNA, 15 bp, Homo sapiens
tagtataagcatatg

SEQ ID NO: 623122 - DNA, 15 bp, Homo sapiens
agtataagcatatgc

SEQ ID NO: 623123 - DNA, 15 bp, Homo sapiens
gtataagcatatgct

SEQ ID NO: 623124 - DNA, 15 bp, Homo sapiens
tataagcatatgcta

SEQ ID NO: 623125 - DNA, 15 bp, Homo sapiens
ataagcatatgctac

SEQ ID NO: 623126 - DNA, 15 bp, Homo sapiens
taagcatatgctact

SEQ ID NO: 623127 - DNA, 15 bp, Homo sapiens
aagcatatgctactt

SEQ ID NO: 623128 - DNA, 15 bp, Homo sapiens
agcatatgctacttc

SEQ ID NO: 623129 - DNA, 15 bp, Homo sapiens
gcatatgctacttca

SEQ ID NO: 623130 - DNA, 15 bp, Homo sapiens
catatgctacttcaa

SEQ ID NO: 623131 - DNA, 15 bp, Homo sapiens
atatgctacttcaaa

SEQ ID NO: 623132 - DNA, 15 bp, Homo sapiens
tatgctacttcaaat

SEQ ID NO: 623133 - DNA, 15 bp, Homo sapiens
atgctacttcaaata

SEQ ID NO: 623134 - DNA, 15 bp, Homo sapiens
tgctacttcaaatat

SEQ ID NO: 623135 - DNA, 15 bp, Homo sapiens
gctacttcaaatatt

SEQ ID NO: 623136 - DNA, 15 bp, Homo sapiens
ctacttcaaatattg

SEQ ID NO: 623137 - DNA, 15 bp, Homo sapiens
tacttcaaatattgc

SEQ ID NO: 623138 - DNA, 15 bp, Homo sapiens
acttcaaatattgca

SEQ ID NO: 623139 - DNA, 15 bp, Homo sapiens
cttcaaatattgcac

SEQ ID NO: 623140 - DNA, 15 bp, Homo sapiens
ttcaaatattgcaca

SEQ ID NO: 623141 - DNA, 15 bp, Homo sapiens
tcaaatattgcacag

SEQ ID NO: 623142 - DNA, 15 bp, Homo sapiens
caaatattgcacagg

SEQ ID NO: 623143 - DNA, 15 bp, Homo sapiens
aaatattgcacagga

SEQ ID NO: 623144 - DNA, 15 bp, Homo sapiens
aatattgcacaggac

SEQ ID NO: 623145 - DNA, 15 bp, Homo sapiens
atattgcacaggaca

SEQ ID NO: 623146 - DNA, 15 bp, Homo sapiens
tattgcacaggacat

SEQ ID NO: 623147 - DNA, 15 bp, Homo sapiens
attgcacaggacata

SEQ ID NO: 623148 - DNA, 15 bp, Homo sapiens
ttgcacaggacatat

SEQ ID NO: 623149 - DNA, 15 bp, Homo sapiens
tgcacaggacatatc

SEQ ID NO: 623150 - DNA, 15 bp, Homo sapiens
gcacaggacatatct

SEQ ID NO: 623151 - DNA, 15 bp, Homo sapiens
cacaggacatatcta

SEQ ID NO: 623152 - DNA, 15 bp, Homo sapiens
acaggacatatctac

SEQ ID NO: 623153 - DNA, 15 bp, Homo sapiens
caggacatatctaca

SEQ ID NO: 623154 - DNA, 15 bp, Homo sapiens
aggacatatctacac

SEQ ID NO: 623155 - DNA, 15 bp, Homo sapiens
ggacatatctacact

SEQ ID NO: 623156 - DNA, 15 bp, Homo sapiens
gacatatctacacta

SEQ ID NO: 623157 - DNA, 15 bp, Homo sapiens
acatatctacactaa

SEQ ID NO: 623158 - DNA, 15 bp, Homo sapiens
catatctacactaaa

SEQ ID NO: 623159 - DNA, 15 bp, Homo sapiens
atatctacactaaaa

SEQ ID NO: 623160 - DNA, 15 bp, Homo sapiens
tatctacactaaaaa

SEQ ID NO: 623161 - DNA, 15 bp, Homo sapiens
atctacactaaaaaa

SEQ ID NO: 623162 - DNA, 15 bp, Homo sapiens
tctacactaaaaaaa

SEQ ID NO: 623163 - DNA, 15 bp, Homo sapiens
ctacactaaaaaaaa

SEQ ID NO: 623164 - DNA, 15 bp, Homo sapiens
tacactaaaaaaaaa

SEQ ID NO: 623165 - DNA, 15 bp, Homo sapiens
acactaaaaaaaaaa

SEQ ID NO: 623166 - DNA, 15 bp, Homo sapiens
cactaaaaaaaaaaa

SEQ ID NO: 623167 - DNA, 15 bp, Homo sapiens
actaaaaaaaaaaaa

SEQ ID NO: 623168 - DNA, 15 bp, Homo sapiens
ctaaaaaaaaaaaaa

SEQ ID NO: 623169 - DNA, 15 bp, Homo sapiens
aaaaaaaaaacctgg

SEQ ID NO: 623170 - DNA, 15 bp, Homo sapiens
aaaaaaaaacctggt

SEQ ID NO: 623171 - DNA, 15 bp, Homo sapiens
aaaaaaaacctggtt

SEQ ID NO: 623172 - DNA, 15 bp, Homo sapiens
aaaaaaacctggttg

SEQ ID NO: 623173 - DNA, 15 bp, Homo sapiens
aaaaaacctggttgt

SEQ ID NO: 623174 - DNA, 15 bp, Homo sapiens
aaaaacctggttgtt

SEQ ID NO: 623175 - DNA, 15 bp, Homo sapiens
aaaacctggttgttt

SEQ ID NO: 623176 - DNA, 15 bp, Homo sapiens
aaacctggttgttta

SEQ ID NO: 623177 - DNA, 15 bp, Homo sapiens
aacctggttgtttat

SEQ ID NO: 623178 - DNA, 15 bp, Homo sapiens
acctggttgtttatc

SEQ ID NO: 623179 - DNA, 15 bp, Homo sapiens
cctggttgtttatct

SEQ ID NO: 623180 - DNA, 15 bp, Homo sapiens
ctggttgtttatctg

SEQ ID NO: 623181 - DNA, 15 bp, Homo sapiens
tggttgtttatctga

SEQ ID NO: 623182 - DNA, 15 bp, Homo sapiens
ggttgtttatctgaa

SEQ ID NO: 623183 - DNA, 15 bp, Homo sapiens
gttgtttatctgaaa

SEQ ID NO: 623184 - DNA, 15 bp, Homo sapiens
ttgtttatctgaaac

SEQ ID NO: 623185 - DNA, 15 bp, Homo sapiens
tgtttatctgaaact

SEQ ID NO: 623186 - DNA, 15 bp, Homo sapiens
gtttatctgaaactc

SEQ ID NO: 623187 - DNA, 15 bp, Homo sapiens
tttatctgaaactca

SEQ ID NO: 623188 - DNA, 15 bp, Homo sapiens
ttatctgaaactcaa

SEQ ID NO: 623189 - DNA, 15 bp, Homo sapiens
tatctgaaactcaaa

SEQ ID NO: 623190 - DNA, 15 bp, Homo sapiens
atctgaaactcaaat

SEQ ID NO: 623191 - DNA, 15 bp, Homo sapiens
tctgaaactcaaatt

SEQ ID NO: 623192 - DNA, 15 bp, Homo sapiens
ctgaaactcaaattt

SEQ ID NO: 623193 - DNA, 15 bp, Homo sapiens
tgaaactcaaatttc

SEQ ID NO: 623194 - DNA, 15 bp, Homo sapiens
gaaactcaaatttca

SEQ ID NO: 623195 - DNA, 15 bp, Homo sapiens
aaactcaaatttcac

SEQ ID NO: 623196 - DNA, 15 bp, Homo sapiens
aactcaaatttcact

SEQ ID NO: 623197 - DNA, 15 bp, Homo sapiens
actcaaatttcacta

SEQ ID NO: 623198 - DNA, 15 bp, Homo sapiens
ctcaaatttcactag

SEQ ID NO: 623199 - DNA, 15 bp, Homo sapiens
tcaaatttcactagg

SEQ ID NO: 623200 - DNA, 15 bp, Homo sapiens
caaatttcactaggc

SEQ ID NO: 623201 - DNA, 15 bp, Homo sapiens
aaatttcactaggca

SEQ ID NO: 623202 - DNA, 15 bp, Homo sapiens
aatttcactaggcat

SEQ ID NO: 623203 - DNA, 15 bp, Homo sapiens
atttcactaggcatc

SEQ ID NO: 623204 - DNA, 15 bp, Homo sapiens
tttcactaggcatcc

SEQ ID NO: 623205 - DNA, 15 bp, Homo sapiens
ttcactaggcatcct

SEQ ID NO: 623206 - DNA, 15 bp, Homo sapiens
tcactaggcatccta

SEQ ID NO: 623207 - DNA, 15 bp, Homo sapiens
cactaggcatcctag

SEQ ID NO: 623208 - DNA, 15 bp, Homo sapiens
actaggcatcctaga

SEQ ID NO: 623209 - DNA, 15 bp, Homo sapiens
ctaggcatcctagat

SEQ ID NO: 623210 - DNA, 15 bp, Homo sapiens
taggcatcctagatt

SEQ ID NO: 623211 - DNA, 15 bp, Homo sapiens
aggcatcctagattt

SEQ ID NO: 623212 - DNA, 15 bp, Homo sapiens
ggcatcctagatttt

SEQ ID NO: 623213 - DNA, 15 bp, Homo sapiens
gcatcctagattttt

SEQ ID NO: 623214 - DNA, 15 bp, Homo sapiens
catcctagattttta

SEQ ID NO: 623215 - DNA, 15 bp, Homo sapiens
atcctagatttttat

SEQ ID NO: 623216 - DNA, 15 bp, Homo sapiens
tcctagatttttatt

SEQ ID NO: 623217 - DNA, 15 bp, Homo sapiens
cctagatttttattt

SEQ ID NO: 623218 - DNA, 15 bp, Homo sapiens
ctagatttttatttg

SEQ ID NO: 623219 - DNA, 15 bp, Homo sapiens
tagatttttatttgc

SEQ ID NO: 623220 - DNA, 15 bp, Homo sapiens
agatttttatttgcc

SEQ ID NO: 623221 - DNA, 15 bp, Homo sapiens
gatttttatttgcca

SEQ ID NO: 623222 - DNA, 15 bp, Homo sapiens
atttttatttgccaa

SEQ ID NO: 623223 - DNA, 15 bp, Homo sapiens
tttttatttgccaaa

SEQ ID NO: 623224 - DNA, 15 bp, Homo sapiens
ttttatttgccaaat

SEQ ID NO: 623225 - DNA, 15 bp, Homo sapiens
tttatttgccaaatc

SEQ ID NO: 623226 - DNA, 15 bp, Homo sapiens
ttatttgccaaatct

SEQ ID NO: 623227 - DNA, 15 bp, Homo sapiens
tatttgccaaatctg

SEQ ID NO: 623228 - DNA, 15 bp, Homo sapiens
atttgccaaatctgg

SEQ ID NO: 623229 - DNA, 15 bp, Homo sapiens
tttgccaaatctggc

SEQ ID NO: 623230 - DNA, 15 bp, Homo sapiens
ttgccaaatctggca

SEQ ID NO: 623231 - DNA, 15 bp, Homo sapiens
tgccaaatctggcaa

SEQ ID NO: 623232 - DNA, 15 bp, Homo sapiens
gccaaatctggcaac

SEQ ID NO: 623233 - DNA, 15 bp, Homo sapiens
ccaaatctggcaacc

SEQ ID NO: 623234 - DNA, 15 bp, Homo sapiens
caaatctggcaaccc

SEQ ID NO: 623235 - DNA, 15 bp, Homo sapiens
aaatctggcaacccc

SEQ ID NO: 623236 - DNA, 15 bp, Homo sapiens
aatctggcaacccca

SEQ ID NO: 623237 - DNA, 15 bp, Homo sapiens
atctggcaaccccag

SEQ ID NO: 623238 - DNA, 15 bp, Homo sapiens
tctggcaaccccagc

SEQ ID NO: 623239 - DNA, 15 bp, Homo sapiens
ctggcaaccccagcc

SEQ ID NO: 623240 - DNA, 15 bp, Homo sapiens
tggcaaccccagcca

SEQ ID NO: 623241 - DNA, 15 bp, Homo sapiens
ggcaaccccagccag

SEQ ID NO: 623242 - DNA, 15 bp, Homo sapiens
gcaaccccagccagt

SEQ ID NO: 623243 - DNA, 15 bp, Homo sapiens
caaccccagccagtg

SEQ ID NO: 623244 - DNA, 15 bp, Homo sapiens
aaccccagccagtgg

SEQ ID NO: 623245 - DNA, 15 bp, Homo sapiens
accccagccagtggc

SEQ ID NO: 623246 - DNA, 15 bp, Homo sapiens
ccccagccagtggcc

SEQ ID NO: 623247 - DNA, 15 bp, Homo sapiens
cccagccagtggcca

SEQ ID NO: 623248 - DNA, 15 bp, Homo sapiens
ccagccagtggccaa

SEQ ID NO: 623249 - DNA, 15 bp, Homo sapiens
cagccagtggccaaa

SEQ ID NO: 623250 - DNA, 15 bp, Homo sapiens
agccagtggccaaaa

SEQ ID NO: 623251 - DNA, 15 bp, Homo sapiens
gccagtggccaaaat

SEQ ID NO: 623252 - DNA, 15 bp, Homo sapiens
ccagtggccaaaata

SEQ ID NO: 623253 - DNA, 15 bp, Homo sapiens
cagtggccaaaataa

SEQ ID NO: 623254 - DNA, 15 bp, Homo sapiens
agtggccaaaataat

SEQ ID NO: 623255 - DNA, 15 bp, Homo sapiens
gtggccaaaataata

SEQ ID NO: 623256 - DNA, 15 bp, Homo sapiens
tggccaaaataataa

SEQ ID NO: 623257 - DNA, 15 bp, Homo sapiens
ggccaaaataataag

SEQ ID NO: 623258 - DNA, 15 bp, Homo sapiens
gccaaaataataaga

SEQ ID NO: 623259 - DNA, 15 bp, Homo sapiens
ccaaaataataagac

SEQ ID NO: 623260 - DNA, 15 bp, Homo sapiens
caaaataataagacc

SEQ ID NO: 623261 - DNA, 15 bp, Homo sapiens
aaaataataagacct

SEQ ID NO: 623262 - DNA, 15 bp, Homo sapiens
aaataataagacctt

SEQ ID NO: 623263 - DNA, 15 bp, Homo sapiens
aataataagaccttc

SEQ ID NO: 623264 - DNA, 15 bp, Homo sapiens
ataataagaccttca

SEQ ID NO: 623265 - DNA, 15 bp, Homo sapiens
taataagaccttcac

SEQ ID NO: 623266 - DNA, 15 bp, Homo sapiens
aataagaccttcact

SEQ ID NO: 623267 - DNA, 15 bp, Homo sapiens
ataagaccttcactt

SEQ ID NO: 623268 - DNA, 15 bp, Homo sapiens
taagaccttcactta

SEQ ID NO: 623269 - DNA, 15 bp, Homo sapiens
aagaccttcacttat

SEQ ID NO: 623270 - DNA, 15 bp, Homo sapiens
agaccttcacttatt

SEQ ID NO: 623271 - DNA, 15 bp, Homo sapiens
gaccttcacttatta

SEQ ID NO: 623272 - DNA, 15 bp, Homo sapiens
accttcacttattag

SEQ ID NO: 623273 - DNA, 15 bp, Homo sapiens
ccttcacttattaga

SEQ ID NO: 623274 - DNA, 15 bp, Homo sapiens
cttcacttattagat

SEQ ID NO: 623275 - DNA, 15 bp, Homo sapiens
ttcacttattagatt

SEQ ID NO: 623276 - DNA, 15 bp, Homo sapiens
tcacttattagatta

SEQ ID NO: 623277 - DNA, 15 bp, Homo sapiens
cacttattagattaa

SEQ ID NO: 623278 - DNA, 15 bp, Homo sapiens
acttattagattaac

SEQ ID NO: 623279 - DNA, 15 bp, Homo sapiens
cttattagattaacc

SEQ ID NO: 623280 - DNA, 15 bp, Homo sapiens
ttattagattaacca

SEQ ID NO: 623281 - DNA, 15 bp, Homo sapiens
tattagattaaccac

SEQ ID NO: 623282 - DNA, 15 bp, Homo sapiens
attagattaaccacc

SEQ ID NO: 623283 - DNA, 15 bp, Homo sapiens
ttagattaaccaccg

SEQ ID NO: 623284 - DNA, 15 bp, Homo sapiens
tagattaaccaccgc

SEQ ID NO: 623285 - DNA, 15 bp, Homo sapiens
agattaaccaccgct

SEQ ID NO: 623286 - DNA, 15 bp, Homo sapiens
gattaaccaccgcta

SEQ ID NO: 623287 - DNA, 15 bp, Homo sapiens
attaaccaccgctac

SEQ ID NO: 623288 - DNA, 15 bp, Homo sapiens
ttaaccaccgctaca

SEQ ID NO: 623289 - DNA, 15 bp, Homo sapiens
taaccaccgctacag

SEQ ID NO: 623290 - DNA, 15 bp, Homo sapiens
aaccaccgctacagg

SEQ ID NO: 623291 - DNA, 15 bp, Homo sapiens
accaccgctacaggg

SEQ ID NO: 623292 - DNA, 15 bp, Homo sapiens
ccaccgctacaggga

SEQ ID NO: 623293 - DNA, 15 bp, Homo sapiens
caccgctacagggaa

SEQ ID NO: 623294 - DNA, 15 bp, Homo sapiens
accgctacagggaaa

SEQ ID NO: 623295 - DNA, 15 bp, Homo sapiens
ccgctacagggaaaa

SEQ ID NO: 623296 - DNA, 15 bp, Homo sapiens
cgctacagggaaaaa

SEQ ID NO: 623297 - DNA, 15 bp, Homo sapiens
gctacagggaaaaat

SEQ ID NO: 623298 - DNA, 15 bp, Homo sapiens
ctacagggaaaaatg

SEQ ID NO: 623299 - DNA, 15 bp, Homo sapiens
tacagggaaaaatga

SEQ ID NO: 623300 - DNA, 15 bp, Homo sapiens
acagggaaaaatgaa

SEQ ID NO: 623301 - DNA, 15 bp, Homo sapiens
cagggaaaaatgaag

SEQ ID NO: 623302 - DNA, 15 bp, Homo sapiens
agggaaaaatgaaga

SEQ ID NO: 623303 - DNA, 15 bp, Homo sapiens
gggaaaaatgaagaa

SEQ ID NO: 623304 - DNA, 15 bp, Homo sapiens
ggaaaaatgaagaaa

SEQ ID NO: 623305 - DNA, 15 bp, Homo sapiens
gaaaaatgaagaaaa

SEQ ID NO: 623306 - DNA, 15 bp, Homo sapiens
aaaaatgaagaaaaa

SEQ ID NO: 623307 - DNA, 15 bp, Homo sapiens
aaaatgaagaaaaaa

SEQ ID NO: 623308 - DNA, 15 bp, Homo sapiens
aaatgaagaaaaaat

SEQ ID NO: 623309 - DNA, 15 bp, Homo sapiens
aatgaagaaaaaata

SEQ ID NO: 623310 - DNA, 15 bp, Homo sapiens
atgaagaaaaaatat

SEQ ID NO: 623311 - DNA, 15 bp, Homo sapiens
tgaagaaaaaatatt

SEQ ID NO: 623312 - DNA, 15 bp, Homo sapiens
gaagaaaaaatattt

SEQ ID NO: 623313 - DNA, 15 bp, Homo sapiens
aagaaaaaatattta

SEQ ID NO: 623314 - DNA, 15 bp, Homo sapiens
agaaaaaatatttat

SEQ ID NO: 623315 - DNA, 15 bp, Homo sapiens
gaaaaaatatttatt

SEQ ID NO: 623316 - DNA, 15 bp, Homo sapiens
aaaaaatatttatta

SEQ ID NO: 623317 - DNA, 15 bp, Homo sapiens
aaaaatatttattaa

SEQ ID NO: 623318 - DNA, 15 bp, Homo sapiens
aaaatatttattaaa

SEQ ID NO: 623319 - DNA, 15 bp, Homo sapiens
aaatatttattaaat

SEQ ID NO: 623320 - DNA, 15 bp, Homo sapiens
aatatttattaaatc

SEQ ID NO: 623321 - DNA, 15 bp, Homo sapiens
atatttattaaatca

SEQ ID NO: 623322 - DNA, 15 bp, Homo sapiens
tatttattaaatcaa

SEQ ID NO: 623323 - DNA, 15 bp, Homo sapiens
atttattaaatcaat

SEQ ID NO: 623324 - DNA, 15 bp, Homo sapiens
tttattaaatcaata

SEQ ID NO: 623325 - DNA, 15 bp, Homo sapiens
ttattaaatcaatag

SEQ ID NO: 623326 - DNA, 15 bp, Homo sapiens
tattaaatcaatagc

SEQ ID NO: 623327 - DNA, 15 bp, Homo sapiens
attaaatcaatagca

SEQ ID NO: 623328 - DNA, 15 bp, Homo sapiens
ttaaatcaatagcac

SEQ ID NO: 623329 - DNA, 15 bp, Homo sapiens
taaatcaatagcaca

SEQ ID NO: 623330 - DNA, 15 bp, Homo sapiens
aaatcaatagcacac

SEQ ID NO: 623331 - DNA, 15 bp, Homo sapiens
aatcaatagcacact

SEQ ID NO: 623332 - DNA, 15 bp, Homo sapiens
atcaatagcacacta

SEQ ID NO: 623333 - DNA, 15 bp, Homo sapiens
tcaatagcacactac

SEQ ID NO: 623334 - DNA, 15 bp, Homo sapiens
caatagcacactacc

SEQ ID NO: 623335 - DNA, 15 bp, Homo sapiens
aatagcacactacca

SEQ ID NO: 623336 - DNA, 15 bp, Homo sapiens
atagcacactaccac

SEQ ID NO: 623337 - DNA, 15 bp, Homo sapiens
tagcacactaccacc

SEQ ID NO: 623338 - DNA, 15 bp, Homo sapiens
agcacactaccacct

SEQ ID NO: 623339 - DNA, 15 bp, Homo sapiens
gcacactaccacctt

SEQ ID NO: 623340 - DNA, 15 bp, Homo sapiens
cacactaccaccttc

SEQ ID NO: 623341 - DNA, 15 bp, Homo sapiens
acactaccaccttcc

SEQ ID NO: 623342 - DNA, 15 bp, Homo sapiens
cactaccaccttcct

SEQ ID NO: 623343 - DNA, 15 bp, Homo sapiens
actaccaccttcctg

SEQ ID NO: 623344 - DNA, 15 bp, Homo sapiens
ctaccaccttcctga

SEQ ID NO: 623345 - DNA, 15 bp, Homo sapiens
taccaccttcctgac

SEQ ID NO: 623346 - DNA, 15 bp, Homo sapiens
accaccttcctgaca

SEQ ID NO: 623347 - DNA, 15 bp, Homo sapiens
ccaccttcctgacaa

SEQ ID NO: 623348 - DNA, 15 bp, Homo sapiens
caccttcctgacaac

SEQ ID NO: 623349 - DNA, 15 bp, Homo sapiens
accttcctgacaacc

SEQ ID NO: 623350 - DNA, 15 bp, Homo sapiens
ccttcctgacaacca

SEQ ID NO: 623351 - DNA, 15 bp, Homo sapiens
cttcctgacaaccaa

SEQ ID NO: 623352 - DNA, 15 bp, Homo sapiens
ttcctgacaaccaag

SEQ ID NO: 623353 - DNA, 15 bp, Homo sapiens
tcctgacaaccaagg

SEQ ID NO: 623354 - DNA, 15 bp, Homo sapiens
cctgacaaccaaggt

SEQ ID NO: 623355 - DNA, 15 bp, Homo sapiens
ctgacaaccaaggtt

SEQ ID NO: 623356 - DNA, 15 bp, Homo sapiens
tgacaaccaaggttg

SEQ ID NO: 623357 - DNA, 15 bp, Homo sapiens
gacaaccaaggttgg

SEQ ID NO: 623358 - DNA, 15 bp, Homo sapiens
acaaccaaggttggt

SEQ ID NO: 623359 - DNA, 15 bp, Homo sapiens
caaccaaggttggtg

SEQ ID NO: 623360 - DNA, 15 bp, Homo sapiens
aaccaaggttggtgg

SEQ ID NO: 623361 - DNA, 15 bp, Homo sapiens
accaaggttggtggg

SEQ ID NO: 623362 - DNA, 15 bp, Homo sapiens
ccaaggttggtgggg

SEQ ID NO: 623363 - DNA, 15 bp, Homo sapiens
caaggttggtggggg

SEQ ID NO: 623364 - DNA, 15 bp, Homo sapiens
aaggttggtgggggt

SEQ ID NO: 623365 - DNA, 15 bp, Homo sapiens
aggttggtgggggta

SEQ ID NO: 623366 - DNA, 15 bp, Homo sapiens
ggttggtgggggtag

SEQ ID NO: 623367 - DNA, 15 bp, Homo sapiens
gttggtgggggtagg

SEQ ID NO: 623368 - DNA, 15 bp, Homo sapiens
ttggtgggggtaggg

SEQ ID NO: 623369 - DNA, 15 bp, Homo sapiens
tggtgggggtaggga

SEQ ID NO: 623370 - DNA, 15 bp, Homo sapiens
ggtgggggtagggag

SEQ ID NO: 623371 - DNA, 15 bp, Homo sapiens
gtgggggtagggagg

SEQ ID NO: 623372 - DNA, 15 bp, Homo sapiens
tgggggtagggaggg

SEQ ID NO: 623373 - DNA, 15 bp, Homo sapiens
gggggtagggagggg

SEQ ID NO: 623374 - DNA, 15 bp, Homo sapiens
ggggtagggaggggt

SEQ ID NO: 623375 - DNA, 15 bp, Homo sapiens
gggtagggaggggtc

SEQ ID NO: 623376 - DNA, 15 bp, Homo sapiens
ggtagggaggggtca

SEQ ID NO: 623377 - DNA, 15 bp, Homo sapiens
gtagggaggggtcag

SEQ ID NO: 623378 - DNA, 15 bp, Homo sapiens
tagggaggggtcagg

SEQ ID NO: 623379 - DNA, 15 bp, Homo sapiens
agggaggggtcagga

SEQ ID NO: 623380 - DNA, 15 bp, Homo sapiens
gggaggggtcaggat

SEQ ID NO: 623381 - DNA, 15 bp, Homo sapiens
ggaggggtcaggata

SEQ ID NO: 623382 - DNA, 15 bp, Homo sapiens
gaggggtcaggatag

SEQ ID NO: 623383 - DNA, 15 bp, Homo sapiens
aggggtcaggatagc

SEQ ID NO: 623384 - DNA, 15 bp, Homo sapiens
ggggtcaggatagcg

SEQ ID NO: 623385 - DNA, 15 bp, Homo sapiens
gggtcaggatagcgt

SEQ ID NO: 623386 - DNA, 15 bp, Homo sapiens
ggtcaggatagcgta

SEQ ID NO: 623387 - DNA, 15 bp, Homo sapiens
gtcaggatagcgtac

SEQ ID NO: 623388 - DNA, 15 bp, Homo sapiens
tcaggatagcgtacc

SEQ ID NO: 623389 - DNA, 15 bp, Homo sapiens
caggatagcgtaccc

SEQ ID NO: 623390 - DNA, 15 bp, Homo sapiens
aggatagcgtaccct

SEQ ID NO: 623391 - DNA, 15 bp, Homo sapiens
ggatagcgtacccta

SEQ ID NO: 623392 - DNA, 15 bp, Homo sapiens
gatagcgtaccctat

SEQ ID NO: 623393 - DNA, 15 bp, Homo sapiens
atagcgtaccctatt

SEQ ID NO: 623394 - DNA, 15 bp, Homo sapiens
tagcgtaccctatta

SEQ ID NO: 623395 - DNA, 15 bp, Homo sapiens
agcgtaccctattac

SEQ ID NO: 623396 - DNA, 15 bp, Homo sapiens
gcgtaccctattaca

SEQ ID NO: 623397 - DNA, 15 bp, Homo sapiens
cgtaccctattacag

SEQ ID NO: 623398 - DNA, 15 bp, Homo sapiens
gtaccctattacagg

SEQ ID NO: 623399 - DNA, 15 bp, Homo sapiens
taccctattacaggc

SEQ ID NO: 623400 - DNA, 15 bp, Homo sapiens
accctattacaggct

SEQ ID NO: 623401 - DNA, 15 bp, Homo sapiens
ccctattacaggctg

SEQ ID NO: 623402 - DNA, 15 bp, Homo sapiens
cctattacaggctgc

SEQ ID NO: 623403 - DNA, 15 bp, Homo sapiens
ctattacaggctgca

SEQ ID NO: 623404 - DNA, 15 bp, Homo sapiens
tattacaggctgcag

SEQ ID NO: 623405 - DNA, 15 bp, Homo sapiens
attacaggctgcagg

SEQ ID NO: 623406 - DNA, 15 bp, Homo sapiens
ttacaggctgcaggg

SEQ ID NO: 623407 - DNA, 15 bp, Homo sapiens
tacaggctgcagggt

SEQ ID NO: 623408 - DNA, 15 bp, Homo sapiens
acaggctgcagggtc

SEQ ID NO: 623409 - DNA, 15 bp, Homo sapiens
caggctgcagggtca

SEQ ID NO: 623410 - DNA, 15 bp, Homo sapiens
aggctgcagggtcaa

SEQ ID NO: 623411 - DNA, 15 bp, Homo sapiens
ggctgcagggtcaaa

SEQ ID NO: 623412 - DNA, 15 bp, Homo sapiens
gctgcagggtcaaag

SEQ ID NO: 623413 - DNA, 15 bp, Homo sapiens
ctgcagggtcaaagg

SEQ ID NO: 623414 - DNA, 15 bp, Homo sapiens
tgcagggtcaaagga

SEQ ID NO: 623415 - DNA, 15 bp, Homo sapiens
gcagggtcaaaggaa

SEQ ID NO: 623416 - DNA, 15 bp, Homo sapiens
cagggtcaaaggaat

SEQ ID NO: 623417 - DNA, 15 bp, Homo sapiens
agggtcaaaggaatt

SEQ ID NO: 623418 - DNA, 15 bp, Homo sapiens
gggtcaaaggaattg

SEQ ID NO: 623419 - DNA, 15 bp, Homo sapiens
ggtcaaaggaattgg

SEQ ID NO: 623420 - DNA, 15 bp, Homo sapiens
gtcaaaggaattggt

SEQ ID NO: 623421 - DNA, 15 bp, Homo sapiens
tcaaaggaattggta

SEQ ID NO: 623422 - DNA, 15 bp, Homo sapiens
caaaggaattggtag

SEQ ID NO: 623423 - DNA, 15 bp, Homo sapiens
aaaggaattggtagt

SEQ ID NO: 623424 - DNA, 15 bp, Homo sapiens
aaggaattggtagta

SEQ ID NO: 623425 - DNA, 15 bp, Homo sapiens
aggaattggtagtaa

SEQ ID NO: 623426 - DNA, 15 bp, Homo sapiens
ggaattggtagtaaa

SEQ ID NO: 623427 - DNA, 15 bp, Homo sapiens
gaattggtagtaaag

SEQ ID NO: 623428 - DNA, 15 bp, Homo sapiens
aattggtagtaaagg

SEQ ID NO: 623429 - DNA, 15 bp, Homo sapiens
attggtagtaaaggc

SEQ ID NO: 623430 - DNA, 15 bp, Homo sapiens
ttggtagtaaaggcc

SEQ ID NO: 623431 - DNA, 15 bp, Homo sapiens
tggtagtaaaggcct

SEQ ID NO: 623432 - DNA, 15 bp, Homo sapiens
ggtagtaaaggccta

SEQ ID NO: 623433 - DNA, 15 bp, Homo sapiens
gtagtaaaggcctag

SEQ ID NO: 623434 - DNA, 15 bp, Homo sapiens
tagtaaaggcctagt

SEQ ID NO: 623435 - DNA, 15 bp, Homo sapiens
agtaaaggcctagtt

SEQ ID NO: 623436 - DNA, 15 bp, Homo sapiens
gtaaaggcctagtta

SEQ ID NO: 623437 - DNA, 15 bp, Homo sapiens
taaaggcctagttat

SEQ ID NO: 623438 - DNA, 15 bp, Homo sapiens
aaaggcctagttata

SEQ ID NO: 623439 - DNA, 15 bp, Homo sapiens
aaggcctagttataa

SEQ ID NO: 623440 - DNA, 15 bp, Homo sapiens
aggcctagttataat

SEQ ID NO: 623441 - DNA, 15 bp, Homo sapiens
ggcctagttataatg

SEQ ID NO: 623442 - DNA, 15 bp, Homo sapiens
gcctagttataatgt

SEQ ID NO: 623443 - DNA, 15 bp, Homo sapiens
cctagttataatgta

SEQ ID NO: 623444 - DNA, 15 bp, Homo sapiens
ctagttataatgtaa

SEQ ID NO: 623445 - DNA, 15 bp, Homo sapiens
tagttataatgtaac

SEQ ID NO: 623446 - DNA, 15 bp, Homo sapiens
agttataatgtaaca

SEQ ID NO: 623447 - DNA, 15 bp, Homo sapiens
gttataatgtaacag

SEQ ID NO: 623448 - DNA, 15 bp, Homo sapiens
ttataatgtaacagg

SEQ ID NO: 623449 - DNA, 15 bp, Homo sapiens
tataatgtaacaggg

SEQ ID NO: 623450 - DNA, 15 bp, Homo sapiens
ataatgtaacaggga

SEQ ID NO: 623451 - DNA, 15 bp, Homo sapiens
taatgtaacagggat

SEQ ID NO: 623452 - DNA, 15 bp, Homo sapiens
aatgtaacagggatc

SEQ ID NO: 623453 - DNA, 15 bp, Homo sapiens
atgtaacagggatca

SEQ ID NO: 623454 - DNA, 15 bp, Homo sapiens
tgtaacagggatcat

SEQ ID NO: 623455 - DNA, 15 bp, Homo sapiens
gtaacagggatcatt

SEQ ID NO: 623456 - DNA, 15 bp, Homo sapiens
taacagggatcatta

SEQ ID NO: 623457 - DNA, 15 bp, Homo sapiens
aacagggatcattat

SEQ ID NO: 623458 - DNA, 15 bp, Homo sapiens
acagggatcattatg

SEQ ID NO: 623459 - DNA, 15 bp, Homo sapiens
cagggatcattatga

SEQ ID NO: 623460 - DNA, 15 bp, Homo sapiens
agggatcattatgac

SEQ ID NO: 623461 - DNA, 15 bp, Homo sapiens
gggatcattatgaca

SEQ ID NO: 623462 - DNA, 15 bp, Homo sapiens
ggatcattatgacat

SEQ ID NO: 623463 - DNA, 15 bp, Homo sapiens
gatcattatgacatc

SEQ ID NO: 623464 - DNA, 15 bp, Homo sapiens
atcattatgacatca

SEQ ID NO: 623465 - DNA, 15 bp, Homo sapiens
tcattatgacatcaa

SEQ ID NO: 623466 - DNA, 15 bp, Homo sapiens
cattatgacatcaac

SEQ ID NO: 623467 - DNA, 15 bp, Homo sapiens
attatgacatcaacc

SEQ ID NO: 623468 - DNA, 15 bp, Homo sapiens
ttatgacatcaaccc

SEQ ID NO: 623469 - DNA, 15 bp, Homo sapiens
tatgacatcaacccc

SEQ ID NO: 623470 - DNA, 15 bp, Homo sapiens
atgacatcaacccca

SEQ ID NO: 623471 - DNA, 15 bp, Homo sapiens
tgacatcaaccccaa

SEQ ID NO: 623472 - DNA, 15 bp, Homo sapiens
gacatcaaccccaat

SEQ ID NO: 623473 - DNA, 15 bp, Homo sapiens
acatcaaccccaatt

SEQ ID NO: 623474 - DNA, 15 bp, Homo sapiens
catcaaccccaattt

SEQ ID NO: 623475 - DNA, 15 bp, Homo sapiens
atcaaccccaattta

SEQ ID NO: 623476 - DNA, 15 bp, Homo sapiens
tcaaccccaatttat

SEQ ID NO: 623477 - DNA, 15 bp, Homo sapiens
caaccccaatttatt

SEQ ID NO: 623478 - DNA, 15 bp, Homo sapiens
aaccccaatttattc

SEQ ID NO: 623479 - DNA, 15 bp, Homo sapiens
accccaatttattct

SEQ ID NO: 623480 - DNA, 15 bp, Homo sapiens
ccccaatttattcta

SEQ ID NO: 623481 - DNA, 15 bp, Homo sapiens
cccaatttattctag

SEQ ID NO: 623482 - DNA, 15 bp, Homo sapiens
ccaatttattctagg

SEQ ID NO: 623483 - DNA, 15 bp, Homo sapiens
caatttattctaggt

SEQ ID NO: 623484 - DNA, 15 bp, Homo sapiens
aatttattctaggtg

SEQ ID NO: 623485 - DNA, 15 bp, Homo sapiens
atttattctaggtgt

SEQ ID NO: 623486 - DNA, 15 bp, Homo sapiens
tttattctaggtgtc

SEQ ID NO: 623487 - DNA, 15 bp, Homo sapiens
ttattctaggtgtct

SEQ ID NO: 623488 - DNA, 15 bp, Homo sapiens
tattctaggtgtctt

SEQ ID NO: 623489 - DNA, 15 bp, Homo sapiens
attctaggtgtcttg

SEQ ID NO: 623490 - DNA, 15 bp, Homo sapiens
ttctaggtgtcttga

SEQ ID NO: 623491 - DNA, 15 bp, Homo sapiens
tctaggtgtcttgag

SEQ ID NO: 623492 - DNA, 15 bp, Homo sapiens
ctaggtgtcttgagt

SEQ ID NO: 623493 - DNA, 15 bp, Homo sapiens
taggtgtcttgagta

SEQ ID NO: 623494 - DNA, 15 bp, Homo sapiens
aggtgtcttgagtag

SEQ ID NO: 623495 - DNA, 15 bp, Homo sapiens
ggtgtcttgagtagt

SEQ ID NO: 623496 - DNA, 15 bp, Homo sapiens
gtgtcttgagtagta

SEQ ID NO: 623497 - DNA, 15 bp, Homo sapiens
tgtcttgagtagtaa

SEQ ID NO: 623498 - DNA, 15 bp, Homo sapiens
gtcttgagtagtaaa

SEQ ID NO: 623499 - DNA, 15 bp, Homo sapiens
tcttgagtagtaaaa

SEQ ID NO: 623500 - DNA, 15 bp, Homo sapiens
cttgagtagtaaaat

SEQ ID NO: 623501 - DNA, 15 bp, Homo sapiens
ttgagtagtaaaatc

SEQ ID NO: 623502 - DNA, 15 bp, Homo sapiens
tgagtagtaaaatct

SEQ ID NO: 623503 - DNA, 15 bp, Homo sapiens
gagtagtaaaatctc

SEQ ID NO: 623504 - DNA, 15 bp, Homo sapiens
agtagtaaaatctca

SEQ ID NO: 623505 - DNA, 15 bp, Homo sapiens
gtagtaaaatctcaa

SEQ ID NO: 623506 - DNA, 15 bp, Homo sapiens
tagtaaaatctcaac

SEQ ID NO: 623507 - DNA, 15 bp, Homo sapiens
agtaaaatctcaaca

SEQ ID NO: 623508 - DNA, 15 bp, Homo sapiens
gtaaaatctcaacat

SEQ ID NO: 623509 - DNA, 15 bp, Homo sapiens
taaaatctcaacatt

SEQ ID NO: 623510 - DNA, 15 bp, Homo sapiens
aaaatctcaacattt

SEQ ID NO: 623511 - DNA, 15 bp, Homo sapiens
aaatctcaacatttt

SEQ ID NO: 623512 - DNA, 15 bp, Homo sapiens
aatctcaacatttta

SEQ ID NO: 623513 - DNA, 15 bp, Homo sapiens
atctcaacattttaa

SEQ ID NO: 623514 - DNA, 15 bp, Homo sapiens
tctcaacattttaag

SEQ ID NO: 623515 - DNA, 15 bp, Homo sapiens
ctcaacattttaaga

SEQ ID NO: 623516 - DNA, 15 bp, Homo sapiens
tcaacattttaagac

SEQ ID NO: 623517 - DNA, 15 bp, Homo sapiens
caacattttaagacc

SEQ ID NO: 623518 - DNA, 15 bp, Homo sapiens
aacattttaagacca

SEQ ID NO: 623519 - DNA, 15 bp, Homo sapiens
acattttaagaccaa

SEQ ID NO: 623520 - DNA, 15 bp, Homo sapiens
cattttaagaccaac

SEQ ID NO: 623521 - DNA, 15 bp, Homo sapiens
attttaagaccaaca

SEQ ID NO: 623522 - DNA, 15 bp, Homo sapiens
ttttaagaccaacat

SEQ ID NO: 623523 - DNA, 15 bp, Homo sapiens
tttaagaccaacatg

SEQ ID NO: 623524 - DNA, 15 bp, Homo sapiens
ttaagaccaacatga

SEQ ID NO: 623525 - DNA, 15 bp, Homo sapiens
taagaccaacatgag

SEQ ID NO: 623526 - DNA, 15 bp, Homo sapiens
aagaccaacatgagc

SEQ ID NO: 623527 - DNA, 15 bp, Homo sapiens
agaccaacatgagcc

SEQ ID NO: 623528 - DNA, 15 bp, Homo sapiens
gaccaacatgagcct

SEQ ID NO: 623529 - DNA, 15 bp, Homo sapiens
accaacatgagcctc

SEQ ID NO: 623530 - DNA, 15 bp, Homo sapiens
ccaacatgagcctcc

SEQ ID NO: 623531 - DNA, 15 bp, Homo sapiens
caacatgagcctcca

SEQ ID NO: 623532 - DNA, 15 bp, Homo sapiens
aacatgagcctccat

SEQ ID NO: 623533 - DNA, 15 bp, Homo sapiens
acatgagcctccatt

SEQ ID NO: 623534 - DNA, 15 bp, Homo sapiens
catgagcctccattt

SEQ ID NO: 623535 - DNA, 15 bp, Homo sapiens
atgagcctccatttc

SEQ ID NO: 623536 - DNA, 15 bp, Homo sapiens
tgagcctccatttca

SEQ ID NO: 623537 - DNA, 15 bp, Homo sapiens
gagcctccatttcat

SEQ ID NO: 623538 - DNA, 15 bp, Homo sapiens
agcctccatttcatg

SEQ ID NO: 623539 - DNA, 15 bp, Homo sapiens
gcctccatttcatgt

SEQ ID NO: 623540 - DNA, 15 bp, Homo sapiens
cctccatttcatgtg

SEQ ID NO: 623541 - DNA, 15 bp, Homo sapiens
ctccatttcatgtga

SEQ ID NO: 623542 - DNA, 15 bp, Homo sapiens
tccatttcatgtgat

SEQ ID NO: 623543 - DNA, 15 bp, Homo sapiens
ccatttcatgtgatg

SEQ ID NO: 623544 - DNA, 15 bp, Homo sapiens
catttcatgtgatga

SEQ ID NO: 623545 - DNA, 15 bp, Homo sapiens
atttcatgtgatgat

SEQ ID NO: 623546 - DNA, 15 bp, Homo sapiens
tttcatgtgatgata

SEQ ID NO: 623547 - DNA, 15 bp, Homo sapiens
ttcatgtgatgataa

SEQ ID NO: 623548 - DNA, 15 bp, Homo sapiens
tcatgtgatgataag

SEQ ID NO: 623549 - DNA, 15 bp, Homo sapiens
catgtgatgataaga

SEQ ID NO: 623550 - DNA, 15 bp, Homo sapiens
atgtgatgataagat

SEQ ID NO: 623551 - DNA, 15 bp, Homo sapiens
tgtgatgataagata

SEQ ID NO: 623552 - DNA, 15 bp, Homo sapiens
gtgatgataagatat

SEQ ID NO: 623553 - DNA, 15 bp, Homo sapiens
tgatgataagatata

SEQ ID NO: 623554 - DNA, 15 bp, Homo sapiens
gatgataagatatac

SEQ ID NO: 623555 - DNA, 15 bp, Homo sapiens
atgataagatatacc

SEQ ID NO: 623556 - DNA, 15 bp, Homo sapiens
tgataagatatacca

SEQ ID NO: 623557 - DNA, 15 bp, Homo sapiens
gataagatataccaa

SEQ ID NO: 623558 - DNA, 15 bp, Homo sapiens
ataagatataccaac

SEQ ID NO: 623559 - DNA, 15 bp, Homo sapiens
taagatataccaact

SEQ ID NO: 623560 - DNA, 15 bp, Homo sapiens
aagatataccaactg

SEQ ID NO: 623561 - DNA, 15 bp, Homo sapiens
agatataccaactga

SEQ ID NO: 623562 - DNA, 15 bp, Homo sapiens
gatataccaactgat

SEQ ID NO: 623563 - DNA, 15 bp, Homo sapiens
atataccaactgatg

SEQ ID NO: 623564 - DNA, 15 bp, Homo sapiens
tataccaactgatgg

SEQ ID NO: 623565 - DNA, 15 bp, Homo sapiens
ataccaactgatgga

SEQ ID NO: 623566 - DNA, 15 bp, Homo sapiens
taccaactgatggag

SEQ ID NO: 623567 - DNA, 15 bp, Homo sapiens
accaactgatggaga

SEQ ID NO: 623568 - DNA, 15 bp, Homo sapiens
ccaactgatggagac

SEQ ID NO: 623569 - DNA, 15 bp, Homo sapiens
caactgatggagacc

SEQ ID NO: 623570 - DNA, 15 bp, Homo sapiens
aactgatggagacca

SEQ ID NO: 623571 - DNA, 15 bp, Homo sapiens
actgatggagaccaa

SEQ ID NO: 623572 - DNA, 15 bp, Homo sapiens
ctgatggagaccaac

SEQ ID NO: 623573 - DNA, 15 bp, Homo sapiens
tgatggagaccaaca

SEQ ID NO: 623574 - DNA, 15 bp, Homo sapiens
gatggagaccaacac

SEQ ID NO: 623575 - DNA, 15 bp, Homo sapiens
atggagaccaacaca

SEQ ID NO: 623576 - DNA, 15 bp, Homo sapiens
tggagaccaacacaa

SEQ ID NO: 623577 - DNA, 15 bp, Homo sapiens
ggagaccaacacaaa

SEQ ID NO: 623578 - DNA, 15 bp, Homo sapiens
gagaccaacacaaat

SEQ ID NO: 623579 - DNA, 15 bp, Homo sapiens
agaccaacacaaatg

SEQ ID NO: 623580 - DNA, 15 bp, Homo sapiens
gaccaacacaaatga

SEQ ID NO: 623581 - DNA, 15 bp, Homo sapiens
accaacacaaatgac

SEQ ID NO: 623582 - DNA, 15 bp, Homo sapiens
ccaacacaaatgacc

SEQ ID NO: 623583 - DNA, 15 bp, Homo sapiens
caacacaaatgacct

SEQ ID NO: 623584 - DNA, 15 bp, Homo sapiens
aacacaaatgacctt

SEQ ID NO: 623585 - DNA, 15 bp, Homo sapiens
acacaaatgaccttc

SEQ ID NO: 623586 - DNA, 15 bp, Homo sapiens
cacaaatgaccttct

SEQ ID NO: 623587 - DNA, 15 bp, Homo sapiens
acaaatgaccttctc

SEQ ID NO: 623588 - DNA, 15 bp, Homo sapiens
caaatgaccttctca

SEQ ID NO: 623589 - DNA, 15 bp, Homo sapiens
aaatgaccttctcat

SEQ ID NO: 623590 - DNA, 15 bp, Homo sapiens
aatgaccttctcatc

SEQ ID NO: 623591 - DNA, 15 bp, Homo sapiens
atgaccttctcatcc

SEQ ID NO: 623592 - DNA, 15 bp, Homo sapiens
tgaccttctcatcca

SEQ ID NO: 623593 - DNA, 15 bp, Homo sapiens
gaccttctcatccat

SEQ ID NO: 623594 - DNA, 15 bp, Homo sapiens
accttctcatccatg

SEQ ID NO: 623595 - DNA, 15 bp, Homo sapiens
ccttctcatccatgg

SEQ ID NO: 623596 - DNA, 15 bp, Homo sapiens
cttctcatccatggt

SEQ ID NO: 623597 - DNA, 15 bp, Homo sapiens
ttctcatccatggtt

SEQ ID NO: 623598 - DNA, 15 bp, Homo sapiens
tctcatccatggttt

SEQ ID NO: 623599 - DNA, 15 bp, Homo sapiens
ctcatccatggtttt

SEQ ID NO: 623600 - DNA, 15 bp, Homo sapiens
tcatccatggttttt

SEQ ID NO: 623601 - DNA, 15 bp, Homo sapiens
catccatggtttttt

SEQ ID NO: 623602 - DNA, 15 bp, Homo sapiens
atccatggtttttta

SEQ ID NO: 623603 - DNA, 15 bp, Homo sapiens
tccatggttttttaa

SEQ ID NO: 623604 - DNA, 15 bp, Homo sapiens
ccatggttttttaaa

SEQ ID NO: 623605 - DNA, 15 bp, Homo sapiens
catggttttttaaaa

SEQ ID NO: 623606 - DNA, 15 bp, Homo sapiens
atggttttttaaaat

SEQ ID NO: 623607 - DNA, 15 bp, Homo sapiens
tggttttttaaaatg

SEQ ID NO: 623608 - DNA, 15 bp, Homo sapiens
ggttttttaaaatga

SEQ ID NO: 623609 - DNA, 15 bp, Homo sapiens
gttttttaaaatgat

SEQ ID NO: 623610 - DNA, 15 bp, Homo sapiens
ttttttaaaatgatg

SEQ ID NO: 623611 - DNA, 15 bp, Homo sapiens
tttttaaaatgatgg

SEQ ID NO: 623612 - DNA, 15 bp, Homo sapiens
ttttaaaatgatggt

SEQ ID NO: 623613 - DNA, 15 bp, Homo sapiens
tttaaaatgatggtg

SEQ ID NO: 623614 - DNA, 15 bp, Homo sapiens
ttaaaatgatggtga

SEQ ID NO: 623615 - DNA, 15 bp, Homo sapiens
taaaatgatggtgaa

SEQ ID NO: 623616 - DNA, 15 bp, Homo sapiens
aaaatgatggtgaat

SEQ ID NO: 623617 - DNA, 15 bp, Homo sapiens
aaatgatggtgaata

SEQ ID NO: 623618 - DNA, 15 bp, Homo sapiens
aatgatggtgaatat

SEQ ID NO: 623619 - DNA, 15 bp, Homo sapiens
atgatggtgaatatt

SEQ ID NO: 623620 - DNA, 15 bp, Homo sapiens
tgatggtgaatattg

SEQ ID NO: 623621 - DNA, 15 bp, Homo sapiens
gatggtgaatattgg

SEQ ID NO: 623622 - DNA, 15 bp, Homo sapiens
atggtgaatattgga

SEQ ID NO: 623623 - DNA, 15 bp, Homo sapiens
tggtgaatattggaa

SEQ ID NO: 623624 - DNA, 15 bp, Homo sapiens
ggtgaatattggaat

SEQ ID NO: 623625 - DNA, 15 bp, Homo sapiens
gtgaatattggaatt

SEQ ID NO: 623626 - DNA, 15 bp, Homo sapiens
tgaatattggaattc

SEQ ID NO: 623627 - DNA, 15 bp, Homo sapiens
gaatattggaattcc

SEQ ID NO: 623628 - DNA, 15 bp, Homo sapiens
aatattggaattcct

SEQ ID NO: 623629 - DNA, 15 bp, Homo sapiens
atattggaattcctg

SEQ ID NO: 623630 - DNA, 15 bp, Homo sapiens
tattggaattcctga

SEQ ID NO: 623631 - DNA, 15 bp, Homo sapiens
attggaattcctgaa

SEQ ID NO: 623632 - DNA, 15 bp, Homo sapiens
ttggaattcctgaag

SEQ ID NO: 623633 - DNA, 15 bp, Homo sapiens
tggaattcctgaaga

SEQ ID NO: 623634 - DNA, 15 bp, Homo sapiens
ggaattcctgaagat

SEQ ID NO: 623635 - DNA, 15 bp, Homo sapiens
gaattcctgaagata

SEQ ID NO: 623636 - DNA, 15 bp, Homo sapiens
aattcctgaagatat

SEQ ID NO: 623637 - DNA, 15 bp, Homo sapiens
attcctgaagatatg

SEQ ID NO: 623638 - DNA, 15 bp, Homo sapiens
ttcctgaagatatga

SEQ ID NO: 623639 - DNA, 15 bp, Homo sapiens
tcctgaagatatgat

SEQ ID NO: 623640 - DNA, 15 bp, Homo sapiens
cctgaagatatgatt

SEQ ID NO: 623641 - DNA, 15 bp, Homo sapiens
ctgaagatatgattt

SEQ ID NO: 623642 - DNA, 15 bp, Homo sapiens
tgaagatatgatttc

SEQ ID NO: 623643 - DNA, 15 bp, Homo sapiens
gaagatatgatttct

SEQ ID NO: 623644 - DNA, 15 bp, Homo sapiens
aagatatgatttcta

SEQ ID NO: 623645 - DNA, 15 bp, Homo sapiens
agatatgatttctat

SEQ ID NO: 623646 - DNA, 15 bp, Homo sapiens
gatatgatttctatc

SEQ ID NO: 623647 - DNA, 15 bp, Homo sapiens
atatgatttctatct

SEQ ID NO: 623648 - DNA, 15 bp, Homo sapiens
tatgatttctatctt

SEQ ID NO: 623649 - DNA, 15 bp, Homo sapiens
atgatttctatctta

SEQ ID NO: 623650 - DNA, 15 bp, Homo sapiens
tgatttctatcttac

SEQ ID NO: 623651 - DNA, 15 bp, Homo sapiens
gatttctatcttact

SEQ ID NO: 623652 - DNA, 15 bp, Homo sapiens
atttctatcttactc

SEQ ID NO: 623653 - DNA, 15 bp, Homo sapiens
tttctatcttactca

SEQ ID NO: 623654 - DNA, 15 bp, Homo sapiens
ttctatcttactcag

SEQ ID NO: 623655 - DNA, 15 bp, Homo sapiens
tctatcttactcagc

SEQ ID NO: 623656 - DNA, 15 bp, Homo sapiens
ctatcttactcagct

SEQ ID NO: 623657 - DNA, 15 bp, Homo sapiens
tatcttactcagctt

SEQ ID NO: 623658 - DNA, 15 bp, Homo sapiens
atcttactcagctta

SEQ ID NO: 623659 - DNA, 15 bp, Homo sapiens
tcttactcagcttag

SEQ ID NO: 623660 - DNA, 15 bp, Homo sapiens
cttactcagcttagt

SEQ ID NO: 623661 - DNA, 15 bp, Homo sapiens
ttactcagcttagta

SEQ ID NO: 623662 - DNA, 15 bp, Homo sapiens
tactcagcttagtaa

SEQ ID NO: 623663 - DNA, 15 bp, Homo sapiens
actcagcttagtaag

SEQ ID NO: 623664 - DNA, 15 bp, Homo sapiens
ctcagcttagtaagc

SEQ ID NO: 623665 - DNA, 15 bp, Homo sapiens
tcagcttagtaagca

SEQ ID NO: 623666 - DNA, 15 bp, Homo sapiens
cagcttagtaagcag

SEQ ID NO: 623667 - DNA, 15 bp, Homo sapiens
agcttagtaagcagc

SEQ ID NO: 623668 - DNA, 15 bp, Homo sapiens
gcttagtaagcagct

SEQ ID NO: 623669 - DNA, 15 bp, Homo sapiens
cttagtaagcagcta

SEQ ID NO: 623670 - DNA, 15 bp, Homo sapiens
ttagtaagcagctat

SEQ ID NO: 623671 - DNA, 15 bp, Homo sapiens
tagtaagcagctatc

SEQ ID NO: 623672 - DNA, 15 bp, Homo sapiens
agtaagcagctatca

SEQ ID NO: 623673 - DNA, 15 bp, Homo sapiens
gtaagcagctatcac

SEQ ID NO: 623674 - DNA, 15 bp, Homo sapiens
taagcagctatcact

SEQ ID NO: 623675 - DNA, 15 bp, Homo sapiens
aagcagctatcactt

SEQ ID NO: 623676 - DNA, 15 bp, Homo sapiens
agcagctatcactta

SEQ ID NO: 623677 - DNA, 15 bp, Homo sapiens
gcagctatcacttaa

SEQ ID NO: 623678 - DNA, 15 bp, Homo sapiens
cagctatcacttaac

SEQ ID NO: 623679 - DNA, 15 bp, Homo sapiens
agctatcacttaaca

SEQ ID NO: 623680 - DNA, 15 bp, Homo sapiens
gctatcacttaacaa

SEQ ID NO: 623681 - DNA, 15 bp, Homo sapiens
ctatcacttaacaat

SEQ ID NO: 623682 - DNA, 15 bp, Homo sapiens
tatcacttaacaata

SEQ ID NO: 623683 - DNA, 15 bp, Homo sapiens
atcacttaacaatac

SEQ ID NO: 623684 - DNA, 15 bp, Homo sapiens
tcacttaacaataca

SEQ ID NO: 623685 - DNA, 15 bp, Homo sapiens
cacttaacaatacaa

SEQ ID NO: 623686 - DNA, 15 bp, Homo sapiens
acttaacaatacaaa

SEQ ID NO: 623687 - DNA, 15 bp, Homo sapiens
cttaacaatacaaaa

SEQ ID NO: 623688 - DNA, 15 bp, Homo sapiens
ttaacaatacaaaac

SEQ ID NO: 623689 - DNA, 15 bp, Homo sapiens
taacaatacaaaacc

SEQ ID NO: 623690 - DNA, 15 bp, Homo sapiens
aacaatacaaaacca

SEQ ID NO: 623691 - DNA, 15 bp, Homo sapiens
acaatacaaaaccag

SEQ ID NO: 623692 - DNA, 15 bp, Homo sapiens
caatacaaaaccaga

SEQ ID NO: 623693 - DNA, 15 bp, Homo sapiens
aatacaaaaccagag

SEQ ID NO: 623694 - DNA, 15 bp, Homo sapiens
atacaaaaccagaga

SEQ ID NO: 623695 - DNA, 15 bp, Homo sapiens
tacaaaaccagagat

SEQ ID NO: 623696 - DNA, 15 bp, Homo sapiens
acaaaaccagagatt

SEQ ID NO: 623697 - DNA, 15 bp, Homo sapiens
caaaaccagagatta

SEQ ID NO: 623698 - DNA, 15 bp, Homo sapiens
aaaaccagagattat

SEQ ID NO: 623699 - DNA, 15 bp, Homo sapiens
aaaccagagattatc

SEQ ID NO: 623700 - DNA, 15 bp, Homo sapiens
aaccagagattatca

SEQ ID NO: 623701 - DNA, 15 bp, Homo sapiens
accagagattatcag

SEQ ID NO: 623702 - DNA, 15 bp, Homo sapiens
ccagagattatcagt

SEQ ID NO: 623703 - DNA, 15 bp, Homo sapiens
cagagattatcagta

SEQ ID NO: 623704 - DNA, 15 bp, Homo sapiens
agagattatcagtag

SEQ ID NO: 623705 - DNA, 15 bp, Homo sapiens
gagattatcagtagc

SEQ ID NO: 623706 - DNA, 15 bp, Homo sapiens
agattatcagtagca

SEQ ID NO: 623707 - DNA, 15 bp, Homo sapiens
gattatcagtagcaa

SEQ ID NO: 623708 - DNA, 15 bp, Homo sapiens
attatcagtagcaac

SEQ ID NO: 623709 - DNA, 15 bp, Homo sapiens
ttatcagtagcaact

SEQ ID NO: 623710 - DNA, 15 bp, Homo sapiens
tatcagtagcaacta

SEQ ID NO: 623711 - DNA, 15 bp, Homo sapiens
atcagtagcaactaa

SEQ ID NO: 623712 - DNA, 15 bp, Homo sapiens
tcagtagcaactaaa

SEQ ID NO: 623713 - DNA, 15 bp, Homo sapiens
cagtagcaactaaat

SEQ ID NO: 623714 - DNA, 15 bp, Homo sapiens
agtagcaactaaatt

SEQ ID NO: 623715 - DNA, 15 bp, Homo sapiens
gtagcaactaaatta

SEQ ID NO: 623716 - DNA, 15 bp, Homo sapiens
tagcaactaaattat

SEQ ID NO: 623717 - DNA, 15 bp, Homo sapiens
agcaactaaattatt

SEQ ID NO: 623718 - DNA, 15 bp, Homo sapiens
gcaactaaattattt

SEQ ID NO: 623719 - DNA, 15 bp, Homo sapiens
caactaaattatttc

SEQ ID NO: 623720 - DNA, 15 bp, Homo sapiens
aactaaattatttcc

SEQ ID NO: 623721 - DNA, 15 bp, Homo sapiens
actaaattatttcct

SEQ ID NO: 623722 - DNA, 15 bp, Homo sapiens
ctaaattatttcctc

SEQ ID NO: 623723 - DNA, 15 bp, Homo sapiens
taaattatttcctct

SEQ ID NO: 623724 - DNA, 15 bp, Homo sapiens
aaattatttcctctc

SEQ ID NO: 623725 - DNA, 15 bp, Homo sapiens
aattatttcctctct

SEQ ID NO: 623726 - DNA, 15 bp, Homo sapiens
attatttcctctctc

SEQ ID NO: 623727 - DNA, 15 bp, Homo sapiens
ttatttcctctctct

SEQ ID NO: 623728 - DNA, 15 bp, Homo sapiens
tatttcctctctctt

SEQ ID NO: 623729 - DNA, 15 bp, Homo sapiens
atttcctctctcttc

SEQ ID NO: 623730 - DNA, 15 bp, Homo sapiens
tttcctctctcttct

SEQ ID NO: 623731 - DNA, 15 bp, Homo sapiens
ttcctctctcttctg

SEQ ID NO: 623732 - DNA, 15 bp, Homo sapiens
tcctctctcttctgt

SEQ ID NO: 623733 - DNA, 15 bp, Homo sapiens
cctctctcttctgtc

SEQ ID NO: 623734 - DNA, 15 bp, Homo sapiens
ctctctcttctgtct

SEQ ID NO: 623735 - DNA, 15 bp, Homo sapiens
tctctcttctgtcta

SEQ ID NO: 623736 - DNA, 15 bp, Homo sapiens
ctctcttctgtctac

SEQ ID NO: 623737 - DNA, 15 bp, Homo sapiens
tctcttctgtctaca

SEQ ID NO: 623738 - DNA, 15 bp, Homo sapiens
ctcttctgtctacac

SEQ ID NO: 623739 - DNA, 15 bp, Homo sapiens
tcttctgtctacacg

SEQ ID NO: 623740 - DNA, 15 bp, Homo sapiens
cttctgtctacacga

SEQ ID NO: 623741 - DNA, 15 bp, Homo sapiens
ttctgtctacacgag

SEQ ID NO: 623742 - DNA, 15 bp, Homo sapiens
tctgtctacacgagg

SEQ ID NO: 623743 - DNA, 15 bp, Homo sapiens
ctgtctacacgagga

SEQ ID NO: 623744 - DNA, 15 bp, Homo sapiens
tgtctacacgaggaa

SEQ ID NO: 623745 - DNA, 15 bp, Homo sapiens
gtctacacgaggaaa

SEQ ID NO: 623746 - DNA, 15 bp, Homo sapiens
tctacacgaggaaac

SEQ ID NO: 623747 - DNA, 15 bp, Homo sapiens
ctacacgaggaaaca

SEQ ID NO: 623748 - DNA, 15 bp, Homo sapiens
tacacgaggaaacac

SEQ ID NO: 623749 - DNA, 15 bp, Homo sapiens
acacgaggaaacact

SEQ ID NO: 623750 - DNA, 15 bp, Homo sapiens
cacgaggaaacactc

SEQ ID NO: 623751 - DNA, 15 bp, Homo sapiens
acgaggaaacactca

SEQ ID NO: 623752 - DNA, 15 bp, Homo sapiens
cgaggaaacactcat

SEQ ID NO: 623753 - DNA, 15 bp, Homo sapiens
gaggaaacactcata

SEQ ID NO: 623754 - DNA, 15 bp, Homo sapiens
aggaaacactcataa

SEQ ID NO: 623755 - DNA, 15 bp, Homo sapiens
ggaaacactcataaa

SEQ ID NO: 623756 - DNA, 15 bp, Homo sapiens
gaaacactcataaat

SEQ ID NO: 623757 - DNA, 15 bp, Homo sapiens
aaacactcataaatg

SEQ ID NO: 623758 - DNA, 15 bp, Homo sapiens
aacactcataaatgc

SEQ ID NO: 623759 - DNA, 15 bp, Homo sapiens
acactcataaatgca

SEQ ID NO: 623760 - DNA, 15 bp, Homo sapiens
cactcataaatgcac

SEQ ID NO: 623761 - DNA, 15 bp, Homo sapiens
actcataaatgcacg

SEQ ID NO: 623762 - DNA, 15 bp, Homo sapiens
ctcataaatgcacgg

SEQ ID NO: 623763 - DNA, 15 bp, Homo sapiens
tcataaatgcacggg

SEQ ID NO: 623764 - DNA, 15 bp, Homo sapiens
cataaatgcacgggg

SEQ ID NO: 623765 - DNA, 15 bp, Homo sapiens
ataaatgcacgggga

SEQ ID NO: 623766 - DNA, 15 bp, Homo sapiens
taaatgcacggggag

SEQ ID NO: 623767 - DNA, 15 bp, Homo sapiens
aaatgcacggggagg

SEQ ID NO: 623768 - DNA, 15 bp, Homo sapiens
aatgcacggggagga

SEQ ID NO: 623769 - DNA, 15 bp, Homo sapiens
atgcacggggaggag

SEQ ID NO: 623770 - DNA, 15 bp, Homo sapiens
tgcacggggaggagg

SEQ ID NO: 623771 - DNA, 15 bp, Homo sapiens
gcacggggaggaggt

SEQ ID NO: 623772 - DNA, 15 bp, Homo sapiens
cacggggaggaggtc

SEQ ID NO: 623773 - DNA, 15 bp, Homo sapiens
acggggaggaggtca

SEQ ID NO: 623774 - DNA, 15 bp, Homo sapiens
cggggaggaggtcag

SEQ ID NO: 623775 - DNA, 15 bp, Homo sapiens
ggggaggaggtcaga

SEQ ID NO: 623776 - DNA, 15 bp, Homo sapiens
gggaggaggtcagaa

SEQ ID NO: 623777 - DNA, 15 bp, Homo sapiens
ggaggaggtcagaac

SEQ ID NO: 623778 - DNA, 15 bp, Homo sapiens
gaggaggtcagaacc

SEQ ID NO: 623779 - DNA, 15 bp, Homo sapiens
aggaggtcagaacct

SEQ ID NO: 623780 - DNA, 15 bp, Homo sapiens
ggaggtcagaacctg

SEQ ID NO: 623781 - DNA, 15 bp, Homo sapiens
gaggtcagaacctga

SEQ ID NO: 623782 - DNA, 15 bp, Homo sapiens
aggtcagaacctgaa

SEQ ID NO: 623783 - DNA, 15 bp, Homo sapiens
ggtcagaacctgaaa

SEQ ID NO: 623784 - DNA, 15 bp, Homo sapiens
gtcagaacctgaaag

SEQ ID NO: 623785 - DNA, 15 bp, Homo sapiens
tcagaacctgaaagc

SEQ ID NO: 623786 - DNA, 15 bp, Homo sapiens
cagaacctgaaagcc

SEQ ID NO: 623787 - DNA, 15 bp, Homo sapiens
agaacctgaaagcct

SEQ ID NO: 623788 - DNA, 15 bp, Homo sapiens
gaacctgaaagcctt

SEQ ID NO: 623789 - DNA, 15 bp, Homo sapiens
aacctgaaagccttt

SEQ ID NO: 623790 - DNA, 15 bp, Homo sapiens
acctgaaagcctttc

SEQ ID NO: 623791 - DNA, 15 bp, Homo sapiens
cctgaaagcctttct

SEQ ID NO: 623792 - DNA, 15 bp, Homo sapiens
ctgaaagcctttctt

SEQ ID NO: 623793 - DNA, 15 bp, Homo sapiens
tgaaagcctttcttt

SEQ ID NO: 623794 - DNA, 15 bp, Homo sapiens
gaaagcctttctttg

SEQ ID NO: 623795 - DNA, 15 bp, Homo sapiens
aaagcctttctttgg

SEQ ID NO: 623796 - DNA, 15 bp, Homo sapiens
aagcctttctttgga

SEQ ID NO: 623797 - DNA, 15 bp, Homo sapiens
agcctttctttggat

SEQ ID NO: 623798 - DNA, 15 bp, Homo sapiens
gcctttctttggata

SEQ ID NO: 623799 - DNA, 15 bp, Homo sapiens
cctttctttggataa

SEQ ID NO: 623800 - DNA, 15 bp, Homo sapiens
ctttctttggataag

SEQ ID NO: 623801 - DNA, 15 bp, Homo sapiens
tttctttggataaga

SEQ ID NO: 623802 - DNA, 15 bp, Homo sapiens
ttctttggataagag

SEQ ID NO: 623803 - DNA, 15 bp, Homo sapiens
tctttggataagagc

SEQ ID NO: 623804 - DNA, 15 bp, Homo sapiens
ctttggataagagca

SEQ ID NO: 623805 - DNA, 15 bp, Homo sapiens
tttggataagagcat

SEQ ID NO: 623806 - DNA, 15 bp, Homo sapiens
ttggataagagcatc

SEQ ID NO: 623807 - DNA, 15 bp, Homo sapiens
tggataagagcatca

SEQ ID NO: 623808 - DNA, 15 bp, Homo sapiens
ggataagagcatcaa

SEQ ID NO: 623809 - DNA, 15 bp, Homo sapiens
gataagagcatcaac

SEQ ID NO: 623810 - DNA, 15 bp, Homo sapiens
ataagagcatcaact

SEQ ID NO: 623811 - DNA, 15 bp, Homo sapiens
taagagcatcaactg

SEQ ID NO: 623812 - DNA, 15 bp, Homo sapiens
aagagcatcaactgc

SEQ ID NO: 623813 - DNA, 15 bp, Homo sapiens
agagcatcaactgca

SEQ ID NO: 623814 - DNA, 15 bp, Homo sapiens
gagcatcaactgcag

SEQ ID NO: 623815 - DNA, 15 bp, Homo sapiens
agcatcaactgcagg

SEQ ID NO: 623816 - DNA, 15 bp, Homo sapiens
gcatcaactgcaggt

SEQ ID NO: 623817 - DNA, 15 bp, Homo sapiens
catcaactgcaggta

SEQ ID NO: 623818 - DNA, 15 bp, Homo sapiens
atcaactgcaggtac

SEQ ID NO: 623819 - DNA, 15 bp, Homo sapiens
tcaactgcaggtacc

SEQ ID NO: 623820 - DNA, 15 bp, Homo sapiens
caactgcaggtacca

SEQ ID NO: 623821 - DNA, 15 bp, Homo sapiens
aactgcaggtaccac

SEQ ID NO: 623822 - DNA, 15 bp, Homo sapiens
actgcaggtaccaca

SEQ ID NO: 623823 - DNA, 15 bp, Homo sapiens
ctgcaggtaccacat

SEQ ID NO: 623824 - DNA, 15 bp, Homo sapiens
tgcaggtaccacatt

SEQ ID NO: 623825 - DNA, 15 bp, Homo sapiens
gcaggtaccacattg

SEQ ID NO: 623826 - DNA, 15 bp, Homo sapiens
caggtaccacattgg

SEQ ID NO: 623827 - DNA, 15 bp, Homo sapiens
aggtaccacattggc

SEQ ID NO: 623828 - DNA, 15 bp, Homo sapiens
ggtaccacattggcc

SEQ ID NO: 623829 - DNA, 15 bp, Homo sapiens
gtaccacattggccc

SEQ ID NO: 623830 - DNA, 15 bp, Homo sapiens
taccacattggccct

SEQ ID NO: 623831 - DNA, 15 bp, Homo sapiens
accacattggccctg

SEQ ID NO: 623832 - DNA, 15 bp, Homo sapiens
ccacattggccctgt

SEQ ID NO: 623833 - DNA, 15 bp, Homo sapiens
cacattggccctgtg

SEQ ID NO: 623834 - DNA, 15 bp, Homo sapiens
acattggccctgtga

SEQ ID NO: 623835 - DNA, 15 bp, Homo sapiens
cattggccctgtgat

SEQ ID NO: 623836 - DNA, 15 bp, Homo sapiens
attggccctgtgatg

SEQ ID NO: 623837 - DNA, 15 bp, Homo sapiens
ttggccctgtgatgc

SEQ ID NO: 623838 - DNA, 15 bp, Homo sapiens
tggccctgtgatgct

SEQ ID NO: 623839 - DNA, 15 bp, Homo sapiens
ggccctgtgatgcta

SEQ ID NO: 623840 - DNA, 15 bp, Homo sapiens
gccctgtgatgctaa

SEQ ID NO: 623841 - DNA, 15 bp, Homo sapiens
ccctgtgatgctaat

SEQ ID NO: 623842 - DNA, 15 bp, Homo sapiens
cctgtgatgctaata

SEQ ID NO: 623843 - DNA, 15 bp, Homo sapiens
ctgtgatgctaatat

SEQ ID NO: 623844 - DNA, 15 bp, Homo sapiens
tgtgatgctaatata

SEQ ID NO: 623845 - DNA, 15 bp, Homo sapiens
gtgatgctaatataa

SEQ ID NO: 623846 - DNA, 15 bp, Homo sapiens
tgatgctaatataaa

SEQ ID NO: 623847 - DNA, 15 bp, Homo sapiens
gatgctaatataaaa

SEQ ID NO: 623848 - DNA, 15 bp, Homo sapiens
atgctaatataaaag

SEQ ID NO: 623849 - DNA, 15 bp, Homo sapiens
tgctaatataaaagg

SEQ ID NO: 623850 - DNA, 15 bp, Homo sapiens
gctaatataaaagga

SEQ ID NO: 623851 - DNA, 15 bp, Homo sapiens
ctaatataaaaggag

SEQ ID NO: 623852 - DNA, 15 bp, Homo sapiens
taatataaaaggagc

SEQ ID NO: 623853 - DNA, 15 bp, Homo sapiens
aatataaaaggagct

SEQ ID NO: 623854 - DNA, 15 bp, Homo sapiens
atataaaaggagcta

SEQ ID NO: 623855 - DNA, 15 bp, Homo sapiens
tataaaaggagctag

SEQ ID NO: 623856 - DNA, 15 bp, Homo sapiens
ataaaaggagctagg

SEQ ID NO: 623857 - DNA, 15 bp, Homo sapiens
taaaaggagctaggc

SEQ ID NO: 623858 - DNA, 15 bp, Homo sapiens
aaaaggagctaggcc

SEQ ID NO: 623859 - DNA, 15 bp, Homo sapiens
aaaggagctaggccc

SEQ ID NO: 623860 - DNA, 15 bp, Homo sapiens
aaggagctaggccca

SEQ ID NO: 623861 - DNA, 15 bp, Homo sapiens
aggagctaggcccac

SEQ ID NO: 623862 - DNA, 15 bp, Homo sapiens
ggagctaggcccacc

SEQ ID NO: 623863 - DNA, 15 bp, Homo sapiens
gagctaggcccaccg

SEQ ID NO: 623864 - DNA, 15 bp, Homo sapiens
agctaggcccaccgg

SEQ ID NO: 623865 - DNA, 15 bp, Homo sapiens
gctaggcccaccggt

SEQ ID NO: 623866 - DNA, 15 bp, Homo sapiens
ctaggcccaccggta

SEQ ID NO: 623867 - DNA, 15 bp, Homo sapiens
taggcccaccggtac

SEQ ID NO: 623868 - DNA, 15 bp, Homo sapiens
aggcccaccggtacc

SEQ ID NO: 623869 - DNA, 15 bp, Homo sapiens
ggcccaccggtaccg

SEQ ID NO: 623870 - DNA, 15 bp, Homo sapiens
gcccaccggtaccga

SEQ ID NO: 623871 - DNA, 15 bp, Homo sapiens
cccaccggtaccgaa

SEQ ID NO: 623872 - DNA, 15 bp, Homo sapiens
ccaccggtaccgaaa

SEQ ID NO: 623873 - DNA, 15 bp, Homo sapiens
caccggtaccgaaaa

SEQ ID NO: 623874 - DNA, 15 bp, Homo sapiens
accggtaccgaaaag

SEQ ID NO: 623875 - DNA, 15 bp, Homo sapiens
ccggtaccgaaaagt

SEQ ID NO: 623876 - DNA, 15 bp, Homo sapiens
cggtaccgaaaagtt

SEQ ID NO: 623877 - DNA, 15 bp, Homo sapiens
ggtaccgaaaagtta

SEQ ID NO: 623878 - DNA, 15 bp, Homo sapiens
gtaccgaaaagttac

SEQ ID NO: 623879 - DNA, 15 bp, Homo sapiens
taccgaaaagttact

SEQ ID NO: 623880 - DNA, 15 bp, Homo sapiens
accgaaaagttactt

SEQ ID NO: 623881 - DNA, 15 bp, Homo sapiens
ccgaaaagttactta

SEQ ID NO: 623882 - DNA, 15 bp, Homo sapiens
cgaaaagttacttag

SEQ ID NO: 623883 - DNA, 15 bp, Homo sapiens
gaaaagttacttaga

SEQ ID NO: 623884 - DNA, 15 bp, Homo sapiens
aaaagttacttagaa

SEQ ID NO: 623885 - DNA, 15 bp, Homo sapiens
aaagttacttagaaa

SEQ ID NO: 623886 - DNA, 15 bp, Homo sapiens
aagttacttagaaaa

SEQ ID NO: 623887 - DNA, 15 bp, Homo sapiens
agttacttagaaaag

SEQ ID NO: 623888 - DNA, 15 bp, Homo sapiens
gttacttagaaaagt

SEQ ID NO: 623889 - DNA, 15 bp, Homo sapiens
ttacttagaaaagtg

SEQ ID NO: 623890 - DNA, 15 bp, Homo sapiens
tacttagaaaagtgc

SEQ ID NO: 623891 - DNA, 15 bp, Homo sapiens
acttagaaaagtgcg

SEQ ID NO: 623892 - DNA, 15 bp, Homo sapiens
cttagaaaagtgcgg

SEQ ID NO: 623893 - DNA, 15 bp, Homo sapiens
ttagaaaagtgcgga

SEQ ID NO: 623894 - DNA, 15 bp, Homo sapiens
tagaaaagtgcggag

SEQ ID NO: 623895 - DNA, 15 bp, Homo sapiens
agaaaagtgcggagg

SEQ ID NO: 623896 - DNA, 15 bp, Homo sapiens
gaaaagtgcggaggc

SEQ ID NO: 623897 - DNA, 15 bp, Homo sapiens
aaaagtgcggaggct

SEQ ID NO: 623898 - DNA, 15 bp, Homo sapiens
aaagtgcggaggctt

SEQ ID NO: 623899 - DNA, 15 bp, Homo sapiens
aagtgcggaggcttt

SEQ ID NO: 623900 - DNA, 15 bp, Homo sapiens
agtgcggaggctttt

SEQ ID NO: 623901 - DNA, 15 bp, Homo sapiens
gtgcggaggctttta

SEQ ID NO: 623902 - DNA, 15 bp, Homo sapiens
tgcggaggcttttaa

SEQ ID NO: 623903 - DNA, 15 bp, Homo sapiens
gcggaggcttttaat

SEQ ID NO: 623904 - DNA, 15 bp, Homo sapiens
cggaggcttttaatt

SEQ ID NO: 623905 - DNA, 15 bp, Homo sapiens
ggaggcttttaattt

SEQ ID NO: 623906 - DNA, 15 bp, Homo sapiens
gaggcttttaatttt

SEQ ID NO: 623907 - DNA, 15 bp, Homo sapiens
aggcttttaatttta

SEQ ID NO: 623908 - DNA, 15 bp, Homo sapiens
ggcttttaattttac

SEQ ID NO: 623909 - DNA, 15 bp, Homo sapiens
gcttttaattttact

SEQ ID NO: 623910 - DNA, 15 bp, Homo sapiens
cttttaattttactt

SEQ ID NO: 623911 - DNA, 15 bp, Homo sapiens
ttttaattttacttt

SEQ ID NO: 623912 - DNA, 15 bp, Homo sapiens
tttaattttactttt

SEQ ID NO: 623913 - DNA, 15 bp, Homo sapiens
ttaattttacttttt

SEQ ID NO: 623914 - DNA, 15 bp, Homo sapiens
taattttactttttt

SEQ ID NO: 623915 - DNA, 15 bp, Homo sapiens
aattttacttttttt

SEQ ID NO: 623916 - DNA, 15 bp, Homo sapiens
attttacttttttta

SEQ ID NO: 623917 - DNA, 15 bp, Homo sapiens
ttttactttttttaa

SEQ ID NO: 623918 - DNA, 15 bp, Homo sapiens
tttactttttttaaa

SEQ ID NO: 623919 - DNA, 15 bp, Homo sapiens
ttactttttttaaaa

SEQ ID NO: 623920 - DNA, 15 bp, Homo sapiens
tactttttttaaaag

SEQ ID NO: 623921 - DNA, 15 bp, Homo sapiens
actttttttaaaaga

SEQ ID NO: 623922 - DNA, 15 bp, Homo sapiens
ctttttttaaaagat

SEQ ID NO: 623923 - DNA, 15 bp, Homo sapiens
tttttttaaaagata

SEQ ID NO: 623924 - DNA, 15 bp, Homo sapiens
ttttttaaaagataa

SEQ ID NO: 623925 - DNA, 15 bp, Homo sapiens
tttttaaaagataag

SEQ ID NO: 623926 - DNA, 15 bp, Homo sapiens
ttttaaaagataaga

SEQ ID NO: 623927 - DNA, 15 bp, Homo sapiens
tttaaaagataagaa

SEQ ID NO: 623928 - DNA, 15 bp, Homo sapiens
ttaaaagataagaaa

SEQ ID NO: 623929 - DNA, 15 bp, Homo sapiens
taaaagataagaaat

SEQ ID NO: 623930 - DNA, 15 bp, Homo sapiens
aaaagataagaaata

SEQ ID NO: 623931 - DNA, 15 bp, Homo sapiens
aaagataagaaatag

SEQ ID NO: 623932 - DNA, 15 bp, Homo sapiens
aagataagaaataga

SEQ ID NO: 623933 - DNA, 15 bp, Homo sapiens
agataagaaatagaa

SEQ ID NO: 623934 - DNA, 15 bp, Homo sapiens
gataagaaatagaat

SEQ ID NO: 623935 - DNA, 15 bp, Homo sapiens
ataagaaatagaatt

SEQ ID NO: 623936 - DNA, 15 bp, Homo sapiens
taagaaatagaattt

SEQ ID NO: 623937 - DNA, 15 bp, Homo sapiens
aagaaatagaattta

SEQ ID NO: 623938 - DNA, 15 bp, Homo sapiens
agaaatagaatttac

SEQ ID NO: 623939 - DNA, 15 bp, Homo sapiens
gaaatagaatttaca

SEQ ID NO: 623940 - DNA, 15 bp, Homo sapiens
aaatagaatttacac

SEQ ID NO: 623941 - DNA, 15 bp, Homo sapiens
aatagaatttacaca

SEQ ID NO: 623942 - DNA, 15 bp, Homo sapiens
atagaatttacacac

SEQ ID NO: 623943 - DNA, 15 bp, Homo sapiens
tagaatttacacact

SEQ ID NO: 623944 - DNA, 15 bp, Homo sapiens
agaatttacacactt

SEQ ID NO: 623945 - DNA, 15 bp, Homo sapiens
gaatttacacacttg

SEQ ID NO: 623946 - DNA, 15 bp, Homo sapiens
aatttacacacttgg

SEQ ID NO: 623947 - DNA, 15 bp, Homo sapiens
atttacacacttggg

SEQ ID NO: 623948 - DNA, 15 bp, Homo sapiens
tttacacacttgggg

SEQ ID NO: 623949 - DNA, 15 bp, Homo sapiens
ttacacacttggggc

SEQ ID NO: 623950 - DNA, 15 bp, Homo sapiens
tacacacttggggct

SEQ ID NO: 623951 - DNA, 15 bp, Homo sapiens
acacacttggggctg

SEQ ID NO: 623952 - DNA, 15 bp, Homo sapiens
cacacttggggctgg

SEQ ID NO: 623953 - DNA, 15 bp, Homo sapiens
acacttggggctggc

SEQ ID NO: 623954 - DNA, 15 bp, Homo sapiens
cacttggggctggcc

SEQ ID NO: 623955 - DNA, 15 bp, Homo sapiens
acttggggctggccc

SEQ ID NO: 623956 - DNA, 15 bp, Homo sapiens
cttggggctggccca

SEQ ID NO: 623957 - DNA, 15 bp, Homo sapiens
ttggggctggcccac

SEQ ID NO: 623958 - DNA, 15 bp, Homo sapiens
tggggctggcccacg

SEQ ID NO: 623959 - DNA, 15 bp, Homo sapiens
ggggctggcccacgt

SEQ ID NO: 623960 - DNA, 15 bp, Homo sapiens
gggctggcccacgtg

SEQ ID NO: 623961 - DNA, 15 bp, Homo sapiens
ggctggcccacgtgt

SEQ ID NO: 623962 - DNA, 15 bp, Homo sapiens
gctggcccacgtgtt

SEQ ID NO: 623963 - DNA, 15 bp, Homo sapiens
ctggcccacgtgttt

SEQ ID NO: 623964 - DNA, 15 bp, Homo sapiens
tggcccacgtgtttc

SEQ ID NO: 623965 - DNA, 15 bp, Homo sapiens
ggcccacgtgtttct

SEQ ID NO: 623966 - DNA, 15 bp, Homo sapiens
gcccacgtgtttctg

SEQ ID NO: 623967 - DNA, 15 bp, Homo sapiens
cccacgtgtttctgt

SEQ ID NO: 623968 - DNA, 15 bp, Homo sapiens
ccacgtgtttctgtg

SEQ ID NO: 623969 - DNA, 15 bp, Homo sapiens
cacgtgtttctgtgt

SEQ ID NO: 623970 - DNA, 15 bp, Homo sapiens
acgtgtttctgtgtg

SEQ ID NO: 623971 - DNA, 15 bp, Homo sapiens
cgtgtttctgtgtgt

SEQ ID NO: 623972 - DNA, 15 bp, Homo sapiens
gtgtttctgtgtgtg

SEQ ID NO: 623973 - DNA, 15 bp, Homo sapiens
tgtttctgtgtgtgt

SEQ ID NO: 623974 - DNA, 15 bp, Homo sapiens
gtttctgtgtgtgtg

SEQ ID NO: 623975 - DNA, 15 bp, Homo sapiens
tttctgtgtgtgtgt

SEQ ID NO: 623976 - DNA, 15 bp, Homo sapiens
ttctgtgtgtgtgta

SEQ ID NO: 623977 - DNA, 15 bp, Homo sapiens
tctgtgtgtgtgtat

SEQ ID NO: 623978 - DNA, 15 bp, Homo sapiens
ctgtgtgtgtgtatg

SEQ ID NO: 623979 - DNA, 15 bp, Homo sapiens
tgtgtgtgtgtatgt

SEQ ID NO: 623980 - DNA, 15 bp, Homo sapiens
gtgtgtgtgtatgtg

SEQ ID NO: 623981 - DNA, 15 bp, Homo sapiens
tgtgtgtgtatgtgt

SEQ ID NO: 623982 - DNA, 15 bp, Homo sapiens
gtgtgtgtatgtgtg

SEQ ID NO: 623983 - DNA, 15 bp, Homo sapiens
tgtgtgtatgtgtgc

SEQ ID NO: 623984 - DNA, 15 bp, Homo sapiens
gtgtgtatgtgtgca

SEQ ID NO: 623985 - DNA, 15 bp, Homo sapiens
tgtgtatgtgtgcac

SEQ ID NO: 623986 - DNA, 15 bp, Homo sapiens
gtgtatgtgtgcacg

SEQ ID NO: 623987 - DNA, 15 bp, Homo sapiens
tgtatgtgtgcacgc

SEQ ID NO: 623988 - DNA, 15 bp, Homo sapiens
gtatgtgtgcacgca

SEQ ID NO: 623989 - DNA, 15 bp, Homo sapiens
tatgtgtgcacgcac

SEQ ID NO: 623990 - DNA, 15 bp, Homo sapiens
atgtgtgcacgcacg

SEQ ID NO: 623991 - DNA, 15 bp, Homo sapiens
tgtgtgcacgcacgc

SEQ ID NO: 623992 - DNA, 15 bp, Homo sapiens
gtgtgcacgcacgcg

SEQ ID NO: 623993 - DNA, 15 bp, Homo sapiens
tgtgcacgcacgcgc

SEQ ID NO: 623994 - DNA, 15 bp, Homo sapiens
gtgcacgcacgcgcg

SEQ ID NO: 623995 - DNA, 15 bp, Homo sapiens
tgcacgcacgcgcgt

SEQ ID NO: 623996 - DNA, 15 bp, Homo sapiens
gcacgcacgcgcgtg

SEQ ID NO: 623997 - DNA, 15 bp, Homo sapiens
cacgcacgcgcgtgt

SEQ ID NO: 623998 - DNA, 15 bp, Homo sapiens
acgcacgcgcgtgtg

SEQ ID NO: 623999 - DNA, 15 bp, Homo sapiens
cgcacgcgcgtgtgc

SEQ ID NO: 624000 - DNA, 15 bp, Homo sapiens
gcacgcgcgtgtgcg

SEQ ID NO: 624001 - DNA, 15 bp, Homo sapiens
cacgcgcgtgtgcgc

SEQ ID NO: 624002 - DNA, 15 bp, Homo sapiens
acgcgcgtgtgcgct

SEQ ID NO: 624003 - DNA, 15 bp, Homo sapiens
cgcgcgtgtgcgctt

SEQ ID NO: 624004 - DNA, 15 bp, Homo sapiens
gcgcgtgtgcgctta

SEQ ID NO: 624005 - DNA, 15 bp, Homo sapiens
cgcgtgtgcgcttac

SEQ ID NO: 624006 - DNA, 15 bp, Homo sapiens
gcgtgtgcgcttaca

SEQ ID NO: 624007 - DNA, 15 bp, Homo sapiens
cgtgtgcgcttacag

SEQ ID NO: 624008 - DNA, 15 bp, Homo sapiens
gtgtgcgcttacagg

SEQ ID NO: 624009 - DNA, 15 bp, Homo sapiens
tgtgcgcttacaggg

SEQ ID NO: 624010 - DNA, 15 bp, Homo sapiens
gtgcgcttacaggga

SEQ ID NO: 624011 - DNA, 15 bp, Homo sapiens
tgcgcttacagggat

SEQ ID NO: 624012 - DNA, 15 bp, Homo sapiens
gcgcttacagggatc

SEQ ID NO: 624013 - DNA, 15 bp, Homo sapiens
cgcttacagggatct

SEQ ID NO: 624014 - DNA, 15 bp, Homo sapiens
gcttacagggatctc

SEQ ID NO: 624015 - DNA, 15 bp, Homo sapiens
cttacagggatctct

SEQ ID NO: 624016 - DNA, 15 bp, Homo sapiens
ttacagggatctctg

SEQ ID NO: 624017 - DNA, 15 bp, Homo sapiens
tacagggatctctga

SEQ ID NO: 624018 - DNA, 15 bp, Homo sapiens
acagggatctctgag

SEQ ID NO: 624019 - DNA, 15 bp, Homo sapiens
cagggatctctgagc

SEQ ID NO: 624020 - DNA, 15 bp, Homo sapiens
agggatctctgagcc

SEQ ID NO: 624021 - DNA, 15 bp, Homo sapiens
gggatctctgagcct

SEQ ID NO: 624022 - DNA, 15 bp, Homo sapiens
ggatctctgagccta

SEQ ID NO: 624023 - DNA, 15 bp, Homo sapiens
gatctctgagcctat

SEQ ID NO: 624024 - DNA, 15 bp, Homo sapiens
atctctgagcctatg

SEQ ID NO: 624025 - DNA, 15 bp, Homo sapiens
tctctgagcctatgg

SEQ ID NO: 624026 - DNA, 15 bp, Homo sapiens
ctctgagcctatgga

SEQ ID NO: 624027 - DNA, 15 bp, Homo sapiens
tctgagcctatggag

SEQ ID NO: 624028 - DNA, 15 bp, Homo sapiens
ctgagcctatggaga

SEQ ID NO: 624029 - DNA, 15 bp, Homo sapiens
tgagcctatggagag

SEQ ID NO: 624030 - DNA, 15 bp, Homo sapiens
gagcctatggagaga

SEQ ID NO: 624031 - DNA, 15 bp, Homo sapiens
agcctatggagagag

SEQ ID NO: 624032 - DNA, 15 bp, Homo sapiens
gcctatggagagaga

SEQ ID NO: 624033 - DNA, 15 bp, Homo sapiens
cctatggagagagat

SEQ ID NO: 624034 - DNA, 15 bp, Homo sapiens
ctatggagagagatg

SEQ ID NO: 624035 - DNA, 15 bp, Homo sapiens
tatggagagagatgt

SEQ ID NO: 624036 - DNA, 15 bp, Homo sapiens
atggagagagatgta

SEQ ID NO: 624037 - DNA, 15 bp, Homo sapiens
tggagagagatgtag

SEQ ID NO: 624038 - DNA, 15 bp, Homo sapiens
ggagagagatgtagc

SEQ ID NO: 624039 - DNA, 15 bp, Homo sapiens
gagagagatgtagct

SEQ ID NO: 624040 - DNA, 15 bp, Homo sapiens
agagagatgtagcta

SEQ ID NO: 624041 - DNA, 15 bp, Homo sapiens
gagagatgtagctag

SEQ ID NO: 624042 - DNA, 15 bp, Homo sapiens
agagatgtagctagg

SEQ ID NO: 624043 - DNA, 15 bp, Homo sapiens
gagatgtagctagga

SEQ ID NO: 624044 - DNA, 15 bp, Homo sapiens
agatgtagctaggat

SEQ ID NO: 624045 - DNA, 15 bp, Homo sapiens
gatgtagctaggata

SEQ ID NO: 624046 - DNA, 15 bp, Homo sapiens
atgtagctaggatag

SEQ ID NO: 624047 - DNA, 15 bp, Homo sapiens
tgtagctaggataga

SEQ ID NO: 624048 - DNA, 15 bp, Homo sapiens
gtagctaggatagag

SEQ ID NO: 624049 - DNA, 15 bp, Homo sapiens
tagctaggatagagt

SEQ ID NO: 624050 - DNA, 15 bp, Homo sapiens
agctaggatagagtg

SEQ ID NO: 624051 - DNA, 15 bp, Homo sapiens
gctaggatagagtgg

SEQ ID NO: 624052 - DNA, 15 bp, Homo sapiens
ctaggatagagtgga

SEQ ID NO: 624053 - DNA, 15 bp, Homo sapiens
taggatagagtggac

SEQ ID NO: 624054 - DNA, 15 bp, Homo sapiens
aggatagagtggaca

SEQ ID NO: 624055 - DNA, 15 bp, Homo sapiens
ggatagagtggacat

SEQ ID NO: 624056 - DNA, 15 bp, Homo sapiens
gatagagtggacatc

SEQ ID NO: 624057 - DNA, 15 bp, Homo sapiens
atagagtggacatct

SEQ ID NO: 624058 - DNA, 15 bp, Homo sapiens
tagagtggacatctg

SEQ ID NO: 624059 - DNA, 15 bp, Homo sapiens
agagtggacatctga

SEQ ID NO: 624060 - DNA, 15 bp, Homo sapiens
gagtggacatctgag

SEQ ID NO: 624061 - DNA, 15 bp, Homo sapiens
agtggacatctgagg

SEQ ID NO: 624062 - DNA, 15 bp, Homo sapiens
gtggacatctgaggt

SEQ ID NO: 624063 - DNA, 15 bp, Homo sapiens
tggacatctgaggtg

SEQ ID NO: 624064 - DNA, 15 bp, Homo sapiens
ggacatctgaggtgg

SEQ ID NO: 624065 - DNA, 15 bp, Homo sapiens
gacatctgaggtggg

SEQ ID NO: 624066 - DNA, 15 bp, Homo sapiens
acatctgaggtggga

SEQ ID NO: 624067 - DNA, 15 bp, Homo sapiens
catctgaggtgggag

SEQ ID NO: 624068 - DNA, 15 bp, Homo sapiens
atctgaggtgggagg

SEQ ID NO: 624069 - DNA, 15 bp, Homo sapiens
tctgaggtgggaggt

SEQ ID NO: 624070 - DNA, 15 bp, Homo sapiens
ctgaggtgggaggtg

SEQ ID NO: 624071 - DNA, 15 bp, Homo sapiens
tgaggtgggaggtga

SEQ ID NO: 624072 - DNA, 15 bp, Homo sapiens
gaggtgggaggtgat

SEQ ID NO: 624073 - DNA, 15 bp, Homo sapiens
aggtgggaggtgata

SEQ ID NO: 624074 - DNA, 15 bp, Homo sapiens
ggtgggaggtgatac

SEQ ID NO: 624075 - DNA, 15 bp, Homo sapiens
gtgggaggtgatact

SEQ ID NO: 624076 - DNA, 15 bp, Homo sapiens
tgggaggtgatacta

SEQ ID NO: 624077 - DNA, 15 bp, Homo sapiens
gggaggtgatactag

SEQ ID NO: 624078 - DNA, 15 bp, Homo sapiens
ggaggtgatactagc

SEQ ID NO: 624079 - DNA, 15 bp, Homo sapiens
gaggtgatactagct

SEQ ID NO: 624080 - DNA, 15 bp, Homo sapiens
aggtgatactagctg

SEQ ID NO: 624081 - DNA, 15 bp, Homo sapiens
ggtgatactagctgg

SEQ ID NO: 624082 - DNA, 15 bp, Homo sapiens
gtgatactagctggc

SEQ ID NO: 624083 - DNA, 15 bp, Homo sapiens
tgatactagctggca

SEQ ID NO: 624084 - DNA, 15 bp, Homo sapiens
gatactagctggcag

SEQ ID NO: 624085 - DNA, 15 bp, Homo sapiens
atactagctggcagt

SEQ ID NO: 624086 - DNA, 15 bp, Homo sapiens
tactagctggcagtc

SEQ ID NO: 624087 - DNA, 15 bp, Homo sapiens
actagctggcagtcc

SEQ ID NO: 624088 - DNA, 15 bp, Homo sapiens
ctagctggcagtcca

SEQ ID NO: 624089 - DNA, 15 bp, Homo sapiens
tagctggcagtccaa

SEQ ID NO: 624090 - DNA, 15 bp, Homo sapiens
agctggcagtccaat

SEQ ID NO: 624091 - DNA, 15 bp, Homo sapiens
gctggcagtccaatg

SEQ ID NO: 624092 - DNA, 15 bp, Homo sapiens
ctggcagtccaatga

SEQ ID NO: 624093 - DNA, 15 bp, Homo sapiens
tggcagtccaatgaa

SEQ ID NO: 624094 - DNA, 15 bp, Homo sapiens
ggcagtccaatgaag

SEQ ID NO: 624095 - DNA, 15 bp, Homo sapiens
gcagtccaatgaagg

SEQ ID NO: 624096 - DNA, 15 bp, Homo sapiens
cagtccaatgaaggg

SEQ ID NO: 624097 - DNA, 15 bp, Homo sapiens
agtccaatgaagggg

SEQ ID NO: 624098 - DNA, 15 bp, Homo sapiens
gtccaatgaaggggt

SEQ ID NO: 624099 - DNA, 15 bp, Homo sapiens
tccaatgaaggggta

SEQ ID NO: 624100 - DNA, 15 bp, Homo sapiens
ccaatgaaggggtag

SEQ ID NO: 624101 - DNA, 15 bp, Homo sapiens
caatgaaggggtaga

SEQ ID NO: 624102 - DNA, 15 bp, Homo sapiens
aatgaaggggtagaa

SEQ ID NO: 624103 - DNA, 15 bp, Homo sapiens
atgaaggggtagaag

SEQ ID NO: 624104 - DNA, 15 bp, Homo sapiens
tgaaggggtagaaga

SEQ ID NO: 624105 - DNA, 15 bp, Homo sapiens
gaaggggtagaagat

SEQ ID NO: 624106 - DNA, 15 bp, Homo sapiens
aaggggtagaagatg

SEQ ID NO: 624107 - DNA, 15 bp, Homo sapiens
aggggtagaagatgg

SEQ ID NO: 624108 - DNA, 15 bp, Homo sapiens
ggggtagaagatggt

SEQ ID NO: 624109 - DNA, 15 bp, Homo sapiens
gggtagaagatggta

SEQ ID NO: 624110 - DNA, 15 bp, Homo sapiens
ggtagaagatggtag

SEQ ID NO: 624111 - DNA, 15 bp, Homo sapiens
gtagaagatggtagg

SEQ ID NO: 624112 - DNA, 15 bp, Homo sapiens
tagaagatggtaggc

SEQ ID NO: 624113 - DNA, 15 bp, Homo sapiens
agaagatggtaggca

SEQ ID NO: 624114 - DNA, 15 bp, Homo sapiens
gaagatggtaggcat

SEQ ID NO: 624115 - DNA, 15 bp, Homo sapiens
aagatggtaggcatc

SEQ ID NO: 624116 - DNA, 15 bp, Homo sapiens
agatggtaggcatca

SEQ ID NO: 624117 - DNA, 15 bp, Homo sapiens
gatggtaggcatcat

SEQ ID NO: 624118 - DNA, 15 bp, Homo sapiens
atggtaggcatcatg

SEQ ID NO: 624119 - DNA, 15 bp, Homo sapiens
tggtaggcatcatgt

SEQ ID NO: 624120 - DNA, 15 bp, Homo sapiens
ggtaggcatcatgtt

SEQ ID NO: 624121 - DNA, 15 bp, Homo sapiens
gtaggcatcatgtta

SEQ ID NO: 624122 - DNA, 15 bp, Homo sapiens
taggcatcatgttag

SEQ ID NO: 624123 - DNA, 15 bp, Homo sapiens
aggcatcatgttagc

SEQ ID NO: 624124 - DNA, 15 bp, Homo sapiens
ggcatcatgttagca

SEQ ID NO: 624125 - DNA, 15 bp, Homo sapiens
gcatcatgttagcag

SEQ ID NO: 624126 - DNA, 15 bp, Homo sapiens
catcatgttagcagg

SEQ ID NO: 624127 - DNA, 15 bp, Homo sapiens
atcatgttagcaggc

SEQ ID NO: 624128 - DNA, 15 bp, Homo sapiens
tcatgttagcaggct

SEQ ID NO: 624129 - DNA, 15 bp, Homo sapiens
catgttagcaggctt

SEQ ID NO: 624130 - DNA, 15 bp, Homo sapiens
atgttagcaggcttt

SEQ ID NO: 624131 - DNA, 15 bp, Homo sapiens
tgttagcaggctttc

SEQ ID NO: 624132 - DNA, 15 bp, Homo sapiens
gttagcaggctttct

SEQ ID NO: 624133 - DNA, 15 bp, Homo sapiens
ttagcaggctttctg

SEQ ID NO: 624134 - DNA, 15 bp, Homo sapiens
tagcaggctttctga

SEQ ID NO: 624135 - DNA, 15 bp, Homo sapiens
agcaggctttctgat

SEQ ID NO: 624136 - DNA, 15 bp, Homo sapiens
gcaggctttctgatg

SEQ ID NO: 624137 - DNA, 15 bp, Homo sapiens
caggctttctgatgc

SEQ ID NO: 624138 - DNA, 15 bp, Homo sapiens
aggctttctgatgct

SEQ ID NO: 624139 - DNA, 15 bp, Homo sapiens
ggctttctgatgctc

SEQ ID NO: 624140 - DNA, 15 bp, Homo sapiens
gctttctgatgctcc

SEQ ID NO: 624141 - DNA, 15 bp, Homo sapiens
ctttctgatgctcca

SEQ ID NO: 624142 - DNA, 15 bp, Homo sapiens
tttctgatgctccag

SEQ ID NO: 624143 - DNA, 15 bp, Homo sapiens
ttctgatgctccaga

SEQ ID NO: 624144 - DNA, 15 bp, Homo sapiens
tctgatgctccagaa

SEQ ID NO: 624145 - DNA, 15 bp, Homo sapiens
ctgatgctccagaat

SEQ ID NO: 624146 - DNA, 15 bp, Homo sapiens
tgatgctccagaatt

SEQ ID NO: 624147 - DNA, 15 bp, Homo sapiens
gatgctccagaattt

SEQ ID NO: 624148 - DNA, 15 bp, Homo sapiens
atgctccagaatttt

SEQ ID NO: 624149 - DNA, 15 bp, Homo sapiens
tgctccagaatttta

SEQ ID NO: 624150 - DNA, 15 bp, Homo sapiens
gctccagaattttaa

SEQ ID NO: 624151 - DNA, 15 bp, Homo sapiens
ctccagaattttaaa

SEQ ID NO: 624152 - DNA, 15 bp, Homo sapiens
tccagaattttaaag

SEQ ID NO: 624153 - DNA, 15 bp, Homo sapiens
ccagaattttaaagc

SEQ ID NO: 624154 - DNA, 15 bp, Homo sapiens
cagaattttaaagct

SEQ ID NO: 624155 - DNA, 15 bp, Homo sapiens
agaattttaaagctg

SEQ ID NO: 624156 - DNA, 15 bp, Homo sapiens
gaattttaaagctgg

SEQ ID NO: 624157 - DNA, 15 bp, Homo sapiens
aattttaaagctggc

SEQ ID NO: 624158 - DNA, 15 bp, Homo sapiens
attttaaagctggcc

SEQ ID NO: 624159 - DNA, 15 bp, Homo sapiens
ttttaaagctggcct

SEQ ID NO: 624160 - DNA, 15 bp, Homo sapiens
tttaaagctggcctg

SEQ ID NO: 624161 - DNA, 15 bp, Homo sapiens
ttaaagctggcctgg

SEQ ID NO: 624162 - DNA, 15 bp, Homo sapiens
taaagctggcctgga

SEQ ID NO: 624163 - DNA, 15 bp, Homo sapiens
aaagctggcctggaa

SEQ ID NO: 624164 - DNA, 15 bp, Homo sapiens
aagctggcctggaat

SEQ ID NO: 624165 - DNA, 15 bp, Homo sapiens
agctggcctggaatc

SEQ ID NO: 624166 - DNA, 15 bp, Homo sapiens
gctggcctggaatct

SEQ ID NO: 624167 - DNA, 15 bp, Homo sapiens
ctggcctggaatctc

SEQ ID NO: 624168 - DNA, 15 bp, Homo sapiens
tggcctggaatctca

SEQ ID NO: 624169 - DNA, 15 bp, Homo sapiens
ggcctggaatctcac

SEQ ID NO: 624170 - DNA, 15 bp, Homo sapiens
gcctggaatctcacc

SEQ ID NO: 624171 - DNA, 15 bp, Homo sapiens
cctggaatctcacct

SEQ ID NO: 624172 - DNA, 15 bp, Homo sapiens
ctggaatctcacctc

SEQ ID NO: 624173 - DNA, 15 bp, Homo sapiens
tggaatctcacctcc

SEQ ID NO: 624174 - DNA, 15 bp, Homo sapiens
ggaatctcacctccg

SEQ ID NO: 624175 - DNA, 15 bp, Homo sapiens
gaatctcacctccgc

SEQ ID NO: 624176 - DNA, 15 bp, Homo sapiens
aatctcacctccgcg

SEQ ID NO: 624177 - DNA, 15 bp, Homo sapiens
atctcacctccgcga

SEQ ID NO: 624178 - DNA, 15 bp, Homo sapiens
tctcacctccgcgat

SEQ ID NO: 624179 - DNA, 15 bp, Homo sapiens
ctcacctccgcgatc

SEQ ID NO: 624180 - DNA, 15 bp, Homo sapiens
tcacctccgcgatcc

SEQ ID NO: 624181 - DNA, 15 bp, Homo sapiens
cacctccgcgatcca

SEQ ID NO: 624182 - DNA, 15 bp, Homo sapiens
acctccgcgatccat

SEQ ID NO: 624183 - DNA, 15 bp, Homo sapiens
cctccgcgatccatc

SEQ ID NO: 624184 - DNA, 15 bp, Homo sapiens
ctccgcgatccatca

SEQ ID NO: 624185 - DNA, 15 bp, Homo sapiens
tccgcgatccatcat

SEQ ID NO: 624186 - DNA, 15 bp, Homo sapiens
ccgcgatccatcatt

SEQ ID NO: 624187 - DNA, 15 bp, Homo sapiens
cgcgatccatcattt

SEQ ID NO: 624188 - DNA, 15 bp, Homo sapiens
gcgatccatcatttt

SEQ ID NO: 624189 - DNA, 15 bp, Homo sapiens
cgatccatcattttg

SEQ ID NO: 624190 - DNA, 15 bp, Homo sapiens
gatccatcattttgg

SEQ ID NO: 624191 - DNA, 15 bp, Homo sapiens
atccatcattttgga

SEQ ID NO: 624192 - DNA, 15 bp, Homo sapiens
tccatcattttggaa

SEQ ID NO: 624193 - DNA, 15 bp, Homo sapiens
ccatcattttggaac

SEQ ID NO: 624194 - DNA, 15 bp, Homo sapiens
catcattttggaact

SEQ ID NO: 624195 - DNA, 15 bp, Homo sapiens
atcattttggaactt

SEQ ID NO: 624196 - DNA, 15 bp, Homo sapiens
tcattttggaactta

SEQ ID NO: 624197 - DNA, 15 bp, Homo sapiens
cattttggaacttag

SEQ ID NO: 624198 - DNA, 15 bp, Homo sapiens
attttggaacttagg

SEQ ID NO: 624199 - DNA, 15 bp, Homo sapiens
ttttggaacttagga

SEQ ID NO: 624200 - DNA, 15 bp, Homo sapiens
tttggaacttaggac

SEQ ID NO: 624201 - DNA, 15 bp, Homo sapiens
ttggaacttaggacc

SEQ ID NO: 624202 - DNA, 15 bp, Homo sapiens
tggaacttaggacca

SEQ ID NO: 624203 - DNA, 15 bp, Homo sapiens
ggaacttaggaccac

SEQ ID NO: 624204 - DNA, 15 bp, Homo sapiens
gaacttaggaccacc

SEQ ID NO: 624205 - DNA, 15 bp, Homo sapiens
aacttaggaccacca

SEQ ID NO: 624206 - DNA, 15 bp, Homo sapiens
acttaggaccaccat

SEQ ID NO: 624207 - DNA, 15 bp, Homo sapiens
cttaggaccaccatt

SEQ ID NO: 624208 - DNA, 15 bp, Homo sapiens
ttaggaccaccatta

SEQ ID NO: 624209 - DNA, 15 bp, Homo sapiens
taggaccaccattag

SEQ ID NO: 624210 - DNA, 15 bp, Homo sapiens
aggaccaccattagc

SEQ ID NO: 624211 - DNA, 15 bp, Homo sapiens
ggaccaccattagcc

SEQ ID NO: 624212 - DNA, 15 bp, Homo sapiens
gaccaccattagcca

SEQ ID NO: 624213 - DNA, 15 bp, Homo sapiens
accaccattagccag

SEQ ID NO: 624214 - DNA, 15 bp, Homo sapiens
ccaccattagccagt

SEQ ID NO: 624215 - DNA, 15 bp, Homo sapiens
caccattagccagtg

SEQ ID NO: 624216 - DNA, 15 bp, Homo sapiens
accattagccagtgg

SEQ ID NO: 624217 - DNA, 15 bp, Homo sapiens
ccattagccagtggc

SEQ ID NO: 624218 - DNA, 15 bp, Homo sapiens
cattagccagtggca

SEQ ID NO: 624219 - DNA, 15 bp, Homo sapiens
attagccagtggcaa

SEQ ID NO: 624220 - DNA, 15 bp, Homo sapiens
ttagccagtggcaaa

SEQ ID NO: 624221 - DNA, 15 bp, Homo sapiens
tagccagtggcaaaa

SEQ ID NO: 624222 - DNA, 15 bp, Homo sapiens
agccagtggcaaaaa

SEQ ID NO: 624223 - DNA, 15 bp, Homo sapiens
gccagtggcaaaaaa

SEQ ID NO: 624224 - DNA, 15 bp, Homo sapiens
ccagtggcaaaaaaa

SEQ ID NO: 624225 - DNA, 15 bp, Homo sapiens
cagtggcaaaaaaaa

SEQ ID NO: 624226 - DNA, 15 bp, Homo sapiens
agtggcaaaaaaaaa

SEQ ID NO: 624227 - DNA, 15 bp, Homo sapiens
gtggcaaaaaaaaag

SEQ ID NO: 624228 - DNA, 15 bp, Homo sapiens
tggcaaaaaaaaagt

SEQ ID NO: 624229 - DNA, 15 bp, Homo sapiens
ggcaaaaaaaaagtt

SEQ ID NO: 624230 - DNA, 15 bp, Homo sapiens
gcaaaaaaaaagttg

SEQ ID NO: 624231 - DNA, 15 bp, Homo sapiens
caaaaaaaaagttga

SEQ ID NO: 624232 - DNA, 15 bp, Homo sapiens
aaaaaaaaagttgaa

SEQ ID NO: 624233 - DNA, 15 bp, Homo sapiens
aaaaaaaagttgaat

SEQ ID NO: 624234 - DNA, 15 bp, Homo sapiens
aaaaaaagttgaatg

SEQ ID NO: 624235 - DNA, 15 bp, Homo sapiens
aaaaaagttgaatga

SEQ ID NO: 624236 - DNA, 15 bp, Homo sapiens
aaaaagttgaatgaa

SEQ ID NO: 624237 - DNA, 15 bp, Homo sapiens
aaaagttgaatgaag

SEQ ID NO: 624238 - DNA, 15 bp, Homo sapiens
aaagttgaatgaagg

SEQ ID NO: 624239 - DNA, 15 bp, Homo sapiens
aagttgaatgaagga

SEQ ID NO: 624240 - DNA, 15 bp, Homo sapiens
agttgaatgaaggaa

SEQ ID NO: 624241 - DNA, 15 bp, Homo sapiens
gttgaatgaaggaac

SEQ ID NO: 624242 - DNA, 15 bp, Homo sapiens
ttgaatgaaggaaca

SEQ ID NO: 624243 - DNA, 15 bp, Homo sapiens
tgaatgaaggaacaa

SEQ ID NO: 624244 - DNA, 15 bp, Homo sapiens
gaatgaaggaacaaa

SEQ ID NO: 624245 - DNA, 15 bp, Homo sapiens
aatgaaggaacaaac

SEQ ID NO: 624246 - DNA, 15 bp, Homo sapiens
atgaaggaacaaaca

SEQ ID NO: 624247 - DNA, 15 bp, Homo sapiens
tgaaggaacaaacaa

SEQ ID NO: 624248 - DNA, 15 bp, Homo sapiens
gaaggaacaaacaat

SEQ ID NO: 624249 - DNA, 15 bp, Homo sapiens
aaggaacaaacaatt

SEQ ID NO: 624250 - DNA, 15 bp, Homo sapiens
aggaacaaacaatta

SEQ ID NO: 624251 - DNA, 15 bp, Homo sapiens
ggaacaaacaattat

SEQ ID NO: 624252 - DNA, 15 bp, Homo sapiens
gaacaaacaattatt

SEQ ID NO: 624253 - DNA, 15 bp, Homo sapiens
aacaaacaattattg

SEQ ID NO: 624254 - DNA, 15 bp, Homo sapiens
acaaacaattattgc

SEQ ID NO: 624255 - DNA, 15 bp, Homo sapiens
caaacaattattgct

SEQ ID NO: 624256 - DNA, 15 bp, Homo sapiens
aaacaattattgctt

SEQ ID NO: 624257 - DNA, 15 bp, Homo sapiens
aacaattattgctta

SEQ ID NO: 624258 - DNA, 15 bp, Homo sapiens
acaattattgcttat

SEQ ID NO: 624259 - DNA, 15 bp, Homo sapiens
caattattgcttatg

SEQ ID NO: 624260 - DNA, 15 bp, Homo sapiens
aattattgcttatgt

SEQ ID NO: 624261 - DNA, 15 bp, Homo sapiens
attattgcttatgta

SEQ ID NO: 624262 - DNA, 15 bp, Homo sapiens
ttattgcttatgtaa

SEQ ID NO: 624263 - DNA, 15 bp, Homo sapiens
tattgcttatgtaat

SEQ ID NO: 624264 - DNA, 15 bp, Homo sapiens
attgcttatgtaatt

SEQ ID NO: 624265 - DNA, 15 bp, Homo sapiens
ttgcttatgtaattc

SEQ ID NO: 624266 - DNA, 15 bp, Homo sapiens
tgcttatgtaattca

SEQ ID NO: 624267 - DNA, 15 bp, Homo sapiens
gcttatgtaattcac

SEQ ID NO: 624268 - DNA, 15 bp, Homo sapiens
cttatgtaattcact

SEQ ID NO: 624269 - DNA, 15 bp, Homo sapiens
ttatgtaattcactt

SEQ ID NO: 624270 - DNA, 15 bp, Homo sapiens
tatgtaattcactta

SEQ ID NO: 624271 - DNA, 15 bp, Homo sapiens
atgtaattcacttag

SEQ ID NO: 624272 - DNA, 15 bp, Homo sapiens
tgtaattcacttagc

SEQ ID NO: 624273 - DNA, 15 bp, Homo sapiens
gtaattcacttagca

SEQ ID NO: 624274 - DNA, 15 bp, Homo sapiens
taattcacttagcac

SEQ ID NO: 624275 - DNA, 15 bp, Homo sapiens
aattcacttagcaca

SEQ ID NO: 624276 - DNA, 15 bp, Homo sapiens
attcacttagcacat

SEQ ID NO: 624277 - DNA, 15 bp, Homo sapiens
ttcacttagcacata

SEQ ID NO: 624278 - DNA, 15 bp, Homo sapiens
tcacttagcacatat

SEQ ID NO: 624279 - DNA, 15 bp, Homo sapiens
cacttagcacatata

SEQ ID NO: 624280 - DNA, 15 bp, Homo sapiens
acttagcacatatat

SEQ ID NO: 624281 - DNA, 15 bp, Homo sapiens
cttagcacatatatg

SEQ ID NO: 624282 - DNA, 15 bp, Homo sapiens
ttagcacatatatga

SEQ ID NO: 624283 - DNA, 15 bp, Homo sapiens
tagcacatatatgat

SEQ ID NO: 624284 - DNA, 15 bp, Homo sapiens
agcacatatatgatg

SEQ ID NO: 624285 - DNA, 15 bp, Homo sapiens
gcacatatatgatgt

SEQ ID NO: 624286 - DNA, 15 bp, Homo sapiens
cacatatatgatgtt

SEQ ID NO: 624287 - DNA, 15 bp, Homo sapiens
acatatatgatgttt

SEQ ID NO: 624288 - DNA, 15 bp, Homo sapiens
catatatgatgtttt

SEQ ID NO: 624289 - DNA, 15 bp, Homo sapiens
atatatgatgtttta

SEQ ID NO: 624290 - DNA, 15 bp, Homo sapiens
tatatgatgttttaa

SEQ ID NO: 624291 - DNA, 15 bp, Homo sapiens
atatgatgttttaaa

SEQ ID NO: 624292 - DNA, 15 bp, Homo sapiens
tatgatgttttaaat

SEQ ID NO: 624293 - DNA, 15 bp, Homo sapiens
atgatgttttaaatt

SEQ ID NO: 624294 - DNA, 15 bp, Homo sapiens
tgatgttttaaattc

SEQ ID NO: 624295 - DNA, 15 bp, Homo sapiens
gatgttttaaattct

SEQ ID NO: 624296 - DNA, 15 bp, Homo sapiens
atgttttaaattctt

SEQ ID NO: 624297 - DNA, 15 bp, Homo sapiens
tgttttaaattctta

SEQ ID NO: 624298 - DNA, 15 bp, Homo sapiens
gttttaaattcttat

SEQ ID NO: 624299 - DNA, 15 bp, Homo sapiens
ttttaaattcttata

SEQ ID NO: 624300 - DNA, 15 bp, Homo sapiens
tttaaattcttatat

SEQ ID NO: 624301 - DNA, 15 bp, Homo sapiens
ttaaattcttatatg

SEQ ID NO: 624302 - DNA, 15 bp, Homo sapiens
taaattcttatatgt

SEQ ID NO: 624303 - DNA, 15 bp, Homo sapiens
aaattcttatatgtg

SEQ ID NO: 624304 - DNA, 15 bp, Homo sapiens
aattcttatatgtgt

SEQ ID NO: 624305 - DNA, 15 bp, Homo sapiens
attcttatatgtgtc

SEQ ID NO: 624306 - DNA, 15 bp, Homo sapiens
ttcttatatgtgtca

SEQ ID NO: 624307 - DNA, 15 bp, Homo sapiens
tcttatatgtgtcat

SEQ ID NO: 624308 - DNA, 15 bp, Homo sapiens
cttatatgtgtcatc

SEQ ID NO: 624309 - DNA, 15 bp, Homo sapiens
ttatatgtgtcatct

SEQ ID NO: 624310 - DNA, 15 bp, Homo sapiens
tatatgtgtcatcta

SEQ ID NO: 624311 - DNA, 15 bp, Homo sapiens
atatgtgtcatctat

SEQ ID NO: 624312 - DNA, 15 bp, Homo sapiens
tatgtgtcatctatt

SEQ ID NO: 624313 - DNA, 15 bp, Homo sapiens
atgtgtcatctattt

SEQ ID NO: 624314 - DNA, 15 bp, Homo sapiens
tgtgtcatctatttt

SEQ ID NO: 624315 - DNA, 15 bp, Homo sapiens
gtgtcatctattttt

SEQ ID NO: 624316 - DNA, 15 bp, Homo sapiens
tgtcatctatttttc

SEQ ID NO: 624317 - DNA, 15 bp, Homo sapiens
gtcatctatttttct

SEQ ID NO: 624318 - DNA, 15 bp, Homo sapiens
tcatctatttttctt

SEQ ID NO: 624319 - DNA, 15 bp, Homo sapiens
catctatttttcttt

SEQ ID NO: 624320 - DNA, 15 bp, Homo sapiens
atctatttttcttta

SEQ ID NO: 624321 - DNA, 15 bp, Homo sapiens
tctatttttctttac

SEQ ID NO: 624322 - DNA, 15 bp, Homo sapiens
ctatttttctttact

SEQ ID NO: 624323 - DNA, 15 bp, Homo sapiens
tatttttctttactt

SEQ ID NO: 624324 - DNA, 15 bp, Homo sapiens
atttttctttacttt

SEQ ID NO: 624325 - DNA, 15 bp, Homo sapiens
tttttctttacttta

SEQ ID NO: 624326 - DNA, 15 bp, Homo sapiens
ttttctttactttaa

SEQ ID NO: 624327 - DNA, 15 bp, Homo sapiens
tttctttactttaaa

SEQ ID NO: 624328 - DNA, 15 bp, Homo sapiens
ttctttactttaaaa

SEQ ID NO: 624329 - DNA, 15 bp, Homo sapiens
tctttactttaaaat

SEQ ID NO: 624330 - DNA, 15 bp, Homo sapiens
ctttactttaaaatt

SEQ ID NO: 624331 - DNA, 15 bp, Homo sapiens
tttactttaaaattt

SEQ ID NO: 624332 - DNA, 15 bp, Homo sapiens
ttactttaaaatttt

SEQ ID NO: 624333 - DNA, 15 bp, Homo sapiens
tactttaaaattttg

SEQ ID NO: 624334 - DNA, 15 bp, Homo sapiens
actttaaaattttgc

SEQ ID NO: 624335 - DNA, 15 bp, Homo sapiens
ctttaaaattttgca

SEQ ID NO: 624336 - DNA, 15 bp, Homo sapiens
tttaaaattttgcaa

SEQ ID NO: 624337 - DNA, 15 bp, Homo sapiens
ttaaaattttgcaac

SEQ ID NO: 624338 - DNA, 15 bp, Homo sapiens
taaaattttgcaaca

SEQ ID NO: 624339 - DNA, 15 bp, Homo sapiens
aaaattttgcaacag

SEQ ID NO: 624340 - DNA, 15 bp, Homo sapiens
aaattttgcaacagt

SEQ ID NO: 624341 - DNA, 15 bp, Homo sapiens
aattttgcaacagtt

SEQ ID NO: 624342 - DNA, 15 bp, Homo sapiens
attttgcaacagtta

SEQ ID NO: 624343 - DNA, 15 bp, Homo sapiens
ttttgcaacagttac

SEQ ID NO: 624344 - DNA, 15 bp, Homo sapiens
tttgcaacagttaca

SEQ ID NO: 624345 - DNA, 15 bp, Homo sapiens
ttgcaacagttacag

SEQ ID NO: 624346 - DNA, 15 bp, Homo sapiens
tgcaacagttacaga

SEQ ID NO: 624347 - DNA, 15 bp, Homo sapiens
gcaacagttacagac

SEQ ID NO: 624348 - DNA, 15 bp, Homo sapiens
caacagttacagact

SEQ ID NO: 624349 - DNA, 15 bp, Homo sapiens
aacagttacagactt

SEQ ID NO: 624350 - DNA, 15 bp, Homo sapiens
acagttacagactta

SEQ ID NO: 624351 - DNA, 15 bp, Homo sapiens
cagttacagacttat

SEQ ID NO: 624352 - DNA, 15 bp, Homo sapiens
agttacagacttatg

SEQ ID NO: 624353 - DNA, 15 bp, Homo sapiens
gttacagacttatgg

SEQ ID NO: 624354 - DNA, 15 bp, Homo sapiens
ttacagacttatgga

SEQ ID NO: 624355 - DNA, 15 bp, Homo sapiens
tacagacttatggaa

SEQ ID NO: 624356 - DNA, 15 bp, Homo sapiens
acagacttatggaaa

SEQ ID NO: 624357 - DNA, 15 bp, Homo sapiens
cagacttatggaaaa

SEQ ID NO: 624358 - DNA, 15 bp, Homo sapiens
agacttatggaaaag

SEQ ID NO: 624359 - DNA, 15 bp, Homo sapiens
gacttatggaaaagt

SEQ ID NO: 624360 - DNA, 15 bp, Homo sapiens
acttatggaaaagtc

SEQ ID NO: 624361 - DNA, 15 bp, Homo sapiens
cttatggaaaagtca

SEQ ID NO: 624362 - DNA, 15 bp, Homo sapiens
ttatggaaaagtcac

SEQ ID NO: 624363 - DNA, 15 bp, Homo sapiens
tatggaaaagtcaca

SEQ ID NO: 624364 - DNA, 15 bp, Homo sapiens
atggaaaagtcacaa

SEQ ID NO: 624365 - DNA, 15 bp, Homo sapiens
tggaaaagtcacaag

SEQ ID NO: 624366 - DNA, 15 bp, Homo sapiens
ggaaaagtcacaagt

SEQ ID NO: 624367 - DNA, 15 bp, Homo sapiens
gaaaagtcacaagta

SEQ ID NO: 624368 - DNA, 15 bp, Homo sapiens
aaaagtcacaagtac

SEQ ID NO: 624369 - DNA, 15 bp, Homo sapiens
aaagtcacaagtaca

SEQ ID NO: 624370 - DNA, 15 bp, Homo sapiens
aagtcacaagtacag

SEQ ID NO: 624371 - DNA, 15 bp, Homo sapiens
agtcacaagtacagt

SEQ ID NO: 624372 - DNA, 15 bp, Homo sapiens
gtcacaagtacagtt

SEQ ID NO: 624373 - DNA, 15 bp, Homo sapiens
tcacaagtacagttg

SEQ ID NO: 624374 - DNA, 15 bp, Homo sapiens
cacaagtacagttga

SEQ ID NO: 624375 - DNA, 15 bp, Homo sapiens
acaagtacagttgaa

SEQ ID NO: 624376 - DNA, 15 bp, Homo sapiens
caagtacagttgaaa

SEQ ID NO: 624377 - DNA, 15 bp, Homo sapiens
aagtacagttgaaac

SEQ ID NO: 624378 - DNA, 15 bp, Homo sapiens
agtacagttgaaacc

SEQ ID NO: 624379 - DNA, 15 bp, Homo sapiens
gtacagttgaaacct

SEQ ID NO: 624380 - DNA, 15 bp, Homo sapiens
tacagttgaaacctt

SEQ ID NO: 624381 - DNA, 15 bp, Homo sapiens
acagttgaaaccttt

SEQ ID NO: 624382 - DNA, 15 bp, Homo sapiens
cagttgaaacctttt

SEQ ID NO: 624383 - DNA, 15 bp, Homo sapiens
agttgaaaccttttt

SEQ ID NO: 624384 - DNA, 15 bp, Homo sapiens
gttgaaacctttttt

SEQ ID NO: 624385 - DNA, 15 bp, Homo sapiens
ttgaaaccttttttt

SEQ ID NO: 624386 - DNA, 15 bp, Homo sapiens
tgaaacctttttttc

SEQ ID NO: 624387 - DNA, 15 bp, Homo sapiens
gaaacctttttttct

SEQ ID NO: 624388 - DNA, 15 bp, Homo sapiens
aaacctttttttctt

SEQ ID NO: 624389 - DNA, 15 bp, Homo sapiens
aacctttttttctta

SEQ ID NO: 624390 - DNA, 15 bp, Homo sapiens
acctttttttcttag

SEQ ID NO: 624391 - DNA, 15 bp, Homo sapiens
cctttttttcttagt

SEQ ID NO: 624392 - DNA, 15 bp, Homo sapiens
ctttttttcttagtc

SEQ ID NO: 624393 - DNA, 15 bp, Homo sapiens
tttttttcttagtca

SEQ ID NO: 624394 - DNA, 15 bp, Homo sapiens
ttttttcttagtcat

SEQ ID NO: 624395 - DNA, 15 bp, Homo sapiens
tttttcttagtcatt

SEQ ID NO: 624396 - DNA, 15 bp, Homo sapiens
ttttcttagtcattt

SEQ ID NO: 624397 - DNA, 15 bp, Homo sapiens
tttcttagtcatttg

SEQ ID NO: 624398 - DNA, 15 bp, Homo sapiens
ttcttagtcatttga

SEQ ID NO: 624399 - DNA, 15 bp, Homo sapiens
tcttagtcatttgaa

SEQ ID NO: 624400 - DNA, 15 bp, Homo sapiens
cttagtcatttgaaa

SEQ ID NO: 624401 - DNA, 15 bp, Homo sapiens
ttagtcatttgaaag

SEQ ID NO: 624402 - DNA, 15 bp, Homo sapiens
tagtcatttgaaagt

SEQ ID NO: 624403 - DNA, 15 bp, Homo sapiens
agtcatttgaaagta

SEQ ID NO: 624404 - DNA, 15 bp, Homo sapiens
gtcatttgaaagtaa

SEQ ID NO: 624405 - DNA, 15 bp, Homo sapiens
tcatttgaaagtaac

SEQ ID NO: 624406 - DNA, 15 bp, Homo sapiens
catttgaaagtaact

SEQ ID NO: 624407 - DNA, 15 bp, Homo sapiens
atttgaaagtaactt

SEQ ID NO: 624408 - DNA, 15 bp, Homo sapiens
tttgaaagtaacttc

SEQ ID NO: 624409 - DNA, 15 bp, Homo sapiens
ttgaaagtaacttct

SEQ ID NO: 624410 - DNA, 15 bp, Homo sapiens
tgaaagtaacttctc

SEQ ID NO: 624411 - DNA, 15 bp, Homo sapiens
gaaagtaacttctca

SEQ ID NO: 624412 - DNA, 15 bp, Homo sapiens
aaagtaacttctcag

SEQ ID NO: 624413 - DNA, 15 bp, Homo sapiens
aagtaacttctcagc

SEQ ID NO: 624414 - DNA, 15 bp, Homo sapiens
agtaacttctcagca

SEQ ID NO: 624415 - DNA, 15 bp, Homo sapiens
gtaacttctcagcaa

SEQ ID NO: 624416 - DNA, 15 bp, Homo sapiens
taacttctcagcaag

SEQ ID NO: 624417 - DNA, 15 bp, Homo sapiens
aacttctcagcaaga

SEQ ID NO: 624418 - DNA, 15 bp, Homo sapiens
acttctcagcaagat

SEQ ID NO: 624419 - DNA, 15 bp, Homo sapiens
cttctcagcaagatg

SEQ ID NO: 624420 - DNA, 15 bp, Homo sapiens
ttctcagcaagatgc

SEQ ID NO: 624421 - DNA, 15 bp, Homo sapiens
tctcagcaagatgcc

SEQ ID NO: 624422 - DNA, 15 bp, Homo sapiens
ctcagcaagatgccc

SEQ ID NO: 624423 - DNA, 15 bp, Homo sapiens
tcagcaagatgcccc

SEQ ID NO: 624424 - DNA, 15 bp, Homo sapiens
cagcaagatgcccct

SEQ ID NO: 624425 - DNA, 15 bp, Homo sapiens
agcaagatgcccctt

SEQ ID NO: 624426 - DNA, 15 bp, Homo sapiens
gcaagatgccccttc

SEQ ID NO: 624427 - DNA, 15 bp, Homo sapiens
caagatgccccttct

SEQ ID NO: 624428 - DNA, 15 bp, Homo sapiens
aagatgccccttctc

SEQ ID NO: 624429 - DNA, 15 bp, Homo sapiens
agatgccccttctca

SEQ ID NO: 624430 - DNA, 15 bp, Homo sapiens
gatgccccttctcat

SEQ ID NO: 624431 - DNA, 15 bp, Homo sapiens
atgccccttctcatt

SEQ ID NO: 624432 - DNA, 15 bp, Homo sapiens
tgccccttctcattt

SEQ ID NO: 624433 - DNA, 15 bp, Homo sapiens
gccccttctcattta

SEQ ID NO: 624434 - DNA, 15 bp, Homo sapiens
ccccttctcatttat

SEQ ID NO: 624435 - DNA, 15 bp, Homo sapiens
cccttctcatttatt

SEQ ID NO: 624436 - DNA, 15 bp, Homo sapiens
ccttctcatttattt

SEQ ID NO: 624437 - DNA, 15 bp, Homo sapiens
cttctcatttatttc

SEQ ID NO: 624438 - DNA, 15 bp, Homo sapiens
ttctcatttatttct

SEQ ID NO: 624439 - DNA, 15 bp, Homo sapiens
tctcatttatttctc

SEQ ID NO: 624440 - DNA, 15 bp, Homo sapiens
ctcatttatttctct

SEQ ID NO: 624441 - DNA, 15 bp, Homo sapiens
tcatttatttctctc

SEQ ID NO: 624442 - DNA, 15 bp, Homo sapiens
catttatttctctct

SEQ ID NO: 624443 - DNA, 15 bp, Homo sapiens
atttatttctctctt

SEQ ID NO: 624444 - DNA, 15 bp, Homo sapiens
tttatttctctcttc

SEQ ID NO: 624445 - DNA, 15 bp, Homo sapiens
ttatttctctcttcc

SEQ ID NO: 624446 - DNA, 15 bp, Homo sapiens
tatttctctcttcct

SEQ ID NO: 624447 - DNA, 15 bp, Homo sapiens
atttctctcttcctg

SEQ ID NO: 624448 - DNA, 15 bp, Homo sapiens
tttctctcttcctgt

SEQ ID NO: 624449 - DNA, 15 bp, Homo sapiens
ttctctcttcctgtc

SEQ ID NO: 624450 - DNA, 15 bp, Homo sapiens
tctctcttcctgtct

SEQ ID NO: 624451 - DNA, 15 bp, Homo sapiens
ctctcttcctgtctc

SEQ ID NO: 624452 - DNA, 15 bp, Homo sapiens
tctcttcctgtctct

SEQ ID NO: 624453 - DNA, 15 bp, Homo sapiens
ctcttcctgtctctc

SEQ ID NO: 624454 - DNA, 15 bp, Homo sapiens
tcttcctgtctctct

SEQ ID NO: 624455 - DNA, 15 bp, Homo sapiens
cttcctgtctctctc

SEQ ID NO: 624456 - DNA, 15 bp, Homo sapiens
ttcctgtctctctct

SEQ ID NO: 624457 - DNA, 15 bp, Homo sapiens
tcctgtctctctctc

SEQ ID NO: 624458 - DNA, 15 bp, Homo sapiens
cctgtctctctctct

SEQ ID NO: 624459 - DNA, 15 bp, Homo sapiens
aggggtgcgggcagt

SEQ ID NO: 624460 - DNA, 15 bp, Homo sapiens
ggggtgcgggcagtg

SEQ ID NO: 624461 - DNA, 15 bp, Homo sapiens
gggtgcgggcagtga

SEQ ID NO: 624462 - DNA, 15 bp, Homo sapiens
ggtgcgggcagtgat

SEQ ID NO: 624463 - DNA, 15 bp, Homo sapiens
gtgcgggcagtgatc

SEQ ID NO: 624464 - DNA, 15 bp, Homo sapiens
tgcgggcagtgatca

SEQ ID NO: 624465 - DNA, 15 bp, Homo sapiens
gcgggcagtgatcac

SEQ ID NO: 624466 - DNA, 15 bp, Homo sapiens
cgggcagtgatcacg

SEQ ID NO: 624467 - DNA, 15 bp, Homo sapiens
gggcagtgatcacga

SEQ ID NO: 624468 - DNA, 15 bp, Homo sapiens
ggcagtgatcacgac

SEQ ID NO: 624469 - DNA, 15 bp, Homo sapiens
gcagtgatcacgacc

SEQ ID NO: 624470 - DNA, 15 bp, Homo sapiens
cagtgatcacgaccc

SEQ ID NO: 624471 - DNA, 15 bp, Homo sapiens
agtgatcacgacccc

SEQ ID NO: 624472 - DNA, 15 bp, Homo sapiens
gtgatcacgaccccc

SEQ ID NO: 624473 - DNA, 15 bp, Homo sapiens
tgatcacgacccccc

SEQ ID NO: 624474 - DNA, 15 bp, Homo sapiens
gatcacgacccccca

SEQ ID NO: 624475 - DNA, 15 bp, Homo sapiens
atcacgaccccccac

SEQ ID NO: 624476 - DNA, 15 bp, Homo sapiens
tcacgaccccccact

SEQ ID NO: 624477 - DNA, 15 bp, Homo sapiens
cacgaccccccactc

SEQ ID NO: 624478 - DNA, 15 bp, Homo sapiens
acgaccccccactcc

SEQ ID NO: 624479 - DNA, 15 bp, Homo sapiens
cgaccccccactcct

SEQ ID NO: 624480 - DNA, 15 bp, Homo sapiens
gaccccccactcctg

SEQ ID NO: 624481 - DNA, 15 bp, Homo sapiens
accccccactcctgg

SEQ ID NO: 624482 - DNA, 15 bp, Homo sapiens
ccccccactcctgga

SEQ ID NO: 624483 - DNA, 15 bp, Homo sapiens
cccccactcctggag

SEQ ID NO: 624484 - DNA, 15 bp, Homo sapiens
ccccactcctggagg

SEQ ID NO: 624485 - DNA, 15 bp, Homo sapiens
cccactcctggagga

SEQ ID NO: 624486 - DNA, 15 bp, Homo sapiens
ccactcctggaggaa

SEQ ID NO: 624487 - DNA, 15 bp, Homo sapiens
cactcctggaggaag

SEQ ID NO: 624488 - DNA, 15 bp, Homo sapiens
actcctggaggaagg

SEQ ID NO: 624489 - DNA, 15 bp, Homo sapiens
ctcctggaggaaggt

SEQ ID NO: 624490 - DNA, 15 bp, Homo sapiens
tcctggaggaaggtg

SEQ ID NO: 624491 - DNA, 15 bp, Homo sapiens
cctggaggaaggtgg

SEQ ID NO: 624492 - DNA, 15 bp, Homo sapiens
ctggaggaaggtggg

SEQ ID NO: 624493 - DNA, 15 bp, Homo sapiens
tggaggaaggtgggt

SEQ ID NO: 624494 - DNA, 15 bp, Homo sapiens
ggaggaaggtgggta

SEQ ID NO: 624495 - DNA, 15 bp, Homo sapiens
gaggaaggtgggtag

SEQ ID NO: 624496 - DNA, 15 bp, Homo sapiens
aggaaggtgggtagc

SEQ ID NO: 624497 - DNA, 15 bp, Homo sapiens
ggaaggtgggtagct

SEQ ID NO: 624498 - DNA, 15 bp, Homo sapiens
gaaggtgggtagctg

SEQ ID NO: 624499 - DNA, 15 bp, Homo sapiens
aaggtgggtagctgc

SEQ ID NO: 624500 - DNA, 15 bp, Homo sapiens
aggtgggtagctgcc

SEQ ID NO: 624501 - DNA, 15 bp, Homo sapiens
ggtgggtagctgcca

SEQ ID NO: 624502 - DNA, 15 bp, Homo sapiens
gtgggtagctgccaa

SEQ ID NO: 624503 - DNA, 15 bp, Homo sapiens
tgggtagctgccaac

SEQ ID NO: 624504 - DNA, 15 bp, Homo sapiens
gggtagctgccaacc

SEQ ID NO: 624505 - DNA, 15 bp, Homo sapiens
ggtagctgccaaccc

SEQ ID NO: 624506 - DNA, 15 bp, Homo sapiens
gtagctgccaaccct

SEQ ID NO: 624507 - DNA, 15 bp, Homo sapiens
tagctgccaaccctg

SEQ ID NO: 624508 - DNA, 15 bp, Homo sapiens
agctgccaaccctga

SEQ ID NO: 624509 - DNA, 15 bp, Homo sapiens
gctgccaaccctgac

SEQ ID NO: 624510 - DNA, 15 bp, Homo sapiens
ctgccaaccctgact

SEQ ID NO: 624511 - DNA, 15 bp, Homo sapiens
tgccaaccctgactt

SEQ ID NO: 624512 - DNA, 15 bp, Homo sapiens
gccaaccctgacttt

SEQ ID NO: 624513 - DNA, 15 bp, Homo sapiens
ccaaccctgactttt

SEQ ID NO: 624514 - DNA, 15 bp, Homo sapiens
caaccctgacttttg

SEQ ID NO: 624515 - DNA, 15 bp, Homo sapiens
aaccctgacttttga

SEQ ID NO: 624516 - DNA, 15 bp, Homo sapiens
accctgacttttgac

SEQ ID NO: 624517 - DNA, 15 bp, Homo sapiens
ccctgacttttgacc

SEQ ID NO: 624518 - DNA, 15 bp, Homo sapiens
cctgacttttgacca

SEQ ID NO: 624519 - DNA, 15 bp, Homo sapiens
ctgacttttgaccag

SEQ ID NO: 624520 - DNA, 15 bp, Homo sapiens
tgacttttgaccagg

SEQ ID NO: 624521 - DNA, 15 bp, Homo sapiens
gacttttgaccaggg

SEQ ID NO: 624522 - DNA, 15 bp, Homo sapiens
acttttgaccagggc

SEQ ID NO: 624523 - DNA, 15 bp, Homo sapiens
cttttgaccagggct

SEQ ID NO: 624524 - DNA, 15 bp, Homo sapiens
ttttgaccagggctt

SEQ ID NO: 624525 - DNA, 15 bp, Homo sapiens
tttgaccagggcttc

SEQ ID NO: 624526 - DNA, 15 bp, Homo sapiens
ttgaccagggcttct

SEQ ID NO: 624527 - DNA, 15 bp, Homo sapiens
tgaccagggcttctc

SEQ ID NO: 624528 - DNA, 15 bp, Homo sapiens
gaccagggcttctca

SEQ ID NO: 624529 - DNA, 15 bp, Homo sapiens
accagggcttctcaa

SEQ ID NO: 624530 - DNA, 15 bp, Homo sapiens
ccagggcttctcaaa

SEQ ID NO: 624531 - DNA, 15 bp, Homo sapiens
cagggcttctcaaat

SEQ ID NO: 624532 - DNA, 15 bp, Homo sapiens
agggcttctcaaatg

SEQ ID NO: 624533 - DNA, 15 bp, Homo sapiens
gggcttctcaaatgc

SEQ ID NO: 624534 - DNA, 15 bp, Homo sapiens
ggcttctcaaatgcc

SEQ ID NO: 624535 - DNA, 15 bp, Homo sapiens
gcttctcaaatgcca

SEQ ID NO: 624536 - DNA, 15 bp, Homo sapiens
cttctcaaatgccag

SEQ ID NO: 624537 - DNA, 15 bp, Homo sapiens
ttctcaaatgccagg

SEQ ID NO: 624538 - DNA, 15 bp, Homo sapiens
tctcaaatgccaggt

SEQ ID NO: 624539 - DNA, 15 bp, Homo sapiens
ctcaaatgccaggtt

SEQ ID NO: 624540 - DNA, 15 bp, Homo sapiens
tcaaatgccaggtta

SEQ ID NO: 624541 - DNA, 15 bp, Homo sapiens
caaatgccaggttag

SEQ ID NO: 624542 - DNA, 15 bp, Homo sapiens
aaatgccaggttagc

SEQ ID NO: 624543 - DNA, 15 bp, Homo sapiens
aatgccaggttagct

SEQ ID NO: 624544 - DNA, 15 bp, Homo sapiens
atgccaggttagctg

SEQ ID NO: 624545 - DNA, 15 bp, Homo sapiens
tgccaggttagctgg

SEQ ID NO: 624546 - DNA, 15 bp, Homo sapiens
gccaggttagctggc

SEQ ID NO: 624547 - DNA, 15 bp, Homo sapiens
ccaggttagctggca

SEQ ID NO: 624548 - DNA, 15 bp, Homo sapiens
caggttagctggcaa

SEQ ID NO: 624549 - DNA, 15 bp, Homo sapiens
aggttagctggcaat

SEQ ID NO: 624550 - DNA, 15 bp, Homo sapiens
ggttagctggcaatt

SEQ ID NO: 624551 - DNA, 15 bp, Homo sapiens
gttagctggcaattg

SEQ ID NO: 624552 - DNA, 15 bp, Homo sapiens
ttagctggcaattgc

SEQ ID NO: 624553 - DNA, 15 bp, Homo sapiens
tagctggcaattgcc

SEQ ID NO: 624554 - DNA, 15 bp, Homo sapiens
agctggcaattgcca

SEQ ID NO: 624555 - DNA, 15 bp, Homo sapiens
gctggcaattgccat

SEQ ID NO: 624556 - DNA, 15 bp, Homo sapiens
ctggcaattgccatt

SEQ ID NO: 624557 - DNA, 15 bp, Homo sapiens
tggcaattgccattc

SEQ ID NO: 624558 - DNA, 15 bp, Homo sapiens
ggcaattgccattct

SEQ ID NO: 624559 - DNA, 15 bp, Homo sapiens
gcaattgccattctt

SEQ ID NO: 624560 - DNA, 15 bp, Homo sapiens
caattgccattcttc

SEQ ID NO: 624561 - DNA, 15 bp, Homo sapiens
aattgccattcttcc

SEQ ID NO: 624562 - DNA, 15 bp, Homo sapiens
attgccattcttccg

SEQ ID NO: 624563 - DNA, 15 bp, Homo sapiens
ttgccattcttccgc

SEQ ID NO: 624564 - DNA, 15 bp, Homo sapiens
tgccattcttccgca

SEQ ID NO: 624565 - DNA, 15 bp, Homo sapiens
gccattcttccgcag

SEQ ID NO: 624566 - DNA, 15 bp, Homo sapiens
ccattcttccgcagg

SEQ ID NO: 624567 - DNA, 15 bp, Homo sapiens
cattcttccgcaggc

SEQ ID NO: 624568 - DNA, 15 bp, Homo sapiens
attcttccgcaggct

SEQ ID NO: 624569 - DNA, 15 bp, Homo sapiens
ttcttccgcaggctc

SEQ ID NO: 624570 - DNA, 15 bp, Homo sapiens
tcttccgcaggctct

SEQ ID NO: 624571 - DNA, 15 bp, Homo sapiens
cttccgcaggctctt

SEQ ID NO: 624572 - DNA, 15 bp, Homo sapiens
ttccgcaggctcttc

SEQ ID NO: 624573 - DNA, 15 bp, Homo sapiens
tccgcaggctcttcc

SEQ ID NO: 624574 - DNA, 15 bp, Homo sapiens
ccgcaggctcttcct

SEQ ID NO: 624575 - DNA, 15 bp, Homo sapiens
cgcaggctcttcctg

SEQ ID NO: 624576 - DNA, 15 bp, Homo sapiens
gcaggctcttcctga

SEQ ID NO: 624577 - DNA, 15 bp, Homo sapiens
caggctcttcctgaa

SEQ ID NO: 624578 - DNA, 15 bp, Homo sapiens
aggctcttcctgaag

SEQ ID NO: 624579 - DNA, 15 bp, Homo sapiens
ggctcttcctgaagc

SEQ ID NO: 624580 - DNA, 15 bp, Homo sapiens
gctcttcctgaagct

SEQ ID NO: 624581 - DNA, 15 bp, Homo sapiens
ctcttcctgaagctg

SEQ ID NO: 624582 - DNA, 15 bp, Homo sapiens
tcttcctgaagctgg

SEQ ID NO: 624583 - DNA, 15 bp, Homo sapiens
cttcctgaagctggg

SEQ ID NO: 624584 - DNA, 15 bp, Homo sapiens
ttcctgaagctgggt

SEQ ID NO: 624585 - DNA, 15 bp, Homo sapiens
tcctgaagctgggtg

SEQ ID NO: 624586 - DNA, 15 bp, Homo sapiens
cctgaagctgggtgg

SEQ ID NO: 624587 - DNA, 15 bp, Homo sapiens
ctgaagctgggtggg

SEQ ID NO: 624588 - DNA, 15 bp, Homo sapiens
tgaagctgggtgggc

SEQ ID NO: 624589 - DNA, 15 bp, Homo sapiens
gaagctgggtgggcc

SEQ ID NO: 624590 - DNA, 15 bp, Homo sapiens
aagctgggtgggccc

SEQ ID NO: 624591 - DNA, 15 bp, Homo sapiens
agctgggtgggcccc

SEQ ID NO: 624592 - DNA, 15 bp, Homo sapiens
gctgggtgggcccct

SEQ ID NO: 624593 - DNA, 15 bp, Homo sapiens
ctgggtgggcccctg

SEQ ID NO: 624594 - DNA, 15 bp, Homo sapiens
tgggtgggcccctgc

SEQ ID NO: 624595 - DNA, 15 bp, Homo sapiens
gggtgggcccctgcc

SEQ ID NO: 624596 - DNA, 15 bp, Homo sapiens
ggtgggcccctgcct

SEQ ID NO: 624597 - DNA, 15 bp, Homo sapiens
gtgggcccctgcctc

SEQ ID NO: 624598 - DNA, 15 bp, Homo sapiens
tgggcccctgcctca

SEQ ID NO: 624599 - DNA, 15 bp, Homo sapiens
gggcccctgcctcac

SEQ ID NO: 624600 - DNA, 15 bp, Homo sapiens
ggcccctgcctcact

SEQ ID NO: 624601 - DNA, 15 bp, Homo sapiens
gcccctgcctcactc

SEQ ID NO: 624602 - DNA, 15 bp, Homo sapiens
cccctgcctcactcc

SEQ ID NO: 624603 - DNA, 15 bp, Homo sapiens
ccctgcctcactccc

SEQ ID NO: 624604 - DNA, 15 bp, Homo sapiens
cctgcctcactcccc

SEQ ID NO: 624605 - DNA, 15 bp, Homo sapiens
ctgcctcactcccct

SEQ ID NO: 624606 - DNA, 15 bp, Homo sapiens
tgcctcactcccctc

SEQ ID NO: 624607 - DNA, 15 bp, Homo sapiens
gcctcactcccctct

SEQ ID NO: 624608 - DNA, 15 bp, Homo sapiens
cctcactcccctctg

SEQ ID NO: 624609 - DNA, 15 bp, Homo sapiens
ctcactcccctctgc

SEQ ID NO: 624610 - DNA, 15 bp, Homo sapiens
tcactcccctctgca

SEQ ID NO: 624611 - DNA, 15 bp, Homo sapiens
cactcccctctgcaa

SEQ ID NO: 624612 - DNA, 15 bp, Homo sapiens
actcccctctgcaat

SEQ ID NO: 624613 - DNA, 15 bp, Homo sapiens
ctcccctctgcaatc

SEQ ID NO: 624614 - DNA, 15 bp, Homo sapiens
tcccctctgcaatcc

SEQ ID NO: 624615 - DNA, 15 bp, Homo sapiens
cccctctgcaatcca

SEQ ID NO: 624616 - DNA, 15 bp, Homo sapiens
ccctctgcaatccag

SEQ ID NO: 624617 - DNA, 15 bp, Homo sapiens
cctctgcaatccagt

SEQ ID NO: 624618 - DNA, 15 bp, Homo sapiens
ctctgcaatccagtc

SEQ ID NO: 624619 - DNA, 15 bp, Homo sapiens
tctgcaatccagtcc

SEQ ID NO: 624620 - DNA, 15 bp, Homo sapiens
ctgcaatccagtcct

SEQ ID NO: 624621 - DNA, 15 bp, Homo sapiens
tgcaatccagtccta

SEQ ID NO: 624622 - DNA, 15 bp, Homo sapiens
gcaatccagtcctac

SEQ ID NO: 624623 - DNA, 15 bp, Homo sapiens
caatccagtcctacc

SEQ ID NO: 624624 - DNA, 15 bp, Homo sapiens
aatccagtcctacct

SEQ ID NO: 624625 - DNA, 15 bp, Homo sapiens
atccagtcctacctt

SEQ ID NO: 624626 - DNA, 15 bp, Homo sapiens
tccagtcctaccttt

SEQ ID NO: 624627 - DNA, 15 bp, Homo sapiens
ccagtcctaccttta

SEQ ID NO: 624628 - DNA, 15 bp, Homo sapiens
cagtcctacctttat

SEQ ID NO: 624629 - DNA, 15 bp, Homo sapiens
agtcctacctttatt

SEQ ID NO: 624630 - DNA, 15 bp, Homo sapiens
gtcctacctttattg

SEQ ID NO: 624631 - DNA, 15 bp, Homo sapiens
tcctacctttattgt

SEQ ID NO: 624632 - DNA, 15 bp, Homo sapiens
cctacctttattgtc

SEQ ID NO: 624633 - DNA, 15 bp, Homo sapiens
ctacctttattgtcc

SEQ ID NO: 624634 - DNA, 15 bp, Homo sapiens
tacctttattgtcct

SEQ ID NO: 624635 - DNA, 15 bp, Homo sapiens
acctttattgtcctc

SEQ ID NO: 624636 - DNA, 15 bp, Homo sapiens
cctttattgtcctca

SEQ ID NO: 624637 - DNA, 15 bp, Homo sapiens
ctttattgtcctcac

SEQ ID NO: 624638 - DNA, 15 bp, Homo sapiens
tttattgtcctcacc

SEQ ID NO: 624639 - DNA, 15 bp, Homo sapiens
ttattgtcctcaccc

SEQ ID NO: 624640 - DNA, 15 bp, Homo sapiens
tattgtcctcaccca

SEQ ID NO: 624641 - DNA, 15 bp, Homo sapiens
attgtcctcacccag

SEQ ID NO: 624642 - DNA, 15 bp, Homo sapiens
ttgtcctcacccagg

SEQ ID NO: 624643 - DNA, 15 bp, Homo sapiens
tgtcctcacccaggg

SEQ ID NO: 624644 - DNA, 15 bp, Homo sapiens
gtcctcacccagggg

SEQ ID NO: 624645 - DNA, 15 bp, Homo sapiens
tcctcacccaggggc

SEQ ID NO: 624646 - DNA, 15 bp, Homo sapiens
cctcacccaggggcc

SEQ ID NO: 624647 - DNA, 15 bp, Homo sapiens
ctcacccaggggcct

SEQ ID NO: 624648 - DNA, 15 bp, Homo sapiens
tcacccaggggcctg

SEQ ID NO: 624649 - DNA, 15 bp, Homo sapiens
cacccaggggcctga

SEQ ID NO: 624650 - DNA, 15 bp, Homo sapiens
acccaggggcctgaa

SEQ ID NO: 624651 - DNA, 15 bp, Homo sapiens
cccaggggcctgaat

SEQ ID NO: 624652 - DNA, 15 bp, Homo sapiens
ccaggggcctgaatt

SEQ ID NO: 624653 - DNA, 15 bp, Homo sapiens
caggggcctgaattg

SEQ ID NO: 624654 - DNA, 15 bp, Homo sapiens
aggggcctgaattgc

SEQ ID NO: 624655 - DNA, 15 bp, Homo sapiens
ggggcctgaattgcc

SEQ ID NO: 624656 - DNA, 15 bp, Homo sapiens
gggcctgaattgcca

SEQ ID NO: 624657 - DNA, 15 bp, Homo sapiens
ggcctgaattgccaa

SEQ ID NO: 624658 - DNA, 15 bp, Homo sapiens
gcctgaattgccaag

SEQ ID NO: 624659 - DNA, 15 bp, Homo sapiens
cctgaattgccaagc

SEQ ID NO: 624660 - DNA, 15 bp, Homo sapiens
ctgaattgccaagca

SEQ ID NO: 624661 - DNA, 15 bp, Homo sapiens
tgaattgccaagcag

SEQ ID NO: 624662 - DNA, 15 bp, Homo sapiens
gaattgccaagcagc

SEQ ID NO: 624663 - DNA, 15 bp, Homo sapiens
aattgccaagcagca

SEQ ID NO: 624664 - DNA, 15 bp, Homo sapiens
attgccaagcagcag

SEQ ID NO: 624665 - DNA, 15 bp, Homo sapiens
ttgccaagcagcagc

SEQ ID NO: 624666 - DNA, 15 bp, Homo sapiens
tgccaagcagcagcc

SEQ ID NO: 624667 - DNA, 15 bp, Homo sapiens
gccaagcagcagccc

SEQ ID NO: 624668 - DNA, 15 bp, Homo sapiens
ccaagcagcagccct

SEQ ID NO: 624669 - DNA, 15 bp, Homo sapiens
caagcagcagccctt

SEQ ID NO: 624670 - DNA, 15 bp, Homo sapiens
aagcagcagcccttc

SEQ ID NO: 624671 - DNA, 15 bp, Homo sapiens
agcagcagcccttcc

SEQ ID NO: 624672 - DNA, 15 bp, Homo sapiens
gcagcagcccttcct

SEQ ID NO: 624673 - DNA, 15 bp, Homo sapiens
cagcagcccttccta

SEQ ID NO: 624674 - DNA, 15 bp, Homo sapiens
agcagcccttcctag

SEQ ID NO: 624675 - DNA, 15 bp, Homo sapiens
gcagcccttcctagc

SEQ ID NO: 624676 - DNA, 15 bp, Homo sapiens
cagcccttcctagca

SEQ ID NO: 624677 - DNA, 15 bp, Homo sapiens
agcccttcctagcaa

SEQ ID NO: 624678 - DNA, 15 bp, Homo sapiens
gcccttcctagcaag

SEQ ID NO: 624679 - DNA, 15 bp, Homo sapiens
cccttcctagcaagc

SEQ ID NO: 624680 - DNA, 15 bp, Homo sapiens
ccttcctagcaagct

SEQ ID NO: 624681 - DNA, 15 bp, Homo sapiens
cttcctagcaagctt

SEQ ID NO: 624682 - DNA, 15 bp, Homo sapiens
ttcctagcaagcttt

SEQ ID NO: 624683 - DNA, 15 bp, Homo sapiens
tcctagcaagctttc

SEQ ID NO: 624684 - DNA, 15 bp, Homo sapiens
cctagcaagctttcc

SEQ ID NO: 624685 - DNA, 15 bp, Homo sapiens
ctagcaagctttccc

SEQ ID NO: 624686 - DNA, 15 bp, Homo sapiens
tagcaagctttcccc

SEQ ID NO: 624687 - DNA, 15 bp, Homo sapiens
agcaagctttcccca

SEQ ID NO: 624688 - DNA, 15 bp, Homo sapiens
gcaagctttccccaa

SEQ ID NO: 624689 - DNA, 15 bp, Homo sapiens
caagctttccccaat

SEQ ID NO: 624690 - DNA, 15 bp, Homo sapiens
aagctttccccaata

SEQ ID NO: 624691 - DNA, 15 bp, Homo sapiens
agctttccccaatag

SEQ ID NO: 624692 - DNA, 15 bp, Homo sapiens
gctttccccaatagt

SEQ ID NO: 624693 - DNA, 15 bp, Homo sapiens
ctttccccaatagtg

SEQ ID NO: 624694 - DNA, 15 bp, Homo sapiens
tttccccaatagtgt

SEQ ID NO: 624695 - DNA, 15 bp, Homo sapiens
ttccccaatagtgtt

SEQ ID NO: 624696 - DNA, 15 bp, Homo sapiens
tccccaatagtgttt

SEQ ID NO: 624697 - DNA, 15 bp, Homo sapiens
ccccaatagtgtttt

SEQ ID NO: 624698 - DNA, 15 bp, Homo sapiens
cccaatagtgttttg

SEQ ID NO: 624699 - DNA, 15 bp, Homo sapiens
ccaatagtgttttgt

SEQ ID NO: 624700 - DNA, 15 bp, Homo sapiens
caatagtgttttgtt

SEQ ID NO: 624701 - DNA, 15 bp, Homo sapiens
aatagtgttttgttt

SEQ ID NO: 624702 - DNA, 15 bp, Homo sapiens
atagtgttttgtttc

SEQ ID NO: 624703 - DNA, 15 bp, Homo sapiens
tagtgttttgtttct

SEQ ID NO: 624704 - DNA, 15 bp, Homo sapiens
agtgttttgtttctt

SEQ ID NO: 624705 - DNA, 15 bp, Homo sapiens
gtgttttgtttctta

SEQ ID NO: 624706 - DNA, 15 bp, Homo sapiens
tgttttgtttcttaa

SEQ ID NO: 624707 - DNA, 15 bp, Homo sapiens
gttttgtttcttaac

SEQ ID NO: 624708 - DNA, 15 bp, Homo sapiens
ttttgtttcttaact

SEQ ID NO: 624709 - DNA, 15 bp, Homo sapiens
tttgtttcttaactt

SEQ ID NO: 624710 - DNA, 15 bp, Homo sapiens
ttgtttcttaacttt

SEQ ID NO: 624711 - DNA, 15 bp, Homo sapiens
tgtttcttaactttt

SEQ ID NO: 624712 - DNA, 15 bp, Homo sapiens
gtttcttaacttttc

SEQ ID NO: 624713 - DNA, 15 bp, Homo sapiens
tttcttaacttttcc

SEQ ID NO: 624714 - DNA, 15 bp, Homo sapiens
ttcttaacttttcct

SEQ ID NO: 624715 - DNA, 15 bp, Homo sapiens
tcttaacttttcctc

SEQ ID NO: 624716 - DNA, 15 bp, Homo sapiens
cttaacttttcctcc

SEQ ID NO: 624717 - DNA, 15 bp, Homo sapiens
ttaacttttcctcct

SEQ ID NO: 624718 - DNA, 15 bp, Homo sapiens
taacttttcctcctc

SEQ ID NO: 624719 - DNA, 15 bp, Homo sapiens
aacttttcctcctct

SEQ ID NO: 624720 - DNA, 15 bp, Homo sapiens
acttttcctcctctc

SEQ ID NO: 624721 - DNA, 15 bp, Homo sapiens
cttttcctcctctca

SEQ ID NO: 624722 - DNA, 15 bp, Homo sapiens
ttttcctcctctcag

SEQ ID NO: 624723 - DNA, 15 bp, Homo sapiens
tttcctcctctcagg

SEQ ID NO: 624724 - DNA, 15 bp, Homo sapiens
ttcctcctctcaggc

SEQ ID NO: 624725 - DNA, 15 bp, Homo sapiens
tcctcctctcaggct

SEQ ID NO: 624726 - DNA, 15 bp, Homo sapiens
cctcctctcaggctg

SEQ ID NO: 624727 - DNA, 15 bp, Homo sapiens
ctcctctcaggctga

SEQ ID NO: 624728 - DNA, 15 bp, Homo sapiens
tcctctcaggctgag

SEQ ID NO: 624729 - DNA, 15 bp, Homo sapiens
cctctcaggctgagt

SEQ ID NO: 624730 - DNA, 15 bp, Homo sapiens
ctctcaggctgagtg

SEQ ID NO: 624731 - DNA, 15 bp, Homo sapiens
tctcaggctgagtgt

SEQ ID NO: 624732 - DNA, 15 bp, Homo sapiens
ctcaggctgagtgtg

SEQ ID NO: 624733 - DNA, 15 bp, Homo sapiens
tcaggctgagtgtgg

SEQ ID NO: 624734 - DNA, 15 bp, Homo sapiens
caggctgagtgtggt

SEQ ID NO: 624735 - DNA, 15 bp, Homo sapiens
aggctgagtgtggtc

SEQ ID NO: 624736 - DNA, 15 bp, Homo sapiens
ggctgagtgtggtca

SEQ ID NO: 624737 - DNA, 15 bp, Homo sapiens
gctgagtgtggtcac

SEQ ID NO: 624738 - DNA, 15 bp, Homo sapiens
ctgagtgtggtcacc

SEQ ID NO: 624739 - DNA, 15 bp, Homo sapiens
tgagtgtggtcacct

SEQ ID NO: 624740 - DNA, 15 bp, Homo sapiens
gagtgtggtcacctg

SEQ ID NO: 624741 - DNA, 15 bp, Homo sapiens
agtgtggtcacctgt

SEQ ID NO: 624742 - DNA, 15 bp, Homo sapiens
gtgtggtcacctgta

SEQ ID NO: 624743 - DNA, 15 bp, Homo sapiens
tgtggtcacctgtaa

SEQ ID NO: 624744 - DNA, 15 bp, Homo sapiens
gtggtcacctgtaaa

SEQ ID NO: 624745 - DNA, 15 bp, Homo sapiens
tggtcacctgtaaat

SEQ ID NO: 624746 - DNA, 15 bp, Homo sapiens
ggtcacctgtaaata

SEQ ID NO: 624747 - DNA, 15 bp, Homo sapiens
gtcacctgtaaatag

SEQ ID NO: 624748 - DNA, 15 bp, Homo sapiens
tcacctgtaaataga

SEQ ID NO: 624749 - DNA, 15 bp, Homo sapiens
cacctgtaaatagat

SEQ ID NO: 624750 - DNA, 15 bp, Homo sapiens
acctgtaaatagatt

SEQ ID NO: 624751 - DNA, 15 bp, Homo sapiens
cctgtaaatagattc

SEQ ID NO: 624752 - DNA, 15 bp, Homo sapiens
ctgtaaatagattcc

SEQ ID NO: 624753 - DNA, 15 bp, Homo sapiens
tgtaaatagattcca

SEQ ID NO: 624754 - DNA, 15 bp, Homo sapiens
gtaaatagattccaa

SEQ ID NO: 624755 - DNA, 15 bp, Homo sapiens
taaatagattccaag

SEQ ID NO: 624756 - DNA, 15 bp, Homo sapiens
aaatagattccaagg

SEQ ID NO: 624757 - DNA, 15 bp, Homo sapiens
aatagattccaagga

SEQ ID NO: 624758 - DNA, 15 bp, Homo sapiens
atagattccaaggac

SEQ ID NO: 624759 - DNA, 15 bp, Homo sapiens
tagattccaaggact

SEQ ID NO: 624760 - DNA, 15 bp, Homo sapiens
agattccaaggactt

SEQ ID NO: 624761 - DNA, 15 bp, Homo sapiens
gattccaaggacttg

SEQ ID NO: 624762 - DNA, 15 bp, Homo sapiens
attccaaggacttgg

SEQ ID NO: 624763 - DNA, 15 bp, Homo sapiens
ttccaaggacttggt

SEQ ID NO: 624764 - DNA, 15 bp, Homo sapiens
tccaaggacttggtt

SEQ ID NO: 624765 - DNA, 15 bp, Homo sapiens
ccaaggacttggttt

SEQ ID NO: 624766 - DNA, 15 bp, Homo sapiens
caaggacttggtttt

SEQ ID NO: 624767 - DNA, 15 bp, Homo sapiens
aaggacttggtttta

SEQ ID NO: 624768 - DNA, 15 bp, Homo sapiens
aggacttggttttat

SEQ ID NO: 624769 - DNA, 15 bp, Homo sapiens
ggacttggttttatg

SEQ ID NO: 624770 - DNA, 15 bp, Homo sapiens
gacttggttttatgt

SEQ ID NO: 624771 - DNA, 15 bp, Homo sapiens
acttggttttatgtt

SEQ ID NO: 624772 - DNA, 15 bp, Homo sapiens
cttggttttatgttt

SEQ ID NO: 624773 - DNA, 15 bp, Homo sapiens
ttggttttatgtttt

SEQ ID NO: 624774 - DNA, 15 bp, Homo sapiens
tggttttatgttttg

SEQ ID NO: 624775 - DNA, 15 bp, Homo sapiens
ggttttatgttttga

SEQ ID NO: 624776 - DNA, 15 bp, Homo sapiens
gttttatgttttgat

SEQ ID NO: 624777 - DNA, 15 bp, Homo sapiens
ttttatgttttgatc

SEQ ID NO: 624778 - DNA, 15 bp, Homo sapiens
tttatgttttgatcc

SEQ ID NO: 624779 - DNA, 15 bp, Homo sapiens
ttatgttttgatcca

SEQ ID NO: 624780 - DNA, 15 bp, Homo sapiens
tatgttttgatccac

SEQ ID NO: 624781 - DNA, 15 bp, Homo sapiens
atgttttgatccaca

SEQ ID NO: 624782 - DNA, 15 bp, Homo sapiens
tgttttgatccacag

SEQ ID NO: 624783 - DNA, 15 bp, Homo sapiens
gttttgatccacagg

SEQ ID NO: 624784 - DNA, 15 bp, Homo sapiens
ttttgatccacaggg

SEQ ID NO: 624785 - DNA, 15 bp, Homo sapiens
tttgatccacaggga

SEQ ID NO: 624786 - DNA, 15 bp, Homo sapiens
ttgatccacagggaa

SEQ ID NO: 624787 - DNA, 15 bp, Homo sapiens
tgatccacagggaat

SEQ ID NO: 624788 - DNA, 15 bp, Homo sapiens
gatccacagggaatt

SEQ ID NO: 624789 - DNA, 15 bp, Homo sapiens
atccacagggaattg

SEQ ID NO: 624790 - DNA, 15 bp, Homo sapiens
tccacagggaattga

SEQ ID NO: 624791 - DNA, 15 bp, Homo sapiens
ccacagggaattgat

SEQ ID NO: 624792 - DNA, 15 bp, Homo sapiens
cacagggaattgatt

SEQ ID NO: 624793 - DNA, 15 bp, Homo sapiens
acagggaattgattt

SEQ ID NO: 624794 - DNA, 15 bp, Homo sapiens
cagggaattgattta

SEQ ID NO: 624795 - DNA, 15 bp, Homo sapiens
agggaattgatttat

SEQ ID NO: 624796 - DNA, 15 bp, Homo sapiens
gggaattgatttatt

SEQ ID NO: 624797 - DNA, 15 bp, Homo sapiens
ggaattgatttattg

SEQ ID NO: 624798 - DNA, 15 bp, Homo sapiens
gaattgatttattgg

SEQ ID NO: 624799 - DNA, 15 bp, Homo sapiens
aattgatttattgga

SEQ ID NO: 624800 - DNA, 15 bp, Homo sapiens
attgatttattggaa

SEQ ID NO: 624801 - DNA, 15 bp, Homo sapiens
ttgatttattggaaa

SEQ ID NO: 624802 - DNA, 15 bp, Homo sapiens
tgatttattggaaat

SEQ ID NO: 624803 - DNA, 15 bp, Homo sapiens
gatttattggaaatg

SEQ ID NO: 624804 - DNA, 15 bp, Homo sapiens
atttattggaaatga

SEQ ID NO: 624805 - DNA, 15 bp, Homo sapiens
tttattggaaatgaa

SEQ ID NO: 624806 - DNA, 15 bp, Homo sapiens
ttattggaaatgaat

SEQ ID NO: 624807 - DNA, 15 bp, Homo sapiens
tattggaaatgaatc

SEQ ID NO: 624808 - DNA, 15 bp, Homo sapiens
attggaaatgaatct

SEQ ID NO: 624809 - DNA, 15 bp, Homo sapiens
ttggaaatgaatctg

SEQ ID NO: 624810 - DNA, 15 bp, Homo sapiens
tggaaatgaatctgc

SEQ ID NO: 624811 - DNA, 15 bp, Homo sapiens
ggaaatgaatctgcc

SEQ ID NO: 624812 - DNA, 15 bp, Homo sapiens
gaaatgaatctgcct

SEQ ID NO: 624813 - DNA, 15 bp, Homo sapiens
aaatgaatctgcctt

SEQ ID NO: 624814 - DNA, 15 bp, Homo sapiens
aatgaatctgccttt

SEQ ID NO: 624815 - DNA, 15 bp, Homo sapiens
atgaatctgcctttc

SEQ ID NO: 624816 - DNA, 15 bp, Homo sapiens
tgaatctgcctttct

SEQ ID NO: 624817 - DNA, 15 bp, Homo sapiens
gaatctgcctttcta

SEQ ID NO: 624818 - DNA, 15 bp, Homo sapiens
aatctgcctttctac

SEQ ID NO: 624819 - DNA, 15 bp, Homo sapiens
atctgcctttctact

SEQ ID NO: 624820 - DNA, 15 bp, Homo sapiens
tctgcctttctactc

SEQ ID NO: 624821 - DNA, 15 bp, Homo sapiens
ctgcctttctactca

SEQ ID NO: 624822 - DNA, 15 bp, Homo sapiens
tgcctttctactcac

SEQ ID NO: 624823 - DNA, 15 bp, Homo sapiens
gcctttctactcaca

SEQ ID NO: 624824 - DNA, 15 bp, Homo sapiens
cctttctactcacag

SEQ ID NO: 624825 - DNA, 15 bp, Homo sapiens
ctttctactcacagg

SEQ ID NO: 624826 - DNA, 15 bp, Homo sapiens
tttctactcacagga

SEQ ID NO: 624827 - DNA, 15 bp, Homo sapiens
ttctactcacaggac

SEQ ID NO: 624828 - DNA, 15 bp, Homo sapiens
tctactcacaggact

SEQ ID NO: 624829 - DNA, 15 bp, Homo sapiens
ctactcacaggactg

SEQ ID NO: 624830 - DNA, 15 bp, Homo sapiens
tactcacaggactgt

SEQ ID NO: 624831 - DNA, 15 bp, Homo sapiens
actcacaggactgtg

SEQ ID NO: 624832 - DNA, 15 bp, Homo sapiens
ctcacaggactgtga

SEQ ID NO: 624833 - DNA, 15 bp, Homo sapiens
tcacaggactgtgag

SEQ ID NO: 624834 - DNA, 15 bp, Homo sapiens
cacaggactgtgaga

SEQ ID NO: 624835 - DNA, 15 bp, Homo sapiens
acaggactgtgagag

SEQ ID NO: 624836 - DNA, 15 bp, Homo sapiens
caggactgtgagagg

SEQ ID NO: 624837 - DNA, 15 bp, Homo sapiens
aggactgtgagaggt

SEQ ID NO: 624838 - DNA, 15 bp, Homo sapiens
ggactgtgagaggtg

SEQ ID NO: 624839 - DNA, 15 bp, Homo sapiens
gactgtgagaggtga

SEQ ID NO: 624840 - DNA, 15 bp, Homo sapiens
actgtgagaggtgaa

SEQ ID NO: 624841 - DNA, 15 bp, Homo sapiens
ctgtgagaggtgaat

SEQ ID NO: 624842 - DNA, 15 bp, Homo sapiens
tgtgagaggtgaatg

SEQ ID NO: 624843 - DNA, 15 bp, Homo sapiens
gtgagaggtgaatga

SEQ ID NO: 624844 - DNA, 15 bp, Homo sapiens
tgagaggtgaatgag

SEQ ID NO: 624845 - DNA, 15 bp, Homo sapiens
gagaggtgaatgaga

SEQ ID NO: 624846 - DNA, 15 bp, Homo sapiens
agaggtgaatgagat

SEQ ID NO: 624847 - DNA, 15 bp, Homo sapiens
gaggtgaatgagatc

SEQ ID NO: 624848 - DNA, 15 bp, Homo sapiens
aggtgaatgagatca

SEQ ID NO: 624849 - DNA, 15 bp, Homo sapiens
ggtgaatgagatcac

SEQ ID NO: 624850 - DNA, 15 bp, Homo sapiens
gtgaatgagatcaca

SEQ ID NO: 624851 - DNA, 15 bp, Homo sapiens
tgaatgagatcacag

SEQ ID NO: 624852 - DNA, 15 bp, Homo sapiens
gaatgagatcacagg

SEQ ID NO: 624853 - DNA, 15 bp, Homo sapiens
aatgagatcacaggt

SEQ ID NO: 624854 - DNA, 15 bp, Homo sapiens
atgagatcacaggtg

SEQ ID NO: 624855 - DNA, 15 bp, Homo sapiens
tgagatcacaggtgt

SEQ ID NO: 624856 - DNA, 15 bp, Homo sapiens
gagatcacaggtgtc

SEQ ID NO: 624857 - DNA, 15 bp, Homo sapiens
agatcacaggtgtca

SEQ ID NO: 624858 - DNA, 15 bp, Homo sapiens
gatcacaggtgtcaa

SEQ ID NO: 624859 - DNA, 15 bp, Homo sapiens
atcacaggtgtcaac

SEQ ID NO: 624860 - DNA, 15 bp, Homo sapiens
tcacaggtgtcaaca

SEQ ID NO: 624861 - DNA, 15 bp, Homo sapiens
cacaggtgtcaacac

SEQ ID NO: 624862 - DNA, 15 bp, Homo sapiens
acaggtgtcaacaca

SEQ ID NO: 624863 - DNA, 15 bp, Homo sapiens
caggtgtcaacacac

SEQ ID NO: 624864 - DNA, 15 bp, Homo sapiens
aggtgtcaacacacg

SEQ ID NO: 624865 - DNA, 15 bp, Homo sapiens
ggtgtcaacacacgc

SEQ ID NO: 624866 - DNA, 15 bp, Homo sapiens
gtgtcaacacacgcc

SEQ ID NO: 624867 - DNA, 15 bp, Homo sapiens
tgtcaacacacgcct

SEQ ID NO: 624868 - DNA, 15 bp, Homo sapiens
gtcaacacacgcctg

SEQ ID NO: 624869 - DNA, 15 bp, Homo sapiens
tcaacacacgcctga

SEQ ID NO: 624870 - DNA, 15 bp, Homo sapiens
caacacacgcctgat

SEQ ID NO: 624871 - DNA, 15 bp, Homo sapiens
aacacacgcctgatg

SEQ ID NO: 624872 - DNA, 15 bp, Homo sapiens
acacacgcctgatga

SEQ ID NO: 624873 - DNA, 15 bp, Homo sapiens
cacacgcctgatgaa

SEQ ID NO: 624874 - DNA, 15 bp, Homo sapiens
acacgcctgatgaaa

SEQ ID NO: 624875 - DNA, 15 bp, Homo sapiens
cacgcctgatgaaac

SEQ ID NO: 624876 - DNA, 15 bp, Homo sapiens
acgcctgatgaaaca

SEQ ID NO: 624877 - DNA, 15 bp, Homo sapiens
cgcctgatgaaacag

SEQ ID NO: 624878 - DNA, 15 bp, Homo sapiens
gcctgatgaaacagg

SEQ ID NO: 624879 - DNA, 15 bp, Homo sapiens
cctgatgaaacagga

SEQ ID NO: 624880 - DNA, 15 bp, Homo sapiens
ctgatgaaacaggat

SEQ ID NO: 624881 - DNA, 15 bp, Homo sapiens
tgatgaaacaggata

SEQ ID NO: 624882 - DNA, 15 bp, Homo sapiens
gatgaaacaggatac

SEQ ID NO: 624883 - DNA, 15 bp, Homo sapiens
atgaaacaggataca

SEQ ID NO: 624884 - DNA, 15 bp, Homo sapiens
tgaaacaggatacac

SEQ ID NO: 624885 - DNA, 15 bp, Homo sapiens
gaaacaggatacaca

SEQ ID NO: 624886 - DNA, 15 bp, Homo sapiens
aaacaggatacacaa

SEQ ID NO: 624887 - DNA, 15 bp, Homo sapiens
aacaggatacacaag

SEQ ID NO: 624888 - DNA, 15 bp, Homo sapiens
acaggatacacaagc

SEQ ID NO: 624889 - DNA, 15 bp, Homo sapiens
caggatacacaagca

SEQ ID NO: 624890 - DNA, 15 bp, Homo sapiens
aggatacacaagcag

SEQ ID NO: 624891 - DNA, 15 bp, Homo sapiens
ggatacacaagcagt

SEQ ID NO: 624892 - DNA, 15 bp, Homo sapiens
gatacacaagcagtt

SEQ ID NO: 624893 - DNA, 15 bp, Homo sapiens
atacacaagcagttc

SEQ ID NO: 624894 - DNA, 15 bp, Homo sapiens
tacacaagcagttct

SEQ ID NO: 624895 - DNA, 15 bp, Homo sapiens
acacaagcagttcta

SEQ ID NO: 624896 - DNA, 15 bp, Homo sapiens
cacaagcagttctag

SEQ ID NO: 624897 - DNA, 15 bp, Homo sapiens
acaagcagttctagt

SEQ ID NO: 624898 - DNA, 15 bp, Homo sapiens
caagcagttctagtt

SEQ ID NO: 624899 - DNA, 15 bp, Homo sapiens
aagcagttctagtta

SEQ ID NO: 624900 - DNA, 15 bp, Homo sapiens
agcagttctagttat

SEQ ID NO: 624901 - DNA, 15 bp, Homo sapiens
gcagttctagttatg

SEQ ID NO: 624902 - DNA, 15 bp, Homo sapiens
cagttctagttatgg

SEQ ID NO: 624903 - DNA, 15 bp, Homo sapiens
agttctagttatggg

SEQ ID NO: 624904 - DNA, 15 bp, Homo sapiens
gttctagttatggga

SEQ ID NO: 624905 - DNA, 15 bp, Homo sapiens
ttctagttatgggag

SEQ ID NO: 624906 - DNA, 15 bp, Homo sapiens
tctagttatgggaga

SEQ ID NO: 624907 - DNA, 15 bp, Homo sapiens
ctagttatgggagac

SEQ ID NO: 624908 - DNA, 15 bp, Homo sapiens
tagttatgggagaca

SEQ ID NO: 624909 - DNA, 15 bp, Homo sapiens
agttatgggagacag

SEQ ID NO: 624910 - DNA, 15 bp, Homo sapiens
gttatgggagacagt

SEQ ID NO: 624911 - DNA, 15 bp, Homo sapiens
ttatgggagacagtg

SEQ ID NO: 624912 - DNA, 15 bp, Homo sapiens
tatgggagacagtgt

SEQ ID NO: 624913 - DNA, 15 bp, Homo sapiens
atgggagacagtgtc

SEQ ID NO: 624914 - DNA, 15 bp, Homo sapiens
tgggagacagtgtca

SEQ ID NO: 624915 - DNA, 15 bp, Homo sapiens
gggagacagtgtcag

SEQ ID NO: 624916 - DNA, 15 bp, Homo sapiens
ggagacagtgtcagg

SEQ ID NO: 624917 - DNA, 15 bp, Homo sapiens
gagacagtgtcagga

SEQ ID NO: 624918 - DNA, 15 bp, Homo sapiens
agacagtgtcaggaa

SEQ ID NO: 624919 - DNA, 15 bp, Homo sapiens
gacagtgtcaggaat

SEQ ID NO: 624920 - DNA, 15 bp, Homo sapiens
acagtgtcaggaatt

SEQ ID NO: 624921 - DNA, 15 bp, Homo sapiens
cagtgtcaggaattg

SEQ ID NO: 624922 - DNA, 15 bp, Homo sapiens
agtgtcaggaattgt

SEQ ID NO: 624923 - DNA, 15 bp, Homo sapiens
gtgtcaggaattgtt

SEQ ID NO: 624924 - DNA, 15 bp, Homo sapiens
tgtcaggaattgttg

SEQ ID NO: 624925 - DNA, 15 bp, Homo sapiens
gtcaggaattgttgt

SEQ ID NO: 624926 - DNA, 15 bp, Homo sapiens
tcaggaattgttgtc

SEQ ID NO: 624927 - DNA, 15 bp, Homo sapiens
caggaattgttgtcc

SEQ ID NO: 624928 - DNA, 15 bp, Homo sapiens
aggaattgttgtcct

SEQ ID NO: 624929 - DNA, 15 bp, Homo sapiens
ggaattgttgtcctt

SEQ ID NO: 624930 - DNA, 15 bp, Homo sapiens
gaattgttgtccttg

SEQ ID NO: 624931 - DNA, 15 bp, Homo sapiens
aattgttgtccttgg

SEQ ID NO: 624932 - DNA, 15 bp, Homo sapiens
attgttgtccttggc

SEQ ID NO: 624933 - DNA, 15 bp, Homo sapiens
ttgttgtccttggca

SEQ ID NO: 624934 - DNA, 15 bp, Homo sapiens
tgttgtccttggcac

SEQ ID NO: 624935 - DNA, 15 bp, Homo sapiens
gttgtccttggcacc

SEQ ID NO: 624936 - DNA, 15 bp, Homo sapiens
ttgtccttggcaccc

SEQ ID NO: 624937 - DNA, 15 bp, Homo sapiens
tgtccttggcaccct

SEQ ID NO: 624938 - DNA, 15 bp, Homo sapiens
gtccttggcaccctc

SEQ ID NO: 624939 - DNA, 15 bp, Homo sapiens
tccttggcaccctca

SEQ ID NO: 624940 - DNA, 15 bp, Homo sapiens
ccttggcaccctcag

SEQ ID NO: 624941 - DNA, 15 bp, Homo sapiens
cttggcaccctcagc

SEQ ID NO: 624942 - DNA, 15 bp, Homo sapiens
ttggcaccctcagcc

SEQ ID NO: 624943 - DNA, 15 bp, Homo sapiens
tggcaccctcagccc

SEQ ID NO: 624944 - DNA, 15 bp, Homo sapiens
ggcaccctcagcccc

SEQ ID NO: 624945 - DNA, 15 bp, Homo sapiens
gcaccctcagcccct

SEQ ID NO: 624946 - DNA, 15 bp, Homo sapiens
caccctcagcccctg

SEQ ID NO: 624947 - DNA, 15 bp, Homo sapiens
accctcagcccctgc

SEQ ID NO: 624948 - DNA, 15 bp, Homo sapiens
ccctcagcccctgca

SEQ ID NO: 624949 - DNA, 15 bp, Homo sapiens
cctcagcccctgcag

SEQ ID NO: 624950 - DNA, 15 bp, Homo sapiens
ctcagcccctgcaga

SEQ ID NO: 624951 - DNA, 15 bp, Homo sapiens
tcagcccctgcagac

SEQ ID NO: 624952 - DNA, 15 bp, Homo sapiens
cagcccctgcagacc

SEQ ID NO: 624953 - DNA, 15 bp, Homo sapiens
agcccctgcagaccc

SEQ ID NO: 624954 - DNA, 15 bp, Homo sapiens
gcccctgcagaccct

SEQ ID NO: 624955 - DNA, 15 bp, Homo sapiens
cccctgcagaccctt

SEQ ID NO: 624956 - DNA, 15 bp, Homo sapiens
ccctgcagacccttt

SEQ ID NO: 624957 - DNA, 15 bp, Homo sapiens
cctgcagaccctttc

SEQ ID NO: 624958 - DNA, 15 bp, Homo sapiens
ctgcagaccctttct

SEQ ID NO: 624959 - DNA, 15 bp, Homo sapiens
tgcagaccctttctg

SEQ ID NO: 624960 - DNA, 15 bp, Homo sapiens
gcagaccctttctgc

SEQ ID NO: 624961 - DNA, 15 bp, Homo sapiens
cagaccctttctgca

SEQ ID NO: 624962 - DNA, 15 bp, Homo sapiens
agaccctttctgcag

SEQ ID NO: 624963 - DNA, 15 bp, Homo sapiens
gaccctttctgcagc

SEQ ID NO: 624964 - DNA, 15 bp, Homo sapiens
accctttctgcagcc

SEQ ID NO: 624965 - DNA, 15 bp, Homo sapiens
ccctttctgcagcct

SEQ ID NO: 624966 - DNA, 15 bp, Homo sapiens
cctttctgcagcctt

SEQ ID NO: 624967 - DNA, 15 bp, Homo sapiens
ctttctgcagccttg

SEQ ID NO: 624968 - DNA, 15 bp, Homo sapiens
tttctgcagccttgg

SEQ ID NO: 624969 - DNA, 15 bp, Homo sapiens
ttctgcagccttggc

SEQ ID NO: 624970 - DNA, 15 bp, Homo sapiens
tctgcagccttggcc

SEQ ID NO: 624971 - DNA, 15 bp, Homo sapiens
ctgcagccttggcca

SEQ ID NO: 624972 - DNA, 15 bp, Homo sapiens
tgcagccttggccat

SEQ ID NO: 624973 - DNA, 15 bp, Homo sapiens
gcagccttggccata

SEQ ID NO: 624974 - DNA, 15 bp, Homo sapiens
cagccttggccatac

SEQ ID NO: 624975 - DNA, 15 bp, Homo sapiens
agccttggccatacc

SEQ ID NO: 624976 - DNA, 15 bp, Homo sapiens
gccttggccatacct

SEQ ID NO: 624977 - DNA, 15 bp, Homo sapiens
ccttggccatacctt

SEQ ID NO: 624978 - DNA, 15 bp, Homo sapiens
cttggccataccttt

SEQ ID NO: 624979 - DNA, 15 bp, Homo sapiens
ttggccatacctttt

SEQ ID NO: 624980 - DNA, 15 bp, Homo sapiens
tggccatacctttta

SEQ ID NO: 624981 - DNA, 15 bp, Homo sapiens
ggccataccttttag

SEQ ID NO: 624982 - DNA, 15 bp, Homo sapiens
gccataccttttaga

SEQ ID NO: 624983 - DNA, 15 bp, Homo sapiens
ccataccttttagag

SEQ ID NO: 624984 - DNA, 15 bp, Homo sapiens
cataccttttagagg

SEQ ID NO: 624985 - DNA, 15 bp, Homo sapiens
ataccttttagaggc

SEQ ID NO: 624986 - DNA, 15 bp, Homo sapiens
taccttttagaggct

SEQ ID NO: 624987 - DNA, 15 bp, Homo sapiens
accttttagaggctt

SEQ ID NO: 624988 - DNA, 15 bp, Homo sapiens
ccttttagaggcttt

SEQ ID NO: 624989 - DNA, 15 bp, Homo sapiens
cttttagaggctttt

SEQ ID NO: 624990 - DNA, 15 bp, Homo sapiens
ttttagaggcttttg

SEQ ID NO: 624991 - DNA, 15 bp, Homo sapiens
tttagaggcttttgt

SEQ ID NO: 624992 - DNA, 15 bp, Homo sapiens
ttagaggcttttgtg

SEQ ID NO: 624993 - DNA, 15 bp, Homo sapiens
tagaggcttttgtgt

SEQ ID NO: 624994 - DNA, 15 bp, Homo sapiens
agaggcttttgtgtg

SEQ ID NO: 624995 - DNA, 15 bp, Homo sapiens
gaggcttttgtgtgg

SEQ ID NO: 624996 - DNA, 15 bp, Homo sapiens
aggcttttgtgtggg

SEQ ID NO: 624997 - DNA, 15 bp, Homo sapiens
ggcttttgtgtggga

SEQ ID NO: 624998 - DNA, 15 bp, Homo sapiens
gcttttgtgtgggag

SEQ ID NO: 624999 - DNA, 15 bp, Homo sapiens
cttttgtgtgggaga

SEQ ID NO: 625000 - DNA, 15 bp, Homo sapiens
ttttgtgtgggagag

SEQ ID NO: 625001 - DNA, 15 bp, Homo sapiens
tttgtgtgggagaga

SEQ ID NO: 625002 - DNA, 15 bp, Homo sapiens
ttgtgtgggagagag

SEQ ID NO: 625003 - DNA, 15 bp, Homo sapiens
tgtgtgggagagagc

SEQ ID NO: 625004 - DNA, 15 bp, Homo sapiens
gtgtgggagagagca

SEQ ID NO: 625005 - DNA, 15 bp, Homo sapiens
tgtgggagagagcag

SEQ ID NO: 625006 - DNA, 15 bp, Homo sapiens
gtgggagagagcagg

SEQ ID NO: 625007 - DNA, 15 bp, Homo sapiens
tgggagagagcaggt

SEQ ID NO: 625008 - DNA, 15 bp, Homo sapiens
gggagagagcaggtc

SEQ ID NO: 625009 - DNA, 15 bp, Homo sapiens
ggagagagcaggtca

SEQ ID NO: 625010 - DNA, 15 bp, Homo sapiens
gagagagcaggtcag

SEQ ID NO: 625011 - DNA, 15 bp, Homo sapiens
agagagcaggtcagg

SEQ ID NO: 625012 - DNA, 15 bp, Homo sapiens
gagagcaggtcagga

SEQ ID NO: 625013 - DNA, 15 bp, Homo sapiens
agagcaggtcaggag

SEQ ID NO: 625014 - DNA, 15 bp, Homo sapiens
gagcaggtcaggagg

SEQ ID NO: 625015 - DNA, 15 bp, Homo sapiens
agcaggtcaggaggt

SEQ ID NO: 625016 - DNA, 15 bp, Homo sapiens
gcaggtcaggaggtt

SEQ ID NO: 625017 - DNA, 15 bp, Homo sapiens
caggtcaggaggttg

SEQ ID NO: 625018 - DNA, 15 bp, Homo sapiens
aggtcaggaggttga

SEQ ID NO: 625019 - DNA, 15 bp, Homo sapiens
ggtcaggaggttgac

SEQ ID NO: 625020 - DNA, 15 bp, Homo sapiens
gtcaggaggttgact

SEQ ID NO: 625021 - DNA, 15 bp, Homo sapiens
tcaggaggttgacta

SEQ ID NO: 625022 - DNA, 15 bp, Homo sapiens
caggaggttgactac

SEQ ID NO: 625023 - DNA, 15 bp, Homo sapiens
aggaggttgactacc

SEQ ID NO: 625024 - DNA, 15 bp, Homo sapiens
ggaggttgactaccc

SEQ ID NO: 625025 - DNA, 15 bp, Homo sapiens
gaggttgactaccca

SEQ ID NO: 625026 - DNA, 15 bp, Homo sapiens
aggttgactacccaa

SEQ ID NO: 625027 - DNA, 15 bp, Homo sapiens
ggttgactacccaaa

SEQ ID NO: 625028 - DNA, 15 bp, Homo sapiens
gttgactacccaaat

SEQ ID NO: 625029 - DNA, 15 bp, Homo sapiens
ttgactacccaaatt

SEQ ID NO: 625030 - DNA, 15 bp, Homo sapiens
tgactacccaaattg

SEQ ID NO: 625031 - DNA, 15 bp, Homo sapiens
gactacccaaattga

SEQ ID NO: 625032 - DNA, 15 bp, Homo sapiens
actacccaaattgac

SEQ ID NO: 625033 - DNA, 15 bp, Homo sapiens
ctacccaaattgact

SEQ ID NO: 625034 - DNA, 15 bp, Homo sapiens
tacccaaattgactc

SEQ ID NO: 625035 - DNA, 15 bp, Homo sapiens
acccaaattgactca

SEQ ID NO: 625036 - DNA, 15 bp, Homo sapiens
cccaaattgactcat

SEQ ID NO: 625037 - DNA, 15 bp, Homo sapiens
ccaaattgactcatt

SEQ ID NO: 625038 - DNA, 15 bp, Homo sapiens
caaattgactcatta

SEQ ID NO: 625039 - DNA, 15 bp, Homo sapiens
aaattgactcattag

SEQ ID NO: 625040 - DNA, 15 bp, Homo sapiens
aattgactcattagc

SEQ ID NO: 625041 - DNA, 15 bp, Homo sapiens
attgactcattagct

SEQ ID NO: 625042 - DNA, 15 bp, Homo sapiens
ttgactcattagctt

SEQ ID NO: 625043 - DNA, 15 bp, Homo sapiens
tgactcattagcttc

SEQ ID NO: 625044 - DNA, 15 bp, Homo sapiens
gactcattagcttca

SEQ ID NO: 625045 - DNA, 15 bp, Homo sapiens
actcattagcttcaa

SEQ ID NO: 625046 - DNA, 15 bp, Homo sapiens
ctcattagcttcaaa

SEQ ID NO: 625047 - DNA, 15 bp, Homo sapiens
tcattagcttcaaac

SEQ ID NO: 625048 - DNA, 15 bp, Homo sapiens
cattagcttcaaact

SEQ ID NO: 625049 - DNA, 15 bp, Homo sapiens
attagcttcaaactc

SEQ ID NO: 625050 - DNA, 15 bp, Homo sapiens
ttagcttcaaactct

SEQ ID NO: 625051 - DNA, 15 bp, Homo sapiens
tagcttcaaactctg

SEQ ID NO: 625052 - DNA, 15 bp, Homo sapiens
agcttcaaactctga

SEQ ID NO: 625053 - DNA, 15 bp, Homo sapiens
gcttcaaactctgat

SEQ ID NO: 625054 - DNA, 15 bp, Homo sapiens
cttcaaactctgatg

SEQ ID NO: 625055 - DNA, 15 bp, Homo sapiens
ttcaaactctgatgt

SEQ ID NO: 625056 - DNA, 15 bp, Homo sapiens
tcaaactctgatgtc

SEQ ID NO: 625057 - DNA, 15 bp, Homo sapiens
caaactctgatgtca

SEQ ID NO: 625058 - DNA, 15 bp, Homo sapiens
aaactctgatgtcaa

SEQ ID NO: 625059 - DNA, 15 bp, Homo sapiens
aactctgatgtcaac

SEQ ID NO: 625060 - DNA, 15 bp, Homo sapiens
actctgatgtcaaca

SEQ ID NO: 625061 - DNA, 15 bp, Homo sapiens
ctctgatgtcaacac

SEQ ID NO: 625062 - DNA, 15 bp, Homo sapiens
tctgatgtcaacaca

SEQ ID NO: 625063 - DNA, 15 bp, Homo sapiens
ctgatgtcaacacat

SEQ ID NO: 625064 - DNA, 15 bp, Homo sapiens
tgatgtcaacacatt

SEQ ID NO: 625065 - DNA, 15 bp, Homo sapiens
gatgtcaacacattt

SEQ ID NO: 625066 - DNA, 15 bp, Homo sapiens
atgtcaacacatttg

SEQ ID NO: 625067 - DNA, 15 bp, Homo sapiens
tgtcaacacatttga

SEQ ID NO: 625068 - DNA, 15 bp, Homo sapiens
gtcaacacatttgaa

SEQ ID NO: 625069 - DNA, 15 bp, Homo sapiens
tcaacacatttgaat

SEQ ID NO: 625070 - DNA, 15 bp, Homo sapiens
caacacatttgaatg

SEQ ID NO: 625071 - DNA, 15 bp, Homo sapiens
aacacatttgaatga

SEQ ID NO: 625072 - DNA, 15 bp, Homo sapiens
acacatttgaatgag

SEQ ID NO: 625073 - DNA, 15 bp, Homo sapiens
cacatttgaatgagt

SEQ ID NO: 625074 - DNA, 15 bp, Homo sapiens
acatttgaatgagtc

SEQ ID NO: 625075 - DNA, 15 bp, Homo sapiens
catttgaatgagtcc

SEQ ID NO: 625076 - DNA, 15 bp, Homo sapiens
atttgaatgagtcct

SEQ ID NO: 625077 - DNA, 15 bp, Homo sapiens
tttgaatgagtcctg

SEQ ID NO: 625078 - DNA, 15 bp, Homo sapiens
ttgaatgagtcctgc

SEQ ID NO: 625079 - DNA, 15 bp, Homo sapiens
tgaatgagtcctgcc

SEQ ID NO: 625080 - DNA, 15 bp, Homo sapiens
gaatgagtcctgcct

SEQ ID NO: 625081 - DNA, 15 bp, Homo sapiens
aatgagtcctgcctg

SEQ ID NO: 625082 - DNA, 15 bp, Homo sapiens
atgagtcctgcctgc

SEQ ID NO: 625083 - DNA, 15 bp, Homo sapiens
tgagtcctgcctgct

SEQ ID NO: 625084 - DNA, 15 bp, Homo sapiens
gagtcctgcctgctt

SEQ ID NO: 625085 - DNA, 15 bp, Homo sapiens
agtcctgcctgcttt

SEQ ID NO: 625086 - DNA, 15 bp, Homo sapiens
gtcctgcctgcttta

SEQ ID NO: 625087 - DNA, 15 bp, Homo sapiens
tcctgcctgctttag

SEQ ID NO: 625088 - DNA, 15 bp, Homo sapiens
cctgcctgctttagg

SEQ ID NO: 625089 - DNA, 15 bp, Homo sapiens
ctgcctgctttaggg

SEQ ID NO: 625090 - DNA, 15 bp, Homo sapiens
tgcctgctttagggc

SEQ ID NO: 625091 - DNA, 15 bp, Homo sapiens
gcctgctttagggcc

SEQ ID NO: 625092 - DNA, 15 bp, Homo sapiens
cctgctttagggcct

SEQ ID NO: 625093 - DNA, 15 bp, Homo sapiens
ctgctttagggccta

SEQ ID NO: 625094 - DNA, 15 bp, Homo sapiens
tgctttagggcctaa

SEQ ID NO: 625095 - DNA, 15 bp, Homo sapiens
gctttagggcctaaa

SEQ ID NO: 625096 - DNA, 15 bp, Homo sapiens
ctttagggcctaaag

SEQ ID NO: 625097 - DNA, 15 bp, Homo sapiens
tttagggcctaaaga

SEQ ID NO: 625098 - DNA, 15 bp, Homo sapiens
ttagggcctaaagag

SEQ ID NO: 625099 - DNA, 15 bp, Homo sapiens
tagggcctaaagagg

SEQ ID NO: 625100 - DNA, 15 bp, Homo sapiens
agggcctaaagagga

SEQ ID NO: 625101 - DNA, 15 bp, Homo sapiens
gggcctaaagaggac

SEQ ID NO: 625102 - DNA, 15 bp, Homo sapiens
ggcctaaagaggacc

SEQ ID NO: 625103 - DNA, 15 bp, Homo sapiens
gcctaaagaggacca

SEQ ID NO: 625104 - DNA, 15 bp, Homo sapiens
cctaaagaggaccag

SEQ ID NO: 625105 - DNA, 15 bp, Homo sapiens
ctaaagaggaccaga

SEQ ID NO: 625106 - DNA, 15 bp, Homo sapiens
taaagaggaccagag

SEQ ID NO: 625107 - DNA, 15 bp, Homo sapiens
aaagaggaccagaga

SEQ ID NO: 625108 - DNA, 15 bp, Homo sapiens
aagaggaccagagaa

SEQ ID NO: 625109 - DNA, 15 bp, Homo sapiens
agaggaccagagaag

SEQ ID NO: 625110 - DNA, 15 bp, Homo sapiens
gaggaccagagaagt

SEQ ID NO: 625111 - DNA, 15 bp, Homo sapiens
aggaccagagaagta

SEQ ID NO: 625112 - DNA, 15 bp, Homo sapiens
ggaccagagaagtac

SEQ ID NO: 625113 - DNA, 15 bp, Homo sapiens
gaccagagaagtaca

SEQ ID NO: 625114 - DNA, 15 bp, Homo sapiens
accagagaagtacac

SEQ ID NO: 625115 - DNA, 15 bp, Homo sapiens
ccagagaagtacacc

SEQ ID NO: 625116 - DNA, 15 bp, Homo sapiens
cagagaagtacacca

SEQ ID NO: 625117 - DNA, 15 bp, Homo sapiens
agagaagtacaccat

SEQ ID NO: 625118 - DNA, 15 bp, Homo sapiens
gagaagtacaccata

SEQ ID NO: 625119 - DNA, 15 bp, Homo sapiens
agaagtacaccatag

SEQ ID NO: 625120 - DNA, 15 bp, Homo sapiens
gaagtacaccatagt

SEQ ID NO: 625121 - DNA, 15 bp, Homo sapiens
aagtacaccatagtc

SEQ ID NO: 625122 - DNA, 15 bp, Homo sapiens
agtacaccatagtcc

SEQ ID NO: 625123 - DNA, 15 bp, Homo sapiens
gtacaccatagtccc

SEQ ID NO: 625124 - DNA, 15 bp, Homo sapiens
tacaccatagtccct

SEQ ID NO: 625125 - DNA, 15 bp, Homo sapiens
acaccatagtccctg

SEQ ID NO: 625126 - DNA, 15 bp, Homo sapiens
caccatagtccctgg

SEQ ID NO: 625127 - DNA, 15 bp, Homo sapiens
accatagtccctggc

SEQ ID NO: 625128 - DNA, 15 bp, Homo sapiens
ccatagtccctggct

SEQ ID NO: 625129 - DNA, 15 bp, Homo sapiens
catagtccctggctt

SEQ ID NO: 625130 - DNA, 15 bp, Homo sapiens
atagtccctggcttc

SEQ ID NO: 625131 - DNA, 15 bp, Homo sapiens
tagtccctggcttcc

SEQ ID NO: 625132 - DNA, 15 bp, Homo sapiens
agtccctggcttcca

SEQ ID NO: 625133 - DNA, 15 bp, Homo sapiens
gtccctggcttccag

SEQ ID NO: 625134 - DNA, 15 bp, Homo sapiens
tccctggcttccaga

SEQ ID NO: 625135 - DNA, 15 bp, Homo sapiens
ccctggcttccagaa

SEQ ID NO: 625136 - DNA, 15 bp, Homo sapiens
cctggcttccagaag

SEQ ID NO: 625137 - DNA, 15 bp, Homo sapiens
ctggcttccagaagg

SEQ ID NO: 625138 - DNA, 15 bp, Homo sapiens
tggcttccagaaggt

SEQ ID NO: 625139 - DNA, 15 bp, Homo sapiens
ggcttccagaaggtc

SEQ ID NO: 625140 - DNA, 15 bp, Homo sapiens
gcttccagaaggtca

SEQ ID NO: 625141 - DNA, 15 bp, Homo sapiens
cttccagaaggtcag

SEQ ID NO: 625142 - DNA, 15 bp, Homo sapiens
ttccagaaggtcagg

SEQ ID NO: 625143 - DNA, 15 bp, Homo sapiens
tccagaaggtcaggg

SEQ ID NO: 625144 - DNA, 15 bp, Homo sapiens
ccagaaggtcaggga

SEQ ID NO: 625145 - DNA, 15 bp, Homo sapiens
cagaaggtcagggag

SEQ ID NO: 625146 - DNA, 15 bp, Homo sapiens
agaaggtcagggagg

SEQ ID NO: 625147 - DNA, 15 bp, Homo sapiens
gaaggtcagggaggg

SEQ ID NO: 625148 - DNA, 15 bp, Homo sapiens
aaggtcagggagggt

SEQ ID NO: 625149 - DNA, 15 bp, Homo sapiens
aggtcagggagggtt

SEQ ID NO: 625150 - DNA, 15 bp, Homo sapiens
ggtcagggagggttt

SEQ ID NO: 625151 - DNA, 15 bp, Homo sapiens
gtcagggagggtttc

SEQ ID NO: 625152 - DNA, 15 bp, Homo sapiens
tcagggagggtttca

SEQ ID NO: 625153 - DNA, 15 bp, Homo sapiens
cagggagggtttcaa

SEQ ID NO: 625154 - DNA, 15 bp, Homo sapiens
agggagggtttcaaa

SEQ ID NO: 625155 - DNA, 15 bp, Homo sapiens
gggagggtttcaaag

SEQ ID NO: 625156 - DNA, 15 bp, Homo sapiens
ggagggtttcaaaga

SEQ ID NO: 625157 - DNA, 15 bp, Homo sapiens
gagggtttcaaagaa

SEQ ID NO: 625158 - DNA, 15 bp, Homo sapiens
agggtttcaaagaag

SEQ ID NO: 625159 - DNA, 15 bp, Homo sapiens
gggtttcaaagaaga

SEQ ID NO: 625160 - DNA, 15 bp, Homo sapiens
ggtttcaaagaagag

SEQ ID NO: 625161 - DNA, 15 bp, Homo sapiens
gtttcaaagaagagg

SEQ ID NO: 625162 - DNA, 15 bp, Homo sapiens
tttcaaagaagaggc

SEQ ID NO: 625163 - DNA, 15 bp, Homo sapiens
ttcaaagaagaggct

SEQ ID NO: 625164 - DNA, 15 bp, Homo sapiens
tcaaagaagaggctg

SEQ ID NO: 625165 - DNA, 15 bp, Homo sapiens
caaagaagaggctgt

SEQ ID NO: 625166 - DNA, 15 bp, Homo sapiens
aaagaagaggctgtg

SEQ ID NO: 625167 - DNA, 15 bp, Homo sapiens
aagaagaggctgtgt

SEQ ID NO: 625168 - DNA, 15 bp, Homo sapiens
agaagaggctgtgtc

SEQ ID NO: 625169 - DNA, 15 bp, Homo sapiens
gaagaggctgtgtct

SEQ ID NO: 625170 - DNA, 15 bp, Homo sapiens
aagaggctgtgtctt

SEQ ID NO: 625171 - DNA, 15 bp, Homo sapiens
agaggctgtgtcttt

SEQ ID NO: 625172 - DNA, 15 bp, Homo sapiens
gaggctgtgtcttta

SEQ ID NO: 625173 - DNA, 15 bp, Homo sapiens
aggctgtgtctttaa

SEQ ID NO: 625174 - DNA, 15 bp, Homo sapiens
ggctgtgtctttaag

SEQ ID NO: 625175 - DNA, 15 bp, Homo sapiens
gctgtgtctttaaga

SEQ ID NO: 625176 - DNA, 15 bp, Homo sapiens
ctgtgtctttaagaa

SEQ ID NO: 625177 - DNA, 15 bp, Homo sapiens
tgtgtctttaagaat

SEQ ID NO: 625178 - DNA, 15 bp, Homo sapiens
gtgtctttaagaatg

SEQ ID NO: 625179 - DNA, 15 bp, Homo sapiens
tgtctttaagaatgg

SEQ ID NO: 625180 - DNA, 15 bp, Homo sapiens
gtctttaagaatggg

SEQ ID NO: 625181 - DNA, 15 bp, Homo sapiens
tctttaagaatgggg

SEQ ID NO: 625182 - DNA, 15 bp, Homo sapiens
ctttaagaatgggga

SEQ ID NO: 625183 - DNA, 15 bp, Homo sapiens
tttaagaatggggaa

SEQ ID NO: 625184 - DNA, 15 bp, Homo sapiens
ttaagaatggggaag

SEQ ID NO: 625185 - DNA, 15 bp, Homo sapiens
taagaatggggaaga

SEQ ID NO: 625186 - DNA, 15 bp, Homo sapiens
aagaatggggaagat

SEQ ID NO: 625187 - DNA, 15 bp, Homo sapiens
agaatggggaagatt

SEQ ID NO: 625188 - DNA, 15 bp, Homo sapiens
gaatggggaagattc

SEQ ID NO: 625189 - DNA, 15 bp, Homo sapiens
aatggggaagattcc

SEQ ID NO: 625190 - DNA, 15 bp, Homo sapiens
atggggaagattcca

SEQ ID NO: 625191 - DNA, 15 bp, Homo sapiens
tggggaagattccat

SEQ ID NO: 625192 - DNA, 15 bp, Homo sapiens
ggggaagattccatt

SEQ ID NO: 625193 - DNA, 15 bp, Homo sapiens
gggaagattccattt

SEQ ID NO: 625194 - DNA, 15 bp, Homo sapiens
ggaagattccatttg

SEQ ID NO: 625195 - DNA, 15 bp, Homo sapiens
gaagattccatttgg

SEQ ID NO: 625196 - DNA, 15 bp, Homo sapiens
aagattccatttggt

SEQ ID NO: 625197 - DNA, 15 bp, Homo sapiens
agattccatttggtg

SEQ ID NO: 625198 - DNA, 15 bp, Homo sapiens
gattccatttggtgg

SEQ ID NO: 625199 - DNA, 15 bp, Homo sapiens
attccatttggtggg

SEQ ID NO: 625200 - DNA, 15 bp, Homo sapiens
ttccatttggtgggg

SEQ ID NO: 625201 - DNA, 15 bp, Homo sapiens
tccatttggtggggc

SEQ ID NO: 625202 - DNA, 15 bp, Homo sapiens
ccatttggtggggca

SEQ ID NO: 625203 - DNA, 15 bp, Homo sapiens
catttggtggggcag

SEQ ID NO: 625204 - DNA, 15 bp, Homo sapiens
atttggtggggcagg

SEQ ID NO: 625205 - DNA, 15 bp, Homo sapiens
tttggtggggcagga

SEQ ID NO: 625206 - DNA, 15 bp, Homo sapiens
ttggtggggcaggag

SEQ ID NO: 625207 - DNA, 15 bp, Homo sapiens
tggtggggcaggagg

SEQ ID NO: 625208 - DNA, 15 bp, Homo sapiens
ggtggggcaggagga

SEQ ID NO: 625209 - DNA, 15 bp, Homo sapiens
gtggggcaggaggag

SEQ ID NO: 625210 - DNA, 15 bp, Homo sapiens
tggggcaggaggagg

SEQ ID NO: 625211 - DNA, 15 bp, Homo sapiens
ggggcaggaggagga

SEQ ID NO: 625212 - DNA, 15 bp, Homo sapiens
gggcaggaggaggag

SEQ ID NO: 625213 - DNA, 15 bp, Homo sapiens
ggcaggaggaggaga

SEQ ID NO: 625214 - DNA, 15 bp, Homo sapiens
gcaggaggaggagaa

SEQ ID NO: 625215 - DNA, 15 bp, Homo sapiens
caggaggaggagaac

SEQ ID NO: 625216 - DNA, 15 bp, Homo sapiens
aggaggaggagaaca

SEQ ID NO: 625217 - DNA, 15 bp, Homo sapiens
ggaggaggagaacat

SEQ ID NO: 625218 - DNA, 15 bp, Homo sapiens
gaggaggagaacatt

SEQ ID NO: 625219 - DNA, 15 bp, Homo sapiens
aggaggagaacattg

SEQ ID NO: 625220 - DNA, 15 bp, Homo sapiens
ggaggagaacattga

SEQ ID NO: 625221 - DNA, 15 bp, Homo sapiens
gaggagaacattgag

SEQ ID NO: 625222 - DNA, 15 bp, Homo sapiens
aggagaacattgagg

SEQ ID NO: 625223 - DNA, 15 bp, Homo sapiens
ggagaacattgaggg

SEQ ID NO: 625224 - DNA, 15 bp, Homo sapiens
gagaacattgaggga

SEQ ID NO: 625225 - DNA, 15 bp, Homo sapiens
agaacattgagggac

SEQ ID NO: 625226 - DNA, 15 bp, Homo sapiens
gaacattgagggact

SEQ ID NO: 625227 - DNA, 15 bp, Homo sapiens
aacattgagggactg

SEQ ID NO: 625228 - DNA, 15 bp, Homo sapiens
acattgagggactgg

SEQ ID NO: 625229 - DNA, 15 bp, Homo sapiens
cattgagggactgga

SEQ ID NO: 625230 - DNA, 15 bp, Homo sapiens
attgagggactggaa

SEQ ID NO: 625231 - DNA, 15 bp, Homo sapiens
ttgagggactggaaa

SEQ ID NO: 625232 - DNA, 15 bp, Homo sapiens
tgagggactggaaac

SEQ ID NO: 625233 - DNA, 15 bp, Homo sapiens
gagggactggaaaca

SEQ ID NO: 625234 - DNA, 15 bp, Homo sapiens
agggactggaaacac

SEQ ID NO: 625235 - DNA, 15 bp, Homo sapiens
gggactggaaacaca

SEQ ID NO: 625236 - DNA, 15 bp, Homo sapiens
ggactggaaacacat

SEQ ID NO: 625237 - DNA, 15 bp, Homo sapiens
gactggaaacacatg

SEQ ID NO: 625238 - DNA, 15 bp, Homo sapiens
actggaaacacatgc

SEQ ID NO: 625239 - DNA, 15 bp, Homo sapiens
ctggaaacacatgcg

SEQ ID NO: 625240 - DNA, 15 bp, Homo sapiens
tggaaacacatgcgg

SEQ ID NO: 625241 - DNA, 15 bp, Homo sapiens
ggaaacacatgcgga

SEQ ID NO: 625242 - DNA, 15 bp, Homo sapiens
gaaacacatgcggag

SEQ ID NO: 625243 - DNA, 15 bp, Homo sapiens
aaacacatgcggagg

SEQ ID NO: 625244 - DNA, 15 bp, Homo sapiens
aacacatgcggaggc

SEQ ID NO: 625245 - DNA, 15 bp, Homo sapiens
acacatgcggaggct

SEQ ID NO: 625246 - DNA, 15 bp, Homo sapiens
cacatgcggaggctg

SEQ ID NO: 625247 - DNA, 15 bp, Homo sapiens
acatgcggaggctgg

SEQ ID NO: 625248 - DNA, 15 bp, Homo sapiens
catgcggaggctggg

SEQ ID NO: 625249 - DNA, 15 bp, Homo sapiens
atgcggaggctggga

SEQ ID NO: 625250 - DNA, 15 bp, Homo sapiens
tgcggaggctgggag

SEQ ID NO: 625251 - DNA, 15 bp, Homo sapiens
gcggaggctgggaga

SEQ ID NO: 625252 - DNA, 15 bp, Homo sapiens
cggaggctgggagac

SEQ ID NO: 625253 - DNA, 15 bp, Homo sapiens
ggaggctgggagacg

SEQ ID NO: 625254 - DNA, 15 bp, Homo sapiens
gaggctgggagacgg

SEQ ID NO: 625255 - DNA, 15 bp, Homo sapiens
aggctgggagacggg

SEQ ID NO: 625256 - DNA, 15 bp, Homo sapiens
ggctgggagacggga

SEQ ID NO: 625257 - DNA, 15 bp, Homo sapiens
gctgggagacgggaa

SEQ ID NO: 625258 - DNA, 15 bp, Homo sapiens
ctgggagacgggaat

SEQ ID NO: 625259 - DNA, 15 bp, Homo sapiens
tgggagacgggaatg

SEQ ID NO: 625260 - DNA, 15 bp, Homo sapiens
gggagacgggaatga

SEQ ID NO: 625261 - DNA, 15 bp, Homo sapiens
ggagacgggaatgac

SEQ ID NO: 625262 - DNA, 15 bp, Homo sapiens
gagacgggaatgacc

SEQ ID NO: 625263 - DNA, 15 bp, Homo sapiens
agacgggaatgacca

SEQ ID NO: 625264 - DNA, 15 bp, Homo sapiens
gacgggaatgaccaa

SEQ ID NO: 625265 - DNA, 15 bp, Homo sapiens
acgggaatgaccaat

SEQ ID NO: 625266 - DNA, 15 bp, Homo sapiens
cgggaatgaccaata

SEQ ID NO: 625267 - DNA, 15 bp, Homo sapiens
gggaatgaccaatag

SEQ ID NO: 625268 - DNA, 15 bp, Homo sapiens
ggaatgaccaatagg

SEQ ID NO: 625269 - DNA, 15 bp, Homo sapiens
gaatgaccaatagga

SEQ ID NO: 625270 - DNA, 15 bp, Homo sapiens
aatgaccaataggac

SEQ ID NO: 625271 - DNA, 15 bp, Homo sapiens
atgaccaataggact

SEQ ID NO: 625272 - DNA, 15 bp, Homo sapiens
tgaccaataggactg

SEQ ID NO: 625273 - DNA, 15 bp, Homo sapiens
gaccaataggactgg

SEQ ID NO: 625274 - DNA, 15 bp, Homo sapiens
accaataggactggg

SEQ ID NO: 625275 - DNA, 15 bp, Homo sapiens
ccaataggactggga

SEQ ID NO: 625276 - DNA, 15 bp, Homo sapiens
caataggactgggaa

SEQ ID NO: 625277 - DNA, 15 bp, Homo sapiens
aataggactgggaac

SEQ ID NO: 625278 - DNA, 15 bp, Homo sapiens
ataggactgggaacc

SEQ ID NO: 625279 - DNA, 15 bp, Homo sapiens
taggactgggaacca

SEQ ID NO: 625280 - DNA, 15 bp, Homo sapiens
aggactgggaaccag

SEQ ID NO: 625281 - DNA, 15 bp, Homo sapiens
ggactgggaaccagg

SEQ ID NO: 625282 - DNA, 15 bp, Homo sapiens
gactgggaaccaggg

SEQ ID NO: 625283 - DNA, 15 bp, Homo sapiens
actgggaaccagggg

SEQ ID NO: 625284 - DNA, 15 bp, Homo sapiens
ctgggaaccaggggg

SEQ ID NO: 625285 - DNA, 15 bp, Homo sapiens
tgggaaccaggggga

SEQ ID NO: 625286 - DNA, 15 bp, Homo sapiens
gggaaccagggggag

SEQ ID NO: 625287 - DNA, 15 bp, Homo sapiens
ggaaccagggggaga

SEQ ID NO: 625288 - DNA, 15 bp, Homo sapiens
gaaccagggggagat

SEQ ID NO: 625289 - DNA, 15 bp, Homo sapiens
aaccagggggagatg

SEQ ID NO: 625290 - DNA, 15 bp, Homo sapiens
accagggggagatgc

SEQ ID NO: 625291 - DNA, 15 bp, Homo sapiens
ccagggggagatgcc

SEQ ID NO: 625292 - DNA, 15 bp, Homo sapiens
cagggggagatgcca

SEQ ID NO: 625293 - DNA, 15 bp, Homo sapiens
agggggagatgccaa

SEQ ID NO: 625294 - DNA, 15 bp, Homo sapiens
gggggagatgccaat

SEQ ID NO: 625295 - DNA, 15 bp, Homo sapiens
ggggagatgccaatt

SEQ ID NO: 625296 - DNA, 15 bp, Homo sapiens
gggagatgccaattg

SEQ ID NO: 625297 - DNA, 15 bp, Homo sapiens
ggagatgccaattgc

SEQ ID NO: 625298 - DNA, 15 bp, Homo sapiens
gagatgccaattgct

SEQ ID NO: 625299 - DNA, 15 bp, Homo sapiens
agatgccaattgctg

SEQ ID NO: 625300 - DNA, 15 bp, Homo sapiens
gatgccaattgctga

SEQ ID NO: 625301 - DNA, 15 bp, Homo sapiens
atgccaattgctgac

SEQ ID NO: 625302 - DNA, 15 bp, Homo sapiens
tgccaattgctgaca

SEQ ID NO: 625303 - DNA, 15 bp, Homo sapiens
gccaattgctgacag

SEQ ID NO: 625304 - DNA, 15 bp, Homo sapiens
ccaattgctgacaga

SEQ ID NO: 625305 - DNA, 15 bp, Homo sapiens
caattgctgacagag

SEQ ID NO: 625306 - DNA, 15 bp, Homo sapiens
aattgctgacagagg

SEQ ID NO: 625307 - DNA, 15 bp, Homo sapiens
attgctgacagagga

SEQ ID NO: 625308 - DNA, 15 bp, Homo sapiens
ttgctgacagaggag

SEQ ID NO: 625309 - DNA, 15 bp, Homo sapiens
tgctgacagaggagt

SEQ ID NO: 625310 - DNA, 15 bp, Homo sapiens
gctgacagaggagtt

SEQ ID NO: 625311 - DNA, 15 bp, Homo sapiens
ctgacagaggagtta

SEQ ID NO: 625312 - DNA, 15 bp, Homo sapiens
tgacagaggagttag

SEQ ID NO: 625313 - DNA, 15 bp, Homo sapiens
gacagaggagttagt

SEQ ID NO: 625314 - DNA, 15 bp, Homo sapiens
acagaggagttagtg

SEQ ID NO: 625315 - DNA, 15 bp, Homo sapiens
cagaggagttagtgc

SEQ ID NO: 625316 - DNA, 15 bp, Homo sapiens
agaggagttagtgca

SEQ ID NO: 625317 - DNA, 15 bp, Homo sapiens
gaggagttagtgcaa

SEQ ID NO: 625318 - DNA, 15 bp, Homo sapiens
aggagttagtgcaag

SEQ ID NO: 625319 - DNA, 15 bp, Homo sapiens
ggagttagtgcaaga

SEQ ID NO: 625320 - DNA, 15 bp, Homo sapiens
gagttagtgcaagag

SEQ ID NO: 625321 - DNA, 15 bp, Homo sapiens
agttagtgcaagagg

SEQ ID NO: 625322 - DNA, 15 bp, Homo sapiens
gttagtgcaagaggt

SEQ ID NO: 625323 - DNA, 15 bp, Homo sapiens
ttagtgcaagaggta

SEQ ID NO: 625324 - DNA, 15 bp, Homo sapiens
tagtgcaagaggtaa

SEQ ID NO: 625325 - DNA, 15 bp, Homo sapiens
agtgcaagaggtaag

SEQ ID NO: 625326 - DNA, 15 bp, Homo sapiens
gtgcaagaggtaagt

SEQ ID NO: 625327 - DNA, 15 bp, Homo sapiens
tgcaagaggtaagtg

SEQ ID NO: 625328 - DNA, 15 bp, Homo sapiens
gcaagaggtaagtga

SEQ ID NO: 625329 - DNA, 15 bp, Homo sapiens
caagaggtaagtgag

SEQ ID NO: 625330 - DNA, 15 bp, Homo sapiens
aagaggtaagtgaga

SEQ ID NO: 625331 - DNA, 15 bp, Homo sapiens
agaggtaagtgagaa

SEQ ID NO: 625332 - DNA, 15 bp, Homo sapiens
gaggtaagtgagaag

SEQ ID NO: 625333 - DNA, 15 bp, Homo sapiens
aggtaagtgagaagg

SEQ ID NO: 625334 - DNA, 15 bp, Homo sapiens
ggtaagtgagaaggg

SEQ ID NO: 625335 - DNA, 15 bp, Homo sapiens
gtaagtgagaagggt

SEQ ID NO: 625336 - DNA, 15 bp, Homo sapiens
taagtgagaagggta

SEQ ID NO: 625337 - DNA, 15 bp, Homo sapiens
aagtgagaagggtag

SEQ ID NO: 625338 - DNA, 15 bp, Homo sapiens
agtgagaagggtagg

SEQ ID NO: 625339 - DNA, 15 bp, Homo sapiens
gtgagaagggtaggt

SEQ ID NO: 625340 - DNA, 15 bp, Homo sapiens
tgagaagggtaggtg

SEQ ID NO: 625341 - DNA, 15 bp, Homo sapiens
gagaagggtaggtgg

SEQ ID NO: 625342 - DNA, 15 bp, Homo sapiens
agaagggtaggtggg

SEQ ID NO: 625343 - DNA, 15 bp, Homo sapiens
gaagggtaggtgggg

SEQ ID NO: 625344 - DNA, 15 bp, Homo sapiens
aagggtaggtggggc

SEQ ID NO: 625345 - DNA, 15 bp, Homo sapiens
agggtaggtggggct

SEQ ID NO: 625346 - DNA, 15 bp, Homo sapiens
gggtaggtggggctg

SEQ ID NO: 625347 - DNA, 15 bp, Homo sapiens
ggtaggtggggctgg

SEQ ID NO: 625348 - DNA, 15 bp, Homo sapiens
gtaggtggggctgga

SEQ ID NO: 625349 - DNA, 15 bp, Homo sapiens
taggtggggctggat

SEQ ID NO: 625350 - DNA, 15 bp, Homo sapiens
aggtggggctggatt

SEQ ID NO: 625351 - DNA, 15 bp, Homo sapiens
ggtggggctggattg

SEQ ID NO: 625352 - DNA, 15 bp, Homo sapiens
gtggggctggattgc

SEQ ID NO: 625353 - DNA, 15 bp, Homo sapiens
tggggctggattgca

SEQ ID NO: 625354 - DNA, 15 bp, Homo sapiens
ggggctggattgcag

SEQ ID NO: 625355 - DNA, 15 bp, Homo sapiens
gggctggattgcagg

SEQ ID NO: 625356 - DNA, 15 bp, Homo sapiens
ggctggattgcaggg

SEQ ID NO: 625357 - DNA, 15 bp, Homo sapiens
gctggattgcagggc

SEQ ID NO: 625358 - DNA, 15 bp, Homo sapiens
ctggattgcagggct

SEQ ID NO: 625359 - DNA, 15 bp, Homo sapiens
tggattgcagggctg

SEQ ID NO: 625360 - DNA, 15 bp, Homo sapiens
ggattgcagggctgt

SEQ ID NO: 625361 - DNA, 15 bp, Homo sapiens
gattgcagggctgta

SEQ ID NO: 625362 - DNA, 15 bp, Homo sapiens
attgcagggctgtaa

SEQ ID NO: 625363 - DNA, 15 bp, Homo sapiens
ttgcagggctgtaac

SEQ ID NO: 625364 - DNA, 15 bp, Homo sapiens
tgcagggctgtaact

SEQ ID NO: 625365 - DNA, 15 bp, Homo sapiens
gcagggctgtaacta

SEQ ID NO: 625366 - DNA, 15 bp, Homo sapiens
cagggctgtaactac

SEQ ID NO: 625367 - DNA, 15 bp, Homo sapiens
agggctgtaactaca

SEQ ID NO: 625368 - DNA, 15 bp, Homo sapiens
gggctgtaactacag

SEQ ID NO: 625369 - DNA, 15 bp, Homo sapiens
ggctgtaactacagc

SEQ ID NO: 625370 - DNA, 15 bp, Homo sapiens
gctgtaactacagct

SEQ ID NO: 625371 - DNA, 15 bp, Homo sapiens
ctgtaactacagctg

SEQ ID NO: 625372 - DNA, 15 bp, Homo sapiens
tgtaactacagctgc

SEQ ID NO: 625373 - DNA, 15 bp, Homo sapiens
gtaactacagctgca

SEQ ID NO: 625374 - DNA, 15 bp, Homo sapiens
taactacagctgcag

SEQ ID NO: 625375 - DNA, 15 bp, Homo sapiens
aactacagctgcaga

SEQ ID NO: 625376 - DNA, 15 bp, Homo sapiens
actacagctgcagag

SEQ ID NO: 625377 - DNA, 15 bp, Homo sapiens
ctacagctgcagagg

SEQ ID NO: 625378 - DNA, 15 bp, Homo sapiens
tacagctgcagaggg

SEQ ID NO: 625379 - DNA, 15 bp, Homo sapiens
acagctgcagaggga

SEQ ID NO: 625380 - DNA, 15 bp, Homo sapiens
cagctgcagagggag

SEQ ID NO: 625381 - DNA, 15 bp, Homo sapiens
agctgcagagggagg

SEQ ID NO: 625382 - DNA, 15 bp, Homo sapiens
gctgcagagggaggg

SEQ ID NO: 625383 - DNA, 15 bp, Homo sapiens
ctgcagagggagggc

SEQ ID NO: 625384 - DNA, 15 bp, Homo sapiens
tgcagagggagggct

SEQ ID NO: 625385 - DNA, 15 bp, Homo sapiens
gcagagggagggctt

SEQ ID NO: 625386 - DNA, 15 bp, Homo sapiens
cagagggagggcttc

SEQ ID NO: 625387 - DNA, 15 bp, Homo sapiens
agagggagggcttca

SEQ ID NO: 625388 - DNA, 15 bp, Homo sapiens
gagggagggcttcaa

SEQ ID NO: 625389 - DNA, 15 bp, Homo sapiens
agggagggcttcaac

SEQ ID NO: 625390 - DNA, 15 bp, Homo sapiens
gggagggcttcaacc

SEQ ID NO: 625391 - DNA, 15 bp, Homo sapiens
ggagggcttcaacct

SEQ ID NO: 625392 - DNA, 15 bp, Homo sapiens
gagggcttcaaccta

SEQ ID NO: 625393 - DNA, 15 bp, Homo sapiens
agggcttcaacctac

SEQ ID NO: 625394 - DNA, 15 bp, Homo sapiens
gggcttcaacctaca

SEQ ID NO: 625395 - DNA, 15 bp, Homo sapiens
ggcttcaacctacag

SEQ ID NO: 625396 - DNA, 15 bp, Homo sapiens
gcttcaacctacagc

SEQ ID NO: 625397 - DNA, 15 bp, Homo sapiens
cttcaacctacagct

SEQ ID NO: 625398 - DNA, 15 bp, Homo sapiens
ttcaacctacagctg

SEQ ID NO: 625399 - DNA, 15 bp, Homo sapiens
tcaacctacagctga

SEQ ID NO: 625400 - DNA, 15 bp, Homo sapiens
caacctacagctgat

SEQ ID NO: 625401 - DNA, 15 bp, Homo sapiens
aacctacagctgatg

SEQ ID NO: 625402 - DNA, 15 bp, Homo sapiens
acctacagctgatgg

SEQ ID NO: 625403 - DNA, 15 bp, Homo sapiens
cctacagctgatggg

SEQ ID NO: 625404 - DNA, 15 bp, Homo sapiens
ctacagctgatgggg

SEQ ID NO: 625405 - DNA, 15 bp, Homo sapiens
tacagctgatgggga

SEQ ID NO: 625406 - DNA, 15 bp, Homo sapiens
acagctgatggggaa

SEQ ID NO: 625407 - DNA, 15 bp, Homo sapiens
cagctgatggggaac

SEQ ID NO: 625408 - DNA, 15 bp, Homo sapiens
agctgatggggaaca

SEQ ID NO: 625409 - DNA, 15 bp, Homo sapiens
gctgatggggaacaa

SEQ ID NO: 625410 - DNA, 15 bp, Homo sapiens
ctgatggggaacaac

SEQ ID NO: 625411 - DNA, 15 bp, Homo sapiens
tgatggggaacaaca

SEQ ID NO: 625412 - DNA, 15 bp, Homo sapiens
gatggggaacaacag

SEQ ID NO: 625413 - DNA, 15 bp, Homo sapiens
atggggaacaacaga

SEQ ID NO: 625414 - DNA, 15 bp, Homo sapiens
tggggaacaacagaa

SEQ ID NO: 625415 - DNA, 15 bp, Homo sapiens
ggggaacaacagaag

SEQ ID NO: 625416 - DNA, 15 bp, Homo sapiens
gggaacaacagaagg

SEQ ID NO: 625417 - DNA, 15 bp, Homo sapiens
ggaacaacagaaggt

SEQ ID NO: 625418 - DNA, 15 bp, Homo sapiens
gaacaacagaaggtt

SEQ ID NO: 625419 - DNA, 15 bp, Homo sapiens
aacaacagaaggttt

SEQ ID NO: 625420 - DNA, 15 bp, Homo sapiens
acaacagaaggtttt

SEQ ID NO: 625421 - DNA, 15 bp, Homo sapiens
caacagaaggttttg

SEQ ID NO: 625422 - DNA, 15 bp, Homo sapiens
aacagaaggttttga

SEQ ID NO: 625423 - DNA, 15 bp, Homo sapiens
acagaaggttttgag

SEQ ID NO: 625424 - DNA, 15 bp, Homo sapiens
cagaaggttttgagg

SEQ ID NO: 625425 - DNA, 15 bp, Homo sapiens
agaaggttttgaggc

SEQ ID NO: 625426 - DNA, 15 bp, Homo sapiens
gaaggttttgaggca

SEQ ID NO: 625427 - DNA, 15 bp, Homo sapiens
aaggttttgaggcat

SEQ ID NO: 625428 - DNA, 15 bp, Homo sapiens
aggttttgaggcatg

SEQ ID NO: 625429 - DNA, 15 bp, Homo sapiens
ggttttgaggcatga

SEQ ID NO: 625430 - DNA, 15 bp, Homo sapiens
gttttgaggcatgag

SEQ ID NO: 625431 - DNA, 15 bp, Homo sapiens
ttttgaggcatgagg

SEQ ID NO: 625432 - DNA, 15 bp, Homo sapiens
tttgaggcatgaggt

SEQ ID NO: 625433 - DNA, 15 bp, Homo sapiens
ttgaggcatgaggtg

SEQ ID NO: 625434 - DNA, 15 bp, Homo sapiens
tgaggcatgaggtgg

SEQ ID NO: 625435 - DNA, 15 bp, Homo sapiens
gaggcatgaggtggc

SEQ ID NO: 625436 - DNA, 15 bp, Homo sapiens
aggcatgaggtggcc

SEQ ID NO: 625437 - DNA, 15 bp, Homo sapiens
ggcatgaggtggcct

SEQ ID NO: 625438 - DNA, 15 bp, Homo sapiens
gcatgaggtggcctg

SEQ ID NO: 625439 - DNA, 15 bp, Homo sapiens
catgaggtggcctga

SEQ ID NO: 625440 - DNA, 15 bp, Homo sapiens
atgaggtggcctgat

SEQ ID NO: 625441 - DNA, 15 bp, Homo sapiens
tgaggtggcctgatg

SEQ ID NO: 625442 - DNA, 15 bp, Homo sapiens
gaggtggcctgatga

SEQ ID NO: 625443 - DNA, 15 bp, Homo sapiens
aggtggcctgatgac

SEQ ID NO: 625444 - DNA, 15 bp, Homo sapiens
ggtggcctgatgaca

SEQ ID NO: 625445 - DNA, 15 bp, Homo sapiens
gtggcctgatgacaa

SEQ ID NO: 625446 - DNA, 15 bp, Homo sapiens
tggcctgatgacaac

SEQ ID NO: 625447 - DNA, 15 bp, Homo sapiens
ggcctgatgacaact

SEQ ID NO: 625448 - DNA, 15 bp, Homo sapiens
gcctgatgacaactc

SEQ ID NO: 625449 - DNA, 15 bp, Homo sapiens
cctgatgacaactct

SEQ ID NO: 625450 - DNA, 15 bp, Homo sapiens
ctgatgacaactctg

SEQ ID NO: 625451 - DNA, 15 bp, Homo sapiens
tgatgacaactctgt

SEQ ID NO: 625452 - DNA, 15 bp, Homo sapiens
gatgacaactctgtt

SEQ ID NO: 625453 - DNA, 15 bp, Homo sapiens
atgacaactctgttt

SEQ ID NO: 625454 - DNA, 15 bp, Homo sapiens
tgacaactctgtttt

SEQ ID NO: 625455 - DNA, 15 bp, Homo sapiens
gacaactctgttttg

SEQ ID NO: 625456 - DNA, 15 bp, Homo sapiens
acaactctgttttgg

SEQ ID NO: 625457 - DNA, 15 bp, Homo sapiens
caactctgttttgga

SEQ ID NO: 625458 - DNA, 15 bp, Homo sapiens
aactctgttttggaa

SEQ ID NO: 625459 - DNA, 15 bp, Homo sapiens
actctgttttggaaa

SEQ ID NO: 625460 - DNA, 15 bp, Homo sapiens
ctctgttttggaaag

SEQ ID NO: 625461 - DNA, 15 bp, Homo sapiens
tctgttttggaaagg

SEQ ID NO: 625462 - DNA, 15 bp, Homo sapiens
ctgttttggaaaggt

SEQ ID NO: 625463 - DNA, 15 bp, Homo sapiens
tgttttggaaaggtg

SEQ ID NO: 625464 - DNA, 15 bp, Homo sapiens
gttttggaaaggtgg

SEQ ID NO: 625465 - DNA, 15 bp, Homo sapiens
ttttggaaaggtgga

SEQ ID NO: 625466 - DNA, 15 bp, Homo sapiens
tttggaaaggtggag

SEQ ID NO: 625467 - DNA, 15 bp, Homo sapiens
ttggaaaggtggagt

SEQ ID NO: 625468 - DNA, 15 bp, Homo sapiens
tggaaaggtggagtt

SEQ ID NO: 625469 - DNA, 15 bp, Homo sapiens
ggaaaggtggagttg

SEQ ID NO: 625470 - DNA, 15 bp, Homo sapiens
gaaaggtggagttgg

SEQ ID NO: 625471 - DNA, 15 bp, Homo sapiens
aaaggtggagttggc

SEQ ID NO: 625472 - DNA, 15 bp, Homo sapiens
aaggtggagttggca

SEQ ID NO: 625473 - DNA, 15 bp, Homo sapiens
aggtggagttggcag

SEQ ID NO: 625474 - DNA, 15 bp, Homo sapiens
ggtggagttggcagg

SEQ ID NO: 625475 - DNA, 15 bp, Homo sapiens
gtggagttggcaggg

SEQ ID NO: 625476 - DNA, 15 bp, Homo sapiens
tggagttggcagggc

SEQ ID NO: 625477 - DNA, 15 bp, Homo sapiens
ggagttggcagggca

SEQ ID NO: 625478 - DNA, 15 bp, Homo sapiens
gagttggcagggcag

SEQ ID NO: 625479 - DNA, 15 bp, Homo sapiens
agttggcagggcaga

SEQ ID NO: 625480 - DNA, 15 bp, Homo sapiens
gttggcagggcagac

SEQ ID NO: 625481 - DNA, 15 bp, Homo sapiens
ttggcagggcagact

SEQ ID NO: 625482 - DNA, 15 bp, Homo sapiens
tggcagggcagactg

SEQ ID NO: 625483 - DNA, 15 bp, Homo sapiens
ggcagggcagactgg

SEQ ID NO: 625484 - DNA, 15 bp, Homo sapiens
gcagggcagactgga

SEQ ID NO: 625485 - DNA, 15 bp, Homo sapiens
cagggcagactggag

SEQ ID NO: 625486 - DNA, 15 bp, Homo sapiens
agggcagactggagg

SEQ ID NO: 625487 - DNA, 15 bp, Homo sapiens
gggcagactggagga

SEQ ID NO: 625488 - DNA, 15 bp, Homo sapiens
ggcagactggaggaa

SEQ ID NO: 625489 - DNA, 15 bp, Homo sapiens
gcagactggaggaag

SEQ ID NO: 625490 - DNA, 15 bp, Homo sapiens
cagactggaggaagt

SEQ ID NO: 625491 - DNA, 15 bp, Homo sapiens
agactggaggaagtg

SEQ ID NO: 625492 - DNA, 15 bp, Homo sapiens
gactggaggaagtgg

SEQ ID NO: 625493 - DNA, 15 bp, Homo sapiens
actggaggaagtggg

SEQ ID NO: 625494 - DNA, 15 bp, Homo sapiens
ctggaggaagtggga

SEQ ID NO: 625495 - DNA, 15 bp, Homo sapiens
tggaggaagtgggag

SEQ ID NO: 625496 - DNA, 15 bp, Homo sapiens
ggaggaagtgggagg

SEQ ID NO: 625497 - DNA, 15 bp, Homo sapiens
gaggaagtgggaggc

SEQ ID NO: 625498 - DNA, 15 bp, Homo sapiens
aggaagtgggaggct

SEQ ID NO: 625499 - DNA, 15 bp, Homo sapiens
ggaagtgggaggctc

SEQ ID NO: 625500 - DNA, 15 bp, Homo sapiens
gaagtgggaggctcg

SEQ ID NO: 625501 - DNA, 15 bp, Homo sapiens
aagtgggaggctcgg

SEQ ID NO: 625502 - DNA, 15 bp, Homo sapiens
agtgggaggctcgga

SEQ ID NO: 625503 - DNA, 15 bp, Homo sapiens
gtgggaggctcggag

SEQ ID NO: 625504 - DNA, 15 bp, Homo sapiens
tgggaggctcggagg

SEQ ID NO: 625505 - DNA, 15 bp, Homo sapiens
gggaggctcggaggt

SEQ ID NO: 625506 - DNA, 15 bp, Homo sapiens
ggaggctcggaggtt

SEQ ID NO: 625507 - DNA, 15 bp, Homo sapiens
gaggctcggaggtta

SEQ ID NO: 625508 - DNA, 15 bp, Homo sapiens
aggctcggaggttag

SEQ ID NO: 625509 - DNA, 15 bp, Homo sapiens
ggctcggaggttagt

SEQ ID NO: 625510 - DNA, 15 bp, Homo sapiens
gctcggaggttagta

SEQ ID NO: 625511 - DNA, 15 bp, Homo sapiens
ctcggaggttagtaa

SEQ ID NO: 625512 - DNA, 15 bp, Homo sapiens
tcggaggttagtaac

SEQ ID NO: 625513 - DNA, 15 bp, Homo sapiens
cggaggttagtaact

SEQ ID NO: 625514 - DNA, 15 bp, Homo sapiens
ggaggttagtaacta

SEQ ID NO: 625515 - DNA, 15 bp, Homo sapiens
gaggttagtaactac

SEQ ID NO: 625516 - DNA, 15 bp, Homo sapiens
aggttagtaactacc

SEQ ID NO: 625517 - DNA, 15 bp, Homo sapiens
ggttagtaactaccc

SEQ ID NO: 625518 - DNA, 15 bp, Homo sapiens
gttagtaactacccc

SEQ ID NO: 625519 - DNA, 15 bp, Homo sapiens
ttagtaactacccct

SEQ ID NO: 625520 - DNA, 15 bp, Homo sapiens
tagtaactacccctt

SEQ ID NO: 625521 - DNA, 15 bp, Homo sapiens
agtaactacccctta

SEQ ID NO: 625522 - DNA, 15 bp, Homo sapiens
gtaactaccccttac

SEQ ID NO: 625523 - DNA, 15 bp, Homo sapiens
taactaccccttact

SEQ ID NO: 625524 - DNA, 15 bp, Homo sapiens
aactaccccttactg

SEQ ID NO: 625525 - DNA, 15 bp, Homo sapiens
actaccccttactga

SEQ ID NO: 625526 - DNA, 15 bp, Homo sapiens
ctaccccttactgag

SEQ ID NO: 625527 - DNA, 15 bp, Homo sapiens
taccccttactgagt

SEQ ID NO: 625528 - DNA, 15 bp, Homo sapiens
accccttactgagtg

SEQ ID NO: 625529 - DNA, 15 bp, Homo sapiens
ccccttactgagtgc

SEQ ID NO: 625530 - DNA, 15 bp, Homo sapiens
cccttactgagtgct

SEQ ID NO: 625531 - DNA, 15 bp, Homo sapiens
ccttactgagtgctt

SEQ ID NO: 625532 - DNA, 15 bp, Homo sapiens
cttactgagtgcttg

SEQ ID NO: 625533 - DNA, 15 bp, Homo sapiens
ttactgagtgcttgc

SEQ ID NO: 625534 - DNA, 15 bp, Homo sapiens
tactgagtgcttgct

SEQ ID NO: 625535 - DNA, 15 bp, Homo sapiens
actgagtgcttgctg

SEQ ID NO: 625536 - DNA, 15 bp, Homo sapiens
ctgagtgcttgctgt

SEQ ID NO: 625537 - DNA, 15 bp, Homo sapiens
tgagtgcttgctgta

SEQ ID NO: 625538 - DNA, 15 bp, Homo sapiens
gagtgcttgctgtag

SEQ ID NO: 625539 - DNA, 15 bp, Homo sapiens
agtgcttgctgtaga

SEQ ID NO: 625540 - DNA, 15 bp, Homo sapiens
gtgcttgctgtagag

SEQ ID NO: 625541 - DNA, 15 bp, Homo sapiens
tgcttgctgtagagg

SEQ ID NO: 625542 - DNA, 15 bp, Homo sapiens
gcttgctgtagagga

SEQ ID NO: 625543 - DNA, 15 bp, Homo sapiens
cttgctgtagaggaa

SEQ ID NO: 625544 - DNA, 15 bp, Homo sapiens
ttgctgtagaggaag

SEQ ID NO: 625545 - DNA, 15 bp, Homo sapiens
tgctgtagaggaagc

SEQ ID NO: 625546 - DNA, 15 bp, Homo sapiens
gctgtagaggaagca

SEQ ID NO: 625547 - DNA, 15 bp, Homo sapiens
ctgtagaggaagcat

SEQ ID NO: 625548 - DNA, 15 bp, Homo sapiens
tgtagaggaagcatt

SEQ ID NO: 625549 - DNA, 15 bp, Homo sapiens
gtagaggaagcattt

SEQ ID NO: 625550 - DNA, 15 bp, Homo sapiens
tagaggaagcatttt

SEQ ID NO: 625551 - DNA, 15 bp, Homo sapiens
agaggaagcatttta

SEQ ID NO: 625552 - DNA, 15 bp, Homo sapiens
gaggaagcattttag

SEQ ID NO: 625553 - DNA, 15 bp, Homo sapiens
aggaagcattttagt

SEQ ID NO: 625554 - DNA, 15 bp, Homo sapiens
ggaagcattttagtc

SEQ ID NO: 625555 - DNA, 15 bp, Homo sapiens
gaagcattttagtcc

SEQ ID NO: 625556 - DNA, 15 bp, Homo sapiens
aagcattttagtcct

SEQ ID NO: 625557 - DNA, 15 bp, Homo sapiens
agcattttagtcctg

SEQ ID NO: 625558 - DNA, 15 bp, Homo sapiens
gcattttagtcctga

SEQ ID NO: 625559 - DNA, 15 bp, Homo sapiens
cattttagtcctgac

SEQ ID NO: 625560 - DNA, 15 bp, Homo sapiens
attttagtcctgacg

SEQ ID NO: 625561 - DNA, 15 bp, Homo sapiens
ttttagtcctgacgg

SEQ ID NO: 625562 - DNA, 15 bp, Homo sapiens
tttagtcctgacggt

SEQ ID NO: 625563 - DNA, 15 bp, Homo sapiens
ttagtcctgacggtg

SEQ ID NO: 625564 - DNA, 15 bp, Homo sapiens
tagtcctgacggtga

SEQ ID NO: 625565 - DNA, 15 bp, Homo sapiens
agtcctgacggtgat

SEQ ID NO: 625566 - DNA, 15 bp, Homo sapiens
gtcctgacggtgatc

SEQ ID NO: 625567 - DNA, 15 bp, Homo sapiens
tcctgacggtgatcc

SEQ ID NO: 625568 - DNA, 15 bp, Homo sapiens
cctgacggtgatccc

SEQ ID NO: 625569 - DNA, 15 bp, Homo sapiens
ctgacggtgatccca

SEQ ID NO: 625570 - DNA, 15 bp, Homo sapiens
tgacggtgatcccag

SEQ ID NO: 625571 - DNA, 15 bp, Homo sapiens
gacggtgatcccagg

SEQ ID NO: 625572 - DNA, 15 bp, Homo sapiens
acggtgatcccaggc

SEQ ID NO: 625573 - DNA, 15 bp, Homo sapiens
cggtgatcccaggcc

SEQ ID NO: 625574 - DNA, 15 bp, Homo sapiens
ggtgatcccaggccc

SEQ ID NO: 625575 - DNA, 15 bp, Homo sapiens
gtgatcccaggccct

SEQ ID NO: 625576 - DNA, 15 bp, Homo sapiens
tgatcccaggccctg

SEQ ID NO: 625577 - DNA, 15 bp, Homo sapiens
gatcccaggccctga

SEQ ID NO: 625578 - DNA, 15 bp, Homo sapiens
atcccaggccctgag

SEQ ID NO: 625579 - DNA, 15 bp, Homo sapiens
tcccaggccctgagt

SEQ ID NO: 625580 - DNA, 15 bp, Homo sapiens
cccaggccctgagtc

SEQ ID NO: 625581 - DNA, 15 bp, Homo sapiens
ccaggccctgagtct

SEQ ID NO: 625582 - DNA, 15 bp, Homo sapiens
caggccctgagtctt

SEQ ID NO: 625583 - DNA, 15 bp, Homo sapiens
aggccctgagtcttt

SEQ ID NO: 625584 - DNA, 15 bp, Homo sapiens
ggccctgagtcttta

SEQ ID NO: 625585 - DNA, 15 bp, Homo sapiens
gccctgagtctttac

SEQ ID NO: 625586 - DNA, 15 bp, Homo sapiens
ccctgagtctttact

SEQ ID NO: 625587 - DNA, 15 bp, Homo sapiens
cctgagtctttactc

SEQ ID NO: 625588 - DNA, 15 bp, Homo sapiens
ctgagtctttactct

SEQ ID NO: 625589 - DNA, 15 bp, Homo sapiens
tgagtctttactctg

SEQ ID NO: 625590 - DNA, 15 bp, Homo sapiens
gagtctttactctgt

SEQ ID NO: 625591 - DNA, 15 bp, Homo sapiens
agtctttactctgtg

SEQ ID NO: 625592 - DNA, 15 bp, Homo sapiens
gtctttactctgtgc

SEQ ID NO: 625593 - DNA, 15 bp, Homo sapiens
tctttactctgtgcc

SEQ ID NO: 625594 - DNA, 15 bp, Homo sapiens
ctttactctgtgcca

SEQ ID NO: 625595 - DNA, 15 bp, Homo sapiens
tttactctgtgccag

SEQ ID NO: 625596 - DNA, 15 bp, Homo sapiens
ttactctgtgccagg

SEQ ID NO: 625597 - DNA, 15 bp, Homo sapiens
tactctgtgccaggc

SEQ ID NO: 625598 - DNA, 15 bp, Homo sapiens
actctgtgccaggca

SEQ ID NO: 625599 - DNA, 15 bp, Homo sapiens
ctctgtgccaggcac

SEQ ID NO: 625600 - DNA, 15 bp, Homo sapiens
tctgtgccaggcact

SEQ ID NO: 625601 - DNA, 15 bp, Homo sapiens
ctgtgccaggcactg

SEQ ID NO: 625602 - DNA, 15 bp, Homo sapiens
tgtgccaggcactgt

SEQ ID NO: 625603 - DNA, 15 bp, Homo sapiens
gtgccaggcactgtg

SEQ ID NO: 625604 - DNA, 15 bp, Homo sapiens
tgccaggcactgtgc

SEQ ID NO: 625605 - DNA, 15 bp, Homo sapiens
gccaggcactgtgct

SEQ ID NO: 625606 - DNA, 15 bp, Homo sapiens
ccaggcactgtgctg

SEQ ID NO: 625607 - DNA, 15 bp, Homo sapiens
caggcactgtgctga

SEQ ID NO: 625608 - DNA, 15 bp, Homo sapiens
aggcactgtgctgag

SEQ ID NO: 625609 - DNA, 15 bp, Homo sapiens
ggcactgtgctgagt

SEQ ID NO: 625610 - DNA, 15 bp, Homo sapiens
gcactgtgctgagtt

SEQ ID NO: 625611 - DNA, 15 bp, Homo sapiens
cactgtgctgagttc

SEQ ID NO: 625612 - DNA, 15 bp, Homo sapiens
actgtgctgagttca

SEQ ID NO: 625613 - DNA, 15 bp, Homo sapiens
ctgtgctgagttcat

SEQ ID NO: 625614 - DNA, 15 bp, Homo sapiens
tgtgctgagttcatc

SEQ ID NO: 625615 - DNA, 15 bp, Homo sapiens
gtgctgagttcatct

SEQ ID NO: 625616 - DNA, 15 bp, Homo sapiens
tgctgagttcatctt

SEQ ID NO: 625617 - DNA, 15 bp, Homo sapiens
gctgagttcatcttc

SEQ ID NO: 625618 - DNA, 15 bp, Homo sapiens
ctgagttcatcttca

SEQ ID NO: 625619 - DNA, 15 bp, Homo sapiens
tgagttcatcttcag

SEQ ID NO: 625620 - DNA, 15 bp, Homo sapiens
gagttcatcttcagc

SEQ ID NO: 625621 - DNA, 15 bp, Homo sapiens
agttcatcttcagca

SEQ ID NO: 625622 - DNA, 15 bp, Homo sapiens
gttcatcttcagcac

SEQ ID NO: 625623 - DNA, 15 bp, Homo sapiens
ttcatcttcagcaca

SEQ ID NO: 625624 - DNA, 15 bp, Homo sapiens
tcatcttcagcacaa

SEQ ID NO: 625625 - DNA, 15 bp, Homo sapiens
catcttcagcacaat

SEQ ID NO: 625626 - DNA, 15 bp, Homo sapiens
atcttcagcacaatc

SEQ ID NO: 625627 - DNA, 15 bp, Homo sapiens
tcttcagcacaatcc

SEQ ID NO: 625628 - DNA, 15 bp, Homo sapiens
cttcagcacaatcct

SEQ ID NO: 625629 - DNA, 15 bp, Homo sapiens
ttcagcacaatccta

SEQ ID NO: 625630 - DNA, 15 bp, Homo sapiens
tcagcacaatcctat

SEQ ID NO: 625631 - DNA, 15 bp, Homo sapiens
cagcacaatcctatg

SEQ ID NO: 625632 - DNA, 15 bp, Homo sapiens
agcacaatcctatga

SEQ ID NO: 625633 - DNA, 15 bp, Homo sapiens
gcacaatcctatgag

SEQ ID NO: 625634 - DNA, 15 bp, Homo sapiens
cacaatcctatgaga

SEQ ID NO: 625635 - DNA, 15 bp, Homo sapiens
acaatcctatgagac

SEQ ID NO: 625636 - DNA, 15 bp, Homo sapiens
caatcctatgagaca

SEQ ID NO: 625637 - DNA, 15 bp, Homo sapiens
aatcctatgagacag

SEQ ID NO: 625638 - DNA, 15 bp, Homo sapiens
atcctatgagacagg

SEQ ID NO: 625639 - DNA, 15 bp, Homo sapiens
tcctatgagacaggt

SEQ ID NO: 625640 - DNA, 15 bp, Homo sapiens
cctatgagacaggta

SEQ ID NO: 625641 - DNA, 15 bp, Homo sapiens
ctatgagacaggtat

SEQ ID NO: 625642 - DNA, 15 bp, Homo sapiens
tatgagacaggtatt

SEQ ID NO: 625643 - DNA, 15 bp, Homo sapiens
atgagacaggtattg

SEQ ID NO: 625644 - DNA, 15 bp, Homo sapiens
tgagacaggtattgt

SEQ ID NO: 625645 - DNA, 15 bp, Homo sapiens
gagacaggtattgtt

SEQ ID NO: 625646 - DNA, 15 bp, Homo sapiens
agacaggtattgtta

SEQ ID NO: 625647 - DNA, 15 bp, Homo sapiens
gacaggtattgttac

SEQ ID NO: 625648 - DNA, 15 bp, Homo sapiens
acaggtattgttacc

SEQ ID NO: 625649 - DNA, 15 bp, Homo sapiens
caggtattgttaccc

SEQ ID NO: 625650 - DNA, 15 bp, Homo sapiens
aggtattgttaccct

SEQ ID NO: 625651 - DNA, 15 bp, Homo sapiens
ggtattgttaccctc

SEQ ID NO: 625652 - DNA, 15 bp, Homo sapiens
gtattgttaccctcc

SEQ ID NO: 625653 - DNA, 15 bp, Homo sapiens
tattgttaccctcct

SEQ ID NO: 625654 - DNA, 15 bp, Homo sapiens
attgttaccctcctc

SEQ ID NO: 625655 - DNA, 15 bp, Homo sapiens
ttgttaccctcctcc

SEQ ID NO: 625656 - DNA, 15 bp, Homo sapiens
tgttaccctcctcct

SEQ ID NO: 625657 - DNA, 15 bp, Homo sapiens
gttaccctcctcctc

SEQ ID NO: 625658 - DNA, 15 bp, Homo sapiens
ttaccctcctcctca

SEQ ID NO: 625659 - DNA, 15 bp, Homo sapiens
taccctcctcctcat

SEQ ID NO: 625660 - DNA, 15 bp, Homo sapiens
accctcctcctcatc

SEQ ID NO: 625661 - DNA, 15 bp, Homo sapiens
ccctcctcctcatca

SEQ ID NO: 625662 - DNA, 15 bp, Homo sapiens
cctcctcctcatcac

SEQ ID NO: 625663 - DNA, 15 bp, Homo sapiens
ctcctcctcatcaca

SEQ ID NO: 625664 - DNA, 15 bp, Homo sapiens
tcctcctcatcacat

SEQ ID NO: 625665 - DNA, 15 bp, Homo sapiens
cctcctcatcacatg

SEQ ID NO: 625666 - DNA, 15 bp, Homo sapiens
ctcctcatcacatgg

SEQ ID NO: 625667 - DNA, 15 bp, Homo sapiens
tcctcatcacatggt

SEQ ID NO: 625668 - DNA, 15 bp, Homo sapiens
cctcatcacatggtt

SEQ ID NO: 625669 - DNA, 15 bp, Homo sapiens
ctcatcacatggttg

SEQ ID NO: 625670 - DNA, 15 bp, Homo sapiens
tcatcacatggttga

SEQ ID NO: 625671 - DNA, 15 bp, Homo sapiens
catcacatggttgaa

SEQ ID NO: 625672 - DNA, 15 bp, Homo sapiens
atcacatggttgaag

SEQ ID NO: 625673 - DNA, 15 bp, Homo sapiens
tcacatggttgaagt

SEQ ID NO: 625674 - DNA, 15 bp, Homo sapiens
cacatggttgaagta

SEQ ID NO: 625675 - DNA, 15 bp, Homo sapiens
acatggttgaagtag

SEQ ID NO: 625676 - DNA, 15 bp, Homo sapiens
catggttgaagtagg

SEQ ID NO: 625677 - DNA, 15 bp, Homo sapiens
atggttgaagtaggc

SEQ ID NO: 625678 - DNA, 15 bp, Homo sapiens
tggttgaagtaggca

SEQ ID NO: 625679 - DNA, 15 bp, Homo sapiens
ggttgaagtaggcaa

SEQ ID NO: 625680 - DNA, 15 bp, Homo sapiens
gttgaagtaggcaag

SEQ ID NO: 625681 - DNA, 15 bp, Homo sapiens
ttgaagtaggcaagg

SEQ ID NO: 625682 - DNA, 15 bp, Homo sapiens
tgaagtaggcaaggt

SEQ ID NO: 625683 - DNA, 15 bp, Homo sapiens
gaagtaggcaaggtt

SEQ ID NO: 625684 - DNA, 15 bp, Homo sapiens
aagtaggcaaggttc

SEQ ID NO: 625685 - DNA, 15 bp, Homo sapiens
agtaggcaaggttca

SEQ ID NO: 625686 - DNA, 15 bp, Homo sapiens
gtaggcaaggttcag

SEQ ID NO: 625687 - DNA, 15 bp, Homo sapiens
taggcaaggttcaga

SEQ ID NO: 625688 - DNA, 15 bp, Homo sapiens
aggcaaggttcagag

SEQ ID NO: 625689 - DNA, 15 bp, Homo sapiens
ggcaaggttcagaga

SEQ ID NO: 625690 - DNA, 15 bp, Homo sapiens
gcaaggttcagagag

SEQ ID NO: 625691 - DNA, 15 bp, Homo sapiens
caaggttcagagagg

SEQ ID NO: 625692 - DNA, 15 bp, Homo sapiens
aaggttcagagaggt

SEQ ID NO: 625693 - DNA, 15 bp, Homo sapiens
aggttcagagaggtc

SEQ ID NO: 625694 - DNA, 15 bp, Homo sapiens
ggttcagagaggtcc

SEQ ID NO: 625695 - DNA, 15 bp, Homo sapiens
gttcagagaggtcca

SEQ ID NO: 625696 - DNA, 15 bp, Homo sapiens
ttcagagaggtccaa

SEQ ID NO: 625697 - DNA, 15 bp, Homo sapiens
tcagagaggtccaat

SEQ ID NO: 625698 - DNA, 15 bp, Homo sapiens
cagagaggtccaatg

SEQ ID NO: 625699 - DNA, 15 bp, Homo sapiens
agagaggtccaatgc

SEQ ID NO: 625700 - DNA, 15 bp, Homo sapiens
gagaggtccaatgcc

SEQ ID NO: 625701 - DNA, 15 bp, Homo sapiens
agaggtccaatgccc

SEQ ID NO: 625702 - DNA, 15 bp, Homo sapiens
gaggtccaatgccca

SEQ ID NO: 625703 - DNA, 15 bp, Homo sapiens
aggtccaatgcccaa

SEQ ID NO: 625704 - DNA, 15 bp, Homo sapiens
ggtccaatgcccaag

SEQ ID NO: 625705 - DNA, 15 bp, Homo sapiens
gtccaatgcccaaga

SEQ ID NO: 625706 - DNA, 15 bp, Homo sapiens
tccaatgcccaagat

SEQ ID NO: 625707 - DNA, 15 bp, Homo sapiens
ccaatgcccaagatc

SEQ ID NO: 625708 - DNA, 15 bp, Homo sapiens
caatgcccaagatca

SEQ ID NO: 625709 - DNA, 15 bp, Homo sapiens
aatgcccaagatcac

SEQ ID NO: 625710 - DNA, 15 bp, Homo sapiens
atgcccaagatcaca

SEQ ID NO: 625711 - DNA, 15 bp, Homo sapiens
tgcccaagatcacac

SEQ ID NO: 625712 - DNA, 15 bp, Homo sapiens
gcccaagatcacaca

SEQ ID NO: 625713 - DNA, 15 bp, Homo sapiens
cccaagatcacacat

SEQ ID NO: 625714 - DNA, 15 bp, Homo sapiens
ccaagatcacacatg

SEQ ID NO: 625715 - DNA, 15 bp, Homo sapiens
caagatcacacatga

SEQ ID NO: 625716 - DNA, 15 bp, Homo sapiens
aagatcacacatgag

SEQ ID NO: 625717 - DNA, 15 bp, Homo sapiens
agatcacacatgagg

SEQ ID NO: 625718 - DNA, 15 bp, Homo sapiens
gatcacacatgagga

SEQ ID NO: 625719 - DNA, 15 bp, Homo sapiens
atcacacatgaggag

SEQ ID NO: 625720 - DNA, 15 bp, Homo sapiens
tcacacatgaggagg

SEQ ID NO: 625721 - DNA, 15 bp, Homo sapiens
cacacatgaggaggc

SEQ ID NO: 625722 - DNA, 15 bp, Homo sapiens
acacatgaggaggcc

SEQ ID NO: 625723 - DNA, 15 bp, Homo sapiens
cacatgaggaggcca

SEQ ID NO: 625724 - DNA, 15 bp, Homo sapiens
acatgaggaggccag

SEQ ID NO: 625725 - DNA, 15 bp, Homo sapiens
catgaggaggccagg

SEQ ID NO: 625726 - DNA, 15 bp, Homo sapiens
atgaggaggccagga

SEQ ID NO: 625727 - DNA, 15 bp, Homo sapiens
tgaggaggccaggac

SEQ ID NO: 625728 - DNA, 15 bp, Homo sapiens
gaggaggccaggact

SEQ ID NO: 625729 - DNA, 15 bp, Homo sapiens
aggaggccaggactg

SEQ ID NO: 625730 - DNA, 15 bp, Homo sapiens
ggaggccaggactgg

SEQ ID NO: 625731 - DNA, 15 bp, Homo sapiens
gaggccaggactgga

SEQ ID NO: 625732 - DNA, 15 bp, Homo sapiens
aggccaggactggaa

SEQ ID NO: 625733 - DNA, 15 bp, Homo sapiens
ggccaggactggaac

SEQ ID NO: 625734 - DNA, 15 bp, Homo sapiens
gccaggactggaacc

SEQ ID NO: 625735 - DNA, 15 bp, Homo sapiens
ccaggactggaaccc

SEQ ID NO: 625736 - DNA, 15 bp, Homo sapiens
caggactggaaccca

SEQ ID NO: 625737 - DNA, 15 bp, Homo sapiens
aggactggaacccaa

SEQ ID NO: 625738 - DNA, 15 bp, Homo sapiens
ggactggaacccaag

SEQ ID NO: 625739 - DNA, 15 bp, Homo sapiens
gactggaacccaagg

SEQ ID NO: 625740 - DNA, 15 bp, Homo sapiens
actggaacccaaggc

SEQ ID NO: 625741 - DNA, 15 bp, Homo sapiens
ctggaacccaaggct

SEQ ID NO: 625742 - DNA, 15 bp, Homo sapiens
tggaacccaaggctg

SEQ ID NO: 625743 - DNA, 15 bp, Homo sapiens
ggaacccaaggctga

SEQ ID NO: 625744 - DNA, 15 bp, Homo sapiens
gaacccaaggctgac

SEQ ID NO: 625745 - DNA, 15 bp, Homo sapiens
aacccaaggctgact

SEQ ID NO: 625746 - DNA, 15 bp, Homo sapiens
acccaaggctgactc

SEQ ID NO: 625747 - DNA, 15 bp, Homo sapiens
cccaaggctgactct

SEQ ID NO: 625748 - DNA, 15 bp, Homo sapiens
ccaaggctgactctg

SEQ ID NO: 625749 - DNA, 15 bp, Homo sapiens
caaggctgactctgg

SEQ ID NO: 625750 - DNA, 15 bp, Homo sapiens
aaggctgactctgga

SEQ ID NO: 625751 - DNA, 15 bp, Homo sapiens
aggctgactctggac

SEQ ID NO: 625752 - DNA, 15 bp, Homo sapiens
ggctgactctggaca

SEQ ID NO: 625753 - DNA, 15 bp, Homo sapiens
gctgactctggacat

SEQ ID NO: 625754 - DNA, 15 bp, Homo sapiens
ctgactctggacatg

SEQ ID NO: 625755 - DNA, 15 bp, Homo sapiens
tgactctggacatga

SEQ ID NO: 625756 - DNA, 15 bp, Homo sapiens
gactctggacatgag

SEQ ID NO: 625757 - DNA, 15 bp, Homo sapiens
actctggacatgagc

SEQ ID NO: 625758 - DNA, 15 bp, Homo sapiens
ctctggacatgagca

SEQ ID NO: 625759 - DNA, 15 bp, Homo sapiens
tctggacatgagcac

SEQ ID NO: 625760 - DNA, 15 bp, Homo sapiens
ctggacatgagcacc

SEQ ID NO: 625761 - DNA, 15 bp, Homo sapiens
tggacatgagcacct

SEQ ID NO: 625762 - DNA, 15 bp, Homo sapiens
ggacatgagcacctg

SEQ ID NO: 625763 - DNA, 15 bp, Homo sapiens
gacatgagcacctga

SEQ ID NO: 625764 - DNA, 15 bp, Homo sapiens
acatgagcacctgac

SEQ ID NO: 625765 - DNA, 15 bp, Homo sapiens
catgagcacctgacc

SEQ ID NO: 625766 - DNA, 15 bp, Homo sapiens
atgagcacctgacct

SEQ ID NO: 625767 - DNA, 15 bp, Homo sapiens
tgagcacctgacctc

SEQ ID NO: 625768 - DNA, 15 bp, Homo sapiens
gagcacctgacctct

SEQ ID NO: 625769 - DNA, 15 bp, Homo sapiens
agcacctgacctctc

SEQ ID NO: 625770 - DNA, 15 bp, Homo sapiens
gcacctgacctctct

SEQ ID NO: 625771 - DNA, 15 bp, Homo sapiens
cacctgacctctcta

SEQ ID NO: 625772 - DNA, 15 bp, Homo sapiens
acctgacctctctac

SEQ ID NO: 625773 - DNA, 15 bp, Homo sapiens
cctgacctctctacc

SEQ ID NO: 625774 - DNA, 15 bp, Homo sapiens
ctgacctctctacct

SEQ ID NO: 625775 - DNA, 15 bp, Homo sapiens
tgacctctctaccta

SEQ ID NO: 625776 - DNA, 15 bp, Homo sapiens
gacctctctacctaa

SEQ ID NO: 625777 - DNA, 15 bp, Homo sapiens
acctctctacctaat

SEQ ID NO: 625778 - DNA, 15 bp, Homo sapiens
cctctctacctaatg

SEQ ID NO: 625779 - DNA, 15 bp, Homo sapiens
ctctctacctaatgc

SEQ ID NO: 625780 - DNA, 15 bp, Homo sapiens
tctctacctaatgcc

SEQ ID NO: 625781 - DNA, 15 bp, Homo sapiens
ctctacctaatgcct

SEQ ID NO: 625782 - DNA, 15 bp, Homo sapiens
tctacctaatgccta

SEQ ID NO: 625783 - DNA, 15 bp, Homo sapiens
ctacctaatgcctaa

SEQ ID NO: 625784 - DNA, 15 bp, Homo sapiens
tacctaatgcctaat

SEQ ID NO: 625785 - DNA, 15 bp, Homo sapiens
acctaatgcctaatg

SEQ ID NO: 625786 - DNA, 15 bp, Homo sapiens
cctaatgcctaatgc

SEQ ID NO: 625787 - DNA, 15 bp, Homo sapiens
ctaatgcctaatgcc

SEQ ID NO: 625788 - DNA, 15 bp, Homo sapiens
taatgcctaatgcct

SEQ ID NO: 625789 - DNA, 15 bp, Homo sapiens
aatgcctaatgcctc

SEQ ID NO: 625790 - DNA, 15 bp, Homo sapiens
atgcctaatgcctct

SEQ ID NO: 625791 - DNA, 15 bp, Homo sapiens
tgcctaatgcctctc

SEQ ID NO: 625792 - DNA, 15 bp, Homo sapiens
gcctaatgcctctcc

SEQ ID NO: 625793 - DNA, 15 bp, Homo sapiens
cctaatgcctctcct

SEQ ID NO: 625794 - DNA, 15 bp, Homo sapiens
ctaatgcctctcctg

SEQ ID NO: 625795 - DNA, 15 bp, Homo sapiens
taatgcctctcctgc

SEQ ID NO: 625796 - DNA, 15 bp, Homo sapiens
aatgcctctcctgct

SEQ ID NO: 625797 - DNA, 15 bp, Homo sapiens
atgcctctcctgctg

SEQ ID NO: 625798 - DNA, 15 bp, Homo sapiens
tgcctctcctgctgg

SEQ ID NO: 625799 - DNA, 15 bp, Homo sapiens
gcctctcctgctggg

SEQ ID NO: 625800 - DNA, 15 bp, Homo sapiens
cctctcctgctggga

SEQ ID NO: 625801 - DNA, 15 bp, Homo sapiens
ctctcctgctgggag

SEQ ID NO: 625802 - DNA, 15 bp, Homo sapiens
tctcctgctgggagc

SEQ ID NO: 625803 - DNA, 15 bp, Homo sapiens
ctcctgctgggagcc

SEQ ID NO: 625804 - DNA, 15 bp, Homo sapiens
tcctgctgggagccc

SEQ ID NO: 625805 - DNA, 15 bp, Homo sapiens
cctgctgggagccct

SEQ ID NO: 625806 - DNA, 15 bp, Homo sapiens
ctgctgggagccctt

SEQ ID NO: 625807 - DNA, 15 bp, Homo sapiens
tgctgggagcccttt

SEQ ID NO: 625808 - DNA, 15 bp, Homo sapiens
gctgggagccctttt

SEQ ID NO: 625809 - DNA, 15 bp, Homo sapiens
ctgggagcccttttt

SEQ ID NO: 625810 - DNA, 15 bp, Homo sapiens
tgggagcccttttta

SEQ ID NO: 625811 - DNA, 15 bp, Homo sapiens
gggagccctttttag

SEQ ID NO: 625812 - DNA, 15 bp, Homo sapiens
ggagccctttttaga

SEQ ID NO: 625813 - DNA, 15 bp, Homo sapiens
gagccctttttagaa

SEQ ID NO: 625814 - DNA, 15 bp, Homo sapiens
agccctttttagaat

SEQ ID NO: 625815 - DNA, 15 bp, Homo sapiens
gccctttttagaatt

SEQ ID NO: 625816 - DNA, 15 bp, Homo sapiens
ccctttttagaattt

SEQ ID NO: 625817 - DNA, 15 bp, Homo sapiens
cctttttagaattta

SEQ ID NO: 625818 - DNA, 15 bp, Homo sapiens
ctttttagaatttaa

SEQ ID NO: 625819 - DNA, 15 bp, Homo sapiens
tttttagaatttaag

SEQ ID NO: 625820 - DNA, 15 bp, Homo sapiens
ttttagaatttaagt

SEQ ID NO: 625821 - DNA, 15 bp, Homo sapiens
tttagaatttaagtc

SEQ ID NO: 625822 - DNA, 15 bp, Homo sapiens
ttagaatttaagtct

SEQ ID NO: 625823 - DNA, 15 bp, Homo sapiens
tagaatttaagtctt

SEQ ID NO: 625824 - DNA, 15 bp, Homo sapiens
agaatttaagtctta

SEQ ID NO: 625825 - DNA, 15 bp, Homo sapiens
gaatttaagtcttaa

SEQ ID NO: 625826 - DNA, 15 bp, Homo sapiens
aatttaagtcttaaa

SEQ ID NO: 625827 - DNA, 15 bp, Homo sapiens
atttaagtcttaaag

SEQ ID NO: 625828 - DNA, 15 bp, Homo sapiens
tttaagtcttaaagg

SEQ ID NO: 625829 - DNA, 15 bp, Homo sapiens
ttaagtcttaaagga

SEQ ID NO: 625830 - DNA, 15 bp, Homo sapiens
taagtcttaaaggat

SEQ ID NO: 625831 - DNA, 15 bp, Homo sapiens
aagtcttaaaggatg

SEQ ID NO: 625832 - DNA, 15 bp, Homo sapiens
agtcttaaaggatgg

SEQ ID NO: 625833 - DNA, 15 bp, Homo sapiens
gtcttaaaggatgga

SEQ ID NO: 625834 - DNA, 15 bp, Homo sapiens
tcttaaaggatggaa

SEQ ID NO: 625835 - DNA, 15 bp, Homo sapiens
cttaaaggatggaag

SEQ ID NO: 625836 - DNA, 15 bp, Homo sapiens
ttaaaggatggaagc

SEQ ID NO: 625837 - DNA, 15 bp, Homo sapiens
taaaggatggaagcc

SEQ ID NO: 625838 - DNA, 15 bp, Homo sapiens
aaaggatggaagccc

SEQ ID NO: 625839 - DNA, 15 bp, Homo sapiens
aaggatggaagccca

SEQ ID NO: 625840 - DNA, 15 bp, Homo sapiens
aggatggaagcccag

SEQ ID NO: 625841 - DNA, 15 bp, Homo sapiens
ggatggaagcccaga

SEQ ID NO: 625842 - DNA, 15 bp, Homo sapiens
gatggaagcccagaa

SEQ ID NO: 625843 - DNA, 15 bp, Homo sapiens
atggaagcccagaag

SEQ ID NO: 625844 - DNA, 15 bp, Homo sapiens
tggaagcccagaagg

SEQ ID NO: 625845 - DNA, 15 bp, Homo sapiens
ggaagcccagaagga

SEQ ID NO: 625846 - DNA, 15 bp, Homo sapiens
gaagcccagaaggaa

SEQ ID NO: 625847 - DNA, 15 bp, Homo sapiens
aagcccagaaggaag

SEQ ID NO: 625848 - DNA, 15 bp, Homo sapiens
agcccagaaggaagc

SEQ ID NO: 625849 - DNA, 15 bp, Homo sapiens
gcccagaaggaagca

SEQ ID NO: 625850 - DNA, 15 bp, Homo sapiens
cccagaaggaagcag

SEQ ID NO: 625851 - DNA, 15 bp, Homo sapiens
ccagaaggaagcaga

SEQ ID NO: 625852 - DNA, 15 bp, Homo sapiens
cagaaggaagcagaa

SEQ ID NO: 625853 - DNA, 15 bp, Homo sapiens
agaaggaagcagaag

SEQ ID NO: 625854 - DNA, 15 bp, Homo sapiens
gaaggaagcagaagc

SEQ ID NO: 625855 - DNA, 15 bp, Homo sapiens
aaggaagcagaagca

SEQ ID NO: 625856 - DNA, 15 bp, Homo sapiens
aggaagcagaagcaa

SEQ ID NO: 625857 - DNA, 15 bp, Homo sapiens
ggaagcagaagcaag

SEQ ID NO: 625858 - DNA, 15 bp, Homo sapiens
gaagcagaagcaagg

SEQ ID NO: 625859 - DNA, 15 bp, Homo sapiens
aagcagaagcaagga

SEQ ID NO: 625860 - DNA, 15 bp, Homo sapiens
agcagaagcaaggaa

SEQ ID NO: 625861 - DNA, 15 bp, Homo sapiens
gcagaagcaaggaag

SEQ ID NO: 625862 - DNA, 15 bp, Homo sapiens
cagaagcaaggaagt

SEQ ID NO: 625863 - DNA, 15 bp, Homo sapiens
agaagcaaggaagtg

SEQ ID NO: 625864 - DNA, 15 bp, Homo sapiens
gaagcaaggaagtgg

SEQ ID NO: 625865 - DNA, 15 bp, Homo sapiens
aagcaaggaagtgga

SEQ ID NO: 625866 - DNA, 15 bp, Homo sapiens
agcaaggaagtggaa

SEQ ID NO: 625867 - DNA, 15 bp, Homo sapiens
gcaaggaagtggaag

SEQ ID NO: 625868 - DNA, 15 bp, Homo sapiens
caaggaagtggaaga

SEQ ID NO: 625869 - DNA, 15 bp, Homo sapiens
aaggaagtggaagag

SEQ ID NO: 625870 - DNA, 15 bp, Homo sapiens
aggaagtggaagaga

SEQ ID NO: 625871 - DNA, 15 bp, Homo sapiens
ggaagtggaagagag

SEQ ID NO: 625872 - DNA, 15 bp, Homo sapiens
gaagtggaagagagg

SEQ ID NO: 625873 - DNA, 15 bp, Homo sapiens
aagtggaagagaggt

SEQ ID NO: 625874 - DNA, 15 bp, Homo sapiens
agtggaagagaggtc

SEQ ID NO: 625875 - DNA, 15 bp, Homo sapiens
gtggaagagaggtcc

SEQ ID NO: 625876 - DNA, 15 bp, Homo sapiens
tggaagagaggtccc

SEQ ID NO: 625877 - DNA, 15 bp, Homo sapiens
ggaagagaggtccca

SEQ ID NO: 625878 - DNA, 15 bp, Homo sapiens
gaagagaggtcccat

SEQ ID NO: 625879 - DNA, 15 bp, Homo sapiens
aagagaggtcccatg

SEQ ID NO: 625880 - DNA, 15 bp, Homo sapiens
agagaggtcccatgg

SEQ ID NO: 625881 - DNA, 15 bp, Homo sapiens
gagaggtcccatgga

SEQ ID NO: 625882 - DNA, 15 bp, Homo sapiens
agaggtcccatggaa

SEQ ID NO: 625883 - DNA, 15 bp, Homo sapiens
gaggtcccatggaaa

SEQ ID NO: 625884 - DNA, 15 bp, Homo sapiens
aggtcccatggaaag

SEQ ID NO: 625885 - DNA, 15 bp, Homo sapiens
ggtcccatggaaagg

SEQ ID NO: 625886 - DNA, 15 bp, Homo sapiens
gtcccatggaaagga

SEQ ID NO: 625887 - DNA, 15 bp, Homo sapiens
tcccatggaaaggac

SEQ ID NO: 625888 - DNA, 15 bp, Homo sapiens
cccatggaaaggaca

SEQ ID NO: 625889 - DNA, 15 bp, Homo sapiens
ccatggaaaggacag

SEQ ID NO: 625890 - DNA, 15 bp, Homo sapiens
catggaaaggacagt

SEQ ID NO: 625891 - DNA, 15 bp, Homo sapiens
atggaaaggacagtg

SEQ ID NO: 625892 - DNA, 15 bp, Homo sapiens
tggaaaggacagtgc

SEQ ID NO: 625893 - DNA, 15 bp, Homo sapiens
ggaaaggacagtgcc

SEQ ID NO: 625894 - DNA, 15 bp, Homo sapiens
gaaaggacagtgcca

SEQ ID NO: 625895 - DNA, 15 bp, Homo sapiens
aaaggacagtgccaa

SEQ ID NO: 625896 - DNA, 15 bp, Homo sapiens
aaggacagtgccaag

SEQ ID NO: 625897 - DNA, 15 bp, Homo sapiens
aggacagtgccaagg

SEQ ID NO: 625898 - DNA, 15 bp, Homo sapiens
ggacagtgccaagga

SEQ ID NO: 625899 - DNA, 15 bp, Homo sapiens
gacagtgccaaggac

SEQ ID NO: 625900 - DNA, 15 bp, Homo sapiens
acagtgccaaggaca

SEQ ID NO: 625901 - DNA, 15 bp, Homo sapiens
cagtgccaaggacac

SEQ ID NO: 625902 - DNA, 15 bp, Homo sapiens
agtgccaaggacact

SEQ ID NO: 625903 - DNA, 15 bp, Homo sapiens
gtgccaaggacactg

SEQ ID NO: 625904 - DNA, 15 bp, Homo sapiens
tgccaaggacactgt

SEQ ID NO: 625905 - DNA, 15 bp, Homo sapiens
gccaaggacactgta

SEQ ID NO: 625906 - DNA, 15 bp, Homo sapiens
ccaaggacactgtac

SEQ ID NO: 625907 - DNA, 15 bp, Homo sapiens
caaggacactgtaca

SEQ ID NO: 625908 - DNA, 15 bp, Homo sapiens
aaggacactgtacag

SEQ ID NO: 625909 - DNA, 15 bp, Homo sapiens
aggacactgtacagc

SEQ ID NO: 625910 - DNA, 15 bp, Homo sapiens
ggacactgtacagcc

SEQ ID NO: 625911 - DNA, 15 bp, Homo sapiens
gacactgtacagcca

SEQ ID NO: 625912 - DNA, 15 bp, Homo sapiens
acactgtacagccag

SEQ ID NO: 625913 - DNA, 15 bp, Homo sapiens
cactgtacagccagc

SEQ ID NO: 625914 - DNA, 15 bp, Homo sapiens
actgtacagccagcc

SEQ ID NO: 625915 - DNA, 15 bp, Homo sapiens
ctgtacagccagccc

SEQ ID NO: 625916 - DNA, 15 bp, Homo sapiens
tgtacagccagccca

SEQ ID NO: 625917 - DNA, 15 bp, Homo sapiens
gtacagccagcccaa

SEQ ID NO: 625918 - DNA, 15 bp, Homo sapiens
tacagccagcccaat

SEQ ID NO: 625919 - DNA, 15 bp, Homo sapiens
acagccagcccaatc

SEQ ID NO: 625920 - DNA, 15 bp, Homo sapiens
cagccagcccaatcc

SEQ ID NO: 625921 - DNA, 15 bp, Homo sapiens
agccagcccaatcct

SEQ ID NO: 625922 - DNA, 15 bp, Homo sapiens
gccagcccaatcctg

SEQ ID NO: 625923 - DNA, 15 bp, Homo sapiens
ccagcccaatcctga

SEQ ID NO: 625924 - DNA, 15 bp, Homo sapiens
cagcccaatcctgac

SEQ ID NO: 625925 - DNA, 15 bp, Homo sapiens
agcccaatcctgacc

SEQ ID NO: 625926 - DNA, 15 bp, Homo sapiens
gcccaatcctgaccc

SEQ ID NO: 625927 - DNA, 15 bp, Homo sapiens
cccaatcctgacccc

SEQ ID NO: 625928 - DNA, 15 bp, Homo sapiens
ccaatcctgacccct

SEQ ID NO: 625929 - DNA, 15 bp, Homo sapiens
caatcctgacccctt

SEQ ID NO: 625930 - DNA, 15 bp, Homo sapiens
aatcctgaccccttt

SEQ ID NO: 625931 - DNA, 15 bp, Homo sapiens
atcctgacccctttt

SEQ ID NO: 625932 - DNA, 15 bp, Homo sapiens
tcctgaccccttttc

SEQ ID NO: 625933 - DNA, 15 bp, Homo sapiens
cctgaccccttttct

SEQ ID NO: 625934 - DNA, 15 bp, Homo sapiens
ctgaccccttttctt

SEQ ID NO: 625935 - DNA, 15 bp, Homo sapiens
tgaccccttttcttc

SEQ ID NO: 625936 - DNA, 15 bp, Homo sapiens
gaccccttttcttca

SEQ ID NO: 625937 - DNA, 15 bp, Homo sapiens
accccttttcttcat

SEQ ID NO: 625938 - DNA, 15 bp, Homo sapiens
ccccttttcttcatc

SEQ ID NO: 625939 - DNA, 15 bp, Homo sapiens
cccttttcttcatct

SEQ ID NO: 625940 - DNA, 15 bp, Homo sapiens
ccttttcttcatcta

SEQ ID NO: 625941 - DNA, 15 bp, Homo sapiens
cttttcttcatctag

SEQ ID NO: 625942 - DNA, 15 bp, Homo sapiens
ttttcttcatctagg

SEQ ID NO: 625943 - DNA, 15 bp, Homo sapiens
tttcttcatctagga

SEQ ID NO: 625944 - DNA, 15 bp, Homo sapiens
ttcttcatctaggat

SEQ ID NO: 625945 - DNA, 15 bp, Homo sapiens
tcttcatctaggatt

SEQ ID NO: 625946 - DNA, 15 bp, Homo sapiens
cttcatctaggattg

SEQ ID NO: 625947 - DNA, 15 bp, Homo sapiens
ttcatctaggattgc

SEQ ID NO: 625948 - DNA, 15 bp, Homo sapiens
tcatctaggattgcc

SEQ ID NO: 625949 - DNA, 15 bp, Homo sapiens
catctaggattgccg

SEQ ID NO: 625950 - DNA, 15 bp, Homo sapiens
atctaggattgccga

SEQ ID NO: 625951 - DNA, 15 bp, Homo sapiens
tctaggattgccgag

SEQ ID NO: 625952 - DNA, 15 bp, Homo sapiens
ctaggattgccgagc

SEQ ID NO: 625953 - DNA, 15 bp, Homo sapiens
taggattgccgagcc

SEQ ID NO: 625954 - DNA, 15 bp, Homo sapiens
aggattgccgagccc

SEQ ID NO: 625955 - DNA, 15 bp, Homo sapiens
ggattgccgagccca

SEQ ID NO: 625956 - DNA, 15 bp, Homo sapiens
gattgccgagcccac

SEQ ID NO: 625957 - DNA, 15 bp, Homo sapiens
attgccgagcccact

SEQ ID NO: 625958 - DNA, 15 bp, Homo sapiens
ttgccgagcccacta

SEQ ID NO: 625959 - DNA, 15 bp, Homo sapiens
tgccgagcccactaa

SEQ ID NO: 625960 - DNA, 15 bp, Homo sapiens
gccgagcccactaag

SEQ ID NO: 625961 - DNA, 15 bp, Homo sapiens
ccgagcccactaagg

SEQ ID NO: 625962 - DNA, 15 bp, Homo sapiens
cgagcccactaagga

SEQ ID NO: 625963 - DNA, 15 bp, Homo sapiens
gagcccactaaggag

SEQ ID NO: 625964 - DNA, 15 bp, Homo sapiens
agcccactaaggagc

SEQ ID NO: 625965 - DNA, 15 bp, Homo sapiens
gcccactaaggagcc

SEQ ID NO: 625966 - DNA, 15 bp, Homo sapiens
cccactaaggagccc

SEQ ID NO: 625967 - DNA, 15 bp, Homo sapiens
ccactaaggagccca

SEQ ID NO: 625968 - DNA, 15 bp, Homo sapiens
cactaaggagcccat

SEQ ID NO: 625969 - DNA, 15 bp, Homo sapiens
actaaggagcccatt

SEQ ID NO: 625970 - DNA, 15 bp, Homo sapiens
ctaaggagcccattg

SEQ ID NO: 625971 - DNA, 15 bp, Homo sapiens
taaggagcccattgt

SEQ ID NO: 625972 - DNA, 15 bp, Homo sapiens
aaggagcccattgtt

SEQ ID NO: 625973 - DNA, 15 bp, Homo sapiens
aggagcccattgttg

SEQ ID NO: 625974 - DNA, 15 bp, Homo sapiens
ggagcccattgttga

SEQ ID NO: 625975 - DNA, 15 bp, Homo sapiens
gagcccattgttgat

SEQ ID NO: 625976 - DNA, 15 bp, Homo sapiens
agcccattgttgatg

SEQ ID NO: 625977 - DNA, 15 bp, Homo sapiens
gcccattgttgatga

SEQ ID NO: 625978 - DNA, 15 bp, Homo sapiens
cccattgttgatgaa

SEQ ID NO: 625979 - DNA, 15 bp, Homo sapiens
ccattgttgatgaag

SEQ ID NO: 625980 - DNA, 15 bp, Homo sapiens
cattgttgatgaaga

SEQ ID NO: 625981 - DNA, 15 bp, Homo sapiens
attgttgatgaagat

SEQ ID NO: 625982 - DNA, 15 bp, Homo sapiens
ttgttgatgaagatg

SEQ ID NO: 625983 - DNA, 15 bp, Homo sapiens
tgttgatgaagatga

SEQ ID NO: 625984 - DNA, 15 bp, Homo sapiens
gttgatgaagatgat

SEQ ID NO: 625985 - DNA, 15 bp, Homo sapiens
ttgatgaagatgatg

SEQ ID NO: 625986 - DNA, 15 bp, Homo sapiens
tgatgaagatgatga

SEQ ID NO: 625987 - DNA, 15 bp, Homo sapiens
gatgaagatgatgat

SEQ ID NO: 625988 - DNA, 15 bp, Homo sapiens
atgaagatgatgatg

SEQ ID NO: 625989 - DNA, 15 bp, Homo sapiens
tgaagatgatgatgt

SEQ ID NO: 625990 - DNA, 15 bp, Homo sapiens
gaagatgatgatgtg

SEQ ID NO: 625991 - DNA, 15 bp, Homo sapiens
aagatgatgatgtgg

SEQ ID NO: 625992 - DNA, 15 bp, Homo sapiens
agatgatgatgtggc

SEQ ID NO: 625993 - DNA, 15 bp, Homo sapiens
gatgatgatgtggct

SEQ ID NO: 625994 - DNA, 15 bp, Homo sapiens
atgatgatgtggctg

SEQ ID NO: 625995 - DNA, 15 bp, Homo sapiens
tgatgatgtggctga

SEQ ID NO: 625996 - DNA, 15 bp, Homo sapiens
gatgatgtggctgaa

SEQ ID NO: 625997 - DNA, 15 bp, Homo sapiens
atgatgtggctgaag

SEQ ID NO: 625998 - DNA, 15 bp, Homo sapiens
tgatgtggctgaaga

SEQ ID NO: 625999 - DNA, 15 bp, Homo sapiens
gatgtggctgaagaa

SEQ ID NO: 626000 - DNA, 15 bp, Homo sapiens
atgtggctgaagaaa

SEQ ID NO: 626001 - DNA, 15 bp, Homo sapiens
tgtggctgaagaaag

SEQ ID NO: 626002 - DNA, 15 bp, Homo sapiens
gtggctgaagaaaga

SEQ ID NO: 626003 - DNA, 15 bp, Homo sapiens
tggctgaagaaagac

SEQ ID NO: 626004 - DNA, 15 bp, Homo sapiens
ggctgaagaaagaca

SEQ ID NO: 626005 - DNA, 15 bp, Homo sapiens
gctgaagaaagacaa

SEQ ID NO: 626006 - DNA, 15 bp, Homo sapiens
ctgaagaaagacaaa

SEQ ID NO: 626007 - DNA, 15 bp, Homo sapiens
tgaagaaagacaaag

SEQ ID NO: 626008 - DNA, 15 bp, Homo sapiens
gaagaaagacaaaga

SEQ ID NO: 626009 - DNA, 15 bp, Homo sapiens
aagaaagacaaagaa

SEQ ID NO: 626010 - DNA, 15 bp, Homo sapiens
agaaagacaaagaat

SEQ ID NO: 626011 - DNA, 15 bp, Homo sapiens
gaaagacaaagaatt

SEQ ID NO: 626012 - DNA, 15 bp, Homo sapiens
aaagacaaagaatta

SEQ ID NO: 626013 - DNA, 15 bp, Homo sapiens
aagacaaagaattat

SEQ ID NO: 626014 - DNA, 15 bp, Homo sapiens
agacaaagaattatt

SEQ ID NO: 626015 - DNA, 15 bp, Homo sapiens
gacaaagaattatta

SEQ ID NO: 626016 - DNA, 15 bp, Homo sapiens
acaaagaattattac

SEQ ID NO: 626017 - DNA, 15 bp, Homo sapiens
caaagaattattact

SEQ ID NO: 626018 - DNA, 15 bp, Homo sapiens
aaagaattattactg

SEQ ID NO: 626019 - DNA, 15 bp, Homo sapiens
aagaattattactgg

SEQ ID NO: 626020 - DNA, 15 bp, Homo sapiens
agaattattactggt

SEQ ID NO: 626021 - DNA, 15 bp, Homo sapiens
gaattattactggtg

SEQ ID NO: 626022 - DNA, 15 bp, Homo sapiens
aattattactggtgg

SEQ ID NO: 626023 - DNA, 15 bp, Homo sapiens
attattactggtgga

SEQ ID NO: 626024 - DNA, 15 bp, Homo sapiens
ttattactggtggaa

SEQ ID NO: 626025 - DNA, 15 bp, Homo sapiens
tattactggtggaaa

SEQ ID NO: 626026 - DNA, 15 bp, Homo sapiens
attactggtggaaat

SEQ ID NO: 626027 - DNA, 15 bp, Homo sapiens
ttactggtggaaata

SEQ ID NO: 626028 - DNA, 15 bp, Homo sapiens
tactggtggaaataa

SEQ ID NO: 626029 - DNA, 15 bp, Homo sapiens
actggtggaaataaa

SEQ ID NO: 626030 - DNA, 15 bp, Homo sapiens
ctggtggaaataaaa

SEQ ID NO: 626031 - DNA, 15 bp, Homo sapiens
tggtggaaataaaac

SEQ ID NO: 626032 - DNA, 15 bp, Homo sapiens
ggtggaaataaaact

SEQ ID NO: 626033 - DNA, 15 bp, Homo sapiens
gtggaaataaaactg

SEQ ID NO: 626034 - DNA, 15 bp, Homo sapiens
tggaaataaaactga

SEQ ID NO: 626035 - DNA, 15 bp, Homo sapiens
ggaaataaaactgac

SEQ ID NO: 626036 - DNA, 15 bp, Homo sapiens
gaaataaaactgaca

SEQ ID NO: 626037 - DNA, 15 bp, Homo sapiens
aaataaaactgacat

SEQ ID NO: 626038 - DNA, 15 bp, Homo sapiens
aataaaactgacatc

SEQ ID NO: 626039 - DNA, 15 bp, Homo sapiens
ataaaactgacatct

SEQ ID NO: 626040 - DNA, 15 bp, Homo sapiens
taaaactgacatctt

SEQ ID NO: 626041 - DNA, 15 bp, Homo sapiens
aaaactgacatctta

SEQ ID NO: 626042 - DNA, 15 bp, Homo sapiens
aaactgacatcttaa

SEQ ID NO: 626043 - DNA, 15 bp, Homo sapiens
aactgacatcttaag

SEQ ID NO: 626044 - DNA, 15 bp, Homo sapiens
actgacatcttaagg

SEQ ID NO: 626045 - DNA, 15 bp, Homo sapiens
ctgacatcttaaggc

SEQ ID NO: 626046 - DNA, 15 bp, Homo sapiens
tgacatcttaaggct

SEQ ID NO: 626047 - DNA, 15 bp, Homo sapiens
gacatcttaaggcta

SEQ ID NO: 626048 - DNA, 15 bp, Homo sapiens
acatcttaaggctac

SEQ ID NO: 626049 - DNA, 15 bp, Homo sapiens
catcttaaggctaca

SEQ ID NO: 626050 - DNA, 15 bp, Homo sapiens
atcttaaggctacat

SEQ ID NO: 626051 - DNA, 15 bp, Homo sapiens
tcttaaggctacatg

SEQ ID NO: 626052 - DNA, 15 bp, Homo sapiens
cttaaggctacatga

SEQ ID NO: 626053 - DNA, 15 bp, Homo sapiens
ttaaggctacatgaa

SEQ ID NO: 626054 - DNA, 15 bp, Homo sapiens
taaggctacatgaac

SEQ ID NO: 626055 - DNA, 15 bp, Homo sapiens
aaggctacatgaact

SEQ ID NO: 626056 - DNA, 15 bp, Homo sapiens
aggctacatgaacta

SEQ ID NO: 626057 - DNA, 15 bp, Homo sapiens
ggctacatgaactaa

SEQ ID NO: 626058 - DNA, 15 bp, Homo sapiens
gctacatgaactaac

SEQ ID NO: 626059 - DNA, 15 bp, Homo sapiens
ctacatgaactaacc

SEQ ID NO: 626060 - DNA, 15 bp, Homo sapiens
tacatgaactaacca

SEQ ID NO: 626061 - DNA, 15 bp, Homo sapiens
acatgaactaaccaa

SEQ ID NO: 626062 - DNA, 15 bp, Homo sapiens
catgaactaaccaag

SEQ ID NO: 626063 - DNA, 15 bp, Homo sapiens
atgaactaaccaagg

SEQ ID NO: 626064 - DNA, 15 bp, Homo sapiens
tgaactaaccaaggt

SEQ ID NO: 626065 - DNA, 15 bp, Homo sapiens
gaactaaccaaggta

SEQ ID NO: 626066 - DNA, 15 bp, Homo sapiens
aactaaccaaggtaa

SEQ ID NO: 626067 - DNA, 15 bp, Homo sapiens
actaaccaaggtaag

SEQ ID NO: 626068 - DNA, 15 bp, Homo sapiens
ctaaccaaggtaagg

SEQ ID NO: 626069 - DNA, 15 bp, Homo sapiens
taaccaaggtaaggg

SEQ ID NO: 626070 - DNA, 15 bp, Homo sapiens
aaccaaggtaaggga

SEQ ID NO: 626071 - DNA, 15 bp, Homo sapiens
accaaggtaagggaa

SEQ ID NO: 626072 - DNA, 15 bp, Homo sapiens
ccaaggtaagggaat

SEQ ID NO: 626073 - DNA, 15 bp, Homo sapiens
caaggtaagggaatg

SEQ ID NO: 626074 - DNA, 15 bp, Homo sapiens
aaggtaagggaatgg

SEQ ID NO: 626075 - DNA, 15 bp, Homo sapiens
aggtaagggaatggg

SEQ ID NO: 626076 - DNA, 15 bp, Homo sapiens
ggtaagggaatgggt

SEQ ID NO: 626077 - DNA, 15 bp, Homo sapiens
gtaagggaatgggta

SEQ ID NO: 626078 - DNA, 15 bp, Homo sapiens
taagggaatgggtat

SEQ ID NO: 626079 - DNA, 15 bp, Homo sapiens
aagggaatgggtatg

SEQ ID NO: 626080 - DNA, 15 bp, Homo sapiens
agggaatgggtatga

SEQ ID NO: 626081 - DNA, 15 bp, Homo sapiens
gggaatgggtatgag

SEQ ID NO: 626082 - DNA, 15 bp, Homo sapiens
ggaatgggtatgagt

SEQ ID NO: 626083 - DNA, 15 bp, Homo sapiens
gaatgggtatgagtt

SEQ ID NO: 626084 - DNA, 15 bp, Homo sapiens
aatgggtatgagttt

SEQ ID NO: 626085 - DNA, 15 bp, Homo sapiens
atgggtatgagtttg

SEQ ID NO: 626086 - DNA, 15 bp, Homo sapiens
tgggtatgagtttgg

SEQ ID NO: 626087 - DNA, 15 bp, Homo sapiens
gggtatgagtttgga

SEQ ID NO: 626088 - DNA, 15 bp, Homo sapiens
ggtatgagtttggag

SEQ ID NO: 626089 - DNA, 15 bp, Homo sapiens
gtatgagtttggagg

SEQ ID NO: 626090 - DNA, 15 bp, Homo sapiens
tatgagtttggaggt

SEQ ID NO: 626091 - DNA, 15 bp, Homo sapiens
atgagtttggaggtg

SEQ ID NO: 626092 - DNA, 15 bp, Homo sapiens
tgagtttggaggtgc

SEQ ID NO: 626093 - DNA, 15 bp, Homo sapiens
gagtttggaggtgct

SEQ ID NO: 626094 - DNA, 15 bp, Homo sapiens
agtttggaggtgctg

SEQ ID NO: 626095 - DNA, 15 bp, Homo sapiens
gtttggaggtgctgg

SEQ ID NO: 626096 - DNA, 15 bp, Homo sapiens
tttggaggtgctggt

SEQ ID NO: 626097 - DNA, 15 bp, Homo sapiens
ttggaggtgctggtt

SEQ ID NO: 626098 - DNA, 15 bp, Homo sapiens
tggaggtgctggtta

SEQ ID NO: 626099 - DNA, 15 bp, Homo sapiens
ggaggtgctggttag

SEQ ID NO: 626100 - DNA, 15 bp, Homo sapiens
gaggtgctggttaga

SEQ ID NO: 626101 - DNA, 15 bp, Homo sapiens
aggtgctggttagat

SEQ ID NO: 626102 - DNA, 15 bp, Homo sapiens
ggtgctggttagatc

SEQ ID NO: 626103 - DNA, 15 bp, Homo sapiens
gtgctggttagatcc

SEQ ID NO: 626104 - DNA, 15 bp, Homo sapiens
tgctggttagatcca

SEQ ID NO: 626105 - DNA, 15 bp, Homo sapiens
gctggttagatccac

SEQ ID NO: 626106 - DNA, 15 bp, Homo sapiens
ctggttagatccaca

SEQ ID NO: 626107 - DNA, 15 bp, Homo sapiens
tggttagatccacag

SEQ ID NO: 626108 - DNA, 15 bp, Homo sapiens
ggttagatccacagt

SEQ ID NO: 626109 - DNA, 15 bp, Homo sapiens
gttagatccacagtt

SEQ ID NO: 626110 - DNA, 15 bp, Homo sapiens
ttagatccacagttg

SEQ ID NO: 626111 - DNA, 15 bp, Homo sapiens
tagatccacagttgg

SEQ ID NO: 626112 - DNA, 15 bp, Homo sapiens
agatccacagttggc

SEQ ID NO: 626113 - DNA, 15 bp, Homo sapiens
gatccacagttggca

SEQ ID NO: 626114 - DNA, 15 bp, Homo sapiens
atccacagttggcat

SEQ ID NO: 626115 - DNA, 15 bp, Homo sapiens
tccacagttggcatg

SEQ ID NO: 626116 - DNA, 15 bp, Homo sapiens
ccacagttggcatga

SEQ ID NO: 626117 - DNA, 15 bp, Homo sapiens
cacagttggcatgat

SEQ ID NO: 626118 - DNA, 15 bp, Homo sapiens
acagttggcatgatg

SEQ ID NO: 626119 - DNA, 15 bp, Homo sapiens
cagttggcatgatgt

SEQ ID NO: 626120 - DNA, 15 bp, Homo sapiens
agttggcatgatgtt

SEQ ID NO: 626121 - DNA, 15 bp, Homo sapiens
gttggcatgatgttg

SEQ ID NO: 626122 - DNA, 15 bp, Homo sapiens
ttggcatgatgttgc

SEQ ID NO: 626123 - DNA, 15 bp, Homo sapiens
tggcatgatgttgcc

SEQ ID NO: 626124 - DNA, 15 bp, Homo sapiens
ggcatgatgttgcca

SEQ ID NO: 626125 - DNA, 15 bp, Homo sapiens
gcatgatgttgccat

SEQ ID NO: 626126 - DNA, 15 bp, Homo sapiens
catgatgttgccatt

SEQ ID NO: 626127 - DNA, 15 bp, Homo sapiens
atgatgttgccattt

SEQ ID NO: 626128 - DNA, 15 bp, Homo sapiens
tgatgttgccatttt

SEQ ID NO: 626129 - DNA, 15 bp, Homo sapiens
gatgttgccattttc

SEQ ID NO: 626130 - DNA, 15 bp, Homo sapiens
atgttgccattttcc

SEQ ID NO: 626131 - DNA, 15 bp, Homo sapiens
tgttgccattttcct

SEQ ID NO: 626132 - DNA, 15 bp, Homo sapiens
gttgccattttcctt

SEQ ID NO: 626133 - DNA, 15 bp, Homo sapiens
ttgccattttccttc

SEQ ID NO: 626134 - DNA, 15 bp, Homo sapiens
tgccattttccttct

SEQ ID NO: 626135 - DNA, 15 bp, Homo sapiens
gccattttccttcta

SEQ ID NO: 626136 - DNA, 15 bp, Homo sapiens
ccattttccttctat

SEQ ID NO: 626137 - DNA, 15 bp, Homo sapiens
cattttccttctata

SEQ ID NO: 626138 - DNA, 15 bp, Homo sapiens
attttccttctatag

SEQ ID NO: 626139 - DNA, 15 bp, Homo sapiens
ttttccttctataga

SEQ ID NO: 626140 - DNA, 15 bp, Homo sapiens
tttccttctatagaa

SEQ ID NO: 626141 - DNA, 15 bp, Homo sapiens
ttccttctatagaac

SEQ ID NO: 626142 - DNA, 15 bp, Homo sapiens
tccttctatagaaca

SEQ ID NO: 626143 - DNA, 15 bp, Homo sapiens
ccttctatagaacaa

SEQ ID NO: 626144 - DNA, 15 bp, Homo sapiens
cttctatagaacaat

SEQ ID NO: 626145 - DNA, 15 bp, Homo sapiens
ttctatagaacaatt

SEQ ID NO: 626146 - DNA, 15 bp, Homo sapiens
tctatagaacaattg

SEQ ID NO: 626147 - DNA, 15 bp, Homo sapiens
ctatagaacaattga

SEQ ID NO: 626148 - DNA, 15 bp, Homo sapiens
tatagaacaattgat

SEQ ID NO: 626149 - DNA, 15 bp, Homo sapiens
atagaacaattgata

SEQ ID NO: 626150 - DNA, 15 bp, Homo sapiens
tagaacaattgatat

SEQ ID NO: 626151 - DNA, 15 bp, Homo sapiens
agaacaattgatatg

SEQ ID NO: 626152 - DNA, 15 bp, Homo sapiens
gaacaattgatatgc

SEQ ID NO: 626153 - DNA, 15 bp, Homo sapiens
aacaattgatatgct

SEQ ID NO: 626154 - DNA, 15 bp, Homo sapiens
acaattgatatgctt

SEQ ID NO: 626155 - DNA, 15 bp, Homo sapiens
caattgatatgctta

SEQ ID NO: 626156 - DNA, 15 bp, Homo sapiens
aattgatatgcttat

SEQ ID NO: 626157 - DNA, 15 bp, Homo sapiens
attgatatgcttatg

SEQ ID NO: 626158 - DNA, 15 bp, Homo sapiens
ttgatatgcttatgc

SEQ ID NO: 626159 - DNA, 15 bp, Homo sapiens
tgatatgcttatgca

SEQ ID NO: 626160 - DNA, 15 bp, Homo sapiens
gatatgcttatgcaa

SEQ ID NO: 626161 - DNA, 15 bp, Homo sapiens
atatgcttatgcaag

SEQ ID NO: 626162 - DNA, 15 bp, Homo sapiens
tatgcttatgcaagc

SEQ ID NO: 626163 - DNA, 15 bp, Homo sapiens
atgcttatgcaagca

SEQ ID NO: 626164 - DNA, 15 bp, Homo sapiens
tgcttatgcaagcaa

SEQ ID NO: 626165 - DNA, 15 bp, Homo sapiens
gcttatgcaagcaat

SEQ ID NO: 626166 - DNA, 15 bp, Homo sapiens
cttatgcaagcaatt

SEQ ID NO: 626167 - DNA, 15 bp, Homo sapiens
ttatgcaagcaattt

SEQ ID NO: 626168 - DNA, 15 bp, Homo sapiens
tatgcaagcaatttg

SEQ ID NO: 626169 - DNA, 15 bp, Homo sapiens
atgcaagcaatttgg

SEQ ID NO: 626170 - DNA, 15 bp, Homo sapiens
tgcaagcaatttggt

SEQ ID NO: 626171 - DNA, 15 bp, Homo sapiens
gcaagcaatttggtt

SEQ ID NO: 626172 - DNA, 15 bp, Homo sapiens
caagcaatttggttc

SEQ ID NO: 626173 - DNA, 15 bp, Homo sapiens
aagcaatttggttcc

SEQ ID NO: 626174 - DNA, 15 bp, Homo sapiens
agcaatttggttccc

SEQ ID NO: 626175 - DNA, 15 bp, Homo sapiens
gcaatttggttccca

SEQ ID NO: 626176 - DNA, 15 bp, Homo sapiens
caatttggttcccag

SEQ ID NO: 626177 - DNA, 15 bp, Homo sapiens
aatttggttcccagt

SEQ ID NO: 626178 - DNA, 15 bp, Homo sapiens
atttggttcccagtt

SEQ ID NO: 626179 - DNA, 15 bp, Homo sapiens
tttggttcccagttt

SEQ ID NO: 626180 - DNA, 15 bp, Homo sapiens
ttggttcccagtttt

SEQ ID NO: 626181 - DNA, 15 bp, Homo sapiens
tggttcccagtttta

SEQ ID NO: 626182 - DNA, 15 bp, Homo sapiens
ggttcccagttttat

SEQ ID NO: 626183 - DNA, 15 bp, Homo sapiens
gttcccagttttatg

SEQ ID NO: 626184 - DNA, 15 bp, Homo sapiens
ttcccagttttatgt

SEQ ID NO: 626185 - DNA, 15 bp, Homo sapiens
tcccagttttatgta

SEQ ID NO: 626186 - DNA, 15 bp, Homo sapiens
cccagttttatgtag

SEQ ID NO: 626187 - DNA, 15 bp, Homo sapiens
ccagttttatgtagg

SEQ ID NO: 626188 - DNA, 15 bp, Homo sapiens
cagttttatgtaggg

SEQ ID NO: 626189 - DNA, 15 bp, Homo sapiens
agttttatgtagggt

SEQ ID NO: 626190 - DNA, 15 bp, Homo sapiens
gttttatgtagggtc

SEQ ID NO: 626191 - DNA, 15 bp, Homo sapiens
ttttatgtagggtca

SEQ ID NO: 626192 - DNA, 15 bp, Homo sapiens
tttatgtagggtcat

SEQ ID NO: 626193 - DNA, 15 bp, Homo sapiens
ttatgtagggtcatc

SEQ ID NO: 626194 - DNA, 15 bp, Homo sapiens
tatgtagggtcatca

SEQ ID NO: 626195 - DNA, 15 bp, Homo sapiens
atgtagggtcatcat

SEQ ID NO: 626196 - DNA, 15 bp, Homo sapiens
tgtagggtcatcatc

SEQ ID NO: 626197 - DNA, 15 bp, Homo sapiens
gtagggtcatcatcc

SEQ ID NO: 626198 - DNA, 15 bp, Homo sapiens
tagggtcatcatccc

SEQ ID NO: 626199 - DNA, 15 bp, Homo sapiens
agggtcatcatccct

SEQ ID NO: 626200 - DNA, 15 bp, Homo sapiens
gggtcatcatccctg

SEQ ID NO: 626201 - DNA, 15 bp, Homo sapiens
ggtcatcatccctgt

SEQ ID NO: 626202 - DNA, 15 bp, Homo sapiens
gtcatcatccctgtg

SEQ ID NO: 626203 - DNA, 15 bp, Homo sapiens
tcatcatccctgtgt

SEQ ID NO: 626204 - DNA, 15 bp, Homo sapiens
catcatccctgtgtt

SEQ ID NO: 626205 - DNA, 15 bp, Homo sapiens
atcatccctgtgtta

SEQ ID NO: 626206 - DNA, 15 bp, Homo sapiens
tcatccctgtgttat

SEQ ID NO: 626207 - DNA, 15 bp, Homo sapiens
catccctgtgttata

SEQ ID NO: 626208 - DNA, 15 bp, Homo sapiens
atccctgtgttataa

SEQ ID NO: 626209 - DNA, 15 bp, Homo sapiens
tccctgtgttataac

SEQ ID NO: 626210 - DNA, 15 bp, Homo sapiens
ccctgtgttataact

SEQ ID NO: 626211 - DNA, 15 bp, Homo sapiens
cctgtgttataactc

SEQ ID NO: 626212 - DNA, 15 bp, Homo sapiens
ctgtgttataactcg

SEQ ID NO: 626213 - DNA, 15 bp, Homo sapiens
tgtgttataactcgt

SEQ ID NO: 626214 - DNA, 15 bp, Homo sapiens
gtgttataactcgtc

SEQ ID NO: 626215 - DNA, 15 bp, Homo sapiens
tgttataactcgtct

SEQ ID NO: 626216 - DNA, 15 bp, Homo sapiens
gttataactcgtctt

SEQ ID NO: 626217 - DNA, 15 bp, Homo sapiens
ttataactcgtcttc

SEQ ID NO: 626218 - DNA, 15 bp, Homo sapiens
tataactcgtcttcc

SEQ ID NO: 626219 - DNA, 15 bp, Homo sapiens
ataactcgtcttcca

SEQ ID NO: 626220 - DNA, 15 bp, Homo sapiens
taactcgtcttccaa

SEQ ID NO: 626221 - DNA, 15 bp, Homo sapiens
aactcgtcttccaag

SEQ ID NO: 626222 - DNA, 15 bp, Homo sapiens
actcgtcttccaaga

SEQ ID NO: 626223 - DNA, 15 bp, Homo sapiens
ctcgtcttccaagag

SEQ ID NO: 626224 - DNA, 15 bp, Homo sapiens
tcgtcttccaagagc

SEQ ID NO: 626225 - DNA, 15 bp, Homo sapiens
cgtcttccaagagca

SEQ ID NO: 626226 - DNA, 15 bp, Homo sapiens
gtcttccaagagcat

SEQ ID NO: 626227 - DNA, 15 bp, Homo sapiens
tcttccaagagcatc

SEQ ID NO: 626228 - DNA, 15 bp, Homo sapiens
cttccaagagcatct

SEQ ID NO: 626229 - DNA, 15 bp, Homo sapiens
ttccaagagcatcta

SEQ ID NO: 626230 - DNA, 15 bp, Homo sapiens
tccaagagcatctaa

SEQ ID NO: 626231 - DNA, 15 bp, Homo sapiens
ccaagagcatctaat

SEQ ID NO: 626232 - DNA, 15 bp, Homo sapiens
caagagcatctaatt

SEQ ID NO: 626233 - DNA, 15 bp, Homo sapiens
aagagcatctaattc

SEQ ID NO: 626234 - DNA, 15 bp, Homo sapiens
agagcatctaattcc

SEQ ID NO: 626235 - DNA, 15 bp, Homo sapiens
gagcatctaattcca

SEQ ID NO: 626236 - DNA, 15 bp, Homo sapiens
agcatctaattccaa

SEQ ID NO: 626237 - DNA, 15 bp, Homo sapiens
gcatctaattccaat

SEQ ID NO: 626238 - DNA, 15 bp, Homo sapiens
catctaattccaatg

SEQ ID NO: 626239 - DNA, 15 bp, Homo sapiens
atctaattccaatgt

SEQ ID NO: 626240 - DNA, 15 bp, Homo sapiens
tctaattccaatgtg

SEQ ID NO: 626241 - DNA, 15 bp, Homo sapiens
ctaattccaatgtgt

SEQ ID NO: 626242 - DNA, 15 bp, Homo sapiens
taattccaatgtgtg

SEQ ID NO: 626243 - DNA, 15 bp, Homo sapiens
aattccaatgtgtgt

SEQ ID NO: 626244 - DNA, 15 bp, Homo sapiens
attccaatgtgtgtt

SEQ ID NO: 626245 - DNA, 15 bp, Homo sapiens
ttccaatgtgtgttc

SEQ ID NO: 626246 - DNA, 15 bp, Homo sapiens
tccaatgtgtgttcc

SEQ ID NO: 626247 - DNA, 15 bp, Homo sapiens
ccaatgtgtgttccc

SEQ ID NO: 626248 - DNA, 15 bp, Homo sapiens
caatgtgtgttccct

SEQ ID NO: 626249 - DNA, 15 bp, Homo sapiens
aatgtgtgttccctg

SEQ ID NO: 626250 - DNA, 15 bp, Homo sapiens
atgtgtgttccctgc

SEQ ID NO: 626251 - DNA, 15 bp, Homo sapiens
tgtgtgttccctgct

SEQ ID NO: 626252 - DNA, 15 bp, Homo sapiens
gtgtgttccctgcta

SEQ ID NO: 626253 - DNA, 15 bp, Homo sapiens
tgtgttccctgctat

SEQ ID NO: 626254 - DNA, 15 bp, Homo sapiens
gtgttccctgctatt

SEQ ID NO: 626255 - DNA, 15 bp, Homo sapiens
tgttccctgctattc

SEQ ID NO: 626256 - DNA, 15 bp, Homo sapiens
gttccctgctattca

SEQ ID NO: 626257 - DNA, 15 bp, Homo sapiens
ttccctgctattcat

SEQ ID NO: 626258 - DNA, 15 bp, Homo sapiens
tccctgctattcatc

SEQ ID NO: 626259 - DNA, 15 bp, Homo sapiens
ccctgctattcatct

SEQ ID NO: 626260 - DNA, 15 bp, Homo sapiens
cctgctattcatctc

SEQ ID NO: 626261 - DNA, 15 bp, Homo sapiens
ctgctattcatctcg

SEQ ID NO: 626262 - DNA, 15 bp, Homo sapiens
tgctattcatctcgg

SEQ ID NO: 626263 - DNA, 15 bp, Homo sapiens
gctattcatctcggg

SEQ ID NO: 626264 - DNA, 15 bp, Homo sapiens
ctattcatctcgggc

SEQ ID NO: 626265 - DNA, 15 bp, Homo sapiens
tattcatctcgggca

SEQ ID NO: 626266 - DNA, 15 bp, Homo sapiens
attcatctcgggcac

SEQ ID NO: 626267 - DNA, 15 bp, Homo sapiens
ttcatctcgggcact

SEQ ID NO: 626268 - DNA, 15 bp, Homo sapiens
tcatctcgggcactg

SEQ ID NO: 626269 - DNA, 15 bp, Homo sapiens
catctcgggcactga

SEQ ID NO: 626270 - DNA, 15 bp, Homo sapiens
atctcgggcactgac

SEQ ID NO: 626271 - DNA, 15 bp, Homo sapiens
tctcgggcactgaca

SEQ ID NO: 626272 - DNA, 15 bp, Homo sapiens
ctcgggcactgacac

SEQ ID NO: 626273 - DNA, 15 bp, Homo sapiens
tcgggcactgacaca

SEQ ID NO: 626274 - DNA, 15 bp, Homo sapiens
cgggcactgacacag

SEQ ID NO: 626275 - DNA, 15 bp, Homo sapiens
gggcactgacacagg

SEQ ID NO: 626276 - DNA, 15 bp, Homo sapiens
ggcactgacacaggg

SEQ ID NO: 626277 - DNA, 15 bp, Homo sapiens
gcactgacacagggc

SEQ ID NO: 626278 - DNA, 15 bp, Homo sapiens
cactgacacagggcc

SEQ ID NO: 626279 - DNA, 15 bp, Homo sapiens
actgacacagggcct

SEQ ID NO: 626280 - DNA, 15 bp, Homo sapiens
ctgacacagggcctc

SEQ ID NO: 626281 - DNA, 15 bp, Homo sapiens
tgacacagggcctca

SEQ ID NO: 626282 - DNA, 15 bp, Homo sapiens
gacacagggcctcag

SEQ ID NO: 626283 - DNA, 15 bp, Homo sapiens
acacagggcctcagt

SEQ ID NO: 626284 - DNA, 15 bp, Homo sapiens
cacagggcctcagtg

SEQ ID NO: 626285 - DNA, 15 bp, Homo sapiens
acagggcctcagtga

SEQ ID NO: 626286 - DNA, 15 bp, Homo sapiens
cagggcctcagtgag

SEQ ID NO: 626287 - DNA, 15 bp, Homo sapiens
agggcctcagtgaga

SEQ ID NO: 626288 - DNA, 15 bp, Homo sapiens
gggcctcagtgagaa

SEQ ID NO: 626289 - DNA, 15 bp, Homo sapiens
ggcctcagtgagaat

SEQ ID NO: 626290 - DNA, 15 bp, Homo sapiens
gcctcagtgagaatc

SEQ ID NO: 626291 - DNA, 15 bp, Homo sapiens
cctcagtgagaatca

SEQ ID NO: 626292 - DNA, 15 bp, Homo sapiens
ctcagtgagaatcac

SEQ ID NO: 626293 - DNA, 15 bp, Homo sapiens
tcagtgagaatcact

SEQ ID NO: 626294 - DNA, 15 bp, Homo sapiens
cagtgagaatcactc

SEQ ID NO: 626295 - DNA, 15 bp, Homo sapiens
agtgagaatcactcc

SEQ ID NO: 626296 - DNA, 15 bp, Homo sapiens
gtgagaatcactcca

SEQ ID NO: 626297 - DNA, 15 bp, Homo sapiens
tgagaatcactccag

SEQ ID NO: 626298 - DNA, 15 bp, Homo sapiens
gagaatcactccagc

SEQ ID NO: 626299 - DNA, 15 bp, Homo sapiens
agaatcactccagct

SEQ ID NO: 626300 - DNA, 15 bp, Homo sapiens
gaatcactccagctg

SEQ ID NO: 626301 - DNA, 15 bp, Homo sapiens
aatcactccagctga

SEQ ID NO: 626302 - DNA, 15 bp, Homo sapiens
atcactccagctgag

SEQ ID NO: 626303 - DNA, 15 bp, Homo sapiens
tcactccagctgagc

SEQ ID NO: 626304 - DNA, 15 bp, Homo sapiens
cactccagctgagca

SEQ ID NO: 626305 - DNA, 15 bp, Homo sapiens
actccagctgagcat

SEQ ID NO: 626306 - DNA, 15 bp, Homo sapiens
ctccagctgagcatc

SEQ ID NO: 626307 - DNA, 15 bp, Homo sapiens
tccagctgagcatca

SEQ ID NO: 626308 - DNA, 15 bp, Homo sapiens
ccagctgagcatcat

SEQ ID NO: 626309 - DNA, 15 bp, Homo sapiens
cagctgagcatcatt

SEQ ID NO: 626310 - DNA, 15 bp, Homo sapiens
agctgagcatcattc

SEQ ID NO: 626311 - DNA, 15 bp, Homo sapiens
gctgagcatcattcc

SEQ ID NO: 626312 - DNA, 15 bp, Homo sapiens
ctgagcatcattccc

SEQ ID NO: 626313 - DNA, 15 bp, Homo sapiens
tgagcatcattccct

SEQ ID NO: 626314 - DNA, 15 bp, Homo sapiens
gagcatcattccctt

SEQ ID NO: 626315 - DNA, 15 bp, Homo sapiens
agcatcattcccttt

SEQ ID NO: 626316 - DNA, 15 bp, Homo sapiens
gcatcattccctttt

SEQ ID NO: 626317 - DNA, 15 bp, Homo sapiens
catcattcccttttc

SEQ ID NO: 626318 - DNA, 15 bp, Homo sapiens
atcattcccttttct

SEQ ID NO: 626319 - DNA, 15 bp, Homo sapiens
tcattcccttttctg

SEQ ID NO: 626320 - DNA, 15 bp, Homo sapiens
cattcccttttctgt

SEQ ID NO: 626321 - DNA, 15 bp, Homo sapiens
attcccttttctgtg

SEQ ID NO: 626322 - DNA, 15 bp, Homo sapiens
ttcccttttctgtgt

SEQ ID NO: 626323 - DNA, 15 bp, Homo sapiens
tcccttttctgtgtt

SEQ ID NO: 626324 - DNA, 15 bp, Homo sapiens
cccttttctgtgttc

SEQ ID NO: 626325 - DNA, 15 bp, Homo sapiens
ccttttctgtgttct

SEQ ID NO: 626326 - DNA, 15 bp, Homo sapiens
cttttctgtgttctg

SEQ ID NO: 626327 - DNA, 15 bp, Homo sapiens
ttttctgtgttctgt

SEQ ID NO: 626328 - DNA, 15 bp, Homo sapiens
tttctgtgttctgtt

SEQ ID NO: 626329 - DNA, 15 bp, Homo sapiens
ttctgtgttctgttt

SEQ ID NO: 626330 - DNA, 15 bp, Homo sapiens
tctgtgttctgtttc

SEQ ID NO: 626331 - DNA, 15 bp, Homo sapiens
ctgtgttctgtttct

SEQ ID NO: 626332 - DNA, 15 bp, Homo sapiens
tgtgttctgtttctg

SEQ ID NO: 626333 - DNA, 15 bp, Homo sapiens
gtgttctgtttctgc

SEQ ID NO: 626334 - DNA, 15 bp, Homo sapiens
tgttctgtttctgca

SEQ ID NO: 626335 - DNA, 15 bp, Homo sapiens
gttctgtttctgcag

SEQ ID NO: 626336 - DNA, 15 bp, Homo sapiens
ttctgtttctgcaga

SEQ ID NO: 626337 - DNA, 15 bp, Homo sapiens
tctgtttctgcagag

SEQ ID NO: 626338 - DNA, 15 bp, Homo sapiens
ctgtttctgcagagc

SEQ ID NO: 626339 - DNA, 15 bp, Homo sapiens
tgtttctgcagagca

SEQ ID NO: 626340 - DNA, 15 bp, Homo sapiens
gtttctgcagagcat

SEQ ID NO: 626341 - DNA, 15 bp, Homo sapiens
tttctgcagagcatg

SEQ ID NO: 626342 - DNA, 15 bp, Homo sapiens
ttctgcagagcatgg

SEQ ID NO: 626343 - DNA, 15 bp, Homo sapiens
tctgcagagcatggg

SEQ ID NO: 626344 - DNA, 15 bp, Homo sapiens
ctgcagagcatgggt

SEQ ID NO: 626345 - DNA, 15 bp, Homo sapiens
tgcagagcatgggtc

SEQ ID NO: 626346 - DNA, 15 bp, Homo sapiens
gcagagcatgggtca

SEQ ID NO: 626347 - DNA, 15 bp, Homo sapiens
cagagcatgggtcag

SEQ ID NO: 626348 - DNA, 15 bp, Homo sapiens
agagcatgggtcagc

SEQ ID NO: 626349 - DNA, 15 bp, Homo sapiens
gagcatgggtcagcc

SEQ ID NO: 626350 - DNA, 15 bp, Homo sapiens
agcatgggtcagcct

SEQ ID NO: 626351 - DNA, 15 bp, Homo sapiens
gcatgggtcagcctc

SEQ ID NO: 626352 - DNA, 15 bp, Homo sapiens
catgggtcagcctcg

SEQ ID NO: 626353 - DNA, 15 bp, Homo sapiens
atgggtcagcctcga

SEQ ID NO: 626354 - DNA, 15 bp, Homo sapiens
tgggtcagcctcgag

SEQ ID NO: 626355 - DNA, 15 bp, Homo sapiens
gggtcagcctcgaga

SEQ ID NO: 626356 - DNA, 15 bp, Homo sapiens
ggtcagcctcgagat

SEQ ID NO: 626357 - DNA, 15 bp, Homo sapiens
gtcagcctcgagatg

SEQ ID NO: 626358 - DNA, 15 bp, Homo sapiens
tcagcctcgagatgt

SEQ ID NO: 626359 - DNA, 15 bp, Homo sapiens
cagcctcgagatgtc

SEQ ID NO: 626360 - DNA, 15 bp, Homo sapiens
agcctcgagatgtct

SEQ ID NO: 626361 - DNA, 15 bp, Homo sapiens
gcctcgagatgtctc

SEQ ID NO: 626362 - DNA, 15 bp, Homo sapiens
cctcgagatgtctca

SEQ ID NO: 626363 - DNA, 15 bp, Homo sapiens
ctcgagatgtctcag

SEQ ID NO: 626364 - DNA, 15 bp, Homo sapiens
tcgagatgtctcagt

SEQ ID NO: 626365 - DNA, 15 bp, Homo sapiens
cgagatgtctcagta

SEQ ID NO: 626366 - DNA, 15 bp, Homo sapiens
gagatgtctcagtac

SEQ ID NO: 626367 - DNA, 15 bp, Homo sapiens
agatgtctcagtact

SEQ ID NO: 626368 - DNA, 15 bp, Homo sapiens
gatgtctcagtactc

SEQ ID NO: 626369 - DNA, 15 bp, Homo sapiens
atgtctcagtactca

SEQ ID NO: 626370 - DNA, 15 bp, Homo sapiens
tgtctcagtactcac

SEQ ID NO: 626371 - DNA, 15 bp, Homo sapiens
gtctcagtactcacc

SEQ ID NO: 626372 - DNA, 15 bp, Homo sapiens
tctcagtactcacca

SEQ ID NO: 626373 - DNA, 15 bp, Homo sapiens
ctcagtactcaccac

SEQ ID NO: 626374 - DNA, 15 bp, Homo sapiens
tcagtactcaccaca

SEQ ID NO: 626375 - DNA, 15 bp, Homo sapiens
cagtactcaccacac

SEQ ID NO: 626376 - DNA, 15 bp, Homo sapiens
agtactcaccacacc

SEQ ID NO: 626377 - DNA, 15 bp, Homo sapiens
gtactcaccacacct

SEQ ID NO: 626378 - DNA, 15 bp, Homo sapiens
tactcaccacacctc

SEQ ID NO: 626379 - DNA, 15 bp, Homo sapiens
actcaccacacctct

SEQ ID NO: 626380 - DNA, 15 bp, Homo sapiens
ctcaccacacctctg

SEQ ID NO: 626381 - DNA, 15 bp, Homo sapiens
tcaccacacctctgt

SEQ ID NO: 626382 - DNA, 15 bp, Homo sapiens
caccacacctctgtg

SEQ ID NO: 626383 - DNA, 15 bp, Homo sapiens
accacacctctgtgc

SEQ ID NO: 626384 - DNA, 15 bp, Homo sapiens
ccacacctctgtgcc

SEQ ID NO: 626385 - DNA, 15 bp, Homo sapiens
cacacctctgtgcct

SEQ ID NO: 626386 - DNA, 15 bp, Homo sapiens
acacctctgtgcctg

SEQ ID NO: 626387 - DNA, 15 bp, Homo sapiens
cacctctgtgcctgc

SEQ ID NO: 626388 - DNA, 15 bp, Homo sapiens
acctctgtgcctgcc

SEQ ID NO: 626389 - DNA, 15 bp, Homo sapiens
cctctgtgcctgccc

SEQ ID NO: 626390 - DNA, 15 bp, Homo sapiens
ctctgtgcctgccca

SEQ ID NO: 626391 - DNA, 15 bp, Homo sapiens
tctgtgcctgcccat

SEQ ID NO: 626392 - DNA, 15 bp, Homo sapiens
ctgtgcctgcccatg

SEQ ID NO: 626393 - DNA, 15 bp, Homo sapiens
tgtgcctgcccatgt

SEQ ID NO: 626394 - DNA, 15 bp, Homo sapiens
gtgcctgcccatgtc

SEQ ID NO: 626395 - DNA, 15 bp, Homo sapiens
tgcctgcccatgtca

SEQ ID NO: 626396 - DNA, 15 bp, Homo sapiens
gcctgcccatgtcaa

SEQ ID NO: 626397 - DNA, 15 bp, Homo sapiens
cctgcccatgtcaat

SEQ ID NO: 626398 - DNA, 15 bp, Homo sapiens
ctgcccatgtcaata

SEQ ID NO: 626399 - DNA, 15 bp, Homo sapiens
tgcccatgtcaatat

SEQ ID NO: 626400 - DNA, 15 bp, Homo sapiens
gcccatgtcaatatg

SEQ ID NO: 626401 - DNA, 15 bp, Homo sapiens
cccatgtcaatatgt

SEQ ID NO: 626402 - DNA, 15 bp, Homo sapiens
ccatgtcaatatgta

SEQ ID NO: 626403 - DNA, 15 bp, Homo sapiens
catgtcaatatgtaa

SEQ ID NO: 626404 - DNA, 15 bp, Homo sapiens
atgtcaatatgtaac

SEQ ID NO: 626405 - DNA, 15 bp, Homo sapiens
tgtcaatatgtaacc

SEQ ID NO: 626406 - DNA, 15 bp, Homo sapiens
gtcaatatgtaacct

SEQ ID NO: 626407 - DNA, 15 bp, Homo sapiens
tcaatatgtaacctc

SEQ ID NO: 626408 - DNA, 15 bp, Homo sapiens
caatatgtaacctcc

SEQ ID NO: 626409 - DNA, 15 bp, Homo sapiens
aatatgtaacctcct

SEQ ID NO: 626410 - DNA, 15 bp, Homo sapiens
atatgtaacctccta

SEQ ID NO: 626411 - DNA, 15 bp, Homo sapiens
tatgtaacctcctag

SEQ ID NO: 626412 - DNA, 15 bp, Homo sapiens
atgtaacctcctagt

SEQ ID NO: 626413 - DNA, 15 bp, Homo sapiens
tgtaacctcctagtg

SEQ ID NO: 626414 - DNA, 15 bp, Homo sapiens
gtaacctcctagtgc

SEQ ID NO: 626415 - DNA, 15 bp, Homo sapiens
taacctcctagtgct

SEQ ID NO: 626416 - DNA, 15 bp, Homo sapiens
aacctcctagtgctg

SEQ ID NO: 626417 - DNA, 15 bp, Homo sapiens
acctcctagtgctgg

SEQ ID NO: 626418 - DNA, 15 bp, Homo sapiens
cctcctagtgctggt

SEQ ID NO: 626419 - DNA, 15 bp, Homo sapiens
ctcctagtgctggta

SEQ ID NO: 626420 - DNA, 15 bp, Homo sapiens
tcctagtgctggtag

SEQ ID NO: 626421 - DNA, 15 bp, Homo sapiens
cctagtgctggtagt

SEQ ID NO: 626422 - DNA, 15 bp, Homo sapiens
ctagtgctggtagtt

SEQ ID NO: 626423 - DNA, 15 bp, Homo sapiens
tagtgctggtagttt

SEQ ID NO: 626424 - DNA, 15 bp, Homo sapiens
agtgctggtagtttt

SEQ ID NO: 626425 - DNA, 15 bp, Homo sapiens
gtgctggtagttttc

SEQ ID NO: 626426 - DNA, 15 bp, Homo sapiens
tgctggtagttttct

SEQ ID NO: 626427 - DNA, 15 bp, Homo sapiens
gctggtagttttctc

SEQ ID NO: 626428 - DNA, 15 bp, Homo sapiens
ctggtagttttctcc

SEQ ID NO: 626429 - DNA, 15 bp, Homo sapiens
tggtagttttctcct

SEQ ID NO: 626430 - DNA, 15 bp, Homo sapiens
ggtagttttctccta

SEQ ID NO: 626431 - DNA, 15 bp, Homo sapiens
gtagttttctcctaa

SEQ ID NO: 626432 - DNA, 15 bp, Homo sapiens
tagttttctcctaaa

SEQ ID NO: 626433 - DNA, 15 bp, Homo sapiens
agttttctcctaaac

SEQ ID NO: 626434 - DNA, 15 bp, Homo sapiens
gttttctcctaaacc

SEQ ID NO: 626435 - DNA, 15 bp, Homo sapiens
ttttctcctaaacca

SEQ ID NO: 626436 - DNA, 15 bp, Homo sapiens
tttctcctaaaccat

SEQ ID NO: 626437 - DNA, 15 bp, Homo sapiens
ttctcctaaaccatc

SEQ ID NO: 626438 - DNA, 15 bp, Homo sapiens
tctcctaaaccatcc

SEQ ID NO: 626439 - DNA, 15 bp, Homo sapiens
ctcctaaaccatcct

SEQ ID NO: 626440 - DNA, 15 bp, Homo sapiens
tcctaaaccatcctt

SEQ ID NO: 626441 - DNA, 15 bp, Homo sapiens
cctaaaccatccttt

SEQ ID NO: 626442 - DNA, 15 bp, Homo sapiens
ctaaaccatcctttg

SEQ ID NO: 626443 - DNA, 15 bp, Homo sapiens
taaaccatcctttgc

SEQ ID NO: 626444 - DNA, 15 bp, Homo sapiens
aaaccatcctttgct

SEQ ID NO: 626445 - DNA, 15 bp, Homo sapiens
aaccatcctttgctc

SEQ ID NO: 626446 - DNA, 15 bp, Homo sapiens
accatcctttgctct

SEQ ID NO: 626447 - DNA, 15 bp, Homo sapiens
ccatcctttgctctt

SEQ ID NO: 626448 - DNA, 15 bp, Homo sapiens
catcctttgctcttt

SEQ ID NO: 626449 - DNA, 15 bp, Homo sapiens
atcctttgctctttg

SEQ ID NO: 626450 - DNA, 15 bp, Homo sapiens
tcctttgctctttgt

SEQ ID NO: 626451 - DNA, 15 bp, Homo sapiens
cctttgctctttgtt

SEQ ID NO: 626452 - DNA, 15 bp, Homo sapiens
ctttgctctttgttc

SEQ ID NO: 626453 - DNA, 15 bp, Homo sapiens
tttgctctttgttcc

SEQ ID NO: 626454 - DNA, 15 bp, Homo sapiens
ttgctctttgttccc

SEQ ID NO: 626455 - DNA, 15 bp, Homo sapiens
tgctctttgttccct

SEQ ID NO: 626456 - DNA, 15 bp, Homo sapiens
gctctttgttccctc

SEQ ID NO: 626457 - DNA, 15 bp, Homo sapiens
ctctttgttccctct

SEQ ID NO: 626458 - DNA, 15 bp, Homo sapiens
tctttgttccctctt

SEQ ID NO: 626459 - DNA, 15 bp, Homo sapiens
ctttgttccctcttc

SEQ ID NO: 626460 - DNA, 15 bp, Homo sapiens
tttgttccctcttcc

SEQ ID NO: 626461 - DNA, 15 bp, Homo sapiens
ttgttccctcttccc

SEQ ID NO: 626462 - DNA, 15 bp, Homo sapiens
tgttccctcttcccc

SEQ ID NO: 626463 - DNA, 15 bp, Homo sapiens
gttccctcttcccct

SEQ ID NO: 626464 - DNA, 15 bp, Homo sapiens
ttccctcttcccctc

SEQ ID NO: 626465 - DNA, 15 bp, Homo sapiens
tccctcttcccctcc

SEQ ID NO: 626466 - DNA, 15 bp, Homo sapiens
ccctcttcccctcct

SEQ ID NO: 626467 - DNA, 15 bp, Homo sapiens
cctcttcccctcctt

SEQ ID NO: 626468 - DNA, 15 bp, Homo sapiens
ctcttcccctccttg

SEQ ID NO: 626469 - DNA, 15 bp, Homo sapiens
tcttcccctccttgc

SEQ ID NO: 626470 - DNA, 15 bp, Homo sapiens
cttcccctccttgct

SEQ ID NO: 626471 - DNA, 15 bp, Homo sapiens
ttcccctccttgctc

SEQ ID NO: 626472 - DNA, 15 bp, Homo sapiens
tcccctccttgctct

SEQ ID NO: 626473 - DNA, 15 bp, Homo sapiens
cccctccttgctctc

SEQ ID NO: 626474 - DNA, 15 bp, Homo sapiens
ccctccttgctctca

SEQ ID NO: 626475 - DNA, 15 bp, Homo sapiens
cctccttgctctcac

SEQ ID NO: 626476 - DNA, 15 bp, Homo sapiens
ctccttgctctcacc

SEQ ID NO: 626477 - DNA, 15 bp, Homo sapiens
tccttgctctcaccc

SEQ ID NO: 626478 - DNA, 15 bp, Homo sapiens
ccttgctctcaccct

SEQ ID NO: 626479 - DNA, 15 bp, Homo sapiens
cttgctctcaccctg

SEQ ID NO: 626480 - DNA, 15 bp, Homo sapiens
ttgctctcaccctgt

SEQ ID NO: 626481 - DNA, 15 bp, Homo sapiens
tgctctcaccctgtc

SEQ ID NO: 626482 - DNA, 15 bp, Homo sapiens
gctctcaccctgtct

SEQ ID NO: 626483 - DNA, 15 bp, Homo sapiens
ctctcaccctgtctc

SEQ ID NO: 626484 - DNA, 15 bp, Homo sapiens
tctcaccctgtctca

SEQ ID NO: 626485 - DNA, 15 bp, Homo sapiens
ctcaccctgtctcag

SEQ ID NO: 626486 - DNA, 15 bp, Homo sapiens
tcaccctgtctcagt

SEQ ID NO: 626487 - DNA, 15 bp, Homo sapiens
caccctgtctcagtt

SEQ ID NO: 626488 - DNA, 15 bp, Homo sapiens
accctgtctcagttc

SEQ ID NO: 626489 - DNA, 15 bp, Homo sapiens
ccctgtctcagttct

SEQ ID NO: 626490 - DNA, 15 bp, Homo sapiens
cctgtctcagttctc

SEQ ID NO: 626491 - DNA, 15 bp, Homo sapiens
ctgtctcagttctca

SEQ ID NO: 626492 - DNA, 15 bp, Homo sapiens
tgtctcagttctcag

SEQ ID NO: 626493 - DNA, 15 bp, Homo sapiens
gtctcagttctcagt

SEQ ID NO: 626494 - DNA, 15 bp, Homo sapiens
tctcagttctcagtc

SEQ ID NO: 626495 - DNA, 15 bp, Homo sapiens
ctcagttctcagtcc

SEQ ID NO: 626496 - DNA, 15 bp, Homo sapiens
tcagttctcagtccg

SEQ ID NO: 626497 - DNA, 15 bp, Homo sapiens
cagttctcagtccgg

SEQ ID NO: 626498 - DNA, 15 bp, Homo sapiens
agttctcagtccggt

SEQ ID NO: 626499 - DNA, 15 bp, Homo sapiens
gttctcagtccggtt

SEQ ID NO: 626500 - DNA, 15 bp, Homo sapiens
ttctcagtccggttt

SEQ ID NO: 626501 - DNA, 15 bp, Homo sapiens
tctcagtccggtttc

SEQ ID NO: 626502 - DNA, 15 bp, Homo sapiens
ctcagtccggtttct

SEQ ID NO: 626503 - DNA, 15 bp, Homo sapiens
tcagtccggtttctt

SEQ ID NO: 626504 - DNA, 15 bp, Homo sapiens
cagtccggtttcttc

SEQ ID NO: 626505 - DNA, 15 bp, Homo sapiens
agtccggtttcttcg

SEQ ID NO: 626506 - DNA, 15 bp, Homo sapiens
gtccggtttcttcgt

SEQ ID NO: 626507 - DNA, 15 bp, Homo sapiens
tccggtttcttcgta

SEQ ID NO: 626508 - DNA, 15 bp, Homo sapiens
ccggtttcttcgtat

SEQ ID NO: 626509 - DNA, 15 bp, Homo sapiens
cggtttcttcgtatc

SEQ ID NO: 626510 - DNA, 15 bp, Homo sapiens
ggtttcttcgtatct

SEQ ID NO: 626511 - DNA, 15 bp, Homo sapiens
gtttcttcgtatctt

SEQ ID NO: 626512 - DNA, 15 bp, Homo sapiens
tttcttcgtatcttg

SEQ ID NO: 626513 - DNA, 15 bp, Homo sapiens
ttcttcgtatcttgc

SEQ ID NO: 626514 - DNA, 15 bp, Homo sapiens
tcttcgtatcttgca

SEQ ID NO: 626515 - DNA, 15 bp, Homo sapiens
cttcgtatcttgcag

SEQ ID NO: 626516 - DNA, 15 bp, Homo sapiens
ttcgtatcttgcaga

SEQ ID NO: 626517 - DNA, 15 bp, Homo sapiens
tcgtatcttgcagat

SEQ ID NO: 626518 - DNA, 15 bp, Homo sapiens
cgtatcttgcagatt

SEQ ID NO: 626519 - DNA, 15 bp, Homo sapiens
gtatcttgcagattt

SEQ ID NO: 626520 - DNA, 15 bp, Homo sapiens
tatcttgcagattta

SEQ ID NO: 626521 - DNA, 15 bp, Homo sapiens
atcttgcagatttat

SEQ ID NO: 626522 - DNA, 15 bp, Homo sapiens
tcttgcagatttatc

SEQ ID NO: 626523 - DNA, 15 bp, Homo sapiens
cttgcagatttatcc

SEQ ID NO: 626524 - DNA, 15 bp, Homo sapiens
ttgcagatttatcca

SEQ ID NO: 626525 - DNA, 15 bp, Homo sapiens
tgcagatttatccag

SEQ ID NO: 626526 - DNA, 15 bp, Homo sapiens
gcagatttatccagg

SEQ ID NO: 626527 - DNA, 15 bp, Homo sapiens
cagatttatccaggc

SEQ ID NO: 626528 - DNA, 15 bp, Homo sapiens
agatttatccaggca

SEQ ID NO: 626529 - DNA, 15 bp, Homo sapiens
gatttatccaggcac

SEQ ID NO: 626530 - DNA, 15 bp, Homo sapiens
atttatccaggcacc

SEQ ID NO: 626531 - DNA, 15 bp, Homo sapiens
tttatccaggcacct

SEQ ID NO: 626532 - DNA, 15 bp, Homo sapiens
ttatccaggcacctc

SEQ ID NO: 626533 - DNA, 15 bp, Homo sapiens
tatccaggcacctcc

SEQ ID NO: 626534 - DNA, 15 bp, Homo sapiens
atccaggcacctcca

SEQ ID NO: 626535 - DNA, 15 bp, Homo sapiens
tccaggcacctccag

SEQ ID NO: 626536 - DNA, 15 bp, Homo sapiens
ccaggcacctccagc

SEQ ID NO: 626537 - DNA, 15 bp, Homo sapiens
caggcacctccagcc

SEQ ID NO: 626538 - DNA, 15 bp, Homo sapiens
aggcacctccagccc

SEQ ID NO: 626539 - DNA, 15 bp, Homo sapiens
ggcacctccagccca

SEQ ID NO: 626540 - DNA, 15 bp, Homo sapiens
gcacctccagcccag

SEQ ID NO: 626541 - DNA, 15 bp, Homo sapiens
cacctccagcccagc

SEQ ID NO: 626542 - DNA, 15 bp, Homo sapiens
acctccagcccagca

SEQ ID NO: 626543 - DNA, 15 bp, Homo sapiens
cctccagcccagcag

SEQ ID NO: 626544 - DNA, 15 bp, Homo sapiens
ctccagcccagcagt

SEQ ID NO: 626545 - DNA, 15 bp, Homo sapiens
tccagcccagcagtg

SEQ ID NO: 626546 - DNA, 15 bp, Homo sapiens
ccagcccagcagtgg

SEQ ID NO: 626547 - DNA, 15 bp, Homo sapiens
cagcccagcagtgga

SEQ ID NO: 626548 - DNA, 15 bp, Homo sapiens
agcccagcagtggac

SEQ ID NO: 626549 - DNA, 15 bp, Homo sapiens
gcccagcagtggaca

SEQ ID NO: 626550 - DNA, 15 bp, Homo sapiens
cccagcagtggacag

SEQ ID NO: 626551 - DNA, 15 bp, Homo sapiens
ccagcagtggacagg

SEQ ID NO: 626552 - DNA, 15 bp, Homo sapiens
cagcagtggacaggc

SEQ ID NO: 626553 - DNA, 15 bp, Homo sapiens
agcagtggacaggct

SEQ ID NO: 626554 - DNA, 15 bp, Homo sapiens
gcagtggacaggctg

SEQ ID NO: 626555 - DNA, 15 bp, Homo sapiens
cagtggacaggctgt

SEQ ID NO: 626556 - DNA, 15 bp, Homo sapiens
agtggacaggctgtg

SEQ ID NO: 626557 - DNA, 15 bp, Homo sapiens
gtggacaggctgtgt

SEQ ID NO: 626558 - DNA, 15 bp, Homo sapiens
tggacaggctgtgtg

SEQ ID NO: 626559 - DNA, 15 bp, Homo sapiens
ggacaggctgtgtgt

SEQ ID NO: 626560 - DNA, 15 bp, Homo sapiens
gacaggctgtgtgtc

SEQ ID NO: 626561 - DNA, 15 bp, Homo sapiens
acaggctgtgtgtcg

SEQ ID NO: 626562 - DNA, 15 bp, Homo sapiens
caggctgtgtgtcgg

SEQ ID NO: 626563 - DNA, 15 bp, Homo sapiens
aggctgtgtgtcgga

SEQ ID NO: 626564 - DNA, 15 bp, Homo sapiens
ggctgtgtgtcggag

SEQ ID NO: 626565 - DNA, 15 bp, Homo sapiens
gctgtgtgtcggagt

SEQ ID NO: 626566 - DNA, 15 bp, Homo sapiens
ctgtgtgtcggagtt

SEQ ID NO: 626567 - DNA, 15 bp, Homo sapiens
tgtgtgtcggagttc

SEQ ID NO: 626568 - DNA, 15 bp, Homo sapiens
gtgtgtcggagttcg

SEQ ID NO: 626569 - DNA, 15 bp, Homo sapiens
tgtgtcggagttcgc

SEQ ID NO: 626570 - DNA, 15 bp, Homo sapiens
gtgtcggagttcgcc

SEQ ID NO: 626571 - DNA, 15 bp, Homo sapiens
tgtcggagttcgccc

SEQ ID NO: 626572 - DNA, 15 bp, Homo sapiens
gtcggagttcgccct

SEQ ID NO: 626573 - DNA, 15 bp, Homo sapiens
tcggagttcgccctg

SEQ ID NO: 626574 - DNA, 15 bp, Homo sapiens
cggagttcgccctgg

SEQ ID NO: 626575 - DNA, 15 bp, Homo sapiens
ggagttcgccctgga

SEQ ID NO: 626576 - DNA, 15 bp, Homo sapiens
gagttcgccctggag

SEQ ID NO: 626577 - DNA, 15 bp, Homo sapiens
agttcgccctggaga

SEQ ID NO: 626578 - DNA, 15 bp, Homo sapiens
gttcgccctggagag

SEQ ID NO: 626579 - DNA, 15 bp, Homo sapiens
ttcgccctggagagg

SEQ ID NO: 626580 - DNA, 15 bp, Homo sapiens
tcgccctggagaggt

SEQ ID NO: 626581 - DNA, 15 bp, Homo sapiens
cgccctggagaggtg

SEQ ID NO: 626582 - DNA, 15 bp, Homo sapiens
gccctggagaggtgg

SEQ ID NO: 626583 - DNA, 15 bp, Homo sapiens
ccctggagaggtggg

SEQ ID NO: 626584 - DNA, 15 bp, Homo sapiens
cctggagaggtgggt

SEQ ID NO: 626585 - DNA, 15 bp, Homo sapiens
ctggagaggtgggta

SEQ ID NO: 626586 - DNA, 15 bp, Homo sapiens
tggagaggtgggtac

SEQ ID NO: 626587 - DNA, 15 bp, Homo sapiens
ggagaggtgggtact

SEQ ID NO: 626588 - DNA, 15 bp, Homo sapiens
gagaggtgggtactc

SEQ ID NO: 626589 - DNA, 15 bp, Homo sapiens
agaggtgggtactct

SEQ ID NO: 626590 - DNA, 15 bp, Homo sapiens
gaggtgggtactctg

SEQ ID NO: 626591 - DNA, 15 bp, Homo sapiens
aggtgggtactctgc

SEQ ID NO: 626592 - DNA, 15 bp, Homo sapiens
ggtgggtactctgca

SEQ ID NO: 626593 - DNA, 15 bp, Homo sapiens
gtgggtactctgcag

SEQ ID NO: 626594 - DNA, 15 bp, Homo sapiens
tgggtactctgcaga

SEQ ID NO: 626595 - DNA, 15 bp, Homo sapiens
gggtactctgcagac

SEQ ID NO: 626596 - DNA, 15 bp, Homo sapiens
ggtactctgcagacc

SEQ ID NO: 626597 - DNA, 15 bp, Homo sapiens
gtactctgcagacca

SEQ ID NO: 626598 - DNA, 15 bp, Homo sapiens
tactctgcagaccac

SEQ ID NO: 626599 - DNA, 15 bp, Homo sapiens
actctgcagaccacg

SEQ ID NO: 626600 - DNA, 15 bp, Homo sapiens
ctctgcagaccacgt

SEQ ID NO: 626601 - DNA, 15 bp, Homo sapiens
tctgcagaccacgtg

SEQ ID NO: 626602 - DNA, 15 bp, Homo sapiens
ctgcagaccacgtgt

SEQ ID NO: 626603 - DNA, 15 bp, Homo sapiens
tgcagaccacgtgtg

SEQ ID NO: 626604 - DNA, 15 bp, Homo sapiens
gcagaccacgtgtga

SEQ ID NO: 626605 - DNA, 15 bp, Homo sapiens
cagaccacgtgtgaa

SEQ ID NO: 626606 - DNA, 15 bp, Homo sapiens
agaccacgtgtgaaa

SEQ ID NO: 626607 - DNA, 15 bp, Homo sapiens
gaccacgtgtgaaag

SEQ ID NO: 626608 - DNA, 15 bp, Homo sapiens
accacgtgtgaaagg

SEQ ID NO: 626609 - DNA, 15 bp, Homo sapiens
ccacgtgtgaaaggc

SEQ ID NO: 626610 - DNA, 15 bp, Homo sapiens
cacgtgtgaaaggct

SEQ ID NO: 626611 - DNA, 15 bp, Homo sapiens
acgtgtgaaaggctt

SEQ ID NO: 626612 - DNA, 15 bp, Homo sapiens
cgtgtgaaaggcttc

SEQ ID NO: 626613 - DNA, 15 bp, Homo sapiens
gtgtgaaaggcttcc

SEQ ID NO: 626614 - DNA, 15 bp, Homo sapiens
tgtgaaaggcttccg

SEQ ID NO: 626615 - DNA, 15 bp, Homo sapiens
gtgaaaggcttccga

SEQ ID NO: 626616 - DNA, 15 bp, Homo sapiens
tgaaaggcttccgaa

SEQ ID NO: 626617 - DNA, 15 bp, Homo sapiens
gaaaggcttccgaac

SEQ ID NO: 626618 - DNA, 15 bp, Homo sapiens
aaaggcttccgaaca

SEQ ID NO: 626619 - DNA, 15 bp, Homo sapiens
aaggcttccgaacat

SEQ ID NO: 626620 - DNA, 15 bp, Homo sapiens
aggcttccgaacatc

SEQ ID NO: 626621 - DNA, 15 bp, Homo sapiens
ggcttccgaacatca

SEQ ID NO: 626622 - DNA, 15 bp, Homo sapiens
gcttccgaacatcag

SEQ ID NO: 626623 - DNA, 15 bp, Homo sapiens
cttccgaacatcagc

SEQ ID NO: 626624 - DNA, 15 bp, Homo sapiens
ttccgaacatcagct

SEQ ID NO: 626625 - DNA, 15 bp, Homo sapiens
tccgaacatcagctc

SEQ ID NO: 626626 - DNA, 15 bp, Homo sapiens
ccgaacatcagctct

SEQ ID NO: 626627 - DNA, 15 bp, Homo sapiens
cgaacatcagctctt

SEQ ID NO: 626628 - DNA, 15 bp, Homo sapiens
gaacatcagctcttg

SEQ ID NO: 626629 - DNA, 15 bp, Homo sapiens
aacatcagctcttgt

SEQ ID NO: 626630 - DNA, 15 bp, Homo sapiens
acatcagctcttgtg

SEQ ID NO: 626631 - DNA, 15 bp, Homo sapiens
catcagctcttgtgc

SEQ ID NO: 626632 - DNA, 15 bp, Homo sapiens
atcagctcttgtgcc

SEQ ID NO: 626633 - DNA, 15 bp, Homo sapiens
tcagctcttgtgcct

SEQ ID NO: 626634 - DNA, 15 bp, Homo sapiens
cagctcttgtgcctg

SEQ ID NO: 626635 - DNA, 15 bp, Homo sapiens
agctcttgtgcctgc

SEQ ID NO: 626636 - DNA, 15 bp, Homo sapiens
gctcttgtgcctgcc

SEQ ID NO: 626637 - DNA, 15 bp, Homo sapiens
ctcttgtgcctgcct

SEQ ID NO: 626638 - DNA, 15 bp, Homo sapiens
tcttgtgcctgcctc

SEQ ID NO: 626639 - DNA, 15 bp, Homo sapiens
cttgtgcctgcctct

SEQ ID NO: 626640 - DNA, 15 bp, Homo sapiens
ttgtgcctgcctctc

SEQ ID NO: 626641 - DNA, 15 bp, Homo sapiens
tgtgcctgcctctcc

SEQ ID NO: 626642 - DNA, 15 bp, Homo sapiens
gtgcctgcctctcct

SEQ ID NO: 626643 - DNA, 15 bp, Homo sapiens
tgcctgcctctcctc

SEQ ID NO: 626644 - DNA, 15 bp, Homo sapiens
gcctgcctctcctcc

SEQ ID NO: 626645 - DNA, 15 bp, Homo sapiens
cctgcctctcctccc

SEQ ID NO: 626646 - DNA, 15 bp, Homo sapiens
ctgcctctcctcccc

SEQ ID NO: 626647 - DNA, 15 bp, Homo sapiens
tgcctctcctcccca

SEQ ID NO: 626648 - DNA, 15 bp, Homo sapiens
gcctctcctccccat

SEQ ID NO: 626649 - DNA, 15 bp, Homo sapiens
cctctcctccccata

SEQ ID NO: 626650 - DNA, 15 bp, Homo sapiens
ctctcctccccataa

SEQ ID NO: 626651 - DNA, 15 bp, Homo sapiens
tctcctccccataag

SEQ ID NO: 626652 - DNA, 15 bp, Homo sapiens
ctcctccccataagg

SEQ ID NO: 626653 - DNA, 15 bp, Homo sapiens
tcctccccataaggc

SEQ ID NO: 626654 - DNA, 15 bp, Homo sapiens
cctccccataaggca

SEQ ID NO: 626655 - DNA, 15 bp, Homo sapiens
ctccccataaggcag

SEQ ID NO: 626656 - DNA, 15 bp, Homo sapiens
tccccataaggcaga

SEQ ID NO: 626657 - DNA, 15 bp, Homo sapiens
ccccataaggcagag

SEQ ID NO: 626658 - DNA, 15 bp, Homo sapiens
cccataaggcagagc

SEQ ID NO: 626659 - DNA, 15 bp, Homo sapiens
ccataaggcagagct

SEQ ID NO: 626660 - DNA, 15 bp, Homo sapiens
cataaggcagagcta

SEQ ID NO: 626661 - DNA, 15 bp, Homo sapiens
ataaggcagagctat

SEQ ID NO: 626662 - DNA, 15 bp, Homo sapiens
taaggcagagctatt

SEQ ID NO: 626663 - DNA, 15 bp, Homo sapiens
aaggcagagctattc

SEQ ID NO: 626664 - DNA, 15 bp, Homo sapiens
aggcagagctattca

SEQ ID NO: 626665 - DNA, 15 bp, Homo sapiens
ggcagagctattcaa

SEQ ID NO: 626666 - DNA, 15 bp, Homo sapiens
gcagagctattcaat

SEQ ID NO: 626667 - DNA, 15 bp, Homo sapiens
cagagctattcaata

SEQ ID NO: 626668 - DNA, 15 bp, Homo sapiens
agagctattcaatag

SEQ ID NO: 626669 - DNA, 15 bp, Homo sapiens
gagctattcaatagg

SEQ ID NO: 626670 - DNA, 15 bp, Homo sapiens
agctattcaatagga

SEQ ID NO: 626671 - DNA, 15 bp, Homo sapiens
gctattcaataggaa

SEQ ID NO: 626672 - DNA, 15 bp, Homo sapiens
ctattcaataggaac

SEQ ID NO: 626673 - DNA, 15 bp, Homo sapiens
tattcaataggaaca

SEQ ID NO: 626674 - DNA, 15 bp, Homo sapiens
attcaataggaacat

SEQ ID NO: 626675 - DNA, 15 bp, Homo sapiens
ttcaataggaacata

SEQ ID NO: 626676 - DNA, 15 bp, Homo sapiens
tcaataggaacataa

SEQ ID NO: 626677 - DNA, 15 bp, Homo sapiens
caataggaacataat

SEQ ID NO: 626678 - DNA, 15 bp, Homo sapiens
aataggaacataatg

SEQ ID NO: 626679 - DNA, 15 bp, Homo sapiens
ataggaacataatgc

SEQ ID NO: 626680 - DNA, 15 bp, Homo sapiens
taggaacataatgcc

SEQ ID NO: 626681 - DNA, 15 bp, Homo sapiens
aggaacataatgcca

SEQ ID NO: 626682 - DNA, 15 bp, Homo sapiens
ggaacataatgccat

SEQ ID NO: 626683 - DNA, 15 bp, Homo sapiens
gaacataatgccata

SEQ ID NO: 626684 - DNA, 15 bp, Homo sapiens
aacataatgccataa

SEQ ID NO: 626685 - DNA, 15 bp, Homo sapiens
acataatgccataat

SEQ ID NO: 626686 - DNA, 15 bp, Homo sapiens
cataatgccataatg

SEQ ID NO: 626687 - DNA, 15 bp, Homo sapiens
ataatgccataatgc

SEQ ID NO: 626688 - DNA, 15 bp, Homo sapiens
taatgccataatgca

SEQ ID NO: 626689 - DNA, 15 bp, Homo sapiens
aatgccataatgcaa

SEQ ID NO: 626690 - DNA, 15 bp, Homo sapiens
atgccataatgcaag

SEQ ID NO: 626691 - DNA, 15 bp, Homo sapiens
tgccataatgcaagt

SEQ ID NO: 626692 - DNA, 15 bp, Homo sapiens
gccataatgcaagtc

SEQ ID NO: 626693 - DNA, 15 bp, Homo sapiens
ccataatgcaagtca

SEQ ID NO: 626694 - DNA, 15 bp, Homo sapiens
cataatgcaagtcac

SEQ ID NO: 626695 - DNA, 15 bp, Homo sapiens
ataatgcaagtcaca

SEQ ID NO: 626696 - DNA, 15 bp, Homo sapiens
taatgcaagtcacat

SEQ ID NO: 626697 - DNA, 15 bp, Homo sapiens
aatgcaagtcacata

SEQ ID NO: 626698 - DNA, 15 bp, Homo sapiens
atgcaagtcacatat

SEQ ID NO: 626699 - DNA, 15 bp, Homo sapiens
tgcaagtcacatatg

SEQ ID NO: 626700 - DNA, 15 bp, Homo sapiens
gcaagtcacatatgt

SEQ ID NO: 626701 - DNA, 15 bp, Homo sapiens
caagtcacatatgta

SEQ ID NO: 626702 - DNA, 15 bp, Homo sapiens
aagtcacatatgtaa

SEQ ID NO: 626703 - DNA, 15 bp, Homo sapiens
agtcacatatgtaat

SEQ ID NO: 626704 - DNA, 15 bp, Homo sapiens
gtcacatatgtaatt

SEQ ID NO: 626705 - DNA, 15 bp, Homo sapiens
tcacatatgtaattt

SEQ ID NO: 626706 - DNA, 15 bp, Homo sapiens
cacatatgtaatttt

SEQ ID NO: 626707 - DNA, 15 bp, Homo sapiens
acatatgtaatttta

SEQ ID NO: 626708 - DNA, 15 bp, Homo sapiens
catatgtaattttaa

SEQ ID NO: 626709 - DNA, 15 bp, Homo sapiens
atatgtaattttaaa

SEQ ID NO: 626710 - DNA, 15 bp, Homo sapiens
tatgtaattttaaat

SEQ ID NO: 626711 - DNA, 15 bp, Homo sapiens
atgtaattttaaatc

SEQ ID NO: 626712 - DNA, 15 bp, Homo sapiens
tgtaattttaaatct

SEQ ID NO: 626713 - DNA, 15 bp, Homo sapiens
gtaattttaaatctt

SEQ ID NO: 626714 - DNA, 15 bp, Homo sapiens
taattttaaatcttc

SEQ ID NO: 626715 - DNA, 15 bp, Homo sapiens
aattttaaatcttcc

SEQ ID NO: 626716 - DNA, 15 bp, Homo sapiens
attttaaatcttcca

SEQ ID NO: 626717 - DNA, 15 bp, Homo sapiens
ttttaaatcttccac

SEQ ID NO: 626718 - DNA, 15 bp, Homo sapiens
tttaaatcttccact

SEQ ID NO: 626719 - DNA, 15 bp, Homo sapiens
ttaaatcttccacta

SEQ ID NO: 626720 - DNA, 15 bp, Homo sapiens
taaatcttccactag

SEQ ID NO: 626721 - DNA, 15 bp, Homo sapiens
aaatcttccactagc

SEQ ID NO: 626722 - DNA, 15 bp, Homo sapiens
aatcttccactagcc

SEQ ID NO: 626723 - DNA, 15 bp, Homo sapiens
atcttccactagcca

SEQ ID NO: 626724 - DNA, 15 bp, Homo sapiens
tcttccactagccac

SEQ ID NO: 626725 - DNA, 15 bp, Homo sapiens
cttccactagccaca

SEQ ID NO: 626726 - DNA, 15 bp, Homo sapiens
ttccactagccacat

SEQ ID NO: 626727 - DNA, 15 bp, Homo sapiens
tccactagccacatg

SEQ ID NO: 626728 - DNA, 15 bp, Homo sapiens
ccactagccacatga

SEQ ID NO: 626729 - DNA, 15 bp, Homo sapiens
cactagccacatgag

SEQ ID NO: 626730 - DNA, 15 bp, Homo sapiens
actagccacatgaga

SEQ ID NO: 626731 - DNA, 15 bp, Homo sapiens
ctagccacatgagaa

SEQ ID NO: 626732 - DNA, 15 bp, Homo sapiens
tagccacatgagaaa

SEQ ID NO: 626733 - DNA, 15 bp, Homo sapiens
agccacatgagaaaa

SEQ ID NO: 626734 - DNA, 15 bp, Homo sapiens
gccacatgagaaaag

SEQ ID NO: 626735 - DNA, 15 bp, Homo sapiens
ccacatgagaaaagt

SEQ ID NO: 626736 - DNA, 15 bp, Homo sapiens
cacatgagaaaagta

SEQ ID NO: 626737 - DNA, 15 bp, Homo sapiens
acatgagaaaagtaa

SEQ ID NO: 626738 - DNA, 15 bp, Homo sapiens
catgagaaaagtaaa

SEQ ID NO: 626739 - DNA, 15 bp, Homo sapiens
atgagaaaagtaaaa

SEQ ID NO: 626740 - DNA, 15 bp, Homo sapiens
tgagaaaagtaaaaa

SEQ ID NO: 626741 - DNA, 15 bp, Homo sapiens
gagaaaagtaaaaag

SEQ ID NO: 626742 - DNA, 15 bp, Homo sapiens
agaaaagtaaaaaga

SEQ ID NO: 626743 - DNA, 15 bp, Homo sapiens
gaaaagtaaaaagaa

SEQ ID NO: 626744 - DNA, 15 bp, Homo sapiens
aaaagtaaaaagaaa

SEQ ID NO: 626745 - DNA, 15 bp, Homo sapiens
aaagtaaaaagaaaa

SEQ ID NO: 626746 - DNA, 15 bp, Homo sapiens
aagtaaaaagaaaat

SEQ ID NO: 626747 - DNA, 15 bp, Homo sapiens
agtaaaaagaaaata

SEQ ID NO: 626748 - DNA, 15 bp, Homo sapiens
gtaaaaagaaaatag

SEQ ID NO: 626749 - DNA, 15 bp, Homo sapiens
taaaaagaaaatagg

SEQ ID NO: 626750 - DNA, 15 bp, Homo sapiens
aaaaagaaaataggt

SEQ ID NO: 626751 - DNA, 15 bp, Homo sapiens
aaaagaaaataggta

SEQ ID NO: 626752 - DNA, 15 bp, Homo sapiens
aaagaaaataggtaa

SEQ ID NO: 626753 - DNA, 15 bp, Homo sapiens
aagaaaataggtaaa

SEQ ID NO: 626754 - DNA, 15 bp, Homo sapiens
agaaaataggtaaaa

SEQ ID NO: 626755 - DNA, 15 bp, Homo sapiens
gaaaataggtaaaat

SEQ ID NO: 626756 - DNA, 15 bp, Homo sapiens
aaaataggtaaaatt

SEQ ID NO: 626757 - DNA, 15 bp, Homo sapiens
aaataggtaaaatta

SEQ ID NO: 626758 - DNA, 15 bp, Homo sapiens
aataggtaaaattaa

SEQ ID NO: 626759 - DNA, 15 bp, Homo sapiens
ataggtaaaattaat

SEQ ID NO: 626760 - DNA, 15 bp, Homo sapiens
taggtaaaattaatt

SEQ ID NO: 626761 - DNA, 15 bp, Homo sapiens
aggtaaaattaattt

SEQ ID NO: 626762 - DNA, 15 bp, Homo sapiens
ggtaaaattaatttc

SEQ ID NO: 626763 - DNA, 15 bp, Homo sapiens
gtaaaattaatttca

SEQ ID NO: 626764 - DNA, 15 bp, Homo sapiens
taaaattaatttcat

SEQ ID NO: 626765 - DNA, 15 bp, Homo sapiens
aaaattaatttcatt

SEQ ID NO: 626766 - DNA, 15 bp, Homo sapiens
aaattaatttcatta

SEQ ID NO: 626767 - DNA, 15 bp, Homo sapiens
aattaatttcattag

SEQ ID NO: 626768 - DNA, 15 bp, Homo sapiens
attaatttcattagt

SEQ ID NO: 626769 - DNA, 15 bp, Homo sapiens
ttaatttcattagta

SEQ ID NO: 626770 - DNA, 15 bp, Homo sapiens
taatttcattagtat

SEQ ID NO: 626771 - DNA, 15 bp, Homo sapiens
aatttcattagtatt

SEQ ID NO: 626772 - DNA, 15 bp, Homo sapiens
atttcattagtattt

SEQ ID NO: 626773 - DNA, 15 bp, Homo sapiens
tttcattagtatttt

SEQ ID NO: 626774 - DNA, 15 bp, Homo sapiens
ttcattagtattttt

SEQ ID NO: 626775 - DNA, 15 bp, Homo sapiens
tcattagtatttttt

SEQ ID NO: 626776 - DNA, 15 bp, Homo sapiens
cattagtatttttta

SEQ ID NO: 626777 - DNA, 15 bp, Homo sapiens
attagtattttttat

SEQ ID NO: 626778 - DNA, 15 bp, Homo sapiens
ttagtattttttatt

SEQ ID NO: 626779 - DNA, 15 bp, Homo sapiens
tagtattttttattt

SEQ ID NO: 626780 - DNA, 15 bp, Homo sapiens
agtattttttatttt

SEQ ID NO: 626781 - DNA, 15 bp, Homo sapiens
gtattttttatttta

SEQ ID NO: 626782 - DNA, 15 bp, Homo sapiens
tattttttattttac

SEQ ID NO: 626783 - DNA, 15 bp, Homo sapiens
attttttattttact

SEQ ID NO: 626784 - DNA, 15 bp, Homo sapiens
ttttttattttactc

SEQ ID NO: 626785 - DNA, 15 bp, Homo sapiens
tttttattttactca

SEQ ID NO: 626786 - DNA, 15 bp, Homo sapiens
ttttattttactcaa

SEQ ID NO: 626787 - DNA, 15 bp, Homo sapiens
tttattttactcaat

SEQ ID NO: 626788 - DNA, 15 bp, Homo sapiens
ttattttactcaata

SEQ ID NO: 626789 - DNA, 15 bp, Homo sapiens
tattttactcaatat

SEQ ID NO: 626790 - DNA, 15 bp, Homo sapiens
attttactcaatata

SEQ ID NO: 626791 - DNA, 15 bp, Homo sapiens
ttttactcaatataa

SEQ ID NO: 626792 - DNA, 15 bp, Homo sapiens
tttactcaatataac

SEQ ID NO: 626793 - DNA, 15 bp, Homo sapiens
ttactcaatataacc

SEQ ID NO: 626794 - DNA, 15 bp, Homo sapiens
tactcaatataacca

SEQ ID NO: 626795 - DNA, 15 bp, Homo sapiens
actcaatataaccaa

SEQ ID NO: 626796 - DNA, 15 bp, Homo sapiens
ctcaatataaccaaa

SEQ ID NO: 626797 - DNA, 15 bp, Homo sapiens
tcaatataaccaaaa

SEQ ID NO: 626798 - DNA, 15 bp, Homo sapiens
caatataaccaaaat

SEQ ID NO: 626799 - DNA, 15 bp, Homo sapiens
aatataaccaaaata

SEQ ID NO: 626800 - DNA, 15 bp, Homo sapiens
atataaccaaaatat

SEQ ID NO: 626801 - DNA, 15 bp, Homo sapiens
tataaccaaaatatt

SEQ ID NO: 626802 - DNA, 15 bp, Homo sapiens
ataaccaaaatatta

SEQ ID NO: 626803 - DNA, 15 bp, Homo sapiens
taaccaaaatattat

SEQ ID NO: 626804 - DNA, 15 bp, Homo sapiens
aaccaaaatattatt

SEQ ID NO: 626805 - DNA, 15 bp, Homo sapiens
accaaaatattattt

SEQ ID NO: 626806 - DNA, 15 bp, Homo sapiens
ccaaaatattatttc

SEQ ID NO: 626807 - DNA, 15 bp, Homo sapiens
caaaatattatttca

SEQ ID NO: 626808 - DNA, 15 bp, Homo sapiens
aaaatattatttcaa

SEQ ID NO: 626809 - DNA, 15 bp, Homo sapiens
aaatattatttcaaa

SEQ ID NO: 626810 - DNA, 15 bp, Homo sapiens
aatattatttcaaaa

SEQ ID NO: 626811 - DNA, 15 bp, Homo sapiens
atattatttcaaaat

SEQ ID NO: 626812 - DNA, 15 bp, Homo sapiens
tattatttcaaaatg

SEQ ID NO: 626813 - DNA, 15 bp, Homo sapiens
attatttcaaaatgt

SEQ ID NO: 626814 - DNA, 15 bp, Homo sapiens
ttatttcaaaatgta

SEQ ID NO: 626815 - DNA, 15 bp, Homo sapiens
tatttcaaaatgtaa

SEQ ID NO: 626816 - DNA, 15 bp, Homo sapiens
atttcaaaatgtaat

SEQ ID NO: 626817 - DNA, 15 bp, Homo sapiens
tttcaaaatgtaatt

SEQ ID NO: 626818 - DNA, 15 bp, Homo sapiens
ttcaaaatgtaatta

SEQ ID NO: 626819 - DNA, 15 bp, Homo sapiens
tcaaaatgtaattaa

SEQ ID NO: 626820 - DNA, 15 bp, Homo sapiens
caaaatgtaattaat

SEQ ID NO: 626821 - DNA, 15 bp, Homo sapiens
aaaatgtaattaata

SEQ ID NO: 626822 - DNA, 15 bp, Homo sapiens
aaatgtaattaatag

SEQ ID NO: 626823 - DNA, 15 bp, Homo sapiens
aatgtaattaataga

SEQ ID NO: 626824 - DNA, 15 bp, Homo sapiens
atgtaattaatagaa

SEQ ID NO: 626825 - DNA, 15 bp, Homo sapiens
tgtaattaatagaaa

SEQ ID NO: 626826 - DNA, 15 bp, Homo sapiens
gtaattaatagaaaa

SEQ ID NO: 626827 - DNA, 15 bp, Homo sapiens
taattaatagaaaac

SEQ ID NO: 626828 - DNA, 15 bp, Homo sapiens
aattaatagaaaacc

SEQ ID NO: 626829 - DNA, 15 bp, Homo sapiens
attaatagaaaacct

SEQ ID NO: 626830 - DNA, 15 bp, Homo sapiens
ttaatagaaaacctt

SEQ ID NO: 626831 - DNA, 15 bp, Homo sapiens
taatagaaaacctta

SEQ ID NO: 626832 - DNA, 15 bp, Homo sapiens
aatagaaaaccttat

SEQ ID NO: 626833 - DNA, 15 bp, Homo sapiens
atagaaaaccttatt

SEQ ID NO: 626834 - DNA, 15 bp, Homo sapiens
tagaaaaccttatta

SEQ ID NO: 626835 - DNA, 15 bp, Homo sapiens
agaaaaccttattaa

SEQ ID NO: 626836 - DNA, 15 bp, Homo sapiens
gaaaaccttattaat

SEQ ID NO: 626837 - DNA, 15 bp, Homo sapiens
aaaaccttattaatg

SEQ ID NO: 626838 - DNA, 15 bp, Homo sapiens
aaaccttattaatga

SEQ ID NO: 626839 - DNA, 15 bp, Homo sapiens
aaccttattaatgaa

SEQ ID NO: 626840 - DNA, 15 bp, Homo sapiens
accttattaatgaaa

SEQ ID NO: 626841 - DNA, 15 bp, Homo sapiens
ccttattaatgaaat

SEQ ID NO: 626842 - DNA, 15 bp, Homo sapiens
cttattaatgaaata

SEQ ID NO: 626843 - DNA, 15 bp, Homo sapiens
ttattaatgaaatat

SEQ ID NO: 626844 - DNA, 15 bp, Homo sapiens
tattaatgaaatatt

SEQ ID NO: 626845 - DNA, 15 bp, Homo sapiens
attaatgaaatattt

SEQ ID NO: 626846 - DNA, 15 bp, Homo sapiens
ttaatgaaatatttg

SEQ ID NO: 626847 - DNA, 15 bp, Homo sapiens
taatgaaatatttga

SEQ ID NO: 626848 - DNA, 15 bp, Homo sapiens
aatgaaatatttgac

SEQ ID NO: 626849 - DNA, 15 bp, Homo sapiens
atgaaatatttgaca

SEQ ID NO: 626850 - DNA, 15 bp, Homo sapiens
tgaaatatttgacaa

SEQ ID NO: 626851 - DNA, 15 bp, Homo sapiens
gaaatatttgacaat

SEQ ID NO: 626852 - DNA, 15 bp, Homo sapiens
aaatatttgacaatt

SEQ ID NO: 626853 - DNA, 15 bp, Homo sapiens
aatatttgacaattt

SEQ ID NO: 626854 - DNA, 15 bp, Homo sapiens
atatttgacaatttc

SEQ ID NO: 626855 - DNA, 15 bp, Homo sapiens
tatttgacaatttct

SEQ ID NO: 626856 - DNA, 15 bp, Homo sapiens
atttgacaatttctc

SEQ ID NO: 626857 - DNA, 15 bp, Homo sapiens
tttgacaatttctcg

SEQ ID NO: 626858 - DNA, 15 bp, Homo sapiens
ttgacaatttctcgt

SEQ ID NO: 626859 - DNA, 15 bp, Homo sapiens
tgacaatttctcgtt

SEQ ID NO: 626860 - DNA, 15 bp, Homo sapiens
gacaatttctcgttg

SEQ ID NO: 626861 - DNA, 15 bp, Homo sapiens
acaatttctcgttgt

SEQ ID NO: 626862 - DNA, 15 bp, Homo sapiens
caatttctcgttgtt

SEQ ID NO: 626863 - DNA, 15 bp, Homo sapiens
aatttctcgttgttt

SEQ ID NO: 626864 - DNA, 15 bp, Homo sapiens
atttctcgttgtttt

SEQ ID NO: 626865 - DNA, 15 bp, Homo sapiens
tttctcgttgttttt

SEQ ID NO: 626866 - DNA, 15 bp, Homo sapiens
ttctcgttgttttta

SEQ ID NO: 626867 - DNA, 15 bp, Homo sapiens
tctcgttgtttttaa

SEQ ID NO: 626868 - DNA, 15 bp, Homo sapiens
ctcgttgtttttaag

SEQ ID NO: 626869 - DNA, 15 bp, Homo sapiens
tcgttgtttttaagt

SEQ ID NO: 626870 - DNA, 15 bp, Homo sapiens
cgttgtttttaagtc

SEQ ID NO: 626871 - DNA, 15 bp, Homo sapiens
gttgtttttaagtct

SEQ ID NO: 626872 - DNA, 15 bp, Homo sapiens
ttgtttttaagtctt

SEQ ID NO: 626873 - DNA, 15 bp, Homo sapiens
tgtttttaagtcttt

SEQ ID NO: 626874 - DNA, 15 bp, Homo sapiens
gtttttaagtctttg

SEQ ID NO: 626875 - DNA, 15 bp, Homo sapiens
tttttaagtctttga

SEQ ID NO: 626876 - DNA, 15 bp, Homo sapiens
ttttaagtctttgaa

SEQ ID NO: 626877 - DNA, 15 bp, Homo sapiens
tttaagtctttgaat

SEQ ID NO: 626878 - DNA, 15 bp, Homo sapiens
ttaagtctttgaatc

SEQ ID NO: 626879 - DNA, 15 bp, Homo sapiens
taagtctttgaatct

SEQ ID NO: 626880 - DNA, 15 bp, Homo sapiens
aagtctttgaatctt

SEQ ID NO: 626881 - DNA, 15 bp, Homo sapiens
agtctttgaatcttt

SEQ ID NO: 626882 - DNA, 15 bp, Homo sapiens
gtctttgaatcttta

SEQ ID NO: 626883 - DNA, 15 bp, Homo sapiens
tctttgaatctttac

SEQ ID NO: 626884 - DNA, 15 bp, Homo sapiens
ctttgaatctttaca

SEQ ID NO: 626885 - DNA, 15 bp, Homo sapiens
tttgaatctttacac

SEQ ID NO: 626886 - DNA, 15 bp, Homo sapiens
ttgaatctttacact

SEQ ID NO: 626887 - DNA, 15 bp, Homo sapiens
tgaatctttacactc

SEQ ID NO: 626888 - DNA, 15 bp, Homo sapiens
gaatctttacactca

SEQ ID NO: 626889 - DNA, 15 bp, Homo sapiens
aatctttacactcag

SEQ ID NO: 626890 - DNA, 15 bp, Homo sapiens
atctttacactcagg

SEQ ID NO: 626891 - DNA, 15 bp, Homo sapiens
tctttacactcaggg

SEQ ID NO: 626892 - DNA, 15 bp, Homo sapiens
ctttacactcagggc

SEQ ID NO: 626893 - DNA, 15 bp, Homo sapiens
tttacactcagggcc

SEQ ID NO: 626894 - DNA, 15 bp, Homo sapiens
ttacactcagggccc

SEQ ID NO: 626895 - DNA, 15 bp, Homo sapiens
tacactcagggcccg

SEQ ID NO: 626896 - DNA, 15 bp, Homo sapiens
acactcagggcccgt

SEQ ID NO: 626897 - DNA, 15 bp, Homo sapiens
cactcagggcccgtg

SEQ ID NO: 626898 - DNA, 15 bp, Homo sapiens
actcagggcccgtgt

SEQ ID NO: 626899 - DNA, 15 bp, Homo sapiens
ctcagggcccgtgtc

SEQ ID NO: 626900 - DNA, 15 bp, Homo sapiens
tcagggcccgtgtca

SEQ ID NO: 626901 - DNA, 15 bp, Homo sapiens
cagggcccgtgtcaa

SEQ ID NO: 626902 - DNA, 15 bp, Homo sapiens
agggcccgtgtcaac

SEQ ID NO: 626903 - DNA, 15 bp, Homo sapiens
gggcccgtgtcaact

SEQ ID NO: 626904 - DNA, 15 bp, Homo sapiens
ggcccgtgtcaactg

SEQ ID NO: 626905 - DNA, 15 bp, Homo sapiens
gcccgtgtcaactgg

SEQ ID NO: 626906 - DNA, 15 bp, Homo sapiens
cccgtgtcaactggg

SEQ ID NO: 626907 - DNA, 15 bp, Homo sapiens
ccgtgtcaactggga

SEQ ID NO: 626908 - DNA, 15 bp, Homo sapiens
cgtgtcaactgggac

SEQ ID NO: 626909 - DNA, 15 bp, Homo sapiens
gtgtcaactgggact

SEQ ID NO: 626910 - DNA, 15 bp, Homo sapiens
tgtcaactgggactt

SEQ ID NO: 626911 - DNA, 15 bp, Homo sapiens
gtcaactgggactta

SEQ ID NO: 626912 - DNA, 15 bp, Homo sapiens
tcaactgggacttag

SEQ ID NO: 626913 - DNA, 15 bp, Homo sapiens
caactgggacttaga

SEQ ID NO: 626914 - DNA, 15 bp, Homo sapiens
aactgggacttagat

SEQ ID NO: 626915 - DNA, 15 bp, Homo sapiens
actgggacttagatg

SEQ ID NO: 626916 - DNA, 15 bp, Homo sapiens
ctgggacttagatgt

SEQ ID NO: 626917 - DNA, 15 bp, Homo sapiens
tgggacttagatgtg

SEQ ID NO: 626918 - DNA, 15 bp, Homo sapiens
gggacttagatgtgt

SEQ ID NO: 626919 - DNA, 15 bp, Homo sapiens
ggacttagatgtgtt

SEQ ID NO: 626920 - DNA, 15 bp, Homo sapiens
gacttagatgtgttt

SEQ ID NO: 626921 - DNA, 15 bp, Homo sapiens
acttagatgtgtttc

SEQ ID NO: 626922 - DNA, 15 bp, Homo sapiens
cttagatgtgtttca

SEQ ID NO: 626923 - DNA, 15 bp, Homo sapiens
ttagatgtgtttcaa

SEQ ID NO: 626924 - DNA, 15 bp, Homo sapiens
tagatgtgtttcaag

SEQ ID NO: 626925 - DNA, 15 bp, Homo sapiens
agatgtgtttcaagt

SEQ ID NO: 626926 - DNA, 15 bp, Homo sapiens
gatgtgtttcaagtg

SEQ ID NO: 626927 - DNA, 15 bp, Homo sapiens
atgtgtttcaagtgc

SEQ ID NO: 626928 - DNA, 15 bp, Homo sapiens
tgtgtttcaagtgct

SEQ ID NO: 626929 - DNA, 15 bp, Homo sapiens
gtgtttcaagtgctt

SEQ ID NO: 626930 - DNA, 15 bp, Homo sapiens
tgtttcaagtgctta

SEQ ID NO: 626931 - DNA, 15 bp, Homo sapiens
gtttcaagtgcttag

SEQ ID NO: 626932 - DNA, 15 bp, Homo sapiens
tttcaagtgcttagt

SEQ ID NO: 626933 - DNA, 15 bp, Homo sapiens
ttcaagtgcttagta

SEQ ID NO: 626934 - DNA, 15 bp, Homo sapiens
tcaagtgcttagtag

SEQ ID NO: 626935 - DNA, 15 bp, Homo sapiens
caagtgcttagtagc

SEQ ID NO: 626936 - DNA, 15 bp, Homo sapiens
aagtgcttagtagcc

SEQ ID NO: 626937 - DNA, 15 bp, Homo sapiens
agtgcttagtagcca

SEQ ID NO: 626938 - DNA, 15 bp, Homo sapiens
gtgcttagtagccac

SEQ ID NO: 626939 - DNA, 15 bp, Homo sapiens
tgcttagtagccaca

SEQ ID NO: 626940 - DNA, 15 bp, Homo sapiens
gcttagtagccacat

SEQ ID NO: 626941 - DNA, 15 bp, Homo sapiens
cttagtagccacata

SEQ ID NO: 626942 - DNA, 15 bp, Homo sapiens
ttagtagccacatat

SEQ ID NO: 626943 - DNA, 15 bp, Homo sapiens
tagtagccacatatg

SEQ ID NO: 626944 - DNA, 15 bp, Homo sapiens
agtagccacatatgg

SEQ ID NO: 626945 - DNA, 15 bp, Homo sapiens
gtagccacatatggc

SEQ ID NO: 626946 - DNA, 15 bp, Homo sapiens
tagccacatatggct

SEQ ID NO: 626947 - DNA, 15 bp, Homo sapiens
agccacatatggctc

SEQ ID NO: 626948 - DNA, 15 bp, Homo sapiens
gccacatatggctcg

SEQ ID NO: 626949 - DNA, 15 bp, Homo sapiens
ccacatatggctcgt

SEQ ID NO: 626950 - DNA, 15 bp, Homo sapiens
cacatatggctcgtg

SEQ ID NO: 626951 - DNA, 15 bp, Homo sapiens
acatatggctcgtgg

SEQ ID NO: 626952 - DNA, 15 bp, Homo sapiens
catatggctcgtggc

SEQ ID NO: 626953 - DNA, 15 bp, Homo sapiens
atatggctcgtggcc

SEQ ID NO: 626954 - DNA, 15 bp, Homo sapiens
tatggctcgtggcct

SEQ ID NO: 626955 - DNA, 15 bp, Homo sapiens
atggctcgtggcctc

SEQ ID NO: 626956 - DNA, 15 bp, Homo sapiens
tggctcgtggcctct

SEQ ID NO: 626957 - DNA, 15 bp, Homo sapiens
ggctcgtggcctctg

SEQ ID NO: 626958 - DNA, 15 bp, Homo sapiens
gctcgtggcctctga

SEQ ID NO: 626959 - DNA, 15 bp, Homo sapiens
ctcgtggcctctgat

SEQ ID NO: 626960 - DNA, 15 bp, Homo sapiens
tcgtggcctctgatg

SEQ ID NO: 626961 - DNA, 15 bp, Homo sapiens
cgtggcctctgatgg

SEQ ID NO: 626962 - DNA, 15 bp, Homo sapiens
gtggcctctgatggc

SEQ ID NO: 626963 - DNA, 15 bp, Homo sapiens
tggcctctgatggca

SEQ ID NO: 626964 - DNA, 15 bp, Homo sapiens
ggcctctgatggcag

SEQ ID NO: 626965 - DNA, 15 bp, Homo sapiens
gcctctgatggcagc

SEQ ID NO: 626966 - DNA, 15 bp, Homo sapiens
cctctgatggcagcc

SEQ ID NO: 626967 - DNA, 15 bp, Homo sapiens
ctctgatggcagccc

SEQ ID NO: 626968 - DNA, 15 bp, Homo sapiens
tctgatggcagccca

SEQ ID NO: 626969 - DNA, 15 bp, Homo sapiens
ctgatggcagcccag

SEQ ID NO: 626970 - DNA, 15 bp, Homo sapiens
tgatggcagcccagg

SEQ ID NO: 626971 - DNA, 15 bp, Homo sapiens
gatggcagcccaggt

SEQ ID NO: 626972 - DNA, 15 bp, Homo sapiens
atggcagcccaggtc

SEQ ID NO: 626973 - DNA, 15 bp, Homo sapiens
tggcagcccaggtct

SEQ ID NO: 626974 - DNA, 15 bp, Homo sapiens
ggcagcccaggtcta

SEQ ID NO: 626975 - DNA, 15 bp, Homo sapiens
gcagcccaggtctaa

SEQ ID NO: 626976 - DNA, 15 bp, Homo sapiens
cagcccaggtctaaa

SEQ ID NO: 626977 - DNA, 15 bp, Homo sapiens
agcccaggtctaaaa

SEQ ID NO: 626978 - DNA, 15 bp, Homo sapiens
gcccaggtctaaaat

SEQ ID NO: 626979 - DNA, 15 bp, Homo sapiens
cccaggtctaaaatt

SEQ ID NO: 626980 - DNA, 15 bp, Homo sapiens
ccaggtctaaaattc

SEQ ID NO: 626981 - DNA, 15 bp, Homo sapiens
caggtctaaaattcc

SEQ ID NO: 626982 - DNA, 15 bp, Homo sapiens
aggtctaaaattcct

SEQ ID NO: 626983 - DNA, 15 bp, Homo sapiens
ggtctaaaattcctc

SEQ ID NO: 626984 - DNA, 15 bp, Homo sapiens
gtctaaaattcctcc

SEQ ID NO: 626985 - DNA, 15 bp, Homo sapiens
tctaaaattcctccc

SEQ ID NO: 626986 - DNA, 15 bp, Homo sapiens
ctaaaattcctcccc

SEQ ID NO: 626987 - DNA, 15 bp, Homo sapiens
taaaattcctccccc

SEQ ID NO: 626988 - DNA, 15 bp, Homo sapiens
aaaattcctccccca

SEQ ID NO: 626989 - DNA, 15 bp, Homo sapiens
aaattcctcccccag

SEQ ID NO: 626990 - DNA, 15 bp, Homo sapiens
aattcctcccccagc

SEQ ID NO: 626991 - DNA, 15 bp, Homo sapiens
attcctcccccagct

SEQ ID NO: 626992 - DNA, 15 bp, Homo sapiens
ttcctcccccagctc

SEQ ID NO: 626993 - DNA, 15 bp, Homo sapiens
tcctcccccagctca

SEQ ID NO: 626994 - DNA, 15 bp, Homo sapiens
cctcccccagctcac

SEQ ID NO: 626995 - DNA, 15 bp, Homo sapiens
ctcccccagctcaca

SEQ ID NO: 626996 - DNA, 15 bp, Homo sapiens
tcccccagctcacac

SEQ ID NO: 626997 - DNA, 15 bp, Homo sapiens
cccccagctcacaca

SEQ ID NO: 626998 - DNA, 15 bp, Homo sapiens
ccccagctcacacac

SEQ ID NO: 626999 - DNA, 15 bp, Homo sapiens
cccagctcacacaca

SEQ ID NO: 627000 - DNA, 15 bp, Homo sapiens
ccagctcacacacac

SEQ ID NO: 627001 - DNA, 15 bp, Homo sapiens
cagctcacacacaca

SEQ ID NO: 627002 - DNA, 15 bp, Homo sapiens
agctcacacacacac

SEQ ID NO: 627003 - DNA, 15 bp, Homo sapiens
gctcacacacacact

SEQ ID NO: 627004 - DNA, 15 bp, Homo sapiens
ctcacacacacactt

SEQ ID NO: 627005 - DNA, 15 bp, Homo sapiens
tcacacacacactta

SEQ ID NO: 627006 - DNA, 15 bp, Homo sapiens
cacacacacacttac

SEQ ID NO: 627007 - DNA, 15 bp, Homo sapiens
acacacacacttacc

SEQ ID NO: 627008 - DNA, 15 bp, Homo sapiens
cacacacacttaccc

SEQ ID NO: 627009 - DNA, 15 bp, Homo sapiens
acacacacttaccct

SEQ ID NO: 627010 - DNA, 15 bp, Homo sapiens
cacacacttaccctg

SEQ ID NO: 627011 - DNA, 15 bp, Homo sapiens
acacacttaccctgg

SEQ ID NO: 627012 - DNA, 15 bp, Homo sapiens
cacacttaccctggg

SEQ ID NO: 627013 - DNA, 15 bp, Homo sapiens
acacttaccctgggg

SEQ ID NO: 627014 - DNA, 15 bp, Homo sapiens
cacttaccctggggc

SEQ ID NO: 627015 - DNA, 15 bp, Homo sapiens
acttaccctggggcc

SEQ ID NO: 627016 - DNA, 15 bp, Homo sapiens
cttaccctggggcct

SEQ ID NO: 627017 - DNA, 15 bp, Homo sapiens
ttaccctggggcctg

SEQ ID NO: 627018 - DNA, 15 bp, Homo sapiens
taccctggggcctga

SEQ ID NO: 627019 - DNA, 15 bp, Homo sapiens
accctggggcctgac

SEQ ID NO: 627020 - DNA, 15 bp, Homo sapiens
ccctggggcctgaca

SEQ ID NO: 627021 - DNA, 15 bp, Homo sapiens
cctggggcctgacat

SEQ ID NO: 627022 - DNA, 15 bp, Homo sapiens
ctggggcctgacatt

SEQ ID NO: 627023 - DNA, 15 bp, Homo sapiens
tggggcctgacattt

SEQ ID NO: 627024 - DNA, 15 bp, Homo sapiens
ggggcctgacatttt

SEQ ID NO: 627025 - DNA, 15 bp, Homo sapiens
gggcctgacatttta

SEQ ID NO: 627026 - DNA, 15 bp, Homo sapiens
ggcctgacattttag

SEQ ID NO: 627027 - DNA, 15 bp, Homo sapiens
gcctgacattttaga

SEQ ID NO: 627028 - DNA, 15 bp, Homo sapiens
cctgacattttagac

SEQ ID NO: 627029 - DNA, 15 bp, Homo sapiens
ctgacattttagacc

SEQ ID NO: 627030 - DNA, 15 bp, Homo sapiens
tgacattttagacct

SEQ ID NO: 627031 - DNA, 15 bp, Homo sapiens
gacattttagacctt

SEQ ID NO: 627032 - DNA, 15 bp, Homo sapiens
acattttagaccttc

SEQ ID NO: 627033 - DNA, 15 bp, Homo sapiens
cattttagaccttct

SEQ ID NO: 627034 - DNA, 15 bp, Homo sapiens
attttagaccttctt

SEQ ID NO: 627035 - DNA, 15 bp, Homo sapiens
ttttagaccttcttg

SEQ ID NO: 627036 - DNA, 15 bp, Homo sapiens
tttagaccttcttga

SEQ ID NO: 627037 - DNA, 15 bp, Homo sapiens
ttagaccttcttgat

SEQ ID NO: 627038 - DNA, 15 bp, Homo sapiens
tagaccttcttgatc

SEQ ID NO: 627039 - DNA, 15 bp, Homo sapiens
agaccttcttgatct

SEQ ID NO: 627040 - DNA, 15 bp, Homo sapiens
gaccttcttgatctc

SEQ ID NO: 627041 - DNA, 15 bp, Homo sapiens
accttcttgatctct

SEQ ID NO: 627042 - DNA, 15 bp, Homo sapiens
ccttcttgatctcta

SEQ ID NO: 627043 - DNA, 15 bp, Homo sapiens
cttcttgatctctag

SEQ ID NO: 627044 - DNA, 15 bp, Homo sapiens
ttcttgatctctagg

SEQ ID NO: 627045 - DNA, 15 bp, Homo sapiens
tcttgatctctaggg

SEQ ID NO: 627046 - DNA, 15 bp, Homo sapiens
cttgatctctagggc

SEQ ID NO: 627047 - DNA, 15 bp, Homo sapiens
ttgatctctagggcc

SEQ ID NO: 627048 - DNA, 15 bp, Homo sapiens
tgatctctagggcca

SEQ ID NO: 627049 - DNA, 15 bp, Homo sapiens
gatctctagggccag

SEQ ID NO: 627050 - DNA, 15 bp, Homo sapiens
atctctagggccagg

SEQ ID NO: 627051 - DNA, 15 bp, Homo sapiens
tctctagggccaggc

SEQ ID NO: 627052 - DNA, 15 bp, Homo sapiens
ctctagggccaggct

SEQ ID NO: 627053 - DNA, 15 bp, Homo sapiens
tctagggccaggcta

SEQ ID NO: 627054 - DNA, 15 bp, Homo sapiens
ctagggccaggctag

SEQ ID NO: 627055 - DNA, 15 bp, Homo sapiens
tagggccaggctagc

SEQ ID NO: 627056 - DNA, 15 bp, Homo sapiens
agggccaggctagct

SEQ ID NO: 627057 - DNA, 15 bp, Homo sapiens
gggccaggctagctc

SEQ ID NO: 627058 - DNA, 15 bp, Homo sapiens
ggccaggctagctct

SEQ ID NO: 627059 - DNA, 15 bp, Homo sapiens
gccaggctagctctg

SEQ ID NO: 627060 - DNA, 15 bp, Homo sapiens
ccaggctagctctgt

SEQ ID NO: 627061 - DNA, 15 bp, Homo sapiens
caggctagctctgtg

SEQ ID NO: 627062 - DNA, 15 bp, Homo sapiens
aggctagctctgtgt

SEQ ID NO: 627063 - DNA, 15 bp, Homo sapiens
ggctagctctgtgtt

SEQ ID NO: 627064 - DNA, 15 bp, Homo sapiens
gctagctctgtgttt

SEQ ID NO: 627065 - DNA, 15 bp, Homo sapiens
ctagctctgtgtttt

SEQ ID NO: 627066 - DNA, 15 bp, Homo sapiens
tagctctgtgttttc

SEQ ID NO: 627067 - DNA, 15 bp, Homo sapiens
agctctgtgttttct

SEQ ID NO: 627068 - DNA, 15 bp, Homo sapiens
gctctgtgttttctc

SEQ ID NO: 627069 - DNA, 15 bp, Homo sapiens
ctctgtgttttctcc

SEQ ID NO: 627070 - DNA, 15 bp, Homo sapiens
tctgtgttttctcct

SEQ ID NO: 627071 - DNA, 15 bp, Homo sapiens
ctgtgttttctccta

SEQ ID NO: 627072 - DNA, 15 bp, Homo sapiens
tgtgttttctcctag

SEQ ID NO: 627073 - DNA, 15 bp, Homo sapiens
gtgttttctcctagt

SEQ ID NO: 627074 - DNA, 15 bp, Homo sapiens
tgttttctcctagtg

SEQ ID NO: 627075 - DNA, 15 bp, Homo sapiens
gttttctcctagtgc

SEQ ID NO: 627076 - DNA, 15 bp, Homo sapiens
ttttctcctagtgct

SEQ ID NO: 627077 - DNA, 15 bp, Homo sapiens
tttctcctagtgctt

SEQ ID NO: 627078 - DNA, 15 bp, Homo sapiens
ttctcctagtgcttt

SEQ ID NO: 627079 - DNA, 15 bp, Homo sapiens
tctcctagtgctttg

SEQ ID NO: 627080 - DNA, 15 bp, Homo sapiens
ctcctagtgctttgg

SEQ ID NO: 627081 - DNA, 15 bp, Homo sapiens
tcctagtgctttggc

SEQ ID NO: 627082 - DNA, 15 bp, Homo sapiens
cctagtgctttggcc

SEQ ID NO: 627083 - DNA, 15 bp, Homo sapiens
ctagtgctttggcct

SEQ ID NO: 627084 - DNA, 15 bp, Homo sapiens
tagtgctttggcctc

SEQ ID NO: 627085 - DNA, 15 bp, Homo sapiens
agtgctttggcctcc

SEQ ID NO: 627086 - DNA, 15 bp, Homo sapiens
gtgctttggcctcct

SEQ ID NO: 627087 - DNA, 15 bp, Homo sapiens
tgctttggcctcctg

SEQ ID NO: 627088 - DNA, 15 bp, Homo sapiens
gctttggcctcctgg

SEQ ID NO: 627089 - DNA, 15 bp, Homo sapiens
ctttggcctcctggg

SEQ ID NO: 627090 - DNA, 15 bp, Homo sapiens
tttggcctcctggga

SEQ ID NO: 627091 - DNA, 15 bp, Homo sapiens
ttggcctcctgggag

SEQ ID NO: 627092 - DNA, 15 bp, Homo sapiens
tggcctcctgggagt

SEQ ID NO: 627093 - DNA, 15 bp, Homo sapiens
ggcctcctgggagtg

SEQ ID NO: 627094 - DNA, 15 bp, Homo sapiens
gcctcctgggagtga

SEQ ID NO: 627095 - DNA, 15 bp, Homo sapiens
cctcctgggagtgaa

SEQ ID NO: 627096 - DNA, 15 bp, Homo sapiens
ctcctgggagtgaat

SEQ ID NO: 627097 - DNA, 15 bp, Homo sapiens
tcctgggagtgaatg

SEQ ID NO: 627098 - DNA, 15 bp, Homo sapiens
cctgggagtgaatgg

SEQ ID NO: 627099 - DNA, 15 bp, Homo sapiens
ctgggagtgaatggt

SEQ ID NO: 627100 - DNA, 15 bp, Homo sapiens
tgggagtgaatggtg

SEQ ID NO: 627101 - DNA, 15 bp, Homo sapiens
gggagtgaatggtgc

SEQ ID NO: 627102 - DNA, 15 bp, Homo sapiens
ggagtgaatggtgcc

SEQ ID NO: 627103 - DNA, 15 bp, Homo sapiens
gagtgaatggtgccg

SEQ ID NO: 627104 - DNA, 15 bp, Homo sapiens
agtgaatggtgccgg

SEQ ID NO: 627105 - DNA, 15 bp, Homo sapiens
gtgaatggtgccggc

SEQ ID NO: 627106 - DNA, 15 bp, Homo sapiens
tgaatggtgccggca

SEQ ID NO: 627107 - DNA, 15 bp, Homo sapiens
gaatggtgccggcaa

SEQ ID NO: 627108 - DNA, 15 bp, Homo sapiens
aatggtgccggcaaa

SEQ ID NO: 627109 - DNA, 15 bp, Homo sapiens
atggtgccggcaaaa

SEQ ID NO: 627110 - DNA, 15 bp, Homo sapiens
tggtgccggcaaaac

SEQ ID NO: 627111 - DNA, 15 bp, Homo sapiens
ggtgccggcaaaaca

SEQ ID NO: 627112 - DNA, 15 bp, Homo sapiens
gtgccggcaaaacaa

SEQ ID NO: 627113 - DNA, 15 bp, Homo sapiens
tgccggcaaaacaac

SEQ ID NO: 627114 - DNA, 15 bp, Homo sapiens
gccggcaaaacaacc

SEQ ID NO: 627115 - DNA, 15 bp, Homo sapiens
ccggcaaaacaacca

SEQ ID NO: 627116 - DNA, 15 bp, Homo sapiens
cggcaaaacaaccac

SEQ ID NO: 627117 - DNA, 15 bp, Homo sapiens
ggcaaaacaaccaca

SEQ ID NO: 627118 - DNA, 15 bp, Homo sapiens
gcaaaacaaccacat

SEQ ID NO: 627119 - DNA, 15 bp, Homo sapiens
caaaacaaccacatt

SEQ ID NO: 627120 - DNA, 15 bp, Homo sapiens
aaaacaaccacattc

SEQ ID NO: 627121 - DNA, 15 bp, Homo sapiens
aaacaaccacattca

SEQ ID NO: 627122 - DNA, 15 bp, Homo sapiens
aacaaccacattcaa

SEQ ID NO: 627123 - DNA, 15 bp, Homo sapiens
acaaccacattcaag

SEQ ID NO: 627124 - DNA, 15 bp, Homo sapiens
caaccacattcaaga

SEQ ID NO: 627125 - DNA, 15 bp, Homo sapiens
aaccacattcaagat

SEQ ID NO: 627126 - DNA, 15 bp, Homo sapiens
accacattcaagatg

SEQ ID NO: 627127 - DNA, 15 bp, Homo sapiens
ccacattcaagatgc

SEQ ID NO: 627128 - DNA, 15 bp, Homo sapiens
cacattcaagatgct

SEQ ID NO: 627129 - DNA, 15 bp, Homo sapiens
acattcaagatgctc

SEQ ID NO: 627130 - DNA, 15 bp, Homo sapiens
cattcaagatgctca

SEQ ID NO: 627131 - DNA, 15 bp, Homo sapiens
attcaagatgctcac

SEQ ID NO: 627132 - DNA, 15 bp, Homo sapiens
ttcaagatgctcact

SEQ ID NO: 627133 - DNA, 15 bp, Homo sapiens
tcaagatgctcactg

SEQ ID NO: 627134 - DNA, 15 bp, Homo sapiens
caagatgctcactgg

SEQ ID NO: 627135 - DNA, 15 bp, Homo sapiens
aagatgctcactggg

SEQ ID NO: 627136 - DNA, 15 bp, Homo sapiens
agatgctcactgggg

SEQ ID NO: 627137 - DNA, 15 bp, Homo sapiens
gatgctcactgggga

SEQ ID NO: 627138 - DNA, 15 bp, Homo sapiens
atgctcactggggac

SEQ ID NO: 627139 - DNA, 15 bp, Homo sapiens
tgctcactggggaca

SEQ ID NO: 627140 - DNA, 15 bp, Homo sapiens
gctcactggggacac

SEQ ID NO: 627141 - DNA, 15 bp, Homo sapiens
ctcactggggacacc

SEQ ID NO: 627142 - DNA, 15 bp, Homo sapiens
tcactggggacacca

SEQ ID NO: 627143 - DNA, 15 bp, Homo sapiens
cactggggacaccac

SEQ ID NO: 627144 - DNA, 15 bp, Homo sapiens
actggggacaccaca

SEQ ID NO: 627145 - DNA, 15 bp, Homo sapiens
ctggggacaccacag

SEQ ID NO: 627146 - DNA, 15 bp, Homo sapiens
tggggacaccacagt

SEQ ID NO: 627147 - DNA, 15 bp, Homo sapiens
ggggacaccacagtg

SEQ ID NO: 627148 - DNA, 15 bp, Homo sapiens
gggacaccacagtga

SEQ ID NO: 627149 - DNA, 15 bp, Homo sapiens
ggacaccacagtgac

SEQ ID NO: 627150 - DNA, 15 bp, Homo sapiens
gacaccacagtgacc

SEQ ID NO: 627151 - DNA, 15 bp, Homo sapiens
acaccacagtgacct

SEQ ID NO: 627152 - DNA, 15 bp, Homo sapiens
caccacagtgacctc

SEQ ID NO: 627153 - DNA, 15 bp, Homo sapiens
accacagtgacctca

SEQ ID NO: 627154 - DNA, 15 bp, Homo sapiens
ccacagtgacctcag

SEQ ID NO: 627155 - DNA, 15 bp, Homo sapiens
cacagtgacctcagg

SEQ ID NO: 627156 - DNA, 15 bp, Homo sapiens
acagtgacctcaggg

SEQ ID NO: 627157 - DNA, 15 bp, Homo sapiens
cagtgacctcagggg

SEQ ID NO: 627158 - DNA, 15 bp, Homo sapiens
agtgacctcagggga

SEQ ID NO: 627159 - DNA, 15 bp, Homo sapiens
gtgacctcaggggat

SEQ ID NO: 627160 - DNA, 15 bp, Homo sapiens
tgacctcaggggatg

SEQ ID NO: 627161 - DNA, 15 bp, Homo sapiens
gacctcaggggatgc

SEQ ID NO: 627162 - DNA, 15 bp, Homo sapiens
acctcaggggatgcc

SEQ ID NO: 627163 - DNA, 15 bp, Homo sapiens
cctcaggggatgcca

SEQ ID NO: 627164 - DNA, 15 bp, Homo sapiens
ctcaggggatgccac

SEQ ID NO: 627165 - DNA, 15 bp, Homo sapiens
tcaggggatgccacc

SEQ ID NO: 627166 - DNA, 15 bp, Homo sapiens
caggggatgccaccg

SEQ ID NO: 627167 - DNA, 15 bp, Homo sapiens
aggggatgccaccgt

SEQ ID NO: 627168 - DNA, 15 bp, Homo sapiens
ggggatgccaccgta

SEQ ID NO: 627169 - DNA, 15 bp, Homo sapiens
gggatgccaccgtag

SEQ ID NO: 627170 - DNA, 15 bp, Homo sapiens
ggatgccaccgtagc

SEQ ID NO: 627171 - DNA, 15 bp, Homo sapiens
gatgccaccgtagca

SEQ ID NO: 627172 - DNA, 15 bp, Homo sapiens
atgccaccgtagcag

SEQ ID NO: 627173 - DNA, 15 bp, Homo sapiens
tgccaccgtagcagg

SEQ ID NO: 627174 - DNA, 15 bp, Homo sapiens
gccaccgtagcaggc

SEQ ID NO: 627175 - DNA, 15 bp, Homo sapiens
ccaccgtagcaggca

SEQ ID NO: 627176 - DNA, 15 bp, Homo sapiens
caccgtagcaggcaa

SEQ ID NO: 627177 - DNA, 15 bp, Homo sapiens
accgtagcaggcaag

SEQ ID NO: 627178 - DNA, 15 bp, Homo sapiens
ccgtagcaggcaaga

SEQ ID NO: 627179 - DNA, 15 bp, Homo sapiens
cgtagcaggcaagag

SEQ ID NO: 627180 - DNA, 15 bp, Homo sapiens
gtagcaggcaagagg

SEQ ID NO: 627181 - DNA, 15 bp, Homo sapiens
tagcaggcaagaggt

SEQ ID NO: 627182 - DNA, 15 bp, Homo sapiens
agcaggcaagaggtg

SEQ ID NO: 627183 - DNA, 15 bp, Homo sapiens
gcaggcaagaggtga

SEQ ID NO: 627184 - DNA, 15 bp, Homo sapiens
caggcaagaggtgag

SEQ ID NO: 627185 - DNA, 15 bp, Homo sapiens
aggcaagaggtgagt

SEQ ID NO: 627186 - DNA, 15 bp, Homo sapiens
ggcaagaggtgagta

SEQ ID NO: 627187 - DNA, 15 bp, Homo sapiens
gcaagaggtgagtat

SEQ ID NO: 627188 - DNA, 15 bp, Homo sapiens
caagaggtgagtatc

SEQ ID NO: 627189 - DNA, 15 bp, Homo sapiens
aagaggtgagtatcc

SEQ ID NO: 627190 - DNA, 15 bp, Homo sapiens
agaggtgagtatcct

SEQ ID NO: 627191 - DNA, 15 bp, Homo sapiens
gaggtgagtatcctg

SEQ ID NO: 627192 - DNA, 15 bp, Homo sapiens
aggtgagtatcctgc

SEQ ID NO: 627193 - DNA, 15 bp, Homo sapiens
ggtgagtatcctgct

SEQ ID NO: 627194 - DNA, 15 bp, Homo sapiens
gtgagtatcctgctc

SEQ ID NO: 627195 - DNA, 15 bp, Homo sapiens
tgagtatcctgctcc

SEQ ID NO: 627196 - DNA, 15 bp, Homo sapiens
gagtatcctgctcct

SEQ ID NO: 627197 - DNA, 15 bp, Homo sapiens
agtatcctgctcctc

SEQ ID NO: 627198 - DNA, 15 bp, Homo sapiens
gtatcctgctcctcc

SEQ ID NO: 627199 - DNA, 15 bp, Homo sapiens
tatcctgctcctcct

SEQ ID NO: 627200 - DNA, 15 bp, Homo sapiens
atcctgctcctcctg

SEQ ID NO: 627201 - DNA, 15 bp, Homo sapiens
tcctgctcctcctgt

SEQ ID NO: 627202 - DNA, 15 bp, Homo sapiens
cctgctcctcctgtc

SEQ ID NO: 627203 - DNA, 15 bp, Homo sapiens
ctgctcctcctgtct

SEQ ID NO: 627204 - DNA, 15 bp, Homo sapiens
tgctcctcctgtctc

SEQ ID NO: 627205 - DNA, 15 bp, Homo sapiens
gctcctcctgtctca

SEQ ID NO: 627206 - DNA, 15 bp, Homo sapiens
ctcctcctgtctcag

SEQ ID NO: 627207 - DNA, 15 bp, Homo sapiens
tcctcctgtctcagg

SEQ ID NO: 627208 - DNA, 15 bp, Homo sapiens
cctcctgtctcaggg

SEQ ID NO: 627209 - DNA, 15 bp, Homo sapiens
ctcctgtctcaggga

SEQ ID NO: 627210 - DNA, 15 bp, Homo sapiens
tcctgtctcagggag

SEQ ID NO: 627211 - DNA, 15 bp, Homo sapiens
cctgtctcagggagt

SEQ ID NO: 627212 - DNA, 15 bp, Homo sapiens
ctgtctcagggagtc

SEQ ID NO: 627213 - DNA, 15 bp, Homo sapiens
tgtctcagggagtct

SEQ ID NO: 627214 - DNA, 15 bp, Homo sapiens
gtctcagggagtctc

SEQ ID NO: 627215 - DNA, 15 bp, Homo sapiens
tctcagggagtctct

SEQ ID NO: 627216 - DNA, 15 bp, Homo sapiens
ctcagggagtctctc

SEQ ID NO: 627217 - DNA, 15 bp, Homo sapiens
tcagggagtctctca

SEQ ID NO: 627218 - DNA, 15 bp, Homo sapiens
cagggagtctctcac

SEQ ID NO: 627219 - DNA, 15 bp, Homo sapiens
agggagtctctcaca

SEQ ID NO: 627220 - DNA, 15 bp, Homo sapiens
gggagtctctcacag

SEQ ID NO: 627221 - DNA, 15 bp, Homo sapiens
ggagtctctcacagg

SEQ ID NO: 627222 - DNA, 15 bp, Homo sapiens
gagtctctcacaggt

SEQ ID NO: 627223 - DNA, 15 bp, Homo sapiens
agtctctcacaggtc

SEQ ID NO: 627224 - DNA, 15 bp, Homo sapiens
gtctctcacaggtcc

SEQ ID NO: 627225 - DNA, 15 bp, Homo sapiens
tctctcacaggtcct

SEQ ID NO: 627226 - DNA, 15 bp, Homo sapiens
ctctcacaggtcctg

SEQ ID NO: 627227 - DNA, 15 bp, Homo sapiens
tctcacaggtcctgt

SEQ ID NO: 627228 - DNA, 15 bp, Homo sapiens
ctcacaggtcctgtg

SEQ ID NO: 627229 - DNA, 15 bp, Homo sapiens
tcacaggtcctgtga

SEQ ID NO: 627230 - DNA, 15 bp, Homo sapiens
cacaggtcctgtgag

SEQ ID NO: 627231 - DNA, 15 bp, Homo sapiens
acaggtcctgtgaga

SEQ ID NO: 627232 - DNA, 15 bp, Homo sapiens
caggtcctgtgagaa

SEQ ID NO: 627233 - DNA, 15 bp, Homo sapiens
aggtcctgtgagaag

SEQ ID NO: 627234 - DNA, 15 bp, Homo sapiens
ggtcctgtgagaaga

SEQ ID NO: 627235 - DNA, 15 bp, Homo sapiens
gtcctgtgagaagaa

SEQ ID NO: 627236 - DNA, 15 bp, Homo sapiens
tcctgtgagaagaat

SEQ ID NO: 627237 - DNA, 15 bp, Homo sapiens
cctgtgagaagaata

SEQ ID NO: 627238 - DNA, 15 bp, Homo sapiens
ctgtgagaagaatag

SEQ ID NO: 627239 - DNA, 15 bp, Homo sapiens
tgtgagaagaatagg

SEQ ID NO: 627240 - DNA, 15 bp, Homo sapiens
gtgagaagaatagga

SEQ ID NO: 627241 - DNA, 15 bp, Homo sapiens
tgagaagaataggaa

SEQ ID NO: 627242 - DNA, 15 bp, Homo sapiens
gagaagaataggaag

SEQ ID NO: 627243 - DNA, 15 bp, Homo sapiens
agaagaataggaagg

SEQ ID NO: 627244 - DNA, 15 bp, Homo sapiens
gaagaataggaaggg

SEQ ID NO: 627245 - DNA, 15 bp, Homo sapiens
aagaataggaagggt

SEQ ID NO: 627246 - DNA, 15 bp, Homo sapiens
agaataggaagggtg

SEQ ID NO: 627247 - DNA, 15 bp, Homo sapiens
gaataggaagggtga

SEQ ID NO: 627248 - DNA, 15 bp, Homo sapiens
aataggaagggtgat

SEQ ID NO: 627249 - DNA, 15 bp, Homo sapiens
ataggaagggtgatc

SEQ ID NO: 627250 - DNA, 15 bp, Homo sapiens
taggaagggtgatca

SEQ ID NO: 627251 - DNA, 15 bp, Homo sapiens
aggaagggtgatcat

SEQ ID NO: 627252 - DNA, 15 bp, Homo sapiens
ggaagggtgatcatc

SEQ ID NO: 627253 - DNA, 15 bp, Homo sapiens
gaagggtgatcatca

SEQ ID NO: 627254 - DNA, 15 bp, Homo sapiens
aagggtgatcatcag

SEQ ID NO: 627255 - DNA, 15 bp, Homo sapiens
agggtgatcatcaga

SEQ ID NO: 627256 - DNA, 15 bp, Homo sapiens
gggtgatcatcagac

SEQ ID NO: 627257 - DNA, 15 bp, Homo sapiens
ggtgatcatcagacc

SEQ ID NO: 627258 - DNA, 15 bp, Homo sapiens
gtgatcatcagaccc

SEQ ID NO: 627259 - DNA, 15 bp, Homo sapiens
tgatcatcagaccct

SEQ ID NO: 627260 - DNA, 15 bp, Homo sapiens
gatcatcagacccta

SEQ ID NO: 627261 - DNA, 15 bp, Homo sapiens
atcatcagaccctat

SEQ ID NO: 627262 - DNA, 15 bp, Homo sapiens
tcatcagaccctata

SEQ ID NO: 627263 - DNA, 15 bp, Homo sapiens
catcagaccctatag

SEQ ID NO: 627264 - DNA, 15 bp, Homo sapiens
atcagaccctatagt

SEQ ID NO: 627265 - DNA, 15 bp, Homo sapiens
tcagaccctatagta

SEQ ID NO: 627266 - DNA, 15 bp, Homo sapiens
cagaccctatagtag

SEQ ID NO: 627267 - DNA, 15 bp, Homo sapiens
agaccctatagtagg

SEQ ID NO: 627268 - DNA, 15 bp, Homo sapiens
gaccctatagtaggg

SEQ ID NO: 627269 - DNA, 15 bp, Homo sapiens
accctatagtagggt

SEQ ID NO: 627270 - DNA, 15 bp, Homo sapiens
ccctatagtagggtg

SEQ ID NO: 627271 - DNA, 15 bp, Homo sapiens
cctatagtagggtgg

SEQ ID NO: 627272 - DNA, 15 bp, Homo sapiens
ctatagtagggtggc

SEQ ID NO: 627273 - DNA, 15 bp, Homo sapiens
tatagtagggtggct

SEQ ID NO: 627274 - DNA, 15 bp, Homo sapiens
atagtagggtggctc

SEQ ID NO: 627275 - DNA, 15 bp, Homo sapiens
tagtagggtggctct

SEQ ID NO: 627276 - DNA, 15 bp, Homo sapiens
agtagggtggctctg

SEQ ID NO: 627277 - DNA, 15 bp, Homo sapiens
gtagggtggctctga

SEQ ID NO: 627278 - DNA, 15 bp, Homo sapiens
tagggtggctctgag

SEQ ID NO: 627279 - DNA, 15 bp, Homo sapiens
agggtggctctgagg

SEQ ID NO: 627280 - DNA, 15 bp, Homo sapiens
gggtggctctgaggc

SEQ ID NO: 627281 - DNA, 15 bp, Homo sapiens
ggtggctctgaggcc

SEQ ID NO: 627282 - DNA, 15 bp, Homo sapiens
gtggctctgaggccc

SEQ ID NO: 627283 - DNA, 15 bp, Homo sapiens
tggctctgaggccct

SEQ ID NO: 627284 - DNA, 15 bp, Homo sapiens
ggctctgaggccctg

SEQ ID NO: 627285 - DNA, 15 bp, Homo sapiens
gctctgaggccctga

SEQ ID NO: 627286 - DNA, 15 bp, Homo sapiens
ctctgaggccctgaa

SEQ ID NO: 627287 - DNA, 15 bp, Homo sapiens
tctgaggccctgaaa

SEQ ID NO: 627288 - DNA, 15 bp, Homo sapiens
ctgaggccctgaaag

SEQ ID NO: 627289 - DNA, 15 bp, Homo sapiens
tgaggccctgaaaga

SEQ ID NO: 627290 - DNA, 15 bp, Homo sapiens
gaggccctgaaagat

SEQ ID NO: 627291 - DNA, 15 bp, Homo sapiens
aggccctgaaagatc

SEQ ID NO: 627292 - DNA, 15 bp, Homo sapiens
ggccctgaaagatct

SEQ ID NO: 627293 - DNA, 15 bp, Homo sapiens
gccctgaaagatctg

SEQ ID NO: 627294 - DNA, 15 bp, Homo sapiens
ccctgaaagatctgt

SEQ ID NO: 627295 - DNA, 15 bp, Homo sapiens
cctgaaagatctgta

SEQ ID NO: 627296 - DNA, 15 bp, Homo sapiens
ctgaaagatctgtac

SEQ ID NO: 627297 - DNA, 15 bp, Homo sapiens
tgaaagatctgtaca

SEQ ID NO: 627298 - DNA, 15 bp, Homo sapiens
gaaagatctgtacag

SEQ ID NO: 627299 - DNA, 15 bp, Homo sapiens
aaagatctgtacaga

SEQ ID NO: 627300 - DNA, 15 bp, Homo sapiens
aagatctgtacagag

SEQ ID NO: 627301 - DNA, 15 bp, Homo sapiens
agatctgtacagaga

SEQ ID NO: 627302 - DNA, 15 bp, Homo sapiens
gatctgtacagagaa

SEQ ID NO: 627303 - DNA, 15 bp, Homo sapiens
atctgtacagagaag

SEQ ID NO: 627304 - DNA, 15 bp, Homo sapiens
tctgtacagagaagg

SEQ ID NO: 627305 - DNA, 15 bp, Homo sapiens
ctgtacagagaagga

SEQ ID NO: 627306 - DNA, 15 bp, Homo sapiens
tgtacagagaaggag

SEQ ID NO: 627307 - DNA, 15 bp, Homo sapiens
gtacagagaaggagg

SEQ ID NO: 627308 - DNA, 15 bp, Homo sapiens
tacagagaaggaggc

SEQ ID NO: 627309 - DNA, 15 bp, Homo sapiens
acagagaaggaggcc

SEQ ID NO: 627310 - DNA, 15 bp, Homo sapiens
cagagaaggaggcct

SEQ ID NO: 627311 - DNA, 15 bp, Homo sapiens
agagaaggaggcctc

SEQ ID NO: 627312 - DNA, 15 bp, Homo sapiens
gagaaggaggcctcc

SEQ ID NO: 627313 - DNA, 15 bp, Homo sapiens
agaaggaggcctccc

SEQ ID NO: 627314 - DNA, 15 bp, Homo sapiens
gaaggaggcctccca

SEQ ID NO: 627315 - DNA, 15 bp, Homo sapiens
aaggaggcctcccag

SEQ ID NO: 627316 - DNA, 15 bp, Homo sapiens
aggaggcctcccaga

SEQ ID NO: 627317 - DNA, 15 bp, Homo sapiens
ggaggcctcccagag

SEQ ID NO: 627318 - DNA, 15 bp, Homo sapiens
gaggcctcccagaga

SEQ ID NO: 627319 - DNA, 15 bp, Homo sapiens
aggcctcccagagag

SEQ ID NO: 627320 - DNA, 15 bp, Homo sapiens
ggcctcccagagagc

SEQ ID NO: 627321 - DNA, 15 bp, Homo sapiens
gcctcccagagagca

SEQ ID NO: 627322 - DNA, 15 bp, Homo sapiens
cctcccagagagcat

SEQ ID NO: 627323 - DNA, 15 bp, Homo sapiens
ctcccagagagcatg

SEQ ID NO: 627324 - DNA, 15 bp, Homo sapiens
tcccagagagcatgg

SEQ ID NO: 627325 - DNA, 15 bp, Homo sapiens
cccagagagcatggc

SEQ ID NO: 627326 - DNA, 15 bp, Homo sapiens
ccagagagcatggcc

SEQ ID NO: 627327 - DNA, 15 bp, Homo sapiens
cagagagcatggccc

SEQ ID NO: 627328 - DNA, 15 bp, Homo sapiens
agagagcatggccca

SEQ ID NO: 627329 - DNA, 15 bp, Homo sapiens
gagagcatggcccaa

SEQ ID NO: 627330 - DNA, 15 bp, Homo sapiens
agagcatggcccaaa

SEQ ID NO: 627331 - DNA, 15 bp, Homo sapiens
gagcatggcccaaaa

SEQ ID NO: 627332 - DNA, 15 bp, Homo sapiens
agcatggcccaaaaa

SEQ ID NO: 627333 - DNA, 15 bp, Homo sapiens
gcatggcccaaaaag

SEQ ID NO: 627334 - DNA, 15 bp, Homo sapiens
catggcccaaaaagc

SEQ ID NO: 627335 - DNA, 15 bp, Homo sapiens
atggcccaaaaagcc

SEQ ID NO: 627336 - DNA, 15 bp, Homo sapiens
tggcccaaaaagccc

SEQ ID NO: 627337 - DNA, 15 bp, Homo sapiens
ggcccaaaaagccca

SEQ ID NO: 627338 - DNA, 15 bp, Homo sapiens
gcccaaaaagcccaa

SEQ ID NO: 627339 - DNA, 15 bp, Homo sapiens
cccaaaaagcccaac

SEQ ID NO: 627340 - DNA, 15 bp, Homo sapiens
ccaaaaagcccaaca

SEQ ID NO: 627341 - DNA, 15 bp, Homo sapiens
caaaaagcccaacac

SEQ ID NO: 627342 - DNA, 15 bp, Homo sapiens
aaaaagcccaacaca

SEQ ID NO: 627343 - DNA, 15 bp, Homo sapiens
aaaagcccaacacat

SEQ ID NO: 627344 - DNA, 15 bp, Homo sapiens
aaagcccaacacata

SEQ ID NO: 627345 - DNA, 15 bp, Homo sapiens
aagcccaacacatag

SEQ ID NO: 627346 - DNA, 15 bp, Homo sapiens
agcccaacacataga

SEQ ID NO: 627347 - DNA, 15 bp, Homo sapiens
gcccaacacatagac

SEQ ID NO: 627348 - DNA, 15 bp, Homo sapiens
cccaacacatagacc

SEQ ID NO: 627349 - DNA, 15 bp, Homo sapiens
ccaacacatagaccc

SEQ ID NO: 627350 - DNA, 15 bp, Homo sapiens
caacacatagaccca

SEQ ID NO: 627351 - DNA, 15 bp, Homo sapiens
aacacatagacccaa

SEQ ID NO: 627352 - DNA, 15 bp, Homo sapiens
acacatagacccaat

SEQ ID NO: 627353 - DNA, 15 bp, Homo sapiens
cacatagacccaatg

SEQ ID NO: 627354 - DNA, 15 bp, Homo sapiens
acatagacccaatgg

SEQ ID NO: 627355 - DNA, 15 bp, Homo sapiens
catagacccaatgga

SEQ ID NO: 627356 - DNA, 15 bp, Homo sapiens
atagacccaatggaa

SEQ ID NO: 627357 - DNA, 15 bp, Homo sapiens
tagacccaatggaaa

SEQ ID NO: 627358 - DNA, 15 bp, Homo sapiens
agacccaatggaaaa

SEQ ID NO: 627359 - DNA, 15 bp, Homo sapiens
gacccaatggaaaag

SEQ ID NO: 627360 - DNA, 15 bp, Homo sapiens
acccaatggaaaagt

SEQ ID NO: 627361 - DNA, 15 bp, Homo sapiens
cccaatggaaaagtg

SEQ ID NO: 627362 - DNA, 15 bp, Homo sapiens
ccaatggaaaagtga

SEQ ID NO: 627363 - DNA, 15 bp, Homo sapiens
caatggaaaagtgaa

SEQ ID NO: 627364 - DNA, 15 bp, Homo sapiens
aatggaaaagtgaac

SEQ ID NO: 627365 - DNA, 15 bp, Homo sapiens
atggaaaagtgaact

SEQ ID NO: 627366 - DNA, 15 bp, Homo sapiens
tggaaaagtgaactg

SEQ ID NO: 627367 - DNA, 15 bp, Homo sapiens
ggaaaagtgaactga

SEQ ID NO: 627368 - DNA, 15 bp, Homo sapiens
gaaaagtgaactgaa

SEQ ID NO: 627369 - DNA, 15 bp, Homo sapiens
aaaagtgaactgaat

SEQ ID NO: 627370 - DNA, 15 bp, Homo sapiens
aaagtgaactgaatt

SEQ ID NO: 627371 - DNA, 15 bp, Homo sapiens
aagtgaactgaattg

SEQ ID NO: 627372 - DNA, 15 bp, Homo sapiens
agtgaactgaattgt

SEQ ID NO: 627373 - DNA, 15 bp, Homo sapiens
gtgaactgaattgtg

SEQ ID NO: 627374 - DNA, 15 bp, Homo sapiens
tgaactgaattgtga

SEQ ID NO: 627375 - DNA, 15 bp, Homo sapiens
gaactgaattgtgat

SEQ ID NO: 627376 - DNA, 15 bp, Homo sapiens
aactgaattgtgata

SEQ ID NO: 627377 - DNA, 15 bp, Homo sapiens
actgaattgtgatag

SEQ ID NO: 627378 - DNA, 15 bp, Homo sapiens
ctgaattgtgatagt

SEQ ID NO: 627379 - DNA, 15 bp, Homo sapiens
tgaattgtgatagtt

SEQ ID NO: 627380 - DNA, 15 bp, Homo sapiens
gaattgtgatagtta

SEQ ID NO: 627381 - DNA, 15 bp, Homo sapiens
aattgtgatagttaa

SEQ ID NO: 627382 - DNA, 15 bp, Homo sapiens
attgtgatagttaag

SEQ ID NO: 627383 - DNA, 15 bp, Homo sapiens
ttgtgatagttaaga

SEQ ID NO: 627384 - DNA, 15 bp, Homo sapiens
tgtgatagttaagag

SEQ ID NO: 627385 - DNA, 15 bp, Homo sapiens
gtgatagttaagaga

SEQ ID NO: 627386 - DNA, 15 bp, Homo sapiens
tgatagttaagagat

SEQ ID NO: 627387 - DNA, 15 bp, Homo sapiens
gatagttaagagatt

SEQ ID NO: 627388 - DNA, 15 bp, Homo sapiens
atagttaagagattc

SEQ ID NO: 627389 - DNA, 15 bp, Homo sapiens
tagttaagagattcc

SEQ ID NO: 627390 - DNA, 15 bp, Homo sapiens
agttaagagattcct

SEQ ID NO: 627391 - DNA, 15 bp, Homo sapiens
gttaagagattcctc

SEQ ID NO: 627392 - DNA, 15 bp, Homo sapiens
ttaagagattcctct

SEQ ID NO: 627393 - DNA, 15 bp, Homo sapiens
taagagattcctctg

SEQ ID NO: 627394 - DNA, 15 bp, Homo sapiens
aagagattcctctgt

SEQ ID NO: 627395 - DNA, 15 bp, Homo sapiens
agagattcctctgtt

SEQ ID NO: 627396 - DNA, 15 bp, Homo sapiens
gagattcctctgttg

SEQ ID NO: 627397 - DNA, 15 bp, Homo sapiens
agattcctctgttgg

SEQ ID NO: 627398 - DNA, 15 bp, Homo sapiens
gattcctctgttggg

SEQ ID NO: 627399 - DNA, 15 bp, Homo sapiens
attcctctgttggga

SEQ ID NO: 627400 - DNA, 15 bp, Homo sapiens
ttcctctgttgggat

SEQ ID NO: 627401 - DNA, 15 bp, Homo sapiens
tcctctgttgggatg

SEQ ID NO: 627402 - DNA, 15 bp, Homo sapiens
cctctgttgggatgg

SEQ ID NO: 627403 - DNA, 15 bp, Homo sapiens
ctctgttgggatgga

SEQ ID NO: 627404 - DNA, 15 bp, Homo sapiens
tctgttgggatggat

SEQ ID NO: 627405 - DNA, 15 bp, Homo sapiens
ctgttgggatggatt

SEQ ID NO: 627406 - DNA, 15 bp, Homo sapiens
tgttgggatggattc

SEQ ID NO: 627407 - DNA, 15 bp, Homo sapiens
gttgggatggattct

SEQ ID NO: 627408 - DNA, 15 bp, Homo sapiens
ttgggatggattctt

SEQ ID NO: 627409 - DNA, 15 bp, Homo sapiens
tgggatggattcttg

SEQ ID NO: 627410 - DNA, 15 bp, Homo sapiens
gggatggattcttgg

SEQ ID NO: 627411 - DNA, 15 bp, Homo sapiens
ggatggattcttgga

SEQ ID NO: 627412 - DNA, 15 bp, Homo sapiens
gatggattcttggaa

SEQ ID NO: 627413 - DNA, 15 bp, Homo sapiens
atggattcttggaaa

SEQ ID NO: 627414 - DNA, 15 bp, Homo sapiens
tggattcttggaaag

SEQ ID NO: 627415 - DNA, 15 bp, Homo sapiens
ggattcttggaaaga

SEQ ID NO: 627416 - DNA, 15 bp, Homo sapiens
gattcttggaaagac

SEQ ID NO: 627417 - DNA, 15 bp, Homo sapiens
attcttggaaagacc

SEQ ID NO: 627418 - DNA, 15 bp, Homo sapiens
ttcttggaaagacct

SEQ ID NO: 627419 - DNA, 15 bp, Homo sapiens
tcttggaaagacctg

SEQ ID NO: 627420 - DNA, 15 bp, Homo sapiens
cttggaaagacctgg

SEQ ID NO: 627421 - DNA, 15 bp, Homo sapiens
ttggaaagacctggg

SEQ ID NO: 627422 - DNA, 15 bp, Homo sapiens
tggaaagacctggga

SEQ ID NO: 627423 - DNA, 15 bp, Homo sapiens
ggaaagacctgggaa

SEQ ID NO: 627424 - DNA, 15 bp, Homo sapiens
gaaagacctgggaag

SEQ ID NO: 627425 - DNA, 15 bp, Homo sapiens
aaagacctgggaagc

SEQ ID NO: 627426 - DNA, 15 bp, Homo sapiens
aagacctgggaagca

SEQ ID NO: 627427 - DNA, 15 bp, Homo sapiens
agacctgggaagcac

SEQ ID NO: 627428 - DNA, 15 bp, Homo sapiens
gacctgggaagcact

SEQ ID NO: 627429 - DNA, 15 bp, Homo sapiens
acctgggaagcacta

SEQ ID NO: 627430 - DNA, 15 bp, Homo sapiens
cctgggaagcactaa

SEQ ID NO: 627431 - DNA, 15 bp, Homo sapiens
ctgggaagcactaag

SEQ ID NO: 627432 - DNA, 15 bp, Homo sapiens
tgggaagcactaagt

SEQ ID NO: 627433 - DNA, 15 bp, Homo sapiens
gggaagcactaagtg

SEQ ID NO: 627434 - DNA, 15 bp, Homo sapiens
ggaagcactaagtgt

SEQ ID NO: 627435 - DNA, 15 bp, Homo sapiens
gaagcactaagtgtg

SEQ ID NO: 627436 - DNA, 15 bp, Homo sapiens
aagcactaagtgtgt

SEQ ID NO: 627437 - DNA, 15 bp, Homo sapiens
agcactaagtgtgtg

SEQ ID NO: 627438 - DNA, 15 bp, Homo sapiens
gcactaagtgtgtgg

SEQ ID NO: 627439 - DNA, 15 bp, Homo sapiens
cactaagtgtgtggt

SEQ ID NO: 627440 - DNA, 15 bp, Homo sapiens
actaagtgtgtggtt

SEQ ID NO: 627441 - DNA, 15 bp, Homo sapiens
ctaagtgtgtggttc

SEQ ID NO: 627442 - DNA, 15 bp, Homo sapiens
taagtgtgtggttct

SEQ ID NO: 627443 - DNA, 15 bp, Homo sapiens
aagtgtgtggttctt

SEQ ID NO: 627444 - DNA, 15 bp, Homo sapiens
agtgtgtggttctta

SEQ ID NO: 627445 - DNA, 15 bp, Homo sapiens
gtgtgtggttcttaa

SEQ ID NO: 627446 - DNA, 15 bp, Homo sapiens
tgtgtggttcttaat

SEQ ID NO: 627447 - DNA, 15 bp, Homo sapiens
gtgtggttcttaatc

SEQ ID NO: 627448 - DNA, 15 bp, Homo sapiens
tgtggttcttaatct

SEQ ID NO: 627449 - DNA, 15 bp, Homo sapiens
gtggttcttaatctc

SEQ ID NO: 627450 - DNA, 15 bp, Homo sapiens
tggttcttaatctct

SEQ ID NO: 627451 - DNA, 15 bp, Homo sapiens
ggttcttaatctctt

SEQ ID NO: 627452 - DNA, 15 bp, Homo sapiens
gttcttaatctctta

SEQ ID NO: 627453 - DNA, 15 bp, Homo sapiens
ttcttaatctcttag

SEQ ID NO: 627454 - DNA, 15 bp, Homo sapiens
tcttaatctcttaga

SEQ ID NO: 627455 - DNA, 15 bp, Homo sapiens
cttaatctcttagag

SEQ ID NO: 627456 - DNA, 15 bp, Homo sapiens
ttaatctcttagagg

SEQ ID NO: 627457 - DNA, 15 bp, Homo sapiens
taatctcttagaggt

SEQ ID NO: 627458 - DNA, 15 bp, Homo sapiens
aatctcttagaggtc

SEQ ID NO: 627459 - DNA, 15 bp, Homo sapiens
atctcttagaggtca

SEQ ID NO: 627460 - DNA, 15 bp, Homo sapiens
tctcttagaggtcac

SEQ ID NO: 627461 - DNA, 15 bp, Homo sapiens
ctcttagaggtcacg

SEQ ID NO: 627462 - DNA, 15 bp, Homo sapiens
tcttagaggtcacgg

SEQ ID NO: 627463 - DNA, 15 bp, Homo sapiens
cttagaggtcacgga

SEQ ID NO: 627464 - DNA, 15 bp, Homo sapiens
ttagaggtcacggaa

SEQ ID NO: 627465 - DNA, 15 bp, Homo sapiens
tagaggtcacggaac

SEQ ID NO: 627466 - DNA, 15 bp, Homo sapiens
agaggtcacggaacc

SEQ ID NO: 627467 - DNA, 15 bp, Homo sapiens
gaggtcacggaacct

SEQ ID NO: 627468 - DNA, 15 bp, Homo sapiens
aggtcacggaacctt

SEQ ID NO: 627469 - DNA, 15 bp, Homo sapiens
ggtcacggaaccttt

SEQ ID NO: 627470 - DNA, 15 bp, Homo sapiens
gtcacggaacctttt

SEQ ID NO: 627471 - DNA, 15 bp, Homo sapiens
tcacggaacctttta

SEQ ID NO: 627472 - DNA, 15 bp, Homo sapiens
cacggaaccttttaa

SEQ ID NO: 627473 - DNA, 15 bp, Homo sapiens
acggaaccttttaag

SEQ ID NO: 627474 - DNA, 15 bp, Homo sapiens
cggaaccttttaagc

SEQ ID NO: 627475 - DNA, 15 bp, Homo sapiens
ggaaccttttaagca

SEQ ID NO: 627476 - DNA, 15 bp, Homo sapiens
gaaccttttaagcat

SEQ ID NO: 627477 - DNA, 15 bp, Homo sapiens
aaccttttaagcatc

SEQ ID NO: 627478 - DNA, 15 bp, Homo sapiens
accttttaagcatct

SEQ ID NO: 627479 - DNA, 15 bp, Homo sapiens
ccttttaagcatctg

SEQ ID NO: 627480 - DNA, 15 bp, Homo sapiens
cttttaagcatctga

SEQ ID NO: 627481 - DNA, 15 bp, Homo sapiens
ttttaagcatctgat

SEQ ID NO: 627482 - DNA, 15 bp, Homo sapiens
tttaagcatctgatg

SEQ ID NO: 627483 - DNA, 15 bp, Homo sapiens
ttaagcatctgatga

SEQ ID NO: 627484 - DNA, 15 bp, Homo sapiens
taagcatctgatgaa

SEQ ID NO: 627485 - DNA, 15 bp, Homo sapiens
aagcatctgatgaat

SEQ ID NO: 627486 - DNA, 15 bp, Homo sapiens
agcatctgatgaata

SEQ ID NO: 627487 - DNA, 15 bp, Homo sapiens
gcatctgatgaatat

SEQ ID NO: 627488 - DNA, 15 bp, Homo sapiens
catctgatgaatatt

SEQ ID NO: 627489 - DNA, 15 bp, Homo sapiens
atctgatgaatattt

SEQ ID NO: 627490 - DNA, 15 bp, Homo sapiens
tctgatgaatatttg

SEQ ID NO: 627491 - DNA, 15 bp, Homo sapiens
ctgatgaatatttgt

SEQ ID NO: 627492 - DNA, 15 bp, Homo sapiens
tgatgaatatttgta

SEQ ID NO: 627493 - DNA, 15 bp, Homo sapiens
gatgaatatttgtag

SEQ ID NO: 627494 - DNA, 15 bp, Homo sapiens
atgaatatttgtagc

SEQ ID NO: 627495 - DNA, 15 bp, Homo sapiens
tgaatatttgtagcc

SEQ ID NO: 627496 - DNA, 15 bp, Homo sapiens
gaatatttgtagcct

SEQ ID NO: 627497 - DNA, 15 bp, Homo sapiens
aatatttgtagccta

SEQ ID NO: 627498 - DNA, 15 bp, Homo sapiens
atatttgtagcctat

SEQ ID NO: 627499 - DNA, 15 bp, Homo sapiens
tatttgtagcctatt

SEQ ID NO: 627500 - DNA, 15 bp, Homo sapiens
atttgtagcctattc

SEQ ID NO: 627501 - DNA, 15 bp, Homo sapiens
tttgtagcctattcc

SEQ ID NO: 627502 - DNA, 15 bp, Homo sapiens
ttgtagcctattcct

SEQ ID NO: 627503 - DNA, 15 bp, Homo sapiens
tgtagcctattccta

SEQ ID NO: 627504 - DNA, 15 bp, Homo sapiens
gtagcctattcctat

SEQ ID NO: 627505 - DNA, 15 bp, Homo sapiens
tagcctattcctata

SEQ ID NO: 627506 - DNA, 15 bp, Homo sapiens
agcctattcctataa

SEQ ID NO: 627507 - DNA, 15 bp, Homo sapiens
gcctattcctataaa

SEQ ID NO: 627508 - DNA, 15 bp, Homo sapiens
cctattcctataaaa

SEQ ID NO: 627509 - DNA, 15 bp, Homo sapiens
ctattcctataaaaa

SEQ ID NO: 627510 - DNA, 15 bp, Homo sapiens
tattcctataaaaat

SEQ ID NO: 627511 - DNA, 15 bp, Homo sapiens
attcctataaaaatg

SEQ ID NO: 627512 - DNA, 15 bp, Homo sapiens
ttcctataaaaatgc

SEQ ID NO: 627513 - DNA, 15 bp, Homo sapiens
tcctataaaaatgca

SEQ ID NO: 627514 - DNA, 15 bp, Homo sapiens
cctataaaaatgcac

SEQ ID NO: 627515 - DNA, 15 bp, Homo sapiens
ctataaaaatgcacc

SEQ ID NO: 627516 - DNA, 15 bp, Homo sapiens
tataaaaatgcacca

SEQ ID NO: 627517 - DNA, 15 bp, Homo sapiens
ataaaaatgcaccat

SEQ ID NO: 627518 - DNA, 15 bp, Homo sapiens
taaaaatgcaccatt

SEQ ID NO: 627519 - DNA, 15 bp, Homo sapiens
aaaaatgcaccattg

SEQ ID NO: 627520 - DNA, 15 bp, Homo sapiens
aaaatgcaccattgc

SEQ ID NO: 627521 - DNA, 15 bp, Homo sapiens
aaatgcaccattgct

SEQ ID NO: 627522 - DNA, 15 bp, Homo sapiens
aatgcaccattgctt

SEQ ID NO: 627523 - DNA, 15 bp, Homo sapiens
atgcaccattgcttc

SEQ ID NO: 627524 - DNA, 15 bp, Homo sapiens
tgcaccattgcttcc

SEQ ID NO: 627525 - DNA, 15 bp, Homo sapiens
gcaccattgcttccc

SEQ ID NO: 627526 - DNA, 15 bp, Homo sapiens
caccattgcttccca

SEQ ID NO: 627527 - DNA, 15 bp, Homo sapiens
accattgcttcccat

SEQ ID NO: 627528 - DNA, 15 bp, Homo sapiens
ccattgcttcccatt

SEQ ID NO: 627529 - DNA, 15 bp, Homo sapiens
cattgcttcccatta

SEQ ID NO: 627530 - DNA, 15 bp, Homo sapiens
attgcttcccattac

SEQ ID NO: 627531 - DNA, 15 bp, Homo sapiens
ttgcttcccattacc

SEQ ID NO: 627532 - DNA, 15 bp, Homo sapiens
tgcttcccattacct

SEQ ID NO: 627533 - DNA, 15 bp, Homo sapiens
gcttcccattacctc

SEQ ID NO: 627534 - DNA, 15 bp, Homo sapiens
cttcccattacctcc

SEQ ID NO: 627535 - DNA, 15 bp, Homo sapiens
ttcccattacctccc

SEQ ID NO: 627536 - DNA, 15 bp, Homo sapiens
tcccattacctccct

SEQ ID NO: 627537 - DNA, 15 bp, Homo sapiens
cccattacctccctc

SEQ ID NO: 627538 - DNA, 15 bp, Homo sapiens
ccattacctccctcc

SEQ ID NO: 627539 - DNA, 15 bp, Homo sapiens
cattacctccctcca

SEQ ID NO: 627540 - DNA, 15 bp, Homo sapiens
attacctccctccac

SEQ ID NO: 627541 - DNA, 15 bp, Homo sapiens
ttacctccctccaca

SEQ ID NO: 627542 - DNA, 15 bp, Homo sapiens
tacctccctccacac

SEQ ID NO: 627543 - DNA, 15 bp, Homo sapiens
acctccctccacaca

SEQ ID NO: 627544 - DNA, 15 bp, Homo sapiens
cctccctccacacat

SEQ ID NO: 627545 - DNA, 15 bp, Homo sapiens
ctccctccacacatt

SEQ ID NO: 627546 - DNA, 15 bp, Homo sapiens
tccctccacacattt

SEQ ID NO: 627547 - DNA, 15 bp, Homo sapiens
ccctccacacatttt

SEQ ID NO: 627548 - DNA, 15 bp, Homo sapiens
cctccacacattttt

SEQ ID NO: 627549 - DNA, 15 bp, Homo sapiens
ctccacacattttta

SEQ ID NO: 627550 - DNA, 15 bp, Homo sapiens
tccacacatttttac

SEQ ID NO: 627551 - DNA, 15 bp, Homo sapiens
ccacacatttttaca

SEQ ID NO: 627552 - DNA, 15 bp, Homo sapiens
cacacatttttacaa

SEQ ID NO: 627553 - DNA, 15 bp, Homo sapiens
acacatttttacaaa

SEQ ID NO: 627554 - DNA, 15 bp, Homo sapiens
cacatttttacaaaa

SEQ ID NO: 627555 - DNA, 15 bp, Homo sapiens
acatttttacaaaac

SEQ ID NO: 627556 - DNA, 15 bp, Homo sapiens
catttttacaaaacg

SEQ ID NO: 627557 - DNA, 15 bp, Homo sapiens
atttttacaaaacgt

SEQ ID NO: 627558 - DNA, 15 bp, Homo sapiens
tttttacaaaacgtt

SEQ ID NO: 627559 - DNA, 15 bp, Homo sapiens
ttttacaaaacgttt

SEQ ID NO: 627560 - DNA, 15 bp, Homo sapiens
tttacaaaacgtttc

SEQ ID NO: 627561 - DNA, 15 bp, Homo sapiens
ttacaaaacgtttca

SEQ ID NO: 627562 - DNA, 15 bp, Homo sapiens
tacaaaacgtttcag

SEQ ID NO: 627563 - DNA, 15 bp, Homo sapiens
acaaaacgtttcagg

SEQ ID NO: 627564 - DNA, 15 bp, Homo sapiens
caaaacgtttcaggg

SEQ ID NO: 627565 - DNA, 15 bp, Homo sapiens
aaaacgtttcaggga

SEQ ID NO: 627566 - DNA, 15 bp, Homo sapiens
aaacgtttcagggag

SEQ ID NO: 627567 - DNA, 15 bp, Homo sapiens
aacgtttcagggagt

SEQ ID NO: 627568 - DNA, 15 bp, Homo sapiens
acgtttcagggagtt

SEQ ID NO: 627569 - DNA, 15 bp, Homo sapiens
cgtttcagggagttt

SEQ ID NO: 627570 - DNA, 15 bp, Homo sapiens
gtttcagggagttta

SEQ ID NO: 627571 - DNA, 15 bp, Homo sapiens
tttcagggagtttac

SEQ ID NO: 627572 - DNA, 15 bp, Homo sapiens
ttcagggagtttact

SEQ ID NO: 627573 - DNA, 15 bp, Homo sapiens
tcagggagtttactg

SEQ ID NO: 627574 - DNA, 15 bp, Homo sapiens
cagggagtttactga

SEQ ID NO: 627575 - DNA, 15 bp, Homo sapiens
agggagtttactgag

SEQ ID NO: 627576 - DNA, 15 bp, Homo sapiens
gggagtttactgagc

SEQ ID NO: 627577 - DNA, 15 bp, Homo sapiens
ggagtttactgagcc

SEQ ID NO: 627578 - DNA, 15 bp, Homo sapiens
gagtttactgagccc

SEQ ID NO: 627579 - DNA, 15 bp, Homo sapiens
agtttactgagcccc

SEQ ID NO: 627580 - DNA, 15 bp, Homo sapiens
gtttactgagcccca

SEQ ID NO: 627581 - DNA, 15 bp, Homo sapiens
tttactgagccccag

SEQ ID NO: 627582 - DNA, 15 bp, Homo sapiens
ttactgagccccagg

SEQ ID NO: 627583 - DNA, 15 bp, Homo sapiens
tactgagccccaggt

SEQ ID NO: 627584 - DNA, 15 bp, Homo sapiens
actgagccccaggtc

SEQ ID NO: 627585 - DNA, 15 bp, Homo sapiens
ctgagccccaggtca

SEQ ID NO: 627586 - DNA, 15 bp, Homo sapiens
tgagccccaggtcac

SEQ ID NO: 627587 - DNA, 15 bp, Homo sapiens
gagccccaggtcaca

SEQ ID NO: 627588 - DNA, 15 bp, Homo sapiens
agccccaggtcacat

SEQ ID NO: 627589 - DNA, 15 bp, Homo sapiens
gccccaggtcacatt

SEQ ID NO: 627590 - DNA, 15 bp, Homo sapiens
ccccaggtcacattt

SEQ ID NO: 627591 - DNA, 15 bp, Homo sapiens
cccaggtcacattta

SEQ ID NO: 627592 - DNA, 15 bp, Homo sapiens
ccaggtcacatttat

SEQ ID NO: 627593 - DNA, 15 bp, Homo sapiens
caggtcacatttatg

SEQ ID NO: 627594 - DNA, 15 bp, Homo sapiens
aggtcacatttatga

SEQ ID NO: 627595 - DNA, 15 bp, Homo sapiens
ggtcacatttatgat

SEQ ID NO: 627596 - DNA, 15 bp, Homo sapiens
gtcacatttatgatc

SEQ ID NO: 627597 - DNA, 15 bp, Homo sapiens
tcacatttatgatcc

SEQ ID NO: 627598 - DNA, 15 bp, Homo sapiens
cacatttatgatcct

SEQ ID NO: 627599 - DNA, 15 bp, Homo sapiens
acatttatgatcctg

SEQ ID NO: 627600 - DNA, 15 bp, Homo sapiens
catttatgatcctgc

SEQ ID NO: 627601 - DNA, 15 bp, Homo sapiens
atttatgatcctgca

SEQ ID NO: 627602 - DNA, 15 bp, Homo sapiens
tttatgatcctgcag

SEQ ID NO: 627603 - DNA, 15 bp, Homo sapiens
ttatgatcctgcagg

SEQ ID NO: 627604 - DNA, 15 bp, Homo sapiens
tatgatcctgcagga

SEQ ID NO: 627605 - DNA, 15 bp, Homo sapiens
atgatcctgcaggag

SEQ ID NO: 627606 - DNA, 15 bp, Homo sapiens
tgatcctgcaggagc

SEQ ID NO: 627607 - DNA, 15 bp, Homo sapiens
gatcctgcaggagct

SEQ ID NO: 627608 - DNA, 15 bp, Homo sapiens
atcctgcaggagctc

SEQ ID NO: 627609 - DNA, 15 bp, Homo sapiens
tcctgcaggagctct

SEQ ID NO: 627610 - DNA, 15 bp, Homo sapiens
cctgcaggagctctt

SEQ ID NO: 627611 - DNA, 15 bp, Homo sapiens
ctgcaggagctcttg

SEQ ID NO: 627612 - DNA, 15 bp, Homo sapiens
tgcaggagctcttga

SEQ ID NO: 627613 - DNA, 15 bp, Homo sapiens
gcaggagctcttgaa

SEQ ID NO: 627614 - DNA, 15 bp, Homo sapiens
caggagctcttgaat

SEQ ID NO: 627615 - DNA, 15 bp, Homo sapiens
aggagctcttgaatc

SEQ ID NO: 627616 - DNA, 15 bp, Homo sapiens
ggagctcttgaatcc

SEQ ID NO: 627617 - DNA, 15 bp, Homo sapiens
gagctcttgaatccc

SEQ ID NO: 627618 - DNA, 15 bp, Homo sapiens
agctcttgaatccca

SEQ ID NO: 627619 - DNA, 15 bp, Homo sapiens
gctcttgaatcccag

SEQ ID NO: 627620 - DNA, 15 bp, Homo sapiens
ctcttgaatcccagg

SEQ ID NO: 627621 - DNA, 15 bp, Homo sapiens
tcttgaatcccaggt

SEQ ID NO: 627622 - DNA, 15 bp, Homo sapiens
cttgaatcccaggtt

SEQ ID NO: 627623 - DNA, 15 bp, Homo sapiens
ttgaatcccaggtta

SEQ ID NO: 627624 - DNA, 15 bp, Homo sapiens
tgaatcccaggttaa

SEQ ID NO: 627625 - DNA, 15 bp, Homo sapiens
gaatcccaggttaag

SEQ ID NO: 627626 - DNA, 15 bp, Homo sapiens
aatcccaggttaaga

SEQ ID NO: 627627 - DNA, 15 bp, Homo sapiens
atcccaggttaagaa

SEQ ID NO: 627628 - DNA, 15 bp, Homo sapiens
tcccaggttaagaac

SEQ ID NO: 627629 - DNA, 15 bp, Homo sapiens
cccaggttaagaacc

SEQ ID NO: 627630 - DNA, 15 bp, Homo sapiens
ccaggttaagaaccc

SEQ ID NO: 627631 - DNA, 15 bp, Homo sapiens
caggttaagaacccc

SEQ ID NO: 627632 - DNA, 15 bp, Homo sapiens
aggttaagaacccct

SEQ ID NO: 627633 - DNA, 15 bp, Homo sapiens
ggttaagaacccctg

SEQ ID NO: 627634 - DNA, 15 bp, Homo sapiens
gttaagaacccctgt

SEQ ID NO: 627635 - DNA, 15 bp, Homo sapiens
ttaagaacccctgtg

SEQ ID NO: 627636 - DNA, 15 bp, Homo sapiens
taagaacccctgtga

SEQ ID NO: 627637 - DNA, 15 bp, Homo sapiens
aagaacccctgtgat

SEQ ID NO: 627638 - DNA, 15 bp, Homo sapiens
agaacccctgtgatg

SEQ ID NO: 627639 - DNA, 15 bp, Homo sapiens
gaacccctgtgatga

SEQ ID NO: 627640 - DNA, 15 bp, Homo sapiens
aacccctgtgatgaa

SEQ ID NO: 627641 - DNA, 15 bp, Homo sapiens
acccctgtgatgaat

SEQ ID NO: 627642 - DNA, 15 bp, Homo sapiens
cccctgtgatgaatg

SEQ ID NO: 627643 - DNA, 15 bp, Homo sapiens
ccctgtgatgaatga

SEQ ID NO: 627644 - DNA, 15 bp, Homo sapiens
cctgtgatgaatgaa

SEQ ID NO: 627645 - DNA, 15 bp, Homo sapiens
ctgtgatgaatgaag

SEQ ID NO: 627646 - DNA, 15 bp, Homo sapiens
tgtgatgaatgaaga

SEQ ID NO: 627647 - DNA, 15 bp, Homo sapiens
gtgatgaatgaagaa

SEQ ID NO: 627648 - DNA, 15 bp, Homo sapiens
tgatgaatgaagaat

SEQ ID NO: 627649 - DNA, 15 bp, Homo sapiens
gatgaatgaagaatc

SEQ ID NO: 627650 - DNA, 15 bp, Homo sapiens
atgaatgaagaatcc

SEQ ID NO: 627651 - DNA, 15 bp, Homo sapiens
tgaatgaagaatcct

SEQ ID NO: 627652 - DNA, 15 bp, Homo sapiens
gaatgaagaatcctt

SEQ ID NO: 627653 - DNA, 15 bp, Homo sapiens
aatgaagaatccttc

SEQ ID NO: 627654 - DNA, 15 bp, Homo sapiens
atgaagaatccttcc

SEQ ID NO: 627655 - DNA, 15 bp, Homo sapiens
tgaagaatccttcct

SEQ ID NO: 627656 - DNA, 15 bp, Homo sapiens
gaagaatccttcctc

SEQ ID NO: 627657 - DNA, 15 bp, Homo sapiens
aagaatccttcctct

SEQ ID NO: 627658 - DNA, 15 bp, Homo sapiens
agaatccttcctctg

SEQ ID NO: 627659 - DNA, 15 bp, Homo sapiens
gaatccttcctctgg

SEQ ID NO: 627660 - DNA, 15 bp, Homo sapiens
aatccttcctctggg

SEQ ID NO: 627661 - DNA, 15 bp, Homo sapiens
atccttcctctgggt

SEQ ID NO: 627662 - DNA, 15 bp, Homo sapiens
tccttcctctgggtt

SEQ ID NO: 627663 - DNA, 15 bp, Homo sapiens
ccttcctctgggttg

SEQ ID NO: 627664 - DNA, 15 bp, Homo sapiens
cttcctctgggttga

SEQ ID NO: 627665 - DNA, 15 bp, Homo sapiens
ttcctctgggttgag

SEQ ID NO: 627666 - DNA, 15 bp, Homo sapiens
tcctctgggttgagt

SEQ ID NO: 627667 - DNA, 15 bp, Homo sapiens
cctctgggttgagtt

SEQ ID NO: 627668 - DNA, 15 bp, Homo sapiens
ctctgggttgagttt

SEQ ID NO: 627669 - DNA, 15 bp, Homo sapiens
tctgggttgagtttc

SEQ ID NO: 627670 - DNA, 15 bp, Homo sapiens
ctgggttgagtttct

SEQ ID NO: 627671 - DNA, 15 bp, Homo sapiens
tgggttgagtttcta

SEQ ID NO: 627672 - DNA, 15 bp, Homo sapiens
gggttgagtttctag

SEQ ID NO: 627673 - DNA, 15 bp, Homo sapiens
ggttgagtttctaga

SEQ ID NO: 627674 - DNA, 15 bp, Homo sapiens
gttgagtttctagat

SEQ ID NO: 627675 - DNA, 15 bp, Homo sapiens
ttgagtttctagata

SEQ ID NO: 627676 - DNA, 15 bp, Homo sapiens
tgagtttctagatag

SEQ ID NO: 627677 - DNA, 15 bp, Homo sapiens
gagtttctagatagg

SEQ ID NO: 627678 - DNA, 15 bp, Homo sapiens
agtttctagataggg

SEQ ID NO: 627679 - DNA, 15 bp, Homo sapiens
gtttctagatagggg

SEQ ID NO: 627680 - DNA, 15 bp, Homo sapiens
tttctagataggggc

SEQ ID NO: 627681 - DNA, 15 bp, Homo sapiens
ttctagataggggct

SEQ ID NO: 627682 - DNA, 15 bp, Homo sapiens
tctagataggggctc

SEQ ID NO: 627683 - DNA, 15 bp, Homo sapiens
ctagataggggctca

SEQ ID NO: 627684 - DNA, 15 bp, Homo sapiens
tagataggggctcat

SEQ ID NO: 627685 - DNA, 15 bp, Homo sapiens
agataggggctcatg

SEQ ID NO: 627686 - DNA, 15 bp, Homo sapiens
gataggggctcatgc

SEQ ID NO: 627687 - DNA, 15 bp, Homo sapiens
ataggggctcatgca

SEQ ID NO: 627688 - DNA, 15 bp, Homo sapiens
taggggctcatgcat

SEQ ID NO: 627689 - DNA, 15 bp, Homo sapiens
aggggctcatgcatg

SEQ ID NO: 627690 - DNA, 15 bp, Homo sapiens
ggggctcatgcatgg

SEQ ID NO: 627691 - DNA, 15 bp, Homo sapiens
gggctcatgcatggg

SEQ ID NO: 627692 - DNA, 15 bp, Homo sapiens
ggctcatgcatgggc

SEQ ID NO: 627693 - DNA, 15 bp, Homo sapiens
gctcatgcatgggcc

SEQ ID NO: 627694 - DNA, 15 bp, Homo sapiens
ctcatgcatgggcct

SEQ ID NO: 627695 - DNA, 15 bp, Homo sapiens
tcatgcatgggcctt

SEQ ID NO: 627696 - DNA, 15 bp, Homo sapiens
catgcatgggccttt

SEQ ID NO: 627697 - DNA, 15 bp, Homo sapiens
atgcatgggcctttg

SEQ ID NO: 627698 - DNA, 15 bp, Homo sapiens
tgcatgggcctttgg

SEQ ID NO: 627699 - DNA, 15 bp, Homo sapiens
gcatgggcctttggg

SEQ ID NO: 627700 - DNA, 15 bp, Homo sapiens
catgggcctttgggg

SEQ ID NO: 627701 - DNA, 15 bp, Homo sapiens
atgggcctttggggt

SEQ ID NO: 627702 - DNA, 15 bp, Homo sapiens
tgggcctttggggta

SEQ ID NO: 627703 - DNA, 15 bp, Homo sapiens
gggcctttggggtag

SEQ ID NO: 627704 - DNA, 15 bp, Homo sapiens
ggcctttggggtagc

SEQ ID NO: 627705 - DNA, 15 bp, Homo sapiens
gcctttggggtagcc

SEQ ID NO: 627706 - DNA, 15 bp, Homo sapiens
cctttggggtagcct

SEQ ID NO: 627707 - DNA, 15 bp, Homo sapiens
ctttggggtagccta

SEQ ID NO: 627708 - DNA, 15 bp, Homo sapiens
tttggggtagcctaa

SEQ ID NO: 627709 - DNA, 15 bp, Homo sapiens
ttggggtagcctaac

SEQ ID NO: 627710 - DNA, 15 bp, Homo sapiens
tggggtagcctaacc

SEQ ID NO: 627711 - DNA, 15 bp, Homo sapiens
ggggtagcctaacct

SEQ ID NO: 627712 - DNA, 15 bp, Homo sapiens
gggtagcctaacctg

SEQ ID NO: 627713 - DNA, 15 bp, Homo sapiens
ggtagcctaacctgc

SEQ ID NO: 627714 - DNA, 15 bp, Homo sapiens
gtagcctaacctgca

SEQ ID NO: 627715 - DNA, 15 bp, Homo sapiens
tagcctaacctgcat

SEQ ID NO: 627716 - DNA, 15 bp, Homo sapiens
agcctaacctgcatt

SEQ ID NO: 627717 - DNA, 15 bp, Homo sapiens
gcctaacctgcattg

SEQ ID NO: 627718 - DNA, 15 bp, Homo sapiens
cctaacctgcattgg

SEQ ID NO: 627719 - DNA, 15 bp, Homo sapiens
ctaacctgcattggc

SEQ ID NO: 627720 - DNA, 15 bp, Homo sapiens
taacctgcattggct

SEQ ID NO: 627721 - DNA, 15 bp, Homo sapiens
aacctgcattggcta

SEQ ID NO: 627722 - DNA, 15 bp, Homo sapiens
acctgcattggctat

SEQ ID NO: 627723 - DNA, 15 bp, Homo sapiens
cctgcattggctatt

SEQ ID NO: 627724 - DNA, 15 bp, Homo sapiens
ctgcattggctattt

SEQ ID NO: 627725 - DNA, 15 bp, Homo sapiens
tgcattggctatttg

SEQ ID NO: 627726 - DNA, 15 bp, Homo sapiens
gcattggctatttgt

SEQ ID NO: 627727 - DNA, 15 bp, Homo sapiens
cattggctatttgta

SEQ ID NO: 627728 - DNA, 15 bp, Homo sapiens
attggctatttgtag

SEQ ID NO: 627729 - DNA, 15 bp, Homo sapiens
ttggctatttgtagg

SEQ ID NO: 627730 - DNA, 15 bp, Homo sapiens
tggctatttgtaggc

SEQ ID NO: 627731 - DNA, 15 bp, Homo sapiens
ggctatttgtaggct

SEQ ID NO: 627732 - DNA, 15 bp, Homo sapiens
gctatttgtaggctg

SEQ ID NO: 627733 - DNA, 15 bp, Homo sapiens
ctatttgtaggctga

SEQ ID NO: 627734 - DNA, 15 bp, Homo sapiens
tatttgtaggctgat

SEQ ID NO: 627735 - DNA, 15 bp, Homo sapiens
atttgtaggctgata

SEQ ID NO: 627736 - DNA, 15 bp, Homo sapiens
tttgtaggctgatat

SEQ ID NO: 627737 - DNA, 15 bp, Homo sapiens
ttgtaggctgatatt

SEQ ID NO: 627738 - DNA, 15 bp, Homo sapiens
tgtaggctgatattt

SEQ ID NO: 627739 - DNA, 15 bp, Homo sapiens
gtaggctgatatttg

SEQ ID NO: 627740 - DNA, 15 bp, Homo sapiens
taggctgatatttgg

SEQ ID NO: 627741 - DNA, 15 bp, Homo sapiens
aggctgatatttggc

SEQ ID NO: 627742 - DNA, 15 bp, Homo sapiens
ggctgatatttggct

SEQ ID NO: 627743 - DNA, 15 bp, Homo sapiens
gctgatatttggctt

SEQ ID NO: 627744 - DNA, 15 bp, Homo sapiens
ctgatatttggcttt

SEQ ID NO: 627745 - DNA, 15 bp, Homo sapiens
tgatatttggctttg

SEQ ID NO: 627746 - DNA, 15 bp, Homo sapiens
gatatttggctttgc

SEQ ID NO: 627747 - DNA, 15 bp, Homo sapiens
atatttggctttgcc

SEQ ID NO: 627748 - DNA, 15 bp, Homo sapiens
tatttggctttgcca

SEQ ID NO: 627749 - DNA, 15 bp, Homo sapiens
atttggctttgccag

SEQ ID NO: 627750 - DNA, 15 bp, Homo sapiens
tttggctttgccaga

SEQ ID NO: 627751 - DNA, 15 bp, Homo sapiens
ttggctttgccagac

SEQ ID NO: 627752 - DNA, 15 bp, Homo sapiens
tggctttgccagacc

SEQ ID NO: 627753 - DNA, 15 bp, Homo sapiens
ggctttgccagacca

SEQ ID NO: 627754 - DNA, 15 bp, Homo sapiens
gctttgccagaccaa

SEQ ID NO: 627755 - DNA, 15 bp, Homo sapiens
ctttgccagaccaag

SEQ ID NO: 627756 - DNA, 15 bp, Homo sapiens
tttgccagaccaagg

SEQ ID NO: 627757 - DNA, 15 bp, Homo sapiens
ttgccagaccaagga

SEQ ID NO: 627758 - DNA, 15 bp, Homo sapiens
tgccagaccaaggag

SEQ ID NO: 627759 - DNA, 15 bp, Homo sapiens
gccagaccaaggagc

SEQ ID NO: 627760 - DNA, 15 bp, Homo sapiens
ccagaccaaggagca

SEQ ID NO: 627761 - DNA, 15 bp, Homo sapiens
cagaccaaggagcat

SEQ ID NO: 627762 - DNA, 15 bp, Homo sapiens
agaccaaggagcata

SEQ ID NO: 627763 - DNA, 15 bp, Homo sapiens
gaccaaggagcatag

SEQ ID NO: 627764 - DNA, 15 bp, Homo sapiens
accaaggagcataga

SEQ ID NO: 627765 - DNA, 15 bp, Homo sapiens
ccaaggagcatagag

SEQ ID NO: 627766 - DNA, 15 bp, Homo sapiens
caaggagcatagagg

SEQ ID NO: 627767 - DNA, 15 bp, Homo sapiens
aaggagcatagaggg

SEQ ID NO: 627768 - DNA, 15 bp, Homo sapiens
aggagcatagaggga

SEQ ID NO: 627769 - DNA, 15 bp, Homo sapiens
ggagcatagagggaa

SEQ ID NO: 627770 - DNA, 15 bp, Homo sapiens
gagcatagagggaaa

SEQ ID NO: 627771 - DNA, 15 bp, Homo sapiens
agcatagagggaaaa

SEQ ID NO: 627772 - DNA, 15 bp, Homo sapiens
gcatagagggaaaac

SEQ ID NO: 627773 - DNA, 15 bp, Homo sapiens
catagagggaaaact

SEQ ID NO: 627774 - DNA, 15 bp, Homo sapiens
atagagggaaaactg

SEQ ID NO: 627775 - DNA, 15 bp, Homo sapiens
tagagggaaaactgg

SEQ ID NO: 627776 - DNA, 15 bp, Homo sapiens
agagggaaaactggc

SEQ ID NO: 627777 - DNA, 15 bp, Homo sapiens
gagggaaaactggcg

SEQ ID NO: 627778 - DNA, 15 bp, Homo sapiens
agggaaaactggcgt

SEQ ID NO: 627779 - DNA, 15 bp, Homo sapiens
gggaaaactggcgtg

SEQ ID NO: 627780 - DNA, 15 bp, Homo sapiens
ggaaaactggcgtgt

SEQ ID NO: 627781 - DNA, 15 bp, Homo sapiens
gaaaactggcgtgtg

SEQ ID NO: 627782 - DNA, 15 bp, Homo sapiens
aaaactggcgtgtgc

SEQ ID NO: 627783 - DNA, 15 bp, Homo sapiens
aaactggcgtgtgcc

SEQ ID NO: 627784 - DNA, 15 bp, Homo sapiens
aactggcgtgtgccc

SEQ ID NO: 627785 - DNA, 15 bp, Homo sapiens
actggcgtgtgccct

SEQ ID NO: 627786 - DNA, 15 bp, Homo sapiens
ctggcgtgtgccctt

SEQ ID NO: 627787 - DNA, 15 bp, Homo sapiens
tggcgtgtgcccttg

SEQ ID NO: 627788 - DNA, 15 bp, Homo sapiens
ggcgtgtgcccttgg

SEQ ID NO: 627789 - DNA, 15 bp, Homo sapiens
gcgtgtgcccttgga

SEQ ID NO: 627790 - DNA, 15 bp, Homo sapiens
cgtgtgcccttggat

SEQ ID NO: 627791 - DNA, 15 bp, Homo sapiens
gtgtgcccttggatt

SEQ ID NO: 627792 - DNA, 15 bp, Homo sapiens
tgtgcccttggattc

SEQ ID NO: 627793 - DNA, 15 bp, Homo sapiens
gtgcccttggattct

SEQ ID NO: 627794 - DNA, 15 bp, Homo sapiens
tgcccttggattctg

SEQ ID NO: 627795 - DNA, 15 bp, Homo sapiens
gcccttggattctgg

SEQ ID NO: 627796 - DNA, 15 bp, Homo sapiens
cccttggattctgga

SEQ ID NO: 627797 - DNA, 15 bp, Homo sapiens
ccttggattctggag

SEQ ID NO: 627798 - DNA, 15 bp, Homo sapiens
cttggattctggagg

SEQ ID NO: 627799 - DNA, 15 bp, Homo sapiens
ttggattctggaggg

SEQ ID NO: 627800 - DNA, 15 bp, Homo sapiens
tggattctggagggt

SEQ ID NO: 627801 - DNA, 15 bp, Homo sapiens
ggattctggagggtg

SEQ ID NO: 627802 - DNA, 15 bp, Homo sapiens
gattctggagggtga

SEQ ID NO: 627803 - DNA, 15 bp, Homo sapiens
attctggagggtgac

SEQ ID NO: 627804 - DNA, 15 bp, Homo sapiens
ttctggagggtgact

SEQ ID NO: 627805 - DNA, 15 bp, Homo sapiens
tctggagggtgactg

SEQ ID NO: 627806 - DNA, 15 bp, Homo sapiens
ctggagggtgactgc

SEQ ID NO: 627807 - DNA, 15 bp, Homo sapiens
tggagggtgactgct

SEQ ID NO: 627808 - DNA, 15 bp, Homo sapiens
ggagggtgactgctg

SEQ ID NO: 627809 - DNA, 15 bp, Homo sapiens
gagggtgactgctgc

SEQ ID NO: 627810 - DNA, 15 bp, Homo sapiens
agggtgactgctgct

SEQ ID NO: 627811 - DNA, 15 bp, Homo sapiens
gggtgactgctgctc

SEQ ID NO: 627812 - DNA, 15 bp, Homo sapiens
ggtgactgctgctct

SEQ ID NO: 627813 - DNA, 15 bp, Homo sapiens
gtgactgctgctctc

SEQ ID NO: 627814 - DNA, 15 bp, Homo sapiens
tgactgctgctctct

SEQ ID NO: 627815 - DNA, 15 bp, Homo sapiens
gactgctgctctctg

SEQ ID NO: 627816 - DNA, 15 bp, Homo sapiens
actgctgctctctgt

SEQ ID NO: 627817 - DNA, 15 bp, Homo sapiens
ctgctgctctctgta

SEQ ID NO: 627818 - DNA, 15 bp, Homo sapiens
tgctgctctctgtaa

SEQ ID NO: 627819 - DNA, 15 bp, Homo sapiens
gctgctctctgtaat

SEQ ID NO: 627820 - DNA, 15 bp, Homo sapiens
ctgctctctgtaata

SEQ ID NO: 627821 - DNA, 15 bp, Homo sapiens
tgctctctgtaataa

SEQ ID NO: 627822 - DNA, 15 bp, Homo sapiens
gctctctgtaataaa

SEQ ID NO: 627823 - DNA, 15 bp, Homo sapiens
ctctctgtaataaaa

SEQ ID NO: 627824 - DNA, 15 bp, Homo sapiens
tctctgtaataaaat

SEQ ID NO: 627825 - DNA, 15 bp, Homo sapiens
ctctgtaataaaatg

SEQ ID NO: 627826 - DNA, 15 bp, Homo sapiens
tctgtaataaaatgt

SEQ ID NO: 627827 - DNA, 15 bp, Homo sapiens
ctgtaataaaatgtg

SEQ ID NO: 627828 - DNA, 15 bp, Homo sapiens
tgtaataaaatgtgt

SEQ ID NO: 627829 - DNA, 15 bp, Homo sapiens
gtaataaaatgtgtt

SEQ ID NO: 627830 - DNA, 15 bp, Homo sapiens
taataaaatgtgttt

SEQ ID NO: 627831 - DNA, 15 bp, Homo sapiens
aataaaatgtgttta

SEQ ID NO: 627832 - DNA, 15 bp, Homo sapiens
ataaaatgtgtttaa

SEQ ID NO: 627833 - DNA, 15 bp, Homo sapiens
taaaatgtgtttaaa

SEQ ID NO: 627834 - DNA, 15 bp, Homo sapiens
aaaatgtgtttaaac

SEQ ID NO: 627835 - DNA, 15 bp, Homo sapiens
aaatgtgtttaaaca

SEQ ID NO: 627836 - DNA, 15 bp, Homo sapiens
aatgtgtttaaacag

SEQ ID NO: 627837 - DNA, 15 bp, Homo sapiens
atgtgtttaaacaga

SEQ ID NO: 627838 - DNA, 15 bp, Homo sapiens
tgtgtttaaacagac

SEQ ID NO: 627839 - DNA, 15 bp, Homo sapiens
gtgtttaaacagact

SEQ ID NO: 627840 - DNA, 15 bp, Homo sapiens
tgtttaaacagactg

SEQ ID NO: 627841 - DNA, 15 bp, Homo sapiens
gtttaaacagactgg

SEQ ID NO: 627842 - DNA, 15 bp, Homo sapiens
tttaaacagactggt

SEQ ID NO: 627843 - DNA, 15 bp, Homo sapiens
ttaaacagactggtc

SEQ ID NO: 627844 - DNA, 15 bp, Homo sapiens
taaacagactggtcc

SEQ ID NO: 627845 - DNA, 15 bp, Homo sapiens
aaacagactggtccc

SEQ ID NO: 627846 - DNA, 15 bp, Homo sapiens
aacagactggtcccc

SEQ ID NO: 627847 - DNA, 15 bp, Homo sapiens
acagactggtcccct

SEQ ID NO: 627848 - DNA, 15 bp, Homo sapiens
cagactggtccccta

SEQ ID NO: 627849 - DNA, 15 bp, Homo sapiens
agactggtcccctat

SEQ ID NO: 627850 - DNA, 15 bp, Homo sapiens
gactggtcccctatg

SEQ ID NO: 627851 - DNA, 15 bp, Homo sapiens
actggtcccctatgg

SEQ ID NO: 627852 - DNA, 15 bp, Homo sapiens
ctggtcccctatggg

SEQ ID NO: 627853 - DNA, 15 bp, Homo sapiens
tggtcccctatgggc

SEQ ID NO: 627854 - DNA, 15 bp, Homo sapiens
ggtcccctatgggca

SEQ ID NO: 627855 - DNA, 15 bp, Homo sapiens
gtcccctatgggcag

SEQ ID NO: 627856 - DNA, 15 bp, Homo sapiens
tcccctatgggcagg

SEQ ID NO: 627857 - DNA, 15 bp, Homo sapiens
cccctatgggcagga

SEQ ID NO: 627858 - DNA, 15 bp, Homo sapiens
ccctatgggcaggac

SEQ ID NO: 627859 - DNA, 15 bp, Homo sapiens
cctatgggcaggaca

SEQ ID NO: 627860 - DNA, 15 bp, Homo sapiens
ctatgggcaggacag

SEQ ID NO: 627861 - DNA, 15 bp, Homo sapiens
tatgggcaggacaga

SEQ ID NO: 627862 - DNA, 15 bp, Homo sapiens
atgggcaggacagag

SEQ ID NO: 627863 - DNA, 15 bp, Homo sapiens
tgggcaggacagaga

SEQ ID NO: 627864 - DNA, 15 bp, Homo sapiens
gggcaggacagagag

SEQ ID NO: 627865 - DNA, 15 bp, Homo sapiens
ggcaggacagagagg

SEQ ID NO: 627866 - DNA, 15 bp, Homo sapiens
gcaggacagagagga

SEQ ID NO: 627867 - DNA, 15 bp, Homo sapiens
caggacagagaggat

SEQ ID NO: 627868 - DNA, 15 bp, Homo sapiens
aggacagagaggatg

SEQ ID NO: 627869 - DNA, 15 bp, Homo sapiens
ggacagagaggatga

SEQ ID NO: 627870 - DNA, 15 bp, Homo sapiens
gacagagaggatgag

SEQ ID NO: 627871 - DNA, 15 bp, Homo sapiens
acagagaggatgagc

SEQ ID NO: 627872 - DNA, 15 bp, Homo sapiens
cagagaggatgagct

SEQ ID NO: 627873 - DNA, 15 bp, Homo sapiens
agagaggatgagctc

SEQ ID NO: 627874 - DNA, 15 bp, Homo sapiens
gagaggatgagctct

SEQ ID NO: 627875 - DNA, 15 bp, Homo sapiens
agaggatgagctctc

SEQ ID NO: 627876 - DNA, 15 bp, Homo sapiens
gaggatgagctctca

SEQ ID NO: 627877 - DNA, 15 bp, Homo sapiens
aggatgagctctcac

SEQ ID NO: 627878 - DNA, 15 bp, Homo sapiens
ggatgagctctcact

SEQ ID NO: 627879 - DNA, 15 bp, Homo sapiens
gatgagctctcactc

SEQ ID NO: 627880 - DNA, 15 bp, Homo sapiens
atgagctctcactca

SEQ ID NO: 627881 - DNA, 15 bp, Homo sapiens
tgagctctcactcat

SEQ ID NO: 627882 - DNA, 15 bp, Homo sapiens
gagctctcactcatc

SEQ ID NO: 627883 - DNA, 15 bp, Homo sapiens
agctctcactcatct

SEQ ID NO: 627884 - DNA, 15 bp, Homo sapiens
gctctcactcatctg

SEQ ID NO: 627885 - DNA, 15 bp, Homo sapiens
ctctcactcatctgc

SEQ ID NO: 627886 - DNA, 15 bp, Homo sapiens
tctcactcatctgcc

SEQ ID NO: 627887 - DNA, 15 bp, Homo sapiens
ctcactcatctgcct

SEQ ID NO: 627888 - DNA, 15 bp, Homo sapiens
tcactcatctgcctc

SEQ ID NO: 627889 - DNA, 15 bp, Homo sapiens
cactcatctgcctct

SEQ ID NO: 627890 - DNA, 15 bp, Homo sapiens
actcatctgcctctt

SEQ ID NO: 627891 - DNA, 15 bp, Homo sapiens
ctcatctgcctcttt

SEQ ID NO: 627892 - DNA, 15 bp, Homo sapiens
tcatctgcctctttc

SEQ ID NO: 627893 - DNA, 15 bp, Homo sapiens
catctgcctctttcc

SEQ ID NO: 627894 - DNA, 15 bp, Homo sapiens
atctgcctctttcct

SEQ ID NO: 627895 - DNA, 15 bp, Homo sapiens
tctgcctctttcctg

SEQ ID NO: 627896 - DNA, 15 bp, Homo sapiens
ctgcctctttcctgg

SEQ ID NO: 627897 - DNA, 15 bp, Homo sapiens
tgcctctttcctggc

SEQ ID NO: 627898 - DNA, 15 bp, Homo sapiens
gcctctttcctggct

SEQ ID NO: 627899 - DNA, 15 bp, Homo sapiens
cctctttcctggctg

SEQ ID NO: 627900 - DNA, 15 bp, Homo sapiens
ctctttcctggctgc

SEQ ID NO: 627901 - DNA, 15 bp, Homo sapiens
tctttcctggctgca

SEQ ID NO: 627902 - DNA, 15 bp, Homo sapiens
ctttcctggctgcag

SEQ ID NO: 627903 - DNA, 15 bp, Homo sapiens
tttcctggctgcagg

SEQ ID NO: 627904 - DNA, 15 bp, Homo sapiens
ttcctggctgcagga

SEQ ID NO: 627905 - DNA, 15 bp, Homo sapiens
tcctggctgcaggaa

SEQ ID NO: 627906 - DNA, 15 bp, Homo sapiens
cctggctgcaggaaa

SEQ ID NO: 627907 - DNA, 15 bp, Homo sapiens
ctggctgcaggaaaa

SEQ ID NO: 627908 - DNA, 15 bp, Homo sapiens
tggctgcaggaaaag

SEQ ID NO: 627909 - DNA, 15 bp, Homo sapiens
ggctgcaggaaaagc

SEQ ID NO: 627910 - DNA, 15 bp, Homo sapiens
gctgcaggaaaagct

SEQ ID NO: 627911 - DNA, 15 bp, Homo sapiens
ctgcaggaaaagctt

SEQ ID NO: 627912 - DNA, 15 bp, Homo sapiens
tgcaggaaaagcttg

SEQ ID NO: 627913 - DNA, 15 bp, Homo sapiens
gcaggaaaagcttga

SEQ ID NO: 627914 - DNA, 15 bp, Homo sapiens
caggaaaagcttgaa

SEQ ID NO: 627915 - DNA, 15 bp, Homo sapiens
aggaaaagcttgaac

SEQ ID NO: 627916 - DNA, 15 bp, Homo sapiens
ggaaaagcttgaaca

SEQ ID NO: 627917 - DNA, 15 bp, Homo sapiens
gaaaagcttgaacag

SEQ ID NO: 627918 - DNA, 15 bp, Homo sapiens
aaaagcttgaacagt

SEQ ID NO: 627919 - DNA, 15 bp, Homo sapiens
aaagcttgaacagta

SEQ ID NO: 627920 - DNA, 15 bp, Homo sapiens
aagcttgaacagtaa

SEQ ID NO: 627921 - DNA, 15 bp, Homo sapiens
agcttgaacagtaaa

SEQ ID NO: 627922 - DNA, 15 bp, Homo sapiens
gcttgaacagtaaaa

SEQ ID NO: 627923 - DNA, 15 bp, Homo sapiens
cttgaacagtaaaac

SEQ ID NO: 627924 - DNA, 15 bp, Homo sapiens
ttgaacagtaaaact

SEQ ID NO: 627925 - DNA, 15 bp, Homo sapiens
tgaacagtaaaactt

SEQ ID NO: 627926 - DNA, 15 bp, Homo sapiens
gaacagtaaaacttc

SEQ ID NO: 627927 - DNA, 15 bp, Homo sapiens
aacagtaaaacttca

SEQ ID NO: 627928 - DNA, 15 bp, Homo sapiens
acagtaaaacttcag

SEQ ID NO: 627929 - DNA, 15 bp, Homo sapiens
cagtaaaacttcagc

SEQ ID NO: 627930 - DNA, 15 bp, Homo sapiens
agtaaaacttcagca

SEQ ID NO: 627931 - DNA, 15 bp, Homo sapiens
gtaaaacttcagcac

SEQ ID NO: 627932 - DNA, 15 bp, Homo sapiens
taaaacttcagcaca

SEQ ID NO: 627933 - DNA, 15 bp, Homo sapiens
aaaacttcagcacac

SEQ ID NO: 627934 - DNA, 15 bp, Homo sapiens
aaacttcagcacaca

SEQ ID NO: 627935 - DNA, 15 bp, Homo sapiens
aacttcagcacacac

SEQ ID NO: 627936 - DNA, 15 bp, Homo sapiens
acttcagcacacaca

SEQ ID NO: 627937 - DNA, 15 bp, Homo sapiens
cttcagcacacacaa

SEQ ID NO: 627938 - DNA, 15 bp, Homo sapiens
ttcagcacacacaat

SEQ ID NO: 627939 - DNA, 15 bp, Homo sapiens
tcagcacacacaata

SEQ ID NO: 627940 - DNA, 15 bp, Homo sapiens
cagcacacacaatag

SEQ ID NO: 627941 - DNA, 15 bp, Homo sapiens
agcacacacaataga

SEQ ID NO: 627942 - DNA, 15 bp, Homo sapiens
gcacacacaatagag

SEQ ID NO: 627943 - DNA, 15 bp, Homo sapiens
cacacacaatagagg

SEQ ID NO: 627944 - DNA, 15 bp, Homo sapiens
acacacaatagaggt

SEQ ID NO: 627945 - DNA, 15 bp, Homo sapiens
cacacaatagaggtg

SEQ ID NO: 627946 - DNA, 15 bp, Homo sapiens
acacaatagaggtgc

SEQ ID NO: 627947 - DNA, 15 bp, Homo sapiens
cacaatagaggtgcc

SEQ ID NO: 627948 - DNA, 15 bp, Homo sapiens
acaatagaggtgccc

SEQ ID NO: 627949 - DNA, 15 bp, Homo sapiens
caatagaggtgccca

SEQ ID NO: 627950 - DNA, 15 bp, Homo sapiens
aatagaggtgcccag

SEQ ID NO: 627951 - DNA, 15 bp, Homo sapiens
atagaggtgcccaga

SEQ ID NO: 627952 - DNA, 15 bp, Homo sapiens
tagaggtgcccagag

SEQ ID NO: 627953 - DNA, 15 bp, Homo sapiens
agaggtgcccagagg

SEQ ID NO: 627954 - DNA, 15 bp, Homo sapiens
gaggtgcccagagga

SEQ ID NO: 627955 - DNA, 15 bp, Homo sapiens
aggtgcccagaggaa

SEQ ID NO: 627956 - DNA, 15 bp, Homo sapiens
ggtgcccagaggaag

SEQ ID NO: 627957 - DNA, 15 bp, Homo sapiens
gtgcccagaggaagc

SEQ ID NO: 627958 - DNA, 15 bp, Homo sapiens
tgcccagaggaagcc

SEQ ID NO: 627959 - DNA, 15 bp, Homo sapiens
gcccagaggaagcct

SEQ ID NO: 627960 - DNA, 15 bp, Homo sapiens
cccagaggaagcctc

SEQ ID NO: 627961 - DNA, 15 bp, Homo sapiens
ccagaggaagcctct

SEQ ID NO: 627962 - DNA, 15 bp, Homo sapiens
cagaggaagcctctg

SEQ ID NO: 627963 - DNA, 15 bp, Homo sapiens
agaggaagcctctgc

SEQ ID NO: 627964 - DNA, 15 bp, Homo sapiens
gaggaagcctctgcc

SEQ ID NO: 627965 - DNA, 15 bp, Homo sapiens
aggaagcctctgccc

SEQ ID NO: 627966 - DNA, 15 bp, Homo sapiens
ggaagcctctgccct

SEQ ID NO: 627967 - DNA, 15 bp, Homo sapiens
gaagcctctgccctg

SEQ ID NO: 627968 - DNA, 15 bp, Homo sapiens
aagcctctgccctgg

SEQ ID NO: 627969 - DNA, 15 bp, Homo sapiens
agcctctgccctggt

SEQ ID NO: 627970 - DNA, 15 bp, Homo sapiens
gcctctgccctggtt

SEQ ID NO: 627971 - DNA, 15 bp, Homo sapiens
cctctgccctggttt

SEQ ID NO: 627972 - DNA, 15 bp, Homo sapiens
ctctgccctggttta

SEQ ID NO: 627973 - DNA, 15 bp, Homo sapiens
tctgccctggtttat

SEQ ID NO: 627974 - DNA, 15 bp, Homo sapiens
ctgccctggtttata

SEQ ID NO: 627975 - DNA, 15 bp, Homo sapiens
tgccctggtttataa

SEQ ID NO: 627976 - DNA, 15 bp, Homo sapiens
gccctggtttataag

SEQ ID NO: 627977 - DNA, 15 bp, Homo sapiens
ccctggtttataagt

SEQ ID NO: 627978 - DNA, 15 bp, Homo sapiens
cctggtttataagtg

SEQ ID NO: 627979 - DNA, 15 bp, Homo sapiens
ctggtttataagtgg

SEQ ID NO: 627980 - DNA, 15 bp, Homo sapiens
tggtttataagtgga

SEQ ID NO: 627981 - DNA, 15 bp, Homo sapiens
ggtttataagtggag

SEQ ID NO: 627982 - DNA, 15 bp, Homo sapiens
gtttataagtggagt

SEQ ID NO: 627983 - DNA, 15 bp, Homo sapiens
tttataagtggagtt

SEQ ID NO: 627984 - DNA, 15 bp, Homo sapiens
ttataagtggagtta

SEQ ID NO: 627985 - DNA, 15 bp, Homo sapiens
tataagtggagttag

SEQ ID NO: 627986 - DNA, 15 bp, Homo sapiens
ataagtggagttagg

SEQ ID NO: 627987 - DNA, 15 bp, Homo sapiens
taagtggagttaggt

SEQ ID NO: 627988 - DNA, 15 bp, Homo sapiens
aagtggagttaggtg

SEQ ID NO: 627989 - DNA, 15 bp, Homo sapiens
agtggagttaggtgc

SEQ ID NO: 627990 - DNA, 15 bp, Homo sapiens
gtggagttaggtgct

SEQ ID NO: 627991 - DNA, 15 bp, Homo sapiens
tggagttaggtgctg

SEQ ID NO: 627992 - DNA, 15 bp, Homo sapiens
ggagttaggtgctgc

SEQ ID NO: 627993 - DNA, 15 bp, Homo sapiens
gagttaggtgctgct

SEQ ID NO: 627994 - DNA, 15 bp, Homo sapiens
agttaggtgctgctg

SEQ ID NO: 627995 - DNA, 15 bp, Homo sapiens
gttaggtgctgctga

SEQ ID NO: 627996 - DNA, 15 bp, Homo sapiens
ttaggtgctgctgac

SEQ ID NO: 627997 - DNA, 15 bp, Homo sapiens
taggtgctgctgaca

SEQ ID NO: 627998 - DNA, 15 bp, Homo sapiens
aggtgctgctgacat

SEQ ID NO: 627999 - DNA, 15 bp, Homo sapiens
ggtgctgctgacatc

SEQ ID NO: 628000 - DNA, 15 bp, Homo sapiens
gtgctgctgacatct

SEQ ID NO: 628001 - DNA, 15 bp, Homo sapiens
tgctgctgacatctg

SEQ ID NO: 628002 - DNA, 15 bp, Homo sapiens
gctgctgacatctgt

SEQ ID NO: 628003 - DNA, 15 bp, Homo sapiens
ctgctgacatctgtc

SEQ ID NO: 628004 - DNA, 15 bp, Homo sapiens
tgctgacatctgtcc

SEQ ID NO: 628005 - DNA, 15 bp, Homo sapiens
gctgacatctgtcca

SEQ ID NO: 628006 - DNA, 15 bp, Homo sapiens
ctgacatctgtccag

SEQ ID NO: 628007 - DNA, 15 bp, Homo sapiens
tgacatctgtccagc

SEQ ID NO: 628008 - DNA, 15 bp, Homo sapiens
gacatctgtccagca

SEQ ID NO: 628009 - DNA, 15 bp, Homo sapiens
acatctgtccagcat

SEQ ID NO: 628010 - DNA, 15 bp, Homo sapiens
catctgtccagcatc

SEQ ID NO: 628011 - DNA, 15 bp, Homo sapiens
atctgtccagcatct

SEQ ID NO: 628012 - DNA, 15 bp, Homo sapiens
tctgtccagcatctg

SEQ ID NO: 628013 - DNA, 15 bp, Homo sapiens
ctgtccagcatctgc

SEQ ID NO: 628014 - DNA, 15 bp, Homo sapiens
tgtccagcatctgct

SEQ ID NO: 628015 - DNA, 15 bp, Homo sapiens
gtccagcatctgctt

SEQ ID NO: 628016 - DNA, 15 bp, Homo sapiens
tccagcatctgcttg

SEQ ID NO: 628017 - DNA, 15 bp, Homo sapiens
ccagcatctgcttga

SEQ ID NO: 628018 - DNA, 15 bp, Homo sapiens
cagcatctgcttgac

SEQ ID NO: 628019 - DNA, 15 bp, Homo sapiens
agcatctgcttgact

SEQ ID NO: 628020 - DNA, 15 bp, Homo sapiens
gcatctgcttgactg

SEQ ID NO: 628021 - DNA, 15 bp, Homo sapiens
catctgcttgactgg

SEQ ID NO: 628022 - DNA, 15 bp, Homo sapiens
atctgcttgactggg

SEQ ID NO: 628023 - DNA, 15 bp, Homo sapiens
tctgcttgactgggg

SEQ ID NO: 628024 - DNA, 15 bp, Homo sapiens
ctgcttgactggggc

SEQ ID NO: 628025 - DNA, 15 bp, Homo sapiens
tgcttgactggggcc

SEQ ID NO: 628026 - DNA, 15 bp, Homo sapiens
gcttgactggggcct

SEQ ID NO: 628027 - DNA, 15 bp, Homo sapiens
cttgactggggcctc

SEQ ID NO: 628028 - DNA, 15 bp, Homo sapiens
ttgactggggcctct

SEQ ID NO: 628029 - DNA, 15 bp, Homo sapiens
tgactggggcctctt

SEQ ID NO: 628030 - DNA, 15 bp, Homo sapiens
gactggggcctcttc

SEQ ID NO: 628031 - DNA, 15 bp, Homo sapiens
actggggcctcttcc

SEQ ID NO: 628032 - DNA, 15 bp, Homo sapiens
ctggggcctcttcct

SEQ ID NO: 628033 - DNA, 15 bp, Homo sapiens
tggggcctcttcctc

SEQ ID NO: 628034 - DNA, 15 bp, Homo sapiens
ggggcctcttcctct

SEQ ID NO: 628035 - DNA, 15 bp, Homo sapiens
gggcctcttcctctc

SEQ ID NO: 628036 - DNA, 15 bp, Homo sapiens
ggcctcttcctctct

SEQ ID NO: 628037 - DNA, 15 bp, Homo sapiens
gcctcttcctctctc

SEQ ID NO: 628038 - DNA, 15 bp, Homo sapiens
cctcttcctctctcc

SEQ ID NO: 628039 - DNA, 15 bp, Homo sapiens
ctcttcctctctcct

SEQ ID NO: 628040 - DNA, 15 bp, Homo sapiens
tcttcctctctcctg

SEQ ID NO: 628041 - DNA, 15 bp, Homo sapiens
cttcctctctcctga

SEQ ID NO: 628042 - DNA, 15 bp, Homo sapiens
ttcctctctcctgaa

SEQ ID NO: 628043 - DNA, 15 bp, Homo sapiens
tcctctctcctgaaa

SEQ ID NO: 628044 - DNA, 15 bp, Homo sapiens
cctctctcctgaaag

SEQ ID NO: 628045 - DNA, 15 bp, Homo sapiens
ctctctcctgaaagc

SEQ ID NO: 628046 - DNA, 15 bp, Homo sapiens
tctctcctgaaagcc

SEQ ID NO: 628047 - DNA, 15 bp, Homo sapiens
ctctcctgaaagcca

SEQ ID NO: 628048 - DNA, 15 bp, Homo sapiens
tctcctgaaagccat

SEQ ID NO: 628049 - DNA, 15 bp, Homo sapiens
ctcctgaaagccatc

SEQ ID NO: 628050 - DNA, 15 bp, Homo sapiens
tcctgaaagccatcc

SEQ ID NO: 628051 - DNA, 15 bp, Homo sapiens
cctgaaagccatcct

SEQ ID NO: 628052 - DNA, 15 bp, Homo sapiens
ctgaaagccatcctc

SEQ ID NO: 628053 - DNA, 15 bp, Homo sapiens
tgaaagccatcctca

SEQ ID NO: 628054 - DNA, 15 bp, Homo sapiens
gaaagccatcctcag

SEQ ID NO: 628055 - DNA, 15 bp, Homo sapiens
aaagccatcctcagc

SEQ ID NO: 628056 - DNA, 15 bp, Homo sapiens
aagccatcctcagca

SEQ ID NO: 628057 - DNA, 15 bp, Homo sapiens
agccatcctcagcat

SEQ ID NO: 628058 - DNA, 15 bp, Homo sapiens
gccatcctcagcatg

SEQ ID NO: 628059 - DNA, 15 bp, Homo sapiens
ccatcctcagcatgg

SEQ ID NO: 628060 - DNA, 15 bp, Homo sapiens
catcctcagcatggc

SEQ ID NO: 628061 - DNA, 15 bp, Homo sapiens
atcctcagcatggcc

SEQ ID NO: 628062 - DNA, 15 bp, Homo sapiens
tcctcagcatggccc

SEQ ID NO: 628063 - DNA, 15 bp, Homo sapiens
cctcagcatggccca

SEQ ID NO: 628064 - DNA, 15 bp, Homo sapiens
ctcagcatggcccaa

SEQ ID NO: 628065 - DNA, 15 bp, Homo sapiens
tcagcatggcccaat

SEQ ID NO: 628066 - DNA, 15 bp, Homo sapiens
cagcatggcccaatg

SEQ ID NO: 628067 - DNA, 15 bp, Homo sapiens
agcatggcccaatgc

SEQ ID NO: 628068 - DNA, 15 bp, Homo sapiens
gcatggcccaatgcc

SEQ ID NO: 628069 - DNA, 15 bp, Homo sapiens
catggcccaatgccc

SEQ ID NO: 628070 - DNA, 15 bp, Homo sapiens
atggcccaatgccca

SEQ ID NO: 628071 - DNA, 15 bp, Homo sapiens
tggcccaatgcccag

SEQ ID NO: 628072 - DNA, 15 bp, Homo sapiens
ggcccaatgcccagt

SEQ ID NO: 628073 - DNA, 15 bp, Homo sapiens
gcccaatgcccagtg

SEQ ID NO: 628074 - DNA, 15 bp, Homo sapiens
cccaatgcccagtgg

SEQ ID NO: 628075 - DNA, 15 bp, Homo sapiens
ccaatgcccagtggg

SEQ ID NO: 628076 - DNA, 15 bp, Homo sapiens
caatgcccagtgggc

SEQ ID NO: 628077 - DNA, 15 bp, Homo sapiens
aatgcccagtgggca

SEQ ID NO: 628078 - DNA, 15 bp, Homo sapiens
atgcccagtgggcag

SEQ ID NO: 628079 - DNA, 15 bp, Homo sapiens
tgcccagtgggcagg

SEQ ID NO: 628080 - DNA, 15 bp, Homo sapiens
gcccagtgggcagga

SEQ ID NO: 628081 - DNA, 15 bp, Homo sapiens
cccagtgggcaggac

SEQ ID NO: 628082 - DNA, 15 bp, Homo sapiens
ccagtgggcaggacg

SEQ ID NO: 628083 - DNA, 15 bp, Homo sapiens
cagtgggcaggacga

SEQ ID NO: 628084 - DNA, 15 bp, Homo sapiens
agtgggcaggacgag

SEQ ID NO: 628085 - DNA, 15 bp, Homo sapiens
gtgggcaggacgagt

SEQ ID NO: 628086 - DNA, 15 bp, Homo sapiens
tgggcaggacgagtc

SEQ ID NO: 628087 - DNA, 15 bp, Homo sapiens
gggcaggacgagtcc

SEQ ID NO: 628088 - DNA, 15 bp, Homo sapiens
ggcaggacgagtcct

SEQ ID NO: 628089 - DNA, 15 bp, Homo sapiens
gcaggacgagtcctg

SEQ ID NO: 628090 - DNA, 15 bp, Homo sapiens
caggacgagtcctga

SEQ ID NO: 628091 - DNA, 15 bp, Homo sapiens
aggacgagtcctgag

SEQ ID NO: 628092 - DNA, 15 bp, Homo sapiens
ggacgagtcctgagc

SEQ ID NO: 628093 - DNA, 15 bp, Homo sapiens
gacgagtcctgagca

SEQ ID NO: 628094 - DNA, 15 bp, Homo sapiens
acgagtcctgagcac

SEQ ID NO: 628095 - DNA, 15 bp, Homo sapiens
cgagtcctgagcacg

SEQ ID NO: 628096 - DNA, 15 bp, Homo sapiens
gagtcctgagcacgc

SEQ ID NO: 628097 - DNA, 15 bp, Homo sapiens
agtcctgagcacgct

SEQ ID NO: 628098 - DNA, 15 bp, Homo sapiens
gtcctgagcacgctt

SEQ ID NO: 628099 - DNA, 15 bp, Homo sapiens
tcctgagcacgcttc

SEQ ID NO: 628100 - DNA, 15 bp, Homo sapiens
cctgagcacgcttca

SEQ ID NO: 628101 - DNA, 15 bp, Homo sapiens
ctgagcacgcttcac

SEQ ID NO: 628102 - DNA, 15 bp, Homo sapiens
tgagcacgcttcact

SEQ ID NO: 628103 - DNA, 15 bp, Homo sapiens
gagcacgcttcactg

SEQ ID NO: 628104 - DNA, 15 bp, Homo sapiens
agcacgcttcactgg

SEQ ID NO: 628105 - DNA, 15 bp, Homo sapiens
gcacgcttcactggc

SEQ ID NO: 628106 - DNA, 15 bp, Homo sapiens
cacgcttcactggct

SEQ ID NO: 628107 - DNA, 15 bp, Homo sapiens
acgcttcactggctc

SEQ ID NO: 628108 - DNA, 15 bp, Homo sapiens
cgcttcactggctca

SEQ ID NO: 628109 - DNA, 15 bp, Homo sapiens
gcttcactggctcag

SEQ ID NO: 628110 - DNA, 15 bp, Homo sapiens
cttcactggctcaga

SEQ ID NO: 628111 - DNA, 15 bp, Homo sapiens
ttcactggctcagac

SEQ ID NO: 628112 - DNA, 15 bp, Homo sapiens
tcactggctcagaca

SEQ ID NO: 628113 - DNA, 15 bp, Homo sapiens
cactggctcagacag

SEQ ID NO: 628114 - DNA, 15 bp, Homo sapiens
actggctcagacagg

SEQ ID NO: 628115 - DNA, 15 bp, Homo sapiens
ctggctcagacagga

SEQ ID NO: 628116 - DNA, 15 bp, Homo sapiens
tggctcagacaggat

SEQ ID NO: 628117 - DNA, 15 bp, Homo sapiens
ggctcagacaggatg

SEQ ID NO: 628118 - DNA, 15 bp, Homo sapiens
gctcagacaggatga

SEQ ID NO: 628119 - DNA, 15 bp, Homo sapiens
ctcagacaggatgaa

SEQ ID NO: 628120 - DNA, 15 bp, Homo sapiens
tcagacaggatgaat

SEQ ID NO: 628121 - DNA, 15 bp, Homo sapiens
cagacaggatgaatt

SEQ ID NO: 628122 - DNA, 15 bp, Homo sapiens
agacaggatgaattt

SEQ ID NO: 628123 - DNA, 15 bp, Homo sapiens
gacaggatgaatttg

SEQ ID NO: 628124 - DNA, 15 bp, Homo sapiens
acaggatgaatttga

SEQ ID NO: 628125 - DNA, 15 bp, Homo sapiens
caggatgaatttgat

SEQ ID NO: 628126 - DNA, 15 bp, Homo sapiens
aggatgaatttgatt

SEQ ID NO: 628127 - DNA, 15 bp, Homo sapiens
ggatgaatttgattc

SEQ ID NO: 628128 - DNA, 15 bp, Homo sapiens
gatgaatttgattct

SEQ ID NO: 628129 - DNA, 15 bp, Homo sapiens
atgaatttgattctt

SEQ ID NO: 628130 - DNA, 15 bp, Homo sapiens
tgaatttgattcttt

SEQ ID NO: 628131 - DNA, 15 bp, Homo sapiens
gaatttgattctttg

SEQ ID NO: 628132 - DNA, 15 bp, Homo sapiens
aatttgattctttgg

SEQ ID NO: 628133 - DNA, 15 bp, Homo sapiens
atttgattctttggc

SEQ ID NO: 628134 - DNA, 15 bp, Homo sapiens
tttgattctttggcc

SEQ ID NO: 628135 - DNA, 15 bp, Homo sapiens
ttgattctttggcct

SEQ ID NO: 628136 - DNA, 15 bp, Homo sapiens
tgattctttggcctc

SEQ ID NO: 628137 - DNA, 15 bp, Homo sapiens
gattctttggcctcc

SEQ ID NO: 628138 - DNA, 15 bp, Homo sapiens
attctttggcctcca

SEQ ID NO: 628139 - DNA, 15 bp, Homo sapiens
ttctttggcctccat

SEQ ID NO: 628140 - DNA, 15 bp, Homo sapiens
tctttggcctccata

SEQ ID NO: 628141 - DNA, 15 bp, Homo sapiens
ctttggcctccatag

SEQ ID NO: 628142 - DNA, 15 bp, Homo sapiens
tttggcctccatagc

SEQ ID NO: 628143 - DNA, 15 bp, Homo sapiens
ttggcctccatagcc

SEQ ID NO: 628144 - DNA, 15 bp, Homo sapiens
tggcctccatagcca

SEQ ID NO: 628145 - DNA, 15 bp, Homo sapiens
ggcctccatagccag

SEQ ID NO: 628146 - DNA, 15 bp, Homo sapiens
gcctccatagccagc

SEQ ID NO: 628147 - DNA, 15 bp, Homo sapiens
cctccatagccagcc

SEQ ID NO: 628148 - DNA, 15 bp, Homo sapiens
ctccatagccagccc

SEQ ID NO: 628149 - DNA, 15 bp, Homo sapiens
tccatagccagccct

SEQ ID NO: 628150 - DNA, 15 bp, Homo sapiens
ccatagccagcccta

SEQ ID NO: 628151 - DNA, 15 bp, Homo sapiens
catagccagccctac

SEQ ID NO: 628152 - DNA, 15 bp, Homo sapiens
atagccagccctact

SEQ ID NO: 628153 - DNA, 15 bp, Homo sapiens
tagccagccctactg

SEQ ID NO: 628154 - DNA, 15 bp, Homo sapiens
agccagccctactgg

SEQ ID NO: 628155 - DNA, 15 bp, Homo sapiens
gccagccctactggg

SEQ ID NO: 628156 - DNA, 15 bp, Homo sapiens
ccagccctactgggt

SEQ ID NO: 628157 - DNA, 15 bp, Homo sapiens
cagccctactgggtt

SEQ ID NO: 628158 - DNA, 15 bp, Homo sapiens
agccctactgggttt

SEQ ID NO: 628159 - DNA, 15 bp, Homo sapiens
gccctactgggttta

SEQ ID NO: 628160 - DNA, 15 bp, Homo sapiens
ccctactgggtttac

SEQ ID NO: 628161 - DNA, 15 bp, Homo sapiens
cctactgggtttaca

SEQ ID NO: 628162 - DNA, 15 bp, Homo sapiens
ctactgggtttacag

SEQ ID NO: 628163 - DNA, 15 bp, Homo sapiens
tactgggtttacaga

SEQ ID NO: 628164 - DNA, 15 bp, Homo sapiens
actgggtttacagaa

SEQ ID NO: 628165 - DNA, 15 bp, Homo sapiens
ctgggtttacagaaa

SEQ ID NO: 628166 - DNA, 15 bp, Homo sapiens
tgggtttacagaaaa

SEQ ID NO: 628167 - DNA, 15 bp, Homo sapiens
gggtttacagaaaag

SEQ ID NO: 628168 - DNA, 15 bp, Homo sapiens
ggtttacagaaaagg

SEQ ID NO: 628169 - DNA, 15 bp, Homo sapiens
gtttacagaaaaggg

SEQ ID NO: 628170 - DNA, 15 bp, Homo sapiens
tttacagaaaaggga

SEQ ID NO: 628171 - DNA, 15 bp, Homo sapiens
ttacagaaaagggac

SEQ ID NO: 628172 - DNA, 15 bp, Homo sapiens
tacagaaaagggaca

SEQ ID NO: 628173 - DNA, 15 bp, Homo sapiens
acagaaaagggacag

SEQ ID NO: 628174 - DNA, 15 bp, Homo sapiens
cagaaaagggacagg

SEQ ID NO: 628175 - DNA, 15 bp, Homo sapiens
agaaaagggacaggc

SEQ ID NO: 628176 - DNA, 15 bp, Homo sapiens
gaaaagggacaggca

SEQ ID NO: 628177 - DNA, 15 bp, Homo sapiens
aaaagggacaggcag

SEQ ID NO: 628178 - DNA, 15 bp, Homo sapiens
aaagggacaggcagg

SEQ ID NO: 628179 - DNA, 15 bp, Homo sapiens
aagggacaggcaggg

SEQ ID NO: 628180 - DNA, 15 bp, Homo sapiens
agggacaggcagggg

SEQ ID NO: 628181 - DNA, 15 bp, Homo sapiens
gggacaggcaggggt

SEQ ID NO: 628182 - DNA, 15 bp, Homo sapiens
ggacaggcaggggtg

SEQ ID NO: 628183 - DNA, 15 bp, Homo sapiens
gacaggcaggggtga

SEQ ID NO: 628184 - DNA, 15 bp, Homo sapiens
acaggcaggggtgaa

SEQ ID NO: 628185 - DNA, 15 bp, Homo sapiens
caggcaggggtgaag

SEQ ID NO: 628186 - DNA, 15 bp, Homo sapiens
aggcaggggtgaagc

SEQ ID NO: 628187 - DNA, 15 bp, Homo sapiens
ggcaggggtgaagcc

SEQ ID NO: 628188 - DNA, 15 bp, Homo sapiens
gcaggggtgaagcca

SEQ ID NO: 628189 - DNA, 15 bp, Homo sapiens
caggggtgaagccag

SEQ ID NO: 628190 - DNA, 15 bp, Homo sapiens
aggggtgaagccagg

SEQ ID NO: 628191 - DNA, 15 bp, Homo sapiens
ggggtgaagccaggt

SEQ ID NO: 628192 - DNA, 15 bp, Homo sapiens
gggtgaagccaggtc

SEQ ID NO: 628193 - DNA, 15 bp, Homo sapiens
ggtgaagccaggtca

SEQ ID NO: 628194 - DNA, 15 bp, Homo sapiens
gtgaagccaggtcat

SEQ ID NO: 628195 - DNA, 15 bp, Homo sapiens
tgaagccaggtcatg

SEQ ID NO: 628196 - DNA, 15 bp, Homo sapiens
gaagccaggtcatgg

SEQ ID NO: 628197 - DNA, 15 bp, Homo sapiens
aagccaggtcatggc

SEQ ID NO: 628198 - DNA, 15 bp, Homo sapiens
agccaggtcatggct

SEQ ID NO: 628199 - DNA, 15 bp, Homo sapiens
gccaggtcatggctg

SEQ ID NO: 628200 - DNA, 15 bp, Homo sapiens
ccaggtcatggctga

SEQ ID NO: 628201 - DNA, 15 bp, Homo sapiens
caggtcatggctgag

SEQ ID NO: 628202 - DNA, 15 bp, Homo sapiens
aggtcatggctgagt

SEQ ID NO: 628203 - DNA, 15 bp, Homo sapiens
ggtcatggctgagtc

SEQ ID NO: 628204 - DNA, 15 bp, Homo sapiens
gtcatggctgagtcc

SEQ ID NO: 628205 - DNA, 15 bp, Homo sapiens
tcatggctgagtcca

SEQ ID NO: 628206 - DNA, 15 bp, Homo sapiens
catggctgagtccat

SEQ ID NO: 628207 - DNA, 15 bp, Homo sapiens
atggctgagtccatc

SEQ ID NO: 628208 - DNA, 15 bp, Homo sapiens
tggctgagtccatct

SEQ ID NO: 628209 - DNA, 15 bp, Homo sapiens
ggctgagtccatctc

SEQ ID NO: 628210 - DNA, 15 bp, Homo sapiens
gctgagtccatctca

SEQ ID NO: 628211 - DNA, 15 bp, Homo sapiens
ctgagtccatctcaa

SEQ ID NO: 628212 - DNA, 15 bp, Homo sapiens
tgagtccatctcaac

SEQ ID NO: 628213 - DNA, 15 bp, Homo sapiens
gagtccatctcaaca

SEQ ID NO: 628214 - DNA, 15 bp, Homo sapiens
agtccatctcaacag

SEQ ID NO: 628215 - DNA, 15 bp, Homo sapiens
gtccatctcaacaga

SEQ ID NO: 628216 - DNA, 15 bp, Homo sapiens
tccatctcaacagat

SEQ ID NO: 628217 - DNA, 15 bp, Homo sapiens
ccatctcaacagatc

SEQ ID NO: 628218 - DNA, 15 bp, Homo sapiens
catctcaacagatcc

SEQ ID NO: 628219 - DNA, 15 bp, Homo sapiens
atctcaacagatcca

SEQ ID NO: 628220 - DNA, 15 bp, Homo sapiens
tctcaacagatccag

SEQ ID NO: 628221 - DNA, 15 bp, Homo sapiens
ctcaacagatccagc

SEQ ID NO: 628222 - DNA, 15 bp, Homo sapiens
tcaacagatccagct

SEQ ID NO: 628223 - DNA, 15 bp, Homo sapiens
caacagatccagctt

SEQ ID NO: 628224 - DNA, 15 bp, Homo sapiens
aacagatccagcttc

SEQ ID NO: 628225 - DNA, 15 bp, Homo sapiens
acagatccagcttca

SEQ ID NO: 628226 - DNA, 15 bp, Homo sapiens
cagatccagcttcac

SEQ ID NO: 628227 - DNA, 15 bp, Homo sapiens
agatccagcttcacc

SEQ ID NO: 628228 - DNA, 15 bp, Homo sapiens
gatccagcttcacct

SEQ ID NO: 628229 - DNA, 15 bp, Homo sapiens
atccagcttcacctg

SEQ ID NO: 628230 - DNA, 15 bp, Homo sapiens
tccagcttcacctgc

SEQ ID NO: 628231 - DNA, 15 bp, Homo sapiens
ccagcttcacctgca

SEQ ID NO: 628232 - DNA, 15 bp, Homo sapiens
cagcttcacctgcaa

SEQ ID NO: 628233 - DNA, 15 bp, Homo sapiens
agcttcacctgcaag

SEQ ID NO: 628234 - DNA, 15 bp, Homo sapiens
gcttcacctgcaagt

SEQ ID NO: 628235 - DNA, 15 bp, Homo sapiens
cttcacctgcaagtg

SEQ ID NO: 628236 - DNA, 15 bp, Homo sapiens
ttcacctgcaagtga

SEQ ID NO: 628237 - DNA, 15 bp, Homo sapiens
tcacctgcaagtgac

SEQ ID NO: 628238 - DNA, 15 bp, Homo sapiens
cacctgcaagtgacc

SEQ ID NO: 628239 - DNA, 15 bp, Homo sapiens
acctgcaagtgacca

SEQ ID NO: 628240 - DNA, 15 bp, Homo sapiens
taatttaccctcaaa

SEQ ID NO: 628241 - DNA, 15 bp, Homo sapiens
aatttaccctcaaat

SEQ ID NO: 628242 - DNA, 15 bp, Homo sapiens
atttaccctcaaatg

SEQ ID NO: 628243 - DNA, 15 bp, Homo sapiens
tttaccctcaaatgg

SEQ ID NO: 628244 - DNA, 15 bp, Homo sapiens
ttaccctcaaatggg

SEQ ID NO: 628245 - DNA, 15 bp, Homo sapiens
taccctcaaatgggt

SEQ ID NO: 628246 - DNA, 15 bp, Homo sapiens
accctcaaatgggtc

SEQ ID NO: 628247 - DNA, 15 bp, Homo sapiens
ccctcaaatgggtca

SEQ ID NO: 628248 - DNA, 15 bp, Homo sapiens
cctcaaatgggtcac

SEQ ID NO: 628249 - DNA, 15 bp, Homo sapiens
ctcaaatgggtcaca

SEQ ID NO: 628250 - DNA, 15 bp, Homo sapiens
tcaaatgggtcacaa

SEQ ID NO: 628251 - DNA, 15 bp, Homo sapiens
caaatgggtcacaaa

SEQ ID NO: 628252 - DNA, 15 bp, Homo sapiens
aaatgggtcacaaaa

SEQ ID NO: 628253 - DNA, 15 bp, Homo sapiens
aatgggtcacaaaaa

SEQ ID NO: 628254 - DNA, 15 bp, Homo sapiens
atgggtcacaaaaaa

SEQ ID NO: 628255 - DNA, 15 bp, Homo sapiens
tgggtcacaaaaaat

SEQ ID NO: 628256 - DNA, 15 bp, Homo sapiens
gggtcacaaaaaatt

SEQ ID NO: 628257 - DNA, 15 bp, Homo sapiens
ggtcacaaaaaattg

SEQ ID NO: 628258 - DNA, 15 bp, Homo sapiens
gtcacaaaaaattgt

SEQ ID NO: 628259 - DNA, 15 bp, Homo sapiens
tcacaaaaaattgtg

SEQ ID NO: 628260 - DNA, 15 bp, Homo sapiens
cacaaaaaattgtgt

SEQ ID NO: 628261 - DNA, 15 bp, Homo sapiens
acaaaaaattgtgtg

SEQ ID NO: 628262 - DNA, 15 bp, Homo sapiens
caaaaaattgtgtgt

SEQ ID NO: 628263 - DNA, 15 bp, Homo sapiens
aaaaaattgtgtgtg

SEQ ID NO: 628264 - DNA, 15 bp, Homo sapiens
aaaaattgtgtgtga

SEQ ID NO: 628265 - DNA, 15 bp, Homo sapiens
aaaattgtgtgtgag

SEQ ID NO: 628266 - DNA, 15 bp, Homo sapiens
aaattgtgtgtgaga

SEQ ID NO: 628267 - DNA, 15 bp, Homo sapiens
aattgtgtgtgagag

SEQ ID NO: 628268 - DNA, 15 bp, Homo sapiens
attgtgtgtgagaga

SEQ ID NO: 628269 - DNA, 15 bp, Homo sapiens
ttgtgtgtgagagag

SEQ ID NO: 628270 - DNA, 15 bp, Homo sapiens
gtgtgtgagagagag

SEQ ID NO: 628271 - DNA, 15 bp, Homo sapiens
tgtgtgagagagaga

SEQ ID NO: 628272 - DNA, 15 bp, Homo sapiens
gtgtgagagagagaa

SEQ ID NO: 628273 - DNA, 15 bp, Homo sapiens
tgtgagagagagaag

SEQ ID NO: 628274 - DNA, 15 bp, Homo sapiens
gtgagagagagaagg

SEQ ID NO: 628275 - DNA, 15 bp, Homo sapiens
tgagagagagaaggg

SEQ ID NO: 628276 - DNA, 15 bp, Homo sapiens
gagagagagaagggt

SEQ ID NO: 628277 - DNA, 15 bp, Homo sapiens
agagagagaagggtt

SEQ ID NO: 628278 - DNA, 15 bp, Homo sapiens
gagagagaagggttt

SEQ ID NO: 628279 - DNA, 15 bp, Homo sapiens
agagagaagggtttt

SEQ ID NO: 628280 - DNA, 15 bp, Homo sapiens
gagagaagggtttta

SEQ ID NO: 628281 - DNA, 15 bp, Homo sapiens
agagaagggttttat

SEQ ID NO: 628282 - DNA, 15 bp, Homo sapiens
gagaagggttttatt

SEQ ID NO: 628283 - DNA, 15 bp, Homo sapiens
agaagggttttatta

SEQ ID NO: 628284 - DNA, 15 bp, Homo sapiens
gaagggttttattag

SEQ ID NO: 628285 - DNA, 15 bp, Homo sapiens
aagggttttattagt

SEQ ID NO: 628286 - DNA, 15 bp, Homo sapiens
agggttttattagtt

SEQ ID NO: 628287 - DNA, 15 bp, Homo sapiens
gggttttattagtta

SEQ ID NO: 628288 - DNA, 15 bp, Homo sapiens
ggttttattagttaa

SEQ ID NO: 628289 - DNA, 15 bp, Homo sapiens
gttttattagttaat

SEQ ID NO: 628290 - DNA, 15 bp, Homo sapiens
ttttattagttaata

SEQ ID NO: 628291 - DNA, 15 bp, Homo sapiens
tttattagttaataa

SEQ ID NO: 628292 - DNA, 15 bp, Homo sapiens
ttattagttaataat

SEQ ID NO: 628293 - DNA, 15 bp, Homo sapiens
tattagttaataatt

SEQ ID NO: 628294 - DNA, 15 bp, Homo sapiens
attagttaataattc

SEQ ID NO: 628295 - DNA, 15 bp, Homo sapiens
ttagttaataattct

SEQ ID NO: 628296 - DNA, 15 bp, Homo sapiens
tagttaataattcta

SEQ ID NO: 628297 - DNA, 15 bp, Homo sapiens
agttaataattctat

SEQ ID NO: 628298 - DNA, 15 bp, Homo sapiens
gttaataattctatg

SEQ ID NO: 628299 - DNA, 15 bp, Homo sapiens
ttaataattctatga

SEQ ID NO: 628300 - DNA, 15 bp, Homo sapiens
taataattctatgaa

SEQ ID NO: 628301 - DNA, 15 bp, Homo sapiens
aataattctatgaac

SEQ ID NO: 628302 - DNA, 15 bp, Homo sapiens
ataattctatgaact

SEQ ID NO: 628303 - DNA, 15 bp, Homo sapiens
taattctatgaacta

SEQ ID NO: 628304 - DNA, 15 bp, Homo sapiens
aattctatgaactat

SEQ ID NO: 628305 - DNA, 15 bp, Homo sapiens
attctatgaactatt

SEQ ID NO: 628306 - DNA, 15 bp, Homo sapiens
ttctatgaactattt

SEQ ID NO: 628307 - DNA, 15 bp, Homo sapiens
tctatgaactatttt

SEQ ID NO: 628308 - DNA, 15 bp, Homo sapiens
ctatgaactattttt

SEQ ID NO: 628309 - DNA, 15 bp, Homo sapiens
tatgaactattttta

SEQ ID NO: 628310 - DNA, 15 bp, Homo sapiens
atgaactatttttat

SEQ ID NO: 628311 - DNA, 15 bp, Homo sapiens
tgaactatttttatt

SEQ ID NO: 628312 - DNA, 15 bp, Homo sapiens
gaactatttttattc

SEQ ID NO: 628313 - DNA, 15 bp, Homo sapiens
aactatttttattcc

SEQ ID NO: 628314 - DNA, 15 bp, Homo sapiens
actatttttattcct

SEQ ID NO: 628315 - DNA, 15 bp, Homo sapiens
ctatttttattccta

SEQ ID NO: 628316 - DNA, 15 bp, Homo sapiens
tatttttattcctat

SEQ ID NO: 628317 - DNA, 15 bp, Homo sapiens
atttttattcctata

SEQ ID NO: 628318 - DNA, 15 bp, Homo sapiens
tttttattcctatat

SEQ ID NO: 628319 - DNA, 15 bp, Homo sapiens
ttttattcctatatg

SEQ ID NO: 628320 - DNA, 15 bp, Homo sapiens
tttattcctatatgt

SEQ ID NO: 628321 - DNA, 15 bp, Homo sapiens
ttattcctatatgtt

SEQ ID NO: 628322 - DNA, 15 bp, Homo sapiens
tattcctatatgttt

SEQ ID NO: 628323 - DNA, 15 bp, Homo sapiens
attcctatatgtttg

SEQ ID NO: 628324 - DNA, 15 bp, Homo sapiens
ttcctatatgtttgt

SEQ ID NO: 628325 - DNA, 15 bp, Homo sapiens
tcctatatgtttgtg

SEQ ID NO: 628326 - DNA, 15 bp, Homo sapiens
cctatatgtttgtgt

SEQ ID NO: 628327 - DNA, 15 bp, Homo sapiens
ctatatgtttgtgtg

SEQ ID NO: 628328 - DNA, 15 bp, Homo sapiens
tatatgtttgtgtga

SEQ ID NO: 628329 - DNA, 15 bp, Homo sapiens
atatgtttgtgtgag

SEQ ID NO: 628330 - DNA, 15 bp, Homo sapiens
tatgtttgtgtgagt

SEQ ID NO: 628331 - DNA, 15 bp, Homo sapiens
atgtttgtgtgagtt

SEQ ID NO: 628332 - DNA, 15 bp, Homo sapiens
tgtttgtgtgagttt

SEQ ID NO: 628333 - DNA, 15 bp, Homo sapiens
gtttgtgtgagtttg

SEQ ID NO: 628334 - DNA, 15 bp, Homo sapiens
tttgtgtgagtttga

SEQ ID NO: 628335 - DNA, 15 bp, Homo sapiens
ttgtgtgagtttgaa

SEQ ID NO: 628336 - DNA, 15 bp, Homo sapiens
tgtgtgagtttgaaa

SEQ ID NO: 628337 - DNA, 15 bp, Homo sapiens
gtgtgagtttgaaac

SEQ ID NO: 628338 - DNA, 15 bp, Homo sapiens
tgtgagtttgaaact

SEQ ID NO: 628339 - DNA, 15 bp, Homo sapiens
gtgagtttgaaacta

SEQ ID NO: 628340 - DNA, 15 bp, Homo sapiens
tgagtttgaaactat

SEQ ID NO: 628341 - DNA, 15 bp, Homo sapiens
gagtttgaaactatt

SEQ ID NO: 628342 - DNA, 15 bp, Homo sapiens
agtttgaaactattt

SEQ ID NO: 628343 - DNA, 15 bp, Homo sapiens
gtttgaaactatttc

SEQ ID NO: 628344 - DNA, 15 bp, Homo sapiens
tttgaaactatttcc

SEQ ID NO: 628345 - DNA, 15 bp, Homo sapiens
ttgaaactatttcca

SEQ ID NO: 628346 - DNA, 15 bp, Homo sapiens
tgaaactatttccaa

SEQ ID NO: 628347 - DNA, 15 bp, Homo sapiens
gaaactatttccaaa

SEQ ID NO: 628348 - DNA, 15 bp, Homo sapiens
aaactatttccaaat

SEQ ID NO: 628349 - DNA, 15 bp, Homo sapiens
aactatttccaaata

SEQ ID NO: 628350 - DNA, 15 bp, Homo sapiens
actatttccaaataa

SEQ ID NO: 628351 - DNA, 15 bp, Homo sapiens
ctatttccaaataaa

SEQ ID NO: 628352 - DNA, 15 bp, Homo sapiens
tatttccaaataaaa

SEQ ID NO: 628353 - DNA, 15 bp, Homo sapiens
atttccaaataaaaa

SEQ ID NO: 628354 - DNA, 15 bp, Homo sapiens
tttccaaataaaaag

SEQ ID NO: 628355 - DNA, 15 bp, Homo sapiens
ttccaaataaaaagt

SEQ ID NO: 628356 - DNA, 15 bp, Homo sapiens
tccaaataaaaagtt

SEQ ID NO: 628357 - DNA, 15 bp, Homo sapiens
ccaaataaaaagtta

SEQ ID NO: 628358 - DNA, 15 bp, Homo sapiens
caaataaaaagttaa

SEQ ID NO: 628359 - DNA, 15 bp, Homo sapiens
aaataaaaagttaaa

SEQ ID NO: 628360 - DNA, 15 bp, Homo sapiens
aataaaaagttaaaa

SEQ ID NO: 628361 - DNA, 15 bp, Homo sapiens
ataaaaagttaaaaa

SEQ ID NO: 628362 - DNA, 15 bp, Homo sapiens
taaaaagttaaaaat

SEQ ID NO: 628363 - DNA, 15 bp, Homo sapiens
aaaaagttaaaaatg

SEQ ID NO: 628364 - DNA, 15 bp, Homo sapiens
aaaagttaaaaatgg

SEQ ID NO: 628365 - DNA, 15 bp, Homo sapiens
aaagttaaaaatgga

SEQ ID NO: 628366 - DNA, 15 bp, Homo sapiens
aagttaaaaatggag

SEQ ID NO: 628367 - DNA, 15 bp, Homo sapiens
agttaaaaatggaga

SEQ ID NO: 628368 - DNA, 15 bp, Homo sapiens
gttaaaaatggagat

SEQ ID NO: 628369 - DNA, 15 bp, Homo sapiens
ttaaaaatggagatt

SEQ ID NO: 628370 - DNA, 15 bp, Homo sapiens
taaaaatggagatta

SEQ ID NO: 628371 - DNA, 15 bp, Homo sapiens
aaaaatggagattac

SEQ ID NO: 628372 - DNA, 15 bp, Homo sapiens
aaaatggagattaca

SEQ ID NO: 628373 - DNA, 15 bp, Homo sapiens
aaatggagattacat

SEQ ID NO: 628374 - DNA, 15 bp, Homo sapiens
aatggagattacatt

SEQ ID NO: 628375 - DNA, 15 bp, Homo sapiens
atggagattacattc

SEQ ID NO: 628376 - DNA, 15 bp, Homo sapiens
tggagattacattct

SEQ ID NO: 628377 - DNA, 15 bp, Homo sapiens
ggagattacattcta

SEQ ID NO: 628378 - DNA, 15 bp, Homo sapiens
gagattacattctag

SEQ ID NO: 628379 - DNA, 15 bp, Homo sapiens
agattacattctagt

SEQ ID NO: 628380 - DNA, 15 bp, Homo sapiens
gattacattctagtg

SEQ ID NO: 628381 - DNA, 15 bp, Homo sapiens
attacattctagtgg

SEQ ID NO: 628382 - DNA, 15 bp, Homo sapiens
ttacattctagtggg

SEQ ID NO: 628383 - DNA, 15 bp, Homo sapiens
tacattctagtggga

SEQ ID NO: 628384 - DNA, 15 bp, Homo sapiens
acattctagtgggag

SEQ ID NO: 628385 - DNA, 15 bp, Homo sapiens
cattctagtgggagg

SEQ ID NO: 628386 - DNA, 15 bp, Homo sapiens
attctagtgggaggg

SEQ ID NO: 628387 - DNA, 15 bp, Homo sapiens
ttctagtgggaggga

SEQ ID NO: 628388 - DNA, 15 bp, Homo sapiens
tctagtgggagggat

SEQ ID NO: 628389 - DNA, 15 bp, Homo sapiens
ctagtgggagggata

SEQ ID NO: 628390 - DNA, 15 bp, Homo sapiens
tagtgggagggatag

SEQ ID NO: 628391 - DNA, 15 bp, Homo sapiens
agtgggagggataga

SEQ ID NO: 628392 - DNA, 15 bp, Homo sapiens
gtgggagggatagac

SEQ ID NO: 628393 - DNA, 15 bp, Homo sapiens
tgggagggatagacg

SEQ ID NO: 628394 - DNA, 15 bp, Homo sapiens
gggagggatagacga

SEQ ID NO: 628395 - DNA, 15 bp, Homo sapiens
ggagggatagacgat

SEQ ID NO: 628396 - DNA, 15 bp, Homo sapiens
gagggatagacgatc

SEQ ID NO: 628397 - DNA, 15 bp, Homo sapiens
agggatagacgatct

SEQ ID NO: 628398 - DNA, 15 bp, Homo sapiens
gggatagacgatctg

SEQ ID NO: 628399 - DNA, 15 bp, Homo sapiens
ggatagacgatctgt

SEQ ID NO: 628400 - DNA, 15 bp, Homo sapiens
gatagacgatctgta

SEQ ID NO: 628401 - DNA, 15 bp, Homo sapiens
atagacgatctgtag

SEQ ID NO: 628402 - DNA, 15 bp, Homo sapiens
tagacgatctgtaga

SEQ ID NO: 628403 - DNA, 15 bp, Homo sapiens
agacgatctgtagat

SEQ ID NO: 628404 - DNA, 15 bp, Homo sapiens
gacgatctgtagata

SEQ ID NO: 628405 - DNA, 15 bp, Homo sapiens
acgatctgtagataa

SEQ ID NO: 628406 - DNA, 15 bp, Homo sapiens
cgatctgtagataaa

SEQ ID NO: 628407 - DNA, 15 bp, Homo sapiens
gatctgtagataaat

SEQ ID NO: 628408 - DNA, 15 bp, Homo sapiens
atctgtagataaata

SEQ ID NO: 628409 - DNA, 15 bp, Homo sapiens
tctgtagataaatag

SEQ ID NO: 628410 - DNA, 15 bp, Homo sapiens
ctgtagataaatagg

SEQ ID NO: 628411 - DNA, 15 bp, Homo sapiens
tgtagataaataggt

SEQ ID NO: 628412 - DNA, 15 bp, Homo sapiens
gtagataaataggta

SEQ ID NO: 628413 - DNA, 15 bp, Homo sapiens
tagataaataggtaa

SEQ ID NO: 628414 - DNA, 15 bp, Homo sapiens
agataaataggtaaa

SEQ ID NO: 628415 - DNA, 15 bp, Homo sapiens
gataaataggtaaaa

SEQ ID NO: 628416 - DNA, 15 bp, Homo sapiens
ataaataggtaaaat

SEQ ID NO: 628417 - DNA, 15 bp, Homo sapiens
taaataggtaaaata

SEQ ID NO: 628418 - DNA, 15 bp, Homo sapiens
aaataggtaaaatat

SEQ ID NO: 628419 - DNA, 15 bp, Homo sapiens
aataggtaaaatatc

SEQ ID NO: 628420 - DNA, 15 bp, Homo sapiens
ataggtaaaatatcc

SEQ ID NO: 628421 - DNA, 15 bp, Homo sapiens
taggtaaaatatcca

SEQ ID NO: 628422 - DNA, 15 bp, Homo sapiens
aggtaaaatatccag

SEQ ID NO: 628423 - DNA, 15 bp, Homo sapiens
ggtaaaatatccagt

SEQ ID NO: 628424 - DNA, 15 bp, Homo sapiens
gtaaaatatccagta

SEQ ID NO: 628425 - DNA, 15 bp, Homo sapiens
taaaatatccagtac

SEQ ID NO: 628426 - DNA, 15 bp, Homo sapiens
aaaatatccagtaca

SEQ ID NO: 628427 - DNA, 15 bp, Homo sapiens
aaatatccagtacat

SEQ ID NO: 628428 - DNA, 15 bp, Homo sapiens
aatatccagtacatt

SEQ ID NO: 628429 - DNA, 15 bp, Homo sapiens
atatccagtacatta

SEQ ID NO: 628430 - DNA, 15 bp, Homo sapiens
tatccagtacattag

SEQ ID NO: 628431 - DNA, 15 bp, Homo sapiens
atccagtacattaga

SEQ ID NO: 628432 - DNA, 15 bp, Homo sapiens
tccagtacattagag

SEQ ID NO: 628433 - DNA, 15 bp, Homo sapiens
ccagtacattagaga

SEQ ID NO: 628434 - DNA, 15 bp, Homo sapiens
cagtacattagagag

SEQ ID NO: 628435 - DNA, 15 bp, Homo sapiens
agtacattagagagt

SEQ ID NO: 628436 - DNA, 15 bp, Homo sapiens
gtacattagagagtg

SEQ ID NO: 628437 - DNA, 15 bp, Homo sapiens
tacattagagagtga

SEQ ID NO: 628438 - DNA, 15 bp, Homo sapiens
acattagagagtgaa

SEQ ID NO: 628439 - DNA, 15 bp, Homo sapiens
cattagagagtgaaa

SEQ ID NO: 628440 - DNA, 15 bp, Homo sapiens
attagagagtgaaaa

SEQ ID NO: 628441 - DNA, 15 bp, Homo sapiens
ttagagagtgaaaag

SEQ ID NO: 628442 - DNA, 15 bp, Homo sapiens
tagagagtgaaaagt

SEQ ID NO: 628443 - DNA, 15 bp, Homo sapiens
agagagtgaaaagtc

SEQ ID NO: 628444 - DNA, 15 bp, Homo sapiens
gagagtgaaaagtcc

SEQ ID NO: 628445 - DNA, 15 bp, Homo sapiens
agagtgaaaagtcct

SEQ ID NO: 628446 - DNA, 15 bp, Homo sapiens
gagtgaaaagtcctc

SEQ ID NO: 628447 - DNA, 15 bp, Homo sapiens
agtgaaaagtcctca

SEQ ID NO: 628448 - DNA, 15 bp, Homo sapiens
gtgaaaagtcctcag

SEQ ID NO: 628449 - DNA, 15 bp, Homo sapiens
tgaaaagtcctcagg

SEQ ID NO: 628450 - DNA, 15 bp, Homo sapiens
gaaaagtcctcaggg

SEQ ID NO: 628451 - DNA, 15 bp, Homo sapiens
aaaagtcctcaggga

SEQ ID NO: 628452 - DNA, 15 bp, Homo sapiens
aaagtcctcagggaa

SEQ ID NO: 628453 - DNA, 15 bp, Homo sapiens
aagtcctcagggaaa

SEQ ID NO: 628454 - DNA, 15 bp, Homo sapiens
agtcctcagggaaaa

SEQ ID NO: 628455 - DNA, 15 bp, Homo sapiens
gtcctcagggaaaag

SEQ ID NO: 628456 - DNA, 15 bp, Homo sapiens
tcctcagggaaaagt

SEQ ID NO: 628457 - DNA, 15 bp, Homo sapiens
cctcagggaaaagta

SEQ ID NO: 628458 - DNA, 15 bp, Homo sapiens
ctcagggaaaagtaa

SEQ ID NO: 628459 - DNA, 15 bp, Homo sapiens
tcagggaaaagtaac

SEQ ID NO: 628460 - DNA, 15 bp, Homo sapiens
cagggaaaagtaacg

SEQ ID NO: 628461 - DNA, 15 bp, Homo sapiens
agggaaaagtaacgc

SEQ ID NO: 628462 - DNA, 15 bp, Homo sapiens
gggaaaagtaacgca

SEQ ID NO: 628463 - DNA, 15 bp, Homo sapiens
ggaaaagtaacgcag

SEQ ID NO: 628464 - DNA, 15 bp, Homo sapiens
gaaaagtaacgcagg

SEQ ID NO: 628465 - DNA, 15 bp, Homo sapiens
aaaagtaacgcaggg

SEQ ID NO: 628466 - DNA, 15 bp, Homo sapiens
aaagtaacgcaggga

SEQ ID NO: 628467 - DNA, 15 bp, Homo sapiens
aagtaacgcagggag

SEQ ID NO: 628468 - DNA, 15 bp, Homo sapiens
agtaacgcagggagg

SEQ ID NO: 628469 - DNA, 15 bp, Homo sapiens
gtaacgcagggagga

SEQ ID NO: 628470 - DNA, 15 bp, Homo sapiens
taacgcagggaggaa

SEQ ID NO: 628471 - DNA, 15 bp, Homo sapiens
aacgcagggaggaac

SEQ ID NO: 628472 - DNA, 15 bp, Homo sapiens
acgcagggaggaact

SEQ ID NO: 628473 - DNA, 15 bp, Homo sapiens
cgcagggaggaactg

SEQ ID NO: 628474 - DNA, 15 bp, Homo sapiens
gcagggaggaactgc

SEQ ID NO: 628475 - DNA, 15 bp, Homo sapiens
cagggaggaactgct

SEQ ID NO: 628476 - DNA, 15 bp, Homo sapiens
agggaggaactgctg

SEQ ID NO: 628477 - DNA, 15 bp, Homo sapiens
gggaggaactgctgg

SEQ ID NO: 628478 - DNA, 15 bp, Homo sapiens
ggaggaactgctggg

SEQ ID NO: 628479 - DNA, 15 bp, Homo sapiens
gaggaactgctgggg

SEQ ID NO: 628480 - DNA, 15 bp, Homo sapiens
aggaactgctggggc

SEQ ID NO: 628481 - DNA, 15 bp, Homo sapiens
ggaactgctggggca

SEQ ID NO: 628482 - DNA, 15 bp, Homo sapiens
gaactgctggggcag

SEQ ID NO: 628483 - DNA, 15 bp, Homo sapiens
aactgctggggcagg

SEQ ID NO: 628484 - DNA, 15 bp, Homo sapiens
actgctggggcaggg

SEQ ID NO: 628485 - DNA, 15 bp, Homo sapiens
ctgctggggcagggt

SEQ ID NO: 628486 - DNA, 15 bp, Homo sapiens
tgctggggcagggtt

SEQ ID NO: 628487 - DNA, 15 bp, Homo sapiens
gctggggcagggttt

SEQ ID NO: 628488 - DNA, 15 bp, Homo sapiens
ctggggcagggtttg

SEQ ID NO: 628489 - DNA, 15 bp, Homo sapiens
tggggcagggtttgc

SEQ ID NO: 628490 - DNA, 15 bp, Homo sapiens
ggggcagggtttgca

SEQ ID NO: 628491 - DNA, 15 bp, Homo sapiens
gggcagggtttgcat

SEQ ID NO: 628492 - DNA, 15 bp, Homo sapiens
ggcagggtttgcatt

SEQ ID NO: 628493 - DNA, 15 bp, Homo sapiens
gcagggtttgcattt

SEQ ID NO: 628494 - DNA, 15 bp, Homo sapiens
cagggtttgcatttt

SEQ ID NO: 628495 - DNA, 15 bp, Homo sapiens
agggtttgcattttg

SEQ ID NO: 628496 - DNA, 15 bp, Homo sapiens
gggtttgcattttga

SEQ ID NO: 628497 - DNA, 15 bp, Homo sapiens
ggtttgcattttgag

SEQ ID NO: 628498 - DNA, 15 bp, Homo sapiens
gtttgcattttgagg

SEQ ID NO: 628499 - DNA, 15 bp, Homo sapiens
tttgcattttgaggt

SEQ ID NO: 628500 - DNA, 15 bp, Homo sapiens
ttgcattttgaggta

SEQ ID NO: 628501 - DNA, 15 bp, Homo sapiens
tgcattttgaggtag

SEQ ID NO: 628502 - DNA, 15 bp, Homo sapiens
gcattttgaggtagg

SEQ ID NO: 628503 - DNA, 15 bp, Homo sapiens
cattttgaggtaggg

SEQ ID NO: 628504 - DNA, 15 bp, Homo sapiens
attttgaggtagggt

SEQ ID NO: 628505 - DNA, 15 bp, Homo sapiens
ttttgaggtagggtg

SEQ ID NO: 628506 - DNA, 15 bp, Homo sapiens
tttgaggtagggtgg

SEQ ID NO: 628507 - DNA, 15 bp, Homo sapiens
ttgaggtagggtggc

SEQ ID NO: 628508 - DNA, 15 bp, Homo sapiens
tgaggtagggtggcc

SEQ ID NO: 628509 - DNA, 15 bp, Homo sapiens
gaggtagggtggccc

SEQ ID NO: 628510 - DNA, 15 bp, Homo sapiens
aggtagggtggccca

SEQ ID NO: 628511 - DNA, 15 bp, Homo sapiens
ggtagggtggcccag

SEQ ID NO: 628512 - DNA, 15 bp, Homo sapiens
gtagggtggcccagg

SEQ ID NO: 628513 - DNA, 15 bp, Homo sapiens
tagggtggcccaggg

SEQ ID NO: 628514 - DNA, 15 bp, Homo sapiens
agggtggcccaggga

SEQ ID NO: 628515 - DNA, 15 bp, Homo sapiens
gggtggcccagggag

SEQ ID NO: 628516 - DNA, 15 bp, Homo sapiens
ggtggcccagggaga

SEQ ID NO: 628517 - DNA, 15 bp, Homo sapiens
gtggcccagggagag

SEQ ID NO: 628518 - DNA, 15 bp, Homo sapiens
tggcccagggagagc

SEQ ID NO: 628519 - DNA, 15 bp, Homo sapiens
ggcccagggagagcc

SEQ ID NO: 628520 - DNA, 15 bp, Homo sapiens
gcccagggagagcct

SEQ ID NO: 628521 - DNA, 15 bp, Homo sapiens
cccagggagagcctg

SEQ ID NO: 628522 - DNA, 15 bp, Homo sapiens
ccagggagagcctgc

SEQ ID NO: 628523 - DNA, 15 bp, Homo sapiens
cagggagagcctgca

SEQ ID NO: 628524 - DNA, 15 bp, Homo sapiens
agggagagcctgcag

SEQ ID NO: 628525 - DNA, 15 bp, Homo sapiens
gggagagcctgcaga

SEQ ID NO: 628526 - DNA, 15 bp, Homo sapiens
ggagagcctgcagag

SEQ ID NO: 628527 - DNA, 15 bp, Homo sapiens
gagagcctgcagagg

SEQ ID NO: 628528 - DNA, 15 bp, Homo sapiens
agagcctgcagagga

SEQ ID NO: 628529 - DNA, 15 bp, Homo sapiens
gagcctgcagaggag

SEQ ID NO: 628530 - DNA, 15 bp, Homo sapiens
agcctgcagaggaga

SEQ ID NO: 628531 - DNA, 15 bp, Homo sapiens
gcctgcagaggagag

SEQ ID NO: 628532 - DNA, 15 bp, Homo sapiens
cctgcagaggagaga

SEQ ID NO: 628533 - DNA, 15 bp, Homo sapiens
ctgcagaggagagaa

SEQ ID NO: 628534 - DNA, 15 bp, Homo sapiens
tgcagaggagagaac

SEQ ID NO: 628535 - DNA, 15 bp, Homo sapiens
gcagaggagagaacc

SEQ ID NO: 628536 - DNA, 15 bp, Homo sapiens
cagaggagagaacct

SEQ ID NO: 628537 - DNA, 15 bp, Homo sapiens
agaggagagaacctg

SEQ ID NO: 628538 - DNA, 15 bp, Homo sapiens
gaggagagaacctga

SEQ ID NO: 628539 - DNA, 15 bp, Homo sapiens
aggagagaacctgaa

SEQ ID NO: 628540 - DNA, 15 bp, Homo sapiens
ggagagaacctgaat

SEQ ID NO: 628541 - DNA, 15 bp, Homo sapiens
gagagaacctgaatg

SEQ ID NO: 628542 - DNA, 15 bp, Homo sapiens
agagaacctgaatga

SEQ ID NO: 628543 - DNA, 15 bp, Homo sapiens
gagaacctgaatgaa

SEQ ID NO: 628544 - DNA, 15 bp, Homo sapiens
agaacctgaatgaag

SEQ ID NO: 628545 - DNA, 15 bp, Homo sapiens
gaacctgaatgaaga

SEQ ID NO: 628546 - DNA, 15 bp, Homo sapiens
aacctgaatgaagaa

SEQ ID NO: 628547 - DNA, 15 bp, Homo sapiens
acctgaatgaagaac

SEQ ID NO: 628548 - DNA, 15 bp, Homo sapiens
cctgaatgaagaact

SEQ ID NO: 628549 - DNA, 15 bp, Homo sapiens
ctgaatgaagaacta

SEQ ID NO: 628550 - DNA, 15 bp, Homo sapiens
tgaatgaagaactag

SEQ ID NO: 628551 - DNA, 15 bp, Homo sapiens
gaatgaagaactaga

SEQ ID NO: 628552 - DNA, 15 bp, Homo sapiens
aatgaagaactagag

SEQ ID NO: 628553 - DNA, 15 bp, Homo sapiens
atgaagaactagagg

SEQ ID NO: 628554 - DNA, 15 bp, Homo sapiens
tgaagaactagaggt

SEQ ID NO: 628555 - DNA, 15 bp, Homo sapiens
gaagaactagaggtg

SEQ ID NO: 628556 - DNA, 15 bp, Homo sapiens
aagaactagaggtga

SEQ ID NO: 628557 - DNA, 15 bp, Homo sapiens
agaactagaggtgag

SEQ ID NO: 628558 - DNA, 15 bp, Homo sapiens
gaactagaggtgaga

SEQ ID NO: 628559 - DNA, 15 bp, Homo sapiens
aactagaggtgagag

SEQ ID NO: 628560 - DNA, 15 bp, Homo sapiens
actagaggtgagaga

SEQ ID NO: 628561 - DNA, 15 bp, Homo sapiens
ctagaggtgagagaa

SEQ ID NO: 628562 - DNA, 15 bp, Homo sapiens
tagaggtgagagaag

SEQ ID NO: 628563 - DNA, 15 bp, Homo sapiens
agaggtgagagaagg

SEQ ID NO: 628564 - DNA, 15 bp, Homo sapiens
gaggtgagagaagga

SEQ ID NO: 628565 - DNA, 15 bp, Homo sapiens
aggtgagagaaggag

SEQ ID NO: 628566 - DNA, 15 bp, Homo sapiens
ggtgagagaaggagc

SEQ ID NO: 628567 - DNA, 15 bp, Homo sapiens
gtgagagaaggagcc

SEQ ID NO: 628568 - DNA, 15 bp, Homo sapiens
tgagagaaggagcca

SEQ ID NO: 628569 - DNA, 15 bp, Homo sapiens
gagagaaggagccac

SEQ ID NO: 628570 - DNA, 15 bp, Homo sapiens
agagaaggagccacg

SEQ ID NO: 628571 - DNA, 15 bp, Homo sapiens
gagaaggagccacgt

SEQ ID NO: 628572 - DNA, 15 bp, Homo sapiens
agaaggagccacgtg

SEQ ID NO: 628573 - DNA, 15 bp, Homo sapiens
gaaggagccacgtgc

SEQ ID NO: 628574 - DNA, 15 bp, Homo sapiens
aaggagccacgtgca

SEQ ID NO: 628575 - DNA, 15 bp, Homo sapiens
aggagccacgtgcac

SEQ ID NO: 628576 - DNA, 15 bp, Homo sapiens
ggagccacgtgcaca

SEQ ID NO: 628577 - DNA, 15 bp, Homo sapiens
gagccacgtgcacac

SEQ ID NO: 628578 - DNA, 15 bp, Homo sapiens
agccacgtgcacacc

SEQ ID NO: 628579 - DNA, 15 bp, Homo sapiens
gccacgtgcacacct

SEQ ID NO: 628580 - DNA, 15 bp, Homo sapiens
ccacgtgcacaccta

SEQ ID NO: 628581 - DNA, 15 bp, Homo sapiens
cacgtgcacacctag

SEQ ID NO: 628582 - DNA, 15 bp, Homo sapiens
acgtgcacacctagg

SEQ ID NO: 628583 - DNA, 15 bp, Homo sapiens
cgtgcacacctaggg

SEQ ID NO: 628584 - DNA, 15 bp, Homo sapiens
gtgcacacctaggga

SEQ ID NO: 628585 - DNA, 15 bp, Homo sapiens
tgcacacctagggag

SEQ ID NO: 628586 - DNA, 15 bp, Homo sapiens
gcacacctagggagg

SEQ ID NO: 628587 - DNA, 15 bp, Homo sapiens
cacacctagggagga

SEQ ID NO: 628588 - DNA, 15 bp, Homo sapiens
acacctagggaggaa

SEQ ID NO: 628589 - DNA, 15 bp, Homo sapiens
cacctagggaggaac

SEQ ID NO: 628590 - DNA, 15 bp, Homo sapiens
acctagggaggaaca

SEQ ID NO: 628591 - DNA, 15 bp, Homo sapiens
cctagggaggaacat

SEQ ID NO: 628592 - DNA, 15 bp, Homo sapiens
ctagggaggaacatt

SEQ ID NO: 628593 - DNA, 15 bp, Homo sapiens
tagggaggaacattc

SEQ ID NO: 628594 - DNA, 15 bp, Homo sapiens
agggaggaacattcc

SEQ ID NO: 628595 - DNA, 15 bp, Homo sapiens
gggaggaacattcca

SEQ ID NO: 628596 - DNA, 15 bp, Homo sapiens
ggaggaacattccag

SEQ ID NO: 628597 - DNA, 15 bp, Homo sapiens
gaggaacattccagg

SEQ ID NO: 628598 - DNA, 15 bp, Homo sapiens
aggaacattccaggc

SEQ ID NO: 628599 - DNA, 15 bp, Homo sapiens
ggaacattccaggca

SEQ ID NO: 628600 - DNA, 15 bp, Homo sapiens
gaacattccaggcac

SEQ ID NO: 628601 - DNA, 15 bp, Homo sapiens
aacattccaggcacg

SEQ ID NO: 628602 - DNA, 15 bp, Homo sapiens
acattccaggcacgg

SEQ ID NO: 628603 - DNA, 15 bp, Homo sapiens
cattccaggcacggg

SEQ ID NO: 628604 - DNA, 15 bp, Homo sapiens
attccaggcacgggg

SEQ ID NO: 628605 - DNA, 15 bp, Homo sapiens
ttccaggcacggggg

SEQ ID NO: 628606 - DNA, 15 bp, Homo sapiens
tccaggcacggggga

SEQ ID NO: 628607 - DNA, 15 bp, Homo sapiens
ccaggcacgggggac

SEQ ID NO: 628608 - DNA, 15 bp, Homo sapiens
caggcacgggggact

SEQ ID NO: 628609 - DNA, 15 bp, Homo sapiens
aggcacgggggacta

SEQ ID NO: 628610 - DNA, 15 bp, Homo sapiens
ggcacgggggactag

SEQ ID NO: 628611 - DNA, 15 bp, Homo sapiens
gcacgggggactagt

SEQ ID NO: 628612 - DNA, 15 bp, Homo sapiens
cacgggggactagta

SEQ ID NO: 628613 - DNA, 15 bp, Homo sapiens
acgggggactagtat

SEQ ID NO: 628614 - DNA, 15 bp, Homo sapiens
cgggggactagtata

SEQ ID NO: 628615 - DNA, 15 bp, Homo sapiens
gggggactagtatag

SEQ ID NO: 628616 - DNA, 15 bp, Homo sapiens
ggggactagtataga

SEQ ID NO: 628617 - DNA, 15 bp, Homo sapiens
gggactagtatagaa

SEQ ID NO: 628618 - DNA, 15 bp, Homo sapiens
ggactagtatagaag

SEQ ID NO: 628619 - DNA, 15 bp, Homo sapiens
gactagtatagaagg

SEQ ID NO: 628620 - DNA, 15 bp, Homo sapiens
actagtatagaaggc

SEQ ID NO: 628621 - DNA, 15 bp, Homo sapiens
ctagtatagaaggca

SEQ ID NO: 628622 - DNA, 15 bp, Homo sapiens
tagtatagaaggcag

SEQ ID NO: 628623 - DNA, 15 bp, Homo sapiens
agtatagaaggcaga

SEQ ID NO: 628624 - DNA, 15 bp, Homo sapiens
gtatagaaggcagaa

SEQ ID NO: 628625 - DNA, 15 bp, Homo sapiens
tatagaaggcagaag

SEQ ID NO: 628626 - DNA, 15 bp, Homo sapiens
atagaaggcagaagc

SEQ ID NO: 628627 - DNA, 15 bp, Homo sapiens
tagaaggcagaagca

SEQ ID NO: 628628 - DNA, 15 bp, Homo sapiens
agaaggcagaagcat

SEQ ID NO: 628629 - DNA, 15 bp, Homo sapiens
gaaggcagaagcatg

SEQ ID NO: 628630 - DNA, 15 bp, Homo sapiens
aaggcagaagcatgg

SEQ ID NO: 628631 - DNA, 15 bp, Homo sapiens
aggcagaagcatggt

SEQ ID NO: 628632 - DNA, 15 bp, Homo sapiens
ggcagaagcatggtg

SEQ ID NO: 628633 - DNA, 15 bp, Homo sapiens
gcagaagcatggtga

SEQ ID NO: 628634 - DNA, 15 bp, Homo sapiens
cagaagcatggtgag

SEQ ID NO: 628635 - DNA, 15 bp, Homo sapiens
agaagcatggtgagc

SEQ ID NO: 628636 - DNA, 15 bp, Homo sapiens
gaagcatggtgagct

SEQ ID NO: 628637 - DNA, 15 bp, Homo sapiens
aagcatggtgagctt

SEQ ID NO: 628638 - DNA, 15 bp, Homo sapiens
agcatggtgagcttg

SEQ ID NO: 628639 - DNA, 15 bp, Homo sapiens
gcatggtgagcttgt

SEQ ID NO: 628640 - DNA, 15 bp, Homo sapiens
catggtgagcttgtc

SEQ ID NO: 628641 - DNA, 15 bp, Homo sapiens
atggtgagcttgtct

SEQ ID NO: 628642 - DNA, 15 bp, Homo sapiens
tggtgagcttgtctc

SEQ ID NO: 628643 - DNA, 15 bp, Homo sapiens
ggtgagcttgtctcc

SEQ ID NO: 628644 - DNA, 15 bp, Homo sapiens
gtgagcttgtctcca

SEQ ID NO: 628645 - DNA, 15 bp, Homo sapiens
tgagcttgtctccag

SEQ ID NO: 628646 - DNA, 15 bp, Homo sapiens
gagcttgtctccagt

SEQ ID NO: 628647 - DNA, 15 bp, Homo sapiens
agcttgtctccagtg

SEQ ID NO: 628648 - DNA, 15 bp, Homo sapiens
gcttgtctccagtgg

SEQ ID NO: 628649 - DNA, 15 bp, Homo sapiens
cttgtctccagtggc

SEQ ID NO: 628650 - DNA, 15 bp, Homo sapiens
ttgtctccagtggct

SEQ ID NO: 628651 - DNA, 15 bp, Homo sapiens
tgtctccagtggctt

SEQ ID NO: 628652 - DNA, 15 bp, Homo sapiens
gtctccagtggcttc

SEQ ID NO: 628653 - DNA, 15 bp, Homo sapiens
tctccagtggcttcc

SEQ ID NO: 628654 - DNA, 15 bp, Homo sapiens
ctccagtggcttccc

SEQ ID NO: 628655 - DNA, 15 bp, Homo sapiens
tccagtggcttccct

SEQ ID NO: 628656 - DNA, 15 bp, Homo sapiens
ccagtggcttcccta

SEQ ID NO: 628657 - DNA, 15 bp, Homo sapiens
cagtggcttccctag

SEQ ID NO: 628658 - DNA, 15 bp, Homo sapiens
agtggcttccctaga

SEQ ID NO: 628659 - DNA, 15 bp, Homo sapiens
gtggcttccctagat

SEQ ID NO: 628660 - DNA, 15 bp, Homo sapiens
tggcttccctagatc

SEQ ID NO: 628661 - DNA, 15 bp, Homo sapiens
ggcttccctagatcc

SEQ ID NO: 628662 - DNA, 15 bp, Homo sapiens
gcttccctagatccc

SEQ ID NO: 628663 - DNA, 15 bp, Homo sapiens
cttccctagatcccc

SEQ ID NO: 628664 - DNA, 15 bp, Homo sapiens
ttccctagatcccct

SEQ ID NO: 628665 - DNA, 15 bp, Homo sapiens
tccctagatcccctc

SEQ ID NO: 628666 - DNA, 15 bp, Homo sapiens
ccctagatcccctcc

SEQ ID NO: 628667 - DNA, 15 bp, Homo sapiens
cctagatcccctcct

SEQ ID NO: 628668 - DNA, 15 bp, Homo sapiens
ctagatcccctcctg

SEQ ID NO: 628669 - DNA, 15 bp, Homo sapiens
tagatcccctcctgc

SEQ ID NO: 628670 - DNA, 15 bp, Homo sapiens
agatcccctcctgcg

SEQ ID NO: 628671 - DNA, 15 bp, Homo sapiens
gatcccctcctgcgc

SEQ ID NO: 628672 - DNA, 15 bp, Homo sapiens
atcccctcctgcgca

SEQ ID NO: 628673 - DNA, 15 bp, Homo sapiens
tcccctcctgcgcat

SEQ ID NO: 628674 - DNA, 15 bp, Homo sapiens
cccctcctgcgcatg

SEQ ID NO: 628675 - DNA, 15 bp, Homo sapiens
ccctcctgcgcatgt

SEQ ID NO: 628676 - DNA, 15 bp, Homo sapiens
cctcctgcgcatgtg

SEQ ID NO: 628677 - DNA, 15 bp, Homo sapiens
ctcctgcgcatgtgc

SEQ ID NO: 628678 - DNA, 15 bp, Homo sapiens
tcctgcgcatgtgca

SEQ ID NO: 628679 - DNA, 15 bp, Homo sapiens
cctgcgcatgtgcac

SEQ ID NO: 628680 - DNA, 15 bp, Homo sapiens
ctgcgcatgtgcaca

SEQ ID NO: 628681 - DNA, 15 bp, Homo sapiens
tgcgcatgtgcacac

SEQ ID NO: 628682 - DNA, 15 bp, Homo sapiens
gcgcatgtgcacaca

SEQ ID NO: 628683 - DNA, 15 bp, Homo sapiens
cgcatgtgcacacac

SEQ ID NO: 628684 - DNA, 15 bp, Homo sapiens
gcatgtgcacacaca

SEQ ID NO: 628685 - DNA, 15 bp, Homo sapiens
catgtgcacacacac

SEQ ID NO: 628686 - DNA, 15 bp, Homo sapiens
atgtgcacacacacc

SEQ ID NO: 628687 - DNA, 15 bp, Homo sapiens
tgtgcacacacacct

SEQ ID NO: 628688 - DNA, 15 bp, Homo sapiens
gtgcacacacacctg

SEQ ID NO: 628689 - DNA, 15 bp, Homo sapiens
tgcacacacacctgg

SEQ ID NO: 628690 - DNA, 15 bp, Homo sapiens
gcacacacacctggt

SEQ ID NO: 628691 - DNA, 15 bp, Homo sapiens
cacacacacctggtg

SEQ ID NO: 628692 - DNA, 15 bp, Homo sapiens
acacacacctggtgt

SEQ ID NO: 628693 - DNA, 15 bp, Homo sapiens
cacacacctggtgtc

SEQ ID NO: 628694 - DNA, 15 bp, Homo sapiens
acacacctggtgtct

SEQ ID NO: 628695 - DNA, 15 bp, Homo sapiens
cacacctggtgtctc

SEQ ID NO: 628696 - DNA, 15 bp, Homo sapiens
acacctggtgtctct

SEQ ID NO: 628697 - DNA, 15 bp, Homo sapiens
cacctggtgtctctg

SEQ ID NO: 628698 - DNA, 15 bp, Homo sapiens
acctggtgtctctgt

SEQ ID NO: 628699 - DNA, 15 bp, Homo sapiens
cctggtgtctctgtc

SEQ ID NO: 628700 - DNA, 15 bp, Homo sapiens
ctggtgtctctgtca

SEQ ID NO: 628701 - DNA, 15 bp, Homo sapiens
tggtgtctctgtcat

SEQ ID NO: 628702 - DNA, 15 bp, Homo sapiens
ggtgtctctgtcatc

SEQ ID NO: 628703 - DNA, 15 bp, Homo sapiens
gtgtctctgtcatcg

SEQ ID NO: 628704 - DNA, 15 bp, Homo sapiens
tgtctctgtcatcgt

SEQ ID NO: 628705 - DNA, 15 bp, Homo sapiens
gtctctgtcatcgtt

SEQ ID NO: 628706 - DNA, 15 bp, Homo sapiens
tctctgtcatcgttc

SEQ ID NO: 628707 - DNA, 15 bp, Homo sapiens
ctctgtcatcgttcc

SEQ ID NO: 628708 - DNA, 15 bp, Homo sapiens
tctgtcatcgttccc

SEQ ID NO: 628709 - DNA, 15 bp, Homo sapiens
ctgtcatcgttccct

SEQ ID NO: 628710 - DNA, 15 bp, Homo sapiens
tgtcatcgttccctc

SEQ ID NO: 628711 - DNA, 15 bp, Homo sapiens
gtcatcgttccctca

SEQ ID NO: 628712 - DNA, 15 bp, Homo sapiens
tcatcgttccctcac

SEQ ID NO: 628713 - DNA, 15 bp, Homo sapiens
catcgttccctcaca

SEQ ID NO: 628714 - DNA, 15 bp, Homo sapiens
atcgttccctcacag

SEQ ID NO: 628715 - DNA, 15 bp, Homo sapiens
tcgttccctcacagc

SEQ ID NO: 628716 - DNA, 15 bp, Homo sapiens
cgttccctcacagca

SEQ ID NO: 628717 - DNA, 15 bp, Homo sapiens
gttccctcacagcac

SEQ ID NO: 628718 - DNA, 15 bp, Homo sapiens
ttccctcacagcact

SEQ ID NO: 628719 - DNA, 15 bp, Homo sapiens
tccctcacagcactg

SEQ ID NO: 628720 - DNA, 15 bp, Homo sapiens
ccctcacagcactgt

SEQ ID NO: 628721 - DNA, 15 bp, Homo sapiens
cctcacagcactgtc

SEQ ID NO: 628722 - DNA, 15 bp, Homo sapiens
ctcacagcactgtca

SEQ ID NO: 628723 - DNA, 15 bp, Homo sapiens
tcacagcactgtcac

SEQ ID NO: 628724 - DNA, 15 bp, Homo sapiens
cacagcactgtcacg

SEQ ID NO: 628725 - DNA, 15 bp, Homo sapiens
acagcactgtcacga

SEQ ID NO: 628726 - DNA, 15 bp, Homo sapiens
cagcactgtcacgat

SEQ ID NO: 628727 - DNA, 15 bp, Homo sapiens
agcactgtcacgatc

SEQ ID NO: 628728 - DNA, 15 bp, Homo sapiens
gcactgtcacgatct

SEQ ID NO: 628729 - DNA, 15 bp, Homo sapiens
cactgtcacgatctg

SEQ ID NO: 628730 - DNA, 15 bp, Homo sapiens
actgtcacgatctgc

SEQ ID NO: 628731 - DNA, 15 bp, Homo sapiens
ctgtcacgatctgcc

SEQ ID NO: 628732 - DNA, 15 bp, Homo sapiens
tgtcacgatctgcca

SEQ ID NO: 628733 - DNA, 15 bp, Homo sapiens
gtcacgatctgccag

SEQ ID NO: 628734 - DNA, 15 bp, Homo sapiens
tcacgatctgccagt

SEQ ID NO: 628735 - DNA, 15 bp, Homo sapiens
cacgatctgccagta

SEQ ID NO: 628736 - DNA, 15 bp, Homo sapiens
acgatctgccagtat

SEQ ID NO: 628737 - DNA, 15 bp, Homo sapiens
cgatctgccagtatt

SEQ ID NO: 628738 - DNA, 15 bp, Homo sapiens
gatctgccagtattc

SEQ ID NO: 628739 - DNA, 15 bp, Homo sapiens
atctgccagtattct

SEQ ID NO: 628740 - DNA, 15 bp, Homo sapiens
tctgccagtattctg

SEQ ID NO: 628741 - DNA, 15 bp, Homo sapiens
ctgccagtattctgt

SEQ ID NO: 628742 - DNA, 15 bp, Homo sapiens
tgccagtattctgtt

SEQ ID NO: 628743 - DNA, 15 bp, Homo sapiens
gccagtattctgttt

SEQ ID NO: 628744 - DNA, 15 bp, Homo sapiens
ccagtattctgttta

SEQ ID NO: 628745 - DNA, 15 bp, Homo sapiens
cagtattctgtttat

SEQ ID NO: 628746 - DNA, 15 bp, Homo sapiens
agtattctgtttatt

SEQ ID NO: 628747 - DNA, 15 bp, Homo sapiens
gtattctgtttattt

SEQ ID NO: 628748 - DNA, 15 bp, Homo sapiens
tattctgtttatttt

SEQ ID NO: 628749 - DNA, 15 bp, Homo sapiens
attctgtttattttg

SEQ ID NO: 628750 - DNA, 15 bp, Homo sapiens
ttctgtttattttga

SEQ ID NO: 628751 - DNA, 15 bp, Homo sapiens
tctgtttattttgac

SEQ ID NO: 628752 - DNA, 15 bp, Homo sapiens
ctgtttattttgact

SEQ ID NO: 628753 - DNA, 15 bp, Homo sapiens
tgtttattttgactg

SEQ ID NO: 628754 - DNA, 15 bp, Homo sapiens
gtttattttgactgc

SEQ ID NO: 628755 - DNA, 15 bp, Homo sapiens
tttattttgactgcc

SEQ ID NO: 628756 - DNA, 15 bp, Homo sapiens
ttattttgactgcca

SEQ ID NO: 628757 - DNA, 15 bp, Homo sapiens
tattttgactgccac

SEQ ID NO: 628758 - DNA, 15 bp, Homo sapiens
attttgactgccacc

SEQ ID NO: 628759 - DNA, 15 bp, Homo sapiens
ttttgactgccacct

SEQ ID NO: 628760 - DNA, 15 bp, Homo sapiens
tttgactgccacctc

SEQ ID NO: 628761 - DNA, 15 bp, Homo sapiens
ttgactgccacctcc

SEQ ID NO: 628762 - DNA, 15 bp, Homo sapiens
tgactgccacctccc

SEQ ID NO: 628763 - DNA, 15 bp, Homo sapiens
gactgccacctcccc

SEQ ID NO: 628764 - DNA, 15 bp, Homo sapiens
actgccacctccccg

SEQ ID NO: 628765 - DNA, 15 bp, Homo sapiens
ctgccacctccccgc

SEQ ID NO: 628766 - DNA, 15 bp, Homo sapiens
tgccacctccccgca

SEQ ID NO: 628767 - DNA, 15 bp, Homo sapiens
gccacctccccgcag

SEQ ID NO: 628768 - DNA, 15 bp, Homo sapiens
ccacctccccgcagt

SEQ ID NO: 628769 - DNA, 15 bp, Homo sapiens
cacctccccgcagtc

SEQ ID NO: 628770 - DNA, 15 bp, Homo sapiens
acctccccgcagtct

SEQ ID NO: 628771 - DNA, 15 bp, Homo sapiens
cctccccgcagtctg

SEQ ID NO: 628772 - DNA, 15 bp, Homo sapiens
ctccccgcagtctga

SEQ ID NO: 628773 - DNA, 15 bp, Homo sapiens
tccccgcagtctgag

SEQ ID NO: 628774 - DNA, 15 bp, Homo sapiens
ccccgcagtctgagg

SEQ ID NO: 628775 - DNA, 15 bp, Homo sapiens
cccgcagtctgagga

SEQ ID NO: 628776 - DNA, 15 bp, Homo sapiens
ccgcagtctgaggat

SEQ ID NO: 628777 - DNA, 15 bp, Homo sapiens
cgcagtctgaggata

SEQ ID NO: 628778 - DNA, 15 bp, Homo sapiens
gcagtctgaggatag

SEQ ID NO: 628779 - DNA, 15 bp, Homo sapiens
cagtctgaggatagc

SEQ ID NO: 628780 - DNA, 15 bp, Homo sapiens
agtctgaggatagca

SEQ ID NO: 628781 - DNA, 15 bp, Homo sapiens
gtctgaggatagcag

SEQ ID NO: 628782 - DNA, 15 bp, Homo sapiens
tctgaggatagcagc

SEQ ID NO: 628783 - DNA, 15 bp, Homo sapiens
ctgaggatagcagca

SEQ ID NO: 628784 - DNA, 15 bp, Homo sapiens
tgaggatagcagcaa

SEQ ID NO: 628785 - DNA, 15 bp, Homo sapiens
gaggatagcagcaat

SEQ ID NO: 628786 - DNA, 15 bp, Homo sapiens
aggatagcagcaatg

SEQ ID NO: 628787 - DNA, 15 bp, Homo sapiens
ggatagcagcaatgg

SEQ ID NO: 628788 - DNA, 15 bp, Homo sapiens
gatagcagcaatggc

SEQ ID NO: 628789 - DNA, 15 bp, Homo sapiens
atagcagcaatggct

SEQ ID NO: 628790 - DNA, 15 bp, Homo sapiens
tagcagcaatggctg

SEQ ID NO: 628791 - DNA, 15 bp, Homo sapiens
agcagcaatggctgt

SEQ ID NO: 628792 - DNA, 15 bp, Homo sapiens
gcagcaatggctgtg

SEQ ID NO: 628793 - DNA, 15 bp, Homo sapiens
cagcaatggctgtgt

SEQ ID NO: 628794 - DNA, 15 bp, Homo sapiens
agcaatggctgtgtt

SEQ ID NO: 628795 - DNA, 15 bp, Homo sapiens
gcaatggctgtgttc

SEQ ID NO: 628796 - DNA, 15 bp, Homo sapiens
caatggctgtgttca

SEQ ID NO: 628797 - DNA, 15 bp, Homo sapiens
aatggctgtgttcac

SEQ ID NO: 628798 - DNA, 15 bp, Homo sapiens
atggctgtgttcaca

SEQ ID NO: 628799 - DNA, 15 bp, Homo sapiens
tggctgtgttcacat

SEQ ID NO: 628800 - DNA, 15 bp, Homo sapiens
ggctgtgttcacatt

SEQ ID NO: 628801 - DNA, 15 bp, Homo sapiens
gctgtgttcacattg

SEQ ID NO: 628802 - DNA, 15 bp, Homo sapiens
ctgtgttcacattgt

SEQ ID NO: 628803 - DNA, 15 bp, Homo sapiens
tgtgttcacattgtt

SEQ ID NO: 628804 - DNA, 15 bp, Homo sapiens
gtgttcacattgttc

SEQ ID NO: 628805 - DNA, 15 bp, Homo sapiens
tgttcacattgttct

SEQ ID NO: 628806 - DNA, 15 bp, Homo sapiens
gttcacattgttctc

SEQ ID NO: 628807 - DNA, 15 bp, Homo sapiens
ttcacattgttctcc

SEQ ID NO: 628808 - DNA, 15 bp, Homo sapiens
tcacattgttctcca

SEQ ID NO: 628809 - DNA, 15 bp, Homo sapiens
cacattgttctccag

SEQ ID NO: 628810 - DNA, 15 bp, Homo sapiens
acattgttctccagt

SEQ ID NO: 628811 - DNA, 15 bp, Homo sapiens
cattgttctccagtg

SEQ ID NO: 628812 - DNA, 15 bp, Homo sapiens
attgttctccagtgc

SEQ ID NO: 628813 - DNA, 15 bp, Homo sapiens
ttgttctccagtgcc

SEQ ID NO: 628814 - DNA, 15 bp, Homo sapiens
tgttctccagtgcct

SEQ ID NO: 628815 - DNA, 15 bp, Homo sapiens
gttctccagtgcctg

SEQ ID NO: 628816 - DNA, 15 bp, Homo sapiens
ttctccagtgcctgg

SEQ ID NO: 628817 - DNA, 15 bp, Homo sapiens
tctccagtgcctggt

SEQ ID NO: 628818 - DNA, 15 bp, Homo sapiens
ctccagtgcctggtt

SEQ ID NO: 628819 - DNA, 15 bp, Homo sapiens
tccagtgcctggttc

SEQ ID NO: 628820 - DNA, 15 bp, Homo sapiens
ccagtgcctggttca

SEQ ID NO: 628821 - DNA, 15 bp, Homo sapiens
cagtgcctggttcag

SEQ ID NO: 628822 - DNA, 15 bp, Homo sapiens
agtgcctggttcagt

SEQ ID NO: 628823 - DNA, 15 bp, Homo sapiens
gtgcctggttcagtg

SEQ ID NO: 628824 - DNA, 15 bp, Homo sapiens
tgcctggttcagtgc

SEQ ID NO: 628825 - DNA, 15 bp, Homo sapiens
gcctggttcagtgcc

SEQ ID NO: 628826 - DNA, 15 bp, Homo sapiens
cctggttcagtgcct

SEQ ID NO: 628827 - DNA, 15 bp, Homo sapiens
ctggttcagtgcctg

SEQ ID NO: 628828 - DNA, 15 bp, Homo sapiens
tggttcagtgcctgg

SEQ ID NO: 628829 - DNA, 15 bp, Homo sapiens
ggttcagtgcctggc

SEQ ID NO: 628830 - DNA, 15 bp, Homo sapiens
gttcagtgcctggcg

SEQ ID NO: 628831 - DNA, 15 bp, Homo sapiens
ttcagtgcctggcgt

SEQ ID NO: 628832 - DNA, 15 bp, Homo sapiens
tcagtgcctggcgta

SEQ ID NO: 628833 - DNA, 15 bp, Homo sapiens
cagtgcctggcgtat

SEQ ID NO: 628834 - DNA, 15 bp, Homo sapiens
agtgcctggcgtatg

SEQ ID NO: 628835 - DNA, 15 bp, Homo sapiens
gtgcctggcgtatgg

SEQ ID NO: 628836 - DNA, 15 bp, Homo sapiens
tgcctggcgtatggt

SEQ ID NO: 628837 - DNA, 15 bp, Homo sapiens
gcctggcgtatggtc

SEQ ID NO: 628838 - DNA, 15 bp, Homo sapiens
cctggcgtatggtca

SEQ ID NO: 628839 - DNA, 15 bp, Homo sapiens
ctggcgtatggtcag

SEQ ID NO: 628840 - DNA, 15 bp, Homo sapiens
tggcgtatggtcagt

SEQ ID NO: 628841 - DNA, 15 bp, Homo sapiens
ggcgtatggtcagtg

SEQ ID NO: 628842 - DNA, 15 bp, Homo sapiens
gcgtatggtcagtgc

SEQ ID NO: 628843 - DNA, 15 bp, Homo sapiens
cgtatggtcagtgct

SEQ ID NO: 628844 - DNA, 15 bp, Homo sapiens
gtatggtcagtgctc

SEQ ID NO: 628845 - DNA, 15 bp, Homo sapiens
tatggtcagtgctcc

SEQ ID NO: 628846 - DNA, 15 bp, Homo sapiens
atggtcagtgctcca

SEQ ID NO: 628847 - DNA, 15 bp, Homo sapiens
tggtcagtgctccat

SEQ ID NO: 628848 - DNA, 15 bp, Homo sapiens
ggtcagtgctccata

SEQ ID NO: 628849 - DNA, 15 bp, Homo sapiens
gtcagtgctccatag

SEQ ID NO: 628850 - DNA, 15 bp, Homo sapiens
tcagtgctccatagg

SEQ ID NO: 628851 - DNA, 15 bp, Homo sapiens
cagtgctccataggt

SEQ ID NO: 628852 - DNA, 15 bp, Homo sapiens
agtgctccataggta

SEQ ID NO: 628853 - DNA, 15 bp, Homo sapiens
gtgctccataggtat

SEQ ID NO: 628854 - DNA, 15 bp, Homo sapiens
tgctccataggtatg

SEQ ID NO: 628855 - DNA, 15 bp, Homo sapiens
gctccataggtatgt

SEQ ID NO: 628856 - DNA, 15 bp, Homo sapiens
ctccataggtatgtg

SEQ ID NO: 628857 - DNA, 15 bp, Homo sapiens
tccataggtatgtgt

SEQ ID NO: 628858 - DNA, 15 bp, Homo sapiens
ccataggtatgtgtc

SEQ ID NO: 628859 - DNA, 15 bp, Homo sapiens
cataggtatgtgtcg

SEQ ID NO: 628860 - DNA, 15 bp, Homo sapiens
ataggtatgtgtcgg

SEQ ID NO: 628861 - DNA, 15 bp, Homo sapiens
taggtatgtgtcgga

SEQ ID NO: 628862 - DNA, 15 bp, Homo sapiens
aggtatgtgtcggat

SEQ ID NO: 628863 - DNA, 15 bp, Homo sapiens
ggtatgtgtcggatg

SEQ ID NO: 628864 - DNA, 15 bp, Homo sapiens
gtatgtgtcggatgc

SEQ ID NO: 628865 - DNA, 15 bp, Homo sapiens
tatgtgtcggatgca

SEQ ID NO: 628866 - DNA, 15 bp, Homo sapiens
atgtgtcggatgcac

SEQ ID NO: 628867 - DNA, 15 bp, Homo sapiens
tgtgtcggatgcaca

SEQ ID NO: 628868 - DNA, 15 bp, Homo sapiens
gtgtcggatgcacaa

SEQ ID NO: 628869 - DNA, 15 bp, Homo sapiens
tgtcggatgcacaag

SEQ ID NO: 628870 - DNA, 15 bp, Homo sapiens
gtcggatgcacaagg

SEQ ID NO: 628871 - DNA, 15 bp, Homo sapiens
tcggatgcacaaggc

SEQ ID NO: 628872 - DNA, 15 bp, Homo sapiens
cggatgcacaaggct

SEQ ID NO: 628873 - DNA, 15 bp, Homo sapiens
ggatgcacaaggctt

SEQ ID NO: 628874 - DNA, 15 bp, Homo sapiens
gatgcacaaggcttt

SEQ ID NO: 628875 - DNA, 15 bp, Homo sapiens
atgcacaaggctttg

SEQ ID NO: 628876 - DNA, 15 bp, Homo sapiens
tgcacaaggctttgg

SEQ ID NO: 628877 - DNA, 15 bp, Homo sapiens
gcacaaggctttggg

SEQ ID NO: 628878 - DNA, 15 bp, Homo sapiens
cacaaggctttgggt

SEQ ID NO: 628879 - DNA, 15 bp, Homo sapiens
acaaggctttgggtg

SEQ ID NO: 628880 - DNA, 15 bp, Homo sapiens
caaggctttgggtgt

SEQ ID NO: 628881 - DNA, 15 bp, Homo sapiens
aaggctttgggtgta

SEQ ID NO: 628882 - DNA, 15 bp, Homo sapiens
aggctttgggtgtaa

SEQ ID NO: 628883 - DNA, 15 bp, Homo sapiens
ggctttgggtgtaac

SEQ ID NO: 628884 - DNA, 15 bp, Homo sapiens
gctttgggtgtaacc

SEQ ID NO: 628885 - DNA, 15 bp, Homo sapiens
ctttgggtgtaaccc

SEQ ID NO: 628886 - DNA, 15 bp, Homo sapiens
tttgggtgtaaccct

SEQ ID NO: 628887 - DNA, 15 bp, Homo sapiens
ttgggtgtaaccctc

SEQ ID NO: 628888 - DNA, 15 bp, Homo sapiens
tgggtgtaaccctct

SEQ ID NO: 628889 - DNA, 15 bp, Homo sapiens
gggtgtaaccctctt

SEQ ID NO: 628890 - DNA, 15 bp, Homo sapiens
ggtgtaaccctcttg

SEQ ID NO: 628891 - DNA, 15 bp, Homo sapiens
gtgtaaccctcttga

SEQ ID NO: 628892 - DNA, 15 bp, Homo sapiens
tgtaaccctcttgac

SEQ ID NO: 628893 - DNA, 15 bp, Homo sapiens
gtaaccctcttgacg

SEQ ID NO: 628894 - DNA, 15 bp, Homo sapiens
taaccctcttgacgg

SEQ ID NO: 628895 - DNA, 15 bp, Homo sapiens
aaccctcttgacggg

SEQ ID NO: 628896 - DNA, 15 bp, Homo sapiens
accctcttgacgggt

SEQ ID NO: 628897 - DNA, 15 bp, Homo sapiens
ccctcttgacgggtg

SEQ ID NO: 628898 - DNA, 15 bp, Homo sapiens
cctcttgacgggtgg

SEQ ID NO: 628899 - DNA, 15 bp, Homo sapiens
ctcttgacgggtggg

SEQ ID NO: 628900 - DNA, 15 bp, Homo sapiens
tcttgacgggtggga

SEQ ID NO: 628901 - DNA, 15 bp, Homo sapiens
cttgacgggtgggat

SEQ ID NO: 628902 - DNA, 15 bp, Homo sapiens
ttgacgggtgggatc

SEQ ID NO: 628903 - DNA, 15 bp, Homo sapiens
tgacgggtgggatca

SEQ ID NO: 628904 - DNA, 15 bp, Homo sapiens
gacgggtgggatcaa

SEQ ID NO: 628905 - DNA, 15 bp, Homo sapiens
acgggtgggatcaac

SEQ ID NO: 628906 - DNA, 15 bp, Homo sapiens
cgggtgggatcaaca

SEQ ID NO: 628907 - DNA, 15 bp, Homo sapiens
gggtgggatcaacag

SEQ ID NO: 628908 - DNA, 15 bp, Homo sapiens
ggtgggatcaacagg

SEQ ID NO: 628909 - DNA, 15 bp, Homo sapiens
gtgggatcaacaggt

SEQ ID NO: 628910 - DNA, 15 bp, Homo sapiens
tgggatcaacaggtc

SEQ ID NO: 628911 - DNA, 15 bp, Homo sapiens
gggatcaacaggtct

SEQ ID NO: 628912 - DNA, 15 bp, Homo sapiens
ggatcaacaggtctg

SEQ ID NO: 628913 - DNA, 15 bp, Homo sapiens
gatcaacaggtctgg

SEQ ID NO: 628914 - DNA, 15 bp, Homo sapiens
atcaacaggtctggg

SEQ ID NO: 628915 - DNA, 15 bp, Homo sapiens
tcaacaggtctggga

SEQ ID NO: 628916 - DNA, 15 bp, Homo sapiens
caacaggtctgggac

SEQ ID NO: 628917 - DNA, 15 bp, Homo sapiens
aacaggtctgggact

SEQ ID NO: 628918 - DNA, 15 bp, Homo sapiens
acaggtctgggactc

SEQ ID NO: 628919 - DNA, 15 bp, Homo sapiens
caggtctgggactca

SEQ ID NO: 628920 - DNA, 15 bp, Homo sapiens
aggtctgggactcac

SEQ ID NO: 628921 - DNA, 15 bp, Homo sapiens
ggtctgggactcacc

SEQ ID NO: 628922 - DNA, 15 bp, Homo sapiens
gtctgggactcacca

SEQ ID NO: 628923 - DNA, 15 bp, Homo sapiens
tctgggactcaccat

SEQ ID NO: 628924 - DNA, 15 bp, Homo sapiens
ctgggactcaccatc

SEQ ID NO: 628925 - DNA, 15 bp, Homo sapiens
tgggactcaccatct

SEQ ID NO: 628926 - DNA, 15 bp, Homo sapiens
gggactcaccatctt

SEQ ID NO: 628927 - DNA, 15 bp, Homo sapiens
ggactcaccatcttc

SEQ ID NO: 628928 - DNA, 15 bp, Homo sapiens
gactcaccatcttct

SEQ ID NO: 628929 - DNA, 15 bp, Homo sapiens
actcaccatcttctc

SEQ ID NO: 628930 - DNA, 15 bp, Homo sapiens
ctcaccatcttctca

SEQ ID NO: 628931 - DNA, 15 bp, Homo sapiens
tcaccatcttctcaa

SEQ ID NO: 628932 - DNA, 15 bp, Homo sapiens
caccatcttctcaaa

SEQ ID NO: 628933 - DNA, 15 bp, Homo sapiens
accatcttctcaaac

SEQ ID NO: 628934 - DNA, 15 bp, Homo sapiens
ccatcttctcaaaca

SEQ ID NO: 628935 - DNA, 15 bp, Homo sapiens
catcttctcaaacag

SEQ ID NO: 628936 - DNA, 15 bp, Homo sapiens
atcttctcaaacaga

SEQ ID NO: 628937 - DNA, 15 bp, Homo sapiens
tcttctcaaacagag

SEQ ID NO: 628938 - DNA, 15 bp, Homo sapiens
cttctcaaacagagc

SEQ ID NO: 628939 - DNA, 15 bp, Homo sapiens
ttctcaaacagagcc

SEQ ID NO: 628940 - DNA, 15 bp, Homo sapiens
tctcaaacagagcct

SEQ ID NO: 628941 - DNA, 15 bp, Homo sapiens
ctcaaacagagcctt

SEQ ID NO: 628942 - DNA, 15 bp, Homo sapiens
tcaaacagagccttc

SEQ ID NO: 628943 - DNA, 15 bp, Homo sapiens
caaacagagccttcc

SEQ ID NO: 628944 - DNA, 15 bp, Homo sapiens
aaacagagccttcct

SEQ ID NO: 628945 - DNA, 15 bp, Homo sapiens
aacagagccttcctc

SEQ ID NO: 628946 - DNA, 15 bp, Homo sapiens
acagagccttcctcc

SEQ ID NO: 628947 - DNA, 15 bp, Homo sapiens
cagagccttcctcct

SEQ ID NO: 628948 - DNA, 15 bp, Homo sapiens
agagccttcctcctc

SEQ ID NO: 628949 - DNA, 15 bp, Homo sapiens
gagccttcctcctcc

SEQ ID NO: 628950 - DNA, 15 bp, Homo sapiens
agccttcctcctcca

SEQ ID NO: 628951 - DNA, 15 bp, Homo sapiens
gccttcctcctccac

SEQ ID NO: 628952 - DNA, 15 bp, Homo sapiens
ccttcctcctccact

SEQ ID NO: 628953 - DNA, 15 bp, Homo sapiens
cttcctcctccactg

SEQ ID NO: 628954 - DNA, 15 bp, Homo sapiens
ttcctcctccactgc

SEQ ID NO: 628955 - DNA, 15 bp, Homo sapiens
tcctcctccactgct

SEQ ID NO: 628956 - DNA, 15 bp, Homo sapiens
cctcctccactgcta

SEQ ID NO: 628957 - DNA, 15 bp, Homo sapiens
ctcctccactgctag

SEQ ID NO: 628958 - DNA, 15 bp, Homo sapiens
tcctccactgctagc

SEQ ID NO: 628959 - DNA, 15 bp, Homo sapiens
cctccactgctagcc

SEQ ID NO: 628960 - DNA, 15 bp, Homo sapiens
ctccactgctagcca

SEQ ID NO: 628961 - DNA, 15 bp, Homo sapiens
tccactgctagccat

SEQ ID NO: 628962 - DNA, 15 bp, Homo sapiens
ccactgctagccatg

SEQ ID NO: 628963 - DNA, 15 bp, Homo sapiens
cactgctagccatgg

SEQ ID NO: 628964 - DNA, 15 bp, Homo sapiens
actgctagccatggt

SEQ ID NO: 628965 - DNA, 15 bp, Homo sapiens
ctgctagccatggtc

SEQ ID NO: 628966 - DNA, 15 bp, Homo sapiens
tgctagccatggtcc

SEQ ID NO: 628967 - DNA, 15 bp, Homo sapiens
gctagccatggtcca

SEQ ID NO: 628968 - DNA, 15 bp, Homo sapiens
ctagccatggtccag

SEQ ID NO: 628969 - DNA, 15 bp, Homo sapiens
tagccatggtccagg

SEQ ID NO: 628970 - DNA, 15 bp, Homo sapiens
agccatggtccagga

SEQ ID NO: 628971 - DNA, 15 bp, Homo sapiens
gccatggtccaggac

SEQ ID NO: 628972 - DNA, 15 bp, Homo sapiens
ccatggtccaggacg

SEQ ID NO: 628973 - DNA, 15 bp, Homo sapiens
catggtccaggacgc

SEQ ID NO: 628974 - DNA, 15 bp, Homo sapiens
atggtccaggacgct

SEQ ID NO: 628975 - DNA, 15 bp, Homo sapiens
tggtccaggacgctg

SEQ ID NO: 628976 - DNA, 15 bp, Homo sapiens
ggtccaggacgctgg

SEQ ID NO: 628977 - DNA, 15 bp, Homo sapiens
gtccaggacgctggg

SEQ ID NO: 628978 - DNA, 15 bp, Homo sapiens
tccaggacgctgggc

SEQ ID NO: 628979 - DNA, 15 bp, Homo sapiens
ccaggacgctgggcg

SEQ ID NO: 628980 - DNA, 15 bp, Homo sapiens
caggacgctgggcga

SEQ ID NO: 628981 - DNA, 15 bp, Homo sapiens
aggacgctgggcgag

SEQ ID NO: 628982 - DNA, 15 bp, Homo sapiens
ggacgctgggcgaga

SEQ ID NO: 628983 - DNA, 15 bp, Homo sapiens
gacgctgggcgagac

SEQ ID NO: 628984 - DNA, 15 bp, Homo sapiens
acgctgggcgagacc

SEQ ID NO: 628985 - DNA, 15 bp, Homo sapiens
cgctgggcgagaccc

SEQ ID NO: 628986 - DNA, 15 bp, Homo sapiens
gctgggcgagaccca

SEQ ID NO: 628987 - DNA, 15 bp, Homo sapiens
ctgggcgagacccac

SEQ ID NO: 628988 - DNA, 15 bp, Homo sapiens
tgggcgagacccact

SEQ ID NO: 628989 - DNA, 15 bp, Homo sapiens
gggcgagacccactg

SEQ ID NO: 628990 - DNA, 15 bp, Homo sapiens
ggcgagacccactgt

SEQ ID NO: 628991 - DNA, 15 bp, Homo sapiens
gcgagacccactgtc

SEQ ID NO: 628992 - DNA, 15 bp, Homo sapiens
cgagacccactgtct

SEQ ID NO: 628993 - DNA, 15 bp, Homo sapiens
gagacccactgtctt

SEQ ID NO: 628994 - DNA, 15 bp, Homo sapiens
agacccactgtcttg

SEQ ID NO: 628995 - DNA, 15 bp, Homo sapiens
gacccactgtcttgc

SEQ ID NO: 628996 - DNA, 15 bp, Homo sapiens
acccactgtcttgct

SEQ ID NO: 628997 - DNA, 15 bp, Homo sapiens
cccactgtcttgctc

SEQ ID NO: 628998 - DNA, 15 bp, Homo sapiens
ccactgtcttgctct

SEQ ID NO: 628999 - DNA, 15 bp, Homo sapiens
cactgtcttgctctt

SEQ ID NO: 629000 - DNA, 15 bp, Homo sapiens
actgtcttgctcttt

SEQ ID NO: 629001 - DNA, 15 bp, Homo sapiens
ctgtcttgctctttg

SEQ ID NO: 629002 - DNA, 15 bp, Homo sapiens
tgtcttgctctttgt

SEQ ID NO: 629003 - DNA, 15 bp, Homo sapiens
gtcttgctctttgta

SEQ ID NO: 629004 - DNA, 15 bp, Homo sapiens
tcttgctctttgtaa

SEQ ID NO: 629005 - DNA, 15 bp, Homo sapiens
cttgctctttgtaag

SEQ ID NO: 629006 - DNA, 15 bp, Homo sapiens
ttgctctttgtaagg

SEQ ID NO: 629007 - DNA, 15 bp, Homo sapiens
tgctctttgtaaggc

SEQ ID NO: 629008 - DNA, 15 bp, Homo sapiens
gctctttgtaaggct

SEQ ID NO: 629009 - DNA, 15 bp, Homo sapiens
ctctttgtaaggctg

SEQ ID NO: 629010 - DNA, 15 bp, Homo sapiens
tctttgtaaggctga

SEQ ID NO: 629011 - DNA, 15 bp, Homo sapiens
ctttgtaaggctgaa

SEQ ID NO: 629012 - DNA, 15 bp, Homo sapiens
tttgtaaggctgaag

SEQ ID NO: 629013 - DNA, 15 bp, Homo sapiens
ttgtaaggctgaagt

SEQ ID NO: 629014 - DNA, 15 bp, Homo sapiens
tgtaaggctgaagtc

SEQ ID NO: 629015 - DNA, 15 bp, Homo sapiens
gtaaggctgaagtcc

SEQ ID NO: 629016 - DNA, 15 bp, Homo sapiens
taaggctgaagtcca

SEQ ID NO: 629017 - DNA, 15 bp, Homo sapiens
aaggctgaagtccat

SEQ ID NO: 629018 - DNA, 15 bp, Homo sapiens
aggctgaagtccatt

SEQ ID NO: 629019 - DNA, 15 bp, Homo sapiens
ggctgaagtccattt

SEQ ID NO: 629020 - DNA, 15 bp, Homo sapiens
gctgaagtccatttc

SEQ ID NO: 629021 - DNA, 15 bp, Homo sapiens
ctgaagtccatttcc

SEQ ID NO: 629022 - DNA, 15 bp, Homo sapiens
tgaagtccatttccc

SEQ ID NO: 629023 - DNA, 15 bp, Homo sapiens
gaagtccatttccca

SEQ ID NO: 629024 - DNA, 15 bp, Homo sapiens
aagtccatttcccag

SEQ ID NO: 629025 - DNA, 15 bp, Homo sapiens
agtccatttcccagg

SEQ ID NO: 629026 - DNA, 15 bp, Homo sapiens
gtccatttcccaggc

SEQ ID NO: 629027 - DNA, 15 bp, Homo sapiens
tccatttcccaggcg

SEQ ID NO: 629028 - DNA, 15 bp, Homo sapiens
ccatttcccaggcgg

SEQ ID NO: 629029 - DNA, 15 bp, Homo sapiens
catttcccaggcggc

SEQ ID NO: 629030 - DNA, 15 bp, Homo sapiens
atttcccaggcggct

SEQ ID NO: 629031 - DNA, 15 bp, Homo sapiens
tttcccaggcggcta

SEQ ID NO: 629032 - DNA, 15 bp, Homo sapiens
ttcccaggcggctac

SEQ ID NO: 629033 - DNA, 15 bp, Homo sapiens
tcccaggcggctaca

SEQ ID NO: 629034 - DNA, 15 bp, Homo sapiens
cccaggcggctacac

SEQ ID NO: 629035 - DNA, 15 bp, Homo sapiens
ccaggcggctacacc

SEQ ID NO: 629036 - DNA, 15 bp, Homo sapiens
caggcggctacaccc

SEQ ID NO: 629037 - DNA, 15 bp, Homo sapiens
aggcggctacaccca

SEQ ID NO: 629038 - DNA, 15 bp, Homo sapiens
ggcggctacacccaa

SEQ ID NO: 629039 - DNA, 15 bp, Homo sapiens
gcggctacacccaac

SEQ ID NO: 629040 - DNA, 15 bp, Homo sapiens
cggctacacccaaca

SEQ ID NO: 629041 - DNA, 15 bp, Homo sapiens
ggctacacccaacag

SEQ ID NO: 629042 - DNA, 15 bp, Homo sapiens
gctacacccaacaga

SEQ ID NO: 629043 - DNA, 15 bp, Homo sapiens
ctacacccaacagat

SEQ ID NO: 629044 - DNA, 15 bp, Homo sapiens
tacacccaacagatg

SEQ ID NO: 629045 - DNA, 15 bp, Homo sapiens
acacccaacagatgc

SEQ ID NO: 629046 - DNA, 15 bp, Homo sapiens
cacccaacagatgct

SEQ ID NO: 629047 - DNA, 15 bp, Homo sapiens
acccaacagatgctg

SEQ ID NO: 629048 - DNA, 15 bp, Homo sapiens
cccaacagatgctga

SEQ ID NO: 629049 - DNA, 15 bp, Homo sapiens
ccaacagatgctgag

SEQ ID NO: 629050 - DNA, 15 bp, Homo sapiens
caacagatgctgagc

SEQ ID NO: 629051 - DNA, 15 bp, Homo sapiens
aacagatgctgagca

SEQ ID NO: 629052 - DNA, 15 bp, Homo sapiens
acagatgctgagcag

SEQ ID NO: 629053 - DNA, 15 bp, Homo sapiens
cagatgctgagcagg

SEQ ID NO: 629054 - DNA, 15 bp, Homo sapiens
agatgctgagcaggc

SEQ ID NO: 629055 - DNA, 15 bp, Homo sapiens
gatgctgagcaggct

SEQ ID NO: 629056 - DNA, 15 bp, Homo sapiens
atgctgagcaggctg

SEQ ID NO: 629057 - DNA, 15 bp, Homo sapiens
tgctgagcaggctgg

SEQ ID NO: 629058 - DNA, 15 bp, Homo sapiens
gctgagcaggctggg

SEQ ID NO: 629059 - DNA, 15 bp, Homo sapiens
ctgagcaggctgggc

SEQ ID NO: 629060 - DNA, 15 bp, Homo sapiens
tgagcaggctgggcc

SEQ ID NO: 629061 - DNA, 15 bp, Homo sapiens
gagcaggctgggcca

SEQ ID NO: 629062 - DNA, 15 bp, Homo sapiens
agcaggctgggccac

SEQ ID NO: 629063 - DNA, 15 bp, Homo sapiens
gcaggctgggccacc

SEQ ID NO: 629064 - DNA, 15 bp, Homo sapiens
caggctgggccaccc

SEQ ID NO: 629065 - DNA, 15 bp, Homo sapiens
aggctgggccaccct

SEQ ID NO: 629066 - DNA, 15 bp, Homo sapiens
ggctgggccaccctg

SEQ ID NO: 629067 - DNA, 15 bp, Homo sapiens
gctgggccaccctgg

SEQ ID NO: 629068 - DNA, 15 bp, Homo sapiens
ctgggccaccctggg

SEQ ID NO: 629069 - DNA, 15 bp, Homo sapiens
tgggccaccctggga

SEQ ID NO: 629070 - DNA, 15 bp, Homo sapiens
gggccaccctgggat

SEQ ID NO: 629071 - DNA, 15 bp, Homo sapiens
ggccaccctgggatc

SEQ ID NO: 629072 - DNA, 15 bp, Homo sapiens
gccaccctgggatcc

SEQ ID NO: 629073 - DNA, 15 bp, Homo sapiens
ccaccctgggatcca

SEQ ID NO: 629074 - DNA, 15 bp, Homo sapiens
caccctgggatccaa

SEQ ID NO: 629075 - DNA, 15 bp, Homo sapiens
accctgggatccaag

SEQ ID NO: 629076 - DNA, 15 bp, Homo sapiens
ccctgggatccaaga

SEQ ID NO: 629077 - DNA, 15 bp, Homo sapiens
cctgggatccaagac

SEQ ID NO: 629078 - DNA, 15 bp, Homo sapiens
ctgggatccaagaca

SEQ ID NO: 629079 - DNA, 15 bp, Homo sapiens
tgggatccaagacac

SEQ ID NO: 629080 - DNA, 15 bp, Homo sapiens
gggatccaagacaca

SEQ ID NO: 629081 - DNA, 15 bp, Homo sapiens
ggatccaagacacag

SEQ ID NO: 629082 - DNA, 15 bp, Homo sapiens
gatccaagacacaga

SEQ ID NO: 629083 - DNA, 15 bp, Homo sapiens
atccaagacacagag

SEQ ID NO: 629084 - DNA, 15 bp, Homo sapiens
tccaagacacagaga

SEQ ID NO: 629085 - DNA, 15 bp, Homo sapiens
ccaagacacagagag

SEQ ID NO: 629086 - DNA, 15 bp, Homo sapiens
caagacacagagaga

SEQ ID NO: 629087 - DNA, 15 bp, Homo sapiens
agacacagagagaaa

SEQ ID NO: 629088 - DNA, 15 bp, Homo sapiens
gacacagagagaaag

SEQ ID NO: 629089 - DNA, 15 bp, Homo sapiens
acacagagagaaaga

SEQ ID NO: 629090 - DNA, 15 bp, Homo sapiens
cacagagagaaagag

SEQ ID NO: 629091 - DNA, 15 bp, Homo sapiens
acagagagaaagagc

SEQ ID NO: 629092 - DNA, 15 bp, Homo sapiens
cagagagaaagagcc

SEQ ID NO: 629093 - DNA, 15 bp, Homo sapiens
agagagaaagagccc

SEQ ID NO: 629094 - DNA, 15 bp, Homo sapiens
gagagaaagagcccc

SEQ ID NO: 629095 - DNA, 15 bp, Homo sapiens
agagaaagagcccct

SEQ ID NO: 629096 - DNA, 15 bp, Homo sapiens
gagaaagagcccctg

SEQ ID NO: 629097 - DNA, 15 bp, Homo sapiens
agaaagagcccctgt

SEQ ID NO: 629098 - DNA, 15 bp, Homo sapiens
gaaagagcccctgtc

SEQ ID NO: 629099 - DNA, 15 bp, Homo sapiens
aaagagcccctgtct

SEQ ID NO: 629100 - DNA, 15 bp, Homo sapiens
aagagcccctgtctg

SEQ ID NO: 629101 - DNA, 15 bp, Homo sapiens
agagcccctgtctgg

SEQ ID NO: 629102 - DNA, 15 bp, Homo sapiens
gagcccctgtctggc

SEQ ID NO: 629103 - DNA, 15 bp, Homo sapiens
agcccctgtctggcg

SEQ ID NO: 629104 - DNA, 15 bp, Homo sapiens
gcccctgtctggcgc

SEQ ID NO: 629105 - DNA, 15 bp, Homo sapiens
cccctgtctggcgcc

SEQ ID NO: 629106 - DNA, 15 bp, Homo sapiens
ccctgtctggcgcct

SEQ ID NO: 629107 - DNA, 15 bp, Homo sapiens
cctgtctggcgcctg

SEQ ID NO: 629108 - DNA, 15 bp, Homo sapiens
ctgtctggcgcctga

SEQ ID NO: 629109 - DNA, 15 bp, Homo sapiens
tgtctggcgcctgaa

SEQ ID NO: 629110 - DNA, 15 bp, Homo sapiens
gtctggcgcctgaag

SEQ ID NO: 629111 - DNA, 15 bp, Homo sapiens
tctggcgcctgaagc

SEQ ID NO: 629112 - DNA, 15 bp, Homo sapiens
ctggcgcctgaagca

SEQ ID NO: 629113 - DNA, 15 bp, Homo sapiens
tggcgcctgaagcac

SEQ ID NO: 629114 - DNA, 15 bp, Homo sapiens
ggcgcctgaagcaca

SEQ ID NO: 629115 - DNA, 15 bp, Homo sapiens
gcgcctgaagcacat

SEQ ID NO: 629116 - DNA, 15 bp, Homo sapiens
cgcctgaagcacatg

SEQ ID NO: 629117 - DNA, 15 bp, Homo sapiens
gcctgaagcacatgc

SEQ ID NO: 629118 - DNA, 15 bp, Homo sapiens
cctgaagcacatgcc

SEQ ID NO: 629119 - DNA, 15 bp, Homo sapiens
ctgaagcacatgcca

SEQ ID NO: 629120 - DNA, 15 bp, Homo sapiens
tgaagcacatgccag

SEQ ID NO: 629121 - DNA, 15 bp, Homo sapiens
gaagcacatgccaga

SEQ ID NO: 629122 - DNA, 15 bp, Homo sapiens
aagcacatgccagag

SEQ ID NO: 629123 - DNA, 15 bp, Homo sapiens
agcacatgccagagg

SEQ ID NO: 629124 - DNA, 15 bp, Homo sapiens
gcacatgccagagga

SEQ ID NO: 629125 - DNA, 15 bp, Homo sapiens
cacatgccagaggac

SEQ ID NO: 629126 - DNA, 15 bp, Homo sapiens
acatgccagaggaca

SEQ ID NO: 629127 - DNA, 15 bp, Homo sapiens
catgccagaggacag

SEQ ID NO: 629128 - DNA, 15 bp, Homo sapiens
atgccagaggacagg

SEQ ID NO: 629129 - DNA, 15 bp, Homo sapiens
tgccagaggacagga

SEQ ID NO: 629130 - DNA, 15 bp, Homo sapiens
gccagaggacaggag

SEQ ID NO: 629131 - DNA, 15 bp, Homo sapiens
ccagaggacaggagc

SEQ ID NO: 629132 - DNA, 15 bp, Homo sapiens
cagaggacaggagcc

SEQ ID NO: 629133 - DNA, 15 bp, Homo sapiens
agaggacaggagcca

SEQ ID NO: 629134 - DNA, 15 bp, Homo sapiens
gaggacaggagccag

SEQ ID NO: 629135 - DNA, 15 bp, Homo sapiens
aggacaggagccagc

SEQ ID NO: 629136 - DNA, 15 bp, Homo sapiens
ggacaggagccagca

SEQ ID NO: 629137 - DNA, 15 bp, Homo sapiens
gacaggagccagcag

SEQ ID NO: 629138 - DNA, 15 bp, Homo sapiens
acaggagccagcagg

SEQ ID NO: 629139 - DNA, 15 bp, Homo sapiens
caggagccagcagga

SEQ ID NO: 629140 - DNA, 15 bp, Homo sapiens
aggagccagcaggag

SEQ ID NO: 629141 - DNA, 15 bp, Homo sapiens
ggagccagcaggagc

SEQ ID NO: 629142 - DNA, 15 bp, Homo sapiens
gagccagcaggagcc

SEQ ID NO: 629143 - DNA, 15 bp, Homo sapiens
agccagcaggagcct

SEQ ID NO: 629144 - DNA, 15 bp, Homo sapiens
gccagcaggagcctg

SEQ ID NO: 629145 - DNA, 15 bp, Homo sapiens
ccagcaggagcctgt

SEQ ID NO: 629146 - DNA, 15 bp, Homo sapiens
cagcaggagcctgtt

SEQ ID NO: 629147 - DNA, 15 bp, Homo sapiens
agcaggagcctgttt

SEQ ID NO: 629148 - DNA, 15 bp, Homo sapiens
gcaggagcctgtttc

SEQ ID NO: 629149 - DNA, 15 bp, Homo sapiens
caggagcctgtttca

SEQ ID NO: 629150 - DNA, 15 bp, Homo sapiens
aggagcctgtttcag

SEQ ID NO: 629151 - DNA, 15 bp, Homo sapiens
ggagcctgtttcagc

SEQ ID NO: 629152 - DNA, 15 bp, Homo sapiens
gagcctgtttcagcc

SEQ ID NO: 629153 - DNA, 15 bp, Homo sapiens
agcctgtttcagcct

SEQ ID NO: 629154 - DNA, 15 bp, Homo sapiens
gcctgtttcagccta

SEQ ID NO: 629155 - DNA, 15 bp, Homo sapiens
cctgtttcagcctag

SEQ ID NO: 629156 - DNA, 15 bp, Homo sapiens
ctgtttcagcctagc

SEQ ID NO: 629157 - DNA, 15 bp, Homo sapiens
tgtttcagcctagct

SEQ ID NO: 629158 - DNA, 15 bp, Homo sapiens
gtttcagcctagctg

SEQ ID NO: 629159 - DNA, 15 bp, Homo sapiens
tttcagcctagctgg

SEQ ID NO: 629160 - DNA, 15 bp, Homo sapiens
ttcagcctagctggg

SEQ ID NO: 629161 - DNA, 15 bp, Homo sapiens
tcagcctagctgggg

SEQ ID NO: 629162 - DNA, 15 bp, Homo sapiens
cagcctagctgggga

SEQ ID NO: 629163 - DNA, 15 bp, Homo sapiens
agcctagctggggat

SEQ ID NO: 629164 - DNA, 15 bp, Homo sapiens
gcctagctggggatt

SEQ ID NO: 629165 - DNA, 15 bp, Homo sapiens
cctagctggggattt

SEQ ID NO: 629166 - DNA, 15 bp, Homo sapiens
ctagctggggatttc

SEQ ID NO: 629167 - DNA, 15 bp, Homo sapiens
tagctggggatttca

SEQ ID NO: 629168 - DNA, 15 bp, Homo sapiens
agctggggatttcat

SEQ ID NO: 629169 - DNA, 15 bp, Homo sapiens
gctggggatttcatt

SEQ ID NO: 629170 - DNA, 15 bp, Homo sapiens
ctggggatttcattc

SEQ ID NO: 629171 - DNA, 15 bp, Homo sapiens
tggggatttcattct

SEQ ID NO: 629172 - DNA, 15 bp, Homo sapiens
ggggatttcattctg

SEQ ID NO: 629173 - DNA, 15 bp, Homo sapiens
gggatttcattctgg

SEQ ID NO: 629174 - DNA, 15 bp, Homo sapiens
ggatttcattctgga

SEQ ID NO: 629175 - DNA, 15 bp, Homo sapiens
gatttcattctggag

SEQ ID NO: 629176 - DNA, 15 bp, Homo sapiens
atttcattctggagg

SEQ ID NO: 629177 - DNA, 15 bp, Homo sapiens
tttcattctggaggc

SEQ ID NO: 629178 - DNA, 15 bp, Homo sapiens
ttcattctggaggcg

SEQ ID NO: 629179 - DNA, 15 bp, Homo sapiens
tcattctggaggcgt

SEQ ID NO: 629180 - DNA, 15 bp, Homo sapiens
cattctggaggcgtg

SEQ ID NO: 629181 - DNA, 15 bp, Homo sapiens
attctggaggcgtga

SEQ ID NO: 629182 - DNA, 15 bp, Homo sapiens
ttctggaggcgtgag

SEQ ID NO: 629183 - DNA, 15 bp, Homo sapiens
tctggaggcgtgaga

SEQ ID NO: 629184 - DNA, 15 bp, Homo sapiens
ctggaggcgtgagat

SEQ ID NO: 629185 - DNA, 15 bp, Homo sapiens
tggaggcgtgagatc

SEQ ID NO: 629186 - DNA, 15 bp, Homo sapiens
ggaggcgtgagatct

SEQ ID NO: 629187 - DNA, 15 bp, Homo sapiens
gaggcgtgagatctg

SEQ ID NO: 629188 - DNA, 15 bp, Homo sapiens
aggcgtgagatctgg

SEQ ID NO: 629189 - DNA, 15 bp, Homo sapiens
ggcgtgagatctggg

SEQ ID NO: 629190 - DNA, 15 bp, Homo sapiens
gcgtgagatctggga

SEQ ID NO: 629191 - DNA, 15 bp, Homo sapiens
cgtgagatctgggag

SEQ ID NO: 629192 - DNA, 15 bp, Homo sapiens
gtgagatctgggagc

SEQ ID NO: 629193 - DNA, 15 bp, Homo sapiens
tgagatctgggagcc

SEQ ID NO: 629194 - DNA, 15 bp, Homo sapiens
gagatctgggagccc

SEQ ID NO: 629195 - DNA, 15 bp, Homo sapiens
agatctgggagccca

SEQ ID NO: 629196 - DNA, 15 bp, Homo sapiens
gatctgggagcccaa

SEQ ID NO: 629197 - DNA, 15 bp, Homo sapiens
atctgggagcccaag

SEQ ID NO: 629198 - DNA, 15 bp, Homo sapiens
tctgggagcccaagg

SEQ ID NO: 629199 - DNA, 15 bp, Homo sapiens
ctgggagcccaaggc

SEQ ID NO: 629200 - DNA, 15 bp, Homo sapiens
tgggagcccaaggct

SEQ ID NO: 629201 - DNA, 15 bp, Homo sapiens
gggagcccaaggctt

SEQ ID NO: 629202 - DNA, 15 bp, Homo sapiens
ggagcccaaggcttt

SEQ ID NO: 629203 - DNA, 15 bp, Homo sapiens
gagcccaaggctttg

SEQ ID NO: 629204 - DNA, 15 bp, Homo sapiens
agcccaaggctttga

SEQ ID NO: 629205 - DNA, 15 bp, Homo sapiens
gcccaaggctttgaa

SEQ ID NO: 629206 - DNA, 15 bp, Homo sapiens
cccaaggctttgaac

SEQ ID NO: 629207 - DNA, 15 bp, Homo sapiens
ccaaggctttgaact

SEQ ID NO: 629208 - DNA, 15 bp, Homo sapiens
caaggctttgaactg

SEQ ID NO: 629209 - DNA, 15 bp, Homo sapiens
aaggctttgaactgg

SEQ ID NO: 629210 - DNA, 15 bp, Homo sapiens
aggctttgaactggg

SEQ ID NO: 629211 - DNA, 15 bp, Homo sapiens
ggctttgaactgggg

SEQ ID NO: 629212 - DNA, 15 bp, Homo sapiens
gctttgaactggggg

SEQ ID NO: 629213 - DNA, 15 bp, Homo sapiens
ctttgaactggggga

SEQ ID NO: 629214 - DNA, 15 bp, Homo sapiens
tttgaactgggggag

SEQ ID NO: 629215 - DNA, 15 bp, Homo sapiens
ttgaactgggggagg

SEQ ID NO: 629216 - DNA, 15 bp, Homo sapiens
tgaactgggggaggt

SEQ ID NO: 629217 - DNA, 15 bp, Homo sapiens
gaactgggggaggtt

SEQ ID NO: 629218 - DNA, 15 bp, Homo sapiens
aactgggggaggttt

SEQ ID NO: 629219 - DNA, 15 bp, Homo sapiens
actgggggaggtttg

SEQ ID NO: 629220 - DNA, 15 bp, Homo sapiens
ctgggggaggtttgg

SEQ ID NO: 629221 - DNA, 15 bp, Homo sapiens
tgggggaggtttggg

SEQ ID NO: 629222 - DNA, 15 bp, Homo sapiens
gggggaggtttgggg

SEQ ID NO: 629223 - DNA, 15 bp, Homo sapiens
ggggaggtttggggt

SEQ ID NO: 629224 - DNA, 15 bp, Homo sapiens
gggaggtttggggtg

SEQ ID NO: 629225 - DNA, 15 bp, Homo sapiens
ggaggtttggggtgt

SEQ ID NO: 629226 - DNA, 15 bp, Homo sapiens
gaggtttggggtgtt

SEQ ID NO: 629227 - DNA, 15 bp, Homo sapiens
aggtttggggtgttt

SEQ ID NO: 629228 - DNA, 15 bp, Homo sapiens
ggtttggggtgtttg

SEQ ID NO: 629229 - DNA, 15 bp, Homo sapiens
gtttggggtgtttgc

SEQ ID NO: 629230 - DNA, 15 bp, Homo sapiens
tttggggtgtttgct

SEQ ID NO: 629231 - DNA, 15 bp, Homo sapiens
ttggggtgtttgctt

SEQ ID NO: 629232 - DNA, 15 bp, Homo sapiens
tggggtgtttgcttg

SEQ ID NO: 629233 - DNA, 15 bp, Homo sapiens
ggggtgtttgcttgt

SEQ ID NO: 629234 - DNA, 15 bp, Homo sapiens
gggtgtttgcttgtc

SEQ ID NO: 629235 - DNA, 15 bp, Homo sapiens
ggtgtttgcttgtct

SEQ ID NO: 629236 - DNA, 15 bp, Homo sapiens
gtgtttgcttgtctt

SEQ ID NO: 629237 - DNA, 15 bp, Homo sapiens
tgtttgcttgtcttc

SEQ ID NO: 629238 - DNA, 15 bp, Homo sapiens
gtttgcttgtcttct

SEQ ID NO: 629239 - DNA, 15 bp, Homo sapiens
tttgcttgtcttctc

SEQ ID NO: 629240 - DNA, 15 bp, Homo sapiens
ttgcttgtcttctcc

SEQ ID NO: 629241 - DNA, 15 bp, Homo sapiens
tgcttgtcttctcca

SEQ ID NO: 629242 - DNA, 15 bp, Homo sapiens
gcttgtcttctccaa

SEQ ID NO: 629243 - DNA, 15 bp, Homo sapiens
cttgtcttctccaaa

SEQ ID NO: 629244 - DNA, 15 bp, Homo sapiens
ttgtcttctccaaat

SEQ ID NO: 629245 - DNA, 15 bp, Homo sapiens
tgtcttctccaaatg

SEQ ID NO: 629246 - DNA, 15 bp, Homo sapiens
gtcttctccaaatgg

SEQ ID NO: 629247 - DNA, 15 bp, Homo sapiens
tcttctccaaatggc

SEQ ID NO: 629248 - DNA, 15 bp, Homo sapiens
cttctccaaatggca

SEQ ID NO: 629249 - DNA, 15 bp, Homo sapiens
ttctccaaatggcat

SEQ ID NO: 629250 - DNA, 15 bp, Homo sapiens
tctccaaatggcatt

SEQ ID NO: 629251 - DNA, 15 bp, Homo sapiens
ctccaaatggcattt

SEQ ID NO: 629252 - DNA, 15 bp, Homo sapiens
tccaaatggcatttc

SEQ ID NO: 629253 - DNA, 15 bp, Homo sapiens
ccaaatggcatttct

SEQ ID NO: 629254 - DNA, 15 bp, Homo sapiens
caaatggcatttctt

SEQ ID NO: 629255 - DNA, 15 bp, Homo sapiens
aaatggcatttcttt

SEQ ID NO: 629256 - DNA, 15 bp, Homo sapiens
aatggcatttctttc

SEQ ID NO: 629257 - DNA, 15 bp, Homo sapiens
atggcatttctttct

SEQ ID NO: 629258 - DNA, 15 bp, Homo sapiens
tggcatttctttctc

SEQ ID NO: 629259 - DNA, 15 bp, Homo sapiens
ggcatttctttctct

SEQ ID NO: 629260 - DNA, 15 bp, Homo sapiens
gcatttctttctctt

SEQ ID NO: 629261 - DNA, 15 bp, Homo sapiens
catttctttctcttc

SEQ ID NO: 629262 - DNA, 15 bp, Homo sapiens
atttctttctcttcc

SEQ ID NO: 629263 - DNA, 15 bp, Homo sapiens
tttctttctcttccc

SEQ ID NO: 629264 - DNA, 15 bp, Homo sapiens
ttctttctcttccct

SEQ ID NO: 629265 - DNA, 15 bp, Homo sapiens
tctttctcttcccta

SEQ ID NO: 629266 - DNA, 15 bp, Homo sapiens
ctttctcttccctag

SEQ ID NO: 629267 - DNA, 15 bp, Homo sapiens
tttctcttccctagg

SEQ ID NO: 629268 - DNA, 15 bp, Homo sapiens
ttctcttccctaggt

SEQ ID NO: 629269 - DNA, 15 bp, Homo sapiens
tctcttccctaggtt

SEQ ID NO: 629270 - DNA, 15 bp, Homo sapiens
ctcttccctaggttg

SEQ ID NO: 629271 - DNA, 15 bp, Homo sapiens
tcttccctaggttgc

SEQ ID NO: 629272 - DNA, 15 bp, Homo sapiens
cttccctaggttgca

SEQ ID NO: 629273 - DNA, 15 bp, Homo sapiens
ttccctaggttgcaa

SEQ ID NO: 629274 - DNA, 15 bp, Homo sapiens
tccctaggttgcaaa

SEQ ID NO: 629275 - DNA, 15 bp, Homo sapiens
ccctaggttgcaaac

SEQ ID NO: 629276 - DNA, 15 bp, Homo sapiens
cctaggttgcaaact

SEQ ID NO: 629277 - DNA, 15 bp, Homo sapiens
ctaggttgcaaactg

SEQ ID NO: 629278 - DNA, 15 bp, Homo sapiens
taggttgcaaactgg

SEQ ID NO: 629279 - DNA, 15 bp, Homo sapiens
aggttgcaaactgga

SEQ ID NO: 629280 - DNA, 15 bp, Homo sapiens
ggttgcaaactggag

SEQ ID NO: 629281 - DNA, 15 bp, Homo sapiens
gttgcaaactggagt

SEQ ID NO: 629282 - DNA, 15 bp, Homo sapiens
ttgcaaactggagta

SEQ ID NO: 629283 - DNA, 15 bp, Homo sapiens
tgcaaactggagtat

SEQ ID NO: 629284 - DNA, 15 bp, Homo sapiens
gcaaactggagtatt

SEQ ID NO: 629285 - DNA, 15 bp, Homo sapiens
caaactggagtatta

SEQ ID NO: 629286 - DNA, 15 bp, Homo sapiens
aaactggagtattaa

SEQ ID NO: 629287 - DNA, 15 bp, Homo sapiens
aactggagtattaag

SEQ ID NO: 629288 - DNA, 15 bp, Homo sapiens
actggagtattaaga

SEQ ID NO: 629289 - DNA, 15 bp, Homo sapiens
ctggagtattaagag

SEQ ID NO: 629290 - DNA, 15 bp, Homo sapiens
tggagtattaagagc

SEQ ID NO: 629291 - DNA, 15 bp, Homo sapiens
ggagtattaagagcc

SEQ ID NO: 629292 - DNA, 15 bp, Homo sapiens
gagtattaagagcct

SEQ ID NO: 629293 - DNA, 15 bp, Homo sapiens
agtattaagagcctg

SEQ ID NO: 629294 - DNA, 15 bp, Homo sapiens
gtattaagagcctgg

SEQ ID NO: 629295 - DNA, 15 bp, Homo sapiens
tattaagagcctggg

SEQ ID NO: 629296 - DNA, 15 bp, Homo sapiens
attaagagcctgggc

SEQ ID NO: 629297 - DNA, 15 bp, Homo sapiens
ttaagagcctgggcc

SEQ ID NO: 629298 - DNA, 15 bp, Homo sapiens
taagagcctgggcct

SEQ ID NO: 629299 - DNA, 15 bp, Homo sapiens
aagagcctgggcctg

SEQ ID NO: 629300 - DNA, 15 bp, Homo sapiens
agagcctgggcctga

SEQ ID NO: 629301 - DNA, 15 bp, Homo sapiens
gagcctgggcctgac

SEQ ID NO: 629302 - DNA, 15 bp, Homo sapiens
agcctgggcctgact

SEQ ID NO: 629303 - DNA, 15 bp, Homo sapiens
gcctgggcctgactg

SEQ ID NO: 629304 - DNA, 15 bp, Homo sapiens
cctgggcctgactgt

SEQ ID NO: 629305 - DNA, 15 bp, Homo sapiens
ctgggcctgactgtc

SEQ ID NO: 629306 - DNA, 15 bp, Homo sapiens
tgggcctgactgtct

SEQ ID NO: 629307 - DNA, 15 bp, Homo sapiens
gggcctgactgtcta

SEQ ID NO: 629308 - DNA, 15 bp, Homo sapiens
ggcctgactgtctac

SEQ ID NO: 629309 - DNA, 15 bp, Homo sapiens
gcctgactgtctacg

SEQ ID NO: 629310 - DNA, 15 bp, Homo sapiens
cctgactgtctacgc

SEQ ID NO: 629311 - DNA, 15 bp, Homo sapiens
ctgactgtctacgcc

SEQ ID NO: 629312 - DNA, 15 bp, Homo sapiens
tgactgtctacgccg

SEQ ID NO: 629313 - DNA, 15 bp, Homo sapiens
gactgtctacgccga

SEQ ID NO: 629314 - DNA, 15 bp, Homo sapiens
actgtctacgccgac

SEQ ID NO: 629315 - DNA, 15 bp, Homo sapiens
ctgtctacgccgact

SEQ ID NO: 629316 - DNA, 15 bp, Homo sapiens
tgtctacgccgactg

SEQ ID NO: 629317 - DNA, 15 bp, Homo sapiens
gtctacgccgactgc

SEQ ID NO: 629318 - DNA, 15 bp, Homo sapiens
tctacgccgactgcc

SEQ ID NO: 629319 - DNA, 15 bp, Homo sapiens
ctacgccgactgcct

SEQ ID NO: 629320 - DNA, 15 bp, Homo sapiens
tacgccgactgcctg

SEQ ID NO: 629321 - DNA, 15 bp, Homo sapiens
acgccgactgcctgg

SEQ ID NO: 629322 - DNA, 15 bp, Homo sapiens
cgccgactgcctggc

SEQ ID NO: 629323 - DNA, 15 bp, Homo sapiens
gccgactgcctggct

SEQ ID NO: 629324 - DNA, 15 bp, Homo sapiens
ccgactgcctggctg

SEQ ID NO: 629325 - DNA, 15 bp, Homo sapiens
cgactgcctggctgg

SEQ ID NO: 629326 - DNA, 15 bp, Homo sapiens
gactgcctggctggc

SEQ ID NO: 629327 - DNA, 15 bp, Homo sapiens
actgcctggctggca

SEQ ID NO: 629328 - DNA, 15 bp, Homo sapiens
ctgcctggctggcac

SEQ ID NO: 629329 - DNA, 15 bp, Homo sapiens
tgcctggctggcacg

SEQ ID NO: 629330 - DNA, 15 bp, Homo sapiens
gcctggctggcacgt

SEQ ID NO: 629331 - DNA, 15 bp, Homo sapiens
cctggctggcacgta

SEQ ID NO: 629332 - DNA, 15 bp, Homo sapiens
ctggctggcacgtac

SEQ ID NO: 629333 - DNA, 15 bp, Homo sapiens
tggctggcacgtaca

SEQ ID NO: 629334 - DNA, 15 bp, Homo sapiens
ggctggcacgtacag

SEQ ID NO: 629335 - DNA, 15 bp, Homo sapiens
gctggcacgtacagt

SEQ ID NO: 629336 - DNA, 15 bp, Homo sapiens
ctggcacgtacagtg

SEQ ID NO: 629337 - DNA, 15 bp, Homo sapiens
tggcacgtacagtgg

SEQ ID NO: 629338 - DNA, 15 bp, Homo sapiens
ggcacgtacagtggg

SEQ ID NO: 629339 - DNA, 15 bp, Homo sapiens
gcacgtacagtgggg

SEQ ID NO: 629340 - DNA, 15 bp, Homo sapiens
cacgtacagtggggg

SEQ ID NO: 629341 - DNA, 15 bp, Homo sapiens
acgtacagtgggggc

SEQ ID NO: 629342 - DNA, 15 bp, Homo sapiens
cgtacagtgggggca

SEQ ID NO: 629343 - DNA, 15 bp, Homo sapiens
gtacagtgggggcaa

SEQ ID NO: 629344 - DNA, 15 bp, Homo sapiens
tacagtgggggcaac

SEQ ID NO: 629345 - DNA, 15 bp, Homo sapiens
acagtgggggcaaca

SEQ ID NO: 629346 - DNA, 15 bp, Homo sapiens
cagtgggggcaacaa

SEQ ID NO: 629347 - DNA, 15 bp, Homo sapiens
agtgggggcaacaag

SEQ ID NO: 629348 - DNA, 15 bp, Homo sapiens
gtgggggcaacaagc

SEQ ID NO: 629349 - DNA, 15 bp, Homo sapiens
tgggggcaacaagcg

SEQ ID NO: 629350 - DNA, 15 bp, Homo sapiens
gggggcaacaagcgg

SEQ ID NO: 629351 - DNA, 15 bp, Homo sapiens
ggggcaacaagcgga

SEQ ID NO: 629352 - DNA, 15 bp, Homo sapiens
gggcaacaagcggaa

SEQ ID NO: 629353 - DNA, 15 bp, Homo sapiens
ggcaacaagcggaaa

SEQ ID NO: 629354 - DNA, 15 bp, Homo sapiens
gcaacaagcggaaac

SEQ ID NO: 629355 - DNA, 15 bp, Homo sapiens
caacaagcggaaact

SEQ ID NO: 629356 - DNA, 15 bp, Homo sapiens
aacaagcggaaactc

SEQ ID NO: 629357 - DNA, 15 bp, Homo sapiens
acaagcggaaactct

SEQ ID NO: 629358 - DNA, 15 bp, Homo sapiens
caagcggaaactctc

SEQ ID NO: 629359 - DNA, 15 bp, Homo sapiens
aagcggaaactctcc

SEQ ID NO: 629360 - DNA, 15 bp, Homo sapiens
agcggaaactctcca

SEQ ID NO: 629361 - DNA, 15 bp, Homo sapiens
gcggaaactctccac

SEQ ID NO: 629362 - DNA, 15 bp, Homo sapiens
cggaaactctccaca

SEQ ID NO: 629363 - DNA, 15 bp, Homo sapiens
ggaaactctccacag

SEQ ID NO: 629364 - DNA, 15 bp, Homo sapiens
gaaactctccacagc

SEQ ID NO: 629365 - DNA, 15 bp, Homo sapiens
aaactctccacagcc

SEQ ID NO: 629366 - DNA, 15 bp, Homo sapiens
aactctccacagcca

SEQ ID NO: 629367 - DNA, 15 bp, Homo sapiens
actctccacagccat

SEQ ID NO: 629368 - DNA, 15 bp, Homo sapiens
ctctccacagccatc

SEQ ID NO: 629369 - DNA, 15 bp, Homo sapiens
tctccacagccatcg

SEQ ID NO: 629370 - DNA, 15 bp, Homo sapiens
ctccacagccatcgc

SEQ ID NO: 629371 - DNA, 15 bp, Homo sapiens
tccacagccatcgca

SEQ ID NO: 629372 - DNA, 15 bp, Homo sapiens
ccacagccatcgcac

SEQ ID NO: 629373 - DNA, 15 bp, Homo sapiens
cacagccatcgcact

SEQ ID NO: 629374 - DNA, 15 bp, Homo sapiens
acagccatcgcactc

SEQ ID NO: 629375 - DNA, 15 bp, Homo sapiens
cagccatcgcactca

SEQ ID NO: 629376 - DNA, 15 bp, Homo sapiens
agccatcgcactcat

SEQ ID NO: 629377 - DNA, 15 bp, Homo sapiens
gccatcgcactcatt

SEQ ID NO: 629378 - DNA, 15 bp, Homo sapiens
ccatcgcactcattg

SEQ ID NO: 629379 - DNA, 15 bp, Homo sapiens
catcgcactcattgg

SEQ ID NO: 629380 - DNA, 15 bp, Homo sapiens
atcgcactcattggc

SEQ ID NO: 629381 - DNA, 15 bp, Homo sapiens
tcgcactcattggct

SEQ ID NO: 629382 - DNA, 15 bp, Homo sapiens
cgcactcattggctg

SEQ ID NO: 629383 - DNA, 15 bp, Homo sapiens
gcactcattggctgc

SEQ ID NO: 629384 - DNA, 15 bp, Homo sapiens
cactcattggctgcc

SEQ ID NO: 629385 - DNA, 15 bp, Homo sapiens
actcattggctgccc

SEQ ID NO: 629386 - DNA, 15 bp, Homo sapiens
ctcattggctgccca

SEQ ID NO: 629387 - DNA, 15 bp, Homo sapiens
tcattggctgcccac

SEQ ID NO: 629388 - DNA, 15 bp, Homo sapiens
cattggctgcccacc

SEQ ID NO: 629389 - DNA, 15 bp, Homo sapiens
attggctgcccaccg

SEQ ID NO: 629390 - DNA, 15 bp, Homo sapiens
ttggctgcccaccgc

SEQ ID NO: 629391 - DNA, 15 bp, Homo sapiens
tggctgcccaccgct

SEQ ID NO: 629392 - DNA, 15 bp, Homo sapiens
ggctgcccaccgctg

SEQ ID NO: 629393 - DNA, 15 bp, Homo sapiens
gctgcccaccgctgg

SEQ ID NO: 629394 - DNA, 15 bp, Homo sapiens
ctgcccaccgctggt

SEQ ID NO: 629395 - DNA, 15 bp, Homo sapiens
tgcccaccgctggtg

SEQ ID NO: 629396 - DNA, 15 bp, Homo sapiens
gcccaccgctggtgc

SEQ ID NO: 629397 - DNA, 15 bp, Homo sapiens
cccaccgctggtgct

SEQ ID NO: 629398 - DNA, 15 bp, Homo sapiens
ccaccgctggtgctg

SEQ ID NO: 629399 - DNA, 15 bp, Homo sapiens
caccgctggtgctgc

SEQ ID NO: 629400 - DNA, 15 bp, Homo sapiens
accgctggtgctgct

SEQ ID NO: 629401 - DNA, 15 bp, Homo sapiens
ccgctggtgctgctg

SEQ ID NO: 629402 - DNA, 15 bp, Homo sapiens
cgctggtgctgctgg

SEQ ID NO: 629403 - DNA, 15 bp, Homo sapiens
gctggtgctgctggt

SEQ ID NO: 629404 - DNA, 15 bp, Homo sapiens
ctggtgctgctggta

SEQ ID NO: 629405 - DNA, 15 bp, Homo sapiens
tggtgctgctggtaa

SEQ ID NO: 629406 - DNA, 15 bp, Homo sapiens
ggtgctgctggtaac

SEQ ID NO: 629407 - DNA, 15 bp, Homo sapiens
gtgctgctggtaact

SEQ ID NO: 629408 - DNA, 15 bp, Homo sapiens
tgctgctggtaactg

SEQ ID NO: 629409 - DNA, 15 bp, Homo sapiens
gctgctggtaactgc

SEQ ID NO: 629410 - DNA, 15 bp, Homo sapiens
ctgctggtaactgcg

SEQ ID NO: 629411 - DNA, 15 bp, Homo sapiens
tgctggtaactgcgg

SEQ ID NO: 629412 - DNA, 15 bp, Homo sapiens
gctggtaactgcggg

SEQ ID NO: 629413 - DNA, 15 bp, Homo sapiens
ctggtaactgcgggc

SEQ ID NO: 629414 - DNA, 15 bp, Homo sapiens
tggtaactgcgggct

SEQ ID NO: 629415 - DNA, 15 bp, Homo sapiens
ggtaactgcgggctt

SEQ ID NO: 629416 - DNA, 15 bp, Homo sapiens
gtaactgcgggcttg

SEQ ID NO: 629417 - DNA, 15 bp, Homo sapiens
taactgcgggcttgg

SEQ ID NO: 629418 - DNA, 15 bp, Homo sapiens
aactgcgggcttggg

SEQ ID NO: 629419 - DNA, 15 bp, Homo sapiens
actgcgggcttgggc

SEQ ID NO: 629420 - DNA, 15 bp, Homo sapiens
ctgcgggcttgggcc

SEQ ID NO: 629421 - DNA, 15 bp, Homo sapiens
tgcgggcttgggccg

SEQ ID NO: 629422 - DNA, 15 bp, Homo sapiens
gcgggcttgggccgc

SEQ ID NO: 629423 - DNA, 15 bp, Homo sapiens
cgggcttgggccgca

SEQ ID NO: 629424 - DNA, 15 bp, Homo sapiens
gggcttgggccgcac

SEQ ID NO: 629425 - DNA, 15 bp, Homo sapiens
ggcttgggccgcacc

SEQ ID NO: 629426 - DNA, 15 bp, Homo sapiens
gcttgggccgcacca

SEQ ID NO: 629427 - DNA, 15 bp, Homo sapiens
cttgggccgcaccaa

SEQ ID NO: 629428 - DNA, 15 bp, Homo sapiens
ttgggccgcaccaag

SEQ ID NO: 629429 - DNA, 15 bp, Homo sapiens
tgggccgcaccaagg

SEQ ID NO: 629430 - DNA, 15 bp, Homo sapiens
gggccgcaccaaggg

SEQ ID NO: 629431 - DNA, 15 bp, Homo sapiens
ggccgcaccaagggc

SEQ ID NO: 629432 - DNA, 15 bp, Homo sapiens
gccgcaccaagggct

SEQ ID NO: 629433 - DNA, 15 bp, Homo sapiens
ccgcaccaagggctt

SEQ ID NO: 629434 - DNA, 15 bp, Homo sapiens
cgcaccaagggctta

SEQ ID NO: 629435 - DNA, 15 bp, Homo sapiens
gcaccaagggcttaa

SEQ ID NO: 629436 - DNA, 15 bp, Homo sapiens
caccaagggcttaaa

SEQ ID NO: 629437 - DNA, 15 bp, Homo sapiens
accaagggcttaaac

SEQ ID NO: 629438 - DNA, 15 bp, Homo sapiens
ccaagggcttaaacc

SEQ ID NO: 629439 - DNA, 15 bp, Homo sapiens
caagggcttaaacca

SEQ ID NO: 629440 - DNA, 15 bp, Homo sapiens
aagggcttaaaccaa

SEQ ID NO: 629441 - DNA, 15 bp, Homo sapiens
agggcttaaaccaag

SEQ ID NO: 629442 - DNA, 15 bp, Homo sapiens
gggcttaaaccaagt

SEQ ID NO: 629443 - DNA, 15 bp, Homo sapiens
ggcttaaaccaagtg

SEQ ID NO: 629444 - DNA, 15 bp, Homo sapiens
gcttaaaccaagtgc

SEQ ID NO: 629445 - DNA, 15 bp, Homo sapiens
cttaaaccaagtgct

SEQ ID NO: 629446 - DNA, 15 bp, Homo sapiens
ttaaaccaagtgctg

SEQ ID NO: 629447 - DNA, 15 bp, Homo sapiens
taaaccaagtgctgg

SEQ ID NO: 629448 - DNA, 15 bp, Homo sapiens
aaaccaagtgctggg

SEQ ID NO: 629449 - DNA, 15 bp, Homo sapiens
aaccaagtgctgggt

SEQ ID NO: 629450 - DNA, 15 bp, Homo sapiens
accaagtgctgggtc

SEQ ID NO: 629451 - DNA, 15 bp, Homo sapiens
ccaagtgctgggtct

SEQ ID NO: 629452 - DNA, 15 bp, Homo sapiens
caagtgctgggtctc

SEQ ID NO: 629453 - DNA, 15 bp, Homo sapiens
aagtgctgggtctct

SEQ ID NO: 629454 - DNA, 15 bp, Homo sapiens
agtgctgggtctctt

SEQ ID NO: 629455 - DNA, 15 bp, Homo sapiens
gtgctgggtctcttg

SEQ ID NO: 629456 - DNA, 15 bp, Homo sapiens
tgctgggtctcttgg

SEQ ID NO: 629457 - DNA, 15 bp, Homo sapiens
gctgggtctcttggg

SEQ ID NO: 629458 - DNA, 15 bp, Homo sapiens
ctgggtctcttgggt

SEQ ID NO: 629459 - DNA, 15 bp, Homo sapiens
tgggtctcttgggtt

SEQ ID NO: 629460 - DNA, 15 bp, Homo sapiens
gggtctcttgggttg

SEQ ID NO: 629461 - DNA, 15 bp, Homo sapiens
ggtctcttgggttgg

SEQ ID NO: 629462 - DNA, 15 bp, Homo sapiens
gtctcttgggttggg

SEQ ID NO: 629463 - DNA, 15 bp, Homo sapiens
tctcttgggttgggg

SEQ ID NO: 629464 - DNA, 15 bp, Homo sapiens
ctcttgggttgggga

SEQ ID NO: 629465 - DNA, 15 bp, Homo sapiens
tcttgggttggggaa

SEQ ID NO: 629466 - DNA, 15 bp, Homo sapiens
cttgggttggggaaa

SEQ ID NO: 629467 - DNA, 15 bp, Homo sapiens
ttgggttggggaaat

SEQ ID NO: 629468 - DNA, 15 bp, Homo sapiens
tgggttggggaaata

SEQ ID NO: 629469 - DNA, 15 bp, Homo sapiens
gggttggggaaatag

SEQ ID NO: 629470 - DNA, 15 bp, Homo sapiens
ggttggggaaatagg

SEQ ID NO: 629471 - DNA, 15 bp, Homo sapiens
gttggggaaataggt

SEQ ID NO: 629472 - DNA, 15 bp, Homo sapiens
ttggggaaataggtt

SEQ ID NO: 629473 - DNA, 15 bp, Homo sapiens
tggggaaataggttc

SEQ ID NO: 629474 - DNA, 15 bp, Homo sapiens
ggggaaataggttct

SEQ ID NO: 629475 - DNA, 15 bp, Homo sapiens
gggaaataggttctg

SEQ ID NO: 629476 - DNA, 15 bp, Homo sapiens
ggaaataggttctgg

SEQ ID NO: 629477 - DNA, 15 bp, Homo sapiens
gaaataggttctggg

SEQ ID NO: 629478 - DNA, 15 bp, Homo sapiens
aaataggttctgggt

SEQ ID NO: 629479 - DNA, 15 bp, Homo sapiens
aataggttctgggtc

SEQ ID NO: 629480 - DNA, 15 bp, Homo sapiens
ataggttctgggtcg

SEQ ID NO: 629481 - DNA, 15 bp, Homo sapiens
taggttctgggtcgg

SEQ ID NO: 629482 - DNA, 15 bp, Homo sapiens
aggttctgggtcggc

SEQ ID NO: 629483 - DNA, 15 bp, Homo sapiens
ggttctgggtcggca

SEQ ID NO: 629484 - DNA, 15 bp, Homo sapiens
gttctgggtcggcag

SEQ ID NO: 629485 - DNA, 15 bp, Homo sapiens
ttctgggtcggcaga

SEQ ID NO: 629486 - DNA, 15 bp, Homo sapiens
tctgggtcggcagat

SEQ ID NO: 629487 - DNA, 15 bp, Homo sapiens
ctgggtcggcagatt

SEQ ID NO: 629488 - DNA, 15 bp, Homo sapiens
tgggtcggcagattt

SEQ ID NO: 629489 - DNA, 15 bp, Homo sapiens
gggtcggcagattta

SEQ ID NO: 629490 - DNA, 15 bp, Homo sapiens
ggtcggcagatttag

SEQ ID NO: 629491 - DNA, 15 bp, Homo sapiens
gtcggcagatttaga

SEQ ID NO: 629492 - DNA, 15 bp, Homo sapiens
tcggcagatttagaa

SEQ ID NO: 629493 - DNA, 15 bp, Homo sapiens
cggcagatttagaaa

SEQ ID NO: 629494 - DNA, 15 bp, Homo sapiens
ggcagatttagaaac

SEQ ID NO: 629495 - DNA, 15 bp, Homo sapiens
gcagatttagaaact

SEQ ID NO: 629496 - DNA, 15 bp, Homo sapiens
cagatttagaaactg

SEQ ID NO: 629497 - DNA, 15 bp, Homo sapiens
agatttagaaactgc

SEQ ID NO: 629498 - DNA, 15 bp, Homo sapiens
gatttagaaactgca

SEQ ID NO: 629499 - DNA, 15 bp, Homo sapiens
atttagaaactgcag

SEQ ID NO: 629500 - DNA, 15 bp, Homo sapiens
tttagaaactgcagc

SEQ ID NO: 629501 - DNA, 15 bp, Homo sapiens
ttagaaactgcagca

SEQ ID NO: 629502 - DNA, 15 bp, Homo sapiens
tagaaactgcagcag

SEQ ID NO: 629503 - DNA, 15 bp, Homo sapiens
agaaactgcagcagt

SEQ ID NO: 629504 - DNA, 15 bp, Homo sapiens
gaaactgcagcagtt

SEQ ID NO: 629505 - DNA, 15 bp, Homo sapiens
aaactgcagcagttt

SEQ ID NO: 629506 - DNA, 15 bp, Homo sapiens
aactgcagcagtttg

SEQ ID NO: 629507 - DNA, 15 bp, Homo sapiens
actgcagcagtttgg

SEQ ID NO: 629508 - DNA, 15 bp, Homo sapiens
ctgcagcagtttggc

SEQ ID NO: 629509 - DNA, 15 bp, Homo sapiens
tgcagcagtttggct

SEQ ID NO: 629510 - DNA, 15 bp, Homo sapiens
gcagcagtttggctt

SEQ ID NO: 629511 - DNA, 15 bp, Homo sapiens
cagcagtttggcttt

SEQ ID NO: 629512 - DNA, 15 bp, Homo sapiens
agcagtttggcttta

SEQ ID NO: 629513 - DNA, 15 bp, Homo sapiens
gcagtttggctttag

SEQ ID NO: 629514 - DNA, 15 bp, Homo sapiens
cagtttggctttagt

SEQ ID NO: 629515 - DNA, 15 bp, Homo sapiens
agtttggctttagtc

SEQ ID NO: 629516 - DNA, 15 bp, Homo sapiens
gtttggctttagtct

SEQ ID NO: 629517 - DNA, 15 bp, Homo sapiens
tttggctttagtctg

SEQ ID NO: 629518 - DNA, 15 bp, Homo sapiens
ttggctttagtctgg

SEQ ID NO: 629519 - DNA, 15 bp, Homo sapiens
tggctttagtctgga

SEQ ID NO: 629520 - DNA, 15 bp, Homo sapiens
ggctttagtctggac

SEQ ID NO: 629521 - DNA, 15 bp, Homo sapiens
gctttagtctggact

SEQ ID NO: 629522 - DNA, 15 bp, Homo sapiens
ctttagtctggactg

SEQ ID NO: 629523 - DNA, 15 bp, Homo sapiens
tttagtctggactgt

SEQ ID NO: 629524 - DNA, 15 bp, Homo sapiens
ttagtctggactgtt

SEQ ID NO: 629525 - DNA, 15 bp, Homo sapiens
tagtctggactgttt

SEQ ID NO: 629526 - DNA, 15 bp, Homo sapiens
agtctggactgtttc

SEQ ID NO: 629527 - DNA, 15 bp, Homo sapiens
gtctggactgtttcc

SEQ ID NO: 629528 - DNA, 15 bp, Homo sapiens
tctggactgtttcct

SEQ ID NO: 629529 - DNA, 15 bp, Homo sapiens
ctggactgtttcctg

SEQ ID NO: 629530 - DNA, 15 bp, Homo sapiens
tggactgtttcctgt

SEQ ID NO: 629531 - DNA, 15 bp, Homo sapiens
ggactgtttcctgtg

SEQ ID NO: 629532 - DNA, 15 bp, Homo sapiens
gactgtttcctgtgt

SEQ ID NO: 629533 - DNA, 15 bp, Homo sapiens
actgtttcctgtgtt

SEQ ID NO: 629534 - DNA, 15 bp, Homo sapiens
ctgtttcctgtgttg

SEQ ID NO: 629535 - DNA, 15 bp, Homo sapiens
tgtttcctgtgttgc

SEQ ID NO: 629536 - DNA, 15 bp, Homo sapiens
gtttcctgtgttgct

SEQ ID NO: 629537 - DNA, 15 bp, Homo sapiens
tttcctgtgttgctc

SEQ ID NO: 629538 - DNA, 15 bp, Homo sapiens
ttcctgtgttgctca

SEQ ID NO: 629539 - DNA, 15 bp, Homo sapiens
tcctgtgttgctcat

SEQ ID NO: 629540 - DNA, 15 bp, Homo sapiens
cctgtgttgctcatt

SEQ ID NO: 629541 - DNA, 15 bp, Homo sapiens
ctgtgttgctcattt

SEQ ID NO: 629542 - DNA, 15 bp, Homo sapiens
tgtgttgctcatttt

SEQ ID NO: 629543 - DNA, 15 bp, Homo sapiens
gtgttgctcattttg

SEQ ID NO: 629544 - DNA, 15 bp, Homo sapiens
tgttgctcattttga

SEQ ID NO: 629545 - DNA, 15 bp, Homo sapiens
gttgctcattttgag

SEQ ID NO: 629546 - DNA, 15 bp, Homo sapiens
ttgctcattttgagc

SEQ ID NO: 629547 - DNA, 15 bp, Homo sapiens
tgctcattttgagcg

SEQ ID NO: 629548 - DNA, 15 bp, Homo sapiens
gctcattttgagcga

SEQ ID NO: 629549 - DNA, 15 bp, Homo sapiens
ctcattttgagcgat

SEQ ID NO: 629550 - DNA, 15 bp, Homo sapiens
tcattttgagcgatc

SEQ ID NO: 629551 - DNA, 15 bp, Homo sapiens
cattttgagcgatca

SEQ ID NO: 629552 - DNA, 15 bp, Homo sapiens
attttgagcgatcag

SEQ ID NO: 629553 - DNA, 15 bp, Homo sapiens
ttttgagcgatcagc

SEQ ID NO: 629554 - DNA, 15 bp, Homo sapiens
tttgagcgatcagcc

SEQ ID NO: 629555 - DNA, 15 bp, Homo sapiens
ttgagcgatcagccc

SEQ ID NO: 629556 - DNA, 15 bp, Homo sapiens
tgagcgatcagccca

SEQ ID NO: 629557 - DNA, 15 bp, Homo sapiens
gagcgatcagcccag

SEQ ID NO: 629558 - DNA, 15 bp, Homo sapiens
agcgatcagcccagt

SEQ ID NO: 629559 - DNA, 15 bp, Homo sapiens
gcgatcagcccagtg

SEQ ID NO: 629560 - DNA, 15 bp, Homo sapiens
cgatcagcccagtgt

SEQ ID NO: 629561 - DNA, 15 bp, Homo sapiens
gatcagcccagtgtt

SEQ ID NO: 629562 - DNA, 15 bp, Homo sapiens
atcagcccagtgttt

SEQ ID NO: 629563 - DNA, 15 bp, Homo sapiens
tcagcccagtgtttg

SEQ ID NO: 629564 - DNA, 15 bp, Homo sapiens
cagcccagtgtttgg

SEQ ID NO: 629565 - DNA, 15 bp, Homo sapiens
agcccagtgtttggt

SEQ ID NO: 629566 - DNA, 15 bp, Homo sapiens
gcccagtgtttggtt

SEQ ID NO: 629567 - DNA, 15 bp, Homo sapiens
cccagtgtttggttc

SEQ ID NO: 629568 - DNA, 15 bp, Homo sapiens
ccagtgtttggttca

SEQ ID NO: 629569 - DNA, 15 bp, Homo sapiens
cagtgtttggttcac

SEQ ID NO: 629570 - DNA, 15 bp, Homo sapiens
agtgtttggttcaca

SEQ ID NO: 629571 - DNA, 15 bp, Homo sapiens
gtgtttggttcacac

SEQ ID NO: 629572 - DNA, 15 bp, Homo sapiens
tgtttggttcacaca

SEQ ID NO: 629573 - DNA, 15 bp, Homo sapiens
gtttggttcacacag

SEQ ID NO: 629574 - DNA, 15 bp, Homo sapiens
tttggttcacacagc

SEQ ID NO: 629575 - DNA, 15 bp, Homo sapiens
ttggttcacacagct

SEQ ID NO: 629576 - DNA, 15 bp, Homo sapiens
tggttcacacagctc

SEQ ID NO: 629577 - DNA, 15 bp, Homo sapiens
ggttcacacagctcc

SEQ ID NO: 629578 - DNA, 15 bp, Homo sapiens
gttcacacagctccg

SEQ ID NO: 629579 - DNA, 15 bp, Homo sapiens
ttcacacagctccgg

SEQ ID NO: 629580 - DNA, 15 bp, Homo sapiens
tcacacagctccgga

SEQ ID NO: 629581 - DNA, 15 bp, Homo sapiens
cacacagctccggag

SEQ ID NO: 629582 - DNA, 15 bp, Homo sapiens
acacagctccggaga

SEQ ID NO: 629583 - DNA, 15 bp, Homo sapiens
cacagctccggagaa

SEQ ID NO: 629584 - DNA, 15 bp, Homo sapiens
acagctccggagaaa

SEQ ID NO: 629585 - DNA, 15 bp, Homo sapiens
cagctccggagaaaa

SEQ ID NO: 629586 - DNA, 15 bp, Homo sapiens
agctccggagaaaaa

SEQ ID NO: 629587 - DNA, 15 bp, Homo sapiens
gctccggagaaaaac

SEQ ID NO: 629588 - DNA, 15 bp, Homo sapiens
ctccggagaaaaaca

SEQ ID NO: 629589 - DNA, 15 bp, Homo sapiens
tccggagaaaaacaa

SEQ ID NO: 629590 - DNA, 15 bp, Homo sapiens
ccggagaaaaacaag

SEQ ID NO: 629591 - DNA, 15 bp, Homo sapiens
cggagaaaaacaagt

SEQ ID NO: 629592 - DNA, 15 bp, Homo sapiens
ggagaaaaacaagtc

SEQ ID NO: 629593 - DNA, 15 bp, Homo sapiens
gagaaaaacaagtca

SEQ ID NO: 629594 - DNA, 15 bp, Homo sapiens
agaaaaacaagtcac

SEQ ID NO: 629595 - DNA, 15 bp, Homo sapiens
gaaaaacaagtcacg

SEQ ID NO: 629596 - DNA, 15 bp, Homo sapiens
aaaaacaagtcacgg

SEQ ID NO: 629597 - DNA, 15 bp, Homo sapiens
aaaacaagtcacggc

SEQ ID NO: 629598 - DNA, 15 bp, Homo sapiens
aaacaagtcacggca

SEQ ID NO: 629599 - DNA, 15 bp, Homo sapiens
aacaagtcacggcac

SEQ ID NO: 629600 - DNA, 15 bp, Homo sapiens
acaagtcacggcaca

SEQ ID NO: 629601 - DNA, 15 bp, Homo sapiens
caagtcacggcacag

SEQ ID NO: 629602 - DNA, 15 bp, Homo sapiens
aagtcacggcacagc

SEQ ID NO: 629603 - DNA, 15 bp, Homo sapiens
agtcacggcacagcc

SEQ ID NO: 629604 - DNA, 15 bp, Homo sapiens
gtcacggcacagcct

SEQ ID NO: 629605 - DNA, 15 bp, Homo sapiens
tcacggcacagcctt

SEQ ID NO: 629606 - DNA, 15 bp, Homo sapiens
cacggcacagccttg

SEQ ID NO: 629607 - DNA, 15 bp, Homo sapiens
acggcacagccttga

SEQ ID NO: 629608 - DNA, 15 bp, Homo sapiens
cggcacagccttgac

SEQ ID NO: 629609 - DNA, 15 bp, Homo sapiens
ggcacagccttgact

SEQ ID NO: 629610 - DNA, 15 bp, Homo sapiens
gcacagccttgactt

SEQ ID NO: 629611 - DNA, 15 bp, Homo sapiens
cacagccttgacttg

SEQ ID NO: 629612 - DNA, 15 bp, Homo sapiens
acagccttgacttgg

SEQ ID NO: 629613 - DNA, 15 bp, Homo sapiens
cagccttgacttggg

SEQ ID NO: 629614 - DNA, 15 bp, Homo sapiens
agccttgacttggga

SEQ ID NO: 629615 - DNA, 15 bp, Homo sapiens
gccttgacttgggac

SEQ ID NO: 629616 - DNA, 15 bp, Homo sapiens
ccttgacttgggact

SEQ ID NO: 629617 - DNA, 15 bp, Homo sapiens
cttgacttgggactg

SEQ ID NO: 629618 - DNA, 15 bp, Homo sapiens
ttgacttgggactgc

SEQ ID NO: 629619 - DNA, 15 bp, Homo sapiens
tgacttgggactgcg

SEQ ID NO: 629620 - DNA, 15 bp, Homo sapiens
gacttgggactgcgc

SEQ ID NO: 629621 - DNA, 15 bp, Homo sapiens
acttgggactgcgca

SEQ ID NO: 629622 - DNA, 15 bp, Homo sapiens
cttgggactgcgcac

SEQ ID NO: 629623 - DNA, 15 bp, Homo sapiens
ttgggactgcgcaca

SEQ ID NO: 629624 - DNA, 15 bp, Homo sapiens
tgggactgcgcacat

SEQ ID NO: 629625 - DNA, 15 bp, Homo sapiens
gggactgcgcacatc

SEQ ID NO: 629626 - DNA, 15 bp, Homo sapiens
ggactgcgcacatcc

SEQ ID NO: 629627 - DNA, 15 bp, Homo sapiens
gactgcgcacatcct

SEQ ID NO: 629628 - DNA, 15 bp, Homo sapiens
actgcgcacatcctg

SEQ ID NO: 629629 - DNA, 15 bp, Homo sapiens
ctgcgcacatcctgc

SEQ ID NO: 629630 - DNA, 15 bp, Homo sapiens
tgcgcacatcctgcg

SEQ ID NO: 629631 - DNA, 15 bp, Homo sapiens
gcgcacatcctgcgt

SEQ ID NO: 629632 - DNA, 15 bp, Homo sapiens
cgcacatcctgcgtt

SEQ ID NO: 629633 - DNA, 15 bp, Homo sapiens
gcacatcctgcgttc

SEQ ID NO: 629634 - DNA, 15 bp, Homo sapiens
cacatcctgcgttcc

SEQ ID NO: 629635 - DNA, 15 bp, Homo sapiens
acatcctgcgttccc

SEQ ID NO: 629636 - DNA, 15 bp, Homo sapiens
catcctgcgttccca

SEQ ID NO: 629637 - DNA, 15 bp, Homo sapiens
atcctgcgttcccag

SEQ ID NO: 629638 - DNA, 15 bp, Homo sapiens
tcctgcgttcccagg

SEQ ID NO: 629639 - DNA, 15 bp, Homo sapiens
cctgcgttcccagga

SEQ ID NO: 629640 - DNA, 15 bp, Homo sapiens
ctgcgttcccaggat

SEQ ID NO: 629641 - DNA, 15 bp, Homo sapiens
tgcgttcccaggatg

SEQ ID NO: 629642 - DNA, 15 bp, Homo sapiens
gcgttcccaggatgt

SEQ ID NO: 629643 - DNA, 15 bp, Homo sapiens
cgttcccaggatgtc

SEQ ID NO: 629644 - DNA, 15 bp, Homo sapiens
gttcccaggatgtct

SEQ ID NO: 629645 - DNA, 15 bp, Homo sapiens
ttcccaggatgtctc

SEQ ID NO: 629646 - DNA, 15 bp, Homo sapiens
tcccaggatgtctcc

SEQ ID NO: 629647 - DNA, 15 bp, Homo sapiens
cccaggatgtctcct

SEQ ID NO: 629648 - DNA, 15 bp, Homo sapiens
ccaggatgtctcctg

SEQ ID NO: 629649 - DNA, 15 bp, Homo sapiens
caggatgtctcctgt

SEQ ID NO: 629650 - DNA, 15 bp, Homo sapiens
aggatgtctcctgtg

SEQ ID NO: 629651 - DNA, 15 bp, Homo sapiens
ggatgtctcctgtgg

SEQ ID NO: 629652 - DNA, 15 bp, Homo sapiens
gatgtctcctgtggg

SEQ ID NO: 629653 - DNA, 15 bp, Homo sapiens
atgtctcctgtgggg

SEQ ID NO: 629654 - DNA, 15 bp, Homo sapiens
tgtctcctgtggggc

SEQ ID NO: 629655 - DNA, 15 bp, Homo sapiens
gtctcctgtggggcc

SEQ ID NO: 629656 - DNA, 15 bp, Homo sapiens
tctcctgtggggcca

SEQ ID NO: 629657 - DNA, 15 bp, Homo sapiens
ctcctgtggggccat

SEQ ID NO: 629658 - DNA, 15 bp, Homo sapiens
tcctgtggggccatc

SEQ ID NO: 629659 - DNA, 15 bp, Homo sapiens
cctgtggggccatcg

SEQ ID NO: 629660 - DNA, 15 bp, Homo sapiens
ctgtggggccatcgg

SEQ ID NO: 629661 - DNA, 15 bp, Homo sapiens
tgtggggccatcggc

SEQ ID NO: 629662 - DNA, 15 bp, Homo sapiens
gtggggccatcggct

SEQ ID NO: 629663 - DNA, 15 bp, Homo sapiens
tggggccatcggctc

SEQ ID NO: 629664 - DNA, 15 bp, Homo sapiens
ggggccatcggctca

SEQ ID NO: 629665 - DNA, 15 bp, Homo sapiens
gggccatcggctcac

SEQ ID NO: 629666 - DNA, 15 bp, Homo sapiens
ggccatcggctcaca

SEQ ID NO: 629667 - DNA, 15 bp, Homo sapiens
gccatcggctcacag

SEQ ID NO: 629668 - DNA, 15 bp, Homo sapiens
ccatcggctcacagc

SEQ ID NO: 629669 - DNA, 15 bp, Homo sapiens
catcggctcacagcc

SEQ ID NO: 629670 - DNA, 15 bp, Homo sapiens
atcggctcacagccg

SEQ ID NO: 629671 - DNA, 15 bp, Homo sapiens
tcggctcacagccgg

SEQ ID NO: 629672 - DNA, 15 bp, Homo sapiens
cggctcacagccggg

SEQ ID NO: 629673 - DNA, 15 bp, Homo sapiens
ggctcacagccggga

SEQ ID NO: 629674 - DNA, 15 bp, Homo sapiens
gctcacagccgggaa

SEQ ID NO: 629675 - DNA, 15 bp, Homo sapiens
ctcacagccgggaag

SEQ ID NO: 629676 - DNA, 15 bp, Homo sapiens
tcacagccgggaagt

SEQ ID NO: 629677 - DNA, 15 bp, Homo sapiens
cacagccgggaagtt

SEQ ID NO: 629678 - DNA, 15 bp, Homo sapiens
acagccgggaagttc

SEQ ID NO: 629679 - DNA, 15 bp, Homo sapiens
cagccgggaagttca

SEQ ID NO: 629680 - DNA, 15 bp, Homo sapiens
agccgggaagttcag

SEQ ID NO: 629681 - DNA, 15 bp, Homo sapiens
gccgggaagttcagc

SEQ ID NO: 629682 - DNA, 15 bp, Homo sapiens
ccgggaagttcagcc

SEQ ID NO: 629683 - DNA, 15 bp, Homo sapiens
cgggaagttcagccc

SEQ ID NO: 629684 - DNA, 15 bp, Homo sapiens
gggaagttcagccca

SEQ ID NO: 629685 - DNA, 15 bp, Homo sapiens
ggaagttcagcccac

SEQ ID NO: 629686 - DNA, 15 bp, Homo sapiens
gaagttcagcccact

SEQ ID NO: 629687 - DNA, 15 bp, Homo sapiens
aagttcagcccactc

SEQ ID NO: 629688 - DNA, 15 bp, Homo sapiens
agttcagcccactct

SEQ ID NO: 629689 - DNA, 15 bp, Homo sapiens
gttcagcccactctg

SEQ ID NO: 629690 - DNA, 15 bp, Homo sapiens
ttcagcccactctgc

SEQ ID NO: 629691 - DNA, 15 bp, Homo sapiens
tcagcccactctgcg

SEQ ID NO: 629692 - DNA, 15 bp, Homo sapiens
cagcccactctgcgg

SEQ ID NO: 629693 - DNA, 15 bp, Homo sapiens
agcccactctgcggc

SEQ ID NO: 629694 - DNA, 15 bp, Homo sapiens
gcccactctgcggcc

SEQ ID NO: 629695 - DNA, 15 bp, Homo sapiens
cccactctgcggcct

SEQ ID NO: 629696 - DNA, 15 bp, Homo sapiens
ccactctgcggcctg

SEQ ID NO: 629697 - DNA, 15 bp, Homo sapiens
cactctgcggcctgt

SEQ ID NO: 629698 - DNA, 15 bp, Homo sapiens
actctgcggcctgtc

SEQ ID NO: 629699 - DNA, 15 bp, Homo sapiens
ctctgcggcctgtcg

SEQ ID NO: 629700 - DNA, 15 bp, Homo sapiens
tctgcggcctgtcgg

SEQ ID NO: 629701 - DNA, 15 bp, Homo sapiens
ctgcggcctgtcggt

SEQ ID NO: 629702 - DNA, 15 bp, Homo sapiens
tgcggcctgtcggtg

SEQ ID NO: 629703 - DNA, 15 bp, Homo sapiens
gcggcctgtcggtgt

SEQ ID NO: 629704 - DNA, 15 bp, Homo sapiens
cggcctgtcggtgtc

SEQ ID NO: 629705 - DNA, 15 bp, Homo sapiens
ggcctgtcggtgtct

SEQ ID NO: 629706 - DNA, 15 bp, Homo sapiens
gcctgtcggtgtctg

SEQ ID NO: 629707 - DNA, 15 bp, Homo sapiens
cctgtcggtgtctgg

SEQ ID NO: 629708 - DNA, 15 bp, Homo sapiens
ctgtcggtgtctggt

SEQ ID NO: 629709 - DNA, 15 bp, Homo sapiens
tgtcggtgtctggtc

SEQ ID NO: 629710 - DNA, 15 bp, Homo sapiens
gtcggtgtctggtcc

SEQ ID NO: 629711 - DNA, 15 bp, Homo sapiens
tcggtgtctggtccc

SEQ ID NO: 629712 - DNA, 15 bp, Homo sapiens
cggtgtctggtcccc

SEQ ID NO: 629713 - DNA, 15 bp, Homo sapiens
ggtgtctggtcccca

SEQ ID NO: 629714 - DNA, 15 bp, Homo sapiens
gtgtctggtccccat

SEQ ID NO: 629715 - DNA, 15 bp, Homo sapiens
tgtctggtccccata

SEQ ID NO: 629716 - DNA, 15 bp, Homo sapiens
gtctggtccccatac

SEQ ID NO: 629717 - DNA, 15 bp, Homo sapiens
tctggtccccataca

SEQ ID NO: 629718 - DNA, 15 bp, Homo sapiens
ctggtccccatacag

SEQ ID NO: 629719 - DNA, 15 bp, Homo sapiens
tggtccccatacagg

SEQ ID NO: 629720 - DNA, 15 bp, Homo sapiens
ggtccccatacagga

SEQ ID NO: 629721 - DNA, 15 bp, Homo sapiens
gtccccatacaggag

SEQ ID NO: 629722 - DNA, 15 bp, Homo sapiens
tccccatacaggagc

SEQ ID NO: 629723 - DNA, 15 bp, Homo sapiens
ccccatacaggagca

SEQ ID NO: 629724 - DNA, 15 bp, Homo sapiens
cccatacaggagcac

SEQ ID NO: 629725 - DNA, 15 bp, Homo sapiens
ccatacaggagcact

SEQ ID NO: 629726 - DNA, 15 bp, Homo sapiens
catacaggagcactg

SEQ ID NO: 629727 - DNA, 15 bp, Homo sapiens
atacaggagcactga

SEQ ID NO: 629728 - DNA, 15 bp, Homo sapiens
tacaggagcactgag

SEQ ID NO: 629729 - DNA, 15 bp, Homo sapiens
acaggagcactgagc

SEQ ID NO: 629730 - DNA, 15 bp, Homo sapiens
caggagcactgagct

SEQ ID NO: 629731 - DNA, 15 bp, Homo sapiens
aggagcactgagctg

SEQ ID NO: 629732 - DNA, 15 bp, Homo sapiens
ggagcactgagctgg

SEQ ID NO: 629733 - DNA, 15 bp, Homo sapiens
gagcactgagctggg

SEQ ID NO: 629734 - DNA, 15 bp, Homo sapiens
agcactgagctgggt

SEQ ID NO: 629735 - DNA, 15 bp, Homo sapiens
gcactgagctgggtc

SEQ ID NO: 629736 - DNA, 15 bp, Homo sapiens
cactgagctgggtca

SEQ ID NO: 629737 - DNA, 15 bp, Homo sapiens
actgagctgggtcaa

SEQ ID NO: 629738 - DNA, 15 bp, Homo sapiens
ctgagctgggtcaaa

SEQ ID NO: 629739 - DNA, 15 bp, Homo sapiens
tgagctgggtcaaag

SEQ ID NO: 629740 - DNA, 15 bp, Homo sapiens
gagctgggtcaaagg

SEQ ID NO: 629741 - DNA, 15 bp, Homo sapiens
agctgggtcaaaggc

SEQ ID NO: 629742 - DNA, 15 bp, Homo sapiens
gctgggtcaaaggct

SEQ ID NO: 629743 - DNA, 15 bp, Homo sapiens
ctgggtcaaaggctc

SEQ ID NO: 629744 - DNA, 15 bp, Homo sapiens
tgggtcaaaggctcc

SEQ ID NO: 629745 - DNA, 15 bp, Homo sapiens
gggtcaaaggctcct

SEQ ID NO: 629746 - DNA, 15 bp, Homo sapiens
ggtcaaaggctcctg

SEQ ID NO: 629747 - DNA, 15 bp, Homo sapiens
gtcaaaggctcctga

SEQ ID NO: 629748 - DNA, 15 bp, Homo sapiens
tcaaaggctcctgag

SEQ ID NO: 629749 - DNA, 15 bp, Homo sapiens
caaaggctcctgagc

SEQ ID NO: 629750 - DNA, 15 bp, Homo sapiens
aaaggctcctgagct

SEQ ID NO: 629751 - DNA, 15 bp, Homo sapiens
aaggctcctgagctg

SEQ ID NO: 629752 - DNA, 15 bp, Homo sapiens
aggctcctgagctga

SEQ ID NO: 629753 - DNA, 15 bp, Homo sapiens
ggctcctgagctgag

SEQ ID NO: 629754 - DNA, 15 bp, Homo sapiens
gctcctgagctgagc

SEQ ID NO: 629755 - DNA, 15 bp, Homo sapiens
ctcctgagctgagcc

SEQ ID NO: 629756 - DNA, 15 bp, Homo sapiens
tcctgagctgagcca

SEQ ID NO: 629757 - DNA, 15 bp, Homo sapiens
cctgagctgagccag

SEQ ID NO: 629758 - DNA, 15 bp, Homo sapiens
ctgagctgagccagg

SEQ ID NO: 629759 - DNA, 15 bp, Homo sapiens
tgagctgagccaggc

SEQ ID NO: 629760 - DNA, 15 bp, Homo sapiens
gagctgagccaggcc

SEQ ID NO: 629761 - DNA, 15 bp, Homo sapiens
agctgagccaggcca

SEQ ID NO: 629762 - DNA, 15 bp, Homo sapiens
gctgagccaggccag

SEQ ID NO: 629763 - DNA, 15 bp, Homo sapiens
ctgagccaggccagg

SEQ ID NO: 629764 - DNA, 15 bp, Homo sapiens
tgagccaggccaggc

SEQ ID NO: 629765 - DNA, 15 bp, Homo sapiens
gagccaggccaggcc

SEQ ID NO: 629766 - DNA, 15 bp, Homo sapiens
agccaggccaggcct

SEQ ID NO: 629767 - DNA, 15 bp, Homo sapiens
gccaggccaggcctg

SEQ ID NO: 629768 - DNA, 15 bp, Homo sapiens
ccaggccaggcctga

SEQ ID NO: 629769 - DNA, 15 bp, Homo sapiens
caggccaggcctgag

SEQ ID NO: 629770 - DNA, 15 bp, Homo sapiens
aggccaggcctgagg

SEQ ID NO: 629771 - DNA, 15 bp, Homo sapiens
ggccaggcctgaggc

SEQ ID NO: 629772 - DNA, 15 bp, Homo sapiens
gccaggcctgaggcc

SEQ ID NO: 629773 - DNA, 15 bp, Homo sapiens
ccaggcctgaggcca

SEQ ID NO: 629774 - DNA, 15 bp, Homo sapiens
caggcctgaggccat

SEQ ID NO: 629775 - DNA, 15 bp, Homo sapiens
aggcctgaggccatg

SEQ ID NO: 629776 - DNA, 15 bp, Homo sapiens
ggcctgaggccatgc

SEQ ID NO: 629777 - DNA, 15 bp, Homo sapiens
gcctgaggccatgcc

SEQ ID NO: 629778 - DNA, 15 bp, Homo sapiens
cctgaggccatgccc

SEQ ID NO: 629779 - DNA, 15 bp, Homo sapiens
ctgaggccatgccca

SEQ ID NO: 629780 - DNA, 15 bp, Homo sapiens
tgaggccatgcccac

SEQ ID NO: 629781 - DNA, 15 bp, Homo sapiens
gaggccatgcccacg

SEQ ID NO: 629782 - DNA, 15 bp, Homo sapiens
aggccatgcccacgc

SEQ ID NO: 629783 - DNA, 15 bp, Homo sapiens
ggccatgcccacgca

SEQ ID NO: 629784 - DNA, 15 bp, Homo sapiens
gccatgcccacgcag

SEQ ID NO: 629785 - DNA, 15 bp, Homo sapiens
ccatgcccacgcagc

SEQ ID NO: 629786 - DNA, 15 bp, Homo sapiens
catgcccacgcagcc

SEQ ID NO: 629787 - DNA, 15 bp, Homo sapiens
atgcccacgcagccc

SEQ ID NO: 629788 - DNA, 15 bp, Homo sapiens
tgcccacgcagccca

SEQ ID NO: 629789 - DNA, 15 bp, Homo sapiens
gcccacgcagcccaa

SEQ ID NO: 629790 - DNA, 15 bp, Homo sapiens
cccacgcagcccaag

SEQ ID NO: 629791 - DNA, 15 bp, Homo sapiens
ccacgcagcccaagg

SEQ ID NO: 629792 - DNA, 15 bp, Homo sapiens
cacgcagcccaagga

SEQ ID NO: 629793 - DNA, 15 bp, Homo sapiens
acgcagcccaaggat

SEQ ID NO: 629794 - DNA, 15 bp, Homo sapiens
cgcagcccaaggatc

SEQ ID NO: 629795 - DNA, 15 bp, Homo sapiens
gcagcccaaggatca

SEQ ID NO: 629796 - DNA, 15 bp, Homo sapiens
cagcccaaggatcat

SEQ ID NO: 629797 - DNA, 15 bp, Homo sapiens
agcccaaggatcatg

SEQ ID NO: 629798 - DNA, 15 bp, Homo sapiens
gcccaaggatcatga

SEQ ID NO: 629799 - DNA, 15 bp, Homo sapiens
cccaaggatcatgag

SEQ ID NO: 629800 - DNA, 15 bp, Homo sapiens
ccaaggatcatgagg

SEQ ID NO: 629801 - DNA, 15 bp, Homo sapiens
caaggatcatgaggg

SEQ ID NO: 629802 - DNA, 15 bp, Homo sapiens
aaggatcatgagggc

SEQ ID NO: 629803 - DNA, 15 bp, Homo sapiens
aggatcatgagggca

SEQ ID NO: 629804 - DNA, 15 bp, Homo sapiens
ggatcatgagggcac

SEQ ID NO: 629805 - DNA, 15 bp, Homo sapiens
gatcatgagggcaca

SEQ ID NO: 629806 - DNA, 15 bp, Homo sapiens
atcatgagggcacag

SEQ ID NO: 629807 - DNA, 15 bp, Homo sapiens
tcatgagggcacagg

SEQ ID NO: 629808 - DNA, 15 bp, Homo sapiens
catgagggcacagga

SEQ ID NO: 629809 - DNA, 15 bp, Homo sapiens
atgagggcacaggac

SEQ ID NO: 629810 - DNA, 15 bp, Homo sapiens
tgagggcacaggaca

SEQ ID NO: 629811 - DNA, 15 bp, Homo sapiens
gagggcacaggacat

SEQ ID NO: 629812 - DNA, 15 bp, Homo sapiens
agggcacaggacata

SEQ ID NO: 629813 - DNA, 15 bp, Homo sapiens
gggcacaggacatag

SEQ ID NO: 629814 - DNA, 15 bp, Homo sapiens
ggcacaggacatagc

SEQ ID NO: 629815 - DNA, 15 bp, Homo sapiens
gcacaggacatagcg

SEQ ID NO: 629816 - DNA, 15 bp, Homo sapiens
cacaggacatagcgg

SEQ ID NO: 629817 - DNA, 15 bp, Homo sapiens
acaggacatagcggg

SEQ ID NO: 629818 - DNA, 15 bp, Homo sapiens
caggacatagcggga

SEQ ID NO: 629819 - DNA, 15 bp, Homo sapiens
aggacatagcgggaa

SEQ ID NO: 629820 - DNA, 15 bp, Homo sapiens
ggacatagcgggaac

SEQ ID NO: 629821 - DNA, 15 bp, Homo sapiens
gacatagcgggaacc

SEQ ID NO: 629822 - DNA, 15 bp, Homo sapiens
acatagcgggaacca

SEQ ID NO: 629823 - DNA, 15 bp, Homo sapiens
catagcgggaaccaa

SEQ ID NO: 629824 - DNA, 15 bp, Homo sapiens
atagcgggaaccaag

SEQ ID NO: 629825 - DNA, 15 bp, Homo sapiens
tagcgggaaccaagg

SEQ ID NO: 629826 - DNA, 15 bp, Homo sapiens
agcgggaaccaagga

SEQ ID NO: 629827 - DNA, 15 bp, Homo sapiens
gcgggaaccaaggaa

SEQ ID NO: 629828 - DNA, 15 bp, Homo sapiens
cgggaaccaaggaag

SEQ ID NO: 629829 - DNA, 15 bp, Homo sapiens
gggaaccaaggaagt

SEQ ID NO: 629830 - DNA, 15 bp, Homo sapiens
ggaaccaaggaagtg

SEQ ID NO: 629831 - DNA, 15 bp, Homo sapiens
gaaccaaggaagtga

SEQ ID NO: 629832 - DNA, 15 bp, Homo sapiens
aaccaaggaagtgac

SEQ ID NO: 629833 - DNA, 15 bp, Homo sapiens
accaaggaagtgacc

SEQ ID NO: 629834 - DNA, 15 bp, Homo sapiens
ccaaggaagtgacct

SEQ ID NO: 629835 - DNA, 15 bp, Homo sapiens
caaggaagtgacctg

SEQ ID NO: 629836 - DNA, 15 bp, Homo sapiens
aaggaagtgacctga

SEQ ID NO: 629837 - DNA, 15 bp, Homo sapiens
aggaagtgacctgag

SEQ ID NO: 629838 - DNA, 15 bp, Homo sapiens
ggaagtgacctgagt

SEQ ID NO: 629839 - DNA, 15 bp, Homo sapiens
gaagtgacctgagtg

SEQ ID NO: 629840 - DNA, 15 bp, Homo sapiens
aagtgacctgagtga

SEQ ID NO: 629841 - DNA, 15 bp, Homo sapiens
agtgacctgagtgac

SEQ ID NO: 629842 - DNA, 15 bp, Homo sapiens
gtgacctgagtgacc

SEQ ID NO: 629843 - DNA, 15 bp, Homo sapiens
tgacctgagtgacct

SEQ ID NO: 629844 - DNA, 15 bp, Homo sapiens
gacctgagtgacctc

SEQ ID NO: 629845 - DNA, 15 bp, Homo sapiens
acctgagtgacctcc

SEQ ID NO: 629846 - DNA, 15 bp, Homo sapiens
cctgagtgacctccc

SEQ ID NO: 629847 - DNA, 15 bp, Homo sapiens
ctgagtgacctccct

SEQ ID NO: 629848 - DNA, 15 bp, Homo sapiens
tgagtgacctccctg

SEQ ID NO: 629849 - DNA, 15 bp, Homo sapiens
gagtgacctccctgc

SEQ ID NO: 629850 - DNA, 15 bp, Homo sapiens
agtgacctccctgcc

SEQ ID NO: 629851 - DNA, 15 bp, Homo sapiens
gtgacctccctgcct

SEQ ID NO: 629852 - DNA, 15 bp, Homo sapiens
tgacctccctgcctt

SEQ ID NO: 629853 - DNA, 15 bp, Homo sapiens
gacctccctgccttc

SEQ ID NO: 629854 - DNA, 15 bp, Homo sapiens
acctccctgccttct

SEQ ID NO: 629855 - DNA, 15 bp, Homo sapiens
cctccctgccttctg

SEQ ID NO: 629856 - DNA, 15 bp, Homo sapiens
ctccctgccttctga

SEQ ID NO: 629857 - DNA, 15 bp, Homo sapiens
tccctgccttctgac

SEQ ID NO: 629858 - DNA, 15 bp, Homo sapiens
ccctgccttctgaca

SEQ ID NO: 629859 - DNA, 15 bp, Homo sapiens
cctgccttctgacaa

SEQ ID NO: 629860 - DNA, 15 bp, Homo sapiens
ctgccttctgacaaa

SEQ ID NO: 629861 - DNA, 15 bp, Homo sapiens
tgccttctgacaaat

SEQ ID NO: 629862 - DNA, 15 bp, Homo sapiens
gccttctgacaaatg

SEQ ID NO: 629863 - DNA, 15 bp, Homo sapiens
ccttctgacaaatgt

SEQ ID NO: 629864 - DNA, 15 bp, Homo sapiens
cttctgacaaatgta

SEQ ID NO: 629865 - DNA, 15 bp, Homo sapiens
ttctgacaaatgtat

SEQ ID NO: 629866 - DNA, 15 bp, Homo sapiens
tctgacaaatgtatt

SEQ ID NO: 629867 - DNA, 15 bp, Homo sapiens
ctgacaaatgtattt

SEQ ID NO: 629868 - DNA, 15 bp, Homo sapiens
tgacaaatgtatttg

SEQ ID NO: 629869 - DNA, 15 bp, Homo sapiens
gacaaatgtatttgc

SEQ ID NO: 629870 - DNA, 15 bp, Homo sapiens
acaaatgtatttgca

SEQ ID NO: 629871 - DNA, 15 bp, Homo sapiens
caaatgtatttgcag

SEQ ID NO: 629872 - DNA, 15 bp, Homo sapiens
aaatgtatttgcagg

SEQ ID NO: 629873 - DNA, 15 bp, Homo sapiens
aatgtatttgcagga

SEQ ID NO: 629874 - DNA, 15 bp, Homo sapiens
atgtatttgcaggat

SEQ ID NO: 629875 - DNA, 15 bp, Homo sapiens
tgtatttgcaggatt

SEQ ID NO: 629876 - DNA, 15 bp, Homo sapiens
gtatttgcaggattt

SEQ ID NO: 629877 - DNA, 15 bp, Homo sapiens
tatttgcaggatttt

SEQ ID NO: 629878 - DNA, 15 bp, Homo sapiens
atttgcaggattttc

SEQ ID NO: 629879 - DNA, 15 bp, Homo sapiens
tttgcaggattttct

SEQ ID NO: 629880 - DNA, 15 bp, Homo sapiens
ttgcaggattttctt

SEQ ID NO: 629881 - DNA, 15 bp, Homo sapiens
tgcaggattttcttt

SEQ ID NO: 629882 - DNA, 15 bp, Homo sapiens
gcaggattttctttt

SEQ ID NO: 629883 - DNA, 15 bp, Homo sapiens
caggattttcttttt

SEQ ID NO: 629884 - DNA, 15 bp, Homo sapiens
aggattttctttttt

SEQ ID NO: 629885 - DNA, 15 bp, Homo sapiens
ggattttcttttttt

SEQ ID NO: 629886 - DNA, 15 bp, Homo sapiens
gattttctttttttg

SEQ ID NO: 629887 - DNA, 15 bp, Homo sapiens
attttctttttttga

SEQ ID NO: 629888 - DNA, 15 bp, Homo sapiens
ttttctttttttgag

SEQ ID NO: 629889 - DNA, 15 bp, Homo sapiens
tttctttttttgagg

SEQ ID NO: 629890 - DNA, 15 bp, Homo sapiens
ttctttttttgagga

SEQ ID NO: 629891 - DNA, 15 bp, Homo sapiens
tctttttttgaggag

SEQ ID NO: 629892 - DNA, 15 bp, Homo sapiens
ctttttttgaggaga

SEQ ID NO: 629893 - DNA, 15 bp, Homo sapiens
tttttttgaggagaa

SEQ ID NO: 629894 - DNA, 15 bp, Homo sapiens
ttttttgaggagaat

SEQ ID NO: 629895 - DNA, 15 bp, Homo sapiens
tttttgaggagaatt

SEQ ID NO: 629896 - DNA, 15 bp, Homo sapiens
ttttgaggagaattc

SEQ ID NO: 629897 - DNA, 15 bp, Homo sapiens
tttgaggagaattct

SEQ ID NO: 629898 - DNA, 15 bp, Homo sapiens
ttgaggagaattctg

SEQ ID NO: 629899 - DNA, 15 bp, Homo sapiens
tgaggagaattctgt

SEQ ID NO: 629900 - DNA, 15 bp, Homo sapiens
gaggagaattctgtc

SEQ ID NO: 629901 - DNA, 15 bp, Homo sapiens
aggagaattctgtca

SEQ ID NO: 629902 - DNA, 15 bp, Homo sapiens
ggagaattctgtcat

SEQ ID NO: 629903 - DNA, 15 bp, Homo sapiens
gagaattctgtcatt

SEQ ID NO: 629904 - DNA, 15 bp, Homo sapiens
agaattctgtcattg

SEQ ID NO: 629905 - DNA, 15 bp, Homo sapiens
gaattctgtcattgc

SEQ ID NO: 629906 - DNA, 15 bp, Homo sapiens
aattctgtcattgcc

SEQ ID NO: 629907 - DNA, 15 bp, Homo sapiens
attctgtcattgcct

SEQ ID NO: 629908 - DNA, 15 bp, Homo sapiens
ttctgtcattgcctt

SEQ ID NO: 629909 - DNA, 15 bp, Homo sapiens
tctgtcattgcctta

SEQ ID NO: 629910 - DNA, 15 bp, Homo sapiens
ctgtcattgccttaa

SEQ ID NO: 629911 - DNA, 15 bp, Homo sapiens
tgtcattgccttaat

SEQ ID NO: 629912 - DNA, 15 bp, Homo sapiens
gtcattgccttaatc

SEQ ID NO: 629913 - DNA, 15 bp, Homo sapiens
tcattgccttaatcc

SEQ ID NO: 629914 - DNA, 15 bp, Homo sapiens
cattgccttaatcca

SEQ ID NO: 629915 - DNA, 15 bp, Homo sapiens
attgccttaatccac

SEQ ID NO: 629916 - DNA, 15 bp, Homo sapiens
ttgccttaatccact

SEQ ID NO: 629917 - DNA, 15 bp, Homo sapiens
tgccttaatccactt

SEQ ID NO: 629918 - DNA, 15 bp, Homo sapiens
gccttaatccacttt

SEQ ID NO: 629919 - DNA, 15 bp, Homo sapiens
ccttaatccacttta

SEQ ID NO: 629920 - DNA, 15 bp, Homo sapiens
cttaatccactttaa

SEQ ID NO: 629921 - DNA, 15 bp, Homo sapiens
ttaatccactttaat

SEQ ID NO: 629922 - DNA, 15 bp, Homo sapiens
taatccactttaatc

SEQ ID NO: 629923 - DNA, 15 bp, Homo sapiens
aatccactttaatcc

SEQ ID NO: 629924 - DNA, 15 bp, Homo sapiens
atccactttaatccc

SEQ ID NO: 629925 - DNA, 15 bp, Homo sapiens
tccactttaatcccc

SEQ ID NO: 629926 - DNA, 15 bp, Homo sapiens
ccactttaatcccct

SEQ ID NO: 629927 - DNA, 15 bp, Homo sapiens
cactttaatcccctc

SEQ ID NO: 629928 - DNA, 15 bp, Homo sapiens
actttaatcccctcg

SEQ ID NO: 629929 - DNA, 15 bp, Homo sapiens
ctttaatcccctcgt

SEQ ID NO: 629930 - DNA, 15 bp, Homo sapiens
tttaatcccctcgtg

SEQ ID NO: 629931 - DNA, 15 bp, Homo sapiens
ttaatcccctcgtgg

SEQ ID NO: 629932 - DNA, 15 bp, Homo sapiens
taatcccctcgtggg

SEQ ID NO: 629933 - DNA, 15 bp, Homo sapiens
aatcccctcgtgggc

SEQ ID NO: 629934 - DNA, 15 bp, Homo sapiens
atcccctcgtgggct

SEQ ID NO: 629935 - DNA, 15 bp, Homo sapiens
tcccctcgtgggctg

SEQ ID NO: 629936 - DNA, 15 bp, Homo sapiens
cccctcgtgggctga

SEQ ID NO: 629937 - DNA, 15 bp, Homo sapiens
ccctcgtgggctgaa

SEQ ID NO: 629938 - DNA, 15 bp, Homo sapiens
cctcgtgggctgaaa

SEQ ID NO: 629939 - DNA, 15 bp, Homo sapiens
ctcgtgggctgaaat

SEQ ID NO: 629940 - DNA, 15 bp, Homo sapiens
tcgtgggctgaaatg

SEQ ID NO: 629941 - DNA, 15 bp, Homo sapiens
cgtgggctgaaatgg

SEQ ID NO: 629942 - DNA, 15 bp, Homo sapiens
gtgggctgaaatggg

SEQ ID NO: 629943 - DNA, 15 bp, Homo sapiens
tgggctgaaatgggc

SEQ ID NO: 629944 - DNA, 15 bp, Homo sapiens
gggctgaaatgggcc

SEQ ID NO: 629945 - DNA, 15 bp, Homo sapiens
ggctgaaatgggccc

SEQ ID NO: 629946 - DNA, 15 bp, Homo sapiens
gctgaaatgggccca

SEQ ID NO: 629947 - DNA, 15 bp, Homo sapiens
ctgaaatgggcccag

SEQ ID NO: 629948 - DNA, 15 bp, Homo sapiens
tgaaatgggcccagg

SEQ ID NO: 629949 - DNA, 15 bp, Homo sapiens
gaaatgggcccagga

SEQ ID NO: 629950 - DNA, 15 bp, Homo sapiens
aaatgggcccaggat

SEQ ID NO: 629951 - DNA, 15 bp, Homo sapiens
aatgggcccaggatg

SEQ ID NO: 629952 - DNA, 15 bp, Homo sapiens
atgggcccaggatgg

SEQ ID NO: 629953 - DNA, 15 bp, Homo sapiens
tgggcccaggatgga

SEQ ID NO: 629954 - DNA, 15 bp, Homo sapiens
gggcccaggatggac

SEQ ID NO: 629955 - DNA, 15 bp, Homo sapiens
ggcccaggatggacg

SEQ ID NO: 629956 - DNA, 15 bp, Homo sapiens
gcccaggatggacgc

SEQ ID NO: 629957 - DNA, 15 bp, Homo sapiens
cccaggatggacgcc

SEQ ID NO: 629958 - DNA, 15 bp, Homo sapiens
ccaggatggacgcca

SEQ ID NO: 629959 - DNA, 15 bp, Homo sapiens
caggatggacgccac

SEQ ID NO: 629960 - DNA, 15 bp, Homo sapiens
aggatggacgccacg

SEQ ID NO: 629961 - DNA, 15 bp, Homo sapiens
ggatggacgccacgc

SEQ ID NO: 629962 - DNA, 15 bp, Homo sapiens
gatggacgccacgct

SEQ ID NO: 629963 - DNA, 15 bp, Homo sapiens
atggacgccacgctt

SEQ ID NO: 629964 - DNA, 15 bp, Homo sapiens
tggacgccacgcttc

SEQ ID NO: 629965 - DNA, 15 bp, Homo sapiens
ggacgccacgcttct

SEQ ID NO: 629966 - DNA, 15 bp, Homo sapiens
gacgccacgcttctt

SEQ ID NO: 629967 - DNA, 15 bp, Homo sapiens
acgccacgcttcttt

SEQ ID NO: 629968 - DNA, 15 bp, Homo sapiens
cgccacgcttcttta

SEQ ID NO: 629969 - DNA, 15 bp, Homo sapiens
gccacgcttctttac

SEQ ID NO: 629970 - DNA, 15 bp, Homo sapiens
ccacgcttctttact

SEQ ID NO: 629971 - DNA, 15 bp, Homo sapiens
cacgcttctttactc

SEQ ID NO: 629972 - DNA, 15 bp, Homo sapiens
acgcttctttactct

SEQ ID NO: 629973 - DNA, 15 bp, Homo sapiens
cgcttctttactctt

SEQ ID NO: 629974 - DNA, 15 bp, Homo sapiens
gcttctttactcttg

SEQ ID NO: 629975 - DNA, 15 bp, Homo sapiens
cttctttactcttgg

SEQ ID NO: 629976 - DNA, 15 bp, Homo sapiens
ttctttactcttgga

SEQ ID NO: 629977 - DNA, 15 bp, Homo sapiens
tctttactcttggat

SEQ ID NO: 629978 - DNA, 15 bp, Homo sapiens
ctttactcttggatc

SEQ ID NO: 629979 - DNA, 15 bp, Homo sapiens
tttactcttggatcc

SEQ ID NO: 629980 - DNA, 15 bp, Homo sapiens
ttactcttggatcca

SEQ ID NO: 629981 - DNA, 15 bp, Homo sapiens
tactcttggatccac

SEQ ID NO: 629982 - DNA, 15 bp, Homo sapiens
actcttggatccacc

SEQ ID NO: 629983 - DNA, 15 bp, Homo sapiens
ctcttggatccacct

SEQ ID NO: 629984 - DNA, 15 bp, Homo sapiens
tcttggatccacctc

SEQ ID NO: 629985 - DNA, 15 bp, Homo sapiens
cttggatccacctcc

SEQ ID NO: 629986 - DNA, 15 bp, Homo sapiens
ttggatccacctcct

SEQ ID NO: 629987 - DNA, 15 bp, Homo sapiens
tggatccacctcctg

SEQ ID NO: 629988 - DNA, 15 bp, Homo sapiens
ggatccacctcctgc

SEQ ID NO: 629989 - DNA, 15 bp, Homo sapiens
gatccacctcctgcc

SEQ ID NO: 629990 - DNA, 15 bp, Homo sapiens
atccacctcctgcct

SEQ ID NO: 629991 - DNA, 15 bp, Homo sapiens
tccacctcctgcctt

SEQ ID NO: 629992 - DNA, 15 bp, Homo sapiens
ccacctcctgccttc

SEQ ID NO: 629993 - DNA, 15 bp, Homo sapiens
cacctcctgccttcc

SEQ ID NO: 629994 - DNA, 15 bp, Homo sapiens
acctcctgccttccc

SEQ ID NO: 629995 - DNA, 15 bp, Homo sapiens
cctcctgccttccct

SEQ ID NO: 629996 - DNA, 15 bp, Homo sapiens
ctcctgccttcccta

SEQ ID NO: 629997 - DNA, 15 bp, Homo sapiens
tcctgccttccctac

SEQ ID NO: 629998 - DNA, 15 bp, Homo sapiens
cctgccttccctacc

SEQ ID NO: 629999 - DNA, 15 bp, Homo sapiens
ctgccttccctaccc

SEQ ID NO: 630000 - DNA, 15 bp, Homo sapiens
tgccttccctaccct

SEQ ID NO: 630001 - DNA, 15 bp, Homo sapiens
gccttccctacccta

SEQ ID NO: 630002 - DNA, 15 bp, Homo sapiens
ccttccctaccctac

SEQ ID NO: 630003 - DNA, 15 bp, Homo sapiens
cttccctaccctaca

SEQ ID NO: 630004 - DNA, 15 bp, Homo sapiens
ttccctaccctacac

SEQ ID NO: 630005 - DNA, 15 bp, Homo sapiens
tccctaccctacacc

SEQ ID NO: 630006 - DNA, 15 bp, Homo sapiens
ccctaccctacacca

SEQ ID NO: 630007 - DNA, 15 bp, Homo sapiens
cctaccctacaccag

SEQ ID NO: 630008 - DNA, 15 bp, Homo sapiens
ctaccctacaccagg

SEQ ID NO: 630009 - DNA, 15 bp, Homo sapiens
taccctacaccaggg

SEQ ID NO: 630010 - DNA, 15 bp, Homo sapiens
accctacaccagggt

SEQ ID NO: 630011 - DNA, 15 bp, Homo sapiens
ccctacaccagggta

SEQ ID NO: 630012 - DNA, 15 bp, Homo sapiens
cctacaccagggtac

SEQ ID NO: 630013 - DNA, 15 bp, Homo sapiens
ctacaccagggtacc

SEQ ID NO: 630014 - DNA, 15 bp, Homo sapiens
tacaccagggtaccc

SEQ ID NO: 630015 - DNA, 15 bp, Homo sapiens
acaccagggtacccc

SEQ ID NO: 630016 - DNA, 15 bp, Homo sapiens
caccagggtacccct

SEQ ID NO: 630017 - DNA, 15 bp, Homo sapiens
accagggtacccctg

SEQ ID NO: 630018 - DNA, 15 bp, Homo sapiens
ccagggtacccctgt

SEQ ID NO: 630019 - DNA, 15 bp, Homo sapiens
cagggtacccctgtc

SEQ ID NO: 630020 - DNA, 15 bp, Homo sapiens
agggtacccctgtct

SEQ ID NO: 630021 - DNA, 15 bp, Homo sapiens
gggtacccctgtctt

SEQ ID NO: 630022 - DNA, 15 bp, Homo sapiens
ggtacccctgtcttg

SEQ ID NO: 630023 - DNA, 15 bp, Homo sapiens
gtacccctgtcttgc

SEQ ID NO: 630024 - DNA, 15 bp, Homo sapiens
tacccctgtcttgct

SEQ ID NO: 630025 - DNA, 15 bp, Homo sapiens
acccctgtcttgctc

SEQ ID NO: 630026 - DNA, 15 bp, Homo sapiens
cccctgtcttgctca

SEQ ID NO: 630027 - DNA, 15 bp, Homo sapiens
ccctgtcttgctcaa

SEQ ID NO: 630028 - DNA, 15 bp, Homo sapiens
cctgtcttgctcaag

SEQ ID NO: 630029 - DNA, 15 bp, Homo sapiens
ctgtcttgctcaagt

SEQ ID NO: 630030 - DNA, 15 bp, Homo sapiens
tgtcttgctcaagtg

SEQ ID NO: 630031 - DNA, 15 bp, Homo sapiens
gtcttgctcaagtga

SEQ ID NO: 630032 - DNA, 15 bp, Homo sapiens
tcttgctcaagtgag

SEQ ID NO: 630033 - DNA, 15 bp, Homo sapiens
cttgctcaagtgagg

SEQ ID NO: 630034 - DNA, 15 bp, Homo sapiens
ttgctcaagtgaggg

SEQ ID NO: 630035 - DNA, 15 bp, Homo sapiens
tgctcaagtgagggg

SEQ ID NO: 630036 - DNA, 15 bp, Homo sapiens
gctcaagtgagggga

SEQ ID NO: 630037 - DNA, 15 bp, Homo sapiens
ctcaagtgaggggag

SEQ ID NO: 630038 - DNA, 15 bp, Homo sapiens
tcaagtgaggggagt

SEQ ID NO: 630039 - DNA, 15 bp, Homo sapiens
caagtgaggggagtg

SEQ ID NO: 630040 - DNA, 15 bp, Homo sapiens
aagtgaggggagtga

SEQ ID NO: 630041 - DNA, 15 bp, Homo sapiens
agtgaggggagtgac

SEQ ID NO: 630042 - DNA, 15 bp, Homo sapiens
gtgaggggagtgact

SEQ ID NO: 630043 - DNA, 15 bp, Homo sapiens
tgaggggagtgactg

SEQ ID NO: 630044 - DNA, 15 bp, Homo sapiens
gaggggagtgactgt

SEQ ID NO: 630045 - DNA, 15 bp, Homo sapiens
aggggagtgactgtg

SEQ ID NO: 630046 - DNA, 15 bp, Homo sapiens
ggggagtgactgtgt

SEQ ID NO: 630047 - DNA, 15 bp, Homo sapiens
gggagtgactgtgtg

SEQ ID NO: 630048 - DNA, 15 bp, Homo sapiens
ggagtgactgtgtgc

SEQ ID NO: 630049 - DNA, 15 bp, Homo sapiens
gagtgactgtgtgcg

SEQ ID NO: 630050 - DNA, 15 bp, Homo sapiens
agtgactgtgtgcgc

SEQ ID NO: 630051 - DNA, 15 bp, Homo sapiens
gtgactgtgtgcgcc

SEQ ID NO: 630052 - DNA, 15 bp, Homo sapiens
tgactgtgtgcgcct

SEQ ID NO: 630053 - DNA, 15 bp, Homo sapiens
gactgtgtgcgcctt

SEQ ID NO: 630054 - DNA, 15 bp, Homo sapiens
actgtgtgcgccttc

SEQ ID NO: 630055 - DNA, 15 bp, Homo sapiens
ctgtgtgcgccttct

SEQ ID NO: 630056 - DNA, 15 bp, Homo sapiens
tgtgtgcgccttctg

SEQ ID NO: 630057 - DNA, 15 bp, Homo sapiens
gtgtgcgccttctgt

SEQ ID NO: 630058 - DNA, 15 bp, Homo sapiens
tgtgcgccttctgtc

SEQ ID NO: 630059 - DNA, 15 bp, Homo sapiens
gtgcgccttctgtca

SEQ ID NO: 630060 - DNA, 15 bp, Homo sapiens
tgcgccttctgtcag

SEQ ID NO: 630061 - DNA, 15 bp, Homo sapiens
gcgccttctgtcagc

SEQ ID NO: 630062 - DNA, 15 bp, Homo sapiens
cgccttctgtcagct

SEQ ID NO: 630063 - DNA, 15 bp, Homo sapiens
gccttctgtcagctc

SEQ ID NO: 630064 - DNA, 15 bp, Homo sapiens
ccttctgtcagctca

SEQ ID NO: 630065 - DNA, 15 bp, Homo sapiens
cttctgtcagctcat

SEQ ID NO: 630066 - DNA, 15 bp, Homo sapiens
ttctgtcagctcatc

SEQ ID NO: 630067 - DNA, 15 bp, Homo sapiens
tctgtcagctcatcc

SEQ ID NO: 630068 - DNA, 15 bp, Homo sapiens
ctgtcagctcatcct

SEQ ID NO: 630069 - DNA, 15 bp, Homo sapiens
tgtcagctcatcctc

SEQ ID NO: 630070 - DNA, 15 bp, Homo sapiens
gtcagctcatcctcc

SEQ ID NO: 630071 - DNA, 15 bp, Homo sapiens
tcagctcatcctcca

SEQ ID NO: 630072 - DNA, 15 bp, Homo sapiens
cagctcatcctccac

SEQ ID NO: 630073 - DNA, 15 bp, Homo sapiens
agctcatcctccaca

SEQ ID NO: 630074 - DNA, 15 bp, Homo sapiens
gctcatcctccacag

SEQ ID NO: 630075 - DNA, 15 bp, Homo sapiens
ctcatcctccacagg

SEQ ID NO: 630076 - DNA, 15 bp, Homo sapiens
tcatcctccacaggg

SEQ ID NO: 630077 - DNA, 15 bp, Homo sapiens
catcctccacagggg

SEQ ID NO: 630078 - DNA, 15 bp, Homo sapiens
atcctccacagggga

SEQ ID NO: 630079 - DNA, 15 bp, Homo sapiens
tcctccacaggggag

SEQ ID NO: 630080 - DNA, 15 bp, Homo sapiens
cctccacaggggagc

SEQ ID NO: 630081 - DNA, 15 bp, Homo sapiens
ctccacaggggagcc

SEQ ID NO: 630082 - DNA, 15 bp, Homo sapiens
tccacaggggagcca

SEQ ID NO: 630083 - DNA, 15 bp, Homo sapiens
ccacaggggagccag

SEQ ID NO: 630084 - DNA, 15 bp, Homo sapiens
cacaggggagccagc

SEQ ID NO: 630085 - DNA, 15 bp, Homo sapiens
acaggggagccagcc

SEQ ID NO: 630086 - DNA, 15 bp, Homo sapiens
caggggagccagccc

SEQ ID NO: 630087 - DNA, 15 bp, Homo sapiens
aggggagccagccca

SEQ ID NO: 630088 - DNA, 15 bp, Homo sapiens
ggggagccagcccag

SEQ ID NO: 630089 - DNA, 15 bp, Homo sapiens
gggagccagcccagg

SEQ ID NO: 630090 - DNA, 15 bp, Homo sapiens
ggagccagcccaggg

SEQ ID NO: 630091 - DNA, 15 bp, Homo sapiens
gagccagcccagggg

SEQ ID NO: 630092 - DNA, 15 bp, Homo sapiens
agccagcccaggggg

SEQ ID NO: 630093 - DNA, 15 bp, Homo sapiens
gccagcccaggggga

SEQ ID NO: 630094 - DNA, 15 bp, Homo sapiens
ccagcccagggggaa

SEQ ID NO: 630095 - DNA, 15 bp, Homo sapiens
cagcccagggggaag

SEQ ID NO: 630096 - DNA, 15 bp, Homo sapiens
agcccagggggaagc

SEQ ID NO: 630097 - DNA, 15 bp, Homo sapiens
gcccagggggaagca

SEQ ID NO: 630098 - DNA, 15 bp, Homo sapiens
cccagggggaagcag

SEQ ID NO: 630099 - DNA, 15 bp, Homo sapiens
ccagggggaagcagt

SEQ ID NO: 630100 - DNA, 15 bp, Homo sapiens
cagggggaagcagta

SEQ ID NO: 630101 - DNA, 15 bp, Homo sapiens
agggggaagcagtaa

SEQ ID NO: 630102 - DNA, 15 bp, Homo sapiens
gggggaagcagtaat

SEQ ID NO: 630103 - DNA, 15 bp, Homo sapiens
ggggaagcagtaatc

SEQ ID NO: 630104 - DNA, 15 bp, Homo sapiens
gggaagcagtaatca

SEQ ID NO: 630105 - DNA, 15 bp, Homo sapiens
ggaagcagtaatcag

SEQ ID NO: 630106 - DNA, 15 bp, Homo sapiens
gaagcagtaatcaga

SEQ ID NO: 630107 - DNA, 15 bp, Homo sapiens
aagcagtaatcagaa

SEQ ID NO: 630108 - DNA, 15 bp, Homo sapiens
agcagtaatcagaag

SEQ ID NO: 630109 - DNA, 15 bp, Homo sapiens
gcagtaatcagaagg

SEQ ID NO: 630110 - DNA, 15 bp, Homo sapiens
cagtaatcagaaggg

SEQ ID NO: 630111 - DNA, 15 bp, Homo sapiens
agtaatcagaagggc

SEQ ID NO: 630112 - DNA, 15 bp, Homo sapiens
gtaatcagaagggcc

SEQ ID NO: 630113 - DNA, 15 bp, Homo sapiens
taatcagaagggcca

SEQ ID NO: 630114 - DNA, 15 bp, Homo sapiens
aatcagaagggccag

SEQ ID NO: 630115 - DNA, 15 bp, Homo sapiens
atcagaagggccagc

SEQ ID NO: 630116 - DNA, 15 bp, Homo sapiens
tcagaagggccagct

SEQ ID NO: 630117 - DNA, 15 bp, Homo sapiens
cagaagggccagctc

SEQ ID NO: 630118 - DNA, 15 bp, Homo sapiens
agaagggccagctcc

SEQ ID NO: 630119 - DNA, 15 bp, Homo sapiens
gaagggccagctccc

SEQ ID NO: 630120 - DNA, 15 bp, Homo sapiens
aagggccagctccca

SEQ ID NO: 630121 - DNA, 15 bp, Homo sapiens
agggccagctcccag

SEQ ID NO: 630122 - DNA, 15 bp, Homo sapiens
gggccagctcccagc

SEQ ID NO: 630123 - DNA, 15 bp, Homo sapiens
ggccagctcccagcc

SEQ ID NO: 630124 - DNA, 15 bp, Homo sapiens
gccagctcccagcct

SEQ ID NO: 630125 - DNA, 15 bp, Homo sapiens
ccagctcccagcctg

SEQ ID NO: 630126 - DNA, 15 bp, Homo sapiens
cagctcccagcctgt

SEQ ID NO: 630127 - DNA, 15 bp, Homo sapiens
agctcccagcctgtg

SEQ ID NO: 630128 - DNA, 15 bp, Homo sapiens
gctcccagcctgtgc

SEQ ID NO: 630129 - DNA, 15 bp, Homo sapiens
ctcccagcctgtgcc

SEQ ID NO: 630130 - DNA, 15 bp, Homo sapiens
tcccagcctgtgccc

SEQ ID NO: 630131 - DNA, 15 bp, Homo sapiens
cccagcctgtgcccc

SEQ ID NO: 630132 - DNA, 15 bp, Homo sapiens
ccagcctgtgccccc

SEQ ID NO: 630133 - DNA, 15 bp, Homo sapiens
cagcctgtgccccca

SEQ ID NO: 630134 - DNA, 15 bp, Homo sapiens
agcctgtgcccccaa

SEQ ID NO: 630135 - DNA, 15 bp, Homo sapiens
gcctgtgcccccaac

SEQ ID NO: 630136 - DNA, 15 bp, Homo sapiens
cctgtgcccccaacc

SEQ ID NO: 630137 - DNA, 15 bp, Homo sapiens
ctgtgcccccaacct

SEQ ID NO: 630138 - DNA, 15 bp, Homo sapiens
tgtgcccccaacctt

SEQ ID NO: 630139 - DNA, 15 bp, Homo sapiens
gtgcccccaaccttc

SEQ ID NO: 630140 - DNA, 15 bp, Homo sapiens
tgcccccaaccttct

SEQ ID NO: 630141 - DNA, 15 bp, Homo sapiens
gcccccaaccttctc

SEQ ID NO: 630142 - DNA, 15 bp, Homo sapiens
cccccaaccttctct

SEQ ID NO: 630143 - DNA, 15 bp, Homo sapiens
ccccaaccttctctc

SEQ ID NO: 630144 - DNA, 15 bp, Homo sapiens
cccaaccttctctcc

SEQ ID NO: 630145 - DNA, 15 bp, Homo sapiens
ccaaccttctctcca

SEQ ID NO: 630146 - DNA, 15 bp, Homo sapiens
caaccttctctccac

SEQ ID NO: 630147 - DNA, 15 bp, Homo sapiens
aaccttctctccacc

SEQ ID NO: 630148 - DNA, 15 bp, Homo sapiens
accttctctccaccc

SEQ ID NO: 630149 - DNA, 15 bp, Homo sapiens
ccttctctccacccc

SEQ ID NO: 630150 - DNA, 15 bp, Homo sapiens
cttctctccaccccc

SEQ ID NO: 630151 - DNA, 15 bp, Homo sapiens
ttctctccacccccc

SEQ ID NO: 630152 - DNA, 15 bp, Homo sapiens
tctctccacccccca

SEQ ID NO: 630153 - DNA, 15 bp, Homo sapiens
ctctccaccccccag

SEQ ID NO: 630154 - DNA, 15 bp, Homo sapiens
tctccaccccccagg

SEQ ID NO: 630155 - DNA, 15 bp, Homo sapiens
ctccaccccccagga

SEQ ID NO: 630156 - DNA, 15 bp, Homo sapiens
tccaccccccaggat

SEQ ID NO: 630157 - DNA, 15 bp, Homo sapiens
ccaccccccaggatg

SEQ ID NO: 630158 - DNA, 15 bp, Homo sapiens
caccccccaggatga

SEQ ID NO: 630159 - DNA, 15 bp, Homo sapiens
accccccaggatgag

SEQ ID NO: 630160 - DNA, 15 bp, Homo sapiens
ccccccaggatgagc

SEQ ID NO: 630161 - DNA, 15 bp, Homo sapiens
cccccaggatgagcc

SEQ ID NO: 630162 - DNA, 15 bp, Homo sapiens
ccccaggatgagccc

SEQ ID NO: 630163 - DNA, 15 bp, Homo sapiens
cccaggatgagccca

SEQ ID NO: 630164 - DNA, 15 bp, Homo sapiens
ccaggatgagcccac

SEQ ID NO: 630165 - DNA, 15 bp, Homo sapiens
caggatgagcccacc

SEQ ID NO: 630166 - DNA, 15 bp, Homo sapiens
aggatgagcccacca

SEQ ID NO: 630167 - DNA, 15 bp, Homo sapiens
ggatgagcccaccac

SEQ ID NO: 630168 - DNA, 15 bp, Homo sapiens
gatgagcccaccaca

SEQ ID NO: 630169 - DNA, 15 bp, Homo sapiens
atgagcccaccacag

SEQ ID NO: 630170 - DNA, 15 bp, Homo sapiens
tgagcccaccacagg

SEQ ID NO: 630171 - DNA, 15 bp, Homo sapiens
gagcccaccacaggg

SEQ ID NO: 630172 - DNA, 15 bp, Homo sapiens
agcccaccacaggga

SEQ ID NO: 630173 - DNA, 15 bp, Homo sapiens
gcccaccacagggat

SEQ ID NO: 630174 - DNA, 15 bp, Homo sapiens
cccaccacagggatg

SEQ ID NO: 630175 - DNA, 15 bp, Homo sapiens
ccaccacagggatgg

SEQ ID NO: 630176 - DNA, 15 bp, Homo sapiens
caccacagggatgga

SEQ ID NO: 630177 - DNA, 15 bp, Homo sapiens
accacagggatggac

SEQ ID NO: 630178 - DNA, 15 bp, Homo sapiens
ccacagggatggacc

SEQ ID NO: 630179 - DNA, 15 bp, Homo sapiens
cacagggatggaccc

SEQ ID NO: 630180 - DNA, 15 bp, Homo sapiens
acagggatggacccc

SEQ ID NO: 630181 - DNA, 15 bp, Homo sapiens
cagggatggaccccc

SEQ ID NO: 630182 - DNA, 15 bp, Homo sapiens
agggatggaccccca

SEQ ID NO: 630183 - DNA, 15 bp, Homo sapiens
gggatggacccccag

SEQ ID NO: 630184 - DNA, 15 bp, Homo sapiens
ggatggacccccagg

SEQ ID NO: 630185 - DNA, 15 bp, Homo sapiens
gatggacccccaggc

SEQ ID NO: 630186 - DNA, 15 bp, Homo sapiens
atggacccccaggca

SEQ ID NO: 630187 - DNA, 15 bp, Homo sapiens
tggacccccaggcac

SEQ ID NO: 630188 - DNA, 15 bp, Homo sapiens
ggacccccaggcacg

SEQ ID NO: 630189 - DNA, 15 bp, Homo sapiens
gacccccaggcacgc

SEQ ID NO: 630190 - DNA, 15 bp, Homo sapiens
acccccaggcacgcc

SEQ ID NO: 630191 - DNA, 15 bp, Homo sapiens
cccccaggcacgccg

SEQ ID NO: 630192 - DNA, 15 bp, Homo sapiens
ccccaggcacgccgc

SEQ ID NO: 630193 - DNA, 15 bp, Homo sapiens
cccaggcacgccgca

SEQ ID NO: 630194 - DNA, 15 bp, Homo sapiens
ccaggcacgccgcat

SEQ ID NO: 630195 - DNA, 15 bp, Homo sapiens
caggcacgccgcatg

SEQ ID NO: 630196 - DNA, 15 bp, Homo sapiens
aggcacgccgcatgc

SEQ ID NO: 630197 - DNA, 15 bp, Homo sapiens
ggcacgccgcatgct

SEQ ID NO: 630198 - DNA, 15 bp, Homo sapiens
gcacgccgcatgctg

SEQ ID NO: 630199 - DNA, 15 bp, Homo sapiens
cacgccgcatgctgt

SEQ ID NO: 630200 - DNA, 15 bp, Homo sapiens
acgccgcatgctgtg

SEQ ID NO: 630201 - DNA, 15 bp, Homo sapiens
cgccgcatgctgtgg

SEQ ID NO: 630202 - DNA, 15 bp, Homo sapiens
gccgcatgctgtgga

SEQ ID NO: 630203 - DNA, 15 bp, Homo sapiens
ccgcatgctgtggaa

SEQ ID NO: 630204 - DNA, 15 bp, Homo sapiens
cgcatgctgtggaac

SEQ ID NO: 630205 - DNA, 15 bp, Homo sapiens
gcatgctgtggaacg

SEQ ID NO: 630206 - DNA, 15 bp, Homo sapiens
catgctgtggaacgt

SEQ ID NO: 630207 - DNA, 15 bp, Homo sapiens
atgctgtggaacgtc

SEQ ID NO: 630208 - DNA, 15 bp, Homo sapiens
tgctgtggaacgtca

SEQ ID NO: 630209 - DNA, 15 bp, Homo sapiens
gctgtggaacgtcat

SEQ ID NO: 630210 - DNA, 15 bp, Homo sapiens
ctgtggaacgtcatc

SEQ ID NO: 630211 - DNA, 15 bp, Homo sapiens
tgtggaacgtcatcg

SEQ ID NO: 630212 - DNA, 15 bp, Homo sapiens
gtggaacgtcatcgt

SEQ ID NO: 630213 - DNA, 15 bp, Homo sapiens
tggaacgtcatcgtg

SEQ ID NO: 630214 - DNA, 15 bp, Homo sapiens
ggaacgtcatcgtga

SEQ ID NO: 630215 - DNA, 15 bp, Homo sapiens
gaacgtcatcgtgag

SEQ ID NO: 630216 - DNA, 15 bp, Homo sapiens
aacgtcatcgtgagc

SEQ ID NO: 630217 - DNA, 15 bp, Homo sapiens
acgtcatcgtgagca

SEQ ID NO: 630218 - DNA, 15 bp, Homo sapiens
cgtcatcgtgagcat

SEQ ID NO: 630219 - DNA, 15 bp, Homo sapiens
gtcatcgtgagcatc

SEQ ID NO: 630220 - DNA, 15 bp, Homo sapiens
tcatcgtgagcatca

SEQ ID NO: 630221 - DNA, 15 bp, Homo sapiens
catcgtgagcatcat

SEQ ID NO: 630222 - DNA, 15 bp, Homo sapiens
atcgtgagcatcatc

SEQ ID NO: 630223 - DNA, 15 bp, Homo sapiens
tcgtgagcatcatca

SEQ ID NO: 630224 - DNA, 15 bp, Homo sapiens
cgtgagcatcatcag

SEQ ID NO: 630225 - DNA, 15 bp, Homo sapiens
gtgagcatcatcaga

SEQ ID NO: 630226 - DNA, 15 bp, Homo sapiens
tgagcatcatcagag

SEQ ID NO: 630227 - DNA, 15 bp, Homo sapiens
gagcatcatcagaga

SEQ ID NO: 630228 - DNA, 15 bp, Homo sapiens
agcatcatcagagaa

SEQ ID NO: 630229 - DNA, 15 bp, Homo sapiens
gcatcatcagagaag

SEQ ID NO: 630230 - DNA, 15 bp, Homo sapiens
catcatcagagaagg

SEQ ID NO: 630231 - DNA, 15 bp, Homo sapiens
atcatcagagaaggg

SEQ ID NO: 630232 - DNA, 15 bp, Homo sapiens
tcatcagagaaggga

SEQ ID NO: 630233 - DNA, 15 bp, Homo sapiens
catcagagaagggag

SEQ ID NO: 630234 - DNA, 15 bp, Homo sapiens
atcagagaagggagg

SEQ ID NO: 630235 - DNA, 15 bp, Homo sapiens
tcagagaagggaggg

SEQ ID NO: 630236 - DNA, 15 bp, Homo sapiens
cagagaagggagggc

SEQ ID NO: 630237 - DNA, 15 bp, Homo sapiens
agagaagggagggct

SEQ ID NO: 630238 - DNA, 15 bp, Homo sapiens
gagaagggagggctg

SEQ ID NO: 630239 - DNA, 15 bp, Homo sapiens
agaagggagggctgt

SEQ ID NO: 630240 - DNA, 15 bp, Homo sapiens
gaagggagggctgtg

SEQ ID NO: 630241 - DNA, 15 bp, Homo sapiens
aagggagggctgtgg

SEQ ID NO: 630242 - DNA, 15 bp, Homo sapiens
agggagggctgtggt

SEQ ID NO: 630243 - DNA, 15 bp, Homo sapiens
gggagggctgtggtc

SEQ ID NO: 630244 - DNA, 15 bp, Homo sapiens
ggagggctgtggtcc

SEQ ID NO: 630245 - DNA, 15 bp, Homo sapiens
gagggctgtggtcct

SEQ ID NO: 630246 - DNA, 15 bp, Homo sapiens
agggctgtggtcctc

SEQ ID NO: 630247 - DNA, 15 bp, Homo sapiens
gggctgtggtcctca

SEQ ID NO: 630248 - DNA, 15 bp, Homo sapiens
ggctgtggtcctcac

SEQ ID NO: 630249 - DNA, 15 bp, Homo sapiens
gctgtggtcctcaca

SEQ ID NO: 630250 - DNA, 15 bp, Homo sapiens
ctgtggtcctcacat

SEQ ID NO: 630251 - DNA, 15 bp, Homo sapiens
tgtggtcctcacatc

SEQ ID NO: 630252 - DNA, 15 bp, Homo sapiens
gtggtcctcacatcc

SEQ ID NO: 630253 - DNA, 15 bp, Homo sapiens
tggtcctcacatccc

SEQ ID NO: 630254 - DNA, 15 bp, Homo sapiens
ggtcctcacatccca

SEQ ID NO: 630255 - DNA, 15 bp, Homo sapiens
gtcctcacatcccac

SEQ ID NO: 630256 - DNA, 15 bp, Homo sapiens
tcctcacatcccaca

SEQ ID NO: 630257 - DNA, 15 bp, Homo sapiens
cctcacatcccacag

SEQ ID NO: 630258 - DNA, 15 bp, Homo sapiens
ctcacatcccacagg

SEQ ID NO: 630259 - DNA, 15 bp, Homo sapiens
tcacatcccacaggc

SEQ ID NO: 630260 - DNA, 15 bp, Homo sapiens
cacatcccacaggca

SEQ ID NO: 630261 - DNA, 15 bp, Homo sapiens
acatcccacaggcaa

SEQ ID NO: 630262 - DNA, 15 bp, Homo sapiens
catcccacaggcaag

SEQ ID NO: 630263 - DNA, 15 bp, Homo sapiens
atcccacaggcaaga

SEQ ID NO: 630264 - DNA, 15 bp, Homo sapiens
tcccacaggcaagag

SEQ ID NO: 630265 - DNA, 15 bp, Homo sapiens
cccacaggcaagaga

SEQ ID NO: 630266 - DNA, 15 bp, Homo sapiens
ccacaggcaagagat

SEQ ID NO: 630267 - DNA, 15 bp, Homo sapiens
cacaggcaagagatt

SEQ ID NO: 630268 - DNA, 15 bp, Homo sapiens
acaggcaagagattc

SEQ ID NO: 630269 - DNA, 15 bp, Homo sapiens
caggcaagagattcc

SEQ ID NO: 630270 - DNA, 15 bp, Homo sapiens
aggcaagagattccc

SEQ ID NO: 630271 - DNA, 15 bp, Homo sapiens
ggcaagagattccca

SEQ ID NO: 630272 - DNA, 15 bp, Homo sapiens
gcaagagattcccag

SEQ ID NO: 630273 - DNA, 15 bp, Homo sapiens
caagagattcccagg

SEQ ID NO: 630274 - DNA, 15 bp, Homo sapiens
aagagattcccaggg

SEQ ID NO: 630275 - DNA, 15 bp, Homo sapiens
agagattcccagggc

SEQ ID NO: 630276 - DNA, 15 bp, Homo sapiens
gagattcccagggct

SEQ ID NO: 630277 - DNA, 15 bp, Homo sapiens
agattcccagggctg

SEQ ID NO: 630278 - DNA, 15 bp, Homo sapiens
gattcccagggctgg

SEQ ID NO: 630279 - DNA, 15 bp, Homo sapiens
attcccagggctggg

SEQ ID NO: 630280 - DNA, 15 bp, Homo sapiens
ttcccagggctgggg

SEQ ID NO: 630281 - DNA, 15 bp, Homo sapiens
tcccagggctgggga

SEQ ID NO: 630282 - DNA, 15 bp, Homo sapiens
cccagggctggggaa

SEQ ID NO: 630283 - DNA, 15 bp, Homo sapiens
ccagggctggggaag

SEQ ID NO: 630284 - DNA, 15 bp, Homo sapiens
cagggctggggaagg

SEQ ID NO: 630285 - DNA, 15 bp, Homo sapiens
agggctggggaaggt

SEQ ID NO: 630286 - DNA, 15 bp, Homo sapiens
gggctggggaaggtg

SEQ ID NO: 630287 - DNA, 15 bp, Homo sapiens
ggctggggaaggtgg

SEQ ID NO: 630288 - DNA, 15 bp, Homo sapiens
gctggggaaggtggg

SEQ ID NO: 630289 - DNA, 15 bp, Homo sapiens
ctggggaaggtgggt

SEQ ID NO: 630290 - DNA, 15 bp, Homo sapiens
tggggaaggtgggtg

SEQ ID NO: 630291 - DNA, 15 bp, Homo sapiens
ggggaaggtgggtgg

SEQ ID NO: 630292 - DNA, 15 bp, Homo sapiens
gggaaggtgggtggg

SEQ ID NO: 630293 - DNA, 15 bp, Homo sapiens
ggaaggtgggtggga

SEQ ID NO: 630294 - DNA, 15 bp, Homo sapiens
gaaggtgggtgggaa

SEQ ID NO: 630295 - DNA, 15 bp, Homo sapiens
aaggtgggtgggaat

SEQ ID NO: 630296 - DNA, 15 bp, Homo sapiens
aggtgggtgggaatc

SEQ ID NO: 630297 - DNA, 15 bp, Homo sapiens
ggtgggtgggaatcc

SEQ ID NO: 630298 - DNA, 15 bp, Homo sapiens
gtgggtgggaatcct

SEQ ID NO: 630299 - DNA, 15 bp, Homo sapiens
tgggtgggaatcctc

SEQ ID NO: 630300 - DNA, 15 bp, Homo sapiens
gggtgggaatcctct

SEQ ID NO: 630301 - DNA, 15 bp, Homo sapiens
ggtgggaatcctctc

SEQ ID NO: 630302 - DNA, 15 bp, Homo sapiens
gtgggaatcctctcc

SEQ ID NO: 630303 - DNA, 15 bp, Homo sapiens
tgggaatcctctcct

SEQ ID NO: 630304 - DNA, 15 bp, Homo sapiens
gggaatcctctcctg

SEQ ID NO: 630305 - DNA, 15 bp, Homo sapiens
ggaatcctctcctgc

SEQ ID NO: 630306 - DNA, 15 bp, Homo sapiens
gaatcctctcctgct

SEQ ID NO: 630307 - DNA, 15 bp, Homo sapiens
aatcctctcctgctc

SEQ ID NO: 630308 - DNA, 15 bp, Homo sapiens
atcctctcctgctca

SEQ ID NO: 630309 - DNA, 15 bp, Homo sapiens
tcctctcctgctcac

SEQ ID NO: 630310 - DNA, 15 bp, Homo sapiens
cctctcctgctcacc

SEQ ID NO: 630311 - DNA, 15 bp, Homo sapiens
ctctcctgctcacct

SEQ ID NO: 630312 - DNA, 15 bp, Homo sapiens
tctcctgctcacctc

SEQ ID NO: 630313 - DNA, 15 bp, Homo sapiens
ctcctgctcacctcc

SEQ ID NO: 630314 - DNA, 15 bp, Homo sapiens
tcctgctcacctcct

SEQ ID NO: 630315 - DNA, 15 bp, Homo sapiens
cctgctcacctcctc

SEQ ID NO: 630316 - DNA, 15 bp, Homo sapiens
ctgctcacctcctct

SEQ ID NO: 630317 - DNA, 15 bp, Homo sapiens
tgctcacctcctctc

SEQ ID NO: 630318 - DNA, 15 bp, Homo sapiens
gctcacctcctctct

SEQ ID NO: 630319 - DNA, 15 bp, Homo sapiens
ctcacctcctctctc

SEQ ID NO: 630320 - DNA, 15 bp, Homo sapiens
tcacctcctctctcc

SEQ ID NO: 630321 - DNA, 15 bp, Homo sapiens
cacctcctctctcct

SEQ ID NO: 630322 - DNA, 15 bp, Homo sapiens
acctcctctctcctg

SEQ ID NO: 630323 - DNA, 15 bp, Homo sapiens
cctcctctctcctgc

SEQ ID NO: 630324 - DNA, 15 bp, Homo sapiens
ctcctctctcctgcc

SEQ ID NO: 630325 - DNA, 15 bp, Homo sapiens
tcctctctcctgccc

SEQ ID NO: 630326 - DNA, 15 bp, Homo sapiens
cctctctcctgcccc

SEQ ID NO: 630327 - DNA, 15 bp, Homo sapiens
ctctctcctgcccca

SEQ ID NO: 630328 - DNA, 15 bp, Homo sapiens
tctctcctgccccac

SEQ ID NO: 630329 - DNA, 15 bp, Homo sapiens
ctctcctgccccaca

SEQ ID NO: 630330 - DNA, 15 bp, Homo sapiens
tctcctgccccacag

SEQ ID NO: 630331 - DNA, 15 bp, Homo sapiens
ctcctgccccacagc

SEQ ID NO: 630332 - DNA, 15 bp, Homo sapiens
tcctgccccacagca

SEQ ID NO: 630333 - DNA, 15 bp, Homo sapiens
cctgccccacagcat

SEQ ID NO: 630334 - DNA, 15 bp, Homo sapiens
ctgccccacagcatg

SEQ ID NO: 630335 - DNA, 15 bp, Homo sapiens
tgccccacagcatgg

SEQ ID NO: 630336 - DNA, 15 bp, Homo sapiens
gccccacagcatgga

SEQ ID NO: 630337 - DNA, 15 bp, Homo sapiens
ccccacagcatggaa

SEQ ID NO: 630338 - DNA, 15 bp, Homo sapiens
cccacagcatggaag

SEQ ID NO: 630339 - DNA, 15 bp, Homo sapiens
ccacagcatggaaga

SEQ ID NO: 630340 - DNA, 15 bp, Homo sapiens
cacagcatggaagaa

SEQ ID NO: 630341 - DNA, 15 bp, Homo sapiens
acagcatggaagaat

SEQ ID NO: 630342 - DNA, 15 bp, Homo sapiens
cagcatggaagaatg

SEQ ID NO: 630343 - DNA, 15 bp, Homo sapiens
agcatggaagaatgt

SEQ ID NO: 630344 - DNA, 15 bp, Homo sapiens
gcatggaagaatgtg

SEQ ID NO: 630345 - DNA, 15 bp, Homo sapiens
catggaagaatgtga

SEQ ID NO: 630346 - DNA, 15 bp, Homo sapiens
atggaagaatgtgag

SEQ ID NO: 630347 - DNA, 15 bp, Homo sapiens
tggaagaatgtgagg

SEQ ID NO: 630348 - DNA, 15 bp, Homo sapiens
ggaagaatgtgaggc

SEQ ID NO: 630349 - DNA, 15 bp, Homo sapiens
gaagaatgtgaggca

SEQ ID NO: 630350 - DNA, 15 bp, Homo sapiens
aagaatgtgaggcac

SEQ ID NO: 630351 - DNA, 15 bp, Homo sapiens
agaatgtgaggcact

SEQ ID NO: 630352 - DNA, 15 bp, Homo sapiens
gaatgtgaggcactg

SEQ ID NO: 630353 - DNA, 15 bp, Homo sapiens
aatgtgaggcactgt

SEQ ID NO: 630354 - DNA, 15 bp, Homo sapiens
atgtgaggcactgtg

SEQ ID NO: 630355 - DNA, 15 bp, Homo sapiens
tgtgaggcactgtgt

SEQ ID NO: 630356 - DNA, 15 bp, Homo sapiens
gtgaggcactgtgta

SEQ ID NO: 630357 - DNA, 15 bp, Homo sapiens
tgaggcactgtgtac

SEQ ID NO: 630358 - DNA, 15 bp, Homo sapiens
gaggcactgtgtacc

SEQ ID NO: 630359 - DNA, 15 bp, Homo sapiens
aggcactgtgtaccc

SEQ ID NO: 630360 - DNA, 15 bp, Homo sapiens
ggcactgtgtacccg

SEQ ID NO: 630361 - DNA, 15 bp, Homo sapiens
gcactgtgtacccgg

SEQ ID NO: 630362 - DNA, 15 bp, Homo sapiens
cactgtgtacccggc

SEQ ID NO: 630363 - DNA, 15 bp, Homo sapiens
actgtgtacccggct

SEQ ID NO: 630364 - DNA, 15 bp, Homo sapiens
ctgtgtacccggctg

SEQ ID NO: 630365 - DNA, 15 bp, Homo sapiens
tgtgtacccggctgg

SEQ ID NO: 630366 - DNA, 15 bp, Homo sapiens
gtgtacccggctggc

SEQ ID NO: 630367 - DNA, 15 bp, Homo sapiens
tgtacccggctggcc

SEQ ID NO: 630368 - DNA, 15 bp, Homo sapiens
gtacccggctggcca

SEQ ID NO: 630369 - DNA, 15 bp, Homo sapiens
tacccggctggccat

SEQ ID NO: 630370 - DNA, 15 bp, Homo sapiens
acccggctggccatc

SEQ ID NO: 630371 - DNA, 15 bp, Homo sapiens
cccggctggccatca

SEQ ID NO: 630372 - DNA, 15 bp, Homo sapiens
ccggctggccatcat

SEQ ID NO: 630373 - DNA, 15 bp, Homo sapiens
cggctggccatcatg

SEQ ID NO: 630374 - DNA, 15 bp, Homo sapiens
ggctggccatcatgg

SEQ ID NO: 630375 - DNA, 15 bp, Homo sapiens
gctggccatcatggt

SEQ ID NO: 630376 - DNA, 15 bp, Homo sapiens
ctggccatcatggta

SEQ ID NO: 630377 - DNA, 15 bp, Homo sapiens
tggccatcatggtaa

SEQ ID NO: 630378 - DNA, 15 bp, Homo sapiens
ggccatcatggtaaa

SEQ ID NO: 630379 - DNA, 15 bp, Homo sapiens
gccatcatggtaaag

SEQ ID NO: 630380 - DNA, 15 bp, Homo sapiens
ccatcatggtaaagg

SEQ ID NO: 630381 - DNA, 15 bp, Homo sapiens
catcatggtaaaggg

SEQ ID NO: 630382 - DNA, 15 bp, Homo sapiens
atcatggtaaagggc

SEQ ID NO: 630383 - DNA, 15 bp, Homo sapiens
tcatggtaaagggcg

SEQ ID NO: 630384 - DNA, 15 bp, Homo sapiens
catggtaaagggcgc

SEQ ID NO: 630385 - DNA, 15 bp, Homo sapiens
atggtaaagggcgcc

SEQ ID NO: 630386 - DNA, 15 bp, Homo sapiens
tggtaaagggcgcct

SEQ ID NO: 630387 - DNA, 15 bp, Homo sapiens
ggtaaagggcgcctt

SEQ ID NO: 630388 - DNA, 15 bp, Homo sapiens
gtaaagggcgccttt

SEQ ID NO: 630389 - DNA, 15 bp, Homo sapiens
taaagggcgcctttc

SEQ ID NO: 630390 - DNA, 15 bp, Homo sapiens
aaagggcgcctttcg

SEQ ID NO: 630391 - DNA, 15 bp, Homo sapiens
aagggcgcctttcga

SEQ ID NO: 630392 - DNA, 15 bp, Homo sapiens
agggcgcctttcgat

SEQ ID NO: 630393 - DNA, 15 bp, Homo sapiens
gggcgcctttcgatg

SEQ ID NO: 630394 - DNA, 15 bp, Homo sapiens
ggcgcctttcgatgt

SEQ ID NO: 630395 - DNA, 15 bp, Homo sapiens
gcgcctttcgatgta

SEQ ID NO: 630396 - DNA, 15 bp, Homo sapiens
cgcctttcgatgtat

SEQ ID NO: 630397 - DNA, 15 bp, Homo sapiens
gcctttcgatgtatg

SEQ ID NO: 630398 - DNA, 15 bp, Homo sapiens
cctttcgatgtatgg

SEQ ID NO: 630399 - DNA, 15 bp, Homo sapiens
ctttcgatgtatggg

SEQ ID NO: 630400 - DNA, 15 bp, Homo sapiens
tttcgatgtatgggc

SEQ ID NO: 630401 - DNA, 15 bp, Homo sapiens
ttcgatgtatgggca

SEQ ID NO: 630402 - DNA, 15 bp, Homo sapiens
tcgatgtatgggcac

SEQ ID NO: 630403 - DNA, 15 bp, Homo sapiens
cgatgtatgggcacc

SEQ ID NO: 630404 - DNA, 15 bp, Homo sapiens
gatgtatgggcacca

SEQ ID NO: 630405 - DNA, 15 bp, Homo sapiens
atgtatgggcaccat

SEQ ID NO: 630406 - DNA, 15 bp, Homo sapiens
tgtatgggcaccatt

SEQ ID NO: 630407 - DNA, 15 bp, Homo sapiens
gtatgggcaccattc

SEQ ID NO: 630408 - DNA, 15 bp, Homo sapiens
tatgggcaccattca

SEQ ID NO: 630409 - DNA, 15 bp, Homo sapiens
atgggcaccattcag

SEQ ID NO: 630410 - DNA, 15 bp, Homo sapiens
tgggcaccattcagc

SEQ ID NO: 630411 - DNA, 15 bp, Homo sapiens
gggcaccattcagca

SEQ ID NO: 630412 - DNA, 15 bp, Homo sapiens
ggcaccattcagcat

SEQ ID NO: 630413 - DNA, 15 bp, Homo sapiens
gcaccattcagcatc

SEQ ID NO: 630414 - DNA, 15 bp, Homo sapiens
caccattcagcatct

SEQ ID NO: 630415 - DNA, 15 bp, Homo sapiens
accattcagcatctc

SEQ ID NO: 630416 - DNA, 15 bp, Homo sapiens
ccattcagcatctca

SEQ ID NO: 630417 - DNA, 15 bp, Homo sapiens
cattcagcatctcaa

SEQ ID NO: 630418 - DNA, 15 bp, Homo sapiens
attcagcatctcaag

SEQ ID NO: 630419 - DNA, 15 bp, Homo sapiens
ttcagcatctcaagt

SEQ ID NO: 630420 - DNA, 15 bp, Homo sapiens
tcagcatctcaagtc

SEQ ID NO: 630421 - DNA, 15 bp, Homo sapiens
cagcatctcaagtcc

SEQ ID NO: 630422 - DNA, 15 bp, Homo sapiens
agcatctcaagtcca

SEQ ID NO: 630423 - DNA, 15 bp, Homo sapiens
gcatctcaagtccaa

SEQ ID NO: 630424 - DNA, 15 bp, Homo sapiens
catctcaagtccaag

SEQ ID NO: 630425 - DNA, 15 bp, Homo sapiens
atctcaagtccaagt

SEQ ID NO: 630426 - DNA, 15 bp, Homo sapiens
tctcaagtccaagta

SEQ ID NO: 630427 - DNA, 15 bp, Homo sapiens
ctcaagtccaagtaa

SEQ ID NO: 630428 - DNA, 15 bp, Homo sapiens
tcaagtccaagtaag

SEQ ID NO: 630429 - DNA, 15 bp, Homo sapiens
caagtccaagtaagc

SEQ ID NO: 630430 - DNA, 15 bp, Homo sapiens
aagtccaagtaagca

SEQ ID NO: 630431 - DNA, 15 bp, Homo sapiens
agtccaagtaagcag

SEQ ID NO: 630432 - DNA, 15 bp, Homo sapiens
gtccaagtaagcaga

SEQ ID NO: 630433 - DNA, 15 bp, Homo sapiens
tccaagtaagcagat

SEQ ID NO: 630434 - DNA, 15 bp, Homo sapiens
ccaagtaagcagatg

SEQ ID NO: 630435 - DNA, 15 bp, Homo sapiens
caagtaagcagatgg

SEQ ID NO: 630436 - DNA, 15 bp, Homo sapiens
aagtaagcagatggt

SEQ ID NO: 630437 - DNA, 15 bp, Homo sapiens
agtaagcagatggtg

SEQ ID NO: 630438 - DNA, 15 bp, Homo sapiens
gtaagcagatggtgg

SEQ ID NO: 630439 - DNA, 15 bp, Homo sapiens
taagcagatggtggg

SEQ ID NO: 630440 - DNA, 15 bp, Homo sapiens
aagcagatggtgggg

SEQ ID NO: 630441 - DNA, 15 bp, Homo sapiens
agcagatggtggggc

SEQ ID NO: 630442 - DNA, 15 bp, Homo sapiens
gcagatggtggggcg

SEQ ID NO: 630443 - DNA, 15 bp, Homo sapiens
cagatggtggggcgt

SEQ ID NO: 630444 - DNA, 15 bp, Homo sapiens
agatggtggggcgtg

SEQ ID NO: 630445 - DNA, 15 bp, Homo sapiens
gatggtggggcgtgc

SEQ ID NO: 630446 - DNA, 15 bp, Homo sapiens
atggtggggcgtgcc

SEQ ID NO: 630447 - DNA, 15 bp, Homo sapiens
tggtggggcgtgccc

SEQ ID NO: 630448 - DNA, 15 bp, Homo sapiens
ggtggggcgtgcccc

SEQ ID NO: 630449 - DNA, 15 bp, Homo sapiens
gtggggcgtgcccct

SEQ ID NO: 630450 - DNA, 15 bp, Homo sapiens
tggggcgtgcccctt

SEQ ID NO: 630451 - DNA, 15 bp, Homo sapiens
ggggcgtgccccttg

SEQ ID NO: 630452 - DNA, 15 bp, Homo sapiens
gggcgtgccccttgt

SEQ ID NO: 630453 - DNA, 15 bp, Homo sapiens
ggcgtgccccttgtt

SEQ ID NO: 630454 - DNA, 15 bp, Homo sapiens
gcgtgccccttgttg

SEQ ID NO: 630455 - DNA, 15 bp, Homo sapiens
cgtgccccttgttgc

SEQ ID NO: 630456 - DNA, 15 bp, Homo sapiens
gtgccccttgttgcc

SEQ ID NO: 630457 - DNA, 15 bp, Homo sapiens
tgccccttgttgcct

SEQ ID NO: 630458 - DNA, 15 bp, Homo sapiens
gccccttgttgcctt

SEQ ID NO: 630459 - DNA, 15 bp, Homo sapiens
ccccttgttgccttc

SEQ ID NO: 630460 - DNA, 15 bp, Homo sapiens
cccttgttgccttct

SEQ ID NO: 630461 - DNA, 15 bp, Homo sapiens
ccttgttgccttctg

SEQ ID NO: 630462 - DNA, 15 bp, Homo sapiens
cttgttgccttctgt

SEQ ID NO: 630463 - DNA, 15 bp, Homo sapiens
ttgttgccttctgtg

SEQ ID NO: 630464 - DNA, 15 bp, Homo sapiens
tgttgccttctgtgg

SEQ ID NO: 630465 - DNA, 15 bp, Homo sapiens
gttgccttctgtgga

SEQ ID NO: 630466 - DNA, 15 bp, Homo sapiens
ttgccttctgtggat

SEQ ID NO: 630467 - DNA, 15 bp, Homo sapiens
tgccttctgtggatc

SEQ ID NO: 630468 - DNA, 15 bp, Homo sapiens
gccttctgtggatcc

SEQ ID NO: 630469 - DNA, 15 bp, Homo sapiens
ccttctgtggatcca

SEQ ID NO: 630470 - DNA, 15 bp, Homo sapiens
cttctgtggatccac

SEQ ID NO: 630471 - DNA, 15 bp, Homo sapiens
ttctgtggatccacc

SEQ ID NO: 630472 - DNA, 15 bp, Homo sapiens
tctgtggatccacct

SEQ ID NO: 630473 - DNA, 15 bp, Homo sapiens
ctgtggatccacctg

SEQ ID NO: 630474 - DNA, 15 bp, Homo sapiens
tgtggatccacctgg

SEQ ID NO: 630475 - DNA, 15 bp, Homo sapiens
gtggatccacctgga

SEQ ID NO: 630476 - DNA, 15 bp, Homo sapiens
tggatccacctggat

SEQ ID NO: 630477 - DNA, 15 bp, Homo sapiens
ggatccacctggatc

SEQ ID NO: 630478 - DNA, 15 bp, Homo sapiens
gatccacctggatcc

SEQ ID NO: 630479 - DNA, 15 bp, Homo sapiens
atccacctggatcct

SEQ ID NO: 630480 - DNA, 15 bp, Homo sapiens
tccacctggatcctg

SEQ ID NO: 630481 - DNA, 15 bp, Homo sapiens
ccacctggatcctgt

SEQ ID NO: 630482 - DNA, 15 bp, Homo sapiens
cacctggatcctgtg

SEQ ID NO: 630483 - DNA, 15 bp, Homo sapiens
acctggatcctgtgt

SEQ ID NO: 630484 - DNA, 15 bp, Homo sapiens
cctggatcctgtgtt

SEQ ID NO: 630485 - DNA, 15 bp, Homo sapiens
ctggatcctgtgttc

SEQ ID NO: 630486 - DNA, 15 bp, Homo sapiens
tggatcctgtgttct

SEQ ID NO: 630487 - DNA, 15 bp, Homo sapiens
ggatcctgtgttctc

SEQ ID NO: 630488 - DNA, 15 bp, Homo sapiens
gatcctgtgttctcc

SEQ ID NO: 630489 - DNA, 15 bp, Homo sapiens
atcctgtgttctcca

SEQ ID NO: 630490 - DNA, 15 bp, Homo sapiens
tcctgtgttctccat

SEQ ID NO: 630491 - DNA, 15 bp, Homo sapiens
cctgtgttctccatt

SEQ ID NO: 630492 - DNA, 15 bp, Homo sapiens
ctgtgttctccattg

SEQ ID NO: 630493 - DNA, 15 bp, Homo sapiens
tgtgttctccattga

SEQ ID NO: 630494 - DNA, 15 bp, Homo sapiens
gtgttctccattgac

SEQ ID NO: 630495 - DNA, 15 bp, Homo sapiens
tgttctccattgaca

SEQ ID NO: 630496 - DNA, 15 bp, Homo sapiens
gttctccattgacac

SEQ ID NO: 630497 - DNA, 15 bp, Homo sapiens
ttctccattgacact

SEQ ID NO: 630498 - DNA, 15 bp, Homo sapiens
tctccattgacactt

SEQ ID NO: 630499 - DNA, 15 bp, Homo sapiens
ctccattgacacttg

SEQ ID NO: 630500 - DNA, 15 bp, Homo sapiens
tccattgacacttgg

SEQ ID NO: 630501 - DNA, 15 bp, Homo sapiens
ccattgacacttgga

SEQ ID NO: 630502 - DNA, 15 bp, Homo sapiens
cattgacacttggaa

SEQ ID NO: 630503 - DNA, 15 bp, Homo sapiens
attgacacttggaag

SEQ ID NO: 630504 - DNA, 15 bp, Homo sapiens
ttgacacttggaaga

SEQ ID NO: 630505 - DNA, 15 bp, Homo sapiens
tgacacttggaagag

SEQ ID NO: 630506 - DNA, 15 bp, Homo sapiens
gacacttggaagagt

SEQ ID NO: 630507 - DNA, 15 bp, Homo sapiens
acacttggaagagtc

SEQ ID NO: 630508 - DNA, 15 bp, Homo sapiens
cacttggaagagtcc

SEQ ID NO: 630509 - DNA, 15 bp, Homo sapiens
acttggaagagtcct

SEQ ID NO: 630510 - DNA, 15 bp, Homo sapiens
cttggaagagtcctg

SEQ ID NO: 630511 - DNA, 15 bp, Homo sapiens
ttggaagagtcctgc

SEQ ID NO: 630512 - DNA, 15 bp, Homo sapiens
tggaagagtcctgct

SEQ ID NO: 630513 - DNA, 15 bp, Homo sapiens
ggaagagtcctgctg

SEQ ID NO: 630514 - DNA, 15 bp, Homo sapiens
gaagagtcctgctgc

SEQ ID NO: 630515 - DNA, 15 bp, Homo sapiens
aagagtcctgctgct

SEQ ID NO: 630516 - DNA, 15 bp, Homo sapiens
agagtcctgctgctc

SEQ ID NO: 630517 - DNA, 15 bp, Homo sapiens
gagtcctgctgctcc

SEQ ID NO: 630518 - DNA, 15 bp, Homo sapiens
agtcctgctgctccg

SEQ ID NO: 630519 - DNA, 15 bp, Homo sapiens
gtcctgctgctccgt

SEQ ID NO: 630520 - DNA, 15 bp, Homo sapiens
tcctgctgctccgtc

SEQ ID NO: 630521 - DNA, 15 bp, Homo sapiens
cctgctgctccgtca

SEQ ID NO: 630522 - DNA, 15 bp, Homo sapiens
ctgctgctccgtcat

SEQ ID NO: 630523 - DNA, 15 bp, Homo sapiens
tgctgctccgtcatc

SEQ ID NO: 630524 - DNA, 15 bp, Homo sapiens
gctgctccgtcatcc

SEQ ID NO: 630525 - DNA, 15 bp, Homo sapiens
ctgctccgtcatccc

SEQ ID NO: 630526 - DNA, 15 bp, Homo sapiens
tgctccgtcatcccc

SEQ ID NO: 630527 - DNA, 15 bp, Homo sapiens
gctccgtcatcccct

SEQ ID NO: 630528 - DNA, 15 bp, Homo sapiens
ctccgtcatcccctg

SEQ ID NO: 630529 - DNA, 15 bp, Homo sapiens
tccgtcatcccctgg

SEQ ID NO: 630530 - DNA, 15 bp, Homo sapiens
ccgtcatcccctggg

SEQ ID NO: 630531 - DNA, 15 bp, Homo sapiens
cgtcatcccctgggg

SEQ ID NO: 630532 - DNA, 15 bp, Homo sapiens
gtcatcccctggggc

SEQ ID NO: 630533 - DNA, 15 bp, Homo sapiens
tcatcccctggggca

SEQ ID NO: 630534 - DNA, 15 bp, Homo sapiens
catcccctggggcag

SEQ ID NO: 630535 - DNA, 15 bp, Homo sapiens
atcccctggggcaga

SEQ ID NO: 630536 - DNA, 15 bp, Homo sapiens
tcccctggggcagag

SEQ ID NO: 630537 - DNA, 15 bp, Homo sapiens
cccctggggcagagg

SEQ ID NO: 630538 - DNA, 15 bp, Homo sapiens
ccctggggcagaggc

SEQ ID NO: 630539 - DNA, 15 bp, Homo sapiens
cctggggcagaggca

SEQ ID NO: 630540 - DNA, 15 bp, Homo sapiens
ctggggcagaggcag

SEQ ID NO: 630541 - DNA, 15 bp, Homo sapiens
tggggcagaggcagg

SEQ ID NO: 630542 - DNA, 15 bp, Homo sapiens
ggggcagaggcaggt

SEQ ID NO: 630543 - DNA, 15 bp, Homo sapiens
gggcagaggcaggtg

SEQ ID NO: 630544 - DNA, 15 bp, Homo sapiens
ggcagaggcaggtgg

SEQ ID NO: 630545 - DNA, 15 bp, Homo sapiens
gcagaggcaggtggt

SEQ ID NO: 630546 - DNA, 15 bp, Homo sapiens
cagaggcaggtggtg

SEQ ID NO: 630547 - DNA, 15 bp, Homo sapiens
agaggcaggtggtgg

SEQ ID NO: 630548 - DNA, 15 bp, Homo sapiens
gaggcaggtggtggc

SEQ ID NO: 630549 - DNA, 15 bp, Homo sapiens
aggcaggtggtggct

SEQ ID NO: 630550 - DNA, 15 bp, Homo sapiens
ggcaggtggtggctg

SEQ ID NO: 630551 - DNA, 15 bp, Homo sapiens
gcaggtggtggctgg

SEQ ID NO: 630552 - DNA, 15 bp, Homo sapiens
caggtggtggctggg

SEQ ID NO: 630553 - DNA, 15 bp, Homo sapiens
aggtggtggctgggc

SEQ ID NO: 630554 - DNA, 15 bp, Homo sapiens
ggtggtggctgggcc

SEQ ID NO: 630555 - DNA, 15 bp, Homo sapiens
gtggtggctgggcct

SEQ ID NO: 630556 - DNA, 15 bp, Homo sapiens
tggtggctgggcctc

SEQ ID NO: 630557 - DNA, 15 bp, Homo sapiens
ggtggctgggcctca

SEQ ID NO: 630558 - DNA, 15 bp, Homo sapiens
gtggctgggcctcat

SEQ ID NO: 630559 - DNA, 15 bp, Homo sapiens
tggctgggcctcatt

SEQ ID NO: 630560 - DNA, 15 bp, Homo sapiens
ggctgggcctcattc

SEQ ID NO: 630561 - DNA, 15 bp, Homo sapiens
gctgggcctcattct

SEQ ID NO: 630562 - DNA, 15 bp, Homo sapiens
ctgggcctcattctc

SEQ ID NO: 630563 - DNA, 15 bp, Homo sapiens
tgggcctcattctcc

SEQ ID NO: 630564 - DNA, 15 bp, Homo sapiens
gggcctcattctcca

SEQ ID NO: 630565 - DNA, 15 bp, Homo sapiens
ggcctcattctccag

SEQ ID NO: 630566 - DNA, 15 bp, Homo sapiens
gcctcattctccagc

SEQ ID NO: 630567 - DNA, 15 bp, Homo sapiens
cctcattctccagca

SEQ ID NO: 630568 - DNA, 15 bp, Homo sapiens
ctcattctccagcag

SEQ ID NO: 630569 - DNA, 15 bp, Homo sapiens
tcattctccagcagc

SEQ ID NO: 630570 - DNA, 15 bp, Homo sapiens
cattctccagcagca

SEQ ID NO: 630571 - DNA, 15 bp, Homo sapiens
attctccagcagcag

SEQ ID NO: 630572 - DNA, 15 bp, Homo sapiens
ttctccagcagcaga

SEQ ID NO: 630573 - DNA, 15 bp, Homo sapiens
tctccagcagcagat

SEQ ID NO: 630574 - DNA, 15 bp, Homo sapiens
ctccagcagcagatg

SEQ ID NO: 630575 - DNA, 15 bp, Homo sapiens
tccagcagcagatgg

SEQ ID NO: 630576 - DNA, 15 bp, Homo sapiens
ccagcagcagatgga

SEQ ID NO: 630577 - DNA, 15 bp, Homo sapiens
cagcagcagatggag

SEQ ID NO: 630578 - DNA, 15 bp, Homo sapiens
agcagcagatggaga

SEQ ID NO: 630579 - DNA, 15 bp, Homo sapiens
gcagcagatggagaa

SEQ ID NO: 630580 - DNA, 15 bp, Homo sapiens
cagcagatggagaag

SEQ ID NO: 630581 - DNA, 15 bp, Homo sapiens
agcagatggagaagg

SEQ ID NO: 630582 - DNA, 15 bp, Homo sapiens
gcagatggagaaggc

SEQ ID NO: 630583 - DNA, 15 bp, Homo sapiens
cagatggagaaggcc

SEQ ID NO: 630584 - DNA, 15 bp, Homo sapiens
agatggagaaggcca

SEQ ID NO: 630585 - DNA, 15 bp, Homo sapiens
gatggagaaggccat

SEQ ID NO: 630586 - DNA, 15 bp, Homo sapiens
atggagaaggccatc

SEQ ID NO: 630587 - DNA, 15 bp, Homo sapiens
tggagaaggccatca

SEQ ID NO: 630588 - DNA, 15 bp, Homo sapiens
ggagaaggccatcat

SEQ ID NO: 630589 - DNA, 15 bp, Homo sapiens
gagaaggccatcatg

SEQ ID NO: 630590 - DNA, 15 bp, Homo sapiens
agaaggccatcatgc

SEQ ID NO: 630591 - DNA, 15 bp, Homo sapiens
gaaggccatcatgct

SEQ ID NO: 630592 - DNA, 15 bp, Homo sapiens
aaggccatcatgctg

SEQ ID NO: 630593 - DNA, 15 bp, Homo sapiens
aggccatcatgctga

SEQ ID NO: 630594 - DNA, 15 bp, Homo sapiens
ggccatcatgctgat

SEQ ID NO: 630595 - DNA, 15 bp, Homo sapiens
gccatcatgctgata

SEQ ID NO: 630596 - DNA, 15 bp, Homo sapiens
ccatcatgctgataa

SEQ ID NO: 630597 - DNA, 15 bp, Homo sapiens
catcatgctgataag

SEQ ID NO: 630598 - DNA, 15 bp, Homo sapiens
atcatgctgataaga

SEQ ID NO: 630599 - DNA, 15 bp, Homo sapiens
tcatgctgataagaa

SEQ ID NO: 630600 - DNA, 15 bp, Homo sapiens
catgctgataagaaa

SEQ ID NO: 630601 - DNA, 15 bp, Homo sapiens
atgctgataagaaac

SEQ ID NO: 630602 - DNA, 15 bp, Homo sapiens
tgctgataagaaact

SEQ ID NO: 630603 - DNA, 15 bp, Homo sapiens
gctgataagaaactc

SEQ ID NO: 630604 - DNA, 15 bp, Homo sapiens
ctgataagaaactcc

SEQ ID NO: 630605 - DNA, 15 bp, Homo sapiens
tgataagaaactcct

SEQ ID NO: 630606 - DNA, 15 bp, Homo sapiens
gataagaaactcctc

SEQ ID NO: 630607 - DNA, 15 bp, Homo sapiens
ataagaaactcctct

SEQ ID NO: 630608 - DNA, 15 bp, Homo sapiens
taagaaactcctcta

SEQ ID NO: 630609 - DNA, 15 bp, Homo sapiens
aagaaactcctctat

SEQ ID NO: 630610 - DNA, 15 bp, Homo sapiens
agaaactcctctata

SEQ ID NO: 630611 - DNA, 15 bp, Homo sapiens
gaaactcctctatat

SEQ ID NO: 630612 - DNA, 15 bp, Homo sapiens
aaactcctctatatt

SEQ ID NO: 630613 - DNA, 15 bp, Homo sapiens
aactcctctatattg

SEQ ID NO: 630614 - DNA, 15 bp, Homo sapiens
actcctctatattgg

SEQ ID NO: 630615 - DNA, 15 bp, Homo sapiens
ctcctctatattggc

SEQ ID NO: 630616 - DNA, 15 bp, Homo sapiens
tcctctatattggcc

SEQ ID NO: 630617 - DNA, 15 bp, Homo sapiens
cctctatattggcct

SEQ ID NO: 630618 - DNA, 15 bp, Homo sapiens
ctctatattggccta

SEQ ID NO: 630619 - DNA, 15 bp, Homo sapiens
tctatattggcctaa

SEQ ID NO: 630620 - DNA, 15 bp, Homo sapiens
ctatattggcctaat

SEQ ID NO: 630621 - DNA, 15 bp, Homo sapiens
tatattggcctaatt

SEQ ID NO: 630622 - DNA, 15 bp, Homo sapiens
atattggcctaattt

SEQ ID NO: 630623 - DNA, 15 bp, Homo sapiens
tattggcctaatttc

SEQ ID NO: 630624 - DNA, 15 bp, Homo sapiens
attggcctaatttcc

SEQ ID NO: 630625 - DNA, 15 bp, Homo sapiens
ttggcctaatttcct

SEQ ID NO: 630626 - DNA, 15 bp, Homo sapiens
tggcctaatttcctg

SEQ ID NO: 630627 - DNA, 15 bp, Homo sapiens
ggcctaatttcctgt

SEQ ID NO: 630628 - DNA, 15 bp, Homo sapiens
gcctaatttcctgtg

SEQ ID NO: 630629 - DNA, 15 bp, Homo sapiens
cctaatttcctgtgg

SEQ ID NO: 630630 - DNA, 15 bp, Homo sapiens
ctaatttcctgtggt

SEQ ID NO: 630631 - DNA, 15 bp, Homo sapiens
taatttcctgtggtc

SEQ ID NO: 630632 - DNA, 15 bp, Homo sapiens
aatttcctgtggtcg

SEQ ID NO: 630633 - DNA, 15 bp, Homo sapiens
atttcctgtggtcga

SEQ ID NO: 630634 - DNA, 15 bp, Homo sapiens
tttcctgtggtcgaa

SEQ ID NO: 630635 - DNA, 15 bp, Homo sapiens
ttcctgtggtcgaag

SEQ ID NO: 630636 - DNA, 15 bp, Homo sapiens
tcctgtggtcgaaga

SEQ ID NO: 630637 - DNA, 15 bp, Homo sapiens
cctgtggtcgaagac

SEQ ID NO: 630638 - DNA, 15 bp, Homo sapiens
ctgtggtcgaagact

SEQ ID NO: 630639 - DNA, 15 bp, Homo sapiens
tgtggtcgaagactc

SEQ ID NO: 630640 - DNA, 15 bp, Homo sapiens
gtggtcgaagactcg

SEQ ID NO: 630641 - DNA, 15 bp, Homo sapiens
tggtcgaagactcgc

SEQ ID NO: 630642 - DNA, 15 bp, Homo sapiens
ggtcgaagactcgcc

SEQ ID NO: 630643 - DNA, 15 bp, Homo sapiens
gtcgaagactcgccc

SEQ ID NO: 630644 - DNA, 15 bp, Homo sapiens
tcgaagactcgccca

SEQ ID NO: 630645 - DNA, 15 bp, Homo sapiens
cgaagactcgcccaa

SEQ ID NO: 630646 - DNA, 15 bp, Homo sapiens
gaagactcgcccaag

SEQ ID NO: 630647 - DNA, 15 bp, Homo sapiens
aagactcgcccaagt

SEQ ID NO: 630648 - DNA, 15 bp, Homo sapiens
agactcgcccaagtc

SEQ ID NO: 630649 - DNA, 15 bp, Homo sapiens
gactcgcccaagtct

SEQ ID NO: 630650 - DNA, 15 bp, Homo sapiens
actcgcccaagtctc

SEQ ID NO: 630651 - DNA, 15 bp, Homo sapiens
ctcgcccaagtctct

SEQ ID NO: 630652 - DNA, 15 bp, Homo sapiens
tcgcccaagtctctg

SEQ ID NO: 630653 - DNA, 15 bp, Homo sapiens
cgcccaagtctctgg

SEQ ID NO: 630654 - DNA, 15 bp, Homo sapiens
gcccaagtctctgga

SEQ ID NO: 630655 - DNA, 15 bp, Homo sapiens
cccaagtctctggat

SEQ ID NO: 630656 - DNA, 15 bp, Homo sapiens
ccaagtctctggatg

SEQ ID NO: 630657 - DNA, 15 bp, Homo sapiens
caagtctctggatgg

SEQ ID NO: 630658 - DNA, 15 bp, Homo sapiens
aagtctctggatggg

SEQ ID NO: 630659 - DNA, 15 bp, Homo sapiens
agtctctggatgggg

SEQ ID NO: 630660 - DNA, 15 bp, Homo sapiens
gtctctggatggggc

SEQ ID NO: 630661 - DNA, 15 bp, Homo sapiens
tctctggatggggca

SEQ ID NO: 630662 - DNA, 15 bp, Homo sapiens
ctctggatggggcat

SEQ ID NO: 630663 - DNA, 15 bp, Homo sapiens
tctggatggggcatc

SEQ ID NO: 630664 - DNA, 15 bp, Homo sapiens
ctggatggggcatct

SEQ ID NO: 630665 - DNA, 15 bp, Homo sapiens
tggatggggcatctg

SEQ ID NO: 630666 - DNA, 15 bp, Homo sapiens
ggatggggcatctga

SEQ ID NO: 630667 - DNA, 15 bp, Homo sapiens
gatggggcatctgat

SEQ ID NO: 630668 - DNA, 15 bp, Homo sapiens
atggggcatctgatc

SEQ ID NO: 630669 - DNA, 15 bp, Homo sapiens
tggggcatctgatca

SEQ ID NO: 630670 - DNA, 15 bp, Homo sapiens
ggggcatctgatcag

SEQ ID NO: 630671 - DNA, 15 bp, Homo sapiens
gggcatctgatcagg

SEQ ID NO: 630672 - DNA, 15 bp, Homo sapiens
ggcatctgatcagga

SEQ ID NO: 630673 - DNA, 15 bp, Homo sapiens
gcatctgatcaggat

SEQ ID NO: 630674 - DNA, 15 bp, Homo sapiens
catctgatcaggatg

SEQ ID NO: 630675 - DNA, 15 bp, Homo sapiens
atctgatcaggatgc

SEQ ID NO: 630676 - DNA, 15 bp, Homo sapiens
tctgatcaggatgca

SEQ ID NO: 630677 - DNA, 15 bp, Homo sapiens
ctgatcaggatgcat

SEQ ID NO: 630678 - DNA, 15 bp, Homo sapiens
tgatcaggatgcatg

SEQ ID NO: 630679 - DNA, 15 bp, Homo sapiens
gatcaggatgcatgc

SEQ ID NO: 630680 - DNA, 15 bp, Homo sapiens
atcaggatgcatgca

SEQ ID NO: 630681 - DNA, 15 bp, Homo sapiens
tcaggatgcatgcag

SEQ ID NO: 630682 - DNA, 15 bp, Homo sapiens
caggatgcatgcaga

SEQ ID NO: 630683 - DNA, 15 bp, Homo sapiens
aggatgcatgcagag

SEQ ID NO: 630684 - DNA, 15 bp, Homo sapiens
ggatgcatgcagagc

SEQ ID NO: 630685 - DNA, 15 bp, Homo sapiens
gatgcatgcagagcc

SEQ ID NO: 630686 - DNA, 15 bp, Homo sapiens
atgcatgcagagcct

SEQ ID NO: 630687 - DNA, 15 bp, Homo sapiens
tgcatgcagagcctg

SEQ ID NO: 630688 - DNA, 15 bp, Homo sapiens
gcatgcagagcctgg

SEQ ID NO: 630689 - DNA, 15 bp, Homo sapiens
catgcagagcctggc

SEQ ID NO: 630690 - DNA, 15 bp, Homo sapiens
atgcagagcctggct

SEQ ID NO: 630691 - DNA, 15 bp, Homo sapiens
tgcagagcctggctg

SEQ ID NO: 630692 - DNA, 15 bp, Homo sapiens
gcagagcctggctgg

SEQ ID NO: 630693 - DNA, 15 bp, Homo sapiens
cagagcctggctggg

SEQ ID NO: 630694 - DNA, 15 bp, Homo sapiens
agagcctggctggga

SEQ ID NO: 630695 - DNA, 15 bp, Homo sapiens
gagcctggctgggat

SEQ ID NO: 630696 - DNA, 15 bp, Homo sapiens
agcctggctgggatg

SEQ ID NO: 630697 - DNA, 15 bp, Homo sapiens
gcctggctgggatga

SEQ ID NO: 630698 - DNA, 15 bp, Homo sapiens
cctggctgggatgag

SEQ ID NO: 630699 - DNA, 15 bp, Homo sapiens
ctggctgggatgagg

SEQ ID NO: 630700 - DNA, 15 bp, Homo sapiens
tggctgggatgaggg

SEQ ID NO: 630701 - DNA, 15 bp, Homo sapiens
ggctgggatgaggga

SEQ ID NO: 630702 - DNA, 15 bp, Homo sapiens
gctgggatgagggag

SEQ ID NO: 630703 - DNA, 15 bp, Homo sapiens
ctgggatgagggagg

SEQ ID NO: 630704 - DNA, 15 bp, Homo sapiens
tgggatgagggaggg

SEQ ID NO: 630705 - DNA, 15 bp, Homo sapiens
gggatgagggagggc

SEQ ID NO: 630706 - DNA, 15 bp, Homo sapiens
ggatgagggagggct

SEQ ID NO: 630707 - DNA, 15 bp, Homo sapiens
gatgagggagggctg

SEQ ID NO: 630708 - DNA, 15 bp, Homo sapiens
atgagggagggctgc

SEQ ID NO: 630709 - DNA, 15 bp, Homo sapiens
tgagggagggctgct

SEQ ID NO: 630710 - DNA, 15 bp, Homo sapiens
gagggagggctgcta

SEQ ID NO: 630711 - DNA, 15 bp, Homo sapiens
agggagggctgctac

SEQ ID NO: 630712 - DNA, 15 bp, Homo sapiens
gggagggctgctacc

SEQ ID NO: 630713 - DNA, 15 bp, Homo sapiens
ggagggctgctacca

SEQ ID NO: 630714 - DNA, 15 bp, Homo sapiens
gagggctgctaccac

SEQ ID NO: 630715 - DNA, 15 bp, Homo sapiens
agggctgctaccact

SEQ ID NO: 630716 - DNA, 15 bp, Homo sapiens
gggctgctaccactg

SEQ ID NO: 630717 - DNA, 15 bp, Homo sapiens
ggctgctaccactgc

SEQ ID NO: 630718 - DNA, 15 bp, Homo sapiens
gctgctaccactgcc

SEQ ID NO: 630719 - DNA, 15 bp, Homo sapiens
ctgctaccactgcct

SEQ ID NO: 630720 - DNA, 15 bp, Homo sapiens
tgctaccactgcctc

SEQ ID NO: 630721 - DNA, 15 bp, Homo sapiens
gctaccactgcctca

SEQ ID NO: 630722 - DNA, 15 bp, Homo sapiens
ctaccactgcctcaa

SEQ ID NO: 630723 - DNA, 15 bp, Homo sapiens
taccactgcctcaat

SEQ ID NO: 630724 - DNA, 15 bp, Homo sapiens
accactgcctcaata

SEQ ID NO: 630725 - DNA, 15 bp, Homo sapiens
ccactgcctcaatat

SEQ ID NO: 630726 - DNA, 15 bp, Homo sapiens
cactgcctcaatatt

SEQ ID NO: 630727 - DNA, 15 bp, Homo sapiens
actgcctcaatattt

SEQ ID NO: 630728 - DNA, 15 bp, Homo sapiens
ctgcctcaatatttc

SEQ ID NO: 630729 - DNA, 15 bp, Homo sapiens
tgcctcaatatttca

SEQ ID NO: 630730 - DNA, 15 bp, Homo sapiens
gcctcaatatttcac

SEQ ID NO: 630731 - DNA, 15 bp, Homo sapiens
cctcaatatttcacc

SEQ ID NO: 630732 - DNA, 15 bp, Homo sapiens
ctcaatatttcacca

SEQ ID NO: 630733 - DNA, 15 bp, Homo sapiens
tcaatatttcaccac

SEQ ID NO: 630734 - DNA, 15 bp, Homo sapiens
caatatttcaccact

SEQ ID NO: 630735 - DNA, 15 bp, Homo sapiens
aatatttcaccactt

SEQ ID NO: 630736 - DNA, 15 bp, Homo sapiens
atatttcaccactta

SEQ ID NO: 630737 - DNA, 15 bp, Homo sapiens
tatttcaccacttat

SEQ ID NO: 630738 - DNA, 15 bp, Homo sapiens
atttcaccacttatc

SEQ ID NO: 630739 - DNA, 15 bp, Homo sapiens
tttcaccacttatct

SEQ ID NO: 630740 - DNA, 15 bp, Homo sapiens
ttcaccacttatctc

SEQ ID NO: 630741 - DNA, 15 bp, Homo sapiens
tcaccacttatctca

SEQ ID NO: 630742 - DNA, 15 bp, Homo sapiens
caccacttatctcaa

SEQ ID NO: 630743 - DNA, 15 bp, Homo sapiens
accacttatctcaac

SEQ ID NO: 630744 - DNA, 15 bp, Homo sapiens
ccacttatctcaaca

SEQ ID NO: 630745 - DNA, 15 bp, Homo sapiens
cacttatctcaacag

SEQ ID NO: 630746 - DNA, 15 bp, Homo sapiens
acttatctcaacaga

SEQ ID NO: 630747 - DNA, 15 bp, Homo sapiens
cttatctcaacagat

SEQ ID NO: 630748 - DNA, 15 bp, Homo sapiens
ttatctcaacagatc

SEQ ID NO: 630749 - DNA, 15 bp, Homo sapiens
tatctcaacagatcc

SEQ ID NO: 630750 - DNA, 15 bp, Homo sapiens
atctcaacagatccg

SEQ ID NO: 630751 - DNA, 15 bp, Homo sapiens
tctcaacagatccgg

SEQ ID NO: 630752 - DNA, 15 bp, Homo sapiens
ctcaacagatccggg

SEQ ID NO: 630753 - DNA, 15 bp, Homo sapiens
tcaacagatccggga

SEQ ID NO: 630754 - DNA, 15 bp, Homo sapiens
caacagatccgggac

SEQ ID NO: 630755 - DNA, 15 bp, Homo sapiens
aacagatccgggacc

SEQ ID NO: 630756 - DNA, 15 bp, Homo sapiens
acagatccgggacct

SEQ ID NO: 630757 - DNA, 15 bp, Homo sapiens
cagatccgggacctg

SEQ ID NO: 630758 - DNA, 15 bp, Homo sapiens
agatccgggacctgt

SEQ ID NO: 630759 - DNA, 15 bp, Homo sapiens
gatccgggacctgtg

SEQ ID NO: 630760 - DNA, 15 bp, Homo sapiens
atccgggacctgtgg

SEQ ID NO: 630761 - DNA, 15 bp, Homo sapiens
tccgggacctgtggc

SEQ ID NO: 630762 - DNA, 15 bp, Homo sapiens
ccgggacctgtggcc

SEQ ID NO: 630763 - DNA, 15 bp, Homo sapiens
cgggacctgtggcct

SEQ ID NO: 630764 - DNA, 15 bp, Homo sapiens
gggacctgtggccta

SEQ ID NO: 630765 - DNA, 15 bp, Homo sapiens
ggacctgtggcctat

SEQ ID NO: 630766 - DNA, 15 bp, Homo sapiens
gacctgtggcctatt

SEQ ID NO: 630767 - DNA, 15 bp, Homo sapiens
acctgtggcctattt

SEQ ID NO: 630768 - DNA, 15 bp, Homo sapiens
cctgtggcctattta

SEQ ID NO: 630769 - DNA, 15 bp, Homo sapiens
ctgtggcctatttac

SEQ ID NO: 630770 - DNA, 15 bp, Homo sapiens
tgtggcctatttact

SEQ ID NO: 630771 - DNA, 15 bp, Homo sapiens
gtggcctatttacta

SEQ ID NO: 630772 - DNA, 15 bp, Homo sapiens
tggcctatttactaa

SEQ ID NO: 630773 - DNA, 15 bp, Homo sapiens
ggcctatttactaag

SEQ ID NO: 630774 - DNA, 15 bp, Homo sapiens
gcctatttactaaga

SEQ ID NO: 630775 - DNA, 15 bp, Homo sapiens
cctatttactaagag

SEQ ID NO: 630776 - DNA, 15 bp, Homo sapiens
ctatttactaagagt

SEQ ID NO: 630777 - DNA, 15 bp, Homo sapiens
tatttactaagagtc

SEQ ID NO: 630778 - DNA, 15 bp, Homo sapiens
atttactaagagtcc

SEQ ID NO: 630779 - DNA, 15 bp, Homo sapiens
tttactaagagtcca

SEQ ID NO: 630780 - DNA, 15 bp, Homo sapiens
ttactaagagtccac

SEQ ID NO: 630781 - DNA, 15 bp, Homo sapiens
tactaagagtccact

SEQ ID NO: 630782 - DNA, 15 bp, Homo sapiens
actaagagtccactc

SEQ ID NO: 630783 - DNA, 15 bp, Homo sapiens
ctaagagtccactcc

SEQ ID NO: 630784 - DNA, 15 bp, Homo sapiens
taagagtccactcca

SEQ ID NO: 630785 - DNA, 15 bp, Homo sapiens
aagagtccactccaa

SEQ ID NO: 630786 - DNA, 15 bp, Homo sapiens
agagtccactccaat

SEQ ID NO: 630787 - DNA, 15 bp, Homo sapiens
gagtccactccaatg

SEQ ID NO: 630788 - DNA, 15 bp, Homo sapiens
agtccactccaatgt

SEQ ID NO: 630789 - DNA, 15 bp, Homo sapiens
gtccactccaatgta

SEQ ID NO: 630790 - DNA, 15 bp, Homo sapiens
tccactccaatgtag

SEQ ID NO: 630791 - DNA, 15 bp, Homo sapiens
ccactccaatgtagg

SEQ ID NO: 630792 - DNA, 15 bp, Homo sapiens
cactccaatgtagga

SEQ ID NO: 630793 - DNA, 15 bp, Homo sapiens
actccaatgtaggaa

SEQ ID NO: 630794 - DNA, 15 bp, Homo sapiens
ctccaatgtaggaat

SEQ ID NO: 630795 - DNA, 15 bp, Homo sapiens
tccaatgtaggaatg

SEQ ID NO: 630796 - DNA, 15 bp, Homo sapiens
ccaatgtaggaatgg

SEQ ID NO: 630797 - DNA, 15 bp, Homo sapiens
caatgtaggaatggt

SEQ ID NO: 630798 - DNA, 15 bp, Homo sapiens
aatgtaggaatggtt

SEQ ID NO: 630799 - DNA, 15 bp, Homo sapiens
atgtaggaatggtta

SEQ ID NO: 630800 - DNA, 15 bp, Homo sapiens
tgtaggaatggttag

SEQ ID NO: 630801 - DNA, 15 bp, Homo sapiens
gtaggaatggttagg

SEQ ID NO: 630802 - DNA, 15 bp, Homo sapiens
taggaatggttagga

SEQ ID NO: 630803 - DNA, 15 bp, Homo sapiens
aggaatggttaggag

SEQ ID NO: 630804 - DNA, 15 bp, Homo sapiens
ggaatggttaggaga

SEQ ID NO: 630805 - DNA, 15 bp, Homo sapiens
gaatggttaggagac

SEQ ID NO: 630806 - DNA, 15 bp, Homo sapiens
aatggttaggagacc

SEQ ID NO: 630807 - DNA, 15 bp, Homo sapiens
atggttaggagacca

SEQ ID NO: 630808 - DNA, 15 bp, Homo sapiens
tggttaggagaccaa

SEQ ID NO: 630809 - DNA, 15 bp, Homo sapiens
ggttaggagaccaac

SEQ ID NO: 630810 - DNA, 15 bp, Homo sapiens
gttaggagaccaact

SEQ ID NO: 630811 - DNA, 15 bp, Homo sapiens
ttaggagaccaactg

SEQ ID NO: 630812 - DNA, 15 bp, Homo sapiens
taggagaccaactga

SEQ ID NO: 630813 - DNA, 15 bp, Homo sapiens
aggagaccaactgac

SEQ ID NO: 630814 - DNA, 15 bp, Homo sapiens
ggagaccaactgact

SEQ ID NO: 630815 - DNA, 15 bp, Homo sapiens
gagaccaactgactt

SEQ ID NO: 630816 - DNA, 15 bp, Homo sapiens
agaccaactgacttg

SEQ ID NO: 630817 - DNA, 15 bp, Homo sapiens
gaccaactgacttga

SEQ ID NO: 630818 - DNA, 15 bp, Homo sapiens
accaactgacttgag

SEQ ID NO: 630819 - DNA, 15 bp, Homo sapiens
ccaactgacttgagg

SEQ ID NO: 630820 - DNA, 15 bp, Homo sapiens
caactgacttgagga

SEQ ID NO: 630821 - DNA, 15 bp, Homo sapiens
aactgacttgaggac

SEQ ID NO: 630822 - DNA, 15 bp, Homo sapiens
actgacttgaggacc

SEQ ID NO: 630823 - DNA, 15 bp, Homo sapiens
ctgacttgaggaccc

SEQ ID NO: 630824 - DNA, 15 bp, Homo sapiens
tgacttgaggaccca

SEQ ID NO: 630825 - DNA, 15 bp, Homo sapiens
gacttgaggacccat

SEQ ID NO: 630826 - DNA, 15 bp, Homo sapiens
acttgaggacccatc

SEQ ID NO: 630827 - DNA, 15 bp, Homo sapiens
cttgaggacccatct

SEQ ID NO: 630828 - DNA, 15 bp, Homo sapiens
ttgaggacccatctt

SEQ ID NO: 630829 - DNA, 15 bp, Homo sapiens
tgaggacccatcttt

SEQ ID NO: 630830 - DNA, 15 bp, Homo sapiens
gaggacccatctttg

SEQ ID NO: 630831 - DNA, 15 bp, Homo sapiens
aggacccatctttgt

SEQ ID NO: 630832 - DNA, 15 bp, Homo sapiens
ggacccatctttgtt

SEQ ID NO: 630833 - DNA, 15 bp, Homo sapiens
gacccatctttgttt

SEQ ID NO: 630834 - DNA, 15 bp, Homo sapiens
acccatctttgtttt

SEQ ID NO: 630835 - DNA, 15 bp, Homo sapiens
cccatctttgttttt

SEQ ID NO: 630836 - DNA, 15 bp, Homo sapiens
ccatctttgttttta

SEQ ID NO: 630837 - DNA, 15 bp, Homo sapiens
catctttgtttttag

SEQ ID NO: 630838 - DNA, 15 bp, Homo sapiens
atctttgtttttaga

SEQ ID NO: 630839 - DNA, 15 bp, Homo sapiens
tctttgtttttagaa

SEQ ID NO: 630840 - DNA, 15 bp, Homo sapiens
ctttgtttttagaat

SEQ ID NO: 630841 - DNA, 15 bp, Homo sapiens
tttgtttttagaata

SEQ ID NO: 630842 - DNA, 15 bp, Homo sapiens
ttgtttttagaatat

SEQ ID NO: 630843 - DNA, 15 bp, Homo sapiens
tgtttttagaatatt

SEQ ID NO: 630844 - DNA, 15 bp, Homo sapiens
gtttttagaatattg

SEQ ID NO: 630845 - DNA, 15 bp, Homo sapiens
tttttagaatattgt

SEQ ID NO: 630846 - DNA, 15 bp, Homo sapiens
ttttagaatattgta

SEQ ID NO: 630847 - DNA, 15 bp, Homo sapiens
tttagaatattgtat

SEQ ID NO: 630848 - DNA, 15 bp, Homo sapiens
ttagaatattgtatg

SEQ ID NO: 630849 - DNA, 15 bp, Homo sapiens
tagaatattgtatgc

SEQ ID NO: 630850 - DNA, 15 bp, Homo sapiens
agaatattgtatgct

SEQ ID NO: 630851 - DNA, 15 bp, Homo sapiens
gaatattgtatgctt

SEQ ID NO: 630852 - DNA, 15 bp, Homo sapiens
aatattgtatgcttt

SEQ ID NO: 630853 - DNA, 15 bp, Homo sapiens
atattgtatgctttt

SEQ ID NO: 630854 - DNA, 15 bp, Homo sapiens
tattgtatgcttttg

SEQ ID NO: 630855 - DNA, 15 bp, Homo sapiens
attgtatgcttttga

SEQ ID NO: 630856 - DNA, 15 bp, Homo sapiens
ttgtatgcttttgag

SEQ ID NO: 630857 - DNA, 15 bp, Homo sapiens
tgtatgcttttgagt

SEQ ID NO: 630858 - DNA, 15 bp, Homo sapiens
gtatgcttttgagtt

SEQ ID NO: 630859 - DNA, 15 bp, Homo sapiens
tatgcttttgagttt

SEQ ID NO: 630860 - DNA, 15 bp, Homo sapiens
atgcttttgagtttg

SEQ ID NO: 630861 - DNA, 15 bp, Homo sapiens
tgcttttgagtttga

SEQ ID NO: 630862 - DNA, 15 bp, Homo sapiens
gcttttgagtttgaa

SEQ ID NO: 630863 - DNA, 15 bp, Homo sapiens
cttttgagtttgaaa

SEQ ID NO: 630864 - DNA, 15 bp, Homo sapiens
ttttgagtttgaaaa

SEQ ID NO: 630865 - DNA, 15 bp, Homo sapiens
tttgagtttgaaaaa

SEQ ID NO: 630866 - DNA, 15 bp, Homo sapiens
ttgagtttgaaaaaa

SEQ ID NO: 630867 - DNA, 15 bp, Homo sapiens
tgagtttgaaaaaag

SEQ ID NO: 630868 - DNA, 15 bp, Homo sapiens
gagtttgaaaaaaga

SEQ ID NO: 630869 - DNA, 15 bp, Homo sapiens
agtttgaaaaaagac

SEQ ID NO: 630870 - DNA, 15 bp, Homo sapiens
gtttgaaaaaagacc

SEQ ID NO: 630871 - DNA, 15 bp, Homo sapiens
tttgaaaaaagacca

SEQ ID NO: 630872 - DNA, 15 bp, Homo sapiens
ttgaaaaaagaccat

SEQ ID NO: 630873 - DNA, 15 bp, Homo sapiens
tgaaaaaagaccata

SEQ ID NO: 630874 - DNA, 15 bp, Homo sapiens
gaaaaaagaccatat

SEQ ID NO: 630875 - DNA, 15 bp, Homo sapiens
aaaaaagaccatatg

SEQ ID NO: 630876 - DNA, 15 bp, Homo sapiens
aaaaagaccatatgt

SEQ ID NO: 630877 - DNA, 15 bp, Homo sapiens
aaaagaccatatgtt

SEQ ID NO: 630878 - DNA, 15 bp, Homo sapiens
aaagaccatatgtta

SEQ ID NO: 630879 - DNA, 15 bp, Homo sapiens
aagaccatatgttat

SEQ ID NO: 630880 - DNA, 15 bp, Homo sapiens
agaccatatgttata

SEQ ID NO: 630881 - DNA, 15 bp, Homo sapiens
gaccatatgttatat

SEQ ID NO: 630882 - DNA, 15 bp, Homo sapiens
accatatgttatatg

SEQ ID NO: 630883 - DNA, 15 bp, Homo sapiens
ccatatgttatatga

SEQ ID NO: 630884 - DNA, 15 bp, Homo sapiens
catatgttatatgac

SEQ ID NO: 630885 - DNA, 15 bp, Homo sapiens
atatgttatatgaca

SEQ ID NO: 630886 - DNA, 15 bp, Homo sapiens
tatgttatatgacaa

SEQ ID NO: 630887 - DNA, 15 bp, Homo sapiens
atgttatatgacaaa

SEQ ID NO: 630888 - DNA, 15 bp, Homo sapiens
tgttatatgacaaac

SEQ ID NO: 630889 - DNA, 15 bp, Homo sapiens
gttatatgacaaacc

SEQ ID NO: 630890 - DNA, 15 bp, Homo sapiens
ttatatgacaaacca

SEQ ID NO: 630891 - DNA, 15 bp, Homo sapiens
tatatgacaaaccaa

SEQ ID NO: 630892 - DNA, 15 bp, Homo sapiens
atatgacaaaccaac

SEQ ID NO: 630893 - DNA, 15 bp, Homo sapiens
tatgacaaaccaaca

SEQ ID NO: 630894 - DNA, 15 bp, Homo sapiens
atgacaaaccaacaa

SEQ ID NO: 630895 - DNA, 15 bp, Homo sapiens
tgacaaaccaacaat

SEQ ID NO: 630896 - DNA, 15 bp, Homo sapiens
gacaaaccaacaatg

SEQ ID NO: 630897 - DNA, 15 bp, Homo sapiens
acaaaccaacaatgg

SEQ ID NO: 630898 - DNA, 15 bp, Homo sapiens
caaaccaacaatggc

SEQ ID NO: 630899 - DNA, 15 bp, Homo sapiens
aaaccaacaatggca

SEQ ID NO: 630900 - DNA, 15 bp, Homo sapiens
aaccaacaatggcag

SEQ ID NO: 630901 - DNA, 15 bp, Homo sapiens
accaacaatggcagt

SEQ ID NO: 630902 - DNA, 15 bp, Homo sapiens
ccaacaatggcagta

SEQ ID NO: 630903 - DNA, 15 bp, Homo sapiens
caacaatggcagtaa

SEQ ID NO: 630904 - DNA, 15 bp, Homo sapiens
aacaatggcagtaat

SEQ ID NO: 630905 - DNA, 15 bp, Homo sapiens
acaatggcagtaatc

SEQ ID NO: 630906 - DNA, 15 bp, Homo sapiens
caatggcagtaatct

SEQ ID NO: 630907 - DNA, 15 bp, Homo sapiens
aatggcagtaatctt

SEQ ID NO: 630908 - DNA, 15 bp, Homo sapiens
atggcagtaatcttg

SEQ ID NO: 630909 - DNA, 15 bp, Homo sapiens
tggcagtaatcttga

SEQ ID NO: 630910 - DNA, 15 bp, Homo sapiens
ggcagtaatcttgaa

SEQ ID NO: 630911 - DNA, 15 bp, Homo sapiens
gcagtaatcttgaat

SEQ ID NO: 630912 - DNA, 15 bp, Homo sapiens
cagtaatcttgaata

SEQ ID NO: 630913 - DNA, 15 bp, Homo sapiens
agtaatcttgaatag

SEQ ID NO: 630914 - DNA, 15 bp, Homo sapiens
gtaatcttgaatagg

SEQ ID NO: 630915 - DNA, 15 bp, Homo sapiens
taatcttgaatagga

SEQ ID NO: 630916 - DNA, 15 bp, Homo sapiens
aatcttgaataggat

SEQ ID NO: 630917 - DNA, 15 bp, Homo sapiens
atcttgaataggatt

SEQ ID NO: 630918 - DNA, 15 bp, Homo sapiens
tcttgaataggatta

SEQ ID NO: 630919 - DNA, 15 bp, Homo sapiens
cttgaataggattat

SEQ ID NO: 630920 - DNA, 15 bp, Homo sapiens
ttgaataggattatc

SEQ ID NO: 630921 - DNA, 15 bp, Homo sapiens
tgaataggattatcc

SEQ ID NO: 630922 - DNA, 15 bp, Homo sapiens
gaataggattatcct

SEQ ID NO: 630923 - DNA, 15 bp, Homo sapiens
aataggattatcctt

SEQ ID NO: 630924 - DNA, 15 bp, Homo sapiens
ataggattatcctta

SEQ ID NO: 630925 - DNA, 15 bp, Homo sapiens
taggattatccttat

SEQ ID NO: 630926 - DNA, 15 bp, Homo sapiens
aggattatccttatc

SEQ ID NO: 630927 - DNA, 15 bp, Homo sapiens
ggattatccttatcc

SEQ ID NO: 630928 - DNA, 15 bp, Homo sapiens
gattatccttatcct

SEQ ID NO: 630929 - DNA, 15 bp, Homo sapiens
attatccttatcctg

SEQ ID NO: 630930 - DNA, 15 bp, Homo sapiens
ttatccttatcctgt

SEQ ID NO: 630931 - DNA, 15 bp, Homo sapiens
tatccttatcctgta

SEQ ID NO: 630932 - DNA, 15 bp, Homo sapiens
atccttatcctgtac

SEQ ID NO: 630933 - DNA, 15 bp, Homo sapiens
tccttatcctgtacc

SEQ ID NO: 630934 - DNA, 15 bp, Homo sapiens
ccttatcctgtaccc

SEQ ID NO: 630935 - DNA, 15 bp, Homo sapiens
cttatcctgtaccca

SEQ ID NO: 630936 - DNA, 15 bp, Homo sapiens
ttatcctgtacccac

SEQ ID NO: 630937 - DNA, 15 bp, Homo sapiens
tatcctgtacccaca

SEQ ID NO: 630938 - DNA, 15 bp, Homo sapiens
atcctgtacccacac

SEQ ID NO: 630939 - DNA, 15 bp, Homo sapiens
tcctgtacccacaca

SEQ ID NO: 630940 - DNA, 15 bp, Homo sapiens
cctgtacccacacat

SEQ ID NO: 630941 - DNA, 15 bp, Homo sapiens
ctgtacccacacatt

SEQ ID NO: 630942 - DNA, 15 bp, Homo sapiens
tgtacccacacattg

SEQ ID NO: 630943 - DNA, 15 bp, Homo sapiens
gtacccacacattgt

SEQ ID NO: 630944 - DNA, 15 bp, Homo sapiens
tacccacacattgta

SEQ ID NO: 630945 - DNA, 15 bp, Homo sapiens
acccacacattgtaa

SEQ ID NO: 630946 - DNA, 15 bp, Homo sapiens
cccacacattgtaaa

SEQ ID NO: 630947 - DNA, 15 bp, Homo sapiens
ccacacattgtaaac

SEQ ID NO: 630948 - DNA, 15 bp, Homo sapiens
cacacattgtaaact

SEQ ID NO: 630949 - DNA, 15 bp, Homo sapiens
acacattgtaaacta

SEQ ID NO: 630950 - DNA, 15 bp, Homo sapiens
cacattgtaaactat

SEQ ID NO: 630951 - DNA, 15 bp, Homo sapiens
acattgtaaactatt

SEQ ID NO: 630952 - DNA, 15 bp, Homo sapiens
cattgtaaactattg

SEQ ID NO: 630953 - DNA, 15 bp, Homo sapiens
attgtaaactattgt

SEQ ID NO: 630954 - DNA, 15 bp, Homo sapiens
ttgtaaactattgta

SEQ ID NO: 630955 - DNA, 15 bp, Homo sapiens
tgtaaactattgtag

SEQ ID NO: 630956 - DNA, 15 bp, Homo sapiens
gtaaactattgtaga

SEQ ID NO: 630957 - DNA, 15 bp, Homo sapiens
taaactattgtagat

SEQ ID NO: 630958 - DNA, 15 bp, Homo sapiens
aaactattgtagata

SEQ ID NO: 630959 - DNA, 15 bp, Homo sapiens
aactattgtagataa

SEQ ID NO: 630960 - DNA, 15 bp, Homo sapiens
actattgtagataat

SEQ ID NO: 630961 - DNA, 15 bp, Homo sapiens
ctattgtagataatt

SEQ ID NO: 630962 - DNA, 15 bp, Homo sapiens
tattgtagataattc

SEQ ID NO: 630963 - DNA, 15 bp, Homo sapiens
attgtagataattcc

SEQ ID NO: 630964 - DNA, 15 bp, Homo sapiens
ttgtagataattcct

SEQ ID NO: 630965 - DNA, 15 bp, Homo sapiens
tgtagataattcctt

SEQ ID NO: 630966 - DNA, 15 bp, Homo sapiens
gtagataattcctta

SEQ ID NO: 630967 - DNA, 15 bp, Homo sapiens
tagataattccttat

SEQ ID NO: 630968 - DNA, 15 bp, Homo sapiens
agataattccttatt

SEQ ID NO: 630969 - DNA, 15 bp, Homo sapiens
gataattccttatta

SEQ ID NO: 630970 - DNA, 15 bp, Homo sapiens
ataattccttattat

SEQ ID NO: 630971 - DNA, 15 bp, Homo sapiens
taattccttattatt

SEQ ID NO: 630972 - DNA, 15 bp, Homo sapiens
aattccttattatta

SEQ ID NO: 630973 - DNA, 15 bp, Homo sapiens
attccttattattaa

SEQ ID NO: 630974 - DNA, 15 bp, Homo sapiens
ttccttattattaag

SEQ ID NO: 630975 - DNA, 15 bp, Homo sapiens
tccttattattaaga

SEQ ID NO: 630976 - DNA, 15 bp, Homo sapiens
ccttattattaagag

SEQ ID NO: 630977 - DNA, 15 bp, Homo sapiens
cttattattaagagt

SEQ ID NO: 630978 - DNA, 15 bp, Homo sapiens
ttattattaagagtt

SEQ ID NO: 630979 - DNA, 15 bp, Homo sapiens
tattattaagagttt

SEQ ID NO: 630980 - DNA, 15 bp, Homo sapiens
attattaagagtttg

SEQ ID NO: 630981 - DNA, 15 bp, Homo sapiens
ttattaagagtttgc

SEQ ID NO: 630982 - DNA, 15 bp, Homo sapiens
tattaagagtttgca

SEQ ID NO: 630983 - DNA, 15 bp, Homo sapiens
attaagagtttgcat

SEQ ID NO: 630984 - DNA, 15 bp, Homo sapiens
ttaagagtttgcatg

SEQ ID NO: 630985 - DNA, 15 bp, Homo sapiens
taagagtttgcatgc

SEQ ID NO: 630986 - DNA, 15 bp, Homo sapiens
aagagtttgcatgcc

SEQ ID NO: 630987 - DNA, 15 bp, Homo sapiens
agagtttgcatgcca

SEQ ID NO: 630988 - DNA, 15 bp, Homo sapiens
gagtttgcatgccaa

SEQ ID NO: 630989 - DNA, 15 bp, Homo sapiens
agtttgcatgccaaa

SEQ ID NO: 630990 - DNA, 15 bp, Homo sapiens
gtttgcatgccaaag

SEQ ID NO: 630991 - DNA, 15 bp, Homo sapiens
tttgcatgccaaagc

SEQ ID NO: 630992 - DNA, 15 bp, Homo sapiens
ttgcatgccaaagct

SEQ ID NO: 630993 - DNA, 15 bp, Homo sapiens
tgcatgccaaagcta

SEQ ID NO: 630994 - DNA, 15 bp, Homo sapiens
gcatgccaaagctaa

SEQ ID NO: 630995 - DNA, 15 bp, Homo sapiens
catgccaaagctaac

SEQ ID NO: 630996 - DNA, 15 bp, Homo sapiens
atgccaaagctaaca

SEQ ID NO: 630997 - DNA, 15 bp, Homo sapiens
tgccaaagctaacag

SEQ ID NO: 630998 - DNA, 15 bp, Homo sapiens
gccaaagctaacagt

SEQ ID NO: 630999 - DNA, 15 bp, Homo sapiens
ccaaagctaacagtt

SEQ ID NO: 631000 - DNA, 15 bp, Homo sapiens
caaagctaacagttt

SEQ ID NO: 631001 - DNA, 15 bp, Homo sapiens
aaagctaacagttta

SEQ ID NO: 631002 - DNA, 15 bp, Homo sapiens
aagctaacagtttaa

SEQ ID NO: 631003 - DNA, 15 bp, Homo sapiens
agctaacagtttaag

SEQ ID NO: 631004 - DNA, 15 bp, Homo sapiens
gctaacagtttaaga

SEQ ID NO: 631005 - DNA, 15 bp, Homo sapiens
ctaacagtttaagat

SEQ ID NO: 631006 - DNA, 15 bp, Homo sapiens
taacagtttaagatt

SEQ ID NO: 631007 - DNA, 15 bp, Homo sapiens
aacagtttaagatta

SEQ ID NO: 631008 - DNA, 15 bp, Homo sapiens
acagtttaagattat

SEQ ID NO: 631009 - DNA, 15 bp, Homo sapiens
cagtttaagattatc

SEQ ID NO: 631010 - DNA, 15 bp, Homo sapiens
agtttaagattatca

SEQ ID NO: 631011 - DNA, 15 bp, Homo sapiens
gtttaagattatcag

SEQ ID NO: 631012 - DNA, 15 bp, Homo sapiens
tttaagattatcagc

SEQ ID NO: 631013 - DNA, 15 bp, Homo sapiens
ttaagattatcagca

SEQ ID NO: 631014 - DNA, 15 bp, Homo sapiens
taagattatcagcat

SEQ ID NO: 631015 - DNA, 15 bp, Homo sapiens
aagattatcagcata

SEQ ID NO: 631016 - DNA, 15 bp, Homo sapiens
agattatcagcatat

SEQ ID NO: 631017 - DNA, 15 bp, Homo sapiens
gattatcagcatatt

SEQ ID NO: 631018 - DNA, 15 bp, Homo sapiens
attatcagcatattg

SEQ ID NO: 631019 - DNA, 15 bp, Homo sapiens
ttatcagcatattgc

SEQ ID NO: 631020 - DNA, 15 bp, Homo sapiens
tatcagcatattgcc

SEQ ID NO: 631021 - DNA, 15 bp, Homo sapiens
atcagcatattgccg

SEQ ID NO: 631022 - DNA, 15 bp, Homo sapiens
tcagcatattgccgt

SEQ ID NO: 631023 - DNA, 15 bp, Homo sapiens
cagcatattgccgtg

SEQ ID NO: 631024 - DNA, 15 bp, Homo sapiens
agcatattgccgtgc

SEQ ID NO: 631025 - DNA, 15 bp, Homo sapiens
gcatattgccgtgct

SEQ ID NO: 631026 - DNA, 15 bp, Homo sapiens
catattgccgtgctc

SEQ ID NO: 631027 - DNA, 15 bp, Homo sapiens
atattgccgtgctca

SEQ ID NO: 631028 - DNA, 15 bp, Homo sapiens
tattgccgtgctcat

SEQ ID NO: 631029 - DNA, 15 bp, Homo sapiens
attgccgtgctcatt

SEQ ID NO: 631030 - DNA, 15 bp, Homo sapiens
ttgccgtgctcattc

SEQ ID NO: 631031 - DNA, 15 bp, Homo sapiens
tgccgtgctcattca

SEQ ID NO: 631032 - DNA, 15 bp, Homo sapiens
gccgtgctcattcac

SEQ ID NO: 631033 - DNA, 15 bp, Homo sapiens
ccgtgctcattcacg

SEQ ID NO: 631034 - DNA, 15 bp, Homo sapiens
cgtgctcattcacgt

SEQ ID NO: 631035 - DNA, 15 bp, Homo sapiens
gtgctcattcacgtt

SEQ ID NO: 631036 - DNA, 15 bp, Homo sapiens
tgctcattcacgttc

SEQ ID NO: 631037 - DNA, 15 bp, Homo sapiens
gctcattcacgttct

SEQ ID NO: 631038 - DNA, 15 bp, Homo sapiens
ctcattcacgttctg

SEQ ID NO: 631039 - DNA, 15 bp, Homo sapiens
tcattcacgttctga

SEQ ID NO: 631040 - DNA, 15 bp, Homo sapiens
cattcacgttctgat

SEQ ID NO: 631041 - DNA, 15 bp, Homo sapiens
attcacgttctgata

SEQ ID NO: 631042 - DNA, 15 bp, Homo sapiens
ttcacgttctgatat

SEQ ID NO: 631043 - DNA, 15 bp, Homo sapiens
tcacgttctgatatg

SEQ ID NO: 631044 - DNA, 15 bp, Homo sapiens
cacgttctgatatgc

SEQ ID NO: 631045 - DNA, 15 bp, Homo sapiens
acgttctgatatgct

SEQ ID NO: 631046 - DNA, 15 bp, Homo sapiens
cgttctgatatgctt

SEQ ID NO: 631047 - DNA, 15 bp, Homo sapiens
gttctgatatgcttt

SEQ ID NO: 631048 - DNA, 15 bp, Homo sapiens
ttctgatatgcttta

SEQ ID NO: 631049 - DNA, 15 bp, Homo sapiens
tctgatatgctttat

SEQ ID NO: 631050 - DNA, 15 bp, Homo sapiens
ctgatatgctttata

SEQ ID NO: 631051 - DNA, 15 bp, Homo sapiens
tgatatgctttataa

SEQ ID NO: 631052 - DNA, 15 bp, Homo sapiens
gatatgctttataac

SEQ ID NO: 631053 - DNA, 15 bp, Homo sapiens
atatgctttataacc

SEQ ID NO: 631054 - DNA, 15 bp, Homo sapiens
tatgctttataacct

SEQ ID NO: 631055 - DNA, 15 bp, Homo sapiens
atgctttataaccta

SEQ ID NO: 631056 - DNA, 15 bp, Homo sapiens
tgctttataacctag

SEQ ID NO: 631057 - DNA, 15 bp, Homo sapiens
gctttataacctaga

SEQ ID NO: 631058 - DNA, 15 bp, Homo sapiens
ctttataacctagaa

SEQ ID NO: 631059 - DNA, 15 bp, Homo sapiens
tttataacctagaaa

SEQ ID NO: 631060 - DNA, 15 bp, Homo sapiens
ttataacctagaaaa

SEQ ID NO: 631061 - DNA, 15 bp, Homo sapiens
tataacctagaaaag

SEQ ID NO: 631062 - DNA, 15 bp, Homo sapiens
ataacctagaaaaga

SEQ ID NO: 631063 - DNA, 15 bp, Homo sapiens
taacctagaaaagag

SEQ ID NO: 631064 - DNA, 15 bp, Homo sapiens
aacctagaaaagagc

SEQ ID NO: 631065 - DNA, 15 bp, Homo sapiens
acctagaaaagagca

SEQ ID NO: 631066 - DNA, 15 bp, Homo sapiens
cctagaaaagagcag

SEQ ID NO: 631067 - DNA, 15 bp, Homo sapiens
ctagaaaagagcaga

SEQ ID NO: 631068 - DNA, 15 bp, Homo sapiens
tagaaaagagcagag

SEQ ID NO: 631069 - DNA, 15 bp, Homo sapiens
agaaaagagcagagt

SEQ ID NO: 631070 - DNA, 15 bp, Homo sapiens
gaaaagagcagagtt

SEQ ID NO: 631071 - DNA, 15 bp, Homo sapiens
aaaagagcagagtta

SEQ ID NO: 631072 - DNA, 15 bp, Homo sapiens
aaagagcagagttac

SEQ ID NO: 631073 - DNA, 15 bp, Homo sapiens
aagagcagagttaca

SEQ ID NO: 631074 - DNA, 15 bp, Homo sapiens
agagcagagttacaa

SEQ ID NO: 631075 - DNA, 15 bp, Homo sapiens
gagcagagttacaat

SEQ ID NO: 631076 - DNA, 15 bp, Homo sapiens
agcagagttacaatt

SEQ ID NO: 631077 - DNA, 15 bp, Homo sapiens
gcagagttacaatta

SEQ ID NO: 631078 - DNA, 15 bp, Homo sapiens
cagagttacaattac

SEQ ID NO: 631079 - DNA, 15 bp, Homo sapiens
agagttacaattact

SEQ ID NO: 631080 - DNA, 15 bp, Homo sapiens
gagttacaattactc

SEQ ID NO: 631081 - DNA, 15 bp, Homo sapiens
agttacaattactca

SEQ ID NO: 631082 - DNA, 15 bp, Homo sapiens
gttacaattactcat

SEQ ID NO: 631083 - DNA, 15 bp, Homo sapiens
ttacaattactcatt

SEQ ID NO: 631084 - DNA, 15 bp, Homo sapiens
tacaattactcattt

SEQ ID NO: 631085 - DNA, 15 bp, Homo sapiens
acaattactcattta

SEQ ID NO: 631086 - DNA, 15 bp, Homo sapiens
caattactcatttat

SEQ ID NO: 631087 - DNA, 15 bp, Homo sapiens
aattactcatttatt

SEQ ID NO: 631088 - DNA, 15 bp, Homo sapiens
attactcatttattt

SEQ ID NO: 631089 - DNA, 15 bp, Homo sapiens
ttactcatttattta

SEQ ID NO: 631090 - DNA, 15 bp, Homo sapiens
tactcatttatttaa

SEQ ID NO: 631091 - DNA, 15 bp, Homo sapiens
actcatttatttaac

SEQ ID NO: 631092 - DNA, 15 bp, Homo sapiens
ctcatttatttaaca

SEQ ID NO: 631093 - DNA, 15 bp, Homo sapiens
tcatttatttaacaa

SEQ ID NO: 631094 - DNA, 15 bp, Homo sapiens
catttatttaacaaa

SEQ ID NO: 631095 - DNA, 15 bp, Homo sapiens
atttatttaacaaac

SEQ ID NO: 631096 - DNA, 15 bp, Homo sapiens
tttatttaacaaaca

SEQ ID NO: 631097 - DNA, 15 bp, Homo sapiens
ttatttaacaaacac

SEQ ID NO: 631098 - DNA, 15 bp, Homo sapiens
tatttaacaaacact

SEQ ID NO: 631099 - DNA, 15 bp, Homo sapiens
atttaacaaacactt

SEQ ID NO: 631100 - DNA, 15 bp, Homo sapiens
tttaacaaacactta

SEQ ID NO: 631101 - DNA, 15 bp, Homo sapiens
ttaacaaacacttat

SEQ ID NO: 631102 - DNA, 15 bp, Homo sapiens
taacaaacacttatt

SEQ ID NO: 631103 - DNA, 15 bp, Homo sapiens
aacaaacacttatta

SEQ ID NO: 631104 - DNA, 15 bp, Homo sapiens
acaaacacttattaa

SEQ ID NO: 631105 - DNA, 15 bp, Homo sapiens
caaacacttattaag

SEQ ID NO: 631106 - DNA, 15 bp, Homo sapiens
aaacacttattaaga

SEQ ID NO: 631107 - DNA, 15 bp, Homo sapiens
aacacttattaagag

SEQ ID NO: 631108 - DNA, 15 bp, Homo sapiens
acacttattaagagc

SEQ ID NO: 631109 - DNA, 15 bp, Homo sapiens
cacttattaagagct

SEQ ID NO: 631110 - DNA, 15 bp, Homo sapiens
acttattaagagctc

SEQ ID NO: 631111 - DNA, 15 bp, Homo sapiens
cttattaagagctca

SEQ ID NO: 631112 - DNA, 15 bp, Homo sapiens
ttattaagagctcag

SEQ ID NO: 631113 - DNA, 15 bp, Homo sapiens
tattaagagctcaga

SEQ ID NO: 631114 - DNA, 15 bp, Homo sapiens
attaagagctcagaa

SEQ ID NO: 631115 - DNA, 15 bp, Homo sapiens
ttaagagctcagaat

SEQ ID NO: 631116 - DNA, 15 bp, Homo sapiens
taagagctcagaata

SEQ ID NO: 631117 - DNA, 15 bp, Homo sapiens
aagagctcagaatat

SEQ ID NO: 631118 - DNA, 15 bp, Homo sapiens
agagctcagaatata

SEQ ID NO: 631119 - DNA, 15 bp, Homo sapiens
gagctcagaatataa

SEQ ID NO: 631120 - DNA, 15 bp, Homo sapiens
agctcagaatataag

SEQ ID NO: 631121 - DNA, 15 bp, Homo sapiens
gctcagaatataagt

SEQ ID NO: 631122 - DNA, 15 bp, Homo sapiens
ctcagaatataagtc

SEQ ID NO: 631123 - DNA, 15 bp, Homo sapiens
tcagaatataagtca

SEQ ID NO: 631124 - DNA, 15 bp, Homo sapiens
cagaatataagtcac

SEQ ID NO: 631125 - DNA, 15 bp, Homo sapiens
agaatataagtcact

SEQ ID NO: 631126 - DNA, 15 bp, Homo sapiens
gaatataagtcacta

SEQ ID NO: 631127 - DNA, 15 bp, Homo sapiens
aatataagtcactaa

SEQ ID NO: 631128 - DNA, 15 bp, Homo sapiens
atataagtcactaag

SEQ ID NO: 631129 - DNA, 15 bp, Homo sapiens
tataagtcactaagc

SEQ ID NO: 631130 - DNA, 15 bp, Homo sapiens
ataagtcactaagct

SEQ ID NO: 631131 - DNA, 15 bp, Homo sapiens
taagtcactaagctg

SEQ ID NO: 631132 - DNA, 15 bp, Homo sapiens
aagtcactaagctgg

SEQ ID NO: 631133 - DNA, 15 bp, Homo sapiens
agtcactaagctggt

SEQ ID NO: 631134 - DNA, 15 bp, Homo sapiens
gtcactaagctggtt

SEQ ID NO: 631135 - DNA, 15 bp, Homo sapiens
tcactaagctggttg

SEQ ID NO: 631136 - DNA, 15 bp, Homo sapiens
cactaagctggttgg

SEQ ID NO: 631137 - DNA, 15 bp, Homo sapiens
actaagctggttggt

SEQ ID NO: 631138 - DNA, 15 bp, Homo sapiens
ctaagctggttggtg

SEQ ID NO: 631139 - DNA, 15 bp, Homo sapiens
taagctggttggtgg

SEQ ID NO: 631140 - DNA, 15 bp, Homo sapiens
aagctggttggtggg

SEQ ID NO: 631141 - DNA, 15 bp, Homo sapiens
agctggttggtggga

SEQ ID NO: 631142 - DNA, 15 bp, Homo sapiens
gctggttggtgggag

SEQ ID NO: 631143 - DNA, 15 bp, Homo sapiens
ctggttggtgggagg

SEQ ID NO: 631144 - DNA, 15 bp, Homo sapiens
tggttggtgggagga

SEQ ID NO: 631145 - DNA, 15 bp, Homo sapiens
ggttggtgggaggaa

SEQ ID NO: 631146 - DNA, 15 bp, Homo sapiens
gttggtgggaggaac

SEQ ID NO: 631147 - DNA, 15 bp, Homo sapiens
ttggtgggaggaaca

SEQ ID NO: 631148 - DNA, 15 bp, Homo sapiens
tggtgggaggaacag

SEQ ID NO: 631149 - DNA, 15 bp, Homo sapiens
ggtgggaggaacagc

SEQ ID NO: 631150 - DNA, 15 bp, Homo sapiens
gtgggaggaacagca

SEQ ID NO: 631151 - DNA, 15 bp, Homo sapiens
tgggaggaacagcac

SEQ ID NO: 631152 - DNA, 15 bp, Homo sapiens
gggaggaacagcaca

SEQ ID NO: 631153 - DNA, 15 bp, Homo sapiens
ggaggaacagcacat

SEQ ID NO: 631154 - DNA, 15 bp, Homo sapiens
gaggaacagcacata

SEQ ID NO: 631155 - DNA, 15 bp, Homo sapiens
aggaacagcacataa

SEQ ID NO: 631156 - DNA, 15 bp, Homo sapiens
ggaacagcacataac

SEQ ID NO: 631157 - DNA, 15 bp, Homo sapiens
gaacagcacataacc

SEQ ID NO: 631158 - DNA, 15 bp, Homo sapiens
aacagcacataaccc

SEQ ID NO: 631159 - DNA, 15 bp, Homo sapiens
acagcacataaccca

SEQ ID NO: 631160 - DNA, 15 bp, Homo sapiens
cagcacataacccac

SEQ ID NO: 631161 - DNA, 15 bp, Homo sapiens
agcacataacccacc

SEQ ID NO: 631162 - DNA, 15 bp, Homo sapiens
gcacataacccacct

SEQ ID NO: 631163 - DNA, 15 bp, Homo sapiens
cacataacccacctt

SEQ ID NO: 631164 - DNA, 15 bp, Homo sapiens
acataacccacctta

SEQ ID NO: 631165 - DNA, 15 bp, Homo sapiens
cataacccaccttat

SEQ ID NO: 631166 - DNA, 15 bp, Homo sapiens
ataacccaccttatc

SEQ ID NO: 631167 - DNA, 15 bp, Homo sapiens
taacccaccttatct

SEQ ID NO: 631168 - DNA, 15 bp, Homo sapiens
aacccaccttatcta

SEQ ID NO: 631169 - DNA, 15 bp, Homo sapiens
acccaccttatctat

SEQ ID NO: 631170 - DNA, 15 bp, Homo sapiens
cccaccttatctatg

SEQ ID NO: 631171 - DNA, 15 bp, Homo sapiens
ccaccttatctatgc

SEQ ID NO: 631172 - DNA, 15 bp, Homo sapiens
caccttatctatgct

SEQ ID NO: 631173 - DNA, 15 bp, Homo sapiens
accttatctatgctg

SEQ ID NO: 631174 - DNA, 15 bp, Homo sapiens
ccttatctatgctga

SEQ ID NO: 631175 - DNA, 15 bp, Homo sapiens
cttatctatgctgag

SEQ ID NO: 631176 - DNA, 15 bp, Homo sapiens
ttatctatgctgagg

SEQ ID NO: 631177 - DNA, 15 bp, Homo sapiens
tatctatgctgaggt

SEQ ID NO: 631178 - DNA, 15 bp, Homo sapiens
atctatgctgaggtg

SEQ ID NO: 631179 - DNA, 15 bp, Homo sapiens
tctatgctgaggtgc

SEQ ID NO: 631180 - DNA, 15 bp, Homo sapiens
ctatgctgaggtgca

SEQ ID NO: 631181 - DNA, 15 bp, Homo sapiens
tatgctgaggtgcat

SEQ ID NO: 631182 - DNA, 15 bp, Homo sapiens
atgctgaggtgcata

SEQ ID NO: 631183 - DNA, 15 bp, Homo sapiens
tgctgaggtgcataa

SEQ ID NO: 631184 - DNA, 15 bp, Homo sapiens
gctgaggtgcataat

SEQ ID NO: 631185 - DNA, 15 bp, Homo sapiens
ctgaggtgcataatc

SEQ ID NO: 631186 - DNA, 15 bp, Homo sapiens
tgaggtgcataatcc

SEQ ID NO: 631187 - DNA, 15 bp, Homo sapiens
gaggtgcataatcct

SEQ ID NO: 631188 - DNA, 15 bp, Homo sapiens
aggtgcataatcctg

SEQ ID NO: 631189 - DNA, 15 bp, Homo sapiens
ggtgcataatcctga

SEQ ID NO: 631190 - DNA, 15 bp, Homo sapiens
gtgcataatcctgat

SEQ ID NO: 631191 - DNA, 15 bp, Homo sapiens
tgcataatcctgatg

SEQ ID NO: 631192 - DNA, 15 bp, Homo sapiens
gcataatcctgatgc

SEQ ID NO: 631193 - DNA, 15 bp, Homo sapiens
cataatcctgatgca

SEQ ID NO: 631194 - DNA, 15 bp, Homo sapiens
ataatcctgatgcac

SEQ ID NO: 631195 - DNA, 15 bp, Homo sapiens
taatcctgatgcacc

SEQ ID NO: 631196 - DNA, 15 bp, Homo sapiens
aatcctgatgcaccc

SEQ ID NO: 631197 - DNA, 15 bp, Homo sapiens
atcctgatgcaccca

SEQ ID NO: 631198 - DNA, 15 bp, Homo sapiens
tcctgatgcacccac

SEQ ID NO: 631199 - DNA, 15 bp, Homo sapiens
cctgatgcacccaca

SEQ ID NO: 631200 - DNA, 15 bp, Homo sapiens
ctgatgcacccacag

SEQ ID NO: 631201 - DNA, 15 bp, Homo sapiens
tgatgcacccacagg

SEQ ID NO: 631202 - DNA, 15 bp, Homo sapiens
gatgcacccacagga

SEQ ID NO: 631203 - DNA, 15 bp, Homo sapiens
atgcacccacaggag

SEQ ID NO: 631204 - DNA, 15 bp, Homo sapiens
tgcacccacaggagg

SEQ ID NO: 631205 - DNA, 15 bp, Homo sapiens
gcacccacaggaggg

SEQ ID NO: 631206 - DNA, 15 bp, Homo sapiens
cacccacaggagggt

SEQ ID NO: 631207 - DNA, 15 bp, Homo sapiens
acccacaggagggtg

SEQ ID NO: 631208 - DNA, 15 bp, Homo sapiens
cccacaggagggtgt

SEQ ID NO: 631209 - DNA, 15 bp, Homo sapiens
ccacaggagggtgtt

SEQ ID NO: 631210 - DNA, 15 bp, Homo sapiens
cacaggagggtgtta

SEQ ID NO: 631211 - DNA, 15 bp, Homo sapiens
acaggagggtgttac

SEQ ID NO: 631212 - DNA, 15 bp, Homo sapiens
caggagggtgttaca

SEQ ID NO: 631213 - DNA, 15 bp, Homo sapiens
aggagggtgttacac

SEQ ID NO: 631214 - DNA, 15 bp, Homo sapiens
ggagggtgttacaca

SEQ ID NO: 631215 - DNA, 15 bp, Homo sapiens
gagggtgttacacag

SEQ ID NO: 631216 - DNA, 15 bp, Homo sapiens
agggtgttacacaga

SEQ ID NO: 631217 - DNA, 15 bp, Homo sapiens
gggtgttacacagaa

SEQ ID NO: 631218 - DNA, 15 bp, Homo sapiens
ggtgttacacagaag

SEQ ID NO: 631219 - DNA, 15 bp, Homo sapiens
gtgttacacagaaga

SEQ ID NO: 631220 - DNA, 15 bp, Homo sapiens
tgttacacagaagat

SEQ ID NO: 631221 - DNA, 15 bp, Homo sapiens
gttacacagaagatg

SEQ ID NO: 631222 - DNA, 15 bp, Homo sapiens
ttacacagaagatgt

SEQ ID NO: 631223 - DNA, 15 bp, Homo sapiens
tacacagaagatgtc

SEQ ID NO: 631224 - DNA, 15 bp, Homo sapiens
acacagaagatgtca

SEQ ID NO: 631225 - DNA, 15 bp, Homo sapiens
cacagaagatgtcat

SEQ ID NO: 631226 - DNA, 15 bp, Homo sapiens
acagaagatgtcatc

SEQ ID NO: 631227 - DNA, 15 bp, Homo sapiens
cagaagatgtcatcc

SEQ ID NO: 631228 - DNA, 15 bp, Homo sapiens
agaagatgtcatcct

SEQ ID NO: 631229 - DNA, 15 bp, Homo sapiens
gaagatgtcatcctt

SEQ ID NO: 631230 - DNA, 15 bp, Homo sapiens
aagatgtcatccttt

SEQ ID NO: 631231 - DNA, 15 bp, Homo sapiens
agatgtcatcctttc

SEQ ID NO: 631232 - DNA, 15 bp, Homo sapiens
gatgtcatcctttca

SEQ ID NO: 631233 - DNA, 15 bp, Homo sapiens
atgtcatcctttcat

SEQ ID NO: 631234 - DNA, 15 bp, Homo sapiens
tgtcatcctttcata

SEQ ID NO: 631235 - DNA, 15 bp, Homo sapiens
gtcatcctttcatat

SEQ ID NO: 631236 - DNA, 15 bp, Homo sapiens
tcatcctttcatatg

SEQ ID NO: 631237 - DNA, 15 bp, Homo sapiens
catcctttcatatgt

SEQ ID NO: 631238 - DNA, 15 bp, Homo sapiens
atcctttcatatgtg

SEQ ID NO: 631239 - DNA, 15 bp, Homo sapiens
tcctttcatatgtgt

SEQ ID NO: 631240 - DNA, 15 bp, Homo sapiens
cctttcatatgtgtc

SEQ ID NO: 631241 - DNA, 15 bp, Homo sapiens
ctttcatatgtgtca

SEQ ID NO: 631242 - DNA, 15 bp, Homo sapiens
tttcatatgtgtcag

SEQ ID NO: 631243 - DNA, 15 bp, Homo sapiens
ttcatatgtgtcaga

SEQ ID NO: 631244 - DNA, 15 bp, Homo sapiens
tcatatgtgtcagag

SEQ ID NO: 631245 - DNA, 15 bp, Homo sapiens
catatgtgtcagagc

SEQ ID NO: 631246 - DNA, 15 bp, Homo sapiens
atatgtgtcagagca

SEQ ID NO: 631247 - DNA, 15 bp, Homo sapiens
tatgtgtcagagcag

SEQ ID NO: 631248 - DNA, 15 bp, Homo sapiens
atgtgtcagagcaga

SEQ ID NO: 631249 - DNA, 15 bp, Homo sapiens
tgtgtcagagcagat

SEQ ID NO: 631250 - DNA, 15 bp, Homo sapiens
gtgtcagagcagata

SEQ ID NO: 631251 - DNA, 15 bp, Homo sapiens
tgtcagagcagataa

SEQ ID NO: 631252 - DNA, 15 bp, Homo sapiens
gtcagagcagataaa

SEQ ID NO: 631253 - DNA, 15 bp, Homo sapiens
tcagagcagataaat

SEQ ID NO: 631254 - DNA, 15 bp, Homo sapiens
cagagcagataaata

SEQ ID NO: 631255 - DNA, 15 bp, Homo sapiens
agagcagataaataa

SEQ ID NO: 631256 - DNA, 15 bp, Homo sapiens
gagcagataaataat

SEQ ID NO: 631257 - DNA, 15 bp, Homo sapiens
agcagataaataatt

SEQ ID NO: 631258 - DNA, 15 bp, Homo sapiens
gcagataaataattg

SEQ ID NO: 631259 - DNA, 15 bp, Homo sapiens
cagataaataattga

SEQ ID NO: 631260 - DNA, 15 bp, Homo sapiens
agataaataattgag

SEQ ID NO: 631261 - DNA, 15 bp, Homo sapiens
gataaataattgaga

SEQ ID NO: 631262 - DNA, 15 bp, Homo sapiens
ataaataattgagag

SEQ ID NO: 631263 - DNA, 15 bp, Homo sapiens
taaataattgagaga

SEQ ID NO: 631264 - DNA, 15 bp, Homo sapiens
aaataattgagagaa

SEQ ID NO: 631265 - DNA, 15 bp, Homo sapiens
aataattgagagaaa

SEQ ID NO: 631266 - DNA, 15 bp, Homo sapiens
ataattgagagaaag

SEQ ID NO: 631267 - DNA, 15 bp, Homo sapiens
taattgagagaaagg

SEQ ID NO: 631268 - DNA, 15 bp, Homo sapiens
aattgagagaaaggt

SEQ ID NO: 631269 - DNA, 15 bp, Homo sapiens
attgagagaaaggtc

SEQ ID NO: 631270 - DNA, 15 bp, Homo sapiens
ttgagagaaaggtct

SEQ ID NO: 631271 - DNA, 15 bp, Homo sapiens
tgagagaaaggtcta

SEQ ID NO: 631272 - DNA, 15 bp, Homo sapiens
gagagaaaggtctaa

SEQ ID NO: 631273 - DNA, 15 bp, Homo sapiens
agagaaaggtctaat

SEQ ID NO: 631274 - DNA, 15 bp, Homo sapiens
gagaaaggtctaata

SEQ ID NO: 631275 - DNA, 15 bp, Homo sapiens
agaaaggtctaatag

SEQ ID NO: 631276 - DNA, 15 bp, Homo sapiens
gaaaggtctaataga

SEQ ID NO: 631277 - DNA, 15 bp, Homo sapiens
aaaggtctaatagat

SEQ ID NO: 631278 - DNA, 15 bp, Homo sapiens
aaggtctaatagatt

SEQ ID NO: 631279 - DNA, 15 bp, Homo sapiens
aggtctaatagatta

SEQ ID NO: 631280 - DNA, 15 bp, Homo sapiens
ggtctaatagattag

SEQ ID NO: 631281 - DNA, 15 bp, Homo sapiens
gtctaatagattagc

SEQ ID NO: 631282 - DNA, 15 bp, Homo sapiens
tctaatagattagct

SEQ ID NO: 631283 - DNA, 15 bp, Homo sapiens
ctaatagattagctg

SEQ ID NO: 631284 - DNA, 15 bp, Homo sapiens
taatagattagctgc

SEQ ID NO: 631285 - DNA, 15 bp, Homo sapiens
aatagattagctgct

SEQ ID NO: 631286 - DNA, 15 bp, Homo sapiens
atagattagctgctt

SEQ ID NO: 631287 - DNA, 15 bp, Homo sapiens
tagattagctgcttg

SEQ ID NO: 631288 - DNA, 15 bp, Homo sapiens
agattagctgcttgt

SEQ ID NO: 631289 - DNA, 15 bp, Homo sapiens
gattagctgcttgtg

SEQ ID NO: 631290 - DNA, 15 bp, Homo sapiens
attagctgcttgtgg

SEQ ID NO: 631291 - DNA, 15 bp, Homo sapiens
ttagctgcttgtggc

SEQ ID NO: 631292 - DNA, 15 bp, Homo sapiens
tagctgcttgtggca

SEQ ID NO: 631293 - DNA, 15 bp, Homo sapiens
agctgcttgtggcaa

SEQ ID NO: 631294 - DNA, 15 bp, Homo sapiens
gctgcttgtggcaag

SEQ ID NO: 631295 - DNA, 15 bp, Homo sapiens
ctgcttgtggcaagt

SEQ ID NO: 631296 - DNA, 15 bp, Homo sapiens
tgcttgtggcaagtg

SEQ ID NO: 631297 - DNA, 15 bp, Homo sapiens
gcttgtggcaagtgg

SEQ ID NO: 631298 - DNA, 15 bp, Homo sapiens
cttgtggcaagtgga

SEQ ID NO: 631299 - DNA, 15 bp, Homo sapiens
ttgtggcaagtggac

SEQ ID NO: 631300 - DNA, 15 bp, Homo sapiens
tgtggcaagtggacg

SEQ ID NO: 631301 - DNA, 15 bp, Homo sapiens
gtggcaagtggacgt

SEQ ID NO: 631302 - DNA, 15 bp, Homo sapiens
tggcaagtggacgtt

SEQ ID NO: 631303 - DNA, 15 bp, Homo sapiens
ggcaagtggacgttt

SEQ ID NO: 631304 - DNA, 15 bp, Homo sapiens
gcaagtggacgtttg

SEQ ID NO: 631305 - DNA, 15 bp, Homo sapiens
caagtggacgtttga

SEQ ID NO: 631306 - DNA, 15 bp, Homo sapiens
aagtggacgtttgac

SEQ ID NO: 631307 - DNA, 15 bp, Homo sapiens
agtggacgtttgacc

SEQ ID NO: 631308 - DNA, 15 bp, Homo sapiens
gtggacgtttgaccc

SEQ ID NO: 631309 - DNA, 15 bp, Homo sapiens
tggacgtttgaccca

SEQ ID NO: 631310 - DNA, 15 bp, Homo sapiens
ggacgtttgacccat

SEQ ID NO: 631311 - DNA, 15 bp, Homo sapiens
gacgtttgacccatg

SEQ ID NO: 631312 - DNA, 15 bp, Homo sapiens
acgtttgacccatga

SEQ ID NO: 631313 - DNA, 15 bp, Homo sapiens
cgtttgacccatgat

SEQ ID NO: 631314 - DNA, 15 bp, Homo sapiens
gtttgacccatgatt

SEQ ID NO: 631315 - DNA, 15 bp, Homo sapiens
tttgacccatgattt

SEQ ID NO: 631316 - DNA, 15 bp, Homo sapiens
ttgacccatgattta

SEQ ID NO: 631317 - DNA, 15 bp, Homo sapiens
tgacccatgatttat

SEQ ID NO: 631318 - DNA, 15 bp, Homo sapiens
gacccatgatttatt

SEQ ID NO: 631319 - DNA, 15 bp, Homo sapiens
acccatgatttattg

SEQ ID NO: 631320 - DNA, 15 bp, Homo sapiens
cccatgatttattga

SEQ ID NO: 631321 - DNA, 15 bp, Homo sapiens
ccatgatttattgag

SEQ ID NO: 631322 - DNA, 15 bp, Homo sapiens
catgatttattgagc

SEQ ID NO: 631323 - DNA, 15 bp, Homo sapiens
atgatttattgagca

SEQ ID NO: 631324 - DNA, 15 bp, Homo sapiens
tgatttattgagcaa

SEQ ID NO: 631325 - DNA, 15 bp, Homo sapiens
gatttattgagcaac

SEQ ID NO: 631326 - DNA, 15 bp, Homo sapiens
atttattgagcaact

SEQ ID NO: 631327 - DNA, 15 bp, Homo sapiens
tttattgagcaacta

SEQ ID NO: 631328 - DNA, 15 bp, Homo sapiens
ttattgagcaactac

SEQ ID NO: 631329 - DNA, 15 bp, Homo sapiens
tattgagcaactaca

SEQ ID NO: 631330 - DNA, 15 bp, Homo sapiens
attgagcaactacaa

SEQ ID NO: 631331 - DNA, 15 bp, Homo sapiens
ttgagcaactacaac

SEQ ID NO: 631332 - DNA, 15 bp, Homo sapiens
tgagcaactacaact

SEQ ID NO: 631333 - DNA, 15 bp, Homo sapiens
gagcaactacaactt

SEQ ID NO: 631334 - DNA, 15 bp, Homo sapiens
agcaactacaacttg

SEQ ID NO: 631335 - DNA, 15 bp, Homo sapiens
gcaactacaacttgg

SEQ ID NO: 631336 - DNA, 15 bp, Homo sapiens
caactacaacttgga

SEQ ID NO: 631337 - DNA, 15 bp, Homo sapiens
aactacaacttggac

SEQ ID NO: 631338 - DNA, 15 bp, Homo sapiens
actacaacttggaca

SEQ ID NO: 631339 - DNA, 15 bp, Homo sapiens
ctacaacttggacac

SEQ ID NO: 631340 - DNA, 15 bp, Homo sapiens
tacaacttggacact

SEQ ID NO: 631341 - DNA, 15 bp, Homo sapiens
acaacttggacactg

SEQ ID NO: 631342 - DNA, 15 bp, Homo sapiens
caacttggacactgc

SEQ ID NO: 631343 - DNA, 15 bp, Homo sapiens
aacttggacactgca

SEQ ID NO: 631344 - DNA, 15 bp, Homo sapiens
acttggacactgcat

SEQ ID NO: 631345 - DNA, 15 bp, Homo sapiens
cttggacactgcata

SEQ ID NO: 631346 - DNA, 15 bp, Homo sapiens
ttggacactgcatag

SEQ ID NO: 631347 - DNA, 15 bp, Homo sapiens
tggacactgcataga

SEQ ID NO: 631348 - DNA, 15 bp, Homo sapiens
ggacactgcatagat

SEQ ID NO: 631349 - DNA, 15 bp, Homo sapiens
gacactgcatagata

SEQ ID NO: 631350 - DNA, 15 bp, Homo sapiens
acactgcatagatat

SEQ ID NO: 631351 - DNA, 15 bp, Homo sapiens
cactgcatagatatc

SEQ ID NO: 631352 - DNA, 15 bp, Homo sapiens
actgcatagatatct

SEQ ID NO: 631353 - DNA, 15 bp, Homo sapiens
ctgcatagatatcta

SEQ ID NO: 631354 - DNA, 15 bp, Homo sapiens
tgcatagatatctat

SEQ ID NO: 631355 - DNA, 15 bp, Homo sapiens
gcatagatatctata

SEQ ID NO: 631356 - DNA, 15 bp, Homo sapiens
catagatatctatag

SEQ ID NO: 631357 - DNA, 15 bp, Homo sapiens
atagatatctataga

SEQ ID NO: 631358 - DNA, 15 bp, Homo sapiens
tagatatctatagaa

SEQ ID NO: 631359 - DNA, 15 bp, Homo sapiens
agatatctatagaaa

SEQ ID NO: 631360 - DNA, 15 bp, Homo sapiens
gatatctatagaaat

SEQ ID NO: 631361 - DNA, 15 bp, Homo sapiens
atatctatagaaata

SEQ ID NO: 631362 - DNA, 15 bp, Homo sapiens
tatctatagaaatag

SEQ ID NO: 631363 - DNA, 15 bp, Homo sapiens
atctatagaaatagc

SEQ ID NO: 631364 - DNA, 15 bp, Homo sapiens
tctatagaaatagca

SEQ ID NO: 631365 - DNA, 15 bp, Homo sapiens
ctatagaaatagcag

SEQ ID NO: 631366 - DNA, 15 bp, Homo sapiens
tatagaaatagcagc

SEQ ID NO: 631367 - DNA, 15 bp, Homo sapiens
atagaaatagcagca

SEQ ID NO: 631368 - DNA, 15 bp, Homo sapiens
tagaaatagcagcat

SEQ ID NO: 631369 - DNA, 15 bp, Homo sapiens
agaaatagcagcatg

SEQ ID NO: 631370 - DNA, 15 bp, Homo sapiens
gaaatagcagcatgt

SEQ ID NO: 631371 - DNA, 15 bp, Homo sapiens
aaatagcagcatgtc

SEQ ID NO: 631372 - DNA, 15 bp, Homo sapiens
aatagcagcatgtca

SEQ ID NO: 631373 - DNA, 15 bp, Homo sapiens
atagcagcatgtcag

SEQ ID NO: 631374 - DNA, 15 bp, Homo sapiens
tagcagcatgtcagg

SEQ ID NO: 631375 - DNA, 15 bp, Homo sapiens
agcagcatgtcaggt

SEQ ID NO: 631376 - DNA, 15 bp, Homo sapiens
gcagcatgtcaggtc

SEQ ID NO: 631377 - DNA, 15 bp, Homo sapiens
cagcatgtcaggtca

SEQ ID NO: 631378 - DNA, 15 bp, Homo sapiens
agcatgtcaggtcac

SEQ ID NO: 631379 - DNA, 15 bp, Homo sapiens
gcatgtcaggtcacc

SEQ ID NO: 631380 - DNA, 15 bp, Homo sapiens
catgtcaggtcacca

SEQ ID NO: 631381 - DNA, 15 bp, Homo sapiens
atgtcaggtcaccag

SEQ ID NO: 631382 - DNA, 15 bp, Homo sapiens
tgtcaggtcaccaga

SEQ ID NO: 631383 - DNA, 15 bp, Homo sapiens
gtcaggtcaccagac

SEQ ID NO: 631384 - DNA, 15 bp, Homo sapiens
tcaggtcaccagacc

SEQ ID NO: 631385 - DNA, 15 bp, Homo sapiens
caggtcaccagacct

SEQ ID NO: 631386 - DNA, 15 bp, Homo sapiens
aggtcaccagacctg

SEQ ID NO: 631387 - DNA, 15 bp, Homo sapiens
ggtcaccagacctgt

SEQ ID NO: 631388 - DNA, 15 bp, Homo sapiens
gtcaccagacctgtg

SEQ ID NO: 631389 - DNA, 15 bp, Homo sapiens
tcaccagacctgtgt

SEQ ID NO: 631390 - DNA, 15 bp, Homo sapiens
caccagacctgtgtc

SEQ ID NO: 631391 - DNA, 15 bp, Homo sapiens
accagacctgtgtca

SEQ ID NO: 631392 - DNA, 15 bp, Homo sapiens
ccagacctgtgtcag

SEQ ID NO: 631393 - DNA, 15 bp, Homo sapiens
cagacctgtgtcagc

SEQ ID NO: 631394 - DNA, 15 bp, Homo sapiens
agacctgtgtcagca

SEQ ID NO: 631395 - DNA, 15 bp, Homo sapiens
gacctgtgtcagcaa

SEQ ID NO: 631396 - DNA, 15 bp, Homo sapiens
acctgtgtcagcaac

SEQ ID NO: 631397 - DNA, 15 bp, Homo sapiens
cctgtgtcagcaact

SEQ ID NO: 631398 - DNA, 15 bp, Homo sapiens
ctgtgtcagcaactt

SEQ ID NO: 631399 - DNA, 15 bp, Homo sapiens
tgtgtcagcaacttc

SEQ ID NO: 631400 - DNA, 15 bp, Homo sapiens
gtgtcagcaacttcc

SEQ ID NO: 631401 - DNA, 15 bp, Homo sapiens
tgtcagcaacttcct

SEQ ID NO: 631402 - DNA, 15 bp, Homo sapiens
gtcagcaacttcctg

SEQ ID NO: 631403 - DNA, 15 bp, Homo sapiens
tcagcaacttcctgt

SEQ ID NO: 631404 - DNA, 15 bp, Homo sapiens
cagcaacttcctgtg

SEQ ID NO: 631405 - DNA, 15 bp, Homo sapiens
agcaacttcctgtgt

SEQ ID NO: 631406 - DNA, 15 bp, Homo sapiens
gcaacttcctgtgtc

SEQ ID NO: 631407 - DNA, 15 bp, Homo sapiens
caacttcctgtgtcc

SEQ ID NO: 631408 - DNA, 15 bp, Homo sapiens
aacttcctgtgtcca

SEQ ID NO: 631409 - DNA, 15 bp, Homo sapiens
acttcctgtgtccaa

SEQ ID NO: 631410 - DNA, 15 bp, Homo sapiens
cttcctgtgtccaac

SEQ ID NO: 631411 - DNA, 15 bp, Homo sapiens
ttcctgtgtccaact

SEQ ID NO: 631412 - DNA, 15 bp, Homo sapiens
tcctgtgtccaactg

SEQ ID NO: 631413 - DNA, 15 bp, Homo sapiens
cctgtgtccaactgc

SEQ ID NO: 631414 - DNA, 15 bp, Homo sapiens
ctgtgtccaactgct

SEQ ID NO: 631415 - DNA, 15 bp, Homo sapiens
tgtgtccaactgctg

SEQ ID NO: 631416 - DNA, 15 bp, Homo sapiens
gtgtccaactgctgg

SEQ ID NO: 631417 - DNA, 15 bp, Homo sapiens
tgtccaactgctgga

SEQ ID NO: 631418 - DNA, 15 bp, Homo sapiens
gtccaactgctggag

SEQ ID NO: 631419 - DNA, 15 bp, Homo sapiens
tccaactgctggaga

SEQ ID NO: 631420 - DNA, 15 bp, Homo sapiens
ccaactgctggagaa

SEQ ID NO: 631421 - DNA, 15 bp, Homo sapiens
caactgctggagaaa

SEQ ID NO: 631422 - DNA, 15 bp, Homo sapiens
aactgctggagaaag

SEQ ID NO: 631423 - DNA, 15 bp, Homo sapiens
actgctggagaaagg

SEQ ID NO: 631424 - DNA, 15 bp, Homo sapiens
ctgctggagaaaggg

SEQ ID NO: 631425 - DNA, 15 bp, Homo sapiens
tgctggagaaaggga

SEQ ID NO: 631426 - DNA, 15 bp, Homo sapiens
gctggagaaagggaa

SEQ ID NO: 631427 - DNA, 15 bp, Homo sapiens
ctggagaaagggaag

SEQ ID NO: 631428 - DNA, 15 bp, Homo sapiens
tggagaaagggaagt

SEQ ID NO: 631429 - DNA, 15 bp, Homo sapiens
ggagaaagggaagtc

SEQ ID NO: 631430 - DNA, 15 bp, Homo sapiens
gagaaagggaagtct

SEQ ID NO: 631431 - DNA, 15 bp, Homo sapiens
agaaagggaagtctc

SEQ ID NO: 631432 - DNA, 15 bp, Homo sapiens
gaaagggaagtctcc

SEQ ID NO: 631433 - DNA, 15 bp, Homo sapiens
aaagggaagtctcct

SEQ ID NO: 631434 - DNA, 15 bp, Homo sapiens
aagggaagtctccta

SEQ ID NO: 631435 - DNA, 15 bp, Homo sapiens
agggaagtctcctat

SEQ ID NO: 631436 - DNA, 15 bp, Homo sapiens
gggaagtctcctatt

SEQ ID NO: 631437 - DNA, 15 bp, Homo sapiens
ggaagtctcctattc

SEQ ID NO: 631438 - DNA, 15 bp, Homo sapiens
gaagtctcctattcc

SEQ ID NO: 631439 - DNA, 15 bp, Homo sapiens
aagtctcctattcct

SEQ ID NO: 631440 - DNA, 15 bp, Homo sapiens
agtctcctattcctt

SEQ ID NO: 631441 - DNA, 15 bp, Homo sapiens
gtctcctattccttt

SEQ ID NO: 631442 - DNA, 15 bp, Homo sapiens
tctcctattcctttc

SEQ ID NO: 631443 - DNA, 15 bp, Homo sapiens
ctcctattcctttcc

SEQ ID NO: 631444 - DNA, 15 bp, Homo sapiens
tcctattcctttccc

SEQ ID NO: 631445 - DNA, 15 bp, Homo sapiens
cctattcctttccct

SEQ ID NO: 631446 - DNA, 15 bp, Homo sapiens
ctattcctttccctc

SEQ ID NO: 631447 - DNA, 15 bp, Homo sapiens
tattcctttccctcc

SEQ ID NO: 631448 - DNA, 15 bp, Homo sapiens
attcctttccctcca

SEQ ID NO: 631449 - DNA, 15 bp, Homo sapiens
ttcctttccctccag

SEQ ID NO: 631450 - DNA, 15 bp, Homo sapiens
tcctttccctccagc

SEQ ID NO: 631451 - DNA, 15 bp, Homo sapiens
cctttccctccagct

SEQ ID NO: 631452 - DNA, 15 bp, Homo sapiens
ctttccctccagctc

SEQ ID NO: 631453 - DNA, 15 bp, Homo sapiens
tttccctccagctcc

SEQ ID NO: 631454 - DNA, 15 bp, Homo sapiens
ttccctccagctcct

SEQ ID NO: 631455 - DNA, 15 bp, Homo sapiens
tccctccagctcctt

SEQ ID NO: 631456 - DNA, 15 bp, Homo sapiens
ccctccagctcctta

SEQ ID NO: 631457 - DNA, 15 bp, Homo sapiens
cctccagctccttaa

SEQ ID NO: 631458 - DNA, 15 bp, Homo sapiens
ctccagctccttaat

SEQ ID NO: 631459 - DNA, 15 bp, Homo sapiens
tccagctccttaata

SEQ ID NO: 631460 - DNA, 15 bp, Homo sapiens
ccagctccttaatat

SEQ ID NO: 631461 - DNA, 15 bp, Homo sapiens
cagctccttaatatc

SEQ ID NO: 631462 - DNA, 15 bp, Homo sapiens
agctccttaatatct

SEQ ID NO: 631463 - DNA, 15 bp, Homo sapiens
gctccttaatatctc

SEQ ID NO: 631464 - DNA, 15 bp, Homo sapiens
ctccttaatatctcc

SEQ ID NO: 631465 - DNA, 15 bp, Homo sapiens
tccttaatatctcca

SEQ ID NO: 631466 - DNA, 15 bp, Homo sapiens
ccttaatatctccat

SEQ ID NO: 631467 - DNA, 15 bp, Homo sapiens
cttaatatctccatg

SEQ ID NO: 631468 - DNA, 15 bp, Homo sapiens
ttaatatctccatga

SEQ ID NO: 631469 - DNA, 15 bp, Homo sapiens
taatatctccatgat

SEQ ID NO: 631470 - DNA, 15 bp, Homo sapiens
aatatctccatgata

SEQ ID NO: 631471 - DNA, 15 bp, Homo sapiens
atatctccatgatag

SEQ ID NO: 631472 - DNA, 15 bp, Homo sapiens
tatctccatgataga

SEQ ID NO: 631473 - DNA, 15 bp, Homo sapiens
atctccatgatagag

SEQ ID NO: 631474 - DNA, 15 bp, Homo sapiens
tctccatgatagagg

SEQ ID NO: 631475 - DNA, 15 bp, Homo sapiens
ctccatgatagaggg

SEQ ID NO: 631476 - DNA, 15 bp, Homo sapiens
tccatgatagagggg

SEQ ID NO: 631477 - DNA, 15 bp, Homo sapiens
ccatgatagaggggg

SEQ ID NO: 631478 - DNA, 15 bp, Homo sapiens
catgatagagggggt

SEQ ID NO: 631479 - DNA, 15 bp, Homo sapiens
atgatagagggggtg

SEQ ID NO: 631480 - DNA, 15 bp, Homo sapiens
tgatagagggggtga

SEQ ID NO: 631481 - DNA, 15 bp, Homo sapiens
gatagagggggtgag

SEQ ID NO: 631482 - DNA, 15 bp, Homo sapiens
atagagggggtgaga

SEQ ID NO: 631483 - DNA, 15 bp, Homo sapiens
tagagggggtgagag

SEQ ID NO: 631484 - DNA, 15 bp, Homo sapiens
agagggggtgagagg

SEQ ID NO: 631485 - DNA, 15 bp, Homo sapiens
gagggggtgagaggg

SEQ ID NO: 631486 - DNA, 15 bp, Homo sapiens
agggggtgagagggg

SEQ ID NO: 631487 - DNA, 15 bp, Homo sapiens
gggggtgagagggga

SEQ ID NO: 631488 - DNA, 15 bp, Homo sapiens
ggggtgagaggggag

SEQ ID NO: 631489 - DNA, 15 bp, Homo sapiens
gggtgagaggggagt

SEQ ID NO: 631490 - DNA, 15 bp, Homo sapiens
ggtgagaggggagtg

SEQ ID NO: 631491 - DNA, 15 bp, Homo sapiens
gtgagaggggagtgt

SEQ ID NO: 631492 - DNA, 15 bp, Homo sapiens
tgagaggggagtgtt

SEQ ID NO: 631493 - DNA, 15 bp, Homo sapiens
gagaggggagtgttc

SEQ ID NO: 631494 - DNA, 15 bp, Homo sapiens
agaggggagtgttcc

SEQ ID NO: 631495 - DNA, 15 bp, Homo sapiens
gaggggagtgttccc

SEQ ID NO: 631496 - DNA, 15 bp, Homo sapiens
aggggagtgttccct

SEQ ID NO: 631497 - DNA, 15 bp, Homo sapiens
ggggagtgttccctg

SEQ ID NO: 631498 - DNA, 15 bp, Homo sapiens
gggagtgttccctgt

SEQ ID NO: 631499 - DNA, 15 bp, Homo sapiens
ggagtgttccctgtg

SEQ ID NO: 631500 - DNA, 15 bp, Homo sapiens
gagtgttccctgtgt

SEQ ID NO: 631501 - DNA, 15 bp, Homo sapiens
agtgttccctgtgtg

SEQ ID NO: 631502 - DNA, 15 bp, Homo sapiens
gtgttccctgtgtgg

SEQ ID NO: 631503 - DNA, 15 bp, Homo sapiens
tgttccctgtgtgga

SEQ ID NO: 631504 - DNA, 15 bp, Homo sapiens
gttccctgtgtggag

SEQ ID NO: 631505 - DNA, 15 bp, Homo sapiens
ttccctgtgtggagg

SEQ ID NO: 631506 - DNA, 15 bp, Homo sapiens
tccctgtgtggaggg

SEQ ID NO: 631507 - DNA, 15 bp, Homo sapiens
ccctgtgtggaggga

SEQ ID NO: 631508 - DNA, 15 bp, Homo sapiens
cctgtgtggagggat

SEQ ID NO: 631509 - DNA, 15 bp, Homo sapiens
ctgtgtggagggatg

SEQ ID NO: 631510 - DNA, 15 bp, Homo sapiens
tgtgtggagggatgg

SEQ ID NO: 631511 - DNA, 15 bp, Homo sapiens
gtgtggagggatggt

SEQ ID NO: 631512 - DNA, 15 bp, Homo sapiens
tgtggagggatggtg

SEQ ID NO: 631513 - DNA, 15 bp, Homo sapiens
gtggagggatggtga

SEQ ID NO: 631514 - DNA, 15 bp, Homo sapiens
tggagggatggtgag

SEQ ID NO: 631515 - DNA, 15 bp, Homo sapiens
ggagggatggtgagt

SEQ ID NO: 631516 - DNA, 15 bp, Homo sapiens
gagggatggtgagtt

SEQ ID NO: 631517 - DNA, 15 bp, Homo sapiens
agggatggtgagttt

SEQ ID NO: 631518 - DNA, 15 bp, Homo sapiens
gggatggtgagtttt

SEQ ID NO: 631519 - DNA, 15 bp, Homo sapiens
ggatggtgagttttc

SEQ ID NO: 631520 - DNA, 15 bp, Homo sapiens
gatggtgagttttct

SEQ ID NO: 631521 - DNA, 15 bp, Homo sapiens
atggtgagttttctg

SEQ ID NO: 631522 - DNA, 15 bp, Homo sapiens
tggtgagttttctgg

SEQ ID NO: 631523 - DNA, 15 bp, Homo sapiens
ggtgagttttctgga

SEQ ID NO: 631524 - DNA, 15 bp, Homo sapiens
gtgagttttctggag

SEQ ID NO: 631525 - DNA, 15 bp, Homo sapiens
tgagttttctggagc

SEQ ID NO: 631526 - DNA, 15 bp, Homo sapiens
gagttttctggagct

SEQ ID NO: 631527 - DNA, 15 bp, Homo sapiens
agttttctggagctg

SEQ ID NO: 631528 - DNA, 15 bp, Homo sapiens
gttttctggagctga

SEQ ID NO: 631529 - DNA, 15 bp, Homo sapiens
ttttctggagctgaa

SEQ ID NO: 631530 - DNA, 15 bp, Homo sapiens
tttctggagctgaaa

SEQ ID NO: 631531 - DNA, 15 bp, Homo sapiens
ttctggagctgaaag

SEQ ID NO: 631532 - DNA, 15 bp, Homo sapiens
tctggagctgaaagg

SEQ ID NO: 631533 - DNA, 15 bp, Homo sapiens
ctggagctgaaaggt

SEQ ID NO: 631534 - DNA, 15 bp, Homo sapiens
tggagctgaaaggta

SEQ ID NO: 631535 - DNA, 15 bp, Homo sapiens
ggagctgaaaggtaa

SEQ ID NO: 631536 - DNA, 15 bp, Homo sapiens
gagctgaaaggtaaa

SEQ ID NO: 631537 - DNA, 15 bp, Homo sapiens
agctgaaaggtaaac

SEQ ID NO: 631538 - DNA, 15 bp, Homo sapiens
gctgaaaggtaaaca

SEQ ID NO: 631539 - DNA, 15 bp, Homo sapiens
ctgaaaggtaaacag

SEQ ID NO: 631540 - DNA, 15 bp, Homo sapiens
tgaaaggtaaacagc

SEQ ID NO: 631541 - DNA, 15 bp, Homo sapiens
gaaaggtaaacagcc

SEQ ID NO: 631542 - DNA, 15 bp, Homo sapiens
aaaggtaaacagcct

SEQ ID NO: 631543 - DNA, 15 bp, Homo sapiens
aaggtaaacagcctt

SEQ ID NO: 631544 - DNA, 15 bp, Homo sapiens
aggtaaacagccttt

SEQ ID NO: 631545 - DNA, 15 bp, Homo sapiens
ggtaaacagcctttc

SEQ ID NO: 631546 - DNA, 15 bp, Homo sapiens
gtaaacagcctttct

SEQ ID NO: 631547 - DNA, 15 bp, Homo sapiens
taaacagcctttctc

SEQ ID NO: 631548 - DNA, 15 bp, Homo sapiens
aaacagcctttctcc

SEQ ID NO: 631549 - DNA, 15 bp, Homo sapiens
aacagcctttctcct

SEQ ID NO: 631550 - DNA, 15 bp, Homo sapiens
acagcctttctcctc

SEQ ID NO: 631551 - DNA, 15 bp, Homo sapiens
cagcctttctcctct

SEQ ID NO: 631552 - DNA, 15 bp, Homo sapiens
agcctttctcctctg

SEQ ID NO: 631553 - DNA, 15 bp, Homo sapiens
gcctttctcctctgc

SEQ ID NO: 631554 - DNA, 15 bp, Homo sapiens
cctttctcctctgca

SEQ ID NO: 631555 - DNA, 15 bp, Homo sapiens
ctttctcctctgcat

SEQ ID NO: 631556 - DNA, 15 bp, Homo sapiens
tttctcctctgcatc

SEQ ID NO: 631557 - DNA, 15 bp, Homo sapiens
ttctcctctgcatct

SEQ ID NO: 631558 - DNA, 15 bp, Homo sapiens
tctcctctgcatctt

SEQ ID NO: 631559 - DNA, 15 bp, Homo sapiens
ctcctctgcatctta

SEQ ID NO: 631560 - DNA, 15 bp, Homo sapiens
tcctctgcatcttac

SEQ ID NO: 631561 - DNA, 15 bp, Homo sapiens
cctctgcatcttact

SEQ ID NO: 631562 - DNA, 15 bp, Homo sapiens
ctctgcatcttactg

SEQ ID NO: 631563 - DNA, 15 bp, Homo sapiens
tctgcatcttactgc

SEQ ID NO: 631564 - DNA, 15 bp, Homo sapiens
ctgcatcttactgca

SEQ ID NO: 631565 - DNA, 15 bp, Homo sapiens
tgcatcttactgcag

SEQ ID NO: 631566 - DNA, 15 bp, Homo sapiens
gcatcttactgcaga

SEQ ID NO: 631567 - DNA, 15 bp, Homo sapiens
catcttactgcagag

SEQ ID NO: 631568 - DNA, 15 bp, Homo sapiens
atcttactgcagagg

SEQ ID NO: 631569 - DNA, 15 bp, Homo sapiens
tcttactgcagagga

SEQ ID NO: 631570 - DNA, 15 bp, Homo sapiens
cttactgcagaggag

SEQ ID NO: 631571 - DNA, 15 bp, Homo sapiens
ttactgcagaggaga

SEQ ID NO: 631572 - DNA, 15 bp, Homo sapiens
tactgcagaggagaa

SEQ ID NO: 631573 - DNA, 15 bp, Homo sapiens
actgcagaggagaac

SEQ ID NO: 631574 - DNA, 15 bp, Homo sapiens
ctgcagaggagaaca

SEQ ID NO: 631575 - DNA, 15 bp, Homo sapiens
tgcagaggagaacag

SEQ ID NO: 631576 - DNA, 15 bp, Homo sapiens
gcagaggagaacagc

SEQ ID NO: 631577 - DNA, 15 bp, Homo sapiens
cagaggagaacagcc

SEQ ID NO: 631578 - DNA, 15 bp, Homo sapiens
agaggagaacagccc

SEQ ID NO: 631579 - DNA, 15 bp, Homo sapiens
gaggagaacagccct

SEQ ID NO: 631580 - DNA, 15 bp, Homo sapiens
aggagaacagcccta

SEQ ID NO: 631581 - DNA, 15 bp, Homo sapiens
ggagaacagccctag

SEQ ID NO: 631582 - DNA, 15 bp, Homo sapiens
gagaacagccctaga

SEQ ID NO: 631583 - DNA, 15 bp, Homo sapiens
agaacagccctagac

SEQ ID NO: 631584 - DNA, 15 bp, Homo sapiens
gaacagccctagact

SEQ ID NO: 631585 - DNA, 15 bp, Homo sapiens
aacagccctagactg

SEQ ID NO: 631586 - DNA, 15 bp, Homo sapiens
acagccctagactgt

SEQ ID NO: 631587 - DNA, 15 bp, Homo sapiens
cagccctagactgtg

SEQ ID NO: 631588 - DNA, 15 bp, Homo sapiens
agccctagactgtgg

SEQ ID NO: 631589 - DNA, 15 bp, Homo sapiens
gccctagactgtgga

SEQ ID NO: 631590 - DNA, 15 bp, Homo sapiens
ccctagactgtggag

SEQ ID NO: 631591 - DNA, 15 bp, Homo sapiens
cctagactgtggagg

SEQ ID NO: 631592 - DNA, 15 bp, Homo sapiens
ctagactgtggagga

SEQ ID NO: 631593 - DNA, 15 bp, Homo sapiens
tagactgtggaggaa

SEQ ID NO: 631594 - DNA, 15 bp, Homo sapiens
agactgtggaggaag

SEQ ID NO: 631595 - DNA, 15 bp, Homo sapiens
gactgtggaggaagc

SEQ ID NO: 631596 - DNA, 15 bp, Homo sapiens
actgtggaggaagct

SEQ ID NO: 631597 - DNA, 15 bp, Homo sapiens
ctgtggaggaagctt

SEQ ID NO: 631598 - DNA, 15 bp, Homo sapiens
tgtggaggaagcttt

SEQ ID NO: 631599 - DNA, 15 bp, Homo sapiens
gtggaggaagctttg

SEQ ID NO: 631600 - DNA, 15 bp, Homo sapiens
tggaggaagctttgg

SEQ ID NO: 631601 - DNA, 15 bp, Homo sapiens
ggaggaagctttgga

SEQ ID NO: 631602 - DNA, 15 bp, Homo sapiens
gaggaagctttggag

SEQ ID NO: 631603 - DNA, 15 bp, Homo sapiens
aggaagctttggagt

SEQ ID NO: 631604 - DNA, 15 bp, Homo sapiens
ggaagctttggagtc

SEQ ID NO: 631605 - DNA, 15 bp, Homo sapiens
gaagctttggagtca

SEQ ID NO: 631606 - DNA, 15 bp, Homo sapiens
aagctttggagtcag

SEQ ID NO: 631607 - DNA, 15 bp, Homo sapiens
agctttggagtcagt

SEQ ID NO: 631608 - DNA, 15 bp, Homo sapiens
gctttggagtcagtt

SEQ ID NO: 631609 - DNA, 15 bp, Homo sapiens
ctttggagtcagtta

SEQ ID NO: 631610 - DNA, 15 bp, Homo sapiens
tttggagtcagttat

SEQ ID NO: 631611 - DNA, 15 bp, Homo sapiens
ttggagtcagttatg

SEQ ID NO: 631612 - DNA, 15 bp, Homo sapiens
tggagtcagttatga

SEQ ID NO: 631613 - DNA, 15 bp, Homo sapiens
ggagtcagttatgac

SEQ ID NO: 631614 - DNA, 15 bp, Homo sapiens
gagtcagttatgact

SEQ ID NO: 631615 - DNA, 15 bp, Homo sapiens
agtcagttatgactg

SEQ ID NO: 631616 - DNA, 15 bp, Homo sapiens
gtcagttatgactga

SEQ ID NO: 631617 - DNA, 15 bp, Homo sapiens
tcagttatgactgac

SEQ ID NO: 631618 - DNA, 15 bp, Homo sapiens
cagttatgactgaca

SEQ ID NO: 631619 - DNA, 15 bp, Homo sapiens
agttatgactgacac

SEQ ID NO: 631620 - DNA, 15 bp, Homo sapiens
gttatgactgacaca

SEQ ID NO: 631621 - DNA, 15 bp, Homo sapiens
ttatgactgacacag

SEQ ID NO: 631622 - DNA, 15 bp, Homo sapiens
tatgactgacacagg

SEQ ID NO: 631623 - DNA, 15 bp, Homo sapiens
atgactgacacagga

SEQ ID NO: 631624 - DNA, 15 bp, Homo sapiens
tgactgacacaggat

SEQ ID NO: 631625 - DNA, 15 bp, Homo sapiens
gactgacacaggata

SEQ ID NO: 631626 - DNA, 15 bp, Homo sapiens
actgacacaggatac

SEQ ID NO: 631627 - DNA, 15 bp, Homo sapiens
ctgacacaggatacc

SEQ ID NO: 631628 - DNA, 15 bp, Homo sapiens
tgacacaggatacca

SEQ ID NO: 631629 - DNA, 15 bp, Homo sapiens
gacacaggataccag

SEQ ID NO: 631630 - DNA, 15 bp, Homo sapiens
acacaggataccagg

SEQ ID NO: 631631 - DNA, 15 bp, Homo sapiens
cacaggataccaggg

SEQ ID NO: 631632 - DNA, 15 bp, Homo sapiens
acaggataccagggc

SEQ ID NO: 631633 - DNA, 15 bp, Homo sapiens
caggataccagggca

SEQ ID NO: 631634 - DNA, 15 bp, Homo sapiens
aggataccagggcat

SEQ ID NO: 631635 - DNA, 15 bp, Homo sapiens
ggataccagggcata

SEQ ID NO: 631636 - DNA, 15 bp, Homo sapiens
gataccagggcatag

SEQ ID NO: 631637 - DNA, 15 bp, Homo sapiens
ataccagggcatagg

SEQ ID NO: 631638 - DNA, 15 bp, Homo sapiens
taccagggcataggg

SEQ ID NO: 631639 - DNA, 15 bp, Homo sapiens
accagggcatagggt

SEQ ID NO: 631640 - DNA, 15 bp, Homo sapiens
ccagggcatagggta

SEQ ID NO: 631641 - DNA, 15 bp, Homo sapiens
cagggcatagggtac

SEQ ID NO: 631642 - DNA, 15 bp, Homo sapiens
agggcatagggtact

SEQ ID NO: 631643 - DNA, 15 bp, Homo sapiens
gggcatagggtactg

SEQ ID NO: 631644 - DNA, 15 bp, Homo sapiens
ggcatagggtactga

SEQ ID NO: 631645 - DNA, 15 bp, Homo sapiens
gcatagggtactgac

SEQ ID NO: 631646 - DNA, 15 bp, Homo sapiens
catagggtactgaca

SEQ ID NO: 631647 - DNA, 15 bp, Homo sapiens
atagggtactgacac

SEQ ID NO: 631648 - DNA, 15 bp, Homo sapiens
tagggtactgacacc

SEQ ID NO: 631649 - DNA, 15 bp, Homo sapiens
agggtactgacaccc

SEQ ID NO: 631650 - DNA, 15 bp, Homo sapiens
gggtactgacacccg

SEQ ID NO: 631651 - DNA, 15 bp, Homo sapiens
ggtactgacacccgc

SEQ ID NO: 631652 - DNA, 15 bp, Homo sapiens
gtactgacacccgct

SEQ ID NO: 631653 - DNA, 15 bp, Homo sapiens
tactgacacccgcta

SEQ ID NO: 631654 - DNA, 15 bp, Homo sapiens
actgacacccgctag

SEQ ID NO: 631655 - DNA, 15 bp, Homo sapiens
ctgacacccgctagc

SEQ ID NO: 631656 - DNA, 15 bp, Homo sapiens
tgacacccgctagcc

SEQ ID NO: 631657 - DNA, 15 bp, Homo sapiens
gacacccgctagccg

SEQ ID NO: 631658 - DNA, 15 bp, Homo sapiens
acacccgctagccgt

SEQ ID NO: 631659 - DNA, 15 bp, Homo sapiens
cacccgctagccgtg

SEQ ID NO: 631660 - DNA, 15 bp, Homo sapiens
acccgctagccgtgc

SEQ ID NO: 631661 - DNA, 15 bp, Homo sapiens
cccgctagccgtgca

SEQ ID NO: 631662 - DNA, 15 bp, Homo sapiens
ccgctagccgtgcac

SEQ ID NO: 631663 - DNA, 15 bp, Homo sapiens
cgctagccgtgcaca

SEQ ID NO: 631664 - DNA, 15 bp, Homo sapiens
gctagccgtgcacac

SEQ ID NO: 631665 - DNA, 15 bp, Homo sapiens
ctagccgtgcacaca

SEQ ID NO: 631666 - DNA, 15 bp, Homo sapiens
tagccgtgcacacac

SEQ ID NO: 631667 - DNA, 15 bp, Homo sapiens
agccgtgcacacact

SEQ ID NO: 631668 - DNA, 15 bp, Homo sapiens
gccgtgcacacactc

SEQ ID NO: 631669 - DNA, 15 bp, Homo sapiens
ccgtgcacacactct

SEQ ID NO: 631670 - DNA, 15 bp, Homo sapiens
cgtgcacacactctc

SEQ ID NO: 631671 - DNA, 15 bp, Homo sapiens
gtgcacacactctct

SEQ ID NO: 631672 - DNA, 15 bp, Homo sapiens
tgcacacactctctg

SEQ ID NO: 631673 - DNA, 15 bp, Homo sapiens
gcacacactctctgg

SEQ ID NO: 631674 - DNA, 15 bp, Homo sapiens
cacacactctctggt

SEQ ID NO: 631675 - DNA, 15 bp, Homo sapiens
acacactctctggtg

SEQ ID NO: 631676 - DNA, 15 bp, Homo sapiens
cacactctctggtgg

SEQ ID NO: 631677 - DNA, 15 bp, Homo sapiens
acactctctggtgga

SEQ ID NO: 631678 - DNA, 15 bp, Homo sapiens
cactctctggtggac

SEQ ID NO: 631679 - DNA, 15 bp, Homo sapiens
actctctggtggacc

SEQ ID NO: 631680 - DNA, 15 bp, Homo sapiens
ctctctggtggacca

SEQ ID NO: 631681 - DNA, 15 bp, Homo sapiens
tctctggtggaccat

SEQ ID NO: 631682 - DNA, 15 bp, Homo sapiens
ctctggtggaccatc

SEQ ID NO: 631683 - DNA, 15 bp, Homo sapiens
tctggtggaccatca

SEQ ID NO: 631684 - DNA, 15 bp, Homo sapiens
ctggtggaccatcac

SEQ ID NO: 631685 - DNA, 15 bp, Homo sapiens
tggtggaccatcact

SEQ ID NO: 631686 - DNA, 15 bp, Homo sapiens
ggtggaccatcactc

SEQ ID NO: 631687 - DNA, 15 bp, Homo sapiens
gtggaccatcactca

SEQ ID NO: 631688 - DNA, 15 bp, Homo sapiens
tggaccatcactcat

SEQ ID NO: 631689 - DNA, 15 bp, Homo sapiens
ggaccatcactcatc

SEQ ID NO: 631690 - DNA, 15 bp, Homo sapiens
gaccatcactcatcc

SEQ ID NO: 631691 - DNA, 15 bp, Homo sapiens
accatcactcatcca

SEQ ID NO: 631692 - DNA, 15 bp, Homo sapiens
ccatcactcatccaa

SEQ ID NO: 631693 - DNA, 15 bp, Homo sapiens
catcactcatccaag

SEQ ID NO: 631694 - DNA, 15 bp, Homo sapiens
atcactcatccaaga

SEQ ID NO: 631695 - DNA, 15 bp, Homo sapiens
tcactcatccaagag

SEQ ID NO: 631696 - DNA, 15 bp, Homo sapiens
cactcatccaagaga

SEQ ID NO: 631697 - DNA, 15 bp, Homo sapiens
actcatccaagagag

SEQ ID NO: 631698 - DNA, 15 bp, Homo sapiens
ctcatccaagagagg

SEQ ID NO: 631699 - DNA, 15 bp, Homo sapiens
tcatccaagagaggg

SEQ ID NO: 631700 - DNA, 15 bp, Homo sapiens
catccaagagagggt

SEQ ID NO: 631701 - DNA, 15 bp, Homo sapiens
atccaagagagggta

SEQ ID NO: 631702 - DNA, 15 bp, Homo sapiens
tccaagagagggtaa

SEQ ID NO: 631703 - DNA, 15 bp, Homo sapiens
ccaagagagggtaac

SEQ ID NO: 631704 - DNA, 15 bp, Homo sapiens
caagagagggtaacc

SEQ ID NO: 631705 - DNA, 15 bp, Homo sapiens
aagagagggtaacca

SEQ ID NO: 631706 - DNA, 15 bp, Homo sapiens
agagagggtaaccag

SEQ ID NO: 631707 - DNA, 15 bp, Homo sapiens
gagagggtaaccagc

SEQ ID NO: 631708 - DNA, 15 bp, Homo sapiens
agagggtaaccagcc

SEQ ID NO: 631709 - DNA, 15 bp, Homo sapiens
gagggtaaccagcca

SEQ ID NO: 631710 - DNA, 15 bp, Homo sapiens
agggtaaccagccat

SEQ ID NO: 631711 - DNA, 15 bp, Homo sapiens
gggtaaccagccatc

SEQ ID NO: 631712 - DNA, 15 bp, Homo sapiens
ggtaaccagccatcc

SEQ ID NO: 631713 - DNA, 15 bp, Homo sapiens
gtaaccagccatcct

SEQ ID NO: 631714 - DNA, 15 bp, Homo sapiens
taaccagccatcctg

SEQ ID NO: 631715 - DNA, 15 bp, Homo sapiens
aaccagccatcctgc

SEQ ID NO: 631716 - DNA, 15 bp, Homo sapiens
accagccatcctgct

SEQ ID NO: 631717 - DNA, 15 bp, Homo sapiens
ccagccatcctgctg

SEQ ID NO: 631718 - DNA, 15 bp, Homo sapiens
cagccatcctgctga

SEQ ID NO: 631719 - DNA, 15 bp, Homo sapiens
agccatcctgctgaa

SEQ ID NO: 631720 - DNA, 15 bp, Homo sapiens
gccatcctgctgaag

SEQ ID NO: 631721 - DNA, 15 bp, Homo sapiens
ccatcctgctgaagg

SEQ ID NO: 631722 - DNA, 15 bp, Homo sapiens
catcctgctgaagga

SEQ ID NO: 631723 - DNA, 15 bp, Homo sapiens
atcctgctgaaggag

SEQ ID NO: 631724 - DNA, 15 bp, Homo sapiens
tcctgctgaaggaga

SEQ ID NO: 631725 - DNA, 15 bp, Homo sapiens
cctgctgaaggagaa

SEQ ID NO: 631726 - DNA, 15 bp, Homo sapiens
ctgctgaaggagaaa

SEQ ID NO: 631727 - DNA, 15 bp, Homo sapiens
tgctgaaggagaaag

SEQ ID NO: 631728 - DNA, 15 bp, Homo sapiens
gctgaaggagaaaga

SEQ ID NO: 631729 - DNA, 15 bp, Homo sapiens
ctgaaggagaaagaa

SEQ ID NO: 631730 - DNA, 15 bp, Homo sapiens
tgaaggagaaagaaa

SEQ ID NO: 631731 - DNA, 15 bp, Homo sapiens
gaaggagaaagaaag

SEQ ID NO: 631732 - DNA, 15 bp, Homo sapiens
aaggagaaagaaagc

SEQ ID NO: 631733 - DNA, 15 bp, Homo sapiens
aggagaaagaaagca

SEQ ID NO: 631734 - DNA, 15 bp, Homo sapiens
ggagaaagaaagcac

SEQ ID NO: 631735 - DNA, 15 bp, Homo sapiens
gagaaagaaagcacc

SEQ ID NO: 631736 - DNA, 15 bp, Homo sapiens
agaaagaaagcacca

SEQ ID NO: 631737 - DNA, 15 bp, Homo sapiens
gaaagaaagcaccaa

SEQ ID NO: 631738 - DNA, 15 bp, Homo sapiens
aaagaaagcaccaat

SEQ ID NO: 631739 - DNA, 15 bp, Homo sapiens
aagaaagcaccaatg

SEQ ID NO: 631740 - DNA, 15 bp, Homo sapiens
agaaagcaccaatgg

SEQ ID NO: 631741 - DNA, 15 bp, Homo sapiens
gaaagcaccaatggc

SEQ ID NO: 631742 - DNA, 15 bp, Homo sapiens
aaagcaccaatggcc

SEQ ID NO: 631743 - DNA, 15 bp, Homo sapiens
aagcaccaatggccc

SEQ ID NO: 631744 - DNA, 15 bp, Homo sapiens
agcaccaatggccca

SEQ ID NO: 631745 - DNA, 15 bp, Homo sapiens
gcaccaatggcccaa

SEQ ID NO: 631746 - DNA, 15 bp, Homo sapiens
caccaatggcccaag

SEQ ID NO: 631747 - DNA, 15 bp, Homo sapiens
accaatggcccaagc

SEQ ID NO: 631748 - DNA, 15 bp, Homo sapiens
ccaatggcccaagcc

SEQ ID NO: 631749 - DNA, 15 bp, Homo sapiens
caatggcccaagccc

SEQ ID NO: 631750 - DNA, 15 bp, Homo sapiens
aatggcccaagccct

SEQ ID NO: 631751 - DNA, 15 bp, Homo sapiens
atggcccaagcccta

SEQ ID NO: 631752 - DNA, 15 bp, Homo sapiens
tggcccaagccctag

SEQ ID NO: 631753 - DNA, 15 bp, Homo sapiens
ggcccaagccctagc

SEQ ID NO: 631754 - DNA, 15 bp, Homo sapiens
gcccaagccctagca

SEQ ID NO: 631755 - DNA, 15 bp, Homo sapiens
cccaagccctagcag

SEQ ID NO: 631756 - DNA, 15 bp, Homo sapiens
ccaagccctagcagc

SEQ ID NO: 631757 - DNA, 15 bp, Homo sapiens
caagccctagcagct

SEQ ID NO: 631758 - DNA, 15 bp, Homo sapiens
aagccctagcagctc

SEQ ID NO: 631759 - DNA, 15 bp, Homo sapiens
agccctagcagctcc

SEQ ID NO: 631760 - DNA, 15 bp, Homo sapiens
gccctagcagctcca

SEQ ID NO: 631761 - DNA, 15 bp, Homo sapiens
ccctagcagctccat

SEQ ID NO: 631762 - DNA, 15 bp, Homo sapiens
cctagcagctccatt

SEQ ID NO: 631763 - DNA, 15 bp, Homo sapiens
ctagcagctccattg

SEQ ID NO: 631764 - DNA, 15 bp, Homo sapiens
tagcagctccattgt

SEQ ID NO: 631765 - DNA, 15 bp, Homo sapiens
agcagctccattgtt

SEQ ID NO: 631766 - DNA, 15 bp, Homo sapiens
gcagctccattgttt

SEQ ID NO: 631767 - DNA, 15 bp, Homo sapiens
cagctccattgtttc

SEQ ID NO: 631768 - DNA, 15 bp, Homo sapiens
agctccattgtttca

SEQ ID NO: 631769 - DNA, 15 bp, Homo sapiens
gctccattgtttcag

SEQ ID NO: 631770 - DNA, 15 bp, Homo sapiens
ctccattgtttcagg

SEQ ID NO: 631771 - DNA, 15 bp, Homo sapiens
tccattgtttcagga

SEQ ID NO: 631772 - DNA, 15 bp, Homo sapiens
ccattgtttcaggaa

SEQ ID NO: 631773 - DNA, 15 bp, Homo sapiens
cattgtttcaggaag

SEQ ID NO: 631774 - DNA, 15 bp, Homo sapiens
attgtttcaggaagc

SEQ ID NO: 631775 - DNA, 15 bp, Homo sapiens
ttgtttcaggaagct

SEQ ID NO: 631776 - DNA, 15 bp, Homo sapiens
tgtttcaggaagctt

SEQ ID NO: 631777 - DNA, 15 bp, Homo sapiens
gtttcaggaagcttc

SEQ ID NO: 631778 - DNA, 15 bp, Homo sapiens
tttcaggaagcttcc

SEQ ID NO: 631779 - DNA, 15 bp, Homo sapiens
ttcaggaagcttcct

SEQ ID NO: 631780 - DNA, 15 bp, Homo sapiens
tcaggaagcttcctc

SEQ ID NO: 631781 - DNA, 15 bp, Homo sapiens
caggaagcttcctca

SEQ ID NO: 631782 - DNA, 15 bp, Homo sapiens
aggaagcttcctcag

SEQ ID NO: 631783 - DNA, 15 bp, Homo sapiens
ggaagcttcctcagg

SEQ ID NO: 631784 - DNA, 15 bp, Homo sapiens
gaagcttcctcaggg

SEQ ID NO: 631785 - DNA, 15 bp, Homo sapiens
aagcttcctcaggga

SEQ ID NO: 631786 - DNA, 15 bp, Homo sapiens
agcttcctcagggaa

SEQ ID NO: 631787 - DNA, 15 bp, Homo sapiens
gcttcctcagggaag

SEQ ID NO: 631788 - DNA, 15 bp, Homo sapiens
cttcctcagggaagt

SEQ ID NO: 631789 - DNA, 15 bp, Homo sapiens
ttcctcagggaagtg

SEQ ID NO: 631790 - DNA, 15 bp, Homo sapiens
tcctcagggaagtgc

SEQ ID NO: 631791 - DNA, 15 bp, Homo sapiens
cctcagggaagtgct

SEQ ID NO: 631792 - DNA, 15 bp, Homo sapiens
ctcagggaagtgctg

SEQ ID NO: 631793 - DNA, 15 bp, Homo sapiens
tcagggaagtgctgc

SEQ ID NO: 631794 - DNA, 15 bp, Homo sapiens
cagggaagtgctgcc

SEQ ID NO: 631795 - DNA, 15 bp, Homo sapiens
agggaagtgctgcct

SEQ ID NO: 631796 - DNA, 15 bp, Homo sapiens
gggaagtgctgcctt

SEQ ID NO: 631797 - DNA, 15 bp, Homo sapiens
ggaagtgctgccttc

SEQ ID NO: 631798 - DNA, 15 bp, Homo sapiens
gaagtgctgccttcc

SEQ ID NO: 631799 - DNA, 15 bp, Homo sapiens
aagtgctgccttccc

SEQ ID NO: 631800 - DNA, 15 bp, Homo sapiens
agtgctgccttcccg

SEQ ID NO: 631801 - DNA, 15 bp, Homo sapiens
gtgctgccttcccga

SEQ ID NO: 631802 - DNA, 15 bp, Homo sapiens
tgctgccttcccgag

SEQ ID NO: 631803 - DNA, 15 bp, Homo sapiens
gctgccttcccgagc

SEQ ID NO: 631804 - DNA, 15 bp, Homo sapiens
ctgccttcccgagcc

SEQ ID NO: 631805 - DNA, 15 bp, Homo sapiens
tgccttcccgagcct

SEQ ID NO: 631806 - DNA, 15 bp, Homo sapiens
gccttcccgagcctt

SEQ ID NO: 631807 - DNA, 15 bp, Homo sapiens
ccttcccgagccttt

SEQ ID NO: 631808 - DNA, 15 bp, Homo sapiens
cttcccgagcctttg

SEQ ID NO: 631809 - DNA, 15 bp, Homo sapiens
ttcccgagcctttgc

SEQ ID NO: 631810 - DNA, 15 bp, Homo sapiens
tcccgagcctttgct

SEQ ID NO: 631811 - DNA, 15 bp, Homo sapiens
cccgagcctttgctc

SEQ ID NO: 631812 - DNA, 15 bp, Homo sapiens
ccgagcctttgctcc

SEQ ID NO: 631813 - DNA, 15 bp, Homo sapiens
cgagcctttgctccc

SEQ ID NO: 631814 - DNA, 15 bp, Homo sapiens
gagcctttgctccca

SEQ ID NO: 631815 - DNA, 15 bp, Homo sapiens
agcctttgctcccac

SEQ ID NO: 631816 - DNA, 15 bp, Homo sapiens
gcctttgctcccacc

SEQ ID NO: 631817 - DNA, 15 bp, Homo sapiens
cctttgctcccacct

SEQ ID NO: 631818 - DNA, 15 bp, Homo sapiens
ctttgctcccacctg

SEQ ID NO: 631819 - DNA, 15 bp, Homo sapiens
tttgctcccacctgg

SEQ ID NO: 631820 - DNA, 15 bp, Homo sapiens
ttgctcccacctggc

SEQ ID NO: 631821 - DNA, 15 bp, Homo sapiens
tgctcccacctggcc

SEQ ID NO: 631822 - DNA, 15 bp, Homo sapiens
gctcccacctggccc

SEQ ID NO: 631823 - DNA, 15 bp, Homo sapiens
ctcccacctggccca

SEQ ID NO: 631824 - DNA, 15 bp, Homo sapiens
tcccacctggcccat

SEQ ID NO: 631825 - DNA, 15 bp, Homo sapiens
cccacctggcccatc

SEQ ID NO: 631826 - DNA, 15 bp, Homo sapiens
ccacctggcccatca

SEQ ID NO: 631827 - DNA, 15 bp, Homo sapiens
cacctggcccatcag

SEQ ID NO: 631828 - DNA, 15 bp, Homo sapiens
acctggcccatcagc

SEQ ID NO: 631829 - DNA, 15 bp, Homo sapiens
cctggcccatcagcc

SEQ ID NO: 631830 - DNA, 15 bp, Homo sapiens
ctggcccatcagccc

SEQ ID NO: 631831 - DNA, 15 bp, Homo sapiens
tggcccatcagccct

SEQ ID NO: 631832 - DNA, 15 bp, Homo sapiens
ggcccatcagccctt

SEQ ID NO: 631833 - DNA, 15 bp, Homo sapiens
gcccatcagccctta

SEQ ID NO: 631834 - DNA, 15 bp, Homo sapiens
cccatcagcccttac

SEQ ID NO: 631835 - DNA, 15 bp, Homo sapiens
ccatcagcccttacc

SEQ ID NO: 631836 - DNA, 15 bp, Homo sapiens
catcagcccttacca

SEQ ID NO: 631837 - DNA, 15 bp, Homo sapiens
atcagcccttaccac

SEQ ID NO: 631838 - DNA, 15 bp, Homo sapiens
tcagcccttaccacc

SEQ ID NO: 631839 - DNA, 15 bp, Homo sapiens
cagcccttaccacca

SEQ ID NO: 631840 - DNA, 15 bp, Homo sapiens
agcccttaccaccac

SEQ ID NO: 631841 - DNA, 15 bp, Homo sapiens
gcccttaccaccact

SEQ ID NO: 631842 - DNA, 15 bp, Homo sapiens
cccttaccaccactc

SEQ ID NO: 631843 - DNA, 15 bp, Homo sapiens
ccttaccaccactca

SEQ ID NO: 631844 - DNA, 15 bp, Homo sapiens
cttaccaccactcag

SEQ ID NO: 631845 - DNA, 15 bp, Homo sapiens
ttaccaccactcagt

SEQ ID NO: 631846 - DNA, 15 bp, Homo sapiens
taccaccactcagta

SEQ ID NO: 631847 - DNA, 15 bp, Homo sapiens
accaccactcagtat

SEQ ID NO: 631848 - DNA, 15 bp, Homo sapiens
ccaccactcagtatg

SEQ ID NO: 631849 - DNA, 15 bp, Homo sapiens
caccactcagtatgc

SEQ ID NO: 631850 - DNA, 15 bp, Homo sapiens
accactcagtatgca

SEQ ID NO: 631851 - DNA, 15 bp, Homo sapiens
ccactcagtatgcac

SEQ ID NO: 631852 - DNA, 15 bp, Homo sapiens
cactcagtatgcact

SEQ ID NO: 631853 - DNA, 15 bp, Homo sapiens
actcagtatgcactg

SEQ ID NO: 631854 - DNA, 15 bp, Homo sapiens
ctcagtatgcactgg

SEQ ID NO: 631855 - DNA, 15 bp, Homo sapiens
tcagtatgcactggt

SEQ ID NO: 631856 - DNA, 15 bp, Homo sapiens
cagtatgcactggtc

SEQ ID NO: 631857 - DNA, 15 bp, Homo sapiens
agtatgcactggtcc

SEQ ID NO: 631858 - DNA, 15 bp, Homo sapiens
gtatgcactggtcca

SEQ ID NO: 631859 - DNA, 15 bp, Homo sapiens
tatgcactggtccac

SEQ ID NO: 631860 - DNA, 15 bp, Homo sapiens
atgcactggtccacg

SEQ ID NO: 631861 - DNA, 15 bp, Homo sapiens
tgcactggtccacgt

SEQ ID NO: 631862 - DNA, 15 bp, Homo sapiens
gcactggtccacgtg

SEQ ID NO: 631863 - DNA, 15 bp, Homo sapiens
cactggtccacgtgt

SEQ ID NO: 631864 - DNA, 15 bp, Homo sapiens
actggtccacgtgtc

SEQ ID NO: 631865 - DNA, 15 bp, Homo sapiens
ctggtccacgtgtct

SEQ ID NO: 631866 - DNA, 15 bp, Homo sapiens
tggtccacgtgtctt

SEQ ID NO: 631867 - DNA, 15 bp, Homo sapiens
ggtccacgtgtcttt

SEQ ID NO: 631868 - DNA, 15 bp, Homo sapiens
gtccacgtgtcttta

SEQ ID NO: 631869 - DNA, 15 bp, Homo sapiens
tccacgtgtctttat

SEQ ID NO: 631870 - DNA, 15 bp, Homo sapiens
ccacgtgtctttatg

SEQ ID NO: 631871 - DNA, 15 bp, Homo sapiens
cacgtgtctttatgg

SEQ ID NO: 631872 - DNA, 15 bp, Homo sapiens
acgtgtctttatggg

SEQ ID NO: 631873 - DNA, 15 bp, Homo sapiens
cgtgtctttatgggc

SEQ ID NO: 631874 - DNA, 15 bp, Homo sapiens
gtgtctttatgggca

SEQ ID NO: 631875 - DNA, 15 bp, Homo sapiens
tgtctttatgggcag

SEQ ID NO: 631876 - DNA, 15 bp, Homo sapiens
gtctttatgggcagt

SEQ ID NO: 631877 - DNA, 15 bp, Homo sapiens
tctttatgggcagtc

SEQ ID NO: 631878 - DNA, 15 bp, Homo sapiens
ctttatgggcagtct

SEQ ID NO: 631879 - DNA, 15 bp, Homo sapiens
tttatgggcagtctt

SEQ ID NO: 631880 - DNA, 15 bp, Homo sapiens
ttatgggcagtcttg

SEQ ID NO: 631881 - DNA, 15 bp, Homo sapiens
tatgggcagtcttgg

SEQ ID NO: 631882 - DNA, 15 bp, Homo sapiens
atgggcagtcttggg

SEQ ID NO: 631883 - DNA, 15 bp, Homo sapiens
tgggcagtcttggga

SEQ ID NO: 631884 - DNA, 15 bp, Homo sapiens
gggcagtcttgggat

SEQ ID NO: 631885 - DNA, 15 bp, Homo sapiens
ggcagtcttgggatc

SEQ ID NO: 631886 - DNA, 15 bp, Homo sapiens
gcagtcttgggatcc

SEQ ID NO: 631887 - DNA, 15 bp, Homo sapiens
cagtcttgggatccc

SEQ ID NO: 631888 - DNA, 15 bp, Homo sapiens
agtcttgggatcccc

SEQ ID NO: 631889 - DNA, 15 bp, Homo sapiens
gtcttgggatcccca

SEQ ID NO: 631890 - DNA, 15 bp, Homo sapiens
tcttgggatccccac

SEQ ID NO: 631891 - DNA, 15 bp, Homo sapiens
cttgggatccccaca

SEQ ID NO: 631892 - DNA, 15 bp, Homo sapiens
ttgggatccccacac

SEQ ID NO: 631893 - DNA, 15 bp, Homo sapiens
tgggatccccacact

SEQ ID NO: 631894 - DNA, 15 bp, Homo sapiens
gggatccccacactg

SEQ ID NO: 631895 - DNA, 15 bp, Homo sapiens
ggatccccacactgg

SEQ ID NO: 631896 - DNA, 15 bp, Homo sapiens
gatccccacactggg

SEQ ID NO: 631897 - DNA, 15 bp, Homo sapiens
atccccacactgggc

SEQ ID NO: 631898 - DNA, 15 bp, Homo sapiens
tccccacactgggct

SEQ ID NO: 631899 - DNA, 15 bp, Homo sapiens
ccccacactgggcta

SEQ ID NO: 631900 - DNA, 15 bp, Homo sapiens
cccacactgggctaa

SEQ ID NO: 631901 - DNA, 15 bp, Homo sapiens
ccacactgggctaaa

SEQ ID NO: 631902 - DNA, 15 bp, Homo sapiens
cacactgggctaaaa

SEQ ID NO: 631903 - DNA, 15 bp, Homo sapiens
acactgggctaaaac

SEQ ID NO: 631904 - DNA, 15 bp, Homo sapiens
cactgggctaaaact

SEQ ID NO: 631905 - DNA, 15 bp, Homo sapiens
actgggctaaaacta

SEQ ID NO: 631906 - DNA, 15 bp, Homo sapiens
ctgggctaaaactac

SEQ ID NO: 631907 - DNA, 15 bp, Homo sapiens
tgggctaaaactacc

SEQ ID NO: 631908 - DNA, 15 bp, Homo sapiens
gggctaaaactacct

SEQ ID NO: 631909 - DNA, 15 bp, Homo sapiens
ggctaaaactacctt

SEQ ID NO: 631910 - DNA, 15 bp, Homo sapiens
gctaaaactaccttt

SEQ ID NO: 631911 - DNA, 15 bp, Homo sapiens
ctaaaactacctttg

SEQ ID NO: 631912 - DNA, 15 bp, Homo sapiens
taaaactacctttga

SEQ ID NO: 631913 - DNA, 15 bp, Homo sapiens
aaaactacctttgac

SEQ ID NO: 631914 - DNA, 15 bp, Homo sapiens
aaactacctttgacg

SEQ ID NO: 631915 - DNA, 15 bp, Homo sapiens
aactacctttgacgg

SEQ ID NO: 631916 - DNA, 15 bp, Homo sapiens
actacctttgacggc

SEQ ID NO: 631917 - DNA, 15 bp, Homo sapiens
ctacctttgacggcc

SEQ ID NO: 631918 - DNA, 15 bp, Homo sapiens
tacctttgacggcca

SEQ ID NO: 631919 - DNA, 15 bp, Homo sapiens
acctttgacggccag

SEQ ID NO: 631920 - DNA, 15 bp, Homo sapiens
cctttgacggccagg

SEQ ID NO: 631921 - DNA, 15 bp, Homo sapiens
ctttgacggccaggt

SEQ ID NO: 631922 - DNA, 15 bp, Homo sapiens
tttgacggccaggtg

SEQ ID NO: 631923 - DNA, 15 bp, Homo sapiens
ttgacggccaggtgc

SEQ ID NO: 631924 - DNA, 15 bp, Homo sapiens
tgacggccaggtgca

SEQ ID NO: 631925 - DNA, 15 bp, Homo sapiens
gacggccaggtgcag

SEQ ID NO: 631926 - DNA, 15 bp, Homo sapiens
acggccaggtgcagt

SEQ ID NO: 631927 - DNA, 15 bp, Homo sapiens
cggccaggtgcagtg

SEQ ID NO: 631928 - DNA, 15 bp, Homo sapiens
ggccaggtgcagtgg

SEQ ID NO: 631929 - DNA, 15 bp, Homo sapiens
gccaggtgcagtggc

SEQ ID NO: 631930 - DNA, 15 bp, Homo sapiens
ccaggtgcagtggct

SEQ ID NO: 631931 - DNA, 15 bp, Homo sapiens
caggtgcagtggctt

SEQ ID NO: 631932 - DNA, 15 bp, Homo sapiens
aggtgcagtggctta

SEQ ID NO: 631933 - DNA, 15 bp, Homo sapiens
ggtgcagtggcttac

SEQ ID NO: 631934 - DNA, 15 bp, Homo sapiens
gtgcagtggcttaca

SEQ ID NO: 631935 - DNA, 15 bp, Homo sapiens
tgcagtggcttacac

SEQ ID NO: 631936 - DNA, 15 bp, Homo sapiens
gcagtggcttacacc

SEQ ID NO: 631937 - DNA, 15 bp, Homo sapiens
cagtggcttacacct

SEQ ID NO: 631938 - DNA, 15 bp, Homo sapiens
agtggcttacacctg

SEQ ID NO: 631939 - DNA, 15 bp, Homo sapiens
gtggcttacacctgt

SEQ ID NO: 631940 - DNA, 15 bp, Homo sapiens
tggcttacacctgta

SEQ ID NO: 631941 - DNA, 15 bp, Homo sapiens
ggcttacacctgtaa

SEQ ID NO: 631942 - DNA, 15 bp, Homo sapiens
gcttacacctgtaat

SEQ ID NO: 631943 - DNA, 15 bp, Homo sapiens
cttacacctgtaatc

SEQ ID NO: 631944 - DNA, 15 bp, Homo sapiens
ttacacctgtaatcc

SEQ ID NO: 631945 - DNA, 15 bp, Homo sapiens
tacacctgtaatcct

SEQ ID NO: 631946 - DNA, 15 bp, Homo sapiens
acacctgtaatccta

SEQ ID NO: 631947 - DNA, 15 bp, Homo sapiens
cacctgtaatcctat

SEQ ID NO: 631948 - DNA, 15 bp, Homo sapiens
acctgtaatcctatc

SEQ ID NO: 631949 - DNA, 15 bp, Homo sapiens
cctgtaatcctatca

SEQ ID NO: 631950 - DNA, 15 bp, Homo sapiens
ctgtaatcctatcac

SEQ ID NO: 631951 - DNA, 15 bp, Homo sapiens
tgtaatcctatcact

SEQ ID NO: 631952 - DNA, 15 bp, Homo sapiens
gtaatcctatcactt

SEQ ID NO: 631953 - DNA, 15 bp, Homo sapiens
taatcctatcacttt

SEQ ID NO: 631954 - DNA, 15 bp, Homo sapiens
aatcctatcactttg

SEQ ID NO: 631955 - DNA, 15 bp, Homo sapiens
atcctatcactttgg

SEQ ID NO: 631956 - DNA, 15 bp, Homo sapiens
tcctatcactttggg

SEQ ID NO: 631957 - DNA, 15 bp, Homo sapiens
cctatcactttggga

SEQ ID NO: 631958 - DNA, 15 bp, Homo sapiens
ctatcactttgggaa

SEQ ID NO: 631959 - DNA, 15 bp, Homo sapiens
tatcactttgggaag

SEQ ID NO: 631960 - DNA, 15 bp, Homo sapiens
atcactttgggaagc

SEQ ID NO: 631961 - DNA, 15 bp, Homo sapiens
tcactttgggaagct

SEQ ID NO: 631962 - DNA, 15 bp, Homo sapiens
cactttgggaagctg

SEQ ID NO: 631963 - DNA, 15 bp, Homo sapiens
actttgggaagctga

SEQ ID NO: 631964 - DNA, 15 bp, Homo sapiens
ctttgggaagctgag

SEQ ID NO: 631965 - DNA, 15 bp, Homo sapiens
tttgggaagctgagg

SEQ ID NO: 631966 - DNA, 15 bp, Homo sapiens
ttgggaagctgaggc

SEQ ID NO: 631967 - DNA, 15 bp, Homo sapiens
tgggaagctgaggca

SEQ ID NO: 631968 - DNA, 15 bp, Homo sapiens
gggaagctgaggcag

SEQ ID NO: 631969 - DNA, 15 bp, Homo sapiens
ggaagctgaggcagg

SEQ ID NO: 631970 - DNA, 15 bp, Homo sapiens
gaagctgaggcaggt

SEQ ID NO: 631971 - DNA, 15 bp, Homo sapiens
aagctgaggcaggtg

SEQ ID NO: 631972 - DNA, 15 bp, Homo sapiens
agctgaggcaggtgg

SEQ ID NO: 631973 - DNA, 15 bp, Homo sapiens
gctgaggcaggtgga

SEQ ID NO: 631974 - DNA, 15 bp, Homo sapiens
ctgaggcaggtggat

SEQ ID NO: 631975 - DNA, 15 bp, Homo sapiens
tgaggcaggtggatc

SEQ ID NO: 631976 - DNA, 15 bp, Homo sapiens
caggtggatcacttg

SEQ ID NO: 631977 - DNA, 15 bp, Homo sapiens
aggtggatcacttga

SEQ ID NO: 631978 - DNA, 15 bp, Homo sapiens
ggtggatcacttgag

SEQ ID NO: 631979 - DNA, 15 bp, Homo sapiens
gtggatcacttgagg

SEQ ID NO: 631980 - DNA, 15 bp, Homo sapiens
tggatcacttgaggt

SEQ ID NO: 631981 - DNA, 15 bp, Homo sapiens
ggatcacttgaggtc

SEQ ID NO: 631982 - DNA, 15 bp, Homo sapiens
gatcacttgaggtca

SEQ ID NO: 631983 - DNA, 15 bp, Homo sapiens
atcacttgaggtcag

SEQ ID NO: 631984 - DNA, 15 bp, Homo sapiens
tcacttgaggtcagg

SEQ ID NO: 631985 - DNA, 15 bp, Homo sapiens
cacttgaggtcagga

SEQ ID NO: 631986 - DNA, 15 bp, Homo sapiens
acttgaggtcaggag

SEQ ID NO: 631987 - DNA, 15 bp, Homo sapiens
cttgaggtcaggagt

SEQ ID NO: 631988 - DNA, 15 bp, Homo sapiens
ttgaggtcaggagtt

SEQ ID NO: 631989 - DNA, 15 bp, Homo sapiens
tgaggtcaggagttc

SEQ ID NO: 631990 - DNA, 15 bp, Homo sapiens
gaggtcaggagttcg

SEQ ID NO: 631991 - DNA, 15 bp, Homo sapiens
aggtcaggagttcga

SEQ ID NO: 631992 - DNA, 15 bp, Homo sapiens
ggtcaggagttcgag

SEQ ID NO: 631993 - DNA, 15 bp, Homo sapiens
gtcaggagttcgaga

SEQ ID NO: 631994 - DNA, 15 bp, Homo sapiens
tcaggagttcgagac

SEQ ID NO: 631995 - DNA, 15 bp, Homo sapiens
caggagttcgagacc

SEQ ID NO: 631996 - DNA, 15 bp, Homo sapiens
aggagttcgagacca

SEQ ID NO: 631997 - DNA, 15 bp, Homo sapiens
ggagttcgagaccag

SEQ ID NO: 631998 - DNA, 15 bp, Homo sapiens
cagcctggccaacac

SEQ ID NO: 631999 - DNA, 15 bp, Homo sapiens
agcctggccaacacg

SEQ ID NO: 632000 - DNA, 15 bp, Homo sapiens
gcctggccaacacgg

SEQ ID NO: 632001 - DNA, 15 bp, Homo sapiens
cctggccaacacggt

SEQ ID NO: 632002 - DNA, 15 bp, Homo sapiens
ctggccaacacggtg

SEQ ID NO: 632003 - DNA, 15 bp, Homo sapiens
tggccaacacggtga

SEQ ID NO: 632004 - DNA, 15 bp, Homo sapiens
ggccaacacggtgaa

SEQ ID NO: 632005 - DNA, 15 bp, Homo sapiens
gccaacacggtgaaa

SEQ ID NO: 632006 - DNA, 15 bp, Homo sapiens
ccaacacggtgaaac

SEQ ID NO: 632007 - DNA, 15 bp, Homo sapiens
caacacggtgaaacc

SEQ ID NO: 632008 - DNA, 15 bp, Homo sapiens
acacggtgaaaccct

SEQ ID NO: 632009 - DNA, 15 bp, Homo sapiens
cacggtgaaaccctg

SEQ ID NO: 632010 - DNA, 15 bp, Homo sapiens
acggtgaaaccctgt

SEQ ID NO: 632011 - DNA, 15 bp, Homo sapiens
cggtgaaaccctgtc

SEQ ID NO: 632012 - DNA, 15 bp, Homo sapiens
ggtgaaaccctgtct

SEQ ID NO: 632013 - DNA, 15 bp, Homo sapiens
gtgaaaccctgtctc

SEQ ID NO: 632014 - DNA, 15 bp, Homo sapiens
tgaaaccctgtctct

SEQ ID NO: 632015 - DNA, 15 bp, Homo sapiens
gaaaccctgtctcta

SEQ ID NO: 632016 - DNA, 15 bp, Homo sapiens
aggttttcaaaacag

SEQ ID NO: 632017 - DNA, 15 bp, Homo sapiens
ggttttcaaaacagg

SEQ ID NO: 632018 - DNA, 15 bp, Homo sapiens
gttttcaaaacagga

SEQ ID NO: 632019 - DNA, 15 bp, Homo sapiens
ttttcaaaacaggaa

SEQ ID NO: 632020 - DNA, 15 bp, Homo sapiens
tttcaaaacaggaat

SEQ ID NO: 632021 - DNA, 15 bp, Homo sapiens
ttcaaaacaggaatg

SEQ ID NO: 632022 - DNA, 15 bp, Homo sapiens
tcaaaacaggaatgg

SEQ ID NO: 632023 - DNA, 15 bp, Homo sapiens
caaaacaggaatgga

SEQ ID NO: 632024 - DNA, 15 bp, Homo sapiens
aaaacaggaatggat

SEQ ID NO: 632025 - DNA, 15 bp, Homo sapiens
aaacaggaatggata

SEQ ID NO: 632026 - DNA, 15 bp, Homo sapiens
aacaggaatggataa

SEQ ID NO: 632027 - DNA, 15 bp, Homo sapiens
acaggaatggataat

SEQ ID NO: 632028 - DNA, 15 bp, Homo sapiens
caggaatggataatg

SEQ ID NO: 632029 - DNA, 15 bp, Homo sapiens
aggaatggataatga

SEQ ID NO: 632030 - DNA, 15 bp, Homo sapiens
ggaatggataatgat

SEQ ID NO: 632031 - DNA, 15 bp, Homo sapiens
gaatggataatgatt

SEQ ID NO: 632032 - DNA, 15 bp, Homo sapiens
aatggataatgattt

SEQ ID NO: 632033 - DNA, 15 bp, Homo sapiens
atggataatgatttt

SEQ ID NO: 632034 - DNA, 15 bp, Homo sapiens
tggataatgattttt

SEQ ID NO: 632035 - DNA, 15 bp, Homo sapiens
ggataatgattttta

SEQ ID NO: 632036 - DNA, 15 bp, Homo sapiens
gataatgatttttac

SEQ ID NO: 632037 - DNA, 15 bp, Homo sapiens
ataatgatttttact

SEQ ID NO: 632038 - DNA, 15 bp, Homo sapiens
taatgatttttactg

SEQ ID NO: 632039 - DNA, 15 bp, Homo sapiens
aatgatttttactga

SEQ ID NO: 632040 - DNA, 15 bp, Homo sapiens
atgatttttactgaa

SEQ ID NO: 632041 - DNA, 15 bp, Homo sapiens
tgatttttactgaat

SEQ ID NO: 632042 - DNA, 15 bp, Homo sapiens
gatttttactgaata

SEQ ID NO: 632043 - DNA, 15 bp, Homo sapiens
atttttactgaatac

SEQ ID NO: 632044 - DNA, 15 bp, Homo sapiens
tttttactgaatact

SEQ ID NO: 632045 - DNA, 15 bp, Homo sapiens
ttttactgaatactt

SEQ ID NO: 632046 - DNA, 15 bp, Homo sapiens
tttactgaatacttt

SEQ ID NO: 632047 - DNA, 15 bp, Homo sapiens
ttactgaatactttt

SEQ ID NO: 632048 - DNA, 15 bp, Homo sapiens
tactgaatacttttt

SEQ ID NO: 632049 - DNA, 15 bp, Homo sapiens
actgaatactttttg

SEQ ID NO: 632050 - DNA, 15 bp, Homo sapiens
ctgaatactttttgc

SEQ ID NO: 632051 - DNA, 15 bp, Homo sapiens
tgaatactttttgca

SEQ ID NO: 632052 - DNA, 15 bp, Homo sapiens
gaatactttttgcat

SEQ ID NO: 632053 - DNA, 15 bp, Homo sapiens
aatactttttgcatt

SEQ ID NO: 632054 - DNA, 15 bp, Homo sapiens
atactttttgcattt

SEQ ID NO: 632055 - DNA, 15 bp, Homo sapiens
tactttttgcattta

SEQ ID NO: 632056 - DNA, 15 bp, Homo sapiens
actttttgcatttat

SEQ ID NO: 632057 - DNA, 15 bp, Homo sapiens
ctttttgcatttatg

SEQ ID NO: 632058 - DNA, 15 bp, Homo sapiens
tttttgcatttatga

SEQ ID NO: 632059 - DNA, 15 bp, Homo sapiens
ttttgcatttatgaa

SEQ ID NO: 632060 - DNA, 15 bp, Homo sapiens
tttgcatttatgaaa

SEQ ID NO: 632061 - DNA, 15 bp, Homo sapiens
ttgcatttatgaaaa

SEQ ID NO: 632062 - DNA, 15 bp, Homo sapiens
tgcatttatgaaaat

SEQ ID NO: 632063 - DNA, 15 bp, Homo sapiens
gcatttatgaaaatg

SEQ ID NO: 632064 - DNA, 15 bp, Homo sapiens
catttatgaaaatga

SEQ ID NO: 632065 - DNA, 15 bp, Homo sapiens
atttatgaaaatgat

SEQ ID NO: 632066 - DNA, 15 bp, Homo sapiens
tttatgaaaatgatt

SEQ ID NO: 632067 - DNA, 15 bp, Homo sapiens
ttatgaaaatgatta

SEQ ID NO: 632068 - DNA, 15 bp, Homo sapiens
tatgaaaatgattaa

SEQ ID NO: 632069 - DNA, 15 bp, Homo sapiens
atgaaaatgattaat

SEQ ID NO: 632070 - DNA, 15 bp, Homo sapiens
tgaaaatgattaatt

SEQ ID NO: 632071 - DNA, 15 bp, Homo sapiens
gaaaatgattaatta

SEQ ID NO: 632072 - DNA, 15 bp, Homo sapiens
aaaatgattaattat

SEQ ID NO: 632073 - DNA, 15 bp, Homo sapiens
aaatgattaattatt

SEQ ID NO: 632074 - DNA, 15 bp, Homo sapiens
aatgattaattattt

SEQ ID NO: 632075 - DNA, 15 bp, Homo sapiens
atgattaattatttt

SEQ ID NO: 632076 - DNA, 15 bp, Homo sapiens
tgattaattattttt

SEQ ID NO: 632077 - DNA, 15 bp, Homo sapiens
gattaattatttttt

SEQ ID NO: 632078 - DNA, 15 bp, Homo sapiens
attaattatttttta

SEQ ID NO: 632079 - DNA, 15 bp, Homo sapiens
ttaattattttttac

SEQ ID NO: 632080 - DNA, 15 bp, Homo sapiens
taattattttttacc

SEQ ID NO: 632081 - DNA, 15 bp, Homo sapiens
aattattttttacct

SEQ ID NO: 632082 - DNA, 15 bp, Homo sapiens
attattttttacctt

SEQ ID NO: 632083 - DNA, 15 bp, Homo sapiens
ttattttttacctta

SEQ ID NO: 632084 - DNA, 15 bp, Homo sapiens
tattttttaccttaa

SEQ ID NO: 632085 - DNA, 15 bp, Homo sapiens
attttttaccttaaa

SEQ ID NO: 632086 - DNA, 15 bp, Homo sapiens
ttttttaccttaaat

SEQ ID NO: 632087 - DNA, 15 bp, Homo sapiens
tttttaccttaaata

SEQ ID NO: 632088 - DNA, 15 bp, Homo sapiens
ttttaccttaaataa

SEQ ID NO: 632089 - DNA, 15 bp, Homo sapiens
tttaccttaaataat

SEQ ID NO: 632090 - DNA, 15 bp, Homo sapiens
ttaccttaaataatc

SEQ ID NO: 632091 - DNA, 15 bp, Homo sapiens
taccttaaataatca

SEQ ID NO: 632092 - DNA, 15 bp, Homo sapiens
accttaaataatcat

SEQ ID NO: 632093 - DNA, 15 bp, Homo sapiens
ccttaaataatcatt

SEQ ID NO: 632094 - DNA, 15 bp, Homo sapiens
cttaaataatcattg

SEQ ID NO: 632095 - DNA, 15 bp, Homo sapiens
ttaaataatcattgc

SEQ ID NO: 632096 - DNA, 15 bp, Homo sapiens
taaataatcattgca

SEQ ID NO: 632097 - DNA, 15 bp, Homo sapiens
aaataatcattgcat

SEQ ID NO: 632098 - DNA, 15 bp, Homo sapiens
aataatcattgcatt

SEQ ID NO: 632099 - DNA, 15 bp, Homo sapiens
ataatcattgcattc

SEQ ID NO: 632100 - DNA, 15 bp, Homo sapiens
taatcattgcattcc

SEQ ID NO: 632101 - DNA, 15 bp, Homo sapiens
aatcattgcattcct

SEQ ID NO: 632102 - DNA, 15 bp, Homo sapiens
atcattgcattcctg

SEQ ID NO: 632103 - DNA, 15 bp, Homo sapiens
tcattgcattcctgg

SEQ ID NO: 632104 - DNA, 15 bp, Homo sapiens
cattgcattcctggg

SEQ ID NO: 632105 - DNA, 15 bp, Homo sapiens
attgcattcctggga

SEQ ID NO: 632106 - DNA, 15 bp, Homo sapiens
tgcattcctgggatc

SEQ ID NO: 632107 - DNA, 15 bp, Homo sapiens
gcattcctgggatca

SEQ ID NO: 632108 - DNA, 15 bp, Homo sapiens
cattcctgggatcaa

SEQ ID NO: 632109 - DNA, 15 bp, Homo sapiens
attcctgggatcaac

SEQ ID NO: 632110 - DNA, 15 bp, Homo sapiens
ttcctgggatcaaca

SEQ ID NO: 632111 - DNA, 15 bp, Homo sapiens
tcctgggatcaacat

SEQ ID NO: 632112 - DNA, 15 bp, Homo sapiens
cctgggatcaacatt

SEQ ID NO: 632113 - DNA, 15 bp, Homo sapiens
ctgggatcaacattg

SEQ ID NO: 632114 - DNA, 15 bp, Homo sapiens
tgggatcaacattgc

SEQ ID NO: 632115 - DNA, 15 bp, Homo sapiens
gggatcaacattgct

SEQ ID NO: 632116 - DNA, 15 bp, Homo sapiens
ggatcaacattgctt

SEQ ID NO: 632117 - DNA, 15 bp, Homo sapiens
gatcaacattgcttc

SEQ ID NO: 632118 - DNA, 15 bp, Homo sapiens
atcaacattgcttca

SEQ ID NO: 632119 - DNA, 15 bp, Homo sapiens
tcaacattgcttcat

SEQ ID NO: 632120 - DNA, 15 bp, Homo sapiens
caacattgcttcatt

SEQ ID NO: 632121 - DNA, 15 bp, Homo sapiens
aacattgcttcattt

SEQ ID NO: 632122 - DNA, 15 bp, Homo sapiens
acattgcttcatttt

SEQ ID NO: 632123 - DNA, 15 bp, Homo sapiens
cattgcttcattttt

SEQ ID NO: 632124 - DNA, 15 bp, Homo sapiens
attgcttcatttttt

SEQ ID NO: 632125 - DNA, 15 bp, Homo sapiens
ttgcttcattttttt

SEQ ID NO: 632126 - DNA, 15 bp, Homo sapiens
tgcttcatttttttc

SEQ ID NO: 632127 - DNA, 15 bp, Homo sapiens
gcttcatttttttca

SEQ ID NO: 632128 - DNA, 15 bp, Homo sapiens
cttcatttttttcat

SEQ ID NO: 632129 - DNA, 15 bp, Homo sapiens
ttcatttttttcata

SEQ ID NO: 632130 - DNA, 15 bp, Homo sapiens
tcatttttttcataa

SEQ ID NO: 632131 - DNA, 15 bp, Homo sapiens
catttttttcataaa

SEQ ID NO: 632132 - DNA, 15 bp, Homo sapiens
atttttttcataaac

SEQ ID NO: 632133 - DNA, 15 bp, Homo sapiens
tttttttcataaact

SEQ ID NO: 632134 - DNA, 15 bp, Homo sapiens
ttttttcataaactg

SEQ ID NO: 632135 - DNA, 15 bp, Homo sapiens
tttttcataaactgc

SEQ ID NO: 632136 - DNA, 15 bp, Homo sapiens
ttttcataaactgct

SEQ ID NO: 632137 - DNA, 15 bp, Homo sapiens
tttcataaactgctg

SEQ ID NO: 632138 - DNA, 15 bp, Homo sapiens
ttcataaactgctga

SEQ ID NO: 632139 - DNA, 15 bp, Homo sapiens
tcataaactgctgaa

SEQ ID NO: 632140 - DNA, 15 bp, Homo sapiens
cataaactgctgaat

SEQ ID NO: 632141 - DNA, 15 bp, Homo sapiens
ataaactgctgaatt

SEQ ID NO: 632142 - DNA, 15 bp, Homo sapiens
taaactgctgaatta

SEQ ID NO: 632143 - DNA, 15 bp, Homo sapiens
aaactgctgaattat

SEQ ID NO: 632144 - DNA, 15 bp, Homo sapiens
aactgctgaattatg

SEQ ID NO: 632145 - DNA, 15 bp, Homo sapiens
actgctgaattatgt

SEQ ID NO: 632146 - DNA, 15 bp, Homo sapiens
ctgctgaattatgtt

SEQ ID NO: 632147 - DNA, 15 bp, Homo sapiens
tgctgaattatgttt

SEQ ID NO: 632148 - DNA, 15 bp, Homo sapiens
gctgaattatgttta

SEQ ID NO: 632149 - DNA, 15 bp, Homo sapiens
ctgaattatgtttaa

SEQ ID NO: 632150 - DNA, 15 bp, Homo sapiens
tgaattatgtttaac

SEQ ID NO: 632151 - DNA, 15 bp, Homo sapiens
gaattatgtttaaca

SEQ ID NO: 632152 - DNA, 15 bp, Homo sapiens
aattatgtttaacat

SEQ ID NO: 632153 - DNA, 15 bp, Homo sapiens
attatgtttaacata

SEQ ID NO: 632154 - DNA, 15 bp, Homo sapiens
ttatgtttaacatat

SEQ ID NO: 632155 - DNA, 15 bp, Homo sapiens
tatgtttaacatatt

SEQ ID NO: 632156 - DNA, 15 bp, Homo sapiens
atgtttaacatattt

SEQ ID NO: 632157 - DNA, 15 bp, Homo sapiens
tgtttaacatatttt

SEQ ID NO: 632158 - DNA, 15 bp, Homo sapiens
gtttaacatatttta

SEQ ID NO: 632159 - DNA, 15 bp, Homo sapiens
tttaacatattttat

SEQ ID NO: 632160 - DNA, 15 bp, Homo sapiens
ttaacatattttatt

SEQ ID NO: 632161 - DNA, 15 bp, Homo sapiens
taacatattttattt

SEQ ID NO: 632162 - DNA, 15 bp, Homo sapiens
aacatattttattta

SEQ ID NO: 632163 - DNA, 15 bp, Homo sapiens
acatattttatttat

SEQ ID NO: 632164 - DNA, 15 bp, Homo sapiens
catattttatttatc

SEQ ID NO: 632165 - DNA, 15 bp, Homo sapiens
atattttatttatca

SEQ ID NO: 632166 - DNA, 15 bp, Homo sapiens
tattttatttatcat

SEQ ID NO: 632167 - DNA, 15 bp, Homo sapiens
attttatttatcatt

SEQ ID NO: 632168 - DNA, 15 bp, Homo sapiens
ttttatttatcattt

SEQ ID NO: 632169 - DNA, 15 bp, Homo sapiens
tttatttatcatttt

SEQ ID NO: 632170 - DNA, 15 bp, Homo sapiens
ttatttatcatttta

SEQ ID NO: 632171 - DNA, 15 bp, Homo sapiens
tatttatcattttaa

SEQ ID NO: 632172 - DNA, 15 bp, Homo sapiens
atttatcattttaaa

SEQ ID NO: 632173 - DNA, 15 bp, Homo sapiens
tttatcattttaaaa

SEQ ID NO: 632174 - DNA, 15 bp, Homo sapiens
ttatcattttaaaat

SEQ ID NO: 632175 - DNA, 15 bp, Homo sapiens
tatcattttaaaatc

SEQ ID NO: 632176 - DNA, 15 bp, Homo sapiens
atcattttaaaatct

SEQ ID NO: 632177 - DNA, 15 bp, Homo sapiens
tcattttaaaatctg

SEQ ID NO: 632178 - DNA, 15 bp, Homo sapiens
cattttaaaatctgt

SEQ ID NO: 632179 - DNA, 15 bp, Homo sapiens
attttaaaatctgtt

SEQ ID NO: 632180 - DNA, 15 bp, Homo sapiens
ttttaaaatctgttt

SEQ ID NO: 632181 - DNA, 15 bp, Homo sapiens
tttaaaatctgtttt

SEQ ID NO: 632182 - DNA, 15 bp, Homo sapiens
ttaaaatctgttttc

SEQ ID NO: 632183 - DNA, 15 bp, Homo sapiens
taaaatctgttttca

SEQ ID NO: 632184 - DNA, 15 bp, Homo sapiens
aaaatctgttttcag

SEQ ID NO: 632185 - DNA, 15 bp, Homo sapiens
aaatctgttttcaga

SEQ ID NO: 632186 - DNA, 15 bp, Homo sapiens
aatctgttttcagaa

SEQ ID NO: 632187 - DNA, 15 bp, Homo sapiens
atctgttttcagaag

SEQ ID NO: 632188 - DNA, 15 bp, Homo sapiens
tctgttttcagaagt

SEQ ID NO: 632189 - DNA, 15 bp, Homo sapiens
ctgttttcagaagta

SEQ ID NO: 632190 - DNA, 15 bp, Homo sapiens
tgttttcagaagtaa

SEQ ID NO: 632191 - DNA, 15 bp, Homo sapiens
gttttcagaagtaat

SEQ ID NO: 632192 - DNA, 15 bp, Homo sapiens
ttttcagaagtaatt

SEQ ID NO: 632193 - DNA, 15 bp, Homo sapiens
tttcagaagtaatta

SEQ ID NO: 632194 - DNA, 15 bp, Homo sapiens
ttcagaagtaattat

SEQ ID NO: 632195 - DNA, 15 bp, Homo sapiens
tcagaagtaattata

SEQ ID NO: 632196 - DNA, 15 bp, Homo sapiens
cagaagtaattataa

SEQ ID NO: 632197 - DNA, 15 bp, Homo sapiens
agaagtaattataag

SEQ ID NO: 632198 - DNA, 15 bp, Homo sapiens
gaagtaattataagc

SEQ ID NO: 632199 - DNA, 15 bp, Homo sapiens
aagtaattataagcc

SEQ ID NO: 632200 - DNA, 15 bp, Homo sapiens
agtaattataagcct

SEQ ID NO: 632201 - DNA, 15 bp, Homo sapiens
gtaattataagccta

SEQ ID NO: 632202 - DNA, 15 bp, Homo sapiens
taattataagcctat

SEQ ID NO: 632203 - DNA, 15 bp, Homo sapiens
aattataagcctatt

SEQ ID NO: 632204 - DNA, 15 bp, Homo sapiens
attataagcctattt

SEQ ID NO: 632205 - DNA, 15 bp, Homo sapiens
ttataagcctatttt

SEQ ID NO: 632206 - DNA, 15 bp, Homo sapiens
tataagcctattttt

SEQ ID NO: 632207 - DNA, 15 bp, Homo sapiens
ataagcctattttta

SEQ ID NO: 632208 - DNA, 15 bp, Homo sapiens
taagcctatttttat

SEQ ID NO: 632209 - DNA, 15 bp, Homo sapiens
aagcctatttttatc

SEQ ID NO: 632210 - DNA, 15 bp, Homo sapiens
agcctatttttatcc

SEQ ID NO: 632211 - DNA, 15 bp, Homo sapiens
gcctatttttatcct

SEQ ID NO: 632212 - DNA, 15 bp, Homo sapiens
cctatttttatcctt

SEQ ID NO: 632213 - DNA, 15 bp, Homo sapiens
ctatttttatccttc

SEQ ID NO: 632214 - DNA, 15 bp, Homo sapiens
tatttttatccttct

SEQ ID NO: 632215 - DNA, 15 bp, Homo sapiens
atttttatccttctt

SEQ ID NO: 632216 - DNA, 15 bp, Homo sapiens
tttttatccttcttt

SEQ ID NO: 632217 - DNA, 15 bp, Homo sapiens
ttttatccttctttg

SEQ ID NO: 632218 - DNA, 15 bp, Homo sapiens
tttatccttctttgt

SEQ ID NO: 632219 - DNA, 15 bp, Homo sapiens
ttatccttctttgtt

SEQ ID NO: 632220 - DNA, 15 bp, Homo sapiens
tatccttctttgttt

SEQ ID NO: 632221 - DNA, 15 bp, Homo sapiens
atccttctttgtttt

SEQ ID NO: 632222 - DNA, 15 bp, Homo sapiens
tccttctttgttttg

SEQ ID NO: 632223 - DNA, 15 bp, Homo sapiens
ccttctttgttttga

SEQ ID NO: 632224 - DNA, 15 bp, Homo sapiens
cttctttgttttgat

SEQ ID NO: 632225 - DNA, 15 bp, Homo sapiens
ttctttgttttgatg

SEQ ID NO: 632226 - DNA, 15 bp, Homo sapiens
tctttgttttgatgt

SEQ ID NO: 632227 - DNA, 15 bp, Homo sapiens
ctttgttttgatgtc

SEQ ID NO: 632228 - DNA, 15 bp, Homo sapiens
tttgttttgatgtca

SEQ ID NO: 632229 - DNA, 15 bp, Homo sapiens
ttgttttgatgtcaa

SEQ ID NO: 632230 - DNA, 15 bp, Homo sapiens
tgttttgatgtcaaa

SEQ ID NO: 632231 - DNA, 15 bp, Homo sapiens
gttttgatgtcaaaa

SEQ ID NO: 632232 - DNA, 15 bp, Homo sapiens
ttttgatgtcaaaat

SEQ ID NO: 632233 - DNA, 15 bp, Homo sapiens
tttgatgtcaaaatt

SEQ ID NO: 632234 - DNA, 15 bp, Homo sapiens
ttgatgtcaaaatta

SEQ ID NO: 632235 - DNA, 15 bp, Homo sapiens
tgatgtcaaaattat

SEQ ID NO: 632236 - DNA, 15 bp, Homo sapiens
gatgtcaaaattata

SEQ ID NO: 632237 - DNA, 15 bp, Homo sapiens
atgtcaaaattatac

SEQ ID NO: 632238 - DNA, 15 bp, Homo sapiens
tgtcaaaattatact

SEQ ID NO: 632239 - DNA, 15 bp, Homo sapiens
gtcaaaattatactt

SEQ ID NO: 632240 - DNA, 15 bp, Homo sapiens
tcaaaattatacttg

SEQ ID NO: 632241 - DNA, 15 bp, Homo sapiens
caaaattatacttgc

SEQ ID NO: 632242 - DNA, 15 bp, Homo sapiens
aaaattatacttgct

SEQ ID NO: 632243 - DNA, 15 bp, Homo sapiens
aaattatacttgctt

SEQ ID NO: 632244 - DNA, 15 bp, Homo sapiens
aattatacttgcttt

SEQ ID NO: 632245 - DNA, 15 bp, Homo sapiens
attatacttgcttta

SEQ ID NO: 632246 - DNA, 15 bp, Homo sapiens
ttatacttgctttat

SEQ ID NO: 632247 - DNA, 15 bp, Homo sapiens
tatacttgctttata

SEQ ID NO: 632248 - DNA, 15 bp, Homo sapiens
atacttgctttataa

SEQ ID NO: 632249 - DNA, 15 bp, Homo sapiens
tacttgctttataaa

SEQ ID NO: 632250 - DNA, 15 bp, Homo sapiens
acttgctttataaaa

SEQ ID NO: 632251 - DNA, 15 bp, Homo sapiens
cttgctttataaaat

SEQ ID NO: 632252 - DNA, 15 bp, Homo sapiens
ttgctttataaaatg

SEQ ID NO: 632253 - DNA, 15 bp, Homo sapiens
tgctttataaaatga

SEQ ID NO: 632254 - DNA, 15 bp, Homo sapiens
gctttataaaatgat

SEQ ID NO: 632255 - DNA, 15 bp, Homo sapiens
ctttataaaatgatt

SEQ ID NO: 632256 - DNA, 15 bp, Homo sapiens
tttataaaatgattt

SEQ ID NO: 632257 - DNA, 15 bp, Homo sapiens
ttataaaatgatttg

SEQ ID NO: 632258 - DNA, 15 bp, Homo sapiens
tataaaatgatttgg

SEQ ID NO: 632259 - DNA, 15 bp, Homo sapiens
ataaaatgatttggg

SEQ ID NO: 632260 - DNA, 15 bp, Homo sapiens
taaaatgatttgggt

SEQ ID NO: 632261 - DNA, 15 bp, Homo sapiens
aaaatgatttgggta

SEQ ID NO: 632262 - DNA, 15 bp, Homo sapiens
aaatgatttgggtag

SEQ ID NO: 632263 - DNA, 15 bp, Homo sapiens
aatgatttgggtagc

SEQ ID NO: 632264 - DNA, 15 bp, Homo sapiens
atgatttgggtagct

SEQ ID NO: 632265 - DNA, 15 bp, Homo sapiens
tgatttgggtagctt

SEQ ID NO: 632266 - DNA, 15 bp, Homo sapiens
gatttgggtagcttt

SEQ ID NO: 632267 - DNA, 15 bp, Homo sapiens
atttgggtagctttt

SEQ ID NO: 632268 - DNA, 15 bp, Homo sapiens
tttgggtagcttttc

SEQ ID NO: 632269 - DNA, 15 bp, Homo sapiens
ttgggtagcttttct

SEQ ID NO: 632270 - DNA, 15 bp, Homo sapiens
tgggtagcttttctt

SEQ ID NO: 632271 - DNA, 15 bp, Homo sapiens
gggtagcttttctta

SEQ ID NO: 632272 - DNA, 15 bp, Homo sapiens
ggtagcttttcttat

SEQ ID NO: 632273 - DNA, 15 bp, Homo sapiens
gtagcttttcttatt

SEQ ID NO: 632274 - DNA, 15 bp, Homo sapiens
tagcttttcttattt

SEQ ID NO: 632275 - DNA, 15 bp, Homo sapiens
agcttttcttatttt

SEQ ID NO: 632276 - DNA, 15 bp, Homo sapiens
gcttttcttattttt

SEQ ID NO: 632277 - DNA, 15 bp, Homo sapiens
cttttcttatttttc

SEQ ID NO: 632278 - DNA, 15 bp, Homo sapiens
ttttcttatttttct

SEQ ID NO: 632279 - DNA, 15 bp, Homo sapiens
tttcttatttttctt

SEQ ID NO: 632280 - DNA, 15 bp, Homo sapiens
ttcttatttttcttt

SEQ ID NO: 632281 - DNA, 15 bp, Homo sapiens
tcttatttttctttt

SEQ ID NO: 632282 - DNA, 15 bp, Homo sapiens
cttatttttcttttc

SEQ ID NO: 632283 - DNA, 15 bp, Homo sapiens
ttatttttcttttca

SEQ ID NO: 632284 - DNA, 15 bp, Homo sapiens
tatttttcttttcac

SEQ ID NO: 632285 - DNA, 15 bp, Homo sapiens
atttttcttttcacc

SEQ ID NO: 632286 - DNA, 15 bp, Homo sapiens
tttttcttttcacca

SEQ ID NO: 632287 - DNA, 15 bp, Homo sapiens
ttttcttttcaccaa

SEQ ID NO: 632288 - DNA, 15 bp, Homo sapiens
tttcttttcaccaaa

SEQ ID NO: 632289 - DNA, 15 bp, Homo sapiens
ttcttttcaccaaaa

SEQ ID NO: 632290 - DNA, 15 bp, Homo sapiens
tcttttcaccaaaac

SEQ ID NO: 632291 - DNA, 15 bp, Homo sapiens
cttttcaccaaaact

SEQ ID NO: 632292 - DNA, 15 bp, Homo sapiens
ttttcaccaaaacta

SEQ ID NO: 632293 - DNA, 15 bp, Homo sapiens
tttcaccaaaactat

SEQ ID NO: 632294 - DNA, 15 bp, Homo sapiens
ttcaccaaaactatt

SEQ ID NO: 632295 - DNA, 15 bp, Homo sapiens
tcaccaaaactattt

SEQ ID NO: 632296 - DNA, 15 bp, Homo sapiens
caccaaaactattta

SEQ ID NO: 632297 - DNA, 15 bp, Homo sapiens
accaaaactatttat

SEQ ID NO: 632298 - DNA, 15 bp, Homo sapiens
ccaaaactatttata

SEQ ID NO: 632299 - DNA, 15 bp, Homo sapiens
caaaactatttatat

SEQ ID NO: 632300 - DNA, 15 bp, Homo sapiens
aaaactatttatata

SEQ ID NO: 632301 - DNA, 15 bp, Homo sapiens
aaactatttatataa

SEQ ID NO: 632302 - DNA, 15 bp, Homo sapiens
aactatttatataag

SEQ ID NO: 632303 - DNA, 15 bp, Homo sapiens
actatttatataaga

SEQ ID NO: 632304 - DNA, 15 bp, Homo sapiens
ctatttatataagat

SEQ ID NO: 632305 - DNA, 15 bp, Homo sapiens
tatttatataagatt

SEQ ID NO: 632306 - DNA, 15 bp, Homo sapiens
atttatataagatta

SEQ ID NO: 632307 - DNA, 15 bp, Homo sapiens
tttatataagattag

SEQ ID NO: 632308 - DNA, 15 bp, Homo sapiens
ttatataagattaga

SEQ ID NO: 632309 - DNA, 15 bp, Homo sapiens
tatataagattagaa

SEQ ID NO: 632310 - DNA, 15 bp, Homo sapiens
atataagattagaat

SEQ ID NO: 632311 - DNA, 15 bp, Homo sapiens
tataagattagaatt

SEQ ID NO: 632312 - DNA, 15 bp, Homo sapiens
ataagattagaatta

SEQ ID NO: 632313 - DNA, 15 bp, Homo sapiens
taagattagaattat

SEQ ID NO: 632314 - DNA, 15 bp, Homo sapiens
aagattagaattatc

SEQ ID NO: 632315 - DNA, 15 bp, Homo sapiens
agattagaattatct

SEQ ID NO: 632316 - DNA, 15 bp, Homo sapiens
gattagaattatcta

SEQ ID NO: 632317 - DNA, 15 bp, Homo sapiens
attagaattatctac

SEQ ID NO: 632318 - DNA, 15 bp, Homo sapiens
ttagaattatctact

SEQ ID NO: 632319 - DNA, 15 bp, Homo sapiens
tagaattatctactg

SEQ ID NO: 632320 - DNA, 15 bp, Homo sapiens
agaattatctactgt

SEQ ID NO: 632321 - DNA, 15 bp, Homo sapiens
gaattatctactgtt

SEQ ID NO: 632322 - DNA, 15 bp, Homo sapiens
aattatctactgttt

SEQ ID NO: 632323 - DNA, 15 bp, Homo sapiens
attatctactgtttg

SEQ ID NO: 632324 - DNA, 15 bp, Homo sapiens
ttatctactgtttga

SEQ ID NO: 632325 - DNA, 15 bp, Homo sapiens
tatctactgtttgaa

SEQ ID NO: 632326 - DNA, 15 bp, Homo sapiens
atctactgtttgaag

SEQ ID NO: 632327 - DNA, 15 bp, Homo sapiens
tctactgtttgaagt

SEQ ID NO: 632328 - DNA, 15 bp, Homo sapiens
ctactgtttgaagtt

SEQ ID NO: 632329 - DNA, 15 bp, Homo sapiens
tactgtttgaagttt

SEQ ID NO: 632330 - DNA, 15 bp, Homo sapiens
actgtttgaagtttt

SEQ ID NO: 632331 - DNA, 15 bp, Homo sapiens
ctgtttgaagttttg

SEQ ID NO: 632332 - DNA, 15 bp, Homo sapiens
tgtttgaagttttgg

SEQ ID NO: 632333 - DNA, 15 bp, Homo sapiens
gtttgaagttttggt

SEQ ID NO: 632334 - DNA, 15 bp, Homo sapiens
tttgaagttttggta

SEQ ID NO: 632335 - DNA, 15 bp, Homo sapiens
ttgaagttttggtaa

SEQ ID NO: 632336 - DNA, 15 bp, Homo sapiens
tgaagttttggtaaa

SEQ ID NO: 632337 - DNA, 15 bp, Homo sapiens
gaagttttggtaaaa

SEQ ID NO: 632338 - DNA, 15 bp, Homo sapiens
aagttttggtaaaat

SEQ ID NO: 632339 - DNA, 15 bp, Homo sapiens
agttttggtaaaatt

SEQ ID NO: 632340 - DNA, 15 bp, Homo sapiens
gttttggtaaaattt

SEQ ID NO: 632341 - DNA, 15 bp, Homo sapiens
ttttggtaaaatttg

SEQ ID NO: 632342 - DNA, 15 bp, Homo sapiens
tttggtaaaatttgc

SEQ ID NO: 632343 - DNA, 15 bp, Homo sapiens
ttggtaaaatttgcc

SEQ ID NO: 632344 - DNA, 15 bp, Homo sapiens
tggtaaaatttgcct

SEQ ID NO: 632345 - DNA, 15 bp, Homo sapiens
ggtaaaatttgcctg

SEQ ID NO: 632346 - DNA, 15 bp, Homo sapiens
gtaaaatttgcctgt

SEQ ID NO: 632347 - DNA, 15 bp, Homo sapiens
taaaatttgcctgta

SEQ ID NO: 632348 - DNA, 15 bp, Homo sapiens
aaaatttgcctgtaa

SEQ ID NO: 632349 - DNA, 15 bp, Homo sapiens
aaatttgcctgtaac

SEQ ID NO: 632350 - DNA, 15 bp, Homo sapiens
aatttgcctgtaaca

SEQ ID NO: 632351 - DNA, 15 bp, Homo sapiens
atttgcctgtaacat

SEQ ID NO: 632352 - DNA, 15 bp, Homo sapiens
tttgcctgtaacatt

SEQ ID NO: 632353 - DNA, 15 bp, Homo sapiens
ttgcctgtaacatta

SEQ ID NO: 632354 - DNA, 15 bp, Homo sapiens
tgcctgtaacattat

SEQ ID NO: 632355 - DNA, 15 bp, Homo sapiens
gcctgtaacattatc

SEQ ID NO: 632356 - DNA, 15 bp, Homo sapiens
cctgtaacattatct

SEQ ID NO: 632357 - DNA, 15 bp, Homo sapiens
ctgtaacattatcta

SEQ ID NO: 632358 - DNA, 15 bp, Homo sapiens
tgtaacattatctag

SEQ ID NO: 632359 - DNA, 15 bp, Homo sapiens
gtaacattatctagc

SEQ ID NO: 632360 - DNA, 15 bp, Homo sapiens
taacattatctagcc

SEQ ID NO: 632361 - DNA, 15 bp, Homo sapiens
aacattatctagccc

SEQ ID NO: 632362 - DNA, 15 bp, Homo sapiens
acattatctagccct

SEQ ID NO: 632363 - DNA, 15 bp, Homo sapiens
cattatctagccctg

SEQ ID NO: 632364 - DNA, 15 bp, Homo sapiens
attatctagccctgt

SEQ ID NO: 632365 - DNA, 15 bp, Homo sapiens
ttatctagccctgtt

SEQ ID NO: 632366 - DNA, 15 bp, Homo sapiens
tatctagccctgttg

SEQ ID NO: 632367 - DNA, 15 bp, Homo sapiens
atctagccctgttgt

SEQ ID NO: 632368 - DNA, 15 bp, Homo sapiens
tctagccctgttgtt

SEQ ID NO: 632369 - DNA, 15 bp, Homo sapiens
ctagccctgttgttt

SEQ ID NO: 632370 - DNA, 15 bp, Homo sapiens
tagccctgttgtttt

SEQ ID NO: 632371 - DNA, 15 bp, Homo sapiens
agccctgttgttttt

SEQ ID NO: 632372 - DNA, 15 bp, Homo sapiens
gccctgttgtttttt

SEQ ID NO: 632373 - DNA, 15 bp, Homo sapiens
ccctgttgttttttg

SEQ ID NO: 632374 - DNA, 15 bp, Homo sapiens
cctgttgttttttga

SEQ ID NO: 632375 - DNA, 15 bp, Homo sapiens
ctgttgttttttgag

SEQ ID NO: 632376 - DNA, 15 bp, Homo sapiens
tgttgttttttgagg

SEQ ID NO: 632377 - DNA, 15 bp, Homo sapiens
gttgttttttgaggt

SEQ ID NO: 632378 - DNA, 15 bp, Homo sapiens
ttgttttttgaggtg

SEQ ID NO: 632379 - DNA, 15 bp, Homo sapiens
tgttttttgaggtgg

SEQ ID NO: 632380 - DNA, 15 bp, Homo sapiens
gttttttgaggtggg

SEQ ID NO: 632381 - DNA, 15 bp, Homo sapiens
ttttttgaggtggga

SEQ ID NO: 632382 - DNA, 15 bp, Homo sapiens
tttttgaggtgggag

SEQ ID NO: 632383 - DNA, 15 bp, Homo sapiens
ttttgaggtgggaga

SEQ ID NO: 632384 - DNA, 15 bp, Homo sapiens
tttgaggtgggagac

SEQ ID NO: 632385 - DNA, 15 bp, Homo sapiens
ttgaggtgggagact

SEQ ID NO: 632386 - DNA, 15 bp, Homo sapiens
tgaggtgggagactt

SEQ ID NO: 632387 - DNA, 15 bp, Homo sapiens
gaggtgggagacttt

SEQ ID NO: 632388 - DNA, 15 bp, Homo sapiens
aggtgggagactttt

SEQ ID NO: 632389 - DNA, 15 bp, Homo sapiens
ggtgggagacttttg

SEQ ID NO: 632390 - DNA, 15 bp, Homo sapiens
gtgggagacttttga

SEQ ID NO: 632391 - DNA, 15 bp, Homo sapiens
tgggagacttttgaa

SEQ ID NO: 632392 - DNA, 15 bp, Homo sapiens
gggagacttttgaat

SEQ ID NO: 632393 - DNA, 15 bp, Homo sapiens
ggagacttttgaata

SEQ ID NO: 632394 - DNA, 15 bp, Homo sapiens
gagacttttgaatat

SEQ ID NO: 632395 - DNA, 15 bp, Homo sapiens
agacttttgaatatt

SEQ ID NO: 632396 - DNA, 15 bp, Homo sapiens
gacttttgaatattg

SEQ ID NO: 632397 - DNA, 15 bp, Homo sapiens
acttttgaatattga

SEQ ID NO: 632398 - DNA, 15 bp, Homo sapiens
cttttgaatattgaa

SEQ ID NO: 632399 - DNA, 15 bp, Homo sapiens
ttttgaatattgaat

SEQ ID NO: 632400 - DNA, 15 bp, Homo sapiens
tttgaatattgaatc

SEQ ID NO: 632401 - DNA, 15 bp, Homo sapiens
ttgaatattgaatca

SEQ ID NO: 632402 - DNA, 15 bp, Homo sapiens
tgaatattgaatcaa

SEQ ID NO: 632403 - DNA, 15 bp, Homo sapiens
gaatattgaatcaat

SEQ ID NO: 632404 - DNA, 15 bp, Homo sapiens
aatattgaatcaata

SEQ ID NO: 632405 - DNA, 15 bp, Homo sapiens
atattgaatcaatat

SEQ ID NO: 632406 - DNA, 15 bp, Homo sapiens
tattgaatcaatatt

SEQ ID NO: 632407 - DNA, 15 bp, Homo sapiens
attgaatcaatattt

SEQ ID NO: 632408 - DNA, 15 bp, Homo sapiens
ttgaatcaatatttt

SEQ ID NO: 632409 - DNA, 15 bp, Homo sapiens
tgaatcaatatttta

SEQ ID NO: 632410 - DNA, 15 bp, Homo sapiens
gaatcaatattttaa

SEQ ID NO: 632411 - DNA, 15 bp, Homo sapiens
aatcaatattttaat

SEQ ID NO: 632412 - DNA, 15 bp, Homo sapiens
atcaatattttaata

SEQ ID NO: 632413 - DNA, 15 bp, Homo sapiens
tcaatattttaatag

SEQ ID NO: 632414 - DNA, 15 bp, Homo sapiens
caatattttaatagc

SEQ ID NO: 632415 - DNA, 15 bp, Homo sapiens
aatattttaatagcc

SEQ ID NO: 632416 - DNA, 15 bp, Homo sapiens
atattttaatagcca

SEQ ID NO: 632417 - DNA, 15 bp, Homo sapiens
tattttaatagccat

SEQ ID NO: 632418 - DNA, 15 bp, Homo sapiens
attttaatagccatt

SEQ ID NO: 632419 - DNA, 15 bp, Homo sapiens
ttttaatagccatta

SEQ ID NO: 632420 - DNA, 15 bp, Homo sapiens
tttaatagccattac

SEQ ID NO: 632421 - DNA, 15 bp, Homo sapiens
ttaatagccattact

SEQ ID NO: 632422 - DNA, 15 bp, Homo sapiens
taatagccattactt

SEQ ID NO: 632423 - DNA, 15 bp, Homo sapiens
aatagccattacttt

SEQ ID NO: 632424 - DNA, 15 bp, Homo sapiens
atagccattactttt

SEQ ID NO: 632425 - DNA, 15 bp, Homo sapiens
tagccattacttttt

SEQ ID NO: 632426 - DNA, 15 bp, Homo sapiens
agccattacttttta

SEQ ID NO: 632427 - DNA, 15 bp, Homo sapiens
gccattactttttaa

SEQ ID NO: 632428 - DNA, 15 bp, Homo sapiens
ccattactttttaag

SEQ ID NO: 632429 - DNA, 15 bp, Homo sapiens
cattactttttaagt

SEQ ID NO: 632430 - DNA, 15 bp, Homo sapiens
attactttttaagtt

SEQ ID NO: 632431 - DNA, 15 bp, Homo sapiens
ttactttttaagttt

SEQ ID NO: 632432 - DNA, 15 bp, Homo sapiens
tactttttaagtttt

SEQ ID NO: 632433 - DNA, 15 bp, Homo sapiens
actttttaagttttc

SEQ ID NO: 632434 - DNA, 15 bp, Homo sapiens
ctttttaagttttct

SEQ ID NO: 632435 - DNA, 15 bp, Homo sapiens
tttttaagttttcta

SEQ ID NO: 632436 - DNA, 15 bp, Homo sapiens
ttttaagttttctat

SEQ ID NO: 632437 - DNA, 15 bp, Homo sapiens
tttaagttttctatt

SEQ ID NO: 632438 - DNA, 15 bp, Homo sapiens
ttaagttttctattc

SEQ ID NO: 632439 - DNA, 15 bp, Homo sapiens
taagttttctattcc

SEQ ID NO: 632440 - DNA, 15 bp, Homo sapiens
aagttttctattcct

SEQ ID NO: 632441 - DNA, 15 bp, Homo sapiens
agttttctattcctt

SEQ ID NO: 632442 - DNA, 15 bp, Homo sapiens
gttttctattccttt

SEQ ID NO: 632443 - DNA, 15 bp, Homo sapiens
ttttctattccttta

SEQ ID NO: 632444 - DNA, 15 bp, Homo sapiens
tttctattcctttat

SEQ ID NO: 632445 - DNA, 15 bp, Homo sapiens
ttctattcctttata

SEQ ID NO: 632446 - DNA, 15 bp, Homo sapiens
tctattcctttataa

SEQ ID NO: 632447 - DNA, 15 bp, Homo sapiens
ctattcctttataaa

SEQ ID NO: 632448 - DNA, 15 bp, Homo sapiens
tattcctttataaac

SEQ ID NO: 632449 - DNA, 15 bp, Homo sapiens
attcctttataaaca

SEQ ID NO: 632450 - DNA, 15 bp, Homo sapiens
ttcctttataaacaa

SEQ ID NO: 632451 - DNA, 15 bp, Homo sapiens
tcctttataaacaaa

SEQ ID NO: 632452 - DNA, 15 bp, Homo sapiens
cctttataaacaaat

SEQ ID NO: 632453 - DNA, 15 bp, Homo sapiens
ctttataaacaaatt

SEQ ID NO: 632454 - DNA, 15 bp, Homo sapiens
tttataaacaaattt

SEQ ID NO: 632455 - DNA, 15 bp, Homo sapiens
ttataaacaaatttt

SEQ ID NO: 632456 - DNA, 15 bp, Homo sapiens
tataaacaaattttg

SEQ ID NO: 632457 - DNA, 15 bp, Homo sapiens
ataaacaaattttga

SEQ ID NO: 632458 - DNA, 15 bp, Homo sapiens
taaacaaattttgat

SEQ ID NO: 632459 - DNA, 15 bp, Homo sapiens
aaacaaattttgata

SEQ ID NO: 632460 - DNA, 15 bp, Homo sapiens
aacaaattttgataa

SEQ ID NO: 632461 - DNA, 15 bp, Homo sapiens
acaaattttgataac

SEQ ID NO: 632462 - DNA, 15 bp, Homo sapiens
caaattttgataact

SEQ ID NO: 632463 - DNA, 15 bp, Homo sapiens
aaattttgataactc

SEQ ID NO: 632464 - DNA, 15 bp, Homo sapiens
aattttgataactca

SEQ ID NO: 632465 - DNA, 15 bp, Homo sapiens
attttgataactcat

SEQ ID NO: 632466 - DNA, 15 bp, Homo sapiens
ttttgataactcata

SEQ ID NO: 632467 - DNA, 15 bp, Homo sapiens
tttgataactcatat

SEQ ID NO: 632468 - DNA, 15 bp, Homo sapiens
ttgataactcatatt

SEQ ID NO: 632469 - DNA, 15 bp, Homo sapiens
tgataactcatattt

SEQ ID NO: 632470 - DNA, 15 bp, Homo sapiens
gataactcatatttt

SEQ ID NO: 632471 - DNA, 15 bp, Homo sapiens
ataactcatattttt

SEQ ID NO: 632472 - DNA, 15 bp, Homo sapiens
taactcatatttttc

SEQ ID NO: 632473 - DNA, 15 bp, Homo sapiens
aactcatatttttct

SEQ ID NO: 632474 - DNA, 15 bp, Homo sapiens
actcatatttttcta

SEQ ID NO: 632475 - DNA, 15 bp, Homo sapiens
ctcatatttttctag

SEQ ID NO: 632476 - DNA, 15 bp, Homo sapiens
tcatatttttctaga

SEQ ID NO: 632477 - DNA, 15 bp, Homo sapiens
catatttttctagaa

SEQ ID NO: 632478 - DNA, 15 bp, Homo sapiens
atatttttctagaaa

SEQ ID NO: 632479 - DNA, 15 bp, Homo sapiens
tatttttctagaaaa

SEQ ID NO: 632480 - DNA, 15 bp, Homo sapiens
atttttctagaaaat

SEQ ID NO: 632481 - DNA, 15 bp, Homo sapiens
tttttctagaaaatt

SEQ ID NO: 632482 - DNA, 15 bp, Homo sapiens
ttttctagaaaatta

SEQ ID NO: 632483 - DNA, 15 bp, Homo sapiens
tttctagaaaattaa

SEQ ID NO: 632484 - DNA, 15 bp, Homo sapiens
ttctagaaaattaat

SEQ ID NO: 632485 - DNA, 15 bp, Homo sapiens
tctagaaaattaatc

SEQ ID NO: 632486 - DNA, 15 bp, Homo sapiens
ctagaaaattaatct

SEQ ID NO: 632487 - DNA, 15 bp, Homo sapiens
tagaaaattaatctt

SEQ ID NO: 632488 - DNA, 15 bp, Homo sapiens
agaaaattaatctta

SEQ ID NO: 632489 - DNA, 15 bp, Homo sapiens
gaaaattaatcttaa

SEQ ID NO: 632490 - DNA, 15 bp, Homo sapiens
aaaattaatcttaac

SEQ ID NO: 632491 - DNA, 15 bp, Homo sapiens
aaattaatcttaacc

SEQ ID NO: 632492 - DNA, 15 bp, Homo sapiens
aattaatcttaacct

SEQ ID NO: 632493 - DNA, 15 bp, Homo sapiens
attaatcttaacctg

SEQ ID NO: 632494 - DNA, 15 bp, Homo sapiens
ttaatcttaacctgg

SEQ ID NO: 632495 - DNA, 15 bp, Homo sapiens
taatcttaacctggt

SEQ ID NO: 632496 - DNA, 15 bp, Homo sapiens
aatcttaacctggtt

SEQ ID NO: 632497 - DNA, 15 bp, Homo sapiens
atcttaacctggttt

SEQ ID NO: 632498 - DNA, 15 bp, Homo sapiens
tcttaacctggtttt

SEQ ID NO: 632499 - DNA, 15 bp, Homo sapiens
cttaacctggttttc

SEQ ID NO: 632500 - DNA, 15 bp, Homo sapiens
ttaacctggttttca

SEQ ID NO: 632501 - DNA, 15 bp, Homo sapiens
taacctggttttcaa

SEQ ID NO: 632502 - DNA, 15 bp, Homo sapiens
aacctggttttcaaa

SEQ ID NO: 632503 - DNA, 15 bp, Homo sapiens
acctggttttcaaat

SEQ ID NO: 632504 - DNA, 15 bp, Homo sapiens
cctggttttcaaatt

SEQ ID NO: 632505 - DNA, 15 bp, Homo sapiens
ctggttttcaaattt

SEQ ID NO: 632506 - DNA, 15 bp, Homo sapiens
tggttttcaaattta

SEQ ID NO: 632507 - DNA, 15 bp, Homo sapiens
ggttttcaaatttac

SEQ ID NO: 632508 - DNA, 15 bp, Homo sapiens
gttttcaaatttact

SEQ ID NO: 632509 - DNA, 15 bp, Homo sapiens
ttttcaaatttacta

SEQ ID NO: 632510 - DNA, 15 bp, Homo sapiens
tttcaaatttactac

SEQ ID NO: 632511 - DNA, 15 bp, Homo sapiens
ttcaaatttactacc

SEQ ID NO: 632512 - DNA, 15 bp, Homo sapiens
tcaaatttactacca

SEQ ID NO: 632513 - DNA, 15 bp, Homo sapiens
caaatttactaccat

SEQ ID NO: 632514 - DNA, 15 bp, Homo sapiens
aaatttactaccatg

SEQ ID NO: 632515 - DNA, 15 bp, Homo sapiens
aatttactaccatga

SEQ ID NO: 632516 - DNA, 15 bp, Homo sapiens
atttactaccatgaa

SEQ ID NO: 632517 - DNA, 15 bp, Homo sapiens
tttactaccatgaaa

SEQ ID NO: 632518 - DNA, 15 bp, Homo sapiens
ttactaccatgaaat

SEQ ID NO: 632519 - DNA, 15 bp, Homo sapiens
tactaccatgaaatt

SEQ ID NO: 632520 - DNA, 15 bp, Homo sapiens
actaccatgaaatta

SEQ ID NO: 632521 - DNA, 15 bp, Homo sapiens
ctaccatgaaattac

SEQ ID NO: 632522 - DNA, 15 bp, Homo sapiens
taccatgaaattact

SEQ ID NO: 632523 - DNA, 15 bp, Homo sapiens
accatgaaattactt

SEQ ID NO: 632524 - DNA, 15 bp, Homo sapiens
ccatgaaattactta

SEQ ID NO: 632525 - DNA, 15 bp, Homo sapiens
catgaaattacttag

SEQ ID NO: 632526 - DNA, 15 bp, Homo sapiens
atgaaattacttagt

SEQ ID NO: 632527 - DNA, 15 bp, Homo sapiens
tgaaattacttagta

SEQ ID NO: 632528 - DNA, 15 bp, Homo sapiens
gaaattacttagtat

SEQ ID NO: 632529 - DNA, 15 bp, Homo sapiens
aaattacttagtatt

SEQ ID NO: 632530 - DNA, 15 bp, Homo sapiens
aattacttagtattt

SEQ ID NO: 632531 - DNA, 15 bp, Homo sapiens
attacttagtatttg

SEQ ID NO: 632532 - DNA, 15 bp, Homo sapiens
ttacttagtatttgc

SEQ ID NO: 632533 - DNA, 15 bp, Homo sapiens
tacttagtatttgct

SEQ ID NO: 632534 - DNA, 15 bp, Homo sapiens
acttagtatttgctt

SEQ ID NO: 632535 - DNA, 15 bp, Homo sapiens
cttagtatttgctta

SEQ ID NO: 632536 - DNA, 15 bp, Homo sapiens
ttagtatttgcttat

SEQ ID NO: 632537 - DNA, 15 bp, Homo sapiens
tagtatttgcttatg

SEQ ID NO: 632538 - DNA, 15 bp, Homo sapiens
agtatttgcttatga

SEQ ID NO: 632539 - DNA, 15 bp, Homo sapiens
gtatttgcttatgat

SEQ ID NO: 632540 - DNA, 15 bp, Homo sapiens
tatttgcttatgatt

SEQ ID NO: 632541 - DNA, 15 bp, Homo sapiens
atttgcttatgattt

SEQ ID NO: 632542 - DNA, 15 bp, Homo sapiens
tttgcttatgattta

SEQ ID NO: 632543 - DNA, 15 bp, Homo sapiens
ttgcttatgatttaa

SEQ ID NO: 632544 - DNA, 15 bp, Homo sapiens
tgcttatgatttaaa

SEQ ID NO: 632545 - DNA, 15 bp, Homo sapiens
gcttatgatttaaaa

SEQ ID NO: 632546 - DNA, 15 bp, Homo sapiens
cttatgatttaaaac

SEQ ID NO: 632547 - DNA, 15 bp, Homo sapiens
ttatgatttaaaact

SEQ ID NO: 632548 - DNA, 15 bp, Homo sapiens
tatgatttaaaactt

SEQ ID NO: 632549 - DNA, 15 bp, Homo sapiens
atgatttaaaacttt

SEQ ID NO: 632550 - DNA, 15 bp, Homo sapiens
tgatttaaaacttta

SEQ ID NO: 632551 - DNA, 15 bp, Homo sapiens
gatttaaaactttat

SEQ ID NO: 632552 - DNA, 15 bp, Homo sapiens
atttaaaactttatt

SEQ ID NO: 632553 - DNA, 15 bp, Homo sapiens
tttaaaactttattt

SEQ ID NO: 632554 - DNA, 15 bp, Homo sapiens
ttaaaactttattta

SEQ ID NO: 632555 - DNA, 15 bp, Homo sapiens
taaaactttatttat

SEQ ID NO: 632556 - DNA, 15 bp, Homo sapiens
aaaactttatttatt

SEQ ID NO: 632557 - DNA, 15 bp, Homo sapiens
aaactttatttattt

SEQ ID NO: 632558 - DNA, 15 bp, Homo sapiens
aactttatttatttt

SEQ ID NO: 632559 - DNA, 15 bp, Homo sapiens
actttatttatttta

SEQ ID NO: 632560 - DNA, 15 bp, Homo sapiens
ctttatttattttac

SEQ ID NO: 632561 - DNA, 15 bp, Homo sapiens
tttatttattttacc

SEQ ID NO: 632562 - DNA, 15 bp, Homo sapiens
ttatttattttacct

SEQ ID NO: 632563 - DNA, 15 bp, Homo sapiens
tatttattttacctt

SEQ ID NO: 632564 - DNA, 15 bp, Homo sapiens
atttattttaccttt

SEQ ID NO: 632565 - DNA, 15 bp, Homo sapiens
tttattttacctttc

SEQ ID NO: 632566 - DNA, 15 bp, Homo sapiens
ttattttacctttcc

SEQ ID NO: 632567 - DNA, 15 bp, Homo sapiens
tattttacctttccc

SEQ ID NO: 632568 - DNA, 15 bp, Homo sapiens
attttacctttccca

SEQ ID NO: 632569 - DNA, 15 bp, Homo sapiens
ttttacctttcccat

SEQ ID NO: 632570 - DNA, 15 bp, Homo sapiens
tttacctttcccatt

SEQ ID NO: 632571 - DNA, 15 bp, Homo sapiens
ttacctttcccattt

SEQ ID NO: 632572 - DNA, 15 bp, Homo sapiens
tacctttcccatttt

SEQ ID NO: 632573 - DNA, 15 bp, Homo sapiens
acctttcccattttc

SEQ ID NO: 632574 - DNA, 15 bp, Homo sapiens
cctttcccattttca

SEQ ID NO: 632575 - DNA, 15 bp, Homo sapiens
ctttcccattttcaa

SEQ ID NO: 632576 - DNA, 15 bp, Homo sapiens
tttcccattttcaat

SEQ ID NO: 632577 - DNA, 15 bp, Homo sapiens
ttcccattttcaatt

SEQ ID NO: 632578 - DNA, 15 bp, Homo sapiens
tcccattttcaatta

SEQ ID NO: 632579 - DNA, 15 bp, Homo sapiens
cccattttcaattag

SEQ ID NO: 632580 - DNA, 15 bp, Homo sapiens
ccattttcaattagt

SEQ ID NO: 632581 - DNA, 15 bp, Homo sapiens
cattttcaattagta

SEQ ID NO: 632582 - DNA, 15 bp, Homo sapiens
attttcaattagtat

SEQ ID NO: 632583 - DNA, 15 bp, Homo sapiens
ttttcaattagtatt

SEQ ID NO: 632584 - DNA, 15 bp, Homo sapiens
tttcaattagtattt

SEQ ID NO: 632585 - DNA, 15 bp, Homo sapiens
ttcaattagtatttg

SEQ ID NO: 632586 - DNA, 15 bp, Homo sapiens
tcaattagtatttgt

SEQ ID NO: 632587 - DNA, 15 bp, Homo sapiens
caattagtatttgtg

SEQ ID NO: 632588 - DNA, 15 bp, Homo sapiens
aattagtatttgtga

SEQ ID NO: 632589 - DNA, 15 bp, Homo sapiens
attagtatttgtgat

SEQ ID NO: 632590 - DNA, 15 bp, Homo sapiens
ttagtatttgtgatt

SEQ ID NO: 632591 - DNA, 15 bp, Homo sapiens
tagtatttgtgattt

SEQ ID NO: 632592 - DNA, 15 bp, Homo sapiens
agtatttgtgattta

SEQ ID NO: 632593 - DNA, 15 bp, Homo sapiens
gtatttgtgatttat

SEQ ID NO: 632594 - DNA, 15 bp, Homo sapiens
tatttgtgatttata

SEQ ID NO: 632595 - DNA, 15 bp, Homo sapiens
atttgtgatttatat

SEQ ID NO: 632596 - DNA, 15 bp, Homo sapiens
tttgtgatttatatc

SEQ ID NO: 632597 - DNA, 15 bp, Homo sapiens
ttgtgatttatatct

SEQ ID NO: 632598 - DNA, 15 bp, Homo sapiens
tgtgatttatatctc

SEQ ID NO: 632599 - DNA, 15 bp, Homo sapiens
gtgatttatatctct

SEQ ID NO: 632600 - DNA, 15 bp, Homo sapiens
tgatttatatctctt

SEQ ID NO: 632601 - DNA, 15 bp, Homo sapiens
gatttatatctcttt

SEQ ID NO: 632602 - DNA, 15 bp, Homo sapiens
atttatatctctttt

SEQ ID NO: 632603 - DNA, 15 bp, Homo sapiens
tttatatctcttttc

SEQ ID NO: 632604 - DNA, 15 bp, Homo sapiens
ttatatctcttttct

SEQ ID NO: 632605 - DNA, 15 bp, Homo sapiens
tatatctcttttctt

SEQ ID NO: 632606 - DNA, 15 bp, Homo sapiens
atatctcttttcttc

SEQ ID NO: 632607 - DNA, 15 bp, Homo sapiens
tatctcttttcttca

SEQ ID NO: 632608 - DNA, 15 bp, Homo sapiens
atctcttttcttcaa

SEQ ID NO: 632609 - DNA, 15 bp, Homo sapiens
tctcttttcttcaac

SEQ ID NO: 632610 - DNA, 15 bp, Homo sapiens
ctcttttcttcaaca

SEQ ID NO: 632611 - DNA, 15 bp, Homo sapiens
tcttttcttcaacag

SEQ ID NO: 632612 - DNA, 15 bp, Homo sapiens
cttttcttcaacagt

SEQ ID NO: 632613 - DNA, 15 bp, Homo sapiens
ttttcttcaacagtc

SEQ ID NO: 632614 - DNA, 15 bp, Homo sapiens
tttcttcaacagtct

SEQ ID NO: 632615 - DNA, 15 bp, Homo sapiens
ttcttcaacagtctt

SEQ ID NO: 632616 - DNA, 15 bp, Homo sapiens
tcttcaacagtctta

SEQ ID NO: 632617 - DNA, 15 bp, Homo sapiens
cttcaacagtcttat

SEQ ID NO: 632618 - DNA, 15 bp, Homo sapiens
ttcaacagtcttatt

SEQ ID NO: 632619 - DNA, 15 bp, Homo sapiens
tcaacagtcttattg

SEQ ID NO: 632620 - DNA, 15 bp, Homo sapiens
caacagtcttattga

SEQ ID NO: 632621 - DNA, 15 bp, Homo sapiens
aacagtcttattgac

SEQ ID NO: 632622 - DNA, 15 bp, Homo sapiens
acagtcttattgact

SEQ ID NO: 632623 - DNA, 15 bp, Homo sapiens
cagtcttattgactt

SEQ ID NO: 632624 - DNA, 15 bp, Homo sapiens
agtcttattgacttg

SEQ ID NO: 632625 - DNA, 15 bp, Homo sapiens
gtcttattgacttgc

SEQ ID NO: 632626 - DNA, 15 bp, Homo sapiens
tcttattgacttgca

SEQ ID NO: 632627 - DNA, 15 bp, Homo sapiens
cttattgacttgcat

SEQ ID NO: 632628 - DNA, 15 bp, Homo sapiens
ttattgacttgcatg

SEQ ID NO: 632629 - DNA, 15 bp, Homo sapiens
tattgacttgcatgt

SEQ ID NO: 632630 - DNA, 15 bp, Homo sapiens
attgacttgcatgtt

SEQ ID NO: 632631 - DNA, 15 bp, Homo sapiens
ttgacttgcatgttt

SEQ ID NO: 632632 - DNA, 15 bp, Homo sapiens
tgacttgcatgtttt

SEQ ID NO: 632633 - DNA, 15 bp, Homo sapiens
gacttgcatgttttt

SEQ ID NO: 632634 - DNA, 15 bp, Homo sapiens
acttgcatgttttta

SEQ ID NO: 632635 - DNA, 15 bp, Homo sapiens
cttgcatgtttttag

SEQ ID NO: 632636 - DNA, 15 bp, Homo sapiens
ttgcatgtttttagt

SEQ ID NO: 632637 - DNA, 15 bp, Homo sapiens
tgcatgtttttagtt

SEQ ID NO: 632638 - DNA, 15 bp, Homo sapiens
gcatgtttttagttt

SEQ ID NO: 632639 - DNA, 15 bp, Homo sapiens
catgtttttagtttt

SEQ ID NO: 632640 - DNA, 15 bp, Homo sapiens
atgtttttagttttc

SEQ ID NO: 632641 - DNA, 15 bp, Homo sapiens
tgtttttagttttca

SEQ ID NO: 632642 - DNA, 15 bp, Homo sapiens
gtttttagttttcaa

SEQ ID NO: 632643 - DNA, 15 bp, Homo sapiens
tttttagttttcaaa

SEQ ID NO: 632644 - DNA, 15 bp, Homo sapiens
ttttagttttcaaaa

SEQ ID NO: 632645 - DNA, 15 bp, Homo sapiens
tttagttttcaaaaa

SEQ ID NO: 632646 - DNA, 15 bp, Homo sapiens
ttagttttcaaaaaa

SEQ ID NO: 632647 - DNA, 15 bp, Homo sapiens
tagttttcaaaaaac

SEQ ID NO: 632648 - DNA, 15 bp, Homo sapiens
agttttcaaaaaaca

SEQ ID NO: 632649 - DNA, 15 bp, Homo sapiens
gttttcaaaaaacaa

SEQ ID NO: 632650 - DNA, 15 bp, Homo sapiens
ttttcaaaaaacaac

SEQ ID NO: 632651 - DNA, 15 bp, Homo sapiens
tttcaaaaaacaact

SEQ ID NO: 632652 - DNA, 15 bp, Homo sapiens
ttcaaaaaacaactt

SEQ ID NO: 632653 - DNA, 15 bp, Homo sapiens
tcaaaaaacaacttt

SEQ ID NO: 632654 - DNA, 15 bp, Homo sapiens
caaaaaacaactttt

SEQ ID NO: 632655 - DNA, 15 bp, Homo sapiens
aaaaaacaacttttg

SEQ ID NO: 632656 - DNA, 15 bp, Homo sapiens
aaaaacaacttttga

SEQ ID NO: 632657 - DNA, 15 bp, Homo sapiens
aaaacaacttttgaa

SEQ ID NO: 632658 - DNA, 15 bp, Homo sapiens
aaacaacttttgaat

SEQ ID NO: 632659 - DNA, 15 bp, Homo sapiens
aacaacttttgaatt

SEQ ID NO: 632660 - DNA, 15 bp, Homo sapiens
acaacttttgaattg

SEQ ID NO: 632661 - DNA, 15 bp, Homo sapiens
caacttttgaattga

SEQ ID NO: 632662 - DNA, 15 bp, Homo sapiens
aacttttgaattgat

SEQ ID NO: 632663 - DNA, 15 bp, Homo sapiens
acttttgaattgata

SEQ ID NO: 632664 - DNA, 15 bp, Homo sapiens
cttttgaattgatat

SEQ ID NO: 632665 - DNA, 15 bp, Homo sapiens
ttttgaattgatata

SEQ ID NO: 632666 - DNA, 15 bp, Homo sapiens
tttgaattgatatat

SEQ ID NO: 632667 - DNA, 15 bp, Homo sapiens
ttgaattgatatatc

SEQ ID NO: 632668 - DNA, 15 bp, Homo sapiens
tgaattgatatatcc

SEQ ID NO: 632669 - DNA, 15 bp, Homo sapiens
gaattgatatatcct

SEQ ID NO: 632670 - DNA, 15 bp, Homo sapiens
aattgatatatcctt

SEQ ID NO: 632671 - DNA, 15 bp, Homo sapiens
attgatatatccttt

SEQ ID NO: 632672 - DNA, 15 bp, Homo sapiens
ttgatatatcctttc

SEQ ID NO: 632673 - DNA, 15 bp, Homo sapiens
tgatatatcctttct

SEQ ID NO: 632674 - DNA, 15 bp, Homo sapiens
gatatatcctttcta

SEQ ID NO: 632675 - DNA, 15 bp, Homo sapiens
atatatcctttctac

SEQ ID NO: 632676 - DNA, 15 bp, Homo sapiens
tatatcctttctact

SEQ ID NO: 632677 - DNA, 15 bp, Homo sapiens
atatcctttctactg

SEQ ID NO: 632678 - DNA, 15 bp, Homo sapiens
tatcctttctactgt

SEQ ID NO: 632679 - DNA, 15 bp, Homo sapiens
atcctttctactgtt

SEQ ID NO: 632680 - DNA, 15 bp, Homo sapiens
tcctttctactgttt

SEQ ID NO: 632681 - DNA, 15 bp, Homo sapiens
cctttctactgtttt

SEQ ID NO: 632682 - DNA, 15 bp, Homo sapiens
ctttctactgttttt

SEQ ID NO: 632683 - DNA, 15 bp, Homo sapiens
tttctactgtttttc

SEQ ID NO: 632684 - DNA, 15 bp, Homo sapiens
ttctactgtttttca

SEQ ID NO: 632685 - DNA, 15 bp, Homo sapiens
tctactgtttttcat

SEQ ID NO: 632686 - DNA, 15 bp, Homo sapiens
ctactgtttttcatt

SEQ ID NO: 632687 - DNA, 15 bp, Homo sapiens
tactgtttttcattt

SEQ ID NO: 632688 - DNA, 15 bp, Homo sapiens
actgtttttcatttt

SEQ ID NO: 632689 - DNA, 15 bp, Homo sapiens
ctgtttttcatttta

SEQ ID NO: 632690 - DNA, 15 bp, Homo sapiens
tgtttttcattttat

SEQ ID NO: 632691 - DNA, 15 bp, Homo sapiens
gtttttcattttatt

SEQ ID NO: 632692 - DNA, 15 bp, Homo sapiens
tttttcattttattt

SEQ ID NO: 632693 - DNA, 15 bp, Homo sapiens
ttttcattttatttt

SEQ ID NO: 632694 - DNA, 15 bp, Homo sapiens
tttcattttattttg

SEQ ID NO: 632695 - DNA, 15 bp, Homo sapiens
ttcattttattttgt

SEQ ID NO: 632696 - DNA, 15 bp, Homo sapiens
tcattttattttgtt

SEQ ID NO: 632697 - DNA, 15 bp, Homo sapiens
cattttattttgttt

SEQ ID NO: 632698 - DNA, 15 bp, Homo sapiens
attttattttgtttt

SEQ ID NO: 632699 - DNA, 15 bp, Homo sapiens
ttttattttgttttc

SEQ ID NO: 632700 - DNA, 15 bp, Homo sapiens
tttattttgttttct

SEQ ID NO: 632701 - DNA, 15 bp, Homo sapiens
ttattttgttttcta

SEQ ID NO: 632702 - DNA, 15 bp, Homo sapiens
tattttgttttctat

SEQ ID NO: 632703 - DNA, 15 bp, Homo sapiens
attttgttttctatc

SEQ ID NO: 632704 - DNA, 15 bp, Homo sapiens
ttttgttttctatct

SEQ ID NO: 632705 - DNA, 15 bp, Homo sapiens
tttgttttctatctt

SEQ ID NO: 632706 - DNA, 15 bp, Homo sapiens
ttgttttctatctta

SEQ ID NO: 632707 - DNA, 15 bp, Homo sapiens
tgttttctatcttat

SEQ ID NO: 632708 - DNA, 15 bp, Homo sapiens
gttttctatcttata

SEQ ID NO: 632709 - DNA, 15 bp, Homo sapiens
ttttctatcttataa

SEQ ID NO: 632710 - DNA, 15 bp, Homo sapiens
tttctatcttataaa

SEQ ID NO: 632711 - DNA, 15 bp, Homo sapiens
ttctatcttataaat

SEQ ID NO: 632712 - DNA, 15 bp, Homo sapiens
tctatcttataaatc

SEQ ID NO: 632713 - DNA, 15 bp, Homo sapiens
ctatcttataaatct

SEQ ID NO: 632714 - DNA, 15 bp, Homo sapiens
tatcttataaatctt

SEQ ID NO: 632715 - DNA, 15 bp, Homo sapiens
atcttataaatcttg

SEQ ID NO: 632716 - DNA, 15 bp, Homo sapiens
tcttataaatcttgc

SEQ ID NO: 632717 - DNA, 15 bp, Homo sapiens
cttataaatcttgca

SEQ ID NO: 632718 - DNA, 15 bp, Homo sapiens
ttataaatcttgcat

SEQ ID NO: 632719 - DNA, 15 bp, Homo sapiens
tataaatcttgcatt

SEQ ID NO: 632720 - DNA, 15 bp, Homo sapiens
ataaatcttgcattt

SEQ ID NO: 632721 - DNA, 15 bp, Homo sapiens
taaatcttgcatttt

SEQ ID NO: 632722 - DNA, 15 bp, Homo sapiens
aaatcttgcattttt

SEQ ID NO: 632723 - DNA, 15 bp, Homo sapiens
aatcttgcatttttt

SEQ ID NO: 632724 - DNA, 15 bp, Homo sapiens
atcttgcatttttta

SEQ ID NO: 632725 - DNA, 15 bp, Homo sapiens
tcttgcattttttag

SEQ ID NO: 632726 - DNA, 15 bp, Homo sapiens
cttgcattttttagg

SEQ ID NO: 632727 - DNA, 15 bp, Homo sapiens
ttgcattttttaggt

SEQ ID NO: 632728 - DNA, 15 bp, Homo sapiens
tgcattttttaggtt

SEQ ID NO: 632729 - DNA, 15 bp, Homo sapiens
gcattttttaggttc

SEQ ID NO: 632730 - DNA, 15 bp, Homo sapiens
cattttttaggttct

SEQ ID NO: 632731 - DNA, 15 bp, Homo sapiens
attttttaggttctt

SEQ ID NO: 632732 - DNA, 15 bp, Homo sapiens
ttttttaggttcttg

SEQ ID NO: 632733 - DNA, 15 bp, Homo sapiens
tttttaggttcttga

SEQ ID NO: 632734 - DNA, 15 bp, Homo sapiens
ttttaggttcttgat

SEQ ID NO: 632735 - DNA, 15 bp, Homo sapiens
tttaggttcttgatt

SEQ ID NO: 632736 - DNA, 15 bp, Homo sapiens
ttaggttcttgatta

SEQ ID NO: 632737 - DNA, 15 bp, Homo sapiens
taggttcttgattag

SEQ ID NO: 632738 - DNA, 15 bp, Homo sapiens
aggttcttgattaga

SEQ ID NO: 632739 - DNA, 15 bp, Homo sapiens
ggttcttgattagaa

SEQ ID NO: 632740 - DNA, 15 bp, Homo sapiens
gttcttgattagaac

SEQ ID NO: 632741 - DNA, 15 bp, Homo sapiens
ttcttgattagaaca

SEQ ID NO: 632742 - DNA, 15 bp, Homo sapiens
tcttgattagaacat

SEQ ID NO: 632743 - DNA, 15 bp, Homo sapiens
cttgattagaacata

SEQ ID NO: 632744 - DNA, 15 bp, Homo sapiens
ttgattagaacataa

SEQ ID NO: 632745 - DNA, 15 bp, Homo sapiens
tgattagaacataat

SEQ ID NO: 632746 - DNA, 15 bp, Homo sapiens
gattagaacataatt

SEQ ID NO: 632747 - DNA, 15 bp, Homo sapiens
attagaacataattc

SEQ ID NO: 632748 - DNA, 15 bp, Homo sapiens
ttagaacataattca

SEQ ID NO: 632749 - DNA, 15 bp, Homo sapiens
tagaacataattcat

SEQ ID NO: 632750 - DNA, 15 bp, Homo sapiens
agaacataattcatt

SEQ ID NO: 632751 - DNA, 15 bp, Homo sapiens
gaacataattcattc

SEQ ID NO: 632752 - DNA, 15 bp, Homo sapiens
aacataattcattca

SEQ ID NO: 632753 - DNA, 15 bp, Homo sapiens
acataattcattcat

SEQ ID NO: 632754 - DNA, 15 bp, Homo sapiens
cataattcattcatt

SEQ ID NO: 632755 - DNA, 15 bp, Homo sapiens
ataattcattcatta

SEQ ID NO: 632756 - DNA, 15 bp, Homo sapiens
taattcattcattaa

SEQ ID NO: 632757 - DNA, 15 bp, Homo sapiens
aattcattcattaat

SEQ ID NO: 632758 - DNA, 15 bp, Homo sapiens
attcattcattaatc

SEQ ID NO: 632759 - DNA, 15 bp, Homo sapiens
ttcattcattaatct

SEQ ID NO: 632760 - DNA, 15 bp, Homo sapiens
tcattcattaatctc

SEQ ID NO: 632761 - DNA, 15 bp, Homo sapiens
cattcattaatctct

SEQ ID NO: 632762 - DNA, 15 bp, Homo sapiens
attcattaatctctt

SEQ ID NO: 632763 - DNA, 15 bp, Homo sapiens
ttcattaatctctta

SEQ ID NO: 632764 - DNA, 15 bp, Homo sapiens
tcattaatctcttaa

SEQ ID NO: 632765 - DNA, 15 bp, Homo sapiens
cattaatctcttaaa

SEQ ID NO: 632766 - DNA, 15 bp, Homo sapiens
attaatctcttaaaa

SEQ ID NO: 632767 - DNA, 15 bp, Homo sapiens
ttaatctcttaaaag

SEQ ID NO: 632768 - DNA, 15 bp, Homo sapiens
taatctcttaaaagc

SEQ ID NO: 632769 - DNA, 15 bp, Homo sapiens
aatctcttaaaagca

SEQ ID NO: 632770 - DNA, 15 bp, Homo sapiens
atctcttaaaagcaa

SEQ ID NO: 632771 - DNA, 15 bp, Homo sapiens
tctcttaaaagcaaa

SEQ ID NO: 632772 - DNA, 15 bp, Homo sapiens
ctcttaaaagcaaaa

SEQ ID NO: 632773 - DNA, 15 bp, Homo sapiens
tcttaaaagcaaaat

SEQ ID NO: 632774 - DNA, 15 bp, Homo sapiens
cttaaaagcaaaatg

SEQ ID NO: 632775 - DNA, 15 bp, Homo sapiens
ttaaaagcaaaatgc

SEQ ID NO: 632776 - DNA, 15 bp, Homo sapiens
taaaagcaaaatgca

SEQ ID NO: 632777 - DNA, 15 bp, Homo sapiens
aaaagcaaaatgcat

SEQ ID NO: 632778 - DNA, 15 bp, Homo sapiens
aaagcaaaatgcatt

SEQ ID NO: 632779 - DNA, 15 bp, Homo sapiens
aagcaaaatgcattt

SEQ ID NO: 632780 - DNA, 15 bp, Homo sapiens
agcaaaatgcattta

SEQ ID NO: 632781 - DNA, 15 bp, Homo sapiens
gcaaaatgcatttat

SEQ ID NO: 632782 - DNA, 15 bp, Homo sapiens
caaaatgcatttatc

SEQ ID NO: 632783 - DNA, 15 bp, Homo sapiens
aaaatgcatttatct

SEQ ID NO: 632784 - DNA, 15 bp, Homo sapiens
aaatgcatttatctt

SEQ ID NO: 632785 - DNA, 15 bp, Homo sapiens
aatgcatttatcttt

SEQ ID NO: 632786 - DNA, 15 bp, Homo sapiens
atgcatttatcttta

SEQ ID NO: 632787 - DNA, 15 bp, Homo sapiens
tgcatttatctttat

SEQ ID NO: 632788 - DNA, 15 bp, Homo sapiens
gcatttatctttata

SEQ ID NO: 632789 - DNA, 15 bp, Homo sapiens
catttatctttataa

SEQ ID NO: 632790 - DNA, 15 bp, Homo sapiens
atttatctttataaa

SEQ ID NO: 632791 - DNA, 15 bp, Homo sapiens
tttatctttataaat

SEQ ID NO: 632792 - DNA, 15 bp, Homo sapiens
ttatctttataaata

SEQ ID NO: 632793 - DNA, 15 bp, Homo sapiens
tatctttataaataa

SEQ ID NO: 632794 - DNA, 15 bp, Homo sapiens
atctttataaataaa

SEQ ID NO: 632795 - DNA, 15 bp, Homo sapiens
tctttataaataaat

SEQ ID NO: 632796 - DNA, 15 bp, Homo sapiens
ctttataaataaatc

SEQ ID NO: 632797 - DNA, 15 bp, Homo sapiens
tttataaataaatct

SEQ ID NO: 632798 - DNA, 15 bp, Homo sapiens
ttataaataaatctt

SEQ ID NO: 632799 - DNA, 15 bp, Homo sapiens
tataaataaatcttg

SEQ ID NO: 632800 - DNA, 15 bp, Homo sapiens
ataaataaatcttga

SEQ ID NO: 632801 - DNA, 15 bp, Homo sapiens
taaataaatcttgaa

SEQ ID NO: 632802 - DNA, 15 bp, Homo sapiens
aaataaatcttgaag

SEQ ID NO: 632803 - DNA, 15 bp, Homo sapiens
aataaatcttgaagt

SEQ ID NO: 632804 - DNA, 15 bp, Homo sapiens
ataaatcttgaagta

SEQ ID NO: 632805 - DNA, 15 bp, Homo sapiens
taaatcttgaagtat

SEQ ID NO: 632806 - DNA, 15 bp, Homo sapiens
aaatcttgaagtatc

SEQ ID NO: 632807 - DNA, 15 bp, Homo sapiens
aatcttgaagtatct

SEQ ID NO: 632808 - DNA, 15 bp, Homo sapiens
atcttgaagtatctt

SEQ ID NO: 632809 - DNA, 15 bp, Homo sapiens
tcttgaagtatcttt

SEQ ID NO: 632810 - DNA, 15 bp, Homo sapiens
cttgaagtatctttt

SEQ ID NO: 632811 - DNA, 15 bp, Homo sapiens
ttgaagtatcttttt

SEQ ID NO: 632812 - DNA, 15 bp, Homo sapiens
tgaagtatcttttta

SEQ ID NO: 632813 - DNA, 15 bp, Homo sapiens
gaagtatctttttag

SEQ ID NO: 632814 - DNA, 15 bp, Homo sapiens
aagtatctttttagc

SEQ ID NO: 632815 - DNA, 15 bp, Homo sapiens
agtatctttttagct

SEQ ID NO: 632816 - DNA, 15 bp, Homo sapiens
gtatctttttagctg

SEQ ID NO: 632817 - DNA, 15 bp, Homo sapiens
tatctttttagctgt

SEQ ID NO: 632818 - DNA, 15 bp, Homo sapiens
atctttttagctgta

SEQ ID NO: 632819 - DNA, 15 bp, Homo sapiens
tctttttagctgtag

SEQ ID NO: 632820 - DNA, 15 bp, Homo sapiens
ctttttagctgtagc

SEQ ID NO: 632821 - DNA, 15 bp, Homo sapiens
tttttagctgtagcc

SEQ ID NO: 632822 - DNA, 15 bp, Homo sapiens
ttttagctgtagccc

SEQ ID NO: 632823 - DNA, 15 bp, Homo sapiens
tttagctgtagccca

SEQ ID NO: 632824 - DNA, 15 bp, Homo sapiens
ttagctgtagcccac

SEQ ID NO: 632825 - DNA, 15 bp, Homo sapiens
tagctgtagcccaca

SEQ ID NO: 632826 - DNA, 15 bp, Homo sapiens
agctgtagcccacaa

SEQ ID NO: 632827 - DNA, 15 bp, Homo sapiens
gctgtagcccacaag

SEQ ID NO: 632828 - DNA, 15 bp, Homo sapiens
ctgtagcccacaaga

SEQ ID NO: 632829 - DNA, 15 bp, Homo sapiens
tgtagcccacaagat

SEQ ID NO: 632830 - DNA, 15 bp, Homo sapiens
gtagcccacaagatt

SEQ ID NO: 632831 - DNA, 15 bp, Homo sapiens
tagcccacaagattt

SEQ ID NO: 632832 - DNA, 15 bp, Homo sapiens
agcccacaagatttt

SEQ ID NO: 632833 - DNA, 15 bp, Homo sapiens
gcccacaagatttta

SEQ ID NO: 632834 - DNA, 15 bp, Homo sapiens
cccacaagattttac

SEQ ID NO: 632835 - DNA, 15 bp, Homo sapiens
ccacaagattttaca

SEQ ID NO: 632836 - DNA, 15 bp, Homo sapiens
cacaagattttacat

SEQ ID NO: 632837 - DNA, 15 bp, Homo sapiens
acaagattttacata

SEQ ID NO: 632838 - DNA, 15 bp, Homo sapiens
caagattttacatat

SEQ ID NO: 632839 - DNA, 15 bp, Homo sapiens
aagattttacatatt

SEQ ID NO: 632840 - DNA, 15 bp, Homo sapiens
agattttacatattt

SEQ ID NO: 632841 - DNA, 15 bp, Homo sapiens
gattttacatattta

SEQ ID NO: 632842 - DNA, 15 bp, Homo sapiens
attttacatatttat

SEQ ID NO: 632843 - DNA, 15 bp, Homo sapiens
ttttacatatttatc

SEQ ID NO: 632844 - DNA, 15 bp, Homo sapiens
tttacatatttatca

SEQ ID NO: 632845 - DNA, 15 bp, Homo sapiens
ttacatatttatcac

SEQ ID NO: 632846 - DNA, 15 bp, Homo sapiens
tacatatttatcacc

SEQ ID NO: 632847 - DNA, 15 bp, Homo sapiens
acatatttatcacca

SEQ ID NO: 632848 - DNA, 15 bp, Homo sapiens
catatttatcaccat

SEQ ID NO: 632849 - DNA, 15 bp, Homo sapiens
atatttatcaccata

SEQ ID NO: 632850 - DNA, 15 bp, Homo sapiens
tatttatcaccatat

SEQ ID NO: 632851 - DNA, 15 bp, Homo sapiens
atttatcaccatatt

SEQ ID NO: 632852 - DNA, 15 bp, Homo sapiens
tttatcaccatattt

SEQ ID NO: 632853 - DNA, 15 bp, Homo sapiens
ttatcaccatatttt

SEQ ID NO: 632854 - DNA, 15 bp, Homo sapiens
tatcaccatatttta

SEQ ID NO: 632855 - DNA, 15 bp, Homo sapiens
atcaccatattttaa

SEQ ID NO: 632856 - DNA, 15 bp, Homo sapiens
tcaccatattttaaa

SEQ ID NO: 632857 - DNA, 15 bp, Homo sapiens
caccatattttaaat

SEQ ID NO: 632858 - DNA, 15 bp, Homo sapiens
accatattttaaata

SEQ ID NO: 632859 - DNA, 15 bp, Homo sapiens
ccatattttaaatat

SEQ ID NO: 632860 - DNA, 15 bp, Homo sapiens
catattttaaatatt

SEQ ID NO: 632861 - DNA, 15 bp, Homo sapiens
atattttaaatattt

SEQ ID NO: 632862 - DNA, 15 bp, Homo sapiens
tattttaaatatttt

SEQ ID NO: 632863 - DNA, 15 bp, Homo sapiens
attttaaatattttc

SEQ ID NO: 632864 - DNA, 15 bp, Homo sapiens
ttttaaatattttct

SEQ ID NO: 632865 - DNA, 15 bp, Homo sapiens
tttaaatattttcta

SEQ ID NO: 632866 - DNA, 15 bp, Homo sapiens
ttaaatattttctat

SEQ ID NO: 632867 - DNA, 15 bp, Homo sapiens
taaatattttctatt

SEQ ID NO: 632868 - DNA, 15 bp, Homo sapiens
aaatattttctattt

SEQ ID NO: 632869 - DNA, 15 bp, Homo sapiens
aatattttctatttc

SEQ ID NO: 632870 - DNA, 15 bp, Homo sapiens
atattttctatttct

SEQ ID NO: 632871 - DNA, 15 bp, Homo sapiens
tattttctatttctg

SEQ ID NO: 632872 - DNA, 15 bp, Homo sapiens
attttctatttctgt

SEQ ID NO: 632873 - DNA, 15 bp, Homo sapiens
ttttctatttctgtc

SEQ ID NO: 632874 - DNA, 15 bp, Homo sapiens
tttctatttctgtca

SEQ ID NO: 632875 - DNA, 15 bp, Homo sapiens
ttctatttctgtcat

SEQ ID NO: 632876 - DNA, 15 bp, Homo sapiens
tctatttctgtcatg

SEQ ID NO: 632877 - DNA, 15 bp, Homo sapiens
ctatttctgtcatga

SEQ ID NO: 632878 - DNA, 15 bp, Homo sapiens
tatttctgtcatgat

SEQ ID NO: 632879 - DNA, 15 bp, Homo sapiens
atttctgtcatgatt

SEQ ID NO: 632880 - DNA, 15 bp, Homo sapiens
tttctgtcatgattt

SEQ ID NO: 632881 - DNA, 15 bp, Homo sapiens
ttctgtcatgatttc

SEQ ID NO: 632882 - DNA, 15 bp, Homo sapiens
tctgtcatgatttca

SEQ ID NO: 632883 - DNA, 15 bp, Homo sapiens
ctgtcatgatttcat

SEQ ID NO: 632884 - DNA, 15 bp, Homo sapiens
tgtcatgatttcatc

SEQ ID NO: 632885 - DNA, 15 bp, Homo sapiens
gtcatgatttcatcc

SEQ ID NO: 632886 - DNA, 15 bp, Homo sapiens
tcatgatttcatcct

SEQ ID NO: 632887 - DNA, 15 bp, Homo sapiens
catgatttcatcctt

SEQ ID NO: 632888 - DNA, 15 bp, Homo sapiens
atgatttcatcctta

SEQ ID NO: 632889 - DNA, 15 bp, Homo sapiens
tgatttcatccttaa

SEQ ID NO: 632890 - DNA, 15 bp, Homo sapiens
gatttcatccttaac

SEQ ID NO: 632891 - DNA, 15 bp, Homo sapiens
atttcatccttaacc

SEQ ID NO: 632892 - DNA, 15 bp, Homo sapiens
tttcatccttaaccc

SEQ ID NO: 632893 - DNA, 15 bp, Homo sapiens
ttcatccttaaccca

SEQ ID NO: 632894 - DNA, 15 bp, Homo sapiens
tcatccttaacccat

SEQ ID NO: 632895 - DNA, 15 bp, Homo sapiens
catccttaacccata

SEQ ID NO: 632896 - DNA, 15 bp, Homo sapiens
atccttaacccatat

SEQ ID NO: 632897 - DNA, 15 bp, Homo sapiens
tccttaacccatatt

SEQ ID NO: 632898 - DNA, 15 bp, Homo sapiens
ccttaacccatattt

SEQ ID NO: 632899 - DNA, 15 bp, Homo sapiens
cttaacccatattta

SEQ ID NO: 632900 - DNA, 15 bp, Homo sapiens
ttaacccatatttat

SEQ ID NO: 632901 - DNA, 15 bp, Homo sapiens
taacccatatttatc

SEQ ID NO: 632902 - DNA, 15 bp, Homo sapiens
aacccatatttatct

SEQ ID NO: 632903 - DNA, 15 bp, Homo sapiens
acccatatttatctg

SEQ ID NO: 632904 - DNA, 15 bp, Homo sapiens
cccatatttatctgc

SEQ ID NO: 632905 - DNA, 15 bp, Homo sapiens
ccatatttatctgca

SEQ ID NO: 632906 - DNA, 15 bp, Homo sapiens
catatttatctgcat

SEQ ID NO: 632907 - DNA, 15 bp, Homo sapiens
atatttatctgcata

SEQ ID NO: 632908 - DNA, 15 bp, Homo sapiens
tatttatctgcatat

SEQ ID NO: 632909 - DNA, 15 bp, Homo sapiens
atttatctgcatatg

SEQ ID NO: 632910 - DNA, 15 bp, Homo sapiens
tttatctgcatatgt

SEQ ID NO: 632911 - DNA, 15 bp, Homo sapiens
ttatctgcatatgta

SEQ ID NO: 632912 - DNA, 15 bp, Homo sapiens
tatctgcatatgtat

SEQ ID NO: 632913 - DNA, 15 bp, Homo sapiens
atctgcatatgtatt

SEQ ID NO: 632914 - DNA, 15 bp, Homo sapiens
tctgcatatgtattt

SEQ ID NO: 632915 - DNA, 15 bp, Homo sapiens
ctgcatatgtatttt

SEQ ID NO: 632916 - DNA, 15 bp, Homo sapiens
tgcatatgtatttta

SEQ ID NO: 632917 - DNA, 15 bp, Homo sapiens
gcatatgtattttaa

SEQ ID NO: 632918 - DNA, 15 bp, Homo sapiens
catatgtattttaaa

SEQ ID NO: 632919 - DNA, 15 bp, Homo sapiens
atatgtattttaaag

SEQ ID NO: 632920 - DNA, 15 bp, Homo sapiens
tatgtattttaaagt

SEQ ID NO: 632921 - DNA, 15 bp, Homo sapiens
atgtattttaaagtt

SEQ ID NO: 632922 - DNA, 15 bp, Homo sapiens
tgtattttaaagttt

SEQ ID NO: 632923 - DNA, 15 bp, Homo sapiens
gtattttaaagtttg

SEQ ID NO: 632924 - DNA, 15 bp, Homo sapiens
tattttaaagtttgt

SEQ ID NO: 632925 - DNA, 15 bp, Homo sapiens
attttaaagtttgta

SEQ ID NO: 632926 - DNA, 15 bp, Homo sapiens
ttttaaagtttgtaa

SEQ ID NO: 632927 - DNA, 15 bp, Homo sapiens
tttaaagtttgtaac

SEQ ID NO: 632928 - DNA, 15 bp, Homo sapiens
ttaaagtttgtaaca

SEQ ID NO: 632929 - DNA, 15 bp, Homo sapiens
taaagtttgtaacac

SEQ ID NO: 632930 - DNA, 15 bp, Homo sapiens
aaagtttgtaacaca

SEQ ID NO: 632931 - DNA, 15 bp, Homo sapiens
aagtttgtaacacac

SEQ ID NO: 632932 - DNA, 15 bp, Homo sapiens
agtttgtaacacaca

SEQ ID NO: 632933 - DNA, 15 bp, Homo sapiens
gtttgtaacacacac

SEQ ID NO: 632934 - DNA, 15 bp, Homo sapiens
tttgtaacacacaca

SEQ ID NO: 632935 - DNA, 15 bp, Homo sapiens
ttgtaacacacacaa

SEQ ID NO: 632936 - DNA, 15 bp, Homo sapiens
tgtaacacacacaat

SEQ ID NO: 632937 - DNA, 15 bp, Homo sapiens
gtaacacacacaatt

SEQ ID NO: 632938 - DNA, 15 bp, Homo sapiens
taacacacacaattt

SEQ ID NO: 632939 - DNA, 15 bp, Homo sapiens
aacacacacaatttt

SEQ ID NO: 632940 - DNA, 15 bp, Homo sapiens
acacacacaatttta

SEQ ID NO: 632941 - DNA, 15 bp, Homo sapiens
cacacacaattttac

SEQ ID NO: 632942 - DNA, 15 bp, Homo sapiens
acacacaattttact

SEQ ID NO: 632943 - DNA, 15 bp, Homo sapiens
cacacaattttactg

SEQ ID NO: 632944 - DNA, 15 bp, Homo sapiens
acacaattttactga

SEQ ID NO: 632945 - DNA, 15 bp, Homo sapiens
cacaattttactgag

SEQ ID NO: 632946 - DNA, 15 bp, Homo sapiens
acaattttactgagt

SEQ ID NO: 632947 - DNA, 15 bp, Homo sapiens
caattttactgagta

SEQ ID NO: 632948 - DNA, 15 bp, Homo sapiens
aattttactgagtat

SEQ ID NO: 632949 - DNA, 15 bp, Homo sapiens
attttactgagtata

SEQ ID NO: 632950 - DNA, 15 bp, Homo sapiens
ttttactgagtatat

SEQ ID NO: 632951 - DNA, 15 bp, Homo sapiens
tttactgagtatatg

SEQ ID NO: 632952 - DNA, 15 bp, Homo sapiens
ttactgagtatatgt

SEQ ID NO: 632953 - DNA, 15 bp, Homo sapiens
tactgagtatatgtg

SEQ ID NO: 632954 - DNA, 15 bp, Homo sapiens
actgagtatatgtgt

SEQ ID NO: 632955 - DNA, 15 bp, Homo sapiens
ctgagtatatgtgtg

SEQ ID NO: 632956 - DNA, 15 bp, Homo sapiens
tgagtatatgtgtgt

SEQ ID NO: 632957 - DNA, 15 bp, Homo sapiens
gagtatatgtgtgtg

SEQ ID NO: 632958 - DNA, 15 bp, Homo sapiens
agtatatgtgtgtgt

SEQ ID NO: 632959 - DNA, 15 bp, Homo sapiens
gtatatgtgtgtgtg

SEQ ID NO: 632960 - DNA, 15 bp, Homo sapiens
tatatgtgtgtgtgt

SEQ ID NO: 632961 - DNA, 15 bp, Homo sapiens
atatgtgtgtgtgtt

SEQ ID NO: 632962 - DNA, 15 bp, Homo sapiens
tatgtgtgtgtgttt

SEQ ID NO: 632963 - DNA, 15 bp, Homo sapiens
atgtgtgtgtgtttt

SEQ ID NO: 632964 - DNA, 15 bp, Homo sapiens
tgtgtgtgtgtttta

SEQ ID NO: 632965 - DNA, 15 bp, Homo sapiens
gtgtgtgtgttttac

SEQ ID NO: 632966 - DNA, 15 bp, Homo sapiens
tgtgtgtgttttact

SEQ ID NO: 632967 - DNA, 15 bp, Homo sapiens
gtgtgtgttttacta

SEQ ID NO: 632968 - DNA, 15 bp, Homo sapiens
tgtgtgttttactag

SEQ ID NO: 632969 - DNA, 15 bp, Homo sapiens
gtgtgttttactagt

SEQ ID NO: 632970 - DNA, 15 bp, Homo sapiens
tgtgttttactagtg

SEQ ID NO: 632971 - DNA, 15 bp, Homo sapiens
gtgttttactagtgt

SEQ ID NO: 632972 - DNA, 15 bp, Homo sapiens
tgttttactagtgtt

SEQ ID NO: 632973 - DNA, 15 bp, Homo sapiens
gttttactagtgttt

SEQ ID NO: 632974 - DNA, 15 bp, Homo sapiens
ttttactagtgttta

SEQ ID NO: 632975 - DNA, 15 bp, Homo sapiens
tttactagtgtttaa

SEQ ID NO: 632976 - DNA, 15 bp, Homo sapiens
ttactagtgtttaat

SEQ ID NO: 632977 - DNA, 15 bp, Homo sapiens
tactagtgtttaatt

SEQ ID NO: 632978 - DNA, 15 bp, Homo sapiens
actagtgtttaattt

SEQ ID NO: 632979 - DNA, 15 bp, Homo sapiens
ctagtgtttaatttt

SEQ ID NO: 632980 - DNA, 15 bp, Homo sapiens
tagtgtttaattttt

SEQ ID NO: 632981 - DNA, 15 bp, Homo sapiens
agtgtttaatttttt

SEQ ID NO: 632982 - DNA, 15 bp, Homo sapiens
gtgtttaatttttta

SEQ ID NO: 632983 - DNA, 15 bp, Homo sapiens
tgtttaattttttag

SEQ ID NO: 632984 - DNA, 15 bp, Homo sapiens
gtttaattttttagt

SEQ ID NO: 632985 - DNA, 15 bp, Homo sapiens
tttaattttttagtt

SEQ ID NO: 632986 - DNA, 15 bp, Homo sapiens
ttaattttttagttt

SEQ ID NO: 632987 - DNA, 15 bp, Homo sapiens
taattttttagtttt

SEQ ID NO: 632988 - DNA, 15 bp, Homo sapiens
aattttttagttttt

SEQ ID NO: 632989 - DNA, 15 bp, Homo sapiens
attttttagttttta

SEQ ID NO: 632990 - DNA, 15 bp, Homo sapiens
ttttttagtttttat

SEQ ID NO: 632991 - DNA, 15 bp, Homo sapiens
tttttagtttttatt

SEQ ID NO: 632992 - DNA, 15 bp, Homo sapiens
ttttagtttttattt

SEQ ID NO: 632993 - DNA, 15 bp, Homo sapiens
tttagtttttattta

SEQ ID NO: 632994 - DNA, 15 bp, Homo sapiens
ttagtttttatttaa

SEQ ID NO: 632995 - DNA, 15 bp, Homo sapiens
tagtttttatttaat

SEQ ID NO: 632996 - DNA, 15 bp, Homo sapiens
agtttttatttaatt

SEQ ID NO: 632997 - DNA, 15 bp, Homo sapiens
gtttttatttaattg

SEQ ID NO: 632998 - DNA, 15 bp, Homo sapiens
tttttatttaattgc

SEQ ID NO: 632999 - DNA, 15 bp, Homo sapiens
ttttatttaattgca

SEQ ID NO: 633000 - DNA, 15 bp, Homo sapiens
tttatttaattgcat

SEQ ID NO: 633001 - DNA, 15 bp, Homo sapiens
ttatttaattgcatt

SEQ ID NO: 633002 - DNA, 15 bp, Homo sapiens
tatttaattgcattg

SEQ ID NO: 633003 - DNA, 15 bp, Homo sapiens
atttaattgcattgt

SEQ ID NO: 633004 - DNA, 15 bp, Homo sapiens
tttaattgcattgtc

SEQ ID NO: 633005 - DNA, 15 bp, Homo sapiens
ttaattgcattgtca

SEQ ID NO: 633006 - DNA, 15 bp, Homo sapiens
taattgcattgtcag

SEQ ID NO: 633007 - DNA, 15 bp, Homo sapiens
aattgcattgtcaga

SEQ ID NO: 633008 - DNA, 15 bp, Homo sapiens
attgcattgtcagaa

SEQ ID NO: 633009 - DNA, 15 bp, Homo sapiens
ttgcattgtcagaat

SEQ ID NO: 633010 - DNA, 15 bp, Homo sapiens
tgcattgtcagaata

SEQ ID NO: 633011 - DNA, 15 bp, Homo sapiens
gcattgtcagaatat

SEQ ID NO: 633012 - DNA, 15 bp, Homo sapiens
cattgtcagaatata

SEQ ID NO: 633013 - DNA, 15 bp, Homo sapiens
attgtcagaatatac

SEQ ID NO: 633014 - DNA, 15 bp, Homo sapiens
ttgtcagaatataca

SEQ ID NO: 633015 - DNA, 15 bp, Homo sapiens
tgtcagaatatacac

SEQ ID NO: 633016 - DNA, 15 bp, Homo sapiens
gtcagaatatacacc

SEQ ID NO: 633017 - DNA, 15 bp, Homo sapiens
tcagaatatacaccc

SEQ ID NO: 633018 - DNA, 15 bp, Homo sapiens
cagaatatacaccct

SEQ ID NO: 633019 - DNA, 15 bp, Homo sapiens
agaatatacaccctt

SEQ ID NO: 633020 - DNA, 15 bp, Homo sapiens
gaatatacaccctta

SEQ ID NO: 633021 - DNA, 15 bp, Homo sapiens
aatatacacccttaa

SEQ ID NO: 633022 - DNA, 15 bp, Homo sapiens
atatacacccttaag

SEQ ID NO: 633023 - DNA, 15 bp, Homo sapiens
tatacacccttaaga

SEQ ID NO: 633024 - DNA, 15 bp, Homo sapiens
atacacccttaagaa

SEQ ID NO: 633025 - DNA, 15 bp, Homo sapiens
tacacccttaagaat

SEQ ID NO: 633026 - DNA, 15 bp, Homo sapiens
acacccttaagaata

SEQ ID NO: 633027 - DNA, 15 bp, Homo sapiens
cacccttaagaataa

SEQ ID NO: 633028 - DNA, 15 bp, Homo sapiens
acccttaagaataac

SEQ ID NO: 633029 - DNA, 15 bp, Homo sapiens
cccttaagaataaca

SEQ ID NO: 633030 - DNA, 15 bp, Homo sapiens
ccttaagaataacaa

SEQ ID NO: 633031 - DNA, 15 bp, Homo sapiens
cttaagaataacaac

SEQ ID NO: 633032 - DNA, 15 bp, Homo sapiens
ttaagaataacaaca

SEQ ID NO: 633033 - DNA, 15 bp, Homo sapiens
taagaataacaacaa

SEQ ID NO: 633034 - DNA, 15 bp, Homo sapiens
aagaataacaacaat

SEQ ID NO: 633035 - DNA, 15 bp, Homo sapiens
agaataacaacaata

SEQ ID NO: 633036 - DNA, 15 bp, Homo sapiens
gaataacaacaatat

SEQ ID NO: 633037 - DNA, 15 bp, Homo sapiens
aataacaacaatata

SEQ ID NO: 633038 - DNA, 15 bp, Homo sapiens
ataacaacaatatag

SEQ ID NO: 633039 - DNA, 15 bp, Homo sapiens
taacaacaatataga

SEQ ID NO: 633040 - DNA, 15 bp, Homo sapiens
aacaacaatatagag

SEQ ID NO: 633041 - DNA, 15 bp, Homo sapiens
acaacaatatagaga

SEQ ID NO: 633042 - DNA, 15 bp, Homo sapiens
caacaatatagagaa

SEQ ID NO: 633043 - DNA, 15 bp, Homo sapiens
aacaatatagagaaa

SEQ ID NO: 633044 - DNA, 15 bp, Homo sapiens
acaatatagagaaat

SEQ ID NO: 633045 - DNA, 15 bp, Homo sapiens
caatatagagaaata

SEQ ID NO: 633046 - DNA, 15 bp, Homo sapiens
aatatagagaaatac

SEQ ID NO: 633047 - DNA, 15 bp, Homo sapiens
atatagagaaataca

SEQ ID NO: 633048 - DNA, 15 bp, Homo sapiens
tatagagaaatacat

SEQ ID NO: 633049 - DNA, 15 bp, Homo sapiens
atagagaaatacata

SEQ ID NO: 633050 - DNA, 15 bp, Homo sapiens
tagagaaatacatag

SEQ ID NO: 633051 - DNA, 15 bp, Homo sapiens
agagaaatacatagt

SEQ ID NO: 633052 - DNA, 15 bp, Homo sapiens
gagaaatacatagtt

SEQ ID NO: 633053 - DNA, 15 bp, Homo sapiens
agaaatacatagttt

SEQ ID NO: 633054 - DNA, 15 bp, Homo sapiens
gaaatacatagtttt

SEQ ID NO: 633055 - DNA, 15 bp, Homo sapiens
aaatacatagttttt

SEQ ID NO: 633056 - DNA, 15 bp, Homo sapiens
aatacatagtttttc

SEQ ID NO: 633057 - DNA, 15 bp, Homo sapiens
atacatagtttttca

SEQ ID NO: 633058 - DNA, 15 bp, Homo sapiens
tacatagtttttcat

SEQ ID NO: 633059 - DNA, 15 bp, Homo sapiens
acatagtttttcatt

SEQ ID NO: 633060 - DNA, 15 bp, Homo sapiens
catagtttttcattt

SEQ ID NO: 633061 - DNA, 15 bp, Homo sapiens
atagtttttcatttg

SEQ ID NO: 633062 - DNA, 15 bp, Homo sapiens
tagtttttcatttgt

SEQ ID NO: 633063 - DNA, 15 bp, Homo sapiens
agtttttcatttgta

SEQ ID NO: 633064 - DNA, 15 bp, Homo sapiens
gtttttcatttgtag

SEQ ID NO: 633065 - DNA, 15 bp, Homo sapiens
tttttcatttgtaga

SEQ ID NO: 633066 - DNA, 15 bp, Homo sapiens
ttttcatttgtagaa

SEQ ID NO: 633067 - DNA, 15 bp, Homo sapiens
tttcatttgtagaaa

SEQ ID NO: 633068 - DNA, 15 bp, Homo sapiens
ttcatttgtagaaat

SEQ ID NO: 633069 - DNA, 15 bp, Homo sapiens
tcatttgtagaaatt

SEQ ID NO: 633070 - DNA, 15 bp, Homo sapiens
catttgtagaaattt

SEQ ID NO: 633071 - DNA, 15 bp, Homo sapiens
atttgtagaaatttt

SEQ ID NO: 633072 - DNA, 15 bp, Homo sapiens
tttgtagaaattttt

SEQ ID NO: 633073 - DNA, 15 bp, Homo sapiens
ttgtagaaatttttt

SEQ ID NO: 633074 - DNA, 15 bp, Homo sapiens
tgtagaaatttttta

SEQ ID NO: 633075 - DNA, 15 bp, Homo sapiens
gtagaaattttttat

SEQ ID NO: 633076 - DNA, 15 bp, Homo sapiens
tagaaattttttatg

SEQ ID NO: 633077 - DNA, 15 bp, Homo sapiens
agaaattttttatgg

SEQ ID NO: 633078 - DNA, 15 bp, Homo sapiens
gaaattttttatggc

SEQ ID NO: 633079 - DNA, 15 bp, Homo sapiens
aaattttttatggct

SEQ ID NO: 633080 - DNA, 15 bp, Homo sapiens
aattttttatggctt

SEQ ID NO: 633081 - DNA, 15 bp, Homo sapiens
attttttatggctta

SEQ ID NO: 633082 - DNA, 15 bp, Homo sapiens
ttttttatggcttat

SEQ ID NO: 633083 - DNA, 15 bp, Homo sapiens
tttttatggcttatt

SEQ ID NO: 633084 - DNA, 15 bp, Homo sapiens
ttttatggcttatta

SEQ ID NO: 633085 - DNA, 15 bp, Homo sapiens
tttatggcttattaa

SEQ ID NO: 633086 - DNA, 15 bp, Homo sapiens
ttatggcttattaat

SEQ ID NO: 633087 - DNA, 15 bp, Homo sapiens
tatggcttattaatg

SEQ ID NO: 633088 - DNA, 15 bp, Homo sapiens
atggcttattaatgg

SEQ ID NO: 633089 - DNA, 15 bp, Homo sapiens
tggcttattaatggg

SEQ ID NO: 633090 - DNA, 15 bp, Homo sapiens
ggcttattaatgggt

SEQ ID NO: 633091 - DNA, 15 bp, Homo sapiens
gcttattaatgggta

SEQ ID NO: 633092 - DNA, 15 bp, Homo sapiens
cttattaatgggtaa

SEQ ID NO: 633093 - DNA, 15 bp, Homo sapiens
ttattaatgggtaag

SEQ ID NO: 633094 - DNA, 15 bp, Homo sapiens
tattaatgggtaagt

SEQ ID NO: 633095 - DNA, 15 bp, Homo sapiens
attaatgggtaagtt

SEQ ID NO: 633096 - DNA, 15 bp, Homo sapiens
ttaatgggtaagttt

SEQ ID NO: 633097 - DNA, 15 bp, Homo sapiens
taatgggtaagtttt

SEQ ID NO: 633098 - DNA, 15 bp, Homo sapiens
aatgggtaagtttta

SEQ ID NO: 633099 - DNA, 15 bp, Homo sapiens
atgggtaagttttat

SEQ ID NO: 633100 - DNA, 15 bp, Homo sapiens
tgggtaagttttata

SEQ ID NO: 633101 - DNA, 15 bp, Homo sapiens
gggtaagttttataa

SEQ ID NO: 633102 - DNA, 15 bp, Homo sapiens
ggtaagttttataaa

SEQ ID NO: 633103 - DNA, 15 bp, Homo sapiens
gtaagttttataaaa

SEQ ID NO: 633104 - DNA, 15 bp, Homo sapiens
taagttttataaaaa

SEQ ID NO: 633105 - DNA, 15 bp, Homo sapiens
aagttttataaaaat

SEQ ID NO: 633106 - DNA, 15 bp, Homo sapiens
agttttataaaaatg

SEQ ID NO: 633107 - DNA, 15 bp, Homo sapiens
gttttataaaaatgc

SEQ ID NO: 633108 - DNA, 15 bp, Homo sapiens
ttttataaaaatgcc

SEQ ID NO: 633109 - DNA, 15 bp, Homo sapiens
tttataaaaatgcca

SEQ ID NO: 633110 - DNA, 15 bp, Homo sapiens
ttataaaaatgccaa

SEQ ID NO: 633111 - DNA, 15 bp, Homo sapiens
tataaaaatgccaaa

SEQ ID NO: 633112 - DNA, 15 bp, Homo sapiens
ataaaaatgccaaat

SEQ ID NO: 633113 - DNA, 15 bp, Homo sapiens
taaaaatgccaaatg

SEQ ID NO: 633114 - DNA, 15 bp, Homo sapiens
aaaaatgccaaatgt

SEQ ID NO: 633115 - DNA, 15 bp, Homo sapiens
aaaatgccaaatgta

SEQ ID NO: 633116 - DNA, 15 bp, Homo sapiens
aaatgccaaatgtaa

SEQ ID NO: 633117 - DNA, 15 bp, Homo sapiens
aatgccaaatgtaat

SEQ ID NO: 633118 - DNA, 15 bp, Homo sapiens
atgccaaatgtaatt

SEQ ID NO: 633119 - DNA, 15 bp, Homo sapiens
tgccaaatgtaattg

SEQ ID NO: 633120 - DNA, 15 bp, Homo sapiens
gccaaatgtaattga

SEQ ID NO: 633121 - DNA, 15 bp, Homo sapiens
ccaaatgtaattgaa

SEQ ID NO: 633122 - DNA, 15 bp, Homo sapiens
caaatgtaattgaaa

SEQ ID NO: 633123 - DNA, 15 bp, Homo sapiens
aaatgtaattgaaaa

SEQ ID NO: 633124 - DNA, 15 bp, Homo sapiens
aatgtaattgaaaaa

SEQ ID NO: 633125 - DNA, 15 bp, Homo sapiens
atgtaattgaaaaat

SEQ ID NO: 633126 - DNA, 15 bp, Homo sapiens
tgtaattgaaaaatg

SEQ ID NO: 633127 - DNA, 15 bp, Homo sapiens
gtaattgaaaaatgt

SEQ ID NO: 633128 - DNA, 15 bp, Homo sapiens
taattgaaaaatgtc

SEQ ID NO: 633129 - DNA, 15 bp, Homo sapiens
aattgaaaaatgtct

SEQ ID NO: 633130 - DNA, 15 bp, Homo sapiens
attgaaaaatgtctt

SEQ ID NO: 633131 - DNA, 15 bp, Homo sapiens
ttgaaaaatgtcttg

SEQ ID NO: 633132 - DNA, 15 bp, Homo sapiens
tgaaaaatgtcttgg

SEQ ID NO: 633133 - DNA, 15 bp, Homo sapiens
gaaaaatgtcttggt

SEQ ID NO: 633134 - DNA, 15 bp, Homo sapiens
aaaaatgtcttggtt

SEQ ID NO: 633135 - DNA, 15 bp, Homo sapiens
aaaatgtcttggttg

SEQ ID NO: 633136 - DNA, 15 bp, Homo sapiens
aaatgtcttggttgc

SEQ ID NO: 633137 - DNA, 15 bp, Homo sapiens
aatgtcttggttgca

SEQ ID NO: 633138 - DNA, 15 bp, Homo sapiens
atgtcttggttgcag

SEQ ID NO: 633139 - DNA, 15 bp, Homo sapiens
tgtcttggttgcagg

SEQ ID NO: 633140 - DNA, 15 bp, Homo sapiens
gtcttggttgcaggt

SEQ ID NO: 633141 - DNA, 15 bp, Homo sapiens
tcttggttgcaggtt

SEQ ID NO: 633142 - DNA, 15 bp, Homo sapiens
cttggttgcaggttc

SEQ ID NO: 633143 - DNA, 15 bp, Homo sapiens
ttggttgcaggttcc

SEQ ID NO: 633144 - DNA, 15 bp, Homo sapiens
tggttgcaggttcca

SEQ ID NO: 633145 - DNA, 15 bp, Homo sapiens
ggttgcaggttccat

SEQ ID NO: 633146 - DNA, 15 bp, Homo sapiens
gttgcaggttccata

SEQ ID NO: 633147 - DNA, 15 bp, Homo sapiens
ttgcaggttccatag

SEQ ID NO: 633148 - DNA, 15 bp, Homo sapiens
tgcaggttccatagt

SEQ ID NO: 633149 - DNA, 15 bp, Homo sapiens
gcaggttccatagta

SEQ ID NO: 633150 - DNA, 15 bp, Homo sapiens
caggttccatagtaa

SEQ ID NO: 633151 - DNA, 15 bp, Homo sapiens
aggttccatagtaat

SEQ ID NO: 633152 - DNA, 15 bp, Homo sapiens
ggttccatagtaatg

SEQ ID NO: 633153 - DNA, 15 bp, Homo sapiens
gttccatagtaatga

SEQ ID NO: 633154 - DNA, 15 bp, Homo sapiens
ttccatagtaatgaa

SEQ ID NO: 633155 - DNA, 15 bp, Homo sapiens
tccatagtaatgaaa

SEQ ID NO: 633156 - DNA, 15 bp, Homo sapiens
ccatagtaatgaaat

SEQ ID NO: 633157 - DNA, 15 bp, Homo sapiens
catagtaatgaaatt

SEQ ID NO: 633158 - DNA, 15 bp, Homo sapiens
atagtaatgaaattt

SEQ ID NO: 633159 - DNA, 15 bp, Homo sapiens
tagtaatgaaatttg

SEQ ID NO: 633160 - DNA, 15 bp, Homo sapiens
agtaatgaaatttgt

SEQ ID NO: 633161 - DNA, 15 bp, Homo sapiens
gtaatgaaatttgtc

SEQ ID NO: 633162 - DNA, 15 bp, Homo sapiens
taatgaaatttgtca

SEQ ID NO: 633163 - DNA, 15 bp, Homo sapiens
aatgaaatttgtcat

SEQ ID NO: 633164 - DNA, 15 bp, Homo sapiens
atgaaatttgtcatg

SEQ ID NO: 633165 - DNA, 15 bp, Homo sapiens
tgaaatttgtcatga

SEQ ID NO: 633166 - DNA, 15 bp, Homo sapiens
gaaatttgtcatgaa

SEQ ID NO: 633167 - DNA, 15 bp, Homo sapiens
aaatttgtcatgaaa

SEQ ID NO: 633168 - DNA, 15 bp, Homo sapiens
aatttgtcatgaaaa

SEQ ID NO: 633169 - DNA, 15 bp, Homo sapiens
atttgtcatgaaaat

SEQ ID NO: 633170 - DNA, 15 bp, Homo sapiens
tttgtcatgaaaatc

SEQ ID NO: 633171 - DNA, 15 bp, Homo sapiens
ttgtcatgaaaatct

SEQ ID NO: 633172 - DNA, 15 bp, Homo sapiens
tgtcatgaaaatcta

SEQ ID NO: 633173 - DNA, 15 bp, Homo sapiens
gtcatgaaaatctat

SEQ ID NO: 633174 - DNA, 15 bp, Homo sapiens
tcatgaaaatctatc

SEQ ID NO: 633175 - DNA, 15 bp, Homo sapiens
catgaaaatctatcg

SEQ ID NO: 633176 - DNA, 15 bp, Homo sapiens
atgaaaatctatcga

SEQ ID NO: 633177 - DNA, 15 bp, Homo sapiens
tgaaaatctatcgac

SEQ ID NO: 633178 - DNA, 15 bp, Homo sapiens
gaaaatctatcgaca

SEQ ID NO: 633179 - DNA, 15 bp, Homo sapiens
aaaatctatcgacat

SEQ ID NO: 633180 - DNA, 15 bp, Homo sapiens
aaatctatcgacatt

SEQ ID NO: 633181 - DNA, 15 bp, Homo sapiens
aatctatcgacattg

SEQ ID NO: 633182 - DNA, 15 bp, Homo sapiens
atctatcgacattgt

SEQ ID NO: 633183 - DNA, 15 bp, Homo sapiens
tctatcgacattgtg

SEQ ID NO: 633184 - DNA, 15 bp, Homo sapiens
ctatcgacattgtgt

SEQ ID NO: 633185 - DNA, 15 bp, Homo sapiens
tatcgacattgtgtt

SEQ ID NO: 633186 - DNA, 15 bp, Homo sapiens
atcgacattgtgtta

SEQ ID NO: 633187 - DNA, 15 bp, Homo sapiens
tcgacattgtgttac

SEQ ID NO: 633188 - DNA, 15 bp, Homo sapiens
cgacattgtgttaca

SEQ ID NO: 633189 - DNA, 15 bp, Homo sapiens
gacattgtgttacaa

SEQ ID NO: 633190 - DNA, 15 bp, Homo sapiens
acattgtgttacaat

SEQ ID NO: 633191 - DNA, 15 bp, Homo sapiens
cattgtgttacaatt

SEQ ID NO: 633192 - DNA, 15 bp, Homo sapiens
attgtgttacaatta

SEQ ID NO: 633193 - DNA, 15 bp, Homo sapiens
ttgtgttacaattat

SEQ ID NO: 633194 - DNA, 15 bp, Homo sapiens
tgtgttacaattata

SEQ ID NO: 633195 - DNA, 15 bp, Homo sapiens
gtgttacaattataa

SEQ ID NO: 633196 - DNA, 15 bp, Homo sapiens
tgttacaattataat

SEQ ID NO: 633197 - DNA, 15 bp, Homo sapiens
gttacaattataatt

SEQ ID NO: 633198 - DNA, 15 bp, Homo sapiens
ttacaattataatta

SEQ ID NO: 633199 - DNA, 15 bp, Homo sapiens
tacaattataattaa

SEQ ID NO: 633200 - DNA, 15 bp, Homo sapiens
acaattataattaaa

SEQ ID NO: 633201 - DNA, 15 bp, Homo sapiens
caattataattaaat

SEQ ID NO: 633202 - DNA, 15 bp, Homo sapiens
aattataattaaata

SEQ ID NO: 633203 - DNA, 15 bp, Homo sapiens
attataattaaatat

SEQ ID NO: 633204 - DNA, 15 bp, Homo sapiens
ttataattaaatata

SEQ ID NO: 633205 - DNA, 15 bp, Homo sapiens
tataattaaatatat

SEQ ID NO: 633206 - DNA, 15 bp, Homo sapiens
ataattaaatatata

SEQ ID NO: 633207 - DNA, 15 bp, Homo sapiens
taattaaatatatat

SEQ ID NO: 633208 - DNA, 15 bp, Homo sapiens
aattaaatatatatt

SEQ ID NO: 633209 - DNA, 15 bp, Homo sapiens
attaaatatatattt

SEQ ID NO: 633210 - DNA, 15 bp, Homo sapiens
ttaaatatatatttg

SEQ ID NO: 633211 - DNA, 15 bp, Homo sapiens
taaatatatatttga

SEQ ID NO: 633212 - DNA, 15 bp, Homo sapiens
aaatatatatttgat

SEQ ID NO: 633213 - DNA, 15 bp, Homo sapiens
aatatatatttgatt

SEQ ID NO: 633214 - DNA, 15 bp, Homo sapiens
atatatatttgatta

SEQ ID NO: 633215 - DNA, 15 bp, Homo sapiens
tatatatttgattaa

SEQ ID NO: 633216 - DNA, 15 bp, Homo sapiens
atatatttgattaaa

SEQ ID NO: 633217 - DNA, 15 bp, Homo sapiens
tatatttgattaaat

SEQ ID NO: 633218 - DNA, 15 bp, Homo sapiens
atatttgattaaatc

SEQ ID NO: 633219 - DNA, 15 bp, Homo sapiens
tatttgattaaatca

SEQ ID NO: 633220 - DNA, 15 bp, Homo sapiens
atttgattaaatcaa

SEQ ID NO: 633221 - DNA, 15 bp, Homo sapiens
tttgattaaatcaaa

SEQ ID NO: 633222 - DNA, 15 bp, Homo sapiens
ttgattaaatcaaat

SEQ ID NO: 633223 - DNA, 15 bp, Homo sapiens
tgattaaatcaaatg

SEQ ID NO: 633224 - DNA, 15 bp, Homo sapiens
gattaaatcaaatga

SEQ ID NO: 633225 - DNA, 15 bp, Homo sapiens
attaaatcaaatgaa

SEQ ID NO: 633226 - DNA, 15 bp, Homo sapiens
ttaaatcaaatgaaa

SEQ ID NO: 633227 - DNA, 15 bp, Homo sapiens
taaatcaaatgaaat

SEQ ID NO: 633228 - DNA, 15 bp, Homo sapiens
aaatcaaatgaaatt

SEQ ID NO: 633229 - DNA, 15 bp, Homo sapiens
aatcaaatgaaattg

SEQ ID NO: 633230 - DNA, 15 bp, Homo sapiens
atcaaatgaaattgc

SEQ ID NO: 633231 - DNA, 15 bp, Homo sapiens
tcaaatgaaattgcc

SEQ ID NO: 633232 - DNA, 15 bp, Homo sapiens
caaatgaaattgcca

SEQ ID NO: 633233 - DNA, 15 bp, Homo sapiens
aaatgaaattgccaa

SEQ ID NO: 633234 - DNA, 15 bp, Homo sapiens
aatgaaattgccaac

SEQ ID NO: 633235 - DNA, 15 bp, Homo sapiens
atgaaattgccaaca

SEQ ID NO: 633236 - DNA, 15 bp, Homo sapiens
tgaaattgccaacat

SEQ ID NO: 633237 - DNA, 15 bp, Homo sapiens
gaaattgccaacatt

SEQ ID NO: 633238 - DNA, 15 bp, Homo sapiens
aaattgccaacattt

SEQ ID NO: 633239 - DNA, 15 bp, Homo sapiens
aattgccaacattta

SEQ ID NO: 633240 - DNA, 15 bp, Homo sapiens
attgccaacatttaa

SEQ ID NO: 633241 - DNA, 15 bp, Homo sapiens
ttgccaacatttaat

SEQ ID NO: 633242 - DNA, 15 bp, Homo sapiens
tgccaacatttaatc

SEQ ID NO: 633243 - DNA, 15 bp, Homo sapiens
gccaacatttaatct

SEQ ID NO: 633244 - DNA, 15 bp, Homo sapiens
ccaacatttaatctt

SEQ ID NO: 633245 - DNA, 15 bp, Homo sapiens
caacatttaatcttt

SEQ ID NO: 633246 - DNA, 15 bp, Homo sapiens
aacatttaatctttt

SEQ ID NO: 633247 - DNA, 15 bp, Homo sapiens
acatttaatcttttt

SEQ ID NO: 633248 - DNA, 15 bp, Homo sapiens
catttaatctttttt

SEQ ID NO: 633249 - DNA, 15 bp, Homo sapiens
atttaatcttttttt

SEQ ID NO: 633250 - DNA, 15 bp, Homo sapiens
tttaatcttttttta

SEQ ID NO: 633251 - DNA, 15 bp, Homo sapiens
ttaatctttttttac

SEQ ID NO: 633252 - DNA, 15 bp, Homo sapiens
taatctttttttact

SEQ ID NO: 633253 - DNA, 15 bp, Homo sapiens
aatctttttttactt

SEQ ID NO: 633254 - DNA, 15 bp, Homo sapiens
atctttttttactta

SEQ ID NO: 633255 - DNA, 15 bp, Homo sapiens
tctttttttacttag

SEQ ID NO: 633256 - DNA, 15 bp, Homo sapiens
ctttttttacttaga

SEQ ID NO: 633257 - DNA, 15 bp, Homo sapiens
tttttttacttagaa

SEQ ID NO: 633258 - DNA, 15 bp, Homo sapiens
ttttttacttagaaa

SEQ ID NO: 633259 - DNA, 15 bp, Homo sapiens
tttttacttagaaag

SEQ ID NO: 633260 - DNA, 15 bp, Homo sapiens
ttttacttagaaagt

SEQ ID NO: 633261 - DNA, 15 bp, Homo sapiens
tttacttagaaagtt

SEQ ID NO: 633262 - DNA, 15 bp, Homo sapiens
ttacttagaaagttc

SEQ ID NO: 633263 - DNA, 15 bp, Homo sapiens
tacttagaaagttca

SEQ ID NO: 633264 - DNA, 15 bp, Homo sapiens
acttagaaagttcaa

SEQ ID NO: 633265 - DNA, 15 bp, Homo sapiens
cttagaaagttcaac

SEQ ID NO: 633266 - DNA, 15 bp, Homo sapiens
ttagaaagttcaact

SEQ ID NO: 633267 - DNA, 15 bp, Homo sapiens
tagaaagttcaacta

SEQ ID NO: 633268 - DNA, 15 bp, Homo sapiens
agaaagttcaactaa

SEQ ID NO: 633269 - DNA, 15 bp, Homo sapiens
gaaagttcaactaat

SEQ ID NO: 633270 - DNA, 15 bp, Homo sapiens
aaagttcaactaata

SEQ ID NO: 633271 - DNA, 15 bp, Homo sapiens
aagttcaactaatat

SEQ ID NO: 633272 - DNA, 15 bp, Homo sapiens
agttcaactaatata

SEQ ID NO: 633273 - DNA, 15 bp, Homo sapiens
gttcaactaatatat

SEQ ID NO: 633274 - DNA, 15 bp, Homo sapiens
ttcaactaatatatg

SEQ ID NO: 633275 - DNA, 15 bp, Homo sapiens
tcaactaatatatga

SEQ ID NO: 633276 - DNA, 15 bp, Homo sapiens
caactaatatatgaa

SEQ ID NO: 633277 - DNA, 15 bp, Homo sapiens
aactaatatatgaac

SEQ ID NO: 633278 - DNA, 15 bp, Homo sapiens
actaatatatgaaca

SEQ ID NO: 633279 - DNA, 15 bp, Homo sapiens
ctaatatatgaacaa

SEQ ID NO: 633280 - DNA, 15 bp, Homo sapiens
taatatatgaacaat

SEQ ID NO: 633281 - DNA, 15 bp, Homo sapiens
aatatatgaacaatg

SEQ ID NO: 633282 - DNA, 15 bp, Homo sapiens
atatatgaacaatgt

SEQ ID NO: 633283 - DNA, 15 bp, Homo sapiens
tatatgaacaatgtt

SEQ ID NO: 633284 - DNA, 15 bp, Homo sapiens
atatgaacaatgttc

SEQ ID NO: 633285 - DNA, 15 bp, Homo sapiens
tatgaacaatgttca

SEQ ID NO: 633286 - DNA, 15 bp, Homo sapiens
atgaacaatgttcaa

SEQ ID NO: 633287 - DNA, 15 bp, Homo sapiens
tgaacaatgttcaac

SEQ ID NO: 633288 - DNA, 15 bp, Homo sapiens
gaacaatgttcaacc

SEQ ID NO: 633289 - DNA, 15 bp, Homo sapiens
aacaatgttcaacca

SEQ ID NO: 633290 - DNA, 15 bp, Homo sapiens
acaatgttcaaccaa

SEQ ID NO: 633291 - DNA, 15 bp, Homo sapiens
caatgttcaaccaaa

SEQ ID NO: 633292 - DNA, 15 bp, Homo sapiens
aatgttcaaccaaat

SEQ ID NO: 633293 - DNA, 15 bp, Homo sapiens
atgttcaaccaaatt

SEQ ID NO: 633294 - DNA, 15 bp, Homo sapiens
tgttcaaccaaattt

SEQ ID NO: 633295 - DNA, 15 bp, Homo sapiens
gttcaaccaaatttt

SEQ ID NO: 633296 - DNA, 15 bp, Homo sapiens
ttcaaccaaatttta

SEQ ID NO: 633297 - DNA, 15 bp, Homo sapiens
tcaaccaaattttaa

SEQ ID NO: 633298 - DNA, 15 bp, Homo sapiens
caaccaaattttaag

SEQ ID NO: 633299 - DNA, 15 bp, Homo sapiens
aaccaaattttaaga

SEQ ID NO: 633300 - DNA, 15 bp, Homo sapiens
accaaattttaagaa

SEQ ID NO: 633301 - DNA, 15 bp, Homo sapiens
ccaaattttaagaaa

SEQ ID NO: 633302 - DNA, 15 bp, Homo sapiens
caaattttaagaaaa

SEQ ID NO: 633303 - DNA, 15 bp, Homo sapiens
aaattttaagaaaaa

SEQ ID NO: 633304 - DNA, 15 bp, Homo sapiens
aattttaagaaaaat

SEQ ID NO: 633305 - DNA, 15 bp, Homo sapiens
attttaagaaaaatt

SEQ ID NO: 633306 - DNA, 15 bp, Homo sapiens
ttttaagaaaaattt

SEQ ID NO: 633307 - DNA, 15 bp, Homo sapiens
tttaagaaaaatttt

SEQ ID NO: 633308 - DNA, 15 bp, Homo sapiens
ttaagaaaaatttta

SEQ ID NO: 633309 - DNA, 15 bp, Homo sapiens
taagaaaaattttat

SEQ ID NO: 633310 - DNA, 15 bp, Homo sapiens
aagaaaaattttatg

SEQ ID NO: 633311 - DNA, 15 bp, Homo sapiens
agaaaaattttatgt

SEQ ID NO: 633312 - DNA, 15 bp, Homo sapiens
gaaaaattttatgta

SEQ ID NO: 633313 - DNA, 15 bp, Homo sapiens
aaaaattttatgtag

SEQ ID NO: 633314 - DNA, 15 bp, Homo sapiens
aaaattttatgtagt

SEQ ID NO: 633315 - DNA, 15 bp, Homo sapiens
aaattttatgtagta

SEQ ID NO: 633316 - DNA, 15 bp, Homo sapiens
aattttatgtagtaa

SEQ ID NO: 633317 - DNA, 15 bp, Homo sapiens
attttatgtagtaaa

SEQ ID NO: 633318 - DNA, 15 bp, Homo sapiens
ttttatgtagtaaat

SEQ ID NO: 633319 - DNA, 15 bp, Homo sapiens
tttatgtagtaaatt

SEQ ID NO: 633320 - DNA, 15 bp, Homo sapiens
ttatgtagtaaatta

SEQ ID NO: 633321 - DNA, 15 bp, Homo sapiens
tatgtagtaaattac

SEQ ID NO: 633322 - DNA, 15 bp, Homo sapiens
atgtagtaaattaca

SEQ ID NO: 633323 - DNA, 15 bp, Homo sapiens
tgtagtaaattacat

SEQ ID NO: 633324 - DNA, 15 bp, Homo sapiens
gtagtaaattacata

SEQ ID NO: 633325 - DNA, 15 bp, Homo sapiens
tagtaaattacataa

SEQ ID NO: 633326 - DNA, 15 bp, Homo sapiens
agtaaattacataaa

SEQ ID NO: 633327 - DNA, 15 bp, Homo sapiens
gtaaattacataaaa

SEQ ID NO: 633328 - DNA, 15 bp, Homo sapiens
taaattacataaaat

SEQ ID NO: 633329 - DNA, 15 bp, Homo sapiens
aaattacataaaatt

SEQ ID NO: 633330 - DNA, 15 bp, Homo sapiens
aattacataaaatta

SEQ ID NO: 633331 - DNA, 15 bp, Homo sapiens
attacataaaattac

SEQ ID NO: 633332 - DNA, 15 bp, Homo sapiens
ttacataaaattact

SEQ ID NO: 633333 - DNA, 15 bp, Homo sapiens
tacataaaattactt

SEQ ID NO: 633334 - DNA, 15 bp, Homo sapiens
acataaaattactta

SEQ ID NO: 633335 - DNA, 15 bp, Homo sapiens
cataaaattacttat

SEQ ID NO: 633336 - DNA, 15 bp, Homo sapiens
ataaaattacttatt

SEQ ID NO: 633337 - DNA, 15 bp, Homo sapiens
taaaattacttattt

SEQ ID NO: 633338 - DNA, 15 bp, Homo sapiens
aaaattacttatttt

SEQ ID NO: 633339 - DNA, 15 bp, Homo sapiens
aaattacttattttt

SEQ ID NO: 633340 - DNA, 15 bp, Homo sapiens
aattacttatttttt

SEQ ID NO: 633341 - DNA, 15 bp, Homo sapiens
attacttatttttta

SEQ ID NO: 633342 - DNA, 15 bp, Homo sapiens
ttacttattttttat

SEQ ID NO: 633343 - DNA, 15 bp, Homo sapiens
tacttattttttatt

SEQ ID NO: 633344 - DNA, 15 bp, Homo sapiens
acttattttttattt

SEQ ID NO: 633345 - DNA, 15 bp, Homo sapiens
cttattttttatttg

SEQ ID NO: 633346 - DNA, 15 bp, Homo sapiens
ttattttttatttga

SEQ ID NO: 633347 - DNA, 15 bp, Homo sapiens
tattttttatttgaa

SEQ ID NO: 633348 - DNA, 15 bp, Homo sapiens
attttttatttgaaa

SEQ ID NO: 633349 - DNA, 15 bp, Homo sapiens
ttttttatttgaaaa

SEQ ID NO: 633350 - DNA, 15 bp, Homo sapiens
tttttatttgaaaag

SEQ ID NO: 633351 - DNA, 15 bp, Homo sapiens
ttttatttgaaaagc

SEQ ID NO: 633352 - DNA, 15 bp, Homo sapiens
tttatttgaaaagct

SEQ ID NO: 633353 - DNA, 15 bp, Homo sapiens
ttatttgaaaagctt

SEQ ID NO: 633354 - DNA, 15 bp, Homo sapiens
tatttgaaaagcttt

SEQ ID NO: 633355 - DNA, 15 bp, Homo sapiens
atttgaaaagctttt

SEQ ID NO: 633356 - DNA, 15 bp, Homo sapiens
tttgaaaagctttta

SEQ ID NO: 633357 - DNA, 15 bp, Homo sapiens
ttgaaaagcttttat

SEQ ID NO: 633358 - DNA, 15 bp, Homo sapiens
tgaaaagcttttatg

SEQ ID NO: 633359 - DNA, 15 bp, Homo sapiens
gaaaagcttttatgt

SEQ ID NO: 633360 - DNA, 15 bp, Homo sapiens
aaaagcttttatgtt

SEQ ID NO: 633361 - DNA, 15 bp, Homo sapiens
aaagcttttatgttt

SEQ ID NO: 633362 - DNA, 15 bp, Homo sapiens
aagcttttatgtttt

SEQ ID NO: 633363 - DNA, 15 bp, Homo sapiens
agcttttatgttttc

SEQ ID NO: 633364 - DNA, 15 bp, Homo sapiens
gcttttatgttttct

SEQ ID NO: 633365 - DNA, 15 bp, Homo sapiens
cttttatgttttcta

SEQ ID NO: 633366 - DNA, 15 bp, Homo sapiens
ttttatgttttctaa

SEQ ID NO: 633367 - DNA, 15 bp, Homo sapiens
tttatgttttctaat

SEQ ID NO: 633368 - DNA, 15 bp, Homo sapiens
ttatgttttctaatt

SEQ ID NO: 633369 - DNA, 15 bp, Homo sapiens
tatgttttctaattt

SEQ ID NO: 633370 - DNA, 15 bp, Homo sapiens
atgttttctaatttt

SEQ ID NO: 633371 - DNA, 15 bp, Homo sapiens
tgttttctaattttt

SEQ ID NO: 633372 - DNA, 15 bp, Homo sapiens
gttttctaatttttt

SEQ ID NO: 633373 - DNA, 15 bp, Homo sapiens
ttttctaattttttg

SEQ ID NO: 633374 - DNA, 15 bp, Homo sapiens
tttctaattttttgt

SEQ ID NO: 633375 - DNA, 15 bp, Homo sapiens
ttctaattttttgtc

SEQ ID NO: 633376 - DNA, 15 bp, Homo sapiens
tctaattttttgtct

SEQ ID NO: 633377 - DNA, 15 bp, Homo sapiens
ctaattttttgtctg

SEQ ID NO: 633378 - DNA, 15 bp, Homo sapiens
taattttttgtctgt

SEQ ID NO: 633379 - DNA, 15 bp, Homo sapiens
aattttttgtctgtt

SEQ ID NO: 633380 - DNA, 15 bp, Homo sapiens
attttttgtctgttt

SEQ ID NO: 633381 - DNA, 15 bp, Homo sapiens
ttttttgtctgttta

SEQ ID NO: 633382 - DNA, 15 bp, Homo sapiens
tttttgtctgtttat

SEQ ID NO: 633383 - DNA, 15 bp, Homo sapiens
ttttgtctgtttatc

SEQ ID NO: 633384 - DNA, 15 bp, Homo sapiens
tttgtctgtttatca

SEQ ID NO: 633385 - DNA, 15 bp, Homo sapiens
ttgtctgtttatcag

SEQ ID NO: 633386 - DNA, 15 bp, Homo sapiens
tgtctgtttatcagt

SEQ ID NO: 633387 - DNA, 15 bp, Homo sapiens
gtctgtttatcagtt

SEQ ID NO: 633388 - DNA, 15 bp, Homo sapiens
tctgtttatcagttt

SEQ ID NO: 633389 - DNA, 15 bp, Homo sapiens
ctgtttatcagtttc

SEQ ID NO: 633390 - DNA, 15 bp, Homo sapiens
tgtttatcagtttct

SEQ ID NO: 633391 - DNA, 15 bp, Homo sapiens
gtttatcagtttcta

SEQ ID NO: 633392 - DNA, 15 bp, Homo sapiens
tttatcagtttctaa

SEQ ID NO: 633393 - DNA, 15 bp, Homo sapiens
ttatcagtttctaat

SEQ ID NO: 633394 - DNA, 15 bp, Homo sapiens
tatcagtttctaata

SEQ ID NO: 633395 - DNA, 15 bp, Homo sapiens
atcagtttctaataa

SEQ ID NO: 633396 - DNA, 15 bp, Homo sapiens
tcagtttctaataaa

SEQ ID NO: 633397 - DNA, 15 bp, Homo sapiens
cagtttctaataaag

SEQ ID NO: 633398 - DNA, 15 bp, Homo sapiens
agtttctaataaagt

SEQ ID NO: 633399 - DNA, 15 bp, Homo sapiens
gtttctaataaagtt

SEQ ID NO: 633400 - DNA, 15 bp, Homo sapiens
tttctaataaagttg

SEQ ID NO: 633401 - DNA, 15 bp, Homo sapiens
ttctaataaagttgt

SEQ ID NO: 633402 - DNA, 15 bp, Homo sapiens
tctaataaagttgtg

SEQ ID NO: 633403 - DNA, 15 bp, Homo sapiens
ctaataaagttgtgt

SEQ ID NO: 633404 - DNA, 15 bp, Homo sapiens
taataaagttgtgtt

SEQ ID NO: 633405 - DNA, 15 bp, Homo sapiens
aataaagttgtgttt

SEQ ID NO: 633406 - DNA, 15 bp, Homo sapiens
ataaagttgtgttta

SEQ ID NO: 633407 - DNA, 15 bp, Homo sapiens
taaagttgtgtttaa

SEQ ID NO: 633408 - DNA, 15 bp, Homo sapiens
aaagttgtgtttaaa

SEQ ID NO: 633409 - DNA, 15 bp, Homo sapiens
aagttgtgtttaaat

SEQ ID NO: 633410 - DNA, 15 bp, Homo sapiens
agttgtgtttaaatt

SEQ ID NO: 633411 - DNA, 15 bp, Homo sapiens
gttgtgtttaaattt

SEQ ID NO: 633412 - DNA, 15 bp, Homo sapiens
ttgtgtttaaatttt

SEQ ID NO: 633413 - DNA, 15 bp, Homo sapiens
tgtgtttaaattttt

SEQ ID NO: 633414 - DNA, 15 bp, Homo sapiens
gtgtttaaatttttc

SEQ ID NO: 633415 - DNA, 15 bp, Homo sapiens
tgtttaaatttttca

SEQ ID NO: 633416 - DNA, 15 bp, Homo sapiens
gtttaaatttttcat

SEQ ID NO: 633417 - DNA, 15 bp, Homo sapiens
tttaaatttttcatt

SEQ ID NO: 633418 - DNA, 15 bp, Homo sapiens
ttaaatttttcatta

SEQ ID NO: 633419 - DNA, 15 bp, Homo sapiens
taaatttttcattac

SEQ ID NO: 633420 - DNA, 15 bp, Homo sapiens
aaatttttcattaca

SEQ ID NO: 633421 - DNA, 15 bp, Homo sapiens
aatttttcattacag

SEQ ID NO: 633422 - DNA, 15 bp, Homo sapiens
atttttcattacagt

SEQ ID NO: 633423 - DNA, 15 bp, Homo sapiens
tttttcattacagtt

SEQ ID NO: 633424 - DNA, 15 bp, Homo sapiens
ttttcattacagttg

SEQ ID NO: 633425 - DNA, 15 bp, Homo sapiens
tttcattacagttgc

SEQ ID NO: 633426 - DNA, 15 bp, Homo sapiens
ttcattacagttgca

SEQ ID NO: 633427 - DNA, 15 bp, Homo sapiens
tcattacagttgcag

SEQ ID NO: 633428 - DNA, 15 bp, Homo sapiens
cattacagttgcagg

SEQ ID NO: 633429 - DNA, 15 bp, Homo sapiens
attacagttgcaggc

SEQ ID NO: 633430 - DNA, 15 bp, Homo sapiens
ttacagttgcaggct

SEQ ID NO: 633431 - DNA, 15 bp, Homo sapiens
tacagttgcaggcta

SEQ ID NO: 633432 - DNA, 15 bp, Homo sapiens
acagttgcaggctat

SEQ ID NO: 633433 - DNA, 15 bp, Homo sapiens
cagttgcaggctatg

SEQ ID NO: 633434 - DNA, 15 bp, Homo sapiens
agttgcaggctatgt

SEQ ID NO: 633435 - DNA, 15 bp, Homo sapiens
gttgcaggctatgtt

SEQ ID NO: 633436 - DNA, 15 bp, Homo sapiens
ttgcaggctatgttg

SEQ ID NO: 633437 - DNA, 15 bp, Homo sapiens
tgcaggctatgttgt

SEQ ID NO: 633438 - DNA, 15 bp, Homo sapiens
gcaggctatgttgtg

SEQ ID NO: 633439 - DNA, 15 bp, Homo sapiens
caggctatgttgtgt

SEQ ID NO: 633440 - DNA, 15 bp, Homo sapiens
aggctatgttgtgtt

SEQ ID NO: 633441 - DNA, 15 bp, Homo sapiens
ggctatgttgtgtta

SEQ ID NO: 633442 - DNA, 15 bp, Homo sapiens
gctatgttgtgttag

SEQ ID NO: 633443 - DNA, 15 bp, Homo sapiens
ctatgttgtgttagg

SEQ ID NO: 633444 - DNA, 15 bp, Homo sapiens
tatgttgtgttaggt

SEQ ID NO: 633445 - DNA, 15 bp, Homo sapiens
atgttgtgttaggtt

SEQ ID NO: 633446 - DNA, 15 bp, Homo sapiens
tgttgtgttaggttg

SEQ ID NO: 633447 - DNA, 15 bp, Homo sapiens
gttgtgttaggttgc

SEQ ID NO: 633448 - DNA, 15 bp, Homo sapiens
ttgtgttaggttgct

SEQ ID NO: 633449 - DNA, 15 bp, Homo sapiens
tgtgttaggttgctg

SEQ ID NO: 633450 - DNA, 15 bp, Homo sapiens
gtgttaggttgctgg

SEQ ID NO: 633451 - DNA, 15 bp, Homo sapiens
tgttaggttgctggg

SEQ ID NO: 633452 - DNA, 15 bp, Homo sapiens
gttaggttgctgggt

SEQ ID NO: 633453 - DNA, 15 bp, Homo sapiens
ttaggttgctgggta

SEQ ID NO: 633454 - DNA, 15 bp, Homo sapiens
taggttgctgggtat

SEQ ID NO: 633455 - DNA, 15 bp, Homo sapiens
aggttgctgggtata

SEQ ID NO: 633456 - DNA, 15 bp, Homo sapiens
ggttgctgggtatat

SEQ ID NO: 633457 - DNA, 15 bp, Homo sapiens
gttgctgggtatata

SEQ ID NO: 633458 - DNA, 15 bp, Homo sapiens
ttgctgggtatatac

SEQ ID NO: 633459 - DNA, 15 bp, Homo sapiens
tgctgggtatataca

SEQ ID NO: 633460 - DNA, 15 bp, Homo sapiens
gctgggtatatacaa

SEQ ID NO: 633461 - DNA, 15 bp, Homo sapiens
ctgggtatatacaat

SEQ ID NO: 633462 - DNA, 15 bp, Homo sapiens
tgggtatatacaatc

SEQ ID NO: 633463 - DNA, 15 bp, Homo sapiens
gggtatatacaatcc

SEQ ID NO: 633464 - DNA, 15 bp, Homo sapiens
ggtatatacaatcca

SEQ ID NO: 633465 - DNA, 15 bp, Homo sapiens
gtatatacaatccaa

SEQ ID NO: 633466 - DNA, 15 bp, Homo sapiens
tatatacaatccaat

SEQ ID NO: 633467 - DNA, 15 bp, Homo sapiens
atatacaatccaata

SEQ ID NO: 633468 - DNA, 15 bp, Homo sapiens
tatacaatccaataa

SEQ ID NO: 633469 - DNA, 15 bp, Homo sapiens
atacaatccaataat

SEQ ID NO: 633470 - DNA, 15 bp, Homo sapiens
tacaatccaataatt

SEQ ID NO: 633471 - DNA, 15 bp, Homo sapiens
acaatccaataattg

SEQ ID NO: 633472 - DNA, 15 bp, Homo sapiens
caatccaataattga

SEQ ID NO: 633473 - DNA, 15 bp, Homo sapiens
aatccaataattgat

SEQ ID NO: 633474 - DNA, 15 bp, Homo sapiens
atccaataattgatt

SEQ ID NO: 633475 - DNA, 15 bp, Homo sapiens
tccaataattgattt

SEQ ID NO: 633476 - DNA, 15 bp, Homo sapiens
ccaataattgatttg

SEQ ID NO: 633477 - DNA, 15 bp, Homo sapiens
caataattgatttgt

SEQ ID NO: 633478 - DNA, 15 bp, Homo sapiens
aataattgatttgtc

SEQ ID NO: 633479 - DNA, 15 bp, Homo sapiens
ataattgatttgtct

SEQ ID NO: 633480 - DNA, 15 bp, Homo sapiens
taattgatttgtctt

SEQ ID NO: 633481 - DNA, 15 bp, Homo sapiens
aattgatttgtcttc

SEQ ID NO: 633482 - DNA, 15 bp, Homo sapiens
attgatttgtcttct

SEQ ID NO: 633483 - DNA, 15 bp, Homo sapiens
ttgatttgtcttcta

SEQ ID NO: 633484 - DNA, 15 bp, Homo sapiens
tgatttgtcttctag

SEQ ID NO: 633485 - DNA, 15 bp, Homo sapiens
gatttgtcttctagc

SEQ ID NO: 633486 - DNA, 15 bp, Homo sapiens
atttgtcttctagct

SEQ ID NO: 633487 - DNA, 15 bp, Homo sapiens
tttgtcttctagctg

SEQ ID NO: 633488 - DNA, 15 bp, Homo sapiens
ttgtcttctagctgg

SEQ ID NO: 633489 - DNA, 15 bp, Homo sapiens
tgtcttctagctgga

SEQ ID NO: 633490 - DNA, 15 bp, Homo sapiens
gtcttctagctggat

SEQ ID NO: 633491 - DNA, 15 bp, Homo sapiens
tcttctagctggatt

SEQ ID NO: 633492 - DNA, 15 bp, Homo sapiens
cttctagctggattg

SEQ ID NO: 633493 - DNA, 15 bp, Homo sapiens
ttctagctggattgt

SEQ ID NO: 633494 - DNA, 15 bp, Homo sapiens
tctagctggattgta

SEQ ID NO: 633495 - DNA, 15 bp, Homo sapiens
ctagctggattgtac

SEQ ID NO: 633496 - DNA, 15 bp, Homo sapiens
tagctggattgtact

SEQ ID NO: 633497 - DNA, 15 bp, Homo sapiens
agctggattgtactt

SEQ ID NO: 633498 - DNA, 15 bp, Homo sapiens
gctggattgtacttt

SEQ ID NO: 633499 - DNA, 15 bp, Homo sapiens
ctggattgtactttt

SEQ ID NO: 633500 - DNA, 15 bp, Homo sapiens
tggattgtactttta

SEQ ID NO: 633501 - DNA, 15 bp, Homo sapiens
ggattgtacttttaa

SEQ ID NO: 633502 - DNA, 15 bp, Homo sapiens
gattgtacttttaat

SEQ ID NO: 633503 - DNA, 15 bp, Homo sapiens
attgtacttttaatt

SEQ ID NO: 633504 - DNA, 15 bp, Homo sapiens
ttgtacttttaatta

SEQ ID NO: 633505 - DNA, 15 bp, Homo sapiens
tgtacttttaattat

SEQ ID NO: 633506 - DNA, 15 bp, Homo sapiens
gtacttttaattatt

SEQ ID NO: 633507 - DNA, 15 bp, Homo sapiens
tacttttaattatta

SEQ ID NO: 633508 - DNA, 15 bp, Homo sapiens
acttttaattattat

SEQ ID NO: 633509 - DNA, 15 bp, Homo sapiens
cttttaattattata

SEQ ID NO: 633510 - DNA, 15 bp, Homo sapiens
ttttaattattatat

SEQ ID NO: 633511 - DNA, 15 bp, Homo sapiens
tttaattattatatg

SEQ ID NO: 633512 - DNA, 15 bp, Homo sapiens
ttaattattatatgt

SEQ ID NO: 633513 - DNA, 15 bp, Homo sapiens
taattattatatgtc

SEQ ID NO: 633514 - DNA, 15 bp, Homo sapiens
aattattatatgtcc

SEQ ID NO: 633515 - DNA, 15 bp, Homo sapiens
attattatatgtcct

SEQ ID NO: 633516 - DNA, 15 bp, Homo sapiens
ttattatatgtcctt

SEQ ID NO: 633517 - DNA, 15 bp, Homo sapiens
tattatatgtccttt

SEQ ID NO: 633518 - DNA, 15 bp, Homo sapiens
attatatgtccttta

SEQ ID NO: 633519 - DNA, 15 bp, Homo sapiens
ttatatgtcctttat

SEQ ID NO: 633520 - DNA, 15 bp, Homo sapiens
tatatgtcctttatt

SEQ ID NO: 633521 - DNA, 15 bp, Homo sapiens
atatgtcctttatta

SEQ ID NO: 633522 - DNA, 15 bp, Homo sapiens
tatgtcctttattat

SEQ ID NO: 633523 - DNA, 15 bp, Homo sapiens
atgtcctttattata

SEQ ID NO: 633524 - DNA, 15 bp, Homo sapiens
tgtcctttattatat

SEQ ID NO: 633525 - DNA, 15 bp, Homo sapiens
gtcctttattatatc

SEQ ID NO: 633526 - DNA, 15 bp, Homo sapiens
tcctttattatatcc

SEQ ID NO: 633527 - DNA, 15 bp, Homo sapiens
cctttattatatcca

SEQ ID NO: 633528 - DNA, 15 bp, Homo sapiens
ctttattatatccat

SEQ ID NO: 633529 - DNA, 15 bp, Homo sapiens
tttattatatccatt

SEQ ID NO: 633530 - DNA, 15 bp, Homo sapiens
ttattatatccatta

SEQ ID NO: 633531 - DNA, 15 bp, Homo sapiens
tattatatccattat

SEQ ID NO: 633532 - DNA, 15 bp, Homo sapiens
attatatccattatt

SEQ ID NO: 633533 - DNA, 15 bp, Homo sapiens
ttatatccattattg

SEQ ID NO: 633534 - DNA, 15 bp, Homo sapiens
tatatccattattgt

SEQ ID NO: 633535 - DNA, 15 bp, Homo sapiens
atatccattattgtt

SEQ ID NO: 633536 - DNA, 15 bp, Homo sapiens
tatccattattgttt

SEQ ID NO: 633537 - DNA, 15 bp, Homo sapiens
atccattattgtttt

SEQ ID NO: 633538 - DNA, 15 bp, Homo sapiens
tccattattgttttg

SEQ ID NO: 633539 - DNA, 15 bp, Homo sapiens
ccattattgttttga

SEQ ID NO: 633540 - DNA, 15 bp, Homo sapiens
cattattgttttgaa

SEQ ID NO: 633541 - DNA, 15 bp, Homo sapiens
attattgttttgaac

SEQ ID NO: 633542 - DNA, 15 bp, Homo sapiens
ttattgttttgaaca

SEQ ID NO: 633543 - DNA, 15 bp, Homo sapiens
tattgttttgaacat

SEQ ID NO: 633544 - DNA, 15 bp, Homo sapiens
attgttttgaacatg

SEQ ID NO: 633545 - DNA, 15 bp, Homo sapiens
ttgttttgaacatgg

SEQ ID NO: 633546 - DNA, 15 bp, Homo sapiens
tgttttgaacatgga

SEQ ID NO: 633547 - DNA, 15 bp, Homo sapiens
gttttgaacatggat

SEQ ID NO: 633548 - DNA, 15 bp, Homo sapiens
ttttgaacatggatt

SEQ ID NO: 633549 - DNA, 15 bp, Homo sapiens
tttgaacatggattc

SEQ ID NO: 633550 - DNA, 15 bp, Homo sapiens
ttgaacatggattct

SEQ ID NO: 633551 - DNA, 15 bp, Homo sapiens
tgaacatggattcta

SEQ ID NO: 633552 - DNA, 15 bp, Homo sapiens
gaacatggattctat

SEQ ID NO: 633553 - DNA, 15 bp, Homo sapiens
aacatggattctatt

SEQ ID NO: 633554 - DNA, 15 bp, Homo sapiens
acatggattctattt

SEQ ID NO: 633555 - DNA, 15 bp, Homo sapiens
catggattctatttt

SEQ ID NO: 633556 - DNA, 15 bp, Homo sapiens
atggattctattttt

SEQ ID NO: 633557 - DNA, 15 bp, Homo sapiens
tggattctatttttc

SEQ ID NO: 633558 - DNA, 15 bp, Homo sapiens
ggattctatttttct

SEQ ID NO: 633559 - DNA, 15 bp, Homo sapiens
gattctatttttctg

SEQ ID NO: 633560 - DNA, 15 bp, Homo sapiens
attctatttttctga

SEQ ID NO: 633561 - DNA, 15 bp, Homo sapiens
ttctatttttctgac

SEQ ID NO: 633562 - DNA, 15 bp, Homo sapiens
tctatttttctgaca

SEQ ID NO: 633563 - DNA, 15 bp, Homo sapiens
ctatttttctgacat

SEQ ID NO: 633564 - DNA, 15 bp, Homo sapiens
tatttttctgacatt

SEQ ID NO: 633565 - DNA, 15 bp, Homo sapiens
atttttctgacatta

SEQ ID NO: 633566 - DNA, 15 bp, Homo sapiens
tttttctgacattaa

SEQ ID NO: 633567 - DNA, 15 bp, Homo sapiens
ttttctgacattaac

SEQ ID NO: 633568 - DNA, 15 bp, Homo sapiens
tttctgacattaaca

SEQ ID NO: 633569 - DNA, 15 bp, Homo sapiens
ttctgacattaacat

SEQ ID NO: 633570 - DNA, 15 bp, Homo sapiens
tctgacattaacata

SEQ ID NO: 633571 - DNA, 15 bp, Homo sapiens
ctgacattaacataa

SEQ ID NO: 633572 - DNA, 15 bp, Homo sapiens
tgacattaacataac

SEQ ID NO: 633573 - DNA, 15 bp, Homo sapiens
gacattaacataaca

SEQ ID NO: 633574 - DNA, 15 bp, Homo sapiens
acattaacataacag

SEQ ID NO: 633575 - DNA, 15 bp, Homo sapiens
cattaacataacagc

SEQ ID NO: 633576 - DNA, 15 bp, Homo sapiens
attaacataacagct

SEQ ID NO: 633577 - DNA, 15 bp, Homo sapiens
ttaacataacagctt

SEQ ID NO: 633578 - DNA, 15 bp, Homo sapiens
taacataacagcttt

SEQ ID NO: 633579 - DNA, 15 bp, Homo sapiens
aacataacagctttg

SEQ ID NO: 633580 - DNA, 15 bp, Homo sapiens
acataacagctttga

SEQ ID NO: 633581 - DNA, 15 bp, Homo sapiens
cataacagctttgag

SEQ ID NO: 633582 - DNA, 15 bp, Homo sapiens
ataacagctttgaga

SEQ ID NO: 633583 - DNA, 15 bp, Homo sapiens
taacagctttgagac

SEQ ID NO: 633584 - DNA, 15 bp, Homo sapiens
aacagctttgagaca

SEQ ID NO: 633585 - DNA, 15 bp, Homo sapiens
acagctttgagacat

SEQ ID NO: 633586 - DNA, 15 bp, Homo sapiens
cagctttgagacatc

SEQ ID NO: 633587 - DNA, 15 bp, Homo sapiens
agctttgagacatca

SEQ ID NO: 633588 - DNA, 15 bp, Homo sapiens
gctttgagacatcag

SEQ ID NO: 633589 - DNA, 15 bp, Homo sapiens
ctttgagacatcagt

SEQ ID NO: 633590 - DNA, 15 bp, Homo sapiens
tttgagacatcagta

SEQ ID NO: 633591 - DNA, 15 bp, Homo sapiens
ttgagacatcagtat

SEQ ID NO: 633592 - DNA, 15 bp, Homo sapiens
tgagacatcagtatt

SEQ ID NO: 633593 - DNA, 15 bp, Homo sapiens
gagacatcagtattt

SEQ ID NO: 633594 - DNA, 15 bp, Homo sapiens
agacatcagtatttg

SEQ ID NO: 633595 - DNA, 15 bp, Homo sapiens
gacatcagtatttgc

SEQ ID NO: 633596 - DNA, 15 bp, Homo sapiens
acatcagtatttgca

SEQ ID NO: 633597 - DNA, 15 bp, Homo sapiens
catcagtatttgcat

SEQ ID NO: 633598 - DNA, 15 bp, Homo sapiens
atcagtatttgcatg

SEQ ID NO: 633599 - DNA, 15 bp, Homo sapiens
tcagtatttgcatga

SEQ ID NO: 633600 - DNA, 15 bp, Homo sapiens
cagtatttgcatgac

SEQ ID NO: 633601 - DNA, 15 bp, Homo sapiens
agtatttgcatgacg

SEQ ID NO: 633602 - DNA, 15 bp, Homo sapiens
gtatttgcatgacgt

SEQ ID NO: 633603 - DNA, 15 bp, Homo sapiens
tatttgcatgacgta

SEQ ID NO: 633604 - DNA, 15 bp, Homo sapiens
atttgcatgacgtat

SEQ ID NO: 633605 - DNA, 15 bp, Homo sapiens
tttgcatgacgtatc

SEQ ID NO: 633606 - DNA, 15 bp, Homo sapiens
ttgcatgacgtatcc

SEQ ID NO: 633607 - DNA, 15 bp, Homo sapiens
tgcatgacgtatcct

SEQ ID NO: 633608 - DNA, 15 bp, Homo sapiens
gcatgacgtatcctt

SEQ ID NO: 633609 - DNA, 15 bp, Homo sapiens
catgacgtatccttt

SEQ ID NO: 633610 - DNA, 15 bp, Homo sapiens
atgacgtatcctttt

SEQ ID NO: 633611 - DNA, 15 bp, Homo sapiens
tgacgtatccttttc

SEQ ID NO: 633612 - DNA, 15 bp, Homo sapiens
gacgtatccttttca

SEQ ID NO: 633613 - DNA, 15 bp, Homo sapiens
acgtatccttttcac

SEQ ID NO: 633614 - DNA, 15 bp, Homo sapiens
cgtatccttttcacc

SEQ ID NO: 633615 - DNA, 15 bp, Homo sapiens
gtatccttttcaccc

SEQ ID NO: 633616 - DNA, 15 bp, Homo sapiens
tatccttttcaccct

SEQ ID NO: 633617 - DNA, 15 bp, Homo sapiens
atccttttcaccctt

SEQ ID NO: 633618 - DNA, 15 bp, Homo sapiens
tccttttcacccttt

SEQ ID NO: 633619 - DNA, 15 bp, Homo sapiens
ccttttcacccttta

SEQ ID NO: 633620 - DNA, 15 bp, Homo sapiens
cttttcaccctttaa

SEQ ID NO: 633621 - DNA, 15 bp, Homo sapiens
ttttcaccctttaat

SEQ ID NO: 633622 - DNA, 15 bp, Homo sapiens
tttcaccctttaatt

SEQ ID NO: 633623 - DNA, 15 bp, Homo sapiens
ttcaccctttaattt

SEQ ID NO: 633624 - DNA, 15 bp, Homo sapiens
tcaccctttaatttt

SEQ ID NO: 633625 - DNA, 15 bp, Homo sapiens
caccctttaattttg

SEQ ID NO: 633626 - DNA, 15 bp, Homo sapiens
accctttaattttgg

SEQ ID NO: 633627 - DNA, 15 bp, Homo sapiens
ccctttaattttgga

SEQ ID NO: 633628 - DNA, 15 bp, Homo sapiens
cctttaattttggac

SEQ ID NO: 633629 - DNA, 15 bp, Homo sapiens
ctttaattttggacc

SEQ ID NO: 633630 - DNA, 15 bp, Homo sapiens
tttaattttggacca

SEQ ID NO: 633631 - DNA, 15 bp, Homo sapiens
ttaattttggaccat

SEQ ID NO: 633632 - DNA, 15 bp, Homo sapiens
taattttggaccatt

SEQ ID NO: 633633 - DNA, 15 bp, Homo sapiens
aattttggaccattt

SEQ ID NO: 633634 - DNA, 15 bp, Homo sapiens
attttggaccatttt

SEQ ID NO: 633635 - DNA, 15 bp, Homo sapiens
ttttggaccattttt

SEQ ID NO: 633636 - DNA, 15 bp, Homo sapiens
tttggaccattttta

SEQ ID NO: 633637 - DNA, 15 bp, Homo sapiens
ttggaccatttttat

SEQ ID NO: 633638 - DNA, 15 bp, Homo sapiens
tggaccatttttatg

SEQ ID NO: 633639 - DNA, 15 bp, Homo sapiens
ggaccatttttatga

SEQ ID NO: 633640 - DNA, 15 bp, Homo sapiens
gaccatttttatgat

SEQ ID NO: 633641 - DNA, 15 bp, Homo sapiens
accatttttatgatt

SEQ ID NO: 633642 - DNA, 15 bp, Homo sapiens
ccatttttatgattt

SEQ ID NO: 633643 - DNA, 15 bp, Homo sapiens
catttttatgatttt

SEQ ID NO: 633644 - DNA, 15 bp, Homo sapiens
atttttatgatttta

SEQ ID NO: 633645 - DNA, 15 bp, Homo sapiens
tttttatgattttat

SEQ ID NO: 633646 - DNA, 15 bp, Homo sapiens
ttttatgattttata

SEQ ID NO: 633647 - DNA, 15 bp, Homo sapiens
tttatgattttataa

SEQ ID NO: 633648 - DNA, 15 bp, Homo sapiens
ttatgattttataaa

SEQ ID NO: 633649 - DNA, 15 bp, Homo sapiens
tatgattttataaat

SEQ ID NO: 633650 - DNA, 15 bp, Homo sapiens
atgattttataaatt

SEQ ID NO: 633651 - DNA, 15 bp, Homo sapiens
tgattttataaatta

SEQ ID NO: 633652 - DNA, 15 bp, Homo sapiens
gattttataaattat

SEQ ID NO: 633653 - DNA, 15 bp, Homo sapiens
attttataaattatt

SEQ ID NO: 633654 - DNA, 15 bp, Homo sapiens
ttttataaattattt

SEQ ID NO: 633655 - DNA, 15 bp, Homo sapiens
tttataaattatttc

SEQ ID NO: 633656 - DNA, 15 bp, Homo sapiens
ttataaattatttca

SEQ ID NO: 633657 - DNA, 15 bp, Homo sapiens
tataaattatttcat

SEQ ID NO: 633658 - DNA, 15 bp, Homo sapiens
ataaattatttcatt

SEQ ID NO: 633659 - DNA, 15 bp, Homo sapiens
taaattatttcattt

SEQ ID NO: 633660 - DNA, 15 bp, Homo sapiens
aaattatttcattta

SEQ ID NO: 633661 - DNA, 15 bp, Homo sapiens
aattatttcatttat

SEQ ID NO: 633662 - DNA, 15 bp, Homo sapiens
attatttcatttata

SEQ ID NO: 633663 - DNA, 15 bp, Homo sapiens
ttatttcatttataa

SEQ ID NO: 633664 - DNA, 15 bp, Homo sapiens
tatttcatttataat

SEQ ID NO: 633665 - DNA, 15 bp, Homo sapiens
atttcatttataata

SEQ ID NO: 633666 - DNA, 15 bp, Homo sapiens
tttcatttataataa

SEQ ID NO: 633667 - DNA, 15 bp, Homo sapiens
ttcatttataataag

SEQ ID NO: 633668 - DNA, 15 bp, Homo sapiens
tcatttataataagt

SEQ ID NO: 633669 - DNA, 15 bp, Homo sapiens
catttataataagta

SEQ ID NO: 633670 - DNA, 15 bp, Homo sapiens
atttataataagtat

SEQ ID NO: 633671 - DNA, 15 bp, Homo sapiens
tttataataagtata

SEQ ID NO: 633672 - DNA, 15 bp, Homo sapiens
ttataataagtatat

SEQ ID NO: 633673 - DNA, 15 bp, Homo sapiens
tataataagtatatg

SEQ ID NO: 633674 - DNA, 15 bp, Homo sapiens
ataataagtatatgt

SEQ ID NO: 633675 - DNA, 15 bp, Homo sapiens
taataagtatatgtc

SEQ ID NO: 633676 - DNA, 15 bp, Homo sapiens
aataagtatatgtct

SEQ ID NO: 633677 - DNA, 15 bp, Homo sapiens
ataagtatatgtctg

SEQ ID NO: 633678 - DNA, 15 bp, Homo sapiens
taagtatatgtctgg

SEQ ID NO: 633679 - DNA, 15 bp, Homo sapiens
aagtatatgtctgga

SEQ ID NO: 633680 - DNA, 15 bp, Homo sapiens
agtatatgtctggat

SEQ ID NO: 633681 - DNA, 15 bp, Homo sapiens
gtatatgtctggatt

SEQ ID NO: 633682 - DNA, 15 bp, Homo sapiens
tatatgtctggattg

SEQ ID NO: 633683 - DNA, 15 bp, Homo sapiens
atatgtctggattgg

SEQ ID NO: 633684 - DNA, 15 bp, Homo sapiens
tatgtctggattggc

SEQ ID NO: 633685 - DNA, 15 bp, Homo sapiens
atgtctggattggct

SEQ ID NO: 633686 - DNA, 15 bp, Homo sapiens
tgtctggattggctg

SEQ ID NO: 633687 - DNA, 15 bp, Homo sapiens
gtctggattggctgg

SEQ ID NO: 633688 - DNA, 15 bp, Homo sapiens
tctggattggctggg

SEQ ID NO: 633689 - DNA, 15 bp, Homo sapiens
ctggattggctgggt

SEQ ID NO: 633690 - DNA, 15 bp, Homo sapiens
tggattggctgggtg

SEQ ID NO: 633691 - DNA, 15 bp, Homo sapiens
ggattggctgggtgt

SEQ ID NO: 633692 - DNA, 15 bp, Homo sapiens
gattggctgggtgtg

SEQ ID NO: 633693 - DNA, 15 bp, Homo sapiens
attggctgggtgtgg

SEQ ID NO: 633694 - DNA, 15 bp, Homo sapiens
ttggctgggtgtggt

SEQ ID NO: 633695 - DNA, 15 bp, Homo sapiens
tggctgggtgtggtg

SEQ ID NO: 633696 - DNA, 15 bp, Homo sapiens
ggctgggtgtggtgg

SEQ ID NO: 633697 - DNA, 15 bp, Homo sapiens
gctgggtgtggtggc

SEQ ID NO: 633698 - DNA, 15 bp, Homo sapiens
ctgggtgtggtggct

SEQ ID NO: 633699 - DNA, 15 bp, Homo sapiens
tgggtgtggtggctc

SEQ ID NO: 633700 - DNA, 15 bp, Homo sapiens
gggtgtggtggctca

SEQ ID NO: 633701 - DNA, 15 bp, Homo sapiens
ggtgtggtggctcat

SEQ ID NO: 633702 - DNA, 15 bp, Homo sapiens
gtgtggtggctcatg

SEQ ID NO: 633703 - DNA, 15 bp, Homo sapiens
tgtggtggctcatgc

SEQ ID NO: 633704 - DNA, 15 bp, Homo sapiens
gtggtggctcatgcc

SEQ ID NO: 633705 - DNA, 15 bp, Homo sapiens
tggtggctcatgcct

SEQ ID NO: 633706 - DNA, 15 bp, Homo sapiens
ggtggctcatgcctg

SEQ ID NO: 633707 - DNA, 15 bp, Homo sapiens
gtggctcatgcctgt

SEQ ID NO: 633708 - DNA, 15 bp, Homo sapiens
tggctcatgcctgta

SEQ ID NO: 633709 - DNA, 15 bp, Homo sapiens
ggctcatgcctgtaa

SEQ ID NO: 633710 - DNA, 15 bp, Homo sapiens
gctcatgcctgtaat

SEQ ID NO: 633711 - DNA, 15 bp, Homo sapiens
ctcatgcctgtaatc

SEQ ID NO: 633712 - DNA, 15 bp, Homo sapiens
tcatgcctgtaatct

SEQ ID NO: 633713 - DNA, 15 bp, Homo sapiens
catgcctgtaatctc

SEQ ID NO: 633714 - DNA, 15 bp, Homo sapiens
atgcctgtaatctca

SEQ ID NO: 633715 - DNA, 15 bp, Homo sapiens
tgcctgtaatctcag

SEQ ID NO: 633716 - DNA, 15 bp, Homo sapiens
gcactttgggaggct

SEQ ID NO: 633717 - DNA, 15 bp, Homo sapiens
cactttgggaggcta

SEQ ID NO: 633718 - DNA, 15 bp, Homo sapiens
actttgggaggctaa

SEQ ID NO: 633719 - DNA, 15 bp, Homo sapiens
ctttgggaggctaag

SEQ ID NO: 633720 - DNA, 15 bp, Homo sapiens
tttgggaggctaagg

SEQ ID NO: 633721 - DNA, 15 bp, Homo sapiens
ttgggaggctaaggc

SEQ ID NO: 633722 - DNA, 15 bp, Homo sapiens
tgggaggctaaggca

SEQ ID NO: 633723 - DNA, 15 bp, Homo sapiens
gggaggctaaggcag

SEQ ID NO: 633724 - DNA, 15 bp, Homo sapiens
ggaggctaaggcaga

SEQ ID NO: 633725 - DNA, 15 bp, Homo sapiens
gaggctaaggcagac

SEQ ID NO: 633726 - DNA, 15 bp, Homo sapiens
aggctaaggcagaca

SEQ ID NO: 633727 - DNA, 15 bp, Homo sapiens
ggctaaggcagacag

SEQ ID NO: 633728 - DNA, 15 bp, Homo sapiens
gctaaggcagacaga

SEQ ID NO: 633729 - DNA, 15 bp, Homo sapiens
ctaaggcagacagat

SEQ ID NO: 633730 - DNA, 15 bp, Homo sapiens
taaggcagacagata

SEQ ID NO: 633731 - DNA, 15 bp, Homo sapiens
aaggcagacagataa

SEQ ID NO: 633732 - DNA, 15 bp, Homo sapiens
aggcagacagataat

SEQ ID NO: 633733 - DNA, 15 bp, Homo sapiens
ggcagacagataatc

SEQ ID NO: 633734 - DNA, 15 bp, Homo sapiens
gcagacagataatca

SEQ ID NO: 633735 - DNA, 15 bp, Homo sapiens
cagacagataatcag

SEQ ID NO: 633736 - DNA, 15 bp, Homo sapiens
agacagataatcaga

SEQ ID NO: 633737 - DNA, 15 bp, Homo sapiens
gacagataatcagag

SEQ ID NO: 633738 - DNA, 15 bp, Homo sapiens
acagataatcagagg

SEQ ID NO: 633739 - DNA, 15 bp, Homo sapiens
cagataatcagaggc

SEQ ID NO: 633740 - DNA, 15 bp, Homo sapiens
agataatcagaggcc

SEQ ID NO: 633741 - DNA, 15 bp, Homo sapiens
gataatcagaggcca

SEQ ID NO: 633742 - DNA, 15 bp, Homo sapiens
ataatcagaggccag

SEQ ID NO: 633743 - DNA, 15 bp, Homo sapiens
taatcagaggccagg

SEQ ID NO: 633744 - DNA, 15 bp, Homo sapiens
aatcagaggccagga

SEQ ID NO: 633745 - DNA, 15 bp, Homo sapiens
atcagaggccaggag

SEQ ID NO: 633746 - DNA, 15 bp, Homo sapiens
tcagaggccaggagt

SEQ ID NO: 633747 - DNA, 15 bp, Homo sapiens
cagaggccaggagtt

SEQ ID NO: 633748 - DNA, 15 bp, Homo sapiens
agaggccaggagttt

SEQ ID NO: 633749 - DNA, 15 bp, Homo sapiens
gaggccaggagtttg

SEQ ID NO: 633750 - DNA, 15 bp, Homo sapiens
aggccaggagtttga

SEQ ID NO: 633751 - DNA, 15 bp, Homo sapiens
ggccaggagtttgag

SEQ ID NO: 633752 - DNA, 15 bp, Homo sapiens
gccaggagtttgaga

SEQ ID NO: 633753 - DNA, 15 bp, Homo sapiens
ccaggagtttgagac

SEQ ID NO: 633754 - DNA, 15 bp, Homo sapiens
caggagtttgagacc

SEQ ID NO: 633755 - DNA, 15 bp, Homo sapiens
aggagtttgagacca

SEQ ID NO: 633756 - DNA, 15 bp, Homo sapiens
ggagtttgagaccag

SEQ ID NO: 633757 - DNA, 15 bp, Homo sapiens
gagtttgagaccagc

SEQ ID NO: 633758 - DNA, 15 bp, Homo sapiens
agtttgagaccagcc

SEQ ID NO: 633759 - DNA, 15 bp, Homo sapiens
gtttgagaccagcct

SEQ ID NO: 633760 - DNA, 15 bp, Homo sapiens
tttgagaccagcctg

SEQ ID NO: 633761 - DNA, 15 bp, Homo sapiens
ttgagaccagcctgg

SEQ ID NO: 633762 - DNA, 15 bp, Homo sapiens
tgagaccagcctggc

SEQ ID NO: 633763 - DNA, 15 bp, Homo sapiens
gagaccagcctggcc

SEQ ID NO: 633764 - DNA, 15 bp, Homo sapiens
agaccagcctggcca

SEQ ID NO: 633765 - DNA, 15 bp, Homo sapiens
gaccagcctggccaa

SEQ ID NO: 633766 - DNA, 15 bp, Homo sapiens
accagcctggccaat

SEQ ID NO: 633767 - DNA, 15 bp, Homo sapiens
ccagcctggccaata

SEQ ID NO: 633768 - DNA, 15 bp, Homo sapiens
cagcctggccaatat

SEQ ID NO: 633769 - DNA, 15 bp, Homo sapiens
agcctggccaatatg

SEQ ID NO: 633770 - DNA, 15 bp, Homo sapiens
gcctggccaatatgg

SEQ ID NO: 633771 - DNA, 15 bp, Homo sapiens
cctggccaatatggt

SEQ ID NO: 633772 - DNA, 15 bp, Homo sapiens
ctggccaatatggtg

SEQ ID NO: 633773 - DNA, 15 bp, Homo sapiens
tggccaatatggtga

SEQ ID NO: 633774 - DNA, 15 bp, Homo sapiens
ggccaatatggtgaa

SEQ ID NO: 633775 - DNA, 15 bp, Homo sapiens
gccaatatggtgaaa

SEQ ID NO: 633776 - DNA, 15 bp, Homo sapiens
ccaatatggtgaaac

SEQ ID NO: 633777 - DNA, 15 bp, Homo sapiens
caatatggtgaaact

SEQ ID NO: 633778 - DNA, 15 bp, Homo sapiens
aatatggtgaaactc

SEQ ID NO: 633779 - DNA, 15 bp, Homo sapiens
atatggtgaaactcc

SEQ ID NO: 633780 - DNA, 15 bp, Homo sapiens
tatggtgaaactcca

SEQ ID NO: 633781 - DNA, 15 bp, Homo sapiens
atggtgaaactccat

SEQ ID NO: 633782 - DNA, 15 bp, Homo sapiens
tggtgaaactccatc

SEQ ID NO: 633783 - DNA, 15 bp, Homo sapiens
ggtgaaactccatct

SEQ ID NO: 633784 - DNA, 15 bp, Homo sapiens
gtgaaactccatctc

SEQ ID NO: 633785 - DNA, 15 bp, Homo sapiens
tgaaactccatctct

SEQ ID NO: 633786 - DNA, 15 bp, Homo sapiens
gaaactccatctcta

SEQ ID NO: 633787 - DNA, 15 bp, Homo sapiens
aaactccatctctac

SEQ ID NO: 633788 - DNA, 15 bp, Homo sapiens
aactccatctctact

SEQ ID NO: 633789 - DNA, 15 bp, Homo sapiens
actccatctctacta

SEQ ID NO: 633790 - DNA, 15 bp, Homo sapiens
ctccatctctactaa

SEQ ID NO: 633791 - DNA, 15 bp, Homo sapiens
tccatctctactaaa

SEQ ID NO: 633792 - DNA, 15 bp, Homo sapiens
ccatctctactaaaa

SEQ ID NO: 633793 - DNA, 15 bp, Homo sapiens
catctctactaaaaa

SEQ ID NO: 633794 - DNA, 15 bp, Homo sapiens
atctctactaaaaat

SEQ ID NO: 633795 - DNA, 15 bp, Homo sapiens
taaaaatacaaaaat

SEQ ID NO: 633796 - DNA, 15 bp, Homo sapiens
aaaaatacaaaaatg

SEQ ID NO: 633797 - DNA, 15 bp, Homo sapiens
aaaatacaaaaatga

SEQ ID NO: 633798 - DNA, 15 bp, Homo sapiens
aaatacaaaaatgat

SEQ ID NO: 633799 - DNA, 15 bp, Homo sapiens
aatacaaaaatgatc

SEQ ID NO: 633800 - DNA, 15 bp, Homo sapiens
atacaaaaatgatcc

SEQ ID NO: 633801 - DNA, 15 bp, Homo sapiens
tacaaaaatgatcca

SEQ ID NO: 633802 - DNA, 15 bp, Homo sapiens
acaaaaatgatccag

SEQ ID NO: 633803 - DNA, 15 bp, Homo sapiens
caaaaatgatccagg

SEQ ID NO: 633804 - DNA, 15 bp, Homo sapiens
aaaaatgatccaggc

SEQ ID NO: 633805 - DNA, 15 bp, Homo sapiens
aaaatgatccaggca

SEQ ID NO: 633806 - DNA, 15 bp, Homo sapiens
aaatgatccaggcat

SEQ ID NO: 633807 - DNA, 15 bp, Homo sapiens
aatgatccaggcatg

SEQ ID NO: 633808 - DNA, 15 bp, Homo sapiens
atgatccaggcatgg

SEQ ID NO: 633809 - DNA, 15 bp, Homo sapiens
tgatccaggcatggt

SEQ ID NO: 633810 - DNA, 15 bp, Homo sapiens
gatccaggcatggtg

SEQ ID NO: 633811 - DNA, 15 bp, Homo sapiens
atccaggcatggtgg

SEQ ID NO: 633812 - DNA, 15 bp, Homo sapiens
tccaggcatggtggc

SEQ ID NO: 633813 - DNA, 15 bp, Homo sapiens
ccaggcatggtggct

SEQ ID NO: 633814 - DNA, 15 bp, Homo sapiens
caggcatggtggctc

SEQ ID NO: 633815 - DNA, 15 bp, Homo sapiens
aggcatggtggctca

SEQ ID NO: 633816 - DNA, 15 bp, Homo sapiens
ggcatggtggctcat

SEQ ID NO: 633817 - DNA, 15 bp, Homo sapiens
gcatggtggctcata

SEQ ID NO: 633818 - DNA, 15 bp, Homo sapiens
catggtggctcatac

SEQ ID NO: 633819 - DNA, 15 bp, Homo sapiens
atggtggctcatacc

SEQ ID NO: 633820 - DNA, 15 bp, Homo sapiens
tggtggctcataccc

SEQ ID NO: 633821 - DNA, 15 bp, Homo sapiens
ggtggctcatacccg

SEQ ID NO: 633822 - DNA, 15 bp, Homo sapiens
gtggctcatacccgt

SEQ ID NO: 633823 - DNA, 15 bp, Homo sapiens
tggctcatacccgta

SEQ ID NO: 633824 - DNA, 15 bp, Homo sapiens
ggctcatacccgtaa

SEQ ID NO: 633825 - DNA, 15 bp, Homo sapiens
gctcatacccgtaat

SEQ ID NO: 633826 - DNA, 15 bp, Homo sapiens
ctcatacccgtaatc

SEQ ID NO: 633827 - DNA, 15 bp, Homo sapiens
tcatacccgtaatcc

SEQ ID NO: 633828 - DNA, 15 bp, Homo sapiens
catacccgtaatccc

SEQ ID NO: 633829 - DNA, 15 bp, Homo sapiens
atacccgtaatccca

SEQ ID NO: 633830 - DNA, 15 bp, Homo sapiens
tacccgtaatcccag

SEQ ID NO: 633831 - DNA, 15 bp, Homo sapiens
acccgtaatcccagc

SEQ ID NO: 633832 - DNA, 15 bp, Homo sapiens
cccgtaatcccagct

SEQ ID NO: 633833 - DNA, 15 bp, Homo sapiens
ccgtaatcccagcta

SEQ ID NO: 633834 - DNA, 15 bp, Homo sapiens
cgtaatcccagctac

SEQ ID NO: 633835 - DNA, 15 bp, Homo sapiens
gtaatcccagctact

SEQ ID NO: 633836 - DNA, 15 bp, Homo sapiens
taatcccagctactc

SEQ ID NO: 633837 - DNA, 15 bp, Homo sapiens
aatcccagctactca

SEQ ID NO: 633838 - DNA, 15 bp, Homo sapiens
atcccagctactcag

SEQ ID NO: 633839 - DNA, 15 bp, Homo sapiens
tcccagctactcagg

SEQ ID NO: 633840 - DNA, 15 bp, Homo sapiens
cccagctactcagga

SEQ ID NO: 633841 - DNA, 15 bp, Homo sapiens
ccagctactcaggag

SEQ ID NO: 633842 - DNA, 15 bp, Homo sapiens
cagctactcaggagg

SEQ ID NO: 633843 - DNA, 15 bp, Homo sapiens
agctactcaggaggc

SEQ ID NO: 633844 - DNA, 15 bp, Homo sapiens
gctactcaggaggct

SEQ ID NO: 633845 - DNA, 15 bp, Homo sapiens
ctactcaggaggctg

SEQ ID NO: 633846 - DNA, 15 bp, Homo sapiens
tactcaggaggctga

SEQ ID NO: 633847 - DNA, 15 bp, Homo sapiens
actcaggaggctgag

SEQ ID NO: 633848 - DNA, 15 bp, Homo sapiens
ctcaggaggctgagg

SEQ ID NO: 633849 - DNA, 15 bp, Homo sapiens
tcaggaggctgaggc

SEQ ID NO: 633850 - DNA, 15 bp, Homo sapiens
caggaggctgaggca

SEQ ID NO: 633851 - DNA, 15 bp, Homo sapiens
aggaggctgaggcag

SEQ ID NO: 633852 - DNA, 15 bp, Homo sapiens
tgaggcaggagaatc

SEQ ID NO: 633853 - DNA, 15 bp, Homo sapiens
gaggcaggagaatca

SEQ ID NO: 633854 - DNA, 15 bp, Homo sapiens
aggcaggagaatcac

SEQ ID NO: 633855 - DNA, 15 bp, Homo sapiens
ggcaggagaatcaca

SEQ ID NO: 633856 - DNA, 15 bp, Homo sapiens
gcaggagaatcacat

SEQ ID NO: 633857 - DNA, 15 bp, Homo sapiens
caggagaatcacatg

SEQ ID NO: 633858 - DNA, 15 bp, Homo sapiens
aggagaatcacatga

SEQ ID NO: 633859 - DNA, 15 bp, Homo sapiens
ggagaatcacatgaa

SEQ ID NO: 633860 - DNA, 15 bp, Homo sapiens
gagaatcacatgaac

SEQ ID NO: 633861 - DNA, 15 bp, Homo sapiens
agaatcacatgaacc

SEQ ID NO: 633862 - DNA, 15 bp, Homo sapiens
gaatcacatgaaccc

SEQ ID NO: 633863 - DNA, 15 bp, Homo sapiens
aatcacatgaaccca

SEQ ID NO: 633864 - DNA, 15 bp, Homo sapiens
atcacatgaacccaa

SEQ ID NO: 633865 - DNA, 15 bp, Homo sapiens
tcacatgaacccaag

SEQ ID NO: 633866 - DNA, 15 bp, Homo sapiens
cacatgaacccaaga

SEQ ID NO: 633867 - DNA, 15 bp, Homo sapiens
acatgaacccaagag

SEQ ID NO: 633868 - DNA, 15 bp, Homo sapiens
catgaacccaagagg

SEQ ID NO: 633869 - DNA, 15 bp, Homo sapiens
atgaacccaagaggt

SEQ ID NO: 633870 - DNA, 15 bp, Homo sapiens
tgaacccaagaggtg

SEQ ID NO: 633871 - DNA, 15 bp, Homo sapiens
gaacccaagaggtgg

SEQ ID NO: 633872 - DNA, 15 bp, Homo sapiens
aacccaagaggtgga

SEQ ID NO: 633873 - DNA, 15 bp, Homo sapiens
acccaagaggtggag

SEQ ID NO: 633874 - DNA, 15 bp, Homo sapiens
cccaagaggtggagg

SEQ ID NO: 633875 - DNA, 15 bp, Homo sapiens
ccaagaggtggaggt

SEQ ID NO: 633876 - DNA, 15 bp, Homo sapiens
caagaggtggaggtt

SEQ ID NO: 633877 - DNA, 15 bp, Homo sapiens
aagaggtggaggttg

SEQ ID NO: 633878 - DNA, 15 bp, Homo sapiens
agaggtggaggttgc

SEQ ID NO: 633879 - DNA, 15 bp, Homo sapiens
gaggtggaggttgca

SEQ ID NO: 633880 - DNA, 15 bp, Homo sapiens
aggtggaggttgcag

SEQ ID NO: 633881 - DNA, 15 bp, Homo sapiens
ggtggaggttgcagt

SEQ ID NO: 633882 - DNA, 15 bp, Homo sapiens
gtggaggttgcagtg

SEQ ID NO: 633883 - DNA, 15 bp, Homo sapiens
tggaggttgcagtga

SEQ ID NO: 633884 - DNA, 15 bp, Homo sapiens
ggaggttgcagtgag

SEQ ID NO: 633885 - DNA, 15 bp, Homo sapiens
gaggttgcagtgagc

SEQ ID NO: 633886 - DNA, 15 bp, Homo sapiens
aggttgcagtgagcc

SEQ ID NO: 633887 - DNA, 15 bp, Homo sapiens
ggttgcagtgagcca

SEQ ID NO: 633888 - DNA, 15 bp, Homo sapiens
gttgcagtgagccaa

SEQ ID NO: 633889 - DNA, 15 bp, Homo sapiens
ttgcagtgagccaag

SEQ ID NO: 633890 - DNA, 15 bp, Homo sapiens
tgcagtgagccaaga

SEQ ID NO: 633891 - DNA, 15 bp, Homo sapiens
gcagtgagccaagat

SEQ ID NO: 633892 - DNA, 15 bp, Homo sapiens
cagtgagccaagatt

SEQ ID NO: 633893 - DNA, 15 bp, Homo sapiens
agtgagccaagattg

SEQ ID NO: 633894 - DNA, 15 bp, Homo sapiens
gtgagccaagattga

SEQ ID NO: 633895 - DNA, 15 bp, Homo sapiens
tgagccaagattgag

SEQ ID NO: 633896 - DNA, 15 bp, Homo sapiens
gagccaagattgagc

SEQ ID NO: 633897 - DNA, 15 bp, Homo sapiens
agccaagattgagcc

SEQ ID NO: 633898 - DNA, 15 bp, Homo sapiens
gccaagattgagcca

SEQ ID NO: 633899 - DNA, 15 bp, Homo sapiens
ccaagattgagccac

SEQ ID NO: 633900 - DNA, 15 bp, Homo sapiens
caagattgagccact

SEQ ID NO: 633901 - DNA, 15 bp, Homo sapiens
aagattgagccactg

SEQ ID NO: 633902 - DNA, 15 bp, Homo sapiens
agattgagccactgt

SEQ ID NO: 633903 - DNA, 15 bp, Homo sapiens
gattgagccactgta

SEQ ID NO: 633904 - DNA, 15 bp, Homo sapiens
attgagccactgtac

SEQ ID NO: 633905 - DNA, 15 bp, Homo sapiens
ttgagccactgtact

SEQ ID NO: 633906 - DNA, 15 bp, Homo sapiens
tgagccactgtactc

SEQ ID NO: 633907 - DNA, 15 bp, Homo sapiens
gagccactgtactcc

SEQ ID NO: 633908 - DNA, 15 bp, Homo sapiens
agccactgtactcca

SEQ ID NO: 633909 - DNA, 15 bp, Homo sapiens
gccactgtactccag

SEQ ID NO: 633910 - DNA, 15 bp, Homo sapiens
ccactgtactccagc

SEQ ID NO: 633911 - DNA, 15 bp, Homo sapiens
cactgtactccagcc

SEQ ID NO: 633912 - DNA, 15 bp, Homo sapiens
actgtactccagcct

SEQ ID NO: 633913 - DNA, 15 bp, Homo sapiens
ctgtactccagcctg

SEQ ID NO: 633914 - DNA, 15 bp, Homo sapiens
tgtactccagcctgg

SEQ ID NO: 633915 - DNA, 15 bp, Homo sapiens
gtactccagcctggg

SEQ ID NO: 633916 - DNA, 15 bp, Homo sapiens
tactccagcctgggc

SEQ ID NO: 633917 - DNA, 15 bp, Homo sapiens
actccagcctgggca

SEQ ID NO: 633918 - DNA, 15 bp, Homo sapiens
ctccagcctgggcaa

SEQ ID NO: 633919 - DNA, 15 bp, Homo sapiens
tccagcctgggcaac

SEQ ID NO: 633920 - DNA, 15 bp, Homo sapiens
cagcctgggcaacag

SEQ ID NO: 633921 - DNA, 15 bp, Homo sapiens
agcctgggcaacaga

SEQ ID NO: 633922 - DNA, 15 bp, Homo sapiens
gcctgggcaacagag

SEQ ID NO: 633923 - DNA, 15 bp, Homo sapiens
cctgggcaacagagc

SEQ ID NO: 633924 - DNA, 15 bp, Homo sapiens
ctgggcaacagagca

SEQ ID NO: 633925 - DNA, 15 bp, Homo sapiens
tgggcaacagagcaa

SEQ ID NO: 633926 - DNA, 15 bp, Homo sapiens
gggcaacagagcaag

SEQ ID NO: 633927 - DNA, 15 bp, Homo sapiens
ggcaacagagcaaga

SEQ ID NO: 633928 - DNA, 15 bp, Homo sapiens
gcaacagagcaagac

SEQ ID NO: 633929 - DNA, 15 bp, Homo sapiens
caacagagcaagact

SEQ ID NO: 633930 - DNA, 15 bp, Homo sapiens
aacagagcaagactt

SEQ ID NO: 633931 - DNA, 15 bp, Homo sapiens
acagagcaagacttg

SEQ ID NO: 633932 - DNA, 15 bp, Homo sapiens
cagagcaagacttgg

SEQ ID NO: 633933 - DNA, 15 bp, Homo sapiens
agagcaagacttggt

SEQ ID NO: 633934 - DNA, 15 bp, Homo sapiens
gagcaagacttggtc

SEQ ID NO: 633935 - DNA, 15 bp, Homo sapiens
agcaagacttggtct

SEQ ID NO: 633936 - DNA, 15 bp, Homo sapiens
gcaagacttggtctc

SEQ ID NO: 633937 - DNA, 15 bp, Homo sapiens
caagacttggtctca

SEQ ID NO: 633938 - DNA, 15 bp, Homo sapiens
aagacttggtctcag

SEQ ID NO: 633939 - DNA, 15 bp, Homo sapiens
agacttggtctcaga

SEQ ID NO: 633940 - DNA, 15 bp, Homo sapiens
gacttggtctcagaa

SEQ ID NO: 633941 - DNA, 15 bp, Homo sapiens
acttggtctcagaaa

SEQ ID NO: 633942 - DNA, 15 bp, Homo sapiens
cttggtctcagaaaa

SEQ ID NO: 633943 - DNA, 15 bp, Homo sapiens
ttggtctcagaaaaa

SEQ ID NO: 633944 - DNA, 15 bp, Homo sapiens
tggtctcagaaaaaa

SEQ ID NO: 633945 - DNA, 15 bp, Homo sapiens
ggtctcagaaaaaaa

SEQ ID NO: 633946 - DNA, 15 bp, Homo sapiens
gtctcagaaaaaaaa

SEQ ID NO: 633947 - DNA, 15 bp, Homo sapiens
tctcagaaaaaaaaa

SEQ ID NO: 633948 - DNA, 15 bp, Homo sapiens
ctcagaaaaaaaaaa

SEQ ID NO: 633949 - DNA, 15 bp, Homo sapiens
tcagaaaaaaaaaaa

SEQ ID NO: 633950 - DNA, 15 bp, Homo sapiens
cagaaaaaaaaaaaa

SEQ ID NO: 633951 - DNA, 15 bp, Homo sapiens
agaaaaaaaaaaaaa

SEQ ID NO: 633952 - DNA, 15 bp, Homo sapiens
gaaaaaaaaaaaaag

SEQ ID NO: 633953 - DNA, 15 bp, Homo sapiens
aaaaaaaaaaaagtg

SEQ ID NO: 633954 - DNA, 15 bp, Homo sapiens
aaaaaaaaaaagtgt

SEQ ID NO: 633955 - DNA, 15 bp, Homo sapiens
aaaaaaaaaagtgta

SEQ ID NO: 633956 - DNA, 15 bp, Homo sapiens
aaaaaaaaagtgtat

SEQ ID NO: 633957 - DNA, 15 bp, Homo sapiens
aaaaaaaagtgtatg

SEQ ID NO: 633958 - DNA, 15 bp, Homo sapiens
aaaaaaagtgtatgt

SEQ ID NO: 633959 - DNA, 15 bp, Homo sapiens
aaaaaagtgtatgtc

SEQ ID NO: 633960 - DNA, 15 bp, Homo sapiens
aaaaagtgtatgtct

SEQ ID NO: 633961 - DNA, 15 bp, Homo sapiens
aaaagtgtatgtctt

SEQ ID NO: 633962 - DNA, 15 bp, Homo sapiens
aaagtgtatgtcttg

SEQ ID NO: 633963 - DNA, 15 bp, Homo sapiens
aagtgtatgtcttga

SEQ ID NO: 633964 - DNA, 15 bp, Homo sapiens
agtgtatgtcttgac

SEQ ID NO: 633965 - DNA, 15 bp, Homo sapiens
gtgtatgtcttgact

SEQ ID NO: 633966 - DNA, 15 bp, Homo sapiens
tgtatgtcttgactt

SEQ ID NO: 633967 - DNA, 15 bp, Homo sapiens
gtatgtcttgacttt

SEQ ID NO: 633968 - DNA, 15 bp, Homo sapiens
tatgtcttgacttta

SEQ ID NO: 633969 - DNA, 15 bp, Homo sapiens
atgtcttgactttaa

SEQ ID NO: 633970 - DNA, 15 bp, Homo sapiens
tgtcttgactttaaa

SEQ ID NO: 633971 - DNA, 15 bp, Homo sapiens
gtcttgactttaaaa

SEQ ID NO: 633972 - DNA, 15 bp, Homo sapiens
tcttgactttaaaaa

SEQ ID NO: 633973 - DNA, 15 bp, Homo sapiens
cttgactttaaaaaa

SEQ ID NO: 633974 - DNA, 15 bp, Homo sapiens
ttgactttaaaaaat

SEQ ID NO: 633975 - DNA, 15 bp, Homo sapiens
tgactttaaaaaatt

SEQ ID NO: 633976 - DNA, 15 bp, Homo sapiens
gactttaaaaaattc

SEQ ID NO: 633977 - DNA, 15 bp, Homo sapiens
actttaaaaaattca

SEQ ID NO: 633978 - DNA, 15 bp, Homo sapiens
ctttaaaaaattcaa

SEQ ID NO: 633979 - DNA, 15 bp, Homo sapiens
tttaaaaaattcaat

SEQ ID NO: 633980 - DNA, 15 bp, Homo sapiens
ttaaaaaattcaata

SEQ ID NO: 633981 - DNA, 15 bp, Homo sapiens
taaaaaattcaataa

SEQ ID NO: 633982 - DNA, 15 bp, Homo sapiens
aaaaaattcaataaa

SEQ ID NO: 633983 - DNA, 15 bp, Homo sapiens
aaaaattcaataaac

SEQ ID NO: 633984 - DNA, 15 bp, Homo sapiens
aaaattcaataaact

SEQ ID NO: 633985 - DNA, 15 bp, Homo sapiens
aaattcaataaactg

SEQ ID NO: 633986 - DNA, 15 bp, Homo sapiens
aattcaataaactga

SEQ ID NO: 633987 - DNA, 15 bp, Homo sapiens
attcaataaactgac

SEQ ID NO: 633988 - DNA, 15 bp, Homo sapiens
ttcaataaactgacc

SEQ ID NO: 633989 - DNA, 15 bp, Homo sapiens
tcaataaactgacct

SEQ ID NO: 633990 - DNA, 15 bp, Homo sapiens
caataaactgacctg

SEQ ID NO: 633991 - DNA, 15 bp, Homo sapiens
aataaactgacctgt

SEQ ID NO: 633992 - DNA, 15 bp, Homo sapiens
ataaactgacctgtc

SEQ ID NO: 633993 - DNA, 15 bp, Homo sapiens
taaactgacctgtct

SEQ ID NO: 633994 - DNA, 15 bp, Homo sapiens
aaactgacctgtctt

SEQ ID NO: 633995 - DNA, 15 bp, Homo sapiens
aactgacctgtcttt

SEQ ID NO: 633996 - DNA, 15 bp, Homo sapiens
actgacctgtctttt

SEQ ID NO: 633997 - DNA, 15 bp, Homo sapiens
ctgacctgtcttttt

SEQ ID NO: 633998 - DNA, 15 bp, Homo sapiens
tgacctgtctttttt

SEQ ID NO: 633999 - DNA, 15 bp, Homo sapiens
gacctgtcttttttt

SEQ ID NO: 634000 - DNA, 15 bp, Homo sapiens
acctgtcttttttta

SEQ ID NO: 634001 - DNA, 15 bp, Homo sapiens
cctgtctttttttaa

SEQ ID NO: 634002 - DNA, 15 bp, Homo sapiens
ctgtctttttttaaa

SEQ ID NO: 634003 - DNA, 15 bp, Homo sapiens
tgtctttttttaaaa

SEQ ID NO: 634004 - DNA, 15 bp, Homo sapiens
gtctttttttaaaaa

SEQ ID NO: 634005 - DNA, 15 bp, Homo sapiens
tctttttttaaaaaa

SEQ ID NO: 634006 - DNA, 15 bp, Homo sapiens
ctttttttaaaaaac

SEQ ID NO: 634007 - DNA, 15 bp, Homo sapiens
tttttttaaaaaaca

SEQ ID NO: 634008 - DNA, 15 bp, Homo sapiens
ttttttaaaaaacag

SEQ ID NO: 634009 - DNA, 15 bp, Homo sapiens
tttttaaaaaacagc

SEQ ID NO: 634010 - DNA, 15 bp, Homo sapiens
ttttaaaaaacagcc

SEQ ID NO: 634011 - DNA, 15 bp, Homo sapiens
tttaaaaaacagcct

SEQ ID NO: 634012 - DNA, 15 bp, Homo sapiens
ttaaaaaacagcctt

SEQ ID NO: 634013 - DNA, 15 bp, Homo sapiens
taaaaaacagccttt

SEQ ID NO: 634014 - DNA, 15 bp, Homo sapiens
aaaaaacagcctttt

SEQ ID NO: 634015 - DNA, 15 bp, Homo sapiens
aaaaacagccttttg

SEQ ID NO: 634016 - DNA, 15 bp, Homo sapiens
aaaacagccttttga

SEQ ID NO: 634017 - DNA, 15 bp, Homo sapiens
aaacagccttttgag

SEQ ID NO: 634018 - DNA, 15 bp, Homo sapiens
aacagccttttgagg

SEQ ID NO: 634019 - DNA, 15 bp, Homo sapiens
acagccttttgaggg

SEQ ID NO: 634020 - DNA, 15 bp, Homo sapiens
cagccttttgagggt

SEQ ID NO: 634021 - DNA, 15 bp, Homo sapiens
agccttttgagggta

SEQ ID NO: 634022 - DNA, 15 bp, Homo sapiens
gccttttgagggtat

SEQ ID NO: 634023 - DNA, 15 bp, Homo sapiens
ccttttgagggtata

SEQ ID NO: 634024 - DNA, 15 bp, Homo sapiens
cttttgagggtataa

SEQ ID NO: 634025 - DNA, 15 bp, Homo sapiens
ttttgagggtataat

SEQ ID NO: 634026 - DNA, 15 bp, Homo sapiens
tttgagggtataatt

SEQ ID NO: 634027 - DNA, 15 bp, Homo sapiens
ttgagggtataattt

SEQ ID NO: 634028 - DNA, 15 bp, Homo sapiens
tgagggtataattta

SEQ ID NO: 634029 - DNA, 15 bp, Homo sapiens
gagggtataatttac

SEQ ID NO: 634030 - DNA, 15 bp, Homo sapiens
agggtataatttaca

SEQ ID NO: 634031 - DNA, 15 bp, Homo sapiens
gggtataatttacat

SEQ ID NO: 634032 - DNA, 15 bp, Homo sapiens
ggtataatttacata

SEQ ID NO: 634033 - DNA, 15 bp, Homo sapiens
gtataatttacatat

SEQ ID NO: 634034 - DNA, 15 bp, Homo sapiens
tataatttacatatc

SEQ ID NO: 634035 - DNA, 15 bp, Homo sapiens
ataatttacatatca

SEQ ID NO: 634036 - DNA, 15 bp, Homo sapiens
taatttacatatcac

SEQ ID NO: 634037 - DNA, 15 bp, Homo sapiens
aatttacatatcaca

SEQ ID NO: 634038 - DNA, 15 bp, Homo sapiens
atttacatatcacag

SEQ ID NO: 634039 - DNA, 15 bp, Homo sapiens
tttacatatcacaga

SEQ ID NO: 634040 - DNA, 15 bp, Homo sapiens
ttacatatcacagag

SEQ ID NO: 634041 - DNA, 15 bp, Homo sapiens
tacatatcacagagt

SEQ ID NO: 634042 - DNA, 15 bp, Homo sapiens
acatatcacagagtt

SEQ ID NO: 634043 - DNA, 15 bp, Homo sapiens
catatcacagagttc

SEQ ID NO: 634044 - DNA, 15 bp, Homo sapiens
atatcacagagttca

SEQ ID NO: 634045 - DNA, 15 bp, Homo sapiens
tatcacagagttcac

SEQ ID NO: 634046 - DNA, 15 bp, Homo sapiens
atcacagagttcacc

SEQ ID NO: 634047 - DNA, 15 bp, Homo sapiens
tcacagagttcacct

SEQ ID NO: 634048 - DNA, 15 bp, Homo sapiens
cacagagttcaccta

SEQ ID NO: 634049 - DNA, 15 bp, Homo sapiens
acagagttcacctat

SEQ ID NO: 634050 - DNA, 15 bp, Homo sapiens
cagagttcacctatg

SEQ ID NO: 634051 - DNA, 15 bp, Homo sapiens
agagttcacctatgt

SEQ ID NO: 634052 - DNA, 15 bp, Homo sapiens
gagttcacctatgta

SEQ ID NO: 634053 - DNA, 15 bp, Homo sapiens
agttcacctatgtaa

SEQ ID NO: 634054 - DNA, 15 bp, Homo sapiens
gttcacctatgtaaa

SEQ ID NO: 634055 - DNA, 15 bp, Homo sapiens
ttcacctatgtaaag

SEQ ID NO: 634056 - DNA, 15 bp, Homo sapiens
tcacctatgtaaagt

SEQ ID NO: 634057 - DNA, 15 bp, Homo sapiens
cacctatgtaaagta

SEQ ID NO: 634058 - DNA, 15 bp, Homo sapiens
acctatgtaaagtat

SEQ ID NO: 634059 - DNA, 15 bp, Homo sapiens
cctatgtaaagtatt

SEQ ID NO: 634060 - DNA, 15 bp, Homo sapiens
ctatgtaaagtattc

SEQ ID NO: 634061 - DNA, 15 bp, Homo sapiens
tatgtaaagtattca

SEQ ID NO: 634062 - DNA, 15 bp, Homo sapiens
atgtaaagtattcaa

SEQ ID NO: 634063 - DNA, 15 bp, Homo sapiens
tgtaaagtattcaat

SEQ ID NO: 634064 - DNA, 15 bp, Homo sapiens
gtaaagtattcaatg

SEQ ID NO: 634065 - DNA, 15 bp, Homo sapiens
taaagtattcaatgg

SEQ ID NO: 634066 - DNA, 15 bp, Homo sapiens
aaagtattcaatggt

SEQ ID NO: 634067 - DNA, 15 bp, Homo sapiens
aagtattcaatggtt

SEQ ID NO: 634068 - DNA, 15 bp, Homo sapiens
agtattcaatggttt

SEQ ID NO: 634069 - DNA, 15 bp, Homo sapiens
gtattcaatggtttt

SEQ ID NO: 634070 - DNA, 15 bp, Homo sapiens
tattcaatggttttc

SEQ ID NO: 634071 - DNA, 15 bp, Homo sapiens
attcaatggttttca

SEQ ID NO: 634072 - DNA, 15 bp, Homo sapiens
ttcaatggttttcaa

SEQ ID NO: 634073 - DNA, 15 bp, Homo sapiens
tcaatggttttcaat

SEQ ID NO: 634074 - DNA, 15 bp, Homo sapiens
caatggttttcaata

SEQ ID NO: 634075 - DNA, 15 bp, Homo sapiens
aatggttttcaatat

SEQ ID NO: 634076 - DNA, 15 bp, Homo sapiens
atggttttcaatata

SEQ ID NO: 634077 - DNA, 15 bp, Homo sapiens
tggttttcaatatat

SEQ ID NO: 634078 - DNA, 15 bp, Homo sapiens
ggttttcaatatatt

SEQ ID NO: 634079 - DNA, 15 bp, Homo sapiens
gttttcaatatatta

SEQ ID NO: 634080 - DNA, 15 bp, Homo sapiens
ttttcaatatattaa

SEQ ID NO: 634081 - DNA, 15 bp, Homo sapiens
tttcaatatattaac

SEQ ID NO: 634082 - DNA, 15 bp, Homo sapiens
ttcaatatattaaca

SEQ ID NO: 634083 - DNA, 15 bp, Homo sapiens
tcaatatattaacag

SEQ ID NO: 634084 - DNA, 15 bp, Homo sapiens
caatatattaacaga

SEQ ID NO: 634085 - DNA, 15 bp, Homo sapiens
aatatattaacagag

SEQ ID NO: 634086 - DNA, 15 bp, Homo sapiens
atatattaacagagt

SEQ ID NO: 634087 - DNA, 15 bp, Homo sapiens
tatattaacagagtt

SEQ ID NO: 634088 - DNA, 15 bp, Homo sapiens
atattaacagagttg

SEQ ID NO: 634089 - DNA, 15 bp, Homo sapiens
tattaacagagttgt

SEQ ID NO: 634090 - DNA, 15 bp, Homo sapiens
attaacagagttgtg

SEQ ID NO: 634091 - DNA, 15 bp, Homo sapiens
ttaacagagttgtgc

SEQ ID NO: 634092 - DNA, 15 bp, Homo sapiens
taacagagttgtgcg

SEQ ID NO: 634093 - DNA, 15 bp, Homo sapiens
aacagagttgtgcga

SEQ ID NO: 634094 - DNA, 15 bp, Homo sapiens
acagagttgtgcgac

SEQ ID NO: 634095 - DNA, 15 bp, Homo sapiens
cagagttgtgcgacc

SEQ ID NO: 634096 - DNA, 15 bp, Homo sapiens
agagttgtgcgacca

SEQ ID NO: 634097 - DNA, 15 bp, Homo sapiens
gagttgtgcgaccat

SEQ ID NO: 634098 - DNA, 15 bp, Homo sapiens
agttgtgcgaccatc

SEQ ID NO: 634099 - DNA, 15 bp, Homo sapiens
gttgtgcgaccatca

SEQ ID NO: 634100 - DNA, 15 bp, Homo sapiens
ttgtgcgaccatcac

SEQ ID NO: 634101 - DNA, 15 bp, Homo sapiens
tgtgcgaccatcacc

SEQ ID NO: 634102 - DNA, 15 bp, Homo sapiens
gtgcgaccatcacca

SEQ ID NO: 634103 - DNA, 15 bp, Homo sapiens
tgcgaccatcaccat

SEQ ID NO: 634104 - DNA, 15 bp, Homo sapiens
gcgaccatcaccata

SEQ ID NO: 634105 - DNA, 15 bp, Homo sapiens
cgaccatcaccataa

SEQ ID NO: 634106 - DNA, 15 bp, Homo sapiens
gaccatcaccataat

SEQ ID NO: 634107 - DNA, 15 bp, Homo sapiens
accatcaccataatc

SEQ ID NO: 634108 - DNA, 15 bp, Homo sapiens
ccatcaccataatct

SEQ ID NO: 634109 - DNA, 15 bp, Homo sapiens
catcaccataatcta

SEQ ID NO: 634110 - DNA, 15 bp, Homo sapiens
atcaccataatctaa

SEQ ID NO: 634111 - DNA, 15 bp, Homo sapiens
tcaccataatctaac

SEQ ID NO: 634112 - DNA, 15 bp, Homo sapiens
caccataatctaact

SEQ ID NO: 634113 - DNA, 15 bp, Homo sapiens
accataatctaactt

SEQ ID NO: 634114 - DNA, 15 bp, Homo sapiens
ccataatctaacttt

SEQ ID NO: 634115 - DNA, 15 bp, Homo sapiens
cataatctaacttta

SEQ ID NO: 634116 - DNA, 15 bp, Homo sapiens
ataatctaactttag

SEQ ID NO: 634117 - DNA, 15 bp, Homo sapiens
taatctaactttaga

SEQ ID NO: 634118 - DNA, 15 bp, Homo sapiens
aatctaactttagaa

SEQ ID NO: 634119 - DNA, 15 bp, Homo sapiens
atctaactttagaac

SEQ ID NO: 634120 - DNA, 15 bp, Homo sapiens
tctaactttagaaca

SEQ ID NO: 634121 - DNA, 15 bp, Homo sapiens
ctaactttagaacat

SEQ ID NO: 634122 - DNA, 15 bp, Homo sapiens
taactttagaacatt

SEQ ID NO: 634123 - DNA, 15 bp, Homo sapiens
aactttagaacattt

SEQ ID NO: 634124 - DNA, 15 bp, Homo sapiens
actttagaacatttt

SEQ ID NO: 634125 - DNA, 15 bp, Homo sapiens
ctttagaacattttc

SEQ ID NO: 634126 - DNA, 15 bp, Homo sapiens
tttagaacattttct

SEQ ID NO: 634127 - DNA, 15 bp, Homo sapiens
ttagaacattttctt

SEQ ID NO: 634128 - DNA, 15 bp, Homo sapiens
tagaacattttcttc

SEQ ID NO: 634129 - DNA, 15 bp, Homo sapiens
agaacattttcttca

SEQ ID NO: 634130 - DNA, 15 bp, Homo sapiens
gaacattttcttcat

SEQ ID NO: 634131 - DNA, 15 bp, Homo sapiens
aacattttcttcatc

SEQ ID NO: 634132 - DNA, 15 bp, Homo sapiens
acattttcttcatcc

SEQ ID NO: 634133 - DNA, 15 bp, Homo sapiens
cattttcttcatccc

SEQ ID NO: 634134 - DNA, 15 bp, Homo sapiens
attttcttcatcccc

SEQ ID NO: 634135 - DNA, 15 bp, Homo sapiens
ttttcttcatcccca

SEQ ID NO: 634136 - DNA, 15 bp, Homo sapiens
tttcttcatccccaa

SEQ ID NO: 634137 - DNA, 15 bp, Homo sapiens
ttcttcatccccaaa

SEQ ID NO: 634138 - DNA, 15 bp, Homo sapiens
tcttcatccccaaaa

SEQ ID NO: 634139 - DNA, 15 bp, Homo sapiens
cttcatccccaaaag

SEQ ID NO: 634140 - DNA, 15 bp, Homo sapiens
ttcatccccaaaaga

SEQ ID NO: 634141 - DNA, 15 bp, Homo sapiens
tcatccccaaaagaa

SEQ ID NO: 634142 - DNA, 15 bp, Homo sapiens
catccccaaaagaaa

SEQ ID NO: 634143 - DNA, 15 bp, Homo sapiens
atccccaaaagaaac

SEQ ID NO: 634144 - DNA, 15 bp, Homo sapiens
tccccaaaagaaacc

SEQ ID NO: 634145 - DNA, 15 bp, Homo sapiens
ccccaaaagaaacct

SEQ ID NO: 634146 - DNA, 15 bp, Homo sapiens
cccaaaagaaacctt

SEQ ID NO: 634147 - DNA, 15 bp, Homo sapiens
ccaaaagaaacctta

SEQ ID NO: 634148 - DNA, 15 bp, Homo sapiens
caaaagaaaccttat

SEQ ID NO: 634149 - DNA, 15 bp, Homo sapiens
aaaagaaaccttata

SEQ ID NO: 634150 - DNA, 15 bp, Homo sapiens
aaagaaaccttatat

SEQ ID NO: 634151 - DNA, 15 bp, Homo sapiens
aagaaaccttatatc

SEQ ID NO: 634152 - DNA, 15 bp, Homo sapiens
agaaaccttatatct

SEQ ID NO: 634153 - DNA, 15 bp, Homo sapiens
gaaaccttatatctg

SEQ ID NO: 634154 - DNA, 15 bp, Homo sapiens
aaaccttatatctgt

SEQ ID NO: 634155 - DNA, 15 bp, Homo sapiens
aaccttatatctgtt

SEQ ID NO: 634156 - DNA, 15 bp, Homo sapiens
accttatatctgtta

SEQ ID NO: 634157 - DNA, 15 bp, Homo sapiens
ccttatatctgttac

SEQ ID NO: 634158 - DNA, 15 bp, Homo sapiens
cttatatctgttacc

SEQ ID NO: 634159 - DNA, 15 bp, Homo sapiens
ttatatctgttacca

SEQ ID NO: 634160 - DNA, 15 bp, Homo sapiens
tatatctgttaccag

SEQ ID NO: 634161 - DNA, 15 bp, Homo sapiens
atatctgttaccagt

SEQ ID NO: 634162 - DNA, 15 bp, Homo sapiens
tatctgttaccagtc

SEQ ID NO: 634163 - DNA, 15 bp, Homo sapiens
atctgttaccagtca

SEQ ID NO: 634164 - DNA, 15 bp, Homo sapiens
tctgttaccagtcac

SEQ ID NO: 634165 - DNA, 15 bp, Homo sapiens
ctgttaccagtcact

SEQ ID NO: 634166 - DNA, 15 bp, Homo sapiens
tgttaccagtcactc

SEQ ID NO: 634167 - DNA, 15 bp, Homo sapiens
gttaccagtcactcc

SEQ ID NO: 634168 - DNA, 15 bp, Homo sapiens
ttaccagtcactcct

SEQ ID NO: 634169 - DNA, 15 bp, Homo sapiens
taccagtcactcctc

SEQ ID NO: 634170 - DNA, 15 bp, Homo sapiens
accagtcactcctca

SEQ ID NO: 634171 - DNA, 15 bp, Homo sapiens
ccagtcactcctcat

SEQ ID NO: 634172 - DNA, 15 bp, Homo sapiens
cagtcactcctcatt

SEQ ID NO: 634173 - DNA, 15 bp, Homo sapiens
agtcactcctcattc

SEQ ID NO: 634174 - DNA, 15 bp, Homo sapiens
gtcactcctcattcc

SEQ ID NO: 634175 - DNA, 15 bp, Homo sapiens
tcactcctcattccc

SEQ ID NO: 634176 - DNA, 15 bp, Homo sapiens
cactcctcattcccc

SEQ ID NO: 634177 - DNA, 15 bp, Homo sapiens
actcctcattcccct

SEQ ID NO: 634178 - DNA, 15 bp, Homo sapiens
ctcctcattcccctc

SEQ ID NO: 634179 - DNA, 15 bp, Homo sapiens
tcctcattcccctcc

SEQ ID NO: 634180 - DNA, 15 bp, Homo sapiens
cctcattcccctccc

SEQ ID NO: 634181 - DNA, 15 bp, Homo sapiens
ctcattcccctccca

SEQ ID NO: 634182 - DNA, 15 bp, Homo sapiens
tcattcccctcccac

SEQ ID NO: 634183 - DNA, 15 bp, Homo sapiens
cattcccctcccacc

SEQ ID NO: 634184 - DNA, 15 bp, Homo sapiens
attcccctcccaccc

SEQ ID NO: 634185 - DNA, 15 bp, Homo sapiens
ttcccctcccacccc

SEQ ID NO: 634186 - DNA, 15 bp, Homo sapiens
tcccctcccacccct

SEQ ID NO: 634187 - DNA, 15 bp, Homo sapiens
cccctcccaccccta

SEQ ID NO: 634188 - DNA, 15 bp, Homo sapiens
ccctcccacccctac

SEQ ID NO: 634189 - DNA, 15 bp, Homo sapiens
cctcccacccctacc

SEQ ID NO: 634190 - DNA, 15 bp, Homo sapiens
ctcccacccctaccc

SEQ ID NO: 634191 - DNA, 15 bp, Homo sapiens
tcccacccctacccc

SEQ ID NO: 634192 - DNA, 15 bp, Homo sapiens
cccacccctacccct

SEQ ID NO: 634193 - DNA, 15 bp, Homo sapiens
ccacccctaccccta

SEQ ID NO: 634194 - DNA, 15 bp, Homo sapiens
cacccctacccctac

SEQ ID NO: 634195 - DNA, 15 bp, Homo sapiens
acccctacccctacc

SEQ ID NO: 634196 - DNA, 15 bp, Homo sapiens
cccctacccctaccc

SEQ ID NO: 634197 - DNA, 15 bp, Homo sapiens
ccctacccctacccc

SEQ ID NO: 634198 - DNA, 15 bp, Homo sapiens
cctacccctacccca

SEQ ID NO: 634199 - DNA, 15 bp, Homo sapiens
ctacccctaccccag

SEQ ID NO: 634200 - DNA, 15 bp, Homo sapiens
tacccctaccccagc

SEQ ID NO: 634201 - DNA, 15 bp, Homo sapiens
acccctaccccagca

SEQ ID NO: 634202 - DNA, 15 bp, Homo sapiens
cccctaccccagcat

SEQ ID NO: 634203 - DNA, 15 bp, Homo sapiens
ccctaccccagcatt

SEQ ID NO: 634204 - DNA, 15 bp, Homo sapiens
cctaccccagcatta

SEQ ID NO: 634205 - DNA, 15 bp, Homo sapiens
ctaccccagcattag

SEQ ID NO: 634206 - DNA, 15 bp, Homo sapiens
taccccagcattagg

SEQ ID NO: 634207 - DNA, 15 bp, Homo sapiens
accccagcattaggc

SEQ ID NO: 634208 - DNA, 15 bp, Homo sapiens
ccccagcattaggca

SEQ ID NO: 634209 - DNA, 15 bp, Homo sapiens
cccagcattaggcaa

SEQ ID NO: 634210 - DNA, 15 bp, Homo sapiens
ccagcattaggcaac

SEQ ID NO: 634211 - DNA, 15 bp, Homo sapiens
cagcattaggcaacc

SEQ ID NO: 634212 - DNA, 15 bp, Homo sapiens
agcattaggcaacca

SEQ ID NO: 634213 - DNA, 15 bp, Homo sapiens
gcattaggcaaccac

SEQ ID NO: 634214 - DNA, 15 bp, Homo sapiens
cattaggcaaccact

SEQ ID NO: 634215 - DNA, 15 bp, Homo sapiens
attaggcaaccactt

SEQ ID NO: 634216 - DNA, 15 bp, Homo sapiens
ttaggcaaccactta

SEQ ID NO: 634217 - DNA, 15 bp, Homo sapiens
taggcaaccacttat

SEQ ID NO: 634218 - DNA, 15 bp, Homo sapiens
aggcaaccacttatt

SEQ ID NO: 634219 - DNA, 15 bp, Homo sapiens
ggcaaccacttattt

SEQ ID NO: 634220 - DNA, 15 bp, Homo sapiens
gcaaccacttattta

SEQ ID NO: 634221 - DNA, 15 bp, Homo sapiens
caaccacttatttat

SEQ ID NO: 634222 - DNA, 15 bp, Homo sapiens
aaccacttatttatt

SEQ ID NO: 634223 - DNA, 15 bp, Homo sapiens
accacttatttattt

SEQ ID NO: 634224 - DNA, 15 bp, Homo sapiens
ccacttatttatttt

SEQ ID NO: 634225 - DNA, 15 bp, Homo sapiens
cacttatttattttc

SEQ ID NO: 634226 - DNA, 15 bp, Homo sapiens
acttatttattttct

SEQ ID NO: 634227 - DNA, 15 bp, Homo sapiens
cttatttattttctg

SEQ ID NO: 634228 - DNA, 15 bp, Homo sapiens
ttatttattttctgt

SEQ ID NO: 634229 - DNA, 15 bp, Homo sapiens
tatttattttctgtc

SEQ ID NO: 634230 - DNA, 15 bp, Homo sapiens
atttattttctgtcc

SEQ ID NO: 634231 - DNA, 15 bp, Homo sapiens
tttattttctgtccc

SEQ ID NO: 634232 - DNA, 15 bp, Homo sapiens
ttattttctgtccct

SEQ ID NO: 634233 - DNA, 15 bp, Homo sapiens
tattttctgtcccta

SEQ ID NO: 634234 - DNA, 15 bp, Homo sapiens
attttctgtccctat

SEQ ID NO: 634235 - DNA, 15 bp, Homo sapiens
ttttctgtccctata

SEQ ID NO: 634236 - DNA, 15 bp, Homo sapiens
tttctgtccctatag

SEQ ID NO: 634237 - DNA, 15 bp, Homo sapiens
ttctgtccctataga

SEQ ID NO: 634238 - DNA, 15 bp, Homo sapiens
tctgtccctatagat

SEQ ID NO: 634239 - DNA, 15 bp, Homo sapiens
ctgtccctatagatt

SEQ ID NO: 634240 - DNA, 15 bp, Homo sapiens
tgtccctatagattt

SEQ ID NO: 634241 - DNA, 15 bp, Homo sapiens
gtccctatagatttg

SEQ ID NO: 634242 - DNA, 15 bp, Homo sapiens
tccctatagatttgc

SEQ ID NO: 634243 - DNA, 15 bp, Homo sapiens
ccctatagatttgcc

SEQ ID NO: 634244 - DNA, 15 bp, Homo sapiens
cctatagatttgcct

SEQ ID NO: 634245 - DNA, 15 bp, Homo sapiens
ctatagatttgccta

SEQ ID NO: 634246 - DNA, 15 bp, Homo sapiens
tatagatttgcctat

SEQ ID NO: 634247 - DNA, 15 bp, Homo sapiens
atagatttgcctatc

SEQ ID NO: 634248 - DNA, 15 bp, Homo sapiens
tagatttgcctatct

SEQ ID NO: 634249 - DNA, 15 bp, Homo sapiens
agatttgcctatctt

SEQ ID NO: 634250 - DNA, 15 bp, Homo sapiens
gatttgcctatcttg

SEQ ID NO: 634251 - DNA, 15 bp, Homo sapiens
atttgcctatcttgg

SEQ ID NO: 634252 - DNA, 15 bp, Homo sapiens
tttgcctatcttgga

SEQ ID NO: 634253 - DNA, 15 bp, Homo sapiens
ttgcctatcttggac

SEQ ID NO: 634254 - DNA, 15 bp, Homo sapiens
tgcctatcttggaca

SEQ ID NO: 634255 - DNA, 15 bp, Homo sapiens
gcctatcttggacat

SEQ ID NO: 634256 - DNA, 15 bp, Homo sapiens
cctatcttggacatt

SEQ ID NO: 634257 - DNA, 15 bp, Homo sapiens
ctatcttggacattt

SEQ ID NO: 634258 - DNA, 15 bp, Homo sapiens
tatcttggacatttc

SEQ ID NO: 634259 - DNA, 15 bp, Homo sapiens
atcttggacatttca

SEQ ID NO: 634260 - DNA, 15 bp, Homo sapiens
tcttggacatttcat

SEQ ID NO: 634261 - DNA, 15 bp, Homo sapiens
cttggacatttcatg

SEQ ID NO: 634262 - DNA, 15 bp, Homo sapiens
ttggacatttcatgt

SEQ ID NO: 634263 - DNA, 15 bp, Homo sapiens
tggacatttcatgta

SEQ ID NO: 634264 - DNA, 15 bp, Homo sapiens
ggacatttcatgtaa

SEQ ID NO: 634265 - DNA, 15 bp, Homo sapiens
gacatttcatgtaaa

SEQ ID NO: 634266 - DNA, 15 bp, Homo sapiens
acatttcatgtaaat

SEQ ID NO: 634267 - DNA, 15 bp, Homo sapiens
catttcatgtaaatg

SEQ ID NO: 634268 - DNA, 15 bp, Homo sapiens
atttcatgtaaatgg

SEQ ID NO: 634269 - DNA, 15 bp, Homo sapiens
tttcatgtaaatgga

SEQ ID NO: 634270 - DNA, 15 bp, Homo sapiens
ttcatgtaaatggaa

SEQ ID NO: 634271 - DNA, 15 bp, Homo sapiens
tcatgtaaatggaat

SEQ ID NO: 634272 - DNA, 15 bp, Homo sapiens
catgtaaatggaatc

SEQ ID NO: 634273 - DNA, 15 bp, Homo sapiens
atgtaaatggaatca

SEQ ID NO: 634274 - DNA, 15 bp, Homo sapiens
tgtaaatggaatcat

SEQ ID NO: 634275 - DNA, 15 bp, Homo sapiens
gtaaatggaatcata

SEQ ID NO: 634276 - DNA, 15 bp, Homo sapiens
taaatggaatcatac

SEQ ID NO: 634277 - DNA, 15 bp, Homo sapiens
aaatggaatcataca

SEQ ID NO: 634278 - DNA, 15 bp, Homo sapiens
aatggaatcatacag

SEQ ID NO: 634279 - DNA, 15 bp, Homo sapiens
atggaatcatacagt

SEQ ID NO: 634280 - DNA, 15 bp, Homo sapiens
tggaatcatacagta

SEQ ID NO: 634281 - DNA, 15 bp, Homo sapiens
ggaatcatacagtat

SEQ ID NO: 634282 - DNA, 15 bp, Homo sapiens
gaatcatacagtatg

SEQ ID NO: 634283 - DNA, 15 bp, Homo sapiens
aatcatacagtatgt

SEQ ID NO: 634284 - DNA, 15 bp, Homo sapiens
atcatacagtatgtg

SEQ ID NO: 634285 - DNA, 15 bp, Homo sapiens
tcatacagtatgtgg

SEQ ID NO: 634286 - DNA, 15 bp, Homo sapiens
catacagtatgtggt

SEQ ID NO: 634287 - DNA, 15 bp, Homo sapiens
atacagtatgtggtc

SEQ ID NO: 634288 - DNA, 15 bp, Homo sapiens
tacagtatgtggtct

SEQ ID NO: 634289 - DNA, 15 bp, Homo sapiens
acagtatgtggtctt

SEQ ID NO: 634290 - DNA, 15 bp, Homo sapiens
cagtatgtggtcttt

SEQ ID NO: 634291 - DNA, 15 bp, Homo sapiens
agtatgtggtctttt

SEQ ID NO: 634292 - DNA, 15 bp, Homo sapiens
gtatgtggtcttttg

SEQ ID NO: 634293 - DNA, 15 bp, Homo sapiens
tatgtggtcttttga

SEQ ID NO: 634294 - DNA, 15 bp, Homo sapiens
atgtggtcttttgag

SEQ ID NO: 634295 - DNA, 15 bp, Homo sapiens
tgtggtcttttgaga

SEQ ID NO: 634296 - DNA, 15 bp, Homo sapiens
gtggtcttttgagac

SEQ ID NO: 634297 - DNA, 15 bp, Homo sapiens
tggtcttttgagacc

SEQ ID NO: 634298 - DNA, 15 bp, Homo sapiens
ggtcttttgagaccg

SEQ ID NO: 634299 - DNA, 15 bp, Homo sapiens
gtcttttgagaccgt

SEQ ID NO: 634300 - DNA, 15 bp, Homo sapiens
tcttttgagaccgtc

SEQ ID NO: 634301 - DNA, 15 bp, Homo sapiens
cttttgagaccgtct

SEQ ID NO: 634302 - DNA, 15 bp, Homo sapiens
ttttgagaccgtctt

SEQ ID NO: 634303 - DNA, 15 bp, Homo sapiens
tttgagaccgtcttc

SEQ ID NO: 634304 - DNA, 15 bp, Homo sapiens
ttgagaccgtcttct

SEQ ID NO: 634305 - DNA, 15 bp, Homo sapiens
tgagaccgtcttctt

SEQ ID NO: 634306 - DNA, 15 bp, Homo sapiens
gagaccgtcttcttt

SEQ ID NO: 634307 - DNA, 15 bp, Homo sapiens
agaccgtcttctttc

SEQ ID NO: 634308 - DNA, 15 bp, Homo sapiens
gaccgtcttctttca

SEQ ID NO: 634309 - DNA, 15 bp, Homo sapiens
accgtcttctttcac

SEQ ID NO: 634310 - DNA, 15 bp, Homo sapiens
ccgtcttctttcacg

SEQ ID NO: 634311 - DNA, 15 bp, Homo sapiens
cgtcttctttcacgt

SEQ ID NO: 634312 - DNA, 15 bp, Homo sapiens
gtcttctttcacgta

SEQ ID NO: 634313 - DNA, 15 bp, Homo sapiens
tcttctttcacgtag

SEQ ID NO: 634314 - DNA, 15 bp, Homo sapiens
cttctttcacgtagc

SEQ ID NO: 634315 - DNA, 15 bp, Homo sapiens
ttctttcacgtagca

SEQ ID NO: 634316 - DNA, 15 bp, Homo sapiens
tctttcacgtagcat

SEQ ID NO: 634317 - DNA, 15 bp, Homo sapiens
ctttcacgtagcatg

SEQ ID NO: 634318 - DNA, 15 bp, Homo sapiens
tttcacgtagcatga

SEQ ID NO: 634319 - DNA, 15 bp, Homo sapiens
ttcacgtagcatgat

SEQ ID NO: 634320 - DNA, 15 bp, Homo sapiens
tcacgtagcatgatt

SEQ ID NO: 634321 - DNA, 15 bp, Homo sapiens
cacgtagcatgattt

SEQ ID NO: 634322 - DNA, 15 bp, Homo sapiens
acgtagcatgatttt

SEQ ID NO: 634323 - DNA, 15 bp, Homo sapiens
cgtagcatgattttg

SEQ ID NO: 634324 - DNA, 15 bp, Homo sapiens
gtagcatgattttga

SEQ ID NO: 634325 - DNA, 15 bp, Homo sapiens
tagcatgattttgag

SEQ ID NO: 634326 - DNA, 15 bp, Homo sapiens
agcatgattttgagg

SEQ ID NO: 634327 - DNA, 15 bp, Homo sapiens
gcatgattttgaggt

SEQ ID NO: 634328 - DNA, 15 bp, Homo sapiens
catgattttgaggtt

SEQ ID NO: 634329 - DNA, 15 bp, Homo sapiens
atgattttgaggttc

SEQ ID NO: 634330 - DNA, 15 bp, Homo sapiens
tgattttgaggttca

SEQ ID NO: 634331 - DNA, 15 bp, Homo sapiens
gattttgaggttcat

SEQ ID NO: 634332 - DNA, 15 bp, Homo sapiens
attttgaggttcatc

SEQ ID NO: 634333 - DNA, 15 bp, Homo sapiens
ttttgaggttcatct

SEQ ID NO: 634334 - DNA, 15 bp, Homo sapiens
tttgaggttcatctg

SEQ ID NO: 634335 - DNA, 15 bp, Homo sapiens
ttgaggttcatctgt

SEQ ID NO: 634336 - DNA, 15 bp, Homo sapiens
tgaggttcatctgtg

SEQ ID NO: 634337 - DNA, 15 bp, Homo sapiens
gaggttcatctgtgt

SEQ ID NO: 634338 - DNA, 15 bp, Homo sapiens
aggttcatctgtgta

SEQ ID NO: 634339 - DNA, 15 bp, Homo sapiens
ggttcatctgtgtag

SEQ ID NO: 634340 - DNA, 15 bp, Homo sapiens
gttcatctgtgtagc

SEQ ID NO: 634341 - DNA, 15 bp, Homo sapiens
ttcatctgtgtagca

SEQ ID NO: 634342 - DNA, 15 bp, Homo sapiens
tcatctgtgtagcat

SEQ ID NO: 634343 - DNA, 15 bp, Homo sapiens
catctgtgtagcatg

SEQ ID NO: 634344 - DNA, 15 bp, Homo sapiens
atctgtgtagcatgt

SEQ ID NO: 634345 - DNA, 15 bp, Homo sapiens
tctgtgtagcatgta

SEQ ID NO: 634346 - DNA, 15 bp, Homo sapiens
ctgtgtagcatgtat

SEQ ID NO: 634347 - DNA, 15 bp, Homo sapiens
tgtgtagcatgtatc

SEQ ID NO: 634348 - DNA, 15 bp, Homo sapiens
gtgtagcatgtatca

SEQ ID NO: 634349 - DNA, 15 bp, Homo sapiens
tgtagcatgtatcag

SEQ ID NO: 634350 - DNA, 15 bp, Homo sapiens
gtagcatgtatcagt

SEQ ID NO: 634351 - DNA, 15 bp, Homo sapiens
tagcatgtatcagta

SEQ ID NO: 634352 - DNA, 15 bp, Homo sapiens
agcatgtatcagtac

SEQ ID NO: 634353 - DNA, 15 bp, Homo sapiens
gcatgtatcagtact

SEQ ID NO: 634354 - DNA, 15 bp, Homo sapiens
catgtatcagtactt

SEQ ID NO: 634355 - DNA, 15 bp, Homo sapiens
atgtatcagtacttc

SEQ ID NO: 634356 - DNA, 15 bp, Homo sapiens
tgtatcagtacttca

SEQ ID NO: 634357 - DNA, 15 bp, Homo sapiens
gtatcagtacttcaa

SEQ ID NO: 634358 - DNA, 15 bp, Homo sapiens
tatcagtacttcaat

SEQ ID NO: 634359 - DNA, 15 bp, Homo sapiens
atcagtacttcaatc

SEQ ID NO: 634360 - DNA, 15 bp, Homo sapiens
tcagtacttcaatct

SEQ ID NO: 634361 - DNA, 15 bp, Homo sapiens
cagtacttcaatcta

SEQ ID NO: 634362 - DNA, 15 bp, Homo sapiens
agtacttcaatctac

SEQ ID NO: 634363 - DNA, 15 bp, Homo sapiens
gtacttcaatctaca

SEQ ID NO: 634364 - DNA, 15 bp, Homo sapiens
tacttcaatctacat

SEQ ID NO: 634365 - DNA, 15 bp, Homo sapiens
acttcaatctacata

SEQ ID NO: 634366 - DNA, 15 bp, Homo sapiens
cttcaatctacatac

SEQ ID NO: 634367 - DNA, 15 bp, Homo sapiens
ttcaatctacataca

SEQ ID NO: 634368 - DNA, 15 bp, Homo sapiens
tcaatctacatacat

SEQ ID NO: 634369 - DNA, 15 bp, Homo sapiens
caatctacatacatt

SEQ ID NO: 634370 - DNA, 15 bp, Homo sapiens
aatctacatacattt

SEQ ID NO: 634371 - DNA, 15 bp, Homo sapiens
atctacatacattta

SEQ ID NO: 634372 - DNA, 15 bp, Homo sapiens
tctacatacatttac

SEQ ID NO: 634373 - DNA, 15 bp, Homo sapiens
ctacatacatttacc

SEQ ID NO: 634374 - DNA, 15 bp, Homo sapiens
tacatacatttaccg

SEQ ID NO: 634375 - DNA, 15 bp, Homo sapiens
acatacatttaccgt

SEQ ID NO: 634376 - DNA, 15 bp, Homo sapiens
catacatttaccgta

SEQ ID NO: 634377 - DNA, 15 bp, Homo sapiens
atacatttaccgtaa

SEQ ID NO: 634378 - DNA, 15 bp, Homo sapiens
tacatttaccgtaat

SEQ ID NO: 634379 - DNA, 15 bp, Homo sapiens
acatttaccgtaatt

SEQ ID NO: 634380 - DNA, 15 bp, Homo sapiens
catttaccgtaatta

SEQ ID NO: 634381 - DNA, 15 bp, Homo sapiens
atttaccgtaattac

SEQ ID NO: 634382 - DNA, 15 bp, Homo sapiens
tttaccgtaattact

SEQ ID NO: 634383 - DNA, 15 bp, Homo sapiens
ttaccgtaattactg

SEQ ID NO: 634384 - DNA, 15 bp, Homo sapiens
taccgtaattactga

SEQ ID NO: 634385 - DNA, 15 bp, Homo sapiens
accgtaattactgaa

SEQ ID NO: 634386 - DNA, 15 bp, Homo sapiens
ccgtaattactgaac

SEQ ID NO: 634387 - DNA, 15 bp, Homo sapiens
cgtaattactgaacc

SEQ ID NO: 634388 - DNA, 15 bp, Homo sapiens
gtaattactgaaccg

SEQ ID NO: 634389 - DNA, 15 bp, Homo sapiens
taattactgaaccgt

SEQ ID NO: 634390 - DNA, 15 bp, Homo sapiens
aattactgaaccgtt

SEQ ID NO: 634391 - DNA, 15 bp, Homo sapiens
attactgaaccgttt

SEQ ID NO: 634392 - DNA, 15 bp, Homo sapiens
ttactgaaccgtttg

SEQ ID NO: 634393 - DNA, 15 bp, Homo sapiens
tactgaaccgtttgg

SEQ ID NO: 634394 - DNA, 15 bp, Homo sapiens
actgaaccgtttgga

SEQ ID NO: 634395 - DNA, 15 bp, Homo sapiens
ctgaaccgtttggac

SEQ ID NO: 634396 - DNA, 15 bp, Homo sapiens
tgaaccgtttggact

SEQ ID NO: 634397 - DNA, 15 bp, Homo sapiens
gaaccgtttggacta

SEQ ID NO: 634398 - DNA, 15 bp, Homo sapiens
aaccgtttggactat

SEQ ID NO: 634399 - DNA, 15 bp, Homo sapiens
accgtttggactatt

SEQ ID NO: 634400 - DNA, 15 bp, Homo sapiens
ccgtttggactattt

SEQ ID NO: 634401 - DNA, 15 bp, Homo sapiens
cgtttggactatttt

SEQ ID NO: 634402 - DNA, 15 bp, Homo sapiens
gtttggactattttc

SEQ ID NO: 634403 - DNA, 15 bp, Homo sapiens
tttggactattttca

SEQ ID NO: 634404 - DNA, 15 bp, Homo sapiens
ttggactattttcaa

SEQ ID NO: 634405 - DNA, 15 bp, Homo sapiens
tggactattttcaat

SEQ ID NO: 634406 - DNA, 15 bp, Homo sapiens
ggactattttcaata

SEQ ID NO: 634407 - DNA, 15 bp, Homo sapiens
gactattttcaataa

SEQ ID NO: 634408 - DNA, 15 bp, Homo sapiens
actattttcaataat

SEQ ID NO: 634409 - DNA, 15 bp, Homo sapiens
ctattttcaataata

SEQ ID NO: 634410 - DNA, 15 bp, Homo sapiens
tattttcaataatat

SEQ ID NO: 634411 - DNA, 15 bp, Homo sapiens
attttcaataatatt

SEQ ID NO: 634412 - DNA, 15 bp, Homo sapiens
ttttcaataatattc

SEQ ID NO: 634413 - DNA, 15 bp, Homo sapiens
tttcaataatattca

SEQ ID NO: 634414 - DNA, 15 bp, Homo sapiens
ttcaataatattcat

SEQ ID NO: 634415 - DNA, 15 bp, Homo sapiens
tcaataatattcatt

SEQ ID NO: 634416 - DNA, 15 bp, Homo sapiens
caataatattcattt

SEQ ID NO: 634417 - DNA, 15 bp, Homo sapiens
aataatattcattta

SEQ ID NO: 634418 - DNA, 15 bp, Homo sapiens
ataatattcatttat

SEQ ID NO: 634419 - DNA, 15 bp, Homo sapiens
taatattcatttatg

SEQ ID NO: 634420 - DNA, 15 bp, Homo sapiens
aatattcatttatgt

SEQ ID NO: 634421 - DNA, 15 bp, Homo sapiens
atattcatttatgtt

SEQ ID NO: 634422 - DNA, 15 bp, Homo sapiens
tattcatttatgttt

SEQ ID NO: 634423 - DNA, 15 bp, Homo sapiens
attcatttatgtttt

SEQ ID NO: 634424 - DNA, 15 bp, Homo sapiens
ttcatttatgttttc

SEQ ID NO: 634425 - DNA, 15 bp, Homo sapiens
tcatttatgttttct

SEQ ID NO: 634426 - DNA, 15 bp, Homo sapiens
catttatgttttctg

SEQ ID NO: 634427 - DNA, 15 bp, Homo sapiens
atttatgttttctgt

SEQ ID NO: 634428 - DNA, 15 bp, Homo sapiens
tttatgttttctgtt

SEQ ID NO: 634429 - DNA, 15 bp, Homo sapiens
ttatgttttctgttt

SEQ ID NO: 634430 - DNA, 15 bp, Homo sapiens
tatgttttctgtttg

SEQ ID NO: 634431 - DNA, 15 bp, Homo sapiens
atgttttctgtttgt

SEQ ID NO: 634432 - DNA, 15 bp, Homo sapiens
tgttttctgtttgtt

SEQ ID NO: 634433 - DNA, 15 bp, Homo sapiens
gttttctgtttgtta

SEQ ID NO: 634434 - DNA, 15 bp, Homo sapiens
ttttctgtttgttat

SEQ ID NO: 634435 - DNA, 15 bp, Homo sapiens
tttctgtttgttatg

SEQ ID NO: 634436 - DNA, 15 bp, Homo sapiens
ttctgtttgttatgc

SEQ ID NO: 634437 - DNA, 15 bp, Homo sapiens
tctgtttgttatgct

SEQ ID NO: 634438 - DNA, 15 bp, Homo sapiens
ctgtttgttatgctt

SEQ ID NO: 634439 - DNA, 15 bp, Homo sapiens
tgtttgttatgcttt

SEQ ID NO: 634440 - DNA, 15 bp, Homo sapiens
gtttgttatgctttt

SEQ ID NO: 634441 - DNA, 15 bp, Homo sapiens
tttgttatgcttttt

SEQ ID NO: 634442 - DNA, 15 bp, Homo sapiens
ttgttatgctttttt

SEQ ID NO: 634443 - DNA, 15 bp, Homo sapiens
tgttatgcttttttt

SEQ ID NO: 634444 - DNA, 15 bp, Homo sapiens
gttatgcttttttta

SEQ ID NO: 634445 - DNA, 15 bp, Homo sapiens
ttatgctttttttag

SEQ ID NO: 634446 - DNA, 15 bp, Homo sapiens
tatgctttttttagt

SEQ ID NO: 634447 - DNA, 15 bp, Homo sapiens
atgctttttttagtt

SEQ ID NO: 634448 - DNA, 15 bp, Homo sapiens
tgctttttttagttt

SEQ ID NO: 634449 - DNA, 15 bp, Homo sapiens
gctttttttagtttc

SEQ ID NO: 634450 - DNA, 15 bp, Homo sapiens
ctttttttagtttct

SEQ ID NO: 634451 - DNA, 15 bp, Homo sapiens
tttttttagtttctt

SEQ ID NO: 634452 - DNA, 15 bp, Homo sapiens
ttttttagtttcttt

SEQ ID NO: 634453 - DNA, 15 bp, Homo sapiens
tttttagtttcttta

SEQ ID NO: 634454 - DNA, 15 bp, Homo sapiens
ttttagtttctttag

SEQ ID NO: 634455 - DNA, 15 bp, Homo sapiens
tttagtttctttagt

SEQ ID NO: 634456 - DNA, 15 bp, Homo sapiens
ttagtttctttagtt

SEQ ID NO: 634457 - DNA, 15 bp, Homo sapiens
tagtttctttagttt

SEQ ID NO: 634458 - DNA, 15 bp, Homo sapiens
agtttctttagtttt

SEQ ID NO: 634459 - DNA, 15 bp, Homo sapiens
gtttctttagttttt

SEQ ID NO: 634460 - DNA, 15 bp, Homo sapiens
tttctttagtttttt

SEQ ID NO: 634461 - DNA, 15 bp, Homo sapiens
ttctttagttttttt

SEQ ID NO: 634462 - DNA, 15 bp, Homo sapiens
tctttagtttttttt

SEQ ID NO: 634463 - DNA, 15 bp, Homo sapiens
ctttagtttttttta

SEQ ID NO: 634464 - DNA, 15 bp, Homo sapiens
tttagttttttttaa

SEQ ID NO: 634465 - DNA, 15 bp, Homo sapiens
ttagttttttttaac

SEQ ID NO: 634466 - DNA, 15 bp, Homo sapiens
tagttttttttaact

SEQ ID NO: 634467 - DNA, 15 bp, Homo sapiens
agttttttttaactt

SEQ ID NO: 634468 - DNA, 15 bp, Homo sapiens
gttttttttaacttt

SEQ ID NO: 634469 - DNA, 15 bp, Homo sapiens
ttttttttaactttt

SEQ ID NO: 634470 - DNA, 15 bp, Homo sapiens
tttttttaacttttg

SEQ ID NO: 634471 - DNA, 15 bp, Homo sapiens
ttttttaacttttgt

SEQ ID NO: 634472 - DNA, 15 bp, Homo sapiens
tttttaacttttgtt

SEQ ID NO: 634473 - DNA, 15 bp, Homo sapiens
ttttaacttttgttg

SEQ ID NO: 634474 - DNA, 15 bp, Homo sapiens
tttaacttttgttgg

SEQ ID NO: 634475 - DNA, 15 bp, Homo sapiens
ttaacttttgttgga

SEQ ID NO: 634476 - DNA, 15 bp, Homo sapiens
taacttttgttggat

SEQ ID NO: 634477 - DNA, 15 bp, Homo sapiens
aacttttgttggatt

SEQ ID NO: 634478 - DNA, 15 bp, Homo sapiens
acttttgttggattg

SEQ ID NO: 634479 - DNA, 15 bp, Homo sapiens
cttttgttggattga

SEQ ID NO: 634480 - DNA, 15 bp, Homo sapiens
ttttgttggattgat

SEQ ID NO: 634481 - DNA, 15 bp, Homo sapiens
tttgttggattgatg

SEQ ID NO: 634482 - DNA, 15 bp, Homo sapiens
ttgttggattgatga

SEQ ID NO: 634483 - DNA, 15 bp, Homo sapiens
tgttggattgatgac

SEQ ID NO: 634484 - DNA, 15 bp, Homo sapiens
gttggattgatgaca

SEQ ID NO: 634485 - DNA, 15 bp, Homo sapiens
ttggattgatgacat

SEQ ID NO: 634486 - DNA, 15 bp, Homo sapiens
tggattgatgacatt

SEQ ID NO: 634487 - DNA, 15 bp, Homo sapiens
ggattgatgacattt

SEQ ID NO: 634488 - DNA, 15 bp, Homo sapiens
gattgatgacatttt

SEQ ID NO: 634489 - DNA, 15 bp, Homo sapiens
attgatgacattttc

SEQ ID NO: 634490 - DNA, 15 bp, Homo sapiens
ttgatgacattttct

SEQ ID NO: 634491 - DNA, 15 bp, Homo sapiens
tgatgacattttcta

SEQ ID NO: 634492 - DNA, 15 bp, Homo sapiens
gatgacattttctac

SEQ ID NO: 634493 - DNA, 15 bp, Homo sapiens
atgacattttctaca

SEQ ID NO: 634494 - DNA, 15 bp, Homo sapiens
tgacattttctacat

SEQ ID NO: 634495 - DNA, 15 bp, Homo sapiens
gacattttctacata

SEQ ID NO: 634496 - DNA, 15 bp, Homo sapiens
acattttctacatac

SEQ ID NO: 634497 - DNA, 15 bp, Homo sapiens
cattttctacatact

SEQ ID NO: 634498 - DNA, 15 bp, Homo sapiens
attttctacatactt

SEQ ID NO: 634499 - DNA, 15 bp, Homo sapiens
ttttctacatactta

SEQ ID NO: 634500 - DNA, 15 bp, Homo sapiens
tttctacatacttag

SEQ ID NO: 634501 - DNA, 15 bp, Homo sapiens
ttctacatacttagt

SEQ ID NO: 634502 - DNA, 15 bp, Homo sapiens
tctacatacttagtt

SEQ ID NO: 634503 - DNA, 15 bp, Homo sapiens
ctacatacttagttt

SEQ ID NO: 634504 - DNA, 15 bp, Homo sapiens
tacatacttagtttt

SEQ ID NO: 634505 - DNA, 15 bp, Homo sapiens
acatacttagttttt

SEQ ID NO: 634506 - DNA, 15 bp, Homo sapiens
catacttagttttta

SEQ ID NO: 634507 - DNA, 15 bp, Homo sapiens
atacttagtttttaa

SEQ ID NO: 634508 - DNA, 15 bp, Homo sapiens
tacttagtttttaat

SEQ ID NO: 634509 - DNA, 15 bp, Homo sapiens
acttagtttttaatc

SEQ ID NO: 634510 - DNA, 15 bp, Homo sapiens
cttagtttttaatcc

SEQ ID NO: 634511 - DNA, 15 bp, Homo sapiens
ttagtttttaatcct

SEQ ID NO: 634512 - DNA, 15 bp, Homo sapiens
tagtttttaatcctt

SEQ ID NO: 634513 - DNA, 15 bp, Homo sapiens
agtttttaatccttt

SEQ ID NO: 634514 - DNA, 15 bp, Homo sapiens
gtttttaatcctttg

SEQ ID NO: 634515 - DNA, 15 bp, Homo sapiens
tttttaatcctttgc

SEQ ID NO: 634516 - DNA, 15 bp, Homo sapiens
ttttaatcctttgct

SEQ ID NO: 634517 - DNA, 15 bp, Homo sapiens
tttaatcctttgctt

SEQ ID NO: 634518 - DNA, 15 bp, Homo sapiens
ttaatcctttgctta

SEQ ID NO: 634519 - DNA, 15 bp, Homo sapiens
taatcctttgcttat

SEQ ID NO: 634520 - DNA, 15 bp, Homo sapiens
aatcctttgcttatt

SEQ ID NO: 634521 - DNA, 15 bp, Homo sapiens
atcctttgcttattt

SEQ ID NO: 634522 - DNA, 15 bp, Homo sapiens
tcctttgcttattta

SEQ ID NO: 634523 - DNA, 15 bp, Homo sapiens
cctttgcttatttag

SEQ ID NO: 634524 - DNA, 15 bp, Homo sapiens
ctttgcttatttaga

SEQ ID NO: 634525 - DNA, 15 bp, Homo sapiens
tttgcttatttagaa

SEQ ID NO: 634526 - DNA, 15 bp, Homo sapiens
ttgcttatttagaaa

SEQ ID NO: 634527 - DNA, 15 bp, Homo sapiens
tgcttatttagaaac

SEQ ID NO: 634528 - DNA, 15 bp, Homo sapiens
gcttatttagaaact

SEQ ID NO: 634529 - DNA, 15 bp, Homo sapiens
cttatttagaaacta

SEQ ID NO: 634530 - DNA, 15 bp, Homo sapiens
ttatttagaaactat

SEQ ID NO: 634531 - DNA, 15 bp, Homo sapiens
tatttagaaactata

SEQ ID NO: 634532 - DNA, 15 bp, Homo sapiens
atttagaaactatag

SEQ ID NO: 634533 - DNA, 15 bp, Homo sapiens
tttagaaactataga

SEQ ID NO: 634534 - DNA, 15 bp, Homo sapiens
ttagaaactatagat

SEQ ID NO: 634535 - DNA, 15 bp, Homo sapiens
tagaaactatagatt

SEQ ID NO: 634536 - DNA, 15 bp, Homo sapiens
agaaactatagattt

SEQ ID NO: 634537 - DNA, 15 bp, Homo sapiens
gaaactatagatttt

SEQ ID NO: 634538 - DNA, 15 bp, Homo sapiens
aaactatagatttta

SEQ ID NO: 634539 - DNA, 15 bp, Homo sapiens
aactatagattttac

SEQ ID NO: 634540 - DNA, 15 bp, Homo sapiens
actatagattttact

SEQ ID NO: 634541 - DNA, 15 bp, Homo sapiens
ctatagattttactg

SEQ ID NO: 634542 - DNA, 15 bp, Homo sapiens
tatagattttactgg

SEQ ID NO: 634543 - DNA, 15 bp, Homo sapiens
atagattttactggt

SEQ ID NO: 634544 - DNA, 15 bp, Homo sapiens
tagattttactggta

SEQ ID NO: 634545 - DNA, 15 bp, Homo sapiens
agattttactggtac

SEQ ID NO: 634546 - DNA, 15 bp, Homo sapiens
gattttactggtact

SEQ ID NO: 634547 - DNA, 15 bp, Homo sapiens
attttactggtactt

SEQ ID NO: 634548 - DNA, 15 bp, Homo sapiens
ttttactggtacttt

SEQ ID NO: 634549 - DNA, 15 bp, Homo sapiens
tttactggtactttt

SEQ ID NO: 634550 - DNA, 15 bp, Homo sapiens
ttactggtacttttt

SEQ ID NO: 634551 - DNA, 15 bp, Homo sapiens
tactggtactttttc

SEQ ID NO: 634552 - DNA, 15 bp, Homo sapiens
actggtactttttca

SEQ ID NO: 634553 - DNA, 15 bp, Homo sapiens
ctggtactttttcat

SEQ ID NO: 634554 - DNA, 15 bp, Homo sapiens
tggtactttttcatt

SEQ ID NO: 634555 - DNA, 15 bp, Homo sapiens
ggtactttttcattg

SEQ ID NO: 634556 - DNA, 15 bp, Homo sapiens
gtactttttcattgc

SEQ ID NO: 634557 - DNA, 15 bp, Homo sapiens
tactttttcattgct

SEQ ID NO: 634558 - DNA, 15 bp, Homo sapiens
actttttcattgctt

SEQ ID NO: 634559 - DNA, 15 bp, Homo sapiens
ctttttcattgcttt

SEQ ID NO: 634560 - DNA, 15 bp, Homo sapiens
tttttcattgctttt

SEQ ID NO: 634561 - DNA, 15 bp, Homo sapiens
ttttcattgcttttt

SEQ ID NO: 634562 - DNA, 15 bp, Homo sapiens
tttcattgctttttc

SEQ ID NO: 634563 - DNA, 15 bp, Homo sapiens
ttcattgctttttct

SEQ ID NO: 634564 - DNA, 15 bp, Homo sapiens
tcattgctttttctt

SEQ ID NO: 634565 - DNA, 15 bp, Homo sapiens
cattgctttttctta

SEQ ID NO: 634566 - DNA, 15 bp, Homo sapiens
attgctttttcttaa

SEQ ID NO: 634567 - DNA, 15 bp, Homo sapiens
ttgctttttcttaaa

SEQ ID NO: 634568 - DNA, 15 bp, Homo sapiens
tgctttttcttaaaa

SEQ ID NO: 634569 - DNA, 15 bp, Homo sapiens
gctttttcttaaaat

SEQ ID NO: 634570 - DNA, 15 bp, Homo sapiens
ctttttcttaaaatt

SEQ ID NO: 634571 - DNA, 15 bp, Homo sapiens
tttttcttaaaattt

SEQ ID NO: 634572 - DNA, 15 bp, Homo sapiens
ttttcttaaaatttt

SEQ ID NO: 634573 - DNA, 15 bp, Homo sapiens
tttcttaaaattttc

SEQ ID NO: 634574 - DNA, 15 bp, Homo sapiens
ttcttaaaattttca

SEQ ID NO: 634575 - DNA, 15 bp, Homo sapiens
tcttaaaattttcag

SEQ ID NO: 634576 - DNA, 15 bp, Homo sapiens
cttaaaattttcaga

SEQ ID NO: 634577 - DNA, 15 bp, Homo sapiens
ttaaaattttcagat

SEQ ID NO: 634578 - DNA, 15 bp, Homo sapiens
taaaattttcagata

SEQ ID NO: 634579 - DNA, 15 bp, Homo sapiens
aaaattttcagatat

SEQ ID NO: 634580 - DNA, 15 bp, Homo sapiens
aaattttcagatatt

SEQ ID NO: 634581 - DNA, 15 bp, Homo sapiens
aattttcagatattg

SEQ ID NO: 634582 - DNA, 15 bp, Homo sapiens
attttcagatattgg

SEQ ID NO: 634583 - DNA, 15 bp, Homo sapiens
ttttcagatattggt

SEQ ID NO: 634584 - DNA, 15 bp, Homo sapiens
tttcagatattggtt

SEQ ID NO: 634585 - DNA, 15 bp, Homo sapiens
ttcagatattggttg

SEQ ID NO: 634586 - DNA, 15 bp, Homo sapiens
tcagatattggttga

SEQ ID NO: 634587 - DNA, 15 bp, Homo sapiens
cagatattggttgaa

SEQ ID NO: 634588 - DNA, 15 bp, Homo sapiens
agatattggttgaac

SEQ ID NO: 634589 - DNA, 15 bp, Homo sapiens
gatattggttgaact

SEQ ID NO: 634590 - DNA, 15 bp, Homo sapiens
atattggttgaactt

SEQ ID NO: 634591 - DNA, 15 bp, Homo sapiens
tattggttgaacttt

SEQ ID NO: 634592 - DNA, 15 bp, Homo sapiens
attggttgaactttg

SEQ ID NO: 634593 - DNA, 15 bp, Homo sapiens
ttggttgaactttgt

SEQ ID NO: 634594 - DNA, 15 bp, Homo sapiens
tggttgaactttgtt

SEQ ID NO: 634595 - DNA, 15 bp, Homo sapiens
ggttgaactttgttc

SEQ ID NO: 634596 - DNA, 15 bp, Homo sapiens
gttgaactttgttca

SEQ ID NO: 634597 - DNA, 15 bp, Homo sapiens
ttgaactttgttcag

SEQ ID NO: 634598 - DNA, 15 bp, Homo sapiens
tgaactttgttcaga

SEQ ID NO: 634599 - DNA, 15 bp, Homo sapiens
gaactttgttcagat

SEQ ID NO: 634600 - DNA, 15 bp, Homo sapiens
aactttgttcagata

SEQ ID NO: 634601 - DNA, 15 bp, Homo sapiens
actttgttcagatat

SEQ ID NO: 634602 - DNA, 15 bp, Homo sapiens
ctttgttcagatatt

SEQ ID NO: 634603 - DNA, 15 bp, Homo sapiens
tttgttcagatatta

SEQ ID NO: 634604 - DNA, 15 bp, Homo sapiens
ttgttcagatattag

SEQ ID NO: 634605 - DNA, 15 bp, Homo sapiens
tgttcagatattagt

SEQ ID NO: 634606 - DNA, 15 bp, Homo sapiens
gttcagatattagtt

SEQ ID NO: 634607 - DNA, 15 bp, Homo sapiens
ttcagatattagttg

SEQ ID NO: 634608 - DNA, 15 bp, Homo sapiens
tcagatattagttga

SEQ ID NO: 634609 - DNA, 15 bp, Homo sapiens
cagatattagttgaa

SEQ ID NO: 634610 - DNA, 15 bp, Homo sapiens
agatattagttgaac

SEQ ID NO: 634611 - DNA, 15 bp, Homo sapiens
gatattagttgaact

SEQ ID NO: 634612 - DNA, 15 bp, Homo sapiens
atattagttgaactt

SEQ ID NO: 634613 - DNA, 15 bp, Homo sapiens
tattagttgaacttt

SEQ ID NO: 634614 - DNA, 15 bp, Homo sapiens
attagttgaactttg

SEQ ID NO: 634615 - DNA, 15 bp, Homo sapiens
ttagttgaactttgt

SEQ ID NO: 634616 - DNA, 15 bp, Homo sapiens
tagttgaactttgta

SEQ ID NO: 634617 - DNA, 15 bp, Homo sapiens
agttgaactttgtaa

SEQ ID NO: 634618 - DNA, 15 bp, Homo sapiens
gttgaactttgtaat

SEQ ID NO: 634619 - DNA, 15 bp, Homo sapiens
ttgaactttgtaatt

SEQ ID NO: 634620 - DNA, 15 bp, Homo sapiens
tgaactttgtaatta

SEQ ID NO: 634621 - DNA, 15 bp, Homo sapiens
gaactttgtaattaa

SEQ ID NO: 634622 - DNA, 15 bp, Homo sapiens
aactttgtaattaaa

SEQ ID NO: 634623 - DNA, 15 bp, Homo sapiens
actttgtaattaaaa

SEQ ID NO: 634624 - DNA, 15 bp, Homo sapiens
ctttgtaattaaaaa

SEQ ID NO: 634625 - DNA, 15 bp, Homo sapiens
tttgtaattaaaaaa

SEQ ID NO: 634626 - DNA, 15 bp, Homo sapiens
ttgtaattaaaaaat

SEQ ID NO: 634627 - DNA, 15 bp, Homo sapiens
tgtaattaaaaaatg

SEQ ID NO: 634628 - DNA, 15 bp, Homo sapiens
gtaattaaaaaatgg

SEQ ID NO: 634629 - DNA, 15 bp, Homo sapiens
taattaaaaaatggt

SEQ ID NO: 634630 - DNA, 15 bp, Homo sapiens
aattaaaaaatggtt

SEQ ID NO: 634631 - DNA, 15 bp, Homo sapiens
attaaaaaatggtta

SEQ ID NO: 634632 - DNA, 15 bp, Homo sapiens
ttaaaaaatggttaa

SEQ ID NO: 634633 - DNA, 15 bp, Homo sapiens
taaaaaatggttaaa

SEQ ID NO: 634634 - DNA, 15 bp, Homo sapiens
aaaaaatggttaaat

SEQ ID NO: 634635 - DNA, 15 bp, Homo sapiens
aaaaatggttaaata

SEQ ID NO: 634636 - DNA, 15 bp, Homo sapiens
aaaatggttaaatat

SEQ ID NO: 634637 - DNA, 15 bp, Homo sapiens
aaatggttaaatatt

SEQ ID NO: 634638 - DNA, 15 bp, Homo sapiens
aatggttaaatattg

SEQ ID NO: 634639 - DNA, 15 bp, Homo sapiens
atggttaaatattgg

SEQ ID NO: 634640 - DNA, 15 bp, Homo sapiens
tggttaaatattggc

SEQ ID NO: 634641 - DNA, 15 bp, Homo sapiens
ggttaaatattggca

SEQ ID NO: 634642 - DNA, 15 bp, Homo sapiens
gttaaatattggcaa

SEQ ID NO: 634643 - DNA, 15 bp, Homo sapiens
ttaaatattggcaat

SEQ ID NO: 634644 - DNA, 15 bp, Homo sapiens
taaatattggcaatt

SEQ ID NO: 634645 - DNA, 15 bp, Homo sapiens
aaatattggcaattt

SEQ ID NO: 634646 - DNA, 15 bp, Homo sapiens
aatattggcaatttc

SEQ ID NO: 634647 - DNA, 15 bp, Homo sapiens
atattggcaatttcc

SEQ ID NO: 634648 - DNA, 15 bp, Homo sapiens
tattggcaatttcct

SEQ ID NO: 634649 - DNA, 15 bp, Homo sapiens
attggcaatttcctt

SEQ ID NO: 634650 - DNA, 15 bp, Homo sapiens
ttggcaatttccttt

SEQ ID NO: 634651 - DNA, 15 bp, Homo sapiens
tggcaatttcctttg

SEQ ID NO: 634652 - DNA, 15 bp, Homo sapiens
ggcaatttcctttgg

SEQ ID NO: 634653 - DNA, 15 bp, Homo sapiens
gcaatttcctttggt

SEQ ID NO: 634654 - DNA, 15 bp, Homo sapiens
caatttcctttggtt

SEQ ID NO: 634655 - DNA, 15 bp, Homo sapiens
aatttcctttggttt

SEQ ID NO: 634656 - DNA, 15 bp, Homo sapiens
atttcctttggttta

SEQ ID NO: 634657 - DNA, 15 bp, Homo sapiens
tttcctttggtttaa

SEQ ID NO: 634658 - DNA, 15 bp, Homo sapiens
ttcctttggtttaat

SEQ ID NO: 634659 - DNA, 15 bp, Homo sapiens
tcctttggtttaatc

SEQ ID NO: 634660 - DNA, 15 bp, Homo sapiens
cctttggtttaatca

SEQ ID NO: 634661 - DNA, 15 bp, Homo sapiens
ctttggtttaatcaa

SEQ ID NO: 634662 - DNA, 15 bp, Homo sapiens
tttggtttaatcaaa

SEQ ID NO: 634663 - DNA, 15 bp, Homo sapiens
ttggtttaatcaaac

SEQ ID NO: 634664 - DNA, 15 bp, Homo sapiens
tggtttaatcaaaca

SEQ ID NO: 634665 - DNA, 15 bp, Homo sapiens
ggtttaatcaaacat

SEQ ID NO: 634666 - DNA, 15 bp, Homo sapiens
gtttaatcaaacata

SEQ ID NO: 634667 - DNA, 15 bp, Homo sapiens
tttaatcaaacatat

SEQ ID NO: 634668 - DNA, 15 bp, Homo sapiens
ttaatcaaacatata

SEQ ID NO: 634669 - DNA, 15 bp, Homo sapiens
taatcaaacatatat

SEQ ID NO: 634670 - DNA, 15 bp, Homo sapiens
aatcaaacatatatt

SEQ ID NO: 634671 - DNA, 15 bp, Homo sapiens
atcaaacatatattt

SEQ ID NO: 634672 - DNA, 15 bp, Homo sapiens
tcaaacatatattta

SEQ ID NO: 634673 - DNA, 15 bp, Homo sapiens
caaacatatatttaa

SEQ ID NO: 634674 - DNA, 15 bp, Homo sapiens
aaacatatatttaat

SEQ ID NO: 634675 - DNA, 15 bp, Homo sapiens
aacatatatttaatt

SEQ ID NO: 634676 - DNA, 15 bp, Homo sapiens
acatatatttaatta

SEQ ID NO: 634677 - DNA, 15 bp, Homo sapiens
catatatttaattat

SEQ ID NO: 634678 - DNA, 15 bp, Homo sapiens
atatatttaattata

SEQ ID NO: 634679 - DNA, 15 bp, Homo sapiens
tatatttaattatag

SEQ ID NO: 634680 - DNA, 15 bp, Homo sapiens
atatttaattatagt

SEQ ID NO: 634681 - DNA, 15 bp, Homo sapiens
tatttaattatagtt

SEQ ID NO: 634682 - DNA, 15 bp, Homo sapiens
atttaattatagttg

SEQ ID NO: 634683 - DNA, 15 bp, Homo sapiens
tttaattatagttgt

SEQ ID NO: 634684 - DNA, 15 bp, Homo sapiens
ttaattatagttgta

SEQ ID NO: 634685 - DNA, 15 bp, Homo sapiens
taattatagttgtat

SEQ ID NO: 634686 - DNA, 15 bp, Homo sapiens
aattatagttgtata

SEQ ID NO: 634687 - DNA, 15 bp, Homo sapiens
attatagttgtataa

SEQ ID NO: 634688 - DNA, 15 bp, Homo sapiens
ttatagttgtataaa

SEQ ID NO: 634689 - DNA, 15 bp, Homo sapiens
tatagttgtataaat

SEQ ID NO: 634690 - DNA, 15 bp, Homo sapiens
atagttgtataaata

SEQ ID NO: 634691 - DNA, 15 bp, Homo sapiens
tagttgtataaatat

SEQ ID NO: 634692 - DNA, 15 bp, Homo sapiens
agttgtataaatatg

SEQ ID NO: 634693 - DNA, 15 bp, Homo sapiens
gttgtataaatatgt

SEQ ID NO: 634694 - DNA, 15 bp, Homo sapiens
ttgtataaatatgta

SEQ ID NO: 634695 - DNA, 15 bp, Homo sapiens
tgtataaatatgtat

SEQ ID NO: 634696 - DNA, 15 bp, Homo sapiens
gtataaatatgtatt

SEQ ID NO: 634697 - DNA, 15 bp, Homo sapiens
tataaatatgtattt

SEQ ID NO: 634698 - DNA, 15 bp, Homo sapiens
ataaatatgtattta

SEQ ID NO: 634699 - DNA, 15 bp, Homo sapiens
taaatatgtatttaa

SEQ ID NO: 634700 - DNA, 15 bp, Homo sapiens
aaatatgtatttaat

SEQ ID NO: 634701 - DNA, 15 bp, Homo sapiens
aatatgtatttaatt

SEQ ID NO: 634702 - DNA, 15 bp, Homo sapiens
atatgtatttaatta

SEQ ID NO: 634703 - DNA, 15 bp, Homo sapiens
tatgtatttaattat

SEQ ID NO: 634704 - DNA, 15 bp, Homo sapiens
atgtatttaattata

SEQ ID NO: 634705 - DNA, 15 bp, Homo sapiens
tgtatttaattataa

SEQ ID NO: 634706 - DNA, 15 bp, Homo sapiens
gtatttaattataat

SEQ ID NO: 634707 - DNA, 15 bp, Homo sapiens
tatttaattataatt

SEQ ID NO: 634708 - DNA, 15 bp, Homo sapiens
atttaattataatta

SEQ ID NO: 634709 - DNA, 15 bp, Homo sapiens
tttaattataattat

SEQ ID NO: 634710 - DNA, 15 bp, Homo sapiens
ttaattataattata

SEQ ID NO: 634711 - DNA, 15 bp, Homo sapiens
taattataattataa

SEQ ID NO: 634712 - DNA, 15 bp, Homo sapiens
aattataattataaa

SEQ ID NO: 634713 - DNA, 15 bp, Homo sapiens
attataattataaaa

SEQ ID NO: 634714 - DNA, 15 bp, Homo sapiens
ttataattataaaac

SEQ ID NO: 634715 - DNA, 15 bp, Homo sapiens
tataattataaaaca

SEQ ID NO: 634716 - DNA, 15 bp, Homo sapiens
ataattataaaacaa

SEQ ID NO: 634717 - DNA, 15 bp, Homo sapiens
taattataaaacaat

SEQ ID NO: 634718 - DNA, 15 bp, Homo sapiens
aattataaaacaatg

SEQ ID NO: 634719 - DNA, 15 bp, Homo sapiens
attataaaacaatgt

SEQ ID NO: 634720 - DNA, 15 bp, Homo sapiens
ttataaaacaatgtc

SEQ ID NO: 634721 - DNA, 15 bp, Homo sapiens
tataaaacaatgtcc

SEQ ID NO: 634722 - DNA, 15 bp, Homo sapiens
ataaaacaatgtcct

SEQ ID NO: 634723 - DNA, 15 bp, Homo sapiens
taaaacaatgtcctc

SEQ ID NO: 634724 - DNA, 15 bp, Homo sapiens
aaaacaatgtcctca

SEQ ID NO: 634725 - DNA, 15 bp, Homo sapiens
aaacaatgtcctcag

SEQ ID NO: 634726 - DNA, 15 bp, Homo sapiens
aacaatgtcctcaga

SEQ ID NO: 634727 - DNA, 15 bp, Homo sapiens
acaatgtcctcagat

SEQ ID NO: 634728 - DNA, 15 bp, Homo sapiens
caatgtcctcagatt

SEQ ID NO: 634729 - DNA, 15 bp, Homo sapiens
aatgtcctcagattg

SEQ ID NO: 634730 - DNA, 15 bp, Homo sapiens
atgtcctcagattgt

SEQ ID NO: 634731 - DNA, 15 bp, Homo sapiens
tgtcctcagattgtc

SEQ ID NO: 634732 - DNA, 15 bp, Homo sapiens
gtcctcagattgtca

SEQ ID NO: 634733 - DNA, 15 bp, Homo sapiens
tcctcagattgtcat

SEQ ID NO: 634734 - DNA, 15 bp, Homo sapiens
cctcagattgtcata

SEQ ID NO: 634735 - DNA, 15 bp, Homo sapiens
ctcagattgtcataa

SEQ ID NO: 634736 - DNA, 15 bp, Homo sapiens
tcagattgtcataac

SEQ ID NO: 634737 - DNA, 15 bp, Homo sapiens
cagattgtcataaca

SEQ ID NO: 634738 - DNA, 15 bp, Homo sapiens
agattgtcataacaa

SEQ ID NO: 634739 - DNA, 15 bp, Homo sapiens
gattgtcataacaat

SEQ ID NO: 634740 - DNA, 15 bp, Homo sapiens
attgtcataacaatg

SEQ ID NO: 634741 - DNA, 15 bp, Homo sapiens
ttgtcataacaatga

SEQ ID NO: 634742 - DNA, 15 bp, Homo sapiens
tgtcataacaatgaa

SEQ ID NO: 634743 - DNA, 15 bp, Homo sapiens
gtcataacaatgaac

SEQ ID NO: 634744 - DNA, 15 bp, Homo sapiens
tcataacaatgaact

SEQ ID NO: 634745 - DNA, 15 bp, Homo sapiens
cataacaatgaactt

SEQ ID NO: 634746 - DNA, 15 bp, Homo sapiens
ataacaatgaactta

SEQ ID NO: 634747 - DNA, 15 bp, Homo sapiens
taacaatgaacttaa

SEQ ID NO: 634748 - DNA, 15 bp, Homo sapiens
aacaatgaacttaac

SEQ ID NO: 634749 - DNA, 15 bp, Homo sapiens
acaatgaacttaaca

SEQ ID NO: 634750 - DNA, 15 bp, Homo sapiens
caatgaacttaacat

SEQ ID NO: 634751 - DNA, 15 bp, Homo sapiens
aatgaacttaacata

SEQ ID NO: 634752 - DNA, 15 bp, Homo sapiens
atgaacttaacatac

SEQ ID NO: 634753 - DNA, 15 bp, Homo sapiens
tgaacttaacatact

SEQ ID NO: 634754 - DNA, 15 bp, Homo sapiens
gaacttaacatactt

SEQ ID NO: 634755 - DNA, 15 bp, Homo sapiens
aacttaacatacttt

SEQ ID NO: 634756 - DNA, 15 bp, Homo sapiens
acttaacatacttta

SEQ ID NO: 634757 - DNA, 15 bp, Homo sapiens
cttaacatactttat

SEQ ID NO: 634758 - DNA, 15 bp, Homo sapiens
ttaacatactttatc

SEQ ID NO: 634759 - DNA, 15 bp, Homo sapiens
taacatactttatct

SEQ ID NO: 634760 - DNA, 15 bp, Homo sapiens
aacatactttatctg

SEQ ID NO: 634761 - DNA, 15 bp, Homo sapiens
acatactttatctgc

SEQ ID NO: 634762 - DNA, 15 bp, Homo sapiens
catactttatctgca

SEQ ID NO: 634763 - DNA, 15 bp, Homo sapiens
atactttatctgcat

SEQ ID NO: 634764 - DNA, 15 bp, Homo sapiens
tactttatctgcata

SEQ ID NO: 634765 - DNA, 15 bp, Homo sapiens
actttatctgcatat

SEQ ID NO: 634766 - DNA, 15 bp, Homo sapiens
ctttatctgcatatc

SEQ ID NO: 634767 - DNA, 15 bp, Homo sapiens
tttatctgcatatcg

SEQ ID NO: 634768 - DNA, 15 bp, Homo sapiens
ttatctgcatatcga

SEQ ID NO: 634769 - DNA, 15 bp, Homo sapiens
tatctgcatatcgaa

SEQ ID NO: 634770 - DNA, 15 bp, Homo sapiens
atctgcatatcgaac

SEQ ID NO: 634771 - DNA, 15 bp, Homo sapiens
tctgcatatcgaaca

SEQ ID NO: 634772 - DNA, 15 bp, Homo sapiens
ctgcatatcgaacac

SEQ ID NO: 634773 - DNA, 15 bp, Homo sapiens
tgcatatcgaacacc

SEQ ID NO: 634774 - DNA, 15 bp, Homo sapiens
gcatatcgaacacct

SEQ ID NO: 634775 - DNA, 15 bp, Homo sapiens
catatcgaacacctt

SEQ ID NO: 634776 - DNA, 15 bp, Homo sapiens
atatcgaacacctta

SEQ ID NO: 634777 - DNA, 15 bp, Homo sapiens
tatcgaacaccttat

SEQ ID NO: 634778 - DNA, 15 bp, Homo sapiens
atcgaacaccttatc

SEQ ID NO: 634779 - DNA, 15 bp, Homo sapiens
tcgaacaccttatct

SEQ ID NO: 634780 - DNA, 15 bp, Homo sapiens
cgaacaccttatctt

SEQ ID NO: 634781 - DNA, 15 bp, Homo sapiens
gaacaccttatcttg

SEQ ID NO: 634782 - DNA, 15 bp, Homo sapiens
aacaccttatcttgt

SEQ ID NO: 634783 - DNA, 15 bp, Homo sapiens
acaccttatcttgtg

SEQ ID NO: 634784 - DNA, 15 bp, Homo sapiens
caccttatcttgtgt

SEQ ID NO: 634785 - DNA, 15 bp, Homo sapiens
accttatcttgtgtt

SEQ ID NO: 634786 - DNA, 15 bp, Homo sapiens
ccttatcttgtgttc

SEQ ID NO: 634787 - DNA, 15 bp, Homo sapiens
cttatcttgtgttca

SEQ ID NO: 634788 - DNA, 15 bp, Homo sapiens
ttatcttgtgttcaa

SEQ ID NO: 634789 - DNA, 15 bp, Homo sapiens
tatcttgtgttcaag

SEQ ID NO: 634790 - DNA, 15 bp, Homo sapiens
atcttgtgttcaagt

SEQ ID NO: 634791 - DNA, 15 bp, Homo sapiens
tcttgtgttcaagtt

SEQ ID NO: 634792 - DNA, 15 bp, Homo sapiens
cttgtgttcaagtta

SEQ ID NO: 634793 - DNA, 15 bp, Homo sapiens
ttgtgttcaagttac

SEQ ID NO: 634794 - DNA, 15 bp, Homo sapiens
tgtgttcaagttaca

SEQ ID NO: 634795 - DNA, 15 bp, Homo sapiens
gtgttcaagttacac

SEQ ID NO: 634796 - DNA, 15 bp, Homo sapiens
tgttcaagttacact

SEQ ID NO: 634797 - DNA, 15 bp, Homo sapiens
gttcaagttacactc

SEQ ID NO: 634798 - DNA, 15 bp, Homo sapiens
ttcaagttacactca

SEQ ID NO: 634799 - DNA, 15 bp, Homo sapiens
tcaagttacactcat

SEQ ID NO: 634800 - DNA, 15 bp, Homo sapiens
caagttacactcata

SEQ ID NO: 634801 - DNA, 15 bp, Homo sapiens
aagttacactcatat

SEQ ID NO: 634802 - DNA, 15 bp, Homo sapiens
agttacactcatatc

SEQ ID NO: 634803 - DNA, 15 bp, Homo sapiens
gttacactcatatct

SEQ ID NO: 634804 - DNA, 15 bp, Homo sapiens
ttacactcatatcta

SEQ ID NO: 634805 - DNA, 15 bp, Homo sapiens
tacactcatatctac

SEQ ID NO: 634806 - DNA, 15 bp, Homo sapiens
acactcatatctaca

SEQ ID NO: 634807 - DNA, 15 bp, Homo sapiens
cactcatatctacat

SEQ ID NO: 634808 - DNA, 15 bp, Homo sapiens
actcatatctacata

SEQ ID NO: 634809 - DNA, 15 bp, Homo sapiens
ctcatatctacatac

SEQ ID NO: 634810 - DNA, 15 bp, Homo sapiens
tcatatctacatact

SEQ ID NO: 634811 - DNA, 15 bp, Homo sapiens
catatctacatactg

SEQ ID NO: 634812 - DNA, 15 bp, Homo sapiens
atatctacatactgt

SEQ ID NO: 634813 - DNA, 15 bp, Homo sapiens
tatctacatactgtg

SEQ ID NO: 634814 - DNA, 15 bp, Homo sapiens
atctacatactgtgt

SEQ ID NO: 634815 - DNA, 15 bp, Homo sapiens
tctacatactgtgta

SEQ ID NO: 634816 - DNA, 15 bp, Homo sapiens
ctacatactgtgtag

SEQ ID NO: 634817 - DNA, 15 bp, Homo sapiens
tacatactgtgtaga

SEQ ID NO: 634818 - DNA, 15 bp, Homo sapiens
acatactgtgtagag

SEQ ID NO: 634819 - DNA, 15 bp, Homo sapiens
catactgtgtagagt

SEQ ID NO: 634820 - DNA, 15 bp, Homo sapiens
atactgtgtagagtt

SEQ ID NO: 634821 - DNA, 15 bp, Homo sapiens
tactgtgtagagttt

SEQ ID NO: 634822 - DNA, 15 bp, Homo sapiens
actgtgtagagtttt

SEQ ID NO: 634823 - DNA, 15 bp, Homo sapiens
ctgtgtagagtttta

SEQ ID NO: 634824 - DNA, 15 bp, Homo sapiens
tgtgtagagttttaa

SEQ ID NO: 634825 - DNA, 15 bp, Homo sapiens
gtgtagagttttaat

SEQ ID NO: 634826 - DNA, 15 bp, Homo sapiens
tgtagagttttaatt

SEQ ID NO: 634827 - DNA, 15 bp, Homo sapiens
gtagagttttaatta

SEQ ID NO: 634828 - DNA, 15 bp, Homo sapiens
tagagttttaattat

SEQ ID NO: 634829 - DNA, 15 bp, Homo sapiens
agagttttaattatg

SEQ ID NO: 634830 - DNA, 15 bp, Homo sapiens
gagttttaattatgt

SEQ ID NO: 634831 - DNA, 15 bp, Homo sapiens
agttttaattatgtt

SEQ ID NO: 634832 - DNA, 15 bp, Homo sapiens
gttttaattatgttc

SEQ ID NO: 634833 - DNA, 15 bp, Homo sapiens
ttttaattatgttct

SEQ ID NO: 634834 - DNA, 15 bp, Homo sapiens
tttaattatgttctt

SEQ ID NO: 634835 - DNA, 15 bp, Homo sapiens
ttaattatgttcttt

SEQ ID NO: 634836 - DNA, 15 bp, Homo sapiens
taattatgttctttt

SEQ ID NO: 634837 - DNA, 15 bp, Homo sapiens
aattatgttcttttg

SEQ ID NO: 634838 - DNA, 15 bp, Homo sapiens
attatgttcttttga

SEQ ID NO: 634839 - DNA, 15 bp, Homo sapiens
ttatgttcttttgaa

SEQ ID NO: 634840 - DNA, 15 bp, Homo sapiens
tatgttcttttgaaa

SEQ ID NO: 634841 - DNA, 15 bp, Homo sapiens
atgttcttttgaaat

SEQ ID NO: 634842 - DNA, 15 bp, Homo sapiens
tgttcttttgaaata

SEQ ID NO: 634843 - DNA, 15 bp, Homo sapiens
gttcttttgaaatat

SEQ ID NO: 634844 - DNA, 15 bp, Homo sapiens
ttcttttgaaatata

SEQ ID NO: 634845 - DNA, 15 bp, Homo sapiens
tcttttgaaatataa

SEQ ID NO: 634846 - DNA, 15 bp, Homo sapiens
cttttgaaatataaa

SEQ ID NO: 634847 - DNA, 15 bp, Homo sapiens
ttttgaaatataaaa

SEQ ID NO: 634848 - DNA, 15 bp, Homo sapiens
tttgaaatataaaag

SEQ ID NO: 634849 - DNA, 15 bp, Homo sapiens
ttgaaatataaaagg

SEQ ID NO: 634850 - DNA, 15 bp, Homo sapiens
tgaaatataaaaggt

SEQ ID NO: 634851 - DNA, 15 bp, Homo sapiens
gaaatataaaaggtt

SEQ ID NO: 634852 - DNA, 15 bp, Homo sapiens
aaatataaaaggtta

SEQ ID NO: 634853 - DNA, 15 bp, Homo sapiens
aatataaaaggttat

SEQ ID NO: 634854 - DNA, 15 bp, Homo sapiens
atataaaaggttata

SEQ ID NO: 634855 - DNA, 15 bp, Homo sapiens
tataaaaggttatac

SEQ ID NO: 634856 - DNA, 15 bp, Homo sapiens
ataaaaggttatact

SEQ ID NO: 634857 - DNA, 15 bp, Homo sapiens
taaaaggttatactt

SEQ ID NO: 634858 - DNA, 15 bp, Homo sapiens
aaaaggttatacttg

SEQ ID NO: 634859 - DNA, 15 bp, Homo sapiens
aaaggttatacttgg

SEQ ID NO: 634860 - DNA, 15 bp, Homo sapiens
aaggttatacttggt

SEQ ID NO: 634861 - DNA, 15 bp, Homo sapiens
aggttatacttggta

SEQ ID NO: 634862 - DNA, 15 bp, Homo sapiens
ggttatacttggtat

SEQ ID NO: 634863 - DNA, 15 bp, Homo sapiens
gttatacttggtatc

SEQ ID NO: 634864 - DNA, 15 bp, Homo sapiens
ttatacttggtatca

SEQ ID NO: 634865 - DNA, 15 bp, Homo sapiens
tatacttggtatcaa

SEQ ID NO: 634866 - DNA, 15 bp, Homo sapiens
atacttggtatcaat

SEQ ID NO: 634867 - DNA, 15 bp, Homo sapiens
tacttggtatcaata

SEQ ID NO: 634868 - DNA, 15 bp, Homo sapiens
acttggtatcaatat

SEQ ID NO: 634869 - DNA, 15 bp, Homo sapiens
cttggtatcaatatt

SEQ ID NO: 634870 - DNA, 15 bp, Homo sapiens
ttggtatcaatattt

SEQ ID NO: 634871 - DNA, 15 bp, Homo sapiens
tggtatcaatatttg

SEQ ID NO: 634872 - DNA, 15 bp, Homo sapiens
ggtatcaatatttga

SEQ ID NO: 634873 - DNA, 15 bp, Homo sapiens
gtatcaatatttgat

SEQ ID NO: 634874 - DNA, 15 bp, Homo sapiens
tatcaatatttgatt

SEQ ID NO: 634875 - DNA, 15 bp, Homo sapiens
atcaatatttgattg

SEQ ID NO: 634876 - DNA, 15 bp, Homo sapiens
tcaatatttgattgg

SEQ ID NO: 634877 - DNA, 15 bp, Homo sapiens
caatatttgattggc

SEQ ID NO: 634878 - DNA, 15 bp, Homo sapiens
aatatttgattggcc

SEQ ID NO: 634879 - DNA, 15 bp, Homo sapiens
atatttgattggccg

SEQ ID NO: 634880 - DNA, 15 bp, Homo sapiens
tatttgattggccgt

SEQ ID NO: 634881 - DNA, 15 bp, Homo sapiens
atttgattggccgtc

SEQ ID NO: 634882 - DNA, 15 bp, Homo sapiens
tttgattggccgtcc

SEQ ID NO: 634883 - DNA, 15 bp, Homo sapiens
ttgattggccgtcct

SEQ ID NO: 634884 - DNA, 15 bp, Homo sapiens
tgattggccgtcctg

SEQ ID NO: 634885 - DNA, 15 bp, Homo sapiens
gattggccgtcctga

SEQ ID NO: 634886 - DNA, 15 bp, Homo sapiens
attggccgtcctgac

SEQ ID NO: 634887 - DNA, 15 bp, Homo sapiens
ttggccgtcctgaca

SEQ ID NO: 634888 - DNA, 15 bp, Homo sapiens
tggccgtcctgacat

SEQ ID NO: 634889 - DNA, 15 bp, Homo sapiens
ggccgtcctgacata

SEQ ID NO: 634890 - DNA, 15 bp, Homo sapiens
gccgtcctgacatat

SEQ ID NO: 634891 - DNA, 15 bp, Homo sapiens
ccgtcctgacatatt

SEQ ID NO: 634892 - DNA, 15 bp, Homo sapiens
cgtcctgacatattt

SEQ ID NO: 634893 - DNA, 15 bp, Homo sapiens
gtcctgacatatttt

SEQ ID NO: 634894 - DNA, 15 bp, Homo sapiens
tcctgacatattttg

SEQ ID NO: 634895 - DNA, 15 bp, Homo sapiens
cctgacatattttgt

SEQ ID NO: 634896 - DNA, 15 bp, Homo sapiens
ctgacatattttgtt

SEQ ID NO: 634897 - DNA, 15 bp, Homo sapiens
tgacatattttgtta

SEQ ID NO: 634898 - DNA, 15 bp, Homo sapiens
gacatattttgttaa

SEQ ID NO: 634899 - DNA, 15 bp, Homo sapiens
acatattttgttaac

SEQ ID NO: 634900 - DNA, 15 bp, Homo sapiens
catattttgttaact

SEQ ID NO: 634901 - DNA, 15 bp, Homo sapiens
atattttgttaactc

SEQ ID NO: 634902 - DNA, 15 bp, Homo sapiens
tattttgttaactct

SEQ ID NO: 634903 - DNA, 15 bp, Homo sapiens
attttgttaactctt

SEQ ID NO: 634904 - DNA, 15 bp, Homo sapiens
ttttgttaactcttg

SEQ ID NO: 634905 - DNA, 15 bp, Homo sapiens
tttgttaactcttgt

SEQ ID NO: 634906 - DNA, 15 bp, Homo sapiens
ttgttaactcttgtg

SEQ ID NO: 634907 - DNA, 15 bp, Homo sapiens
tgttaactcttgtgc

SEQ ID NO: 634908 - DNA, 15 bp, Homo sapiens
gttaactcttgtgct

SEQ ID NO: 634909 - DNA, 15 bp, Homo sapiens
ttaactcttgtgctc

SEQ ID NO: 634910 - DNA, 15 bp, Homo sapiens
taactcttgtgctca

SEQ ID NO: 634911 - DNA, 15 bp, Homo sapiens
aactcttgtgctcac

SEQ ID NO: 634912 - DNA, 15 bp, Homo sapiens
actcttgtgctcacc

SEQ ID NO: 634913 - DNA, 15 bp, Homo sapiens
ctcttgtgctcaccc

SEQ ID NO: 634914 - DNA, 15 bp, Homo sapiens
tcttgtgctcaccct

SEQ ID NO: 634915 - DNA, 15 bp, Homo sapiens
cttgtgctcaccctt

SEQ ID NO: 634916 - DNA, 15 bp, Homo sapiens
ttgtgctcacccttg

SEQ ID NO: 634917 - DNA, 15 bp, Homo sapiens
tgtgctcacccttgt

SEQ ID NO: 634918 - DNA, 15 bp, Homo sapiens
gtgctcacccttgtt

SEQ ID NO: 634919 - DNA, 15 bp, Homo sapiens
tgctcacccttgttt

SEQ ID NO: 634920 - DNA, 15 bp, Homo sapiens
gctcacccttgtttc

SEQ ID NO: 634921 - DNA, 15 bp, Homo sapiens
ctcacccttgtttct

SEQ ID NO: 634922 - DNA, 15 bp, Homo sapiens
tcacccttgtttctc

SEQ ID NO: 634923 - DNA, 15 bp, Homo sapiens
cacccttgtttctct

SEQ ID NO: 634924 - DNA, 15 bp, Homo sapiens
acccttgtttctctc

SEQ ID NO: 634925 - DNA, 15 bp, Homo sapiens
cccttgtttctctct

SEQ ID NO: 634926 - DNA, 15 bp, Homo sapiens
ccttgtttctctctt

SEQ ID NO: 634927 - DNA, 15 bp, Homo sapiens
cttgtttctctcttt

SEQ ID NO: 634928 - DNA, 15 bp, Homo sapiens
ttgtttctctctttc

SEQ ID NO: 634929 - DNA, 15 bp, Homo sapiens
tgtttctctctttca

SEQ ID NO: 634930 - DNA, 15 bp, Homo sapiens
gtttctctctttcat

SEQ ID NO: 634931 - DNA, 15 bp, Homo sapiens
tttctctctttcatg

SEQ ID NO: 634932 - DNA, 15 bp, Homo sapiens
ttctctctttcatgg

SEQ ID NO: 634933 - DNA, 15 bp, Homo sapiens
tctctctttcatggc

SEQ ID NO: 634934 - DNA, 15 bp, Homo sapiens
ctctctttcatggct

SEQ ID NO: 634935 - DNA, 15 bp, Homo sapiens
tctctttcatggctc

SEQ ID NO: 634936 - DNA, 15 bp, Homo sapiens
ctctttcatggctcc

SEQ ID NO: 634937 - DNA, 15 bp, Homo sapiens
tctttcatggctccc

SEQ ID NO: 634938 - DNA, 15 bp, Homo sapiens
ctttcatggctccct

SEQ ID NO: 634939 - DNA, 15 bp, Homo sapiens
tttcatggctccctt

SEQ ID NO: 634940 - DNA, 15 bp, Homo sapiens
ttcatggctcccttc

SEQ ID NO: 634941 - DNA, 15 bp, Homo sapiens
tcatggctcccttct

SEQ ID NO: 634942 - DNA, 15 bp, Homo sapiens
catggctcccttctg

SEQ ID NO: 634943 - DNA, 15 bp, Homo sapiens
atggctcccttctgg

SEQ ID NO: 634944 - DNA, 15 bp, Homo sapiens
tggctcccttctgga

SEQ ID NO: 634945 - DNA, 15 bp, Homo sapiens
ggctcccttctggat

SEQ ID NO: 634946 - DNA, 15 bp, Homo sapiens
gctcccttctggata

SEQ ID NO: 634947 - DNA, 15 bp, Homo sapiens
ctcccttctggatac

SEQ ID NO: 634948 - DNA, 15 bp, Homo sapiens
tcccttctggatact

SEQ ID NO: 634949 - DNA, 15 bp, Homo sapiens
cccttctggatactc

SEQ ID NO: 634950 - DNA, 15 bp, Homo sapiens
ccttctggatactcc

SEQ ID NO: 634951 - DNA, 15 bp, Homo sapiens
cttctggatactcct

SEQ ID NO: 634952 - DNA, 15 bp, Homo sapiens
ttctggatactcctt

SEQ ID NO: 634953 - DNA, 15 bp, Homo sapiens
tctggatactccttc

SEQ ID NO: 634954 - DNA, 15 bp, Homo sapiens
ctggatactccttct

SEQ ID NO: 634955 - DNA, 15 bp, Homo sapiens
tggatactccttctg

SEQ ID NO: 634956 - DNA, 15 bp, Homo sapiens
ggatactccttctgg

SEQ ID NO: 634957 - DNA, 15 bp, Homo sapiens
gatactccttctggc

SEQ ID NO: 634958 - DNA, 15 bp, Homo sapiens
atactccttctggct

SEQ ID NO: 634959 - DNA, 15 bp, Homo sapiens
tactccttctggcta

SEQ ID NO: 634960 - DNA, 15 bp, Homo sapiens
actccttctggctaa

SEQ ID NO: 634961 - DNA, 15 bp, Homo sapiens
ctccttctggctaag

SEQ ID NO: 634962 - DNA, 15 bp, Homo sapiens
tccttctggctaagg

SEQ ID NO: 634963 - DNA, 15 bp, Homo sapiens
ccttctggctaaggc

SEQ ID NO: 634964 - DNA, 15 bp, Homo sapiens
cttctggctaaggca

SEQ ID NO: 634965 - DNA, 15 bp, Homo sapiens
ttctggctaaggcac

SEQ ID NO: 634966 - DNA, 15 bp, Homo sapiens
tctggctaaggcaca

SEQ ID NO: 634967 - DNA, 15 bp, Homo sapiens
ctggctaaggcacat

SEQ ID NO: 634968 - DNA, 15 bp, Homo sapiens
tggctaaggcacatc

SEQ ID NO: 634969 - DNA, 15 bp, Homo sapiens
ggctaaggcacatcc

SEQ ID NO: 634970 - DNA, 15 bp, Homo sapiens
gctaaggcacatcct

SEQ ID NO: 634971 - DNA, 15 bp, Homo sapiens
ctaaggcacatcctc

SEQ ID NO: 634972 - DNA, 15 bp, Homo sapiens
taaggcacatcctct

SEQ ID NO: 634973 - DNA, 15 bp, Homo sapiens
aaggcacatcctcta

SEQ ID NO: 634974 - DNA, 15 bp, Homo sapiens
aggcacatcctctag

SEQ ID NO: 634975 - DNA, 15 bp, Homo sapiens
ggcacatcctctagt

SEQ ID NO: 634976 - DNA, 15 bp, Homo sapiens
gcacatcctctagtt

SEQ ID NO: 634977 - DNA, 15 bp, Homo sapiens
cacatcctctagttg

SEQ ID NO: 634978 - DNA, 15 bp, Homo sapiens
acatcctctagttgt

SEQ ID NO: 634979 - DNA, 15 bp, Homo sapiens
catcctctagttgtt

SEQ ID NO: 634980 - DNA, 15 bp, Homo sapiens
atcctctagttgttg

SEQ ID NO: 634981 - DNA, 15 bp, Homo sapiens
tcctctagttgttgt

SEQ ID NO: 634982 - DNA, 15 bp, Homo sapiens
cctctagttgttgtt

SEQ ID NO: 634983 - DNA, 15 bp, Homo sapiens
ctctagttgttgttt

SEQ ID NO: 634984 - DNA, 15 bp, Homo sapiens
tctagttgttgtttt

SEQ ID NO: 634985 - DNA, 15 bp, Homo sapiens
ctagttgttgtttta

SEQ ID NO: 634986 - DNA, 15 bp, Homo sapiens
tagttgttgttttat

SEQ ID NO: 634987 - DNA, 15 bp, Homo sapiens
agttgttgttttatg

SEQ ID NO: 634988 - DNA, 15 bp, Homo sapiens
gttgttgttttatgc

SEQ ID NO: 634989 - DNA, 15 bp, Homo sapiens
ttgttgttttatgca

SEQ ID NO: 634990 - DNA, 15 bp, Homo sapiens
tgttgttttatgcag

SEQ ID NO: 634991 - DNA, 15 bp, Homo sapiens
gttgttttatgcagg

SEQ ID NO: 634992 - DNA, 15 bp, Homo sapiens
ttgttttatgcaggt

SEQ ID NO: 634993 - DNA, 15 bp, Homo sapiens
tgttttatgcaggtc

SEQ ID NO: 634994 - DNA, 15 bp, Homo sapiens
gttttatgcaggtct

SEQ ID NO: 634995 - DNA, 15 bp, Homo sapiens
ttttatgcaggtctg

SEQ ID NO: 634996 - DNA, 15 bp, Homo sapiens
tttatgcaggtctgt

SEQ ID NO: 634997 - DNA, 15 bp, Homo sapiens
ttatgcaggtctgta

SEQ ID NO: 634998 - DNA, 15 bp, Homo sapiens
tatgcaggtctgtaa

SEQ ID NO: 634999 - DNA, 15 bp, Homo sapiens
atgcaggtctgtaag

SEQ ID NO: 635000 - DNA, 15 bp, Homo sapiens
tgcaggtctgtaagt

SEQ ID NO: 635001 - DNA, 15 bp, Homo sapiens
gcaggtctgtaagtg

SEQ ID NO: 635002 - DNA, 15 bp, Homo sapiens
caggtctgtaagtgt

SEQ ID NO: 635003 - DNA, 15 bp, Homo sapiens
aggtctgtaagtgta

SEQ ID NO: 635004 - DNA, 15 bp, Homo sapiens
ggtctgtaagtgtaa

SEQ ID NO: 635005 - DNA, 15 bp, Homo sapiens
gtctgtaagtgtaaa

SEQ ID NO: 635006 - DNA, 15 bp, Homo sapiens
tctgtaagtgtaaac

SEQ ID NO: 635007 - DNA, 15 bp, Homo sapiens
ctgtaagtgtaaacc

SEQ ID NO: 635008 - DNA, 15 bp, Homo sapiens
tgtaagtgtaaaccc

SEQ ID NO: 635009 - DNA, 15 bp, Homo sapiens
gtaagtgtaaaccct

SEQ ID NO: 635010 - DNA, 15 bp, Homo sapiens
taagtgtaaaccctc

SEQ ID NO: 635011 - DNA, 15 bp, Homo sapiens
aagtgtaaaccctct

SEQ ID NO: 635012 - DNA, 15 bp, Homo sapiens
agtgtaaaccctctg

SEQ ID NO: 635013 - DNA, 15 bp, Homo sapiens
gtgtaaaccctctga

SEQ ID NO: 635014 - DNA, 15 bp, Homo sapiens
tgtaaaccctctgac

SEQ ID NO: 635015 - DNA, 15 bp, Homo sapiens
gtaaaccctctgact

SEQ ID NO: 635016 - DNA, 15 bp, Homo sapiens
taaaccctctgactt

SEQ ID NO: 635017 - DNA, 15 bp, Homo sapiens
aaaccctctgacttt

SEQ ID NO: 635018 - DNA, 15 bp, Homo sapiens
aaccctctgactttg

SEQ ID NO: 635019 - DNA, 15 bp, Homo sapiens
accctctgactttga

SEQ ID NO: 635020 - DNA, 15 bp, Homo sapiens
ccctctgactttgaa

SEQ ID NO: 635021 - DNA, 15 bp, Homo sapiens
cctctgactttgaat

SEQ ID NO: 635022 - DNA, 15 bp, Homo sapiens
ctctgactttgaatg

SEQ ID NO: 635023 - DNA, 15 bp, Homo sapiens
tctgactttgaatgt

SEQ ID NO: 635024 - DNA, 15 bp, Homo sapiens
ctgactttgaatgtc

SEQ ID NO: 635025 - DNA, 15 bp, Homo sapiens
tgactttgaatgtct

SEQ ID NO: 635026 - DNA, 15 bp, Homo sapiens
gactttgaatgtctg

SEQ ID NO: 635027 - DNA, 15 bp, Homo sapiens
actttgaatgtctgt

SEQ ID NO: 635028 - DNA, 15 bp, Homo sapiens
ctttgaatgtctgta

SEQ ID NO: 635029 - DNA, 15 bp, Homo sapiens
tttgaatgtctgtaa

SEQ ID NO: 635030 - DNA, 15 bp, Homo sapiens
ttgaatgtctgtaaa

SEQ ID NO: 635031 - DNA, 15 bp, Homo sapiens
tgaatgtctgtaaag

SEQ ID NO: 635032 - DNA, 15 bp, Homo sapiens
gaatgtctgtaaaga

SEQ ID NO: 635033 - DNA, 15 bp, Homo sapiens
aatgtctgtaaagat

SEQ ID NO: 635034 - DNA, 15 bp, Homo sapiens
atgtctgtaaagatg

SEQ ID NO: 635035 - DNA, 15 bp, Homo sapiens
tgtctgtaaagatgc

SEQ ID NO: 635036 - DNA, 15 bp, Homo sapiens
gtctgtaaagatgct

SEQ ID NO: 635037 - DNA, 15 bp, Homo sapiens
tctgtaaagatgctg

SEQ ID NO: 635038 - DNA, 15 bp, Homo sapiens
ctgtaaagatgctga

SEQ ID NO: 635039 - DNA, 15 bp, Homo sapiens
tgtaaagatgctgaa

SEQ ID NO: 635040 - DNA, 15 bp, Homo sapiens
gtaaagatgctgaat

SEQ ID NO: 635041 - DNA, 15 bp, Homo sapiens
taaagatgctgaata

SEQ ID NO: 635042 - DNA, 15 bp, Homo sapiens
aaagatgctgaataa

SEQ ID NO: 635043 - DNA, 15 bp, Homo sapiens
aagatgctgaataat

SEQ ID NO: 635044 - DNA, 15 bp, Homo sapiens
agatgctgaataatt

SEQ ID NO: 635045 - DNA, 15 bp, Homo sapiens
gatgctgaataattt

SEQ ID NO: 635046 - DNA, 15 bp, Homo sapiens
atgctgaataatttt

SEQ ID NO: 635047 - DNA, 15 bp, Homo sapiens
tgctgaataattttt

SEQ ID NO: 635048 - DNA, 15 bp, Homo sapiens
gctgaataatttttt

SEQ ID NO: 635049 - DNA, 15 bp, Homo sapiens
ctgaataattttttg

SEQ ID NO: 635050 - DNA, 15 bp, Homo sapiens
tgaataattttttgg

SEQ ID NO: 635051 - DNA, 15 bp, Homo sapiens
gaataattttttggc

SEQ ID NO: 635052 - DNA, 15 bp, Homo sapiens
aataattttttggct

SEQ ID NO: 635053 - DNA, 15 bp, Homo sapiens
ataattttttggctc

SEQ ID NO: 635054 - DNA, 15 bp, Homo sapiens
taattttttggctca

SEQ ID NO: 635055 - DNA, 15 bp, Homo sapiens
aattttttggctcag

SEQ ID NO: 635056 - DNA, 15 bp, Homo sapiens
attttttggctcagt

SEQ ID NO: 635057 - DNA, 15 bp, Homo sapiens
ttttttggctcagtg

SEQ ID NO: 635058 - DNA, 15 bp, Homo sapiens
tttttggctcagtgt

SEQ ID NO: 635059 - DNA, 15 bp, Homo sapiens
ttttggctcagtgta

SEQ ID NO: 635060 - DNA, 15 bp, Homo sapiens
tttggctcagtgtaa

SEQ ID NO: 635061 - DNA, 15 bp, Homo sapiens
ttggctcagtgtaaa

SEQ ID NO: 635062 - DNA, 15 bp, Homo sapiens
tggctcagtgtaaaa

SEQ ID NO: 635063 - DNA, 15 bp, Homo sapiens
ggctcagtgtaaaat

SEQ ID NO: 635064 - DNA, 15 bp, Homo sapiens
gctcagtgtaaaatt

SEQ ID NO: 635065 - DNA, 15 bp, Homo sapiens
ctcagtgtaaaattc

SEQ ID NO: 635066 - DNA, 15 bp, Homo sapiens
tcagtgtaaaattct

SEQ ID NO: 635067 - DNA, 15 bp, Homo sapiens
cagtgtaaaattcta

SEQ ID NO: 635068 - DNA, 15 bp, Homo sapiens
agtgtaaaattctaa

SEQ ID NO: 635069 - DNA, 15 bp, Homo sapiens
gtgtaaaattctaag

SEQ ID NO: 635070 - DNA, 15 bp, Homo sapiens
tgtaaaattctaagt

SEQ ID NO: 635071 - DNA, 15 bp, Homo sapiens
gtaaaattctaagtt

SEQ ID NO: 635072 - DNA, 15 bp, Homo sapiens
taaaattctaagtta

SEQ ID NO: 635073 - DNA, 15 bp, Homo sapiens
aaaattctaagttaa

SEQ ID NO: 635074 - DNA, 15 bp, Homo sapiens
aaattctaagttaaa

SEQ ID NO: 635075 - DNA, 15 bp, Homo sapiens
aattctaagttaaag

SEQ ID NO: 635076 - DNA, 15 bp, Homo sapiens
attctaagttaaaga

SEQ ID NO: 635077 - DNA, 15 bp, Homo sapiens
ttctaagttaaagat

SEQ ID NO: 635078 - DNA, 15 bp, Homo sapiens
tctaagttaaagatt

SEQ ID NO: 635079 - DNA, 15 bp, Homo sapiens
ctaagttaaagatta

SEQ ID NO: 635080 - DNA, 15 bp, Homo sapiens
taagttaaagattac

SEQ ID NO: 635081 - DNA, 15 bp, Homo sapiens
aagttaaagattact

SEQ ID NO: 635082 - DNA, 15 bp, Homo sapiens
agttaaagattactt

SEQ ID NO: 635083 - DNA, 15 bp, Homo sapiens
gttaaagattacttt

SEQ ID NO: 635084 - DNA, 15 bp, Homo sapiens
ttaaagattactttt

SEQ ID NO: 635085 - DNA, 15 bp, Homo sapiens
taaagattacttttt

SEQ ID NO: 635086 - DNA, 15 bp, Homo sapiens
aaagattactttttt

SEQ ID NO: 635087 - DNA, 15 bp, Homo sapiens
aagattacttttttt

SEQ ID NO: 635088 - DNA, 15 bp, Homo sapiens
agattactttttttt

SEQ ID NO: 635089 - DNA, 15 bp, Homo sapiens
gattacttttttttc

SEQ ID NO: 635090 - DNA, 15 bp, Homo sapiens
attacttttttttct

SEQ ID NO: 635091 - DNA, 15 bp, Homo sapiens
ttacttttttttctc

SEQ ID NO: 635092 - DNA, 15 bp, Homo sapiens
tacttttttttctca

SEQ ID NO: 635093 - DNA, 15 bp, Homo sapiens
acttttttttctcat

SEQ ID NO: 635094 - DNA, 15 bp, Homo sapiens
cttttttttctcatc

SEQ ID NO: 635095 - DNA, 15 bp, Homo sapiens
ttttttttctcatca

SEQ ID NO: 635096 - DNA, 15 bp, Homo sapiens
tttttttctcatcac

SEQ ID NO: 635097 - DNA, 15 bp, Homo sapiens
ttttttctcatcact

SEQ ID NO: 635098 - DNA, 15 bp, Homo sapiens
tttttctcatcactt

SEQ ID NO: 635099 - DNA, 15 bp, Homo sapiens
ttttctcatcacttt

SEQ ID NO: 635100 - DNA, 15 bp, Homo sapiens
tttctcatcactttg

SEQ ID NO: 635101 - DNA, 15 bp, Homo sapiens
ttctcatcactttga

SEQ ID NO: 635102 - DNA, 15 bp, Homo sapiens
tctcatcactttgaa

SEQ ID NO: 635103 - DNA, 15 bp, Homo sapiens
ctcatcactttgaag

SEQ ID NO: 635104 - DNA, 15 bp, Homo sapiens
tcatcactttgaaga

SEQ ID NO: 635105 - DNA, 15 bp, Homo sapiens
catcactttgaagac

SEQ ID NO: 635106 - DNA, 15 bp, Homo sapiens
atcactttgaagaca

SEQ ID NO: 635107 - DNA, 15 bp, Homo sapiens
tcactttgaagacat

SEQ ID NO: 635108 - DNA, 15 bp, Homo sapiens
cactttgaagacatt

SEQ ID NO: 635109 - DNA, 15 bp, Homo sapiens
actttgaagacatta

SEQ ID NO: 635110 - DNA, 15 bp, Homo sapiens
ctttgaagacattac

SEQ ID NO: 635111 - DNA, 15 bp, Homo sapiens
tttgaagacattacg

SEQ ID NO: 635112 - DNA, 15 bp, Homo sapiens
ttgaagacattacgc

SEQ ID NO: 635113 - DNA, 15 bp, Homo sapiens
tgaagacattacgcc

SEQ ID NO: 635114 - DNA, 15 bp, Homo sapiens
gaagacattacgcca

SEQ ID NO: 635115 - DNA, 15 bp, Homo sapiens
aagacattacgccac

SEQ ID NO: 635116 - DNA, 15 bp, Homo sapiens
agacattacgccact

SEQ ID NO: 635117 - DNA, 15 bp, Homo sapiens
gacattacgccactg

SEQ ID NO: 635118 - DNA, 15 bp, Homo sapiens
acattacgccactgt

SEQ ID NO: 635119 - DNA, 15 bp, Homo sapiens
cattacgccactgtt

SEQ ID NO: 635120 - DNA, 15 bp, Homo sapiens
attacgccactgttt

SEQ ID NO: 635121 - DNA, 15 bp, Homo sapiens
ttacgccactgtttt

SEQ ID NO: 635122 - DNA, 15 bp, Homo sapiens
tacgccactgttttc

SEQ ID NO: 635123 - DNA, 15 bp, Homo sapiens
acgccactgttttct

SEQ ID NO: 635124 - DNA, 15 bp, Homo sapiens
cgccactgttttcta

SEQ ID NO: 635125 - DNA, 15 bp, Homo sapiens
gccactgttttctag

SEQ ID NO: 635126 - DNA, 15 bp, Homo sapiens
ccactgttttctagc

SEQ ID NO: 635127 - DNA, 15 bp, Homo sapiens
cactgttttctagcc

SEQ ID NO: 635128 - DNA, 15 bp, Homo sapiens
actgttttctagcct

SEQ ID NO: 635129 - DNA, 15 bp, Homo sapiens
ctgttttctagcctc

SEQ ID NO: 635130 - DNA, 15 bp, Homo sapiens
tgttttctagcctct

SEQ ID NO: 635131 - DNA, 15 bp, Homo sapiens
gttttctagcctcta

SEQ ID NO: 635132 - DNA, 15 bp, Homo sapiens
ttttctagcctctat

SEQ ID NO: 635133 - DNA, 15 bp, Homo sapiens
tttctagcctctatt

SEQ ID NO: 635134 - DNA, 15 bp, Homo sapiens
ttctagcctctattg

SEQ ID NO: 635135 - DNA, 15 bp, Homo sapiens
tctagcctctattgc

SEQ ID NO: 635136 - DNA, 15 bp, Homo sapiens
ctagcctctattgct

SEQ ID NO: 635137 - DNA, 15 bp, Homo sapiens
tagcctctattgctg

SEQ ID NO: 635138 - DNA, 15 bp, Homo sapiens
agcctctattgctga

SEQ ID NO: 635139 - DNA, 15 bp, Homo sapiens
gcctctattgctgat

SEQ ID NO: 635140 - DNA, 15 bp, Homo sapiens
cctctattgctgatg

SEQ ID NO: 635141 - DNA, 15 bp, Homo sapiens
ctctattgctgatga

SEQ ID NO: 635142 - DNA, 15 bp, Homo sapiens
tctattgctgatgag

SEQ ID NO: 635143 - DNA, 15 bp, Homo sapiens
ctattgctgatgaga

SEQ ID NO: 635144 - DNA, 15 bp, Homo sapiens
tattgctgatgagaa

SEQ ID NO: 635145 - DNA, 15 bp, Homo sapiens
attgctgatgagaaa

SEQ ID NO: 635146 - DNA, 15 bp, Homo sapiens
ttgctgatgagaaaa

SEQ ID NO: 635147 - DNA, 15 bp, Homo sapiens
tgctgatgagaaaac

SEQ ID NO: 635148 - DNA, 15 bp, Homo sapiens
gctgatgagaaaact

SEQ ID NO: 635149 - DNA, 15 bp, Homo sapiens
ctgatgagaaaactt

SEQ ID NO: 635150 - DNA, 15 bp, Homo sapiens
tgatgagaaaacttc

SEQ ID NO: 635151 - DNA, 15 bp, Homo sapiens
gatgagaaaacttct

SEQ ID NO: 635152 - DNA, 15 bp, Homo sapiens
atgagaaaacttctg

SEQ ID NO: 635153 - DNA, 15 bp, Homo sapiens
tgagaaaacttctgt

SEQ ID NO: 635154 - DNA, 15 bp, Homo sapiens
gagaaaacttctgtc

SEQ ID NO: 635155 - DNA, 15 bp, Homo sapiens
agaaaacttctgtca

SEQ ID NO: 635156 - DNA, 15 bp, Homo sapiens
gaaaacttctgtcag

SEQ ID NO: 635157 - DNA, 15 bp, Homo sapiens
aaaacttctgtcagt

SEQ ID NO: 635158 - DNA, 15 bp, Homo sapiens
aaacttctgtcagtc

SEQ ID NO: 635159 - DNA, 15 bp, Homo sapiens
aacttctgtcagtct

SEQ ID NO: 635160 - DNA, 15 bp, Homo sapiens
acttctgtcagtctg

SEQ ID NO: 635161 - DNA, 15 bp, Homo sapiens
cttctgtcagtctgt

SEQ ID NO: 635162 - DNA, 15 bp, Homo sapiens
ttctgtcagtctgtt

SEQ ID NO: 635163 - DNA, 15 bp, Homo sapiens
tctgtcagtctgttc

SEQ ID NO: 635164 - DNA, 15 bp, Homo sapiens
ctgtcagtctgttct

SEQ ID NO: 635165 - DNA, 15 bp, Homo sapiens
tgtcagtctgttctt

SEQ ID NO: 635166 - DNA, 15 bp, Homo sapiens
gtcagtctgttcttt

SEQ ID NO: 635167 - DNA, 15 bp, Homo sapiens
tcagtctgttcttta

SEQ ID NO: 635168 - DNA, 15 bp, Homo sapiens
cagtctgttctttat

SEQ ID NO: 635169 - DNA, 15 bp, Homo sapiens
agtctgttctttata

SEQ ID NO: 635170 - DNA, 15 bp, Homo sapiens
gtctgttctttatat

SEQ ID NO: 635171 - DNA, 15 bp, Homo sapiens
tctgttctttatatt

SEQ ID NO: 635172 - DNA, 15 bp, Homo sapiens
ctgttctttatattt

SEQ ID NO: 635173 - DNA, 15 bp, Homo sapiens
tgttctttatatttg

SEQ ID NO: 635174 - DNA, 15 bp, Homo sapiens
gttctttatatttga

SEQ ID NO: 635175 - DNA, 15 bp, Homo sapiens
ttctttatatttgaa

SEQ ID NO: 635176 - DNA, 15 bp, Homo sapiens
tctttatatttgaat

SEQ ID NO: 635177 - DNA, 15 bp, Homo sapiens
ctttatatttgaata

SEQ ID NO: 635178 - DNA, 15 bp, Homo sapiens
tttatatttgaatat

SEQ ID NO: 635179 - DNA, 15 bp, Homo sapiens
ttatatttgaatatg

SEQ ID NO: 635180 - DNA, 15 bp, Homo sapiens
tatatttgaatatgc

SEQ ID NO: 635181 - DNA, 15 bp, Homo sapiens
atatttgaatatgca

SEQ ID NO: 635182 - DNA, 15 bp, Homo sapiens
tatttgaatatgcat

SEQ ID NO: 635183 - DNA, 15 bp, Homo sapiens
atttgaatatgcatt

SEQ ID NO: 635184 - DNA, 15 bp, Homo sapiens
tttgaatatgcattt

SEQ ID NO: 635185 - DNA, 15 bp, Homo sapiens
ttgaatatgcatttt

SEQ ID NO: 635186 - DNA, 15 bp, Homo sapiens
tgaatatgcattttc

SEQ ID NO: 635187 - DNA, 15 bp, Homo sapiens
gaatatgcattttcc

SEQ ID NO: 635188 - DNA, 15 bp, Homo sapiens
aatatgcattttccc

SEQ ID NO: 635189 - DNA, 15 bp, Homo sapiens
atatgcattttcccc

SEQ ID NO: 635190 - DNA, 15 bp, Homo sapiens
tatgcattttcccct

SEQ ID NO: 635191 - DNA, 15 bp, Homo sapiens
atgcattttcccctt

SEQ ID NO: 635192 - DNA, 15 bp, Homo sapiens
tgcattttccccttt

SEQ ID NO: 635193 - DNA, 15 bp, Homo sapiens
gcattttcccctttc

SEQ ID NO: 635194 - DNA, 15 bp, Homo sapiens
cattttcccctttca

SEQ ID NO: 635195 - DNA, 15 bp, Homo sapiens
attttcccctttcac

SEQ ID NO: 635196 - DNA, 15 bp, Homo sapiens
ttttcccctttcaca

SEQ ID NO: 635197 - DNA, 15 bp, Homo sapiens
tttcccctttcacag

SEQ ID NO: 635198 - DNA, 15 bp, Homo sapiens
ttcccctttcacagt

SEQ ID NO: 635199 - DNA, 15 bp, Homo sapiens
tcccctttcacagtg

SEQ ID NO: 635200 - DNA, 15 bp, Homo sapiens
cccctttcacagtgt

SEQ ID NO: 635201 - DNA, 15 bp, Homo sapiens
ccctttcacagtgtt

SEQ ID NO: 635202 - DNA, 15 bp, Homo sapiens
cctttcacagtgttt

SEQ ID NO: 635203 - DNA, 15 bp, Homo sapiens
ctttcacagtgttta

SEQ ID NO: 635204 - DNA, 15 bp, Homo sapiens
tttcacagtgtttag

SEQ ID NO: 635205 - DNA, 15 bp, Homo sapiens
ttcacagtgtttagg

SEQ ID NO: 635206 - DNA, 15 bp, Homo sapiens
tcacagtgtttagga

SEQ ID NO: 635207 - DNA, 15 bp, Homo sapiens
cacagtgtttaggat

SEQ ID NO: 635208 - DNA, 15 bp, Homo sapiens
acagtgtttaggatg

SEQ ID NO: 635209 - DNA, 15 bp, Homo sapiens
cagtgtttaggatgg

SEQ ID NO: 635210 - DNA, 15 bp, Homo sapiens
agtgtttaggatgga

SEQ ID NO: 635211 - DNA, 15 bp, Homo sapiens
gtgtttaggatggat

SEQ ID NO: 635212 - DNA, 15 bp, Homo sapiens
tgtttaggatggatt

SEQ ID NO: 635213 - DNA, 15 bp, Homo sapiens
gtttaggatggattt

SEQ ID NO: 635214 - DNA, 15 bp, Homo sapiens
tttaggatggatttt

SEQ ID NO: 635215 - DNA, 15 bp, Homo sapiens
ttaggatggattttg

SEQ ID NO: 635216 - DNA, 15 bp, Homo sapiens
taggatggattttgt

SEQ ID NO: 635217 - DNA, 15 bp, Homo sapiens
aggatggattttgtt

SEQ ID NO: 635218 - DNA, 15 bp, Homo sapiens
ggatggattttgttt

SEQ ID NO: 635219 - DNA, 15 bp, Homo sapiens
gatggattttgttta

SEQ ID NO: 635220 - DNA, 15 bp, Homo sapiens
atggattttgtttat

SEQ ID NO: 635221 - DNA, 15 bp, Homo sapiens
tggattttgtttatt

SEQ ID NO: 635222 - DNA, 15 bp, Homo sapiens
ggattttgtttattc

SEQ ID NO: 635223 - DNA, 15 bp, Homo sapiens
gattttgtttattct

SEQ ID NO: 635224 - DNA, 15 bp, Homo sapiens
attttgtttattctt

SEQ ID NO: 635225 - DNA, 15 bp, Homo sapiens
ttttgtttattcttg

SEQ ID NO: 635226 - DNA, 15 bp, Homo sapiens
tttgtttattcttga

SEQ ID NO: 635227 - DNA, 15 bp, Homo sapiens
ttgtttattcttgat

SEQ ID NO: 635228 - DNA, 15 bp, Homo sapiens
tgtttattcttgatg

SEQ ID NO: 635229 - DNA, 15 bp, Homo sapiens
gtttattcttgatgc

SEQ ID NO: 635230 - DNA, 15 bp, Homo sapiens
tttattcttgatgct

SEQ ID NO: 635231 - DNA, 15 bp, Homo sapiens
ttattcttgatgctt

SEQ ID NO: 635232 - DNA, 15 bp, Homo sapiens
tattcttgatgcttt

SEQ ID NO: 635233 - DNA, 15 bp, Homo sapiens
attcttgatgcttta

SEQ ID NO: 635234 - DNA, 15 bp, Homo sapiens
ttcttgatgctttac

SEQ ID NO: 635235 - DNA, 15 bp, Homo sapiens
tcttgatgctttact

SEQ ID NO: 635236 - DNA, 15 bp, Homo sapiens
cttgatgctttacta

SEQ ID NO: 635237 - DNA, 15 bp, Homo sapiens
ttgatgctttactac

SEQ ID NO: 635238 - DNA, 15 bp, Homo sapiens
tgatgctttactaca

SEQ ID NO: 635239 - DNA, 15 bp, Homo sapiens
gatgctttactacag

SEQ ID NO: 635240 - DNA, 15 bp, Homo sapiens
atgctttactacagt

SEQ ID NO: 635241 - DNA, 15 bp, Homo sapiens
tgctttactacagtt

SEQ ID NO: 635242 - DNA, 15 bp, Homo sapiens
gctttactacagttt

SEQ ID NO: 635243 - DNA, 15 bp, Homo sapiens
ctttactacagtttg

SEQ ID NO: 635244 - DNA, 15 bp, Homo sapiens
tttactacagtttga

SEQ ID NO: 635245 - DNA, 15 bp, Homo sapiens
ttactacagtttgat

SEQ ID NO: 635246 - DNA, 15 bp, Homo sapiens
tactacagtttgatt

SEQ ID NO: 635247 - DNA, 15 bp, Homo sapiens
actacagtttgattc

SEQ ID NO: 635248 - DNA, 15 bp, Homo sapiens
ctacagtttgattct

SEQ ID NO: 635249 - DNA, 15 bp, Homo sapiens
tacagtttgattctt

SEQ ID NO: 635250 - DNA, 15 bp, Homo sapiens
acagtttgattcttg

SEQ ID NO: 635251 - DNA, 15 bp, Homo sapiens
cagtttgattcttga

SEQ ID NO: 635252 - DNA, 15 bp, Homo sapiens
agtttgattcttgaa

SEQ ID NO: 635253 - DNA, 15 bp, Homo sapiens
gtttgattcttgaac

SEQ ID NO: 635254 - DNA, 15 bp, Homo sapiens
tttgattcttgaaca

SEQ ID NO: 635255 - DNA, 15 bp, Homo sapiens
ttgattcttgaacaa

SEQ ID NO: 635256 - DNA, 15 bp, Homo sapiens
tgattcttgaacaac

SEQ ID NO: 635257 - DNA, 15 bp, Homo sapiens
gattcttgaacaaca

SEQ ID NO: 635258 - DNA, 15 bp, Homo sapiens
attcttgaacaacac

SEQ ID NO: 635259 - DNA, 15 bp, Homo sapiens
ttcttgaacaacaca

SEQ ID NO: 635260 - DNA, 15 bp, Homo sapiens
tcttgaacaacacag

SEQ ID NO: 635261 - DNA, 15 bp, Homo sapiens
cttgaacaacacagg

SEQ ID NO: 635262 - DNA, 15 bp, Homo sapiens
ttgaacaacacaggt

SEQ ID NO: 635263 - DNA, 15 bp, Homo sapiens
tgaacaacacaggtt

SEQ ID NO: 635264 - DNA, 15 bp, Homo sapiens
gaacaacacaggttg

SEQ ID NO: 635265 - DNA, 15 bp, Homo sapiens
aacaacacaggttgc

SEQ ID NO: 635266 - DNA, 15 bp, Homo sapiens
acaacacaggttgca

SEQ ID NO: 635267 - DNA, 15 bp, Homo sapiens
caacacaggttgcaa

SEQ ID NO: 635268 - DNA, 15 bp, Homo sapiens
aacacaggttgcaac

SEQ ID NO: 635269 - DNA, 15 bp, Homo sapiens
acacaggttgcaact

SEQ ID NO: 635270 - DNA, 15 bp, Homo sapiens
cacaggttgcaactg

SEQ ID NO: 635271 - DNA, 15 bp, Homo sapiens
acaggttgcaactgt

SEQ ID NO: 635272 - DNA, 15 bp, Homo sapiens
caggttgcaactgtg

SEQ ID NO: 635273 - DNA, 15 bp, Homo sapiens
aggttgcaactgtgg

SEQ ID NO: 635274 - DNA, 15 bp, Homo sapiens
ggttgcaactgtgga

SEQ ID NO: 635275 - DNA, 15 bp, Homo sapiens
gttgcaactgtggag

SEQ ID NO: 635276 - DNA, 15 bp, Homo sapiens
ttgcaactgtggagg

SEQ ID NO: 635277 - DNA, 15 bp, Homo sapiens
tgcaactgtggaggt

SEQ ID NO: 635278 - DNA, 15 bp, Homo sapiens
gcaactgtggaggtc

SEQ ID NO: 635279 - DNA, 15 bp, Homo sapiens
caactgtggaggtcc

SEQ ID NO: 635280 - DNA, 15 bp, Homo sapiens
aactgtggaggtcca

SEQ ID NO: 635281 - DNA, 15 bp, Homo sapiens
actgtggaggtccac

SEQ ID NO: 635282 - DNA, 15 bp, Homo sapiens
ctgtggaggtccact

SEQ ID NO: 635283 - DNA, 15 bp, Homo sapiens
tgtggaggtccactt

SEQ ID NO: 635284 - DNA, 15 bp, Homo sapiens
gtggaggtccacttg

SEQ ID NO: 635285 - DNA, 15 bp, Homo sapiens
tggaggtccacttgt

SEQ ID NO: 635286 - DNA, 15 bp, Homo sapiens
ggaggtccacttgta

SEQ ID NO: 635287 - DNA, 15 bp, Homo sapiens
gaggtccacttgtat

SEQ ID NO: 635288 - DNA, 15 bp, Homo sapiens
aggtccacttgtatg

SEQ ID NO: 635289 - DNA, 15 bp, Homo sapiens
ggtccacttgtatgg

SEQ ID NO: 635290 - DNA, 15 bp, Homo sapiens
gtccacttgtatggg

SEQ ID NO: 635291 - DNA, 15 bp, Homo sapiens
tccacttgtatgggg

SEQ ID NO: 635292 - DNA, 15 bp, Homo sapiens
ccacttgtatgggga

SEQ ID NO: 635293 - DNA, 15 bp, Homo sapiens
cacttgtatggggat

SEQ ID NO: 635294 - DNA, 15 bp, Homo sapiens
acttgtatggggatt

SEQ ID NO: 635295 - DNA, 15 bp, Homo sapiens
cttgtatggggattg

SEQ ID NO: 635296 - DNA, 15 bp, Homo sapiens
ttgtatggggattgt

SEQ ID NO: 635297 - DNA, 15 bp, Homo sapiens
tgtatggggattgtt

SEQ ID NO: 635298 - DNA, 15 bp, Homo sapiens
gtatggggattgttt

SEQ ID NO: 635299 - DNA, 15 bp, Homo sapiens
tatggggattgtttt

SEQ ID NO: 635300 - DNA, 15 bp, Homo sapiens
atggggattgttttc

SEQ ID NO: 635301 - DNA, 15 bp, Homo sapiens
tggggattgttttca

SEQ ID NO: 635302 - DNA, 15 bp, Homo sapiens
ggggattgttttcaa

SEQ ID NO: 635303 - DNA, 15 bp, Homo sapiens
gggattgttttcaac

SEQ ID NO: 635304 - DNA, 15 bp, Homo sapiens
ggattgttttcaacc

SEQ ID NO: 635305 - DNA, 15 bp, Homo sapiens
gattgttttcaacca

SEQ ID NO: 635306 - DNA, 15 bp, Homo sapiens
attgttttcaaccaa

SEQ ID NO: 635307 - DNA, 15 bp, Homo sapiens
ttgttttcaaccaat

SEQ ID NO: 635308 - DNA, 15 bp, Homo sapiens
tgttttcaaccaatc

SEQ ID NO: 635309 - DNA, 15 bp, Homo sapiens
gttttcaaccaatct

SEQ ID NO: 635310 - DNA, 15 bp, Homo sapiens
ttttcaaccaatctc

SEQ ID NO: 635311 - DNA, 15 bp, Homo sapiens
tttcaaccaatctca

SEQ ID NO: 635312 - DNA, 15 bp, Homo sapiens
ttcaaccaatctcag

SEQ ID NO: 635313 - DNA, 15 bp, Homo sapiens
tcaaccaatctcaga

SEQ ID NO: 635314 - DNA, 15 bp, Homo sapiens
caaccaatctcagat

SEQ ID NO: 635315 - DNA, 15 bp, Homo sapiens
aaccaatctcagatg

SEQ ID NO: 635316 - DNA, 15 bp, Homo sapiens
accaatctcagatga

SEQ ID NO: 635317 - DNA, 15 bp, Homo sapiens
ccaatctcagatgaa

SEQ ID NO: 635318 - DNA, 15 bp, Homo sapiens
caatctcagatgaaa

SEQ ID NO: 635319 - DNA, 15 bp, Homo sapiens
aatctcagatgaaaa

SEQ ID NO: 635320 - DNA, 15 bp, Homo sapiens
atctcagatgaaaaa

SEQ ID NO: 635321 - DNA, 15 bp, Homo sapiens
tctcagatgaaaaat

SEQ ID NO: 635322 - DNA, 15 bp, Homo sapiens
ctcagatgaaaaata

SEQ ID NO: 635323 - DNA, 15 bp, Homo sapiens
tcagatgaaaaatat

SEQ ID NO: 635324 - DNA, 15 bp, Homo sapiens
cagatgaaaaatata

SEQ ID NO: 635325 - DNA, 15 bp, Homo sapiens
agatgaaaaatatag

SEQ ID NO: 635326 - DNA, 15 bp, Homo sapiens
gatgaaaaatatagt

SEQ ID NO: 635327 - DNA, 15 bp, Homo sapiens
atgaaaaatatagta

SEQ ID NO: 635328 - DNA, 15 bp, Homo sapiens
tgaaaaatatagtat

SEQ ID NO: 635329 - DNA, 15 bp, Homo sapiens
gaaaaatatagtatt

SEQ ID NO: 635330 - DNA, 15 bp, Homo sapiens
aaaaatatagtattc

SEQ ID NO: 635331 - DNA, 15 bp, Homo sapiens
aaaatatagtattct

SEQ ID NO: 635332 - DNA, 15 bp, Homo sapiens
aaatatagtattctc

SEQ ID NO: 635333 - DNA, 15 bp, Homo sapiens
aatatagtattctca

SEQ ID NO: 635334 - DNA, 15 bp, Homo sapiens
atatagtattctcag

SEQ ID NO: 635335 - DNA, 15 bp, Homo sapiens
tatagtattctcagg

SEQ ID NO: 635336 - DNA, 15 bp, Homo sapiens
atagtattctcagga

SEQ ID NO: 635337 - DNA, 15 bp, Homo sapiens
tagtattctcaggat

SEQ ID NO: 635338 - DNA, 15 bp, Homo sapiens
agtattctcaggatg

SEQ ID NO: 635339 - DNA, 15 bp, Homo sapiens
gtattctcaggatgc

SEQ ID NO: 635340 - DNA, 15 bp, Homo sapiens
tattctcaggatgca

SEQ ID NO: 635341 - DNA, 15 bp, Homo sapiens
attctcaggatgcaa

SEQ ID NO: 635342 - DNA, 15 bp, Homo sapiens
ttctcaggatgcaaa

SEQ ID NO: 635343 - DNA, 15 bp, Homo sapiens
tctcaggatgcaaaa

SEQ ID NO: 635344 - DNA, 15 bp, Homo sapiens
ctcaggatgcaaaac

SEQ ID NO: 635345 - DNA, 15 bp, Homo sapiens
tcaggatgcaaaacc

SEQ ID NO: 635346 - DNA, 15 bp, Homo sapiens
caggatgcaaaacca

SEQ ID NO: 635347 - DNA, 15 bp, Homo sapiens
aggatgcaaaaccag

SEQ ID NO: 635348 - DNA, 15 bp, Homo sapiens
ggatgcaaaaccagt

SEQ ID NO: 635349 - DNA, 15 bp, Homo sapiens
gatgcaaaaccagtg

SEQ ID NO: 635350 - DNA, 15 bp, Homo sapiens
atgcaaaaccagtgg

SEQ ID NO: 635351 - DNA, 15 bp, Homo sapiens
tgcaaaaccagtgga

SEQ ID NO: 635352 - DNA, 15 bp, Homo sapiens
gcaaaaccagtggat

SEQ ID NO: 635353 - DNA, 15 bp, Homo sapiens
caaaaccagtggata

SEQ ID NO: 635354 - DNA, 15 bp, Homo sapiens
aaaaccagtggatat

SEQ ID NO: 635355 - DNA, 15 bp, Homo sapiens
aaaccagtggatatg

SEQ ID NO: 635356 - DNA, 15 bp, Homo sapiens
aaccagtggatatgt

SEQ ID NO: 635357 - DNA, 15 bp, Homo sapiens
accagtggatatgta

SEQ ID NO: 635358 - DNA, 15 bp, Homo sapiens
ccagtggatatgtag

SEQ ID NO: 635359 - DNA, 15 bp, Homo sapiens
cagtggatatgtaga

SEQ ID NO: 635360 - DNA, 15 bp, Homo sapiens
agtggatatgtagag

SEQ ID NO: 635361 - DNA, 15 bp, Homo sapiens
gtggatatgtagagc

SEQ ID NO: 635362 - DNA, 15 bp, Homo sapiens
tggatatgtagagcc

SEQ ID NO: 635363 - DNA, 15 bp, Homo sapiens
ggatatgtagagcca

SEQ ID NO: 635364 - DNA, 15 bp, Homo sapiens
gatatgtagagccaa

SEQ ID NO: 635365 - DNA, 15 bp, Homo sapiens
atatgtagagccaat

SEQ ID NO: 635366 - DNA, 15 bp, Homo sapiens
tatgtagagccaatt

SEQ ID NO: 635367 - DNA, 15 bp, Homo sapiens
atgtagagccaattt

SEQ ID NO: 635368 - DNA, 15 bp, Homo sapiens
tgtagagccaatttt

SEQ ID NO: 635369 - DNA, 15 bp, Homo sapiens
gtagagccaattttt

SEQ ID NO: 635370 - DNA, 15 bp, Homo sapiens
tagagccaatttttc

SEQ ID NO: 635371 - DNA, 15 bp, Homo sapiens
agagccaatttttcc

SEQ ID NO: 635372 - DNA, 15 bp, Homo sapiens
gagccaatttttcct

SEQ ID NO: 635373 - DNA, 15 bp, Homo sapiens
agccaatttttccta

SEQ ID NO: 635374 - DNA, 15 bp, Homo sapiens
gccaatttttcctat

SEQ ID NO: 635375 - DNA, 15 bp, Homo sapiens
ccaatttttcctatg

SEQ ID NO: 635376 - DNA, 15 bp, Homo sapiens
caatttttcctatgc

SEQ ID NO: 635377 - DNA, 15 bp, Homo sapiens
aatttttcctatgca

SEQ ID NO: 635378 - DNA, 15 bp, Homo sapiens
atttttcctatgcac

SEQ ID NO: 635379 - DNA, 15 bp, Homo sapiens
tttttcctatgcaca

SEQ ID NO: 635380 - DNA, 15 bp, Homo sapiens
ttttcctatgcacaa

SEQ ID NO: 635381 - DNA, 15 bp, Homo sapiens
tttcctatgcacaag

SEQ ID NO: 635382 - DNA, 15 bp, Homo sapiens
ttcctatgcacaagt

SEQ ID NO: 635383 - DNA, 15 bp, Homo sapiens
tcctatgcacaagtt

SEQ ID NO: 635384 - DNA, 15 bp, Homo sapiens
cctatgcacaagttc

SEQ ID NO: 635385 - DNA, 15 bp, Homo sapiens
ctatgcacaagttct

SEQ ID NO: 635386 - DNA, 15 bp, Homo sapiens
tatgcacaagttctg

SEQ ID NO: 635387 - DNA, 15 bp, Homo sapiens
atgcacaagttctgc

SEQ ID NO: 635388 - DNA, 15 bp, Homo sapiens
tgcacaagttctgca

SEQ ID NO: 635389 - DNA, 15 bp, Homo sapiens
gcacaagttctgcaa

SEQ ID NO: 635390 - DNA, 15 bp, Homo sapiens
cacaagttctgcaag

SEQ ID NO: 635391 - DNA, 15 bp, Homo sapiens
acaagttctgcaagc

SEQ ID NO: 635392 - DNA, 15 bp, Homo sapiens
caagttctgcaagcc

SEQ ID NO: 635393 - DNA, 15 bp, Homo sapiens
aagttctgcaagcca

SEQ ID NO: 635394 - DNA, 15 bp, Homo sapiens
agttctgcaagccaa

SEQ ID NO: 635395 - DNA, 15 bp, Homo sapiens
gttctgcaagccaac

SEQ ID NO: 635396 - DNA, 15 bp, Homo sapiens
ttctgcaagccaact

SEQ ID NO: 635397 - DNA, 15 bp, Homo sapiens
tctgcaagccaactg

SEQ ID NO: 635398 - DNA, 15 bp, Homo sapiens
ctgcaagccaactgt

SEQ ID NO: 635399 - DNA, 15 bp, Homo sapiens
tgcaagccaactgta

SEQ ID NO: 635400 - DNA, 15 bp, Homo sapiens
gcaagccaactgtag

SEQ ID NO: 635401 - DNA, 15 bp, Homo sapiens
caagccaactgtagg

SEQ ID NO: 635402 - DNA, 15 bp, Homo sapiens
aagccaactgtagga

SEQ ID NO: 635403 - DNA, 15 bp, Homo sapiens
agccaactgtaggac

SEQ ID NO: 635404 - DNA, 15 bp, Homo sapiens
gccaactgtaggact

SEQ ID NO: 635405 - DNA, 15 bp, Homo sapiens
ccaactgtaggactt

SEQ ID NO: 635406 - DNA, 15 bp, Homo sapiens
caactgtaggacttg

SEQ ID NO: 635407 - DNA, 15 bp, Homo sapiens
aactgtaggacttgt

SEQ ID NO: 635408 - DNA, 15 bp, Homo sapiens
actgtaggacttgtg

SEQ ID NO: 635409 - DNA, 15 bp, Homo sapiens
ctgtaggacttgtgt

SEQ ID NO: 635410 - DNA, 15 bp, Homo sapiens
tgtaggacttgtgta

SEQ ID NO: 635411 - DNA, 15 bp, Homo sapiens
gtaggacttgtgtat

SEQ ID NO: 635412 - DNA, 15 bp, Homo sapiens
taggacttgtgtata

SEQ ID NO: 635413 - DNA, 15 bp, Homo sapiens
aggacttgtgtatac

SEQ ID NO: 635414 - DNA, 15 bp, Homo sapiens
ggacttgtgtatacc

SEQ ID NO: 635415 - DNA, 15 bp, Homo sapiens
gacttgtgtatacct

SEQ ID NO: 635416 - DNA, 15 bp, Homo sapiens
acttgtgtatacctg

SEQ ID NO: 635417 - DNA, 15 bp, Homo sapiens
cttgtgtatacctgg

SEQ ID NO: 635418 - DNA, 15 bp, Homo sapiens
ttgtgtatacctgga

SEQ ID NO: 635419 - DNA, 15 bp, Homo sapiens
tgtgtatacctggat

SEQ ID NO: 635420 - DNA, 15 bp, Homo sapiens
gtgtatacctggatt

SEQ ID NO: 635421 - DNA, 15 bp, Homo sapiens
tgtatacctggattt

SEQ ID NO: 635422 - DNA, 15 bp, Homo sapiens
gtatacctggatttt

SEQ ID NO: 635423 - DNA, 15 bp, Homo sapiens
tatacctggattttg

SEQ ID NO: 635424 - DNA, 15 bp, Homo sapiens
atacctggattttgg

SEQ ID NO: 635425 - DNA, 15 bp, Homo sapiens
tacctggattttggt

SEQ ID NO: 635426 - DNA, 15 bp, Homo sapiens
acctggattttggta

SEQ ID NO: 635427 - DNA, 15 bp, Homo sapiens
cctggattttggtat

SEQ ID NO: 635428 - DNA, 15 bp, Homo sapiens
ctggattttggtata

SEQ ID NO: 635429 - DNA, 15 bp, Homo sapiens
tggattttggtatat

SEQ ID NO: 635430 - DNA, 15 bp, Homo sapiens
ggattttggtatatg

SEQ ID NO: 635431 - DNA, 15 bp, Homo sapiens
gattttggtatatgc

SEQ ID NO: 635432 - DNA, 15 bp, Homo sapiens
attttggtatatgca

SEQ ID NO: 635433 - DNA, 15 bp, Homo sapiens
ttttggtatatgcaa

SEQ ID NO: 635434 - DNA, 15 bp, Homo sapiens
tttggtatatgcaaa

SEQ ID NO: 635435 - DNA, 15 bp, Homo sapiens
ttggtatatgcaaat

SEQ ID NO: 635436 - DNA, 15 bp, Homo sapiens
tggtatatgcaaatt

SEQ ID NO: 635437 - DNA, 15 bp, Homo sapiens
ggtatatgcaaattt

SEQ ID NO: 635438 - DNA, 15 bp, Homo sapiens
gtatatgcaaatttt

SEQ ID NO: 635439 - DNA, 15 bp, Homo sapiens
tatatgcaaattttg

SEQ ID NO: 635440 - DNA, 15 bp, Homo sapiens
atatgcaaattttgg

SEQ ID NO: 635441 - DNA, 15 bp, Homo sapiens
tatgcaaattttggt

SEQ ID NO: 635442 - DNA, 15 bp, Homo sapiens
atgcaaattttggta

SEQ ID NO: 635443 - DNA, 15 bp, Homo sapiens
tgcaaattttggtat

SEQ ID NO: 635444 - DNA, 15 bp, Homo sapiens
gcaaattttggtata

SEQ ID NO: 635445 - DNA, 15 bp, Homo sapiens
caaattttggtatac

SEQ ID NO: 635446 - DNA, 15 bp, Homo sapiens
aaattttggtataca

SEQ ID NO: 635447 - DNA, 15 bp, Homo sapiens
aattttggtatacat

SEQ ID NO: 635448 - DNA, 15 bp, Homo sapiens
attttggtatacatg

SEQ ID NO: 635449 - DNA, 15 bp, Homo sapiens
ttttggtatacatgg

SEQ ID NO: 635450 - DNA, 15 bp, Homo sapiens
tttggtatacatggg

SEQ ID NO: 635451 - DNA, 15 bp, Homo sapiens
ttggtatacatggga

SEQ ID NO: 635452 - DNA, 15 bp, Homo sapiens
tggtatacatgggag

SEQ ID NO: 635453 - DNA, 15 bp, Homo sapiens
ggtatacatgggagt

SEQ ID NO: 635454 - DNA, 15 bp, Homo sapiens
gtatacatgggagtg

SEQ ID NO: 635455 - DNA, 15 bp, Homo sapiens
tatacatgggagtgc

SEQ ID NO: 635456 - DNA, 15 bp, Homo sapiens
atacatgggagtgct

SEQ ID NO: 635457 - DNA, 15 bp, Homo sapiens
tacatgggagtgcta

SEQ ID NO: 635458 - DNA, 15 bp, Homo sapiens
acatgggagtgctag

SEQ ID NO: 635459 - DNA, 15 bp, Homo sapiens
catgggagtgctaga

SEQ ID NO: 635460 - DNA, 15 bp, Homo sapiens
atgggagtgctagaa

SEQ ID NO: 635461 - DNA, 15 bp, Homo sapiens
tgggagtgctagaac

SEQ ID NO: 635462 - DNA, 15 bp, Homo sapiens
gggagtgctagaacc

SEQ ID NO: 635463 - DNA, 15 bp, Homo sapiens
ggagtgctagaacca

SEQ ID NO: 635464 - DNA, 15 bp, Homo sapiens
gagtgctagaaccaa

SEQ ID NO: 635465 - DNA, 15 bp, Homo sapiens
agtgctagaaccaat

SEQ ID NO: 635466 - DNA, 15 bp, Homo sapiens
gtgctagaaccaatc

SEQ ID NO: 635467 - DNA, 15 bp, Homo sapiens
tgctagaaccaatct

SEQ ID NO: 635468 - DNA, 15 bp, Homo sapiens
gctagaaccaatctc

SEQ ID NO: 635469 - DNA, 15 bp, Homo sapiens
ctagaaccaatctcc

SEQ ID NO: 635470 - DNA, 15 bp, Homo sapiens
tagaaccaatctcct

SEQ ID NO: 635471 - DNA, 15 bp, Homo sapiens
agaaccaatctcctg

SEQ ID NO: 635472 - DNA, 15 bp, Homo sapiens
gaaccaatctcctgc

SEQ ID NO: 635473 - DNA, 15 bp, Homo sapiens
aaccaatctcctgca

SEQ ID NO: 635474 - DNA, 15 bp, Homo sapiens
accaatctcctgcat

SEQ ID NO: 635475 - DNA, 15 bp, Homo sapiens
ccaatctcctgcata

SEQ ID NO: 635476 - DNA, 15 bp, Homo sapiens
caatctcctgcatat

SEQ ID NO: 635477 - DNA, 15 bp, Homo sapiens
aatctcctgcatata

SEQ ID NO: 635478 - DNA, 15 bp, Homo sapiens
atctcctgcatatac

SEQ ID NO: 635479 - DNA, 15 bp, Homo sapiens
tctcctgcatatact

SEQ ID NO: 635480 - DNA, 15 bp, Homo sapiens
ctcctgcatatactg

SEQ ID NO: 635481 - DNA, 15 bp, Homo sapiens
tcctgcatatactga

SEQ ID NO: 635482 - DNA, 15 bp, Homo sapiens
cctgcatatactgag

SEQ ID NO: 635483 - DNA, 15 bp, Homo sapiens
ctgcatatactgagg

SEQ ID NO: 635484 - DNA, 15 bp, Homo sapiens
tgcatatactgaggg

SEQ ID NO: 635485 - DNA, 15 bp, Homo sapiens
gcatatactgaggga

SEQ ID NO: 635486 - DNA, 15 bp, Homo sapiens
catatactgagggac

SEQ ID NO: 635487 - DNA, 15 bp, Homo sapiens
atatactgagggaca

SEQ ID NO: 635488 - DNA, 15 bp, Homo sapiens
tatactgagggacat

SEQ ID NO: 635489 - DNA, 15 bp, Homo sapiens
atactgagggacatt

SEQ ID NO: 635490 - DNA, 15 bp, Homo sapiens
tactgagggacattt

SEQ ID NO: 635491 - DNA, 15 bp, Homo sapiens
actgagggacatttc

SEQ ID NO: 635492 - DNA, 15 bp, Homo sapiens
ctgagggacatttct

SEQ ID NO: 635493 - DNA, 15 bp, Homo sapiens
tgagggacatttcta

SEQ ID NO: 635494 - DNA, 15 bp, Homo sapiens
gagggacatttctat

SEQ ID NO: 635495 - DNA, 15 bp, Homo sapiens
agggacatttctata

SEQ ID NO: 635496 - DNA, 15 bp, Homo sapiens
gggacatttctatat

SEQ ID NO: 635497 - DNA, 15 bp, Homo sapiens
ggacatttctatata

SEQ ID NO: 635498 - DNA, 15 bp, Homo sapiens
gacatttctatataa

SEQ ID NO: 635499 - DNA, 15 bp, Homo sapiens
acatttctatataat

SEQ ID NO: 635500 - DNA, 15 bp, Homo sapiens
catttctatataatg

SEQ ID NO: 635501 - DNA, 15 bp, Homo sapiens
atttctatataatgt

SEQ ID NO: 635502 - DNA, 15 bp, Homo sapiens
tttctatataatgta

SEQ ID NO: 635503 - DNA, 15 bp, Homo sapiens
ttctatataatgtat

SEQ ID NO: 635504 - DNA, 15 bp, Homo sapiens
tctatataatgtatc

SEQ ID NO: 635505 - DNA, 15 bp, Homo sapiens
ctatataatgtatct

SEQ ID NO: 635506 - DNA, 15 bp, Homo sapiens
tatataatgtatcta

SEQ ID NO: 635507 - DNA, 15 bp, Homo sapiens
atataatgtatctaa

SEQ ID NO: 635508 - DNA, 15 bp, Homo sapiens
tataatgtatctaag

SEQ ID NO: 635509 - DNA, 15 bp, Homo sapiens
ataatgtatctaagt

SEQ ID NO: 635510 - DNA, 15 bp, Homo sapiens
taatgtatctaagtt

SEQ ID NO: 635511 - DNA, 15 bp, Homo sapiens
aatgtatctaagttt

SEQ ID NO: 635512 - DNA, 15 bp, Homo sapiens
atgtatctaagtttt

SEQ ID NO: 635513 - DNA, 15 bp, Homo sapiens
tgtatctaagttttg

SEQ ID NO: 635514 - DNA, 15 bp, Homo sapiens
gtatctaagttttga

SEQ ID NO: 635515 - DNA, 15 bp, Homo sapiens
tatctaagttttgac

SEQ ID NO: 635516 - DNA, 15 bp, Homo sapiens
atctaagttttgact

SEQ ID NO: 635517 - DNA, 15 bp, Homo sapiens
tctaagttttgactg

SEQ ID NO: 635518 - DNA, 15 bp, Homo sapiens
ctaagttttgactga

SEQ ID NO: 635519 - DNA, 15 bp, Homo sapiens
taagttttgactgat

SEQ ID NO: 635520 - DNA, 15 bp, Homo sapiens
aagttttgactgata

SEQ ID NO: 635521 - DNA, 15 bp, Homo sapiens
agttttgactgatat

SEQ ID NO: 635522 - DNA, 15 bp, Homo sapiens
gttttgactgatatc

SEQ ID NO: 635523 - DNA, 15 bp, Homo sapiens
ttttgactgatatct

SEQ ID NO: 635524 - DNA, 15 bp, Homo sapiens
tttgactgatatcta

SEQ ID NO: 635525 - DNA, 15 bp, Homo sapiens
ttgactgatatctat

SEQ ID NO: 635526 - DNA, 15 bp, Homo sapiens
tgactgatatctatt

SEQ ID NO: 635527 - DNA, 15 bp, Homo sapiens
gactgatatctattc

SEQ ID NO: 635528 - DNA, 15 bp, Homo sapiens
actgatatctattcc

SEQ ID NO: 635529 - DNA, 15 bp, Homo sapiens
ctgatatctattcca

SEQ ID NO: 635530 - DNA, 15 bp, Homo sapiens
tgatatctattccaa

SEQ ID NO: 635531 - DNA, 15 bp, Homo sapiens
gatatctattccaat

SEQ ID NO: 635532 - DNA, 15 bp, Homo sapiens
atatctattccaatc

SEQ ID NO: 635533 - DNA, 15 bp, Homo sapiens
tatctattccaatca

SEQ ID NO: 635534 - DNA, 15 bp, Homo sapiens
atctattccaatcaa

SEQ ID NO: 635535 - DNA, 15 bp, Homo sapiens
tctattccaatcaat

SEQ ID NO: 635536 - DNA, 15 bp, Homo sapiens
ctattccaatcaatt

SEQ ID NO: 635537 - DNA, 15 bp, Homo sapiens
tattccaatcaattc

SEQ ID NO: 635538 - DNA, 15 bp, Homo sapiens
attccaatcaattct

SEQ ID NO: 635539 - DNA, 15 bp, Homo sapiens
ttccaatcaattctt

SEQ ID NO: 635540 - DNA, 15 bp, Homo sapiens
tccaatcaattcttg

SEQ ID NO: 635541 - DNA, 15 bp, Homo sapiens
ccaatcaattcttgg

SEQ ID NO: 635542 - DNA, 15 bp, Homo sapiens
caatcaattcttggt

SEQ ID NO: 635543 - DNA, 15 bp, Homo sapiens
aatcaattcttggtg

SEQ ID NO: 635544 - DNA, 15 bp, Homo sapiens
atcaattcttggtgt

SEQ ID NO: 635545 - DNA, 15 bp, Homo sapiens
tcaattcttggtgtc

SEQ ID NO: 635546 - DNA, 15 bp, Homo sapiens
caattcttggtgtct

SEQ ID NO: 635547 - DNA, 15 bp, Homo sapiens
aattcttggtgtcta

SEQ ID NO: 635548 - DNA, 15 bp, Homo sapiens
attcttggtgtctac

SEQ ID NO: 635549 - DNA, 15 bp, Homo sapiens
ttcttggtgtctact

SEQ ID NO: 635550 - DNA, 15 bp, Homo sapiens
tcttggtgtctactg

SEQ ID NO: 635551 - DNA, 15 bp, Homo sapiens
cttggtgtctactgt

SEQ ID NO: 635552 - DNA, 15 bp, Homo sapiens
ttggtgtctactgtt

SEQ ID NO: 635553 - DNA, 15 bp, Homo sapiens
tggtgtctactgtta

SEQ ID NO: 635554 - DNA, 15 bp, Homo sapiens
ggtgtctactgttaa

SEQ ID NO: 635555 - DNA, 15 bp, Homo sapiens
gtgtctactgttaat

SEQ ID NO: 635556 - DNA, 15 bp, Homo sapiens
tgtctactgttaatt

SEQ ID NO: 635557 - DNA, 15 bp, Homo sapiens
gtctactgttaattt

SEQ ID NO: 635558 - DNA, 15 bp, Homo sapiens
tctactgttaatttg

SEQ ID NO: 635559 - DNA, 15 bp, Homo sapiens
ctactgttaatttga

SEQ ID NO: 635560 - DNA, 15 bp, Homo sapiens
tactgttaatttgaa

SEQ ID NO: 635561 - DNA, 15 bp, Homo sapiens
actgttaatttgaag

SEQ ID NO: 635562 - DNA, 15 bp, Homo sapiens
ctgttaatttgaaga

SEQ ID NO: 635563 - DNA, 15 bp, Homo sapiens
tgttaatttgaagaa

SEQ ID NO: 635564 - DNA, 15 bp, Homo sapiens
gttaatttgaagaat

SEQ ID NO: 635565 - DNA, 15 bp, Homo sapiens
ttaatttgaagaatc

SEQ ID NO: 635566 - DNA, 15 bp, Homo sapiens
taatttgaagaatca

SEQ ID NO: 635567 - DNA, 15 bp, Homo sapiens
aatttgaagaatcag

SEQ ID NO: 635568 - DNA, 15 bp, Homo sapiens
atttgaagaatcagg

SEQ ID NO: 635569 - DNA, 15 bp, Homo sapiens
tttgaagaatcaggt

SEQ ID NO: 635570 - DNA, 15 bp, Homo sapiens
ttgaagaatcaggta

SEQ ID NO: 635571 - DNA, 15 bp, Homo sapiens
tgaagaatcaggtaa

SEQ ID NO: 635572 - DNA, 15 bp, Homo sapiens
gaagaatcaggtaat

SEQ ID NO: 635573 - DNA, 15 bp, Homo sapiens
aagaatcaggtaatt

SEQ ID NO: 635574 - DNA, 15 bp, Homo sapiens
agaatcaggtaattg

SEQ ID NO: 635575 - DNA, 15 bp, Homo sapiens
gaatcaggtaattgc

SEQ ID NO: 635576 - DNA, 15 bp, Homo sapiens
aatcaggtaattgct

SEQ ID NO: 635577 - DNA, 15 bp, Homo sapiens
atcaggtaattgctt

SEQ ID NO: 635578 - DNA, 15 bp, Homo sapiens
tcaggtaattgcttc

SEQ ID NO: 635579 - DNA, 15 bp, Homo sapiens
caggtaattgcttct

SEQ ID NO: 635580 - DNA, 15 bp, Homo sapiens
aggtaattgcttctg

SEQ ID NO: 635581 - DNA, 15 bp, Homo sapiens
ggtaattgcttctgg

SEQ ID NO: 635582 - DNA, 15 bp, Homo sapiens
gtaattgcttctgga

SEQ ID NO: 635583 - DNA, 15 bp, Homo sapiens
taattgcttctggaa

SEQ ID NO: 635584 - DNA, 15 bp, Homo sapiens
aattgcttctggaaa

SEQ ID NO: 635585 - DNA, 15 bp, Homo sapiens
attgcttctggaaaa

SEQ ID NO: 635586 - DNA, 15 bp, Homo sapiens
ttgcttctggaaaat

SEQ ID NO: 635587 - DNA, 15 bp, Homo sapiens
tgcttctggaaaatt

SEQ ID NO: 635588 - DNA, 15 bp, Homo sapiens
gcttctggaaaattc

SEQ ID NO: 635589 - DNA, 15 bp, Homo sapiens
cttctggaaaattct

SEQ ID NO: 635590 - DNA, 15 bp, Homo sapiens
ttctggaaaattctt

SEQ ID NO: 635591 - DNA, 15 bp, Homo sapiens
tctggaaaattctta

SEQ ID NO: 635592 - DNA, 15 bp, Homo sapiens
ctggaaaattcttag

SEQ ID NO: 635593 - DNA, 15 bp, Homo sapiens
tggaaaattcttagc

SEQ ID NO: 635594 - DNA, 15 bp, Homo sapiens
ggaaaattcttagca

SEQ ID NO: 635595 - DNA, 15 bp, Homo sapiens
gaaaattcttagcaa

SEQ ID NO: 635596 - DNA, 15 bp, Homo sapiens
aaaattcttagcaat

SEQ ID NO: 635597 - DNA, 15 bp, Homo sapiens
aaattcttagcaatt

SEQ ID NO: 635598 - DNA, 15 bp, Homo sapiens
aattcttagcaatta

SEQ ID NO: 635599 - DNA, 15 bp, Homo sapiens
attcttagcaattat

SEQ ID NO: 635600 - DNA, 15 bp, Homo sapiens
ttcttagcaattatc

SEQ ID NO: 635601 - DNA, 15 bp, Homo sapiens
tcttagcaattatct

SEQ ID NO: 635602 - DNA, 15 bp, Homo sapiens
cttagcaattatctc

SEQ ID NO: 635603 - DNA, 15 bp, Homo sapiens
ttagcaattatctct

SEQ ID NO: 635604 - DNA, 15 bp, Homo sapiens
tagcaattatctctt

SEQ ID NO: 635605 - DNA, 15 bp, Homo sapiens
agcaattatctcttt

SEQ ID NO: 635606 - DNA, 15 bp, Homo sapiens
gcaattatctcttta

SEQ ID NO: 635607 - DNA, 15 bp, Homo sapiens
caattatctctttaa

SEQ ID NO: 635608 - DNA, 15 bp, Homo sapiens
aattatctctttaat

SEQ ID NO: 635609 - DNA, 15 bp, Homo sapiens
attatctctttaatt

SEQ ID NO: 635610 - DNA, 15 bp, Homo sapiens
ttatctctttaatta

SEQ ID NO: 635611 - DNA, 15 bp, Homo sapiens
tatctctttaattat

SEQ ID NO: 635612 - DNA, 15 bp, Homo sapiens
atctctttaattatt

SEQ ID NO: 635613 - DNA, 15 bp, Homo sapiens
tctctttaattatta

SEQ ID NO: 635614 - DNA, 15 bp, Homo sapiens
ctctttaattattac

SEQ ID NO: 635615 - DNA, 15 bp, Homo sapiens
tctttaattattaca

SEQ ID NO: 635616 - DNA, 15 bp, Homo sapiens
ctttaattattacac

SEQ ID NO: 635617 - DNA, 15 bp, Homo sapiens
tttaattattacact

SEQ ID NO: 635618 - DNA, 15 bp, Homo sapiens
ttaattattacactt

SEQ ID NO: 635619 - DNA, 15 bp, Homo sapiens
taattattacacttc

SEQ ID NO: 635620 - DNA, 15 bp, Homo sapiens
aattattacacttct

SEQ ID NO: 635621 - DNA, 15 bp, Homo sapiens
attattacacttctg

SEQ ID NO: 635622 - DNA, 15 bp, Homo sapiens
ttattacacttctgt

SEQ ID NO: 635623 - DNA, 15 bp, Homo sapiens
tattacacttctgtc

SEQ ID NO: 635624 - DNA, 15 bp, Homo sapiens
attacacttctgtca

SEQ ID NO: 635625 - DNA, 15 bp, Homo sapiens
ttacacttctgtcat

SEQ ID NO: 635626 - DNA, 15 bp, Homo sapiens
tacacttctgtcatt

SEQ ID NO: 635627 - DNA, 15 bp, Homo sapiens
acacttctgtcattc

SEQ ID NO: 635628 - DNA, 15 bp, Homo sapiens
cacttctgtcattct

SEQ ID NO: 635629 - DNA, 15 bp, Homo sapiens
acttctgtcattctc

SEQ ID NO: 635630 - DNA, 15 bp, Homo sapiens
cttctgtcattctcc

SEQ ID NO: 635631 - DNA, 15 bp, Homo sapiens
ttctgtcattctcca

SEQ ID NO: 635632 - DNA, 15 bp, Homo sapiens
tctgtcattctccac

SEQ ID NO: 635633 - DNA, 15 bp, Homo sapiens
ctgtcattctccact

SEQ ID NO: 635634 - DNA, 15 bp, Homo sapiens
tgtcattctccactc

SEQ ID NO: 635635 - DNA, 15 bp, Homo sapiens
gtcattctccactct

SEQ ID NO: 635636 - DNA, 15 bp, Homo sapiens
tcattctccactctc

SEQ ID NO: 635637 - DNA, 15 bp, Homo sapiens
cattctccactctct

SEQ ID NO: 635638 - DNA, 15 bp, Homo sapiens
attctccactctctg

SEQ ID NO: 635639 - DNA, 15 bp, Homo sapiens
ttctccactctctgc

SEQ ID NO: 635640 - DNA, 15 bp, Homo sapiens
tctccactctctgct

SEQ ID NO: 635641 - DNA, 15 bp, Homo sapiens
ctccactctctgctt

SEQ ID NO: 635642 - DNA, 15 bp, Homo sapiens
tccactctctgcttc

SEQ ID NO: 635643 - DNA, 15 bp, Homo sapiens
ccactctctgcttct

SEQ ID NO: 635644 - DNA, 15 bp, Homo sapiens
cactctctgcttctg

SEQ ID NO: 635645 - DNA, 15 bp, Homo sapiens
actctctgcttctgg

SEQ ID NO: 635646 - DNA, 15 bp, Homo sapiens
ctctctgcttctggg

SEQ ID NO: 635647 - DNA, 15 bp, Homo sapiens
tctctgcttctggga

SEQ ID NO: 635648 - DNA, 15 bp, Homo sapiens
ctctgcttctgggat

SEQ ID NO: 635649 - DNA, 15 bp, Homo sapiens
tctgcttctgggatt

SEQ ID NO: 635650 - DNA, 15 bp, Homo sapiens
ctgcttctgggattc

SEQ ID NO: 635651 - DNA, 15 bp, Homo sapiens
tgcttctgggattcc

SEQ ID NO: 635652 - DNA, 15 bp, Homo sapiens
gcttctgggattcca

SEQ ID NO: 635653 - DNA, 15 bp, Homo sapiens
cttctgggattccaa

SEQ ID NO: 635654 - DNA, 15 bp, Homo sapiens
ttctgggattccaat

SEQ ID NO: 635655 - DNA, 15 bp, Homo sapiens
tctgggattccaatt

SEQ ID NO: 635656 - DNA, 15 bp, Homo sapiens
ctgggattccaatta

SEQ ID NO: 635657 - DNA, 15 bp, Homo sapiens
tgggattccaattag

SEQ ID NO: 635658 - DNA, 15 bp, Homo sapiens
gggattccaattagg

SEQ ID NO: 635659 - DNA, 15 bp, Homo sapiens
ggattccaattaggt

SEQ ID NO: 635660 - DNA, 15 bp, Homo sapiens
gattccaattaggtg

SEQ ID NO: 635661 - DNA, 15 bp, Homo sapiens
attccaattaggtga

SEQ ID NO: 635662 - DNA, 15 bp, Homo sapiens
ttccaattaggtgaa

SEQ ID NO: 635663 - DNA, 15 bp, Homo sapiens
tccaattaggtgaat

SEQ ID NO: 635664 - DNA, 15 bp, Homo sapiens
ccaattaggtgaatt

SEQ ID NO: 635665 - DNA, 15 bp, Homo sapiens
caattaggtgaattt

SEQ ID NO: 635666 - DNA, 15 bp, Homo sapiens
aattaggtgaattta

SEQ ID NO: 635667 - DNA, 15 bp, Homo sapiens
attaggtgaatttag

SEQ ID NO: 635668 - DNA, 15 bp, Homo sapiens
ttaggtgaatttaga

SEQ ID NO: 635669 - DNA, 15 bp, Homo sapiens
taggtgaatttagaa

SEQ ID NO: 635670 - DNA, 15 bp, Homo sapiens
aggtgaatttagaag

SEQ ID NO: 635671 - DNA, 15 bp, Homo sapiens
ggtgaatttagaaga

SEQ ID NO: 635672 - DNA, 15 bp, Homo sapiens
gtgaatttagaagat

SEQ ID NO: 635673 - DNA, 15 bp, Homo sapiens
tgaatttagaagatt

SEQ ID NO: 635674 - DNA, 15 bp, Homo sapiens
gaatttagaagattt

SEQ ID NO: 635675 - DNA, 15 bp, Homo sapiens
aatttagaagatttt

SEQ ID NO: 635676 - DNA, 15 bp, Homo sapiens
atttagaagattttc

SEQ ID NO: 635677 - DNA, 15 bp, Homo sapiens
tttagaagattttca

SEQ ID NO: 635678 - DNA, 15 bp, Homo sapiens
ttagaagattttcat

SEQ ID NO: 635679 - DNA, 15 bp, Homo sapiens
tagaagattttcata

SEQ ID NO: 635680 - DNA, 15 bp, Homo sapiens
agaagattttcataa

SEQ ID NO: 635681 - DNA, 15 bp, Homo sapiens
gaagattttcataac

SEQ ID NO: 635682 - DNA, 15 bp, Homo sapiens
aagattttcataact

SEQ ID NO: 635683 - DNA, 15 bp, Homo sapiens
agattttcataactc

SEQ ID NO: 635684 - DNA, 15 bp, Homo sapiens
gattttcataactcc

SEQ ID NO: 635685 - DNA, 15 bp, Homo sapiens
attttcataactccc

SEQ ID NO: 635686 - DNA, 15 bp, Homo sapiens
ttttcataactcccc

SEQ ID NO: 635687 - DNA, 15 bp, Homo sapiens
tttcataactccccc

SEQ ID NO: 635688 - DNA, 15 bp, Homo sapiens
ttcataactccccct

SEQ ID NO: 635689 - DNA, 15 bp, Homo sapiens
tcataactccccctt

SEQ ID NO: 635690 - DNA, 15 bp, Homo sapiens
cataactcccccttt

SEQ ID NO: 635691 - DNA, 15 bp, Homo sapiens
ataactccccctttc

SEQ ID NO: 635692 - DNA, 15 bp, Homo sapiens
taactccccctttct

SEQ ID NO: 635693 - DNA, 15 bp, Homo sapiens
aactccccctttctc

SEQ ID NO: 635694 - DNA, 15 bp, Homo sapiens
actccccctttctct

SEQ ID NO: 635695 - DNA, 15 bp, Homo sapiens
ctccccctttctctc

SEQ ID NO: 635696 - DNA, 15 bp, Homo sapiens
tccccctttctctct

SEQ ID NO: 635697 - DNA, 15 bp, Homo sapiens
ccccctttctctctt

SEQ ID NO: 635698 - DNA, 15 bp, Homo sapiens
cccctttctctcttt

SEQ ID NO: 635699 - DNA, 15 bp, Homo sapiens
ccctttctctctttt

SEQ ID NO: 635700 - DNA, 15 bp, Homo sapiens
cctttctctctttta

SEQ ID NO: 635701 - DNA, 15 bp, Homo sapiens
ctttctctcttttat

SEQ ID NO: 635702 - DNA, 15 bp, Homo sapiens
tttctctcttttatt

SEQ ID NO: 635703 - DNA, 15 bp, Homo sapiens
ttctctcttttattt

SEQ ID NO: 635704 - DNA, 15 bp, Homo sapiens
tctctcttttatttg

SEQ ID NO: 635705 - DNA, 15 bp, Homo sapiens
ctctcttttatttgt

SEQ ID NO: 635706 - DNA, 15 bp, Homo sapiens
tctcttttatttgta

SEQ ID NO: 635707 - DNA, 15 bp, Homo sapiens
ctcttttatttgtac

SEQ ID NO: 635708 - DNA, 15 bp, Homo sapiens
tcttttatttgtaca

SEQ ID NO: 635709 - DNA, 15 bp, Homo sapiens
cttttatttgtacat

SEQ ID NO: 635710 - DNA, 15 bp, Homo sapiens
ttttatttgtacatg

SEQ ID NO: 635711 - DNA, 15 bp, Homo sapiens
tttatttgtacatgt

SEQ ID NO: 635712 - DNA, 15 bp, Homo sapiens
ttatttgtacatgtg

SEQ ID NO: 635713 - DNA, 15 bp, Homo sapiens
tatttgtacatgtgt

SEQ ID NO: 635714 - DNA, 15 bp, Homo sapiens
atttgtacatgtgtg

SEQ ID NO: 635715 - DNA, 15 bp, Homo sapiens
tttgtacatgtgtgt

SEQ ID NO: 635716 - DNA, 15 bp, Homo sapiens
ttgtacatgtgtgta

SEQ ID NO: 635717 - DNA, 15 bp, Homo sapiens
tgtacatgtgtgtat

SEQ ID NO: 635718 - DNA, 15 bp, Homo sapiens
gtacatgtgtgtata

SEQ ID NO: 635719 - DNA, 15 bp, Homo sapiens
tacatgtgtgtatat

SEQ ID NO: 635720 - DNA, 15 bp, Homo sapiens
acatgtgtgtatata

SEQ ID NO: 635721 - DNA, 15 bp, Homo sapiens
catgtgtgtatatat

SEQ ID NO: 635722 - DNA, 15 bp, Homo sapiens
atgtgtgtatatatg

SEQ ID NO: 635723 - DNA, 15 bp, Homo sapiens
tgtgtgtatatatgt

SEQ ID NO: 635724 - DNA, 15 bp, Homo sapiens
gtgtgtatatatgta

SEQ ID NO: 635725 - DNA, 15 bp, Homo sapiens
tgtgtatatatgtat

SEQ ID NO: 635726 - DNA, 15 bp, Homo sapiens
gtgtatatatgtatg

SEQ ID NO: 635727 - DNA, 15 bp, Homo sapiens
tgtatatatgtatgt

SEQ ID NO: 635728 - DNA, 15 bp, Homo sapiens
gtatatatgtatgta

SEQ ID NO: 635729 - DNA, 15 bp, Homo sapiens
tatatatgtatgtaa

SEQ ID NO: 635730 - DNA, 15 bp, Homo sapiens
atatatgtatgtaat

SEQ ID NO: 635731 - DNA, 15 bp, Homo sapiens
tatatgtatgtaata

SEQ ID NO: 635732 - DNA, 15 bp, Homo sapiens
atatgtatgtaatac

SEQ ID NO: 635733 - DNA, 15 bp, Homo sapiens
tatgtatgtaataca

SEQ ID NO: 635734 - DNA, 15 bp, Homo sapiens
atgtatgtaatacat

SEQ ID NO: 635735 - DNA, 15 bp, Homo sapiens
tgtatgtaatacata

SEQ ID NO: 635736 - DNA, 15 bp, Homo sapiens
gtatgtaatacatat

SEQ ID NO: 635737 - DNA, 15 bp, Homo sapiens
tatgtaatacatatc

SEQ ID NO: 635738 - DNA, 15 bp, Homo sapiens
atgtaatacatatca

SEQ ID NO: 635739 - DNA, 15 bp, Homo sapiens
tgtaatacatatcac

SEQ ID NO: 635740 - DNA, 15 bp, Homo sapiens
gtaatacatatcacg

SEQ ID NO: 635741 - DNA, 15 bp, Homo sapiens
taatacatatcacgg

SEQ ID NO: 635742 - DNA, 15 bp, Homo sapiens
aatacatatcacggt

SEQ ID NO: 635743 - DNA, 15 bp, Homo sapiens
atacatatcacggtc

SEQ ID NO: 635744 - DNA, 15 bp, Homo sapiens
tacatatcacggtct

SEQ ID NO: 635745 - DNA, 15 bp, Homo sapiens
acatatcacggtctc

SEQ ID NO: 635746 - DNA, 15 bp, Homo sapiens
catatcacggtctcc

SEQ ID NO: 635747 - DNA, 15 bp, Homo sapiens
atatcacggtctcct

SEQ ID NO: 635748 - DNA, 15 bp, Homo sapiens
tatcacggtctcctc

SEQ ID NO: 635749 - DNA, 15 bp, Homo sapiens
atcacggtctcctcc

SEQ ID NO: 635750 - DNA, 15 bp, Homo sapiens
tcacggtctcctcct

SEQ ID NO: 635751 - DNA, 15 bp, Homo sapiens
cacggtctcctcctg

SEQ ID NO: 635752 - DNA, 15 bp, Homo sapiens
acggtctcctcctgt

SEQ ID NO: 635753 - DNA, 15 bp, Homo sapiens
cggtctcctcctgtg

SEQ ID NO: 635754 - DNA, 15 bp, Homo sapiens
ggtctcctcctgtga

SEQ ID NO: 635755 - DNA, 15 bp, Homo sapiens
gtctcctcctgtgac

SEQ ID NO: 635756 - DNA, 15 bp, Homo sapiens
tctcctcctgtgacc

SEQ ID NO: 635757 - DNA, 15 bp, Homo sapiens
ctcctcctgtgacct

SEQ ID NO: 635758 - DNA, 15 bp, Homo sapiens
tcctcctgtgacctc

SEQ ID NO: 635759 - DNA, 15 bp, Homo sapiens
cctcctgtgacctcc

SEQ ID NO: 635760 - DNA, 15 bp, Homo sapiens
ctcctgtgacctcca

SEQ ID NO: 635761 - DNA, 15 bp, Homo sapiens
tcctgtgacctccat

SEQ ID NO: 635762 - DNA, 15 bp, Homo sapiens
cctgtgacctccatg

SEQ ID NO: 635763 - DNA, 15 bp, Homo sapiens
ctgtgacctccatgg

SEQ ID NO: 635764 - DNA, 15 bp, Homo sapiens
tgtgacctccatggg

SEQ ID NO: 635765 - DNA, 15 bp, Homo sapiens
gtgacctccatgggt

SEQ ID NO: 635766 - DNA, 15 bp, Homo sapiens
tgacctccatgggtc

SEQ ID NO: 635767 - DNA, 15 bp, Homo sapiens
gacctccatgggtct

SEQ ID NO: 635768 - DNA, 15 bp, Homo sapiens
acctccatgggtctg

SEQ ID NO: 635769 - DNA, 15 bp, Homo sapiens
cctccatgggtctgc

SEQ ID NO: 635770 - DNA, 15 bp, Homo sapiens
ctccatgggtctgca

SEQ ID NO: 635771 - DNA, 15 bp, Homo sapiens
tccatgggtctgcat

SEQ ID NO: 635772 - DNA, 15 bp, Homo sapiens
ccatgggtctgcatt

SEQ ID NO: 635773 - DNA, 15 bp, Homo sapiens
catgggtctgcattt

SEQ ID NO: 635774 - DNA, 15 bp, Homo sapiens
atgggtctgcatttc

SEQ ID NO: 635775 - DNA, 15 bp, Homo sapiens
tgggtctgcatttca

SEQ ID NO: 635776 - DNA, 15 bp, Homo sapiens
gggtctgcatttcat

SEQ ID NO: 635777 - DNA, 15 bp, Homo sapiens
ggtctgcatttcatc

SEQ ID NO: 635778 - DNA, 15 bp, Homo sapiens
gtctgcatttcatca

SEQ ID NO: 635779 - DNA, 15 bp, Homo sapiens
tctgcatttcatcat

SEQ ID NO: 635780 - DNA, 15 bp, Homo sapiens
ctgcatttcatcata

SEQ ID NO: 635781 - DNA, 15 bp, Homo sapiens
tgcatttcatcataa

SEQ ID NO: 635782 - DNA, 15 bp, Homo sapiens
gcatttcatcataag

SEQ ID NO: 635783 - DNA, 15 bp, Homo sapiens
catttcatcataagg

SEQ ID NO: 635784 - DNA, 15 bp, Homo sapiens
atttcatcataagga

SEQ ID NO: 635785 - DNA, 15 bp, Homo sapiens
tttcatcataaggaa

SEQ ID NO: 635786 - DNA, 15 bp, Homo sapiens
ttcatcataaggaat

SEQ ID NO: 635787 - DNA, 15 bp, Homo sapiens
tcatcataaggaata

SEQ ID NO: 635788 - DNA, 15 bp, Homo sapiens
catcataaggaatag

SEQ ID NO: 635789 - DNA, 15 bp, Homo sapiens
atcataaggaataga

SEQ ID NO: 635790 - DNA, 15 bp, Homo sapiens
tcataaggaatagat

SEQ ID NO: 635791 - DNA, 15 bp, Homo sapiens
cataaggaatagatg

SEQ ID NO: 635792 - DNA, 15 bp, Homo sapiens
ataaggaatagatgc

SEQ ID NO: 635793 - DNA, 15 bp, Homo sapiens
taaggaatagatgct

SEQ ID NO: 635794 - DNA, 15 bp, Homo sapiens
aaggaatagatgctt

SEQ ID NO: 635795 - DNA, 15 bp, Homo sapiens
aggaatagatgcttc

SEQ ID NO: 635796 - DNA, 15 bp, Homo sapiens
ggaatagatgcttca

SEQ ID NO: 635797 - DNA, 15 bp, Homo sapiens
gaatagatgcttcaa

SEQ ID NO: 635798 - DNA, 15 bp, Homo sapiens
aatagatgcttcaat

SEQ ID NO: 635799 - DNA, 15 bp, Homo sapiens
atagatgcttcaatg

SEQ ID NO: 635800 - DNA, 15 bp, Homo sapiens
tagatgcttcaatgg

SEQ ID NO: 635801 - DNA, 15 bp, Homo sapiens
agatgcttcaatggt

SEQ ID NO: 635802 - DNA, 15 bp, Homo sapiens
gatgcttcaatggtg

SEQ ID NO: 635803 - DNA, 15 bp, Homo sapiens
atgcttcaatggtgg

SEQ ID NO: 635804 - DNA, 15 bp, Homo sapiens
tgcttcaatggtggc

SEQ ID NO: 635805 - DNA, 15 bp, Homo sapiens
gcttcaatggtggcc

SEQ ID NO: 635806 - DNA, 15 bp, Homo sapiens
cttcaatggtggcca

SEQ ID NO: 635807 - DNA, 15 bp, Homo sapiens
ttcaatggtggccag

SEQ ID NO: 635808 - DNA, 15 bp, Homo sapiens
tcaatggtggccagc

SEQ ID NO: 635809 - DNA, 15 bp, Homo sapiens
caatggtggccagca

SEQ ID NO: 635810 - DNA, 15 bp, Homo sapiens
aatggtggccagcag

SEQ ID NO: 635811 - DNA, 15 bp, Homo sapiens
atggtggccagcagt

SEQ ID NO: 635812 - DNA, 15 bp, Homo sapiens
tggtggccagcagtt

SEQ ID NO: 635813 - DNA, 15 bp, Homo sapiens
ggtggccagcagttt

SEQ ID NO: 635814 - DNA, 15 bp, Homo sapiens
gtggccagcagtttc

SEQ ID NO: 635815 - DNA, 15 bp, Homo sapiens
tggccagcagtttcc

SEQ ID NO: 635816 - DNA, 15 bp, Homo sapiens
ggccagcagtttcct

SEQ ID NO: 635817 - DNA, 15 bp, Homo sapiens
gccagcagtttcctc

SEQ ID NO: 635818 - DNA, 15 bp, Homo sapiens
ccagcagtttcctca

SEQ ID NO: 635819 - DNA, 15 bp, Homo sapiens
cagcagtttcctcag

SEQ ID NO: 635820 - DNA, 15 bp, Homo sapiens
agcagtttcctcagg

SEQ ID NO: 635821 - DNA, 15 bp, Homo sapiens
gcagtttcctcaggg

SEQ ID NO: 635822 - DNA, 15 bp, Homo sapiens
cagtttcctcagggt

SEQ ID NO: 635823 - DNA, 15 bp, Homo sapiens
agtttcctcagggtc

SEQ ID NO: 635824 - DNA, 15 bp, Homo sapiens
gtttcctcagggtct

SEQ ID NO: 635825 - DNA, 15 bp, Homo sapiens
tttcctcagggtctt

SEQ ID NO: 635826 - DNA, 15 bp, Homo sapiens
ttcctcagggtcttc

SEQ ID NO: 635827 - DNA, 15 bp, Homo sapiens
tcctcagggtcttct

SEQ ID NO: 635828 - DNA, 15 bp, Homo sapiens
cctcagggtcttctc

SEQ ID NO: 635829 - DNA, 15 bp, Homo sapiens
ctcagggtcttctca

SEQ ID NO: 635830 - DNA, 15 bp, Homo sapiens
tcagggtcttctcag

SEQ ID NO: 635831 - DNA, 15 bp, Homo sapiens
cagggtcttctcagc

SEQ ID NO: 635832 - DNA, 15 bp, Homo sapiens
agggtcttctcagca

SEQ ID NO: 635833 - DNA, 15 bp, Homo sapiens
gggtcttctcagcag

SEQ ID NO: 635834 - DNA, 15 bp, Homo sapiens
ggtcttctcagcagt

SEQ ID NO: 635835 - DNA, 15 bp, Homo sapiens
gtcttctcagcagtg

SEQ ID NO: 635836 - DNA, 15 bp, Homo sapiens
tcttctcagcagtgc

SEQ ID NO: 635837 - DNA, 15 bp, Homo sapiens
cttctcagcagtgca

SEQ ID NO: 635838 - DNA, 15 bp, Homo sapiens
ttctcagcagtgcat

SEQ ID NO: 635839 - DNA, 15 bp, Homo sapiens
tctcagcagtgcatg

SEQ ID NO: 635840 - DNA, 15 bp, Homo sapiens
ctcagcagtgcatgg

SEQ ID NO: 635841 - DNA, 15 bp, Homo sapiens
tcagcagtgcatggg

SEQ ID NO: 635842 - DNA, 15 bp, Homo sapiens
cagcagtgcatgggg

SEQ ID NO: 635843 - DNA, 15 bp, Homo sapiens
agcagtgcatggggc

SEQ ID NO: 635844 - DNA, 15 bp, Homo sapiens
gcagtgcatggggcc

SEQ ID NO: 635845 - DNA, 15 bp, Homo sapiens
cagtgcatggggccc

SEQ ID NO: 635846 - DNA, 15 bp, Homo sapiens
agtgcatggggccca

SEQ ID NO: 635847 - DNA, 15 bp, Homo sapiens
gtgcatggggcccac

SEQ ID NO: 635848 - DNA, 15 bp, Homo sapiens
tgcatggggcccaca

SEQ ID NO: 635849 - DNA, 15 bp, Homo sapiens
gcatggggcccacat

SEQ ID NO: 635850 - DNA, 15 bp, Homo sapiens
catggggcccacatt

SEQ ID NO: 635851 - DNA, 15 bp, Homo sapiens
atggggcccacatta

SEQ ID NO: 635852 - DNA, 15 bp, Homo sapiens
tggggcccacattag

SEQ ID NO: 635853 - DNA, 15 bp, Homo sapiens
ggggcccacattagc

SEQ ID NO: 635854 - DNA, 15 bp, Homo sapiens
gggcccacattagct

SEQ ID NO: 635855 - DNA, 15 bp, Homo sapiens
ggcccacattagctc

SEQ ID NO: 635856 - DNA, 15 bp, Homo sapiens
gcccacattagctcc

SEQ ID NO: 635857 - DNA, 15 bp, Homo sapiens
cccacattagctcct

SEQ ID NO: 635858 - DNA, 15 bp, Homo sapiens
ccacattagctcctc

SEQ ID NO: 635859 - DNA, 15 bp, Homo sapiens
cacattagctcctct

SEQ ID NO: 635860 - DNA, 15 bp, Homo sapiens
acattagctcctctg

SEQ ID NO: 635861 - DNA, 15 bp, Homo sapiens
cattagctcctctgg

SEQ ID NO: 635862 - DNA, 15 bp, Homo sapiens
attagctcctctggc

SEQ ID NO: 635863 - DNA, 15 bp, Homo sapiens
ttagctcctctggct

SEQ ID NO: 635864 - DNA, 15 bp, Homo sapiens
tagctcctctggctc

SEQ ID NO: 635865 - DNA, 15 bp, Homo sapiens
agctcctctggctcc

SEQ ID NO: 635866 - DNA, 15 bp, Homo sapiens
gctcctctggctcca

SEQ ID NO: 635867 - DNA, 15 bp, Homo sapiens
ctcctctggctccaa

SEQ ID NO: 635868 - DNA, 15 bp, Homo sapiens
tcctctggctccaag

SEQ ID NO: 635869 - DNA, 15 bp, Homo sapiens
cctctggctccaagc

SEQ ID NO: 635870 - DNA, 15 bp, Homo sapiens
ctctggctccaagcg

SEQ ID NO: 635871 - DNA, 15 bp, Homo sapiens
tctggctccaagcga

SEQ ID NO: 635872 - DNA, 15 bp, Homo sapiens
ctggctccaagcgaa

SEQ ID NO: 635873 - DNA, 15 bp, Homo sapiens
tggctccaagcgaag

SEQ ID NO: 635874 - DNA, 15 bp, Homo sapiens
ggctccaagcgaaga

SEQ ID NO: 635875 - DNA, 15 bp, Homo sapiens
gctccaagcgaagag

SEQ ID NO: 635876 - DNA, 15 bp, Homo sapiens
ctccaagcgaagaga

SEQ ID NO: 635877 - DNA, 15 bp, Homo sapiens
tccaagcgaagagat

SEQ ID NO: 635878 - DNA, 15 bp, Homo sapiens
ccaagcgaagagatg

SEQ ID NO: 635879 - DNA, 15 bp, Homo sapiens
caagcgaagagatgg

SEQ ID NO: 635880 - DNA, 15 bp, Homo sapiens
aagcgaagagatggt

SEQ ID NO: 635881 - DNA, 15 bp, Homo sapiens
agcgaagagatggtc

SEQ ID NO: 635882 - DNA, 15 bp, Homo sapiens
gcgaagagatggtct

SEQ ID NO: 635883 - DNA, 15 bp, Homo sapiens
cgaagagatggtctc

SEQ ID NO: 635884 - DNA, 15 bp, Homo sapiens
gaagagatggtctct

SEQ ID NO: 635885 - DNA, 15 bp, Homo sapiens
aagagatggtctcta

SEQ ID NO: 635886 - DNA, 15 bp, Homo sapiens
agagatggtctctag

SEQ ID NO: 635887 - DNA, 15 bp, Homo sapiens
gagatggtctctagc

SEQ ID NO: 635888 - DNA, 15 bp, Homo sapiens
agatggtctctagcc

SEQ ID NO: 635889 - DNA, 15 bp, Homo sapiens
gatggtctctagccc

SEQ ID NO: 635890 - DNA, 15 bp, Homo sapiens
atggtctctagcccc

SEQ ID NO: 635891 - DNA, 15 bp, Homo sapiens
tggtctctagccccc

SEQ ID NO: 635892 - DNA, 15 bp, Homo sapiens
ggtctctagccccct

SEQ ID NO: 635893 - DNA, 15 bp, Homo sapiens
gtctctagccccctg

SEQ ID NO: 635894 - DNA, 15 bp, Homo sapiens
tctctagccccctgt

SEQ ID NO: 635895 - DNA, 15 bp, Homo sapiens
ctctagccccctgtt

SEQ ID NO: 635896 - DNA, 15 bp, Homo sapiens
tctagccccctgttt

SEQ ID NO: 635897 - DNA, 15 bp, Homo sapiens
ctagccccctgtttg

SEQ ID NO: 635898 - DNA, 15 bp, Homo sapiens
tagccccctgtttga

SEQ ID NO: 635899 - DNA, 15 bp, Homo sapiens
agccccctgtttgat

SEQ ID NO: 635900 - DNA, 15 bp, Homo sapiens
gccccctgtttgatt

SEQ ID NO: 635901 - DNA, 15 bp, Homo sapiens
ccccctgtttgattt

SEQ ID NO: 635902 - DNA, 15 bp, Homo sapiens
cccctgtttgatttg

SEQ ID NO: 635903 - DNA, 15 bp, Homo sapiens
ccctgtttgatttgg

SEQ ID NO: 635904 - DNA, 15 bp, Homo sapiens
cctgtttgatttggg

SEQ ID NO: 635905 - DNA, 15 bp, Homo sapiens
ctgtttgatttgggg

SEQ ID NO: 635906 - DNA, 15 bp, Homo sapiens
tgtttgatttggggc

SEQ ID NO: 635907 - DNA, 15 bp, Homo sapiens
gtttgatttggggca

SEQ ID NO: 635908 - DNA, 15 bp, Homo sapiens
tttgatttggggcac

SEQ ID NO: 635909 - DNA, 15 bp, Homo sapiens
ttgatttggggcact

SEQ ID NO: 635910 - DNA, 15 bp, Homo sapiens
tgatttggggcactt

SEQ ID NO: 635911 - DNA, 15 bp, Homo sapiens
gatttggggcactta

SEQ ID NO: 635912 - DNA, 15 bp, Homo sapiens
atttggggcacttac

SEQ ID NO: 635913 - DNA, 15 bp, Homo sapiens
tttggggcacttaca

SEQ ID NO: 635914 - DNA, 15 bp, Homo sapiens
ttggggcacttacag

SEQ ID NO: 635915 - DNA, 15 bp, Homo sapiens
tggggcacttacagt

SEQ ID NO: 635916 - DNA, 15 bp, Homo sapiens
ggggcacttacagtc

SEQ ID NO: 635917 - DNA, 15 bp, Homo sapiens
gggcacttacagtcc

SEQ ID NO: 635918 - DNA, 15 bp, Homo sapiens
ggcacttacagtcct

SEQ ID NO: 635919 - DNA, 15 bp, Homo sapiens
gcacttacagtcctc

SEQ ID NO: 635920 - DNA, 15 bp, Homo sapiens
cacttacagtcctct

SEQ ID NO: 635921 - DNA, 15 bp, Homo sapiens
acttacagtcctctc

SEQ ID NO: 635922 - DNA, 15 bp, Homo sapiens
cttacagtcctctcg

SEQ ID NO: 635923 - DNA, 15 bp, Homo sapiens
ttacagtcctctcgc

SEQ ID NO: 635924 - DNA, 15 bp, Homo sapiens
tacagtcctctcgcc

SEQ ID NO: 635925 - DNA, 15 bp, Homo sapiens
acagtcctctcgcca

SEQ ID NO: 635926 - DNA, 15 bp, Homo sapiens
cagtcctctcgccag

SEQ ID NO: 635927 - DNA, 15 bp, Homo sapiens
agtcctctcgccagc

SEQ ID NO: 635928 - DNA, 15 bp, Homo sapiens
gtcctctcgccagct

SEQ ID NO: 635929 - DNA, 15 bp, Homo sapiens
tcctctcgccagcta

SEQ ID NO: 635930 - DNA, 15 bp, Homo sapiens
cctctcgccagctaa

SEQ ID NO: 635931 - DNA, 15 bp, Homo sapiens
ctctcgccagctaaa

SEQ ID NO: 635932 - DNA, 15 bp, Homo sapiens
tctcgccagctaaac

SEQ ID NO: 635933 - DNA, 15 bp, Homo sapiens
ctcgccagctaaact

SEQ ID NO: 635934 - DNA, 15 bp, Homo sapiens
tcgccagctaaactc

SEQ ID NO: 635935 - DNA, 15 bp, Homo sapiens
cgccagctaaactct

SEQ ID NO: 635936 - DNA, 15 bp, Homo sapiens
gccagctaaactctc

SEQ ID NO: 635937 - DNA, 15 bp, Homo sapiens
ccagctaaactctca

SEQ ID NO: 635938 - DNA, 15 bp, Homo sapiens
cagctaaactctcac

SEQ ID NO: 635939 - DNA, 15 bp, Homo sapiens
agctaaactctcaca

SEQ ID NO: 635940 - DNA, 15 bp, Homo sapiens
gctaaactctcacac

SEQ ID NO: 635941 - DNA, 15 bp, Homo sapiens
ctaaactctcacact

SEQ ID NO: 635942 - DNA, 15 bp, Homo sapiens
taaactctcacactc

SEQ ID NO: 635943 - DNA, 15 bp, Homo sapiens
aaactctcacactcg

SEQ ID NO: 635944 - DNA, 15 bp, Homo sapiens
aactctcacactcgt

SEQ ID NO: 635945 - DNA, 15 bp, Homo sapiens
actctcacactcgtc

SEQ ID NO: 635946 - DNA, 15 bp, Homo sapiens
ctctcacactcgtca

SEQ ID NO: 635947 - DNA, 15 bp, Homo sapiens
tctcacactcgtcag

SEQ ID NO: 635948 - DNA, 15 bp, Homo sapiens
ctcacactcgtcagc

SEQ ID NO: 635949 - DNA, 15 bp, Homo sapiens
tcacactcgtcagca

SEQ ID NO: 635950 - DNA, 15 bp, Homo sapiens
cacactcgtcagcat

SEQ ID NO: 635951 - DNA, 15 bp, Homo sapiens
acactcgtcagcatc

SEQ ID NO: 635952 - DNA, 15 bp, Homo sapiens
cactcgtcagcatcc

SEQ ID NO: 635953 - DNA, 15 bp, Homo sapiens
actcgtcagcatcca

SEQ ID NO: 635954 - DNA, 15 bp, Homo sapiens
ctcgtcagcatccag

SEQ ID NO: 635955 - DNA, 15 bp, Homo sapiens
tcgtcagcatccaga

SEQ ID NO: 635956 - DNA, 15 bp, Homo sapiens
cgtcagcatccagac

SEQ ID NO: 635957 - DNA, 15 bp, Homo sapiens
gtcagcatccagacg

SEQ ID NO: 635958 - DNA, 15 bp, Homo sapiens
tcagcatccagacgc

SEQ ID NO: 635959 - DNA, 15 bp, Homo sapiens
cagcatccagacgct

SEQ ID NO: 635960 - DNA, 15 bp, Homo sapiens
agcatccagacgctg

SEQ ID NO: 635961 - DNA, 15 bp, Homo sapiens
gcatccagacgctga

SEQ ID NO: 635962 - DNA, 15 bp, Homo sapiens
catccagacgctgag

SEQ ID NO: 635963 - DNA, 15 bp, Homo sapiens
atccagacgctgagg

SEQ ID NO: 635964 - DNA, 15 bp, Homo sapiens
tccagacgctgaggg

SEQ ID NO: 635965 - DNA, 15 bp, Homo sapiens
ccagacgctgagggg

SEQ ID NO: 635966 - DNA, 15 bp, Homo sapiens
cagacgctgagggga

SEQ ID NO: 635967 - DNA, 15 bp, Homo sapiens
agacgctgaggggaa

SEQ ID NO: 635968 - DNA, 15 bp, Homo sapiens
gacgctgaggggaaa

SEQ ID NO: 635969 - DNA, 15 bp, Homo sapiens
acgctgaggggaaaa

SEQ ID NO: 635970 - DNA, 15 bp, Homo sapiens
cgctgaggggaaaat

SEQ ID NO: 635971 - DNA, 15 bp, Homo sapiens
gctgaggggaaaata

SEQ ID NO: 635972 - DNA, 15 bp, Homo sapiens
ctgaggggaaaatac

SEQ ID NO: 635973 - DNA, 15 bp, Homo sapiens
tgaggggaaaatacc

SEQ ID NO: 635974 - DNA, 15 bp, Homo sapiens
gaggggaaaatacca

SEQ ID NO: 635975 - DNA, 15 bp, Homo sapiens
aggggaaaataccag

SEQ ID NO: 635976 - DNA, 15 bp, Homo sapiens
ggggaaaataccagc

SEQ ID NO: 635977 - DNA, 15 bp, Homo sapiens
gggaaaataccagct

SEQ ID NO: 635978 - DNA, 15 bp, Homo sapiens
ggaaaataccagctg

SEQ ID NO: 635979 - DNA, 15 bp, Homo sapiens
gaaaataccagctgc

SEQ ID NO: 635980 - DNA, 15 bp, Homo sapiens
aaaataccagctgct

SEQ ID NO: 635981 - DNA, 15 bp, Homo sapiens
aaataccagctgctt

SEQ ID NO: 635982 - DNA, 15 bp, Homo sapiens
aataccagctgcttc

SEQ ID NO: 635983 - DNA, 15 bp, Homo sapiens
ataccagctgcttct

SEQ ID NO: 635984 - DNA, 15 bp, Homo sapiens
taccagctgcttctg

SEQ ID NO: 635985 - DNA, 15 bp, Homo sapiens
accagctgcttctgt

SEQ ID NO: 635986 - DNA, 15 bp, Homo sapiens
ccagctgcttctgtg

SEQ ID NO: 635987 - DNA, 15 bp, Homo sapiens
cagctgcttctgtgc

SEQ ID NO: 635988 - DNA, 15 bp, Homo sapiens
agctgcttctgtgct

SEQ ID NO: 635989 - DNA, 15 bp, Homo sapiens
gctgcttctgtgctc

SEQ ID NO: 635990 - DNA, 15 bp, Homo sapiens
ctgcttctgtgctct

SEQ ID NO: 635991 - DNA, 15 bp, Homo sapiens
tgcttctgtgctctg

SEQ ID NO: 635992 - DNA, 15 bp, Homo sapiens
gcttctgtgctctgc

SEQ ID NO: 635993 - DNA, 15 bp, Homo sapiens
cttctgtgctctgct

SEQ ID NO: 635994 - DNA, 15 bp, Homo sapiens
ttctgtgctctgctt

SEQ ID NO: 635995 - DNA, 15 bp, Homo sapiens
tctgtgctctgctta

SEQ ID NO: 635996 - DNA, 15 bp, Homo sapiens
ctgtgctctgcttac

SEQ ID NO: 635997 - DNA, 15 bp, Homo sapiens
tgtgctctgcttact

SEQ ID NO: 635998 - DNA, 15 bp, Homo sapiens
gtgctctgcttactc

SEQ ID NO: 635999 - DNA, 15 bp, Homo sapiens
tgctctgcttactct

SEQ ID NO: 636000 - DNA, 15 bp, Homo sapiens
gctctgcttactctt

SEQ ID NO: 636001 - DNA, 15 bp, Homo sapiens
ctctgcttactcttc

SEQ ID NO: 636002 - DNA, 15 bp, Homo sapiens
tctgcttactcttcg

SEQ ID NO: 636003 - DNA, 15 bp, Homo sapiens
ctgcttactcttcgg

SEQ ID NO: 636004 - DNA, 15 bp, Homo sapiens
tgcttactcttcggt

SEQ ID NO: 636005 - DNA, 15 bp, Homo sapiens
gcttactcttcggta

SEQ ID NO: 636006 - DNA, 15 bp, Homo sapiens
cttactcttcggtac

SEQ ID NO: 636007 - DNA, 15 bp, Homo sapiens
ttactcttcggtact

SEQ ID NO: 636008 - DNA, 15 bp, Homo sapiens
tactcttcggtactt

SEQ ID NO: 636009 - DNA, 15 bp, Homo sapiens
actcttcggtacttc

SEQ ID NO: 636010 - DNA, 15 bp, Homo sapiens
ctcttcggtacttct

SEQ ID NO: 636011 - DNA, 15 bp, Homo sapiens
tcttcggtacttctc

SEQ ID NO: 636012 - DNA, 15 bp, Homo sapiens
cttcggtacttctct

SEQ ID NO: 636013 - DNA, 15 bp, Homo sapiens
ttcggtacttctctg

SEQ ID NO: 636014 - DNA, 15 bp, Homo sapiens
tcggtacttctctgc

SEQ ID NO: 636015 - DNA, 15 bp, Homo sapiens
cggtacttctctgcc

SEQ ID NO: 636016 - DNA, 15 bp, Homo sapiens
ggtacttctctgcca

SEQ ID NO: 636017 - DNA, 15 bp, Homo sapiens
gtacttctctgccat

SEQ ID NO: 636018 - DNA, 15 bp, Homo sapiens
tacttctctgccatt

SEQ ID NO: 636019 - DNA, 15 bp, Homo sapiens
acttctctgccattt

SEQ ID NO: 636020 - DNA, 15 bp, Homo sapiens
cttctctgccatttc

SEQ ID NO: 636021 - DNA, 15 bp, Homo sapiens
ttctctgccatttct

SEQ ID NO: 636022 - DNA, 15 bp, Homo sapiens
tctctgccatttctg

SEQ ID NO: 636023 - DNA, 15 bp, Homo sapiens
ctctgccatttctgg

SEQ ID NO: 636024 - DNA, 15 bp, Homo sapiens
tctgccatttctggt

SEQ ID NO: 636025 - DNA, 15 bp, Homo sapiens
ctgccatttctggtt

SEQ ID NO: 636026 - DNA, 15 bp, Homo sapiens
tgccatttctggttc

SEQ ID NO: 636027 - DNA, 15 bp, Homo sapiens
gccatttctggttcc

SEQ ID NO: 636028 - DNA, 15 bp, Homo sapiens
ccatttctggttcct

SEQ ID NO: 636029 - DNA, 15 bp, Homo sapiens
catttctggttcctg

SEQ ID NO: 636030 - DNA, 15 bp, Homo sapiens
atttctggttcctga

SEQ ID NO: 636031 - DNA, 15 bp, Homo sapiens
tttctggttcctgaa

SEQ ID NO: 636032 - DNA, 15 bp, Homo sapiens
ttctggttcctgaag

SEQ ID NO: 636033 - DNA, 15 bp, Homo sapiens
tctggttcctgaaga

SEQ ID NO: 636034 - DNA, 15 bp, Homo sapiens
ctggttcctgaagat

SEQ ID NO: 636035 - DNA, 15 bp, Homo sapiens
tggttcctgaagatg

SEQ ID NO: 636036 - DNA, 15 bp, Homo sapiens
ggttcctgaagatgt

SEQ ID NO: 636037 - DNA, 15 bp, Homo sapiens
gttcctgaagatgtt

SEQ ID NO: 636038 - DNA, 15 bp, Homo sapiens
ttcctgaagatgttt

SEQ ID NO: 636039 - DNA, 15 bp, Homo sapiens
tcctgaagatgttta

SEQ ID NO: 636040 - DNA, 15 bp, Homo sapiens
cctgaagatgtttat

SEQ ID NO: 636041 - DNA, 15 bp, Homo sapiens
ctgaagatgtttatt

SEQ ID NO: 636042 - DNA, 15 bp, Homo sapiens
tgaagatgtttattt

SEQ ID NO: 636043 - DNA, 15 bp, Homo sapiens
gaagatgtttatttt

SEQ ID NO: 636044 - DNA, 15 bp, Homo sapiens
aagatgtttattttt

SEQ ID NO: 636045 - DNA, 15 bp, Homo sapiens
agatgtttattttta

SEQ ID NO: 636046 - DNA, 15 bp, Homo sapiens
gatgtttatttttat

SEQ ID NO: 636047 - DNA, 15 bp, Homo sapiens
atgtttatttttatt

SEQ ID NO: 636048 - DNA, 15 bp, Homo sapiens
tgtttatttttattt

SEQ ID NO: 636049 - DNA, 15 bp, Homo sapiens
gtttatttttattta

SEQ ID NO: 636050 - DNA, 15 bp, Homo sapiens
tttatttttatttat

SEQ ID NO: 636051 - DNA, 15 bp, Homo sapiens
ttatttttatttatt

SEQ ID NO: 636052 - DNA, 15 bp, Homo sapiens
tatttttatttattt

SEQ ID NO: 636053 - DNA, 15 bp, Homo sapiens
atttttatttatttg

SEQ ID NO: 636054 - DNA, 15 bp, Homo sapiens
tttttatttatttga

SEQ ID NO: 636055 - DNA, 15 bp, Homo sapiens
ttttatttatttgag

SEQ ID NO: 636056 - DNA, 15 bp, Homo sapiens
tttatttatttgagt

SEQ ID NO: 636057 - DNA, 15 bp, Homo sapiens
ttatttatttgagtc

SEQ ID NO: 636058 - DNA, 15 bp, Homo sapiens
tatttatttgagtct

SEQ ID NO: 636059 - DNA, 15 bp, Homo sapiens
atttatttgagtctg

SEQ ID NO: 636060 - DNA, 15 bp, Homo sapiens
tttatttgagtctga

SEQ ID NO: 636061 - DNA, 15 bp, Homo sapiens
ttatttgagtctgac

SEQ ID NO: 636062 - DNA, 15 bp, Homo sapiens
tatttgagtctgact

SEQ ID NO: 636063 - DNA, 15 bp, Homo sapiens
atttgagtctgactg

SEQ ID NO: 636064 - DNA, 15 bp, Homo sapiens
tttgagtctgactgt

SEQ ID NO: 636065 - DNA, 15 bp, Homo sapiens
ttgagtctgactgta

SEQ ID NO: 636066 - DNA, 15 bp, Homo sapiens
tgagtctgactgtat

SEQ ID NO: 636067 - DNA, 15 bp, Homo sapiens
gagtctgactgtatc

SEQ ID NO: 636068 - DNA, 15 bp, Homo sapiens
agtctgactgtatct

SEQ ID NO: 636069 - DNA, 15 bp, Homo sapiens
gtctgactgtatctc

SEQ ID NO: 636070 - DNA, 15 bp, Homo sapiens
tctgactgtatctct

SEQ ID NO: 636071 - DNA, 15 bp, Homo sapiens
ctgactgtatctctt

SEQ ID NO: 636072 - DNA, 15 bp, Homo sapiens
tgactgtatctcttt

SEQ ID NO: 636073 - DNA, 15 bp, Homo sapiens
gactgtatctctttt

SEQ ID NO: 636074 - DNA, 15 bp, Homo sapiens
actgtatctcttttt

SEQ ID NO: 636075 - DNA, 15 bp, Homo sapiens
ctgtatctcttttta

SEQ ID NO: 636076 - DNA, 15 bp, Homo sapiens
tgtatctctttttaa

SEQ ID NO: 636077 - DNA, 15 bp, Homo sapiens
gtatctctttttaaa

SEQ ID NO: 636078 - DNA, 15 bp, Homo sapiens
tatctctttttaaaa

SEQ ID NO: 636079 - DNA, 15 bp, Homo sapiens
atctctttttaaaaa

SEQ ID NO: 636080 - DNA, 15 bp, Homo sapiens
tctctttttaaaaac

SEQ ID NO: 636081 - DNA, 15 bp, Homo sapiens
ctctttttaaaaaca

SEQ ID NO: 636082 - DNA, 15 bp, Homo sapiens
tctttttaaaaacat

SEQ ID NO: 636083 - DNA, 15 bp, Homo sapiens
ctttttaaaaacatg

SEQ ID NO: 636084 - DNA, 15 bp, Homo sapiens
tttttaaaaacatgt

SEQ ID NO: 636085 - DNA, 15 bp, Homo sapiens
ttttaaaaacatgtt

SEQ ID NO: 636086 - DNA, 15 bp, Homo sapiens
tttaaaaacatgtta

SEQ ID NO: 636087 - DNA, 15 bp, Homo sapiens
ttaaaaacatgttat

SEQ ID NO: 636088 - DNA, 15 bp, Homo sapiens
taaaaacatgttatc

SEQ ID NO: 636089 - DNA, 15 bp, Homo sapiens
aaaaacatgttatcc

SEQ ID NO: 636090 - DNA, 15 bp, Homo sapiens
aaaacatgttatcca

SEQ ID NO: 636091 - DNA, 15 bp, Homo sapiens
aaacatgttatccac

SEQ ID NO: 636092 - DNA, 15 bp, Homo sapiens
aacatgttatccacc

SEQ ID NO: 636093 - DNA, 15 bp, Homo sapiens
acatgttatccacca

SEQ ID NO: 636094 - DNA, 15 bp, Homo sapiens
catgttatccaccat

SEQ ID NO: 636095 - DNA, 15 bp, Homo sapiens
atgttatccaccatt

SEQ ID NO: 636096 - DNA, 15 bp, Homo sapiens
tgttatccaccattg

SEQ ID NO: 636097 - DNA, 15 bp, Homo sapiens
gttatccaccattgc

SEQ ID NO: 636098 - DNA, 15 bp, Homo sapiens
ttatccaccattgct

SEQ ID NO: 636099 - DNA, 15 bp, Homo sapiens
tatccaccattgcta

SEQ ID NO: 636100 - DNA, 15 bp, Homo sapiens
atccaccattgctat

SEQ ID NO: 636101 - DNA, 15 bp, Homo sapiens
tccaccattgctata

SEQ ID NO: 636102 - DNA, 15 bp, Homo sapiens
ccaccattgctatat

SEQ ID NO: 636103 - DNA, 15 bp, Homo sapiens
caccattgctatata

SEQ ID NO: 636104 - DNA, 15 bp, Homo sapiens
accattgctatatat

SEQ ID NO: 636105 - DNA, 15 bp, Homo sapiens
ccattgctatatatt

SEQ ID NO: 636106 - DNA, 15 bp, Homo sapiens
cattgctatatattt

SEQ ID NO: 636107 - DNA, 15 bp, Homo sapiens
attgctatatatttg

SEQ ID NO: 636108 - DNA, 15 bp, Homo sapiens
ttgctatatatttga

SEQ ID NO: 636109 - DNA, 15 bp, Homo sapiens
tgctatatatttgaa

SEQ ID NO: 636110 - DNA, 15 bp, Homo sapiens
gctatatatttgaag

SEQ ID NO: 636111 - DNA, 15 bp, Homo sapiens
ctatatatttgaagc

SEQ ID NO: 636112 - DNA, 15 bp, Homo sapiens
tatatatttgaagca

SEQ ID NO: 636113 - DNA, 15 bp, Homo sapiens
atatatttgaagcag

SEQ ID NO: 636114 - DNA, 15 bp, Homo sapiens
tatatttgaagcaga

SEQ ID NO: 636115 - DNA, 15 bp, Homo sapiens
atatttgaagcagag

SEQ ID NO: 636116 - DNA, 15 bp, Homo sapiens
tatttgaagcagaga

SEQ ID NO: 636117 - DNA, 15 bp, Homo sapiens
atttgaagcagagaa

SEQ ID NO: 636118 - DNA, 15 bp, Homo sapiens
tttgaagcagagaaa

SEQ ID NO: 636119 - DNA, 15 bp, Homo sapiens
ttgaagcagagaaag

SEQ ID NO: 636120 - DNA, 15 bp, Homo sapiens
tgaagcagagaaagt

SEQ ID NO: 636121 - DNA, 15 bp, Homo sapiens
gaagcagagaaagtt

SEQ ID NO: 636122 - DNA, 15 bp, Homo sapiens
aagcagagaaagtta

SEQ ID NO: 636123 - DNA, 15 bp, Homo sapiens
agcagagaaagttag

SEQ ID NO: 636124 - DNA, 15 bp, Homo sapiens
gcagagaaagttagt

SEQ ID NO: 636125 - DNA, 15 bp, Homo sapiens
cagagaaagttagtg

SEQ ID NO: 636126 - DNA, 15 bp, Homo sapiens
agagaaagttagtga

SEQ ID NO: 636127 - DNA, 15 bp, Homo sapiens
gagaaagttagtgaa

SEQ ID NO: 636128 - DNA, 15 bp, Homo sapiens
agaaagttagtgaag

SEQ ID NO: 636129 - DNA, 15 bp, Homo sapiens
gaaagttagtgaagc

SEQ ID NO: 636130 - DNA, 15 bp, Homo sapiens
aaagttagtgaagca

SEQ ID NO: 636131 - DNA, 15 bp, Homo sapiens
aagttagtgaagcat

SEQ ID NO: 636132 - DNA, 15 bp, Homo sapiens
agttagtgaagcata

SEQ ID NO: 636133 - DNA, 15 bp, Homo sapiens
gttagtgaagcataa

SEQ ID NO: 636134 - DNA, 15 bp, Homo sapiens
ttagtgaagcataaa

SEQ ID NO: 636135 - DNA, 15 bp, Homo sapiens
tagtgaagcataaac

SEQ ID NO: 636136 - DNA, 15 bp, Homo sapiens
agtgaagcataaact

SEQ ID NO: 636137 - DNA, 15 bp, Homo sapiens
gtgaagcataaactt

SEQ ID NO: 636138 - DNA, 15 bp, Homo sapiens
tgaagcataaacttc

SEQ ID NO: 636139 - DNA, 15 bp, Homo sapiens
gaagcataaacttca

SEQ ID NO: 636140 - DNA, 15 bp, Homo sapiens
aagcataaacttcat

SEQ ID NO: 636141 - DNA, 15 bp, Homo sapiens
agcataaacttcatg

SEQ ID NO: 636142 - DNA, 15 bp, Homo sapiens
gcataaacttcatgc

SEQ ID NO: 636143 - DNA, 15 bp, Homo sapiens
cataaacttcatgct

SEQ ID NO: 636144 - DNA, 15 bp, Homo sapiens
ataaacttcatgctg

SEQ ID NO: 636145 - DNA, 15 bp, Homo sapiens
taaacttcatgctga

SEQ ID NO: 636146 - DNA, 15 bp, Homo sapiens
aaacttcatgctgaa

SEQ ID NO: 636147 - DNA, 15 bp, Homo sapiens
aacttcatgctgaat

SEQ ID NO: 636148 - DNA, 15 bp, Homo sapiens
acttcatgctgaatc

SEQ ID NO: 636149 - DNA, 15 bp, Homo sapiens
cttcatgctgaatcg

SEQ ID NO: 636150 - DNA, 15 bp, Homo sapiens
ttcatgctgaatcga

SEQ ID NO: 636151 - DNA, 15 bp, Homo sapiens
tcatgctgaatcgag

SEQ ID NO: 636152 - DNA, 15 bp, Homo sapiens
catgctgaatcgagt

SEQ ID NO: 636153 - DNA, 15 bp, Homo sapiens
atgctgaatcgagtg

SEQ ID NO: 636154 - DNA, 15 bp, Homo sapiens
tgctgaatcgagtgt

SEQ ID NO: 636155 - DNA, 15 bp, Homo sapiens
gctgaatcgagtgtc

SEQ ID NO: 636156 - DNA, 15 bp, Homo sapiens
ctgaatcgagtgtct

SEQ ID NO: 636157 - DNA, 15 bp, Homo sapiens
tgaatcgagtgtcta

SEQ ID NO: 636158 - DNA, 15 bp, Homo sapiens
gaatcgagtgtctat

SEQ ID NO: 636159 - DNA, 15 bp, Homo sapiens
aatcgagtgtctata

SEQ ID NO: 636160 - DNA, 15 bp, Homo sapiens
atcgagtgtctatat

SEQ ID NO: 636161 - DNA, 15 bp, Homo sapiens
tcgagtgtctatatc

SEQ ID NO: 636162 - DNA, 15 bp, Homo sapiens
cgagtgtctatatcc

SEQ ID NO: 636163 - DNA, 15 bp, Homo sapiens
gagtgtctatatcct

SEQ ID NO: 636164 - DNA, 15 bp, Homo sapiens
agtgtctatatcctg

SEQ ID NO: 636165 - DNA, 15 bp, Homo sapiens
gtgtctatatcctgg

SEQ ID NO: 636166 - DNA, 15 bp, Homo sapiens
tgtctatatcctgga

SEQ ID NO: 636167 - DNA, 15 bp, Homo sapiens
gtctatatcctggaa

SEQ ID NO: 636168 - DNA, 15 bp, Homo sapiens
tctatatcctggaat

SEQ ID NO: 636169 - DNA, 15 bp, Homo sapiens
ctatatcctggaatt

SEQ ID NO: 636170 - DNA, 15 bp, Homo sapiens
tatatcctggaattc

SEQ ID NO: 636171 - DNA, 15 bp, Homo sapiens
atatcctggaattct

SEQ ID NO: 636172 - DNA, 15 bp, Homo sapiens
tatcctggaattctc

SEQ ID NO: 636173 - DNA, 15 bp, Homo sapiens
atcctggaattctca

SEQ ID NO: 636174 - DNA, 15 bp, Homo sapiens
tcctggaattctcag

SEQ ID NO: 636175 - DNA, 15 bp, Homo sapiens
cctggaattctcagc

SEQ ID NO: 636176 - DNA, 15 bp, Homo sapiens
ctggaattctcagcc

SEQ ID NO: 636177 - DNA, 15 bp, Homo sapiens
tggaattctcagcct

SEQ ID NO: 636178 - DNA, 15 bp, Homo sapiens
ggaattctcagcctg

SEQ ID NO: 636179 - DNA, 15 bp, Homo sapiens
gaattctcagcctgt

SEQ ID NO: 636180 - DNA, 15 bp, Homo sapiens
aattctcagcctgta

SEQ ID NO: 636181 - DNA, 15 bp, Homo sapiens
attctcagcctgtac

SEQ ID NO: 636182 - DNA, 15 bp, Homo sapiens
ttctcagcctgtacc

SEQ ID NO: 636183 - DNA, 15 bp, Homo sapiens
tctcagcctgtaccc

SEQ ID NO: 636184 - DNA, 15 bp, Homo sapiens
ctcagcctgtaccct

SEQ ID NO: 636185 - DNA, 15 bp, Homo sapiens
tcagcctgtaccctc

SEQ ID NO: 636186 - DNA, 15 bp, Homo sapiens
cagcctgtaccctct

SEQ ID NO: 636187 - DNA, 15 bp, Homo sapiens
agcctgtaccctcta

SEQ ID NO: 636188 - DNA, 15 bp, Homo sapiens
gcctgtaccctctat

SEQ ID NO: 636189 - DNA, 15 bp, Homo sapiens
cctgtaccctctata

SEQ ID NO: 636190 - DNA, 15 bp, Homo sapiens
ctgtaccctctataa

SEQ ID NO: 636191 - DNA, 15 bp, Homo sapiens
tgtaccctctataaa

SEQ ID NO: 636192 - DNA, 15 bp, Homo sapiens
gtaccctctataaac

SEQ ID NO: 636193 - DNA, 15 bp, Homo sapiens
taccctctataaact

SEQ ID NO: 636194 - DNA, 15 bp, Homo sapiens
accctctataaacta

SEQ ID NO: 636195 - DNA, 15 bp, Homo sapiens
ccctctataaactaa

SEQ ID NO: 636196 - DNA, 15 bp, Homo sapiens
cctctataaactaat

SEQ ID NO: 636197 - DNA, 15 bp, Homo sapiens
ctctataaactaatt

SEQ ID NO: 636198 - DNA, 15 bp, Homo sapiens
tctataaactaattt

SEQ ID NO: 636199 - DNA, 15 bp, Homo sapiens
ctataaactaatttt

SEQ ID NO: 636200 - DNA, 15 bp, Homo sapiens
tataaactaattttt

SEQ ID NO: 636201 - DNA, 15 bp, Homo sapiens
ataaactaatttttc

SEQ ID NO: 636202 - DNA, 15 bp, Homo sapiens
taaactaatttttcc

SEQ ID NO: 636203 - DNA, 15 bp, Homo sapiens
aaactaatttttcca

SEQ ID NO: 636204 - DNA, 15 bp, Homo sapiens
aactaatttttccac

SEQ ID NO: 636205 - DNA, 15 bp, Homo sapiens
actaatttttccact

SEQ ID NO: 636206 - DNA, 15 bp, Homo sapiens
ctaatttttccactg

SEQ ID NO: 636207 - DNA, 15 bp, Homo sapiens
taatttttccactgt

SEQ ID NO: 636208 - DNA, 15 bp, Homo sapiens
aatttttccactgtg

SEQ ID NO: 636209 - DNA, 15 bp, Homo sapiens
atttttccactgtga

SEQ ID NO: 636210 - DNA, 15 bp, Homo sapiens
tttttccactgtgaa

SEQ ID NO: 636211 - DNA, 15 bp, Homo sapiens
ttttccactgtgaat

SEQ ID NO: 636212 - DNA, 15 bp, Homo sapiens
tttccactgtgaata

SEQ ID NO: 636213 - DNA, 15 bp, Homo sapiens
ttccactgtgaataa

SEQ ID NO: 636214 - DNA, 15 bp, Homo sapiens
tccactgtgaataag

SEQ ID NO: 636215 - DNA, 15 bp, Homo sapiens
ccactgtgaataaga

SEQ ID NO: 636216 - DNA, 15 bp, Homo sapiens
cactgtgaataagac

SEQ ID NO: 636217 - DNA, 15 bp, Homo sapiens
actgtgaataagact

SEQ ID NO: 636218 - DNA, 15 bp, Homo sapiens
ctgtgaataagacta

SEQ ID NO: 636219 - DNA, 15 bp, Homo sapiens
tgtgaataagactaa

SEQ ID NO: 636220 - DNA, 15 bp, Homo sapiens
gtgaataagactaat

SEQ ID NO: 636221 - DNA, 15 bp, Homo sapiens
tgaataagactaatc

SEQ ID NO: 636222 - DNA, 15 bp, Homo sapiens
gaataagactaatca

SEQ ID NO: 636223 - DNA, 15 bp, Homo sapiens
aataagactaatcat

SEQ ID NO: 636224 - DNA, 15 bp, Homo sapiens
ataagactaatcatg

SEQ ID NO: 636225 - DNA, 15 bp, Homo sapiens
taagactaatcatga

SEQ ID NO: 636226 - DNA, 15 bp, Homo sapiens
aagactaatcatgac

SEQ ID NO: 636227 - DNA, 15 bp, Homo sapiens
agactaatcatgact

SEQ ID NO: 636228 - DNA, 15 bp, Homo sapiens
gactaatcatgactc

SEQ ID NO: 636229 - DNA, 15 bp, Homo sapiens
actaatcatgactct

SEQ ID NO: 636230 - DNA, 15 bp, Homo sapiens
ctaatcatgactctg

SEQ ID NO: 636231 - DNA, 15 bp, Homo sapiens
taatcatgactctgt

SEQ ID NO: 636232 - DNA, 15 bp, Homo sapiens
aatcatgactctgtc

SEQ ID NO: 636233 - DNA, 15 bp, Homo sapiens
atcatgactctgtcg

SEQ ID NO: 636234 - DNA, 15 bp, Homo sapiens
tcatgactctgtcga

SEQ ID NO: 636235 - DNA, 15 bp, Homo sapiens
catgactctgtcgac

SEQ ID NO: 636236 - DNA, 15 bp, Homo sapiens
atgactctgtcgaca

SEQ ID NO: 636237 - DNA, 15 bp, Homo sapiens
tgactctgtcgacat

SEQ ID NO: 636238 - DNA, 15 bp, Homo sapiens
gactctgtcgacatt

SEQ ID NO: 636239 - DNA, 15 bp, Homo sapiens
actctgtcgacattt

SEQ ID NO: 636240 - DNA, 15 bp, Homo sapiens
ctctgtcgacattta

SEQ ID NO: 636241 - DNA, 15 bp, Homo sapiens
tctgtcgacatttac

SEQ ID NO: 636242 - DNA, 15 bp, Homo sapiens
ctgtcgacatttaca

SEQ ID NO: 636243 - DNA, 15 bp, Homo sapiens
tgtcgacatttacat

SEQ ID NO: 636244 - DNA, 15 bp, Homo sapiens
gtcgacatttacatt

SEQ ID NO: 636245 - DNA, 15 bp, Homo sapiens
tcgacatttacattt

SEQ ID NO: 636246 - DNA, 15 bp, Homo sapiens
cgacatttacatttt

SEQ ID NO: 636247 - DNA, 15 bp, Homo sapiens
gacatttacatttta

SEQ ID NO: 636248 - DNA, 15 bp, Homo sapiens
acatttacattttat

SEQ ID NO: 636249 - DNA, 15 bp, Homo sapiens
catttacattttatt

SEQ ID NO: 636250 - DNA, 15 bp, Homo sapiens
atttacattttattt

SEQ ID NO: 636251 - DNA, 15 bp, Homo sapiens
tttacattttattta

SEQ ID NO: 636252 - DNA, 15 bp, Homo sapiens
ttacattttatttag

SEQ ID NO: 636253 - DNA, 15 bp, Homo sapiens
tacattttatttaga

SEQ ID NO: 636254 - DNA, 15 bp, Homo sapiens
acattttatttagaa

SEQ ID NO: 636255 - DNA, 15 bp, Homo sapiens
cattttatttagaaa

SEQ ID NO: 636256 - DNA, 15 bp, Homo sapiens
attttatttagaaaa

SEQ ID NO: 636257 - DNA, 15 bp, Homo sapiens
ttttatttagaaaat

SEQ ID NO: 636258 - DNA, 15 bp, Homo sapiens
tttatttagaaaatg

SEQ ID NO: 636259 - DNA, 15 bp, Homo sapiens
ttatttagaaaatgt

SEQ ID NO: 636260 - DNA, 15 bp, Homo sapiens
tatttagaaaatgtc

SEQ ID NO: 636261 - DNA, 15 bp, Homo sapiens
atttagaaaatgtct

SEQ ID NO: 636262 - DNA, 15 bp, Homo sapiens
tttagaaaatgtctt

SEQ ID NO: 636263 - DNA, 15 bp, Homo sapiens
ttagaaaatgtcttc

SEQ ID NO: 636264 - DNA, 15 bp, Homo sapiens
tagaaaatgtcttcc

SEQ ID NO: 636265 - DNA, 15 bp, Homo sapiens
agaaaatgtcttcct

SEQ ID NO: 636266 - DNA, 15 bp, Homo sapiens
gaaaatgtcttcctt

SEQ ID NO: 636267 - DNA, 15 bp, Homo sapiens
aaaatgtcttccttc

SEQ ID NO: 636268 - DNA, 15 bp, Homo sapiens
aaatgtcttccttct

SEQ ID NO: 636269 - DNA, 15 bp, Homo sapiens
aatgtcttccttctg

SEQ ID NO: 636270 - DNA, 15 bp, Homo sapiens
atgtcttccttctgt

SEQ ID NO: 636271 - DNA, 15 bp, Homo sapiens
tgtcttccttctgtt

SEQ ID NO: 636272 - DNA, 15 bp, Homo sapiens
gtcttccttctgttc

SEQ ID NO: 636273 - DNA, 15 bp, Homo sapiens
tcttccttctgttcc

SEQ ID NO: 636274 - DNA, 15 bp, Homo sapiens
cttccttctgttcct

SEQ ID NO: 636275 - DNA, 15 bp, Homo sapiens
ttccttctgttcctt

SEQ ID NO: 636276 - DNA, 15 bp, Homo sapiens
tccttctgttccttt

SEQ ID NO: 636277 - DNA, 15 bp, Homo sapiens
ccttctgttcctttg

SEQ ID NO: 636278 - DNA, 15 bp, Homo sapiens
cttctgttcctttga

SEQ ID NO: 636279 - DNA, 15 bp, Homo sapiens
ttctgttcctttgat

SEQ ID NO: 636280 - DNA, 15 bp, Homo sapiens
tctgttcctttgatc

SEQ ID NO: 636281 - DNA, 15 bp, Homo sapiens
ctgttcctttgatcc

SEQ ID NO: 636282 - DNA, 15 bp, Homo sapiens
tgttcctttgatcca

SEQ ID NO: 636283 - DNA, 15 bp, Homo sapiens
gttcctttgatccaa

SEQ ID NO: 636284 - DNA, 15 bp, Homo sapiens
ttcctttgatccaag

SEQ ID NO: 636285 - DNA, 15 bp, Homo sapiens
tcctttgatccaagc

SEQ ID NO: 636286 - DNA, 15 bp, Homo sapiens
cctttgatccaagct

SEQ ID NO: 636287 - DNA, 15 bp, Homo sapiens
ctttgatccaagctt

SEQ ID NO: 636288 - DNA, 15 bp, Homo sapiens
tttgatccaagcttg

SEQ ID NO: 636289 - DNA, 15 bp, Homo sapiens
ttgatccaagcttga

SEQ ID NO: 636290 - DNA, 15 bp, Homo sapiens
tgatccaagcttgac

SEQ ID NO: 636291 - DNA, 15 bp, Homo sapiens
gatccaagcttgact

SEQ ID NO: 636292 - DNA, 15 bp, Homo sapiens
atccaagcttgactc

SEQ ID NO: 636293 - DNA, 15 bp, Homo sapiens
tccaagcttgactca

SEQ ID NO: 636294 - DNA, 15 bp, Homo sapiens
ccaagcttgactcac

SEQ ID NO: 636295 - DNA, 15 bp, Homo sapiens
caagcttgactcacc

SEQ ID NO: 636296 - DNA, 15 bp, Homo sapiens
aagcttgactcacct

SEQ ID NO: 636297 - DNA, 15 bp, Homo sapiens
agcttgactcacctt

SEQ ID NO: 636298 - DNA, 15 bp, Homo sapiens
gcttgactcacctta

SEQ ID NO: 636299 - DNA, 15 bp, Homo sapiens
cttgactcaccttac

SEQ ID NO: 636300 - DNA, 15 bp, Homo sapiens
ttgactcaccttacc

SEQ ID NO: 636301 - DNA, 15 bp, Homo sapiens
tgactcaccttacct

SEQ ID NO: 636302 - DNA, 15 bp, Homo sapiens
gactcaccttacctt

SEQ ID NO: 636303 - DNA, 15 bp, Homo sapiens
actcaccttaccttg

SEQ ID NO: 636304 - DNA, 15 bp, Homo sapiens
ctcaccttaccttga

SEQ ID NO: 636305 - DNA, 15 bp, Homo sapiens
tcaccttaccttgag

SEQ ID NO: 636306 - DNA, 15 bp, Homo sapiens
caccttaccttgagg

SEQ ID NO: 636307 - DNA, 15 bp, Homo sapiens
accttaccttgaggt

SEQ ID NO: 636308 - DNA, 15 bp, Homo sapiens
ccttaccttgaggtt

SEQ ID NO: 636309 - DNA, 15 bp, Homo sapiens
cttaccttgaggttg

SEQ ID NO: 636310 - DNA, 15 bp, Homo sapiens
ttaccttgaggttgc

SEQ ID NO: 636311 - DNA, 15 bp, Homo sapiens
taccttgaggttgca

SEQ ID NO: 636312 - DNA, 15 bp, Homo sapiens
accttgaggttgcat

SEQ ID NO: 636313 - DNA, 15 bp, Homo sapiens
ccttgaggttgcatt

SEQ ID NO: 636314 - DNA, 15 bp, Homo sapiens
cttgaggttgcattt

SEQ ID NO: 636315 - DNA, 15 bp, Homo sapiens
ttgaggttgcattta

SEQ ID NO: 636316 - DNA, 15 bp, Homo sapiens
tgaggttgcatttac

SEQ ID NO: 636317 - DNA, 15 bp, Homo sapiens
gaggttgcatttaca

SEQ ID NO: 636318 - DNA, 15 bp, Homo sapiens
aggttgcatttacaa

SEQ ID NO: 636319 - DNA, 15 bp, Homo sapiens
ggttgcatttacaaa

SEQ ID NO: 636320 - DNA, 15 bp, Homo sapiens
gttgcatttacaaag

SEQ ID NO: 636321 - DNA, 15 bp, Homo sapiens
ttgcatttacaaagg

SEQ ID NO: 636322 - DNA, 15 bp, Homo sapiens
tgcatttacaaagga

SEQ ID NO: 636323 - DNA, 15 bp, Homo sapiens
gcatttacaaaggaa

SEQ ID NO: 636324 - DNA, 15 bp, Homo sapiens
catttacaaaggaac

SEQ ID NO: 636325 - DNA, 15 bp, Homo sapiens
atttacaaaggaaca

SEQ ID NO: 636326 - DNA, 15 bp, Homo sapiens
tttacaaaggaacac

SEQ ID NO: 636327 - DNA, 15 bp, Homo sapiens
ttacaaaggaacact

SEQ ID NO: 636328 - DNA, 15 bp, Homo sapiens
tacaaaggaacactg

SEQ ID NO: 636329 - DNA, 15 bp, Homo sapiens
acaaaggaacactga

SEQ ID NO: 636330 - DNA, 15 bp, Homo sapiens
caaaggaacactgaa

SEQ ID NO: 636331 - DNA, 15 bp, Homo sapiens
aaaggaacactgaag

SEQ ID NO: 636332 - DNA, 15 bp, Homo sapiens
aaggaacactgaagg

SEQ ID NO: 636333 - DNA, 15 bp, Homo sapiens
aggaacactgaaggt

SEQ ID NO: 636334 - DNA, 15 bp, Homo sapiens
ggaacactgaaggtt

SEQ ID NO: 636335 - DNA, 15 bp, Homo sapiens
gaacactgaaggtta

SEQ ID NO: 636336 - DNA, 15 bp, Homo sapiens
aacactgaaggttac

SEQ ID NO: 636337 - DNA, 15 bp, Homo sapiens
acactgaaggttacc

SEQ ID NO: 636338 - DNA, 15 bp, Homo sapiens
cactgaaggttaccc

SEQ ID NO: 636339 - DNA, 15 bp, Homo sapiens
actgaaggttaccca

SEQ ID NO: 636340 - DNA, 15 bp, Homo sapiens
ctgaaggttacccaa

SEQ ID NO: 636341 - DNA, 15 bp, Homo sapiens
tgaaggttacccaac

SEQ ID NO: 636342 - DNA, 15 bp, Homo sapiens
gaaggttacccaaca

SEQ ID NO: 636343 - DNA, 15 bp, Homo sapiens
aaggttacccaacag

SEQ ID NO: 636344 - DNA, 15 bp, Homo sapiens
aggttacccaacagt

SEQ ID NO: 636345 - DNA, 15 bp, Homo sapiens
ggttacccaacagta

SEQ ID NO: 636346 - DNA, 15 bp, Homo sapiens
gttacccaacagtat

SEQ ID NO: 636347 - DNA, 15 bp, Homo sapiens
ttacccaacagtatg

SEQ ID NO: 636348 - DNA, 15 bp, Homo sapiens
tacccaacagtatgt

SEQ ID NO: 636349 - DNA, 15 bp, Homo sapiens
acccaacagtatgtg

SEQ ID NO: 636350 - DNA, 15 bp, Homo sapiens
cccaacagtatgtgg

SEQ ID NO: 636351 - DNA, 15 bp, Homo sapiens
ccaacagtatgtggg

SEQ ID NO: 636352 - DNA, 15 bp, Homo sapiens
caacagtatgtgggt

SEQ ID NO: 636353 - DNA, 15 bp, Homo sapiens
aacagtatgtgggtg

SEQ ID NO: 636354 - DNA, 15 bp, Homo sapiens
acagtatgtgggtgt

SEQ ID NO: 636355 - DNA, 15 bp, Homo sapiens
cagtatgtgggtgtc

SEQ ID NO: 636356 - DNA, 15 bp, Homo sapiens
agtatgtgggtgtcg

SEQ ID NO: 636357 - DNA, 15 bp, Homo sapiens
gtatgtgggtgtcgt

SEQ ID NO: 636358 - DNA, 15 bp, Homo sapiens
tatgtgggtgtcgtt

SEQ ID NO: 636359 - DNA, 15 bp, Homo sapiens
atgtgggtgtcgttc

SEQ ID NO: 636360 - DNA, 15 bp, Homo sapiens
tgtgggtgtcgttca

SEQ ID NO: 636361 - DNA, 15 bp, Homo sapiens
gtgggtgtcgttcat

SEQ ID NO: 636362 - DNA, 15 bp, Homo sapiens
tgggtgtcgttcatc

SEQ ID NO: 636363 - DNA, 15 bp, Homo sapiens
gggtgtcgttcatca

SEQ ID NO: 636364 - DNA, 15 bp, Homo sapiens
ggtgtcgttcatcaa

SEQ ID NO: 636365 - DNA, 15 bp, Homo sapiens
gtgtcgttcatcaac

SEQ ID NO: 636366 - DNA, 15 bp, Homo sapiens
tgtcgttcatcaact

SEQ ID NO: 636367 - DNA, 15 bp, Homo sapiens
gtcgttcatcaacta

SEQ ID NO: 636368 - DNA, 15 bp, Homo sapiens
tcgttcatcaactac

SEQ ID NO: 636369 - DNA, 15 bp, Homo sapiens
cgttcatcaactaca

SEQ ID NO: 636370 - DNA, 15 bp, Homo sapiens
gttcatcaactacag

SEQ ID NO: 636371 - DNA, 15 bp, Homo sapiens
ttcatcaactacagt

SEQ ID NO: 636372 - DNA, 15 bp, Homo sapiens
tcatcaactacagtg

SEQ ID NO: 636373 - DNA, 15 bp, Homo sapiens
catcaactacagtga

SEQ ID NO: 636374 - DNA, 15 bp, Homo sapiens
atcaactacagtgac

SEQ ID NO: 636375 - DNA, 15 bp, Homo sapiens
tcaactacagtgact

SEQ ID NO: 636376 - DNA, 15 bp, Homo sapiens
caactacagtgactc

SEQ ID NO: 636377 - DNA, 15 bp, Homo sapiens
aactacagtgactca

SEQ ID NO: 636378 - DNA, 15 bp, Homo sapiens
actacagtgactcaa

SEQ ID NO: 636379 - DNA, 15 bp, Homo sapiens
ctacagtgactcaag

SEQ ID NO: 636380 - DNA, 15 bp, Homo sapiens
tacagtgactcaaga

SEQ ID NO: 636381 - DNA, 15 bp, Homo sapiens
acagtgactcaagaa

SEQ ID NO: 636382 - DNA, 15 bp, Homo sapiens
cagtgactcaagaat

SEQ ID NO: 636383 - DNA, 15 bp, Homo sapiens
agtgactcaagaata

SEQ ID NO: 636384 - DNA, 15 bp, Homo sapiens
gtgactcaagaatat

SEQ ID NO: 636385 - DNA, 15 bp, Homo sapiens
tgactcaagaatatc

SEQ ID NO: 636386 - DNA, 15 bp, Homo sapiens
gactcaagaatatca

SEQ ID NO: 636387 - DNA, 15 bp, Homo sapiens
actcaagaatatcac

SEQ ID NO: 636388 - DNA, 15 bp, Homo sapiens
ctcaagaatatcacc

SEQ ID NO: 636389 - DNA, 15 bp, Homo sapiens
tcaagaatatcacca

SEQ ID NO: 636390 - DNA, 15 bp, Homo sapiens
caagaatatcaccag

SEQ ID NO: 636391 - DNA, 15 bp, Homo sapiens
aagaatatcaccagt

SEQ ID NO: 636392 - DNA, 15 bp, Homo sapiens
agaatatcaccagtt

SEQ ID NO: 636393 - DNA, 15 bp, Homo sapiens
gaatatcaccagttg

SEQ ID NO: 636394 - DNA, 15 bp, Homo sapiens
aatatcaccagttgg

SEQ ID NO: 636395 - DNA, 15 bp, Homo sapiens
atatcaccagttggt

SEQ ID NO: 636396 - DNA, 15 bp, Homo sapiens
tatcaccagttggtt

SEQ ID NO: 636397 - DNA, 15 bp, Homo sapiens
atcaccagttggttt

SEQ ID NO: 636398 - DNA, 15 bp, Homo sapiens
tcaccagttggtttg

SEQ ID NO: 636399 - DNA, 15 bp, Homo sapiens
caccagttggtttgc

SEQ ID NO: 636400 - DNA, 15 bp, Homo sapiens
accagttggtttgcc

SEQ ID NO: 636401 - DNA, 15 bp, Homo sapiens
ccagttggtttgcct

SEQ ID NO: 636402 - DNA, 15 bp, Homo sapiens
cagttggtttgcctt

SEQ ID NO: 636403 - DNA, 15 bp, Homo sapiens
agttggtttgccttt

SEQ ID NO: 636404 - DNA, 15 bp, Homo sapiens
gttggtttgcctttc

SEQ ID NO: 636405 - DNA, 15 bp, Homo sapiens
ttggtttgcctttct

SEQ ID NO: 636406 - DNA, 15 bp, Homo sapiens
tggtttgcctttctc

SEQ ID NO: 636407 - DNA, 15 bp, Homo sapiens
ggtttgcctttctca

SEQ ID NO: 636408 - DNA, 15 bp, Homo sapiens
gtttgcctttctcat

SEQ ID NO: 636409 - DNA, 15 bp, Homo sapiens
tttgcctttctcatg

SEQ ID NO: 636410 - DNA, 15 bp, Homo sapiens
ttgcctttctcatgg

SEQ ID NO: 636411 - DNA, 15 bp, Homo sapiens
tgcctttctcatggt

SEQ ID NO: 636412 - DNA, 15 bp, Homo sapiens
gcctttctcatggtt

SEQ ID NO: 636413 - DNA, 15 bp, Homo sapiens
cctttctcatggttt

SEQ ID NO: 636414 - DNA, 15 bp, Homo sapiens
ctttctcatggtttt

SEQ ID NO: 636415 - DNA, 15 bp, Homo sapiens
tttctcatggtttta

SEQ ID NO: 636416 - DNA, 15 bp, Homo sapiens
ttctcatggttttaa

SEQ ID NO: 636417 - DNA, 15 bp, Homo sapiens
tctcatggttttaat

SEQ ID NO: 636418 - DNA, 15 bp, Homo sapiens
ctcatggttttaatg

SEQ ID NO: 636419 - DNA, 15 bp, Homo sapiens
tcatggttttaatgt

SEQ ID NO: 636420 - DNA, 15 bp, Homo sapiens
catggttttaatgtt

SEQ ID NO: 636421 - DNA, 15 bp, Homo sapiens
atggttttaatgttt

SEQ ID NO: 636422 - DNA, 15 bp, Homo sapiens
tggttttaatgtttt

SEQ ID NO: 636423 - DNA, 15 bp, Homo sapiens
ggttttaatgttttc

SEQ ID NO: 636424 - DNA, 15 bp, Homo sapiens
gttttaatgttttct

SEQ ID NO: 636425 - DNA, 15 bp, Homo sapiens
ttttaatgttttctc

SEQ ID NO: 636426 - DNA, 15 bp, Homo sapiens
tttaatgttttctca

SEQ ID NO: 636427 - DNA, 15 bp, Homo sapiens
ttaatgttttctcat

SEQ ID NO: 636428 - DNA, 15 bp, Homo sapiens
taatgttttctcatt

SEQ ID NO: 636429 - DNA, 15 bp, Homo sapiens
aatgttttctcatta

SEQ ID NO: 636430 - DNA, 15 bp, Homo sapiens
atgttttctcattaa

SEQ ID NO: 636431 - DNA, 15 bp, Homo sapiens
tgttttctcattaaa

SEQ ID NO: 636432 - DNA, 15 bp, Homo sapiens
gttttctcattaaaa

SEQ ID NO: 636433 - DNA, 15 bp, Homo sapiens
ttttctcattaaaaa

SEQ ID NO: 636434 - DNA, 15 bp, Homo sapiens
tttctcattaaaaat

SEQ ID NO: 636435 - DNA, 15 bp, Homo sapiens
ttctcattaaaaata

SEQ ID NO: 636436 - DNA, 15 bp, Homo sapiens
tctcattaaaaataa

SEQ ID NO: 636437 - DNA, 15 bp, Homo sapiens
ctcattaaaaataaa

SEQ ID NO: 636438 - DNA, 15 bp, Homo sapiens
tcattaaaaataaat

SEQ ID NO: 636439 - DNA, 15 bp, Homo sapiens
cattaaaaataaata

SEQ ID NO: 636440 - DNA, 15 bp, Homo sapiens
attaaaaataaataa

SEQ ID NO: 636441 - DNA, 15 bp, Homo sapiens
ttaaaaataaataaa

SEQ ID NO: 636442 - DNA, 15 bp, Homo sapiens
taaaaataaataaag

SEQ ID NO: 636443 - DNA, 15 bp, Homo sapiens
aaaaataaataaagc

SEQ ID NO: 636444 - DNA, 15 bp, Homo sapiens
aaaataaataaagca

SEQ ID NO: 636445 - DNA, 15 bp, Homo sapiens
aaataaataaagcac

SEQ ID NO: 636446 - DNA, 15 bp, Homo sapiens
aataaataaagcaca

SEQ ID NO: 636447 - DNA, 15 bp, Homo sapiens
ataaataaagcacag

SEQ ID NO: 636448 - DNA, 15 bp, Homo sapiens
taaataaagcacaga

SEQ ID NO: 636449 - DNA, 15 bp, Homo sapiens
aaataaagcacagat

SEQ ID NO: 636450 - DNA, 15 bp, Homo sapiens
aataaagcacagata

SEQ ID NO: 636451 - DNA, 15 bp, Homo sapiens
ataaagcacagataa

SEQ ID NO: 636452 - DNA, 15 bp, Homo sapiens
taaagcacagataag

SEQ ID NO: 636453 - DNA, 15 bp, Homo sapiens
aaagcacagataagc

SEQ ID NO: 636454 - DNA, 15 bp, Homo sapiens
aagcacagataagca

SEQ ID NO: 636455 - DNA, 15 bp, Homo sapiens
agcacagataagcag

SEQ ID NO: 636456 - DNA, 15 bp, Homo sapiens
gcacagataagcaga

SEQ ID NO: 636457 - DNA, 15 bp, Homo sapiens
cacagataagcagaa

SEQ ID NO: 636458 - DNA, 15 bp, Homo sapiens
acagataagcagaaa

SEQ ID NO: 636459 - DNA, 15 bp, Homo sapiens
cagataagcagaaag

SEQ ID NO: 636460 - DNA, 15 bp, Homo sapiens
agataagcagaaaga

SEQ ID NO: 636461 - DNA, 15 bp, Homo sapiens
gataagcagaaagaa

SEQ ID NO: 636462 - DNA, 15 bp, Homo sapiens
ataagcagaaagaat

SEQ ID NO: 636463 - DNA, 15 bp, Homo sapiens
taagcagaaagaata

SEQ ID NO: 636464 - DNA, 15 bp, Homo sapiens
aagcagaaagaataa

SEQ ID NO: 636465 - DNA, 15 bp, Homo sapiens
agcagaaagaataac

SEQ ID NO: 636466 - DNA, 15 bp, Homo sapiens
gcagaaagaataacc

SEQ ID NO: 636467 - DNA, 15 bp, Homo sapiens
cagaaagaataacca

SEQ ID NO: 636468 - DNA, 15 bp, Homo sapiens
agaaagaataaccat

SEQ ID NO: 636469 - DNA, 15 bp, Homo sapiens
gaaagaataaccatc

SEQ ID NO: 636470 - DNA, 15 bp, Homo sapiens
aaagaataaccatcc

SEQ ID NO: 636471 - DNA, 15 bp, Homo sapiens
aagaataaccatcca

SEQ ID NO: 636472 - DNA, 15 bp, Homo sapiens
agaataaccatccat

SEQ ID NO: 636473 - DNA, 15 bp, Homo sapiens
gaataaccatccatc

SEQ ID NO: 636474 - DNA, 15 bp, Homo sapiens
aataaccatccatcc

SEQ ID NO: 636475 - DNA, 15 bp, Homo sapiens
ataaccatccatcca

SEQ ID NO: 636476 - DNA, 15 bp, Homo sapiens
taaccatccatccaa

SEQ ID NO: 636477 - DNA, 15 bp, Homo sapiens
aaccatccatccaac

SEQ ID NO: 636478 - DNA, 15 bp, Homo sapiens
accatccatccaaca

SEQ ID NO: 636479 - DNA, 15 bp, Homo sapiens
ccatccatccaacaa

SEQ ID NO: 636480 - DNA, 15 bp, Homo sapiens
catccatccaacaac

SEQ ID NO: 636481 - DNA, 15 bp, Homo sapiens
atccatccaacaact

SEQ ID NO: 636482 - DNA, 15 bp, Homo sapiens
tccatccaacaacta

SEQ ID NO: 636483 - DNA, 15 bp, Homo sapiens
ccatccaacaactag

SEQ ID NO: 636484 - DNA, 15 bp, Homo sapiens
catccaacaactaga

SEQ ID NO: 636485 - DNA, 15 bp, Homo sapiens
atccaacaactagag

SEQ ID NO: 636486 - DNA, 15 bp, Homo sapiens
tccaacaactagagg

SEQ ID NO: 636487 - DNA, 15 bp, Homo sapiens
ccaacaactagagga

SEQ ID NO: 636488 - DNA, 15 bp, Homo sapiens
caacaactagaggaa

SEQ ID NO: 636489 - DNA, 15 bp, Homo sapiens
aacaactagaggaaa

SEQ ID NO: 636490 - DNA, 15 bp, Homo sapiens
acaactagaggaaaa

SEQ ID NO: 636491 - DNA, 15 bp, Homo sapiens
caactagaggaaaat

SEQ ID NO: 636492 - DNA, 15 bp, Homo sapiens
aactagaggaaaatt

SEQ ID NO: 636493 - DNA, 15 bp, Homo sapiens
actagaggaaaattt

SEQ ID NO: 636494 - DNA, 15 bp, Homo sapiens
ctagaggaaaattta

SEQ ID NO: 636495 - DNA, 15 bp, Homo sapiens
tagaggaaaatttat

SEQ ID NO: 636496 - DNA, 15 bp, Homo sapiens
agaggaaaatttatc

SEQ ID NO: 636497 - DNA, 15 bp, Homo sapiens
gaggaaaatttatca

SEQ ID NO: 636498 - DNA, 15 bp, Homo sapiens
aggaaaatttatcaa

SEQ ID NO: 636499 - DNA, 15 bp, Homo sapiens
ggaaaatttatcaat

SEQ ID NO: 636500 - DNA, 15 bp, Homo sapiens
gaaaatttatcaatg

SEQ ID NO: 636501 - DNA, 15 bp, Homo sapiens
aaaatttatcaatgg

SEQ ID NO: 636502 - DNA, 15 bp, Homo sapiens
aaatttatcaatggt

SEQ ID NO: 636503 - DNA, 15 bp, Homo sapiens
aatttatcaatggtt

SEQ ID NO: 636504 - DNA, 15 bp, Homo sapiens
atttatcaatggttt

SEQ ID NO: 636505 - DNA, 15 bp, Homo sapiens
tttatcaatggtttt

SEQ ID NO: 636506 - DNA, 15 bp, Homo sapiens
ttatcaatggttttg

SEQ ID NO: 636507 - DNA, 15 bp, Homo sapiens
tatcaatggttttgc

SEQ ID NO: 636508 - DNA, 15 bp, Homo sapiens
atcaatggttttgct

SEQ ID NO: 636509 - DNA, 15 bp, Homo sapiens
tcaatggttttgctt

SEQ ID NO: 636510 - DNA, 15 bp, Homo sapiens
caatggttttgcttt

SEQ ID NO: 636511 - DNA, 15 bp, Homo sapiens
aatggttttgcttta

SEQ ID NO: 636512 - DNA, 15 bp, Homo sapiens
atggttttgctttat

SEQ ID NO: 636513 - DNA, 15 bp, Homo sapiens
tggttttgctttatc

SEQ ID NO: 636514 - DNA, 15 bp, Homo sapiens
ggttttgctttatct

SEQ ID NO: 636515 - DNA, 15 bp, Homo sapiens
gttttgctttatctt

SEQ ID NO: 636516 - DNA, 15 bp, Homo sapiens
ttttgctttatcttt

SEQ ID NO: 636517 - DNA, 15 bp, Homo sapiens
tttgctttatctttc

SEQ ID NO: 636518 - DNA, 15 bp, Homo sapiens
ttgctttatctttcc

SEQ ID NO: 636519 - DNA, 15 bp, Homo sapiens
tgctttatctttcct

SEQ ID NO: 636520 - DNA, 15 bp, Homo sapiens
gctttatctttccta

SEQ ID NO: 636521 - DNA, 15 bp, Homo sapiens
ctttatctttcctat

SEQ ID NO: 636522 - DNA, 15 bp, Homo sapiens
tttatctttcctata

SEQ ID NO: 636523 - DNA, 15 bp, Homo sapiens
ttatctttcctataa

SEQ ID NO: 636524 - DNA, 15 bp, Homo sapiens
tatctttcctataat

SEQ ID NO: 636525 - DNA, 15 bp, Homo sapiens
atctttcctataatt

SEQ ID NO: 636526 - DNA, 15 bp, Homo sapiens
tctttcctataatta

SEQ ID NO: 636527 - DNA, 15 bp, Homo sapiens
ctttcctataattaa

SEQ ID NO: 636528 - DNA, 15 bp, Homo sapiens
tttcctataattaag

SEQ ID NO: 636529 - DNA, 15 bp, Homo sapiens
ttcctataattaagc

SEQ ID NO: 636530 - DNA, 15 bp, Homo sapiens
tcctataattaagct

SEQ ID NO: 636531 - DNA, 15 bp, Homo sapiens
cctataattaagcta

SEQ ID NO: 636532 - DNA, 15 bp, Homo sapiens
ctataattaagctat

SEQ ID NO: 636533 - DNA, 15 bp, Homo sapiens
tataattaagctata

SEQ ID NO: 636534 - DNA, 15 bp, Homo sapiens
ataattaagctataa

SEQ ID NO: 636535 - DNA, 15 bp, Homo sapiens
taattaagctataaa

SEQ ID NO: 636536 - DNA, 15 bp, Homo sapiens
aattaagctataaaa

SEQ ID NO: 636537 - DNA, 15 bp, Homo sapiens
attaagctataaaaa

SEQ ID NO: 636538 - DNA, 15 bp, Homo sapiens
ttaagctataaaaaa

SEQ ID NO: 636539 - DNA, 15 bp, Homo sapiens
taagctataaaaaac

SEQ ID NO: 636540 - DNA, 15 bp, Homo sapiens
aagctataaaaaaca

SEQ ID NO: 636541 - DNA, 15 bp, Homo sapiens
agctataaaaaacaa

SEQ ID NO: 636542 - DNA, 15 bp, Homo sapiens
gctataaaaaacaac

SEQ ID NO: 636543 - DNA, 15 bp, Homo sapiens
ctataaaaaacaacc

SEQ ID NO: 636544 - DNA, 15 bp, Homo sapiens
tataaaaaacaacca

SEQ ID NO: 636545 - DNA, 15 bp, Homo sapiens
ataaaaaacaaccat

SEQ ID NO: 636546 - DNA, 15 bp, Homo sapiens
taaaaaacaaccatc

SEQ ID NO: 636547 - DNA, 15 bp, Homo sapiens
aaaaaacaaccatcc

SEQ ID NO: 636548 - DNA, 15 bp, Homo sapiens
aaaaacaaccatcca

SEQ ID NO: 636549 - DNA, 15 bp, Homo sapiens
aaaacaaccatccat

SEQ ID NO: 636550 - DNA, 15 bp, Homo sapiens
aaacaaccatccatg

SEQ ID NO: 636551 - DNA, 15 bp, Homo sapiens
aacaaccatccatgt

SEQ ID NO: 636552 - DNA, 15 bp, Homo sapiens
acaaccatccatgta

SEQ ID NO: 636553 - DNA, 15 bp, Homo sapiens
caaccatccatgtaa

SEQ ID NO: 636554 - DNA, 15 bp, Homo sapiens
aaccatccatgtaac

SEQ ID NO: 636555 - DNA, 15 bp, Homo sapiens
accatccatgtaaca

SEQ ID NO: 636556 - DNA, 15 bp, Homo sapiens
ccatccatgtaacaa

SEQ ID NO: 636557 - DNA, 15 bp, Homo sapiens
catccatgtaacaac

SEQ ID NO: 636558 - DNA, 15 bp, Homo sapiens
atccatgtaacaact

SEQ ID NO: 636559 - DNA, 15 bp, Homo sapiens
tccatgtaacaacta

SEQ ID NO: 636560 - DNA, 15 bp, Homo sapiens
ccatgtaacaactag

SEQ ID NO: 636561 - DNA, 15 bp, Homo sapiens
catgtaacaactaga

SEQ ID NO: 636562 - DNA, 15 bp, Homo sapiens
atgtaacaactagag

SEQ ID NO: 636563 - DNA, 15 bp, Homo sapiens
tgtaacaactagaga

SEQ ID NO: 636564 - DNA, 15 bp, Homo sapiens
gtaacaactagagaa

SEQ ID NO: 636565 - DNA, 15 bp, Homo sapiens
taacaactagagaaa

SEQ ID NO: 636566 - DNA, 15 bp, Homo sapiens
aacaactagagaaaa

SEQ ID NO: 636567 - DNA, 15 bp, Homo sapiens
acaactagagaaaac

SEQ ID NO: 636568 - DNA, 15 bp, Homo sapiens
caactagagaaaacc

SEQ ID NO: 636569 - DNA, 15 bp, Homo sapiens
aactagagaaaacct

SEQ ID NO: 636570 - DNA, 15 bp, Homo sapiens
actagagaaaacctt

SEQ ID NO: 636571 - DNA, 15 bp, Homo sapiens
ctagagaaaaccttt

SEQ ID NO: 636572 - DNA, 15 bp, Homo sapiens
tagagaaaaccttta

SEQ ID NO: 636573 - DNA, 15 bp, Homo sapiens
agagaaaacctttat

SEQ ID NO: 636574 - DNA, 15 bp, Homo sapiens
gagaaaacctttatc

SEQ ID NO: 636575 - DNA, 15 bp, Homo sapiens
agaaaacctttatca

SEQ ID NO: 636576 - DNA, 15 bp, Homo sapiens
gaaaacctttatcaa

SEQ ID NO: 636577 - DNA, 15 bp, Homo sapiens
aaaacctttatcaat

SEQ ID NO: 636578 - DNA, 15 bp, Homo sapiens
aaacctttatcaatg

SEQ ID NO: 636579 - DNA, 15 bp, Homo sapiens
aacctttatcaatga

SEQ ID NO: 636580 - DNA, 15 bp, Homo sapiens
acctttatcaatgac

SEQ ID NO: 636581 - DNA, 15 bp, Homo sapiens
cctttatcaatgact

SEQ ID NO: 636582 - DNA, 15 bp, Homo sapiens
ctttatcaatgactg

SEQ ID NO: 636583 - DNA, 15 bp, Homo sapiens
tttatcaatgactgt

SEQ ID NO: 636584 - DNA, 15 bp, Homo sapiens
ttatcaatgactgtg

SEQ ID NO: 636585 - DNA, 15 bp, Homo sapiens
tatcaatgactgtgg

SEQ ID NO: 636586 - DNA, 15 bp, Homo sapiens
atcaatgactgtggc

SEQ ID NO: 636587 - DNA, 15 bp, Homo sapiens
tcaatgactgtggct

SEQ ID NO: 636588 - DNA, 15 bp, Homo sapiens
caatgactgtggctt

SEQ ID NO: 636589 - DNA, 15 bp, Homo sapiens
aatgactgtggctta

SEQ ID NO: 636590 - DNA, 15 bp, Homo sapiens
atgactgtggcttat

SEQ ID NO: 636591 - DNA, 15 bp, Homo sapiens
tgactgtggcttatc

SEQ ID NO: 636592 - DNA, 15 bp, Homo sapiens
gactgtggcttatct

SEQ ID NO: 636593 - DNA, 15 bp, Homo sapiens
actgtggcttatctt

SEQ ID NO: 636594 - DNA, 15 bp, Homo sapiens
ctgtggcttatcttt

SEQ ID NO: 636595 - DNA, 15 bp, Homo sapiens
tgtggcttatctttc

SEQ ID NO: 636596 - DNA, 15 bp, Homo sapiens
gtggcttatctttcc

SEQ ID NO: 636597 - DNA, 15 bp, Homo sapiens
tggcttatctttcct

SEQ ID NO: 636598 - DNA, 15 bp, Homo sapiens
ggcttatctttcctg

SEQ ID NO: 636599 - DNA, 15 bp, Homo sapiens
gcttatctttcctga

SEQ ID NO: 636600 - DNA, 15 bp, Homo sapiens
cttatctttcctgat

SEQ ID NO: 636601 - DNA, 15 bp, Homo sapiens
ttatctttcctgata

SEQ ID NO: 636602 - DNA, 15 bp, Homo sapiens
tatctttcctgataa

SEQ ID NO: 636603 - DNA, 15 bp, Homo sapiens
atctttcctgataat

SEQ ID NO: 636604 - DNA, 15 bp, Homo sapiens
tctttcctgataatt

SEQ ID NO: 636605 - DNA, 15 bp, Homo sapiens
ctttcctgataatta

SEQ ID NO: 636606 - DNA, 15 bp, Homo sapiens
tttcctgataattag

SEQ ID NO: 636607 - DNA, 15 bp, Homo sapiens
ttcctgataattagg

SEQ ID NO: 636608 - DNA, 15 bp, Homo sapiens
tcctgataattaggc

SEQ ID NO: 636609 - DNA, 15 bp, Homo sapiens
cctgataattaggct

SEQ ID NO: 636610 - DNA, 15 bp, Homo sapiens
ctgataattaggctc

SEQ ID NO: 636611 - DNA, 15 bp, Homo sapiens
tgataattaggctct

SEQ ID NO: 636612 - DNA, 15 bp, Homo sapiens
gataattaggctctt

SEQ ID NO: 636613 - DNA, 15 bp, Homo sapiens
ataattaggctcttt

SEQ ID NO: 636614 - DNA, 15 bp, Homo sapiens
taattaggctctttc

SEQ ID NO: 636615 - DNA, 15 bp, Homo sapiens
aattaggctctttca

SEQ ID NO: 636616 - DNA, 15 bp, Homo sapiens
attaggctctttcag

SEQ ID NO: 636617 - DNA, 15 bp, Homo sapiens
ttaggctctttcagg

SEQ ID NO: 636618 - DNA, 15 bp, Homo sapiens
taggctctttcaggg

SEQ ID NO: 636619 - DNA, 15 bp, Homo sapiens
aggctctttcaggga

SEQ ID NO: 636620 - DNA, 15 bp, Homo sapiens
ggctctttcagggag

SEQ ID NO: 636621 - DNA, 15 bp, Homo sapiens
gctctttcagggagt

SEQ ID NO: 636622 - DNA, 15 bp, Homo sapiens
ctctttcagggagtt

SEQ ID NO: 636623 - DNA, 15 bp, Homo sapiens
tctttcagggagtta

SEQ ID NO: 636624 - DNA, 15 bp, Homo sapiens
ctttcagggagttat

SEQ ID NO: 636625 - DNA, 15 bp, Homo sapiens
tttcagggagttatt

SEQ ID NO: 636626 - DNA, 15 bp, Homo sapiens
ttcagggagttatta

SEQ ID NO: 636627 - DNA, 15 bp, Homo sapiens
tcagggagttattaa

SEQ ID NO: 636628 - DNA, 15 bp, Homo sapiens
cagggagttattaac

SEQ ID NO: 636629 - DNA, 15 bp, Homo sapiens
agggagttattaacc

SEQ ID NO: 636630 - DNA, 15 bp, Homo sapiens
gggagttattaaccg

SEQ ID NO: 636631 - DNA, 15 bp, Homo sapiens
ggagttattaaccga

SEQ ID NO: 636632 - DNA, 15 bp, Homo sapiens
gagttattaaccgat

SEQ ID NO: 636633 - DNA, 15 bp, Homo sapiens
agttattaaccgatt

SEQ ID NO: 636634 - DNA, 15 bp, Homo sapiens
gttattaaccgattt

SEQ ID NO: 636635 - DNA, 15 bp, Homo sapiens
ttattaaccgatttt

SEQ ID NO: 636636 - DNA, 15 bp, Homo sapiens
tattaaccgatttta

SEQ ID NO: 636637 - DNA, 15 bp, Homo sapiens
attaaccgattttaa

SEQ ID NO: 636638 - DNA, 15 bp, Homo sapiens
ttaaccgattttaaa

SEQ ID NO: 636639 - DNA, 15 bp, Homo sapiens
taaccgattttaaaa

SEQ ID NO: 636640 - DNA, 15 bp, Homo sapiens
aaccgattttaaaac

SEQ ID NO: 636641 - DNA, 15 bp, Homo sapiens
accgattttaaaact

SEQ ID NO: 636642 - DNA, 15 bp, Homo sapiens
ccgattttaaaactt

SEQ ID NO: 636643 - DNA, 15 bp, Homo sapiens
cgattttaaaacttt

SEQ ID NO: 636644 - DNA, 15 bp, Homo sapiens
gattttaaaactttt

SEQ ID NO: 636645 - DNA, 15 bp, Homo sapiens
attttaaaacttttg

SEQ ID NO: 636646 - DNA, 15 bp, Homo sapiens
ttttaaaacttttgt

SEQ ID NO: 636647 - DNA, 15 bp, Homo sapiens
tttaaaacttttgtc

SEQ ID NO: 636648 - DNA, 15 bp, Homo sapiens
ttaaaacttttgtct

SEQ ID NO: 636649 - DNA, 15 bp, Homo sapiens
taaaacttttgtctg

SEQ ID NO: 636650 - DNA, 15 bp, Homo sapiens
aaaacttttgtctga

SEQ ID NO: 636651 - DNA, 15 bp, Homo sapiens
aaacttttgtctgag

SEQ ID NO: 636652 - DNA, 15 bp, Homo sapiens
aacttttgtctgaga

SEQ ID NO: 636653 - DNA, 15 bp, Homo sapiens
acttttgtctgagat

SEQ ID NO: 636654 - DNA, 15 bp, Homo sapiens
cttttgtctgagatt

SEQ ID NO: 636655 - DNA, 15 bp, Homo sapiens
ttttgtctgagattg

SEQ ID NO: 636656 - DNA, 15 bp, Homo sapiens
tttgtctgagattga

SEQ ID NO: 636657 - DNA, 15 bp, Homo sapiens
ttgtctgagattgat

SEQ ID NO: 636658 - DNA, 15 bp, Homo sapiens
tgtctgagattgatt

SEQ ID NO: 636659 - DNA, 15 bp, Homo sapiens
gtctgagattgatta

SEQ ID NO: 636660 - DNA, 15 bp, Homo sapiens
tctgagattgattag

SEQ ID NO: 636661 - DNA, 15 bp, Homo sapiens
ctgagattgattagt

SEQ ID NO: 636662 - DNA, 15 bp, Homo sapiens
tgagattgattagta

SEQ ID NO: 636663 - DNA, 15 bp, Homo sapiens
gagattgattagtaa

SEQ ID NO: 636664 - DNA, 15 bp, Homo sapiens
agattgattagtaaa

SEQ ID NO: 636665 - DNA, 15 bp, Homo sapiens
gattgattagtaaag

SEQ ID NO: 636666 - DNA, 15 bp, Homo sapiens
attgattagtaaaga

SEQ ID NO: 636667 - DNA, 15 bp, Homo sapiens
ttgattagtaaagat

SEQ ID NO: 636668 - DNA, 15 bp, Homo sapiens
tgattagtaaagatt

SEQ ID NO: 636669 - DNA, 15 bp, Homo sapiens
gattagtaaagatta

SEQ ID NO: 636670 - DNA, 15 bp, Homo sapiens
attagtaaagattat

SEQ ID NO: 636671 - DNA, 15 bp, Homo sapiens
ttagtaaagattatt

SEQ ID NO: 636672 - DNA, 15 bp, Homo sapiens
tagtaaagattattt

SEQ ID NO: 636673 - DNA, 15 bp, Homo sapiens
agtaaagattatttc

SEQ ID NO: 636674 - DNA, 15 bp, Homo sapiens
gtaaagattatttct

SEQ ID NO: 636675 - DNA, 15 bp, Homo sapiens
taaagattatttctt

SEQ ID NO: 636676 - DNA, 15 bp, Homo sapiens
aaagattatttcttg

SEQ ID NO: 636677 - DNA, 15 bp, Homo sapiens
aagattatttcttga

SEQ ID NO: 636678 - DNA, 15 bp, Homo sapiens
agattatttcttgaa

SEQ ID NO: 636679 - DNA, 15 bp, Homo sapiens
gattatttcttgaac

SEQ ID NO: 636680 - DNA, 15 bp, Homo sapiens
attatttcttgaacc

SEQ ID NO: 636681 - DNA, 15 bp, Homo sapiens
ttatttcttgaacca

SEQ ID NO: 636682 - DNA, 15 bp, Homo sapiens
tatttcttgaaccaa

SEQ ID NO: 636683 - DNA, 15 bp, Homo sapiens
atttcttgaaccaaa

SEQ ID NO: 636684 - DNA, 15 bp, Homo sapiens
tttcttgaaccaaat

SEQ ID NO: 636685 - DNA, 15 bp, Homo sapiens
ttcttgaaccaaatt

SEQ ID NO: 636686 - DNA, 15 bp, Homo sapiens
tcttgaaccaaattg

SEQ ID NO: 636687 - DNA, 15 bp, Homo sapiens
cttgaaccaaattgt

SEQ ID NO: 636688 - DNA, 15 bp, Homo sapiens
ttgaaccaaattgtt

SEQ ID NO: 636689 - DNA, 15 bp, Homo sapiens
tgaaccaaattgttc

SEQ ID NO: 636690 - DNA, 15 bp, Homo sapiens
gaaccaaattgttct

SEQ ID NO: 636691 - DNA, 15 bp, Homo sapiens
aaccaaattgttctt

SEQ ID NO: 636692 - DNA, 15 bp, Homo sapiens
accaaattgttcttt

SEQ ID NO: 636693 - DNA, 15 bp, Homo sapiens
ccaaattgttctttc

SEQ ID NO: 636694 - DNA, 15 bp, Homo sapiens
caaattgttctttcg

SEQ ID NO: 636695 - DNA, 15 bp, Homo sapiens
aaattgttctttcgt

SEQ ID NO: 636696 - DNA, 15 bp, Homo sapiens
aattgttctttcgtt

SEQ ID NO: 636697 - DNA, 15 bp, Homo sapiens
attgttctttcgttt

SEQ ID NO: 636698 - DNA, 15 bp, Homo sapiens
ttgttctttcgtttg

SEQ ID NO: 636699 - DNA, 15 bp, Homo sapiens
tgttctttcgtttgg

SEQ ID NO: 636700 - DNA, 15 bp, Homo sapiens
gttctttcgtttggc

SEQ ID NO: 636701 - DNA, 15 bp, Homo sapiens
ttctttcgtttggct

SEQ ID NO: 636702 - DNA, 15 bp, Homo sapiens
tctttcgtttggcta

SEQ ID NO: 636703 - DNA, 15 bp, Homo sapiens
ctttcgtttggctac

SEQ ID NO: 636704 - DNA, 15 bp, Homo sapiens
tttcgtttggctact

SEQ ID NO: 636705 - DNA, 15 bp, Homo sapiens
ttcgtttggctactt

SEQ ID NO: 636706 - DNA, 15 bp, Homo sapiens
tcgtttggctacttt

SEQ ID NO: 636707 - DNA, 15 bp, Homo sapiens
cgtttggctactttg

SEQ ID NO: 636708 - DNA, 15 bp, Homo sapiens
gtttggctactttga

SEQ ID NO: 636709 - DNA, 15 bp, Homo sapiens
tttggctactttgat

SEQ ID NO: 636710 - DNA, 15 bp, Homo sapiens
ttggctactttgatt

SEQ ID NO: 636711 - DNA, 15 bp, Homo sapiens
tggctactttgatta

SEQ ID NO: 636712 - DNA, 15 bp, Homo sapiens
ggctactttgattaa

SEQ ID NO: 636713 - DNA, 15 bp, Homo sapiens
gctactttgattaaa

SEQ ID NO: 636714 - DNA, 15 bp, Homo sapiens
ctactttgattaaag

SEQ ID NO: 636715 - DNA, 15 bp, Homo sapiens
tactttgattaaaga

SEQ ID NO: 636716 - DNA, 15 bp, Homo sapiens
actttgattaaagaa

SEQ ID NO: 636717 - DNA, 15 bp, Homo sapiens
ctttgattaaagaag

SEQ ID NO: 636718 - DNA, 15 bp, Homo sapiens
tttgattaaagaaga

SEQ ID NO: 636719 - DNA, 15 bp, Homo sapiens
ttgattaaagaagaa

SEQ ID NO: 636720 - DNA, 15 bp, Homo sapiens
tgattaaagaagaaa

SEQ ID NO: 636721 - DNA, 15 bp, Homo sapiens
gattaaagaagaaag

SEQ ID NO: 636722 - DNA, 15 bp, Homo sapiens
attaaagaagaaaga

SEQ ID NO: 636723 - DNA, 15 bp, Homo sapiens
ttaaagaagaaagaa

SEQ ID NO: 636724 - DNA, 15 bp, Homo sapiens
taaagaagaaagaag

SEQ ID NO: 636725 - DNA, 15 bp, Homo sapiens
aaagaagaaagaaga

SEQ ID NO: 636726 - DNA, 15 bp, Homo sapiens
aagaagaaagaagag

SEQ ID NO: 636727 - DNA, 15 bp, Homo sapiens
agaagaaagaagaga

SEQ ID NO: 636728 - DNA, 15 bp, Homo sapiens
gaagaaagaagagat

SEQ ID NO: 636729 - DNA, 15 bp, Homo sapiens
aagaaagaagagata

SEQ ID NO: 636730 - DNA, 15 bp, Homo sapiens
agaaagaagagataa

SEQ ID NO: 636731 - DNA, 15 bp, Homo sapiens
gaaagaagagataat

SEQ ID NO: 636732 - DNA, 15 bp, Homo sapiens
aaagaagagataata

SEQ ID NO: 636733 - DNA, 15 bp, Homo sapiens
aagaagagataataa

SEQ ID NO: 636734 - DNA, 15 bp, Homo sapiens
agaagagataataat

SEQ ID NO: 636735 - DNA, 15 bp, Homo sapiens
gaagagataataatt

SEQ ID NO: 636736 - DNA, 15 bp, Homo sapiens
aagagataataattg

SEQ ID NO: 636737 - DNA, 15 bp, Homo sapiens
agagataataattgc

SEQ ID NO: 636738 - DNA, 15 bp, Homo sapiens
gagataataattgca

SEQ ID NO: 636739 - DNA, 15 bp, Homo sapiens
agataataattgcaa

SEQ ID NO: 636740 - DNA, 15 bp, Homo sapiens
gataataattgcaat

SEQ ID NO: 636741 - DNA, 15 bp, Homo sapiens
ataataattgcaatg

SEQ ID NO: 636742 - DNA, 15 bp, Homo sapiens
taataattgcaatga

SEQ ID NO: 636743 - DNA, 15 bp, Homo sapiens
aataattgcaatgat

SEQ ID NO: 636744 - DNA, 15 bp, Homo sapiens
ataattgcaatgatt

SEQ ID NO: 636745 - DNA, 15 bp, Homo sapiens
taattgcaatgattc

SEQ ID NO: 636746 - DNA, 15 bp, Homo sapiens
aattgcaatgattct

SEQ ID NO: 636747 - DNA, 15 bp, Homo sapiens
attgcaatgattctt

SEQ ID NO: 636748 - DNA, 15 bp, Homo sapiens
ttgcaatgattcttt

SEQ ID NO: 636749 - DNA, 15 bp, Homo sapiens
tgcaatgattctttt

SEQ ID NO: 636750 - DNA, 15 bp, Homo sapiens
gcaatgattctttta

SEQ ID NO: 636751 - DNA, 15 bp, Homo sapiens
caatgattcttttat

SEQ ID NO: 636752 - DNA, 15 bp, Homo sapiens
aatgattcttttatt

SEQ ID NO: 636753 - DNA, 15 bp, Homo sapiens
atgattcttttattt

SEQ ID NO: 636754 - DNA, 15 bp, Homo sapiens
tgattcttttatttt

SEQ ID NO: 636755 - DNA, 15 bp, Homo sapiens
gattcttttatttta

SEQ ID NO: 636756 - DNA, 15 bp, Homo sapiens
attcttttattttat

SEQ ID NO: 636757 - DNA, 15 bp, Homo sapiens
ttcttttattttatt

SEQ ID NO: 636758 - DNA, 15 bp, Homo sapiens
tcttttattttattt

SEQ ID NO: 636759 - DNA, 15 bp, Homo sapiens
cttttattttatttt

SEQ ID NO: 636760 - DNA, 15 bp, Homo sapiens
ttattttattttata

SEQ ID NO: 636761 - DNA, 15 bp, Homo sapiens
tattttattttatag

SEQ ID NO: 636762 - DNA, 15 bp, Homo sapiens
attttattttatagg

SEQ ID NO: 636763 - DNA, 15 bp, Homo sapiens
ttttattttataggg

SEQ ID NO: 636764 - DNA, 15 bp, Homo sapiens
tttattttatagggt

SEQ ID NO: 636765 - DNA, 15 bp, Homo sapiens
ttattttatagggtc

SEQ ID NO: 636766 - DNA, 15 bp, Homo sapiens
tattttatagggtcg

SEQ ID NO: 636767 - DNA, 15 bp, Homo sapiens
attttatagggtcgt

SEQ ID NO: 636768 - DNA, 15 bp, Homo sapiens
ttttatagggtcgtt

SEQ ID NO: 636769 - DNA, 15 bp, Homo sapiens
tttatagggtcgttg

SEQ ID NO: 636770 - DNA, 15 bp, Homo sapiens
ttatagggtcgttgg

SEQ ID NO: 636771 - DNA, 15 bp, Homo sapiens
tatagggtcgttggc

SEQ ID NO: 636772 - DNA, 15 bp, Homo sapiens
atagggtcgttggct

SEQ ID NO: 636773 - DNA, 15 bp, Homo sapiens
tagggtcgttggctg

SEQ ID NO: 636774 - DNA, 15 bp, Homo sapiens
agggtcgttggctgt

SEQ ID NO: 636775 - DNA, 15 bp, Homo sapiens
gggtcgttggctgtg

SEQ ID NO: 636776 - DNA, 15 bp, Homo sapiens
ggtcgttggctgtgg

SEQ ID NO: 636777 - DNA, 15 bp, Homo sapiens
gtcgttggctgtggg

SEQ ID NO: 636778 - DNA, 15 bp, Homo sapiens
tcgttggctgtgggt

SEQ ID NO: 636779 - DNA, 15 bp, Homo sapiens
cgttggctgtgggtt

SEQ ID NO: 636780 - DNA, 15 bp, Homo sapiens
gttggctgtgggttg

SEQ ID NO: 636781 - DNA, 15 bp, Homo sapiens
ttggctgtgggttgc

SEQ ID NO: 636782 - DNA, 15 bp, Homo sapiens
tggctgtgggttgca

SEQ ID NO: 636783 - DNA, 15 bp, Homo sapiens
ggctgtgggttgcaa

SEQ ID NO: 636784 - DNA, 15 bp, Homo sapiens
gctgtgggttgcaat

SEQ ID NO: 636785 - DNA, 15 bp, Homo sapiens
ctgtgggttgcaatt

SEQ ID NO: 636786 - DNA, 15 bp, Homo sapiens
tgtgggttgcaatta

SEQ ID NO: 636787 - DNA, 15 bp, Homo sapiens
gtgggttgcaattac

SEQ ID NO: 636788 - DNA, 15 bp, Homo sapiens
tgggttgcaattacc

SEQ ID NO: 636789 - DNA, 15 bp, Homo sapiens
gggttgcaattacca

SEQ ID NO: 636790 - DNA, 15 bp, Homo sapiens
ggttgcaattaccat

SEQ ID NO: 636791 - DNA, 15 bp, Homo sapiens
gttgcaattaccatg

SEQ ID NO: 636792 - DNA, 15 bp, Homo sapiens
ttgcaattaccatgt

SEQ ID NO: 636793 - DNA, 15 bp, Homo sapiens
tgcaattaccatgtc

SEQ ID NO: 636794 - DNA, 15 bp, Homo sapiens
gcaattaccatgtct

SEQ ID NO: 636795 - DNA, 15 bp, Homo sapiens
caattaccatgtctg

SEQ ID NO: 636796 - DNA, 15 bp, Homo sapiens
aattaccatgtctga

SEQ ID NO: 636797 - DNA, 15 bp, Homo sapiens
attaccatgtctgac

SEQ ID NO: 636798 - DNA, 15 bp, Homo sapiens
ttaccatgtctgact

SEQ ID NO: 636799 - DNA, 15 bp, Homo sapiens
taccatgtctgactc

SEQ ID NO: 636800 - DNA, 15 bp, Homo sapiens
accatgtctgactca

SEQ ID NO: 636801 - DNA, 15 bp, Homo sapiens
ccatgtctgactcag

SEQ ID NO: 636802 - DNA, 15 bp, Homo sapiens
catgtctgactcagt

SEQ ID NO: 636803 - DNA, 15 bp, Homo sapiens
atgtctgactcagta

SEQ ID NO: 636804 - DNA, 15 bp, Homo sapiens
tgtctgactcagtaa

SEQ ID NO: 636805 - DNA, 15 bp, Homo sapiens
gtctgactcagtaat

SEQ ID NO: 636806 - DNA, 15 bp, Homo sapiens
tctgactcagtaatt

SEQ ID NO: 636807 - DNA, 15 bp, Homo sapiens
ctgactcagtaattc

SEQ ID NO: 636808 - DNA, 15 bp, Homo sapiens
tgactcagtaattct

SEQ ID NO: 636809 - DNA, 15 bp, Homo sapiens
gactcagtaattctt

SEQ ID NO: 636810 - DNA, 15 bp, Homo sapiens
actcagtaattcttc

SEQ ID NO: 636811 - DNA, 15 bp, Homo sapiens
ctcagtaattcttcg

SEQ ID NO: 636812 - DNA, 15 bp, Homo sapiens
tcagtaattcttcga

SEQ ID NO: 636813 - DNA, 15 bp, Homo sapiens
cagtaattcttcgaa

SEQ ID NO: 636814 - DNA, 15 bp, Homo sapiens
agtaattcttcgaag

SEQ ID NO: 636815 - DNA, 15 bp, Homo sapiens
gtaattcttcgaagt

SEQ ID NO: 636816 - DNA, 15 bp, Homo sapiens
taattcttcgaagta

SEQ ID NO: 636817 - DNA, 15 bp, Homo sapiens
aattcttcgaagtat

SEQ ID NO: 636818 - DNA, 15 bp, Homo sapiens
attcttcgaagtata

SEQ ID NO: 636819 - DNA, 15 bp, Homo sapiens
ttcttcgaagtataa

SEQ ID NO: 636820 - DNA, 15 bp, Homo sapiens
tcttcgaagtataaa

SEQ ID NO: 636821 - DNA, 15 bp, Homo sapiens
cttcgaagtataaag

SEQ ID NO: 636822 - DNA, 15 bp, Homo sapiens
ttcgaagtataaaga

SEQ ID NO: 636823 - DNA, 15 bp, Homo sapiens
tcgaagtataaagaa

SEQ ID NO: 636824 - DNA, 15 bp, Homo sapiens
cgaagtataaagaaa

SEQ ID NO: 636825 - DNA, 15 bp, Homo sapiens
gaagtataaagaaat

SEQ ID NO: 636826 - DNA, 15 bp, Homo sapiens
aagtataaagaaatt

SEQ ID NO: 636827 - DNA, 15 bp, Homo sapiens
agtataaagaaattt

SEQ ID NO: 636828 - DNA, 15 bp, Homo sapiens
gtataaagaaatttg

SEQ ID NO: 636829 - DNA, 15 bp, Homo sapiens
tataaagaaatttgg

SEQ ID NO: 636830 - DNA, 15 bp, Homo sapiens
ataaagaaatttgga

SEQ ID NO: 636831 - DNA, 15 bp, Homo sapiens
taaagaaatttggag

SEQ ID NO: 636832 - DNA, 15 bp, Homo sapiens
aaagaaatttggaga

SEQ ID NO: 636833 - DNA, 15 bp, Homo sapiens
aagaaatttggagag

SEQ ID NO: 636834 - DNA, 15 bp, Homo sapiens
agaaatttggagagg

SEQ ID NO: 636835 - DNA, 15 bp, Homo sapiens
gaaatttggagagga

SEQ ID NO: 636836 - DNA, 15 bp, Homo sapiens
aaatttggagaggag

SEQ ID NO: 636837 - DNA, 15 bp, Homo sapiens
aatttggagaggaga

SEQ ID NO: 636838 - DNA, 15 bp, Homo sapiens
atttggagaggagaa

SEQ ID NO: 636839 - DNA, 15 bp, Homo sapiens
tttggagaggagaat

SEQ ID NO: 636840 - DNA, 15 bp, Homo sapiens
ttggagaggagaatg

SEQ ID NO: 636841 - DNA, 15 bp, Homo sapiens
tggagaggagaatga

SEQ ID NO: 636842 - DNA, 15 bp, Homo sapiens
ggagaggagaatgat

SEQ ID NO: 636843 - DNA, 15 bp, Homo sapiens
gagaggagaatgatg

SEQ ID NO: 636844 - DNA, 15 bp, Homo sapiens
agaggagaatgatgg

SEQ ID NO: 636845 - DNA, 15 bp, Homo sapiens
gaggagaatgatggt

SEQ ID NO: 636846 - DNA, 15 bp, Homo sapiens
aggagaatgatggtt

SEQ ID NO: 636847 - DNA, 15 bp, Homo sapiens
ggagaatgatggttt

SEQ ID NO: 636848 - DNA, 15 bp, Homo sapiens
gagaatgatggtttt

SEQ ID NO: 636849 - DNA, 15 bp, Homo sapiens
agaatgatggttttg

SEQ ID NO: 636850 - DNA, 15 bp, Homo sapiens
gaatgatggttttga

SEQ ID NO: 636851 - DNA, 15 bp, Homo sapiens
aatgatggttttgag

SEQ ID NO: 636852 - DNA, 15 bp, Homo sapiens
atgatggttttgagt

SEQ ID NO: 636853 - DNA, 15 bp, Homo sapiens
tgatggttttgagtc

SEQ ID NO: 636854 - DNA, 15 bp, Homo sapiens
gatggttttgagtca

SEQ ID NO: 636855 - DNA, 15 bp, Homo sapiens
atggttttgagtcag

SEQ ID NO: 636856 - DNA, 15 bp, Homo sapiens
tggttttgagtcaga

SEQ ID NO: 636857 - DNA, 15 bp, Homo sapiens
ggttttgagtcagat

SEQ ID NO: 636858 - DNA, 15 bp, Homo sapiens
gttttgagtcagata

SEQ ID NO: 636859 - DNA, 15 bp, Homo sapiens
ttttgagtcagataa

SEQ ID NO: 636860 - DNA, 15 bp, Homo sapiens
tttgagtcagataaa

SEQ ID NO: 636861 - DNA, 15 bp, Homo sapiens
ttgagtcagataaat

SEQ ID NO: 636862 - DNA, 15 bp, Homo sapiens
tgagtcagataaatc

SEQ ID NO: 636863 - DNA, 15 bp, Homo sapiens
gagtcagataaatca

SEQ ID NO: 636864 - DNA, 15 bp, Homo sapiens
agtcagataaatcat

SEQ ID NO: 636865 - DNA, 15 bp, Homo sapiens
gtcagataaatcatg

SEQ ID NO: 636866 - DNA, 15 bp, Homo sapiens
tcagataaatcatgt

SEQ ID NO: 636867 - DNA, 15 bp, Homo sapiens
cagataaatcatgtg

SEQ ID NO: 636868 - DNA, 15 bp, Homo sapiens
agataaatcatgtga

SEQ ID NO: 636869 - DNA, 15 bp, Homo sapiens
gataaatcatgtgag

SEQ ID NO: 636870 - DNA, 15 bp, Homo sapiens
ataaatcatgtgagt

SEQ ID NO: 636871 - DNA, 15 bp, Homo sapiens
taaatcatgtgagtg

SEQ ID NO: 636872 - DNA, 15 bp, Homo sapiens
aaatcatgtgagtgg

SEQ ID NO: 636873 - DNA, 15 bp, Homo sapiens
aatcatgtgagtggc

SEQ ID NO: 636874 - DNA, 15 bp, Homo sapiens
atcatgtgagtggct

SEQ ID NO: 636875 - DNA, 15 bp, Homo sapiens
tcatgtgagtggctt

SEQ ID NO: 636876 - DNA, 15 bp, Homo sapiens
catgtgagtggcttt

SEQ ID NO: 636877 - DNA, 15 bp, Homo sapiens
atgtgagtggctttt

SEQ ID NO: 636878 - DNA, 15 bp, Homo sapiens
tgtgagtggcttttt

SEQ ID NO: 636879 - DNA, 15 bp, Homo sapiens
gtgagtggctttttt

SEQ ID NO: 636880 - DNA, 15 bp, Homo sapiens
tgagtggcttttttc

SEQ ID NO: 636881 - DNA, 15 bp, Homo sapiens
gagtggcttttttcc

SEQ ID NO: 636882 - DNA, 15 bp, Homo sapiens
agtggcttttttccc

SEQ ID NO: 636883 - DNA, 15 bp, Homo sapiens
gtggcttttttccct

SEQ ID NO: 636884 - DNA, 15 bp, Homo sapiens
tggcttttttccctc

SEQ ID NO: 636885 - DNA, 15 bp, Homo sapiens
ggcttttttccctca

SEQ ID NO: 636886 - DNA, 15 bp, Homo sapiens
gcttttttccctcac

SEQ ID NO: 636887 - DNA, 15 bp, Homo sapiens
cttttttccctcact

SEQ ID NO: 636888 - DNA, 15 bp, Homo sapiens
ttttttccctcactg

SEQ ID NO: 636889 - DNA, 15 bp, Homo sapiens
tttttccctcactgc

SEQ ID NO: 636890 - DNA, 15 bp, Homo sapiens
ttttccctcactgca

SEQ ID NO: 636891 - DNA, 15 bp, Homo sapiens
tttccctcactgcat

SEQ ID NO: 636892 - DNA, 15 bp, Homo sapiens
ttccctcactgcatc

SEQ ID NO: 636893 - DNA, 15 bp, Homo sapiens
tccctcactgcatct

SEQ ID NO: 636894 - DNA, 15 bp, Homo sapiens
ccctcactgcatctt

SEQ ID NO: 636895 - DNA, 15 bp, Homo sapiens
cctcactgcatcttg

SEQ ID NO: 636896 - DNA, 15 bp, Homo sapiens
ctcactgcatcttgt

SEQ ID NO: 636897 - DNA, 15 bp, Homo sapiens
tcactgcatcttgta

SEQ ID NO: 636898 - DNA, 15 bp, Homo sapiens
cactgcatcttgtac

SEQ ID NO: 636899 - DNA, 15 bp, Homo sapiens
actgcatcttgtaca

SEQ ID NO: 636900 - DNA, 15 bp, Homo sapiens
ctgcatcttgtacaa

SEQ ID NO: 636901 - DNA, 15 bp, Homo sapiens
tgcatcttgtacaag

SEQ ID NO: 636902 - DNA, 15 bp, Homo sapiens
gcatcttgtacaagg

SEQ ID NO: 636903 - DNA, 15 bp, Homo sapiens
catcttgtacaagga

SEQ ID NO: 636904 - DNA, 15 bp, Homo sapiens
atcttgtacaaggag

SEQ ID NO: 636905 - DNA, 15 bp, Homo sapiens
tcttgtacaaggaga

SEQ ID NO: 636906 - DNA, 15 bp, Homo sapiens
cttgtacaaggagag

SEQ ID NO: 636907 - DNA, 15 bp, Homo sapiens
ttgtacaaggagagg

SEQ ID NO: 636908 - DNA, 15 bp, Homo sapiens
tgtacaaggagaggt

SEQ ID NO: 636909 - DNA, 15 bp, Homo sapiens
gtacaaggagaggtg

SEQ ID NO: 636910 - DNA, 15 bp, Homo sapiens
tacaaggagaggtga

SEQ ID NO: 636911 - DNA, 15 bp, Homo sapiens
acaaggagaggtgag

SEQ ID NO: 636912 - DNA, 15 bp, Homo sapiens
caaggagaggtgaga

SEQ ID NO: 636913 - DNA, 15 bp, Homo sapiens
aaggagaggtgagaa

SEQ ID NO: 636914 - DNA, 15 bp, Homo sapiens
aggagaggtgagaac

SEQ ID NO: 636915 - DNA, 15 bp, Homo sapiens
ggagaggtgagaaca

SEQ ID NO: 636916 - DNA, 15 bp, Homo sapiens
gagaggtgagaacaa

SEQ ID NO: 636917 - DNA, 15 bp, Homo sapiens
agaggtgagaacaaa

SEQ ID NO: 636918 - DNA, 15 bp, Homo sapiens
gaggtgagaacaaaa

SEQ ID NO: 636919 - DNA, 15 bp, Homo sapiens
aggtgagaacaaaag

SEQ ID NO: 636920 - DNA, 15 bp, Homo sapiens
ggtgagaacaaaagt

SEQ ID NO: 636921 - DNA, 15 bp, Homo sapiens
gtgagaacaaaagta

SEQ ID NO: 636922 - DNA, 15 bp, Homo sapiens
tgagaacaaaagtag

SEQ ID NO: 636923 - DNA, 15 bp, Homo sapiens
gagaacaaaagtagg

SEQ ID NO: 636924 - DNA, 15 bp, Homo sapiens
agaacaaaagtagga

SEQ ID NO: 636925 - DNA, 15 bp, Homo sapiens
gaacaaaagtaggac

SEQ ID NO: 636926 - DNA, 15 bp, Homo sapiens
aacaaaagtaggaca

SEQ ID NO: 636927 - DNA, 15 bp, Homo sapiens
acaaaagtaggacaa

SEQ ID NO: 636928 - DNA, 15 bp, Homo sapiens
caaaagtaggacaag

SEQ ID NO: 636929 - DNA, 15 bp, Homo sapiens
aaaagtaggacaagc

SEQ ID NO: 636930 - DNA, 15 bp, Homo sapiens
aaagtaggacaagct

SEQ ID NO: 636931 - DNA, 15 bp, Homo sapiens
aagtaggacaagctg

SEQ ID NO: 636932 - DNA, 15 bp, Homo sapiens
agtaggacaagctgg

SEQ ID NO: 636933 - DNA, 15 bp, Homo sapiens
gtaggacaagctggt

SEQ ID NO: 636934 - DNA, 15 bp, Homo sapiens
taggacaagctggtc

SEQ ID NO: 636935 - DNA, 15 bp, Homo sapiens
aggacaagctggtca

SEQ ID NO: 636936 - DNA, 15 bp, Homo sapiens
ggacaagctggtcaa

SEQ ID NO: 636937 - DNA, 15 bp, Homo sapiens
gacaagctggtcaag

SEQ ID NO: 636938 - DNA, 15 bp, Homo sapiens
acaagctggtcaagt

SEQ ID NO: 636939 - DNA, 15 bp, Homo sapiens
caagctggtcaagtt

SEQ ID NO: 636940 - DNA, 15 bp, Homo sapiens
aagctggtcaagttt

SEQ ID NO: 636941 - DNA, 15 bp, Homo sapiens
agctggtcaagtttc

SEQ ID NO: 636942 - DNA, 15 bp, Homo sapiens
gctggtcaagtttca

SEQ ID NO: 636943 - DNA, 15 bp, Homo sapiens
ctggtcaagtttcaa

SEQ ID NO: 636944 - DNA, 15 bp, Homo sapiens
tggtcaagtttcaag

SEQ ID NO: 636945 - DNA, 15 bp, Homo sapiens
ggtcaagtttcaagg

SEQ ID NO: 636946 - DNA, 15 bp, Homo sapiens
gtcaagtttcaagga

SEQ ID NO: 636947 - DNA, 15 bp, Homo sapiens
tcaagtttcaaggag

SEQ ID NO: 636948 - DNA, 15 bp, Homo sapiens
caagtttcaaggagc

SEQ ID NO: 636949 - DNA, 15 bp, Homo sapiens
aagtttcaaggagca

SEQ ID NO: 636950 - DNA, 15 bp, Homo sapiens
agtttcaaggagcag

SEQ ID NO: 636951 - DNA, 15 bp, Homo sapiens
gtttcaaggagcaga

SEQ ID NO: 636952 - DNA, 15 bp, Homo sapiens
tttcaaggagcagaa

SEQ ID NO: 636953 - DNA, 15 bp, Homo sapiens
ttcaaggagcagaaa

SEQ ID NO: 636954 - DNA, 15 bp, Homo sapiens
tcaaggagcagaaaa

SEQ ID NO: 636955 - DNA, 15 bp, Homo sapiens
caaggagcagaaaaa

SEQ ID NO: 636956 - DNA, 15 bp, Homo sapiens
aaggagcagaaaaaa

SEQ ID NO: 636957 - DNA, 15 bp, Homo sapiens
aggagcagaaaaaaa

SEQ ID NO: 636958 - DNA, 15 bp, Homo sapiens
ggagcagaaaaaaat

SEQ ID NO: 636959 - DNA, 15 bp, Homo sapiens
gagcagaaaaaaatc

SEQ ID NO: 636960 - DNA, 15 bp, Homo sapiens
agcagaaaaaaatca

SEQ ID NO: 636961 - DNA, 15 bp, Homo sapiens
gcagaaaaaaatcag

SEQ ID NO: 636962 - DNA, 15 bp, Homo sapiens
cagaaaaaaatcagc

SEQ ID NO: 636963 - DNA, 15 bp, Homo sapiens
agaaaaaaatcagca

SEQ ID NO: 636964 - DNA, 15 bp, Homo sapiens
gaaaaaaatcagcaa

SEQ ID NO: 636965 - DNA, 15 bp, Homo sapiens
aaaaaaatcagcaac

SEQ ID NO: 636966 - DNA, 15 bp, Homo sapiens
aaaaaatcagcaaca

SEQ ID NO: 636967 - DNA, 15 bp, Homo sapiens
aaaaatcagcaacag

SEQ ID NO: 636968 - DNA, 15 bp, Homo sapiens
aaaatcagcaacagt

SEQ ID NO: 636969 - DNA, 15 bp, Homo sapiens
aaatcagcaacagta

SEQ ID NO: 636970 - DNA, 15 bp, Homo sapiens
aatcagcaacagtag

SEQ ID NO: 636971 - DNA, 15 bp, Homo sapiens
atcagcaacagtagg

SEQ ID NO: 636972 - DNA, 15 bp, Homo sapiens
tcagcaacagtaggt

SEQ ID NO: 636973 - DNA, 15 bp, Homo sapiens
cagcaacagtaggta

SEQ ID NO: 636974 - DNA, 15 bp, Homo sapiens
agcaacagtaggtag

SEQ ID NO: 636975 - DNA, 15 bp, Homo sapiens
gcaacagtaggtaga

SEQ ID NO: 636976 - DNA, 15 bp, Homo sapiens
caacagtaggtagaa

SEQ ID NO: 636977 - DNA, 15 bp, Homo sapiens
aacagtaggtagaag

SEQ ID NO: 636978 - DNA, 15 bp, Homo sapiens
acagtaggtagaagt

SEQ ID NO: 636979 - DNA, 15 bp, Homo sapiens
cagtaggtagaagta

SEQ ID NO: 636980 - DNA, 15 bp, Homo sapiens
agtaggtagaagtat

SEQ ID NO: 636981 - DNA, 15 bp, Homo sapiens
gtaggtagaagtatc

SEQ ID NO: 636982 - DNA, 15 bp, Homo sapiens
taggtagaagtatca

SEQ ID NO: 636983 - DNA, 15 bp, Homo sapiens
aggtagaagtatcat

SEQ ID NO: 636984 - DNA, 15 bp, Homo sapiens
ggtagaagtatcatt

SEQ ID NO: 636985 - DNA, 15 bp, Homo sapiens
gtagaagtatcattg

SEQ ID NO: 636986 - DNA, 15 bp, Homo sapiens
tagaagtatcattgt

SEQ ID NO: 636987 - DNA, 15 bp, Homo sapiens
agaagtatcattgtg

SEQ ID NO: 636988 - DNA, 15 bp, Homo sapiens
gaagtatcattgtgt

SEQ ID NO: 636989 - DNA, 15 bp, Homo sapiens
aagtatcattgtgtg

SEQ ID NO: 636990 - DNA, 15 bp, Homo sapiens
agtatcattgtgtgt

SEQ ID NO: 636991 - DNA, 15 bp, Homo sapiens
gtatcattgtgtgtg

SEQ ID NO: 636992 - DNA, 15 bp, Homo sapiens
tatcattgtgtgtga

SEQ ID NO: 636993 - DNA, 15 bp, Homo sapiens
atcattgtgtgtgat

SEQ ID NO: 636994 - DNA, 15 bp, Homo sapiens
tcattgtgtgtgatt

SEQ ID NO: 636995 - DNA, 15 bp, Homo sapiens
cattgtgtgtgattc

SEQ ID NO: 636996 - DNA, 15 bp, Homo sapiens
attgtgtgtgattct

SEQ ID NO: 636997 - DNA, 15 bp, Homo sapiens
ttgtgtgtgattctt

SEQ ID NO: 636998 - DNA, 15 bp, Homo sapiens
tgtgtgtgattctta

SEQ ID NO: 636999 - DNA, 15 bp, Homo sapiens
gtgtgtgattcttat

SEQ ID NO: 637000 - DNA, 15 bp, Homo sapiens
tgtgtgattcttata

SEQ ID NO: 637001 - DNA, 15 bp, Homo sapiens
gtgtgattcttatac

SEQ ID NO: 637002 - DNA, 15 bp, Homo sapiens
tgtgattcttataca

SEQ ID NO: 637003 - DNA, 15 bp, Homo sapiens
gtgattcttatacac

SEQ ID NO: 637004 - DNA, 15 bp, Homo sapiens
tgattcttatacaca

SEQ ID NO: 637005 - DNA, 15 bp, Homo sapiens
gattcttatacacaa

SEQ ID NO: 637006 - DNA, 15 bp, Homo sapiens
attcttatacacaac

SEQ ID NO: 637007 - DNA, 15 bp, Homo sapiens
ttcttatacacaact

SEQ ID NO: 637008 - DNA, 15 bp, Homo sapiens
tcttatacacaactg

SEQ ID NO: 637009 - DNA, 15 bp, Homo sapiens
cttatacacaactgt

SEQ ID NO: 637010 - DNA, 15 bp, Homo sapiens
ttatacacaactgtg

SEQ ID NO: 637011 - DNA, 15 bp, Homo sapiens
tatacacaactgtgt

SEQ ID NO: 637012 - DNA, 15 bp, Homo sapiens
atacacaactgtgtg

SEQ ID NO: 637013 - DNA, 15 bp, Homo sapiens
tacacaactgtgtgg

SEQ ID NO: 637014 - DNA, 15 bp, Homo sapiens
acacaactgtgtggc

SEQ ID NO: 637015 - DNA, 15 bp, Homo sapiens
cacaactgtgtggct

SEQ ID NO: 637016 - DNA, 15 bp, Homo sapiens
acaactgtgtggctc

SEQ ID NO: 637017 - DNA, 15 bp, Homo sapiens
caactgtgtggctct

SEQ ID NO: 637018 - DNA, 15 bp, Homo sapiens
aactgtgtggctctc

SEQ ID NO: 637019 - DNA, 15 bp, Homo sapiens
actgtgtggctctcc

SEQ ID NO: 637020 - DNA, 15 bp, Homo sapiens
ctgtgtggctctccc

SEQ ID NO: 637021 - DNA, 15 bp, Homo sapiens
tgtgtggctctccct

SEQ ID NO: 637022 - DNA, 15 bp, Homo sapiens
gtgtggctctcccta

SEQ ID NO: 637023 - DNA, 15 bp, Homo sapiens
tgtggctctccctag

SEQ ID NO: 637024 - DNA, 15 bp, Homo sapiens
gtggctctccctaga

SEQ ID NO: 637025 - DNA, 15 bp, Homo sapiens
tggctctccctagaa

SEQ ID NO: 637026 - DNA, 15 bp, Homo sapiens
ggctctccctagaat

SEQ ID NO: 637027 - DNA, 15 bp, Homo sapiens
gctctccctagaatc

SEQ ID NO: 637028 - DNA, 15 bp, Homo sapiens
ctctccctagaatcc

SEQ ID NO: 637029 - DNA, 15 bp, Homo sapiens
tctccctagaatcca

SEQ ID NO: 637030 - DNA, 15 bp, Homo sapiens
ctccctagaatccat

SEQ ID NO: 637031 - DNA, 15 bp, Homo sapiens
tccctagaatccatg

SEQ ID NO: 637032 - DNA, 15 bp, Homo sapiens
ccctagaatccatgt

SEQ ID NO: 637033 - DNA, 15 bp, Homo sapiens
cctagaatccatgta

SEQ ID NO: 637034 - DNA, 15 bp, Homo sapiens
ctagaatccatgtaa

SEQ ID NO: 637035 - DNA, 15 bp, Homo sapiens
tagaatccatgtaac

SEQ ID NO: 637036 - DNA, 15 bp, Homo sapiens
agaatccatgtaacg

SEQ ID NO: 637037 - DNA, 15 bp, Homo sapiens
gaatccatgtaacgt

SEQ ID NO: 637038 - DNA, 15 bp, Homo sapiens
aatccatgtaacgta

SEQ ID NO: 637039 - DNA, 15 bp, Homo sapiens
atccatgtaacgtaa

SEQ ID NO: 637040 - DNA, 15 bp, Homo sapiens
tccatgtaacgtaat

SEQ ID NO: 637041 - DNA, 15 bp, Homo sapiens
ccatgtaacgtaata

SEQ ID NO: 637042 - DNA, 15 bp, Homo sapiens
catgtaacgtaatat

SEQ ID NO: 637043 - DNA, 15 bp, Homo sapiens
atgtaacgtaatatc

SEQ ID NO: 637044 - DNA, 15 bp, Homo sapiens
tgtaacgtaatatct

SEQ ID NO: 637045 - DNA, 15 bp, Homo sapiens
gtaacgtaatatctg

SEQ ID NO: 637046 - DNA, 15 bp, Homo sapiens
taacgtaatatctga

SEQ ID NO: 637047 - DNA, 15 bp, Homo sapiens
aacgtaatatctgaa

SEQ ID NO: 637048 - DNA, 15 bp, Homo sapiens
acgtaatatctgaaa

SEQ ID NO: 637049 - DNA, 15 bp, Homo sapiens
cgtaatatctgaaag

SEQ ID NO: 637050 - DNA, 15 bp, Homo sapiens
gtaatatctgaaagc

SEQ ID NO: 637051 - DNA, 15 bp, Homo sapiens
taatatctgaaagca

SEQ ID NO: 637052 - DNA, 15 bp, Homo sapiens
aatatctgaaagcac

SEQ ID NO: 637053 - DNA, 15 bp, Homo sapiens
atatctgaaagcact

SEQ ID NO: 637054 - DNA, 15 bp, Homo sapiens
tatctgaaagcacta

SEQ ID NO: 637055 - DNA, 15 bp, Homo sapiens
atctgaaagcactag

SEQ ID NO: 637056 - DNA, 15 bp, Homo sapiens
tctgaaagcactagg

SEQ ID NO: 637057 - DNA, 15 bp, Homo sapiens
ctgaaagcactaggt

SEQ ID NO: 637058 - DNA, 15 bp, Homo sapiens
tgaaagcactaggta

SEQ ID NO: 637059 - DNA, 15 bp, Homo sapiens
gaaagcactaggtaa

SEQ ID NO: 637060 - DNA, 15 bp, Homo sapiens
aaagcactaggtaag

SEQ ID NO: 637061 - DNA, 15 bp, Homo sapiens
aagcactaggtaaga

SEQ ID NO: 637062 - DNA, 15 bp, Homo sapiens
agcactaggtaagaa

SEQ ID NO: 637063 - DNA, 15 bp, Homo sapiens
gcactaggtaagaac

SEQ ID NO: 637064 - DNA, 15 bp, Homo sapiens
cactaggtaagaaca

SEQ ID NO: 637065 - DNA, 15 bp, Homo sapiens
actaggtaagaacac

SEQ ID NO: 637066 - DNA, 15 bp, Homo sapiens
ctaggtaagaacaca

SEQ ID NO: 637067 - DNA, 15 bp, Homo sapiens
taggtaagaacacac

SEQ ID NO: 637068 - DNA, 15 bp, Homo sapiens
aggtaagaacacacc

SEQ ID NO: 637069 - DNA, 15 bp, Homo sapiens
ggtaagaacacacca

SEQ ID NO: 637070 - DNA, 15 bp, Homo sapiens
agtctggtatgaagg

SEQ ID NO: 637071 - DNA, 15 bp, Homo sapiens
gtctggtatgaaggc

SEQ ID NO: 637072 - DNA, 15 bp, Homo sapiens
tctggtatgaaggcg

SEQ ID NO: 637073 - DNA, 15 bp, Homo sapiens
ctggtatgaaggcgg

SEQ ID NO: 637074 - DNA, 15 bp, Homo sapiens
tggtatgaaggcggg

SEQ ID NO: 637075 - DNA, 15 bp, Homo sapiens
ggtatgaaggcggga

SEQ ID NO: 637076 - DNA, 15 bp, Homo sapiens
gtatgaaggcgggat

SEQ ID NO: 637077 - DNA, 15 bp, Homo sapiens
tatgaaggcgggatt

SEQ ID NO: 637078 - DNA, 15 bp, Homo sapiens
atgaaggcgggatta

SEQ ID NO: 637079 - DNA, 15 bp, Homo sapiens
tgaaggcgggattag

SEQ ID NO: 637080 - DNA, 15 bp, Homo sapiens
gaaggcgggattaga

SEQ ID NO: 637081 - DNA, 15 bp, Homo sapiens
aaggcgggattagat

SEQ ID NO: 637082 - DNA, 15 bp, Homo sapiens
aggcgggattagatg

SEQ ID NO: 637083 - DNA, 15 bp, Homo sapiens
ggcgggattagatga

SEQ ID NO: 637084 - DNA, 15 bp, Homo sapiens
gcgggattagatgag

SEQ ID NO: 637085 - DNA, 15 bp, Homo sapiens
cgggattagatgagg

SEQ ID NO: 637086 - DNA, 15 bp, Homo sapiens
gggattagatgaggt

SEQ ID NO: 637087 - DNA, 15 bp, Homo sapiens
ggattagatgaggtc

SEQ ID NO: 637088 - DNA, 15 bp, Homo sapiens
gattagatgaggtct

SEQ ID NO: 637089 - DNA, 15 bp, Homo sapiens
attagatgaggtcta

SEQ ID NO: 637090 - DNA, 15 bp, Homo sapiens
ttagatgaggtctaa

SEQ ID NO: 637091 - DNA, 15 bp, Homo sapiens
tagatgaggtctaat

SEQ ID NO: 637092 - DNA, 15 bp, Homo sapiens
agatgaggtctaatt

SEQ ID NO: 637093 - DNA, 15 bp, Homo sapiens
gatgaggtctaattt

SEQ ID NO: 637094 - DNA, 15 bp, Homo sapiens
atgaggtctaattta

SEQ ID NO: 637095 - DNA, 15 bp, Homo sapiens
tgaggtctaatttag

SEQ ID NO: 637096 - DNA, 15 bp, Homo sapiens
gaggtctaatttaga

SEQ ID NO: 637097 - DNA, 15 bp, Homo sapiens
aggtctaatttagaa

SEQ ID NO: 637098 - DNA, 15 bp, Homo sapiens
ggtctaatttagaag

SEQ ID NO: 637099 - DNA, 15 bp, Homo sapiens
gtctaatttagaaga

SEQ ID NO: 637100 - DNA, 15 bp, Homo sapiens
tctaatttagaagac

SEQ ID NO: 637101 - DNA, 15 bp, Homo sapiens
ctaatttagaagaca

SEQ ID NO: 637102 - DNA, 15 bp, Homo sapiens
taatttagaagacag

SEQ ID NO: 637103 - DNA, 15 bp, Homo sapiens
aatttagaagacaga

SEQ ID NO: 637104 - DNA, 15 bp, Homo sapiens
atttagaagacagaa

SEQ ID NO: 637105 - DNA, 15 bp, Homo sapiens
tttagaagacagaag

SEQ ID NO: 637106 - DNA, 15 bp, Homo sapiens
ttagaagacagaagt

SEQ ID NO: 637107 - DNA, 15 bp, Homo sapiens
tagaagacagaagtg

SEQ ID NO: 637108 - DNA, 15 bp, Homo sapiens
agaagacagaagtga

SEQ ID NO: 637109 - DNA, 15 bp, Homo sapiens
gaagacagaagtgag

SEQ ID NO: 637110 - DNA, 15 bp, Homo sapiens
aagacagaagtgagg

SEQ ID NO: 637111 - DNA, 15 bp, Homo sapiens
agacagaagtgaggc

SEQ ID NO: 637112 - DNA, 15 bp, Homo sapiens
gacagaagtgaggca

SEQ ID NO: 637113 - DNA, 15 bp, Homo sapiens
acagaagtgaggcat

SEQ ID NO: 637114 - DNA, 15 bp, Homo sapiens
cagaagtgaggcatc

SEQ ID NO: 637115 - DNA, 15 bp, Homo sapiens
agaagtgaggcatca

SEQ ID NO: 637116 - DNA, 15 bp, Homo sapiens
gaagtgaggcatcag

SEQ ID NO: 637117 - DNA, 15 bp, Homo sapiens
aagtgaggcatcagg

SEQ ID NO: 637118 - DNA, 15 bp, Homo sapiens
agtgaggcatcaggt

SEQ ID NO: 637119 - DNA, 15 bp, Homo sapiens
gtgaggcatcaggta

SEQ ID NO: 637120 - DNA, 15 bp, Homo sapiens
tgaggcatcaggtaa

SEQ ID NO: 637121 - DNA, 15 bp, Homo sapiens
gaggcatcaggtaag

SEQ ID NO: 637122 - DNA, 15 bp, Homo sapiens
aggcatcaggtaagt

SEQ ID NO: 637123 - DNA, 15 bp, Homo sapiens
ggcatcaggtaagtt

SEQ ID NO: 637124 - DNA, 15 bp, Homo sapiens
gcatcaggtaagttc

SEQ ID NO: 637125 - DNA, 15 bp, Homo sapiens
catcaggtaagttcc

SEQ ID NO: 637126 - DNA, 15 bp, Homo sapiens
atcaggtaagttcct

SEQ ID NO: 637127 - DNA, 15 bp, Homo sapiens
tcaggtaagttcctg

SEQ ID NO: 637128 - DNA, 15 bp, Homo sapiens
caggtaagttcctga

SEQ ID NO: 637129 - DNA, 15 bp, Homo sapiens
aggtaagttcctgaa

SEQ ID NO: 637130 - DNA, 15 bp, Homo sapiens
ggtaagttcctgaag

SEQ ID NO: 637131 - DNA, 15 bp, Homo sapiens
gtaagttcctgaagt

SEQ ID NO: 637132 - DNA, 15 bp, Homo sapiens
taagttcctgaagtg

SEQ ID NO: 637133 - DNA, 15 bp, Homo sapiens
aagttcctgaagtgg

SEQ ID NO: 637134 - DNA, 15 bp, Homo sapiens
agttcctgaagtgga

SEQ ID NO: 637135 - DNA, 15 bp, Homo sapiens
gttcctgaagtggag

SEQ ID NO: 637136 - DNA, 15 bp, Homo sapiens
ttcctgaagtggagg

SEQ ID NO: 637137 - DNA, 15 bp, Homo sapiens
tcctgaagtggaggt

SEQ ID NO: 637138 - DNA, 15 bp, Homo sapiens
cctgaagtggaggtg

SEQ ID NO: 637139 - DNA, 15 bp, Homo sapiens
ctgaagtggaggtgg

SEQ ID NO: 637140 - DNA, 15 bp, Homo sapiens
tgaagtggaggtggt

SEQ ID NO: 637141 - DNA, 15 bp, Homo sapiens
gaagtggaggtggtg

SEQ ID NO: 637142 - DNA, 15 bp, Homo sapiens
aagtggaggtggtgg

SEQ ID NO: 637143 - DNA, 15 bp, Homo sapiens
agtggaggtggtgga

SEQ ID NO: 637144 - DNA, 15 bp, Homo sapiens
gtggaggtggtggaa

SEQ ID NO: 637145 - DNA, 15 bp, Homo sapiens
tggaggtggtggaaa

SEQ ID NO: 637146 - DNA, 15 bp, Homo sapiens
ggaggtggtggaaac

SEQ ID NO: 637147 - DNA, 15 bp, Homo sapiens
gaggtggtggaaacg

SEQ ID NO: 637148 - DNA, 15 bp, Homo sapiens
aggtggtggaaacgg

SEQ ID NO: 637149 - DNA, 15 bp, Homo sapiens
ggtggtggaaacgga

SEQ ID NO: 637150 - DNA, 15 bp, Homo sapiens
gtggtggaaacggaa

SEQ ID NO: 637151 - DNA, 15 bp, Homo sapiens
tggtggaaacggaag

SEQ ID NO: 637152 - DNA, 15 bp, Homo sapiens
ggtggaaacggaagg

SEQ ID NO: 637153 - DNA, 15 bp, Homo sapiens
gtggaaacggaaggg

SEQ ID NO: 637154 - DNA, 15 bp, Homo sapiens
tggaaacggaagggt

SEQ ID NO: 637155 - DNA, 15 bp, Homo sapiens
ggaaacggaagggtt

SEQ ID NO: 637156 - DNA, 15 bp, Homo sapiens
gaaacggaagggtta

SEQ ID NO: 637157 - DNA, 15 bp, Homo sapiens
aaacggaagggttaa

SEQ ID NO: 637158 - DNA, 15 bp, Homo sapiens
aacggaagggttaaa

SEQ ID NO: 637159 - DNA, 15 bp, Homo sapiens
acggaagggttaaag

SEQ ID NO: 637160 - DNA, 15 bp, Homo sapiens
cggaagggttaaagg

SEQ ID NO: 637161 - DNA, 15 bp, Homo sapiens
ggaagggttaaaggt

SEQ ID NO: 637162 - DNA, 15 bp, Homo sapiens
gaagggttaaaggta

SEQ ID NO: 637163 - DNA, 15 bp, Homo sapiens
aagggttaaaggtat

SEQ ID NO: 637164 - DNA, 15 bp, Homo sapiens
agggttaaaggtatt

SEQ ID NO: 637165 - DNA, 15 bp, Homo sapiens
gggttaaaggtattt

SEQ ID NO: 637166 - DNA, 15 bp, Homo sapiens
ggttaaaggtatttt

SEQ ID NO: 637167 - DNA, 15 bp, Homo sapiens
gttaaaggtatttta

SEQ ID NO: 637168 - DNA, 15 bp, Homo sapiens
ttaaaggtattttag

SEQ ID NO: 637169 - DNA, 15 bp, Homo sapiens
taaaggtattttaga

SEQ ID NO: 637170 - DNA, 15 bp, Homo sapiens
aaaggtattttagaa

SEQ ID NO: 637171 - DNA, 15 bp, Homo sapiens
aaggtattttagaaa

SEQ ID NO: 637172 - DNA, 15 bp, Homo sapiens
aggtattttagaaat

SEQ ID NO: 637173 - DNA, 15 bp, Homo sapiens
ggtattttagaaatt

SEQ ID NO: 637174 - DNA, 15 bp, Homo sapiens
gtattttagaaattt

SEQ ID NO: 637175 - DNA, 15 bp, Homo sapiens
tattttagaaatttt

SEQ ID NO: 637176 - DNA, 15 bp, Homo sapiens
attttagaaatttta

SEQ ID NO: 637177 - DNA, 15 bp, Homo sapiens
ttttagaaattttaa

SEQ ID NO: 637178 - DNA, 15 bp, Homo sapiens
tttagaaattttaag

SEQ ID NO: 637179 - DNA, 15 bp, Homo sapiens
ttagaaattttaagt

SEQ ID NO: 637180 - DNA, 15 bp, Homo sapiens
tagaaattttaagta

SEQ ID NO: 637181 - DNA, 15 bp, Homo sapiens
agaaattttaagtaa

SEQ ID NO: 637182 - DNA, 15 bp, Homo sapiens
gaaattttaagtaat

SEQ ID NO: 637183 - DNA, 15 bp, Homo sapiens
aaattttaagtaatt

SEQ ID NO: 637184 - DNA, 15 bp, Homo sapiens
aattttaagtaattc

SEQ ID NO: 637185 - DNA, 15 bp, Homo sapiens
attttaagtaattca

SEQ ID NO: 637186 - DNA, 15 bp, Homo sapiens
ttttaagtaattcac

SEQ ID NO: 637187 - DNA, 15 bp, Homo sapiens
tttaagtaattcaca

SEQ ID NO: 637188 - DNA, 15 bp, Homo sapiens
ttaagtaattcacag

SEQ ID NO: 637189 - DNA, 15 bp, Homo sapiens
taagtaattcacagc

SEQ ID NO: 637190 - DNA, 15 bp, Homo sapiens
aagtaattcacagca

SEQ ID NO: 637191 - DNA, 15 bp, Homo sapiens
agtaattcacagcag

SEQ ID NO: 637192 - DNA, 15 bp, Homo sapiens
gtaattcacagcaga

SEQ ID NO: 637193 - DNA, 15 bp, Homo sapiens
taattcacagcagag

SEQ ID NO: 637194 - DNA, 15 bp, Homo sapiens
aattcacagcagagg

SEQ ID NO: 637195 - DNA, 15 bp, Homo sapiens
attcacagcagaggg

SEQ ID NO: 637196 - DNA, 15 bp, Homo sapiens
ttcacagcagaggga

SEQ ID NO: 637197 - DNA, 15 bp, Homo sapiens
tcacagcagagggag

SEQ ID NO: 637198 - DNA, 15 bp, Homo sapiens
cacagcagagggagg

SEQ ID NO: 637199 - DNA, 15 bp, Homo sapiens
acagcagagggagga

SEQ ID NO: 637200 - DNA, 15 bp, Homo sapiens
cagcagagggaggaa

SEQ ID NO: 637201 - DNA, 15 bp, Homo sapiens
agcagagggaggaag

SEQ ID NO: 637202 - DNA, 15 bp, Homo sapiens
gcagagggaggaagt

SEQ ID NO: 637203 - DNA, 15 bp, Homo sapiens
cagagggaggaagtg

SEQ ID NO: 637204 - DNA, 15 bp, Homo sapiens
agagggaggaagtgg

SEQ ID NO: 637205 - DNA, 15 bp, Homo sapiens
gagggaggaagtggg

SEQ ID NO: 637206 - DNA, 15 bp, Homo sapiens
agggaggaagtggga

SEQ ID NO: 637207 - DNA, 15 bp, Homo sapiens
gggaggaagtgggag

SEQ ID NO: 637208 - DNA, 15 bp, Homo sapiens
ggaggaagtgggagt

SEQ ID NO: 637209 - DNA, 15 bp, Homo sapiens
gaggaagtgggagtg

SEQ ID NO: 637210 - DNA, 15 bp, Homo sapiens
aggaagtgggagtgg

SEQ ID NO: 637211 - DNA, 15 bp, Homo sapiens
ggaagtgggagtggt

SEQ ID NO: 637212 - DNA, 15 bp, Homo sapiens
gaagtgggagtggta

SEQ ID NO: 637213 - DNA, 15 bp, Homo sapiens
aagtgggagtggtaa

SEQ ID NO: 637214 - DNA, 15 bp, Homo sapiens
agtgggagtggtaag

SEQ ID NO: 637215 - DNA, 15 bp, Homo sapiens
gtgggagtggtaaga

SEQ ID NO: 637216 - DNA, 15 bp, Homo sapiens
tgggagtggtaagat

SEQ ID NO: 637217 - DNA, 15 bp, Homo sapiens
gggagtggtaagatt

SEQ ID NO: 637218 - DNA, 15 bp, Homo sapiens
ggagtggtaagatta

SEQ ID NO: 637219 - DNA, 15 bp, Homo sapiens
gagtggtaagattag

SEQ ID NO: 637220 - DNA, 15 bp, Homo sapiens
agtggtaagattagc

SEQ ID NO: 637221 - DNA, 15 bp, Homo sapiens
gtggtaagattagct

SEQ ID NO: 637222 - DNA, 15 bp, Homo sapiens
tggtaagattagctt

SEQ ID NO: 637223 - DNA, 15 bp, Homo sapiens
ggtaagattagcttt

SEQ ID NO: 637224 - DNA, 15 bp, Homo sapiens
gtaagattagctttg

SEQ ID NO: 637225 - DNA, 15 bp, Homo sapiens
taagattagctttgg

SEQ ID NO: 637226 - DNA, 15 bp, Homo sapiens
aagattagctttggg

SEQ ID NO: 637227 - DNA, 15 bp, Homo sapiens
agattagctttgggc

SEQ ID NO: 637228 - DNA, 15 bp, Homo sapiens
gattagctttgggct

SEQ ID NO: 637229 - DNA, 15 bp, Homo sapiens
attagctttgggctg

SEQ ID NO: 637230 - DNA, 15 bp, Homo sapiens
ttagctttgggctgg

SEQ ID NO: 637231 - DNA, 15 bp, Homo sapiens
tagctttgggctggg

SEQ ID NO: 637232 - DNA, 15 bp, Homo sapiens
agctttgggctggga

SEQ ID NO: 637233 - DNA, 15 bp, Homo sapiens
gctttgggctgggag

SEQ ID NO: 637234 - DNA, 15 bp, Homo sapiens
ctttgggctgggagt

SEQ ID NO: 637235 - DNA, 15 bp, Homo sapiens
tttgggctgggagtg

SEQ ID NO: 637236 - DNA, 15 bp, Homo sapiens
ttgggctgggagtgg

SEQ ID NO: 637237 - DNA, 15 bp, Homo sapiens
tgggctgggagtggt

SEQ ID NO: 637238 - DNA, 15 bp, Homo sapiens
gggctgggagtggtc

SEQ ID NO: 637239 - DNA, 15 bp, Homo sapiens
ggctgggagtggtca

SEQ ID NO: 637240 - DNA, 15 bp, Homo sapiens
gctgggagtggtcag

SEQ ID NO: 637241 - DNA, 15 bp, Homo sapiens
ctgggagtggtcagg

SEQ ID NO: 637242 - DNA, 15 bp, Homo sapiens
tgggagtggtcaggt

SEQ ID NO: 637243 - DNA, 15 bp, Homo sapiens
gggagtggtcaggtc

SEQ ID NO: 637244 - DNA, 15 bp, Homo sapiens
ggagtggtcaggtca

SEQ ID NO: 637245 - DNA, 15 bp, Homo sapiens
gagtggtcaggtcag

SEQ ID NO: 637246 - DNA, 15 bp, Homo sapiens
agtggtcaggtcagc

SEQ ID NO: 637247 - DNA, 15 bp, Homo sapiens
gtggtcaggtcagcc

SEQ ID NO: 637248 - DNA, 15 bp, Homo sapiens
tggtcaggtcagcct

SEQ ID NO: 637249 - DNA, 15 bp, Homo sapiens
ggtcaggtcagcctg

SEQ ID NO: 637250 - DNA, 15 bp, Homo sapiens
gtcaggtcagcctgg

SEQ ID NO: 637251 - DNA, 15 bp, Homo sapiens
tcaggtcagcctggg

SEQ ID NO: 637252 - DNA, 15 bp, Homo sapiens
caggtcagcctgggc

SEQ ID NO: 637253 - DNA, 15 bp, Homo sapiens
aggtcagcctgggcc

SEQ ID NO: 637254 - DNA, 15 bp, Homo sapiens
ggtcagcctgggcct

SEQ ID NO: 637255 - DNA, 15 bp, Homo sapiens
gtcagcctgggcctc

SEQ ID NO: 637256 - DNA, 15 bp, Homo sapiens
tcagcctgggcctct

SEQ ID NO: 637257 - DNA, 15 bp, Homo sapiens
cagcctgggcctctg

SEQ ID NO: 637258 - DNA, 15 bp, Homo sapiens
agcctgggcctctga

SEQ ID NO: 637259 - DNA, 15 bp, Homo sapiens
gcctgggcctctgag

SEQ ID NO: 637260 - DNA, 15 bp, Homo sapiens
cctgggcctctgaga

SEQ ID NO: 637261 - DNA, 15 bp, Homo sapiens
ctgggcctctgagag

SEQ ID NO: 637262 - DNA, 15 bp, Homo sapiens
tgggcctctgagagc

SEQ ID NO: 637263 - DNA, 15 bp, Homo sapiens
gggcctctgagagcc

SEQ ID NO: 637264 - DNA, 15 bp, Homo sapiens
ggcctctgagagcca

SEQ ID NO: 637265 - DNA, 15 bp, Homo sapiens
gcctctgagagccac

SEQ ID NO: 637266 - DNA, 15 bp, Homo sapiens
cctctgagagccaca

SEQ ID NO: 637267 - DNA, 15 bp, Homo sapiens
ctctgagagccacac

SEQ ID NO: 637268 - DNA, 15 bp, Homo sapiens
tctgagagccacacg

SEQ ID NO: 637269 - DNA, 15 bp, Homo sapiens
ctgagagccacacgt

SEQ ID NO: 637270 - DNA, 15 bp, Homo sapiens
tgagagccacacgtt

SEQ ID NO: 637271 - DNA, 15 bp, Homo sapiens
gagagccacacgttt

SEQ ID NO: 637272 - DNA, 15 bp, Homo sapiens
agagccacacgtttc

SEQ ID NO: 637273 - DNA, 15 bp, Homo sapiens
gagccacacgtttct

SEQ ID NO: 637274 - DNA, 15 bp, Homo sapiens
agccacacgtttctt

SEQ ID NO: 637275 - DNA, 15 bp, Homo sapiens
gccacacgtttctta

SEQ ID NO: 637276 - DNA, 15 bp, Homo sapiens
ccacacgtttcttat

SEQ ID NO: 637277 - DNA, 15 bp, Homo sapiens
cacacgtttcttatt

SEQ ID NO: 637278 - DNA, 15 bp, Homo sapiens
acacgtttcttattg

SEQ ID NO: 637279 - DNA, 15 bp, Homo sapiens
cacgtttcttattgc

SEQ ID NO: 637280 - DNA, 15 bp, Homo sapiens
acgtttcttattgcg

SEQ ID NO: 637281 - DNA, 15 bp, Homo sapiens
cgtttcttattgcgt

SEQ ID NO: 637282 - DNA, 15 bp, Homo sapiens
gtttcttattgcgtg

SEQ ID NO: 637283 - DNA, 15 bp, Homo sapiens
tttcttattgcgtgg

SEQ ID NO: 637284 - DNA, 15 bp, Homo sapiens
ttcttattgcgtggg

SEQ ID NO: 637285 - DNA, 15 bp, Homo sapiens
tcttattgcgtggga

SEQ ID NO: 637286 - DNA, 15 bp, Homo sapiens
cttattgcgtgggaa

SEQ ID NO: 637287 - DNA, 15 bp, Homo sapiens
ttattgcgtgggaag

SEQ ID NO: 637288 - DNA, 15 bp, Homo sapiens
tattgcgtgggaagt

SEQ ID NO: 637289 - DNA, 15 bp, Homo sapiens
attgcgtgggaagtt

SEQ ID NO: 637290 - DNA, 15 bp, Homo sapiens
ttgcgtgggaagttt

SEQ ID NO: 637291 - DNA, 15 bp, Homo sapiens
tgcgtgggaagttta

SEQ ID NO: 637292 - DNA, 15 bp, Homo sapiens
gcgtgggaagtttaa

SEQ ID NO: 637293 - DNA, 15 bp, Homo sapiens
cgtgggaagtttaaa

SEQ ID NO: 637294 - DNA, 15 bp, Homo sapiens
gtgggaagtttaaaa

SEQ ID NO: 637295 - DNA, 15 bp, Homo sapiens
tgggaagtttaaaaa

SEQ ID NO: 637296 - DNA, 15 bp, Homo sapiens
gggaagtttaaaaaa

SEQ ID NO: 637297 - DNA, 15 bp, Homo sapiens
ggaagtttaaaaaat

SEQ ID NO: 637298 - DNA, 15 bp, Homo sapiens
gaagtttaaaaaatg

SEQ ID NO: 637299 - DNA, 15 bp, Homo sapiens
aagtttaaaaaatgg

SEQ ID NO: 637300 - DNA, 15 bp, Homo sapiens
agtttaaaaaatggg

SEQ ID NO: 637301 - DNA, 15 bp, Homo sapiens
gtttaaaaaatgggt

SEQ ID NO: 637302 - DNA, 15 bp, Homo sapiens
tttaaaaaatgggtg

SEQ ID NO: 637303 - DNA, 15 bp, Homo sapiens
ttaaaaaatgggtgt

SEQ ID NO: 637304 - DNA, 15 bp, Homo sapiens
taaaaaatgggtgtg

SEQ ID NO: 637305 - DNA, 15 bp, Homo sapiens
aaaaaatgggtgtgg

SEQ ID NO: 637306 - DNA, 15 bp, Homo sapiens
aaaaatgggtgtgga

SEQ ID NO: 637307 - DNA, 15 bp, Homo sapiens
aaaatgggtgtggat

SEQ ID NO: 637308 - DNA, 15 bp, Homo sapiens
aaatgggtgtggatg

SEQ ID NO: 637309 - DNA, 15 bp, Homo sapiens
aatgggtgtggatgt

SEQ ID NO: 637310 - DNA, 15 bp, Homo sapiens
atgggtgtggatgta

SEQ ID NO: 637311 - DNA, 15 bp, Homo sapiens
tgggtgtggatgtag

SEQ ID NO: 637312 - DNA, 15 bp, Homo sapiens
gggtgtggatgtaga

SEQ ID NO: 637313 - DNA, 15 bp, Homo sapiens
ggtgtggatgtagat

SEQ ID NO: 637314 - DNA, 15 bp, Homo sapiens
gtgtggatgtagatg

SEQ ID NO: 637315 - DNA, 15 bp, Homo sapiens
tgtggatgtagatga

SEQ ID NO: 637316 - DNA, 15 bp, Homo sapiens
gtggatgtagatgaa

SEQ ID NO: 637317 - DNA, 15 bp, Homo sapiens
tggatgtagatgaat

SEQ ID NO: 637318 - DNA, 15 bp, Homo sapiens
ggatgtagatgaatg

SEQ ID NO: 637319 - DNA, 15 bp, Homo sapiens
gatgtagatgaatgg

SEQ ID NO: 637320 - DNA, 15 bp, Homo sapiens
atgtagatgaatggc

SEQ ID NO: 637321 - DNA, 15 bp, Homo sapiens
tgtagatgaatggca

SEQ ID NO: 637322 - DNA, 15 bp, Homo sapiens
gtagatgaatggcaa

SEQ ID NO: 637323 - DNA, 15 bp, Homo sapiens
tagatgaatggcaag

SEQ ID NO: 637324 - DNA, 15 bp, Homo sapiens
agatgaatggcaagg

SEQ ID NO: 637325 - DNA, 15 bp, Homo sapiens
gatgaatggcaagga

SEQ ID NO: 637326 - DNA, 15 bp, Homo sapiens
atgaatggcaaggag

SEQ ID NO: 637327 - DNA, 15 bp, Homo sapiens
tgaatggcaaggaga

SEQ ID NO: 637328 - DNA, 15 bp, Homo sapiens
gaatggcaaggagag

SEQ ID NO: 637329 - DNA, 15 bp, Homo sapiens
aatggcaaggagagg

SEQ ID NO: 637330 - DNA, 15 bp, Homo sapiens
atggcaaggagagga

SEQ ID NO: 637331 - DNA, 15 bp, Homo sapiens
tggcaaggagaggat

SEQ ID NO: 637332 - DNA, 15 bp, Homo sapiens
ggcaaggagaggatg

SEQ ID NO: 637333 - DNA, 15 bp, Homo sapiens
gcaaggagaggatga

SEQ ID NO: 637334 - DNA, 15 bp, Homo sapiens
caaggagaggatgag

SEQ ID NO: 637335 - DNA, 15 bp, Homo sapiens
aaggagaggatgagt

SEQ ID NO: 637336 - DNA, 15 bp, Homo sapiens
aggagaggatgagta

SEQ ID NO: 637337 - DNA, 15 bp, Homo sapiens
ggagaggatgagtag

SEQ ID NO: 637338 - DNA, 15 bp, Homo sapiens
gagaggatgagtagg

SEQ ID NO: 637339 - DNA, 15 bp, Homo sapiens
agaggatgagtagga

SEQ ID NO: 637340 - DNA, 15 bp, Homo sapiens
gaggatgagtaggaa

SEQ ID NO: 637341 - DNA, 15 bp, Homo sapiens
aggatgagtaggaag

SEQ ID NO: 637342 - DNA, 15 bp, Homo sapiens
ggatgagtaggaagt

SEQ ID NO: 637343 - DNA, 15 bp, Homo sapiens
gatgagtaggaagtt

SEQ ID NO: 637344 - DNA, 15 bp, Homo sapiens
atgagtaggaagttg

SEQ ID NO: 637345 - DNA, 15 bp, Homo sapiens
tgagtaggaagttga

SEQ ID NO: 637346 - DNA, 15 bp, Homo sapiens
gagtaggaagttgaa

SEQ ID NO: 637347 - DNA, 15 bp, Homo sapiens
agtaggaagttgaat

SEQ ID NO: 637348 - DNA, 15 bp, Homo sapiens
gtaggaagttgaatg

SEQ ID NO: 637349 - DNA, 15 bp, Homo sapiens
taggaagttgaatga

SEQ ID NO: 637350 - DNA, 15 bp, Homo sapiens
aggaagttgaatgag

SEQ ID NO: 637351 - DNA, 15 bp, Homo sapiens
ggaagttgaatgagt

SEQ ID NO: 637352 - DNA, 15 bp, Homo sapiens
gaagttgaatgagtt

SEQ ID NO: 637353 - DNA, 15 bp, Homo sapiens
aagttgaatgagttg

SEQ ID NO: 637354 - DNA, 15 bp, Homo sapiens
agttgaatgagttgc

SEQ ID NO: 637355 - DNA, 15 bp, Homo sapiens
gttgaatgagttgct

SEQ ID NO: 637356 - DNA, 15 bp, Homo sapiens
ttgaatgagttgctt

SEQ ID NO: 637357 - DNA, 15 bp, Homo sapiens
tgaatgagttgcttt

SEQ ID NO: 637358 - DNA, 15 bp, Homo sapiens
gaatgagttgctttg

SEQ ID NO: 637359 - DNA, 15 bp, Homo sapiens
aatgagttgctttgt

SEQ ID NO: 637360 - DNA, 15 bp, Homo sapiens
atgagttgctttgtt

SEQ ID NO: 637361 - DNA, 15 bp, Homo sapiens
tgagttgctttgttt

SEQ ID NO: 637362 - DNA, 15 bp, Homo sapiens
gagttgctttgtttt

SEQ ID NO: 637363 - DNA, 15 bp, Homo sapiens
agttgctttgttttt

SEQ ID NO: 637364 - DNA, 15 bp, Homo sapiens
gttgctttgttttta

SEQ ID NO: 637365 - DNA, 15 bp, Homo sapiens
ttgctttgtttttag

SEQ ID NO: 637366 - DNA, 15 bp, Homo sapiens
tgctttgtttttaga

SEQ ID NO: 637367 - DNA, 15 bp, Homo sapiens
gctttgtttttagag

SEQ ID NO: 637368 - DNA, 15 bp, Homo sapiens
ctttgtttttagagg

SEQ ID NO: 637369 - DNA, 15 bp, Homo sapiens
tttgtttttagagga

SEQ ID NO: 637370 - DNA, 15 bp, Homo sapiens
ttgtttttagaggag

SEQ ID NO: 637371 - DNA, 15 bp, Homo sapiens
tgtttttagaggagg

SEQ ID NO: 637372 - DNA, 15 bp, Homo sapiens
gtttttagaggaggt

SEQ ID NO: 637373 - DNA, 15 bp, Homo sapiens
tttttagaggaggtg

SEQ ID NO: 637374 - DNA, 15 bp, Homo sapiens
ttttagaggaggtga

SEQ ID NO: 637375 - DNA, 15 bp, Homo sapiens
tttagaggaggtgag

SEQ ID NO: 637376 - DNA, 15 bp, Homo sapiens
ttagaggaggtgagc

SEQ ID NO: 637377 - DNA, 15 bp, Homo sapiens
tagaggaggtgagca

SEQ ID NO: 637378 - DNA, 15 bp, Homo sapiens
agaggaggtgagcat

SEQ ID NO: 637379 - DNA, 15 bp, Homo sapiens
gaggaggtgagcatg

SEQ ID NO: 637380 - DNA, 15 bp, Homo sapiens
aggaggtgagcatgg

SEQ ID NO: 637381 - DNA, 15 bp, Homo sapiens
ggaggtgagcatgga

SEQ ID NO: 637382 - DNA, 15 bp, Homo sapiens
gaggtgagcatggaa

SEQ ID NO: 637383 - DNA, 15 bp, Homo sapiens
aggtgagcatggaat

SEQ ID NO: 637384 - DNA, 15 bp, Homo sapiens
ggtgagcatggaatg

SEQ ID NO: 637385 - DNA, 15 bp, Homo sapiens
gtgagcatggaatga

SEQ ID NO: 637386 - DNA, 15 bp, Homo sapiens
tgagcatggaatgag

SEQ ID NO: 637387 - DNA, 15 bp, Homo sapiens
gagcatggaatgaga

SEQ ID NO: 637388 - DNA, 15 bp, Homo sapiens
agcatggaatgagaa

SEQ ID NO: 637389 - DNA, 15 bp, Homo sapiens
gcatggaatgagaag

SEQ ID NO: 637390 - DNA, 15 bp, Homo sapiens
catggaatgagaaga

SEQ ID NO: 637391 - DNA, 15 bp, Homo sapiens
atggaatgagaagat

SEQ ID NO: 637392 - DNA, 15 bp, Homo sapiens
tggaatgagaagatc

SEQ ID NO: 637393 - DNA, 15 bp, Homo sapiens
ggaatgagaagatca

SEQ ID NO: 637394 - DNA, 15 bp, Homo sapiens
gaatgagaagatcac

SEQ ID NO: 637395 - DNA, 15 bp, Homo sapiens
aatgagaagatcaca

SEQ ID NO: 637396 - DNA, 15 bp, Homo sapiens
atgagaagatcacag

SEQ ID NO: 637397 - DNA, 15 bp, Homo sapiens
tgagaagatcacagc

SEQ ID NO: 637398 - DNA, 15 bp, Homo sapiens
gagaagatcacagca

SEQ ID NO: 637399 - DNA, 15 bp, Homo sapiens
agaagatcacagcaa

SEQ ID NO: 637400 - DNA, 15 bp, Homo sapiens
gaagatcacagcaaa

SEQ ID NO: 637401 - DNA, 15 bp, Homo sapiens
aagatcacagcaaat

SEQ ID NO: 637402 - DNA, 15 bp, Homo sapiens
agatcacagcaaatt

SEQ ID NO: 637403 - DNA, 15 bp, Homo sapiens
gatcacagcaaattt

SEQ ID NO: 637404 - DNA, 15 bp, Homo sapiens
atcacagcaaatttt

SEQ ID NO: 637405 - DNA, 15 bp, Homo sapiens
tcacagcaaattttg

SEQ ID NO: 637406 - DNA, 15 bp, Homo sapiens
cacagcaaattttgc

SEQ ID NO: 637407 - DNA, 15 bp, Homo sapiens
acagcaaattttgcc

SEQ ID NO: 637408 - DNA, 15 bp, Homo sapiens
cagcaaattttgcca

SEQ ID NO: 637409 - DNA, 15 bp, Homo sapiens
agcaaattttgccag

SEQ ID NO: 637410 - DNA, 15 bp, Homo sapiens
gcaaattttgccaga

SEQ ID NO: 637411 - DNA, 15 bp, Homo sapiens
caaattttgccagag

SEQ ID NO: 637412 - DNA, 15 bp, Homo sapiens
aaattttgccagagc

SEQ ID NO: 637413 - DNA, 15 bp, Homo sapiens
aattttgccagagct

SEQ ID NO: 637414 - DNA, 15 bp, Homo sapiens
attttgccagagctg

SEQ ID NO: 637415 - DNA, 15 bp, Homo sapiens
ttttgccagagctgc

SEQ ID NO: 637416 - DNA, 15 bp, Homo sapiens
tttgccagagctgct

SEQ ID NO: 637417 - DNA, 15 bp, Homo sapiens
ttgccagagctgctg

SEQ ID NO: 637418 - DNA, 15 bp, Homo sapiens
tgccagagctgctga

SEQ ID NO: 637419 - DNA, 15 bp, Homo sapiens
gccagagctgctgag

SEQ ID NO: 637420 - DNA, 15 bp, Homo sapiens
ccagagctgctgaga

SEQ ID NO: 637421 - DNA, 15 bp, Homo sapiens
cagagctgctgagaa

SEQ ID NO: 637422 - DNA, 15 bp, Homo sapiens
agagctgctgagaag

SEQ ID NO: 637423 - DNA, 15 bp, Homo sapiens
gagctgctgagaaga

SEQ ID NO: 637424 - DNA, 15 bp, Homo sapiens
agctgctgagaagaa

SEQ ID NO: 637425 - DNA, 15 bp, Homo sapiens
gctgctgagaagaat

SEQ ID NO: 637426 - DNA, 15 bp, Homo sapiens
ctgctgagaagaatg

SEQ ID NO: 637427 - DNA, 15 bp, Homo sapiens
tgctgagaagaatgg

SEQ ID NO: 637428 - DNA, 15 bp, Homo sapiens
gctgagaagaatggg

SEQ ID NO: 637429 - DNA, 15 bp, Homo sapiens
ctgagaagaatggga

SEQ ID NO: 637430 - DNA, 15 bp, Homo sapiens
tgagaagaatgggag

SEQ ID NO: 637431 - DNA, 15 bp, Homo sapiens
gagaagaatgggagc

SEQ ID NO: 637432 - DNA, 15 bp, Homo sapiens
agaagaatgggagca

SEQ ID NO: 637433 - DNA, 15 bp, Homo sapiens
gaagaatgggagcaa

SEQ ID NO: 637434 - DNA, 15 bp, Homo sapiens
aagaatgggagcaat

SEQ ID NO: 637435 - DNA, 15 bp, Homo sapiens
agaatgggagcaatc

SEQ ID NO: 637436 - DNA, 15 bp, Homo sapiens
gaatgggagcaatcc

SEQ ID NO: 637437 - DNA, 15 bp, Homo sapiens
aatgggagcaatccg

SEQ ID NO: 637438 - DNA, 15 bp, Homo sapiens
atgggagcaatccgc

SEQ ID NO: 637439 - DNA, 15 bp, Homo sapiens
tgggagcaatccgca

SEQ ID NO: 637440 - DNA, 15 bp, Homo sapiens
gggagcaatccgcag

SEQ ID NO: 637441 - DNA, 15 bp, Homo sapiens
ggagcaatccgcaga

SEQ ID NO: 637442 - DNA, 15 bp, Homo sapiens
gagcaatccgcagag

SEQ ID NO: 637443 - DNA, 15 bp, Homo sapiens
agcaatccgcagaga

SEQ ID NO: 637444 - DNA, 15 bp, Homo sapiens
gcaatccgcagagaa

SEQ ID NO: 637445 - DNA, 15 bp, Homo sapiens
caatccgcagagaaa

SEQ ID NO: 637446 - DNA, 15 bp, Homo sapiens
aatccgcagagaaat

SEQ ID NO: 637447 - DNA, 15 bp, Homo sapiens
atccgcagagaaatg

SEQ ID NO: 637448 - DNA, 15 bp, Homo sapiens
tccgcagagaaatga

SEQ ID NO: 637449 - DNA, 15 bp, Homo sapiens
ccgcagagaaatgaa

SEQ ID NO: 637450 - DNA, 15 bp, Homo sapiens
cgcagagaaatgaag

SEQ ID NO: 637451 - DNA, 15 bp, Homo sapiens
gcagagaaatgaagt

SEQ ID NO: 637452 - DNA, 15 bp, Homo sapiens
cagagaaatgaagtg

SEQ ID NO: 637453 - DNA, 15 bp, Homo sapiens
agagaaatgaagtgt

SEQ ID NO: 637454 - DNA, 15 bp, Homo sapiens
gagaaatgaagtgtg

SEQ ID NO: 637455 - DNA, 15 bp, Homo sapiens
agaaatgaagtgtgc

SEQ ID NO: 637456 - DNA, 15 bp, Homo sapiens
gaaatgaagtgtgca

SEQ ID NO: 637457 - DNA, 15 bp, Homo sapiens
aaatgaagtgtgcat

SEQ ID NO: 637458 - DNA, 15 bp, Homo sapiens
aatgaagtgtgcatt

SEQ ID NO: 637459 - DNA, 15 bp, Homo sapiens
atgaagtgtgcattg

SEQ ID NO: 637460 - DNA, 15 bp, Homo sapiens
tgaagtgtgcattgc

SEQ ID NO: 637461 - DNA, 15 bp, Homo sapiens
gaagtgtgcattgca

SEQ ID NO: 637462 - DNA, 15 bp, Homo sapiens
aagtgtgcattgcat

SEQ ID NO: 637463 - DNA, 15 bp, Homo sapiens
agtgtgcattgcatg

SEQ ID NO: 637464 - DNA, 15 bp, Homo sapiens
gtgtgcattgcatgt

SEQ ID NO: 637465 - DNA, 15 bp, Homo sapiens
tgtgcattgcatgtt

SEQ ID NO: 637466 - DNA, 15 bp, Homo sapiens
gtgcattgcatgttg

SEQ ID NO: 637467 - DNA, 15 bp, Homo sapiens
tgcattgcatgttga

SEQ ID NO: 637468 - DNA, 15 bp, Homo sapiens
gcattgcatgttgag

SEQ ID NO: 637469 - DNA, 15 bp, Homo sapiens
cattgcatgttgagc

SEQ ID NO: 637470 - DNA, 15 bp, Homo sapiens
attgcatgttgagct

SEQ ID NO: 637471 - DNA, 15 bp, Homo sapiens
ttgcatgttgagctg

SEQ ID NO: 637472 - DNA, 15 bp, Homo sapiens
tgcatgttgagctgg

SEQ ID NO: 637473 - DNA, 15 bp, Homo sapiens
gcatgttgagctgga

SEQ ID NO: 637474 - DNA, 15 bp, Homo sapiens
catgttgagctggag

SEQ ID NO: 637475 - DNA, 15 bp, Homo sapiens
atgttgagctggaga

SEQ ID NO: 637476 - DNA, 15 bp, Homo sapiens
tgttgagctggagag

SEQ ID NO: 637477 - DNA, 15 bp, Homo sapiens
gttgagctggagagc

SEQ ID NO: 637478 - DNA, 15 bp, Homo sapiens
ttgagctggagagca

SEQ ID NO: 637479 - DNA, 15 bp, Homo sapiens
tgagctggagagcac

SEQ ID NO: 637480 - DNA, 15 bp, Homo sapiens
gagctggagagcaca

SEQ ID NO: 637481 - DNA, 15 bp, Homo sapiens
agctggagagcacac

SEQ ID NO: 637482 - DNA, 15 bp, Homo sapiens
gctggagagcacaca

SEQ ID NO: 637483 - DNA, 15 bp, Homo sapiens
ctggagagcacacat

SEQ ID NO: 637484 - DNA, 15 bp, Homo sapiens
tggagagcacacatt

SEQ ID NO: 637485 - DNA, 15 bp, Homo sapiens
ggagagcacacattc

SEQ ID NO: 637486 - DNA, 15 bp, Homo sapiens
gagagcacacattca

SEQ ID NO: 637487 - DNA, 15 bp, Homo sapiens
agagcacacattcac

SEQ ID NO: 637488 - DNA, 15 bp, Homo sapiens
gagcacacattcact

SEQ ID NO: 637489 - DNA, 15 bp, Homo sapiens
agcacacattcactc

SEQ ID NO: 637490 - DNA, 15 bp, Homo sapiens
gcacacattcactcc

SEQ ID NO: 637491 - DNA, 15 bp, Homo sapiens
cacacattcactcca

SEQ ID NO: 637492 - DNA, 15 bp, Homo sapiens
acacattcactccat

SEQ ID NO: 637493 - DNA, 15 bp, Homo sapiens
cacattcactccatt

SEQ ID NO: 637494 - DNA, 15 bp, Homo sapiens
acattcactccatta

SEQ ID NO: 637495 - DNA, 15 bp, Homo sapiens
cattcactccattaa

SEQ ID NO: 637496 - DNA, 15 bp, Homo sapiens
attcactccattaat

SEQ ID NO: 637497 - DNA, 15 bp, Homo sapiens
ttcactccattaatt

SEQ ID NO: 637498 - DNA, 15 bp, Homo sapiens
tcactccattaattc

SEQ ID NO: 637499 - DNA, 15 bp, Homo sapiens
cactccattaattca

SEQ ID NO: 637500 - DNA, 15 bp, Homo sapiens
actccattaattcat

SEQ ID NO: 637501 - DNA, 15 bp, Homo sapiens
ctccattaattcatt

SEQ ID NO: 637502 - DNA, 15 bp, Homo sapiens
tccattaattcattc

SEQ ID NO: 637503 - DNA, 15 bp, Homo sapiens
ccattaattcattcg

SEQ ID NO: 637504 - DNA, 15 bp, Homo sapiens
cattaattcattcgt

SEQ ID NO: 637505 - DNA, 15 bp, Homo sapiens
attaattcattcgtt

SEQ ID NO: 637506 - DNA, 15 bp, Homo sapiens
ttaattcattcgttt

SEQ ID NO: 637507 - DNA, 15 bp, Homo sapiens
taattcattcgtttt

SEQ ID NO: 637508 - DNA, 15 bp, Homo sapiens
aattcattcgttttg

SEQ ID NO: 637509 - DNA, 15 bp, Homo sapiens
attcattcgttttgc

SEQ ID NO: 637510 - DNA, 15 bp, Homo sapiens
ttcattcgttttgca

SEQ ID NO: 637511 - DNA, 15 bp, Homo sapiens
tcattcgttttgcaa

SEQ ID NO: 637512 - DNA, 15 bp, Homo sapiens
cattcgttttgcaaa

SEQ ID NO: 637513 - DNA, 15 bp, Homo sapiens
attcgttttgcaaat

SEQ ID NO: 637514 - DNA, 15 bp, Homo sapiens
ttcgttttgcaaata

SEQ ID NO: 637515 - DNA, 15 bp, Homo sapiens
tcgttttgcaaatat

SEQ ID NO: 637516 - DNA, 15 bp, Homo sapiens
cgttttgcaaatatt

SEQ ID NO: 637517 - DNA, 15 bp, Homo sapiens
gttttgcaaatattg

SEQ ID NO: 637518 - DNA, 15 bp, Homo sapiens
ttttgcaaatattga

SEQ ID NO: 637519 - DNA, 15 bp, Homo sapiens
tttgcaaatattgag

SEQ ID NO: 637520 - DNA, 15 bp, Homo sapiens
ttgcaaatattgagt

SEQ ID NO: 637521 - DNA, 15 bp, Homo sapiens
tgcaaatattgagtg

SEQ ID NO: 637522 - DNA, 15 bp, Homo sapiens
gcaaatattgagtgt

SEQ ID NO: 637523 - DNA, 15 bp, Homo sapiens
caaatattgagtgtc

SEQ ID NO: 637524 - DNA, 15 bp, Homo sapiens
aaatattgagtgtct

SEQ ID NO: 637525 - DNA, 15 bp, Homo sapiens
aatattgagtgtcta

SEQ ID NO: 637526 - DNA, 15 bp, Homo sapiens
atattgagtgtctat

SEQ ID NO: 637527 - DNA, 15 bp, Homo sapiens
tattgagtgtctatt

SEQ ID NO: 637528 - DNA, 15 bp, Homo sapiens
attgagtgtctattt

SEQ ID NO: 637529 - DNA, 15 bp, Homo sapiens
ttgagtgtctatttg

SEQ ID NO: 637530 - DNA, 15 bp, Homo sapiens
tgagtgtctatttgg

SEQ ID NO: 637531 - DNA, 15 bp, Homo sapiens
gagtgtctatttggt

SEQ ID NO: 637532 - DNA, 15 bp, Homo sapiens
agtgtctatttggta

SEQ ID NO: 637533 - DNA, 15 bp, Homo sapiens
gtgtctatttggtat

SEQ ID NO: 637534 - DNA, 15 bp, Homo sapiens
tgtctatttggtatc

SEQ ID NO: 637535 - DNA, 15 bp, Homo sapiens
gtctatttggtatca

SEQ ID NO: 637536 - DNA, 15 bp, Homo sapiens
tctatttggtatcag

SEQ ID NO: 637537 - DNA, 15 bp, Homo sapiens
ctatttggtatcaga

SEQ ID NO: 637538 - DNA, 15 bp, Homo sapiens
tatttggtatcagac

SEQ ID NO: 637539 - DNA, 15 bp, Homo sapiens
atttggtatcagaca

SEQ ID NO: 637540 - DNA, 15 bp, Homo sapiens
tttggtatcagacac

SEQ ID NO: 637541 - DNA, 15 bp, Homo sapiens
ttggtatcagacact

SEQ ID NO: 637542 - DNA, 15 bp, Homo sapiens
tggtatcagacacta

SEQ ID NO: 637543 - DNA, 15 bp, Homo sapiens
ggtatcagacactat

SEQ ID NO: 637544 - DNA, 15 bp, Homo sapiens
gtatcagacactatt

SEQ ID NO: 637545 - DNA, 15 bp, Homo sapiens
tatcagacactattg

SEQ ID NO: 637546 - DNA, 15 bp, Homo sapiens
atcagacactattgt

SEQ ID NO: 637547 - DNA, 15 bp, Homo sapiens
tcagacactattgta

SEQ ID NO: 637548 - DNA, 15 bp, Homo sapiens
cagacactattgtag

SEQ ID NO: 637549 - DNA, 15 bp, Homo sapiens
agacactattgtagg

SEQ ID NO: 637550 - DNA, 15 bp, Homo sapiens
gacactattgtaggt

SEQ ID NO: 637551 - DNA, 15 bp, Homo sapiens
acactattgtaggtg

SEQ ID NO: 637552 - DNA, 15 bp, Homo sapiens
cactattgtaggtgc

SEQ ID NO: 637553 - DNA, 15 bp, Homo sapiens
actattgtaggtgct

SEQ ID NO: 637554 - DNA, 15 bp, Homo sapiens
ctattgtaggtgctg

SEQ ID NO: 637555 - DNA, 15 bp, Homo sapiens
tattgtaggtgctgc

SEQ ID NO: 637556 - DNA, 15 bp, Homo sapiens
attgtaggtgctgcg

SEQ ID NO: 637557 - DNA, 15 bp, Homo sapiens
ttgtaggtgctgcgg

SEQ ID NO: 637558 - DNA, 15 bp, Homo sapiens
tgtaggtgctgcggg

SEQ ID NO: 637559 - DNA, 15 bp, Homo sapiens
gtaggtgctgcgggt

SEQ ID NO: 637560 - DNA, 15 bp, Homo sapiens
taggtgctgcgggta

SEQ ID NO: 637561 - DNA, 15 bp, Homo sapiens
aggtgctgcgggtat

SEQ ID NO: 637562 - DNA, 15 bp, Homo sapiens
ggtgctgcgggtata

SEQ ID NO: 637563 - DNA, 15 bp, Homo sapiens
gtgctgcgggtatag

SEQ ID NO: 637564 - DNA, 15 bp, Homo sapiens
tgctgcgggtataga

SEQ ID NO: 637565 - DNA, 15 bp, Homo sapiens
gctgcgggtatagaa

SEQ ID NO: 637566 - DNA, 15 bp, Homo sapiens
ctgcgggtatagaaa

SEQ ID NO: 637567 - DNA, 15 bp, Homo sapiens
tgcgggtatagaaaa

SEQ ID NO: 637568 - DNA, 15 bp, Homo sapiens
gcgggtatagaaaag

SEQ ID NO: 637569 - DNA, 15 bp, Homo sapiens
cgggtatagaaaaga

SEQ ID NO: 637570 - DNA, 15 bp, Homo sapiens
gggtatagaaaagaa

SEQ ID NO: 637571 - DNA, 15 bp, Homo sapiens
ggtatagaaaagaac

SEQ ID NO: 637572 - DNA, 15 bp, Homo sapiens
gtatagaaaagaaca

SEQ ID NO: 637573 - DNA, 15 bp, Homo sapiens
tatagaaaagaacaa

SEQ ID NO: 637574 - DNA, 15 bp, Homo sapiens
atagaaaagaacaaa

SEQ ID NO: 637575 - DNA, 15 bp, Homo sapiens
tagaaaagaacaaaa

SEQ ID NO: 637576 - DNA, 15 bp, Homo sapiens
agaaaagaacaaaat

SEQ ID NO: 637577 - DNA, 15 bp, Homo sapiens
gaaaagaacaaaata

SEQ ID NO: 637578 - DNA, 15 bp, Homo sapiens
aaaagaacaaaatag

SEQ ID NO: 637579 - DNA, 15 bp, Homo sapiens
aaagaacaaaatagg

SEQ ID NO: 637580 - DNA, 15 bp, Homo sapiens
aagaacaaaataggc

SEQ ID NO: 637581 - DNA, 15 bp, Homo sapiens
agaacaaaataggca

SEQ ID NO: 637582 - DNA, 15 bp, Homo sapiens
gaacaaaataggcaa

SEQ ID NO: 637583 - DNA, 15 bp, Homo sapiens
aacaaaataggcaaa

SEQ ID NO: 637584 - DNA, 15 bp, Homo sapiens
acaaaataggcaaaa

SEQ ID NO: 637585 - DNA, 15 bp, Homo sapiens
caaaataggcaaaaa

SEQ ID NO: 637586 - DNA, 15 bp, Homo sapiens
aaaataggcaaaaat

SEQ ID NO: 637587 - DNA, 15 bp, Homo sapiens
aaataggcaaaaatg

SEQ ID NO: 637588 - DNA, 15 bp, Homo sapiens
aataggcaaaaatgt

SEQ ID NO: 637589 - DNA, 15 bp, Homo sapiens
ataggcaaaaatgtt

SEQ ID NO: 637590 - DNA, 15 bp, Homo sapiens
taggcaaaaatgttg

SEQ ID NO: 637591 - DNA, 15 bp, Homo sapiens
aggcaaaaatgttgg

SEQ ID NO: 637592 - DNA, 15 bp, Homo sapiens
ggcaaaaatgttggc

SEQ ID NO: 637593 - DNA, 15 bp, Homo sapiens
gcaaaaatgttggcc

SEQ ID NO: 637594 - DNA, 15 bp, Homo sapiens
caaaaatgttggccc

SEQ ID NO: 637595 - DNA, 15 bp, Homo sapiens
aaaaatgttggccct

SEQ ID NO: 637596 - DNA, 15 bp, Homo sapiens
aaaatgttggccctt

SEQ ID NO: 637597 - DNA, 15 bp, Homo sapiens
aaatgttggcccttg

SEQ ID NO: 637598 - DNA, 15 bp, Homo sapiens
aatgttggcccttga

SEQ ID NO: 637599 - DNA, 15 bp, Homo sapiens
atgttggcccttgag

SEQ ID NO: 637600 - DNA, 15 bp, Homo sapiens
tgttggcccttgagg

SEQ ID NO: 637601 - DNA, 15 bp, Homo sapiens
gttggcccttgagga

SEQ ID NO: 637602 - DNA, 15 bp, Homo sapiens
ttggcccttgaggag

SEQ ID NO: 637603 - DNA, 15 bp, Homo sapiens
tggcccttgaggagt

SEQ ID NO: 637604 - DNA, 15 bp, Homo sapiens
ggcccttgaggagtt

SEQ ID NO: 637605 - DNA, 15 bp, Homo sapiens
gcccttgaggagttt

SEQ ID NO: 637606 - DNA, 15 bp, Homo sapiens
cccttgaggagttta

SEQ ID NO: 637607 - DNA, 15 bp, Homo sapiens
ccttgaggagtttac

SEQ ID NO: 637608 - DNA, 15 bp, Homo sapiens
cttgaggagtttaca

SEQ ID NO: 637609 - DNA, 15 bp, Homo sapiens
ttgaggagtttacat

SEQ ID NO: 637610 - DNA, 15 bp, Homo sapiens
tgaggagtttacatt

SEQ ID NO: 637611 - DNA, 15 bp, Homo sapiens
gaggagtttacattt

SEQ ID NO: 637612 - DNA, 15 bp, Homo sapiens
aggagtttacatttt

SEQ ID NO: 637613 - DNA, 15 bp, Homo sapiens
ggagtttacatttta

SEQ ID NO: 637614 - DNA, 15 bp, Homo sapiens
gagtttacattttag

SEQ ID NO: 637615 - DNA, 15 bp, Homo sapiens
agtttacattttagt

SEQ ID NO: 637616 - DNA, 15 bp, Homo sapiens
gtttacattttagtg

SEQ ID NO: 637617 - DNA, 15 bp, Homo sapiens
tttacattttagtga

SEQ ID NO: 637618 - DNA, 15 bp, Homo sapiens
ttacattttagtgag

SEQ ID NO: 637619 - DNA, 15 bp, Homo sapiens
tacattttagtgagg

SEQ ID NO: 637620 - DNA, 15 bp, Homo sapiens
acattttagtgaggg

SEQ ID NO: 637621 - DNA, 15 bp, Homo sapiens
cattttagtgaggga

SEQ ID NO: 637622 - DNA, 15 bp, Homo sapiens
attttagtgagggag

SEQ ID NO: 637623 - DNA, 15 bp, Homo sapiens
ttttagtgagggaga

SEQ ID NO: 637624 - DNA, 15 bp, Homo sapiens
tttagtgagggagat

SEQ ID NO: 637625 - DNA, 15 bp, Homo sapiens
ttagtgagggagata

SEQ ID NO: 637626 - DNA, 15 bp, Homo sapiens
tagtgagggagatat

SEQ ID NO: 637627 - DNA, 15 bp, Homo sapiens
agtgagggagatata

SEQ ID NO: 637628 - DNA, 15 bp, Homo sapiens
gtgagggagatataa

SEQ ID NO: 637629 - DNA, 15 bp, Homo sapiens
tgagggagatataat

SEQ ID NO: 637630 - DNA, 15 bp, Homo sapiens
gagggagatataata

SEQ ID NO: 637631 - DNA, 15 bp, Homo sapiens
agggagatataataa

SEQ ID NO: 637632 - DNA, 15 bp, Homo sapiens
gggagatataataaa

SEQ ID NO: 637633 - DNA, 15 bp, Homo sapiens
ggagatataataaac

SEQ ID NO: 637634 - DNA, 15 bp, Homo sapiens
gagatataataaaca

SEQ ID NO: 637635 - DNA, 15 bp, Homo sapiens
agatataataaacat

SEQ ID NO: 637636 - DNA, 15 bp, Homo sapiens
gatataataaacatt

SEQ ID NO: 637637 - DNA, 15 bp, Homo sapiens
atataataaacattg

SEQ ID NO: 637638 - DNA, 15 bp, Homo sapiens
tataataaacattgt

SEQ ID NO: 637639 - DNA, 15 bp, Homo sapiens
ataataaacattgta

SEQ ID NO: 637640 - DNA, 15 bp, Homo sapiens
taataaacattgtaa

SEQ ID NO: 637641 - DNA, 15 bp, Homo sapiens
aataaacattgtaaa

SEQ ID NO: 637642 - DNA, 15 bp, Homo sapiens
ataaacattgtaaat

SEQ ID NO: 637643 - DNA, 15 bp, Homo sapiens
taaacattgtaaata

SEQ ID NO: 637644 - DNA, 15 bp, Homo sapiens
aaacattgtaaataa

SEQ ID NO: 637645 - DNA, 15 bp, Homo sapiens
aacattgtaaataaa

SEQ ID NO: 637646 - DNA, 15 bp, Homo sapiens
acattgtaaataaat

SEQ ID NO: 637647 - DNA, 15 bp, Homo sapiens
cattgtaaataaatc

SEQ ID NO: 637648 - DNA, 15 bp, Homo sapiens
attgtaaataaatca

SEQ ID NO: 637649 - DNA, 15 bp, Homo sapiens
ttgtaaataaatcaa

SEQ ID NO: 637650 - DNA, 15 bp, Homo sapiens
tgtaaataaatcaaa

SEQ ID NO: 637651 - DNA, 15 bp, Homo sapiens
gtaaataaatcaaat

SEQ ID NO: 637652 - DNA, 15 bp, Homo sapiens
taaataaatcaaatg

SEQ ID NO: 637653 - DNA, 15 bp, Homo sapiens
aaataaatcaaatgt

SEQ ID NO: 637654 - DNA, 15 bp, Homo sapiens
aataaatcaaatgta

SEQ ID NO: 637655 - DNA, 15 bp, Homo sapiens
ataaatcaaatgtat

SEQ ID NO: 637656 - DNA, 15 bp, Homo sapiens
taaatcaaatgtata

SEQ ID NO: 637657 - DNA, 15 bp, Homo sapiens
aaatcaaatgtatag

SEQ ID NO: 637658 - DNA, 15 bp, Homo sapiens
aatcaaatgtatagc

SEQ ID NO: 637659 - DNA, 15 bp, Homo sapiens
atcaaatgtatagca

SEQ ID NO: 637660 - DNA, 15 bp, Homo sapiens
tcaaatgtatagcat

SEQ ID NO: 637661 - DNA, 15 bp, Homo sapiens
caaatgtatagcatg

SEQ ID NO: 637662 - DNA, 15 bp, Homo sapiens
aaatgtatagcatgg

SEQ ID NO: 637663 - DNA, 15 bp, Homo sapiens
aatgtatagcatggt

SEQ ID NO: 637664 - DNA, 15 bp, Homo sapiens
atgtatagcatggta

SEQ ID NO: 637665 - DNA, 15 bp, Homo sapiens
tgtatagcatggtag

SEQ ID NO: 637666 - DNA, 15 bp, Homo sapiens
gtatagcatggtagc

SEQ ID NO: 637667 - DNA, 15 bp, Homo sapiens
tatagcatggtagct

SEQ ID NO: 637668 - DNA, 15 bp, Homo sapiens
atagcatggtagcta

SEQ ID NO: 637669 - DNA, 15 bp, Homo sapiens
tagcatggtagctag

SEQ ID NO: 637670 - DNA, 15 bp, Homo sapiens
agcatggtagctagt

SEQ ID NO: 637671 - DNA, 15 bp, Homo sapiens
gcatggtagctagtg

SEQ ID NO: 637672 - DNA, 15 bp, Homo sapiens
catggtagctagtga

SEQ ID NO: 637673 - DNA, 15 bp, Homo sapiens
atggtagctagtgat

SEQ ID NO: 637674 - DNA, 15 bp, Homo sapiens
tggtagctagtgata

SEQ ID NO: 637675 - DNA, 15 bp, Homo sapiens
ggtagctagtgataa

SEQ ID NO: 637676 - DNA, 15 bp, Homo sapiens
gtagctagtgataat

SEQ ID NO: 637677 - DNA, 15 bp, Homo sapiens
tagctagtgataatc

SEQ ID NO: 637678 - DNA, 15 bp, Homo sapiens
agctagtgataatct

SEQ ID NO: 637679 - DNA, 15 bp, Homo sapiens
gctagtgataatcta

SEQ ID NO: 637680 - DNA, 15 bp, Homo sapiens
ctagtgataatctat

SEQ ID NO: 637681 - DNA, 15 bp, Homo sapiens
tagtgataatctatc

SEQ ID NO: 637682 - DNA, 15 bp, Homo sapiens
agtgataatctatca

SEQ ID NO: 637683 - DNA, 15 bp, Homo sapiens
gtgataatctatcac

SEQ ID NO: 637684 - DNA, 15 bp, Homo sapiens
tgataatctatcact

SEQ ID NO: 637685 - DNA, 15 bp, Homo sapiens
gataatctatcactt

SEQ ID NO: 637686 - DNA, 15 bp, Homo sapiens
ataatctatcacttt

SEQ ID NO: 637687 - DNA, 15 bp, Homo sapiens
taatctatcactttc

SEQ ID NO: 637688 - DNA, 15 bp, Homo sapiens
aatctatcactttct

SEQ ID NO: 637689 - DNA, 15 bp, Homo sapiens
atctatcactttctt

SEQ ID NO: 637690 - DNA, 15 bp, Homo sapiens
tctatcactttcttt

SEQ ID NO: 637691 - DNA, 15 bp, Homo sapiens
ctatcactttctttc

SEQ ID NO: 637692 - DNA, 15 bp, Homo sapiens
tatcactttctttct

SEQ ID NO: 637693 - DNA, 15 bp, Homo sapiens
atcactttctttctg

SEQ ID NO: 637694 - DNA, 15 bp, Homo sapiens
tcactttctttctga

SEQ ID NO: 637695 - DNA, 15 bp, Homo sapiens
cactttctttctgag

SEQ ID NO: 637696 - DNA, 15 bp, Homo sapiens
actttctttctgaga

SEQ ID NO: 637697 - DNA, 15 bp, Homo sapiens
ctttctttctgagaa

SEQ ID NO: 637698 - DNA, 15 bp, Homo sapiens
tttctttctgagaag

SEQ ID NO: 637699 - DNA, 15 bp, Homo sapiens
ttctttctgagaagg

SEQ ID NO: 637700 - DNA, 15 bp, Homo sapiens
tctttctgagaagga

SEQ ID NO: 637701 - DNA, 15 bp, Homo sapiens
ctttctgagaaggaa

SEQ ID NO: 637702 - DNA, 15 bp, Homo sapiens
tttctgagaaggaaa

SEQ ID NO: 637703 - DNA, 15 bp, Homo sapiens
ttctgagaaggaaaa

SEQ ID NO: 637704 - DNA, 15 bp, Homo sapiens
tctgagaaggaaaaa

SEQ ID NO: 637705 - DNA, 15 bp, Homo sapiens
ctgagaaggaaaaat

SEQ ID NO: 637706 - DNA, 15 bp, Homo sapiens
tgagaaggaaaaata

SEQ ID NO: 637707 - DNA, 15 bp, Homo sapiens
gagaaggaaaaataa

SEQ ID NO: 637708 - DNA, 15 bp, Homo sapiens
agaaggaaaaataaa

SEQ ID NO: 637709 - DNA, 15 bp, Homo sapiens
gaaggaaaaataaac

SEQ ID NO: 637710 - DNA, 15 bp, Homo sapiens
aaggaaaaataaact

SEQ ID NO: 637711 - DNA, 15 bp, Homo sapiens
aggaaaaataaactg

SEQ ID NO: 637712 - DNA, 15 bp, Homo sapiens
ggaaaaataaactgg

SEQ ID NO: 637713 - DNA, 15 bp, Homo sapiens
gaaaaataaactgga

SEQ ID NO: 637714 - DNA, 15 bp, Homo sapiens
aaaaataaactggaa

SEQ ID NO: 637715 - DNA, 15 bp, Homo sapiens
aaaataaactggaaa

SEQ ID NO: 637716 - DNA, 15 bp, Homo sapiens
aaataaactggaaat

SEQ ID NO: 637717 - DNA, 15 bp, Homo sapiens
aataaactggaaatg

SEQ ID NO: 637718 - DNA, 15 bp, Homo sapiens
ataaactggaaatgg

SEQ ID NO: 637719 - DNA, 15 bp, Homo sapiens
taaactggaaatgga

SEQ ID NO: 637720 - DNA, 15 bp, Homo sapiens
aaactggaaatggag

SEQ ID NO: 637721 - DNA, 15 bp, Homo sapiens
aactggaaatggagc

SEQ ID NO: 637722 - DNA, 15 bp, Homo sapiens
actggaaatggagct

SEQ ID NO: 637723 - DNA, 15 bp, Homo sapiens
ctggaaatggagcta

SEQ ID NO: 637724 - DNA, 15 bp, Homo sapiens
tggaaatggagctat

SEQ ID NO: 637725 - DNA, 15 bp, Homo sapiens
ggaaatggagctatg

SEQ ID NO: 637726 - DNA, 15 bp, Homo sapiens
gaaatggagctatga

SEQ ID NO: 637727 - DNA, 15 bp, Homo sapiens
aaatggagctatgaa

SEQ ID NO: 637728 - DNA, 15 bp, Homo sapiens
aatggagctatgaaa

SEQ ID NO: 637729 - DNA, 15 bp, Homo sapiens
atggagctatgaaat

SEQ ID NO: 637730 - DNA, 15 bp, Homo sapiens
tggagctatgaaatg

SEQ ID NO: 637731 - DNA, 15 bp, Homo sapiens
ggagctatgaaatgg

SEQ ID NO: 637732 - DNA, 15 bp, Homo sapiens
gagctatgaaatggt

SEQ ID NO: 637733 - DNA, 15 bp, Homo sapiens
agctatgaaatggtg

SEQ ID NO: 637734 - DNA, 15 bp, Homo sapiens
gctatgaaatggtgc

SEQ ID NO: 637735 - DNA, 15 bp, Homo sapiens
ctatgaaatggtgcg

SEQ ID NO: 637736 - DNA, 15 bp, Homo sapiens
tatgaaatggtgcgt

SEQ ID NO: 637737 - DNA, 15 bp, Homo sapiens
atgaaatggtgcgtg

SEQ ID NO: 637738 - DNA, 15 bp, Homo sapiens
tgaaatggtgcgtgg

SEQ ID NO: 637739 - DNA, 15 bp, Homo sapiens
gaaatggtgcgtggg

SEQ ID NO: 637740 - DNA, 15 bp, Homo sapiens
aaatggtgcgtgggg

SEQ ID NO: 637741 - DNA, 15 bp, Homo sapiens
aatggtgcgtggggg

SEQ ID NO: 637742 - DNA, 15 bp, Homo sapiens
atggtgcgtgggggg

SEQ ID NO: 637743 - DNA, 15 bp, Homo sapiens
tggtgcgtggggggt

SEQ ID NO: 637744 - DNA, 15 bp, Homo sapiens
ggtgcgtggggggtg

SEQ ID NO: 637745 - DNA, 15 bp, Homo sapiens
gtgcgtggggggtgg

SEQ ID NO: 637746 - DNA, 15 bp, Homo sapiens
tgcgtggggggtggg

SEQ ID NO: 637747 - DNA, 15 bp, Homo sapiens
gcgtggggggtgggg

SEQ ID NO: 637748 - DNA, 15 bp, Homo sapiens
cgtggggggtggggt

SEQ ID NO: 637749 - DNA, 15 bp, Homo sapiens
gtggggggtggggtt

SEQ ID NO: 637750 - DNA, 15 bp, Homo sapiens
tggggggtggggttg

SEQ ID NO: 637751 - DNA, 15 bp, Homo sapiens
ggggggtggggttga

SEQ ID NO: 637752 - DNA, 15 bp, Homo sapiens
gggggtggggttgaa

SEQ ID NO: 637753 - DNA, 15 bp, Homo sapiens
ggggtggggttgaaa

SEQ ID NO: 637754 - DNA, 15 bp, Homo sapiens
gggtggggttgaaat

SEQ ID NO: 637755 - DNA, 15 bp, Homo sapiens
ggtggggttgaaatt

SEQ ID NO: 637756 - DNA, 15 bp, Homo sapiens
gtggggttgaaattt

SEQ ID NO: 637757 - DNA, 15 bp, Homo sapiens
tggggttgaaatttt

SEQ ID NO: 637758 - DNA, 15 bp, Homo sapiens
ggggttgaaatttta

SEQ ID NO: 637759 - DNA, 15 bp, Homo sapiens
gggttgaaattttaa

SEQ ID NO: 637760 - DNA, 15 bp, Homo sapiens
ggttgaaattttaaa

SEQ ID NO: 637761 - DNA, 15 bp, Homo sapiens
gttgaaattttaaag

SEQ ID NO: 637762 - DNA, 15 bp, Homo sapiens
ttgaaattttaaaga

SEQ ID NO: 637763 - DNA, 15 bp, Homo sapiens
tgaaattttaaagac

SEQ ID NO: 637764 - DNA, 15 bp, Homo sapiens
gaaattttaaagact

SEQ ID NO: 637765 - DNA, 15 bp, Homo sapiens
aaattttaaagactt

SEQ ID NO: 637766 - DNA, 15 bp, Homo sapiens
aattttaaagacttt

SEQ ID NO: 637767 - DNA, 15 bp, Homo sapiens
attttaaagactttg

SEQ ID NO: 637768 - DNA, 15 bp, Homo sapiens
ttttaaagactttgg

SEQ ID NO: 637769 - DNA, 15 bp, Homo sapiens
tttaaagactttggc

SEQ ID NO: 637770 - DNA, 15 bp, Homo sapiens
ttaaagactttggcc

SEQ ID NO: 637771 - DNA, 15 bp, Homo sapiens
taaagactttggcca

SEQ ID NO: 637772 - DNA, 15 bp, Homo sapiens
aaagactttggccag

SEQ ID NO: 637773 - DNA, 15 bp, Homo sapiens
aagactttggccagg

SEQ ID NO: 637774 - DNA, 15 bp, Homo sapiens
agactttggccaggc

SEQ ID NO: 637775 - DNA, 15 bp, Homo sapiens
gactttggccaggca

SEQ ID NO: 637776 - DNA, 15 bp, Homo sapiens
actttggccaggcaa

SEQ ID NO: 637777 - DNA, 15 bp, Homo sapiens
ctttggccaggcaag

SEQ ID NO: 637778 - DNA, 15 bp, Homo sapiens
tttggccaggcaaga

SEQ ID NO: 637779 - DNA, 15 bp, Homo sapiens
ttggccaggcaagac

SEQ ID NO: 637780 - DNA, 15 bp, Homo sapiens
tggccaggcaagact

SEQ ID NO: 637781 - DNA, 15 bp, Homo sapiens
ggccaggcaagactc

SEQ ID NO: 637782 - DNA, 15 bp, Homo sapiens
gccaggcaagactct

SEQ ID NO: 637783 - DNA, 15 bp, Homo sapiens
ccaggcaagactctg

SEQ ID NO: 637784 - DNA, 15 bp, Homo sapiens
caggcaagactctgt

SEQ ID NO: 637785 - DNA, 15 bp, Homo sapiens
aggcaagactctgtt

SEQ ID NO: 637786 - DNA, 15 bp, Homo sapiens
ggcaagactctgttg

SEQ ID NO: 637787 - DNA, 15 bp, Homo sapiens
gcaagactctgttga

SEQ ID NO: 637788 - DNA, 15 bp, Homo sapiens
caagactctgttgag

SEQ ID NO: 637789 - DNA, 15 bp, Homo sapiens
aagactctgttgagt

SEQ ID NO: 637790 - DNA, 15 bp, Homo sapiens
agactctgttgagta

SEQ ID NO: 637791 - DNA, 15 bp, Homo sapiens
gactctgttgagtag

SEQ ID NO: 637792 - DNA, 15 bp, Homo sapiens
actctgttgagtagg

SEQ ID NO: 637793 - DNA, 15 bp, Homo sapiens
ctctgttgagtaggt

SEQ ID NO: 637794 - DNA, 15 bp, Homo sapiens
tctgttgagtaggtg

SEQ ID NO: 637795 - DNA, 15 bp, Homo sapiens
ctgttgagtaggtga

SEQ ID NO: 637796 - DNA, 15 bp, Homo sapiens
tgttgagtaggtgat

SEQ ID NO: 637797 - DNA, 15 bp, Homo sapiens
gttgagtaggtgatt

SEQ ID NO: 637798 - DNA, 15 bp, Homo sapiens
ttgagtaggtgattt

SEQ ID NO: 637799 - DNA, 15 bp, Homo sapiens
tgagtaggtgatttc

SEQ ID NO: 637800 - DNA, 15 bp, Homo sapiens
gagtaggtgatttca

SEQ ID NO: 637801 - DNA, 15 bp, Homo sapiens
agtaggtgatttcaa

SEQ ID NO: 637802 - DNA, 15 bp, Homo sapiens
gtaggtgatttcaaa

SEQ ID NO: 637803 - DNA, 15 bp, Homo sapiens
taggtgatttcaaag

SEQ ID NO: 637804 - DNA, 15 bp, Homo sapiens
aggtgatttcaaagg

SEQ ID NO: 637805 - DNA, 15 bp, Homo sapiens
ggtgatttcaaagga

SEQ ID NO: 637806 - DNA, 15 bp, Homo sapiens
gtgatttcaaaggaa

SEQ ID NO: 637807 - DNA, 15 bp, Homo sapiens
tgatttcaaaggaag

SEQ ID NO: 637808 - DNA, 15 bp, Homo sapiens
gatttcaaaggaagg

SEQ ID NO: 637809 - DNA, 15 bp, Homo sapiens
atttcaaaggaaggt

SEQ ID NO: 637810 - DNA, 15 bp, Homo sapiens
tttcaaaggaaggtc

SEQ ID NO: 637811 - DNA, 15 bp, Homo sapiens
ttcaaaggaaggtct

SEQ ID NO: 637812 - DNA, 15 bp, Homo sapiens
tcaaaggaaggtcta

SEQ ID NO: 637813 - DNA, 15 bp, Homo sapiens
caaaggaaggtctag

SEQ ID NO: 637814 - DNA, 15 bp, Homo sapiens
aaaggaaggtctagc

SEQ ID NO: 637815 - DNA, 15 bp, Homo sapiens
aaggaaggtctagcg

SEQ ID NO: 637816 - DNA, 15 bp, Homo sapiens
aggaaggtctagcgg

SEQ ID NO: 637817 - DNA, 15 bp, Homo sapiens
ggaaggtctagcgga

SEQ ID NO: 637818 - DNA, 15 bp, Homo sapiens
gaaggtctagcggag

SEQ ID NO: 637819 - DNA, 15 bp, Homo sapiens
aaggtctagcggagg

SEQ ID NO: 637820 - DNA, 15 bp, Homo sapiens
aggtctagcggaggt

SEQ ID NO: 637821 - DNA, 15 bp, Homo sapiens
ggtctagcggaggtg

SEQ ID NO: 637822 - DNA, 15 bp, Homo sapiens
gtctagcggaggtga

SEQ ID NO: 637823 - DNA, 15 bp, Homo sapiens
tctagcggaggtgat

SEQ ID NO: 637824 - DNA, 15 bp, Homo sapiens
ctagcggaggtgatg

SEQ ID NO: 637825 - DNA, 15 bp, Homo sapiens
tagcggaggtgatgg

SEQ ID NO: 637826 - DNA, 15 bp, Homo sapiens
agcggaggtgatgga

SEQ ID NO: 637827 - DNA, 15 bp, Homo sapiens
gcggaggtgatggag

SEQ ID NO: 637828 - DNA, 15 bp, Homo sapiens
cggaggtgatggagc

SEQ ID NO: 637829 - DNA, 15 bp, Homo sapiens
ggaggtgatggagct

SEQ ID NO: 637830 - DNA, 15 bp, Homo sapiens
gaggtgatggagctg

SEQ ID NO: 637831 - DNA, 15 bp, Homo sapiens
aggtgatggagctgt

SEQ ID NO: 637832 - DNA, 15 bp, Homo sapiens
ggtgatggagctgtc

SEQ ID NO: 637833 - DNA, 15 bp, Homo sapiens
gtgatggagctgtcc

SEQ ID NO: 637834 - DNA, 15 bp, Homo sapiens
tgatggagctgtccc

SEQ ID NO: 637835 - DNA, 15 bp, Homo sapiens
gatggagctgtccct

SEQ ID NO: 637836 - DNA, 15 bp, Homo sapiens
atggagctgtccctg

SEQ ID NO: 637837 - DNA, 15 bp, Homo sapiens
tggagctgtccctgt

SEQ ID NO: 637838 - DNA, 15 bp, Homo sapiens
ggagctgtccctgtg

SEQ ID NO: 637839 - DNA, 15 bp, Homo sapiens
gagctgtccctgtgg

SEQ ID NO: 637840 - DNA, 15 bp, Homo sapiens
agctgtccctgtggt

SEQ ID NO: 637841 - DNA, 15 bp, Homo sapiens
gctgtccctgtggtt

SEQ ID NO: 637842 - DNA, 15 bp, Homo sapiens
ctgtccctgtggtta

SEQ ID NO: 637843 - DNA, 15 bp, Homo sapiens
tgtccctgtggttac

SEQ ID NO: 637844 - DNA, 15 bp, Homo sapiens
gtccctgtggttacc

SEQ ID NO: 637845 - DNA, 15 bp, Homo sapiens
tccctgtggttacct

SEQ ID NO: 637846 - DNA, 15 bp, Homo sapiens
ccctgtggttaccta

SEQ ID NO: 637847 - DNA, 15 bp, Homo sapiens
cctgtggttacctaa

SEQ ID NO: 637848 - DNA, 15 bp, Homo sapiens
ctgtggttacctaaa

SEQ ID NO: 637849 - DNA, 15 bp, Homo sapiens
tgtggttacctaaag

SEQ ID NO: 637850 - DNA, 15 bp, Homo sapiens
gtggttacctaaaga

SEQ ID NO: 637851 - DNA, 15 bp, Homo sapiens
tggttacctaaagaa

SEQ ID NO: 637852 - DNA, 15 bp, Homo sapiens
ggttacctaaagaaa

SEQ ID NO: 637853 - DNA, 15 bp, Homo sapiens
gttacctaaagaaaa

SEQ ID NO: 637854 - DNA, 15 bp, Homo sapiens
ttacctaaagaaaat

SEQ ID NO: 637855 - DNA, 15 bp, Homo sapiens
tacctaaagaaaatg

SEQ ID NO: 637856 - DNA, 15 bp, Homo sapiens
acctaaagaaaatgc

SEQ ID NO: 637857 - DNA, 15 bp, Homo sapiens
cctaaagaaaatgca

SEQ ID NO: 637858 - DNA, 15 bp, Homo sapiens
ctaaagaaaatgcac

SEQ ID NO: 637859 - DNA, 15 bp, Homo sapiens
taaagaaaatgcacc

SEQ ID NO: 637860 - DNA, 15 bp, Homo sapiens
aaagaaaatgcacct

SEQ ID NO: 637861 - DNA, 15 bp, Homo sapiens
aagaaaatgcacctg

SEQ ID NO: 637862 - DNA, 15 bp, Homo sapiens
agaaaatgcacctgg

SEQ ID NO: 637863 - DNA, 15 bp, Homo sapiens
gaaaatgcacctggg

SEQ ID NO: 637864 - DNA, 15 bp, Homo sapiens
aaaatgcacctgggg

SEQ ID NO: 637865 - DNA, 15 bp, Homo sapiens
aaatgcacctgggga

SEQ ID NO: 637866 - DNA, 15 bp, Homo sapiens
aatgcacctggggag

SEQ ID NO: 637867 - DNA, 15 bp, Homo sapiens
atgcacctggggaga

SEQ ID NO: 637868 - DNA, 15 bp, Homo sapiens
tgcacctggggagaa

SEQ ID NO: 637869 - DNA, 15 bp, Homo sapiens
gcacctggggagaag

SEQ ID NO: 637870 - DNA, 15 bp, Homo sapiens
cacctggggagaagg

SEQ ID NO: 637871 - DNA, 15 bp, Homo sapiens
acctggggagaagga

SEQ ID NO: 637872 - DNA, 15 bp, Homo sapiens
cctggggagaaggag

SEQ ID NO: 637873 - DNA, 15 bp, Homo sapiens
ctggggagaaggagt

SEQ ID NO: 637874 - DNA, 15 bp, Homo sapiens
tggggagaaggagta

SEQ ID NO: 637875 - DNA, 15 bp, Homo sapiens
ggggagaaggagtag

SEQ ID NO: 637876 - DNA, 15 bp, Homo sapiens
gggagaaggagtagc

SEQ ID NO: 637877 - DNA, 15 bp, Homo sapiens
ggagaaggagtagca

SEQ ID NO: 637878 - DNA, 15 bp, Homo sapiens
gagaaggagtagcag

SEQ ID NO: 637879 - DNA, 15 bp, Homo sapiens
agaaggagtagcagg

SEQ ID NO: 637880 - DNA, 15 bp, Homo sapiens
gaaggagtagcaggt

SEQ ID NO: 637881 - DNA, 15 bp, Homo sapiens
aaggagtagcaggtg

SEQ ID NO: 637882 - DNA, 15 bp, Homo sapiens
aggagtagcaggtgc

SEQ ID NO: 637883 - DNA, 15 bp, Homo sapiens
ggagtagcaggtgcc

SEQ ID NO: 637884 - DNA, 15 bp, Homo sapiens
gagtagcaggtgccc

SEQ ID NO: 637885 - DNA, 15 bp, Homo sapiens
agtagcaggtgcccg

SEQ ID NO: 637886 - DNA, 15 bp, Homo sapiens
gtagcaggtgcccgc

SEQ ID NO: 637887 - DNA, 15 bp, Homo sapiens
tagcaggtgcccgca

SEQ ID NO: 637888 - DNA, 15 bp, Homo sapiens
agcaggtgcccgcac

SEQ ID NO: 637889 - DNA, 15 bp, Homo sapiens
gcaggtgcccgcacc

SEQ ID NO: 637890 - DNA, 15 bp, Homo sapiens
caggtgcccgcaccc

SEQ ID NO: 637891 - DNA, 15 bp, Homo sapiens
aggtgcccgcaccca

SEQ ID NO: 637892 - DNA, 15 bp, Homo sapiens
ggtgcccgcacccag

SEQ ID NO: 637893 - DNA, 15 bp, Homo sapiens
gtgcccgcacccaga

SEQ ID NO: 637894 - DNA, 15 bp, Homo sapiens
tgcccgcacccagag

SEQ ID NO: 637895 - DNA, 15 bp, Homo sapiens
gcccgcacccagagg

SEQ ID NO: 637896 - DNA, 15 bp, Homo sapiens
cccgcacccagaggt

SEQ ID NO: 637897 - DNA, 15 bp, Homo sapiens
ccgcacccagaggtg

SEQ ID NO: 637898 - DNA, 15 bp, Homo sapiens
cgcacccagaggtgg

SEQ ID NO: 637899 - DNA, 15 bp, Homo sapiens
gcacccagaggtggg

SEQ ID NO: 637900 - DNA, 15 bp, Homo sapiens
cacccagaggtggga

SEQ ID NO: 637901 - DNA, 15 bp, Homo sapiens
acccagaggtgggaa

SEQ ID NO: 637902 - DNA, 15 bp, Homo sapiens
cccagaggtgggaac

SEQ ID NO: 637903 - DNA, 15 bp, Homo sapiens
ccagaggtgggaaca

SEQ ID NO: 637904 - DNA, 15 bp, Homo sapiens
cagaggtgggaacag

SEQ ID NO: 637905 - DNA, 15 bp, Homo sapiens
agaggtgggaacagt

SEQ ID NO: 637906 - DNA, 15 bp, Homo sapiens
gaggtgggaacagtt

SEQ ID NO: 637907 - DNA, 15 bp, Homo sapiens
aggtgggaacagttg

SEQ ID NO: 637908 - DNA, 15 bp, Homo sapiens
ggtgggaacagttgg

SEQ ID NO: 637909 - DNA, 15 bp, Homo sapiens
gtgggaacagttggg

SEQ ID NO: 637910 - DNA, 15 bp, Homo sapiens
tgggaacagttgggc

SEQ ID NO: 637911 - DNA, 15 bp, Homo sapiens
gggaacagttgggca

SEQ ID NO: 637912 - DNA, 15 bp, Homo sapiens
ggaacagttgggcat

SEQ ID NO: 637913 - DNA, 15 bp, Homo sapiens
gaacagttgggcatg

SEQ ID NO: 637914 - DNA, 15 bp, Homo sapiens
aacagttgggcatgg

SEQ ID NO: 637915 - DNA, 15 bp, Homo sapiens
acagttgggcatgga

SEQ ID NO: 637916 - DNA, 15 bp, Homo sapiens
cagttgggcatggac

SEQ ID NO: 637917 - DNA, 15 bp, Homo sapiens
agttgggcatggaca

SEQ ID NO: 637918 - DNA, 15 bp, Homo sapiens
gttgggcatggacaa

SEQ ID NO: 637919 - DNA, 15 bp, Homo sapiens
ttgggcatggacaaa

SEQ ID NO: 637920 - DNA, 15 bp, Homo sapiens
tgggcatggacaaag

SEQ ID NO: 637921 - DNA, 15 bp, Homo sapiens
gggcatggacaaagg

SEQ ID NO: 637922 - DNA, 15 bp, Homo sapiens
ggcatggacaaaggt

SEQ ID NO: 637923 - DNA, 15 bp, Homo sapiens
gcatggacaaaggtc

SEQ ID NO: 637924 - DNA, 15 bp, Homo sapiens
catggacaaaggtca

SEQ ID NO: 637925 - DNA, 15 bp, Homo sapiens
atggacaaaggtcag

SEQ ID NO: 637926 - DNA, 15 bp, Homo sapiens
tggacaaaggtcagc

SEQ ID NO: 637927 - DNA, 15 bp, Homo sapiens
ggacaaaggtcagca

SEQ ID NO: 637928 - DNA, 15 bp, Homo sapiens
gacaaaggtcagcaa

SEQ ID NO: 637929 - DNA, 15 bp, Homo sapiens
acaaaggtcagcaag

SEQ ID NO: 637930 - DNA, 15 bp, Homo sapiens
caaaggtcagcaaga

SEQ ID NO: 637931 - DNA, 15 bp, Homo sapiens
aaaggtcagcaagag

SEQ ID NO: 637932 - DNA, 15 bp, Homo sapiens
aaggtcagcaagagg

SEQ ID NO: 637933 - DNA, 15 bp, Homo sapiens
aggtcagcaagaggc

SEQ ID NO: 637934 - DNA, 15 bp, Homo sapiens
ggtcagcaagaggcc

SEQ ID NO: 637935 - DNA, 15 bp, Homo sapiens
gtcagcaagaggcca

SEQ ID NO: 637936 - DNA, 15 bp, Homo sapiens
tcagcaagaggccag

SEQ ID NO: 637937 - DNA, 15 bp, Homo sapiens
cagcaagaggccagg

SEQ ID NO: 637938 - DNA, 15 bp, Homo sapiens
agcaagaggccaggc

SEQ ID NO: 637939 - DNA, 15 bp, Homo sapiens
gcaagaggccaggca

SEQ ID NO: 637940 - DNA, 15 bp, Homo sapiens
caagaggccaggcaa

SEQ ID NO: 637941 - DNA, 15 bp, Homo sapiens
aagaggccaggcaag

SEQ ID NO: 637942 - DNA, 15 bp, Homo sapiens
agaggccaggcaagt

SEQ ID NO: 637943 - DNA, 15 bp, Homo sapiens
gaggccaggcaagtg

SEQ ID NO: 637944 - DNA, 15 bp, Homo sapiens
aggccaggcaagtgg

SEQ ID NO: 637945 - DNA, 15 bp, Homo sapiens
ggccaggcaagtggg

SEQ ID NO: 637946 - DNA, 15 bp, Homo sapiens
gccaggcaagtgggg

SEQ ID NO: 637947 - DNA, 15 bp, Homo sapiens
ccaggcaagtggggt

SEQ ID NO: 637948 - DNA, 15 bp, Homo sapiens
caggcaagtggggtg

SEQ ID NO: 637949 - DNA, 15 bp, Homo sapiens
aggcaagtggggtgt

SEQ ID NO: 637950 - DNA, 15 bp, Homo sapiens
ggcaagtggggtgtt

SEQ ID NO: 637951 - DNA, 15 bp, Homo sapiens
gcaagtggggtgttg

SEQ ID NO: 637952 - DNA, 15 bp, Homo sapiens
caagtggggtgttga

SEQ ID NO: 637953 - DNA, 15 bp, Homo sapiens
aagtggggtgttgag

SEQ ID NO: 637954 - DNA, 15 bp, Homo sapiens
agtggggtgttgaga

SEQ ID NO: 637955 - DNA, 15 bp, Homo sapiens
gtggggtgttgagaa

SEQ ID NO: 637956 - DNA, 15 bp, Homo sapiens
tggggtgttgagaac

SEQ ID NO: 637957 - DNA, 15 bp, Homo sapiens
ggggtgttgagaact

SEQ ID NO: 637958 - DNA, 15 bp, Homo sapiens
gggtgttgagaacta

SEQ ID NO: 637959 - DNA, 15 bp, Homo sapiens
ggtgttgagaactag

SEQ ID NO: 637960 - DNA, 15 bp, Homo sapiens
gtgttgagaactaga

SEQ ID NO: 637961 - DNA, 15 bp, Homo sapiens
tgttgagaactagaa

SEQ ID NO: 637962 - DNA, 15 bp, Homo sapiens
gttgagaactagaat

SEQ ID NO: 637963 - DNA, 15 bp, Homo sapiens
ttgagaactagaata

SEQ ID NO: 637964 - DNA, 15 bp, Homo sapiens
tgagaactagaatat

SEQ ID NO: 637965 - DNA, 15 bp, Homo sapiens
gagaactagaatata

SEQ ID NO: 637966 - DNA, 15 bp, Homo sapiens
agaactagaatatag

SEQ ID NO: 637967 - DNA, 15 bp, Homo sapiens
gaactagaatatagt

SEQ ID NO: 637968 - DNA, 15 bp, Homo sapiens
aactagaatatagtt

SEQ ID NO: 637969 - DNA, 15 bp, Homo sapiens
actagaatatagttg

SEQ ID NO: 637970 - DNA, 15 bp, Homo sapiens
ctagaatatagttgg

SEQ ID NO: 637971 - DNA, 15 bp, Homo sapiens
tagaatatagttgga

SEQ ID NO: 637972 - DNA, 15 bp, Homo sapiens
agaatatagttggag

SEQ ID NO: 637973 - DNA, 15 bp, Homo sapiens
gaatatagttggagg

SEQ ID NO: 637974 - DNA, 15 bp, Homo sapiens
aatatagttggagga

SEQ ID NO: 637975 - DNA, 15 bp, Homo sapiens
atatagttggaggag

SEQ ID NO: 637976 - DNA, 15 bp, Homo sapiens
tatagttggaggagg

SEQ ID NO: 637977 - DNA, 15 bp, Homo sapiens
atagttggaggaggt

SEQ ID NO: 637978 - DNA, 15 bp, Homo sapiens
tagttggaggaggtg

SEQ ID NO: 637979 - DNA, 15 bp, Homo sapiens
agttggaggaggtga

SEQ ID NO: 637980 - DNA, 15 bp, Homo sapiens
gttggaggaggtgag

SEQ ID NO: 637981 - DNA, 15 bp, Homo sapiens
ttggaggaggtgagg

SEQ ID NO: 637982 - DNA, 15 bp, Homo sapiens
tggaggaggtgaggt

SEQ ID NO: 637983 - DNA, 15 bp, Homo sapiens
ggaggaggtgaggtc

SEQ ID NO: 637984 - DNA, 15 bp, Homo sapiens
gaggaggtgaggtca

SEQ ID NO: 637985 - DNA, 15 bp, Homo sapiens
aggaggtgaggtcag

SEQ ID NO: 637986 - DNA, 15 bp, Homo sapiens
ggaggtgaggtcaga

SEQ ID NO: 637987 - DNA, 15 bp, Homo sapiens
gaggtgaggtcagag

SEQ ID NO: 637988 - DNA, 15 bp, Homo sapiens
aggtgaggtcagaga

SEQ ID NO: 637989 - DNA, 15 bp, Homo sapiens
ggtgaggtcagagag

SEQ ID NO: 637990 - DNA, 15 bp, Homo sapiens
gtgaggtcagagagc

SEQ ID NO: 637991 - DNA, 15 bp, Homo sapiens
tgaggtcagagagcc

SEQ ID NO: 637992 - DNA, 15 bp, Homo sapiens
gaggtcagagagcca

SEQ ID NO: 637993 - DNA, 15 bp, Homo sapiens
aggtcagagagccaa

SEQ ID NO: 637994 - DNA, 15 bp, Homo sapiens
ggtcagagagccaag

SEQ ID NO: 637995 - DNA, 15 bp, Homo sapiens
gtcagagagccaagg

SEQ ID NO: 637996 - DNA, 15 bp, Homo sapiens
tcagagagccaaggg

SEQ ID NO: 637997 - DNA, 15 bp, Homo sapiens
cagagagccaagggc

SEQ ID NO: 637998 - DNA, 15 bp, Homo sapiens
agagagccaagggcc

SEQ ID NO: 637999 - DNA, 15 bp, Homo sapiens
gagagccaagggcca

SEQ ID NO: 638000 - DNA, 15 bp, Homo sapiens
agagccaagggccag

SEQ ID NO: 638001 - DNA, 15 bp, Homo sapiens
gagccaagggccaga

SEQ ID NO: 638002 - DNA, 15 bp, Homo sapiens
agccaagggccagac

SEQ ID NO: 638003 - DNA, 15 bp, Homo sapiens
gccaagggccagacc

SEQ ID NO: 638004 - DNA, 15 bp, Homo sapiens
ccaagggccagaccg

SEQ ID NO: 638005 - DNA, 15 bp, Homo sapiens
caagggccagaccgt

SEQ ID NO: 638006 - DNA, 15 bp, Homo sapiens
aagggccagaccgtg

SEQ ID NO: 638007 - DNA, 15 bp, Homo sapiens
agggccagaccgtgg

SEQ ID NO: 638008 - DNA, 15 bp, Homo sapiens
gggccagaccgtggg

SEQ ID NO: 638009 - DNA, 15 bp, Homo sapiens
ggccagaccgtgggg

SEQ ID NO: 638010 - DNA, 15 bp, Homo sapiens
gccagaccgtgggga

SEQ ID NO: 638011 - DNA, 15 bp, Homo sapiens
ccagaccgtggggag

SEQ ID NO: 638012 - DNA, 15 bp, Homo sapiens
cagaccgtggggagt

SEQ ID NO: 638013 - DNA, 15 bp, Homo sapiens
agaccgtggggagtc

SEQ ID NO: 638014 - DNA, 15 bp, Homo sapiens
gaccgtggggagtct

SEQ ID NO: 638015 - DNA, 15 bp, Homo sapiens
accgtggggagtctc

SEQ ID NO: 638016 - DNA, 15 bp, Homo sapiens
ccgtggggagtctca

SEQ ID NO: 638017 - DNA, 15 bp, Homo sapiens
cgtggggagtctcag

SEQ ID NO: 638018 - DNA, 15 bp, Homo sapiens
gtggggagtctcaga

SEQ ID NO: 638019 - DNA, 15 bp, Homo sapiens
tggggagtctcagaa

SEQ ID NO: 638020 - DNA, 15 bp, Homo sapiens
ggggagtctcagaaa

SEQ ID NO: 638021 - DNA, 15 bp, Homo sapiens
gggagtctcagaaaa

SEQ ID NO: 638022 - DNA, 15 bp, Homo sapiens
ggagtctcagaaaaa

SEQ ID NO: 638023 - DNA, 15 bp, Homo sapiens
gagtctcagaaaaaa

SEQ ID NO: 638024 - DNA, 15 bp, Homo sapiens
agtctcagaaaaaat

SEQ ID NO: 638025 - DNA, 15 bp, Homo sapiens
gtctcagaaaaaatt

SEQ ID NO: 638026 - DNA, 15 bp, Homo sapiens
tctcagaaaaaattt

SEQ ID NO: 638027 - DNA, 15 bp, Homo sapiens
ctcagaaaaaattta

SEQ ID NO: 638028 - DNA, 15 bp, Homo sapiens
tcagaaaaaatttag

SEQ ID NO: 638029 - DNA, 15 bp, Homo sapiens
cagaaaaaatttagg

SEQ ID NO: 638030 - DNA, 15 bp, Homo sapiens
agaaaaaatttagga

SEQ ID NO: 638031 - DNA, 15 bp, Homo sapiens
gaaaaaatttaggat

SEQ ID NO: 638032 - DNA, 15 bp, Homo sapiens
aaaaaatttaggatt

SEQ ID NO: 638033 - DNA, 15 bp, Homo sapiens
aaaaatttaggattc

SEQ ID NO: 638034 - DNA, 15 bp, Homo sapiens
aaaatttaggattct

SEQ ID NO: 638035 - DNA, 15 bp, Homo sapiens
aaatttaggattctt

SEQ ID NO: 638036 - DNA, 15 bp, Homo sapiens
aatttaggattcttt

SEQ ID NO: 638037 - DNA, 15 bp, Homo sapiens
atttaggattctttt

SEQ ID NO: 638038 - DNA, 15 bp, Homo sapiens
tttaggattcttttc

SEQ ID NO: 638039 - DNA, 15 bp, Homo sapiens
ttaggattcttttct

SEQ ID NO: 638040 - DNA, 15 bp, Homo sapiens
taggattcttttctg

SEQ ID NO: 638041 - DNA, 15 bp, Homo sapiens
aggattcttttctgg

SEQ ID NO: 638042 - DNA, 15 bp, Homo sapiens
ggattcttttctggg

SEQ ID NO: 638043 - DNA, 15 bp, Homo sapiens
gattcttttctgggc

SEQ ID NO: 638044 - DNA, 15 bp, Homo sapiens
attcttttctgggcc

SEQ ID NO: 638045 - DNA, 15 bp, Homo sapiens
ttcttttctgggcca

SEQ ID NO: 638046 - DNA, 15 bp, Homo sapiens
tcttttctgggccag

SEQ ID NO: 638047 - DNA, 15 bp, Homo sapiens
cttttctgggccaga

SEQ ID NO: 638048 - DNA, 15 bp, Homo sapiens
ttttctgggccagaa

SEQ ID NO: 638049 - DNA, 15 bp, Homo sapiens
tttctgggccagaag

SEQ ID NO: 638050 - DNA, 15 bp, Homo sapiens
ttctgggccagaagg

SEQ ID NO: 638051 - DNA, 15 bp, Homo sapiens
tctgggccagaaggg

SEQ ID NO: 638052 - DNA, 15 bp, Homo sapiens
ctgggccagaaggga

SEQ ID NO: 638053 - DNA, 15 bp, Homo sapiens
tgggccagaagggaa

SEQ ID NO: 638054 - DNA, 15 bp, Homo sapiens
gggccagaagggaag

SEQ ID NO: 638055 - DNA, 15 bp, Homo sapiens
ggccagaagggaagc

SEQ ID NO: 638056 - DNA, 15 bp, Homo sapiens
gccagaagggaagct

SEQ ID NO: 638057 - DNA, 15 bp, Homo sapiens
ccagaagggaagctt

SEQ ID NO: 638058 - DNA, 15 bp, Homo sapiens
cagaagggaagctta

SEQ ID NO: 638059 - DNA, 15 bp, Homo sapiens
agaagggaagcttag

SEQ ID NO: 638060 - DNA, 15 bp, Homo sapiens
gaagggaagcttagg

SEQ ID NO: 638061 - DNA, 15 bp, Homo sapiens
aagggaagcttaggg

SEQ ID NO: 638062 - DNA, 15 bp, Homo sapiens
agggaagcttagggc

SEQ ID NO: 638063 - DNA, 15 bp, Homo sapiens
gggaagcttagggca

SEQ ID NO: 638064 - DNA, 15 bp, Homo sapiens
ggaagcttagggcag

SEQ ID NO: 638065 - DNA, 15 bp, Homo sapiens
gaagcttagggcagc

SEQ ID NO: 638066 - DNA, 15 bp, Homo sapiens
aagcttagggcagct

SEQ ID NO: 638067 - DNA, 15 bp, Homo sapiens
agcttagggcagctg

SEQ ID NO: 638068 - DNA, 15 bp, Homo sapiens
gcttagggcagctga

SEQ ID NO: 638069 - DNA, 15 bp, Homo sapiens
cttagggcagctgag

SEQ ID NO: 638070 - DNA, 15 bp, Homo sapiens
ttagggcagctgagt

SEQ ID NO: 638071 - DNA, 15 bp, Homo sapiens
tagggcagctgagta

SEQ ID NO: 638072 - DNA, 15 bp, Homo sapiens
agggcagctgagtac

SEQ ID NO: 638073 - DNA, 15 bp, Homo sapiens
gggcagctgagtact

SEQ ID NO: 638074 - DNA, 15 bp, Homo sapiens
ggcagctgagtacta

SEQ ID NO: 638075 - DNA, 15 bp, Homo sapiens
gcagctgagtactag

SEQ ID NO: 638076 - DNA, 15 bp, Homo sapiens
cagctgagtactaga

SEQ ID NO: 638077 - DNA, 15 bp, Homo sapiens
agctgagtactagac

SEQ ID NO: 638078 - DNA, 15 bp, Homo sapiens
gctgagtactagact

SEQ ID NO: 638079 - DNA, 15 bp, Homo sapiens
ctgagtactagactc

SEQ ID NO: 638080 - DNA, 15 bp, Homo sapiens
tgagtactagactct

SEQ ID NO: 638081 - DNA, 15 bp, Homo sapiens
gagtactagactctg

SEQ ID NO: 638082 - DNA, 15 bp, Homo sapiens
agtactagactctgc

SEQ ID NO: 638083 - DNA, 15 bp, Homo sapiens
gtactagactctgcc

SEQ ID NO: 638084 - DNA, 15 bp, Homo sapiens
tactagactctgcct

SEQ ID NO: 638085 - DNA, 15 bp, Homo sapiens
actagactctgcctg

SEQ ID NO: 638086 - DNA, 15 bp, Homo sapiens
ctagactctgcctgt

SEQ ID NO: 638087 - DNA, 15 bp, Homo sapiens
tagactctgcctgtg

SEQ ID NO: 638088 - DNA, 15 bp, Homo sapiens
agactctgcctgtgt

SEQ ID NO: 638089 - DNA, 15 bp, Homo sapiens
gactctgcctgtgtt

SEQ ID NO: 638090 - DNA, 15 bp, Homo sapiens
actctgcctgtgttg

SEQ ID NO: 638091 - DNA, 15 bp, Homo sapiens
ctctgcctgtgttgg

SEQ ID NO: 638092 - DNA, 15 bp, Homo sapiens
tctgcctgtgttggt

SEQ ID NO: 638093 - DNA, 15 bp, Homo sapiens
ctgcctgtgttggta

SEQ ID NO: 638094 - DNA, 15 bp, Homo sapiens
tgcctgtgttggtat

SEQ ID NO: 638095 - DNA, 15 bp, Homo sapiens
gcctgtgttggtatc

SEQ ID NO: 638096 - DNA, 15 bp, Homo sapiens
cctgtgttggtatcc

SEQ ID NO: 638097 - DNA, 15 bp, Homo sapiens
ctgtgttggtatcca

SEQ ID NO: 638098 - DNA, 15 bp, Homo sapiens
tgtgttggtatccat

SEQ ID NO: 638099 - DNA, 15 bp, Homo sapiens
gtgttggtatccatt

SEQ ID NO: 638100 - DNA, 15 bp, Homo sapiens
tgttggtatccattc

SEQ ID NO: 638101 - DNA, 15 bp, Homo sapiens
gttggtatccattca

SEQ ID NO: 638102 - DNA, 15 bp, Homo sapiens
ttggtatccattcac

SEQ ID NO: 638103 - DNA, 15 bp, Homo sapiens
tggtatccattcaca

SEQ ID NO: 638104 - DNA, 15 bp, Homo sapiens
ggtatccattcacaa

SEQ ID NO: 638105 - DNA, 15 bp, Homo sapiens
gtatccattcacaag

SEQ ID NO: 638106 - DNA, 15 bp, Homo sapiens
tatccattcacaagg

SEQ ID NO: 638107 - DNA, 15 bp, Homo sapiens
atccattcacaaggt

SEQ ID NO: 638108 - DNA, 15 bp, Homo sapiens
tccattcacaaggtg

SEQ ID NO: 638109 - DNA, 15 bp, Homo sapiens
ccattcacaaggtgg

SEQ ID NO: 638110 - DNA, 15 bp, Homo sapiens
cattcacaaggtggt

SEQ ID NO: 638111 - DNA, 15 bp, Homo sapiens
attcacaaggtggtg

SEQ ID NO: 638112 - DNA, 15 bp, Homo sapiens
ttcacaaggtggtga

SEQ ID NO: 638113 - DNA, 15 bp, Homo sapiens
tcacaaggtggtgag

SEQ ID NO: 638114 - DNA, 15 bp, Homo sapiens
cacaaggtggtgagg

SEQ ID NO: 638115 - DNA, 15 bp, Homo sapiens
acaaggtggtgaggt

SEQ ID NO: 638116 - DNA, 15 bp, Homo sapiens
caaggtggtgaggtt

SEQ ID NO: 638117 - DNA, 15 bp, Homo sapiens
aaggtggtgaggttg

SEQ ID NO: 638118 - DNA, 15 bp, Homo sapiens
aggtggtgaggttgt

SEQ ID NO: 638119 - DNA, 15 bp, Homo sapiens
ggtggtgaggttgtg

SEQ ID NO: 638120 - DNA, 15 bp, Homo sapiens
gtggtgaggttgtgt

SEQ ID NO: 638121 - DNA, 15 bp, Homo sapiens
tggtgaggttgtgtc

SEQ ID NO: 638122 - DNA, 15 bp, Homo sapiens
ggtgaggttgtgtcc

SEQ ID NO: 638123 - DNA, 15 bp, Homo sapiens
gtgaggttgtgtcca

SEQ ID NO: 638124 - DNA, 15 bp, Homo sapiens
tgaggttgtgtccag

SEQ ID NO: 638125 - DNA, 15 bp, Homo sapiens
gaggttgtgtccagc

SEQ ID NO: 638126 - DNA, 15 bp, Homo sapiens
aggttgtgtccagca

SEQ ID NO: 638127 - DNA, 15 bp, Homo sapiens
ggttgtgtccagcag

SEQ ID NO: 638128 - DNA, 15 bp, Homo sapiens
gttgtgtccagcagg

SEQ ID NO: 638129 - DNA, 15 bp, Homo sapiens
ttgtgtccagcaggc

SEQ ID NO: 638130 - DNA, 15 bp, Homo sapiens
tgtgtccagcaggcc

SEQ ID NO: 638131 - DNA, 15 bp, Homo sapiens
gtgtccagcaggccc

SEQ ID NO: 638132 - DNA, 15 bp, Homo sapiens
tgtccagcaggccca

SEQ ID NO: 638133 - DNA, 15 bp, Homo sapiens
gtccagcaggcccag

SEQ ID NO: 638134 - DNA, 15 bp, Homo sapiens
tccagcaggcccagc

SEQ ID NO: 638135 - DNA, 15 bp, Homo sapiens
ccagcaggcccagca

SEQ ID NO: 638136 - DNA, 15 bp, Homo sapiens
cagcaggcccagcag

SEQ ID NO: 638137 - DNA, 15 bp, Homo sapiens
agcaggcccagcagc

SEQ ID NO: 638138 - DNA, 15 bp, Homo sapiens
gcaggcccagcagcc

SEQ ID NO: 638139 - DNA, 15 bp, Homo sapiens
caggcccagcagcct

SEQ ID NO: 638140 - DNA, 15 bp, Homo sapiens
aggcccagcagcctg

SEQ ID NO: 638141 - DNA, 15 bp, Homo sapiens
ggcccagcagcctgg

SEQ ID NO: 638142 - DNA, 15 bp, Homo sapiens
gcccagcagcctggc

SEQ ID NO: 638143 - DNA, 15 bp, Homo sapiens
cccagcagcctggct

SEQ ID NO: 638144 - DNA, 15 bp, Homo sapiens
ccagcagcctggctt

SEQ ID NO: 638145 - DNA, 15 bp, Homo sapiens
cagcagcctggctta

SEQ ID NO: 638146 - DNA, 15 bp, Homo sapiens
agcagcctggcttaa

SEQ ID NO: 638147 - DNA, 15 bp, Homo sapiens
gcagcctggcttaag

SEQ ID NO: 638148 - DNA, 15 bp, Homo sapiens
cagcctggcttaagg

SEQ ID NO: 638149 - DNA, 15 bp, Homo sapiens
agcctggcttaagga

SEQ ID NO: 638150 - DNA, 15 bp, Homo sapiens
gcctggcttaaggag

SEQ ID NO: 638151 - DNA, 15 bp, Homo sapiens
cctggcttaaggaga

SEQ ID NO: 638152 - DNA, 15 bp, Homo sapiens
ctggcttaaggagaa

SEQ ID NO: 638153 - DNA, 15 bp, Homo sapiens
tggcttaaggagaag

SEQ ID NO: 638154 - DNA, 15 bp, Homo sapiens
ggcttaaggagaaga

SEQ ID NO: 638155 - DNA, 15 bp, Homo sapiens
gcttaaggagaagag

SEQ ID NO: 638156 - DNA, 15 bp, Homo sapiens
cttaaggagaagagg

SEQ ID NO: 638157 - DNA, 15 bp, Homo sapiens
ttaaggagaagaggg

SEQ ID NO: 638158 - DNA, 15 bp, Homo sapiens
taaggagaagagggc

SEQ ID NO: 638159 - DNA, 15 bp, Homo sapiens
aaggagaagagggca

SEQ ID NO: 638160 - DNA, 15 bp, Homo sapiens
aggagaagagggcaa

SEQ ID NO: 638161 - DNA, 15 bp, Homo sapiens
ggagaagagggcaaa

SEQ ID NO: 638162 - DNA, 15 bp, Homo sapiens
gagaagagggcaaac

SEQ ID NO: 638163 - DNA, 15 bp, Homo sapiens
agaagagggcaaaca

SEQ ID NO: 638164 - DNA, 15 bp, Homo sapiens
gaagagggcaaacag

SEQ ID NO: 638165 - DNA, 15 bp, Homo sapiens
aagagggcaaacagc

SEQ ID NO: 638166 - DNA, 15 bp, Homo sapiens
agagggcaaacagct

SEQ ID NO: 638167 - DNA, 15 bp, Homo sapiens
gagggcaaacagctg

SEQ ID NO: 638168 - DNA, 15 bp, Homo sapiens
agggcaaacagctgg

SEQ ID NO: 638169 - DNA, 15 bp, Homo sapiens
gggcaaacagctgga

SEQ ID NO: 638170 - DNA, 15 bp, Homo sapiens
ggcaaacagctggat

SEQ ID NO: 638171 - DNA, 15 bp, Homo sapiens
gcaaacagctggatg

SEQ ID NO: 638172 - DNA, 15 bp, Homo sapiens
caaacagctggatgg

SEQ ID NO: 638173 - DNA, 15 bp, Homo sapiens
aaacagctggatgga

SEQ ID NO: 638174 - DNA, 15 bp, Homo sapiens
aacagctggatggat

SEQ ID NO: 638175 - DNA, 15 bp, Homo sapiens
acagctggatggatg

SEQ ID NO: 638176 - DNA, 15 bp, Homo sapiens
cagctggatggatgc

SEQ ID NO: 638177 - DNA, 15 bp, Homo sapiens
agctggatggatgca

SEQ ID NO: 638178 - DNA, 15 bp, Homo sapiens
gctggatggatgcag

SEQ ID NO: 638179 - DNA, 15 bp, Homo sapiens
ctggatggatgcagg

SEQ ID NO: 638180 - DNA, 15 bp, Homo sapiens
tggatggatgcagga

SEQ ID NO: 638181 - DNA, 15 bp, Homo sapiens
ggatggatgcaggat

SEQ ID NO: 638182 - DNA, 15 bp, Homo sapiens
gatggatgcaggatg

SEQ ID NO: 638183 - DNA, 15 bp, Homo sapiens
atggatgcaggatga

SEQ ID NO: 638184 - DNA, 15 bp, Homo sapiens
tggatgcaggatgaa

SEQ ID NO: 638185 - DNA, 15 bp, Homo sapiens
ggatgcaggatgaag

SEQ ID NO: 638186 - DNA, 15 bp, Homo sapiens
gatgcaggatgaagt

SEQ ID NO: 638187 - DNA, 15 bp, Homo sapiens
atgcaggatgaagtt

SEQ ID NO: 638188 - DNA, 15 bp, Homo sapiens
tgcaggatgaagttt

SEQ ID NO: 638189 - DNA, 15 bp, Homo sapiens
gcaggatgaagttta

SEQ ID NO: 638190 - DNA, 15 bp, Homo sapiens
caggatgaagtttac

SEQ ID NO: 638191 - DNA, 15 bp, Homo sapiens
aggatgaagtttaca

SEQ ID NO: 638192 - DNA, 15 bp, Homo sapiens
ggatgaagtttacaa

SEQ ID NO: 638193 - DNA, 15 bp, Homo sapiens
gatgaagtttacaag

SEQ ID NO: 638194 - DNA, 15 bp, Homo sapiens
atgaagtttacaagg

SEQ ID NO: 638195 - DNA, 15 bp, Homo sapiens
tgaagtttacaagga

SEQ ID NO: 638196 - DNA, 15 bp, Homo sapiens
gaagtttacaaggat

SEQ ID NO: 638197 - DNA, 15 bp, Homo sapiens
aagtttacaaggatg

SEQ ID NO: 638198 - DNA, 15 bp, Homo sapiens
agtttacaaggatga

SEQ ID NO: 638199 - DNA, 15 bp, Homo sapiens
gtttacaaggatgat

SEQ ID NO: 638200 - DNA, 15 bp, Homo sapiens
tttacaaggatgatg

SEQ ID NO: 638201 - DNA, 15 bp, Homo sapiens
ttacaaggatgatgt

SEQ ID NO: 638202 - DNA, 15 bp, Homo sapiens
tacaaggatgatgta

SEQ ID NO: 638203 - DNA, 15 bp, Homo sapiens
acaaggatgatgtag

SEQ ID NO: 638204 - DNA, 15 bp, Homo sapiens
caaggatgatgtaga

SEQ ID NO: 638205 - DNA, 15 bp, Homo sapiens
aaggatgatgtagag

SEQ ID NO: 638206 - DNA, 15 bp, Homo sapiens
aggatgatgtagaga

SEQ ID NO: 638207 - DNA, 15 bp, Homo sapiens
ggatgatgtagagaa

SEQ ID NO: 638208 - DNA, 15 bp, Homo sapiens
gatgatgtagagaaa

SEQ ID NO: 638209 - DNA, 15 bp, Homo sapiens
atgatgtagagaaaa

SEQ ID NO: 638210 - DNA, 15 bp, Homo sapiens
tgatgtagagaaaat

SEQ ID NO: 638211 - DNA, 15 bp, Homo sapiens
gatgtagagaaaata

SEQ ID NO: 638212 - DNA, 15 bp, Homo sapiens
atgtagagaaaataa

SEQ ID NO: 638213 - DNA, 15 bp, Homo sapiens
tgtagagaaaataat

SEQ ID NO: 638214 - DNA, 15 bp, Homo sapiens
gtagagaaaataatt

SEQ ID NO: 638215 - DNA, 15 bp, Homo sapiens
tagagaaaataattg

SEQ ID NO: 638216 - DNA, 15 bp, Homo sapiens
agagaaaataattga

SEQ ID NO: 638217 - DNA, 15 bp, Homo sapiens
gagaaaataattgag

SEQ ID NO: 638218 - DNA, 15 bp, Homo sapiens
agaaaataattgagg

SEQ ID NO: 638219 - DNA, 15 bp, Homo sapiens
gaaaataattgagga

SEQ ID NO: 638220 - DNA, 15 bp, Homo sapiens
aaaataattgaggat

SEQ ID NO: 638221 - DNA, 15 bp, Homo sapiens
aaataattgaggatg

SEQ ID NO: 638222 - DNA, 15 bp, Homo sapiens
aataattgaggatga

SEQ ID NO: 638223 - DNA, 15 bp, Homo sapiens
ataattgaggatgat

SEQ ID NO: 638224 - DNA, 15 bp, Homo sapiens
taattgaggatgatg

SEQ ID NO: 638225 - DNA, 15 bp, Homo sapiens
aattgaggatgatgg

SEQ ID NO: 638226 - DNA, 15 bp, Homo sapiens
attgaggatgatggt

SEQ ID NO: 638227 - DNA, 15 bp, Homo sapiens
ttgaggatgatggtg

SEQ ID NO: 638228 - DNA, 15 bp, Homo sapiens
tgaggatgatggtga

SEQ ID NO: 638229 - DNA, 15 bp, Homo sapiens
gaggatgatggtgag

SEQ ID NO: 638230 - DNA, 15 bp, Homo sapiens
aggatgatggtgaga

SEQ ID NO: 638231 - DNA, 15 bp, Homo sapiens
ggatgatggtgagag

SEQ ID NO: 638232 - DNA, 15 bp, Homo sapiens
gatgatggtgagagt

SEQ ID NO: 638233 - DNA, 15 bp, Homo sapiens
atgatggtgagagtg

SEQ ID NO: 638234 - DNA, 15 bp, Homo sapiens
tgatggtgagagtgt

SEQ ID NO: 638235 - DNA, 15 bp, Homo sapiens
gatggtgagagtgtg

SEQ ID NO: 638236 - DNA, 15 bp, Homo sapiens
atggtgagagtgtgg

SEQ ID NO: 638237 - DNA, 15 bp, Homo sapiens
tggtgagagtgtggt

SEQ ID NO: 638238 - DNA, 15 bp, Homo sapiens
ggtgagagtgtggtt

SEQ ID NO: 638239 - DNA, 15 bp, Homo sapiens
gtgagagtgtggttc

SEQ ID NO: 638240 - DNA, 15 bp, Homo sapiens
tgagagtgtggttca

SEQ ID NO: 638241 - DNA, 15 bp, Homo sapiens
gagagtgtggttcaa

SEQ ID NO: 638242 - DNA, 15 bp, Homo sapiens
agagtgtggttcaaa

SEQ ID NO: 638243 - DNA, 15 bp, Homo sapiens
gagtgtggttcaaat

SEQ ID NO: 638244 - DNA, 15 bp, Homo sapiens
agtgtggttcaaatg

SEQ ID NO: 638245 - DNA, 15 bp, Homo sapiens
gtgtggttcaaatgc

SEQ ID NO: 638246 - DNA, 15 bp, Homo sapiens
tgtggttcaaatgcc

SEQ ID NO: 638247 - DNA, 15 bp, Homo sapiens
gtggttcaaatgcct

SEQ ID NO: 638248 - DNA, 15 bp, Homo sapiens
tggttcaaatgcctg

SEQ ID NO: 638249 - DNA, 15 bp, Homo sapiens
ggttcaaatgcctgg

SEQ ID NO: 638250 - DNA, 15 bp, Homo sapiens
gttcaaatgcctggc

SEQ ID NO: 638251 - DNA, 15 bp, Homo sapiens
ttcaaatgcctggca

SEQ ID NO: 638252 - DNA, 15 bp, Homo sapiens
tcaaatgcctggcag

SEQ ID NO: 638253 - DNA, 15 bp, Homo sapiens
caaatgcctggcaga

SEQ ID NO: 638254 - DNA, 15 bp, Homo sapiens
aaatgcctggcagag

SEQ ID NO: 638255 - DNA, 15 bp, Homo sapiens
aatgcctggcagagg

SEQ ID NO: 638256 - DNA, 15 bp, Homo sapiens
atgcctggcagaggg

SEQ ID NO: 638257 - DNA, 15 bp, Homo sapiens
tgcctggcagaggga

SEQ ID NO: 638258 - DNA, 15 bp, Homo sapiens
gcctggcagagggac

SEQ ID NO: 638259 - DNA, 15 bp, Homo sapiens
cctggcagagggacc

SEQ ID NO: 638260 - DNA, 15 bp, Homo sapiens
ctggcagagggacct

SEQ ID NO: 638261 - DNA, 15 bp, Homo sapiens
tggcagagggacctt

SEQ ID NO: 638262 - DNA, 15 bp, Homo sapiens
ggcagagggaccttg

SEQ ID NO: 638263 - DNA, 15 bp, Homo sapiens
gcagagggaccttgg

SEQ ID NO: 638264 - DNA, 15 bp, Homo sapiens
cagagggaccttggc

SEQ ID NO: 638265 - DNA, 15 bp, Homo sapiens
agagggaccttggct

SEQ ID NO: 638266 - DNA, 15 bp, Homo sapiens
gagggaccttggctg

SEQ ID NO: 638267 - DNA, 15 bp, Homo sapiens
agggaccttggctgc

SEQ ID NO: 638268 - DNA, 15 bp, Homo sapiens
gggaccttggctgca

SEQ ID NO: 638269 - DNA, 15 bp, Homo sapiens
ggaccttggctgcat

SEQ ID NO: 638270 - DNA, 15 bp, Homo sapiens
gaccttggctgcatg

SEQ ID NO: 638271 - DNA, 15 bp, Homo sapiens
accttggctgcatgg

SEQ ID NO: 638272 - DNA, 15 bp, Homo sapiens
ccttggctgcatggg

SEQ ID NO: 638273 - DNA, 15 bp, Homo sapiens
cttggctgcatgggg

SEQ ID NO: 638274 - DNA, 15 bp, Homo sapiens
ttggctgcatgggga

SEQ ID NO: 638275 - DNA, 15 bp, Homo sapiens
tggctgcatggggaa

SEQ ID NO: 638276 - DNA, 15 bp, Homo sapiens
ggctgcatggggaag

SEQ ID NO: 638277 - DNA, 15 bp, Homo sapiens
gctgcatggggaagg

SEQ ID NO: 638278 - DNA, 15 bp, Homo sapiens
ctgcatggggaagga

SEQ ID NO: 638279 - DNA, 15 bp, Homo sapiens
tgcatggggaaggaa

SEQ ID NO: 638280 - DNA, 15 bp, Homo sapiens
gcatggggaaggaag

SEQ ID NO: 638281 - DNA, 15 bp, Homo sapiens
catggggaaggaagc

SEQ ID NO: 638282 - DNA, 15 bp, Homo sapiens
atggggaaggaagca

SEQ ID NO: 638283 - DNA, 15 bp, Homo sapiens
tggggaaggaagcaa

SEQ ID NO: 638284 - DNA, 15 bp, Homo sapiens
ggggaaggaagcaaa

SEQ ID NO: 638285 - DNA, 15 bp, Homo sapiens
gggaaggaagcaaaa

SEQ ID NO: 638286 - DNA, 15 bp, Homo sapiens
ggaaggaagcaaaat

SEQ ID NO: 638287 - DNA, 15 bp, Homo sapiens
gaaggaagcaaaatc

SEQ ID NO: 638288 - DNA, 15 bp, Homo sapiens
aaggaagcaaaatct

SEQ ID NO: 638289 - DNA, 15 bp, Homo sapiens
aggaagcaaaatctt

SEQ ID NO: 638290 - DNA, 15 bp, Homo sapiens
ggaagcaaaatctta

SEQ ID NO: 638291 - DNA, 15 bp, Homo sapiens
gaagcaaaatcttaa

SEQ ID NO: 638292 - DNA, 15 bp, Homo sapiens
aagcaaaatcttaat

SEQ ID NO: 638293 - DNA, 15 bp, Homo sapiens
agcaaaatcttaatg

SEQ ID NO: 638294 - DNA, 15 bp, Homo sapiens
gcaaaatcttaatgg

SEQ ID NO: 638295 - DNA, 15 bp, Homo sapiens
caaaatcttaatggg

SEQ ID NO: 638296 - DNA, 15 bp, Homo sapiens
aaaatcttaatgggg

SEQ ID NO: 638297 - DNA, 15 bp, Homo sapiens
aaatcttaatggggt

SEQ ID NO: 638298 - DNA, 15 bp, Homo sapiens
aatcttaatggggtt

SEQ ID NO: 638299 - DNA, 15 bp, Homo sapiens
atcttaatggggttt

SEQ ID NO: 638300 - DNA, 15 bp, Homo sapiens
tcttaatggggttta

SEQ ID NO: 638301 - DNA, 15 bp, Homo sapiens
cttaatggggtttag

SEQ ID NO: 638302 - DNA, 15 bp, Homo sapiens
ttaatggggtttagc

SEQ ID NO: 638303 - DNA, 15 bp, Homo sapiens
taatggggtttagca

SEQ ID NO: 638304 - DNA, 15 bp, Homo sapiens
aatggggtttagcaa

SEQ ID NO: 638305 - DNA, 15 bp, Homo sapiens
atggggtttagcaat

SEQ ID NO: 638306 - DNA, 15 bp, Homo sapiens
tggggtttagcaatg

SEQ ID NO: 638307 - DNA, 15 bp, Homo sapiens
ggggtttagcaatgg

SEQ ID NO: 638308 - DNA, 15 bp, Homo sapiens
gggtttagcaatgga

SEQ ID NO: 638309 - DNA, 15 bp, Homo sapiens
ggtttagcaatggaa

SEQ ID NO: 638310 - DNA, 15 bp, Homo sapiens
gtttagcaatggaag

SEQ ID NO: 638311 - DNA, 15 bp, Homo sapiens
tttagcaatggaagg

SEQ ID NO: 638312 - DNA, 15 bp, Homo sapiens
ttagcaatggaagga

SEQ ID NO: 638313 - DNA, 15 bp, Homo sapiens
tagcaatggaaggaa

SEQ ID NO: 638314 - DNA, 15 bp, Homo sapiens
agcaatggaaggaaa

SEQ ID NO: 638315 - DNA, 15 bp, Homo sapiens
gcaatggaaggaaat

SEQ ID NO: 638316 - DNA, 15 bp, Homo sapiens
caatggaaggaaatg

SEQ ID NO: 638317 - DNA, 15 bp, Homo sapiens
aatggaaggaaatga

SEQ ID NO: 638318 - DNA, 15 bp, Homo sapiens
atggaaggaaatgaa

SEQ ID NO: 638319 - DNA, 15 bp, Homo sapiens
tggaaggaaatgaag

SEQ ID NO: 638320 - DNA, 15 bp, Homo sapiens
ggaaggaaatgaagg

SEQ ID NO: 638321 - DNA, 15 bp, Homo sapiens
gaaggaaatgaagga

SEQ ID NO: 638322 - DNA, 15 bp, Homo sapiens
aaggaaatgaaggat

SEQ ID NO: 638323 - DNA, 15 bp, Homo sapiens
aggaaatgaaggatt

SEQ ID NO: 638324 - DNA, 15 bp, Homo sapiens
ggaaatgaaggattt

SEQ ID NO: 638325 - DNA, 15 bp, Homo sapiens
gaaatgaaggattta

SEQ ID NO: 638326 - DNA, 15 bp, Homo sapiens
aaatgaaggatttaa

SEQ ID NO: 638327 - DNA, 15 bp, Homo sapiens
aatgaaggatttaaa

SEQ ID NO: 638328 - DNA, 15 bp, Homo sapiens
atgaaggatttaaag

SEQ ID NO: 638329 - DNA, 15 bp, Homo sapiens
tgaaggatttaaagg

SEQ ID NO: 638330 - DNA, 15 bp, Homo sapiens
gaaggatttaaagga

SEQ ID NO: 638331 - DNA, 15 bp, Homo sapiens
aaggatttaaaggac

SEQ ID NO: 638332 - DNA, 15 bp, Homo sapiens
aggatttaaaggact

SEQ ID NO: 638333 - DNA, 15 bp, Homo sapiens
ggatttaaaggactg

SEQ ID NO: 638334 - DNA, 15 bp, Homo sapiens
gatttaaaggactgc

SEQ ID NO: 638335 - DNA, 15 bp, Homo sapiens
atttaaaggactgca

SEQ ID NO: 638336 - DNA, 15 bp, Homo sapiens
tttaaaggactgcat

SEQ ID NO: 638337 - DNA, 15 bp, Homo sapiens
ttaaaggactgcatg

SEQ ID NO: 638338 - DNA, 15 bp, Homo sapiens
taaaggactgcatgg

SEQ ID NO: 638339 - DNA, 15 bp, Homo sapiens
aaaggactgcatggc

SEQ ID NO: 638340 - DNA, 15 bp, Homo sapiens
aaggactgcatggct

SEQ ID NO: 638341 - DNA, 15 bp, Homo sapiens
aggactgcatggctc

SEQ ID NO: 638342 - DNA, 15 bp, Homo sapiens
ggactgcatggctca

SEQ ID NO: 638343 - DNA, 15 bp, Homo sapiens
gactgcatggctcaa

SEQ ID NO: 638344 - DNA, 15 bp, Homo sapiens
actgcatggctcaag

SEQ ID NO: 638345 - DNA, 15 bp, Homo sapiens
ctgcatggctcaagt

SEQ ID NO: 638346 - DNA, 15 bp, Homo sapiens
tgcatggctcaagtg

SEQ ID NO: 638347 - DNA, 15 bp, Homo sapiens
gcatggctcaagtga

SEQ ID NO: 638348 - DNA, 15 bp, Homo sapiens
catggctcaagtgag

SEQ ID NO: 638349 - DNA, 15 bp, Homo sapiens
atggctcaagtgagg

SEQ ID NO: 638350 - DNA, 15 bp, Homo sapiens
tggctcaagtgaggt

SEQ ID NO: 638351 - DNA, 15 bp, Homo sapiens
ggctcaagtgaggtt

SEQ ID NO: 638352 - DNA, 15 bp, Homo sapiens
gctcaagtgaggttg

SEQ ID NO: 638353 - DNA, 15 bp, Homo sapiens
ctcaagtgaggttga

SEQ ID NO: 638354 - DNA, 15 bp, Homo sapiens
tcaagtgaggttgac

SEQ ID NO: 638355 - DNA, 15 bp, Homo sapiens
caagtgaggttgaca

SEQ ID NO: 638356 - DNA, 15 bp, Homo sapiens
aagtgaggttgacaa

SEQ ID NO: 638357 - DNA, 15 bp, Homo sapiens
agtgaggttgacaaa

SEQ ID NO: 638358 - DNA, 15 bp, Homo sapiens
gtgaggttgacaaat

SEQ ID NO: 638359 - DNA, 15 bp, Homo sapiens
tgaggttgacaaata

SEQ ID NO: 638360 - DNA, 15 bp, Homo sapiens
gaggttgacaaatag

SEQ ID NO: 638361 - DNA, 15 bp, Homo sapiens
aggttgacaaatagg

SEQ ID NO: 638362 - DNA, 15 bp, Homo sapiens
ggttgacaaataggt

SEQ ID NO: 638363 - DNA, 15 bp, Homo sapiens
gttgacaaataggtg

SEQ ID NO: 638364 - DNA, 15 bp, Homo sapiens
ttgacaaataggtgt

SEQ ID NO: 638365 - DNA, 15 bp, Homo sapiens
tgacaaataggtgtg

SEQ ID NO: 638366 - DNA, 15 bp, Homo sapiens
gacaaataggtgtgg

SEQ ID NO: 638367 - DNA, 15 bp, Homo sapiens
acaaataggtgtgga

SEQ ID NO: 638368 - DNA, 15 bp, Homo sapiens
caaataggtgtggaa

SEQ ID NO: 638369 - DNA, 15 bp, Homo sapiens
aaataggtgtggaag

SEQ ID NO: 638370 - DNA, 15 bp, Homo sapiens
aataggtgtggaagg

SEQ ID NO: 638371 - DNA, 15 bp, Homo sapiens
ataggtgtggaagga

SEQ ID NO: 638372 - DNA, 15 bp, Homo sapiens
taggtgtggaaggag

SEQ ID NO: 638373 - DNA, 15 bp, Homo sapiens
aggtgtggaaggagg

SEQ ID NO: 638374 - DNA, 15 bp, Homo sapiens
ggtgtggaaggagga

SEQ ID NO: 638375 - DNA, 15 bp, Homo sapiens
gtgtggaaggaggaa

SEQ ID NO: 638376 - DNA, 15 bp, Homo sapiens
tgtggaaggaggaag

SEQ ID NO: 638377 - DNA, 15 bp, Homo sapiens
gtggaaggaggaagg

SEQ ID NO: 638378 - DNA, 15 bp, Homo sapiens
tggaaggaggaagga

SEQ ID NO: 638379 - DNA, 15 bp, Homo sapiens
ggaaggaggaaggaa

SEQ ID NO: 638380 - DNA, 15 bp, Homo sapiens
gaaggaggaaggaag

SEQ ID NO: 638381 - DNA, 15 bp, Homo sapiens
aaggaggaaggaagc

SEQ ID NO: 638382 - DNA, 15 bp, Homo sapiens
aggaggaaggaagcg

SEQ ID NO: 638383 - DNA, 15 bp, Homo sapiens
ggaggaaggaagcga

SEQ ID NO: 638384 - DNA, 15 bp, Homo sapiens
gaggaaggaagcgag

SEQ ID NO: 638385 - DNA, 15 bp, Homo sapiens
aggaaggaagcgaga

SEQ ID NO: 638386 - DNA, 15 bp, Homo sapiens
ggaaggaagcgagaa

SEQ ID NO: 638387 - DNA, 15 bp, Homo sapiens
gaaggaagcgagaaa

SEQ ID NO: 638388 - DNA, 15 bp, Homo sapiens
aaggaagcgagaaaa

SEQ ID NO: 638389 - DNA, 15 bp, Homo sapiens
aggaagcgagaaaat

SEQ ID NO: 638390 - DNA, 15 bp, Homo sapiens
ggaagcgagaaaatg

SEQ ID NO: 638391 - DNA, 15 bp, Homo sapiens
gaagcgagaaaatga

SEQ ID NO: 638392 - DNA, 15 bp, Homo sapiens
aagcgagaaaatgag

SEQ ID NO: 638393 - DNA, 15 bp, Homo sapiens
agcgagaaaatgagg

SEQ ID NO: 638394 - DNA, 15 bp, Homo sapiens
gcgagaaaatgaggt

SEQ ID NO: 638395 - DNA, 15 bp, Homo sapiens
cgagaaaatgaggta

SEQ ID NO: 638396 - DNA, 15 bp, Homo sapiens
gagaaaatgaggtac

SEQ ID NO: 638397 - DNA, 15 bp, Homo sapiens
agaaaatgaggtaca

SEQ ID NO: 638398 - DNA, 15 bp, Homo sapiens
gaaaatgaggtacat

SEQ ID NO: 638399 - DNA, 15 bp, Homo sapiens
aaaatgaggtacatg

SEQ ID NO: 638400 - DNA, 15 bp, Homo sapiens
aaatgaggtacatgg

SEQ ID NO: 638401 - DNA, 15 bp, Homo sapiens
aatgaggtacatggg

SEQ ID NO: 638402 - DNA, 15 bp, Homo sapiens
atgaggtacatgggc

SEQ ID NO: 638403 - DNA, 15 bp, Homo sapiens
tgaggtacatgggca

SEQ ID NO: 638404 - DNA, 15 bp, Homo sapiens
gaggtacatgggcag

SEQ ID NO: 638405 - DNA, 15 bp, Homo sapiens
aggtacatgggcagt

SEQ ID NO: 638406 - DNA, 15 bp, Homo sapiens
ggtacatgggcagtc

SEQ ID NO: 638407 - DNA, 15 bp, Homo sapiens
gtacatgggcagtca

SEQ ID NO: 638408 - DNA, 15 bp, Homo sapiens
tacatgggcagtcac

SEQ ID NO: 638409 - DNA, 15 bp, Homo sapiens
acatgggcagtcaca

SEQ ID NO: 638410 - DNA, 15 bp, Homo sapiens
catgggcagtcacag

SEQ ID NO: 638411 - DNA, 15 bp, Homo sapiens
atgggcagtcacaga

SEQ ID NO: 638412 - DNA, 15 bp, Homo sapiens
tgggcagtcacagag

SEQ ID NO: 638413 - DNA, 15 bp, Homo sapiens
gggcagtcacagagt

SEQ ID NO: 638414 - DNA, 15 bp, Homo sapiens
ggcagtcacagagtg

SEQ ID NO: 638415 - DNA, 15 bp, Homo sapiens
gcagtcacagagtgc

SEQ ID NO: 638416 - DNA, 15 bp, Homo sapiens
cagtcacagagtgcc

SEQ ID NO: 638417 - DNA, 15 bp, Homo sapiens
agtcacagagtgcca

SEQ ID NO: 638418 - DNA, 15 bp, Homo sapiens
gtcacagagtgccaa

SEQ ID NO: 638419 - DNA, 15 bp, Homo sapiens
tcacagagtgccaag

SEQ ID NO: 638420 - DNA, 15 bp, Homo sapiens
cacagagtgccaagg

SEQ ID NO: 638421 - DNA, 15 bp, Homo sapiens
acagagtgccaagga

SEQ ID NO: 638422 - DNA, 15 bp, Homo sapiens
cagagtgccaaggag

SEQ ID NO: 638423 - DNA, 15 bp, Homo sapiens
agagtgccaaggagt

SEQ ID NO: 638424 - DNA, 15 bp, Homo sapiens
gagtgccaaggagtt

SEQ ID NO: 638425 - DNA, 15 bp, Homo sapiens
agtgccaaggagtta

SEQ ID NO: 638426 - DNA, 15 bp, Homo sapiens
gtgccaaggagttaa

SEQ ID NO: 638427 - DNA, 15 bp, Homo sapiens
tgccaaggagttaaa

SEQ ID NO: 638428 - DNA, 15 bp, Homo sapiens
gccaaggagttaaac

SEQ ID NO: 638429 - DNA, 15 bp, Homo sapiens
ccaaggagttaaaca

SEQ ID NO: 638430 - DNA, 15 bp, Homo sapiens
caaggagttaaacat

SEQ ID NO: 638431 - DNA, 15 bp, Homo sapiens
aaggagttaaacatg

SEQ ID NO: 638432 - DNA, 15 bp, Homo sapiens
aggagttaaacatgt

SEQ ID NO: 638433 - DNA, 15 bp, Homo sapiens
ggagttaaacatgtc

SEQ ID NO: 638434 - DNA, 15 bp, Homo sapiens
gagttaaacatgtca

SEQ ID NO: 638435 - DNA, 15 bp, Homo sapiens
agttaaacatgtcag

SEQ ID NO: 638436 - DNA, 15 bp, Homo sapiens
gttaaacatgtcaga

SEQ ID NO: 638437 - DNA, 15 bp, Homo sapiens
ttaaacatgtcagac

SEQ ID NO: 638438 - DNA, 15 bp, Homo sapiens
taaacatgtcagaca

SEQ ID NO: 638439 - DNA, 15 bp, Homo sapiens
aaacatgtcagacag

SEQ ID NO: 638440 - DNA, 15 bp, Homo sapiens
aacatgtcagacagt

SEQ ID NO: 638441 - DNA, 15 bp, Homo sapiens
acatgtcagacagta

SEQ ID NO: 638442 - DNA, 15 bp, Homo sapiens
catgtcagacagtag

SEQ ID NO: 638443 - DNA, 15 bp, Homo sapiens
atgtcagacagtagt

SEQ ID NO: 638444 - DNA, 15 bp, Homo sapiens
tgtcagacagtagtt

SEQ ID NO: 638445 - DNA, 15 bp, Homo sapiens
gtcagacagtagttc

SEQ ID NO: 638446 - DNA, 15 bp, Homo sapiens
tcagacagtagttcc

SEQ ID NO: 638447 - DNA, 15 bp, Homo sapiens
cagacagtagttcct

SEQ ID NO: 638448 - DNA, 15 bp, Homo sapiens
agacagtagttcctg

SEQ ID NO: 638449 - DNA, 15 bp, Homo sapiens
gacagtagttcctgg

SEQ ID NO: 638450 - DNA, 15 bp, Homo sapiens
acagtagttcctggt

SEQ ID NO: 638451 - DNA, 15 bp, Homo sapiens
cagtagttcctggtg

SEQ ID NO: 638452 - DNA, 15 bp, Homo sapiens
agtagttcctggtga

SEQ ID NO: 638453 - DNA, 15 bp, Homo sapiens
gtagttcctggtgac

SEQ ID NO: 638454 - DNA, 15 bp, Homo sapiens
tagttcctggtgaca

SEQ ID NO: 638455 - DNA, 15 bp, Homo sapiens
agttcctggtgacag

SEQ ID NO: 638456 - DNA, 15 bp, Homo sapiens
gttcctggtgacagc

SEQ ID NO: 638457 - DNA, 15 bp, Homo sapiens
ttcctggtgacagca

SEQ ID NO: 638458 - DNA, 15 bp, Homo sapiens
tcctggtgacagcaa

SEQ ID NO: 638459 - DNA, 15 bp, Homo sapiens
cctggtgacagcaag

SEQ ID NO: 638460 - DNA, 15 bp, Homo sapiens
ctggtgacagcaagg

SEQ ID NO: 638461 - DNA, 15 bp, Homo sapiens
tggtgacagcaaggt

SEQ ID NO: 638462 - DNA, 15 bp, Homo sapiens
ggtgacagcaaggtc

SEQ ID NO: 638463 - DNA, 15 bp, Homo sapiens
gtgacagcaaggtcc

SEQ ID NO: 638464 - DNA, 15 bp, Homo sapiens
tgacagcaaggtcca

SEQ ID NO: 638465 - DNA, 15 bp, Homo sapiens
gacagcaaggtccag

SEQ ID NO: 638466 - DNA, 15 bp, Homo sapiens
acagcaaggtccagg

SEQ ID NO: 638467 - DNA, 15 bp, Homo sapiens
cagcaaggtccaggg

SEQ ID NO: 638468 - DNA, 15 bp, Homo sapiens
agcaaggtccagggt

SEQ ID NO: 638469 - DNA, 15 bp, Homo sapiens
gcaaggtccagggtg

SEQ ID NO: 638470 - DNA, 15 bp, Homo sapiens
caaggtccagggtgt

SEQ ID NO: 638471 - DNA, 15 bp, Homo sapiens
aaggtccagggtgta

SEQ ID NO: 638472 - DNA, 15 bp, Homo sapiens
aggtccagggtgtat

SEQ ID NO: 638473 - DNA, 15 bp, Homo sapiens
ggtccagggtgtatt

SEQ ID NO: 638474 - DNA, 15 bp, Homo sapiens
gtccagggtgtattc

SEQ ID NO: 638475 - DNA, 15 bp, Homo sapiens
tccagggtgtattca

SEQ ID NO: 638476 - DNA, 15 bp, Homo sapiens
ccagggtgtattcat

SEQ ID NO: 638477 - DNA, 15 bp, Homo sapiens
cagggtgtattcatg

SEQ ID NO: 638478 - DNA, 15 bp, Homo sapiens
agggtgtattcatgg

SEQ ID NO: 638479 - DNA, 15 bp, Homo sapiens
gggtgtattcatgga

SEQ ID NO: 638480 - DNA, 15 bp, Homo sapiens
ggtgtattcatggac

SEQ ID NO: 638481 - DNA, 15 bp, Homo sapiens
gtgtattcatggact

SEQ ID NO: 638482 - DNA, 15 bp, Homo sapiens
tgtattcatggactg

SEQ ID NO: 638483 - DNA, 15 bp, Homo sapiens
gtattcatggactgc

SEQ ID NO: 638484 - DNA, 15 bp, Homo sapiens
tattcatggactgcg

SEQ ID NO: 638485 - DNA, 15 bp, Homo sapiens
attcatggactgcgt

SEQ ID NO: 638486 - DNA, 15 bp, Homo sapiens
ttcatggactgcgtg

SEQ ID NO: 638487 - DNA, 15 bp, Homo sapiens
tcatggactgcgtga

SEQ ID NO: 638488 - DNA, 15 bp, Homo sapiens
catggactgcgtgac

SEQ ID NO: 638489 - DNA, 15 bp, Homo sapiens
atggactgcgtgact

SEQ ID NO: 638490 - DNA, 15 bp, Homo sapiens
tggactgcgtgactc

SEQ ID NO: 638491 - DNA, 15 bp, Homo sapiens
ggactgcgtgactca

SEQ ID NO: 638492 - DNA, 15 bp, Homo sapiens
gactgcgtgactcag

SEQ ID NO: 638493 - DNA, 15 bp, Homo sapiens
actgcgtgactcagg

SEQ ID NO: 638494 - DNA, 15 bp, Homo sapiens
ctgcgtgactcaggt

SEQ ID NO: 638495 - DNA, 15 bp, Homo sapiens
tgcgtgactcaggtt

SEQ ID NO: 638496 - DNA, 15 bp, Homo sapiens
gcgtgactcaggtta

SEQ ID NO: 638497 - DNA, 15 bp, Homo sapiens
cgtgactcaggttaa

SEQ ID NO: 638498 - DNA, 15 bp, Homo sapiens
gtgactcaggttaag

SEQ ID NO: 638499 - DNA, 15 bp, Homo sapiens
tgactcaggttaagt

SEQ ID NO: 638500 - DNA, 15 bp, Homo sapiens
gactcaggttaagtc

SEQ ID NO: 638501 - DNA, 15 bp, Homo sapiens
actcaggttaagtca

SEQ ID NO: 638502 - DNA, 15 bp, Homo sapiens
ctcaggttaagtcaa

SEQ ID NO: 638503 - DNA, 15 bp, Homo sapiens
tcaggttaagtcaag

SEQ ID NO: 638504 - DNA, 15 bp, Homo sapiens
caggttaagtcaaga

SEQ ID NO: 638505 - DNA, 15 bp, Homo sapiens
aggttaagtcaagat

SEQ ID NO: 638506 - DNA, 15 bp, Homo sapiens
ggttaagtcaagatc

SEQ ID NO: 638507 - DNA, 15 bp, Homo sapiens
gttaagtcaagatcc

SEQ ID NO: 638508 - DNA, 15 bp, Homo sapiens
ttaagtcaagatccc

SEQ ID NO: 638509 - DNA, 15 bp, Homo sapiens
taagtcaagatcccc

SEQ ID NO: 638510 - DNA, 15 bp, Homo sapiens
aagtcaagatccccg

SEQ ID NO: 638511 - DNA, 15 bp, Homo sapiens
agtcaagatccccga

SEQ ID NO: 638512 - DNA, 15 bp, Homo sapiens
gtcaagatccccgaa

SEQ ID NO: 638513 - DNA, 15 bp, Homo sapiens
tcaagatccccgaag

SEQ ID NO: 638514 - DNA, 15 bp, Homo sapiens
caagatccccgaagt

SEQ ID NO: 638515 - DNA, 15 bp, Homo sapiens
aagatccccgaagtt

SEQ ID NO: 638516 - DNA, 15 bp, Homo sapiens
agatccccgaagttg

SEQ ID NO: 638517 - DNA, 15 bp, Homo sapiens
gatccccgaagttga

SEQ ID NO: 638518 - DNA, 15 bp, Homo sapiens
atccccgaagttgaa

SEQ ID NO: 638519 - DNA, 15 bp, Homo sapiens
tccccgaagttgaag

SEQ ID NO: 638520 - DNA, 15 bp, Homo sapiens
ccccgaagttgaaga

SEQ ID NO: 638521 - DNA, 15 bp, Homo sapiens
cccgaagttgaagag

SEQ ID NO: 638522 - DNA, 15 bp, Homo sapiens
ccgaagttgaagagg

SEQ ID NO: 638523 - DNA, 15 bp, Homo sapiens
cgaagttgaagaggt

SEQ ID NO: 638524 - DNA, 15 bp, Homo sapiens
gaagttgaagaggtc

SEQ ID NO: 638525 - DNA, 15 bp, Homo sapiens
aagttgaagaggtca

SEQ ID NO: 638526 - DNA, 15 bp, Homo sapiens
agttgaagaggtcaa

SEQ ID NO: 638527 - DNA, 15 bp, Homo sapiens
gttgaagaggtcaaa

SEQ ID NO: 638528 - DNA, 15 bp, Homo sapiens
ttgaagaggtcaaat

SEQ ID NO: 638529 - DNA, 15 bp, Homo sapiens
tgaagaggtcaaata

SEQ ID NO: 638530 - DNA, 15 bp, Homo sapiens
gaagaggtcaaatac

SEQ ID NO: 638531 - DNA, 15 bp, Homo sapiens
aagaggtcaaataca

SEQ ID NO: 638532 - DNA, 15 bp, Homo sapiens
agaggtcaaatacag

SEQ ID NO: 638533 - DNA, 15 bp, Homo sapiens
gaggtcaaatacagg

SEQ ID NO: 638534 - DNA, 15 bp, Homo sapiens
aggtcaaatacaggt

SEQ ID NO: 638535 - DNA, 15 bp, Homo sapiens
ggtcaaatacaggtt

SEQ ID NO: 638536 - DNA, 15 bp, Homo sapiens
gtcaaatacaggtta

SEQ ID NO: 638537 - DNA, 15 bp, Homo sapiens
tcaaatacaggttaa

SEQ ID NO: 638538 - DNA, 15 bp, Homo sapiens
caaatacaggttaaa

SEQ ID NO: 638539 - DNA, 15 bp, Homo sapiens
aaatacaggttaaac

SEQ ID NO: 638540 - DNA, 15 bp, Homo sapiens
aatacaggttaaaca

SEQ ID NO: 638541 - DNA, 15 bp, Homo sapiens
atacaggttaaacat

SEQ ID NO: 638542 - DNA, 15 bp, Homo sapiens
tacaggttaaacatg

SEQ ID NO: 638543 - DNA, 15 bp, Homo sapiens
acaggttaaacatgg

SEQ ID NO: 638544 - DNA, 15 bp, Homo sapiens
caggttaaacatggc

SEQ ID NO: 638545 - DNA, 15 bp, Homo sapiens
aggttaaacatggcc

SEQ ID NO: 638546 - DNA, 15 bp, Homo sapiens
ggttaaacatggcct

SEQ ID NO: 638547 - DNA, 15 bp, Homo sapiens
gttaaacatggcctt

SEQ ID NO: 638548 - DNA, 15 bp, Homo sapiens
ttaaacatggcctta

SEQ ID NO: 638549 - DNA, 15 bp, Homo sapiens
taaacatggccttat

SEQ ID NO: 638550 - DNA, 15 bp, Homo sapiens
aaacatggccttatg

SEQ ID NO: 638551 - DNA, 15 bp, Homo sapiens
aacatggccttatgg

SEQ ID NO: 638552 - DNA, 15 bp, Homo sapiens
acatggccttatggg

SEQ ID NO: 638553 - DNA, 15 bp, Homo sapiens
catggccttatggga

SEQ ID NO: 638554 - DNA, 15 bp, Homo sapiens
atggccttatgggaa

SEQ ID NO: 638555 - DNA, 15 bp, Homo sapiens
tggccttatgggaaa

SEQ ID NO: 638556 - DNA, 15 bp, Homo sapiens
ggccttatgggaaat

SEQ ID NO: 638557 - DNA, 15 bp, Homo sapiens
gccttatgggaaatg

SEQ ID NO: 638558 - DNA, 15 bp, Homo sapiens
ccttatgggaaatga

SEQ ID NO: 638559 - DNA, 15 bp, Homo sapiens
cttatgggaaatgaa

SEQ ID NO: 638560 - DNA, 15 bp, Homo sapiens
ttatgggaaatgaaa

SEQ ID NO: 638561 - DNA, 15 bp, Homo sapiens
tatgggaaatgaaat

SEQ ID NO: 638562 - DNA, 15 bp, Homo sapiens
atgggaaatgaaatg

SEQ ID NO: 638563 - DNA, 15 bp, Homo sapiens
tgggaaatgaaatga

SEQ ID NO: 638564 - DNA, 15 bp, Homo sapiens
gggaaatgaaatgaa

SEQ ID NO: 638565 - DNA, 15 bp, Homo sapiens
ggaaatgaaatgaat

SEQ ID NO: 638566 - DNA, 15 bp, Homo sapiens
gaaatgaaatgaatg

SEQ ID NO: 638567 - DNA, 15 bp, Homo sapiens
aaatgaaatgaatgg

SEQ ID NO: 638568 - DNA, 15 bp, Homo sapiens
aatgaaatgaatggg

SEQ ID NO: 638569 - DNA, 15 bp, Homo sapiens
atgaaatgaatggga

SEQ ID NO: 638570 - DNA, 15 bp, Homo sapiens
tgaaatgaatgggaa

SEQ ID NO: 638571 - DNA, 15 bp, Homo sapiens
gaaatgaatgggaaa

SEQ ID NO: 638572 - DNA, 15 bp, Homo sapiens
aaatgaatgggaaat

SEQ ID NO: 638573 - DNA, 15 bp, Homo sapiens
aatgaatgggaaata

SEQ ID NO: 638574 - DNA, 15 bp, Homo sapiens
atgaatgggaaatat

SEQ ID NO: 638575 - DNA, 15 bp, Homo sapiens
tgaatgggaaatatt

SEQ ID NO: 638576 - DNA, 15 bp, Homo sapiens
gaatgggaaatatta

SEQ ID NO: 638577 - DNA, 15 bp, Homo sapiens
aatgggaaatattaa

SEQ ID NO: 638578 - DNA, 15 bp, Homo sapiens
atgggaaatattaag

SEQ ID NO: 638579 - DNA, 15 bp, Homo sapiens
tgggaaatattaagg

SEQ ID NO: 638580 - DNA, 15 bp, Homo sapiens
gggaaatattaagga

SEQ ID NO: 638581 - DNA, 15 bp, Homo sapiens
ggaaatattaaggaa

SEQ ID NO: 638582 - DNA, 15 bp, Homo sapiens
gaaatattaaggaaa

SEQ ID NO: 638583 - DNA, 15 bp, Homo sapiens
aaatattaaggaaat

SEQ ID NO: 638584 - DNA, 15 bp, Homo sapiens
aatattaaggaaata

SEQ ID NO: 638585 - DNA, 15 bp, Homo sapiens
atattaaggaaatat

SEQ ID NO: 638586 - DNA, 15 bp, Homo sapiens
tattaaggaaatatg

SEQ ID NO: 638587 - DNA, 15 bp, Homo sapiens
attaaggaaatatga

SEQ ID NO: 638588 - DNA, 15 bp, Homo sapiens
ttaaggaaatatgat

SEQ ID NO: 638589 - DNA, 15 bp, Homo sapiens
taaggaaatatgatt

SEQ ID NO: 638590 - DNA, 15 bp, Homo sapiens
aaggaaatatgattc

SEQ ID NO: 638591 - DNA, 15 bp, Homo sapiens
aggaaatatgattct

SEQ ID NO: 638592 - DNA, 15 bp, Homo sapiens
ggaaatatgattcta

SEQ ID NO: 638593 - DNA, 15 bp, Homo sapiens
gaaatatgattctat

SEQ ID NO: 638594 - DNA, 15 bp, Homo sapiens
aaatatgattctatg

SEQ ID NO: 638595 - DNA, 15 bp, Homo sapiens
aatatgattctatga

SEQ ID NO: 638596 - DNA, 15 bp, Homo sapiens
atatgattctatgaa

SEQ ID NO: 638597 - DNA, 15 bp, Homo sapiens
tatgattctatgaaa

SEQ ID NO: 638598 - DNA, 15 bp, Homo sapiens
atgattctatgaaaa

SEQ ID NO: 638599 - DNA, 15 bp, Homo sapiens
tgattctatgaaaag

SEQ ID NO: 638600 - DNA, 15 bp, Homo sapiens
gattctatgaaaagt

SEQ ID NO: 638601 - DNA, 15 bp, Homo sapiens
attctatgaaaagtg

SEQ ID NO: 638602 - DNA, 15 bp, Homo sapiens
ttctatgaaaagtgt

SEQ ID NO: 638603 - DNA, 15 bp, Homo sapiens
tctatgaaaagtgtg

SEQ ID NO: 638604 - DNA, 15 bp, Homo sapiens
ctatgaaaagtgtgg

SEQ ID NO: 638605 - DNA, 15 bp, Homo sapiens
tatgaaaagtgtggg

SEQ ID NO: 638606 - DNA, 15 bp, Homo sapiens
atgaaaagtgtgggc

SEQ ID NO: 638607 - DNA, 15 bp, Homo sapiens
tgaaaagtgtgggca

SEQ ID NO: 638608 - DNA, 15 bp, Homo sapiens
gaaaagtgtgggcat

SEQ ID NO: 638609 - DNA, 15 bp, Homo sapiens
aaaagtgtgggcatg

SEQ ID NO: 638610 - DNA, 15 bp, Homo sapiens
aaagtgtgggcatgt

SEQ ID NO: 638611 - DNA, 15 bp, Homo sapiens
aagtgtgggcatgtt

SEQ ID NO: 638612 - DNA, 15 bp, Homo sapiens
agtgtgggcatgttc

SEQ ID NO: 638613 - DNA, 15 bp, Homo sapiens
gtgtgggcatgttct

SEQ ID NO: 638614 - DNA, 15 bp, Homo sapiens
tgtgggcatgttctt

SEQ ID NO: 638615 - DNA, 15 bp, Homo sapiens
gtgggcatgttcttg

SEQ ID NO: 638616 - DNA, 15 bp, Homo sapiens
tgggcatgttcttga

SEQ ID NO: 638617 - DNA, 15 bp, Homo sapiens
gggcatgttcttgaa

SEQ ID NO: 638618 - DNA, 15 bp, Homo sapiens
ggcatgttcttgaat

SEQ ID NO: 638619 - DNA, 15 bp, Homo sapiens
gcatgttcttgaatt

SEQ ID NO: 638620 - DNA, 15 bp, Homo sapiens
catgttcttgaattt

SEQ ID NO: 638621 - DNA, 15 bp, Homo sapiens
atgttcttgaatttt

SEQ ID NO: 638622 - DNA, 15 bp, Homo sapiens
tgttcttgaattttt

SEQ ID NO: 638623 - DNA, 15 bp, Homo sapiens
gttcttgaatttttc

SEQ ID NO: 638624 - DNA, 15 bp, Homo sapiens
ttcttgaatttttca

SEQ ID NO: 638625 - DNA, 15 bp, Homo sapiens
tcttgaatttttcat

SEQ ID NO: 638626 - DNA, 15 bp, Homo sapiens
cttgaatttttcatc

SEQ ID NO: 638627 - DNA, 15 bp, Homo sapiens
ttgaatttttcatca

SEQ ID NO: 638628 - DNA, 15 bp, Homo sapiens
tgaatttttcatcat

SEQ ID NO: 638629 - DNA, 15 bp, Homo sapiens
gaatttttcatcatt

SEQ ID NO: 638630 - DNA, 15 bp, Homo sapiens
aatttttcatcatta

SEQ ID NO: 638631 - DNA, 15 bp, Homo sapiens
atttttcatcattat

SEQ ID NO: 638632 - DNA, 15 bp, Homo sapiens
tttttcatcattatc

SEQ ID NO: 638633 - DNA, 15 bp, Homo sapiens
ttttcatcattatca

SEQ ID NO: 638634 - DNA, 15 bp, Homo sapiens
tttcatcattatcaa

SEQ ID NO: 638635 - DNA, 15 bp, Homo sapiens
ttcatcattatcaac

SEQ ID NO: 638636 - DNA, 15 bp, Homo sapiens
tcatcattatcaaca

SEQ ID NO: 638637 - DNA, 15 bp, Homo sapiens
catcattatcaacat

SEQ ID NO: 638638 - DNA, 15 bp, Homo sapiens
atcattatcaacatt

SEQ ID NO: 638639 - DNA, 15 bp, Homo sapiens
tcattatcaacatta

SEQ ID NO: 638640 - DNA, 15 bp, Homo sapiens
cattatcaacattat

SEQ ID NO: 638641 - DNA, 15 bp, Homo sapiens
attatcaacattatt

SEQ ID NO: 638642 - DNA, 15 bp, Homo sapiens
ttatcaacattattt

SEQ ID NO: 638643 - DNA, 15 bp, Homo sapiens
tatcaacattattta

SEQ ID NO: 638644 - DNA, 15 bp, Homo sapiens
atcaacattatttaa

SEQ ID NO: 638645 - DNA, 15 bp, Homo sapiens
tcaacattatttaat

SEQ ID NO: 638646 - DNA, 15 bp, Homo sapiens
caacattatttaatg

SEQ ID NO: 638647 - DNA, 15 bp, Homo sapiens
aacattatttaatgt

SEQ ID NO: 638648 - DNA, 15 bp, Homo sapiens
acattatttaatgta

SEQ ID NO: 638649 - DNA, 15 bp, Homo sapiens
cattatttaatgtag

SEQ ID NO: 638650 - DNA, 15 bp, Homo sapiens
attatttaatgtagt

SEQ ID NO: 638651 - DNA, 15 bp, Homo sapiens
ttatttaatgtagtt

SEQ ID NO: 638652 - DNA, 15 bp, Homo sapiens
tatttaatgtagttg

SEQ ID NO: 638653 - DNA, 15 bp, Homo sapiens
atttaatgtagttgt

SEQ ID NO: 638654 - DNA, 15 bp, Homo sapiens
tttaatgtagttgta

SEQ ID NO: 638655 - DNA, 15 bp, Homo sapiens
ttaatgtagttgtaa

SEQ ID NO: 638656 - DNA, 15 bp, Homo sapiens
taatgtagttgtaat

SEQ ID NO: 638657 - DNA, 15 bp, Homo sapiens
aatgtagttgtaata

SEQ ID NO: 638658 - DNA, 15 bp, Homo sapiens
atgtagttgtaatat

SEQ ID NO: 638659 - DNA, 15 bp, Homo sapiens
tgtagttgtaatatt

SEQ ID NO: 638660 - DNA, 15 bp, Homo sapiens
gtagttgtaatattt

SEQ ID NO: 638661 - DNA, 15 bp, Homo sapiens
tagttgtaatatttt

SEQ ID NO: 638662 - DNA, 15 bp, Homo sapiens
agttgtaatattttt

SEQ ID NO: 638663 - DNA, 15 bp, Homo sapiens
gttgtaatattttta

SEQ ID NO: 638664 - DNA, 15 bp, Homo sapiens
ttgtaatatttttaa

SEQ ID NO: 638665 - DNA, 15 bp, Homo sapiens
tgtaatatttttaag

SEQ ID NO: 638666 - DNA, 15 bp, Homo sapiens
gtaatatttttaagc

SEQ ID NO: 638667 - DNA, 15 bp, Homo sapiens
taatatttttaagca

SEQ ID NO: 638668 - DNA, 15 bp, Homo sapiens
aatatttttaagcat

SEQ ID NO: 638669 - DNA, 15 bp, Homo sapiens
atatttttaagcatg

SEQ ID NO: 638670 - DNA, 15 bp, Homo sapiens
tatttttaagcatga

SEQ ID NO: 638671 - DNA, 15 bp, Homo sapiens
atttttaagcatgag

SEQ ID NO: 638672 - DNA, 15 bp, Homo sapiens
tttttaagcatgagg

SEQ ID NO: 638673 - DNA, 15 bp, Homo sapiens
ttttaagcatgagga

SEQ ID NO: 638674 - DNA, 15 bp, Homo sapiens
tttaagcatgaggaa

SEQ ID NO: 638675 - DNA, 15 bp, Homo sapiens
ttaagcatgaggaag

SEQ ID NO: 638676 - DNA, 15 bp, Homo sapiens
taagcatgaggaagc

SEQ ID NO: 638677 - DNA, 15 bp, Homo sapiens
aagcatgaggaagct

SEQ ID NO: 638678 - DNA, 15 bp, Homo sapiens
agcatgaggaagctt

SEQ ID NO: 638679 - DNA, 15 bp, Homo sapiens
gcatgaggaagcttt

SEQ ID NO: 638680 - DNA, 15 bp, Homo sapiens
catgaggaagcttta

SEQ ID NO: 638681 - DNA, 15 bp, Homo sapiens
atgaggaagctttaa

SEQ ID NO: 638682 - DNA, 15 bp, Homo sapiens
tgaggaagctttaaa

SEQ ID NO: 638683 - DNA, 15 bp, Homo sapiens
gaggaagctttaaaa

SEQ ID NO: 638684 - DNA, 15 bp, Homo sapiens
aggaagctttaaaat

SEQ ID NO: 638685 - DNA, 15 bp, Homo sapiens
ggaagctttaaaatt

SEQ ID NO: 638686 - DNA, 15 bp, Homo sapiens
gaagctttaaaatta

SEQ ID NO: 638687 - DNA, 15 bp, Homo sapiens
aagctttaaaattag

SEQ ID NO: 638688 - DNA, 15 bp, Homo sapiens
agctttaaaattagc

SEQ ID NO: 638689 - DNA, 15 bp, Homo sapiens
gctttaaaattagct

SEQ ID NO: 638690 - DNA, 15 bp, Homo sapiens
ctttaaaattagcta

SEQ ID NO: 638691 - DNA, 15 bp, Homo sapiens
tttaaaattagctaa

SEQ ID NO: 638692 - DNA, 15 bp, Homo sapiens
ttaaaattagctaat

SEQ ID NO: 638693 - DNA, 15 bp, Homo sapiens
taaaattagctaatc

SEQ ID NO: 638694 - DNA, 15 bp, Homo sapiens
aaaattagctaatcc

SEQ ID NO: 638695 - DNA, 15 bp, Homo sapiens
aaattagctaatcca

SEQ ID NO: 638696 - DNA, 15 bp, Homo sapiens
aattagctaatccaa

SEQ ID NO: 638697 - DNA, 15 bp, Homo sapiens
attagctaatccaac

SEQ ID NO: 638698 - DNA, 15 bp, Homo sapiens
ttagctaatccaacc

SEQ ID NO: 638699 - DNA, 15 bp, Homo sapiens
tagctaatccaacca

SEQ ID NO: 638700 - DNA, 15 bp, Homo sapiens
agctaatccaaccac

SEQ ID NO: 638701 - DNA, 15 bp, Homo sapiens
gctaatccaaccact

SEQ ID NO: 638702 - DNA, 15 bp, Homo sapiens
ctaatccaaccactt

SEQ ID NO: 638703 - DNA, 15 bp, Homo sapiens
taatccaaccacttc

SEQ ID NO: 638704 - DNA, 15 bp, Homo sapiens
aatccaaccacttca

SEQ ID NO: 638705 - DNA, 15 bp, Homo sapiens
atccaaccacttcaa

SEQ ID NO: 638706 - DNA, 15 bp, Homo sapiens
tccaaccacttcaac

SEQ ID NO: 638707 - DNA, 15 bp, Homo sapiens
ccaaccacttcaact

SEQ ID NO: 638708 - DNA, 15 bp, Homo sapiens
caaccacttcaactt

SEQ ID NO: 638709 - DNA, 15 bp, Homo sapiens
aaccacttcaactta

SEQ ID NO: 638710 - DNA, 15 bp, Homo sapiens
accacttcaacttac

SEQ ID NO: 638711 - DNA, 15 bp, Homo sapiens
ccacttcaacttacc

SEQ ID NO: 638712 - DNA, 15 bp, Homo sapiens
cacttcaacttaccc

SEQ ID NO: 638713 - DNA, 15 bp, Homo sapiens
acttcaacttaccca

SEQ ID NO: 638714 - DNA, 15 bp, Homo sapiens
cttcaacttacccat

SEQ ID NO: 638715 - DNA, 15 bp, Homo sapiens
ttcaacttacccatg

SEQ ID NO: 638716 - DNA, 15 bp, Homo sapiens
tcaacttacccatga

SEQ ID NO: 638717 - DNA, 15 bp, Homo sapiens
caacttacccatgag

SEQ ID NO: 638718 - DNA, 15 bp, Homo sapiens
aacttacccatgagg

SEQ ID NO: 638719 - DNA, 15 bp, Homo sapiens
acttacccatgagga

SEQ ID NO: 638720 - DNA, 15 bp, Homo sapiens
cttacccatgaggaa

SEQ ID NO: 638721 - DNA, 15 bp, Homo sapiens
ttacccatgaggaaa

SEQ ID NO: 638722 - DNA, 15 bp, Homo sapiens
tacccatgaggaaat

SEQ ID NO: 638723 - DNA, 15 bp, Homo sapiens
acccatgaggaaatg

SEQ ID NO: 638724 - DNA, 15 bp, Homo sapiens
cccatgaggaaatgc

SEQ ID NO: 638725 - DNA, 15 bp, Homo sapiens
ccatgaggaaatgca

SEQ ID NO: 638726 - DNA, 15 bp, Homo sapiens
catgaggaaatgcag

SEQ ID NO: 638727 - DNA, 15 bp, Homo sapiens
atgaggaaatgcagt

SEQ ID NO: 638728 - DNA, 15 bp, Homo sapiens
tgaggaaatgcagtc

SEQ ID NO: 638729 - DNA, 15 bp, Homo sapiens
gaggaaatgcagtca

SEQ ID NO: 638730 - DNA, 15 bp, Homo sapiens
aggaaatgcagtcac

SEQ ID NO: 638731 - DNA, 15 bp, Homo sapiens
ggaaatgcagtcaca

SEQ ID NO: 638732 - DNA, 15 bp, Homo sapiens
gaaatgcagtcacaa

SEQ ID NO: 638733 - DNA, 15 bp, Homo sapiens
aaatgcagtcacaaa

SEQ ID NO: 638734 - DNA, 15 bp, Homo sapiens
aatgcagtcacaaat

SEQ ID NO: 638735 - DNA, 15 bp, Homo sapiens
atgcagtcacaaata

SEQ ID NO: 638736 - DNA, 15 bp, Homo sapiens
tgcagtcacaaatag

SEQ ID NO: 638737 - DNA, 15 bp, Homo sapiens
gcagtcacaaataga

SEQ ID NO: 638738 - DNA, 15 bp, Homo sapiens
cagtcacaaatagat

SEQ ID NO: 638739 - DNA, 15 bp, Homo sapiens
agtcacaaatagatt

SEQ ID NO: 638740 - DNA, 15 bp, Homo sapiens
gtcacaaatagattg

SEQ ID NO: 638741 - DNA, 15 bp, Homo sapiens
tcacaaatagattga

SEQ ID NO: 638742 - DNA, 15 bp, Homo sapiens
cacaaatagattgag

SEQ ID NO: 638743 - DNA, 15 bp, Homo sapiens
acaaatagattgagg

SEQ ID NO: 638744 - DNA, 15 bp, Homo sapiens
caaatagattgaggg

SEQ ID NO: 638745 - DNA, 15 bp, Homo sapiens
aaatagattgagggt

SEQ ID NO: 638746 - DNA, 15 bp, Homo sapiens
aatagattgagggtc

SEQ ID NO: 638747 - DNA, 15 bp, Homo sapiens
atagattgagggtca

SEQ ID NO: 638748 - DNA, 15 bp, Homo sapiens
tagattgagggtcat

SEQ ID NO: 638749 - DNA, 15 bp, Homo sapiens
agattgagggtcatg

SEQ ID NO: 638750 - DNA, 15 bp, Homo sapiens
gattgagggtcatga

SEQ ID NO: 638751 - DNA, 15 bp, Homo sapiens
attgagggtcatgac

SEQ ID NO: 638752 - DNA, 15 bp, Homo sapiens
ttgagggtcatgact

SEQ ID NO: 638753 - DNA, 15 bp, Homo sapiens
tgagggtcatgactg

SEQ ID NO: 638754 - DNA, 15 bp, Homo sapiens
gagggtcatgactga

SEQ ID NO: 638755 - DNA, 15 bp, Homo sapiens
agggtcatgactgag

SEQ ID NO: 638756 - DNA, 15 bp, Homo sapiens
gggtcatgactgagg

SEQ ID NO: 638757 - DNA, 15 bp, Homo sapiens
ggtcatgactgaggg

SEQ ID NO: 638758 - DNA, 15 bp, Homo sapiens
gtcatgactgagggc

SEQ ID NO: 638759 - DNA, 15 bp, Homo sapiens
tcatgactgagggca

SEQ ID NO: 638760 - DNA, 15 bp, Homo sapiens
catgactgagggcaa

SEQ ID NO: 638761 - DNA, 15 bp, Homo sapiens
atgactgagggcaaa

SEQ ID NO: 638762 - DNA, 15 bp, Homo sapiens
tgactgagggcaaag

SEQ ID NO: 638763 - DNA, 15 bp, Homo sapiens
gactgagggcaaaga

SEQ ID NO: 638764 - DNA, 15 bp, Homo sapiens
actgagggcaaagag

SEQ ID NO: 638765 - DNA, 15 bp, Homo sapiens
ctgagggcaaagagt

SEQ ID NO: 638766 - DNA, 15 bp, Homo sapiens
tgagggcaaagagtt

SEQ ID NO: 638767 - DNA, 15 bp, Homo sapiens
gagggcaaagagtta

SEQ ID NO: 638768 - DNA, 15 bp, Homo sapiens
agggcaaagagttat

SEQ ID NO: 638769 - DNA, 15 bp, Homo sapiens
gggcaaagagttatt

SEQ ID NO: 638770 - DNA, 15 bp, Homo sapiens
ggcaaagagttattt

SEQ ID NO: 638771 - DNA, 15 bp, Homo sapiens
gcaaagagttatttg

SEQ ID NO: 638772 - DNA, 15 bp, Homo sapiens
caaagagttatttgt

SEQ ID NO: 638773 - DNA, 15 bp, Homo sapiens
aaagagttatttgtt

SEQ ID NO: 638774 - DNA, 15 bp, Homo sapiens
aagagttatttgttg

SEQ ID NO: 638775 - DNA, 15 bp, Homo sapiens
agagttatttgttgg

SEQ ID NO: 638776 - DNA, 15 bp, Homo sapiens
gagttatttgttggt

SEQ ID NO: 638777 - DNA, 15 bp, Homo sapiens
agttatttgttggta

SEQ ID NO: 638778 - DNA, 15 bp, Homo sapiens
gttatttgttggtat

SEQ ID NO: 638779 - DNA, 15 bp, Homo sapiens
ttatttgttggtata

SEQ ID NO: 638780 - DNA, 15 bp, Homo sapiens
tatttgttggtataa

SEQ ID NO: 638781 - DNA, 15 bp, Homo sapiens
atttgttggtataac

SEQ ID NO: 638782 - DNA, 15 bp, Homo sapiens
tttgttggtataact

SEQ ID NO: 638783 - DNA, 15 bp, Homo sapiens
ttgttggtataactg

SEQ ID NO: 638784 - DNA, 15 bp, Homo sapiens
tgttggtataactgg

SEQ ID NO: 638785 - DNA, 15 bp, Homo sapiens
gttggtataactggg

SEQ ID NO: 638786 - DNA, 15 bp, Homo sapiens
ttggtataactggga

SEQ ID NO: 638787 - DNA, 15 bp, Homo sapiens
tggtataactgggag

SEQ ID NO: 638788 - DNA, 15 bp, Homo sapiens
ggtataactgggagt

SEQ ID NO: 638789 - DNA, 15 bp, Homo sapiens
gtataactgggagta

SEQ ID NO: 638790 - DNA, 15 bp, Homo sapiens
tataactgggagtat

SEQ ID NO: 638791 - DNA, 15 bp, Homo sapiens
ataactgggagtata

SEQ ID NO: 638792 - DNA, 15 bp, Homo sapiens
taactgggagtatag

SEQ ID NO: 638793 - DNA, 15 bp, Homo sapiens
aactgggagtataga

SEQ ID NO: 638794 - DNA, 15 bp, Homo sapiens
actgggagtatagag

SEQ ID NO: 638795 - DNA, 15 bp, Homo sapiens
ctgggagtatagagg

SEQ ID NO: 638796 - DNA, 15 bp, Homo sapiens
tgggagtatagagga

SEQ ID NO: 638797 - DNA, 15 bp, Homo sapiens
gggagtatagaggac

SEQ ID NO: 638798 - DNA, 15 bp, Homo sapiens
ggagtatagaggact

SEQ ID NO: 638799 - DNA, 15 bp, Homo sapiens
gagtatagaggactt

SEQ ID NO: 638800 - DNA, 15 bp, Homo sapiens
agtatagaggacttt

SEQ ID NO: 638801 - DNA, 15 bp, Homo sapiens
gtatagaggactttt

SEQ ID NO: 638802 - DNA, 15 bp, Homo sapiens
tatagaggacttttt

SEQ ID NO: 638803 - DNA, 15 bp, Homo sapiens
atagaggacttttta

SEQ ID NO: 638804 - DNA, 15 bp, Homo sapiens
tagaggactttttac

SEQ ID NO: 638805 - DNA, 15 bp, Homo sapiens
agaggactttttact

SEQ ID NO: 638806 - DNA, 15 bp, Homo sapiens
gaggactttttactt

SEQ ID NO: 638807 - DNA, 15 bp, Homo sapiens
aggactttttacttt

SEQ ID NO: 638808 - DNA, 15 bp, Homo sapiens
ggactttttactttc

SEQ ID NO: 638809 - DNA, 15 bp, Homo sapiens
gactttttactttct

SEQ ID NO: 638810 - DNA, 15 bp, Homo sapiens
actttttactttctc

SEQ ID NO: 638811 - DNA, 15 bp, Homo sapiens
ctttttactttctct

SEQ ID NO: 638812 - DNA, 15 bp, Homo sapiens
tttttactttctctc

SEQ ID NO: 638813 - DNA, 15 bp, Homo sapiens
ttttactttctctcc

SEQ ID NO: 638814 - DNA, 15 bp, Homo sapiens
tttactttctctcca

SEQ ID NO: 638815 - DNA, 15 bp, Homo sapiens
ttactttctctccat

SEQ ID NO: 638816 - DNA, 15 bp, Homo sapiens
tactttctctccata

SEQ ID NO: 638817 - DNA, 15 bp, Homo sapiens
actttctctccatac

SEQ ID NO: 638818 - DNA, 15 bp, Homo sapiens
ctttctctccatacc

SEQ ID NO: 638819 - DNA, 15 bp, Homo sapiens
tttctctccatacct

SEQ ID NO: 638820 - DNA, 15 bp, Homo sapiens
ttctctccatacctc

SEQ ID NO: 638821 - DNA, 15 bp, Homo sapiens
tctctccatacctct

SEQ ID NO: 638822 - DNA, 15 bp, Homo sapiens
ctctccatacctctc

SEQ ID NO: 638823 - DNA, 15 bp, Homo sapiens
tctccatacctctca

SEQ ID NO: 638824 - DNA, 15 bp, Homo sapiens
ctccatacctctcag

SEQ ID NO: 638825 - DNA, 15 bp, Homo sapiens
tccatacctctcagg

SEQ ID NO: 638826 - DNA, 15 bp, Homo sapiens
ccatacctctcaggt

SEQ ID NO: 638827 - DNA, 15 bp, Homo sapiens
catacctctcaggtg

SEQ ID NO: 638828 - DNA, 15 bp, Homo sapiens
atacctctcaggtgt

SEQ ID NO: 638829 - DNA, 15 bp, Homo sapiens
tacctctcaggtgtt

SEQ ID NO: 638830 - DNA, 15 bp, Homo sapiens
acctctcaggtgttc

SEQ ID NO: 638831 - DNA, 15 bp, Homo sapiens
cctctcaggtgttca

SEQ ID NO: 638832 - DNA, 15 bp, Homo sapiens
ctctcaggtgttcat

SEQ ID NO: 638833 - DNA, 15 bp, Homo sapiens
tctcaggtgttcatc

SEQ ID NO: 638834 - DNA, 15 bp, Homo sapiens
ctcaggtgttcatct

SEQ ID NO: 638835 - DNA, 15 bp, Homo sapiens
tcaggtgttcatctc

SEQ ID NO: 638836 - DNA, 15 bp, Homo sapiens
caggtgttcatctct

SEQ ID NO: 638837 - DNA, 15 bp, Homo sapiens
aggtgttcatctctg

SEQ ID NO: 638838 - DNA, 15 bp, Homo sapiens
ggtgttcatctctgt

SEQ ID NO: 638839 - DNA, 15 bp, Homo sapiens
gtgttcatctctgtg

SEQ ID NO: 638840 - DNA, 15 bp, Homo sapiens
tgttcatctctgtga

SEQ ID NO: 638841 - DNA, 15 bp, Homo sapiens
gttcatctctgtgaa

SEQ ID NO: 638842 - DNA, 15 bp, Homo sapiens
ttcatctctgtgaat

SEQ ID NO: 638843 - DNA, 15 bp, Homo sapiens
tcatctctgtgaatc

SEQ ID NO: 638844 - DNA, 15 bp, Homo sapiens
catctctgtgaatcg

SEQ ID NO: 638845 - DNA, 15 bp, Homo sapiens
atctctgtgaatcgc

SEQ ID NO: 638846 - DNA, 15 bp, Homo sapiens
tctctgtgaatcgct

SEQ ID NO: 638847 - DNA, 15 bp, Homo sapiens
ctctgtgaatcgcta

SEQ ID NO: 638848 - DNA, 15 bp, Homo sapiens
tctgtgaatcgctag

SEQ ID NO: 638849 - DNA, 15 bp, Homo sapiens
ctgtgaatcgctagt

SEQ ID NO: 638850 - DNA, 15 bp, Homo sapiens
tgtgaatcgctagtg

SEQ ID NO: 638851 - DNA, 15 bp, Homo sapiens
gtgaatcgctagtga

SEQ ID NO: 638852 - DNA, 15 bp, Homo sapiens
tgaatcgctagtgaa

SEQ ID NO: 638853 - DNA, 15 bp, Homo sapiens
gaatcgctagtgaac

SEQ ID NO: 638854 - DNA, 15 bp, Homo sapiens
aatcgctagtgaacc

SEQ ID NO: 638855 - DNA, 15 bp, Homo sapiens
atcgctagtgaacct

SEQ ID NO: 638856 - DNA, 15 bp, Homo sapiens
tcgctagtgaacctg

SEQ ID NO: 638857 - DNA, 15 bp, Homo sapiens
cgctagtgaacctga

SEQ ID NO: 638858 - DNA, 15 bp, Homo sapiens
gctagtgaacctgag

SEQ ID NO: 638859 - DNA, 15 bp, Homo sapiens
ctagtgaacctgaga

SEQ ID NO: 638860 - DNA, 15 bp, Homo sapiens
tagtgaacctgagat

SEQ ID NO: 638861 - DNA, 15 bp, Homo sapiens
agtgaacctgagatt

SEQ ID NO: 638862 - DNA, 15 bp, Homo sapiens
gtgaacctgagattg

SEQ ID NO: 638863 - DNA, 15 bp, Homo sapiens
tgaacctgagattga

SEQ ID NO: 638864 - DNA, 15 bp, Homo sapiens
gaacctgagattgag

SEQ ID NO: 638865 - DNA, 15 bp, Homo sapiens
aacctgagattgagc

SEQ ID NO: 638866 - DNA, 15 bp, Homo sapiens
acctgagattgagct

SEQ ID NO: 638867 - DNA, 15 bp, Homo sapiens
cctgagattgagcta

SEQ ID NO: 638868 - DNA, 15 bp, Homo sapiens
ctgagattgagctat

SEQ ID NO: 638869 - DNA, 15 bp, Homo sapiens
tgagattgagctata

SEQ ID NO: 638870 - DNA, 15 bp, Homo sapiens
gagattgagctatac

SEQ ID NO: 638871 - DNA, 15 bp, Homo sapiens
agattgagctatact

SEQ ID NO: 638872 - DNA, 15 bp, Homo sapiens
gattgagctatactg

SEQ ID NO: 638873 - DNA, 15 bp, Homo sapiens
attgagctatactga

SEQ ID NO: 638874 - DNA, 15 bp, Homo sapiens
ttgagctatactgaa

SEQ ID NO: 638875 - DNA, 15 bp, Homo sapiens
tgagctatactgaaa

SEQ ID NO: 638876 - DNA, 15 bp, Homo sapiens
gagctatactgaaat

SEQ ID NO: 638877 - DNA, 15 bp, Homo sapiens
agctatactgaaatc

SEQ ID NO: 638878 - DNA, 15 bp, Homo sapiens
gctatactgaaatct

SEQ ID NO: 638879 - DNA, 15 bp, Homo sapiens
ctatactgaaatctc

SEQ ID NO: 638880 - DNA, 15 bp, Homo sapiens
tatactgaaatctct

SEQ ID NO: 638881 - DNA, 15 bp, Homo sapiens
atactgaaatctcta

SEQ ID NO: 638882 - DNA, 15 bp, Homo sapiens
tactgaaatctctag

SEQ ID NO: 638883 - DNA, 15 bp, Homo sapiens
actgaaatctctaga

SEQ ID NO: 638884 - DNA, 15 bp, Homo sapiens
ctgaaatctctagaa

SEQ ID NO: 638885 - DNA, 15 bp, Homo sapiens
tgaaatctctagaag

SEQ ID NO: 638886 - DNA, 15 bp, Homo sapiens
gaaatctctagaaga

SEQ ID NO: 638887 - DNA, 15 bp, Homo sapiens
aaatctctagaagag

SEQ ID NO: 638888 - DNA, 15 bp, Homo sapiens
aatctctagaagagg

SEQ ID NO: 638889 - DNA, 15 bp, Homo sapiens
atctctagaagaggg

SEQ ID NO: 638890 - DNA, 15 bp, Homo sapiens
tctctagaagaggga

SEQ ID NO: 638891 - DNA, 15 bp, Homo sapiens
ctctagaagagggaa

SEQ ID NO: 638892 - DNA, 15 bp, Homo sapiens
tctagaagagggaaa

SEQ ID NO: 638893 - DNA, 15 bp, Homo sapiens
ctagaagagggaaat

SEQ ID NO: 638894 - DNA, 15 bp, Homo sapiens
tagaagagggaaatc

SEQ ID NO: 638895 - DNA, 15 bp, Homo sapiens
agaagagggaaatct

SEQ ID NO: 638896 - DNA, 15 bp, Homo sapiens
gaagagggaaatcta

SEQ ID NO: 638897 - DNA, 15 bp, Homo sapiens
aagagggaaatctag

SEQ ID NO: 638898 - DNA, 15 bp, Homo sapiens
agagggaaatctaga

SEQ ID NO: 638899 - DNA, 15 bp, Homo sapiens
gagggaaatctagaa

SEQ ID NO: 638900 - DNA, 15 bp, Homo sapiens
agggaaatctagaag

SEQ ID NO: 638901 - DNA, 15 bp, Homo sapiens
gggaaatctagaaga

SEQ ID NO: 638902 - DNA, 15 bp, Homo sapiens
ggaaatctagaagaa

SEQ ID NO: 638903 - DNA, 15 bp, Homo sapiens
gaaatctagaagaat

SEQ ID NO: 638904 - DNA, 15 bp, Homo sapiens
aaatctagaagaata

SEQ ID NO: 638905 - DNA, 15 bp, Homo sapiens
aatctagaagaataa

SEQ ID NO: 638906 - DNA, 15 bp, Homo sapiens
atctagaagaataaa

SEQ ID NO: 638907 - DNA, 15 bp, Homo sapiens
tctagaagaataaag

SEQ ID NO: 638908 - DNA, 15 bp, Homo sapiens
ctagaagaataaagc

SEQ ID NO: 638909 - DNA, 15 bp, Homo sapiens
tagaagaataaagct

SEQ ID NO: 638910 - DNA, 15 bp, Homo sapiens
agaagaataaagctt

SEQ ID NO: 638911 - DNA, 15 bp, Homo sapiens
gaagaataaagcttg

SEQ ID NO: 638912 - DNA, 15 bp, Homo sapiens
aagaataaagcttgt

SEQ ID NO: 638913 - DNA, 15 bp, Homo sapiens
agaataaagcttgtg

SEQ ID NO: 638914 - DNA, 15 bp, Homo sapiens
gaataaagcttgtgt

SEQ ID NO: 638915 - DNA, 15 bp, Homo sapiens
aataaagcttgtgtt

SEQ ID NO: 638916 - DNA, 15 bp, Homo sapiens
ataaagcttgtgttt

SEQ ID NO: 638917 - DNA, 15 bp, Homo sapiens
taaagcttgtgttta

SEQ ID NO: 638918 - DNA, 15 bp, Homo sapiens
aaagcttgtgtttaa

SEQ ID NO: 638919 - DNA, 15 bp, Homo sapiens
aagcttgtgtttaag

SEQ ID NO: 638920 - DNA, 15 bp, Homo sapiens
agcttgtgtttaaga

SEQ ID NO: 638921 - DNA, 15 bp, Homo sapiens
gcttgtgtttaagat

SEQ ID NO: 638922 - DNA, 15 bp, Homo sapiens
cttgtgtttaagata

SEQ ID NO: 638923 - DNA, 15 bp, Homo sapiens
ttgtgtttaagatac

SEQ ID NO: 638924 - DNA, 15 bp, Homo sapiens
tgtgtttaagatact

SEQ ID NO: 638925 - DNA, 15 bp, Homo sapiens
gtgtttaagatacta

SEQ ID NO: 638926 - DNA, 15 bp, Homo sapiens
tgtttaagatactag

SEQ ID NO: 638927 - DNA, 15 bp, Homo sapiens
gtttaagatactagg

SEQ ID NO: 638928 - DNA, 15 bp, Homo sapiens
tttaagatactaggt

SEQ ID NO: 638929 - DNA, 15 bp, Homo sapiens
ttaagatactaggtt

SEQ ID NO: 638930 - DNA, 15 bp, Homo sapiens
taagatactaggttt

SEQ ID NO: 638931 - DNA, 15 bp, Homo sapiens
aagatactaggtttg

SEQ ID NO: 638932 - DNA, 15 bp, Homo sapiens
agatactaggtttgg

SEQ ID NO: 638933 - DNA, 15 bp, Homo sapiens
gatactaggtttggc

SEQ ID NO: 638934 - DNA, 15 bp, Homo sapiens
atactaggtttggcc

SEQ ID NO: 638935 - DNA, 15 bp, Homo sapiens
tactaggtttggcca

SEQ ID NO: 638936 - DNA, 15 bp, Homo sapiens
actaggtttggccag

SEQ ID NO: 638937 - DNA, 15 bp, Homo sapiens
ctaggtttggccaga

SEQ ID NO: 638938 - DNA, 15 bp, Homo sapiens
taggtttggccagaa

SEQ ID NO: 638939 - DNA, 15 bp, Homo sapiens
aggtttggccagaat

SEQ ID NO: 638940 - DNA, 15 bp, Homo sapiens
ggtttggccagaatt

SEQ ID NO: 638941 - DNA, 15 bp, Homo sapiens
gtttggccagaattt

SEQ ID NO: 638942 - DNA, 15 bp, Homo sapiens
tttggccagaatttt

SEQ ID NO: 638943 - DNA, 15 bp, Homo sapiens
ttggccagaattttc

SEQ ID NO: 638944 - DNA, 15 bp, Homo sapiens
tggccagaattttcc

SEQ ID NO: 638945 - DNA, 15 bp, Homo sapiens
ggccagaattttcca

SEQ ID NO: 638946 - DNA, 15 bp, Homo sapiens
gccagaattttccag

SEQ ID NO: 638947 - DNA, 15 bp, Homo sapiens
ccagaattttccagc

SEQ ID NO: 638948 - DNA, 15 bp, Homo sapiens
cagaattttccagcc

SEQ ID NO: 638949 - DNA, 15 bp, Homo sapiens
agaattttccagcca

SEQ ID NO: 638950 - DNA, 15 bp, Homo sapiens
gaattttccagccag

SEQ ID NO: 638951 - DNA, 15 bp, Homo sapiens
aattttccagccagt

SEQ ID NO: 638952 - DNA, 15 bp, Homo sapiens
attttccagccagtg

SEQ ID NO: 638953 - DNA, 15 bp, Homo sapiens
ttttccagccagtgg

SEQ ID NO: 638954 - DNA, 15 bp, Homo sapiens
tttccagccagtggg

SEQ ID NO: 638955 - DNA, 15 bp, Homo sapiens
ttccagccagtgggg

SEQ ID NO: 638956 - DNA, 15 bp, Homo sapiens
tccagccagtgggga

SEQ ID NO: 638957 - DNA, 15 bp, Homo sapiens
ccagccagtggggat

SEQ ID NO: 638958 - DNA, 15 bp, Homo sapiens
cagccagtggggatt

SEQ ID NO: 638959 - DNA, 15 bp, Homo sapiens
agccagtggggattt

SEQ ID NO: 638960 - DNA, 15 bp, Homo sapiens
gccagtggggatttt

SEQ ID NO: 638961 - DNA, 15 bp, Homo sapiens
ccagtggggattttc

SEQ ID NO: 638962 - DNA, 15 bp, Homo sapiens
cagtggggattttct

SEQ ID NO: 638963 - DNA, 15 bp, Homo sapiens
agtggggattttctt

SEQ ID NO: 638964 - DNA, 15 bp, Homo sapiens
gtggggattttcttt

SEQ ID NO: 638965 - DNA, 15 bp, Homo sapiens
tggggattttctttc

SEQ ID NO: 638966 - DNA, 15 bp, Homo sapiens
ggggattttctttct

SEQ ID NO: 638967 - DNA, 15 bp, Homo sapiens
gggattttctttctt

SEQ ID NO: 638968 - DNA, 15 bp, Homo sapiens
ggattttctttctta

SEQ ID NO: 638969 - DNA, 15 bp, Homo sapiens
gattttctttcttac

SEQ ID NO: 638970 - DNA, 15 bp, Homo sapiens
attttctttcttact

SEQ ID NO: 638971 - DNA, 15 bp, Homo sapiens
ttttctttcttacta

SEQ ID NO: 638972 - DNA, 15 bp, Homo sapiens
tttctttcttactaa

SEQ ID NO: 638973 - DNA, 15 bp, Homo sapiens
ttctttcttactaaa

SEQ ID NO: 638974 - DNA, 15 bp, Homo sapiens
tctttcttactaaag

SEQ ID NO: 638975 - DNA, 15 bp, Homo sapiens
ctttcttactaaaga

SEQ ID NO: 638976 - DNA, 15 bp, Homo sapiens
tttcttactaaagaa

SEQ ID NO: 638977 - DNA, 15 bp, Homo sapiens
ttcttactaaagaat

SEQ ID NO: 638978 - DNA, 15 bp, Homo sapiens
tcttactaaagaata

SEQ ID NO: 638979 - DNA, 15 bp, Homo sapiens
cttactaaagaataa

SEQ ID NO: 638980 - DNA, 15 bp, Homo sapiens
ttactaaagaataac

SEQ ID NO: 638981 - DNA, 15 bp, Homo sapiens
tactaaagaataact

SEQ ID NO: 638982 - DNA, 15 bp, Homo sapiens
actaaagaataactc

SEQ ID NO: 638983 - DNA, 15 bp, Homo sapiens
ctaaagaataactca

SEQ ID NO: 638984 - DNA, 15 bp, Homo sapiens
taaagaataactcat

SEQ ID NO: 638985 - DNA, 15 bp, Homo sapiens
aaagaataactcata

SEQ ID NO: 638986 - DNA, 15 bp, Homo sapiens
aagaataactcataa

SEQ ID NO: 638987 - DNA, 15 bp, Homo sapiens
agaataactcataaa

SEQ ID NO: 638988 - DNA, 15 bp, Homo sapiens
gaataactcataaaa

SEQ ID NO: 638989 - DNA, 15 bp, Homo sapiens
aataactcataaaat

SEQ ID NO: 638990 - DNA, 15 bp, Homo sapiens
ataactcataaaatc

SEQ ID NO: 638991 - DNA, 15 bp, Homo sapiens
taactcataaaatca

SEQ ID NO: 638992 - DNA, 15 bp, Homo sapiens
aactcataaaatcac

SEQ ID NO: 638993 - DNA, 15 bp, Homo sapiens
actcataaaatcacc

SEQ ID NO: 638994 - DNA, 15 bp, Homo sapiens
ctcataaaatcacca

SEQ ID NO: 638995 - DNA, 15 bp, Homo sapiens
tcataaaatcaccac

SEQ ID NO: 638996 - DNA, 15 bp, Homo sapiens
cataaaatcaccacc

SEQ ID NO: 638997 - DNA, 15 bp, Homo sapiens
ataaaatcaccacct

SEQ ID NO: 638998 - DNA, 15 bp, Homo sapiens
taaaatcaccaccta

SEQ ID NO: 638999 - DNA, 15 bp, Homo sapiens
aaaatcaccacctag

SEQ ID NO: 639000 - DNA, 15 bp, Homo sapiens
aaatcaccacctagg

SEQ ID NO: 639001 - DNA, 15 bp, Homo sapiens
aatcaccacctaggg

SEQ ID NO: 639002 - DNA, 15 bp, Homo sapiens
atcaccacctaggga

SEQ ID NO: 639003 - DNA, 15 bp, Homo sapiens
tcaccacctagggag

SEQ ID NO: 639004 - DNA, 15 bp, Homo sapiens
caccacctagggaga

SEQ ID NO: 639005 - DNA, 15 bp, Homo sapiens
accacctagggagaa

SEQ ID NO: 639006 - DNA, 15 bp, Homo sapiens
ccacctagggagaat

SEQ ID NO: 639007 - DNA, 15 bp, Homo sapiens
cacctagggagaatt

SEQ ID NO: 639008 - DNA, 15 bp, Homo sapiens
acctagggagaattt

SEQ ID NO: 639009 - DNA, 15 bp, Homo sapiens
cctagggagaatttc

SEQ ID NO: 639010 - DNA, 15 bp, Homo sapiens
ctagggagaatttcc

SEQ ID NO: 639011 - DNA, 15 bp, Homo sapiens
tagggagaatttccc

SEQ ID NO: 639012 - DNA, 15 bp, Homo sapiens
agggagaatttccca

SEQ ID NO: 639013 - DNA, 15 bp, Homo sapiens
gggagaatttcccat

SEQ ID NO: 639014 - DNA, 15 bp, Homo sapiens
ggagaatttcccatt

SEQ ID NO: 639015 - DNA, 15 bp, Homo sapiens
gagaatttcccattg

SEQ ID NO: 639016 - DNA, 15 bp, Homo sapiens
agaatttcccattgt

SEQ ID NO: 639017 - DNA, 15 bp, Homo sapiens
gaatttcccattgta

SEQ ID NO: 639018 - DNA, 15 bp, Homo sapiens
aatttcccattgtat

SEQ ID NO: 639019 - DNA, 15 bp, Homo sapiens
atttcccattgtatt

SEQ ID NO: 639020 - DNA, 15 bp, Homo sapiens
tttcccattgtattg

SEQ ID NO: 639021 - DNA, 15 bp, Homo sapiens
ttcccattgtattgg

SEQ ID NO: 639022 - DNA, 15 bp, Homo sapiens
tcccattgtattgga

SEQ ID NO: 639023 - DNA, 15 bp, Homo sapiens
cccattgtattggaa

SEQ ID NO: 639024 - DNA, 15 bp, Homo sapiens
ccattgtattggaaa

SEQ ID NO: 639025 - DNA, 15 bp, Homo sapiens
cattgtattggaaag

SEQ ID NO: 639026 - DNA, 15 bp, Homo sapiens
attgtattggaaagg

SEQ ID NO: 639027 - DNA, 15 bp, Homo sapiens
ttgtattggaaaggg

SEQ ID NO: 639028 - DNA, 15 bp, Homo sapiens
tgtattggaaagggt

SEQ ID NO: 639029 - DNA, 15 bp, Homo sapiens
gtattggaaagggtg

SEQ ID NO: 639030 - DNA, 15 bp, Homo sapiens
tattggaaagggtgg

SEQ ID NO: 639031 - DNA, 15 bp, Homo sapiens
attggaaagggtggt

SEQ ID NO: 639032 - DNA, 15 bp, Homo sapiens
ttggaaagggtggtc

SEQ ID NO: 639033 - DNA, 15 bp, Homo sapiens
tggaaagggtggtct

SEQ ID NO: 639034 - DNA, 15 bp, Homo sapiens
ggaaagggtggtctt

SEQ ID NO: 639035 - DNA, 15 bp, Homo sapiens
gaaagggtggtcttt

SEQ ID NO: 639036 - DNA, 15 bp, Homo sapiens
aaagggtggtcttta

SEQ ID NO: 639037 - DNA, 15 bp, Homo sapiens
aagggtggtctttaa

SEQ ID NO: 639038 - DNA, 15 bp, Homo sapiens
agggtggtctttaaa

SEQ ID NO: 639039 - DNA, 15 bp, Homo sapiens
gggtggtctttaaat

SEQ ID NO: 639040 - DNA, 15 bp, Homo sapiens
ggtggtctttaaatc

SEQ ID NO: 639041 - DNA, 15 bp, Homo sapiens
gtggtctttaaatcc

SEQ ID NO: 639042 - DNA, 15 bp, Homo sapiens
tggtctttaaatcct

SEQ ID NO: 639043 - DNA, 15 bp, Homo sapiens
ggtctttaaatcctt

SEQ ID NO: 639044 - DNA, 15 bp, Homo sapiens
gtctttaaatcctta

SEQ ID NO: 639045 - DNA, 15 bp, Homo sapiens
tctttaaatccttat

SEQ ID NO: 639046 - DNA, 15 bp, Homo sapiens
ctttaaatccttatg

SEQ ID NO: 639047 - DNA, 15 bp, Homo sapiens
tttaaatccttatgt

SEQ ID NO: 639048 - DNA, 15 bp, Homo sapiens
ttaaatccttatgtt

SEQ ID NO: 639049 - DNA, 15 bp, Homo sapiens
taaatccttatgttt

SEQ ID NO: 639050 - DNA, 15 bp, Homo sapiens
aaatccttatgtttt

SEQ ID NO: 639051 - DNA, 15 bp, Homo sapiens
aatccttatgttttt

SEQ ID NO: 639052 - DNA, 15 bp, Homo sapiens
atccttatgtttttc

SEQ ID NO: 639053 - DNA, 15 bp, Homo sapiens
tccttatgtttttct

SEQ ID NO: 639054 - DNA, 15 bp, Homo sapiens
ccttatgtttttctc

SEQ ID NO: 639055 - DNA, 15 bp, Homo sapiens
cttatgtttttctca

SEQ ID NO: 639056 - DNA, 15 bp, Homo sapiens
ttatgtttttctcat

SEQ ID NO: 639057 - DNA, 15 bp, Homo sapiens
tatgtttttctcatc

SEQ ID NO: 639058 - DNA, 15 bp, Homo sapiens
atgtttttctcatca

SEQ ID NO: 639059 - DNA, 15 bp, Homo sapiens
tgtttttctcatcag

SEQ ID NO: 639060 - DNA, 15 bp, Homo sapiens
gtttttctcatcagg

SEQ ID NO: 639061 - DNA, 15 bp, Homo sapiens
tttttctcatcaggt

SEQ ID NO: 639062 - DNA, 15 bp, Homo sapiens
ttttctcatcaggtt

SEQ ID NO: 639063 - DNA, 15 bp, Homo sapiens
tttctcatcaggtta

SEQ ID NO: 639064 - DNA, 15 bp, Homo sapiens
ttctcatcaggttac

SEQ ID NO: 639065 - DNA, 15 bp, Homo sapiens
tctcatcaggttaca

SEQ ID NO: 639066 - DNA, 15 bp, Homo sapiens
ctcatcaggttacaa

SEQ ID NO: 639067 - DNA, 15 bp, Homo sapiens
tcatcaggttacaag

SEQ ID NO: 639068 - DNA, 15 bp, Homo sapiens
catcaggttacaaga

SEQ ID NO: 639069 - DNA, 15 bp, Homo sapiens
atcaggttacaagat

SEQ ID NO: 639070 - DNA, 15 bp, Homo sapiens
tcaggttacaagatg

SEQ ID NO: 639071 - DNA, 15 bp, Homo sapiens
caggttacaagatga

SEQ ID NO: 639072 - DNA, 15 bp, Homo sapiens
aggttacaagatgag

SEQ ID NO: 639073 - DNA, 15 bp, Homo sapiens
ggttacaagatgaga

SEQ ID NO: 639074 - DNA, 15 bp, Homo sapiens
gttacaagatgagaa

SEQ ID NO: 639075 - DNA, 15 bp, Homo sapiens
ttacaagatgagaag

SEQ ID NO: 639076 - DNA, 15 bp, Homo sapiens
tacaagatgagaaga

SEQ ID NO: 639077 - DNA, 15 bp, Homo sapiens
acaagatgagaagaa

SEQ ID NO: 639078 - DNA, 15 bp, Homo sapiens
caagatgagaagaaa

SEQ ID NO: 639079 - DNA, 15 bp, Homo sapiens
aagatgagaagaaag

SEQ ID NO: 639080 - DNA, 15 bp, Homo sapiens
agatgagaagaaagg

SEQ ID NO: 639081 - DNA, 15 bp, Homo sapiens
gatgagaagaaaggt

SEQ ID NO: 639082 - DNA, 15 bp, Homo sapiens
atgagaagaaaggtg

SEQ ID NO: 639083 - DNA, 15 bp, Homo sapiens
tgagaagaaaggtga

SEQ ID NO: 639084 - DNA, 15 bp, Homo sapiens
gagaagaaaggtgat

SEQ ID NO: 639085 - DNA, 15 bp, Homo sapiens
agaagaaaggtgatg

SEQ ID NO: 639086 - DNA, 15 bp, Homo sapiens
gaagaaaggtgatgg

SEQ ID NO: 639087 - DNA, 15 bp, Homo sapiens
aagaaaggtgatggc

SEQ ID NO: 639088 - DNA, 15 bp, Homo sapiens
agaaaggtgatggcg

SEQ ID NO: 639089 - DNA, 15 bp, Homo sapiens
gaaaggtgatggcgt

SEQ ID NO: 639090 - DNA, 15 bp, Homo sapiens
aaaggtgatggcgtt

SEQ ID NO: 639091 - DNA, 15 bp, Homo sapiens
aaggtgatggcgtta

SEQ ID NO: 639092 - DNA, 15 bp, Homo sapiens
aggtgatggcgttag

SEQ ID NO: 639093 - DNA, 15 bp, Homo sapiens
ggtgatggcgttaga

SEQ ID NO: 639094 - DNA, 15 bp, Homo sapiens
gtgatggcgttagag

SEQ ID NO: 639095 - DNA, 15 bp, Homo sapiens
tgatggcgttagagt

SEQ ID NO: 639096 - DNA, 15 bp, Homo sapiens
gatggcgttagagtt

SEQ ID NO: 639097 - DNA, 15 bp, Homo sapiens
atggcgttagagttg

SEQ ID NO: 639098 - DNA, 15 bp, Homo sapiens
tggcgttagagttgg

SEQ ID NO: 639099 - DNA, 15 bp, Homo sapiens
ggcgttagagttggc

SEQ ID NO: 639100 - DNA, 15 bp, Homo sapiens
gcgttagagttggct

SEQ ID NO: 639101 - DNA, 15 bp, Homo sapiens
cgttagagttggctt

SEQ ID NO: 639102 - DNA, 15 bp, Homo sapiens
gttagagttggcttc

SEQ ID NO: 639103 - DNA, 15 bp, Homo sapiens
ttagagttggcttct

SEQ ID NO: 639104 - DNA, 15 bp, Homo sapiens
tagagttggcttctt

SEQ ID NO: 639105 - DNA, 15 bp, Homo sapiens
agagttggcttcttt

SEQ ID NO: 639106 - DNA, 15 bp, Homo sapiens
gagttggcttctttc

SEQ ID NO: 639107 - DNA, 15 bp, Homo sapiens
agttggcttctttca

SEQ ID NO: 639108 - DNA, 15 bp, Homo sapiens
gttggcttctttcaa

SEQ ID NO: 639109 - DNA, 15 bp, Homo sapiens
ttggcttctttcaat

SEQ ID NO: 639110 - DNA, 15 bp, Homo sapiens
tggcttctttcaatt

SEQ ID NO: 639111 - DNA, 15 bp, Homo sapiens
ggcttctttcaattg

SEQ ID NO: 639112 - DNA, 15 bp, Homo sapiens
gcttctttcaattgg

SEQ ID NO: 639113 - DNA, 15 bp, Homo sapiens
cttctttcaattggt

SEQ ID NO: 639114 - DNA, 15 bp, Homo sapiens
ttctttcaattggta

SEQ ID NO: 639115 - DNA, 15 bp, Homo sapiens
tctttcaattggtaa

SEQ ID NO: 639116 - DNA, 15 bp, Homo sapiens
ctttcaattggtaat

SEQ ID NO: 639117 - DNA, 15 bp, Homo sapiens
tttcaattggtaata

SEQ ID NO: 639118 - DNA, 15 bp, Homo sapiens
ttcaattggtaataa

SEQ ID NO: 639119 - DNA, 15 bp, Homo sapiens
tcaattggtaataaa

SEQ ID NO: 639120 - DNA, 15 bp, Homo sapiens
caattggtaataaaa

SEQ ID NO: 639121 - DNA, 15 bp, Homo sapiens
aattggtaataaaac

SEQ ID NO: 639122 - DNA, 15 bp, Homo sapiens
attggtaataaaact

SEQ ID NO: 639123 - DNA, 15 bp, Homo sapiens
ttggtaataaaactg

SEQ ID NO: 639124 - DNA, 15 bp, Homo sapiens
tggtaataaaactgt

SEQ ID NO: 639125 - DNA, 15 bp, Homo sapiens
ggtaataaaactgtg

SEQ ID NO: 639126 - DNA, 15 bp, Homo sapiens
gtaataaaactgtgt

SEQ ID NO: 639127 - DNA, 15 bp, Homo sapiens
taataaaactgtgtt

SEQ ID NO: 639128 - DNA, 15 bp, Homo sapiens
aataaaactgtgttg

SEQ ID NO: 639129 - DNA, 15 bp, Homo sapiens
ataaaactgtgttga

SEQ ID NO: 639130 - DNA, 15 bp, Homo sapiens
taaaactgtgttgat

SEQ ID NO: 639131 - DNA, 15 bp, Homo sapiens
aaaactgtgttgatt

SEQ ID NO: 639132 - DNA, 15 bp, Homo sapiens
aaactgtgttgattt

SEQ ID NO: 639133 - DNA, 15 bp, Homo sapiens
aactgtgttgattta

SEQ ID NO: 639134 - DNA, 15 bp, Homo sapiens
actgtgttgatttat

SEQ ID NO: 639135 - DNA, 15 bp, Homo sapiens
ctgtgttgatttatg

SEQ ID NO: 639136 - DNA, 15 bp, Homo sapiens
tgtgttgatttatgg

SEQ ID NO: 639137 - DNA, 15 bp, Homo sapiens
gtgttgatttatggc

SEQ ID NO: 639138 - DNA, 15 bp, Homo sapiens
tgttgatttatggca

SEQ ID NO: 639139 - DNA, 15 bp, Homo sapiens
gttgatttatggcag

SEQ ID NO: 639140 - DNA, 15 bp, Homo sapiens
ttgatttatggcagt

SEQ ID NO: 639141 - DNA, 15 bp, Homo sapiens
tgatttatggcagtg

SEQ ID NO: 639142 - DNA, 15 bp, Homo sapiens
gatttatggcagtgg

SEQ ID NO: 639143 - DNA, 15 bp, Homo sapiens
atttatggcagtggg

SEQ ID NO: 639144 - DNA, 15 bp, Homo sapiens
tttatggcagtgggt

SEQ ID NO: 639145 - DNA, 15 bp, Homo sapiens
ttatggcagtgggtg

SEQ ID NO: 639146 - DNA, 15 bp, Homo sapiens
tatggcagtgggtgt

SEQ ID NO: 639147 - DNA, 15 bp, Homo sapiens
atggcagtgggtgtg

SEQ ID NO: 639148 - DNA, 15 bp, Homo sapiens
tggcagtgggtgtgc

SEQ ID NO: 639149 - DNA, 15 bp, Homo sapiens
ggcagtgggtgtgca

SEQ ID NO: 639150 - DNA, 15 bp, Homo sapiens
gcagtgggtgtgcag

SEQ ID NO: 639151 - DNA, 15 bp, Homo sapiens
cagtgggtgtgcagc

SEQ ID NO: 639152 - DNA, 15 bp, Homo sapiens
agtgggtgtgcagct

SEQ ID NO: 639153 - DNA, 15 bp, Homo sapiens
gtgggtgtgcagcta

SEQ ID NO: 639154 - DNA, 15 bp, Homo sapiens
tgggtgtgcagctat

SEQ ID NO: 639155 - DNA, 15 bp, Homo sapiens
gggtgtgcagctata

SEQ ID NO: 639156 - DNA, 15 bp, Homo sapiens
ggtgtgcagctataa

SEQ ID NO: 639157 - DNA, 15 bp, Homo sapiens
gtgtgcagctataaa

SEQ ID NO: 639158 - DNA, 15 bp, Homo sapiens
tgtgcagctataaat

SEQ ID NO: 639159 - DNA, 15 bp, Homo sapiens
gtgcagctataaatt

SEQ ID NO: 639160 - DNA, 15 bp, Homo sapiens
tgcagctataaattg

SEQ ID NO: 639161 - DNA, 15 bp, Homo sapiens
gcagctataaattgt

SEQ ID NO: 639162 - DNA, 15 bp, Homo sapiens
cagctataaattgtt

SEQ ID NO: 639163 - DNA, 15 bp, Homo sapiens
agctataaattgttt

SEQ ID NO: 639164 - DNA, 15 bp, Homo sapiens
gctataaattgttta

SEQ ID NO: 639165 - DNA, 15 bp, Homo sapiens
ctataaattgtttag

SEQ ID NO: 639166 - DNA, 15 bp, Homo sapiens
tataaattgtttaga

SEQ ID NO: 639167 - DNA, 15 bp, Homo sapiens
ataaattgtttagat

SEQ ID NO: 639168 - DNA, 15 bp, Homo sapiens
taaattgtttagatc

SEQ ID NO: 639169 - DNA, 15 bp, Homo sapiens
aaattgtttagatca

SEQ ID NO: 639170 - DNA, 15 bp, Homo sapiens
aattgtttagatcat

SEQ ID NO: 639171 - DNA, 15 bp, Homo sapiens
attgtttagatcatg

SEQ ID NO: 639172 - DNA, 15 bp, Homo sapiens
ttgtttagatcatga

SEQ ID NO: 639173 - DNA, 15 bp, Homo sapiens
tgtttagatcatgag

SEQ ID NO: 639174 - DNA, 15 bp, Homo sapiens
gtttagatcatgagg

SEQ ID NO: 639175 - DNA, 15 bp, Homo sapiens
tttagatcatgaggg

SEQ ID NO: 639176 - DNA, 15 bp, Homo sapiens
ttagatcatgagggg

SEQ ID NO: 639177 - DNA, 15 bp, Homo sapiens
tagatcatgagggga

SEQ ID NO: 639178 - DNA, 15 bp, Homo sapiens
agatcatgaggggag

SEQ ID NO: 639179 - DNA, 15 bp, Homo sapiens
gatcatgaggggagt

SEQ ID NO: 639180 - DNA, 15 bp, Homo sapiens
atcatgaggggagtg

SEQ ID NO: 639181 - DNA, 15 bp, Homo sapiens
tcatgaggggagtgt

SEQ ID NO: 639182 - DNA, 15 bp, Homo sapiens
catgaggggagtgtt

SEQ ID NO: 639183 - DNA, 15 bp, Homo sapiens
atgaggggagtgtta

SEQ ID NO: 639184 - DNA, 15 bp, Homo sapiens
tgaggggagtgttaa

SEQ ID NO: 639185 - DNA, 15 bp, Homo sapiens
gaggggagtgttaaa

SEQ ID NO: 639186 - DNA, 15 bp, Homo sapiens
aggggagtgttaaat

SEQ ID NO: 639187 - DNA, 15 bp, Homo sapiens
ggggagtgttaaatc

SEQ ID NO: 639188 - DNA, 15 bp, Homo sapiens
gggagtgttaaatct

SEQ ID NO: 639189 - DNA, 15 bp, Homo sapiens
ggagtgttaaatctt

SEQ ID NO: 639190 - DNA, 15 bp, Homo sapiens
gagtgttaaatcttt

SEQ ID NO: 639191 - DNA, 15 bp, Homo sapiens
agtgttaaatcttta

SEQ ID NO: 639192 - DNA, 15 bp, Homo sapiens
gtgttaaatctttag

SEQ ID NO: 639193 - DNA, 15 bp, Homo sapiens
tgttaaatctttagt

SEQ ID NO: 639194 - DNA, 15 bp, Homo sapiens
gttaaatctttagtc

SEQ ID NO: 639195 - DNA, 15 bp, Homo sapiens
ttaaatctttagtca

SEQ ID NO: 639196 - DNA, 15 bp, Homo sapiens
taaatctttagtcat

SEQ ID NO: 639197 - DNA, 15 bp, Homo sapiens
aaatctttagtcata

SEQ ID NO: 639198 - DNA, 15 bp, Homo sapiens
aatctttagtcatat

SEQ ID NO: 639199 - DNA, 15 bp, Homo sapiens
atctttagtcatatt

SEQ ID NO: 639200 - DNA, 15 bp, Homo sapiens
tctttagtcatattg

SEQ ID NO: 639201 - DNA, 15 bp, Homo sapiens
ctttagtcatattgg

SEQ ID NO: 639202 - DNA, 15 bp, Homo sapiens
tttagtcatattggc

SEQ ID NO: 639203 - DNA, 15 bp, Homo sapiens
ttagtcatattggca

SEQ ID NO: 639204 - DNA, 15 bp, Homo sapiens
tagtcatattggcag

SEQ ID NO: 639205 - DNA, 15 bp, Homo sapiens
agtcatattggcagg

SEQ ID NO: 639206 - DNA, 15 bp, Homo sapiens
gtcatattggcaggt

SEQ ID NO: 639207 - DNA, 15 bp, Homo sapiens
tcatattggcaggtt

SEQ ID NO: 639208 - DNA, 15 bp, Homo sapiens
catattggcaggttt

SEQ ID NO: 639209 - DNA, 15 bp, Homo sapiens
atattggcaggtttt

SEQ ID NO: 639210 - DNA, 15 bp, Homo sapiens
tattggcaggttttt

SEQ ID NO: 639211 - DNA, 15 bp, Homo sapiens
attggcaggttttta

SEQ ID NO: 639212 - DNA, 15 bp, Homo sapiens
ttggcaggtttttaa

SEQ ID NO: 639213 - DNA, 15 bp, Homo sapiens
tggcaggtttttaac

SEQ ID NO: 639214 - DNA, 15 bp, Homo sapiens
ggcaggtttttaact

SEQ ID NO: 639215 - DNA, 15 bp, Homo sapiens
gcaggtttttaactt

SEQ ID NO: 639216 - DNA, 15 bp, Homo sapiens
caggtttttaacttc

SEQ ID NO: 639217 - DNA, 15 bp, Homo sapiens
aggtttttaacttca

SEQ ID NO: 639218 - DNA, 15 bp, Homo sapiens
ggtttttaacttcag

SEQ ID NO: 639219 - DNA, 15 bp, Homo sapiens
gtttttaacttcagt

SEQ ID NO: 639220 - DNA, 15 bp, Homo sapiens
tttttaacttcagtg

SEQ ID NO: 639221 - DNA, 15 bp, Homo sapiens
ttttaacttcagtga

SEQ ID NO: 639222 - DNA, 15 bp, Homo sapiens
tttaacttcagtgat

SEQ ID NO: 639223 - DNA, 15 bp, Homo sapiens
ttaacttcagtgatc

SEQ ID NO: 639224 - DNA, 15 bp, Homo sapiens
taacttcagtgatca

SEQ ID NO: 639225 - DNA, 15 bp, Homo sapiens
aacttcagtgatcac

SEQ ID NO: 639226 - DNA, 15 bp, Homo sapiens
acttcagtgatcact

SEQ ID NO: 639227 - DNA, 15 bp, Homo sapiens
cttcagtgatcactt

SEQ ID NO: 639228 - DNA, 15 bp, Homo sapiens
ttcagtgatcacttt

SEQ ID NO: 639229 - DNA, 15 bp, Homo sapiens
tcagtgatcactttt

SEQ ID NO: 639230 - DNA, 15 bp, Homo sapiens
cagtgatcacttttt

SEQ ID NO: 639231 - DNA, 15 bp, Homo sapiens
agtgatcactttttc

SEQ ID NO: 639232 - DNA, 15 bp, Homo sapiens
gtgatcactttttca

SEQ ID NO: 639233 - DNA, 15 bp, Homo sapiens
tgatcactttttcag

SEQ ID NO: 639234 - DNA, 15 bp, Homo sapiens
gatcactttttcagt

SEQ ID NO: 639235 - DNA, 15 bp, Homo sapiens
atcactttttcagtc

SEQ ID NO: 639236 - DNA, 15 bp, Homo sapiens
tcactttttcagtca

SEQ ID NO: 639237 - DNA, 15 bp, Homo sapiens
cactttttcagtcat

SEQ ID NO: 639238 - DNA, 15 bp, Homo sapiens
actttttcagtcata

SEQ ID NO: 639239 - DNA, 15 bp, Homo sapiens
ctttttcagtcatag

SEQ ID NO: 639240 - DNA, 15 bp, Homo sapiens
tttttcagtcatagg

SEQ ID NO: 639241 - DNA, 15 bp, Homo sapiens
ttttcagtcataggc

SEQ ID NO: 639242 - DNA, 15 bp, Homo sapiens
tttcagtcataggct

SEQ ID NO: 639243 - DNA, 15 bp, Homo sapiens
ttcagtcataggctt

SEQ ID NO: 639244 - DNA, 15 bp, Homo sapiens
tcagtcataggcttt

SEQ ID NO: 639245 - DNA, 15 bp, Homo sapiens
cagtcataggctttg

SEQ ID NO: 639246 - DNA, 15 bp, Homo sapiens
agtcataggctttgc

SEQ ID NO: 639247 - DNA, 15 bp, Homo sapiens
gtcataggctttgcc

SEQ ID NO: 639248 - DNA, 15 bp, Homo sapiens
tcataggctttgcct

SEQ ID NO: 639249 - DNA, 15 bp, Homo sapiens
cataggctttgccta

SEQ ID NO: 639250 - DNA, 15 bp, Homo sapiens
ataggctttgcctat

SEQ ID NO: 639251 - DNA, 15 bp, Homo sapiens
taggctttgcctatg

SEQ ID NO: 639252 - DNA, 15 bp, Homo sapiens
aggctttgcctatgt

SEQ ID NO: 639253 - DNA, 15 bp, Homo sapiens
ggctttgcctatgtg

SEQ ID NO: 639254 - DNA, 15 bp, Homo sapiens
gctttgcctatgtga

SEQ ID NO: 639255 - DNA, 15 bp, Homo sapiens
ctttgcctatgtgat

SEQ ID NO: 639256 - DNA, 15 bp, Homo sapiens
tttgcctatgtgata

SEQ ID NO: 639257 - DNA, 15 bp, Homo sapiens
ttgcctatgtgataa

SEQ ID NO: 639258 - DNA, 15 bp, Homo sapiens
tgcctatgtgataac

SEQ ID NO: 639259 - DNA, 15 bp, Homo sapiens
gcctatgtgataaca

SEQ ID NO: 639260 - DNA, 15 bp, Homo sapiens
cctatgtgataacat

SEQ ID NO: 639261 - DNA, 15 bp, Homo sapiens
ctatgtgataacatg

SEQ ID NO: 639262 - DNA, 15 bp, Homo sapiens
tatgtgataacatgc

SEQ ID NO: 639263 - DNA, 15 bp, Homo sapiens
atgtgataacatgct

SEQ ID NO: 639264 - DNA, 15 bp, Homo sapiens
tgtgataacatgctg

SEQ ID NO: 639265 - DNA, 15 bp, Homo sapiens
gtgataacatgctga

SEQ ID NO: 639266 - DNA, 15 bp, Homo sapiens
tgataacatgctgaa

SEQ ID NO: 639267 - DNA, 15 bp, Homo sapiens
gataacatgctgaat

SEQ ID NO: 639268 - DNA, 15 bp, Homo sapiens
ataacatgctgaata

SEQ ID NO: 639269 - DNA, 15 bp, Homo sapiens
taacatgctgaataa

SEQ ID NO: 639270 - DNA, 15 bp, Homo sapiens
aacatgctgaataac

SEQ ID NO: 639271 - DNA, 15 bp, Homo sapiens
acatgctgaataact

SEQ ID NO: 639272 - DNA, 15 bp, Homo sapiens
catgctgaataacta

SEQ ID NO: 639273 - DNA, 15 bp, Homo sapiens
atgctgaataactat

SEQ ID NO: 639274 - DNA, 15 bp, Homo sapiens
tgctgaataactatt

SEQ ID NO: 639275 - DNA, 15 bp, Homo sapiens
gctgaataactatta

SEQ ID NO: 639276 - DNA, 15 bp, Homo sapiens
ctgaataactattag

SEQ ID NO: 639277 - DNA, 15 bp, Homo sapiens
tgaataactattaga

SEQ ID NO: 639278 - DNA, 15 bp, Homo sapiens
gaataactattagaa

SEQ ID NO: 639279 - DNA, 15 bp, Homo sapiens
aataactattagaaa

SEQ ID NO: 639280 - DNA, 15 bp, Homo sapiens
ataactattagaaat

SEQ ID NO: 639281 - DNA, 15 bp, Homo sapiens
taactattagaaata

SEQ ID NO: 639282 - DNA, 15 bp, Homo sapiens
aactattagaaatat

SEQ ID NO: 639283 - DNA, 15 bp, Homo sapiens
actattagaaatata

SEQ ID NO: 639284 - DNA, 15 bp, Homo sapiens
ctattagaaatatat

SEQ ID NO: 639285 - DNA, 15 bp, Homo sapiens
tattagaaatatatt

SEQ ID NO: 639286 - DNA, 15 bp, Homo sapiens
attagaaatatattg

SEQ ID NO: 639287 - DNA, 15 bp, Homo sapiens
ttagaaatatattgc

SEQ ID NO: 639288 - DNA, 15 bp, Homo sapiens
tagaaatatattgct

SEQ ID NO: 639289 - DNA, 15 bp, Homo sapiens
agaaatatattgctc

SEQ ID NO: 639290 - DNA, 15 bp, Homo sapiens
gaaatatattgctca

SEQ ID NO: 639291 - DNA, 15 bp, Homo sapiens
aaatatattgctcat

SEQ ID NO: 639292 - DNA, 15 bp, Homo sapiens
aatatattgctcata

SEQ ID NO: 639293 - DNA, 15 bp, Homo sapiens
atatattgctcataa

SEQ ID NO: 639294 - DNA, 15 bp, Homo sapiens
tatattgctcataaa

SEQ ID NO: 639295 - DNA, 15 bp, Homo sapiens
atattgctcataaag

SEQ ID NO: 639296 - DNA, 15 bp, Homo sapiens
tattgctcataaagc

SEQ ID NO: 639297 - DNA, 15 bp, Homo sapiens
attgctcataaagca

SEQ ID NO: 639298 - DNA, 15 bp, Homo sapiens
ttgctcataaagcat

SEQ ID NO: 639299 - DNA, 15 bp, Homo sapiens
tgctcataaagcata

SEQ ID NO: 639300 - DNA, 15 bp, Homo sapiens
gctcataaagcatac

SEQ ID NO: 639301 - DNA, 15 bp, Homo sapiens
ctcataaagcataca

SEQ ID NO: 639302 - DNA, 15 bp, Homo sapiens
tcataaagcatacaa

SEQ ID NO: 639303 - DNA, 15 bp, Homo sapiens
cataaagcatacaaa

SEQ ID NO: 639304 - DNA, 15 bp, Homo sapiens
ataaagcatacaaat

SEQ ID NO: 639305 - DNA, 15 bp, Homo sapiens
taaagcatacaaatc

SEQ ID NO: 639306 - DNA, 15 bp, Homo sapiens
aaagcatacaaatcc

SEQ ID NO: 639307 - DNA, 15 bp, Homo sapiens
aagcatacaaatcct

SEQ ID NO: 639308 - DNA, 15 bp, Homo sapiens
agcatacaaatccta

SEQ ID NO: 639309 - DNA, 15 bp, Homo sapiens
gcatacaaatcctat

SEQ ID NO: 639310 - DNA, 15 bp, Homo sapiens
catacaaatcctatc

SEQ ID NO: 639311 - DNA, 15 bp, Homo sapiens
atacaaatcctatcc

SEQ ID NO: 639312 - DNA, 15 bp, Homo sapiens
tacaaatcctatcca

SEQ ID NO: 639313 - DNA, 15 bp, Homo sapiens
acaaatcctatccaa

SEQ ID NO: 639314 - DNA, 15 bp, Homo sapiens
caaatcctatccaat

SEQ ID NO: 639315 - DNA, 15 bp, Homo sapiens
aaatcctatccaata

SEQ ID NO: 639316 - DNA, 15 bp, Homo sapiens
aatcctatccaatag

SEQ ID NO: 639317 - DNA, 15 bp, Homo sapiens
atcctatccaataga

SEQ ID NO: 639318 - DNA, 15 bp, Homo sapiens
tcctatccaatagat

SEQ ID NO: 639319 - DNA, 15 bp, Homo sapiens
cctatccaatagatc

SEQ ID NO: 639320 - DNA, 15 bp, Homo sapiens
ctatccaatagatca

SEQ ID NO: 639321 - DNA, 15 bp, Homo sapiens
tatccaatagatcag

SEQ ID NO: 639322 - DNA, 15 bp, Homo sapiens
atccaatagatcaga

SEQ ID NO: 639323 - DNA, 15 bp, Homo sapiens
tccaatagatcagaa

SEQ ID NO: 639324 - DNA, 15 bp, Homo sapiens
ccaatagatcagaaa

SEQ ID NO: 639325 - DNA, 15 bp, Homo sapiens
caatagatcagaaaa

SEQ ID NO: 639326 - DNA, 15 bp, Homo sapiens
aatagatcagaaaaa

SEQ ID NO: 639327 - DNA, 15 bp, Homo sapiens
atagatcagaaaaat

SEQ ID NO: 639328 - DNA, 15 bp, Homo sapiens
tagatcagaaaaatg

SEQ ID NO: 639329 - DNA, 15 bp, Homo sapiens
agatcagaaaaatgt

SEQ ID NO: 639330 - DNA, 15 bp, Homo sapiens
gatcagaaaaatgtc

SEQ ID NO: 639331 - DNA, 15 bp, Homo sapiens
atcagaaaaatgtct

SEQ ID NO: 639332 - DNA, 15 bp, Homo sapiens
tcagaaaaatgtctt

SEQ ID NO: 639333 - DNA, 15 bp, Homo sapiens
cagaaaaatgtcttg

SEQ ID NO: 639334 - DNA, 15 bp, Homo sapiens
agaaaaatgtcttgg

SEQ ID NO: 639335 - DNA, 15 bp, Homo sapiens
gaaaaatgtcttgga

SEQ ID NO: 639336 - DNA, 15 bp, Homo sapiens
aaaaatgtcttggaa

SEQ ID NO: 639337 - DNA, 15 bp, Homo sapiens
aaaatgtcttggaaa

SEQ ID NO: 639338 - DNA, 15 bp, Homo sapiens
aaatgtcttggaaaa

SEQ ID NO: 639339 - DNA, 15 bp, Homo sapiens
aatgtcttggaaaat

SEQ ID NO: 639340 - DNA, 15 bp, Homo sapiens
atgtcttggaaaatt

SEQ ID NO: 639341 - DNA, 15 bp, Homo sapiens
tgtcttggaaaatta

SEQ ID NO: 639342 - DNA, 15 bp, Homo sapiens
gtcttggaaaattat

SEQ ID NO: 639343 - DNA, 15 bp, Homo sapiens
tcttggaaaattatc

SEQ ID NO: 639344 - DNA, 15 bp, Homo sapiens
cttggaaaattatca

SEQ ID NO: 639345 - DNA, 15 bp, Homo sapiens
ttggaaaattatcac

SEQ ID NO: 639346 - DNA, 15 bp, Homo sapiens
tggaaaattatcact

SEQ ID NO: 639347 - DNA, 15 bp, Homo sapiens
ggaaaattatcacta

SEQ ID NO: 639348 - DNA, 15 bp, Homo sapiens
gaaaattatcactaa

SEQ ID NO: 639349 - DNA, 15 bp, Homo sapiens
aaaattatcactaag

SEQ ID NO: 639350 - DNA, 15 bp, Homo sapiens
aaattatcactaagc

SEQ ID NO: 639351 - DNA, 15 bp, Homo sapiens
aattatcactaagcc

SEQ ID NO: 639352 - DNA, 15 bp, Homo sapiens
attatcactaagccc

SEQ ID NO: 639353 - DNA, 15 bp, Homo sapiens
ttatcactaagccca

SEQ ID NO: 639354 - DNA, 15 bp, Homo sapiens
tatcactaagcccat

SEQ ID NO: 639355 - DNA, 15 bp, Homo sapiens
atcactaagcccatg

SEQ ID NO: 639356 - DNA, 15 bp, Homo sapiens
tcactaagcccatgg

SEQ ID NO: 639357 - DNA, 15 bp, Homo sapiens
cactaagcccatggt

SEQ ID NO: 639358 - DNA, 15 bp, Homo sapiens
actaagcccatggtt

SEQ ID NO: 639359 - DNA, 15 bp, Homo sapiens
ctaagcccatggtta

SEQ ID NO: 639360 - DNA, 15 bp, Homo sapiens
taagcccatggttat

SEQ ID NO: 639361 - DNA, 15 bp, Homo sapiens
aagcccatggttatc

SEQ ID NO: 639362 - DNA, 15 bp, Homo sapiens
agcccatggttatca

SEQ ID NO: 639363 - DNA, 15 bp, Homo sapiens
gcccatggttatcat

SEQ ID NO: 639364 - DNA, 15 bp, Homo sapiens
cccatggttatcata

SEQ ID NO: 639365 - DNA, 15 bp, Homo sapiens
ccatggttatcatat

SEQ ID NO: 639366 - DNA, 15 bp, Homo sapiens
catggttatcatatt

SEQ ID NO: 639367 - DNA, 15 bp, Homo sapiens
atggttatcatattt

SEQ ID NO: 639368 - DNA, 15 bp, Homo sapiens
tggttatcatatttg

SEQ ID NO: 639369 - DNA, 15 bp, Homo sapiens
ggttatcatatttgt

SEQ ID NO: 639370 - DNA, 15 bp, Homo sapiens
gttatcatatttgta

SEQ ID NO: 639371 - DNA, 15 bp, Homo sapiens
ttatcatatttgtaa

SEQ ID NO: 639372 - DNA, 15 bp, Homo sapiens
tatcatatttgtaag

SEQ ID NO: 639373 - DNA, 15 bp, Homo sapiens
atcatatttgtaagg

SEQ ID NO: 639374 - DNA, 15 bp, Homo sapiens
tcatatttgtaagga

SEQ ID NO: 639375 - DNA, 15 bp, Homo sapiens
catatttgtaaggaa

SEQ ID NO: 639376 - DNA, 15 bp, Homo sapiens
atatttgtaaggaaa

SEQ ID NO: 639377 - DNA, 15 bp, Homo sapiens
tatttgtaaggaaag

SEQ ID NO: 639378 - DNA, 15 bp, Homo sapiens
atttgtaaggaaagt

SEQ ID NO: 639379 - DNA, 15 bp, Homo sapiens
tttgtaaggaaagtc

SEQ ID NO: 639380 - DNA, 15 bp, Homo sapiens
ttgtaaggaaagtca

SEQ ID NO: 639381 - DNA, 15 bp, Homo sapiens
tgtaaggaaagtcat

SEQ ID NO: 639382 - DNA, 15 bp, Homo sapiens
gtaaggaaagtcatc

SEQ ID NO: 639383 - DNA, 15 bp, Homo sapiens
taaggaaagtcatca

SEQ ID NO: 639384 - DNA, 15 bp, Homo sapiens
aaggaaagtcatcac

SEQ ID NO: 639385 - DNA, 15 bp, Homo sapiens
aggaaagtcatcaca

SEQ ID NO: 639386 - DNA, 15 bp, Homo sapiens
ggaaagtcatcacaa

SEQ ID NO: 639387 - DNA, 15 bp, Homo sapiens
gaaagtcatcacaac

SEQ ID NO: 639388 - DNA, 15 bp, Homo sapiens
aaagtcatcacaaca

SEQ ID NO: 639389 - DNA, 15 bp, Homo sapiens
aagtcatcacaacaa

SEQ ID NO: 639390 - DNA, 15 bp, Homo sapiens
agtcatcacaacaat

SEQ ID NO: 639391 - DNA, 15 bp, Homo sapiens
gtcatcacaacaatc

SEQ ID NO: 639392 - DNA, 15 bp, Homo sapiens
tcatcacaacaatca

SEQ ID NO: 639393 - DNA, 15 bp, Homo sapiens
catcacaacaatcac

SEQ ID NO: 639394 - DNA, 15 bp, Homo sapiens
atcacaacaatcaca

SEQ ID NO: 639395 - DNA, 15 bp, Homo sapiens
tcacaacaatcacat

SEQ ID NO: 639396 - DNA, 15 bp, Homo sapiens
cacaacaatcacata

SEQ ID NO: 639397 - DNA, 15 bp, Homo sapiens
acaacaatcacatat

SEQ ID NO: 639398 - DNA, 15 bp, Homo sapiens
caacaatcacatata

SEQ ID NO: 639399 - DNA, 15 bp, Homo sapiens
aacaatcacatatat

SEQ ID NO: 639400 - DNA, 15 bp, Homo sapiens
acaatcacatatata

SEQ ID NO: 639401 - DNA, 15 bp, Homo sapiens
caatcacatatatat

SEQ ID NO: 639402 - DNA, 15 bp, Homo sapiens
aatcacatatatata

SEQ ID NO: 639403 - DNA, 15 bp, Homo sapiens
atcacatatatatat

SEQ ID NO: 639404 - DNA, 15 bp, Homo sapiens
tcacatatatatatt

SEQ ID NO: 639405 - DNA, 15 bp, Homo sapiens
cacatatatatattt

SEQ ID NO: 639406 - DNA, 15 bp, Homo sapiens
acatatatatattta

SEQ ID NO: 639407 - DNA, 15 bp, Homo sapiens
catatatatatttat

SEQ ID NO: 639408 - DNA, 15 bp, Homo sapiens
atatatatatttatt

SEQ ID NO: 639409 - DNA, 15 bp, Homo sapiens
tatatatatttattc

SEQ ID NO: 639410 - DNA, 15 bp, Homo sapiens
atatatatttattct

SEQ ID NO: 639411 - DNA, 15 bp, Homo sapiens
tatatatttattctt

SEQ ID NO: 639412 - DNA, 15 bp, Homo sapiens
atatatttattctta

SEQ ID NO: 639413 - DNA, 15 bp, Homo sapiens
tatatttattcttat

SEQ ID NO: 639414 - DNA, 15 bp, Homo sapiens
atatttattcttatg

SEQ ID NO: 639415 - DNA, 15 bp, Homo sapiens
tatttattcttatga

SEQ ID NO: 639416 - DNA, 15 bp, Homo sapiens
atttattcttatgac

SEQ ID NO: 639417 - DNA, 15 bp, Homo sapiens
tttattcttatgaca

SEQ ID NO: 639418 - DNA, 15 bp, Homo sapiens
ttattcttatgacaa

SEQ ID NO: 639419 - DNA, 15 bp, Homo sapiens
tattcttatgacaaa

SEQ ID NO: 639420 - DNA, 15 bp, Homo sapiens
attcttatgacaaat

SEQ ID NO: 639421 - DNA, 15 bp, Homo sapiens
ttcttatgacaaatc

SEQ ID NO: 639422 - DNA, 15 bp, Homo sapiens
tcttatgacaaatct

SEQ ID NO: 639423 - DNA, 15 bp, Homo sapiens
cttatgacaaatctt

SEQ ID NO: 639424 - DNA, 15 bp, Homo sapiens
ttatgacaaatcttt

SEQ ID NO: 639425 - DNA, 15 bp, Homo sapiens
tatgacaaatcttta

SEQ ID NO: 639426 - DNA, 15 bp, Homo sapiens
atgacaaatctttag

SEQ ID NO: 639427 - DNA, 15 bp, Homo sapiens
tgacaaatctttaga

SEQ ID NO: 639428 - DNA, 15 bp, Homo sapiens
gacaaatctttagaa

SEQ ID NO: 639429 - DNA, 15 bp, Homo sapiens
acaaatctttagaaa

SEQ ID NO: 639430 - DNA, 15 bp, Homo sapiens
caaatctttagaaat

SEQ ID NO: 639431 - DNA, 15 bp, Homo sapiens
aaatctttagaaatt

SEQ ID NO: 639432 - DNA, 15 bp, Homo sapiens
aatctttagaaattt

SEQ ID NO: 639433 - DNA, 15 bp, Homo sapiens
atctttagaaatttt

SEQ ID NO: 639434 - DNA, 15 bp, Homo sapiens
tctttagaaatttta

SEQ ID NO: 639435 - DNA, 15 bp, Homo sapiens
ctttagaaattttaa

SEQ ID NO: 639436 - DNA, 15 bp, Homo sapiens
tttagaaattttaaa

SEQ ID NO: 639437 - DNA, 15 bp, Homo sapiens
ttagaaattttaaag

SEQ ID NO: 639438 - DNA, 15 bp, Homo sapiens
tagaaattttaaagt

SEQ ID NO: 639439 - DNA, 15 bp, Homo sapiens
agaaattttaaagta

SEQ ID NO: 639440 - DNA, 15 bp, Homo sapiens
gaaattttaaagtat

SEQ ID NO: 639441 - DNA, 15 bp, Homo sapiens
aaattttaaagtata

SEQ ID NO: 639442 - DNA, 15 bp, Homo sapiens
aattttaaagtatag

SEQ ID NO: 639443 - DNA, 15 bp, Homo sapiens
attttaaagtatagg

SEQ ID NO: 639444 - DNA, 15 bp, Homo sapiens
ttttaaagtataggt

SEQ ID NO: 639445 - DNA, 15 bp, Homo sapiens
tttaaagtataggtg

SEQ ID NO: 639446 - DNA, 15 bp, Homo sapiens
ttaaagtataggtgt

SEQ ID NO: 639447 - DNA, 15 bp, Homo sapiens
taaagtataggtgtt

SEQ ID NO: 639448 - DNA, 15 bp, Homo sapiens
aaagtataggtgttt

SEQ ID NO: 639449 - DNA, 15 bp, Homo sapiens
aagtataggtgttta

SEQ ID NO: 639450 - DNA, 15 bp, Homo sapiens
agtataggtgtttac

SEQ ID NO: 639451 - DNA, 15 bp, Homo sapiens
gtataggtgtttact

SEQ ID NO: 639452 - DNA, 15 bp, Homo sapiens
tataggtgtttactc

SEQ ID NO: 639453 - DNA, 15 bp, Homo sapiens
ataggtgtttactcc

SEQ ID NO: 639454 - DNA, 15 bp, Homo sapiens
taggtgtttactcca

SEQ ID NO: 639455 - DNA, 15 bp, Homo sapiens
aggtgtttactccaa

SEQ ID NO: 639456 - DNA, 15 bp, Homo sapiens
ggtgtttactccaaa

SEQ ID NO: 639457 - DNA, 15 bp, Homo sapiens
gtgtttactccaaat

SEQ ID NO: 639458 - DNA, 15 bp, Homo sapiens
tgtttactccaaatt

SEQ ID NO: 639459 - DNA, 15 bp, Homo sapiens
gtttactccaaattt

SEQ ID NO: 639460 - DNA, 15 bp, Homo sapiens
tttactccaaatttt

SEQ ID NO: 639461 - DNA, 15 bp, Homo sapiens
ttactccaaattttc

SEQ ID NO: 639462 - DNA, 15 bp, Homo sapiens
tactccaaattttct

SEQ ID NO: 639463 - DNA, 15 bp, Homo sapiens
actccaaattttctc

SEQ ID NO: 639464 - DNA, 15 bp, Homo sapiens
ctccaaattttctca

SEQ ID NO: 639465 - DNA, 15 bp, Homo sapiens
tccaaattttctcag

SEQ ID NO: 639466 - DNA, 15 bp, Homo sapiens
ccaaattttctcagg

SEQ ID NO: 639467 - DNA, 15 bp, Homo sapiens
caaattttctcagga

SEQ ID NO: 639468 - DNA, 15 bp, Homo sapiens
aaattttctcaggat

SEQ ID NO: 639469 - DNA, 15 bp, Homo sapiens
aattttctcaggatg

SEQ ID NO: 639470 - DNA, 15 bp, Homo sapiens
attttctcaggatgg

SEQ ID NO: 639471 - DNA, 15 bp, Homo sapiens
ttttctcaggatgga

SEQ ID NO: 639472 - DNA, 15 bp, Homo sapiens
tttctcaggatggag

SEQ ID NO: 639473 - DNA, 15 bp, Homo sapiens
ttctcaggatggagg

SEQ ID NO: 639474 - DNA, 15 bp, Homo sapiens
tctcaggatggaggc

SEQ ID NO: 639475 - DNA, 15 bp, Homo sapiens
ctcaggatggaggca

SEQ ID NO: 639476 - DNA, 15 bp, Homo sapiens
tcaggatggaggcat

SEQ ID NO: 639477 - DNA, 15 bp, Homo sapiens
caggatggaggcatt

SEQ ID NO: 639478 - DNA, 15 bp, Homo sapiens
aggatggaggcattt

SEQ ID NO: 639479 - DNA, 15 bp, Homo sapiens
ggatggaggcatttc

SEQ ID NO: 639480 - DNA, 15 bp, Homo sapiens
gatggaggcatttct

SEQ ID NO: 639481 - DNA, 15 bp, Homo sapiens
atggaggcatttcta

SEQ ID NO: 639482 - DNA, 15 bp, Homo sapiens
tggaggcatttctag

SEQ ID NO: 639483 - DNA, 15 bp, Homo sapiens
ggaggcatttctagg

SEQ ID NO: 639484 - DNA, 15 bp, Homo sapiens
gaggcatttctaggc

SEQ ID NO: 639485 - DNA, 15 bp, Homo sapiens
aggcatttctaggca

SEQ ID NO: 639486 - DNA, 15 bp, Homo sapiens
ggcatttctaggcag

SEQ ID NO: 639487 - DNA, 15 bp, Homo sapiens
gcatttctaggcaga

SEQ ID NO: 639488 - DNA, 15 bp, Homo sapiens
catttctaggcagaa

SEQ ID NO: 639489 - DNA, 15 bp, Homo sapiens
atttctaggcagaaa

SEQ ID NO: 639490 - DNA, 15 bp, Homo sapiens
tttctaggcagaaat

SEQ ID NO: 639491 - DNA, 15 bp, Homo sapiens
ttctaggcagaaatt

SEQ ID NO: 639492 - DNA, 15 bp, Homo sapiens
tctaggcagaaattg

SEQ ID NO: 639493 - DNA, 15 bp, Homo sapiens
ctaggcagaaattgg

SEQ ID NO: 639494 - DNA, 15 bp, Homo sapiens
taggcagaaattggc

SEQ ID NO: 639495 - DNA, 15 bp, Homo sapiens
aggcagaaattggca

SEQ ID NO: 639496 - DNA, 15 bp, Homo sapiens
ggcagaaattggcat

SEQ ID NO: 639497 - DNA, 15 bp, Homo sapiens
gcagaaattggcatt

SEQ ID NO: 639498 - DNA, 15 bp, Homo sapiens
cagaaattggcattc

SEQ ID NO: 639499 - DNA, 15 bp, Homo sapiens
agaaattggcattct

SEQ ID NO: 639500 - DNA, 15 bp, Homo sapiens
gaaattggcattctt

SEQ ID NO: 639501 - DNA, 15 bp, Homo sapiens
aaattggcattcttc

SEQ ID NO: 639502 - DNA, 15 bp, Homo sapiens
aattggcattcttca

SEQ ID NO: 639503 - DNA, 15 bp, Homo sapiens
attggcattcttcat

SEQ ID NO: 639504 - DNA, 15 bp, Homo sapiens
ttggcattcttcata

SEQ ID NO: 639505 - DNA, 15 bp, Homo sapiens
tggcattcttcatag

SEQ ID NO: 639506 - DNA, 15 bp, Homo sapiens
ggcattcttcatagt

SEQ ID NO: 639507 - DNA, 15 bp, Homo sapiens
gcattcttcatagtc

SEQ ID NO: 639508 - DNA, 15 bp, Homo sapiens
cattcttcatagtca

SEQ ID NO: 639509 - DNA, 15 bp, Homo sapiens
attcttcatagtcac

SEQ ID NO: 639510 - DNA, 15 bp, Homo sapiens
ttcttcatagtcact

SEQ ID NO: 639511 - DNA, 15 bp, Homo sapiens
tcttcatagtcacta

SEQ ID NO: 639512 - DNA, 15 bp, Homo sapiens
cttcatagtcactat

SEQ ID NO: 639513 - DNA, 15 bp, Homo sapiens
ttcatagtcactatc

SEQ ID NO: 639514 - DNA, 15 bp, Homo sapiens
tcatagtcactatca

SEQ ID NO: 639515 - DNA, 15 bp, Homo sapiens
catagtcactatcag

SEQ ID NO: 639516 - DNA, 15 bp, Homo sapiens
atagtcactatcagt

SEQ ID NO: 639517 - DNA, 15 bp, Homo sapiens
tagtcactatcagtt

SEQ ID NO: 639518 - DNA, 15 bp, Homo sapiens
agtcactatcagttc

SEQ ID NO: 639519 - DNA, 15 bp, Homo sapiens
gtcactatcagttca

SEQ ID NO: 639520 - DNA, 15 bp, Homo sapiens
tcactatcagttcaa

SEQ ID NO: 639521 - DNA, 15 bp, Homo sapiens
cactatcagttcaac

SEQ ID NO: 639522 - DNA, 15 bp, Homo sapiens
actatcagttcaaca

SEQ ID NO: 639523 - DNA, 15 bp, Homo sapiens
ctatcagttcaacaa

SEQ ID NO: 639524 - DNA, 15 bp, Homo sapiens
tatcagttcaacaaa

SEQ ID NO: 639525 - DNA, 15 bp, Homo sapiens
atcagttcaacaaaa

SEQ ID NO: 639526 - DNA, 15 bp, Homo sapiens
tcagttcaacaaaac

SEQ ID NO: 639527 - DNA, 15 bp, Homo sapiens
cagttcaacaaaaca

SEQ ID NO: 639528 - DNA, 15 bp, Homo sapiens
agttcaacaaaacaa

SEQ ID NO: 639529 - DNA, 15 bp, Homo sapiens
gttcaacaaaacaat

SEQ ID NO: 639530 - DNA, 15 bp, Homo sapiens
ttcaacaaaacaatt

SEQ ID NO: 639531 - DNA, 15 bp, Homo sapiens
tcaacaaaacaattt

SEQ ID NO: 639532 - DNA, 15 bp, Homo sapiens
caacaaaacaattta

SEQ ID NO: 639533 - DNA, 15 bp, Homo sapiens
aacaaaacaatttat

SEQ ID NO: 639534 - DNA, 15 bp, Homo sapiens
acaaaacaatttata

SEQ ID NO: 639535 - DNA, 15 bp, Homo sapiens
caaaacaatttatag

SEQ ID NO: 639536 - DNA, 15 bp, Homo sapiens
aaaacaatttatagt

SEQ ID NO: 639537 - DNA, 15 bp, Homo sapiens
aaacaatttatagta

SEQ ID NO: 639538 - DNA, 15 bp, Homo sapiens
aacaatttatagtat

SEQ ID NO: 639539 - DNA, 15 bp, Homo sapiens
acaatttatagtatt

SEQ ID NO: 639540 - DNA, 15 bp, Homo sapiens
caatttatagtattt

SEQ ID NO: 639541 - DNA, 15 bp, Homo sapiens
aatttatagtatttc

SEQ ID NO: 639542 - DNA, 15 bp, Homo sapiens
atttatagtatttct

SEQ ID NO: 639543 - DNA, 15 bp, Homo sapiens
tttatagtatttctc

SEQ ID NO: 639544 - DNA, 15 bp, Homo sapiens
ttatagtatttctca

SEQ ID NO: 639545 - DNA, 15 bp, Homo sapiens
tatagtatttctcaa

SEQ ID NO: 639546 - DNA, 15 bp, Homo sapiens
atagtatttctcaat

SEQ ID NO: 639547 - DNA, 15 bp, Homo sapiens
tagtatttctcaatg

SEQ ID NO: 639548 - DNA, 15 bp, Homo sapiens
agtatttctcaatgc

SEQ ID NO: 639549 - DNA, 15 bp, Homo sapiens
gtatttctcaatgcc

SEQ ID NO: 639550 - DNA, 15 bp, Homo sapiens
tatttctcaatgccc

SEQ ID NO: 639551 - DNA, 15 bp, Homo sapiens
atttctcaatgcccc

SEQ ID NO: 639552 - DNA, 15 bp, Homo sapiens
tttctcaatgcccca

SEQ ID NO: 639553 - DNA, 15 bp, Homo sapiens
ttctcaatgccccac

SEQ ID NO: 639554 - DNA, 15 bp, Homo sapiens
tctcaatgccccaca

SEQ ID NO: 639555 - DNA, 15 bp, Homo sapiens
ctcaatgccccacac

SEQ ID NO: 639556 - DNA, 15 bp, Homo sapiens
tcaatgccccacaca

SEQ ID NO: 639557 - DNA, 15 bp, Homo sapiens
caatgccccacacag

SEQ ID NO: 639558 - DNA, 15 bp, Homo sapiens
aatgccccacacagt

SEQ ID NO: 639559 - DNA, 15 bp, Homo sapiens
atgccccacacagtt

SEQ ID NO: 639560 - DNA, 15 bp, Homo sapiens
tgccccacacagttt

SEQ ID NO: 639561 - DNA, 15 bp, Homo sapiens
gccccacacagttta

SEQ ID NO: 639562 - DNA, 15 bp, Homo sapiens
ccccacacagtttat

SEQ ID NO: 639563 - DNA, 15 bp, Homo sapiens
cccacacagtttatc

SEQ ID NO: 639564 - DNA, 15 bp, Homo sapiens
ccacacagtttatct

SEQ ID NO: 639565 - DNA, 15 bp, Homo sapiens
cacacagtttatcta

SEQ ID NO: 639566 - DNA, 15 bp, Homo sapiens
acacagtttatctac

SEQ ID NO: 639567 - DNA, 15 bp, Homo sapiens
cacagtttatctact

SEQ ID NO: 639568 - DNA, 15 bp, Homo sapiens
acagtttatctactt

SEQ ID NO: 639569 - DNA, 15 bp, Homo sapiens
cagtttatctacttg

SEQ ID NO: 639570 - DNA, 15 bp, Homo sapiens
agtttatctacttgg

SEQ ID NO: 639571 - DNA, 15 bp, Homo sapiens
gtttatctacttggc

SEQ ID NO: 639572 - DNA, 15 bp, Homo sapiens
tttatctacttggca

SEQ ID NO: 639573 - DNA, 15 bp, Homo sapiens
ttatctacttggcaa

SEQ ID NO: 639574 - DNA, 15 bp, Homo sapiens
tatctacttggcaat

SEQ ID NO: 639575 - DNA, 15 bp, Homo sapiens
atctacttggcaatg

SEQ ID NO: 639576 - DNA, 15 bp, Homo sapiens
tctacttggcaatgg

SEQ ID NO: 639577 - DNA, 15 bp, Homo sapiens
ctacttggcaatggc

SEQ ID NO: 639578 - DNA, 15 bp, Homo sapiens
tacttggcaatggca

SEQ ID NO: 639579 - DNA, 15 bp, Homo sapiens
acttggcaatggcat

SEQ ID NO: 639580 - DNA, 15 bp, Homo sapiens
cttggcaatggcatc

SEQ ID NO: 639581 - DNA, 15 bp, Homo sapiens
ttggcaatggcatca

SEQ ID NO: 639582 - DNA, 15 bp, Homo sapiens
tggcaatggcatcaa

SEQ ID NO: 639583 - DNA, 15 bp, Homo sapiens
ggcaatggcatcaat

SEQ ID NO: 639584 - DNA, 15 bp, Homo sapiens
gcaatggcatcaatg

SEQ ID NO: 639585 - DNA, 15 bp, Homo sapiens
caatggcatcaatga

SEQ ID NO: 639586 - DNA, 15 bp, Homo sapiens
aatggcatcaatgac

SEQ ID NO: 639587 - DNA, 15 bp, Homo sapiens
atggcatcaatgaca

SEQ ID NO: 639588 - DNA, 15 bp, Homo sapiens
tggcatcaatgacag

SEQ ID NO: 639589 - DNA, 15 bp, Homo sapiens
ggcatcaatgacagt

SEQ ID NO: 639590 - DNA, 15 bp, Homo sapiens
gcatcaatgacagtg

SEQ ID NO: 639591 - DNA, 15 bp, Homo sapiens
catcaatgacagtga

SEQ ID NO: 639592 - DNA, 15 bp, Homo sapiens
atcaatgacagtgat

SEQ ID NO: 639593 - DNA, 15 bp, Homo sapiens
tcaatgacagtgatt

SEQ ID NO: 639594 - DNA, 15 bp, Homo sapiens
caatgacagtgatta

SEQ ID NO: 639595 - DNA, 15 bp, Homo sapiens
aatgacagtgattat

SEQ ID NO: 639596 - DNA, 15 bp, Homo sapiens
atgacagtgattatt

SEQ ID NO: 639597 - DNA, 15 bp, Homo sapiens
tgacagtgattattt

SEQ ID NO: 639598 - DNA, 15 bp, Homo sapiens
gacagtgattatttt

SEQ ID NO: 639599 - DNA, 15 bp, Homo sapiens
acagtgattattttc

SEQ ID NO: 639600 - DNA, 15 bp, Homo sapiens
cagtgattattttcc

SEQ ID NO: 639601 - DNA, 15 bp, Homo sapiens
agtgattattttccc

SEQ ID NO: 639602 - DNA, 15 bp, Homo sapiens
gtgattattttcccc

SEQ ID NO: 639603 - DNA, 15 bp, Homo sapiens
tgattattttcccct

SEQ ID NO: 639604 - DNA, 15 bp, Homo sapiens
gattattttccccta

SEQ ID NO: 639605 - DNA, 15 bp, Homo sapiens
attattttcccctaa

SEQ ID NO: 639606 - DNA, 15 bp, Homo sapiens
ttattttcccctaag

SEQ ID NO: 639607 - DNA, 15 bp, Homo sapiens
tattttcccctaagt

SEQ ID NO: 639608 - DNA, 15 bp, Homo sapiens
attttcccctaagtt

SEQ ID NO: 639609 - DNA, 15 bp, Homo sapiens
ttttcccctaagttg

SEQ ID NO: 639610 - DNA, 15 bp, Homo sapiens
tttcccctaagttgt

SEQ ID NO: 639611 - DNA, 15 bp, Homo sapiens
ttcccctaagttgta

SEQ ID NO: 639612 - DNA, 15 bp, Homo sapiens
tcccctaagttgtag

SEQ ID NO: 639613 - DNA, 15 bp, Homo sapiens
cccctaagttgtaga

SEQ ID NO: 639614 - DNA, 15 bp, Homo sapiens
ccctaagttgtagat

SEQ ID NO: 639615 - DNA, 15 bp, Homo sapiens
cctaagttgtagatg

SEQ ID NO: 639616 - DNA, 15 bp, Homo sapiens
ctaagttgtagatga

SEQ ID NO: 639617 - DNA, 15 bp, Homo sapiens
taagttgtagatgag

SEQ ID NO: 639618 - DNA, 15 bp, Homo sapiens
aagttgtagatgagt

SEQ ID NO: 639619 - DNA, 15 bp, Homo sapiens
agttgtagatgagta

SEQ ID NO: 639620 - DNA, 15 bp, Homo sapiens
gttgtagatgagtag

SEQ ID NO: 639621 - DNA, 15 bp, Homo sapiens
ttgtagatgagtagc

SEQ ID NO: 639622 - DNA, 15 bp, Homo sapiens
tgtagatgagtagct

SEQ ID NO: 639623 - DNA, 15 bp, Homo sapiens
gtagatgagtagcta

SEQ ID NO: 639624 - DNA, 15 bp, Homo sapiens
tagatgagtagctaa

SEQ ID NO: 639625 - DNA, 15 bp, Homo sapiens
agatgagtagctaaa

SEQ ID NO: 639626 - DNA, 15 bp, Homo sapiens
gatgagtagctaaaa

SEQ ID NO: 639627 - DNA, 15 bp, Homo sapiens
atgagtagctaaaaa

SEQ ID NO: 639628 - DNA, 15 bp, Homo sapiens
tgagtagctaaaaac

SEQ ID NO: 639629 - DNA, 15 bp, Homo sapiens
gagtagctaaaaacg

SEQ ID NO: 639630 - DNA, 15 bp, Homo sapiens
agtagctaaaaacga

SEQ ID NO: 639631 - DNA, 15 bp, Homo sapiens
gtagctaaaaacgaa

SEQ ID NO: 639632 - DNA, 15 bp, Homo sapiens
tagctaaaaacgaaa

SEQ ID NO: 639633 - DNA, 15 bp, Homo sapiens
agctaaaaacgaaag

SEQ ID NO: 639634 - DNA, 15 bp, Homo sapiens
gctaaaaacgaaagt

SEQ ID NO: 639635 - DNA, 15 bp, Homo sapiens
ctaaaaacgaaagtc

SEQ ID NO: 639636 - DNA, 15 bp, Homo sapiens
taaaaacgaaagtca

SEQ ID NO: 639637 - DNA, 15 bp, Homo sapiens
aaaaacgaaagtcag

SEQ ID NO: 639638 - DNA, 15 bp, Homo sapiens
aaaacgaaagtcagc

SEQ ID NO: 639639 - DNA, 15 bp, Homo sapiens
aaacgaaagtcagct

SEQ ID NO: 639640 - DNA, 15 bp, Homo sapiens
aacgaaagtcagctc

SEQ ID NO: 639641 - DNA, 15 bp, Homo sapiens
acgaaagtcagctcc

SEQ ID NO: 639642 - DNA, 15 bp, Homo sapiens
cgaaagtcagctcct

SEQ ID NO: 639643 - DNA, 15 bp, Homo sapiens
gaaagtcagctcctg

SEQ ID NO: 639644 - DNA, 15 bp, Homo sapiens
aaagtcagctcctga

SEQ ID NO: 639645 - DNA, 15 bp, Homo sapiens
aagtcagctcctgaa

SEQ ID NO: 639646 - DNA, 15 bp, Homo sapiens
agtcagctcctgaaa

SEQ ID NO: 639647 - DNA, 15 bp, Homo sapiens
gtcagctcctgaaat

SEQ ID NO: 639648 - DNA, 15 bp, Homo sapiens
tcagctcctgaaata

SEQ ID NO: 639649 - DNA, 15 bp, Homo sapiens
cagctcctgaaataa

SEQ ID NO: 639650 - DNA, 15 bp, Homo sapiens
agctcctgaaataaa

SEQ ID NO: 639651 - DNA, 15 bp, Homo sapiens
gctcctgaaataaac

SEQ ID NO: 639652 - DNA, 15 bp, Homo sapiens
ctcctgaaataaaca

SEQ ID NO: 639653 - DNA, 15 bp, Homo sapiens
tcctgaaataaacag

SEQ ID NO: 639654 - DNA, 15 bp, Homo sapiens
cctgaaataaacaga

SEQ ID NO: 639655 - DNA, 15 bp, Homo sapiens
ctgaaataaacagaa

SEQ ID NO: 639656 - DNA, 15 bp, Homo sapiens
tgaaataaacagaat

SEQ ID NO: 639657 - DNA, 15 bp, Homo sapiens
gaaataaacagaatg

SEQ ID NO: 639658 - DNA, 15 bp, Homo sapiens
aaataaacagaatga

SEQ ID NO: 639659 - DNA, 15 bp, Homo sapiens
aataaacagaatgaa

SEQ ID NO: 639660 - DNA, 15 bp, Homo sapiens
ataaacagaatgaat

SEQ ID NO: 639661 - DNA, 15 bp, Homo sapiens
taaacagaatgaatt

SEQ ID NO: 639662 - DNA, 15 bp, Homo sapiens
aaacagaatgaattc

SEQ ID NO: 639663 - DNA, 15 bp, Homo sapiens
aacagaatgaattca

SEQ ID NO: 639664 - DNA, 15 bp, Homo sapiens
acagaatgaattcag

SEQ ID NO: 639665 - DNA, 15 bp, Homo sapiens
cagaatgaattcaga

SEQ ID NO: 639666 - DNA, 15 bp, Homo sapiens
agaatgaattcagag

SEQ ID NO: 639667 - DNA, 15 bp, Homo sapiens
gaatgaattcagaga

SEQ ID NO: 639668 - DNA, 15 bp, Homo sapiens
aatgaattcagagag

SEQ ID NO: 639669 - DNA, 15 bp, Homo sapiens
atgaattcagagagc

SEQ ID NO: 639670 - DNA, 15 bp, Homo sapiens
tgaattcagagagca

SEQ ID NO: 639671 - DNA, 15 bp, Homo sapiens
gaattcagagagcag

SEQ ID NO: 639672 - DNA, 15 bp, Homo sapiens
aattcagagagcagg

SEQ ID NO: 639673 - DNA, 15 bp, Homo sapiens
attcagagagcagga

SEQ ID NO: 639674 - DNA, 15 bp, Homo sapiens
ttcagagagcaggaa

SEQ ID NO: 639675 - DNA, 15 bp, Homo sapiens
tcagagagcaggaaa

SEQ ID NO: 639676 - DNA, 15 bp, Homo sapiens
cagagagcaggaaat

SEQ ID NO: 639677 - DNA, 15 bp, Homo sapiens
agagagcaggaaatt

SEQ ID NO: 639678 - DNA, 15 bp, Homo sapiens
gagagcaggaaattt

SEQ ID NO: 639679 - DNA, 15 bp, Homo sapiens
agagcaggaaattta

SEQ ID NO: 639680 - DNA, 15 bp, Homo sapiens
gagcaggaaatttat

SEQ ID NO: 639681 - DNA, 15 bp, Homo sapiens
agcaggaaatttata

SEQ ID NO: 639682 - DNA, 15 bp, Homo sapiens
gcaggaaatttataa

SEQ ID NO: 639683 - DNA, 15 bp, Homo sapiens
caggaaatttataac

SEQ ID NO: 639684 - DNA, 15 bp, Homo sapiens
aggaaatttataaca

SEQ ID NO: 639685 - DNA, 15 bp, Homo sapiens
ggaaatttataacat

SEQ ID NO: 639686 - DNA, 15 bp, Homo sapiens
gaaatttataacatg

SEQ ID NO: 639687 - DNA, 15 bp, Homo sapiens
aaatttataacatga

SEQ ID NO: 639688 - DNA, 15 bp, Homo sapiens
aatttataacatgat

SEQ ID NO: 639689 - DNA, 15 bp, Homo sapiens
atttataacatgatc

SEQ ID NO: 639690 - DNA, 15 bp, Homo sapiens
tttataacatgatct

SEQ ID NO: 639691 - DNA, 15 bp, Homo sapiens
ttataacatgatcta

SEQ ID NO: 639692 - DNA, 15 bp, Homo sapiens
tataacatgatctaa

SEQ ID NO: 639693 - DNA, 15 bp, Homo sapiens
ataacatgatctaac

SEQ ID NO: 639694 - DNA, 15 bp, Homo sapiens
taacatgatctaaca

SEQ ID NO: 639695 - DNA, 15 bp, Homo sapiens
aacatgatctaacaa

SEQ ID NO: 639696 - DNA, 15 bp, Homo sapiens
acatgatctaacaat

SEQ ID NO: 639697 - DNA, 15 bp, Homo sapiens
catgatctaacaatg

SEQ ID NO: 639698 - DNA, 15 bp, Homo sapiens
atgatctaacaatgt

SEQ ID NO: 639699 - DNA, 15 bp, Homo sapiens
tgatctaacaatgta

SEQ ID NO: 639700 - DNA, 15 bp, Homo sapiens
gatctaacaatgtaa

SEQ ID NO: 639701 - DNA, 15 bp, Homo sapiens
atctaacaatgtaag

SEQ ID NO: 639702 - DNA, 15 bp, Homo sapiens
tctaacaatgtaaga

SEQ ID NO: 639703 - DNA, 15 bp, Homo sapiens
ctaacaatgtaagag

SEQ ID NO: 639704 - DNA, 15 bp, Homo sapiens
taacaatgtaagagt

SEQ ID NO: 639705 - DNA, 15 bp, Homo sapiens
aacaatgtaagagtc

SEQ ID NO: 639706 - DNA, 15 bp, Homo sapiens
acaatgtaagagtct

SEQ ID NO: 639707 - DNA, 15 bp, Homo sapiens
caatgtaagagtcta

SEQ ID NO: 639708 - DNA, 15 bp, Homo sapiens
aatgtaagagtctaa

SEQ ID NO: 639709 - DNA, 15 bp, Homo sapiens
atgtaagagtctaat

SEQ ID NO: 639710 - DNA, 15 bp, Homo sapiens
tgtaagagtctaatg

SEQ ID NO: 639711 - DNA, 15 bp, Homo sapiens
gtaagagtctaatgt

SEQ ID NO: 639712 - DNA, 15 bp, Homo sapiens
taagagtctaatgtt

SEQ ID NO: 639713 - DNA, 15 bp, Homo sapiens
aagagtctaatgttt

SEQ ID NO: 639714 - DNA, 15 bp, Homo sapiens
agagtctaatgtttt

SEQ ID NO: 639715 - DNA, 15 bp, Homo sapiens
gagtctaatgtttta

SEQ ID NO: 639716 - DNA, 15 bp, Homo sapiens
agtctaatgttttag

SEQ ID NO: 639717 - DNA, 15 bp, Homo sapiens
gtctaatgttttaga

SEQ ID NO: 639718 - DNA, 15 bp, Homo sapiens
tctaatgttttagat

SEQ ID NO: 639719 - DNA, 15 bp, Homo sapiens
ctaatgttttagata

SEQ ID NO: 639720 - DNA, 15 bp, Homo sapiens
taatgttttagataa

SEQ ID NO: 639721 - DNA, 15 bp, Homo sapiens
aatgttttagataat

SEQ ID NO: 639722 - DNA, 15 bp, Homo sapiens
atgttttagataatt

SEQ ID NO: 639723 - DNA, 15 bp, Homo sapiens
tgttttagataattg

SEQ ID NO: 639724 - DNA, 15 bp, Homo sapiens
gttttagataattga

SEQ ID NO: 639725 - DNA, 15 bp, Homo sapiens
ttttagataattgat

SEQ ID NO: 639726 - DNA, 15 bp, Homo sapiens
tttagataattgatg

SEQ ID NO: 639727 - DNA, 15 bp, Homo sapiens
ttagataattgatgt

SEQ ID NO: 639728 - DNA, 15 bp, Homo sapiens
tagataattgatgta

SEQ ID NO: 639729 - DNA, 15 bp, Homo sapiens
agataattgatgtac

SEQ ID NO: 639730 - DNA, 15 bp, Homo sapiens
gataattgatgtacc

SEQ ID NO: 639731 - DNA, 15 bp, Homo sapiens
ataattgatgtaccg

SEQ ID NO: 639732 - DNA, 15 bp, Homo sapiens
taattgatgtaccgt

SEQ ID NO: 639733 - DNA, 15 bp, Homo sapiens
aattgatgtaccgtg

SEQ ID NO: 639734 - DNA, 15 bp, Homo sapiens
attgatgtaccgtgc

SEQ ID NO: 639735 - DNA, 15 bp, Homo sapiens
ttgatgtaccgtgcc

SEQ ID NO: 639736 - DNA, 15 bp, Homo sapiens
tgatgtaccgtgccg

SEQ ID NO: 639737 - DNA, 15 bp, Homo sapiens
gatgtaccgtgccgt

SEQ ID NO: 639738 - DNA, 15 bp, Homo sapiens
atgtaccgtgccgtt

SEQ ID NO: 639739 - DNA, 15 bp, Homo sapiens
tgtaccgtgccgttt

SEQ ID NO: 639740 - DNA, 15 bp, Homo sapiens
gtaccgtgccgttta

SEQ ID NO: 639741 - DNA, 15 bp, Homo sapiens
taccgtgccgtttat

SEQ ID NO: 639742 - DNA, 15 bp, Homo sapiens
accgtgccgtttatt

SEQ ID NO: 639743 - DNA, 15 bp, Homo sapiens
ccgtgccgtttattt

SEQ ID NO: 639744 - DNA, 15 bp, Homo sapiens
cgtgccgtttatttc

SEQ ID NO: 639745 - DNA, 15 bp, Homo sapiens
gtgccgtttatttca

SEQ ID NO: 639746 - DNA, 15 bp, Homo sapiens
tgccgtttatttcaa

SEQ ID NO: 639747 - DNA, 15 bp, Homo sapiens
gccgtttatttcaat

SEQ ID NO: 639748 - DNA, 15 bp, Homo sapiens
ccgtttatttcaata

SEQ ID NO: 639749 - DNA, 15 bp, Homo sapiens
cgtttatttcaatat

SEQ ID NO: 639750 - DNA, 15 bp, Homo sapiens
gtttatttcaatata

SEQ ID NO: 639751 - DNA, 15 bp, Homo sapiens
tttatttcaatataa

SEQ ID NO: 639752 - DNA, 15 bp, Homo sapiens
ttatttcaatataat

SEQ ID NO: 639753 - DNA, 15 bp, Homo sapiens
tatttcaatataatt

SEQ ID NO: 639754 - DNA, 15 bp, Homo sapiens
atttcaatataatta

SEQ ID NO: 639755 - DNA, 15 bp, Homo sapiens
tttcaatataattag

SEQ ID NO: 639756 - DNA, 15 bp, Homo sapiens
ttcaatataattagt

SEQ ID NO: 639757 - DNA, 15 bp, Homo sapiens
tcaatataattagta

SEQ ID NO: 639758 - DNA, 15 bp, Homo sapiens
caatataattagtat

SEQ ID NO: 639759 - DNA, 15 bp, Homo sapiens
aatataattagtata

SEQ ID NO: 639760 - DNA, 15 bp, Homo sapiens
atataattagtatac

SEQ ID NO: 639761 - DNA, 15 bp, Homo sapiens
tataattagtatacg

SEQ ID NO: 639762 - DNA, 15 bp, Homo sapiens
ataattagtatacga

SEQ ID NO: 639763 - DNA, 15 bp, Homo sapiens
taattagtatacgaa

SEQ ID NO: 639764 - DNA, 15 bp, Homo sapiens
aattagtatacgaac

SEQ ID NO: 639765 - DNA, 15 bp, Homo sapiens
attagtatacgaact

SEQ ID NO: 639766 - DNA, 15 bp, Homo sapiens
ttagtatacgaactc

SEQ ID NO: 639767 - DNA, 15 bp, Homo sapiens
tagtatacgaactct

SEQ ID NO: 639768 - DNA, 15 bp, Homo sapiens
agtatacgaactctg

SEQ ID NO: 639769 - DNA, 15 bp, Homo sapiens
gtatacgaactctgc

SEQ ID NO: 639770 - DNA, 15 bp, Homo sapiens
tatacgaactctgcc

SEQ ID NO: 639771 - DNA, 15 bp, Homo sapiens
atacgaactctgcca

SEQ ID NO: 639772 - DNA, 15 bp, Homo sapiens
tacgaactctgccac

SEQ ID NO: 639773 - DNA, 15 bp, Homo sapiens
acgaactctgccact

SEQ ID NO: 639774 - DNA, 15 bp, Homo sapiens
cgaactctgccactc

SEQ ID NO: 639775 - DNA, 15 bp, Homo sapiens
gaactctgccactca

SEQ ID NO: 639776 - DNA, 15 bp, Homo sapiens
aactctgccactcaa

SEQ ID NO: 639777 - DNA, 15 bp, Homo sapiens
actctgccactcaat

SEQ ID NO: 639778 - DNA, 15 bp, Homo sapiens
ctctgccactcaatt

SEQ ID NO: 639779 - DNA, 15 bp, Homo sapiens
tctgccactcaatta

SEQ ID NO: 639780 - DNA, 15 bp, Homo sapiens
ctgccactcaattaa

SEQ ID NO: 639781 - DNA, 15 bp, Homo sapiens
tgccactcaattaag

SEQ ID NO: 639782 - DNA, 15 bp, Homo sapiens
gccactcaattaagg

SEQ ID NO: 639783 - DNA, 15 bp, Homo sapiens
ccactcaattaaggt

SEQ ID NO: 639784 - DNA, 15 bp, Homo sapiens
cactcaattaaggtg

SEQ ID NO: 639785 - DNA, 15 bp, Homo sapiens
actcaattaaggtga

SEQ ID NO: 639786 - DNA, 15 bp, Homo sapiens
ctcaattaaggtgat

SEQ ID NO: 639787 - DNA, 15 bp, Homo sapiens
tcaattaaggtgatt

SEQ ID NO: 639788 - DNA, 15 bp, Homo sapiens
caattaaggtgattc

SEQ ID NO: 639789 - DNA, 15 bp, Homo sapiens
aattaaggtgattcc

SEQ ID NO: 639790 - DNA, 15 bp, Homo sapiens
attaaggtgattccc

SEQ ID NO: 639791 - DNA, 15 bp, Homo sapiens
ttaaggtgattccca

SEQ ID NO: 639792 - DNA, 15 bp, Homo sapiens
taaggtgattcccat

SEQ ID NO: 639793 - DNA, 15 bp, Homo sapiens
aaggtgattcccatg

SEQ ID NO: 639794 - DNA, 15 bp, Homo sapiens
aggtgattcccatga

SEQ ID NO: 639795 - DNA, 15 bp, Homo sapiens
ggtgattcccatgaa

SEQ ID NO: 639796 - DNA, 15 bp, Homo sapiens
gtgattcccatgaaa

SEQ ID NO: 639797 - DNA, 15 bp, Homo sapiens
tgattcccatgaaat

SEQ ID NO: 639798 - DNA, 15 bp, Homo sapiens
gattcccatgaaatt

SEQ ID NO: 639799 - DNA, 15 bp, Homo sapiens
attcccatgaaattt

SEQ ID NO: 639800 - DNA, 15 bp, Homo sapiens
ttcccatgaaatttg

SEQ ID NO: 639801 - DNA, 15 bp, Homo sapiens
tcccatgaaatttgg

SEQ ID NO: 639802 - DNA, 15 bp, Homo sapiens
cccatgaaatttggt

SEQ ID NO: 639803 - DNA, 15 bp, Homo sapiens
ccatgaaatttggtg

SEQ ID NO: 639804 - DNA, 15 bp, Homo sapiens
catgaaatttggtgt

SEQ ID NO: 639805 - DNA, 15 bp, Homo sapiens
atgaaatttggtgtt

SEQ ID NO: 639806 - DNA, 15 bp, Homo sapiens
tgaaatttggtgttg

SEQ ID NO: 639807 - DNA, 15 bp, Homo sapiens
gaaatttggtgttga

SEQ ID NO: 639808 - DNA, 15 bp, Homo sapiens
aaatttggtgttgag

SEQ ID NO: 639809 - DNA, 15 bp, Homo sapiens
aatttggtgttgagt

SEQ ID NO: 639810 - DNA, 15 bp, Homo sapiens
atttggtgttgagta

SEQ ID NO: 639811 - DNA, 15 bp, Homo sapiens
tttggtgttgagtac

SEQ ID NO: 639812 - DNA, 15 bp, Homo sapiens
ttggtgttgagtact

SEQ ID NO: 639813 - DNA, 15 bp, Homo sapiens
tggtgttgagtacta

SEQ ID NO: 639814 - DNA, 15 bp, Homo sapiens
ggtgttgagtactat

SEQ ID NO: 639815 - DNA, 15 bp, Homo sapiens
gtgttgagtactatt

SEQ ID NO: 639816 - DNA, 15 bp, Homo sapiens
tgttgagtactattc

SEQ ID NO: 639817 - DNA, 15 bp, Homo sapiens
gttgagtactattca

SEQ ID NO: 639818 - DNA, 15 bp, Homo sapiens
ttgagtactattcat

SEQ ID NO: 639819 - DNA, 15 bp, Homo sapiens
tgagtactattcatg

SEQ ID NO: 639820 - DNA, 15 bp, Homo sapiens
gagtactattcatga

SEQ ID NO: 639821 - DNA, 15 bp, Homo sapiens
agtactattcatgag

SEQ ID NO: 639822 - DNA, 15 bp, Homo sapiens
gtactattcatgaga

SEQ ID NO: 639823 - DNA, 15 bp, Homo sapiens
tactattcatgagaa

SEQ ID NO: 639824 - DNA, 15 bp, Homo sapiens
actattcatgagaat

SEQ ID NO: 639825 - DNA, 15 bp, Homo sapiens
ctattcatgagaatc

SEQ ID NO: 639826 - DNA, 15 bp, Homo sapiens
tattcatgagaatct

SEQ ID NO: 639827 - DNA, 15 bp, Homo sapiens
attcatgagaatcta

SEQ ID NO: 639828 - DNA, 15 bp, Homo sapiens
ttcatgagaatctag

SEQ ID NO: 639829 - DNA, 15 bp, Homo sapiens
tcatgagaatctagt

SEQ ID NO: 639830 - DNA, 15 bp, Homo sapiens
catgagaatctagta

SEQ ID NO: 639831 - DNA, 15 bp, Homo sapiens
atgagaatctagtaa

SEQ ID NO: 639832 - DNA, 15 bp, Homo sapiens
tgagaatctagtaac

SEQ ID NO: 639833 - DNA, 15 bp, Homo sapiens
gagaatctagtaact

SEQ ID NO: 639834 - DNA, 15 bp, Homo sapiens
agaatctagtaacta

SEQ ID NO: 639835 - DNA, 15 bp, Homo sapiens
gaatctagtaactaa

SEQ ID NO: 639836 - DNA, 15 bp, Homo sapiens
aatctagtaactaaa

SEQ ID NO: 639837 - DNA, 15 bp, Homo sapiens
atctagtaactaaat

SEQ ID NO: 639838 - DNA, 15 bp, Homo sapiens
tctagtaactaaatt

SEQ ID NO: 639839 - DNA, 15 bp, Homo sapiens
ctagtaactaaatta

SEQ ID NO: 639840 - DNA, 15 bp, Homo sapiens
tagtaactaaattaa

SEQ ID NO: 639841 - DNA, 15 bp, Homo sapiens
agtaactaaattaag

SEQ ID NO: 639842 - DNA, 15 bp, Homo sapiens
gtaactaaattaagt

SEQ ID NO: 639843 - DNA, 15 bp, Homo sapiens
taactaaattaagta

SEQ ID NO: 639844 - DNA, 15 bp, Homo sapiens
aactaaattaagtag

SEQ ID NO: 639845 - DNA, 15 bp, Homo sapiens
actaaattaagtagt

SEQ ID NO: 639846 - DNA, 15 bp, Homo sapiens
ctaaattaagtagtc

SEQ ID NO: 639847 - DNA, 15 bp, Homo sapiens
taaattaagtagtcc

SEQ ID NO: 639848 - DNA, 15 bp, Homo sapiens
aaattaagtagtcct

SEQ ID NO: 639849 - DNA, 15 bp, Homo sapiens
aattaagtagtcctc

SEQ ID NO: 639850 - DNA, 15 bp, Homo sapiens
attaagtagtcctcc

SEQ ID NO: 639851 - DNA, 15 bp, Homo sapiens
ttaagtagtcctcct

SEQ ID NO: 639852 - DNA, 15 bp, Homo sapiens
taagtagtcctccta

SEQ ID NO: 639853 - DNA, 15 bp, Homo sapiens
aagtagtcctcctac

SEQ ID NO: 639854 - DNA, 15 bp, Homo sapiens
agtagtcctcctacc

SEQ ID NO: 639855 - DNA, 15 bp, Homo sapiens
gtagtcctcctacct

SEQ ID NO: 639856 - DNA, 15 bp, Homo sapiens
tagtcctcctacctc

SEQ ID NO: 639857 - DNA, 15 bp, Homo sapiens
agtcctcctacctct

SEQ ID NO: 639858 - DNA, 15 bp, Homo sapiens
gtcctcctacctctc

SEQ ID NO: 639859 - DNA, 15 bp, Homo sapiens
tcctcctacctctcc

SEQ ID NO: 639860 - DNA, 15 bp, Homo sapiens
cctcctacctctcct

SEQ ID NO: 639861 - DNA, 15 bp, Homo sapiens
ctcctacctctcctg

SEQ ID NO: 639862 - DNA, 15 bp, Homo sapiens
tcctacctctcctgc

SEQ ID NO: 639863 - DNA, 15 bp, Homo sapiens
cctacctctcctgct

SEQ ID NO: 639864 - DNA, 15 bp, Homo sapiens
ctacctctcctgctc

SEQ ID NO: 639865 - DNA, 15 bp, Homo sapiens
tacctctcctgctct

SEQ ID NO: 639866 - DNA, 15 bp, Homo sapiens
acctctcctgctctt

SEQ ID NO: 639867 - DNA, 15 bp, Homo sapiens
cctctcctgctcttc

SEQ ID NO: 639868 - DNA, 15 bp, Homo sapiens
ctctcctgctcttca

SEQ ID NO: 639869 - DNA, 15 bp, Homo sapiens
tctcctgctcttcac

SEQ ID NO: 639870 - DNA, 15 bp, Homo sapiens
ctcctgctcttcacc

SEQ ID NO: 639871 - DNA, 15 bp, Homo sapiens
tcctgctcttcaccc

SEQ ID NO: 639872 - DNA, 15 bp, Homo sapiens
cctgctcttcaccca

SEQ ID NO: 639873 - DNA, 15 bp, Homo sapiens
ctgctcttcacccat

SEQ ID NO: 639874 - DNA, 15 bp, Homo sapiens
tgctcttcacccata

SEQ ID NO: 639875 - DNA, 15 bp, Homo sapiens
gctcttcacccatag

SEQ ID NO: 639876 - DNA, 15 bp, Homo sapiens
ctcttcacccataga

SEQ ID NO: 639877 - DNA, 15 bp, Homo sapiens
tcttcacccatagat

SEQ ID NO: 639878 - DNA, 15 bp, Homo sapiens
cttcacccatagatg

SEQ ID NO: 639879 - DNA, 15 bp, Homo sapiens
ttcacccatagatga

SEQ ID NO: 639880 - DNA, 15 bp, Homo sapiens
tcacccatagatgat

SEQ ID NO: 639881 - DNA, 15 bp, Homo sapiens
cacccatagatgatc

SEQ ID NO: 639882 - DNA, 15 bp, Homo sapiens
acccatagatgatct

SEQ ID NO: 639883 - DNA, 15 bp, Homo sapiens
cccatagatgatctc

SEQ ID NO: 639884 - DNA, 15 bp, Homo sapiens
ccatagatgatctct

SEQ ID NO: 639885 - DNA, 15 bp, Homo sapiens
catagatgatctctg

SEQ ID NO: 639886 - DNA, 15 bp, Homo sapiens
atagatgatctctga

SEQ ID NO: 639887 - DNA, 15 bp, Homo sapiens
tagatgatctctgaa

SEQ ID NO: 639888 - DNA, 15 bp, Homo sapiens
agatgatctctgaac

SEQ ID NO: 639889 - DNA, 15 bp, Homo sapiens
gatgatctctgaacc

SEQ ID NO: 639890 - DNA, 15 bp, Homo sapiens
atgatctctgaaccc

SEQ ID NO: 639891 - DNA, 15 bp, Homo sapiens
tgatctctgaaccct

SEQ ID NO: 639892 - DNA, 15 bp, Homo sapiens
gatctctgaaccctt

SEQ ID NO: 639893 - DNA, 15 bp, Homo sapiens
atctctgaacccttt

SEQ ID NO: 639894 - DNA, 15 bp, Homo sapiens
tctctgaaccctttg

SEQ ID NO: 639895 - DNA, 15 bp, Homo sapiens
ctctgaaccctttgt

SEQ ID NO: 639896 - DNA, 15 bp, Homo sapiens
tctgaaccctttgtt

SEQ ID NO: 639897 - DNA, 15 bp, Homo sapiens
ctgaaccctttgttt

SEQ ID NO: 639898 - DNA, 15 bp, Homo sapiens
tgaaccctttgtttt

SEQ ID NO: 639899 - DNA, 15 bp, Homo sapiens
gaaccctttgttttt

SEQ ID NO: 639900 - DNA, 15 bp, Homo sapiens
aaccctttgtttttc

SEQ ID NO: 639901 - DNA, 15 bp, Homo sapiens
accctttgtttttca

SEQ ID NO: 639902 - DNA, 15 bp, Homo sapiens
ccctttgtttttcaa

SEQ ID NO: 639903 - DNA, 15 bp, Homo sapiens
cctttgtttttcaag

SEQ ID NO: 639904 - DNA, 15 bp, Homo sapiens
ctttgtttttcaagt

SEQ ID NO: 639905 - DNA, 15 bp, Homo sapiens
tttgtttttcaagtt

SEQ ID NO: 639906 - DNA, 15 bp, Homo sapiens
ttgtttttcaagttt

SEQ ID NO: 639907 - DNA, 15 bp, Homo sapiens
tgtttttcaagtttc

SEQ ID NO: 639908 - DNA, 15 bp, Homo sapiens
gtttttcaagtttcg

SEQ ID NO: 639909 - DNA, 15 bp, Homo sapiens
tttttcaagtttcgg

SEQ ID NO: 639910 - DNA, 15 bp, Homo sapiens
ttttcaagtttcggt

SEQ ID NO: 639911 - DNA, 15 bp, Homo sapiens
tttcaagtttcggtt

SEQ ID NO: 639912 - DNA, 15 bp, Homo sapiens
ttcaagtttcggttt

SEQ ID NO: 639913 - DNA, 15 bp, Homo sapiens
tcaagtttcggtttt

SEQ ID NO: 639914 - DNA, 15 bp, Homo sapiens
caagtttcggttttc

SEQ ID NO: 639915 - DNA, 15 bp, Homo sapiens
aagtttcggttttct

SEQ ID NO: 639916 - DNA, 15 bp, Homo sapiens
agtttcggttttctt

SEQ ID NO: 639917 - DNA, 15 bp, Homo sapiens
gtttcggttttcttc

SEQ ID NO: 639918 - DNA, 15 bp, Homo sapiens
tttcggttttcttca

SEQ ID NO: 639919 - DNA, 15 bp, Homo sapiens
ttcggttttcttcat

SEQ ID NO: 639920 - DNA, 15 bp, Homo sapiens
tcggttttcttcatc

SEQ ID NO: 639921 - DNA, 15 bp, Homo sapiens
cggttttcttcatca

SEQ ID NO: 639922 - DNA, 15 bp, Homo sapiens
ggttttcttcatcaa

SEQ ID NO: 639923 - DNA, 15 bp, Homo sapiens
gttttcttcatcaac

SEQ ID NO: 639924 - DNA, 15 bp, Homo sapiens
ttttcttcatcaact

SEQ ID NO: 639925 - DNA, 15 bp, Homo sapiens
tttcttcatcaactg

SEQ ID NO: 639926 - DNA, 15 bp, Homo sapiens
ttcttcatcaactga

SEQ ID NO: 639927 - DNA, 15 bp, Homo sapiens
tcttcatcaactgac

SEQ ID NO: 639928 - DNA, 15 bp, Homo sapiens
cttcatcaactgaca

SEQ ID NO: 639929 - DNA, 15 bp, Homo sapiens
ttcatcaactgacat

SEQ ID NO: 639930 - DNA, 15 bp, Homo sapiens
tcatcaactgacatt

SEQ ID NO: 639931 - DNA, 15 bp, Homo sapiens
catcaactgacattt

SEQ ID NO: 639932 - DNA, 15 bp, Homo sapiens
atcaactgacatttg

SEQ ID NO: 639933 - DNA, 15 bp, Homo sapiens
tcaactgacatttgg

SEQ ID NO: 639934 - DNA, 15 bp, Homo sapiens
caactgacatttggc

SEQ ID NO: 639935 - DNA, 15 bp, Homo sapiens
aactgacatttggct

SEQ ID NO: 639936 - DNA, 15 bp, Homo sapiens
actgacatttggctg

SEQ ID NO: 639937 - DNA, 15 bp, Homo sapiens
ctgacatttggctga

SEQ ID NO: 639938 - DNA, 15 bp, Homo sapiens
tgacatttggctgat

SEQ ID NO: 639939 - DNA, 15 bp, Homo sapiens
gacatttggctgatg

SEQ ID NO: 639940 - DNA, 15 bp, Homo sapiens
acatttggctgatgt

SEQ ID NO: 639941 - DNA, 15 bp, Homo sapiens
catttggctgatgtt

SEQ ID NO: 639942 - DNA, 15 bp, Homo sapiens
atttggctgatgttt

SEQ ID NO: 639943 - DNA, 15 bp, Homo sapiens
tttggctgatgtttg

SEQ ID NO: 639944 - DNA, 15 bp, Homo sapiens
ttggctgatgtttgt

SEQ ID NO: 639945 - DNA, 15 bp, Homo sapiens
tggctgatgtttgtg

SEQ ID NO: 639946 - DNA, 15 bp, Homo sapiens
ggctgatgtttgtgg

SEQ ID NO: 639947 - DNA, 15 bp, Homo sapiens
gctgatgtttgtggg

SEQ ID NO: 639948 - DNA, 15 bp, Homo sapiens
ctgatgtttgtggga

SEQ ID NO: 639949 - DNA, 15 bp, Homo sapiens
tgatgtttgtgggaa

SEQ ID NO: 639950 - DNA, 15 bp, Homo sapiens
gatgtttgtgggaag

SEQ ID NO: 639951 - DNA, 15 bp, Homo sapiens
atgtttgtgggaagt

SEQ ID NO: 639952 - DNA, 15 bp, Homo sapiens
tgtttgtgggaagtt

SEQ ID NO: 639953 - DNA, 15 bp, Homo sapiens
gtttgtgggaagttt

SEQ ID NO: 639954 - DNA, 15 bp, Homo sapiens
tttgtgggaagtttg

SEQ ID NO: 639955 - DNA, 15 bp, Homo sapiens
ttgtgggaagtttgt

SEQ ID NO: 639956 - DNA, 15 bp, Homo sapiens
tgtgggaagtttgtg

SEQ ID NO: 639957 - DNA, 15 bp, Homo sapiens
gtgggaagtttgtgt

SEQ ID NO: 639958 - DNA, 15 bp, Homo sapiens
tgggaagtttgtgtg

SEQ ID NO: 639959 - DNA, 15 bp, Homo sapiens
gggaagtttgtgtgc

SEQ ID NO: 639960 - DNA, 15 bp, Homo sapiens
ggaagtttgtgtgca

SEQ ID NO: 639961 - DNA, 15 bp, Homo sapiens
gaagtttgtgtgcat

SEQ ID NO: 639962 - DNA, 15 bp, Homo sapiens
aagtttgtgtgcatt

SEQ ID NO: 639963 - DNA, 15 bp, Homo sapiens
agtttgtgtgcattt

SEQ ID NO: 639964 - DNA, 15 bp, Homo sapiens
gtttgtgtgcatttc

SEQ ID NO: 639965 - DNA, 15 bp, Homo sapiens
tttgtgtgcatttct

SEQ ID NO: 639966 - DNA, 15 bp, Homo sapiens
ttgtgtgcatttctc

SEQ ID NO: 639967 - DNA, 15 bp, Homo sapiens
tgtgtgcatttctcc

SEQ ID NO: 639968 - DNA, 15 bp, Homo sapiens
gtgtgcatttctcca

SEQ ID NO: 639969 - DNA, 15 bp, Homo sapiens
tgtgcatttctccat

SEQ ID NO: 639970 - DNA, 15 bp, Homo sapiens
gtgcatttctccatg

SEQ ID NO: 639971 - DNA, 15 bp, Homo sapiens
tgcatttctccatgg

SEQ ID NO: 639972 - DNA, 15 bp, Homo sapiens
gcatttctccatgga

SEQ ID NO: 639973 - DNA, 15 bp, Homo sapiens
catttctccatggaa

SEQ ID NO: 639974 - DNA, 15 bp, Homo sapiens
atttctccatggaat

SEQ ID NO: 639975 - DNA, 15 bp, Homo sapiens
tttctccatggaata

SEQ ID NO: 639976 - DNA, 15 bp, Homo sapiens
ttctccatggaatag

SEQ ID NO: 639977 - DNA, 15 bp, Homo sapiens
tctccatggaatagc

SEQ ID NO: 639978 - DNA, 15 bp, Homo sapiens
ctccatggaatagcc

SEQ ID NO: 639979 - DNA, 15 bp, Homo sapiens
tccatggaatagccc

SEQ ID NO: 639980 - DNA, 15 bp, Homo sapiens
ccatggaatagccca

SEQ ID NO: 639981 - DNA, 15 bp, Homo sapiens
catggaatagcccag

SEQ ID NO: 639982 - DNA, 15 bp, Homo sapiens
atggaatagcccagc

SEQ ID NO: 639983 - DNA, 15 bp, Homo sapiens
tggaatagcccagcc

SEQ ID NO: 639984 - DNA, 15 bp, Homo sapiens
ggaatagcccagcca

SEQ ID NO: 639985 - DNA, 15 bp, Homo sapiens
gaatagcccagccag

SEQ ID NO: 639986 - DNA, 15 bp, Homo sapiens
aatagcccagccagg

SEQ ID NO: 639987 - DNA, 15 bp, Homo sapiens
atagcccagccaggc

SEQ ID NO: 639988 - DNA, 15 bp, Homo sapiens
tagcccagccaggcg

SEQ ID NO: 639989 - DNA, 15 bp, Homo sapiens
agcccagccaggcgt

SEQ ID NO: 639990 - DNA, 15 bp, Homo sapiens
gcccagccaggcgtg

SEQ ID NO: 639991 - DNA, 15 bp, Homo sapiens
cccagccaggcgtgc

SEQ ID NO: 639992 - DNA, 15 bp, Homo sapiens
ccagccaggcgtgct

SEQ ID NO: 639993 - DNA, 15 bp, Homo sapiens
cagccaggcgtgcta

SEQ ID NO: 639994 - DNA, 15 bp, Homo sapiens
agccaggcgtgctac

SEQ ID NO: 639995 - DNA, 15 bp, Homo sapiens
gccaggcgtgctact

SEQ ID NO: 639996 - DNA, 15 bp, Homo sapiens
ccaggcgtgctactc

SEQ ID NO: 639997 - DNA, 15 bp, Homo sapiens
caggcgtgctactca

SEQ ID NO: 639998 - DNA, 15 bp, Homo sapiens
aggcgtgctactcat

SEQ ID NO: 639999 - DNA, 15 bp, Homo sapiens
ggcgtgctactcatt

SEQ ID NO: 640000 - DNA, 15 bp, Homo sapiens
gcgtgctactcattt

SEQ ID NO: 640001 - DNA, 15 bp, Homo sapiens
cgtgctactcatttt

SEQ ID NO: 640002 - DNA, 15 bp, Homo sapiens
gtgctactcattttt

SEQ ID NO: 640003 - DNA, 15 bp, Homo sapiens
tgctactcatttttg

SEQ ID NO: 640004 - DNA, 15 bp, Homo sapiens
gctactcatttttgg

SEQ ID NO: 640005 - DNA, 15 bp, Homo sapiens
ctactcatttttggc

SEQ ID NO: 640006 - DNA, 15 bp, Homo sapiens
tactcatttttggca

SEQ ID NO: 640007 - DNA, 15 bp, Homo sapiens
actcatttttggcac

SEQ ID NO: 640008 - DNA, 15 bp, Homo sapiens
ctcatttttggcaca

SEQ ID NO: 640009 - DNA, 15 bp, Homo sapiens
tcatttttggcacaa

SEQ ID NO: 640010 - DNA, 15 bp, Homo sapiens
catttttggcacaat

SEQ ID NO: 640011 - DNA, 15 bp, Homo sapiens
atttttggcacaatg

SEQ ID NO: 640012 - DNA, 15 bp, Homo sapiens
tttttggcacaatga

SEQ ID NO: 640013 - DNA, 15 bp, Homo sapiens
ttttggcacaatgac

SEQ ID NO: 640014 - DNA, 15 bp, Homo sapiens
tttggcacaatgaca

SEQ ID NO: 640015 - DNA, 15 bp, Homo sapiens
ttggcacaatgacag

SEQ ID NO: 640016 - DNA, 15 bp, Homo sapiens
tggcacaatgacaga

SEQ ID NO: 640017 - DNA, 15 bp, Homo sapiens
ggcacaatgacagat

SEQ ID NO: 640018 - DNA, 15 bp, Homo sapiens
gcacaatgacagatg

SEQ ID NO: 640019 - DNA, 15 bp, Homo sapiens
cacaatgacagatgt

SEQ ID NO: 640020 - DNA, 15 bp, Homo sapiens
acaatgacagatgtt

SEQ ID NO: 640021 - DNA, 15 bp, Homo sapiens
caatgacagatgttt

SEQ ID NO: 640022 - DNA, 15 bp, Homo sapiens
aatgacagatgtttt

SEQ ID NO: 640023 - DNA, 15 bp, Homo sapiens
atgacagatgttttt

SEQ ID NO: 640024 - DNA, 15 bp, Homo sapiens
tgacagatgttttta

SEQ ID NO: 640025 - DNA, 15 bp, Homo sapiens
gacagatgtttttat

SEQ ID NO: 640026 - DNA, 15 bp, Homo sapiens
acagatgtttttatt

SEQ ID NO: 640027 - DNA, 15 bp, Homo sapiens
cagatgtttttattg

SEQ ID NO: 640028 - DNA, 15 bp, Homo sapiens
agatgtttttattga

SEQ ID NO: 640029 - DNA, 15 bp, Homo sapiens
gatgtttttattgac

SEQ ID NO: 640030 - DNA, 15 bp, Homo sapiens
atgtttttattgact

SEQ ID NO: 640031 - DNA, 15 bp, Homo sapiens
tgtttttattgacta

SEQ ID NO: 640032 - DNA, 15 bp, Homo sapiens
gtttttattgactac

SEQ ID NO: 640033 - DNA, 15 bp, Homo sapiens
tttttattgactacg

SEQ ID NO: 640034 - DNA, 15 bp, Homo sapiens
ttttattgactacga

SEQ ID NO: 640035 - DNA, 15 bp, Homo sapiens
tttattgactacgac

SEQ ID NO: 640036 - DNA, 15 bp, Homo sapiens
ttattgactacgacg

SEQ ID NO: 640037 - DNA, 15 bp, Homo sapiens
tattgactacgacgt

SEQ ID NO: 640038 - DNA, 15 bp, Homo sapiens
attgactacgacgtt

SEQ ID NO: 640039 - DNA, 15 bp, Homo sapiens
ttgactacgacgttg

SEQ ID NO: 640040 - DNA, 15 bp, Homo sapiens
tgactacgacgttga

SEQ ID NO: 640041 - DNA, 15 bp, Homo sapiens
gactacgacgttgag

SEQ ID NO: 640042 - DNA, 15 bp, Homo sapiens
actacgacgttgagt

SEQ ID NO: 640043 - DNA, 15 bp, Homo sapiens
ctacgacgttgagtt

SEQ ID NO: 640044 - DNA, 15 bp, Homo sapiens
tacgacgttgagtta

SEQ ID NO: 640045 - DNA, 15 bp, Homo sapiens
acgacgttgagttac

SEQ ID NO: 640046 - DNA, 15 bp, Homo sapiens
cgacgttgagttaca

SEQ ID NO: 640047 - DNA, 15 bp, Homo sapiens
gacgttgagttacaa

SEQ ID NO: 640048 - DNA, 15 bp, Homo sapiens
acgttgagttacaag

SEQ ID NO: 640049 - DNA, 15 bp, Homo sapiens
cgttgagttacaaga

SEQ ID NO: 640050 - DNA, 15 bp, Homo sapiens
gttgagttacaagaa

SEQ ID NO: 640051 - DNA, 15 bp, Homo sapiens
ttgagttacaagaac

SEQ ID NO: 640052 - DNA, 15 bp, Homo sapiens
tgagttacaagaact

SEQ ID NO: 640053 - DNA, 15 bp, Homo sapiens
gagttacaagaactc

SEQ ID NO: 640054 - DNA, 15 bp, Homo sapiens
agttacaagaactcc

SEQ ID NO: 640055 - DNA, 15 bp, Homo sapiens
gttacaagaactcca

SEQ ID NO: 640056 - DNA, 15 bp, Homo sapiens
ttacaagaactccag

SEQ ID NO: 640057 - DNA, 15 bp, Homo sapiens
tacaagaactccaga

SEQ ID NO: 640058 - DNA, 15 bp, Homo sapiens
acaagaactccagat

SEQ ID NO: 640059 - DNA, 15 bp, Homo sapiens
caagaactccagatt

SEQ ID NO: 640060 - DNA, 15 bp, Homo sapiens
aagaactccagattc

SEQ ID NO: 640061 - DNA, 15 bp, Homo sapiens
agaactccagattcc

SEQ ID NO: 640062 - DNA, 15 bp, Homo sapiens
gaactccagattcca

SEQ ID NO: 640063 - DNA, 15 bp, Homo sapiens
aactccagattccag

SEQ ID NO: 640064 - DNA, 15 bp, Homo sapiens
actccagattccagg

SEQ ID NO: 640065 - DNA, 15 bp, Homo sapiens
ctccagattccagga

SEQ ID NO: 640066 - DNA, 15 bp, Homo sapiens
tccagattccaggaa

SEQ ID NO: 640067 - DNA, 15 bp, Homo sapiens
ccagattccaggaaa

SEQ ID NO: 640068 - DNA, 15 bp, Homo sapiens
cagattccaggaaaa

SEQ ID NO: 640069 - DNA, 15 bp, Homo sapiens
agattccaggaaaag

SEQ ID NO: 640070 - DNA, 15 bp, Homo sapiens
gattccaggaaaagc

SEQ ID NO: 640071 - DNA, 15 bp, Homo sapiens
attccaggaaaagca

SEQ ID NO: 640072 - DNA, 15 bp, Homo sapiens
ttccaggaaaagcat

SEQ ID NO: 640073 - DNA, 15 bp, Homo sapiens
tccaggaaaagcatg

SEQ ID NO: 640074 - DNA, 15 bp, Homo sapiens
ccaggaaaagcatgt

SEQ ID NO: 640075 - DNA, 15 bp, Homo sapiens
caggaaaagcatgtg

SEQ ID NO: 640076 - DNA, 15 bp, Homo sapiens
aggaaaagcatgtgt

SEQ ID NO: 640077 - DNA, 15 bp, Homo sapiens
ggaaaagcatgtgtg

SEQ ID NO: 640078 - DNA, 15 bp, Homo sapiens
gaaaagcatgtgtga

SEQ ID NO: 640079 - DNA, 15 bp, Homo sapiens
aaaagcatgtgtgaa

SEQ ID NO: 640080 - DNA, 15 bp, Homo sapiens
aaagcatgtgtgaat

SEQ ID NO: 640081 - DNA, 15 bp, Homo sapiens
aagcatgtgtgaata

SEQ ID NO: 640082 - DNA, 15 bp, Homo sapiens
agcatgtgtgaataa

SEQ ID NO: 640083 - DNA, 15 bp, Homo sapiens
gcatgtgtgaataac

SEQ ID NO: 640084 - DNA, 15 bp, Homo sapiens
catgtgtgaataaca

SEQ ID NO: 640085 - DNA, 15 bp, Homo sapiens
atgtgtgaataacac

SEQ ID NO: 640086 - DNA, 15 bp, Homo sapiens
tgtgtgaataacacc

SEQ ID NO: 640087 - DNA, 15 bp, Homo sapiens
gtgtgaataacacca

SEQ ID NO: 640088 - DNA, 15 bp, Homo sapiens
tgtgaataacaccat

SEQ ID NO: 640089 - DNA, 15 bp, Homo sapiens
gtgaataacaccatt

SEQ ID NO: 640090 - DNA, 15 bp, Homo sapiens
tgaataacaccattg

SEQ ID NO: 640091 - DNA, 15 bp, Homo sapiens
gaataacaccattgt

SEQ ID NO: 640092 - DNA, 15 bp, Homo sapiens
aataacaccattgta

SEQ ID NO: 640093 - DNA, 15 bp, Homo sapiens
ataacaccattgtat

SEQ ID NO: 640094 - DNA, 15 bp, Homo sapiens
taacaccattgtatg

SEQ ID NO: 640095 - DNA, 15 bp, Homo sapiens
aacaccattgtatgg

SEQ ID NO: 640096 - DNA, 15 bp, Homo sapiens
acaccattgtatgga

SEQ ID NO: 640097 - DNA, 15 bp, Homo sapiens
caccattgtatggac

SEQ ID NO: 640098 - DNA, 15 bp, Homo sapiens
accattgtatggact

SEQ ID NO: 640099 - DNA, 15 bp, Homo sapiens
ccattgtatggacta

SEQ ID NO: 640100 - DNA, 15 bp, Homo sapiens
cattgtatggactaa

SEQ ID NO: 640101 - DNA, 15 bp, Homo sapiens
attgtatggactaac

SEQ ID NO: 640102 - DNA, 15 bp, Homo sapiens
ttgtatggactaaca

SEQ ID NO: 640103 - DNA, 15 bp, Homo sapiens
tgtatggactaacag

SEQ ID NO: 640104 - DNA, 15 bp, Homo sapiens
gtatggactaacagt

SEQ ID NO: 640105 - DNA, 15 bp, Homo sapiens
tatggactaacagtt

SEQ ID NO: 640106 - DNA, 15 bp, Homo sapiens
atggactaacagttc

SEQ ID NO: 640107 - DNA, 15 bp, Homo sapiens
tggactaacagttcc

SEQ ID NO: 640108 - DNA, 15 bp, Homo sapiens
ggactaacagttccc

SEQ ID NO: 640109 - DNA, 15 bp, Homo sapiens
gactaacagttccct

SEQ ID NO: 640110 - DNA, 15 bp, Homo sapiens
actaacagttccctc

SEQ ID NO: 640111 - DNA, 15 bp, Homo sapiens
ctaacagttccctca

SEQ ID NO: 640112 - DNA, 15 bp, Homo sapiens
taacagttccctcaa

SEQ ID NO: 640113 - DNA, 15 bp, Homo sapiens
aacagttccctcaac

SEQ ID NO: 640114 - DNA, 15 bp, Homo sapiens
acagttccctcaacc

SEQ ID NO: 640115 - DNA, 15 bp, Homo sapiens
cagttccctcaacca

SEQ ID NO: 640116 - DNA, 15 bp, Homo sapiens
agttccctcaaccag

SEQ ID NO: 640117 - DNA, 15 bp, Homo sapiens
gttccctcaaccaga

SEQ ID NO: 640118 - DNA, 15 bp, Homo sapiens
ttccctcaaccagaa

SEQ ID NO: 640119 - DNA, 15 bp, Homo sapiens
tccctcaaccagaac

SEQ ID NO: 640120 - DNA, 15 bp, Homo sapiens
ccctcaaccagaaca

SEQ ID NO: 640121 - DNA, 15 bp, Homo sapiens
cctcaaccagaacat

SEQ ID NO: 640122 - DNA, 15 bp, Homo sapiens
ctcaaccagaacatg

SEQ ID NO: 640123 - DNA, 15 bp, Homo sapiens
tcaaccagaacatga

SEQ ID NO: 640124 - DNA, 15 bp, Homo sapiens
caaccagaacatgac

SEQ ID NO: 640125 - DNA, 15 bp, Homo sapiens
aaccagaacatgaca

SEQ ID NO: 640126 - DNA, 15 bp, Homo sapiens
accagaacatgacaa

SEQ ID NO: 640127 - DNA, 15 bp, Homo sapiens
ccagaacatgacaaa

SEQ ID NO: 640128 - DNA, 15 bp, Homo sapiens
cagaacatgacaaat

SEQ ID NO: 640129 - DNA, 15 bp, Homo sapiens
agaacatgacaaatg

SEQ ID NO: 640130 - DNA, 15 bp, Homo sapiens
gaacatgacaaatgg

SEQ ID NO: 640131 - DNA, 15 bp, Homo sapiens
aacatgacaaatgga

SEQ ID NO: 640132 - DNA, 15 bp, Homo sapiens
acatgacaaatggaa

SEQ ID NO: 640133 - DNA, 15 bp, Homo sapiens
catgacaaatggaac

SEQ ID NO: 640134 - DNA, 15 bp, Homo sapiens
atgacaaatggaaca

SEQ ID NO: 640135 - DNA, 15 bp, Homo sapiens
tgacaaatggaacac

SEQ ID NO: 640136 - DNA, 15 bp, Homo sapiens
gacaaatggaacacg

SEQ ID NO: 640137 - DNA, 15 bp, Homo sapiens
acaaatggaacacgt

SEQ ID NO: 640138 - DNA, 15 bp, Homo sapiens
caaatggaacacgtt

SEQ ID NO: 640139 - DNA, 15 bp, Homo sapiens
aaatggaacacgttg

SEQ ID NO: 640140 - DNA, 15 bp, Homo sapiens
aatggaacacgttgt

SEQ ID NO: 640141 - DNA, 15 bp, Homo sapiens
atggaacacgttgtg

SEQ ID NO: 640142 - DNA, 15 bp, Homo sapiens
tggaacacgttgtgg

SEQ ID NO: 640143 - DNA, 15 bp, Homo sapiens
ggaacacgttgtggg

SEQ ID NO: 640144 - DNA, 15 bp, Homo sapiens
gaacacgttgtgggt

SEQ ID NO: 640145 - DNA, 15 bp, Homo sapiens
aacacgttgtgggta

SEQ ID NO: 640146 - DNA, 15 bp, Homo sapiens
acacgttgtgggtag

SEQ ID NO: 640147 - DNA, 15 bp, Homo sapiens
cacgttgtgggtagg

SEQ ID NO: 640148 - DNA, 15 bp, Homo sapiens
acgttgtgggtaggt

SEQ ID NO: 640149 - DNA, 15 bp, Homo sapiens
cgttgtgggtaggtt

SEQ ID NO: 640150 - DNA, 15 bp, Homo sapiens
gttgtgggtaggttg

SEQ ID NO: 640151 - DNA, 15 bp, Homo sapiens
ttgtgggtaggttgt

SEQ ID NO: 640152 - DNA, 15 bp, Homo sapiens
tgtgggtaggttgtt

SEQ ID NO: 640153 - DNA, 15 bp, Homo sapiens
gtgggtaggttgttt

SEQ ID NO: 640154 - DNA, 15 bp, Homo sapiens
tgggtaggttgtttt

SEQ ID NO: 640155 - DNA, 15 bp, Homo sapiens
gggtaggttgttttt

SEQ ID NO: 640156 - DNA, 15 bp, Homo sapiens
ggtaggttgtttttg

SEQ ID NO: 640157 - DNA, 15 bp, Homo sapiens
gtaggttgtttttgt

SEQ ID NO: 640158 - DNA, 15 bp, Homo sapiens
taggttgtttttgtt

SEQ ID NO: 640159 - DNA, 15 bp, Homo sapiens
aggttgtttttgttt

SEQ ID NO: 640160 - DNA, 15 bp, Homo sapiens
ggttgtttttgtttt

SEQ ID NO: 640161 - DNA, 15 bp, Homo sapiens
gttgtttttgttttt

SEQ ID NO: 640162 - DNA, 15 bp, Homo sapiens
ttgtttttgttttta

SEQ ID NO: 640163 - DNA, 15 bp, Homo sapiens
tgtttttgtttttaa

SEQ ID NO: 640164 - DNA, 15 bp, Homo sapiens
gtttttgtttttaat

SEQ ID NO: 640165 - DNA, 15 bp, Homo sapiens
tttttgtttttaatt

SEQ ID NO: 640166 - DNA, 15 bp, Homo sapiens
ttttgtttttaattt

SEQ ID NO: 640167 - DNA, 15 bp, Homo sapiens
tttgtttttaatttt

SEQ ID NO: 640168 - DNA, 15 bp, Homo sapiens
ttgtttttaattttt

SEQ ID NO: 640169 - DNA, 15 bp, Homo sapiens
tgtttttaatttttt

SEQ ID NO: 640170 - DNA, 15 bp, Homo sapiens
gtttttaatttttta

SEQ ID NO: 640171 - DNA, 15 bp, Homo sapiens
tttttaattttttac

SEQ ID NO: 640172 - DNA, 15 bp, Homo sapiens
ttttaattttttact

SEQ ID NO: 640173 - DNA, 15 bp, Homo sapiens
tttaattttttactt

SEQ ID NO: 640174 - DNA, 15 bp, Homo sapiens
ttaattttttacttt

SEQ ID NO: 640175 - DNA, 15 bp, Homo sapiens
taattttttactttt

SEQ ID NO: 640176 - DNA, 15 bp, Homo sapiens
aattttttacttttt

SEQ ID NO: 640177 - DNA, 15 bp, Homo sapiens
attttttactttttt

SEQ ID NO: 640178 - DNA, 15 bp, Homo sapiens
ttttttacttttttg

SEQ ID NO: 640179 - DNA, 15 bp, Homo sapiens
tttttacttttttgc

SEQ ID NO: 640180 - DNA, 15 bp, Homo sapiens
ttttacttttttgct

SEQ ID NO: 640181 - DNA, 15 bp, Homo sapiens
tttacttttttgctc

SEQ ID NO: 640182 - DNA, 15 bp, Homo sapiens
ttacttttttgctca

SEQ ID NO: 640183 - DNA, 15 bp, Homo sapiens
tacttttttgctcat

SEQ ID NO: 640184 - DNA, 15 bp, Homo sapiens
acttttttgctcata

SEQ ID NO: 640185 - DNA, 15 bp, Homo sapiens
cttttttgctcatat

SEQ ID NO: 640186 - DNA, 15 bp, Homo sapiens
ttttttgctcatatc

SEQ ID NO: 640187 - DNA, 15 bp, Homo sapiens
tttttgctcatatct

SEQ ID NO: 640188 - DNA, 15 bp, Homo sapiens
ttttgctcatatctt

SEQ ID NO: 640189 - DNA, 15 bp, Homo sapiens
tttgctcatatctta

SEQ ID NO: 640190 - DNA, 15 bp, Homo sapiens
ttgctcatatcttaa

SEQ ID NO: 640191 - DNA, 15 bp, Homo sapiens
tgctcatatcttaaa

SEQ ID NO: 640192 - DNA, 15 bp, Homo sapiens
gctcatatcttaaat

SEQ ID NO: 640193 - DNA, 15 bp, Homo sapiens
ctcatatcttaaatt

SEQ ID NO: 640194 - DNA, 15 bp, Homo sapiens
tcatatcttaaattg

SEQ ID NO: 640195 - DNA, 15 bp, Homo sapiens
catatcttaaattgt

SEQ ID NO: 640196 - DNA, 15 bp, Homo sapiens
atatcttaaattgta

SEQ ID NO: 640197 - DNA, 15 bp, Homo sapiens
tatcttaaattgtaa

SEQ ID NO: 640198 - DNA, 15 bp, Homo sapiens
atcttaaattgtaat

SEQ ID NO: 640199 - DNA, 15 bp, Homo sapiens
tcttaaattgtaatt

SEQ ID NO: 640200 - DNA, 15 bp, Homo sapiens
cttaaattgtaattc

SEQ ID NO: 640201 - DNA, 15 bp, Homo sapiens
ttaaattgtaattca

SEQ ID NO: 640202 - DNA, 15 bp, Homo sapiens
taaattgtaattcaa

SEQ ID NO: 640203 - DNA, 15 bp, Homo sapiens
aaattgtaattcaaa

SEQ ID NO: 640204 - DNA, 15 bp, Homo sapiens
aattgtaattcaaaa

SEQ ID NO: 640205 - DNA, 15 bp, Homo sapiens
attgtaattcaaaat

SEQ ID NO: 640206 - DNA, 15 bp, Homo sapiens
ttgtaattcaaaatg

SEQ ID NO: 640207 - DNA, 15 bp, Homo sapiens
tgtaattcaaaatgt

SEQ ID NO: 640208 - DNA, 15 bp, Homo sapiens
gtaattcaaaatgta

SEQ ID NO: 640209 - DNA, 15 bp, Homo sapiens
taattcaaaatgtat

SEQ ID NO: 640210 - DNA, 15 bp, Homo sapiens
aattcaaaatgtata

SEQ ID NO: 640211 - DNA, 15 bp, Homo sapiens
attcaaaatgtatag

SEQ ID NO: 640212 - DNA, 15 bp, Homo sapiens
ttcaaaatgtataga

SEQ ID NO: 640213 - DNA, 15 bp, Homo sapiens
tcaaaatgtatagag

SEQ ID NO: 640214 - DNA, 15 bp, Homo sapiens
caaaatgtatagagg

SEQ ID NO: 640215 - DNA, 15 bp, Homo sapiens
aaaatgtatagaggg

SEQ ID NO: 640216 - DNA, 15 bp, Homo sapiens
aaatgtatagagggg

SEQ ID NO: 640217 - DNA, 15 bp, Homo sapiens
aatgtatagagggga

SEQ ID NO: 640218 - DNA, 15 bp, Homo sapiens
atgtatagaggggat

SEQ ID NO: 640219 - DNA, 15 bp, Homo sapiens
tgtatagaggggatt

SEQ ID NO: 640220 - DNA, 15 bp, Homo sapiens
gtatagaggggattt

SEQ ID NO: 640221 - DNA, 15 bp, Homo sapiens
tatagaggggatttt

SEQ ID NO: 640222 - DNA, 15 bp, Homo sapiens
atagaggggatttta

SEQ ID NO: 640223 - DNA, 15 bp, Homo sapiens
tagaggggattttac

SEQ ID NO: 640224 - DNA, 15 bp, Homo sapiens
agaggggattttact

SEQ ID NO: 640225 - DNA, 15 bp, Homo sapiens
gaggggattttactg

SEQ ID NO: 640226 - DNA, 15 bp, Homo sapiens
aggggattttactgg

SEQ ID NO: 640227 - DNA, 15 bp, Homo sapiens
ggggattttactggc

SEQ ID NO: 640228 - DNA, 15 bp, Homo sapiens
gggattttactggct

SEQ ID NO: 640229 - DNA, 15 bp, Homo sapiens
ggattttactggctg

SEQ ID NO: 640230 - DNA, 15 bp, Homo sapiens
gattttactggctga

SEQ ID NO: 640231 - DNA, 15 bp, Homo sapiens
attttactggctgag

SEQ ID NO: 640232 - DNA, 15 bp, Homo sapiens
ttttactggctgagc

SEQ ID NO: 640233 - DNA, 15 bp, Homo sapiens
tttactggctgagct

SEQ ID NO: 640234 - DNA, 15 bp, Homo sapiens
ttactggctgagctg

SEQ ID NO: 640235 - DNA, 15 bp, Homo sapiens
tactggctgagctgg

SEQ ID NO: 640236 - DNA, 15 bp, Homo sapiens
actggctgagctgga

SEQ ID NO: 640237 - DNA, 15 bp, Homo sapiens
ctggctgagctggag

SEQ ID NO: 640238 - DNA, 15 bp, Homo sapiens
tggctgagctggagt

SEQ ID NO: 640239 - DNA, 15 bp, Homo sapiens
ggctgagctggagtg

SEQ ID NO: 640240 - DNA, 15 bp, Homo sapiens
gctgagctggagtgg

SEQ ID NO: 640241 - DNA, 15 bp, Homo sapiens
ctgagctggagtggt

SEQ ID NO: 640242 - DNA, 15 bp, Homo sapiens
tgagctggagtggta

SEQ ID NO: 640243 - DNA, 15 bp, Homo sapiens
gagctggagtggtat

SEQ ID NO: 640244 - DNA, 15 bp, Homo sapiens
agctggagtggtatc

SEQ ID NO: 640245 - DNA, 15 bp, Homo sapiens
gctggagtggtatct

SEQ ID NO: 640246 - DNA, 15 bp, Homo sapiens
ctggagtggtatcta

SEQ ID NO: 640247 - DNA, 15 bp, Homo sapiens
tggagtggtatctaa

SEQ ID NO: 640248 - DNA, 15 bp, Homo sapiens
ggagtggtatctaac

SEQ ID NO: 640249 - DNA, 15 bp, Homo sapiens
gagtggtatctaaca

SEQ ID NO: 640250 - DNA, 15 bp, Homo sapiens
agtggtatctaacac

SEQ ID NO: 640251 - DNA, 15 bp, Homo sapiens
gtggtatctaacaca

SEQ ID NO: 640252 - DNA, 15 bp, Homo sapiens
tggtatctaacacaa

SEQ ID NO: 640253 - DNA, 15 bp, Homo sapiens
ggtatctaacacaaa

SEQ ID NO: 640254 - DNA, 15 bp, Homo sapiens
gtatctaacacaaag

SEQ ID NO: 640255 - DNA, 15 bp, Homo sapiens
tatctaacacaaaga

SEQ ID NO: 640256 - DNA, 15 bp, Homo sapiens
atctaacacaaagag

SEQ ID NO: 640257 - DNA, 15 bp, Homo sapiens
tctaacacaaagaga

SEQ ID NO: 640258 - DNA, 15 bp, Homo sapiens
ctaacacaaagagaa

SEQ ID NO: 640259 - DNA, 15 bp, Homo sapiens
taacacaaagagaat

SEQ ID NO: 640260 - DNA, 15 bp, Homo sapiens
aacacaaagagaata

SEQ ID NO: 640261 - DNA, 15 bp, Homo sapiens
acacaaagagaatag

SEQ ID NO: 640262 - DNA, 15 bp, Homo sapiens
cacaaagagaataga

SEQ ID NO: 640263 - DNA, 15 bp, Homo sapiens
acaaagagaatagaa

SEQ ID NO: 640264 - DNA, 15 bp, Homo sapiens
caaagagaatagaaa

SEQ ID NO: 640265 - DNA, 15 bp, Homo sapiens
aaagagaatagaaac

SEQ ID NO: 640266 - DNA, 15 bp, Homo sapiens
aagagaatagaaaca

SEQ ID NO: 640267 - DNA, 15 bp, Homo sapiens
agagaatagaaacat

SEQ ID NO: 640268 - DNA, 15 bp, Homo sapiens
gagaatagaaacatg

SEQ ID NO: 640269 - DNA, 15 bp, Homo sapiens
agaatagaaacatga

SEQ ID NO: 640270 - DNA, 15 bp, Homo sapiens
gaatagaaacatgag

SEQ ID NO: 640271 - DNA, 15 bp, Homo sapiens
aatagaaacatgagt

SEQ ID NO: 640272 - DNA, 15 bp, Homo sapiens
atagaaacatgagtt

SEQ ID NO: 640273 - DNA, 15 bp, Homo sapiens
tagaaacatgagttt

SEQ ID NO: 640274 - DNA, 15 bp, Homo sapiens
agaaacatgagttta

SEQ ID NO: 640275 - DNA, 15 bp, Homo sapiens
gaaacatgagtttac

SEQ ID NO: 640276 - DNA, 15 bp, Homo sapiens
aaacatgagtttacc

SEQ ID NO: 640277 - DNA, 15 bp, Homo sapiens
aacatgagtttaccc

SEQ ID NO: 640278 - DNA, 15 bp, Homo sapiens
acatgagtttaccca

SEQ ID NO: 640279 - DNA, 15 bp, Homo sapiens
catgagtttacccat

SEQ ID NO: 640280 - DNA, 15 bp, Homo sapiens
atgagtttacccata

SEQ ID NO: 640281 - DNA, 15 bp, Homo sapiens
tgagtttacccatat

SEQ ID NO: 640282 - DNA, 15 bp, Homo sapiens
gagtttacccatatt

SEQ ID NO: 640283 - DNA, 15 bp, Homo sapiens
agtttacccatattt

SEQ ID NO: 640284 - DNA, 15 bp, Homo sapiens
gtttacccatatttc

SEQ ID NO: 640285 - DNA, 15 bp, Homo sapiens
tttacccatatttct

SEQ ID NO: 640286 - DNA, 15 bp, Homo sapiens
ttacccatatttcta

SEQ ID NO: 640287 - DNA, 15 bp, Homo sapiens
tacccatatttctag

SEQ ID NO: 640288 - DNA, 15 bp, Homo sapiens
acccatatttctaga

SEQ ID NO: 640289 - DNA, 15 bp, Homo sapiens
cccatatttctagaa

SEQ ID NO: 640290 - DNA, 15 bp, Homo sapiens
ccatatttctagaaa

SEQ ID NO: 640291 - DNA, 15 bp, Homo sapiens
catatttctagaaat

SEQ ID NO: 640292 - DNA, 15 bp, Homo sapiens
atatttctagaaatt

SEQ ID NO: 640293 - DNA, 15 bp, Homo sapiens
tatttctagaaatta

SEQ ID NO: 640294 - DNA, 15 bp, Homo sapiens
atttctagaaattac

SEQ ID NO: 640295 - DNA, 15 bp, Homo sapiens
tttctagaaattact

SEQ ID NO: 640296 - DNA, 15 bp, Homo sapiens
ttctagaaattactc

SEQ ID NO: 640297 - DNA, 15 bp, Homo sapiens
tctagaaattactct

SEQ ID NO: 640298 - DNA, 15 bp, Homo sapiens
ctagaaattactctg

SEQ ID NO: 640299 - DNA, 15 bp, Homo sapiens
tagaaattactctgc

SEQ ID NO: 640300 - DNA, 15 bp, Homo sapiens
agaaattactctgcc

SEQ ID NO: 640301 - DNA, 15 bp, Homo sapiens
gaaattactctgcct

SEQ ID NO: 640302 - DNA, 15 bp, Homo sapiens
aaattactctgcctc

SEQ ID NO: 640303 - DNA, 15 bp, Homo sapiens
aattactctgcctca

SEQ ID NO: 640304 - DNA, 15 bp, Homo sapiens
attactctgcctcaa

SEQ ID NO: 640305 - DNA, 15 bp, Homo sapiens
ttactctgcctcaag

SEQ ID NO: 640306 - DNA, 15 bp, Homo sapiens
tactctgcctcaagt

SEQ ID NO: 640307 - DNA, 15 bp, Homo sapiens
actctgcctcaagtt

SEQ ID NO: 640308 - DNA, 15 bp, Homo sapiens
ctctgcctcaagttt

SEQ ID NO: 640309 - DNA, 15 bp, Homo sapiens
tctgcctcaagtttc

SEQ ID NO: 640310 - DNA, 15 bp, Homo sapiens
ctgcctcaagtttcc

SEQ ID NO: 640311 - DNA, 15 bp, Homo sapiens
tgcctcaagtttcct

SEQ ID NO: 640312 - DNA, 15 bp, Homo sapiens
gcctcaagtttcctt

SEQ ID NO: 640313 - DNA, 15 bp, Homo sapiens
cctcaagtttccttc

SEQ ID NO: 640314 - DNA, 15 bp, Homo sapiens
ctcaagtttccttct

SEQ ID NO: 640315 - DNA, 15 bp, Homo sapiens
tcaagtttccttcta

SEQ ID NO: 640316 - DNA, 15 bp, Homo sapiens
caagtttccttctat

SEQ ID NO: 640317 - DNA, 15 bp, Homo sapiens
aagtttccttctatc

SEQ ID NO: 640318 - DNA, 15 bp, Homo sapiens
agtttccttctatct

SEQ ID NO: 640319 - DNA, 15 bp, Homo sapiens
gtttccttctatctt

SEQ ID NO: 640320 - DNA, 15 bp, Homo sapiens
tttccttctatctta

SEQ ID NO: 640321 - DNA, 15 bp, Homo sapiens
ttccttctatcttac

SEQ ID NO: 640322 - DNA, 15 bp, Homo sapiens
tccttctatcttact

SEQ ID NO: 640323 - DNA, 15 bp, Homo sapiens
ccttctatcttacta

SEQ ID NO: 640324 - DNA, 15 bp, Homo sapiens
cttctatcttactat

SEQ ID NO: 640325 - DNA, 15 bp, Homo sapiens
ttctatcttactatg

SEQ ID NO: 640326 - DNA, 15 bp, Homo sapiens
tctatcttactatgt

SEQ ID NO: 640327 - DNA, 15 bp, Homo sapiens
ctatcttactatgtt

SEQ ID NO: 640328 - DNA, 15 bp, Homo sapiens
tatcttactatgttt

SEQ ID NO: 640329 - DNA, 15 bp, Homo sapiens
atcttactatgtttt

SEQ ID NO: 640330 - DNA, 15 bp, Homo sapiens
tcttactatgtttta

SEQ ID NO: 640331 - DNA, 15 bp, Homo sapiens
cttactatgttttaa

SEQ ID NO: 640332 - DNA, 15 bp, Homo sapiens
ttactatgttttaaa

SEQ ID NO: 640333 - DNA, 15 bp, Homo sapiens
tactatgttttaaaa

SEQ ID NO: 640334 - DNA, 15 bp, Homo sapiens
actatgttttaaaat

SEQ ID NO: 640335 - DNA, 15 bp, Homo sapiens
ctatgttttaaaatc

SEQ ID NO: 640336 - DNA, 15 bp, Homo sapiens
tatgttttaaaatct

SEQ ID NO: 640337 - DNA, 15 bp, Homo sapiens
atgttttaaaatctt

SEQ ID NO: 640338 - DNA, 15 bp, Homo sapiens
tgttttaaaatctta

SEQ ID NO: 640339 - DNA, 15 bp, Homo sapiens
gttttaaaatcttaa

SEQ ID NO: 640340 - DNA, 15 bp, Homo sapiens
ttttaaaatcttaat

SEQ ID NO: 640341 - DNA, 15 bp, Homo sapiens
tttaaaatcttaata

SEQ ID NO: 640342 - DNA, 15 bp, Homo sapiens
ttaaaatcttaatag

SEQ ID NO: 640343 - DNA, 15 bp, Homo sapiens
taaaatcttaataga

SEQ ID NO: 640344 - DNA, 15 bp, Homo sapiens
aaaatcttaatagaa

SEQ ID NO: 640345 - DNA, 15 bp, Homo sapiens
aaatcttaatagaaa

SEQ ID NO: 640346 - DNA, 15 bp, Homo sapiens
aatcttaatagaaac

SEQ ID NO: 640347 - DNA, 15 bp, Homo sapiens
atcttaatagaaaca

SEQ ID NO: 640348 - DNA, 15 bp, Homo sapiens
tcttaatagaaacag

SEQ ID NO: 640349 - DNA, 15 bp, Homo sapiens
cttaatagaaacagg

SEQ ID NO: 640350 - DNA, 15 bp, Homo sapiens
ttaatagaaacagga

SEQ ID NO: 640351 - DNA, 15 bp, Homo sapiens
taatagaaacaggat

SEQ ID NO: 640352 - DNA, 15 bp, Homo sapiens
aatagaaacaggatt

SEQ ID NO: 640353 - DNA, 15 bp, Homo sapiens
atagaaacaggattg

SEQ ID NO: 640354 - DNA, 15 bp, Homo sapiens
tagaaacaggattga

SEQ ID NO: 640355 - DNA, 15 bp, Homo sapiens
agaaacaggattgaa

SEQ ID NO: 640356 - DNA, 15 bp, Homo sapiens
gaaacaggattgaaa

SEQ ID NO: 640357 - DNA, 15 bp, Homo sapiens
aaacaggattgaaag

SEQ ID NO: 640358 - DNA, 15 bp, Homo sapiens
aacaggattgaaagt

SEQ ID NO: 640359 - DNA, 15 bp, Homo sapiens
acaggattgaaagtc

SEQ ID NO: 640360 - DNA, 15 bp, Homo sapiens
caggattgaaagtca

SEQ ID NO: 640361 - DNA, 15 bp, Homo sapiens
aggattgaaagtcac

SEQ ID NO: 640362 - DNA, 15 bp, Homo sapiens
ggattgaaagtcact

SEQ ID NO: 640363 - DNA, 15 bp, Homo sapiens
gattgaaagtcactc

SEQ ID NO: 640364 - DNA, 15 bp, Homo sapiens
attgaaagtcactca

SEQ ID NO: 640365 - DNA, 15 bp, Homo sapiens
ttgaaagtcactcac

SEQ ID NO: 640366 - DNA, 15 bp, Homo sapiens
tgaaagtcactcacc

SEQ ID NO: 640367 - DNA, 15 bp, Homo sapiens
gaaagtcactcacca

SEQ ID NO: 640368 - DNA, 15 bp, Homo sapiens
aaagtcactcaccaa

SEQ ID NO: 640369 - DNA, 15 bp, Homo sapiens
aagtcactcaccaaa

SEQ ID NO: 640370 - DNA, 15 bp, Homo sapiens
agtcactcaccaaat

SEQ ID NO: 640371 - DNA, 15 bp, Homo sapiens
gtcactcaccaaata

SEQ ID NO: 640372 - DNA, 15 bp, Homo sapiens
tcactcaccaaatac

SEQ ID NO: 640373 - DNA, 15 bp, Homo sapiens
cactcaccaaataca

SEQ ID NO: 640374 - DNA, 15 bp, Homo sapiens
actcaccaaatacat

SEQ ID NO: 640375 - DNA, 15 bp, Homo sapiens
ctcaccaaatacatt

SEQ ID NO: 640376 - DNA, 15 bp, Homo sapiens
tcaccaaatacattg

SEQ ID NO: 640377 - DNA, 15 bp, Homo sapiens
caccaaatacattgc

SEQ ID NO: 640378 - DNA, 15 bp, Homo sapiens
accaaatacattgcc

SEQ ID NO: 640379 - DNA, 15 bp, Homo sapiens
ccaaatacattgcca

SEQ ID NO: 640380 - DNA, 15 bp, Homo sapiens
caaatacattgccaa

SEQ ID NO: 640381 - DNA, 15 bp, Homo sapiens
aaatacattgccaaa

SEQ ID NO: 640382 - DNA, 15 bp, Homo sapiens
aatacattgccaaaa

SEQ ID NO: 640383 - DNA, 15 bp, Homo sapiens
atacattgccaaaat

SEQ ID NO: 640384 - DNA, 15 bp, Homo sapiens
tacattgccaaaatg

SEQ ID NO: 640385 - DNA, 15 bp, Homo sapiens
acattgccaaaatgt

SEQ ID NO: 640386 - DNA, 15 bp, Homo sapiens
cattgccaaaatgtt

SEQ ID NO: 640387 - DNA, 15 bp, Homo sapiens
attgccaaaatgtta

SEQ ID NO: 640388 - DNA, 15 bp, Homo sapiens
ttgccaaaatgttac

SEQ ID NO: 640389 - DNA, 15 bp, Homo sapiens
tgccaaaatgttacc

SEQ ID NO: 640390 - DNA, 15 bp, Homo sapiens
gccaaaatgttacca

SEQ ID NO: 640391 - DNA, 15 bp, Homo sapiens
ccaaaatgttaccac

SEQ ID NO: 640392 - DNA, 15 bp, Homo sapiens
caaaatgttaccact

SEQ ID NO: 640393 - DNA, 15 bp, Homo sapiens
aaaatgttaccactt

SEQ ID NO: 640394 - DNA, 15 bp, Homo sapiens
aaatgttaccacttt

SEQ ID NO: 640395 - DNA, 15 bp, Homo sapiens
aatgttaccacttta

SEQ ID NO: 640396 - DNA, 15 bp, Homo sapiens
atgttaccactttat

SEQ ID NO: 640397 - DNA, 15 bp, Homo sapiens
tgttaccactttatt

SEQ ID NO: 640398 - DNA, 15 bp, Homo sapiens
gttaccactttattg

SEQ ID NO: 640399 - DNA, 15 bp, Homo sapiens
ttaccactttattga

SEQ ID NO: 640400 - DNA, 15 bp, Homo sapiens
taccactttattgag

SEQ ID NO: 640401 - DNA, 15 bp, Homo sapiens
accactttattgagt

SEQ ID NO: 640402 - DNA, 15 bp, Homo sapiens
ccactttattgagta

SEQ ID NO: 640403 - DNA, 15 bp, Homo sapiens
cactttattgagtat

SEQ ID NO: 640404 - DNA, 15 bp, Homo sapiens
actttattgagtata

SEQ ID NO: 640405 - DNA, 15 bp, Homo sapiens
ctttattgagtatag

SEQ ID NO: 640406 - DNA, 15 bp, Homo sapiens
tttattgagtatagg

SEQ ID NO: 640407 - DNA, 15 bp, Homo sapiens
ttattgagtataggc

SEQ ID NO: 640408 - DNA, 15 bp, Homo sapiens
tattgagtataggct

SEQ ID NO: 640409 - DNA, 15 bp, Homo sapiens
attgagtataggctt

SEQ ID NO: 640410 - DNA, 15 bp, Homo sapiens
ttgagtataggcttg

SEQ ID NO: 640411 - DNA, 15 bp, Homo sapiens
tgagtataggcttga

SEQ ID NO: 640412 - DNA, 15 bp, Homo sapiens
gagtataggcttgag

SEQ ID NO: 640413 - DNA, 15 bp, Homo sapiens
agtataggcttgagc

SEQ ID NO: 640414 - DNA, 15 bp, Homo sapiens
gtataggcttgagca

SEQ ID NO: 640415 - DNA, 15 bp, Homo sapiens
tataggcttgagcat

SEQ ID NO: 640416 - DNA, 15 bp, Homo sapiens
ataggcttgagcatg

SEQ ID NO: 640417 - DNA, 15 bp, Homo sapiens
taggcttgagcatga

SEQ ID NO: 640418 - DNA, 15 bp, Homo sapiens
aggcttgagcatgac

SEQ ID NO: 640419 - DNA, 15 bp, Homo sapiens
ggcttgagcatgaca

SEQ ID NO: 640420 - DNA, 15 bp, Homo sapiens
gcttgagcatgacac

SEQ ID NO: 640421 - DNA, 15 bp, Homo sapiens
cttgagcatgacact

SEQ ID NO: 640422 - DNA, 15 bp, Homo sapiens
ttgagcatgacacta

SEQ ID NO: 640423 - DNA, 15 bp, Homo sapiens
tgagcatgacactac

SEQ ID NO: 640424 - DNA, 15 bp, Homo sapiens
gagcatgacactacc

SEQ ID NO: 640425 - DNA, 15 bp, Homo sapiens
agcatgacactacca

SEQ ID NO: 640426 - DNA, 15 bp, Homo sapiens
gcatgacactaccaa

SEQ ID NO: 640427 - DNA, 15 bp, Homo sapiens
catgacactaccaat

SEQ ID NO: 640428 - DNA, 15 bp, Homo sapiens
atgacactaccaata

SEQ ID NO: 640429 - DNA, 15 bp, Homo sapiens
tgacactaccaatac

SEQ ID NO: 640430 - DNA, 15 bp, Homo sapiens
gacactaccaatact

SEQ ID NO: 640431 - DNA, 15 bp, Homo sapiens
acactaccaatactt

SEQ ID NO: 640432 - DNA, 15 bp, Homo sapiens
cactaccaatactta

SEQ ID NO: 640433 - DNA, 15 bp, Homo sapiens
actaccaatacttaa

SEQ ID NO: 640434 - DNA, 15 bp, Homo sapiens
ctaccaatacttaac

SEQ ID NO: 640435 - DNA, 15 bp, Homo sapiens
taccaatacttaacg

SEQ ID NO: 640436 - DNA, 15 bp, Homo sapiens
accaatacttaacgt

SEQ ID NO: 640437 - DNA, 15 bp, Homo sapiens
ccaatacttaacgtc

SEQ ID NO: 640438 - DNA, 15 bp, Homo sapiens
caatacttaacgtca

SEQ ID NO: 640439 - DNA, 15 bp, Homo sapiens
aatacttaacgtcac

SEQ ID NO: 640440 - DNA, 15 bp, Homo sapiens
atacttaacgtcact

SEQ ID NO: 640441 - DNA, 15 bp, Homo sapiens
tacttaacgtcacta

SEQ ID NO: 640442 - DNA, 15 bp, Homo sapiens
acttaacgtcactag

SEQ ID NO: 640443 - DNA, 15 bp, Homo sapiens
cttaacgtcactagg

SEQ ID NO: 640444 - DNA, 15 bp, Homo sapiens
ttaacgtcactaggg

SEQ ID NO: 640445 - DNA, 15 bp, Homo sapiens
taacgtcactaggga

SEQ ID NO: 640446 - DNA, 15 bp, Homo sapiens
aacgtcactagggag

SEQ ID NO: 640447 - DNA, 15 bp, Homo sapiens
acgtcactagggagg

SEQ ID NO: 640448 - DNA, 15 bp, Homo sapiens
cgtcactagggaggt

SEQ ID NO: 640449 - DNA, 15 bp, Homo sapiens
gtcactagggaggtg

SEQ ID NO: 640450 - DNA, 15 bp, Homo sapiens
tcactagggaggtga

SEQ ID NO: 640451 - DNA, 15 bp, Homo sapiens
cactagggaggtgac

SEQ ID NO: 640452 - DNA, 15 bp, Homo sapiens
actagggaggtgacc

SEQ ID NO: 640453 - DNA, 15 bp, Homo sapiens
ctagggaggtgaccc

SEQ ID NO: 640454 - DNA, 15 bp, Homo sapiens
tagggaggtgaccca

SEQ ID NO: 640455 - DNA, 15 bp, Homo sapiens
agggaggtgacccat

SEQ ID NO: 640456 - DNA, 15 bp, Homo sapiens
gggaggtgacccatg

SEQ ID NO: 640457 - DNA, 15 bp, Homo sapiens
ggaggtgacccatga

SEQ ID NO: 640458 - DNA, 15 bp, Homo sapiens
gaggtgacccatgaa

SEQ ID NO: 640459 - DNA, 15 bp, Homo sapiens
aggtgacccatgaat

SEQ ID NO: 640460 - DNA, 15 bp, Homo sapiens
ggtgacccatgaatt

SEQ ID NO: 640461 - DNA, 15 bp, Homo sapiens
gtgacccatgaattt

SEQ ID NO: 640462 - DNA, 15 bp, Homo sapiens
tgacccatgaatttt

SEQ ID NO: 640463 - DNA, 15 bp, Homo sapiens
gacccatgaatttta

SEQ ID NO: 640464 - DNA, 15 bp, Homo sapiens
acccatgaattttac

SEQ ID NO: 640465 - DNA, 15 bp, Homo sapiens
cccatgaattttact

SEQ ID NO: 640466 - DNA, 15 bp, Homo sapiens
ccatgaattttactt

SEQ ID NO: 640467 - DNA, 15 bp, Homo sapiens
catgaattttacttg

SEQ ID NO: 640468 - DNA, 15 bp, Homo sapiens
atgaattttacttga

SEQ ID NO: 640469 - DNA, 15 bp, Homo sapiens
tgaattttacttgag

SEQ ID NO: 640470 - DNA, 15 bp, Homo sapiens
gaattttacttgagt

SEQ ID NO: 640471 - DNA, 15 bp, Homo sapiens
aattttacttgagta

SEQ ID NO: 640472 - DNA, 15 bp, Homo sapiens
attttacttgagtat

SEQ ID NO: 640473 - DNA, 15 bp, Homo sapiens
ttttacttgagtatc

SEQ ID NO: 640474 - DNA, 15 bp, Homo sapiens
tttacttgagtatca

SEQ ID NO: 640475 - DNA, 15 bp, Homo sapiens
ttacttgagtatcat

SEQ ID NO: 640476 - DNA, 15 bp, Homo sapiens
tacttgagtatcatc

SEQ ID NO: 640477 - DNA, 15 bp, Homo sapiens
acttgagtatcatct

SEQ ID NO: 640478 - DNA, 15 bp, Homo sapiens
cttgagtatcatctc

SEQ ID NO: 640479 - DNA, 15 bp, Homo sapiens
ttgagtatcatctcc

SEQ ID NO: 640480 - DNA, 15 bp, Homo sapiens
tgagtatcatctcca

SEQ ID NO: 640481 - DNA, 15 bp, Homo sapiens
gagtatcatctccaa

SEQ ID NO: 640482 - DNA, 15 bp, Homo sapiens
agtatcatctccaag

SEQ ID NO: 640483 - DNA, 15 bp, Homo sapiens
gtatcatctccaaga

SEQ ID NO: 640484 - DNA, 15 bp, Homo sapiens
tatcatctccaagag

SEQ ID NO: 640485 - DNA, 15 bp, Homo sapiens
atcatctccaagagt

SEQ ID NO: 640486 - DNA, 15 bp, Homo sapiens
tcatctccaagagtt

SEQ ID NO: 640487 - DNA, 15 bp, Homo sapiens
catctccaagagttc

SEQ ID NO: 640488 - DNA, 15 bp, Homo sapiens
atctccaagagttct

SEQ ID NO: 640489 - DNA, 15 bp, Homo sapiens
tctccaagagttcta

SEQ ID NO: 640490 - DNA, 15 bp, Homo sapiens
ctccaagagttctat

SEQ ID NO: 640491 - DNA, 15 bp, Homo sapiens
tccaagagttctatt

SEQ ID NO: 640492 - DNA, 15 bp, Homo sapiens
ccaagagttctattt

SEQ ID NO: 640493 - DNA, 15 bp, Homo sapiens
caagagttctatttt

SEQ ID NO: 640494 - DNA, 15 bp, Homo sapiens
aagagttctattttt

SEQ ID NO: 640495 - DNA, 15 bp, Homo sapiens
agagttctatttttc

SEQ ID NO: 640496 - DNA, 15 bp, Homo sapiens
gagttctatttttcc

SEQ ID NO: 640497 - DNA, 15 bp, Homo sapiens
agttctatttttccc

SEQ ID NO: 640498 - DNA, 15 bp, Homo sapiens
gttctatttttcccc

SEQ ID NO: 640499 - DNA, 15 bp, Homo sapiens
ttctatttttccccc

SEQ ID NO: 640500 - DNA, 15 bp, Homo sapiens
tctatttttcccccc

SEQ ID NO: 640501 - DNA, 15 bp, Homo sapiens
ctatttttccccccc

SEQ ID NO: 640502 - DNA, 15 bp, Homo sapiens
tatttttccccccca

SEQ ID NO: 640503 - DNA, 15 bp, Homo sapiens
atttttcccccccac

SEQ ID NO: 640504 - DNA, 15 bp, Homo sapiens
tttttcccccccacc

SEQ ID NO: 640505 - DNA, 15 bp, Homo sapiens
ttttcccccccacca

SEQ ID NO: 640506 - DNA, 15 bp, Homo sapiens
tttcccccccaccaa

SEQ ID NO: 640507 - DNA, 15 bp, Homo sapiens
ttcccccccaccaac

SEQ ID NO: 640508 - DNA, 15 bp, Homo sapiens
tcccccccaccaact

SEQ ID NO: 640509 - DNA, 15 bp, Homo sapiens
cccccccaccaactc

SEQ ID NO: 640510 - DNA, 15 bp, Homo sapiens
ccccccaccaactcc

SEQ ID NO: 640511 - DNA, 15 bp, Homo sapiens
cccccaccaactccc

SEQ ID NO: 640512 - DNA, 15 bp, Homo sapiens
ccccaccaactcccc

SEQ ID NO: 640513 - DNA, 15 bp, Homo sapiens
cccaccaactcccct

SEQ ID NO: 640514 - DNA, 15 bp, Homo sapiens
ccaccaactcccctc

SEQ ID NO: 640515 - DNA, 15 bp, Homo sapiens
caccaactcccctct

SEQ ID NO: 640516 - DNA, 15 bp, Homo sapiens
accaactcccctctg

SEQ ID NO: 640517 - DNA, 15 bp, Homo sapiens
ccaactcccctctgc

SEQ ID NO: 640518 - DNA, 15 bp, Homo sapiens
caactcccctctgcc

SEQ ID NO: 640519 - DNA, 15 bp, Homo sapiens
aactcccctctgccc

SEQ ID NO: 640520 - DNA, 15 bp, Homo sapiens
actcccctctgcccc

SEQ ID NO: 640521 - DNA, 15 bp, Homo sapiens
ctcccctctgcccct

SEQ ID NO: 640522 - DNA, 15 bp, Homo sapiens
tcccctctgcccctt

SEQ ID NO: 640523 - DNA, 15 bp, Homo sapiens
cccctctgcccctta

SEQ ID NO: 640524 - DNA, 15 bp, Homo sapiens
ccctctgccccttag

SEQ ID NO: 640525 - DNA, 15 bp, Homo sapiens
cctctgccccttagc

SEQ ID NO: 640526 - DNA, 15 bp, Homo sapiens
ctctgccccttagct

SEQ ID NO: 640527 - DNA, 15 bp, Homo sapiens
tctgccccttagctt

SEQ ID NO: 640528 - DNA, 15 bp, Homo sapiens
ctgccccttagcttt

SEQ ID NO: 640529 - DNA, 15 bp, Homo sapiens
tgccccttagctttg

SEQ ID NO: 640530 - DNA, 15 bp, Homo sapiens
gccccttagctttgt

SEQ ID NO: 640531 - DNA, 15 bp, Homo sapiens
ccccttagctttgtg

SEQ ID NO: 640532 - DNA, 15 bp, Homo sapiens
cccttagctttgtgg

SEQ ID NO: 640533 - DNA, 15 bp, Homo sapiens
ccttagctttgtggc

SEQ ID NO: 640534 - DNA, 15 bp, Homo sapiens
cttagctttgtggct

SEQ ID NO: 640535 - DNA, 15 bp, Homo sapiens
ttagctttgtggctg

SEQ ID NO: 640536 - DNA, 15 bp, Homo sapiens
tagctttgtggctgt

SEQ ID NO: 640537 - DNA, 15 bp, Homo sapiens
agctttgtggctgtg

SEQ ID NO: 640538 - DNA, 15 bp, Homo sapiens
gctttgtggctgtgg

SEQ ID NO: 640539 - DNA, 15 bp, Homo sapiens
ctttgtggctgtggc

SEQ ID NO: 640540 - DNA, 15 bp, Homo sapiens
tttgtggctgtggct

SEQ ID NO: 640541 - DNA, 15 bp, Homo sapiens
ttgtggctgtggctg

SEQ ID NO: 640542 - DNA, 15 bp, Homo sapiens
tgtggctgtggctgg

SEQ ID NO: 640543 - DNA, 15 bp, Homo sapiens
gtggctgtggctggt

SEQ ID NO: 640544 - DNA, 15 bp, Homo sapiens
tggctgtggctggtg

SEQ ID NO: 640545 - DNA, 15 bp, Homo sapiens
ggctgtggctggtga

SEQ ID NO: 640546 - DNA, 15 bp, Homo sapiens
gctgtggctggtgat

SEQ ID NO: 640547 - DNA, 15 bp, Homo sapiens
ctgtggctggtgatc

SEQ ID NO: 640548 - DNA, 15 bp, Homo sapiens
tgtggctggtgatcc

SEQ ID NO: 640549 - DNA, 15 bp, Homo sapiens
gtggctggtgatcca

SEQ ID NO: 640550 - DNA, 15 bp, Homo sapiens
tggctggtgatccac

SEQ ID NO: 640551 - DNA, 15 bp, Homo sapiens
ggctggtgatccact

SEQ ID NO: 640552 - DNA, 15 bp, Homo sapiens
gctggtgatccactt

SEQ ID NO: 640553 - DNA, 15 bp, Homo sapiens
ctggtgatccacttg

SEQ ID NO: 640554 - DNA, 15 bp, Homo sapiens
tggtgatccacttga

SEQ ID NO: 640555 - DNA, 15 bp, Homo sapiens
ggtgatccacttgat

SEQ ID NO: 640556 - DNA, 15 bp, Homo sapiens
gtgatccacttgatc

SEQ ID NO: 640557 - DNA, 15 bp, Homo sapiens
tgatccacttgatct

SEQ ID NO: 640558 - DNA, 15 bp, Homo sapiens
gatccacttgatctt

SEQ ID NO: 640559 - DNA, 15 bp, Homo sapiens
atccacttgatctta

SEQ ID NO: 640560 - DNA, 15 bp, Homo sapiens
tccacttgatcttaa

SEQ ID NO: 640561 - DNA, 15 bp, Homo sapiens
ccacttgatcttaac

SEQ ID NO: 640562 - DNA, 15 bp, Homo sapiens
cacttgatcttaacc

SEQ ID NO: 640563 - DNA, 15 bp, Homo sapiens
acttgatcttaaccc

SEQ ID NO: 640564 - DNA, 15 bp, Homo sapiens
cttgatcttaaccct

SEQ ID NO: 640565 - DNA, 15 bp, Homo sapiens
ttgatcttaaccctt

SEQ ID NO: 640566 - DNA, 15 bp, Homo sapiens
tgatcttaacccttc

SEQ ID NO: 640567 - DNA, 15 bp, Homo sapiens
gatcttaacccttcc

SEQ ID NO: 640568 - DNA, 15 bp, Homo sapiens
atcttaacccttcca

SEQ ID NO: 640569 - DNA, 15 bp, Homo sapiens
tcttaacccttccat

SEQ ID NO: 640570 - DNA, 15 bp, Homo sapiens
cttaacccttccatc

SEQ ID NO: 640571 - DNA, 15 bp, Homo sapiens
ttaacccttccatct

SEQ ID NO: 640572 - DNA, 15 bp, Homo sapiens
taacccttccatctg

SEQ ID NO: 640573 - DNA, 15 bp, Homo sapiens
aacccttccatctgt

SEQ ID NO: 640574 - DNA, 15 bp, Homo sapiens
acccttccatctgta

SEQ ID NO: 640575 - DNA, 15 bp, Homo sapiens
cccttccatctgtaa

SEQ ID NO: 640576 - DNA, 15 bp, Homo sapiens
ccttccatctgtaat

SEQ ID NO: 640577 - DNA, 15 bp, Homo sapiens
cttccatctgtaatg

SEQ ID NO: 640578 - DNA, 15 bp, Homo sapiens
ttccatctgtaatgg

SEQ ID NO: 640579 - DNA, 15 bp, Homo sapiens
tccatctgtaatggg

SEQ ID NO: 640580 - DNA, 15 bp, Homo sapiens
ccatctgtaatggga

SEQ ID NO: 640581 - DNA, 15 bp, Homo sapiens
catctgtaatgggaa

SEQ ID NO: 640582 - DNA, 15 bp, Homo sapiens
atctgtaatgggaat

SEQ ID NO: 640583 - DNA, 15 bp, Homo sapiens
tctgtaatgggaatt

SEQ ID NO: 640584 - DNA, 15 bp, Homo sapiens
ctgtaatgggaattt

SEQ ID NO: 640585 - DNA, 15 bp, Homo sapiens
tgtaatgggaatttc

SEQ ID NO: 640586 - DNA, 15 bp, Homo sapiens
gtaatgggaatttca

SEQ ID NO: 640587 - DNA, 15 bp, Homo sapiens
taatgggaatttcat

SEQ ID NO: 640588 - DNA, 15 bp, Homo sapiens
aatgggaatttcatg

SEQ ID NO: 640589 - DNA, 15 bp, Homo sapiens
atgggaatttcatga

SEQ ID NO: 640590 - DNA, 15 bp, Homo sapiens
tgggaatttcatgaa

SEQ ID NO: 640591 - DNA, 15 bp, Homo sapiens
gggaatttcatgaac

SEQ ID NO: 640592 - DNA, 15 bp, Homo sapiens
ggaatttcatgaaca

SEQ ID NO: 640593 - DNA, 15 bp, Homo sapiens
gaatttcatgaacag

SEQ ID NO: 640594 - DNA, 15 bp, Homo sapiens
aatttcatgaacagg

SEQ ID NO: 640595 - DNA, 15 bp, Homo sapiens
atttcatgaacaggc

SEQ ID NO: 640596 - DNA, 15 bp, Homo sapiens
tttcatgaacaggct

SEQ ID NO: 640597 - DNA, 15 bp, Homo sapiens
ttcatgaacaggctg

SEQ ID NO: 640598 - DNA, 15 bp, Homo sapiens
tcatgaacaggctgc

SEQ ID NO: 640599 - DNA, 15 bp, Homo sapiens
catgaacaggctgca

SEQ ID NO: 640600 - DNA, 15 bp, Homo sapiens
atgaacaggctgcat

SEQ ID NO: 640601 - DNA, 15 bp, Homo sapiens
tgaacaggctgcatt

SEQ ID NO: 640602 - DNA, 15 bp, Homo sapiens
gaacaggctgcatta

SEQ ID NO: 640603 - DNA, 15 bp, Homo sapiens
aacaggctgcattac

SEQ ID NO: 640604 - DNA, 15 bp, Homo sapiens
acaggctgcattact

SEQ ID NO: 640605 - DNA, 15 bp, Homo sapiens
caggctgcattactt

SEQ ID NO: 640606 - DNA, 15 bp, Homo sapiens
aggctgcattacttt

SEQ ID NO: 640607 - DNA, 15 bp, Homo sapiens
ggctgcattactttg

SEQ ID NO: 640608 - DNA, 15 bp, Homo sapiens
gctgcattactttga

SEQ ID NO: 640609 - DNA, 15 bp, Homo sapiens
ctgcattactttgag

SEQ ID NO: 640610 - DNA, 15 bp, Homo sapiens
tgcattactttgagt

SEQ ID NO: 640611 - DNA, 15 bp, Homo sapiens
gcattactttgagta

SEQ ID NO: 640612 - DNA, 15 bp, Homo sapiens
cattactttgagtaa

SEQ ID NO: 640613 - DNA, 15 bp, Homo sapiens
attactttgagtaag

SEQ ID NO: 640614 - DNA, 15 bp, Homo sapiens
ttactttgagtaagg

SEQ ID NO: 640615 - DNA, 15 bp, Homo sapiens
tactttgagtaaggt

SEQ ID NO: 640616 - DNA, 15 bp, Homo sapiens
actttgagtaaggta

SEQ ID NO: 640617 - DNA, 15 bp, Homo sapiens
ctttgagtaaggtac

SEQ ID NO: 640618 - DNA, 15 bp, Homo sapiens
tttgagtaaggtaca

SEQ ID NO: 640619 - DNA, 15 bp, Homo sapiens
ttgagtaaggtacac

SEQ ID NO: 640620 - DNA, 15 bp, Homo sapiens
tgagtaaggtacact

SEQ ID NO: 640621 - DNA, 15 bp, Homo sapiens
gagtaaggtacacta

SEQ ID NO: 640622 - DNA, 15 bp, Homo sapiens
agtaaggtacactag

SEQ ID NO: 640623 - DNA, 15 bp, Homo sapiens
gtaaggtacactagt

SEQ ID NO: 640624 - DNA, 15 bp, Homo sapiens
taaggtacactagtc

SEQ ID NO: 640625 - DNA, 15 bp, Homo sapiens
aaggtacactagtct

SEQ ID NO: 640626 - DNA, 15 bp, Homo sapiens
aggtacactagtctc

SEQ ID NO: 640627 - DNA, 15 bp, Homo sapiens
ggtacactagtctca

SEQ ID NO: 640628 - DNA, 15 bp, Homo sapiens
gtacactagtctcaa

SEQ ID NO: 640629 - DNA, 15 bp, Homo sapiens
tacactagtctcaac

SEQ ID NO: 640630 - DNA, 15 bp, Homo sapiens
acactagtctcaacc

SEQ ID NO: 640631 - DNA, 15 bp, Homo sapiens
cactagtctcaacca

SEQ ID NO: 640632 - DNA, 15 bp, Homo sapiens
actagtctcaaccag

SEQ ID NO: 640633 - DNA, 15 bp, Homo sapiens
ctagtctcaaccagt

SEQ ID NO: 640634 - DNA, 15 bp, Homo sapiens
tagtctcaaccagta

SEQ ID NO: 640635 - DNA, 15 bp, Homo sapiens
agtctcaaccagtag

SEQ ID NO: 640636 - DNA, 15 bp, Homo sapiens
gtctcaaccagtagt

SEQ ID NO: 640637 - DNA, 15 bp, Homo sapiens
tctcaaccagtagtt

SEQ ID NO: 640638 - DNA, 15 bp, Homo sapiens
ctcaaccagtagttg

SEQ ID NO: 640639 - DNA, 15 bp, Homo sapiens
tcaaccagtagttga

SEQ ID NO: 640640 - DNA, 15 bp, Homo sapiens
caaccagtagttgag

SEQ ID NO: 640641 - DNA, 15 bp, Homo sapiens
aaccagtagttgagt

SEQ ID NO: 640642 - DNA, 15 bp, Homo sapiens
accagtagttgagtt

SEQ ID NO: 640643 - DNA, 15 bp, Homo sapiens
ccagtagttgagttt

SEQ ID NO: 640644 - DNA, 15 bp, Homo sapiens
cagtagttgagtttg

SEQ ID NO: 640645 - DNA, 15 bp, Homo sapiens
agtagttgagtttgt

SEQ ID NO: 640646 - DNA, 15 bp, Homo sapiens
gtagttgagtttgtt

SEQ ID NO: 640647 - DNA, 15 bp, Homo sapiens
tagttgagtttgttt

SEQ ID NO: 640648 - DNA, 15 bp, Homo sapiens
agttgagtttgtttt

SEQ ID NO: 640649 - DNA, 15 bp, Homo sapiens
gttgagtttgttttt

SEQ ID NO: 640650 - DNA, 15 bp, Homo sapiens
ttgagtttgtttttt

SEQ ID NO: 640651 - DNA, 15 bp, Homo sapiens
tgagtttgttttttt

SEQ ID NO: 640652 - DNA, 15 bp, Homo sapiens
gagtttgtttttttc

SEQ ID NO: 640653 - DNA, 15 bp, Homo sapiens
agtttgtttttttct

SEQ ID NO: 640654 - DNA, 15 bp, Homo sapiens
gtttgtttttttctt

SEQ ID NO: 640655 - DNA, 15 bp, Homo sapiens
tttgtttttttcttt

SEQ ID NO: 640656 - DNA, 15 bp, Homo sapiens
ttgtttttttctttt

SEQ ID NO: 640657 - DNA, 15 bp, Homo sapiens
tgtttttttcttttt

SEQ ID NO: 640658 - DNA, 15 bp, Homo sapiens
gtttttttctttttt

SEQ ID NO: 640659 - DNA, 15 bp, Homo sapiens
tttttttcttttttc

SEQ ID NO: 640660 - DNA, 15 bp, Homo sapiens
ttttttcttttttct

SEQ ID NO: 640661 - DNA, 15 bp, Homo sapiens
tttttcttttttctt

SEQ ID NO: 640662 - DNA, 15 bp, Homo sapiens
ttttcttttttcttt

SEQ ID NO: 640663 - DNA, 15 bp, Homo sapiens
tttcttttttctttt

SEQ ID NO: 640664 - DNA, 15 bp, Homo sapiens
ttcttttttcttttt

SEQ ID NO: 640665 - DNA, 15 bp, Homo sapiens
tcttttttctttttt

SEQ ID NO: 640666 - DNA, 15 bp, Homo sapiens
cttttttcttttttt

SEQ ID NO: 640667 - DNA, 15 bp, Homo sapiens
ttttttctttttttt

SEQ ID NO: 640668 - DNA, 15 bp, Homo sapiens
tttttcttttttttt

SEQ ID NO: 640669 - DNA, 15 bp, Homo sapiens
ttttctttttttttt

SEQ ID NO: 640670 - DNA, 15 bp, Homo sapiens
tttcttttttttttt

SEQ ID NO: 640671 - DNA, 15 bp, Homo sapiens
ttctttttttttttt

SEQ ID NO: 640672 - DNA, 15 bp, Homo sapiens
tcttttttttttttt

SEQ ID NO: 640673 - DNA, 15 bp, Homo sapiens
tttttttttttttta

SEQ ID NO: 640674 - DNA, 15 bp, Homo sapiens
tttttttttttttaa

SEQ ID NO: 640675 - DNA, 15 bp, Homo sapiens
ttttttttttttaag

SEQ ID NO: 640676 - DNA, 15 bp, Homo sapiens
tttttttttttaaga

SEQ ID NO: 640677 - DNA, 15 bp, Homo sapiens
ttttttttttaagat

SEQ ID NO: 640678 - DNA, 15 bp, Homo sapiens
tttttttttaagatg

SEQ ID NO: 640679 - DNA, 15 bp, Homo sapiens
ttttttttaagatgg

SEQ ID NO: 640680 - DNA, 15 bp, Homo sapiens
tttttttaagatgga

SEQ ID NO: 640681 - DNA, 15 bp, Homo sapiens
ttttttaagatggag

SEQ ID NO: 640682 - DNA, 15 bp, Homo sapiens
tttttaagatggagt

SEQ ID NO: 640683 - DNA, 15 bp, Homo sapiens
ttttaagatggagtc

SEQ ID NO: 640684 - DNA, 15 bp, Homo sapiens
tttaagatggagtct

SEQ ID NO: 640685 - DNA, 15 bp, Homo sapiens
ttaagatggagtctc

SEQ ID NO: 640686 - DNA, 15 bp, Homo sapiens
taagatggagtctcc

SEQ ID NO: 640687 - DNA, 15 bp, Homo sapiens
aagatggagtctcct

SEQ ID NO: 640688 - DNA, 15 bp, Homo sapiens
agatggagtctcctt

SEQ ID NO: 640689 - DNA, 15 bp, Homo sapiens
gatggagtctccttt

SEQ ID NO: 640690 - DNA, 15 bp, Homo sapiens
atggagtctcctttt

SEQ ID NO: 640691 - DNA, 15 bp, Homo sapiens
tggagtctccttttt

SEQ ID NO: 640692 - DNA, 15 bp, Homo sapiens
ggagtctcctttttt

SEQ ID NO: 640693 - DNA, 15 bp, Homo sapiens
gagtctccttttttg

SEQ ID NO: 640694 - DNA, 15 bp, Homo sapiens
agtctccttttttgc

SEQ ID NO: 640695 - DNA, 15 bp, Homo sapiens
gtctccttttttgcc

SEQ ID NO: 640696 - DNA, 15 bp, Homo sapiens
tctccttttttgccc

SEQ ID NO: 640697 - DNA, 15 bp, Homo sapiens
ctccttttttgccca

SEQ ID NO: 640698 - DNA, 15 bp, Homo sapiens
tccttttttgcccag

SEQ ID NO: 640699 - DNA, 15 bp, Homo sapiens
ccttttttgcccagg

SEQ ID NO: 640700 - DNA, 15 bp, Homo sapiens
cttttttgcccaggc

SEQ ID NO: 640701 - DNA, 15 bp, Homo sapiens
ttttttgcccaggct

SEQ ID NO: 640702 - DNA, 15 bp, Homo sapiens
tttttgcccaggctg

SEQ ID NO: 640703 - DNA, 15 bp, Homo sapiens
ttttgcccaggctgg

SEQ ID NO: 640704 - DNA, 15 bp, Homo sapiens
tttgcccaggctgga

SEQ ID NO: 640705 - DNA, 15 bp, Homo sapiens
ttgcccaggctggag

SEQ ID NO: 640706 - DNA, 15 bp, Homo sapiens
tgcccaggctggagt

SEQ ID NO: 640707 - DNA, 15 bp, Homo sapiens
gcccaggctggagta

SEQ ID NO: 640708 - DNA, 15 bp, Homo sapiens
cccaggctggagtac

SEQ ID NO: 640709 - DNA, 15 bp, Homo sapiens
ccaggctggagtaca

SEQ ID NO: 640710 - DNA, 15 bp, Homo sapiens
caggctggagtacag

SEQ ID NO: 640711 - DNA, 15 bp, Homo sapiens
aggctggagtacagt

SEQ ID NO: 640712 - DNA, 15 bp, Homo sapiens
ggctggagtacagtg

SEQ ID NO: 640713 - DNA, 15 bp, Homo sapiens
gctggagtacagtgg

SEQ ID NO: 640714 - DNA, 15 bp, Homo sapiens
ctggagtacagtggt

SEQ ID NO: 640715 - DNA, 15 bp, Homo sapiens
tggagtacagtggtg

SEQ ID NO: 640716 - DNA, 15 bp, Homo sapiens
ggagtacagtggtgt

SEQ ID NO: 640717 - DNA, 15 bp, Homo sapiens
gagtacagtggtgtg

SEQ ID NO: 640718 - DNA, 15 bp, Homo sapiens
agtacagtggtgtga

SEQ ID NO: 640719 - DNA, 15 bp, Homo sapiens
gtacagtggtgtgat

SEQ ID NO: 640720 - DNA, 15 bp, Homo sapiens
tacagtggtgtgatc

SEQ ID NO: 640721 - DNA, 15 bp, Homo sapiens
acagtggtgtgatct

SEQ ID NO: 640722 - DNA, 15 bp, Homo sapiens
cagtggtgtgatctt

SEQ ID NO: 640723 - DNA, 15 bp, Homo sapiens
agtggtgtgatcttg

SEQ ID NO: 640724 - DNA, 15 bp, Homo sapiens
gtggtgtgatcttgg

SEQ ID NO: 640725 - DNA, 15 bp, Homo sapiens
tggtgtgatcttggc

SEQ ID NO: 640726 - DNA, 15 bp, Homo sapiens
ggtgtgatcttggct

SEQ ID NO: 640727 - DNA, 15 bp, Homo sapiens
gtgtgatcttggctc

SEQ ID NO: 640728 - DNA, 15 bp, Homo sapiens
tgtgatcttggctca

SEQ ID NO: 640729 - DNA, 15 bp, Homo sapiens
gtgatcttggctcac

SEQ ID NO: 640730 - DNA, 15 bp, Homo sapiens
tgatcttggctcact

SEQ ID NO: 640731 - DNA, 15 bp, Homo sapiens
gatcttggctcactg

SEQ ID NO: 640732 - DNA, 15 bp, Homo sapiens
atcttggctcactgc

SEQ ID NO: 640733 - DNA, 15 bp, Homo sapiens
tcttggctcactgca

SEQ ID NO: 640734 - DNA, 15 bp, Homo sapiens
cttggctcactgcag

SEQ ID NO: 640735 - DNA, 15 bp, Homo sapiens
ttggctcactgcagc

SEQ ID NO: 640736 - DNA, 15 bp, Homo sapiens
tggctcactgcagcc

SEQ ID NO: 640737 - DNA, 15 bp, Homo sapiens
ggctcactgcagcct

SEQ ID NO: 640738 - DNA, 15 bp, Homo sapiens
gctcactgcagcctc

SEQ ID NO: 640739 - DNA, 15 bp, Homo sapiens
ctcactgcagcctct

SEQ ID NO: 640740 - DNA, 15 bp, Homo sapiens
tcactgcagcctctg

SEQ ID NO: 640741 - DNA, 15 bp, Homo sapiens
cactgcagcctctgc

SEQ ID NO: 640742 - DNA, 15 bp, Homo sapiens
actgcagcctctgcc

SEQ ID NO: 640743 - DNA, 15 bp, Homo sapiens
ctgcagcctctgcct

SEQ ID NO: 640744 - DNA, 15 bp, Homo sapiens
tgcagcctctgcctc

SEQ ID NO: 640745 - DNA, 15 bp, Homo sapiens
gcagcctctgcctct

SEQ ID NO: 640746 - DNA, 15 bp, Homo sapiens
cagcctctgcctctt

SEQ ID NO: 640747 - DNA, 15 bp, Homo sapiens
agcctctgcctcttg

SEQ ID NO: 640748 - DNA, 15 bp, Homo sapiens
gcctctgcctcttgg

SEQ ID NO: 640749 - DNA, 15 bp, Homo sapiens
cctctgcctcttggg

SEQ ID NO: 640750 - DNA, 15 bp, Homo sapiens
ctctgcctcttgggt

SEQ ID NO: 640751 - DNA, 15 bp, Homo sapiens
tctgcctcttgggtt

SEQ ID NO: 640752 - DNA, 15 bp, Homo sapiens
ctgcctcttgggttc

SEQ ID NO: 640753 - DNA, 15 bp, Homo sapiens
tgcctcttgggttca

SEQ ID NO: 640754 - DNA, 15 bp, Homo sapiens
gcctcttgggttcaa

SEQ ID NO: 640755 - DNA, 15 bp, Homo sapiens
cctcttgggttcaag

SEQ ID NO: 640756 - DNA, 15 bp, Homo sapiens
ctcttgggttcaagt

SEQ ID NO: 640757 - DNA, 15 bp, Homo sapiens
tcttgggttcaagtg

SEQ ID NO: 640758 - DNA, 15 bp, Homo sapiens
cttgggttcaagtga

SEQ ID NO: 640759 - DNA, 15 bp, Homo sapiens
ttgggttcaagtgat

SEQ ID NO: 640760 - DNA, 15 bp, Homo sapiens
tgggttcaagtgatt

SEQ ID NO: 640761 - DNA, 15 bp, Homo sapiens
gggttcaagtgattc

SEQ ID NO: 640762 - DNA, 15 bp, Homo sapiens
ggttcaagtgattct

SEQ ID NO: 640763 - DNA, 15 bp, Homo sapiens
gttcaagtgattctc

SEQ ID NO: 640764 - DNA, 15 bp, Homo sapiens
ttcaagtgattctca

SEQ ID NO: 640765 - DNA, 15 bp, Homo sapiens
tcaagtgattctcat

SEQ ID NO: 640766 - DNA, 15 bp, Homo sapiens
caagtgattctcatg

SEQ ID NO: 640767 - DNA, 15 bp, Homo sapiens
aagtgattctcatga

SEQ ID NO: 640768 - DNA, 15 bp, Homo sapiens
agtgattctcatgac

SEQ ID NO: 640769 - DNA, 15 bp, Homo sapiens
gtgattctcatgact

SEQ ID NO: 640770 - DNA, 15 bp, Homo sapiens
tgattctcatgactc

SEQ ID NO: 640771 - DNA, 15 bp, Homo sapiens
gattctcatgactca

SEQ ID NO: 640772 - DNA, 15 bp, Homo sapiens
attctcatgactcag

SEQ ID NO: 640773 - DNA, 15 bp, Homo sapiens
ttctcatgactcagc

SEQ ID NO: 640774 - DNA, 15 bp, Homo sapiens
tctcatgactcagcc

SEQ ID NO: 640775 - DNA, 15 bp, Homo sapiens
ctcatgactcagcct

SEQ ID NO: 640776 - DNA, 15 bp, Homo sapiens
tcatgactcagcctc

SEQ ID NO: 640777 - DNA, 15 bp, Homo sapiens
catgactcagcctcc

SEQ ID NO: 640778 - DNA, 15 bp, Homo sapiens
atgactcagcctcct

SEQ ID NO: 640779 - DNA, 15 bp, Homo sapiens
tgactcagcctcctg

SEQ ID NO: 640780 - DNA, 15 bp, Homo sapiens
gactcagcctcctga

SEQ ID NO: 640781 - DNA, 15 bp, Homo sapiens
actcagcctcctgag

SEQ ID NO: 640782 - DNA, 15 bp, Homo sapiens
ctcagcctcctgagt

SEQ ID NO: 640783 - DNA, 15 bp, Homo sapiens
tcagcctcctgagta

SEQ ID NO: 640784 - DNA, 15 bp, Homo sapiens
cagcctcctgagtag

SEQ ID NO: 640785 - DNA, 15 bp, Homo sapiens
agcctcctgagtagc

SEQ ID NO: 640786 - DNA, 15 bp, Homo sapiens
gcctcctgagtagct

SEQ ID NO: 640787 - DNA, 15 bp, Homo sapiens
cctcctgagtagctg

SEQ ID NO: 640788 - DNA, 15 bp, Homo sapiens
ctcctgagtagctgg

SEQ ID NO: 640789 - DNA, 15 bp, Homo sapiens
tcctgagtagctggg

SEQ ID NO: 640790 - DNA, 15 bp, Homo sapiens
cctgagtagctggga

SEQ ID NO: 640791 - DNA, 15 bp, Homo sapiens
ctgagtagctgggat

SEQ ID NO: 640792 - DNA, 15 bp, Homo sapiens
tgagtagctgggatt

SEQ ID NO: 640793 - DNA, 15 bp, Homo sapiens
gagtagctgggatta

SEQ ID NO: 640794 - DNA, 15 bp, Homo sapiens
agtagctgggattac

SEQ ID NO: 640795 - DNA, 15 bp, Homo sapiens
gtagctgggattaca

SEQ ID NO: 640796 - DNA, 15 bp, Homo sapiens
tagctgggattacag

SEQ ID NO: 640797 - DNA, 15 bp, Homo sapiens
agctgggattacagg

SEQ ID NO: 640798 - DNA, 15 bp, Homo sapiens
gctgggattacaggc

SEQ ID NO: 640799 - DNA, 15 bp, Homo sapiens
ctgggattacaggcg

SEQ ID NO: 640800 - DNA, 15 bp, Homo sapiens
tgggattacaggcgc

SEQ ID NO: 640801 - DNA, 15 bp, Homo sapiens
gggattacaggcgcc

SEQ ID NO: 640802 - DNA, 15 bp, Homo sapiens
ggattacaggcgccc

SEQ ID NO: 640803 - DNA, 15 bp, Homo sapiens
gattacaggcgcccg

SEQ ID NO: 640804 - DNA, 15 bp, Homo sapiens
attacaggcgcccgc

SEQ ID NO: 640805 - DNA, 15 bp, Homo sapiens
ttacaggcgcccgcc

SEQ ID NO: 640806 - DNA, 15 bp, Homo sapiens
tacaggcgcccgcca

SEQ ID NO: 640807 - DNA, 15 bp, Homo sapiens
acaggcgcccgccac

SEQ ID NO: 640808 - DNA, 15 bp, Homo sapiens
caggcgcccgccact

SEQ ID NO: 640809 - DNA, 15 bp, Homo sapiens
aggcgcccgccacta

SEQ ID NO: 640810 - DNA, 15 bp, Homo sapiens
ggcgcccgccactat

SEQ ID NO: 640811 - DNA, 15 bp, Homo sapiens
gcgcccgccactatg

SEQ ID NO: 640812 - DNA, 15 bp, Homo sapiens
cgcccgccactatgc

SEQ ID NO: 640813 - DNA, 15 bp, Homo sapiens
gcccgccactatgcc

SEQ ID NO: 640814 - DNA, 15 bp, Homo sapiens
cccgccactatgccc

SEQ ID NO: 640815 - DNA, 15 bp, Homo sapiens
ccgccactatgccca

SEQ ID NO: 640816 - DNA, 15 bp, Homo sapiens
cgccactatgcccag

SEQ ID NO: 640817 - DNA, 15 bp, Homo sapiens
gccactatgcccagc

SEQ ID NO: 640818 - DNA, 15 bp, Homo sapiens
ccactatgcccagct

SEQ ID NO: 640819 - DNA, 15 bp, Homo sapiens
cactatgcccagcta

SEQ ID NO: 640820 - DNA, 15 bp, Homo sapiens
actatgcccagctaa

SEQ ID NO: 640821 - DNA, 15 bp, Homo sapiens
ctatgcccagctaaa

SEQ ID NO: 640822 - DNA, 15 bp, Homo sapiens
tatgcccagctaaat

SEQ ID NO: 640823 - DNA, 15 bp, Homo sapiens
atgcccagctaaatt

SEQ ID NO: 640824 - DNA, 15 bp, Homo sapiens
tgcccagctaaattt

SEQ ID NO: 640825 - DNA, 15 bp, Homo sapiens
gcccagctaaatttt

SEQ ID NO: 640826 - DNA, 15 bp, Homo sapiens
cccagctaaattttg

SEQ ID NO: 640827 - DNA, 15 bp, Homo sapiens
ccagctaaattttgt

SEQ ID NO: 640828 - DNA, 15 bp, Homo sapiens
cagctaaattttgta

SEQ ID NO: 640829 - DNA, 15 bp, Homo sapiens
agctaaattttgtat

SEQ ID NO: 640830 - DNA, 15 bp, Homo sapiens
gctaaattttgtatt

SEQ ID NO: 640831 - DNA, 15 bp, Homo sapiens
ctaaattttgtattt

SEQ ID NO: 640832 - DNA, 15 bp, Homo sapiens
taaattttgtatttt

SEQ ID NO: 640833 - DNA, 15 bp, Homo sapiens
aaattttgtattttt

SEQ ID NO: 640834 - DNA, 15 bp, Homo sapiens
aattttgtattttta

SEQ ID NO: 640835 - DNA, 15 bp, Homo sapiens
attttgtatttttag

SEQ ID NO: 640836 - DNA, 15 bp, Homo sapiens
ttttgtatttttagt

SEQ ID NO: 640837 - DNA, 15 bp, Homo sapiens
tttgtatttttagta

SEQ ID NO: 640838 - DNA, 15 bp, Homo sapiens
ttgtatttttagtag

SEQ ID NO: 640839 - DNA, 15 bp, Homo sapiens
tgtatttttagtaga

SEQ ID NO: 640840 - DNA, 15 bp, Homo sapiens
gtatttttagtagag

SEQ ID NO: 640841 - DNA, 15 bp, Homo sapiens
tatttttagtagaga

SEQ ID NO: 640842 - DNA, 15 bp, Homo sapiens
atttttagtagagat

SEQ ID NO: 640843 - DNA, 15 bp, Homo sapiens
tttttagtagagatg

SEQ ID NO: 640844 - DNA, 15 bp, Homo sapiens
ttttagtagagatgg

SEQ ID NO: 640845 - DNA, 15 bp, Homo sapiens
tttagtagagatggg

SEQ ID NO: 640846 - DNA, 15 bp, Homo sapiens
ttagtagagatgggg

SEQ ID NO: 640847 - DNA, 15 bp, Homo sapiens
tagtagagatggggt

SEQ ID NO: 640848 - DNA, 15 bp, Homo sapiens
agtagagatggggtt

SEQ ID NO: 640849 - DNA, 15 bp, Homo sapiens
gtagagatggggttt

SEQ ID NO: 640850 - DNA, 15 bp, Homo sapiens
tagagatggggtttc

SEQ ID NO: 640851 - DNA, 15 bp, Homo sapiens
agagatggggtttca

SEQ ID NO: 640852 - DNA, 15 bp, Homo sapiens
gagatggggtttcac

SEQ ID NO: 640853 - DNA, 15 bp, Homo sapiens
agatggggtttcacc

SEQ ID NO: 640854 - DNA, 15 bp, Homo sapiens
gatggggtttcacca

SEQ ID NO: 640855 - DNA, 15 bp, Homo sapiens
atggggtttcaccat

SEQ ID NO: 640856 - DNA, 15 bp, Homo sapiens
tggggtttcaccatt

SEQ ID NO: 640857 - DNA, 15 bp, Homo sapiens
ggggtttcaccattt

SEQ ID NO: 640858 - DNA, 15 bp, Homo sapiens
gggtttcaccatttt

SEQ ID NO: 640859 - DNA, 15 bp, Homo sapiens
ggtttcaccattttg

SEQ ID NO: 640860 - DNA, 15 bp, Homo sapiens
gtttcaccattttgg

SEQ ID NO: 640861 - DNA, 15 bp, Homo sapiens
tttcaccattttgga

SEQ ID NO: 640862 - DNA, 15 bp, Homo sapiens
ttcaccattttggac

SEQ ID NO: 640863 - DNA, 15 bp, Homo sapiens
tcaccattttggaca

SEQ ID NO: 640864 - DNA, 15 bp, Homo sapiens
caccattttggacag

SEQ ID NO: 640865 - DNA, 15 bp, Homo sapiens
accattttggacagg

SEQ ID NO: 640866 - DNA, 15 bp, Homo sapiens
ccattttggacaggc

SEQ ID NO: 640867 - DNA, 15 bp, Homo sapiens
cattttggacaggct

SEQ ID NO: 640868 - DNA, 15 bp, Homo sapiens
attttggacaggctg

SEQ ID NO: 640869 - DNA, 15 bp, Homo sapiens
ttttggacaggctgg

SEQ ID NO: 640870 - DNA, 15 bp, Homo sapiens
tttggacaggctggt

SEQ ID NO: 640871 - DNA, 15 bp, Homo sapiens
ttggacaggctggtc

SEQ ID NO: 640872 - DNA, 15 bp, Homo sapiens
tggacaggctggtct

SEQ ID NO: 640873 - DNA, 15 bp, Homo sapiens
ggacaggctggtctc

SEQ ID NO: 640874 - DNA, 15 bp, Homo sapiens
gacaggctggtctca

SEQ ID NO: 640875 - DNA, 15 bp, Homo sapiens
acaggctggtctcaa

SEQ ID NO: 640876 - DNA, 15 bp, Homo sapiens
caggctggtctcaat

SEQ ID NO: 640877 - DNA, 15 bp, Homo sapiens
aggctggtctcaatc

SEQ ID NO: 640878 - DNA, 15 bp, Homo sapiens
ggctggtctcaatct

SEQ ID NO: 640879 - DNA, 15 bp, Homo sapiens
gctggtctcaatctc

SEQ ID NO: 640880 - DNA, 15 bp, Homo sapiens
ctggtctcaatctcc

SEQ ID NO: 640881 - DNA, 15 bp, Homo sapiens
tggtctcaatctcct

SEQ ID NO: 640882 - DNA, 15 bp, Homo sapiens
ggtctcaatctcctc

SEQ ID NO: 640883 - DNA, 15 bp, Homo sapiens
gtctcaatctcctca

SEQ ID NO: 640884 - DNA, 15 bp, Homo sapiens
tctcaatctcctcag

SEQ ID NO: 640885 - DNA, 15 bp, Homo sapiens
ctcaatctcctcagg

SEQ ID NO: 640886 - DNA, 15 bp, Homo sapiens
tcaatctcctcaggt

SEQ ID NO: 640887 - DNA, 15 bp, Homo sapiens
caatctcctcaggtc

SEQ ID NO: 640888 - DNA, 15 bp, Homo sapiens
aatctcctcaggtca

SEQ ID NO: 640889 - DNA, 15 bp, Homo sapiens
atctcctcaggtcat

SEQ ID NO: 640890 - DNA, 15 bp, Homo sapiens
tctcctcaggtcatc

SEQ ID NO: 640891 - DNA, 15 bp, Homo sapiens
ctcctcaggtcatct

SEQ ID NO: 640892 - DNA, 15 bp, Homo sapiens
tcctcaggtcatctg

SEQ ID NO: 640893 - DNA, 15 bp, Homo sapiens
cctcaggtcatctgc

SEQ ID NO: 640894 - DNA, 15 bp, Homo sapiens
ctcaggtcatctgcc

SEQ ID NO: 640895 - DNA, 15 bp, Homo sapiens
tcaggtcatctgcct

SEQ ID NO: 640896 - DNA, 15 bp, Homo sapiens
caggtcatctgcctg

SEQ ID NO: 640897 - DNA, 15 bp, Homo sapiens
aggtcatctgcctgc

SEQ ID NO: 640898 - DNA, 15 bp, Homo sapiens
ggtcatctgcctgcc

SEQ ID NO: 640899 - DNA, 15 bp, Homo sapiens
gtcatctgcctgcct

SEQ ID NO: 640900 - DNA, 15 bp, Homo sapiens
tcatctgcctgcctc

SEQ ID NO: 640901 - DNA, 15 bp, Homo sapiens
catctgcctgcctca

SEQ ID NO: 640902 - DNA, 15 bp, Homo sapiens
atctgcctgcctcag

SEQ ID NO: 640903 - DNA, 15 bp, Homo sapiens
tctgcctgcctcagc

SEQ ID NO: 640904 - DNA, 15 bp, Homo sapiens
ctgcctgcctcagcc

SEQ ID NO: 640905 - DNA, 15 bp, Homo sapiens
tgcctgcctcagcct

SEQ ID NO: 640906 - DNA, 15 bp, Homo sapiens
gcctgcctcagcctc

SEQ ID NO: 640907 - DNA, 15 bp, Homo sapiens
cctgcctcagcctcc

SEQ ID NO: 640908 - DNA, 15 bp, Homo sapiens
ctgcctcagcctccc

SEQ ID NO: 640909 - DNA, 15 bp, Homo sapiens
tgcctcagcctccca

SEQ ID NO: 640910 - DNA, 15 bp, Homo sapiens
gcctcagcctcccaa

SEQ ID NO: 640911 - DNA, 15 bp, Homo sapiens
cctcagcctcccaaa

SEQ ID NO: 640912 - DNA, 15 bp, Homo sapiens
ctcagcctcccaaag

SEQ ID NO: 640913 - DNA, 15 bp, Homo sapiens
tcagcctcccaaagt

SEQ ID NO: 640914 - DNA, 15 bp, Homo sapiens
cagcctcccaaagtg

SEQ ID NO: 640915 - DNA, 15 bp, Homo sapiens
agcctcccaaagtgc

SEQ ID NO: 640916 - DNA, 15 bp, Homo sapiens
gcctcccaaagtgct

SEQ ID NO: 640917 - DNA, 15 bp, Homo sapiens
cctcccaaagtgctg

SEQ ID NO: 640918 - DNA, 15 bp, Homo sapiens
ctcccaaagtgctga

SEQ ID NO: 640919 - DNA, 15 bp, Homo sapiens
tcccaaagtgctgag

SEQ ID NO: 640920 - DNA, 15 bp, Homo sapiens
cccaaagtgctgaga

SEQ ID NO: 640921 - DNA, 15 bp, Homo sapiens
ccaaagtgctgagat

SEQ ID NO: 640922 - DNA, 15 bp, Homo sapiens
caaagtgctgagatt

SEQ ID NO: 640923 - DNA, 15 bp, Homo sapiens
aaagtgctgagatta

SEQ ID NO: 640924 - DNA, 15 bp, Homo sapiens
aagtgctgagattac

SEQ ID NO: 640925 - DNA, 15 bp, Homo sapiens
agtgctgagattaca

SEQ ID NO: 640926 - DNA, 15 bp, Homo sapiens
gtgctgagattacag

SEQ ID NO: 640927 - DNA, 15 bp, Homo sapiens
tgctgagattacagg

SEQ ID NO: 640928 - DNA, 15 bp, Homo sapiens
gctgagattacaggc

SEQ ID NO: 640929 - DNA, 15 bp, Homo sapiens
ctgagattacaggcg

SEQ ID NO: 640930 - DNA, 15 bp, Homo sapiens
tgagattacaggcgt

SEQ ID NO: 640931 - DNA, 15 bp, Homo sapiens
gagattacaggcgtg

SEQ ID NO: 640932 - DNA, 15 bp, Homo sapiens
agattacaggcgtga

SEQ ID NO: 640933 - DNA, 15 bp, Homo sapiens
gattacaggcgtgag

SEQ ID NO: 640934 - DNA, 15 bp, Homo sapiens
attacaggcgtgaga

SEQ ID NO: 640935 - DNA, 15 bp, Homo sapiens
ttacaggcgtgagaa

SEQ ID NO: 640936 - DNA, 15 bp, Homo sapiens
tacaggcgtgagaaa

SEQ ID NO: 640937 - DNA, 15 bp, Homo sapiens
acaggcgtgagaaaa

SEQ ID NO: 640938 - DNA, 15 bp, Homo sapiens
caggcgtgagaaaac

SEQ ID NO: 640939 - DNA, 15 bp, Homo sapiens
aggcgtgagaaaact

SEQ ID NO: 640940 - DNA, 15 bp, Homo sapiens
ggcgtgagaaaacta

SEQ ID NO: 640941 - DNA, 15 bp, Homo sapiens
gcgtgagaaaactag

SEQ ID NO: 640942 - DNA, 15 bp, Homo sapiens
cgtgagaaaactagg

SEQ ID NO: 640943 - DNA, 15 bp, Homo sapiens
gtgagaaaactaggg

SEQ ID NO: 640944 - DNA, 15 bp, Homo sapiens
tgagaaaactagggc

SEQ ID NO: 640945 - DNA, 15 bp, Homo sapiens
gagaaaactagggca

SEQ ID NO: 640946 - DNA, 15 bp, Homo sapiens
agaaaactagggcag

SEQ ID NO: 640947 - DNA, 15 bp, Homo sapiens
gaaaactagggcagt

SEQ ID NO: 640948 - DNA, 15 bp, Homo sapiens
aaaactagggcagtg

SEQ ID NO: 640949 - DNA, 15 bp, Homo sapiens
aaactagggcagtgc

SEQ ID NO: 640950 - DNA, 15 bp, Homo sapiens
aactagggcagtgct

SEQ ID NO: 640951 - DNA, 15 bp, Homo sapiens
actagggcagtgctg

SEQ ID NO: 640952 - DNA, 15 bp, Homo sapiens
ctagggcagtgctgt

SEQ ID NO: 640953 - DNA, 15 bp, Homo sapiens
tagggcagtgctgtg

SEQ ID NO: 640954 - DNA, 15 bp, Homo sapiens
agggcagtgctgtga

SEQ ID NO: 640955 - DNA, 15 bp, Homo sapiens
gggcagtgctgtgat

SEQ ID NO: 640956 - DNA, 15 bp, Homo sapiens
ggcagtgctgtgatc

SEQ ID NO: 640957 - DNA, 15 bp, Homo sapiens
gcagtgctgtgatca

SEQ ID NO: 640958 - DNA, 15 bp, Homo sapiens
cagtgctgtgatcag

SEQ ID NO: 640959 - DNA, 15 bp, Homo sapiens
agtgctgtgatcaga

SEQ ID NO: 640960 - DNA, 15 bp, Homo sapiens
gtgctgtgatcagag

SEQ ID NO: 640961 - DNA, 15 bp, Homo sapiens
tgctgtgatcagagg

SEQ ID NO: 640962 - DNA, 15 bp, Homo sapiens
gctgtgatcagaggc

SEQ ID NO: 640963 - DNA, 15 bp, Homo sapiens
ctgtgatcagaggca

SEQ ID NO: 640964 - DNA, 15 bp, Homo sapiens
tgtgatcagaggcaa

SEQ ID NO: 640965 - DNA, 15 bp, Homo sapiens
gtgatcagaggcaac

SEQ ID NO: 640966 - DNA, 15 bp, Homo sapiens
tgatcagaggcaacc

SEQ ID NO: 640967 - DNA, 15 bp, Homo sapiens
gatcagaggcaacca

SEQ ID NO: 640968 - DNA, 15 bp, Homo sapiens
atcagaggcaaccac

SEQ ID NO: 640969 - DNA, 15 bp, Homo sapiens
tcagaggcaaccacg

SEQ ID NO: 640970 - DNA, 15 bp, Homo sapiens
cagaggcaaccacgc

SEQ ID NO: 640971 - DNA, 15 bp, Homo sapiens
agaggcaaccacgca

SEQ ID NO: 640972 - DNA, 15 bp, Homo sapiens
gaggcaaccacgcag

SEQ ID NO: 640973 - DNA, 15 bp, Homo sapiens
aggcaaccacgcaga

SEQ ID NO: 640974 - DNA, 15 bp, Homo sapiens
ggcaaccacgcagaa

SEQ ID NO: 640975 - DNA, 15 bp, Homo sapiens
gcaaccacgcagaag

SEQ ID NO: 640976 - DNA, 15 bp, Homo sapiens
caaccacgcagaagt

SEQ ID NO: 640977 - DNA, 15 bp, Homo sapiens
aaccacgcagaagta

SEQ ID NO: 640978 - DNA, 15 bp, Homo sapiens
accacgcagaagtag

SEQ ID NO: 640979 - DNA, 15 bp, Homo sapiens
ccacgcagaagtagc

SEQ ID NO: 640980 - DNA, 15 bp, Homo sapiens
cacgcagaagtagcc

SEQ ID NO: 640981 - DNA, 15 bp, Homo sapiens
acgcagaagtagcca

SEQ ID NO: 640982 - DNA, 15 bp, Homo sapiens
cgcagaagtagccag

SEQ ID NO: 640983 - DNA, 15 bp, Homo sapiens
gcagaagtagccaga

SEQ ID NO: 640984 - DNA, 15 bp, Homo sapiens
cagaagtagccagaa

SEQ ID NO: 640985 - DNA, 15 bp, Homo sapiens
agaagtagccagaac

SEQ ID NO: 640986 - DNA, 15 bp, Homo sapiens
gaagtagccagaact

SEQ ID NO: 640987 - DNA, 15 bp, Homo sapiens
aagtagccagaactc

SEQ ID NO: 640988 - DNA, 15 bp, Homo sapiens
agtagccagaactca

SEQ ID NO: 640989 - DNA, 15 bp, Homo sapiens
gtagccagaactcac

SEQ ID NO: 640990 - DNA, 15 bp, Homo sapiens
tagccagaactcaca

SEQ ID NO: 640991 - DNA, 15 bp, Homo sapiens
agccagaactcacac

SEQ ID NO: 640992 - DNA, 15 bp, Homo sapiens
gccagaactcacaca

SEQ ID NO: 640993 - DNA, 15 bp, Homo sapiens
ccagaactcacacag

SEQ ID NO: 640994 - DNA, 15 bp, Homo sapiens
cagaactcacacaga

SEQ ID NO: 640995 - DNA, 15 bp, Homo sapiens
agaactcacacagac

SEQ ID NO: 640996 - DNA, 15 bp, Homo sapiens
gaactcacacagaca

SEQ ID NO: 640997 - DNA, 15 bp, Homo sapiens
aactcacacagacac

SEQ ID NO: 640998 - DNA, 15 bp, Homo sapiens
actcacacagacaca

SEQ ID NO: 640999 - DNA, 15 bp, Homo sapiens
ctcacacagacacag

SEQ ID NO: 641000 - DNA, 15 bp, Homo sapiens
tcacacagacacagt

SEQ ID NO: 641001 - DNA, 15 bp, Homo sapiens
cacacagacacagtc

SEQ ID NO: 641002 - DNA, 15 bp, Homo sapiens
acacagacacagtca

SEQ ID NO: 641003 - DNA, 15 bp, Homo sapiens
cacagacacagtcac

SEQ ID NO: 641004 - DNA, 15 bp, Homo sapiens
acagacacagtcact

SEQ ID NO: 641005 - DNA, 15 bp, Homo sapiens
cagacacagtcacta

SEQ ID NO: 641006 - DNA, 15 bp, Homo sapiens
agacacagtcactat

SEQ ID NO: 641007 - DNA, 15 bp, Homo sapiens
gacacagtcactatg

SEQ ID NO: 641008 - DNA, 15 bp, Homo sapiens
acacagtcactatgc

SEQ ID NO: 641009 - DNA, 15 bp, Homo sapiens
cacagtcactatgct

SEQ ID NO: 641010 - DNA, 15 bp, Homo sapiens
acagtcactatgcta

SEQ ID NO: 641011 - DNA, 15 bp, Homo sapiens
cagtcactatgctac

SEQ ID NO: 641012 - DNA, 15 bp, Homo sapiens
agtcactatgctact

SEQ ID NO: 641013 - DNA, 15 bp, Homo sapiens
gtcactatgctactg

SEQ ID NO: 641014 - DNA, 15 bp, Homo sapiens
tcactatgctactgt

SEQ ID NO: 641015 - DNA, 15 bp, Homo sapiens
cactatgctactgtt

SEQ ID NO: 641016 - DNA, 15 bp, Homo sapiens
actatgctactgttt

SEQ ID NO: 641017 - DNA, 15 bp, Homo sapiens
ctatgctactgtttt

SEQ ID NO: 641018 - DNA, 15 bp, Homo sapiens
tatgctactgttttc

SEQ ID NO: 641019 - DNA, 15 bp, Homo sapiens
atgctactgttttct

SEQ ID NO: 641020 - DNA, 15 bp, Homo sapiens
tgctactgttttctt

SEQ ID NO: 641021 - DNA, 15 bp, Homo sapiens
gctactgttttcttt

SEQ ID NO: 641022 - DNA, 15 bp, Homo sapiens
ctactgttttctttg

SEQ ID NO: 641023 - DNA, 15 bp, Homo sapiens
tactgttttctttgt

SEQ ID NO: 641024 - DNA, 15 bp, Homo sapiens
actgttttctttgtg

SEQ ID NO: 641025 - DNA, 15 bp, Homo sapiens
ctgttttctttgtga

SEQ ID NO: 641026 - DNA, 15 bp, Homo sapiens
tgttttctttgtgat

SEQ ID NO: 641027 - DNA, 15 bp, Homo sapiens
gttttctttgtgata

SEQ ID NO: 641028 - DNA, 15 bp, Homo sapiens
ttttctttgtgataa

SEQ ID NO: 641029 - DNA, 15 bp, Homo sapiens
tttctttgtgataag

SEQ ID NO: 641030 - DNA, 15 bp, Homo sapiens
ttctttgtgataagc

SEQ ID NO: 641031 - DNA, 15 bp, Homo sapiens
tctttgtgataagcc

SEQ ID NO: 641032 - DNA, 15 bp, Homo sapiens
ctttgtgataagcct

SEQ ID NO: 641033 - DNA, 15 bp, Homo sapiens
tttgtgataagcctg

SEQ ID NO: 641034 - DNA, 15 bp, Homo sapiens
ttgtgataagcctga

SEQ ID NO: 641035 - DNA, 15 bp, Homo sapiens
tgtgataagcctgac

SEQ ID NO: 641036 - DNA, 15 bp, Homo sapiens
gtgataagcctgaca

SEQ ID NO: 641037 - DNA, 15 bp, Homo sapiens
tgataagcctgacag

SEQ ID NO: 641038 - DNA, 15 bp, Homo sapiens
gataagcctgacagg

SEQ ID NO: 641039 - DNA, 15 bp, Homo sapiens
ataagcctgacaggc

SEQ ID NO: 641040 - DNA, 15 bp, Homo sapiens
taagcctgacaggcc

SEQ ID NO: 641041 - DNA, 15 bp, Homo sapiens
aagcctgacaggcca

SEQ ID NO: 641042 - DNA, 15 bp, Homo sapiens
agcctgacaggccac

SEQ ID NO: 641043 - DNA, 15 bp, Homo sapiens
gcctgacaggccacc

SEQ ID NO: 641044 - DNA, 15 bp, Homo sapiens
cctgacaggccacct

SEQ ID NO: 641045 - DNA, 15 bp, Homo sapiens
ctgacaggccacctt

SEQ ID NO: 641046 - DNA, 15 bp, Homo sapiens
tgacaggccaccttg

SEQ ID NO: 641047 - DNA, 15 bp, Homo sapiens
gacaggccaccttgt

SEQ ID NO: 641048 - DNA, 15 bp, Homo sapiens
acaggccaccttgta

SEQ ID NO: 641049 - DNA, 15 bp, Homo sapiens
caggccaccttgtaa

SEQ ID NO: 641050 - DNA, 15 bp, Homo sapiens
aggccaccttgtaat

SEQ ID NO: 641051 - DNA, 15 bp, Homo sapiens
ggccaccttgtaatc

SEQ ID NO: 641052 - DNA, 15 bp, Homo sapiens
gccaccttgtaatca

SEQ ID NO: 641053 - DNA, 15 bp, Homo sapiens
ccaccttgtaatcag

SEQ ID NO: 641054 - DNA, 15 bp, Homo sapiens
caccttgtaatcagt

SEQ ID NO: 641055 - DNA, 15 bp, Homo sapiens
accttgtaatcagtg

SEQ ID NO: 641056 - DNA, 15 bp, Homo sapiens
ccttgtaatcagtga

SEQ ID NO: 641057 - DNA, 15 bp, Homo sapiens
ttgtaatcagtgagt

SEQ ID NO: 641058 - DNA, 15 bp, Homo sapiens
tgtaatcagtgagtc

SEQ ID NO: 641059 - DNA, 15 bp, Homo sapiens
gtaatcagtgagtct

SEQ ID NO: 641060 - DNA, 15 bp, Homo sapiens
taatcagtgagtctg

SEQ ID NO: 641061 - DNA, 15 bp, Homo sapiens
aatcagtgagtctgt

SEQ ID NO: 641062 - DNA, 15 bp, Homo sapiens
atcagtgagtctgtc

SEQ ID NO: 641063 - DNA, 15 bp, Homo sapiens
tcagtgagtctgtcg

SEQ ID NO: 641064 - DNA, 15 bp, Homo sapiens
cagtgagtctgtcgt

SEQ ID NO: 641065 - DNA, 15 bp, Homo sapiens
agtgagtctgtcgtg

SEQ ID NO: 641066 - DNA, 15 bp, Homo sapiens
gtgagtctgtcgtgt

SEQ ID NO: 641067 - DNA, 15 bp, Homo sapiens
tgagtctgtcgtgta

SEQ ID NO: 641068 - DNA, 15 bp, Homo sapiens
gagtctgtcgtgtac

SEQ ID NO: 641069 - DNA, 15 bp, Homo sapiens
agtctgtcgtgtact

SEQ ID NO: 641070 - DNA, 15 bp, Homo sapiens
gtctgtcgtgtactc

SEQ ID NO: 641071 - DNA, 15 bp, Homo sapiens
tctgtcgtgtactca

SEQ ID NO: 641072 - DNA, 15 bp, Homo sapiens
ctgtcgtgtactcag

SEQ ID NO: 641073 - DNA, 15 bp, Homo sapiens
tgtcgtgtactcagg

SEQ ID NO: 641074 - DNA, 15 bp, Homo sapiens
gtcgtgtactcaggg

SEQ ID NO: 641075 - DNA, 15 bp, Homo sapiens
tcgtgtactcagggc

SEQ ID NO: 641076 - DNA, 15 bp, Homo sapiens
cgtgtactcagggct

SEQ ID NO: 641077 - DNA, 15 bp, Homo sapiens
gtgtactcagggctg

SEQ ID NO: 641078 - DNA, 15 bp, Homo sapiens
tgtactcagggctga

SEQ ID NO: 641079 - DNA, 15 bp, Homo sapiens
gtactcagggctgac

SEQ ID NO: 641080 - DNA, 15 bp, Homo sapiens
tactcagggctgact

SEQ ID NO: 641081 - DNA, 15 bp, Homo sapiens
actcagggctgactc

SEQ ID NO: 641082 - DNA, 15 bp, Homo sapiens
ctcagggctgactca

SEQ ID NO: 641083 - DNA, 15 bp, Homo sapiens
tcagggctgactcac

SEQ ID NO: 641084 - DNA, 15 bp, Homo sapiens
cagggctgactcact

SEQ ID NO: 641085 - DNA, 15 bp, Homo sapiens
agggctgactcactg

SEQ ID NO: 641086 - DNA, 15 bp, Homo sapiens
gggctgactcactgt

SEQ ID NO: 641087 - DNA, 15 bp, Homo sapiens
ggctgactcactgtc

SEQ ID NO: 641088 - DNA, 15 bp, Homo sapiens
gctgactcactgtca

SEQ ID NO: 641089 - DNA, 15 bp, Homo sapiens
ctgactcactgtcat

SEQ ID NO: 641090 - DNA, 15 bp, Homo sapiens
tgactcactgtcata

SEQ ID NO: 641091 - DNA, 15 bp, Homo sapiens
gactcactgtcatag

SEQ ID NO: 641092 - DNA, 15 bp, Homo sapiens
actcactgtcatagc

SEQ ID NO: 641093 - DNA, 15 bp, Homo sapiens
ctcactgtcatagca

SEQ ID NO: 641094 - DNA, 15 bp, Homo sapiens
tcactgtcatagcat

SEQ ID NO: 641095 - DNA, 15 bp, Homo sapiens
cactgtcatagcatg

SEQ ID NO: 641096 - DNA, 15 bp, Homo sapiens
actgtcatagcatgg

SEQ ID NO: 641097 - DNA, 15 bp, Homo sapiens
ctgtcatagcatggc

SEQ ID NO: 641098 - DNA, 15 bp, Homo sapiens
tgtcatagcatggcc

SEQ ID NO: 641099 - DNA, 15 bp, Homo sapiens
gtcatagcatggcct

SEQ ID NO: 641100 - DNA, 15 bp, Homo sapiens
tcatagcatggcctt

SEQ ID NO: 641101 - DNA, 15 bp, Homo sapiens
catagcatggccttt

SEQ ID NO: 641102 - DNA, 15 bp, Homo sapiens
atagcatggcctttg

SEQ ID NO: 641103 - DNA, 15 bp, Homo sapiens
tagcatggcctttgc

SEQ ID NO: 641104 - DNA, 15 bp, Homo sapiens
agcatggcctttgca

SEQ ID NO: 641105 - DNA, 15 bp, Homo sapiens
gcatggcctttgcag

SEQ ID NO: 641106 - DNA, 15 bp, Homo sapiens
catggcctttgcagt

SEQ ID NO: 641107 - DNA, 15 bp, Homo sapiens
atggcctttgcagtg

SEQ ID NO: 641108 - DNA, 15 bp, Homo sapiens
tggcctttgcagtgt

SEQ ID NO: 641109 - DNA, 15 bp, Homo sapiens
ggcctttgcagtgtg

SEQ ID NO: 641110 - DNA, 15 bp, Homo sapiens
gcctttgcagtgtgc

SEQ ID NO: 641111 - DNA, 15 bp, Homo sapiens
cctttgcagtgtgcc

SEQ ID NO: 641112 - DNA, 15 bp, Homo sapiens
ctttgcagtgtgcct

SEQ ID NO: 641113 - DNA, 15 bp, Homo sapiens
tttgcagtgtgcctc

SEQ ID NO: 641114 - DNA, 15 bp, Homo sapiens
ttgcagtgtgcctca

SEQ ID NO: 641115 - DNA, 15 bp, Homo sapiens
tgcagtgtgcctcat

SEQ ID NO: 641116 - DNA, 15 bp, Homo sapiens
gcagtgtgcctcatg

SEQ ID NO: 641117 - DNA, 15 bp, Homo sapiens
cagtgtgcctcatgc

SEQ ID NO: 641118 - DNA, 15 bp, Homo sapiens
agtgtgcctcatgct

SEQ ID NO: 641119 - DNA, 15 bp, Homo sapiens
gtgtgcctcatgctg

SEQ ID NO: 641120 - DNA, 15 bp, Homo sapiens
tgtgcctcatgctgg

SEQ ID NO: 641121 - DNA, 15 bp, Homo sapiens
gtgcctcatgctggc

SEQ ID NO: 641122 - DNA, 15 bp, Homo sapiens
tgcctcatgctggct

SEQ ID NO: 641123 - DNA, 15 bp, Homo sapiens
gcctcatgctggctc

SEQ ID NO: 641124 - DNA, 15 bp, Homo sapiens
cctcatgctggctca

SEQ ID NO: 641125 - DNA, 15 bp, Homo sapiens
ctcatgctggctcaa

SEQ ID NO: 641126 - DNA, 15 bp, Homo sapiens
tcatgctggctcaag

SEQ ID NO: 641127 - DNA, 15 bp, Homo sapiens
catgctggctcaagt

SEQ ID NO: 641128 - DNA, 15 bp, Homo sapiens
atgctggctcaagtt

SEQ ID NO: 641129 - DNA, 15 bp, Homo sapiens
tgctggctcaagttc

SEQ ID NO: 641130 - DNA, 15 bp, Homo sapiens
gctggctcaagttca

SEQ ID NO: 641131 - DNA, 15 bp, Homo sapiens
ctggctcaagttcag

SEQ ID NO: 641132 - DNA, 15 bp, Homo sapiens
tggctcaagttcaga

SEQ ID NO: 641133 - DNA, 15 bp, Homo sapiens
ggctcaagttcagaa

SEQ ID NO: 641134 - DNA, 15 bp, Homo sapiens
gctcaagttcagaac

SEQ ID NO: 641135 - DNA, 15 bp, Homo sapiens
ctcaagttcagaaca

SEQ ID NO: 641136 - DNA, 15 bp, Homo sapiens
tcaagttcagaacag

SEQ ID NO: 641137 - DNA, 15 bp, Homo sapiens
caagttcagaacagc

SEQ ID NO: 641138 - DNA, 15 bp, Homo sapiens
aagttcagaacagct

SEQ ID NO: 641139 - DNA, 15 bp, Homo sapiens
agttcagaacagctt

SEQ ID NO: 641140 - DNA, 15 bp, Homo sapiens
gttcagaacagctta

SEQ ID NO: 641141 - DNA, 15 bp, Homo sapiens
ttcagaacagcttat

SEQ ID NO: 641142 - DNA, 15 bp, Homo sapiens
tcagaacagcttatt

SEQ ID NO: 641143 - DNA, 15 bp, Homo sapiens
cagaacagcttattt

SEQ ID NO: 641144 - DNA, 15 bp, Homo sapiens
agaacagcttatttg

SEQ ID NO: 641145 - DNA, 15 bp, Homo sapiens
gaacagcttatttgc

SEQ ID NO: 641146 - DNA, 15 bp, Homo sapiens
aacagcttatttgca

SEQ ID NO: 641147 - DNA, 15 bp, Homo sapiens
acagcttatttgcac

SEQ ID NO: 641148 - DNA, 15 bp, Homo sapiens
cagcttatttgcaca

SEQ ID NO: 641149 - DNA, 15 bp, Homo sapiens
agcttatttgcacat

SEQ ID NO: 641150 - DNA, 15 bp, Homo sapiens
gcttatttgcacata

SEQ ID NO: 641151 - DNA, 15 bp, Homo sapiens
cttatttgcacatag

SEQ ID NO: 641152 - DNA, 15 bp, Homo sapiens
ttatttgcacatagg

SEQ ID NO: 641153 - DNA, 15 bp, Homo sapiens
tatttgcacatagga

SEQ ID NO: 641154 - DNA, 15 bp, Homo sapiens
atttgcacataggaa

SEQ ID NO: 641155 - DNA, 15 bp, Homo sapiens
tttgcacataggaac

SEQ ID NO: 641156 - DNA, 15 bp, Homo sapiens
ttgcacataggaacc

SEQ ID NO: 641157 - DNA, 15 bp, Homo sapiens
tgcacataggaaccc

SEQ ID NO: 641158 - DNA, 15 bp, Homo sapiens
gcacataggaaccca

SEQ ID NO: 641159 - DNA, 15 bp, Homo sapiens
cacataggaacccac

SEQ ID NO: 641160 - DNA, 15 bp, Homo sapiens
acataggaacccaca

SEQ ID NO: 641161 - DNA, 15 bp, Homo sapiens
cataggaacccacat

SEQ ID NO: 641162 - DNA, 15 bp, Homo sapiens
ataggaacccacata

SEQ ID NO: 641163 - DNA, 15 bp, Homo sapiens
taggaacccacatat

SEQ ID NO: 641164 - DNA, 15 bp, Homo sapiens
aggaacccacatatt

SEQ ID NO: 641165 - DNA, 15 bp, Homo sapiens
ggaacccacatattc

SEQ ID NO: 641166 - DNA, 15 bp, Homo sapiens
gaacccacatattca

SEQ ID NO: 641167 - DNA, 15 bp, Homo sapiens
aacccacatattcag

SEQ ID NO: 641168 - DNA, 15 bp, Homo sapiens
acccacatattcagg

SEQ ID NO: 641169 - DNA, 15 bp, Homo sapiens
cccacatattcaggt

SEQ ID NO: 641170 - DNA, 15 bp, Homo sapiens
ccacatattcaggtt

SEQ ID NO: 641171 - DNA, 15 bp, Homo sapiens
cacatattcaggttc

SEQ ID NO: 641172 - DNA, 15 bp, Homo sapiens
acatattcaggttca

SEQ ID NO: 641173 - DNA, 15 bp, Homo sapiens
catattcaggttcaa

SEQ ID NO: 641174 - DNA, 15 bp, Homo sapiens
atattcaggttcaag

SEQ ID NO: 641175 - DNA, 15 bp, Homo sapiens
tattcaggttcaaga

SEQ ID NO: 641176 - DNA, 15 bp, Homo sapiens
attcaggttcaagaa

SEQ ID NO: 641177 - DNA, 15 bp, Homo sapiens
ttcaggttcaagaat

SEQ ID NO: 641178 - DNA, 15 bp, Homo sapiens
tcaggttcaagaatc

SEQ ID NO: 641179 - DNA, 15 bp, Homo sapiens
caggttcaagaatca

SEQ ID NO: 641180 - DNA, 15 bp, Homo sapiens
aggttcaagaatcaa

SEQ ID NO: 641181 - DNA, 15 bp, Homo sapiens
ggttcaagaatcaag

SEQ ID NO: 641182 - DNA, 15 bp, Homo sapiens
gttcaagaatcaagg

SEQ ID NO: 641183 - DNA, 15 bp, Homo sapiens
ttcaagaatcaaggg

SEQ ID NO: 641184 - DNA, 15 bp, Homo sapiens
tcaagaatcaagggt

SEQ ID NO: 641185 - DNA, 15 bp, Homo sapiens
caagaatcaagggtg

SEQ ID NO: 641186 - DNA, 15 bp, Homo sapiens
aagaatcaagggtgg

SEQ ID NO: 641187 - DNA, 15 bp, Homo sapiens
agaatcaagggtggg

SEQ ID NO: 641188 - DNA, 15 bp, Homo sapiens
gaatcaagggtgggg

SEQ ID NO: 641189 - DNA, 15 bp, Homo sapiens
aatcaagggtggggc

SEQ ID NO: 641190 - DNA, 15 bp, Homo sapiens
atcaagggtggggca

SEQ ID NO: 641191 - DNA, 15 bp, Homo sapiens
tcaagggtggggcac

SEQ ID NO: 641192 - DNA, 15 bp, Homo sapiens
caagggtggggcaca

SEQ ID NO: 641193 - DNA, 15 bp, Homo sapiens
aagggtggggcacat

SEQ ID NO: 641194 - DNA, 15 bp, Homo sapiens
agggtggggcacatc

SEQ ID NO: 641195 - DNA, 15 bp, Homo sapiens
gggtggggcacatct

SEQ ID NO: 641196 - DNA, 15 bp, Homo sapiens
ggtggggcacatctt

SEQ ID NO: 641197 - DNA, 15 bp, Homo sapiens
gtggggcacatcttg

SEQ ID NO: 641198 - DNA, 15 bp, Homo sapiens
tggggcacatcttgg

SEQ ID NO: 641199 - DNA, 15 bp, Homo sapiens
ggggcacatcttggc

SEQ ID NO: 641200 - DNA, 15 bp, Homo sapiens
gggcacatcttggct

SEQ ID NO: 641201 - DNA, 15 bp, Homo sapiens
ggcacatcttggcta

SEQ ID NO: 641202 - DNA, 15 bp, Homo sapiens
gcacatcttggctag

SEQ ID NO: 641203 - DNA, 15 bp, Homo sapiens
cacatcttggctaga

SEQ ID NO: 641204 - DNA, 15 bp, Homo sapiens
acatcttggctagaa

SEQ ID NO: 641205 - DNA, 15 bp, Homo sapiens
catcttggctagaaa

SEQ ID NO: 641206 - DNA, 15 bp, Homo sapiens
atcttggctagaaag

SEQ ID NO: 641207 - DNA, 15 bp, Homo sapiens
tcttggctagaaaga

SEQ ID NO: 641208 - DNA, 15 bp, Homo sapiens
cttggctagaaagac

SEQ ID NO: 641209 - DNA, 15 bp, Homo sapiens
ttggctagaaagaca

SEQ ID NO: 641210 - DNA, 15 bp, Homo sapiens
tggctagaaagacac

SEQ ID NO: 641211 - DNA, 15 bp, Homo sapiens
ggctagaaagacact

SEQ ID NO: 641212 - DNA, 15 bp, Homo sapiens
gctagaaagacacta

SEQ ID NO: 641213 - DNA, 15 bp, Homo sapiens
ctagaaagacactag

SEQ ID NO: 641214 - DNA, 15 bp, Homo sapiens
tagaaagacactagg

SEQ ID NO: 641215 - DNA, 15 bp, Homo sapiens
agaaagacactagga

SEQ ID NO: 641216 - DNA, 15 bp, Homo sapiens
gaaagacactaggaa

SEQ ID NO: 641217 - DNA, 15 bp, Homo sapiens
aaagacactaggaat

SEQ ID NO: 641218 - DNA, 15 bp, Homo sapiens
aagacactaggaatg

SEQ ID NO: 641219 - DNA, 15 bp, Homo sapiens
agacactaggaatgg

SEQ ID NO: 641220 - DNA, 15 bp, Homo sapiens
gacactaggaatggc

SEQ ID NO: 641221 - DNA, 15 bp, Homo sapiens
acactaggaatggct

SEQ ID NO: 641222 - DNA, 15 bp, Homo sapiens
cactaggaatggctc

SEQ ID NO: 641223 - DNA, 15 bp, Homo sapiens
actaggaatggctcc

SEQ ID NO: 641224 - DNA, 15 bp, Homo sapiens
ctaggaatggctccc

SEQ ID NO: 641225 - DNA, 15 bp, Homo sapiens
taggaatggctccct

SEQ ID NO: 641226 - DNA, 15 bp, Homo sapiens
aggaatggctccctc

SEQ ID NO: 641227 - DNA, 15 bp, Homo sapiens
ggaatggctccctca

SEQ ID NO: 641228 - DNA, 15 bp, Homo sapiens
gaatggctccctcag

SEQ ID NO: 641229 - DNA, 15 bp, Homo sapiens
aatggctccctcaga

SEQ ID NO: 641230 - DNA, 15 bp, Homo sapiens
atggctccctcagag

SEQ ID NO: 641231 - DNA, 15 bp, Homo sapiens
tggctccctcagagg

SEQ ID NO: 641232 - DNA, 15 bp, Homo sapiens
ggctccctcagagga

SEQ ID NO: 641233 - DNA, 15 bp, Homo sapiens
gctccctcagaggaa

SEQ ID NO: 641234 - DNA, 15 bp, Homo sapiens
ctccctcagaggaat

SEQ ID NO: 641235 - DNA, 15 bp, Homo sapiens
tccctcagaggaatt

SEQ ID NO: 641236 - DNA, 15 bp, Homo sapiens
ccctcagaggaattt

SEQ ID NO: 641237 - DNA, 15 bp, Homo sapiens
cctcagaggaattta

SEQ ID NO: 641238 - DNA, 15 bp, Homo sapiens
ctcagaggaatttat

SEQ ID NO: 641239 - DNA, 15 bp, Homo sapiens
tcagaggaatttata

SEQ ID NO: 641240 - DNA, 15 bp, Homo sapiens
cagaggaatttatag

SEQ ID NO: 641241 - DNA, 15 bp, Homo sapiens
agaggaatttatagt

SEQ ID NO: 641242 - DNA, 15 bp, Homo sapiens
gaggaatttatagtt

SEQ ID NO: 641243 - DNA, 15 bp, Homo sapiens
aggaatttatagttt

SEQ ID NO: 641244 - DNA, 15 bp, Homo sapiens
ggaatttatagtttt

SEQ ID NO: 641245 - DNA, 15 bp, Homo sapiens
gaatttatagttttc

SEQ ID NO: 641246 - DNA, 15 bp, Homo sapiens
aatttatagttttca

SEQ ID NO: 641247 - DNA, 15 bp, Homo sapiens
atttatagttttcac

SEQ ID NO: 641248 - DNA, 15 bp, Homo sapiens
tttatagttttcacc

SEQ ID NO: 641249 - DNA, 15 bp, Homo sapiens
ttatagttttcacct

SEQ ID NO: 641250 - DNA, 15 bp, Homo sapiens
tatagttttcacctt

SEQ ID NO: 641251 - DNA, 15 bp, Homo sapiens
atagttttcaccttc

SEQ ID NO: 641252 - DNA, 15 bp, Homo sapiens
tagttttcaccttca

SEQ ID NO: 641253 - DNA, 15 bp, Homo sapiens
agttttcaccttcat

SEQ ID NO: 641254 - DNA, 15 bp, Homo sapiens
gttttcaccttcatt

SEQ ID NO: 641255 - DNA, 15 bp, Homo sapiens
ttttcaccttcattt

SEQ ID NO: 641256 - DNA, 15 bp, Homo sapiens
tttcaccttcatttt

SEQ ID NO: 641257 - DNA, 15 bp, Homo sapiens
ttcaccttcattttt

SEQ ID NO: 641258 - DNA, 15 bp, Homo sapiens
tcaccttcatttttg

SEQ ID NO: 641259 - DNA, 15 bp, Homo sapiens
caccttcatttttga

SEQ ID NO: 641260 - DNA, 15 bp, Homo sapiens
accttcatttttgaa

SEQ ID NO: 641261 - DNA, 15 bp, Homo sapiens
ccttcatttttgaaa

SEQ ID NO: 641262 - DNA, 15 bp, Homo sapiens
cttcatttttgaaat

SEQ ID NO: 641263 - DNA, 15 bp, Homo sapiens
ttcatttttgaaatt

SEQ ID NO: 641264 - DNA, 15 bp, Homo sapiens
tcatttttgaaattt

SEQ ID NO: 641265 - DNA, 15 bp, Homo sapiens
catttttgaaatttt

SEQ ID NO: 641266 - DNA, 15 bp, Homo sapiens
atttttgaaattttc

SEQ ID NO: 641267 - DNA, 15 bp, Homo sapiens
tttttgaaattttct

SEQ ID NO: 641268 - DNA, 15 bp, Homo sapiens
ttttgaaattttcta

SEQ ID NO: 641269 - DNA, 15 bp, Homo sapiens
tttgaaattttctat

SEQ ID NO: 641270 - DNA, 15 bp, Homo sapiens
ttgaaattttctata

SEQ ID NO: 641271 - DNA, 15 bp, Homo sapiens
tgaaattttctatag

SEQ ID NO: 641272 - DNA, 15 bp, Homo sapiens
gaaattttctatagg

SEQ ID NO: 641273 - DNA, 15 bp, Homo sapiens
aaattttctataggc

SEQ ID NO: 641274 - DNA, 15 bp, Homo sapiens
aattttctataggct

SEQ ID NO: 641275 - DNA, 15 bp, Homo sapiens
attttctataggctt

SEQ ID NO: 641276 - DNA, 15 bp, Homo sapiens
ttttctataggcttg

SEQ ID NO: 641277 - DNA, 15 bp, Homo sapiens
tttctataggcttga

SEQ ID NO: 641278 - DNA, 15 bp, Homo sapiens
ttctataggcttgat

SEQ ID NO: 641279 - DNA, 15 bp, Homo sapiens
tctataggcttgatt

SEQ ID NO: 641280 - DNA, 15 bp, Homo sapiens
ctataggcttgattc

SEQ ID NO: 641281 - DNA, 15 bp, Homo sapiens
tataggcttgattcc

SEQ ID NO: 641282 - DNA, 15 bp, Homo sapiens
ataggcttgattcca

SEQ ID NO: 641283 - DNA, 15 bp, Homo sapiens
taggcttgattccag

SEQ ID NO: 641284 - DNA, 15 bp, Homo sapiens
aggcttgattccaga

SEQ ID NO: 641285 - DNA, 15 bp, Homo sapiens
ggcttgattccagac

SEQ ID NO: 641286 - DNA, 15 bp, Homo sapiens
gcttgattccagact

SEQ ID NO: 641287 - DNA, 15 bp, Homo sapiens
cttgattccagacta

SEQ ID NO: 641288 - DNA, 15 bp, Homo sapiens
ttgattccagactat

SEQ ID NO: 641289 - DNA, 15 bp, Homo sapiens
tgattccagactatg

SEQ ID NO: 641290 - DNA, 15 bp, Homo sapiens
gattccagactatga

SEQ ID NO: 641291 - DNA, 15 bp, Homo sapiens
attccagactatgaa

SEQ ID NO: 641292 - DNA, 15 bp, Homo sapiens
ttccagactatgaat

SEQ ID NO: 641293 - DNA, 15 bp, Homo sapiens
tccagactatgaatg

SEQ ID NO: 641294 - DNA, 15 bp, Homo sapiens
ccagactatgaatga

SEQ ID NO: 641295 - DNA, 15 bp, Homo sapiens
cagactatgaatgag

SEQ ID NO: 641296 - DNA, 15 bp, Homo sapiens
agactatgaatgagt

SEQ ID NO: 641297 - DNA, 15 bp, Homo sapiens
gactatgaatgagtc

SEQ ID NO: 641298 - DNA, 15 bp, Homo sapiens
actatgaatgagtcc

SEQ ID NO: 641299 - DNA, 15 bp, Homo sapiens
ctatgaatgagtcct

SEQ ID NO: 641300 - DNA, 15 bp, Homo sapiens
tatgaatgagtcctt

SEQ ID NO: 641301 - DNA, 15 bp, Homo sapiens
atgaatgagtccttc

SEQ ID NO: 641302 - DNA, 15 bp, Homo sapiens
tgaatgagtccttct

SEQ ID NO: 641303 - DNA, 15 bp, Homo sapiens
gaatgagtccttcta

SEQ ID NO: 641304 - DNA, 15 bp, Homo sapiens
aatgagtccttctaa

SEQ ID NO: 641305 - DNA, 15 bp, Homo sapiens
atgagtccttctaaa

SEQ ID NO: 641306 - DNA, 15 bp, Homo sapiens
tgagtccttctaaat

SEQ ID NO: 641307 - DNA, 15 bp, Homo sapiens
gagtccttctaaatc

SEQ ID NO: 641308 - DNA, 15 bp, Homo sapiens
agtccttctaaatca

SEQ ID NO: 641309 - DNA, 15 bp, Homo sapiens
gtccttctaaatcat

SEQ ID NO: 641310 - DNA, 15 bp, Homo sapiens
tccttctaaatcatt

SEQ ID NO: 641311 - DNA, 15 bp, Homo sapiens
ccttctaaatcattg

SEQ ID NO: 641312 - DNA, 15 bp, Homo sapiens
cttctaaatcattga

SEQ ID NO: 641313 - DNA, 15 bp, Homo sapiens
ttctaaatcattgac

SEQ ID NO: 641314 - DNA, 15 bp, Homo sapiens
tctaaatcattgaca

SEQ ID NO: 641315 - DNA, 15 bp, Homo sapiens
ctaaatcattgacac

SEQ ID NO: 641316 - DNA, 15 bp, Homo sapiens
taaatcattgacact

SEQ ID NO: 641317 - DNA, 15 bp, Homo sapiens
aaatcattgacactc

SEQ ID NO: 641318 - DNA, 15 bp, Homo sapiens
aatcattgacactct

SEQ ID NO: 641319 - DNA, 15 bp, Homo sapiens
atcattgacactctt

SEQ ID NO: 641320 - DNA, 15 bp, Homo sapiens
tcattgacactcttc

SEQ ID NO: 641321 - DNA, 15 bp, Homo sapiens
cattgacactcttcc

SEQ ID NO: 641322 - DNA, 15 bp, Homo sapiens
attgacactcttcca

SEQ ID NO: 641323 - DNA, 15 bp, Homo sapiens
ttgacactcttccat

SEQ ID NO: 641324 - DNA, 15 bp, Homo sapiens
tgacactcttccata

SEQ ID NO: 641325 - DNA, 15 bp, Homo sapiens
gacactcttccataa

SEQ ID NO: 641326 - DNA, 15 bp, Homo sapiens
acactcttccataat

SEQ ID NO: 641327 - DNA, 15 bp, Homo sapiens
cactcttccataata

SEQ ID NO: 641328 - DNA, 15 bp, Homo sapiens
actcttccataatat

SEQ ID NO: 641329 - DNA, 15 bp, Homo sapiens
ctcttccataatatt

SEQ ID NO: 641330 - DNA, 15 bp, Homo sapiens
tcttccataatatta

SEQ ID NO: 641331 - DNA, 15 bp, Homo sapiens
cttccataatattat

SEQ ID NO: 641332 - DNA, 15 bp, Homo sapiens
ttccataatattatc

SEQ ID NO: 641333 - DNA, 15 bp, Homo sapiens
tccataatattatct

SEQ ID NO: 641334 - DNA, 15 bp, Homo sapiens
ccataatattatctc

SEQ ID NO: 641335 - DNA, 15 bp, Homo sapiens
cataatattatctct

SEQ ID NO: 641336 - DNA, 15 bp, Homo sapiens
ataatattatctctc

SEQ ID NO: 641337 - DNA, 15 bp, Homo sapiens
taatattatctctct

SEQ ID NO: 641338 - DNA, 15 bp, Homo sapiens
aatattatctctctt

SEQ ID NO: 641339 - DNA, 15 bp, Homo sapiens
atattatctctctta

SEQ ID NO: 641340 - DNA, 15 bp, Homo sapiens
tattatctctcttag

SEQ ID NO: 641341 - DNA, 15 bp, Homo sapiens
attatctctcttagg

SEQ ID NO: 641342 - DNA, 15 bp, Homo sapiens
ttatctctcttaggg

SEQ ID NO: 641343 - DNA, 15 bp, Homo sapiens
tatctctcttagggt

SEQ ID NO: 641344 - DNA, 15 bp, Homo sapiens
atctctcttagggtc

SEQ ID NO: 641345 - DNA, 15 bp, Homo sapiens
tctctcttagggtct

SEQ ID NO: 641346 - DNA, 15 bp, Homo sapiens
ctctcttagggtctt

SEQ ID NO: 641347 - DNA, 15 bp, Homo sapiens
tctcttagggtcttt

SEQ ID NO: 641348 - DNA, 15 bp, Homo sapiens
ctcttagggtctttc

SEQ ID NO: 641349 - DNA, 15 bp, Homo sapiens
tcttagggtctttca

SEQ ID NO: 641350 - DNA, 15 bp, Homo sapiens
cttagggtctttcat

SEQ ID NO: 641351 - DNA, 15 bp, Homo sapiens
ttagggtctttcatt

SEQ ID NO: 641352 - DNA, 15 bp, Homo sapiens
tagggtctttcattc

SEQ ID NO: 641353 - DNA, 15 bp, Homo sapiens
agggtctttcattca

SEQ ID NO: 641354 - DNA, 15 bp, Homo sapiens
gggtctttcattcat

SEQ ID NO: 641355 - DNA, 15 bp, Homo sapiens
ggtctttcattcatt

SEQ ID NO: 641356 - DNA, 15 bp, Homo sapiens
gtctttcattcattt

SEQ ID NO: 641357 - DNA, 15 bp, Homo sapiens
tctttcattcattta

SEQ ID NO: 641358 - DNA, 15 bp, Homo sapiens
ctttcattcatttac

SEQ ID NO: 641359 - DNA, 15 bp, Homo sapiens
tttcattcatttact

SEQ ID NO: 641360 - DNA, 15 bp, Homo sapiens
ttcattcatttactc

SEQ ID NO: 641361 - DNA, 15 bp, Homo sapiens
tcattcatttactca

SEQ ID NO: 641362 - DNA, 15 bp, Homo sapiens
cattcatttactcat

SEQ ID NO: 641363 - DNA, 15 bp, Homo sapiens
attcatttactcatt

SEQ ID NO: 641364 - DNA, 15 bp, Homo sapiens
ttcatttactcattc

SEQ ID NO: 641365 - DNA, 15 bp, Homo sapiens
tcatttactcattca

SEQ ID NO: 641366 - DNA, 15 bp, Homo sapiens
catttactcattcaa

SEQ ID NO: 641367 - DNA, 15 bp, Homo sapiens
atttactcattcaac

SEQ ID NO: 641368 - DNA, 15 bp, Homo sapiens
tttactcattcaacc

SEQ ID NO: 641369 - DNA, 15 bp, Homo sapiens
ttactcattcaacca

SEQ ID NO: 641370 - DNA, 15 bp, Homo sapiens
tactcattcaaccaa

SEQ ID NO: 641371 - DNA, 15 bp, Homo sapiens
actcattcaaccaaa

SEQ ID NO: 641372 - DNA, 15 bp, Homo sapiens
ctcattcaaccaaaa

SEQ ID NO: 641373 - DNA, 15 bp, Homo sapiens
tcattcaaccaaaat

SEQ ID NO: 641374 - DNA, 15 bp, Homo sapiens
cattcaaccaaaatt

SEQ ID NO: 641375 - DNA, 15 bp, Homo sapiens
attcaaccaaaattt

SEQ ID NO: 641376 - DNA, 15 bp, Homo sapiens
ttcaaccaaaatttt

SEQ ID NO: 641377 - DNA, 15 bp, Homo sapiens
tcaaccaaaattttt

SEQ ID NO: 641378 - DNA, 15 bp, Homo sapiens
caaccaaaatttttt

SEQ ID NO: 641379 - DNA, 15 bp, Homo sapiens
aaccaaaattttttt

SEQ ID NO: 641380 - DNA, 15 bp, Homo sapiens
accaaaattttttta

SEQ ID NO: 641381 - DNA, 15 bp, Homo sapiens
ccaaaatttttttaa

SEQ ID NO: 641382 - DNA, 15 bp, Homo sapiens
caaaatttttttaaa

SEQ ID NO: 641383 - DNA, 15 bp, Homo sapiens
aaaatttttttaaac

SEQ ID NO: 641384 - DNA, 15 bp, Homo sapiens
aaatttttttaaaca

SEQ ID NO: 641385 - DNA, 15 bp, Homo sapiens
aatttttttaaacat

SEQ ID NO: 641386 - DNA, 15 bp, Homo sapiens
atttttttaaacatc

SEQ ID NO: 641387 - DNA, 15 bp, Homo sapiens
tttttttaaacatca

SEQ ID NO: 641388 - DNA, 15 bp, Homo sapiens
ttttttaaacatcaa

SEQ ID NO: 641389 - DNA, 15 bp, Homo sapiens
tttttaaacatcaaa

SEQ ID NO: 641390 - DNA, 15 bp, Homo sapiens
ttttaaacatcaaat

SEQ ID NO: 641391 - DNA, 15 bp, Homo sapiens
tttaaacatcaaata

SEQ ID NO: 641392 - DNA, 15 bp, Homo sapiens
ttaaacatcaaatat

SEQ ID NO: 641393 - DNA, 15 bp, Homo sapiens
taaacatcaaatata

SEQ ID NO: 641394 - DNA, 15 bp, Homo sapiens
aaacatcaaatatac

SEQ ID NO: 641395 - DNA, 15 bp, Homo sapiens
aacatcaaatatacc

SEQ ID NO: 641396 - DNA, 15 bp, Homo sapiens
acatcaaatatacca

SEQ ID NO: 641397 - DNA, 15 bp, Homo sapiens
catcaaatataccag

SEQ ID NO: 641398 - DNA, 15 bp, Homo sapiens
atcaaatataccagg

SEQ ID NO: 641399 - DNA, 15 bp, Homo sapiens
tcaaatataccagga

SEQ ID NO: 641400 - DNA, 15 bp, Homo sapiens
caaatataccaggaa

SEQ ID NO: 641401 - DNA, 15 bp, Homo sapiens
aaatataccaggaac

SEQ ID NO: 641402 - DNA, 15 bp, Homo sapiens
aatataccaggaact

SEQ ID NO: 641403 - DNA, 15 bp, Homo sapiens
atataccaggaactc

SEQ ID NO: 641404 - DNA, 15 bp, Homo sapiens
tataccaggaactca

SEQ ID NO: 641405 - DNA, 15 bp, Homo sapiens
ataccaggaactcat

SEQ ID NO: 641406 - DNA, 15 bp, Homo sapiens
taccaggaactcatg

SEQ ID NO: 641407 - DNA, 15 bp, Homo sapiens
accaggaactcatga

SEQ ID NO: 641408 - DNA, 15 bp, Homo sapiens
ccaggaactcatgaa

SEQ ID NO: 641409 - DNA, 15 bp, Homo sapiens
caggaactcatgaaa

SEQ ID NO: 641410 - DNA, 15 bp, Homo sapiens
aggaactcatgaaag

SEQ ID NO: 641411 - DNA, 15 bp, Homo sapiens
ggaactcatgaaagc

SEQ ID NO: 641412 - DNA, 15 bp, Homo sapiens
gaactcatgaaagca

SEQ ID NO: 641413 - DNA, 15 bp, Homo sapiens
aactcatgaaagcat

SEQ ID NO: 641414 - DNA, 15 bp, Homo sapiens
actcatgaaagcatc

SEQ ID NO: 641415 - DNA, 15 bp, Homo sapiens
ctcatgaaagcatca

SEQ ID NO: 641416 - DNA, 15 bp, Homo sapiens
tcatgaaagcatcaa

SEQ ID NO: 641417 - DNA, 15 bp, Homo sapiens
catgaaagcatcaag

SEQ ID NO: 641418 - DNA, 15 bp, Homo sapiens
atgaaagcatcaagg

SEQ ID NO: 641419 - DNA, 15 bp, Homo sapiens
tgaaagcatcaagga

SEQ ID NO: 641420 - DNA, 15 bp, Homo sapiens
gaaagcatcaaggac

SEQ ID NO: 641421 - DNA, 15 bp, Homo sapiens
aaagcatcaaggaca

SEQ ID NO: 641422 - DNA, 15 bp, Homo sapiens
aagcatcaaggacac

SEQ ID NO: 641423 - DNA, 15 bp, Homo sapiens
agcatcaaggacaca

SEQ ID NO: 641424 - DNA, 15 bp, Homo sapiens
gcatcaaggacacag

SEQ ID NO: 641425 - DNA, 15 bp, Homo sapiens
catcaaggacacagt

SEQ ID NO: 641426 - DNA, 15 bp, Homo sapiens
atcaaggacacagtt

SEQ ID NO: 641427 - DNA, 15 bp, Homo sapiens
tcaaggacacagttg

SEQ ID NO: 641428 - DNA, 15 bp, Homo sapiens
caaggacacagttgt

SEQ ID NO: 641429 - DNA, 15 bp, Homo sapiens
aaggacacagttgtc

SEQ ID NO: 641430 - DNA, 15 bp, Homo sapiens
aggacacagttgtct

SEQ ID NO: 641431 - DNA, 15 bp, Homo sapiens
ggacacagttgtctt

SEQ ID NO: 641432 - DNA, 15 bp, Homo sapiens
gacacagttgtctta

SEQ ID NO: 641433 - DNA, 15 bp, Homo sapiens
acacagttgtcttaa

SEQ ID NO: 641434 - DNA, 15 bp, Homo sapiens
cacagttgtcttaag

SEQ ID NO: 641435 - DNA, 15 bp, Homo sapiens
acagttgtcttaaga

SEQ ID NO: 641436 - DNA, 15 bp, Homo sapiens
cagttgtcttaagag

SEQ ID NO: 641437 - DNA, 15 bp, Homo sapiens
agttgtcttaagagc

SEQ ID NO: 641438 - DNA, 15 bp, Homo sapiens
gttgtcttaagagca

SEQ ID NO: 641439 - DNA, 15 bp, Homo sapiens
ttgtcttaagagcat

SEQ ID NO: 641440 - DNA, 15 bp, Homo sapiens
tgtcttaagagcatg

SEQ ID NO: 641441 - DNA, 15 bp, Homo sapiens
gtcttaagagcatgg

SEQ ID NO: 641442 - DNA, 15 bp, Homo sapiens
tcttaagagcatggt

SEQ ID NO: 641443 - DNA, 15 bp, Homo sapiens
cttaagagcatggtc

SEQ ID NO: 641444 - DNA, 15 bp, Homo sapiens
ttaagagcatggtcc

SEQ ID NO: 641445 - DNA, 15 bp, Homo sapiens
taagagcatggtcct

SEQ ID NO: 641446 - DNA, 15 bp, Homo sapiens
aagagcatggtccta

SEQ ID NO: 641447 - DNA, 15 bp, Homo sapiens
agagcatggtcctag

SEQ ID NO: 641448 - DNA, 15 bp, Homo sapiens
gagcatggtcctagc

SEQ ID NO: 641449 - DNA, 15 bp, Homo sapiens
agcatggtcctagcc

SEQ ID NO: 641450 - DNA, 15 bp, Homo sapiens
gcatggtcctagcca

SEQ ID NO: 641451 - DNA, 15 bp, Homo sapiens
catggtcctagccag

SEQ ID NO: 641452 - DNA, 15 bp, Homo sapiens
atggtcctagccagg

SEQ ID NO: 641453 - DNA, 15 bp, Homo sapiens
tggtcctagccaggt

SEQ ID NO: 641454 - DNA, 15 bp, Homo sapiens
ggtcctagccaggta

SEQ ID NO: 641455 - DNA, 15 bp, Homo sapiens
gtcctagccaggtat

SEQ ID NO: 641456 - DNA, 15 bp, Homo sapiens
tcctagccaggtatg

SEQ ID NO: 641457 - DNA, 15 bp, Homo sapiens
cctagccaggtatgg

SEQ ID NO: 641458 - DNA, 15 bp, Homo sapiens
ctagccaggtatggt

SEQ ID NO: 641459 - DNA, 15 bp, Homo sapiens
tagccaggtatggtg

SEQ ID NO: 641460 - DNA, 15 bp, Homo sapiens
agccaggtatggtgg

SEQ ID NO: 641461 - DNA, 15 bp, Homo sapiens
gccaggtatggtggc

SEQ ID NO: 641462 - DNA, 15 bp, Homo sapiens
ccaggtatggtggct

SEQ ID NO: 641463 - DNA, 15 bp, Homo sapiens
caggtatggtggctc

SEQ ID NO: 641464 - DNA, 15 bp, Homo sapiens
aggtatggtggctca

SEQ ID NO: 641465 - DNA, 15 bp, Homo sapiens
ggtatggtggctcat

SEQ ID NO: 641466 - DNA, 15 bp, Homo sapiens
gtatggtggctcatg

SEQ ID NO: 641467 - DNA, 15 bp, Homo sapiens
tatggtggctcatgc

SEQ ID NO: 641468 - DNA, 15 bp, Homo sapiens
atggtggctcatgcc

SEQ ID NO: 641469 - DNA, 15 bp, Homo sapiens
tcatgcctgtaatcg

SEQ ID NO: 641470 - DNA, 15 bp, Homo sapiens
catgcctgtaatcgt

SEQ ID NO: 641471 - DNA, 15 bp, Homo sapiens
atgcctgtaatcgta

SEQ ID NO: 641472 - DNA, 15 bp, Homo sapiens
tgcctgtaatcgtaa

SEQ ID NO: 641473 - DNA, 15 bp, Homo sapiens
gcctgtaatcgtaac

SEQ ID NO: 641474 - DNA, 15 bp, Homo sapiens
cctgtaatcgtaaca

SEQ ID NO: 641475 - DNA, 15 bp, Homo sapiens
ctgtaatcgtaacac

SEQ ID NO: 641476 - DNA, 15 bp, Homo sapiens
tgtaatcgtaacact

SEQ ID NO: 641477 - DNA, 15 bp, Homo sapiens
gtaatcgtaacactc

SEQ ID NO: 641478 - DNA, 15 bp, Homo sapiens
taatcgtaacactct

SEQ ID NO: 641479 - DNA, 15 bp, Homo sapiens
aatcgtaacactctg

SEQ ID NO: 641480 - DNA, 15 bp, Homo sapiens
atcgtaacactctgg

SEQ ID NO: 641481 - DNA, 15 bp, Homo sapiens
tcgtaacactctggg

SEQ ID NO: 641482 - DNA, 15 bp, Homo sapiens
cgtaacactctggga

SEQ ID NO: 641483 - DNA, 15 bp, Homo sapiens
gtaacactctgggag

SEQ ID NO: 641484 - DNA, 15 bp, Homo sapiens
taacactctgggagg

SEQ ID NO: 641485 - DNA, 15 bp, Homo sapiens
aacactctgggaggg

SEQ ID NO: 641486 - DNA, 15 bp, Homo sapiens
acactctgggagggt

SEQ ID NO: 641487 - DNA, 15 bp, Homo sapiens
cactctgggagggtg

SEQ ID NO: 641488 - DNA, 15 bp, Homo sapiens
actctgggagggtga

SEQ ID NO: 641489 - DNA, 15 bp, Homo sapiens
ctctgggagggtgag

SEQ ID NO: 641490 - DNA, 15 bp, Homo sapiens
tctgggagggtgaga

SEQ ID NO: 641491 - DNA, 15 bp, Homo sapiens
ctgggagggtgagac

SEQ ID NO: 641492 - DNA, 15 bp, Homo sapiens
tgggagggtgagaca

SEQ ID NO: 641493 - DNA, 15 bp, Homo sapiens
gggagggtgagacag

SEQ ID NO: 641494 - DNA, 15 bp, Homo sapiens
ggagggtgagacagg

SEQ ID NO: 641495 - DNA, 15 bp, Homo sapiens
gagggtgagacagga

SEQ ID NO: 641496 - DNA, 15 bp, Homo sapiens
agggtgagacaggag

SEQ ID NO: 641497 - DNA, 15 bp, Homo sapiens
gggtgagacaggagg

SEQ ID NO: 641498 - DNA, 15 bp, Homo sapiens
ggtgagacaggagga

SEQ ID NO: 641499 - DNA, 15 bp, Homo sapiens
gtgagacaggaggat

SEQ ID NO: 641500 - DNA, 15 bp, Homo sapiens
tgagacaggaggatt

SEQ ID NO: 641501 - DNA, 15 bp, Homo sapiens
gagacaggaggattg

SEQ ID NO: 641502 - DNA, 15 bp, Homo sapiens
agacaggaggattgt

SEQ ID NO: 641503 - DNA, 15 bp, Homo sapiens
gacaggaggattgtt

SEQ ID NO: 641504 - DNA, 15 bp, Homo sapiens
acaggaggattgttt

SEQ ID NO: 641505 - DNA, 15 bp, Homo sapiens
caggaggattgtttg

SEQ ID NO: 641506 - DNA, 15 bp, Homo sapiens
aggaggattgtttga

SEQ ID NO: 641507 - DNA, 15 bp, Homo sapiens
ggaggattgtttgag

SEQ ID NO: 641508 - DNA, 15 bp, Homo sapiens
gaggattgtttgagc

SEQ ID NO: 641509 - DNA, 15 bp, Homo sapiens
aggattgtttgagcc

SEQ ID NO: 641510 - DNA, 15 bp, Homo sapiens
ggattgtttgagccc

SEQ ID NO: 641511 - DNA, 15 bp, Homo sapiens
gattgtttgagccca

SEQ ID NO: 641512 - DNA, 15 bp, Homo sapiens
attgtttgagcccag

SEQ ID NO: 641513 - DNA, 15 bp, Homo sapiens
ttgtttgagcccaga

SEQ ID NO: 641514 - DNA, 15 bp, Homo sapiens
tgtttgagcccagaa

SEQ ID NO: 641515 - DNA, 15 bp, Homo sapiens
gtttgagcccagaag

SEQ ID NO: 641516 - DNA, 15 bp, Homo sapiens
tttgagcccagaagt

SEQ ID NO: 641517 - DNA, 15 bp, Homo sapiens
ttgagcccagaagtt

SEQ ID NO: 641518 - DNA, 15 bp, Homo sapiens
tgagcccagaagttc

SEQ ID NO: 641519 - DNA, 15 bp, Homo sapiens
gagcccagaagttcg

SEQ ID NO: 641520 - DNA, 15 bp, Homo sapiens
agcccagaagttcga

SEQ ID NO: 641521 - DNA, 15 bp, Homo sapiens
gcccagaagttcgag

SEQ ID NO: 641522 - DNA, 15 bp, Homo sapiens
cccagaagttcgaga

SEQ ID NO: 641523 - DNA, 15 bp, Homo sapiens
ccagaagttcgagac

SEQ ID NO: 641524 - DNA, 15 bp, Homo sapiens
cagaagttcgagaca

SEQ ID NO: 641525 - DNA, 15 bp, Homo sapiens
agaagttcgagacaa

SEQ ID NO: 641526 - DNA, 15 bp, Homo sapiens
gaagttcgagacaag

SEQ ID NO: 641527 - DNA, 15 bp, Homo sapiens
aagttcgagacaagc

SEQ ID NO: 641528 - DNA, 15 bp, Homo sapiens
agttcgagacaagcc

SEQ ID NO: 641529 - DNA, 15 bp, Homo sapiens
gttcgagacaagcct

SEQ ID NO: 641530 - DNA, 15 bp, Homo sapiens
ttcgagacaagcctg

SEQ ID NO: 641531 - DNA, 15 bp, Homo sapiens
tcgagacaagcctgg

SEQ ID NO: 641532 - DNA, 15 bp, Homo sapiens
cgagacaagcctggg

SEQ ID NO: 641533 - DNA, 15 bp, Homo sapiens
gagacaagcctgggc

SEQ ID NO: 641534 - DNA, 15 bp, Homo sapiens
agacaagcctgggca

SEQ ID NO: 641535 - DNA, 15 bp, Homo sapiens
gacaagcctgggcaa

SEQ ID NO: 641536 - DNA, 15 bp, Homo sapiens
acaagcctgggcaac

SEQ ID NO: 641537 - DNA, 15 bp, Homo sapiens
caagcctgggcaaca

SEQ ID NO: 641538 - DNA, 15 bp, Homo sapiens
aagcctgggcaacat

SEQ ID NO: 641539 - DNA, 15 bp, Homo sapiens
agcctgggcaacata

SEQ ID NO: 641540 - DNA, 15 bp, Homo sapiens
gcctgggcaacatag

SEQ ID NO: 641541 - DNA, 15 bp, Homo sapiens
cctgggcaacatagt

SEQ ID NO: 641542 - DNA, 15 bp, Homo sapiens
ctgggcaacatagtg

SEQ ID NO: 641543 - DNA, 15 bp, Homo sapiens
tgggcaacatagtga

SEQ ID NO: 641544 - DNA, 15 bp, Homo sapiens
gggcaacatagtgag

SEQ ID NO: 641545 - DNA, 15 bp, Homo sapiens
ggcaacatagtgaga

SEQ ID NO: 641546 - DNA, 15 bp, Homo sapiens
gcaacatagtgagac

SEQ ID NO: 641547 - DNA, 15 bp, Homo sapiens
caacatagtgagacc

SEQ ID NO: 641548 - DNA, 15 bp, Homo sapiens
aacatagtgagaccc

SEQ ID NO: 641549 - DNA, 15 bp, Homo sapiens
acatagtgagaccct

SEQ ID NO: 641550 - DNA, 15 bp, Homo sapiens
catagtgagaccctg

SEQ ID NO: 641551 - DNA, 15 bp, Homo sapiens
atagtgagaccctgt

SEQ ID NO: 641552 - DNA, 15 bp, Homo sapiens
tagtgagaccctgtc

SEQ ID NO: 641553 - DNA, 15 bp, Homo sapiens
agtgagaccctgtct

SEQ ID NO: 641554 - DNA, 15 bp, Homo sapiens
gtgagaccctgtctc

SEQ ID NO: 641555 - DNA, 15 bp, Homo sapiens
tgagaccctgtctct

SEQ ID NO: 641556 - DNA, 15 bp, Homo sapiens
gagaccctgtctcta

SEQ ID NO: 641557 - DNA, 15 bp, Homo sapiens
agaccctgtctctac

SEQ ID NO: 641558 - DNA, 15 bp, Homo sapiens
gaccctgtctctaca

SEQ ID NO: 641559 - DNA, 15 bp, Homo sapiens
accctgtctctacaa

SEQ ID NO: 641560 - DNA, 15 bp, Homo sapiens
ccctgtctctacaaa

SEQ ID NO: 641561 - DNA, 15 bp, Homo sapiens
cctgtctctacaaaa

SEQ ID NO: 641562 - DNA, 15 bp, Homo sapiens
ctgtctctacaaaaa

SEQ ID NO: 641563 - DNA, 15 bp, Homo sapiens
tgtctctacaaaaat

SEQ ID NO: 641564 - DNA, 15 bp, Homo sapiens
gtctctacaaaaatt

SEQ ID NO: 641565 - DNA, 15 bp, Homo sapiens
tctctacaaaaattt

SEQ ID NO: 641566 - DNA, 15 bp, Homo sapiens
ctctacaaaaatttt

SEQ ID NO: 641567 - DNA, 15 bp, Homo sapiens
tctacaaaaattttt

SEQ ID NO: 641568 - DNA, 15 bp, Homo sapiens
ctacaaaaatttttt

SEQ ID NO: 641569 - DNA, 15 bp, Homo sapiens
tacaaaaattttttt

SEQ ID NO: 641570 - DNA, 15 bp, Homo sapiens
acaaaaattttttta

SEQ ID NO: 641571 - DNA, 15 bp, Homo sapiens
caaaaatttttttaa

SEQ ID NO: 641572 - DNA, 15 bp, Homo sapiens
aaaaatttttttaaa

SEQ ID NO: 641573 - DNA, 15 bp, Homo sapiens
aaaatttttttaaaa

SEQ ID NO: 641574 - DNA, 15 bp, Homo sapiens
aaatttttttaaaaa

SEQ ID NO: 641575 - DNA, 15 bp, Homo sapiens
aatttttttaaaaaa

SEQ ID NO: 641576 - DNA, 15 bp, Homo sapiens
atttttttaaaaaat

SEQ ID NO: 641577 - DNA, 15 bp, Homo sapiens
tttttttaaaaaata

SEQ ID NO: 641578 - DNA, 15 bp, Homo sapiens
ttttttaaaaaatag

SEQ ID NO: 641579 - DNA, 15 bp, Homo sapiens
tttttaaaaaatagc

SEQ ID NO: 641580 - DNA, 15 bp, Homo sapiens
ttttaaaaaatagct

SEQ ID NO: 641581 - DNA, 15 bp, Homo sapiens
tttaaaaaatagctt

SEQ ID NO: 641582 - DNA, 15 bp, Homo sapiens
ttaaaaaatagcttg

SEQ ID NO: 641583 - DNA, 15 bp, Homo sapiens
taaaaaatagcttgg

SEQ ID NO: 641584 - DNA, 15 bp, Homo sapiens
aaaaaatagcttggc

SEQ ID NO: 641585 - DNA, 15 bp, Homo sapiens
aaaaatagcttggct

SEQ ID NO: 641586 - DNA, 15 bp, Homo sapiens
aaaatagcttggctt

SEQ ID NO: 641587 - DNA, 15 bp, Homo sapiens
aaatagcttggcttt

SEQ ID NO: 641588 - DNA, 15 bp, Homo sapiens
aatagcttggctttg

SEQ ID NO: 641589 - DNA, 15 bp, Homo sapiens
atagcttggctttgt

SEQ ID NO: 641590 - DNA, 15 bp, Homo sapiens
tagcttggctttgtg

SEQ ID NO: 641591 - DNA, 15 bp, Homo sapiens
agcttggctttgtgg

SEQ ID NO: 641592 - DNA, 15 bp, Homo sapiens
gcttggctttgtggt

SEQ ID NO: 641593 - DNA, 15 bp, Homo sapiens
cttggctttgtggtg

SEQ ID NO: 641594 - DNA, 15 bp, Homo sapiens
ttggctttgtggtgt

SEQ ID NO: 641595 - DNA, 15 bp, Homo sapiens
tggctttgtggtgtg

SEQ ID NO: 641596 - DNA, 15 bp, Homo sapiens
ggctttgtggtgtgc

SEQ ID NO: 641597 - DNA, 15 bp, Homo sapiens
gctttgtggtgtgcc

SEQ ID NO: 641598 - DNA, 15 bp, Homo sapiens
ctttgtggtgtgccc

SEQ ID NO: 641599 - DNA, 15 bp, Homo sapiens
tttgtggtgtgcccc

SEQ ID NO: 641600 - DNA, 15 bp, Homo sapiens
ttgtggtgtgcccct

SEQ ID NO: 641601 - DNA, 15 bp, Homo sapiens
tgtggtgtgcccctg

SEQ ID NO: 641602 - DNA, 15 bp, Homo sapiens
gtggtgtgcccctgt

SEQ ID NO: 641603 - DNA, 15 bp, Homo sapiens
tggtgtgcccctgtc

SEQ ID NO: 641604 - DNA, 15 bp, Homo sapiens
ggtgtgcccctgtca

SEQ ID NO: 641605 - DNA, 15 bp, Homo sapiens
gtgtgcccctgtcat

SEQ ID NO: 641606 - DNA, 15 bp, Homo sapiens
tgtgcccctgtcatc

SEQ ID NO: 641607 - DNA, 15 bp, Homo sapiens
gtgcccctgtcatcc

SEQ ID NO: 641608 - DNA, 15 bp, Homo sapiens
tgcccctgtcatccc

SEQ ID NO: 641609 - DNA, 15 bp, Homo sapiens
gcccctgtcatccca

SEQ ID NO: 641610 - DNA, 15 bp, Homo sapiens
cccctgtcatcccag

SEQ ID NO: 641611 - DNA, 15 bp, Homo sapiens
ccctgtcatcccagc

SEQ ID NO: 641612 - DNA, 15 bp, Homo sapiens
cctgtcatcccagct

SEQ ID NO: 641613 - DNA, 15 bp, Homo sapiens
ctgtcatcccagcta

SEQ ID NO: 641614 - DNA, 15 bp, Homo sapiens
tgtcatcccagctac

SEQ ID NO: 641615 - DNA, 15 bp, Homo sapiens
gtcatcccagctact

SEQ ID NO: 641616 - DNA, 15 bp, Homo sapiens
tcatcccagctactt

SEQ ID NO: 641617 - DNA, 15 bp, Homo sapiens
catcccagctacttg

SEQ ID NO: 641618 - DNA, 15 bp, Homo sapiens
atcccagctacttga

SEQ ID NO: 641619 - DNA, 15 bp, Homo sapiens
tcccagctacttgag

SEQ ID NO: 641620 - DNA, 15 bp, Homo sapiens
cccagctacttgaga

SEQ ID NO: 641621 - DNA, 15 bp, Homo sapiens
ccagctacttgagag

SEQ ID NO: 641622 - DNA, 15 bp, Homo sapiens
cagctacttgagagg

SEQ ID NO: 641623 - DNA, 15 bp, Homo sapiens
agctacttgagaggc

SEQ ID NO: 641624 - DNA, 15 bp, Homo sapiens
gctacttgagaggct

SEQ ID NO: 641625 - DNA, 15 bp, Homo sapiens
ctacttgagaggctg

SEQ ID NO: 641626 - DNA, 15 bp, Homo sapiens
tacttgagaggctga

SEQ ID NO: 641627 - DNA, 15 bp, Homo sapiens
acttgagaggctgag

SEQ ID NO: 641628 - DNA, 15 bp, Homo sapiens
cttgagaggctgaga

SEQ ID NO: 641629 - DNA, 15 bp, Homo sapiens
ttgagaggctgagat

SEQ ID NO: 641630 - DNA, 15 bp, Homo sapiens
tgagaggctgagatg

SEQ ID NO: 641631 - DNA, 15 bp, Homo sapiens
gagaggctgagatgg

SEQ ID NO: 641632 - DNA, 15 bp, Homo sapiens
agaggctgagatggg

SEQ ID NO: 641633 - DNA, 15 bp, Homo sapiens
gaggctgagatggga

SEQ ID NO: 641634 - DNA, 15 bp, Homo sapiens
aggctgagatgggaa

SEQ ID NO: 641635 - DNA, 15 bp, Homo sapiens
ggctgagatgggaag

SEQ ID NO: 641636 - DNA, 15 bp, Homo sapiens
gctgagatgggaaga

SEQ ID NO: 641637 - DNA, 15 bp, Homo sapiens
ctgagatgggaagat

SEQ ID NO: 641638 - DNA, 15 bp, Homo sapiens
tgagatgggaagatc

SEQ ID NO: 641639 - DNA, 15 bp, Homo sapiens
gagatgggaagatca

SEQ ID NO: 641640 - DNA, 15 bp, Homo sapiens
agatgggaagatcac

SEQ ID NO: 641641 - DNA, 15 bp, Homo sapiens
gatgggaagatcact

SEQ ID NO: 641642 - DNA, 15 bp, Homo sapiens
atgggaagatcactt

SEQ ID NO: 641643 - DNA, 15 bp, Homo sapiens
tgggaagatcacttg

SEQ ID NO: 641644 - DNA, 15 bp, Homo sapiens
gggaagatcacttgg

SEQ ID NO: 641645 - DNA, 15 bp, Homo sapiens
ggaagatcacttggg

SEQ ID NO: 641646 - DNA, 15 bp, Homo sapiens
gaagatcacttgggt

SEQ ID NO: 641647 - DNA, 15 bp, Homo sapiens
aagatcacttgggtc

SEQ ID NO: 641648 - DNA, 15 bp, Homo sapiens
agatcacttgggtct

SEQ ID NO: 641649 - DNA, 15 bp, Homo sapiens
gatcacttgggtctg

SEQ ID NO: 641650 - DNA, 15 bp, Homo sapiens
atcacttgggtctgg

SEQ ID NO: 641651 - DNA, 15 bp, Homo sapiens
tcacttgggtctggg

SEQ ID NO: 641652 - DNA, 15 bp, Homo sapiens
cacttgggtctgggt

SEQ ID NO: 641653 - DNA, 15 bp, Homo sapiens
acttgggtctgggtg

SEQ ID NO: 641654 - DNA, 15 bp, Homo sapiens
cttgggtctgggtgt

SEQ ID NO: 641655 - DNA, 15 bp, Homo sapiens
ttgggtctgggtgtt

SEQ ID NO: 641656 - DNA, 15 bp, Homo sapiens
tgggtctgggtgttt

SEQ ID NO: 641657 - DNA, 15 bp, Homo sapiens
gggtctgggtgtttg

SEQ ID NO: 641658 - DNA, 15 bp, Homo sapiens
ggtctgggtgtttgt

SEQ ID NO: 641659 - DNA, 15 bp, Homo sapiens
gtctgggtgtttgtg

SEQ ID NO: 641660 - DNA, 15 bp, Homo sapiens
tctgggtgtttgtgg

SEQ ID NO: 641661 - DNA, 15 bp, Homo sapiens
ctgggtgtttgtggc

SEQ ID NO: 641662 - DNA, 15 bp, Homo sapiens
tgggtgtttgtggct

SEQ ID NO: 641663 - DNA, 15 bp, Homo sapiens
gggtgtttgtggctg

SEQ ID NO: 641664 - DNA, 15 bp, Homo sapiens
ggtgtttgtggctgc

SEQ ID NO: 641665 - DNA, 15 bp, Homo sapiens
gtgtttgtggctgca

SEQ ID NO: 641666 - DNA, 15 bp, Homo sapiens
tgtttgtggctgcag

SEQ ID NO: 641667 - DNA, 15 bp, Homo sapiens
gtttgtggctgcagt

SEQ ID NO: 641668 - DNA, 15 bp, Homo sapiens
tttgtggctgcagtt

SEQ ID NO: 641669 - DNA, 15 bp, Homo sapiens
ttgtggctgcagttg

SEQ ID NO: 641670 - DNA, 15 bp, Homo sapiens
tgtggctgcagttgg

SEQ ID NO: 641671 - DNA, 15 bp, Homo sapiens
gtggctgcagttggc

SEQ ID NO: 641672 - DNA, 15 bp, Homo sapiens
tggctgcagttggct

SEQ ID NO: 641673 - DNA, 15 bp, Homo sapiens
ggctgcagttggctg

SEQ ID NO: 641674 - DNA, 15 bp, Homo sapiens
gctgcagttggctgt

SEQ ID NO: 641675 - DNA, 15 bp, Homo sapiens
ctgcagttggctgtg

SEQ ID NO: 641676 - DNA, 15 bp, Homo sapiens
tgcagttggctgtga

SEQ ID NO: 641677 - DNA, 15 bp, Homo sapiens
gcagttggctgtgat

SEQ ID NO: 641678 - DNA, 15 bp, Homo sapiens
cagttggctgtgatt

SEQ ID NO: 641679 - DNA, 15 bp, Homo sapiens
agttggctgtgatta

SEQ ID NO: 641680 - DNA, 15 bp, Homo sapiens
gttggctgtgattac

SEQ ID NO: 641681 - DNA, 15 bp, Homo sapiens
ttggctgtgattaca

SEQ ID NO: 641682 - DNA, 15 bp, Homo sapiens
tggctgtgattacat

SEQ ID NO: 641683 - DNA, 15 bp, Homo sapiens
ggctgtgattacatg

SEQ ID NO: 641684 - DNA, 15 bp, Homo sapiens
gctgtgattacatgg

SEQ ID NO: 641685 - DNA, 15 bp, Homo sapiens
ctgtgattacatggg

SEQ ID NO: 641686 - DNA, 15 bp, Homo sapiens
tgtgattacatgggt

SEQ ID NO: 641687 - DNA, 15 bp, Homo sapiens
gtgattacatgggtg

SEQ ID NO: 641688 - DNA, 15 bp, Homo sapiens
tgattacatgggtga

SEQ ID NO: 641689 - DNA, 15 bp, Homo sapiens
gattacatgggtgac

SEQ ID NO: 641690 - DNA, 15 bp, Homo sapiens
attacatgggtgaca

SEQ ID NO: 641691 - DNA, 15 bp, Homo sapiens
ttacatgggtgacag

SEQ ID NO: 641692 - DNA, 15 bp, Homo sapiens
tacatgggtgacaga

SEQ ID NO: 641693 - DNA, 15 bp, Homo sapiens
acatgggtgacagaa

SEQ ID NO: 641694 - DNA, 15 bp, Homo sapiens
catgggtgacagaat

SEQ ID NO: 641695 - DNA, 15 bp, Homo sapiens
atgggtgacagaatg

SEQ ID NO: 641696 - DNA, 15 bp, Homo sapiens
tgggtgacagaatga

SEQ ID NO: 641697 - DNA, 15 bp, Homo sapiens
gggtgacagaatgag

SEQ ID NO: 641698 - DNA, 15 bp, Homo sapiens
ggtgacagaatgaga

SEQ ID NO: 641699 - DNA, 15 bp, Homo sapiens
gtgacagaatgagac

SEQ ID NO: 641700 - DNA, 15 bp, Homo sapiens
tgacagaatgagacc

SEQ ID NO: 641701 - DNA, 15 bp, Homo sapiens
gacagaatgagaccc

SEQ ID NO: 641702 - DNA, 15 bp, Homo sapiens
acagaatgagacccc

SEQ ID NO: 641703 - DNA, 15 bp, Homo sapiens
cagaatgagacccca

SEQ ID NO: 641704 - DNA, 15 bp, Homo sapiens
agaatgagaccccat

SEQ ID NO: 641705 - DNA, 15 bp, Homo sapiens
gaatgagaccccatc

SEQ ID NO: 641706 - DNA, 15 bp, Homo sapiens
aatgagaccccatct

SEQ ID NO: 641707 - DNA, 15 bp, Homo sapiens
atgagaccccatctc

SEQ ID NO: 641708 - DNA, 15 bp, Homo sapiens
tgagaccccatctca

SEQ ID NO: 641709 - DNA, 15 bp, Homo sapiens
gagaccccatctcag

SEQ ID NO: 641710 - DNA, 15 bp, Homo sapiens
agaccccatctcaga

SEQ ID NO: 641711 - DNA, 15 bp, Homo sapiens
gaccccatctcagaa

SEQ ID NO: 641712 - DNA, 15 bp, Homo sapiens
accccatctcagaaa

SEQ ID NO: 641713 - DNA, 15 bp, Homo sapiens
ccccatctcagaaaa

SEQ ID NO: 641714 - DNA, 15 bp, Homo sapiens
cccatctcagaaaaa

SEQ ID NO: 641715 - DNA, 15 bp, Homo sapiens
ccatctcagaaaaac

SEQ ID NO: 641716 - DNA, 15 bp, Homo sapiens
catctcagaaaaacc

SEQ ID NO: 641717 - DNA, 15 bp, Homo sapiens
atctcagaaaaacca

SEQ ID NO: 641718 - DNA, 15 bp, Homo sapiens
tctcagaaaaaccaa

SEQ ID NO: 641719 - DNA, 15 bp, Homo sapiens
ctcagaaaaaccaaa

SEQ ID NO: 641720 - DNA, 15 bp, Homo sapiens
tcagaaaaaccaaaa

SEQ ID NO: 641721 - DNA, 15 bp, Homo sapiens
cagaaaaaccaaaag

SEQ ID NO: 641722 - DNA, 15 bp, Homo sapiens
agaaaaaccaaaaga

SEQ ID NO: 641723 - DNA, 15 bp, Homo sapiens
gaaaaaccaaaagag

SEQ ID NO: 641724 - DNA, 15 bp, Homo sapiens
aaaaaccaaaagagt

SEQ ID NO: 641725 - DNA, 15 bp, Homo sapiens
aaaaccaaaagagtc

SEQ ID NO: 641726 - DNA, 15 bp, Homo sapiens
aaaccaaaagagtca

SEQ ID NO: 641727 - DNA, 15 bp, Homo sapiens
aaccaaaagagtcat

SEQ ID NO: 641728 - DNA, 15 bp, Homo sapiens
accaaaagagtcatg

SEQ ID NO: 641729 - DNA, 15 bp, Homo sapiens
ccaaaagagtcatga

SEQ ID NO: 641730 - DNA, 15 bp, Homo sapiens
caaaagagtcatgat

SEQ ID NO: 641731 - DNA, 15 bp, Homo sapiens
aaaagagtcatgatc

SEQ ID NO: 641732 - DNA, 15 bp, Homo sapiens
aaagagtcatgatcc

SEQ ID NO: 641733 - DNA, 15 bp, Homo sapiens
aagagtcatgatccc

SEQ ID NO: 641734 - DNA, 15 bp, Homo sapiens
agagtcatgatccct

SEQ ID NO: 641735 - DNA, 15 bp, Homo sapiens
gagtcatgatcccta

SEQ ID NO: 641736 - DNA, 15 bp, Homo sapiens
agtcatgatccctat

SEQ ID NO: 641737 - DNA, 15 bp, Homo sapiens
gtcatgatccctatc

SEQ ID NO: 641738 - DNA, 15 bp, Homo sapiens
tcatgatccctatct

SEQ ID NO: 641739 - DNA, 15 bp, Homo sapiens
catgatccctatctg

SEQ ID NO: 641740 - DNA, 15 bp, Homo sapiens
atgatccctatctgt

SEQ ID NO: 641741 - DNA, 15 bp, Homo sapiens
tgatccctatctgtg

SEQ ID NO: 641742 - DNA, 15 bp, Homo sapiens
gatccctatctgtgt

SEQ ID NO: 641743 - DNA, 15 bp, Homo sapiens
atccctatctgtgtg

SEQ ID NO: 641744 - DNA, 15 bp, Homo sapiens
tccctatctgtgtga

SEQ ID NO: 641745 - DNA, 15 bp, Homo sapiens
ccctatctgtgtgaa

SEQ ID NO: 641746 - DNA, 15 bp, Homo sapiens
cctatctgtgtgaag

SEQ ID NO: 641747 - DNA, 15 bp, Homo sapiens
ctatctgtgtgaagc

SEQ ID NO: 641748 - DNA, 15 bp, Homo sapiens
tatctgtgtgaagct

SEQ ID NO: 641749 - DNA, 15 bp, Homo sapiens
atctgtgtgaagctt

SEQ ID NO: 641750 - DNA, 15 bp, Homo sapiens
tctgtgtgaagctta

SEQ ID NO: 641751 - DNA, 15 bp, Homo sapiens
ctgtgtgaagcttaa

SEQ ID NO: 641752 - DNA, 15 bp, Homo sapiens
tgtgtgaagcttaag

SEQ ID NO: 641753 - DNA, 15 bp, Homo sapiens
gtgtgaagcttaagc

SEQ ID NO: 641754 - DNA, 15 bp, Homo sapiens
tgtgaagcttaagcc

SEQ ID NO: 641755 - DNA, 15 bp, Homo sapiens
gtgaagcttaagcct

SEQ ID NO: 641756 - DNA, 15 bp, Homo sapiens
tgaagcttaagccta

SEQ ID NO: 641757 - DNA, 15 bp, Homo sapiens
gaagcttaagcctag

SEQ ID NO: 641758 - DNA, 15 bp, Homo sapiens
aagcttaagcctagt

SEQ ID NO: 641759 - DNA, 15 bp, Homo sapiens
agcttaagcctagta

SEQ ID NO: 641760 - DNA, 15 bp, Homo sapiens
gcttaagcctagtaa

SEQ ID NO: 641761 - DNA, 15 bp, Homo sapiens
cttaagcctagtaag

SEQ ID NO: 641762 - DNA, 15 bp, Homo sapiens
ttaagcctagtaagc

SEQ ID NO: 641763 - DNA, 15 bp, Homo sapiens
taagcctagtaagcc

SEQ ID NO: 641764 - DNA, 15 bp, Homo sapiens
aagcctagtaagcca

SEQ ID NO: 641765 - DNA, 15 bp, Homo sapiens
agcctagtaagccat

SEQ ID NO: 641766 - DNA, 15 bp, Homo sapiens
gcctagtaagccatc

SEQ ID NO: 641767 - DNA, 15 bp, Homo sapiens
cctagtaagccatca

SEQ ID NO: 641768 - DNA, 15 bp, Homo sapiens
ctagtaagccatcat

SEQ ID NO: 641769 - DNA, 15 bp, Homo sapiens
tagtaagccatcatt

SEQ ID NO: 641770 - DNA, 15 bp, Homo sapiens
agtaagccatcattc

SEQ ID NO: 641771 - DNA, 15 bp, Homo sapiens
gtaagccatcattca

SEQ ID NO: 641772 - DNA, 15 bp, Homo sapiens
taagccatcattcag

SEQ ID NO: 641773 - DNA, 15 bp, Homo sapiens
aagccatcattcagt

SEQ ID NO: 641774 - DNA, 15 bp, Homo sapiens
agccatcattcagtc

SEQ ID NO: 641775 - DNA, 15 bp, Homo sapiens
gccatcattcagtca

SEQ ID NO: 641776 - DNA, 15 bp, Homo sapiens
ccatcattcagtcaa

SEQ ID NO: 641777 - DNA, 15 bp, Homo sapiens
catcattcagtcaat

SEQ ID NO: 641778 - DNA, 15 bp, Homo sapiens
atcattcagtcaatg

SEQ ID NO: 641779 - DNA, 15 bp, Homo sapiens
tcattcagtcaatga

SEQ ID NO: 641780 - DNA, 15 bp, Homo sapiens
cattcagtcaatgat

SEQ ID NO: 641781 - DNA, 15 bp, Homo sapiens
attcagtcaatgatc

SEQ ID NO: 641782 - DNA, 15 bp, Homo sapiens
ttcagtcaatgatca

SEQ ID NO: 641783 - DNA, 15 bp, Homo sapiens
tcagtcaatgatcat

SEQ ID NO: 641784 - DNA, 15 bp, Homo sapiens
cagtcaatgatcatt

SEQ ID NO: 641785 - DNA, 15 bp, Homo sapiens
agtcaatgatcattt

SEQ ID NO: 641786 - DNA, 15 bp, Homo sapiens
gtcaatgatcattta

SEQ ID NO: 641787 - DNA, 15 bp, Homo sapiens
tcaatgatcatttaa

SEQ ID NO: 641788 - DNA, 15 bp, Homo sapiens
caatgatcatttaaa

SEQ ID NO: 641789 - DNA, 15 bp, Homo sapiens
aatgatcatttaaaa

SEQ ID NO: 641790 - DNA, 15 bp, Homo sapiens
atgatcatttaaaaa

SEQ ID NO: 641791 - DNA, 15 bp, Homo sapiens
tgatcatttaaaaac

SEQ ID NO: 641792 - DNA, 15 bp, Homo sapiens
gatcatttaaaaaca

SEQ ID NO: 641793 - DNA, 15 bp, Homo sapiens
atcatttaaaaacat

SEQ ID NO: 641794 - DNA, 15 bp, Homo sapiens
tcatttaaaaacata

SEQ ID NO: 641795 - DNA, 15 bp, Homo sapiens
catttaaaaacatat

SEQ ID NO: 641796 - DNA, 15 bp, Homo sapiens
atttaaaaacatatg

SEQ ID NO: 641797 - DNA, 15 bp, Homo sapiens
tttaaaaacatatgc

SEQ ID NO: 641798 - DNA, 15 bp, Homo sapiens
ttaaaaacatatgca

SEQ ID NO: 641799 - DNA, 15 bp, Homo sapiens
taaaaacatatgcag

SEQ ID NO: 641800 - DNA, 15 bp, Homo sapiens
aaaaacatatgcagt

SEQ ID NO: 641801 - DNA, 15 bp, Homo sapiens
aaaacatatgcagtg

SEQ ID NO: 641802 - DNA, 15 bp, Homo sapiens
aaacatatgcagtga

SEQ ID NO: 641803 - DNA, 15 bp, Homo sapiens
aacatatgcagtgac

SEQ ID NO: 641804 - DNA, 15 bp, Homo sapiens
acatatgcagtgaca

SEQ ID NO: 641805 - DNA, 15 bp, Homo sapiens
catatgcagtgacag

SEQ ID NO: 641806 - DNA, 15 bp, Homo sapiens
atatgcagtgacaga

SEQ ID NO: 641807 - DNA, 15 bp, Homo sapiens
tatgcagtgacagac

SEQ ID NO: 641808 - DNA, 15 bp, Homo sapiens
atgcagtgacagact

SEQ ID NO: 641809 - DNA, 15 bp, Homo sapiens
tgcagtgacagactt

SEQ ID NO: 641810 - DNA, 15 bp, Homo sapiens
gcagtgacagacttg

SEQ ID NO: 641811 - DNA, 15 bp, Homo sapiens
cagtgacagacttgg

SEQ ID NO: 641812 - DNA, 15 bp, Homo sapiens
agtgacagacttgga

SEQ ID NO: 641813 - DNA, 15 bp, Homo sapiens
gtgacagacttggag

SEQ ID NO: 641814 - DNA, 15 bp, Homo sapiens
tgacagacttggagg

SEQ ID NO: 641815 - DNA, 15 bp, Homo sapiens
gacagacttggaggt

SEQ ID NO: 641816 - DNA, 15 bp, Homo sapiens
acagacttggaggta

SEQ ID NO: 641817 - DNA, 15 bp, Homo sapiens
cagacttggaggtac

SEQ ID NO: 641818 - DNA, 15 bp, Homo sapiens
agacttggaggtacc

SEQ ID NO: 641819 - DNA, 15 bp, Homo sapiens
gacttggaggtacct

SEQ ID NO: 641820 - DNA, 15 bp, Homo sapiens
acttggaggtacctg

SEQ ID NO: 641821 - DNA, 15 bp, Homo sapiens
cttggaggtacctga

SEQ ID NO: 641822 - DNA, 15 bp, Homo sapiens
ttggaggtacctgac

SEQ ID NO: 641823 - DNA, 15 bp, Homo sapiens
tggaggtacctgaca

SEQ ID NO: 641824 - DNA, 15 bp, Homo sapiens
ggaggtacctgacag

SEQ ID NO: 641825 - DNA, 15 bp, Homo sapiens
gaggtacctgacaga

SEQ ID NO: 641826 - DNA, 15 bp, Homo sapiens
aggtacctgacagaa

SEQ ID NO: 641827 - DNA, 15 bp, Homo sapiens
ggtacctgacagaaa

SEQ ID NO: 641828 - DNA, 15 bp, Homo sapiens
gtacctgacagaaaa

SEQ ID NO: 641829 - DNA, 15 bp, Homo sapiens
tacctgacagaaaac

SEQ ID NO: 641830 - DNA, 15 bp, Homo sapiens
acctgacagaaaaca

SEQ ID NO: 641831 - DNA, 15 bp, Homo sapiens
cctgacagaaaacac

SEQ ID NO: 641832 - DNA, 15 bp, Homo sapiens
ctgacagaaaacaca

SEQ ID NO: 641833 - DNA, 15 bp, Homo sapiens
tgacagaaaacacag

SEQ ID NO: 641834 - DNA, 15 bp, Homo sapiens
gacagaaaacacagg

SEQ ID NO: 641835 - DNA, 15 bp, Homo sapiens
acagaaaacacagga

SEQ ID NO: 641836 - DNA, 15 bp, Homo sapiens
cagaaaacacaggat

SEQ ID NO: 641837 - DNA, 15 bp, Homo sapiens
agaaaacacaggata

SEQ ID NO: 641838 - DNA, 15 bp, Homo sapiens
gaaaacacaggataa

SEQ ID NO: 641839 - DNA, 15 bp, Homo sapiens
aaaacacaggataat

SEQ ID NO: 641840 - DNA, 15 bp, Homo sapiens
aaacacaggataata

SEQ ID NO: 641841 - DNA, 15 bp, Homo sapiens
aacacaggataatat

SEQ ID NO: 641842 - DNA, 15 bp, Homo sapiens
acacaggataatata

SEQ ID NO: 641843 - DNA, 15 bp, Homo sapiens
cacaggataatatac

SEQ ID NO: 641844 - DNA, 15 bp, Homo sapiens
acaggataatataca

SEQ ID NO: 641845 - DNA, 15 bp, Homo sapiens
caggataatatacaa

SEQ ID NO: 641846 - DNA, 15 bp, Homo sapiens
aggataatatacaat

SEQ ID NO: 641847 - DNA, 15 bp, Homo sapiens
ggataatatacaatg

SEQ ID NO: 641848 - DNA, 15 bp, Homo sapiens
gataatatacaatgt

SEQ ID NO: 641849 - DNA, 15 bp, Homo sapiens
ataatatacaatgtg

SEQ ID NO: 641850 - DNA, 15 bp, Homo sapiens
taatatacaatgtga

SEQ ID NO: 641851 - DNA, 15 bp, Homo sapiens
aatatacaatgtgaa

SEQ ID NO: 641852 - DNA, 15 bp, Homo sapiens
atatacaatgtgaat

SEQ ID NO: 641853 - DNA, 15 bp, Homo sapiens
tatacaatgtgaatt

SEQ ID NO: 641854 - DNA, 15 bp, Homo sapiens
atacaatgtgaatta

SEQ ID NO: 641855 - DNA, 15 bp, Homo sapiens
tacaatgtgaattat

SEQ ID NO: 641856 - DNA, 15 bp, Homo sapiens
acaatgtgaattatt

SEQ ID NO: 641857 - DNA, 15 bp, Homo sapiens
caatgtgaattattc

SEQ ID NO: 641858 - DNA, 15 bp, Homo sapiens
aatgtgaattattct

SEQ ID NO: 641859 - DNA, 15 bp, Homo sapiens
atgtgaattattctt

SEQ ID NO: 641860 - DNA, 15 bp, Homo sapiens
tgtgaattattcttt

SEQ ID NO: 641861 - DNA, 15 bp, Homo sapiens
gtgaattattcttta

SEQ ID NO: 641862 - DNA, 15 bp, Homo sapiens
tgaattattctttat

SEQ ID NO: 641863 - DNA, 15 bp, Homo sapiens
gaattattctttata

SEQ ID NO: 641864 - DNA, 15 bp, Homo sapiens
aattattctttataa

SEQ ID NO: 641865 - DNA, 15 bp, Homo sapiens
attattctttataaa

SEQ ID NO: 641866 - DNA, 15 bp, Homo sapiens
ttattctttataaac

SEQ ID NO: 641867 - DNA, 15 bp, Homo sapiens
tattctttataaaca

SEQ ID NO: 641868 - DNA, 15 bp, Homo sapiens
attctttataaacaa

SEQ ID NO: 641869 - DNA, 15 bp, Homo sapiens
ttctttataaacaac

SEQ ID NO: 641870 - DNA, 15 bp, Homo sapiens
tctttataaacaaca

SEQ ID NO: 641871 - DNA, 15 bp, Homo sapiens
ctttataaacaacaa

SEQ ID NO: 641872 - DNA, 15 bp, Homo sapiens
tttataaacaacaag

SEQ ID NO: 641873 - DNA, 15 bp, Homo sapiens
ttataaacaacaagc

SEQ ID NO: 641874 - DNA, 15 bp, Homo sapiens
tataaacaacaagcc

SEQ ID NO: 641875 - DNA, 15 bp, Homo sapiens
ataaacaacaagcct

SEQ ID NO: 641876 - DNA, 15 bp, Homo sapiens
taaacaacaagccta

SEQ ID NO: 641877 - DNA, 15 bp, Homo sapiens
aaacaacaagcctac

SEQ ID NO: 641878 - DNA, 15 bp, Homo sapiens
aacaacaagcctact

SEQ ID NO: 641879 - DNA, 15 bp, Homo sapiens
acaacaagcctactt

SEQ ID NO: 641880 - DNA, 15 bp, Homo sapiens
caacaagcctactta

SEQ ID NO: 641881 - DNA, 15 bp, Homo sapiens
aacaagcctacttat

SEQ ID NO: 641882 - DNA, 15 bp, Homo sapiens
acaagcctacttatt

SEQ ID NO: 641883 - DNA, 15 bp, Homo sapiens
caagcctacttattc

SEQ ID NO: 641884 - DNA, 15 bp, Homo sapiens
aagcctacttattct

SEQ ID NO: 641885 - DNA, 15 bp, Homo sapiens
agcctacttattcta

SEQ ID NO: 641886 - DNA, 15 bp, Homo sapiens
gcctacttattctat

SEQ ID NO: 641887 - DNA, 15 bp, Homo sapiens
cctacttattctata

SEQ ID NO: 641888 - DNA, 15 bp, Homo sapiens
ctacttattctatat

SEQ ID NO: 641889 - DNA, 15 bp, Homo sapiens
tacttattctatata

SEQ ID NO: 641890 - DNA, 15 bp, Homo sapiens
acttattctatataa

SEQ ID NO: 641891 - DNA, 15 bp, Homo sapiens
cttattctatataag

SEQ ID NO: 641892 - DNA, 15 bp, Homo sapiens
ttattctatataagt

SEQ ID NO: 641893 - DNA, 15 bp, Homo sapiens
tattctatataagtt

SEQ ID NO: 641894 - DNA, 15 bp, Homo sapiens
attctatataagttc

SEQ ID NO: 641895 - DNA, 15 bp, Homo sapiens
ttctatataagttcc

SEQ ID NO: 641896 - DNA, 15 bp, Homo sapiens
tctatataagttccc

SEQ ID NO: 641897 - DNA, 15 bp, Homo sapiens
ctatataagttccct

SEQ ID NO: 641898 - DNA, 15 bp, Homo sapiens
tatataagttcccta

SEQ ID NO: 641899 - DNA, 15 bp, Homo sapiens
atataagttccctaa

SEQ ID NO: 641900 - DNA, 15 bp, Homo sapiens
tataagttccctaat

SEQ ID NO: 641901 - DNA, 15 bp, Homo sapiens
ataagttccctaatg

SEQ ID NO: 641902 - DNA, 15 bp, Homo sapiens
taagttccctaatgt

SEQ ID NO: 641903 - DNA, 15 bp, Homo sapiens
aagttccctaatgtc

SEQ ID NO: 641904 - DNA, 15 bp, Homo sapiens
agttccctaatgtct

SEQ ID NO: 641905 - DNA, 15 bp, Homo sapiens
gttccctaatgtcta

SEQ ID NO: 641906 - DNA, 15 bp, Homo sapiens
ttccctaatgtctaa

SEQ ID NO: 641907 - DNA, 15 bp, Homo sapiens
tccctaatgtctaaa

SEQ ID NO: 641908 - DNA, 15 bp, Homo sapiens
ccctaatgtctaaat

SEQ ID NO: 641909 - DNA, 15 bp, Homo sapiens
cctaatgtctaaata

SEQ ID NO: 641910 - DNA, 15 bp, Homo sapiens
ctaatgtctaaatat

SEQ ID NO: 641911 - DNA, 15 bp, Homo sapiens
taatgtctaaatatg

SEQ ID NO: 641912 - DNA, 15 bp, Homo sapiens
aatgtctaaatatgt

SEQ ID NO: 641913 - DNA, 15 bp, Homo sapiens
atgtctaaatatgta

SEQ ID NO: 641914 - DNA, 15 bp, Homo sapiens
tgtctaaatatgtat

SEQ ID NO: 641915 - DNA, 15 bp, Homo sapiens
gtctaaatatgtatg

SEQ ID NO: 641916 - DNA, 15 bp, Homo sapiens
tctaaatatgtatgt

SEQ ID NO: 641917 - DNA, 15 bp, Homo sapiens
ctaaatatgtatgtt

SEQ ID NO: 641918 - DNA, 15 bp, Homo sapiens
taaatatgtatgttt

SEQ ID NO: 641919 - DNA, 15 bp, Homo sapiens
aaatatgtatgtttc

SEQ ID NO: 641920 - DNA, 15 bp, Homo sapiens
aatatgtatgtttct

SEQ ID NO: 641921 - DNA, 15 bp, Homo sapiens
atatgtatgtttctt

SEQ ID NO: 641922 - DNA, 15 bp, Homo sapiens
tatgtatgtttcttt

SEQ ID NO: 641923 - DNA, 15 bp, Homo sapiens
atgtatgtttctttt

SEQ ID NO: 641924 - DNA, 15 bp, Homo sapiens
tgtatgtttcttttc

SEQ ID NO: 641925 - DNA, 15 bp, Homo sapiens
gtatgtttcttttct

SEQ ID NO: 641926 - DNA, 15 bp, Homo sapiens
tatgtttcttttcta

SEQ ID NO: 641927 - DNA, 15 bp, Homo sapiens
atgtttcttttctaa

SEQ ID NO: 641928 - DNA, 15 bp, Homo sapiens
tgtttcttttctaaa

SEQ ID NO: 641929 - DNA, 15 bp, Homo sapiens
gtttcttttctaaaa

SEQ ID NO: 641930 - DNA, 15 bp, Homo sapiens
tttcttttctaaaat

SEQ ID NO: 641931 - DNA, 15 bp, Homo sapiens
ttcttttctaaaatt

SEQ ID NO: 641932 - DNA, 15 bp, Homo sapiens
tcttttctaaaattg

SEQ ID NO: 641933 - DNA, 15 bp, Homo sapiens
cttttctaaaattgg

SEQ ID NO: 641934 - DNA, 15 bp, Homo sapiens
ttttctaaaattgga

SEQ ID NO: 641935 - DNA, 15 bp, Homo sapiens
tttctaaaattggaa

SEQ ID NO: 641936 - DNA, 15 bp, Homo sapiens
ttctaaaattggaag

SEQ ID NO: 641937 - DNA, 15 bp, Homo sapiens
tctaaaattggaagt

SEQ ID NO: 641938 - DNA, 15 bp, Homo sapiens
ctaaaattggaagtt

SEQ ID NO: 641939 - DNA, 15 bp, Homo sapiens
taaaattggaagttt

SEQ ID NO: 641940 - DNA, 15 bp, Homo sapiens
aaaattggaagtttc

SEQ ID NO: 641941 - DNA, 15 bp, Homo sapiens
aaattggaagtttct

SEQ ID NO: 641942 - DNA, 15 bp, Homo sapiens
aattggaagtttctt

SEQ ID NO: 641943 - DNA, 15 bp, Homo sapiens
attggaagtttcttt

SEQ ID NO: 641944 - DNA, 15 bp, Homo sapiens
ttggaagtttctttt

SEQ ID NO: 641945 - DNA, 15 bp, Homo sapiens
tggaagtttcttttc

SEQ ID NO: 641946 - DNA, 15 bp, Homo sapiens
ggaagtttcttttca

SEQ ID NO: 641947 - DNA, 15 bp, Homo sapiens
gaagtttcttttcat

SEQ ID NO: 641948 - DNA, 15 bp, Homo sapiens
aagtttcttttcatt

SEQ ID NO: 641949 - DNA, 15 bp, Homo sapiens
agtttcttttcattt

SEQ ID NO: 641950 - DNA, 15 bp, Homo sapiens
gtttcttttcatttg

SEQ ID NO: 641951 - DNA, 15 bp, Homo sapiens
tttcttttcatttga

SEQ ID NO: 641952 - DNA, 15 bp, Homo sapiens
ttcttttcatttgac

SEQ ID NO: 641953 - DNA, 15 bp, Homo sapiens
tcttttcatttgaca

SEQ ID NO: 641954 - DNA, 15 bp, Homo sapiens
cttttcatttgacaa

SEQ ID NO: 641955 - DNA, 15 bp, Homo sapiens
ttttcatttgacaaa

SEQ ID NO: 641956 - DNA, 15 bp, Homo sapiens
tttcatttgacaaac

SEQ ID NO: 641957 - DNA, 15 bp, Homo sapiens
ttcatttgacaaact

SEQ ID NO: 641958 - DNA, 15 bp, Homo sapiens
tcatttgacaaactc

SEQ ID NO: 641959 - DNA, 15 bp, Homo sapiens
catttgacaaactca

SEQ ID NO: 641960 - DNA, 15 bp, Homo sapiens
atttgacaaactcag

SEQ ID NO: 641961 - DNA, 15 bp, Homo sapiens
tttgacaaactcaga

SEQ ID NO: 641962 - DNA, 15 bp, Homo sapiens
ttgacaaactcagag

SEQ ID NO: 641963 - DNA, 15 bp, Homo sapiens
tgacaaactcagagc

SEQ ID NO: 641964 - DNA, 15 bp, Homo sapiens
gacaaactcagagca

SEQ ID NO: 641965 - DNA, 15 bp, Homo sapiens
acaaactcagagcaa

SEQ ID NO: 641966 - DNA, 15 bp, Homo sapiens
caaactcagagcaat

SEQ ID NO: 641967 - DNA, 15 bp, Homo sapiens
aaactcagagcaatt

SEQ ID NO: 641968 - DNA, 15 bp, Homo sapiens
aactcagagcaattt

SEQ ID NO: 641969 - DNA, 15 bp, Homo sapiens
actcagagcaatttg

SEQ ID NO: 641970 - DNA, 15 bp, Homo sapiens
ctcagagcaatttgt

SEQ ID NO: 641971 - DNA, 15 bp, Homo sapiens
tcagagcaatttgta

SEQ ID NO: 641972 - DNA, 15 bp, Homo sapiens
cagagcaatttgtat

SEQ ID NO: 641973 - DNA, 15 bp, Homo sapiens
agagcaatttgtata

SEQ ID NO: 641974 - DNA, 15 bp, Homo sapiens
gagcaatttgtataa

SEQ ID NO: 641975 - DNA, 15 bp, Homo sapiens
agcaatttgtataaa

SEQ ID NO: 641976 - DNA, 15 bp, Homo sapiens
gcaatttgtataaaa

SEQ ID NO: 641977 - DNA, 15 bp, Homo sapiens
caatttgtataaaag

SEQ ID NO: 641978 - DNA, 15 bp, Homo sapiens
aatttgtataaaaga

SEQ ID NO: 641979 - DNA, 15 bp, Homo sapiens
atttgtataaaagag

SEQ ID NO: 641980 - DNA, 15 bp, Homo sapiens
tttgtataaaagaga

SEQ ID NO: 641981 - DNA, 15 bp, Homo sapiens
ttgtataaaagagag

SEQ ID NO: 641982 - DNA, 15 bp, Homo sapiens
tgtataaaagagaga

SEQ ID NO: 641983 - DNA, 15 bp, Homo sapiens
gtataaaagagagat

SEQ ID NO: 641984 - DNA, 15 bp, Homo sapiens
tataaaagagagatt

SEQ ID NO: 641985 - DNA, 15 bp, Homo sapiens
ataaaagagagattg

SEQ ID NO: 641986 - DNA, 15 bp, Homo sapiens
taaaagagagattga

SEQ ID NO: 641987 - DNA, 15 bp, Homo sapiens
aaaagagagattgag

SEQ ID NO: 641988 - DNA, 15 bp, Homo sapiens
aaagagagattgagt

SEQ ID NO: 641989 - DNA, 15 bp, Homo sapiens
aagagagattgagtt

SEQ ID NO: 641990 - DNA, 15 bp, Homo sapiens
agagagattgagttc

SEQ ID NO: 641991 - DNA, 15 bp, Homo sapiens
gagagattgagttca

SEQ ID NO: 641992 - DNA, 15 bp, Homo sapiens
agagattgagttcaa

SEQ ID NO: 641993 - DNA, 15 bp, Homo sapiens
gagattgagttcaac

SEQ ID NO: 641994 - DNA, 15 bp, Homo sapiens
agattgagttcaaca

SEQ ID NO: 641995 - DNA, 15 bp, Homo sapiens
gattgagttcaacaa

SEQ ID NO: 641996 - DNA, 15 bp, Homo sapiens
attgagttcaacaaa

SEQ ID NO: 641997 - DNA, 15 bp, Homo sapiens
ttgagttcaacaaaa

SEQ ID NO: 641998 - DNA, 15 bp, Homo sapiens
tgagttcaacaaaag

SEQ ID NO: 641999 - DNA, 15 bp, Homo sapiens
gagttcaacaaaagt

SEQ ID NO: 642000 - DNA, 15 bp, Homo sapiens
agttcaacaaaagtc

SEQ ID NO: 642001 - DNA, 15 bp, Homo sapiens
gttcaacaaaagtct

SEQ ID NO: 642002 - DNA, 15 bp, Homo sapiens
ttcaacaaaagtctt

SEQ ID NO: 642003 - DNA, 15 bp, Homo sapiens
tcaacaaaagtcttt

SEQ ID NO: 642004 - DNA, 15 bp, Homo sapiens
caacaaaagtctttg

SEQ ID NO: 642005 - DNA, 15 bp, Homo sapiens
aacaaaagtctttga

SEQ ID NO: 642006 - DNA, 15 bp, Homo sapiens
acaaaagtctttgaa

SEQ ID NO: 642007 - DNA, 15 bp, Homo sapiens
caaaagtctttgaaa

SEQ ID NO: 642008 - DNA, 15 bp, Homo sapiens
aaaagtctttgaaat

SEQ ID NO: 642009 - DNA, 15 bp, Homo sapiens
aaagtctttgaaatc

SEQ ID NO: 642010 - DNA, 15 bp, Homo sapiens
aagtctttgaaatcc

SEQ ID NO: 642011 - DNA, 15 bp, Homo sapiens
agtctttgaaatcct

SEQ ID NO: 642012 - DNA, 15 bp, Homo sapiens
gtctttgaaatcctt

SEQ ID NO: 642013 - DNA, 15 bp, Homo sapiens
tctttgaaatccttc

SEQ ID NO: 642014 - DNA, 15 bp, Homo sapiens
ctttgaaatccttca

SEQ ID NO: 642015 - DNA, 15 bp, Homo sapiens
tttgaaatccttcat

SEQ ID NO: 642016 - DNA, 15 bp, Homo sapiens
ttgaaatccttcatt

SEQ ID NO: 642017 - DNA, 15 bp, Homo sapiens
tgaaatccttcattt

SEQ ID NO: 642018 - DNA, 15 bp, Homo sapiens
gaaatccttcattta

SEQ ID NO: 642019 - DNA, 15 bp, Homo sapiens
aaatccttcatttat

SEQ ID NO: 642020 - DNA, 15 bp, Homo sapiens
aatccttcatttatg

SEQ ID NO: 642021 - DNA, 15 bp, Homo sapiens
atccttcatttatgc

SEQ ID NO: 642022 - DNA, 15 bp, Homo sapiens
tccttcatttatgcg

SEQ ID NO: 642023 - DNA, 15 bp, Homo sapiens
ccttcatttatgcgg

SEQ ID NO: 642024 - DNA, 15 bp, Homo sapiens
cttcatttatgcggg

SEQ ID NO: 642025 - DNA, 15 bp, Homo sapiens
ttcatttatgcggga

SEQ ID NO: 642026 - DNA, 15 bp, Homo sapiens
tcatttatgcgggag

SEQ ID NO: 642027 - DNA, 15 bp, Homo sapiens
catttatgcgggagg

SEQ ID NO: 642028 - DNA, 15 bp, Homo sapiens
atttatgcgggagga

SEQ ID NO: 642029 - DNA, 15 bp, Homo sapiens
tttatgcgggaggac

SEQ ID NO: 642030 - DNA, 15 bp, Homo sapiens
ttatgcgggaggaca

SEQ ID NO: 642031 - DNA, 15 bp, Homo sapiens
tatgcgggaggacag

SEQ ID NO: 642032 - DNA, 15 bp, Homo sapiens
atgcgggaggacaga

SEQ ID NO: 642033 - DNA, 15 bp, Homo sapiens
tgcgggaggacagaa

SEQ ID NO: 642034 - DNA, 15 bp, Homo sapiens
gcgggaggacagaag

SEQ ID NO: 642035 - DNA, 15 bp, Homo sapiens
cgggaggacagaagt

SEQ ID NO: 642036 - DNA, 15 bp, Homo sapiens
gggaggacagaagtg

SEQ ID NO: 642037 - DNA, 15 bp, Homo sapiens
ggaggacagaagtga

SEQ ID NO: 642038 - DNA, 15 bp, Homo sapiens
gaggacagaagtgaa

SEQ ID NO: 642039 - DNA, 15 bp, Homo sapiens
aggacagaagtgaac

SEQ ID NO: 642040 - DNA, 15 bp, Homo sapiens
ggacagaagtgaact

SEQ ID NO: 642041 - DNA, 15 bp, Homo sapiens
gacagaagtgaactg

SEQ ID NO: 642042 - DNA, 15 bp, Homo sapiens
acagaagtgaactgc

SEQ ID NO: 642043 - DNA, 15 bp, Homo sapiens
cagaagtgaactgct

SEQ ID NO: 642044 - DNA, 15 bp, Homo sapiens
agaagtgaactgctt

SEQ ID NO: 642045 - DNA, 15 bp, Homo sapiens
gaagtgaactgcttt

SEQ ID NO: 642046 - DNA, 15 bp, Homo sapiens
aagtgaactgctttt

SEQ ID NO: 642047 - DNA, 15 bp, Homo sapiens
agtgaactgcttttt

SEQ ID NO: 642048 - DNA, 15 bp, Homo sapiens
gtgaactgcttttta

SEQ ID NO: 642049 - DNA, 15 bp, Homo sapiens
tgaactgctttttac

SEQ ID NO: 642050 - DNA, 15 bp, Homo sapiens
gaactgctttttaca

SEQ ID NO: 642051 - DNA, 15 bp, Homo sapiens
aactgctttttacag

SEQ ID NO: 642052 - DNA, 15 bp, Homo sapiens
actgctttttacaga

SEQ ID NO: 642053 - DNA, 15 bp, Homo sapiens
ctgctttttacagag

SEQ ID NO: 642054 - DNA, 15 bp, Homo sapiens
tgctttttacagagg

SEQ ID NO: 642055 - DNA, 15 bp, Homo sapiens
gctttttacagaggg

SEQ ID NO: 642056 - DNA, 15 bp, Homo sapiens
ctttttacagagggg

SEQ ID NO: 642057 - DNA, 15 bp, Homo sapiens
tttttacagaggggt

SEQ ID NO: 642058 - DNA, 15 bp, Homo sapiens
ttttacagaggggtt

SEQ ID NO: 642059 - DNA, 15 bp, Homo sapiens
tttacagaggggttt

SEQ ID NO: 642060 - DNA, 15 bp, Homo sapiens
ttacagaggggtttg

SEQ ID NO: 642061 - DNA, 15 bp, Homo sapiens
tacagaggggtttga

SEQ ID NO: 642062 - DNA, 15 bp, Homo sapiens
acagaggggtttgac

SEQ ID NO: 642063 - DNA, 15 bp, Homo sapiens
cagaggggtttgacc

SEQ ID NO: 642064 - DNA, 15 bp, Homo sapiens
agaggggtttgacca

SEQ ID NO: 642065 - DNA, 15 bp, Homo sapiens
gaggggtttgaccac

SEQ ID NO: 642066 - DNA, 15 bp, Homo sapiens
aggggtttgaccaca

SEQ ID NO: 642067 - DNA, 15 bp, Homo sapiens
ggggtttgaccacaa

SEQ ID NO: 642068 - DNA, 15 bp, Homo sapiens
gggtttgaccacaaa

SEQ ID NO: 642069 - DNA, 15 bp, Homo sapiens
ggtttgaccacaaaa

SEQ ID NO: 642070 - DNA, 15 bp, Homo sapiens
gtttgaccacaaaac

SEQ ID NO: 642071 - DNA, 15 bp, Homo sapiens
tttgaccacaaaaca

SEQ ID NO: 642072 - DNA, 15 bp, Homo sapiens
ttgaccacaaaacat

SEQ ID NO: 642073 - DNA, 15 bp, Homo sapiens
tgaccacaaaacata

SEQ ID NO: 642074 - DNA, 15 bp, Homo sapiens
gaccacaaaacataa

SEQ ID NO: 642075 - DNA, 15 bp, Homo sapiens
accacaaaacataag

SEQ ID NO: 642076 - DNA, 15 bp, Homo sapiens
ccacaaaacataaga

SEQ ID NO: 642077 - DNA, 15 bp, Homo sapiens
cacaaaacataagat

SEQ ID NO: 642078 - DNA, 15 bp, Homo sapiens
acaaaacataagatt

SEQ ID NO: 642079 - DNA, 15 bp, Homo sapiens
caaaacataagatta

SEQ ID NO: 642080 - DNA, 15 bp, Homo sapiens
aaaacataagattaa

SEQ ID NO: 642081 - DNA, 15 bp, Homo sapiens
aaacataagattaat

SEQ ID NO: 642082 - DNA, 15 bp, Homo sapiens
aacataagattaatc

SEQ ID NO: 642083 - DNA, 15 bp, Homo sapiens
acataagattaatca

SEQ ID NO: 642084 - DNA, 15 bp, Homo sapiens
cataagattaatcat

SEQ ID NO: 642085 - DNA, 15 bp, Homo sapiens
ataagattaatcatt

SEQ ID NO: 642086 - DNA, 15 bp, Homo sapiens
taagattaatcattc

SEQ ID NO: 642087 - DNA, 15 bp, Homo sapiens
aagattaatcattct

SEQ ID NO: 642088 - DNA, 15 bp, Homo sapiens
agattaatcattctc

SEQ ID NO: 642089 - DNA, 15 bp, Homo sapiens
gattaatcattctcc

SEQ ID NO: 642090 - DNA, 15 bp, Homo sapiens
attaatcattctccc

SEQ ID NO: 642091 - DNA, 15 bp, Homo sapiens
ttaatcattctcccc

SEQ ID NO: 642092 - DNA, 15 bp, Homo sapiens
taatcattctcccct

SEQ ID NO: 642093 - DNA, 15 bp, Homo sapiens
aatcattctcccctt

SEQ ID NO: 642094 - DNA, 15 bp, Homo sapiens
atcattctccccttg

SEQ ID NO: 642095 - DNA, 15 bp, Homo sapiens
tcattctccccttgg

SEQ ID NO: 642096 - DNA, 15 bp, Homo sapiens
cattctccccttgga

SEQ ID NO: 642097 - DNA, 15 bp, Homo sapiens
attctccccttggag

SEQ ID NO: 642098 - DNA, 15 bp, Homo sapiens
ttctccccttggaga

SEQ ID NO: 642099 - DNA, 15 bp, Homo sapiens
tctccccttggagaa

SEQ ID NO: 642100 - DNA, 15 bp, Homo sapiens
ctccccttggagaaa

SEQ ID NO: 642101 - DNA, 15 bp, Homo sapiens
tccccttggagaaaa

SEQ ID NO: 642102 - DNA, 15 bp, Homo sapiens
ccccttggagaaaaa

SEQ ID NO: 642103 - DNA, 15 bp, Homo sapiens
cccttggagaaaaaa

SEQ ID NO: 642104 - DNA, 15 bp, Homo sapiens
ccttggagaaaaaaa

SEQ ID NO: 642105 - DNA, 15 bp, Homo sapiens
cttggagaaaaaaat

SEQ ID NO: 642106 - DNA, 15 bp, Homo sapiens
ttggagaaaaaaatg

SEQ ID NO: 642107 - DNA, 15 bp, Homo sapiens
tggagaaaaaaatgc

SEQ ID NO: 642108 - DNA, 15 bp, Homo sapiens
ggagaaaaaaatgca

SEQ ID NO: 642109 - DNA, 15 bp, Homo sapiens
gagaaaaaaatgcat

SEQ ID NO: 642110 - DNA, 15 bp, Homo sapiens
agaaaaaaatgcatt

SEQ ID NO: 642111 - DNA, 15 bp, Homo sapiens
gaaaaaaatgcattc

SEQ ID NO: 642112 - DNA, 15 bp, Homo sapiens
aaaaaaatgcattca

SEQ ID NO: 642113 - DNA, 15 bp, Homo sapiens
aaaaaatgcattcag

SEQ ID NO: 642114 - DNA, 15 bp, Homo sapiens
aaaaatgcattcaga

SEQ ID NO: 642115 - DNA, 15 bp, Homo sapiens
aaaatgcattcagac

SEQ ID NO: 642116 - DNA, 15 bp, Homo sapiens
aaatgcattcagacc

SEQ ID NO: 642117 - DNA, 15 bp, Homo sapiens
aatgcattcagacct

SEQ ID NO: 642118 - DNA, 15 bp, Homo sapiens
atgcattcagaccta

SEQ ID NO: 642119 - DNA, 15 bp, Homo sapiens
tgcattcagacctat

SEQ ID NO: 642120 - DNA, 15 bp, Homo sapiens
gcattcagacctatg

SEQ ID NO: 642121 - DNA, 15 bp, Homo sapiens
cattcagacctatgt

SEQ ID NO: 642122 - DNA, 15 bp, Homo sapiens
attcagacctatgtg

SEQ ID NO: 642123 - DNA, 15 bp, Homo sapiens
ttcagacctatgtgt

SEQ ID NO: 642124 - DNA, 15 bp, Homo sapiens
tcagacctatgtgtg

SEQ ID NO: 642125 - DNA, 15 bp, Homo sapiens
cagacctatgtgtga

SEQ ID NO: 642126 - DNA, 15 bp, Homo sapiens
agacctatgtgtgat

SEQ ID NO: 642127 - DNA, 15 bp, Homo sapiens
gacctatgtgtgatg

SEQ ID NO: 642128 - DNA, 15 bp, Homo sapiens
acctatgtgtgatgt

SEQ ID NO: 642129 - DNA, 15 bp, Homo sapiens
cctatgtgtgatgta

SEQ ID NO: 642130 - DNA, 15 bp, Homo sapiens
ctatgtgtgatgtaa

SEQ ID NO: 642131 - DNA, 15 bp, Homo sapiens
tatgtgtgatgtaaa

SEQ ID NO: 642132 - DNA, 15 bp, Homo sapiens
atgtgtgatgtaaat

SEQ ID NO: 642133 - DNA, 15 bp, Homo sapiens
tgtgtgatgtaaatt

SEQ ID NO: 642134 - DNA, 15 bp, Homo sapiens
gtgtgatgtaaattg

SEQ ID NO: 642135 - DNA, 15 bp, Homo sapiens
tgtgatgtaaattga

SEQ ID NO: 642136 - DNA, 15 bp, Homo sapiens
gtgatgtaaattgac

SEQ ID NO: 642137 - DNA, 15 bp, Homo sapiens
tgatgtaaattgacc

SEQ ID NO: 642138 - DNA, 15 bp, Homo sapiens
gatgtaaattgaccc

SEQ ID NO: 642139 - DNA, 15 bp, Homo sapiens
atgtaaattgaccca

SEQ ID NO: 642140 - DNA, 15 bp, Homo sapiens
tgtaaattgacccaa

SEQ ID NO: 642141 - DNA, 15 bp, Homo sapiens
gtaaattgacccaag

SEQ ID NO: 642142 - DNA, 15 bp, Homo sapiens
taaattgacccaagc

SEQ ID NO: 642143 - DNA, 15 bp, Homo sapiens
aaattgacccaagcc

SEQ ID NO: 642144 - DNA, 15 bp, Homo sapiens
aattgacccaagcca

SEQ ID NO: 642145 - DNA, 15 bp, Homo sapiens
attgacccaagccac

SEQ ID NO: 642146 - DNA, 15 bp, Homo sapiens
ttgacccaagccacg

SEQ ID NO: 642147 - DNA, 15 bp, Homo sapiens
tgacccaagccacgg

SEQ ID NO: 642148 - DNA, 15 bp, Homo sapiens
gacccaagccacgga

SEQ ID NO: 642149 - DNA, 15 bp, Homo sapiens
acccaagccacggat

SEQ ID NO: 642150 - DNA, 15 bp, Homo sapiens
cccaagccacggata

SEQ ID NO: 642151 - DNA, 15 bp, Homo sapiens
ccaagccacggataa

SEQ ID NO: 642152 - DNA, 15 bp, Homo sapiens
caagccacggataac

SEQ ID NO: 642153 - DNA, 15 bp, Homo sapiens
aagccacggataaca

SEQ ID NO: 642154 - DNA, 15 bp, Homo sapiens
agccacggataacac

SEQ ID NO: 642155 - DNA, 15 bp, Homo sapiens
gccacggataacact

SEQ ID NO: 642156 - DNA, 15 bp, Homo sapiens
ccacggataacactt

SEQ ID NO: 642157 - DNA, 15 bp, Homo sapiens
cacggataacactta

SEQ ID NO: 642158 - DNA, 15 bp, Homo sapiens
acggataacacttat

SEQ ID NO: 642159 - DNA, 15 bp, Homo sapiens
cggataacacttatg

SEQ ID NO: 642160 - DNA, 15 bp, Homo sapiens
ggataacacttatga

SEQ ID NO: 642161 - DNA, 15 bp, Homo sapiens
gataacacttatgag

SEQ ID NO: 642162 - DNA, 15 bp, Homo sapiens
ataacacttatgagg

SEQ ID NO: 642163 - DNA, 15 bp, Homo sapiens
taacacttatgagga

SEQ ID NO: 642164 - DNA, 15 bp, Homo sapiens
aacacttatgaggat

SEQ ID NO: 642165 - DNA, 15 bp, Homo sapiens
acacttatgaggata

SEQ ID NO: 642166 - DNA, 15 bp, Homo sapiens
cacttatgaggataa

SEQ ID NO: 642167 - DNA, 15 bp, Homo sapiens
acttatgaggataag

SEQ ID NO: 642168 - DNA, 15 bp, Homo sapiens
cttatgaggataagt

SEQ ID NO: 642169 - DNA, 15 bp, Homo sapiens
ttatgaggataagtt

SEQ ID NO: 642170 - DNA, 15 bp, Homo sapiens
tatgaggataagttt

SEQ ID NO: 642171 - DNA, 15 bp, Homo sapiens
atgaggataagtttt

SEQ ID NO: 642172 - DNA, 15 bp, Homo sapiens
tgaggataagttttt

SEQ ID NO: 642173 - DNA, 15 bp, Homo sapiens
gaggataagtttttg

SEQ ID NO: 642174 - DNA, 15 bp, Homo sapiens
aggataagtttttga

SEQ ID NO: 642175 - DNA, 15 bp, Homo sapiens
ggataagtttttgag

SEQ ID NO: 642176 - DNA, 15 bp, Homo sapiens
gataagtttttgagg

SEQ ID NO: 642177 - DNA, 15 bp, Homo sapiens
ataagtttttgagga

SEQ ID NO: 642178 - DNA, 15 bp, Homo sapiens
taagtttttgaggaa

SEQ ID NO: 642179 - DNA, 15 bp, Homo sapiens
aagtttttgaggaaa

SEQ ID NO: 642180 - DNA, 15 bp, Homo sapiens
agtttttgaggaaaa

SEQ ID NO: 642181 - DNA, 15 bp, Homo sapiens
gtttttgaggaaaag

SEQ ID NO: 642182 - DNA, 15 bp, Homo sapiens
tttttgaggaaaagg

SEQ ID NO: 642183 - DNA, 15 bp, Homo sapiens
ttttgaggaaaaggt

SEQ ID NO: 642184 - DNA, 15 bp, Homo sapiens
tttgaggaaaaggtc

SEQ ID NO: 642185 - DNA, 15 bp, Homo sapiens
ttgaggaaaaggtcc

SEQ ID NO: 642186 - DNA, 15 bp, Homo sapiens
tgaggaaaaggtcct

SEQ ID NO: 642187 - DNA, 15 bp, Homo sapiens
gaggaaaaggtcctc

SEQ ID NO: 642188 - DNA, 15 bp, Homo sapiens
aggaaaaggtcctca

SEQ ID NO: 642189 - DNA, 15 bp, Homo sapiens
ggaaaaggtcctcaa

SEQ ID NO: 642190 - DNA, 15 bp, Homo sapiens
gaaaaggtcctcaag

SEQ ID NO: 642191 - DNA, 15 bp, Homo sapiens
aaaaggtcctcaagt

SEQ ID NO: 642192 - DNA, 15 bp, Homo sapiens
aaaggtcctcaagta

SEQ ID NO: 642193 - DNA, 15 bp, Homo sapiens
aaggtcctcaagtat

SEQ ID NO: 642194 - DNA, 15 bp, Homo sapiens
aggtcctcaagtata

SEQ ID NO: 642195 - DNA, 15 bp, Homo sapiens
ggtcctcaagtatat

SEQ ID NO: 642196 - DNA, 15 bp, Homo sapiens
gtcctcaagtatatc

SEQ ID NO: 642197 - DNA, 15 bp, Homo sapiens
tcctcaagtatatct

SEQ ID NO: 642198 - DNA, 15 bp, Homo sapiens
cctcaagtatatctt

SEQ ID NO: 642199 - DNA, 15 bp, Homo sapiens
ctcaagtatatctta

SEQ ID NO: 642200 - DNA, 15 bp, Homo sapiens
tcaagtatatcttat

SEQ ID NO: 642201 - DNA, 15 bp, Homo sapiens
caagtatatcttatc

SEQ ID NO: 642202 - DNA, 15 bp, Homo sapiens
aagtatatcttatca

SEQ ID NO: 642203 - DNA, 15 bp, Homo sapiens
agtatatcttatcat

SEQ ID NO: 642204 - DNA, 15 bp, Homo sapiens
gtatatcttatcatg

SEQ ID NO: 642205 - DNA, 15 bp, Homo sapiens
tatatcttatcatgc

SEQ ID NO: 642206 - DNA, 15 bp, Homo sapiens
atatcttatcatgcc

SEQ ID NO: 642207 - DNA, 15 bp, Homo sapiens
tatcttatcatgcct

SEQ ID NO: 642208 - DNA, 15 bp, Homo sapiens
atcttatcatgcctt

SEQ ID NO: 642209 - DNA, 15 bp, Homo sapiens
tcttatcatgcctta

SEQ ID NO: 642210 - DNA, 15 bp, Homo sapiens
cttatcatgccttaa

SEQ ID NO: 642211 - DNA, 15 bp, Homo sapiens
ttatcatgccttaaa

SEQ ID NO: 642212 - DNA, 15 bp, Homo sapiens
tatcatgccttaaaa

SEQ ID NO: 642213 - DNA, 15 bp, Homo sapiens
atcatgccttaaaat

SEQ ID NO: 642214 - DNA, 15 bp, Homo sapiens
tcatgccttaaaatt

SEQ ID NO: 642215 - DNA, 15 bp, Homo sapiens
catgccttaaaattt

SEQ ID NO: 642216 - DNA, 15 bp, Homo sapiens
atgccttaaaatttg

SEQ ID NO: 642217 - DNA, 15 bp, Homo sapiens
tgccttaaaatttgg

SEQ ID NO: 642218 - DNA, 15 bp, Homo sapiens
gccttaaaatttgga

SEQ ID NO: 642219 - DNA, 15 bp, Homo sapiens
ccttaaaatttggaa

SEQ ID NO: 642220 - DNA, 15 bp, Homo sapiens
cttaaaatttggaaa

SEQ ID NO: 642221 - DNA, 15 bp, Homo sapiens
ttaaaatttggaaat

SEQ ID NO: 642222 - DNA, 15 bp, Homo sapiens
taaaatttggaaata

SEQ ID NO: 642223 - DNA, 15 bp, Homo sapiens
aaaatttggaaataa

SEQ ID NO: 642224 - DNA, 15 bp, Homo sapiens
aaatttggaaataaa

SEQ ID NO: 642225 - DNA, 15 bp, Homo sapiens
aatttggaaataaat

SEQ ID NO: 642226 - DNA, 15 bp, Homo sapiens
atttggaaataaatg

SEQ ID NO: 642227 - DNA, 15 bp, Homo sapiens
tttggaaataaatgt

SEQ ID NO: 642228 - DNA, 15 bp, Homo sapiens
ttggaaataaatgtg

SEQ ID NO: 642229 - DNA, 15 bp, Homo sapiens
tggaaataaatgtga

SEQ ID NO: 642230 - DNA, 15 bp, Homo sapiens
ggaaataaatgtgag

SEQ ID NO: 642231 - DNA, 15 bp, Homo sapiens
gaaataaatgtgaga

SEQ ID NO: 642232 - DNA, 15 bp, Homo sapiens
aaataaatgtgagag

SEQ ID NO: 642233 - DNA, 15 bp, Homo sapiens
aataaatgtgagagg

SEQ ID NO: 642234 - DNA, 15 bp, Homo sapiens
ataaatgtgagagga

SEQ ID NO: 642235 - DNA, 15 bp, Homo sapiens
taaatgtgagaggag

SEQ ID NO: 642236 - DNA, 15 bp, Homo sapiens
aaatgtgagaggagc

SEQ ID NO: 642237 - DNA, 15 bp, Homo sapiens
aatgtgagaggagcc

SEQ ID NO: 642238 - DNA, 15 bp, Homo sapiens
atgtgagaggagcca

SEQ ID NO: 642239 - DNA, 15 bp, Homo sapiens
tgtgagaggagccaa

SEQ ID NO: 642240 - DNA, 15 bp, Homo sapiens
gtgagaggagccaaa

SEQ ID NO: 642241 - DNA, 15 bp, Homo sapiens
tgagaggagccaaaa

SEQ ID NO: 642242 - DNA, 15 bp, Homo sapiens
gagaggagccaaaat

SEQ ID NO: 642243 - DNA, 15 bp, Homo sapiens
agaggagccaaaatt

SEQ ID NO: 642244 - DNA, 15 bp, Homo sapiens
gaggagccaaaattt

SEQ ID NO: 642245 - DNA, 15 bp, Homo sapiens
aggagccaaaatttg

SEQ ID NO: 642246 - DNA, 15 bp, Homo sapiens
ggagccaaaatttga

SEQ ID NO: 642247 - DNA, 15 bp, Homo sapiens
gagccaaaatttgag

SEQ ID NO: 642248 - DNA, 15 bp, Homo sapiens
agccaaaatttgagg

SEQ ID NO: 642249 - DNA, 15 bp, Homo sapiens
gccaaaatttgaggc

SEQ ID NO: 642250 - DNA, 15 bp, Homo sapiens
ccaaaatttgaggca

SEQ ID NO: 642251 - DNA, 15 bp, Homo sapiens
caaaatttgaggcat

SEQ ID NO: 642252 - DNA, 15 bp, Homo sapiens
aaaatttgaggcata

SEQ ID NO: 642253 - DNA, 15 bp, Homo sapiens
aaatttgaggcatat

SEQ ID NO: 642254 - DNA, 15 bp, Homo sapiens
aatttgaggcatata

SEQ ID NO: 642255 - DNA, 15 bp, Homo sapiens
atttgaggcatatac

SEQ ID NO: 642256 - DNA, 15 bp, Homo sapiens
tttgaggcatataca

SEQ ID NO: 642257 - DNA, 15 bp, Homo sapiens
ttgaggcatatacat

SEQ ID NO: 642258 - DNA, 15 bp, Homo sapiens
tgaggcatatacatg

SEQ ID NO: 642259 - DNA, 15 bp, Homo sapiens
gaggcatatacatga

SEQ ID NO: 642260 - DNA, 15 bp, Homo sapiens
aggcatatacatgat

SEQ ID NO: 642261 - DNA, 15 bp, Homo sapiens
ggcatatacatgata

SEQ ID NO: 642262 - DNA, 15 bp, Homo sapiens
gcatatacatgatac

SEQ ID NO: 642263 - DNA, 15 bp, Homo sapiens
catatacatgatact

SEQ ID NO: 642264 - DNA, 15 bp, Homo sapiens
atatacatgatacta

SEQ ID NO: 642265 - DNA, 15 bp, Homo sapiens
tatacatgatactag

SEQ ID NO: 642266 - DNA, 15 bp, Homo sapiens
atacatgatactagg

SEQ ID NO: 642267 - DNA, 15 bp, Homo sapiens
tacatgatactaggt

SEQ ID NO: 642268 - DNA, 15 bp, Homo sapiens
acatgatactaggtg

SEQ ID NO: 642269 - DNA, 15 bp, Homo sapiens
catgatactaggtgc

SEQ ID NO: 642270 - DNA, 15 bp, Homo sapiens
atgatactaggtgct

SEQ ID NO: 642271 - DNA, 15 bp, Homo sapiens
tgatactaggtgctt

SEQ ID NO: 642272 - DNA, 15 bp, Homo sapiens
gatactaggtgctta

SEQ ID NO: 642273 - DNA, 15 bp, Homo sapiens
atactaggtgcttat

SEQ ID NO: 642274 - DNA, 15 bp, Homo sapiens
tactaggtgcttatg

SEQ ID NO: 642275 - DNA, 15 bp, Homo sapiens
actaggtgcttatga

SEQ ID NO: 642276 - DNA, 15 bp, Homo sapiens
ctaggtgcttatgaa

SEQ ID NO: 642277 - DNA, 15 bp, Homo sapiens
taggtgcttatgaat

SEQ ID NO: 642278 - DNA, 15 bp, Homo sapiens
aggtgcttatgaata

SEQ ID NO: 642279 - DNA, 15 bp, Homo sapiens
ggtgcttatgaatat

SEQ ID NO: 642280 - DNA, 15 bp, Homo sapiens
gtgcttatgaatatt

SEQ ID NO: 642281 - DNA, 15 bp, Homo sapiens
tgcttatgaatattt

SEQ ID NO: 642282 - DNA, 15 bp, Homo sapiens
gcttatgaatattta

SEQ ID NO: 642283 - DNA, 15 bp, Homo sapiens
cttatgaatatttat

SEQ ID NO: 642284 - DNA, 15 bp, Homo sapiens
ttatgaatatttatc

SEQ ID NO: 642285 - DNA, 15 bp, Homo sapiens
tatgaatatttatcc

SEQ ID NO: 642286 - DNA, 15 bp, Homo sapiens
atgaatatttatcca

SEQ ID NO: 642287 - DNA, 15 bp, Homo sapiens
tgaatatttatccaa

SEQ ID NO: 642288 - DNA, 15 bp, Homo sapiens
gaatatttatccaat

SEQ ID NO: 642289 - DNA, 15 bp, Homo sapiens
aatatttatccaatg

SEQ ID NO: 642290 - DNA, 15 bp, Homo sapiens
atatttatccaatga

SEQ ID NO: 642291 - DNA, 15 bp, Homo sapiens
tatttatccaatgaa

SEQ ID NO: 642292 - DNA, 15 bp, Homo sapiens
atttatccaatgaat

SEQ ID NO: 642293 - DNA, 15 bp, Homo sapiens
tttatccaatgaatt

SEQ ID NO: 642294 - DNA, 15 bp, Homo sapiens
ttatccaatgaatta

SEQ ID NO: 642295 - DNA, 15 bp, Homo sapiens
tatccaatgaattaa

SEQ ID NO: 642296 - DNA, 15 bp, Homo sapiens
atccaatgaattaaa

SEQ ID NO: 642297 - DNA, 15 bp, Homo sapiens
tccaatgaattaaag

SEQ ID NO: 642298 - DNA, 15 bp, Homo sapiens
ccaatgaattaaaga

SEQ ID NO: 642299 - DNA, 15 bp, Homo sapiens
caatgaattaaagaa

SEQ ID NO: 642300 - DNA, 15 bp, Homo sapiens
aatgaattaaagaat

SEQ ID NO: 642301 - DNA, 15 bp, Homo sapiens
atgaattaaagaatg

SEQ ID NO: 642302 - DNA, 15 bp, Homo sapiens
tgaattaaagaatga

SEQ ID NO: 642303 - DNA, 15 bp, Homo sapiens
gaattaaagaatgaa

SEQ ID NO: 642304 - DNA, 15 bp, Homo sapiens
aattaaagaatgaat

SEQ ID NO: 642305 - DNA, 15 bp, Homo sapiens
attaaagaatgaatc

SEQ ID NO: 642306 - DNA, 15 bp, Homo sapiens
ttaaagaatgaatct

SEQ ID NO: 642307 - DNA, 15 bp, Homo sapiens
taaagaatgaatcta

SEQ ID NO: 642308 - DNA, 15 bp, Homo sapiens
aaagaatgaatctac

SEQ ID NO: 642309 - DNA, 15 bp, Homo sapiens
aagaatgaatctact

SEQ ID NO: 642310 - DNA, 15 bp, Homo sapiens
agaatgaatctactt

SEQ ID NO: 642311 - DNA, 15 bp, Homo sapiens
gaatgaatctacttt

SEQ ID NO: 642312 - DNA, 15 bp, Homo sapiens
aatgaatctactttc

SEQ ID NO: 642313 - DNA, 15 bp, Homo sapiens
atgaatctactttca

SEQ ID NO: 642314 - DNA, 15 bp, Homo sapiens
tgaatctactttcaa

SEQ ID NO: 642315 - DNA, 15 bp, Homo sapiens
gaatctactttcaac

SEQ ID NO: 642316 - DNA, 15 bp, Homo sapiens
aatctactttcaaca

SEQ ID NO: 642317 - DNA, 15 bp, Homo sapiens
atctactttcaacat

SEQ ID NO: 642318 - DNA, 15 bp, Homo sapiens
tctactttcaacatt

SEQ ID NO: 642319 - DNA, 15 bp, Homo sapiens
ctactttcaacattt

SEQ ID NO: 642320 - DNA, 15 bp, Homo sapiens
tactttcaacatttg

SEQ ID NO: 642321 - DNA, 15 bp, Homo sapiens
actttcaacatttgc

SEQ ID NO: 642322 - DNA, 15 bp, Homo sapiens
ctttcaacatttgca

SEQ ID NO: 642323 - DNA, 15 bp, Homo sapiens
tttcaacatttgcat

SEQ ID NO: 642324 - DNA, 15 bp, Homo sapiens
ttcaacatttgcatc

SEQ ID NO: 642325 - DNA, 15 bp, Homo sapiens
tcaacatttgcatca

SEQ ID NO: 642326 - DNA, 15 bp, Homo sapiens
caacatttgcatcat

SEQ ID NO: 642327 - DNA, 15 bp, Homo sapiens
aacatttgcatcata

SEQ ID NO: 642328 - DNA, 15 bp, Homo sapiens
acatttgcatcatag

SEQ ID NO: 642329 - DNA, 15 bp, Homo sapiens
catttgcatcatagc

SEQ ID NO: 642330 - DNA, 15 bp, Homo sapiens
atttgcatcatagcc

SEQ ID NO: 642331 - DNA, 15 bp, Homo sapiens
tttgcatcatagcca

SEQ ID NO: 642332 - DNA, 15 bp, Homo sapiens
ttgcatcatagccat

SEQ ID NO: 642333 - DNA, 15 bp, Homo sapiens
tgcatcatagccatc

SEQ ID NO: 642334 - DNA, 15 bp, Homo sapiens
gcatcatagccatct

SEQ ID NO: 642335 - DNA, 15 bp, Homo sapiens
catcatagccatcta

SEQ ID NO: 642336 - DNA, 15 bp, Homo sapiens
atcatagccatctat

SEQ ID NO: 642337 - DNA, 15 bp, Homo sapiens
tcatagccatctatt

SEQ ID NO: 642338 - DNA, 15 bp, Homo sapiens
catagccatctatta

SEQ ID NO: 642339 - DNA, 15 bp, Homo sapiens
atagccatctattaa

SEQ ID NO: 642340 - DNA, 15 bp, Homo sapiens
tagccatctattaaa

SEQ ID NO: 642341 - DNA, 15 bp, Homo sapiens
agccatctattaaaa

SEQ ID NO: 642342 - DNA, 15 bp, Homo sapiens
gccatctattaaaaa

SEQ ID NO: 642343 - DNA, 15 bp, Homo sapiens
ccatctattaaaaag

SEQ ID NO: 642344 - DNA, 15 bp, Homo sapiens
catctattaaaaagg

SEQ ID NO: 642345 - DNA, 15 bp, Homo sapiens
atctattaaaaagga

SEQ ID NO: 642346 - DNA, 15 bp, Homo sapiens
tctattaaaaaggaa

SEQ ID NO: 642347 - DNA, 15 bp, Homo sapiens
ctattaaaaaggaat

SEQ ID NO: 642348 - DNA, 15 bp, Homo sapiens
tattaaaaaggaatt

SEQ ID NO: 642349 - DNA, 15 bp, Homo sapiens
attaaaaaggaattc

SEQ ID NO: 642350 - DNA, 15 bp, Homo sapiens
ttaaaaaggaattct

SEQ ID NO: 642351 - DNA, 15 bp, Homo sapiens
taaaaaggaattctc

SEQ ID NO: 642352 - DNA, 15 bp, Homo sapiens
aaaaaggaattctct

SEQ ID NO: 642353 - DNA, 15 bp, Homo sapiens
aaaaggaattctctg

SEQ ID NO: 642354 - DNA, 15 bp, Homo sapiens
aaaggaattctctgt

SEQ ID NO: 642355 - DNA, 15 bp, Homo sapiens
aaggaattctctgtg

SEQ ID NO: 642356 - DNA, 15 bp, Homo sapiens
aggaattctctgtgg

SEQ ID NO: 642357 - DNA, 15 bp, Homo sapiens
ggaattctctgtggc

SEQ ID NO: 642358 - DNA, 15 bp, Homo sapiens
gaattctctgtggcc

SEQ ID NO: 642359 - DNA, 15 bp, Homo sapiens
aattctctgtggcca

SEQ ID NO: 642360 - DNA, 15 bp, Homo sapiens
attctctgtggccac

SEQ ID NO: 642361 - DNA, 15 bp, Homo sapiens
ttctctgtggccact

SEQ ID NO: 642362 - DNA, 15 bp, Homo sapiens
tctctgtggccactc

SEQ ID NO: 642363 - DNA, 15 bp, Homo sapiens
ctctgtggccactca

SEQ ID NO: 642364 - DNA, 15 bp, Homo sapiens
tctgtggccactcat

SEQ ID NO: 642365 - DNA, 15 bp, Homo sapiens
ctgtggccactcatt

SEQ ID NO: 642366 - DNA, 15 bp, Homo sapiens
tgtggccactcatta

SEQ ID NO: 642367 - DNA, 15 bp, Homo sapiens
gtggccactcattac

SEQ ID NO: 642368 - DNA, 15 bp, Homo sapiens
tggccactcattact

SEQ ID NO: 642369 - DNA, 15 bp, Homo sapiens
ggccactcattactc

SEQ ID NO: 642370 - DNA, 15 bp, Homo sapiens
gccactcattactca

SEQ ID NO: 642371 - DNA, 15 bp, Homo sapiens
ccactcattactcac

SEQ ID NO: 642372 - DNA, 15 bp, Homo sapiens
cactcattactcact

SEQ ID NO: 642373 - DNA, 15 bp, Homo sapiens
actcattactcactg

SEQ ID NO: 642374 - DNA, 15 bp, Homo sapiens
ctcattactcactgt

SEQ ID NO: 642375 - DNA, 15 bp, Homo sapiens
tcattactcactgtc

SEQ ID NO: 642376 - DNA, 15 bp, Homo sapiens
cattactcactgtct

SEQ ID NO: 642377 - DNA, 15 bp, Homo sapiens
attactcactgtctt

SEQ ID NO: 642378 - DNA, 15 bp, Homo sapiens
ttactcactgtcttc

SEQ ID NO: 642379 - DNA, 15 bp, Homo sapiens
tactcactgtcttca

SEQ ID NO: 642380 - DNA, 15 bp, Homo sapiens
actcactgtcttcat

SEQ ID NO: 642381 - DNA, 15 bp, Homo sapiens
ctcactgtcttcatt

SEQ ID NO: 642382 - DNA, 15 bp, Homo sapiens
tcactgtcttcattg

SEQ ID NO: 642383 - DNA, 15 bp, Homo sapiens
cactgtcttcattgt

SEQ ID NO: 642384 - DNA, 15 bp, Homo sapiens
actgtcttcattgtt

SEQ ID NO: 642385 - DNA, 15 bp, Homo sapiens
ctgtcttcattgtta

SEQ ID NO: 642386 - DNA, 15 bp, Homo sapiens
tgtcttcattgttac

SEQ ID NO: 642387 - DNA, 15 bp, Homo sapiens
gtcttcattgttact

SEQ ID NO: 642388 - DNA, 15 bp, Homo sapiens
tcttcattgttactg

SEQ ID NO: 642389 - DNA, 15 bp, Homo sapiens
cttcattgttactgg

SEQ ID NO: 642390 - DNA, 15 bp, Homo sapiens
ttcattgttactgga

SEQ ID NO: 642391 - DNA, 15 bp, Homo sapiens
tcattgttactggat

SEQ ID NO: 642392 - DNA, 15 bp, Homo sapiens
cattgttactggatc

SEQ ID NO: 642393 - DNA, 15 bp, Homo sapiens
attgttactggatca

SEQ ID NO: 642394 - DNA, 15 bp, Homo sapiens
ttgttactggatcac

SEQ ID NO: 642395 - DNA, 15 bp, Homo sapiens
tgttactggatcaca

SEQ ID NO: 642396 - DNA, 15 bp, Homo sapiens
gttactggatcacat

SEQ ID NO: 642397 - DNA, 15 bp, Homo sapiens
ttactggatcacata

SEQ ID NO: 642398 - DNA, 15 bp, Homo sapiens
tactggatcacatac

SEQ ID NO: 642399 - DNA, 15 bp, Homo sapiens
actggatcacatacc

SEQ ID NO: 642400 - DNA, 15 bp, Homo sapiens
ctggatcacatacct

SEQ ID NO: 642401 - DNA, 15 bp, Homo sapiens
tggatcacatacctg

SEQ ID NO: 642402 - DNA, 15 bp, Homo sapiens
ggatcacatacctga

SEQ ID NO: 642403 - DNA, 15 bp, Homo sapiens
gatcacatacctgaa

SEQ ID NO: 642404 - DNA, 15 bp, Homo sapiens
atcacatacctgaag

SEQ ID NO: 642405 - DNA, 15 bp, Homo sapiens
tcacatacctgaagg

SEQ ID NO: 642406 - DNA, 15 bp, Homo sapiens
cacatacctgaaggc

SEQ ID NO: 642407 - DNA, 15 bp, Homo sapiens
acatacctgaaggcg

SEQ ID NO: 642408 - DNA, 15 bp, Homo sapiens
catacctgaaggcga

SEQ ID NO: 642409 - DNA, 15 bp, Homo sapiens
atacctgaaggcgag

SEQ ID NO: 642410 - DNA, 15 bp, Homo sapiens
tacctgaaggcgagc

SEQ ID NO: 642411 - DNA, 15 bp, Homo sapiens
acctgaaggcgagca

SEQ ID NO: 642412 - DNA, 15 bp, Homo sapiens
cctgaaggcgagcaa

SEQ ID NO: 642413 - DNA, 15 bp, Homo sapiens
ctgaaggcgagcaaa

SEQ ID NO: 642414 - DNA, 15 bp, Homo sapiens
tgaaggcgagcaaag

SEQ ID NO: 642415 - DNA, 15 bp, Homo sapiens
gaaggcgagcaaaga

SEQ ID NO: 642416 - DNA, 15 bp, Homo sapiens
aaggcgagcaaagaa

SEQ ID NO: 642417 - DNA, 15 bp, Homo sapiens
aggcgagcaaagaat

SEQ ID NO: 642418 - DNA, 15 bp, Homo sapiens
ggcgagcaaagaata

SEQ ID NO: 642419 - DNA, 15 bp, Homo sapiens
gcgagcaaagaatac

SEQ ID NO: 642420 - DNA, 15 bp, Homo sapiens
cgagcaaagaataca

SEQ ID NO: 642421 - DNA, 15 bp, Homo sapiens
gagcaaagaatacaa

SEQ ID NO: 642422 - DNA, 15 bp, Homo sapiens
agcaaagaatacaaa

SEQ ID NO: 642423 - DNA, 15 bp, Homo sapiens
gcaaagaatacaaac

SEQ ID NO: 642424 - DNA, 15 bp, Homo sapiens
caaagaatacaaact

SEQ ID NO: 642425 - DNA, 15 bp, Homo sapiens
aaagaatacaaactg

SEQ ID NO: 642426 - DNA, 15 bp, Homo sapiens
aagaatacaaactga

SEQ ID NO: 642427 - DNA, 15 bp, Homo sapiens
agaatacaaactgag

SEQ ID NO: 642428 - DNA, 15 bp, Homo sapiens
gaatacaaactgagg

SEQ ID NO: 642429 - DNA, 15 bp, Homo sapiens
aatacaaactgaggc

SEQ ID NO: 642430 - DNA, 15 bp, Homo sapiens
atacaaactgaggct

SEQ ID NO: 642431 - DNA, 15 bp, Homo sapiens
tacaaactgaggctt

SEQ ID NO: 642432 - DNA, 15 bp, Homo sapiens
acaaactgaggcttt

SEQ ID NO: 642433 - DNA, 15 bp, Homo sapiens
caaactgaggctttc

SEQ ID NO: 642434 - DNA, 15 bp, Homo sapiens
aaactgaggctttca

SEQ ID NO: 642435 - DNA, 15 bp, Homo sapiens
aactgaggctttcag

SEQ ID NO: 642436 - DNA, 15 bp, Homo sapiens
actgaggctttcaga

SEQ ID NO: 642437 - DNA, 15 bp, Homo sapiens
ctgaggctttcagaa

SEQ ID NO: 642438 - DNA, 15 bp, Homo sapiens
tgaggctttcagaag

SEQ ID NO: 642439 - DNA, 15 bp, Homo sapiens
gaggctttcagaagt

SEQ ID NO: 642440 - DNA, 15 bp, Homo sapiens
aggctttcagaagtc

SEQ ID NO: 642441 - DNA, 15 bp, Homo sapiens
ggctttcagaagtcc

SEQ ID NO: 642442 - DNA, 15 bp, Homo sapiens
gctttcagaagtcca

SEQ ID NO: 642443 - DNA, 15 bp, Homo sapiens
ctttcagaagtccac

SEQ ID NO: 642444 - DNA, 15 bp, Homo sapiens
tttcagaagtccact

SEQ ID NO: 642445 - DNA, 15 bp, Homo sapiens
ttcagaagtccactg

SEQ ID NO: 642446 - DNA, 15 bp, Homo sapiens
tcagaagtccactgg

SEQ ID NO: 642447 - DNA, 15 bp, Homo sapiens
cagaagtccactggc

SEQ ID NO: 642448 - DNA, 15 bp, Homo sapiens
agaagtccactggct

SEQ ID NO: 642449 - DNA, 15 bp, Homo sapiens
gaagtccactggctt

SEQ ID NO: 642450 - DNA, 15 bp, Homo sapiens
aagtccactggcttt

SEQ ID NO: 642451 - DNA, 15 bp, Homo sapiens
agtccactggctttg

SEQ ID NO: 642452 - DNA, 15 bp, Homo sapiens
gtccactggctttgg

SEQ ID NO: 642453 - DNA, 15 bp, Homo sapiens
tccactggctttggc

SEQ ID NO: 642454 - DNA, 15 bp, Homo sapiens
ccactggctttggct

SEQ ID NO: 642455 - DNA, 15 bp, Homo sapiens
cactggctttggctg

SEQ ID NO: 642456 - DNA, 15 bp, Homo sapiens
actggctttggctga

SEQ ID NO: 642457 - DNA, 15 bp, Homo sapiens
ctggctttggctgaa

SEQ ID NO: 642458 - DNA, 15 bp, Homo sapiens
tggctttggctgaat

SEQ ID NO: 642459 - DNA, 15 bp, Homo sapiens
ggctttggctgaatt

SEQ ID NO: 642460 - DNA, 15 bp, Homo sapiens
gctttggctgaattc

SEQ ID NO: 642461 - DNA, 15 bp, Homo sapiens
ctttggctgaattca

SEQ ID NO: 642462 - DNA, 15 bp, Homo sapiens
tttggctgaattcac

SEQ ID NO: 642463 - DNA, 15 bp, Homo sapiens
ttggctgaattcacg

SEQ ID NO: 642464 - DNA, 15 bp, Homo sapiens
tggctgaattcacgt

SEQ ID NO: 642465 - DNA, 15 bp, Homo sapiens
ggctgaattcacgta

SEQ ID NO: 642466 - DNA, 15 bp, Homo sapiens
gctgaattcacgtaa

SEQ ID NO: 642467 - DNA, 15 bp, Homo sapiens
ctgaattcacgtaat

SEQ ID NO: 642468 - DNA, 15 bp, Homo sapiens
tgaattcacgtaata

SEQ ID NO: 642469 - DNA, 15 bp, Homo sapiens
gaattcacgtaatac

SEQ ID NO: 642470 - DNA, 15 bp, Homo sapiens
aattcacgtaatacc

SEQ ID NO: 642471 - DNA, 15 bp, Homo sapiens
attcacgtaatacca

SEQ ID NO: 642472 - DNA, 15 bp, Homo sapiens
ttcacgtaataccaa

SEQ ID NO: 642473 - DNA, 15 bp, Homo sapiens
tcacgtaataccaaa

SEQ ID NO: 642474 - DNA, 15 bp, Homo sapiens
cacgtaataccaaat

SEQ ID NO: 642475 - DNA, 15 bp, Homo sapiens
acgtaataccaaatg

SEQ ID NO: 642476 - DNA, 15 bp, Homo sapiens
cgtaataccaaatgt

SEQ ID NO: 642477 - DNA, 15 bp, Homo sapiens
gtaataccaaatgtg

SEQ ID NO: 642478 - DNA, 15 bp, Homo sapiens
taataccaaatgtga

SEQ ID NO: 642479 - DNA, 15 bp, Homo sapiens
aataccaaatgtgaa

SEQ ID NO: 642480 - DNA, 15 bp, Homo sapiens
ataccaaatgtgaat

SEQ ID NO: 642481 - DNA, 15 bp, Homo sapiens
taccaaatgtgaatg

SEQ ID NO: 642482 - DNA, 15 bp, Homo sapiens
accaaatgtgaatgg

SEQ ID NO: 642483 - DNA, 15 bp, Homo sapiens
ccaaatgtgaatgga

SEQ ID NO: 642484 - DNA, 15 bp, Homo sapiens
caaatgtgaatggac

SEQ ID NO: 642485 - DNA, 15 bp, Homo sapiens
aaatgtgaatggaca

SEQ ID NO: 642486 - DNA, 15 bp, Homo sapiens
aatgtgaatggacat

SEQ ID NO: 642487 - DNA, 15 bp, Homo sapiens
atgtgaatggacatt

SEQ ID NO: 642488 - DNA, 15 bp, Homo sapiens
tgtgaatggacattt

SEQ ID NO: 642489 - DNA, 15 bp, Homo sapiens
gtgaatggacatttg

SEQ ID NO: 642490 - DNA, 15 bp, Homo sapiens
tgaatggacatttgt

SEQ ID NO: 642491 - DNA, 15 bp, Homo sapiens
gaatggacatttgtc

SEQ ID NO: 642492 - DNA, 15 bp, Homo sapiens
aatggacatttgtcc

SEQ ID NO: 642493 - DNA, 15 bp, Homo sapiens
atggacatttgtcct

SEQ ID NO: 642494 - DNA, 15 bp, Homo sapiens
tggacatttgtcctt

SEQ ID NO: 642495 - DNA, 15 bp, Homo sapiens
ggacatttgtccttt

SEQ ID NO: 642496 - DNA, 15 bp, Homo sapiens
gacatttgtcctttt

SEQ ID NO: 642497 - DNA, 15 bp, Homo sapiens
acatttgtccttttc

SEQ ID NO: 642498 - DNA, 15 bp, Homo sapiens
catttgtccttttct

SEQ ID NO: 642499 - DNA, 15 bp, Homo sapiens
atttgtccttttctt

SEQ ID NO: 642500 - DNA, 15 bp, Homo sapiens
tttgtccttttcttt

SEQ ID NO: 642501 - DNA, 15 bp, Homo sapiens
ttgtccttttctttt

SEQ ID NO: 642502 - DNA, 15 bp, Homo sapiens
tgtccttttcttttt

SEQ ID NO: 642503 - DNA, 15 bp, Homo sapiens
gtccttttcttttta

SEQ ID NO: 642504 - DNA, 15 bp, Homo sapiens
tccttttctttttaa

SEQ ID NO: 642505 - DNA, 15 bp, Homo sapiens
ccttttctttttaaa

SEQ ID NO: 642506 - DNA, 15 bp, Homo sapiens
cttttctttttaaaa

SEQ ID NO: 642507 - DNA, 15 bp, Homo sapiens
ttttctttttaaaaa

SEQ ID NO: 642508 - DNA, 15 bp, Homo sapiens
tttctttttaaaaaa

SEQ ID NO: 642509 - DNA, 15 bp, Homo sapiens
ttctttttaaaaaaa

SEQ ID NO: 642510 - DNA, 15 bp, Homo sapiens
tctttttaaaaaaat

SEQ ID NO: 642511 - DNA, 15 bp, Homo sapiens
ctttttaaaaaaatt

SEQ ID NO: 642512 - DNA, 15 bp, Homo sapiens
tttttaaaaaaattc

SEQ ID NO: 642513 - DNA, 15 bp, Homo sapiens
ttttaaaaaaattca

SEQ ID NO: 642514 - DNA, 15 bp, Homo sapiens
tttaaaaaaattcat

SEQ ID NO: 642515 - DNA, 15 bp, Homo sapiens
ttaaaaaaattcata

SEQ ID NO: 642516 - DNA, 15 bp, Homo sapiens
taaaaaaattcatac

SEQ ID NO: 642517 - DNA, 15 bp, Homo sapiens
aaaaaaattcataca

SEQ ID NO: 642518 - DNA, 15 bp, Homo sapiens
aaaaaattcatacag

SEQ ID NO: 642519 - DNA, 15 bp, Homo sapiens
aaaaattcatacaga

SEQ ID NO: 642520 - DNA, 15 bp, Homo sapiens
aaaattcatacagat

SEQ ID NO: 642521 - DNA, 15 bp, Homo sapiens
aaattcatacagata

SEQ ID NO: 642522 - DNA, 15 bp, Homo sapiens
aattcatacagatag

SEQ ID NO: 642523 - DNA, 15 bp, Homo sapiens
attcatacagatagc

SEQ ID NO: 642524 - DNA, 15 bp, Homo sapiens
ttcatacagatagct

SEQ ID NO: 642525 - DNA, 15 bp, Homo sapiens
tcatacagatagctg

SEQ ID NO: 642526 - DNA, 15 bp, Homo sapiens
catacagatagctga

SEQ ID NO: 642527 - DNA, 15 bp, Homo sapiens
atacagatagctgaa

SEQ ID NO: 642528 - DNA, 15 bp, Homo sapiens
tacagatagctgaaa

SEQ ID NO: 642529 - DNA, 15 bp, Homo sapiens
acagatagctgaaat

SEQ ID NO: 642530 - DNA, 15 bp, Homo sapiens
cagatagctgaaatt

SEQ ID NO: 642531 - DNA, 15 bp, Homo sapiens
agatagctgaaattg

SEQ ID NO: 642532 - DNA, 15 bp, Homo sapiens
gatagctgaaattgt

SEQ ID NO: 642533 - DNA, 15 bp, Homo sapiens
atagctgaaattgta

SEQ ID NO: 642534 - DNA, 15 bp, Homo sapiens
tagctgaaattgtat

SEQ ID NO: 642535 - DNA, 15 bp, Homo sapiens
agctgaaattgtata

SEQ ID NO: 642536 - DNA, 15 bp, Homo sapiens
gctgaaattgtatag

SEQ ID NO: 642537 - DNA, 15 bp, Homo sapiens
ctgaaattgtataga

SEQ ID NO: 642538 - DNA, 15 bp, Homo sapiens
tgaaattgtatagac

SEQ ID NO: 642539 - DNA, 15 bp, Homo sapiens
gaaattgtatagact

SEQ ID NO: 642540 - DNA, 15 bp, Homo sapiens
aaattgtatagacta

SEQ ID NO: 642541 - DNA, 15 bp, Homo sapiens
aattgtatagactat

SEQ ID NO: 642542 - DNA, 15 bp, Homo sapiens
attgtatagactata

SEQ ID NO: 642543 - DNA, 15 bp, Homo sapiens
ttgtatagactatac

SEQ ID NO: 642544 - DNA, 15 bp, Homo sapiens
tgtatagactatacc

SEQ ID NO: 642545 - DNA, 15 bp, Homo sapiens
gtatagactatacct

SEQ ID NO: 642546 - DNA, 15 bp, Homo sapiens
tatagactatacctt

SEQ ID NO: 642547 - DNA, 15 bp, Homo sapiens
atagactataccttt

SEQ ID NO: 642548 - DNA, 15 bp, Homo sapiens
tagactatacctttc

SEQ ID NO: 642549 - DNA, 15 bp, Homo sapiens
agactatacctttct

SEQ ID NO: 642550 - DNA, 15 bp, Homo sapiens
gactatacctttcta

SEQ ID NO: 642551 - DNA, 15 bp, Homo sapiens
actatacctttctag

SEQ ID NO: 642552 - DNA, 15 bp, Homo sapiens
ctatacctttctagg

SEQ ID NO: 642553 - DNA, 15 bp, Homo sapiens
tatacctttctaggc

SEQ ID NO: 642554 - DNA, 15 bp, Homo sapiens
atacctttctaggca

SEQ ID NO: 642555 - DNA, 15 bp, Homo sapiens
tacctttctaggcat

SEQ ID NO: 642556 - DNA, 15 bp, Homo sapiens
acctttctaggcatt

SEQ ID NO: 642557 - DNA, 15 bp, Homo sapiens
cctttctaggcattt

SEQ ID NO: 642558 - DNA, 15 bp, Homo sapiens
ctttctaggcatttc

SEQ ID NO: 642559 - DNA, 15 bp, Homo sapiens
tttctaggcatttct

SEQ ID NO: 642560 - DNA, 15 bp, Homo sapiens
ttctaggcatttctt

SEQ ID NO: 642561 - DNA, 15 bp, Homo sapiens
tctaggcatttcttt

SEQ ID NO: 642562 - DNA, 15 bp, Homo sapiens
ctaggcatttcttta

SEQ ID NO: 642563 - DNA, 15 bp, Homo sapiens
taggcatttctttac

SEQ ID NO: 642564 - DNA, 15 bp, Homo sapiens
aggcatttctttacc

SEQ ID NO: 642565 - DNA, 15 bp, Homo sapiens
ggcatttctttacca

SEQ ID NO: 642566 - DNA, 15 bp, Homo sapiens
gcatttctttaccag

SEQ ID NO: 642567 - DNA, 15 bp, Homo sapiens
catttctttaccagg

SEQ ID NO: 642568 - DNA, 15 bp, Homo sapiens
atttctttaccagga

SEQ ID NO: 642569 - DNA, 15 bp, Homo sapiens
tttctttaccaggaa

SEQ ID NO: 642570 - DNA, 15 bp, Homo sapiens
ttctttaccaggaac

SEQ ID NO: 642571 - DNA, 15 bp, Homo sapiens
tctttaccaggaact

SEQ ID NO: 642572 - DNA, 15 bp, Homo sapiens
ctttaccaggaactc

SEQ ID NO: 642573 - DNA, 15 bp, Homo sapiens
tttaccaggaactcc

SEQ ID NO: 642574 - DNA, 15 bp, Homo sapiens
ttaccaggaactcct

SEQ ID NO: 642575 - DNA, 15 bp, Homo sapiens
taccaggaactcctt

SEQ ID NO: 642576 - DNA, 15 bp, Homo sapiens
accaggaactccttg

SEQ ID NO: 642577 - DNA, 15 bp, Homo sapiens
ccaggaactccttga

SEQ ID NO: 642578 - DNA, 15 bp, Homo sapiens
caggaactccttgat

SEQ ID NO: 642579 - DNA, 15 bp, Homo sapiens
aggaactccttgatg

SEQ ID NO: 642580 - DNA, 15 bp, Homo sapiens
ggaactccttgatga

SEQ ID NO: 642581 - DNA, 15 bp, Homo sapiens
gaactccttgatgag

SEQ ID NO: 642582 - DNA, 15 bp, Homo sapiens
aactccttgatgagt

SEQ ID NO: 642583 - DNA, 15 bp, Homo sapiens
actccttgatgagtt

SEQ ID NO: 642584 - DNA, 15 bp, Homo sapiens
ctccttgatgagtta

SEQ ID NO: 642585 - DNA, 15 bp, Homo sapiens
tccttgatgagttaa

SEQ ID NO: 642586 - DNA, 15 bp, Homo sapiens
ccttgatgagttaaa

SEQ ID NO: 642587 - DNA, 15 bp, Homo sapiens
cttgatgagttaaat

SEQ ID NO: 642588 - DNA, 15 bp, Homo sapiens
ttgatgagttaaata

SEQ ID NO: 642589 - DNA, 15 bp, Homo sapiens
tgatgagttaaatac

SEQ ID NO: 642590 - DNA, 15 bp, Homo sapiens
gatgagttaaatact

SEQ ID NO: 642591 - DNA, 15 bp, Homo sapiens
atgagttaaatactg

SEQ ID NO: 642592 - DNA, 15 bp, Homo sapiens
tgagttaaatactgt

SEQ ID NO: 642593 - DNA, 15 bp, Homo sapiens
gagttaaatactgtc

SEQ ID NO: 642594 - DNA, 15 bp, Homo sapiens
agttaaatactgtca

SEQ ID NO: 642595 - DNA, 15 bp, Homo sapiens
gttaaatactgtcat

SEQ ID NO: 642596 - DNA, 15 bp, Homo sapiens
ttaaatactgtcatc

SEQ ID NO: 642597 - DNA, 15 bp, Homo sapiens
taaatactgtcatcg

SEQ ID NO: 642598 - DNA, 15 bp, Homo sapiens
aaatactgtcatcgt

SEQ ID NO: 642599 - DNA, 15 bp, Homo sapiens
aatactgtcatcgtg

SEQ ID NO: 642600 - DNA, 15 bp, Homo sapiens
atactgtcatcgtga

SEQ ID NO: 642601 - DNA, 15 bp, Homo sapiens
tactgtcatcgtgag

SEQ ID NO: 642602 - DNA, 15 bp, Homo sapiens
actgtcatcgtgagt

SEQ ID NO: 642603 - DNA, 15 bp, Homo sapiens
ctgtcatcgtgagtt

SEQ ID NO: 642604 - DNA, 15 bp, Homo sapiens
tgtcatcgtgagtta

SEQ ID NO: 642605 - DNA, 15 bp, Homo sapiens
gtcatcgtgagttat

SEQ ID NO: 642606 - DNA, 15 bp, Homo sapiens
tcatcgtgagttatt

SEQ ID NO: 642607 - DNA, 15 bp, Homo sapiens
catcgtgagttattg

SEQ ID NO: 642608 - DNA, 15 bp, Homo sapiens
atcgtgagttattgt

SEQ ID NO: 642609 - DNA, 15 bp, Homo sapiens
tcgtgagttattgtg

SEQ ID NO: 642610 - DNA, 15 bp, Homo sapiens
cgtgagttattgtga

SEQ ID NO: 642611 - DNA, 15 bp, Homo sapiens
gtgagttattgtgat

SEQ ID NO: 642612 - DNA, 15 bp, Homo sapiens
tgagttattgtgatc

SEQ ID NO: 642613 - DNA, 15 bp, Homo sapiens
gagttattgtgatca

SEQ ID NO: 642614 - DNA, 15 bp, Homo sapiens
agttattgtgatcat

SEQ ID NO: 642615 - DNA, 15 bp, Homo sapiens
gttattgtgatcatt

SEQ ID NO: 642616 - DNA, 15 bp, Homo sapiens
ttattgtgatcattg

SEQ ID NO: 642617 - DNA, 15 bp, Homo sapiens
tattgtgatcattga

SEQ ID NO: 642618 - DNA, 15 bp, Homo sapiens
attgtgatcattgac

SEQ ID NO: 642619 - DNA, 15 bp, Homo sapiens
ttgtgatcattgaca

SEQ ID NO: 642620 - DNA, 15 bp, Homo sapiens
tgtgatcattgacat

SEQ ID NO: 642621 - DNA, 15 bp, Homo sapiens
gtgatcattgacatg

SEQ ID NO: 642622 - DNA, 15 bp, Homo sapiens
tgatcattgacatga

SEQ ID NO: 642623 - DNA, 15 bp, Homo sapiens
gatcattgacatgaa

SEQ ID NO: 642624 - DNA, 15 bp, Homo sapiens
atcattgacatgaat

SEQ ID NO: 642625 - DNA, 15 bp, Homo sapiens
tcattgacatgaata

SEQ ID NO: 642626 - DNA, 15 bp, Homo sapiens
cattgacatgaatac

SEQ ID NO: 642627 - DNA, 15 bp, Homo sapiens
attgacatgaatact

SEQ ID NO: 642628 - DNA, 15 bp, Homo sapiens
ttgacatgaatacta

SEQ ID NO: 642629 - DNA, 15 bp, Homo sapiens
tgacatgaatactat

SEQ ID NO: 642630 - DNA, 15 bp, Homo sapiens
gacatgaatactatt

SEQ ID NO: 642631 - DNA, 15 bp, Homo sapiens
acatgaatactattt

SEQ ID NO: 642632 - DNA, 15 bp, Homo sapiens
catgaatactatttg

SEQ ID NO: 642633 - DNA, 15 bp, Homo sapiens
atgaatactatttgt

SEQ ID NO: 642634 - DNA, 15 bp, Homo sapiens
tgaatactatttgtt

SEQ ID NO: 642635 - DNA, 15 bp, Homo sapiens
gaatactatttgttc

SEQ ID NO: 642636 - DNA, 15 bp, Homo sapiens
aatactatttgttct

SEQ ID NO: 642637 - DNA, 15 bp, Homo sapiens
atactatttgttcta

SEQ ID NO: 642638 - DNA, 15 bp, Homo sapiens
tactatttgttctat

SEQ ID NO: 642639 - DNA, 15 bp, Homo sapiens
actatttgttctatt

SEQ ID NO: 642640 - DNA, 15 bp, Homo sapiens
ctatttgttctattc

SEQ ID NO: 642641 - DNA, 15 bp, Homo sapiens
tatttgttctattct

SEQ ID NO: 642642 - DNA, 15 bp, Homo sapiens
atttgttctattctg

SEQ ID NO: 642643 - DNA, 15 bp, Homo sapiens
tttgttctattctga

SEQ ID NO: 642644 - DNA, 15 bp, Homo sapiens
ttgttctattctgaa

SEQ ID NO: 642645 - DNA, 15 bp, Homo sapiens
tgttctattctgaat

SEQ ID NO: 642646 - DNA, 15 bp, Homo sapiens
gttctattctgaata

SEQ ID NO: 642647 - DNA, 15 bp, Homo sapiens
ttctattctgaataa

SEQ ID NO: 642648 - DNA, 15 bp, Homo sapiens
tctattctgaataac

SEQ ID NO: 642649 - DNA, 15 bp, Homo sapiens
ctattctgaataaca

SEQ ID NO: 642650 - DNA, 15 bp, Homo sapiens
tattctgaataacat

SEQ ID NO: 642651 - DNA, 15 bp, Homo sapiens
attctgaataacatg

SEQ ID NO: 642652 - DNA, 15 bp, Homo sapiens
ttctgaataacatgt

SEQ ID NO: 642653 - DNA, 15 bp, Homo sapiens
tctgaataacatgtt

SEQ ID NO: 642654 - DNA, 15 bp, Homo sapiens
ctgaataacatgttt

SEQ ID NO: 642655 - DNA, 15 bp, Homo sapiens
tgaataacatgtttg

SEQ ID NO: 642656 - DNA, 15 bp, Homo sapiens
gaataacatgtttgt

SEQ ID NO: 642657 - DNA, 15 bp, Homo sapiens
aataacatgtttgtt

SEQ ID NO: 642658 - DNA, 15 bp, Homo sapiens
ataacatgtttgttt

SEQ ID NO: 642659 - DNA, 15 bp, Homo sapiens
taacatgtttgttta

SEQ ID NO: 642660 - DNA, 15 bp, Homo sapiens
aacatgtttgtttag

SEQ ID NO: 642661 - DNA, 15 bp, Homo sapiens
acatgtttgtttagc

SEQ ID NO: 642662 - DNA, 15 bp, Homo sapiens
catgtttgtttagct

SEQ ID NO: 642663 - DNA, 15 bp, Homo sapiens
atgtttgtttagctg

SEQ ID NO: 642664 - DNA, 15 bp, Homo sapiens
tgtttgtttagctgt

SEQ ID NO: 642665 - DNA, 15 bp, Homo sapiens
gtttgtttagctgtt

SEQ ID NO: 642666 - DNA, 15 bp, Homo sapiens
tttgtttagctgttt

SEQ ID NO: 642667 - DNA, 15 bp, Homo sapiens
ttgtttagctgtttt

SEQ ID NO: 642668 - DNA, 15 bp, Homo sapiens
tgtttagctgtttta

SEQ ID NO: 642669 - DNA, 15 bp, Homo sapiens
gtttagctgttttat

SEQ ID NO: 642670 - DNA, 15 bp, Homo sapiens
tttagctgttttatg

SEQ ID NO: 642671 - DNA, 15 bp, Homo sapiens
ttagctgttttatgg

SEQ ID NO: 642672 - DNA, 15 bp, Homo sapiens
tagctgttttatggt

SEQ ID NO: 642673 - DNA, 15 bp, Homo sapiens
agctgttttatggta

SEQ ID NO: 642674 - DNA, 15 bp, Homo sapiens
gctgttttatggtaa

SEQ ID NO: 642675 - DNA, 15 bp, Homo sapiens
ctgttttatggtaag

SEQ ID NO: 642676 - DNA, 15 bp, Homo sapiens
tgttttatggtaaga

SEQ ID NO: 642677 - DNA, 15 bp, Homo sapiens
gttttatggtaagat

SEQ ID NO: 642678 - DNA, 15 bp, Homo sapiens
ttttatggtaagatc

SEQ ID NO: 642679 - DNA, 15 bp, Homo sapiens
tttatggtaagatca

SEQ ID NO: 642680 - DNA, 15 bp, Homo sapiens
ttatggtaagatcac

SEQ ID NO: 642681 - DNA, 15 bp, Homo sapiens
tatggtaagatcacc

SEQ ID NO: 642682 - DNA, 15 bp, Homo sapiens
atggtaagatcaccg

SEQ ID NO: 642683 - DNA, 15 bp, Homo sapiens
tggtaagatcaccgc

SEQ ID NO: 642684 - DNA, 15 bp, Homo sapiens
ggtaagatcaccgcg

SEQ ID NO: 642685 - DNA, 15 bp, Homo sapiens
gtaagatcaccgcga

SEQ ID NO: 642686 - DNA, 15 bp, Homo sapiens
taagatcaccgcgat

SEQ ID NO: 642687 - DNA, 15 bp, Homo sapiens
aagatcaccgcgatc

SEQ ID NO: 642688 - DNA, 15 bp, Homo sapiens
agatcaccgcgatct

SEQ ID NO: 642689 - DNA, 15 bp, Homo sapiens
gatcaccgcgatctt

SEQ ID NO: 642690 - DNA, 15 bp, Homo sapiens
atcaccgcgatctta

SEQ ID NO: 642691 - DNA, 15 bp, Homo sapiens
tcaccgcgatcttat

SEQ ID NO: 642692 - DNA, 15 bp, Homo sapiens
caccgcgatcttatg

SEQ ID NO: 642693 - DNA, 15 bp, Homo sapiens
accgcgatcttatga

SEQ ID NO: 642694 - DNA, 15 bp, Homo sapiens
ccgcgatcttatgac

SEQ ID NO: 642695 - DNA, 15 bp, Homo sapiens
cgcgatcttatgact

SEQ ID NO: 642696 - DNA, 15 bp, Homo sapiens
gcgatcttatgactt

SEQ ID NO: 642697 - DNA, 15 bp, Homo sapiens
cgatcttatgacttg

SEQ ID NO: 642698 - DNA, 15 bp, Homo sapiens
gatcttatgacttgg

SEQ ID NO: 642699 - DNA, 15 bp, Homo sapiens
atcttatgacttggg

SEQ ID NO: 642700 - DNA, 15 bp, Homo sapiens
tcttatgacttgggt

SEQ ID NO: 642701 - DNA, 15 bp, Homo sapiens
cttatgacttgggtg

SEQ ID NO: 642702 - DNA, 15 bp, Homo sapiens
ttatgacttgggtgg

SEQ ID NO: 642703 - DNA, 15 bp, Homo sapiens
tatgacttgggtggg

SEQ ID NO: 642704 - DNA, 15 bp, Homo sapiens
atgacttgggtggga

SEQ ID NO: 642705 - DNA, 15 bp, Homo sapiens
tgacttgggtgggac

SEQ ID NO: 642706 - DNA, 15 bp, Homo sapiens
gacttgggtgggaca

SEQ ID NO: 642707 - DNA, 15 bp, Homo sapiens
acttgggtgggacag

SEQ ID NO: 642708 - DNA, 15 bp, Homo sapiens
cttgggtgggacaga

SEQ ID NO: 642709 - DNA, 15 bp, Homo sapiens
ttgggtgggacagag

SEQ ID NO: 642710 - DNA, 15 bp, Homo sapiens
tgggtgggacagagg

SEQ ID NO: 642711 - DNA, 15 bp, Homo sapiens
gggtgggacagagga

SEQ ID NO: 642712 - DNA, 15 bp, Homo sapiens
ggtgggacagaggag

SEQ ID NO: 642713 - DNA, 15 bp, Homo sapiens
gtgggacagaggaga

SEQ ID NO: 642714 - DNA, 15 bp, Homo sapiens
tgggacagaggagaa

SEQ ID NO: 642715 - DNA, 15 bp, Homo sapiens
gggacagaggagaaa

SEQ ID NO: 642716 - DNA, 15 bp, Homo sapiens
ggacagaggagaaaa

SEQ ID NO: 642717 - DNA, 15 bp, Homo sapiens
gacagaggagaaaag

SEQ ID NO: 642718 - DNA, 15 bp, Homo sapiens
acagaggagaaaaga

SEQ ID NO: 642719 - DNA, 15 bp, Homo sapiens
cagaggagaaaagag

SEQ ID NO: 642720 - DNA, 15 bp, Homo sapiens
agaggagaaaagaga

SEQ ID NO: 642721 - DNA, 15 bp, Homo sapiens
gaggagaaaagagag

SEQ ID NO: 642722 - DNA, 15 bp, Homo sapiens
aggagaaaagagagg

SEQ ID NO: 642723 - DNA, 15 bp, Homo sapiens
ggagaaaagagagga

SEQ ID NO: 642724 - DNA, 15 bp, Homo sapiens
gagaaaagagaggac

SEQ ID NO: 642725 - DNA, 15 bp, Homo sapiens
agaaaagagaggaca

SEQ ID NO: 642726 - DNA, 15 bp, Homo sapiens
gaaaagagaggacat

SEQ ID NO: 642727 - DNA, 15 bp, Homo sapiens
aaaagagaggacatt

SEQ ID NO: 642728 - DNA, 15 bp, Homo sapiens
aaagagaggacattt

SEQ ID NO: 642729 - DNA, 15 bp, Homo sapiens
aagagaggacatttt

SEQ ID NO: 642730 - DNA, 15 bp, Homo sapiens
agagaggacattttt

SEQ ID NO: 642731 - DNA, 15 bp, Homo sapiens
gagaggacatttttc

SEQ ID NO: 642732 - DNA, 15 bp, Homo sapiens
agaggacatttttct

SEQ ID NO: 642733 - DNA, 15 bp, Homo sapiens
gaggacatttttcta

SEQ ID NO: 642734 - DNA, 15 bp, Homo sapiens
aggacatttttctac

SEQ ID NO: 642735 - DNA, 15 bp, Homo sapiens
ggacatttttctacc

SEQ ID NO: 642736 - DNA, 15 bp, Homo sapiens
gacatttttctacct

SEQ ID NO: 642737 - DNA, 15 bp, Homo sapiens
acatttttctacctg

SEQ ID NO: 642738 - DNA, 15 bp, Homo sapiens
catttttctacctgt

SEQ ID NO: 642739 - DNA, 15 bp, Homo sapiens
atttttctacctgta

SEQ ID NO: 642740 - DNA, 15 bp, Homo sapiens
tttttctacctgtaa

SEQ ID NO: 642741 - DNA, 15 bp, Homo sapiens
ttttctacctgtaag

SEQ ID NO: 642742 - DNA, 15 bp, Homo sapiens
tttctacctgtaagt

SEQ ID NO: 642743 - DNA, 15 bp, Homo sapiens
ttctacctgtaagta

SEQ ID NO: 642744 - DNA, 15 bp, Homo sapiens
tctacctgtaagtag

SEQ ID NO: 642745 - DNA, 15 bp, Homo sapiens
ctacctgtaagtagt

SEQ ID NO: 642746 - DNA, 15 bp, Homo sapiens
tacctgtaagtagtt

SEQ ID NO: 642747 - DNA, 15 bp, Homo sapiens
acctgtaagtagttt

SEQ ID NO: 642748 - DNA, 15 bp, Homo sapiens
cctgtaagtagttta

SEQ ID NO: 642749 - DNA, 15 bp, Homo sapiens
ctgtaagtagtttat

SEQ ID NO: 642750 - DNA, 15 bp, Homo sapiens
tgtaagtagtttata

SEQ ID NO: 642751 - DNA, 15 bp, Homo sapiens
gtaagtagtttatat

SEQ ID NO: 642752 - DNA, 15 bp, Homo sapiens
taagtagtttatata

SEQ ID NO: 642753 - DNA, 15 bp, Homo sapiens
aagtagtttatatac

SEQ ID NO: 642754 - DNA, 15 bp, Homo sapiens
agtagtttatatacc

SEQ ID NO: 642755 - DNA, 15 bp, Homo sapiens
gtagtttatatacct

SEQ ID NO: 642756 - DNA, 15 bp, Homo sapiens
tagtttatatacctc

SEQ ID NO: 642757 - DNA, 15 bp, Homo sapiens
agtttatatacctcc

SEQ ID NO: 642758 - DNA, 15 bp, Homo sapiens
gtttatatacctcca

SEQ ID NO: 642759 - DNA, 15 bp, Homo sapiens
tttatatacctccaa

SEQ ID NO: 642760 - DNA, 15 bp, Homo sapiens
ttatatacctccaaa

SEQ ID NO: 642761 - DNA, 15 bp, Homo sapiens
tatatacctccaaag

SEQ ID NO: 642762 - DNA, 15 bp, Homo sapiens
atatacctccaaagt

SEQ ID NO: 642763 - DNA, 15 bp, Homo sapiens
tatacctccaaagtc

SEQ ID NO: 642764 - DNA, 15 bp, Homo sapiens
atacctccaaagtcg

SEQ ID NO: 642765 - DNA, 15 bp, Homo sapiens
tacctccaaagtcgc

SEQ ID NO: 642766 - DNA, 15 bp, Homo sapiens
acctccaaagtcgcc

SEQ ID NO: 642767 - DNA, 15 bp, Homo sapiens
cctccaaagtcgccc

SEQ ID NO: 642768 - DNA, 15 bp, Homo sapiens
ctccaaagtcgccca

SEQ ID NO: 642769 - DNA, 15 bp, Homo sapiens
tccaaagtcgcccaa

SEQ ID NO: 642770 - DNA, 15 bp, Homo sapiens
ccaaagtcgcccaaa

SEQ ID NO: 642771 - DNA, 15 bp, Homo sapiens
caaagtcgcccaaac

SEQ ID NO: 642772 - DNA, 15 bp, Homo sapiens
aaagtcgcccaaact

SEQ ID NO: 642773 - DNA, 15 bp, Homo sapiens
aagtcgcccaaactg

SEQ ID NO: 642774 - DNA, 15 bp, Homo sapiens
agtcgcccaaactgt

SEQ ID NO: 642775 - DNA, 15 bp, Homo sapiens
gtcgcccaaactgtt

SEQ ID NO: 642776 - DNA, 15 bp, Homo sapiens
tcgcccaaactgttt

SEQ ID NO: 642777 - DNA, 15 bp, Homo sapiens
cgcccaaactgtttg

SEQ ID NO: 642778 - DNA, 15 bp, Homo sapiens
gcccaaactgtttgc

SEQ ID NO: 642779 - DNA, 15 bp, Homo sapiens
cccaaactgtttgca

SEQ ID NO: 642780 - DNA, 15 bp, Homo sapiens
ccaaactgtttgcag

SEQ ID NO: 642781 - DNA, 15 bp, Homo sapiens
caaactgtttgcagg

SEQ ID NO: 642782 - DNA, 15 bp, Homo sapiens
aaactgtttgcaggt

SEQ ID NO: 642783 - DNA, 15 bp, Homo sapiens
aactgtttgcaggtt

SEQ ID NO: 642784 - DNA, 15 bp, Homo sapiens
actgtttgcaggttt

SEQ ID NO: 642785 - DNA, 15 bp, Homo sapiens
ctgtttgcaggtttc

SEQ ID NO: 642786 - DNA, 15 bp, Homo sapiens
tgtttgcaggtttct

SEQ ID NO: 642787 - DNA, 15 bp, Homo sapiens
gtttgcaggtttctt

SEQ ID NO: 642788 - DNA, 15 bp, Homo sapiens
tttgcaggtttcttt

SEQ ID NO: 642789 - DNA, 15 bp, Homo sapiens
ttgcaggtttctttc

SEQ ID NO: 642790 - DNA, 15 bp, Homo sapiens
tgcaggtttctttcg

SEQ ID NO: 642791 - DNA, 15 bp, Homo sapiens
gcaggtttctttcgt

SEQ ID NO: 642792 - DNA, 15 bp, Homo sapiens
caggtttctttcgtg

SEQ ID NO: 642793 - DNA, 15 bp, Homo sapiens
aggtttctttcgtgg

SEQ ID NO: 642794 - DNA, 15 bp, Homo sapiens
ggtttctttcgtgga

SEQ ID NO: 642795 - DNA, 15 bp, Homo sapiens
gtttctttcgtggaa

SEQ ID NO: 642796 - DNA, 15 bp, Homo sapiens
tttctttcgtggaaa

SEQ ID NO: 642797 - DNA, 15 bp, Homo sapiens
ttctttcgtggaaaa

SEQ ID NO: 642798 - DNA, 15 bp, Homo sapiens
tctttcgtggaaaaa

SEQ ID NO: 642799 - DNA, 15 bp, Homo sapiens
ctttcgtggaaaaag

SEQ ID NO: 642800 - DNA, 15 bp, Homo sapiens
tttcgtggaaaaagt

SEQ ID NO: 642801 - DNA, 15 bp, Homo sapiens
ttcgtggaaaaagta

SEQ ID NO: 642802 - DNA, 15 bp, Homo sapiens
tcgtggaaaaagtat

SEQ ID NO: 642803 - DNA, 15 bp, Homo sapiens
cgtggaaaaagtata

SEQ ID NO: 642804 - DNA, 15 bp, Homo sapiens
gtggaaaaagtatat

SEQ ID NO: 642805 - DNA, 15 bp, Homo sapiens
tggaaaaagtatatc

SEQ ID NO: 642806 - DNA, 15 bp, Homo sapiens
ggaaaaagtatatca

SEQ ID NO: 642807 - DNA, 15 bp, Homo sapiens
gaaaaagtatatcat

SEQ ID NO: 642808 - DNA, 15 bp, Homo sapiens
aaaaagtatatcatt

SEQ ID NO: 642809 - DNA, 15 bp, Homo sapiens
aaaagtatatcatta

SEQ ID NO: 642810 - DNA, 15 bp, Homo sapiens
aaagtatatcattaa

SEQ ID NO: 642811 - DNA, 15 bp, Homo sapiens
aagtatatcattaaa

SEQ ID NO: 642812 - DNA, 15 bp, Homo sapiens
agtatatcattaaaa

SEQ ID NO: 642813 - DNA, 15 bp, Homo sapiens
gtatatcattaaaag

SEQ ID NO: 642814 - DNA, 15 bp, Homo sapiens
tatatcattaaaagt

SEQ ID NO: 642815 - DNA, 15 bp, Homo sapiens
atatcattaaaagta

SEQ ID NO: 642816 - DNA, 15 bp, Homo sapiens
tatcattaaaagtac

SEQ ID NO: 642817 - DNA, 15 bp, Homo sapiens
atcattaaaagtaca

SEQ ID NO: 642818 - DNA, 15 bp, Homo sapiens
tcattaaaagtacag

SEQ ID NO: 642819 - DNA, 15 bp, Homo sapiens
cattaaaagtacagt

SEQ ID NO: 642820 - DNA, 15 bp, Homo sapiens
attaaaagtacagtt

SEQ ID NO: 642821 - DNA, 15 bp, Homo sapiens
ttaaaagtacagttt

SEQ ID NO: 642822 - DNA, 15 bp, Homo sapiens
taaaagtacagtttc

SEQ ID NO: 642823 - DNA, 15 bp, Homo sapiens
aaaagtacagtttct

SEQ ID NO: 642824 - DNA, 15 bp, Homo sapiens
aaagtacagtttctc

SEQ ID NO: 642825 - DNA, 15 bp, Homo sapiens
aagtacagtttctcc

SEQ ID NO: 642826 - DNA, 15 bp, Homo sapiens
agtacagtttctcct

SEQ ID NO: 642827 - DNA, 15 bp, Homo sapiens
gtacagtttctcctt

SEQ ID NO: 642828 - DNA, 15 bp, Homo sapiens
tacagtttctccttt

SEQ ID NO: 642829 - DNA, 15 bp, Homo sapiens
acagtttctcctttt

SEQ ID NO: 642830 - DNA, 15 bp, Homo sapiens
cagtttctcctttta

SEQ ID NO: 642831 - DNA, 15 bp, Homo sapiens
agtttctccttttat

SEQ ID NO: 642832 - DNA, 15 bp, Homo sapiens
gtttctccttttatt

SEQ ID NO: 642833 - DNA, 15 bp, Homo sapiens
tttctccttttatta

SEQ ID NO: 642834 - DNA, 15 bp, Homo sapiens
ttctccttttattac

SEQ ID NO: 642835 - DNA, 15 bp, Homo sapiens
tctccttttattaca

SEQ ID NO: 642836 - DNA, 15 bp, Homo sapiens
ctccttttattacaa

SEQ ID NO: 642837 - DNA, 15 bp, Homo sapiens
tccttttattacaat

SEQ ID NO: 642838 - DNA, 15 bp, Homo sapiens
ccttttattacaata

SEQ ID NO: 642839 - DNA, 15 bp, Homo sapiens
cttttattacaatag

SEQ ID NO: 642840 - DNA, 15 bp, Homo sapiens
ttttattacaataga

SEQ ID NO: 642841 - DNA, 15 bp, Homo sapiens
tttattacaatagat

SEQ ID NO: 642842 - DNA, 15 bp, Homo sapiens
ttattacaatagatg

SEQ ID NO: 642843 - DNA, 15 bp, Homo sapiens
tattacaatagatgt

SEQ ID NO: 642844 - DNA, 15 bp, Homo sapiens
attacaatagatgta

SEQ ID NO: 642845 - DNA, 15 bp, Homo sapiens
ttacaatagatgtat

SEQ ID NO: 642846 - DNA, 15 bp, Homo sapiens
tacaatagatgtatt

SEQ ID NO: 642847 - DNA, 15 bp, Homo sapiens
acaatagatgtatta

SEQ ID NO: 642848 - DNA, 15 bp, Homo sapiens
caatagatgtattag

SEQ ID NO: 642849 - DNA, 15 bp, Homo sapiens
aatagatgtattagc

SEQ ID NO: 642850 - DNA, 15 bp, Homo sapiens
atagatgtattagcc

SEQ ID NO: 642851 - DNA, 15 bp, Homo sapiens
tagatgtattagcct

SEQ ID NO: 642852 - DNA, 15 bp, Homo sapiens
agatgtattagcctt

SEQ ID NO: 642853 - DNA, 15 bp, Homo sapiens
gatgtattagcctta

SEQ ID NO: 642854 - DNA, 15 bp, Homo sapiens
atgtattagccttag

SEQ ID NO: 642855 - DNA, 15 bp, Homo sapiens
tgtattagccttaga

SEQ ID NO: 642856 - DNA, 15 bp, Homo sapiens
gtattagccttagaa

SEQ ID NO: 642857 - DNA, 15 bp, Homo sapiens
tattagccttagaat

SEQ ID NO: 642858 - DNA, 15 bp, Homo sapiens
attagccttagaata

SEQ ID NO: 642859 - DNA, 15 bp, Homo sapiens
ttagccttagaatat

SEQ ID NO: 642860 - DNA, 15 bp, Homo sapiens
tagccttagaatata

SEQ ID NO: 642861 - DNA, 15 bp, Homo sapiens
agccttagaatatac

SEQ ID NO: 642862 - DNA, 15 bp, Homo sapiens
gccttagaatataca

SEQ ID NO: 642863 - DNA, 15 bp, Homo sapiens
ccttagaatatacaa

SEQ ID NO: 642864 - DNA, 15 bp, Homo sapiens
cttagaatatacaag

SEQ ID NO: 642865 - DNA, 15 bp, Homo sapiens
ttagaatatacaaga

SEQ ID NO: 642866 - DNA, 15 bp, Homo sapiens
tagaatatacaagac

SEQ ID NO: 642867 - DNA, 15 bp, Homo sapiens
agaatatacaagaca

SEQ ID NO: 642868 - DNA, 15 bp, Homo sapiens
gaatatacaagacaa

SEQ ID NO: 642869 - DNA, 15 bp, Homo sapiens
aatatacaagacaac

SEQ ID NO: 642870 - DNA, 15 bp, Homo sapiens
atatacaagacaacc

SEQ ID NO: 642871 - DNA, 15 bp, Homo sapiens
tatacaagacaaccc

SEQ ID NO: 642872 - DNA, 15 bp, Homo sapiens
atacaagacaaccca

SEQ ID NO: 642873 - DNA, 15 bp, Homo sapiens
tacaagacaacccaa

SEQ ID NO: 642874 - DNA, 15 bp, Homo sapiens
acaagacaacccaat

SEQ ID NO: 642875 - DNA, 15 bp, Homo sapiens
caagacaacccaata

SEQ ID NO: 642876 - DNA, 15 bp, Homo sapiens
aagacaacccaataa

SEQ ID NO: 642877 - DNA, 15 bp, Homo sapiens
agacaacccaataat

SEQ ID NO: 642878 - DNA, 15 bp, Homo sapiens
gacaacccaataatt

SEQ ID NO: 642879 - DNA, 15 bp, Homo sapiens
acaacccaataattt

SEQ ID NO: 642880 - DNA, 15 bp, Homo sapiens
caacccaataatttt

SEQ ID NO: 642881 - DNA, 15 bp, Homo sapiens
aacccaataatttta

SEQ ID NO: 642882 - DNA, 15 bp, Homo sapiens
acccaataattttag

SEQ ID NO: 642883 - DNA, 15 bp, Homo sapiens
cccaataattttagc

SEQ ID NO: 642884 - DNA, 15 bp, Homo sapiens
ccaataattttagca

SEQ ID NO: 642885 - DNA, 15 bp, Homo sapiens
caataattttagcaa

SEQ ID NO: 642886 - DNA, 15 bp, Homo sapiens
aataattttagcaac

SEQ ID NO: 642887 - DNA, 15 bp, Homo sapiens
ataattttagcaaca

SEQ ID NO: 642888 - DNA, 15 bp, Homo sapiens
taattttagcaacaa

SEQ ID NO: 642889 - DNA, 15 bp, Homo sapiens
aattttagcaacaaa

SEQ ID NO: 642890 - DNA, 15 bp, Homo sapiens
attttagcaacaaaa

SEQ ID NO: 642891 - DNA, 15 bp, Homo sapiens
ttttagcaacaaaag

SEQ ID NO: 642892 - DNA, 15 bp, Homo sapiens
tttagcaacaaaagc

SEQ ID NO: 642893 - DNA, 15 bp, Homo sapiens
ttagcaacaaaagca

SEQ ID NO: 642894 - DNA, 15 bp, Homo sapiens
tagcaacaaaagcat

SEQ ID NO: 642895 - DNA, 15 bp, Homo sapiens
agcaacaaaagcatg

SEQ ID NO: 642896 - DNA, 15 bp, Homo sapiens
gcaacaaaagcatgt

SEQ ID NO: 642897 - DNA, 15 bp, Homo sapiens
caacaaaagcatgtg

SEQ ID NO: 642898 - DNA, 15 bp, Homo sapiens
aacaaaagcatgtgt

SEQ ID NO: 642899 - DNA, 15 bp, Homo sapiens
acaaaagcatgtgtg

SEQ ID NO: 642900 - DNA, 15 bp, Homo sapiens
caaaagcatgtgtgt

SEQ ID NO: 642901 - DNA, 15 bp, Homo sapiens
aaaagcatgtgtgtg

SEQ ID NO: 642902 - DNA, 15 bp, Homo sapiens
aaagcatgtgtgtgt

SEQ ID NO: 642903 - DNA, 15 bp, Homo sapiens
aagcatgtgtgtgta

SEQ ID NO: 642904 - DNA, 15 bp, Homo sapiens
agcatgtgtgtgtaa

SEQ ID NO: 642905 - DNA, 15 bp, Homo sapiens
gcatgtgtgtgtaat

SEQ ID NO: 642906 - DNA, 15 bp, Homo sapiens
catgtgtgtgtaatg

SEQ ID NO: 642907 - DNA, 15 bp, Homo sapiens
atgtgtgtgtaatga

SEQ ID NO: 642908 - DNA, 15 bp, Homo sapiens
tgtgtgtgtaatgac

SEQ ID NO: 642909 - DNA, 15 bp, Homo sapiens
gtgtgtgtaatgaca

SEQ ID NO: 642910 - DNA, 15 bp, Homo sapiens
tgtgtgtaatgacag

SEQ ID NO: 642911 - DNA, 15 bp, Homo sapiens
gtgtgtaatgacagg

SEQ ID NO: 642912 - DNA, 15 bp, Homo sapiens
tgtgtaatgacagga

SEQ ID NO: 642913 - DNA, 15 bp, Homo sapiens
gtgtaatgacaggag

SEQ ID NO: 642914 - DNA, 15 bp, Homo sapiens
tgtaatgacaggagc

SEQ ID NO: 642915 - DNA, 15 bp, Homo sapiens
gtaatgacaggagct

SEQ ID NO: 642916 - DNA, 15 bp, Homo sapiens
taatgacaggagctg

SEQ ID NO: 642917 - DNA, 15 bp, Homo sapiens
aatgacaggagctgg

SEQ ID NO: 642918 - DNA, 15 bp, Homo sapiens
atgacaggagctggt

SEQ ID NO: 642919 - DNA, 15 bp, Homo sapiens
tgacaggagctggtt

SEQ ID NO: 642920 - DNA, 15 bp, Homo sapiens
gacaggagctggttt

SEQ ID NO: 642921 - DNA, 15 bp, Homo sapiens
acaggagctggtttt

SEQ ID NO: 642922 - DNA, 15 bp, Homo sapiens
caggagctggtttta

SEQ ID NO: 642923 - DNA, 15 bp, Homo sapiens
aggagctggttttac

SEQ ID NO: 642924 - DNA, 15 bp, Homo sapiens
ggagctggttttact

SEQ ID NO: 642925 - DNA, 15 bp, Homo sapiens
gagctggttttacta

SEQ ID NO: 642926 - DNA, 15 bp, Homo sapiens
agctggttttactat

SEQ ID NO: 642927 - DNA, 15 bp, Homo sapiens
gctggttttactatt

SEQ ID NO: 642928 - DNA, 15 bp, Homo sapiens
ctggttttactattt

SEQ ID NO: 642929 - DNA, 15 bp, Homo sapiens
tggttttactatttt

SEQ ID NO: 642930 - DNA, 15 bp, Homo sapiens
ggttttactatttta

SEQ ID NO: 642931 - DNA, 15 bp, Homo sapiens
gttttactattttat

SEQ ID NO: 642932 - DNA, 15 bp, Homo sapiens
ttttactattttatt

SEQ ID NO: 642933 - DNA, 15 bp, Homo sapiens
tttactattttatta

SEQ ID NO: 642934 - DNA, 15 bp, Homo sapiens
ttactattttattat

SEQ ID NO: 642935 - DNA, 15 bp, Homo sapiens
tactattttattata

SEQ ID NO: 642936 - DNA, 15 bp, Homo sapiens
actattttattatat

SEQ ID NO: 642937 - DNA, 15 bp, Homo sapiens
ctattttattatatt

SEQ ID NO: 642938 - DNA, 15 bp, Homo sapiens
tattttattatattg

SEQ ID NO: 642939 - DNA, 15 bp, Homo sapiens
attttattatattgg

SEQ ID NO: 642940 - DNA, 15 bp, Homo sapiens
ttttattatattggt

SEQ ID NO: 642941 - DNA, 15 bp, Homo sapiens
tttattatattggtt

SEQ ID NO: 642942 - DNA, 15 bp, Homo sapiens
ttattatattggttt

SEQ ID NO: 642943 - DNA, 15 bp, Homo sapiens
tattatattggtttc

SEQ ID NO: 642944 - DNA, 15 bp, Homo sapiens
attatattggtttcc

SEQ ID NO: 642945 - DNA, 15 bp, Homo sapiens
ttatattggtttcca

SEQ ID NO: 642946 - DNA, 15 bp, Homo sapiens
tatattggtttccac

SEQ ID NO: 642947 - DNA, 15 bp, Homo sapiens
atattggtttccaca

SEQ ID NO: 642948 - DNA, 15 bp, Homo sapiens
tattggtttccacat

SEQ ID NO: 642949 - DNA, 15 bp, Homo sapiens
attggtttccacatg

SEQ ID NO: 642950 - DNA, 15 bp, Homo sapiens
ttggtttccacatgt

SEQ ID NO: 642951 - DNA, 15 bp, Homo sapiens
tggtttccacatgtc

SEQ ID NO: 642952 - DNA, 15 bp, Homo sapiens
ggtttccacatgtca

SEQ ID NO: 642953 - DNA, 15 bp, Homo sapiens
gtttccacatgtcaa

SEQ ID NO: 642954 - DNA, 15 bp, Homo sapiens
tttccacatgtcaat

SEQ ID NO: 642955 - DNA, 15 bp, Homo sapiens
ttccacatgtcaatt

SEQ ID NO: 642956 - DNA, 15 bp, Homo sapiens
tccacatgtcaattg

SEQ ID NO: 642957 - DNA, 15 bp, Homo sapiens
ccacatgtcaattgt

SEQ ID NO: 642958 - DNA, 15 bp, Homo sapiens
cacatgtcaattgta

SEQ ID NO: 642959 - DNA, 15 bp, Homo sapiens
acatgtcaattgtaa

SEQ ID NO: 642960 - DNA, 15 bp, Homo sapiens
catgtcaattgtaat

SEQ ID NO: 642961 - DNA, 15 bp, Homo sapiens
atgtcaattgtaatc

SEQ ID NO: 642962 - DNA, 15 bp, Homo sapiens
tgtcaattgtaatct

SEQ ID NO: 642963 - DNA, 15 bp, Homo sapiens
gtcaattgtaatcta

SEQ ID NO: 642964 - DNA, 15 bp, Homo sapiens
tcaattgtaatctag

SEQ ID NO: 642965 - DNA, 15 bp, Homo sapiens
caattgtaatctagt

SEQ ID NO: 642966 - DNA, 15 bp, Homo sapiens
aattgtaatctagta

SEQ ID NO: 642967 - DNA, 15 bp, Homo sapiens
attgtaatctagtag

SEQ ID NO: 642968 - DNA, 15 bp, Homo sapiens
ttgtaatctagtaga

SEQ ID NO: 642969 - DNA, 15 bp, Homo sapiens
tgtaatctagtagat

SEQ ID NO: 642970 - DNA, 15 bp, Homo sapiens
gtaatctagtagatg

SEQ ID NO: 642971 - DNA, 15 bp, Homo sapiens
taatctagtagatgg

SEQ ID NO: 642972 - DNA, 15 bp, Homo sapiens
aatctagtagatgga

SEQ ID NO: 642973 - DNA, 15 bp, Homo sapiens
atctagtagatggaa

SEQ ID NO: 642974 - DNA, 15 bp, Homo sapiens
tctagtagatggaat

SEQ ID NO: 642975 - DNA, 15 bp, Homo sapiens
ctagtagatggaatt

SEQ ID NO: 642976 - DNA, 15 bp, Homo sapiens
tagtagatggaattt

SEQ ID NO: 642977 - DNA, 15 bp, Homo sapiens
agtagatggaatttt

SEQ ID NO: 642978 - DNA, 15 bp, Homo sapiens
gtagatggaattttt

SEQ ID NO: 642979 - DNA, 15 bp, Homo sapiens
tagatggaattttta

SEQ ID NO: 642980 - DNA, 15 bp, Homo sapiens
agatggaatttttaa

SEQ ID NO: 642981 - DNA, 15 bp, Homo sapiens
gatggaatttttaag

SEQ ID NO: 642982 - DNA, 15 bp, Homo sapiens
atggaatttttaagt

SEQ ID NO: 642983 - DNA, 15 bp, Homo sapiens
tggaatttttaagtt

SEQ ID NO: 642984 - DNA, 15 bp, Homo sapiens
ggaatttttaagtta

SEQ ID NO: 642985 - DNA, 15 bp, Homo sapiens
gaatttttaagttaa

SEQ ID NO: 642986 - DNA, 15 bp, Homo sapiens
aatttttaagttaaa

SEQ ID NO: 642987 - DNA, 15 bp, Homo sapiens
atttttaagttaaag

SEQ ID NO: 642988 - DNA, 15 bp, Homo sapiens
tttttaagttaaagc

SEQ ID NO: 642989 - DNA, 15 bp, Homo sapiens
ttttaagttaaagcc

SEQ ID NO: 642990 - DNA, 15 bp, Homo sapiens
tttaagttaaagcct

SEQ ID NO: 642991 - DNA, 15 bp, Homo sapiens
ttaagttaaagcctt

SEQ ID NO: 642992 - DNA, 15 bp, Homo sapiens
taagttaaagccttc

SEQ ID NO: 642993 - DNA, 15 bp, Homo sapiens
aagttaaagccttcc

SEQ ID NO: 642994 - DNA, 15 bp, Homo sapiens
agttaaagccttcca

SEQ ID NO: 642995 - DNA, 15 bp, Homo sapiens
gttaaagccttccag

SEQ ID NO: 642996 - DNA, 15 bp, Homo sapiens
ttaaagccttccaga

SEQ ID NO: 642997 - DNA, 15 bp, Homo sapiens
taaagccttccagat

SEQ ID NO: 642998 - DNA, 15 bp, Homo sapiens
aaagccttccagatg

SEQ ID NO: 642999 - DNA, 15 bp, Homo sapiens
aagccttccagatgg

SEQ ID NO: 643000 - DNA, 15 bp, Homo sapiens
agccttccagatggc

SEQ ID NO: 643001 - DNA, 15 bp, Homo sapiens
gccttccagatggct

SEQ ID NO: 643002 - DNA, 15 bp, Homo sapiens
ccttccagatggctg

SEQ ID NO: 643003 - DNA, 15 bp, Homo sapiens
cttccagatggctgt

SEQ ID NO: 643004 - DNA, 15 bp, Homo sapiens
ttccagatggctgtc

SEQ ID NO: 643005 - DNA, 15 bp, Homo sapiens
tccagatggctgtca

SEQ ID NO: 643006 - DNA, 15 bp, Homo sapiens
ccagatggctgtcag

SEQ ID NO: 643007 - DNA, 15 bp, Homo sapiens
cagatggctgtcagt

SEQ ID NO: 643008 - DNA, 15 bp, Homo sapiens
agatggctgtcagtg

SEQ ID NO: 643009 - DNA, 15 bp, Homo sapiens
gatggctgtcagtga

SEQ ID NO: 643010 - DNA, 15 bp, Homo sapiens
atggctgtcagtgaa

SEQ ID NO: 643011 - DNA, 15 bp, Homo sapiens
tggctgtcagtgaat

SEQ ID NO: 643012 - DNA, 15 bp, Homo sapiens
ggctgtcagtgaatt

SEQ ID NO: 643013 - DNA, 15 bp, Homo sapiens
gctgtcagtgaatta

SEQ ID NO: 643014 - DNA, 15 bp, Homo sapiens
ctgtcagtgaattac

SEQ ID NO: 643015 - DNA, 15 bp, Homo sapiens
tgtcagtgaattaca

SEQ ID NO: 643016 - DNA, 15 bp, Homo sapiens
gtcagtgaattacac

SEQ ID NO: 643017 - DNA, 15 bp, Homo sapiens
tcagtgaattacact

SEQ ID NO: 643018 - DNA, 15 bp, Homo sapiens
cagtgaattacactg

SEQ ID NO: 643019 - DNA, 15 bp, Homo sapiens
agtgaattacactga

SEQ ID NO: 643020 - DNA, 15 bp, Homo sapiens
gtgaattacactgat

SEQ ID NO: 643021 - DNA, 15 bp, Homo sapiens
tgaattacactgata

SEQ ID NO: 643022 - DNA, 15 bp, Homo sapiens
gaattacactgataa

SEQ ID NO: 643023 - DNA, 15 bp, Homo sapiens
aattacactgataag

SEQ ID NO: 643024 - DNA, 15 bp, Homo sapiens
attacactgataagg

SEQ ID NO: 643025 - DNA, 15 bp, Homo sapiens
ttacactgataagga

SEQ ID NO: 643026 - DNA, 15 bp, Homo sapiens
tacactgataaggat

SEQ ID NO: 643027 - DNA, 15 bp, Homo sapiens
acactgataaggatt

SEQ ID NO: 643028 - DNA, 15 bp, Homo sapiens
cactgataaggatta

SEQ ID NO: 643029 - DNA, 15 bp, Homo sapiens
actgataaggattac

SEQ ID NO: 643030 - DNA, 15 bp, Homo sapiens
ctgataaggattaca

SEQ ID NO: 643031 - DNA, 15 bp, Homo sapiens
tgataaggattacag

SEQ ID NO: 643032 - DNA, 15 bp, Homo sapiens
gataaggattacaga

SEQ ID NO: 643033 - DNA, 15 bp, Homo sapiens
ataaggattacagag

SEQ ID NO: 643034 - DNA, 15 bp, Homo sapiens
taaggattacagagt

SEQ ID NO: 643035 - DNA, 15 bp, Homo sapiens
aaggattacagagtg

SEQ ID NO: 643036 - DNA, 15 bp, Homo sapiens
aggattacagagtgt

SEQ ID NO: 643037 - DNA, 15 bp, Homo sapiens
ggattacagagtgtc

SEQ ID NO: 643038 - DNA, 15 bp, Homo sapiens
gattacagagtgtca

SEQ ID NO: 643039 - DNA, 15 bp, Homo sapiens
attacagagtgtcag

SEQ ID NO: 643040 - DNA, 15 bp, Homo sapiens
ttacagagtgtcagg

SEQ ID NO: 643041 - DNA, 15 bp, Homo sapiens
tacagagtgtcaggt

SEQ ID NO: 643042 - DNA, 15 bp, Homo sapiens
acagagtgtcaggtc

SEQ ID NO: 643043 - DNA, 15 bp, Homo sapiens
cagagtgtcaggtct

SEQ ID NO: 643044 - DNA, 15 bp, Homo sapiens
agagtgtcaggtctc

SEQ ID NO: 643045 - DNA, 15 bp, Homo sapiens
gagtgtcaggtctct

SEQ ID NO: 643046 - DNA, 15 bp, Homo sapiens
agtgtcaggtctctt

SEQ ID NO: 643047 - DNA, 15 bp, Homo sapiens
gtgtcaggtctcttg

SEQ ID NO: 643048 - DNA, 15 bp, Homo sapiens
tgtcaggtctcttga

SEQ ID NO: 643049 - DNA, 15 bp, Homo sapiens
gtcaggtctcttgat

SEQ ID NO: 643050 - DNA, 15 bp, Homo sapiens
tcaggtctcttgatt

SEQ ID NO: 643051 - DNA, 15 bp, Homo sapiens
caggtctcttgatta

SEQ ID NO: 643052 - DNA, 15 bp, Homo sapiens
aggtctcttgattag

SEQ ID NO: 643053 - DNA, 15 bp, Homo sapiens
ggtctcttgattagc

SEQ ID NO: 643054 - DNA, 15 bp, Homo sapiens
gtctcttgattagct

SEQ ID NO: 643055 - DNA, 15 bp, Homo sapiens
tctcttgattagctt

SEQ ID NO: 643056 - DNA, 15 bp, Homo sapiens
ctcttgattagctta

SEQ ID NO: 643057 - DNA, 15 bp, Homo sapiens
tcttgattagcttat

SEQ ID NO: 643058 - DNA, 15 bp, Homo sapiens
cttgattagcttatc

SEQ ID NO: 643059 - DNA, 15 bp, Homo sapiens
ttgattagcttatca

SEQ ID NO: 643060 - DNA, 15 bp, Homo sapiens
tgattagcttatcag

SEQ ID NO: 643061 - DNA, 15 bp, Homo sapiens
gattagcttatcaga

SEQ ID NO: 643062 - DNA, 15 bp, Homo sapiens
attagcttatcagaa

SEQ ID NO: 643063 - DNA, 15 bp, Homo sapiens
ttagcttatcagaat

SEQ ID NO: 643064 - DNA, 15 bp, Homo sapiens
tagcttatcagaatt

SEQ ID NO: 643065 - DNA, 15 bp, Homo sapiens
agcttatcagaattt

SEQ ID NO: 643066 - DNA, 15 bp, Homo sapiens
gcttatcagaatttc

SEQ ID NO: 643067 - DNA, 15 bp, Homo sapiens
cttatcagaatttct

SEQ ID NO: 643068 - DNA, 15 bp, Homo sapiens
ttatcagaatttctg

SEQ ID NO: 643069 - DNA, 15 bp, Homo sapiens
tatcagaatttctgg

SEQ ID NO: 643070 - DNA, 15 bp, Homo sapiens
atcagaatttctggt

SEQ ID NO: 643071 - DNA, 15 bp, Homo sapiens
tcagaatttctggtc

SEQ ID NO: 643072 - DNA, 15 bp, Homo sapiens
cagaatttctggtca

SEQ ID NO: 643073 - DNA, 15 bp, Homo sapiens
agaatttctggtcag

SEQ ID NO: 643074 - DNA, 15 bp, Homo sapiens
gaatttctggtcaga

SEQ ID NO: 643075 - DNA, 15 bp, Homo sapiens
aatttctggtcagaa

SEQ ID NO: 643076 - DNA, 15 bp, Homo sapiens
atttctggtcagaac

SEQ ID NO: 643077 - DNA, 15 bp, Homo sapiens
tttctggtcagaaca

SEQ ID NO: 643078 - DNA, 15 bp, Homo sapiens
ttctggtcagaacag

SEQ ID NO: 643079 - DNA, 15 bp, Homo sapiens
tctggtcagaacagt

SEQ ID NO: 643080 - DNA, 15 bp, Homo sapiens
ctggtcagaacagtc

SEQ ID NO: 643081 - DNA, 15 bp, Homo sapiens
tggtcagaacagtcg

SEQ ID NO: 643082 - DNA, 15 bp, Homo sapiens
ggtcagaacagtcga

SEQ ID NO: 643083 - DNA, 15 bp, Homo sapiens
gtcagaacagtcgaa

SEQ ID NO: 643084 - DNA, 15 bp, Homo sapiens
tcagaacagtcgaat

SEQ ID NO: 643085 - DNA, 15 bp, Homo sapiens
cagaacagtcgaata

SEQ ID NO: 643086 - DNA, 15 bp, Homo sapiens
agaacagtcgaataa

SEQ ID NO: 643087 - DNA, 15 bp, Homo sapiens
gaacagtcgaataat

SEQ ID NO: 643088 - DNA, 15 bp, Homo sapiens
aacagtcgaataata

SEQ ID NO: 643089 - DNA, 15 bp, Homo sapiens
acagtcgaataatag

SEQ ID NO: 643090 - DNA, 15 bp, Homo sapiens
cagtcgaataataga

SEQ ID NO: 643091 - DNA, 15 bp, Homo sapiens
agtcgaataatagat

SEQ ID NO: 643092 - DNA, 15 bp, Homo sapiens
gtcgaataatagata

SEQ ID NO: 643093 - DNA, 15 bp, Homo sapiens
tcgaataatagataa

SEQ ID NO: 643094 - DNA, 15 bp, Homo sapiens
cgaataatagataaa

SEQ ID NO: 643095 - DNA, 15 bp, Homo sapiens
gaataatagataaaa

SEQ ID NO: 643096 - DNA, 15 bp, Homo sapiens
aataatagataaaaa

SEQ ID NO: 643097 - DNA, 15 bp, Homo sapiens
ataatagataaaaaa

SEQ ID NO: 643098 - DNA, 15 bp, Homo sapiens
taatagataaaaaaa

SEQ ID NO: 643099 - DNA, 15 bp, Homo sapiens
aatagataaaaaaat

SEQ ID NO: 643100 - DNA, 15 bp, Homo sapiens
atagataaaaaaatg

SEQ ID NO: 643101 - DNA, 15 bp, Homo sapiens
tagataaaaaaatga

SEQ ID NO: 643102 - DNA, 15 bp, Homo sapiens
agataaaaaaatgaa

SEQ ID NO: 643103 - DNA, 15 bp, Homo sapiens
gataaaaaaatgaaa

SEQ ID NO: 643104 - DNA, 15 bp, Homo sapiens
ataaaaaaatgaaag

SEQ ID NO: 643105 - DNA, 15 bp, Homo sapiens
taaaaaaatgaaagc

SEQ ID NO: 643106 - DNA, 15 bp, Homo sapiens
aaaaaaatgaaagca

SEQ ID NO: 643107 - DNA, 15 bp, Homo sapiens
aaaaaatgaaagcag

SEQ ID NO: 643108 - DNA, 15 bp, Homo sapiens
aaaaatgaaagcaga

SEQ ID NO: 643109 - DNA, 15 bp, Homo sapiens
aaaatgaaagcagat

SEQ ID NO: 643110 - DNA, 15 bp, Homo sapiens
aaatgaaagcagatg

SEQ ID NO: 643111 - DNA, 15 bp, Homo sapiens
aatgaaagcagatga

SEQ ID NO: 643112 - DNA, 15 bp, Homo sapiens
atgaaagcagatgaa

SEQ ID NO: 643113 - DNA, 15 bp, Homo sapiens
tgaaagcagatgaag

SEQ ID NO: 643114 - DNA, 15 bp, Homo sapiens
gaaagcagatgaagg

SEQ ID NO: 643115 - DNA, 15 bp, Homo sapiens
aaagcagatgaagga

SEQ ID NO: 643116 - DNA, 15 bp, Homo sapiens
aagcagatgaaggaa

SEQ ID NO: 643117 - DNA, 15 bp, Homo sapiens
agcagatgaaggaat

SEQ ID NO: 643118 - DNA, 15 bp, Homo sapiens
gcagatgaaggaata

SEQ ID NO: 643119 - DNA, 15 bp, Homo sapiens
cagatgaaggaatag

SEQ ID NO: 643120 - DNA, 15 bp, Homo sapiens
agatgaaggaatagg

SEQ ID NO: 643121 - DNA, 15 bp, Homo sapiens
gatgaaggaatagga

SEQ ID NO: 643122 - DNA, 15 bp, Homo sapiens
atgaaggaataggaa

SEQ ID NO: 643123 - DNA, 15 bp, Homo sapiens
tgaaggaataggaag

SEQ ID NO: 643124 - DNA, 15 bp, Homo sapiens
gaaggaataggaagt

SEQ ID NO: 643125 - DNA, 15 bp, Homo sapiens
aaggaataggaagtt

SEQ ID NO: 643126 - DNA, 15 bp, Homo sapiens
aggaataggaagtta

SEQ ID NO: 643127 - DNA, 15 bp, Homo sapiens
ggaataggaagttaa

SEQ ID NO: 643128 - DNA, 15 bp, Homo sapiens
gaataggaagttaaa

SEQ ID NO: 643129 - DNA, 15 bp, Homo sapiens
aataggaagttaaaa

SEQ ID NO: 643130 - DNA, 15 bp, Homo sapiens
ataggaagttaaaat

SEQ ID NO: 643131 - DNA, 15 bp, Homo sapiens
taggaagttaaaata

SEQ ID NO: 643132 - DNA, 15 bp, Homo sapiens
aggaagttaaaatac

SEQ ID NO: 643133 - DNA, 15 bp, Homo sapiens
ggaagttaaaatacc

SEQ ID NO: 643134 - DNA, 15 bp, Homo sapiens
gaagttaaaatacca

SEQ ID NO: 643135 - DNA, 15 bp, Homo sapiens
aagttaaaataccac

SEQ ID NO: 643136 - DNA, 15 bp, Homo sapiens
agttaaaataccaca

SEQ ID NO: 643137 - DNA, 15 bp, Homo sapiens
gttaaaataccacag

SEQ ID NO: 643138 - DNA, 15 bp, Homo sapiens
ttaaaataccacagt

SEQ ID NO: 643139 - DNA, 15 bp, Homo sapiens
taaaataccacagtt

SEQ ID NO: 643140 - DNA, 15 bp, Homo sapiens
aaaataccacagttg

SEQ ID NO: 643141 - DNA, 15 bp, Homo sapiens
aaataccacagttgc

SEQ ID NO: 643142 - DNA, 15 bp, Homo sapiens
aataccacagttgca

SEQ ID NO: 643143 - DNA, 15 bp, Homo sapiens
ataccacagttgcaa

SEQ ID NO: 643144 - DNA, 15 bp, Homo sapiens
taccacagttgcaat

SEQ ID NO: 643145 - DNA, 15 bp, Homo sapiens
accacagttgcaatt

SEQ ID NO: 643146 - DNA, 15 bp, Homo sapiens
ccacagttgcaattt

SEQ ID NO: 643147 - DNA, 15 bp, Homo sapiens
cacagttgcaatttc

SEQ ID NO: 643148 - DNA, 15 bp, Homo sapiens
acagttgcaatttca

SEQ ID NO: 643149 - DNA, 15 bp, Homo sapiens
cagttgcaatttcat

SEQ ID NO: 643150 - DNA, 15 bp, Homo sapiens
agttgcaatttcatt

SEQ ID NO: 643151 - DNA, 15 bp, Homo sapiens
gttgcaatttcattt

SEQ ID NO: 643152 - DNA, 15 bp, Homo sapiens
ttgcaatttcatttt

SEQ ID NO: 643153 - DNA, 15 bp, Homo sapiens
tgcaatttcatttta

SEQ ID NO: 643154 - DNA, 15 bp, Homo sapiens
gcaatttcattttat

SEQ ID NO: 643155 - DNA, 15 bp, Homo sapiens
caatttcattttatt

SEQ ID NO: 643156 - DNA, 15 bp, Homo sapiens
aatttcattttattt

SEQ ID NO: 643157 - DNA, 15 bp, Homo sapiens
atttcattttatttt

SEQ ID NO: 643158 - DNA, 15 bp, Homo sapiens
tttcattttattttc

SEQ ID NO: 643159 - DNA, 15 bp, Homo sapiens
ttcattttattttct

SEQ ID NO: 643160 - DNA, 15 bp, Homo sapiens
tcattttattttctt

SEQ ID NO: 643161 - DNA, 15 bp, Homo sapiens
cattttattttcttt

SEQ ID NO: 643162 - DNA, 15 bp, Homo sapiens
attttattttctttt

SEQ ID NO: 643163 - DNA, 15 bp, Homo sapiens
ttttattttctttta

SEQ ID NO: 643164 - DNA, 15 bp, Homo sapiens
tttattttcttttat

SEQ ID NO: 643165 - DNA, 15 bp, Homo sapiens
ttattttcttttatc

SEQ ID NO: 643166 - DNA, 15 bp, Homo sapiens
tattttcttttatcc

SEQ ID NO: 643167 - DNA, 15 bp, Homo sapiens
attttcttttatcca

SEQ ID NO: 643168 - DNA, 15 bp, Homo sapiens
ttttcttttatccaa

SEQ ID NO: 643169 - DNA, 15 bp, Homo sapiens
tttcttttatccaat

SEQ ID NO: 643170 - DNA, 15 bp, Homo sapiens
ttcttttatccaatt

SEQ ID NO: 643171 - DNA, 15 bp, Homo sapiens
tcttttatccaatta

SEQ ID NO: 643172 - DNA, 15 bp, Homo sapiens
cttttatccaattaa

SEQ ID NO: 643173 - DNA, 15 bp, Homo sapiens
ttttatccaattaaa

SEQ ID NO: 643174 - DNA, 15 bp, Homo sapiens
tttatccaattaaag

SEQ ID NO: 643175 - DNA, 15 bp, Homo sapiens
ttatccaattaaagt

SEQ ID NO: 643176 - DNA, 15 bp, Homo sapiens
tatccaattaaagtg

SEQ ID NO: 643177 - DNA, 15 bp, Homo sapiens
atccaattaaagtgt

SEQ ID NO: 643178 - DNA, 15 bp, Homo sapiens
tccaattaaagtgta

SEQ ID NO: 643179 - DNA, 15 bp, Homo sapiens
ccaattaaagtgtaa

SEQ ID NO: 643180 - DNA, 15 bp, Homo sapiens
caattaaagtgtaaa

SEQ ID NO: 643181 - DNA, 15 bp, Homo sapiens
aattaaagtgtaaac

SEQ ID NO: 643182 - DNA, 15 bp, Homo sapiens
attaaagtgtaaaca

SEQ ID NO: 643183 - DNA, 15 bp, Homo sapiens
ttaaagtgtaaacac

SEQ ID NO: 643184 - DNA, 15 bp, Homo sapiens
taaagtgtaaacact

SEQ ID NO: 643185 - DNA, 15 bp, Homo sapiens
aaagtgtaaacactc

SEQ ID NO: 643186 - DNA, 15 bp, Homo sapiens
aagtgtaaacactca

SEQ ID NO: 643187 - DNA, 15 bp, Homo sapiens
agtgtaaacactcaa

SEQ ID NO: 643188 - DNA, 15 bp, Homo sapiens
gtgtaaacactcaaa

SEQ ID NO: 643189 - DNA, 15 bp, Homo sapiens
tgtaaacactcaaat

SEQ ID NO: 643190 - DNA, 15 bp, Homo sapiens
gtaaacactcaaatg

SEQ ID NO: 643191 - DNA, 15 bp, Homo sapiens
taaacactcaaatgg

SEQ ID NO: 643192 - DNA, 15 bp, Homo sapiens
aaacactcaaatgga

SEQ ID NO: 643193 - DNA, 15 bp, Homo sapiens
aacactcaaatggaa

SEQ ID NO: 643194 - DNA, 15 bp, Homo sapiens
acactcaaatggaag

SEQ ID NO: 643195 - DNA, 15 bp, Homo sapiens
cactcaaatggaagc

SEQ ID NO: 643196 - DNA, 15 bp, Homo sapiens
actcaaatggaagcc

SEQ ID NO: 643197 - DNA, 15 bp, Homo sapiens
ctcaaatggaagcca

SEQ ID NO: 643198 - DNA, 15 bp, Homo sapiens
tcaaatggaagccac

SEQ ID NO: 643199 - DNA, 15 bp, Homo sapiens
caaatggaagccaca

SEQ ID NO: 643200 - DNA, 15 bp, Homo sapiens
aaatggaagccacaa

SEQ ID NO: 643201 - DNA, 15 bp, Homo sapiens
aatggaagccacaaa

SEQ ID NO: 643202 - DNA, 15 bp, Homo sapiens
atggaagccacaaag

SEQ ID NO: 643203 - DNA, 15 bp, Homo sapiens
tggaagccacaaagt

SEQ ID NO: 643204 - DNA, 15 bp, Homo sapiens
ggaagccacaaagtc

SEQ ID NO: 643205 - DNA, 15 bp, Homo sapiens
gaagccacaaagtct

SEQ ID NO: 643206 - DNA, 15 bp, Homo sapiens
aagccacaaagtctc

SEQ ID NO: 643207 - DNA, 15 bp, Homo sapiens
agccacaaagtctcg

SEQ ID NO: 643208 - DNA, 15 bp, Homo sapiens
gccacaaagtctcgt

SEQ ID NO: 643209 - DNA, 15 bp, Homo sapiens
ccacaaagtctcgtg

SEQ ID NO: 643210 - DNA, 15 bp, Homo sapiens
cacaaagtctcgtgt

SEQ ID NO: 643211 - DNA, 15 bp, Homo sapiens
acaaagtctcgtgta

SEQ ID NO: 643212 - DNA, 15 bp, Homo sapiens
caaagtctcgtgtaa

SEQ ID NO: 643213 - DNA, 15 bp, Homo sapiens
aaagtctcgtgtaac

SEQ ID NO: 643214 - DNA, 15 bp, Homo sapiens
aagtctcgtgtaact

SEQ ID NO: 643215 - DNA, 15 bp, Homo sapiens
agtctcgtgtaactt

SEQ ID NO: 643216 - DNA, 15 bp, Homo sapiens
gtctcgtgtaactta

SEQ ID NO: 643217 - DNA, 15 bp, Homo sapiens
tctcgtgtaacttaa

SEQ ID NO: 643218 - DNA, 15 bp, Homo sapiens
ctcgtgtaacttaat

SEQ ID NO: 643219 - DNA, 15 bp, Homo sapiens
tcgtgtaacttaatt

SEQ ID NO: 643220 - DNA, 15 bp, Homo sapiens
cgtgtaacttaattg

SEQ ID NO: 643221 - DNA, 15 bp, Homo sapiens
gtgtaacttaattgt

SEQ ID NO: 643222 - DNA, 15 bp, Homo sapiens
tgtaacttaattgta

SEQ ID NO: 643223 - DNA, 15 bp, Homo sapiens
gtaacttaattgtag

SEQ ID NO: 643224 - DNA, 15 bp, Homo sapiens
taacttaattgtaga

SEQ ID NO: 643225 - DNA, 15 bp, Homo sapiens
aacttaattgtagaa

SEQ ID NO: 643226 - DNA, 15 bp, Homo sapiens
acttaattgtagaag

SEQ ID NO: 643227 - DNA, 15 bp, Homo sapiens
cttaattgtagaaga

SEQ ID NO: 643228 - DNA, 15 bp, Homo sapiens
ttaattgtagaagag

SEQ ID NO: 643229 - DNA, 15 bp, Homo sapiens
taattgtagaagaga

SEQ ID NO: 643230 - DNA, 15 bp, Homo sapiens
aattgtagaagagac

SEQ ID NO: 643231 - DNA, 15 bp, Homo sapiens
attgtagaagagaca

SEQ ID NO: 643232 - DNA, 15 bp, Homo sapiens
ttgtagaagagacat

SEQ ID NO: 643233 - DNA, 15 bp, Homo sapiens
tgtagaagagacata

SEQ ID NO: 643234 - DNA, 15 bp, Homo sapiens
gtagaagagacatac

SEQ ID NO: 643235 - DNA, 15 bp, Homo sapiens
tagaagagacatact

SEQ ID NO: 643236 - DNA, 15 bp, Homo sapiens
agaagagacatactg

SEQ ID NO: 643237 - DNA, 15 bp, Homo sapiens
gaagagacatactgt

SEQ ID NO: 643238 - DNA, 15 bp, Homo sapiens
aagagacatactgta

SEQ ID NO: 643239 - DNA, 15 bp, Homo sapiens
agagacatactgtaa

SEQ ID NO: 643240 - DNA, 15 bp, Homo sapiens
gagacatactgtaat

SEQ ID NO: 643241 - DNA, 15 bp, Homo sapiens
agacatactgtaatt

SEQ ID NO: 643242 - DNA, 15 bp, Homo sapiens
gacatactgtaattt

SEQ ID NO: 643243 - DNA, 15 bp, Homo sapiens
acatactgtaatttc

SEQ ID NO: 643244 - DNA, 15 bp, Homo sapiens
catactgtaatttct

SEQ ID NO: 643245 - DNA, 15 bp, Homo sapiens
atactgtaatttctg

SEQ ID NO: 643246 - DNA, 15 bp, Homo sapiens
tactgtaatttctgc

SEQ ID NO: 643247 - DNA, 15 bp, Homo sapiens
actgtaatttctgcc

SEQ ID NO: 643248 - DNA, 15 bp, Homo sapiens
ctgtaatttctgcca

SEQ ID NO: 643249 - DNA, 15 bp, Homo sapiens
tgtaatttctgccat

SEQ ID NO: 643250 - DNA, 15 bp, Homo sapiens
gtaatttctgccata

SEQ ID NO: 643251 - DNA, 15 bp, Homo sapiens
taatttctgccatat

SEQ ID NO: 643252 - DNA, 15 bp, Homo sapiens
aatttctgccatatt

SEQ ID NO: 643253 - DNA, 15 bp, Homo sapiens
atttctgccatattc

SEQ ID NO: 643254 - DNA, 15 bp, Homo sapiens
tttctgccatattct

SEQ ID NO: 643255 - DNA, 15 bp, Homo sapiens
ttctgccatattcta

SEQ ID NO: 643256 - DNA, 15 bp, Homo sapiens
tctgccatattctat

SEQ ID NO: 643257 - DNA, 15 bp, Homo sapiens
ctgccatattctatg

SEQ ID NO: 643258 - DNA, 15 bp, Homo sapiens
tgccatattctatgg

SEQ ID NO: 643259 - DNA, 15 bp, Homo sapiens
gccatattctatggg

SEQ ID NO: 643260 - DNA, 15 bp, Homo sapiens
ccatattctatgggt

SEQ ID NO: 643261 - DNA, 15 bp, Homo sapiens
catattctatgggtc

SEQ ID NO: 643262 - DNA, 15 bp, Homo sapiens
atattctatgggtca

SEQ ID NO: 643263 - DNA, 15 bp, Homo sapiens
tattctatgggtcac

SEQ ID NO: 643264 - DNA, 15 bp, Homo sapiens
attctatgggtcaca

SEQ ID NO: 643265 - DNA, 15 bp, Homo sapiens
ttctatgggtcacag

SEQ ID NO: 643266 - DNA, 15 bp, Homo sapiens
tctatgggtcacaga

SEQ ID NO: 643267 - DNA, 15 bp, Homo sapiens
ctatgggtcacagaa

SEQ ID NO: 643268 - DNA, 15 bp, Homo sapiens
tatgggtcacagaaa

SEQ ID NO: 643269 - DNA, 15 bp, Homo sapiens
atgggtcacagaaac

SEQ ID NO: 643270 - DNA, 15 bp, Homo sapiens
tgggtcacagaaacc

SEQ ID NO: 643271 - DNA, 15 bp, Homo sapiens
gggtcacagaaacca

SEQ ID NO: 643272 - DNA, 15 bp, Homo sapiens
ggtcacagaaaccaa

SEQ ID NO: 643273 - DNA, 15 bp, Homo sapiens
gtcacagaaaccaac

SEQ ID NO: 643274 - DNA, 15 bp, Homo sapiens
tcacagaaaccaacc

SEQ ID NO: 643275 - DNA, 15 bp, Homo sapiens
cacagaaaccaaccc

SEQ ID NO: 643276 - DNA, 15 bp, Homo sapiens
acagaaaccaaccct

SEQ ID NO: 643277 - DNA, 15 bp, Homo sapiens
cagaaaccaaccctg

SEQ ID NO: 643278 - DNA, 15 bp, Homo sapiens
agaaaccaaccctgg

SEQ ID NO: 643279 - DNA, 15 bp, Homo sapiens
gaaaccaaccctggt

SEQ ID NO: 643280 - DNA, 15 bp, Homo sapiens
aaaccaaccctggtg

SEQ ID NO: 643281 - DNA, 15 bp, Homo sapiens
aaccaaccctggtgt

SEQ ID NO: 643282 - DNA, 15 bp, Homo sapiens
accaaccctggtgta

SEQ ID NO: 643283 - DNA, 15 bp, Homo sapiens
ccaaccctggtgtaa

SEQ ID NO: 643284 - DNA, 15 bp, Homo sapiens
caaccctggtgtaat

SEQ ID NO: 643285 - DNA, 15 bp, Homo sapiens
aaccctggtgtaatt

SEQ ID NO: 643286 - DNA, 15 bp, Homo sapiens
accctggtgtaattt

SEQ ID NO: 643287 - DNA, 15 bp, Homo sapiens
ccctggtgtaatttg

SEQ ID NO: 643288 - DNA, 15 bp, Homo sapiens
cctggtgtaatttgg

SEQ ID NO: 643289 - DNA, 15 bp, Homo sapiens
ctggtgtaatttgga

SEQ ID NO: 643290 - DNA, 15 bp, Homo sapiens
tggtgtaatttggaa

SEQ ID NO: 643291 - DNA, 15 bp, Homo sapiens
ggtgtaatttggaag

SEQ ID NO: 643292 - DNA, 15 bp, Homo sapiens
gtgtaatttggaagg

SEQ ID NO: 643293 - DNA, 15 bp, Homo sapiens
tgtaatttggaagga

SEQ ID NO: 643294 - DNA, 15 bp, Homo sapiens
gtaatttggaaggag

SEQ ID NO: 643295 - DNA, 15 bp, Homo sapiens
taatttggaaggagt

SEQ ID NO: 643296 - DNA, 15 bp, Homo sapiens
aatttggaaggagtc

SEQ ID NO: 643297 - DNA, 15 bp, Homo sapiens
atttggaaggagtct

SEQ ID NO: 643298 - DNA, 15 bp, Homo sapiens
tttggaaggagtcta

SEQ ID NO: 643299 - DNA, 15 bp, Homo sapiens
ttggaaggagtctaa

SEQ ID NO: 643300 - DNA, 15 bp, Homo sapiens
tggaaggagtctaaa

SEQ ID NO: 643301 - DNA, 15 bp, Homo sapiens
ggaaggagtctaaac

SEQ ID NO: 643302 - DNA, 15 bp, Homo sapiens
gaaggagtctaaaca

SEQ ID NO: 643303 - DNA, 15 bp, Homo sapiens
aaggagtctaaacaa

SEQ ID NO: 643304 - DNA, 15 bp, Homo sapiens
aggagtctaaacaag

SEQ ID NO: 643305 - DNA, 15 bp, Homo sapiens
ggagtctaaacaagt

SEQ ID NO: 643306 - DNA, 15 bp, Homo sapiens
gagtctaaacaagtg

SEQ ID NO: 643307 - DNA, 15 bp, Homo sapiens
agtctaaacaagtgt

SEQ ID NO: 643308 - DNA, 15 bp, Homo sapiens
gtctaaacaagtgtg

SEQ ID NO: 643309 - DNA, 15 bp, Homo sapiens
tctaaacaagtgtga

SEQ ID NO: 643310 - DNA, 15 bp, Homo sapiens
ctaaacaagtgtgaa

SEQ ID NO: 643311 - DNA, 15 bp, Homo sapiens
taaacaagtgtgaat

SEQ ID NO: 643312 - DNA, 15 bp, Homo sapiens
aaacaagtgtgaata

SEQ ID NO: 643313 - DNA, 15 bp, Homo sapiens
aacaagtgtgaatat

SEQ ID NO: 643314 - DNA, 15 bp, Homo sapiens
acaagtgtgaatatt

SEQ ID NO: 643315 - DNA, 15 bp, Homo sapiens
caagtgtgaatattg

SEQ ID NO: 643316 - DNA, 15 bp, Homo sapiens
aagtgtgaatattgc

SEQ ID NO: 643317 - DNA, 15 bp, Homo sapiens
agtgtgaatattgcc

SEQ ID NO: 643318 - DNA, 15 bp, Homo sapiens
gtgtgaatattgcca

SEQ ID NO: 643319 - DNA, 15 bp, Homo sapiens
tgtgaatattgccag

SEQ ID NO: 643320 - DNA, 15 bp, Homo sapiens
gtgaatattgccaga

SEQ ID NO: 643321 - DNA, 15 bp, Homo sapiens
tgaatattgccagat

SEQ ID NO: 643322 - DNA, 15 bp, Homo sapiens
gaatattgccagatg

SEQ ID NO: 643323 - DNA, 15 bp, Homo sapiens
aatattgccagatga

SEQ ID NO: 643324 - DNA, 15 bp, Homo sapiens
atattgccagatgag

SEQ ID NO: 643325 - DNA, 15 bp, Homo sapiens
tattgccagatgaga

SEQ ID NO: 643326 - DNA, 15 bp, Homo sapiens
attgccagatgagaa

SEQ ID NO: 643327 - DNA, 15 bp, Homo sapiens
ttgccagatgagaat

SEQ ID NO: 643328 - DNA, 15 bp, Homo sapiens
tgccagatgagaatt

SEQ ID NO: 643329 - DNA, 15 bp, Homo sapiens
gccagatgagaattt

SEQ ID NO: 643330 - DNA, 15 bp, Homo sapiens
ccagatgagaatttt

SEQ ID NO: 643331 - DNA, 15 bp, Homo sapiens
cagatgagaatttta

SEQ ID NO: 643332 - DNA, 15 bp, Homo sapiens
agatgagaattttag

SEQ ID NO: 643333 - DNA, 15 bp, Homo sapiens
gatgagaattttagg

SEQ ID NO: 643334 - DNA, 15 bp, Homo sapiens
atgagaattttaggg

SEQ ID NO: 643335 - DNA, 15 bp, Homo sapiens
tgagaattttagggg

SEQ ID NO: 643336 - DNA, 15 bp, Homo sapiens
gagaattttaggggc

SEQ ID NO: 643337 - DNA, 15 bp, Homo sapiens
agaattttaggggct

SEQ ID NO: 643338 - DNA, 15 bp, Homo sapiens
gaattttaggggctt

SEQ ID NO: 643339 - DNA, 15 bp, Homo sapiens
aattttaggggcttt

SEQ ID NO: 643340 - DNA, 15 bp, Homo sapiens
attttaggggctttt

SEQ ID NO: 643341 - DNA, 15 bp, Homo sapiens
ttttaggggcttttt

SEQ ID NO: 643342 - DNA, 15 bp, Homo sapiens
tttaggggctttttg

SEQ ID NO: 643343 - DNA, 15 bp, Homo sapiens
ttaggggctttttgg

SEQ ID NO: 643344 - DNA, 15 bp, Homo sapiens
taggggctttttgga

SEQ ID NO: 643345 - DNA, 15 bp, Homo sapiens
aggggctttttggag

SEQ ID NO: 643346 - DNA, 15 bp, Homo sapiens
ggggctttttggagg

SEQ ID NO: 643347 - DNA, 15 bp, Homo sapiens
gggctttttggaggc

SEQ ID NO: 643348 - DNA, 15 bp, Homo sapiens
ggctttttggaggct

SEQ ID NO: 643349 - DNA, 15 bp, Homo sapiens
gctttttggaggctg

SEQ ID NO: 643350 - DNA, 15 bp, Homo sapiens
ctttttggaggctga

SEQ ID NO: 643351 - DNA, 15 bp, Homo sapiens
tttttggaggctgat

SEQ ID NO: 643352 - DNA, 15 bp, Homo sapiens
ttttggaggctgatt

SEQ ID NO: 643353 - DNA, 15 bp, Homo sapiens
tttggaggctgatta

SEQ ID NO: 643354 - DNA, 15 bp, Homo sapiens
ttggaggctgattac

SEQ ID NO: 643355 - DNA, 15 bp, Homo sapiens
tggaggctgattact

SEQ ID NO: 643356 - DNA, 15 bp, Homo sapiens
ggaggctgattacta

SEQ ID NO: 643357 - DNA, 15 bp, Homo sapiens
gaggctgattactac

SEQ ID NO: 643358 - DNA, 15 bp, Homo sapiens
aggctgattactact

SEQ ID NO: 643359 - DNA, 15 bp, Homo sapiens
ggctgattactactg

SEQ ID NO: 643360 - DNA, 15 bp, Homo sapiens
gctgattactactgc

SEQ ID NO: 643361 - DNA, 15 bp, Homo sapiens
ctgattactactgcg

SEQ ID NO: 643362 - DNA, 15 bp, Homo sapiens
tgattactactgcgg

SEQ ID NO: 643363 - DNA, 15 bp, Homo sapiens
gattactactgcggg

SEQ ID NO: 643364 - DNA, 15 bp, Homo sapiens
attactactgcgggc

SEQ ID NO: 643365 - DNA, 15 bp, Homo sapiens
ttactactgcgggca

SEQ ID NO: 643366 - DNA, 15 bp, Homo sapiens
tactactgcgggcat

SEQ ID NO: 643367 - DNA, 15 bp, Homo sapiens
actactgcgggcatt

SEQ ID NO: 643368 - DNA, 15 bp, Homo sapiens
ctactgcgggcattg

SEQ ID NO: 643369 - DNA, 15 bp, Homo sapiens
tactgcgggcattgg

SEQ ID NO: 643370 - DNA, 15 bp, Homo sapiens
actgcgggcattggg

SEQ ID NO: 643371 - DNA, 15 bp, Homo sapiens
ctgcgggcattgggg

SEQ ID NO: 643372 - DNA, 15 bp, Homo sapiens
tgcgggcattgggga

SEQ ID NO: 643373 - DNA, 15 bp, Homo sapiens
gcgggcattggggag

SEQ ID NO: 643374 - DNA, 15 bp, Homo sapiens
cgggcattggggagc

SEQ ID NO: 643375 - DNA, 15 bp, Homo sapiens
gggcattggggagct

SEQ ID NO: 643376 - DNA, 15 bp, Homo sapiens
ggcattggggagctc

SEQ ID NO: 643377 - DNA, 15 bp, Homo sapiens
gcattggggagctca

SEQ ID NO: 643378 - DNA, 15 bp, Homo sapiens
cattggggagctcaa

SEQ ID NO: 643379 - DNA, 15 bp, Homo sapiens
attggggagctcaag

SEQ ID NO: 643380 - DNA, 15 bp, Homo sapiens
ttggggagctcaagt

SEQ ID NO: 643381 - DNA, 15 bp, Homo sapiens
tggggagctcaagtc

SEQ ID NO: 643382 - DNA, 15 bp, Homo sapiens
ggggagctcaagtct

SEQ ID NO: 643383 - DNA, 15 bp, Homo sapiens
gggagctcaagtctt

SEQ ID NO: 643384 - DNA, 15 bp, Homo sapiens
ggagctcaagtcttc

SEQ ID NO: 643385 - DNA, 15 bp, Homo sapiens
gagctcaagtcttca

SEQ ID NO: 643386 - DNA, 15 bp, Homo sapiens
agctcaagtcttcac

SEQ ID NO: 643387 - DNA, 15 bp, Homo sapiens
gctcaagtcttcact

SEQ ID NO: 643388 - DNA, 15 bp, Homo sapiens
ctcaagtcttcactt

SEQ ID NO: 643389 - DNA, 15 bp, Homo sapiens
tcaagtcttcacttc

SEQ ID NO: 643390 - DNA, 15 bp, Homo sapiens
caagtcttcacttcc

SEQ ID NO: 643391 - DNA, 15 bp, Homo sapiens
aagtcttcacttcct

SEQ ID NO: 643392 - DNA, 15 bp, Homo sapiens
agtcttcacttcctc

SEQ ID NO: 643393 - DNA, 15 bp, Homo sapiens
gtcttcacttcctct

SEQ ID NO: 643394 - DNA, 15 bp, Homo sapiens
tcttcacttcctctc

SEQ ID NO: 643395 - DNA, 15 bp, Homo sapiens
cttcacttcctctca

SEQ ID NO: 643396 - DNA, 15 bp, Homo sapiens
ttcacttcctctcat

SEQ ID NO: 643397 - DNA, 15 bp, Homo sapiens
tcacttcctctcata

SEQ ID NO: 643398 - DNA, 15 bp, Homo sapiens
cacttcctctcatac

SEQ ID NO: 643399 - DNA, 15 bp, Homo sapiens
acttcctctcataca

SEQ ID NO: 643400 - DNA, 15 bp, Homo sapiens
cttcctctcatacag

SEQ ID NO: 643401 - DNA, 15 bp, Homo sapiens
ttcctctcatacaga

SEQ ID NO: 643402 - DNA, 15 bp, Homo sapiens
tcctctcatacagat

SEQ ID NO: 643403 - DNA, 15 bp, Homo sapiens
cctctcatacagata

SEQ ID NO: 643404 - DNA, 15 bp, Homo sapiens
ctctcatacagataa

SEQ ID NO: 643405 - DNA, 15 bp, Homo sapiens
tctcatacagataaa

SEQ ID NO: 643406 - DNA, 15 bp, Homo sapiens
ctcatacagataaat

SEQ ID NO: 643407 - DNA, 15 bp, Homo sapiens
tcatacagataaatc

SEQ ID NO: 643408 - DNA, 15 bp, Homo sapiens
catacagataaatca

SEQ ID NO: 643409 - DNA, 15 bp, Homo sapiens
atacagataaatcaa

SEQ ID NO: 643410 - DNA, 15 bp, Homo sapiens
tacagataaatcaat

SEQ ID NO: 643411 - DNA, 15 bp, Homo sapiens
acagataaatcaatg

SEQ ID NO: 643412 - DNA, 15 bp, Homo sapiens
cagataaatcaatgc

SEQ ID NO: 643413 - DNA, 15 bp, Homo sapiens
agataaatcaatgca

SEQ ID NO: 643414 - DNA, 15 bp, Homo sapiens
gataaatcaatgcag

SEQ ID NO: 643415 - DNA, 15 bp, Homo sapiens
ataaatcaatgcaga

SEQ ID NO: 643416 - DNA, 15 bp, Homo sapiens
taaatcaatgcagaa

SEQ ID NO: 643417 - DNA, 15 bp, Homo sapiens
aaatcaatgcagaaa

SEQ ID NO: 643418 - DNA, 15 bp, Homo sapiens
aatcaatgcagaaat

SEQ ID NO: 643419 - DNA, 15 bp, Homo sapiens
atcaatgcagaaatc

SEQ ID NO: 643420 - DNA, 15 bp, Homo sapiens
tcaatgcagaaatct

SEQ ID NO: 643421 - DNA, 15 bp, Homo sapiens
caatgcagaaatcta

SEQ ID NO: 643422 - DNA, 15 bp, Homo sapiens
aatgcagaaatctag

SEQ ID NO: 643423 - DNA, 15 bp, Homo sapiens
atgcagaaatctagg

SEQ ID NO: 643424 - DNA, 15 bp, Homo sapiens
tgcagaaatctaggc

SEQ ID NO: 643425 - DNA, 15 bp, Homo sapiens
gcagaaatctaggcc

SEQ ID NO: 643426 - DNA, 15 bp, Homo sapiens
cagaaatctaggcct

SEQ ID NO: 643427 - DNA, 15 bp, Homo sapiens
agaaatctaggcctg

SEQ ID NO: 643428 - DNA, 15 bp, Homo sapiens
gaaatctaggcctgt

SEQ ID NO: 643429 - DNA, 15 bp, Homo sapiens
aaatctaggcctgtc

SEQ ID NO: 643430 - DNA, 15 bp, Homo sapiens
aatctaggcctgtcc

SEQ ID NO: 643431 - DNA, 15 bp, Homo sapiens
atctaggcctgtcct

SEQ ID NO: 643432 - DNA, 15 bp, Homo sapiens
tctaggcctgtcctt

SEQ ID NO: 643433 - DNA, 15 bp, Homo sapiens
ctaggcctgtccttt

SEQ ID NO: 643434 - DNA, 15 bp, Homo sapiens
taggcctgtcctttc

SEQ ID NO: 643435 - DNA, 15 bp, Homo sapiens
aggcctgtcctttca

SEQ ID NO: 643436 - DNA, 15 bp, Homo sapiens
ggcctgtcctttcac

SEQ ID NO: 643437 - DNA, 15 bp, Homo sapiens
gcctgtcctttcact

SEQ ID NO: 643438 - DNA, 15 bp, Homo sapiens
cctgtcctttcactt

SEQ ID NO: 643439 - DNA, 15 bp, Homo sapiens
ctgtcctttcacttg

SEQ ID NO: 643440 - DNA, 15 bp, Homo sapiens
tgtcctttcacttgg

SEQ ID NO: 643441 - DNA, 15 bp, Homo sapiens
gtcctttcacttgga

SEQ ID NO: 643442 - DNA, 15 bp, Homo sapiens
tcctttcacttggat

SEQ ID NO: 643443 - DNA, 15 bp, Homo sapiens
cctttcacttggatt

SEQ ID NO: 643444 - DNA, 15 bp, Homo sapiens
ctttcacttggattt

SEQ ID NO: 643445 - DNA, 15 bp, Homo sapiens
tttcacttggatttc

SEQ ID NO: 643446 - DNA, 15 bp, Homo sapiens
ttcacttggatttca

SEQ ID NO: 643447 - DNA, 15 bp, Homo sapiens
tcacttggatttcag

SEQ ID NO: 643448 - DNA, 15 bp, Homo sapiens
cacttggatttcagt

SEQ ID NO: 643449 - DNA, 15 bp, Homo sapiens
acttggatttcagtc

SEQ ID NO: 643450 - DNA, 15 bp, Homo sapiens
cttggatttcagtct

SEQ ID NO: 643451 - DNA, 15 bp, Homo sapiens
ttggatttcagtcta

SEQ ID NO: 643452 - DNA, 15 bp, Homo sapiens
tggatttcagtctat

SEQ ID NO: 643453 - DNA, 15 bp, Homo sapiens
ggatttcagtctatg

SEQ ID NO: 643454 - DNA, 15 bp, Homo sapiens
gatttcagtctatgt

SEQ ID NO: 643455 - DNA, 15 bp, Homo sapiens
atttcagtctatgtt

SEQ ID NO: 643456 - DNA, 15 bp, Homo sapiens
tttcagtctatgttc

SEQ ID NO: 643457 - DNA, 15 bp, Homo sapiens
ttcagtctatgttct

SEQ ID NO: 643458 - DNA, 15 bp, Homo sapiens
tcagtctatgttctt

SEQ ID NO: 643459 - DNA, 15 bp, Homo sapiens
cagtctatgttctta

SEQ ID NO: 643460 - DNA, 15 bp, Homo sapiens
agtctatgttcttag

SEQ ID NO: 643461 - DNA, 15 bp, Homo sapiens
gtctatgttcttagc

SEQ ID NO: 643462 - DNA, 15 bp, Homo sapiens
tctatgttcttagca

SEQ ID NO: 643463 - DNA, 15 bp, Homo sapiens
ctatgttcttagcaa

SEQ ID NO: 643464 - DNA, 15 bp, Homo sapiens
tatgttcttagcaat

SEQ ID NO: 643465 - DNA, 15 bp, Homo sapiens
atgttcttagcaata

SEQ ID NO: 643466 - DNA, 15 bp, Homo sapiens
tgttcttagcaatat

SEQ ID NO: 643467 - DNA, 15 bp, Homo sapiens
gttcttagcaatata

SEQ ID NO: 643468 - DNA, 15 bp, Homo sapiens
ttcttagcaatatat

SEQ ID NO: 643469 - DNA, 15 bp, Homo sapiens
tcttagcaatatata

SEQ ID NO: 643470 - DNA, 15 bp, Homo sapiens
cttagcaatatatat

SEQ ID NO: 643471 - DNA, 15 bp, Homo sapiens
ttagcaatatatatt

SEQ ID NO: 643472 - DNA, 15 bp, Homo sapiens
tagcaatatatattc

SEQ ID NO: 643473 - DNA, 15 bp, Homo sapiens
agcaatatatattca

SEQ ID NO: 643474 - DNA, 15 bp, Homo sapiens
gcaatatatattcag

SEQ ID NO: 643475 - DNA, 15 bp, Homo sapiens
caatatatattcagt

SEQ ID NO: 643476 - DNA, 15 bp, Homo sapiens
aatatatattcagtt

SEQ ID NO: 643477 - DNA, 15 bp, Homo sapiens
atatatattcagttt

SEQ ID NO: 643478 - DNA, 15 bp, Homo sapiens
tatatattcagtttg

SEQ ID NO: 643479 - DNA, 15 bp, Homo sapiens
atatattcagtttgt

SEQ ID NO: 643480 - DNA, 15 bp, Homo sapiens
tatattcagtttgta

SEQ ID NO: 643481 - DNA, 15 bp, Homo sapiens
atattcagtttgtat

SEQ ID NO: 643482 - DNA, 15 bp, Homo sapiens
tattcagtttgtata

SEQ ID NO: 643483 - DNA, 15 bp, Homo sapiens
attcagtttgtataa

SEQ ID NO: 643484 - DNA, 15 bp, Homo sapiens
ttcagtttgtataag

SEQ ID NO: 643485 - DNA, 15 bp, Homo sapiens
tcagtttgtataagc

SEQ ID NO: 643486 - DNA, 15 bp, Homo sapiens
cagtttgtataagca

SEQ ID NO: 643487 - DNA, 15 bp, Homo sapiens
agtttgtataagcaa

SEQ ID NO: 643488 - DNA, 15 bp, Homo sapiens
gtttgtataagcaag

SEQ ID NO: 643489 - DNA, 15 bp, Homo sapiens
tttgtataagcaagc

SEQ ID NO: 643490 - DNA, 15 bp, Homo sapiens
ttgtataagcaagca

SEQ ID NO: 643491 - DNA, 15 bp, Homo sapiens
tgtataagcaagcac

SEQ ID NO: 643492 - DNA, 15 bp, Homo sapiens
gtataagcaagcact

SEQ ID NO: 643493 - DNA, 15 bp, Homo sapiens
tataagcaagcacta

SEQ ID NO: 643494 - DNA, 15 bp, Homo sapiens
ataagcaagcactat

SEQ ID NO: 643495 - DNA, 15 bp, Homo sapiens
taagcaagcactatt

SEQ ID NO: 643496 - DNA, 15 bp, Homo sapiens
aagcaagcactattt

SEQ ID NO: 643497 - DNA, 15 bp, Homo sapiens
agcaagcactatttt

SEQ ID NO: 643498 - DNA, 15 bp, Homo sapiens
gcaagcactattttg

SEQ ID NO: 643499 - DNA, 15 bp, Homo sapiens
caagcactattttgt

SEQ ID NO: 643500 - DNA, 15 bp, Homo sapiens
aagcactattttgta

SEQ ID NO: 643501 - DNA, 15 bp, Homo sapiens
agcactattttgtag

SEQ ID NO: 643502 - DNA, 15 bp, Homo sapiens
gcactattttgtagc

SEQ ID NO: 643503 - DNA, 15 bp, Homo sapiens
cactattttgtagct

SEQ ID NO: 643504 - DNA, 15 bp, Homo sapiens
actattttgtagcta

SEQ ID NO: 643505 - DNA, 15 bp, Homo sapiens
ctattttgtagctag

SEQ ID NO: 643506 - DNA, 15 bp, Homo sapiens
tattttgtagctaga

SEQ ID NO: 643507 - DNA, 15 bp, Homo sapiens
attttgtagctagac

SEQ ID NO: 643508 - DNA, 15 bp, Homo sapiens
ttttgtagctagaca

SEQ ID NO: 643509 - DNA, 15 bp, Homo sapiens
tttgtagctagacag

SEQ ID NO: 643510 - DNA, 15 bp, Homo sapiens
ttgtagctagacagt

SEQ ID NO: 643511 - DNA, 15 bp, Homo sapiens
tgtagctagacagtt

SEQ ID NO: 643512 - DNA, 15 bp, Homo sapiens
gtagctagacagttt

SEQ ID NO: 643513 - DNA, 15 bp, Homo sapiens
tagctagacagttta

SEQ ID NO: 643514 - DNA, 15 bp, Homo sapiens
agctagacagtttag

SEQ ID NO: 643515 - DNA, 15 bp, Homo sapiens
gctagacagtttagg

SEQ ID NO: 643516 - DNA, 15 bp, Homo sapiens
ctagacagtttaggc

SEQ ID NO: 643517 - DNA, 15 bp, Homo sapiens
tagacagtttaggct

SEQ ID NO: 643518 - DNA, 15 bp, Homo sapiens
agacagtttaggcta

SEQ ID NO: 643519 - DNA, 15 bp, Homo sapiens
gacagtttaggctat

SEQ ID NO: 643520 - DNA, 15 bp, Homo sapiens
acagtttaggctata

SEQ ID NO: 643521 - DNA, 15 bp, Homo sapiens
cagtttaggctatat

SEQ ID NO: 643522 - DNA, 15 bp, Homo sapiens
agtttaggctatata

SEQ ID NO: 643523 - DNA, 15 bp, Homo sapiens
gtttaggctatatac

SEQ ID NO: 643524 - DNA, 15 bp, Homo sapiens
tttaggctatatact

SEQ ID NO: 643525 - DNA, 15 bp, Homo sapiens
ttaggctatatactt

SEQ ID NO: 643526 - DNA, 15 bp, Homo sapiens
taggctatatacttt

SEQ ID NO: 643527 - DNA, 15 bp, Homo sapiens
aggctatatactttt

SEQ ID NO: 643528 - DNA, 15 bp, Homo sapiens
ggctatatacttttg

SEQ ID NO: 643529 - DNA, 15 bp, Homo sapiens
gctatatacttttgt

SEQ ID NO: 643530 - DNA, 15 bp, Homo sapiens
ctatatacttttgta

SEQ ID NO: 643531 - DNA, 15 bp, Homo sapiens
tatatacttttgtaa

SEQ ID NO: 643532 - DNA, 15 bp, Homo sapiens
atatacttttgtaat

SEQ ID NO: 643533 - DNA, 15 bp, Homo sapiens
tatacttttgtaatg

SEQ ID NO: 643534 - DNA, 15 bp, Homo sapiens
atacttttgtaatgg

SEQ ID NO: 643535 - DNA, 15 bp, Homo sapiens
tacttttgtaatggc

SEQ ID NO: 643536 - DNA, 15 bp, Homo sapiens
acttttgtaatggct

SEQ ID NO: 643537 - DNA, 15 bp, Homo sapiens
cttttgtaatggctt

SEQ ID NO: 643538 - DNA, 15 bp, Homo sapiens
ttttgtaatggcttt

SEQ ID NO: 643539 - DNA, 15 bp, Homo sapiens
tttgtaatggctttg

SEQ ID NO: 643540 - DNA, 15 bp, Homo sapiens
ttgtaatggctttgt

SEQ ID NO: 643541 - DNA, 15 bp, Homo sapiens
tgtaatggctttgtt

SEQ ID NO: 643542 - DNA, 15 bp, Homo sapiens
gtaatggctttgttg

SEQ ID NO: 643543 - DNA, 15 bp, Homo sapiens
taatggctttgttga

SEQ ID NO: 643544 - DNA, 15 bp, Homo sapiens
aatggctttgttgag

SEQ ID NO: 643545 - DNA, 15 bp, Homo sapiens
atggctttgttgaga

SEQ ID NO: 643546 - DNA, 15 bp, Homo sapiens
tggctttgttgagat

SEQ ID NO: 643547 - DNA, 15 bp, Homo sapiens
ggctttgttgagata

SEQ ID NO: 643548 - DNA, 15 bp, Homo sapiens
gctttgttgagatac

SEQ ID NO: 643549 - DNA, 15 bp, Homo sapiens
ctttgttgagataca

SEQ ID NO: 643550 - DNA, 15 bp, Homo sapiens
tttgttgagatacaa

SEQ ID NO: 643551 - DNA, 15 bp, Homo sapiens
ttgttgagatacaat

SEQ ID NO: 643552 - DNA, 15 bp, Homo sapiens
tgttgagatacaatt

SEQ ID NO: 643553 - DNA, 15 bp, Homo sapiens
gttgagatacaattc

SEQ ID NO: 643554 - DNA, 15 bp, Homo sapiens
ttgagatacaattca

SEQ ID NO: 643555 - DNA, 15 bp, Homo sapiens
tgagatacaattcac

SEQ ID NO: 643556 - DNA, 15 bp, Homo sapiens
gagatacaattcaca

SEQ ID NO: 643557 - DNA, 15 bp, Homo sapiens
agatacaattcacat

SEQ ID NO: 643558 - DNA, 15 bp, Homo sapiens
gatacaattcacata

SEQ ID NO: 643559 - DNA, 15 bp, Homo sapiens
atacaattcacatac

SEQ ID NO: 643560 - DNA, 15 bp, Homo sapiens
tacaattcacatact

SEQ ID NO: 643561 - DNA, 15 bp, Homo sapiens
acaattcacatacta

SEQ ID NO: 643562 - DNA, 15 bp, Homo sapiens
caattcacatactat

SEQ ID NO: 643563 - DNA, 15 bp, Homo sapiens
aattcacatactata

SEQ ID NO: 643564 - DNA, 15 bp, Homo sapiens
attcacatactataa

SEQ ID NO: 643565 - DNA, 15 bp, Homo sapiens
ttcacatactataaa

SEQ ID NO: 643566 - DNA, 15 bp, Homo sapiens
tcacatactataaaa

SEQ ID NO: 643567 - DNA, 15 bp, Homo sapiens
cacatactataaaat

SEQ ID NO: 643568 - DNA, 15 bp, Homo sapiens
acatactataaaatt

SEQ ID NO: 643569 - DNA, 15 bp, Homo sapiens
catactataaaattc

SEQ ID NO: 643570 - DNA, 15 bp, Homo sapiens
atactataaaattca

SEQ ID NO: 643571 - DNA, 15 bp, Homo sapiens
tactataaaattcac

SEQ ID NO: 643572 - DNA, 15 bp, Homo sapiens
actataaaattcacc

SEQ ID NO: 643573 - DNA, 15 bp, Homo sapiens
ctataaaattcaccc

SEQ ID NO: 643574 - DNA, 15 bp, Homo sapiens
tataaaattcaccca

SEQ ID NO: 643575 - DNA, 15 bp, Homo sapiens
ataaaattcacccac

SEQ ID NO: 643576 - DNA, 15 bp, Homo sapiens
taaaattcacccact

SEQ ID NO: 643577 - DNA, 15 bp, Homo sapiens
aaaattcacccactc

SEQ ID NO: 643578 - DNA, 15 bp, Homo sapiens
aaattcacccactcg

SEQ ID NO: 643579 - DNA, 15 bp, Homo sapiens
aattcacccactcga

SEQ ID NO: 643580 - DNA, 15 bp, Homo sapiens
attcacccactcgaa

SEQ ID NO: 643581 - DNA, 15 bp, Homo sapiens
ttcacccactcgaag

SEQ ID NO: 643582 - DNA, 15 bp, Homo sapiens
tcacccactcgaagt

SEQ ID NO: 643583 - DNA, 15 bp, Homo sapiens
cacccactcgaagtg

SEQ ID NO: 643584 - DNA, 15 bp, Homo sapiens
acccactcgaagtgt

SEQ ID NO: 643585 - DNA, 15 bp, Homo sapiens
cccactcgaagtgta

SEQ ID NO: 643586 - DNA, 15 bp, Homo sapiens
ccactcgaagtgtac

SEQ ID NO: 643587 - DNA, 15 bp, Homo sapiens
cactcgaagtgtaca

SEQ ID NO: 643588 - DNA, 15 bp, Homo sapiens
actcgaagtgtacaa

SEQ ID NO: 643589 - DNA, 15 bp, Homo sapiens
ctcgaagtgtacaat

SEQ ID NO: 643590 - DNA, 15 bp, Homo sapiens
tcgaagtgtacaatt

SEQ ID NO: 643591 - DNA, 15 bp, Homo sapiens
cgaagtgtacaatta

SEQ ID NO: 643592 - DNA, 15 bp, Homo sapiens
gaagtgtacaattag

SEQ ID NO: 643593 - DNA, 15 bp, Homo sapiens
aagtgtacaattaga

SEQ ID NO: 643594 - DNA, 15 bp, Homo sapiens
agtgtacaattagat

SEQ ID NO: 643595 - DNA, 15 bp, Homo sapiens
gtgtacaattagatg

SEQ ID NO: 643596 - DNA, 15 bp, Homo sapiens
tgtacaattagatgt

SEQ ID NO: 643597 - DNA, 15 bp, Homo sapiens
gtacaattagatgtt

SEQ ID NO: 643598 - DNA, 15 bp, Homo sapiens
tacaattagatgttt

SEQ ID NO: 643599 - DNA, 15 bp, Homo sapiens
acaattagatgtttt

SEQ ID NO: 643600 - DNA, 15 bp, Homo sapiens
caattagatgttttt

SEQ ID NO: 643601 - DNA, 15 bp, Homo sapiens
aattagatgtttttt

SEQ ID NO: 643602 - DNA, 15 bp, Homo sapiens
attagatgtttttta

SEQ ID NO: 643603 - DNA, 15 bp, Homo sapiens
ttagatgttttttag

SEQ ID NO: 643604 - DNA, 15 bp, Homo sapiens
tagatgttttttagt

SEQ ID NO: 643605 - DNA, 15 bp, Homo sapiens
agatgttttttagta

SEQ ID NO: 643606 - DNA, 15 bp, Homo sapiens
gatgttttttagtat

SEQ ID NO: 643607 - DNA, 15 bp, Homo sapiens
atgttttttagtata

SEQ ID NO: 643608 - DNA, 15 bp, Homo sapiens
tgttttttagtatat

SEQ ID NO: 643609 - DNA, 15 bp, Homo sapiens
gttttttagtatatt

SEQ ID NO: 643610 - DNA, 15 bp, Homo sapiens
ttttttagtatattt

SEQ ID NO: 643611 - DNA, 15 bp, Homo sapiens
tttttagtatattta

SEQ ID NO: 643612 - DNA, 15 bp, Homo sapiens
ttttagtatatttac

SEQ ID NO: 643613 - DNA, 15 bp, Homo sapiens
tttagtatatttaca

SEQ ID NO: 643614 - DNA, 15 bp, Homo sapiens
ttagtatatttacag

SEQ ID NO: 643615 - DNA, 15 bp, Homo sapiens
tagtatatttacaga

SEQ ID NO: 643616 - DNA, 15 bp, Homo sapiens
agtatatttacagag

SEQ ID NO: 643617 - DNA, 15 bp, Homo sapiens
gtatatttacagagt

SEQ ID NO: 643618 - DNA, 15 bp, Homo sapiens
tatatttacagagtt

SEQ ID NO: 643619 - DNA, 15 bp, Homo sapiens
atatttacagagttg

SEQ ID NO: 643620 - DNA, 15 bp, Homo sapiens
tatttacagagttgt

SEQ ID NO: 643621 - DNA, 15 bp, Homo sapiens
atttacagagttgtg

SEQ ID NO: 643622 - DNA, 15 bp, Homo sapiens
tttacagagttgtgc

SEQ ID NO: 643623 - DNA, 15 bp, Homo sapiens
ttacagagttgtgca

SEQ ID NO: 643624 - DNA, 15 bp, Homo sapiens
tacagagttgtgcat

SEQ ID NO: 643625 - DNA, 15 bp, Homo sapiens
acagagttgtgcatt

SEQ ID NO: 643626 - DNA, 15 bp, Homo sapiens
cagagttgtgcattc

SEQ ID NO: 643627 - DNA, 15 bp, Homo sapiens
agagttgtgcattca

SEQ ID NO: 643628 - DNA, 15 bp, Homo sapiens
gagttgtgcattcac

SEQ ID NO: 643629 - DNA, 15 bp, Homo sapiens
agttgtgcattcact

SEQ ID NO: 643630 - DNA, 15 bp, Homo sapiens
gttgtgcattcactg

SEQ ID NO: 643631 - DNA, 15 bp, Homo sapiens
ttgtgcattcactgc

SEQ ID NO: 643632 - DNA, 15 bp, Homo sapiens
tgtgcattcactgcc

SEQ ID NO: 643633 - DNA, 15 bp, Homo sapiens
gtgcattcactgcca

SEQ ID NO: 643634 - DNA, 15 bp, Homo sapiens
tgcattcactgccac

SEQ ID NO: 643635 - DNA, 15 bp, Homo sapiens
gcattcactgccaca

SEQ ID NO: 643636 - DNA, 15 bp, Homo sapiens
cattcactgccacag

SEQ ID NO: 643637 - DNA, 15 bp, Homo sapiens
attcactgccacagt

SEQ ID NO: 643638 - DNA, 15 bp, Homo sapiens
ttcactgccacagtc

SEQ ID NO: 643639 - DNA, 15 bp, Homo sapiens
tcactgccacagtca

SEQ ID NO: 643640 - DNA, 15 bp, Homo sapiens
cactgccacagtcaa

SEQ ID NO: 643641 - DNA, 15 bp, Homo sapiens
actgccacagtcaat

SEQ ID NO: 643642 - DNA, 15 bp, Homo sapiens
ctgccacagtcaatt

SEQ ID NO: 643643 - DNA, 15 bp, Homo sapiens
tgccacagtcaattt

SEQ ID NO: 643644 - DNA, 15 bp, Homo sapiens
gccacagtcaatttt

SEQ ID NO: 643645 - DNA, 15 bp, Homo sapiens
ccacagtcaatttta

SEQ ID NO: 643646 - DNA, 15 bp, Homo sapiens
cacagtcaattttag

SEQ ID NO: 643647 - DNA, 15 bp, Homo sapiens
acagtcaattttaga

SEQ ID NO: 643648 - DNA, 15 bp, Homo sapiens
cagtcaattttagaa

SEQ ID NO: 643649 - DNA, 15 bp, Homo sapiens
agtcaattttagaac

SEQ ID NO: 643650 - DNA, 15 bp, Homo sapiens
gtcaattttagaaca

SEQ ID NO: 643651 - DNA, 15 bp, Homo sapiens
tcaattttagaacat

SEQ ID NO: 643652 - DNA, 15 bp, Homo sapiens
caattttagaacatt

SEQ ID NO: 643653 - DNA, 15 bp, Homo sapiens
aattttagaacattt

SEQ ID NO: 643654 - DNA, 15 bp, Homo sapiens
attttagaacatttt

SEQ ID NO: 643655 - DNA, 15 bp, Homo sapiens
ttttagaacattttc

SEQ ID NO: 643656 - DNA, 15 bp, Homo sapiens
tagaacattttcttt

SEQ ID NO: 643657 - DNA, 15 bp, Homo sapiens
agaacattttctttt

SEQ ID NO: 643658 - DNA, 15 bp, Homo sapiens
gaacattttcttttt

SEQ ID NO: 643659 - DNA, 15 bp, Homo sapiens
aacattttctttttt

SEQ ID NO: 643660 - DNA, 15 bp, Homo sapiens
acattttcttttttt

SEQ ID NO: 643661 - DNA, 15 bp, Homo sapiens
cattttctttttttt

SEQ ID NO: 643662 - DNA, 15 bp, Homo sapiens
attttcttttttttc

SEQ ID NO: 643663 - DNA, 15 bp, Homo sapiens
ttttcttttttttcc

SEQ ID NO: 643664 - DNA, 15 bp, Homo sapiens
tttcttttttttcct

SEQ ID NO: 643665 - DNA, 15 bp, Homo sapiens
ttcttttttttcctt

SEQ ID NO: 643666 - DNA, 15 bp, Homo sapiens
tcttttttttccttt

SEQ ID NO: 643667 - DNA, 15 bp, Homo sapiens
cttttttttcctttt

SEQ ID NO: 643668 - DNA, 15 bp, Homo sapiens
ttttttttccttttt

SEQ ID NO: 643669 - DNA, 15 bp, Homo sapiens
tttttttcctttttt

SEQ ID NO: 643670 - DNA, 15 bp, Homo sapiens
ttttttccttttttt

SEQ ID NO: 643671 - DNA, 15 bp, Homo sapiens
tttttcctttttttt

SEQ ID NO: 643672 - DNA, 15 bp, Homo sapiens
ttttcctttttttta

SEQ ID NO: 643673 - DNA, 15 bp, Homo sapiens
tttccttttttttaa

SEQ ID NO: 643674 - DNA, 15 bp, Homo sapiens
ttccttttttttaat

SEQ ID NO: 643675 - DNA, 15 bp, Homo sapiens
tccttttttttaatt

SEQ ID NO: 643676 - DNA, 15 bp, Homo sapiens
ccttttttttaatta

SEQ ID NO: 643677 - DNA, 15 bp, Homo sapiens
cttttttttaattat

SEQ ID NO: 643678 - DNA, 15 bp, Homo sapiens
ttttttttaattata

SEQ ID NO: 643679 - DNA, 15 bp, Homo sapiens
tttttttaattatac

SEQ ID NO: 643680 - DNA, 15 bp, Homo sapiens
ttttttaattatact

SEQ ID NO: 643681 - DNA, 15 bp, Homo sapiens
tttttaattatactt

SEQ ID NO: 643682 - DNA, 15 bp, Homo sapiens
ttttaattatacttt

SEQ ID NO: 643683 - DNA, 15 bp, Homo sapiens
tttaattatacttta

SEQ ID NO: 643684 - DNA, 15 bp, Homo sapiens
ttaattatactttaa

SEQ ID NO: 643685 - DNA, 15 bp, Homo sapiens
taattatactttaag

SEQ ID NO: 643686 - DNA, 15 bp, Homo sapiens
aattatactttaagt

SEQ ID NO: 643687 - DNA, 15 bp, Homo sapiens
attatactttaagtt

SEQ ID NO: 643688 - DNA, 15 bp, Homo sapiens
ttatactttaagttt

SEQ ID NO: 643689 - DNA, 15 bp, Homo sapiens
tatactttaagtttt

SEQ ID NO: 643690 - DNA, 15 bp, Homo sapiens
atactttaagtttta

SEQ ID NO: 643691 - DNA, 15 bp, Homo sapiens
tactttaagttttag

SEQ ID NO: 643692 - DNA, 15 bp, Homo sapiens
actttaagttttagg

SEQ ID NO: 643693 - DNA, 15 bp, Homo sapiens
ctttaagttttaggg

SEQ ID NO: 643694 - DNA, 15 bp, Homo sapiens
tttaagttttagggt

SEQ ID NO: 643695 - DNA, 15 bp, Homo sapiens
ttaagttttagggta

SEQ ID NO: 643696 - DNA, 15 bp, Homo sapiens
taagttttagggtac

SEQ ID NO: 643697 - DNA, 15 bp, Homo sapiens
aagttttagggtaca

SEQ ID NO: 643698 - DNA, 15 bp, Homo sapiens
agttttagggtacat

SEQ ID NO: 643699 - DNA, 15 bp, Homo sapiens
gtagggggcagttga

SEQ ID NO: 643700 - DNA, 15 bp, Homo sapiens
tagggggcagttgag

SEQ ID NO: 643701 - DNA, 15 bp, Homo sapiens
agggggcagttgagt

SEQ ID NO: 643702 - DNA, 15 bp, Homo sapiens
gggggcagttgagta

SEQ ID NO: 643703 - DNA, 15 bp, Homo sapiens
ggggcagttgagtag

SEQ ID NO: 643704 - DNA, 15 bp, Homo sapiens
gggcagttgagtagc

SEQ ID NO: 643705 - DNA, 15 bp, Homo sapiens
ggcagttgagtagct

SEQ ID NO: 643706 - DNA, 15 bp, Homo sapiens
gcagttgagtagctt

SEQ ID NO: 643707 - DNA, 15 bp, Homo sapiens
cagttgagtagcttg

SEQ ID NO: 643708 - DNA, 15 bp, Homo sapiens
agttgagtagcttga

SEQ ID NO: 643709 - DNA, 15 bp, Homo sapiens
gttgagtagcttgaa

SEQ ID NO: 643710 - DNA, 15 bp, Homo sapiens
ttgagtagcttgaag

SEQ ID NO: 643711 - DNA, 15 bp, Homo sapiens
tgagtagcttgaaga

SEQ ID NO: 643712 - DNA, 15 bp, Homo sapiens
gagtagcttgaagaa

SEQ ID NO: 643713 - DNA, 15 bp, Homo sapiens
agtagcttgaagaat

SEQ ID NO: 643714 - DNA, 15 bp, Homo sapiens
gtagcttgaagaatg

SEQ ID NO: 643715 - DNA, 15 bp, Homo sapiens
tagcttgaagaatgt

SEQ ID NO: 643716 - DNA, 15 bp, Homo sapiens
agcttgaagaatgtg

SEQ ID NO: 643717 - DNA, 15 bp, Homo sapiens
gcttgaagaatgtgg

SEQ ID NO: 643718 - DNA, 15 bp, Homo sapiens
cttgaagaatgtggg

SEQ ID NO: 643719 - DNA, 15 bp, Homo sapiens
ttgaagaatgtgggg

SEQ ID NO: 643720 - DNA, 15 bp, Homo sapiens
tgaagaatgtggggc

SEQ ID NO: 643721 - DNA, 15 bp, Homo sapiens
gaagaatgtggggca

SEQ ID NO: 643722 - DNA, 15 bp, Homo sapiens
aagaatgtggggcag

SEQ ID NO: 643723 - DNA, 15 bp, Homo sapiens
agaatgtggggcagg

SEQ ID NO: 643724 - DNA, 15 bp, Homo sapiens
gaatgtggggcaggg

SEQ ID NO: 643725 - DNA, 15 bp, Homo sapiens
aatgtggggcagggg

SEQ ID NO: 643726 - DNA, 15 bp, Homo sapiens
atgtggggcaggggg

SEQ ID NO: 643727 - DNA, 15 bp, Homo sapiens
tgtggggcaggggga

SEQ ID NO: 643728 - DNA, 15 bp, Homo sapiens
gtggggcagggggag

SEQ ID NO: 643729 - DNA, 15 bp, Homo sapiens
tggggcagggggaga

SEQ ID NO: 643730 - DNA, 15 bp, Homo sapiens
ggggcagggggagat

SEQ ID NO: 643731 - DNA, 15 bp, Homo sapiens
gggcagggggagata

SEQ ID NO: 643732 - DNA, 15 bp, Homo sapiens
ggcagggggagatag

SEQ ID NO: 643733 - DNA, 15 bp, Homo sapiens
gcagggggagataga

SEQ ID NO: 643734 - DNA, 15 bp, Homo sapiens
cagggggagatagag

SEQ ID NO: 643735 - DNA, 15 bp, Homo sapiens
agggggagatagagg

SEQ ID NO: 643736 - DNA, 15 bp, Homo sapiens
gggggagatagagga

SEQ ID NO: 643737 - DNA, 15 bp, Homo sapiens
ggggagatagaggaa

SEQ ID NO: 643738 - DNA, 15 bp, Homo sapiens
gggagatagaggaaa

SEQ ID NO: 643739 - DNA, 15 bp, Homo sapiens
ggagatagaggaaag

SEQ ID NO: 643740 - DNA, 15 bp, Homo sapiens
gagatagaggaaagc

SEQ ID NO: 643741 - DNA, 15 bp, Homo sapiens
agatagaggaaagca

SEQ ID NO: 643742 - DNA, 15 bp, Homo sapiens
gatagaggaaagcaa

SEQ ID NO: 643743 - DNA, 15 bp, Homo sapiens
atagaggaaagcaaa

SEQ ID NO: 643744 - DNA, 15 bp, Homo sapiens
tagaggaaagcaaaa

SEQ ID NO: 643745 - DNA, 15 bp, Homo sapiens
agaggaaagcaaaat

SEQ ID NO: 643746 - DNA, 15 bp, Homo sapiens
gaggaaagcaaaatt

SEQ ID NO: 643747 - DNA, 15 bp, Homo sapiens
aggaaagcaaaattt

SEQ ID NO: 643748 - DNA, 15 bp, Homo sapiens
ggaaagcaaaattta

SEQ ID NO: 643749 - DNA, 15 bp, Homo sapiens
gaaagcaaaatttac

SEQ ID NO: 643750 - DNA, 15 bp, Homo sapiens
aaagcaaaatttact

SEQ ID NO: 643751 - DNA, 15 bp, Homo sapiens
aagcaaaatttactt

SEQ ID NO: 643752 - DNA, 15 bp, Homo sapiens
agcaaaatttacttt

SEQ ID NO: 643753 - DNA, 15 bp, Homo sapiens
gcaaaatttactttc

SEQ ID NO: 643754 - DNA, 15 bp, Homo sapiens
caaaatttactttct

SEQ ID NO: 643755 - DNA, 15 bp, Homo sapiens
aaaatttactttctt

SEQ ID NO: 643756 - DNA, 15 bp, Homo sapiens
aaatttactttcttt

SEQ ID NO: 643757 - DNA, 15 bp, Homo sapiens
aatttactttctttt

SEQ ID NO: 643758 - DNA, 15 bp, Homo sapiens
atttactttcttttt

SEQ ID NO: 643759 - DNA, 15 bp, Homo sapiens
tttactttctttttc

SEQ ID NO: 643760 - DNA, 15 bp, Homo sapiens
ttactttctttttct

SEQ ID NO: 643761 - DNA, 15 bp, Homo sapiens
tactttctttttctc

SEQ ID NO: 643762 - DNA, 15 bp, Homo sapiens
actttctttttctcg

SEQ ID NO: 643763 - DNA, 15 bp, Homo sapiens
ctttctttttctcgc

SEQ ID NO: 643764 - DNA, 15 bp, Homo sapiens
tttctttttctcgca

SEQ ID NO: 643765 - DNA, 15 bp, Homo sapiens
ttctttttctcgcat

SEQ ID NO: 643766 - DNA, 15 bp, Homo sapiens
tctttttctcgcatt

SEQ ID NO: 643767 - DNA, 15 bp, Homo sapiens
ctttttctcgcattg

SEQ ID NO: 643768 - DNA, 15 bp, Homo sapiens
tttttctcgcattgc

SEQ ID NO: 643769 - DNA, 15 bp, Homo sapiens
ttttctcgcattgct

SEQ ID NO: 643770 - DNA, 15 bp, Homo sapiens
tttctcgcattgcta

SEQ ID NO: 643771 - DNA, 15 bp, Homo sapiens
ttctcgcattgctaa

SEQ ID NO: 643772 - DNA, 15 bp, Homo sapiens
tctcgcattgctaaa

SEQ ID NO: 643773 - DNA, 15 bp, Homo sapiens
ctcgcattgctaaag

SEQ ID NO: 643774 - DNA, 15 bp, Homo sapiens
tcgcattgctaaagt

SEQ ID NO: 643775 - DNA, 15 bp, Homo sapiens
cgcattgctaaagtc

SEQ ID NO: 643776 - DNA, 15 bp, Homo sapiens
gcattgctaaagtct

SEQ ID NO: 643777 - DNA, 15 bp, Homo sapiens
cattgctaaagtctc

SEQ ID NO: 643778 - DNA, 15 bp, Homo sapiens
attgctaaagtctca

SEQ ID NO: 643779 - DNA, 15 bp, Homo sapiens
ttgctaaagtctcaa

SEQ ID NO: 643780 - DNA, 15 bp, Homo sapiens
tgctaaagtctcaac

SEQ ID NO: 643781 - DNA, 15 bp, Homo sapiens
gctaaagtctcaaca

SEQ ID NO: 643782 - DNA, 15 bp, Homo sapiens
ctaaagtctcaacaa

SEQ ID NO: 643783 - DNA, 15 bp, Homo sapiens
taaagtctcaacaaa

SEQ ID NO: 643784 - DNA, 15 bp, Homo sapiens
aaagtctcaacaaac

SEQ ID NO: 643785 - DNA, 15 bp, Homo sapiens
aagtctcaacaaact

SEQ ID NO: 643786 - DNA, 15 bp, Homo sapiens
agtctcaacaaactg

SEQ ID NO: 643787 - DNA, 15 bp, Homo sapiens
gtctcaacaaactgc

SEQ ID NO: 643788 - DNA, 15 bp, Homo sapiens
tctcaacaaactgca

SEQ ID NO: 643789 - DNA, 15 bp, Homo sapiens
ctcaacaaactgcat

SEQ ID NO: 643790 - DNA, 15 bp, Homo sapiens
tcaacaaactgcatt

SEQ ID NO: 643791 - DNA, 15 bp, Homo sapiens
caacaaactgcattc

SEQ ID NO: 643792 - DNA, 15 bp, Homo sapiens
aacaaactgcattcc

SEQ ID NO: 643793 - DNA, 15 bp, Homo sapiens
acaaactgcattcca

SEQ ID NO: 643794 - DNA, 15 bp, Homo sapiens
caaactgcattccaa

SEQ ID NO: 643795 - DNA, 15 bp, Homo sapiens
aaactgcattccaac

SEQ ID NO: 643796 - DNA, 15 bp, Homo sapiens
aactgcattccaacc

SEQ ID NO: 643797 - DNA, 15 bp, Homo sapiens
actgcattccaaccc

SEQ ID NO: 643798 - DNA, 15 bp, Homo sapiens
ctgcattccaaccca

SEQ ID NO: 643799 - DNA, 15 bp, Homo sapiens
tgcattccaacccaa

SEQ ID NO: 643800 - DNA, 15 bp, Homo sapiens
gcattccaacccaaa

SEQ ID NO: 643801 - DNA, 15 bp, Homo sapiens
cattccaacccaaat

SEQ ID NO: 643802 - DNA, 15 bp, Homo sapiens
attccaacccaaatt

SEQ ID NO: 643803 - DNA, 15 bp, Homo sapiens
ttccaacccaaattc

SEQ ID NO: 643804 - DNA, 15 bp, Homo sapiens
tccaacccaaattct

SEQ ID NO: 643805 - DNA, 15 bp, Homo sapiens
ccaacccaaattctg

SEQ ID NO: 643806 - DNA, 15 bp, Homo sapiens
caacccaaattctga

SEQ ID NO: 643807 - DNA, 15 bp, Homo sapiens
aacccaaattctgaa

SEQ ID NO: 643808 - DNA, 15 bp, Homo sapiens
acccaaattctgaaa

SEQ ID NO: 643809 - DNA, 15 bp, Homo sapiens
cccaaattctgaaag

SEQ ID NO: 643810 - DNA, 15 bp, Homo sapiens
ccaaattctgaaagg

SEQ ID NO: 643811 - DNA, 15 bp, Homo sapiens
caaattctgaaaggc

SEQ ID NO: 643812 - DNA, 15 bp, Homo sapiens
aaattctgaaaggct

SEQ ID NO: 643813 - DNA, 15 bp, Homo sapiens
aattctgaaaggctg

SEQ ID NO: 643814 - DNA, 15 bp, Homo sapiens
attctgaaaggctga

SEQ ID NO: 643815 - DNA, 15 bp, Homo sapiens
ttctgaaaggctgaa

SEQ ID NO: 643816 - DNA, 15 bp, Homo sapiens
tctgaaaggctgaat

SEQ ID NO: 643817 - DNA, 15 bp, Homo sapiens
ctgaaaggctgaatc

SEQ ID NO: 643818 - DNA, 15 bp, Homo sapiens
tgaaaggctgaatct

SEQ ID NO: 643819 - DNA, 15 bp, Homo sapiens
gaaaggctgaatcta

SEQ ID NO: 643820 - DNA, 15 bp, Homo sapiens
aaaggctgaatctag

SEQ ID NO: 643821 - DNA, 15 bp, Homo sapiens
aaggctgaatctaga

SEQ ID NO: 643822 - DNA, 15 bp, Homo sapiens
aggctgaatctagag

SEQ ID NO: 643823 - DNA, 15 bp, Homo sapiens
ggctgaatctagagc

SEQ ID NO: 643824 - DNA, 15 bp, Homo sapiens
gctgaatctagagca

SEQ ID NO: 643825 - DNA, 15 bp, Homo sapiens
ctgaatctagagcat

SEQ ID NO: 643826 - DNA, 15 bp, Homo sapiens
tgaatctagagcata

SEQ ID NO: 643827 - DNA, 15 bp, Homo sapiens
gaatctagagcatat

SEQ ID NO: 643828 - DNA, 15 bp, Homo sapiens
aatctagagcatatt

SEQ ID NO: 643829 - DNA, 15 bp, Homo sapiens
atctagagcatattt

SEQ ID NO: 643830 - DNA, 15 bp, Homo sapiens
tctagagcatatttt

SEQ ID NO: 643831 - DNA, 15 bp, Homo sapiens
ctagagcatatttta

SEQ ID NO: 643832 - DNA, 15 bp, Homo sapiens
tagagcatattttag

SEQ ID NO: 643833 - DNA, 15 bp, Homo sapiens
agagcatattttaga

SEQ ID NO: 643834 - DNA, 15 bp, Homo sapiens
gagcatattttagat

SEQ ID NO: 643835 - DNA, 15 bp, Homo sapiens
agcatattttagatt

SEQ ID NO: 643836 - DNA, 15 bp, Homo sapiens
gcatattttagattt

SEQ ID NO: 643837 - DNA, 15 bp, Homo sapiens
catattttagattta

SEQ ID NO: 643838 - DNA, 15 bp, Homo sapiens
atattttagatttaa

SEQ ID NO: 643839 - DNA, 15 bp, Homo sapiens
tattttagatttaag

SEQ ID NO: 643840 - DNA, 15 bp, Homo sapiens
attttagatttaagt

SEQ ID NO: 643841 - DNA, 15 bp, Homo sapiens
ttttagatttaagtg

SEQ ID NO: 643842 - DNA, 15 bp, Homo sapiens
tttagatttaagtgt

SEQ ID NO: 643843 - DNA, 15 bp, Homo sapiens
ttagatttaagtgtt

SEQ ID NO: 643844 - DNA, 15 bp, Homo sapiens
tagatttaagtgttg

SEQ ID NO: 643845 - DNA, 15 bp, Homo sapiens
agatttaagtgttgg

SEQ ID NO: 643846 - DNA, 15 bp, Homo sapiens
gatttaagtgttgga

SEQ ID NO: 643847 - DNA, 15 bp, Homo sapiens
atttaagtgttggaa

SEQ ID NO: 643848 - DNA, 15 bp, Homo sapiens
tttaagtgttggaag

SEQ ID NO: 643849 - DNA, 15 bp, Homo sapiens
ttaagtgttggaagg

SEQ ID NO: 643850 - DNA, 15 bp, Homo sapiens
taagtgttggaaggg

SEQ ID NO: 643851 - DNA, 15 bp, Homo sapiens
aagtgttggaagggc

SEQ ID NO: 643852 - DNA, 15 bp, Homo sapiens
agtgttggaagggct

SEQ ID NO: 643853 - DNA, 15 bp, Homo sapiens
gtgttggaagggctt

SEQ ID NO: 643854 - DNA, 15 bp, Homo sapiens
tgttggaagggcttg

SEQ ID NO: 643855 - DNA, 15 bp, Homo sapiens
gttggaagggcttgg

SEQ ID NO: 643856 - DNA, 15 bp, Homo sapiens
ttggaagggcttgga

SEQ ID NO: 643857 - DNA, 15 bp, Homo sapiens
tggaagggcttggag

SEQ ID NO: 643858 - DNA, 15 bp, Homo sapiens
ggaagggcttggagg

SEQ ID NO: 643859 - DNA, 15 bp, Homo sapiens
gaagggcttggaggt

SEQ ID NO: 643860 - DNA, 15 bp, Homo sapiens
aagggcttggaggta

SEQ ID NO: 643861 - DNA, 15 bp, Homo sapiens
agggcttggaggtac

SEQ ID NO: 643862 - DNA, 15 bp, Homo sapiens
gggcttggaggtact

SEQ ID NO: 643863 - DNA, 15 bp, Homo sapiens
ggcttggaggtactt

SEQ ID NO: 643864 - DNA, 15 bp, Homo sapiens
gcttggaggtactta

SEQ ID NO: 643865 - DNA, 15 bp, Homo sapiens
cttggaggtacttaa

SEQ ID NO: 643866 - DNA, 15 bp, Homo sapiens
ttggaggtacttaac

SEQ ID NO: 643867 - DNA, 15 bp, Homo sapiens
tggaggtacttaact

SEQ ID NO: 643868 - DNA, 15 bp, Homo sapiens
ggaggtacttaactc

SEQ ID NO: 643869 - DNA, 15 bp, Homo sapiens
gaggtacttaactct

SEQ ID NO: 643870 - DNA, 15 bp, Homo sapiens
aggtacttaactctt

SEQ ID NO: 643871 - DNA, 15 bp, Homo sapiens
ggtacttaactctta

SEQ ID NO: 643872 - DNA, 15 bp, Homo sapiens
gtacttaactcttat

SEQ ID NO: 643873 - DNA, 15 bp, Homo sapiens
tacttaactcttatt

SEQ ID NO: 643874 - DNA, 15 bp, Homo sapiens
acttaactcttatta

SEQ ID NO: 643875 - DNA, 15 bp, Homo sapiens
cttaactcttattaa

SEQ ID NO: 643876 - DNA, 15 bp, Homo sapiens
ttaactcttattaag

SEQ ID NO: 643877 - DNA, 15 bp, Homo sapiens
taactcttattaaga

SEQ ID NO: 643878 - DNA, 15 bp, Homo sapiens
aactcttattaagaa

SEQ ID NO: 643879 - DNA, 15 bp, Homo sapiens
actcttattaagaaa

SEQ ID NO: 643880 - DNA, 15 bp, Homo sapiens
ctcttattaagaaag

SEQ ID NO: 643881 - DNA, 15 bp, Homo sapiens
tcttattaagaaaga

SEQ ID NO: 643882 - DNA, 15 bp, Homo sapiens
cttattaagaaagaa

SEQ ID NO: 643883 - DNA, 15 bp, Homo sapiens
ttattaagaaagaaa

SEQ ID NO: 643884 - DNA, 15 bp, Homo sapiens
tattaagaaagaaaa

SEQ ID NO: 643885 - DNA, 15 bp, Homo sapiens
attaagaaagaaaaa

SEQ ID NO: 643886 - DNA, 15 bp, Homo sapiens
ttaagaaagaaaaat

SEQ ID NO: 643887 - DNA, 15 bp, Homo sapiens
taagaaagaaaaata

SEQ ID NO: 643888 - DNA, 15 bp, Homo sapiens
aagaaagaaaaatat

SEQ ID NO: 643889 - DNA, 15 bp, Homo sapiens
agaaagaaaaatatt

SEQ ID NO: 643890 - DNA, 15 bp, Homo sapiens
gaaagaaaaatattt

SEQ ID NO: 643891 - DNA, 15 bp, Homo sapiens
aaagaaaaatatttt

SEQ ID NO: 643892 - DNA, 15 bp, Homo sapiens
aagaaaaatatttta

SEQ ID NO: 643893 - DNA, 15 bp, Homo sapiens
agaaaaatattttat

SEQ ID NO: 643894 - DNA, 15 bp, Homo sapiens
gaaaaatattttatc

SEQ ID NO: 643895 - DNA, 15 bp, Homo sapiens
aaaaatattttatct

SEQ ID NO: 643896 - DNA, 15 bp, Homo sapiens
aaaatattttatctt

SEQ ID NO: 643897 - DNA, 15 bp, Homo sapiens
aaatattttatcttt

SEQ ID NO: 643898 - DNA, 15 bp, Homo sapiens
aatattttatctttt

SEQ ID NO: 643899 - DNA, 15 bp, Homo sapiens
atattttatcttttg

SEQ ID NO: 643900 - DNA, 15 bp, Homo sapiens
tattttatcttttgc

SEQ ID NO: 643901 - DNA, 15 bp, Homo sapiens
attttatcttttgcc

SEQ ID NO: 643902 - DNA, 15 bp, Homo sapiens
ttttatcttttgcct

SEQ ID NO: 643903 - DNA, 15 bp, Homo sapiens
tttatcttttgcctt

SEQ ID NO: 643904 - DNA, 15 bp, Homo sapiens
ttatcttttgccttc

SEQ ID NO: 643905 - DNA, 15 bp, Homo sapiens
tatcttttgccttct

SEQ ID NO: 643906 - DNA, 15 bp, Homo sapiens
atcttttgccttctt

SEQ ID NO: 643907 - DNA, 15 bp, Homo sapiens
tcttttgccttcttt

SEQ ID NO: 643908 - DNA, 15 bp, Homo sapiens
cttttgccttctttt

SEQ ID NO: 643909 - DNA, 15 bp, Homo sapiens
ttttgccttcttttg

SEQ ID NO: 643910 - DNA, 15 bp, Homo sapiens
tttgccttcttttgt

SEQ ID NO: 643911 - DNA, 15 bp, Homo sapiens
ttgccttcttttgta

SEQ ID NO: 643912 - DNA, 15 bp, Homo sapiens
tgccttcttttgtag

SEQ ID NO: 643913 - DNA, 15 bp, Homo sapiens
gccttcttttgtaga

SEQ ID NO: 643914 - DNA, 15 bp, Homo sapiens
ccttcttttgtagaa

SEQ ID NO: 643915 - DNA, 15 bp, Homo sapiens
cttcttttgtagaaa

SEQ ID NO: 643916 - DNA, 15 bp, Homo sapiens
ttcttttgtagaaaa

SEQ ID NO: 643917 - DNA, 15 bp, Homo sapiens
tcttttgtagaaaaa

SEQ ID NO: 643918 - DNA, 15 bp, Homo sapiens
cttttgtagaaaaat

SEQ ID NO: 643919 - DNA, 15 bp, Homo sapiens
ttttgtagaaaaata

SEQ ID NO: 643920 - DNA, 15 bp, Homo sapiens
tttgtagaaaaataa

SEQ ID NO: 643921 - DNA, 15 bp, Homo sapiens
ttgtagaaaaataat

SEQ ID NO: 643922 - DNA, 15 bp, Homo sapiens
tgtagaaaaataatg

SEQ ID NO: 643923 - DNA, 15 bp, Homo sapiens
gtagaaaaataatga

SEQ ID NO: 643924 - DNA, 15 bp, Homo sapiens
tagaaaaataatgaa

SEQ ID NO: 643925 - DNA, 15 bp, Homo sapiens
agaaaaataatgaat

SEQ ID NO: 643926 - DNA, 15 bp, Homo sapiens
gaaaaataatgaatt

SEQ ID NO: 643927 - DNA, 15 bp, Homo sapiens
aaaaataatgaattc

SEQ ID NO: 643928 - DNA, 15 bp, Homo sapiens
aaaataatgaattcc

SEQ ID NO: 643929 - DNA, 15 bp, Homo sapiens
aaataatgaattcct

SEQ ID NO: 643930 - DNA, 15 bp, Homo sapiens
aataatgaattcctt

SEQ ID NO: 643931 - DNA, 15 bp, Homo sapiens
ataatgaattccttc

SEQ ID NO: 643932 - DNA, 15 bp, Homo sapiens
taatgaattccttcc

SEQ ID NO: 643933 - DNA, 15 bp, Homo sapiens
aatgaattccttccc

SEQ ID NO: 643934 - DNA, 15 bp, Homo sapiens
atgaattccttccca

SEQ ID NO: 643935 - DNA, 15 bp, Homo sapiens
tgaattccttcccat

SEQ ID NO: 643936 - DNA, 15 bp, Homo sapiens
gaattccttcccatt

SEQ ID NO: 643937 - DNA, 15 bp, Homo sapiens
aattccttcccattc

SEQ ID NO: 643938 - DNA, 15 bp, Homo sapiens
attccttcccattca

SEQ ID NO: 643939 - DNA, 15 bp, Homo sapiens
ttccttcccattcat

SEQ ID NO: 643940 - DNA, 15 bp, Homo sapiens
tccttcccattcatt

SEQ ID NO: 643941 - DNA, 15 bp, Homo sapiens
ccttcccattcattc

SEQ ID NO: 643942 - DNA, 15 bp, Homo sapiens
cttcccattcattca

SEQ ID NO: 643943 - DNA, 15 bp, Homo sapiens
ttcccattcattcaa

SEQ ID NO: 643944 - DNA, 15 bp, Homo sapiens
tcccattcattcaag

SEQ ID NO: 643945 - DNA, 15 bp, Homo sapiens
cccattcattcaaga

SEQ ID NO: 643946 - DNA, 15 bp, Homo sapiens
ccattcattcaagaa

SEQ ID NO: 643947 - DNA, 15 bp, Homo sapiens
cattcattcaagaat

SEQ ID NO: 643948 - DNA, 15 bp, Homo sapiens
attcattcaagaatt

SEQ ID NO: 643949 - DNA, 15 bp, Homo sapiens
ttcattcaagaattc

SEQ ID NO: 643950 - DNA, 15 bp, Homo sapiens
tcattcaagaattcc

SEQ ID NO: 643951 - DNA, 15 bp, Homo sapiens
cattcaagaattcca

SEQ ID NO: 643952 - DNA, 15 bp, Homo sapiens
attcaagaattccac

SEQ ID NO: 643953 - DNA, 15 bp, Homo sapiens
ttcaagaattccaca

SEQ ID NO: 643954 - DNA, 15 bp, Homo sapiens
tcaagaattccacac

SEQ ID NO: 643955 - DNA, 15 bp, Homo sapiens
caagaattccacaca

SEQ ID NO: 643956 - DNA, 15 bp, Homo sapiens
aagaattccacacag

SEQ ID NO: 643957 - DNA, 15 bp, Homo sapiens
agaattccacacagt

SEQ ID NO: 643958 - DNA, 15 bp, Homo sapiens
gaattccacacagtg

SEQ ID NO: 643959 - DNA, 15 bp, Homo sapiens
aattccacacagtgc

SEQ ID NO: 643960 - DNA, 15 bp, Homo sapiens
attccacacagtgct

SEQ ID NO: 643961 - DNA, 15 bp, Homo sapiens
ttccacacagtgctg

SEQ ID NO: 643962 - DNA, 15 bp, Homo sapiens
tccacacagtgctgt

SEQ ID NO: 643963 - DNA, 15 bp, Homo sapiens
ccacacagtgctgtt

SEQ ID NO: 643964 - DNA, 15 bp, Homo sapiens
cacacagtgctgttt

SEQ ID NO: 643965 - DNA, 15 bp, Homo sapiens
acacagtgctgtttg

SEQ ID NO: 643966 - DNA, 15 bp, Homo sapiens
cacagtgctgtttgt

SEQ ID NO: 643967 - DNA, 15 bp, Homo sapiens
acagtgctgtttgta

SEQ ID NO: 643968 - DNA, 15 bp, Homo sapiens
cagtgctgtttgtaa

SEQ ID NO: 643969 - DNA, 15 bp, Homo sapiens
agtgctgtttgtaaa

SEQ ID NO: 643970 - DNA, 15 bp, Homo sapiens
gtgctgtttgtaaag

SEQ ID NO: 643971 - DNA, 15 bp, Homo sapiens
tgctgtttgtaaaga

SEQ ID NO: 643972 - DNA, 15 bp, Homo sapiens
gctgtttgtaaagag

SEQ ID NO: 643973 - DNA, 15 bp, Homo sapiens
ctgtttgtaaagaga

SEQ ID NO: 643974 - DNA, 15 bp, Homo sapiens
tgtttgtaaagagaa

SEQ ID NO: 643975 - DNA, 15 bp, Homo sapiens
gtttgtaaagagaaa

SEQ ID NO: 643976 - DNA, 15 bp, Homo sapiens
tttgtaaagagaaat

SEQ ID NO: 643977 - DNA, 15 bp, Homo sapiens
ttgtaaagagaaatg

SEQ ID NO: 643978 - DNA, 15 bp, Homo sapiens
tgtaaagagaaatga

SEQ ID NO: 643979 - DNA, 15 bp, Homo sapiens
gtaaagagaaatgaa

SEQ ID NO: 643980 - DNA, 15 bp, Homo sapiens
taaagagaaatgaat

SEQ ID NO: 643981 - DNA, 15 bp, Homo sapiens
aaagagaaatgaatc

SEQ ID NO: 643982 - DNA, 15 bp, Homo sapiens
aagagaaatgaatca

SEQ ID NO: 643983 - DNA, 15 bp, Homo sapiens
agagaaatgaatcat

SEQ ID NO: 643984 - DNA, 15 bp, Homo sapiens
gagaaatgaatcatt

SEQ ID NO: 643985 - DNA, 15 bp, Homo sapiens
agaaatgaatcattt

SEQ ID NO: 643986 - DNA, 15 bp, Homo sapiens
gaaatgaatcatttt

SEQ ID NO: 643987 - DNA, 15 bp, Homo sapiens
aaatgaatcattttt

SEQ ID NO: 643988 - DNA, 15 bp, Homo sapiens
aatgaatcatttttt

SEQ ID NO: 643989 - DNA, 15 bp, Homo sapiens
atgaatcattttttc

SEQ ID NO: 643990 - DNA, 15 bp, Homo sapiens
tgaatcattttttcc

SEQ ID NO: 643991 - DNA, 15 bp, Homo sapiens
gaatcattttttccc

SEQ ID NO: 643992 - DNA, 15 bp, Homo sapiens
aatcattttttccca

SEQ ID NO: 643993 - DNA, 15 bp, Homo sapiens
atcattttttcccat

SEQ ID NO: 643994 - DNA, 15 bp, Homo sapiens
tcattttttcccatt

SEQ ID NO: 643995 - DNA, 15 bp, Homo sapiens
cattttttcccattt

SEQ ID NO: 643996 - DNA, 15 bp, Homo sapiens
attttttcccattta

SEQ ID NO: 643997 - DNA, 15 bp, Homo sapiens
ttttttcccatttag

SEQ ID NO: 643998 - DNA, 15 bp, Homo sapiens
tttttcccatttagg

SEQ ID NO: 643999 - DNA, 15 bp, Homo sapiens
ttttcccatttaggc

SEQ ID NO: 644000 - DNA, 15 bp, Homo sapiens
tttcccatttaggca

SEQ ID NO: 644001 - DNA, 15 bp, Homo sapiens
ttcccatttaggcat

SEQ ID NO: 644002 - DNA, 15 bp, Homo sapiens
tcccatttaggcatt

SEQ ID NO: 644003 - DNA, 15 bp, Homo sapiens
cccatttaggcattg

SEQ ID NO: 644004 - DNA, 15 bp, Homo sapiens
ccatttaggcattgg

SEQ ID NO: 644005 - DNA, 15 bp, Homo sapiens
catttaggcattggg

SEQ ID NO: 644006 - DNA, 15 bp, Homo sapiens
atttaggcattggga

SEQ ID NO: 644007 - DNA, 15 bp, Homo sapiens
tttaggcattgggaa

SEQ ID NO: 644008 - DNA, 15 bp, Homo sapiens
ttaggcattgggaat

SEQ ID NO: 644009 - DNA, 15 bp, Homo sapiens
taggcattgggaatt

SEQ ID NO: 644010 - DNA, 15 bp, Homo sapiens
aggcattgggaattt

SEQ ID NO: 644011 - DNA, 15 bp, Homo sapiens
ggcattgggaatttt

SEQ ID NO: 644012 - DNA, 15 bp, Homo sapiens
gcattgggaatttta

SEQ ID NO: 644013 - DNA, 15 bp, Homo sapiens
cattgggaattttaa

SEQ ID NO: 644014 - DNA, 15 bp, Homo sapiens
attgggaattttaat

SEQ ID NO: 644015 - DNA, 15 bp, Homo sapiens
ttgggaattttaatg

SEQ ID NO: 644016 - DNA, 15 bp, Homo sapiens
tgggaattttaatga

SEQ ID NO: 644017 - DNA, 15 bp, Homo sapiens
gggaattttaatgac

SEQ ID NO: 644018 - DNA, 15 bp, Homo sapiens
ggaattttaatgaca

SEQ ID NO: 644019 - DNA, 15 bp, Homo sapiens
gaattttaatgacag

SEQ ID NO: 644020 - DNA, 15 bp, Homo sapiens
aattttaatgacagg

SEQ ID NO: 644021 - DNA, 15 bp, Homo sapiens
attttaatgacaggc

SEQ ID NO: 644022 - DNA, 15 bp, Homo sapiens
ttttaatgacaggct

SEQ ID NO: 644023 - DNA, 15 bp, Homo sapiens
tttaatgacaggctt

SEQ ID NO: 644024 - DNA, 15 bp, Homo sapiens
ttaatgacaggcttt

SEQ ID NO: 644025 - DNA, 15 bp, Homo sapiens
taatgacaggctttt

SEQ ID NO: 644026 - DNA, 15 bp, Homo sapiens
aatgacaggcttttt

SEQ ID NO: 644027 - DNA, 15 bp, Homo sapiens
atgacaggctttttt

SEQ ID NO: 644028 - DNA, 15 bp, Homo sapiens
tgacaggcttttttt

SEQ ID NO: 644029 - DNA, 15 bp, Homo sapiens
gacaggctttttttt

SEQ ID NO: 644030 - DNA, 15 bp, Homo sapiens
acaggcttttttttt

SEQ ID NO: 644031 - DNA, 15 bp, Homo sapiens
caggctttttttttt

SEQ ID NO: 644032 - DNA, 15 bp, Homo sapiens
aggcttttttttttt

SEQ ID NO: 644033 - DNA, 15 bp, Homo sapiens
ggctttttttttttt

SEQ ID NO: 644034 - DNA, 15 bp, Homo sapiens
gcttttttttttttt

SEQ ID NO: 644035 - DNA, 15 bp, Homo sapiens
tttttttttttttag

SEQ ID NO: 644036 - DNA, 15 bp, Homo sapiens
ttttttttttttagt

SEQ ID NO: 644037 - DNA, 15 bp, Homo sapiens
tttttttttttagtt

SEQ ID NO: 644038 - DNA, 15 bp, Homo sapiens
ttttttttttagtta

SEQ ID NO: 644039 - DNA, 15 bp, Homo sapiens
tttttttttagttag

SEQ ID NO: 644040 - DNA, 15 bp, Homo sapiens
ttttttttagttagg

SEQ ID NO: 644041 - DNA, 15 bp, Homo sapiens
tttttttagttaggg

SEQ ID NO: 644042 - DNA, 15 bp, Homo sapiens
ttttttagttaggga

SEQ ID NO: 644043 - DNA, 15 bp, Homo sapiens
tttttagttagggaa

SEQ ID NO: 644044 - DNA, 15 bp, Homo sapiens
ttttagttagggaaa

SEQ ID NO: 644045 - DNA, 15 bp, Homo sapiens
tttagttagggaaaa

SEQ ID NO: 644046 - DNA, 15 bp, Homo sapiens
ttagttagggaaaat

SEQ ID NO: 644047 - DNA, 15 bp, Homo sapiens
tagttagggaaaatc

SEQ ID NO: 644048 - DNA, 15 bp, Homo sapiens
agttagggaaaatct

SEQ ID NO: 644049 - DNA, 15 bp, Homo sapiens
gttagggaaaatcta

SEQ ID NO: 644050 - DNA, 15 bp, Homo sapiens
ttagggaaaatctat

SEQ ID NO: 644051 - DNA, 15 bp, Homo sapiens
tagggaaaatctatc

SEQ ID NO: 644052 - DNA, 15 bp, Homo sapiens
agggaaaatctatca

SEQ ID NO: 644053 - DNA, 15 bp, Homo sapiens
gggaaaatctatcag

SEQ ID NO: 644054 - DNA, 15 bp, Homo sapiens
ggaaaatctatcagc

SEQ ID NO: 644055 - DNA, 15 bp, Homo sapiens
gaaaatctatcagca

SEQ ID NO: 644056 - DNA, 15 bp, Homo sapiens
aaaatctatcagcag

SEQ ID NO: 644057 - DNA, 15 bp, Homo sapiens
aaatctatcagcaga

SEQ ID NO: 644058 - DNA, 15 bp, Homo sapiens
aatctatcagcagat

SEQ ID NO: 644059 - DNA, 15 bp, Homo sapiens
atctatcagcagatt

SEQ ID NO: 644060 - DNA, 15 bp, Homo sapiens
tctatcagcagatta

SEQ ID NO: 644061 - DNA, 15 bp, Homo sapiens
ctatcagcagattag

SEQ ID NO: 644062 - DNA, 15 bp, Homo sapiens
tatcagcagattaga

SEQ ID NO: 644063 - DNA, 15 bp, Homo sapiens
atcagcagattagat

SEQ ID NO: 644064 - DNA, 15 bp, Homo sapiens
tcagcagattagatt

SEQ ID NO: 644065 - DNA, 15 bp, Homo sapiens
cagcagattagattt

SEQ ID NO: 644066 - DNA, 15 bp, Homo sapiens
agcagattagatttt

SEQ ID NO: 644067 - DNA, 15 bp, Homo sapiens
gcagattagattttt

SEQ ID NO: 644068 - DNA, 15 bp, Homo sapiens
cagattagatttttg

SEQ ID NO: 644069 - DNA, 15 bp, Homo sapiens
agattagatttttgc

SEQ ID NO: 644070 - DNA, 15 bp, Homo sapiens
gattagatttttgct

SEQ ID NO: 644071 - DNA, 15 bp, Homo sapiens
attagatttttgctg

SEQ ID NO: 644072 - DNA, 15 bp, Homo sapiens
ttagatttttgctga

SEQ ID NO: 644073 - DNA, 15 bp, Homo sapiens
tagatttttgctgat

SEQ ID NO: 644074 - DNA, 15 bp, Homo sapiens
agatttttgctgatg

SEQ ID NO: 644075 - DNA, 15 bp, Homo sapiens
gatttttgctgatgt

SEQ ID NO: 644076 - DNA, 15 bp, Homo sapiens
atttttgctgatgtc

SEQ ID NO: 644077 - DNA, 15 bp, Homo sapiens
tttttgctgatgtca

SEQ ID NO: 644078 - DNA, 15 bp, Homo sapiens
ttttgctgatgtcat

SEQ ID NO: 644079 - DNA, 15 bp, Homo sapiens
tttgctgatgtcata

SEQ ID NO: 644080 - DNA, 15 bp, Homo sapiens
ttgctgatgtcataa

SEQ ID NO: 644081 - DNA, 15 bp, Homo sapiens
tgctgatgtcataat

SEQ ID NO: 644082 - DNA, 15 bp, Homo sapiens
gctgatgtcataatt

SEQ ID NO: 644083 - DNA, 15 bp, Homo sapiens
ctgatgtcataattt

SEQ ID NO: 644084 - DNA, 15 bp, Homo sapiens
tgatgtcataatttt

SEQ ID NO: 644085 - DNA, 15 bp, Homo sapiens
gatgtcataattttt

SEQ ID NO: 644086 - DNA, 15 bp, Homo sapiens
atgtcataatttttg

SEQ ID NO: 644087 - DNA, 15 bp, Homo sapiens
tgtcataatttttgt

SEQ ID NO: 644088 - DNA, 15 bp, Homo sapiens
gtcataatttttgtt

SEQ ID NO: 644089 - DNA, 15 bp, Homo sapiens
tcataatttttgttt

SEQ ID NO: 644090 - DNA, 15 bp, Homo sapiens
cataatttttgtttt

SEQ ID NO: 644091 - DNA, 15 bp, Homo sapiens
ataatttttgtttta

SEQ ID NO: 644092 - DNA, 15 bp, Homo sapiens
taatttttgttttac

SEQ ID NO: 644093 - DNA, 15 bp, Homo sapiens
aatttttgttttaca

SEQ ID NO: 644094 - DNA, 15 bp, Homo sapiens
atttttgttttacat

SEQ ID NO: 644095 - DNA, 15 bp, Homo sapiens
tttttgttttacatt

SEQ ID NO: 644096 - DNA, 15 bp, Homo sapiens
ttttgttttacattt

SEQ ID NO: 644097 - DNA, 15 bp, Homo sapiens
tttgttttacatttc

SEQ ID NO: 644098 - DNA, 15 bp, Homo sapiens
ttgttttacatttct

SEQ ID NO: 644099 - DNA, 15 bp, Homo sapiens
tgttttacatttctt

SEQ ID NO: 644100 - DNA, 15 bp, Homo sapiens
gttttacatttcttg

SEQ ID NO: 644101 - DNA, 15 bp, Homo sapiens
ttttacatttcttga

SEQ ID NO: 644102 - DNA, 15 bp, Homo sapiens
tttacatttcttgaa

SEQ ID NO: 644103 - DNA, 15 bp, Homo sapiens
ttacatttcttgaaa

SEQ ID NO: 644104 - DNA, 15 bp, Homo sapiens
tacatttcttgaaaa

SEQ ID NO: 644105 - DNA, 15 bp, Homo sapiens
acatttcttgaaaat

SEQ ID NO: 644106 - DNA, 15 bp, Homo sapiens
catttcttgaaaatt

SEQ ID NO: 644107 - DNA, 15 bp, Homo sapiens
atttcttgaaaatta

SEQ ID NO: 644108 - DNA, 15 bp, Homo sapiens
tttcttgaaaattat

SEQ ID NO: 644109 - DNA, 15 bp, Homo sapiens
ttcttgaaaattatt

SEQ ID NO: 644110 - DNA, 15 bp, Homo sapiens
tcttgaaaattattg

SEQ ID NO: 644111 - DNA, 15 bp, Homo sapiens
cttgaaaattattgc

SEQ ID NO: 644112 - DNA, 15 bp, Homo sapiens
ttgaaaattattgcc

SEQ ID NO: 644113 - DNA, 15 bp, Homo sapiens
tgaaaattattgcct

SEQ ID NO: 644114 - DNA, 15 bp, Homo sapiens
gaaaattattgcctg

SEQ ID NO: 644115 - DNA, 15 bp, Homo sapiens
aaaattattgcctga

SEQ ID NO: 644116 - DNA, 15 bp, Homo sapiens
aaattattgcctgaa

SEQ ID NO: 644117 - DNA, 15 bp, Homo sapiens
aattattgcctgaaa

SEQ ID NO: 644118 - DNA, 15 bp, Homo sapiens
attattgcctgaaaa

SEQ ID NO: 644119 - DNA, 15 bp, Homo sapiens
ttattgcctgaaaac

SEQ ID NO: 644120 - DNA, 15 bp, Homo sapiens
tattgcctgaaaact

SEQ ID NO: 644121 - DNA, 15 bp, Homo sapiens
attgcctgaaaacta

SEQ ID NO: 644122 - DNA, 15 bp, Homo sapiens
ttgcctgaaaactat

SEQ ID NO: 644123 - DNA, 15 bp, Homo sapiens
tgcctgaaaactatg

SEQ ID NO: 644124 - DNA, 15 bp, Homo sapiens
gcctgaaaactatgc

SEQ ID NO: 644125 - DNA, 15 bp, Homo sapiens
cctgaaaactatgca

SEQ ID NO: 644126 - DNA, 15 bp, Homo sapiens
ctgaaaactatgcat

SEQ ID NO: 644127 - DNA, 15 bp, Homo sapiens
tgaaaactatgcatg

SEQ ID NO: 644128 - DNA, 15 bp, Homo sapiens
gaaaactatgcatga

SEQ ID NO: 644129 - DNA, 15 bp, Homo sapiens
aaaactatgcatgaa

SEQ ID NO: 644130 - DNA, 15 bp, Homo sapiens
aaactatgcatgaat

SEQ ID NO: 644131 - DNA, 15 bp, Homo sapiens
aactatgcatgaatg

SEQ ID NO: 644132 - DNA, 15 bp, Homo sapiens
actatgcatgaatgc

SEQ ID NO: 644133 - DNA, 15 bp, Homo sapiens
ctatgcatgaatgct

SEQ ID NO: 644134 - DNA, 15 bp, Homo sapiens
tatgcatgaatgctt

SEQ ID NO: 644135 - DNA, 15 bp, Homo sapiens
atgcatgaatgcttc

SEQ ID NO: 644136 - DNA, 15 bp, Homo sapiens
tgcatgaatgcttct

SEQ ID NO: 644137 - DNA, 15 bp, Homo sapiens
gcatgaatgcttcta

SEQ ID NO: 644138 - DNA, 15 bp, Homo sapiens
catgaatgcttctag

SEQ ID NO: 644139 - DNA, 15 bp, Homo sapiens
atgaatgcttctagg

SEQ ID NO: 644140 - DNA, 15 bp, Homo sapiens
tgaatgcttctaggc

SEQ ID NO: 644141 - DNA, 15 bp, Homo sapiens
gaatgcttctaggca

SEQ ID NO: 644142 - DNA, 15 bp, Homo sapiens
aatgcttctaggcag

SEQ ID NO: 644143 - DNA, 15 bp, Homo sapiens
atgcttctaggcagg

SEQ ID NO: 644144 - DNA, 15 bp, Homo sapiens
tgcttctaggcaggt

SEQ ID NO: 644145 - DNA, 15 bp, Homo sapiens
gcttctaggcaggtc

SEQ ID NO: 644146 - DNA, 15 bp, Homo sapiens
cttctaggcaggtct

SEQ ID NO: 644147 - DNA, 15 bp, Homo sapiens
ttctaggcaggtctt

SEQ ID NO: 644148 - DNA, 15 bp, Homo sapiens
tctaggcaggtcttt

SEQ ID NO: 644149 - DNA, 15 bp, Homo sapiens
ctaggcaggtctttc

SEQ ID NO: 644150 - DNA, 15 bp, Homo sapiens
taggcaggtctttcc

SEQ ID NO: 644151 - DNA, 15 bp, Homo sapiens
aggcaggtctttccg

SEQ ID NO: 644152 - DNA, 15 bp, Homo sapiens
ggcaggtctttccgg

SEQ ID NO: 644153 - DNA, 15 bp, Homo sapiens
gcaggtctttccggg

SEQ ID NO: 644154 - DNA, 15 bp, Homo sapiens
caggtctttccggga

SEQ ID NO: 644155 - DNA, 15 bp, Homo sapiens
aggtctttccgggag

SEQ ID NO: 644156 - DNA, 15 bp, Homo sapiens
ggtctttccgggagg

SEQ ID NO: 644157 - DNA, 15 bp, Homo sapiens
gtctttccgggagga

SEQ ID NO: 644158 - DNA, 15 bp, Homo sapiens
tctttccgggaggaa

SEQ ID NO: 644159 - DNA, 15 bp, Homo sapiens
ctttccgggaggaaa

SEQ ID NO: 644160 - DNA, 15 bp, Homo sapiens
tttccgggaggaaat

SEQ ID NO: 644161 - DNA, 15 bp, Homo sapiens
ttccgggaggaaatt

SEQ ID NO: 644162 - DNA, 15 bp, Homo sapiens
tccgggaggaaattc

SEQ ID NO: 644163 - DNA, 15 bp, Homo sapiens
ccgggaggaaattca

SEQ ID NO: 644164 - DNA, 15 bp, Homo sapiens
cgggaggaaattcac

SEQ ID NO: 644165 - DNA, 15 bp, Homo sapiens
gggaggaaattcact

SEQ ID NO: 644166 - DNA, 15 bp, Homo sapiens
ggaggaaattcactc

SEQ ID NO: 644167 - DNA, 15 bp, Homo sapiens
gaggaaattcactca

SEQ ID NO: 644168 - DNA, 15 bp, Homo sapiens
aggaaattcactcag

SEQ ID NO: 644169 - DNA, 15 bp, Homo sapiens
ggaaattcactcaga

SEQ ID NO: 644170 - DNA, 15 bp, Homo sapiens
gaaattcactcagaa

SEQ ID NO: 644171 - DNA, 15 bp, Homo sapiens
aaattcactcagaaa

SEQ ID NO: 644172 - DNA, 15 bp, Homo sapiens
aattcactcagaaat

SEQ ID NO: 644173 - DNA, 15 bp, Homo sapiens
attcactcagaaatg

SEQ ID NO: 644174 - DNA, 15 bp, Homo sapiens
ttcactcagaaatgg

SEQ ID NO: 644175 - DNA, 15 bp, Homo sapiens
tcactcagaaatggc

SEQ ID NO: 644176 - DNA, 15 bp, Homo sapiens
cactcagaaatggca

SEQ ID NO: 644177 - DNA, 15 bp, Homo sapiens
actcagaaatggcat

SEQ ID NO: 644178 - DNA, 15 bp, Homo sapiens
ctcagaaatggcatt

SEQ ID NO: 644179 - DNA, 15 bp, Homo sapiens
tcagaaatggcatta

SEQ ID NO: 644180 - DNA, 15 bp, Homo sapiens
cagaaatggcattaa

SEQ ID NO: 644181 - DNA, 15 bp, Homo sapiens
agaaatggcattaaa

SEQ ID NO: 644182 - DNA, 15 bp, Homo sapiens
gaaatggcattaaaa

SEQ ID NO: 644183 - DNA, 15 bp, Homo sapiens
aaatggcattaaaaa

SEQ ID NO: 644184 - DNA, 15 bp, Homo sapiens
aatggcattaaaaat

SEQ ID NO: 644185 - DNA, 15 bp, Homo sapiens
atggcattaaaaata

SEQ ID NO: 644186 - DNA, 15 bp, Homo sapiens
tggcattaaaaatag

SEQ ID NO: 644187 - DNA, 15 bp, Homo sapiens
ggcattaaaaatagt

SEQ ID NO: 644188 - DNA, 15 bp, Homo sapiens
gcattaaaaatagtt

SEQ ID NO: 644189 - DNA, 15 bp, Homo sapiens
cattaaaaatagtta

SEQ ID NO: 644190 - DNA, 15 bp, Homo sapiens
attaaaaatagttat

SEQ ID NO: 644191 - DNA, 15 bp, Homo sapiens
ttaaaaatagttatt

SEQ ID NO: 644192 - DNA, 15 bp, Homo sapiens
taaaaatagttattt

SEQ ID NO: 644193 - DNA, 15 bp, Homo sapiens
aaaaatagttattta

SEQ ID NO: 644194 - DNA, 15 bp, Homo sapiens
aaaatagttatttaa

SEQ ID NO: 644195 - DNA, 15 bp, Homo sapiens
aaatagttatttaag

SEQ ID NO: 644196 - DNA, 15 bp, Homo sapiens
aatagttatttaaga

SEQ ID NO: 644197 - DNA, 15 bp, Homo sapiens
atagttatttaagaa

SEQ ID NO: 644198 - DNA, 15 bp, Homo sapiens
tagttatttaagaac

SEQ ID NO: 644199 - DNA, 15 bp, Homo sapiens
agttatttaagaaca

SEQ ID NO: 644200 - DNA, 15 bp, Homo sapiens
gttatttaagaacaa

SEQ ID NO: 644201 - DNA, 15 bp, Homo sapiens
ttatttaagaacaat

SEQ ID NO: 644202 - DNA, 15 bp, Homo sapiens
tatttaagaacaata

SEQ ID NO: 644203 - DNA, 15 bp, Homo sapiens
atttaagaacaataa

SEQ ID NO: 644204 - DNA, 15 bp, Homo sapiens
tttaagaacaataat

SEQ ID NO: 644205 - DNA, 15 bp, Homo sapiens
ttaagaacaataatg

SEQ ID NO: 644206 - DNA, 15 bp, Homo sapiens
taagaacaataatgc

SEQ ID NO: 644207 - DNA, 15 bp, Homo sapiens
aagaacaataatgcc

SEQ ID NO: 644208 - DNA, 15 bp, Homo sapiens
agaacaataatgcct

SEQ ID NO: 644209 - DNA, 15 bp, Homo sapiens
gaacaataatgcctt

SEQ ID NO: 644210 - DNA, 15 bp, Homo sapiens
aacaataatgcctta

SEQ ID NO: 644211 - DNA, 15 bp, Homo sapiens
acaataatgccttat

SEQ ID NO: 644212 - DNA, 15 bp, Homo sapiens
caataatgccttatt

SEQ ID NO: 644213 - DNA, 15 bp, Homo sapiens
aataatgccttattt

SEQ ID NO: 644214 - DNA, 15 bp, Homo sapiens
ataatgccttatttt

SEQ ID NO: 644215 - DNA, 15 bp, Homo sapiens
taatgccttattttt

SEQ ID NO: 644216 - DNA, 15 bp, Homo sapiens
aatgccttatttttg

SEQ ID NO: 644217 - DNA, 15 bp, Homo sapiens
atgccttatttttgg

SEQ ID NO: 644218 - DNA, 15 bp, Homo sapiens
tgccttatttttggt

SEQ ID NO: 644219 - DNA, 15 bp, Homo sapiens
gccttatttttggtg

SEQ ID NO: 644220 - DNA, 15 bp, Homo sapiens
ccttatttttggtgc

SEQ ID NO: 644221 - DNA, 15 bp, Homo sapiens
cttatttttggtgct

SEQ ID NO: 644222 - DNA, 15 bp, Homo sapiens
ttatttttggtgctg

SEQ ID NO: 644223 - DNA, 15 bp, Homo sapiens
tatttttggtgctgt

SEQ ID NO: 644224 - DNA, 15 bp, Homo sapiens
atttttggtgctgtg

SEQ ID NO: 644225 - DNA, 15 bp, Homo sapiens
tttttggtgctgtga

SEQ ID NO: 644226 - DNA, 15 bp, Homo sapiens
ttttggtgctgtgag

SEQ ID NO: 644227 - DNA, 15 bp, Homo sapiens
tttggtgctgtgagc

SEQ ID NO: 644228 - DNA, 15 bp, Homo sapiens
ttggtgctgtgagcc

SEQ ID NO: 644229 - DNA, 15 bp, Homo sapiens
tggtgctgtgagcct

SEQ ID NO: 644230 - DNA, 15 bp, Homo sapiens
ggtgctgtgagcctt

SEQ ID NO: 644231 - DNA, 15 bp, Homo sapiens
gtgctgtgagccttc

SEQ ID NO: 644232 - DNA, 15 bp, Homo sapiens
tgctgtgagccttct

SEQ ID NO: 644233 - DNA, 15 bp, Homo sapiens
gctgtgagccttctt

SEQ ID NO: 644234 - DNA, 15 bp, Homo sapiens
ctgtgagccttcttt

SEQ ID NO: 644235 - DNA, 15 bp, Homo sapiens
tgtgagccttctttc

SEQ ID NO: 644236 - DNA, 15 bp, Homo sapiens
gtgagccttctttca

SEQ ID NO: 644237 - DNA, 15 bp, Homo sapiens
tgagccttctttcac

SEQ ID NO: 644238 - DNA, 15 bp, Homo sapiens
gagccttctttcaca

SEQ ID NO: 644239 - DNA, 15 bp, Homo sapiens
agccttctttcacac

SEQ ID NO: 644240 - DNA, 15 bp, Homo sapiens
gccttctttcacaca

SEQ ID NO: 644241 - DNA, 15 bp, Homo sapiens
ccttctttcacacat

SEQ ID NO: 644242 - DNA, 15 bp, Homo sapiens
cttctttcacacatg

SEQ ID NO: 644243 - DNA, 15 bp, Homo sapiens
ttctttcacacatgg

SEQ ID NO: 644244 - DNA, 15 bp, Homo sapiens
tctttcacacatggg

SEQ ID NO: 644245 - DNA, 15 bp, Homo sapiens
ctttcacacatgggg

SEQ ID NO: 644246 - DNA, 15 bp, Homo sapiens
tttcacacatgggga

SEQ ID NO: 644247 - DNA, 15 bp, Homo sapiens
ttcacacatggggaa

SEQ ID NO: 644248 - DNA, 15 bp, Homo sapiens
tcacacatggggaaa

SEQ ID NO: 644249 - DNA, 15 bp, Homo sapiens
cacacatggggaaag

SEQ ID NO: 644250 - DNA, 15 bp, Homo sapiens
acacatggggaaagt

SEQ ID NO: 644251 - DNA, 15 bp, Homo sapiens
cacatggggaaagtg

SEQ ID NO: 644252 - DNA, 15 bp, Homo sapiens
acatggggaaagtga

SEQ ID NO: 644253 - DNA, 15 bp, Homo sapiens
catggggaaagtgaa

SEQ ID NO: 644254 - DNA, 15 bp, Homo sapiens
atggggaaagtgaag

SEQ ID NO: 644255 - DNA, 15 bp, Homo sapiens
tggggaaagtgaagc

SEQ ID NO: 644256 - DNA, 15 bp, Homo sapiens
ggggaaagtgaagct

SEQ ID NO: 644257 - DNA, 15 bp, Homo sapiens
gggaaagtgaagctc

SEQ ID NO: 644258 - DNA, 15 bp, Homo sapiens
ggaaagtgaagctct

SEQ ID NO: 644259 - DNA, 15 bp, Homo sapiens
gaaagtgaagctctg

SEQ ID NO: 644260 - DNA, 15 bp, Homo sapiens
aaagtgaagctctgt

SEQ ID NO: 644261 - DNA, 15 bp, Homo sapiens
aagtgaagctctgta

SEQ ID NO: 644262 - DNA, 15 bp, Homo sapiens
agtgaagctctgtag

SEQ ID NO: 644263 - DNA, 15 bp, Homo sapiens
gtgaagctctgtagg

SEQ ID NO: 644264 - DNA, 15 bp, Homo sapiens
tgaagctctgtaggg

SEQ ID NO: 644265 - DNA, 15 bp, Homo sapiens
gaagctctgtagggt

SEQ ID NO: 644266 - DNA, 15 bp, Homo sapiens
aagctctgtagggta

SEQ ID NO: 644267 - DNA, 15 bp, Homo sapiens
agctctgtagggtaa

SEQ ID NO: 644268 - DNA, 15 bp, Homo sapiens
gctctgtagggtaaa

SEQ ID NO: 644269 - DNA, 15 bp, Homo sapiens
ctctgtagggtaaag

SEQ ID NO: 644270 - DNA, 15 bp, Homo sapiens
tctgtagggtaaagt

SEQ ID NO: 644271 - DNA, 15 bp, Homo sapiens
ctgtagggtaaagtc

SEQ ID NO: 644272 - DNA, 15 bp, Homo sapiens
tgtagggtaaagtcc

SEQ ID NO: 644273 - DNA, 15 bp, Homo sapiens
gtagggtaaagtcca

SEQ ID NO: 644274 - DNA, 15 bp, Homo sapiens
tagggtaaagtccag

SEQ ID NO: 644275 - DNA, 15 bp, Homo sapiens
agggtaaagtccaga

SEQ ID NO: 644276 - DNA, 15 bp, Homo sapiens
gggtaaagtccagaa

SEQ ID NO: 644277 - DNA, 15 bp, Homo sapiens
ggtaaagtccagaag

SEQ ID NO: 644278 - DNA, 15 bp, Homo sapiens
gtaaagtccagaaga

SEQ ID NO: 644279 - DNA, 15 bp, Homo sapiens
taaagtccagaagac

SEQ ID NO: 644280 - DNA, 15 bp, Homo sapiens
aaagtccagaagaca

SEQ ID NO: 644281 - DNA, 15 bp, Homo sapiens
aagtccagaagacat

SEQ ID NO: 644282 - DNA, 15 bp, Homo sapiens
agtccagaagacatg

SEQ ID NO: 644283 - DNA, 15 bp, Homo sapiens
gtccagaagacatgg

SEQ ID NO: 644284 - DNA, 15 bp, Homo sapiens
tccagaagacatggg

SEQ ID NO: 644285 - DNA, 15 bp, Homo sapiens
ccagaagacatgggc

SEQ ID NO: 644286 - DNA, 15 bp, Homo sapiens
cagaagacatgggcc

SEQ ID NO: 644287 - DNA, 15 bp, Homo sapiens
agaagacatgggcct

SEQ ID NO: 644288 - DNA, 15 bp, Homo sapiens
gaagacatgggcctg

SEQ ID NO: 644289 - DNA, 15 bp, Homo sapiens
aagacatgggcctgc

SEQ ID NO: 644290 - DNA, 15 bp, Homo sapiens
agacatgggcctgct

SEQ ID NO: 644291 - DNA, 15 bp, Homo sapiens
gacatgggcctgctt

SEQ ID NO: 644292 - DNA, 15 bp, Homo sapiens
acatgggcctgctta

SEQ ID NO: 644293 - DNA, 15 bp, Homo sapiens
catgggcctgcttaa

SEQ ID NO: 644294 - DNA, 15 bp, Homo sapiens
atgggcctgcttaag

SEQ ID NO: 644295 - DNA, 15 bp, Homo sapiens
tgggcctgcttaagt

SEQ ID NO: 644296 - DNA, 15 bp, Homo sapiens
gggcctgcttaagtg

SEQ ID NO: 644297 - DNA, 15 bp, Homo sapiens
ggcctgcttaagtgt

SEQ ID NO: 644298 - DNA, 15 bp, Homo sapiens
gcctgcttaagtgtc

SEQ ID NO: 644299 - DNA, 15 bp, Homo sapiens
cctgcttaagtgtca

SEQ ID NO: 644300 - DNA, 15 bp, Homo sapiens
ctgcttaagtgtcag

SEQ ID NO: 644301 - DNA, 15 bp, Homo sapiens
tgcttaagtgtcaga

SEQ ID NO: 644302 - DNA, 15 bp, Homo sapiens
gcttaagtgtcagag

SEQ ID NO: 644303 - DNA, 15 bp, Homo sapiens
cttaagtgtcagagc

SEQ ID NO: 644304 - DNA, 15 bp, Homo sapiens
ttaagtgtcagagct

SEQ ID NO: 644305 - DNA, 15 bp, Homo sapiens
taagtgtcagagctg

SEQ ID NO: 644306 - DNA, 15 bp, Homo sapiens
aagtgtcagagctgg

SEQ ID NO: 644307 - DNA, 15 bp, Homo sapiens
agtgtcagagctgga

SEQ ID NO: 644308 - DNA, 15 bp, Homo sapiens
gtgtcagagctggat

SEQ ID NO: 644309 - DNA, 15 bp, Homo sapiens
tgtcagagctggatt

SEQ ID NO: 644310 - DNA, 15 bp, Homo sapiens
gtcagagctggattc

SEQ ID NO: 644311 - DNA, 15 bp, Homo sapiens
tcagagctggattca

SEQ ID NO: 644312 - DNA, 15 bp, Homo sapiens
cagagctggattcaa

SEQ ID NO: 644313 - DNA, 15 bp, Homo sapiens
agagctggattcaaa

SEQ ID NO: 644314 - DNA, 15 bp, Homo sapiens
gagctggattcaaac

SEQ ID NO: 644315 - DNA, 15 bp, Homo sapiens
agctggattcaaacc

SEQ ID NO: 644316 - DNA, 15 bp, Homo sapiens
gctggattcaaaccc

SEQ ID NO: 644317 - DNA, 15 bp, Homo sapiens
ctggattcaaaccca

SEQ ID NO: 644318 - DNA, 15 bp, Homo sapiens
tggattcaaacccaa

SEQ ID NO: 644319 - DNA, 15 bp, Homo sapiens
ggattcaaacccaaa

SEQ ID NO: 644320 - DNA, 15 bp, Homo sapiens
gattcaaacccaaat

SEQ ID NO: 644321 - DNA, 15 bp, Homo sapiens
attcaaacccaaatc

SEQ ID NO: 644322 - DNA, 15 bp, Homo sapiens
ttcaaacccaaatct

SEQ ID NO: 644323 - DNA, 15 bp, Homo sapiens
tcaaacccaaatctc

SEQ ID NO: 644324 - DNA, 15 bp, Homo sapiens
caaacccaaatctca

SEQ ID NO: 644325 - DNA, 15 bp, Homo sapiens
aaacccaaatctcag

SEQ ID NO: 644326 - DNA, 15 bp, Homo sapiens
aacccaaatctcagg

SEQ ID NO: 644327 - DNA, 15 bp, Homo sapiens
acccaaatctcaggc

SEQ ID NO: 644328 - DNA, 15 bp, Homo sapiens
cccaaatctcaggct

SEQ ID NO: 644329 - DNA, 15 bp, Homo sapiens
ccaaatctcaggcta

SEQ ID NO: 644330 - DNA, 15 bp, Homo sapiens
caaatctcaggctac

SEQ ID NO: 644331 - DNA, 15 bp, Homo sapiens
aaatctcaggctacc

SEQ ID NO: 644332 - DNA, 15 bp, Homo sapiens
aatctcaggctaccc

SEQ ID NO: 644333 - DNA, 15 bp, Homo sapiens
atctcaggctaccct

SEQ ID NO: 644334 - DNA, 15 bp, Homo sapiens
tctcaggctaccctg

SEQ ID NO: 644335 - DNA, 15 bp, Homo sapiens
ctcaggctaccctgc

SEQ ID NO: 644336 - DNA, 15 bp, Homo sapiens
tcaggctaccctgct

SEQ ID NO: 644337 - DNA, 15 bp, Homo sapiens
caggctaccctgctg

SEQ ID NO: 644338 - DNA, 15 bp, Homo sapiens
aggctaccctgctga

SEQ ID NO: 644339 - DNA, 15 bp, Homo sapiens
ggctaccctgctgaa

SEQ ID NO: 644340 - DNA, 15 bp, Homo sapiens
gctaccctgctgaag

SEQ ID NO: 644341 - DNA, 15 bp, Homo sapiens
ctaccctgctgaagg

SEQ ID NO: 644342 - DNA, 15 bp, Homo sapiens
taccctgctgaaggt

SEQ ID NO: 644343 - DNA, 15 bp, Homo sapiens
accctgctgaaggtt

SEQ ID NO: 644344 - DNA, 15 bp, Homo sapiens
ccctgctgaaggttc

SEQ ID NO: 644345 - DNA, 15 bp, Homo sapiens
cctgctgaaggttct

SEQ ID NO: 644346 - DNA, 15 bp, Homo sapiens
ctgctgaaggttctg

SEQ ID NO: 644347 - DNA, 15 bp, Homo sapiens
tgctgaaggttctgt

SEQ ID NO: 644348 - DNA, 15 bp, Homo sapiens
gctgaaggttctgtt

SEQ ID NO: 644349 - DNA, 15 bp, Homo sapiens
ctgaaggttctgttt

SEQ ID NO: 644350 - DNA, 15 bp, Homo sapiens
tgaaggttctgttta

SEQ ID NO: 644351 - DNA, 15 bp, Homo sapiens
gaaggttctgtttac

SEQ ID NO: 644352 - DNA, 15 bp, Homo sapiens
aaggttctgtttacc

SEQ ID NO: 644353 - DNA, 15 bp, Homo sapiens
aggttctgtttacct

SEQ ID NO: 644354 - DNA, 15 bp, Homo sapiens
ggttctgtttacctc

SEQ ID NO: 644355 - DNA, 15 bp, Homo sapiens
gttctgtttacctcc

SEQ ID NO: 644356 - DNA, 15 bp, Homo sapiens
ttctgtttacctcca

SEQ ID NO: 644357 - DNA, 15 bp, Homo sapiens
tctgtttacctccac

SEQ ID NO: 644358 - DNA, 15 bp, Homo sapiens
ctgtttacctccact

SEQ ID NO: 644359 - DNA, 15 bp, Homo sapiens
tgtttacctccactt

SEQ ID NO: 644360 - DNA, 15 bp, Homo sapiens
gtttacctccacttt

SEQ ID NO: 644361 - DNA, 15 bp, Homo sapiens
tttacctccactttt

SEQ ID NO: 644362 - DNA, 15 bp, Homo sapiens
ttacctccactttta

SEQ ID NO: 644363 - DNA, 15 bp, Homo sapiens
tacctccacttttag

SEQ ID NO: 644364 - DNA, 15 bp, Homo sapiens
acctccacttttagc

SEQ ID NO: 644365 - DNA, 15 bp, Homo sapiens
cctccacttttagca

SEQ ID NO: 644366 - DNA, 15 bp, Homo sapiens
ctccacttttagcag

SEQ ID NO: 644367 - DNA, 15 bp, Homo sapiens
tccacttttagcagc

SEQ ID NO: 644368 - DNA, 15 bp, Homo sapiens
ccacttttagcagca

SEQ ID NO: 644369 - DNA, 15 bp, Homo sapiens
cacttttagcagcag

SEQ ID NO: 644370 - DNA, 15 bp, Homo sapiens
acttttagcagcaga

SEQ ID NO: 644371 - DNA, 15 bp, Homo sapiens
cttttagcagcagat

SEQ ID NO: 644372 - DNA, 15 bp, Homo sapiens
ttttagcagcagatg

SEQ ID NO: 644373 - DNA, 15 bp, Homo sapiens
tttagcagcagatga

SEQ ID NO: 644374 - DNA, 15 bp, Homo sapiens
ttagcagcagatgac

SEQ ID NO: 644375 - DNA, 15 bp, Homo sapiens
tagcagcagatgaca

SEQ ID NO: 644376 - DNA, 15 bp, Homo sapiens
agcagcagatgacag

SEQ ID NO: 644377 - DNA, 15 bp, Homo sapiens
gcagcagatgacaga

SEQ ID NO: 644378 - DNA, 15 bp, Homo sapiens
cagcagatgacagag

SEQ ID NO: 644379 - DNA, 15 bp, Homo sapiens
agcagatgacagagc

SEQ ID NO: 644380 - DNA, 15 bp, Homo sapiens
gcagatgacagagct

SEQ ID NO: 644381 - DNA, 15 bp, Homo sapiens
cagatgacagagctc

SEQ ID NO: 644382 - DNA, 15 bp, Homo sapiens
agatgacagagctca

SEQ ID NO: 644383 - DNA, 15 bp, Homo sapiens
gatgacagagctcac

SEQ ID NO: 644384 - DNA, 15 bp, Homo sapiens
atgacagagctcaca

SEQ ID NO: 644385 - DNA, 15 bp, Homo sapiens
tgacagagctcacat

SEQ ID NO: 644386 - DNA, 15 bp, Homo sapiens
gacagagctcacatc

SEQ ID NO: 644387 - DNA, 15 bp, Homo sapiens
acagagctcacatct

SEQ ID NO: 644388 - DNA, 15 bp, Homo sapiens
cagagctcacatctt

SEQ ID NO: 644389 - DNA, 15 bp, Homo sapiens
agagctcacatctta

SEQ ID NO: 644390 - DNA, 15 bp, Homo sapiens
gagctcacatcttag

SEQ ID NO: 644391 - DNA, 15 bp, Homo sapiens
agctcacatcttagt

SEQ ID NO: 644392 - DNA, 15 bp, Homo sapiens
gctcacatcttagtt

SEQ ID NO: 644393 - DNA, 15 bp, Homo sapiens
ctcacatcttagttc

SEQ ID NO: 644394 - DNA, 15 bp, Homo sapiens
tcacatcttagttcc

SEQ ID NO: 644395 - DNA, 15 bp, Homo sapiens
cacatcttagttccc

SEQ ID NO: 644396 - DNA, 15 bp, Homo sapiens
acatcttagttccca

SEQ ID NO: 644397 - DNA, 15 bp, Homo sapiens
catcttagttcccaa

SEQ ID NO: 644398 - DNA, 15 bp, Homo sapiens
atcttagttcccaag

SEQ ID NO: 644399 - DNA, 15 bp, Homo sapiens
tcttagttcccaaga

SEQ ID NO: 644400 - DNA, 15 bp, Homo sapiens
cttagttcccaagaa

SEQ ID NO: 644401 - DNA, 15 bp, Homo sapiens
ttagttcccaagaag

SEQ ID NO: 644402 - DNA, 15 bp, Homo sapiens
tagttcccaagaaga

SEQ ID NO: 644403 - DNA, 15 bp, Homo sapiens
agttcccaagaagag

SEQ ID NO: 644404 - DNA, 15 bp, Homo sapiens
gttcccaagaagagg

SEQ ID NO: 644405 - DNA, 15 bp, Homo sapiens
ttcccaagaagaggc

SEQ ID NO: 644406 - DNA, 15 bp, Homo sapiens
tcccaagaagaggca

SEQ ID NO: 644407 - DNA, 15 bp, Homo sapiens
cccaagaagaggcat

SEQ ID NO: 644408 - DNA, 15 bp, Homo sapiens
ccaagaagaggcatt

SEQ ID NO: 644409 - DNA, 15 bp, Homo sapiens
caagaagaggcattt

SEQ ID NO: 644410 - DNA, 15 bp, Homo sapiens
aagaagaggcatttt

SEQ ID NO: 644411 - DNA, 15 bp, Homo sapiens
agaagaggcattttc

SEQ ID NO: 644412 - DNA, 15 bp, Homo sapiens
gaagaggcattttct

SEQ ID NO: 644413 - DNA, 15 bp, Homo sapiens
aagaggcattttctg

SEQ ID NO: 644414 - DNA, 15 bp, Homo sapiens
agaggcattttctga

SEQ ID NO: 644415 - DNA, 15 bp, Homo sapiens
gaggcattttctgaa

SEQ ID NO: 644416 - DNA, 15 bp, Homo sapiens
aggcattttctgaat

SEQ ID NO: 644417 - DNA, 15 bp, Homo sapiens
ggcattttctgaatt

SEQ ID NO: 644418 - DNA, 15 bp, Homo sapiens
gcattttctgaatta

SEQ ID NO: 644419 - DNA, 15 bp, Homo sapiens
cattttctgaattac

SEQ ID NO: 644420 - DNA, 15 bp, Homo sapiens
attttctgaattact

SEQ ID NO: 644421 - DNA, 15 bp, Homo sapiens
ttttctgaattactt

SEQ ID NO: 644422 - DNA, 15 bp, Homo sapiens
tttctgaattacttt

SEQ ID NO: 644423 - DNA, 15 bp, Homo sapiens
ttctgaattactttc

SEQ ID NO: 644424 - DNA, 15 bp, Homo sapiens
tctgaattactttcc

SEQ ID NO: 644425 - DNA, 15 bp, Homo sapiens
ctgaattactttccc

SEQ ID NO: 644426 - DNA, 15 bp, Homo sapiens
tgaattactttcccc

SEQ ID NO: 644427 - DNA, 15 bp, Homo sapiens
gaattactttccccc

SEQ ID NO: 644428 - DNA, 15 bp, Homo sapiens
aattactttccccct

SEQ ID NO: 644429 - DNA, 15 bp, Homo sapiens
attactttccccctt

SEQ ID NO: 644430 - DNA, 15 bp, Homo sapiens
ttactttcccccttt

SEQ ID NO: 644431 - DNA, 15 bp, Homo sapiens
tactttccccctttt

SEQ ID NO: 644432 - DNA, 15 bp, Homo sapiens
actttcccccttttc

SEQ ID NO: 644433 - DNA, 15 bp, Homo sapiens
ctttcccccttttct

SEQ ID NO: 644434 - DNA, 15 bp, Homo sapiens
tttcccccttttctc

SEQ ID NO: 644435 - DNA, 15 bp, Homo sapiens
ttcccccttttctca

SEQ ID NO: 644436 - DNA, 15 bp, Homo sapiens
tcccccttttctcaa

SEQ ID NO: 644437 - DNA, 15 bp, Homo sapiens
cccccttttctcaac

SEQ ID NO: 644438 - DNA, 15 bp, Homo sapiens
ccccttttctcaact

SEQ ID NO: 644439 - DNA, 15 bp, Homo sapiens
cccttttctcaactg

SEQ ID NO: 644440 - DNA, 15 bp, Homo sapiens
ccttttctcaactgt

SEQ ID NO: 644441 - DNA, 15 bp, Homo sapiens
cttttctcaactgtt

SEQ ID NO: 644442 - DNA, 15 bp, Homo sapiens
ttttctcaactgttg

SEQ ID NO: 644443 - DNA, 15 bp, Homo sapiens
tttctcaactgttgt

SEQ ID NO: 644444 - DNA, 15 bp, Homo sapiens
ttctcaactgttgta

SEQ ID NO: 644445 - DNA, 15 bp, Homo sapiens
tctcaactgttgtat

SEQ ID NO: 644446 - DNA, 15 bp, Homo sapiens
ctcaactgttgtatt

SEQ ID NO: 644447 - DNA, 15 bp, Homo sapiens
tcaactgttgtattg

SEQ ID NO: 644448 - DNA, 15 bp, Homo sapiens
caactgttgtattga

SEQ ID NO: 644449 - DNA, 15 bp, Homo sapiens
aactgttgtattgaa

SEQ ID NO: 644450 - DNA, 15 bp, Homo sapiens
actgttgtattgaaa

SEQ ID NO: 644451 - DNA, 15 bp, Homo sapiens
ctgttgtattgaaag

SEQ ID NO: 644452 - DNA, 15 bp, Homo sapiens
tgttgtattgaaagt

SEQ ID NO: 644453 - DNA, 15 bp, Homo sapiens
gttgtattgaaagta

SEQ ID NO: 644454 - DNA, 15 bp, Homo sapiens
ttgtattgaaagtac

SEQ ID NO: 644455 - DNA, 15 bp, Homo sapiens
tgtattgaaagtact

SEQ ID NO: 644456 - DNA, 15 bp, Homo sapiens
gtattgaaagtactt

SEQ ID NO: 644457 - DNA, 15 bp, Homo sapiens
tattgaaagtacttt

SEQ ID NO: 644458 - DNA, 15 bp, Homo sapiens
attgaaagtactttc

SEQ ID NO: 644459 - DNA, 15 bp, Homo sapiens
ttgaaagtactttct

SEQ ID NO: 644460 - DNA, 15 bp, Homo sapiens
tgaaagtactttctt

SEQ ID NO: 644461 - DNA, 15 bp, Homo sapiens
gaaagtactttcttc

SEQ ID NO: 644462 - DNA, 15 bp, Homo sapiens
aaagtactttcttct

SEQ ID NO: 644463 - DNA, 15 bp, Homo sapiens
aagtactttcttctg

SEQ ID NO: 644464 - DNA, 15 bp, Homo sapiens
agtactttcttctga

SEQ ID NO: 644465 - DNA, 15 bp, Homo sapiens
gtactttcttctgaa

SEQ ID NO: 644466 - DNA, 15 bp, Homo sapiens
tactttcttctgaaa

SEQ ID NO: 644467 - DNA, 15 bp, Homo sapiens
actttcttctgaaaa

SEQ ID NO: 644468 - DNA, 15 bp, Homo sapiens
ctttcttctgaaaaa

SEQ ID NO: 644469 - DNA, 15 bp, Homo sapiens
tttcttctgaaaaaa

SEQ ID NO: 644470 - DNA, 15 bp, Homo sapiens
ttcttctgaaaaaag

SEQ ID NO: 644471 - DNA, 15 bp, Homo sapiens
tcttctgaaaaaaga

SEQ ID NO: 644472 - DNA, 15 bp, Homo sapiens
cttctgaaaaaagaa

SEQ ID NO: 644473 - DNA, 15 bp, Homo sapiens
ttctgaaaaaagaaa

SEQ ID NO: 644474 - DNA, 15 bp, Homo sapiens
tctgaaaaaagaaat

SEQ ID NO: 644475 - DNA, 15 bp, Homo sapiens
ctgaaaaaagaaatt

SEQ ID NO: 644476 - DNA, 15 bp, Homo sapiens
tgaaaaaagaaatta

SEQ ID NO: 644477 - DNA, 15 bp, Homo sapiens
gaaaaaagaaattaa

SEQ ID NO: 644478 - DNA, 15 bp, Homo sapiens
aaaaaagaaattaac

SEQ ID NO: 644479 - DNA, 15 bp, Homo sapiens
aaaaagaaattaaca

SEQ ID NO: 644480 - DNA, 15 bp, Homo sapiens
aaaagaaattaacaa

SEQ ID NO: 644481 - DNA, 15 bp, Homo sapiens
aaagaaattaacaaa

SEQ ID NO: 644482 - DNA, 15 bp, Homo sapiens
aagaaattaacaaat

SEQ ID NO: 644483 - DNA, 15 bp, Homo sapiens
agaaattaacaaata

SEQ ID NO: 644484 - DNA, 15 bp, Homo sapiens
gaaattaacaaatat

SEQ ID NO: 644485 - DNA, 15 bp, Homo sapiens
aaattaacaaatatt

SEQ ID NO: 644486 - DNA, 15 bp, Homo sapiens
aattaacaaatattt

SEQ ID NO: 644487 - DNA, 15 bp, Homo sapiens
attaacaaatatttc

SEQ ID NO: 644488 - DNA, 15 bp, Homo sapiens
ttaacaaatatttca

SEQ ID NO: 644489 - DNA, 15 bp, Homo sapiens
taacaaatatttcaa

SEQ ID NO: 644490 - DNA, 15 bp, Homo sapiens
aacaaatatttcaaa

SEQ ID NO: 644491 - DNA, 15 bp, Homo sapiens
acaaatatttcaaac

SEQ ID NO: 644492 - DNA, 15 bp, Homo sapiens
caaatatttcaaaca

SEQ ID NO: 644493 - DNA, 15 bp, Homo sapiens
aaatatttcaaacat

SEQ ID NO: 644494 - DNA, 15 bp, Homo sapiens
aatatttcaaacatt

SEQ ID NO: 644495 - DNA, 15 bp, Homo sapiens
atatttcaaacattg

SEQ ID NO: 644496 - DNA, 15 bp, Homo sapiens
tatttcaaacattgc

SEQ ID NO: 644497 - DNA, 15 bp, Homo sapiens
atttcaaacattgca

SEQ ID NO: 644498 - DNA, 15 bp, Homo sapiens
tttcaaacattgcaa

SEQ ID NO: 644499 - DNA, 15 bp, Homo sapiens
ttcaaacattgcaat

SEQ ID NO: 644500 - DNA, 15 bp, Homo sapiens
tcaaacattgcaatg

SEQ ID NO: 644501 - DNA, 15 bp, Homo sapiens
caaacattgcaatgc

SEQ ID NO: 644502 - DNA, 15 bp, Homo sapiens
aaacattgcaatgct

SEQ ID NO: 644503 - DNA, 15 bp, Homo sapiens
aacattgcaatgcta

SEQ ID NO: 644504 - DNA, 15 bp, Homo sapiens
acattgcaatgctaa

SEQ ID NO: 644505 - DNA, 15 bp, Homo sapiens
cattgcaatgctaaa

SEQ ID NO: 644506 - DNA, 15 bp, Homo sapiens
attgcaatgctaaac

SEQ ID NO: 644507 - DNA, 15 bp, Homo sapiens
ttgcaatgctaaaca

SEQ ID NO: 644508 - DNA, 15 bp, Homo sapiens
tgcaatgctaaacat

SEQ ID NO: 644509 - DNA, 15 bp, Homo sapiens
gcaatgctaaacatt

SEQ ID NO: 644510 - DNA, 15 bp, Homo sapiens
caatgctaaacattc

SEQ ID NO: 644511 - DNA, 15 bp, Homo sapiens
aatgctaaacattcc

SEQ ID NO: 644512 - DNA, 15 bp, Homo sapiens
atgctaaacattcct

SEQ ID NO: 644513 - DNA, 15 bp, Homo sapiens
tgctaaacattcctt

SEQ ID NO: 644514 - DNA, 15 bp, Homo sapiens
gctaaacattccttt

SEQ ID NO: 644515 - DNA, 15 bp, Homo sapiens
ctaaacattcctttg

SEQ ID NO: 644516 - DNA, 15 bp, Homo sapiens
taaacattcctttgt

SEQ ID NO: 644517 - DNA, 15 bp, Homo sapiens
aaacattcctttgtc

SEQ ID NO: 644518 - DNA, 15 bp, Homo sapiens
aacattcctttgtcc

SEQ ID NO: 644519 - DNA, 15 bp, Homo sapiens
acattcctttgtcca

SEQ ID NO: 644520 - DNA, 15 bp, Homo sapiens
cattcctttgtccat

SEQ ID NO: 644521 - DNA, 15 bp, Homo sapiens
attcctttgtccatt

SEQ ID NO: 644522 - DNA, 15 bp, Homo sapiens
ttcctttgtccattt

SEQ ID NO: 644523 - DNA, 15 bp, Homo sapiens
tcctttgtccatttc

SEQ ID NO: 644524 - DNA, 15 bp, Homo sapiens
cctttgtccatttcc

SEQ ID NO: 644525 - DNA, 15 bp, Homo sapiens
ctttgtccatttcca

SEQ ID NO: 644526 - DNA, 15 bp, Homo sapiens
tttgtccatttccag

SEQ ID NO: 644527 - DNA, 15 bp, Homo sapiens
ttgtccatttccaga

SEQ ID NO: 644528 - DNA, 15 bp, Homo sapiens
tgtccatttccagat

SEQ ID NO: 644529 - DNA, 15 bp, Homo sapiens
gtccatttccagata

SEQ ID NO: 644530 - DNA, 15 bp, Homo sapiens
tccatttccagatat

SEQ ID NO: 644531 - DNA, 15 bp, Homo sapiens
ccatttccagatatg

SEQ ID NO: 644532 - DNA, 15 bp, Homo sapiens
catttccagatatgc

SEQ ID NO: 644533 - DNA, 15 bp, Homo sapiens
atttccagatatgct

SEQ ID NO: 644534 - DNA, 15 bp, Homo sapiens
tttccagatatgctt

SEQ ID NO: 644535 - DNA, 15 bp, Homo sapiens
ttccagatatgcttt

SEQ ID NO: 644536 - DNA, 15 bp, Homo sapiens
tccagatatgctttt

SEQ ID NO: 644537 - DNA, 15 bp, Homo sapiens
ccagatatgcttttg

SEQ ID NO: 644538 - DNA, 15 bp, Homo sapiens
cagatatgcttttgg

SEQ ID NO: 644539 - DNA, 15 bp, Homo sapiens
agatatgcttttggg

SEQ ID NO: 644540 - DNA, 15 bp, Homo sapiens
gatatgcttttgggt

SEQ ID NO: 644541 - DNA, 15 bp, Homo sapiens
atatgcttttgggtc

SEQ ID NO: 644542 - DNA, 15 bp, Homo sapiens
tatgcttttgggtca

SEQ ID NO: 644543 - DNA, 15 bp, Homo sapiens
atgcttttgggtcat

SEQ ID NO: 644544 - DNA, 15 bp, Homo sapiens
tgcttttgggtcatt

SEQ ID NO: 644545 - DNA, 15 bp, Homo sapiens
gcttttgggtcattg

SEQ ID NO: 644546 - DNA, 15 bp, Homo sapiens
cttttgggtcattgc

SEQ ID NO: 644547 - DNA, 15 bp, Homo sapiens
ttttgggtcattgcc

SEQ ID NO: 644548 - DNA, 15 bp, Homo sapiens
tttgggtcattgccg

SEQ ID NO: 644549 - DNA, 15 bp, Homo sapiens
ttgggtcattgccgc

SEQ ID NO: 644550 - DNA, 15 bp, Homo sapiens
tgggtcattgccgca

SEQ ID NO: 644551 - DNA, 15 bp, Homo sapiens
gggtcattgccgcag

SEQ ID NO: 644552 - DNA, 15 bp, Homo sapiens
ggtcattgccgcagc

SEQ ID NO: 644553 - DNA, 15 bp, Homo sapiens
gtcattgccgcagct

SEQ ID NO: 644554 - DNA, 15 bp, Homo sapiens
tcattgccgcagctc

SEQ ID NO: 644555 - DNA, 15 bp, Homo sapiens
cattgccgcagctcg

SEQ ID NO: 644556 - DNA, 15 bp, Homo sapiens
attgccgcagctcgt

SEQ ID NO: 644557 - DNA, 15 bp, Homo sapiens
ttgccgcagctcgtc

SEQ ID NO: 644558 - DNA, 15 bp, Homo sapiens
tgccgcagctcgtca

SEQ ID NO: 644559 - DNA, 15 bp, Homo sapiens
gccgcagctcgtcag

SEQ ID NO: 644560 - DNA, 15 bp, Homo sapiens
ccgcagctcgtcaga

SEQ ID NO: 644561 - DNA, 15 bp, Homo sapiens
cgcagctcgtcagat

SEQ ID NO: 644562 - DNA, 15 bp, Homo sapiens
gcagctcgtcagata

SEQ ID NO: 644563 - DNA, 15 bp, Homo sapiens
cagctcgtcagatac

SEQ ID NO: 644564 - DNA, 15 bp, Homo sapiens
agctcgtcagataca

SEQ ID NO: 644565 - DNA, 15 bp, Homo sapiens
gctcgtcagatacag

SEQ ID NO: 644566 - DNA, 15 bp, Homo sapiens
ctcgtcagatacaga

SEQ ID NO: 644567 - DNA, 15 bp, Homo sapiens
tcgtcagatacagaa

SEQ ID NO: 644568 - DNA, 15 bp, Homo sapiens
cgtcagatacagaaa

SEQ ID NO: 644569 - DNA, 15 bp, Homo sapiens
gtcagatacagaaaa

SEQ ID NO: 644570 - DNA, 15 bp, Homo sapiens
tcagatacagaaaat

SEQ ID NO: 644571 - DNA, 15 bp, Homo sapiens
cagatacagaaaatg

SEQ ID NO: 644572 - DNA, 15 bp, Homo sapiens
agatacagaaaatga

SEQ ID NO: 644573 - DNA, 15 bp, Homo sapiens
gatacagaaaatgag

SEQ ID NO: 644574 - DNA, 15 bp, Homo sapiens
atacagaaaatgaga

SEQ ID NO: 644575 - DNA, 15 bp, Homo sapiens
tacagaaaatgagaa

SEQ ID NO: 644576 - DNA, 15 bp, Homo sapiens
acagaaaatgagaaa

SEQ ID NO: 644577 - DNA, 15 bp, Homo sapiens
cagaaaatgagaaaa

SEQ ID NO: 644578 - DNA, 15 bp, Homo sapiens
agaaaatgagaaaat

SEQ ID NO: 644579 - DNA, 15 bp, Homo sapiens
gaaaatgagaaaatt

SEQ ID NO: 644580 - DNA, 15 bp, Homo sapiens
aaaatgagaaaattt

SEQ ID NO: 644581 - DNA, 15 bp, Homo sapiens
aaatgagaaaatttt

SEQ ID NO: 644582 - DNA, 15 bp, Homo sapiens
aatgagaaaatttta

SEQ ID NO: 644583 - DNA, 15 bp, Homo sapiens
atgagaaaattttac

SEQ ID NO: 644584 - DNA, 15 bp, Homo sapiens
tgagaaaattttact

SEQ ID NO: 644585 - DNA, 15 bp, Homo sapiens
gagaaaattttactt

SEQ ID NO: 644586 - DNA, 15 bp, Homo sapiens
agaaaattttacttt

SEQ ID NO: 644587 - DNA, 15 bp, Homo sapiens
gaaaattttacttta

SEQ ID NO: 644588 - DNA, 15 bp, Homo sapiens
aaaattttactttag

SEQ ID NO: 644589 - DNA, 15 bp, Homo sapiens
aaattttactttagg

SEQ ID NO: 644590 - DNA, 15 bp, Homo sapiens
aattttactttagga

SEQ ID NO: 644591 - DNA, 15 bp, Homo sapiens
attttactttaggag

SEQ ID NO: 644592 - DNA, 15 bp, Homo sapiens
ttttactttaggaga

SEQ ID NO: 644593 - DNA, 15 bp, Homo sapiens
tttactttaggagaa

SEQ ID NO: 644594 - DNA, 15 bp, Homo sapiens
ttactttaggagaat

SEQ ID NO: 644595 - DNA, 15 bp, Homo sapiens
tactttaggagaata

SEQ ID NO: 644596 - DNA, 15 bp, Homo sapiens
actttaggagaataa

SEQ ID NO: 644597 - DNA, 15 bp, Homo sapiens
ctttaggagaataat

SEQ ID NO: 644598 - DNA, 15 bp, Homo sapiens
tttaggagaataatg

SEQ ID NO: 644599 - DNA, 15 bp, Homo sapiens
ttaggagaataatga

SEQ ID NO: 644600 - DNA, 15 bp, Homo sapiens
taggagaataatgag

SEQ ID NO: 644601 - DNA, 15 bp, Homo sapiens
aggagaataatgaga

SEQ ID NO: 644602 - DNA, 15 bp, Homo sapiens
ggagaataatgagaa

SEQ ID NO: 644603 - DNA, 15 bp, Homo sapiens
gagaataatgagaat

SEQ ID NO: 644604 - DNA, 15 bp, Homo sapiens
agaataatgagaatg

SEQ ID NO: 644605 - DNA, 15 bp, Homo sapiens
gaataatgagaatgg

SEQ ID NO: 644606 - DNA, 15 bp, Homo sapiens
aataatgagaatgga

SEQ ID NO: 644607 - DNA, 15 bp, Homo sapiens
ataatgagaatggaa

SEQ ID NO: 644608 - DNA, 15 bp, Homo sapiens
taatgagaatggaaa

SEQ ID NO: 644609 - DNA, 15 bp, Homo sapiens
aatgagaatggaaat

SEQ ID NO: 644610 - DNA, 15 bp, Homo sapiens
atgagaatggaaata

SEQ ID NO: 644611 - DNA, 15 bp, Homo sapiens
tgagaatggaaatag

SEQ ID NO: 644612 - DNA, 15 bp, Homo sapiens
gagaatggaaatagg

SEQ ID NO: 644613 - DNA, 15 bp, Homo sapiens
agaatggaaataggg

SEQ ID NO: 644614 - DNA, 15 bp, Homo sapiens
gaatggaaatagggt

SEQ ID NO: 644615 - DNA, 15 bp, Homo sapiens
aatggaaatagggtg

SEQ ID NO: 644616 - DNA, 15 bp, Homo sapiens
atggaaatagggtgg

SEQ ID NO: 644617 - DNA, 15 bp, Homo sapiens
tggaaatagggtggt

SEQ ID NO: 644618 - DNA, 15 bp, Homo sapiens
ggaaatagggtggtt

SEQ ID NO: 644619 - DNA, 15 bp, Homo sapiens
gaaatagggtggttt

SEQ ID NO: 644620 - DNA, 15 bp, Homo sapiens
aaatagggtggtttg

SEQ ID NO: 644621 - DNA, 15 bp, Homo sapiens
aatagggtggtttga

SEQ ID NO: 644622 - DNA, 15 bp, Homo sapiens
atagggtggtttgac

SEQ ID NO: 644623 - DNA, 15 bp, Homo sapiens
tagggtggtttgact

SEQ ID NO: 644624 - DNA, 15 bp, Homo sapiens
agggtggtttgactg

SEQ ID NO: 644625 - DNA, 15 bp, Homo sapiens
gggtggtttgactgc

SEQ ID NO: 644626 - DNA, 15 bp, Homo sapiens
ggtggtttgactgca

SEQ ID NO: 644627 - DNA, 15 bp, Homo sapiens
gtggtttgactgcaa

SEQ ID NO: 644628 - DNA, 15 bp, Homo sapiens
tggtttgactgcaat

SEQ ID NO: 644629 - DNA, 15 bp, Homo sapiens
ggtttgactgcaatt

SEQ ID NO: 644630 - DNA, 15 bp, Homo sapiens
gtttgactgcaattc

SEQ ID NO: 644631 - DNA, 15 bp, Homo sapiens
tttgactgcaattca

SEQ ID NO: 644632 - DNA, 15 bp, Homo sapiens
ttgactgcaattcag

SEQ ID NO: 644633 - DNA, 15 bp, Homo sapiens
tgactgcaattcagt

SEQ ID NO: 644634 - DNA, 15 bp, Homo sapiens
gactgcaattcagtg

SEQ ID NO: 644635 - DNA, 15 bp, Homo sapiens
actgcaattcagtgg

SEQ ID NO: 644636 - DNA, 15 bp, Homo sapiens
ctgcaattcagtggg

SEQ ID NO: 644637 - DNA, 15 bp, Homo sapiens
tgcaattcagtgggg

SEQ ID NO: 644638 - DNA, 15 bp, Homo sapiens
gcaattcagtggggg

SEQ ID NO: 644639 - DNA, 15 bp, Homo sapiens
aattcagtgggggag

SEQ ID NO: 644640 - DNA, 15 bp, Homo sapiens
attcagtgggggagc

SEQ ID NO: 644641 - DNA, 15 bp, Homo sapiens
ttcagtgggggagct

SEQ ID NO: 644642 - DNA, 15 bp, Homo sapiens
tcagtgggggagctg

SEQ ID NO: 644643 - DNA, 15 bp, Homo sapiens
cagtgggggagctga

SEQ ID NO: 644644 - DNA, 15 bp, Homo sapiens
agtgggggagctgaa

SEQ ID NO: 644645 - DNA, 15 bp, Homo sapiens
gtgggggagctgaat

SEQ ID NO: 644646 - DNA, 15 bp, Homo sapiens
tgggggagctgaata

SEQ ID NO: 644647 - DNA, 15 bp, Homo sapiens
gggggagctgaatac

SEQ ID NO: 644648 - DNA, 15 bp, Homo sapiens
ggggagctgaataca

SEQ ID NO: 644649 - DNA, 15 bp, Homo sapiens
gggagctgaatacaa

SEQ ID NO: 644650 - DNA, 15 bp, Homo sapiens
ggagctgaatacaag

SEQ ID NO: 644651 - DNA, 15 bp, Homo sapiens
gagctgaatacaaga

SEQ ID NO: 644652 - DNA, 15 bp, Homo sapiens
agctgaatacaagat

SEQ ID NO: 644653 - DNA, 15 bp, Homo sapiens
gctgaatacaagatt

SEQ ID NO: 644654 - DNA, 15 bp, Homo sapiens
ctgaatacaagattc

SEQ ID NO: 644655 - DNA, 15 bp, Homo sapiens
tgaatacaagattct

SEQ ID NO: 644656 - DNA, 15 bp, Homo sapiens
gaatacaagattctc

SEQ ID NO: 644657 - DNA, 15 bp, Homo sapiens
aatacaagattctct

SEQ ID NO: 644658 - DNA, 15 bp, Homo sapiens
atacaagattctctg

SEQ ID NO: 644659 - DNA, 15 bp, Homo sapiens
tacaagattctctga

SEQ ID NO: 644660 - DNA, 15 bp, Homo sapiens
acaagattctctgag

SEQ ID NO: 644661 - DNA, 15 bp, Homo sapiens
caagattctctgagt

SEQ ID NO: 644662 - DNA, 15 bp, Homo sapiens
aagattctctgagta

SEQ ID NO: 644663 - DNA, 15 bp, Homo sapiens
agattctctgagtaa

SEQ ID NO: 644664 - DNA, 15 bp, Homo sapiens
gattctctgagtaag

SEQ ID NO: 644665 - DNA, 15 bp, Homo sapiens
attctctgagtaagt

SEQ ID NO: 644666 - DNA, 15 bp, Homo sapiens
ttctctgagtaagta

SEQ ID NO: 644667 - DNA, 15 bp, Homo sapiens
tctctgagtaagtag

SEQ ID NO: 644668 - DNA, 15 bp, Homo sapiens
ctctgagtaagtagc

SEQ ID NO: 644669 - DNA, 15 bp, Homo sapiens
tctgagtaagtagct

SEQ ID NO: 644670 - DNA, 15 bp, Homo sapiens
ctgagtaagtagctg

SEQ ID NO: 644671 - DNA, 15 bp, Homo sapiens
tgagtaagtagctgg

SEQ ID NO: 644672 - DNA, 15 bp, Homo sapiens
gagtaagtagctggt

SEQ ID NO: 644673 - DNA, 15 bp, Homo sapiens
agtaagtagctggta

SEQ ID NO: 644674 - DNA, 15 bp, Homo sapiens
gtaagtagctggtaa

SEQ ID NO: 644675 - DNA, 15 bp, Homo sapiens
taagtagctggtaaa

SEQ ID NO: 644676 - DNA, 15 bp, Homo sapiens
aagtagctggtaaaa

SEQ ID NO: 644677 - DNA, 15 bp, Homo sapiens
agtagctggtaaaac

SEQ ID NO: 644678 - DNA, 15 bp, Homo sapiens
gtagctggtaaaaca

SEQ ID NO: 644679 - DNA, 15 bp, Homo sapiens
tagctggtaaaacag

SEQ ID NO: 644680 - DNA, 15 bp, Homo sapiens
agctggtaaaacagt

SEQ ID NO: 644681 - DNA, 15 bp, Homo sapiens
gctggtaaaacagta

SEQ ID NO: 644682 - DNA, 15 bp, Homo sapiens
ctggtaaaacagtat

SEQ ID NO: 644683 - DNA, 15 bp, Homo sapiens
tggtaaaacagtatt

SEQ ID NO: 644684 - DNA, 15 bp, Homo sapiens
ggtaaaacagtattt

SEQ ID NO: 644685 - DNA, 15 bp, Homo sapiens
gtaaaacagtatttt

SEQ ID NO: 644686 - DNA, 15 bp, Homo sapiens
taaaacagtatttta

SEQ ID NO: 644687 - DNA, 15 bp, Homo sapiens
aaaacagtattttag

SEQ ID NO: 644688 - DNA, 15 bp, Homo sapiens
aaacagtattttagt

SEQ ID NO: 644689 - DNA, 15 bp, Homo sapiens
aacagtattttagtg

SEQ ID NO: 644690 - DNA, 15 bp, Homo sapiens
acagtattttagtgt

SEQ ID NO: 644691 - DNA, 15 bp, Homo sapiens
cagtattttagtgtg

SEQ ID NO: 644692 - DNA, 15 bp, Homo sapiens
agtattttagtgtgt

SEQ ID NO: 644693 - DNA, 15 bp, Homo sapiens
gtattttagtgtgtg

SEQ ID NO: 644694 - DNA, 15 bp, Homo sapiens
tattttagtgtgtga

SEQ ID NO: 644695 - DNA, 15 bp, Homo sapiens
attttagtgtgtgat

SEQ ID NO: 644696 - DNA, 15 bp, Homo sapiens
ttttagtgtgtgatt

SEQ ID NO: 644697 - DNA, 15 bp, Homo sapiens
tttagtgtgtgattt

SEQ ID NO: 644698 - DNA, 15 bp, Homo sapiens
ttagtgtgtgatttt

SEQ ID NO: 644699 - DNA, 15 bp, Homo sapiens
tagtgtgtgattttt

SEQ ID NO: 644700 - DNA, 15 bp, Homo sapiens
agtgtgtgatttttg

SEQ ID NO: 644701 - DNA, 15 bp, Homo sapiens
gtgtgtgatttttgg

SEQ ID NO: 644702 - DNA, 15 bp, Homo sapiens
tgtgtgatttttgga

SEQ ID NO: 644703 - DNA, 15 bp, Homo sapiens
gtgtgatttttggat

SEQ ID NO: 644704 - DNA, 15 bp, Homo sapiens
tgtgatttttggata

SEQ ID NO: 644705 - DNA, 15 bp, Homo sapiens
gtgatttttggataa

SEQ ID NO: 644706 - DNA, 15 bp, Homo sapiens
tgatttttggataat

SEQ ID NO: 644707 - DNA, 15 bp, Homo sapiens
gatttttggataata

SEQ ID NO: 644708 - DNA, 15 bp, Homo sapiens
atttttggataataa

SEQ ID NO: 644709 - DNA, 15 bp, Homo sapiens
tttttggataataaa

SEQ ID NO: 644710 - DNA, 15 bp, Homo sapiens
ttttggataataaaa

SEQ ID NO: 644711 - DNA, 15 bp, Homo sapiens
tttggataataaaac

SEQ ID NO: 644712 - DNA, 15 bp, Homo sapiens
ttggataataaaacc

SEQ ID NO: 644713 - DNA, 15 bp, Homo sapiens
tggataataaaaccc

SEQ ID NO: 644714 - DNA, 15 bp, Homo sapiens
ggataataaaaccct

SEQ ID NO: 644715 - DNA, 15 bp, Homo sapiens
gataataaaaccctt

SEQ ID NO: 644716 - DNA, 15 bp, Homo sapiens
ataataaaacccttg

SEQ ID NO: 644717 - DNA, 15 bp, Homo sapiens
taataaaacccttgt

SEQ ID NO: 644718 - DNA, 15 bp, Homo sapiens
aataaaacccttgtt

SEQ ID NO: 644719 - DNA, 15 bp, Homo sapiens
ataaaacccttgttt

SEQ ID NO: 644720 - DNA, 15 bp, Homo sapiens
taaaacccttgtttc

SEQ ID NO: 644721 - DNA, 15 bp, Homo sapiens
aaaacccttgtttct

SEQ ID NO: 644722 - DNA, 15 bp, Homo sapiens
aaacccttgtttcta

SEQ ID NO: 644723 - DNA, 15 bp, Homo sapiens
aacccttgtttctaa

SEQ ID NO: 644724 - DNA, 15 bp, Homo sapiens
acccttgtttctaaa

SEQ ID NO: 644725 - DNA, 15 bp, Homo sapiens
cccttgtttctaaat

SEQ ID NO: 644726 - DNA, 15 bp, Homo sapiens
ccttgtttctaaatt

SEQ ID NO: 644727 - DNA, 15 bp, Homo sapiens
cttgtttctaaatta

SEQ ID NO: 644728 - DNA, 15 bp, Homo sapiens
ttgtttctaaattaa

SEQ ID NO: 644729 - DNA, 15 bp, Homo sapiens
tgtttctaaattaaa

SEQ ID NO: 644730 - DNA, 15 bp, Homo sapiens
gtttctaaattaaat

SEQ ID NO: 644731 - DNA, 15 bp, Homo sapiens
tttctaaattaaata

SEQ ID NO: 644732 - DNA, 15 bp, Homo sapiens
ttctaaattaaataa

SEQ ID NO: 644733 - DNA, 15 bp, Homo sapiens
tctaaattaaataaa

SEQ ID NO: 644734 - DNA, 15 bp, Homo sapiens
ctaaattaaataaaa

SEQ ID NO: 644735 - DNA, 15 bp, Homo sapiens
taaattaaataaaaa

SEQ ID NO: 644736 - DNA, 15 bp, Homo sapiens
aaattaaataaaaat

SEQ ID NO: 644737 - DNA, 15 bp, Homo sapiens
aattaaataaaaatt

SEQ ID NO: 644738 - DNA, 15 bp, Homo sapiens
attaaataaaaattt

SEQ ID NO: 644739 - DNA, 15 bp, Homo sapiens
ttaaataaaaattta

SEQ ID NO: 644740 - DNA, 15 bp, Homo sapiens
taaataaaaatttaa

SEQ ID NO: 644741 - DNA, 15 bp, Homo sapiens
aaataaaaatttaaa

SEQ ID NO: 644742 - DNA, 15 bp, Homo sapiens
aataaaaatttaaaa

SEQ ID NO: 644743 - DNA, 15 bp, Homo sapiens
ataaaaatttaaaaa

SEQ ID NO: 644744 - DNA, 15 bp, Homo sapiens
taaaaatttaaaaat

SEQ ID NO: 644745 - DNA, 15 bp, Homo sapiens
aaaaatttaaaaata

SEQ ID NO: 644746 - DNA, 15 bp, Homo sapiens
aaaatttaaaaatat

SEQ ID NO: 644747 - DNA, 15 bp, Homo sapiens
aaatttaaaaatatt

SEQ ID NO: 644748 - DNA, 15 bp, Homo sapiens
aatttaaaaatattt

SEQ ID NO: 644749 - DNA, 15 bp, Homo sapiens
atttaaaaatatttt

SEQ ID NO: 644750 - DNA, 15 bp, Homo sapiens
tttaaaaatattttc

SEQ ID NO: 644751 - DNA, 15 bp, Homo sapiens
ttaaaaatattttca

SEQ ID NO: 644752 - DNA, 15 bp, Homo sapiens
taaaaatattttcag

SEQ ID NO: 644753 - DNA, 15 bp, Homo sapiens
aaaaatattttcagt

SEQ ID NO: 644754 - DNA, 15 bp, Homo sapiens
aaaatattttcagtt

SEQ ID NO: 644755 - DNA, 15 bp, Homo sapiens
aaatattttcagttt

SEQ ID NO: 644756 - DNA, 15 bp, Homo sapiens
aatattttcagtttt

SEQ ID NO: 644757 - DNA, 15 bp, Homo sapiens
atattttcagttttc

SEQ ID NO: 644758 - DNA, 15 bp, Homo sapiens
tattttcagttttcc

SEQ ID NO: 644759 - DNA, 15 bp, Homo sapiens
attttcagttttcct

SEQ ID NO: 644760 - DNA, 15 bp, Homo sapiens
ttttcagttttccta

SEQ ID NO: 644761 - DNA, 15 bp, Homo sapiens
tttcagttttcctat

SEQ ID NO: 644762 - DNA, 15 bp, Homo sapiens
ttcagttttcctatg

SEQ ID NO: 644763 - DNA, 15 bp, Homo sapiens
tcagttttcctatgt

SEQ ID NO: 644764 - DNA, 15 bp, Homo sapiens
cagttttcctatgtt

SEQ ID NO: 644765 - DNA, 15 bp, Homo sapiens
agttttcctatgttt

SEQ ID NO: 644766 - DNA, 15 bp, Homo sapiens
gttttcctatgtttc

SEQ ID NO: 644767 - DNA, 15 bp, Homo sapiens
ttttcctatgtttca

SEQ ID NO: 644768 - DNA, 15 bp, Homo sapiens
tttcctatgtttcat

SEQ ID NO: 644769 - DNA, 15 bp, Homo sapiens
ttcctatgtttcatc

SEQ ID NO: 644770 - DNA, 15 bp, Homo sapiens
tcctatgtttcatct

SEQ ID NO: 644771 - DNA, 15 bp, Homo sapiens
cctatgtttcatctc

SEQ ID NO: 644772 - DNA, 15 bp, Homo sapiens
ctatgtttcatctct

SEQ ID NO: 644773 - DNA, 15 bp, Homo sapiens
tatgtttcatctctt

SEQ ID NO: 644774 - DNA, 15 bp, Homo sapiens
atgtttcatctctta

SEQ ID NO: 644775 - DNA, 15 bp, Homo sapiens
tgtttcatctcttaa

SEQ ID NO: 644776 - DNA, 15 bp, Homo sapiens
gtttcatctcttaaa

SEQ ID NO: 644777 - DNA, 15 bp, Homo sapiens
tttcatctcttaaat

SEQ ID NO: 644778 - DNA, 15 bp, Homo sapiens
ttcatctcttaaatt

SEQ ID NO: 644779 - DNA, 15 bp, Homo sapiens
tcatctcttaaattg

SEQ ID NO: 644780 - DNA, 15 bp, Homo sapiens
catctcttaaattgg

SEQ ID NO: 644781 - DNA, 15 bp, Homo sapiens
atctcttaaattggg

SEQ ID NO: 644782 - DNA, 15 bp, Homo sapiens
tctcttaaattgggc

SEQ ID NO: 644783 - DNA, 15 bp, Homo sapiens
ctcttaaattgggct

SEQ ID NO: 644784 - DNA, 15 bp, Homo sapiens
tcttaaattgggctt

SEQ ID NO: 644785 - DNA, 15 bp, Homo sapiens
cttaaattgggcttt

SEQ ID NO: 644786 - DNA, 15 bp, Homo sapiens
ttaaattgggctttc

SEQ ID NO: 644787 - DNA, 15 bp, Homo sapiens
taaattgggctttca

SEQ ID NO: 644788 - DNA, 15 bp, Homo sapiens
aaattgggctttcat

SEQ ID NO: 644789 - DNA, 15 bp, Homo sapiens
aattgggctttcata

SEQ ID NO: 644790 - DNA, 15 bp, Homo sapiens
attgggctttcatat

SEQ ID NO: 644791 - DNA, 15 bp, Homo sapiens
ttgggctttcatatg

SEQ ID NO: 644792 - DNA, 15 bp, Homo sapiens
tgggctttcatatgt

SEQ ID NO: 644793 - DNA, 15 bp, Homo sapiens
gggctttcatatgtg

SEQ ID NO: 644794 - DNA, 15 bp, Homo sapiens
ggctttcatatgtgg

SEQ ID NO: 644795 - DNA, 15 bp, Homo sapiens
gctttcatatgtggc

SEQ ID NO: 644796 - DNA, 15 bp, Homo sapiens
ctttcatatgtggca

SEQ ID NO: 644797 - DNA, 15 bp, Homo sapiens
tttcatatgtggcat

SEQ ID NO: 644798 - DNA, 15 bp, Homo sapiens
ttcatatgtggcatg

SEQ ID NO: 644799 - DNA, 15 bp, Homo sapiens
tcatatgtggcatgg

SEQ ID NO: 644800 - DNA, 15 bp, Homo sapiens
catatgtggcatggc

SEQ ID NO: 644801 - DNA, 15 bp, Homo sapiens
atatgtggcatggct

SEQ ID NO: 644802 - DNA, 15 bp, Homo sapiens
tatgtggcatggctt

SEQ ID NO: 644803 - DNA, 15 bp, Homo sapiens
atgtggcatggcttt

SEQ ID NO: 644804 - DNA, 15 bp, Homo sapiens
tgtggcatggctttt

SEQ ID NO: 644805 - DNA, 15 bp, Homo sapiens
gtggcatggcttttt

SEQ ID NO: 644806 - DNA, 15 bp, Homo sapiens
tggcatggctttttc

SEQ ID NO: 644807 - DNA, 15 bp, Homo sapiens
ggcatggctttttca

SEQ ID NO: 644808 - DNA, 15 bp, Homo sapiens
gcatggctttttcat

SEQ ID NO: 644809 - DNA, 15 bp, Homo sapiens
catggctttttcata

SEQ ID NO: 644810 - DNA, 15 bp, Homo sapiens
atggctttttcataa

SEQ ID NO: 644811 - DNA, 15 bp, Homo sapiens
tggctttttcataag

SEQ ID NO: 644812 - DNA, 15 bp, Homo sapiens
ggctttttcataagt

SEQ ID NO: 644813 - DNA, 15 bp, Homo sapiens
gctttttcataagta

SEQ ID NO: 644814 - DNA, 15 bp, Homo sapiens
ctttttcataagtaa

SEQ ID NO: 644815 - DNA, 15 bp, Homo sapiens
tttttcataagtaat

SEQ ID NO: 644816 - DNA, 15 bp, Homo sapiens
ttttcataagtaata

SEQ ID NO: 644817 - DNA, 15 bp, Homo sapiens
tttcataagtaatac

SEQ ID NO: 644818 - DNA, 15 bp, Homo sapiens
ttcataagtaataca

SEQ ID NO: 644819 - DNA, 15 bp, Homo sapiens
tcataagtaatacac

SEQ ID NO: 644820 - DNA, 15 bp, Homo sapiens
cataagtaatacact

SEQ ID NO: 644821 - DNA, 15 bp, Homo sapiens
ataagtaatacactg

SEQ ID NO: 644822 - DNA, 15 bp, Homo sapiens
taagtaatacactgt

SEQ ID NO: 644823 - DNA, 15 bp, Homo sapiens
aagtaatacactgtc

SEQ ID NO: 644824 - DNA, 15 bp, Homo sapiens
agtaatacactgtca

SEQ ID NO: 644825 - DNA, 15 bp, Homo sapiens
gtaatacactgtcaa

SEQ ID NO: 644826 - DNA, 15 bp, Homo sapiens
taatacactgtcaaa

SEQ ID NO: 644827 - DNA, 15 bp, Homo sapiens
aatacactgtcaaat

SEQ ID NO: 644828 - DNA, 15 bp, Homo sapiens
atacactgtcaaata

SEQ ID NO: 644829 - DNA, 15 bp, Homo sapiens
tacactgtcaaatat

SEQ ID NO: 644830 - DNA, 15 bp, Homo sapiens
acactgtcaaatatg

SEQ ID NO: 644831 - DNA, 15 bp, Homo sapiens
cactgtcaaatatgg

SEQ ID NO: 644832 - DNA, 15 bp, Homo sapiens
actgtcaaatatgga

SEQ ID NO: 644833 - DNA, 15 bp, Homo sapiens
ctgtcaaatatggac

SEQ ID NO: 644834 - DNA, 15 bp, Homo sapiens
tgtcaaatatggaca

SEQ ID NO: 644835 - DNA, 15 bp, Homo sapiens
gtcaaatatggacat

SEQ ID NO: 644836 - DNA, 15 bp, Homo sapiens
tcaaatatggacatt

SEQ ID NO: 644837 - DNA, 15 bp, Homo sapiens
caaatatggacatta

SEQ ID NO: 644838 - DNA, 15 bp, Homo sapiens
aaatatggacattaa

SEQ ID NO: 644839 - DNA, 15 bp, Homo sapiens
aatatggacattaaa

SEQ ID NO: 644840 - DNA, 15 bp, Homo sapiens
atatggacattaaaa

SEQ ID NO: 644841 - DNA, 15 bp, Homo sapiens
tatggacattaaaaa

SEQ ID NO: 644842 - DNA, 15 bp, Homo sapiens
atggacattaaaaat

SEQ ID NO: 644843 - DNA, 15 bp, Homo sapiens
tggacattaaaaatt

SEQ ID NO: 644844 - DNA, 15 bp, Homo sapiens
ggacattaaaaattg

SEQ ID NO: 644845 - DNA, 15 bp, Homo sapiens
gacattaaaaattga

SEQ ID NO: 644846 - DNA, 15 bp, Homo sapiens
acattaaaaattgaa

SEQ ID NO: 644847 - DNA, 15 bp, Homo sapiens
cattaaaaattgaaa

SEQ ID NO: 644848 - DNA, 15 bp, Homo sapiens
attaaaaattgaaac

SEQ ID NO: 644849 - DNA, 15 bp, Homo sapiens
ttaaaaattgaaacc

SEQ ID NO: 644850 - DNA, 15 bp, Homo sapiens
taaaaattgaaaccc

SEQ ID NO: 644851 - DNA, 15 bp, Homo sapiens
aaaaattgaaaccca

SEQ ID NO: 644852 - DNA, 15 bp, Homo sapiens
aaaattgaaacccaa

SEQ ID NO: 644853 - DNA, 15 bp, Homo sapiens
aaattgaaacccaag

SEQ ID NO: 644854 - DNA, 15 bp, Homo sapiens
aattgaaacccaagg

SEQ ID NO: 644855 - DNA, 15 bp, Homo sapiens
attgaaacccaaggt

SEQ ID NO: 644856 - DNA, 15 bp, Homo sapiens
ttgaaacccaaggta

SEQ ID NO: 644857 - DNA, 15 bp, Homo sapiens
tgaaacccaaggtac

SEQ ID NO: 644858 - DNA, 15 bp, Homo sapiens
gaaacccaaggtact

SEQ ID NO: 644859 - DNA, 15 bp, Homo sapiens
aaacccaaggtactg

SEQ ID NO: 644860 - DNA, 15 bp, Homo sapiens
aacccaaggtactgc

SEQ ID NO: 644861 - DNA, 15 bp, Homo sapiens
acccaaggtactgca

SEQ ID NO: 644862 - DNA, 15 bp, Homo sapiens
cccaaggtactgcaa

SEQ ID NO: 644863 - DNA, 15 bp, Homo sapiens
ccaaggtactgcaat

SEQ ID NO: 644864 - DNA, 15 bp, Homo sapiens
caaggtactgcaatt

SEQ ID NO: 644865 - DNA, 15 bp, Homo sapiens
aaggtactgcaattt

SEQ ID NO: 644866 - DNA, 15 bp, Homo sapiens
aggtactgcaatttg

SEQ ID NO: 644867 - DNA, 15 bp, Homo sapiens
ggtactgcaatttgg

SEQ ID NO: 644868 - DNA, 15 bp, Homo sapiens
gtactgcaatttggt

SEQ ID NO: 644869 - DNA, 15 bp, Homo sapiens
tactgcaatttggtg

SEQ ID NO: 644870 - DNA, 15 bp, Homo sapiens
actgcaatttggtgt

SEQ ID NO: 644871 - DNA, 15 bp, Homo sapiens
ctgcaatttggtgtg

SEQ ID NO: 644872 - DNA, 15 bp, Homo sapiens
tgcaatttggtgtgt

SEQ ID NO: 644873 - DNA, 15 bp, Homo sapiens
gcaatttggtgtgta

SEQ ID NO: 644874 - DNA, 15 bp, Homo sapiens
caatttggtgtgtag

SEQ ID NO: 644875 - DNA, 15 bp, Homo sapiens
aatttggtgtgtaga

SEQ ID NO: 644876 - DNA, 15 bp, Homo sapiens
atttggtgtgtagac

SEQ ID NO: 644877 - DNA, 15 bp, Homo sapiens
tttggtgtgtagacc

SEQ ID NO: 644878 - DNA, 15 bp, Homo sapiens
ttggtgtgtagacct

SEQ ID NO: 644879 - DNA, 15 bp, Homo sapiens
tggtgtgtagacctt

SEQ ID NO: 644880 - DNA, 15 bp, Homo sapiens
ggtgtgtagacctta

SEQ ID NO: 644881 - DNA, 15 bp, Homo sapiens
gtgtgtagaccttaa

SEQ ID NO: 644882 - DNA, 15 bp, Homo sapiens
tgtgtagaccttaat

SEQ ID NO: 644883 - DNA, 15 bp, Homo sapiens
gtgtagaccttaatt

SEQ ID NO: 644884 - DNA, 15 bp, Homo sapiens
tgtagaccttaatta

SEQ ID NO: 644885 - DNA, 15 bp, Homo sapiens
gtagaccttaattaa

SEQ ID NO: 644886 - DNA, 15 bp, Homo sapiens
tagaccttaattaaa

SEQ ID NO: 644887 - DNA, 15 bp, Homo sapiens
agaccttaattaaaa

SEQ ID NO: 644888 - DNA, 15 bp, Homo sapiens
gaccttaattaaaat

SEQ ID NO: 644889 - DNA, 15 bp, Homo sapiens
accttaattaaaata

SEQ ID NO: 644890 - DNA, 15 bp, Homo sapiens
ccttaattaaaatat

SEQ ID NO: 644891 - DNA, 15 bp, Homo sapiens
cttaattaaaatatt

SEQ ID NO: 644892 - DNA, 15 bp, Homo sapiens
ttaattaaaatatta

SEQ ID NO: 644893 - DNA, 15 bp, Homo sapiens
taattaaaatattag

SEQ ID NO: 644894 - DNA, 15 bp, Homo sapiens
aattaaaatattaga

SEQ ID NO: 644895 - DNA, 15 bp, Homo sapiens
attaaaatattagaa

SEQ ID NO: 644896 - DNA, 15 bp, Homo sapiens
ttaaaatattagaaa

SEQ ID NO: 644897 - DNA, 15 bp, Homo sapiens
taaaatattagaaag

SEQ ID NO: 644898 - DNA, 15 bp, Homo sapiens
aaaatattagaaagg

SEQ ID NO: 644899 - DNA, 15 bp, Homo sapiens
aaatattagaaagga

SEQ ID NO: 644900 - DNA, 15 bp, Homo sapiens
aatattagaaaggaa

SEQ ID NO: 644901 - DNA, 15 bp, Homo sapiens
atattagaaaggaaa

SEQ ID NO: 644902 - DNA, 15 bp, Homo sapiens
tattagaaaggaaat

SEQ ID NO: 644903 - DNA, 15 bp, Homo sapiens
attagaaaggaaata

SEQ ID NO: 644904 - DNA, 15 bp, Homo sapiens
ttagaaaggaaatat

SEQ ID NO: 644905 - DNA, 15 bp, Homo sapiens
tagaaaggaaatatt

SEQ ID NO: 644906 - DNA, 15 bp, Homo sapiens
agaaaggaaatatta

SEQ ID NO: 644907 - DNA, 15 bp, Homo sapiens
gaaaggaaatattat

SEQ ID NO: 644908 - DNA, 15 bp, Homo sapiens
aaaggaaatattata

SEQ ID NO: 644909 - DNA, 15 bp, Homo sapiens
aaggaaatattatag

SEQ ID NO: 644910 - DNA, 15 bp, Homo sapiens
aggaaatattataga

SEQ ID NO: 644911 - DNA, 15 bp, Homo sapiens
ggaaatattatagaa

SEQ ID NO: 644912 - DNA, 15 bp, Homo sapiens
gaaatattatagaag

SEQ ID NO: 644913 - DNA, 15 bp, Homo sapiens
aaatattatagaaga

SEQ ID NO: 644914 - DNA, 15 bp, Homo sapiens
aatattatagaagac

SEQ ID NO: 644915 - DNA, 15 bp, Homo sapiens
atattatagaagaca

SEQ ID NO: 644916 - DNA, 15 bp, Homo sapiens
tattatagaagacag

SEQ ID NO: 644917 - DNA, 15 bp, Homo sapiens
attatagaagacagt

SEQ ID NO: 644918 - DNA, 15 bp, Homo sapiens
ttatagaagacagtt

SEQ ID NO: 644919 - DNA, 15 bp, Homo sapiens
tatagaagacagtta

SEQ ID NO: 644920 - DNA, 15 bp, Homo sapiens
atagaagacagttaa

SEQ ID NO: 644921 - DNA, 15 bp, Homo sapiens
tagaagacagttaaa

SEQ ID NO: 644922 - DNA, 15 bp, Homo sapiens
agaagacagttaaaa

SEQ ID NO: 644923 - DNA, 15 bp, Homo sapiens
gaagacagttaaaaa

SEQ ID NO: 644924 - DNA, 15 bp, Homo sapiens
aagacagttaaaaag

SEQ ID NO: 644925 - DNA, 15 bp, Homo sapiens
agacagttaaaaagg

SEQ ID NO: 644926 - DNA, 15 bp, Homo sapiens
gacagttaaaaaggt

SEQ ID NO: 644927 - DNA, 15 bp, Homo sapiens
acagttaaaaaggtt

SEQ ID NO: 644928 - DNA, 15 bp, Homo sapiens
cagttaaaaaggtta

SEQ ID NO: 644929 - DNA, 15 bp, Homo sapiens
agttaaaaaggttat

SEQ ID NO: 644930 - DNA, 15 bp, Homo sapiens
gttaaaaaggttatt

SEQ ID NO: 644931 - DNA, 15 bp, Homo sapiens
ttaaaaaggttattt

SEQ ID NO: 644932 - DNA, 15 bp, Homo sapiens
taaaaaggttattta

SEQ ID NO: 644933 - DNA, 15 bp, Homo sapiens
aaaaaggttatttag

SEQ ID NO: 644934 - DNA, 15 bp, Homo sapiens
aaaaggttatttagc

SEQ ID NO: 644935 - DNA, 15 bp, Homo sapiens
aaaggttatttagct

SEQ ID NO: 644936 - DNA, 15 bp, Homo sapiens
aaggttatttagctg

SEQ ID NO: 644937 - DNA, 15 bp, Homo sapiens
aggttatttagctgt

SEQ ID NO: 644938 - DNA, 15 bp, Homo sapiens
ggttatttagctgtc

SEQ ID NO: 644939 - DNA, 15 bp, Homo sapiens
gttatttagctgtcc

SEQ ID NO: 644940 - DNA, 15 bp, Homo sapiens
ttatttagctgtcca

SEQ ID NO: 644941 - DNA, 15 bp, Homo sapiens
tatttagctgtccag

SEQ ID NO: 644942 - DNA, 15 bp, Homo sapiens
atttagctgtccagg

SEQ ID NO: 644943 - DNA, 15 bp, Homo sapiens
tttagctgtccaggt

SEQ ID NO: 644944 - DNA, 15 bp, Homo sapiens
ttagctgtccaggtg

SEQ ID NO: 644945 - DNA, 15 bp, Homo sapiens
tagctgtccaggtgt

SEQ ID NO: 644946 - DNA, 15 bp, Homo sapiens
agctgtccaggtgta

SEQ ID NO: 644947 - DNA, 15 bp, Homo sapiens
gctgtccaggtgtaa

SEQ ID NO: 644948 - DNA, 15 bp, Homo sapiens
ctgtccaggtgtaac

SEQ ID NO: 644949 - DNA, 15 bp, Homo sapiens
tgtccaggtgtaact

SEQ ID NO: 644950 - DNA, 15 bp, Homo sapiens
gtccaggtgtaactg

SEQ ID NO: 644951 - DNA, 15 bp, Homo sapiens
tccaggtgtaactgg

SEQ ID NO: 644952 - DNA, 15 bp, Homo sapiens
ccaggtgtaactgga

SEQ ID NO: 644953 - DNA, 15 bp, Homo sapiens
caggtgtaactggat

SEQ ID NO: 644954 - DNA, 15 bp, Homo sapiens
aggtgtaactggatt

SEQ ID NO: 644955 - DNA, 15 bp, Homo sapiens
ggtgtaactggattt

SEQ ID NO: 644956 - DNA, 15 bp, Homo sapiens
gtgtaactggattta

SEQ ID NO: 644957 - DNA, 15 bp, Homo sapiens
tgtaactggatttaa

SEQ ID NO: 644958 - DNA, 15 bp, Homo sapiens
gtaactggatttaaa

SEQ ID NO: 644959 - DNA, 15 bp, Homo sapiens
taactggatttaaat

SEQ ID NO: 644960 - DNA, 15 bp, Homo sapiens
aactggatttaaatc

SEQ ID NO: 644961 - DNA, 15 bp, Homo sapiens
actggatttaaatcc

SEQ ID NO: 644962 - DNA, 15 bp, Homo sapiens
ctggatttaaatcca

SEQ ID NO: 644963 - DNA, 15 bp, Homo sapiens
tggatttaaatccag

SEQ ID NO: 644964 - DNA, 15 bp, Homo sapiens
ggatttaaatccagt

SEQ ID NO: 644965 - DNA, 15 bp, Homo sapiens
gatttaaatccagtt

SEQ ID NO: 644966 - DNA, 15 bp, Homo sapiens
atttaaatccagttt

SEQ ID NO: 644967 - DNA, 15 bp, Homo sapiens
tttaaatccagttta

SEQ ID NO: 644968 - DNA, 15 bp, Homo sapiens
ttaaatccagtttac

SEQ ID NO: 644969 - DNA, 15 bp, Homo sapiens
taaatccagtttaca

SEQ ID NO: 644970 - DNA, 15 bp, Homo sapiens
aaatccagtttacac

SEQ ID NO: 644971 - DNA, 15 bp, Homo sapiens
aatccagtttacacc

SEQ ID NO: 644972 - DNA, 15 bp, Homo sapiens
atccagtttacacct

SEQ ID NO: 644973 - DNA, 15 bp, Homo sapiens
tccagtttacaccta

SEQ ID NO: 644974 - DNA, 15 bp, Homo sapiens
ccagtttacacctag

SEQ ID NO: 644975 - DNA, 15 bp, Homo sapiens
cagtttacacctagt

SEQ ID NO: 644976 - DNA, 15 bp, Homo sapiens
agtttacacctagtt

SEQ ID NO: 644977 - DNA, 15 bp, Homo sapiens
gtttacacctagttt

SEQ ID NO: 644978 - DNA, 15 bp, Homo sapiens
tttacacctagttta

SEQ ID NO: 644979 - DNA, 15 bp, Homo sapiens
ttacacctagtttag

SEQ ID NO: 644980 - DNA, 15 bp, Homo sapiens
tacacctagtttagg

SEQ ID NO: 644981 - DNA, 15 bp, Homo sapiens
acacctagtttaggt

SEQ ID NO: 644982 - DNA, 15 bp, Homo sapiens
cacctagtttaggtc

SEQ ID NO: 644983 - DNA, 15 bp, Homo sapiens
acctagtttaggtca

SEQ ID NO: 644984 - DNA, 15 bp, Homo sapiens
cctagtttaggtcat

SEQ ID NO: 644985 - DNA, 15 bp, Homo sapiens
ctagtttaggtcatt

SEQ ID NO: 644986 - DNA, 15 bp, Homo sapiens
tagtttaggtcatta

SEQ ID NO: 644987 - DNA, 15 bp, Homo sapiens
agtttaggtcattaa

SEQ ID NO: 644988 - DNA, 15 bp, Homo sapiens
gtttaggtcattaac

SEQ ID NO: 644989 - DNA, 15 bp, Homo sapiens
tttaggtcattaaca

SEQ ID NO: 644990 - DNA, 15 bp, Homo sapiens
ttaggtcattaacag

SEQ ID NO: 644991 - DNA, 15 bp, Homo sapiens
taggtcattaacagc

SEQ ID NO: 644992 - DNA, 15 bp, Homo sapiens
aggtcattaacagcc

SEQ ID NO: 644993 - DNA, 15 bp, Homo sapiens
ggtcattaacagcca

SEQ ID NO: 644994 - DNA, 15 bp, Homo sapiens
gtcattaacagccac

SEQ ID NO: 644995 - DNA, 15 bp, Homo sapiens
tcattaacagccacc

SEQ ID NO: 644996 - DNA, 15 bp, Homo sapiens
cattaacagccaccc

SEQ ID NO: 644997 - DNA, 15 bp, Homo sapiens
attaacagccaccca

SEQ ID NO: 644998 - DNA, 15 bp, Homo sapiens
ttaacagccacccag

SEQ ID NO: 644999 - DNA, 15 bp, Homo sapiens
taacagccacccagg

SEQ ID NO: 645000 - DNA, 15 bp, Homo sapiens
aacagccacccagga

SEQ ID NO: 645001 - DNA, 15 bp, Homo sapiens
acagccacccaggaa

SEQ ID NO: 645002 - DNA, 15 bp, Homo sapiens
cagccacccaggaat

SEQ ID NO: 645003 - DNA, 15 bp, Homo sapiens
agccacccaggaatt

SEQ ID NO: 645004 - DNA, 15 bp, Homo sapiens
gccacccaggaattc

SEQ ID NO: 645005 - DNA, 15 bp, Homo sapiens
ccacccaggaattct

SEQ ID NO: 645006 - DNA, 15 bp, Homo sapiens
cacccaggaattcta

SEQ ID NO: 645007 - DNA, 15 bp, Homo sapiens
acccaggaattctaa

SEQ ID NO: 645008 - DNA, 15 bp, Homo sapiens
cccaggaattctaaa

SEQ ID NO: 645009 - DNA, 15 bp, Homo sapiens
ccaggaattctaaat

SEQ ID NO: 645010 - DNA, 15 bp, Homo sapiens
caggaattctaaatg

SEQ ID NO: 645011 - DNA, 15 bp, Homo sapiens
aggaattctaaatga

SEQ ID NO: 645012 - DNA, 15 bp, Homo sapiens
ggaattctaaatgag

SEQ ID NO: 645013 - DNA, 15 bp, Homo sapiens
gaattctaaatgaga

SEQ ID NO: 645014 - DNA, 15 bp, Homo sapiens
aattctaaatgagag

SEQ ID NO: 645015 - DNA, 15 bp, Homo sapiens
attctaaatgagagg

SEQ ID NO: 645016 - DNA, 15 bp, Homo sapiens
ttctaaatgagagga

SEQ ID NO: 645017 - DNA, 15 bp, Homo sapiens
tctaaatgagaggaa

SEQ ID NO: 645018 - DNA, 15 bp, Homo sapiens
ctaaatgagaggaat

SEQ ID NO: 645019 - DNA, 15 bp, Homo sapiens
taaatgagaggaatt

SEQ ID NO: 645020 - DNA, 15 bp, Homo sapiens
aaatgagaggaatta

SEQ ID NO: 645021 - DNA, 15 bp, Homo sapiens
aatgagaggaattag

SEQ ID NO: 645022 - DNA, 15 bp, Homo sapiens
atgagaggaattaga

SEQ ID NO: 645023 - DNA, 15 bp, Homo sapiens
tgagaggaattagaa

SEQ ID NO: 645024 - DNA, 15 bp, Homo sapiens
gagaggaattagaat

SEQ ID NO: 645025 - DNA, 15 bp, Homo sapiens
agaggaattagaatt

SEQ ID NO: 645026 - DNA, 15 bp, Homo sapiens
gaggaattagaattg

SEQ ID NO: 645027 - DNA, 15 bp, Homo sapiens
aggaattagaattgg

SEQ ID NO: 645028 - DNA, 15 bp, Homo sapiens
ggaattagaattggt

SEQ ID NO: 645029 - DNA, 15 bp, Homo sapiens
gaattagaattggtc

SEQ ID NO: 645030 - DNA, 15 bp, Homo sapiens
aattagaattggtcg

SEQ ID NO: 645031 - DNA, 15 bp, Homo sapiens
attagaattggtcga

SEQ ID NO: 645032 - DNA, 15 bp, Homo sapiens
ttagaattggtcgaa

SEQ ID NO: 645033 - DNA, 15 bp, Homo sapiens
tagaattggtcgaac

SEQ ID NO: 645034 - DNA, 15 bp, Homo sapiens
agaattggtcgaacc

SEQ ID NO: 645035 - DNA, 15 bp, Homo sapiens
gaattggtcgaaccc

SEQ ID NO: 645036 - DNA, 15 bp, Homo sapiens
aattggtcgaaccct

SEQ ID NO: 645037 - DNA, 15 bp, Homo sapiens
attggtcgaacccta

SEQ ID NO: 645038 - DNA, 15 bp, Homo sapiens
ttggtcgaaccctat

SEQ ID NO: 645039 - DNA, 15 bp, Homo sapiens
tggtcgaaccctatt

SEQ ID NO: 645040 - DNA, 15 bp, Homo sapiens
ggtcgaaccctattg

SEQ ID NO: 645041 - DNA, 15 bp, Homo sapiens
gtcgaaccctattga

SEQ ID NO: 645042 - DNA, 15 bp, Homo sapiens
tcgaaccctattgaa

SEQ ID NO: 645043 - DNA, 15 bp, Homo sapiens
cgaaccctattgaac

SEQ ID NO: 645044 - DNA, 15 bp, Homo sapiens
gaaccctattgaact

SEQ ID NO: 645045 - DNA, 15 bp, Homo sapiens
aaccctattgaactg

SEQ ID NO: 645046 - DNA, 15 bp, Homo sapiens
accctattgaactga

SEQ ID NO: 645047 - DNA, 15 bp, Homo sapiens
ccctattgaactgaa

SEQ ID NO: 645048 - DNA, 15 bp, Homo sapiens
cctattgaactgaat

SEQ ID NO: 645049 - DNA, 15 bp, Homo sapiens
ctattgaactgaatt

SEQ ID NO: 645050 - DNA, 15 bp, Homo sapiens
tattgaactgaattt

SEQ ID NO: 645051 - DNA, 15 bp, Homo sapiens
attgaactgaatttt

SEQ ID NO: 645052 - DNA, 15 bp, Homo sapiens
ttgaactgaattttg

SEQ ID NO: 645053 - DNA, 15 bp, Homo sapiens
tgaactgaattttga

SEQ ID NO: 645054 - DNA, 15 bp, Homo sapiens
gaactgaattttgag

SEQ ID NO: 645055 - DNA, 15 bp, Homo sapiens
aactgaattttgagg

SEQ ID NO: 645056 - DNA, 15 bp, Homo sapiens
actgaattttgaggt

SEQ ID NO: 645057 - DNA, 15 bp, Homo sapiens
ctgaattttgaggtc

SEQ ID NO: 645058 - DNA, 15 bp, Homo sapiens
tgaattttgaggtcc

SEQ ID NO: 645059 - DNA, 15 bp, Homo sapiens
gaattttgaggtccc

SEQ ID NO: 645060 - DNA, 15 bp, Homo sapiens
aattttgaggtcccc

SEQ ID NO: 645061 - DNA, 15 bp, Homo sapiens
attttgaggtcccct

SEQ ID NO: 645062 - DNA, 15 bp, Homo sapiens
ttttgaggtcccctg

SEQ ID NO: 645063 - DNA, 15 bp, Homo sapiens
tttgaggtcccctga

SEQ ID NO: 645064 - DNA, 15 bp, Homo sapiens
ttgaggtcccctgaa

SEQ ID NO: 645065 - DNA, 15 bp, Homo sapiens
tgaggtcccctgaaa

SEQ ID NO: 645066 - DNA, 15 bp, Homo sapiens
gaggtcccctgaaag

SEQ ID NO: 645067 - DNA, 15 bp, Homo sapiens
aggtcccctgaaaga

SEQ ID NO: 645068 - DNA, 15 bp, Homo sapiens
ggtcccctgaaagac

SEQ ID NO: 645069 - DNA, 15 bp, Homo sapiens
gtcccctgaaagaca

SEQ ID NO: 645070 - DNA, 15 bp, Homo sapiens
tcccctgaaagacag

SEQ ID NO: 645071 - DNA, 15 bp, Homo sapiens
cccctgaaagacagt

SEQ ID NO: 645072 - DNA, 15 bp, Homo sapiens
ccctgaaagacagtc

SEQ ID NO: 645073 - DNA, 15 bp, Homo sapiens
cctgaaagacagtca

SEQ ID NO: 645074 - DNA, 15 bp, Homo sapiens
ctgaaagacagtcac

SEQ ID NO: 645075 - DNA, 15 bp, Homo sapiens
tgaaagacagtcact

SEQ ID NO: 645076 - DNA, 15 bp, Homo sapiens
gaaagacagtcactc

SEQ ID NO: 645077 - DNA, 15 bp, Homo sapiens
aaagacagtcactct

SEQ ID NO: 645078 - DNA, 15 bp, Homo sapiens
aagacagtcactcta

SEQ ID NO: 645079 - DNA, 15 bp, Homo sapiens
agacagtcactctac

SEQ ID NO: 645080 - DNA, 15 bp, Homo sapiens
gacagtcactctaca

SEQ ID NO: 645081 - DNA, 15 bp, Homo sapiens
acagtcactctacag

SEQ ID NO: 645082 - DNA, 15 bp, Homo sapiens
cagtcactctacagt

SEQ ID NO: 645083 - DNA, 15 bp, Homo sapiens
agtcactctacagtg

SEQ ID NO: 645084 - DNA, 15 bp, Homo sapiens
gtcactctacagtgt

SEQ ID NO: 645085 - DNA, 15 bp, Homo sapiens
tcactctacagtgta

SEQ ID NO: 645086 - DNA, 15 bp, Homo sapiens
cactctacagtgtag

SEQ ID NO: 645087 - DNA, 15 bp, Homo sapiens
actctacagtgtaga

SEQ ID NO: 645088 - DNA, 15 bp, Homo sapiens
ctctacagtgtagat

SEQ ID NO: 645089 - DNA, 15 bp, Homo sapiens
tctacagtgtagata

SEQ ID NO: 645090 - DNA, 15 bp, Homo sapiens
ctacagtgtagataa

SEQ ID NO: 645091 - DNA, 15 bp, Homo sapiens
tacagtgtagataaa

SEQ ID NO: 645092 - DNA, 15 bp, Homo sapiens
acagtgtagataaag

SEQ ID NO: 645093 - DNA, 15 bp, Homo sapiens
cagtgtagataaagc

SEQ ID NO: 645094 - DNA, 15 bp, Homo sapiens
agtgtagataaagca

SEQ ID NO: 645095 - DNA, 15 bp, Homo sapiens
gtgtagataaagcac

SEQ ID NO: 645096 - DNA, 15 bp, Homo sapiens
tgtagataaagcaca

SEQ ID NO: 645097 - DNA, 15 bp, Homo sapiens
gtagataaagcacac

SEQ ID NO: 645098 - DNA, 15 bp, Homo sapiens
tagataaagcacact

SEQ ID NO: 645099 - DNA, 15 bp, Homo sapiens
agataaagcacactg

SEQ ID NO: 645100 - DNA, 15 bp, Homo sapiens
gataaagcacactga

SEQ ID NO: 645101 - DNA, 15 bp, Homo sapiens
ataaagcacactgaa

SEQ ID NO: 645102 - DNA, 15 bp, Homo sapiens
taaagcacactgaaa

SEQ ID NO: 645103 - DNA, 15 bp, Homo sapiens
aaagcacactgaaat

SEQ ID NO: 645104 - DNA, 15 bp, Homo sapiens
aagcacactgaaatt

SEQ ID NO: 645105 - DNA, 15 bp, Homo sapiens
agcacactgaaattc

SEQ ID NO: 645106 - DNA, 15 bp, Homo sapiens
gcacactgaaattca

SEQ ID NO: 645107 - DNA, 15 bp, Homo sapiens
cacactgaaattcag

SEQ ID NO: 645108 - DNA, 15 bp, Homo sapiens
acactgaaattcagg

SEQ ID NO: 645109 - DNA, 15 bp, Homo sapiens
cactgaaattcagga

SEQ ID NO: 645110 - DNA, 15 bp, Homo sapiens
actgaaattcaggac

SEQ ID NO: 645111 - DNA, 15 bp, Homo sapiens
ctgaaattcaggacc

SEQ ID NO: 645112 - DNA, 15 bp, Homo sapiens
tgaaattcaggaccc

SEQ ID NO: 645113 - DNA, 15 bp, Homo sapiens
gaaattcaggacccc

SEQ ID NO: 645114 - DNA, 15 bp, Homo sapiens
aaattcaggacccct

SEQ ID NO: 645115 - DNA, 15 bp, Homo sapiens
aattcaggacccctg

SEQ ID NO: 645116 - DNA, 15 bp, Homo sapiens
attcaggacccctga

SEQ ID NO: 645117 - DNA, 15 bp, Homo sapiens
ttcaggacccctgac

SEQ ID NO: 645118 - DNA, 15 bp, Homo sapiens
tcaggacccctgact

SEQ ID NO: 645119 - DNA, 15 bp, Homo sapiens
caggacccctgactt

SEQ ID NO: 645120 - DNA, 15 bp, Homo sapiens
aggacccctgacttc

SEQ ID NO: 645121 - DNA, 15 bp, Homo sapiens
ggacccctgacttcc

SEQ ID NO: 645122 - DNA, 15 bp, Homo sapiens
gacccctgacttccg

SEQ ID NO: 645123 - DNA, 15 bp, Homo sapiens
acccctgacttccgg

SEQ ID NO: 645124 - DNA, 15 bp, Homo sapiens
cccctgacttccggc

SEQ ID NO: 645125 - DNA, 15 bp, Homo sapiens
ccctgacttccggca

SEQ ID NO: 645126 - DNA, 15 bp, Homo sapiens
cctgacttccggcac

SEQ ID NO: 645127 - DNA, 15 bp, Homo sapiens
ctgacttccggcact

SEQ ID NO: 645128 - DNA, 15 bp, Homo sapiens
tgacttccggcactt

SEQ ID NO: 645129 - DNA, 15 bp, Homo sapiens
gacttccggcactta

SEQ ID NO: 645130 - DNA, 15 bp, Homo sapiens
acttccggcacttac

SEQ ID NO: 645131 - DNA, 15 bp, Homo sapiens
cttccggcacttact

SEQ ID NO: 645132 - DNA, 15 bp, Homo sapiens
ttccggcacttactc

SEQ ID NO: 645133 - DNA, 15 bp, Homo sapiens
tccggcacttactct

SEQ ID NO: 645134 - DNA, 15 bp, Homo sapiens
ccggcacttactctg

SEQ ID NO: 645135 - DNA, 15 bp, Homo sapiens
cggcacttactctgc

SEQ ID NO: 645136 - DNA, 15 bp, Homo sapiens
ggcacttactctgct

SEQ ID NO: 645137 - DNA, 15 bp, Homo sapiens
gcacttactctgctc

SEQ ID NO: 645138 - DNA, 15 bp, Homo sapiens
cacttactctgctcc

SEQ ID NO: 645139 - DNA, 15 bp, Homo sapiens
acttactctgctcct

SEQ ID NO: 645140 - DNA, 15 bp, Homo sapiens
cttactctgctcctt

SEQ ID NO: 645141 - DNA, 15 bp, Homo sapiens
ttactctgctcctta

SEQ ID NO: 645142 - DNA, 15 bp, Homo sapiens
tactctgctccttac

SEQ ID NO: 645143 - DNA, 15 bp, Homo sapiens
actctgctccttact

SEQ ID NO: 645144 - DNA, 15 bp, Homo sapiens
ctctgctccttactg

SEQ ID NO: 645145 - DNA, 15 bp, Homo sapiens
tctgctccttactgt

SEQ ID NO: 645146 - DNA, 15 bp, Homo sapiens
ctgctccttactgtg

SEQ ID NO: 645147 - DNA, 15 bp, Homo sapiens
tgctccttactgtga

SEQ ID NO: 645148 - DNA, 15 bp, Homo sapiens
gctccttactgtgac

SEQ ID NO: 645149 - DNA, 15 bp, Homo sapiens
ctccttactgtgacc

SEQ ID NO: 645150 - DNA, 15 bp, Homo sapiens
tccttactgtgacct

SEQ ID NO: 645151 - DNA, 15 bp, Homo sapiens
ccttactgtgacctt

SEQ ID NO: 645152 - DNA, 15 bp, Homo sapiens
cttactgtgaccttg

SEQ ID NO: 645153 - DNA, 15 bp, Homo sapiens
ttactgtgaccttga

SEQ ID NO: 645154 - DNA, 15 bp, Homo sapiens
tactgtgaccttgag

SEQ ID NO: 645155 - DNA, 15 bp, Homo sapiens
actgtgaccttgagc

SEQ ID NO: 645156 - DNA, 15 bp, Homo sapiens
ctgtgaccttgagca

SEQ ID NO: 645157 - DNA, 15 bp, Homo sapiens
tgtgaccttgagcag

SEQ ID NO: 645158 - DNA, 15 bp, Homo sapiens
gtgaccttgagcagt

SEQ ID NO: 645159 - DNA, 15 bp, Homo sapiens
tgaccttgagcagtt

SEQ ID NO: 645160 - DNA, 15 bp, Homo sapiens
gaccttgagcagtta

SEQ ID NO: 645161 - DNA, 15 bp, Homo sapiens
accttgagcagttat

SEQ ID NO: 645162 - DNA, 15 bp, Homo sapiens
ccttgagcagttatc

SEQ ID NO: 645163 - DNA, 15 bp, Homo sapiens
cttgagcagttatct

SEQ ID NO: 645164 - DNA, 15 bp, Homo sapiens
ttgagcagttatcta

SEQ ID NO: 645165 - DNA, 15 bp, Homo sapiens
tgagcagttatctaa

SEQ ID NO: 645166 - DNA, 15 bp, Homo sapiens
gagcagttatctaac

SEQ ID NO: 645167 - DNA, 15 bp, Homo sapiens
agcagttatctaacc

SEQ ID NO: 645168 - DNA, 15 bp, Homo sapiens
gcagttatctaaccc

SEQ ID NO: 645169 - DNA, 15 bp, Homo sapiens
cagttatctaaccct

SEQ ID NO: 645170 - DNA, 15 bp, Homo sapiens
agttatctaaccctg

SEQ ID NO: 645171 - DNA, 15 bp, Homo sapiens
gttatctaaccctgc

SEQ ID NO: 645172 - DNA, 15 bp, Homo sapiens
ttatctaaccctgct

SEQ ID NO: 645173 - DNA, 15 bp, Homo sapiens
tatctaaccctgctg

SEQ ID NO: 645174 - DNA, 15 bp, Homo sapiens
atctaaccctgctgg

SEQ ID NO: 645175 - DNA, 15 bp, Homo sapiens
tctaaccctgctgga

SEQ ID NO: 645176 - DNA, 15 bp, Homo sapiens
ctaaccctgctggaa

SEQ ID NO: 645177 - DNA, 15 bp, Homo sapiens
taaccctgctggaac

SEQ ID NO: 645178 - DNA, 15 bp, Homo sapiens
aaccctgctggaaca

SEQ ID NO: 645179 - DNA, 15 bp, Homo sapiens
accctgctggaacac

SEQ ID NO: 645180 - DNA, 15 bp, Homo sapiens
ccctgctggaacaca

SEQ ID NO: 645181 - DNA, 15 bp, Homo sapiens
cctgctggaacacaa

SEQ ID NO: 645182 - DNA, 15 bp, Homo sapiens
ctgctggaacacaat

SEQ ID NO: 645183 - DNA, 15 bp, Homo sapiens
tgctggaacacaatg

SEQ ID NO: 645184 - DNA, 15 bp, Homo sapiens
gctggaacacaatgg

SEQ ID NO: 645185 - DNA, 15 bp, Homo sapiens
ctggaacacaatggc

SEQ ID NO: 645186 - DNA, 15 bp, Homo sapiens
tggaacacaatggcc

SEQ ID NO: 645187 - DNA, 15 bp, Homo sapiens
ggaacacaatggcct

SEQ ID NO: 645188 - DNA, 15 bp, Homo sapiens
gaacacaatggccta

SEQ ID NO: 645189 - DNA, 15 bp, Homo sapiens
aacacaatggcctaa

SEQ ID NO: 645190 - DNA, 15 bp, Homo sapiens
acacaatggcctaat

SEQ ID NO: 645191 - DNA, 15 bp, Homo sapiens
cacaatggcctaata

SEQ ID NO: 645192 - DNA, 15 bp, Homo sapiens
acaatggcctaatac

SEQ ID NO: 645193 - DNA, 15 bp, Homo sapiens
caatggcctaatacc

SEQ ID NO: 645194 - DNA, 15 bp, Homo sapiens
aatggcctaatacct

SEQ ID NO: 645195 - DNA, 15 bp, Homo sapiens
atggcctaatacctg

SEQ ID NO: 645196 - DNA, 15 bp, Homo sapiens
tggcctaatacctgg

SEQ ID NO: 645197 - DNA, 15 bp, Homo sapiens
ggcctaatacctggg

SEQ ID NO: 645198 - DNA, 15 bp, Homo sapiens
gcctaatacctgggt

SEQ ID NO: 645199 - DNA, 15 bp, Homo sapiens
cctaatacctgggtg

SEQ ID NO: 645200 - DNA, 15 bp, Homo sapiens
ctaatacctgggtga

SEQ ID NO: 645201 - DNA, 15 bp, Homo sapiens
taatacctgggtgat

SEQ ID NO: 645202 - DNA, 15 bp, Homo sapiens
aatacctgggtgatg

SEQ ID NO: 645203 - DNA, 15 bp, Homo sapiens
atacctgggtgatgt

SEQ ID NO: 645204 - DNA, 15 bp, Homo sapiens
tacctgggtgatgtc

SEQ ID NO: 645205 - DNA, 15 bp, Homo sapiens
acctgggtgatgtct

SEQ ID NO: 645206 - DNA, 15 bp, Homo sapiens
cctgggtgatgtctt

SEQ ID NO: 645207 - DNA, 15 bp, Homo sapiens
ctgggtgatgtctta

SEQ ID NO: 645208 - DNA, 15 bp, Homo sapiens
tgggtgatgtcttag

SEQ ID NO: 645209 - DNA, 15 bp, Homo sapiens
gggtgatgtcttagg

SEQ ID NO: 645210 - DNA, 15 bp, Homo sapiens
ggtgatgtcttaggt

SEQ ID NO: 645211 - DNA, 15 bp, Homo sapiens
gtgatgtcttaggtt

SEQ ID NO: 645212 - DNA, 15 bp, Homo sapiens
tgatgtcttaggttc

SEQ ID NO: 645213 - DNA, 15 bp, Homo sapiens
gatgtcttaggttct

SEQ ID NO: 645214 - DNA, 15 bp, Homo sapiens
atgtcttaggttctt

SEQ ID NO: 645215 - DNA, 15 bp, Homo sapiens
tgtcttaggttcttt

SEQ ID NO: 645216 - DNA, 15 bp, Homo sapiens
gtcttaggttctttc

SEQ ID NO: 645217 - DNA, 15 bp, Homo sapiens
tcttaggttctttct

SEQ ID NO: 645218 - DNA, 15 bp, Homo sapiens
cttaggttctttctt

SEQ ID NO: 645219 - DNA, 15 bp, Homo sapiens
ttaggttctttcttg

SEQ ID NO: 645220 - DNA, 15 bp, Homo sapiens
taggttctttcttgc

SEQ ID NO: 645221 - DNA, 15 bp, Homo sapiens
aggttctttcttgct

SEQ ID NO: 645222 - DNA, 15 bp, Homo sapiens
ggttctttcttgctg

SEQ ID NO: 645223 - DNA, 15 bp, Homo sapiens
gttctttcttgctgt

SEQ ID NO: 645224 - DNA, 15 bp, Homo sapiens
ttctttcttgctgtt

SEQ ID NO: 645225 - DNA, 15 bp, Homo sapiens
tctttcttgctgttt

SEQ ID NO: 645226 - DNA, 15 bp, Homo sapiens
ctttcttgctgttta

SEQ ID NO: 645227 - DNA, 15 bp, Homo sapiens
tttcttgctgtttag

SEQ ID NO: 645228 - DNA, 15 bp, Homo sapiens
ttcttgctgtttagt

SEQ ID NO: 645229 - DNA, 15 bp, Homo sapiens
tcttgctgtttagtt

SEQ ID NO: 645230 - DNA, 15 bp, Homo sapiens
cttgctgtttagttc

SEQ ID NO: 645231 - DNA, 15 bp, Homo sapiens
ttgctgtttagttcc

SEQ ID NO: 645232 - DNA, 15 bp, Homo sapiens
tgctgtttagttcca

SEQ ID NO: 645233 - DNA, 15 bp, Homo sapiens
gctgtttagttccaa

SEQ ID NO: 645234 - DNA, 15 bp, Homo sapiens
ctgtttagttccaag

SEQ ID NO: 645235 - DNA, 15 bp, Homo sapiens
tgtttagttccaagc

SEQ ID NO: 645236 - DNA, 15 bp, Homo sapiens
gtttagttccaagct

SEQ ID NO: 645237 - DNA, 15 bp, Homo sapiens
tttagttccaagctc

SEQ ID NO: 645238 - DNA, 15 bp, Homo sapiens
ttagttccaagctct

SEQ ID NO: 645239 - DNA, 15 bp, Homo sapiens
tagttccaagctctc

SEQ ID NO: 645240 - DNA, 15 bp, Homo sapiens
agttccaagctctct

SEQ ID NO: 645241 - DNA, 15 bp, Homo sapiens
gttccaagctctctt

SEQ ID NO: 645242 - DNA, 15 bp, Homo sapiens
ttccaagctctcttc

SEQ ID NO: 645243 - DNA, 15 bp, Homo sapiens
tccaagctctcttca

SEQ ID NO: 645244 - DNA, 15 bp, Homo sapiens
ccaagctctcttcac

SEQ ID NO: 645245 - DNA, 15 bp, Homo sapiens
caagctctcttcact

SEQ ID NO: 645246 - DNA, 15 bp, Homo sapiens
aagctctcttcactc

SEQ ID NO: 645247 - DNA, 15 bp, Homo sapiens
agctctcttcactcc

SEQ ID NO: 645248 - DNA, 15 bp, Homo sapiens
gctctcttcactcca

SEQ ID NO: 645249 - DNA, 15 bp, Homo sapiens
ctctcttcactccaa

SEQ ID NO: 645250 - DNA, 15 bp, Homo sapiens
tctcttcactccaac

SEQ ID NO: 645251 - DNA, 15 bp, Homo sapiens
ctcttcactccaact

SEQ ID NO: 645252 - DNA, 15 bp, Homo sapiens
tcttcactccaactg

SEQ ID NO: 645253 - DNA, 15 bp, Homo sapiens
cttcactccaactgg

SEQ ID NO: 645254 - DNA, 15 bp, Homo sapiens
ttcactccaactgga

SEQ ID NO: 645255 - DNA, 15 bp, Homo sapiens
tcactccaactggac

SEQ ID NO: 645256 - DNA, 15 bp, Homo sapiens
cactccaactggaca

SEQ ID NO: 645257 - DNA, 15 bp, Homo sapiens
actccaactggacaa

SEQ ID NO: 645258 - DNA, 15 bp, Homo sapiens
ctccaactggacaag

SEQ ID NO: 645259 - DNA, 15 bp, Homo sapiens
tccaactggacaaga

SEQ ID NO: 645260 - DNA, 15 bp, Homo sapiens
ccaactggacaagag

SEQ ID NO: 645261 - DNA, 15 bp, Homo sapiens
caactggacaagaga

SEQ ID NO: 645262 - DNA, 15 bp, Homo sapiens
aactggacaagagat

SEQ ID NO: 645263 - DNA, 15 bp, Homo sapiens
actggacaagagatt

SEQ ID NO: 645264 - DNA, 15 bp, Homo sapiens
ctggacaagagatta

SEQ ID NO: 645265 - DNA, 15 bp, Homo sapiens
tggacaagagattaa

SEQ ID NO: 645266 - DNA, 15 bp, Homo sapiens
ggacaagagattaag

SEQ ID NO: 645267 - DNA, 15 bp, Homo sapiens
gacaagagattaagg

SEQ ID NO: 645268 - DNA, 15 bp, Homo sapiens
acaagagattaagga

SEQ ID NO: 645269 - DNA, 15 bp, Homo sapiens
caagagattaaggaa

SEQ ID NO: 645270 - DNA, 15 bp, Homo sapiens
aagagattaaggaaa

SEQ ID NO: 645271 - DNA, 15 bp, Homo sapiens
agagattaaggaaat

SEQ ID NO: 645272 - DNA, 15 bp, Homo sapiens
gagattaaggaaatg

SEQ ID NO: 645273 - DNA, 15 bp, Homo sapiens
agattaaggaaatgt

SEQ ID NO: 645274 - DNA, 15 bp, Homo sapiens
gattaaggaaatgtt

SEQ ID NO: 645275 - DNA, 15 bp, Homo sapiens
attaaggaaatgttc

SEQ ID NO: 645276 - DNA, 15 bp, Homo sapiens
ttaaggaaatgttct

SEQ ID NO: 645277 - DNA, 15 bp, Homo sapiens
taaggaaatgttctc

SEQ ID NO: 645278 - DNA, 15 bp, Homo sapiens
aaggaaatgttctca

SEQ ID NO: 645279 - DNA, 15 bp, Homo sapiens
aggaaatgttctcag

SEQ ID NO: 645280 - DNA, 15 bp, Homo sapiens
ggaaatgttctcagg

SEQ ID NO: 645281 - DNA, 15 bp, Homo sapiens
gaaatgttctcagga

SEQ ID NO: 645282 - DNA, 15 bp, Homo sapiens
aaatgttctcaggaa

SEQ ID NO: 645283 - DNA, 15 bp, Homo sapiens
aatgttctcaggaat

SEQ ID NO: 645284 - DNA, 15 bp, Homo sapiens
atgttctcaggaata

SEQ ID NO: 645285 - DNA, 15 bp, Homo sapiens
tgttctcaggaatat

SEQ ID NO: 645286 - DNA, 15 bp, Homo sapiens
gttctcaggaatatg

SEQ ID NO: 645287 - DNA, 15 bp, Homo sapiens
ttctcaggaatatga

SEQ ID NO: 645288 - DNA, 15 bp, Homo sapiens
tctcaggaatatgaa

SEQ ID NO: 645289 - DNA, 15 bp, Homo sapiens
ctcaggaatatgaat

SEQ ID NO: 645290 - DNA, 15 bp, Homo sapiens
tcaggaatatgaatt

SEQ ID NO: 645291 - DNA, 15 bp, Homo sapiens
caggaatatgaattt

SEQ ID NO: 645292 - DNA, 15 bp, Homo sapiens
aggaatatgaattta

SEQ ID NO: 645293 - DNA, 15 bp, Homo sapiens
ggaatatgaatttaa

SEQ ID NO: 645294 - DNA, 15 bp, Homo sapiens
gaatatgaatttaat

SEQ ID NO: 645295 - DNA, 15 bp, Homo sapiens
aatatgaatttaata

SEQ ID NO: 645296 - DNA, 15 bp, Homo sapiens
atatgaatttaatat

SEQ ID NO: 645297 - DNA, 15 bp, Homo sapiens
tatgaatttaatata

SEQ ID NO: 645298 - DNA, 15 bp, Homo sapiens
atgaatttaatataa

SEQ ID NO: 645299 - DNA, 15 bp, Homo sapiens
tgaatttaatataat

SEQ ID NO: 645300 - DNA, 15 bp, Homo sapiens
gaatttaatataatt

SEQ ID NO: 645301 - DNA, 15 bp, Homo sapiens
aatttaatataatta

SEQ ID NO: 645302 - DNA, 15 bp, Homo sapiens
atttaatataattat

SEQ ID NO: 645303 - DNA, 15 bp, Homo sapiens
tttaatataattata

SEQ ID NO: 645304 - DNA, 15 bp, Homo sapiens
ttaatataattatat

SEQ ID NO: 645305 - DNA, 15 bp, Homo sapiens
taatataattatatt

SEQ ID NO: 645306 - DNA, 15 bp, Homo sapiens
aatataattatattc

SEQ ID NO: 645307 - DNA, 15 bp, Homo sapiens
atataattatattca

SEQ ID NO: 645308 - DNA, 15 bp, Homo sapiens
tataattatattcaa

SEQ ID NO: 645309 - DNA, 15 bp, Homo sapiens
ataattatattcaat

SEQ ID NO: 645310 - DNA, 15 bp, Homo sapiens
taattatattcaata

SEQ ID NO: 645311 - DNA, 15 bp, Homo sapiens
aattatattcaataa

SEQ ID NO: 645312 - DNA, 15 bp, Homo sapiens
attatattcaataaa

SEQ ID NO: 645313 - DNA, 15 bp, Homo sapiens
ttatattcaataaat

SEQ ID NO: 645314 - DNA, 15 bp, Homo sapiens
tatattcaataaata

SEQ ID NO: 645315 - DNA, 15 bp, Homo sapiens
atattcaataaatat

SEQ ID NO: 645316 - DNA, 15 bp, Homo sapiens
tattcaataaatatt

SEQ ID NO: 645317 - DNA, 15 bp, Homo sapiens
attcaataaatattc

SEQ ID NO: 645318 - DNA, 15 bp, Homo sapiens
ttcaataaatattct

SEQ ID NO: 645319 - DNA, 15 bp, Homo sapiens
tcaataaatattctg

SEQ ID NO: 645320 - DNA, 15 bp, Homo sapiens
caataaatattctgg

SEQ ID NO: 645321 - DNA, 15 bp, Homo sapiens
aataaatattctgga

SEQ ID NO: 645322 - DNA, 15 bp, Homo sapiens
ataaatattctggag

SEQ ID NO: 645323 - DNA, 15 bp, Homo sapiens
taaatattctggagc

SEQ ID NO: 645324 - DNA, 15 bp, Homo sapiens
aaatattctggagca

SEQ ID NO: 645325 - DNA, 15 bp, Homo sapiens
aatattctggagcaa

SEQ ID NO: 645326 - DNA, 15 bp, Homo sapiens
atattctggagcaat

SEQ ID NO: 645327 - DNA, 15 bp, Homo sapiens
tattctggagcaatt

SEQ ID NO: 645328 - DNA, 15 bp, Homo sapiens
attctggagcaattg

SEQ ID NO: 645329 - DNA, 15 bp, Homo sapiens
ttctggagcaattgc

SEQ ID NO: 645330 - DNA, 15 bp, Homo sapiens
tctggagcaattgcc

SEQ ID NO: 645331 - DNA, 15 bp, Homo sapiens
ctggagcaattgcct

SEQ ID NO: 645332 - DNA, 15 bp, Homo sapiens
tggagcaattgcctt

SEQ ID NO: 645333 - DNA, 15 bp, Homo sapiens
ggagcaattgccttg

SEQ ID NO: 645334 - DNA, 15 bp, Homo sapiens
gagcaattgccttgc

SEQ ID NO: 645335 - DNA, 15 bp, Homo sapiens
agcaattgccttgca

SEQ ID NO: 645336 - DNA, 15 bp, Homo sapiens
gcaattgccttgcac

SEQ ID NO: 645337 - DNA, 15 bp, Homo sapiens
caattgccttgcact

SEQ ID NO: 645338 - DNA, 15 bp, Homo sapiens
aattgccttgcactt

SEQ ID NO: 645339 - DNA, 15 bp, Homo sapiens
attgccttgcacttg

SEQ ID NO: 645340 - DNA, 15 bp, Homo sapiens
ttgccttgcacttgt

SEQ ID NO: 645341 - DNA, 15 bp, Homo sapiens
tgccttgcacttgtg

SEQ ID NO: 645342 - DNA, 15 bp, Homo sapiens
gccttgcacttgtgc

SEQ ID NO: 645343 - DNA, 15 bp, Homo sapiens
ccttgcacttgtgct

SEQ ID NO: 645344 - DNA, 15 bp, Homo sapiens
cttgcacttgtgctc

SEQ ID NO: 645345 - DNA, 15 bp, Homo sapiens
ttgcacttgtgctct

SEQ ID NO: 645346 - DNA, 15 bp, Homo sapiens
tgcacttgtgctctt

SEQ ID NO: 645347 - DNA, 15 bp, Homo sapiens
gcacttgtgctcttg

SEQ ID NO: 645348 - DNA, 15 bp, Homo sapiens
cacttgtgctcttga

SEQ ID NO: 645349 - DNA, 15 bp, Homo sapiens
cttgtgctcttgagg

SEQ ID NO: 645350 - DNA, 15 bp, Homo sapiens
ttgtgctcttgagga

SEQ ID NO: 645351 - DNA, 15 bp, Homo sapiens
tgtgctcttgaggaa

SEQ ID NO: 645352 - DNA, 15 bp, Homo sapiens
gtgctcttgaggaac

SEQ ID NO: 645353 - DNA, 15 bp, Homo sapiens
tgctcttgaggaact

SEQ ID NO: 645354 - DNA, 15 bp, Homo sapiens
gctcttgaggaactt

SEQ ID NO: 645355 - DNA, 15 bp, Homo sapiens
ctcttgaggaactta

SEQ ID NO: 645356 - DNA, 15 bp, Homo sapiens
tcttgaggaacttac

SEQ ID NO: 645357 - DNA, 15 bp, Homo sapiens
cttgaggaacttaca

SEQ ID NO: 645358 - DNA, 15 bp, Homo sapiens
ttgaggaacttacag

SEQ ID NO: 645359 - DNA, 15 bp, Homo sapiens
tgaggaacttacagc

SEQ ID NO: 645360 - DNA, 15 bp, Homo sapiens
gaggaacttacagcc

SEQ ID NO: 645361 - DNA, 15 bp, Homo sapiens
aggaacttacagcct

SEQ ID NO: 645362 - DNA, 15 bp, Homo sapiens
ggaacttacagcctc

SEQ ID NO: 645363 - DNA, 15 bp, Homo sapiens
gaacttacagcctcg

SEQ ID NO: 645364 - DNA, 15 bp, Homo sapiens
aacttacagcctcgt

SEQ ID NO: 645365 - DNA, 15 bp, Homo sapiens
acttacagcctcgta

SEQ ID NO: 645366 - DNA, 15 bp, Homo sapiens
cttacagcctcgtag

SEQ ID NO: 645367 - DNA, 15 bp, Homo sapiens
ttacagcctcgtagg

SEQ ID NO: 645368 - DNA, 15 bp, Homo sapiens
tacagcctcgtaggg

SEQ ID NO: 645369 - DNA, 15 bp, Homo sapiens
acagcctcgtagggg

SEQ ID NO: 645370 - DNA, 15 bp, Homo sapiens
cagcctcgtagggga

SEQ ID NO: 645371 - DNA, 15 bp, Homo sapiens
agcctcgtaggggaa

SEQ ID NO: 645372 - DNA, 15 bp, Homo sapiens
gcctcgtaggggaaa

SEQ ID NO: 645373 - DNA, 15 bp, Homo sapiens
cctcgtaggggaaat

SEQ ID NO: 645374 - DNA, 15 bp, Homo sapiens
ctcgtaggggaaata

SEQ ID NO: 645375 - DNA, 15 bp, Homo sapiens
tcgtaggggaaataa

SEQ ID NO: 645376 - DNA, 15 bp, Homo sapiens
cgtaggggaaataag

SEQ ID NO: 645377 - DNA, 15 bp, Homo sapiens
gtaggggaaataaga

SEQ ID NO: 645378 - DNA, 15 bp, Homo sapiens
taggggaaataagaa

SEQ ID NO: 645379 - DNA, 15 bp, Homo sapiens
aggggaaataagaaa

SEQ ID NO: 645380 - DNA, 15 bp, Homo sapiens
ggggaaataagaaat

SEQ ID NO: 645381 - DNA, 15 bp, Homo sapiens
gggaaataagaaatg

SEQ ID NO: 645382 - DNA, 15 bp, Homo sapiens
ggaaataagaaatgc

SEQ ID NO: 645383 - DNA, 15 bp, Homo sapiens
gaaataagaaatgca

SEQ ID NO: 645384 - DNA, 15 bp, Homo sapiens
aaataagaaatgcaa

SEQ ID NO: 645385 - DNA, 15 bp, Homo sapiens
aataagaaatgcaag

SEQ ID NO: 645386 - DNA, 15 bp, Homo sapiens
ataagaaatgcaagc

SEQ ID NO: 645387 - DNA, 15 bp, Homo sapiens
taagaaatgcaagca

SEQ ID NO: 645388 - DNA, 15 bp, Homo sapiens
aagaaatgcaagcaa

SEQ ID NO: 645389 - DNA, 15 bp, Homo sapiens
agaaatgcaagcaaa

SEQ ID NO: 645390 - DNA, 15 bp, Homo sapiens
gaaatgcaagcaaat

SEQ ID NO: 645391 - DNA, 15 bp, Homo sapiens
aaatgcaagcaaata

SEQ ID NO: 645392 - DNA, 15 bp, Homo sapiens
aatgcaagcaaataa

SEQ ID NO: 645393 - DNA, 15 bp, Homo sapiens
atgcaagcaaataat

SEQ ID NO: 645394 - DNA, 15 bp, Homo sapiens
tgcaagcaaataatc

SEQ ID NO: 645395 - DNA, 15 bp, Homo sapiens
gcaagcaaataatca

SEQ ID NO: 645396 - DNA, 15 bp, Homo sapiens
caagcaaataatcag

SEQ ID NO: 645397 - DNA, 15 bp, Homo sapiens
aagcaaataatcaga

SEQ ID NO: 645398 - DNA, 15 bp, Homo sapiens
agcaaataatcagaa

SEQ ID NO: 645399 - DNA, 15 bp, Homo sapiens
gcaaataatcagaac

SEQ ID NO: 645400 - DNA, 15 bp, Homo sapiens
caaataatcagaact

SEQ ID NO: 645401 - DNA, 15 bp, Homo sapiens
aaataatcagaacta

SEQ ID NO: 645402 - DNA, 15 bp, Homo sapiens
aataatcagaactaa

SEQ ID NO: 645403 - DNA, 15 bp, Homo sapiens
ataatcagaactaac

SEQ ID NO: 645404 - DNA, 15 bp, Homo sapiens
taatcagaactaaca

SEQ ID NO: 645405 - DNA, 15 bp, Homo sapiens
aatcagaactaacac

SEQ ID NO: 645406 - DNA, 15 bp, Homo sapiens
atcagaactaacaca

SEQ ID NO: 645407 - DNA, 15 bp, Homo sapiens
tcagaactaacacat

SEQ ID NO: 645408 - DNA, 15 bp, Homo sapiens
cagaactaacacata

SEQ ID NO: 645409 - DNA, 15 bp, Homo sapiens
agaactaacacatat

SEQ ID NO: 645410 - DNA, 15 bp, Homo sapiens
gaactaacacatatt

SEQ ID NO: 645411 - DNA, 15 bp, Homo sapiens
aactaacacatattg

SEQ ID NO: 645412 - DNA, 15 bp, Homo sapiens
actaacacatattgt

SEQ ID NO: 645413 - DNA, 15 bp, Homo sapiens
ctaacacatattgtt

SEQ ID NO: 645414 - DNA, 15 bp, Homo sapiens
taacacatattgttt

SEQ ID NO: 645415 - DNA, 15 bp, Homo sapiens
aacacatattgttta

SEQ ID NO: 645416 - DNA, 15 bp, Homo sapiens
acacatattgtttat

SEQ ID NO: 645417 - DNA, 15 bp, Homo sapiens
cacatattgtttatt

SEQ ID NO: 645418 - DNA, 15 bp, Homo sapiens
acatattgtttatta

SEQ ID NO: 645419 - DNA, 15 bp, Homo sapiens
catattgtttattat

SEQ ID NO: 645420 - DNA, 15 bp, Homo sapiens
atattgtttattata

SEQ ID NO: 645421 - DNA, 15 bp, Homo sapiens
tattgtttattatat

SEQ ID NO: 645422 - DNA, 15 bp, Homo sapiens
attgtttattatatg

SEQ ID NO: 645423 - DNA, 15 bp, Homo sapiens
ttgtttattatatga

SEQ ID NO: 645424 - DNA, 15 bp, Homo sapiens
tgtttattatatgat

SEQ ID NO: 645425 - DNA, 15 bp, Homo sapiens
gtttattatatgata

SEQ ID NO: 645426 - DNA, 15 bp, Homo sapiens
tttattatatgatag

SEQ ID NO: 645427 - DNA, 15 bp, Homo sapiens
ttattatatgatagg

SEQ ID NO: 645428 - DNA, 15 bp, Homo sapiens
tattatatgataggc

SEQ ID NO: 645429 - DNA, 15 bp, Homo sapiens
attatatgataggcg

SEQ ID NO: 645430 - DNA, 15 bp, Homo sapiens
ttatatgataggcgc

SEQ ID NO: 645431 - DNA, 15 bp, Homo sapiens
tatatgataggcgct

SEQ ID NO: 645432 - DNA, 15 bp, Homo sapiens
atatgataggcgctg

SEQ ID NO: 645433 - DNA, 15 bp, Homo sapiens
tatgataggcgctgt

SEQ ID NO: 645434 - DNA, 15 bp, Homo sapiens
atgataggcgctgtc

SEQ ID NO: 645435 - DNA, 15 bp, Homo sapiens
tgataggcgctgtcc

SEQ ID NO: 645436 - DNA, 15 bp, Homo sapiens
gataggcgctgtcct

SEQ ID NO: 645437 - DNA, 15 bp, Homo sapiens
ataggcgctgtccta

SEQ ID NO: 645438 - DNA, 15 bp, Homo sapiens
taggcgctgtcctat

SEQ ID NO: 645439 - DNA, 15 bp, Homo sapiens
aggcgctgtcctata

SEQ ID NO: 645440 - DNA, 15 bp, Homo sapiens
ggcgctgtcctatag

SEQ ID NO: 645441 - DNA, 15 bp, Homo sapiens
gcgctgtcctatagg

SEQ ID NO: 645442 - DNA, 15 bp, Homo sapiens
cgctgtcctataggc

SEQ ID NO: 645443 - DNA, 15 bp, Homo sapiens
gctgtcctataggct

SEQ ID NO: 645444 - DNA, 15 bp, Homo sapiens
ctgtcctataggctt

SEQ ID NO: 645445 - DNA, 15 bp, Homo sapiens
tgtcctataggcttt

SEQ ID NO: 645446 - DNA, 15 bp, Homo sapiens
gtcctataggcttta

SEQ ID NO: 645447 - DNA, 15 bp, Homo sapiens
tcctataggctttac

SEQ ID NO: 645448 - DNA, 15 bp, Homo sapiens
cctataggctttaca

SEQ ID NO: 645449 - DNA, 15 bp, Homo sapiens
ctataggctttacat

SEQ ID NO: 645450 - DNA, 15 bp, Homo sapiens
tataggctttacata

SEQ ID NO: 645451 - DNA, 15 bp, Homo sapiens
ataggctttacatat

SEQ ID NO: 645452 - DNA, 15 bp, Homo sapiens
taggctttacatata

SEQ ID NO: 645453 - DNA, 15 bp, Homo sapiens
aggctttacatatat

SEQ ID NO: 645454 - DNA, 15 bp, Homo sapiens
ggctttacatatatt

SEQ ID NO: 645455 - DNA, 15 bp, Homo sapiens
gctttacatatattc

SEQ ID NO: 645456 - DNA, 15 bp, Homo sapiens
ctttacatatattcg

SEQ ID NO: 645457 - DNA, 15 bp, Homo sapiens
tttacatatattcgc

SEQ ID NO: 645458 - DNA, 15 bp, Homo sapiens
ttacatatattcgct

SEQ ID NO: 645459 - DNA, 15 bp, Homo sapiens
tacatatattcgcta

SEQ ID NO: 645460 - DNA, 15 bp, Homo sapiens
acatatattcgctac

SEQ ID NO: 645461 - DNA, 15 bp, Homo sapiens
catatattcgctact

SEQ ID NO: 645462 - DNA, 15 bp, Homo sapiens
atatattcgctactt

SEQ ID NO: 645463 - DNA, 15 bp, Homo sapiens
tatattcgctacttt

SEQ ID NO: 645464 - DNA, 15 bp, Homo sapiens
atattcgctacttta

SEQ ID NO: 645465 - DNA, 15 bp, Homo sapiens
tattcgctactttaa

SEQ ID NO: 645466 - DNA, 15 bp, Homo sapiens
attcgctactttaat

SEQ ID NO: 645467 - DNA, 15 bp, Homo sapiens
ttcgctactttaatc

SEQ ID NO: 645468 - DNA, 15 bp, Homo sapiens
tcgctactttaatcc

SEQ ID NO: 645469 - DNA, 15 bp, Homo sapiens
cgctactttaatcct

SEQ ID NO: 645470 - DNA, 15 bp, Homo sapiens
gctactttaatcctc

SEQ ID NO: 645471 - DNA, 15 bp, Homo sapiens
ctactttaatcctca

SEQ ID NO: 645472 - DNA, 15 bp, Homo sapiens
tactttaatcctcat

SEQ ID NO: 645473 - DNA, 15 bp, Homo sapiens
actttaatcctcatt

SEQ ID NO: 645474 - DNA, 15 bp, Homo sapiens
ctttaatcctcatta

SEQ ID NO: 645475 - DNA, 15 bp, Homo sapiens
tttaatcctcattat

SEQ ID NO: 645476 - DNA, 15 bp, Homo sapiens
ttaatcctcattatt

SEQ ID NO: 645477 - DNA, 15 bp, Homo sapiens
taatcctcattatta

SEQ ID NO: 645478 - DNA, 15 bp, Homo sapiens
aatcctcattattac

SEQ ID NO: 645479 - DNA, 15 bp, Homo sapiens
atcctcattattacc

SEQ ID NO: 645480 - DNA, 15 bp, Homo sapiens
tcctcattattaccc

SEQ ID NO: 645481 - DNA, 15 bp, Homo sapiens
cctcattattaccca

SEQ ID NO: 645482 - DNA, 15 bp, Homo sapiens
ctcattattacccat

SEQ ID NO: 645483 - DNA, 15 bp, Homo sapiens
tcattattacccatt

SEQ ID NO: 645484 - DNA, 15 bp, Homo sapiens
cattattacccattg

SEQ ID NO: 645485 - DNA, 15 bp, Homo sapiens
attattacccattgg

SEQ ID NO: 645486 - DNA, 15 bp, Homo sapiens
ttattacccattggg

SEQ ID NO: 645487 - DNA, 15 bp, Homo sapiens
tattacccattgggg

SEQ ID NO: 645488 - DNA, 15 bp, Homo sapiens
attacccattggggt

SEQ ID NO: 645489 - DNA, 15 bp, Homo sapiens
ttacccattggggta

SEQ ID NO: 645490 - DNA, 15 bp, Homo sapiens
tacccattggggtag

SEQ ID NO: 645491 - DNA, 15 bp, Homo sapiens
acccattggggtagg

SEQ ID NO: 645492 - DNA, 15 bp, Homo sapiens
cccattggggtaggt

SEQ ID NO: 645493 - DNA, 15 bp, Homo sapiens
ccattggggtaggtt

SEQ ID NO: 645494 - DNA, 15 bp, Homo sapiens
cattggggtaggttc

SEQ ID NO: 645495 - DNA, 15 bp, Homo sapiens
attggggtaggttct

SEQ ID NO: 645496 - DNA, 15 bp, Homo sapiens
ttggggtaggttcta

SEQ ID NO: 645497 - DNA, 15 bp, Homo sapiens
tggggtaggttctat

SEQ ID NO: 645498 - DNA, 15 bp, Homo sapiens
ggggtaggttctatt

SEQ ID NO: 645499 - DNA, 15 bp, Homo sapiens
gggtaggttctatta

SEQ ID NO: 645500 - DNA, 15 bp, Homo sapiens
ggtaggttctattat

SEQ ID NO: 645501 - DNA, 15 bp, Homo sapiens
gtaggttctattatt

SEQ ID NO: 645502 - DNA, 15 bp, Homo sapiens
taggttctattattg

SEQ ID NO: 645503 - DNA, 15 bp, Homo sapiens
aggttctattattgt

SEQ ID NO: 645504 - DNA, 15 bp, Homo sapiens
ggttctattattgtt

SEQ ID NO: 645505 - DNA, 15 bp, Homo sapiens
gttctattattgttc

SEQ ID NO: 645506 - DNA, 15 bp, Homo sapiens
ttctattattgttct

SEQ ID NO: 645507 - DNA, 15 bp, Homo sapiens
tctattattgttctt

SEQ ID NO: 645508 - DNA, 15 bp, Homo sapiens
ctattattgttctta

SEQ ID NO: 645509 - DNA, 15 bp, Homo sapiens
tattattgttcttat

SEQ ID NO: 645510 - DNA, 15 bp, Homo sapiens
attattgttcttatt

SEQ ID NO: 645511 - DNA, 15 bp, Homo sapiens
ttattgttcttattt

SEQ ID NO: 645512 - DNA, 15 bp, Homo sapiens
tattgttcttatttt

SEQ ID NO: 645513 - DNA, 15 bp, Homo sapiens
attgttcttatttta

SEQ ID NO: 645514 - DNA, 15 bp, Homo sapiens
ttgttcttattttac

SEQ ID NO: 645515 - DNA, 15 bp, Homo sapiens
tgttcttattttaca

SEQ ID NO: 645516 - DNA, 15 bp, Homo sapiens
gttcttattttacag

SEQ ID NO: 645517 - DNA, 15 bp, Homo sapiens
ttcttattttacaga

SEQ ID NO: 645518 - DNA, 15 bp, Homo sapiens
tcttattttacagac

SEQ ID NO: 645519 - DNA, 15 bp, Homo sapiens
cttattttacagaca

SEQ ID NO: 645520 - DNA, 15 bp, Homo sapiens
ttattttacagacaa

SEQ ID NO: 645521 - DNA, 15 bp, Homo sapiens
tattttacagacaag

SEQ ID NO: 645522 - DNA, 15 bp, Homo sapiens
attttacagacaaga

SEQ ID NO: 645523 - DNA, 15 bp, Homo sapiens
ttttacagacaagaa

SEQ ID NO: 645524 - DNA, 15 bp, Homo sapiens
tttacagacaagaaa

SEQ ID NO: 645525 - DNA, 15 bp, Homo sapiens
ttacagacaagaaaa

SEQ ID NO: 645526 - DNA, 15 bp, Homo sapiens
tacagacaagaaaat

SEQ ID NO: 645527 - DNA, 15 bp, Homo sapiens
acagacaagaaaatt

SEQ ID NO: 645528 - DNA, 15 bp, Homo sapiens
cagacaagaaaattg

SEQ ID NO: 645529 - DNA, 15 bp, Homo sapiens
agacaagaaaattga

SEQ ID NO: 645530 - DNA, 15 bp, Homo sapiens
gacaagaaaattgag

SEQ ID NO: 645531 - DNA, 15 bp, Homo sapiens
acaagaaaattgagc

SEQ ID NO: 645532 - DNA, 15 bp, Homo sapiens
caagaaaattgagcc

SEQ ID NO: 645533 - DNA, 15 bp, Homo sapiens
aagaaaattgagcca

SEQ ID NO: 645534 - DNA, 15 bp, Homo sapiens
agaaaattgagccac

SEQ ID NO: 645535 - DNA, 15 bp, Homo sapiens
gaaaattgagccaca

SEQ ID NO: 645536 - DNA, 15 bp, Homo sapiens
aaaattgagccacaa

SEQ ID NO: 645537 - DNA, 15 bp, Homo sapiens
aaattgagccacaaa

SEQ ID NO: 645538 - DNA, 15 bp, Homo sapiens
aattgagccacaaaa

SEQ ID NO: 645539 - DNA, 15 bp, Homo sapiens
attgagccacaaaaa

SEQ ID NO: 645540 - DNA, 15 bp, Homo sapiens
ttgagccacaaaaag

SEQ ID NO: 645541 - DNA, 15 bp, Homo sapiens
tgagccacaaaaagg

SEQ ID NO: 645542 - DNA, 15 bp, Homo sapiens
gagccacaaaaaggt

SEQ ID NO: 645543 - DNA, 15 bp, Homo sapiens
agccacaaaaaggtt

SEQ ID NO: 645544 - DNA, 15 bp, Homo sapiens
gccacaaaaaggtta

SEQ ID NO: 645545 - DNA, 15 bp, Homo sapiens
ccacaaaaaggttaa

SEQ ID NO: 645546 - DNA, 15 bp, Homo sapiens
cacaaaaaggttaag

SEQ ID NO: 645547 - DNA, 15 bp, Homo sapiens
acaaaaaggttaagt

SEQ ID NO: 645548 - DNA, 15 bp, Homo sapiens
caaaaaggttaagta

SEQ ID NO: 645549 - DNA, 15 bp, Homo sapiens
aaaaaggttaagtaa

SEQ ID NO: 645550 - DNA, 15 bp, Homo sapiens
aaaaggttaagtaac

SEQ ID NO: 645551 - DNA, 15 bp, Homo sapiens
aaaggttaagtaact

SEQ ID NO: 645552 - DNA, 15 bp, Homo sapiens
aaggttaagtaactt

SEQ ID NO: 645553 - DNA, 15 bp, Homo sapiens
aggttaagtaacttg

SEQ ID NO: 645554 - DNA, 15 bp, Homo sapiens
ggttaagtaacttgc

SEQ ID NO: 645555 - DNA, 15 bp, Homo sapiens
gttaagtaacttgcc

SEQ ID NO: 645556 - DNA, 15 bp, Homo sapiens
ttaagtaacttgccc

SEQ ID NO: 645557 - DNA, 15 bp, Homo sapiens
taagtaacttgccca

SEQ ID NO: 645558 - DNA, 15 bp, Homo sapiens
aagtaacttgcccaa

SEQ ID NO: 645559 - DNA, 15 bp, Homo sapiens
agtaacttgcccaac

SEQ ID NO: 645560 - DNA, 15 bp, Homo sapiens
gtaacttgcccaaca

SEQ ID NO: 645561 - DNA, 15 bp, Homo sapiens
taacttgcccaacaa

SEQ ID NO: 645562 - DNA, 15 bp, Homo sapiens
aacttgcccaacaag

SEQ ID NO: 645563 - DNA, 15 bp, Homo sapiens
acttgcccaacaaga

SEQ ID NO: 645564 - DNA, 15 bp, Homo sapiens
cttgcccaacaagag

SEQ ID NO: 645565 - DNA, 15 bp, Homo sapiens
ttgcccaacaagagt

SEQ ID NO: 645566 - DNA, 15 bp, Homo sapiens
tgcccaacaagagtc

SEQ ID NO: 645567 - DNA, 15 bp, Homo sapiens
gcccaacaagagtct

SEQ ID NO: 645568 - DNA, 15 bp, Homo sapiens
cccaacaagagtctg

SEQ ID NO: 645569 - DNA, 15 bp, Homo sapiens
ccaacaagagtctgt

SEQ ID NO: 645570 - DNA, 15 bp, Homo sapiens
caacaagagtctgta

SEQ ID NO: 645571 - DNA, 15 bp, Homo sapiens
aacaagagtctgtat

SEQ ID NO: 645572 - DNA, 15 bp, Homo sapiens
acaagagtctgtatt

SEQ ID NO: 645573 - DNA, 15 bp, Homo sapiens
caagagtctgtattc

SEQ ID NO: 645574 - DNA, 15 bp, Homo sapiens
aagagtctgtattca

SEQ ID NO: 645575 - DNA, 15 bp, Homo sapiens
agagtctgtattcaa

SEQ ID NO: 645576 - DNA, 15 bp, Homo sapiens
gagtctgtattcaaa

SEQ ID NO: 645577 - DNA, 15 bp, Homo sapiens
agtctgtattcaaat

SEQ ID NO: 645578 - DNA, 15 bp, Homo sapiens
gtctgtattcaaatt

SEQ ID NO: 645579 - DNA, 15 bp, Homo sapiens
tctgtattcaaattc

SEQ ID NO: 645580 - DNA, 15 bp, Homo sapiens
ctgtattcaaattcc

SEQ ID NO: 645581 - DNA, 15 bp, Homo sapiens
tgtattcaaattcct

SEQ ID NO: 645582 - DNA, 15 bp, Homo sapiens
gtattcaaattccta

SEQ ID NO: 645583 - DNA, 15 bp, Homo sapiens
tattcaaattcctag

SEQ ID NO: 645584 - DNA, 15 bp, Homo sapiens
attcaaattcctagt

SEQ ID NO: 645585 - DNA, 15 bp, Homo sapiens
ttcaaattcctagtc

SEQ ID NO: 645586 - DNA, 15 bp, Homo sapiens
tcaaattcctagtct

SEQ ID NO: 645587 - DNA, 15 bp, Homo sapiens
caaattcctagtctg

SEQ ID NO: 645588 - DNA, 15 bp, Homo sapiens
aaattcctagtctgg

SEQ ID NO: 645589 - DNA, 15 bp, Homo sapiens
aattcctagtctggc

SEQ ID NO: 645590 - DNA, 15 bp, Homo sapiens
attcctagtctggct

SEQ ID NO: 645591 - DNA, 15 bp, Homo sapiens
ttcctagtctggctc

SEQ ID NO: 645592 - DNA, 15 bp, Homo sapiens
tcctagtctggctcc

SEQ ID NO: 645593 - DNA, 15 bp, Homo sapiens
cctagtctggctcca

SEQ ID NO: 645594 - DNA, 15 bp, Homo sapiens
ctagtctggctccag

SEQ ID NO: 645595 - DNA, 15 bp, Homo sapiens
tagtctggctccaga

SEQ ID NO: 645596 - DNA, 15 bp, Homo sapiens
agtctggctccagaa

SEQ ID NO: 645597 - DNA, 15 bp, Homo sapiens
gtctggctccagaat

SEQ ID NO: 645598 - DNA, 15 bp, Homo sapiens
tctggctccagaatc

SEQ ID NO: 645599 - DNA, 15 bp, Homo sapiens
ctggctccagaatct

SEQ ID NO: 645600 - DNA, 15 bp, Homo sapiens
tggctccagaatctg

SEQ ID NO: 645601 - DNA, 15 bp, Homo sapiens
ggctccagaatctgc

SEQ ID NO: 645602 - DNA, 15 bp, Homo sapiens
gctccagaatctgca

SEQ ID NO: 645603 - DNA, 15 bp, Homo sapiens
ctccagaatctgcac

SEQ ID NO: 645604 - DNA, 15 bp, Homo sapiens
tccagaatctgcact

SEQ ID NO: 645605 - DNA, 15 bp, Homo sapiens
ccagaatctgcactc

SEQ ID NO: 645606 - DNA, 15 bp, Homo sapiens
cagaatctgcactct

SEQ ID NO: 645607 - DNA, 15 bp, Homo sapiens
agaatctgcactctt

SEQ ID NO: 645608 - DNA, 15 bp, Homo sapiens
gaatctgcactcttc

SEQ ID NO: 645609 - DNA, 15 bp, Homo sapiens
aatctgcactcttca

SEQ ID NO: 645610 - DNA, 15 bp, Homo sapiens
atctgcactcttcac

SEQ ID NO: 645611 - DNA, 15 bp, Homo sapiens
tctgcactcttcacc

SEQ ID NO: 645612 - DNA, 15 bp, Homo sapiens
ctgcactcttcacca

SEQ ID NO: 645613 - DNA, 15 bp, Homo sapiens
tgcactcttcaccac

SEQ ID NO: 645614 - DNA, 15 bp, Homo sapiens
gcactcttcaccact

SEQ ID NO: 645615 - DNA, 15 bp, Homo sapiens
cactcttcaccacta

SEQ ID NO: 645616 - DNA, 15 bp, Homo sapiens
actcttcaccactac

SEQ ID NO: 645617 - DNA, 15 bp, Homo sapiens
ctcttcaccactact

SEQ ID NO: 645618 - DNA, 15 bp, Homo sapiens
tcttcaccactactc

SEQ ID NO: 645619 - DNA, 15 bp, Homo sapiens
cttcaccactactct

SEQ ID NO: 645620 - DNA, 15 bp, Homo sapiens
ttcaccactactcta

SEQ ID NO: 645621 - DNA, 15 bp, Homo sapiens
tcaccactactctat

SEQ ID NO: 645622 - DNA, 15 bp, Homo sapiens
caccactactctata

SEQ ID NO: 645623 - DNA, 15 bp, Homo sapiens
accactactctatac

SEQ ID NO: 645624 - DNA, 15 bp, Homo sapiens
ccactactctatact

SEQ ID NO: 645625 - DNA, 15 bp, Homo sapiens
cactactctatactg

SEQ ID NO: 645626 - DNA, 15 bp, Homo sapiens
actactctatactgc

SEQ ID NO: 645627 - DNA, 15 bp, Homo sapiens
ctactctatactgcc

SEQ ID NO: 645628 - DNA, 15 bp, Homo sapiens
tactctatactgcct

SEQ ID NO: 645629 - DNA, 15 bp, Homo sapiens
actctatactgccta

SEQ ID NO: 645630 - DNA, 15 bp, Homo sapiens
ctctatactgcctat

SEQ ID NO: 645631 - DNA, 15 bp, Homo sapiens
tctatactgcctata

SEQ ID NO: 645632 - DNA, 15 bp, Homo sapiens
ctatactgcctatat

SEQ ID NO: 645633 - DNA, 15 bp, Homo sapiens
tatactgcctatatg

SEQ ID NO: 645634 - DNA, 15 bp, Homo sapiens
atactgcctatatgc

SEQ ID NO: 645635 - DNA, 15 bp, Homo sapiens
tactgcctatatgca

SEQ ID NO: 645636 - DNA, 15 bp, Homo sapiens
actgcctatatgcag

SEQ ID NO: 645637 - DNA, 15 bp, Homo sapiens
ctgcctatatgcaga

SEQ ID NO: 645638 - DNA, 15 bp, Homo sapiens
tgcctatatgcagaa

SEQ ID NO: 645639 - DNA, 15 bp, Homo sapiens
gcctatatgcagaat

SEQ ID NO: 645640 - DNA, 15 bp, Homo sapiens
cctatatgcagaatg

SEQ ID NO: 645641 - DNA, 15 bp, Homo sapiens
ctatatgcagaatgc

SEQ ID NO: 645642 - DNA, 15 bp, Homo sapiens
tatatgcagaatgca

SEQ ID NO: 645643 - DNA, 15 bp, Homo sapiens
atatgcagaatgcaa

SEQ ID NO: 645644 - DNA, 15 bp, Homo sapiens
tatgcagaatgcaat

SEQ ID NO: 645645 - DNA, 15 bp, Homo sapiens
atgcagaatgcaata

SEQ ID NO: 645646 - DNA, 15 bp, Homo sapiens
tgcagaatgcaataa

SEQ ID NO: 645647 - DNA, 15 bp, Homo sapiens
gcagaatgcaataat

SEQ ID NO: 645648 - DNA, 15 bp, Homo sapiens
cagaatgcaataatt

SEQ ID NO: 645649 - DNA, 15 bp, Homo sapiens
agaatgcaataattc

SEQ ID NO: 645650 - DNA, 15 bp, Homo sapiens
gaatgcaataattcc

SEQ ID NO: 645651 - DNA, 15 bp, Homo sapiens
aatgcaataattcca

SEQ ID NO: 645652 - DNA, 15 bp, Homo sapiens
atgcaataattccac

SEQ ID NO: 645653 - DNA, 15 bp, Homo sapiens
tgcaataattccaca

SEQ ID NO: 645654 - DNA, 15 bp, Homo sapiens
gcaataattccacac

SEQ ID NO: 645655 - DNA, 15 bp, Homo sapiens
caataattccacaca

SEQ ID NO: 645656 - DNA, 15 bp, Homo sapiens
aataattccacacac

SEQ ID NO: 645657 - DNA, 15 bp, Homo sapiens
ataattccacacaca

SEQ ID NO: 645658 - DNA, 15 bp, Homo sapiens
taattccacacacat

SEQ ID NO: 645659 - DNA, 15 bp, Homo sapiens
aattccacacacata

SEQ ID NO: 645660 - DNA, 15 bp, Homo sapiens
attccacacacatac

SEQ ID NO: 645661 - DNA, 15 bp, Homo sapiens
ttccacacacataca

SEQ ID NO: 645662 - DNA, 15 bp, Homo sapiens
tccacacacatacaa

SEQ ID NO: 645663 - DNA, 15 bp, Homo sapiens
ccacacacatacaaa

SEQ ID NO: 645664 - DNA, 15 bp, Homo sapiens
cacacacatacaaat

SEQ ID NO: 645665 - DNA, 15 bp, Homo sapiens
acacacatacaaatg

SEQ ID NO: 645666 - DNA, 15 bp, Homo sapiens
cacacatacaaatgc

SEQ ID NO: 645667 - DNA, 15 bp, Homo sapiens
acacatacaaatgca

SEQ ID NO: 645668 - DNA, 15 bp, Homo sapiens
cacatacaaatgcac

SEQ ID NO: 645669 - DNA, 15 bp, Homo sapiens
acatacaaatgcaca

SEQ ID NO: 645670 - DNA, 15 bp, Homo sapiens
catacaaatgcacaa

SEQ ID NO: 645671 - DNA, 15 bp, Homo sapiens
atacaaatgcacaag

SEQ ID NO: 645672 - DNA, 15 bp, Homo sapiens
tacaaatgcacaagg

SEQ ID NO: 645673 - DNA, 15 bp, Homo sapiens
acaaatgcacaagga

SEQ ID NO: 645674 - DNA, 15 bp, Homo sapiens
caaatgcacaaggat

SEQ ID NO: 645675 - DNA, 15 bp, Homo sapiens
aaatgcacaaggatt

SEQ ID NO: 645676 - DNA, 15 bp, Homo sapiens
aatgcacaaggatta

SEQ ID NO: 645677 - DNA, 15 bp, Homo sapiens
atgcacaaggattaa

SEQ ID NO: 645678 - DNA, 15 bp, Homo sapiens
tgcacaaggattaat

SEQ ID NO: 645679 - DNA, 15 bp, Homo sapiens
gcacaaggattaatt

SEQ ID NO: 645680 - DNA, 15 bp, Homo sapiens
cacaaggattaatta

SEQ ID NO: 645681 - DNA, 15 bp, Homo sapiens
acaaggattaattac

SEQ ID NO: 645682 - DNA, 15 bp, Homo sapiens
caaggattaattaca

SEQ ID NO: 645683 - DNA, 15 bp, Homo sapiens
aaggattaattacag

SEQ ID NO: 645684 - DNA, 15 bp, Homo sapiens
aggattaattacagt

SEQ ID NO: 645685 - DNA, 15 bp, Homo sapiens
ggattaattacagtg

SEQ ID NO: 645686 - DNA, 15 bp, Homo sapiens
gattaattacagtgt

SEQ ID NO: 645687 - DNA, 15 bp, Homo sapiens
attaattacagtgtt

SEQ ID NO: 645688 - DNA, 15 bp, Homo sapiens
ttaattacagtgtta

SEQ ID NO: 645689 - DNA, 15 bp, Homo sapiens
taattacagtgttac

SEQ ID NO: 645690 - DNA, 15 bp, Homo sapiens
aattacagtgttacg

SEQ ID NO: 645691 - DNA, 15 bp, Homo sapiens
attacagtgttacgg

SEQ ID NO: 645692 - DNA, 15 bp, Homo sapiens
ttacagtgttacgga

SEQ ID NO: 645693 - DNA, 15 bp, Homo sapiens
tacagtgttacggaa

SEQ ID NO: 645694 - DNA, 15 bp, Homo sapiens
acagtgttacggaaa

SEQ ID NO: 645695 - DNA, 15 bp, Homo sapiens
cagtgttacggaaac

SEQ ID NO: 645696 - DNA, 15 bp, Homo sapiens
agtgttacggaaaca

SEQ ID NO: 645697 - DNA, 15 bp, Homo sapiens
gtgttacggaaacac

SEQ ID NO: 645698 - DNA, 15 bp, Homo sapiens
tgttacggaaacaca

SEQ ID NO: 645699 - DNA, 15 bp, Homo sapiens
gttacggaaacacag

SEQ ID NO: 645700 - DNA, 15 bp, Homo sapiens
ttacggaaacacagg

SEQ ID NO: 645701 - DNA, 15 bp, Homo sapiens
tacggaaacacaggg

SEQ ID NO: 645702 - DNA, 15 bp, Homo sapiens
acggaaacacaggga

SEQ ID NO: 645703 - DNA, 15 bp, Homo sapiens
cggaaacacagggag

SEQ ID NO: 645704 - DNA, 15 bp, Homo sapiens
ggaaacacagggaga

SEQ ID NO: 645705 - DNA, 15 bp, Homo sapiens
gaaacacagggagaa

SEQ ID NO: 645706 - DNA, 15 bp, Homo sapiens
aaacacagggagaaa

SEQ ID NO: 645707 - DNA, 15 bp, Homo sapiens
aacacagggagaaag

SEQ ID NO: 645708 - DNA, 15 bp, Homo sapiens
acacagggagaaagg

SEQ ID NO: 645709 - DNA, 15 bp, Homo sapiens
cacagggagaaaggt

SEQ ID NO: 645710 - DNA, 15 bp, Homo sapiens
acagggagaaaggtg

SEQ ID NO: 645711 - DNA, 15 bp, Homo sapiens
cagggagaaaggtgt

SEQ ID NO: 645712 - DNA, 15 bp, Homo sapiens
agggagaaaggtgtt

SEQ ID NO: 645713 - DNA, 15 bp, Homo sapiens
gggagaaaggtgtta

SEQ ID NO: 645714 - DNA, 15 bp, Homo sapiens
ggagaaaggtgttac

SEQ ID NO: 645715 - DNA, 15 bp, Homo sapiens
gagaaaggtgttact

SEQ ID NO: 645716 - DNA, 15 bp, Homo sapiens
agaaaggtgttactt

SEQ ID NO: 645717 - DNA, 15 bp, Homo sapiens
gaaaggtgttacttc

SEQ ID NO: 645718 - DNA, 15 bp, Homo sapiens
aaaggtgttacttct

SEQ ID NO: 645719 - DNA, 15 bp, Homo sapiens
aaggtgttacttctt

SEQ ID NO: 645720 - DNA, 15 bp, Homo sapiens
aggtgttacttcttc

SEQ ID NO: 645721 - DNA, 15 bp, Homo sapiens
ggtgttacttcttct

SEQ ID NO: 645722 - DNA, 15 bp, Homo sapiens
gtgttacttcttctt

SEQ ID NO: 645723 - DNA, 15 bp, Homo sapiens
tgttacttcttcttg

SEQ ID NO: 645724 - DNA, 15 bp, Homo sapiens
gttacttcttcttgg

SEQ ID NO: 645725 - DNA, 15 bp, Homo sapiens
ttacttcttcttggg

SEQ ID NO: 645726 - DNA, 15 bp, Homo sapiens
tacttcttcttgggg

SEQ ID NO: 645727 - DNA, 15 bp, Homo sapiens
acttcttcttggggg

SEQ ID NO: 645728 - DNA, 15 bp, Homo sapiens
cttcttcttggggga

SEQ ID NO: 645729 - DNA, 15 bp, Homo sapiens
ttcttcttgggggat

SEQ ID NO: 645730 - DNA, 15 bp, Homo sapiens
tcttcttgggggatt

SEQ ID NO: 645731 - DNA, 15 bp, Homo sapiens
cttcttgggggatta

SEQ ID NO: 645732 - DNA, 15 bp, Homo sapiens
ttcttgggggattat

SEQ ID NO: 645733 - DNA, 15 bp, Homo sapiens
tcttgggggattata

SEQ ID NO: 645734 - DNA, 15 bp, Homo sapiens
cttgggggattatac

SEQ ID NO: 645735 - DNA, 15 bp, Homo sapiens
ttgggggattataca

SEQ ID NO: 645736 - DNA, 15 bp, Homo sapiens
tgggggattatacaa

SEQ ID NO: 645737 - DNA, 15 bp, Homo sapiens
gggggattatacaag

SEQ ID NO: 645738 - DNA, 15 bp, Homo sapiens
ggggattatacaaga

SEQ ID NO: 645739 - DNA, 15 bp, Homo sapiens
gggattatacaagat

SEQ ID NO: 645740 - DNA, 15 bp, Homo sapiens
ggattatacaagatt

SEQ ID NO: 645741 - DNA, 15 bp, Homo sapiens
gattatacaagattg

SEQ ID NO: 645742 - DNA, 15 bp, Homo sapiens
attatacaagattga

SEQ ID NO: 645743 - DNA, 15 bp, Homo sapiens
ttatacaagattgat

SEQ ID NO: 645744 - DNA, 15 bp, Homo sapiens
tatacaagattgatg

SEQ ID NO: 645745 - DNA, 15 bp, Homo sapiens
atacaagattgatgc

SEQ ID NO: 645746 - DNA, 15 bp, Homo sapiens
tacaagattgatgca

SEQ ID NO: 645747 - DNA, 15 bp, Homo sapiens
acaagattgatgcac

SEQ ID NO: 645748 - DNA, 15 bp, Homo sapiens
caagattgatgcacg

SEQ ID NO: 645749 - DNA, 15 bp, Homo sapiens
aagattgatgcacga

SEQ ID NO: 645750 - DNA, 15 bp, Homo sapiens
agattgatgcacgag

SEQ ID NO: 645751 - DNA, 15 bp, Homo sapiens
gattgatgcacgaga

SEQ ID NO: 645752 - DNA, 15 bp, Homo sapiens
attgatgcacgagaa

SEQ ID NO: 645753 - DNA, 15 bp, Homo sapiens
ttgatgcacgagaag

SEQ ID NO: 645754 - DNA, 15 bp, Homo sapiens
tgatgcacgagaagg

SEQ ID NO: 645755 - DNA, 15 bp, Homo sapiens
gatgcacgagaaggt

SEQ ID NO: 645756 - DNA, 15 bp, Homo sapiens
atgcacgagaaggta

SEQ ID NO: 645757 - DNA, 15 bp, Homo sapiens
tgcacgagaaggtat

SEQ ID NO: 645758 - DNA, 15 bp, Homo sapiens
gcacgagaaggtatg

SEQ ID NO: 645759 - DNA, 15 bp, Homo sapiens
cacgagaaggtatgt

SEQ ID NO: 645760 - DNA, 15 bp, Homo sapiens
acgagaaggtatgtg

SEQ ID NO: 645761 - DNA, 15 bp, Homo sapiens
cgagaaggtatgtga

SEQ ID NO: 645762 - DNA, 15 bp, Homo sapiens
gagaaggtatgtgac

SEQ ID NO: 645763 - DNA, 15 bp, Homo sapiens
agaaggtatgtgact

SEQ ID NO: 645764 - DNA, 15 bp, Homo sapiens
gaaggtatgtgacta

SEQ ID NO: 645765 - DNA, 15 bp, Homo sapiens
aaggtatgtgactag

SEQ ID NO: 645766 - DNA, 15 bp, Homo sapiens
aggtatgtgactaga

SEQ ID NO: 645767 - DNA, 15 bp, Homo sapiens
ggtatgtgactagaa

SEQ ID NO: 645768 - DNA, 15 bp, Homo sapiens
gtatgtgactagaac

SEQ ID NO: 645769 - DNA, 15 bp, Homo sapiens
tatgtgactagaacc

SEQ ID NO: 645770 - DNA, 15 bp, Homo sapiens
atgtgactagaacct

SEQ ID NO: 645771 - DNA, 15 bp, Homo sapiens
tgtgactagaacctt

SEQ ID NO: 645772 - DNA, 15 bp, Homo sapiens
gtgactagaaccttg

SEQ ID NO: 645773 - DNA, 15 bp, Homo sapiens
tgactagaaccttga

SEQ ID NO: 645774 - DNA, 15 bp, Homo sapiens
gactagaaccttgag

SEQ ID NO: 645775 - DNA, 15 bp, Homo sapiens
actagaaccttgagg

SEQ ID NO: 645776 - DNA, 15 bp, Homo sapiens
ctagaaccttgaggc

SEQ ID NO: 645777 - DNA, 15 bp, Homo sapiens
tagaaccttgaggct

SEQ ID NO: 645778 - DNA, 15 bp, Homo sapiens
agaaccttgaggctg

SEQ ID NO: 645779 - DNA, 15 bp, Homo sapiens
gaaccttgaggctga

SEQ ID NO: 645780 - DNA, 15 bp, Homo sapiens
aaccttgaggctgaa

SEQ ID NO: 645781 - DNA, 15 bp, Homo sapiens
accttgaggctgaaa

SEQ ID NO: 645782 - DNA, 15 bp, Homo sapiens
ccttgaggctgaaag

SEQ ID NO: 645783 - DNA, 15 bp, Homo sapiens
cttgaggctgaaagg

SEQ ID NO: 645784 - DNA, 15 bp, Homo sapiens
ttgaggctgaaagga

SEQ ID NO: 645785 - DNA, 15 bp, Homo sapiens
tgaggctgaaaggat

SEQ ID NO: 645786 - DNA, 15 bp, Homo sapiens
gaggctgaaaggatt

SEQ ID NO: 645787 - DNA, 15 bp, Homo sapiens
aggctgaaaggattc

SEQ ID NO: 645788 - DNA, 15 bp, Homo sapiens
ggctgaaaggattca

SEQ ID NO: 645789 - DNA, 15 bp, Homo sapiens
gctgaaaggattcag

SEQ ID NO: 645790 - DNA, 15 bp, Homo sapiens
ctgaaaggattcagc

SEQ ID NO: 645791 - DNA, 15 bp, Homo sapiens
tgaaaggattcagca

SEQ ID NO: 645792 - DNA, 15 bp, Homo sapiens
gaaaggattcagcag

SEQ ID NO: 645793 - DNA, 15 bp, Homo sapiens
aaaggattcagcagg

SEQ ID NO: 645794 - DNA, 15 bp, Homo sapiens
aaggattcagcaggc

SEQ ID NO: 645795 - DNA, 15 bp, Homo sapiens
aggattcagcaggca

SEQ ID NO: 645796 - DNA, 15 bp, Homo sapiens
ggattcagcaggcat

SEQ ID NO: 645797 - DNA, 15 bp, Homo sapiens
gattcagcaggcatg

SEQ ID NO: 645798 - DNA, 15 bp, Homo sapiens
attcagcaggcatga

SEQ ID NO: 645799 - DNA, 15 bp, Homo sapiens
ttcagcaggcatgaa

SEQ ID NO: 645800 - DNA, 15 bp, Homo sapiens
tcagcaggcatgaag

SEQ ID NO: 645801 - DNA, 15 bp, Homo sapiens
cagcaggcatgaaga

SEQ ID NO: 645802 - DNA, 15 bp, Homo sapiens
agcaggcatgaagaa

SEQ ID NO: 645803 - DNA, 15 bp, Homo sapiens
gcaggcatgaagaaa

SEQ ID NO: 645804 - DNA, 15 bp, Homo sapiens
caggcatgaagaaag

SEQ ID NO: 645805 - DNA, 15 bp, Homo sapiens
aggcatgaagaaaga

SEQ ID NO: 645806 - DNA, 15 bp, Homo sapiens
ggcatgaagaaagaa

SEQ ID NO: 645807 - DNA, 15 bp, Homo sapiens
gcatgaagaaagaaa

SEQ ID NO: 645808 - DNA, 15 bp, Homo sapiens
catgaagaaagaaaa

SEQ ID NO: 645809 - DNA, 15 bp, Homo sapiens
atgaagaaagaaaag

SEQ ID NO: 645810 - DNA, 15 bp, Homo sapiens
tgaagaaagaaaagc

SEQ ID NO: 645811 - DNA, 15 bp, Homo sapiens
gaagaaagaaaagct

SEQ ID NO: 645812 - DNA, 15 bp, Homo sapiens
aagaaagaaaagctt

SEQ ID NO: 645813 - DNA, 15 bp, Homo sapiens
agaaagaaaagcttt

SEQ ID NO: 645814 - DNA, 15 bp, Homo sapiens
gaaagaaaagctttg

SEQ ID NO: 645815 - DNA, 15 bp, Homo sapiens
aaagaaaagctttgc

SEQ ID NO: 645816 - DNA, 15 bp, Homo sapiens
aagaaaagctttgca

SEQ ID NO: 645817 - DNA, 15 bp, Homo sapiens
agaaaagctttgcaa

SEQ ID NO: 645818 - DNA, 15 bp, Homo sapiens
gaaaagctttgcaag

SEQ ID NO: 645819 - DNA, 15 bp, Homo sapiens
aaaagctttgcaaga

SEQ ID NO: 645820 - DNA, 15 bp, Homo sapiens
aaagctttgcaagac

SEQ ID NO: 645821 - DNA, 15 bp, Homo sapiens
aagctttgcaagaca

SEQ ID NO: 645822 - DNA, 15 bp, Homo sapiens
agctttgcaagacag

SEQ ID NO: 645823 - DNA, 15 bp, Homo sapiens
gctttgcaagacaga

SEQ ID NO: 645824 - DNA, 15 bp, Homo sapiens
ctttgcaagacagag

SEQ ID NO: 645825 - DNA, 15 bp, Homo sapiens
tttgcaagacagagc

SEQ ID NO: 645826 - DNA, 15 bp, Homo sapiens
ttgcaagacagagca

SEQ ID NO: 645827 - DNA, 15 bp, Homo sapiens
tgcaagacagagcaa

SEQ ID NO: 645828 - DNA, 15 bp, Homo sapiens
gcaagacagagcaag

SEQ ID NO: 645829 - DNA, 15 bp, Homo sapiens
caagacagagcaagg

SEQ ID NO: 645830 - DNA, 15 bp, Homo sapiens
aagacagagcaagga

SEQ ID NO: 645831 - DNA, 15 bp, Homo sapiens
agacagagcaaggat

SEQ ID NO: 645832 - DNA, 15 bp, Homo sapiens
gacagagcaaggata

SEQ ID NO: 645833 - DNA, 15 bp, Homo sapiens
acagagcaaggatat

SEQ ID NO: 645834 - DNA, 15 bp, Homo sapiens
cagagcaaggatatt

SEQ ID NO: 645835 - DNA, 15 bp, Homo sapiens
agagcaaggatatta

SEQ ID NO: 645836 - DNA, 15 bp, Homo sapiens
gagcaaggatattag

SEQ ID NO: 645837 - DNA, 15 bp, Homo sapiens
agcaaggatattagc

SEQ ID NO: 645838 - DNA, 15 bp, Homo sapiens
gcaaggatattagct

SEQ ID NO: 645839 - DNA, 15 bp, Homo sapiens
caaggatattagcta

SEQ ID NO: 645840 - DNA, 15 bp, Homo sapiens
aaggatattagctat

SEQ ID NO: 645841 - DNA, 15 bp, Homo sapiens
aggatattagctatg

SEQ ID NO: 645842 - DNA, 15 bp, Homo sapiens
ggatattagctatgt

SEQ ID NO: 645843 - DNA, 15 bp, Homo sapiens
gatattagctatgta

SEQ ID NO: 645844 - DNA, 15 bp, Homo sapiens
atattagctatgtaa

SEQ ID NO: 645845 - DNA, 15 bp, Homo sapiens
tattagctatgtaaa

SEQ ID NO: 645846 - DNA, 15 bp, Homo sapiens
attagctatgtaaaa

SEQ ID NO: 645847 - DNA, 15 bp, Homo sapiens
ttagctatgtaaaag

SEQ ID NO: 645848 - DNA, 15 bp, Homo sapiens
tagctatgtaaaaga

SEQ ID NO: 645849 - DNA, 15 bp, Homo sapiens
agctatgtaaaagaa

SEQ ID NO: 645850 - DNA, 15 bp, Homo sapiens
gctatgtaaaagaaa

SEQ ID NO: 645851 - DNA, 15 bp, Homo sapiens
ctatgtaaaagaaaa

SEQ ID NO: 645852 - DNA, 15 bp, Homo sapiens
tatgtaaaagaaaaa

SEQ ID NO: 645853 - DNA, 15 bp, Homo sapiens
atgtaaaagaaaaag

SEQ ID NO: 645854 - DNA, 15 bp, Homo sapiens
tgtaaaagaaaaaga

SEQ ID NO: 645855 - DNA, 15 bp, Homo sapiens
gtaaaagaaaaagac

SEQ ID NO: 645856 - DNA, 15 bp, Homo sapiens
taaaagaaaaagaca

SEQ ID NO: 645857 - DNA, 15 bp, Homo sapiens
aaaagaaaaagacaa

SEQ ID NO: 645858 - DNA, 15 bp, Homo sapiens
aaagaaaaagacaaa

SEQ ID NO: 645859 - DNA, 15 bp, Homo sapiens
aagaaaaagacaaat

SEQ ID NO: 645860 - DNA, 15 bp, Homo sapiens
agaaaaagacaaata

SEQ ID NO: 645861 - DNA, 15 bp, Homo sapiens
gaaaaagacaaataa

SEQ ID NO: 645862 - DNA, 15 bp, Homo sapiens
aaaaagacaaataag

SEQ ID NO: 645863 - DNA, 15 bp, Homo sapiens
aaaagacaaataaga

SEQ ID NO: 645864 - DNA, 15 bp, Homo sapiens
aaagacaaataagat

SEQ ID NO: 645865 - DNA, 15 bp, Homo sapiens
aagacaaataagatg

SEQ ID NO: 645866 - DNA, 15 bp, Homo sapiens
agacaaataagatgg

SEQ ID NO: 645867 - DNA, 15 bp, Homo sapiens
gacaaataagatggt

SEQ ID NO: 645868 - DNA, 15 bp, Homo sapiens
acaaataagatggtt

SEQ ID NO: 645869 - DNA, 15 bp, Homo sapiens
caaataagatggttt

SEQ ID NO: 645870 - DNA, 15 bp, Homo sapiens
aaataagatggtttc

SEQ ID NO: 645871 - DNA, 15 bp, Homo sapiens
aataagatggtttcc

SEQ ID NO: 645872 - DNA, 15 bp, Homo sapiens
ataagatggtttcca

SEQ ID NO: 645873 - DNA, 15 bp, Homo sapiens
taagatggtttccaa

SEQ ID NO: 645874 - DNA, 15 bp, Homo sapiens
aagatggtttccaaa

SEQ ID NO: 645875 - DNA, 15 bp, Homo sapiens
agatggtttccaaaa

SEQ ID NO: 645876 - DNA, 15 bp, Homo sapiens
gatggtttccaaaag

SEQ ID NO: 645877 - DNA, 15 bp, Homo sapiens
atggtttccaaaagc

SEQ ID NO: 645878 - DNA, 15 bp, Homo sapiens
tggtttccaaaagcc

SEQ ID NO: 645879 - DNA, 15 bp, Homo sapiens
ggtttccaaaagcct

SEQ ID NO: 645880 - DNA, 15 bp, Homo sapiens
gtttccaaaagcctt

SEQ ID NO: 645881 - DNA, 15 bp, Homo sapiens
tttccaaaagccttt

SEQ ID NO: 645882 - DNA, 15 bp, Homo sapiens
ttccaaaagccttta

SEQ ID NO: 645883 - DNA, 15 bp, Homo sapiens
tccaaaagcctttat

SEQ ID NO: 645884 - DNA, 15 bp, Homo sapiens
ccaaaagcctttatc

SEQ ID NO: 645885 - DNA, 15 bp, Homo sapiens
caaaagcctttatca

SEQ ID NO: 645886 - DNA, 15 bp, Homo sapiens
aaaagcctttatcaa

SEQ ID NO: 645887 - DNA, 15 bp, Homo sapiens
aaagcctttatcaac

SEQ ID NO: 645888 - DNA, 15 bp, Homo sapiens
aagcctttatcaaca

SEQ ID NO: 645889 - DNA, 15 bp, Homo sapiens
agcctttatcaacac

SEQ ID NO: 645890 - DNA, 15 bp, Homo sapiens
gcctttatcaacact

SEQ ID NO: 645891 - DNA, 15 bp, Homo sapiens
cctttatcaacactg

SEQ ID NO: 645892 - DNA, 15 bp, Homo sapiens
ctttatcaacactga

SEQ ID NO: 645893 - DNA, 15 bp, Homo sapiens
tttatcaacactgag

SEQ ID NO: 645894 - DNA, 15 bp, Homo sapiens
ttatcaacactgagt

SEQ ID NO: 645895 - DNA, 15 bp, Homo sapiens
tatcaacactgagta

SEQ ID NO: 645896 - DNA, 15 bp, Homo sapiens
atcaacactgagtac

SEQ ID NO: 645897 - DNA, 15 bp, Homo sapiens
tcaacactgagtacc

SEQ ID NO: 645898 - DNA, 15 bp, Homo sapiens
caacactgagtacca

SEQ ID NO: 645899 - DNA, 15 bp, Homo sapiens
aacactgagtaccag

SEQ ID NO: 645900 - DNA, 15 bp, Homo sapiens
acactgagtaccagc

SEQ ID NO: 645901 - DNA, 15 bp, Homo sapiens
cactgagtaccagct

SEQ ID NO: 645902 - DNA, 15 bp, Homo sapiens
actgagtaccagctg

SEQ ID NO: 645903 - DNA, 15 bp, Homo sapiens
ctgagtaccagctgg

SEQ ID NO: 645904 - DNA, 15 bp, Homo sapiens
tgagtaccagctggg

SEQ ID NO: 645905 - DNA, 15 bp, Homo sapiens
gagtaccagctggga

SEQ ID NO: 645906 - DNA, 15 bp, Homo sapiens
agtaccagctgggaa

SEQ ID NO: 645907 - DNA, 15 bp, Homo sapiens
gtaccagctgggaaa

SEQ ID NO: 645908 - DNA, 15 bp, Homo sapiens
taccagctgggaaac

SEQ ID NO: 645909 - DNA, 15 bp, Homo sapiens
accagctgggaaacc

SEQ ID NO: 645910 - DNA, 15 bp, Homo sapiens
ccagctgggaaacct

SEQ ID NO: 645911 - DNA, 15 bp, Homo sapiens
cagctgggaaaccta

SEQ ID NO: 645912 - DNA, 15 bp, Homo sapiens
agctgggaaacctag

SEQ ID NO: 645913 - DNA, 15 bp, Homo sapiens
gctgggaaacctaga

SEQ ID NO: 645914 - DNA, 15 bp, Homo sapiens
ctgggaaacctagat

SEQ ID NO: 645915 - DNA, 15 bp, Homo sapiens
tgggaaacctagatt

SEQ ID NO: 645916 - DNA, 15 bp, Homo sapiens
gggaaacctagatta

SEQ ID NO: 645917 - DNA, 15 bp, Homo sapiens
ggaaacctagattaa

SEQ ID NO: 645918 - DNA, 15 bp, Homo sapiens
gaaacctagattaag

SEQ ID NO: 645919 - DNA, 15 bp, Homo sapiens
aaacctagattaaga

SEQ ID NO: 645920 - DNA, 15 bp, Homo sapiens
aacctagattaagaa

SEQ ID NO: 645921 - DNA, 15 bp, Homo sapiens
acctagattaagaac

SEQ ID NO: 645922 - DNA, 15 bp, Homo sapiens
cctagattaagaaca

SEQ ID NO: 645923 - DNA, 15 bp, Homo sapiens
ctagattaagaacaa

SEQ ID NO: 645924 - DNA, 15 bp, Homo sapiens
tagattaagaacaaa

SEQ ID NO: 645925 - DNA, 15 bp, Homo sapiens
agattaagaacaaaa

SEQ ID NO: 645926 - DNA, 15 bp, Homo sapiens
gattaagaacaaaat

SEQ ID NO: 645927 - DNA, 15 bp, Homo sapiens
attaagaacaaaatt

SEQ ID NO: 645928 - DNA, 15 bp, Homo sapiens
ttaagaacaaaattg

SEQ ID NO: 645929 - DNA, 15 bp, Homo sapiens
taagaacaaaattga

SEQ ID NO: 645930 - DNA, 15 bp, Homo sapiens
aagaacaaaattgat

SEQ ID NO: 645931 - DNA, 15 bp, Homo sapiens
agaacaaaattgatt

SEQ ID NO: 645932 - DNA, 15 bp, Homo sapiens
gaacaaaattgattg

SEQ ID NO: 645933 - DNA, 15 bp, Homo sapiens
aacaaaattgattgg

SEQ ID NO: 645934 - DNA, 15 bp, Homo sapiens
acaaaattgattggc

SEQ ID NO: 645935 - DNA, 15 bp, Homo sapiens
caaaattgattggct

SEQ ID NO: 645936 - DNA, 15 bp, Homo sapiens
aaaattgattggcta

SEQ ID NO: 645937 - DNA, 15 bp, Homo sapiens
aaattgattggctat

SEQ ID NO: 645938 - DNA, 15 bp, Homo sapiens
aattgattggctatc

SEQ ID NO: 645939 - DNA, 15 bp, Homo sapiens
attgattggctatca

SEQ ID NO: 645940 - DNA, 15 bp, Homo sapiens
ttgattggctatcag

SEQ ID NO: 645941 - DNA, 15 bp, Homo sapiens
tgattggctatcagg

SEQ ID NO: 645942 - DNA, 15 bp, Homo sapiens
gattggctatcagga

SEQ ID NO: 645943 - DNA, 15 bp, Homo sapiens
attggctatcaggaa

SEQ ID NO: 645944 - DNA, 15 bp, Homo sapiens
ttggctatcaggaaa

SEQ ID NO: 645945 - DNA, 15 bp, Homo sapiens
tggctatcaggaaag

SEQ ID NO: 645946 - DNA, 15 bp, Homo sapiens
ggctatcaggaaaga

SEQ ID NO: 645947 - DNA, 15 bp, Homo sapiens
gctatcaggaaagag

SEQ ID NO: 645948 - DNA, 15 bp, Homo sapiens
ctatcaggaaagagg

SEQ ID NO: 645949 - DNA, 15 bp, Homo sapiens
tatcaggaaagaggc

SEQ ID NO: 645950 - DNA, 15 bp, Homo sapiens
atcaggaaagaggct

SEQ ID NO: 645951 - DNA, 15 bp, Homo sapiens
tcaggaaagaggctt

SEQ ID NO: 645952 - DNA, 15 bp, Homo sapiens
caggaaagaggcttg

SEQ ID NO: 645953 - DNA, 15 bp, Homo sapiens
aggaaagaggcttga

SEQ ID NO: 645954 - DNA, 15 bp, Homo sapiens
ggaaagaggcttgat

SEQ ID NO: 645955 - DNA, 15 bp, Homo sapiens
gaaagaggcttgata

SEQ ID NO: 645956 - DNA, 15 bp, Homo sapiens
aaagaggcttgataa

SEQ ID NO: 645957 - DNA, 15 bp, Homo sapiens
aagaggcttgataac

SEQ ID NO: 645958 - DNA, 15 bp, Homo sapiens
agaggcttgataaca

SEQ ID NO: 645959 - DNA, 15 bp, Homo sapiens
gaggcttgataacat

SEQ ID NO: 645960 - DNA, 15 bp, Homo sapiens
aggcttgataacatc

SEQ ID NO: 645961 - DNA, 15 bp, Homo sapiens
ggcttgataacatcc

SEQ ID NO: 645962 - DNA, 15 bp, Homo sapiens
gcttgataacatccc

SEQ ID NO: 645963 - DNA, 15 bp, Homo sapiens
cttgataacatccca

SEQ ID NO: 645964 - DNA, 15 bp, Homo sapiens
ttgataacatcccaa

SEQ ID NO: 645965 - DNA, 15 bp, Homo sapiens
tgataacatcccaag

SEQ ID NO: 645966 - DNA, 15 bp, Homo sapiens
gataacatcccaagg

SEQ ID NO: 645967 - DNA, 15 bp, Homo sapiens
ataacatcccaaggt

SEQ ID NO: 645968 - DNA, 15 bp, Homo sapiens
taacatcccaaggtg

SEQ ID NO: 645969 - DNA, 15 bp, Homo sapiens
aacatcccaaggtgc

SEQ ID NO: 645970 - DNA, 15 bp, Homo sapiens
acatcccaaggtgca

SEQ ID NO: 645971 - DNA, 15 bp, Homo sapiens
catcccaaggtgcag

SEQ ID NO: 645972 - DNA, 15 bp, Homo sapiens
atcccaaggtgcagc

SEQ ID NO: 645973 - DNA, 15 bp, Homo sapiens
tcccaaggtgcagca

SEQ ID NO: 645974 - DNA, 15 bp, Homo sapiens
cccaaggtgcagcaa

SEQ ID NO: 645975 - DNA, 15 bp, Homo sapiens
ccaaggtgcagcaaa

SEQ ID NO: 645976 - DNA, 15 bp, Homo sapiens
caaggtgcagcaaat

SEQ ID NO: 645977 - DNA, 15 bp, Homo sapiens
aaggtgcagcaaatt

SEQ ID NO: 645978 - DNA, 15 bp, Homo sapiens
aggtgcagcaaattt

SEQ ID NO: 645979 - DNA, 15 bp, Homo sapiens
ggtgcagcaaatttt

SEQ ID NO: 645980 - DNA, 15 bp, Homo sapiens
gtgcagcaaattttc

SEQ ID NO: 645981 - DNA, 15 bp, Homo sapiens
tgcagcaaattttcc

SEQ ID NO: 645982 - DNA, 15 bp, Homo sapiens
gcagcaaattttcca

SEQ ID NO: 645983 - DNA, 15 bp, Homo sapiens
cagcaaattttccaa

SEQ ID NO: 645984 - DNA, 15 bp, Homo sapiens
agcaaattttccaag

SEQ ID NO: 645985 - DNA, 15 bp, Homo sapiens
gcaaattttccaaga

SEQ ID NO: 645986 - DNA, 15 bp, Homo sapiens
caaattttccaagat

SEQ ID NO: 645987 - DNA, 15 bp, Homo sapiens
aaattttccaagatc

SEQ ID NO: 645988 - DNA, 15 bp, Homo sapiens
aattttccaagatct

SEQ ID NO: 645989 - DNA, 15 bp, Homo sapiens
attttccaagatctg

SEQ ID NO: 645990 - DNA, 15 bp, Homo sapiens
ttttccaagatctga

SEQ ID NO: 645991 - DNA, 15 bp, Homo sapiens
tttccaagatctgag

SEQ ID NO: 645992 - DNA, 15 bp, Homo sapiens
ttccaagatctgaga

SEQ ID NO: 645993 - DNA, 15 bp, Homo sapiens
tccaagatctgagag

SEQ ID NO: 645994 - DNA, 15 bp, Homo sapiens
ccaagatctgagagg

SEQ ID NO: 645995 - DNA, 15 bp, Homo sapiens
caagatctgagaggc

SEQ ID NO: 645996 - DNA, 15 bp, Homo sapiens
aagatctgagaggct

SEQ ID NO: 645997 - DNA, 15 bp, Homo sapiens
agatctgagaggctg

SEQ ID NO: 645998 - DNA, 15 bp, Homo sapiens
gatctgagaggctgt

SEQ ID NO: 645999 - DNA, 15 bp, Homo sapiens
atctgagaggctgtt

SEQ ID NO: 646000 - DNA, 15 bp, Homo sapiens
tctgagaggctgtta

SEQ ID NO: 646001 - DNA, 15 bp, Homo sapiens
ctgagaggctgttaa

SEQ ID NO: 646002 - DNA, 15 bp, Homo sapiens
tgagaggctgttaat

SEQ ID NO: 646003 - DNA, 15 bp, Homo sapiens
gagaggctgttaatg

SEQ ID NO: 646004 - DNA, 15 bp, Homo sapiens
agaggctgttaatgc

SEQ ID NO: 646005 - DNA, 15 bp, Homo sapiens
gaggctgttaatgct

SEQ ID NO: 646006 - DNA, 15 bp, Homo sapiens
aggctgttaatgcta

SEQ ID NO: 646007 - DNA, 15 bp, Homo sapiens
ggctgttaatgctat

SEQ ID NO: 646008 - DNA, 15 bp, Homo sapiens
gctgttaatgctatc

SEQ ID NO: 646009 - DNA, 15 bp, Homo sapiens
ctgttaatgctatcc

SEQ ID NO: 646010 - DNA, 15 bp, Homo sapiens
tgttaatgctatcca

SEQ ID NO: 646011 - DNA, 15 bp, Homo sapiens
gttaatgctatccaa

SEQ ID NO: 646012 - DNA, 15 bp, Homo sapiens
ttaatgctatccaag

SEQ ID NO: 646013 - DNA, 15 bp, Homo sapiens
taatgctatccaagg

SEQ ID NO: 646014 - DNA, 15 bp, Homo sapiens
aatgctatccaaggg

SEQ ID NO: 646015 - DNA, 15 bp, Homo sapiens
atgctatccaagggt

SEQ ID NO: 646016 - DNA, 15 bp, Homo sapiens
tgctatccaagggtg

SEQ ID NO: 646017 - DNA, 15 bp, Homo sapiens
gctatccaagggtga

SEQ ID NO: 646018 - DNA, 15 bp, Homo sapiens
ctatccaagggtgat

SEQ ID NO: 646019 - DNA, 15 bp, Homo sapiens
tatccaagggtgata

SEQ ID NO: 646020 - DNA, 15 bp, Homo sapiens
atccaagggtgatag

SEQ ID NO: 646021 - DNA, 15 bp, Homo sapiens
tccaagggtgatagg

SEQ ID NO: 646022 - DNA, 15 bp, Homo sapiens
ccaagggtgataggg

SEQ ID NO: 646023 - DNA, 15 bp, Homo sapiens
caagggtgataggga

SEQ ID NO: 646024 - DNA, 15 bp, Homo sapiens
aagggtgatagggat

SEQ ID NO: 646025 - DNA, 15 bp, Homo sapiens
agggtgatagggata

SEQ ID NO: 646026 - DNA, 15 bp, Homo sapiens
gggtgatagggatag

SEQ ID NO: 646027 - DNA, 15 bp, Homo sapiens
ggtgatagggataga

SEQ ID NO: 646028 - DNA, 15 bp, Homo sapiens
gtgatagggatagag

SEQ ID NO: 646029 - DNA, 15 bp, Homo sapiens
tgatagggatagaga

SEQ ID NO: 646030 - DNA, 15 bp, Homo sapiens
gatagggatagagag

SEQ ID NO: 646031 - DNA, 15 bp, Homo sapiens
atagggatagagaga

SEQ ID NO: 646032 - DNA, 15 bp, Homo sapiens
tagggatagagagat

SEQ ID NO: 646033 - DNA, 15 bp, Homo sapiens
agggatagagagatg

SEQ ID NO: 646034 - DNA, 15 bp, Homo sapiens
gggatagagagatgg

SEQ ID NO: 646035 - DNA, 15 bp, Homo sapiens
ggatagagagatggg

SEQ ID NO: 646036 - DNA, 15 bp, Homo sapiens
gatagagagatggga

SEQ ID NO: 646037 - DNA, 15 bp, Homo sapiens
atagagagatgggaa

SEQ ID NO: 646038 - DNA, 15 bp, Homo sapiens
tagagagatgggaat

SEQ ID NO: 646039 - DNA, 15 bp, Homo sapiens
agagagatgggaatg

SEQ ID NO: 646040 - DNA, 15 bp, Homo sapiens
gagagatgggaatgt

SEQ ID NO: 646041 - DNA, 15 bp, Homo sapiens
agagatgggaatgtt

SEQ ID NO: 646042 - DNA, 15 bp, Homo sapiens
gagatgggaatgttt

SEQ ID NO: 646043 - DNA, 15 bp, Homo sapiens
agatgggaatgttta

SEQ ID NO: 646044 - DNA, 15 bp, Homo sapiens
gatgggaatgtttaa

SEQ ID NO: 646045 - DNA, 15 bp, Homo sapiens
atgggaatgtttaaa

SEQ ID NO: 646046 - DNA, 15 bp, Homo sapiens
tgggaatgtttaaaa

SEQ ID NO: 646047 - DNA, 15 bp, Homo sapiens
gggaatgtttaaaag

SEQ ID NO: 646048 - DNA, 15 bp, Homo sapiens
ggaatgtttaaaagg

SEQ ID NO: 646049 - DNA, 15 bp, Homo sapiens
gaatgtttaaaaggg

SEQ ID NO: 646050 - DNA, 15 bp, Homo sapiens
aatgtttaaaaggga

SEQ ID NO: 646051 - DNA, 15 bp, Homo sapiens
atgtttaaaagggaa

SEQ ID NO: 646052 - DNA, 15 bp, Homo sapiens
tgtttaaaagggaaa

SEQ ID NO: 646053 - DNA, 15 bp, Homo sapiens
gtttaaaagggaaag

SEQ ID NO: 646054 - DNA, 15 bp, Homo sapiens
tttaaaagggaaaga

SEQ ID NO: 646055 - DNA, 15 bp, Homo sapiens
ttaaaagggaaagac

SEQ ID NO: 646056 - DNA, 15 bp, Homo sapiens
taaaagggaaagact

SEQ ID NO: 646057 - DNA, 15 bp, Homo sapiens
aaaagggaaagactg

SEQ ID NO: 646058 - DNA, 15 bp, Homo sapiens
aaagggaaagactga

SEQ ID NO: 646059 - DNA, 15 bp, Homo sapiens
aagggaaagactgag

SEQ ID NO: 646060 - DNA, 15 bp, Homo sapiens
agggaaagactgaga

SEQ ID NO: 646061 - DNA, 15 bp, Homo sapiens
gggaaagactgagac

SEQ ID NO: 646062 - DNA, 15 bp, Homo sapiens
ggaaagactgagact

SEQ ID NO: 646063 - DNA, 15 bp, Homo sapiens
gaaagactgagactt

SEQ ID NO: 646064 - DNA, 15 bp, Homo sapiens
aaagactgagacttt

SEQ ID NO: 646065 - DNA, 15 bp, Homo sapiens
aagactgagactttc

SEQ ID NO: 646066 - DNA, 15 bp, Homo sapiens
agactgagactttca

SEQ ID NO: 646067 - DNA, 15 bp, Homo sapiens
gactgagactttcag

SEQ ID NO: 646068 - DNA, 15 bp, Homo sapiens
actgagactttcagc

SEQ ID NO: 646069 - DNA, 15 bp, Homo sapiens
ctgagactttcagca

SEQ ID NO: 646070 - DNA, 15 bp, Homo sapiens
tgagactttcagcaa

SEQ ID NO: 646071 - DNA, 15 bp, Homo sapiens
gagactttcagcaag

SEQ ID NO: 646072 - DNA, 15 bp, Homo sapiens
agactttcagcaaga

SEQ ID NO: 646073 - DNA, 15 bp, Homo sapiens
gactttcagcaagat

SEQ ID NO: 646074 - DNA, 15 bp, Homo sapiens
actttcagcaagata

SEQ ID NO: 646075 - DNA, 15 bp, Homo sapiens
ctttcagcaagatat

SEQ ID NO: 646076 - DNA, 15 bp, Homo sapiens
tttcagcaagatatt

SEQ ID NO: 646077 - DNA, 15 bp, Homo sapiens
ttcagcaagatattt

SEQ ID NO: 646078 - DNA, 15 bp, Homo sapiens
tcagcaagatatttg

SEQ ID NO: 646079 - DNA, 15 bp, Homo sapiens
cagcaagatatttga

SEQ ID NO: 646080 - DNA, 15 bp, Homo sapiens
agcaagatatttgaa

SEQ ID NO: 646081 - DNA, 15 bp, Homo sapiens
gcaagatatttgaat

SEQ ID NO: 646082 - DNA, 15 bp, Homo sapiens
caagatatttgaatg

SEQ ID NO: 646083 - DNA, 15 bp, Homo sapiens
aagatatttgaatga

SEQ ID NO: 646084 - DNA, 15 bp, Homo sapiens
agatatttgaatgat

SEQ ID NO: 646085 - DNA, 15 bp, Homo sapiens
gatatttgaatgatc

SEQ ID NO: 646086 - DNA, 15 bp, Homo sapiens
atatttgaatgatca

SEQ ID NO: 646087 - DNA, 15 bp, Homo sapiens
tatttgaatgatcaa

SEQ ID NO: 646088 - DNA, 15 bp, Homo sapiens
atttgaatgatcaaa

SEQ ID NO: 646089 - DNA, 15 bp, Homo sapiens
tttgaatgatcaaat

SEQ ID NO: 646090 - DNA, 15 bp, Homo sapiens
ttgaatgatcaaatt

SEQ ID NO: 646091 - DNA, 15 bp, Homo sapiens
tgaatgatcaaattc

SEQ ID NO: 646092 - DNA, 15 bp, Homo sapiens
gaatgatcaaattca

SEQ ID NO: 646093 - DNA, 15 bp, Homo sapiens
aatgatcaaattcag

SEQ ID NO: 646094 - DNA, 15 bp, Homo sapiens
atgatcaaattcagt

SEQ ID NO: 646095 - DNA, 15 bp, Homo sapiens
tgatcaaattcagtt

SEQ ID NO: 646096 - DNA, 15 bp, Homo sapiens
gatcaaattcagttt

SEQ ID NO: 646097 - DNA, 15 bp, Homo sapiens
atcaaattcagtttt

SEQ ID NO: 646098 - DNA, 15 bp, Homo sapiens
tcaaattcagtttta

SEQ ID NO: 646099 - DNA, 15 bp, Homo sapiens
caaattcagttttag

SEQ ID NO: 646100 - DNA, 15 bp, Homo sapiens
aaattcagttttagt

SEQ ID NO: 646101 - DNA, 15 bp, Homo sapiens
aattcagttttagtg

SEQ ID NO: 646102 - DNA, 15 bp, Homo sapiens
attcagttttagtga

SEQ ID NO: 646103 - DNA, 15 bp, Homo sapiens
ttcagttttagtgac

SEQ ID NO: 646104 - DNA, 15 bp, Homo sapiens
tcagttttagtgacc

SEQ ID NO: 646105 - DNA, 15 bp, Homo sapiens
cagttttagtgacca

SEQ ID NO: 646106 - DNA, 15 bp, Homo sapiens
agttttagtgaccaa

SEQ ID NO: 646107 - DNA, 15 bp, Homo sapiens
gttttagtgaccaaa

SEQ ID NO: 646108 - DNA, 15 bp, Homo sapiens
ttttagtgaccaaaa

SEQ ID NO: 646109 - DNA, 15 bp, Homo sapiens
tttagtgaccaaaat

SEQ ID NO: 646110 - DNA, 15 bp, Homo sapiens
ttagtgaccaaaatc

SEQ ID NO: 646111 - DNA, 15 bp, Homo sapiens
tagtgaccaaaatct

SEQ ID NO: 646112 - DNA, 15 bp, Homo sapiens
agtgaccaaaatctt

SEQ ID NO: 646113 - DNA, 15 bp, Homo sapiens
gtgaccaaaatcttt

SEQ ID NO: 646114 - DNA, 15 bp, Homo sapiens
tgaccaaaatctttc

SEQ ID NO: 646115 - DNA, 15 bp, Homo sapiens
gaccaaaatctttct

SEQ ID NO: 646116 - DNA, 15 bp, Homo sapiens
accaaaatctttctg

SEQ ID NO: 646117 - DNA, 15 bp, Homo sapiens
ccaaaatctttctgg

SEQ ID NO: 646118 - DNA, 15 bp, Homo sapiens
caaaatctttctggt

SEQ ID NO: 646119 - DNA, 15 bp, Homo sapiens
aaaatctttctggtt

SEQ ID NO: 646120 - DNA, 15 bp, Homo sapiens
aaatctttctggttt

SEQ ID NO: 646121 - DNA, 15 bp, Homo sapiens
aatctttctggtttc

SEQ ID NO: 646122 - DNA, 15 bp, Homo sapiens
atctttctggtttct

SEQ ID NO: 646123 - DNA, 15 bp, Homo sapiens
tctttctggtttcta

SEQ ID NO: 646124 - DNA, 15 bp, Homo sapiens
ctttctggtttctag

SEQ ID NO: 646125 - DNA, 15 bp, Homo sapiens
tttctggtttctagt

SEQ ID NO: 646126 - DNA, 15 bp, Homo sapiens
ttctggtttctagtg

SEQ ID NO: 646127 - DNA, 15 bp, Homo sapiens
tctggtttctagtga

SEQ ID NO: 646128 - DNA, 15 bp, Homo sapiens
ctggtttctagtgat

SEQ ID NO: 646129 - DNA, 15 bp, Homo sapiens
tggtttctagtgata

SEQ ID NO: 646130 - DNA, 15 bp, Homo sapiens
ggtttctagtgatat

SEQ ID NO: 646131 - DNA, 15 bp, Homo sapiens
gtttctagtgatatt

SEQ ID NO: 646132 - DNA, 15 bp, Homo sapiens
tttctagtgatatta

SEQ ID NO: 646133 - DNA, 15 bp, Homo sapiens
ttctagtgatattaa

SEQ ID NO: 646134 - DNA, 15 bp, Homo sapiens
tctagtgatattaat

SEQ ID NO: 646135 - DNA, 15 bp, Homo sapiens
ctagtgatattaata

SEQ ID NO: 646136 - DNA, 15 bp, Homo sapiens
tagtgatattaataa

SEQ ID NO: 646137 - DNA, 15 bp, Homo sapiens
agtgatattaataaa

SEQ ID NO: 646138 - DNA, 15 bp, Homo sapiens
gtgatattaataaaa

SEQ ID NO: 646139 - DNA, 15 bp, Homo sapiens
tgatattaataaaat

SEQ ID NO: 646140 - DNA, 15 bp, Homo sapiens
gatattaataaaatc

SEQ ID NO: 646141 - DNA, 15 bp, Homo sapiens
atattaataaaatca

SEQ ID NO: 646142 - DNA, 15 bp, Homo sapiens
tattaataaaatcaa

SEQ ID NO: 646143 - DNA, 15 bp, Homo sapiens
attaataaaatcaat

SEQ ID NO: 646144 - DNA, 15 bp, Homo sapiens
ttaataaaatcaatg

SEQ ID NO: 646145 - DNA, 15 bp, Homo sapiens
taataaaatcaatga

SEQ ID NO: 646146 - DNA, 15 bp, Homo sapiens
aataaaatcaatgat

SEQ ID NO: 646147 - DNA, 15 bp, Homo sapiens
ataaaatcaatgatg

SEQ ID NO: 646148 - DNA, 15 bp, Homo sapiens
taaaatcaatgatgc

SEQ ID NO: 646149 - DNA, 15 bp, Homo sapiens
aaaatcaatgatgcc

SEQ ID NO: 646150 - DNA, 15 bp, Homo sapiens
aaatcaatgatgcca

SEQ ID NO: 646151 - DNA, 15 bp, Homo sapiens
aatcaatgatgccat

SEQ ID NO: 646152 - DNA, 15 bp, Homo sapiens
atcaatgatgccata

SEQ ID NO: 646153 - DNA, 15 bp, Homo sapiens
tcaatgatgccatag

SEQ ID NO: 646154 - DNA, 15 bp, Homo sapiens
caatgatgccatagc

SEQ ID NO: 646155 - DNA, 15 bp, Homo sapiens
aatgatgccatagct

SEQ ID NO: 646156 - DNA, 15 bp, Homo sapiens
atgatgccatagctg

SEQ ID NO: 646157 - DNA, 15 bp, Homo sapiens
tgatgccatagctga

SEQ ID NO: 646158 - DNA, 15 bp, Homo sapiens
gatgccatagctgac

SEQ ID NO: 646159 - DNA, 15 bp, Homo sapiens
atgccatagctgacc

SEQ ID NO: 646160 - DNA, 15 bp, Homo sapiens
tgccatagctgacca

SEQ ID NO: 646161 - DNA, 15 bp, Homo sapiens
gccatagctgaccaa

SEQ ID NO: 646162 - DNA, 15 bp, Homo sapiens
ccatagctgaccaaa

SEQ ID NO: 646163 - DNA, 15 bp, Homo sapiens
catagctgaccaaat

SEQ ID NO: 646164 - DNA, 15 bp, Homo sapiens
atagctgaccaaatg

SEQ ID NO: 646165 - DNA, 15 bp, Homo sapiens
tagctgaccaaatgg

SEQ ID NO: 646166 - DNA, 15 bp, Homo sapiens
agctgaccaaatggc

SEQ ID NO: 646167 - DNA, 15 bp, Homo sapiens
gctgaccaaatggcc

SEQ ID NO: 646168 - DNA, 15 bp, Homo sapiens
ctgaccaaatggccc

SEQ ID NO: 646169 - DNA, 15 bp, Homo sapiens
tgaccaaatggccct

SEQ ID NO: 646170 - DNA, 15 bp, Homo sapiens
gaccaaatggccctt

SEQ ID NO: 646171 - DNA, 15 bp, Homo sapiens
accaaatggcccttt

SEQ ID NO: 646172 - DNA, 15 bp, Homo sapiens
ccaaatggccctttt

SEQ ID NO: 646173 - DNA, 15 bp, Homo sapiens
caaatggcccttttc

SEQ ID NO: 646174 - DNA, 15 bp, Homo sapiens
aaatggcccttttca

SEQ ID NO: 646175 - DNA, 15 bp, Homo sapiens
aatggcccttttcat

SEQ ID NO: 646176 - DNA, 15 bp, Homo sapiens
atggcccttttcatt

SEQ ID NO: 646177 - DNA, 15 bp, Homo sapiens
tggcccttttcattc

SEQ ID NO: 646178 - DNA, 15 bp, Homo sapiens
ggcccttttcattca

SEQ ID NO: 646179 - DNA, 15 bp, Homo sapiens
gcccttttcattcag

SEQ ID NO: 646180 - DNA, 15 bp, Homo sapiens
cccttttcattcagc

SEQ ID NO: 646181 - DNA, 15 bp, Homo sapiens
ccttttcattcagcg

SEQ ID NO: 646182 - DNA, 15 bp, Homo sapiens
cttttcattcagcgc

SEQ ID NO: 646183 - DNA, 15 bp, Homo sapiens
ttttcattcagcgca

SEQ ID NO: 646184 - DNA, 15 bp, Homo sapiens
tttcattcagcgcat

SEQ ID NO: 646185 - DNA, 15 bp, Homo sapiens
ttcattcagcgcatg

SEQ ID NO: 646186 - DNA, 15 bp, Homo sapiens
tcattcagcgcatga

SEQ ID NO: 646187 - DNA, 15 bp, Homo sapiens
cattcagcgcatgac

SEQ ID NO: 646188 - DNA, 15 bp, Homo sapiens
attcagcgcatgacc

SEQ ID NO: 646189 - DNA, 15 bp, Homo sapiens
ttcagcgcatgacct

SEQ ID NO: 646190 - DNA, 15 bp, Homo sapiens
tcagcgcatgacctc

SEQ ID NO: 646191 - DNA, 15 bp, Homo sapiens
cagcgcatgacctcg

SEQ ID NO: 646192 - DNA, 15 bp, Homo sapiens
agcgcatgacctcga

SEQ ID NO: 646193 - DNA, 15 bp, Homo sapiens
gcgcatgacctcgac

SEQ ID NO: 646194 - DNA, 15 bp, Homo sapiens
cgcatgacctcgacc

SEQ ID NO: 646195 - DNA, 15 bp, Homo sapiens
gcatgacctcgacca

SEQ ID NO: 646196 - DNA, 15 bp, Homo sapiens
catgacctcgaccat

SEQ ID NO: 646197 - DNA, 15 bp, Homo sapiens
atgacctcgaccatc

SEQ ID NO: 646198 - DNA, 15 bp, Homo sapiens
tgacctcgaccatct

SEQ ID NO: 646199 - DNA, 15 bp, Homo sapiens
gacctcgaccatctg

SEQ ID NO: 646200 - DNA, 15 bp, Homo sapiens
acctcgaccatctgt

SEQ ID NO: 646201 - DNA, 15 bp, Homo sapiens
cctcgaccatctgtg

SEQ ID NO: 646202 - DNA, 15 bp, Homo sapiens
ctcgaccatctgtgg

SEQ ID NO: 646203 - DNA, 15 bp, Homo sapiens
tcgaccatctgtggt

SEQ ID NO: 646204 - DNA, 15 bp, Homo sapiens
cgaccatctgtggtt

SEQ ID NO: 646205 - DNA, 15 bp, Homo sapiens
gaccatctgtggttt

SEQ ID NO: 646206 - DNA, 15 bp, Homo sapiens
accatctgtggtttc

SEQ ID NO: 646207 - DNA, 15 bp, Homo sapiens
ccatctgtggtttcc

SEQ ID NO: 646208 - DNA, 15 bp, Homo sapiens
catctgtggtttcct

SEQ ID NO: 646209 - DNA, 15 bp, Homo sapiens
atctgtggtttcctg

SEQ ID NO: 646210 - DNA, 15 bp, Homo sapiens
tctgtggtttcctgt

SEQ ID NO: 646211 - DNA, 15 bp, Homo sapiens
ctgtggtttcctgtt

SEQ ID NO: 646212 - DNA, 15 bp, Homo sapiens
tgtggtttcctgttg

SEQ ID NO: 646213 - DNA, 15 bp, Homo sapiens
gtggtttcctgttgg

SEQ ID NO: 646214 - DNA, 15 bp, Homo sapiens
tggtttcctgttggg

SEQ ID NO: 646215 - DNA, 15 bp, Homo sapiens
ggtttcctgttggga

SEQ ID NO: 646216 - DNA, 15 bp, Homo sapiens
gtttcctgttgggat

SEQ ID NO: 646217 - DNA, 15 bp, Homo sapiens
tttcctgttgggatt

SEQ ID NO: 646218 - DNA, 15 bp, Homo sapiens
ttcctgttgggattt

SEQ ID NO: 646219 - DNA, 15 bp, Homo sapiens
tcctgttgggatttt

SEQ ID NO: 646220 - DNA, 15 bp, Homo sapiens
cctgttgggattttt

SEQ ID NO: 646221 - DNA, 15 bp, Homo sapiens
ctgttgggatttttc

SEQ ID NO: 646222 - DNA, 15 bp, Homo sapiens
tgttgggatttttca

SEQ ID NO: 646223 - DNA, 15 bp, Homo sapiens
gttgggatttttcag

SEQ ID NO: 646224 - DNA, 15 bp, Homo sapiens
ttgggatttttcagg

SEQ ID NO: 646225 - DNA, 15 bp, Homo sapiens
tgggatttttcaggg

SEQ ID NO: 646226 - DNA, 15 bp, Homo sapiens
gggatttttcagggg

SEQ ID NO: 646227 - DNA, 15 bp, Homo sapiens
ggatttttcaggggt

SEQ ID NO: 646228 - DNA, 15 bp, Homo sapiens
gatttttcaggggtt

SEQ ID NO: 646229 - DNA, 15 bp, Homo sapiens
atttttcaggggttg

SEQ ID NO: 646230 - DNA, 15 bp, Homo sapiens
tttttcaggggttgg

SEQ ID NO: 646231 - DNA, 15 bp, Homo sapiens
ttttcaggggttgga

SEQ ID NO: 646232 - DNA, 15 bp, Homo sapiens
tttcaggggttggaa

SEQ ID NO: 646233 - DNA, 15 bp, Homo sapiens
ttcaggggttggaaa

SEQ ID NO: 646234 - DNA, 15 bp, Homo sapiens
tcaggggttggaaac

SEQ ID NO: 646235 - DNA, 15 bp, Homo sapiens
caggggttggaaact

SEQ ID NO: 646236 - DNA, 15 bp, Homo sapiens
aggggttggaaactg

SEQ ID NO: 646237 - DNA, 15 bp, Homo sapiens
ggggttggaaactga

SEQ ID NO: 646238 - DNA, 15 bp, Homo sapiens
gggttggaaactgac

SEQ ID NO: 646239 - DNA, 15 bp, Homo sapiens
ggttggaaactgacc

SEQ ID NO: 646240 - DNA, 15 bp, Homo sapiens
gttggaaactgacct

SEQ ID NO: 646241 - DNA, 15 bp, Homo sapiens
ttggaaactgacctt

SEQ ID NO: 646242 - DNA, 15 bp, Homo sapiens
tggaaactgaccttg

SEQ ID NO: 646243 - DNA, 15 bp, Homo sapiens
ggaaactgaccttgg

SEQ ID NO: 646244 - DNA, 15 bp, Homo sapiens
gaaactgaccttggt

SEQ ID NO: 646245 - DNA, 15 bp, Homo sapiens
aaactgaccttggtt

SEQ ID NO: 646246 - DNA, 15 bp, Homo sapiens
aactgaccttggtta

SEQ ID NO: 646247 - DNA, 15 bp, Homo sapiens
actgaccttggttat

SEQ ID NO: 646248 - DNA, 15 bp, Homo sapiens
ctgaccttggttatt

SEQ ID NO: 646249 - DNA, 15 bp, Homo sapiens
tgaccttggttatta

SEQ ID NO: 646250 - DNA, 15 bp, Homo sapiens
gaccttggttattat

SEQ ID NO: 646251 - DNA, 15 bp, Homo sapiens
accttggttattatt

SEQ ID NO: 646252 - DNA, 15 bp, Homo sapiens
ccttggttattattt

SEQ ID NO: 646253 - DNA, 15 bp, Homo sapiens
cttggttattatttc

SEQ ID NO: 646254 - DNA, 15 bp, Homo sapiens
ttggttattatttct

SEQ ID NO: 646255 - DNA, 15 bp, Homo sapiens
tggttattatttctg

SEQ ID NO: 646256 - DNA, 15 bp, Homo sapiens
ggttattatttctgt

SEQ ID NO: 646257 - DNA, 15 bp, Homo sapiens
gttattatttctgtc

SEQ ID NO: 646258 - DNA, 15 bp, Homo sapiens
ttattatttctgtca

SEQ ID NO: 646259 - DNA, 15 bp, Homo sapiens
tattatttctgtcag

SEQ ID NO: 646260 - DNA, 15 bp, Homo sapiens
attatttctgtcagc

SEQ ID NO: 646261 - DNA, 15 bp, Homo sapiens
ttatttctgtcagcc

SEQ ID NO: 646262 - DNA, 15 bp, Homo sapiens
tatttctgtcagccc

SEQ ID NO: 646263 - DNA, 15 bp, Homo sapiens
atttctgtcagccct

SEQ ID NO: 646264 - DNA, 15 bp, Homo sapiens
tttctgtcagccctc

SEQ ID NO: 646265 - DNA, 15 bp, Homo sapiens
ttctgtcagccctct

SEQ ID NO: 646266 - DNA, 15 bp, Homo sapiens
tctgtcagccctctc

SEQ ID NO: 646267 - DNA, 15 bp, Homo sapiens
ctgtcagccctctca

SEQ ID NO: 646268 - DNA, 15 bp, Homo sapiens
tgtcagccctctcat

SEQ ID NO: 646269 - DNA, 15 bp, Homo sapiens
gtcagccctctcatt

SEQ ID NO: 646270 - DNA, 15 bp, Homo sapiens
tcagccctctcattg

SEQ ID NO: 646271 - DNA, 15 bp, Homo sapiens
cagccctctcattgg

SEQ ID NO: 646272 - DNA, 15 bp, Homo sapiens
agccctctcattggg

SEQ ID NO: 646273 - DNA, 15 bp, Homo sapiens
gccctctcattggga

SEQ ID NO: 646274 - DNA, 15 bp, Homo sapiens
ccctctcattgggat

SEQ ID NO: 646275 - DNA, 15 bp, Homo sapiens
cctctcattgggatt

SEQ ID NO: 646276 - DNA, 15 bp, Homo sapiens
ctctcattgggattg

SEQ ID NO: 646277 - DNA, 15 bp, Homo sapiens
tctcattgggattgg

SEQ ID NO: 646278 - DNA, 15 bp, Homo sapiens
ctcattgggattgga

SEQ ID NO: 646279 - DNA, 15 bp, Homo sapiens
tcattgggattggag

SEQ ID NO: 646280 - DNA, 15 bp, Homo sapiens
cattgggattggagc

SEQ ID NO: 646281 - DNA, 15 bp, Homo sapiens
attgggattggagca

SEQ ID NO: 646282 - DNA, 15 bp, Homo sapiens
ttgggattggagcag

SEQ ID NO: 646283 - DNA, 15 bp, Homo sapiens
tgggattggagcagc

SEQ ID NO: 646284 - DNA, 15 bp, Homo sapiens
gggattggagcagcc

SEQ ID NO: 646285 - DNA, 15 bp, Homo sapiens
ggattggagcagcca

SEQ ID NO: 646286 - DNA, 15 bp, Homo sapiens
gattggagcagccac

SEQ ID NO: 646287 - DNA, 15 bp, Homo sapiens
attggagcagccacc

SEQ ID NO: 646288 - DNA, 15 bp, Homo sapiens
ttggagcagccacca

SEQ ID NO: 646289 - DNA, 15 bp, Homo sapiens
tggagcagccaccat

SEQ ID NO: 646290 - DNA, 15 bp, Homo sapiens
ggagcagccaccatt

SEQ ID NO: 646291 - DNA, 15 bp, Homo sapiens
gagcagccaccattg

SEQ ID NO: 646292 - DNA, 15 bp, Homo sapiens
agcagccaccattgg

SEQ ID NO: 646293 - DNA, 15 bp, Homo sapiens
gcagccaccattggt

SEQ ID NO: 646294 - DNA, 15 bp, Homo sapiens
cagccaccattggtc

SEQ ID NO: 646295 - DNA, 15 bp, Homo sapiens
agccaccattggtct

SEQ ID NO: 646296 - DNA, 15 bp, Homo sapiens
gccaccattggtctg

SEQ ID NO: 646297 - DNA, 15 bp, Homo sapiens
ccaccattggtctgg

SEQ ID NO: 646298 - DNA, 15 bp, Homo sapiens
caccattggtctggt

SEQ ID NO: 646299 - DNA, 15 bp, Homo sapiens
accattggtctggta

SEQ ID NO: 646300 - DNA, 15 bp, Homo sapiens
ccattggtctggtaa

SEQ ID NO: 646301 - DNA, 15 bp, Homo sapiens
cattggtctggtaag

SEQ ID NO: 646302 - DNA, 15 bp, Homo sapiens
attggtctggtaaga

SEQ ID NO: 646303 - DNA, 15 bp, Homo sapiens
ttggtctggtaagaa

SEQ ID NO: 646304 - DNA, 15 bp, Homo sapiens
tggtctggtaagaat

SEQ ID NO: 646305 - DNA, 15 bp, Homo sapiens
ggtctggtaagaatg

SEQ ID NO: 646306 - DNA, 15 bp, Homo sapiens
gtctggtaagaatgt

SEQ ID NO: 646307 - DNA, 15 bp, Homo sapiens
tctggtaagaatgtc

SEQ ID NO: 646308 - DNA, 15 bp, Homo sapiens
ctggtaagaatgtct

SEQ ID NO: 646309 - DNA, 15 bp, Homo sapiens
tggtaagaatgtctt

SEQ ID NO: 646310 - DNA, 15 bp, Homo sapiens
ggtaagaatgtcttt

SEQ ID NO: 646311 - DNA, 15 bp, Homo sapiens
gtaagaatgtctttt

SEQ ID NO: 646312 - DNA, 15 bp, Homo sapiens
taagaatgtcttttt

SEQ ID NO: 646313 - DNA, 15 bp, Homo sapiens
aagaatgtctttttg

SEQ ID NO: 646314 - DNA, 15 bp, Homo sapiens
agaatgtctttttgc

SEQ ID NO: 646315 - DNA, 15 bp, Homo sapiens
gaatgtctttttgca

SEQ ID NO: 646316 - DNA, 15 bp, Homo sapiens
aatgtctttttgcat

SEQ ID NO: 646317 - DNA, 15 bp, Homo sapiens
atgtctttttgcatc

SEQ ID NO: 646318 - DNA, 15 bp, Homo sapiens
tgtctttttgcatct

SEQ ID NO: 646319 - DNA, 15 bp, Homo sapiens
gtctttttgcatctc

SEQ ID NO: 646320 - DNA, 15 bp, Homo sapiens
tctttttgcatctct

SEQ ID NO: 646321 - DNA, 15 bp, Homo sapiens
ctttttgcatctctc

SEQ ID NO: 646322 - DNA, 15 bp, Homo sapiens
tttttgcatctctcc

SEQ ID NO: 646323 - DNA, 15 bp, Homo sapiens
ttttgcatctctcca

SEQ ID NO: 646324 - DNA, 15 bp, Homo sapiens
tttgcatctctccat

SEQ ID NO: 646325 - DNA, 15 bp, Homo sapiens
ttgcatctctccatg

SEQ ID NO: 646326 - DNA, 15 bp, Homo sapiens
tgcatctctccatgg

SEQ ID NO: 646327 - DNA, 15 bp, Homo sapiens
gcatctctccatggg

SEQ ID NO: 646328 - DNA, 15 bp, Homo sapiens
catctctccatggga

SEQ ID NO: 646329 - DNA, 15 bp, Homo sapiens
atctctccatgggaa

SEQ ID NO: 646330 - DNA, 15 bp, Homo sapiens
tctctccatgggaag

SEQ ID NO: 646331 - DNA, 15 bp, Homo sapiens
ctctccatgggaaga

SEQ ID NO: 646332 - DNA, 15 bp, Homo sapiens
tctccatgggaagac

SEQ ID NO: 646333 - DNA, 15 bp, Homo sapiens
ctccatgggaagaca

SEQ ID NO: 646334 - DNA, 15 bp, Homo sapiens
tccatgggaagacat

SEQ ID NO: 646335 - DNA, 15 bp, Homo sapiens
ccatgggaagacatt

SEQ ID NO: 646336 - DNA, 15 bp, Homo sapiens
catgggaagacattt

SEQ ID NO: 646337 - DNA, 15 bp, Homo sapiens
atgggaagacatttg

SEQ ID NO: 646338 - DNA, 15 bp, Homo sapiens
tgggaagacatttgc

SEQ ID NO: 646339 - DNA, 15 bp, Homo sapiens
gggaagacatttgcc

SEQ ID NO: 646340 - DNA, 15 bp, Homo sapiens
ggaagacatttgcct

SEQ ID NO: 646341 - DNA, 15 bp, Homo sapiens
gaagacatttgcctt

SEQ ID NO: 646342 - DNA, 15 bp, Homo sapiens
aagacatttgccttc

SEQ ID NO: 646343 - DNA, 15 bp, Homo sapiens
agacatttgccttca

SEQ ID NO: 646344 - DNA, 15 bp, Homo sapiens
gacatttgccttcat

SEQ ID NO: 646345 - DNA, 15 bp, Homo sapiens
acatttgccttcata

SEQ ID NO: 646346 - DNA, 15 bp, Homo sapiens
catttgccttcataa

SEQ ID NO: 646347 - DNA, 15 bp, Homo sapiens
atttgccttcataaa

SEQ ID NO: 646348 - DNA, 15 bp, Homo sapiens
tttgccttcataaac

SEQ ID NO: 646349 - DNA, 15 bp, Homo sapiens
ttgccttcataaaca

SEQ ID NO: 646350 - DNA, 15 bp, Homo sapiens
tgccttcataaacag

SEQ ID NO: 646351 - DNA, 15 bp, Homo sapiens
gccttcataaacagc

SEQ ID NO: 646352 - DNA, 15 bp, Homo sapiens
ccttcataaacagcc

SEQ ID NO: 646353 - DNA, 15 bp, Homo sapiens
cttcataaacagcca

SEQ ID NO: 646354 - DNA, 15 bp, Homo sapiens
ttcataaacagccaa

SEQ ID NO: 646355 - DNA, 15 bp, Homo sapiens
tcataaacagccaaa

SEQ ID NO: 646356 - DNA, 15 bp, Homo sapiens
cataaacagccaaaa

SEQ ID NO: 646357 - DNA, 15 bp, Homo sapiens
ataaacagccaaaaa

SEQ ID NO: 646358 - DNA, 15 bp, Homo sapiens
taaacagccaaaaat

SEQ ID NO: 646359 - DNA, 15 bp, Homo sapiens
aaacagccaaaaatg

SEQ ID NO: 646360 - DNA, 15 bp, Homo sapiens
aacagccaaaaatgt

SEQ ID NO: 646361 - DNA, 15 bp, Homo sapiens
acagccaaaaatgtg

SEQ ID NO: 646362 - DNA, 15 bp, Homo sapiens
cagccaaaaatgtga

SEQ ID NO: 646363 - DNA, 15 bp, Homo sapiens
agccaaaaatgtgaa

SEQ ID NO: 646364 - DNA, 15 bp, Homo sapiens
gccaaaaatgtgaag

SEQ ID NO: 646365 - DNA, 15 bp, Homo sapiens
ccaaaaatgtgaagc

SEQ ID NO: 646366 - DNA, 15 bp, Homo sapiens
caaaaatgtgaagct

SEQ ID NO: 646367 - DNA, 15 bp, Homo sapiens
aaaaatgtgaagctt

SEQ ID NO: 646368 - DNA, 15 bp, Homo sapiens
aaaatgtgaagcttg

SEQ ID NO: 646369 - DNA, 15 bp, Homo sapiens
aaatgtgaagcttga

SEQ ID NO: 646370 - DNA, 15 bp, Homo sapiens
aatgtgaagcttgag

SEQ ID NO: 646371 - DNA, 15 bp, Homo sapiens
atgtgaagcttgagt

SEQ ID NO: 646372 - DNA, 15 bp, Homo sapiens
tgtgaagcttgagtc

SEQ ID NO: 646373 - DNA, 15 bp, Homo sapiens
gtgaagcttgagtcc

SEQ ID NO: 646374 - DNA, 15 bp, Homo sapiens
tgaagcttgagtccc

SEQ ID NO: 646375 - DNA, 15 bp, Homo sapiens
gaagcttgagtccct

SEQ ID NO: 646376 - DNA, 15 bp, Homo sapiens
aagcttgagtccctt

SEQ ID NO: 646377 - DNA, 15 bp, Homo sapiens
agcttgagtcccttt

SEQ ID NO: 646378 - DNA, 15 bp, Homo sapiens
gcttgagtccctttt

SEQ ID NO: 646379 - DNA, 15 bp, Homo sapiens
cttgagtcccttttc

SEQ ID NO: 646380 - DNA, 15 bp, Homo sapiens
ttgagtcccttttcc

SEQ ID NO: 646381 - DNA, 15 bp, Homo sapiens
tgagtcccttttcct

SEQ ID NO: 646382 - DNA, 15 bp, Homo sapiens
gagtcccttttcctg

SEQ ID NO: 646383 - DNA, 15 bp, Homo sapiens
agtcccttttcctga

SEQ ID NO: 646384 - DNA, 15 bp, Homo sapiens
gtcccttttcctgag

SEQ ID NO: 646385 - DNA, 15 bp, Homo sapiens
tcccttttcctgagt

SEQ ID NO: 646386 - DNA, 15 bp, Homo sapiens
cccttttcctgagta

SEQ ID NO: 646387 - DNA, 15 bp, Homo sapiens
ccttttcctgagtac

SEQ ID NO: 646388 - DNA, 15 bp, Homo sapiens
cttttcctgagtaca

SEQ ID NO: 646389 - DNA, 15 bp, Homo sapiens
ttttcctgagtacag

SEQ ID NO: 646390 - DNA, 15 bp, Homo sapiens
tttcctgagtacagt

SEQ ID NO: 646391 - DNA, 15 bp, Homo sapiens
ttcctgagtacagtt

SEQ ID NO: 646392 - DNA, 15 bp, Homo sapiens
tcctgagtacagtta

SEQ ID NO: 646393 - DNA, 15 bp, Homo sapiens
cctgagtacagttag

SEQ ID NO: 646394 - DNA, 15 bp, Homo sapiens
ctgagtacagttagc

SEQ ID NO: 646395 - DNA, 15 bp, Homo sapiens
tgagtacagttagca

SEQ ID NO: 646396 - DNA, 15 bp, Homo sapiens
gagtacagttagcaa

SEQ ID NO: 646397 - DNA, 15 bp, Homo sapiens
agtacagttagcaac

SEQ ID NO: 646398 - DNA, 15 bp, Homo sapiens
gtacagttagcaaca

SEQ ID NO: 646399 - DNA, 15 bp, Homo sapiens
tacagttagcaacat

SEQ ID NO: 646400 - DNA, 15 bp, Homo sapiens
acagttagcaacata

SEQ ID NO: 646401 - DNA, 15 bp, Homo sapiens
cagttagcaacataa

SEQ ID NO: 646402 - DNA, 15 bp, Homo sapiens
agttagcaacataat

SEQ ID NO: 646403 - DNA, 15 bp, Homo sapiens
gttagcaacataatt

SEQ ID NO: 646404 - DNA, 15 bp, Homo sapiens
ttagcaacataatta

SEQ ID NO: 646405 - DNA, 15 bp, Homo sapiens
tagcaacataattat

SEQ ID NO: 646406 - DNA, 15 bp, Homo sapiens
agcaacataattatc

SEQ ID NO: 646407 - DNA, 15 bp, Homo sapiens
gcaacataattatca

SEQ ID NO: 646408 - DNA, 15 bp, Homo sapiens
caacataattatcac

SEQ ID NO: 646409 - DNA, 15 bp, Homo sapiens
aacataattatcact

SEQ ID NO: 646410 - DNA, 15 bp, Homo sapiens
acataattatcacta

SEQ ID NO: 646411 - DNA, 15 bp, Homo sapiens
cataattatcactat

SEQ ID NO: 646412 - DNA, 15 bp, Homo sapiens
ataattatcactatc

SEQ ID NO: 646413 - DNA, 15 bp, Homo sapiens
taattatcactatct

SEQ ID NO: 646414 - DNA, 15 bp, Homo sapiens
aattatcactatctt

SEQ ID NO: 646415 - DNA, 15 bp, Homo sapiens
attatcactatcttc

SEQ ID NO: 646416 - DNA, 15 bp, Homo sapiens
ttatcactatcttca

SEQ ID NO: 646417 - DNA, 15 bp, Homo sapiens
tatcactatcttcat

SEQ ID NO: 646418 - DNA, 15 bp, Homo sapiens
atcactatcttcatg

SEQ ID NO: 646419 - DNA, 15 bp, Homo sapiens
tcactatcttcatgt

SEQ ID NO: 646420 - DNA, 15 bp, Homo sapiens
cactatcttcatgta

SEQ ID NO: 646421 - DNA, 15 bp, Homo sapiens
actatcttcatgtag

SEQ ID NO: 646422 - DNA, 15 bp, Homo sapiens
ctatcttcatgtagt

SEQ ID NO: 646423 - DNA, 15 bp, Homo sapiens
tatcttcatgtagtt

SEQ ID NO: 646424 - DNA, 15 bp, Homo sapiens
atcttcatgtagttt

SEQ ID NO: 646425 - DNA, 15 bp, Homo sapiens
tcttcatgtagtttg

SEQ ID NO: 646426 - DNA, 15 bp, Homo sapiens
cttcatgtagtttgt

SEQ ID NO: 646427 - DNA, 15 bp, Homo sapiens
ttcatgtagtttgtt

SEQ ID NO: 646428 - DNA, 15 bp, Homo sapiens
tcatgtagtttgtta

SEQ ID NO: 646429 - DNA, 15 bp, Homo sapiens
catgtagtttgttag

SEQ ID NO: 646430 - DNA, 15 bp, Homo sapiens
atgtagtttgttaga

SEQ ID NO: 646431 - DNA, 15 bp, Homo sapiens
tgtagtttgttagat

SEQ ID NO: 646432 - DNA, 15 bp, Homo sapiens
gtagtttgttagatt

SEQ ID NO: 646433 - DNA, 15 bp, Homo sapiens
tagtttgttagatta

SEQ ID NO: 646434 - DNA, 15 bp, Homo sapiens
agtttgttagattac

SEQ ID NO: 646435 - DNA, 15 bp, Homo sapiens
gtttgttagattact

SEQ ID NO: 646436 - DNA, 15 bp, Homo sapiens
tttgttagattactc

SEQ ID NO: 646437 - DNA, 15 bp, Homo sapiens
ttgttagattactcc

SEQ ID NO: 646438 - DNA, 15 bp, Homo sapiens
tgttagattactccc

SEQ ID NO: 646439 - DNA, 15 bp, Homo sapiens
gttagattactcccc

SEQ ID NO: 646440 - DNA, 15 bp, Homo sapiens
ttagattactcccca

SEQ ID NO: 646441 - DNA, 15 bp, Homo sapiens
tagattactccccag

SEQ ID NO: 646442 - DNA, 15 bp, Homo sapiens
agattactccccagt

SEQ ID NO: 646443 - DNA, 15 bp, Homo sapiens
gattactccccagtg

SEQ ID NO: 646444 - DNA, 15 bp, Homo sapiens
attactccccagtgt

SEQ ID NO: 646445 - DNA, 15 bp, Homo sapiens
ttactccccagtgtc

SEQ ID NO: 646446 - DNA, 15 bp, Homo sapiens
tactccccagtgtca

SEQ ID NO: 646447 - DNA, 15 bp, Homo sapiens
actccccagtgtcaa

SEQ ID NO: 646448 - DNA, 15 bp, Homo sapiens
ctccccagtgtcaaa

SEQ ID NO: 646449 - DNA, 15 bp, Homo sapiens
tccccagtgtcaaat

SEQ ID NO: 646450 - DNA, 15 bp, Homo sapiens
ccccagtgtcaaatg

SEQ ID NO: 646451 - DNA, 15 bp, Homo sapiens
cccagtgtcaaatga

SEQ ID NO: 646452 - DNA, 15 bp, Homo sapiens
ccagtgtcaaatgac

SEQ ID NO: 646453 - DNA, 15 bp, Homo sapiens
cagtgtcaaatgaca

SEQ ID NO: 646454 - DNA, 15 bp, Homo sapiens
agtgtcaaatgacat

SEQ ID NO: 646455 - DNA, 15 bp, Homo sapiens
gtgtcaaatgacatt

SEQ ID NO: 646456 - DNA, 15 bp, Homo sapiens
tgtcaaatgacattt

SEQ ID NO: 646457 - DNA, 15 bp, Homo sapiens
gtcaaatgacatttc

SEQ ID NO: 646458 - DNA, 15 bp, Homo sapiens
tcaaatgacatttca

SEQ ID NO: 646459 - DNA, 15 bp, Homo sapiens
caaatgacatttcat

SEQ ID NO: 646460 - DNA, 15 bp, Homo sapiens
aaatgacatttcatc

SEQ ID NO: 646461 - DNA, 15 bp, Homo sapiens
aatgacatttcatcg

SEQ ID NO: 646462 - DNA, 15 bp, Homo sapiens
atgacatttcatcga

SEQ ID NO: 646463 - DNA, 15 bp, Homo sapiens
tgacatttcatcgaa

SEQ ID NO: 646464 - DNA, 15 bp, Homo sapiens
gacatttcatcgaat

SEQ ID NO: 646465 - DNA, 15 bp, Homo sapiens
acatttcatcgaata

SEQ ID NO: 646466 - DNA, 15 bp, Homo sapiens
catttcatcgaatag

SEQ ID NO: 646467 - DNA, 15 bp, Homo sapiens
atttcatcgaatagg

SEQ ID NO: 646468 - DNA, 15 bp, Homo sapiens
tttcatcgaataggg

SEQ ID NO: 646469 - DNA, 15 bp, Homo sapiens
ttcatcgaataggga

SEQ ID NO: 646470 - DNA, 15 bp, Homo sapiens
tcatcgaatagggat

SEQ ID NO: 646471 - DNA, 15 bp, Homo sapiens
catcgaatagggatt

SEQ ID NO: 646472 - DNA, 15 bp, Homo sapiens
atcgaatagggatta

SEQ ID NO: 646473 - DNA, 15 bp, Homo sapiens
tcgaatagggattaa

SEQ ID NO: 646474 - DNA, 15 bp, Homo sapiens
cgaatagggattaat

SEQ ID NO: 646475 - DNA, 15 bp, Homo sapiens
gaatagggattaatg

SEQ ID NO: 646476 - DNA, 15 bp, Homo sapiens
aatagggattaatga

SEQ ID NO: 646477 - DNA, 15 bp, Homo sapiens
atagggattaatgat

SEQ ID NO: 646478 - DNA, 15 bp, Homo sapiens
tagggattaatgatg

SEQ ID NO: 646479 - DNA, 15 bp, Homo sapiens
agggattaatgatgt

SEQ ID NO: 646480 - DNA, 15 bp, Homo sapiens
gggattaatgatgtt

SEQ ID NO: 646481 - DNA, 15 bp, Homo sapiens
ggattaatgatgttt

SEQ ID NO: 646482 - DNA, 15 bp, Homo sapiens
gattaatgatgtttt

SEQ ID NO: 646483 - DNA, 15 bp, Homo sapiens
attaatgatgtttta

SEQ ID NO: 646484 - DNA, 15 bp, Homo sapiens
ttaatgatgttttaa

SEQ ID NO: 646485 - DNA, 15 bp, Homo sapiens
taatgatgttttaat

SEQ ID NO: 646486 - DNA, 15 bp, Homo sapiens
aatgatgttttaata

SEQ ID NO: 646487 - DNA, 15 bp, Homo sapiens
atgatgttttaatag

SEQ ID NO: 646488 - DNA, 15 bp, Homo sapiens
tgatgttttaatagg

SEQ ID NO: 646489 - DNA, 15 bp, Homo sapiens
gatgttttaataggt

SEQ ID NO: 646490 - DNA, 15 bp, Homo sapiens
atgttttaataggta

SEQ ID NO: 646491 - DNA, 15 bp, Homo sapiens
tgttttaataggtaa

SEQ ID NO: 646492 - DNA, 15 bp, Homo sapiens
gttttaataggtaaa

SEQ ID NO: 646493 - DNA, 15 bp, Homo sapiens
ttttaataggtaaat

SEQ ID NO: 646494 - DNA, 15 bp, Homo sapiens
tttaataggtaaata

SEQ ID NO: 646495 - DNA, 15 bp, Homo sapiens
ttaataggtaaatat

SEQ ID NO: 646496 - DNA, 15 bp, Homo sapiens
taataggtaaatatt

SEQ ID NO: 646497 - DNA, 15 bp, Homo sapiens
aataggtaaatattg

SEQ ID NO: 646498 - DNA, 15 bp, Homo sapiens
ataggtaaatattgt

SEQ ID NO: 646499 - DNA, 15 bp, Homo sapiens
taggtaaatattgtt

SEQ ID NO: 646500 - DNA, 15 bp, Homo sapiens
aggtaaatattgttt

SEQ ID NO: 646501 - DNA, 15 bp, Homo sapiens
ggtaaatattgtttt

SEQ ID NO: 646502 - DNA, 15 bp, Homo sapiens
gtaaatattgtttta

SEQ ID NO: 646503 - DNA, 15 bp, Homo sapiens
taaatattgttttat

SEQ ID NO: 646504 - DNA, 15 bp, Homo sapiens
aaatattgttttatt

SEQ ID NO: 646505 - DNA, 15 bp, Homo sapiens
aatattgttttatta

SEQ ID NO: 646506 - DNA, 15 bp, Homo sapiens
atattgttttattaa

SEQ ID NO: 646507 - DNA, 15 bp, Homo sapiens
tattgttttattaac

SEQ ID NO: 646508 - DNA, 15 bp, Homo sapiens
attgttttattaaca

SEQ ID NO: 646509 - DNA, 15 bp, Homo sapiens
ttgttttattaacag

SEQ ID NO: 646510 - DNA, 15 bp, Homo sapiens
tgttttattaacagc

SEQ ID NO: 646511 - DNA, 15 bp, Homo sapiens
gttttattaacagca

SEQ ID NO: 646512 - DNA, 15 bp, Homo sapiens
ttttattaacagcaa

SEQ ID NO: 646513 - DNA, 15 bp, Homo sapiens
tttattaacagcaat

SEQ ID NO: 646514 - DNA, 15 bp, Homo sapiens
ttattaacagcaatt

SEQ ID NO: 646515 - DNA, 15 bp, Homo sapiens
tattaacagcaatta

SEQ ID NO: 646516 - DNA, 15 bp, Homo sapiens
attaacagcaattac

SEQ ID NO: 646517 - DNA, 15 bp, Homo sapiens
ttaacagcaattaca

SEQ ID NO: 646518 - DNA, 15 bp, Homo sapiens
taacagcaattacat

SEQ ID NO: 646519 - DNA, 15 bp, Homo sapiens
aacagcaattacatt

SEQ ID NO: 646520 - DNA, 15 bp, Homo sapiens
acagcaattacattt

SEQ ID NO: 646521 - DNA, 15 bp, Homo sapiens
cagcaattacattta

SEQ ID NO: 646522 - DNA, 15 bp, Homo sapiens
agcaattacatttat

SEQ ID NO: 646523 - DNA, 15 bp, Homo sapiens
gcaattacatttatt

SEQ ID NO: 646524 - DNA, 15 bp, Homo sapiens
caattacatttattg

SEQ ID NO: 646525 - DNA, 15 bp, Homo sapiens
aattacatttattga

SEQ ID NO: 646526 - DNA, 15 bp, Homo sapiens
attacatttattgag

SEQ ID NO: 646527 - DNA, 15 bp, Homo sapiens
ttacatttattgagc

SEQ ID NO: 646528 - DNA, 15 bp, Homo sapiens
tacatttattgagca

SEQ ID NO: 646529 - DNA, 15 bp, Homo sapiens
acatttattgagcat

SEQ ID NO: 646530 - DNA, 15 bp, Homo sapiens
catttattgagcatt

SEQ ID NO: 646531 - DNA, 15 bp, Homo sapiens
atttattgagcattc

SEQ ID NO: 646532 - DNA, 15 bp, Homo sapiens
tttattgagcattca

SEQ ID NO: 646533 - DNA, 15 bp, Homo sapiens
ttattgagcattcac

SEQ ID NO: 646534 - DNA, 15 bp, Homo sapiens
tattgagcattcact

SEQ ID NO: 646535 - DNA, 15 bp, Homo sapiens
attgagcattcactg

SEQ ID NO: 646536 - DNA, 15 bp, Homo sapiens
ttgagcattcactgt

SEQ ID NO: 646537 - DNA, 15 bp, Homo sapiens
tgagcattcactgtt

SEQ ID NO: 646538 - DNA, 15 bp, Homo sapiens
gagcattcactgttt

SEQ ID NO: 646539 - DNA, 15 bp, Homo sapiens
agcattcactgtttc

SEQ ID NO: 646540 - DNA, 15 bp, Homo sapiens
gcattcactgtttct

SEQ ID NO: 646541 - DNA, 15 bp, Homo sapiens
cattcactgtttctc

SEQ ID NO: 646542 - DNA, 15 bp, Homo sapiens
attcactgtttctct

SEQ ID NO: 646543 - DNA, 15 bp, Homo sapiens
ttcactgtttctcta

SEQ ID NO: 646544 - DNA, 15 bp, Homo sapiens
tcactgtttctctag

SEQ ID NO: 646545 - DNA, 15 bp, Homo sapiens
cactgtttctctagg

SEQ ID NO: 646546 - DNA, 15 bp, Homo sapiens
actgtttctctaggc

SEQ ID NO: 646547 - DNA, 15 bp, Homo sapiens
ctgtttctctaggca

SEQ ID NO: 646548 - DNA, 15 bp, Homo sapiens
tgtttctctaggcac

SEQ ID NO: 646549 - DNA, 15 bp, Homo sapiens
gtttctctaggcact

SEQ ID NO: 646550 - DNA, 15 bp, Homo sapiens
tttctctaggcacta

SEQ ID NO: 646551 - DNA, 15 bp, Homo sapiens
ttctctaggcactac

SEQ ID NO: 646552 - DNA, 15 bp, Homo sapiens
tctctaggcactact

SEQ ID NO: 646553 - DNA, 15 bp, Homo sapiens
ctctaggcactacta

SEQ ID NO: 646554 - DNA, 15 bp, Homo sapiens
tctaggcactactag

SEQ ID NO: 646555 - DNA, 15 bp, Homo sapiens
ctaggcactactagg

SEQ ID NO: 646556 - DNA, 15 bp, Homo sapiens
taggcactactagga

SEQ ID NO: 646557 - DNA, 15 bp, Homo sapiens
aggcactactaggag

SEQ ID NO: 646558 - DNA, 15 bp, Homo sapiens
ggcactactaggagc

SEQ ID NO: 646559 - DNA, 15 bp, Homo sapiens
gcactactaggagct

SEQ ID NO: 646560 - DNA, 15 bp, Homo sapiens
cactactaggagctt

SEQ ID NO: 646561 - DNA, 15 bp, Homo sapiens
actactaggagctta

SEQ ID NO: 646562 - DNA, 15 bp, Homo sapiens
ctactaggagcttaa

SEQ ID NO: 646563 - DNA, 15 bp, Homo sapiens
tactaggagcttaat

SEQ ID NO: 646564 - DNA, 15 bp, Homo sapiens
actaggagcttaata

SEQ ID NO: 646565 - DNA, 15 bp, Homo sapiens
ctaggagcttaatag

SEQ ID NO: 646566 - DNA, 15 bp, Homo sapiens
taggagcttaatagt

SEQ ID NO: 646567 - DNA, 15 bp, Homo sapiens
aggagcttaatagtc

SEQ ID NO: 646568 - DNA, 15 bp, Homo sapiens
ggagcttaatagtca

SEQ ID NO: 646569 - DNA, 15 bp, Homo sapiens
gagcttaatagtcat

SEQ ID NO: 646570 - DNA, 15 bp, Homo sapiens
agcttaatagtcatt

SEQ ID NO: 646571 - DNA, 15 bp, Homo sapiens
gcttaatagtcatta

SEQ ID NO: 646572 - DNA, 15 bp, Homo sapiens
cttaatagtcattat

SEQ ID NO: 646573 - DNA, 15 bp, Homo sapiens
ttaatagtcattatc

SEQ ID NO: 646574 - DNA, 15 bp, Homo sapiens
taatagtcattatct

SEQ ID NO: 646575 - DNA, 15 bp, Homo sapiens
aatagtcattatctc

SEQ ID NO: 646576 - DNA, 15 bp, Homo sapiens
atagtcattatctct

SEQ ID NO: 646577 - DNA, 15 bp, Homo sapiens
tagtcattatctcta

SEQ ID NO: 646578 - DNA, 15 bp, Homo sapiens
agtcattatctctaa

SEQ ID NO: 646579 - DNA, 15 bp, Homo sapiens
gtcattatctctaat

SEQ ID NO: 646580 - DNA, 15 bp, Homo sapiens
tcattatctctaatc

SEQ ID NO: 646581 - DNA, 15 bp, Homo sapiens
cattatctctaatct

SEQ ID NO: 646582 - DNA, 15 bp, Homo sapiens
attatctctaatctt

SEQ ID NO: 646583 - DNA, 15 bp, Homo sapiens
ttatctctaatcttt

SEQ ID NO: 646584 - DNA, 15 bp, Homo sapiens
tatctctaatcttta

SEQ ID NO: 646585 - DNA, 15 bp, Homo sapiens
atctctaatctttac

SEQ ID NO: 646586 - DNA, 15 bp, Homo sapiens
tctctaatctttaca

SEQ ID NO: 646587 - DNA, 15 bp, Homo sapiens
ctctaatctttacaa

SEQ ID NO: 646588 - DNA, 15 bp, Homo sapiens
tctaatctttacaac

SEQ ID NO: 646589 - DNA, 15 bp, Homo sapiens
ctaatctttacaaca

SEQ ID NO: 646590 - DNA, 15 bp, Homo sapiens
taatctttacaacaa

SEQ ID NO: 646591 - DNA, 15 bp, Homo sapiens
aatctttacaacaat

SEQ ID NO: 646592 - DNA, 15 bp, Homo sapiens
atctttacaacaatc

SEQ ID NO: 646593 - DNA, 15 bp, Homo sapiens
tctttacaacaatct

SEQ ID NO: 646594 - DNA, 15 bp, Homo sapiens
ctttacaacaatctt

SEQ ID NO: 646595 - DNA, 15 bp, Homo sapiens
tttacaacaatctta

SEQ ID NO: 646596 - DNA, 15 bp, Homo sapiens
ttacaacaatcttat

SEQ ID NO: 646597 - DNA, 15 bp, Homo sapiens
tacaacaatcttata

SEQ ID NO: 646598 - DNA, 15 bp, Homo sapiens
acaacaatcttataa

SEQ ID NO: 646599 - DNA, 15 bp, Homo sapiens
caacaatcttataaa

SEQ ID NO: 646600 - DNA, 15 bp, Homo sapiens
aacaatcttataaag

SEQ ID NO: 646601 - DNA, 15 bp, Homo sapiens
acaatcttataaagt

SEQ ID NO: 646602 - DNA, 15 bp, Homo sapiens
caatcttataaagtg

SEQ ID NO: 646603 - DNA, 15 bp, Homo sapiens
aatcttataaagtga

SEQ ID NO: 646604 - DNA, 15 bp, Homo sapiens
atcttataaagtgag

SEQ ID NO: 646605 - DNA, 15 bp, Homo sapiens
tcttataaagtgagc

SEQ ID NO: 646606 - DNA, 15 bp, Homo sapiens
cttataaagtgagca

SEQ ID NO: 646607 - DNA, 15 bp, Homo sapiens
ttataaagtgagcac

SEQ ID NO: 646608 - DNA, 15 bp, Homo sapiens
tataaagtgagcact

SEQ ID NO: 646609 - DNA, 15 bp, Homo sapiens
ataaagtgagcacta

SEQ ID NO: 646610 - DNA, 15 bp, Homo sapiens
taaagtgagcactaa

SEQ ID NO: 646611 - DNA, 15 bp, Homo sapiens
aaagtgagcactaac

SEQ ID NO: 646612 - DNA, 15 bp, Homo sapiens
aagtgagcactaaca

SEQ ID NO: 646613 - DNA, 15 bp, Homo sapiens
agtgagcactaacat

SEQ ID NO: 646614 - DNA, 15 bp, Homo sapiens
gtgagcactaacatc

SEQ ID NO: 646615 - DNA, 15 bp, Homo sapiens
tgagcactaacatca

SEQ ID NO: 646616 - DNA, 15 bp, Homo sapiens
gagcactaacatcat

SEQ ID NO: 646617 - DNA, 15 bp, Homo sapiens
agcactaacatcatt

SEQ ID NO: 646618 - DNA, 15 bp, Homo sapiens
gcactaacatcattt

SEQ ID NO: 646619 - DNA, 15 bp, Homo sapiens
cactaacatcatttt

SEQ ID NO: 646620 - DNA, 15 bp, Homo sapiens
actaacatcatttta

SEQ ID NO: 646621 - DNA, 15 bp, Homo sapiens
ctaacatcattttaa

SEQ ID NO: 646622 - DNA, 15 bp, Homo sapiens
taacatcattttaaa

SEQ ID NO: 646623 - DNA, 15 bp, Homo sapiens
aacatcattttaaat

SEQ ID NO: 646624 - DNA, 15 bp, Homo sapiens
acatcattttaaata

SEQ ID NO: 646625 - DNA, 15 bp, Homo sapiens
catcattttaaatat

SEQ ID NO: 646626 - DNA, 15 bp, Homo sapiens
atcattttaaatata

SEQ ID NO: 646627 - DNA, 15 bp, Homo sapiens
tcattttaaatataa

SEQ ID NO: 646628 - DNA, 15 bp, Homo sapiens
cattttaaatataag

SEQ ID NO: 646629 - DNA, 15 bp, Homo sapiens
attttaaatataaga

SEQ ID NO: 646630 - DNA, 15 bp, Homo sapiens
ttttaaatataagaa

SEQ ID NO: 646631 - DNA, 15 bp, Homo sapiens
tttaaatataagaaa

SEQ ID NO: 646632 - DNA, 15 bp, Homo sapiens
ttaaatataagaaac

SEQ ID NO: 646633 - DNA, 15 bp, Homo sapiens
taaatataagaaact

SEQ ID NO: 646634 - DNA, 15 bp, Homo sapiens
aaatataagaaacta

SEQ ID NO: 646635 - DNA, 15 bp, Homo sapiens
aatataagaaactag

SEQ ID NO: 646636 - DNA, 15 bp, Homo sapiens
atataagaaactagg

SEQ ID NO: 646637 - DNA, 15 bp, Homo sapiens
tataagaaactaggc

SEQ ID NO: 646638 - DNA, 15 bp, Homo sapiens
ataagaaactaggct

SEQ ID NO: 646639 - DNA, 15 bp, Homo sapiens
taagaaactaggctc

SEQ ID NO: 646640 - DNA, 15 bp, Homo sapiens
aagaaactaggctca

SEQ ID NO: 646641 - DNA, 15 bp, Homo sapiens
agaaactaggctcag

SEQ ID NO: 646642 - DNA, 15 bp, Homo sapiens
gaaactaggctcaga

SEQ ID NO: 646643 - DNA, 15 bp, Homo sapiens
aaactaggctcagaa

SEQ ID NO: 646644 - DNA, 15 bp, Homo sapiens
aactaggctcagaaa

SEQ ID NO: 646645 - DNA, 15 bp, Homo sapiens
actaggctcagaaag

SEQ ID NO: 646646 - DNA, 15 bp, Homo sapiens
ctaggctcagaaagg

SEQ ID NO: 646647 - DNA, 15 bp, Homo sapiens
taggctcagaaaggt

SEQ ID NO: 646648 - DNA, 15 bp, Homo sapiens
aggctcagaaaggta

SEQ ID NO: 646649 - DNA, 15 bp, Homo sapiens
ggctcagaaaggtaa

SEQ ID NO: 646650 - DNA, 15 bp, Homo sapiens
gctcagaaaggtaag

SEQ ID NO: 646651 - DNA, 15 bp, Homo sapiens
ctcagaaaggtaagg

SEQ ID NO: 646652 - DNA, 15 bp, Homo sapiens
tcagaaaggtaaggg

SEQ ID NO: 646653 - DNA, 15 bp, Homo sapiens
cagaaaggtaagggg

SEQ ID NO: 646654 - DNA, 15 bp, Homo sapiens
agaaaggtaagggga

SEQ ID NO: 646655 - DNA, 15 bp, Homo sapiens
gaaaggtaaggggat

SEQ ID NO: 646656 - DNA, 15 bp, Homo sapiens
aaaggtaaggggatt

SEQ ID NO: 646657 - DNA, 15 bp, Homo sapiens
aaggtaaggggattt

SEQ ID NO: 646658 - DNA, 15 bp, Homo sapiens
aggtaaggggatttg

SEQ ID NO: 646659 - DNA, 15 bp, Homo sapiens
ggtaaggggatttgt

SEQ ID NO: 646660 - DNA, 15 bp, Homo sapiens
gtaaggggatttgtc

SEQ ID NO: 646661 - DNA, 15 bp, Homo sapiens
taaggggatttgtct

SEQ ID NO: 646662 - DNA, 15 bp, Homo sapiens
aaggggatttgtctg

SEQ ID NO: 646663 - DNA, 15 bp, Homo sapiens
aggggatttgtctgg

SEQ ID NO: 646664 - DNA, 15 bp, Homo sapiens
ggggatttgtctggg

SEQ ID NO: 646665 - DNA, 15 bp, Homo sapiens
gggatttgtctggga

SEQ ID NO: 646666 - DNA, 15 bp, Homo sapiens
ggatttgtctgggac

SEQ ID NO: 646667 - DNA, 15 bp, Homo sapiens
gatttgtctgggact

SEQ ID NO: 646668 - DNA, 15 bp, Homo sapiens
atttgtctgggactg

SEQ ID NO: 646669 - DNA, 15 bp, Homo sapiens
tttgtctgggactgc

SEQ ID NO: 646670 - DNA, 15 bp, Homo sapiens
ttgtctgggactgca

SEQ ID NO: 646671 - DNA, 15 bp, Homo sapiens
tgtctgggactgcac

SEQ ID NO: 646672 - DNA, 15 bp, Homo sapiens
gtctgggactgcaca

SEQ ID NO: 646673 - DNA, 15 bp, Homo sapiens
tctgggactgcacag

SEQ ID NO: 646674 - DNA, 15 bp, Homo sapiens
ctgggactgcacagc

SEQ ID NO: 646675 - DNA, 15 bp, Homo sapiens
tgggactgcacagct

SEQ ID NO: 646676 - DNA, 15 bp, Homo sapiens
gggactgcacagctg

SEQ ID NO: 646677 - DNA, 15 bp, Homo sapiens
ggactgcacagctgg

SEQ ID NO: 646678 - DNA, 15 bp, Homo sapiens
gactgcacagctggc

SEQ ID NO: 646679 - DNA, 15 bp, Homo sapiens
actgcacagctggca

SEQ ID NO: 646680 - DNA, 15 bp, Homo sapiens
ctgcacagctggcag

SEQ ID NO: 646681 - DNA, 15 bp, Homo sapiens
tgcacagctggcaga

SEQ ID NO: 646682 - DNA, 15 bp, Homo sapiens
gcacagctggcagag

SEQ ID NO: 646683 - DNA, 15 bp, Homo sapiens
cacagctggcagagt

SEQ ID NO: 646684 - DNA, 15 bp, Homo sapiens
acagctggcagagta

SEQ ID NO: 646685 - DNA, 15 bp, Homo sapiens
cagctggcagagtag

SEQ ID NO: 646686 - DNA, 15 bp, Homo sapiens
agctggcagagtagg

SEQ ID NO: 646687 - DNA, 15 bp, Homo sapiens
gctggcagagtagga

SEQ ID NO: 646688 - DNA, 15 bp, Homo sapiens
ctggcagagtaggat

SEQ ID NO: 646689 - DNA, 15 bp, Homo sapiens
tggcagagtaggatt

SEQ ID NO: 646690 - DNA, 15 bp, Homo sapiens
ggcagagtaggattc

SEQ ID NO: 646691 - DNA, 15 bp, Homo sapiens
gcagagtaggattca

SEQ ID NO: 646692 - DNA, 15 bp, Homo sapiens
cagagtaggattcaa

SEQ ID NO: 646693 - DNA, 15 bp, Homo sapiens
agagtaggattcaag

SEQ ID NO: 646694 - DNA, 15 bp, Homo sapiens
gagtaggattcaagt

SEQ ID NO: 646695 - DNA, 15 bp, Homo sapiens
agtaggattcaagtc

SEQ ID NO: 646696 - DNA, 15 bp, Homo sapiens
gtaggattcaagtct

SEQ ID NO: 646697 - DNA, 15 bp, Homo sapiens
taggattcaagtcta

SEQ ID NO: 646698 - DNA, 15 bp, Homo sapiens
aggattcaagtctaa

SEQ ID NO: 646699 - DNA, 15 bp, Homo sapiens
ggattcaagtctaag

SEQ ID NO: 646700 - DNA, 15 bp, Homo sapiens
gattcaagtctaagg

SEQ ID NO: 646701 - DNA, 15 bp, Homo sapiens
attcaagtctaaggg

SEQ ID NO: 646702 - DNA, 15 bp, Homo sapiens
ttcaagtctaagggg

SEQ ID NO: 646703 - DNA, 15 bp, Homo sapiens
tcaagtctaaggggc

SEQ ID NO: 646704 - DNA, 15 bp, Homo sapiens
caagtctaaggggct

SEQ ID NO: 646705 - DNA, 15 bp, Homo sapiens
aagtctaaggggctc

SEQ ID NO: 646706 - DNA, 15 bp, Homo sapiens
agtctaaggggctct

SEQ ID NO: 646707 - DNA, 15 bp, Homo sapiens
gtctaaggggctctg

SEQ ID NO: 646708 - DNA, 15 bp, Homo sapiens
tctaaggggctctga

SEQ ID NO: 646709 - DNA, 15 bp, Homo sapiens
ctaaggggctctgac

SEQ ID NO: 646710 - DNA, 15 bp, Homo sapiens
taaggggctctgact

SEQ ID NO: 646711 - DNA, 15 bp, Homo sapiens
aaggggctctgactc

SEQ ID NO: 646712 - DNA, 15 bp, Homo sapiens
aggggctctgactcc

SEQ ID NO: 646713 - DNA, 15 bp, Homo sapiens
ggggctctgactcca

SEQ ID NO: 646714 - DNA, 15 bp, Homo sapiens
gggctctgactccaa

SEQ ID NO: 646715 - DNA, 15 bp, Homo sapiens
ggctctgactccaaa

SEQ ID NO: 646716 - DNA, 15 bp, Homo sapiens
gctctgactccaaac

SEQ ID NO: 646717 - DNA, 15 bp, Homo sapiens
ctctgactccaaacc

SEQ ID NO: 646718 - DNA, 15 bp, Homo sapiens
tctgactccaaaccc

SEQ ID NO: 646719 - DNA, 15 bp, Homo sapiens
ctgactccaaacccc

SEQ ID NO: 646720 - DNA, 15 bp, Homo sapiens
tgactccaaacccca

SEQ ID NO: 646721 - DNA, 15 bp, Homo sapiens
gactccaaaccccac

SEQ ID NO: 646722 - DNA, 15 bp, Homo sapiens
actccaaaccccact

SEQ ID NO: 646723 - DNA, 15 bp, Homo sapiens
ctccaaaccccactc

SEQ ID NO: 646724 - DNA, 15 bp, Homo sapiens
tccaaaccccactca

SEQ ID NO: 646725 - DNA, 15 bp, Homo sapiens
ccaaaccccactcac

SEQ ID NO: 646726 - DNA, 15 bp, Homo sapiens
caaaccccactcact

SEQ ID NO: 646727 - DNA, 15 bp, Homo sapiens
aaaccccactcactc

SEQ ID NO: 646728 - DNA, 15 bp, Homo sapiens
aaccccactcactct

SEQ ID NO: 646729 - DNA, 15 bp, Homo sapiens
accccactcactctc

SEQ ID NO: 646730 - DNA, 15 bp, Homo sapiens
ccccactcactctcc

SEQ ID NO: 646731 - DNA, 15 bp, Homo sapiens
cccactcactctcca

SEQ ID NO: 646732 - DNA, 15 bp, Homo sapiens
ccactcactctccaa

SEQ ID NO: 646733 - DNA, 15 bp, Homo sapiens
cactcactctccaat

SEQ ID NO: 646734 - DNA, 15 bp, Homo sapiens
actcactctccaata

SEQ ID NO: 646735 - DNA, 15 bp, Homo sapiens
ctcactctccaatat

SEQ ID NO: 646736 - DNA, 15 bp, Homo sapiens
tcactctccaatatg

SEQ ID NO: 646737 - DNA, 15 bp, Homo sapiens
cactctccaatatgc

SEQ ID NO: 646738 - DNA, 15 bp, Homo sapiens
actctccaatatgcc

SEQ ID NO: 646739 - DNA, 15 bp, Homo sapiens
ctctccaatatgcct

SEQ ID NO: 646740 - DNA, 15 bp, Homo sapiens
tctccaatatgccta

SEQ ID NO: 646741 - DNA, 15 bp, Homo sapiens
ctccaatatgcctat

SEQ ID NO: 646742 - DNA, 15 bp, Homo sapiens
tccaatatgcctatt

SEQ ID NO: 646743 - DNA, 15 bp, Homo sapiens
ccaatatgcctattg

SEQ ID NO: 646744 - DNA, 15 bp, Homo sapiens
caatatgcctattgt

SEQ ID NO: 646745 - DNA, 15 bp, Homo sapiens
aatatgcctattgtt

SEQ ID NO: 646746 - DNA, 15 bp, Homo sapiens
atatgcctattgttc

SEQ ID NO: 646747 - DNA, 15 bp, Homo sapiens
tatgcctattgttct

SEQ ID NO: 646748 - DNA, 15 bp, Homo sapiens
atgcctattgttctc

SEQ ID NO: 646749 - DNA, 15 bp, Homo sapiens
tgcctattgttctcc

SEQ ID NO: 646750 - DNA, 15 bp, Homo sapiens
gcctattgttctcca

SEQ ID NO: 646751 - DNA, 15 bp, Homo sapiens
cctattgttctccat

SEQ ID NO: 646752 - DNA, 15 bp, Homo sapiens
ctattgttctccatg

SEQ ID NO: 646753 - DNA, 15 bp, Homo sapiens
tattgttctccatgt

SEQ ID NO: 646754 - DNA, 15 bp, Homo sapiens
attgttctccatgtc

SEQ ID NO: 646755 - DNA, 15 bp, Homo sapiens
ttgttctccatgtcc

SEQ ID NO: 646756 - DNA, 15 bp, Homo sapiens
tgttctccatgtcct

SEQ ID NO: 646757 - DNA, 15 bp, Homo sapiens
gttctccatgtcctc

SEQ ID NO: 646758 - DNA, 15 bp, Homo sapiens
ttctccatgtcctcc

SEQ ID NO: 646759 - DNA, 15 bp, Homo sapiens
tctccatgtcctccc

SEQ ID NO: 646760 - DNA, 15 bp, Homo sapiens
ctccatgtcctccca

SEQ ID NO: 646761 - DNA, 15 bp, Homo sapiens
tccatgtcctcccaa

SEQ ID NO: 646762 - DNA, 15 bp, Homo sapiens
ccatgtcctcccaag

SEQ ID NO: 646763 - DNA, 15 bp, Homo sapiens
catgtcctcccaagc

SEQ ID NO: 646764 - DNA, 15 bp, Homo sapiens
atgtcctcccaagct

SEQ ID NO: 646765 - DNA, 15 bp, Homo sapiens
tgtcctcccaagctt

SEQ ID NO: 646766 - DNA, 15 bp, Homo sapiens
gtcctcccaagcttg

SEQ ID NO: 646767 - DNA, 15 bp, Homo sapiens
tcctcccaagcttgg

SEQ ID NO: 646768 - DNA, 15 bp, Homo sapiens
cctcccaagcttggg

SEQ ID NO: 646769 - DNA, 15 bp, Homo sapiens
ctcccaagcttgggc

SEQ ID NO: 646770 - DNA, 15 bp, Homo sapiens
tcccaagcttgggca

SEQ ID NO: 646771 - DNA, 15 bp, Homo sapiens
cccaagcttgggcac

SEQ ID NO: 646772 - DNA, 15 bp, Homo sapiens
ccaagcttgggcact

SEQ ID NO: 646773 - DNA, 15 bp, Homo sapiens
caagcttgggcactt

SEQ ID NO: 646774 - DNA, 15 bp, Homo sapiens
aagcttgggcacttc

SEQ ID NO: 646775 - DNA, 15 bp, Homo sapiens
agcttgggcacttcc

SEQ ID NO: 646776 - DNA, 15 bp, Homo sapiens
gcttgggcacttccc

SEQ ID NO: 646777 - DNA, 15 bp, Homo sapiens
cttgggcacttccct

SEQ ID NO: 646778 - DNA, 15 bp, Homo sapiens
ttgggcacttccctg

SEQ ID NO: 646779 - DNA, 15 bp, Homo sapiens
tgggcacttccctga

SEQ ID NO: 646780 - DNA, 15 bp, Homo sapiens
gggcacttccctgaa

SEQ ID NO: 646781 - DNA, 15 bp, Homo sapiens
ggcacttccctgaaa

SEQ ID NO: 646782 - DNA, 15 bp, Homo sapiens
gcacttccctgaaaa

SEQ ID NO: 646783 - DNA, 15 bp, Homo sapiens
cacttccctgaaaag

SEQ ID NO: 646784 - DNA, 15 bp, Homo sapiens
acttccctgaaaagg

SEQ ID NO: 646785 - DNA, 15 bp, Homo sapiens
cttccctgaaaaggc

SEQ ID NO: 646786 - DNA, 15 bp, Homo sapiens
ttccctgaaaaggca

SEQ ID NO: 646787 - DNA, 15 bp, Homo sapiens
tccctgaaaaggcac

SEQ ID NO: 646788 - DNA, 15 bp, Homo sapiens
ccctgaaaaggcaca

SEQ ID NO: 646789 - DNA, 15 bp, Homo sapiens
cctgaaaaggcacaa

SEQ ID NO: 646790 - DNA, 15 bp, Homo sapiens
ctgaaaaggcacaac

SEQ ID NO: 646791 - DNA, 15 bp, Homo sapiens
tgaaaaggcacaaca

SEQ ID NO: 646792 - DNA, 15 bp, Homo sapiens
gaaaaggcacaacag

SEQ ID NO: 646793 - DNA, 15 bp, Homo sapiens
aaaaggcacaacaga

SEQ ID NO: 646794 - DNA, 15 bp, Homo sapiens
aaaggcacaacagac

SEQ ID NO: 646795 - DNA, 15 bp, Homo sapiens
aaggcacaacagaca

SEQ ID NO: 646796 - DNA, 15 bp, Homo sapiens
aggcacaacagacaa

SEQ ID NO: 646797 - DNA, 15 bp, Homo sapiens
ggcacaacagacaaa

SEQ ID NO: 646798 - DNA, 15 bp, Homo sapiens
gcacaacagacaaag

SEQ ID NO: 646799 - DNA, 15 bp, Homo sapiens
cacaacagacaaaga

SEQ ID NO: 646800 - DNA, 15 bp, Homo sapiens
acaacagacaaagag

SEQ ID NO: 646801 - DNA, 15 bp, Homo sapiens
caacagacaaagagc

SEQ ID NO: 646802 - DNA, 15 bp, Homo sapiens
aacagacaaagagca

SEQ ID NO: 646803 - DNA, 15 bp, Homo sapiens
acagacaaagagcat

SEQ ID NO: 646804 - DNA, 15 bp, Homo sapiens
cagacaaagagcatt

SEQ ID NO: 646805 - DNA, 15 bp, Homo sapiens
agacaaagagcatta

SEQ ID NO: 646806 - DNA, 15 bp, Homo sapiens
gacaaagagcattaa

SEQ ID NO: 646807 - DNA, 15 bp, Homo sapiens
acaaagagcattaac

SEQ ID NO: 646808 - DNA, 15 bp, Homo sapiens
caaagagcattaaca

SEQ ID NO: 646809 - DNA, 15 bp, Homo sapiens
aaagagcattaacaa

SEQ ID NO: 646810 - DNA, 15 bp, Homo sapiens
aagagcattaacaag

SEQ ID NO: 646811 - DNA, 15 bp, Homo sapiens
agagcattaacaagc

SEQ ID NO: 646812 - DNA, 15 bp, Homo sapiens
gagcattaacaagca

SEQ ID NO: 646813 - DNA, 15 bp, Homo sapiens
agcattaacaagcac

SEQ ID NO: 646814 - DNA, 15 bp, Homo sapiens
gcattaacaagcaca

SEQ ID NO: 646815 - DNA, 15 bp, Homo sapiens
cattaacaagcacac

SEQ ID NO: 646816 - DNA, 15 bp, Homo sapiens
attaacaagcacaca

SEQ ID NO: 646817 - DNA, 15 bp, Homo sapiens
ttaacaagcacacaa

SEQ ID NO: 646818 - DNA, 15 bp, Homo sapiens
taacaagcacacaag

SEQ ID NO: 646819 - DNA, 15 bp, Homo sapiens
aacaagcacacaaga

SEQ ID NO: 646820 - DNA, 15 bp, Homo sapiens
acaagcacacaagaa

SEQ ID NO: 646821 - DNA, 15 bp, Homo sapiens
caagcacacaagaag

SEQ ID NO: 646822 - DNA, 15 bp, Homo sapiens
aagcacacaagaagg

SEQ ID NO: 646823 - DNA, 15 bp, Homo sapiens
agcacacaagaagga

SEQ ID NO: 646824 - DNA, 15 bp, Homo sapiens
gcacacaagaaggat

SEQ ID NO: 646825 - DNA, 15 bp, Homo sapiens
cacacaagaaggatt

SEQ ID NO: 646826 - DNA, 15 bp, Homo sapiens
acacaagaaggattt

SEQ ID NO: 646827 - DNA, 15 bp, Homo sapiens
cacaagaaggatttc

SEQ ID NO: 646828 - DNA, 15 bp, Homo sapiens
acaagaaggatttct

SEQ ID NO: 646829 - DNA, 15 bp, Homo sapiens
caagaaggatttctg

SEQ ID NO: 646830 - DNA, 15 bp, Homo sapiens
aagaaggatttctgc

SEQ ID NO: 646831 - DNA, 15 bp, Homo sapiens
agaaggatttctgca

SEQ ID NO: 646832 - DNA, 15 bp, Homo sapiens
gaaggatttctgcaa

SEQ ID NO: 646833 - DNA, 15 bp, Homo sapiens
aaggatttctgcaat

SEQ ID NO: 646834 - DNA, 15 bp, Homo sapiens
aggatttctgcaatc

SEQ ID NO: 646835 - DNA, 15 bp, Homo sapiens
ggatttctgcaatca

SEQ ID NO: 646836 - DNA, 15 bp, Homo sapiens
gatttctgcaatcac

SEQ ID NO: 646837 - DNA, 15 bp, Homo sapiens
atttctgcaatcaca

SEQ ID NO: 646838 - DNA, 15 bp, Homo sapiens
tttctgcaatcacaa

SEQ ID NO: 646839 - DNA, 15 bp, Homo sapiens
ttctgcaatcacaac

SEQ ID NO: 646840 - DNA, 15 bp, Homo sapiens
tctgcaatcacaact

SEQ ID NO: 646841 - DNA, 15 bp, Homo sapiens
ctgcaatcacaactg

SEQ ID NO: 646842 - DNA, 15 bp, Homo sapiens
tgcaatcacaactgt

SEQ ID NO: 646843 - DNA, 15 bp, Homo sapiens
gcaatcacaactgtg

SEQ ID NO: 646844 - DNA, 15 bp, Homo sapiens
caatcacaactgtgt

SEQ ID NO: 646845 - DNA, 15 bp, Homo sapiens
aatcacaactgtgtt

SEQ ID NO: 646846 - DNA, 15 bp, Homo sapiens
atcacaactgtgttc

SEQ ID NO: 646847 - DNA, 15 bp, Homo sapiens
tcacaactgtgttct

SEQ ID NO: 646848 - DNA, 15 bp, Homo sapiens
cacaactgtgttctc

SEQ ID NO: 646849 - DNA, 15 bp, Homo sapiens
acaactgtgttctcc

SEQ ID NO: 646850 - DNA, 15 bp, Homo sapiens
caactgtgttctcca

SEQ ID NO: 646851 - DNA, 15 bp, Homo sapiens
aactgtgttctccat

SEQ ID NO: 646852 - DNA, 15 bp, Homo sapiens
actgtgttctccatt

SEQ ID NO: 646853 - DNA, 15 bp, Homo sapiens
ctgtgttctccattt

SEQ ID NO: 646854 - DNA, 15 bp, Homo sapiens
tgtgttctccatttc

SEQ ID NO: 646855 - DNA, 15 bp, Homo sapiens
gtgttctccatttca

SEQ ID NO: 646856 - DNA, 15 bp, Homo sapiens
tgttctccatttcat

SEQ ID NO: 646857 - DNA, 15 bp, Homo sapiens
gttctccatttcatc

SEQ ID NO: 646858 - DNA, 15 bp, Homo sapiens
ttctccatttcatct

SEQ ID NO: 646859 - DNA, 15 bp, Homo sapiens
tctccatttcatctt

SEQ ID NO: 646860 - DNA, 15 bp, Homo sapiens
ctccatttcatctta

SEQ ID NO: 646861 - DNA, 15 bp, Homo sapiens
tccatttcatcttat

SEQ ID NO: 646862 - DNA, 15 bp, Homo sapiens
ccatttcatcttatc

SEQ ID NO: 646863 - DNA, 15 bp, Homo sapiens
catttcatcttatct

SEQ ID NO: 646864 - DNA, 15 bp, Homo sapiens
atttcatcttatctt

SEQ ID NO: 646865 - DNA, 15 bp, Homo sapiens
tttcatcttatcttt

SEQ ID NO: 646866 - DNA, 15 bp, Homo sapiens
ttcatcttatctttc

SEQ ID NO: 646867 - DNA, 15 bp, Homo sapiens
tcatcttatctttca

SEQ ID NO: 646868 - DNA, 15 bp, Homo sapiens
catcttatctttcag

SEQ ID NO: 646869 - DNA, 15 bp, Homo sapiens
atcttatctttcaga

SEQ ID NO: 646870 - DNA, 15 bp, Homo sapiens
tcttatctttcagat

SEQ ID NO: 646871 - DNA, 15 bp, Homo sapiens
cttatctttcagata

SEQ ID NO: 646872 - DNA, 15 bp, Homo sapiens
ttatctttcagataa

SEQ ID NO: 646873 - DNA, 15 bp, Homo sapiens
tatctttcagataac

SEQ ID NO: 646874 - DNA, 15 bp, Homo sapiens
atctttcagataacc

SEQ ID NO: 646875 - DNA, 15 bp, Homo sapiens
tctttcagataacct

SEQ ID NO: 646876 - DNA, 15 bp, Homo sapiens
ctttcagataacctc

SEQ ID NO: 646877 - DNA, 15 bp, Homo sapiens
tttcagataacctct

SEQ ID NO: 646878 - DNA, 15 bp, Homo sapiens
ttcagataacctctt

SEQ ID NO: 646879 - DNA, 15 bp, Homo sapiens
tcagataacctcttt

SEQ ID NO: 646880 - DNA, 15 bp, Homo sapiens
cagataacctctttc

SEQ ID NO: 646881 - DNA, 15 bp, Homo sapiens
agataacctctttca

SEQ ID NO: 646882 - DNA, 15 bp, Homo sapiens
gataacctctttcag

SEQ ID NO: 646883 - DNA, 15 bp, Homo sapiens
ataacctctttcaga

SEQ ID NO: 646884 - DNA, 15 bp, Homo sapiens
taacctctttcagag

SEQ ID NO: 646885 - DNA, 15 bp, Homo sapiens
aacctctttcagaga

SEQ ID NO: 646886 - DNA, 15 bp, Homo sapiens
acctctttcagagag

SEQ ID NO: 646887 - DNA, 15 bp, Homo sapiens
cctctttcagagaga

SEQ ID NO: 646888 - DNA, 15 bp, Homo sapiens
ctctttcagagagag

SEQ ID NO: 646889 - DNA, 15 bp, Homo sapiens
tctttcagagagagg

SEQ ID NO: 646890 - DNA, 15 bp, Homo sapiens
ctttcagagagaggt

SEQ ID NO: 646891 - DNA, 15 bp, Homo sapiens
tttcagagagaggtg

SEQ ID NO: 646892 - DNA, 15 bp, Homo sapiens
ttcagagagaggtga

SEQ ID NO: 646893 - DNA, 15 bp, Homo sapiens
tcagagagaggtgat

SEQ ID NO: 646894 - DNA, 15 bp, Homo sapiens
cagagagaggtgatc

SEQ ID NO: 646895 - DNA, 15 bp, Homo sapiens
agagagaggtgatct

SEQ ID NO: 646896 - DNA, 15 bp, Homo sapiens
gagagaggtgatctg

SEQ ID NO: 646897 - DNA, 15 bp, Homo sapiens
agagaggtgatctga

SEQ ID NO: 646898 - DNA, 15 bp, Homo sapiens
gagaggtgatctgac

SEQ ID NO: 646899 - DNA, 15 bp, Homo sapiens
agaggtgatctgacc

SEQ ID NO: 646900 - DNA, 15 bp, Homo sapiens
gaggtgatctgaccc

SEQ ID NO: 646901 - DNA, 15 bp, Homo sapiens
aggtgatctgaccca

SEQ ID NO: 646902 - DNA, 15 bp, Homo sapiens
ggtgatctgacccat

SEQ ID NO: 646903 - DNA, 15 bp, Homo sapiens
gtgatctgacccatt

SEQ ID NO: 646904 - DNA, 15 bp, Homo sapiens
tgatctgacccattc

SEQ ID NO: 646905 - DNA, 15 bp, Homo sapiens
gatctgacccattcc

SEQ ID NO: 646906 - DNA, 15 bp, Homo sapiens
atctgacccattcca

SEQ ID NO: 646907 - DNA, 15 bp, Homo sapiens
tctgacccattccaa

SEQ ID NO: 646908 - DNA, 15 bp, Homo sapiens
ctgacccattccaag

SEQ ID NO: 646909 - DNA, 15 bp, Homo sapiens
tgacccattccaaga

SEQ ID NO: 646910 - DNA, 15 bp, Homo sapiens
gacccattccaagag

SEQ ID NO: 646911 - DNA, 15 bp, Homo sapiens
acccattccaagagt

SEQ ID NO: 646912 - DNA, 15 bp, Homo sapiens
cccattccaagagtt

SEQ ID NO: 646913 - DNA, 15 bp, Homo sapiens
ccattccaagagtta

SEQ ID NO: 646914 - DNA, 15 bp, Homo sapiens
cattccaagagttat

SEQ ID NO: 646915 - DNA, 15 bp, Homo sapiens
attccaagagttatc

SEQ ID NO: 646916 - DNA, 15 bp, Homo sapiens
ttccaagagttatcc

SEQ ID NO: 646917 - DNA, 15 bp, Homo sapiens
tccaagagttatccc

SEQ ID NO: 646918 - DNA, 15 bp, Homo sapiens
ccaagagttatccca

SEQ ID NO: 646919 - DNA, 15 bp, Homo sapiens
caagagttatcccag

SEQ ID NO: 646920 - DNA, 15 bp, Homo sapiens
aagagttatcccagt

SEQ ID NO: 646921 - DNA, 15 bp, Homo sapiens
agagttatcccagtc

SEQ ID NO: 646922 - DNA, 15 bp, Homo sapiens
gagttatcccagtca

SEQ ID NO: 646923 - DNA, 15 bp, Homo sapiens
agttatcccagtcac

SEQ ID NO: 646924 - DNA, 15 bp, Homo sapiens
gttatcccagtcact

SEQ ID NO: 646925 - DNA, 15 bp, Homo sapiens
ttatcccagtcactg

SEQ ID NO: 646926 - DNA, 15 bp, Homo sapiens
tatcccagtcactgt

SEQ ID NO: 646927 - DNA, 15 bp, Homo sapiens
atcccagtcactgtc

SEQ ID NO: 646928 - DNA, 15 bp, Homo sapiens
tcccagtcactgtct

SEQ ID NO: 646929 - DNA, 15 bp, Homo sapiens
cccagtcactgtctc

SEQ ID NO: 646930 - DNA, 15 bp, Homo sapiens
ccagtcactgtctcg

SEQ ID NO: 646931 - DNA, 15 bp, Homo sapiens
cagtcactgtctcgg

SEQ ID NO: 646932 - DNA, 15 bp, Homo sapiens
agtcactgtctcggt

SEQ ID NO: 646933 - DNA, 15 bp, Homo sapiens
gtcactgtctcggtt

SEQ ID NO: 646934 - DNA, 15 bp, Homo sapiens
tcactgtctcggttc

SEQ ID NO: 646935 - DNA, 15 bp, Homo sapiens
cactgtctcggttcc

SEQ ID NO: 646936 - DNA, 15 bp, Homo sapiens
actgtctcggttccc

SEQ ID NO: 646937 - DNA, 15 bp, Homo sapiens
ctgtctcggttcccc

SEQ ID NO: 646938 - DNA, 15 bp, Homo sapiens
tgtctcggttcccca

SEQ ID NO: 646939 - DNA, 15 bp, Homo sapiens
gtctcggttccccag

SEQ ID NO: 646940 - DNA, 15 bp, Homo sapiens
tctcggttccccagg

SEQ ID NO: 646941 - DNA, 15 bp, Homo sapiens
ctcggttccccagga

SEQ ID NO: 646942 - DNA, 15 bp, Homo sapiens
tcggttccccaggaa

SEQ ID NO: 646943 - DNA, 15 bp, Homo sapiens
cggttccccaggaat

SEQ ID NO: 646944 - DNA, 15 bp, Homo sapiens
ggttccccaggaatt

SEQ ID NO: 646945 - DNA, 15 bp, Homo sapiens
gttccccaggaattg

SEQ ID NO: 646946 - DNA, 15 bp, Homo sapiens
ttccccaggaattga

SEQ ID NO: 646947 - DNA, 15 bp, Homo sapiens
tccccaggaattgag

SEQ ID NO: 646948 - DNA, 15 bp, Homo sapiens
ccccaggaattgagg

SEQ ID NO: 646949 - DNA, 15 bp, Homo sapiens
cccaggaattgaggc

SEQ ID NO: 646950 - DNA, 15 bp, Homo sapiens
ccaggaattgaggcc

SEQ ID NO: 646951 - DNA, 15 bp, Homo sapiens
caggaattgaggcct

SEQ ID NO: 646952 - DNA, 15 bp, Homo sapiens
aggaattgaggcctg

SEQ ID NO: 646953 - DNA, 15 bp, Homo sapiens
ggaattgaggcctgg

SEQ ID NO: 646954 - DNA, 15 bp, Homo sapiens
gaattgaggcctgga

SEQ ID NO: 646955 - DNA, 15 bp, Homo sapiens
aattgaggcctggac

SEQ ID NO: 646956 - DNA, 15 bp, Homo sapiens
attgaggcctggaca

SEQ ID NO: 646957 - DNA, 15 bp, Homo sapiens
ttgaggcctggacaa

SEQ ID NO: 646958 - DNA, 15 bp, Homo sapiens
tgaggcctggacaac

SEQ ID NO: 646959 - DNA, 15 bp, Homo sapiens
gaggcctggacaaca

SEQ ID NO: 646960 - DNA, 15 bp, Homo sapiens
aggcctggacaacat

SEQ ID NO: 646961 - DNA, 15 bp, Homo sapiens
ggcctggacaacata

SEQ ID NO: 646962 - DNA, 15 bp, Homo sapiens
gcctggacaacatat

SEQ ID NO: 646963 - DNA, 15 bp, Homo sapiens
cctggacaacatata

SEQ ID NO: 646964 - DNA, 15 bp, Homo sapiens
ctggacaacatatag

SEQ ID NO: 646965 - DNA, 15 bp, Homo sapiens
tggacaacatatagg

SEQ ID NO: 646966 - DNA, 15 bp, Homo sapiens
ggacaacatatagga

SEQ ID NO: 646967 - DNA, 15 bp, Homo sapiens
gacaacatataggaa

SEQ ID NO: 646968 - DNA, 15 bp, Homo sapiens
acaacatataggaat

SEQ ID NO: 646969 - DNA, 15 bp, Homo sapiens
caacatataggaata

SEQ ID NO: 646970 - DNA, 15 bp, Homo sapiens
aacatataggaatag

SEQ ID NO: 646971 - DNA, 15 bp, Homo sapiens
acatataggaatagg

SEQ ID NO: 646972 - DNA, 15 bp, Homo sapiens
catataggaatagga

SEQ ID NO: 646973 - DNA, 15 bp, Homo sapiens
atataggaataggaa

SEQ ID NO: 646974 - DNA, 15 bp, Homo sapiens
tataggaataggaat

SEQ ID NO: 646975 - DNA, 15 bp, Homo sapiens
ataggaataggaatt

SEQ ID NO: 646976 - DNA, 15 bp, Homo sapiens
taggaataggaattt

SEQ ID NO: 646977 - DNA, 15 bp, Homo sapiens
aggaataggaatttc

SEQ ID NO: 646978 - DNA, 15 bp, Homo sapiens
ggaataggaatttcg

SEQ ID NO: 646979 - DNA, 15 bp, Homo sapiens
gaataggaatttcgg

SEQ ID NO: 646980 - DNA, 15 bp, Homo sapiens
aataggaatttcggg

SEQ ID NO: 646981 - DNA, 15 bp, Homo sapiens
ataggaatttcgggt

SEQ ID NO: 646982 - DNA, 15 bp, Homo sapiens
taggaatttcgggtc

SEQ ID NO: 646983 - DNA, 15 bp, Homo sapiens
aggaatttcgggtca

SEQ ID NO: 646984 - DNA, 15 bp, Homo sapiens
ggaatttcgggtcac

SEQ ID NO: 646985 - DNA, 15 bp, Homo sapiens
gaatttcgggtcaca

SEQ ID NO: 646986 - DNA, 15 bp, Homo sapiens
aatttcgggtcacat

SEQ ID NO: 646987 - DNA, 15 bp, Homo sapiens
atttcgggtcacatc

SEQ ID NO: 646988 - DNA, 15 bp, Homo sapiens
tttcgggtcacatca

SEQ ID NO: 646989 - DNA, 15 bp, Homo sapiens
ttcgggtcacatcag

SEQ ID NO: 646990 - DNA, 15 bp, Homo sapiens
tcgggtcacatcagc

SEQ ID NO: 646991 - DNA, 15 bp, Homo sapiens
cgggtcacatcagct

SEQ ID NO: 646992 - DNA, 15 bp, Homo sapiens
gggtcacatcagcta

SEQ ID NO: 646993 - DNA, 15 bp, Homo sapiens
ggtcacatcagctaa

SEQ ID NO: 646994 - DNA, 15 bp, Homo sapiens
gtcacatcagctaaa

SEQ ID NO: 646995 - DNA, 15 bp, Homo sapiens
tcacatcagctaaaa

SEQ ID NO: 646996 - DNA, 15 bp, Homo sapiens
cacatcagctaaaaa

SEQ ID NO: 646997 - DNA, 15 bp, Homo sapiens
acatcagctaaaaac

SEQ ID NO: 646998 - DNA, 15 bp, Homo sapiens
catcagctaaaaaca

SEQ ID NO: 646999 - DNA, 15 bp, Homo sapiens
atcagctaaaaacac

SEQ ID NO: 647000 - DNA, 15 bp, Homo sapiens
tcagctaaaaacact

SEQ ID NO: 647001 - DNA, 15 bp, Homo sapiens
cagctaaaaacactc

SEQ ID NO: 647002 - DNA, 15 bp, Homo sapiens
agctaaaaacactcc

SEQ ID NO: 647003 - DNA, 15 bp, Homo sapiens
gctaaaaacactccc

SEQ ID NO: 647004 - DNA, 15 bp, Homo sapiens
ctaaaaacactccca

SEQ ID NO: 647005 - DNA, 15 bp, Homo sapiens
taaaaacactcccaa

SEQ ID NO: 647006 - DNA, 15 bp, Homo sapiens
aaaaacactcccaag

SEQ ID NO: 647007 - DNA, 15 bp, Homo sapiens
aaaacactcccaagg

SEQ ID NO: 647008 - DNA, 15 bp, Homo sapiens
aaacactcccaagga

SEQ ID NO: 647009 - DNA, 15 bp, Homo sapiens
aacactcccaaggac

SEQ ID NO: 647010 - DNA, 15 bp, Homo sapiens
acactcccaaggact

SEQ ID NO: 647011 - DNA, 15 bp, Homo sapiens
cactcccaaggactg

SEQ ID NO: 647012 - DNA, 15 bp, Homo sapiens
actcccaaggactga

SEQ ID NO: 647013 - DNA, 15 bp, Homo sapiens
ctcccaaggactgag

SEQ ID NO: 647014 - DNA, 15 bp, Homo sapiens
tcccaaggactgaga

SEQ ID NO: 647015 - DNA, 15 bp, Homo sapiens
cccaaggactgagaa

SEQ ID NO: 647016 - DNA, 15 bp, Homo sapiens
ccaaggactgagaaa

SEQ ID NO: 647017 - DNA, 15 bp, Homo sapiens
caaggactgagaaat

SEQ ID NO: 647018 - DNA, 15 bp, Homo sapiens
aaggactgagaaatt

SEQ ID NO: 647019 - DNA, 15 bp, Homo sapiens
aggactgagaaatta

SEQ ID NO: 647020 - DNA, 15 bp, Homo sapiens
ggactgagaaattat

SEQ ID NO: 647021 - DNA, 15 bp, Homo sapiens
gactgagaaattatt

SEQ ID NO: 647022 - DNA, 15 bp, Homo sapiens
actgagaaattatta

SEQ ID NO: 647023 - DNA, 15 bp, Homo sapiens
ctgagaaattattat

SEQ ID NO: 647024 - DNA, 15 bp, Homo sapiens
tgagaaattattatt

SEQ ID NO: 647025 - DNA, 15 bp, Homo sapiens
gagaaattattatta

SEQ ID NO: 647026 - DNA, 15 bp, Homo sapiens
agaaattattattag

SEQ ID NO: 647027 - DNA, 15 bp, Homo sapiens
gaaattattattaga

SEQ ID NO: 647028 - DNA, 15 bp, Homo sapiens
aaattattattagag

SEQ ID NO: 647029 - DNA, 15 bp, Homo sapiens
aattattattagagc

SEQ ID NO: 647030 - DNA, 15 bp, Homo sapiens
attattattagagca

SEQ ID NO: 647031 - DNA, 15 bp, Homo sapiens
ttattattagagcag

SEQ ID NO: 647032 - DNA, 15 bp, Homo sapiens
tattattagagcagc

SEQ ID NO: 647033 - DNA, 15 bp, Homo sapiens
attattagagcagcc

SEQ ID NO: 647034 - DNA, 15 bp, Homo sapiens
ttattagagcagcca

SEQ ID NO: 647035 - DNA, 15 bp, Homo sapiens
tattagagcagccac

SEQ ID NO: 647036 - DNA, 15 bp, Homo sapiens
attagagcagccaca

SEQ ID NO: 647037 - DNA, 15 bp, Homo sapiens
ttagagcagccacat

SEQ ID NO: 647038 - DNA, 15 bp, Homo sapiens
tagagcagccacatt

SEQ ID NO: 647039 - DNA, 15 bp, Homo sapiens
agagcagccacatta

SEQ ID NO: 647040 - DNA, 15 bp, Homo sapiens
gagcagccacattag

SEQ ID NO: 647041 - DNA, 15 bp, Homo sapiens
agcagccacattaga

SEQ ID NO: 647042 - DNA, 15 bp, Homo sapiens
gcagccacattagat

SEQ ID NO: 647043 - DNA, 15 bp, Homo sapiens
cagccacattagata

SEQ ID NO: 647044 - DNA, 15 bp, Homo sapiens
agccacattagatag

SEQ ID NO: 647045 - DNA, 15 bp, Homo sapiens
gccacattagatagc

SEQ ID NO: 647046 - DNA, 15 bp, Homo sapiens
ccacattagatagca

SEQ ID NO: 647047 - DNA, 15 bp, Homo sapiens
cacattagatagcac

SEQ ID NO: 647048 - DNA, 15 bp, Homo sapiens
acattagatagcacg

SEQ ID NO: 647049 - DNA, 15 bp, Homo sapiens
cattagatagcacgt

SEQ ID NO: 647050 - DNA, 15 bp, Homo sapiens
attagatagcacgtt

SEQ ID NO: 647051 - DNA, 15 bp, Homo sapiens
ttagatagcacgtta

SEQ ID NO: 647052 - DNA, 15 bp, Homo sapiens
tagatagcacgttat

SEQ ID NO: 647053 - DNA, 15 bp, Homo sapiens
agatagcacgttatg

SEQ ID NO: 647054 - DNA, 15 bp, Homo sapiens
gatagcacgttatgg

SEQ ID NO: 647055 - DNA, 15 bp, Homo sapiens
atagcacgttatgga

SEQ ID NO: 647056 - DNA, 15 bp, Homo sapiens
tagcacgttatggaa

SEQ ID NO: 647057 - DNA, 15 bp, Homo sapiens
agcacgttatggaat

SEQ ID NO: 647058 - DNA, 15 bp, Homo sapiens
gcacgttatggaatc

SEQ ID NO: 647059 - DNA, 15 bp, Homo sapiens
cacgttatggaatca

SEQ ID NO: 647060 - DNA, 15 bp, Homo sapiens
acgttatggaatcag

SEQ ID NO: 647061 - DNA, 15 bp, Homo sapiens
cgttatggaatcagg

SEQ ID NO: 647062 - DNA, 15 bp, Homo sapiens
gttatggaatcaggc

SEQ ID NO: 647063 - DNA, 15 bp, Homo sapiens
ttatggaatcaggca

SEQ ID NO: 647064 - DNA, 15 bp, Homo sapiens
tatggaatcaggcat

SEQ ID NO: 647065 - DNA, 15 bp, Homo sapiens
atggaatcaggcata

SEQ ID NO: 647066 - DNA, 15 bp, Homo sapiens
tggaatcaggcatac

SEQ ID NO: 647067 - DNA, 15 bp, Homo sapiens
ggaatcaggcatact

SEQ ID NO: 647068 - DNA, 15 bp, Homo sapiens
gaatcaggcatacta

SEQ ID NO: 647069 - DNA, 15 bp, Homo sapiens
aatcaggcatactaa

SEQ ID NO: 647070 - DNA, 15 bp, Homo sapiens
atcaggcatactaaa

SEQ ID NO: 647071 - DNA, 15 bp, Homo sapiens
tcaggcatactaaaa

SEQ ID NO: 647072 - DNA, 15 bp, Homo sapiens
caggcatactaaaac

SEQ ID NO: 647073 - DNA, 15 bp, Homo sapiens
aggcatactaaaact

SEQ ID NO: 647074 - DNA, 15 bp, Homo sapiens
ggcatactaaaactg

SEQ ID NO: 647075 - DNA, 15 bp, Homo sapiens
gcatactaaaactgt

SEQ ID NO: 647076 - DNA, 15 bp, Homo sapiens
catactaaaactgtg

SEQ ID NO: 647077 - DNA, 15 bp, Homo sapiens
atactaaaactgtgc

SEQ ID NO: 647078 - DNA, 15 bp, Homo sapiens
tactaaaactgtgct

SEQ ID NO: 647079 - DNA, 15 bp, Homo sapiens
actaaaactgtgcta

SEQ ID NO: 647080 - DNA, 15 bp, Homo sapiens
ctaaaactgtgctat

SEQ ID NO: 647081 - DNA, 15 bp, Homo sapiens
taaaactgtgctata

SEQ ID NO: 647082 - DNA, 15 bp, Homo sapiens
aaaactgtgctataa

SEQ ID NO: 647083 - DNA, 15 bp, Homo sapiens
aaactgtgctataaa

SEQ ID NO: 647084 - DNA, 15 bp, Homo sapiens
aactgtgctataaat

SEQ ID NO: 647085 - DNA, 15 bp, Homo sapiens
actgtgctataaatg

SEQ ID NO: 647086 - DNA, 15 bp, Homo sapiens
ctgtgctataaatga

SEQ ID NO: 647087 - DNA, 15 bp, Homo sapiens
tgtgctataaatgag

SEQ ID NO: 647088 - DNA, 15 bp, Homo sapiens
gtgctataaatgaga

SEQ ID NO: 647089 - DNA, 15 bp, Homo sapiens
tgctataaatgagaa

SEQ ID NO: 647090 - DNA, 15 bp, Homo sapiens
gctataaatgagaat

SEQ ID NO: 647091 - DNA, 15 bp, Homo sapiens
ctataaatgagaata

SEQ ID NO: 647092 - DNA, 15 bp, Homo sapiens
tataaatgagaatag

SEQ ID NO: 647093 - DNA, 15 bp, Homo sapiens
ataaatgagaataga

SEQ ID NO: 647094 - DNA, 15 bp, Homo sapiens
taaatgagaatagaa

SEQ ID NO: 647095 - DNA, 15 bp, Homo sapiens
aaatgagaatagaat

SEQ ID NO: 647096 - DNA, 15 bp, Homo sapiens
aatgagaatagaatt

SEQ ID NO: 647097 - DNA, 15 bp, Homo sapiens
atgagaatagaattt

SEQ ID NO: 647098 - DNA, 15 bp, Homo sapiens
tgagaatagaattta

SEQ ID NO: 647099 - DNA, 15 bp, Homo sapiens
gagaatagaatttaa

SEQ ID NO: 647100 - DNA, 15 bp, Homo sapiens
agaatagaatttaac

SEQ ID NO: 647101 - DNA, 15 bp, Homo sapiens
gaatagaatttaact

SEQ ID NO: 647102 - DNA, 15 bp, Homo sapiens
aatagaatttaactg

SEQ ID NO: 647103 - DNA, 15 bp, Homo sapiens
atagaatttaactga

SEQ ID NO: 647104 - DNA, 15 bp, Homo sapiens
tagaatttaactgaa

SEQ ID NO: 647105 - DNA, 15 bp, Homo sapiens
agaatttaactgaaa

SEQ ID NO: 647106 - DNA, 15 bp, Homo sapiens
gaatttaactgaaaa

SEQ ID NO: 647107 - DNA, 15 bp, Homo sapiens
aatttaactgaaaaa

SEQ ID NO: 647108 - DNA, 15 bp, Homo sapiens
atttaactgaaaaac

SEQ ID NO: 647109 - DNA, 15 bp, Homo sapiens
tttaactgaaaaact

SEQ ID NO: 647110 - DNA, 15 bp, Homo sapiens
ttaactgaaaaactg

SEQ ID NO: 647111 - DNA, 15 bp, Homo sapiens
taactgaaaaactgc

SEQ ID NO: 647112 - DNA, 15 bp, Homo sapiens
aactgaaaaactgca

SEQ ID NO: 647113 - DNA, 15 bp, Homo sapiens
actgaaaaactgcat

SEQ ID NO: 647114 - DNA, 15 bp, Homo sapiens
ctgaaaaactgcata

SEQ ID NO: 647115 - DNA, 15 bp, Homo sapiens
tgaaaaactgcatac

SEQ ID NO: 647116 - DNA, 15 bp, Homo sapiens
gaaaaactgcataca

SEQ ID NO: 647117 - DNA, 15 bp, Homo sapiens
aaaaactgcatacac

SEQ ID NO: 647118 - DNA, 15 bp, Homo sapiens
aaaactgcatacacc

SEQ ID NO: 647119 - DNA, 15 bp, Homo sapiens
aaactgcatacaccc

SEQ ID NO: 647120 - DNA, 15 bp, Homo sapiens
aactgcatacaccct

SEQ ID NO: 647121 - DNA, 15 bp, Homo sapiens
actgcatacaccctc

SEQ ID NO: 647122 - DNA, 15 bp, Homo sapiens
ctgcatacaccctca

SEQ ID NO: 647123 - DNA, 15 bp, Homo sapiens
tgcatacaccctcac

SEQ ID NO: 647124 - DNA, 15 bp, Homo sapiens
gcatacaccctcaca

SEQ ID NO: 647125 - DNA, 15 bp, Homo sapiens
catacaccctcacac

SEQ ID NO: 647126 - DNA, 15 bp, Homo sapiens
atacaccctcacaca

SEQ ID NO: 647127 - DNA, 15 bp, Homo sapiens
tacaccctcacacat

SEQ ID NO: 647128 - DNA, 15 bp, Homo sapiens
acaccctcacacatc

SEQ ID NO: 647129 - DNA, 15 bp, Homo sapiens
caccctcacacatcg

SEQ ID NO: 647130 - DNA, 15 bp, Homo sapiens
accctcacacatcgt

SEQ ID NO: 647131 - DNA, 15 bp, Homo sapiens
ccctcacacatcgtt

SEQ ID NO: 647132 - DNA, 15 bp, Homo sapiens
cctcacacatcgttg

SEQ ID NO: 647133 - DNA, 15 bp, Homo sapiens
ctcacacatcgttga

SEQ ID NO: 647134 - DNA, 15 bp, Homo sapiens
tcacacatcgttgag

SEQ ID NO: 647135 - DNA, 15 bp, Homo sapiens
cacacatcgttgagc

SEQ ID NO: 647136 - DNA, 15 bp, Homo sapiens
acacatcgttgagca

SEQ ID NO: 647137 - DNA, 15 bp, Homo sapiens
cacatcgttgagcaa

SEQ ID NO: 647138 - DNA, 15 bp, Homo sapiens
acatcgttgagcaat

SEQ ID NO: 647139 - DNA, 15 bp, Homo sapiens
catcgttgagcaata

SEQ ID NO: 647140 - DNA, 15 bp, Homo sapiens
atcgttgagcaatag

SEQ ID NO: 647141 - DNA, 15 bp, Homo sapiens
tcgttgagcaatagg

SEQ ID NO: 647142 - DNA, 15 bp, Homo sapiens
cgttgagcaataggt

SEQ ID NO: 647143 - DNA, 15 bp, Homo sapiens
gttgagcaataggta

SEQ ID NO: 647144 - DNA, 15 bp, Homo sapiens
ttgagcaataggtac

SEQ ID NO: 647145 - DNA, 15 bp, Homo sapiens
tgagcaataggtacc

SEQ ID NO: 647146 - DNA, 15 bp, Homo sapiens
gagcaataggtacca

SEQ ID NO: 647147 - DNA, 15 bp, Homo sapiens
agcaataggtaccaa

SEQ ID NO: 647148 - DNA, 15 bp, Homo sapiens
gcaataggtaccaac

SEQ ID NO: 647149 - DNA, 15 bp, Homo sapiens
caataggtaccaact

SEQ ID NO: 647150 - DNA, 15 bp, Homo sapiens
aataggtaccaactt

SEQ ID NO: 647151 - DNA, 15 bp, Homo sapiens
ataggtaccaacttc

SEQ ID NO: 647152 - DNA, 15 bp, Homo sapiens
taggtaccaacttcc

SEQ ID NO: 647153 - DNA, 15 bp, Homo sapiens
aggtaccaacttcct

SEQ ID NO: 647154 - DNA, 15 bp, Homo sapiens
ggtaccaacttccta

SEQ ID NO: 647155 - DNA, 15 bp, Homo sapiens
gtaccaacttcctat

SEQ ID NO: 647156 - DNA, 15 bp, Homo sapiens
taccaacttcctatt

SEQ ID NO: 647157 - DNA, 15 bp, Homo sapiens
accaacttcctattg

SEQ ID NO: 647158 - DNA, 15 bp, Homo sapiens
ccaacttcctattgc

SEQ ID NO: 647159 - DNA, 15 bp, Homo sapiens
caacttcctattgct

SEQ ID NO: 647160 - DNA, 15 bp, Homo sapiens
aacttcctattgctc

SEQ ID NO: 647161 - DNA, 15 bp, Homo sapiens
acttcctattgctca

SEQ ID NO: 647162 - DNA, 15 bp, Homo sapiens
cttcctattgctcaa

SEQ ID NO: 647163 - DNA, 15 bp, Homo sapiens
ttcctattgctcaat

SEQ ID NO: 647164 - DNA, 15 bp, Homo sapiens
tcctattgctcaata

SEQ ID NO: 647165 - DNA, 15 bp, Homo sapiens
cctattgctcaatag

SEQ ID NO: 647166 - DNA, 15 bp, Homo sapiens
ctattgctcaatagc

SEQ ID NO: 647167 - DNA, 15 bp, Homo sapiens
tattgctcaatagca

SEQ ID NO: 647168 - DNA, 15 bp, Homo sapiens
attgctcaatagcaa

SEQ ID NO: 647169 - DNA, 15 bp, Homo sapiens
ttgctcaatagcaaa

SEQ ID NO: 647170 - DNA, 15 bp, Homo sapiens
tgctcaatagcaaaa

SEQ ID NO: 647171 - DNA, 15 bp, Homo sapiens
gctcaatagcaaaat

SEQ ID NO: 647172 - DNA, 15 bp, Homo sapiens
ctcaatagcaaaata

SEQ ID NO: 647173 - DNA, 15 bp, Homo sapiens
tcaatagcaaaatat

SEQ ID NO: 647174 - DNA, 15 bp, Homo sapiens
caatagcaaaatatt

SEQ ID NO: 647175 - DNA, 15 bp, Homo sapiens
aatagcaaaatattc

SEQ ID NO: 647176 - DNA, 15 bp, Homo sapiens
atagcaaaatattct

SEQ ID NO: 647177 - DNA, 15 bp, Homo sapiens
tagcaaaatattctc

SEQ ID NO: 647178 - DNA, 15 bp, Homo sapiens
agcaaaatattctca

SEQ ID NO: 647179 - DNA, 15 bp, Homo sapiens
gcaaaatattctcac

SEQ ID NO: 647180 - DNA, 15 bp, Homo sapiens
caaaatattctcaca

SEQ ID NO: 647181 - DNA, 15 bp, Homo sapiens
aaaatattctcacag

SEQ ID NO: 647182 - DNA, 15 bp, Homo sapiens
aaatattctcacagt

SEQ ID NO: 647183 - DNA, 15 bp, Homo sapiens
aatattctcacagtg

SEQ ID NO: 647184 - DNA, 15 bp, Homo sapiens
atattctcacagtgt

SEQ ID NO: 647185 - DNA, 15 bp, Homo sapiens
tattctcacagtgtc

SEQ ID NO: 647186 - DNA, 15 bp, Homo sapiens
attctcacagtgtct

SEQ ID NO: 647187 - DNA, 15 bp, Homo sapiens
ttctcacagtgtcta

SEQ ID NO: 647188 - DNA, 15 bp, Homo sapiens
tctcacagtgtctac

SEQ ID NO: 647189 - DNA, 15 bp, Homo sapiens
ctcacagtgtctaca

SEQ ID NO: 647190 - DNA, 15 bp, Homo sapiens
tcacagtgtctacat

SEQ ID NO: 647191 - DNA, 15 bp, Homo sapiens
cacagtgtctacatt

SEQ ID NO: 647192 - DNA, 15 bp, Homo sapiens
acagtgtctacatta

SEQ ID NO: 647193 - DNA, 15 bp, Homo sapiens
cagtgtctacattat

SEQ ID NO: 647194 - DNA, 15 bp, Homo sapiens
agtgtctacattatt

SEQ ID NO: 647195 - DNA, 15 bp, Homo sapiens
gtgtctacattattc

SEQ ID NO: 647196 - DNA, 15 bp, Homo sapiens
tgtctacattattca

SEQ ID NO: 647197 - DNA, 15 bp, Homo sapiens
gtctacattattcaa

SEQ ID NO: 647198 - DNA, 15 bp, Homo sapiens
tctacattattcaaa

SEQ ID NO: 647199 - DNA, 15 bp, Homo sapiens
ctacattattcaaac

SEQ ID NO: 647200 - DNA, 15 bp, Homo sapiens
tacattattcaaaca

SEQ ID NO: 647201 - DNA, 15 bp, Homo sapiens
acattattcaaacat

SEQ ID NO: 647202 - DNA, 15 bp, Homo sapiens
cattattcaaacatt

SEQ ID NO: 647203 - DNA, 15 bp, Homo sapiens
attattcaaacattt

SEQ ID NO: 647204 - DNA, 15 bp, Homo sapiens
ttattcaaacatttc

SEQ ID NO: 647205 - DNA, 15 bp, Homo sapiens
tattcaaacatttcc

SEQ ID NO: 647206 - DNA, 15 bp, Homo sapiens
attcaaacatttccc

SEQ ID NO: 647207 - DNA, 15 bp, Homo sapiens
ttcaaacatttccca

SEQ ID NO: 647208 - DNA, 15 bp, Homo sapiens
tcaaacatttcccag

SEQ ID NO: 647209 - DNA, 15 bp, Homo sapiens
caaacatttcccaga

SEQ ID NO: 647210 - DNA, 15 bp, Homo sapiens
aaacatttcccagat

SEQ ID NO: 647211 - DNA, 15 bp, Homo sapiens
aacatttcccagata

SEQ ID NO: 647212 - DNA, 15 bp, Homo sapiens
acatttcccagataa

SEQ ID NO: 647213 - DNA, 15 bp, Homo sapiens
catttcccagataaa

SEQ ID NO: 647214 - DNA, 15 bp, Homo sapiens
atttcccagataaaa

SEQ ID NO: 647215 - DNA, 15 bp, Homo sapiens
tttcccagataaaat

SEQ ID NO: 647216 - DNA, 15 bp, Homo sapiens
ttcccagataaaata

SEQ ID NO: 647217 - DNA, 15 bp, Homo sapiens
cacaatataagtatg

SEQ ID NO: 647218 - DNA, 15 bp, Homo sapiens
acaatataagtatgt

SEQ ID NO: 647219 - DNA, 15 bp, Homo sapiens
caatataagtatgtg

SEQ ID NO: 647220 - DNA, 15 bp, Homo sapiens
aatataagtatgtga

SEQ ID NO: 647221 - DNA, 15 bp, Homo sapiens
atataagtatgtgag

SEQ ID NO: 647222 - DNA, 15 bp, Homo sapiens
tataagtatgtgagg

SEQ ID NO: 647223 - DNA, 15 bp, Homo sapiens
ataagtatgtgaggt

SEQ ID NO: 647224 - DNA, 15 bp, Homo sapiens
taagtatgtgaggta

SEQ ID NO: 647225 - DNA, 15 bp, Homo sapiens
aagtatgtgaggtaa

SEQ ID NO: 647226 - DNA, 15 bp, Homo sapiens
agtatgtgaggtaat

SEQ ID NO: 647227 - DNA, 15 bp, Homo sapiens
gtatgtgaggtaatg

SEQ ID NO: 647228 - DNA, 15 bp, Homo sapiens
tatgtgaggtaatgc

SEQ ID NO: 647229 - DNA, 15 bp, Homo sapiens
atgtgaggtaatgca

SEQ ID NO: 647230 - DNA, 15 bp, Homo sapiens
tgtgaggtaatgcat

SEQ ID NO: 647231 - DNA, 15 bp, Homo sapiens
gtgaggtaatgcatg

SEQ ID NO: 647232 - DNA, 15 bp, Homo sapiens
tgaggtaatgcatgt

SEQ ID NO: 647233 - DNA, 15 bp, Homo sapiens
gaggtaatgcatgtt

SEQ ID NO: 647234 - DNA, 15 bp, Homo sapiens
aggtaatgcatgtta

SEQ ID NO: 647235 - DNA, 15 bp, Homo sapiens
ggtaatgcatgttaa

SEQ ID NO: 647236 - DNA, 15 bp, Homo sapiens
gtaatgcatgttaat

SEQ ID NO: 647237 - DNA, 15 bp, Homo sapiens
taatgcatgttaatt

SEQ ID NO: 647238 - DNA, 15 bp, Homo sapiens
aatgcatgttaatta

SEQ ID NO: 647239 - DNA, 15 bp, Homo sapiens
atgcatgttaattat

SEQ ID NO: 647240 - DNA, 15 bp, Homo sapiens
tgcatgttaattatc

SEQ ID NO: 647241 - DNA, 15 bp, Homo sapiens
gcatgttaattatct

SEQ ID NO: 647242 - DNA, 15 bp, Homo sapiens
catgttaattatctt

SEQ ID NO: 647243 - DNA, 15 bp, Homo sapiens
atgttaattatcttg

SEQ ID NO: 647244 - DNA, 15 bp, Homo sapiens
tgttaattatcttga

SEQ ID NO: 647245 - DNA, 15 bp, Homo sapiens
gttaattatcttgat

SEQ ID NO: 647246 - DNA, 15 bp, Homo sapiens
ttaattatcttgatt

SEQ ID NO: 647247 - DNA, 15 bp, Homo sapiens
taattatcttgattt

SEQ ID NO: 647248 - DNA, 15 bp, Homo sapiens
aattatcttgattta

SEQ ID NO: 647249 - DNA, 15 bp, Homo sapiens
attatcttgatttag

SEQ ID NO: 647250 - DNA, 15 bp, Homo sapiens
ttatcttgatttagc

SEQ ID NO: 647251 - DNA, 15 bp, Homo sapiens
tatcttgatttagcc

SEQ ID NO: 647252 - DNA, 15 bp, Homo sapiens
atcttgatttagcca

SEQ ID NO: 647253 - DNA, 15 bp, Homo sapiens
tcttgatttagccat

SEQ ID NO: 647254 - DNA, 15 bp, Homo sapiens
cttgatttagccatt

SEQ ID NO: 647255 - DNA, 15 bp, Homo sapiens
ttgatttagccattc

SEQ ID NO: 647256 - DNA, 15 bp, Homo sapiens
tgatttagccattcc

SEQ ID NO: 647257 - DNA, 15 bp, Homo sapiens
gatttagccattcca

SEQ ID NO: 647258 - DNA, 15 bp, Homo sapiens
atttagccattccac

SEQ ID NO: 647259 - DNA, 15 bp, Homo sapiens
tttagccattccaca

SEQ ID NO: 647260 - DNA, 15 bp, Homo sapiens
ttagccattccacaa

SEQ ID NO: 647261 - DNA, 15 bp, Homo sapiens
tagccattccacaat

SEQ ID NO: 647262 - DNA, 15 bp, Homo sapiens
agccattccacaatt

SEQ ID NO: 647263 - DNA, 15 bp, Homo sapiens
gccattccacaattt

SEQ ID NO: 647264 - DNA, 15 bp, Homo sapiens
ccattccacaattta

SEQ ID NO: 647265 - DNA, 15 bp, Homo sapiens
cattccacaatttat

SEQ ID NO: 647266 - DNA, 15 bp, Homo sapiens
attccacaatttata

SEQ ID NO: 647267 - DNA, 15 bp, Homo sapiens
ttccacaatttatac

SEQ ID NO: 647268 - DNA, 15 bp, Homo sapiens
tccacaatttataca

SEQ ID NO: 647269 - DNA, 15 bp, Homo sapiens
ccacaatttatacat

SEQ ID NO: 647270 - DNA, 15 bp, Homo sapiens
cacaatttatacata

SEQ ID NO: 647271 - DNA, 15 bp, Homo sapiens
acaatttatacatac

SEQ ID NO: 647272 - DNA, 15 bp, Homo sapiens
caatttatacatact

SEQ ID NO: 647273 - DNA, 15 bp, Homo sapiens
aatttatacatactt

SEQ ID NO: 647274 - DNA, 15 bp, Homo sapiens
atttatacatacttc

SEQ ID NO: 647275 - DNA, 15 bp, Homo sapiens
tttatacatacttca

SEQ ID NO: 647276 - DNA, 15 bp, Homo sapiens
ttatacatacttcaa

SEQ ID NO: 647277 - DNA, 15 bp, Homo sapiens
tatacatacttcaaa

SEQ ID NO: 647278 - DNA, 15 bp, Homo sapiens
atacatacttcaaac

SEQ ID NO: 647279 - DNA, 15 bp, Homo sapiens
tacatacttcaaacc

SEQ ID NO: 647280 - DNA, 15 bp, Homo sapiens
acatacttcaaacca

SEQ ID NO: 647281 - DNA, 15 bp, Homo sapiens
catacttcaaaccat

SEQ ID NO: 647282 - DNA, 15 bp, Homo sapiens
atacttcaaaccatc

SEQ ID NO: 647283 - DNA, 15 bp, Homo sapiens
tacttcaaaccatca

SEQ ID NO: 647284 - DNA, 15 bp, Homo sapiens
acttcaaaccatcat

SEQ ID NO: 647285 - DNA, 15 bp, Homo sapiens
cttcaaaccatcatg

SEQ ID NO: 647286 - DNA, 15 bp, Homo sapiens
ttcaaaccatcatgt

SEQ ID NO: 647287 - DNA, 15 bp, Homo sapiens
tcaaaccatcatgtt

SEQ ID NO: 647288 - DNA, 15 bp, Homo sapiens
caaaccatcatgttg

SEQ ID NO: 647289 - DNA, 15 bp, Homo sapiens
aaaccatcatgttgt

SEQ ID NO: 647290 - DNA, 15 bp, Homo sapiens
aaccatcatgttgta

SEQ ID NO: 647291 - DNA, 15 bp, Homo sapiens
accatcatgttgtat

SEQ ID NO: 647292 - DNA, 15 bp, Homo sapiens
ccatcatgttgtata

SEQ ID NO: 647293 - DNA, 15 bp, Homo sapiens
catcatgttgtatac

SEQ ID NO: 647294 - DNA, 15 bp, Homo sapiens
atcatgttgtatacc

SEQ ID NO: 647295 - DNA, 15 bp, Homo sapiens
tcatgttgtatacca

SEQ ID NO: 647296 - DNA, 15 bp, Homo sapiens
catgttgtataccat

SEQ ID NO: 647297 - DNA, 15 bp, Homo sapiens
atgttgtataccata

SEQ ID NO: 647298 - DNA, 15 bp, Homo sapiens
tgttgtataccataa

SEQ ID NO: 647299 - DNA, 15 bp, Homo sapiens
gttgtataccataaa

SEQ ID NO: 647300 - DNA, 15 bp, Homo sapiens
ttgtataccataaat

SEQ ID NO: 647301 - DNA, 15 bp, Homo sapiens
tgtataccataaata

SEQ ID NO: 647302 - DNA, 15 bp, Homo sapiens
gtataccataaatat

SEQ ID NO: 647303 - DNA, 15 bp, Homo sapiens
tataccataaatata

SEQ ID NO: 647304 - DNA, 15 bp, Homo sapiens
ataccataaatatat

SEQ ID NO: 647305 - DNA, 15 bp, Homo sapiens
taccataaatatatg

SEQ ID NO: 647306 - DNA, 15 bp, Homo sapiens
accataaatatatgt

SEQ ID NO: 647307 - DNA, 15 bp, Homo sapiens
ccataaatatatgta

SEQ ID NO: 647308 - DNA, 15 bp, Homo sapiens
cataaatatatgtaa

SEQ ID NO: 647309 - DNA, 15 bp, Homo sapiens
ataaatatatgtaag

SEQ ID NO: 647310 - DNA, 15 bp, Homo sapiens
taaatatatgtaagt

SEQ ID NO: 647311 - DNA, 15 bp, Homo sapiens
aaatatatgtaagtt

SEQ ID NO: 647312 - DNA, 15 bp, Homo sapiens
aatatatgtaagttt

SEQ ID NO: 647313 - DNA, 15 bp, Homo sapiens
atatatgtaagtttt

SEQ ID NO: 647314 - DNA, 15 bp, Homo sapiens
tatatgtaagttttg

SEQ ID NO: 647315 - DNA, 15 bp, Homo sapiens
atatgtaagttttgt

SEQ ID NO: 647316 - DNA, 15 bp, Homo sapiens
tatgtaagttttgtc

SEQ ID NO: 647317 - DNA, 15 bp, Homo sapiens
atgtaagttttgtca

SEQ ID NO: 647318 - DNA, 15 bp, Homo sapiens
tgtaagttttgtcaa

SEQ ID NO: 647319 - DNA, 15 bp, Homo sapiens
gtaagttttgtcaat

SEQ ID NO: 647320 - DNA, 15 bp, Homo sapiens
taagttttgtcaatt

SEQ ID NO: 647321 - DNA, 15 bp, Homo sapiens
aagttttgtcaatta

SEQ ID NO: 647322 - DNA, 15 bp, Homo sapiens
agttttgtcaattaa

SEQ ID NO: 647323 - DNA, 15 bp, Homo sapiens
gttttgtcaattaaa

SEQ ID NO: 647324 - DNA, 15 bp, Homo sapiens
ttttgtcaattaaaa

SEQ ID NO: 647325 - DNA, 15 bp, Homo sapiens
tttgtcaattaaaaa

SEQ ID NO: 647326 - DNA, 15 bp, Homo sapiens
ttgtcaattaaaaaa

SEQ ID NO: 647327 - DNA, 15 bp, Homo sapiens
tgtcaattaaaaaat

SEQ ID NO: 647328 - DNA, 15 bp, Homo sapiens
gtcaattaaaaaata

SEQ ID NO: 647329 - DNA, 15 bp, Homo sapiens
tcaattaaaaaataa

SEQ ID NO: 647330 - DNA, 15 bp, Homo sapiens
caattaaaaaataat

SEQ ID NO: 647331 - DNA, 15 bp, Homo sapiens
aattaaaaaataata

SEQ ID NO: 647332 - DNA, 15 bp, Homo sapiens
attaaaaaataataa

SEQ ID NO: 647333 - DNA, 15 bp, Homo sapiens
ttaaaaaataataaa

SEQ ID NO: 647334 - DNA, 15 bp, Homo sapiens
taaaaaataataaag

SEQ ID NO: 647335 - DNA, 15 bp, Homo sapiens
aaaaaataataaaga

SEQ ID NO: 647336 - DNA, 15 bp, Homo sapiens
aaaaataataaagaa

SEQ ID NO: 647337 - DNA, 15 bp, Homo sapiens
aaaataataaagaaa

SEQ ID NO: 647338 - DNA, 15 bp, Homo sapiens
aaataataaagaaat

SEQ ID NO: 647339 - DNA, 15 bp, Homo sapiens
aataataaagaaatg

SEQ ID NO: 647340 - DNA, 15 bp, Homo sapiens
ataataaagaaatgc

SEQ ID NO: 647341 - DNA, 15 bp, Homo sapiens
taataaagaaatgcc

SEQ ID NO: 647342 - DNA, 15 bp, Homo sapiens
aataaagaaatgcca

SEQ ID NO: 647343 - DNA, 15 bp, Homo sapiens
ataaagaaatgccag

SEQ ID NO: 647344 - DNA, 15 bp, Homo sapiens
taaagaaatgccagc

SEQ ID NO: 647345 - DNA, 15 bp, Homo sapiens
aaagaaatgccagca

SEQ ID NO: 647346 - DNA, 15 bp, Homo sapiens
aagaaatgccagcat

SEQ ID NO: 647347 - DNA, 15 bp, Homo sapiens
agaaatgccagcatg

SEQ ID NO: 647348 - DNA, 15 bp, Homo sapiens
gaaatgccagcatga

SEQ ID NO: 647349 - DNA, 15 bp, Homo sapiens
aaatgccagcatgat

SEQ ID NO: 647350 - DNA, 15 bp, Homo sapiens
aatgccagcatgatt

SEQ ID NO: 647351 - DNA, 15 bp, Homo sapiens
atgccagcatgattc

SEQ ID NO: 647352 - DNA, 15 bp, Homo sapiens
tgccagcatgattca

SEQ ID NO: 647353 - DNA, 15 bp, Homo sapiens
gccagcatgattcaa

SEQ ID NO: 647354 - DNA, 15 bp, Homo sapiens
ccagcatgattcaaa

SEQ ID NO: 647355 - DNA, 15 bp, Homo sapiens
cagcatgattcaaaa

SEQ ID NO: 647356 - DNA, 15 bp, Homo sapiens
agcatgattcaaaat

SEQ ID NO: 647357 - DNA, 15 bp, Homo sapiens
gcatgattcaaaatg

SEQ ID NO: 647358 - DNA, 15 bp, Homo sapiens
catgattcaaaatgc

SEQ ID NO: 647359 - DNA, 15 bp, Homo sapiens
atgattcaaaatgct

SEQ ID NO: 647360 - DNA, 15 bp, Homo sapiens
tgattcaaaatgcta

SEQ ID NO: 647361 - DNA, 15 bp, Homo sapiens
gattcaaaatgctat

SEQ ID NO: 647362 - DNA, 15 bp, Homo sapiens
attcaaaatgctatt

SEQ ID NO: 647363 - DNA, 15 bp, Homo sapiens
ttcaaaatgctattt

SEQ ID NO: 647364 - DNA, 15 bp, Homo sapiens
tcaaaatgctatttc

SEQ ID NO: 647365 - DNA, 15 bp, Homo sapiens
caaaatgctatttca

SEQ ID NO: 647366 - DNA, 15 bp, Homo sapiens
aaaatgctatttcac

SEQ ID NO: 647367 - DNA, 15 bp, Homo sapiens
aaatgctatttcaca

SEQ ID NO: 647368 - DNA, 15 bp, Homo sapiens
aatgctatttcacac

SEQ ID NO: 647369 - DNA, 15 bp, Homo sapiens
atgctatttcacaca

SEQ ID NO: 647370 - DNA, 15 bp, Homo sapiens
tgctatttcacacat

SEQ ID NO: 647371 - DNA, 15 bp, Homo sapiens
gctatttcacacatt

SEQ ID NO: 647372 - DNA, 15 bp, Homo sapiens
ctatttcacacattt

SEQ ID NO: 647373 - DNA, 15 bp, Homo sapiens
tatttcacacatttt

SEQ ID NO: 647374 - DNA, 15 bp, Homo sapiens
atttcacacattttt

SEQ ID NO: 647375 - DNA, 15 bp, Homo sapiens
tttcacacattttta

SEQ ID NO: 647376 - DNA, 15 bp, Homo sapiens
ttcacacatttttat

SEQ ID NO: 647377 - DNA, 15 bp, Homo sapiens
tcacacatttttatt

SEQ ID NO: 647378 - DNA, 15 bp, Homo sapiens
cacacatttttattg

SEQ ID NO: 647379 - DNA, 15 bp, Homo sapiens
acacatttttattga

SEQ ID NO: 647380 - DNA, 15 bp, Homo sapiens
cacatttttattgaa

SEQ ID NO: 647381 - DNA, 15 bp, Homo sapiens
acatttttattgaac

SEQ ID NO: 647382 - DNA, 15 bp, Homo sapiens
catttttattgaaca

SEQ ID NO: 647383 - DNA, 15 bp, Homo sapiens
atttttattgaacac

SEQ ID NO: 647384 - DNA, 15 bp, Homo sapiens
tttttattgaacacc

SEQ ID NO: 647385 - DNA, 15 bp, Homo sapiens
ttttattgaacacct

SEQ ID NO: 647386 - DNA, 15 bp, Homo sapiens
tttattgaacacctt

SEQ ID NO: 647387 - DNA, 15 bp, Homo sapiens
ttattgaacaccttt

SEQ ID NO: 647388 - DNA, 15 bp, Homo sapiens
tattgaacacctttt

SEQ ID NO: 647389 - DNA, 15 bp, Homo sapiens
attgaacaccttttt

SEQ ID NO: 647390 - DNA, 15 bp, Homo sapiens
ttgaacaccttttta

SEQ ID NO: 647391 - DNA, 15 bp, Homo sapiens
tgaacacctttttaa

SEQ ID NO: 647392 - DNA, 15 bp, Homo sapiens
gaacacctttttaat

SEQ ID NO: 647393 - DNA, 15 bp, Homo sapiens
aacacctttttaatt

SEQ ID NO: 647394 - DNA, 15 bp, Homo sapiens
acacctttttaatta

SEQ ID NO: 647395 - DNA, 15 bp, Homo sapiens
cacctttttaattaa

SEQ ID NO: 647396 - DNA, 15 bp, Homo sapiens
acctttttaattaaa

SEQ ID NO: 647397 - DNA, 15 bp, Homo sapiens
cctttttaattaaac

SEQ ID NO: 647398 - DNA, 15 bp, Homo sapiens
ctttttaattaaaca

SEQ ID NO: 647399 - DNA, 15 bp, Homo sapiens
tttttaattaaacac

SEQ ID NO: 647400 - DNA, 15 bp, Homo sapiens
ttttaattaaacaca

SEQ ID NO: 647401 - DNA, 15 bp, Homo sapiens
tttaattaaacacac

SEQ ID NO: 647402 - DNA, 15 bp, Homo sapiens
ttaattaaacacact

SEQ ID NO: 647403 - DNA, 15 bp, Homo sapiens
taattaaacacactt

SEQ ID NO: 647404 - DNA, 15 bp, Homo sapiens
aattaaacacacttt

SEQ ID NO: 647405 - DNA, 15 bp, Homo sapiens
attaaacacacttta

SEQ ID NO: 647406 - DNA, 15 bp, Homo sapiens
ttaaacacactttat

SEQ ID NO: 647407 - DNA, 15 bp, Homo sapiens
taaacacactttatt

SEQ ID NO: 647408 - DNA, 15 bp, Homo sapiens
aaacacactttattc

SEQ ID NO: 647409 - DNA, 15 bp, Homo sapiens
aacacactttattca

SEQ ID NO: 647410 - DNA, 15 bp, Homo sapiens
acacactttattcag

SEQ ID NO: 647411 - DNA, 15 bp, Homo sapiens
cacactttattcagg

SEQ ID NO: 647412 - DNA, 15 bp, Homo sapiens
acactttattcaggt

SEQ ID NO: 647413 - DNA, 15 bp, Homo sapiens
cactttattcaggta

SEQ ID NO: 647414 - DNA, 15 bp, Homo sapiens
actttattcaggtac

SEQ ID NO: 647415 - DNA, 15 bp, Homo sapiens
ctttattcaggtact

SEQ ID NO: 647416 - DNA, 15 bp, Homo sapiens
tttattcaggtactg

SEQ ID NO: 647417 - DNA, 15 bp, Homo sapiens
ttattcaggtactgt

SEQ ID NO: 647418 - DNA, 15 bp, Homo sapiens
tattcaggtactgtg

SEQ ID NO: 647419 - DNA, 15 bp, Homo sapiens
attcaggtactgtgc

SEQ ID NO: 647420 - DNA, 15 bp, Homo sapiens
ttcaggtactgtgct

SEQ ID NO: 647421 - DNA, 15 bp, Homo sapiens
tcaggtactgtgcta

SEQ ID NO: 647422 - DNA, 15 bp, Homo sapiens
caggtactgtgctac

SEQ ID NO: 647423 - DNA, 15 bp, Homo sapiens
aggtactgtgctaca

SEQ ID NO: 647424 - DNA, 15 bp, Homo sapiens
ggtactgtgctacat

SEQ ID NO: 647425 - DNA, 15 bp, Homo sapiens
gtactgtgctacatg

SEQ ID NO: 647426 - DNA, 15 bp, Homo sapiens
tactgtgctacatgt

SEQ ID NO: 647427 - DNA, 15 bp, Homo sapiens
actgtgctacatgtt

SEQ ID NO: 647428 - DNA, 15 bp, Homo sapiens
ctgtgctacatgttc

SEQ ID NO: 647429 - DNA, 15 bp, Homo sapiens
tgtgctacatgttct

SEQ ID NO: 647430 - DNA, 15 bp, Homo sapiens
gtgctacatgttctt

SEQ ID NO: 647431 - DNA, 15 bp, Homo sapiens
tgctacatgttcttt

SEQ ID NO: 647432 - DNA, 15 bp, Homo sapiens
gctacatgttcttta

SEQ ID NO: 647433 - DNA, 15 bp, Homo sapiens
ctacatgttctttat

SEQ ID NO: 647434 - DNA, 15 bp, Homo sapiens
tacatgttctttata

SEQ ID NO: 647435 - DNA, 15 bp, Homo sapiens
acatgttctttataa

SEQ ID NO: 647436 - DNA, 15 bp, Homo sapiens
catgttctttataaa

SEQ ID NO: 647437 - DNA, 15 bp, Homo sapiens
atgttctttataaag

SEQ ID NO: 647438 - DNA, 15 bp, Homo sapiens
tgttctttataaagt

SEQ ID NO: 647439 - DNA, 15 bp, Homo sapiens
gttctttataaagtc

SEQ ID NO: 647440 - DNA, 15 bp, Homo sapiens
ttctttataaagtct

SEQ ID NO: 647441 - DNA, 15 bp, Homo sapiens
tctttataaagtctg

SEQ ID NO: 647442 - DNA, 15 bp, Homo sapiens
ctttataaagtctga

SEQ ID NO: 647443 - DNA, 15 bp, Homo sapiens
tttataaagtctgat

SEQ ID NO: 647444 - DNA, 15 bp, Homo sapiens
ttataaagtctgata

SEQ ID NO: 647445 - DNA, 15 bp, Homo sapiens
tataaagtctgataa

SEQ ID NO: 647446 - DNA, 15 bp, Homo sapiens
ataaagtctgataag

SEQ ID NO: 647447 - DNA, 15 bp, Homo sapiens
taaagtctgataaga

SEQ ID NO: 647448 - DNA, 15 bp, Homo sapiens
aaagtctgataagat

SEQ ID NO: 647449 - DNA, 15 bp, Homo sapiens
aagtctgataagatt

SEQ ID NO: 647450 - DNA, 15 bp, Homo sapiens
agtctgataagattt

SEQ ID NO: 647451 - DNA, 15 bp, Homo sapiens
gtctgataagatttc

SEQ ID NO: 647452 - DNA, 15 bp, Homo sapiens
tctgataagatttct

SEQ ID NO: 647453 - DNA, 15 bp, Homo sapiens
ctgataagatttcta

SEQ ID NO: 647454 - DNA, 15 bp, Homo sapiens
tgataagatttctat

SEQ ID NO: 647455 - DNA, 15 bp, Homo sapiens
gataagatttctatt

SEQ ID NO: 647456 - DNA, 15 bp, Homo sapiens
ataagatttctattt

SEQ ID NO: 647457 - DNA, 15 bp, Homo sapiens
taagatttctatttg

SEQ ID NO: 647458 - DNA, 15 bp, Homo sapiens
aagatttctatttgg

SEQ ID NO: 647459 - DNA, 15 bp, Homo sapiens
agatttctatttggt

SEQ ID NO: 647460 - DNA, 15 bp, Homo sapiens
gatttctatttggtc

SEQ ID NO: 647461 - DNA, 15 bp, Homo sapiens
atttctatttggtca

SEQ ID NO: 647462 - DNA, 15 bp, Homo sapiens
tttctatttggtcaa

SEQ ID NO: 647463 - DNA, 15 bp, Homo sapiens
ttctatttggtcaaa

SEQ ID NO: 647464 - DNA, 15 bp, Homo sapiens
tctatttggtcaaac

SEQ ID NO: 647465 - DNA, 15 bp, Homo sapiens
ctatttggtcaaaca

SEQ ID NO: 647466 - DNA, 15 bp, Homo sapiens
tatttggtcaaacag

SEQ ID NO: 647467 - DNA, 15 bp, Homo sapiens
atttggtcaaacagg

SEQ ID NO: 647468 - DNA, 15 bp, Homo sapiens
tttggtcaaacaggc

SEQ ID NO: 647469 - DNA, 15 bp, Homo sapiens
ttggtcaaacaggct

SEQ ID NO: 647470 - DNA, 15 bp, Homo sapiens
tggtcaaacaggctg

SEQ ID NO: 647471 - DNA, 15 bp, Homo sapiens
ggtcaaacaggctgg

SEQ ID NO: 647472 - DNA, 15 bp, Homo sapiens
gtcaaacaggctggg

SEQ ID NO: 647473 - DNA, 15 bp, Homo sapiens
tcaaacaggctgggc

SEQ ID NO: 647474 - DNA, 15 bp, Homo sapiens
caaacaggctgggca

SEQ ID NO: 647475 - DNA, 15 bp, Homo sapiens
aaacaggctgggcac

SEQ ID NO: 647476 - DNA, 15 bp, Homo sapiens
aacaggctgggcaca

SEQ ID NO: 647477 - DNA, 15 bp, Homo sapiens
acaggctgggcacag

SEQ ID NO: 647478 - DNA, 15 bp, Homo sapiens
caggctgggcacagt

SEQ ID NO: 647479 - DNA, 15 bp, Homo sapiens
aggctgggcacagtg

SEQ ID NO: 647480 - DNA, 15 bp, Homo sapiens
ggctgggcacagtgg

SEQ ID NO: 647481 - DNA, 15 bp, Homo sapiens
gctgggcacagtggc

SEQ ID NO: 647482 - DNA, 15 bp, Homo sapiens
ctgggcacagtggct

SEQ ID NO: 647483 - DNA, 15 bp, Homo sapiens
tgggcacagtggctc

SEQ ID NO: 647484 - DNA, 15 bp, Homo sapiens
gggcacagtggctca

SEQ ID NO: 647485 - DNA, 15 bp, Homo sapiens
ggcacagtggctcac

SEQ ID NO: 647486 - DNA, 15 bp, Homo sapiens
gcacagtggctcaca

SEQ ID NO: 647487 - DNA, 15 bp, Homo sapiens
cacagtggctcacac

SEQ ID NO: 647488 - DNA, 15 bp, Homo sapiens
acagtggctcacacc

SEQ ID NO: 647489 - DNA, 15 bp, Homo sapiens
cagtggctcacacct

SEQ ID NO: 647490 - DNA, 15 bp, Homo sapiens
agtggctcacacctg

SEQ ID NO: 647491 - DNA, 15 bp, Homo sapiens
gtggctcacacctgt

SEQ ID NO: 647492 - DNA, 15 bp, Homo sapiens
tggctcacacctgta

SEQ ID NO: 647493 - DNA, 15 bp, Homo sapiens
ggctcacacctgtaa

SEQ ID NO: 647494 - DNA, 15 bp, Homo sapiens
gctcacacctgtaat

SEQ ID NO: 647495 - DNA, 15 bp, Homo sapiens
ctcacacctgtaatc

SEQ ID NO: 647496 - DNA, 15 bp, Homo sapiens
tcacacctgtaatcc

SEQ ID NO: 647497 - DNA, 15 bp, Homo sapiens
cacacctgtaatccc

SEQ ID NO: 647498 - DNA, 15 bp, Homo sapiens
acacctgtaatccca

SEQ ID NO: 647499 - DNA, 15 bp, Homo sapiens
cacctgtaatcccag

SEQ ID NO: 647500 - DNA, 15 bp, Homo sapiens
acctgtaatcccagc

SEQ ID NO: 647501 - DNA, 15 bp, Homo sapiens
tggaaggccaaggca

SEQ ID NO: 647502 - DNA, 15 bp, Homo sapiens
ggaaggccaaggcag

SEQ ID NO: 647503 - DNA, 15 bp, Homo sapiens
gaaggccaaggcagg

SEQ ID NO: 647504 - DNA, 15 bp, Homo sapiens
aaggccaaggcaggt

SEQ ID NO: 647505 - DNA, 15 bp, Homo sapiens
aggccaaggcaggtg

SEQ ID NO: 647506 - DNA, 15 bp, Homo sapiens
ggccaaggcaggtgg

SEQ ID NO: 647507 - DNA, 15 bp, Homo sapiens
gccaaggcaggtgga

SEQ ID NO: 647508 - DNA, 15 bp, Homo sapiens
ccaaggcaggtggat

SEQ ID NO: 647509 - DNA, 15 bp, Homo sapiens
caaggcaggtggatt

SEQ ID NO: 647510 - DNA, 15 bp, Homo sapiens
aaggcaggtggattg

SEQ ID NO: 647511 - DNA, 15 bp, Homo sapiens
aggcaggtggattgc

SEQ ID NO: 647512 - DNA, 15 bp, Homo sapiens
ggcaggtggattgct

SEQ ID NO: 647513 - DNA, 15 bp, Homo sapiens
gcaggtggattgctt

SEQ ID NO: 647514 - DNA, 15 bp, Homo sapiens
caggtggattgcttg

SEQ ID NO: 647515 - DNA, 15 bp, Homo sapiens
aggtggattgcttga

SEQ ID NO: 647516 - DNA, 15 bp, Homo sapiens
gtggattgcttgagg

SEQ ID NO: 647517 - DNA, 15 bp, Homo sapiens
tggattgcttgaggc

SEQ ID NO: 647518 - DNA, 15 bp, Homo sapiens
ggattgcttgaggcc

SEQ ID NO: 647519 - DNA, 15 bp, Homo sapiens
gattgcttgaggcca

SEQ ID NO: 647520 - DNA, 15 bp, Homo sapiens
attgcttgaggccag

SEQ ID NO: 647521 - DNA, 15 bp, Homo sapiens
ttgcttgaggccagg

SEQ ID NO: 647522 - DNA, 15 bp, Homo sapiens
tgcttgaggccagga

SEQ ID NO: 647523 - DNA, 15 bp, Homo sapiens
gcttgaggccaggag

SEQ ID NO: 647524 - DNA, 15 bp, Homo sapiens
cttgaggccaggagt

SEQ ID NO: 647525 - DNA, 15 bp, Homo sapiens
ttgaggccaggagtt

SEQ ID NO: 647526 - DNA, 15 bp, Homo sapiens
tgaggccaggagttt

SEQ ID NO: 647527 - DNA, 15 bp, Homo sapiens
tgagaccagcctggg

SEQ ID NO: 647528 - DNA, 15 bp, Homo sapiens
gagaccagcctgggc

SEQ ID NO: 647529 - DNA, 15 bp, Homo sapiens
agaccagcctgggca

SEQ ID NO: 647530 - DNA, 15 bp, Homo sapiens
gaccagcctgggcaa

SEQ ID NO: 647531 - DNA, 15 bp, Homo sapiens
accagcctgggcaac

SEQ ID NO: 647532 - DNA, 15 bp, Homo sapiens
aacatggcaaaacct

SEQ ID NO: 647533 - DNA, 15 bp, Homo sapiens
acatggcaaaacctc

SEQ ID NO: 647534 - DNA, 15 bp, Homo sapiens
catggcaaaacctca

SEQ ID NO: 647535 - DNA, 15 bp, Homo sapiens
atggcaaaacctcat

SEQ ID NO: 647536 - DNA, 15 bp, Homo sapiens
tggcaaaacctcatc

SEQ ID NO: 647537 - DNA, 15 bp, Homo sapiens
ggcaaaacctcatct

SEQ ID NO: 647538 - DNA, 15 bp, Homo sapiens
gcaaaacctcatctc

SEQ ID NO: 647539 - DNA, 15 bp, Homo sapiens
caaaacctcatctct

SEQ ID NO: 647540 - DNA, 15 bp, Homo sapiens
aaaacctcatctcta

SEQ ID NO: 647541 - DNA, 15 bp, Homo sapiens
aaacctcatctctac

SEQ ID NO: 647542 - DNA, 15 bp, Homo sapiens
aacctcatctctaca

SEQ ID NO: 647543 - DNA, 15 bp, Homo sapiens
acctcatctctacaa

SEQ ID NO: 647544 - DNA, 15 bp, Homo sapiens
cctcatctctacaaa

SEQ ID NO: 647545 - DNA, 15 bp, Homo sapiens
ctcatctctacaaaa

SEQ ID NO: 647546 - DNA, 15 bp, Homo sapiens
tcatctctacaaaaa

SEQ ID NO: 647547 - DNA, 15 bp, Homo sapiens
tctctacaaaaaaat

SEQ ID NO: 647548 - DNA, 15 bp, Homo sapiens
ctctacaaaaaaata

SEQ ID NO: 647549 - DNA, 15 bp, Homo sapiens
tctacaaaaaaatac

SEQ ID NO: 647550 - DNA, 15 bp, Homo sapiens
ctacaaaaaaataca

SEQ ID NO: 647551 - DNA, 15 bp, Homo sapiens
tacaaaaaaatacag

SEQ ID NO: 647552 - DNA, 15 bp, Homo sapiens
acaaaaaaatacaga

SEQ ID NO: 647553 - DNA, 15 bp, Homo sapiens
caaaaaaatacagaa

SEQ ID NO: 647554 - DNA, 15 bp, Homo sapiens
aaaaaaatacagaaa

SEQ ID NO: 647555 - DNA, 15 bp, Homo sapiens
aaaaaatacagaaat

SEQ ID NO: 647556 - DNA, 15 bp, Homo sapiens
aaaaatacagaaatt

SEQ ID NO: 647557 - DNA, 15 bp, Homo sapiens
aaaatacagaaatta

SEQ ID NO: 647558 - DNA, 15 bp, Homo sapiens
aaatacagaaattaa

SEQ ID NO: 647559 - DNA, 15 bp, Homo sapiens
aatacagaaattaac

SEQ ID NO: 647560 - DNA, 15 bp, Homo sapiens
atacagaaattaacc

SEQ ID NO: 647561 - DNA, 15 bp, Homo sapiens
tacagaaattaacca

SEQ ID NO: 647562 - DNA, 15 bp, Homo sapiens
acagaaattaaccag

SEQ ID NO: 647563 - DNA, 15 bp, Homo sapiens
cagaaattaaccaga

SEQ ID NO: 647564 - DNA, 15 bp, Homo sapiens
agaaattaaccagac

SEQ ID NO: 647565 - DNA, 15 bp, Homo sapiens
gaaattaaccagaca

SEQ ID NO: 647566 - DNA, 15 bp, Homo sapiens
aaattaaccagacat

SEQ ID NO: 647567 - DNA, 15 bp, Homo sapiens
aattaaccagacatg

SEQ ID NO: 647568 - DNA, 15 bp, Homo sapiens
attaaccagacatgg

SEQ ID NO: 647569 - DNA, 15 bp, Homo sapiens
ttaaccagacatggt

SEQ ID NO: 647570 - DNA, 15 bp, Homo sapiens
taaccagacatggtg

SEQ ID NO: 647571 - DNA, 15 bp, Homo sapiens
aaccagacatggtgg

SEQ ID NO: 647572 - DNA, 15 bp, Homo sapiens
accagacatggtggt

SEQ ID NO: 647573 - DNA, 15 bp, Homo sapiens
ccagacatggtggtg

SEQ ID NO: 647574 - DNA, 15 bp, Homo sapiens
cagacatggtggtgt

SEQ ID NO: 647575 - DNA, 15 bp, Homo sapiens
agacatggtggtgta

SEQ ID NO: 647576 - DNA, 15 bp, Homo sapiens
gacatggtggtgtac

SEQ ID NO: 647577 - DNA, 15 bp, Homo sapiens
acatggtggtgtaca

SEQ ID NO: 647578 - DNA, 15 bp, Homo sapiens
catggtggtgtacac

SEQ ID NO: 647579 - DNA, 15 bp, Homo sapiens
atggtggtgtacacc

SEQ ID NO: 647580 - DNA, 15 bp, Homo sapiens
tggtggtgtacacct

SEQ ID NO: 647581 - DNA, 15 bp, Homo sapiens
ggtggtgtacacctg

SEQ ID NO: 647582 - DNA, 15 bp, Homo sapiens
gtggtgtacacctgt

SEQ ID NO: 647583 - DNA, 15 bp, Homo sapiens
tggtgtacacctgta

SEQ ID NO: 647584 - DNA, 15 bp, Homo sapiens
ggtgtacacctgtag

SEQ ID NO: 647585 - DNA, 15 bp, Homo sapiens
gtgtacacctgtagt

SEQ ID NO: 647586 - DNA, 15 bp, Homo sapiens
tgtacacctgtagtc

SEQ ID NO: 647587 - DNA, 15 bp, Homo sapiens
gtacacctgtagtcc

SEQ ID NO: 647588 - DNA, 15 bp, Homo sapiens
tacacctgtagtccc

SEQ ID NO: 647589 - DNA, 15 bp, Homo sapiens
acacctgtagtccca

SEQ ID NO: 647590 - DNA, 15 bp, Homo sapiens
cacctgtagtcccag

SEQ ID NO: 647591 - DNA, 15 bp, Homo sapiens
acctgtagtcccagc

SEQ ID NO: 647592 - DNA, 15 bp, Homo sapiens
tagtcccagctactt

SEQ ID NO: 647593 - DNA, 15 bp, Homo sapiens
agtcccagctacttg

SEQ ID NO: 647594 - DNA, 15 bp, Homo sapiens
gtcccagctacttgg

SEQ ID NO: 647595 - DNA, 15 bp, Homo sapiens
tcccagctacttggg

SEQ ID NO: 647596 - DNA, 15 bp, Homo sapiens
cccagctacttggga

SEQ ID NO: 647597 - DNA, 15 bp, Homo sapiens
ccagctacttgggag

SEQ ID NO: 647598 - DNA, 15 bp, Homo sapiens
cagctacttgggagg

SEQ ID NO: 647599 - DNA, 15 bp, Homo sapiens
agctacttgggaggc

SEQ ID NO: 647600 - DNA, 15 bp, Homo sapiens
gctacttgggaggct

SEQ ID NO: 647601 - DNA, 15 bp, Homo sapiens
ctacttgggaggctg

SEQ ID NO: 647602 - DNA, 15 bp, Homo sapiens
tacttgggaggctga

SEQ ID NO: 647603 - DNA, 15 bp, Homo sapiens
acttgggaggctgag

SEQ ID NO: 647604 - DNA, 15 bp, Homo sapiens
cttgggaggctgagg

SEQ ID NO: 647605 - DNA, 15 bp, Homo sapiens
ttgggaggctgaggt

SEQ ID NO: 647606 - DNA, 15 bp, Homo sapiens
tgggaggctgaggtg

SEQ ID NO: 647607 - DNA, 15 bp, Homo sapiens
gggaggctgaggtgg

SEQ ID NO: 647608 - DNA, 15 bp, Homo sapiens
ggaggctgaggtggg

SEQ ID NO: 647609 - DNA, 15 bp, Homo sapiens
gaggctgaggtggga

SEQ ID NO: 647610 - DNA, 15 bp, Homo sapiens
aggctgaggtgggag

SEQ ID NO: 647611 - DNA, 15 bp, Homo sapiens
ggctgaggtgggagg

SEQ ID NO: 647612 - DNA, 15 bp, Homo sapiens
gctgaggtgggagga

SEQ ID NO: 647613 - DNA, 15 bp, Homo sapiens
gaggtgggaggatca

SEQ ID NO: 647614 - DNA, 15 bp, Homo sapiens
aggtgggaggatcac

SEQ ID NO: 647615 - DNA, 15 bp, Homo sapiens
ggtgggaggatcacc

SEQ ID NO: 647616 - DNA, 15 bp, Homo sapiens
gtgggaggatcacct

SEQ ID NO: 647617 - DNA, 15 bp, Homo sapiens
tgggaggatcacctg

SEQ ID NO: 647618 - DNA, 15 bp, Homo sapiens
gggaggatcacctga

SEQ ID NO: 647619 - DNA, 15 bp, Homo sapiens
ggaggatcacctgat

SEQ ID NO: 647620 - DNA, 15 bp, Homo sapiens
gaggatcacctgatt

SEQ ID NO: 647621 - DNA, 15 bp, Homo sapiens
aggatcacctgattc

SEQ ID NO: 647622 - DNA, 15 bp, Homo sapiens
ggatcacctgattct

SEQ ID NO: 647623 - DNA, 15 bp, Homo sapiens
gatcacctgattctg

SEQ ID NO: 647624 - DNA, 15 bp, Homo sapiens
atcacctgattctgg

SEQ ID NO: 647625 - DNA, 15 bp, Homo sapiens
tcacctgattctggg

SEQ ID NO: 647626 - DNA, 15 bp, Homo sapiens
cacctgattctgggg

SEQ ID NO: 647627 - DNA, 15 bp, Homo sapiens
acctgattctgggga

SEQ ID NO: 647628 - DNA, 15 bp, Homo sapiens
cctgattctggggag

SEQ ID NO: 647629 - DNA, 15 bp, Homo sapiens
ctgattctggggagt

SEQ ID NO: 647630 - DNA, 15 bp, Homo sapiens
tgattctggggagtt

SEQ ID NO: 647631 - DNA, 15 bp, Homo sapiens
gattctggggagttt

SEQ ID NO: 647632 - DNA, 15 bp, Homo sapiens
attctggggagtttg

SEQ ID NO: 647633 - DNA, 15 bp, Homo sapiens
ttctggggagtttga

SEQ ID NO: 647634 - DNA, 15 bp, Homo sapiens
tctggggagtttgag

SEQ ID NO: 647635 - DNA, 15 bp, Homo sapiens
ctggggagtttgagg

SEQ ID NO: 647636 - DNA, 15 bp, Homo sapiens
tggggagtttgaggt

SEQ ID NO: 647637 - DNA, 15 bp, Homo sapiens
ggggagtttgaggtt

SEQ ID NO: 647638 - DNA, 15 bp, Homo sapiens
gggagtttgaggtta

SEQ ID NO: 647639 - DNA, 15 bp, Homo sapiens
ggagtttgaggttac

SEQ ID NO: 647640 - DNA, 15 bp, Homo sapiens
gagtttgaggttaca

SEQ ID NO: 647641 - DNA, 15 bp, Homo sapiens
agtttgaggttacag

SEQ ID NO: 647642 - DNA, 15 bp, Homo sapiens
gtttgaggttacagc

SEQ ID NO: 647643 - DNA, 15 bp, Homo sapiens
tttgaggttacagcg

SEQ ID NO: 647644 - DNA, 15 bp, Homo sapiens
ttgaggttacagcga

SEQ ID NO: 647645 - DNA, 15 bp, Homo sapiens
tgaggttacagcgag

SEQ ID NO: 647646 - DNA, 15 bp, Homo sapiens
gaggttacagcgagc

SEQ ID NO: 647647 - DNA, 15 bp, Homo sapiens
aggttacagcgagct

SEQ ID NO: 647648 - DNA, 15 bp, Homo sapiens
ggttacagcgagctg

SEQ ID NO: 647649 - DNA, 15 bp, Homo sapiens
gttacagcgagctgt

SEQ ID NO: 647650 - DNA, 15 bp, Homo sapiens
ttacagcgagctgtg

SEQ ID NO: 647651 - DNA, 15 bp, Homo sapiens
tacagcgagctgtga

SEQ ID NO: 647652 - DNA, 15 bp, Homo sapiens
acagcgagctgtgat

SEQ ID NO: 647653 - DNA, 15 bp, Homo sapiens
cagcgagctgtgatc

SEQ ID NO: 647654 - DNA, 15 bp, Homo sapiens
agcgagctgtgatca

SEQ ID NO: 647655 - DNA, 15 bp, Homo sapiens
gcgagctgtgatcat

SEQ ID NO: 647656 - DNA, 15 bp, Homo sapiens
cgagctgtgatcatg

SEQ ID NO: 647657 - DNA, 15 bp, Homo sapiens
gagctgtgatcatgc

SEQ ID NO: 647658 - DNA, 15 bp, Homo sapiens
agctgtgatcatgct

SEQ ID NO: 647659 - DNA, 15 bp, Homo sapiens
gctgtgatcatgcta

SEQ ID NO: 647660 - DNA, 15 bp, Homo sapiens
ctgtgatcatgctac

SEQ ID NO: 647661 - DNA, 15 bp, Homo sapiens
tgtgatcatgctact

SEQ ID NO: 647662 - DNA, 15 bp, Homo sapiens
gtgatcatgctactg

SEQ ID NO: 647663 - DNA, 15 bp, Homo sapiens
tgatcatgctactgc

SEQ ID NO: 647664 - DNA, 15 bp, Homo sapiens
gatcatgctactgca

SEQ ID NO: 647665 - DNA, 15 bp, Homo sapiens
atcatgctactgcac

SEQ ID NO: 647666 - DNA, 15 bp, Homo sapiens
tcatgctactgcact

SEQ ID NO: 647667 - DNA, 15 bp, Homo sapiens
catgctactgcactc

SEQ ID NO: 647668 - DNA, 15 bp, Homo sapiens
atgctactgcactcc

SEQ ID NO: 647669 - DNA, 15 bp, Homo sapiens
tgctactgcactcca

SEQ ID NO: 647670 - DNA, 15 bp, Homo sapiens
gctactgcactccag

SEQ ID NO: 647671 - DNA, 15 bp, Homo sapiens
ctactgcactccagc

SEQ ID NO: 647672 - DNA, 15 bp, Homo sapiens
tactgcactccagcc

SEQ ID NO: 647673 - DNA, 15 bp, Homo sapiens
tgcactccagcctga

SEQ ID NO: 647674 - DNA, 15 bp, Homo sapiens
gcactccagcctgaa

SEQ ID NO: 647675 - DNA, 15 bp, Homo sapiens
cactccagcctgaat

SEQ ID NO: 647676 - DNA, 15 bp, Homo sapiens
actccagcctgaatg

SEQ ID NO: 647677 - DNA, 15 bp, Homo sapiens
ctccagcctgaatga

SEQ ID NO: 647678 - DNA, 15 bp, Homo sapiens
tccagcctgaatgat

SEQ ID NO: 647679 - DNA, 15 bp, Homo sapiens
ccagcctgaatgatg

SEQ ID NO: 647680 - DNA, 15 bp, Homo sapiens
cagcctgaatgatgg

SEQ ID NO: 647681 - DNA, 15 bp, Homo sapiens
agcctgaatgatgga

SEQ ID NO: 647682 - DNA, 15 bp, Homo sapiens
gcctgaatgatggag

SEQ ID NO: 647683 - DNA, 15 bp, Homo sapiens
cctgaatgatggagt

SEQ ID NO: 647684 - DNA, 15 bp, Homo sapiens
ctgaatgatggagtg

SEQ ID NO: 647685 - DNA, 15 bp, Homo sapiens
tgaatgatggagtga

SEQ ID NO: 647686 - DNA, 15 bp, Homo sapiens
gaatgatggagtgag

SEQ ID NO: 647687 - DNA, 15 bp, Homo sapiens
aatgatggagtgaga

SEQ ID NO: 647688 - DNA, 15 bp, Homo sapiens
atgatggagtgagac

SEQ ID NO: 647689 - DNA, 15 bp, Homo sapiens
tgatggagtgagacc

SEQ ID NO: 647690 - DNA, 15 bp, Homo sapiens
gatggagtgagaccc

SEQ ID NO: 647691 - DNA, 15 bp, Homo sapiens
atggagtgagaccct

SEQ ID NO: 647692 - DNA, 15 bp, Homo sapiens
tggagtgagaccctg

SEQ ID NO: 647693 - DNA, 15 bp, Homo sapiens
ggagtgagaccctgt

SEQ ID NO: 647694 - DNA, 15 bp, Homo sapiens
gagtgagaccctgtc

SEQ ID NO: 647695 - DNA, 15 bp, Homo sapiens
tgagaccctgtctca

SEQ ID NO: 647696 - DNA, 15 bp, Homo sapiens
gagaccctgtctcaa

SEQ ID NO: 647697 - DNA, 15 bp, Homo sapiens
agaccctgtctcaaa

SEQ ID NO: 647698 - DNA, 15 bp, Homo sapiens
gaccctgtctcaaaa

SEQ ID NO: 647699 - DNA, 15 bp, Homo sapiens
accctgtctcaaaaa

SEQ ID NO: 647700 - DNA, 15 bp, Homo sapiens
ccctgtctcaaaaaa

SEQ ID NO: 647701 - DNA, 15 bp, Homo sapiens
cctgtctcaaaaaac

SEQ ID NO: 647702 - DNA, 15 bp, Homo sapiens
ctgtctcaaaaaaca

SEQ ID NO: 647703 - DNA, 15 bp, Homo sapiens
tgtctcaaaaaacaa

SEQ ID NO: 647704 - DNA, 15 bp, Homo sapiens
gtctcaaaaaacaaa

SEQ ID NO: 647705 - DNA, 15 bp, Homo sapiens
tctcaaaaaacaaat

SEQ ID NO: 647706 - DNA, 15 bp, Homo sapiens
ctcaaaaaacaaatt

SEQ ID NO: 647707 - DNA, 15 bp, Homo sapiens
tcaaaaaacaaatta

SEQ ID NO: 647708 - DNA, 15 bp, Homo sapiens
caaaaaacaaattag

SEQ ID NO: 647709 - DNA, 15 bp, Homo sapiens
aaaaaacaaattagt

SEQ ID NO: 647710 - DNA, 15 bp, Homo sapiens
aaaaacaaattagtg

SEQ ID NO: 647711 - DNA, 15 bp, Homo sapiens
aaaacaaattagtgt

SEQ ID NO: 647712 - DNA, 15 bp, Homo sapiens
aaacaaattagtgtt

SEQ ID NO: 647713 - DNA, 15 bp, Homo sapiens
aacaaattagtgttg

SEQ ID NO: 647714 - DNA, 15 bp, Homo sapiens
acaaattagtgttga

SEQ ID NO: 647715 - DNA, 15 bp, Homo sapiens
caaattagtgttgaa

SEQ ID NO: 647716 - DNA, 15 bp, Homo sapiens
aaattagtgttgaaa

SEQ ID NO: 647717 - DNA, 15 bp, Homo sapiens
aattagtgttgaaaa

SEQ ID NO: 647718 - DNA, 15 bp, Homo sapiens
attagtgttgaaaag

SEQ ID NO: 647719 - DNA, 15 bp, Homo sapiens
ttagtgttgaaaagt

SEQ ID NO: 647720 - DNA, 15 bp, Homo sapiens
tagtgttgaaaagtt

SEQ ID NO: 647721 - DNA, 15 bp, Homo sapiens
agtgttgaaaagtta

SEQ ID NO: 647722 - DNA, 15 bp, Homo sapiens
gtgttgaaaagttat

SEQ ID NO: 647723 - DNA, 15 bp, Homo sapiens
tgttgaaaagttata

SEQ ID NO: 647724 - DNA, 15 bp, Homo sapiens
gttgaaaagttatag

SEQ ID NO: 647725 - DNA, 15 bp, Homo sapiens
ttgaaaagttataga

SEQ ID NO: 647726 - DNA, 15 bp, Homo sapiens
tgaaaagttatagag

SEQ ID NO: 647727 - DNA, 15 bp, Homo sapiens
gaaaagttatagagc

SEQ ID NO: 647728 - DNA, 15 bp, Homo sapiens
aaaagttatagagca

SEQ ID NO: 647729 - DNA, 15 bp, Homo sapiens
aaagttatagagcat

SEQ ID NO: 647730 - DNA, 15 bp, Homo sapiens
aagttatagagcatt

SEQ ID NO: 647731 - DNA, 15 bp, Homo sapiens
agttatagagcatta

SEQ ID NO: 647732 - DNA, 15 bp, Homo sapiens
gttatagagcattat

SEQ ID NO: 647733 - DNA, 15 bp, Homo sapiens
ttatagagcattatt

SEQ ID NO: 647734 - DNA, 15 bp, Homo sapiens
tatagagcattattc

SEQ ID NO: 647735 - DNA, 15 bp, Homo sapiens
atagagcattattct

SEQ ID NO: 647736 - DNA, 15 bp, Homo sapiens
tagagcattattcta

SEQ ID NO: 647737 - DNA, 15 bp, Homo sapiens
agagcattattctag

SEQ ID NO: 647738 - DNA, 15 bp, Homo sapiens
gagcattattctaga

SEQ ID NO: 647739 - DNA, 15 bp, Homo sapiens
agcattattctagag

SEQ ID NO: 647740 - DNA, 15 bp, Homo sapiens
gcattattctagaga

SEQ ID NO: 647741 - DNA, 15 bp, Homo sapiens
cattattctagagat

SEQ ID NO: 647742 - DNA, 15 bp, Homo sapiens
attattctagagatt

SEQ ID NO: 647743 - DNA, 15 bp, Homo sapiens
ttattctagagatta

SEQ ID NO: 647744 - DNA, 15 bp, Homo sapiens
tattctagagattaa

SEQ ID NO: 647745 - DNA, 15 bp, Homo sapiens
attctagagattaac

SEQ ID NO: 647746 - DNA, 15 bp, Homo sapiens
ttctagagattaact

SEQ ID NO: 647747 - DNA, 15 bp, Homo sapiens
tctagagattaactc

SEQ ID NO: 647748 - DNA, 15 bp, Homo sapiens
ctagagattaactcc

SEQ ID NO: 647749 - DNA, 15 bp, Homo sapiens
tagagattaactccc

SEQ ID NO: 647750 - DNA, 15 bp, Homo sapiens
agagattaactccca

SEQ ID NO: 647751 - DNA, 15 bp, Homo sapiens
gagattaactcccag

SEQ ID NO: 647752 - DNA, 15 bp, Homo sapiens
agattaactcccagt

SEQ ID NO: 647753 - DNA, 15 bp, Homo sapiens
gattaactcccagtg

SEQ ID NO: 647754 - DNA, 15 bp, Homo sapiens
attaactcccagtga

SEQ ID NO: 647755 - DNA, 15 bp, Homo sapiens
ttaactcccagtgaa

SEQ ID NO: 647756 - DNA, 15 bp, Homo sapiens
taactcccagtgaaa

SEQ ID NO: 647757 - DNA, 15 bp, Homo sapiens
aactcccagtgaaaa

SEQ ID NO: 647758 - DNA, 15 bp, Homo sapiens
actcccagtgaaaag

SEQ ID NO: 647759 - DNA, 15 bp, Homo sapiens
ctcccagtgaaaaga

SEQ ID NO: 647760 - DNA, 15 bp, Homo sapiens
tcccagtgaaaagaa

SEQ ID NO: 647761 - DNA, 15 bp, Homo sapiens
cccagtgaaaagaaa

SEQ ID NO: 647762 - DNA, 15 bp, Homo sapiens
ccagtgaaaagaaaa

SEQ ID NO: 647763 - DNA, 15 bp, Homo sapiens
cagtgaaaagaaaaa

SEQ ID NO: 647764 - DNA, 15 bp, Homo sapiens
agtgaaaagaaaaac

SEQ ID NO: 647765 - DNA, 15 bp, Homo sapiens
gtgaaaagaaaaacc

SEQ ID NO: 647766 - DNA, 15 bp, Homo sapiens
tgaaaagaaaaaccc

SEQ ID NO: 647767 - DNA, 15 bp, Homo sapiens
gaaaagaaaaaccca

SEQ ID NO: 647768 - DNA, 15 bp, Homo sapiens
aaaagaaaaacccaa

SEQ ID NO: 647769 - DNA, 15 bp, Homo sapiens
aaagaaaaacccaaa

SEQ ID NO: 647770 - DNA, 15 bp, Homo sapiens
aagaaaaacccaaat

SEQ ID NO: 647771 - DNA, 15 bp, Homo sapiens
agaaaaacccaaatg

SEQ ID NO: 647772 - DNA, 15 bp, Homo sapiens
gaaaaacccaaatgg

SEQ ID NO: 647773 - DNA, 15 bp, Homo sapiens
aaaaacccaaatggc

SEQ ID NO: 647774 - DNA, 15 bp, Homo sapiens
aaaacccaaatggcc

SEQ ID NO: 647775 - DNA, 15 bp, Homo sapiens
aaacccaaatggcca

SEQ ID NO: 647776 - DNA, 15 bp, Homo sapiens
aacccaaatggccaa

SEQ ID NO: 647777 - DNA, 15 bp, Homo sapiens
acccaaatggccaaa

SEQ ID NO: 647778 - DNA, 15 bp, Homo sapiens
cccaaatggccaaaa

SEQ ID NO: 647779 - DNA, 15 bp, Homo sapiens
ccaaatggccaaaat

SEQ ID NO: 647780 - DNA, 15 bp, Homo sapiens
caaatggccaaaata

SEQ ID NO: 647781 - DNA, 15 bp, Homo sapiens
aaatggccaaaataa

SEQ ID NO: 647782 - DNA, 15 bp, Homo sapiens
aatggccaaaataat

SEQ ID NO: 647783 - DNA, 15 bp, Homo sapiens
atggccaaaataata

SEQ ID NO: 647784 - DNA, 15 bp, Homo sapiens
tggccaaaataatac

SEQ ID NO: 647785 - DNA, 15 bp, Homo sapiens
ggccaaaataataca

SEQ ID NO: 647786 - DNA, 15 bp, Homo sapiens
gccaaaataatacag

SEQ ID NO: 647787 - DNA, 15 bp, Homo sapiens
ccaaaataatacagt

SEQ ID NO: 647788 - DNA, 15 bp, Homo sapiens
caaaataatacagtt

SEQ ID NO: 647789 - DNA, 15 bp, Homo sapiens
aaaataatacagttg

SEQ ID NO: 647790 - DNA, 15 bp, Homo sapiens
aaataatacagttgt

SEQ ID NO: 647791 - DNA, 15 bp, Homo sapiens
aataatacagttgtc

SEQ ID NO: 647792 - DNA, 15 bp, Homo sapiens
ataatacagttgtcc

SEQ ID NO: 647793 - DNA, 15 bp, Homo sapiens
taatacagttgtcca

SEQ ID NO: 647794 - DNA, 15 bp, Homo sapiens
aatacagttgtccaa

SEQ ID NO: 647795 - DNA, 15 bp, Homo sapiens
atacagttgtccaaa

SEQ ID NO: 647796 - DNA, 15 bp, Homo sapiens
tacagttgtccaaaa

SEQ ID NO: 647797 - DNA, 15 bp, Homo sapiens
acagttgtccaaaat

SEQ ID NO: 647798 - DNA, 15 bp, Homo sapiens
cagttgtccaaaatg

SEQ ID NO: 647799 - DNA, 15 bp, Homo sapiens
agttgtccaaaatgt

SEQ ID NO: 647800 - DNA, 15 bp, Homo sapiens
gttgtccaaaatgta

SEQ ID NO: 647801 - DNA, 15 bp, Homo sapiens
ttgtccaaaatgtaa

SEQ ID NO: 647802 - DNA, 15 bp, Homo sapiens
tgtccaaaatgtaat

SEQ ID NO: 647803 - DNA, 15 bp, Homo sapiens
gtccaaaatgtaatt

SEQ ID NO: 647804 - DNA, 15 bp, Homo sapiens
tccaaaatgtaattt

SEQ ID NO: 647805 - DNA, 15 bp, Homo sapiens
ccaaaatgtaatttt

SEQ ID NO: 647806 - DNA, 15 bp, Homo sapiens
caaaatgtaattttg

SEQ ID NO: 647807 - DNA, 15 bp, Homo sapiens
aaaatgtaattttgt

SEQ ID NO: 647808 - DNA, 15 bp, Homo sapiens
aaatgtaattttgtt

SEQ ID NO: 647809 - DNA, 15 bp, Homo sapiens
aatgtaattttgttt

SEQ ID NO: 647810 - DNA, 15 bp, Homo sapiens
atgtaattttgttta

SEQ ID NO: 647811 - DNA, 15 bp, Homo sapiens
tgtaattttgtttat

SEQ ID NO: 647812 - DNA, 15 bp, Homo sapiens
gtaattttgtttatt

SEQ ID NO: 647813 - DNA, 15 bp, Homo sapiens
taattttgtttattc

SEQ ID NO: 647814 - DNA, 15 bp, Homo sapiens
aattttgtttattct

SEQ ID NO: 647815 - DNA, 15 bp, Homo sapiens
ttttgtttattcttt

SEQ ID NO: 647816 - DNA, 15 bp, Homo sapiens
tttgtttattcttta

SEQ ID NO: 647817 - DNA, 15 bp, Homo sapiens
ttgtttattctttaa

SEQ ID NO: 647818 - DNA, 15 bp, Homo sapiens
tgtttattctttaat

SEQ ID NO: 647819 - DNA, 15 bp, Homo sapiens
gtttattctttaatt

SEQ ID NO: 647820 - DNA, 15 bp, Homo sapiens
tttattctttaattt

SEQ ID NO: 647821 - DNA, 15 bp, Homo sapiens
ttattctttaattta

SEQ ID NO: 647822 - DNA, 15 bp, Homo sapiens
tattctttaatttat

SEQ ID NO: 647823 - DNA, 15 bp, Homo sapiens
attctttaatttatc

SEQ ID NO: 647824 - DNA, 15 bp, Homo sapiens
ttctttaatttatct

SEQ ID NO: 647825 - DNA, 15 bp, Homo sapiens
tctttaatttatctg

SEQ ID NO: 647826 - DNA, 15 bp, Homo sapiens
ctttaatttatctgg

SEQ ID NO: 647827 - DNA, 15 bp, Homo sapiens
tttaatttatctggt

SEQ ID NO: 647828 - DNA, 15 bp, Homo sapiens
ttaatttatctggta

SEQ ID NO: 647829 - DNA, 15 bp, Homo sapiens
taatttatctggtat

SEQ ID NO: 647830 - DNA, 15 bp, Homo sapiens
aatttatctggtatt

SEQ ID NO: 647831 - DNA, 15 bp, Homo sapiens
atttatctggtattt

SEQ ID NO: 647832 - DNA, 15 bp, Homo sapiens
tttatctggtattta

SEQ ID NO: 647833 - DNA, 15 bp, Homo sapiens
ttatctggtatttat

SEQ ID NO: 647834 - DNA, 15 bp, Homo sapiens
tatctggtatttatt

SEQ ID NO: 647835 - DNA, 15 bp, Homo sapiens
atctggtatttattg

SEQ ID NO: 647836 - DNA, 15 bp, Homo sapiens
tctggtatttattga

SEQ ID NO: 647837 - DNA, 15 bp, Homo sapiens
ctggtatttattgag

SEQ ID NO: 647838 - DNA, 15 bp, Homo sapiens
tggtatttattgagt

SEQ ID NO: 647839 - DNA, 15 bp, Homo sapiens
ggtatttattgagta

SEQ ID NO: 647840 - DNA, 15 bp, Homo sapiens
gtatttattgagtac

SEQ ID NO: 647841 - DNA, 15 bp, Homo sapiens
tatttattgagtact

SEQ ID NO: 647842 - DNA, 15 bp, Homo sapiens
atttattgagtactt

SEQ ID NO: 647843 - DNA, 15 bp, Homo sapiens
tttattgagtactta

SEQ ID NO: 647844 - DNA, 15 bp, Homo sapiens
ttattgagtacttac

SEQ ID NO: 647845 - DNA, 15 bp, Homo sapiens
tattgagtacttact

SEQ ID NO: 647846 - DNA, 15 bp, Homo sapiens
attgagtacttacta

SEQ ID NO: 647847 - DNA, 15 bp, Homo sapiens
ttgagtacttactac

SEQ ID NO: 647848 - DNA, 15 bp, Homo sapiens
tgagtacttactacg

SEQ ID NO: 647849 - DNA, 15 bp, Homo sapiens
gagtacttactacgt

SEQ ID NO: 647850 - DNA, 15 bp, Homo sapiens
agtacttactacgtg

SEQ ID NO: 647851 - DNA, 15 bp, Homo sapiens
gtacttactacgtgc

SEQ ID NO: 647852 - DNA, 15 bp, Homo sapiens
tacttactacgtgcc

SEQ ID NO: 647853 - DNA, 15 bp, Homo sapiens
acttactacgtgcca

SEQ ID NO: 647854 - DNA, 15 bp, Homo sapiens
cttactacgtgccat

SEQ ID NO: 647855 - DNA, 15 bp, Homo sapiens
ttactacgtgccatg

SEQ ID NO: 647856 - DNA, 15 bp, Homo sapiens
tactacgtgccatgc

SEQ ID NO: 647857 - DNA, 15 bp, Homo sapiens
actacgtgccatgct

SEQ ID NO: 647858 - DNA, 15 bp, Homo sapiens
ctacgtgccatgctt

SEQ ID NO: 647859 - DNA, 15 bp, Homo sapiens
tacgtgccatgcttt

SEQ ID NO: 647860 - DNA, 15 bp, Homo sapiens
acgtgccatgctttg

SEQ ID NO: 647861 - DNA, 15 bp, Homo sapiens
cgtgccatgctttga

SEQ ID NO: 647862 - DNA, 15 bp, Homo sapiens
gtgccatgctttgat

SEQ ID NO: 647863 - DNA, 15 bp, Homo sapiens
tgccatgctttgatt

SEQ ID NO: 647864 - DNA, 15 bp, Homo sapiens
gccatgctttgattt

SEQ ID NO: 647865 - DNA, 15 bp, Homo sapiens
ccatgctttgatttt

SEQ ID NO: 647866 - DNA, 15 bp, Homo sapiens
catgctttgattttt

SEQ ID NO: 647867 - DNA, 15 bp, Homo sapiens
atgctttgattttta

SEQ ID NO: 647868 - DNA, 15 bp, Homo sapiens
tgctttgatttttat

SEQ ID NO: 647869 - DNA, 15 bp, Homo sapiens
gctttgatttttata

SEQ ID NO: 647870 - DNA, 15 bp, Homo sapiens
ctttgatttttataa

SEQ ID NO: 647871 - DNA, 15 bp, Homo sapiens
tttgatttttataaa

SEQ ID NO: 647872 - DNA, 15 bp, Homo sapiens
ttgatttttataaaa

SEQ ID NO: 647873 - DNA, 15 bp, Homo sapiens
tgatttttataaaat

SEQ ID NO: 647874 - DNA, 15 bp, Homo sapiens
gatttttataaaata

SEQ ID NO: 647875 - DNA, 15 bp, Homo sapiens
atttttataaaatag

SEQ ID NO: 647876 - DNA, 15 bp, Homo sapiens
tttttataaaatagc

SEQ ID NO: 647877 - DNA, 15 bp, Homo sapiens
ttttataaaatagct

SEQ ID NO: 647878 - DNA, 15 bp, Homo sapiens
tttataaaatagcta

SEQ ID NO: 647879 - DNA, 15 bp, Homo sapiens
ttataaaatagctac

SEQ ID NO: 647880 - DNA, 15 bp, Homo sapiens
tataaaatagctacc

SEQ ID NO: 647881 - DNA, 15 bp, Homo sapiens
ataaaatagctacca

SEQ ID NO: 647882 - DNA, 15 bp, Homo sapiens
taaaatagctaccaa

SEQ ID NO: 647883 - DNA, 15 bp, Homo sapiens
aaaatagctaccaac

SEQ ID NO: 647884 - DNA, 15 bp, Homo sapiens
aaatagctaccaact

SEQ ID NO: 647885 - DNA, 15 bp, Homo sapiens
aatagctaccaactg

SEQ ID NO: 647886 - DNA, 15 bp, Homo sapiens
atagctaccaactga

SEQ ID NO: 647887 - DNA, 15 bp, Homo sapiens
tagctaccaactgaa

SEQ ID NO: 647888 - DNA, 15 bp, Homo sapiens
agctaccaactgaat

SEQ ID NO: 647889 - DNA, 15 bp, Homo sapiens
gctaccaactgaata

SEQ ID NO: 647890 - DNA, 15 bp, Homo sapiens
ctaccaactgaatag

SEQ ID NO: 647891 - DNA, 15 bp, Homo sapiens
taccaactgaatagc

SEQ ID NO: 647892 - DNA, 15 bp, Homo sapiens
accaactgaatagca

SEQ ID NO: 647893 - DNA, 15 bp, Homo sapiens
ccaactgaatagcaa

SEQ ID NO: 647894 - DNA, 15 bp, Homo sapiens
caactgaatagcaac

SEQ ID NO: 647895 - DNA, 15 bp, Homo sapiens
aactgaatagcaact

SEQ ID NO: 647896 - DNA, 15 bp, Homo sapiens
actgaatagcaactc

SEQ ID NO: 647897 - DNA, 15 bp, Homo sapiens
ctgaatagcaactct

SEQ ID NO: 647898 - DNA, 15 bp, Homo sapiens
tgaatagcaactctt

SEQ ID NO: 647899 - DNA, 15 bp, Homo sapiens
gaatagcaactctta

SEQ ID NO: 647900 - DNA, 15 bp, Homo sapiens
aatagcaactcttac

SEQ ID NO: 647901 - DNA, 15 bp, Homo sapiens
atagcaactcttact

SEQ ID NO: 647902 - DNA, 15 bp, Homo sapiens
tagcaactcttactt

SEQ ID NO: 647903 - DNA, 15 bp, Homo sapiens
agcaactcttacttt

SEQ ID NO: 647904 - DNA, 15 bp, Homo sapiens
gcaactcttacttta

SEQ ID NO: 647905 - DNA, 15 bp, Homo sapiens
caactcttactttat

SEQ ID NO: 647906 - DNA, 15 bp, Homo sapiens
aactcttactttatg

SEQ ID NO: 647907 - DNA, 15 bp, Homo sapiens
actcttactttatgt

SEQ ID NO: 647908 - DNA, 15 bp, Homo sapiens
ctcttactttatgtg

SEQ ID NO: 647909 - DNA, 15 bp, Homo sapiens
tcttactttatgtgt

SEQ ID NO: 647910 - DNA, 15 bp, Homo sapiens
cttactttatgtgtt

SEQ ID NO: 647911 - DNA, 15 bp, Homo sapiens
ttactttatgtgttg

SEQ ID NO: 647912 - DNA, 15 bp, Homo sapiens
tactttatgtgttgt

SEQ ID NO: 647913 - DNA, 15 bp, Homo sapiens
actttatgtgttgta

SEQ ID NO: 647914 - DNA, 15 bp, Homo sapiens
ctttatgtgttgtag

SEQ ID NO: 647915 - DNA, 15 bp, Homo sapiens
tttatgtgttgtaga

SEQ ID NO: 647916 - DNA, 15 bp, Homo sapiens
ttatgtgttgtagat

SEQ ID NO: 647917 - DNA, 15 bp, Homo sapiens
tatgtgttgtagatt

SEQ ID NO: 647918 - DNA, 15 bp, Homo sapiens
atgtgttgtagattt

SEQ ID NO: 647919 - DNA, 15 bp, Homo sapiens
tgtgttgtagatttg

SEQ ID NO: 647920 - DNA, 15 bp, Homo sapiens
gtgttgtagatttgg

SEQ ID NO: 647921 - DNA, 15 bp, Homo sapiens
tgttgtagatttggt

SEQ ID NO: 647922 - DNA, 15 bp, Homo sapiens
gttgtagatttggta

SEQ ID NO: 647923 - DNA, 15 bp, Homo sapiens
ttgtagatttggtaa

SEQ ID NO: 647924 - DNA, 15 bp, Homo sapiens
tgtagatttggtaag

SEQ ID NO: 647925 - DNA, 15 bp, Homo sapiens
gtagatttggtaaga

SEQ ID NO: 647926 - DNA, 15 bp, Homo sapiens
tagatttggtaagat

SEQ ID NO: 647927 - DNA, 15 bp, Homo sapiens
agatttggtaagatg

SEQ ID NO: 647928 - DNA, 15 bp, Homo sapiens
gatttggtaagatgg

SEQ ID NO: 647929 - DNA, 15 bp, Homo sapiens
atttggtaagatggt

SEQ ID NO: 647930 - DNA, 15 bp, Homo sapiens
tttggtaagatggtg

SEQ ID NO: 647931 - DNA, 15 bp, Homo sapiens
ttggtaagatggtgt

SEQ ID NO: 647932 - DNA, 15 bp, Homo sapiens
tggtaagatggtgtt

SEQ ID NO: 647933 - DNA, 15 bp, Homo sapiens
ggtaagatggtgtta

SEQ ID NO: 647934 - DNA, 15 bp, Homo sapiens
gtaagatggtgttat

SEQ ID NO: 647935 - DNA, 15 bp, Homo sapiens
taagatggtgttatt

SEQ ID NO: 647936 - DNA, 15 bp, Homo sapiens
aagatggtgttattc

SEQ ID NO: 647937 - DNA, 15 bp, Homo sapiens
agatggtgttattct

SEQ ID NO: 647938 - DNA, 15 bp, Homo sapiens
gatggtgttattctc

SEQ ID NO: 647939 - DNA, 15 bp, Homo sapiens
atggtgttattctca

SEQ ID NO: 647940 - DNA, 15 bp, Homo sapiens
tggtgttattctcag

SEQ ID NO: 647941 - DNA, 15 bp, Homo sapiens
ggtgttattctcagt

SEQ ID NO: 647942 - DNA, 15 bp, Homo sapiens
gtgttattctcagtt

SEQ ID NO: 647943 - DNA, 15 bp, Homo sapiens
tgttattctcagttg

SEQ ID NO: 647944 - DNA, 15 bp, Homo sapiens
gttattctcagttgc

SEQ ID NO: 647945 - DNA, 15 bp, Homo sapiens
ttattctcagttgct

SEQ ID NO: 647946 - DNA, 15 bp, Homo sapiens
tattctcagttgcta

SEQ ID NO: 647947 - DNA, 15 bp, Homo sapiens
attctcagttgctac

SEQ ID NO: 647948 - DNA, 15 bp, Homo sapiens
ttctcagttgctacc

SEQ ID NO: 647949 - DNA, 15 bp, Homo sapiens
tctcagttgctacca

SEQ ID NO: 647950 - DNA, 15 bp, Homo sapiens
ctcagttgctaccaa

SEQ ID NO: 647951 - DNA, 15 bp, Homo sapiens
tcagttgctaccaaa

SEQ ID NO: 647952 - DNA, 15 bp, Homo sapiens
cagttgctaccaaat

SEQ ID NO: 647953 - DNA, 15 bp, Homo sapiens
agttgctaccaaatc

SEQ ID NO: 647954 - DNA, 15 bp, Homo sapiens
gttgctaccaaatcc

SEQ ID NO: 647955 - DNA, 15 bp, Homo sapiens
ttgctaccaaatcca

SEQ ID NO: 647956 - DNA, 15 bp, Homo sapiens
tgctaccaaatccat

SEQ ID NO: 647957 - DNA, 15 bp, Homo sapiens
gctaccaaatccatc

SEQ ID NO: 647958 - DNA, 15 bp, Homo sapiens
ctaccaaatccatca

SEQ ID NO: 647959 - DNA, 15 bp, Homo sapiens
taccaaatccatcaa

SEQ ID NO: 647960 - DNA, 15 bp, Homo sapiens
accaaatccatcaag

SEQ ID NO: 647961 - DNA, 15 bp, Homo sapiens
ccaaatccatcaagt

SEQ ID NO: 647962 - DNA, 15 bp, Homo sapiens
caaatccatcaagta

SEQ ID NO: 647963 - DNA, 15 bp, Homo sapiens
aaatccatcaagtaa

SEQ ID NO: 647964 - DNA, 15 bp, Homo sapiens
aatccatcaagtaaa

SEQ ID NO: 647965 - DNA, 15 bp, Homo sapiens
atccatcaagtaaaa

SEQ ID NO: 647966 - DNA, 15 bp, Homo sapiens
tccatcaagtaaaaa

SEQ ID NO: 647967 - DNA, 15 bp, Homo sapiens
ccatcaagtaaaaaa

SEQ ID NO: 647968 - DNA, 15 bp, Homo sapiens
catcaagtaaaaaag

SEQ ID NO: 647969 - DNA, 15 bp, Homo sapiens
atcaagtaaaaaaga

SEQ ID NO: 647970 - DNA, 15 bp, Homo sapiens
tcaagtaaaaaagag

SEQ ID NO: 647971 - DNA, 15 bp, Homo sapiens
caagtaaaaaagaga

SEQ ID NO: 647972 - DNA, 15 bp, Homo sapiens
aagtaaaaaagagaa

SEQ ID NO: 647973 - DNA, 15 bp, Homo sapiens
agtaaaaaagagaat

SEQ ID NO: 647974 - DNA, 15 bp, Homo sapiens
gtaaaaaagagaata

SEQ ID NO: 647975 - DNA, 15 bp, Homo sapiens
taaaaaagagaatag

SEQ ID NO: 647976 - DNA, 15 bp, Homo sapiens
aaaaaagagaatagg

SEQ ID NO: 647977 - DNA, 15 bp, Homo sapiens
aaaaagagaatagga

SEQ ID NO: 647978 - DNA, 15 bp, Homo sapiens
aaaagagaataggat

SEQ ID NO: 647979 - DNA, 15 bp, Homo sapiens
aaagagaataggatt

SEQ ID NO: 647980 - DNA, 15 bp, Homo sapiens
aagagaataggattt

SEQ ID NO: 647981 - DNA, 15 bp, Homo sapiens
agagaataggattta

SEQ ID NO: 647982 - DNA, 15 bp, Homo sapiens
gagaataggatttac

SEQ ID NO: 647983 - DNA, 15 bp, Homo sapiens
agaataggatttaca

SEQ ID NO: 647984 - DNA, 15 bp, Homo sapiens
gaataggatttacaa

SEQ ID NO: 647985 - DNA, 15 bp, Homo sapiens
aataggatttacaac

SEQ ID NO: 647986 - DNA, 15 bp, Homo sapiens
ataggatttacaacc

SEQ ID NO: 647987 - DNA, 15 bp, Homo sapiens
taggatttacaacct

SEQ ID NO: 647988 - DNA, 15 bp, Homo sapiens
aggatttacaacctc

SEQ ID NO: 647989 - DNA, 15 bp, Homo sapiens
ggatttacaacctct

SEQ ID NO: 647990 - DNA, 15 bp, Homo sapiens
gatttacaacctctt

SEQ ID NO: 647991 - DNA, 15 bp, Homo sapiens
atttacaacctctta

SEQ ID NO: 647992 - DNA, 15 bp, Homo sapiens
tttacaacctcttat

SEQ ID NO: 647993 - DNA, 15 bp, Homo sapiens
ttacaacctcttatt

SEQ ID NO: 647994 - DNA, 15 bp, Homo sapiens
tacaacctcttatta

SEQ ID NO: 647995 - DNA, 15 bp, Homo sapiens
acaacctcttattat

SEQ ID NO: 647996 - DNA, 15 bp, Homo sapiens
caacctcttattatc

SEQ ID NO: 647997 - DNA, 15 bp, Homo sapiens
aacctcttattatcg

SEQ ID NO: 647998 - DNA, 15 bp, Homo sapiens
acctcttattatcgt

SEQ ID NO: 647999 - DNA, 15 bp, Homo sapiens
cctcttattatcgtc

SEQ ID NO: 648000 - DNA, 15 bp, Homo sapiens
ctcttattatcgtct

SEQ ID NO: 648001 - DNA, 15 bp, Homo sapiens
tcttattatcgtctt

SEQ ID NO: 648002 - DNA, 15 bp, Homo sapiens
cttattatcgtcttt

SEQ ID NO: 648003 - DNA, 15 bp, Homo sapiens
ttattatcgtctttt

SEQ ID NO: 648004 - DNA, 15 bp, Homo sapiens
tattatcgtcttttc

SEQ ID NO: 648005 - DNA, 15 bp, Homo sapiens
attatcgtcttttcc

SEQ ID NO: 648006 - DNA, 15 bp, Homo sapiens
ttatcgtcttttccc

SEQ ID NO: 648007 - DNA, 15 bp, Homo sapiens
tatcgtcttttcccc

SEQ ID NO: 648008 - DNA, 15 bp, Homo sapiens
atcgtcttttcccca

SEQ ID NO: 648009 - DNA, 15 bp, Homo sapiens
tcgtcttttccccac

SEQ ID NO: 648010 - DNA, 15 bp, Homo sapiens
cgtcttttccccact

SEQ ID NO: 648011 - DNA, 15 bp, Homo sapiens
gtcttttccccactt

SEQ ID NO: 648012 - DNA, 15 bp, Homo sapiens
tcttttccccacttc

SEQ ID NO: 648013 - DNA, 15 bp, Homo sapiens
cttttccccacttct

SEQ ID NO: 648014 - DNA, 15 bp, Homo sapiens
ttttccccacttctt

SEQ ID NO: 648015 - DNA, 15 bp, Homo sapiens
tttccccacttcttt

SEQ ID NO: 648016 - DNA, 15 bp, Homo sapiens
ttccccacttctttt

SEQ ID NO: 648017 - DNA, 15 bp, Homo sapiens
tccccacttcttttg

SEQ ID NO: 648018 - DNA, 15 bp, Homo sapiens
ccccacttcttttgg

SEQ ID NO: 648019 - DNA, 15 bp, Homo sapiens
cccacttcttttggt

SEQ ID NO: 648020 - DNA, 15 bp, Homo sapiens
ccacttcttttggtt

SEQ ID NO: 648021 - DNA, 15 bp, Homo sapiens
cacttcttttggttt

SEQ ID NO: 648022 - DNA, 15 bp, Homo sapiens
acttcttttggtttg

SEQ ID NO: 648023 - DNA, 15 bp, Homo sapiens
cttcttttggtttgt

SEQ ID NO: 648024 - DNA, 15 bp, Homo sapiens
ttcttttggtttgtg

SEQ ID NO: 648025 - DNA, 15 bp, Homo sapiens
tcttttggtttgtgg

SEQ ID NO: 648026 - DNA, 15 bp, Homo sapiens
cttttggtttgtgga

SEQ ID NO: 648027 - DNA, 15 bp, Homo sapiens
ttttggtttgtggag

SEQ ID NO: 648028 - DNA, 15 bp, Homo sapiens
tttggtttgtggagt

SEQ ID NO: 648029 - DNA, 15 bp, Homo sapiens
ttggtttgtggagtg

SEQ ID NO: 648030 - DNA, 15 bp, Homo sapiens
tggtttgtggagtga

SEQ ID NO: 648031 - DNA, 15 bp, Homo sapiens
ggtttgtggagtgag

SEQ ID NO: 648032 - DNA, 15 bp, Homo sapiens
gtttgtggagtgagg

SEQ ID NO: 648033 - DNA, 15 bp, Homo sapiens
tttgtggagtgaggt

SEQ ID NO: 648034 - DNA, 15 bp, Homo sapiens
ttgtggagtgaggtt

SEQ ID NO: 648035 - DNA, 15 bp, Homo sapiens
tgtggagtgaggttc

SEQ ID NO: 648036 - DNA, 15 bp, Homo sapiens
gtggagtgaggttcc

SEQ ID NO: 648037 - DNA, 15 bp, Homo sapiens
tggagtgaggttcct

SEQ ID NO: 648038 - DNA, 15 bp, Homo sapiens
ggagtgaggttcctt

SEQ ID NO: 648039 - DNA, 15 bp, Homo sapiens
gagtgaggttcctta

SEQ ID NO: 648040 - DNA, 15 bp, Homo sapiens
agtgaggttccttat

SEQ ID NO: 648041 - DNA, 15 bp, Homo sapiens
gtgaggttccttatt

SEQ ID NO: 648042 - DNA, 15 bp, Homo sapiens
tgaggttccttattt

SEQ ID NO: 648043 - DNA, 15 bp, Homo sapiens
gaggttccttatttc

SEQ ID NO: 648044 - DNA, 15 bp, Homo sapiens
aggttccttatttct

SEQ ID NO: 648045 - DNA, 15 bp, Homo sapiens
ggttccttatttctt

SEQ ID NO: 648046 - DNA, 15 bp, Homo sapiens
gttccttatttcttg

SEQ ID NO: 648047 - DNA, 15 bp, Homo sapiens
ttccttatttcttgt

SEQ ID NO: 648048 - DNA, 15 bp, Homo sapiens
tccttatttcttgta

SEQ ID NO: 648049 - DNA, 15 bp, Homo sapiens
ccttatttcttgtaa

SEQ ID NO: 648050 - DNA, 15 bp, Homo sapiens
cttatttcttgtaaa

SEQ ID NO: 648051 - DNA, 15 bp, Homo sapiens
ttatttcttgtaaaa

SEQ ID NO: 648052 - DNA, 15 bp, Homo sapiens
tatttcttgtaaaaa

SEQ ID NO: 648053 - DNA, 15 bp, Homo sapiens
atttcttgtaaaaaa

SEQ ID NO: 648054 - DNA, 15 bp, Homo sapiens
tttcttgtaaaaaat

SEQ ID NO: 648055 - DNA, 15 bp, Homo sapiens
ttcttgtaaaaaatt

SEQ ID NO: 648056 - DNA, 15 bp, Homo sapiens
tcttgtaaaaaattt

SEQ ID NO: 648057 - DNA, 15 bp, Homo sapiens
cttgtaaaaaatttc

SEQ ID NO: 648058 - DNA, 15 bp, Homo sapiens
ttgtaaaaaatttca

SEQ ID NO: 648059 - DNA, 15 bp, Homo sapiens
tgtaaaaaatttcag

SEQ ID NO: 648060 - DNA, 15 bp, Homo sapiens
gtaaaaaatttcagt

SEQ ID NO: 648061 - DNA, 15 bp, Homo sapiens
taaaaaatttcagta

SEQ ID NO: 648062 - DNA, 15 bp, Homo sapiens
aaaaaatttcagtag

SEQ ID NO: 648063 - DNA, 15 bp, Homo sapiens
aaaaatttcagtagc

SEQ ID NO: 648064 - DNA, 15 bp, Homo sapiens
aaaatttcagtagca

SEQ ID NO: 648065 - DNA, 15 bp, Homo sapiens
aaatttcagtagcat

SEQ ID NO: 648066 - DNA, 15 bp, Homo sapiens
aatttcagtagcata

SEQ ID NO: 648067 - DNA, 15 bp, Homo sapiens
atttcagtagcatat

SEQ ID NO: 648068 - DNA, 15 bp, Homo sapiens
tttcagtagcatatt

SEQ ID NO: 648069 - DNA, 15 bp, Homo sapiens
ttcagtagcatattt

SEQ ID NO: 648070 - DNA, 15 bp, Homo sapiens
tcagtagcatatttc

SEQ ID NO: 648071 - DNA, 15 bp, Homo sapiens
cagtagcatatttct

SEQ ID NO: 648072 - DNA, 15 bp, Homo sapiens
agtagcatatttctt

SEQ ID NO: 648073 - DNA, 15 bp, Homo sapiens
gtagcatatttcttc

SEQ ID NO: 648074 - DNA, 15 bp, Homo sapiens
tagcatatttcttcc

SEQ ID NO: 648075 - DNA, 15 bp, Homo sapiens
agcatatttcttcca

SEQ ID NO: 648076 - DNA, 15 bp, Homo sapiens
gcatatttcttccac

SEQ ID NO: 648077 - DNA, 15 bp, Homo sapiens
catatttcttccacc

SEQ ID NO: 648078 - DNA, 15 bp, Homo sapiens
atatttcttccacca

SEQ ID NO: 648079 - DNA, 15 bp, Homo sapiens
tatttcttccaccat

SEQ ID NO: 648080 - DNA, 15 bp, Homo sapiens
atttcttccaccatg

SEQ ID NO: 648081 - DNA, 15 bp, Homo sapiens
tttcttccaccatga

SEQ ID NO: 648082 - DNA, 15 bp, Homo sapiens
ttcttccaccatgaa

SEQ ID NO: 648083 - DNA, 15 bp, Homo sapiens
tcttccaccatgaaa

SEQ ID NO: 648084 - DNA, 15 bp, Homo sapiens
cttccaccatgaaag

SEQ ID NO: 648085 - DNA, 15 bp, Homo sapiens
ttccaccatgaaaga

SEQ ID NO: 648086 - DNA, 15 bp, Homo sapiens
tccaccatgaaagac

SEQ ID NO: 648087 - DNA, 15 bp, Homo sapiens
ccaccatgaaagaca

SEQ ID NO: 648088 - DNA, 15 bp, Homo sapiens
caccatgaaagacat

SEQ ID NO: 648089 - DNA, 15 bp, Homo sapiens
accatgaaagacatt

SEQ ID NO: 648090 - DNA, 15 bp, Homo sapiens
ccatgaaagacatta

SEQ ID NO: 648091 - DNA, 15 bp, Homo sapiens
catgaaagacattat

SEQ ID NO: 648092 - DNA, 15 bp, Homo sapiens
atgaaagacattatc

SEQ ID NO: 648093 - DNA, 15 bp, Homo sapiens
tgaaagacattatct

SEQ ID NO: 648094 - DNA, 15 bp, Homo sapiens
gaaagacattatctt

SEQ ID NO: 648095 - DNA, 15 bp, Homo sapiens
aaagacattatcttt

SEQ ID NO: 648096 - DNA, 15 bp, Homo sapiens
aagacattatctttt

SEQ ID NO: 648097 - DNA, 15 bp, Homo sapiens
agacattatctttta

SEQ ID NO: 648098 - DNA, 15 bp, Homo sapiens
gacattatcttttat

SEQ ID NO: 648099 - DNA, 15 bp, Homo sapiens
acattatcttttatt

SEQ ID NO: 648100 - DNA, 15 bp, Homo sapiens
cattatcttttattg

SEQ ID NO: 648101 - DNA, 15 bp, Homo sapiens
attatcttttattgt

SEQ ID NO: 648102 - DNA, 15 bp, Homo sapiens
ttatcttttattgtc

SEQ ID NO: 648103 - DNA, 15 bp, Homo sapiens
tatcttttattgtca

SEQ ID NO: 648104 - DNA, 15 bp, Homo sapiens
atcttttattgtcaa

SEQ ID NO: 648105 - DNA, 15 bp, Homo sapiens
tcttttattgtcaat

SEQ ID NO: 648106 - DNA, 15 bp, Homo sapiens
cttttattgtcaata

SEQ ID NO: 648107 - DNA, 15 bp, Homo sapiens
ttttattgtcaataa

SEQ ID NO: 648108 - DNA, 15 bp, Homo sapiens
tttattgtcaataaa

SEQ ID NO: 648109 - DNA, 15 bp, Homo sapiens
ttattgtcaataaaa

SEQ ID NO: 648110 - DNA, 15 bp, Homo sapiens
tattgtcaataaaag

SEQ ID NO: 648111 - DNA, 15 bp, Homo sapiens
attgtcaataaaaga

SEQ ID NO: 648112 - DNA, 15 bp, Homo sapiens
ttgtcaataaaagag

SEQ ID NO: 648113 - DNA, 15 bp, Homo sapiens
tgtcaataaaagaga

SEQ ID NO: 648114 - DNA, 15 bp, Homo sapiens
gtcaataaaagagac

SEQ ID NO: 648115 - DNA, 15 bp, Homo sapiens
tcaataaaagagaca

SEQ ID NO: 648116 - DNA, 15 bp, Homo sapiens
caataaaagagacag

SEQ ID NO: 648117 - DNA, 15 bp, Homo sapiens
aataaaagagacagt

SEQ ID NO: 648118 - DNA, 15 bp, Homo sapiens
ataaaagagacagtg

SEQ ID NO: 648119 - DNA, 15 bp, Homo sapiens
taaaagagacagtgt

SEQ ID NO: 648120 - DNA, 15 bp, Homo sapiens
aaaagagacagtgta

SEQ ID NO: 648121 - DNA, 15 bp, Homo sapiens
aaagagacagtgtag

SEQ ID NO: 648122 - DNA, 15 bp, Homo sapiens
aagagacagtgtagt

SEQ ID NO: 648123 - DNA, 15 bp, Homo sapiens
agagacagtgtagtg

SEQ ID NO: 648124 - DNA, 15 bp, Homo sapiens
gagacagtgtagtgt

SEQ ID NO: 648125 - DNA, 15 bp, Homo sapiens
agacagtgtagtgtt

SEQ ID NO: 648126 - DNA, 15 bp, Homo sapiens
gacagtgtagtgttt

SEQ ID NO: 648127 - DNA, 15 bp, Homo sapiens
acagtgtagtgtttt

SEQ ID NO: 648128 - DNA, 15 bp, Homo sapiens
cagtgtagtgtttta

SEQ ID NO: 648129 - DNA, 15 bp, Homo sapiens
agtgtagtgttttaa

SEQ ID NO: 648130 - DNA, 15 bp, Homo sapiens
gtgtagtgttttaaa

SEQ ID NO: 648131 - DNA, 15 bp, Homo sapiens
tgtagtgttttaaaa

SEQ ID NO: 648132 - DNA, 15 bp, Homo sapiens
gtagtgttttaaaaa

SEQ ID NO: 648133 - DNA, 15 bp, Homo sapiens
tagtgttttaaaaat

SEQ ID NO: 648134 - DNA, 15 bp, Homo sapiens
agtgttttaaaaatg

SEQ ID NO: 648135 - DNA, 15 bp, Homo sapiens
gtgttttaaaaatgg

SEQ ID NO: 648136 - DNA, 15 bp, Homo sapiens
tgttttaaaaatggt

SEQ ID NO: 648137 - DNA, 15 bp, Homo sapiens
gttttaaaaatggta

SEQ ID NO: 648138 - DNA, 15 bp, Homo sapiens
ttttaaaaatggtaa

SEQ ID NO: 648139 - DNA, 15 bp, Homo sapiens
tttaaaaatggtaac

SEQ ID NO: 648140 - DNA, 15 bp, Homo sapiens
ttaaaaatggtaaca

SEQ ID NO: 648141 - DNA, 15 bp, Homo sapiens
taaaaatggtaacaa

SEQ ID NO: 648142 - DNA, 15 bp, Homo sapiens
aaaaatggtaacaaa

SEQ ID NO: 648143 - DNA, 15 bp, Homo sapiens
aaaatggtaacaaac

SEQ ID NO: 648144 - DNA, 15 bp, Homo sapiens
aaatggtaacaaaca

SEQ ID NO: 648145 - DNA, 15 bp, Homo sapiens
aatggtaacaaacat

SEQ ID NO: 648146 - DNA, 15 bp, Homo sapiens
atggtaacaaacata

SEQ ID NO: 648147 - DNA, 15 bp, Homo sapiens
tggtaacaaacatag

SEQ ID NO: 648148 - DNA, 15 bp, Homo sapiens
ggtaacaaacatagg

SEQ ID NO: 648149 - DNA, 15 bp, Homo sapiens
gtaacaaacatagga

SEQ ID NO: 648150 - DNA, 15 bp, Homo sapiens
taacaaacataggat

SEQ ID NO: 648151 - DNA, 15 bp, Homo sapiens
aacaaacataggata

SEQ ID NO: 648152 - DNA, 15 bp, Homo sapiens
acaaacataggatag

SEQ ID NO: 648153 - DNA, 15 bp, Homo sapiens
caaacataggataga

SEQ ID NO: 648154 - DNA, 15 bp, Homo sapiens
aaacataggatagac

SEQ ID NO: 648155 - DNA, 15 bp, Homo sapiens
aacataggatagacc

SEQ ID NO: 648156 - DNA, 15 bp, Homo sapiens
acataggatagacct

SEQ ID NO: 648157 - DNA, 15 bp, Homo sapiens
cataggatagacctt

SEQ ID NO: 648158 - DNA, 15 bp, Homo sapiens
ataggatagaccttc

SEQ ID NO: 648159 - DNA, 15 bp, Homo sapiens
taggatagaccttca

SEQ ID NO: 648160 - DNA, 15 bp, Homo sapiens
aggatagaccttcag

SEQ ID NO: 648161 - DNA, 15 bp, Homo sapiens
ggatagaccttcagt

SEQ ID NO: 648162 - DNA, 15 bp, Homo sapiens
gatagaccttcagtt

SEQ ID NO: 648163 - DNA, 15 bp, Homo sapiens
atagaccttcagttt

SEQ ID NO: 648164 - DNA, 15 bp, Homo sapiens
tagaccttcagtttg

SEQ ID NO: 648165 - DNA, 15 bp, Homo sapiens
agaccttcagtttgt

SEQ ID NO: 648166 - DNA, 15 bp, Homo sapiens
gaccttcagtttgtg

SEQ ID NO: 648167 - DNA, 15 bp, Homo sapiens
accttcagtttgtgt

SEQ ID NO: 648168 - DNA, 15 bp, Homo sapiens
ccttcagtttgtgtc

SEQ ID NO: 648169 - DNA, 15 bp, Homo sapiens
cttcagtttgtgtcc

SEQ ID NO: 648170 - DNA, 15 bp, Homo sapiens
ttcagtttgtgtcct

SEQ ID NO: 648171 - DNA, 15 bp, Homo sapiens
tcagtttgtgtcctg

SEQ ID NO: 648172 - DNA, 15 bp, Homo sapiens
cagtttgtgtcctgc

SEQ ID NO: 648173 - DNA, 15 bp, Homo sapiens
agtttgtgtcctgca

SEQ ID NO: 648174 - DNA, 15 bp, Homo sapiens
gtttgtgtcctgcaa

SEQ ID NO: 648175 - DNA, 15 bp, Homo sapiens
tttgtgtcctgcaaa

SEQ ID NO: 648176 - DNA, 15 bp, Homo sapiens
ttgtgtcctgcaaaa

SEQ ID NO: 648177 - DNA, 15 bp, Homo sapiens
tgtgtcctgcaaaag

SEQ ID NO: 648178 - DNA, 15 bp, Homo sapiens
gtgtcctgcaaaagg

SEQ ID NO: 648179 - DNA, 15 bp, Homo sapiens
tgtcctgcaaaaggt

SEQ ID NO: 648180 - DNA, 15 bp, Homo sapiens
gtcctgcaaaaggtt

SEQ ID NO: 648181 - DNA, 15 bp, Homo sapiens
tcctgcaaaaggtta

SEQ ID NO: 648182 - DNA, 15 bp, Homo sapiens
cctgcaaaaggttaa

SEQ ID NO: 648183 - DNA, 15 bp, Homo sapiens
ctgcaaaaggttaaa

SEQ ID NO: 648184 - DNA, 15 bp, Homo sapiens
tgcaaaaggttaaaa

SEQ ID NO: 648185 - DNA, 15 bp, Homo sapiens
gcaaaaggttaaaag

SEQ ID NO: 648186 - DNA, 15 bp, Homo sapiens
caaaaggttaaaagt

SEQ ID NO: 648187 - DNA, 15 bp, Homo sapiens
aaaaggttaaaagtt

SEQ ID NO: 648188 - DNA, 15 bp, Homo sapiens
aaaggttaaaagttc

SEQ ID NO: 648189 - DNA, 15 bp, Homo sapiens
aaggttaaaagttct

SEQ ID NO: 648190 - DNA, 15 bp, Homo sapiens
aggttaaaagttctc

SEQ ID NO: 648191 - DNA, 15 bp, Homo sapiens
ggttaaaagttctcc

SEQ ID NO: 648192 - DNA, 15 bp, Homo sapiens
gttaaaagttctcca

SEQ ID NO: 648193 - DNA, 15 bp, Homo sapiens
ttaaaagttctccat

SEQ ID NO: 648194 - DNA, 15 bp, Homo sapiens
taaaagttctccatg

SEQ ID NO: 648195 - DNA, 15 bp, Homo sapiens
aaaagttctccatga

SEQ ID NO: 648196 - DNA, 15 bp, Homo sapiens
aaagttctccatgaa

SEQ ID NO: 648197 - DNA, 15 bp, Homo sapiens
aagttctccatgaat

SEQ ID NO: 648198 - DNA, 15 bp, Homo sapiens
agttctccatgaatt

SEQ ID NO: 648199 - DNA, 15 bp, Homo sapiens
gttctccatgaattc

SEQ ID NO: 648200 - DNA, 15 bp, Homo sapiens
ttctccatgaattca

SEQ ID NO: 648201 - DNA, 15 bp, Homo sapiens
tctccatgaattcaa

SEQ ID NO: 648202 - DNA, 15 bp, Homo sapiens
ctccatgaattcaat

SEQ ID NO: 648203 - DNA, 15 bp, Homo sapiens
tccatgaattcaatt

SEQ ID NO: 648204 - DNA, 15 bp, Homo sapiens
ccatgaattcaattc

SEQ ID NO: 648205 - DNA, 15 bp, Homo sapiens
catgaattcaattcc

SEQ ID NO: 648206 - DNA, 15 bp, Homo sapiens
atgaattcaattcct

SEQ ID NO: 648207 - DNA, 15 bp, Homo sapiens
tgaattcaattcctg

SEQ ID NO: 648208 - DNA, 15 bp, Homo sapiens
gaattcaattcctga

SEQ ID NO: 648209 - DNA, 15 bp, Homo sapiens
aattcaattcctgag

SEQ ID NO: 648210 - DNA, 15 bp, Homo sapiens
attcaattcctgaga

SEQ ID NO: 648211 - DNA, 15 bp, Homo sapiens
ttcaattcctgagat

SEQ ID NO: 648212 - DNA, 15 bp, Homo sapiens
tcaattcctgagatg

SEQ ID NO: 648213 - DNA, 15 bp, Homo sapiens
caattcctgagatgt

SEQ ID NO: 648214 - DNA, 15 bp, Homo sapiens
aattcctgagatgta

SEQ ID NO: 648215 - DNA, 15 bp, Homo sapiens
attcctgagatgtag

SEQ ID NO: 648216 - DNA, 15 bp, Homo sapiens
ttcctgagatgtagg

SEQ ID NO: 648217 - DNA, 15 bp, Homo sapiens
tcctgagatgtagga

SEQ ID NO: 648218 - DNA, 15 bp, Homo sapiens
cctgagatgtaggaa

SEQ ID NO: 648219 - DNA, 15 bp, Homo sapiens
ctgagatgtaggaag

SEQ ID NO: 648220 - DNA, 15 bp, Homo sapiens
tgagatgtaggaagg

SEQ ID NO: 648221 - DNA, 15 bp, Homo sapiens
gagatgtaggaaggc

SEQ ID NO: 648222 - DNA, 15 bp, Homo sapiens
agatgtaggaaggca

SEQ ID NO: 648223 - DNA, 15 bp, Homo sapiens
gatgtaggaaggcag

SEQ ID NO: 648224 - DNA, 15 bp, Homo sapiens
atgtaggaaggcagt

SEQ ID NO: 648225 - DNA, 15 bp, Homo sapiens
tgtaggaaggcagtt

SEQ ID NO: 648226 - DNA, 15 bp, Homo sapiens
gtaggaaggcagttt

SEQ ID NO: 648227 - DNA, 15 bp, Homo sapiens
taggaaggcagtttc

SEQ ID NO: 648228 - DNA, 15 bp, Homo sapiens
aggaaggcagtttca

SEQ ID NO: 648229 - DNA, 15 bp, Homo sapiens
ggaaggcagtttcag

SEQ ID NO: 648230 - DNA, 15 bp, Homo sapiens
gaaggcagtttcaga

SEQ ID NO: 648231 - DNA, 15 bp, Homo sapiens
aaggcagtttcagaa

SEQ ID NO: 648232 - DNA, 15 bp, Homo sapiens
aggcagtttcagaat

SEQ ID NO: 648233 - DNA, 15 bp, Homo sapiens
ggcagtttcagaatg

SEQ ID NO: 648234 - DNA, 15 bp, Homo sapiens
gcagtttcagaatgc

SEQ ID NO: 648235 - DNA, 15 bp, Homo sapiens
cagtttcagaatgcc

SEQ ID NO: 648236 - DNA, 15 bp, Homo sapiens
agtttcagaatgcct

SEQ ID NO: 648237 - DNA, 15 bp, Homo sapiens
gtttcagaatgcctg

SEQ ID NO: 648238 - DNA, 15 bp, Homo sapiens
tttcagaatgcctga

SEQ ID NO: 648239 - DNA, 15 bp, Homo sapiens
ttcagaatgcctgag

SEQ ID NO: 648240 - DNA, 15 bp, Homo sapiens
tcagaatgcctgagc

SEQ ID NO: 648241 - DNA, 15 bp, Homo sapiens
cagaatgcctgagct

SEQ ID NO: 648242 - DNA, 15 bp, Homo sapiens
agaatgcctgagcta

SEQ ID NO: 648243 - DNA, 15 bp, Homo sapiens
gaatgcctgagctat

SEQ ID NO: 648244 - DNA, 15 bp, Homo sapiens
aatgcctgagctata

SEQ ID NO: 648245 - DNA, 15 bp, Homo sapiens
atgcctgagctatat

SEQ ID NO: 648246 - DNA, 15 bp, Homo sapiens
tgcctgagctatata

SEQ ID NO: 648247 - DNA, 15 bp, Homo sapiens
gcctgagctatatat

SEQ ID NO: 648248 - DNA, 15 bp, Homo sapiens
cctgagctatatatg

SEQ ID NO: 648249 - DNA, 15 bp, Homo sapiens
ctgagctatatatga

SEQ ID NO: 648250 - DNA, 15 bp, Homo sapiens
tgagctatatatgag

SEQ ID NO: 648251 - DNA, 15 bp, Homo sapiens
gagctatatatgaga

SEQ ID NO: 648252 - DNA, 15 bp, Homo sapiens
agctatatatgagac

SEQ ID NO: 648253 - DNA, 15 bp, Homo sapiens
gctatatatgagaca

SEQ ID NO: 648254 - DNA, 15 bp, Homo sapiens
ctatatatgagacaa

SEQ ID NO: 648255 - DNA, 15 bp, Homo sapiens
tatatatgagacaaa

SEQ ID NO: 648256 - DNA, 15 bp, Homo sapiens
atatatgagacaaag

SEQ ID NO: 648257 - DNA, 15 bp, Homo sapiens
tatatgagacaaagc

SEQ ID NO: 648258 - DNA, 15 bp, Homo sapiens
atatgagacaaagcc

SEQ ID NO: 648259 - DNA, 15 bp, Homo sapiens
tatgagacaaagccc

SEQ ID NO: 648260 - DNA, 15 bp, Homo sapiens
atgagacaaagccca

SEQ ID NO: 648261 - DNA, 15 bp, Homo sapiens
tgagacaaagcccat

SEQ ID NO: 648262 - DNA, 15 bp, Homo sapiens
gagacaaagcccatt

SEQ ID NO: 648263 - DNA, 15 bp, Homo sapiens
agacaaagcccattg

SEQ ID NO: 648264 - DNA, 15 bp, Homo sapiens
gacaaagcccattgt

SEQ ID NO: 648265 - DNA, 15 bp, Homo sapiens
acaaagcccattgtt

SEQ ID NO: 648266 - DNA, 15 bp, Homo sapiens
caaagcccattgtta

SEQ ID NO: 648267 - DNA, 15 bp, Homo sapiens
aaagcccattgttaa

SEQ ID NO: 648268 - DNA, 15 bp, Homo sapiens
aagcccattgttaat

SEQ ID NO: 648269 - DNA, 15 bp, Homo sapiens
agcccattgttaatg

SEQ ID NO: 648270 - DNA, 15 bp, Homo sapiens
gcccattgttaatgg

SEQ ID NO: 648271 - DNA, 15 bp, Homo sapiens
cccattgttaatggc

SEQ ID NO: 648272 - DNA, 15 bp, Homo sapiens
ccattgttaatggct

SEQ ID NO: 648273 - DNA, 15 bp, Homo sapiens
cattgttaatggcta

SEQ ID NO: 648274 - DNA, 15 bp, Homo sapiens
attgttaatggctag

SEQ ID NO: 648275 - DNA, 15 bp, Homo sapiens
ttgttaatggctaga

SEQ ID NO: 648276 - DNA, 15 bp, Homo sapiens
tgttaatggctagat

SEQ ID NO: 648277 - DNA, 15 bp, Homo sapiens
gttaatggctagatc

SEQ ID NO: 648278 - DNA, 15 bp, Homo sapiens
ttaatggctagatca

SEQ ID NO: 648279 - DNA, 15 bp, Homo sapiens
taatggctagatcat

SEQ ID NO: 648280 - DNA, 15 bp, Homo sapiens
aatggctagatcatg

SEQ ID NO: 648281 - DNA, 15 bp, Homo sapiens
atggctagatcatgg

SEQ ID NO: 648282 - DNA, 15 bp, Homo sapiens
tggctagatcatgga

SEQ ID NO: 648283 - DNA, 15 bp, Homo sapiens
ggctagatcatggaa

SEQ ID NO: 648284 - DNA, 15 bp, Homo sapiens
gctagatcatggaat

SEQ ID NO: 648285 - DNA, 15 bp, Homo sapiens
ctagatcatggaatt

SEQ ID NO: 648286 - DNA, 15 bp, Homo sapiens
tagatcatggaatta

SEQ ID NO: 648287 - DNA, 15 bp, Homo sapiens
agatcatggaattac

SEQ ID NO: 648288 - DNA, 15 bp, Homo sapiens
gatcatggaattact

SEQ ID NO: 648289 - DNA, 15 bp, Homo sapiens
atcatggaattactg

SEQ ID NO: 648290 - DNA, 15 bp, Homo sapiens
tcatggaattactga

SEQ ID NO: 648291 - DNA, 15 bp, Homo sapiens
catggaattactgaa

SEQ ID NO: 648292 - DNA, 15 bp, Homo sapiens
atggaattactgaaa

SEQ ID NO: 648293 - DNA, 15 bp, Homo sapiens
tggaattactgaaac

SEQ ID NO: 648294 - DNA, 15 bp, Homo sapiens
ggaattactgaaacc

SEQ ID NO: 648295 - DNA, 15 bp, Homo sapiens
gaattactgaaacct

SEQ ID NO: 648296 - DNA, 15 bp, Homo sapiens
aattactgaaaccta

SEQ ID NO: 648297 - DNA, 15 bp, Homo sapiens
attactgaaacctat

SEQ ID NO: 648298 - DNA, 15 bp, Homo sapiens
ttactgaaacctatt

SEQ ID NO: 648299 - DNA, 15 bp, Homo sapiens
tactgaaacctattc

SEQ ID NO: 648300 - DNA, 15 bp, Homo sapiens
actgaaacctattcc

SEQ ID NO: 648301 - DNA, 15 bp, Homo sapiens
ctgaaacctattcct

SEQ ID NO: 648302 - DNA, 15 bp, Homo sapiens
tgaaacctattcctt

SEQ ID NO: 648303 - DNA, 15 bp, Homo sapiens
gaaacctattccttg

SEQ ID NO: 648304 - DNA, 15 bp, Homo sapiens
aaacctattccttgc

SEQ ID NO: 648305 - DNA, 15 bp, Homo sapiens
aacctattccttgca

SEQ ID NO: 648306 - DNA, 15 bp, Homo sapiens
acctattccttgcat

SEQ ID NO: 648307 - DNA, 15 bp, Homo sapiens
cctattccttgcatt

SEQ ID NO: 648308 - DNA, 15 bp, Homo sapiens
ctattccttgcattg

SEQ ID NO: 648309 - DNA, 15 bp, Homo sapiens
tattccttgcattgg

SEQ ID NO: 648310 - DNA, 15 bp, Homo sapiens
attccttgcattgga

SEQ ID NO: 648311 - DNA, 15 bp, Homo sapiens
ttccttgcattggac

SEQ ID NO: 648312 - DNA, 15 bp, Homo sapiens
tccttgcattggact

SEQ ID NO: 648313 - DNA, 15 bp, Homo sapiens
ccttgcattggactt

SEQ ID NO: 648314 - DNA, 15 bp, Homo sapiens
cttgcattggacttc

SEQ ID NO: 648315 - DNA, 15 bp, Homo sapiens
ttgcattggacttcc

SEQ ID NO: 648316 - DNA, 15 bp, Homo sapiens
tgcattggacttcca

SEQ ID NO: 648317 - DNA, 15 bp, Homo sapiens
gcattggacttccac

SEQ ID NO: 648318 - DNA, 15 bp, Homo sapiens
cattggacttccaca

SEQ ID NO: 648319 - DNA, 15 bp, Homo sapiens
attggacttccacat

SEQ ID NO: 648320 - DNA, 15 bp, Homo sapiens
ttggacttccacata

SEQ ID NO: 648321 - DNA, 15 bp, Homo sapiens
tggacttccacatag

SEQ ID NO: 648322 - DNA, 15 bp, Homo sapiens
ggacttccacatagt

SEQ ID NO: 648323 - DNA, 15 bp, Homo sapiens
gacttccacatagtt

SEQ ID NO: 648324 - DNA, 15 bp, Homo sapiens
acttccacatagttt

SEQ ID NO: 648325 - DNA, 15 bp, Homo sapiens
cttccacatagtttc

SEQ ID NO: 648326 - DNA, 15 bp, Homo sapiens
ttccacatagtttca

SEQ ID NO: 648327 - DNA, 15 bp, Homo sapiens
tccacatagtttcag

SEQ ID NO: 648328 - DNA, 15 bp, Homo sapiens
ccacatagtttcagt

SEQ ID NO: 648329 - DNA, 15 bp, Homo sapiens
cacatagtttcagtt

SEQ ID NO: 648330 - DNA, 15 bp, Homo sapiens
acatagtttcagtta

SEQ ID NO: 648331 - DNA, 15 bp, Homo sapiens
catagtttcagttat

SEQ ID NO: 648332 - DNA, 15 bp, Homo sapiens
atagtttcagttatc

SEQ ID NO: 648333 - DNA, 15 bp, Homo sapiens
tagtttcagttatcc

SEQ ID NO: 648334 - DNA, 15 bp, Homo sapiens
agtttcagttatcca

SEQ ID NO: 648335 - DNA, 15 bp, Homo sapiens
gtttcagttatccat

SEQ ID NO: 648336 - DNA, 15 bp, Homo sapiens
tttcagttatccatg

SEQ ID NO: 648337 - DNA, 15 bp, Homo sapiens
ttcagttatccatgt

SEQ ID NO: 648338 - DNA, 15 bp, Homo sapiens
tcagttatccatgtc

SEQ ID NO: 648339 - DNA, 15 bp, Homo sapiens
cagttatccatgtct

SEQ ID NO: 648340 - DNA, 15 bp, Homo sapiens
agttatccatgtctc

SEQ ID NO: 648341 - DNA, 15 bp, Homo sapiens
gttatccatgtctca

SEQ ID NO: 648342 - DNA, 15 bp, Homo sapiens
ttatccatgtctcat

SEQ ID NO: 648343 - DNA, 15 bp, Homo sapiens
tatccatgtctcatg

SEQ ID NO: 648344 - DNA, 15 bp, Homo sapiens
atccatgtctcatgg

SEQ ID NO: 648345 - DNA, 15 bp, Homo sapiens
tccatgtctcatggc

SEQ ID NO: 648346 - DNA, 15 bp, Homo sapiens
ccatgtctcatggct

SEQ ID NO: 648347 - DNA, 15 bp, Homo sapiens
catgtctcatggctg

SEQ ID NO: 648348 - DNA, 15 bp, Homo sapiens
atgtctcatggctgt

SEQ ID NO: 648349 - DNA, 15 bp, Homo sapiens
tgtctcatggctgtg

SEQ ID NO: 648350 - DNA, 15 bp, Homo sapiens
gtctcatggctgtga

SEQ ID NO: 648351 - DNA, 15 bp, Homo sapiens
tctcatggctgtgaa

SEQ ID NO: 648352 - DNA, 15 bp, Homo sapiens
ctcatggctgtgaac

SEQ ID NO: 648353 - DNA, 15 bp, Homo sapiens
tcatggctgtgaacc

SEQ ID NO: 648354 - DNA, 15 bp, Homo sapiens
catggctgtgaacct

SEQ ID NO: 648355 - DNA, 15 bp, Homo sapiens
atggctgtgaacctg

SEQ ID NO: 648356 - DNA, 15 bp, Homo sapiens
tggctgtgaacctga

SEQ ID NO: 648357 - DNA, 15 bp, Homo sapiens
ggctgtgaacctgac

SEQ ID NO: 648358 - DNA, 15 bp, Homo sapiens
gctgtgaacctgacc

SEQ ID NO: 648359 - DNA, 15 bp, Homo sapiens
ctgtgaacctgacca

SEQ ID NO: 648360 - DNA, 15 bp, Homo sapiens
tgtgaacctgaccag

SEQ ID NO: 648361 - DNA, 15 bp, Homo sapiens
gtgaacctgaccagt

SEQ ID NO: 648362 - DNA, 15 bp, Homo sapiens
tgaacctgaccagtg

SEQ ID NO: 648363 - DNA, 15 bp, Homo sapiens
gaacctgaccagtgt

SEQ ID NO: 648364 - DNA, 15 bp, Homo sapiens
aacctgaccagtgtg

SEQ ID NO: 648365 - DNA, 15 bp, Homo sapiens
acctgaccagtgtgt

SEQ ID NO: 648366 - DNA, 15 bp, Homo sapiens
cctgaccagtgtgtc

SEQ ID NO: 648367 - DNA, 15 bp, Homo sapiens
ctgaccagtgtgtca

SEQ ID NO: 648368 - DNA, 15 bp, Homo sapiens
tgaccagtgtgtcac

SEQ ID NO: 648369 - DNA, 15 bp, Homo sapiens
gaccagtgtgtcaca

SEQ ID NO: 648370 - DNA, 15 bp, Homo sapiens
accagtgtgtcacaa

SEQ ID NO: 648371 - DNA, 15 bp, Homo sapiens
ccagtgtgtcacaac

SEQ ID NO: 648372 - DNA, 15 bp, Homo sapiens
cagtgtgtcacaaca

SEQ ID NO: 648373 - DNA, 15 bp, Homo sapiens
agtgtgtcacaacac

SEQ ID NO: 648374 - DNA, 15 bp, Homo sapiens
gtgtgtcacaacaca

SEQ ID NO: 648375 - DNA, 15 bp, Homo sapiens
tgtgtcacaacacag

SEQ ID NO: 648376 - DNA, 15 bp, Homo sapiens
gtgtcacaacacagc

SEQ ID NO: 648377 - DNA, 15 bp, Homo sapiens
tgtcacaacacagcg

SEQ ID NO: 648378 - DNA, 15 bp, Homo sapiens
gtcacaacacagcgt

SEQ ID NO: 648379 - DNA, 15 bp, Homo sapiens
tcacaacacagcgtc

SEQ ID NO: 648380 - DNA, 15 bp, Homo sapiens
cacaacacagcgtct

SEQ ID NO: 648381 - DNA, 15 bp, Homo sapiens
acaacacagcgtctc

SEQ ID NO: 648382 - DNA, 15 bp, Homo sapiens
caacacagcgtctca

SEQ ID NO: 648383 - DNA, 15 bp, Homo sapiens
aacacagcgtctcag

SEQ ID NO: 648384 - DNA, 15 bp, Homo sapiens
acacagcgtctcagc

SEQ ID NO: 648385 - DNA, 15 bp, Homo sapiens
cacagcgtctcagcc

SEQ ID NO: 648386 - DNA, 15 bp, Homo sapiens
acagcgtctcagcca

SEQ ID NO: 648387 - DNA, 15 bp, Homo sapiens
cagcgtctcagccac

SEQ ID NO: 648388 - DNA, 15 bp, Homo sapiens
agcgtctcagccaca

SEQ ID NO: 648389 - DNA, 15 bp, Homo sapiens
gcgtctcagccacag

SEQ ID NO: 648390 - DNA, 15 bp, Homo sapiens
cgtctcagccacagg

SEQ ID NO: 648391 - DNA, 15 bp, Homo sapiens
gtctcagccacaggg

SEQ ID NO: 648392 - DNA, 15 bp, Homo sapiens
tctcagccacagggc

SEQ ID NO: 648393 - DNA, 15 bp, Homo sapiens
ctcagccacagggca

SEQ ID NO: 648394 - DNA, 15 bp, Homo sapiens
tcagccacagggcag

SEQ ID NO: 648395 - DNA, 15 bp, Homo sapiens
cagccacagggcaga

SEQ ID NO: 648396 - DNA, 15 bp, Homo sapiens
agccacagggcagat

SEQ ID NO: 648397 - DNA, 15 bp, Homo sapiens
gccacagggcagatg

SEQ ID NO: 648398 - DNA, 15 bp, Homo sapiens
ccacagggcagatgg

SEQ ID NO: 648399 - DNA, 15 bp, Homo sapiens
cacagggcagatggg

SEQ ID NO: 648400 - DNA, 15 bp, Homo sapiens
acagggcagatgggt

SEQ ID NO: 648401 - DNA, 15 bp, Homo sapiens
cagggcagatgggtg

SEQ ID NO: 648402 - DNA, 15 bp, Homo sapiens
agggcagatgggtga

SEQ ID NO: 648403 - DNA, 15 bp, Homo sapiens
gggcagatgggtgag

SEQ ID NO: 648404 - DNA, 15 bp, Homo sapiens
ggcagatgggtgagt

SEQ ID NO: 648405 - DNA, 15 bp, Homo sapiens
gcagatgggtgagtt

SEQ ID NO: 648406 - DNA, 15 bp, Homo sapiens
cagatgggtgagtta

SEQ ID NO: 648407 - DNA, 15 bp, Homo sapiens
agatgggtgagttat

SEQ ID NO: 648408 - DNA, 15 bp, Homo sapiens
gatgggtgagttata

SEQ ID NO: 648409 - DNA, 15 bp, Homo sapiens
atgggtgagttatag

SEQ ID NO: 648410 - DNA, 15 bp, Homo sapiens
tgggtgagttataga

SEQ ID NO: 648411 - DNA, 15 bp, Homo sapiens
gggtgagttatagat

SEQ ID NO: 648412 - DNA, 15 bp, Homo sapiens
ggtgagttatagatg

SEQ ID NO: 648413 - DNA, 15 bp, Homo sapiens
gtgagttatagatga

SEQ ID NO: 648414 - DNA, 15 bp, Homo sapiens
tgagttatagatgag

SEQ ID NO: 648415 - DNA, 15 bp, Homo sapiens
gagttatagatgagt

SEQ ID NO: 648416 - DNA, 15 bp, Homo sapiens
agttatagatgagtt

SEQ ID NO: 648417 - DNA, 15 bp, Homo sapiens
gttatagatgagttg

SEQ ID NO: 648418 - DNA, 15 bp, Homo sapiens
ttatagatgagttgg

SEQ ID NO: 648419 - DNA, 15 bp, Homo sapiens
tatagatgagttggt

SEQ ID NO: 648420 - DNA, 15 bp, Homo sapiens
atagatgagttggtg

SEQ ID NO: 648421 - DNA, 15 bp, Homo sapiens
tagatgagttggtgc

SEQ ID NO: 648422 - DNA, 15 bp, Homo sapiens
agatgagttggtgca

SEQ ID NO: 648423 - DNA, 15 bp, Homo sapiens
gatgagttggtgcaa

SEQ ID NO: 648424 - DNA, 15 bp, Homo sapiens
atgagttggtgcaaa

SEQ ID NO: 648425 - DNA, 15 bp, Homo sapiens
tgagttggtgcaaac

SEQ ID NO: 648426 - DNA, 15 bp, Homo sapiens
gagttggtgcaaaca

SEQ ID NO: 648427 - DNA, 15 bp, Homo sapiens
agttggtgcaaacac

SEQ ID NO: 648428 - DNA, 15 bp, Homo sapiens
gttggtgcaaacact

SEQ ID NO: 648429 - DNA, 15 bp, Homo sapiens
ttggtgcaaacacta

SEQ ID NO: 648430 - DNA, 15 bp, Homo sapiens
tggtgcaaacactag

SEQ ID NO: 648431 - DNA, 15 bp, Homo sapiens
ggtgcaaacactagt

SEQ ID NO: 648432 - DNA, 15 bp, Homo sapiens
gtgcaaacactagtt

SEQ ID NO: 648433 - DNA, 15 bp, Homo sapiens
tgcaaacactagttc

SEQ ID NO: 648434 - DNA, 15 bp, Homo sapiens
gcaaacactagttcc

SEQ ID NO: 648435 - DNA, 15 bp, Homo sapiens
caaacactagttcca

SEQ ID NO: 648436 - DNA, 15 bp, Homo sapiens
aaacactagttccaa

SEQ ID NO: 648437 - DNA, 15 bp, Homo sapiens
aacactagttccaag

SEQ ID NO: 648438 - DNA, 15 bp, Homo sapiens
acactagttccaagc

SEQ ID NO: 648439 - DNA, 15 bp, Homo sapiens
cactagttccaagcc

SEQ ID NO: 648440 - DNA, 15 bp, Homo sapiens
actagttccaagcct

SEQ ID NO: 648441 - DNA, 15 bp, Homo sapiens
ctagttccaagcctg

SEQ ID NO: 648442 - DNA, 15 bp, Homo sapiens
tagttccaagcctgg

SEQ ID NO: 648443 - DNA, 15 bp, Homo sapiens
agttccaagcctggg

SEQ ID NO: 648444 - DNA, 15 bp, Homo sapiens
gttccaagcctgggg

SEQ ID NO: 648445 - DNA, 15 bp, Homo sapiens
ttccaagcctgggga

SEQ ID NO: 648446 - DNA, 15 bp, Homo sapiens
tccaagcctggggag

SEQ ID NO: 648447 - DNA, 15 bp, Homo sapiens
ccaagcctggggagc

SEQ ID NO: 648448 - DNA, 15 bp, Homo sapiens
caagcctggggagct

SEQ ID NO: 648449 - DNA, 15 bp, Homo sapiens
aagcctggggagctg

SEQ ID NO: 648450 - DNA, 15 bp, Homo sapiens
agcctggggagctgg

SEQ ID NO: 648451 - DNA, 15 bp, Homo sapiens
gcctggggagctgga

SEQ ID NO: 648452 - DNA, 15 bp, Homo sapiens
cctggggagctggaa

SEQ ID NO: 648453 - DNA, 15 bp, Homo sapiens
ctggggagctggaaa

SEQ ID NO: 648454 - DNA, 15 bp, Homo sapiens
tggggagctggaaac

SEQ ID NO: 648455 - DNA, 15 bp, Homo sapiens
ggggagctggaaaca

SEQ ID NO: 648456 - DNA, 15 bp, Homo sapiens
gggagctggaaacaa

SEQ ID NO: 648457 - DNA, 15 bp, Homo sapiens
ggagctggaaacaaa

SEQ ID NO: 648458 - DNA, 15 bp, Homo sapiens
gagctggaaacaaaa

SEQ ID NO: 648459 - DNA, 15 bp, Homo sapiens
agctggaaacaaaaa

SEQ ID NO: 648460 - DNA, 15 bp, Homo sapiens
gctggaaacaaaaag

SEQ ID NO: 648461 - DNA, 15 bp, Homo sapiens
ctggaaacaaaaagt

SEQ ID NO: 648462 - DNA, 15 bp, Homo sapiens
tggaaacaaaaagtc

SEQ ID NO: 648463 - DNA, 15 bp, Homo sapiens
ggaaacaaaaagtct

SEQ ID NO: 648464 - DNA, 15 bp, Homo sapiens
gaaacaaaaagtctg

SEQ ID NO: 648465 - DNA, 15 bp, Homo sapiens
aaacaaaaagtctgg

SEQ ID NO: 648466 - DNA, 15 bp, Homo sapiens
aacaaaaagtctggt

SEQ ID NO: 648467 - DNA, 15 bp, Homo sapiens
acaaaaagtctggtc

SEQ ID NO: 648468 - DNA, 15 bp, Homo sapiens
caaaaagtctggtct

SEQ ID NO: 648469 - DNA, 15 bp, Homo sapiens
aaaaagtctggtctg

SEQ ID NO: 648470 - DNA, 15 bp, Homo sapiens
aaaagtctggtctgc

SEQ ID NO: 648471 - DNA, 15 bp, Homo sapiens
aaagtctggtctgct

SEQ ID NO: 648472 - DNA, 15 bp, Homo sapiens
aagtctggtctgctt

SEQ ID NO: 648473 - DNA, 15 bp, Homo sapiens
agtctggtctgctta

SEQ ID NO: 648474 - DNA, 15 bp, Homo sapiens
gtctggtctgcttat

SEQ ID NO: 648475 - DNA, 15 bp, Homo sapiens
tctggtctgcttatt

SEQ ID NO: 648476 - DNA, 15 bp, Homo sapiens
ctggtctgcttattt

SEQ ID NO: 648477 - DNA, 15 bp, Homo sapiens
tggtctgcttatttg

SEQ ID NO: 648478 - DNA, 15 bp, Homo sapiens
ggtctgcttatttgg

SEQ ID NO: 648479 - DNA, 15 bp, Homo sapiens
gtctgcttatttgga

SEQ ID NO: 648480 - DNA, 15 bp, Homo sapiens
tctgcttatttggag

SEQ ID NO: 648481 - DNA, 15 bp, Homo sapiens
ctgcttatttggagc

SEQ ID NO: 648482 - DNA, 15 bp, Homo sapiens
tgcttatttggagcc

SEQ ID NO: 648483 - DNA, 15 bp, Homo sapiens
gcttatttggagcca

SEQ ID NO: 648484 - DNA, 15 bp, Homo sapiens
cttatttggagccag

SEQ ID NO: 648485 - DNA, 15 bp, Homo sapiens
ttatttggagccagt

SEQ ID NO: 648486 - DNA, 15 bp, Homo sapiens
tatttggagccagtt

SEQ ID NO: 648487 - DNA, 15 bp, Homo sapiens
atttggagccagttg

SEQ ID NO: 648488 - DNA, 15 bp, Homo sapiens
tttggagccagttgc

SEQ ID NO: 648489 - DNA, 15 bp, Homo sapiens
ttggagccagttgca

SEQ ID NO: 648490 - DNA, 15 bp, Homo sapiens
tggagccagttgcat

SEQ ID NO: 648491 - DNA, 15 bp, Homo sapiens
ggagccagttgcatt

SEQ ID NO: 648492 - DNA, 15 bp, Homo sapiens
gagccagttgcatta

SEQ ID NO: 648493 - DNA, 15 bp, Homo sapiens
agccagttgcattat

SEQ ID NO: 648494 - DNA, 15 bp, Homo sapiens
gccagttgcattatt

SEQ ID NO: 648495 - DNA, 15 bp, Homo sapiens
ccagttgcattattt

SEQ ID NO: 648496 - DNA, 15 bp, Homo sapiens
cagttgcattatttt

SEQ ID NO: 648497 - DNA, 15 bp, Homo sapiens
agttgcattattttc

SEQ ID NO: 648498 - DNA, 15 bp, Homo sapiens
gttgcattattttct

SEQ ID NO: 648499 - DNA, 15 bp, Homo sapiens
ttgcattattttctg

SEQ ID NO: 648500 - DNA, 15 bp, Homo sapiens
tgcattattttctga

SEQ ID NO: 648501 - DNA, 15 bp, Homo sapiens
gcattattttctgat

SEQ ID NO: 648502 - DNA, 15 bp, Homo sapiens
cattattttctgata

SEQ ID NO: 648503 - DNA, 15 bp, Homo sapiens
attattttctgataa

SEQ ID NO: 648504 - DNA, 15 bp, Homo sapiens
ttattttctgataag

SEQ ID NO: 648505 - DNA, 15 bp, Homo sapiens
tattttctgataagg

SEQ ID NO: 648506 - DNA, 15 bp, Homo sapiens
attttctgataagga

SEQ ID NO: 648507 - DNA, 15 bp, Homo sapiens
ttttctgataaggac

SEQ ID NO: 648508 - DNA, 15 bp, Homo sapiens
tttctgataaggaca

SEQ ID NO: 648509 - DNA, 15 bp, Homo sapiens
ttctgataaggacat

SEQ ID NO: 648510 - DNA, 15 bp, Homo sapiens
tctgataaggacatg

SEQ ID NO: 648511 - DNA, 15 bp, Homo sapiens
ctgataaggacatgt

SEQ ID NO: 648512 - DNA, 15 bp, Homo sapiens
tgataaggacatgtc

SEQ ID NO: 648513 - DNA, 15 bp, Homo sapiens
gataaggacatgtca

SEQ ID NO: 648514 - DNA, 15 bp, Homo sapiens
ataaggacatgtcat

SEQ ID NO: 648515 - DNA, 15 bp, Homo sapiens
taaggacatgtcatg

SEQ ID NO: 648516 - DNA, 15 bp, Homo sapiens
aaggacatgtcatgt

SEQ ID NO: 648517 - DNA, 15 bp, Homo sapiens
aggacatgtcatgtg

SEQ ID NO: 648518 - DNA, 15 bp, Homo sapiens
ggacatgtcatgtga

SEQ ID NO: 648519 - DNA, 15 bp, Homo sapiens
gacatgtcatgtgac

SEQ ID NO: 648520 - DNA, 15 bp, Homo sapiens
acatgtcatgtgact

SEQ ID NO: 648521 - DNA, 15 bp, Homo sapiens
catgtcatgtgactc

SEQ ID NO: 648522 - DNA, 15 bp, Homo sapiens
atgtcatgtgactca

SEQ ID NO: 648523 - DNA, 15 bp, Homo sapiens
tgtcatgtgactcaa

SEQ ID NO: 648524 - DNA, 15 bp, Homo sapiens
gtcatgtgactcaag

SEQ ID NO: 648525 - DNA, 15 bp, Homo sapiens
tcatgtgactcaagg

SEQ ID NO: 648526 - DNA, 15 bp, Homo sapiens
catgtgactcaagga

SEQ ID NO: 648527 - DNA, 15 bp, Homo sapiens
atgtgactcaaggaa

SEQ ID NO: 648528 - DNA, 15 bp, Homo sapiens
tgtgactcaaggaaa

SEQ ID NO: 648529 - DNA, 15 bp, Homo sapiens
gtgactcaaggaaac

SEQ ID NO: 648530 - DNA, 15 bp, Homo sapiens
tgactcaaggaaaca

SEQ ID NO: 648531 - DNA, 15 bp, Homo sapiens
gactcaaggaaacac

SEQ ID NO: 648532 - DNA, 15 bp, Homo sapiens
actcaaggaaacact

SEQ ID NO: 648533 - DNA, 15 bp, Homo sapiens
ctcaaggaaacactt

SEQ ID NO: 648534 - DNA, 15 bp, Homo sapiens
tcaaggaaacacttc

SEQ ID NO: 648535 - DNA, 15 bp, Homo sapiens
caaggaaacacttca

SEQ ID NO: 648536 - DNA, 15 bp, Homo sapiens
aaggaaacacttcaa

SEQ ID NO: 648537 - DNA, 15 bp, Homo sapiens
aggaaacacttcaaa

SEQ ID NO: 648538 - DNA, 15 bp, Homo sapiens
ggaaacacttcaaac

SEQ ID NO: 648539 - DNA, 15 bp, Homo sapiens
gaaacacttcaaaca

SEQ ID NO: 648540 - DNA, 15 bp, Homo sapiens
aaacacttcaaacat

SEQ ID NO: 648541 - DNA, 15 bp, Homo sapiens
aacacttcaaacata

SEQ ID NO: 648542 - DNA, 15 bp, Homo sapiens
acacttcaaacataa

SEQ ID NO: 648543 - DNA, 15 bp, Homo sapiens
cacttcaaacataat

SEQ ID NO: 648544 - DNA, 15 bp, Homo sapiens
acttcaaacataata

SEQ ID NO: 648545 - DNA, 15 bp, Homo sapiens
cttcaaacataatac

SEQ ID NO: 648546 - DNA, 15 bp, Homo sapiens
ttcaaacataatact

SEQ ID NO: 648547 - DNA, 15 bp, Homo sapiens
tcaaacataatacta

SEQ ID NO: 648548 - DNA, 15 bp, Homo sapiens
caaacataatactag

SEQ ID NO: 648549 - DNA, 15 bp, Homo sapiens
aaacataatactaga

SEQ ID NO: 648550 - DNA, 15 bp, Homo sapiens
aacataatactagat

SEQ ID NO: 648551 - DNA, 15 bp, Homo sapiens
acataatactagatc

SEQ ID NO: 648552 - DNA, 15 bp, Homo sapiens
cataatactagatct

SEQ ID NO: 648553 - DNA, 15 bp, Homo sapiens
ataatactagatctc

SEQ ID NO: 648554 - DNA, 15 bp, Homo sapiens
taatactagatctct

SEQ ID NO: 648555 - DNA, 15 bp, Homo sapiens
aatactagatctctc

SEQ ID NO: 648556 - DNA, 15 bp, Homo sapiens
atactagatctctct

SEQ ID NO: 648557 - DNA, 15 bp, Homo sapiens
tactagatctctctt

SEQ ID NO: 648558 - DNA, 15 bp, Homo sapiens
actagatctctcttg

SEQ ID NO: 648559 - DNA, 15 bp, Homo sapiens
ctagatctctcttgt

SEQ ID NO: 648560 - DNA, 15 bp, Homo sapiens
tagatctctcttgtt

SEQ ID NO: 648561 - DNA, 15 bp, Homo sapiens
agatctctcttgttc

SEQ ID NO: 648562 - DNA, 15 bp, Homo sapiens
gatctctcttgttca

SEQ ID NO: 648563 - DNA, 15 bp, Homo sapiens
atctctcttgttcat

SEQ ID NO: 648564 - DNA, 15 bp, Homo sapiens
tctctcttgttcata

SEQ ID NO: 648565 - DNA, 15 bp, Homo sapiens
ctctcttgttcatat

SEQ ID NO: 648566 - DNA, 15 bp, Homo sapiens
tctcttgttcatata

SEQ ID NO: 648567 - DNA, 15 bp, Homo sapiens
ctcttgttcatatat

SEQ ID NO: 648568 - DNA, 15 bp, Homo sapiens
tcttgttcatatatt

SEQ ID NO: 648569 - DNA, 15 bp, Homo sapiens
cttgttcatatattt

SEQ ID NO: 648570 - DNA, 15 bp, Homo sapiens
ttgttcatatattta

SEQ ID NO: 648571 - DNA, 15 bp, Homo sapiens
tgttcatatatttat

SEQ ID NO: 648572 - DNA, 15 bp, Homo sapiens
gttcatatatttatg

SEQ ID NO: 648573 - DNA, 15 bp, Homo sapiens
ttcatatatttatgt

SEQ ID NO: 648574 - DNA, 15 bp, Homo sapiens
tcatatatttatgtt

SEQ ID NO: 648575 - DNA, 15 bp, Homo sapiens
catatatttatgttg

SEQ ID NO: 648576 - DNA, 15 bp, Homo sapiens
atatatttatgttga

SEQ ID NO: 648577 - DNA, 15 bp, Homo sapiens
tatatttatgttgaa

SEQ ID NO: 648578 - DNA, 15 bp, Homo sapiens
atatttatgttgaaa

SEQ ID NO: 648579 - DNA, 15 bp, Homo sapiens
tatttatgttgaaaa

SEQ ID NO: 648580 - DNA, 15 bp, Homo sapiens
atttatgttgaaaat

SEQ ID NO: 648581 - DNA, 15 bp, Homo sapiens
tttatgttgaaaatt

SEQ ID NO: 648582 - DNA, 15 bp, Homo sapiens
ttatgttgaaaattc

SEQ ID NO: 648583 - DNA, 15 bp, Homo sapiens
tatgttgaaaattct

SEQ ID NO: 648584 - DNA, 15 bp, Homo sapiens
atgttgaaaattctt

SEQ ID NO: 648585 - DNA, 15 bp, Homo sapiens
tgttgaaaattcttt

SEQ ID NO: 648586 - DNA, 15 bp, Homo sapiens
gttgaaaattctttt

SEQ ID NO: 648587 - DNA, 15 bp, Homo sapiens
ttgaaaattcttttc

SEQ ID NO: 648588 - DNA, 15 bp, Homo sapiens
tgaaaattcttttct

SEQ ID NO: 648589 - DNA, 15 bp, Homo sapiens
gaaaattcttttctc

SEQ ID NO: 648590 - DNA, 15 bp, Homo sapiens
aaaattcttttctct

SEQ ID NO: 648591 - DNA, 15 bp, Homo sapiens
aaattcttttctctt

SEQ ID NO: 648592 - DNA, 15 bp, Homo sapiens
aattcttttctcttg

SEQ ID NO: 648593 - DNA, 15 bp, Homo sapiens
attcttttctcttgg

SEQ ID NO: 648594 - DNA, 15 bp, Homo sapiens
ttcttttctcttggg

SEQ ID NO: 648595 - DNA, 15 bp, Homo sapiens
tcttttctcttgggg

SEQ ID NO: 648596 - DNA, 15 bp, Homo sapiens
cttttctcttggggc

SEQ ID NO: 648597 - DNA, 15 bp, Homo sapiens
ttttctcttggggcc

SEQ ID NO: 648598 - DNA, 15 bp, Homo sapiens
tttctcttggggcca

SEQ ID NO: 648599 - DNA, 15 bp, Homo sapiens
ttctcttggggccaa

SEQ ID NO: 648600 - DNA, 15 bp, Homo sapiens
tctcttggggccaag

SEQ ID NO: 648601 - DNA, 15 bp, Homo sapiens
ctcttggggccaagc

SEQ ID NO: 648602 - DNA, 15 bp, Homo sapiens
tcttggggccaagct

SEQ ID NO: 648603 - DNA, 15 bp, Homo sapiens
cttggggccaagctt

SEQ ID NO: 648604 - DNA, 15 bp, Homo sapiens
ttggggccaagctta

SEQ ID NO: 648605 - DNA, 15 bp, Homo sapiens
tggggccaagcttac

SEQ ID NO: 648606 - DNA, 15 bp, Homo sapiens
ggggccaagcttacc

SEQ ID NO: 648607 - DNA, 15 bp, Homo sapiens
gggccaagcttacct

SEQ ID NO: 648608 - DNA, 15 bp, Homo sapiens
ggccaagcttacctc

SEQ ID NO: 648609 - DNA, 15 bp, Homo sapiens
gccaagcttacctca

SEQ ID NO: 648610 - DNA, 15 bp, Homo sapiens
ccaagcttacctcac

SEQ ID NO: 648611 - DNA, 15 bp, Homo sapiens
caagcttacctcact

SEQ ID NO: 648612 - DNA, 15 bp, Homo sapiens
aagcttacctcacta

SEQ ID NO: 648613 - DNA, 15 bp, Homo sapiens
agcttacctcactat

SEQ ID NO: 648614 - DNA, 15 bp, Homo sapiens
gcttacctcactatg

SEQ ID NO: 648615 - DNA, 15 bp, Homo sapiens
cttacctcactatgc

SEQ ID NO: 648616 - DNA, 15 bp, Homo sapiens
ttacctcactatgca

SEQ ID NO: 648617 - DNA, 15 bp, Homo sapiens
tacctcactatgcaa

SEQ ID NO: 648618 - DNA, 15 bp, Homo sapiens
acctcactatgcaat

SEQ ID NO: 648619 - DNA, 15 bp, Homo sapiens
cctcactatgcaatc

SEQ ID NO: 648620 - DNA, 15 bp, Homo sapiens
ctcactatgcaatcc

SEQ ID NO: 648621 - DNA, 15 bp, Homo sapiens
tcactatgcaatcca

SEQ ID NO: 648622 - DNA, 15 bp, Homo sapiens
cactatgcaatccaa

SEQ ID NO: 648623 - DNA, 15 bp, Homo sapiens
actatgcaatccaag

SEQ ID NO: 648624 - DNA, 15 bp, Homo sapiens
ctatgcaatccaagc

SEQ ID NO: 648625 - DNA, 15 bp, Homo sapiens
tatgcaatccaagca

SEQ ID NO: 648626 - DNA, 15 bp, Homo sapiens
atgcaatccaagcag

SEQ ID NO: 648627 - DNA, 15 bp, Homo sapiens
tgcaatccaagcagc

SEQ ID NO: 648628 - DNA, 15 bp, Homo sapiens
gcaatccaagcagca

SEQ ID NO: 648629 - DNA, 15 bp, Homo sapiens
caatccaagcagcaa

SEQ ID NO: 648630 - DNA, 15 bp, Homo sapiens
aatccaagcagcaat

SEQ ID NO: 648631 - DNA, 15 bp, Homo sapiens
atccaagcagcaatc

SEQ ID NO: 648632 - DNA, 15 bp, Homo sapiens
tccaagcagcaatca

SEQ ID NO: 648633 - DNA, 15 bp, Homo sapiens
ccaagcagcaatcag

SEQ ID NO: 648634 - DNA, 15 bp, Homo sapiens
caagcagcaatcagg

SEQ ID NO: 648635 - DNA, 15 bp, Homo sapiens
aagcagcaatcaggc

SEQ ID NO: 648636 - DNA, 15 bp, Homo sapiens
agcagcaatcaggca

SEQ ID NO: 648637 - DNA, 15 bp, Homo sapiens
gcagcaatcaggcag

SEQ ID NO: 648638 - DNA, 15 bp, Homo sapiens
cagcaatcaggcagc

SEQ ID NO: 648639 - DNA, 15 bp, Homo sapiens
agcaatcaggcagct

SEQ ID NO: 648640 - DNA, 15 bp, Homo sapiens
gcaatcaggcagctc

SEQ ID NO: 648641 - DNA, 15 bp, Homo sapiens
caatcaggcagctct

SEQ ID NO: 648642 - DNA, 15 bp, Homo sapiens
aatcaggcagctctg

SEQ ID NO: 648643 - DNA, 15 bp, Homo sapiens
atcaggcagctctgt

SEQ ID NO: 648644 - DNA, 15 bp, Homo sapiens
tcaggcagctctgtt

SEQ ID NO: 648645 - DNA, 15 bp, Homo sapiens
caggcagctctgtta

SEQ ID NO: 648646 - DNA, 15 bp, Homo sapiens
aggcagctctgttaa

SEQ ID NO: 648647 - DNA, 15 bp, Homo sapiens
ggcagctctgttaag

SEQ ID NO: 648648 - DNA, 15 bp, Homo sapiens
gcagctctgttaagt

SEQ ID NO: 648649 - DNA, 15 bp, Homo sapiens
cagctctgttaagta

SEQ ID NO: 648650 - DNA, 15 bp, Homo sapiens
agctctgttaagtat

SEQ ID NO: 648651 - DNA, 15 bp, Homo sapiens
gctctgttaagtatc

SEQ ID NO: 648652 - DNA, 15 bp, Homo sapiens
ctctgttaagtatcg

SEQ ID NO: 648653 - DNA, 15 bp, Homo sapiens
tctgttaagtatcgc

SEQ ID NO: 648654 - DNA, 15 bp, Homo sapiens
ctgttaagtatcgcc

SEQ ID NO: 648655 - DNA, 15 bp, Homo sapiens
tgttaagtatcgccc

SEQ ID NO: 648656 - DNA, 15 bp, Homo sapiens
gttaagtatcgccct

SEQ ID NO: 648657 - DNA, 15 bp, Homo sapiens
ttaagtatcgccctt

SEQ ID NO: 648658 - DNA, 15 bp, Homo sapiens
taagtatcgcccttt

SEQ ID NO: 648659 - DNA, 15 bp, Homo sapiens
aagtatcgccctttc

SEQ ID NO: 648660 - DNA, 15 bp, Homo sapiens
agtatcgccctttca

SEQ ID NO: 648661 - DNA, 15 bp, Homo sapiens
gtatcgccctttcaa

SEQ ID NO: 648662 - DNA, 15 bp, Homo sapiens
tatcgccctttcaac

SEQ ID NO: 648663 - DNA, 15 bp, Homo sapiens
atcgccctttcaaca

SEQ ID NO: 648664 - DNA, 15 bp, Homo sapiens
tcgccctttcaacat

SEQ ID NO: 648665 - DNA, 15 bp, Homo sapiens
cgccctttcaacatg

SEQ ID NO: 648666 - DNA, 15 bp, Homo sapiens
gccctttcaacatgt

SEQ ID NO: 648667 - DNA, 15 bp, Homo sapiens
ccctttcaacatgtt

SEQ ID NO: 648668 - DNA, 15 bp, Homo sapiens
cctttcaacatgttt

SEQ ID NO: 648669 - DNA, 15 bp, Homo sapiens
ctttcaacatgtttc

SEQ ID NO: 648670 - DNA, 15 bp, Homo sapiens
tttcaacatgtttca

SEQ ID NO: 648671 - DNA, 15 bp, Homo sapiens
ttcaacatgtttcat

SEQ ID NO: 648672 - DNA, 15 bp, Homo sapiens
tcaacatgtttcatt

SEQ ID NO: 648673 - DNA, 15 bp, Homo sapiens
caacatgtttcattg

SEQ ID NO: 648674 - DNA, 15 bp, Homo sapiens
aacatgtttcattgt

SEQ ID NO: 648675 - DNA, 15 bp, Homo sapiens
acatgtttcattgtc

SEQ ID NO: 648676 - DNA, 15 bp, Homo sapiens
catgtttcattgtca

SEQ ID NO: 648677 - DNA, 15 bp, Homo sapiens
atgtttcattgtcag

SEQ ID NO: 648678 - DNA, 15 bp, Homo sapiens
tgtttcattgtcagg

SEQ ID NO: 648679 - DNA, 15 bp, Homo sapiens
gtttcattgtcaggt

SEQ ID NO: 648680 - DNA, 15 bp, Homo sapiens
tttcattgtcaggtt

SEQ ID NO: 648681 - DNA, 15 bp, Homo sapiens
ttcattgtcaggtta

SEQ ID NO: 648682 - DNA, 15 bp, Homo sapiens
tcattgtcaggttaa

SEQ ID NO: 648683 - DNA, 15 bp, Homo sapiens
cattgtcaggttaaa

SEQ ID NO: 648684 - DNA, 15 bp, Homo sapiens
attgtcaggttaaaa

SEQ ID NO: 648685 - DNA, 15 bp, Homo sapiens
ttgtcaggttaaaac

SEQ ID NO: 648686 - DNA, 15 bp, Homo sapiens
tgtcaggttaaaaca

SEQ ID NO: 648687 - DNA, 15 bp, Homo sapiens
gtcaggttaaaacaa

SEQ ID NO: 648688 - DNA, 15 bp, Homo sapiens
tcaggttaaaacaaa

SEQ ID NO: 648689 - DNA, 15 bp, Homo sapiens
caggttaaaacaaac

SEQ ID NO: 648690 - DNA, 15 bp, Homo sapiens
aggttaaaacaaact

SEQ ID NO: 648691 - DNA, 15 bp, Homo sapiens
ggttaaaacaaactt

SEQ ID NO: 648692 - DNA, 15 bp, Homo sapiens
gttaaaacaaacttt

SEQ ID NO: 648693 - DNA, 15 bp, Homo sapiens
ttaaaacaaacttta

SEQ ID NO: 648694 - DNA, 15 bp, Homo sapiens
taaaacaaactttaa

SEQ ID NO: 648695 - DNA, 15 bp, Homo sapiens
aaaacaaactttaaa

SEQ ID NO: 648696 - DNA, 15 bp, Homo sapiens
aaacaaactttaaaa

SEQ ID NO: 648697 - DNA, 15 bp, Homo sapiens
aacaaactttaaaaa

SEQ ID NO: 648698 - DNA, 15 bp, Homo sapiens
acaaactttaaaaaa

SEQ ID NO: 648699 - DNA, 15 bp, Homo sapiens
caaactttaaaaaac

SEQ ID NO: 648700 - DNA, 15 bp, Homo sapiens
aaactttaaaaaact

SEQ ID NO: 648701 - DNA, 15 bp, Homo sapiens
aactttaaaaaacta

SEQ ID NO: 648702 - DNA, 15 bp, Homo sapiens
actttaaaaaactac

SEQ ID NO: 648703 - DNA, 15 bp, Homo sapiens
ctttaaaaaactaca

SEQ ID NO: 648704 - DNA, 15 bp, Homo sapiens
tttaaaaaactacat

SEQ ID NO: 648705 - DNA, 15 bp, Homo sapiens
ttaaaaaactacata

SEQ ID NO: 648706 - DNA, 15 bp, Homo sapiens
taaaaaactacataa

SEQ ID NO: 648707 - DNA, 15 bp, Homo sapiens
aaaaaactacataaa

SEQ ID NO: 648708 - DNA, 15 bp, Homo sapiens
aaaaactacataaag

SEQ ID NO: 648709 - DNA, 15 bp, Homo sapiens
aaaactacataaagg

SEQ ID NO: 648710 - DNA, 15 bp, Homo sapiens
aaactacataaaggt

SEQ ID NO: 648711 - DNA, 15 bp, Homo sapiens
aactacataaaggtt

SEQ ID NO: 648712 - DNA, 15 bp, Homo sapiens
actacataaaggtta

SEQ ID NO: 648713 - DNA, 15 bp, Homo sapiens
ctacataaaggttat

SEQ ID NO: 648714 - DNA, 15 bp, Homo sapiens
tacataaaggttatt

SEQ ID NO: 648715 - DNA, 15 bp, Homo sapiens
acataaaggttattg

SEQ ID NO: 648716 - DNA, 15 bp, Homo sapiens
cataaaggttattgg

SEQ ID NO: 648717 - DNA, 15 bp, Homo sapiens
ataaaggttattgga

SEQ ID NO: 648718 - DNA, 15 bp, Homo sapiens
taaaggttattggag

SEQ ID NO: 648719 - DNA, 15 bp, Homo sapiens
aaaggttattggaga

SEQ ID NO: 648720 - DNA, 15 bp, Homo sapiens
aaggttattggagat

SEQ ID NO: 648721 - DNA, 15 bp, Homo sapiens
aggttattggagatt

SEQ ID NO: 648722 - DNA, 15 bp, Homo sapiens
ggttattggagattt

SEQ ID NO: 648723 - DNA, 15 bp, Homo sapiens
gttattggagatttt

SEQ ID NO: 648724 - DNA, 15 bp, Homo sapiens
ttattggagattttt

SEQ ID NO: 648725 - DNA, 15 bp, Homo sapiens
tattggagatttttc

SEQ ID NO: 648726 - DNA, 15 bp, Homo sapiens
attggagatttttct

SEQ ID NO: 648727 - DNA, 15 bp, Homo sapiens
ttggagatttttctc

SEQ ID NO: 648728 - DNA, 15 bp, Homo sapiens
tggagatttttctcc

SEQ ID NO: 648729 - DNA, 15 bp, Homo sapiens
ggagatttttctccc

SEQ ID NO: 648730 - DNA, 15 bp, Homo sapiens
gagatttttctccct

SEQ ID NO: 648731 - DNA, 15 bp, Homo sapiens
agatttttctccctg

SEQ ID NO: 648732 - DNA, 15 bp, Homo sapiens
gatttttctccctga

SEQ ID NO: 648733 - DNA, 15 bp, Homo sapiens
atttttctccctgaa

SEQ ID NO: 648734 - DNA, 15 bp, Homo sapiens
tttttctccctgaag

SEQ ID NO: 648735 - DNA, 15 bp, Homo sapiens
ttttctccctgaagc

SEQ ID NO: 648736 - DNA, 15 bp, Homo sapiens
tttctccctgaagct

SEQ ID NO: 648737 - DNA, 15 bp, Homo sapiens
ttctccctgaagctg

SEQ ID NO: 648738 - DNA, 15 bp, Homo sapiens
tctccctgaagctgc

SEQ ID NO: 648739 - DNA, 15 bp, Homo sapiens
ctccctgaagctgct

SEQ ID NO: 648740 - DNA, 15 bp, Homo sapiens
tccctgaagctgctc

SEQ ID NO: 648741 - DNA, 15 bp, Homo sapiens
ccctgaagctgctct

SEQ ID NO: 648742 - DNA, 15 bp, Homo sapiens
cctgaagctgctctg

SEQ ID NO: 648743 - DNA, 15 bp, Homo sapiens
ctgaagctgctctgt

SEQ ID NO: 648744 - DNA, 15 bp, Homo sapiens
tgaagctgctctgtg

SEQ ID NO: 648745 - DNA, 15 bp, Homo sapiens
gaagctgctctgtgt

SEQ ID NO: 648746 - DNA, 15 bp, Homo sapiens
aagctgctctgtgtt

SEQ ID NO: 648747 - DNA, 15 bp, Homo sapiens
agctgctctgtgttt

SEQ ID NO: 648748 - DNA, 15 bp, Homo sapiens
gctgctctgtgtttg

SEQ ID NO: 648749 - DNA, 15 bp, Homo sapiens
ctgctctgtgtttgc

SEQ ID NO: 648750 - DNA, 15 bp, Homo sapiens
tgctctgtgtttgcg

SEQ ID NO: 648751 - DNA, 15 bp, Homo sapiens
gctctgtgtttgcga

SEQ ID NO: 648752 - DNA, 15 bp, Homo sapiens
ctctgtgtttgcgat

SEQ ID NO: 648753 - DNA, 15 bp, Homo sapiens
tctgtgtttgcgatg

SEQ ID NO: 648754 - DNA, 15 bp, Homo sapiens
ctgtgtttgcgatga

SEQ ID NO: 648755 - DNA, 15 bp, Homo sapiens
tgtgtttgcgatgat

SEQ ID NO: 648756 - DNA, 15 bp, Homo sapiens
gtgtttgcgatgatt

SEQ ID NO: 648757 - DNA, 15 bp, Homo sapiens
tgtttgcgatgattt

SEQ ID NO: 648758 - DNA, 15 bp, Homo sapiens
gtttgcgatgatttt

SEQ ID NO: 648759 - DNA, 15 bp, Homo sapiens
tttgcgatgatttta

SEQ ID NO: 648760 - DNA, 15 bp, Homo sapiens
ttgcgatgattttat

SEQ ID NO: 648761 - DNA, 15 bp, Homo sapiens
tgcgatgattttatg

SEQ ID NO: 648762 - DNA, 15 bp, Homo sapiens
gcgatgattttatga

SEQ ID NO: 648763 - DNA, 15 bp, Homo sapiens
cgatgattttatgat

SEQ ID NO: 648764 - DNA, 15 bp, Homo sapiens
gatgattttatgatc

SEQ ID NO: 648765 - DNA, 15 bp, Homo sapiens
atgattttatgatca

SEQ ID NO: 648766 - DNA, 15 bp, Homo sapiens
tgattttatgatcat

SEQ ID NO: 648767 - DNA, 15 bp, Homo sapiens
gattttatgatcatt

SEQ ID NO: 648768 - DNA, 15 bp, Homo sapiens
attttatgatcattt

SEQ ID NO: 648769 - DNA, 15 bp, Homo sapiens
ttttatgatcatttt

SEQ ID NO: 648770 - DNA, 15 bp, Homo sapiens
tttatgatcattttg

SEQ ID NO: 648771 - DNA, 15 bp, Homo sapiens
ttatgatcattttgt

SEQ ID NO: 648772 - DNA, 15 bp, Homo sapiens
tatgatcattttgta

SEQ ID NO: 648773 - DNA, 15 bp, Homo sapiens
atgatcattttgtaa

SEQ ID NO: 648774 - DNA, 15 bp, Homo sapiens
tgatcattttgtaaa

SEQ ID NO: 648775 - DNA, 15 bp, Homo sapiens
gatcattttgtaaaa

SEQ ID NO: 648776 - DNA, 15 bp, Homo sapiens
atcattttgtaaaac

SEQ ID NO: 648777 - DNA, 15 bp, Homo sapiens
tcattttgtaaaacc

SEQ ID NO: 648778 - DNA, 15 bp, Homo sapiens
cattttgtaaaacca

SEQ ID NO: 648779 - DNA, 15 bp, Homo sapiens
attttgtaaaaccac

SEQ ID NO: 648780 - DNA, 15 bp, Homo sapiens
ttttgtaaaaccact

SEQ ID NO: 648781 - DNA, 15 bp, Homo sapiens
tttgtaaaaccactg

SEQ ID NO: 648782 - DNA, 15 bp, Homo sapiens
ttgtaaaaccactgc

SEQ ID NO: 648783 - DNA, 15 bp, Homo sapiens
tgtaaaaccactgca

SEQ ID NO: 648784 - DNA, 15 bp, Homo sapiens
gtaaaaccactgcat

SEQ ID NO: 648785 - DNA, 15 bp, Homo sapiens
taaaaccactgcatc

SEQ ID NO: 648786 - DNA, 15 bp, Homo sapiens
aaaaccactgcatca

SEQ ID NO: 648787 - DNA, 15 bp, Homo sapiens
aaaccactgcatcac

SEQ ID NO: 648788 - DNA, 15 bp, Homo sapiens
aaccactgcatcacg

SEQ ID NO: 648789 - DNA, 15 bp, Homo sapiens
accactgcatcacgg

SEQ ID NO: 648790 - DNA, 15 bp, Homo sapiens
ccactgcatcacggc

SEQ ID NO: 648791 - DNA, 15 bp, Homo sapiens
cactgcatcacggcc

SEQ ID NO: 648792 - DNA, 15 bp, Homo sapiens
actgcatcacggcct

SEQ ID NO: 648793 - DNA, 15 bp, Homo sapiens
ctgcatcacggcctg

SEQ ID NO: 648794 - DNA, 15 bp, Homo sapiens
tgcatcacggcctgt

SEQ ID NO: 648795 - DNA, 15 bp, Homo sapiens
gcatcacggcctgtt

SEQ ID NO: 648796 - DNA, 15 bp, Homo sapiens
catcacggcctgttt

SEQ ID NO: 648797 - DNA, 15 bp, Homo sapiens
atcacggcctgtttt

SEQ ID NO: 648798 - DNA, 15 bp, Homo sapiens
tcacggcctgtttta

SEQ ID NO: 648799 - DNA, 15 bp, Homo sapiens
cacggcctgttttaa

SEQ ID NO: 648800 - DNA, 15 bp, Homo sapiens
acggcctgttttaaa

SEQ ID NO: 648801 - DNA, 15 bp, Homo sapiens
cggcctgttttaaac

SEQ ID NO: 648802 - DNA, 15 bp, Homo sapiens
ggcctgttttaaaca

SEQ ID NO: 648803 - DNA, 15 bp, Homo sapiens
gcctgttttaaacat

SEQ ID NO: 648804 - DNA, 15 bp, Homo sapiens
cctgttttaaacatt

SEQ ID NO: 648805 - DNA, 15 bp, Homo sapiens
ctgttttaaacatta

SEQ ID NO: 648806 - DNA, 15 bp, Homo sapiens
tgttttaaacattat

SEQ ID NO: 648807 - DNA, 15 bp, Homo sapiens
gttttaaacattata

SEQ ID NO: 648808 - DNA, 15 bp, Homo sapiens
ttttaaacattataa

SEQ ID NO: 648809 - DNA, 15 bp, Homo sapiens
tttaaacattataac

SEQ ID NO: 648810 - DNA, 15 bp, Homo sapiens
ttaaacattataact

SEQ ID NO: 648811 - DNA, 15 bp, Homo sapiens
taaacattataactt

SEQ ID NO: 648812 - DNA, 15 bp, Homo sapiens
aaacattataacttg

SEQ ID NO: 648813 - DNA, 15 bp, Homo sapiens
aacattataacttga

SEQ ID NO: 648814 - DNA, 15 bp, Homo sapiens
acattataacttgag

SEQ ID NO: 648815 - DNA, 15 bp, Homo sapiens
cattataacttgagc

SEQ ID NO: 648816 - DNA, 15 bp, Homo sapiens
attataacttgagct

SEQ ID NO: 648817 - DNA, 15 bp, Homo sapiens
ttataacttgagctg

SEQ ID NO: 648818 - DNA, 15 bp, Homo sapiens
tataacttgagctgt

SEQ ID NO: 648819 - DNA, 15 bp, Homo sapiens
ataacttgagctgtt

SEQ ID NO: 648820 - DNA, 15 bp, Homo sapiens
taacttgagctgttt

SEQ ID NO: 648821 - DNA, 15 bp, Homo sapiens
aacttgagctgtttc

SEQ ID NO: 648822 - DNA, 15 bp, Homo sapiens
acttgagctgtttct

SEQ ID NO: 648823 - DNA, 15 bp, Homo sapiens
cttgagctgtttctg

SEQ ID NO: 648824 - DNA, 15 bp, Homo sapiens
ttgagctgtttctgc

SEQ ID NO: 648825 - DNA, 15 bp, Homo sapiens
tgagctgtttctgcc

SEQ ID NO: 648826 - DNA, 15 bp, Homo sapiens
gagctgtttctgccg

SEQ ID NO: 648827 - DNA, 15 bp, Homo sapiens
agctgtttctgccga

SEQ ID NO: 648828 - DNA, 15 bp, Homo sapiens
gctgtttctgccgaa

SEQ ID NO: 648829 - DNA, 15 bp, Homo sapiens
ctgtttctgccgaaa

SEQ ID NO: 648830 - DNA, 15 bp, Homo sapiens
tgtttctgccgaaat

SEQ ID NO: 648831 - DNA, 15 bp, Homo sapiens
gtttctgccgaaatt

SEQ ID NO: 648832 - DNA, 15 bp, Homo sapiens
tttctgccgaaattg

SEQ ID NO: 648833 - DNA, 15 bp, Homo sapiens
ttctgccgaaattga

SEQ ID NO: 648834 - DNA, 15 bp, Homo sapiens
tctgccgaaattgac

SEQ ID NO: 648835 - DNA, 15 bp, Homo sapiens
ctgccgaaattgact

SEQ ID NO: 648836 - DNA, 15 bp, Homo sapiens
tgccgaaattgactc

SEQ ID NO: 648837 - DNA, 15 bp, Homo sapiens
gccgaaattgactca

SEQ ID NO: 648838 - DNA, 15 bp, Homo sapiens
ccgaaattgactcaa

SEQ ID NO: 648839 - DNA, 15 bp, Homo sapiens
cgaaattgactcaag

SEQ ID NO: 648840 - DNA, 15 bp, Homo sapiens
gaaattgactcaagc

SEQ ID NO: 648841 - DNA, 15 bp, Homo sapiens
aaattgactcaagca

SEQ ID NO: 648842 - DNA, 15 bp, Homo sapiens
aattgactcaagcat

SEQ ID NO: 648843 - DNA, 15 bp, Homo sapiens
attgactcaagcatt

SEQ ID NO: 648844 - DNA, 15 bp, Homo sapiens
ttgactcaagcattt

SEQ ID NO: 648845 - DNA, 15 bp, Homo sapiens
tgactcaagcatttt

SEQ ID NO: 648846 - DNA, 15 bp, Homo sapiens
gactcaagcattttg

SEQ ID NO: 648847 - DNA, 15 bp, Homo sapiens
actcaagcattttgt

SEQ ID NO: 648848 - DNA, 15 bp, Homo sapiens
ctcaagcattttgtc

SEQ ID NO: 648849 - DNA, 15 bp, Homo sapiens
tcaagcattttgtct

SEQ ID NO: 648850 - DNA, 15 bp, Homo sapiens
caagcattttgtctt

SEQ ID NO: 648851 - DNA, 15 bp, Homo sapiens
aagcattttgtcttc

SEQ ID NO: 648852 - DNA, 15 bp, Homo sapiens
agcattttgtcttca

SEQ ID NO: 648853 - DNA, 15 bp, Homo sapiens
gcattttgtcttcac

SEQ ID NO: 648854 - DNA, 15 bp, Homo sapiens
cattttgtcttcaca

SEQ ID NO: 648855 - DNA, 15 bp, Homo sapiens
attttgtcttcacag

SEQ ID NO: 648856 - DNA, 15 bp, Homo sapiens
ttttgtcttcacagg

SEQ ID NO: 648857 - DNA, 15 bp, Homo sapiens
tttgtcttcacaggt

SEQ ID NO: 648858 - DNA, 15 bp, Homo sapiens
ttgtcttcacaggta

SEQ ID NO: 648859 - DNA, 15 bp, Homo sapiens
tgtcttcacaggtat

SEQ ID NO: 648860 - DNA, 15 bp, Homo sapiens
gtcttcacaggtatg

SEQ ID NO: 648861 - DNA, 15 bp, Homo sapiens
tcttcacaggtatga

SEQ ID NO: 648862 - DNA, 15 bp, Homo sapiens
cttcacaggtatgag

SEQ ID NO: 648863 - DNA, 15 bp, Homo sapiens
ttcacaggtatgaga

SEQ ID NO: 648864 - DNA, 15 bp, Homo sapiens
tcacaggtatgagaa

SEQ ID NO: 648865 - DNA, 15 bp, Homo sapiens
cacaggtatgagaaa

SEQ ID NO: 648866 - DNA, 15 bp, Homo sapiens
acaggtatgagaaaa

SEQ ID NO: 648867 - DNA, 15 bp, Homo sapiens
caggtatgagaaaaa

SEQ ID NO: 648868 - DNA, 15 bp, Homo sapiens
aggtatgagaaaaat

SEQ ID NO: 648869 - DNA, 15 bp, Homo sapiens
ggtatgagaaaaatc

SEQ ID NO: 648870 - DNA, 15 bp, Homo sapiens
gtatgagaaaaatct

SEQ ID NO: 648871 - DNA, 15 bp, Homo sapiens
tatgagaaaaatctt

SEQ ID NO: 648872 - DNA, 15 bp, Homo sapiens
atgagaaaaatcttg

SEQ ID NO: 648873 - DNA, 15 bp, Homo sapiens
tgagaaaaatcttgt

SEQ ID NO: 648874 - DNA, 15 bp, Homo sapiens
gagaaaaatcttgtg

SEQ ID NO: 648875 - DNA, 15 bp, Homo sapiens
agaaaaatcttgtgt

SEQ ID NO: 648876 - DNA, 15 bp, Homo sapiens
gaaaaatcttgtgtt

SEQ ID NO: 648877 - DNA, 15 bp, Homo sapiens
aaaaatcttgtgttc

SEQ ID NO: 648878 - DNA, 15 bp, Homo sapiens
aaaatcttgtgttcg

SEQ ID NO: 648879 - DNA, 15 bp, Homo sapiens
aaatcttgtgttcgc

SEQ ID NO: 648880 - DNA, 15 bp, Homo sapiens
aatcttgtgttcgcc

SEQ ID NO: 648881 - DNA, 15 bp, Homo sapiens
atcttgtgttcgccc

SEQ ID NO: 648882 - DNA, 15 bp, Homo sapiens
tcttgtgttcgccca

SEQ ID NO: 648883 - DNA, 15 bp, Homo sapiens
cttgtgttcgcccag

SEQ ID NO: 648884 - DNA, 15 bp, Homo sapiens
ttgtgttcgcccagc

SEQ ID NO: 648885 - DNA, 15 bp, Homo sapiens
tgtgttcgcccagcg

SEQ ID NO: 648886 - DNA, 15 bp, Homo sapiens
gtgttcgcccagcgt

SEQ ID NO: 648887 - DNA, 15 bp, Homo sapiens
tgttcgcccagcgtt

SEQ ID NO: 648888 - DNA, 15 bp, Homo sapiens
gttcgcccagcgttg

SEQ ID NO: 648889 - DNA, 15 bp, Homo sapiens
ttcgcccagcgttgg

SEQ ID NO: 648890 - DNA, 15 bp, Homo sapiens
tcgcccagcgttggg

SEQ ID NO: 648891 - DNA, 15 bp, Homo sapiens
cgcccagcgttgggg

SEQ ID NO: 648892 - DNA, 15 bp, Homo sapiens
gcccagcgttgggga

SEQ ID NO: 648893 - DNA, 15 bp, Homo sapiens
cccagcgttggggaa

SEQ ID NO: 648894 - DNA, 15 bp, Homo sapiens
ccagcgttggggaat

SEQ ID NO: 648895 - DNA, 15 bp, Homo sapiens
cagcgttggggaatt

SEQ ID NO: 648896 - DNA, 15 bp, Homo sapiens
agcgttggggaatta

SEQ ID NO: 648897 - DNA, 15 bp, Homo sapiens
gcgttggggaattag

SEQ ID NO: 648898 - DNA, 15 bp, Homo sapiens
cgttggggaattaga

SEQ ID NO: 648899 - DNA, 15 bp, Homo sapiens
gttggggaattagaa

SEQ ID NO: 648900 - DNA, 15 bp, Homo sapiens
ttggggaattagaaa

SEQ ID NO: 648901 - DNA, 15 bp, Homo sapiens
tggggaattagaaaa

SEQ ID NO: 648902 - DNA, 15 bp, Homo sapiens
ggggaattagaaaag

SEQ ID NO: 648903 - DNA, 15 bp, Homo sapiens
gggaattagaaaagg

SEQ ID NO: 648904 - DNA, 15 bp, Homo sapiens
ggaattagaaaagga

SEQ ID NO: 648905 - DNA, 15 bp, Homo sapiens
gaattagaaaaggaa

SEQ ID NO: 648906 - DNA, 15 bp, Homo sapiens
aattagaaaaggaat

SEQ ID NO: 648907 - DNA, 15 bp, Homo sapiens
attagaaaaggaata

SEQ ID NO: 648908 - DNA, 15 bp, Homo sapiens
ttagaaaaggaatag

SEQ ID NO: 648909 - DNA, 15 bp, Homo sapiens
tagaaaaggaatagt

SEQ ID NO: 648910 - DNA, 15 bp, Homo sapiens
agaaaaggaatagtg

SEQ ID NO: 648911 - DNA, 15 bp, Homo sapiens
gaaaaggaatagtga

SEQ ID NO: 648912 - DNA, 15 bp, Homo sapiens
aaaaggaatagtgat

SEQ ID NO: 648913 - DNA, 15 bp, Homo sapiens
aaaggaatagtgatg

SEQ ID NO: 648914 - DNA, 15 bp, Homo sapiens
aaggaatagtgatgg

SEQ ID NO: 648915 - DNA, 15 bp, Homo sapiens
aggaatagtgatggg

SEQ ID NO: 648916 - DNA, 15 bp, Homo sapiens
ggaatagtgatggga

SEQ ID NO: 648917 - DNA, 15 bp, Homo sapiens
gaatagtgatgggat

SEQ ID NO: 648918 - DNA, 15 bp, Homo sapiens
aatagtgatgggatt

SEQ ID NO: 648919 - DNA, 15 bp, Homo sapiens
atagtgatgggattc

SEQ ID NO: 648920 - DNA, 15 bp, Homo sapiens
tagtgatgggattct

SEQ ID NO: 648921 - DNA, 15 bp, Homo sapiens
agtgatgggattctt

SEQ ID NO: 648922 - DNA, 15 bp, Homo sapiens
gtgatgggattcttt

SEQ ID NO: 648923 - DNA, 15 bp, Homo sapiens
tgatgggattcttta

SEQ ID NO: 648924 - DNA, 15 bp, Homo sapiens
gatgggattctttac

SEQ ID NO: 648925 - DNA, 15 bp, Homo sapiens
atgggattctttact

SEQ ID NO: 648926 - DNA, 15 bp, Homo sapiens
tgggattctttactg

SEQ ID NO: 648927 - DNA, 15 bp, Homo sapiens
gggattctttactgg

SEQ ID NO: 648928 - DNA, 15 bp, Homo sapiens
ggattctttactgga

SEQ ID NO: 648929 - DNA, 15 bp, Homo sapiens
gattctttactggat

SEQ ID NO: 648930 - DNA, 15 bp, Homo sapiens
attctttactggatt

SEQ ID NO: 648931 - DNA, 15 bp, Homo sapiens
ttctttactggattc

SEQ ID NO: 648932 - DNA, 15 bp, Homo sapiens
tctttactggattcg

SEQ ID NO: 648933 - DNA, 15 bp, Homo sapiens
ctttactggattcgt

SEQ ID NO: 648934 - DNA, 15 bp, Homo sapiens
tttactggattcgtg

SEQ ID NO: 648935 - DNA, 15 bp, Homo sapiens
ttactggattcgtgt

SEQ ID NO: 648936 - DNA, 15 bp, Homo sapiens
tactggattcgtgtg

SEQ ID NO: 648937 - DNA, 15 bp, Homo sapiens
actggattcgtgtgg

SEQ ID NO: 648938 - DNA, 15 bp, Homo sapiens
ctggattcgtgtggt

SEQ ID NO: 648939 - DNA, 15 bp, Homo sapiens
tggattcgtgtggtg

SEQ ID NO: 648940 - DNA, 15 bp, Homo sapiens
ggattcgtgtggtgt

SEQ ID NO: 648941 - DNA, 15 bp, Homo sapiens
gattcgtgtggtgtc

SEQ ID NO: 648942 - DNA, 15 bp, Homo sapiens
attcgtgtggtgtct

SEQ ID NO: 648943 - DNA, 15 bp, Homo sapiens
ttcgtgtggtgtctc

SEQ ID NO: 648944 - DNA, 15 bp, Homo sapiens
tcgtgtggtgtctca

SEQ ID NO: 648945 - DNA, 15 bp, Homo sapiens
cgtgtggtgtctcat

SEQ ID NO: 648946 - DNA, 15 bp, Homo sapiens
gtgtggtgtctcatc

SEQ ID NO: 648947 - DNA, 15 bp, Homo sapiens
tgtggtgtctcatct

SEQ ID NO: 648948 - DNA, 15 bp, Homo sapiens
gtggtgtctcatctt

SEQ ID NO: 648949 - DNA, 15 bp, Homo sapiens
tggtgtctcatcttt

SEQ ID NO: 648950 - DNA, 15 bp, Homo sapiens
ggtgtctcatctttt

SEQ ID NO: 648951 - DNA, 15 bp, Homo sapiens
gtgtctcatcttttt

SEQ ID NO: 648952 - DNA, 15 bp, Homo sapiens
tgtctcatctttttg

SEQ ID NO: 648953 - DNA, 15 bp, Homo sapiens
gtctcatctttttgt

SEQ ID NO: 648954 - DNA, 15 bp, Homo sapiens
tctcatctttttgtg

SEQ ID NO: 648955 - DNA, 15 bp, Homo sapiens
ctcatctttttgtgt

SEQ ID NO: 648956 - DNA, 15 bp, Homo sapiens
tcatctttttgtgtt

SEQ ID NO: 648957 - DNA, 15 bp, Homo sapiens
catctttttgtgtta

SEQ ID NO: 648958 - DNA, 15 bp, Homo sapiens
atctttttgtgttat

SEQ ID NO: 648959 - DNA, 15 bp, Homo sapiens
tctttttgtgttatg

SEQ ID NO: 648960 - DNA, 15 bp, Homo sapiens
ctttttgtgttatgc

SEQ ID NO: 648961 - DNA, 15 bp, Homo sapiens
tttttgtgttatgca

SEQ ID NO: 648962 - DNA, 15 bp, Homo sapiens
ttttgtgttatgcac

SEQ ID NO: 648963 - DNA, 15 bp, Homo sapiens
tttgtgttatgcact

SEQ ID NO: 648964 - DNA, 15 bp, Homo sapiens
ttgtgttatgcactg

SEQ ID NO: 648965 - DNA, 15 bp, Homo sapiens
tgtgttatgcactgg

SEQ ID NO: 648966 - DNA, 15 bp, Homo sapiens
gtgttatgcactggc

SEQ ID NO: 648967 - DNA, 15 bp, Homo sapiens
tgttatgcactggcc

SEQ ID NO: 648968 - DNA, 15 bp, Homo sapiens
gttatgcactggcct

SEQ ID NO: 648969 - DNA, 15 bp, Homo sapiens
ttatgcactggcctt

SEQ ID NO: 648970 - DNA, 15 bp, Homo sapiens
tatgcactggccttc

SEQ ID NO: 648971 - DNA, 15 bp, Homo sapiens
atgcactggccttct

SEQ ID NO: 648972 - DNA, 15 bp, Homo sapiens
tgcactggccttctg

SEQ ID NO: 648973 - DNA, 15 bp, Homo sapiens
gcactggccttctgg

SEQ ID NO: 648974 - DNA, 15 bp, Homo sapiens
cactggccttctggt

SEQ ID NO: 648975 - DNA, 15 bp, Homo sapiens
actggccttctggta

SEQ ID NO: 648976 - DNA, 15 bp, Homo sapiens
ctggccttctggtac

SEQ ID NO: 648977 - DNA, 15 bp, Homo sapiens
tggccttctggtacg

SEQ ID NO: 648978 - DNA, 15 bp, Homo sapiens
ggccttctggtacgg

SEQ ID NO: 648979 - DNA, 15 bp, Homo sapiens
gccttctggtacggc

SEQ ID NO: 648980 - DNA, 15 bp, Homo sapiens
ccttctggtacggct

SEQ ID NO: 648981 - DNA, 15 bp, Homo sapiens
cttctggtacggctc

SEQ ID NO: 648982 - DNA, 15 bp, Homo sapiens
ttctggtacggctcc

SEQ ID NO: 648983 - DNA, 15 bp, Homo sapiens
tctggtacggctcca

SEQ ID NO: 648984 - DNA, 15 bp, Homo sapiens
ctggtacggctccac

SEQ ID NO: 648985 - DNA, 15 bp, Homo sapiens
tggtacggctccaca

SEQ ID NO: 648986 - DNA, 15 bp, Homo sapiens
ggtacggctccacac

SEQ ID NO: 648987 - DNA, 15 bp, Homo sapiens
gtacggctccacact

SEQ ID NO: 648988 - DNA, 15 bp, Homo sapiens
tacggctccacactt

SEQ ID NO: 648989 - DNA, 15 bp, Homo sapiens
acggctccacacttg

SEQ ID NO: 648990 - DNA, 15 bp, Homo sapiens
cggctccacacttgt

SEQ ID NO: 648991 - DNA, 15 bp, Homo sapiens
ggctccacacttgtc

SEQ ID NO: 648992 - DNA, 15 bp, Homo sapiens
gctccacacttgtcc

SEQ ID NO: 648993 - DNA, 15 bp, Homo sapiens
ctccacacttgtcct

SEQ ID NO: 648994 - DNA, 15 bp, Homo sapiens
tccacacttgtcctg

SEQ ID NO: 648995 - DNA, 15 bp, Homo sapiens
ccacacttgtcctgg

SEQ ID NO: 648996 - DNA, 15 bp, Homo sapiens
cacacttgtcctgga

SEQ ID NO: 648997 - DNA, 15 bp, Homo sapiens
acacttgtcctggat

SEQ ID NO: 648998 - DNA, 15 bp, Homo sapiens
cacttgtcctggatg

SEQ ID NO: 648999 - DNA, 15 bp, Homo sapiens
acttgtcctggatga

SEQ ID NO: 649000 - DNA, 15 bp, Homo sapiens
cttgtcctggatgaa

SEQ ID NO: 649001 - DNA, 15 bp, Homo sapiens
ttgtcctggatgaag

SEQ ID NO: 649002 - DNA, 15 bp, Homo sapiens
tgtcctggatgaagg

SEQ ID NO: 649003 - DNA, 15 bp, Homo sapiens
gtcctggatgaagga

SEQ ID NO: 649004 - DNA, 15 bp, Homo sapiens
tcctggatgaaggag

SEQ ID NO: 649005 - DNA, 15 bp, Homo sapiens
cctggatgaaggaga

SEQ ID NO: 649006 - DNA, 15 bp, Homo sapiens
ctggatgaaggagaa

SEQ ID NO: 649007 - DNA, 15 bp, Homo sapiens
tggatgaaggagaat

SEQ ID NO: 649008 - DNA, 15 bp, Homo sapiens
ggatgaaggagaata

SEQ ID NO: 649009 - DNA, 15 bp, Homo sapiens
gatgaaggagaatat

SEQ ID NO: 649010 - DNA, 15 bp, Homo sapiens
atgaaggagaatata

SEQ ID NO: 649011 - DNA, 15 bp, Homo sapiens
tgaaggagaatatac

SEQ ID NO: 649012 - DNA, 15 bp, Homo sapiens
gaaggagaatataca

SEQ ID NO: 649013 - DNA, 15 bp, Homo sapiens
aaggagaatatacac

SEQ ID NO: 649014 - DNA, 15 bp, Homo sapiens
aggagaatatacacc

SEQ ID NO: 649015 - DNA, 15 bp, Homo sapiens
ggagaatatacacca

SEQ ID NO: 649016 - DNA, 15 bp, Homo sapiens
gagaatatacaccag

SEQ ID NO: 649017 - DNA, 15 bp, Homo sapiens
agaatatacaccagg

SEQ ID NO: 649018 - DNA, 15 bp, Homo sapiens
gaatatacaccagga

SEQ ID NO: 649019 - DNA, 15 bp, Homo sapiens
aatatacaccaggaa

SEQ ID NO: 649020 - DNA, 15 bp, Homo sapiens
atatacaccaggaac

SEQ ID NO: 649021 - DNA, 15 bp, Homo sapiens
tatacaccaggaacc

SEQ ID NO: 649022 - DNA, 15 bp, Homo sapiens
atacaccaggaaccc

SEQ ID NO: 649023 - DNA, 15 bp, Homo sapiens
tacaccaggaaccct

SEQ ID NO: 649024 - DNA, 15 bp, Homo sapiens
acaccaggaaccctt

SEQ ID NO: 649025 - DNA, 15 bp, Homo sapiens
caccaggaacccttg

SEQ ID NO: 649026 - DNA, 15 bp, Homo sapiens
accaggaacccttgt

SEQ ID NO: 649027 - DNA, 15 bp, Homo sapiens
ccaggaacccttgtc

SEQ ID NO: 649028 - DNA, 15 bp, Homo sapiens
caggaacccttgtcc

SEQ ID NO: 649029 - DNA, 15 bp, Homo sapiens
aggaacccttgtcca

SEQ ID NO: 649030 - DNA, 15 bp, Homo sapiens
ggaacccttgtccag

SEQ ID NO: 649031 - DNA, 15 bp, Homo sapiens
gaacccttgtccagg

SEQ ID NO: 649032 - DNA, 15 bp, Homo sapiens
aacccttgtccaggt

SEQ ID NO: 649033 - DNA, 15 bp, Homo sapiens
acccttgtccaggta

SEQ ID NO: 649034 - DNA, 15 bp, Homo sapiens
cccttgtccaggtac

SEQ ID NO: 649035 - DNA, 15 bp, Homo sapiens
ccttgtccaggtacc

SEQ ID NO: 649036 - DNA, 15 bp, Homo sapiens
cttgtccaggtacct

SEQ ID NO: 649037 - DNA, 15 bp, Homo sapiens
ttgtccaggtacctt

SEQ ID NO: 649038 - DNA, 15 bp, Homo sapiens
tgtccaggtaccttg

SEQ ID NO: 649039 - DNA, 15 bp, Homo sapiens
gtccaggtaccttgg

SEQ ID NO: 649040 - DNA, 15 bp, Homo sapiens
tccaggtaccttgga

SEQ ID NO: 649041 - DNA, 15 bp, Homo sapiens
ccaggtaccttggac

SEQ ID NO: 649042 - DNA, 15 bp, Homo sapiens
caggtaccttggact

SEQ ID NO: 649043 - DNA, 15 bp, Homo sapiens
aggtaccttggactt

SEQ ID NO: 649044 - DNA, 15 bp, Homo sapiens
ggtaccttggactta

SEQ ID NO: 649045 - DNA, 15 bp, Homo sapiens
gtaccttggacttat

SEQ ID NO: 649046 - DNA, 15 bp, Homo sapiens
taccttggacttatt

SEQ ID NO: 649047 - DNA, 15 bp, Homo sapiens
accttggacttattg

SEQ ID NO: 649048 - DNA, 15 bp, Homo sapiens
ccttggacttattga

SEQ ID NO: 649049 - DNA, 15 bp, Homo sapiens
cttggacttattgac

SEQ ID NO: 649050 - DNA, 15 bp, Homo sapiens
ttggacttattgacc

SEQ ID NO: 649051 - DNA, 15 bp, Homo sapiens
tggacttattgaccg

SEQ ID NO: 649052 - DNA, 15 bp, Homo sapiens
ggacttattgaccga

SEQ ID NO: 649053 - DNA, 15 bp, Homo sapiens
gacttattgaccgag

SEQ ID NO: 649054 - DNA, 15 bp, Homo sapiens
acttattgaccgaga

SEQ ID NO: 649055 - DNA, 15 bp, Homo sapiens
cttattgaccgagac

SEQ ID NO: 649056 - DNA, 15 bp, Homo sapiens
ttattgaccgagaca

SEQ ID NO: 649057 - DNA, 15 bp, Homo sapiens
tattgaccgagacat

SEQ ID NO: 649058 - DNA, 15 bp, Homo sapiens
attgaccgagacata

SEQ ID NO: 649059 - DNA, 15 bp, Homo sapiens
ttgaccgagacatag

SEQ ID NO: 649060 - DNA, 15 bp, Homo sapiens
tgaccgagacatagc

SEQ ID NO: 649061 - DNA, 15 bp, Homo sapiens
gaccgagacatagca

SEQ ID NO: 649062 - DNA, 15 bp, Homo sapiens
accgagacatagcat

SEQ ID NO: 649063 - DNA, 15 bp, Homo sapiens
ccgagacatagcatt

SEQ ID NO: 649064 - DNA, 15 bp, Homo sapiens
cgagacatagcattt

SEQ ID NO: 649065 - DNA, 15 bp, Homo sapiens
gagacatagcatttc

SEQ ID NO: 649066 - DNA, 15 bp, Homo sapiens
agacatagcatttcc

SEQ ID NO: 649067 - DNA, 15 bp, Homo sapiens
gacatagcatttcct

SEQ ID NO: 649068 - DNA, 15 bp, Homo sapiens
acatagcatttcctt

SEQ ID NO: 649069 - DNA, 15 bp, Homo sapiens
catagcatttccttc

SEQ ID NO: 649070 - DNA, 15 bp, Homo sapiens
atagcatttccttct

SEQ ID NO: 649071 - DNA, 15 bp, Homo sapiens
tagcatttccttctg

SEQ ID NO: 649072 - DNA, 15 bp, Homo sapiens
agcatttccttctgg

SEQ ID NO: 649073 - DNA, 15 bp, Homo sapiens
gcatttccttctggt

SEQ ID NO: 649074 - DNA, 15 bp, Homo sapiens
catttccttctggta

SEQ ID NO: 649075 - DNA, 15 bp, Homo sapiens
atttccttctggtat

SEQ ID NO: 649076 - DNA, 15 bp, Homo sapiens
tttccttctggtatc

SEQ ID NO: 649077 - DNA, 15 bp, Homo sapiens
ttccttctggtatct

SEQ ID NO: 649078 - DNA, 15 bp, Homo sapiens
tccttctggtatctc

SEQ ID NO: 649079 - DNA, 15 bp, Homo sapiens
ccttctggtatctca

SEQ ID NO: 649080 - DNA, 15 bp, Homo sapiens
cttctggtatctcag

SEQ ID NO: 649081 - DNA, 15 bp, Homo sapiens
ttctggtatctcaga

SEQ ID NO: 649082 - DNA, 15 bp, Homo sapiens
tctggtatctcagaa

SEQ ID NO: 649083 - DNA, 15 bp, Homo sapiens
ctggtatctcagaaa

SEQ ID NO: 649084 - DNA, 15 bp, Homo sapiens
tggtatctcagaaaa

SEQ ID NO: 649085 - DNA, 15 bp, Homo sapiens
ggtatctcagaaaag

SEQ ID NO: 649086 - DNA, 15 bp, Homo sapiens
gtatctcagaaaagt

SEQ ID NO: 649087 - DNA, 15 bp, Homo sapiens
tatctcagaaaagtc

SEQ ID NO: 649088 - DNA, 15 bp, Homo sapiens
atctcagaaaagtcc

SEQ ID NO: 649089 - DNA, 15 bp, Homo sapiens
tctcagaaaagtcca

SEQ ID NO: 649090 - DNA, 15 bp, Homo sapiens
ctcagaaaagtccat

SEQ ID NO: 649091 - DNA, 15 bp, Homo sapiens
tcagaaaagtccatg

SEQ ID NO: 649092 - DNA, 15 bp, Homo sapiens
cagaaaagtccatgg

SEQ ID NO: 649093 - DNA, 15 bp, Homo sapiens
agaaaagtccatgga

SEQ ID NO: 649094 - DNA, 15 bp, Homo sapiens
gaaaagtccatggat

SEQ ID NO: 649095 - DNA, 15 bp, Homo sapiens
aaaagtccatggatt

SEQ ID NO: 649096 - DNA, 15 bp, Homo sapiens
aaagtccatggatta

SEQ ID NO: 649097 - DNA, 15 bp, Homo sapiens
aagtccatggattag

SEQ ID NO: 649098 - DNA, 15 bp, Homo sapiens
agtccatggattaga

SEQ ID NO: 649099 - DNA, 15 bp, Homo sapiens
gtccatggattagat

SEQ ID NO: 649100 - DNA, 15 bp, Homo sapiens
tccatggattagata

SEQ ID NO: 649101 - DNA, 15 bp, Homo sapiens
ccatggattagatat

SEQ ID NO: 649102 - DNA, 15 bp, Homo sapiens
catggattagatatt

SEQ ID NO: 649103 - DNA, 15 bp, Homo sapiens
atggattagatattt

SEQ ID NO: 649104 - DNA, 15 bp, Homo sapiens
tggattagatatttt

SEQ ID NO: 649105 - DNA, 15 bp, Homo sapiens
ggattagatattttg

SEQ ID NO: 649106 - DNA, 15 bp, Homo sapiens
gattagatattttgt

SEQ ID NO: 649107 - DNA, 15 bp, Homo sapiens
attagatattttgtt

SEQ ID NO: 649108 - DNA, 15 bp, Homo sapiens
ttagatattttgttt

SEQ ID NO: 649109 - DNA, 15 bp, Homo sapiens
tagatattttgttta

SEQ ID NO: 649110 - DNA, 15 bp, Homo sapiens
agatattttgtttat

SEQ ID NO: 649111 - DNA, 15 bp, Homo sapiens
gatattttgtttatt

SEQ ID NO: 649112 - DNA, 15 bp, Homo sapiens
atattttgtttatta

SEQ ID NO: 649113 - DNA, 15 bp, Homo sapiens
tattttgtttattac

SEQ ID NO: 649114 - DNA, 15 bp, Homo sapiens
attttgtttattact

SEQ ID NO: 649115 - DNA, 15 bp, Homo sapiens
ttttgtttattactt

SEQ ID NO: 649116 - DNA, 15 bp, Homo sapiens
tttgtttattacttt

SEQ ID NO: 649117 - DNA, 15 bp, Homo sapiens
ttgtttattactttg

SEQ ID NO: 649118 - DNA, 15 bp, Homo sapiens
tgtttattactttgg

SEQ ID NO: 649119 - DNA, 15 bp, Homo sapiens
gtttattactttggt

SEQ ID NO: 649120 - DNA, 15 bp, Homo sapiens
tttattactttggtg

SEQ ID NO: 649121 - DNA, 15 bp, Homo sapiens
ttattactttggtgc

SEQ ID NO: 649122 - DNA, 15 bp, Homo sapiens
tattactttggtgcc

SEQ ID NO: 649123 - DNA, 15 bp, Homo sapiens
attactttggtgcct

SEQ ID NO: 649124 - DNA, 15 bp, Homo sapiens
ttactttggtgcctt

SEQ ID NO: 649125 - DNA, 15 bp, Homo sapiens
tactttggtgccttc

SEQ ID NO: 649126 - DNA, 15 bp, Homo sapiens
actttggtgccttca

SEQ ID NO: 649127 - DNA, 15 bp, Homo sapiens
ctttggtgccttcag

SEQ ID NO: 649128 - DNA, 15 bp, Homo sapiens
tttggtgccttcagg

SEQ ID NO: 649129 - DNA, 15 bp, Homo sapiens
ttggtgccttcagga

SEQ ID NO: 649130 - DNA, 15 bp, Homo sapiens
tggtgccttcaggaa

SEQ ID NO: 649131 - DNA, 15 bp, Homo sapiens
ggtgccttcaggaaa

SEQ ID NO: 649132 - DNA, 15 bp, Homo sapiens
gtgccttcaggaaaa

SEQ ID NO: 649133 - DNA, 15 bp, Homo sapiens
tgccttcaggaaaaa

SEQ ID NO: 649134 - DNA, 15 bp, Homo sapiens
gccttcaggaaaaaa

SEQ ID NO: 649135 - DNA, 15 bp, Homo sapiens
ccttcaggaaaaaag

SEQ ID NO: 649136 - DNA, 15 bp, Homo sapiens
cttcaggaaaaaagc

SEQ ID NO: 649137 - DNA, 15 bp, Homo sapiens
ttcaggaaaaaagca

SEQ ID NO: 649138 - DNA, 15 bp, Homo sapiens
tcaggaaaaaagcat

SEQ ID NO: 649139 - DNA, 15 bp, Homo sapiens
caggaaaaaagcatc

SEQ ID NO: 649140 - DNA, 15 bp, Homo sapiens
aggaaaaaagcatca

SEQ ID NO: 649141 - DNA, 15 bp, Homo sapiens
ggaaaaaagcatcaa

SEQ ID NO: 649142 - DNA, 15 bp, Homo sapiens
gaaaaaagcatcaat

SEQ ID NO: 649143 - DNA, 15 bp, Homo sapiens
aaaaaagcatcaatg

SEQ ID NO: 649144 - DNA, 15 bp, Homo sapiens
aaaaagcatcaatga

SEQ ID NO: 649145 - DNA, 15 bp, Homo sapiens
aaaagcatcaatgat

SEQ ID NO: 649146 - DNA, 15 bp, Homo sapiens
aaagcatcaatgatt

SEQ ID NO: 649147 - DNA, 15 bp, Homo sapiens
aagcatcaatgattt

SEQ ID NO: 649148 - DNA, 15 bp, Homo sapiens
agcatcaatgatttt

SEQ ID NO: 649149 - DNA, 15 bp, Homo sapiens
gcatcaatgatttta

SEQ ID NO: 649150 - DNA, 15 bp, Homo sapiens
catcaatgattttat

SEQ ID NO: 649151 - DNA, 15 bp, Homo sapiens
atcaatgattttatg

SEQ ID NO: 649152 - DNA, 15 bp, Homo sapiens
tcaatgattttatgg

SEQ ID NO: 649153 - DNA, 15 bp, Homo sapiens
caatgattttatgga

SEQ ID NO: 649154 - DNA, 15 bp, Homo sapiens
aatgattttatggag

SEQ ID NO: 649155 - DNA, 15 bp, Homo sapiens
atgattttatggagt

SEQ ID NO: 649156 - DNA, 15 bp, Homo sapiens
tgattttatggagtc

SEQ ID NO: 649157 - DNA, 15 bp, Homo sapiens
gattttatggagtct

SEQ ID NO: 649158 - DNA, 15 bp, Homo sapiens
attttatggagtctg

SEQ ID NO: 649159 - DNA, 15 bp, Homo sapiens
ttttatggagtctgt

SEQ ID NO: 649160 - DNA, 15 bp, Homo sapiens
tttatggagtctgtc

SEQ ID NO: 649161 - DNA, 15 bp, Homo sapiens
ttatggagtctgtct

SEQ ID NO: 649162 - DNA, 15 bp, Homo sapiens
tatggagtctgtctg

SEQ ID NO: 649163 - DNA, 15 bp, Homo sapiens
atggagtctgtctgt

SEQ ID NO: 649164 - DNA, 15 bp, Homo sapiens
tggagtctgtctgtg

SEQ ID NO: 649165 - DNA, 15 bp, Homo sapiens
ggagtctgtctgtgg

SEQ ID NO: 649166 - DNA, 15 bp, Homo sapiens
gagtctgtctgtgga

SEQ ID NO: 649167 - DNA, 15 bp, Homo sapiens
agtctgtctgtggaa

SEQ ID NO: 649168 - DNA, 15 bp, Homo sapiens
gtctgtctgtggaaa

SEQ ID NO: 649169 - DNA, 15 bp, Homo sapiens
tctgtctgtggaaac

SEQ ID NO: 649170 - DNA, 15 bp, Homo sapiens
ctgtctgtggaaaca

SEQ ID NO: 649171 - DNA, 15 bp, Homo sapiens
tgtctgtggaaacaa

SEQ ID NO: 649172 - DNA, 15 bp, Homo sapiens
gtctgtggaaacaag

SEQ ID NO: 649173 - DNA, 15 bp, Homo sapiens
tctgtggaaacaagt

SEQ ID NO: 649174 - DNA, 15 bp, Homo sapiens
ctgtggaaacaagta

SEQ ID NO: 649175 - DNA, 15 bp, Homo sapiens
tgtggaaacaagtaa

SEQ ID NO: 649176 - DNA, 15 bp, Homo sapiens
gtggaaacaagtaat

SEQ ID NO: 649177 - DNA, 15 bp, Homo sapiens
tggaaacaagtaata

SEQ ID NO: 649178 - DNA, 15 bp, Homo sapiens
ggaaacaagtaatac

SEQ ID NO: 649179 - DNA, 15 bp, Homo sapiens
gaaacaagtaatacc

SEQ ID NO: 649180 - DNA, 15 bp, Homo sapiens
aaacaagtaatacct

SEQ ID NO: 649181 - DNA, 15 bp, Homo sapiens
aacaagtaatacctt

SEQ ID NO: 649182 - DNA, 15 bp, Homo sapiens
acaagtaatacctta

SEQ ID NO: 649183 - DNA, 15 bp, Homo sapiens
caagtaataccttaa

SEQ ID NO: 649184 - DNA, 15 bp, Homo sapiens
aagtaataccttaaa

SEQ ID NO: 649185 - DNA, 15 bp, Homo sapiens
agtaataccttaaat

SEQ ID NO: 649186 - DNA, 15 bp, Homo sapiens
gtaataccttaaatt

SEQ ID NO: 649187 - DNA, 15 bp, Homo sapiens
taataccttaaattt

SEQ ID NO: 649188 - DNA, 15 bp, Homo sapiens
aataccttaaatttt

SEQ ID NO: 649189 - DNA, 15 bp, Homo sapiens
ataccttaaattttt

SEQ ID NO: 649190 - DNA, 15 bp, Homo sapiens
taccttaaatttttt

SEQ ID NO: 649191 - DNA, 15 bp, Homo sapiens
accttaaattttttt

SEQ ID NO: 649192 - DNA, 15 bp, Homo sapiens
ccttaaatttttttt

SEQ ID NO: 649193 - DNA, 15 bp, Homo sapiens
cttaaattttttttt

SEQ ID NO: 649194 - DNA, 15 bp, Homo sapiens
ttaaattttttttta

SEQ ID NO: 649195 - DNA, 15 bp, Homo sapiens
taaatttttttttat

SEQ ID NO: 649196 - DNA, 15 bp, Homo sapiens
aaatttttttttatt

SEQ ID NO: 649197 - DNA, 15 bp, Homo sapiens
aatttttttttattt

SEQ ID NO: 649198 - DNA, 15 bp, Homo sapiens
atttttttttatttc

SEQ ID NO: 649199 - DNA, 15 bp, Homo sapiens
tttttttttatttcc

SEQ ID NO: 649200 - DNA, 15 bp, Homo sapiens
ttttttttatttcca

SEQ ID NO: 649201 - DNA, 15 bp, Homo sapiens
tttttttatttccat

SEQ ID NO: 649202 - DNA, 15 bp, Homo sapiens
ttttttatttccata

SEQ ID NO: 649203 - DNA, 15 bp, Homo sapiens
tttttatttccataa

SEQ ID NO: 649204 - DNA, 15 bp, Homo sapiens
ttttatttccataat

SEQ ID NO: 649205 - DNA, 15 bp, Homo sapiens
tttatttccataatt

SEQ ID NO: 649206 - DNA, 15 bp, Homo sapiens
ttatttccataattt

SEQ ID NO: 649207 - DNA, 15 bp, Homo sapiens
tatttccataatttt

SEQ ID NO: 649208 - DNA, 15 bp, Homo sapiens
atttccataattttt

SEQ ID NO: 649209 - DNA, 15 bp, Homo sapiens
tttccataatttttt

SEQ ID NO: 649210 - DNA, 15 bp, Homo sapiens
ttccataattttttt

SEQ ID NO: 649211 - DNA, 15 bp, Homo sapiens
tccataatttttttg

SEQ ID NO: 649212 - DNA, 15 bp, Homo sapiens
ccataatttttttgg

SEQ ID NO: 649213 - DNA, 15 bp, Homo sapiens
cataatttttttggg

SEQ ID NO: 649214 - DNA, 15 bp, Homo sapiens
ataatttttttggga

SEQ ID NO: 649215 - DNA, 15 bp, Homo sapiens
taatttttttgggaa

SEQ ID NO: 649216 - DNA, 15 bp, Homo sapiens
aatttttttgggaaa

SEQ ID NO: 649217 - DNA, 15 bp, Homo sapiens
atttttttgggaaac

SEQ ID NO: 649218 - DNA, 15 bp, Homo sapiens
tttttttgggaaaca

SEQ ID NO: 649219 - DNA, 15 bp, Homo sapiens
ttttttgggaaacag

SEQ ID NO: 649220 - DNA, 15 bp, Homo sapiens
tttttgggaaacagg

SEQ ID NO: 649221 - DNA, 15 bp, Homo sapiens
ttttgggaaacaggt

SEQ ID NO: 649222 - DNA, 15 bp, Homo sapiens
tttgggaaacaggtg

SEQ ID NO: 649223 - DNA, 15 bp, Homo sapiens
ttgggaaacaggtgg

SEQ ID NO: 649224 - DNA, 15 bp, Homo sapiens
tgggaaacaggtggt

SEQ ID NO: 649225 - DNA, 15 bp, Homo sapiens
gggaaacaggtggta

SEQ ID NO: 649226 - DNA, 15 bp, Homo sapiens
ggaaacaggtggtat

SEQ ID NO: 649227 - DNA, 15 bp, Homo sapiens
gaaacaggtggtatt

SEQ ID NO: 649228 - DNA, 15 bp, Homo sapiens
aaacaggtggtattt

SEQ ID NO: 649229 - DNA, 15 bp, Homo sapiens
aacaggtggtattta

SEQ ID NO: 649230 - DNA, 15 bp, Homo sapiens
acaggtggtatttag

SEQ ID NO: 649231 - DNA, 15 bp, Homo sapiens
caggtggtatttagt

SEQ ID NO: 649232 - DNA, 15 bp, Homo sapiens
aggtggtatttagtt

SEQ ID NO: 649233 - DNA, 15 bp, Homo sapiens
ggtggtatttagtta

SEQ ID NO: 649234 - DNA, 15 bp, Homo sapiens
gtggtatttagttac

SEQ ID NO: 649235 - DNA, 15 bp, Homo sapiens
tggtatttagttaca

SEQ ID NO: 649236 - DNA, 15 bp, Homo sapiens
ggtatttagttacat

SEQ ID NO: 649237 - DNA, 15 bp, Homo sapiens
gtatttagttacatg

SEQ ID NO: 649238 - DNA, 15 bp, Homo sapiens
tatttagttacatga

SEQ ID NO: 649239 - DNA, 15 bp, Homo sapiens
atttagttacatgag

SEQ ID NO: 649240 - DNA, 15 bp, Homo sapiens
tttagttacatgagt

SEQ ID NO: 649241 - DNA, 15 bp, Homo sapiens
ttagttacatgagta

SEQ ID NO: 649242 - DNA, 15 bp, Homo sapiens
tagttacatgagtaa

SEQ ID NO: 649243 - DNA, 15 bp, Homo sapiens
agttacatgagtaag

SEQ ID NO: 649244 - DNA, 15 bp, Homo sapiens
gttacatgagtaagt

SEQ ID NO: 649245 - DNA, 15 bp, Homo sapiens
ttacatgagtaagtc

SEQ ID NO: 649246 - DNA, 15 bp, Homo sapiens
tacatgagtaagtcc

SEQ ID NO: 649247 - DNA, 15 bp, Homo sapiens
acatgagtaagtcct

SEQ ID NO: 649248 - DNA, 15 bp, Homo sapiens
catgagtaagtcctt

SEQ ID NO: 649249 - DNA, 15 bp, Homo sapiens
atgagtaagtccttt

SEQ ID NO: 649250 - DNA, 15 bp, Homo sapiens
tgagtaagtccttta

SEQ ID NO: 649251 - DNA, 15 bp, Homo sapiens
gagtaagtcctttag

SEQ ID NO: 649252 - DNA, 15 bp, Homo sapiens
agtaagtcctttagt

SEQ ID NO: 649253 - DNA, 15 bp, Homo sapiens
gtaagtcctttagtg

SEQ ID NO: 649254 - DNA, 15 bp, Homo sapiens
taagtcctttagtgg

SEQ ID NO: 649255 - DNA, 15 bp, Homo sapiens
aagtcctttagtggt

SEQ ID NO: 649256 - DNA, 15 bp, Homo sapiens
agtcctttagtggtg

SEQ ID NO: 649257 - DNA, 15 bp, Homo sapiens
gtcctttagtggtga

SEQ ID NO: 649258 - DNA, 15 bp, Homo sapiens
tcctttagtggtgat

SEQ ID NO: 649259 - DNA, 15 bp, Homo sapiens
cctttagtggtgatt

SEQ ID NO: 649260 - DNA, 15 bp, Homo sapiens
ctttagtggtgattt

SEQ ID NO: 649261 - DNA, 15 bp, Homo sapiens
tttagtggtgatttg

SEQ ID NO: 649262 - DNA, 15 bp, Homo sapiens
ttagtggtgatttgt

SEQ ID NO: 649263 - DNA, 15 bp, Homo sapiens
tagtggtgatttgtg

SEQ ID NO: 649264 - DNA, 15 bp, Homo sapiens
agtggtgatttgtga

SEQ ID NO: 649265 - DNA, 15 bp, Homo sapiens
gtggtgatttgtgag

SEQ ID NO: 649266 - DNA, 15 bp, Homo sapiens
tggtgatttgtgaga

SEQ ID NO: 649267 - DNA, 15 bp, Homo sapiens
ggtgatttgtgagat

SEQ ID NO: 649268 - DNA, 15 bp, Homo sapiens
gtgatttgtgagatt

SEQ ID NO: 649269 - DNA, 15 bp, Homo sapiens
tgatttgtgagattt

SEQ ID NO: 649270 - DNA, 15 bp, Homo sapiens
gatttgtgagatttt

SEQ ID NO: 649271 - DNA, 15 bp, Homo sapiens
atttgtgagattttg

SEQ ID NO: 649272 - DNA, 15 bp, Homo sapiens
tttgtgagattttgg

SEQ ID NO: 649273 - DNA, 15 bp, Homo sapiens
ttgtgagattttggt

SEQ ID NO: 649274 - DNA, 15 bp, Homo sapiens
tgtgagattttggtg

SEQ ID NO: 649275 - DNA, 15 bp, Homo sapiens
gtgagattttggtgc

SEQ ID NO: 649276 - DNA, 15 bp, Homo sapiens
tgagattttggtgca

SEQ ID NO: 649277 - DNA, 15 bp, Homo sapiens
gagattttggtgcac

SEQ ID NO: 649278 - DNA, 15 bp, Homo sapiens
agattttggtgcacc

SEQ ID NO: 649279 - DNA, 15 bp, Homo sapiens
gattttggtgcaccc

SEQ ID NO: 649280 - DNA, 15 bp, Homo sapiens
attttggtgcaccca

SEQ ID NO: 649281 - DNA, 15 bp, Homo sapiens
ttttggtgcacccat

SEQ ID NO: 649282 - DNA, 15 bp, Homo sapiens
tttggtgcacccatc

SEQ ID NO: 649283 - DNA, 15 bp, Homo sapiens
ttggtgcacccatca

SEQ ID NO: 649284 - DNA, 15 bp, Homo sapiens
tggtgcacccatcac

SEQ ID NO: 649285 - DNA, 15 bp, Homo sapiens
ggtgcacccatcacc

SEQ ID NO: 649286 - DNA, 15 bp, Homo sapiens
gtgcacccatcaccc

SEQ ID NO: 649287 - DNA, 15 bp, Homo sapiens
tgcacccatcaccca

SEQ ID NO: 649288 - DNA, 15 bp, Homo sapiens
gcacccatcacccaa

SEQ ID NO: 649289 - DNA, 15 bp, Homo sapiens
cacccatcacccaag

SEQ ID NO: 649290 - DNA, 15 bp, Homo sapiens
acccatcacccaagc

SEQ ID NO: 649291 - DNA, 15 bp, Homo sapiens
cccatcacccaagca

SEQ ID NO: 649292 - DNA, 15 bp, Homo sapiens
ccatcacccaagcag

SEQ ID NO: 649293 - DNA, 15 bp, Homo sapiens
catcacccaagcagt

SEQ ID NO: 649294 - DNA, 15 bp, Homo sapiens
atcacccaagcagta

SEQ ID NO: 649295 - DNA, 15 bp, Homo sapiens
tcacccaagcagtat

SEQ ID NO: 649296 - DNA, 15 bp, Homo sapiens
cacccaagcagtata

SEQ ID NO: 649297 - DNA, 15 bp, Homo sapiens
acccaagcagtatac

SEQ ID NO: 649298 - DNA, 15 bp, Homo sapiens
cccaagcagtataca

SEQ ID NO: 649299 - DNA, 15 bp, Homo sapiens
ccaagcagtatacac

SEQ ID NO: 649300 - DNA, 15 bp, Homo sapiens
caagcagtatacact

SEQ ID NO: 649301 - DNA, 15 bp, Homo sapiens
aagcagtatacactg

SEQ ID NO: 649302 - DNA, 15 bp, Homo sapiens
agcagtatacactga

SEQ ID NO: 649303 - DNA, 15 bp, Homo sapiens
gcagtatacactgaa

SEQ ID NO: 649304 - DNA, 15 bp, Homo sapiens
cagtatacactgaat

SEQ ID NO: 649305 - DNA, 15 bp, Homo sapiens
agtatacactgaatc

SEQ ID NO: 649306 - DNA, 15 bp, Homo sapiens
gtatacactgaatcc

SEQ ID NO: 649307 - DNA, 15 bp, Homo sapiens
tatacactgaatcca

SEQ ID NO: 649308 - DNA, 15 bp, Homo sapiens
atacactgaatccaa

SEQ ID NO: 649309 - DNA, 15 bp, Homo sapiens
tacactgaatccaag

SEQ ID NO: 649310 - DNA, 15 bp, Homo sapiens
acactgaatccaagc

SEQ ID NO: 649311 - DNA, 15 bp, Homo sapiens
cactgaatccaagct

SEQ ID NO: 649312 - DNA, 15 bp, Homo sapiens
actgaatccaagctc

SEQ ID NO: 649313 - DNA, 15 bp, Homo sapiens
ctgaatccaagctct

SEQ ID NO: 649314 - DNA, 15 bp, Homo sapiens
tgaatccaagctctg

SEQ ID NO: 649315 - DNA, 15 bp, Homo sapiens
gaatccaagctctgg

SEQ ID NO: 649316 - DNA, 15 bp, Homo sapiens
aatccaagctctggt

SEQ ID NO: 649317 - DNA, 15 bp, Homo sapiens
atccaagctctggtc

SEQ ID NO: 649318 - DNA, 15 bp, Homo sapiens
tccaagctctggtct

SEQ ID NO: 649319 - DNA, 15 bp, Homo sapiens
ccaagctctggtctt

SEQ ID NO: 649320 - DNA, 15 bp, Homo sapiens
caagctctggtcttt

SEQ ID NO: 649321 - DNA, 15 bp, Homo sapiens
aagctctggtctttt

SEQ ID NO: 649322 - DNA, 15 bp, Homo sapiens
agctctggtctttta

SEQ ID NO: 649323 - DNA, 15 bp, Homo sapiens
gctctggtcttttat

SEQ ID NO: 649324 - DNA, 15 bp, Homo sapiens
ctctggtcttttatc

SEQ ID NO: 649325 - DNA, 15 bp, Homo sapiens
tctggtcttttatcc

SEQ ID NO: 649326 - DNA, 15 bp, Homo sapiens
ctggtcttttatcct

SEQ ID NO: 649327 - DNA, 15 bp, Homo sapiens
tggtcttttatcctt

SEQ ID NO: 649328 - DNA, 15 bp, Homo sapiens
ggtcttttatccttc

SEQ ID NO: 649329 - DNA, 15 bp, Homo sapiens
gtcttttatccttca

SEQ ID NO: 649330 - DNA, 15 bp, Homo sapiens
tcttttatccttcac

SEQ ID NO: 649331 - DNA, 15 bp, Homo sapiens
cttttatccttcact

SEQ ID NO: 649332 - DNA, 15 bp, Homo sapiens
ttttatccttcactg

SEQ ID NO: 649333 - DNA, 15 bp, Homo sapiens
tttatccttcactgc

SEQ ID NO: 649334 - DNA, 15 bp, Homo sapiens
ttatccttcactgcc

SEQ ID NO: 649335 - DNA, 15 bp, Homo sapiens
tatccttcactgcct

SEQ ID NO: 649336 - DNA, 15 bp, Homo sapiens
atccttcactgcctt

SEQ ID NO: 649337 - DNA, 15 bp, Homo sapiens
tccttcactgccttc

SEQ ID NO: 649338 - DNA, 15 bp, Homo sapiens
ccttcactgccttcg

SEQ ID NO: 649339 - DNA, 15 bp, Homo sapiens
cttcactgccttcgt

SEQ ID NO: 649340 - DNA, 15 bp, Homo sapiens
ttcactgccttcgta

SEQ ID NO: 649341 - DNA, 15 bp, Homo sapiens
tcactgccttcgtac

SEQ ID NO: 649342 - DNA, 15 bp, Homo sapiens
cactgccttcgtacc

SEQ ID NO: 649343 - DNA, 15 bp, Homo sapiens
actgccttcgtaccc

SEQ ID NO: 649344 - DNA, 15 bp, Homo sapiens
ctgccttcgtaccct

SEQ ID NO: 649345 - DNA, 15 bp, Homo sapiens
tgccttcgtaccctt

SEQ ID NO: 649346 - DNA, 15 bp, Homo sapiens
gccttcgtacccttt

SEQ ID NO: 649347 - DNA, 15 bp, Homo sapiens
ccttcgtaccctttt

SEQ ID NO: 649348 - DNA, 15 bp, Homo sapiens
cttcgtacccttttc

SEQ ID NO: 649349 - DNA, 15 bp, Homo sapiens
ttcgtacccttttcc

SEQ ID NO: 649350 - DNA, 15 bp, Homo sapiens
tcgtacccttttccg

SEQ ID NO: 649351 - DNA, 15 bp, Homo sapiens
cgtacccttttccgc

SEQ ID NO: 649352 - DNA, 15 bp, Homo sapiens
gtacccttttccgct

SEQ ID NO: 649353 - DNA, 15 bp, Homo sapiens
tacccttttccgctg

SEQ ID NO: 649354 - DNA, 15 bp, Homo sapiens
acccttttccgctga

SEQ ID NO: 649355 - DNA, 15 bp, Homo sapiens
cccttttccgctgag

SEQ ID NO: 649356 - DNA, 15 bp, Homo sapiens
ccttttccgctgagt

SEQ ID NO: 649357 - DNA, 15 bp, Homo sapiens
cttttccgctgagtc

SEQ ID NO: 649358 - DNA, 15 bp, Homo sapiens
ttttccgctgagtcc

SEQ ID NO: 649359 - DNA, 15 bp, Homo sapiens
tttccgctgagtccc

SEQ ID NO: 649360 - DNA, 15 bp, Homo sapiens
ttccgctgagtcccc

SEQ ID NO: 649361 - DNA, 15 bp, Homo sapiens
tccgctgagtcccca

SEQ ID NO: 649362 - DNA, 15 bp, Homo sapiens
ccgctgagtccccaa

SEQ ID NO: 649363 - DNA, 15 bp, Homo sapiens
cgctgagtccccaaa

SEQ ID NO: 649364 - DNA, 15 bp, Homo sapiens
gctgagtccccaaag

SEQ ID NO: 649365 - DNA, 15 bp, Homo sapiens
ctgagtccccaaagt

SEQ ID NO: 649366 - DNA, 15 bp, Homo sapiens
tgagtccccaaagtc

SEQ ID NO: 649367 - DNA, 15 bp, Homo sapiens
gagtccccaaagtcc

SEQ ID NO: 649368 - DNA, 15 bp, Homo sapiens
agtccccaaagtcca

SEQ ID NO: 649369 - DNA, 15 bp, Homo sapiens
gtccccaaagtccat

SEQ ID NO: 649370 - DNA, 15 bp, Homo sapiens
tccccaaagtccatt

SEQ ID NO: 649371 - DNA, 15 bp, Homo sapiens
ccccaaagtccattg

SEQ ID NO: 649372 - DNA, 15 bp, Homo sapiens
cccaaagtccattgt

SEQ ID NO: 649373 - DNA, 15 bp, Homo sapiens
ccaaagtccattgta

SEQ ID NO: 649374 - DNA, 15 bp, Homo sapiens
caaagtccattgtat

SEQ ID NO: 649375 - DNA, 15 bp, Homo sapiens
aaagtccattgtatc

SEQ ID NO: 649376 - DNA, 15 bp, Homo sapiens
aagtccattgtatca

SEQ ID NO: 649377 - DNA, 15 bp, Homo sapiens
agtccattgtatcat

SEQ ID NO: 649378 - DNA, 15 bp, Homo sapiens
gtccattgtatcatt

SEQ ID NO: 649379 - DNA, 15 bp, Homo sapiens
tccattgtatcattc

SEQ ID NO: 649380 - DNA, 15 bp, Homo sapiens
ccattgtatcattct

SEQ ID NO: 649381 - DNA, 15 bp, Homo sapiens
cattgtatcattctt

SEQ ID NO: 649382 - DNA, 15 bp, Homo sapiens
attgtatcattctta

SEQ ID NO: 649383 - DNA, 15 bp, Homo sapiens
ttgtatcattcttat

SEQ ID NO: 649384 - DNA, 15 bp, Homo sapiens
tgtatcattcttatg

SEQ ID NO: 649385 - DNA, 15 bp, Homo sapiens
gtatcattcttatgc

SEQ ID NO: 649386 - DNA, 15 bp, Homo sapiens
tatcattcttatgcc

SEQ ID NO: 649387 - DNA, 15 bp, Homo sapiens
atcattcttatgcct

SEQ ID NO: 649388 - DNA, 15 bp, Homo sapiens
tcattcttatgcctt

SEQ ID NO: 649389 - DNA, 15 bp, Homo sapiens
cattcttatgccttt

SEQ ID NO: 649390 - DNA, 15 bp, Homo sapiens
attcttatgcctttg

SEQ ID NO: 649391 - DNA, 15 bp, Homo sapiens
ttcttatgcctttgc

SEQ ID NO: 649392 - DNA, 15 bp, Homo sapiens
tcttatgcctttgca

SEQ ID NO: 649393 - DNA, 15 bp, Homo sapiens
cttatgcctttgcat

SEQ ID NO: 649394 - DNA, 15 bp, Homo sapiens
ttatgcctttgcatc

SEQ ID NO: 649395 - DNA, 15 bp, Homo sapiens
tatgcctttgcatcc

SEQ ID NO: 649396 - DNA, 15 bp, Homo sapiens
atgcctttgcatcct

SEQ ID NO: 649397 - DNA, 15 bp, Homo sapiens
tgcctttgcatcctc

SEQ ID NO: 649398 - DNA, 15 bp, Homo sapiens
gcctttgcatcctca

SEQ ID NO: 649399 - DNA, 15 bp, Homo sapiens
cctttgcatcctcat

SEQ ID NO: 649400 - DNA, 15 bp, Homo sapiens
ctttgcatcctcata

SEQ ID NO: 649401 - DNA, 15 bp, Homo sapiens
tttgcatcctcatag

SEQ ID NO: 649402 - DNA, 15 bp, Homo sapiens
ttgcatcctcatagc

SEQ ID NO: 649403 - DNA, 15 bp, Homo sapiens
tgcatcctcatagct

SEQ ID NO: 649404 - DNA, 15 bp, Homo sapiens
gcatcctcatagctt

SEQ ID NO: 649405 - DNA, 15 bp, Homo sapiens
catcctcatagctta

SEQ ID NO: 649406 - DNA, 15 bp, Homo sapiens
atcctcatagcttag

SEQ ID NO: 649407 - DNA, 15 bp, Homo sapiens
tcctcatagcttagc

SEQ ID NO: 649408 - DNA, 15 bp, Homo sapiens
cctcatagcttagct

SEQ ID NO: 649409 - DNA, 15 bp, Homo sapiens
ctcatagcttagctc

SEQ ID NO: 649410 - DNA, 15 bp, Homo sapiens
tcatagcttagctcc

SEQ ID NO: 649411 - DNA, 15 bp, Homo sapiens
catagcttagctccc

SEQ ID NO: 649412 - DNA, 15 bp, Homo sapiens
atagcttagctccca

SEQ ID NO: 649413 - DNA, 15 bp, Homo sapiens
tagcttagctcccac

SEQ ID NO: 649414 - DNA, 15 bp, Homo sapiens
agcttagctcccact

SEQ ID NO: 649415 - DNA, 15 bp, Homo sapiens
gcttagctcccactt

SEQ ID NO: 649416 - DNA, 15 bp, Homo sapiens
cttagctcccactta

SEQ ID NO: 649417 - DNA, 15 bp, Homo sapiens
ttagctcccacttat

SEQ ID NO: 649418 - DNA, 15 bp, Homo sapiens
tagctcccacttatg

SEQ ID NO: 649419 - DNA, 15 bp, Homo sapiens
agctcccacttatga

SEQ ID NO: 649420 - DNA, 15 bp, Homo sapiens
gctcccacttatgag

SEQ ID NO: 649421 - DNA, 15 bp, Homo sapiens
ctcccacttatgagt

SEQ ID NO: 649422 - DNA, 15 bp, Homo sapiens
tcccacttatgagtg

SEQ ID NO: 649423 - DNA, 15 bp, Homo sapiens
cccacttatgagtga

SEQ ID NO: 649424 - DNA, 15 bp, Homo sapiens
ccacttatgagtgag

SEQ ID NO: 649425 - DNA, 15 bp, Homo sapiens
cacttatgagtgaga

SEQ ID NO: 649426 - DNA, 15 bp, Homo sapiens
acttatgagtgagaa

SEQ ID NO: 649427 - DNA, 15 bp, Homo sapiens
cttatgagtgagaac

SEQ ID NO: 649428 - DNA, 15 bp, Homo sapiens
ttatgagtgagaaca

SEQ ID NO: 649429 - DNA, 15 bp, Homo sapiens
tgagtgagaacatgc

SEQ ID NO: 649430 - DNA, 15 bp, Homo sapiens
gagtgagaacatgca

SEQ ID NO: 649431 - DNA, 15 bp, Homo sapiens
agtgagaacatgcaa

SEQ ID NO: 649432 - DNA, 15 bp, Homo sapiens
gtgagaacatgcaat

SEQ ID NO: 649433 - DNA, 15 bp, Homo sapiens
tgagaacatgcaata

SEQ ID NO: 649434 - DNA, 15 bp, Homo sapiens
gagaacatgcaatat

SEQ ID NO: 649435 - DNA, 15 bp, Homo sapiens
agaacatgcaatatt

SEQ ID NO: 649436 - DNA, 15 bp, Homo sapiens
gaacatgcaatattt

SEQ ID NO: 649437 - DNA, 15 bp, Homo sapiens
aacatgcaatatttg

SEQ ID NO: 649438 - DNA, 15 bp, Homo sapiens
acatgcaatatttgg

SEQ ID NO: 649439 - DNA, 15 bp, Homo sapiens
catgcaatatttggt

SEQ ID NO: 649440 - DNA, 15 bp, Homo sapiens
atgcaatatttggtt

SEQ ID NO: 649441 - DNA, 15 bp, Homo sapiens
tgcaatatttggttt

SEQ ID NO: 649442 - DNA, 15 bp, Homo sapiens
gcaatatttggtttt

SEQ ID NO: 649443 - DNA, 15 bp, Homo sapiens
caatatttggttttc

SEQ ID NO: 649444 - DNA, 15 bp, Homo sapiens
aatatttggttttcc

SEQ ID NO: 649445 - DNA, 15 bp, Homo sapiens
atatttggttttcca

SEQ ID NO: 649446 - DNA, 15 bp, Homo sapiens
tatttggttttccat

SEQ ID NO: 649447 - DNA, 15 bp, Homo sapiens
atttggttttccatt

SEQ ID NO: 649448 - DNA, 15 bp, Homo sapiens
tttggttttccattc

SEQ ID NO: 649449 - DNA, 15 bp, Homo sapiens
ttggttttccattcc

SEQ ID NO: 649450 - DNA, 15 bp, Homo sapiens
tggttttccattcct

SEQ ID NO: 649451 - DNA, 15 bp, Homo sapiens
ggttttccattcctg

SEQ ID NO: 649452 - DNA, 15 bp, Homo sapiens
gttttccattcctga

SEQ ID NO: 649453 - DNA, 15 bp, Homo sapiens
ttttccattcctgag

SEQ ID NO: 649454 - DNA, 15 bp, Homo sapiens
tttccattcctgagt

SEQ ID NO: 649455 - DNA, 15 bp, Homo sapiens
ttccattcctgagtt

SEQ ID NO: 649456 - DNA, 15 bp, Homo sapiens
tccattcctgagtta

SEQ ID NO: 649457 - DNA, 15 bp, Homo sapiens
ccattcctgagttac

SEQ ID NO: 649458 - DNA, 15 bp, Homo sapiens
cattcctgagttact

SEQ ID NO: 649459 - DNA, 15 bp, Homo sapiens
attcctgagttactt

SEQ ID NO: 649460 - DNA, 15 bp, Homo sapiens
ttcctgagttacttt

SEQ ID NO: 649461 - DNA, 15 bp, Homo sapiens
tcctgagttacttta

SEQ ID NO: 649462 - DNA, 15 bp, Homo sapiens
cctgagttactttac

SEQ ID NO: 649463 - DNA, 15 bp, Homo sapiens
ctgagttactttact

SEQ ID NO: 649464 - DNA, 15 bp, Homo sapiens
tgagttactttactt

SEQ ID NO: 649465 - DNA, 15 bp, Homo sapiens
gagttactttactta

SEQ ID NO: 649466 - DNA, 15 bp, Homo sapiens
agttactttacttag

SEQ ID NO: 649467 - DNA, 15 bp, Homo sapiens
gttactttacttaga

SEQ ID NO: 649468 - DNA, 15 bp, Homo sapiens
ttactttacttagaa

SEQ ID NO: 649469 - DNA, 15 bp, Homo sapiens
tactttacttagaat

SEQ ID NO: 649470 - DNA, 15 bp, Homo sapiens
actttacttagaata

SEQ ID NO: 649471 - DNA, 15 bp, Homo sapiens
ctttacttagaataa

SEQ ID NO: 649472 - DNA, 15 bp, Homo sapiens
tttacttagaataac

SEQ ID NO: 649473 - DNA, 15 bp, Homo sapiens
ttacttagaataaca

SEQ ID NO: 649474 - DNA, 15 bp, Homo sapiens
tacttagaataacag

SEQ ID NO: 649475 - DNA, 15 bp, Homo sapiens
acttagaataacagt

SEQ ID NO: 649476 - DNA, 15 bp, Homo sapiens
cttagaataacagtc

SEQ ID NO: 649477 - DNA, 15 bp, Homo sapiens
ttagaataacagtct

SEQ ID NO: 649478 - DNA, 15 bp, Homo sapiens
tagaataacagtctc

SEQ ID NO: 649479 - DNA, 15 bp, Homo sapiens
agaataacagtctcc

SEQ ID NO: 649480 - DNA, 15 bp, Homo sapiens
gaataacagtctcca

SEQ ID NO: 649481 - DNA, 15 bp, Homo sapiens
aataacagtctccaa

SEQ ID NO: 649482 - DNA, 15 bp, Homo sapiens
ataacagtctccaat

SEQ ID NO: 649483 - DNA, 15 bp, Homo sapiens
taacagtctccaatc

SEQ ID NO: 649484 - DNA, 15 bp, Homo sapiens
aacagtctccaatcc

SEQ ID NO: 649485 - DNA, 15 bp, Homo sapiens
acagtctccaatccc

SEQ ID NO: 649486 - DNA, 15 bp, Homo sapiens
cagtctccaatccca

SEQ ID NO: 649487 - DNA, 15 bp, Homo sapiens
agtctccaatcccat

SEQ ID NO: 649488 - DNA, 15 bp, Homo sapiens
gtctccaatcccatc

SEQ ID NO: 649489 - DNA, 15 bp, Homo sapiens
tctccaatcccatcc

SEQ ID NO: 649490 - DNA, 15 bp, Homo sapiens
ctccaatcccatcca

SEQ ID NO: 649491 - DNA, 15 bp, Homo sapiens
tccaatcccatccag

SEQ ID NO: 649492 - DNA, 15 bp, Homo sapiens
ccaatcccatccagg

SEQ ID NO: 649493 - DNA, 15 bp, Homo sapiens
caatcccatccaggt

SEQ ID NO: 649494 - DNA, 15 bp, Homo sapiens
aatcccatccaggtt

SEQ ID NO: 649495 - DNA, 15 bp, Homo sapiens
atcccatccaggttg

SEQ ID NO: 649496 - DNA, 15 bp, Homo sapiens
tcccatccaggttgc

SEQ ID NO: 649497 - DNA, 15 bp, Homo sapiens
cccatccaggttgct

SEQ ID NO: 649498 - DNA, 15 bp, Homo sapiens
ccatccaggttgctg

SEQ ID NO: 649499 - DNA, 15 bp, Homo sapiens
catccaggttgctgt

SEQ ID NO: 649500 - DNA, 15 bp, Homo sapiens
atccaggttgctgtg

SEQ ID NO: 649501 - DNA, 15 bp, Homo sapiens
tccaggttgctgtga

SEQ ID NO: 649502 - DNA, 15 bp, Homo sapiens
ccaggttgctgtgaa

SEQ ID NO: 649503 - DNA, 15 bp, Homo sapiens
caggttgctgtgaat

SEQ ID NO: 649504 - DNA, 15 bp, Homo sapiens
aggttgctgtgaatg

SEQ ID NO: 649505 - DNA, 15 bp, Homo sapiens
ggttgctgtgaatgc

SEQ ID NO: 649506 - DNA, 15 bp, Homo sapiens
gttgctgtgaatgcc

SEQ ID NO: 649507 - DNA, 15 bp, Homo sapiens
ttgctgtgaatgcca

SEQ ID NO: 649508 - DNA, 15 bp, Homo sapiens
tgctgtgaatgccat

SEQ ID NO: 649509 - DNA, 15 bp, Homo sapiens
gctgtgaatgccatt

SEQ ID NO: 649510 - DNA, 15 bp, Homo sapiens
ctgtgaatgccatta

SEQ ID NO: 649511 - DNA, 15 bp, Homo sapiens
tgtgaatgccattaa

SEQ ID NO: 649512 - DNA, 15 bp, Homo sapiens
gtgaatgccattaat

SEQ ID NO: 649513 - DNA, 15 bp, Homo sapiens
tgaatgccattaatt

SEQ ID NO: 649514 - DNA, 15 bp, Homo sapiens
gaatgccattaattc

SEQ ID NO: 649515 - DNA, 15 bp, Homo sapiens
aatgccattaattca

SEQ ID NO: 649516 - DNA, 15 bp, Homo sapiens
atgccattaattcat

SEQ ID NO: 649517 - DNA, 15 bp, Homo sapiens
tgccattaattcatt

SEQ ID NO: 649518 - DNA, 15 bp, Homo sapiens
gccattaattcattc

SEQ ID NO: 649519 - DNA, 15 bp, Homo sapiens
ccattaattcattcc

SEQ ID NO: 649520 - DNA, 15 bp, Homo sapiens
cattaattcattcct

SEQ ID NO: 649521 - DNA, 15 bp, Homo sapiens
attaattcattcctt

SEQ ID NO: 649522 - DNA, 15 bp, Homo sapiens
ttaattcattccttt

SEQ ID NO: 649523 - DNA, 15 bp, Homo sapiens
taattcattcctttt

SEQ ID NO: 649524 - DNA, 15 bp, Homo sapiens
aattcattcctttta

SEQ ID NO: 649525 - DNA, 15 bp, Homo sapiens
attcattccttttat

SEQ ID NO: 649526 - DNA, 15 bp, Homo sapiens
ttcattccttttatt

SEQ ID NO: 649527 - DNA, 15 bp, Homo sapiens
tcattccttttattg

SEQ ID NO: 649528 - DNA, 15 bp, Homo sapiens
cattccttttattgc

SEQ ID NO: 649529 - DNA, 15 bp, Homo sapiens
attccttttattgct

SEQ ID NO: 649530 - DNA, 15 bp, Homo sapiens
ttccttttattgctg

SEQ ID NO: 649531 - DNA, 15 bp, Homo sapiens
tccttttattgctga

SEQ ID NO: 649532 - DNA, 15 bp, Homo sapiens
ccttttattgctgag

SEQ ID NO: 649533 - DNA, 15 bp, Homo sapiens
cttttattgctgagt

SEQ ID NO: 649534 - DNA, 15 bp, Homo sapiens
ttttattgctgagta

SEQ ID NO: 649535 - DNA, 15 bp, Homo sapiens
tttattgctgagtag

SEQ ID NO: 649536 - DNA, 15 bp, Homo sapiens
ttattgctgagtagt

SEQ ID NO: 649537 - DNA, 15 bp, Homo sapiens
tattgctgagtagta

SEQ ID NO: 649538 - DNA, 15 bp, Homo sapiens
attgctgagtagtat

SEQ ID NO: 649539 - DNA, 15 bp, Homo sapiens
ttgctgagtagtatt

SEQ ID NO: 649540 - DNA, 15 bp, Homo sapiens
tgctgagtagtattc

SEQ ID NO: 649541 - DNA, 15 bp, Homo sapiens
gctgagtagtattct

SEQ ID NO: 649542 - DNA, 15 bp, Homo sapiens
ctgagtagtattctg

SEQ ID NO: 649543 - DNA, 15 bp, Homo sapiens
tgagtagtattctgc

SEQ ID NO: 649544 - DNA, 15 bp, Homo sapiens
gagtagtattctgcc

SEQ ID NO: 649545 - DNA, 15 bp, Homo sapiens
agtagtattctgcca

SEQ ID NO: 649546 - DNA, 15 bp, Homo sapiens
gtagtattctgccat

SEQ ID NO: 649547 - DNA, 15 bp, Homo sapiens
tagtattctgccata

SEQ ID NO: 649548 - DNA, 15 bp, Homo sapiens
agtattctgccatat

SEQ ID NO: 649549 - DNA, 15 bp, Homo sapiens
gtattctgccatata

SEQ ID NO: 649550 - DNA, 15 bp, Homo sapiens
tattctgccatatat

SEQ ID NO: 649551 - DNA, 15 bp, Homo sapiens
attctgccatatata

SEQ ID NO: 649552 - DNA, 15 bp, Homo sapiens
ttctgccatatatat

SEQ ID NO: 649553 - DNA, 15 bp, Homo sapiens
tctgccatatatata

SEQ ID NO: 649554 - DNA, 15 bp, Homo sapiens
ctgccatatatatat

SEQ ID NO: 649555 - DNA, 15 bp, Homo sapiens
tgccatatatatatg

SEQ ID NO: 649556 - DNA, 15 bp, Homo sapiens
gccatatatatatgt

SEQ ID NO: 649557 - DNA, 15 bp, Homo sapiens
ccatatatatatgta

SEQ ID NO: 649558 - DNA, 15 bp, Homo sapiens
catatatatatgtaa

SEQ ID NO: 649559 - DNA, 15 bp, Homo sapiens
atatatatatgtaat

SEQ ID NO: 649560 - DNA, 15 bp, Homo sapiens
tatatatatgtaatt

SEQ ID NO: 649561 - DNA, 15 bp, Homo sapiens
atatatatgtaatta

SEQ ID NO: 649562 - DNA, 15 bp, Homo sapiens
tatatatgtaattat

SEQ ID NO: 649563 - DNA, 15 bp, Homo sapiens
atatatgtaattata

SEQ ID NO: 649564 - DNA, 15 bp, Homo sapiens
tatatgtaattatat

SEQ ID NO: 649565 - DNA, 15 bp, Homo sapiens
atatgtaattatatg

SEQ ID NO: 649566 - DNA, 15 bp, Homo sapiens
tatgtaattatatgt

SEQ ID NO: 649567 - DNA, 15 bp, Homo sapiens
atgtaattatatgta

SEQ ID NO: 649568 - DNA, 15 bp, Homo sapiens
tgtaattatatgtat

SEQ ID NO: 649569 - DNA, 15 bp, Homo sapiens
gtaattatatgtatc

SEQ ID NO: 649570 - DNA, 15 bp, Homo sapiens
taattatatgtatct

SEQ ID NO: 649571 - DNA, 15 bp, Homo sapiens
aattatatgtatctg

SEQ ID NO: 649572 - DNA, 15 bp, Homo sapiens
attatatgtatctgt

SEQ ID NO: 649573 - DNA, 15 bp, Homo sapiens
ttatatgtatctgtg

SEQ ID NO: 649574 - DNA, 15 bp, Homo sapiens
tatatgtatctgtgt

SEQ ID NO: 649575 - DNA, 15 bp, Homo sapiens
atatgtatctgtgta

SEQ ID NO: 649576 - DNA, 15 bp, Homo sapiens
tatgtatctgtgtat

SEQ ID NO: 649577 - DNA, 15 bp, Homo sapiens
atgtatctgtgtata

SEQ ID NO: 649578 - DNA, 15 bp, Homo sapiens
tgtatctgtgtatat

SEQ ID NO: 649579 - DNA, 15 bp, Homo sapiens
gtatctgtgtatata

SEQ ID NO: 649580 - DNA, 15 bp, Homo sapiens
tatctgtgtatatat

SEQ ID NO: 649581 - DNA, 15 bp, Homo sapiens
atctgtgtatatata

SEQ ID NO: 649582 - DNA, 15 bp, Homo sapiens
tctgtgtatatatat

SEQ ID NO: 649583 - DNA, 15 bp, Homo sapiens
ctgtgtatatatata

SEQ ID NO: 649584 - DNA, 15 bp, Homo sapiens
tgtgtatatatatac

SEQ ID NO: 649585 - DNA, 15 bp, Homo sapiens
gtgtatatatataca

SEQ ID NO: 649586 - DNA, 15 bp, Homo sapiens
tgtatatatatacat

SEQ ID NO: 649587 - DNA, 15 bp, Homo sapiens
gtatatatatacata

SEQ ID NO: 649588 - DNA, 15 bp, Homo sapiens
tatatatatacatat

SEQ ID NO: 649589 - DNA, 15 bp, Homo sapiens
atatatatacatata

SEQ ID NO: 649590 - DNA, 15 bp, Homo sapiens
tatatatacatatat

SEQ ID NO: 649591 - DNA, 15 bp, Homo sapiens
atatatacatatatg

SEQ ID NO: 649592 - DNA, 15 bp, Homo sapiens
tatatacatatatgt

SEQ ID NO: 649593 - DNA, 15 bp, Homo sapiens
atatacatatatgtt

SEQ ID NO: 649594 - DNA, 15 bp, Homo sapiens
tatacatatatgtta

SEQ ID NO: 649595 - DNA, 15 bp, Homo sapiens
atacatatatgttat

SEQ ID NO: 649596 - DNA, 15 bp, Homo sapiens
tacatatatgttata

SEQ ID NO: 649597 - DNA, 15 bp, Homo sapiens
acatatatgttatat

SEQ ID NO: 649598 - DNA, 15 bp, Homo sapiens
catatatgttatata

SEQ ID NO: 649599 - DNA, 15 bp, Homo sapiens
atatatgttatatat

SEQ ID NO: 649600 - DNA, 15 bp, Homo sapiens
tatatgttatatata

SEQ ID NO: 649601 - DNA, 15 bp, Homo sapiens
atatgttatatatat

SEQ ID NO: 649602 - DNA, 15 bp, Homo sapiens
tatgttatatatata

SEQ ID NO: 649603 - DNA, 15 bp, Homo sapiens
atgttatatatatat

SEQ ID NO: 649604 - DNA, 15 bp, Homo sapiens
tgttatatatatatc

SEQ ID NO: 649605 - DNA, 15 bp, Homo sapiens
gttatatatatatca

SEQ ID NO: 649606 - DNA, 15 bp, Homo sapiens
ttatatatatatcac

SEQ ID NO: 649607 - DNA, 15 bp, Homo sapiens
tatatatatatcaca

SEQ ID NO: 649608 - DNA, 15 bp, Homo sapiens
atatatatatcacag

SEQ ID NO: 649609 - DNA, 15 bp, Homo sapiens
tatatatatcacagt

SEQ ID NO: 649610 - DNA, 15 bp, Homo sapiens
atatatatcacagtt

SEQ ID NO: 649611 - DNA, 15 bp, Homo sapiens
tatatatcacagttt

SEQ ID NO: 649612 - DNA, 15 bp, Homo sapiens
atatatcacagtttc

SEQ ID NO: 649613 - DNA, 15 bp, Homo sapiens
tatatcacagtttct

SEQ ID NO: 649614 - DNA, 15 bp, Homo sapiens
atatcacagtttctt

SEQ ID NO: 649615 - DNA, 15 bp, Homo sapiens
tatcacagtttcttt

SEQ ID NO: 649616 - DNA, 15 bp, Homo sapiens
atcacagtttcttta

SEQ ID NO: 649617 - DNA, 15 bp, Homo sapiens
tcacagtttctttat

SEQ ID NO: 649618 - DNA, 15 bp, Homo sapiens
cacagtttctttatc

SEQ ID NO: 649619 - DNA, 15 bp, Homo sapiens
acagtttctttatcc

SEQ ID NO: 649620 - DNA, 15 bp, Homo sapiens
cagtttctttatcca

SEQ ID NO: 649621 - DNA, 15 bp, Homo sapiens
agtttctttatccac

SEQ ID NO: 649622 - DNA, 15 bp, Homo sapiens
gtttctttatccact

SEQ ID NO: 649623 - DNA, 15 bp, Homo sapiens
tttctttatccactt

SEQ ID NO: 649624 - DNA, 15 bp, Homo sapiens
ttctttatccacttg

SEQ ID NO: 649625 - DNA, 15 bp, Homo sapiens
tctttatccacttgt

SEQ ID NO: 649626 - DNA, 15 bp, Homo sapiens
ctttatccacttgtt

SEQ ID NO: 649627 - DNA, 15 bp, Homo sapiens
tttatccacttgttg

SEQ ID NO: 649628 - DNA, 15 bp, Homo sapiens
ttatccacttgttga

SEQ ID NO: 649629 - DNA, 15 bp, Homo sapiens
tatccacttgttgat

SEQ ID NO: 649630 - DNA, 15 bp, Homo sapiens
atccacttgttgatt

SEQ ID NO: 649631 - DNA, 15 bp, Homo sapiens
tccacttgttgattg

SEQ ID NO: 649632 - DNA, 15 bp, Homo sapiens
ccacttgttgattga

SEQ ID NO: 649633 - DNA, 15 bp, Homo sapiens
cacttgttgattgat

SEQ ID NO: 649634 - DNA, 15 bp, Homo sapiens
acttgttgattgatg

SEQ ID NO: 649635 - DNA, 15 bp, Homo sapiens
cttgttgattgatgg

SEQ ID NO: 649636 - DNA, 15 bp, Homo sapiens
ttgttgattgatggg

SEQ ID NO: 649637 - DNA, 15 bp, Homo sapiens
tgttgattgatgggc

SEQ ID NO: 649638 - DNA, 15 bp, Homo sapiens
gttgattgatgggca

SEQ ID NO: 649639 - DNA, 15 bp, Homo sapiens
ttgattgatgggcat

SEQ ID NO: 649640 - DNA, 15 bp, Homo sapiens
tgattgatgggcatt

SEQ ID NO: 649641 - DNA, 15 bp, Homo sapiens
gattgatgggcattt

SEQ ID NO: 649642 - DNA, 15 bp, Homo sapiens
attgatgggcatttg

SEQ ID NO: 649643 - DNA, 15 bp, Homo sapiens
ttgatgggcatttgg

SEQ ID NO: 649644 - DNA, 15 bp, Homo sapiens
tgatgggcatttggg

SEQ ID NO: 649645 - DNA, 15 bp, Homo sapiens
gatgggcatttgggc

SEQ ID NO: 649646 - DNA, 15 bp, Homo sapiens
atgggcatttgggct

SEQ ID NO: 649647 - DNA, 15 bp, Homo sapiens
tgggcatttgggcta

SEQ ID NO: 649648 - DNA, 15 bp, Homo sapiens
gggcatttgggctag

SEQ ID NO: 649649 - DNA, 15 bp, Homo sapiens
ggcatttgggctagt

SEQ ID NO: 649650 - DNA, 15 bp, Homo sapiens
gcatttgggctagtt

SEQ ID NO: 649651 - DNA, 15 bp, Homo sapiens
catttgggctagttc

SEQ ID NO: 649652 - DNA, 15 bp, Homo sapiens
atttgggctagttcc

SEQ ID NO: 649653 - DNA, 15 bp, Homo sapiens
tttgggctagttcca

SEQ ID NO: 649654 - DNA, 15 bp, Homo sapiens
ttgggctagttccac

SEQ ID NO: 649655 - DNA, 15 bp, Homo sapiens
tgggctagttccaca

SEQ ID NO: 649656 - DNA, 15 bp, Homo sapiens
gggctagttccacag

SEQ ID NO: 649657 - DNA, 15 bp, Homo sapiens
ggctagttccacagt

SEQ ID NO: 649658 - DNA, 15 bp, Homo sapiens
gctagttccacagtt

SEQ ID NO: 649659 - DNA, 15 bp, Homo sapiens
ctagttccacagttt

SEQ ID NO: 649660 - DNA, 15 bp, Homo sapiens
tagttccacagtttt

SEQ ID NO: 649661 - DNA, 15 bp, Homo sapiens
agttccacagttttg

SEQ ID NO: 649662 - DNA, 15 bp, Homo sapiens
gttccacagttttgc

SEQ ID NO: 649663 - DNA, 15 bp, Homo sapiens
ttccacagttttgca

SEQ ID NO: 649664 - DNA, 15 bp, Homo sapiens
tccacagttttgcaa

SEQ ID NO: 649665 - DNA, 15 bp, Homo sapiens
ccacagttttgcaat

SEQ ID NO: 649666 - DNA, 15 bp, Homo sapiens
cacagttttgcaatt

SEQ ID NO: 649667 - DNA, 15 bp, Homo sapiens
acagttttgcaattg

SEQ ID NO: 649668 - DNA, 15 bp, Homo sapiens
cagttttgcaattgt

SEQ ID NO: 649669 - DNA, 15 bp, Homo sapiens
agttttgcaattgta

SEQ ID NO: 649670 - DNA, 15 bp, Homo sapiens
gttttgcaattgtaa

SEQ ID NO: 649671 - DNA, 15 bp, Homo sapiens
ttttgcaattgtaaa

SEQ ID NO: 649672 - DNA, 15 bp, Homo sapiens
tttgcaattgtaaat

SEQ ID NO: 649673 - DNA, 15 bp, Homo sapiens
ttgcaattgtaaatt

SEQ ID NO: 649674 - DNA, 15 bp, Homo sapiens
tgcaattgtaaattg

SEQ ID NO: 649675 - DNA, 15 bp, Homo sapiens
gcaattgtaaattgt

SEQ ID NO: 649676 - DNA, 15 bp, Homo sapiens
caattgtaaattgtg

SEQ ID NO: 649677 - DNA, 15 bp, Homo sapiens
aattgtaaattgtgc

SEQ ID NO: 649678 - DNA, 15 bp, Homo sapiens
attgtaaattgtgct

SEQ ID NO: 649679 - DNA, 15 bp, Homo sapiens
ttgtaaattgtgctg

SEQ ID NO: 649680 - DNA, 15 bp, Homo sapiens
tgtaaattgtgctgc

SEQ ID NO: 649681 - DNA, 15 bp, Homo sapiens
gtaaattgtgctgct

SEQ ID NO: 649682 - DNA, 15 bp, Homo sapiens
taaattgtgctgcta

SEQ ID NO: 649683 - DNA, 15 bp, Homo sapiens
aaattgtgctgctat

SEQ ID NO: 649684 - DNA, 15 bp, Homo sapiens
aattgtgctgctata

SEQ ID NO: 649685 - DNA, 15 bp, Homo sapiens
attgtgctgctataa

SEQ ID NO: 649686 - DNA, 15 bp, Homo sapiens
ttgtgctgctataaa

SEQ ID NO: 649687 - DNA, 15 bp, Homo sapiens
tgtgctgctataaac

SEQ ID NO: 649688 - DNA, 15 bp, Homo sapiens
gtgctgctataaaca

SEQ ID NO: 649689 - DNA, 15 bp, Homo sapiens
tgctgctataaacat

SEQ ID NO: 649690 - DNA, 15 bp, Homo sapiens
gctgctataaacatg

SEQ ID NO: 649691 - DNA, 15 bp, Homo sapiens
ctgctataaacatgc

SEQ ID NO: 649692 - DNA, 15 bp, Homo sapiens
tgctataaacatgcg

SEQ ID NO: 649693 - DNA, 15 bp, Homo sapiens
gctataaacatgcgt

SEQ ID NO: 649694 - DNA, 15 bp, Homo sapiens
ctataaacatgcgtg

SEQ ID NO: 649695 - DNA, 15 bp, Homo sapiens
tataaacatgcgtgt

SEQ ID NO: 649696 - DNA, 15 bp, Homo sapiens
ataaacatgcgtgtg

SEQ ID NO: 649697 - DNA, 15 bp, Homo sapiens
taaacatgcgtgtgc

SEQ ID NO: 649698 - DNA, 15 bp, Homo sapiens
aaacatgcgtgtgca

SEQ ID NO: 649699 - DNA, 15 bp, Homo sapiens
aacatgcgtgtgcaa

SEQ ID NO: 649700 - DNA, 15 bp, Homo sapiens
acatgcgtgtgcaag

SEQ ID NO: 649701 - DNA, 15 bp, Homo sapiens
catgcgtgtgcaagt

SEQ ID NO: 649702 - DNA, 15 bp, Homo sapiens
atgcgtgtgcaagta

SEQ ID NO: 649703 - DNA, 15 bp, Homo sapiens
tgcgtgtgcaagtat

SEQ ID NO: 649704 - DNA, 15 bp, Homo sapiens
gcgtgtgcaagtatc

SEQ ID NO: 649705 - DNA, 15 bp, Homo sapiens
cgtgtgcaagtatct

SEQ ID NO: 649706 - DNA, 15 bp, Homo sapiens
gtgtgcaagtatctc

SEQ ID NO: 649707 - DNA, 15 bp, Homo sapiens
tgtgcaagtatctct

SEQ ID NO: 649708 - DNA, 15 bp, Homo sapiens
gtgcaagtatctctt

SEQ ID NO: 649709 - DNA, 15 bp, Homo sapiens
tgcaagtatctcttt

SEQ ID NO: 649710 - DNA, 15 bp, Homo sapiens
gcaagtatctctttt

SEQ ID NO: 649711 - DNA, 15 bp, Homo sapiens
caagtatctcttttg

SEQ ID NO: 649712 - DNA, 15 bp, Homo sapiens
aagtatctcttttgt

SEQ ID NO: 649713 - DNA, 15 bp, Homo sapiens
agtatctcttttgta

SEQ ID NO: 649714 - DNA, 15 bp, Homo sapiens
gtatctcttttgtat

SEQ ID NO: 649715 - DNA, 15 bp, Homo sapiens
tatctcttttgtata

SEQ ID NO: 649716 - DNA, 15 bp, Homo sapiens
atctcttttgtataa

SEQ ID NO: 649717 - DNA, 15 bp, Homo sapiens
tctcttttgtataac

SEQ ID NO: 649718 - DNA, 15 bp, Homo sapiens
ctcttttgtataacg

SEQ ID NO: 649719 - DNA, 15 bp, Homo sapiens
tcttttgtataacga

SEQ ID NO: 649720 - DNA, 15 bp, Homo sapiens
cttttgtataacgac

SEQ ID NO: 649721 - DNA, 15 bp, Homo sapiens
ttttgtataacgact

SEQ ID NO: 649722 - DNA, 15 bp, Homo sapiens
tttgtataacgactt

SEQ ID NO: 649723 - DNA, 15 bp, Homo sapiens
ttgtataacgacttc

SEQ ID NO: 649724 - DNA, 15 bp, Homo sapiens
tgtataacgacttct

SEQ ID NO: 649725 - DNA, 15 bp, Homo sapiens
gtataacgacttctt

SEQ ID NO: 649726 - DNA, 15 bp, Homo sapiens
tataacgacttcttt

SEQ ID NO: 649727 - DNA, 15 bp, Homo sapiens
ataacgacttctttt

SEQ ID NO: 649728 - DNA, 15 bp, Homo sapiens
taacgacttcttttc

SEQ ID NO: 649729 - DNA, 15 bp, Homo sapiens
aacgacttcttttcc

SEQ ID NO: 649730 - DNA, 15 bp, Homo sapiens
acgacttcttttcct

SEQ ID NO: 649731 - DNA, 15 bp, Homo sapiens
cgacttcttttcctc

SEQ ID NO: 649732 - DNA, 15 bp, Homo sapiens
gacttcttttcctct

SEQ ID NO: 649733 - DNA, 15 bp, Homo sapiens
acttcttttcctctg

SEQ ID NO: 649734 - DNA, 15 bp, Homo sapiens
cttcttttcctctgg

SEQ ID NO: 649735 - DNA, 15 bp, Homo sapiens
ttcttttcctctggg

SEQ ID NO: 649736 - DNA, 15 bp, Homo sapiens
tcttttcctctgggt

SEQ ID NO: 649737 - DNA, 15 bp, Homo sapiens
cttttcctctgggta

SEQ ID NO: 649738 - DNA, 15 bp, Homo sapiens
ttttcctctgggtag

SEQ ID NO: 649739 - DNA, 15 bp, Homo sapiens
tttcctctgggtaga

SEQ ID NO: 649740 - DNA, 15 bp, Homo sapiens
ttcctctgggtagat

SEQ ID NO: 649741 - DNA, 15 bp, Homo sapiens
tcctctgggtagata

SEQ ID NO: 649742 - DNA, 15 bp, Homo sapiens
cctctgggtagatac

SEQ ID NO: 649743 - DNA, 15 bp, Homo sapiens
ctctgggtagatacc

SEQ ID NO: 649744 - DNA, 15 bp, Homo sapiens
tctgggtagataccc

SEQ ID NO: 649745 - DNA, 15 bp, Homo sapiens
ctgggtagataccca

SEQ ID NO: 649746 - DNA, 15 bp, Homo sapiens
tgggtagatacccag

SEQ ID NO: 649747 - DNA, 15 bp, Homo sapiens
gggtagatacccagt

SEQ ID NO: 649748 - DNA, 15 bp, Homo sapiens
ggtagatacccagta

SEQ ID NO: 649749 - DNA, 15 bp, Homo sapiens
gtagatacccagtag

SEQ ID NO: 649750 - DNA, 15 bp, Homo sapiens
tagatacccagtagt

SEQ ID NO: 649751 - DNA, 15 bp, Homo sapiens
agatacccagtagtg

SEQ ID NO: 649752 - DNA, 15 bp, Homo sapiens
gatacccagtagtgg

SEQ ID NO: 649753 - DNA, 15 bp, Homo sapiens
atacccagtagtggg

SEQ ID NO: 649754 - DNA, 15 bp, Homo sapiens
tacccagtagtggga

SEQ ID NO: 649755 - DNA, 15 bp, Homo sapiens
acccagtagtgggat

SEQ ID NO: 649756 - DNA, 15 bp, Homo sapiens
cccagtagtgggatt

SEQ ID NO: 649757 - DNA, 15 bp, Homo sapiens
ccagtagtgggattg

SEQ ID NO: 649758 - DNA, 15 bp, Homo sapiens
cagtagtgggattgc

SEQ ID NO: 649759 - DNA, 15 bp, Homo sapiens
agtagtgggattgct

SEQ ID NO: 649760 - DNA, 15 bp, Homo sapiens
gtagtgggattgctg

SEQ ID NO: 649761 - DNA, 15 bp, Homo sapiens
tagtgggattgctgg

SEQ ID NO: 649762 - DNA, 15 bp, Homo sapiens
agtgggattgctgga

SEQ ID NO: 649763 - DNA, 15 bp, Homo sapiens
gtgggattgctggat

SEQ ID NO: 649764 - DNA, 15 bp, Homo sapiens
tgggattgctggatc

SEQ ID NO: 649765 - DNA, 15 bp, Homo sapiens
gggattgctggatca

SEQ ID NO: 649766 - DNA, 15 bp, Homo sapiens
ggattgctggatcaa

SEQ ID NO: 649767 - DNA, 15 bp, Homo sapiens
gattgctggatcaaa

SEQ ID NO: 649768 - DNA, 15 bp, Homo sapiens
attgctggatcaaat

SEQ ID NO: 649769 - DNA, 15 bp, Homo sapiens
ttgctggatcaaatg

SEQ ID NO: 649770 - DNA, 15 bp, Homo sapiens
tgctggatcaaatgg

SEQ ID NO: 649771 - DNA, 15 bp, Homo sapiens
gctggatcaaatggt

SEQ ID NO: 649772 - DNA, 15 bp, Homo sapiens
ctggatcaaatggta

SEQ ID NO: 649773 - DNA, 15 bp, Homo sapiens
tggatcaaatggtag

SEQ ID NO: 649774 - DNA, 15 bp, Homo sapiens
ggatcaaatggtagt

SEQ ID NO: 649775 - DNA, 15 bp, Homo sapiens
gatcaaatggtagtt

SEQ ID NO: 649776 - DNA, 15 bp, Homo sapiens
atcaaatggtagttc

SEQ ID NO: 649777 - DNA, 15 bp, Homo sapiens
tcaaatggtagttct

SEQ ID NO: 649778 - DNA, 15 bp, Homo sapiens
caaatggtagttcta

SEQ ID NO: 649779 - DNA, 15 bp, Homo sapiens
aaatggtagttctat

SEQ ID NO: 649780 - DNA, 15 bp, Homo sapiens
aatggtagttctatg

SEQ ID NO: 649781 - DNA, 15 bp, Homo sapiens
atggtagttctatgt

SEQ ID NO: 649782 - DNA, 15 bp, Homo sapiens
tggtagttctatgtt

SEQ ID NO: 649783 - DNA, 15 bp, Homo sapiens
ggtagttctatgttc

SEQ ID NO: 649784 - DNA, 15 bp, Homo sapiens
gtagttctatgttca

SEQ ID NO: 649785 - DNA, 15 bp, Homo sapiens
tagttctatgttcag

SEQ ID NO: 649786 - DNA, 15 bp, Homo sapiens
agttctatgttcagt

SEQ ID NO: 649787 - DNA, 15 bp, Homo sapiens
gttctatgttcagtt

SEQ ID NO: 649788 - DNA, 15 bp, Homo sapiens
ttctatgttcagttc

SEQ ID NO: 649789 - DNA, 15 bp, Homo sapiens
tctatgttcagttct

SEQ ID NO: 649790 - DNA, 15 bp, Homo sapiens
ctatgttcagttctt

SEQ ID NO: 649791 - DNA, 15 bp, Homo sapiens
tatgttcagttcttt

SEQ ID NO: 649792 - DNA, 15 bp, Homo sapiens
atgttcagttcttta

SEQ ID NO: 649793 - DNA, 15 bp, Homo sapiens
tgttcagttctttaa

SEQ ID NO: 649794 - DNA, 15 bp, Homo sapiens
gttcagttctttaag

SEQ ID NO: 649795 - DNA, 15 bp, Homo sapiens
ttcagttctttaagg

SEQ ID NO: 649796 - DNA, 15 bp, Homo sapiens
tcagttctttaagga

SEQ ID NO: 649797 - DNA, 15 bp, Homo sapiens
cagttctttaaggaa

SEQ ID NO: 649798 - DNA, 15 bp, Homo sapiens
agttctttaaggaat

SEQ ID NO: 649799 - DNA, 15 bp, Homo sapiens
gttctttaaggaatt

SEQ ID NO: 649800 - DNA, 15 bp, Homo sapiens
ttctttaaggaattt

SEQ ID NO: 649801 - DNA, 15 bp, Homo sapiens
tctttaaggaatttc

SEQ ID NO: 649802 - DNA, 15 bp, Homo sapiens
ctttaaggaatttcc

SEQ ID NO: 649803 - DNA, 15 bp, Homo sapiens
tttaaggaatttcca

SEQ ID NO: 649804 - DNA, 15 bp, Homo sapiens
ttaaggaatttccat

SEQ ID NO: 649805 - DNA, 15 bp, Homo sapiens
taaggaatttccata

SEQ ID NO: 649806 - DNA, 15 bp, Homo sapiens
aaggaatttccatac

SEQ ID NO: 649807 - DNA, 15 bp, Homo sapiens
aggaatttccatact

SEQ ID NO: 649808 - DNA, 15 bp, Homo sapiens
ggaatttccatactg

SEQ ID NO: 649809 - DNA, 15 bp, Homo sapiens
gaatttccatactgt

SEQ ID NO: 649810 - DNA, 15 bp, Homo sapiens
aatttccatactgtt

SEQ ID NO: 649811 - DNA, 15 bp, Homo sapiens
atttccatactgttt

SEQ ID NO: 649812 - DNA, 15 bp, Homo sapiens
tttccatactgtttt

SEQ ID NO: 649813 - DNA, 15 bp, Homo sapiens
ttccatactgttttc

SEQ ID NO: 649814 - DNA, 15 bp, Homo sapiens
tccatactgttttcc

SEQ ID NO: 649815 - DNA, 15 bp, Homo sapiens
ccatactgttttcca

SEQ ID NO: 649816 - DNA, 15 bp, Homo sapiens
catactgttttccat

SEQ ID NO: 649817 - DNA, 15 bp, Homo sapiens
atactgttttccata

SEQ ID NO: 649818 - DNA, 15 bp, Homo sapiens
tactgttttccatag

SEQ ID NO: 649819 - DNA, 15 bp, Homo sapiens
actgttttccatagt

SEQ ID NO: 649820 - DNA, 15 bp, Homo sapiens
ctgttttccatagtt

SEQ ID NO: 649821 - DNA, 15 bp, Homo sapiens
tgttttccatagttg

SEQ ID NO: 649822 - DNA, 15 bp, Homo sapiens
gttttccatagttgt

SEQ ID NO: 649823 - DNA, 15 bp, Homo sapiens
ttttccatagttgtt

SEQ ID NO: 649824 - DNA, 15 bp, Homo sapiens
tttccatagttgttg

SEQ ID NO: 649825 - DNA, 15 bp, Homo sapiens
ttccatagttgttgt

SEQ ID NO: 649826 - DNA, 15 bp, Homo sapiens
tccatagttgttgta

SEQ ID NO: 649827 - DNA, 15 bp, Homo sapiens
ccatagttgttgtac

SEQ ID NO: 649828 - DNA, 15 bp, Homo sapiens
catagttgttgtact

SEQ ID NO: 649829 - DNA, 15 bp, Homo sapiens
atagttgttgtacta

SEQ ID NO: 649830 - DNA, 15 bp, Homo sapiens
tagttgttgtactag

SEQ ID NO: 649831 - DNA, 15 bp, Homo sapiens
agttgttgtactagt

SEQ ID NO: 649832 - DNA, 15 bp, Homo sapiens
gttgttgtactagtt

SEQ ID NO: 649833 - DNA, 15 bp, Homo sapiens
ttgttgtactagttt

SEQ ID NO: 649834 - DNA, 15 bp, Homo sapiens
tgttgtactagttta

SEQ ID NO: 649835 - DNA, 15 bp, Homo sapiens
gttgtactagtttac

SEQ ID NO: 649836 - DNA, 15 bp, Homo sapiens
ttgtactagtttaca

SEQ ID NO: 649837 - DNA, 15 bp, Homo sapiens
tgtactagtttacat

SEQ ID NO: 649838 - DNA, 15 bp, Homo sapiens
gtactagtttacatt

SEQ ID NO: 649839 - DNA, 15 bp, Homo sapiens
tactagtttacattc

SEQ ID NO: 649840 - DNA, 15 bp, Homo sapiens
actagtttacattcc

SEQ ID NO: 649841 - DNA, 15 bp, Homo sapiens
ctagtttacattccc

SEQ ID NO: 649842 - DNA, 15 bp, Homo sapiens
tagtttacattccca

SEQ ID NO: 649843 - DNA, 15 bp, Homo sapiens
agtttacattcccac

SEQ ID NO: 649844 - DNA, 15 bp, Homo sapiens
gtttacattcccacc

SEQ ID NO: 649845 - DNA, 15 bp, Homo sapiens
ccaccaacagtgtag

SEQ ID NO: 649846 - DNA, 15 bp, Homo sapiens
caccaacagtgtaga

SEQ ID NO: 649847 - DNA, 15 bp, Homo sapiens
accaacagtgtagaa

SEQ ID NO: 649848 - DNA, 15 bp, Homo sapiens
ccaacagtgtagaag

SEQ ID NO: 649849 - DNA, 15 bp, Homo sapiens
caacagtgtagaagt

SEQ ID NO: 649850 - DNA, 15 bp, Homo sapiens
aacagtgtagaagtg

SEQ ID NO: 649851 - DNA, 15 bp, Homo sapiens
acagtgtagaagtgt

SEQ ID NO: 649852 - DNA, 15 bp, Homo sapiens
cagtgtagaagtgtt

SEQ ID NO: 649853 - DNA, 15 bp, Homo sapiens
agtgtagaagtgttc

SEQ ID NO: 649854 - DNA, 15 bp, Homo sapiens
gtgtagaagtgttcc

SEQ ID NO: 649855 - DNA, 15 bp, Homo sapiens
tgtagaagtgttcct

SEQ ID NO: 649856 - DNA, 15 bp, Homo sapiens
gtagaagtgttcctt

SEQ ID NO: 649857 - DNA, 15 bp, Homo sapiens
tagaagtgttccttt

SEQ ID NO: 649858 - DNA, 15 bp, Homo sapiens
agaagtgttcctttt

SEQ ID NO: 649859 - DNA, 15 bp, Homo sapiens
gaagtgttccttttc

SEQ ID NO: 649860 - DNA, 15 bp, Homo sapiens
aagtgttccttttca

SEQ ID NO: 649861 - DNA, 15 bp, Homo sapiens
agtgttccttttcac

SEQ ID NO: 649862 - DNA, 15 bp, Homo sapiens
gtgttccttttcact

SEQ ID NO: 649863 - DNA, 15 bp, Homo sapiens
tgttccttttcacta

SEQ ID NO: 649864 - DNA, 15 bp, Homo sapiens
gttccttttcactac

SEQ ID NO: 649865 - DNA, 15 bp, Homo sapiens
ttccttttcactaca

SEQ ID NO: 649866 - DNA, 15 bp, Homo sapiens
tccttttcactacat

SEQ ID NO: 649867 - DNA, 15 bp, Homo sapiens
ccttttcactacatc

SEQ ID NO: 649868 - DNA, 15 bp, Homo sapiens
cttttcactacatcc

SEQ ID NO: 649869 - DNA, 15 bp, Homo sapiens
ttttcactacatcca

SEQ ID NO: 649870 - DNA, 15 bp, Homo sapiens
tttcactacatccat

SEQ ID NO: 649871 - DNA, 15 bp, Homo sapiens
ttcactacatccatg

SEQ ID NO: 649872 - DNA, 15 bp, Homo sapiens
tcactacatccatgc

SEQ ID NO: 649873 - DNA, 15 bp, Homo sapiens
cactacatccatgcc

SEQ ID NO: 649874 - DNA, 15 bp, Homo sapiens
actacatccatgcca

SEQ ID NO: 649875 - DNA, 15 bp, Homo sapiens
ctacatccatgccaa

SEQ ID NO: 649876 - DNA, 15 bp, Homo sapiens
tacatccatgccaac

SEQ ID NO: 649877 - DNA, 15 bp, Homo sapiens
acatccatgccaaca

SEQ ID NO: 649878 - DNA, 15 bp, Homo sapiens
catccatgccaacat

SEQ ID NO: 649879 - DNA, 15 bp, Homo sapiens
atccatgccaacatc

SEQ ID NO: 649880 - DNA, 15 bp, Homo sapiens
tccatgccaacatct

SEQ ID NO: 649881 - DNA, 15 bp, Homo sapiens
ccatgccaacatcta

SEQ ID NO: 649882 - DNA, 15 bp, Homo sapiens
catgccaacatctat

SEQ ID NO: 649883 - DNA, 15 bp, Homo sapiens
atgccaacatctatt

SEQ ID NO: 649884 - DNA, 15 bp, Homo sapiens
tgccaacatctatta

SEQ ID NO: 649885 - DNA, 15 bp, Homo sapiens
gccaacatctattat

SEQ ID NO: 649886 - DNA, 15 bp, Homo sapiens
ccaacatctattatg

SEQ ID NO: 649887 - DNA, 15 bp, Homo sapiens
caacatctattatgt

SEQ ID NO: 649888 - DNA, 15 bp, Homo sapiens
aacatctattatgtt

SEQ ID NO: 649889 - DNA, 15 bp, Homo sapiens
acatctattatgttt

SEQ ID NO: 649890 - DNA, 15 bp, Homo sapiens
catctattatgtttt

SEQ ID NO: 649891 - DNA, 15 bp, Homo sapiens
atctattatgttttg

SEQ ID NO: 649892 - DNA, 15 bp, Homo sapiens
tctattatgttttga

SEQ ID NO: 649893 - DNA, 15 bp, Homo sapiens
ctattatgttttgat

SEQ ID NO: 649894 - DNA, 15 bp, Homo sapiens
tattatgttttgatt

SEQ ID NO: 649895 - DNA, 15 bp, Homo sapiens
attatgttttgattt

SEQ ID NO: 649896 - DNA, 15 bp, Homo sapiens
ttatgttttgatttt

SEQ ID NO: 649897 - DNA, 15 bp, Homo sapiens
tatgttttgattttt

SEQ ID NO: 649898 - DNA, 15 bp, Homo sapiens
atgttttgatttttt

SEQ ID NO: 649899 - DNA, 15 bp, Homo sapiens
tgttttgattttttt

SEQ ID NO: 649900 - DNA, 15 bp, Homo sapiens
gttttgattttttta

SEQ ID NO: 649901 - DNA, 15 bp, Homo sapiens
ttttgatttttttat

SEQ ID NO: 649902 - DNA, 15 bp, Homo sapiens
tttgatttttttatt

SEQ ID NO: 649903 - DNA, 15 bp, Homo sapiens
ttgatttttttatta

SEQ ID NO: 649904 - DNA, 15 bp, Homo sapiens
tgatttttttattat

SEQ ID NO: 649905 - DNA, 15 bp, Homo sapiens
gatttttttattata

SEQ ID NO: 649906 - DNA, 15 bp, Homo sapiens
atttttttattatag

SEQ ID NO: 649907 - DNA, 15 bp, Homo sapiens
tttttttattatagc

SEQ ID NO: 649908 - DNA, 15 bp, Homo sapiens
ttttttattatagcc

SEQ ID NO: 649909 - DNA, 15 bp, Homo sapiens
tttttattatagcca

SEQ ID NO: 649910 - DNA, 15 bp, Homo sapiens
ttttattatagccat

SEQ ID NO: 649911 - DNA, 15 bp, Homo sapiens
tttattatagccatt

SEQ ID NO: 649912 - DNA, 15 bp, Homo sapiens
ttattatagccattc

SEQ ID NO: 649913 - DNA, 15 bp, Homo sapiens
tattatagccattct

SEQ ID NO: 649914 - DNA, 15 bp, Homo sapiens
attatagccattctt

SEQ ID NO: 649915 - DNA, 15 bp, Homo sapiens
ttatagccattcttg

SEQ ID NO: 649916 - DNA, 15 bp, Homo sapiens
tatagccattcttgc

SEQ ID NO: 649917 - DNA, 15 bp, Homo sapiens
atagccattcttgca

SEQ ID NO: 649918 - DNA, 15 bp, Homo sapiens
tagccattcttgcaa

SEQ ID NO: 649919 - DNA, 15 bp, Homo sapiens
agccattcttgcaag

SEQ ID NO: 649920 - DNA, 15 bp, Homo sapiens
gccattcttgcaaga

SEQ ID NO: 649921 - DNA, 15 bp, Homo sapiens
ccattcttgcaagat

SEQ ID NO: 649922 - DNA, 15 bp, Homo sapiens
cattcttgcaagatt

SEQ ID NO: 649923 - DNA, 15 bp, Homo sapiens
attcttgcaagatta

SEQ ID NO: 649924 - DNA, 15 bp, Homo sapiens
ttcttgcaagattaa

SEQ ID NO: 649925 - DNA, 15 bp, Homo sapiens
tcttgcaagattaag

SEQ ID NO: 649926 - DNA, 15 bp, Homo sapiens
cttgcaagattaagg

SEQ ID NO: 649927 - DNA, 15 bp, Homo sapiens
ttgcaagattaaggt

SEQ ID NO: 649928 - DNA, 15 bp, Homo sapiens
tgcaagattaaggtg

SEQ ID NO: 649929 - DNA, 15 bp, Homo sapiens
gcaagattaaggtgg

SEQ ID NO: 649930 - DNA, 15 bp, Homo sapiens
caagattaaggtggt

SEQ ID NO: 649931 - DNA, 15 bp, Homo sapiens
aagattaaggtggta

SEQ ID NO: 649932 - DNA, 15 bp, Homo sapiens
agattaaggtggtat

SEQ ID NO: 649933 - DNA, 15 bp, Homo sapiens
gattaaggtggtatc

SEQ ID NO: 649934 - DNA, 15 bp, Homo sapiens
attaaggtggtatca

SEQ ID NO: 649935 - DNA, 15 bp, Homo sapiens
ttaaggtggtatcac

SEQ ID NO: 649936 - DNA, 15 bp, Homo sapiens
taaggtggtatcaca

SEQ ID NO: 649937 - DNA, 15 bp, Homo sapiens
aaggtggtatcacat

SEQ ID NO: 649938 - DNA, 15 bp, Homo sapiens
aggtggtatcacatt

SEQ ID NO: 649939 - DNA, 15 bp, Homo sapiens
ggtggtatcacattg

SEQ ID NO: 649940 - DNA, 15 bp, Homo sapiens
gtggtatcacattgt

SEQ ID NO: 649941 - DNA, 15 bp, Homo sapiens
tggtatcacattgtg

SEQ ID NO: 649942 - DNA, 15 bp, Homo sapiens
ggtatcacattgtgg

SEQ ID NO: 649943 - DNA, 15 bp, Homo sapiens
gtatcacattgtggt

SEQ ID NO: 649944 - DNA, 15 bp, Homo sapiens
tatcacattgtggtt

SEQ ID NO: 649945 - DNA, 15 bp, Homo sapiens
atcacattgtggttt

SEQ ID NO: 649946 - DNA, 15 bp, Homo sapiens
tcacattgtggtttt

SEQ ID NO: 649947 - DNA, 15 bp, Homo sapiens
cacattgtggttttg

SEQ ID NO: 649948 - DNA, 15 bp, Homo sapiens
acattgtggttttga

SEQ ID NO: 649949 - DNA, 15 bp, Homo sapiens
gtggttttgatttgt

SEQ ID NO: 649950 - DNA, 15 bp, Homo sapiens
tggttttgatttgta

SEQ ID NO: 649951 - DNA, 15 bp, Homo sapiens
ggttttgatttgtat

SEQ ID NO: 649952 - DNA, 15 bp, Homo sapiens
gttttgatttgtatt

SEQ ID NO: 649953 - DNA, 15 bp, Homo sapiens
ttttgatttgtattt

SEQ ID NO: 649954 - DNA, 15 bp, Homo sapiens
tttgatttgtatttc

SEQ ID NO: 649955 - DNA, 15 bp, Homo sapiens
ttgatttgtatttcc

SEQ ID NO: 649956 - DNA, 15 bp, Homo sapiens
tgatttgtatttccc

SEQ ID NO: 649957 - DNA, 15 bp, Homo sapiens
gatttgtatttccct

SEQ ID NO: 649958 - DNA, 15 bp, Homo sapiens
atttgtatttccctg

SEQ ID NO: 649959 - DNA, 15 bp, Homo sapiens
tttgtatttccctga

SEQ ID NO: 649960 - DNA, 15 bp, Homo sapiens
ttgtatttccctgat

SEQ ID NO: 649961 - DNA, 15 bp, Homo sapiens
tgtatttccctgatc

SEQ ID NO: 649962 - DNA, 15 bp, Homo sapiens
gtatttccctgatca

SEQ ID NO: 649963 - DNA, 15 bp, Homo sapiens
tatttccctgatcat

SEQ ID NO: 649964 - DNA, 15 bp, Homo sapiens
atttccctgatcatt

SEQ ID NO: 649965 - DNA, 15 bp, Homo sapiens
tttccctgatcatta

SEQ ID NO: 649966 - DNA, 15 bp, Homo sapiens
ttccctgatcattag

SEQ ID NO: 649967 - DNA, 15 bp, Homo sapiens
tccctgatcattagt

SEQ ID NO: 649968 - DNA, 15 bp, Homo sapiens
ccctgatcattagtg

SEQ ID NO: 649969 - DNA, 15 bp, Homo sapiens
cctgatcattagtga

SEQ ID NO: 649970 - DNA, 15 bp, Homo sapiens
ctgatcattagtgat

SEQ ID NO: 649971 - DNA, 15 bp, Homo sapiens
tgatcattagtgatg

SEQ ID NO: 649972 - DNA, 15 bp, Homo sapiens
gatcattagtgatgt

SEQ ID NO: 649973 - DNA, 15 bp, Homo sapiens
atcattagtgatgtt

SEQ ID NO: 649974 - DNA, 15 bp, Homo sapiens
tcattagtgatgttg

SEQ ID NO: 649975 - DNA, 15 bp, Homo sapiens
cattagtgatgttga

SEQ ID NO: 649976 - DNA, 15 bp, Homo sapiens
attagtgatgttgag

SEQ ID NO: 649977 - DNA, 15 bp, Homo sapiens
ttagtgatgttgagc

SEQ ID NO: 649978 - DNA, 15 bp, Homo sapiens
tagtgatgttgagca

SEQ ID NO: 649979 - DNA, 15 bp, Homo sapiens
agtgatgttgagcat

SEQ ID NO: 649980 - DNA, 15 bp, Homo sapiens
gtgatgttgagcatt

SEQ ID NO: 649981 - DNA, 15 bp, Homo sapiens
tgatgttgagcattt

SEQ ID NO: 649982 - DNA, 15 bp, Homo sapiens
gatgttgagcatttt

SEQ ID NO: 649983 - DNA, 15 bp, Homo sapiens
atgttgagcattttt

SEQ ID NO: 649984 - DNA, 15 bp, Homo sapiens
tgttgagcatttttt

SEQ ID NO: 649985 - DNA, 15 bp, Homo sapiens
gttgagcattttttt

SEQ ID NO: 649986 - DNA, 15 bp, Homo sapiens
ttgagcatttttttc

SEQ ID NO: 649987 - DNA, 15 bp, Homo sapiens
tgagcatttttttca

SEQ ID NO: 649988 - DNA, 15 bp, Homo sapiens
gagcatttttttcat

SEQ ID NO: 649989 - DNA, 15 bp, Homo sapiens
agcatttttttcata

SEQ ID NO: 649990 - DNA, 15 bp, Homo sapiens
gcatttttttcatat

SEQ ID NO: 649991 - DNA, 15 bp, Homo sapiens
catttttttcatatg

SEQ ID NO: 649992 - DNA, 15 bp, Homo sapiens
atttttttcatatgt

SEQ ID NO: 649993 - DNA, 15 bp, Homo sapiens
tttttttcatatgtt

SEQ ID NO: 649994 - DNA, 15 bp, Homo sapiens
ttttttcatatgttt

SEQ ID NO: 649995 - DNA, 15 bp, Homo sapiens
tttttcatatgtttg

SEQ ID NO: 649996 - DNA, 15 bp, Homo sapiens
ttttcatatgtttgt

SEQ ID NO: 649997 - DNA, 15 bp, Homo sapiens
tttcatatgtttgtt

SEQ ID NO: 649998 - DNA, 15 bp, Homo sapiens
ttcatatgtttgttg

SEQ ID NO: 649999 - DNA, 15 bp, Homo sapiens
tcatatgtttgttgg

SEQ ID NO: 650000 - DNA, 15 bp, Homo sapiens
catatgtttgttggc

SEQ ID NO: 650001 - DNA, 15 bp, Homo sapiens
atatgtttgttggcc

SEQ ID NO: 650002 - DNA, 15 bp, Homo sapiens
tatgtttgttggcca

SEQ ID NO: 650003 - DNA, 15 bp, Homo sapiens
atgtttgttggccat

SEQ ID NO: 650004 - DNA, 15 bp, Homo sapiens
tgtttgttggccatt

SEQ ID NO: 650005 - DNA, 15 bp, Homo sapiens
gtttgttggccattt

SEQ ID NO: 650006 - DNA, 15 bp, Homo sapiens
tttgttggccatttg

SEQ ID NO: 650007 - DNA, 15 bp, Homo sapiens
ttgttggccatttgt

SEQ ID NO: 650008 - DNA, 15 bp, Homo sapiens
tgttggccatttgtg

SEQ ID NO: 650009 - DNA, 15 bp, Homo sapiens
gttggccatttgtgt

SEQ ID NO: 650010 - DNA, 15 bp, Homo sapiens
ttggccatttgtgta

SEQ ID NO: 650011 - DNA, 15 bp, Homo sapiens
tggccatttgtgtat

SEQ ID NO: 650012 - DNA, 15 bp, Homo sapiens
ggccatttgtgtatc

SEQ ID NO: 650013 - DNA, 15 bp, Homo sapiens
gccatttgtgtatct

SEQ ID NO: 650014 - DNA, 15 bp, Homo sapiens
ccatttgtgtatctt

SEQ ID NO: 650015 - DNA, 15 bp, Homo sapiens
catttgtgtatcttc

SEQ ID NO: 650016 - DNA, 15 bp, Homo sapiens
atttgtgtatcttct

SEQ ID NO: 650017 - DNA, 15 bp, Homo sapiens
tttgtgtatcttctt

SEQ ID NO: 650018 - DNA, 15 bp, Homo sapiens
ttgtgtatcttcttc

SEQ ID NO: 650019 - DNA, 15 bp, Homo sapiens
tgtgtatcttcttct

SEQ ID NO: 650020 - DNA, 15 bp, Homo sapiens
gtgtatcttcttctg

SEQ ID NO: 650021 - DNA, 15 bp, Homo sapiens
tgtatcttcttctga

SEQ ID NO: 650022 - DNA, 15 bp, Homo sapiens
gtatcttcttctgag

SEQ ID NO: 650023 - DNA, 15 bp, Homo sapiens
tatcttcttctgaga

SEQ ID NO: 650024 - DNA, 15 bp, Homo sapiens
atcttcttctgagaa

SEQ ID NO: 650025 - DNA, 15 bp, Homo sapiens
tcttcttctgagaat

SEQ ID NO: 650026 - DNA, 15 bp, Homo sapiens
cttcttctgagaatt

SEQ ID NO: 650027 - DNA, 15 bp, Homo sapiens
ttcttctgagaattg

SEQ ID NO: 650028 - DNA, 15 bp, Homo sapiens
tcttctgagaattgt

SEQ ID NO: 650029 - DNA, 15 bp, Homo sapiens
cttctgagaattgtc

SEQ ID NO: 650030 - DNA, 15 bp, Homo sapiens
ttctgagaattgtct

SEQ ID NO: 650031 - DNA, 15 bp, Homo sapiens
tctgagaattgtcta

SEQ ID NO: 650032 - DNA, 15 bp, Homo sapiens
ctgagaattgtctat

SEQ ID NO: 650033 - DNA, 15 bp, Homo sapiens
tgagaattgtctatt

SEQ ID NO: 650034 - DNA, 15 bp, Homo sapiens
gagaattgtctattc

SEQ ID NO: 650035 - DNA, 15 bp, Homo sapiens
agaattgtctattca

SEQ ID NO: 650036 - DNA, 15 bp, Homo sapiens
gaattgtctattcat

SEQ ID NO: 650037 - DNA, 15 bp, Homo sapiens
aattgtctattcatg

SEQ ID NO: 650038 - DNA, 15 bp, Homo sapiens
attgtctattcatgt

SEQ ID NO: 650039 - DNA, 15 bp, Homo sapiens
ttgtctattcatgtc

SEQ ID NO: 650040 - DNA, 15 bp, Homo sapiens
tgtctattcatgtcc

SEQ ID NO: 650041 - DNA, 15 bp, Homo sapiens
gtctattcatgtcct

SEQ ID NO: 650042 - DNA, 15 bp, Homo sapiens
tctattcatgtcctt

SEQ ID NO: 650043 - DNA, 15 bp, Homo sapiens
ctattcatgtcctta

SEQ ID NO: 650044 - DNA, 15 bp, Homo sapiens
tattcatgtccttag

SEQ ID NO: 650045 - DNA, 15 bp, Homo sapiens
attcatgtccttagc

SEQ ID NO: 650046 - DNA, 15 bp, Homo sapiens
ttcatgtccttagct

SEQ ID NO: 650047 - DNA, 15 bp, Homo sapiens
tcatgtccttagctc

SEQ ID NO: 650048 - DNA, 15 bp, Homo sapiens
catgtccttagctca

SEQ ID NO: 650049 - DNA, 15 bp, Homo sapiens
atgtccttagctcac

SEQ ID NO: 650050 - DNA, 15 bp, Homo sapiens
tgtccttagctcact

SEQ ID NO: 650051 - DNA, 15 bp, Homo sapiens
gtccttagctcactt

SEQ ID NO: 650052 - DNA, 15 bp, Homo sapiens
tccttagctcacttt

SEQ ID NO: 650053 - DNA, 15 bp, Homo sapiens
ccttagctcactttc

SEQ ID NO: 650054 - DNA, 15 bp, Homo sapiens
cttagctcactttct

SEQ ID NO: 650055 - DNA, 15 bp, Homo sapiens
ttagctcactttctg

SEQ ID NO: 650056 - DNA, 15 bp, Homo sapiens
tagctcactttctga

SEQ ID NO: 650057 - DNA, 15 bp, Homo sapiens
agctcactttctgag

SEQ ID NO: 650058 - DNA, 15 bp, Homo sapiens
gctcactttctgagt

SEQ ID NO: 650059 - DNA, 15 bp, Homo sapiens
ctcactttctgagtt

SEQ ID NO: 650060 - DNA, 15 bp, Homo sapiens
tcactttctgagttt

SEQ ID NO: 650061 - DNA, 15 bp, Homo sapiens
cactttctgagttta

SEQ ID NO: 650062 - DNA, 15 bp, Homo sapiens
actttctgagtttat

SEQ ID NO: 650063 - DNA, 15 bp, Homo sapiens
ctttctgagtttatt

SEQ ID NO: 650064 - DNA, 15 bp, Homo sapiens
tttctgagtttattg

SEQ ID NO: 650065 - DNA, 15 bp, Homo sapiens
ttctgagtttattgt

SEQ ID NO: 650066 - DNA, 15 bp, Homo sapiens
tctgagtttattgta

SEQ ID NO: 650067 - DNA, 15 bp, Homo sapiens
ctgagtttattgtag

SEQ ID NO: 650068 - DNA, 15 bp, Homo sapiens
tgagtttattgtaga

SEQ ID NO: 650069 - DNA, 15 bp, Homo sapiens
gagtttattgtagat

SEQ ID NO: 650070 - DNA, 15 bp, Homo sapiens
agtttattgtagatt

SEQ ID NO: 650071 - DNA, 15 bp, Homo sapiens
gtttattgtagattc

SEQ ID NO: 650072 - DNA, 15 bp, Homo sapiens
tttattgtagattcc

SEQ ID NO: 650073 - DNA, 15 bp, Homo sapiens
ttattgtagattccg

SEQ ID NO: 650074 - DNA, 15 bp, Homo sapiens
tattgtagattccgg

SEQ ID NO: 650075 - DNA, 15 bp, Homo sapiens
attgtagattccgga

SEQ ID NO: 650076 - DNA, 15 bp, Homo sapiens
ttgtagattccggat

SEQ ID NO: 650077 - DNA, 15 bp, Homo sapiens
tgtagattccggata

SEQ ID NO: 650078 - DNA, 15 bp, Homo sapiens
gtagattccggatat

SEQ ID NO: 650079 - DNA, 15 bp, Homo sapiens
tagattccggatatt

SEQ ID NO: 650080 - DNA, 15 bp, Homo sapiens
agattccggatatta

SEQ ID NO: 650081 - DNA, 15 bp, Homo sapiens
gattccggatattag

SEQ ID NO: 650082 - DNA, 15 bp, Homo sapiens
attccggatattagt

SEQ ID NO: 650083 - DNA, 15 bp, Homo sapiens
ttccggatattagtc

SEQ ID NO: 650084 - DNA, 15 bp, Homo sapiens
tccggatattagtcc

SEQ ID NO: 650085 - DNA, 15 bp, Homo sapiens
ccggatattagtcct

SEQ ID NO: 650086 - DNA, 15 bp, Homo sapiens
cggatattagtcctt

SEQ ID NO: 650087 - DNA, 15 bp, Homo sapiens
ggatattagtccttt

SEQ ID NO: 650088 - DNA, 15 bp, Homo sapiens
gatattagtcctttg

SEQ ID NO: 650089 - DNA, 15 bp, Homo sapiens
atattagtcctttgt

SEQ ID NO: 650090 - DNA, 15 bp, Homo sapiens
tattagtcctttgtc

SEQ ID NO: 650091 - DNA, 15 bp, Homo sapiens
attagtcctttgtca

SEQ ID NO: 650092 - DNA, 15 bp, Homo sapiens
ttagtcctttgtcag

SEQ ID NO: 650093 - DNA, 15 bp, Homo sapiens
tagtcctttgtcaga

SEQ ID NO: 650094 - DNA, 15 bp, Homo sapiens
agtcctttgtcagat

SEQ ID NO: 650095 - DNA, 15 bp, Homo sapiens
gtcctttgtcagatg

SEQ ID NO: 650096 - DNA, 15 bp, Homo sapiens
tcctttgtcagatgt

SEQ ID NO: 650097 - DNA, 15 bp, Homo sapiens
cctttgtcagatgtg

SEQ ID NO: 650098 - DNA, 15 bp, Homo sapiens
ctttgtcagatgtgt

SEQ ID NO: 650099 - DNA, 15 bp, Homo sapiens
tttgtcagatgtgta

SEQ ID NO: 650100 - DNA, 15 bp, Homo sapiens
ttgtcagatgtgtag

SEQ ID NO: 650101 - DNA, 15 bp, Homo sapiens
tgtcagatgtgtaga

SEQ ID NO: 650102 - DNA, 15 bp, Homo sapiens
gtcagatgtgtagat

SEQ ID NO: 650103 - DNA, 15 bp, Homo sapiens
tcagatgtgtagatt

SEQ ID NO: 650104 - DNA, 15 bp, Homo sapiens
cagatgtgtagattg

SEQ ID NO: 650105 - DNA, 15 bp, Homo sapiens
agatgtgtagattgt

SEQ ID NO: 650106 - DNA, 15 bp, Homo sapiens
gatgtgtagattgtg

SEQ ID NO: 650107 - DNA, 15 bp, Homo sapiens
atgtgtagattgtga

SEQ ID NO: 650108 - DNA, 15 bp, Homo sapiens
tgtgtagattgtgaa

SEQ ID NO: 650109 - DNA, 15 bp, Homo sapiens
gtgtagattgtgaag

SEQ ID NO: 650110 - DNA, 15 bp, Homo sapiens
tgtagattgtgaaga

SEQ ID NO: 650111 - DNA, 15 bp, Homo sapiens
gtagattgtgaagat

SEQ ID NO: 650112 - DNA, 15 bp, Homo sapiens
tagattgtgaagatt

SEQ ID NO: 650113 - DNA, 15 bp, Homo sapiens
agattgtgaagattt

SEQ ID NO: 650114 - DNA, 15 bp, Homo sapiens
gattgtgaagatttt

SEQ ID NO: 650115 - DNA, 15 bp, Homo sapiens
attgtgaagattttc

SEQ ID NO: 650116 - DNA, 15 bp, Homo sapiens
ttgtgaagattttct

SEQ ID NO: 650117 - DNA, 15 bp, Homo sapiens
tgtgaagattttctc

SEQ ID NO: 650118 - DNA, 15 bp, Homo sapiens
gtgaagattttctcc

SEQ ID NO: 650119 - DNA, 15 bp, Homo sapiens
tgaagattttctccc

SEQ ID NO: 650120 - DNA, 15 bp, Homo sapiens
gaagattttctccca

SEQ ID NO: 650121 - DNA, 15 bp, Homo sapiens
aagattttctcccat

SEQ ID NO: 650122 - DNA, 15 bp, Homo sapiens
agattttctcccatc

SEQ ID NO: 650123 - DNA, 15 bp, Homo sapiens
gattttctcccatcc

SEQ ID NO: 650124 - DNA, 15 bp, Homo sapiens
attttctcccatcct

SEQ ID NO: 650125 - DNA, 15 bp, Homo sapiens
ttttctcccatcctg

SEQ ID NO: 650126 - DNA, 15 bp, Homo sapiens
tttctcccatcctgt

SEQ ID NO: 650127 - DNA, 15 bp, Homo sapiens
ttctcccatcctgtg

SEQ ID NO: 650128 - DNA, 15 bp, Homo sapiens
tctcccatcctgtgg

SEQ ID NO: 650129 - DNA, 15 bp, Homo sapiens
ctcccatcctgtggg

SEQ ID NO: 650130 - DNA, 15 bp, Homo sapiens
tcccatcctgtgggt

SEQ ID NO: 650131 - DNA, 15 bp, Homo sapiens
cccatcctgtgggtt

SEQ ID NO: 650132 - DNA, 15 bp, Homo sapiens
ccatcctgtgggttg

SEQ ID NO: 650133 - DNA, 15 bp, Homo sapiens
catcctgtgggttgt

SEQ ID NO: 650134 - DNA, 15 bp, Homo sapiens
atcctgtgggttgtc

SEQ ID NO: 650135 - DNA, 15 bp, Homo sapiens
tcctgtgggttgtct

SEQ ID NO: 650136 - DNA, 15 bp, Homo sapiens
cctgtgggttgtctg

SEQ ID NO: 650137 - DNA, 15 bp, Homo sapiens
ctgtgggttgtctgt

SEQ ID NO: 650138 - DNA, 15 bp, Homo sapiens
tgtgggttgtctgtt

SEQ ID NO: 650139 - DNA, 15 bp, Homo sapiens
gtgggttgtctgttt

SEQ ID NO: 650140 - DNA, 15 bp, Homo sapiens
tgggttgtctgttta

SEQ ID NO: 650141 - DNA, 15 bp, Homo sapiens
gggttgtctgtttac

SEQ ID NO: 650142 - DNA, 15 bp, Homo sapiens
ggttgtctgtttact

SEQ ID NO: 650143 - DNA, 15 bp, Homo sapiens
gttgtctgtttactc

SEQ ID NO: 650144 - DNA, 15 bp, Homo sapiens
ttgtctgtttactcg

SEQ ID NO: 650145 - DNA, 15 bp, Homo sapiens
tgtctgtttactcgc

SEQ ID NO: 650146 - DNA, 15 bp, Homo sapiens
gtctgtttactcgct

SEQ ID NO: 650147 - DNA, 15 bp, Homo sapiens
tctgtttactcgctg

SEQ ID NO: 650148 - DNA, 15 bp, Homo sapiens
ctgtttactcgctga

SEQ ID NO: 650149 - DNA, 15 bp, Homo sapiens
tgtttactcgctgac

SEQ ID NO: 650150 - DNA, 15 bp, Homo sapiens
gtttactcgctgact

SEQ ID NO: 650151 - DNA, 15 bp, Homo sapiens
tttactcgctgactg

SEQ ID NO: 650152 - DNA, 15 bp, Homo sapiens
ttactcgctgactgt

SEQ ID NO: 650153 - DNA, 15 bp, Homo sapiens
tactcgctgactgtt

SEQ ID NO: 650154 - DNA, 15 bp, Homo sapiens
actcgctgactgttc

SEQ ID NO: 650155 - DNA, 15 bp, Homo sapiens
ctcgctgactgttcc

SEQ ID NO: 650156 - DNA, 15 bp, Homo sapiens
tcgctgactgttcct

SEQ ID NO: 650157 - DNA, 15 bp, Homo sapiens
cgctgactgttcctt

SEQ ID NO: 650158 - DNA, 15 bp, Homo sapiens
gctgactgttcctta

SEQ ID NO: 650159 - DNA, 15 bp, Homo sapiens
ctgactgttccttat

SEQ ID NO: 650160 - DNA, 15 bp, Homo sapiens
tgactgttccttatg

SEQ ID NO: 650161 - DNA, 15 bp, Homo sapiens
gactgttccttatgc

SEQ ID NO: 650162 - DNA, 15 bp, Homo sapiens
actgttccttatgct

SEQ ID NO: 650163 - DNA, 15 bp, Homo sapiens
ctgttccttatgctg

SEQ ID NO: 650164 - DNA, 15 bp, Homo sapiens
tgttccttatgctgt

SEQ ID NO: 650165 - DNA, 15 bp, Homo sapiens
gttccttatgctgtg

SEQ ID NO: 650166 - DNA, 15 bp, Homo sapiens
ttccttatgctgtga

SEQ ID NO: 650167 - DNA, 15 bp, Homo sapiens
tccttatgctgtgaa

SEQ ID NO: 650168 - DNA, 15 bp, Homo sapiens
ccttatgctgtgaaa

SEQ ID NO: 650169 - DNA, 15 bp, Homo sapiens
cttatgctgtgaaaa

SEQ ID NO: 650170 - DNA, 15 bp, Homo sapiens
ttatgctgtgaaaaa

SEQ ID NO: 650171 - DNA, 15 bp, Homo sapiens
tatgctgtgaaaaac

SEQ ID NO: 650172 - DNA, 15 bp, Homo sapiens
atgctgtgaaaaacc

SEQ ID NO: 650173 - DNA, 15 bp, Homo sapiens
tgctgtgaaaaacct

SEQ ID NO: 650174 - DNA, 15 bp, Homo sapiens
gctgtgaaaaacctc

SEQ ID NO: 650175 - DNA, 15 bp, Homo sapiens
ctgtgaaaaacctct

SEQ ID NO: 650176 - DNA, 15 bp, Homo sapiens
tgtgaaaaacctctt

SEQ ID NO: 650177 - DNA, 15 bp, Homo sapiens
gtgaaaaacctcttt

SEQ ID NO: 650178 - DNA, 15 bp, Homo sapiens
tgaaaaacctcttta

SEQ ID NO: 650179 - DNA, 15 bp, Homo sapiens
gaaaaacctctttag

SEQ ID NO: 650180 - DNA, 15 bp, Homo sapiens
aaaaacctctttagt

SEQ ID NO: 650181 - DNA, 15 bp, Homo sapiens
aaaacctctttagtt

SEQ ID NO: 650182 - DNA, 15 bp, Homo sapiens
aaacctctttagttt

SEQ ID NO: 650183 - DNA, 15 bp, Homo sapiens
aacctctttagttta

SEQ ID NO: 650184 - DNA, 15 bp, Homo sapiens
acctctttagtttaa

SEQ ID NO: 650185 - DNA, 15 bp, Homo sapiens
cctctttagtttaat

SEQ ID NO: 650186 - DNA, 15 bp, Homo sapiens
ctctttagtttaatt

SEQ ID NO: 650187 - DNA, 15 bp, Homo sapiens
tctttagtttaatta

SEQ ID NO: 650188 - DNA, 15 bp, Homo sapiens
ctttagtttaattaa

SEQ ID NO: 650189 - DNA, 15 bp, Homo sapiens
tttagtttaattaag

SEQ ID NO: 650190 - DNA, 15 bp, Homo sapiens
ttagtttaattaagt

SEQ ID NO: 650191 - DNA, 15 bp, Homo sapiens
tagtttaattaagtc

SEQ ID NO: 650192 - DNA, 15 bp, Homo sapiens
agtttaattaagtct

SEQ ID NO: 650193 - DNA, 15 bp, Homo sapiens
gtttaattaagtctc

SEQ ID NO: 650194 - DNA, 15 bp, Homo sapiens
tttaattaagtctca

SEQ ID NO: 650195 - DNA, 15 bp, Homo sapiens
ttaattaagtctcac

SEQ ID NO: 650196 - DNA, 15 bp, Homo sapiens
taattaagtctcacc

SEQ ID NO: 650197 - DNA, 15 bp, Homo sapiens
aattaagtctcacct

SEQ ID NO: 650198 - DNA, 15 bp, Homo sapiens
attaagtctcaccta

SEQ ID NO: 650199 - DNA, 15 bp, Homo sapiens
ttaagtctcacctat

SEQ ID NO: 650200 - DNA, 15 bp, Homo sapiens
taagtctcacctatt

SEQ ID NO: 650201 - DNA, 15 bp, Homo sapiens
aagtctcacctattt

SEQ ID NO: 650202 - DNA, 15 bp, Homo sapiens
agtctcacctattta

SEQ ID NO: 650203 - DNA, 15 bp, Homo sapiens
gtctcacctatttat

SEQ ID NO: 650204 - DNA, 15 bp, Homo sapiens
tctcacctatttatc

SEQ ID NO: 650205 - DNA, 15 bp, Homo sapiens
ctcacctatttatct

SEQ ID NO: 650206 - DNA, 15 bp, Homo sapiens
tcacctatttatctt

SEQ ID NO: 650207 - DNA, 15 bp, Homo sapiens
cacctatttatcttt

SEQ ID NO: 650208 - DNA, 15 bp, Homo sapiens
acctatttatctttg

SEQ ID NO: 650209 - DNA, 15 bp, Homo sapiens
cctatttatctttgt

SEQ ID NO: 650210 - DNA, 15 bp, Homo sapiens
ctatttatctttgtt

SEQ ID NO: 650211 - DNA, 15 bp, Homo sapiens
tatttatctttgttt

SEQ ID NO: 650212 - DNA, 15 bp, Homo sapiens
atttatctttgtttt

SEQ ID NO: 650213 - DNA, 15 bp, Homo sapiens
tttatctttgttttt

SEQ ID NO: 650214 - DNA, 15 bp, Homo sapiens
ttatctttgttttta

SEQ ID NO: 650215 - DNA, 15 bp, Homo sapiens
tatctttgtttttat

SEQ ID NO: 650216 - DNA, 15 bp, Homo sapiens
atctttgtttttatt

SEQ ID NO: 650217 - DNA, 15 bp, Homo sapiens
tctttgtttttattg

SEQ ID NO: 650218 - DNA, 15 bp, Homo sapiens
ctttgtttttattgc

SEQ ID NO: 650219 - DNA, 15 bp, Homo sapiens
tttgtttttattgca

SEQ ID NO: 650220 - DNA, 15 bp, Homo sapiens
ttgtttttattgcat

SEQ ID NO: 650221 - DNA, 15 bp, Homo sapiens
tgtttttattgcatt

SEQ ID NO: 650222 - DNA, 15 bp, Homo sapiens
gtttttattgcattt

SEQ ID NO: 650223 - DNA, 15 bp, Homo sapiens
tttttattgcatttg

SEQ ID NO: 650224 - DNA, 15 bp, Homo sapiens
ttttattgcatttgc

SEQ ID NO: 650225 - DNA, 15 bp, Homo sapiens
tttattgcatttgct

SEQ ID NO: 650226 - DNA, 15 bp, Homo sapiens
ttattgcatttgctt

SEQ ID NO: 650227 - DNA, 15 bp, Homo sapiens
tattgcatttgcttt

SEQ ID NO: 650228 - DNA, 15 bp, Homo sapiens
attgcatttgctttt

SEQ ID NO: 650229 - DNA, 15 bp, Homo sapiens
ttgcatttgcttttg

SEQ ID NO: 650230 - DNA, 15 bp, Homo sapiens
tgcatttgcttttgg

SEQ ID NO: 650231 - DNA, 15 bp, Homo sapiens
gcatttgcttttggg

SEQ ID NO: 650232 - DNA, 15 bp, Homo sapiens
catttgcttttgggt

SEQ ID NO: 650233 - DNA, 15 bp, Homo sapiens
atttgcttttgggtt

SEQ ID NO: 650234 - DNA, 15 bp, Homo sapiens
tttgcttttgggttc

SEQ ID NO: 650235 - DNA, 15 bp, Homo sapiens
ttgcttttgggttct

SEQ ID NO: 650236 - DNA, 15 bp, Homo sapiens
tgcttttgggttctt

SEQ ID NO: 650237 - DNA, 15 bp, Homo sapiens
gcttttgggttcttg

SEQ ID NO: 650238 - DNA, 15 bp, Homo sapiens
cttttgggttcttgg

SEQ ID NO: 650239 - DNA, 15 bp, Homo sapiens
ttttgggttcttggt

SEQ ID NO: 650240 - DNA, 15 bp, Homo sapiens
tttgggttcttggtc

SEQ ID NO: 650241 - DNA, 15 bp, Homo sapiens
ttgggttcttggtca

SEQ ID NO: 650242 - DNA, 15 bp, Homo sapiens
tgggttcttggtcat

SEQ ID NO: 650243 - DNA, 15 bp, Homo sapiens
gggttcttggtcatg

SEQ ID NO: 650244 - DNA, 15 bp, Homo sapiens
ggttcttggtcatga

SEQ ID NO: 650245 - DNA, 15 bp, Homo sapiens
gttcttggtcatgaa

SEQ ID NO: 650246 - DNA, 15 bp, Homo sapiens
ttcttggtcatgaaa

SEQ ID NO: 650247 - DNA, 15 bp, Homo sapiens
tcttggtcatgaaat

SEQ ID NO: 650248 - DNA, 15 bp, Homo sapiens
cttggtcatgaaatc

SEQ ID NO: 650249 - DNA, 15 bp, Homo sapiens
ttggtcatgaaatct

SEQ ID NO: 650250 - DNA, 15 bp, Homo sapiens
tggtcatgaaatctt

SEQ ID NO: 650251 - DNA, 15 bp, Homo sapiens
ggtcatgaaatcttt

SEQ ID NO: 650252 - DNA, 15 bp, Homo sapiens
gtcatgaaatctttg

SEQ ID NO: 650253 - DNA, 15 bp, Homo sapiens
tcatgaaatctttgc

SEQ ID NO: 650254 - DNA, 15 bp, Homo sapiens
catgaaatctttgcc

SEQ ID NO: 650255 - DNA, 15 bp, Homo sapiens
atgaaatctttgcct

SEQ ID NO: 650256 - DNA, 15 bp, Homo sapiens
tgaaatctttgccta

SEQ ID NO: 650257 - DNA, 15 bp, Homo sapiens
gaaatctttgcctag

SEQ ID NO: 650258 - DNA, 15 bp, Homo sapiens
aaatctttgcctagg

SEQ ID NO: 650259 - DNA, 15 bp, Homo sapiens
aatctttgcctaggc

SEQ ID NO: 650260 - DNA, 15 bp, Homo sapiens
atctttgcctaggcc

SEQ ID NO: 650261 - DNA, 15 bp, Homo sapiens
tctttgcctaggcca

SEQ ID NO: 650262 - DNA, 15 bp, Homo sapiens
ctttgcctaggccaa

SEQ ID NO: 650263 - DNA, 15 bp, Homo sapiens
tttgcctaggccaaa

SEQ ID NO: 650264 - DNA, 15 bp, Homo sapiens
ttgcctaggccaaag

SEQ ID NO: 650265 - DNA, 15 bp, Homo sapiens
tgcctaggccaaagt

SEQ ID NO: 650266 - DNA, 15 bp, Homo sapiens
gcctaggccaaagtc

SEQ ID NO: 650267 - DNA, 15 bp, Homo sapiens
cctaggccaaagtct

SEQ ID NO: 650268 - DNA, 15 bp, Homo sapiens
ctaggccaaagtcta

SEQ ID NO: 650269 - DNA, 15 bp, Homo sapiens
taggccaaagtctag

SEQ ID NO: 650270 - DNA, 15 bp, Homo sapiens
aggccaaagtctaga

SEQ ID NO: 650271 - DNA, 15 bp, Homo sapiens
ggccaaagtctagaa

SEQ ID NO: 650272 - DNA, 15 bp, Homo sapiens
gccaaagtctagaag

SEQ ID NO: 650273 - DNA, 15 bp, Homo sapiens
ccaaagtctagaagg

SEQ ID NO: 650274 - DNA, 15 bp, Homo sapiens
caaagtctagaaggg

SEQ ID NO: 650275 - DNA, 15 bp, Homo sapiens
aaagtctagaagggc

SEQ ID NO: 650276 - DNA, 15 bp, Homo sapiens
aagtctagaagggct

SEQ ID NO: 650277 - DNA, 15 bp, Homo sapiens
agtctagaagggctt

SEQ ID NO: 650278 - DNA, 15 bp, Homo sapiens
gtctagaagggcttt

SEQ ID NO: 650279 - DNA, 15 bp, Homo sapiens
tctagaagggctttt

SEQ ID NO: 650280 - DNA, 15 bp, Homo sapiens
ctagaagggcttttc

SEQ ID NO: 650281 - DNA, 15 bp, Homo sapiens
tagaagggcttttcc

SEQ ID NO: 650282 - DNA, 15 bp, Homo sapiens
agaagggcttttcca

SEQ ID NO: 650283 - DNA, 15 bp, Homo sapiens
gaagggcttttccaa

SEQ ID NO: 650284 - DNA, 15 bp, Homo sapiens
aagggcttttccaat

SEQ ID NO: 650285 - DNA, 15 bp, Homo sapiens
agggcttttccaatg

SEQ ID NO: 650286 - DNA, 15 bp, Homo sapiens
gggcttttccaatgt

SEQ ID NO: 650287 - DNA, 15 bp, Homo sapiens
ggcttttccaatgtt

SEQ ID NO: 650288 - DNA, 15 bp, Homo sapiens
gcttttccaatgtta

SEQ ID NO: 650289 - DNA, 15 bp, Homo sapiens
cttttccaatgttat

SEQ ID NO: 650290 - DNA, 15 bp, Homo sapiens
ttttccaatgttatc

SEQ ID NO: 650291 - DNA, 15 bp, Homo sapiens
tttccaatgttatct

SEQ ID NO: 650292 - DNA, 15 bp, Homo sapiens
ttccaatgttatctt

SEQ ID NO: 650293 - DNA, 15 bp, Homo sapiens
tccaatgttatcttc

SEQ ID NO: 650294 - DNA, 15 bp, Homo sapiens
ccaatgttatcttct

SEQ ID NO: 650295 - DNA, 15 bp, Homo sapiens
caatgttatcttcta

SEQ ID NO: 650296 - DNA, 15 bp, Homo sapiens
aatgttatcttctag

SEQ ID NO: 650297 - DNA, 15 bp, Homo sapiens
atgttatcttctaga

SEQ ID NO: 650298 - DNA, 15 bp, Homo sapiens
tgttatcttctagaa

SEQ ID NO: 650299 - DNA, 15 bp, Homo sapiens
gttatcttctagaaa

SEQ ID NO: 650300 - DNA, 15 bp, Homo sapiens
ttatcttctagaaat

SEQ ID NO: 650301 - DNA, 15 bp, Homo sapiens
tatcttctagaaatt

SEQ ID NO: 650302 - DNA, 15 bp, Homo sapiens
atcttctagaaattt

SEQ ID NO: 650303 - DNA, 15 bp, Homo sapiens
tcttctagaaatttt

SEQ ID NO: 650304 - DNA, 15 bp, Homo sapiens
cttctagaaatttta

SEQ ID NO: 650305 - DNA, 15 bp, Homo sapiens
ttctagaaattttat

SEQ ID NO: 650306 - DNA, 15 bp, Homo sapiens
tctagaaattttata

SEQ ID NO: 650307 - DNA, 15 bp, Homo sapiens
ctagaaattttatag

SEQ ID NO: 650308 - DNA, 15 bp, Homo sapiens
tagaaattttataga

SEQ ID NO: 650309 - DNA, 15 bp, Homo sapiens
agaaattttatagag

SEQ ID NO: 650310 - DNA, 15 bp, Homo sapiens
gaaattttatagaga

SEQ ID NO: 650311 - DNA, 15 bp, Homo sapiens
aaattttatagagaa

SEQ ID NO: 650312 - DNA, 15 bp, Homo sapiens
aattttatagagaaa

SEQ ID NO: 650313 - DNA, 15 bp, Homo sapiens
attttatagagaaac

SEQ ID NO: 650314 - DNA, 15 bp, Homo sapiens
ttttatagagaaaca

SEQ ID NO: 650315 - DNA, 15 bp, Homo sapiens
tttatagagaaacaa

SEQ ID NO: 650316 - DNA, 15 bp, Homo sapiens
ttatagagaaacaaa

SEQ ID NO: 650317 - DNA, 15 bp, Homo sapiens
tatagagaaacaaat

SEQ ID NO: 650318 - DNA, 15 bp, Homo sapiens
atagagaaacaaata

SEQ ID NO: 650319 - DNA, 15 bp, Homo sapiens
tagagaaacaaataa

SEQ ID NO: 650320 - DNA, 15 bp, Homo sapiens
agagaaacaaataat

SEQ ID NO: 650321 - DNA, 15 bp, Homo sapiens
gagaaacaaataata

SEQ ID NO: 650322 - DNA, 15 bp, Homo sapiens
agaaacaaataatac

SEQ ID NO: 650323 - DNA, 15 bp, Homo sapiens
gaaacaaataatact

SEQ ID NO: 650324 - DNA, 15 bp, Homo sapiens
aaacaaataatactt

SEQ ID NO: 650325 - DNA, 15 bp, Homo sapiens
aacaaataatactta

SEQ ID NO: 650326 - DNA, 15 bp, Homo sapiens
acaaataatacttat

SEQ ID NO: 650327 - DNA, 15 bp, Homo sapiens
caaataatacttata

SEQ ID NO: 650328 - DNA, 15 bp, Homo sapiens
aaataatacttatat

SEQ ID NO: 650329 - DNA, 15 bp, Homo sapiens
aataatacttatata

SEQ ID NO: 650330 - DNA, 15 bp, Homo sapiens
ataatacttatatat

SEQ ID NO: 650331 - DNA, 15 bp, Homo sapiens
taatacttatatatt

SEQ ID NO: 650332 - DNA, 15 bp, Homo sapiens
aatacttatatattt

SEQ ID NO: 650333 - DNA, 15 bp, Homo sapiens
atacttatatatttt

SEQ ID NO: 650334 - DNA, 15 bp, Homo sapiens
tacttatatatttta

SEQ ID NO: 650335 - DNA, 15 bp, Homo sapiens
acttatatattttat

SEQ ID NO: 650336 - DNA, 15 bp, Homo sapiens
cttatatattttata

SEQ ID NO: 650337 - DNA, 15 bp, Homo sapiens
ttatatattttatag

SEQ ID NO: 650338 - DNA, 15 bp, Homo sapiens
tatatattttatagt

SEQ ID NO: 650339 - DNA, 15 bp, Homo sapiens
atatattttatagta

SEQ ID NO: 650340 - DNA, 15 bp, Homo sapiens
tatattttatagtaa

SEQ ID NO: 650341 - DNA, 15 bp, Homo sapiens
atattttatagtaaa

SEQ ID NO: 650342 - DNA, 15 bp, Homo sapiens
tattttatagtaaag

SEQ ID NO: 650343 - DNA, 15 bp, Homo sapiens
attttatagtaaagg

SEQ ID NO: 650344 - DNA, 15 bp, Homo sapiens
ttttatagtaaaggg

SEQ ID NO: 650345 - DNA, 15 bp, Homo sapiens
tttatagtaaaggga

SEQ ID NO: 650346 - DNA, 15 bp, Homo sapiens
ttatagtaaagggat

SEQ ID NO: 650347 - DNA, 15 bp, Homo sapiens
tatagtaaagggatg

SEQ ID NO: 650348 - DNA, 15 bp, Homo sapiens
atagtaaagggatgc

SEQ ID NO: 650349 - DNA, 15 bp, Homo sapiens
tagtaaagggatgct

SEQ ID NO: 650350 - DNA, 15 bp, Homo sapiens
agtaaagggatgcta

SEQ ID NO: 650351 - DNA, 15 bp, Homo sapiens
gtaaagggatgctaa

SEQ ID NO: 650352 - DNA, 15 bp, Homo sapiens
taaagggatgctaaa

SEQ ID NO: 650353 - DNA, 15 bp, Homo sapiens
aaagggatgctaaac

SEQ ID NO: 650354 - DNA, 15 bp, Homo sapiens
aagggatgctaaaca

SEQ ID NO: 650355 - DNA, 15 bp, Homo sapiens
agggatgctaaacat

SEQ ID NO: 650356 - DNA, 15 bp, Homo sapiens
gggatgctaaacatt

SEQ ID NO: 650357 - DNA, 15 bp, Homo sapiens
ggatgctaaacattt

SEQ ID NO: 650358 - DNA, 15 bp, Homo sapiens
gatgctaaacatttg

SEQ ID NO: 650359 - DNA, 15 bp, Homo sapiens
atgctaaacatttga

SEQ ID NO: 650360 - DNA, 15 bp, Homo sapiens
tgctaaacatttgaa

SEQ ID NO: 650361 - DNA, 15 bp, Homo sapiens
gctaaacatttgaat

SEQ ID NO: 650362 - DNA, 15 bp, Homo sapiens
ctaaacatttgaatt

SEQ ID NO: 650363 - DNA, 15 bp, Homo sapiens
taaacatttgaattg

SEQ ID NO: 650364 - DNA, 15 bp, Homo sapiens
aaacatttgaattga

SEQ ID NO: 650365 - DNA, 15 bp, Homo sapiens
aacatttgaattgat

SEQ ID NO: 650366 - DNA, 15 bp, Homo sapiens
acatttgaattgata

SEQ ID NO: 650367 - DNA, 15 bp, Homo sapiens
catttgaattgataa

SEQ ID NO: 650368 - DNA, 15 bp, Homo sapiens
atttgaattgataag

SEQ ID NO: 650369 - DNA, 15 bp, Homo sapiens
tttgaattgataaga

SEQ ID NO: 650370 - DNA, 15 bp, Homo sapiens
ttgaattgataagac

SEQ ID NO: 650371 - DNA, 15 bp, Homo sapiens
tgaattgataagacc

SEQ ID NO: 650372 - DNA, 15 bp, Homo sapiens
gaattgataagacca

SEQ ID NO: 650373 - DNA, 15 bp, Homo sapiens
aattgataagaccag

SEQ ID NO: 650374 - DNA, 15 bp, Homo sapiens
attgataagaccagc

SEQ ID NO: 650375 - DNA, 15 bp, Homo sapiens
ttgataagaccagca

SEQ ID NO: 650376 - DNA, 15 bp, Homo sapiens
tgataagaccagcaa

SEQ ID NO: 650377 - DNA, 15 bp, Homo sapiens
gataagaccagcaat

SEQ ID NO: 650378 - DNA, 15 bp, Homo sapiens
ataagaccagcaatt

SEQ ID NO: 650379 - DNA, 15 bp, Homo sapiens
taagaccagcaattt

SEQ ID NO: 650380 - DNA, 15 bp, Homo sapiens
aagaccagcaattta

SEQ ID NO: 650381 - DNA, 15 bp, Homo sapiens
agaccagcaatttaa

SEQ ID NO: 650382 - DNA, 15 bp, Homo sapiens
gaccagcaatttaat

SEQ ID NO: 650383 - DNA, 15 bp, Homo sapiens
accagcaatttaata

SEQ ID NO: 650384 - DNA, 15 bp, Homo sapiens
ccagcaatttaataa

SEQ ID NO: 650385 - DNA, 15 bp, Homo sapiens
cagcaatttaataat

SEQ ID NO: 650386 - DNA, 15 bp, Homo sapiens
agcaatttaataatt

SEQ ID NO: 650387 - DNA, 15 bp, Homo sapiens
gcaatttaataattt

SEQ ID NO: 650388 - DNA, 15 bp, Homo sapiens
caatttaataatttc

SEQ ID NO: 650389 - DNA, 15 bp, Homo sapiens
aatttaataatttca

SEQ ID NO: 650390 - DNA, 15 bp, Homo sapiens
atttaataatttcaa

SEQ ID NO: 650391 - DNA, 15 bp, Homo sapiens
tttaataatttcaaa

SEQ ID NO: 650392 - DNA, 15 bp, Homo sapiens
ttaataatttcaaat

SEQ ID NO: 650393 - DNA, 15 bp, Homo sapiens
taataatttcaaatt

SEQ ID NO: 650394 - DNA, 15 bp, Homo sapiens
aataatttcaaatta

SEQ ID NO: 650395 - DNA, 15 bp, Homo sapiens
ataatttcaaattaa

SEQ ID NO: 650396 - DNA, 15 bp, Homo sapiens
taatttcaaattaac

SEQ ID NO: 650397 - DNA, 15 bp, Homo sapiens
aatttcaaattaact

SEQ ID NO: 650398 - DNA, 15 bp, Homo sapiens
atttcaaattaactg

SEQ ID NO: 650399 - DNA, 15 bp, Homo sapiens
tttcaaattaactga

SEQ ID NO: 650400 - DNA, 15 bp, Homo sapiens
ttcaaattaactgaa

SEQ ID NO: 650401 - DNA, 15 bp, Homo sapiens
tcaaattaactgaac

SEQ ID NO: 650402 - DNA, 15 bp, Homo sapiens
caaattaactgaaca

SEQ ID NO: 650403 - DNA, 15 bp, Homo sapiens
aaattaactgaacac

SEQ ID NO: 650404 - DNA, 15 bp, Homo sapiens
aattaactgaacact

SEQ ID NO: 650405 - DNA, 15 bp, Homo sapiens
attaactgaacactt

SEQ ID NO: 650406 - DNA, 15 bp, Homo sapiens
ttaactgaacacttt

SEQ ID NO: 650407 - DNA, 15 bp, Homo sapiens
taactgaacacttta

SEQ ID NO: 650408 - DNA, 15 bp, Homo sapiens
aactgaacactttat

SEQ ID NO: 650409 - DNA, 15 bp, Homo sapiens
actgaacactttata

SEQ ID NO: 650410 - DNA, 15 bp, Homo sapiens
ctgaacactttatag

SEQ ID NO: 650411 - DNA, 15 bp, Homo sapiens
tgaacactttatagc

SEQ ID NO: 650412 - DNA, 15 bp, Homo sapiens
gaacactttatagct

SEQ ID NO: 650413 - DNA, 15 bp, Homo sapiens
aacactttatagcta

SEQ ID NO: 650414 - DNA, 15 bp, Homo sapiens
acactttatagctat

SEQ ID NO: 650415 - DNA, 15 bp, Homo sapiens
cactttatagctatg

SEQ ID NO: 650416 - DNA, 15 bp, Homo sapiens
actttatagctatga

SEQ ID NO: 650417 - DNA, 15 bp, Homo sapiens
ctttatagctatgaa

SEQ ID NO: 650418 - DNA, 15 bp, Homo sapiens
tttatagctatgaaa

SEQ ID NO: 650419 - DNA, 15 bp, Homo sapiens
ttatagctatgaaat

SEQ ID NO: 650420 - DNA, 15 bp, Homo sapiens
tatagctatgaaatg

SEQ ID NO: 650421 - DNA, 15 bp, Homo sapiens
atagctatgaaatga

SEQ ID NO: 650422 - DNA, 15 bp, Homo sapiens
tagctatgaaatgat

SEQ ID NO: 650423 - DNA, 15 bp, Homo sapiens
agctatgaaatgatg

SEQ ID NO: 650424 - DNA, 15 bp, Homo sapiens
gctatgaaatgatga

SEQ ID NO: 650425 - DNA, 15 bp, Homo sapiens
ctatgaaatgatgat

SEQ ID NO: 650426 - DNA, 15 bp, Homo sapiens
tatgaaatgatgatt

SEQ ID NO: 650427 - DNA, 15 bp, Homo sapiens
atgaaatgatgattt

SEQ ID NO: 650428 - DNA, 15 bp, Homo sapiens
tgaaatgatgatttt

SEQ ID NO: 650429 - DNA, 15 bp, Homo sapiens
gaaatgatgattttc

SEQ ID NO: 650430 - DNA, 15 bp, Homo sapiens
aaatgatgattttct

SEQ ID NO: 650431 - DNA, 15 bp, Homo sapiens
aatgatgattttctg

SEQ ID NO: 650432 - DNA, 15 bp, Homo sapiens
atgatgattttctga

SEQ ID NO: 650433 - DNA, 15 bp, Homo sapiens
tgatgattttctgac

SEQ ID NO: 650434 - DNA, 15 bp, Homo sapiens
gatgattttctgact

SEQ ID NO: 650435 - DNA, 15 bp, Homo sapiens
atgattttctgactg

SEQ ID NO: 650436 - DNA, 15 bp, Homo sapiens
tgattttctgactga

SEQ ID NO: 650437 - DNA, 15 bp, Homo sapiens
gattttctgactgag

SEQ ID NO: 650438 - DNA, 15 bp, Homo sapiens
attttctgactgagt

SEQ ID NO: 650439 - DNA, 15 bp, Homo sapiens
ttttctgactgagtc

SEQ ID NO: 650440 - DNA, 15 bp, Homo sapiens
tttctgactgagtcc

SEQ ID NO: 650441 - DNA, 15 bp, Homo sapiens
ttctgactgagtcca

SEQ ID NO: 650442 - DNA, 15 bp, Homo sapiens
tctgactgagtccaa

SEQ ID NO: 650443 - DNA, 15 bp, Homo sapiens
ctgactgagtccaaa

SEQ ID NO: 650444 - DNA, 15 bp, Homo sapiens
tgactgagtccaaaa

SEQ ID NO: 650445 - DNA, 15 bp, Homo sapiens
gactgagtccaaaaa

SEQ ID NO: 650446 - DNA, 15 bp, Homo sapiens
actgagtccaaaaag

SEQ ID NO: 650447 - DNA, 15 bp, Homo sapiens
ctgagtccaaaaaga

SEQ ID NO: 650448 - DNA, 15 bp, Homo sapiens
tgagtccaaaaagaa

SEQ ID NO: 650449 - DNA, 15 bp, Homo sapiens
gagtccaaaaagaaa

SEQ ID NO: 650450 - DNA, 15 bp, Homo sapiens
agtccaaaaagaaaa

SEQ ID NO: 650451 - DNA, 15 bp, Homo sapiens
gtccaaaaagaaaat

SEQ ID NO: 650452 - DNA, 15 bp, Homo sapiens
tccaaaaagaaaata

SEQ ID NO: 650453 - DNA, 15 bp, Homo sapiens
ccaaaaagaaaatat

SEQ ID NO: 650454 - DNA, 15 bp, Homo sapiens
caaaaagaaaatatg

SEQ ID NO: 650455 - DNA, 15 bp, Homo sapiens
aaaaagaaaatatgc

SEQ ID NO: 650456 - DNA, 15 bp, Homo sapiens
aaaagaaaatatgcc

SEQ ID NO: 650457 - DNA, 15 bp, Homo sapiens
aaagaaaatatgcca

SEQ ID NO: 650458 - DNA, 15 bp, Homo sapiens
aagaaaatatgccat

SEQ ID NO: 650459 - DNA, 15 bp, Homo sapiens
agaaaatatgccatg

SEQ ID NO: 650460 - DNA, 15 bp, Homo sapiens
gaaaatatgccatga

SEQ ID NO: 650461 - DNA, 15 bp, Homo sapiens
aaaatatgccatgaa

SEQ ID NO: 650462 - DNA, 15 bp, Homo sapiens
aaatatgccatgaaa

SEQ ID NO: 650463 - DNA, 15 bp, Homo sapiens
aatatgccatgaaaa

SEQ ID NO: 650464 - DNA, 15 bp, Homo sapiens
atatgccatgaaaat

SEQ ID NO: 650465 - DNA, 15 bp, Homo sapiens
tatgccatgaaaatg

SEQ ID NO: 650466 - DNA, 15 bp, Homo sapiens
atgccatgaaaatgg

SEQ ID NO: 650467 - DNA, 15 bp, Homo sapiens
tgccatgaaaatgga

SEQ ID NO: 650468 - DNA, 15 bp, Homo sapiens
gccatgaaaatggaa

SEQ ID NO: 650469 - DNA, 15 bp, Homo sapiens
ccatgaaaatggaaa

SEQ ID NO: 650470 - DNA, 15 bp, Homo sapiens
catgaaaatggaaac

SEQ ID NO: 650471 - DNA, 15 bp, Homo sapiens
atgaaaatggaaact

SEQ ID NO: 650472 - DNA, 15 bp, Homo sapiens
tgaaaatggaaactc

SEQ ID NO: 650473 - DNA, 15 bp, Homo sapiens
gaaaatggaaactca

SEQ ID NO: 650474 - DNA, 15 bp, Homo sapiens
aaaatggaaactcag

SEQ ID NO: 650475 - DNA, 15 bp, Homo sapiens
aaatggaaactcagt

SEQ ID NO: 650476 - DNA, 15 bp, Homo sapiens
aatggaaactcagtg

SEQ ID NO: 650477 - DNA, 15 bp, Homo sapiens
atggaaactcagtga

SEQ ID NO: 650478 - DNA, 15 bp, Homo sapiens
tggaaactcagtgat

SEQ ID NO: 650479 - DNA, 15 bp, Homo sapiens
ggaaactcagtgatc

SEQ ID NO: 650480 - DNA, 15 bp, Homo sapiens
gaaactcagtgatct

SEQ ID NO: 650481 - DNA, 15 bp, Homo sapiens
aaactcagtgatctc

SEQ ID NO: 650482 - DNA, 15 bp, Homo sapiens
aactcagtgatctct

SEQ ID NO: 650483 - DNA, 15 bp, Homo sapiens
actcagtgatctctc

SEQ ID NO: 650484 - DNA, 15 bp, Homo sapiens
ctcagtgatctctca

SEQ ID NO: 650485 - DNA, 15 bp, Homo sapiens
tcagtgatctctcag

SEQ ID NO: 650486 - DNA, 15 bp, Homo sapiens
cagtgatctctcagc

SEQ ID NO: 650487 - DNA, 15 bp, Homo sapiens
agtgatctctcagct

SEQ ID NO: 650488 - DNA, 15 bp, Homo sapiens
gtgatctctcagcta

SEQ ID NO: 650489 - DNA, 15 bp, Homo sapiens
tgatctctcagctaa

SEQ ID NO: 650490 - DNA, 15 bp, Homo sapiens
gatctctcagctaaa

SEQ ID NO: 650491 - DNA, 15 bp, Homo sapiens
atctctcagctaaaa

SEQ ID NO: 650492 - DNA, 15 bp, Homo sapiens
tctctcagctaaaaa

SEQ ID NO: 650493 - DNA, 15 bp, Homo sapiens
ctctcagctaaaaat

SEQ ID NO: 650494 - DNA, 15 bp, Homo sapiens
tctcagctaaaaatt

SEQ ID NO: 650495 - DNA, 15 bp, Homo sapiens
ctcagctaaaaatta

SEQ ID NO: 650496 - DNA, 15 bp, Homo sapiens
tcagctaaaaattaa

SEQ ID NO: 650497 - DNA, 15 bp, Homo sapiens
cagctaaaaattaac

SEQ ID NO: 650498 - DNA, 15 bp, Homo sapiens
agctaaaaattaaca

SEQ ID NO: 650499 - DNA, 15 bp, Homo sapiens
gctaaaaattaacag

SEQ ID NO: 650500 - DNA, 15 bp, Homo sapiens
ctaaaaattaacagc

SEQ ID NO: 650501 - DNA, 15 bp, Homo sapiens
taaaaattaacagct

SEQ ID NO: 650502 - DNA, 15 bp, Homo sapiens
aaaaattaacagctc

SEQ ID NO: 650503 - DNA, 15 bp, Homo sapiens
aaaattaacagctcg

SEQ ID NO: 650504 - DNA, 15 bp, Homo sapiens
aaattaacagctcgt

SEQ ID NO: 650505 - DNA, 15 bp, Homo sapiens
aattaacagctcgta

SEQ ID NO: 650506 - DNA, 15 bp, Homo sapiens
attaacagctcgtat

SEQ ID NO: 650507 - DNA, 15 bp, Homo sapiens
ttaacagctcgtata

SEQ ID NO: 650508 - DNA, 15 bp, Homo sapiens
taacagctcgtataa

SEQ ID NO: 650509 - DNA, 15 bp, Homo sapiens
aacagctcgtataac

SEQ ID NO: 650510 - DNA, 15 bp, Homo sapiens
acagctcgtataact

SEQ ID NO: 650511 - DNA, 15 bp, Homo sapiens
cagctcgtataactg

SEQ ID NO: 650512 - DNA, 15 bp, Homo sapiens
agctcgtataactga

SEQ ID NO: 650513 - DNA, 15 bp, Homo sapiens
gctcgtataactgag

SEQ ID NO: 650514 - DNA, 15 bp, Homo sapiens
ctcgtataactgagc

SEQ ID NO: 650515 - DNA, 15 bp, Homo sapiens
tcgtataactgagct

SEQ ID NO: 650516 - DNA, 15 bp, Homo sapiens
cgtataactgagctt

SEQ ID NO: 650517 - DNA, 15 bp, Homo sapiens
gtataactgagcttt

SEQ ID NO: 650518 - DNA, 15 bp, Homo sapiens
tataactgagcttta

SEQ ID NO: 650519 - DNA, 15 bp, Homo sapiens
ataactgagctttat

SEQ ID NO: 650520 - DNA, 15 bp, Homo sapiens
taactgagctttatg

SEQ ID NO: 650521 - DNA, 15 bp, Homo sapiens
aactgagctttatga

SEQ ID NO: 650522 - DNA, 15 bp, Homo sapiens
actgagctttatgat

SEQ ID NO: 650523 - DNA, 15 bp, Homo sapiens
ctgagctttatgata

SEQ ID NO: 650524 - DNA, 15 bp, Homo sapiens
tgagctttatgatag

SEQ ID NO: 650525 - DNA, 15 bp, Homo sapiens
gagctttatgatagt

SEQ ID NO: 650526 - DNA, 15 bp, Homo sapiens
agctttatgatagtc

SEQ ID NO: 650527 - DNA, 15 bp, Homo sapiens
gctttatgatagtcc

SEQ ID NO: 650528 - DNA, 15 bp, Homo sapiens
ctttatgatagtcca

SEQ ID NO: 650529 - DNA, 15 bp, Homo sapiens
tttatgatagtccaa

SEQ ID NO: 650530 - DNA, 15 bp, Homo sapiens
ttatgatagtccaag

SEQ ID NO: 650531 - DNA, 15 bp, Homo sapiens
tatgatagtccaaga

SEQ ID NO: 650532 - DNA, 15 bp, Homo sapiens
atgatagtccaagat

SEQ ID NO: 650533 - DNA, 15 bp, Homo sapiens
tgatagtccaagata
